United States Patent Application Publication US 2020/0040061 A1 - sequence listing, part 3

SEQ ID NO: 23893 - DNA, 20 bp, Artificial Sequence
  Description of Artificial Sequence: Synthetic oligonucleotide
  Target: SCNA; (-) strand; PAM type: NRG; PAM sequence: AGG
taagctgaagcaaatctcaa

SEQ ID NO: 23894 - DNA, 20 bp, Artificial Sequence
  Description of Artificial Sequence: Synthetic oligonucleotide
  Target: SCNA; (-) strand; PAM type: NRG; PAM sequence: AAG
ttaagctgaagcaaatctca

SEQ ID NO: 23895 - DNA, 20 bp, Artificial Sequence
  Description of Artificial Sequence: Synthetic oligonucleotide
  Target: SCNA; (-) strand; PAM type: NRG; PAM sequence: AAG
aaagtatctctgttaagctg

SEQ ID NO: 23896 - DNA, 20 bp, Artificial Sequence
  Description of Artificial Sequence: Synthetic oligonucleotide
  Target: SCNA; (-) strand; PAM type: NRG; PAM sequence: AAG
agtttaaaagtatctctgtt

SEQ ID NO: 23897 - DNA, 20 bp, Artificial Sequence
  Description of Artificial Sequence: Synthetic oligonucleotide
  Target: SCNA; (-) strand; PAM type: NRG; PAM sequence: AAG
tttaaattaacaaagtttaa

SEQ ID NO: 23898 - DNA, 20 bp, Artificial Sequence
  Description of Artificial Sequence: Synthetic oligonucleotide
  Target: SCNA; (-) strand; PAM type: NRG; PAM sequence: AAG
gggaaacatttaaattaaca

SEQ ID NO: 23899 - DNA, 20 bp, Artificial Sequence
  Description of Artificial Sequence: Synthetic oligonucleotide
  Target: SCNA; (-) strand; PAM type: NRG; PAM sequence: GGG
ttctctgctcaaataatttt

SEQ ID NO: 23900 - DNA, 20 bp, Artificial Sequence
  Description of Artificial Sequence: Synthetic oligonucleotide
  Target: SCNA; (-) strand; PAM type: NRG; PAM sequence: TGG
attctctgctcaaataattt

SEQ ID NO: 23901 - DNA, 20 bp, Artificial Sequence
  Description of Artificial Sequence: Synthetic oligonucleotide
  Target: SCNA; (-) strand; PAM type: NRG; PAM sequence: TGG
tgcacatggtataattagaa

SEQ ID NO: 23902 - DNA, 20 bp, Artificial Sequence
  Description of Artificial Sequence: Synthetic oligonucleotide
  Target: SCNA; (-) strand; PAM type: NRG; PAM sequence: TAG
tattatgcacatggtataat

SEQ ID NO: 23903 - DNA, 20 bp, Artificial Sequence
  Description of Artificial Sequence: Synthetic oligonucleotide
  Target: SCNA; (-) strand; PAM type: NRG; PAM sequence: TGG
tccattgagtattatgcaca

SEQ ID NO: 23904 - DNA, 20 bp, Artificial Sequence
  Description of Artificial Sequence: Synthetic oligonucleotide
  Target: SCNA; (-) strand; PAM type: NRG; PAM sequence: GAG
caaagtcatgtgattccatt

SEQ ID NO: 23905 - DNA, 20 bp, Artificial Sequence
  Description of Artificial Sequence: Synthetic oligonucleotide
  Target: SCNA; (-) strand; PAM type: NRG; PAM sequence: AAG
gttttcctctgatttcccca

SEQ ID NO: 23906 - DNA, 20 bp, Artificial Sequence
  Description of Artificial Sequence: Synthetic oligonucleotide
  Target: SCNA; (-) strand; PAM type: NRG; PAM sequence: TAG
aaataaaatgtaatcactat

SEQ ID NO: 23907 - DNA, 20 bp, Artificial Sequence
  Description of Artificial Sequence: Synthetic oligonucleotide
  Target: SCNA; (-) strand; PAM type: NRG; PAM sequence: TAG
actgaacatgccgttttatt

SEQ ID NO: 23908 - DNA, 20 bp, Artificial Sequence
  Description of Artificial Sequence: Synthetic oligonucleotide
  Target: SCNA; (-) strand; PAM type: NRG; PAM sequence: AAG
tgtataacacaaagagggaa

SEQ ID NO: 23909 - DNA, 20 bp, Artificial Sequence
  Description of Artificial Sequence: Synthetic oligonucleotide
  Target: SCNA; (-) strand; PAM type: NRG; PAM sequence: GGG
taaattgtataacacaaaga

SEQ ID NO: 23910 - DNA, 20 bp, Artificial Sequence
  Description of Artificial Sequence: Synthetic oligonucleotide
  Target: SCNA; (-) strand; PAM type: NRG; PAM sequence: AGG
gtaaattgtataacacaaag

SEQ ID NO: 23911 - DNA, 20 bp, Artificial Sequence
  Description of Artificial Sequence: Synthetic oligonucleotide
  Target: SCNA; (-) strand; PAM type: NRG; PAM sequence: GAG
agtaaattgtataacacaaa

SEQ ID NO: 23912 - DNA, 20 bp, Artificial Sequence
  Description of Artificial Sequence: Synthetic oligonucleotide
  Target: SCNA; (-) strand; PAM type: NRG; PAM sequence: AAG
taagtaaattgtataacaca

SEQ ID NO: 23913 - DNA, 20 bp, Artificial Sequence
  Description of Artificial Sequence: Synthetic oligonucleotide
  Target: SCNA; (-) strand; PAM type: NRG; PAM sequence: AAG
gtagtttgatgatattaagt

SEQ ID NO: 23914 - DNA, 20 bp, Artificial Sequence
  Description of Artificial Sequence: Synthetic oligonucleotide
  Target: SCNA; (-) strand; PAM type: NRG; PAM sequence: AAG
ctttgtagtttgatgatatt

SEQ ID NO: 23915 - DNA, 20 bp, Artificial Sequence
  Description of Artificial Sequence: Synthetic oligonucleotide
  Target: SCNA; (-) strand; PAM type: NRG; PAM sequence: TAG
atcttttccatattcctttg

SEQ ID NO: 23916 - DNA, 20 bp, Artificial Sequence
  Description of Artificial Sequence: Synthetic oligonucleotide
  Target: SCNA; (-) strand; PAM type: NRG; PAM sequence: CAG
agtgtgtcgatacatgatca

SEQ ID NO: 23917 - DNA, 20 bp, Artificial Sequence
  Description of Artificial Sequence: Synthetic oligonucleotide
  Target: SCNA; (-) strand; PAM type: NRG; PAM sequence: AAG
gaacttacattttctctaag

SEQ ID NO: 23918 - DNA, 20 bp, Artificial Sequence
  Description of Artificial Sequence: Synthetic oligonucleotide
  Target: SCNA; (-) strand; PAM type: NRG; PAM sequence: AAG
caagaacttacattttctct

SEQ ID NO: 23919 - DNA, 20 bp, Artificial Sequence
  Description of Artificial Sequence: Synthetic oligonucleotide
  Target: SCNA; (-) strand; PAM type: NRG; PAM sequence: AAG
tacagttgtaatattttgcc

SEQ ID NO: 23920 - DNA, 20 bp, Artificial Sequence
  Description of Artificial Sequence: Synthetic oligonucleotide
  Target: SCNA; (-) strand; PAM type: NRG; PAM sequence: CAG
aaaaattgtagtgcattata

SEQ ID NO: 23921 - DNA, 20 bp, Artificial Sequence
  Description of Artificial Sequence: Synthetic oligonucleotide
  Target: SCNA; (-) strand; PAM type: NRG; PAM sequence: TAG
caaaagatttttaaaaattg

SEQ ID NO: 23922 - DNA, 20 bp, Artificial Sequence
  Description of Artificial Sequence: Synthetic oligonucleotide
  Target: SCNA; (-) strand; PAM type: NRG; PAM sequence: AAG
aaataagataatgcagacaa

SEQ ID NO: 23923 - DNA, 20 bp, Artificial Sequence
  Description of Artificial Sequence: Synthetic oligonucleotide
  Target: SCNA; (-) strand; PAM type: NRG; PAM sequence: CAG
gtgaatgaaataagataatg

SEQ ID NO: 23924 - DNA, 20 bp, Artificial Sequence
  Description of Artificial Sequence: Synthetic oligonucleotide
  Target: SCNA; (-) strand; PAM type: NRG; PAM sequence: AAG
ggttggagtgtgaatgaaat

SEQ ID NO: 23925 - DNA, 20 bp, Artificial Sequence
  Description of Artificial Sequence: Synthetic oligonucleotide
  Target: SCNA; (-) strand; PAM type: NRG; PAM sequence: GAG
cagccaactgcccagggttg

SEQ ID NO: 23926 - DNA, 20 bp, Artificial Sequence
  Description of Artificial Sequence: Synthetic oligonucleotide
  Target: SCNA; (-) strand; PAM type: NRG; PAM sequence: TGG
gccagccaactgcccagggt

SEQ ID NO: 23927 - DNA, 20 bp, Artificial Sequence
  Description of Artificial Sequence: Synthetic oligonucleotide
  Target: SCNA; (-) strand; PAM type: NRG; PAM sequence: GGG
actggccagccaactgccca

SEQ ID NO: 23928 - DNA, 20 bp, Artificial Sequence
  Description of Artificial Sequence: Synthetic oligonucleotide
  Target: SCNA; (-) strand; PAM type: NRG; PAM sequence: AGG
aactggccagccaactgccc

SEQ ID NO: 23929 - DNA, 20 bp, Artificial Sequence
  Description of Artificial Sequence: Synthetic oligonucleotide
  Target: SCNA; (-) strand; PAM type: NRG; PAM sequence: CAG
taactggccagccaactgcc

SEQ ID NO: 23930 - DNA, 20 bp, Artificial Sequence
  Description of Artificial Sequence: Synthetic oligonucleotide
  Target: SCNA; (-) strand; PAM type: NRG; PAM sequence: CAG
gctactcatctgtaactggc

SEQ ID NO: 23931 - DNA, 20 bp, Artificial Sequence
  Description of Artificial Sequence: Synthetic oligonucleotide
  Target: SCNA; (-) strand; PAM type: NRG; PAM sequence: TGG
catagctactcatctgtaac

SEQ ID NO: 23932 - DNA, 20 bp, Artificial Sequence
  Description of Artificial Sequence: Synthetic oligonucleotide
  Target: SCNA; (-) strand; PAM type: NRG; PAM sequence: TAG
catgtaacctttctaaacca

SEQ ID NO: 23933 - DNA, 20 bp, Artificial Sequence
  Description of Artificial Sequence: Synthetic oligonucleotide
  Target: SCNA; (-) strand; PAM type: NRG; PAM sequence: TGG
attatgcgttgccagatccc

SEQ ID NO: 23934 - DNA, 20 bp, Artificial Sequence
  Description of Artificial Sequence: Synthetic oligonucleotide
  Target: SCNA; (-) strand; PAM type: NRG; PAM sequence: CAG
tgtattcaattatgcgttgc

SEQ ID NO: 23935 - DNA, 20 bp, Artificial Sequence
  Description of Artificial Sequence: Synthetic oligonucleotide
  Target: SCNA; (-) strand; PAM type: NRG; PAM sequence: AAG
tgtttaatagcttgaatctt

SEQ ID NO: 23936 - DNA, 20 bp, Artificial Sequence
  Description of Artificial Sequence: Synthetic oligonucleotide
  Target: SCNA; (-) strand; PAM type: NRG; PAM sequence: TAG
tgctttcagtctgtgtttaa

SEQ ID NO: 23937 - DNA, 20 bp, Artificial Sequence
  Description of Artificial Sequence: Synthetic oligonucleotide
  Target: SCNA; (-) strand; PAM type: NRG; PAM sequence: CAG
aaatgagttcaaaatgcttt

SEQ ID NO: 23938 - DNA, 20 bp, Artificial Sequence
  Description of Artificial Sequence: Synthetic oligonucleotide
  Target: SCNA; (-) strand; PAM type: NRG; PAM sequence: GAG
ataaaaatgttgaattaaat

SEQ ID NO: 23939 - DNA, 20 bp, Artificial Sequence
  Description of Artificial Sequence: Synthetic oligonucleotide
  Target: SCNA; (-) strand; PAM type: NRG; PAM sequence: GAG
catctcccctctctaagcat

SEQ ID NO: 23940 - DNA, 20 bp, Artificial Sequence
  Description of Artificial Sequence: Synthetic oligonucleotide
  Target: SCNA; (-) strand; PAM type: NRG; PAM sequence: AAG
tgatgtcatctcccctctct

SEQ ID NO: 23941 - DNA, 20 bp, Artificial Sequence
  Description of Artificial Sequence: Synthetic oligonucleotide
  Target: SCNA; (-) strand; PAM type: NRG; PAM sequence: TGG
tcttctctctctcactctac

SEQ ID NO: 23942 - DNA, 20 bp, Artificial Sequence
  Description of Artificial Sequence: Synthetic oligonucleotide
  Target: SCNA; (-) strand; PAM type: NRG; PAM sequence: TGG
gaattcagggaacagagagt

SEQ ID NO: 23943 - DNA, 20 bp, Artificial Sequence
  Description of Artificial Sequence: Synthetic oligonucleotide
  Target: SCNA; (-) strand; PAM type: NRG; PAM sequence: GAG
gcttgaattcagggaacaga

SEQ ID NO: 23944 - DNA, 20 bp, Artificial Sequence
  Description of Artificial Sequence: Synthetic oligonucleotide
  Target: SCNA; (-) strand; PAM type: NRG; PAM sequence: GAG
gggcttgaattcagggaaca

SEQ ID NO: 23945 - DNA, 20 bp, Artificial Sequence
  Description of Artificial Sequence: Synthetic oligonucleotide
  Target: SCNA; (-) strand; PAM type: NRG; PAM sequence: CAG
atgggcttgaattcagggaa

SEQ ID NO: 23946 - DNA, 20 bp, Artificial Sequence
  Description of Artificial Sequence: Synthetic oligonucleotide
  Target: SCNA; (-) strand; PAM type: NRG; PAM sequence: GGG
agggcatgggcttgaattca

SEQ ID NO: 23947 - DNA, 20 bp, Artificial Sequence
  Description of Artificial Sequence: Synthetic oligonucleotide
  Target: SCNA; (-) strand; PAM type: NRG; PAM sequence: AGG
gagggcatgggcttgaattc

SEQ ID NO: 23948 - DNA, 20 bp, Artificial Sequence
  Description of Artificial Sequence: Synthetic oligonucleotide
  Target: SCNA; (-) strand; PAM type: NRG; PAM sequence: CAG
ggagggcatgggcttgaatt

SEQ ID NO: 23949 - DNA, 20 bp, Artificial Sequence
  Description of Artificial Sequence: Synthetic oligonucleotide
  Target: SCNA; (-) strand; PAM type: NRG; PAM sequence: GGG
tggcatggtgtggagggcat

SEQ ID NO: 23950 - DNA, 20 bp, Artificial Sequence
  Description of Artificial Sequence: Synthetic oligonucleotide
  Target: SCNA; (-) strand; PAM type: NRG; PAM sequence: TGG
atggcatggtgtggagggca

SEQ ID NO: 23951 - DNA, 20 bp, Artificial Sequence
  Description of Artificial Sequence: Synthetic oligonucleotide
  Target: SCNA; (-) strand; PAM type: NRG; PAM sequence: GGG
aaaacatggcatggtgtgga

SEQ ID NO: 23952 - DNA, 20 bp, Artificial Sequence
  Description of Artificial Sequence: Synthetic oligonucleotide
  Target: SCNA; (-) strand; PAM type: NRG; PAM sequence: AGG
gaaaacatggcatggtgtgg

SEQ ID NO: 23953 - DNA, 20 bp, Artificial Sequence
  Description of Artificial Sequence: Synthetic oligonucleotide
  Target: SCNA; (-) strand; PAM type: NRG; PAM sequence: GAG
ggaaaacatggcatggtgtg

SEQ ID NO: 23954 - DNA, 20 bp, Artificial Sequence
  Description of Artificial Sequence: Synthetic oligonucleotide
  Target: SCNA; (-) strand; PAM type: NRG; PAM sequence: TGG
agggaaaacatggcatggtg

SEQ ID NO: 23955 - DNA, 20 bp, Artificial Sequence
  Description of Artificial Sequence: Synthetic oligonucleotide
  Target: SCNA; (-) strand; PAM type: NRG; PAM sequence: TGG
tatacagggaaaacatggca

SEQ ID NO: 23956 - DNA, 20 bp, Artificial Sequence
  Description of Artificial Sequence: Synthetic oligonucleotide
  Target: SCNA; (-) strand; PAM type: NRG; PAM sequence: TGG
ggtcatatacagggaaaaca

SEQ ID NO: 23957 - DNA, 20 bp, Artificial Sequence
  Description of Artificial Sequence: Synthetic oligonucleotide
  Target: SCNA; (-) strand; PAM type: NRG; PAM sequence: GGG
attttgtttggtcatataca

SEQ ID NO: 23958 - DNA, 20 bp, Artificial Sequence
  Description of Artificial Sequence: Synthetic oligonucleotide
  Target: SCNA; (-) strand; PAM type: NRG; PAM sequence: AGG
cattttgtttggtcatatac

SEQ ID NO: 23959 - DNA, 20 bp, Artificial Sequence
  Description of Artificial Sequence: Synthetic oligonucleotide
  Target: SCNA; (-) strand; PAM type: NRG; PAM sequence: CAG
ccattttgtttggtcatata

SEQ ID NO: 23960 - DNA, 20 bp, Artificial Sequence
  Description of Artificial Sequence: Synthetic oligonucleotide
  Target: SCNA; (-) strand; PAM type: NRG; PAM sequence: TGG
tttaactgcaccattttgtt

SEQ ID NO: 23961 - DNA, 20 bp, Artificial Sequence
  Description of Artificial Sequence: Synthetic oligonucleotide
  Target: SCNA; (-) strand; PAM type: NRG; PAM sequence: TGG
ctcctgtgcatgacggctcg

SEQ ID NO: 23962 - DNA, 20 bp, Artificial Sequence
  Description of Artificial Sequence: Synthetic oligonucleotide
  Target: SCNA; (-) strand; PAM type: NRG; PAM sequence: CGG
gctggccctcctgtgcatga

SEQ ID NO: 23963 - DNA, 20 bp, Artificial Sequence
  Description of Artificial Sequence: Synthetic oligonucleotide
  Target: SCNA; (-) strand; PAM type: NRG; PAM sequence: TGG
gatccagcatgatggccagc

SEQ ID NO: 23964 - DNA, 20 bp, Artificial Sequence
  Description of Artificial Sequence: Synthetic oligonucleotide
  Target: SCNA; (-) strand; PAM type: NRG; PAM sequence: CAG
gtttgatccagcatgatggc

SEQ ID NO: 23965 - DNA, 20 bp, Artificial Sequence
  Description of Artificial Sequence: Synthetic oligonucleotide
  Target: SCNA; (-) strand; PAM type: NRG; PAM sequence: TGG
tgctgtttgatccagcatga

SEQ ID NO: 23966 - DNA, 20 bp, Artificial Sequence
  Description of Artificial Sequence: Synthetic oligonucleotide
  Target: SCNA; (-) strand; PAM type: NRG; PAM sequence: CAG
tctatatctgctgtttgatc

SEQ ID NO: 23967 - DNA, 20 bp, Artificial Sequence
  Description of Artificial Sequence: Synthetic oligonucleotide
  Target: SCNA; (-) strand; PAM type: NRG; PAM sequence: TGG
cacaagtgttctgctagaga

SEQ ID NO: 23968 - DNA, 20 bp, Artificial Sequence
  Description of Artificial Sequence: Synthetic oligonucleotide
  Target: SCNA; (-) strand; PAM type: NRG; PAM sequence: GAG
aattcacaagtgttctgcta

SEQ ID NO: 23969 - DNA, 20 bp, Artificial Sequence
  Description of Artificial Sequence: Synthetic oligonucleotide
  Target: SCNA; (-) strand; PAM type: NRG; PAM sequence: TAG
gcaattcacaagtgttctgc

SEQ ID NO: 23970 - DNA, 20 bp, Artificial Sequence
  Description of Artificial Sequence: Synthetic oligonucleotide
  Target: SCNA; (-) strand; PAM type: NRG; PAM sequence: AAG
ttgaaacaaaggcaattcac

SEQ ID NO: 23971 - DNA, 20 bp, Artificial Sequence
  Description of Artificial Sequence: Synthetic oligonucleotide
  Target: SCNA; (-) strand; PAM type: NRG; PAM sequence: AGG
catttatgagtttgaaacaa

SEQ ID NO: 23972 - DNA, 20 bp, Artificial Sequence
  Description of Artificial Sequence: Synthetic oligonucleotide
  Target: SCNA; (-) strand; PAM type: NRG; PAM sequence: AAG
acatttatgagtttgaaaca

SEQ ID NO: 23973 - DNA, 20 bp, Artificial Sequence
  Description of Artificial Sequence: Synthetic oligonucleotide
  Target: SCNA; (-) strand; PAM type: NRG; PAM sequence: GAG
aaaggtatactaacatttat

SEQ ID NO: 23974 - DNA, 20 bp, Artificial Sequence
  Description of Artificial Sequence: Synthetic oligonucleotide
  Target: SCNA; (-) strand; PAM type: NRG; PAM sequence: AGG
tcatggtagtcctcctacaa

SEQ ID NO: 23975 - DNA, 20 bp, Artificial Sequence
  Description of Artificial Sequence: Synthetic oligonucleotide
  Target: SCNA; (-) strand; PAM type: NRG; PAM sequence: AAG
ttcatggtagtcctcctaca

SEQ ID NO: 23976 - DNA, 20 bp, Artificial Sequence
  Description of Artificial Sequence: Synthetic oligonucleotide
  Target: SCNA; (-) strand; PAM type: NRG; PAM sequence: TAG
tggcaattcatctttcatgg

SEQ ID NO: 23977 - DNA, 20 bp, Artificial Sequence
  Description of Artificial Sequence: Synthetic oligonucleotide
  Target: SCNA; (-) strand; PAM type: NRG; PAM sequence: TGG
tagtggcaattcatctttca

SEQ ID NO: 23978 - DNA, 20 bp, Artificial Sequence
  Description of Artificial Sequence: Synthetic oligonucleotide
  Target: SCNA; (-) strand; PAM type: NRG; PAM sequence: TGG
atactaatgactgcttatag

SEQ ID NO: 23979 - DNA, 20 bp, Artificial Sequence
  Description of Artificial Sequence: Synthetic oligonucleotide
  Target: SCNA; (-) strand; PAM type: NRG; PAM sequence: TAG
taaatactaatgactgctta

SEQ ID NO: 23980 - DNA, 20 bp, Artificial Sequence
  Description of Artificial Sequence: Synthetic oligonucleotide
  Target: SCNA; (-) strand; PAM type: NRG; PAM sequence: AAG
tctaaagtaggcacctttaa

SEQ ID NO: 23981 - DNA, 20 bp, Artificial Sequence
  Description of Artificial Sequence: Synthetic oligonucleotide
  Target: SCNA; (-) strand; PAM type: NRG; PAM sequence: AGG
tattatgacatatctaaagt

SEQ ID NO: 23982 - DNA, 20 bp, Artificial Sequence
  Description of Artificial Sequence: Synthetic oligonucleotide
  Target: SCNA; (-) strand; PAM type: NRG; PAM sequence: TAG
atattatgacatatctaaag

SEQ ID NO: 23983 - DNA, 20 bp, Artificial Sequence
  Description of Artificial Sequence: Synthetic oligonucleotide
  Target: SCNA; (-) strand; PAM type: NRG; PAM sequence: AAG
ctaatattatgacatatcta

SEQ ID NO: 23984 - DNA, 20 bp, Artificial Sequence
  Description of Artificial Sequence: Synthetic oligonucleotide
  Target: SCNA; (-) strand; PAM type: NRG; PAM sequence: TAG
tcctacaaagcatagataga

SEQ ID NO: 23985 - DNA, 20 bp, Artificial Sequence
  Description of Artificial Sequence: Synthetic oligonucleotide
  Target: SCNA; (-) strand; PAM type: NRG; PAM sequence: TAG
attgtcctacaaagcataga

SEQ ID NO: 23986 - DNA, 20 bp, Artificial Sequence
  Description of Artificial Sequence: Synthetic oligonucleotide
  Target: SCNA; (-) strand; PAM type: NRG; PAM sequence: TAG
tataattgtcctacaaagca

SEQ ID NO: 23987 - DNA, 20 bp, Artificial Sequence
  Description of Artificial Sequence: Synthetic oligonucleotide
  Target: SCNA; (-) strand; PAM type: NRG; PAM sequence: AAG
attaatataattgtcctaca

SEQ ID NO: 23988 - DNA, 20 bp, Artificial Sequence
  Description of Artificial Sequence: Synthetic oligonucleotide
  Target: SCNA; (-) strand; PAM type: NRG; PAM sequence: GGG
tacttatgtcaggtaacttt

SEQ ID NO: 23989 - DNA, 20 bp, Artificial Sequence
  Description of Artificial Sequence: Synthetic oligonucleotide
  Target: SCNA; (-) strand; PAM type: NRG; PAM sequence: TGG
ctacttatgtcaggtaactt

SEQ ID NO: 23990 - DNA, 20 bp, Artificial Sequence
  Description of Artificial Sequence: Synthetic oligonucleotide
  Target: SCNA; (-) strand; PAM type: NRG; PAM sequence: AGG
atgtgcttcctacttatgtc

SEQ ID NO: 23991 - DNA, 20 bp, Artificial Sequence
  Description of Artificial Sequence: Synthetic oligonucleotide
  Target: SCNA; (-) strand; PAM type: NRG; PAM sequence: CAG
catgtgcttcctacttatgt

SEQ ID NO: 23992 - DNA, 20 bp, Artificial Sequence
  Description of Artificial Sequence: Synthetic oligonucleotide
  Target: SCNA; (-) strand; PAM type: NRG; PAM sequence: AGG
tatttgctatatatcagaag

SEQ ID NO: 23993 - DNA, 20 bp, Artificial Sequence
  Description of Artificial Sequence: Synthetic oligonucleotide
  Target: SCNA; (-) strand; PAM type: NRG; PAM sequence: GAG
ttatttgctatatatcagaa

SEQ ID NO: 23994 - DNA, 20 bp, Artificial Sequence
  Description of Artificial Sequence: Synthetic oligonucleotide
  Target: SCNA; (-) strand; PAM type: NRG; PAM sequence: AAG
tattatttgctatatatcag

SEQ ID NO: 23995 - DNA, 20 bp, Artificial Sequence
  Description of Artificial Sequence: Synthetic oligonucleotide
  Target: SCNA; (-) strand; PAM type: NRG; PAM sequence: CAG
atatattatttgctatatat

SEQ ID NO: 23996 - DNA, 20 bp, Artificial Sequence
  Description of Artificial Sequence: Synthetic oligonucleotide
  Target: SCNA; (-) strand; PAM type: NRG; PAM sequence: GAG
caatttttgctcagtggatt

SEQ ID NO: 23997 - DNA, 20 bp, Artificial Sequence
  Description of Artificial Sequence: Synthetic oligonucleotide
  Target: SCNA; (-) strand; PAM type: NRG; PAM sequence: TGG
aggttccaatttttgctcag

SEQ ID NO: 23998 - DNA, 20 bp, Artificial Sequence
  Description of Artificial Sequence: Synthetic oligonucleotide
  Target: SCNA; (-) strand; PAM type: NRG; PAM sequence: CAG
ttgaggttccaatttttgct

SEQ ID NO: 23999 - DNA, 20 bp, Artificial Sequence
  Description of Artificial Sequence: Synthetic oligonucleotide
  Target: SCNA; (-) strand; PAM type: NRG; PAM sequence: AGG
gtacatacagctttgccttg

SEQ ID NO: 24000 - DNA, 20 bp, Artificial Sequence
  Description of Artificial Sequence: Synthetic oligonucleotide
  Target: SCNA; (-) strand; PAM type: NRG; PAM sequence: GAG
tgtacatacagctttgcctt

SEQ ID NO: 24001 - DNA, 20 bp, Artificial Sequence
  Description of Artificial Sequence: Synthetic oligonucleotide
  Target: SCNA; (-) strand; PAM type: NRG; PAM sequence: CAG
attttctgaggttgtacata

SEQ ID NO: 24002 - DNA, 20 bp, Artificial Sequence
  Description of Artificial Sequence: Synthetic oligonucleotide
  Target: SCNA; (-) strand; PAM type: NRG; PAM sequence: AGG
catgccacacagattttctg

SEQ ID NO: 24003 - DNA, 20 bp, Artificial Sequence
  Description of Artificial Sequence: Synthetic oligonucleotide
  Target: SCNA; (-) strand; PAM type: NRG; PAM sequence: GAG
tcatgccacacagattttct

SEQ ID NO: 24004 - DNA, 20 bp, Artificial Sequence
  Description of Artificial Sequence: Synthetic oligonucleotide
  Target: SCNA; (-) strand; PAM type: NRG; PAM sequence: CAG
ttacggtatttcatgccaca

SEQ ID NO: 24005 - DNA, 20 bp, Artificial Sequence
  Description of Artificial Sequence: Synthetic oligonucleotide
  Target: SCNA; (-) strand; PAM type: NRG; PAM sequence: CGG
tgccctttcagtgtacgtta

SEQ ID NO: 24006 - DNA, 20 bp, Artificial Sequence
  Description of Artificial Sequence: Synthetic oligonucleotide
  Target: SCNA; (-) strand; PAM type: NRG; PAM sequence: CAG
aaaatcgaaaattgcccttt

SEQ ID NO: 24007 - DNA, 20 bp, Artificial Sequence
  Description of Artificial Sequence: Synthetic oligonucleotide
  Target: SCNA; (-) strand; PAM type: NRG; PAM sequence: GGG
tttttttctatttggctatt

SEQ ID NO: 24008 - DNA, 20 bp, Artificial Sequence
  Description of Artificial Sequence: Synthetic oligonucleotide
  Target: SCNA; (-) strand; PAM type: NRG; PAM sequence: TGG
ctttttttctatttggctat

SEQ ID NO: 24009 - DNA, 20 bp, Artificial Sequence
  Description of Artificial Sequence: Synthetic oligonucleotide
  Target: SCNA; (-) strand; PAM type: NRG; PAM sequence: TGG
atacacactttttttctatt

SEQ ID NO: 24010 - DNA, 20 bp, Artificial Sequence
  Description of Artificial Sequence: Synthetic oligonucleotide
  Target: SCNA; (-) strand; PAM type: NRG; PAM sequence: AAG
gtctgacaatccttaatatc

SEQ ID NO: 24011 - DNA, 20 bp, Artificial Sequence
  Description of Artificial Sequence: Synthetic oligonucleotide
  Target: SCNA; (-) strand; PAM type: NRG; PAM sequence: AAG
tgcttacaatggggtgacat

SEQ ID NO: 24012 - DNA, 20 bp, Artificial Sequence
  Description of Artificial Sequence: Synthetic oligonucleotide
  Target: SCNA; (-) strand; PAM type: NRG; PAM sequence: GGG
aactatctatgcttacaatg

SEQ ID NO: 24013 - DNA, 20 bp, Artificial Sequence
  Description of Artificial Sequence: Synthetic oligonucleotide
  Target: SCNA; (-) strand; PAM type: NRG; PAM sequence: GGG
taactatctatgcttacaat

SEQ ID NO: 24014 - DNA, 20 bp, Artificial Sequence
  Description of Artificial Sequence: Synthetic oligonucleotide
  Target: SCNA; (-) strand; PAM type: NRG; PAM sequence: TGG
ttaactatctatgcttacaa

SEQ ID NO: 24015 - DNA, 20 bp, Artificial Sequence
  Description of Artificial Sequence: Synthetic oligonucleotide
  Target: SCNA; (-) strand; PAM type: NRG; PAM sequence: TAG
tttaatttaatgaaatcaaa

SEQ ID NO: 24016 - DNA, 20 bp, Artificial Sequence
  Description of Artificial Sequence: Synthetic oligonucleotide
  Target: SCNA; (-) strand; PAM type: NRG; PAM sequence: TGG
gaatgaattcagttacatta

SEQ ID NO: 24017 - DNA, 20 bp, Artificial Sequence
  Description of Artificial Sequence: Synthetic oligonucleotide
  Target: SCNA; (-) strand; PAM type: NRG; PAM sequence: CAG
tcagttcataggaatgaatt

SEQ ID NO: 24018 - DNA, 20 bp, Artificial Sequence
  Description of Artificial Sequence: Synthetic oligonucleotide
  Target: SCNA; (-) strand; PAM type: NRG; PAM sequence: AGG
ctaattggaattcagttcat

SEQ ID NO: 24019 - DNA, 20 bp, Artificial Sequence
  Description of Artificial Sequence: Synthetic oligonucleotide
  Target: SCNA; (-) strand; PAM type: NRG; PAM sequence: TAG
tctaattggaattcagttca

SEQ ID NO: 24020 - DNA, 20 bp, Artificial Sequence
  Description of Artificial Sequence: Synthetic oligonucleotide
  Target: SCNA; (-) strand; PAM type: NRG; PAM sequence: CAG
tgataaatctaattggaatt

SEQ ID NO: 24021 - DNA, 20 bp, Artificial Sequence
  Description of Artificial Sequence: Synthetic oligonucleotide
  Target: SCNA; (-) strand; PAM type: NRG; PAM sequence: TGG
aacaatatgataaatctaat

SEQ ID NO: 24022 - DNA, 20 bp, Artificial Sequence
  Description of Artificial Sequence: Synthetic oligonucleotide
  Target: SCNA; (-) strand; PAM type: NRG; PAM sequence: TGG
gggactgtcctacttttctc

SEQ ID NO: 24023 - DNA, 20 bp, Artificial Sequence
  Description of Artificial Sequence: Synthetic oligonucleotide
  Target: SCNA; (-) strand; PAM type: NRG; PAM sequence: GGG
ttatcttcctgcttagatgt

SEQ ID NO: 24024 - DNA, 20 bp, Artificial Sequence
  Description of Artificial Sequence: Synthetic oligonucleotide
  Target: SCNA; (-) strand; PAM type: NRG; PAM sequence: TGG
tttatcttcctgcttagatg

SEQ ID NO: 24025 - DNA, 20 bp, Artificial Sequence
  Description of Artificial Sequence: Synthetic oligonucleotide
  Target: SCNA; (-) strand; PAM type: NRG; PAM sequence: TAG
atatattttatcttcctgct

SEQ ID NO: 24026 - DNA, 20 bp, Artificial Sequence
  Description of Artificial Sequence: Synthetic oligonucleotide
  Target: SCNA; (-) strand; PAM type: NRG; PAM sequence: CGG
gaaaaaatggaaataaagaa

SEQ ID NO: 24027 - DNA, 20 bp, Artificial Sequence
  Description of Artificial Sequence: Synthetic oligonucleotide
  Target: SCNA; (-) strand; PAM type: NRG; PAM sequence: AAG
taagtgaaaaaatggaaata

SEQ ID NO: 24028 - DNA, 20 bp, Artificial Sequence
  Description of Artificial Sequence: Synthetic oligonucleotide
  Target: SCNA; (-) strand; PAM type: NRG; PAM sequence: TGG
tgaacaagtaagtgaaaaaa

SEQ ID NO: 24029 - DNA, 20 bp, Artificial Sequence
  Description of Artificial Sequence: Synthetic oligonucleotide
  Target: SCNA; (-) strand; PAM type: NRG; PAM sequence: AAG
agattatttattgaacaagt

SEQ ID NO: 24030 - DNA, 20 bp, Artificial Sequence
  Description of Artificial Sequence: Synthetic oligonucleotide
  Target: SCNA; (-) strand; PAM type: NRG; PAM sequence: AAG
aaatagattatttattgaac

SEQ ID NO: 24031 - DNA, 20 bp, Artificial Sequence
  Description of Artificial Sequence: Synthetic oligonucleotide
  Target: SCNA; (-) strand; PAM type: NRG; PAM sequence: TAG
aattatgcttgttgaataaa

SEQ ID NO: 24032 - DNA, 20 bp, Artificial Sequence
  Description of Artificial Sequence: Synthetic oligonucleotide
  Target: SCNA; (-) strand; PAM type: NRG; PAM sequence: CAG
taatgcaaagaatactgagc

SEQ ID NO: 24033 - DNA, 20 bp, Artificial Sequence
  Description of Artificial Sequence: Synthetic oligonucleotide
  Target: SCNA; (-) strand; PAM type: NRG; PAM sequence: GAG
atactaatgcaaagaatact

SEQ ID NO: 24034 - DNA, 20 bp, Artificial Sequence
  Description of Artificial Sequence: Synthetic oligonucleotide
  Target: SCNA; (-) strand; PAM type: NRG; PAM sequence: AAG
tcatagtgaatactaatgca

SEQ ID NO: 24035 - DNA, 20 bp, Artificial Sequence
  Description of Artificial Sequence: Synthetic oligonucleotide
  Target: SCNA; (-) strand; PAM type: NRG; PAM sequence: TAG
tttaattcttattaatgtca

SEQ ID NO: 24036 - DNA, 20 bp, Artificial Sequence
  Description of Artificial Sequence: Synthetic oligonucleotide
  Target: SCNA; (-) strand; PAM type: NRG; PAM sequence: TAG
tacttgtgaaaattccaaag

SEQ ID NO: 24037 - DNA, 20 bp, Artificial Sequence
  Description of Artificial Sequence: Synthetic oligonucleotide
  Target: SCNA; (-) strand; PAM type: NRG; PAM sequence: AAG
agttacttgtgaaaattcca

SEQ ID NO: 24038 - DNA, 20 bp, Artificial Sequence
  Description of Artificial Sequence: Synthetic oligonucleotide
  Target: SCNA; (-) strand; PAM type: NRG; PAM sequence: CAG
gtgattctggaatcactaag

SEQ ID NO: 24039 - DNA, 20 bp, Artificial Sequence
  Description of Artificial Sequence: Synthetic oligonucleotide
  Target: SCNA; (-) strand; PAM type: NRG; PAM sequence: AAG
caggtgattctggaatcact

SEQ ID NO: 24040 - DNA, 20 bp, Artificial Sequence
  Description of Artificial Sequence: Synthetic oligonucleotide
  Target: SCNA; (-) strand; PAM type: NRG; PAM sequence: TGG
ccccttctaccaggtgattc

SEQ ID NO: 24041 - DNA, 20 bp, Artificial Sequence
  Description of Artificial Sequence: Synthetic oligonucleotide
  Target: SCNA; (-) strand; PAM type: NRG; PAM sequence: AGG
tttaaatatccccttctacc

SEQ ID NO: 24042 - DNA, 20 bp, Artificial Sequence
  Description of Artificial Sequence: Synthetic oligonucleotide
  Target: SCNA; (-) strand; PAM type: NRG; PAM sequence: CAG
atttaaatatccccttctac

SEQ ID NO: 24043 - DNA, 20 bp, Artificial Sequence
  Description of Artificial Sequence: Synthetic oligonucleotide
  Target: SCNA; (-) strand; PAM type: NRG; PAM sequence: AAG
ttaacaacatttggattttt

SEQ ID NO: 24044 - DNA, 20 bp, Artificial Sequence
  Description of Artificial Sequence: Synthetic oligonucleotide
  Target: SCNA; (-) strand; PAM type: NRG; PAM sequence: TGG
ttaaaacttttaacaacatt

SEQ ID NO: 24045 - DNA, 20 bp, Artificial Sequence
  Description of Artificial Sequence: Synthetic oligonucleotide
  Target: SCNA; (-) strand; PAM type: NRG; PAM sequence: AAG
gtatatgaagtaatttttat

SEQ ID NO: 24046 - DNA, 20 bp, Artificial Sequence
  Description of Artificial Sequence: Synthetic oligonucleotide
  Target: SCNA; (-) strand; PAM type: NRG; PAM sequence: AAG
aatttgtcaactcgtatatg

SEQ ID NO: 24047 - DNA, 20 bp, Artificial Sequence
  Description of Artificial Sequence: Synthetic oligonucleotide
  Target: SCNA; (-) strand; PAM type: NRG; PAM sequence: GAG
tttaattgttcttctacaag

SEQ ID NO: 24048 - DNA, 20 bp, Artificial Sequence
  Description of Artificial Sequence: Synthetic oligonucleotide
  Target: SCNA; (-) strand; PAM type: NRG; PAM sequence: AGG
aatttaattgttcttctaca

SEQ ID NO: 24049 - DNA, 20 bp, Artificial Sequence
  Description of Artificial Sequence: Synthetic oligonucleotide
  Target: SCNA; (-) strand; PAM type: NRG; PAM sequence: AAG
caatttaattgttcttctac

SEQ ID NO: 24050 - DNA, 20 bp, Artificial Sequence
  Description of Artificial Sequence: Synthetic oligonucleotide
  Target: SCNA; (-) strand; PAM type: NRG; PAM sequence: TAG
ataattacgtgtatgagagt

SEQ ID NO: 24051 - DNA, 20 bp, Artificial Sequence
  Description of Artificial Sequence: Synthetic oligonucleotide
  Target: SCNA; (-) strand; PAM type: NRG; PAM sequence: GAG
atatataattacgtgtatga

SEQ ID NO: 24052 - DNA, 20 bp, Artificial Sequence
  Description of Artificial Sequence: Synthetic oligonucleotide
  Target: SCNA; (-) strand; PAM type: NRG; PAM sequence: GAG
aaatatataattacgtgtat

SEQ ID NO: 24053 - DNA, 20 bp, Artificial Sequence
  Description of Artificial Sequence: Synthetic oligonucleotide
  Target: SCNA; (-) strand; PAM type: NRG; PAM sequence: GAG
ggtacagaaatgaggtaaat

SEQ ID NO: 24054 - DNA, 20 bp, Artificial Sequence
  Description of Artificial Sequence: Synthetic oligonucleotide
  Target: SCNA; (-) strand; PAM type: NRG; PAM sequence: AGG
tattcaagggtacagaaatg

SEQ ID NO: 24055 - DNA, 20 bp, Artificial Sequence
  Description of Artificial Sequence: Synthetic oligonucleotide
  Target: SCNA; (-) strand; PAM type: NRG; PAM sequence: GAG
atattcaagggtacagaaat

SEQ ID NO: 24056 - DNA, 20 bp, Artificial Sequence
  Description of Artificial Sequence: Synthetic oligonucleotide
  Target: SCNA; (-) strand; PAM type: NRG; PAM sequence: CAG
ttacgtgatattcaagggta

SEQ ID NO: 24057 - DNA, 20 bp, Artificial Sequence
  Description of Artificial Sequence: Synthetic oligonucleotide
  Target: SCNA; (-) strand; PAM type: NRG; PAM sequence: GGG
tatgtttacgtgatattcaa

SEQ ID NO: 24058 - DNA, 20 bp, Artificial Sequence
  Description of Artificial Sequence: Synthetic oligonucleotide
  Target: SCNA; (-) strand; PAM type: NRG; PAM sequence: AGG
atatgtttacgtgatattca

SEQ ID NO: 24059 - DNA, 20 bp, Artificial Sequence
  Description of Artificial Sequence: Synthetic oligonucleotide
  Target: SCNA; (-) strand; PAM type: NRG; PAM sequence: AAG
aatatgtttacgtgatattc

SEQ ID NO: 24060 - DNA, 20 bp, Artificial Sequence
  Description of Artificial Sequence: Synthetic oligonucleotide
  Target: SCNA; (-) strand; PAM type: NRG; PAM sequence: AGG
attcaaagtatttaaaaatc

SEQ ID NO: 24061 - DNA, 20 bp, Artificial Sequence
  Description of Artificial Sequence: Synthetic oligonucleotide
  Target: SCNA; (-) strand; PAM type: NRG; PAM sequence: CAG
tattcaaagtatttaaaaat

SEQ ID NO: 24062 - DNA, 20 bp, Artificial Sequence
  Description of Artificial Sequence: Synthetic oligonucleotide
  Target: SCNA; (-) strand; PAM type: NRG; PAM sequence: AAG
tttggttctcaaactattca

SEQ ID NO: 24063 - DNA, 20 bp, Artificial Sequence
  Description of Artificial Sequence: Synthetic oligonucleotide
  Target: SCNA; (-) strand; PAM type: NRG; PAM sequence: TGG
aattgtcaaaagaggtcttt

SEQ ID NO: 24064 - DNA, 20 bp, Artificial Sequence
  Description of Artificial Sequence: Synthetic oligonucleotide
  Target: SCNA; (-) strand; PAM type: NRG; PAM sequence: AGG
caagaggaaattgtcaaaag

SEQ ID NO: 24065 - DNA, 20 bp, Artificial Sequence
  Description of Artificial Sequence: Synthetic oligonucleotide
  Target: SCNA; (-) strand; PAM type: NRG; PAM sequence: GAG
tcaagaggaaattgtcaaaa

SEQ ID NO: 24066 - DNA, 20 bp, Artificial Sequence
  Description of Artificial Sequence: Synthetic oligonucleotide
  Target: SCNA; (-) strand; PAM type: NRG; PAM sequence: AAG
tatcaagaggaaattgtcaa

SEQ ID NO: 24067 - DNA, 20 bp, Artificial Sequence
  Description of Artificial Sequence: Synthetic oligonucleotide
  Target: SCNA; (-) strand; PAM type: NRG; PAM sequence: AGG
atgctatttgctttatcaag

SEQ ID NO: 24068 - DNA, 20 bp, Artificial Sequence
  Description of Artificial Sequence: Synthetic oligonucleotide
  Target: SCNA; (-) strand; PAM type: NRG; PAM sequence: GAG
gatgctatttgctttatcaa

SEQ ID NO: 24069 - DNA, 20 bp, Artificial Sequence
  Description of Artificial Sequence: Synthetic oligonucleotide
  Target: SCNA; (-) strand; PAM type: NRG; PAM sequence: AAG
atgatgctatttgctttatc

SEQ ID NO: 24070 - DNA, 20 bp, Artificial Sequence
  Description of Artificial Sequence: Synthetic oligonucleotide
  Target: SCNA; (-) strand; PAM type: NRG; PAM sequence: GAG
gttagcttttaagttttagg

SEQ ID NO: 24071 - DNA, 20 bp, Artificial Sequence
  Description of Artificial Sequence: Synthetic oligonucleotide
  Target: SCNA; (-) strand; PAM type: NRG; PAM sequence: GGG
ctgttagcttttaagtttta

SEQ ID NO: 24072 - DNA, 20 bp, Artificial Sequence
  Description of Artificial Sequence: Synthetic oligonucleotide
  Target: SCNA; (-) strand; PAM type: NRG; PAM sequence: AGG
gctgttagcttttaagtttt

SEQ ID NO: 24073 - DNA, 20 bp, Artificial Sequence
  Description of Artificial Sequence: Synthetic oligonucleotide
  Target: SCNA; (-) strand; PAM type: NRG; PAM sequence: TAG
ggctgttagcttttaagttt

SEQ ID NO: 24074 - DNA, 20 bp, Artificial Sequence
  Description of Artificial Sequence: Synthetic oligonucleotide
  Target: SCNA; (-) strand; PAM type: NRG; PAM sequence: AAG
agcataggctgttagctttt

SEQ ID NO: 24075 - DNA, 20 bp, Artificial Sequence
  Description of Artificial Sequence: Synthetic oligonucleotide
  Target: SCNA; (-) strand; PAM type: NRG; PAM sequence: TAG
ccccttcaagcataggctgt

SEQ ID NO: 24076 - DNA, 20 bp, Artificial Sequence
  Description of Artificial Sequence: Synthetic oligonucleotide
  Target: SCNA; (-) strand; PAM type: NRG; PAM sequence: AGG
ttttctgccccttcaagcat

SEQ ID NO: 24077 - DNA, 20 bp, Artificial Sequence
  Description of Artificial Sequence: Synthetic oligonucleotide
  Target: SCNA; (-) strand; PAM type: NRG; PAM sequence: TAG
cttttctgccccttcaagca

SEQ ID NO: 24078 - DNA, 20 bp, Artificial Sequence
  Description of Artificial Sequence: Synthetic oligonucleotide
  Target: SCNA; (-) strand; PAM type: NRG; PAM sequence: AAG
cttgacttttctgccccttc

SEQ ID NO: 24079 - DNA, 20 bp, Artificial Sequence
  Description of Artificial Sequence: Synthetic oligonucleotide
  Target: SCNA; (-) strand; PAM type: NRG; PAM sequence: AAG
cctgtttgtccctaaaaagt

SEQ ID NO: 24080 - DNA, 20 bp, Artificial Sequence
  Description of Artificial Sequence: Synthetic oligonucleotide
  Target: SCNA; (-) strand; PAM type: NRG; PAM sequence: AAG
acaacctgtttgtccctaaa

SEQ ID NO: 24081 - DNA, 20 bp, Artificial Sequence
  Description of Artificial Sequence: Synthetic oligonucleotide
  Target: SCNA; (-) strand; PAM type: NRG; PAM sequence: AAG
gtgacgggcataaataggat

SEQ ID NO: 24082 - DNA, 20 bp, Artificial Sequence
  Description of Artificial Sequence: Synthetic oligonucleotide
  Target: SCNA; (-) strand; PAM type: NRG; PAM sequence: AGG
tttaggtgacgggcataaat

SEQ ID NO: 24083 - DNA, 20 bp, Artificial Sequence
  Description of Artificial Sequence: Synthetic oligonucleotide
  Target: SCNA; (-) strand; PAM type: NRG; PAM sequence: TAG
gtttaggtgacgggcataaa

SEQ ID NO: 24084 - DNA, 20 bp, Artificial Sequence
  Description of Artificial Sequence: Synthetic oligonucleotide
  Target: SCNA; (-) strand; PAM type: NRG; PAM sequence: GGG
cacttatatgtttaggtgac

SEQ ID NO: 24085 - DNA, 20 bp, Artificial Sequence
  Description of Artificial Sequence: Synthetic oligonucleotide
  Target: SCNA; (-) strand; PAM type: NRG; PAM sequence: CGG
gcacttatatgtttaggtga

SEQ ID NO: 24086 - DNA, 20 bp, Artificial Sequence
  Description of Artificial Sequence: Synthetic oligonucleotide
  Target: SCNA; (-) strand; PAM type: NRG; PAM sequence: AGG
aaaatagcacttatatgttt

SEQ ID NO: 24087 - DNA, 20 bp, Artificial Sequence
  Description of Artificial Sequence: Synthetic oligonucleotide
  Target: SCNA; (-) strand; PAM type: NRG; PAM sequence: TAG
aaaaatagcacttatatgtt

SEQ ID NO: 24088 - DNA, 20 bp, Artificial Sequence
  Description of Artificial Sequence: Synthetic oligonucleotide
  Target: SCNA; (-) strand; PAM type: NRG; PAM sequence: TAG
tgataataaacttggaaaaa

SEQ ID NO: 24089 - DNA, 20 bp, Artificial Sequence
  Description of Artificial Sequence: Synthetic oligonucleotide
  Target: SCNA; (-) strand; PAM type: NRG; PAM sequence: TGG
ttgtaatttgataataaact

SEQ ID NO: 24090 - DNA, 20 bp, Artificial Sequence
  Description of Artificial Sequence: Synthetic oligonucleotide
  Target: SCNA; (-) strand; PAM type: NRG; PAM sequence: GAG
ttttacctctactaccatct

SEQ ID NO: 24091 - DNA, 20 bp, Artificial Sequence
  Description of Artificial Sequence: Synthetic oligonucleotide
  Target: SCNA; (-) strand; PAM type: NRG; PAM sequence: AGG
ttactcatcttacatgactt

SEQ ID NO: 24092 - DNA, 20 bp, Artificial Sequence
  Description of Artificial Sequence: Synthetic oligonucleotide
  Target: SCNA; (-) strand; PAM type: NRG; PAM sequence: TAG
cttactcatcttacatgact

SEQ ID NO: 24093 - DNA, 20 bp, Artificial Sequence
  Description of Artificial Sequence: Synthetic oligonucleotide
  Target: SCNA; (-) strand; PAM type: NRG; PAM sequence: TAG
catgttgtacattagatctt

SEQ ID NO: 24094 - DNA, 20 bp, Artificial Sequence
  Description of Artificial Sequence: Synthetic oligonucleotide
  Target: SCNA; (-) strand; PAM type: NRG; PAM sequence: TAG
ataatcttcatgttgtacat

SEQ ID NO: 24095 - DNA, 20 bp, Artificial Sequence
  Description of Artificial Sequence: Synthetic oligonucleotide
  Target: SCNA; (-) strand; PAM type: NRG; PAM sequence: CAG
ctactttcttgaaaaattac

SEQ ID NO: 24096 - DNA, 20 bp, Artificial Sequence
  Description of Artificial Sequence: Synthetic oligonucleotide
  Target: SCNA; (-) strand; PAM type: NRG; PAM sequence: CAG
tatctttgcttttttactat

SEQ ID NO: 24097 - DNA, 20 bp, Artificial Sequence
  Description of Artificial Sequence: Synthetic oligonucleotide
  Target: SCNA; (-) strand; PAM type: NRG; PAM sequence: TGG
ttaacatacccatcatcata

SEQ ID NO: 24098 - DNA, 20 bp, Artificial Sequence
  Description of Artificial Sequence: Synthetic oligonucleotide
  Target: SCNA; (-) strand; PAM type: NRG; PAM sequence: AAG
taaaagtgattcctacattg

SEQ ID NO: 24099 - DNA, 20 bp, Artificial Sequence
  Description of Artificial Sequence: Synthetic oligonucleotide
  Target: SCNA; (-) strand; PAM type: NRG; PAM sequence: AAG
taatatacacacgtatataa

SEQ ID NO: 24100 - DNA, 20 bp, Artificial Sequence
  Description of Artificial Sequence: Synthetic oligonucleotide
  Target: SCNA; (-) strand; PAM type: NRG; PAM sequence: GAG
gttgtacagcatgatgtttt

SEQ ID NO: 24101 - DNA, 20 bp, Artificial Sequence
  Description of Artificial Sequence: Synthetic oligonucleotide
  Target: SCNA; (-) strand; PAM type: NRG; PAM sequence: CAG
ttgtatacatttaagttgta

SEQ ID NO: 24102 - DNA, 20 bp, Artificial Sequence
  Description of Artificial Sequence: Synthetic oligonucleotide
  Target: SCNA; (-) strand; PAM type: NRG; PAM sequence: AAG
atttttaattgtatacattt

SEQ ID NO: 24103 - DNA, 20 bp, Artificial Sequence
  Description of Artificial Sequence: Synthetic oligonucleotide
  Target: SCNA; (-) strand; PAM type: NRG; PAM sequence: TAG
atgtaggatgacttcaaact

SEQ ID NO: 24104 - DNA, 20 bp, Artificial Sequence
  Description of Artificial Sequence: Synthetic oligonucleotide
  Target: SCNA; (-) strand; PAM type: NRG; PAM sequence: AGG
aatgagatactgttaaatgt

SEQ ID NO: 24105 - DNA, 20 bp, Artificial Sequence
  Description of Artificial Sequence: Synthetic oligonucleotide
  Target: SCNA; (-) strand; PAM type: NRG; PAM sequence: TAG
taatgagatactgttaaatg

SEQ ID NO: 24106 - DNA, 20 bp, Artificial Sequence
  Description of Artificial Sequence: Synthetic oligonucleotide
  Target: SCNA; (-) strand; PAM type: NRG; PAM sequence: GAG
attttgctggtttcattaat

SEQ ID NO: 24107 - DNA, 20 bp, Artificial Sequence
  Description of Artificial Sequence: Synthetic oligonucleotide
  Target: SCNA; (-) strand; PAM type: NRG; PAM sequence: TGG
agatggcatgataattttgc

SEQ ID NO: 24108 - DNA, 20 bp, Artificial Sequence
  Description of Artificial Sequence: Synthetic oligonucleotide
  Target: SCNA; (-) strand; PAM type: NRG; PAM sequence: TGG
tattccttcacttgcaaaga

SEQ ID NO: 24109 - DNA, 20 bp, Artificial Sequence
  Description of Artificial Sequence: Synthetic oligonucleotide
  Target: SCNA; (-) strand; PAM type: NRG; PAM sequence: AAG
ttagtattccttcacttgca

SEQ ID NO: 24110 - DNA, 20 bp, Artificial Sequence
  Description of Artificial Sequence: Synthetic oligonucleotide
  Target: SCNA; (-) strand; PAM type: NRG; PAM sequence: TAG
catgtgctaacgtctattgt

SEQ ID NO: 24111 - DNA, 20 bp, Artificial Sequence
  Description of Artificial Sequence: Synthetic oligonucleotide
  Target: SCNA; (-) strand; PAM type: NRG; PAM sequence: GAG
ttctgtggactgcaacgtga

SEQ ID NO: 24112 - DNA, 20 bp, Artificial Sequence
  Description of Artificial Sequence: Synthetic oligonucleotide
  Target: SCNA; (-) strand; PAM type: NRG; PAM sequence: GAG
aattctgtggactgcaacgt

SEQ ID NO: 24113 - DNA, 20 bp, Artificial Sequence
  Description of Artificial Sequence: Synthetic oligonucleotide
  Target: SCNA; (-) strand; PAM type: NRG; PAM sequence: TGG
taacatagcttaaaattctg

SEQ ID NO: 24114 - DNA, 20 bp, Artificial Sequence
  Description of Artificial Sequence: Synthetic oligonucleotide
  Target: SCNA; (-) strand; PAM type: NRG; PAM sequence: TAG
tccttcataaatgtttaaca

SEQ ID NO: 24115 - DNA, 20 bp, Artificial Sequence
  Description of Artificial Sequence: Synthetic oligonucleotide
  Target: SCNA; (-) strand; PAM type: NRG; PAM sequence: AGG
atcacgttacaccaacaaat

SEQ ID NO: 24116 - DNA, 20 bp, Artificial Sequence
  Description of Artificial Sequence: Synthetic oligonucleotide
  Target: SCNA; (-) strand; PAM type: NRG; PAM sequence: TAG
catcacgttacaccaacaaa

SEQ ID NO: 24117 - DNA, 20 bp, Artificial Sequence
  Description of Artificial Sequence: Synthetic oligonucleotide
  Target: SCNA; (-) strand; PAM type: NRG; PAM sequence: TAG
gtattataggatgagtggga

SEQ ID NO: 24118 - DNA, 20 bp, Artificial Sequence
  Description of Artificial Sequence: Synthetic oligonucleotide
  Target: SCNA; (-) strand; PAM type: NRG; PAM sequence: GGG
aaatgtattataggatgagt

SEQ ID NO: 24119 - DNA, 20 bp, Artificial Sequence
  Description of Artificial Sequence: Synthetic oligonucleotide
  Target: SCNA; (-) strand; PAM type: NRG; PAM sequence: TGG
gaaatgtattataggatgag

SEQ ID NO: 24120 - DNA, 20 bp, Artificial Sequence
  Description of Artificial Sequence: Synthetic oligonucleotide
  Target: SCNA; (-) strand; PAM type: NRG; PAM sequence: GAG
aaagaaatgtattataggat

SEQ ID NO: 24121 - DNA, 20 bp, Artificial Sequence
  Description of Artificial Sequence: Synthetic oligonucleotide
  Target: SCNA; (-) strand; PAM type: NRG; PAM sequence: AGG
ttgtcaaagaaatgtattat

SEQ ID NO: 24122 - DNA, 20 bp, Artificial Sequence
  Description of Artificial Sequence: Synthetic oligonucleotide
  Target: SCNA; (-) strand; PAM type: NRG; PAM sequence: TAG
tttgtcaaagaaatgtatta

SEQ ID NO: 24123 - DNA, 20 bp, Artificial Sequence
  Description of Artificial Sequence: Synthetic oligonucleotide
  Target: SCNA; (-) strand; PAM type: NRG; PAM sequence: AAG
gatgatagttttgtttgtca

SEQ ID NO: 24124 - DNA, 20 bp, Artificial Sequence
  Description of Artificial Sequence: Synthetic oligonucleotide
  Target: SCNA; (-) strand; PAM type: NRG; PAM sequence: TAG
caaagaactgattgcgatga

SEQ ID NO: 24125 - DNA, 20 bp, Artificial Sequence
  Description of Artificial Sequence: Synthetic oligonucleotide
  Target: SCNA; (-) strand; PAM type: NRG; PAM sequence: AAG
acatccaattttaatattca

SEQ ID NO: 24126 - DNA, 20 bp, Artificial Sequence
  Description of Artificial Sequence: Synthetic oligonucleotide
  Target: SCNA; (-) strand; PAM type: NRG; PAM sequence: AAG
atcagtggttaatagtctgt

SEQ ID NO: 24127 - DNA, 20 bp, Artificial Sequence
  Description of Artificial Sequence: Synthetic oligonucleotide
  Target: SCNA; (-) strand; PAM type: NRG; PAM sequence: TAG
atcttaggatcagtggttaa

SEQ ID NO: 24128 - DNA, 20 bp, Artificial Sequence
  Description of Artificial Sequence: Synthetic oligonucleotide
  Target: SCNA; (-) strand; PAM type: NRG; PAM sequence: TGG
cacccaaatcttaggatcag

SEQ ID NO: 24129 - DNA, 20 bp, Artificial Sequence
  Description of Artificial Sequence: Synthetic oligonucleotide
  Target: SCNA; (-) strand; PAM type: NRG; PAM sequence: CAG
ttccacccaaatcttaggat

SEQ ID NO: 24130 - DNA, 20 bp, Artificial Sequence
  Description of Artificial Sequence: Synthetic oligonucleotide
  Target: SCNA; (-) strand; PAM type: NRG; PAM sequence: AGG
aatacttccacccaaatctt

SEQ ID NO: 24131 - DNA, 20 bp, Artificial Sequence
  Description of Artificial Sequence: Synthetic oligonucleotide
  Target: SCNA; (-) strand; PAM type: NRG; PAM sequence: TAG
aaatacttccacccaaatct

SEQ ID NO: 24132 - DNA, 20 bp, Artificial Sequence
  Description of Artificial Sequence: Synthetic oligonucleotide
  Target: SCNA; (-) strand; PAM type: NRG; PAM sequence: GAG
attttagctgcttagatata

SEQ ID NO: 24133 - DNA, 20 bp, Artificial Sequence
  Description of Artificial Sequence: Synthetic oligonucleotide
  Target: SCNA; (-) strand; PAM type: NRG; PAM sequence: TAG
atattttagctgcttagata

SEQ ID NO: 24134 - DNA, 20 bp, Artificial Sequence
  Description of Artificial Sequence: Synthetic oligonucleotide
  Target: SCNA; (-) strand; PAM type: NRG; PAM sequence: TAG
gccatgatattttagctgct

SEQ ID NO: 24135 - DNA, 20 bp, Artificial Sequence
  Description of Artificial Sequence: Synthetic oligonucleotide
  Target: SCNA; (-) strand; PAM type: NRG; PAM sequence: TAG
agatagtagccatgatattt

SEQ ID NO: 24136 - DNA, 20 bp, Artificial Sequence
  Description of Artificial Sequence: Synthetic oligonucleotide
  Target: SCNA; (-) strand; PAM type: NRG; PAM sequence: TAG
tcacatacacgcacagatag

SEQ ID NO: 24137 - DNA, 20 bp, Artificial Sequence
  Description of Artificial Sequence: Synthetic oligonucleotide
  Target: SCNA; (-) strand; PAM type: NRG; PAM sequence: TAG
acctcacatacacgcacaga

SEQ ID NO: 24138 - DNA, 20 bp, Artificial Sequence
  Description of Artificial Sequence: Synthetic oligonucleotide
  Target: SCNA; (-) strand; PAM type: NRG; PAM sequence: CAG
aattacctcacatacacgca

SEQ ID NO: 24139 - DNA, 20 bp, Artificial Sequence
  Description of Artificial Sequence: Synthetic oligonucleotide
  Target: SCNA; (-) strand; PAM type: NRG; PAM sequence: TAG
ttaaattgtgtttttgtcag

SEQ ID NO: 24140 - DNA, 20 bp, Artificial Sequence
  Description of Artificial Sequence: Synthetic oligonucleotide
  Target: SCNA; (-) strand; PAM type: NRG; PAM sequence: CAG
acattaaattgtgtttttgt

SEQ ID NO: 24141 - DNA, 20 bp, Artificial Sequence
  Description of Artificial Sequence: Synthetic oligonucleotide
  Target: SCNA; (-) strand; PAM type: NRG; PAM sequence: AGG
atttatcttagaaatgagag

SEQ ID NO: 24142 - DNA, 20 bp, Artificial Sequence
  Description of Artificial Sequence: Synthetic oligonucleotide
  Target: SCNA; (-) strand; PAM type: NRG; PAM sequence: GAG
gatttatcttagaaatgaga

SEQ ID NO: 24143 - DNA, 20 bp, Artificial Sequence
  Description of Artificial Sequence: Synthetic oligonucleotide
  Target: SCNA; (-) strand; PAM type: NRG; PAM sequence: GAG
gagatttatcttagaaatga

SEQ ID NO: 24144 - DNA, 20 bp, Artificial Sequence
  Description of Artificial Sequence: Synthetic oligonucleotide
  Target: SCNA; (-) strand; PAM type: NRG; PAM sequence: GAG
aagagatttatcttagaaat

SEQ ID NO: 24145 - DNA, 20 bp, Artificial Sequence
  Description of Artificial Sequence: Synthetic oligonucleotide
  Target: SCNA; (-) strand; PAM type: NRG; PAM sequence: TAG
ggaaaaaaagagatttatct

SEQ ID NO: 24146 - DNA, 20 bp, Artificial Sequence
  Description of Artificial Sequence: Synthetic oligonucleotide
  Target: SCNA; (-) strand; PAM type: NRG; PAM sequence: GAG
atatccatcatggaaaaaaa

SEQ ID NO: 24147 - DNA, 20 bp, Artificial Sequence
  Description of Artificial Sequence: Synthetic oligonucleotide
  Target: SCNA; (-) strand; PAM type: NRG; PAM sequence: AAG
atatatccatcatggaaaaa

SEQ ID NO: 24148 - DNA, 20 bp, Artificial Sequence
  Description of Artificial Sequence: Synthetic oligonucleotide
  Target: SCNA; (-) strand; PAM type: NRG; PAM sequence: TGG
ttacaagtatatatccatca

SEQ ID NO: 24149 - DNA, 20 bp, Artificial Sequence
  Description of Artificial Sequence: Synthetic oligonucleotide
  Target: SCNA; (-) strand; PAM type: NRG; PAM sequence: AAG
agaacaatatggtttgttac

SEQ ID NO: 24150 - DNA, 20 bp, Artificial Sequence
  Description of Artificial Sequence: Synthetic oligonucleotide
  Target: SCNA; (-) strand; PAM type: NRG; PAM sequence: TGG
tgtggtctctgagaacaata

SEQ ID NO: 24151 - DNA, 20 bp, Artificial Sequence
  Description of Artificial Sequence: Synthetic oligonucleotide
  Target: SCNA; (-) strand; PAM type: NRG; PAM sequence: GAG
agggagcagctgtggtctct

SEQ ID NO: 24152 - DNA, 20 bp, Artificial Sequence
  Description of Artificial Sequence: Synthetic oligonucleotide
  Target: SCNA; (-) strand; PAM type: NRG; PAM sequence: TGG
tgggaaaaagggagcagctg

SEQ ID NO: 24153 - DNA, 20 bp, Artificial Sequence
  Description of Artificial Sequence: Synthetic oligonucleotide
  Target: SCNA; (-) strand; PAM type: NRG; PAM sequence: CAG
ttaccctgggaaaaagggag

SEQ ID NO: 24154 - DNA, 20 bp, Artificial Sequence
  Description of Artificial Sequence: Synthetic oligonucleotide
  Target: SCNA; (-) strand; PAM type: NRG; PAM sequence: GAG
tatttaccctgggaaaaagg

SEQ ID NO: 24155 - DNA, 20 bp, Artificial Sequence
  Description of Artificial Sequence: Synthetic oligonucleotide
  Target: SCNA; (-) strand; PAM type: NRG; PAM sequence: GGG
catatttaccctgggaaaaa

SEQ ID NO: 24156 - DNA, 20 bp, Artificial Sequence
  Description of Artificial Sequence: Synthetic oligonucleotide
  Target: SCNA; (-) strand; PAM type: NRG; PAM sequence: AGG
acatatttaccctgggaaaa

SEQ ID NO: 24157 - DNA, 20 bp, Artificial Sequence
  Description of Artificial Sequence: Synthetic oligonucleotide
  Target: SCNA; (-) strand; PAM type: NRG; PAM sequence: AAG
gacatatttaccctgggaaa

SEQ ID NO: 24158 - DNA, 20 bp, Artificial Sequence
  Description of Artificial Sequence: Synthetic oligonucleotide
  Target: SCNA; (-) strand; PAM type: NRG; PAM sequence: GGG
gagactgacatatttaccct

SEQ ID NO: 24159 - DNA, 20 bp, Artificial Sequence
  Description of Artificial Sequence: Synthetic oligonucleotide
  Target: SCNA; (-) strand; PAM type: NRG; PAM sequence: TGG
ggagactgacatatttaccc

SEQ ID NO: 24160 - DNA, 20 bp, Artificial Sequence
  Description of Artificial Sequence: Synthetic oligonucleotide
  Target: SCNA; (-) strand; PAM type: NRG; PAM sequence: GAG
aaatgggcagttcaggccgg

SEQ ID NO: 24161 - DNA, 20 bp, Artificial Sequence
  Description of Artificial Sequence: Synthetic oligonucleotide
  Target: SCNA; (-) strand; PAM type: NRG; PAM sequence: GGG
agaaatgggcagttcaggcc

SEQ ID NO: 24162 - DNA, 20 bp, Artificial Sequence
  Description of Artificial Sequence: Synthetic oligonucleotide
  Target: SCNA; (-) strand; PAM type: NRG; PAM sequence: CGG
aagaaatgggcagttcaggc

SEQ ID NO: 24163 - DNA, 20 bp, Artificial Sequence
  Description of Artificial Sequence: Synthetic oligonucleotide
  Target: SCNA; (-) strand; PAM type: NRG; PAM sequence: AGG
cttcaagaaatgggcagttc

SEQ ID NO: 24164 - DNA, 20 bp, Artificial Sequence
  Description of Artificial Sequence: Synthetic oligonucleotide
  Target: SCNA; (-) strand; PAM type: NRG; PAM sequence: CAG
ccttcaagaaatgggcagtt

SEQ ID NO: 24165 - DNA, 20 bp, Artificial Sequence
  Description of Artificial Sequence: Synthetic oligonucleotide
  Target: SCNA; (-) strand; PAM type: NRG; PAM sequence: CAG
tcctgccttcaagaaatggg

SEQ ID NO: 24166 - DNA, 20 bp, Artificial Sequence
  Description of Artificial Sequence: Synthetic oligonucleotide
  Target: SCNA; (-) strand; PAM type: NRG; PAM sequence: GGG
ggctcctgccttcaagaaat

SEQ ID NO: 24167 - DNA, 20 bp, Artificial Sequence
  Description of Artificial Sequence: Synthetic oligonucleotide
  Target: SCNA; (-) strand; PAM type: NRG; PAM sequence: TGG
tggctcctgccttcaagaaa

SEQ ID NO: 24168 - DNA, 20 bp, Artificial Sequence
  Description of Artificial Sequence: Synthetic oligonucleotide
  Target: SCNA; (-) strand; PAM type: NRG; PAM sequence: AAG
tatgggtggctcctgccttc

SEQ ID NO: 24169 - DNA, 20 bp, Artificial Sequence
  Description of Artificial Sequence: Synthetic oligonucleotide
  Target: SCNA; (-) strand; PAM type: NRG; PAM sequence: TGG
aaaactgagtaacatatggg

SEQ ID NO: 24170 - DNA, 20 bp, Artificial Sequence
  Description of Artificial Sequence: Synthetic oligonucleotide
  Target: SCNA; (-) strand; PAM type: NRG; PAM sequence: GGG
tacaaaactgagtaacatat

SEQ ID NO: 24171 - DNA, 20 bp, Artificial Sequence
  Description of Artificial Sequence: Synthetic oligonucleotide
  Target: SCNA; (-) strand; PAM type: NRG; PAM sequence: TGG
atacaaaactgagtaacata

SEQ ID NO: 24172 - DNA, 20 bp, Artificial Sequence
  Description of Artificial Sequence: Synthetic oligonucleotide
  Target: SCNA; (-) strand; PAM type: NRG; PAM sequence: GAG
accatgagaaatacaaaact

SEQ ID NO: 24173 - DNA, 20 bp, Artificial Sequence
  Description of Artificial Sequence: Synthetic oligonucleotide
  Target: SCNA; (-) strand; PAM type: NRG; PAM sequence: GAG
gacactcagctgggcaccat

SEQ ID NO: 24174 - DNA, 20 bp, Artificial Sequence
  Description of Artificial Sequence: Synthetic oligonucleotide
  Target: SCNA; (-) strand; PAM type: NRG; PAM sequence: GGG
tatgtgccagacactcagct

SEQ ID NO: 24175 - DNA, 20 bp, Artificial Sequence
  Description of Artificial Sequence: Synthetic oligonucleotide
  Target: SCNA; (-) strand; PAM type: NRG; PAM sequence: TGG
atatgtgccagacactcagc

SEQ ID NO: 24176 - DNA, 20 bp, Artificial Sequence
  Description of Artificial Sequence: Synthetic oligonucleotide
  Target: SCNA; (-) strand; PAM type: NRG; PAM sequence: CAG
cttaatatgtgccagacact

SEQ ID NO: 24177 - DNA, 20 bp, Artificial Sequence
  Description of Artificial Sequence: Synthetic oligonucleotide
  Target: SCNA; (-) strand; PAM type: NRG; PAM sequence: CAG
actgagtacttaatatgtgc

SEQ ID NO: 24178 - DNA, 20 bp, Artificial Sequence
  Description of Artificial Sequence: Synthetic oligonucleotide
  Target: SCNA; (-) strand; PAM type: NRG; PAM sequence: GAG
ttcattaaaaatcattaact

SEQ ID NO: 24179 - DNA, 20 bp, Artificial Sequence
  Description of Artificial Sequence: Synthetic oligonucleotide
  Target: SCNA; (-) strand; PAM type: NRG; PAM sequence: AGG
tataaaattataaggaaaat

SEQ ID NO: 24180 - DNA, 20 bp, Artificial Sequence
  Description of Artificial Sequence: Synthetic oligonucleotide
  Target: SCNA; (-) strand; PAM type: NRG; PAM sequence: TAG
gtataaaattataaggaaaa

SEQ ID NO: 24181 - DNA, 20 bp, Artificial Sequence
  Description of Artificial Sequence: Synthetic oligonucleotide
  Target: SCNA; (-) strand; PAM type: NRG; PAM sequence: AGG
taattatgtataaaattata

SEQ ID NO: 24182 - DNA, 20 bp, Artificial Sequence
  Description of Artificial Sequence: Synthetic oligonucleotide
  Target: SCNA; (-) strand; PAM type: NRG; PAM sequence: AAG
gtaattatgtataaaattat

SEQ ID NO: 24183 - DNA, 20 bp, Artificial Sequence
  Description of Artificial Sequence: Synthetic oligonucleotide
  Target: SCNA; (-) strand; PAM type: NRG; PAM sequence: AAG
ctgtaaggttctaggtggga

SEQ ID NO: 24184 - DNA, 20 bp, Artificial Sequence
  Description of Artificial Sequence: Synthetic oligonucleotide
  Target: SCNA; (-) strand; PAM type: NRG; PAM sequence: GGG
aatcctgtaaggttctaggt

SEQ ID NO: 24185 - DNA, 20 bp, Artificial Sequence
  Description of Artificial Sequence: Synthetic oligonucleotide
  Target: SCNA; (-) strand; PAM type: NRG; PAM sequence: TGG
taatcctgtaaggttctagg

SEQ ID NO: 24186 - DNA, 20 bp, Artificial Sequence
  Description of Artificial Sequence: Synthetic oligonucleotide
  Target: SCNA; (-) strand; PAM type: NRG; PAM sequence: AGG
ccttaatcctgtaaggttct

SEQ ID NO: 24187 - DNA, 20 bp, Artificial Sequence
  Description of Artificial Sequence: Synthetic oligonucleotide
  Target: SCNA; (-) strand; PAM type: NRG; PAM sequence: TAG
cccttaatcctgtaaggttc

SEQ ID NO: 24188 - DNA, 20 bp, Artificial Sequence
  Description of Artificial Sequence: Synthetic oligonucleotide
  Target: SCNA; (-) strand; PAM type: NRG; PAM sequence: AGG
taatgacccttaatcctgta

SEQ ID NO: 24189 - DNA, 20 bp, Artificial Sequence
  Description of Artificial Sequence: Synthetic oligonucleotide
  Target: SCNA; (-) strand; PAM type: NRG; PAM sequence: AAG
ctaatgacccttaatcctgt

SEQ ID NO: 24190 - DNA, 20 bp, Artificial Sequence
  Description of Artificial Sequence: Synthetic oligonucleotide
  Target: SCNA; (-) strand; PAM type: NRG; PAM sequence: TAG
ctgggttcaagatggatgaa

SEQ ID NO: 24191 - DNA, 20 bp, Artificial Sequence
  Description of Artificial Sequence: Synthetic oligonucleotide
  Target: SCNA; (-) strand; PAM type: NRG; PAM sequence: TGG
aaatttcactgggttcaaga

SEQ ID NO: 24192 - DNA, 20 bp, Artificial Sequence
  Description of Artificial Sequence: Synthetic oligonucleotide
  Target: SCNA; (-) strand; PAM type: NRG; PAM sequence: AAG
gacaaaatttcactgggttc

SEQ ID NO: 24193 - DNA, 20 bp, Artificial Sequence
  Description of Artificial Sequence: Synthetic oligonucleotide
  Target: SCNA; (-) strand; PAM type: NRG; PAM sequence: GGG
gtatctgacaaaatttcact

SEQ ID NO: 24194 - DNA, 20 bp, Artificial Sequence
  Description of Artificial Sequence: Synthetic oligonucleotide
  Target: SCNA; (-) strand; PAM type: NRG; PAM sequence: TGG
tgtatctgacaaaatttcac

SEQ ID NO: 24195 - DNA, 20 bp, Artificial Sequence
  Description of Artificial Sequence: Synthetic oligonucleotide
  Target: SCNA; (-) strand; PAM type: NRG; PAM sequence: TGG
acttagaaacacaattatta

SEQ ID NO: 24196 - DNA, 20 bp, Artificial Sequence
  Description of Artificial Sequence: Synthetic oligonucleotide
  Target: SCNA; (-) strand; PAM type: NRG; PAM sequence: TAG
gtacataaactgtccccact

SEQ ID NO: 24197 - DNA, 20 bp, Artificial Sequence
  Description of Artificial Sequence: Synthetic oligonucleotide
  Target: SCNA; (-) strand; PAM type: NRG; PAM sequence: TGG
ctcatatgagagcccactaa

SEQ ID NO: 24198 - DNA, 20 bp, Artificial Sequence
  Description of Artificial Sequence: Synthetic oligonucleotide
  Target: SCNA; (-) strand; PAM type: NRG; PAM sequence: GAG
ggtatttctcactcatatga

SEQ ID NO: 24199 - DNA, 20 bp, Artificial Sequence
  Description of Artificial Sequence: Synthetic oligonucleotide
  Target: SCNA; (-) strand; PAM type: NRG; PAM sequence: GAG
ttggtatttctcactcatat

SEQ ID NO: 24200 - DNA, 20 bp, Artificial Sequence
  Description of Artificial Sequence: Synthetic oligonucleotide
  Target: SCNA; (-) strand; PAM type: NRG; PAM sequence: TGG
gcaatgtggtatgtaaaagt

SEQ ID NO: 24201 - DNA, 20 bp, Artificial Sequence
  Description of Artificial Sequence: Synthetic oligonucleotide
  Target: SCNA; (-) strand; PAM type: NRG; PAM sequence: AAG
ttttgcaatgtggtatgtaa

SEQ ID NO: 24202 - DNA, 20 bp, Artificial Sequence
  Description of Artificial Sequence: Synthetic oligonucleotide
  Target: SCNA; (-) strand; PAM type: NRG; PAM sequence: TGG
aacagtgacattttgcaatg

SEQ ID NO: 24203 - DNA, 20 bp, Artificial Sequence
  Description of Artificial Sequence: Synthetic oligonucleotide
  Target: SCNA; (-) strand; PAM type: NRG; PAM sequence: CAG
ttgtttctaaaggtatgtaa

SEQ ID NO: 24204 - DNA, 20 bp, Artificial Sequence
  Description of Artificial Sequence: Synthetic oligonucleotide
  Target: SCNA; (-) strand; PAM type: NRG; PAM sequence: AGG
taagattgatttgtttctaa

SEQ ID NO: 24205 - DNA, 20 bp, Artificial Sequence
  Description of Artificial Sequence: Synthetic oligonucleotide
  Target: SCNA; (-) strand; PAM type: NRG; PAM sequence: AAG
ttaagattgatttgtttcta

SEQ ID NO: 24206 - DNA, 20 bp, Artificial Sequence
  Description of Artificial Sequence: Synthetic oligonucleotide
  Target: SCNA; (-) strand; PAM type: NRG; PAM sequence: AAG
tgattattaaagaaaaattt

SEQ ID NO: 24207 - DNA, 20 bp, Artificial Sequence
  Description of Artificial Sequence: Synthetic oligonucleotide
  Target: SCNA; (-) strand; PAM type: NRG; PAM sequence: AAG
aaagcatactgtgattatta

SEQ ID NO: 24208 - DNA, 20 bp, Artificial Sequence
  Description of Artificial Sequence: Synthetic oligonucleotide
  Target: SCNA; (-) strand; PAM type: NRG; PAM sequence: AAG
ggcactataatcttagatta

SEQ ID NO: 24209 - DNA, 20 bp, Artificial Sequence
  Description of Artificial Sequence: Synthetic oligonucleotide
  Target: SCNA; (-) strand; PAM type: NRG; PAM sequence: TAG
tattactggcactataatct

SEQ ID NO: 24210 - DNA, 20 bp, Artificial Sequence
  Description of Artificial Sequence: Synthetic oligonucleotide
  Target: SCNA; (-) strand; PAM type: NRG; PAM sequence: TGG
cgagtggcatatactattac

SEQ ID NO: 24211 - DNA, 20 bp, Artificial Sequence
  Description of Artificial Sequence: Synthetic oligonucleotide
  Target: SCNA; (-) strand; PAM type: NRG; PAM sequence: TGG
atttgtatttgtgtttcgag

SEQ ID NO: 24212 - DNA, 20 bp, Artificial Sequence
  Description of Artificial Sequence: Synthetic oligonucleotide
  Target: SCNA; (-) strand; PAM type: NRG; PAM sequence: GAG
ctgatttgtatttgtgtttc

SEQ ID NO: 24213 - DNA, 20 bp, Artificial Sequence
  Description of Artificial Sequence: Synthetic oligonucleotide
  Target: SCNA; (-) strand; PAM type: NRG; PAM sequence: GAG
agacctaaattaaaagcttt

SEQ ID NO: 24214 - DNA, 20 bp, Artificial Sequence
  Description of Artificial Sequence: Synthetic oligonucleotide
  Target: SCNA; (-) strand; PAM type: NRG; PAM sequence: AAG
tatatttagacctaaattaa

SEQ ID NO: 24215 - DNA, 20 bp, Artificial Sequence
  Description of Artificial Sequence: Synthetic oligonucleotide
  Target: SCNA; (-) strand; PAM type: NRG; PAM sequence: TAG
agatgactattaggtatatt

SEQ ID NO: 24216 - DNA, 20 bp, Artificial Sequence
  Description of Artificial Sequence: Synthetic oligonucleotide
  Target: SCNA; (-) strand; PAM type: NRG; PAM sequence: AGG
aagataaccagatgactatt

SEQ ID NO: 24217 - DNA, 20 bp, Artificial Sequence
  Description of Artificial Sequence: Synthetic oligonucleotide
  Target: SCNA; (-) strand; PAM type: NRG; PAM sequence: TAG
gaagataaccagatgactat

SEQ ID NO: 24218 - DNA, 20 bp, Artificial Sequence
  Description of Artificial Sequence: Synthetic oligonucleotide
  Target: SCNA; (-) strand; PAM type: NRG; PAM sequence: CAG
gcttgacttcagaagataac

SEQ ID NO: 24219 - DNA, 20 bp, Artificial Sequence
  Description of Artificial Sequence: Synthetic oligonucleotide
  Target: SCNA; (-) strand; PAM type: NRG; PAM sequence: AAG
gtccttgtgcttgacttcag

SEQ ID NO: 24220 - DNA, 20 bp, Artificial Sequence
  Description of Artificial Sequence: Synthetic oligonucleotide
  Target: SCNA; (-) strand; PAM type: NRG; PAM sequence: CAG
cttgtccttgtgcttgactt

SEQ ID NO: 24221 - DNA, 20 bp, Artificial Sequence
  Description of Artificial Sequence: Synthetic oligonucleotide
  Target: SCNA; (-) strand; PAM type: NRG; PAM sequence: TGG
gcctcaaataattaaaagtt

SEQ ID NO: 24222 - DNA, 20 bp, Artificial Sequence
  Description of Artificial Sequence: Synthetic oligonucleotide
  Target: SCNA; (-) strand; PAM type: NRG; PAM sequence: AAG
acattgcctcaaataattaa

SEQ ID NO: 24223 - DNA, 20 bp, Artificial Sequence
  Description of Artificial Sequence: Synthetic oligonucleotide
  Target: SCNA; (-) strand; PAM type: NRG; PAM sequence: AAG
ttatagtaagctttcccctt

SEQ ID NO: 24224 - DNA, 20 bp, Artificial Sequence
  Description of Artificial Sequence: Synthetic oligonucleotide
  Target: SCNA; (-) strand; PAM type: NRG; PAM sequence: AAG
gaaatattttaatttatagt

SEQ ID NO: 24225 - DNA, 20 bp, Artificial Sequence
  Description of Artificial Sequence: Synthetic oligonucleotide
  Target: SCNA; (-) strand; PAM type: NRG; PAM sequence: TAG
tggagaaatattttaattta

SEQ ID NO: 24226 - DNA, 20 bp, Artificial Sequence
  Description of Artificial Sequence: Synthetic oligonucleotide
  Target: SCNA; (-) strand; PAM type: NRG; PAM sequence: GAG
aataagagatgtcaggactg

SEQ ID NO: 24227 - DNA, 20 bp, Artificial Sequence
  Description of Artificial Sequence: Synthetic oligonucleotide
  Target: SCNA; (-) strand; PAM type: NRG; PAM sequence: TGG
gtaataagagatgtcaggac

SEQ ID NO: 24228 - DNA, 20 bp, Artificial Sequence
  Description of Artificial Sequence: Synthetic oligonucleotide
  Target: SCNA; (-) strand; PAM type: NRG; PAM sequence: AGG
aggtagtaataagagatgtc

SEQ ID NO: 24229 - DNA, 20 bp, Artificial Sequence
  Description of Artificial Sequence: Synthetic oligonucleotide
  Target: SCNA; (-) strand; PAM type: NRG; PAM sequence: CAG
aaggtagtaataagagatgt

SEQ ID NO: 24230 - DNA, 20 bp, Artificial Sequence
  Description of Artificial Sequence: Synthetic oligonucleotide
  Target: SCNA; (-) strand; PAM type: NRG; PAM sequence: GAG
ttataacaaggtagtaataa

SEQ ID NO: 24231 - DNA, 20 bp, Artificial Sequence
  Description of Artificial Sequence: Synthetic oligonucleotide
  Target: SCNA; (-) strand; PAM type: NRG; PAM sequence: AAG
ttttataacaaggtagtaat

SEQ ID NO: 24232 - DNA, 20 bp, Artificial Sequence
  Description of Artificial Sequence: Synthetic oligonucleotide
  Target: SCNA; (-) strand; PAM type: NRG; PAM sequence: TAG
aaaataattttataacaagg

SEQ ID NO: 24233 - DNA, 20 bp, Artificial Sequence
  Description of Artificial Sequence: Synthetic oligonucleotide
  Target: SCNA; (-) strand; PAM type: NRG; PAM sequence: AGG
cttaaaataattttataaca

SEQ ID NO: 24234 - DNA, 20 bp, Artificial Sequence
  Description of Artificial Sequence: Synthetic oligonucleotide
  Target: SCNA; (-) strand; PAM type: NRG; PAM sequence: AAG
tcttaaaataattttataac

SEQ ID NO: 24235 - DNA, 20 bp, Artificial Sequence
  Description of Artificial Sequence: Synthetic oligonucleotide
  Target: SCNA; (-) strand; PAM type: NRG; PAM sequence: AGG
aagaagcacacacaggtcac

SEQ ID NO: 24236 - DNA, 20 bp, Artificial Sequence
  Description of Artificial Sequence: Synthetic oligonucleotide
  Target: SCNA; (-) strand; PAM type: NRG; PAM sequence: CAG
gaagaagcacacacaggtca

SEQ ID NO: 24237 - DNA, 20 bp, Artificial Sequence
  Description of Artificial Sequence: Synthetic oligonucleotide
  Target: SCNA; (-) strand; PAM type: NRG; PAM sequence: AGG
ttctttgaagaagcacacac

SEQ ID NO: 24238 - DNA, 20 bp, Artificial Sequence
  Description of Artificial Sequence: Synthetic oligonucleotide
  Target: SCNA; (-) strand; PAM type: NRG; PAM sequence: CAG
tttctttgaagaagcacaca

SEQ ID NO: 24239 - DNA, 20 bp, Artificial Sequence
  Description of Artificial Sequence: Synthetic oligonucleotide
  Target: SCNA; (-) strand; PAM type: NRG; PAM sequence: AAG
catttcagatttctttgaag

SEQ ID NO: 24240 - DNA, 20 bp, Artificial Sequence
  Description of Artificial Sequence: Synthetic oligonucleotide
  Target: SCNA; (-) strand; PAM type: NRG; PAM sequence: AAG
caacatttcagatttctttg

SEQ ID NO: 24241 - DNA, 20 bp, Artificial Sequence
  Description of Artificial Sequence: Synthetic oligonucleotide
  Target: SCNA; (-) strand; PAM type: NRG; PAM sequence: CAG
acaggtcacaggcaacattt

SEQ ID NO: 24242 - DNA, 20 bp, Artificial Sequence
  Description of Artificial Sequence: Synthetic oligonucleotide
  Target: SCNA; (-) strand; PAM type: NRG; PAM sequence: AGG
cacaaacaagcacaggtcac

SEQ ID NO: 24243 - DNA, 20 bp, Artificial Sequence
  Description of Artificial Sequence: Synthetic oligonucleotide
  Target: SCNA; (-) strand; PAM type: NRG; PAM sequence: CAG
tcacaaacaagcacaggtca

SEQ ID NO: 24244 - DNA, 20 bp, Artificial Sequence
  Description of Artificial Sequence: Synthetic oligonucleotide
  Target: SCNA; (-) strand; PAM type: NRG; PAM sequence: AGG
ttgatttcacaaacaagcac

SEQ ID NO: 24245 - DNA, 20 bp, Artificial Sequence
  Description of Artificial Sequence: Synthetic oligonucleotide
  Target: SCNA; (-) strand; PAM type: NRG; PAM sequence: CAG
gttgatttcacaaacaagca

SEQ ID NO: 24246 - DNA, 20 bp, Artificial Sequence
  Description of Artificial Sequence: Synthetic oligonucleotide
  Target: SCNA; (-) strand; PAM type: NRG; PAM sequence: AAG
ttaatgttgatttcacaaac

SEQ ID NO: 24247 - DNA, 20 bp, Artificial Sequence
  Description of Artificial Sequence: Synthetic oligonucleotide
  Target: SCNA; (-) strand; PAM type: NRG; PAM sequence: CAG
cagatgatgtatgttgccat

SEQ ID NO: 24248 - DNA, 20 bp, Artificial Sequence
  Description of Artificial Sequence: Synthetic oligonucleotide
  Target: SCNA; (-) strand; PAM type: NRG; PAM sequence: CAG
cctctgattaaatgattaat

SEQ ID NO: 24249 - DNA, 20 bp, Artificial Sequence
  Description of Artificial Sequence: Synthetic oligonucleotide
  Target: SCNA; (-) strand; PAM type: NRG; PAM sequence: TGG
ttttaaacacttgagtgtta

SEQ ID NO: 24250 - DNA, 20 bp, Artificial Sequence
  Description of Artificial Sequence: Synthetic oligonucleotide
  Target: SCNA; (-) strand; PAM type: NRG; PAM sequence: GAG
aaatttatttttaaacactt

SEQ ID NO: 24251 - DNA, 20 bp, Artificial Sequence
  Description of Artificial Sequence: Synthetic oligonucleotide
  Target: SCNA; (-) strand; PAM type: NRG; PAM sequence: GGG
cttactatggctgtcatgtt

SEQ ID NO: 24252 - DNA, 20 bp, Artificial Sequence
  Description of Artificial Sequence: Synthetic oligonucleotide
  Target: SCNA; (-) strand; PAM type: NRG; PAM sequence: TGG
acttactatggctgtcatgt

SEQ ID NO: 24253 - DNA, 20 bp, Artificial Sequence
  Description of Artificial Sequence: Synthetic oligonucleotide
  Target: SCNA; (-) strand; PAM type: NRG; PAM sequence: TGG
tcatttcctttgacttacta

SEQ ID NO: 24254 - DNA, 20 bp, Artificial Sequence
  Description of Artificial Sequence: Synthetic oligonucleotide
  Target: SCNA; (-) strand; PAM type: NRG; PAM sequence: AAG
acattgtgaatataatatct

SEQ ID NO: 24255 - DNA, 20 bp, Artificial Sequence
  Description of Artificial Sequence: Synthetic oligonucleotide
  Target: SCNA; (-) strand; PAM type: NRG; PAM sequence: AGG
aaagcaggttttaaaatgtc

SEQ ID NO: 24256 - DNA, 20 bp, Artificial Sequence
  Description of Artificial Sequence: Synthetic oligonucleotide
  Target: SCNA; (-) strand; PAM type: NRG; PAM sequence: CAG
aaaagcaggttttaaaatgt

SEQ ID NO: 24257 - DNA, 20 bp, Artificial Sequence
  Description of Artificial Sequence: Synthetic oligonucleotide
  Target: SCNA; (-) strand; PAM type: NRG; PAM sequence: AGG
tagatgaataaaaaaaaagc

SEQ ID NO: 24258 - DNA, 20 bp, Artificial Sequence
  Description of Artificial Sequence: Synthetic oligonucleotide
  Target: SCNA; (-) strand; PAM type: NRG; PAM sequence: CAG
ctagatgaataaaaaaaaag

SEQ ID NO: 24259 - DNA, 20 bp, Artificial Sequence
  Description of Artificial Sequence: Synthetic oligonucleotide
  Target: SCNA; (-) strand; PAM type: NRG; PAM sequence: AAG
gtgctagatgaataaaaaaa

SEQ ID NO: 24260 - DNA, 20 bp, Artificial Sequence
  Description of Artificial Sequence: Synthetic oligonucleotide
  Target: SCNA; (-) strand; PAM type: NRG; PAM sequence: TAG
atagctagccagttgtgtgc

SEQ ID NO: 24261 - DNA, 20 bp, Artificial Sequence
  Description of Artificial Sequence: Synthetic oligonucleotide
  Target: SCNA; (-) strand; PAM type: NRG; PAM sequence: CAG
ttcataaaaggatagctagc

SEQ ID NO: 24262 - DNA, 20 bp, Artificial Sequence
  Description of Artificial Sequence: Synthetic oligonucleotide
  Target: SCNA; (-) strand; PAM type: NRG; PAM sequence: TAG
ttaattcataaaaggatagc

SEQ ID NO: 24263 - DNA, 20 bp, Artificial Sequence
  Description of Artificial Sequence: Synthetic oligonucleotide
  Target: SCNA; (-) strand; PAM type: NRG; PAM sequence: TAG
tgacttaattcataaaagga

SEQ ID NO: 24264 - DNA, 20 bp, Artificial Sequence
  Description of Artificial Sequence: Synthetic oligonucleotide
  Target: SCNA; (-) strand; PAM type: NRG; PAM sequence: AGG
atcctgacttaattcataaa

SEQ ID NO: 24265 - DNA, 20 bp, Artificial Sequence
  Description of Artificial Sequence: Synthetic oligonucleotide
  Target: SCNA; (-) strand; PAM type: NRG; PAM sequence: AAG
aatcctgacttaattcataa

SEQ ID NO: 24266 - DNA, 20 bp, Artificial Sequence
  Description of Artificial Sequence: Synthetic oligonucleotide
  Target: SCNA; (-) strand; PAM type: NRG; PAM sequence: TGG
ttttaaatcttgatttcaaa

SEQ ID NO: 24267 - DNA, 20 bp, Artificial Sequence
  Description of Artificial Sequence: Synthetic oligonucleotide
  Target: SCNA; (-) strand; PAM type: NRG; PAM sequence: TGG
gttcctaagcaatgccattt

SEQ ID NO: 24268 - DNA, 20 bp, Artificial Sequence
  Description of Artificial Sequence: Synthetic oligonucleotide
  Target: SCNA; (-) strand; PAM type: NRG; PAM sequence: AAG
aaaatcagaatgaagttcct

SEQ ID NO: 24269 - DNA, 20 bp, Artificial Sequence
  Description of Artificial Sequence: Synthetic oligonucleotide
  Target: SCNA; (-) strand; PAM type: NRG; PAM sequence: AAG
tgttgttcaaaatcagaatg

SEQ ID NO: 24270 - DNA, 20 bp, Artificial Sequence
  Description of Artificial Sequence: Synthetic oligonucleotide
  Target: SCNA; (-) strand; PAM type: NRG; PAM sequence: CAG
tatttattgttgttcaaaat

SEQ ID NO: 24271 - DNA, 20 bp, Artificial Sequence
  Description of Artificial Sequence: Synthetic oligonucleotide
  Target: SCNA; (-) strand; PAM type: NRG; PAM sequence: CAG
atacttaaaacatccaggtt

SEQ ID NO: 24272 - DNA, 20 bp, Artificial Sequence
  Description of Artificial Sequence: Synthetic oligonucleotide
  Target: SCNA; (-) strand; PAM type: NRG; PAM sequence: AGG
cttggatacttaaaacatcc

SEQ ID NO: 24273 - DNA, 20 bp, Artificial Sequence
  Description of Artificial Sequence: Synthetic oligonucleotide
  Target: SCNA; (-) strand; PAM type: NRG; PAM sequence: CAG
ccttggatacttaaaacatc

SEQ ID NO: 24274 - DNA, 20 bp, Artificial Sequence
  Description of Artificial Sequence: Synthetic oligonucleotide
  Target: SCNA; (-) strand; PAM type: NRG; PAM sequence: TGG
gcttgaaatgtctgttgcct

SEQ ID NO: 24275 - DNA, 20 bp, Artificial Sequence
  Description of Artificial Sequence: Synthetic oligonucleotide
  Target: SCNA; (-) strand; PAM type: NRG; PAM sequence: AAG
atagttttcacgcaagaaat

SEQ ID NO: 24276 - DNA, 20 bp, Artificial Sequence
  Description of Artificial Sequence: Synthetic oligonucleotide
  Target: SCNA; (-) strand; PAM type: NRG; PAM sequence: AAG
atgattaatagttttcacgc

SEQ ID NO: 24277 - DNA, 20 bp, Artificial Sequence
  Description of Artificial Sequence: Synthetic oligonucleotide
  Target: SCNA; (-) strand; PAM type: NRG; PAM sequence: TAG
cttatctacatgatgattaa

SEQ ID NO: 24278 - DNA, 20 bp, Artificial Sequence
  Description of Artificial Sequence: Synthetic oligonucleotide
  Target: SCNA; (-) strand; PAM type: NRG; PAM sequence: GAG
cttcgttatcatatcccatt

SEQ ID NO: 24279 - DNA, 20 bp, Artificial Sequence
  Description of Artificial Sequence: Synthetic oligonucleotide
  Target: SCNA; (-) strand; PAM type: NRG; PAM sequence: CAG
ctgacaaataatacagcagt

SEQ ID NO: 24280 - DNA, 20 bp, Artificial Sequence
  Description of Artificial Sequence: Synthetic oligonucleotide
  Target: SCNA; (-) strand; PAM type: NRG; PAM sequence: CAG
ctgcctgacaaataatacag

SEQ ID NO: 24281 - DNA, 20 bp, Artificial Sequence
  Description of Artificial Sequence: Synthetic oligonucleotide
  Target: SCNA; (-) strand; PAM type: NRG; PAM sequence: CAG
ccactgcctgacaaataata

SEQ ID NO: 24282 - DNA, 20 bp, Artificial Sequence
  Description of Artificial Sequence: Synthetic oligonucleotide
  Target: SCNA; (-) strand; PAM type: NRG; PAM sequence: AAG
aaagtcctgaataaactgtg

SEQ ID NO: 24283 - DNA, 20 bp, Artificial Sequence
  Description of Artificial Sequence: Synthetic oligonucleotide
  Target: SCNA; (-) strand; PAM type: NRG; PAM sequence: AAG
tctggagttttagagagcaa

SEQ ID NO: 24284 - DNA, 20 bp, Artificial Sequence
  Description of Artificial Sequence: Synthetic oligonucleotide
  Target: SCNA; (-) strand; PAM type: NRG; PAM sequence: GAG
taattttctggagttttaga

SEQ ID NO: 24285 - DNA, 20 bp, Artificial Sequence
  Description of Artificial Sequence: Synthetic oligonucleotide
  Target: SCNA; (-) strand; PAM type: NRG; PAM sequence: GAG
tgtaattttctggagtttta

SEQ ID NO: 24286 - DNA, 20 bp, Artificial Sequence
  Description of Artificial Sequence: Synthetic oligonucleotide
  Target: SCNA; (-) strand; PAM type: NRG; PAM sequence: TAG
tttgtaattttctggagttt

SEQ ID NO: 24287 - DNA, 20 bp, Artificial Sequence
  Description of Artificial Sequence: Synthetic oligonucleotide
  Target: SCNA; (-) strand; PAM type: NRG; PAM sequence: GAG
tatatttttgtaattttctg

SEQ ID NO: 24288 - DNA, 20 bp, Artificial Sequence
  Description of Artificial Sequence: Synthetic oligonucleotide
  Target: SCNA; (-) strand; PAM type: NRG; PAM sequence: TGG
tttatatttttgtaattttc

SEQ ID NO: 24289 - DNA, 20 bp, Artificial Sequence
  Description of Artificial Sequence: Synthetic oligonucleotide
  Target: SCNA; (-) strand; PAM type: NRG; PAM sequence: AAG
tctaaaagagttggatcctg

SEQ ID NO: 24290 - DNA, 20 bp, Artificial Sequence
  Description of Artificial Sequence: Synthetic oligonucleotide
  Target: SCNA; (-) strand; PAM type: NRG; PAM sequence: TGG
atggaatgctctaaaagagt

SEQ ID NO: 24291 - DNA, 20 bp, Artificial Sequence
  Description of Artificial Sequence: Synthetic oligonucleotide
  Target: SCNA; (-) strand; PAM type: NRG; PAM sequence: GAG
ccacatggaatgctctaaaa

SEQ ID NO: 24292 - DNA, 20 bp, Artificial Sequence
  Description of Artificial Sequence: Synthetic oligonucleotide
  Target: SCNA; (-) strand; PAM type: NRG; PAM sequence: AAG
tgccacatggaatgctctaa

SEQ ID NO: 24293 - DNA, 20 bp, Artificial Sequence
  Description of Artificial Sequence: Synthetic oligonucleotide
  Target: SCNA; (-) strand; PAM type: NRG; PAM sequence: TGG
agcatctctttcatgccaca

SEQ ID NO: 24294 - DNA, 20 bp, Artificial Sequence
  Description of Artificial Sequence: Synthetic oligonucleotide
  Target: SCNA; (-) strand; PAM type: NRG; PAM sequence: GAG
taaatccttgctgaactaat

SEQ ID NO: 24295 - DNA, 20 bp, Artificial Sequence
  Description of Artificial Sequence: Synthetic oligonucleotide
  Target: SCNA; (-) strand; PAM type: NRG; PAM sequence: TGG
aacagtgtcttgcttgtggc

SEQ ID NO: 24296 - DNA, 20 bp, Artificial Sequence
  Description of Artificial Sequence: Synthetic oligonucleotide
  Target: SCNA; (-) strand; PAM type: NRG; PAM sequence: TGG
cctcaacagtgtcttgcttg

SEQ ID NO: 24297 - DNA, 20 bp, Artificial Sequence
  Description of Artificial Sequence: Synthetic oligonucleotide
  Target: SCNA; (-) strand; PAM type: NRG; PAM sequence: CAG
ggtctatcccagctcctcaa

SEQ ID NO: 24298 - DNA, 20 bp, Artificial Sequence
  Description of Artificial Sequence: Synthetic oligonucleotide
  Target: SCNA; (-) strand; PAM type: NRG; PAM sequence: CAG
ctagaacacttggtctatcc

SEQ ID NO: 24299 - DNA, 20 bp, Artificial Sequence
  Description of Artificial Sequence: Synthetic oligonucleotide
  Target: SCNA; (-) strand; PAM type: NRG; PAM sequence: TGG
ggagtagccactagaacact

SEQ ID NO: 24300 - DNA, 20 bp, Artificial Sequence
  Description of Artificial Sequence: Synthetic oligonucleotide
  Target: SCNA; (-) strand; PAM type: NRG; PAM sequence: TAG
gtgcagtgtggagtagccac

SEQ ID NO: 24301 - DNA, 20 bp, Artificial Sequence
  Description of Artificial Sequence: Synthetic oligonucleotide
  Target: SCNA; (-) strand; PAM type: NRG; PAM sequence: TAG
actatgcgtgcagtgtggag

SEQ ID NO: 24302 - DNA, 20 bp, Artificial Sequence
  Description of Artificial Sequence: Synthetic oligonucleotide
  Target: SCNA; (-) strand; PAM type: NRG; PAM sequence: GAG
gctactatgcgtgcagtgtg

SEQ ID NO: 24303 - DNA, 20 bp, Artificial Sequence
  Description of Artificial Sequence: Synthetic oligonucleotide
  Target: SCNA; (-) strand; PAM type: NRG; PAM sequence: TGG
atgctactatgcgtgcagtg

SEQ ID NO: 24304 - DNA, 20 bp, Artificial Sequence
  Description of Artificial Sequence: Synthetic oligonucleotide
  Target: SCNA; (-) strand; PAM type: NRG; PAM sequence: CAG
ctgtaatgctactatgcgtg

SEQ ID NO: 24305 - DNA, 20 bp, Artificial Sequence
  Description of Artificial Sequence: Synthetic oligonucleotide
  Target: SCNA; (-) strand; PAM type: NRG; PAM sequence: CAG
acaaagaaagtgacttgaat

SEQ ID NO: 24306 - DNA, 20 bp, Artificial Sequence
  Description of Artificial Sequence: Synthetic oligonucleotide
  Target: SCNA; (-) strand; PAM type: NRG; PAM sequence: AAG
ctaagaatattgtacaaaga

SEQ ID NO: 24307 - DNA, 20 bp, Artificial Sequence
  Description of Artificial Sequence: Synthetic oligonucleotide
  Target: SCNA; (-) strand; PAM type: NRG; PAM sequence: AAG
tgttctaagaatattgtaca

SEQ ID NO: 24308 - DNA, 20 bp, Artificial Sequence
  Description of Artificial Sequence: Synthetic oligonucleotide
  Target: SCNA; (-) strand; PAM type: NRG; PAM sequence: AAG
aagaaagatctgcttgttct

SEQ ID NO: 24309 - DNA, 20 bp, Artificial Sequence
  Description of Artificial Sequence: Synthetic oligonucleotide
  Target: SCNA; (-) strand; PAM type: NRG; PAM sequence: AAG
cctacttctattgaagaaga

SEQ ID NO: 24310 - DNA, 20 bp, Artificial Sequence
  Description of Artificial Sequence: Synthetic oligonucleotide
  Target: SCNA; (-) strand; PAM type: NRG; PAM sequence: AAG
atttcctacttctattgaag

SEQ ID NO: 24311 - DNA, 20 bp, Artificial Sequence
  Description of Artificial Sequence: Synthetic oligonucleotide
  Target: SCNA; (-) strand; PAM type: NRG; PAM sequence: AAG
tatatttcctacttctattg

SEQ ID NO: 24312 - DNA, 20 bp, Artificial Sequence
  Description of Artificial Sequence: Synthetic oligonucleotide
  Target: SCNA; (-) strand; PAM type: NRG; PAM sequence: GAG
agcaacagtgatgttatata

SEQ ID NO: 24313 - DNA, 20 bp, Artificial Sequence
  Description of Artificial Sequence: Synthetic oligonucleotide
  Target: SCNA; (-) strand; PAM type: NRG; PAM sequence: TAG
aaagcaacagtgatgttata

SEQ ID NO: 24314 - DNA, 20 bp, Artificial Sequence
  Description of Artificial Sequence: Synthetic oligonucleotide
  Target: SCNA; (-) strand; PAM type: NRG; PAM sequence: CAG
aaattttaagtgcaaagcaa

SEQ ID NO: 24315 - DNA, 20 bp, Artificial Sequence
  Description of Artificial Sequence: Synthetic oligonucleotide
  Target: SCNA; (-) strand; PAM type: NRG; PAM sequence: AAG
aggcagaaattttaagtgca

SEQ ID NO: 24316 - DNA, 20 bp, Artificial Sequence
  Description of Artificial Sequence: Synthetic oligonucleotide
  Target: SCNA; (-) strand; PAM type: NRG; PAM sequence: AAG
agtgcacaggcagaaatttt

SEQ ID NO: 24317 - DNA, 20 bp, Artificial Sequence
  Description of Artificial Sequence: Synthetic oligonucleotide
  Target: SCNA; (-) strand; PAM type: NRG; PAM sequence: CAG
acaggttaaaagtgcacagg

SEQ ID NO: 24318 - DNA, 20 bp, Artificial Sequence
  Description of Artificial Sequence: Synthetic oligonucleotide
  Target: SCNA; (-) strand; PAM type: NRG; PAM sequence: AGG
gaaacaggttaaaagtgcac

SEQ ID NO: 24319 - DNA, 20 bp, Artificial Sequence
  Description of Artificial Sequence: Synthetic oligonucleotide
  Target: SCNA; (-) strand; PAM type: NRG; PAM sequence: CAG
agaaacaggttaaaagtgca

SEQ ID NO: 24320 - DNA, 20 bp, Artificial Sequence
  Description of Artificial Sequence: Synthetic oligonucleotide
  Target: SCNA; (-) strand; PAM type: NRG; PAM sequence: AAG
gcagagtagaaacaggttaa

SEQ ID NO: 24321 - DNA, 20 bp, Artificial Sequence
  Description of Artificial Sequence: Synthetic oligonucleotide
  Target: SCNA; (-) strand; PAM type: NRG; PAM sequence: AGG
ttcattggcagagtagaaac

SEQ ID NO: 24322 - DNA, 20 bp, Artificial Sequence
  Description of Artificial Sequence: Synthetic oligonucleotide
  Target: SCNA; (-) strand; PAM type: NRG; PAM sequence: CAG
tttcattggcagagtagaaa

SEQ ID NO: 24323 - DNA, 20 bp, Artificial Sequence
  Description of Artificial Sequence: Synthetic oligonucleotide
  Target: SCNA; (-) strand; PAM type: NRG; PAM sequence: TAG
catacctttcattggcagag

SEQ ID NO: 24324 - DNA, 20 bp, Artificial Sequence
  Description of Artificial Sequence: Synthetic oligonucleotide
  Target: SCNA; (-) strand; PAM type: NRG; PAM sequence: GAG
gttcatacctttcattggca

SEQ ID NO: 24325 - DNA, 20 bp, Artificial Sequence
  Description of Artificial Sequence: Synthetic oligonucleotide
  Target: SCNA; (-) strand; PAM type: NRG; PAM sequence: CAG
aagttcatacctttcattgg

SEQ ID NO: 24326 - DNA, 20 bp, Artificial Sequence
  Description of Artificial Sequence: Synthetic oligonucleotide
  Target: SCNA; (-) strand; PAM type: NRG; PAM sequence: TGG
ttgaagttcatacctttcat

SEQ ID NO: 24327 - DNA, 20 bp, Artificial Sequence
  Description of Artificial Sequence: Synthetic oligonucleotide
  Target: SCNA; (-) strand; PAM type: NRG; PAM sequence: AAG
gtcatacaattcatttcttg

SEQ ID NO: 24328 - DNA, 20 bp, Artificial Sequence
  Description of Artificial Sequence: Synthetic oligonucleotide
  Target: SCNA; (-) strand; PAM type: NRG; PAM sequence: CAG
atgtgcacataagaagttat

SEQ ID NO: 24329 - DNA, 20 bp, Artificial Sequence
  Description of Artificial Sequence: Synthetic oligonucleotide
  Target: SCNA; (-) strand; PAM type: NRG; PAM sequence: AAG
tttactcatgtgcacataag

SEQ ID NO: 24330 - DNA, 20 bp, Artificial Sequence
  Description of Artificial Sequence: Synthetic oligonucleotide
  Target: SCNA; (-) strand; PAM type: NRG; PAM sequence: AAG
atttttactcatgtgcacat

SEQ ID NO: 24331 - DNA, 20 bp, Artificial Sequence
  Description of Artificial Sequence: Synthetic oligonucleotide
  Target: SCNA; (-) strand; PAM type: NRG; PAM sequence: TAG
tgtttagtacattagaataa

SEQ ID NO: 24332 - DNA, 20 bp, Artificial Sequence
  Description of Artificial Sequence: Synthetic oligonucleotide
  Target: SCNA; (-) strand; PAM type: NRG; PAM sequence: TAG
aactcttgtgtttagtacat

SEQ ID NO: 24333 - DNA, 20 bp, Artificial Sequence
  Description of Artificial Sequence: Synthetic oligonucleotide
  Target: SCNA; (-) strand; PAM type: NRG; PAM sequence: TAG
acaatattaactcttgtgtt

SEQ ID NO: 24334 - DNA, 20 bp, Artificial Sequence
  Description of Artificial Sequence: Synthetic oligonucleotide
  Target: SCNA; (-) strand; PAM type: NRG; PAM sequence: CAG
aattataagattttgtttta

SEQ ID NO: 24335 - DNA, 20 bp, Artificial Sequence
  Description of Artificial Sequence: Synthetic oligonucleotide
  Target: SCNA; (-) strand; PAM type: NRG; PAM sequence: AAG
aatgagttatcttgaattat

SEQ ID NO: 24336 - DNA, 20 bp, Artificial Sequence
  Description of Artificial Sequence: Synthetic oligonucleotide
  Target: SCNA; (-) strand; PAM type: NRG; PAM sequence: GAG
agactagttaaaggacaaat

SEQ ID NO: 24337 - DNA, 20 bp, Artificial Sequence
  Description of Artificial Sequence: Synthetic oligonucleotide
  Target: SCNA; (-) strand; PAM type: NRG; PAM sequence: AGG
ctaagtataagactagttaa

SEQ ID NO: 24338 - DNA, 20 bp, Artificial Sequence
  Description of Artificial Sequence: Synthetic oligonucleotide
  Target: SCNA; (-) strand; PAM type: NRG; PAM sequence: AAG
tctaagtataagactagtta

SEQ ID NO: 24339 - DNA, 20 bp, Artificial Sequence
  Description of Artificial Sequence: Synthetic oligonucleotide
  Target: SCNA; (-) strand; PAM type: NRG; PAM sequence: TAG
ataatttctaagtataagac

SEQ ID NO: 24340 - DNA, 20 bp, Artificial Sequence
  Description of Artificial Sequence: Synthetic oligonucleotide
  Target: SCNA; (-) strand; PAM type: NRG; PAM sequence: AAG
tagtaataatttctaagtat

SEQ ID NO: 24341 - DNA, 20 bp, Artificial Sequence
  Description of Artificial Sequence: Synthetic oligonucleotide
  Target: SCNA; (-) strand; PAM type: NRG; PAM sequence: AAG
tgcccttagtaataatttct

SEQ ID NO: 24342 - DNA, 20 bp, Artificial Sequence
  Description of Artificial Sequence: Synthetic oligonucleotide
  Target: SCNA; (-) strand; PAM type: NRG; PAM sequence: TAG
catatgaatgtagctgccct

SEQ ID NO: 24343 - DNA, 20 bp, Artificial Sequence
  Description of Artificial Sequence: Synthetic oligonucleotide
  Target: SCNA; (-) strand; PAM type: NRG; PAM sequence: TAG
ttaatttgatcatatgaatg

SEQ ID NO: 24344 - DNA, 20 bp, Artificial Sequence
  Description of Artificial Sequence: Synthetic oligonucleotide
  Target: SCNA; (-) strand; PAM type: NRG; PAM sequence: CAG
aaatcgagagtaaatcaaag

SEQ ID NO: 24345 - DNA, 20 bp, Artificial Sequence
  Description of Artificial Sequence: Synthetic oligonucleotide
  Target: SCNA; (-) strand; PAM type: NRG; PAM sequence: AAG
aataaatcgagagtaaatca

SEQ ID NO: 24346 - DNA, 20 bp, Artificial Sequence
  Description of Artificial Sequence: Synthetic oligonucleotide
  Target: SCNA; (-) strand; PAM type: NRG; PAM sequence: GAG
ctgaacaaccaataaatcga

SEQ ID NO: 24347 - DNA, 20 bp, Artificial Sequence
  Description of Artificial Sequence: Synthetic oligonucleotide
  Target: SCNA; (-) strand; PAM type: NRG; PAM sequence: GAG
ttctgaacaaccaataaatc

SEQ ID NO: 24348 - DNA, 20 bp, Artificial Sequence
  Description of Artificial Sequence: Synthetic oligonucleotide
  Target: SCNA; (-) strand; PAM type: NRG; PAM sequence: TGG
cctctcccttcacaaatagg

SEQ ID NO: 24349 - DNA, 20 bp, Artificial Sequence
  Description of Artificial Sequence: Synthetic oligonucleotide
  Target: SCNA; (-) strand; PAM type: NRG; PAM sequence: AGG
ttccctctcccttcacaaat

SEQ ID NO: 24350 - DNA, 20 bp, Artificial Sequence
  Description of Artificial Sequence: Synthetic oligonucleotide
  Target: SCNA; (-) strand; PAM type: NRG; PAM sequence: TAG
gttccctctcccttcacaaa

SEQ ID NO: 24351 - DNA, 20 bp, Artificial Sequence
  Description of Artificial Sequence: Synthetic oligonucleotide
  Target: SCNA; (-) strand; PAM type: NRG; PAM sequence: AAG
tctagttgatgagggaggga

SEQ ID NO: 24352 - DNA, 20 bp, Artificial Sequence
  Description of Artificial Sequence: Synthetic oligonucleotide
  Target: SCNA; (-) strand; PAM type: NRG; PAM sequence: GGG
accctctagttgatgaggga

SEQ ID NO: 24353 - DNA, 20 bp, Artificial Sequence
  Description of Artificial Sequence: Synthetic oligonucleotide
  Target: SCNA; (-) strand; PAM type: NRG; PAM sequence: AGG
caccctctagttgatgaggg

SEQ ID NO: 24354 - DNA, 20 bp, Artificial Sequence
  Description of Artificial Sequence: Synthetic oligonucleotide
  Target: SCNA; (-) strand; PAM type: NRG; PAM sequence: GAG
tcaccctctagttgatgagg

SEQ ID NO: 24355 - DNA, 20 bp, Artificial Sequence
  Description of Artificial Sequence: Synthetic oligonucleotide
  Target: SCNA; (-) strand; PAM type: NRG; PAM sequence: GGG
catcaccctctagttgatga

SEQ ID NO: 24356 - DNA, 20 bp, Artificial Sequence
  Description of Artificial Sequence: Synthetic oligonucleotide
  Target: SCNA; (-) strand; PAM type: NRG; PAM sequence: AGG
ccatcaccctctagttgatg

SEQ ID NO: 24357 - DNA, 20 bp, Artificial Sequence
  Description of Artificial Sequence: Synthetic oligonucleotide
  Target: SCNA; (-) strand; PAM type: NRG; PAM sequence: GAG
tccatcaccctctagttgat

SEQ ID NO: 24358 - DNA, 20 bp, Artificial Sequence
  Description of Artificial Sequence: Synthetic oligonucleotide
  Target: SCNA; (-) strand; PAM type: NRG; PAM sequence: TAG
gtatctggtccatcaccctc

SEQ ID NO: 24359 - DNA, 20 bp, Artificial Sequence
  Description of Artificial Sequence: Synthetic oligonucleotide
  Target: SCNA; (-) strand; PAM type: NRG; PAM sequence: TGG
tcatgccctttgagggtatc

SEQ ID NO: 24360 - DNA, 20 bp, Artificial Sequence
  Description of Artificial Sequence: Synthetic oligonucleotide
  Target: SCNA; (-) strand; PAM type: NRG; PAM sequence: GGG
tcacctttcatgccctttga

SEQ ID NO: 24361 - DNA, 20 bp, Artificial Sequence
  Description of Artificial Sequence: Synthetic oligonucleotide
  Target: SCNA; (-) strand; PAM type: NRG; PAM sequence: AGG
ttcacctttcatgccctttg

SEQ ID NO: 24362 - DNA, 20 bp, Artificial Sequence
  Description of Artificial Sequence: Synthetic oligonucleotide
  Target: SCNA; (-) strand; PAM type: NRG; PAM sequence: GAG
tttcacctttcatgcccttt

SEQ ID NO: 24363 - DNA, 20 bp, Artificial Sequence
  Description of Artificial Sequence: Synthetic oligonucleotide
  Target: SCNA; (-) strand; PAM type: NRG; PAM sequence: CGG
ctgaaagggagtaatggcac

SEQ ID NO: 24364 - DNA, 20 bp, Artificial Sequence
  Description of Artificial Sequence: Synthetic oligonucleotide
  Target: SCNA; (-) strand; PAM type: NRG; PAM sequence: TGG
ggaacactgaaagggagtaa

SEQ ID NO: 24365 - DNA, 20 bp, Artificial Sequence
  Description of Artificial Sequence: Synthetic oligonucleotide
  Target: SCNA; (-) strand; PAM type: NRG; PAM sequence: GAG
agatcaggaacactgaaagg

SEQ ID NO: 24366 - DNA, 20 bp, Artificial Sequence
  Description of Artificial Sequence: Synthetic oligonucleotide
  Target: SCNA; (-) strand; PAM type: NRG; PAM sequence: GGG
taagatcaggaacactgaaa

SEQ ID NO: 24367 - DNA, 20 bp, Artificial Sequence
  Description of Artificial Sequence: Synthetic oligonucleotide
  Target: SCNA; (-) strand; PAM type: NRG; PAM sequence: AGG
ttaagatcaggaacactgaa

SEQ ID NO: 24368 - DNA, 20 bp, Artificial Sequence
  Description of Artificial Sequence: Synthetic oligonucleotide
  Target: SCNA; (-) strand; PAM type: NRG; PAM sequence: AAG
tttaagatcaggaacactga

SEQ ID NO: 24369 - DNA, 20 bp, Artificial Sequence
  Description of Artificial Sequence: Synthetic oligonucleotide
  Target: SCNA; (-) strand; PAM type: NRG; PAM sequence: AGG
atggctctgcttttaagatc

SEQ ID NO: 24370 - DNA, 20 bp, Artificial Sequence
  Description of Artificial Sequence: Synthetic oligonucleotide
  Target: SCNA; (-) strand; PAM type: NRG; PAM sequence: CAG
aatggctctgcttttaagat

SEQ ID NO: 24371 - DNA, 20 bp, Artificial Sequence
  Description of Artificial Sequence: Synthetic oligonucleotide
  Target: SCNA; (-) strand; PAM type: NRG; PAM sequence: AAG
ggattaatggctctgctttt

SEQ ID NO: 24372 - DNA, 20 bp, Artificial Sequence
  Description of Artificial Sequence: Synthetic oligonucleotide
  Target: SCNA; (-) strand; PAM type: NRG; PAM sequence: TGG
agcttgtagaagtggattaa

SEQ ID NO: 24373 - DNA, 20 bp, Artificial Sequence
  Description of Artificial Sequence: Synthetic oligonucleotide
  Target: SCNA; (-) strand; PAM type: NRG; PAM sequence: TGG
ggatgtctagcttgtagaag

SEQ ID NO: 24374 - DNA, 20 bp, Artificial Sequence
  Description of Artificial Sequence: Synthetic oligonucleotide
  Target: SCNA; (-) strand; PAM type: NRG; PAM sequence: AAG
actggatgtctagcttgtag

SEQ ID NO: 24375 - DNA, 20 bp, Artificial Sequence
  Description of Artificial Sequence: Synthetic oligonucleotide
  Target: SCNA; (-) strand; PAM type: NRG; PAM sequence: TAG
ggtactggatgtctagcttg

SEQ ID NO: 24376 - DNA, 20 bp, Artificial Sequence
  Description of Artificial Sequence: Synthetic oligonucleotide
  Target: SCNA; (-) strand; PAM type: NRG; PAM sequence: TAG
aagtaggggtactggatgtc

SEQ ID NO: 24377 - DNA, 20 bp, Artificial Sequence
  Description of Artificial Sequence: Synthetic oligonucleotide
  Target: SCNA; (-) strand; PAM type: NRG; PAM sequence: TGG
gatgtgacaagtaggggtac

SEQ ID NO: 24378 - DNA, 20 bp, Artificial Sequence
  Description of Artificial Sequence: Synthetic oligonucleotide
  Target: SCNA; (-) strand; PAM type: NRG; PAM sequence: GGG
aagagggatgtgacaagtag

SEQ ID NO: 24379 - DNA, 20 bp, Artificial Sequence
  Description of Artificial Sequence: Synthetic oligonucleotide
  Target: SCNA; (-) strand; PAM type: NRG; PAM sequence: GGG
gaagagggatgtgacaagta

SEQ ID NO: 24380 - DNA, 20 bp, Artificial Sequence
  Description of Artificial Sequence: Synthetic oligonucleotide
  Target: SCNA; (-) strand; PAM type: NRG; PAM sequence: AGG
ggaagagggatgtgacaagt

SEQ ID NO: 24381 - DNA, 20 bp, Artificial Sequence
  Description of Artificial Sequence: Synthetic oligonucleotide
  Target: SCNA; (-) strand; PAM type: NRG; PAM sequence: TAG
aggaagagggatgtgacaag

SEQ ID NO: 24382 - DNA, 20 bp, Artificial Sequence
  Description of Artificial Sequence: Synthetic oligonucleotide
  Target: SCNA; (-) strand; PAM type: NRG; PAM sequence: AAG
tggaggaagagggatgtgac

SEQ ID NO: 24383 - DNA, 20 bp, Artificial Sequence
  Description of Artificial Sequence: Synthetic oligonucleotide
  Target: SCNA; (-) strand; PAM type: NRG; PAM sequence: GGG
gccagaaacttggaggaaga

SEQ ID NO: 24384 - DNA, 20 bp, Artificial Sequence
  Description of Artificial Sequence: Synthetic oligonucleotide
  Target: SCNA; (-) strand; PAM type: NRG; PAM sequence: AGG
tgccagaaacttggaggaag

SEQ ID NO: 24385 - DNA, 20 bp, Artificial Sequence
  Description of Artificial Sequence: Synthetic oligonucleotide
  Target: SCNA; (-) strand; PAM type: NRG; PAM sequence: GAG
gtgccagaaacttggaggaa

SEQ ID NO: 24386 - DNA, 20 bp, Artificial Sequence
  Description of Artificial Sequence: Synthetic oligonucleotide
  Target: SCNA; (-) strand; PAM type: NRG; PAM sequence: AAG
ctgtgccagaaacttggagg

SEQ ID NO: 24387 - DNA, 20 bp, Artificial Sequence
  Description of Artificial Sequence: Synthetic oligonucleotide
  Target: SCNA; (-) strand; PAM type: NRG; PAM sequence: AGG
acactgtgccagaaacttgg

SEQ ID NO: 24388 - DNA, 20 bp, Artificial Sequence
  Description of Artificial Sequence: Synthetic oligonucleotide
  Target: SCNA; (-) strand; PAM type: NRG; PAM sequence: GAG
cacactgtgccagaaacttg

SEQ ID NO: 24389 - DNA, 20 bp, Artificial Sequence
  Description of Artificial Sequence: Synthetic oligonucleotide
  Target: SCNA; (-) strand; PAM type: NRG; PAM sequence: TGG
ctcacactgtgccagaaact

SEQ ID NO: 24390 - DNA, 20 bp, Artificial Sequence
  Description of Artificial Sequence: Synthetic oligonucleotide
  Target: SCNA; (-) strand; PAM type: NRG; PAM sequence: CAG
aatgtttgctcacactgtgc

SEQ ID NO: 24391 - DNA, 20 bp, Artificial Sequence
  Description of Artificial Sequence: Synthetic oligonucleotide
  Target: SCNA; (-) strand; PAM type: NRG; PAM sequence: AAG
cactcattcatcattcaaga

SEQ ID NO: 24392 - DNA, 20 bp, Artificial Sequence
  Description of Artificial Sequence: Synthetic oligonucleotide
  Target: SCNA; (-) strand; PAM type: NRG; PAM sequence: AAG
gagacactcattcatcattc

SEQ ID NO: 24393 - DNA, 20 bp, Artificial Sequence
  Description of Artificial Sequence: Synthetic oligonucleotide
  Target: SCNA; (-) strand; PAM type: NRG; PAM sequence: GAG
tgcttattaatgactgcatt

SEQ ID NO: 24394 - DNA, 20 bp, Artificial Sequence
  Description of Artificial Sequence: Synthetic oligonucleotide
  Target: SCNA; (-) strand; PAM type: NRG; PAM sequence: AAG
tgaccctggtaaatagaaat

SEQ ID NO: 24395 - DNA, 20 bp, Artificial Sequence
  Description of Artificial Sequence: Synthetic oligonucleotide
  Target: SCNA; (-) strand; PAM type: NRG; PAM sequence: TAG
atcaaaatgaccctggtaaa

SEQ ID NO: 24396 - DNA, 20 bp, Artificial Sequence
  Description of Artificial Sequence: Synthetic oligonucleotide
  Target: SCNA; (-) strand; PAM type: NRG; PAM sequence: TGG
aactttgatcaaaatgaccc

SEQ ID NO: 24397 - DNA, 20 bp, Artificial Sequence
  Description of Artificial Sequence: Synthetic oligonucleotide
  Target: SCNA; (-) strand; PAM type: NRG; PAM sequence: AAG
aatctggatggtttcaatga

SEQ ID NO: 24398 - DNA, 20 bp, Artificial Sequence
  Description of Artificial Sequence: Synthetic oligonucleotide
  Target: SCNA; (-) strand; PAM type: NRG; PAM sequence: TGG
gggatgctaaaaaatctgga

SEQ ID NO: 24399 - DNA, 20 bp, Artificial Sequence
  Description of Artificial Sequence: Synthetic oligonucleotide
  Target: SCNA; (-) strand; PAM type: NRG; PAM sequence: TGG
ctatgggatgctaaaaaatc

SEQ ID NO: 24400 - DNA, 20 bp, Artificial Sequence
  Description of Artificial Sequence: Synthetic oligonucleotide
  Target: SCNA; (-) strand; PAM type: NRG; PAM sequence: GGG
gcaattgtggtcacatctat

SEQ ID NO: 24401 - DNA, 20 bp, Artificial Sequence
  Description of Artificial Sequence: Synthetic oligonucleotide
  Target: SCNA; (-) strand; PAM type: NRG; PAM sequence: TGG
tgcaattgtggtcacatcta

SEQ ID NO: 24402 - DNA, 20 bp, Artificial Sequence
  Description of Artificial Sequence: Synthetic oligonucleotide
  Target: SCNA; (-) strand; PAM type: NRG; PAM sequence: TGG
ctaataaatgtctgcaattg

SEQ ID NO: 24403 - DNA, 20 bp, Artificial Sequence
  Description of Artificial Sequence: Synthetic oligonucleotide
  Target: SCNA; (-) strand; PAM type: NRG; PAM sequence: AAG
tgagtttctataataattca

SEQ ID NO: 24404 - DNA, 20 bp, Artificial Sequence
  Description of Artificial Sequence: Synthetic oligonucleotide
  Target: SCNA; (-) strand; PAM type: NRG; PAM sequence: GAG
taatttagcaataaagttct

SEQ ID NO: 24405 - DNA, 20 bp, Artificial Sequence
  Description of Artificial Sequence: Synthetic oligonucleotide
  Target: SCNA; (-) strand; PAM type: NRG; PAM sequence: AAG
tgaagtctaatttagcaata

SEQ ID NO: 24406 - DNA, 20 bp, Artificial Sequence
  Description of Artificial Sequence: Synthetic oligonucleotide
  Target: SCNA; (-) strand; PAM type: NRG; PAM sequence: TAG
aaaattgttgaagtctaatt

SEQ ID NO: 24407 - DNA, 20 bp, Artificial Sequence
  Description of Artificial Sequence: Synthetic oligonucleotide
  Target: SCNA; (-) strand; PAM type: NRG; PAM sequence: AAG
gctctactagaaaattgttg

SEQ ID NO: 24408 - DNA, 20 bp, Artificial Sequence
  Description of Artificial Sequence: Synthetic oligonucleotide
  Target: SCNA; (-) strand; PAM type: NRG; PAM sequence: TAG
ataaaatgaggaagctctac

SEQ ID NO: 24409 - DNA, 20 bp, Artificial Sequence
  Description of Artificial Sequence: Synthetic oligonucleotide
  Target: SCNA; (-) strand; PAM type: NRG; PAM sequence: AAG
gtctttctcataaaatgagg

SEQ ID NO: 24410 - DNA, 20 bp, Artificial Sequence
  Description of Artificial Sequence: Synthetic oligonucleotide
  Target: SCNA; (-) strand; PAM type: NRG; PAM sequence: AGG
aaagtctttctcataaaatg

SEQ ID NO: 24411 - DNA, 20 bp, Artificial Sequence
  Description of Artificial Sequence: Synthetic oligonucleotide
  Target: SCNA; (-) strand; PAM type: NRG; PAM sequence: GAG
aaaagtctttctcataaaat

SEQ ID NO: 24412 - DNA, 20 bp, Artificial Sequence
  Description of Artificial Sequence: Synthetic oligonucleotide
  Target: SCNA; (-) strand; PAM type: NRG; PAM sequence: AAG
acctttcgcagatctcctaa

SEQ ID NO: 24413 - DNA, 20 bp, Artificial Sequence
  Description of Artificial Sequence: Synthetic oligonucleotide
  Target: SCNA; (-) strand; PAM type: NRG; PAM sequence: CAG
cctgactggataacctttcg

SEQ ID NO: 24414 - DNA, 20 bp, Artificial Sequence
  Description of Artificial Sequence: Synthetic oligonucleotide
  Target: SCNA; (-) strand; PAM type: NRG; PAM sequence: TGG
ctgctcatacaccacctgac

SEQ ID NO: 24415 - DNA, 20 bp, Artificial Sequence
  Description of Artificial Sequence: Synthetic oligonucleotide
  Target: SCNA; (-) strand; PAM type: NRG; PAM sequence: TAG
ggactgagagtgaaaatggc

SEQ ID NO: 24416 - DNA, 20 bp, Artificial Sequence
  Description of Artificial Sequence: Synthetic oligonucleotide
  Target: SCNA; (-) strand; PAM type: NRG; PAM sequence: TGG
cattggactgagagtgaaaa

SEQ ID NO: 24417 - DNA, 20 bp, Artificial Sequence
  Description of Artificial Sequence: Synthetic oligonucleotide
  Target: SCNA; (-) strand; PAM type: NRG; PAM sequence: GAG
ggaaataaacattggactga

SEQ ID NO: 24418 - DNA, 20 bp, Artificial Sequence
  Description of Artificial Sequence: Synthetic oligonucleotide
  Target: SCNA; (-) strand; PAM type: NRG; PAM sequence: GAG
gtggaaataaacattggact

SEQ ID NO: 24419 - DNA, 20 bp, Artificial Sequence
  Description of Artificial Sequence: Synthetic oligonucleotide
  Target: SCNA; (-) strand; PAM type: NRG; PAM sequence: TGG
atagttgtggaaataaacat

SEQ ID NO: 24420 - DNA, 20 bp, Artificial Sequence
  Description of Artificial Sequence: Synthetic oligonucleotide
  Target: SCNA; (-) strand; PAM type: NRG; PAM sequence: TGG
tagaaattgcagcatagttg

SEQ ID NO: 24421 - DNA, 20 bp, Artificial Sequence
  Description of Artificial Sequence: Synthetic oligonucleotide
  Target: SCNA; (-) strand; PAM type: NRG; PAM sequence: TAG
agaacctagaaattgcagca

SEQ ID NO: 24422 - DNA, 20 bp, Artificial Sequence
  Description of Artificial Sequence: Synthetic oligonucleotide
  Target: SCNA; (-) strand; PAM type: NRG; PAM sequence: CAG
gccatagaacctagaaattg

SEQ ID NO: 24423 - DNA, 20 bp, Artificial Sequence
  Description of Artificial Sequence: Synthetic oligonucleotide
  Target: SCNA; (-) strand; PAM type: NRG; PAM sequence: TAG
gaaaatgaagccatagaacc

SEQ ID NO: 24424 - DNA, 20 bp, Artificial Sequence
  Description of Artificial Sequence: Synthetic oligonucleotide
  Target: SCNA; (-) strand; PAM type: NRG; PAM sequence: TAG
ctaatatgaaaatgaagcca

SEQ ID NO: 24425 - DNA, 20 bp, Artificial Sequence
  Description of Artificial Sequence: Synthetic oligonucleotide
  Target: SCNA; (-) strand; PAM type: NRG; PAM sequence: AAG
tgatttctaatatgaaaatg

SEQ ID NO: 24426 - DNA, 20 bp, Artificial Sequence
  Description of Artificial Sequence: Synthetic oligonucleotide
  Target: SCNA; (-) strand; PAM type: NRG; PAM sequence: TAG
tatttcccttataggtagta

SEQ ID NO: 24427 - DNA, 20 bp, Artificial Sequence
  Description of Artificial Sequence: Synthetic oligonucleotide
  Target: SCNA; (-) strand; PAM type: NRG; PAM sequence: TAG
ggagatatttcccttatagg

SEQ ID NO: 24428 - DNA, 20 bp, Artificial Sequence
  Description of Artificial Sequence: Synthetic oligonucleotide
  Target: SCNA; (-) strand; PAM type: NRG; PAM sequence: AGG
tttggagatatttcccttat

SEQ ID NO: 24429 - DNA, 20 bp, Artificial Sequence
  Description of Artificial Sequence: Synthetic oligonucleotide
  Target: SCNA; (-) strand; PAM type: NRG; PAM sequence: TAG
atttggagatatttccctta

SEQ ID NO: 24430 - DNA, 20 bp, Artificial Sequence
  Description of Artificial Sequence: Synthetic oligonucleotide
  Target: SCNA; (-) strand; PAM type: NRG; PAM sequence: GAG
gtgacaaaattaatcatttg

SEQ ID NO: 24431 - DNA, 20 bp, Artificial Sequence
  Description of Artificial Sequence: Synthetic oligonucleotide
  Target: SCNA; (-) strand; PAM type: NRG; PAM sequence: TGG
atgtgacaaaattaatcatt

SEQ ID NO: 24432 - DNA, 20 bp, Artificial Sequence
  Description of Artificial Sequence: Synthetic oligonucleotide
  Target: SCNA; (-) strand; PAM type: NRG; PAM sequence: AAG
aatatttaaagcagaaatct

SEQ ID NO: 24433 - DNA, 20 bp, Artificial Sequence
  Description of Artificial Sequence: Synthetic oligonucleotide
  Target: SCNA; (-) strand; PAM type: NRG; PAM sequence: CAG
atttattttaatatttaaag

SEQ ID NO: 24434 - DNA, 20 bp, Artificial Sequence
  Description of Artificial Sequence: Synthetic oligonucleotide
  Target: SCNA; (-) strand; PAM type: NRG; PAM sequence: AAG
tctatttattttaatattta

SEQ ID NO: 24435 - DNA, 20 bp, Artificial Sequence
  Description of Artificial Sequence: Synthetic oligonucleotide
  Target: SCNA; (-) strand; PAM type: NRG; PAM sequence: GGG
gcttaatcttttacaaaact

SEQ ID NO: 24436 - DNA, 20 bp, Artificial Sequence
  Description of Artificial Sequence: Synthetic oligonucleotide
  Target: SCNA; (-) strand; PAM type: NRG; PAM sequence: TGG
tgcttaatcttttacaaaac

SEQ ID NO: 24437 - DNA, 20 bp, Artificial Sequence
  Description of Artificial Sequence: Synthetic oligonucleotide
  Target: SCNA; (-) strand; PAM type: NRG; PAM sequence: AAG
aaattgcaaatggagcatga

SEQ ID NO: 24438 - DNA, 20 bp, Artificial Sequence
  Description of Artificial Sequence: Synthetic oligonucleotide
  Target: SCNA; (-) strand; PAM type: NRG; PAM sequence: GAG
tacaatataaattgcaaatg

SEQ ID NO: 24439 - DNA, 20 bp, Artificial Sequence
  Description of Artificial Sequence: Synthetic oligonucleotide
  Target: SCNA; (-) strand; PAM type: NRG; PAM sequence: TGG
catacaatataaattgcaaa

SEQ ID NO: 24440 - DNA, 20 bp, Artificial Sequence
  Description of Artificial Sequence: Synthetic oligonucleotide
  Target: SCNA; (-) strand; PAM type: NRG; PAM sequence: AGG
cttttattcacctgcattta

SEQ ID NO: 24441 - DNA, 20 bp, Artificial Sequence
  Description of Artificial Sequence: Synthetic oligonucleotide
  Target: SCNA; (-) strand; PAM type: NRG; PAM sequence: AAG
tcttttattcacctgcattt

SEQ ID NO: 24442 - DNA, 20 bp, Artificial Sequence
  Description of Artificial Sequence: Synthetic oligonucleotide
  Target: SCNA; (-) strand; PAM type: NRG; PAM sequence: GGG
cttcagaatattaagcaaca

SEQ ID NO: 24443 - DNA, 20 bp, Artificial Sequence
  Description of Artificial Sequence: Synthetic oligonucleotide
  Target: SCNA; (-) strand; PAM type: NRG; PAM sequence: AGG
gcttcagaatattaagcaac

SEQ ID NO: 24444 - DNA, 20 bp, Artificial Sequence
  Description of Artificial Sequence: Synthetic oligonucleotide
  Target: SCNA; (-) strand; PAM type: NRG; PAM sequence: CAG
tgcttcagaatattaagcaa

SEQ ID NO: 24445 - DNA, 20 bp, Artificial Sequence
  Description of Artificial Sequence: Synthetic oligonucleotide
  Target: SCNA; (-) strand; PAM type: NRG; PAM sequence: AAG
ttttattgcttcagaatatt

SEQ ID NO: 24446 - DNA, 20 bp, Artificial Sequence
  Description of Artificial Sequence: Synthetic oligonucleotide
  Target: SCNA; (-) strand; PAM type: NRG; PAM sequence: CAG
actagaggattttattgctt

SEQ ID NO: 24447 - DNA, 20 bp, Artificial Sequence
  Description of Artificial Sequence: Synthetic oligonucleotide
  Target: SCNA; (-) strand; PAM type: NRG; PAM sequence: AGG
ggacaactagatttaactag

SEQ ID NO: 24448 - DNA, 20 bp, Artificial Sequence
  Description of Artificial Sequence: Synthetic oligonucleotide
  Target: SCNA; (-) strand; PAM type: NRG; PAM sequence: GAG
tggacaactagatttaacta

SEQ ID NO: 24449 - DNA, 20 bp, Artificial Sequence
  Description of Artificial Sequence: Synthetic oligonucleotide
  Target: SCNA; (-) strand; PAM type: NRG; PAM sequence: TAG
tatggacaactagatttaac

SEQ ID NO: 24450 - DNA, 20 bp, Artificial Sequence
  Description of Artificial Sequence: Synthetic oligonucleotide
  Target: SCNA; (-) strand; PAM type: NRG; PAM sequence: TAG
tacattcagttatggacaac

SEQ ID NO: 24451 - DNA, 20 bp, Artificial Sequence
  Description of Artificial Sequence: Synthetic oligonucleotide
  Target: SCNA; (-) strand; PAM type: NRG; PAM sequence: TGG
ggtctttatacattcagtta

SEQ ID NO: 24452 - DNA, 20 bp, Artificial Sequence
  Description of Artificial Sequence: Synthetic oligonucleotide
  Target: SCNA; (-) strand; PAM type: NRG; PAM sequence: CAG
cctttgggtctttatacatt

SEQ ID NO: 24453 - DNA, 20 bp, Artificial Sequence
  Description of Artificial Sequence: Synthetic oligonucleotide
  Target: SCNA; (-) strand; PAM type: NRG; PAM sequence: GGG
ctcaaaacttaccttccttt

SEQ ID NO: 24454 - DNA, 20 bp, Artificial Sequence
  Description of Artificial Sequence: Synthetic oligonucleotide
  Target: SCNA; (-) strand; PAM type: NRG; PAM sequence: TGG
cctcaaaacttaccttcctt

SEQ ID NO: 24455 - DNA, 20 bp, Artificial Sequence
  Description of Artificial Sequence: Synthetic oligonucleotide
  Target: SCNA; (-) strand; PAM type: NRG; PAM sequence: AAG
agccactatatcacttcccc

SEQ ID NO: 24456 - DNA, 20 bp, Artificial Sequence
  Description of Artificial Sequence: Synthetic oligonucleotide
  Target: SCNA; (-) strand; PAM type: NRG; PAM sequence: CAG
ggacaccagtagtacttttc

SEQ ID NO: 24457 - DNA, 20 bp, Artificial Sequence
  Description of Artificial Sequence: Synthetic oligonucleotide
  Target: SCNA; (-) strand; PAM type: NRG; PAM sequence: TAG
tggaatagactggacaccag

SEQ ID NO: 24458 - DNA, 20 bp, Artificial Sequence
  Description of Artificial Sequence: Synthetic oligonucleotide
  Target: SCNA; (-) strand; PAM type: NRG; PAM sequence: CAG
atttggaatagactggacac

SEQ ID NO: 24459 - DNA, 20 bp, Artificial Sequence
  Description of Artificial Sequence: Synthetic oligonucleotide
  Target: SCNA; (-) strand; PAM type: NRG; PAM sequence: TGG
cacagtcatttggaatagac

SEQ ID NO: 24460 - DNA, 20 bp, Artificial Sequence
  Description of Artificial Sequence: Synthetic oligonucleotide
  Target: SCNA; (-) strand; PAM type: NRG; PAM sequence: TAG
gattgcacagtcatttggaa

SEQ ID NO: 24461 - DNA, 20 bp, Artificial Sequence
  Description of Artificial Sequence: Synthetic oligonucleotide
  Target: SCNA; (-) strand; PAM type: NRG; PAM sequence: TGG
tccaagattgcacagtcatt

SEQ ID NO: 24462 - DNA, 20 bp, Artificial Sequence
  Description of Artificial Sequence: Synthetic oligonucleotide
  Target: SCNA; (-) strand; PAM type: NRG; PAM sequence: CAG
gtgggtagtccaagattgca

SEQ ID NO: 24463 - DNA, 20 bp, Artificial Sequence
  Description of Artificial Sequence: Synthetic oligonucleotide
  Target: SCNA; (-) strand; PAM type: NRG; PAM sequence: AAG
acagaggaagtgggtagtcc

SEQ ID NO: 24464 - DNA, 20 bp, Artificial Sequence
  Description of Artificial Sequence: Synthetic oligonucleotide
  Target: SCNA; (-) strand; PAM type: NRG; PAM sequence: TAG
aaatctacagaggaagtggg

SEQ ID NO: 24465 - DNA, 20 bp, Artificial Sequence
  Description of Artificial Sequence: Synthetic oligonucleotide
  Target: SCNA; (-) strand; PAM type: NRG; PAM sequence: GGG
cagaaatctacagaggaagt

SEQ ID NO: 24466 - DNA, 20 bp, Artificial Sequence
  Description of Artificial Sequence: Synthetic oligonucleotide
  Target: SCNA; (-) strand; PAM type: NRG; PAM sequence: TGG
acagaaatctacagaggaag

SEQ ID NO: 24467 - DNA, 20 bp, Artificial Sequence
  Description of Artificial Sequence: Synthetic oligonucleotide
  Target: SCNA; (-) strand; PAM type: NRG; PAM sequence: AAG
gaaacagaaatctacagagg

SEQ ID NO: 24468 - DNA, 20 bp, Artificial Sequence
  Description of Artificial Sequence: Synthetic oligonucleotide
  Target: SCNA; (-) strand; PAM type: NRG; PAM sequence: AGG
gaggaaacagaaatctacag

SEQ ID NO: 24469 - DNA, 20 bp, Artificial Sequence
  Description of Artificial Sequence: Synthetic oligonucleotide
  Target: SCNA; (-) strand; PAM type: NRG; PAM sequence: GAG
tgaggaaacagaaatctaca

SEQ ID NO: 24470 - DNA, 20 bp, Artificial Sequence
  Description of Artificial Sequence: Synthetic oligonucleotide
  Target: SCNA; (-) strand; PAM type: NRG; PAM sequence: CAG
gatgaggaaacagaaatcta

SEQ ID NO: 24471 - DNA, 20 bp, Artificial Sequence
  Description of Artificial Sequence: Synthetic oligonucleotide
  Target: SCNA; (-) strand; PAM type: NRG; PAM sequence: CAG
tgattgtagagatgaggaaa

SEQ ID NO: 24472 - DNA, 20 bp, Artificial Sequence
  Description of Artificial Sequence: Synthetic oligonucleotide
  Target: SCNA; (-) strand; PAM type: NRG; PAM sequence: AGG
atcttctgattgtagagatg

SEQ ID NO: 24473 - DNA, 20 bp, Artificial Sequence
  Description of Artificial Sequence: Synthetic oligonucleotide
  Target: SCNA; (-) strand; PAM type: NRG; PAM sequence: GAG
aatcttctgattgtagagat

SEQ ID NO: 24474 - DNA, 20 bp, Artificial Sequence
  Description of Artificial Sequence: Synthetic oligonucleotide
  Target: SCNA; (-) strand; PAM type: NRG; PAM sequence: GAG
agatcaatcttctgattgta

SEQ ID NO: 24475 - DNA, 20 bp, Artificial Sequence
  Description of Artificial Sequence: Synthetic oligonucleotide
  Target: SCNA; (-) strand; PAM type: NRG; PAM sequence: TAG
tcagatcaatcttctgattg

SEQ ID NO: 24476 - DNA, 20 bp, Artificial Sequence
  Description of Artificial Sequence: Synthetic oligonucleotide
  Target: SCNA; (-) strand; PAM type: NRG; PAM sequence: CAG
ccattgacagaccctctgtt

SEQ ID NO: 24477 - DNA, 20 bp, Artificial Sequence
  Description of Artificial Sequence: Synthetic oligonucleotide
  Target: SCNA; (-) strand; PAM type: NRG; PAM sequence: CAG
cttaatgggaagtccattga

SEQ ID NO: 24478 - DNA, 20 bp, Artificial Sequence
  Description of Artificial Sequence: Synthetic oligonucleotide
  Target: SCNA; (-) strand; PAM type: NRG; PAM sequence: AAG
acatcaaagagcttaatggg

SEQ ID NO: 24479 - DNA, 20 bp, Artificial Sequence
  Description of Artificial Sequence: Synthetic oligonucleotide
  Target: SCNA; (-) strand; PAM type: NRG; PAM sequence: GGG
cgcacatcaaagagcttaat

SEQ ID NO: 24480 - DNA, 20 bp, Artificial Sequence
  Description of Artificial Sequence: Synthetic oligonucleotide
  Target: SCNA; (-) strand; PAM type: NRG; PAM sequence: TGG
acgcacatcaaagagcttaa

SEQ ID NO: 24481 - DNA, 20 bp, Artificial Sequence
  Description of Artificial Sequence: Synthetic oligonucleotide
  Target: SCNA; (-) strand; PAM type: NRG; PAM sequence: GAG
actcacatacgcacatcaaa

SEQ ID NO: 24482 - DNA, 20 bp, Artificial Sequence
  Description of Artificial Sequence: Synthetic oligonucleotide
  Target: SCNA; (-) strand; PAM type: NRG; PAM sequence: AAG
gcactcacatacgcacatca

SEQ ID NO: 24483 - DNA, 20 bp, Artificial Sequence
  Description of Artificial Sequence: Synthetic oligonucleotide
  Target: SCNA; (-) strand; PAM type: NRG; PAM sequence: CAG
gctatagaccctcttagctt

SEQ ID NO: 24484 - DNA, 20 bp, Artificial Sequence
  Description of Artificial Sequence: Synthetic oligonucleotide
  Target: SCNA; (-) strand; PAM type: NRG; PAM sequence: TAG
atagaagctatagaccctct

SEQ ID NO: 24485 - DNA, 20 bp, Artificial Sequence
  Description of Artificial Sequence: Synthetic oligonucleotide
  Target: SCNA; (-) strand; PAM type: NRG; PAM sequence: TAG
tcacgggctaatagaagcta

SEQ ID NO: 24486 - DNA, 20 bp, Artificial Sequence
  Description of Artificial Sequence: Synthetic oligonucleotide
  Target: SCNA; (-) strand; PAM type: NRG; PAM sequence: AAG
cccttttcacgggctaatag

SEQ ID NO: 24487 - DNA, 20 bp, Artificial Sequence
  Description of Artificial Sequence: Synthetic oligonucleotide
  Target: SCNA; (-) strand; PAM type: NRG; PAM sequence: TAG
cgacccttttcacgggctaa

SEQ ID NO: 24488 - DNA, 20 bp, Artificial Sequence
  Description of Artificial Sequence: Synthetic oligonucleotide
  Target: SCNA; (-) strand; PAM type: NRG; PAM sequence: GGG
gtgtctccgacccttttcac

SEQ ID NO: 24489 - DNA, 20 bp, Artificial Sequence
  Description of Artificial Sequence: Synthetic oligonucleotide
  Target: SCNA; (-) strand; PAM type: NRG; PAM sequence: CGG
tgtgtctccgacccttttca

SEQ ID NO: 24490 - DNA, 20 bp, Artificial Sequence
  Description of Artificial Sequence: Synthetic oligonucleotide
  Target: SCNA; (-) strand; PAM type: NRG; PAM sequence: CAG
ttagtacacaggcaattaat

SEQ ID NO: 24491 - DNA, 20 bp, Artificial Sequence
  Description of Artificial Sequence: Synthetic oligonucleotide
  Target: SCNA; (-) strand; PAM type: NRG; PAM sequence: AGG
ctcagattaaattagtacac

SEQ ID NO: 24492 - DNA, 20 bp, Artificial Sequence
  Description of Artificial Sequence: Synthetic oligonucleotide
  Target: SCNA; (-) strand; PAM type: NRG; PAM sequence: CAG
cctcagattaaattagtaca

SEQ ID NO: 24493 - DNA, 20 bp, Artificial Sequence
  Description of Artificial Sequence: Synthetic oligonucleotide
  Target: SCNA; (-) strand; PAM type: NRG; PAM sequence: TAG
agagggacctcagattaaat

SEQ ID NO: 24494 - DNA, 20 bp, Artificial Sequence
  Description of Artificial Sequence: Synthetic oligonucleotide
  Target: SCNA; (-) strand; PAM type: NRG; PAM sequence: CAG
tcacaagttaagagggacct

SEQ ID NO: 24495 - DNA, 20 bp, Artificial Sequence
  Description of Artificial Sequence: Synthetic oligonucleotide
  Target: SCNA; (-) strand; PAM type: NRG; PAM sequence: GGG
taagatttcacaagttaaga

SEQ ID NO: 24496 - DNA, 20 bp, Artificial Sequence
  Description of Artificial Sequence: Synthetic oligonucleotide
  Target: SCNA; (-) strand; PAM type: NRG; PAM sequence: AGG
gtaagatttcacaagttaag

SEQ ID NO: 24497 - DNA, 20 bp, Artificial Sequence
  Description of Artificial Sequence: Synthetic oligonucleotide
  Target: SCNA; (-) strand; PAM type: NRG; PAM sequence: GAG
cgtaagatttcacaagttaa

SEQ ID NO: 24498 - DNA, 20 bp, Artificial Sequence
  Description of Artificial Sequence: Synthetic oligonucleotide
  Target: SCNA; (-) strand; PAM type: NRG; PAM sequence: AAG
ttcgtaagatttcacaagtt

SEQ ID NO: 24499 - DNA, 20 bp, Artificial Sequence
  Description of Artificial Sequence: Synthetic oligonucleotide
  Target: SCNA; (-) strand; PAM type: NRG; PAM sequence: AAG
atagcttcgtaagatttcac

SEQ ID NO: 24500 - DNA, 20 bp, Artificial Sequence
  Description of Artificial Sequence: Synthetic oligonucleotide
  Target: SCNA; (-) strand; PAM type: NRG; PAM sequence: AAG
aattctatttatagcttcgt

SEQ ID NO: 24501 - DNA, 20 bp, Artificial Sequence
  Description of Artificial Sequence: Synthetic oligonucleotide
  Target: SCNA; (-) strand; PAM type: NRG; PAM sequence: TAG
taaaattttaattctattta

SEQ ID NO: 24502 - DNA, 20 bp, Artificial Sequence
  Description of Artificial Sequence: Synthetic oligonucleotide
  Target: SCNA; (-) strand; PAM type: NRG; PAM sequence: TGG
ataataattatattaattcc

SEQ ID NO: 24503 - DNA, 20 bp, Artificial Sequence
  Description of Artificial Sequence: Synthetic oligonucleotide
  Target: SCNA; (-) strand; PAM type: NRG; PAM sequence: GGG
cttttcaaataatcttatta

SEQ ID NO: 24504 - DNA, 20 bp, Artificial Sequence
  Description of Artificial Sequence: Synthetic oligonucleotide
  Target: SCNA; (-) strand; PAM type: NRG; PAM sequence: AGG
gcttttcaaataatcttatt

SEQ ID NO: 24505 - DNA, 20 bp, Artificial Sequence
  Description of Artificial Sequence: Synthetic oligonucleotide
  Target: SCNA; (-) strand; PAM type: NRG; PAM sequence: TAG
tgcttttcaaataatcttat

SEQ ID NO: 24506 - DNA, 20 bp, Artificial Sequence
  Description of Artificial Sequence: Synthetic oligonucleotide
  Target: SCNA; (-) strand; PAM type: NRG; PAM sequence: TGG
gaatgcatggttggtcatgg

SEQ ID NO: 24507 - DNA, 20 bp, Artificial Sequence
  Description of Artificial Sequence: Synthetic oligonucleotide
  Target: SCNA; (-) strand; PAM type: NRG; PAM sequence: TGG
tttgaatgcatggttggtca

SEQ ID NO: 24508 - DNA, 20 bp, Artificial Sequence
  Description of Artificial Sequence: Synthetic oligonucleotide
  Target: SCNA; (-) strand; PAM type: NRG; PAM sequence: TGG
ctaatgtttgaatgcatggt

SEQ ID NO: 24509 - DNA, 20 bp, Artificial Sequence
  Description of Artificial Sequence: Synthetic oligonucleotide
  Target: SCNA; (-) strand; PAM type: NRG; PAM sequence: TGG
tcagctaatgtttgaatgca

SEQ ID NO: 24510 - DNA, 20 bp, Artificial Sequence
  Description of Artificial Sequence: Synthetic oligonucleotide
  Target: SCNA; (-) strand; PAM type: NRG; PAM sequence: CAG
gggcttctagtgaagttctt

SEQ ID NO: 24511 - DNA, 20 bp, Artificial Sequence
  Description of Artificial Sequence: Synthetic oligonucleotide
  Target: SCNA; (-) strand; PAM type: NRG; PAM sequence: AAG
tccttactgggcttctagtg

SEQ ID NO: 24512 - DNA, 20 bp, Artificial Sequence
  Description of Artificial Sequence: Synthetic oligonucleotide
  Target: SCNA; (-) strand; PAM type: NRG; PAM sequence: TAG
gcaaatccttactgggcttc

SEQ ID NO: 24513 - DNA, 20 bp, Artificial Sequence
  Description of Artificial Sequence: Synthetic oligonucleotide
  Target: SCNA; (-) strand; PAM type: NRG; PAM sequence: GGG
aatgatggcaaatccttact

SEQ ID NO: 24514 - DNA, 20 bp, Artificial Sequence
  Description of Artificial Sequence: Synthetic oligonucleotide
  Target: SCNA; (-) strand; PAM type: NRG; PAM sequence: TGG
taatgatggcaaatccttac

SEQ ID NO: 24515 - DNA, 20 bp, Artificial Sequence
  Description of Artificial Sequence: Synthetic oligonucleotide
  Target: SCNA; (-) strand; PAM type: NRG; PAM sequence: TGG
ggtgcaatggatgctaatga

SEQ ID NO: 24516 - DNA, 20 bp, Artificial Sequence
  Description of Artificial Sequence: Synthetic oligonucleotide
  Target: SCNA; (-) strand; PAM type: NRG; PAM sequence: TGG
atgtctagtgtctggtgcaa

SEQ ID NO: 24517 - DNA, 20 bp, Artificial Sequence
  Description of Artificial Sequence: Synthetic oligonucleotide
  Target: SCNA; (-) strand; PAM type: NRG; PAM sequence: TGG
gtacttacatgtctagtgtc

SEQ ID NO: 24518 - DNA, 20 bp, Artificial Sequence
  Description of Artificial Sequence: Synthetic oligonucleotide
  Target: SCNA; (-) strand; PAM type: NRG; PAM sequence: TAG
actacatgtacttacatgtc

SEQ ID NO: 24519 - DNA, 20 bp, Artificial Sequence
  Description of Artificial Sequence: Synthetic oligonucleotide
  Target: SCNA; (-) strand; PAM type: NRG; PAM sequence: TAG
aaaaatatctgtgatatatt

SEQ ID NO: 24520 - DNA, 20 bp, Artificial Sequence
  Description of Artificial Sequence: Synthetic oligonucleotide
  Target: SCNA; (-) strand; PAM type: NRG; PAM sequence: CAG
aaactctgataataaaaagg

SEQ ID NO: 24521 - DNA, 20 bp, Artificial Sequence
  Description of Artificial Sequence: Synthetic oligonucleotide
  Target: SCNA; (-) strand; PAM type: NRG; PAM sequence: AGG
ttaaaactctgataataaaa

SEQ ID NO: 24522 - DNA, 20 bp, Artificial Sequence
  Description of Artificial Sequence: Synthetic oligonucleotide
  Target: SCNA; (-) strand; PAM type: NRG; PAM sequence: AAG
attaaaactctgataataaa

SEQ ID NO: 24523 - DNA, 20 bp, Artificial Sequence
  Description of Artificial Sequence: Synthetic oligonucleotide
  Target: SCNA; (-) strand; PAM type: NRG; PAM sequence: TAG
aagtagcagccttaccttga

SEQ ID NO: 24524 - DNA, 20 bp, Artificial Sequence
  Description of Artificial Sequence: Synthetic oligonucleotide
  Target: SCNA; (-) strand; PAM type: NRG; PAM sequence: CAG
cttcatgtaatcctaagtag

SEQ ID NO: 24525 - DNA, 20 bp, Artificial Sequence
  Description of Artificial Sequence: Synthetic oligonucleotide
  Target: SCNA; (-) strand; PAM type: NRG; PAM sequence: TAG
ccacttcatgtaatcctaag

SEQ ID NO: 24526 - DNA, 20 bp, Artificial Sequence
  Description of Artificial Sequence: Synthetic oligonucleotide
  Target: SCNA; (-) strand; PAM type: NRG; PAM sequence: AAG
tttccacttcatgtaatcct

SEQ ID NO: 24527 - DNA, 20 bp, Artificial Sequence
  Description of Artificial Sequence: Synthetic oligonucleotide
  Target: SCNA; (-) strand; PAM type: NRG; PAM sequence: GGG
atttgctggcaaactattct

SEQ ID NO: 24528 - DNA, 20 bp, Artificial Sequence
  Description of Artificial Sequence: Synthetic oligonucleotide
  Target: SCNA; (-) strand; PAM type: NRG; PAM sequence: TGG
tatttgctggcaaactattc

SEQ ID NO: 24529 - DNA, 20 bp, Artificial Sequence
  Description of Artificial Sequence: Synthetic oligonucleotide
  Target: SCNA; (-) strand; PAM type: NRG; PAM sequence: TGG
gagaaagaagttttatttgc

SEQ ID NO: 24530 - DNA, 20 bp, Artificial Sequence
  Description of Artificial Sequence: Synthetic oligonucleotide
  Target: SCNA; (-) strand; PAM type: NRG; PAM sequence: AAG
tcttgaaaattgtgagaaag

SEQ ID NO: 24531 - DNA, 20 bp, Artificial Sequence
  Description of Artificial Sequence: Synthetic oligonucleotide
  Target: SCNA; (-) strand; PAM type: NRG; PAM sequence: AAG
atatcttgaaaattgtgaga

SEQ ID NO: 24532 - DNA, 20 bp, Artificial Sequence
  Description of Artificial Sequence: Synthetic oligonucleotide
  Target: SCNA; (-) strand; PAM type: NRG; PAM sequence: GAG
atgaatatcttgaaaattgt

SEQ ID NO: 24533 - DNA, 20 bp, Artificial Sequence
  Description of Artificial Sequence: Synthetic oligonucleotide
  Target: SCNA; (-) strand; PAM type: NRG; PAM sequence: TGG
agttacaatcaaaatgattt

SEQ ID NO: 24534 - DNA, 20 bp, Artificial Sequence
  Description of Artificial Sequence: Synthetic oligonucleotide
  Target: SCNA; (-) strand; PAM type: NRG; PAM sequence: AAG
agtgctattcagctatccaa

SEQ ID NO: 24535 - DNA, 20 bp, Artificial Sequence
  Description of Artificial Sequence: Synthetic oligonucleotide
  Target: SCNA; (-) strand; PAM type: NRG; PAM sequence: CAG
agtataagaacagtgctatt

SEQ ID NO: 24536 - DNA, 20 bp, Artificial Sequence
  Description of Artificial Sequence: Synthetic oligonucleotide
  Target: SCNA; (-) strand; PAM type: NRG; PAM sequence: CAG
tcatatgcttagtataagaa

SEQ ID NO: 24537 - DNA, 20 bp, Artificial Sequence
  Description of Artificial Sequence: Synthetic oligonucleotide
  Target: SCNA; (-) strand; PAM type: NRG; PAM sequence: AAG
tataatcatatgcttagtat

SEQ ID NO: 24538 - DNA, 20 bp, Artificial Sequence
  Description of Artificial Sequence: Synthetic oligonucleotide
  Target: SCNA; (-) strand; PAM type: NRG; PAM sequence: TAG
gtcttttataatcatatgct

SEQ ID NO: 24539 - DNA, 20 bp, Artificial Sequence
  Description of Artificial Sequence: Synthetic oligonucleotide
  Target: SCNA; (-) strand; PAM type: NRG; PAM sequence: GGG
gcacaacaactttcatttct

SEQ ID NO: 24540 - DNA, 20 bp, Artificial Sequence
  Description of Artificial Sequence: Synthetic oligonucleotide
  Target: SCNA; (-) strand; PAM type: NRG; PAM sequence: TGG
agcacaacaactttcatttc

SEQ ID NO: 24541 - DNA, 20 bp, Artificial Sequence
  Description of Artificial Sequence: Synthetic oligonucleotide
  Target: SCNA; (-) strand; PAM type: NRG; PAM sequence: AAG
aaggagggaaggaagtgagt

SEQ ID NO: 24542 - DNA, 20 bp, Artificial Sequence
  Description of Artificial Sequence: Synthetic oligonucleotide
  Target: SCNA; (-) strand; PAM type: NRG; PAM sequence: GAG
aattaaggagggaaggaagt

SEQ ID NO: 24543 - DNA, 20 bp, Artificial Sequence
  Description of Artificial Sequence: Synthetic oligonucleotide
  Target: SCNA; (-) strand; PAM type: NRG; PAM sequence: AAG
attaaattaaggagggaagg

SEQ ID NO: 24544 - DNA, 20 bp, Artificial Sequence
  Description of Artificial Sequence: Synthetic oligonucleotide
  Target: SCNA; (-) strand; PAM type: NRG; PAM sequence: AGG
tttattaaattaaggaggga

SEQ ID NO: 24545 - DNA, 20 bp, Artificial Sequence
  Description of Artificial Sequence: Synthetic oligonucleotide
  Target: SCNA; (-) strand; PAM type: NRG; PAM sequence: AAG
atttattaaattaaggaggg

SEQ ID NO: 24546 - DNA, 20 bp, Artificial Sequence
  Description of Artificial Sequence: Synthetic oligonucleotide
  Target: SCNA; (-) strand; PAM type: NRG; PAM sequence: GGG
aacatttattaaattaagga

SEQ ID NO: 24547 - DNA, 20 bp, Artificial Sequence
  Description of Artificial Sequence: Synthetic oligonucleotide
  Target: SCNA; (-) strand; PAM type: NRG; PAM sequence: AGG
aaacatttattaaattaagg

SEQ ID NO: 24548 - DNA, 20 bp, Artificial Sequence
  Description of Artificial Sequence: Synthetic oligonucleotide
  Target: SCNA; (-) strand; PAM type: NRG; PAM sequence: GAG
caaacatttattaaattaag

SEQ ID NO: 24549 - DNA, 20 bp, Artificial Sequence
  Description of Artificial Sequence: Synthetic oligonucleotide
  Target: SCNA; (-) strand; PAM type: NRG; PAM sequence: AGG
aacaaacatttattaaatta

SEQ ID NO: 24550 - DNA, 20 bp, Artificial Sequence
  Description of Artificial Sequence: Synthetic oligonucleotide
  Target: SCNA; (-) strand; PAM type: NRG; PAM sequence: AAG
taacaaacatttattaaatt

SEQ ID NO: 24551 - DNA, 20 bp, Artificial Sequence
  Description of Artificial Sequence: Synthetic oligonucleotide
  Target: SCNA; (-) strand; PAM type: NRG; PAM sequence: TAG
ggagagtttccaacttacag

SEQ ID NO: 24552 - DNA, 20 bp, Artificial Sequence
  Description of Artificial Sequence: Synthetic oligonucleotide
  Target: SCNA; (-) strand; PAM type: NRG; PAM sequence: CAG
ctgggagagtttccaactta

SEQ ID NO: 24553 - DNA, 20 bp, Artificial Sequence
  Description of Artificial Sequence: Synthetic oligonucleotide
  Target: SCNA; (-) strand; PAM type: NRG; PAM sequence: GAG
tatttcacaagtgtctggga

SEQ ID NO: 24554 - DNA, 20 bp, Artificial Sequence
  Description of Artificial Sequence: Synthetic oligonucleotide
  Target: SCNA; (-) strand; PAM type: NRG; PAM sequence: GAG
gatatttcacaagtgtctgg

SEQ ID NO: 24555 - DNA, 20 bp, Artificial Sequence
  Description of Artificial Sequence: Synthetic oligonucleotide
  Target: SCNA; (-) strand; PAM type: NRG; PAM sequence: GGG
ttgatatttcacaagtgtct

SEQ ID NO: 24556 - DNA, 20 bp, Artificial Sequence
  Description of Artificial Sequence: Synthetic oligonucleotide
  Target: SCNA; (-) strand; PAM type: NRG; PAM sequence: TGG
attgatatttcacaagtgtc

SEQ ID NO: 24557 - DNA, 20 bp, Artificial Sequence
  Description of Artificial Sequence: Synthetic oligonucleotide
  Target: SCNA; (-) strand; PAM type: NRG; PAM sequence: AAG
tttgttcattgatatttcac

SEQ ID NO: 24558 - DNA, 20 bp, Artificial Sequence
  Description of Artificial Sequence: Synthetic oligonucleotide
  Target: SCNA; (-) strand; PAM type: NRG; PAM sequence: GAG
ctagaatgtaggcaccatga

SEQ ID NO: 24559 - DNA, 20 bp, Artificial Sequence
  Description of Artificial Sequence: Synthetic oligonucleotide
  Target: SCNA; (-) strand; PAM type: NRG; PAM sequence: GAG
ttctagaatgtaggcaccat

SEQ ID NO: 24560 - DNA, 20 bp, Artificial Sequence
  Description of Artificial Sequence: Synthetic oligonucleotide
  Target: SCNA; (-) strand; PAM type: NRG; PAM sequence: AGG
atttctcccttctagaatgt

SEQ ID NO: 24561 - DNA, 20 bp, Artificial Sequence
  Description of Artificial Sequence: Synthetic oligonucleotide
  Target: SCNA; (-) strand; PAM type: NRG; PAM sequence: TAG
tatttctcccttctagaatg

SEQ ID NO: 24562 - DNA, 20 bp, Artificial Sequence
  Description of Artificial Sequence: Synthetic oligonucleotide
  Target: SCNA; (-) strand; PAM type: NRG; PAM sequence: TAG
tttattttatttctcccttc

SEQ ID NO: 24563 - DNA, 20 bp, Artificial Sequence
  Description of Artificial Sequence: Synthetic oligonucleotide
  Target: SCNA; (-) strand; PAM type: NRG; PAM sequence: AAG
tctttttcctttctttgcca

SEQ ID NO: 24564 - DNA, 20 bp, Artificial Sequence
  Description of Artificial Sequence: Synthetic oligonucleotide
  Target: SCNA; (-) strand; PAM type: NRG; PAM sequence: CAG
cttctcacctctggtattcc

SEQ ID NO: 24565 - DNA, 20 bp, Artificial Sequence
  Description of Artificial Sequence: Synthetic oligonucleotide
  Target: SCNA; (-) strand; PAM type: NRG; PAM sequence: TGG
ggagccattcttctcacctc

SEQ ID NO: 24566 - DNA, 20 bp, Artificial Sequence
  Description of Artificial Sequence: Synthetic oligonucleotide
  Target: SCNA; (-) strand; PAM type: NRG; PAM sequence: GAG
ccctaatctatataaaattg

SEQ ID NO: 24567 - DNA, 20 bp, Artificial Sequence
  Description of Artificial Sequence: Synthetic oligonucleotide
  Target: SCNA; (-) strand; PAM type: NRG; PAM sequence: TGG
tgccctaatctatataaaat

SEQ ID NO: 24568 - DNA, 20 bp, Artificial Sequence
  Description of Artificial Sequence: Synthetic oligonucleotide
  Target: SCNA; (-) strand; PAM type: NRG; PAM sequence: AGG
gccctgacacgttcttgggg

SEQ ID NO: 24569 - DNA, 20 bp, Artificial Sequence
  Description of Artificial Sequence: Synthetic oligonucleotide
  Target: SCNA; (-) strand; PAM type: NRG; PAM sequence: GAG
tgccctgacacgttcttggg

SEQ ID NO: 24570 - DNA, 20 bp, Artificial Sequence
  Description of Artificial Sequence: Synthetic oligonucleotide
  Target: SCNA; (-) strand; PAM type: NRG; PAM sequence: GGG
cttgccctgacacgttcttg

SEQ ID NO: 24571 - DNA, 20 bp, Artificial Sequence
  Description of Artificial Sequence: Synthetic oligonucleotide
  Target: SCNA; (-) strand; PAM type: NRG; PAM sequence: GGG
ccttgccctgacacgttctt

SEQ ID NO: 24572 - DNA, 20 bp, Artificial Sequence
  Description of Artificial Sequence: Synthetic oligonucleotide
  Target: SCNA; (-) strand; PAM type: NRG; PAM sequence: TGG
cccttgccctgacacgttct

SEQ ID NO: 24573 - DNA, 20 bp, Artificial Sequence
  Description of Artificial Sequence: Synthetic oligonucleotide
  Target: SCNA; (-) strand; PAM type: NRG; PAM sequence: AAG
tgctatttcttgaataaatc

SEQ ID NO: 24574 - DNA, 20 bp, Artificial Sequence
  Description of Artificial Sequence: Synthetic oligonucleotide
  Target: SCNA; (-) strand; PAM type: NRG; PAM sequence: CAG
cacaaacatcaccactacaa

SEQ ID NO: 24575 - DNA, 20 bp, Artificial Sequence
  Description of Artificial Sequence: Synthetic oligonucleotide
  Target: SCNA; (-) strand; PAM type: NRG; PAM sequence: AAG
atgaggtgtcaacaacgttg

SEQ ID NO: 24576 - DNA, 20 bp, Artificial Sequence
  Description of Artificial Sequence: Synthetic oligonucleotide
  Target: SCNA; (-) strand; PAM type: NRG; PAM sequence: AGG
tatggaactaatacagtatg

SEQ ID NO: 24577 - DNA, 20 bp, Artificial Sequence
  Description of Artificial Sequence: Synthetic oligonucleotide
  Target: SCNA; (-) strand; PAM type: NRG; PAM sequence: GAG
atatggaactaatacagtat

SEQ ID NO: 24578 - DNA, 20 bp, Artificial Sequence
  Description of Artificial Sequence: Synthetic oligonucleotide
  Target: SCNA; (-) strand; PAM type: NRG; PAM sequence: CAG
ttttaaatatggaactaata

SEQ ID NO: 24579 - DNA, 20 bp, Artificial Sequence
  Description of Artificial Sequence: Synthetic oligonucleotide
  Target: SCNA; (-) strand; PAM type: NRG; PAM sequence: TGG
tataactttcattttaaata

SEQ ID NO: 24580 - DNA, 20 bp, Artificial Sequence
  Description of Artificial Sequence: Synthetic oligonucleotide
  Target: SCNA; (-) strand; PAM type: NRG; PAM sequence: AAG
acacgaataagattatacca

SEQ ID NO: 24581 - DNA, 20 bp, Artificial Sequence
  Description of Artificial Sequence: Synthetic oligonucleotide
  Target: SCNA; (-) strand; PAM type: NRG; PAM sequence: AAG
gacaaacatgggacacgaat

SEQ ID NO: 24582 - DNA, 20 bp, Artificial Sequence
  Description of Artificial Sequence: Synthetic oligonucleotide
  Target: SCNA; (-) strand; PAM type: NRG; PAM sequence: GGG
tgaatttttttgacaaacat

SEQ ID NO: 24583 - DNA, 20 bp, Artificial Sequence
  Description of Artificial Sequence: Synthetic oligonucleotide
  Target: SCNA; (-) strand; PAM type: NRG; PAM sequence: TGG
ctgaatttttttgacaaaca

SEQ ID NO: 24584 - DNA, 20 bp, Artificial Sequence
  Description of Artificial Sequence: Synthetic oligonucleotide
  Target: SCNA; (-) strand; PAM type: NRG; PAM sequence: AAG
gtagattttaaaattctgag

SEQ ID NO: 24585 - DNA, 20 bp, Artificial Sequence
  Description of Artificial Sequence: Synthetic oligonucleotide
  Target: SCNA; (-) strand; PAM type: NRG; PAM sequence: GAG
gaggtagattttaaaattct

SEQ ID NO: 24586 - DNA, 20 bp, Artificial Sequence
  Description of Artificial Sequence: Synthetic oligonucleotide
  Target: SCNA; (-) strand; PAM type: NRG; PAM sequence: TAG
ccagagatatagttttgagg

SEQ ID NO: 24587 - DNA, 20 bp, Artificial Sequence
  Description of Artificial Sequence: Synthetic oligonucleotide
  Target: SCNA; (-) strand; PAM type: NRG; PAM sequence: AGG
caaccagagatatagttttg

SEQ ID NO: 24588 - DNA, 20 bp, Artificial Sequence
  Description of Artificial Sequence: Synthetic oligonucleotide
  Target: SCNA; (-) strand; PAM type: NRG; PAM sequence: GAG
ccaaccagagatatagtttt

SEQ ID NO: 24589 - DNA, 20 bp, Artificial Sequence
  Description of Artificial Sequence: Synthetic oligonucleotide
  Target: SCNA; (-) strand; PAM type: NRG; PAM sequence: TAG
atacataccaaccagagata

SEQ ID NO: 24590 - DNA, 20 bp, Artificial Sequence
  Description of Artificial Sequence: Synthetic oligonucleotide
  Target: SCNA; (-) strand; PAM type: NRG; PAM sequence: GAG
cttaaaatacataccaacca

SEQ ID NO: 24591 - DNA, 20 bp, Artificial Sequence
  Description of Artificial Sequence: Synthetic oligonucleotide
  Target: SCNA; (-) strand; PAM type: NRG; PAM sequence: CAG
gacttaaaatacataccaac

SEQ ID NO: 24592 - DNA, 20 bp, Artificial Sequence
  Description of Artificial Sequence: Synthetic oligonucleotide
  Target: SCNA; (-) strand; PAM type: NRG; PAM sequence: GAG
tacatatttgtgggaaatga

SEQ ID NO: 24593 - DNA, 20 bp, Artificial Sequence
  Description of Artificial Sequence: Synthetic oligonucleotide
  Target: SCNA; (-) strand; PAM type: NRG; PAM sequence: GAG
aatacatatttgtgggaaat

SEQ ID NO: 24594 - DNA, 20 bp, Artificial Sequence
  Description of Artificial Sequence: Synthetic oligonucleotide
  Target: SCNA; (-) strand; PAM type: NRG; PAM sequence: GGG
attgccaaatacatatttgt

SEQ ID NO: 24595 - DNA, 20 bp, Artificial Sequence
  Description of Artificial Sequence: Synthetic oligonucleotide
  Target: SCNA; (-) strand; PAM type: NRG; PAM sequence: TGG
cattgccaaatacatatttg

SEQ ID NO: 24596 - DNA, 20 bp, Artificial Sequence
  Description of Artificial Sequence: Synthetic oligonucleotide
  Target: SCNA; (-) strand; PAM type: NRG; PAM sequence: CAG
catatctgcatattacataa

SEQ ID NO: 24597 - DNA, 20 bp, Artificial Sequence
  Description of Artificial Sequence: Synthetic oligonucleotide
  Target: SCNA; (-) strand; PAM type: NRG; PAM sequence: TGG
tgacatcatctcttattaaa

SEQ ID NO: 24598 - DNA, 20 bp, Artificial Sequence
  Description of Artificial Sequence: Synthetic oligonucleotide
  Target: SCNA; (-) strand; PAM type: NRG; PAM sequence: TAG
ttcttttacttatttcttta

SEQ ID NO: 24599 - DNA, 20 bp, Artificial Sequence
  Description of Artificial Sequence: Synthetic oligonucleotide
  Target: SCNA; (-) strand; PAM type: NRG; PAM sequence: AAG
atttcctaatttccaaaata

SEQ ID NO: 24600 - DNA, 20 bp, Artificial Sequence
  Description of Artificial Sequence: Synthetic oligonucleotide
  Target: SCNA; (-) strand; PAM type: NRG; PAM sequence: GAG
cttggaatttctcttccttg

SEQ ID NO: 24601 - DNA, 20 bp, Artificial Sequence
  Description of Artificial Sequence: Synthetic oligonucleotide
  Target: SCNA; (-) strand; PAM type: NRG; PAM sequence: TGG
gtcttggaatttctcttcct

SEQ ID NO: 24602 - DNA, 20 bp, Artificial Sequence
  Description of Artificial Sequence: Synthetic oligonucleotide
  Target: SCNA; (-) strand; PAM type: NRG; PAM sequence: TGG
ttcatgttaattgtaagtct

SEQ ID NO: 24603 - DNA, 20 bp, Artificial Sequence
  Description of Artificial Sequence: Synthetic oligonucleotide
  Target: SCNA; (-) strand; PAM type: NRG; PAM sequence: AAG
agggctttcatgttaattgt

SEQ ID NO: 24604 - DNA, 20 bp, Artificial Sequence
  Description of Artificial Sequence: Synthetic oligonucleotide
  Target: SCNA; (-) strand; PAM type: NRG; PAM sequence: GGG
tgacatttcagaaagaatga

SEQ ID NO: 24605 - DNA, 20 bp, Artificial Sequence
  Description of Artificial Sequence: Synthetic oligonucleotide
  Target: SCNA; (-) strand; PAM type: NRG; PAM sequence: AGG
gtgacatttcagaaagaatg

SEQ ID NO: 24606 - DNA, 20 bp, Artificial Sequence
  Description of Artificial Sequence: Synthetic oligonucleotide
  Target: SCNA; (-) strand; PAM type: NRG; PAM sequence: GAG
agtgacatttcagaaagaat

SEQ ID NO: 24607 - DNA, 20 bp, Artificial Sequence
  Description of Artificial Sequence: Synthetic oligonucleotide
  Target: SCNA; (-) strand; PAM type: NRG; PAM sequence: AAG
aggaacagtgacatttcaga

SEQ ID NO: 24608 - DNA, 20 bp, Artificial Sequence
  Description of Artificial Sequence: Synthetic oligonucleotide
  Target: SCNA; (-) strand; PAM type: NRG; PAM sequence: CAG
ccaaaggaacagtgacattt

SEQ ID NO: 24609 - DNA, 20 bp, Artificial Sequence
  Description of Artificial Sequence: Synthetic oligonucleotide
  Target: SCNA; (-) strand; PAM type: NRG; PAM sequence: CAG
gtagtaaaatgccaaaggaa

SEQ ID NO: 24610 - DNA, 20 bp, Artificial Sequence
  Description of Artificial Sequence: Synthetic oligonucleotide
  Target: SCNA; (-) strand; PAM type: NRG; PAM sequence: AGG
aaaatgtagtaaaatgccaa

SEQ ID NO: 24611 - DNA, 20 bp, Artificial Sequence
  Description of Artificial Sequence: Synthetic oligonucleotide
  Target: SCNA; (-) strand; PAM type: NRG; PAM sequence: AAG
aaaaatgtagtaaaatgcca

SEQ ID NO: 24612 - DNA, 20 bp, Artificial Sequence
  Description of Artificial Sequence: Synthetic oligonucleotide
  Target: SCNA; (-) strand; PAM type: NRG; PAM sequence: TAG
agttaatgaaacaaaaaatg

SEQ ID NO: 24613 - DNA, 20 bp, Artificial Sequence
  Description of Artificial Sequence: Synthetic oligonucleotide
  Target: SCNA; (-) strand; PAM type: NRG; PAM sequence: AAG
ttgtttcaatttctggaaga

SEQ ID NO: 24614 - DNA, 20 bp, Artificial Sequence
  Description of Artificial Sequence: Synthetic oligonucleotide
  Target: SCNA; (-) strand; PAM type: NRG; PAM sequence: AAG
atgattgtttcaatttctgg

SEQ ID NO: 24615 - DNA, 20 bp, Artificial Sequence
  Description of Artificial Sequence: Synthetic oligonucleotide
  Target: SCNA; (-) strand; PAM type: NRG; PAM sequence: TGG
attatgattgtttcaatttc

SEQ ID NO: 24616 - DNA, 20 bp, Artificial Sequence
  Description of Artificial Sequence: Synthetic oligonucleotide
  Target: SCNA; (-) strand; PAM type: NRG; PAM sequence: CAG
gcttgtttcaggcattaacc

SEQ ID NO: 24617 - DNA, 20 bp, Artificial Sequence
  Description of Artificial Sequence: Synthetic oligonucleotide
  Target: SCNA; (-) strand; PAM type: NRG; PAM sequence: AGG
atattggtcttgcttgtttc

SEQ ID NO: 24618 - DNA, 20 bp, Artificial Sequence
  Description of Artificial Sequence: Synthetic oligonucleotide
  Target: SCNA; (-) strand; PAM type: NRG; PAM sequence: CAG
tatattggtcttgcttgttt

SEQ ID NO: 24619 - DNA, 20 bp, Artificial Sequence
  Description of Artificial Sequence: Synthetic oligonucleotide
  Target: SCNA; (-) strand; PAM type: NRG; PAM sequence: TGG
aaaaagtgctacctttatat

SEQ ID NO: 24620 - DNA, 20 bp, Artificial Sequence
  Description of Artificial Sequence: Synthetic oligonucleotide
  Target: SCNA; (-) strand; PAM type: NRG; PAM sequence: AAG
ctgaccctccccttgtgaaa

SEQ ID NO: 24621 - DNA, 20 bp, Artificial Sequence
  Description of Artificial Sequence: Synthetic oligonucleotide
  Target: SCNA; (-) strand; PAM type: NRG; PAM sequence: CGG
aagatacttactgtggggaa

SEQ ID NO: 24622 - DNA, 20 bp, Artificial Sequence
  Description of Artificial Sequence: Synthetic oligonucleotide
  Target: SCNA; (-) strand; PAM type: NRG; PAM sequence: GGG
ggagcaagatacttactgtg

SEQ ID NO: 24623 - DNA, 20 bp, Artificial Sequence
  Description of Artificial Sequence: Synthetic oligonucleotide
  Target: SCNA; (-) strand; PAM type: NRG; PAM sequence: GGG
aggagcaagatacttactgt

SEQ ID NO: 24624 - DNA, 20 bp, Artificial Sequence
  Description of Artificial Sequence: Synthetic oligonucleotide
  Target: SCNA; (-) strand; PAM type: NRG; PAM sequence: TGG
caggagcaagatacttactg

SEQ ID NO: 24625 - DNA, 20 bp, Artificial Sequence
  Description of Artificial Sequence: Synthetic oligonucleotide
  Target: SCNA; (-) strand; PAM type: NRG; PAM sequence: AAG
tgaggcctggaggcaggagc

SEQ ID NO: 24626 - DNA, 20 bp, Artificial Sequence
  Description of Artificial Sequence: Synthetic oligonucleotide
  Target: SCNA; (-) strand; PAM type: NRG; PAM sequence: GAG
catgtgaggcctggaggcag

SEQ ID NO: 24627 - DNA, 20 bp, Artificial Sequence
  Description of Artificial Sequence: Synthetic oligonucleotide
  Target: SCNA; (-) strand; PAM type: NRG; PAM sequence: AGG
ttcatgtgaggcctggaggc

SEQ ID NO: 24628 - DNA, 20 bp, Artificial Sequence
  Description of Artificial Sequence: Synthetic oligonucleotide
  Target: SCNA; (-) strand; PAM type: NRG; PAM sequence: CAG
tttcatgtgaggcctggagg

SEQ ID NO: 24629 - DNA, 20 bp, Artificial Sequence
  Description of Artificial Sequence: Synthetic oligonucleotide
  Target: SCNA; (-) strand; PAM type: NRG; PAM sequence: AGG
cattttcatgtgaggcctgg

SEQ ID NO: 24630 - DNA, 20 bp, Artificial Sequence
  Description of Artificial Sequence: Synthetic oligonucleotide
  Target: SCNA; (-) strand; PAM type: NRG; PAM sequence: GAG
tcattttcatgtgaggcctg

SEQ ID NO: 24631 - DNA, 20 bp, Artificial Sequence
  Description of Artificial Sequence: Synthetic oligonucleotide
  Target: SCNA; (-) strand; PAM type: NRG; PAM sequence: TGG
gttcattttcatgtgaggcc

SEQ ID NO: 24632 - DNA, 20 bp, Artificial Sequence
  Description of Artificial Sequence: Synthetic oligonucleotide
  Target: SCNA; (-) strand; PAM type: NRG; PAM sequence: AGG
ttacggttcattttcatgtg

SEQ ID NO: 24633 - DNA, 20 bp, Artificial Sequence
  Description of Artificial Sequence: Synthetic oligonucleotide
  Target: SCNA; (-) strand; PAM type: NRG; PAM sequence: GAG
attacggttcattttcatgt

SEQ ID NO: 24634 - DNA, 20 bp, Artificial Sequence
  Description of Artificial Sequence: Synthetic oligonucleotide
  Target: SCNA; (-) strand; PAM type: NRG; PAM sequence: CGG
tttataagctggtgagatta

SEQ ID NO: 24635 - DNA, 20 bp, Artificial Sequence
  Description of Artificial Sequence: Synthetic oligonucleotide
  Target: SCNA; (-) strand; PAM type: NRG; PAM sequence: GAG
tgttacatttataagctggt

SEQ ID NO: 24636 - DNA, 20 bp, Artificial Sequence
  Description of Artificial Sequence: Synthetic oligonucleotide
  Target: SCNA; (-) strand; PAM type: NRG; PAM sequence: TGG
tttgtgttacatttataagc

SEQ ID NO: 24637 - DNA, 20 bp, Artificial Sequence
  Description of Artificial Sequence: Synthetic oligonucleotide
  Target: SCNA; (-) strand; PAM type: NRG; PAM sequence: AAG
acgttttgtgttacatttat

SEQ ID NO: 24638 - DNA, 20 bp, Artificial Sequence
  Description of Artificial Sequence: Synthetic oligonucleotide
  Target: SCNA; (-) strand; PAM type: NRG; PAM sequence: TGG
aggaccagttgggcaaggta

SEQ ID NO: 24639 - DNA, 20 bp, Artificial Sequence
  Description of Artificial Sequence: Synthetic oligonucleotide
  Target: SCNA; (-) strand; PAM type: NRG; PAM sequence: AGG
caaaaaggaccagttgggca

SEQ ID NO: 24640 - DNA, 20 bp, Artificial Sequence
  Description of Artificial Sequence: Synthetic oligonucleotide
  Target: SCNA; (-) strand; PAM type: NRG; PAM sequence: AAG
tcaaaaaggaccagttgggc

SEQ ID NO: 24641 - DNA, 20 bp, Artificial Sequence
  Description of Artificial Sequence: Synthetic oligonucleotide
  Target: SCNA; (-) strand; PAM type: NRG; PAM sequence: GGG
tttgtcaaaaaggaccagtt

SEQ ID NO: 24642 - DNA, 20 bp, Artificial Sequence
  Description of Artificial Sequence: Synthetic oligonucleotide
  Target: SCNA; (-) strand; PAM type: NRG; PAM sequence: TGG
ctttgtcaaaaaggaccagt

SEQ ID NO: 24643 - DNA, 20 bp, Artificial Sequence
  Description of Artificial Sequence: Synthetic oligonucleotide
  Target: SCNA; (-) strand; PAM type: NRG; PAM sequence: CAG
ctggctttgtcaaaaaggac

SEQ ID NO: 24644 - DNA, 20 bp, Artificial Sequence
  Description of Artificial Sequence: Synthetic oligonucleotide
  Target: SCNA; (-) strand; PAM type: NRG; PAM sequence: AGG
agccactggctttgtcaaaa

SEQ ID NO: 24645 - DNA, 20 bp, Artificial Sequence
  Description of Artificial Sequence: Synthetic oligonucleotide
  Target: SCNA; (-) strand; PAM type: NRG; PAM sequence: AAG
cagccactggctttgtcaaa

SEQ ID NO: 24646 - DNA, 20 bp, Artificial Sequence
  Description of Artificial Sequence: Synthetic oligonucleotide
  Target: SCNA; (-) strand; PAM type: NRG; PAM sequence: TGG
gggagcattgcagcagccac

SEQ ID NO: 24647 - DNA, 20 bp, Artificial Sequence
  Description of Artificial Sequence: Synthetic oligonucleotide
  Target: SCNA; (-) strand; PAM type: NRG; PAM sequence: CAG
gggagcagggagcattgcag

SEQ ID NO: 24648 - DNA, 20 bp, Artificial Sequence
  Description of Artificial Sequence: Synthetic oligonucleotide
  Target: SCNA; (-) strand; PAM type: NRG; PAM sequence: CAG
ggagggagcagggagcattg

SEQ ID NO: 24649 - DNA, 20 bp, Artificial Sequence
  Description of Artificial Sequence: Synthetic oligonucleotide
  Target: SCNA; (-) strand; PAM type: NRG; PAM sequence: GAG
aagacagtggagggagcagg

SEQ ID NO: 24650 - DNA, 20 bp, Artificial Sequence
  Description of Artificial Sequence: Synthetic oligonucleotide
  Target: SCNA; (-) strand; PAM type: NRG; PAM sequence: GGG
agaagacagtggagggagca

SEQ ID NO: 24651 - DNA, 20 bp, Artificial Sequence
  Description of Artificial Sequence: Synthetic oligonucleotide
  Target: SCNA; (-) strand; PAM type: NRG; PAM sequence: AGG
cagaagacagtggagggagc

SEQ ID NO: 24652 - DNA, 20 bp, Artificial Sequence
  Description of Artificial Sequence: Synthetic oligonucleotide
  Target: SCNA; (-) strand; PAM type: NRG; PAM sequence: CAG
ccagaagacagtggagggag

SEQ ID NO: 24653 - DNA, 20 bp, Artificial Sequence
  Description of Artificial Sequence: Synthetic oligonucleotide
  Target: SCNA; (-) strand; PAM type: NRG; PAM sequence: GAG
agcccagaagacagtggagg

SEQ ID NO: 24654 - DNA, 20 bp, Artificial Sequence
  Description of Artificial Sequence: Synthetic oligonucleotide
  Target: SCNA; (-) strand; PAM type: NRG; PAM sequence: GGG
gtagcccagaagacagtgga

SEQ ID NO: 24655 - DNA, 20 bp, Artificial Sequence
  Description of Artificial Sequence: Synthetic oligonucleotide
  Target: SCNA; (-) strand; PAM type: NRG; PAM sequence: AGG
agtagcccagaagacagtgg

SEQ ID NO: 24656 - DNA, 20 bp, Artificial Sequence
  Description of Artificial Sequence: Synthetic oligonucleotide
  Target: SCNA; (-) strand; PAM type: NRG; PAM sequence: GAG
cagtagcccagaagacagtg

SEQ ID NO: 24657 - DNA, 20 bp, Artificial Sequence
  Description of Artificial Sequence: Synthetic oligonucleotide
  Target: SCNA; (-) strand; PAM type: NRG; PAM sequence: TGG
agcagtagcccagaagacag

SEQ ID NO: 24658 - DNA, 20 bp, Artificial Sequence
  Description of Artificial Sequence: Synthetic oligonucleotide
  Target: SCNA; (-) strand; PAM type: NRG; PAM sequence: CAG
gacagcagtagcccagaaga

SEQ ID NO: 24659 - DNA, 20 bp, Artificial Sequence
  Description of Artificial Sequence: Synthetic oligonucleotide
  Target: SCNA; (-) strand; PAM type: NRG; PAM sequence: AAG
gtgtgacagcagtagcccag

SEQ ID NO: 24660 - DNA, 20 bp, Artificial Sequence
  Description of Artificial Sequence: Synthetic oligonucleotide
  Target: SCNA; (-) strand; PAM type: NRG; PAM sequence: CAG
cgggtgtgacagcagtagcc

SEQ ID NO: 24661 - DNA, 20 bp, Artificial Sequence
  Description of Artificial Sequence: Synthetic oligonucleotide
  Target: SCNA; (-) strand; PAM type: NRG; PAM sequence: TAG
ggtgacgggtgtgacagcag

SEQ ID NO: 24662 - DNA, 20 bp, Artificial Sequence
  Description of Artificial Sequence: Synthetic oligonucleotide
  Target: SCNA; (-) strand; PAM type: NRG; PAM sequence: CAG
agtggtgacgggtgtgacag

SEQ ID NO: 24663 - DNA, 20 bp, Artificial Sequence
  Description of Artificial Sequence: Synthetic oligonucleotide
  Target: SCNA; (-) strand; PAM type: NRG; PAM sequence: CAG
agcagtggtgacgggtgtga

SEQ ID NO: 24664 - DNA, 20 bp, Artificial Sequence
  Description of Artificial Sequence: Synthetic oligonucleotide
  Target: SCNA; (-) strand; PAM type: NRG; PAM sequence: GGG
gttggaggagcagtggtgac

SEQ ID NO: 24665 - DNA, 20 bp, Artificial Sequence
  Description of Artificial Sequence: Synthetic oligonucleotide
  Target: SCNA; (-) strand; PAM type: NRG; PAM sequence: CGG
tgttggaggagcagtggtga

SEQ ID NO: 24666 - DNA, 20 bp, Artificial Sequence
  Description of Artificial Sequence: Synthetic oligonucleotide
  Target: SCNA; (-) strand; PAM type: NRG; PAM sequence: TGG
gacaaatgttggaggagcag

SEQ ID NO: 24667 - DNA, 20 bp, Artificial Sequence
  Description of Artificial Sequence: Synthetic oligonucleotide
  Target: SCNA; (-) strand; PAM type: NRG; PAM sequence: CAG
agtgacaaatgttggaggag

SEQ ID NO: 24668 - DNA, 20 bp, Artificial Sequence
  Description of Artificial Sequence: Synthetic oligonucleotide
  Target: SCNA; (-) strand; PAM type: NRG; PAM sequence: GAG
gcaagtgacaaatgttggag

SEQ ID NO: 24669 - DNA, 20 bp, Artificial Sequence
  Description of Artificial Sequence: Synthetic oligonucleotide
  Target: SCNA; (-) strand; PAM type: NRG; PAM sequence: AGG
gagcaagtgacaaatgttgg

SEQ ID NO: 24670 - DNA, 20 bp, Artificial Sequence
  Description of Artificial Sequence: Synthetic oligonucleotide
  Target: SCNA; (-) strand; PAM type: NRG; PAM sequence: GAG
agagcaagtgacaaatgttg

SEQ ID NO: 24671 - DNA, 20 bp, Artificial Sequence
  Description of Artificial Sequence: Synthetic oligonucleotide
  Target: SCNA; (-) strand; PAM type: NRG; PAM sequence: TGG
aaagagcaagtgacaaatgt

SEQ ID NO: 24672 - DNA, 20 bp, Artificial Sequence
  Description of Artificial Sequence: Synthetic oligonucleotide
  Target: SCNA; (-) strand; PAM type: NRG; PAM sequence: AAG
ggctgagaagaccaaagagc

SEQ ID NO: 24673 - DNA, 20 bp, Artificial Sequence
  Description of Artificial Sequence: Synthetic oligonucleotide
  Target: SCNA; (-) strand; PAM type: NRG; PAM sequence: GAG
cagtggctgagaagaccaaa

SEQ ID NO: 24674 - DNA, 20 bp, Artificial Sequence
  Description of Artificial Sequence: Synthetic oligonucleotide
  Target: SCNA; (-) strand; PAM type: NRG; PAM sequence: AAG
accagtggctgagaagacca

SEQ ID NO: 24675 - DNA, 20 bp, Artificial Sequence
  Description of Artificial Sequence: Synthetic oligonucleotide
  Target: SCNA; (-) strand; PAM type: NRG; PAM sequence: AAG
tatttgtaccagtggctgag

SEQ ID NO: 24676 - DNA, 20 bp, Artificial Sequence
  Description of Artificial Sequence: Synthetic oligonucleotide
  Target: SCNA; (-) strand; PAM type: NRG; PAM sequence: GAG
ctttatttgtaccagtggct

SEQ ID NO: 24677 - DNA, 20 bp, Artificial Sequence
  Description of Artificial Sequence: Synthetic oligonucleotide
  Target: SCNA; (-) strand; PAM type: NRG; PAM sequence: TGG
ttgctctttatttgtaccag

SEQ ID NO: 24678 - DNA, 20 bp, Artificial Sequence
  Description of Artificial Sequence: Synthetic oligonucleotide
  Target: SCNA; (-) strand; PAM type: NRG; PAM sequence: CAG
ttgttgctctttatttgtac

SEQ ID NO: 24679 - DNA, 20 bp, Artificial Sequence
  Description of Artificial Sequence: Synthetic oligonucleotide
  Target: SCNA; (-) strand; PAM type: NRG; PAM sequence: AAG
agtggaagtggaatgatttt

SEQ ID NO: 24680 - DNA, 20 bp, Artificial Sequence
  Description of Artificial Sequence: Synthetic oligonucleotide
  Target: SCNA; (-) strand; PAM type: NRG; PAM sequence: TGG
aagccgatggctagtggaag

SEQ ID NO: 24681 - DNA, 20 bp, Artificial Sequence
  Description of Artificial Sequence: Synthetic oligonucleotide
  Target: SCNA; (-) strand; PAM type: NRG; PAM sequence: AAG
tggaagccgatggctagtgg

SEQ ID NO: 24682 - DNA, 20 bp, Artificial Sequence
  Description of Artificial Sequence: Synthetic oligonucleotide
  Target: SCNA; (-) strand; PAM type: NRG; PAM sequence: TGG
gtatggaagccgatggctag

SEQ ID NO: 24683 - DNA, 20 bp, Artificial Sequence
  Description of Artificial Sequence: Synthetic oligonucleotide
  Target: SCNA; (-) strand; PAM type: NRG; PAM sequence: TAG
ggtgtatggaagccgatggc

SEQ ID NO: 24684 - DNA, 20 bp, Artificial Sequence
  Description of Artificial Sequence: Synthetic oligonucleotide
  Target: SCNA; (-) strand; PAM type: NRG; PAM sequence: TGG
tacaggtgtatggaagccga

SEQ ID NO: 24685 - DNA, 20 bp, Artificial Sequence
  Description of Artificial Sequence: Synthetic oligonucleotide
  Target: SCNA; (-) strand; PAM type: NRG; PAM sequence: AAG
gtgtagatacaggtgtatgg

SEQ ID NO: 24686 - DNA, 20 bp, Artificial Sequence
  Description of Artificial Sequence: Synthetic oligonucleotide
  Target: SCNA; (-) strand; PAM type: NRG; PAM sequence: TGG
catgtgtagatacaggtgta

SEQ ID NO: 24687 - DNA, 20 bp, Artificial Sequence
  Description of Artificial Sequence: Synthetic oligonucleotide
  Target: SCNA; (-) strand; PAM type: NRG; PAM sequence: AGG
tctatggcatgtgtagatac

SEQ ID NO: 24688 - DNA, 20 bp, Artificial Sequence
  Description of Artificial Sequence: Synthetic oligonucleotide
  Target: SCNA; (-) strand; PAM type: NRG; PAM sequence: CAG
atctatggcatgtgtagata

SEQ ID NO: 24689 - DNA, 20 bp, Artificial Sequence
  Description of Artificial Sequence: Synthetic oligonucleotide
  Target: SCNA; (-) strand; PAM type: NRG; PAM sequence: TAG
tcagttatctatggcatgtg

SEQ ID NO: 24690 - DNA, 20 bp, Artificial Sequence
  Description of Artificial Sequence: Synthetic oligonucleotide
  Target: SCNA; (-) strand; PAM type: NRG; PAM sequence: TGG
tctgaccactcagttatcta

SEQ ID NO: 24691 - DNA, 20 bp, Artificial Sequence
  Description of Artificial Sequence: Synthetic oligonucleotide
  Target: SCNA; (-) strand; PAM type: NRG; PAM sequence: CAG
ttttgtttcttctgaccact

SEQ ID NO: 24692 - DNA, 20 bp, Artificial Sequence
  Description of Artificial Sequence: Synthetic oligonucleotide
  Target: SCNA; (-) strand; PAM type: NRG; PAM sequence: TGG
cactcacttggacatcttgg

SEQ ID NO: 24693 - DNA, 20 bp, Artificial Sequence
  Description of Artificial Sequence: Synthetic oligonucleotide
  Target: SCNA; (-) strand; PAM type: NRG; PAM sequence: TGG
ccacactcacttggacatct

SEQ ID NO: 24694 - DNA, 20 bp, Artificial Sequence
  Description of Artificial Sequence: Synthetic oligonucleotide
  Target: SCNA; (-) strand; PAM type: NRG; PAM sequence: TGG
ttggttgaaccacactcact

SEQ ID NO: 24695 - DNA, 20 bp, Artificial Sequence
  Description of Artificial Sequence: Synthetic oligonucleotide
  Target: SCNA; (-) strand; PAM type: NRG; PAM sequence: TGG
cttagccaagattcaatgtt

SEQ ID NO: 24696 - DNA, 20 bp, Artificial Sequence
  Description of Artificial Sequence: Synthetic oligonucleotide
  Target: SCNA; (-) strand; PAM type: NRG; PAM sequence: AAG
ttagccaaaatatcttagcc

SEQ ID NO: 24697 - DNA, 20 bp, Artificial Sequence
  Description of Artificial Sequence: Synthetic oligonucleotide
  Target: SCNA; (-) strand; PAM type: NRG; PAM sequence: TAG
tgactttagccaaaatatct

SEQ ID NO: 24698 - DNA, 20 bp, Artificial Sequence
  Description of Artificial Sequence: Synthetic oligonucleotide
  Target: SCNA; (-) strand; PAM type: NRG; PAM sequence: TAG
tttttaatactgcatgactt

SEQ ID NO: 24699 - DNA, 20 bp, Artificial Sequence
  Description of Artificial Sequence: Synthetic oligonucleotide
  Target: SCNA; (-) strand; PAM type: NRG; PAM sequence: AAG
attcctgatcgttaaacttg

SEQ ID NO: 24700 - DNA, 20 bp, Artificial Sequence
  Description of Artificial Sequence: Synthetic oligonucleotide
  Target: SCNA; (-) strand; PAM type: NRG; PAM sequence: TGG
aaccaaatccaaatcactca

SEQ ID NO: 24701 - DNA, 20 bp, Artificial Sequence
  Description of Artificial Sequence: Synthetic oligonucleotide
  Target: SCNA; (-) strand; PAM type: NRG; PAM sequence: TAG
tgctttctgtaaactttcca

SEQ ID NO: 24702 - DNA, 20 bp, Artificial Sequence
  Description of Artificial Sequence: Synthetic oligonucleotide
  Target: SCNA; (-) strand; PAM type: NRG; PAM sequence: AAG
tcaaatataactgcacctgt

SEQ ID NO: 24703 - DNA, 20 bp, Artificial Sequence
  Description of Artificial Sequence: Synthetic oligonucleotide
  Target: SCNA; (-) strand; PAM type: NRG; PAM sequence: TGG
agaaatattcatgctgagtc

SEQ ID NO: 24704 - DNA, 20 bp, Artificial Sequence
  Description of Artificial Sequence: Synthetic oligonucleotide
  Target: SCNA; (-) strand; PAM type: NRG; PAM sequence: GAG
aataaagaaatattcatgct

SEQ ID NO: 24705 - DNA, 20 bp, Artificial Sequence
  Description of Artificial Sequence: Synthetic oligonucleotide
  Target: SCNA; (-) strand; PAM type: NRG; PAM sequence: AAG
attggcactgaattgaaata

SEQ ID NO: 24706 - DNA, 20 bp, Artificial Sequence
  Description of Artificial Sequence: Synthetic oligonucleotide
  Target: SCNA; (-) strand; PAM type: NRG; PAM sequence: TGG
gctgagtgagatcaaaggat

SEQ ID NO: 24707 - DNA, 20 bp, Artificial Sequence
  Description of Artificial Sequence: Synthetic oligonucleotide
  Target: SCNA; (-) strand; PAM type: NRG; PAM sequence: AGG
aacttgctgagtgagatcaa

SEQ ID NO: 24708 - DNA, 20 bp, Artificial Sequence
  Description of Artificial Sequence: Synthetic oligonucleotide
  Target: SCNA; (-) strand; PAM type: NRG; PAM sequence: AAG
taacttgctgagtgagatca

SEQ ID NO: 24709 - DNA, 20 bp, Artificial Sequence
  Description of Artificial Sequence: Synthetic oligonucleotide
  Target: SCNA; (-) strand; PAM type: NRG; PAM sequence: GAG
tggaaattaacttgctgagt

SEQ ID NO: 24710 - DNA, 20 bp, Artificial Sequence
  Description of Artificial Sequence: Synthetic oligonucleotide
  Target: SCNA; (-) strand; PAM type: NRG; PAM sequence: GAG
gtggtggaaattaacttgct

SEQ ID NO: 24711 - DNA, 20 bp, Artificial Sequence
  Description of Artificial Sequence: Synthetic oligonucleotide
  Target: SCNA; (-) strand; PAM type: NRG; PAM sequence: TGG
gtgttgcttagaaggtgtgg

SEQ ID NO: 24712 - DNA, 20 bp, Artificial Sequence
  Description of Artificial Sequence: Synthetic oligonucleotide
  Target: SCNA; (-) strand; PAM type: NRG; PAM sequence: TGG
attgtgttgcttagaaggtg

SEQ ID NO: 24713 - DNA, 20 bp, Artificial Sequence
  Description of Artificial Sequence: Synthetic oligonucleotide
  Target: SCNA; (-) strand; PAM type: NRG; PAM sequence: AGG
tatgtattgtgttgcttaga

SEQ ID NO: 24714 - DNA, 20 bp, Artificial Sequence
  Description of Artificial Sequence: Synthetic oligonucleotide
  Target: SCNA; (-) strand; PAM type: NRG; PAM sequence: AAG
gtatgtattgtgttgcttag

SEQ ID NO: 24715 - DNA, 20 bp, Artificial Sequence
  Description of Artificial Sequence: Synthetic oligonucleotide
  Target: SCNA; (-) strand; PAM type: NRG; PAM sequence: TAG
gaagtatgtattgtgttgct

SEQ ID NO: 24716 - DNA, 20 bp, Artificial Sequence
  Description of Artificial Sequence: Synthetic oligonucleotide
  Target: SCNA; (-) strand; PAM type: NRG; PAM sequence: AAG
tcaaataaataaataaatag

SEQ ID NO: 24717 - DNA, 20 bp, Artificial Sequence
  Description of Artificial Sequence: Synthetic oligonucleotide
  Target: SCNA; (-) strand; PAM type: NRG; PAM sequence: TAG
atctcaaataaataaataaa

SEQ ID NO: 24718 - DNA, 20 bp, Artificial Sequence
  Description of Artificial Sequence: Synthetic oligonucleotide
  Target: SCNA; (-) strand; PAM type: NRG; PAM sequence: AAG
tgcattccagcctgaacaac

SEQ ID NO: 24719 - DNA, 20 bp, Artificial Sequence
  Description of Artificial Sequence: Synthetic oligonucleotide
  Target: SCNA; (-) strand; PAM type: NRG; PAM sequence: CAG
gagattgtgccattgcattc

SEQ ID NO: 24720 - DNA, 20 bp, Artificial Sequence
  Description of Artificial Sequence: Synthetic oligonucleotide
  Target: SCNA; (-) strand; PAM type: NRG; PAM sequence: GAG
ggcggaggttgctgtgagct

SEQ ID NO: 24721 - DNA, 20 bp, Artificial Sequence
  Description of Artificial Sequence: Synthetic oligonucleotide
  Target: SCNA; (-) strand; PAM type: NRG; PAM sequence: GAG
caggaggcggaggttgctgt

SEQ ID NO: 24722 - DNA, 20 bp, Artificial Sequence
  Description of Artificial Sequence: Synthetic oligonucleotide
  Target: SCNA; (-) strand; PAM type: NRG; PAM sequence: AGG
agcttgaactcaggaggcgg

SEQ ID NO: 24723 - DNA, 20 bp, Artificial Sequence
  Description of Artificial Sequence: Synthetic oligonucleotide
  Target: SCNA; (-) strand; PAM type: NRG; PAM sequence: GAG
tagcttgaactcaggaggcg

SEQ ID NO: 24724 - DNA, 20 bp, Artificial Sequence
  Description of Artificial Sequence: Synthetic oligonucleotide
  Target: SCNA; (-) strand; PAM type: NRG; PAM sequence: CGG
aatagcttgaactcaggagg

SEQ ID NO: 24725 - DNA, 20 bp, Artificial Sequence
  Description of Artificial Sequence: Synthetic oligonucleotide
  Target: SCNA; (-) strand; PAM type: NRG; PAM sequence: AGG
gagaatagcttgaactcagg

SEQ ID NO: 24726 - DNA, 20 bp, Artificial Sequence
  Description of Artificial Sequence: Synthetic oligonucleotide
  Target: SCNA; (-) strand; PAM type: NRG; PAM sequence: GAG
ggagaatagcttgaactcag

SEQ ID NO: 24727 - DNA, 20 bp, Artificial Sequence
  Description of Artificial Sequence: Synthetic oligonucleotide
  Target: SCNA; (-) strand; PAM type: NRG; PAM sequence: AGG
caggagaatagcttgaactc

SEQ ID NO: 24728 - DNA, 20 bp, Artificial Sequence
  Description of Artificial Sequence: Synthetic oligonucleotide
  Target: SCNA; (-) strand; PAM type: NRG; PAM sequence: CAG
gcaggagaatagcttgaact

SEQ ID NO: 24729 - DNA, 20 bp, Artificial Sequence
  Description of Artificial Sequence: Synthetic oligonucleotide
  Target: SCNA; (-) strand; PAM type: NRG; PAM sequence: TAG
gggagactgaggcaggagaa

SEQ ID NO: 24730 - DNA, 20 bp, Artificial Sequence
  Description of Artificial Sequence: Synthetic oligonucleotide
  Target: SCNA; (-) strand; PAM type: NRG; PAM sequence: GAG
tactcgggagactgaggcag

SEQ ID NO: 24731 - DNA, 20 bp, Artificial Sequence
  Description of Artificial Sequence: Synthetic oligonucleotide
  Target: SCNA; (-) strand; PAM type: NRG; PAM sequence: AGG
gctactcgggagactgaggc

SEQ ID NO: 24732 - DNA, 20 bp, Artificial Sequence
  Description of Artificial Sequence: Synthetic oligonucleotide
  Target: SCNA; (-) strand; PAM type: NRG; PAM sequence: CAG
agctactcgggagactgagg

SEQ ID NO: 24733 - DNA, 20 bp, Artificial Sequence
  Description of Artificial Sequence: Synthetic oligonucleotide
  Target: SCNA; (-) strand; PAM type: NRG; PAM sequence: AGG
cccagctactcgggagactg

SEQ ID NO: 24734 - DNA, 20 bp, Artificial Sequence
  Description of Artificial Sequence: Synthetic oligonucleotide
  Target: SCNA; (-) strand; PAM type: NRG; PAM sequence: GAG
tcccagctactcgggagact

SEQ ID NO: 24735 - DNA, 20 bp, Artificial Sequence
  Description of Artificial Sequence: Synthetic oligonucleotide
  Target: SCNA; (-) strand; PAM type: NRG; PAM sequence: GAG
ctgtaatcccagctactcgg

SEQ ID NO: 24736 - DNA, 20 bp, Artificial Sequence
  Description of Artificial Sequence: Synthetic oligonucleotide
  Target: SCNA; (-) strand; PAM type: NRG; PAM sequence: GGG
acctgtaatcccagctactc

SEQ ID NO: 24737 - DNA, 20 bp, Artificial Sequence
  Description of Artificial Sequence: Synthetic oligonucleotide
  Target: SCNA; (-) strand; PAM type: NRG; PAM sequence: CGG
cacctgtaatcccagctact

SEQ ID NO: 24738 - DNA, 20 bp, Artificial Sequence
  Description of Artificial Sequence: Synthetic oligonucleotide
  Target: SCNA; (-) strand; PAM type: NRG; PAM sequence: CAG
gttgtgggcacctgtaatcc

SEQ ID NO: 24739 - DNA, 20 bp, Artificial Sequence
  Description of Artificial Sequence: Synthetic oligonucleotide
  Target: SCNA; (-) strand; PAM type: NRG; PAM sequence: GGG
aattagccaggtgtggttgt

SEQ ID NO: 24740 - DNA, 20 bp, Artificial Sequence
  Description of Artificial Sequence: Synthetic oligonucleotide
  Target: SCNA; (-) strand; PAM type: NRG; PAM sequence: TGG
taattagccaggtgtggttg

SEQ ID NO: 24741 - DNA, 20 bp, Artificial Sequence
  Description of Artificial Sequence: Synthetic oligonucleotide
  Target: SCNA; (-) strand; PAM type: NRG; PAM sequence: TGG
taataataattagccaggtg

SEQ ID NO: 24742 - DNA, 20 bp, Artificial Sequence
  Description of Artificial Sequence: Synthetic oligonucleotide
  Target: SCNA; (-) strand; PAM type: NRG; PAM sequence: AGG
aataataataataattagcc

SEQ ID NO: 24743 - DNA, 20 bp, Artificial Sequence
  Description of Artificial Sequence: Synthetic oligonucleotide
  Target: SCNA; (-) strand; PAM type: NRG; PAM sequence: CAG
taataataataataattagc

SEQ ID NO: 24744 - DNA, 20 bp, Artificial Sequence
  Description of Artificial Sequence: Synthetic oligonucleotide
  Target: SCNA; (-) strand; PAM type: NRG; PAM sequence: TAG
ataataataataataataat

SEQ ID NO: 24745 - DNA, 20 bp, Artificial Sequence
  Description of Artificial Sequence: Synthetic oligonucleotide
  Target: SCNA; (-) strand; PAM type: NRG; PAM sequence: TGG
ttaggagttcgagaccggcc

SEQ ID NO: 24746 - DNA, 20 bp, Artificial Sequence
  Description of Artificial Sequence: Synthetic oligonucleotide
  Target: SCNA; (-) strand; PAM type: NRG; PAM sequence: CGG
tgaggttaggagttcgagac

SEQ ID NO: 24747 - DNA, 20 bp, Artificial Sequence
  Description of Artificial Sequence: Synthetic oligonucleotide
  Target: SCNA; (-) strand; PAM type: NRG; PAM sequence: GAG
tcacctgaggttaggagttc

SEQ ID NO: 24748 - DNA, 20 bp, Artificial Sequence
  Description of Artificial Sequence: Synthetic oligonucleotide
  Target: SCNA; (-) strand; PAM type: NRG; PAM sequence: GAG
ggtggatcacctgaggttag

SEQ ID NO: 24749 - DNA, 20 bp, Artificial Sequence
  Description of Artificial Sequence: Synthetic oligonucleotide
  Target: SCNA; (-) strand; PAM type: NRG; PAM sequence: AGG
cgggtggatcacctgaggtt

SEQ ID NO: 24750 - DNA, 20 bp, Artificial Sequence
  Description of Artificial Sequence: Synthetic oligonucleotide
  Target: SCNA; (-) strand; PAM type: NRG; PAM sequence: TAG
gcgggtggatcacctgaggt

SEQ ID NO: 24751 - DNA, 20 bp, Artificial Sequence
  Description of Artificial Sequence: Synthetic oligonucleotide
  Target: SCNA; (-) strand; PAM type: NRG; PAM sequence: AGG
taaggcgggtggatcacctg

SEQ ID NO: 24752 - DNA, 20 bp, Artificial Sequence
  Description of Artificial Sequence: Synthetic oligonucleotide
  Target: SCNA; (-) strand; PAM type: NRG; PAM sequence: GAG
ctaaggcgggtggatcacct

SEQ ID NO: 24753 - DNA, 20 bp, Artificial Sequence
  Description of Artificial Sequence: Synthetic oligonucleotide
  Target: SCNA; (-) strand; PAM type: NRG; PAM sequence: TGG
ctttgggaggctaaggcggg

SEQ ID NO: 24754 - DNA, 20 bp, Artificial Sequence
  Description of Artificial Sequence: Synthetic oligonucleotide
  Target: SCNA; (-) strand; PAM type: NRG; PAM sequence: GGG
gcactttgggaggctaaggc

SEQ ID NO: 24755 - DNA, 20 bp, Artificial Sequence
  Description of Artificial Sequence: Synthetic oligonucleotide
  Target: SCNA; (-) strand; PAM type: NRG; PAM sequence: CGG
agcactttgggaggctaagg

SEQ ID NO: 24756 - DNA, 20 bp, Artificial Sequence
  Description of Artificial Sequence: Synthetic oligonucleotide
  Target: SCNA; (-) strand; PAM type: NRG; PAM sequence: AGG
cctagcactttgggaggcta

SEQ ID NO: 24757 - DNA, 20 bp, Artificial Sequence
  Description of Artificial Sequence: Synthetic oligonucleotide
  Target: SCNA; (-) strand; PAM type: NRG; PAM sequence: AAG
tcctagcactttgggaggct

SEQ ID NO: 24758 - DNA, 20 bp, Artificial Sequence
  Description of Artificial Sequence: Synthetic oligonucleotide
  Target: SCNA; (-) strand; PAM type: NRG; PAM sequence: AGG
tataatcctagcactttggg

SEQ ID NO: 24759 - DNA, 20 bp, Artificial Sequence
  Description of Artificial Sequence: Synthetic oligonucleotide
  Target: SCNA; (-) strand; PAM type: NRG; PAM sequence: GAG
ctataatcctagcactttgg

SEQ ID NO: 24760 - DNA, 20 bp, Artificial Sequence
  Description of Artificial Sequence: Synthetic oligonucleotide
  Target: SCNA; (-) strand; PAM type: NRG; PAM sequence: GGG
gcctataatcctagcacttt

SEQ ID NO: 24761 - DNA, 20 bp, Artificial Sequence
  Description of Artificial Sequence: Synthetic oligonucleotide
  Target: SCNA; (-) strand; PAM type: NRG; PAM sequence: TGG
tgcctataatcctagcactt

SEQ ID NO: 24762 - DNA, 20 bp, Artificial Sequence
  Description of Artificial Sequence: Synthetic oligonucleotide
  Target: SCNA; (-) strand; PAM type: NRG; PAM sequence: TAG
gtggatcatgcctataatcc

SEQ ID NO: 24763 - DNA, 20 bp, Artificial Sequence
  Description of Artificial Sequence: Synthetic oligonucleotide
  Target: SCNA; (-) strand; PAM type: NRG; PAM sequence: TGG
taagtaggggctgggtgcgg

SEQ ID NO: 24764 - DNA, 20 bp, Artificial Sequence
  Description of Artificial Sequence: Synthetic oligonucleotide
  Target: SCNA; (-) strand; PAM type: NRG; PAM sequence: CGG
taataagtaggggctgggtg

SEQ ID NO: 24765 - DNA, 20 bp, Artificial Sequence
  Description of Artificial Sequence: Synthetic oligonucleotide
  Target: SCNA; (-) strand; PAM type: NRG; PAM sequence: GGG
gtagataataagtaggggct

SEQ ID NO: 24766 - DNA, 20 bp, Artificial Sequence
  Description of Artificial Sequence: Synthetic oligonucleotide
  Target: SCNA; (-) strand; PAM type: NRG; PAM sequence: TGG
cgtagataataagtaggggc

SEQ ID NO: 24767 - DNA, 20 bp, Artificial Sequence
  Description of Artificial Sequence: Synthetic oligonucleotide
  Target: SCNA; (-) strand; PAM type: NRG; PAM sequence: GGG
aacacgtagataataagtag

SEQ ID NO: 24768 - DNA, 20 bp, Artificial Sequence
  Description of Artificial Sequence: Synthetic oligonucleotide
  Target: SCNA; (-) strand; PAM type: NRG; PAM sequence: GGG
gaacacgtagataataagta

SEQ ID NO: 24769 - DNA, 20 bp, Artificial Sequence
  Description of Artificial Sequence: Synthetic oligonucleotide
  Target: SCNA; (-) strand; PAM type: NRG; PAM sequence: AGG
tgaacacgtagataataagt

SEQ ID NO: 24770 - DNA, 20 bp, Artificial Sequence
  Description of Artificial Sequence: Synthetic oligonucleotide
  Target: SCNA; (-) strand; PAM type: NRG; PAM sequence: TAG
ctgaacacgtagataataag

SEQ ID NO: 24771 - DNA, 20 bp, Artificial Sequence
  Description of Artificial Sequence: Synthetic oligonucleotide
  Target: SCNA; (-) strand; PAM type: NRG; PAM sequence: AAG
cgtctgaacacgtagataat

SEQ ID NO: 24772 - DNA, 20 bp, Artificial Sequence
  Description of Artificial Sequence: Synthetic oligonucleotide
  Target: SCNA; (-) strand; PAM type: NRG; PAM sequence: TAG
taataccacgtctgaacacg

SEQ ID NO: 24773 - DNA, 20 bp, Artificial Sequence
  Description of Artificial Sequence: Synthetic oligonucleotide
  Target: SCNA; (-) strand; PAM type: NRG; PAM sequence: AAG
gaagttctataaaaagatcc

SEQ ID NO: 24774 - DNA, 20 bp, Artificial Sequence
  Description of Artificial Sequence: Synthetic oligonucleotide
  Target: SCNA; (-) strand; PAM type: NRG; PAM sequence: AAG
actacctgaagttctataaa

SEQ ID NO: 24775 - DNA, 20 bp, Artificial Sequence
  Description of Artificial Sequence: Synthetic oligonucleotide
  Target: SCNA; (-) strand; PAM type: NRG; PAM sequence: AAG
accctttgtttcactacctg

SEQ ID NO: 24776 - DNA, 20 bp, Artificial Sequence
  Description of Artificial Sequence: Synthetic oligonucleotide
  Target: SCNA; (-) strand; PAM type: NRG; PAM sequence: AAG
tactgcaaatttagcttttt

SEQ ID NO: 24777 - DNA, 20 bp, Artificial Sequence
  Description of Artificial Sequence: Synthetic oligonucleotide
  Target: SCNA; (-) strand; PAM type: NRG; PAM sequence: TAG
tattaaaattactgcaaatt

SEQ ID NO: 24778 - DNA, 20 bp, Artificial Sequence
  Description of Artificial Sequence: Synthetic oligonucleotide
  Target: SCNA; (-) strand; PAM type: NRG; PAM sequence: TAG
ctcttcattttcatactgtc

SEQ ID NO: 24779 - DNA, 20 bp, Artificial Sequence
  Description of Artificial Sequence: Synthetic oligonucleotide
  Target: SCNA; (-) strand; PAM type: NRG; PAM sequence: TAG
gaaattgtaagggtgctcaa

SEQ ID NO: 24780 - DNA, 20 bp, Artificial Sequence
  Description of Artificial Sequence: Synthetic oligonucleotide
  Target: SCNA; (-) strand; PAM type: NRG; PAM sequence: GGG
tttatgaaaagaaattgtaa

SEQ ID NO: 24781 - DNA, 20 bp, Artificial Sequence
  Description of Artificial Sequence: Synthetic oligonucleotide
  Target: SCNA; (-) strand; PAM type: NRG; PAM sequence: AGG
ttttatgaaaagaaattgta

SEQ ID NO: 24782 - DNA, 20 bp, Artificial Sequence
  Description of Artificial Sequence: Synthetic oligonucleotide
  Target: SCNA; (-) strand; PAM type: NRG; PAM sequence: AAG
gttttatgaaaagaaattgt

SEQ ID NO: 24783 - DNA, 20 bp, Artificial Sequence
  Description of Artificial Sequence: Synthetic oligonucleotide
  Target: SCNA; (-) strand; PAM type: NRG; PAM sequence: AAG
atctcattttgttttatgaa

SEQ ID NO: 24784 - DNA, 20 bp, Artificial Sequence
  Description of Artificial Sequence: Synthetic oligonucleotide
  Target: SCNA; (-) strand; PAM type: NRG; PAM sequence: AAG
gcttatttaactgaacaaga

SEQ ID NO: 24785 - DNA, 20 bp, Artificial Sequence
  Description of Artificial Sequence: Synthetic oligonucleotide
  Target: SCNA; (-) strand; PAM type: NRG; PAM sequence: AAG
tctggcttatttaactgaac

SEQ ID NO: 24786 - DNA, 20 bp, Artificial Sequence
  Description of Artificial Sequence: Synthetic oligonucleotide
  Target: SCNA; (-) strand; PAM type: NRG; PAM sequence: TGG
gttgtttgcctttctgtttc

SEQ ID NO: 24787 - DNA, 20 bp, Artificial Sequence
  Description of Artificial Sequence: Synthetic oligonucleotide
  Target: SCNA; (-) strand; PAM type: NRG; PAM sequence: TGG
tccacatgagtgagatcatg

SEQ ID NO: 24788 - DNA, 20 bp, Artificial Sequence
  Description of Artificial Sequence: Synthetic oligonucleotide
  Target: SCNA; (-) strand; PAM type: NRG; PAM sequence: GAG
tctttagattccacatgagt

SEQ ID NO: 24789 - DNA, 20 bp, Artificial Sequence
  Description of Artificial Sequence: Synthetic oligonucleotide
  Target: SCNA; (-) strand; PAM type: NRG; PAM sequence: GAG
tttttctttagattccacat

SEQ ID NO: 24790 - DNA, 20 bp, Artificial Sequence
  Description of Artificial Sequence: Synthetic oligonucleotide
  Target: SCNA; (-) strand; PAM type: NRG; PAM sequence: TAG
tatcaacttttctttttctt

SEQ ID NO: 24791 - DNA, 20 bp, Artificial Sequence
  Description of Artificial Sequence: Synthetic oligonucleotide
  Target: SCNA; (-) strand; PAM type: NRG; PAM sequence: GAG
gtgccttcatttccttagat

SEQ ID NO: 24792 - DNA, 20 bp, Artificial Sequence
  Description of Artificial Sequence: Synthetic oligonucleotide
  Target: SCNA; (-) strand; PAM type: NRG; PAM sequence: TAG
aaaatgtgccttcatttcct

SEQ ID NO: 24793 - DNA, 20 bp, Artificial Sequence
  Description of Artificial Sequence: Synthetic oligonucleotide
  Target: SCNA; (-) strand; PAM type: NRG; PAM sequence: AAG
tggggagtacaaagcatgtc

SEQ ID NO: 24794 - DNA, 20 bp, Artificial Sequence
  Description of Artificial Sequence: Synthetic oligonucleotide
  Target: SCNA; (-) strand; PAM type: NRG; PAM sequence: AAG
aggcttatctggggagtaca

SEQ ID NO: 24795 - DNA, 20 bp, Artificial Sequence
  Description of Artificial Sequence: Synthetic oligonucleotide
  Target: SCNA; (-) strand; PAM type: NRG; PAM sequence: GAG
cagactgaggcttatctggg

SEQ ID NO: 24796 - DNA, 20 bp, Artificial Sequence
  Description of Artificial Sequence: Synthetic oligonucleotide
  Target: SCNA; (-) strand; PAM type: NRG; PAM sequence: GGG
ctcagactgaggcttatctg

SEQ ID NO: 24797 - DNA, 20 bp, Artificial Sequence
  Description of Artificial Sequence: Synthetic oligonucleotide
  Target: SCNA; (-) strand; PAM type: NRG; PAM sequence: GGG
tctcagactgaggcttatct

SEQ ID NO: 24798 - DNA, 20 bp, Artificial Sequence
  Description of Artificial Sequence: Synthetic oligonucleotide
  Target: SCNA; (-) strand; PAM type: NRG; PAM sequence: TGG
ctctcagactgaggcttatc

SEQ ID NO: 24799 - DNA, 20 bp, Artificial Sequence
  Description of Artificial Sequence: Synthetic oligonucleotide
  Target: SCNA; (-) strand; PAM type: NRG; PAM sequence: AGG
gtgtaactcctctcagactg

SEQ ID NO: 24800 - DNA, 20 bp, Artificial Sequence
  Description of Artificial Sequence: Synthetic oligonucleotide
  Target: SCNA; (-) strand; PAM type: NRG; PAM sequence: GAG
ggtgtaactcctctcagact

SEQ ID NO: 24801 - DNA, 20 bp, Artificial Sequence
  Description of Artificial Sequence: Synthetic oligonucleotide
  Target: SCNA; (-) strand; PAM type: NRG; PAM sequence: CAG
tgacatggtgtaactcctct

SEQ ID NO: 24802 - DNA, 20 bp, Artificial Sequence
  Description of Artificial Sequence: Synthetic oligonucleotide
  Target: SCNA; (-) strand; PAM type: NRG; PAM sequence: TGG
atagcactaaacagctgaca

SEQ ID NO: 24803 - DNA, 20 bp, Artificial Sequence
  Description of Artificial Sequence: Synthetic oligonucleotide
  Target: SCNA; (-) strand; PAM type: NRG; PAM sequence: CAG
gtcatgtgaatagcactaaa

SEQ ID NO: 24804 - DNA, 20 bp, Artificial Sequence
  Description of Artificial Sequence: Synthetic oligonucleotide
  Target: SCNA; (-) strand; PAM type: NRG; PAM sequence: TAG
ctatacaatagtcatgtgaa

SEQ ID NO: 24805 - DNA, 20 bp, Artificial Sequence
  Description of Artificial Sequence: Synthetic oligonucleotide
  Target: SCNA; (-) strand; PAM type: NRG; PAM sequence: TAG
gtgagatgaaacctatacaa

SEQ ID NO: 24806 - DNA, 20 bp, Artificial Sequence
  Description of Artificial Sequence: Synthetic oligonucleotide
  Target: SCNA; (-) strand; PAM type: NRG; PAM sequence: GAG
tattggcttcttcaactggt

SEQ ID NO: 24807 - DNA, 20 bp, Artificial Sequence
  Description of Artificial Sequence: Synthetic oligonucleotide
  Target: SCNA; (-) strand; PAM type: NRG; PAM sequence: TGG
taaatattggcttcttcaac

SEQ ID NO: 24808 - DNA, 20 bp, Artificial Sequence
  Description of Artificial Sequence: Synthetic oligonucleotide
  Target: SCNA; (-) strand; PAM type: NRG; PAM sequence: TGG
ataaataaataagtaaatat

SEQ ID NO: 24809 - DNA, 20 bp, Artificial Sequence
  Description of Artificial Sequence: Synthetic oligonucleotide
  Target: SCNA; (-) strand; PAM type: NRG; PAM sequence: AAG
aaataaataaataaataaat

SEQ ID NO: 24810 - DNA, 20 bp, Artificial Sequence
  Description of Artificial Sequence: Synthetic oligonucleotide
  Target: SCNA; (-) strand; PAM type: NRG; PAM sequence: AAG
tccagcctgggtgacagagc

SEQ ID NO: 24811 - DNA, 20 bp, Artificial Sequence
  Description of Artificial Sequence: Synthetic oligonucleotide
  Target: SCNA; (-) strand; PAM type: NRG; PAM sequence: GAG
gcactccagcctgggtgaca

SEQ ID NO: 24812 - DNA, 20 bp, Artificial Sequence
  Description of Artificial Sequence: Synthetic oligonucleotide
  Target: SCNA; (-) strand; PAM type: NRG; PAM sequence: CAG
ctgcactccagcctgggtga

SEQ ID NO: 24813 - DNA, 20 bp, Artificial Sequence
  Description of Artificial Sequence: Synthetic oligonucleotide
  Target: SCNA; (-) strand; PAM type: NRG; PAM sequence: GGG
gtgccactgcactccagcct

SEQ ID NO: 24814 - DNA, 20 bp, Artificial Sequence
  Description of Artificial Sequence: Synthetic oligonucleotide
  Target: SCNA; (-) strand; PAM type: NRG; PAM sequence: TGG
cgtgccactgcactccagcc

SEQ ID NO: 24815 - DNA, 20 bp, Artificial Sequence
  Description of Artificial Sequence: Synthetic oligonucleotide
  Target: SCNA; (-) strand; PAM type: NRG; PAM sequence: CAG
gacatcgtgccactgcactc

SEQ ID NO: 24816 - DNA, 20 bp, Artificial Sequence
  Description of Artificial Sequence: Synthetic oligonucleotide
  Target: SCNA; (-) strand; PAM type: NRG; PAM sequence: GAG
cgggagtcggagtttgcagt

SEQ ID NO: 24817 - DNA, 20 bp, Artificial Sequence
  Description of Artificial Sequence: Synthetic oligonucleotide
  Target: SCNA; (-) strand; PAM type: NRG; PAM sequence: CAG
aacccgggagtcggagtttg

SEQ ID NO: 24818 - DNA, 20 bp, Artificial Sequence
  Description of Artificial Sequence: Synthetic oligonucleotide
  Target: SCNA; (-) strand; PAM type: NRG; PAM sequence: GAG
tggcctgaacccgggagtcg

SEQ ID NO: 24819 - DNA, 20 bp, Artificial Sequence
  Description of Artificial Sequence: Synthetic oligonucleotide
  Target: SCNA; (-) strand; PAM type: NRG; PAM sequence: CGG
aatggcctgaacccgggagt

SEQ ID NO: 24820 - DNA, 20 bp, Artificial Sequence
  Description of Artificial Sequence: Synthetic oligonucleotide
  Target: SCNA; (-) strand; PAM type: NRG; PAM sequence: GAG
ggagaatggcctgaacccgg

SEQ ID NO: 24821 - DNA, 20 bp, Artificial Sequence
  Description of Artificial Sequence: Synthetic oligonucleotide
  Target: SCNA; (-) strand; PAM type: NRG; PAM sequence: GGG
caggagaatggcctgaaccc

SEQ ID NO: 24822 - DNA, 20 bp, Artificial Sequence
  Description of Artificial Sequence: Synthetic oligonucleotide
  Target: SCNA; (-) strand; PAM type: NRG; PAM sequence: CGG
gcaggagaatggcctgaacc

SEQ ID NO: 24823 - DNA, 20 bp, Artificial Sequence
  Description of Artificial Sequence: Synthetic oligonucleotide
  Target: SCNA; (-) strand; PAM type: NRG; PAM sequence: TGG
gggaggctgaggcaggagaa

SEQ ID NO: 24824 - DNA, 20 bp, Artificial Sequence
  Description of Artificial Sequence: Synthetic oligonucleotide
  Target: SCNA; (-) strand; PAM type: NRG; PAM sequence: GAG
tgctggggaggctgaggcag

SEQ ID NO: 24825 - DNA, 20 bp, Artificial Sequence
  Description of Artificial Sequence: Synthetic oligonucleotide
  Target: SCNA; (-) strand; PAM type: NRG; PAM sequence: AGG
gctgctggggaggctgaggc

SEQ ID NO: 24826 - DNA, 20 bp, Artificial Sequence
  Description of Artificial Sequence: Synthetic oligonucleotide
  Target: SCNA; (-) strand; PAM type: NRG; PAM sequence: CAG
agctgctggggaggctgagg

SEQ ID NO: 24827 - DNA, 20 bp, Artificial Sequence
  Description of Artificial Sequence: Synthetic oligonucleotide
  Target: SCNA; (-) strand; PAM type: NRG; PAM sequence: AGG
cccagctgctggggaggctg

SEQ ID NO: 24828 - DNA, 20 bp, Artificial Sequence
  Description of Artificial Sequence: Synthetic oligonucleotide
  Target: SCNA; (-) strand; PAM type: NRG; PAM sequence: GAG
tcccagctgctggggaggct

SEQ ID NO: 24829 - DNA, 20 bp, Artificial Sequence
  Description of Artificial Sequence: Synthetic oligonucleotide
  Target: SCNA; (-) strand; PAM type: NRG; PAM sequence: AGG
tgtagtcccagctgctgggg

SEQ ID NO: 24830 - DNA, 20 bp, Artificial Sequence
  Description of Artificial Sequence: Synthetic oligonucleotide
  Target: SCNA; (-) strand; PAM type: NRG; PAM sequence: GAG
ctgtagtcccagctgctggg

SEQ ID NO: 24831 - DNA, 20 bp, Artificial Sequence
  Description of Artificial Sequence: Synthetic oligonucleotide
  Target: SCNA; (-) strand; PAM type: NRG; PAM sequence: GGG
acctgtagtcccagctgctg

SEQ ID NO: 24832 - DNA, 20 bp, Artificial Sequence
  Description of Artificial Sequence: Synthetic oligonucleotide
  Target: SCNA; (-) strand; PAM type: NRG; PAM sequence: GGG
cacctgtagtcccagctgct

SEQ ID NO: 24833 - DNA, 20 bp, Artificial Sequence
  Description of Artificial Sequence: Synthetic oligonucleotide
  Target: SCNA; (-) strand; PAM type: NRG; PAM sequence: TGG
gcacctgtagtcccagctgc

SEQ ID NO: 24834 - DNA, 20 bp, Artificial Sequence
  Description of Artificial Sequence: Synthetic oligonucleotide
  Target: SCNA; (-) strand; PAM type: NRG; PAM sequence: CAG
gtggcgcgcacctgtagtcc

SEQ ID NO: 24835 - DNA, 20 bp, Artificial Sequence
  Description of Artificial Sequence: Synthetic oligonucleotide
  Target: SCNA; (-) strand; PAM type: NRG; PAM sequence: TAG
ggtgtggtggcgcgcacctg

SEQ ID NO: 24836 - DNA, 20 bp, Artificial Sequence
  Description of Artificial Sequence: Synthetic oligonucleotide
  Target: SCNA; (-) strand; PAM type: NRG; PAM sequence: TGG
aaaaaattagccgggtgtgg

SEQ ID NO: 24837 - DNA, 20 bp, Artificial Sequence
  Description of Artificial Sequence: Synthetic oligonucleotide
  Target: SCNA; (-) strand; PAM type: NRG; PAM sequence: TGG
ataaaaaaattagccgggtg

SEQ ID NO: 24838 - DNA, 20 bp, Artificial Sequence
  Description of Artificial Sequence: Synthetic oligonucleotide
  Target: SCNA; (-) strand; PAM type: NRG; PAM sequence: GGG
aaaatataaaaaaattagcc

SEQ ID NO: 24839 - DNA, 20 bp, Artificial Sequence
  Description of Artificial Sequence: Synthetic oligonucleotide
  Target: SCNA; (-) strand; PAM type: NRG; PAM sequence: CGG
aaaaatataaaaaaattagc

SEQ ID NO: 24840 - DNA, 20 bp, Artificial Sequence
  Description of Artificial Sequence: Synthetic oligonucleotide
  Target: SCNA; (-) strand; PAM type: NRG; PAM sequence: TAG
tactaaaaatataaaaaaat

SEQ ID NO: 24841 - DNA, 20 bp, Artificial Sequence
  Description of Artificial Sequence: Synthetic oligonucleotide
  Target: SCNA; (-) strand; PAM type: NRG; PAM sequence: CGG
cgagaccatcctggctaaca

SEQ ID NO: 24842 - DNA, 20 bp, Artificial Sequence
  Description of Artificial Sequence: Synthetic oligonucleotide
  Target: SCNA; (-) strand; PAM type: NRG; PAM sequence: TGG
tcaggagatcgagaccatcc

SEQ ID NO: 24843 - DNA, 20 bp, Artificial Sequence
  Description of Artificial Sequence: Synthetic oligonucleotide
  Target: SCNA; (-) strand; PAM type: NRG; PAM sequence: GAG
gatcacgaggtcaggagatc

SEQ ID NO: 24844 - DNA, 20 bp, Artificial Sequence
  Description of Artificial Sequence: Synthetic oligonucleotide
  Target: SCNA; (-) strand; PAM type: NRG; PAM sequence: GAG
cgggcagatcacgaggtcag

SEQ ID NO: 24845 - DNA, 20 bp, Artificial Sequence
  Description of Artificial Sequence: Synthetic oligonucleotide
  Target: SCNA; (-) strand; PAM type: NRG; PAM sequence: AGG
ggcgggcagatcacgaggtc

SEQ ID NO: 24846 - DNA, 20 bp, Artificial Sequence
  Description of Artificial Sequence: Synthetic oligonucleotide
  Target: SCNA; (-) strand; PAM type: NRG; PAM sequence: CAG
aggcgggcagatcacgaggt

SEQ ID NO: 24847 - DNA, 20 bp, Artificial Sequence
  Description of Artificial Sequence: Synthetic oligonucleotide
  Target: SCNA; (-) strand; PAM type: NRG; PAM sequence: AGG
gctgaggcgggcagatcacg

SEQ ID NO: 24848 - DNA, 20 bp, Artificial Sequence
  Description of Artificial Sequence: Synthetic oligonucleotide
  Target: SCNA; (-) strand; PAM type: NRG; PAM sequence: GAG
ggctgaggcgggcagatcac

SEQ ID NO: 24849 - DNA, 20 bp, Artificial Sequence
  Description of Artificial Sequence: Synthetic oligonucleotide
  Target: SCNA; (-) strand; PAM type: NRG; PAM sequence: CAG
ctttgggaggctgaggcggg

SEQ ID NO: 24850 - DNA, 20 bp, Artificial Sequence
  Description of Artificial Sequence: Synthetic oligonucleotide
  Target: SCNA; (-) strand; PAM type: NRG; PAM sequence: GGG
gcactttgggaggctgaggc

SEQ ID NO: 24851 - DNA, 20 bp, Artificial Sequence
  Description of Artificial Sequence: Synthetic oligonucleotide
  Target: SCNA; (-) strand; PAM type: NRG; PAM sequence: CGG
agcactttgggaggctgagg

SEQ ID NO: 24852 - DNA, 20 bp, Artificial Sequence
  Description of Artificial Sequence: Synthetic oligonucleotide
  Target: SCNA; (-) strand; PAM type: NRG; PAM sequence: AGG
cccagcactttgggaggctg

SEQ ID NO: 24853 - DNA, 20 bp, Artificial Sequence
  Description of Artificial Sequence: Synthetic oligonucleotide
  Target: SCNA; (-) strand; PAM type: NRG; PAM sequence: GAG
tcccagcactttgggaggct

SEQ ID NO: 24854 - DNA, 20 bp, Artificial Sequence
  Description of Artificial Sequence: Synthetic oligonucleotide
  Target: SCNA; (-) strand; PAM type: NRG; PAM sequence: AGG
tgttatcccagcactttggg

SEQ ID NO: 24855 - DNA, 20 bp, Artificial Sequence
  Description of Artificial Sequence: Synthetic oligonucleotide
  Target: SCNA; (-) strand; PAM type: NRG; PAM sequence: GAG
ctgttatcccagcactttgg

SEQ ID NO: 24856 - DNA, 20 bp, Artificial Sequence
  Description of Artificial Sequence: Synthetic oligonucleotide
  Target: SCNA; (-) strand; PAM type: NRG; PAM sequence: GGG
gcctgttatcccagcacttt

SEQ ID NO: 24857 - DNA, 20 bp, Artificial Sequence
  Description of Artificial Sequence: Synthetic oligonucleotide
  Target: SCNA; (-) strand; PAM type: NRG; PAM sequence: TGG
cgcctgttatcccagcactt

SEQ ID NO: 24858 - DNA, 20 bp, Artificial Sequence
  Description of Artificial Sequence: Synthetic oligonucleotide
  Target: SCNA; (-) strand; PAM type: NRG; PAM sequence: CAG
gtggctcacgcctgttatcc

SEQ ID NO: 24859 - DNA, 20 bp, Artificial Sequence
  Description of Artificial Sequence: Synthetic oligonucleotide
  Target: SCNA; (-) strand; PAM type: NRG; PAM sequence: TGG
tggcttcaggccaggcgcgg

SEQ ID NO: 24860 - DNA, 20 bp, Artificial Sequence
  Description of Artificial Sequence: Synthetic oligonucleotide
  Target: SCNA; (-) strand; PAM type: NRG; PAM sequence: CGG
tattggcttcaggccaggcg

SEQ ID NO: 24861 - DNA, 20 bp, Artificial Sequence
  Description of Artificial Sequence: Synthetic oligonucleotide
  Target: SCNA; (-) strand; PAM type: NRG; PAM sequence: AGG
ttaaatattggcttcaggcc

SEQ ID NO: 24862 - DNA, 20 bp, Artificial Sequence
  Description of Artificial Sequence: Synthetic oligonucleotide
  Target: SCNA; (-) strand; PAM type: NRG; PAM sequence: CAG
tttaaatattggcttcaggc

SEQ ID NO: 24863 - DNA, 20 bp, Artificial Sequence
  Description of Artificial Sequence: Synthetic oligonucleotide
  Target: SCNA; (-) strand; PAM type: NRG; PAM sequence: AGG
accatttaaatattggcttc

SEQ ID NO: 24864 - DNA, 20 bp, Artificial Sequence
  Description of Artificial Sequence: Synthetic oligonucleotide
  Target: SCNA; (-) strand; PAM type: NRG; PAM sequence: CAG
caccatttaaatattggctt

SEQ ID NO: 24865 - DNA, 20 bp, Artificial Sequence
  Description of Artificial Sequence: Synthetic oligonucleotide
  Target: SCNA; (-) strand; PAM type: NRG; PAM sequence: TGG
tgtccacaccatttaaatat

SEQ ID NO: 24866 - DNA, 20 bp, Artificial Sequence
  Description of Artificial Sequence: Synthetic oligonucleotide
  Target: SCNA; (-) strand; PAM type: NRG; PAM sequence: TAG
acagacccccttagcttaca

SEQ ID NO: 24867 - DNA, 20 bp, Artificial Sequence
  Description of Artificial Sequence: Synthetic oligonucleotide
  Target: SCNA; (-) strand; PAM type: NRG; PAM sequence: TAG
cttgtccttacagaccccct

SEQ ID NO: 24868 - DNA, 20 bp, Artificial Sequence
  Description of Artificial Sequence: Synthetic oligonucleotide
  Target: SCNA; (-) strand; PAM type: NRG; PAM sequence: CAG
gagaaagcctcttgtcctta

SEQ ID NO: 24869 - DNA, 20 bp, Artificial Sequence
  Description of Artificial Sequence: Synthetic oligonucleotide
  Target: SCNA; (-) strand; PAM type: NRG; PAM sequence: AAG
cattgcctgtactaaggaga

SEQ ID NO: 24870 - DNA, 20 bp, Artificial Sequence
  Description of Artificial Sequence: Synthetic oligonucleotide
  Target: SCNA; (-) strand; PAM type: NRG; PAM sequence: GAG
cccacattgcctgtactaag

SEQ ID NO: 24871 - DNA, 20 bp, Artificial Sequence
  Description of Artificial Sequence: Synthetic oligonucleotide
  Target: SCNA; (-) strand; PAM type: NRG; PAM sequence: AGG
tgcccacattgcctgtacta

SEQ ID NO: 24872 - DNA, 20 bp, Artificial Sequence
  Description of Artificial Sequence: Synthetic oligonucleotide
  Target: SCNA; (-) strand; PAM type: NRG; PAM sequence: AAG
ttgcccacattgcctgtact

SEQ ID NO: 24873 - DNA, 20 bp, Artificial Sequence
  Description of Artificial Sequence: Synthetic oligonucleotide
  Target: SCNA; (-) strand; PAM type: NRG; PAM sequence: AGG
ttgggctgtgtggctatgtc

SEQ ID NO: 24874 - DNA, 20 bp, Artificial Sequence
  Description of Artificial Sequence: Synthetic oligonucleotide
  Target: SCNA; (-) strand; PAM type: NRG; PAM sequence: CAG
cttgggctgtgtggctatgt

SEQ ID NO: 24875 - DNA, 20 bp, Artificial Sequence
  Description of Artificial Sequence: Synthetic oligonucleotide
  Target: SCNA; (-) strand; PAM type: NRG; PAM sequence: TGG
gtttctggtcttgggctgtg

SEQ ID NO: 24876 - DNA, 20 bp, Artificial Sequence
  Description of Artificial Sequence: Synthetic oligonucleotide
  Target: SCNA; (-) strand; PAM type: NRG; PAM sequence: GGG
tgtggaccgtttctggtctt

SEQ ID NO: 24877 - DNA, 20 bp, Artificial Sequence
  Description of Artificial Sequence: Synthetic oligonucleotide
  Target: SCNA; (-) strand; PAM type: NRG; PAM sequence: TGG
ctgtggaccgtttctggtct

SEQ ID NO: 24878 - DNA, 20 bp, Artificial Sequence
  Description of Artificial Sequence: Synthetic oligonucleotide
  Target: SCNA; (-) strand; PAM type: NRG; PAM sequence: TGG
acactactgtggaccgtttc

SEQ ID NO: 24879 - DNA, 20 bp, Artificial Sequence
  Description of Artificial Sequence: Synthetic oligonucleotide
  Target: SCNA; (-) strand; PAM type: NRG; PAM sequence: TGG
aatagggagcaacactactg

SEQ ID NO: 24880 - DNA, 20 bp, Artificial Sequence
  Description of Artificial Sequence: Synthetic oligonucleotide
  Target: SCNA; (-) strand; PAM type: NRG; PAM sequence: GAG
tagcctaaaagacaaatagg

SEQ ID NO: 24881 - DNA, 20 bp, Artificial Sequence
  Description of Artificial Sequence: Synthetic oligonucleotide
  Target: SCNA; (-) strand; PAM type: NRG; PAM sequence: GGG
tctagcctaaaagacaaata

SEQ ID NO: 24882 - DNA, 20 bp, Artificial Sequence
  Description of Artificial Sequence: Synthetic oligonucleotide
  Target: SCNA; (-) strand; PAM type: NRG; PAM sequence: AGG
ttctagcctaaaagacaaat

SEQ ID NO: 24883 - DNA, 20 bp, Artificial Sequence
  Description of Artificial Sequence: Synthetic oligonucleotide
  Target: SCNA; (-) strand; PAM type: NRG; PAM sequence: TAG
attctagcctaaaagacaaa

SEQ ID NO: 24884 - DNA, 20 bp, Artificial Sequence
  Description of Artificial Sequence: Synthetic oligonucleotide
  Target: SCNA; (-) strand; PAM type: NRG; PAM sequence: AAG
tgtacaaaattctagcctaa

SEQ ID NO: 24885 - DNA, 20 bp, Artificial Sequence
  Description of Artificial Sequence: Synthetic oligonucleotide
  Target: SCNA; (-) strand; PAM type: NRG; PAM sequence: TAG
taggtagttgtacaaaattc

SEQ ID NO: 24886 - DNA, 20 bp, Artificial Sequence
  Description of Artificial Sequence: Synthetic oligonucleotide
  Target: SCNA; (-) strand; PAM type: NRG; PAM sequence: TAG
agtggcacggagttgttagg

SEQ ID NO: 24887 - DNA, 20 bp, Artificial Sequence
  Description of Artificial Sequence: Synthetic oligonucleotide
  Target: SCNA; (-) strand; PAM type: NRG; PAM sequence: AGG
agaagtggcacggagttgtt

SEQ ID NO: 24888 - DNA, 20 bp, Artificial Sequence
  Description of Artificial Sequence: Synthetic oligonucleotide
  Target: SCNA; (-) strand; PAM type: NRG; PAM sequence: TAG
tagaagtggcacggagttgt

SEQ ID NO: 24889 - DNA, 20 bp, Artificial Sequence
  Description of Artificial Sequence: Synthetic oligonucleotide
  Target: SCNA; (-) strand; PAM type: NRG; PAM sequence: GAG
atatccttagaagtggcacg

SEQ ID NO: 24890 - DNA, 20 bp, Artificial Sequence
  Description of Artificial Sequence: Synthetic oligonucleotide
  Target: SCNA; (-) strand; PAM type: NRG; PAM sequence: CGG
ccatatccttagaagtggca

SEQ ID NO: 24891 - DNA, 20 bp, Artificial Sequence
  Description of Artificial Sequence: Synthetic oligonucleotide
  Target: SCNA; (-) strand; PAM type: NRG; PAM sequence: TGG
atcagccatatccttagaag

SEQ ID NO: 24892 - DNA, 20 bp, Artificial Sequence
  Description of Artificial Sequence: Synthetic oligonucleotide
  Target: SCNA; (-) strand; PAM type: NRG; PAM sequence: AAG
gacatcagccatatccttag

SEQ ID NO: 24893 - DNA, 20 bp, Artificial Sequence
  Description of Artificial Sequence: Synthetic oligonucleotide
  Target: SCNA; (-) strand; PAM type: NRG; PAM sequence: TAG
ggagacatcagccatatcct

SEQ ID NO: 24894 - DNA, 20 bp, Artificial Sequence
  Description of Artificial Sequence: Synthetic oligonucleotide
  Target: SCNA; (-) strand; PAM type: NRG; PAM sequence: CAG
tcttgctcttaaggagacat

SEQ ID NO: 24895 - DNA, 20 bp, Artificial Sequence
  Description of Artificial Sequence: Synthetic oligonucleotide
  Target: SCNA; (-) strand; PAM type: NRG; PAM sequence: GAG
aaatagctcttgctcttaag

SEQ ID NO: 24896 - DNA, 20 bp, Artificial Sequence
  Description of Artificial Sequence: Synthetic oligonucleotide
  Target: SCNA; (-) strand; PAM type: NRG; PAM sequence: AGG
gtaaatagctcttgctctta

SEQ ID NO: 24897 - DNA, 20 bp, Artificial Sequence
  Description of Artificial Sequence: Synthetic oligonucleotide
  Target: SCNA; (-) strand; PAM type: NRG; PAM sequence: AAG
tgtaaatagctcttgctctt

SEQ ID NO: 24898 - DNA, 20 bp, Artificial Sequence
  Description of Artificial Sequence: Synthetic oligonucleotide
  Target: SCNA; (-) strand; PAM type: NRG; PAM sequence: TAG
atcgaactttgaattgtaaa

SEQ ID NO: 24899 - DNA, 20 bp, Artificial Sequence
  Description of Artificial Sequence: Synthetic oligonucleotide
  Target: SCNA; (-) strand; PAM type: NRG; PAM sequence: TGG
ttttcagtacagcttttcgc

SEQ ID NO: 24900 - DNA, 20 bp, Artificial Sequence
  Description of Artificial Sequence: Synthetic oligonucleotide
  Target: SCNA; (-) strand; PAM type: NRG; PAM sequence: CAG
aaaacataagattttcagta

SEQ ID NO: 24901 - DNA, 20 bp, Artificial Sequence
  Description of Artificial Sequence: Synthetic oligonucleotide
  Target: SCNA; (-) strand; PAM type: NRG; PAM sequence: CAG
gttttaaaacataagatttt

SEQ ID NO: 24902 - DNA, 20 bp, Artificial Sequence
  Description of Artificial Sequence: Synthetic oligonucleotide
  Target: SCNA; (-) strand; PAM type: NRG; PAM sequence: AAG
tcagaaatgttttaaaacat

SEQ ID NO: 24903 - DNA, 20 bp, Artificial Sequence
  Description of Artificial Sequence: Synthetic oligonucleotide
  Target: SCNA; (-) strand; PAM type: NRG; PAM sequence: CAG
tttttaaaggatcaacattt

SEQ ID NO: 24904 - DNA, 20 bp, Artificial Sequence
  Description of Artificial Sequence: Synthetic oligonucleotide
  Target: SCNA; (-) strand; PAM type: NRG; PAM sequence: AGG
acataattgactatttttaa

SEQ ID NO: 24905 - DNA, 20 bp, Artificial Sequence
  Description of Artificial Sequence: Synthetic oligonucleotide
  Target: SCNA; (-) strand; PAM type: NRG; PAM sequence: AAG
cacataattgactattttta

SEQ ID NO: 24906 - DNA, 20 bp, Artificial Sequence
  Description of Artificial Sequence: Synthetic oligonucleotide
  Target: SCNA; (-) strand; PAM type: NRG; PAM sequence: AGG
ttcaattcacgtccttgaaa

SEQ ID NO: 24907 - DNA, 20 bp, Artificial Sequence
  Description of Artificial Sequence: Synthetic oligonucleotide
  Target: SCNA; (-) strand; PAM type: NRG; PAM sequence: AAG
tttcaattcacgtccttgaa

SEQ ID NO: 24908 - DNA, 20 bp, Artificial Sequence
  Description of Artificial Sequence: Synthetic oligonucleotide
  Target: SCNA; (-) strand; PAM type: NRG; PAM sequence: AAG
aacaagaaaatgttcgtttc

SEQ ID NO: 24909 - DNA, 20 bp, Artificial Sequence
  Description of Artificial Sequence: Synthetic oligonucleotide
  Target: SCNA; (-) strand; PAM type: NRG; PAM sequence: AAG
tcgctttgagattttataac

SEQ ID NO: 24910 - DNA, 20 bp, Artificial Sequence
  Description of Artificial Sequence: Synthetic oligonucleotide
  Target: SCNA; (-) strand; PAM type: NRG; PAM sequence: GAG
cctatttttaatctcgcttt

SEQ ID NO: 24911 - DNA, 20 bp, Artificial Sequence
  Description of Artificial Sequence: Synthetic oligonucleotide
  Target: SCNA; (-) strand; PAM type: NRG; PAM sequence: TGG
gatattataaaatttatggc

SEQ ID NO: 24912 - DNA, 20 bp, Artificial Sequence
  Description of Artificial Sequence: Synthetic oligonucleotide
  Target: SCNA; (-) strand; PAM type: NRG; PAM sequence: TGG
tctagatattataaaattta

SEQ ID NO: 24913 - DNA, 20 bp, Artificial Sequence
  Description of Artificial Sequence: Synthetic oligonucleotide
  Target: SCNA; (-) strand; PAM type: NRG; PAM sequence: TAG
tacatatataaaaggctatc

SEQ ID NO: 24914 - DNA, 20 bp, Artificial Sequence
  Description of Artificial Sequence: Synthetic oligonucleotide
  Target: SCNA; (-) strand; PAM type: NRG; PAM sequence: AGG
aaaatttatacatatataaa

SEQ ID NO: 24915 - DNA, 20 bp, Artificial Sequence
  Description of Artificial Sequence: Synthetic oligonucleotide
  Target: SCNA; (-) strand; PAM type: NRG; PAM sequence: AAG
taaaatttatacatatataa

SEQ ID NO: 24916 - DNA, 20 bp, Artificial Sequence
  Description of Artificial Sequence: Synthetic oligonucleotide
  Target: SCNA; (-) strand; PAM type: NRG; PAM sequence: TAG
gcagtgtattgcattaaaac

SEQ ID NO: 24917 - DNA, 20 bp, Artificial Sequence
  Description of Artificial Sequence: Synthetic oligonucleotide
  Target: SCNA; (-) strand; PAM type: NRG; PAM sequence: CAG
gtagagtacattttactgtg

SEQ ID NO: 24918 - DNA, 20 bp, Artificial Sequence
  Description of Artificial Sequence: Synthetic oligonucleotide
  Target: SCNA; (-) strand; PAM type: NRG; PAM sequence: GAG
caaaattataataatgtgta

SEQ ID NO: 24919 - DNA, 20 bp, Artificial Sequence
  Description of Artificial Sequence: Synthetic oligonucleotide
  Target: SCNA; (-) strand; PAM type: NRG; PAM sequence: TAG
aacaaaattataataatgtg

SEQ ID NO: 24920 - DNA, 20 bp, Artificial Sequence
  Description of Artificial Sequence: Synthetic oligonucleotide
  Target: SCNA; (-) strand; PAM type: NRG; PAM sequence: TAG
cactctgtcattttgtaatg

SEQ ID NO: 24921 - DNA, 20 bp, Artificial Sequence
  Description of Artificial Sequence: Synthetic oligonucleotide
  Target: SCNA; (-) strand; PAM type: NRG; PAM sequence: CAG
tactagagaaatcagttcta

SEQ ID NO: 24922 - DNA, 20 bp, Artificial Sequence
  Description of Artificial Sequence: Synthetic oligonucleotide
  Target: SCNA; (-) strand; PAM type: NRG; PAM sequence: CAG
agagaccctactagagaaat

SEQ ID NO: 24923 - DNA, 20 bp, Artificial Sequence
  Description of Artificial Sequence: Synthetic oligonucleotide
  Target: SCNA; (-) strand; PAM type: NRG; PAM sequence: GAG
ggtcagcagagaccctacta

SEQ ID NO: 24924 - DNA, 20 bp, Artificial Sequence
  Description of Artificial Sequence: Synthetic oligonucleotide
  Target: SCNA; (-) strand; PAM type: NRG; PAM sequence: TAG
aaggtcagcagagaccctac

SEQ ID NO: 24925 - DNA, 20 bp, Artificial Sequence
  Description of Artificial Sequence: Synthetic oligonucleotide
  Target: SCNA; (-) strand; PAM type: NRG; PAM sequence: GAG
atagaggttaaaggtcagca

SEQ ID NO: 24926 - DNA, 20 bp, Artificial Sequence
  Description of Artificial Sequence: Synthetic oligonucleotide
  Target: SCNA; (-) strand; PAM type: NRG; PAM sequence: CAG
aaatagaggttaaaggtcag

SEQ ID NO: 24927 - DNA, 20 bp, Artificial Sequence
  Description of Artificial Sequence: Synthetic oligonucleotide
  Target: SCNA; (-) strand; PAM type: NRG; PAM sequence: CAG
gaaaaatagaggttaaaggt

SEQ ID NO: 24928 - DNA, 20 bp, Artificial Sequence
  Description of Artificial Sequence: Synthetic oligonucleotide
  Target: SCNA; (-) strand; PAM type: NRG; PAM sequence: AGG
aggggaaaaatagaggttaa

SEQ ID NO: 24929 - DNA, 20 bp, Artificial Sequence
  Description of Artificial Sequence: Synthetic oligonucleotide
  Target: SCNA; (-) strand; PAM type: NRG; PAM sequence: AAG
aaggggaaaaatagaggtta

SEQ ID NO: 24930 - DNA, 20 bp, Artificial Sequence
  Description of Artificial Sequence: Synthetic oligonucleotide
  Target: SCNA; (-) strand; PAM type: NRG; PAM sequence: AGG
gccctcaaggggaaaaatag

SEQ ID NO: 24931 - DNA, 20 bp, Artificial Sequence
  Description of Artificial Sequence: Synthetic oligonucleotide
  Target: SCNA; (-) strand; PAM type: NRG; PAM sequence: GAG
ggccctcaaggggaaaaata

SEQ ID NO: 24932 - DNA, 20 bp, Artificial Sequence
  Description of Artificial Sequence: Synthetic oligonucleotide
  Target: SCNA; (-) strand; PAM type: NRG; PAM sequence: TAG
aaggccctcaaggggaaaaa

SEQ ID NO: 24933 - DNA, 20 bp, Artificial Sequence
  Description of Artificial Sequence: Synthetic oligonucleotide
  Target: SCNA; (-) strand; PAM type: NRG; PAM sequence: GGG
tagtgtgaaaggccctcaag

SEQ ID NO: 24934 - DNA, 20 bp, Artificial Sequence
  Description of Artificial Sequence: Synthetic oligonucleotide
  Target: SCNA; (-) strand; PAM type: NRG; PAM sequence: GGG
atagtgtgaaaggccctcaa

SEQ ID NO: 24935 - DNA, 20 bp, Artificial Sequence
  Description of Artificial Sequence: Synthetic oligonucleotide
  Target: SCNA; (-) strand; PAM type: NRG; PAM sequence: AGG
gatagtgtgaaaggccctca

SEQ ID NO: 24936 - DNA, 20 bp, Artificial Sequence
  Description of Artificial Sequence: Synthetic oligonucleotide
  Target: SCNA; (-) strand; PAM type: NRG; PAM sequence: AAG
agatagtgtgaaaggccctc

SEQ ID NO: 24937 - DNA, 20 bp, Artificial Sequence
  Description of Artificial Sequence: Synthetic oligonucleotide
  Target: SCNA; (-) strand; PAM type: NRG; PAM sequence: AGG
gagtagagagatagtgtgaa

SEQ ID NO: 24938 - DNA, 20 bp, Artificial Sequence
  Description of Artificial Sequence: Synthetic oligonucleotide
  Target: SCNA; (-) strand; PAM type: NRG; PAM sequence: AAG
tgagtagagagatagtgtga

SEQ ID NO: 24939 - DNA, 20 bp, Artificial Sequence
  Description of Artificial Sequence: Synthetic oligonucleotide
  Target: SCNA; (-) strand; PAM type: NRG; PAM sequence: TAG
aatgtcagtgagtagagaga

SEQ ID NO: 24940 - DNA, 20 bp, Artificial Sequence
  Description of Artificial Sequence: Synthetic oligonucleotide
  Target: SCNA; (-) strand; PAM type: NRG; PAM sequence: GAG
ttggaatgtcagtgagtaga

SEQ ID NO: 24941 - DNA, 20 bp, Artificial Sequence
  Description of Artificial Sequence: Synthetic oligonucleotide
  Target: SCNA; (-) strand; PAM type: NRG; PAM sequence: GAG
atttggaatgtcagtgagta

SEQ ID NO: 24942 - DNA, 20 bp, Artificial Sequence
  Description of Artificial Sequence: Synthetic oligonucleotide
  Target: SCNA; (-) strand; PAM type: NRG; PAM sequence: TAG
tcatttggaatgtcagtgag

SEQ ID NO: 24943 - DNA, 20 bp, Artificial Sequence
  Description of Artificial Sequence: Synthetic oligonucleotide
  Target: SCNA; (-) strand; PAM type: NRG; PAM sequence: GAG
ccgtcatttggaatgtcagt

SEQ ID NO: 24944 - DNA, 20 bp, Artificial Sequence
  Description of Artificial Sequence: Synthetic oligonucleotide
  Target: SCNA; (-) strand; PAM type: NRG; PAM sequence: CAG
tcacccgtcatttggaatgt

SEQ ID NO: 24945 - DNA, 20 bp, Artificial Sequence
  Description of Artificial Sequence: Synthetic oligonucleotide
  Target: SCNA; (-) strand; PAM type: NRG; PAM sequence: TGG
ttgttttgtcacccgtcatt

SEQ ID NO: 24946 - DNA, 20 bp, Artificial Sequence
  Description of Artificial Sequence: Synthetic oligonucleotide
  Target: SCNA; (-) strand; PAM type: NRG; PAM sequence: GAG
gacccaaaatgtactaatat

SEQ ID NO: 24947 - DNA, 20 bp, Artificial Sequence
  Description of Artificial Sequence: Synthetic oligonucleotide
  Target: SCNA; (-) strand; PAM type: NRG; PAM sequence: TAG
gaaaaacagttaccatttat

SEQ ID NO: 24948 - DNA, 20 bp, Artificial Sequence
  Description of Artificial Sequence: Synthetic oligonucleotide
  Target: SCNA; (-) strand; PAM type: NRG; PAM sequence: CAG
agaactcaattgccgaaaaa

SEQ ID NO: 24949 - DNA, 20 bp, Artificial Sequence
  Description of Artificial Sequence: Synthetic oligonucleotide
  Target: SCNA; (-) strand; PAM type: NRG; PAM sequence: AAG
aagcagaatccctgatttca

SEQ ID NO: 24950 - DNA, 20 bp, Artificial Sequence
  Description of Artificial Sequence: Synthetic oligonucleotide
  Target: SCNA; (-) strand; PAM type: NRG; PAM sequence: CAG
taatataaagaaaaataaag

SEQ ID NO: 24951 - DNA, 20 bp, Artificial Sequence
  Description of Artificial Sequence: Synthetic oligonucleotide
  Target: SCNA; (-) strand; PAM type: NRG; PAM sequence: AAG
aaataatataaagaaaaata

SEQ ID NO: 24952 - DNA, 20 bp, Artificial Sequence
  Description of Artificial Sequence: Synthetic oligonucleotide
  Target: SCNA; (-) strand; PAM type: NRG; PAM sequence: AAG
atctactatgaaataatata

SEQ ID NO: 24953 - DNA, 20 bp, Artificial Sequence
  Description of Artificial Sequence: Synthetic oligonucleotide
  Target: SCNA; (-) strand; PAM type: NRG; PAM sequence: TAG
ggtagacactaaattcattt

SEQ ID NO: 24954 - DNA, 20 bp, Artificial Sequence
  Description of Artificial Sequence: Synthetic oligonucleotide
  Target: SCNA; (-) strand; PAM type: NRG; PAM sequence: TAG
attaatgcagacattagagg

SEQ ID NO: 24955 - DNA, 20 bp, Artificial Sequence
  Description of Artificial Sequence: Synthetic oligonucleotide
  Target: SCNA; (-) strand; PAM type: NRG; PAM sequence: AGG
tatattaatgcagacattag

SEQ ID NO: 24956 - DNA, 20 bp, Artificial Sequence
  Description of Artificial Sequence: Synthetic oligonucleotide
  Target: SCNA; (-) strand; PAM type: NRG; PAM sequence: GAG
ttatattaatgcagacatta

SEQ ID NO: 24957 - DNA, 20 bp, Artificial Sequence
  Description of Artificial Sequence: Synthetic oligonucleotide
  Target: SCNA; (-) strand; PAM type: NRG; PAM sequence: TAG
atttatattaatgcagacat

SEQ ID NO: 24958 - DNA, 20 bp, Artificial Sequence
  Description of Artificial Sequence: Synthetic oligonucleotide
  Target: SCNA; (-) strand; PAM type: NRG; PAM sequence: CAG
acctattatttatattaatg

SEQ ID NO: 24959 - DNA, 20 bp, Artificial Sequence
  Description of Artificial Sequence: Synthetic oligonucleotide
  Target: SCNA; (-) strand; PAM type: NRG; PAM sequence: AAG
ttttatttttaaagtagcta

SEQ ID NO: 24960 - DNA, 20 bp, Artificial Sequence
  Description of Artificial Sequence: Synthetic oligonucleotide
  Target: SCNA; (-) strand; PAM type: NRG; PAM sequence: TAG
ttggaattttatttttaaag

SEQ ID NO: 24961 - DNA, 20 bp, Artificial Sequence
  Description of Artificial Sequence: Synthetic oligonucleotide
  Target: SCNA; (-) strand; PAM type: NRG; PAM sequence: AAG
tttttggaattttattttta

SEQ ID NO: 24962 - DNA, 20 bp, Artificial Sequence
  Description of Artificial Sequence: Synthetic oligonucleotide
  Target: SCNA; (-) strand; PAM type: NRG; PAM sequence: TGG
ttggtatcacatttcctttt

SEQ ID NO: 24963 - DNA, 20 bp, Artificial Sequence
  Description of Artificial Sequence: Synthetic oligonucleotide
  Target: SCNA; (-) strand; PAM type: NRG; PAM sequence: TGG
gctatatctattctaaaagt

SEQ ID NO: 24964 - DNA, 20 bp, Artificial Sequence
  Description of Artificial Sequence: Synthetic oligonucleotide
  Target: SCNA; (-) strand; PAM type: NRG; PAM sequence: AAG
tttggctatatctattctaa

SEQ ID NO: 24965 - DNA, 20 bp, Artificial Sequence
  Description of Artificial Sequence: Synthetic oligonucleotide
  Target: SCNA; (-) strand; PAM type: NRG; PAM sequence: TGG
ttaatgtcaaaggttagatt

SEQ ID NO: 24966 - DNA, 20 bp, Artificial Sequence
  Description of Artificial Sequence: Synthetic oligonucleotide
  Target: SCNA; (-) strand; PAM type: NRG; PAM sequence: TAG
ttttgtttaatgtcaaaggt

SEQ ID NO: 24967 - DNA, 20 bp, Artificial Sequence
  Description of Artificial Sequence: Synthetic oligonucleotide
  Target: SCNA; (-) strand; PAM type: NRG; PAM sequence: AGG
ataattttgtttaatgtcaa

SEQ ID NO: 24968 - DNA, 20 bp, Artificial Sequence
  Description of Artificial Sequence: Synthetic oligonucleotide
  Target: SCNA; (-) strand; PAM type: NRG; PAM sequence: AAG
tataattttgtttaatgtca

SEQ ID NO: 24969 - DNA, 20 bp, Artificial Sequence
  Description of Artificial Sequence: Synthetic oligonucleotide
  Target: SCNA; (-) strand; PAM type: NRG; PAM sequence: TAG
tattatgatttaaatttcct

SEQ ID NO: 24970 - DNA, 20 bp, Artificial Sequence
  Description of Artificial Sequence: Synthetic oligonucleotide
  Target: SCNA; (-) strand; PAM type: NRG; PAM sequence: AGG
taacactggagattttctga

SEQ ID NO: 24971 - DNA, 20 bp, Artificial Sequence
  Description of Artificial Sequence: Synthetic oligonucleotide
  Target: SCNA; (-) strand; PAM type: NRG; PAM sequence: AAG
ctaacactggagattttctg

SEQ ID NO: 24972 - DNA, 20 bp, Artificial Sequence
  Description of Artificial Sequence: Synthetic oligonucleotide
  Target: SCNA; (-) strand; PAM type: NRG; PAM sequence: GAG
taaagaaatttctaacactg

SEQ ID NO: 24973 - DNA, 20 bp, Artificial Sequence
  Description of Artificial Sequence: Synthetic oligonucleotide
  Target: SCNA; (-) strand; PAM type: NRG; PAM sequence: TGG
tataaagaaatttctaacac

SEQ ID NO: 24974 - DNA, 20 bp, Artificial Sequence
  Description of Artificial Sequence: Synthetic oligonucleotide
  Target: SCNA; (-) strand; PAM type: NRG; PAM sequence: AAG
tttcatgcaagtatagtata

SEQ ID NO: 24975 - DNA, 20 bp, Artificial Sequence
  Description of Artificial Sequence: Synthetic oligonucleotide
  Target: SCNA; (-) strand; PAM type: NRG; PAM sequence: TAG
acctatttttcatgcaagta

SEQ ID NO: 24976 - DNA, 20 bp, Artificial Sequence
  Description of Artificial Sequence: Synthetic oligonucleotide
  Target: SCNA; (-) strand; PAM type: NRG; PAM sequence: AAG
aagttacctatttttcatgc

SEQ ID NO: 24977 - DNA, 20 bp, Artificial Sequence
  Description of Artificial Sequence: Synthetic oligonucleotide
  Target: SCNA; (-) strand; PAM type: NRG; PAM sequence: AAG
taaaaataaactatgatata

SEQ ID NO: 24978 - DNA, 20 bp, Artificial Sequence
  Description of Artificial Sequence: Synthetic oligonucleotide
  Target: SCNA; (-) strand; PAM type: NRG; PAM sequence: AGG
actgaatgatatgttttttc

SEQ ID NO: 24979 - DNA, 20 bp, Artificial Sequence
  Description of Artificial Sequence: Synthetic oligonucleotide
  Target: SCNA; (-) strand; PAM type: NRG; PAM sequence: CAG
tactgaatgatatgtttttt

SEQ ID NO: 24980 - DNA, 20 bp, Artificial Sequence
  Description of Artificial Sequence: Synthetic oligonucleotide
  Target: SCNA; (-) strand; PAM type: NRG; PAM sequence: TAG
caacttaatgcatcatatta

SEQ ID NO: 24981 - DNA, 20 bp, Artificial Sequence
  Description of Artificial Sequence: Synthetic oligonucleotide
  Target: SCNA; (-) strand; PAM type: NRG; PAM sequence: CAG
ttgatctcaggaaattattt

SEQ ID NO: 24982 - DNA, 20 bp, Artificial Sequence
  Description of Artificial Sequence: Synthetic oligonucleotide
  Target: SCNA; (-) strand; PAM type: NRG; PAM sequence: AGG
aatcctggctgtttgatctc

SEQ ID NO: 24983 - DNA, 20 bp, Artificial Sequence
  Description of Artificial Sequence: Synthetic oligonucleotide
  Target: SCNA; (-) strand; PAM type: NRG; PAM sequence: CAG
aaatcctggctgtttgatct

SEQ ID NO: 24984 - DNA, 20 bp, Artificial Sequence
  Description of Artificial Sequence: Synthetic oligonucleotide
  Target: SCNA; (-) strand; PAM type: NRG; PAM sequence: TGG
aaatccaccaacttaaatcc

SEQ ID NO: 24985 - DNA, 20 bp, Artificial Sequence
  Description of Artificial Sequence: Synthetic oligonucleotide
  Target: SCNA; (-) strand; PAM type: NRG; PAM sequence: TAG
ataaaataaattatcctagt

SEQ ID NO: 24986 - DNA, 20 bp, Artificial Sequence
  Description of Artificial Sequence: Synthetic oligonucleotide
  Target: SCNA; (-) strand; PAM type: NRG; PAM sequence: TAG
tcaaataaaataaattatcc

SEQ ID NO: 24987 - DNA, 20 bp, Artificial Sequence
  Description of Artificial Sequence: Synthetic oligonucleotide
  Target: SCNA; (-) strand; PAM type: NRG; PAM sequence: AAG
ctgggaactttctacctaca

SEQ ID NO: 24988 - DNA, 20 bp, Artificial Sequence
  Description of Artificial Sequence: Synthetic oligonucleotide
  Target: SCNA; (-) strand; PAM type: NRG; PAM sequence: GGG
gacttcagtaaacttgggct

SEQ ID NO: 24989 - DNA, 20 bp, Artificial Sequence
  Description of Artificial Sequence: Synthetic oligonucleotide
  Target: SCNA; (-) strand; PAM type: NRG; PAM sequence: TGG
agacttcagtaaacttgggc

SEQ ID NO: 24990 - DNA, 20 bp, Artificial Sequence
  Description of Artificial Sequence: Synthetic oligonucleotide
  Target: SCNA; (-) strand; PAM type: NRG; PAM sequence: GGG
atacagacttcagtaaactt

SEQ ID NO: 24991 - DNA, 20 bp, Artificial Sequence
  Description of Artificial Sequence: Synthetic oligonucleotide
  Target: SCNA; (-) strand; PAM type: NRG; PAM sequence: TGG
aatacagacttcagtaaact

SEQ ID NO: 24992 - DNA, 20 bp, Artificial Sequence
  Description of Artificial Sequence: Synthetic oligonucleotide
  Target: SCNA; (-) strand; PAM type: NRG; PAM sequence: CAG
caggggagaaatacagactt

SEQ ID NO: 24993 - DNA, 20 bp, Artificial Sequence
  Description of Artificial Sequence: Synthetic oligonucleotide
  Target: SCNA; (-) strand; PAM type: NRG; PAM sequence: CAG
ggtggggcaggggagaaata

SEQ ID NO: 24994 - DNA, 20 bp, Artificial Sequence
  Description of Artificial Sequence: Synthetic oligonucleotide
  Target: SCNA; (-) strand; PAM type: NRG; PAM sequence: GAG
tttttttcggtggggcaggg

SEQ ID NO: 24995 - DNA, 20 bp, Artificial Sequence
  Description of Artificial Sequence: Synthetic oligonucleotide
  Target: SCNA; (-) strand; PAM type: NRG; PAM sequence: GGG
tttttttttcggtggggcag

SEQ ID NO: 24996 - DNA, 20 bp, Artificial Sequence
  Description of Artificial Sequence: Synthetic oligonucleotide
  Target: SCNA; (-) strand; PAM type: NRG; PAM sequence: GGG
ttttttttttcggtggggca

SEQ ID NO: 24997 - DNA, 20 bp, Artificial Sequence
  Description of Artificial Sequence: Synthetic oligonucleotide
  Target: SCNA; (-) strand; PAM type: NRG; PAM sequence: AGG
tttttttttttcggtggggc

SEQ ID NO: 24998 - DNA, 20 bp, Artificial Sequence
  Description of Artificial Sequence: Synthetic oligonucleotide
  Target: SCNA; (-) strand; PAM type: NRG; PAM sequence: CAG
ctttttttttttcggtgggg

SEQ ID NO: 24999 - DNA, 20 bp, Artificial Sequence
  Description of Artificial Sequence: Synthetic oligonucleotide
  Target: SCNA; (-) strand; PAM type: NRG; PAM sequence: GGG
tagctttttttttttcggtg

SEQ ID NO: 25000 - DNA, 20 bp, Artificial Sequence
  Description of Artificial Sequence: Synthetic oligonucleotide
  Target: SCNA; (-) strand; PAM type: NRG; PAM sequence: GGG
ttagctttttttttttcggt

SEQ ID NO: 25001 - DNA, 20 bp, Artificial Sequence
  Description of Artificial Sequence: Synthetic oligonucleotide
  Target: SCNA; (-) strand; PAM type: NRG; PAM sequence: TGG
attagctttttttttttcgg

SEQ ID NO: 25002 - DNA, 20 bp, Artificial Sequence
  Description of Artificial Sequence: Synthetic oligonucleotide
  Target: SCNA; (-) strand; PAM type: NRG; PAM sequence: CGG
cccattagcttttttttttt

SEQ ID NO: 25003 - DNA, 20 bp, Artificial Sequence
  Description of Artificial Sequence: Synthetic oligonucleotide
  Target: SCNA; (-) strand; PAM type: NRG; PAM sequence: TAG
ttcccctaaattcatcccat

SEQ ID NO: 25004 - DNA, 20 bp, Artificial Sequence
  Description of Artificial Sequence: Synthetic oligonucleotide
  Target: SCNA; (-) strand; PAM type: NRG; PAM sequence: AAG
aatattatcttctaatatta

SEQ ID NO: 25005 - DNA, 20 bp, Artificial Sequence
  Description of Artificial Sequence: Synthetic oligonucleotide
  Target: SCNA; (-) strand; PAM type: NRG; PAM sequence: TAG
ggaaacaagaaattattaca

SEQ ID NO: 25006 - DNA, 20 bp, Artificial Sequence
  Description of Artificial Sequence: Synthetic oligonucleotide
  Target: SCNA; (-) strand; PAM type: NRG; PAM sequence: AAG
aagtcttaatgcagggaaac

SEQ ID NO: 25007 - DNA, 20 bp, Artificial Sequence
  Description of Artificial Sequence: Synthetic oligonucleotide
  Target: SCNA; (-) strand; PAM type: NRG; PAM sequence: GGG
ttgctacaagtcttaatgca

SEQ ID NO: 25008 - DNA, 20 bp, Artificial Sequence
  Description of Artificial Sequence: Synthetic oligonucleotide
  Target: SCNA; (-) strand; PAM type: NRG; PAM sequence: AGG
cttgctacaagtcttaatgc

SEQ ID NO: 25009 - DNA, 20 bp, Artificial Sequence
  Description of Artificial Sequence: Synthetic oligonucleotide
  Target: SCNA; (-) strand; PAM type: NRG; PAM sequence: CAG
tcttgctacaagtcttaatg

SEQ ID NO: 25010 - DNA, 20 bp, Artificial Sequence
  Description of Artificial Sequence: Synthetic oligonucleotide
  Target: SCNA; (-) strand; PAM type: NRG; PAM sequence: AAG
ttgttaattgttcttgctac

SEQ ID NO: 25011 - DNA, 20 bp, Artificial Sequence
  Description of Artificial Sequence: Synthetic oligonucleotide
  Target: SCNA; (-) strand; PAM type: NRG; PAM sequence: AAG
gtttattatgggtacatatt

SEQ ID NO: 25012 - DNA, 20 bp, Artificial Sequence
  Description of Artificial Sequence: Synthetic oligonucleotide
  Target: SCNA; (-) strand; PAM type: NRG; PAM sequence: GGG
tgatgtaaaatgtttattat

SEQ ID NO: 25013 - DNA, 20 bp, Artificial Sequence
  Description of Artificial Sequence: Synthetic oligonucleotide
  Target: SCNA; (-) strand; PAM type: NRG; PAM sequence: TGG
ctgatgtaaaatgtttatta

SEQ ID NO: 25014 - DNA, 20 bp, Artificial Sequence
  Description of Artificial Sequence: Synthetic oligonucleotide
  Target: SCNA; (-) strand; PAM type: NRG; PAM sequence: GAG
cttcaatggttaaagagagg

SEQ ID NO: 25015 - DNA, 20 bp, Artificial Sequence
  Description of Artificial Sequence: Synthetic oligonucleotide
  Target: SCNA; (-) strand; PAM type: NRG; PAM sequence: GGG
cacttcaatggttaaagaga

SEQ ID NO: 25016 - DNA, 20 bp, Artificial Sequence
  Description of Artificial Sequence: Synthetic oligonucleotide
  Target: SCNA; (-) strand; PAM type: NRG; PAM sequence: AGG
acacttcaatggttaaagag

SEQ ID NO: 25017 - DNA, 20 bp, Artificial Sequence
  Description of Artificial Sequence: Synthetic oligonucleotide
  Target: SCNA; (-) strand; PAM type: NRG; PAM sequence: GAG
tacacttcaatggttaaaga

SEQ ID NO: 25018 - DNA, 20 bp, Artificial Sequence
  Description of Artificial Sequence: Synthetic oligonucleotide
  Target: SCNA; (-) strand; PAM type: NRG; PAM sequence: GAG
attacacttcaatggttaaa

SEQ ID NO: 25019 - DNA, 20 bp, Artificial Sequence
  Description of Artificial Sequence: Synthetic oligonucleotide
  Target: SCNA; (-) strand; PAM type: NRG; PAM sequence: AAG
taattacacttcaatggtta

SEQ ID NO: 25020 - DNA, 20 bp, Artificial Sequence
  Description of Artificial Sequence: Synthetic oligonucleotide
  Target: SCNA; (-) strand; PAM type: NRG; PAM sequence: TGG
ataagataattacacttcaa

SEQ ID NO: 25021 - DNA, 20 bp, Artificial Sequence
  Description of Artificial Sequence: Synthetic oligonucleotide
  Target: SCNA; (-) strand; PAM type: NRG; PAM sequence: AAG
gtctaattatgagaagaaat

SEQ ID NO: 25022 - DNA, 20 bp, Artificial Sequence
  Description of Artificial Sequence: Synthetic oligonucleotide
  Target: SCNA; (-) strand; PAM type: NRG; PAM sequence: AAG
tgcttaagtctaattatgag

SEQ ID NO: 25023 - DNA, 20 bp, Artificial Sequence
  Description of Artificial Sequence: Synthetic oligonucleotide
  Target: SCNA; (-) strand; PAM type: NRG; PAM sequence: GAG
aagtgcttaagtctaattat

SEQ ID NO: 25024 - DNA, 20 bp, Artificial Sequence
  Description of Artificial Sequence: Synthetic oligonucleotide
  Target: SCNA; (-) strand; PAM type: NRG; PAM sequence: AAG
ttatttaatataaagtgctt

SEQ ID NO: 25025 - DNA, 20 bp, Artificial Sequence
  Description of Artificial Sequence: Synthetic oligonucleotide
  Target: SCNA; (-) strand; PAM type: NRG; PAM sequence: AAG
gaatagggttatttaatata

SEQ ID NO: 25026 - DNA, 20 bp, Artificial Sequence
  Description of Artificial Sequence: Synthetic oligonucleotide
  Target: SCNA; (-) strand; PAM type: NRG; PAM sequence: GGG
atgaattaactttttgaata

SEQ ID NO: 25027 - DNA, 20 bp, Artificial Sequence
  Description of Artificial Sequence: Synthetic oligonucleotide
  Target: SCNA; (-) strand; PAM type: NRG; PAM sequence: AGG
aatgaattaactttttgaat

SEQ ID NO: 25028 - DNA, 20 bp, Artificial Sequence
  Description of Artificial Sequence: Synthetic oligonucleotide
  Target: SCNA; (-) strand; PAM type: NRG; PAM sequence: TAG
aaatgaattaactttttgaa

SEQ ID NO: 25029 - DNA, 20 bp, Artificial Sequence
  Description of Artificial Sequence: Synthetic oligonucleotide
  Target: SCNA; (-) strand; PAM type: NRG; PAM sequence: CAG
taatcattcctctcccacat

SEQ ID NO: 25030 - DNA, 20 bp, Artificial Sequence
  Description of Artificial Sequence: Synthetic oligonucleotide
  Target: SCNA; (-) strand; PAM type: NRG; PAM sequence: CGG
agaaacacattgggataaat

SEQ ID NO: 25031 - DNA, 20 bp, Artificial Sequence
  Description of Artificial Sequence: Synthetic oligonucleotide
  Target: SCNA; (-) strand; PAM type: NRG; PAM sequence: GGG
atggctatgagaaacacatt

SEQ ID NO: 25032 - DNA, 20 bp, Artificial Sequence
  Description of Artificial Sequence: Synthetic oligonucleotide
  Target: SCNA; (-) strand; PAM type: NRG; PAM sequence: TGG
tatggctatgagaaacacat

SEQ ID NO: 25033 - DNA, 20 bp, Artificial Sequence
  Description of Artificial Sequence: Synthetic oligonucleotide
  Target: SCNA; (-) strand; PAM type: NRG; PAM sequence: GAG
gtcataactagtatggctat

SEQ ID NO: 25034 - DNA, 20 bp, Artificial Sequence
  Description of Artificial Sequence: Synthetic oligonucleotide
  Target: SCNA; (-) strand; PAM type: NRG; PAM sequence: TGG
aaatgctgtcataactagta

SEQ ID NO: 25035 - DNA, 20 bp, Artificial Sequence
  Description of Artificial Sequence: Synthetic oligonucleotide
  Target: SCNA; (-) strand; PAM type: NRG; PAM sequence: TAG
accaaaaatgctgtcataac

SEQ ID NO: 25036 - DNA, 20 bp, Artificial Sequence
  Description of Artificial Sequence: Synthetic oligonucleotide
  Target: SCNA; (-) strand; PAM type: NRG; PAM sequence: TAG
cccatggaccaccctggcag

SEQ ID NO: 25037 - DNA, 20 bp, Artificial Sequence
  Description of Artificial Sequence: Synthetic oligonucleotide
  Target: SCNA; (-) strand; PAM type: NRG; PAM sequence: CAG
gcacccatggaccaccctgg

SEQ ID NO: 25038 - DNA, 20 bp, Artificial Sequence
  Description of Artificial Sequence: Synthetic oligonucleotide
  Target: SCNA; (-) strand; PAM type: NRG; PAM sequence: TGG
attgcacccatggaccaccc

SEQ ID NO: 25039 - DNA, 20 bp, Artificial Sequence
  Description of Artificial Sequence: Synthetic oligonucleotide
  Target: SCNA; (-) strand; PAM type: NRG; PAM sequence: TGG
atttacagcgattgcaccca

SEQ ID NO: 25040 - DNA, 20 bp, Artificial Sequence
  Description of Artificial Sequence: Synthetic oligonucleotide
  Target: SCNA; (-) strand; PAM type: NRG; PAM sequence: CAG
ttcagcatgtgcaatattta

SEQ ID NO: 25041 - DNA, 20 bp, Artificial Sequence
  Description of Artificial Sequence: Synthetic oligonucleotide
  Target: SCNA; (-) strand; PAM type: NRG; PAM sequence: CAG
cagtaaggacatggtgattt

SEQ ID NO: 25042 - DNA, 20 bp, Artificial Sequence
  Description of Artificial Sequence: Synthetic oligonucleotide
  Target: SCNA; (-) strand; PAM type: NRG; PAM sequence: TGG
gttgctaggcagtaaggaca

SEQ ID NO: 25043 - DNA, 20 bp, Artificial Sequence
  Description of Artificial Sequence: Synthetic oligonucleotide
  Target: SCNA; (-) strand; PAM type: NRG; PAM sequence: AGG
ggaaatgttgctaggcagta

SEQ ID NO: 25044 - DNA, 20 bp, Artificial Sequence
  Description of Artificial Sequence: Synthetic oligonucleotide
  Target: SCNA; (-) strand; PAM type: NRG; PAM sequence: AAG
gggaaatgttgctaggcagt

SEQ ID NO: 25045 - DNA, 20 bp, Artificial Sequence
  Description of Artificial Sequence: Synthetic oligonucleotide
  Target: SCNA; (-) strand; PAM type: NRG; PAM sequence: CAG
ctatgggaaatgttgctagg

SEQ ID NO: 25046 - DNA, 20 bp, Artificial Sequence
  Description of Artificial Sequence: Synthetic oligonucleotide
  Target: SCNA; (-) strand; PAM type: NRG; PAM sequence: AGG
aaactatgggaaatgttgct

SEQ ID NO: 25047 - DNA, 20 bp, Artificial Sequence
  Description of Artificial Sequence: Synthetic oligonucleotide
  Target: SCNA; (-) strand; PAM type: NRG; PAM sequence: TAG
aaaactatgggaaatgttgc

SEQ ID NO: 25048 - DNA, 20 bp, Artificial Sequence
  Description of Artificial Sequence: Synthetic oligonucleotide
  Target: SCNA; (-) strand; PAM type: NRG; PAM sequence: GGG
agtgttccacagaaaactat

SEQ ID NO: 25049 - DNA, 20 bp, Artificial Sequence
  Description of Artificial Sequence: Synthetic oligonucleotide
  Target: SCNA; (-) strand; PAM type: NRG; PAM sequence: TGG
tagtgttccacagaaaacta

SEQ ID NO: 25050 - DNA, 20 bp, Artificial Sequence
  Description of Artificial Sequence: Synthetic oligonucleotide
  Target: SCNA; (-) strand; PAM type: NRG; PAM sequence: CAG
tgaatgaaactagtgttcca

SEQ ID NO: 25051 - DNA, 20 bp, Artificial Sequence
  Description of Artificial Sequence: Synthetic oligonucleotide
  Target: SCNA; (-) strand; PAM type: NRG; PAM sequence: TAG
ttactagggttgaatgaaac

SEQ ID NO: 25052 - DNA, 20 bp, Artificial Sequence
  Description of Artificial Sequence: Synthetic oligonucleotide
  Target: SCNA; (-) strand; PAM type: NRG; PAM sequence: GGG
actttcttcattagttacta

SEQ ID NO: 25053 - DNA, 20 bp, Artificial Sequence
  Description of Artificial Sequence: Synthetic oligonucleotide
  Target: SCNA; (-) strand; PAM type: NRG; PAM sequence: AGG
aactttcttcattagttact

SEQ ID NO: 25054 - DNA, 20 bp, Artificial Sequence
  Description of Artificial Sequence: Synthetic oligonucleotide
  Target: SCNA; (-) strand; PAM type: NRG; PAM sequence: TAG
aaactttcttcattagttac

SEQ ID NO: 25055 - DNA, 20 bp, Artificial Sequence
  Description of Artificial Sequence: Synthetic oligonucleotide
  Target: SCNA; (-) strand; PAM type: NRG; PAM sequence: TAG
ttattgaaaactttcttcat

SEQ ID NO: 25056 - DNA, 20 bp, Artificial Sequence
  Description of Artificial Sequence: Synthetic oligonucleotide
  Target: SCNA; (-) strand; PAM type: NRG; PAM sequence: GGG
gcattacatagttaaaatca

SEQ ID NO: 25057 - DNA, 20 bp, Artificial Sequence
  Description of Artificial Sequence: Synthetic oligonucleotide
  Target: SCNA; (-) strand; PAM type: NRG; PAM sequence: AGG
tgcattacatagttaaaatc

SEQ ID NO: 25058 - DNA, 20 bp, Artificial Sequence
  Description of Artificial Sequence: Synthetic oligonucleotide
  Target: SCNA; (-) strand; PAM type: NRG; PAM sequence: CAG
ttgcattacatagttaaaat

SEQ ID NO: 25059 - DNA, 20 bp, Artificial Sequence
  Description of Artificial Sequence: Synthetic oligonucleotide
  Target: SCNA; (-) strand; PAM type: NRG; PAM sequence: TAG
gtaaagaaatttgcattaca

SEQ ID NO: 25060 - DNA, 20 bp, Artificial Sequence
  Description of Artificial Sequence: Synthetic oligonucleotide
  Target: SCNA; (-) strand; PAM type: NRG; PAM sequence: AAG
atctgagatgtcctacagta

SEQ ID NO: 25061 - DNA, 20 bp, Artificial Sequence
  Description of Artificial Sequence: Synthetic oligonucleotide
  Target: SCNA; (-) strand; PAM type: NRG; PAM sequence: CAG
aaggaatctgagatgtccta

SEQ ID NO: 25062 - DNA, 20 bp, Artificial Sequence
  Description of Artificial Sequence: Synthetic oligonucleotide
  Target: SCNA; (-) strand; PAM type: NRG; PAM sequence: GAG
tttagcgtattaaggaatct

SEQ ID NO: 25063 - DNA, 20 bp, Artificial Sequence
  Description of Artificial Sequence: Synthetic oligonucleotide
  Target: SCNA; (-) strand; PAM type: NRG; PAM sequence: AGG
attttctctttagcgtatta

SEQ ID NO: 25064 - DNA, 20 bp, Artificial Sequence
  Description of Artificial Sequence: Synthetic oligonucleotide
  Target: SCNA; (-) strand; PAM type: NRG; PAM sequence: AAG
tattttctctttagcgtatt

SEQ ID NO: 25065 - DNA, 20 bp, Artificial Sequence
  Description of Artificial Sequence: Synthetic oligonucleotide
  Target: SCNA; (-) strand; PAM type: NRG; PAM sequence: TAG
tgtatactttattttctctt

SEQ ID NO: 25066 - DNA, 20 bp, Artificial Sequence
  Description of Artificial Sequence: Synthetic oligonucleotide
  Target: SCNA; (-) strand; PAM type: NRG; PAM sequence: GAG
ctaacattgtacaatgttgg

SEQ ID NO: 25067 - DNA, 20 bp, Artificial Sequence
  Description of Artificial Sequence: Synthetic oligonucleotide
  Target: SCNA; (-) strand; PAM type: NRG; PAM sequence: GGG
ttctaacattgtacaatgtt

SEQ ID NO: 25068 - DNA, 20 bp, Artificial Sequence
  Description of Artificial Sequence: Synthetic oligonucleotide
  Target: SCNA; (-) strand; PAM type: NRG; PAM sequence: TGG
tttctaacattgtacaatgt

SEQ ID NO: 25069 - DNA, 20 bp, Artificial Sequence
  Description of Artificial Sequence: Synthetic oligonucleotide
  Target: SCNA; (-) strand; PAM type: NRG; PAM sequence: AAG
ggacagtggctcacaatctt

SEQ ID NO: 25070 - DNA, 20 bp, Artificial Sequence
  Description of Artificial Sequence: Synthetic oligonucleotide
  Target: SCNA; (-) strand; PAM type: NRG; PAM sequence: TGG
aaatgttttctgaaggacag

SEQ ID NO: 25071 - DNA, 20 bp, Artificial Sequence
  Description of Artificial Sequence: Synthetic oligonucleotide
  Target: SCNA; (-) strand; PAM type: NRG; PAM sequence: CAG
ataaaatgttttctgaagga

SEQ ID NO: 25072 - DNA, 20 bp, Artificial Sequence
  Description of Artificial Sequence: Synthetic oligonucleotide
  Target: SCNA; (-) strand; PAM type: NRG; PAM sequence: AGG
ttttataaaatgttttctga

SEQ ID NO: 25073 - DNA, 20 bp, Artificial Sequence
  Description of Artificial Sequence: Synthetic oligonucleotide
  Target: SCNA; (-) strand; PAM type: NRG; PAM sequence: AAG
attttataaaatgttttctg

SEQ ID NO: 25074 - DNA, 20 bp, Artificial Sequence
  Description of Artificial Sequence: Synthetic oligonucleotide
  Target: SCNA; (-) strand; PAM type: NRG; PAM sequence: TAG
gagactgaagtttgtacaat

SEQ ID NO: 25075 - DNA, 20 bp, Artificial Sequence
  Description of Artificial Sequence: Synthetic oligonucleotide
  Target: SCNA; (-) strand; PAM type: NRG; PAM sequence: AAG
tgagagagagagagagactg

SEQ ID NO: 25076 - DNA, 20 bp, Artificial Sequence
  Description of Artificial Sequence: Synthetic oligonucleotide
  Target: SCNA; (-) strand; PAM type: NRG; PAM sequence: GAG
gtgtgtgtgagagagagaga

SEQ ID NO: 25077 - DNA, 20 bp, Artificial Sequence
  Description of Artificial Sequence: Synthetic oligonucleotide
  Target: SCNA; (-) strand; PAM type: NRG; PAM sequence: GAG
gcgtgtgtgtgagagagaga

SEQ ID NO: 25078 - DNA, 20 bp, Artificial Sequence
  Description of Artificial Sequence: Synthetic oligonucleotide
  Target: SCNA; (-) strand; PAM type: NRG; PAM sequence: GAG
gtgcgtgtgtgtgagagaga

SEQ ID NO: 25079 - DNA, 20 bp, Artificial Sequence
  Description of Artificial Sequence: Synthetic oligonucleotide
  Target: SCNA; (-) strand; PAM type: NRG; PAM sequence: GAG
gtgtgcgtgtgtgtgagaga

SEQ ID NO: 25080 - DNA, 20 bp, Artificial Sequence
  Description of Artificial Sequence: Synthetic oligonucleotide
  Target: SCNA; (-) strand; PAM type: NRG; PAM sequence: GAG
gtgtgtgcgtgtgtgtgaga

SEQ ID NO: 25081 - DNA, 20 bp, Artificial Sequence
  Description of Artificial Sequence: Synthetic oligonucleotide
  Target: SCNA; (-) strand; PAM type: NRG; PAM sequence: GAG
gtgtgtgtgcgtgtgtgtga

SEQ ID NO: 25082 - DNA, 20 bp, Artificial Sequence
  Description of Artificial Sequence: Synthetic oligonucleotide
  Target: SCNA; (-) strand; PAM type: NRG; PAM sequence: GAG
gtgtgtgtgtgcgtgtgtgt

SEQ ID NO: 25083 - DNA, 20 bp, Artificial Sequence
  Description of Artificial Sequence: Synthetic oligonucleotide
  Target: SCNA; (-) strand; PAM type: NRG; PAM sequence: CAG
tgcatttttttagtcttttc

SEQ ID NO: 25084 - DNA, 20 bp, Artificial Sequence
  Description of Artificial Sequence: Synthetic oligonucleotide
  Target: SCNA; (-) strand; PAM type: NRG; PAM sequence: TAG
ggagatgggctgcatttttt

SEQ ID NO: 25085 - DNA, 20 bp, Artificial Sequence
  Description of Artificial Sequence: Synthetic oligonucleotide
  Target: SCNA; (-) strand; PAM type: NRG; PAM sequence: GGG
ctaatggagactgtggagat

SEQ ID NO: 25086 - DNA, 20 bp, Artificial Sequence
  Description of Artificial Sequence: Synthetic oligonucleotide
  Target: SCNA; (-) strand; PAM type: NRG; PAM sequence: TGG
tctaatggagactgtggaga

SEQ ID NO: 25087 - DNA, 20 bp, Artificial Sequence
  Description of Artificial Sequence: Synthetic oligonucleotide
  Target: SCNA; (-) strand; PAM type: NRG; PAM sequence: GAG
atgatctaatggagactgtg

SEQ ID NO: 25088 - DNA, 20 bp, Artificial Sequence
  Description of Artificial Sequence: Synthetic oligonucleotide
  Target: SCNA; (-) strand; PAM type: NRG; PAM sequence: TGG
tgatgatctaatggagactg

SEQ ID NO: 25089 - DNA, 20 bp, Artificial Sequence
  Description of Artificial Sequence: Synthetic oligonucleotide
  Target: SCNA; (-) strand; PAM type: NRG; PAM sequence: GAG
tgtcacctgatgatctaatg

SEQ ID NO: 25090 - DNA, 20 bp, Artificial Sequence
  Description of Artificial Sequence: Synthetic oligonucleotide
  Target: SCNA; (-) strand; PAM type: NRG; PAM sequence: TGG
actgtcacctgatgatctaa

SEQ ID NO: 25091 - DNA, 20 bp, Artificial Sequence
  Description of Artificial Sequence: Synthetic oligonucleotide
  Target: SCNA; (-) strand; PAM type: NRG; PAM sequence: AAG
ggagtcagtggtaaaaatta

SEQ ID NO: 25092 - DNA, 20 bp, Artificial Sequence
  Description of Artificial Sequence: Synthetic oligonucleotide
  Target: SCNA; (-) strand; PAM type: NRG; PAM sequence: TGG
gtggcaagttctggagtcag

SEQ ID NO: 25093 - DNA, 20 bp, Artificial Sequence
  Description of Artificial Sequence: Synthetic oligonucleotide
  Target: SCNA; (-) strand; PAM type: NRG; PAM sequence: CAG
catgtggcaagttctggagt

SEQ ID NO: 25094 - DNA, 20 bp, Artificial Sequence
  Description of Artificial Sequence: Synthetic oligonucleotide
  Target: SCNA; (-) strand; PAM type: NRG; PAM sequence: GAG
caagcatgtggcaagttctg

SEQ ID NO: 25095 - DNA, 20 bp, Artificial Sequence
  Description of Artificial Sequence: Synthetic oligonucleotide
  Target: SCNA; (-) strand; PAM type: NRG; PAM sequence: TGG
gacaagcatgtggcaagttc

SEQ ID NO: 25096 - DNA, 20 bp, Artificial Sequence
  Description of Artificial Sequence: Synthetic oligonucleotide
  Target: SCNA; (-) strand; PAM type: NRG; PAM sequence: AAG
aaagcagacaagcatgtggc

SEQ ID NO: 25097 - DNA, 20 bp, Artificial Sequence
  Description of Artificial Sequence: Synthetic oligonucleotide
  Target: SCNA; (-) strand; PAM type: NRG; PAM sequence: TGG
ttagaaagcagacaagcatg

SEQ ID NO: 25098 - DNA, 20 bp, Artificial Sequence
  Description of Artificial Sequence: Synthetic oligonucleotide
  Target: SCNA; (-) strand; PAM type: NRG; PAM sequence: AAG
atgaggtttagaaagcagac

SEQ ID NO: 25099 - DNA, 20 bp, Artificial Sequence
  Description of Artificial Sequence: Synthetic oligonucleotide
  Target: SCNA; (-) strand; PAM type: NRG; PAM sequence: CAG
aacccatgaggtttagaaag

SEQ ID NO: 25100 - DNA, 20 bp, Artificial Sequence
  Description of Artificial Sequence: Synthetic oligonucleotide
  Target: SCNA; (-) strand; PAM type: NRG; PAM sequence: AAG
aagaacccatgaggtttaga

SEQ ID NO: 25101 - DNA, 20 bp, Artificial Sequence
  Description of Artificial Sequence: Synthetic oligonucleotide
  Target: SCNA; (-) strand; PAM type: NRG; PAM sequence: TAG
gaggaagaacccatgaggtt

SEQ ID NO: 25102 - DNA, 20 bp, Artificial Sequence
  Description of Artificial Sequence: Synthetic oligonucleotide
  Target: SCNA; (-) strand; PAM type: NRG; PAM sequence: AGG
tagttgaggaagaacccatg

SEQ ID NO: 25103 - DNA, 20 bp, Artificial Sequence
  Description of Artificial Sequence: Synthetic oligonucleotide
  Target: SCNA; (-) strand; PAM type: NRG; PAM sequence: GAG
gtagttgaggaagaacccat

SEQ ID NO: 25104 - DNA, 20 bp, Artificial Sequence
  Description of Artificial Sequence: Synthetic oligonucleotide
  Target: SCNA; (-) strand; PAM type: NRG; PAM sequence: AAG
gttccatttagtagttgagg

SEQ ID NO: 25105 - DNA, 20 bp, Artificial Sequence
  Description of Artificial Sequence: Synthetic oligonucleotide
  Target: SCNA; (-) strand; PAM type: NRG; PAM sequence: AGG
ggtgttccatttagtagttg

SEQ ID NO: 25106 - DNA, 20 bp, Artificial Sequence
  Description of Artificial Sequence: Synthetic oligonucleotide
  Target: SCNA; (-) strand; PAM type: NRG; PAM sequence: GAG
tggtgttccatttagtagtt

SEQ ID NO: 25107 - DNA, 20 bp, Artificial Sequence
  Description of Artificial Sequence: Synthetic oligonucleotide
  Target: SCNA; (-) strand; PAM type: NRG; PAM sequence: TAG
atgaatggtgttccatttag

SEQ ID NO: 25108 - DNA, 20 bp, Artificial Sequence
  Description of Artificial Sequence: Synthetic oligonucleotide
  Target: SCNA; (-) strand; PAM type: NRG; PAM sequence: TAG
tagatgaatggtgttccatt

SEQ ID NO: 25109 - DNA, 20 bp, Artificial Sequence
  Description of Artificial Sequence: Synthetic oligonucleotide
  Target: SCNA; (-) strand; PAM type: NRG; PAM sequence: TGG
agacggtcaacctagatgaa

SEQ ID NO: 25110 - DNA, 20 bp, Artificial Sequence
  Description of Artificial Sequence: Synthetic oligonucleotide
  Target: SCNA; (-) strand; PAM type: NRG; PAM sequence: TAG
ctatctgaagacggtcaacc

SEQ ID NO: 25111 - DNA, 20 bp, Artificial Sequence
  Description of Artificial Sequence: Synthetic oligonucleotide
  Target: SCNA; (-) strand; PAM type: NRG; PAM sequence: CGG
gagactccactatctgaaga

SEQ ID NO: 25112 - DNA, 20 bp, Artificial Sequence
  Description of Artificial Sequence: Synthetic oligonucleotide
  Target: SCNA; (-) strand; PAM type: NRG; PAM sequence: AAG
ggtggagactccactatctg

SEQ ID NO: 25113 - DNA, 20 bp, Artificial Sequence
  Description of Artificial Sequence: Synthetic oligonucleotide
  Target: SCNA; (-) strand; PAM type: NRG; PAM sequence: GAG
aactagataacagacaggtg

SEQ ID NO: 25114 - DNA, 20 bp, Artificial Sequence
  Description of Artificial Sequence: Synthetic oligonucleotide
  Target: SCNA; (-) strand; PAM type: NRG; PAM sequence: TGG
agaactagataacagacagg

SEQ ID NO: 25115 - DNA, 20 bp, Artificial Sequence
  Description of Artificial Sequence: Synthetic oligonucleotide
  Target: SCNA; (-) strand; PAM type: NRG; PAM sequence: AGG
ataagaactagataacagac

SEQ ID NO: 25116 - DNA, 20 bp, Artificial Sequence
  Description of Artificial Sequence: Synthetic oligonucleotide
  Target: SCNA; (-) strand; PAM type: NRG; PAM sequence: CAG
aataagaactagataacaga

SEQ ID NO: 25117 - DNA, 20 bp, Artificial Sequence
  Description of Artificial Sequence: Synthetic oligonucleotide
  Target: SCNA; (-) strand; PAM type: NRG; PAM sequence: CAG
ttataataagaactagataa

SEQ ID NO: 25118 - DNA, 20 bp, Artificial Sequence
  Description of Artificial Sequence: Synthetic oligonucleotide
  Target: SCNA; (-) strand; PAM type: NRG; PAM sequence: TAG
agcatgattataataagaac

SEQ ID NO: 25119 - DNA, 20 bp, Artificial Sequence
  Description of Artificial Sequence: Synthetic oligonucleotide
  Target: SCNA; (-) strand; PAM type: NRG; PAM sequence: AAG
ttgtgaagcatgattataat

SEQ ID NO: 25120 - DNA, 20 bp, Artificial Sequence
  Description of Artificial Sequence: Synthetic oligonucleotide
  Target: SCNA; (-) strand; PAM type: NRG; PAM sequence: AAG
cctataaatatgatattgtg

SEQ ID NO: 25121 - DNA, 20 bp, Artificial Sequence
  Description of Artificial Sequence: Synthetic oligonucleotide
  Target: SCNA; (-) strand; PAM type: NRG; PAM sequence: GGG
gtggactatgatgccttcta

SEQ ID NO: 25122 - DNA, 20 bp, Artificial Sequence
  Description of Artificial Sequence: Synthetic oligonucleotide
  Target: SCNA; (-) strand; PAM type: NRG; PAM sequence: AGG
agtggactatgatgccttct

SEQ ID NO: 25123 - DNA, 20 bp, Artificial Sequence
  Description of Artificial Sequence: Synthetic oligonucleotide
  Target: SCNA; (-) strand; PAM type: NRG; PAM sequence: TAG
aagtggactatgatgccttc

SEQ ID NO: 25124 - DNA, 20 bp, Artificial Sequence
  Description of Artificial Sequence: Synthetic oligonucleotide
  Target: SCNA; (-) strand; PAM type: NRG; PAM sequence: TGG
cagagaagtagttaagtaag

SEQ ID NO: 25125 - DNA, 20 bp, Artificial Sequence
  Description of Artificial Sequence: Synthetic oligonucleotide
  Target: SCNA; (-) strand; PAM type: NRG; PAM sequence: AAG
caacagagaagtagttaagt

SEQ ID NO: 25126 - DNA, 20 bp, Artificial Sequence
  Description of Artificial Sequence: Synthetic oligonucleotide
  Target: SCNA; (-) strand; PAM type: NRG; PAM sequence: AAG
aatccaacagagaagtagtt

SEQ ID NO: 25127 - DNA, 20 bp, Artificial Sequence
  Description of Artificial Sequence: Synthetic oligonucleotide
  Target: SCNA; (-) strand; PAM type: NRG; PAM sequence: TAG
gttgcaatccaacagagaag

SEQ ID NO: 25128 - DNA, 20 bp, Artificial Sequence
  Description of Artificial Sequence: Synthetic oligonucleotide
  Target: SCNA; (-) strand; PAM type: NRG; PAM sequence: AAG
tctgttgcaatccaacagag

SEQ ID NO: 25129 - DNA, 20 bp, Artificial Sequence
  Description of Artificial Sequence: Synthetic oligonucleotide
  Target: SCNA; (-) strand; PAM type: NRG; PAM sequence: GAG
ggctctgttgcaatccaaca

SEQ ID NO: 25130 - DNA, 20 bp, Artificial Sequence
  Description of Artificial Sequence: Synthetic oligonucleotide
  Target: SCNA; (-) strand; PAM type: NRG; PAM sequence: CAG
tgggctctgttgcaatccaa

SEQ ID NO: 25131 - DNA, 20 bp, Artificial Sequence
  Description of Artificial Sequence: Synthetic oligonucleotide
  Target: SCNA; (-) strand; PAM type: NRG; PAM sequence: GGG
gttaattgtgcacctttaat

SEQ ID NO: 25132 - DNA, 20 bp, Artificial Sequence
  Description of Artificial Sequence: Synthetic oligonucleotide
  Target: SCNA; (-) strand; PAM type: NRG; PAM sequence: TGG
agttaattgtgcacctttaa

SEQ ID NO: 25133 - DNA, 20 bp, Artificial Sequence
  Description of Artificial Sequence: Synthetic oligonucleotide
  Target: SCNA; (-) strand; PAM type: NRG; PAM sequence: AAG
tttgaaactagttctgttag

SEQ ID NO: 25134 - DNA, 20 bp, Artificial Sequence
  Description of Artificial Sequence: Synthetic oligonucleotide
  Target: SCNA; (-) strand; PAM type: NRG; PAM sequence: TAG
tcctttgaaactagttctgt

SEQ ID NO: 25135 - DNA, 20 bp, Artificial Sequence
  Description of Artificial Sequence: Synthetic oligonucleotide
  Target: SCNA; (-) strand; PAM type: NRG; PAM sequence: TAG
aaaacagactcctttgaaac

SEQ ID NO: 25136 - DNA, 20 bp, Artificial Sequence
  Description of Artificial Sequence: Synthetic oligonucleotide
  Target: SCNA; (-) strand; PAM type: NRG; PAM sequence: CAG
atcagagtgtaaaaataaaa

SEQ ID NO: 25137 - DNA, 20 bp, Artificial Sequence
  Description of Artificial Sequence: Synthetic oligonucleotide
  Target: SCNA; (-) strand; PAM type: NRG; PAM sequence: GAG
tacttttgatttaaaaatca

SEQ ID NO: 25138 - DNA, 20 bp, Artificial Sequence
  Description of Artificial Sequence: Synthetic oligonucleotide
  Target: SCNA; (-) strand; PAM type: NRG; PAM sequence: CAG
aatacttttgatttaaaaat

SEQ ID NO: 25139 - DNA, 20 bp, Artificial Sequence
  Description of Artificial Sequence: Synthetic oligonucleotide
  Target: SCNA; (-) strand; PAM type: NRG; PAM sequence: GAG
caacatttttacaactagtg

SEQ ID NO: 25140 - DNA, 20 bp, Artificial Sequence
  Description of Artificial Sequence: Synthetic oligonucleotide
  Target: SCNA; (-) strand; PAM type: NRG; PAM sequence: TGG
tgcaacatttttacaactag

SEQ ID NO: 25141 - DNA, 20 bp, Artificial Sequence
  Description of Artificial Sequence: Synthetic oligonucleotide
  Target: SCNA; (-) strand; PAM type: NRG; PAM sequence: TAG
ttgtgcaacatttttacaac

SEQ ID NO: 25142 - DNA, 20 bp, Artificial Sequence
  Description of Artificial Sequence: Synthetic oligonucleotide
  Target: SCNA; (-) strand; PAM type: NRG; PAM sequence: TAG
aagtgttacttatagtttta

SEQ ID NO: 25143 - DNA, 20 bp, Artificial Sequence
  Description of Artificial Sequence: Synthetic oligonucleotide
  Target: SCNA; (-) strand; PAM type: NRG; PAM sequence: TAG
tattttataagtgttactta

SEQ ID NO: 25144 - DNA, 20 bp, Artificial Sequence
  Description of Artificial Sequence: Synthetic oligonucleotide
  Target: SCNA; (-) strand; PAM type: NRG; PAM sequence: AAG
gcaaacaatatgtattttat

SEQ ID NO: 25145 - DNA, 20 bp, Artificial Sequence
  Description of Artificial Sequence: Synthetic oligonucleotide
  Target: SCNA; (-) strand; PAM type: NRG; PAM sequence: AAG
acaaaacatctggaaaacaa

SEQ ID NO: 25146 - DNA, 20 bp, Artificial Sequence
  Description of Artificial Sequence: Synthetic oligonucleotide
  Target: SCNA; (-) strand; PAM type: NRG; PAM sequence: TGG
attaatgtacacaaaacatc

SEQ ID NO: 25147 - DNA, 20 bp, Artificial Sequence
  Description of Artificial Sequence: Synthetic oligonucleotide
  Target: SCNA; (-) strand; PAM type: NRG; PAM sequence: CAG
tcctcatctataaaataatt

SEQ ID NO: 25148 - DNA, 20 bp, Artificial Sequence
  Description of Artificial Sequence: Synthetic oligonucleotide
  Target: SCNA; (-) strand; PAM type: NRG; PAM sequence: TAG
ttcttcacctctgtgtgatt

SEQ ID NO: 25149 - DNA, 20 bp, Artificial Sequence
  Description of Artificial Sequence: Synthetic oligonucleotide
  Target: SCNA; (-) strand; PAM type: NRG; PAM sequence: AAG
accagctgtgtgttttttgc

SEQ ID NO: 25150 - DNA, 20 bp, Artificial Sequence
  Description of Artificial Sequence: Synthetic oligonucleotide
  Target: SCNA; (-) strand; PAM type: NRG; PAM sequence: CAG
acttcctgcttactccttac

SEQ ID NO: 25151 - DNA, 20 bp, Artificial Sequence
  Description of Artificial Sequence: Synthetic oligonucleotide
  Target: SCNA; (-) strand; PAM type: NRG; PAM sequence: TGG
acacaggagtcagatcttct

SEQ ID NO: 25152 - DNA, 20 bp, Artificial Sequence
  Description of Artificial Sequence: Synthetic oligonucleotide
  Target: SCNA; (-) strand; PAM type: NRG; PAM sequence: CAG
atgactaaaaacacaggagt

SEQ ID NO: 25153 - DNA, 20 bp, Artificial Sequence
  Description of Artificial Sequence: Synthetic oligonucleotide
  Target: SCNA; (-) strand; PAM type: NRG; PAM sequence: GAG
ggatatgactaaaaacacag

SEQ ID NO: 25154 - DNA, 20 bp, Artificial Sequence
  Description of Artificial Sequence: Synthetic oligonucleotide
  Target: SCNA; (-) strand; PAM type: NRG; PAM sequence: AGG
gtggatatgactaaaaacac

SEQ ID NO: 25155 - DNA, 20 bp, Artificial Sequence
  Description of Artificial Sequence: Synthetic oligonucleotide
  Target: SCNA; (-) strand; PAM type: NRG; PAM sequence: CAG
tgtggatatgactaaaaaca

SEQ ID NO: 25156 - DNA, 20 bp, Artificial Sequence
  Description of Artificial Sequence: Synthetic oligonucleotide
  Target: SCNA; (-) strand; PAM type: NRG; PAM sequence: TGG
ggaatcttaatacagtgttg

SEQ ID NO: 25157 - DNA, 20 bp, Artificial Sequence
  Description of Artificial Sequence: Synthetic oligonucleotide
  Target: SCNA; (-) strand; PAM type: NRG; PAM sequence: CAG
atgatatgggaatcttaata

SEQ ID NO: 25158 - DNA, 20 bp, Artificial Sequence
  Description of Artificial Sequence: Synthetic oligonucleotide
  Target: SCNA; (-) strand; PAM type: NRG; PAM sequence: GGG
ggaaatgaggacaatgatat

SEQ ID NO: 25159 - DNA, 20 bp, Artificial Sequence
  Description of Artificial Sequence: Synthetic oligonucleotide
  Target: SCNA; (-) strand; PAM type: NRG; PAM sequence: TGG
tggaaatgaggacaatgata

SEQ ID NO: 25160 - DNA, 20 bp, Artificial Sequence
  Description of Artificial Sequence: Synthetic oligonucleotide
  Target: SCNA; (-) strand; PAM type: NRG; PAM sequence: AGG
tgacttctaaaatggaaatg

SEQ ID NO: 25161 - DNA, 20 bp, Artificial Sequence
  Description of Artificial Sequence: Synthetic oligonucleotide
  Target: SCNA; (-) strand; PAM type: NRG; PAM sequence: GAG
ctgacttctaaaatggaaat

SEQ ID NO: 25162 - DNA, 20 bp, Artificial Sequence
  Description of Artificial Sequence: Synthetic oligonucleotide
  Target: SCNA; (-) strand; PAM type: NRG; PAM sequence: TGG
cctatcactgacttctaaaa

SEQ ID NO: 25163 - DNA, 20 bp, Artificial Sequence
  Description of Artificial Sequence: Synthetic oligonucleotide
  Target: SCNA; (-) strand; PAM type: NRG; PAM sequence: TAG
tcggaaagcattaaacacaa

SEQ ID NO: 25164 - DNA, 20 bp, Artificial Sequence
  Description of Artificial Sequence: Synthetic oligonucleotide
  Target: SCNA; (-) strand; PAM type: NRG; PAM sequence: AAG
atataatttatataatcgga

SEQ ID NO: 25165 - DNA, 20 bp, Artificial Sequence
  Description of Artificial Sequence: Synthetic oligonucleotide
  Target: SCNA; (-) strand; PAM type: NRG; PAM sequence: CGG
agaaatataatttatataat

SEQ ID NO: 25166 - DNA, 20 bp, Artificial Sequence
  Description of Artificial Sequence: Synthetic oligonucleotide
  Target: SCNA; (-) strand; PAM type: NRG; PAM sequence: CAG
ggtgaagcaaaagatataat

SEQ ID NO: 25167 - DNA, 20 bp, Artificial Sequence
  Description of Artificial Sequence: Synthetic oligonucleotide
  Target: SCNA; (-) strand; PAM type: NRG; PAM sequence: AAG
tggcagatgtggtgaagcaa

SEQ ID NO: 25168 - DNA, 20 bp, Artificial Sequence
  Description of Artificial Sequence: Synthetic oligonucleotide
  Target: SCNA; (-) strand; PAM type: NRG; PAM sequence: AAG
gtttcctggcagatgtggtg

SEQ ID NO: 25169 - DNA, 20 bp, Artificial Sequence
  Description of Artificial Sequence: Synthetic oligonucleotide
  Target: SCNA; (-) strand; PAM type: NRG; PAM sequence: TGG
tccacgtttcctggcagatg

SEQ ID NO: 25170 - DNA, 20 bp, Artificial Sequence
  Description of Artificial Sequence: Synthetic oligonucleotide
  Target: SCNA; (-) strand; PAM type: NRG; PAM sequence: CAG
aagtactccacgtttcctgg

SEQ ID NO: 25171 - DNA, 20 bp, Artificial Sequence
  Description of Artificial Sequence: Synthetic oligonucleotide
  Target: SCNA; (-) strand; PAM type: NRG; PAM sequence: TGG
tgtaagtactccacgtttcc

SEQ ID NO: 25172 - DNA, 20 bp, Artificial Sequence
  Description of Artificial Sequence: Synthetic oligonucleotide
  Target: SCNA; (-) strand; PAM type: NRG; PAM sequence: AAG
gtaattaagttttctgttgt

SEQ ID NO: 25173 - DNA, 20 bp, Artificial Sequence
  Description of Artificial Sequence: Synthetic oligonucleotide
  Target: SCNA; (-) strand; PAM type: NRG; PAM sequence: AAG
cccacagacttgctgtaatt

SEQ ID NO: 25174 - DNA, 20 bp, Artificial Sequence
  Description of Artificial Sequence: Synthetic oligonucleotide
  Target: SCNA; (-) strand; PAM type: NRG; PAM sequence: CAG
tttaacaaattaaaagccca

SEQ ID NO: 25175 - DNA, 20 bp, Artificial Sequence
  Description of Artificial Sequence: Synthetic oligonucleotide
  Target: SCNA; (-) strand; PAM type: NRG; PAM sequence: AAG
accaaaatttaacaaattaa

SEQ ID NO: 25176 - DNA, 20 bp, Artificial Sequence
  Description of Artificial Sequence: Synthetic oligonucleotide
  Target: SCNA; (-) strand; PAM type: NRG; PAM sequence: GAG
cagaaatagagaaatcaaag

SEQ ID NO: 25177 - DNA, 20 bp, Artificial Sequence
  Description of Artificial Sequence: Synthetic oligonucleotide
  Target: SCNA; (-) strand; PAM type: NRG; PAM sequence: AGG
gccagaaatagagaaatcaa

SEQ ID NO: 25178 - DNA, 20 bp, Artificial Sequence
  Description of Artificial Sequence: Synthetic oligonucleotide
  Target: SCNA; (-) strand; PAM type: NRG; PAM sequence: AAG
tgccagaaatagagaaatca

SEQ ID NO: 25179 - DNA, 20 bp, Artificial Sequence
  Description of Artificial Sequence: Synthetic oligonucleotide
  Target: SCNA; (-) strand; PAM type: NRG; PAM sequence: GAG
ggatgagagtgccagaaata

SEQ ID NO: 25180 - DNA, 20 bp, Artificial Sequence
  Description of Artificial Sequence: Synthetic oligonucleotide
  Target: SCNA; (-) strand; PAM type: NRG; PAM sequence: TAG
gaggatgagagtgccagaaa

SEQ ID NO: 25181 - DNA, 20 bp, Artificial Sequence
  Description of Artificial Sequence: Synthetic oligonucleotide
  Target: SCNA; (-) strand; PAM type: NRG; PAM sequence: CAG
gaagatgaggatgagagtgc

SEQ ID NO: 25182 - DNA, 20 bp, Artificial Sequence
  Description of Artificial Sequence: Synthetic oligonucleotide
  Target: SCNA; (-) strand; PAM type: NRG; PAM sequence: GAG
gttgaggaagatgaggatga

SEQ ID NO: 25183 - DNA, 20 bp, Artificial Sequence
  Description of Artificial Sequence: Synthetic oligonucleotide
  Target: SCNA; (-) strand; PAM type: NRG; PAM sequence: GAG
atgttgaggaagatgaggat

SEQ ID NO: 25184 - DNA, 20 bp, Artificial Sequence
  Description of Artificial Sequence: Synthetic oligonucleotide
  Target: SCNA; (-) strand; PAM type: NRG; PAM sequence: AGG
atcagatgttgaggaagatg

SEQ ID NO: 25185 - DNA, 20 bp, Artificial Sequence
  Description of Artificial Sequence: Synthetic oligonucleotide
  Target: SCNA; (-) strand; PAM type: NRG; PAM sequence: GAG
catcagatgttgaggaagat

SEQ ID NO: 25186 - DNA, 20 bp, Artificial Sequence
  Description of Artificial Sequence: Synthetic oligonucleotide
  Target: SCNA; (-) strand; PAM type: NRG; PAM sequence: AAG
atcatcatcagatgttgagg

SEQ ID NO: 25187 - DNA, 20 bp, Artificial Sequence
  Description of Artificial Sequence: Synthetic oligonucleotide
  Target: SCNA; (-) strand; PAM type: NRG; PAM sequence: AGG
ataatcatcatcagatgttg

SEQ ID NO: 25188 - DNA, 20 bp, Artificial Sequence
  Description of Artificial Sequence: Synthetic oligonucleotide
  Target: SCNA; (-) strand; PAM type: NRG; PAM sequence: GAG
gataatcatcatcagatgtt

SEQ ID NO: 25189 - DNA, 20 bp, Artificial Sequence
  Description of Artificial Sequence: Synthetic oligonucleotide
  Target: SCNA; (-) strand; PAM type: NRG; PAM sequence: CAG
aaaaggatgataatcatcat

SEQ ID NO: 25190 - DNA, 20 bp, Artificial Sequence
  Description of Artificial Sequence: Synthetic oligonucleotide
  Target: SCNA; (-) strand; PAM type: NRG; PAM sequence: AGG
aaatatcaaaaatgatgaaa

SEQ ID NO: 25191 - DNA, 20 bp, Artificial Sequence
  Description of Artificial Sequence: Synthetic oligonucleotide
  Target: SCNA; (-) strand; PAM type: NRG; PAM sequence: AAG
gaaatatcaaaaatgatgaa

SEQ ID NO: 25192 - DNA, 20 bp, Artificial Sequence
  Description of Artificial Sequence: Synthetic oligonucleotide
  Target: SCNA; (-) strand; PAM type: NRG; PAM sequence: AAG
agtcaattaggtttacaatc

SEQ ID NO: 25193 - DNA, 20 bp, Artificial Sequence
  Description of Artificial Sequence: Synthetic oligonucleotide
  Target: SCNA; (-) strand; PAM type: NRG; PAM sequence: AGG
agaatttgaacaagtcaatt

SEQ ID NO: 25194 - DNA, 20 bp, Artificial Sequence
  Description of Artificial Sequence: Synthetic oligonucleotide
  Target: SCNA; (-) strand; PAM type: NRG; PAM sequence: TAG
gagaatttgaacaagtcaat

SEQ ID NO: 25195 - DNA, 20 bp, Artificial Sequence
  Description of Artificial Sequence: Synthetic oligonucleotide
  Target: SCNA; (-) strand; PAM type: NRG; PAM sequence: AAG
aatttaccgagaatttgaac

SEQ ID NO: 25196 - DNA, 20 bp, Artificial Sequence
  Description of Artificial Sequence: Synthetic oligonucleotide
  Target: SCNA; (-) strand; PAM type: NRG; PAM sequence: GAG
tcatttggcctaaatttacc

SEQ ID NO: 25197 - DNA, 20 bp, Artificial Sequence
  Description of Artificial Sequence: Synthetic oligonucleotide
  Target: SCNA; (-) strand; PAM type: NRG; PAM sequence: TGG
ttctgattatattattcatt

SEQ ID NO: 25198 - DNA, 20 bp, Artificial Sequence
  Description of Artificial Sequence: Synthetic oligonucleotide
  Target: SCNA; (-) strand; PAM type: NRG; PAM sequence: TAG
atctttgtattgttatggta

SEQ ID NO: 25199 - DNA, 20 bp, Artificial Sequence
  Description of Artificial Sequence: Synthetic oligonucleotide
  Target: SCNA; (-) strand; PAM type: NRG; PAM sequence: TGG
tatttatctttgtattgtta

SEQ ID NO: 25200 - DNA, 20 bp, Artificial Sequence
  Description of Artificial Sequence: Synthetic oligonucleotide
  Target: SCNA; (-) strand; PAM type: NRG; PAM sequence: CAG
aggaaacacccttggacagt

SEQ ID NO: 25201 - DNA, 20 bp, Artificial Sequence
  Description of Artificial Sequence: Synthetic oligonucleotide
  Target: SCNA; (-) strand; PAM type: NRG; PAM sequence: CAG
tttcaggaaacacccttgga

SEQ ID NO: 25202 - DNA, 20 bp, Artificial Sequence
  Description of Artificial Sequence: Synthetic oligonucleotide
  Target: SCNA; (-) strand; PAM type: NRG; PAM sequence: TGG
tgcatttcaggaaacaccct

SEQ ID NO: 25203 - DNA, 20 bp, Artificial Sequence
  Description of Artificial Sequence: Synthetic oligonucleotide
  Target: SCNA; (-) strand; PAM type: NRG; PAM sequence: AGG
gataattcagagtgcatttc

SEQ ID NO: 25204 - DNA, 20 bp, Artificial Sequence
  Description of Artificial Sequence: Synthetic oligonucleotide
  Target: SCNA; (-) strand; PAM type: NRG; PAM sequence: CAG
tgataattcagagtgcattt

SEQ ID NO: 25205 - DNA, 20 bp, Artificial Sequence
  Description of Artificial Sequence: Synthetic oligonucleotide
  Target: SCNA; (-) strand; PAM type: NRG; PAM sequence: GAG
aatattcctttgataattca

SEQ ID NO: 25206 - DNA, 20 bp, Artificial Sequence
  Description of Artificial Sequence: Synthetic oligonucleotide
  Target: SCNA; (-) strand; PAM type: NRG; PAM sequence: CAG
acaatattcctttgataatt

SEQ ID NO: 25207 - DNA, 20 bp, Artificial Sequence
  Description of Artificial Sequence: Synthetic oligonucleotide
  Target: SCNA; (-) strand; PAM type: NRG; PAM sequence: CAG
agtaaaatttctgttgatta

SEQ ID NO: 25208 - DNA, 20 bp, Artificial Sequence
  Description of Artificial Sequence: Synthetic oligonucleotide
  Target: SCNA; (-) strand; PAM type: NRG; PAM sequence: AAG
tattgccataattttaaaaa

SEQ ID NO: 25209 - DNA, 20 bp, Artificial Sequence
  Description of Artificial Sequence: Synthetic oligonucleotide
  Target: SCNA; (-) strand; PAM type: NRG; PAM sequence: GGG
atgtttaatttatagtaagt

SEQ ID NO: 25210 - DNA, 20 bp, Artificial Sequence
  Description of Artificial Sequence: Synthetic oligonucleotide
  Target: SCNA; (-) strand; PAM type: NRG; PAM sequence: TGG
tatgtttaatttatagtaag

SEQ ID NO: 25211 - DNA, 20 bp, Artificial Sequence
  Description of Artificial Sequence: Synthetic oligonucleotide
  Target: SCNA; (-) strand; PAM type: NRG; PAM sequence: AAG
agctatgtttaatttatagt

SEQ ID NO: 25212 - DNA, 20 bp, Artificial Sequence
  Description of Artificial Sequence: Synthetic oligonucleotide
  Target: SCNA; (-) strand; PAM type: NRG; PAM sequence: TAG
gataagctatgtttaattta

SEQ ID NO: 25213 - DNA, 20 bp, Artificial Sequence
  Description of Artificial Sequence: Synthetic oligonucleotide
  Target: SCNA; (-) strand; PAM type: NRG; PAM sequence: AAG
aatgagggctttgaattgat

SEQ ID NO: 25214 - DNA, 20 bp, Artificial Sequence
  Description of Artificial Sequence: Synthetic oligonucleotide
  Target: SCNA; (-) strand; PAM type: NRG; PAM sequence: GGG
atacttgccaagaataatga

SEQ ID NO: 25215 - DNA, 20 bp, Artificial Sequence
  Description of Artificial Sequence: Synthetic oligonucleotide
  Target: SCNA; (-) strand; PAM type: NRG; PAM sequence: AGG
tatacttgccaagaataatg

SEQ ID NO: 25216 - DNA, 20 bp, Artificial Sequence
  Description of Artificial Sequence: Synthetic oligonucleotide
  Target: SCNA; (-) strand; PAM type: NRG; PAM sequence: GAG
atatacttgccaagaataat

SEQ ID NO: 25217 - DNA, 20 bp, Artificial Sequence
  Description of Artificial Sequence: Synthetic oligonucleotide
  Target: SCNA; (-) strand; PAM type: NRG; PAM sequence: AAG
aaataaaaaatatacttgcc

SEQ ID NO: 25218 - DNA, 20 bp, Artificial Sequence
  Description of Artificial Sequence: Synthetic oligonucleotide
  Target: SCNA; (-) strand; PAM type: NRG; PAM sequence: AGG
tttataaagtatttttaaat

SEQ ID NO: 25219 - DNA, 20 bp, Artificial Sequence
  Description of Artificial Sequence: Synthetic oligonucleotide
  Target: SCNA; (-) strand; PAM type: NRG; PAM sequence: TAG
ctttataaagtatttttaaa

SEQ ID NO: 25220 - DNA, 20 bp, Artificial Sequence
  Description of Artificial Sequence: Synthetic oligonucleotide
  Target: SCNA; (-) strand; PAM type: NRG; PAM sequence: AAG
ttgaaactgaattctttata

SEQ ID NO: 25221 - DNA, 20 bp, Artificial Sequence
  Description of Artificial Sequence: Synthetic oligonucleotide
  Target: SCNA; (-) strand; PAM type: NRG; PAM sequence: CAG
tgagcattctaagaacatat

SEQ ID NO: 25222 - DNA, 20 bp, Artificial Sequence
  Description of Artificial Sequence: Synthetic oligonucleotide
  Target: SCNA; (-) strand; PAM type: NRG; PAM sequence: AAG
aaacaatcactgagcattct

SEQ ID NO: 25223 - DNA, 20 bp, Artificial Sequence
  Description of Artificial Sequence: Synthetic oligonucleotide
  Target: SCNA; (-) strand; PAM type: NRG; PAM sequence: GAG
gaaattgtaaaacaatcact

SEQ ID NO: 25224 - DNA, 20 bp, Artificial Sequence
  Description of Artificial Sequence: Synthetic oligonucleotide
  Target: SCNA; (-) strand; PAM type: NRG; PAM sequence: AAG
attagtgtggcccagtattc

SEQ ID NO: 25225 - DNA, 20 bp, Artificial Sequence
  Description of Artificial Sequence: Synthetic oligonucleotide
  Target: SCNA; (-) strand; PAM type: NRG; PAM sequence: CAG
atctagtgattagtgtggcc

SEQ ID NO: 25226 - DNA, 20 bp, Artificial Sequence
  Description of Artificial Sequence: Synthetic oligonucleotide
  Target: SCNA; (-) strand; PAM type: NRG; PAM sequence: TGG
aaagtatctagtgattagtg

SEQ ID NO: 25227 - DNA, 20 bp, Artificial Sequence
  Description of Artificial Sequence: Synthetic oligonucleotide
  Target: SCNA; (-) strand; PAM type: NRG; PAM sequence: TAG
tatttaaagtatctagtgat

SEQ ID NO: 25228 - DNA, 20 bp, Artificial Sequence
  Description of Artificial Sequence: Synthetic oligonucleotide
  Target: SCNA; (-) strand; PAM type: NRG; PAM sequence: TAG
aagatgatatttaaagtatc

SEQ ID NO: 25229 - DNA, 20 bp, Artificial Sequence
  Description of Artificial Sequence: Synthetic oligonucleotide
  Target: SCNA; (-) strand; PAM type: NRG; PAM sequence: AAG
atatccaaagatgatattta

SEQ ID NO: 25230 - DNA, 20 bp, Artificial Sequence
  Description of Artificial Sequence: Synthetic oligonucleotide
  Target: SCNA; (-) strand; PAM type: NRG; PAM sequence: AAG
ctccattgtgcttatatcca

SEQ ID NO: 25231 - DNA, 20 bp, Artificial Sequence
  Description of Artificial Sequence: Synthetic oligonucleotide
  Target: SCNA; (-) strand; PAM type: NRG; PAM sequence: AAG
tgcatggtgtggcaacaggt

SEQ ID NO: 25232 - DNA, 20 bp, Artificial Sequence
  Description of Artificial Sequence: Synthetic oligonucleotide
  Target: SCNA; (-) strand; PAM type: NRG; PAM sequence: AGG
gtggtgcatggtgtggcaac

SEQ ID NO: 25233 - DNA, 20 bp, Artificial Sequence
  Description of Artificial Sequence: Synthetic oligonucleotide
  Target: SCNA; (-) strand; PAM type: NRG; PAM sequence: CAG
agtggtgcatggtgtggcaa

SEQ ID NO: 25234 - DNA, 20 bp, Artificial Sequence
  Description of Artificial Sequence: Synthetic oligonucleotide
  Target: SCNA; (-) strand; PAM type: NRG; PAM sequence: TGG
ggagggagtggtgcatggtg

SEQ ID NO: 25235 - DNA, 20 bp, Artificial Sequence
  Description of Artificial Sequence: Synthetic oligonucleotide
  Target: SCNA; (-) strand; PAM type: NRG; PAM sequence: TGG
accaaggagggagtggtgca

SEQ ID NO: 25236 - DNA, 20 bp, Artificial Sequence
  Description of Artificial Sequence: Synthetic oligonucleotide
  Target: SCNA; (-) strand; PAM type: NRG; PAM sequence: TGG
ctccaaaaccaaggagggag

SEQ ID NO: 25237 - DNA, 20 bp, Artificial Sequence
  Description of Artificial Sequence: Synthetic oligonucleotide
  Target: SCNA; (-) strand; PAM type: NRG; PAM sequence: GAG
aggctccaaaaccaaggagg

SEQ ID NO: 25238 - DNA, 20 bp, Artificial Sequence
  Description of Artificial Sequence: Synthetic oligonucleotide
  Target: SCNA; (-) strand; PAM type: NRG; PAM sequence: GGG
gtaggctccaaaaccaagga

SEQ ID NO: 25239 - DNA, 20 bp, Artificial Sequence
  Description of Artificial Sequence: Synthetic oligonucleotide
  Target: SCNA; (-) strand; PAM type: NRG; PAM sequence: AGG
tgtaggctccaaaaccaagg

SEQ ID NO: 25240 - DNA, 20 bp, Artificial Sequence
  Description of Artificial Sequence: Synthetic oligonucleotide
  Target: SCNA; (-) strand; PAM type: NRG; PAM sequence: GAG
ttgtaggctccaaaaccaag

SEQ ID NO: 25241 - DNA, 20 bp, Artificial Sequence
  Description of Artificial Sequence: Synthetic oligonucleotide
  Target: SCNA; (-) strand; PAM type: NRG; PAM sequence: AGG
ttttgtaggctccaaaacca

SEQ ID NO: 25242 - DNA, 20 bp, Artificial Sequence
  Description of Artificial Sequence: Synthetic oligonucleotide
  Target: SCNA; (-) strand; PAM type: NRG; PAM sequence: AAG
tttttgtaggctccaaaacc

SEQ ID NO: 25243 - DNA, 20 bp, Artificial Sequence
  Description of Artificial Sequence: Synthetic oligonucleotide
  Target: SCNA; (-) strand; PAM type: NRG; PAM sequence: AGG
tgtcttgaatttgtttttgt

SEQ ID NO: 25244 - DNA, 20 bp, Artificial Sequence
  Description of Artificial Sequence: Synthetic oligonucleotide
  Target: SCNA; (-) strand; PAM type: NRG; PAM sequence: TAG
atgtcttgaatttgtttttg

SEQ ID NO: 25245 - DNA, 20 bp, Artificial Sequence
  Description of Artificial Sequence: Synthetic oligonucleotide
  Target: SCNA; (-) strand; PAM type: NRG; PAM sequence: GAG
cagcaatttaaggctagctt

SEQ ID NO: 25246 - DNA, 20 bp, Artificial Sequence
  Description of Artificial Sequence: Synthetic oligonucleotide
  Target: SCNA; (-) strand; PAM type: NRG; PAM sequence: TAG
gctaatcagcaatttaaggc

SEQ ID NO: 25247 - DNA, 20 bp, Artificial Sequence
  Description of Artificial Sequence: Synthetic oligonucleotide
  Target: SCNA; (-) strand; PAM type: NRG; PAM sequence: AGG
actagctaatcagcaattta

SEQ ID NO: 25248 - DNA, 20 bp, Artificial Sequence
  Description of Artificial Sequence: Synthetic oligonucleotide
  Target: SCNA; (-) strand; PAM type: NRG; PAM sequence: AAG
aactagctaatcagcaattt

SEQ ID NO: 25249 - DNA, 20 bp, Artificial Sequence
  Description of Artificial Sequence: Synthetic oligonucleotide
  Target: SCNA; (-) strand; PAM type: NRG; PAM sequence: CAG
tgtattgaaaactagctaat

SEQ ID NO: 25250 - DNA, 20 bp, Artificial Sequence
  Description of Artificial Sequence: Synthetic oligonucleotide
  Target: SCNA; (-) strand; PAM type: NRG; PAM sequence: TAG
aaattagttgtattgaaaac

SEQ ID NO: 25251 - DNA, 20 bp, Artificial Sequence
  Description of Artificial Sequence: Synthetic oligonucleotide
  Target: SCNA; (-) strand; PAM type: NRG; PAM sequence: TAG
gaagattgagatttttaaat

SEQ ID NO: 25252 - DNA, 20 bp, Artificial Sequence
  Description of Artificial Sequence: Synthetic oligonucleotide
  Target: SCNA; (-) strand; PAM type: NRG; PAM sequence: GAG
tatatatacttctgaagatt

SEQ ID NO: 25253 - DNA, 20 bp, Artificial Sequence
  Description of Artificial Sequence: Synthetic oligonucleotide
  Target: SCNA; (-) strand; PAM type: NRG; PAM sequence: AAG
taataatatatatacttctg

SEQ ID NO: 25254 - DNA, 20 bp, Artificial Sequence
  Description of Artificial Sequence: Synthetic oligonucleotide
  Target: SCNA; (-) strand; PAM type: NRG; PAM sequence: AAG
tatatttttttctttccctg

SEQ ID NO: 25255 - DNA, 20 bp, Artificial Sequence
  Description of Artificial Sequence: Synthetic oligonucleotide
  Target: SCNA; (-) strand; PAM type: NRG; PAM sequence: AGG
gagttccttcttctagtttt

SEQ ID NO: 25256 - DNA, 20 bp, Artificial Sequence
  Description of Artificial Sequence: Synthetic oligonucleotide
  Target: SCNA; (-) strand; PAM type: NRG; PAM sequence: TAG
ggagttccttcttctagttt

SEQ ID NO: 25257 - DNA, 20 bp, Artificial Sequence
  Description of Artificial Sequence: Synthetic oligonucleotide
  Target: SCNA; (-) strand; PAM type: NRG; PAM sequence: TAG
gttactggagttccttcttc

SEQ ID NO: 25258 - DNA, 20 bp, Artificial Sequence
  Description of Artificial Sequence: Synthetic oligonucleotide
  Target: SCNA; (-) strand; PAM type: NRG; PAM sequence: GAG
atttattgtggtggttactg

SEQ ID NO: 25259 - DNA, 20 bp, Artificial Sequence
  Description of Artificial Sequence: Synthetic oligonucleotide
  Target: SCNA; (-) strand; PAM type: NRG; PAM sequence: TGG
ctatttattgtggtggttac

SEQ ID NO: 25260 - DNA, 20 bp, Artificial Sequence
  Description of Artificial Sequence: Synthetic oligonucleotide
  Target: SCNA; (-) strand; PAM type: NRG; PAM sequence: TGG
ctttcttctatttattgtgg

SEQ ID NO: 25261 - DNA, 20 bp, Artificial Sequence
  Description of Artificial Sequence: Synthetic oligonucleotide
  Target: SCNA; (-) strand; PAM type: NRG; PAM sequence: TGG
gggctttcttctatttattg

SEQ ID NO: 25262 - DNA, 20 bp, Artificial Sequence
  Description of Artificial Sequence: Synthetic oligonucleotide
  Target: SCNA; (-) strand; PAM type: NRG; PAM sequence: GGG
gagaggacctcctgttagct

SEQ ID NO: 25263 - DNA, 20 bp, Artificial Sequence
  Description of Artificial Sequence: Synthetic oligonucleotide
  Target: SCNA; (-) strand; PAM type: NRG; PAM sequence: TGG
ggagaggacctcctgttagc

SEQ ID NO: 25264 - DNA, 20 bp, Artificial Sequence
  Description of Artificial Sequence: Synthetic oligonucleotide
  Target: SCNA; (-) strand; PAM type: NRG; PAM sequence: TAG
aattggagaggacctcctgt

SEQ ID NO: 25265 - DNA, 20 bp, Artificial Sequence
  Description of Artificial Sequence: Synthetic oligonucleotide
  Target: SCNA; (-) strand; PAM type: NRG; PAM sequence: AGG
tgctaaaatcgtaattggag

SEQ ID NO: 25266 - DNA, 20 bp, Artificial Sequence
  Description of Artificial Sequence: Synthetic oligonucleotide
  Target: SCNA; (-) strand; PAM type: NRG; PAM sequence: GAG
gtgctaaaatcgtaattgga

SEQ ID NO: 25267 - DNA, 20 bp, Artificial Sequence
  Description of Artificial Sequence: Synthetic oligonucleotide
  Target: SCNA; (-) strand; PAM type: NRG; PAM sequence: GAG
ttgtgctaaaatcgtaattg

SEQ ID NO: 25268 - DNA, 20 bp, Artificial Sequence
  Description of Artificial Sequence: Synthetic oligonucleotide
  Target: SCNA; (-) strand; PAM type: NRG; PAM sequence: TGG
ttttgtgctaaaatcgtaat

SEQ ID NO: 25269 - DNA, 20 bp, Artificial Sequence
  Description of Artificial Sequence: Synthetic oligonucleotide
  Target: SCNA; (-) strand; PAM type: NRG; PAM sequence: AAG
atgtgggaacaaaggggata

SEQ ID NO: 25270 - DNA, 20 bp, Artificial Sequence
  Description of Artificial Sequence: Synthetic oligonucleotide
  Target: SCNA; (-) strand; PAM type: NRG; PAM sequence: GGG
catgtgatgtgggaacaaag

SEQ ID NO: 25271 - DNA, 20 bp, Artificial Sequence
  Description of Artificial Sequence: Synthetic oligonucleotide
  Target: SCNA; (-) strand; PAM type: NRG; PAM sequence: GGG
acatgtgatgtgggaacaaa

SEQ ID NO: 25272 - DNA, 20 bp, Artificial Sequence
  Description of Artificial Sequence: Synthetic oligonucleotide
  Target: SCNA; (-) strand; PAM type: NRG; PAM sequence: AGG
gacatgtgatgtgggaacaa

SEQ ID NO: 25273 - DNA, 20 bp, Artificial Sequence
  Description of Artificial Sequence: Synthetic oligonucleotide
  Target: SCNA; (-) strand; PAM type: NRG; PAM sequence: AAG
tgacatgtgatgtgggaaca

SEQ ID NO: 25274 - DNA, 20 bp, Artificial Sequence
  Description of Artificial Sequence: Synthetic oligonucleotide
  Target: SCNA; (-) strand; PAM type: NRG; PAM sequence: GGG
tgtaagttgacatgtgatgt

SEQ ID NO: 25275 - DNA, 20 bp, Artificial Sequence
  Description of Artificial Sequence: Synthetic oligonucleotide
  Target: SCNA; (-) strand; PAM type: NRG; PAM sequence: TGG
ctgtaagttgacatgtgatg

SEQ ID NO: 25276 - DNA, 20 bp, Artificial Sequence
  Description of Artificial Sequence: Synthetic oligonucleotide
  Target: SCNA; (-) strand; PAM type: NRG; PAM sequence: AAG
cattcttttttctcctctgt

SEQ ID NO: 25277 - DNA, 20 bp, Artificial Sequence
  Description of Artificial Sequence: Synthetic oligonucleotide
  Target: SCNA; (-) strand; PAM type: NRG; PAM sequence: CGG
attatcttctcactgggccc

SEQ ID NO: 25278 - DNA, 20 bp, Artificial Sequence
  Description of Artificial Sequence: Synthetic oligonucleotide
  Target: SCNA; (-) strand; PAM type: NRG; PAM sequence: GGG
ttcaaaattatcttctcact

SEQ ID NO: 25279 - DNA, 20 bp, Artificial Sequence
  Description of Artificial Sequence: Synthetic oligonucleotide
  Target: SCNA; (-) strand; PAM type: NRG; PAM sequence: TGG
attcaaaattatcttctcac

SEQ ID NO: 25280 - DNA, 20 bp, Artificial Sequence
  Description of Artificial Sequence: Synthetic oligonucleotide
  Target: SCNA; (-) strand; PAM type: NRG; PAM sequence: CAG
ctgtacttttaaagcttcta

SEQ ID NO: 25281 - DNA, 20 bp, Artificial Sequence
  Description of Artificial Sequence: Synthetic oligonucleotide
  Target: SCNA; (-) strand; PAM type: NRG; PAM sequence: AAG
tctctagtgctgtactttta

SEQ ID NO: 25282 - DNA, 20 bp, Artificial Sequence
  Description of Artificial Sequence: Synthetic oligonucleotide
  Target: SCNA; (-) strand; PAM type: NRG; PAM sequence: TAG
tgggttgactgatctgtctc

SEQ ID NO: 25283 - DNA, 20 bp, Artificial Sequence
  Description of Artificial Sequence: Synthetic oligonucleotide
  Target: SCNA; (-) strand; PAM type: NRG; PAM sequence: GGG
cttcttcccttttgtttcat

SEQ ID NO: 25284 - DNA, 20 bp, Artificial Sequence
  Description of Artificial Sequence: Synthetic oligonucleotide
  Target: SCNA; (-) strand; PAM type: NRG; PAM sequence: TGG
ccttcttcccttttgtttca

SEQ ID NO: 25285 - DNA, 20 bp, Artificial Sequence
  Description of Artificial Sequence: Synthetic oligonucleotide
  Target: SCNA; (-) strand; PAM type: NRG; PAM sequence: AAG
tgggtgttcagcacatgtta

SEQ ID NO: 25286 - DNA, 20 bp, Artificial Sequence
  Description of Artificial Sequence: Synthetic oligonucleotide
  Target: SCNA; (-) strand; PAM type: NRG; PAM sequence: CAG
ttttttacataatgggtgtt

SEQ ID NO: 25287 - DNA, 20 bp, Artificial Sequence
  Description of Artificial Sequence: Synthetic oligonucleotide
  Target: SCNA; (-) strand; PAM type: NRG; PAM sequence: GGG
aaatgttttttttacataat

SEQ ID NO: 25288 - DNA, 20 bp, Artificial Sequence
  Description of Artificial Sequence: Synthetic oligonucleotide
  Target: SCNA; (-) strand; PAM type: NRG; PAM sequence: TGG
aaaatgttttttttacataa

SEQ ID NO: 25289 - DNA, 20 bp, Artificial Sequence
  Description of Artificial Sequence: Synthetic oligonucleotide
  Target: SCNA; (-) strand; PAM type: NRG; PAM sequence: CAG
caggcatgagccactgcgcc

SEQ ID NO: 25290 - DNA, 20 bp, Artificial Sequence
  Description of Artificial Sequence: Synthetic oligonucleotide
  Target: SCNA; (-) strand; PAM type: NRG; PAM sequence: GAG
attgctgggattacaggcat

SEQ ID NO: 25291 - DNA, 20 bp, Artificial Sequence
  Description of Artificial Sequence: Synthetic oligonucleotide
  Target: SCNA; (-) strand; PAM type: NRG; PAM sequence: AGG
tcccaaattgctgggattac

SEQ ID NO: 25292 - DNA, 20 bp, Artificial Sequence
  Description of Artificial Sequence: Synthetic oligonucleotide
  Target: SCNA; (-) strand; PAM type: NRG; PAM sequence: CAG
ctcccaaattgctgggatta

SEQ ID NO: 25293 - DNA, 20 bp, Artificial Sequence
  Description of Artificial Sequence: Synthetic oligonucleotide
  Target: SCNA; (-) strand; PAM type: NRG; PAM sequence: GGG
cctcggcctcccaaattgct

SEQ ID NO: 25294 - DNA, 20 bp, Artificial Sequence
  Description of Artificial Sequence: Synthetic oligonucleotide
  Target: SCNA; (-) strand; PAM type: NRG; PAM sequence: TGG
acctcggcctcccaaattgc

SEQ ID NO: 25295 - DNA, 20 bp, Artificial Sequence
  Description of Artificial Sequence: Synthetic oligonucleotide
  Target: SCNA; (-) strand; PAM type: NRG; PAM sequence: CGG
acctcgtgatctgcccacct

SEQ ID NO: 25296 - DNA, 20 bp, Artificial Sequence
  Description of Artificial Sequence: Synthetic oligonucleotide
  Target: SCNA; (-) strand; PAM type: NRG; PAM sequence: TGG
tttcaccatattagccagga

SEQ ID NO: 25297 - DNA, 20 bp, Artificial Sequence
  Description of Artificial Sequence: Synthetic oligonucleotide
  Target: SCNA; (-) strand; PAM type: NRG; PAM sequence: AGG
ggggtttcaccatattagcc

SEQ ID NO: 25298 - DNA, 20 bp, Artificial Sequence
  Description of Artificial Sequence: Synthetic oligonucleotide
  Target: SCNA; (-) strand; PAM type: NRG; PAM sequence: CAG
tggggtttcaccatattagc

SEQ ID NO: 25299 - DNA, 20 bp, Artificial Sequence
  Description of Artificial Sequence: Synthetic oligonucleotide
  Target: SCNA; (-) strand; PAM type: NRG; PAM sequence: TAG
gagatggggtttcaccatat

SEQ ID NO: 25300 - DNA, 20 bp, Artificial Sequence
  Description of Artificial Sequence: Synthetic oligonucleotide
  Target: SCNA; (-) strand; PAM type: NRG; PAM sequence: GGG
ttgtatttttggtagagatg

SEQ ID NO: 25301 - DNA, 20 bp, Artificial Sequence
  Description of Artificial Sequence: Synthetic oligonucleotide
  Target: SCNA; (-) strand; PAM type: NRG; PAM sequence: GGG
tttgtatttttggtagagat

SEQ ID NO: 25302 - DNA, 20 bp, Artificial Sequence
  Description of Artificial Sequence: Synthetic oligonucleotide
  Target: SCNA; (-) strand; PAM type: NRG; PAM sequence: TGG
ttttgtatttttggtagaga

SEQ ID NO: 25303 - DNA, 20 bp, Artificial Sequence
  Description of Artificial Sequence: Synthetic oligonucleotide
  Target: SCNA; (-) strand; PAM type: NRG; PAM sequence: GAG
aattttttgtatttttggta

SEQ ID NO: 25304 - DNA, 20 bp, Artificial Sequence
  Description of Artificial Sequence: Synthetic oligonucleotide
  Target: SCNA; (-) strand; PAM type: NRG; PAM sequence: TAG
ctaattttttgtatttttgg

SEQ ID NO: 25305 - DNA, 20 bp, Artificial Sequence
  Description of Artificial Sequence: Synthetic oligonucleotide
  Target: SCNA; (-) strand; PAM type: NRG; PAM sequence: TGG
tggctaattttttgtatttt

SEQ ID NO: 25306 - DNA, 20 bp, Artificial Sequence
  Description of Artificial Sequence: Synthetic oligonucleotide
  Target: SCNA; (-) strand; PAM type: NRG; PAM sequence: TGG
caggcacccgccaccacgcc

SEQ ID NO: 25307 - DNA, 20 bp, Artificial Sequence
  Description of Artificial Sequence: Synthetic oligonucleotide
  Target: SCNA; (-) strand; PAM type: NRG; PAM sequence: AGG
tcccaagtagctgggactac

SEQ ID NO: 25308 - DNA, 20 bp, Artificial Sequence
  Description of Artificial Sequence: Synthetic oligonucleotide
  Target: SCNA; (-) strand; PAM type: NRG; PAM sequence: CAG
ctcccaagtagctgggacta

SEQ ID NO: 25309 - DNA, 20 bp, Artificial Sequence
  Description of Artificial Sequence: Synthetic oligonucleotide
  Target: SCNA; (-) strand; PAM type: NRG; PAM sequence: GGG
tcagcccctcccaagtagct

SEQ ID NO: 25310 - DNA, 20 bp, Artificial Sequence
  Description of Artificial Sequence: Synthetic oligonucleotide
  Target: SCNA; (-) strand; PAM type: NRG; PAM sequence: TGG
ctcagcccctcccaagtagc

SEQ ID NO: 25311 - DNA, 20 bp, Artificial Sequence
  Description of Artificial Sequence: Synthetic oligonucleotide
  Target: SCNA; (-) strand; PAM type: NRG; PAM sequence: TAG
ctgcctcagcccctcccaag

SEQ ID NO: 25312 - DNA, 20 bp, Artificial Sequence
  Description of Artificial Sequence: Synthetic oligonucleotide
  Target: SCNA; (-) strand; PAM type: NRG; PAM sequence: AAG
ctcctgcctcagcccctccc

SEQ ID NO: 25313 - DNA, 20 bp, Artificial Sequence
  Description of Artificial Sequence: Synthetic oligonucleotide
  Target: SCNA; (-) strand; PAM type: NRG; PAM sequence: CAG
ttcatgccattctcctgcct

SEQ ID NO: 25314 - DNA, 20 bp, Artificial Sequence
  Description of Artificial Sequence: Synthetic oligonucleotide
  Target: SCNA; (-) strand; PAM type: NRG; PAM sequence: GAG
cactgcaagttctgcctccc

SEQ ID NO: 25315 - DNA, 20 bp, Artificial Sequence
  Description of Artificial Sequence: Synthetic oligonucleotide
  Target: SCNA; (-) strand; PAM type: NRG; PAM sequence: AAG
gcacaatcttggctcactgc

SEQ ID NO: 25316 - DNA, 20 bp, Artificial Sequence
  Description of Artificial Sequence: Synthetic oligonucleotide
  Target: SCNA; (-) strand; PAM type: NRG; PAM sequence: TGG
ggagtgcagtggcacaatct

SEQ ID NO: 25317 - DNA, 20 bp, Artificial Sequence
  Description of Artificial Sequence: Synthetic oligonucleotide
  Target: SCNA; (-) strand; PAM type: NRG; PAM sequence: TGG
ttacccaggctggagtgcag

SEQ ID NO: 25318 - DNA, 20 bp, Artificial Sequence
  Description of Artificial Sequence: Synthetic oligonucleotide
  Target: SCNA; (-) strand; PAM type: NRG; PAM sequence: CAG
ctgttacccaggctggagtg

SEQ ID NO: 25319 - DNA, 20 bp, Artificial Sequence
  Description of Artificial Sequence: Synthetic oligonucleotide
  Target: SCNA; (-) strand; PAM type: NRG; PAM sequence: GAG
ttgctctgttacccaggctg

SEQ ID NO: 25320 - DNA, 20 bp, Artificial Sequence
  Description of Artificial Sequence: Synthetic oligonucleotide
  Target: SCNA; (-) strand; PAM type: NRG; PAM sequence: TGG
tcttgctctgttacccaggc

SEQ ID NO: 25321 - DNA, 20 bp, Artificial Sequence
  Description of Artificial Sequence: Synthetic oligonucleotide
  Target: SCNA; (-) strand; PAM type: NRG; PAM sequence: AGG
agagtcttgctctgttaccc

SEQ ID NO: 25322 - DNA, 20 bp, Artificial Sequence
  Description of Artificial Sequence: Synthetic oligonucleotide
  Target: SCNA; (-) strand; PAM type: NRG; PAM sequence: CAG
cagagtcttgctctgttacc

SEQ ID NO: 25323 - DNA, 20 bp, Artificial Sequence
  Description of Artificial Sequence: Synthetic oligonucleotide
  Target: SCNA; (-) strand; PAM type: NRG; PAM sequence: GAG
ctgtttgtttttttgagaca

SEQ ID NO: 25324 - DNA, 20 bp, Artificial Sequence
  Description of Artificial Sequence: Synthetic oligonucleotide
  Target: SCNA; (-) strand; PAM type: NRG; PAM sequence: CAG
gtctgtttgtttttttgaga

SEQ ID NO: 25325 - DNA, 20 bp, Artificial Sequence
  Description of Artificial Sequence: Synthetic oligonucleotide
  Target: SCNA; (-) strand; PAM type: NRG; PAM sequence: GAG
gtttgtctgtttgttttttt

SEQ ID NO: 25326 - DNA, 20 bp, Artificial Sequence
  Description of Artificial Sequence: Synthetic oligonucleotide
  Target: SCNA; (-) strand; PAM type: NRG; PAM sequence: AAG
ggctgttatgaagattaaat

SEQ ID NO: 25327 - DNA, 20 bp, Artificial Sequence
  Description of Artificial Sequence: Synthetic oligonucleotide
  Target: SCNA; (-) strand; PAM type: NRG; PAM sequence: AAG
tatattaaatggctgttatg

SEQ ID NO: 25328 - DNA, 20 bp, Artificial Sequence
  Description of Artificial Sequence: Synthetic oligonucleotide
  Target: SCNA; (-) strand; PAM type: NRG; PAM sequence: TGG
cataatataactatattaaa

SEQ ID NO: 25329 - DNA, 20 bp, Artificial Sequence
  Description of Artificial Sequence: Synthetic oligonucleotide
  Target: SCNA; (-) strand; PAM type: NRG; PAM sequence: GGG
tttcatcagctatttaaaat

SEQ ID NO: 25330 - DNA, 20 bp, Artificial Sequence
  Description of Artificial Sequence: Synthetic oligonucleotide
  Target: SCNA; (-) strand; PAM type: NRG; PAM sequence: TGG
atttcatcagctatttaaaa

SEQ ID NO: 25331 - DNA, 20 bp, Artificial Sequence
  Description of Artificial Sequence: Synthetic oligonucleotide
  Target: SCNA; (-) strand; PAM type: NRG; PAM sequence: CAG
actcggatttttaatttcat

SEQ ID NO: 25332 - DNA, 20 bp, Artificial Sequence
  Description of Artificial Sequence: Synthetic oligonucleotide
  Target: SCNA; (-) strand; PAM type: NRG; PAM sequence: CGG
gttacataaattacttaact

SEQ ID NO: 25333 - DNA, 20 bp, Artificial Sequence
  Description of Artificial Sequence: Synthetic oligonucleotide
  Target: SCNA; (-) strand; PAM type: NRG; PAM sequence: TAG
ccctagtttgaatgtgctta

SEQ ID NO: 25334 - DNA, 20 bp, Artificial Sequence
  Description of Artificial Sequence: Synthetic oligonucleotide
  Target: SCNA; (-) strand; PAM type: NRG; PAM sequence: TAG
ctgatcctgtgtagagaccc

SEQ ID NO: 25335 - DNA, 20 bp, Artificial Sequence
  Description of Artificial Sequence: Synthetic oligonucleotide
  Target: SCNA; (-) strand; PAM type: NRG; PAM sequence: GAG
agaaattctgatcctgtgta

SEQ ID NO: 25336 - DNA, 20 bp, Artificial Sequence
  Description of Artificial Sequence: Synthetic oligonucleotide
  Target: SCNA; (-) strand; PAM type: NRG; PAM sequence: TAG
gaagaaattctgatcctgtg

SEQ ID NO: 25337 - DNA, 20 bp, Artificial Sequence
  Description of Artificial Sequence: Synthetic oligonucleotide
  Target: SCNA; (-) strand; PAM type: NRG; PAM sequence: AAG
tagtaatgttcaaggtttgg

SEQ ID NO: 25338 - DNA, 20 bp, Artificial Sequence
  Description of Artificial Sequence: Synthetic oligonucleotide
  Target: SCNA; (-) strand; PAM type: NRG; PAM sequence: TGG
gtttagtaatgttcaaggtt

SEQ ID NO: 25339 - DNA, 20 bp, Artificial Sequence
  Description of Artificial Sequence: Synthetic oligonucleotide
  Target: SCNA; (-) strand; PAM type: NRG; PAM sequence: AGG
ttcaagtttagtaatgttca

SEQ ID NO: 25340 - DNA, 20 bp, Artificial Sequence
  Description of Artificial Sequence: Synthetic oligonucleotide
  Target: SCNA; (-) strand; PAM type: NRG; PAM sequence: AAG
attcaagtttagtaatgttc

SEQ ID NO: 25341 - DNA, 20 bp, Artificial Sequence
  Description of Artificial Sequence: Synthetic oligonucleotide
  Target: SCNA; (-) strand; PAM type: NRG; PAM sequence: TAG
taattatttgtattcaagtt

SEQ ID NO: 25342 - DNA, 20 bp, Artificial Sequence
  Description of Artificial Sequence: Synthetic oligonucleotide
  Target: SCNA; (-) strand; PAM type: NRG; PAM sequence: AAG
cataataattatttgtattc

SEQ ID NO: 25343 - DNA, 20 bp, Artificial Sequence
  Description of Artificial Sequence: Synthetic oligonucleotide
  Target: SCNA; (-) strand; PAM type: NRG; PAM sequence: AAG
atatgaatacaattttttac

SEQ ID NO: 25344 - DNA, 20 bp, Artificial Sequence
  Description of Artificial Sequence: Synthetic oligonucleotide
  Target: SCNA; (-) strand; PAM type: NRG; PAM sequence: AGG
tgaaaaatccaacattagag

SEQ ID NO: 25345 - DNA, 20 bp, Artificial Sequence
  Description of Artificial Sequence: Synthetic oligonucleotide
  Target: SCNA; (-) strand; PAM type: NRG; PAM sequence: GAG
ctgaaaaatccaacattaga

SEQ ID NO: 25346 - DNA, 20 bp, Artificial Sequence
  Description of Artificial Sequence: Synthetic oligonucleotide
  Target: SCNA; (-) strand; PAM type: NRG; PAM sequence: GAG
cactgaaaaatccaacatta

SEQ ID NO: 25347 - DNA, 20 bp, Artificial Sequence
  Description of Artificial Sequence: Synthetic oligonucleotide
  Target: SCNA; (-) strand; PAM type: NRG; PAM sequence: TAG
tacactgaaaaatccaacat

SEQ ID NO: 25348 - DNA, 20 bp, Artificial Sequence
  Description of Artificial Sequence: Synthetic oligonucleotide
  Target: SCNA; (-) strand; PAM type: NRG; PAM sequence: CAG
tgccgattccataaattata

SEQ ID NO: 25349 - DNA, 20 bp, Artificial Sequence
  Description of Artificial Sequence: Synthetic oligonucleotide
  Target: SCNA; (-) strand; PAM type: NRG; PAM sequence: GAG
actgatccaaacttaaaaag

SEQ ID NO: 25350 - DNA, 20 bp, Artificial Sequence
  Description of Artificial Sequence: Synthetic oligonucleotide
  Target: SCNA; (-) strand; PAM type: NRG; PAM sequence: AGG
aaactgatccaaacttaaaa

SEQ ID NO: 25351 - DNA, 20 bp, Artificial Sequence
  Description of Artificial Sequence: Synthetic oligonucleotide
  Target: SCNA; (-) strand; PAM type: NRG; PAM sequence: AAG
taaactgatccaaacttaaa

SEQ ID NO: 25352 - DNA, 20 bp, Artificial Sequence
  Description of Artificial Sequence: Synthetic oligonucleotide
  Target: SCNA; (-) strand; PAM type: NRG; PAM sequence: AAG
gtcagtatatcatgacatta

SEQ ID NO: 25353 - DNA, 20 bp, Artificial Sequence
  Description of Artificial Sequence: Synthetic oligonucleotide
  Target: SCNA; (-) strand; PAM type: NRG; PAM sequence: CAG
ccttatgttaaatacactgt

SEQ ID NO: 25354 - DNA, 20 bp, Artificial Sequence
  Description of Artificial Sequence: Synthetic oligonucleotide
  Target: SCNA; (-) strand; PAM type: NRG; PAM sequence: AAG
gagtgaaggtgtcccagagg

SEQ ID NO: 25355 - DNA, 20 bp, Artificial Sequence
  Description of Artificial Sequence: Synthetic oligonucleotide
  Target: SCNA; (-) strand; PAM type: NRG; PAM sequence: AGG
aaagagtgaaggtgtcccag

SEQ ID NO: 25356 - DNA, 20 bp, Artificial Sequence
  Description of Artificial Sequence: Synthetic oligonucleotide
  Target: SCNA; (-) strand; PAM type: NRG; PAM sequence: GAG
taaagagtgaaggtgtccca

SEQ ID NO: 25357 - DNA, 20 bp, Artificial Sequence
  Description of Artificial Sequence: Synthetic oligonucleotide
  Target: SCNA; (-) strand; PAM type: NRG; PAM sequence: CAG
gataaagagtgaaggtgtcc

SEQ ID NO: 25358 - DNA, 20 bp, Artificial Sequence
  Description of Artificial Sequence: Synthetic oligonucleotide
  Target: SCNA; (-) strand; PAM type: NRG; PAM sequence: AGG
gaggttgtgataaagagtga

SEQ ID NO: 25359 - DNA, 20 bp, Artificial Sequence
  Description of Artificial Sequence: Synthetic oligonucleotide
  Target: SCNA; (-) strand; PAM type: NRG; PAM sequence: AAG
agaggttgtgataaagagtg

SEQ ID NO: 25360 - DNA, 20 bp, Artificial Sequence
  Description of Artificial Sequence: Synthetic oligonucleotide
  Target: SCNA; (-) strand; PAM type: NRG; PAM sequence: GAG
gggaaagaggttgtgataaa

SEQ ID NO: 25361 - DNA, 20 bp, Artificial Sequence
  Description of Artificial Sequence: Synthetic oligonucleotide
  Target: SCNA; (-) strand; PAM type: NRG; PAM sequence: AAG
tggggaaagaggttgtgata

SEQ ID NO: 25362 - DNA, 20 bp, Artificial Sequence
  Description of Artificial Sequence: Synthetic oligonucleotide
  Target: SCNA; (-) strand; PAM type: NRG; PAM sequence: AGG
tatccgtataatggggaaag

SEQ ID NO: 25363 - DNA, 20 bp, Artificial Sequence
  Description of Artificial Sequence: Synthetic oligonucleotide
  Target: SCNA; (-) strand; PAM type: NRG; PAM sequence: GAG
gtatccgtataatggggaaa

SEQ ID NO: 25364 - DNA, 20 bp, Artificial Sequence
  Description of Artificial Sequence: Synthetic oligonucleotide
  Target: SCNA; (-) strand; PAM type: NRG; PAM sequence: AAG
aggtatccgtataatgggga

SEQ ID NO: 25365 - DNA, 20 bp, Artificial Sequence
  Description of Artificial Sequence: Synthetic oligonucleotide
  Target: SCNA; (-) strand; PAM type: NRG; PAM sequence: GGG
gtgaaggtatccgtataatg

SEQ ID NO: 25366 - DNA, 20 bp, Artificial Sequence
  Description of Artificial Sequence: Synthetic oligonucleotide
  Target: SCNA; (-) strand; PAM type: NRG; PAM sequence: GGG
ggtgaaggtatccgtataat

SEQ ID NO: 25367 - DNA, 20 bp, Artificial Sequence
  Description of Artificial Sequence: Synthetic oligonucleotide
  Target: SCNA; (-) strand; PAM type: NRG; PAM sequence: TGG
aggtgaaggtatccgtataa

SEQ ID NO: 25368 - DNA, 20 bp, Artificial Sequence
  Description of Artificial Sequence: Synthetic oligonucleotide
  Target: SCNA; (-) strand; PAM type: NRG; PAM sequence: AGG
agaggaacgtagtgaggtga

SEQ ID NO: 25369 - DNA, 20 bp, Artificial Sequence
  Description of Artificial Sequence: Synthetic oligonucleotide
  Target: SCNA; (-) strand; PAM type: NRG; PAM sequence: AAG
cagaggaacgtagtgaggtg

SEQ ID NO: 25370 - DNA, 20 bp, Artificial Sequence
  Description of Artificial Sequence: Synthetic oligonucleotide
  Target: SCNA; (-) strand; PAM type: NRG; PAM sequence: AGG
gcagtcagaggaacgtagtg

SEQ ID NO: 25371 - DNA, 20 bp, Artificial Sequence
  Description of Artificial Sequence: Synthetic oligonucleotide
  Target: SCNA; (-) strand; PAM type: NRG; PAM sequence: GAG
tgcagtcagaggaacgtagt

SEQ ID NO: 25372 - DNA, 20 bp, Artificial Sequence
  Description of Artificial Sequence: Synthetic oligonucleotide
  Target: SCNA; (-) strand; PAM type: NRG; PAM sequence: TAG
aatatgcagtcagaggaacg

SEQ ID NO: 25373 - DNA, 20 bp, Artificial Sequence
  Description of Artificial Sequence: Synthetic oligonucleotide
  Target: SCNA; (-) strand; PAM type: NRG; PAM sequence: AGG
gactctaaatatgcagtcag

SEQ ID NO: 25374 - DNA, 20 bp, Artificial Sequence
  Description of Artificial Sequence: Synthetic oligonucleotide
  Target: SCNA; (-) strand; PAM type: NRG; PAM sequence: GAG
agactctaaatatgcagtca

SEQ ID NO: 25375 - DNA, 20 bp, Artificial Sequence
  Description of Artificial Sequence: Synthetic oligonucleotide
  Target: SCNA; (-) strand; PAM type: NRG; PAM sequence: CAG
ggagactctaaatatgcagt

SEQ ID NO: 25376 - DNA, 20 bp, Artificial Sequence
  Description of Artificial Sequence: Synthetic oligonucleotide
  Target: SCNA; (-) strand; PAM type: NRG; PAM sequence: CAG
ttcaggagactctaaatatg

SEQ ID NO: 25377 - DNA, 20 bp, Artificial Sequence
  Description of Artificial Sequence: Synthetic oligonucleotide
  Target: SCNA; (-) strand; PAM type: NRG; PAM sequence: GAG
ttgtcactgctgcaattcag

SEQ ID NO: 25378 - DNA, 20 bp, Artificial Sequence
  Description of Artificial Sequence: Synthetic oligonucleotide
  Target: SCNA; (-) strand; PAM type: NRG; PAM sequence: AGG
tgttgtcactgctgcaattc

SEQ ID NO: 25379 - DNA, 20 bp, Artificial Sequence
  Description of Artificial Sequence: Synthetic oligonucleotide
  Target: SCNA; (-) strand; PAM type: NRG; PAM sequence: CAG
atgttgtcactgctgcaatt

SEQ ID NO: 25380 - DNA, 20 bp, Artificial Sequence
  Description of Artificial Sequence: Synthetic oligonucleotide
  Target: SCNA; (-) strand; PAM type: NRG; PAM sequence: AGG
tacaggaagtagctaccctg

SEQ ID NO: 25381 - DNA, 20 bp, Artificial Sequence
  Description of Artificial Sequence: Synthetic oligonucleotide
  Target: SCNA; (-) strand; PAM type: NRG; PAM sequence: GAG
atacaggaagtagctaccct

SEQ ID NO: 25382 - DNA, 20 bp, Artificial Sequence
  Description of Artificial Sequence: Synthetic oligonucleotide
  Target: SCNA; (-) strand; PAM type: NRG; PAM sequence: TAG
aagttgatgtatacaggaag

SEQ ID NO: 25383 - DNA, 20 bp, Artificial Sequence
  Description of Artificial Sequence: Synthetic oligonucleotide
  Target: SCNA; (-) strand; PAM type: NRG; PAM sequence: AAG
cataagttgatgtatacagg

SEQ ID NO: 25384 - DNA, 20 bp, Artificial Sequence
  Description of Artificial Sequence: Synthetic oligonucleotide
  Target: SCNA; (-) strand; PAM type: NRG; PAM sequence: AGG
aaacataagttgatgtatac

SEQ ID NO: 25385 - DNA, 20 bp, Artificial Sequence
  Description of Artificial Sequence: Synthetic oligonucleotide
  Target: SCNA; (-) strand; PAM type: NRG; PAM sequence: CAG
caaacataagttgatgtata

SEQ ID NO: 25386 - DNA, 20 bp, Artificial Sequence
  Description of Artificial Sequence: Synthetic oligonucleotide
  Target: SCNA; (-) strand; PAM type: NRG; PAM sequence: AAG
gtaaaatttgaatcaaacat

SEQ ID NO: 25387 - DNA, 20 bp, Artificial Sequence
  Description of Artificial Sequence: Synthetic oligonucleotide
  Target: SCNA; (-) strand; PAM type: NRG; PAM sequence: AAG
aaggaagtgaaacattctgg

SEQ ID NO: 25388 - DNA, 20 bp, Artificial Sequence
  Description of Artificial Sequence: Synthetic oligonucleotide
  Target: SCNA; (-) strand; PAM type: NRG; PAM sequence: TGG
acaaaggaagtgaaacattc

SEQ ID NO: 25389 - DNA, 20 bp, Artificial Sequence
  Description of Artificial Sequence: Synthetic oligonucleotide
  Target: SCNA; (-) strand; PAM type: NRG; PAM sequence: AAG
gaaagagtagcaaacaaagg

SEQ ID NO: 25390 - DNA, 20 bp, Artificial Sequence
  Description of Artificial Sequence: Synthetic oligonucleotide
  Target: SCNA; (-) strand; PAM type: NRG; PAM sequence: AGG
gatgaaagagtagcaaacaa

SEQ ID NO: 25391 - DNA, 20 bp, Artificial Sequence
  Description of Artificial Sequence: Synthetic oligonucleotide
  Target: SCNA; (-) strand; PAM type: NRG; PAM sequence: AAG
agatgaaagagtagcaaaca

SEQ ID NO: 25392 - DNA, 20 bp, Artificial Sequence
  Description of Artificial Sequence: Synthetic oligonucleotide
  Target: SCNA; (-) strand; PAM type: NRG; PAM sequence: TAG
ggccagcaaagatgaaagag

SEQ ID NO: 25393 - DNA, 20 bp, Artificial Sequence
  Description of Artificial Sequence: Synthetic oligonucleotide
  Target: SCNA; (-) strand; PAM type: NRG; PAM sequence: GAG
actggccagcaaagatgaaa

SEQ ID NO: 25394 - DNA, 20 bp, Artificial Sequence
  Description of Artificial Sequence: Synthetic oligonucleotide
  Target: SCNA; (-) strand; PAM type: NRG; PAM sequence: AAG
aaactggccagcaaagatga

SEQ ID NO: 25395 - DNA, 20 bp, Artificial Sequence
  Description of Artificial Sequence: Synthetic oligonucleotide
  Target: SCNA; (-) strand; PAM type: NRG; PAM sequence: AAG
aaagaggaaactggccagca

SEQ ID NO: 25396 - DNA, 20 bp, Artificial Sequence
  Description of Artificial Sequence: Synthetic oligonucleotide
  Target: SCNA; (-) strand; PAM type: NRG; PAM sequence: CAG
aatcaaaagaggaaactggc

SEQ ID NO: 25397 - DNA, 20 bp, Artificial Sequence
  Description of Artificial Sequence: Synthetic oligonucleotide
  Target: SCNA; (-) strand; PAM type: NRG; PAM sequence: TGG
gcgcaatcaaaagaggaaac

SEQ ID NO: 25398 - DNA, 20 bp, Artificial Sequence
  Description of Artificial Sequence: Synthetic oligonucleotide
  Target: SCNA; (-) strand; PAM type: NRG; PAM sequence: AGG
cgaaaatgcgcaatcaaaag

SEQ ID NO: 25399 - DNA, 20 bp, Artificial Sequence
  Description of Artificial Sequence: Synthetic oligonucleotide
  Target: SCNA; (-) strand; PAM type: NRG; PAM sequence: GAG
acgaaaatgcgcaatcaaaa

SEQ ID NO: 25400 - DNA, 20 bp, Artificial Sequence
  Description of Artificial Sequence: Synthetic oligonucleotide
  Target: SCNA; (-) strand; PAM type: NRG; PAM sequence: AAG
tcacgaaaatgcgcaatcaa

SEQ ID NO: 25401 - DNA, 20 bp, Artificial Sequence
  Description of Artificial Sequence: Synthetic oligonucleotide
  Target: SCNA; (-) strand; PAM type: NRG; PAM sequence: GAG
ccacattgtctcccagtggt

SEQ ID NO: 25402 - DNA, 20 bp, Artificial Sequence
  Description of Artificial Sequence: Synthetic oligonucleotide
  Target: SCNA; (-) strand; PAM type: NRG; PAM sequence: TGG
gtggccacattgtctcccag

SEQ ID NO: 25403 - DNA, 20 bp, Artificial Sequence
  Description of Artificial Sequence: Synthetic oligonucleotide
  Target: SCNA; (-) strand; PAM type: NRG; PAM sequence: CAG
tgtgtggccacattgtctcc

SEQ ID NO: 25404 - DNA, 20 bp, Artificial Sequence
  Description of Artificial Sequence: Synthetic oligonucleotide
  Target: SCNA; (-) strand; PAM type: NRG; PAM sequence: TGG
cagcaatgcccggacttgtg

SEQ ID NO: 25405 - DNA, 20 bp, Artificial Sequence
  Description of Artificial Sequence: Synthetic oligonucleotide
  Target: SCNA; (-) strand; PAM type: NRG; PAM sequence: CGG
ttcatacagacagcaatgcc

SEQ ID NO: 25406 - DNA, 20 bp, Artificial Sequence
  Description of Artificial Sequence: Synthetic oligonucleotide
  Target: SCNA; (-) strand; PAM type: NRG; PAM sequence: CAG
tgttatgcagttcatacaga

SEQ ID NO: 25407 - DNA, 20 bp, Artificial Sequence
  Description of Artificial Sequence: Synthetic oligonucleotide
  Target: SCNA; (-) strand; PAM type: NRG; PAM sequence: CAG
catctgttatgcagttcata

SEQ ID NO: 25408 - DNA, 20 bp, Artificial Sequence
  Description of Artificial Sequence: Synthetic oligonucleotide
  Target: SCNA; (-) strand; PAM type: NRG; PAM sequence: CAG
gttgcttcacatctgttatg

SEQ ID NO: 25409 - DNA, 20 bp, Artificial Sequence
  Description of Artificial Sequence: Synthetic oligonucleotide
  Target: SCNA; (-) strand; PAM type: NRG; PAM sequence: TGG
tttcaaagctttttggagat

SEQ ID NO: 25410 - DNA, 20 bp, Artificial Sequence
  Description of Artificial Sequence: Synthetic oligonucleotide
  Target: SCNA; (-) strand; PAM type: NRG; PAM sequence: GAG
acttctttcaaagctttttg

SEQ ID NO: 25411 - DNA, 20 bp, Artificial Sequence
  Description of Artificial Sequence: Synthetic oligonucleotide
  Target: SCNA; (-) strand; PAM type: NRG; PAM sequence: TGG
gcacttctttcaaagctttt

SEQ ID NO: 25412 - DNA, 20 bp, Artificial Sequence
  Description of Artificial Sequence: Synthetic oligonucleotide
  Target: SCNA; (-) strand; PAM type: NRG; PAM sequence: AAG
aaaccacagcacttctttca

SEQ ID NO: 25413 - DNA, 20 bp, Artificial Sequence
  Description of Artificial Sequence: Synthetic oligonucleotide
  Target: SCNA; (-) strand; PAM type: NRG; PAM sequence: CAG
tataatcagtgacaaaacca

SEQ ID NO: 25414 - DNA, 20 bp, Artificial Sequence
  Description of Artificial Sequence: Synthetic oligonucleotide
  Target: SCNA; (-) strand; PAM type: NRG; PAM sequence: CAG
taacagaaacccattataat

SEQ ID NO: 25415 - DNA, 20 bp, Artificial Sequence
  Description of Artificial Sequence: Synthetic oligonucleotide
  Target: SCNA; (-) strand; PAM type: NRG; PAM sequence: CAG
tcaaatcattacataaataa

SEQ ID NO: 25416 - DNA, 20 bp, Artificial Sequence
  Description of Artificial Sequence: Synthetic oligonucleotide
  Target: SCNA; (-) strand; PAM type: NRG; PAM sequence: CAG
aaactttgctgctaactctt

SEQ ID NO: 25417 - DNA, 20 bp, Artificial Sequence
  Description of Artificial Sequence: Synthetic oligonucleotide
  Target: SCNA; (-) strand; PAM type: NRG; PAM sequence: AAG
ataccgaaagtcattgcata

SEQ ID NO: 25418 - DNA, 20 bp, Artificial Sequence
  Description of Artificial Sequence: Synthetic oligonucleotide
  Target: SCNA; (-) strand; PAM type: NRG; PAM sequence: AAG
ctgttaccacagtataccga

SEQ ID NO: 25419 - DNA, 20 bp, Artificial Sequence
  Description of Artificial Sequence: Synthetic oligonucleotide
  Target: SCNA; (-) strand; PAM type: NRG; PAM sequence: CAG
aattcaaatttctgttacca

SEQ ID NO: 25420 - DNA, 20 bp, Artificial Sequence
  Description of Artificial Sequence: Synthetic oligonucleotide
  Target: SCNA; (-) strand; PAM type: NRG; PAM sequence: CAG
tatggttagttaaataacac

SEQ ID NO: 25421 - DNA, 20 bp, Artificial Sequence
  Description of Artificial Sequence: Synthetic oligonucleotide
  Target: SCNA; (-) strand; PAM type: NRG; PAM sequence: TAG
caaattccaggtactatggt

SEQ ID NO: 25422 - DNA, 20 bp, Artificial Sequence
  Description of Artificial Sequence: Synthetic oligonucleotide
  Target: SCNA; (-) strand; PAM type: NRG; PAM sequence: TGG
caaacaaattccaggtacta

SEQ ID NO: 25423 - DNA, 20 bp, Artificial Sequence
  Description of Artificial Sequence: Synthetic oligonucleotide
  Target: SCNA; (-) strand; PAM type: NRG; PAM sequence: AGG
ttccagcacaaacaaattcc

SEQ ID NO: 25424 - DNA, 20 bp, Artificial Sequence
  Description of Artificial Sequence: Synthetic oligonucleotide
  Target: SCNA; (-) strand; PAM type: NRG; PAM sequence: CAG
gttccagcacaaacaaattc

SEQ ID NO: 25425 - DNA, 20 bp, Artificial Sequence
  Description of Artificial Sequence: Synthetic oligonucleotide
  Target: SCNA; (-) strand; PAM type: NRG; PAM sequence: CAG
gttctcactctgcatagttc

SEQ ID NO: 25426 - DNA, 20 bp, Artificial Sequence
  Description of Artificial Sequence: Synthetic oligonucleotide
  Target: SCNA; (-) strand; PAM type: NRG; PAM sequence: TAG
tcagctgttctcactctgca

SEQ ID NO: 25427 - DNA, 20 bp, Artificial Sequence
  Description of Artificial Sequence: Synthetic oligonucleotide
  Target: SCNA; (-) strand; PAM type: NRG; PAM sequence: CAG
aaacatattctcttaaatat

SEQ ID NO: 25428 - DNA, 20 bp, Artificial Sequence
  Description of Artificial Sequence: Synthetic oligonucleotide
  Target: SCNA; (-) strand; PAM type: NRG; PAM sequence: GAG
ggtggtgaggatgagagata

SEQ ID NO: 25429 - DNA, 20 bp, Artificial Sequence
  Description of Artificial Sequence: Synthetic oligonucleotide
  Target: SCNA; (-) strand; PAM type: NRG; PAM sequence: TAG
caggtggtgaggatgagaga

SEQ ID NO: 25430 - DNA, 20 bp, Artificial Sequence
  Description of Artificial Sequence: Synthetic oligonucleotide
  Target: SCNA; (-) strand; PAM type: NRG; PAM sequence: GAG
ggtgcaggtggtgaggatga

SEQ ID NO: 25431 - DNA, 20 bp, Artificial Sequence
  Description of Artificial Sequence: Synthetic oligonucleotide
  Target: SCNA; (-) strand; PAM type: NRG; PAM sequence: GAG
ggggtgcaggtggtgaggat

SEQ ID NO: 25432 - DNA, 20 bp, Artificial Sequence
  Description of Artificial Sequence: Synthetic oligonucleotide
  Target: SCNA; (-) strand; PAM type: NRG; PAM sequence: AGG
aacatggggtgcaggtggtg

SEQ ID NO: 25433 - DNA, 20 bp, Artificial Sequence
  Description of Artificial Sequence: Synthetic oligonucleotide
  Target: SCNA; (-) strand; PAM type: NRG; PAM sequence: GAG
caacatggggtgcaggtggt

SEQ ID NO: 25434 - DNA, 20 bp, Artificial Sequence
  Description of Artificial Sequence: Synthetic oligonucleotide
  Target: SCNA; (-) strand; PAM type: NRG; PAM sequence: TGG
aagacaacatggggtgcagg

SEQ ID NO: 25435 - DNA, 20 bp, Artificial Sequence
  Description of Artificial Sequence: Synthetic oligonucleotide
  Target: SCNA; (-) strand; PAM type: NRG; PAM sequence: AGG
tttaagacaacatggggtgc

SEQ ID NO: 25436 - DNA, 20 bp, Artificial Sequence
  Description of Artificial Sequence: Synthetic oligonucleotide
  Target: SCNA; (-) strand; PAM type: NRG; PAM sequence: CAG
ttttaagacaacatggggtg

SEQ ID NO: 25437 - DNA, 20 bp, Artificial Sequence
  Description of Artificial Sequence: Synthetic oligonucleotide
  Target: SCNA; (-) strand; PAM type: NRG; PAM sequence: GGG
gtcatttttaagacaacatg

SEQ ID NO: 25438 - DNA, 20 bp, Artificial Sequence
  Description of Artificial Sequence: Synthetic oligonucleotide
  Target: SCNA; (-) strand; PAM type: NRG; PAM sequence: GGG
agtcatttttaagacaacat

SEQ ID NO: 25439 - DNA, 20 bp, Artificial Sequence
  Description of Artificial Sequence: Synthetic oligonucleotide
  Target: SCNA; (-) strand; PAM type: NRG; PAM sequence: TGG
tagtcatttttaagacaaca

SEQ ID NO: 25440 - DNA, 20 bp, Artificial Sequence
  Description of Artificial Sequence: Synthetic oligonucleotide
  Target: SCNA; (-) strand; PAM type: NRG; PAM sequence: AAG
tcttactactagtcattttt

SEQ ID NO: 25441 - DNA, 20 bp, Artificial Sequence
  Description of Artificial Sequence: Synthetic oligonucleotide
  Target: SCNA; (-) strand; PAM type: NRG; PAM sequence: TAG
tgttagacatttcttactac

SEQ ID NO: 25442 - DNA, 20 bp, Artificial Sequence
  Description of Artificial Sequence: Synthetic oligonucleotide
  Target: SCNA; (-) strand; PAM type: NRG; PAM sequence: TAG
aaagatcgcattccagctgt

SEQ ID NO: 25443 - DNA, 20 bp, Artificial Sequence
  Description of Artificial Sequence: Synthetic oligonucleotide
  Target: SCNA; (-) strand; PAM type: NRG; PAM sequence: CAG
aaagaacaaagatcgcattc

SEQ ID NO: 25444 - DNA, 20 bp, Artificial Sequence
  Description of Artificial Sequence: Synthetic oligonucleotide
  Target: SCNA; (-) strand; PAM type: NRG; PAM sequence: AAG
tactgctaaggcaaagaaca

SEQ ID NO: 25445 - DNA, 20 bp, Artificial Sequence
  Description of Artificial Sequence: Synthetic oligonucleotide
  Target: SCNA; (-) strand; PAM type: NRG; PAM sequence: AAG
tcttaggtactgctaaggca

SEQ ID NO: 25446 - DNA, 20 bp, Artificial Sequence
  Description of Artificial Sequence: Synthetic oligonucleotide
  Target: SCNA; (-) strand; PAM type: NRG; PAM sequence: AGG
caaattcttaggtactgcta

SEQ ID NO: 25447 - DNA, 20 bp, Artificial Sequence
  Description of Artificial Sequence: Synthetic oligonucleotide
  Target: SCNA; (-) strand; PAM type: NRG; PAM sequence: AAG
tcaaattcttaggtactgct

SEQ ID NO: 25448 - DNA, 20 bp, Artificial Sequence
  Description of Artificial Sequence: Synthetic oligonucleotide
  Target: SCNA; (-) strand; PAM type: NRG; PAM sequence: AGG
taaccaaaggtcaaattctt

SEQ ID NO: 25449 - DNA, 20 bp, Artificial Sequence
  Description of Artificial Sequence: Synthetic oligonucleotide
  Target: SCNA; (-) strand; PAM type: NRG; PAM sequence: TAG
ttaaccaaaggtcaaattct

SEQ ID NO: 25450 - DNA, 20 bp, Artificial Sequence
  Description of Artificial Sequence: Synthetic oligonucleotide
  Target: SCNA; (-) strand; PAM type: NRG; PAM sequence: AGG
atgtttcataatttaaccaa

SEQ ID NO: 25451 - DNA, 20 bp, Artificial Sequence
  Description of Artificial Sequence: Synthetic oligonucleotide
  Target: SCNA; (-) strand; PAM type: NRG; PAM sequence: AAG
tatgtttcataatttaacca

SEQ ID NO: 25452 - DNA, 20 bp, Artificial Sequence
  Description of Artificial Sequence: Synthetic oligonucleotide
  Target: SCNA; (-) strand; PAM type: NRG; PAM sequence: TAG
ctatctcattgtctttgatt

SEQ ID NO: 25453 - DNA, 20 bp, Artificial Sequence
  Description of Artificial Sequence: Synthetic oligonucleotide
  Target: SCNA; (-) strand; PAM type: NRG; PAM sequence: CAG
cccctccctcttaccgttgt

SEQ ID NO: 25454 - DNA, 20 bp, Artificial Sequence
  Description of Artificial Sequence: Synthetic oligonucleotide
  Target: SCNA; (-) strand; PAM type: NRG; PAM sequence: TGG
tagaactcattcctcatatt

SEQ ID NO: 25455 - DNA, 20 bp, Artificial Sequence
  Description of Artificial Sequence: Synthetic oligonucleotide
  Target: SCNA; (-) strand; PAM type: NRG; PAM sequence: TAG
cctacagtactacagaatgc

SEQ ID NO: 25456 - DNA, 20 bp, Artificial Sequence
  Description of Artificial Sequence: Synthetic oligonucleotide
  Target: SCNA; (-) strand; PAM type: NRG; PAM sequence: CAG
tatatcaccctacagtacta

SEQ ID NO: 25457 - DNA, 20 bp, Artificial Sequence
  Description of Artificial Sequence: Synthetic oligonucleotide
  Target: SCNA; (-) strand; PAM type: NRG; PAM sequence: CAG
ttgttaagtatatcacccta

SEQ ID NO: 25458 - DNA, 20 bp, Artificial Sequence
  Description of Artificial Sequence: Synthetic oligonucleotide
  Target: SCNA; (-) strand; PAM type: NRG; PAM sequence: AAG
atatgcaataaactattgtt

SEQ ID NO: 25459 - DNA, 20 bp, Artificial Sequence
  Description of Artificial Sequence: Synthetic oligonucleotide
  Target: SCNA; (-) strand; PAM type: NRG; PAM sequence: TAG
aaattaaaaattctctcttc

SEQ ID NO: 25460 - DNA, 20 bp, Artificial Sequence
  Description of Artificial Sequence: Synthetic oligonucleotide
  Target: SCNA; (-) strand; PAM type: NRG; PAM sequence: CAG
tcattcctttgtggtgggaa

SEQ ID NO: 25461 - DNA, 20 bp, Artificial Sequence
  Description of Artificial Sequence: Synthetic oligonucleotide
  Target: SCNA; (-) strand; PAM type: NRG; PAM sequence: GGG
atttatcattcctttgtggt

SEQ ID NO: 25462 - DNA, 20 bp, Artificial Sequence
  Description of Artificial Sequence: Synthetic oligonucleotide
  Target: SCNA; (-) strand; PAM type: NRG; PAM sequence: TGG
catttatcattcctttgtgg

SEQ ID NO: 25463 - DNA, 20 bp, Artificial Sequence
  Description of Artificial Sequence: Synthetic oligonucleotide
  Target: SCNA; (-) strand; PAM type: NRG; PAM sequence: TGG
aaacatttatcattcctttg

SEQ ID NO: 25464 - DNA, 20 bp, Artificial Sequence
  Description of Artificial Sequence: Synthetic oligonucleotide
  Target: SCNA; (-) strand; PAM type: NRG; PAM sequence: GGG
aatgtgtgataatcaaatta

SEQ ID NO: 25465 - DNA, 20 bp, Artificial Sequence
  Description of Artificial Sequence: Synthetic oligonucleotide
  Target: SCNA; (-) strand; PAM type: NRG; PAM sequence: AGG
caatgtgtgataatcaaatt

SEQ ID NO: 25466 - DNA, 20 bp, Artificial Sequence
  Description of Artificial Sequence: Synthetic oligonucleotide
  Target: SCNA; (-) strand; PAM type: NRG; PAM sequence: TAG
acaatgtgtgataatcaaat

SEQ ID NO: 25467 - DNA, 20 bp, Artificial Sequence
  Description of Artificial Sequence: Synthetic oligonucleotide
  Target: SCNA; (-) strand; PAM type: NRG; PAM sequence: CAG
ttgtatataattgtgggatc

SEQ ID NO: 25468 - DNA, 20 bp, Artificial Sequence
  Description of Artificial Sequence: Synthetic oligonucleotide
  Target: SCNA; (-) strand; PAM type: NRG; PAM sequence: GGG
taataattgtatataattgt

SEQ ID NO: 25469 - DNA, 20 bp, Artificial Sequence
  Description of Artificial Sequence: Synthetic oligonucleotide
  Target: SCNA; (-) strand; PAM type: NRG; PAM sequence: TGG
gtaataattgtatataattg

SEQ ID NO: 25470 - DNA, 20 bp, Artificial Sequence
  Description of Artificial Sequence: Synthetic oligonucleotide
  Target: SCNA; (-) strand; PAM type: NRG; PAM sequence: TAG
tttaatttttcttttatttt

SEQ ID NO: 25471 - DNA, 20 bp, Artificial Sequence
  Description of Artificial Sequence: Synthetic oligonucleotide
  Target: SCNA; (-) strand; PAM type: NRG; PAM sequence: GGG
cacccagaagagggattgct

SEQ ID NO: 25472 - DNA, 20 bp, Artificial Sequence
  Description of Artificial Sequence: Synthetic oligonucleotide
  Target: SCNA; (-) strand; PAM type: NRG; PAM sequence: TGG
acacccagaagagggattgc

SEQ ID NO: 25473 - DNA, 20 bp, Artificial Sequence
  Description of Artificial Sequence: Synthetic oligonucleotide
  Target: SCNA; (-) strand; PAM type: NRG; PAM sequence: GGG
gtggatctacacccagaaga

SEQ ID NO: 25474 - DNA, 20 bp, Artificial Sequence
  Description of Artificial Sequence: Synthetic oligonucleotide
  Target: SCNA; (-) strand; PAM type: NRG; PAM sequence: AGG
tgtggatctacacccagaag

SEQ ID NO: 25475 - DNA, 20 bp, Artificial Sequence
  Description of Artificial Sequence: Synthetic oligonucleotide
  Target: SCNA; (-) strand; PAM type: NRG; PAM sequence: GAG
ttgtggatctacacccagaa

SEQ ID NO: 25476 - DNA, 20 bp, Artificial Sequence
  Description of Artificial Sequence: Synthetic oligonucleotide
  Target: SCNA; (-) strand; PAM type: NRG; PAM sequence: AAG
tcttgtggatctacacccag

SEQ ID NO: 25477 - DNA, 20 bp, Artificial Sequence
  Description of Artificial Sequence: Synthetic oligonucleotide
  Target: SCNA; (-) strand; PAM type: NRG; PAM sequence: CAG
ttttcttgtggatctacacc

SEQ ID NO: 25478 - DNA, 20 bp, Artificial Sequence
  Description of Artificial Sequence: Synthetic oligonucleotide
  Target: SCNA; (-) strand; PAM type: NRG; PAM sequence: TGG
tatgctgaaatcttttcttg

SEQ ID NO: 25479 - DNA, 20 bp, Artificial Sequence
  Description of Artificial Sequence: Synthetic oligonucleotide
  Target: SCNA; (-) strand; PAM type: NRG; PAM sequence: CAG
tgtgttggggcccttggaaa

SEQ ID NO: 25480 - DNA, 20 bp, Artificial Sequence
  Description of Artificial Sequence: Synthetic oligonucleotide
  Target: SCNA; (-) strand; PAM type: NRG; PAM sequence: TGG
agccactgtgttggggccct

SEQ ID NO: 25481 - DNA, 20 bp, Artificial Sequence
  Description of Artificial Sequence: Synthetic oligonucleotide
  Target: SCNA; (-) strand; PAM type: NRG; PAM sequence: GGG
aagcaagagccactgtgttg

SEQ ID NO: 25482 - DNA, 20 bp, Artificial Sequence
  Description of Artificial Sequence: Synthetic oligonucleotide
  Target: SCNA; (-) strand; PAM type: NRG; PAM sequence: GGG
caagcaagagccactgtgtt

SEQ ID NO: 25483 - DNA, 20 bp, Artificial Sequence
  Description of Artificial Sequence: Synthetic oligonucleotide
  Target: SCNA; (-) strand; PAM type: NRG; PAM sequence: TGG
ccaagcaagagccactgtgt

SEQ ID NO: 25484 - DNA, 20 bp, Artificial Sequence
  Description of Artificial Sequence: Synthetic oligonucleotide
  Target: SCNA; (-) strand; PAM type: NRG; PAM sequence: GAG
agcactgggattccaagcaa

SEQ ID NO: 25485 - DNA, 20 bp, Artificial Sequence
  Description of Artificial Sequence: Synthetic oligonucleotide
  Target: SCNA; (-) strand; PAM type: NRG; PAM sequence: AAG
aaagcactgggattccaagc

SEQ ID NO: 25486 - DNA, 20 bp, Artificial Sequence
  Description of Artificial Sequence: Synthetic oligonucleotide
  Target: SCNA; (-) strand; PAM type: NRG; PAM sequence: AAG
tcccaaagcactgggattcc

SEQ ID NO: 25487 - DNA, 20 bp, Artificial Sequence
  Description of Artificial Sequence: Synthetic oligonucleotide
  Target: SCNA; (-) strand; PAM type: NRG; PAM sequence: GGG
cctcagcctcccaaagcact

SEQ ID NO: 25488 - DNA, 20 bp, Artificial Sequence
  Description of Artificial Sequence: Synthetic oligonucleotide
  Target: SCNA; (-) strand; PAM type: NRG; PAM sequence: TGG
gcctcagcctcccaaagcac

SEQ ID NO: 25489 - DNA, 20 bp, Artificial Sequence
  Description of Artificial Sequence: Synthetic oligonucleotide
  Target: SCNA; (-) strand; PAM type: NRG; PAM sequence: AAG
cttcctgcctcagcctccca

SEQ ID NO: 25490 - DNA, 20 bp, Artificial Sequence
  Description of Artificial Sequence: Synthetic oligonucleotide
  Target: SCNA; (-) strand; PAM type: NRG; PAM sequence: CAG
tataagtgatcttcctgcct

SEQ ID NO: 25491 - DNA, 20 bp, Artificial Sequence
  Description of Artificial Sequence: Synthetic oligonucleotide
  Target: SCNA; (-) strand; PAM type: NRG; PAM sequence: AAG
aaaattccttatatagttat

SEQ ID NO: 25492 - DNA, 20 bp, Artificial Sequence
  Description of Artificial Sequence: Synthetic oligonucleotide
  Target: SCNA; (-) strand; PAM type: NRG; PAM sequence: TAG
tgtttttaaaattccttata

SEQ ID NO: 25493 - DNA, 20 bp, Artificial Sequence
  Description of Artificial Sequence: Synthetic oligonucleotide
  Target: SCNA; (-) strand; PAM type: NRG; PAM sequence: TAG
aaataaataaatattagttt

SEQ ID NO: 25494 - DNA, 20 bp, Artificial Sequence
  Description of Artificial Sequence: Synthetic oligonucleotide
  Target: SCNA; (-) strand; PAM type: NRG; PAM sequence: TAG
tttgctaaataaataaatat

SEQ ID NO: 25495 - DNA, 20 bp, Artificial Sequence
  Description of Artificial Sequence: Synthetic oligonucleotide
  Target: SCNA; (-) strand; PAM type: NRG; PAM sequence: TGG
atttctaatgttttaaattc

SEQ ID NO: 25496 - DNA, 20 bp, Artificial Sequence
  Description of Artificial Sequence: Synthetic oligonucleotide
  Target: SCNA; (-) strand; PAM type: NRG; PAM sequence: AAG
ctcttgataagttttttaca

SEQ ID NO: 25497 - DNA, 20 bp, Artificial Sequence
  Description of Artificial Sequence: Synthetic oligonucleotide
  Target: SCNA; (-) strand; PAM type: NRG; PAM sequence: AAG
ctatttacattactcttgat

SEQ ID NO: 25498 - DNA, 20 bp, Artificial Sequence
  Description of Artificial Sequence: Synthetic oligonucleotide
  Target: SCNA; (-) strand; PAM type: NRG; PAM sequence: AAG
ggaagttatacaatgagaag

SEQ ID NO: 25499 - DNA, 20 bp, Artificial Sequence
  Description of Artificial Sequence: Synthetic oligonucleotide
  Target: SCNA; (-) strand; PAM type: NRG; PAM sequence: AAG
ataggaagttatacaatgag

SEQ ID NO: 25500 - DNA, 20 bp, Artificial Sequence
  Description of Artificial Sequence: Synthetic oligonucleotide
  Target: SCNA; (-) strand; PAM type: NRG; PAM sequence: GAG
cgtataggaagttatacaat

SEQ ID NO: 25501 - DNA, 20 bp, Artificial Sequence
  Description of Artificial Sequence: Synthetic oligonucleotide
  Target: SCNA; (-) strand; PAM type: NRG; PAM sequence: AAG
acatgtccactccgtatagg

SEQ ID NO: 25502 - DNA, 20 bp, Artificial Sequence
  Description of Artificial Sequence: Synthetic oligonucleotide
  Target: SCNA; (-) strand; PAM type: NRG; PAM sequence: AGG
aaaacatgtccactccgtat

SEQ ID NO: 25503 - DNA, 20 bp, Artificial Sequence
  Description of Artificial Sequence: Synthetic oligonucleotide
  Target: SCNA; (-) strand; PAM type: NRG; PAM sequence: TAG
aaaaacatgtccactccgta

SEQ ID NO: 25504 - DNA, 20 bp, Artificial Sequence
  Description of Artificial Sequence: Synthetic oligonucleotide
  Target: SCNA; (-) strand; PAM type: NRG; PAM sequence: GAG
cctaattcaaatttagaata

SEQ ID NO: 25505 - DNA, 20 bp, Artificial Sequence
  Description of Artificial Sequence: Synthetic oligonucleotide
  Target: SCNA; (-) strand; PAM type: NRG; PAM sequence: TAG
ctcctaattcaaatttagaa

SEQ ID NO: 25506 - DNA, 20 bp, Artificial Sequence
  Description of Artificial Sequence: Synthetic oligonucleotide
  Target: SCNA; (-) strand; PAM type: NRG; PAM sequence: TAG
tcaaactcctaattcaaatt

SEQ ID NO: 25507 - DNA, 20 bp, Artificial Sequence
  Description of Artificial Sequence: Synthetic oligonucleotide
  Target: SCNA; (-) strand; PAM type: NRG; PAM sequence: TGG
tctcactctgttgcccagac

SEQ ID NO: 25508 - DNA, 20 bp, Artificial Sequence
  Description of Artificial Sequence: Synthetic oligonucleotide
  Target: SCNA; (-) strand; PAM type: NRG; PAM sequence: CAG
tagcatctcactctgttgcc

SEQ ID NO: 25509 - DNA, 20 bp, Artificial Sequence
  Description of Artificial Sequence: Synthetic oligonucleotide
  Target: SCNA; (-) strand; PAM type: NRG; PAM sequence: TAG
tttaatattttttgtagata

SEQ ID NO: 25510 - DNA, 20 bp, Artificial Sequence
  Description of Artificial Sequence: Synthetic oligonucleotide
  Target: SCNA; (-) strand; PAM type: NRG; PAM sequence: TAG
ctaatttttaatattttttg

SEQ ID NO: 25511 - DNA, 20 bp, Artificial Sequence
  Description of Artificial Sequence: Synthetic oligonucleotide
  Target: SCNA; (-) strand; PAM type: NRG; PAM sequence: TGG
caggcatacattaccatgcc

SEQ ID NO: 25512 - DNA, 20 bp, Artificial Sequence
  Description of Artificial Sequence: Synthetic oligonucleotide
  Target: SCNA; (-) strand; PAM type: NRG; PAM sequence: AGG
tcccaagtagctgagactac

SEQ ID NO: 25513 - DNA, 20 bp, Artificial Sequence
  Description of Artificial Sequence: Synthetic oligonucleotide
  Target: SCNA; (-) strand; PAM type: NRG; PAM sequence: CAG
ctcccaagtagctgagacta

SEQ ID NO: 25514 - DNA, 20 bp, Artificial Sequence
  Description of Artificial Sequence: Synthetic oligonucleotide
  Target: SCNA; (-) strand; PAM type: NRG; PAM sequence: GAG
ccttggcctcccaagtagct

SEQ ID NO: 25515 - DNA, 20 bp, Artificial Sequence
  Description of Artificial Sequence: Synthetic oligonucleotide
  Target: SCNA; (-) strand; PAM type: NRG; PAM sequence: TAG
tcctgccttggcctcccaag

SEQ ID NO: 25516 - DNA, 20 bp, Artificial Sequence
  Description of Artificial Sequence: Synthetic oligonucleotide
  Target: SCNA; (-) strand; PAM type: NRG; PAM sequence: AAG
tcctcctgccttggcctccc

SEQ ID NO: 25517 - DNA, 20 bp, Artificial Sequence
  Description of Artificial Sequence: Synthetic oligonucleotide
  Target: SCNA; (-) strand; PAM type: NRG; PAM sequence: TGG
ctcaagagatcctcctgcct

SEQ ID NO: 25518 - DNA, 20 bp, Artificial Sequence
  Description of Artificial Sequence: Synthetic oligonucleotide
  Target: SCNA; (-) strand; PAM type: NRG; PAM sequence: GAG
cctcaaacttctgggctcaa

SEQ ID NO: 25519 - DNA, 20 bp, Artificial Sequence
  Description of Artificial Sequence: Synthetic oligonucleotide
  Target: SCNA; (-) strand; PAM type: NRG; PAM sequence: AAG
aacctcaaacttctgggctc

SEQ ID NO: 25520 - DNA, 20 bp, Artificial Sequence
  Description of Artificial Sequence: Synthetic oligonucleotide
  Target: SCNA; (-) strand; PAM type: NRG; PAM sequence: GGG
cactgtaacctcaaacttct

SEQ ID NO: 25521 - DNA, 20 bp, Artificial Sequence
  Description of Artificial Sequence: Synthetic oligonucleotide
  Target: SCNA; (-) strand; PAM type: NRG; PAM sequence: TGG
tcactgtaacctcaaacttc

SEQ ID NO: 25522 - DNA, 20 bp, Artificial Sequence
  Description of Artificial Sequence: Synthetic oligonucleotide
  Target: SCNA; (-) strand; PAM type: NRG; PAM sequence: TAG
gcaatggagtggtgttatca

SEQ ID NO: 25523 - DNA, 20 bp, Artificial Sequence
  Description of Artificial Sequence: Synthetic oligonucleotide
  Target: SCNA; (-) strand; PAM type: NRG; PAM sequence: TGG
tcacccaggctgcaatggag

SEQ ID NO: 25524 - DNA, 20 bp, Artificial Sequence
  Description of Artificial Sequence: Synthetic oligonucleotide
  Target: SCNA; (-) strand; PAM type: NRG; PAM sequence: GAG
ctgtcacccaggctgcaatg

SEQ ID NO: 25525 - DNA, 20 bp, Artificial Sequence
  Description of Artificial Sequence: Synthetic oligonucleotide
  Target: SCNA; (-) strand; PAM type: NRG; PAM sequence: TGG
tgctgtcacccaggctgcaa

SEQ ID NO: 25526 - DNA, 20 bp, Artificial Sequence
  Description of Artificial Sequence: Synthetic oligonucleotide
  Target: SCNA; (-) strand; PAM type: NRG; PAM sequence: AGG
acagggtcttgctgtcaccc

SEQ ID NO: 25527 - DNA, 20 bp, Artificial Sequence
  Description of Artificial Sequence: Synthetic oligonucleotide
  Target: SCNA; (-) strand; PAM type: NRG; PAM sequence: CAG
gacagggtcttgctgtcacc

SEQ ID NO: 25528 - DNA, 20 bp, Artificial Sequence
  Description of Artificial Sequence: Synthetic oligonucleotide
  Target: SCNA; (-) strand; PAM type: NRG; PAM sequence: GGG
ttttttcttttttggagaca

SEQ ID NO: 25529 - DNA, 20 bp, Artificial Sequence
  Description of Artificial Sequence: Synthetic oligonucleotide
  Target: SCNA; (-) strand; PAM type: NRG; PAM sequence: AGG
tttttttcttttttggagac

SEQ ID NO: 25530 - DNA, 20 bp, Artificial Sequence
  Description of Artificial Sequence: Synthetic oligonucleotide
  Target: SCNA; (-) strand; PAM type: NRG; PAM sequence: CAG
ctttttttcttttttggaga

SEQ ID NO: 25531 - DNA, 20 bp, Artificial Sequence
  Description of Artificial Sequence: Synthetic oligonucleotide
  Target: SCNA; (-) strand; PAM type: NRG; PAM sequence: GAG
ttttctttttttcttttttg

SEQ ID NO: 25532 - DNA, 20 bp, Artificial Sequence
  Description of Artificial Sequence: Synthetic oligonucleotide
  Target: SCNA; (-) strand; PAM type: NRG; PAM sequence: TGG
gtttttctttttttcttttt

SEQ ID NO: 25533 - DNA, 20 bp, Artificial Sequence
  Description of Artificial Sequence: Synthetic oligonucleotide
  Target: SCNA; (-) strand; PAM type: NRG; PAM sequence: TGG
atcagtagacactttagttg

SEQ ID NO: 25534 - DNA, 20 bp, Artificial Sequence
  Description of Artificial Sequence: Synthetic oligonucleotide
  Target: SCNA; (-) strand; PAM type: NRG; PAM sequence: TAG
ctatctatcagtagacactt

SEQ ID NO: 25535 - DNA, 20 bp, Artificial Sequence
  Description of Artificial Sequence: Synthetic oligonucleotide
  Target: SCNA; (-) strand; PAM type: NRG; PAM sequence: TAG
tttatctacctatctatcag

SEQ ID NO: 25536 - DNA, 20 bp, Artificial Sequence
  Description of Artificial Sequence: Synthetic oligonucleotide
  Target: SCNA; (-) strand; PAM type: NRG; PAM sequence: CAG
ctttttatctacctatctat

SEQ ID NO: 25537 - DNA, 20 bp, Artificial Sequence
  Description of Artificial Sequence: Synthetic oligonucleotide
  Target: SCNA; (-) strand; PAM type: NRG; PAM sequence: GGG
ggtaggatcttgttttttta

SEQ ID NO: 25538 - DNA, 20 bp, Artificial Sequence
  Description of Artificial Sequence: Synthetic oligonucleotide
  Target: SCNA; (-) strand; PAM type: NRG; PAM sequence: AGG
tggtaggatcttgttttttt

SEQ ID NO: 25539 - DNA, 20 bp, Artificial Sequence
  Description of Artificial Sequence: Synthetic oligonucleotide
  Target: SCNA; (-) strand; PAM type: NRG; PAM sequence: TAG
atggtaggatcttgtttttt

SEQ ID NO: 25540 - DNA, 20 bp, Artificial Sequence
  Description of Artificial Sequence: Synthetic oligonucleotide
  Target: SCNA; (-) strand; PAM type: NRG; PAM sequence: AGG
tcatccatgttgtaaatggt

SEQ ID NO: 25541 - DNA, 20 bp, Artificial Sequence
  Description of Artificial Sequence: Synthetic oligonucleotide
  Target: SCNA; (-) strand; PAM type: NRG; PAM sequence: TAG
ttcatccatgttgtaaatgg

SEQ ID NO: 25542 - DNA, 20 bp, Artificial Sequence
  Description of Artificial Sequence: Synthetic oligonucleotide
  Target: SCNA; (-) strand; PAM type: NRG; PAM sequence: TGG
gggttcatccatgttgtaaa

SEQ ID NO: 25543 - DNA, 20 bp, Artificial Sequence
  Description of Artificial Sequence: Synthetic oligonucleotide
  Target: SCNA; (-) strand; PAM type: NRG; PAM sequence: GGG
cacttagcataattttgtct

SEQ ID NO: 25544 - DNA, 20 bp, Artificial Sequence
  Description of Artificial Sequence: Synthetic oligonucleotide
  Target: SCNA; (-) strand; PAM type: NRG; PAM sequence: TGG
tcacttagcataattttgtc

SEQ ID NO: 25545 - DNA, 20 bp, Artificial Sequence
  Description of Artificial Sequence: Synthetic oligonucleotide
  Target: SCNA; (-) strand; PAM type: NRG; PAM sequence: TAG
tgtgtttggcttatttcact

SEQ ID NO: 25546 - DNA, 20 bp, Artificial Sequence
  Description of Artificial Sequence: Synthetic oligonucleotide
  Target: SCNA; (-) strand; PAM type: NRG; PAM sequence: TGG
aatatttttctttctgtgtt

SEQ ID NO: 25547 - DNA, 20 bp, Artificial Sequence
  Description of Artificial Sequence: Synthetic oligonucleotide
  Target: SCNA; (-) strand; PAM type: NRG; PAM sequence: GAG
tcaagcttccacatatatgt

SEQ ID NO: 25548 - DNA, 20 bp, Artificial Sequence
  Description of Artificial Sequence: Synthetic oligonucleotide
  Target: SCNA; (-) strand; PAM type: NRG; PAM sequence: AAG
gtatatttgaattttgtttc

SEQ ID NO: 25549 - DNA, 20 bp, Artificial Sequence
  Description of Artificial Sequence: Synthetic oligonucleotide
  Target: SCNA; (-) strand; PAM type: NRG; PAM sequence: TAG
tattaaccctgttttttacg

SEQ ID NO: 25550 - DNA, 20 bp, Artificial Sequence
  Description of Artificial Sequence: Synthetic oligonucleotide
  Target: SCNA; (-) strand; PAM type: NRG; PAM sequence: TGG
tgctacttgcttggatccta

SEQ ID NO: 25551 - DNA, 20 bp, Artificial Sequence
  Description of Artificial Sequence: Synthetic oligonucleotide
  Target: SCNA; (-) strand; PAM type: NRG; PAM sequence: TGG
ttacacatctgctacttgct

SEQ ID NO: 25552 - DNA, 20 bp, Artificial Sequence
  Description of Artificial Sequence: Synthetic oligonucleotide
  Target: SCNA; (-) strand; PAM type: NRG; PAM sequence: TAG
cacctacagtcctcatacat

SEQ ID NO: 25553 - DNA, 20 bp, Artificial Sequence
  Description of Artificial Sequence: Synthetic oligonucleotide
  Target: SCNA; (-) strand; PAM type: NRG; PAM sequence: CAG
tagtacaattttatcaccta

SEQ ID NO: 25554 - DNA, 20 bp, Artificial Sequence
  Description of Artificial Sequence: Synthetic oligonucleotide
  Target: SCNA; (-) strand; PAM type: NRG; PAM sequence: TAG
tttatcatgaatctcaaata

SEQ ID NO: 25555 - DNA, 20 bp, Artificial Sequence
  Description of Artificial Sequence: Synthetic oligonucleotide
  Target: SCNA; (-) strand; PAM type: NRG; PAM sequence: CAG
tgttgtttttgtggcaaggg

SEQ ID NO: 25556 - DNA, 20 bp, Artificial Sequence
  Description of Artificial Sequence: Synthetic oligonucleotide
  Target: SCNA; (-) strand; PAM type: NRG; PAM sequence: GGG
ttttgttgtttttgtggcaa

SEQ ID NO: 25557 - DNA, 20 bp, Artificial Sequence
  Description of Artificial Sequence: Synthetic oligonucleotide
  Target: SCNA; (-) strand; PAM type: NRG; PAM sequence: AGG
tttttgttgtttttgtggca

SEQ ID NO: 25558 - DNA, 20 bp, Artificial Sequence
  Description of Artificial Sequence: Synthetic oligonucleotide
  Target: SCNA; (-) strand; PAM type: NRG; PAM sequence: AAG
ttttttgttgtttttgtggc

SEQ ID NO: 25559 - DNA, 20 bp, Artificial Sequence
  Description of Artificial Sequence: Synthetic oligonucleotide
  Target: SCNA; (-) strand; PAM type: NRG; PAM sequence: TGG
taccttttttgttgtttttg

SEQ ID NO: 25560 - DNA, 20 bp, Artificial Sequence
  Description of Artificial Sequence: Synthetic oligonucleotide
  Target: SCNA; (-) strand; PAM type: NRG; PAM sequence: TAG
aatatattcataatctctca

SEQ ID NO: 25561 - DNA, 20 bp, Artificial Sequence
  Description of Artificial Sequence: Synthetic oligonucleotide
  Target: SCNA; (-) strand; PAM type: NRG; PAM sequence: AAG
actaaaaaattactatattg

SEQ ID NO: 25562 - DNA, 20 bp, Artificial Sequence
  Description of Artificial Sequence: Synthetic oligonucleotide
  Target: SCNA; (-) strand; PAM type: NRG; PAM sequence: TAG
catgatgctatcagatacat

SEQ ID NO: 25563 - DNA, 20 bp, Artificial Sequence
  Description of Artificial Sequence: Synthetic oligonucleotide
  Target: SCNA; (-) strand; PAM type: NRG; PAM sequence: CAG
ggtatgcaacatgatgctat

SEQ ID NO: 25564 - DNA, 20 bp, Artificial Sequence
  Description of Artificial Sequence: Synthetic oligonucleotide
  Target: SCNA; (-) strand; PAM type: NRG; PAM sequence: GGG
aatttaattgtgtatattta

SEQ ID NO: 25565 - DNA, 20 bp, Artificial Sequence
  Description of Artificial Sequence: Synthetic oligonucleotide
  Target: SCNA; (-) strand; PAM type: NRG; PAM sequence: AGG
aaatttaattgtgtatattt

SEQ ID NO: 25566 - DNA, 20 bp, Artificial Sequence
  Description of Artificial Sequence: Synthetic oligonucleotide
  Target: SCNA; (-) strand; PAM type: NRG; PAM sequence: TAG
taaatttaattgtgtatatt

SEQ ID NO: 25567 - DNA, 20 bp, Artificial Sequence
  Description of Artificial Sequence: Synthetic oligonucleotide
  Target: SCNA; (-) strand; PAM type: NRG; PAM sequence: TGG
agccattgcacccggcctag

SEQ ID NO: 25568 - DNA, 20 bp, Artificial Sequence
  Description of Artificial Sequence: Synthetic oligonucleotide
  Target: SCNA; (-) strand; PAM type: NRG; PAM sequence: TAG
gtgagccattgcacccggcc

SEQ ID NO: 25569 - DNA, 20 bp, Artificial Sequence
  Description of Artificial Sequence: Synthetic oligonucleotide
  Target: SCNA; (-) strand; PAM type: NRG; PAM sequence: CGG
caggcgtgagccattgcacc

SEQ ID NO: 25570 - DNA, 20 bp, Artificial Sequence
  Description of Artificial Sequence: Synthetic oligonucleotide
  Target: SCNA; (-) strand; PAM type: NRG; PAM sequence: GAG
aatgctgggattacaggcgt

SEQ ID NO: 25571 - DNA, 20 bp, Artificial Sequence
  Description of Artificial Sequence: Synthetic oligonucleotide
  Target: SCNA; (-) strand; PAM type: NRG; PAM sequence: AGG
tcccaaaatgctgggattac

SEQ ID NO: 25572 - DNA, 20 bp, Artificial Sequence
  Description of Artificial Sequence: Synthetic oligonucleotide
  Target: SCNA; (-) strand; PAM type: NRG; PAM sequence: CAG
ctcccaaaatgctgggatta

SEQ ID NO: 25573 - DNA, 20 bp, Artificial Sequence
  Description of Artificial Sequence: Synthetic oligonucleotide
  Target: SCNA; (-) strand; PAM type: NRG; PAM sequence: GGG
cctcggcctcccaaaatgct

SEQ ID NO: 25574 - DNA, 20 bp, Artificial Sequence
  Description of Artificial Sequence: Synthetic oligonucleotide
  Target: SCNA; (-) strand; PAM type: NRG; PAM sequence: TGG
acctcggcctcccaaaatgc

SEQ ID NO: 25575 - DNA, 20 bp, Artificial Sequence
  Description of Artificial Sequence: Synthetic oligonucleotide
  Target: SCNA; (-) strand; PAM type: NRG; PAM sequence: CGG
gatctcatcatccccgacct

SEQ ID NO: 25576 - DNA, 20 bp, Artificial Sequence
  Description of Artificial Sequence: Synthetic oligonucleotide
  Target: SCNA; (-) strand; PAM type: NRG; PAM sequence: TGG
tttcaccatgttagccagga

SEQ ID NO: 25577 - DNA, 20 bp, Artificial Sequence
  Description of Artificial Sequence: Synthetic oligonucleotide
  Target: SCNA; (-) strand; PAM type: NRG; PAM sequence: AGG
ggggtttcaccatgttagcc

SEQ ID NO: 25578 - DNA, 20 bp, Artificial Sequence
  Description of Artificial Sequence: Synthetic oligonucleotide
  Target: SCNA; (-) strand; PAM type: NRG; PAM sequence: CAG
tggggtttcaccatgttagc

SEQ ID NO: 25579 - DNA, 20 bp, Artificial Sequence
  Description of Artificial Sequence: Synthetic oligonucleotide
  Target: SCNA; (-) strand; PAM type: NRG; PAM sequence: TAG
gagatggggtttcaccatgt

SEQ ID NO: 25580 - DNA, 20 bp, Artificial Sequence
  Description of Artificial Sequence: Synthetic oligonucleotide
  Target: SCNA; (-) strand; PAM type: NRG; PAM sequence: GGG
ttgtatttttagtagagatg

SEQ ID NO: 25581 - DNA, 20 bp, Artificial Sequence
  Description of Artificial Sequence: Synthetic oligonucleotide
  Target: SCNA; (-) strand; PAM type: NRG; PAM sequence: GGG
tttgtatttttagtagagat

SEQ ID NO: 25582 - DNA, 20 bp, Artificial Sequence
  Description of Artificial Sequence: Synthetic oligonucleotide
  Target: SCNA; (-) strand; PAM type: NRG; PAM sequence: TGG
ttttgtatttttagtagaga

SEQ ID NO: 25583 - DNA, 20 bp, Artificial Sequence
  Description of Artificial Sequence: Synthetic oligonucleotide
  Target: SCNA; (-) strand; PAM type: NRG; PAM sequence: GAG
taatttttgtatttttagta

SEQ ID NO: 25584 - DNA, 20 bp, Artificial Sequence
  Description of Artificial Sequence: Synthetic oligonucleotide
  Target: SCNA; (-) strand; PAM type: NRG; PAM sequence: TAG
gctaatttttgtatttttag

SEQ ID NO: 25585 - DNA, 20 bp, Artificial Sequence
  Description of Artificial Sequence: Synthetic oligonucleotide
  Target: SCNA; (-) strand; PAM type: NRG; PAM sequence: TAG
ccggctaatttttgtatttt

SEQ ID NO: 25586 - DNA, 20 bp, Artificial Sequence
  Description of Artificial Sequence: Synthetic oligonucleotide
  Target: SCNA; (-) strand; PAM type: NRG; PAM sequence: CGG
caggcatgcaccaccatgcc

SEQ ID NO: 25587 - DNA, 20 bp, Artificial Sequence
  Description of Artificial Sequence: Synthetic oligonucleotide
  Target: SCNA; (-) strand; PAM type: NRG; PAM sequence: AGG
tcctgagtagctgaaattac

SEQ ID NO: 25588 - DNA, 20 bp, Artificial Sequence
  Description of Artificial Sequence: Synthetic oligonucleotide
  Target: SCNA; (-) strand; PAM type: NRG; PAM sequence: CAG
ctcctgagtagctgaaatta

SEQ ID NO: 25589 - DNA, 20 bp, Artificial Sequence
  Description of Artificial Sequence: Synthetic oligonucleotide
  Target: SCNA; (-) strand; PAM type: NRG; PAM sequence: TAG
tcctgactcagcctcctgag

SEQ ID NO: 25590 - DNA, 20 bp, Artificial Sequence
  Description of Artificial Sequence: Synthetic oligonucleotide
  Target: SCNA; (-) strand; PAM type: NRG; PAM sequence: GAG
ttctcctgactcagcctcct

SEQ ID NO: 25591 - DNA, 20 bp, Artificial Sequence
  Description of Artificial Sequence: Synthetic oligonucleotide
  Target: SCNA; (-) strand; PAM type: NRG; PAM sequence: CAG
ttcaagttattctcctgact

SEQ ID NO: 25592 - DNA, 20 bp, Artificial Sequence
  Description of Artificial Sequence: Synthetic oligonucleotide
  Target: SCNA; (-) strand; PAM type: NRG; PAM sequence: AAG
aacctccgcctcctgggttc

SEQ ID NO: 25593 - DNA, 20 bp, Artificial Sequence
  Description of Artificial Sequence: Synthetic oligonucleotide
  Target: SCNA; (-) strand; PAM type: NRG; PAM sequence: GGG
cactgcaacctccgcctcct

SEQ ID NO: 25594 - DNA, 20 bp, Artificial Sequence
  Description of Artificial Sequence: Synthetic oligonucleotide
  Target: SCNA; (-) strand; PAM type: NRG; PAM sequence: TGG
tcactgcaacctccgcctcc

SEQ ID NO: 25595 - DNA, 20 bp, Artificial Sequence
  Description of Artificial Sequence: Synthetic oligonucleotide
  Target: SCNA; (-) strand; PAM type: NRG; PAM sequence: CGG
gaagtgcagtggtgtgatct

SEQ ID NO: 25596 - DNA, 20 bp, Artificial Sequence
  Description of Artificial Sequence: Synthetic oligonucleotide
  Target: SCNA; (-) strand; PAM type: NRG; PAM sequence: TGG
cactccaggctgaagtgcag

SEQ ID NO: 25597 - DNA, 20 bp, Artificial Sequence
  Description of Artificial Sequence: Synthetic oligonucleotide
  Target: SCNA; (-) strand; PAM type: NRG; PAM sequence: CAG
tttcactccaggctgaagtg

SEQ ID NO: 25598 - DNA, 20 bp, Artificial Sequence
  Description of Artificial Sequence: Synthetic oligonucleotide
  Target: SCNA; (-) strand; PAM type: NRG; PAM sequence: AAG
tgtcatttcactccaggctg

SEQ ID NO: 25599 - DNA, 20 bp, Artificial Sequence
  Description of Artificial Sequence: Synthetic oligonucleotide
  Target: SCNA; (-) strand; PAM type: NRG; PAM sequence: AGG
tcaatctgtcatttcactcc

SEQ ID NO: 25600 - DNA, 20 bp, Artificial Sequence
  Description of Artificial Sequence: Synthetic oligonucleotide
  Target: SCNA; (-) strand; PAM type: NRG; PAM sequence: CAG
ctcaatctgtcatttcactc

SEQ ID NO: 25601 - DNA, 20 bp, Artificial Sequence
  Description of Artificial Sequence: Synthetic oligonucleotide
  Target: SCNA; (-) strand; PAM type: NRG; PAM sequence: GGG
ttttctttttttctgagata

SEQ ID NO: 25602 - DNA, 20 bp, Artificial Sequence
  Description of Artificial Sequence: Synthetic oligonucleotide
  Target: SCNA; (-) strand; PAM type: NRG; PAM sequence: AGG
tttttctttttttctgagat

SEQ ID NO: 25603 - DNA, 20 bp, Artificial Sequence
  Description of Artificial Sequence: Synthetic oligonucleotide
  Target: SCNA; (-) strand; PAM type: NRG; PAM sequence: TAG
ttttttctttttttctgaga

SEQ ID NO: 25604 - DNA, 20 bp, Artificial Sequence
  Description of Artificial Sequence: Synthetic oligonucleotide
  Target: SCNA; (-) strand; PAM type: NRG; PAM sequence: GAG
ttttttttttctttttttct

SEQ ID NO: 25605 - DNA, 20 bp, Artificial Sequence
  Description of Artificial Sequence: Synthetic oligonucleotide
  Target: SCNA; (-) strand; PAM type: NRG; PAM sequence: TGG
gttctaatggtgtggtttag

SEQ ID NO: 25606 - DNA, 20 bp, Artificial Sequence
  Description of Artificial Sequence: Synthetic oligonucleotide
  Target: SCNA; (-) strand; PAM type: NRG; PAM sequence: TAG
taagttctaatggtgtggtt

SEQ ID NO: 25607 - DNA, 20 bp, Artificial Sequence
  Description of Artificial Sequence: Synthetic oligonucleotide
  Target: SCNA; (-) strand; PAM type: NRG; PAM sequence: TGG
aattataagttctaatggtg

SEQ ID NO: 25608 - DNA, 20 bp, Artificial Sequence
  Description of Artificial Sequence: Synthetic oligonucleotide
  Target: SCNA; (-) strand; PAM type: NRG; PAM sequence: TGG
taattaattataagttctaa

SEQ ID NO: 25609 - DNA, 20 bp, Artificial Sequence
  Description of Artificial Sequence: Synthetic oligonucleotide
  Target: SCNA; (-) strand; PAM type: NRG; PAM sequence: AAG
tataaaaaataattaattat

SEQ ID NO: 25610 - DNA, 20 bp, Artificial Sequence
  Description of Artificial Sequence: Synthetic oligonucleotide
  Target: SCNA; (-) strand; PAM type: NRG; PAM sequence: AAG
aaatataaaatatgttgcat

SEQ ID NO: 25611 - DNA, 20 bp, Artificial Sequence
  Description of Artificial Sequence: Synthetic oligonucleotide
  Target: SCNA; (-) strand; PAM type: NRG; PAM sequence: GGG
gttatatacctatctctttg

SEQ ID NO: 25612 - DNA, 20 bp, Artificial Sequence
  Description of Artificial Sequence: Synthetic oligonucleotide
  Target: SCNA; (-) strand; PAM type: NRG; PAM sequence: GGG
agttatatacctatctcttt

SEQ ID NO: 25613 - DNA, 20 bp, Artificial Sequence
  Description of Artificial Sequence: Synthetic oligonucleotide
  Target: SCNA; (-) strand; PAM type: NRG; PAM sequence: TGG
aagttatatacctatctctt

SEQ ID NO: 25614 - DNA, 20 bp, Artificial Sequence
  Description of Artificial Sequence: Synthetic oligonucleotide
  Target: SCNA; (-) strand; PAM type: NRG; PAM sequence: AAG
ctcatttatctcgttttttt

SEQ ID NO: 25615 - DNA, 20 bp, Artificial Sequence
  Description of Artificial Sequence: Synthetic oligonucleotide
  Target: SCNA; (-) strand; PAM type: NRG; PAM sequence: AGG
tgatacatggtaaccttatg

SEQ ID NO: 25616 - DNA, 20 bp, Artificial Sequence
  Description of Artificial Sequence: Synthetic oligonucleotide
  Target: SCNA; (-) strand; PAM type: NRG; PAM sequence: GAG
ttgatacatggtaaccttat

SEQ ID NO: 25617 - DNA, 20 bp, Artificial Sequence
  Description of Artificial Sequence: Synthetic oligonucleotide
  Target: SCNA; (-) strand; PAM type: NRG; PAM sequence: TGG
caactgattggtttgataca

SEQ ID NO: 25618 - DNA, 20 bp, Artificial Sequence
  Description of Artificial Sequence: Synthetic oligonucleotide
  Target: SCNA; (-) strand; PAM type: NRG; PAM sequence: TGG
gacctcaaagaacaactgat

SEQ ID NO: 25619 - DNA, 20 bp, Artificial Sequence
  Description of Artificial Sequence: Synthetic oligonucleotide
  Target: SCNA; (-) strand; PAM type: NRG; PAM sequence: AAG
agtaaataattatgacctca

SEQ ID NO: 25620 - DNA, 20 bp, Artificial Sequence
  Description of Artificial Sequence: Synthetic oligonucleotide
  Target: SCNA; (-) strand; PAM type: NRG; PAM sequence: TAG
aaccatcaattacagattat

SEQ ID NO: 25621 - DNA, 20 bp, Artificial Sequence
  Description of Artificial Sequence: Synthetic oligonucleotide
  Target: SCNA; (-) strand; PAM type: NRG; PAM sequence: CAG
taaaggctaaccatcaatta

SEQ ID NO: 25622 - DNA, 20 bp, Artificial Sequence
  Description of Artificial Sequence: Synthetic oligonucleotide
  Target: SCNA; (-) strand; PAM type: NRG; PAM sequence: AGG
acagattactcataaattaa

SEQ ID NO: 25623 - DNA, 20 bp, Artificial Sequence
  Description of Artificial Sequence: Synthetic oligonucleotide
  Target: SCNA; (-) strand; PAM type: NRG; PAM sequence: AAG
tacagattactcataaatta

SEQ ID NO: 25624 - DNA, 20 bp, Artificial Sequence
  Description of Artificial Sequence: Synthetic oligonucleotide
  Target: SCNA; (-) strand; PAM type: NRG; PAM sequence: CAG
taggtgtacgttatcaatta

SEQ ID NO: 25625 - DNA, 20 bp, Artificial Sequence
  Description of Artificial Sequence: Synthetic oligonucleotide
  Target: SCNA; (-) strand; PAM type: NRG; PAM sequence: AGG
ccacttggcacctattttgt

SEQ ID NO: 25626 - DNA, 20 bp, Artificial Sequence
  Description of Artificial Sequence: Synthetic oligonucleotide
  Target: SCNA; (-) strand; PAM type: NRG; PAM sequence: TAG
accacttggcacctattttg

SEQ ID NO: 25627 - DNA, 20 bp, Artificial Sequence
  Description of Artificial Sequence: Synthetic oligonucleotide
  Target: SCNA; (-) strand; PAM type: NRG; PAM sequence: TGG
ttgctagtcacataaccact

SEQ ID NO: 25628 - DNA, 20 bp, Artificial Sequence
  Description of Artificial Sequence: Synthetic oligonucleotide
  Target: SCNA; (-) strand; PAM type: NRG; PAM sequence: TAG
ctacagcatttataccttgc

SEQ ID NO: 25629 - DNA, 20 bp, Artificial Sequence
  Description of Artificial Sequence: Synthetic oligonucleotide
  Target: SCNA; (-) strand; PAM type: NRG; PAM sequence: CAG
catcagctctggtgtcccta

SEQ ID NO: 25630 - DNA, 20 bp, Artificial Sequence
  Description of Artificial Sequence: Synthetic oligonucleotide
  Target: SCNA; (-) strand; PAM type: NRG; PAM sequence: TGG
ctcagggaagccatcagctc

SEQ ID NO: 25631 - DNA, 20 bp, Artificial Sequence
  Description of Artificial Sequence: Synthetic oligonucleotide
  Target: SCNA; (-) strand; PAM type: NRG; PAM sequence: CAG
cctccgctcagggaagccat

SEQ ID NO: 25632 - DNA, 20 bp, Artificial Sequence
  Description of Artificial Sequence: Synthetic oligonucleotide
  Target: SCNA; (-) strand; PAM type: NRG; PAM sequence: AAG
tgggacacctccgctcaggg

SEQ ID NO: 25633 - DNA, 20 bp, Artificial Sequence
  Description of Artificial Sequence: Synthetic oligonucleotide
  Target: SCNA; (-) strand; PAM type: NRG; PAM sequence: GGG
gtgtgggacacctccgctca

SEQ ID NO: 25634 - DNA, 20 bp, Artificial Sequence
  Description of Artificial Sequence: Synthetic oligonucleotide
  Target: SCNA; (-) strand; PAM type: NRG; PAM sequence: AGG
tgtgtgggacacctccgctc

SEQ ID NO: 25635 - DNA, 20 bp, Artificial Sequence
  Description of Artificial Sequence: Synthetic oligonucleotide
  Target: SCNA; (-) strand; PAM type: NRG; PAM sequence: CAG
gtgtgtgggacacctccgct

SEQ ID NO: 25636 - DNA, 20 bp, Artificial Sequence
  Description of Artificial Sequence: Synthetic oligonucleotide
  Target: SCNA; (-) strand; PAM type: NRG; PAM sequence: GGG
agacaagatagggtgtgtgt

SEQ ID NO: 25637 - DNA, 20 bp, Artificial Sequence
  Description of Artificial Sequence: Synthetic oligonucleotide
  Target: SCNA; (-) strand; PAM type: NRG; PAM sequence: TGG
aagacaagatagggtgtgtg

SEQ ID NO: 25638 - DNA, 20 bp, Artificial Sequence
  Description of Artificial Sequence: Synthetic oligonucleotide
  Target: SCNA; (-) strand; PAM type: NRG; PAM sequence: GGG
gaggttgggaagacaagata

SEQ ID NO: 25639 - DNA, 20 bp, Artificial Sequence
  Description of Artificial Sequence: Synthetic oligonucleotide
  Target: SCNA; (-) strand; PAM type: NRG; PAM sequence: AGG
tgaggttgggaagacaagat

SEQ ID NO: 25640 - DNA, 20 bp, Artificial Sequence
  Description of Artificial Sequence: Synthetic oligonucleotide
  Target: SCNA; (-) strand; PAM type: NRG; PAM sequence: TAG
ttgaggttgggaagacaaga

SEQ ID NO: 25641 - DNA, 20 bp, Artificial Sequence
  Description of Artificial Sequence: Synthetic oligonucleotide
  Target: SCNA; (-) strand; PAM type: NRG; PAM sequence: AAG
tcttttgaggttgggaagac

SEQ ID NO: 25642 - DNA, 20 bp, Artificial Sequence
  Description of Artificial Sequence: Synthetic oligonucleotide
  Target: SCNA; (-) strand; PAM type: NRG; PAM sequence: AAG
tgtgctcttttgaggttggg

SEQ ID NO: 25643 - DNA, 20 bp, Artificial Sequence
  Description of Artificial Sequence: Synthetic oligonucleotide
  Target: SCNA; (-) strand; PAM type: NRG; PAM sequence: GGG
ctctgtgctcttttgaggtt

SEQ ID NO: 25644 - DNA, 20 bp, Artificial Sequence
  Description of Artificial Sequence: Synthetic oligonucleotide
  Target: SCNA; (-) strand; PAM type: NRG; PAM sequence: TGG
actctgtgctcttttgaggt

SEQ ID NO: 25645 - DNA, 20 bp, Artificial Sequence
  Description of Artificial Sequence: Synthetic oligonucleotide
  Target: SCNA; (-) strand; PAM type: NRG; PAM sequence: AGG
ctccactctgtgctcttttg

SEQ ID NO: 25646 - DNA, 20 bp, Artificial Sequence
  Description of Artificial Sequence: Synthetic oligonucleotide
  Target: SCNA; (-) strand; PAM type: NRG; PAM sequence: GAG
tctccactctgtgctctttt

SEQ ID NO: 25647 - DNA, 20 bp, Artificial Sequence
  Description of Artificial Sequence: Synthetic oligonucleotide
  Target: SCNA; (-) strand; PAM type: NRG; PAM sequence: AGG
actgagttctcaaaactctc

SEQ ID NO: 25648 - DNA, 20 bp, Artificial Sequence
  Description of Artificial Sequence: Synthetic oligonucleotide
  Target: SCNA; (-) strand; PAM type: NRG; PAM sequence: CAG
aactgagttctcaaaactct

SEQ ID NO: 25649 - DNA, 20 bp, Artificial Sequence
  Description of Artificial Sequence: Synthetic oligonucleotide
  Target: SCNA; (-) strand; PAM type: NRG; PAM sequence: GAG
catgcacaacagggataact

SEQ ID NO: 25650 - DNA, 20 bp, Artificial Sequence
  Description of Artificial Sequence: Synthetic oligonucleotide
  Target: SCNA; (-) strand; PAM type: NRG; PAM sequence: GGG
tcaacataacatgcacaaca

SEQ ID NO: 25651 - DNA, 20 bp, Artificial Sequence
  Description of Artificial Sequence: Synthetic oligonucleotide
  Target: SCNA; (-) strand; PAM type: NRG; PAM sequence: AGG
gtcaacataacatgcacaac

SEQ ID NO: 25652 - DNA, 20 bp, Artificial Sequence
  Description of Artificial Sequence: Synthetic oligonucleotide
  Target: SCNA; (-) strand; PAM type: NRG; PAM sequence: CAG
agtcaacataacatgcacaa

SEQ ID NO: 25653 - DNA, 20 bp, Artificial Sequence
  Description of Artificial Sequence: Synthetic oligonucleotide
  Target: SCNA; (-) strand; PAM type: NRG; PAM sequence: AAG
ttcacctcactaagctgaca

SEQ ID NO: 25654 - DNA, 20 bp, Artificial Sequence
  Description of Artificial Sequence: Synthetic oligonucleotide
  Target: SCNA; (-) strand; PAM type: NRG; PAM sequence: AAG
aaaatgtgcttcacctcact

SEQ ID NO: 25655 - DNA, 20 bp, Artificial Sequence
  Description of Artificial Sequence: Synthetic oligonucleotide
  Target: SCNA; (-) strand; PAM type: NRG; PAM sequence: AAG
gaaattgatagcaaattctc

SEQ ID NO: 25656 - DNA, 20 bp, Artificial Sequence
  Description of Artificial Sequence: Synthetic oligonucleotide
  Target: SCNA; (-) strand; PAM type: NRG; PAM sequence: TAG
gtggccatcagtgaaattga

SEQ ID NO: 25657 - DNA, 20 bp, Artificial Sequence
  Description of Artificial Sequence: Synthetic oligonucleotide
  Target: SCNA; (-) strand; PAM type: NRG; PAM sequence: CAG
caataagcagcagtggccat

SEQ ID NO: 25658 - DNA, 20 bp, Artificial Sequence
  Description of Artificial Sequence: Synthetic oligonucleotide
  Target: SCNA; (-) strand; PAM type: NRG; PAM sequence: TGG
ctctgctcaataagcagcag

SEQ ID NO: 25659 - DNA, 20 bp, Artificial Sequence
  Description of Artificial Sequence: Synthetic oligonucleotide
  Target: SCNA; (-) strand; PAM type: NRG; PAM sequence: CAG
ccactctgctcaataagcag

SEQ ID NO: 25660 - DNA, 20 bp, Artificial Sequence
  Description of Artificial Sequence: Synthetic oligonucleotide
  Target: SCNA; (-) strand; PAM type: NRG; PAM sequence: CAG
atgccactctgctcaataag

SEQ ID NO: 25661 - DNA, 20 bp, Artificial Sequence
  Description of Artificial Sequence: Synthetic oligonucleotide
  Target: SCNA; (-) strand; PAM type: NRG; PAM sequence: AAG
ccaatgccactctgctcaat

SEQ ID NO: 25662 - DNA, 20 bp, Artificial Sequence
  Description of Artificial Sequence: Synthetic oligonucleotide
  Target: SCNA; (-) strand; PAM type: NRG; PAM sequence: GAG
acaagaaaatgatgatcttt

SEQ ID NO: 25663 - DNA, 20 bp, Artificial Sequence
  Description of Artificial Sequence: Synthetic oligonucleotide
  Target: SCNA; (-) strand; PAM type: NRG; PAM sequence: AAG
aatataaatgcaataaatac

SEQ ID NO: 25664 - DNA, 20 bp, Artificial Sequence
  Description of Artificial Sequence: Synthetic oligonucleotide
  Target: SCNA; (-) strand; PAM type: NRG; PAM sequence: CAG
aattatctttatataatgct

SEQ ID NO: 25665 - DNA, 20 bp, Artificial Sequence
  Description of Artificial Sequence: Synthetic oligonucleotide
  Target: SCNA; (-) strand; PAM type: NRG; PAM sequence: AAG
gatctaaatccaaaagcaga

SEQ ID NO: 25666 - DNA, 20 bp, Artificial Sequence
  Description of Artificial Sequence: Synthetic oligonucleotide
  Target: SCNA; (-) strand; PAM type: NRG; PAM sequence: CAG
attagatctaaatccaaaag

SEQ ID NO: 25667 - DNA, 20 bp, Artificial Sequence
  Description of Artificial Sequence: Synthetic oligonucleotide
  Target: SCNA; (-) strand; PAM type: NRG; PAM sequence: AAG
ttaattagatctaaatccaa

SEQ ID NO: 25668 - DNA, 20 bp, Artificial Sequence
  Description of Artificial Sequence: Synthetic oligonucleotide
  Target: SCNA; (-) strand; PAM type: NRG; PAM sequence: TAG
caaatgactcagaaattaat

SEQ ID NO: 25669 - DNA, 20 bp, Artificial Sequence
  Description of Artificial Sequence: Synthetic oligonucleotide
  Target: SCNA; (-) strand; PAM type: NRG; PAM sequence: CAG
aaaaatttcttcaaatgact

SEQ ID NO: 25670 - DNA, 20 bp, Artificial Sequence
  Description of Artificial Sequence: Synthetic oligonucleotide
  Target: SCNA; (-) strand; PAM type: NRG; PAM sequence: TAG
atcaacatacttcaatttaa

SEQ ID NO: 25671 - DNA, 20 bp, Artificial Sequence
  Description of Artificial Sequence: Synthetic oligonucleotide
  Target: SCNA; (-) strand; PAM type: NRG; PAM sequence: GGG
atgatcagtgttatttttat

SEQ ID NO: 25672 - DNA, 20 bp, Artificial Sequence
  Description of Artificial Sequence: Synthetic oligonucleotide
  Target: SCNA; (-) strand; PAM type: NRG; PAM sequence: TGG
aatgatcagtgttattttta

SEQ ID NO: 25673 - DNA, 20 bp, Artificial Sequence
  Description of Artificial Sequence: Synthetic oligonucleotide
  Target: SCNA; (-) strand; PAM type: NRG; PAM sequence: CAG
tgaagaactaccttaatgat

SEQ ID NO: 25674 - DNA, 20 bp, Artificial Sequence
  Description of Artificial Sequence: Synthetic oligonucleotide
  Target: SCNA; (-) strand; PAM type: NRG; PAM sequence: AAG
aactactttttaactcattg

SEQ ID NO: 25675 - DNA, 20 bp, Artificial Sequence
  Description of Artificial Sequence: Synthetic oligonucleotide
  Target: SCNA; (-) strand; PAM type: NRG; PAM sequence: AAG
aagtaatctcattcctttat

SEQ ID NO: 25676 - DNA, 20 bp, Artificial Sequence
  Description of Artificial Sequence: Synthetic oligonucleotide
  Target: SCNA; (-) strand; PAM type: NRG; PAM sequence: AAG
tggtagaagcctcataagaa

SEQ ID NO: 25677 - DNA, 20 bp, Artificial Sequence
  Description of Artificial Sequence: Synthetic oligonucleotide
  Target: SCNA; (-) strand; PAM type: NRG; PAM sequence: AAG
atgtttggtagaagcctcat

SEQ ID NO: 25678 - DNA, 20 bp, Artificial Sequence
  Description of Artificial Sequence: Synthetic oligonucleotide
  Target: SCNA; (-) strand; PAM type: NRG; PAM sequence: AAG
tggctgaagatgtttggtag

SEQ ID NO: 25679 - DNA, 20 bp, Artificial Sequence
  Description of Artificial Sequence: Synthetic oligonucleotide
  Target: SCNA; (-) strand; PAM type: NRG; PAM sequence: TAG
ttatggctgaagatgtttgg

SEQ ID NO: 25680 - DNA, 20 bp, Artificial Sequence
  Description of Artificial Sequence: Synthetic oligonucleotide
  Target: SCNA; (-) strand; PAM type: NRG; PAM sequence: TGG
cacttatggctgaagatgtt

SEQ ID NO: 25681 - DNA, 20 bp, Artificial Sequence
  Description of Artificial Sequence: Synthetic oligonucleotide
  Target: SCNA; (-) strand; PAM type: NRG; PAM sequence: AAG
tataatttcacttatggctg

SEQ ID NO: 25682 - DNA, 20 bp, Artificial Sequence
  Description of Artificial Sequence: Synthetic oligonucleotide
  Target: SCNA; (-) strand; PAM type: NRG; PAM sequence: TGG
ccattttataatttcactta

SEQ ID NO: 25683 - DNA, 20 bp, Artificial Sequence
  Description of Artificial Sequence: Synthetic oligonucleotide
  Target: SCNA; (-) strand; PAM type: NRG; PAM sequence: AAG
tgaaagattggaggcgacca

SEQ ID NO: 25684 - DNA, 20 bp, Artificial Sequence
  Description of Artificial Sequence: Synthetic oligonucleotide
  Target: SCNA; (-) strand; PAM type: NRG; PAM sequence: AGG
taactagtttgaaagattgg

SEQ ID NO: 25685 - DNA, 20 bp, Artificial Sequence
  Description of Artificial Sequence: Synthetic oligonucleotide
  Target: SCNA; (-) strand; PAM type: NRG; PAM sequence: GAG
ataactagtttgaaagattg

SEQ ID NO: 25686 - DNA, 20 bp, Artificial Sequence
  Description of Artificial Sequence: Synthetic oligonucleotide
  Target: SCNA; (-) strand; PAM type: NRG; PAM sequence: TGG
acataactagtttgaaagat

SEQ ID NO: 25687 - DNA, 20 bp, Artificial Sequence
  Description of Artificial Sequence: Synthetic oligonucleotide
  Target: SCNA; (-) strand; PAM type: NRG; PAM sequence: AAG
tcattacataactagtttga

SEQ ID NO: 25688 - DNA, 20 bp, Artificial Sequence
  Description of Artificial Sequence: Synthetic oligonucleotide
  Target: SCNA; (-) strand; PAM type: NRG; PAM sequence: TAG
tttatccttcattacataac

SEQ ID NO: 25689 - DNA, 20 bp, Artificial Sequence
  Description of Artificial Sequence: Synthetic oligonucleotide
  Target: SCNA; (-) strand; PAM type: NRG; PAM sequence: CGG
ttatcaaataaactctccaa

SEQ ID NO: 25690 - DNA, 20 bp, Artificial Sequence
  Description of Artificial Sequence: Synthetic oligonucleotide
  Target: SCNA; (-) strand; PAM type: NRG; PAM sequence: TGG
acttttatatataggaacca

SEQ ID NO: 25691 - DNA, 20 bp, Artificial Sequence
  Description of Artificial Sequence: Synthetic oligonucleotide
  Target: SCNA; (-) strand; PAM type: NRG; PAM sequence: AGG
ttgagcacacttttatatat

SEQ ID NO: 25692 - DNA, 20 bp, Artificial Sequence
  Description of Artificial Sequence: Synthetic oligonucleotide
  Target: SCNA; (-) strand; PAM type: NRG; PAM sequence: TAG
attgagcacacttttatata

SEQ ID NO: 25693 - DNA, 20 bp, Artificial Sequence
  Description of Artificial Sequence: Synthetic oligonucleotide
  Target: SCNA; (-) strand; PAM type: NRG; PAM sequence: GAG
gacaggacatatgaataatt

SEQ ID NO: 25694 - DNA, 20 bp, Artificial Sequence
  Description of Artificial Sequence: Synthetic oligonucleotide
  Target: SCNA; (-) strand; PAM type: NRG; PAM sequence: AGG
tgggaatgtcataataagac

SEQ ID NO: 25695 - DNA, 20 bp, Artificial Sequence
  Description of Artificial Sequence: Synthetic oligonucleotide
  Target: SCNA; (-) strand; PAM type: NRG; PAM sequence: CAG
gtgggaatgtcataataaga

SEQ ID NO: 25696 - DNA, 20 bp, Artificial Sequence
  Description of Artificial Sequence: Synthetic oligonucleotide
  Target: SCNA; (-) strand; PAM type: NRG; PAM sequence: AAG
ttttgtgggaatgtcataat

SEQ ID NO: 25697 - DNA, 20 bp, Artificial Sequence
  Description of Artificial Sequence: Synthetic oligonucleotide
  Target: SCNA; (-) strand; PAM type: NRG; PAM sequence: GGG
aactaccttgcagtttttgt

SEQ ID NO: 25698 - DNA, 20 bp, Artificial Sequence
  Description of Artificial Sequence: Synthetic oligonucleotide
  Target: SCNA; (-) strand; PAM type: NRG; PAM sequence: TGG
caactaccttgcagtttttg

SEQ ID NO: 25699 - DNA, 20 bp, Artificial Sequence
  Description of Artificial Sequence: Synthetic oligonucleotide
  Target: SCNA; (-) strand; PAM type: NRG; PAM sequence: CAG
agaaaactgcaactaccttg

SEQ ID NO: 25700 - DNA, 20 bp, Artificial Sequence
  Description of Artificial Sequence: Synthetic oligonucleotide
  Target: SCNA; (-) strand; PAM type: NRG; PAM sequence: TAG
gattagtaaaaaatatgatt

SEQ ID NO: 25701 - DNA, 20 bp, Artificial Sequence
  Description of Artificial Sequence: Synthetic oligonucleotide
  Target: SCNA; (-) strand; PAM type: NRG; PAM sequence: TAG
ctgagcatcacttccctgat

SEQ ID NO: 25702 - DNA, 20 bp, Artificial Sequence
  Description of Artificial Sequence: Synthetic oligonucleotide
  Target: SCNA; (-) strand; PAM type: NRG; PAM sequence: GAG
gaagcgtacttaacatctct

SEQ ID NO: 25703 - DNA, 20 bp, Artificial Sequence
  Description of Artificial Sequence: Synthetic oligonucleotide
  Target: SCNA; (-) strand; PAM type: NRG; PAM sequence: AAG
tcacctttagggtcttgggg

SEQ ID NO: 25704 - DNA, 20 bp, Artificial Sequence
  Description of Artificial Sequence: Synthetic oligonucleotide
  Target: SCNA; (-) strand; PAM type: NRG; PAM sequence: GGG
ttatcacctttagggtcttg

SEQ ID NO: 25705 - DNA, 20 bp, Artificial Sequence
  Description of Artificial Sequence: Synthetic oligonucleotide
  Target: SCNA; (-) strand; PAM type: NRG; PAM sequence: GGG
cttatcacctttagggtctt

SEQ ID NO: 25706 - DNA, 20 bp, Artificial Sequence
  Description of Artificial Sequence: Synthetic oligonucleotide
  Target: SCNA; (-) strand; PAM type: NRG; PAM sequence: TGG
acttatcacctttagggtct

SEQ ID NO: 25707 - DNA, 20 bp, Artificial Sequence
  Description of Artificial Sequence: Synthetic oligonucleotide
  Target: SCNA; (-) strand; PAM type: NRG; PAM sequence: GGG
tacatcacttatcaccttta

SEQ ID NO: 25708 - DNA, 20 bp, Artificial Sequence
  Description of Artificial Sequence: Synthetic oligonucleotide
  Target: SCNA; (-) strand; PAM type: NRG; PAM sequence: AGG
ctacatcacttatcaccttt

SEQ ID NO: 25709 - DNA, 20 bp, Artificial Sequence
  Description of Artificial Sequence: Synthetic oligonucleotide
  Target: SCNA; (-) strand; PAM type: NRG; PAM sequence: TAG
actacatcacttatcacctt

SEQ ID NO: 25710 - DNA, 20 bp, Artificial Sequence
  Description of Artificial Sequence: Synthetic oligonucleotide
  Target: SCNA; (-) strand; PAM type: NRG; PAM sequence: GAG
cacaaaccaaagttttagtt

SEQ ID NO: 25711 - DNA, 20 bp, Artificial Sequence
  Description of Artificial Sequence: Synthetic oligonucleotide
  Target: SCNA; (-) strand; PAM type: NRG; PAM sequence: TAG
aatcacacaaaccaaagttt

SEQ ID NO: 25712 - DNA, 20 bp, Artificial Sequence
  Description of Artificial Sequence: Synthetic oligonucleotide
  Target: SCNA; (-) strand; PAM type: NRG; PAM sequence: AAG
tgcactaatcacacaaacca

SEQ ID NO: 25713 - DNA, 20 bp, Artificial Sequence
  Description of Artificial Sequence: Synthetic oligonucleotide
  Target: SCNA; (-) strand; PAM type: NRG; PAM sequence: AAG
ctgactactgatagagtgga

SEQ ID NO: 25714 - DNA, 20 bp, Artificial Sequence
  Description of Artificial Sequence: Synthetic oligonucleotide
  Target: SCNA; (-) strand; PAM type: NRG; PAM sequence: TGG
cttgctgactactgatagag

SEQ ID NO: 25715 - DNA, 20 bp, Artificial Sequence
  Description of Artificial Sequence: Synthetic oligonucleotide
  Target: SCNA; (-) strand; PAM type: NRG; PAM sequence: GAG
tagcttgctgactactgata

SEQ ID NO: 25716 - DNA, 20 bp, Artificial Sequence
  Description of Artificial Sequence: Synthetic oligonucleotide
  Target: SCNA; (-) strand; PAM type: NRG; PAM sequence: TAG
tgtagcttgctgactactga

SEQ ID NO: 25717 - DNA, 20 bp, Artificial Sequence
  Description of Artificial Sequence: Synthetic oligonucleotide
  Target: SCNA; (-) strand; PAM type: NRG; PAM sequence: TAG
tggaattgtcttgtatgttg

SEQ ID NO: 25718 - DNA, 20 bp, Artificial Sequence
  Description of Artificial Sequence: Synthetic oligonucleotide
  Target: SCNA; (-) strand; PAM type: NRG; PAM sequence: TGG
tatcaaaacaggtggtgggc

SEQ ID NO: 25719 - DNA, 20 bp, Artificial Sequence
  Description of Artificial Sequence: Synthetic oligonucleotide
  Target: SCNA; (-) strand; PAM type: NRG; PAM sequence: GGG
catttatcaaaacaggtggt

SEQ ID NO: 25720 - DNA, 20 bp, Artificial Sequence
  Description of Artificial Sequence: Synthetic oligonucleotide
  Target: SCNA; (-) strand; PAM type: NRG; PAM sequence: TGG
tcatttatcaaaacaggtgg

SEQ ID NO: 25721 - DNA, 20 bp, Artificial Sequence
  Description of Artificial Sequence: Synthetic oligonucleotide
  Target: SCNA; (-) strand; PAM type: NRG; PAM sequence: TGG
acttcatttatcaaaacagg

SEQ ID NO: 25722 - DNA, 20 bp, Artificial Sequence
  Description of Artificial Sequence: Synthetic oligonucleotide
  Target: SCNA; (-) strand; PAM type: NRG; PAM sequence: AGG
aaaacttcatttatcaaaac

SEQ ID NO: 25723 - DNA, 20 bp, Artificial Sequence
  Description of Artificial Sequence: Synthetic oligonucleotide
  Target: SCNA; (-) strand; PAM type: NRG; PAM sequence: CAG
taaaacttcatttatcaaaa

SEQ ID NO: 25724 - DNA, 20 bp, Artificial Sequence
  Description of Artificial Sequence: Synthetic oligonucleotide
  Target: SCNA; (-) strand; PAM type: NRG; PAM sequence: TGG
gtcataaacaataactagtg

SEQ ID NO: 25725 - DNA, 20 bp, Artificial Sequence
  Description of Artificial Sequence: Synthetic oligonucleotide
  Target: SCNA; (-) strand; PAM type: NRG; PAM sequence: TAG
aggtagtcataaacaataac

SEQ ID NO: 25726 - DNA, 20 bp, Artificial Sequence
  Description of Artificial Sequence: Synthetic oligonucleotide
  Target: SCNA; (-) strand; PAM type: NRG; PAM sequence: TAG
ctgctgttgaagtgtgaagg

SEQ ID NO: 25727 - DNA, 20 bp, Artificial Sequence
  Description of Artificial Sequence: Synthetic oligonucleotide
  Target: SCNA; (-) strand; PAM type: NRG; PAM sequence: AGG
attctgctgttgaagtgtga

SEQ ID NO: 25728 - DNA, 20 bp, Artificial Sequence
  Description of Artificial Sequence: Synthetic oligonucleotide
  Target: SCNA; (-) strand; PAM type: NRG; PAM sequence: AAG
aattctgctgttgaagtgtg

SEQ ID NO: 25729 - DNA, 20 bp, Artificial Sequence
  Description of Artificial Sequence: Synthetic oligonucleotide
  Target: SCNA; (-) strand; PAM type: NRG; PAM sequence: AAG
atgtctcaattctgctgttg

SEQ ID NO: 25730 - DNA, 20 bp, Artificial Sequence
  Description of Artificial Sequence: Synthetic oligonucleotide
  Target: SCNA; (-) strand; PAM type: NRG; PAM sequence: AAG
gtgataccctgtctaaaaaa

SEQ ID NO: 25731 - DNA, 20 bp, Artificial Sequence
  Description of Artificial Sequence: Synthetic oligonucleotide
  Target: SCNA; (-) strand; PAM type: NRG; PAM sequence: GAG
gcactccagcctgggtggca

SEQ ID NO: 25732 - DNA, 20 bp, Artificial Sequence
  Description of Artificial Sequence: Synthetic oligonucleotide
  Target: SCNA; (-) strand; PAM type: NRG; PAM sequence: CAG
ctgcactccagcctgggtgg

SEQ ID NO: 25733 - DNA, 20 bp, Artificial Sequence
  Description of Artificial Sequence: Synthetic oligonucleotide
  Target: SCNA; (-) strand; PAM type: NRG; PAM sequence: TGG
ccactgcactccagcctggg

SEQ ID NO: 25734 - DNA, 20 bp, Artificial Sequence
  Description of Artificial Sequence: Synthetic oligonucleotide
  Target: SCNA; (-) strand; PAM type: NRG; PAM sequence: GGG
gagccactgcactccagcct

SEQ ID NO: 25735 - DNA, 20 bp, Artificial Sequence
  Description of Artificial Sequence: Synthetic oligonucleotide
  Target: SCNA; (-) strand; PAM type: NRG; PAM sequence: TGG
cgagccactgcactccagcc

SEQ ID NO: 25736 - DNA, 20 bp, Artificial Sequence
  Description of Artificial Sequence: Synthetic oligonucleotide
  Target: SCNA; (-) strand; PAM type: NRG; PAM sequence: CAG
gagatcgagccactgcactc

SEQ ID NO: 25737 - DNA, 20 bp, Artificial Sequence
  Description of Artificial Sequence: Synthetic oligonucleotide
  Target: SCNA; (-) strand; PAM type: NRG; PAM sequence: GAG
ggttgcagtgagctgagatc

SEQ ID NO: 25738 - DNA, 20 bp, Artificial Sequence
  Description of Artificial Sequence: Synthetic oligonucleotide
  Target: SCNA; (-) strand; PAM type: NRG; PAM sequence: GAG
tgcagaggttgcagtgagct

SEQ ID NO: 25739 - DNA, 20 bp, Artificial Sequence
  Description of Artificial Sequence: Synthetic oligonucleotide
  Target: SCNA; (-) strand; PAM type: NRG; PAM sequence: GAG
ctcactgcagaggttgcagt

SEQ ID NO: 25740 - DNA, 20 bp, Artificial Sequence
  Description of Artificial Sequence: Synthetic oligonucleotide
  Target: SCNA; (-) strand; PAM type: NRG; PAM sequence: CAG
acagctcactgcagaggttg

SEQ ID NO: 25741 - DNA, 20 bp, Artificial Sequence
  Description of Artificial Sequence: Synthetic oligonucleotide
  Target: SCNA; (-) strand; PAM type: NRG; PAM sequence: AGG
agccatacagctcactgcag

SEQ ID NO: 25742 - DNA, 20 bp, Artificial Sequence
  Description of Artificial Sequence: Synthetic oligonucleotide
  Target: SCNA; (-) strand; PAM type: NRG; PAM sequence: GAG
gagccatacagctcactgca

SEQ ID NO: 25743 - DNA, 20 bp, Artificial Sequence
  Description of Artificial Sequence: Synthetic oligonucleotide
  Target: SCNA; (-) strand; PAM type: NRG; PAM sequence: CAG
ttgagccatacagctcactg

SEQ ID NO: 25744 - DNA, 20 bp, Artificial Sequence
  Description of Artificial Sequence: Synthetic oligonucleotide
  Target: SCNA; (-) strand; PAM type: NRG; PAM sequence: CAG
ggaggatggcttgagccata

SEQ ID NO: 25745 - DNA, 20 bp, Artificial Sequence
  Description of Artificial Sequence: Synthetic oligonucleotide
  Target: SCNA; (-) strand; PAM type: NRG; PAM sequence: GAG
ctgaggtaggaggatggctt

SEQ ID NO: 25746 - DNA, 20 bp, Artificial Sequence
  Description of Artificial Sequence: Synthetic oligonucleotide
  Target: SCNA; (-) strand; PAM type: NRG; PAM sequence: TGG
aggaggctgaggtaggagga

SEQ ID NO: 25747 - DNA, 20 bp, Artificial Sequence
  Description of Artificial Sequence: Synthetic oligonucleotide
  Target: SCNA; (-) strand; PAM type: NRG; PAM sequence: AGG
acccaggaggctgaggtagg

SEQ ID NO: 25748 - DNA, 20 bp, Artificial Sequence
  Description of Artificial Sequence: Synthetic oligonucleotide
  Target: SCNA; (-) strand; PAM type: NRG; PAM sequence: GAG
tacccaggaggctgaggtag

SEQ ID NO: 25749 - DNA, 20 bp, Artificial Sequence
  Description of Artificial Sequence: Synthetic oligonucleotide
  Target: SCNA; (-) strand; PAM type: NRG; PAM sequence: AGG
gctacccaggaggctgaggt

SEQ ID NO: 25750 - DNA, 20 bp, Artificial Sequence
  Description of Artificial Sequence: Synthetic oligonucleotide
  Target: SCNA; (-) strand; PAM type: NRG; PAM sequence: TAG
agctacccaggaggctgagg

SEQ ID NO: 25751 - DNA, 20 bp, Artificial Sequence
  Description of Artificial Sequence: Synthetic oligonucleotide
  Target: SCNA; (-) strand; PAM type: NRG; PAM sequence: AGG
gccagctacccaggaggctg

SEQ ID NO: 25752 - DNA, 20 bp, Artificial Sequence
  Description of Artificial Sequence: Synthetic oligonucleotide
  Target: SCNA; (-) strand; PAM type: NRG; PAM sequence: GAG
tgccagctacccaggaggct

SEQ ID NO: 25753 - DNA, 20 bp, Artificial Sequence
  Description of Artificial Sequence: Synthetic oligonucleotide
  Target: SCNA; (-) strand; PAM type: NRG; PAM sequence: AGG
tgtattgccagctacccagg

SEQ ID NO: 25754 - DNA, 20 bp, Artificial Sequence
  Description of Artificial Sequence: Synthetic oligonucleotide
  Target: SCNA; (-) strand; PAM type: NRG; PAM sequence: GAG
gtgtattgccagctacccag

SEQ ID NO: 25755 - DNA, 20 bp, Artificial Sequence
  Description of Artificial Sequence: Synthetic oligonucleotide
  Target: SCNA; (-) strand; PAM type: NRG; PAM sequence: AGG
atgtgtattgccagctaccc

SEQ ID NO: 25756 - DNA, 20 bp, Artificial Sequence
  Description of Artificial Sequence: Synthetic oligonucleotide
  Target: SCNA; (-) strand; PAM type: NRG; PAM sequence: CAG
catgtgtattgccagctacc

SEQ ID NO: 25757 - DNA, 20 bp, Artificial Sequence
  Description of Artificial Sequence: Synthetic oligonucleotide
  Target: SCNA; (-) strand; PAM type: NRG; PAM sequence: CAG
gtagcatgcatgtgtattgc

SEQ ID NO: 25758 - DNA, 20 bp, Artificial Sequence
  Description of Artificial Sequence: Synthetic oligonucleotide
  Target: SCNA; (-) strand; PAM type: NRG; PAM sequence: TAG
caaaaattagccgggtatgg

SEQ ID NO: 25759 - DNA, 20 bp, Artificial Sequence
  Description of Artificial Sequence: Synthetic oligonucleotide
  Target: SCNA; (-) strand; PAM type: NRG; PAM sequence: TGG
acgcaaaaattagccgggta

SEQ ID NO: 25760 - DNA, 20 bp, Artificial Sequence
  Description of Artificial Sequence: Synthetic oligonucleotide
  Target: SCNA; (-) strand; PAM type: NRG; PAM sequence: GGG
aaacaacgcaaaaattagcc

SEQ ID NO: 25761 - DNA, 20 bp, Artificial Sequence
  Description of Artificial Sequence: Synthetic oligonucleotide
  Target: SCNA; (-) strand; PAM type: NRG; PAM sequence: CGG
caaacaacgcaaaaattagc

SEQ ID NO: 25762 - DNA, 20 bp, Artificial Sequence
  Description of Artificial Sequence: Synthetic oligonucleotide
  Target: SCNA; (-) strand; PAM type: NRG; PAM sequence: TAG
tctacaaacaacgcaaaaat

SEQ ID NO: 25763 - DNA, 20 bp, Artificial Sequence
  Description of Artificial Sequence: Synthetic oligonucleotide
  Target: SCNA; (-) strand; PAM type: NRG; PAM sequence: TGG
tgagaccagcctgggccaca

SEQ ID NO: 25764 - DNA, 20 bp, Artificial Sequence
  Description of Artificial Sequence: Synthetic oligonucleotide
  Target: SCNA; (-) strand; PAM type: NRG; PAM sequence: GGG
caggggtttgagaccagcct

SEQ ID NO: 25765 - DNA, 20 bp, Artificial Sequence
  Description of Artificial Sequence: Synthetic oligonucleotide
  Target: SCNA; (-) strand; PAM type: NRG; PAM sequence: TGG
ccaggggtttgagaccagcc

SEQ ID NO: 25766 - DNA, 20 bp, Artificial Sequence
  Description of Artificial Sequence: Synthetic oligonucleotide
  Target: SCNA; (-) strand; PAM type: NRG; PAM sequence: CAG
tgagcccaggggtttgagac

SEQ ID NO: 25767 - DNA, 20 bp, Artificial Sequence
  Description of Artificial Sequence: Synthetic oligonucleotide
  Target: SCNA; (-) strand; PAM type: NRG; PAM sequence: GAG
tcacttgagcccaggggttt

SEQ ID NO: 25768 - DNA, 20 bp, Artificial Sequence
  Description of Artificial Sequence: Synthetic oligonucleotide
  Target: SCNA; (-) strand; PAM type: NRG; PAM sequence: GGG
ggtggatcacttgagcccag

SEQ ID NO: 25769 - DNA, 20 bp, Artificial Sequence
  Description of Artificial Sequence: Synthetic oligonucleotide
  Target: SCNA; (-) strand; PAM type: NRG; PAM sequence: GGG
tggtggatcacttgagccca

SEQ ID NO: 25770 - DNA, 20 bp, Artificial Sequence
  Description of Artificial Sequence: Synthetic oligonucleotide
  Target: SCNA; (-) strand; PAM type: NRG; PAM sequence: AGG
ctggtggatcacttgagccc

SEQ ID NO: 25771 - DNA, 20 bp, Artificial Sequence
  Description of Artificial Sequence: Synthetic oligonucleotide
  Target: SCNA; (-) strand; PAM type: NRG; PAM sequence: CAG
gctggtggatcacttgagcc

SEQ ID NO: 25772 - DNA, 20 bp, Artificial Sequence
  Description of Artificial Sequence: Synthetic oligonucleotide
  Target: SCNA; (-) strand; PAM type: NRG; PAM sequence: GAG
ccgaggctggtggatcactt

SEQ ID NO: 25773 - DNA, 20 bp, Artificial Sequence
  Description of Artificial Sequence: Synthetic oligonucleotide
  Target: SCNA; (-) strand; PAM type: NRG; PAM sequence: TGG
ctttgagagcccgaggctgg

SEQ ID NO: 25774 - DNA, 20 bp, Artificial Sequence
  Description of Artificial Sequence: Synthetic oligonucleotide
  Target: SCNA; (-) strand; PAM type: NRG; PAM sequence: TGG
gcactttgagagcccgaggc

SEQ ID NO: 25775 - DNA, 20 bp, Artificial Sequence
  Description of Artificial Sequence: Synthetic oligonucleotide
  Target: SCNA; (-) strand; PAM type: NRG; PAM sequence: AGG
cccagcactttgagagcccg

SEQ ID NO: 25776 - DNA, 20 bp, Artificial Sequence
  Description of Artificial Sequence: Synthetic oligonucleotide
  Target: SCNA; (-) strand; PAM type: NRG; PAM sequence: GAG
tcccagcactttgagagccc

SEQ ID NO: 25777 - DNA, 20 bp, Artificial Sequence
  Description of Artificial Sequence: Synthetic oligonucleotide
  Target: SCNA; (-) strand; PAM type: NRG; PAM sequence: GAG
ctttaatcccagcactttga

SEQ ID NO: 25778 - DNA, 20 bp, Artificial Sequence
  Description of Artificial Sequence: Synthetic oligonucleotide
  Target: SCNA; (-) strand; PAM type: NRG; PAM sequence: GAG
gtctttaatcccagcacttt

SEQ ID NO: 25779 - DNA, 20 bp, Artificial Sequence
  Description of Artificial Sequence: Synthetic oligonucleotide
  Target: SCNA; (-) strand; PAM type: NRG; PAM sequence: CAG
gtggctcaggtctttaatcc

SEQ ID NO: 25780 - DNA, 20 bp, Artificial Sequence
  Description of Artificial Sequence: Synthetic oligonucleotide
  Target: SCNA; (-) strand; PAM type: NRG; PAM sequence: AGG
ttggccaggtgccgtggctc

SEQ ID NO: 25781 - DNA, 20 bp, Artificial Sequence
  Description of Artificial Sequence: Synthetic oligonucleotide
  Target: SCNA; (-) strand; PAM type: NRG; PAM sequence: CAG
cttggccaggtgccgtggct

SEQ ID NO: 25782 - DNA, 20 bp, Artificial Sequence
  Description of Artificial Sequence: Synthetic oligonucleotide
  Target: SCNA; (-) strand; PAM type: NRG; PAM sequence: TGG
tatgtcttggccaggtgccg

SEQ ID NO: 25783 - DNA, 20 bp, Artificial Sequence
  Description of Artificial Sequence: Synthetic oligonucleotide
  Target: SCNA; (-) strand; PAM type: NRG; PAM sequence: AGG
atgagatctatgtcttggcc

SEQ ID NO: 25784 - DNA, 20 bp, Artificial Sequence
  Description of Artificial Sequence: Synthetic oligonucleotide
  Target: SCNA; (-) strand; PAM type: NRG; PAM sequence: CAG
catgagatctatgtcttggc

SEQ ID NO: 25785 - DNA, 20 bp, Artificial Sequence
  Description of Artificial Sequence: Synthetic oligonucleotide
  Target: SCNA; (-) strand; PAM type: NRG; PAM sequence: TGG
aagccatgagatctatgtct

SEQ ID NO: 25786 - DNA, 20 bp, Artificial Sequence
  Description of Artificial Sequence: Synthetic oligonucleotide
  Target: SCNA; (-) strand; PAM type: NRG; PAM sequence: GAG
tagcacgtattttaagccat

SEQ ID NO: 25787 - DNA, 20 bp, Artificial Sequence
  Description of Artificial Sequence: Synthetic oligonucleotide
  Target: SCNA; (-) strand; PAM type: NRG; PAM sequence: AAG
aatcagatagcacgtatttt

SEQ ID NO: 25788 - DNA, 20 bp, Artificial Sequence
  Description of Artificial Sequence: Synthetic oligonucleotide
  Target: SCNA; (-) strand; PAM type: NRG; PAM sequence: TAG
attttgggtaaggaatcaga

SEQ ID NO: 25789 - DNA, 20 bp, Artificial Sequence
  Description of Artificial Sequence: Synthetic oligonucleotide
  Target: SCNA; (-) strand; PAM type: NRG; PAM sequence: CAG
caaaattttgggtaaggaat

SEQ ID NO: 25790 - DNA, 20 bp, Artificial Sequence
  Description of Artificial Sequence: Synthetic oligonucleotide
  Target: SCNA; (-) strand; PAM type: NRG; PAM sequence: AGG
gattggcaaaattttgggta

SEQ ID NO: 25791 - DNA, 20 bp, Artificial Sequence
  Description of Artificial Sequence: Synthetic oligonucleotide
  Target: SCNA; (-) strand; PAM type: NRG; PAM sequence: AAG
ggattggcaaaattttgggt

SEQ ID NO: 25792 - DNA, 20 bp, Artificial Sequence
  Description of Artificial Sequence: Synthetic oligonucleotide
  Target: SCNA; (-) strand; PAM type: NRG; PAM sequence: GGG
ccagggattggcaaaatttt

SEQ ID NO: 25793 - DNA, 20 bp, Artificial Sequence
  Description of Artificial Sequence: Synthetic oligonucleotide
  Target: SCNA; (-) strand; PAM type: NRG; PAM sequence: TGG
tccagggattggcaaaattt

SEQ ID NO: 25794 - DNA, 20 bp, Artificial Sequence
  Description of Artificial Sequence: Synthetic oligonucleotide
  Target: SCNA; (-) strand; PAM type: NRG; PAM sequence: TGG
caatagtatagtccagggat

SEQ ID NO: 25795 - DNA, 20 bp, Artificial Sequence
  Description of Artificial Sequence: Synthetic oligonucleotide
  Target: SCNA; (-) strand; PAM type: NRG; PAM sequence: GGG
agacacaatagtatagtcca

SEQ ID NO: 25796 - DNA, 20 bp, Artificial Sequence
  Description of Artificial Sequence: Synthetic oligonucleotide
  Target: SCNA; (-) strand; PAM type: NRG; PAM sequence: AGG
aagacacaatagtatagtcc

SEQ ID NO: 25797 - DNA, 20 bp, Artificial Sequence
  Description of Artificial Sequence: Synthetic oligonucleotide
  Target: SCNA; (-) strand; PAM type: NRG; PAM sequence: CAG
gaagacacaatagtatagtc

SEQ ID NO: 25798 - DNA, 20 bp, Artificial Sequence
  Description of Artificial Sequence: Synthetic oligonucleotide
  Target: SCNA; (-) strand; PAM type: NRG; PAM sequence: TAG
catgtgaagacacaatagta

SEQ ID NO: 25799 - DNA, 20 bp, Artificial Sequence
  Description of Artificial Sequence: Synthetic oligonucleotide
  Target: SCNA; (-) strand; PAM type: NRG; PAM sequence: TAG
atgaccatgtgaagacacaa

SEQ ID NO: 25800 - DNA, 20 bp, Artificial Sequence
  Description of Artificial Sequence: Synthetic oligonucleotide
  Target: SCNA; (-) strand; PAM type: NRG; PAM sequence: AAG
agataaaaaatgaccatgtg

SEQ ID NO: 25801 - DNA, 20 bp, Artificial Sequence
  Description of Artificial Sequence: Synthetic oligonucleotide
  Target: SCNA; (-) strand; PAM type: NRG; PAM sequence: AAG
tgaacttacacacagaattt

SEQ ID NO: 25802 - DNA, 20 bp, Artificial Sequence
  Description of Artificial Sequence: Synthetic oligonucleotide
  Target: SCNA; (-) strand; PAM type: NRG; PAM sequence: CAG
ttgagagttgaacttacaca

SEQ ID NO: 25803 - DNA, 20 bp, Artificial Sequence
  Description of Artificial Sequence: Synthetic oligonucleotide
  Target: SCNA; (-) strand; PAM type: NRG; PAM sequence: GAG
acattctgagttctaattga

SEQ ID NO: 25804 - DNA, 20 bp, Artificial Sequence
  Description of Artificial Sequence: Synthetic oligonucleotide
  Target: SCNA; (-) strand; PAM type: NRG; PAM sequence: GAG
ttacattctgagttctaatt

SEQ ID NO: 25805 - DNA, 20 bp, Artificial Sequence
  Description of Artificial Sequence: Synthetic oligonucleotide
  Target: SCNA; (-) strand; PAM type: NRG; PAM sequence: GAG
ttttttattggttacattct

SEQ ID NO: 25806 - DNA, 20 bp, Artificial Sequence
  Description of Artificial Sequence: Synthetic oligonucleotide
  Target: SCNA; (-) strand; PAM type: NRG; PAM sequence: TGG
acattctataaattttttat

SEQ ID NO: 25807 - DNA, 20 bp, Artificial Sequence
  Description of Artificial Sequence: Synthetic oligonucleotide
  Target: SCNA; (-) strand; PAM type: NRG; PAM sequence: TAG
ctctcatggcatttaacaca

SEQ ID NO: 25808 - DNA, 20 bp, Artificial Sequence
  Description of Artificial Sequence: Synthetic oligonucleotide
  Target: SCNA; (-) strand; PAM type: NRG; PAM sequence: TGG
atcattttcaatgtctctca

SEQ ID NO: 25809 - DNA, 20 bp, Artificial Sequence
  Description of Artificial Sequence: Synthetic oligonucleotide
  Target: SCNA; (-) strand; PAM type: NRG; PAM sequence: TAG
aagcacaagtttctttgact

SEQ ID NO: 25810 - DNA, 20 bp, Artificial Sequence
  Description of Artificial Sequence: Synthetic oligonucleotide
  Target: SCNA; (-) strand; PAM type: NRG; PAM sequence: AAG
tttccaagttctgcaagcac

SEQ ID NO: 25811 - DNA, 20 bp, Artificial Sequence
  Description of Artificial Sequence: Synthetic oligonucleotide
  Target: SCNA; (-) strand; PAM type: NRG; PAM sequence: AAG
ctcagatttccaagttctgc

SEQ ID NO: 25812 - DNA, 20 bp, Artificial Sequence
  Description of Artificial Sequence: Synthetic oligonucleotide
  Target: SCNA; (-) strand; PAM type: NRG; PAM sequence: AAG
ccgtttgtcctcagatttcc

SEQ ID NO: 25813 - DNA, 20 bp, Artificial Sequence
  Description of Artificial Sequence: Synthetic oligonucleotide
  Target: SCNA; (-) strand; PAM type: NRG; PAM sequence: CAG
aatatctttccgtttgtcct

SEQ ID NO: 25814 - DNA, 20 bp, Artificial Sequence
  Description of Artificial Sequence: Synthetic oligonucleotide
  Target: SCNA; (-) strand; PAM type: NRG; PAM sequence: CAG
aatactgaatcagtgacatg

SEQ ID NO: 25815 - DNA, 20 bp, Artificial Sequence
  Description of Artificial Sequence: Synthetic oligonucleotide
  Target: SCNA; (-) strand; PAM type: NRG; PAM sequence: CAG
tggaatttggaatactgaat

SEQ ID NO: 25816 - DNA, 20 bp, Artificial Sequence
  Description of Artificial Sequence: Synthetic oligonucleotide
  Target: SCNA; (-) strand; PAM type: NRG; PAM sequence: TGG
atacctttttagatggaatt

SEQ ID NO: 25817 - DNA, 20 bp, Artificial Sequence
  Description of Artificial Sequence: Synthetic oligonucleotide
  Target: SCNA; (-) strand; PAM type: NRG; PAM sequence: TGG
gtgaattatacctttttaga

SEQ ID NO: 25818 - DNA, 20 bp, Artificial Sequence
  Description of Artificial Sequence: Synthetic oligonucleotide
  Target: SCNA; (-) strand; PAM type: NRG; PAM sequence: TAG
aagtgtgaattatacctttt

SEQ ID NO: 25819 - DNA, 20 bp, Artificial Sequence
  Description of Artificial Sequence: Synthetic oligonucleotide
  Target: SCNA; (-) strand; PAM type: NRG; PAM sequence: AAG
ttaattttaaatattttatg

SEQ ID NO: 25820 - DNA, 20 bp, Artificial Sequence
  Description of Artificial Sequence: Synthetic oligonucleotide
  Target: SCNA; (-) strand; PAM type: NRG; PAM sequence: GAG
tacaagaggaaaaaattgat

SEQ ID NO: 25821 - DNA, 20 bp, Artificial Sequence
  Description of Artificial Sequence: Synthetic oligonucleotide
  Target: SCNA; (-) strand; PAM type: NRG; PAM sequence: AGG
ttgaaatagggtgttacaag

SEQ ID NO: 25822 - DNA, 20 bp, Artificial Sequence
  Description of Artificial Sequence: Synthetic oligonucleotide
  Target: SCNA; (-) strand; PAM type: NRG; PAM sequence: GAG
attgaaatagggtgttacaa

SEQ ID NO: 25823 - DNA, 20 bp, Artificial Sequence
  Description of Artificial Sequence: Synthetic oligonucleotide
  Target: SCNA; (-) strand; PAM type: NRG; PAM sequence: AAG
tcattgaaatagggtgttac

SEQ ID NO: 25824 - DNA, 20 bp, Artificial Sequence
  Description of Artificial Sequence: Synthetic oligonucleotide
  Target: SCNA; (-) strand; PAM type: NRG; PAM sequence: GGG
ttcagaaagtcattgaaata

SEQ ID NO: 25825 - DNA, 20 bp, Artificial Sequence
  Description of Artificial Sequence: Synthetic oligonucleotide
  Target: SCNA; (-) strand; PAM type: NRG; PAM sequence: AGG
tttcagaaagtcattgaaat

SEQ ID NO: 25826 - DNA, 20 bp, Artificial Sequence
  Description of Artificial Sequence: Synthetic oligonucleotide
  Target: SCNA; (-) strand; PAM type: NRG; PAM sequence: TAG
ttttcagaaagtcattgaaa

SEQ ID NO: 25827 - DNA, 20 bp, Artificial Sequence
  Description of Artificial Sequence: Synthetic oligonucleotide
  Target: SCNA; (-) strand; PAM type: NRG; PAM sequence: AAG
ccttaaaacatattttcaga

SEQ ID NO: 25828 - DNA, 20 bp, Artificial Sequence
  Description of Artificial Sequence: Synthetic oligonucleotide
  Target: SCNA; (-) strand; PAM type: NRG; PAM sequence: CAG
tctaccttaaaacatatttt

SEQ ID NO: 25829 - DNA, 20 bp, Artificial Sequence
  Description of Artificial Sequence: Synthetic oligonucleotide
  Target: SCNA; (-) strand; PAM type: NRG; PAM sequence: TAG
tgtgccactgcctcattatt

SEQ ID NO: 25830 - DNA, 20 bp, Artificial Sequence
  Description of Artificial Sequence: Synthetic oligonucleotide
  Target: SCNA; (-) strand; PAM type: NRG; PAM sequence: AGG
tcctgagtagccaggattat

SEQ ID NO: 25831 - DNA, 20 bp, Artificial Sequence
  Description of Artificial Sequence: Synthetic oligonucleotide
  Target: SCNA; (-) strand; PAM type: NRG; PAM sequence: TAG
ctcctgagtagccaggatta

SEQ ID NO: 25832 - DNA, 20 bp, Artificial Sequence
  Description of Artificial Sequence: Synthetic oligonucleotide
  Target: SCNA; (-) strand; PAM type: NRG; PAM sequence: AGG
cctcagcctcctgagtagcc

SEQ ID NO: 25833 - DNA, 20 bp, Artificial Sequence
  Description of Artificial Sequence: Synthetic oligonucleotide
  Target: SCNA; (-) strand; PAM type: NRG; PAM sequence: CAG
acctcagcctcctgagtagc

SEQ ID NO: 25834 - DNA, 20 bp, Artificial Sequence
  Description of Artificial Sequence: Synthetic oligonucleotide
  Target: SCNA; (-) strand; PAM type: NRG; PAM sequence: TAG
ccccacctcagcctcctgag

SEQ ID NO: 25835 - DNA, 20 bp, Artificial Sequence
  Description of Artificial Sequence: Synthetic oligonucleotide
  Target: SCNA; (-) strand; PAM type: NRG; PAM sequence: GAG
tgcccccacctcagcctcct

SEQ ID NO: 25836 - DNA, 20 bp, Artificial Sequence
  Description of Artificial Sequence: Synthetic oligonucleotide
  Target: SCNA; (-) strand; PAM type: NRG; PAM sequence: CAG
ctcaagtcatgcccccacct

SEQ ID NO: 25837 - DNA, 20 bp, Artificial Sequence
  Description of Artificial Sequence: Synthetic oligonucleotide
  Target: SCNA; (-) strand; PAM type: NRG; PAM sequence: AAG
atccttgaattcctgggctc

SEQ ID NO: 25838 - DNA, 20 bp, Artificial Sequence
  Description of Artificial Sequence: Synthetic oligonucleotide
  Target: SCNA; (-) strand; PAM type: NRG; PAM sequence: GGG
cactgcatccttgaattcct

SEQ ID NO: 25839 - DNA, 20 bp, Artificial Sequence
  Description of Artificial Sequence: Synthetic oligonucleotide
  Target: SCNA; (-) strand; PAM type: NRG; PAM sequence: TGG
tcactgcatccttgaattcc

SEQ ID NO: 25840 - DNA, 20 bp, Artificial Sequence
  Description of Artificial Sequence: Synthetic oligonucleotide
  Target: SCNA; (-) strand; PAM type: NRG; PAM sequence: TAG
ggactgcagtgatgctatca

SEQ ID NO: 25841 - DNA, 20 bp, Artificial Sequence
  Description of Artificial Sequence: Synthetic oligonucleotide
  Target: SCNA; (-) strand; PAM type: NRG; PAM sequence: CAG
ctgtcgcccaggctggactg

SEQ ID NO: 25842 - DNA, 20 bp, Artificial Sequence
  Description of Artificial Sequence: Synthetic oligonucleotide
  Target: SCNA; (-) strand; PAM type: NRG; PAM sequence: TGG
ccttgctctgtcgcccaggc

SEQ ID NO: 25843 - DNA, 20 bp, Artificial Sequence
  Description of Artificial Sequence: Synthetic oligonucleotide
  Target: SCNA; (-) strand; PAM type: NRG; PAM sequence: AGG
agggccttgctctgtcgccc

SEQ ID NO: 25844 - DNA, 20 bp, Artificial Sequence
  Description of Artificial Sequence: Synthetic oligonucleotide
  Target: SCNA; (-) strand; PAM type: NRG; PAM sequence: CAG
cagggccttgctctgtcgcc

SEQ ID NO: 25845 - DNA, 20 bp, Artificial Sequence
  Description of Artificial Sequence: Synthetic oligonucleotide
  Target: SCNA; (-) strand; PAM type: NRG; PAM sequence: GGG
attttcagtttttagagtca

SEQ ID NO: 25846 - DNA, 20 bp, Artificial Sequence
  Description of Artificial Sequence: Synthetic oligonucleotide
  Target: SCNA; (-) strand; PAM type: NRG; PAM sequence: AGG
tattttcagtttttagagtc

SEQ ID NO: 25847 - DNA, 20 bp, Artificial Sequence
  Description of Artificial Sequence: Synthetic oligonucleotide
  Target: SCNA; (-) strand; PAM type: NRG; PAM sequence: CAG
ttattttcagtttttagagt

SEQ ID NO: 25848 - DNA, 20 bp, Artificial Sequence
  Description of Artificial Sequence: Synthetic oligonucleotide
  Target: SCNA; (-) strand; PAM type: NRG; PAM sequence: GAG
ttttttattttcagttttta

SEQ ID NO: 25849 - DNA, 20 bp, Artificial Sequence
  Description of Artificial Sequence: Synthetic oligonucleotide
  Target: SCNA; (-) strand; PAM type: NRG; PAM sequence: TAG
agttttttattttcagtttt

SEQ ID NO: 25850 - DNA, 20 bp, Artificial Sequence
  Description of Artificial Sequence: Synthetic oligonucleotide
  Target: SCNA; (-) strand; PAM type: NRG; PAM sequence: CAG
ttttttcagttttttatttt

SEQ ID NO: 25851 - DNA, 20 bp, Artificial Sequence
  Description of Artificial Sequence: Synthetic oligonucleotide
  Target: SCNA; (-) strand; PAM type: NRG; PAM sequence: CAG
ttcacaacacattttttttt

SEQ ID NO: 25852 - DNA, 20 bp, Artificial Sequence
  Description of Artificial Sequence: Synthetic oligonucleotide
  Target: SCNA; (-) strand; PAM type: NRG; PAM sequence: AAG
tatatgaatgcatctcatca

SEQ ID NO: 25853 - DNA, 20 bp, Artificial Sequence
  Description of Artificial Sequence: Synthetic oligonucleotide
  Target: SCNA; (-) strand; PAM type: NRG; PAM sequence: GGG
gtgggggaaattttatactt

SEQ ID NO: 25854 - DNA, 20 bp, Artificial Sequence
  Description of Artificial Sequence: Synthetic oligonucleotide
  Target: SCNA; (-) strand; PAM type: NRG; PAM sequence: TGG
agtgggggaaattttatact

SEQ ID NO: 25855 - DNA, 20 bp, Artificial Sequence
  Description of Artificial Sequence: Synthetic oligonucleotide
  Target: SCNA; (-) strand; PAM type: NRG; PAM sequence: GGG
tcttcaacatagatcagtgg

SEQ ID NO: 25856 - DNA, 20 bp, Artificial Sequence
  Description of Artificial Sequence: Synthetic oligonucleotide
  Target: SCNA; (-) strand; PAM type: NRG; PAM sequence: GGG
ctcttcaacatagatcagtg

SEQ ID NO: 25857 - DNA, 20 bp, Artificial Sequence
  Description of Artificial Sequence: Synthetic oligonucleotide
  Target: SCNA; (-) strand; PAM type: NRG; PAM sequence: GGG
tctcttcaacatagatcagt

SEQ ID NO: 25858 - DNA, 20 bp, Artificial Sequence
  Description of Artificial Sequence: Synthetic oligonucleotide
  Target: SCNA; (-) strand; PAM type: NRG; PAM sequence: TGG
atctcttcaacatagatcag

SEQ ID NO: 25859 - DNA, 20 bp, Artificial Sequence
  Description of Artificial Sequence: Synthetic oligonucleotide
  Target: SCNA; (-) strand; PAM type: NRG; PAM sequence: CAG
actatctcttcaacatagat

SEQ ID NO: 25860 - DNA, 20 bp, Artificial Sequence
  Description of Artificial Sequence: Synthetic oligonucleotide
  Target: SCNA; (-) strand; PAM type: NRG; PAM sequence: TAG
gctacactatctcttcaaca

SEQ ID NO: 25861 - DNA, 20 bp, Artificial Sequence
  Description of Artificial Sequence: Synthetic oligonucleotide
  Target: SCNA; (-) strand; PAM type: NRG; PAM sequence: AAG
tatgtctgcaaagtgaaaga

SEQ ID NO: 25862 - DNA, 20 bp, Artificial Sequence
  Description of Artificial Sequence: Synthetic oligonucleotide
  Target: SCNA; (-) strand; PAM type: NRG; PAM sequence: AAG
cgtctatgtctgcaaagtga

SEQ ID NO: 25863 - DNA, 20 bp, Artificial Sequence
  Description of Artificial Sequence: Synthetic oligonucleotide
  Target: SCNA; (-) strand; PAM type: NRG; PAM sequence: AAG
gtgctccgtctatgtctgca

SEQ ID NO: 25864 - DNA, 20 bp, Artificial Sequence
  Description of Artificial Sequence: Synthetic oligonucleotide
  Target: SCNA; (-) strand; PAM type: NRG; PAM sequence: TAG
gatgaccacattgagttgcc

SEQ ID NO: 25865 - DNA, 20 bp, Artificial Sequence
  Description of Artificial Sequence: Synthetic oligonucleotide
  Target: SCNA; (-) strand; PAM type: NRG; PAM sequence: GAG
aggtggaggatgaccacatt

SEQ ID NO: 25866 - DNA, 20 bp, Artificial Sequence
  Description of Artificial Sequence: Synthetic oligonucleotide
  Target: SCNA; (-) strand; PAM type: NRG; PAM sequence: AGG
caggatgaacagtcaggtgg

SEQ ID NO: 25867 - DNA, 20 bp, Artificial Sequence
  Description of Artificial Sequence: Synthetic oligonucleotide
  Target: SCNA; (-) strand; PAM type: NRG; PAM sequence: GAG
acaggatgaacagtcaggtg

SEQ ID NO: 25868 - DNA, 20 bp, Artificial Sequence
  Description of Artificial Sequence: Synthetic oligonucleotide
  Target: SCNA; (-) strand; PAM type: NRG; PAM sequence: TGG
tcacaggatgaacagtcagg

SEQ ID NO: 25869 - DNA, 20 bp, Artificial Sequence
  Description of Artificial Sequence: Synthetic oligonucleotide
  Target: SCNA; (-) strand; PAM type: NRG; PAM sequence: AGG
gagtcacaggatgaacagtc

SEQ ID NO: 25870 - DNA, 20 bp, Artificial Sequence
  Description of Artificial Sequence: Synthetic oligonucleotide
  Target: SCNA; (-) strand; PAM type: NRG; PAM sequence: CAG
agagtcacaggatgaacagt

SEQ ID NO: 25871 - DNA, 20 bp, Artificial Sequence
  Description of Artificial Sequence: Synthetic oligonucleotide
  Target: SCNA; (-) strand; PAM type: NRG; PAM sequence: CAG
agtaagagtcacaggatgaa

SEQ ID NO: 25872 - DNA, 20 bp, Artificial Sequence
  Description of Artificial Sequence: Synthetic oligonucleotide
  Target: SCNA; (-) strand; PAM type: NRG; PAM sequence: AGG
actatagcagtaagagtcac

SEQ ID NO: 25873 - DNA, 20 bp, Artificial Sequence
  Description of Artificial Sequence: Synthetic oligonucleotide
  Target: SCNA; (-) strand; PAM type: NRG; PAM sequence: CAG
aactatagcagtaagagtca

SEQ ID NO: 25874 - DNA, 20 bp, Artificial Sequence
  Description of Artificial Sequence: Synthetic oligonucleotide
  Target: SCNA; (-) strand; PAM type: NRG; PAM sequence: GAG
ggtggcaactatagcagtaa

SEQ ID NO: 25875 - DNA, 20 bp, Artificial Sequence
  Description of Artificial Sequence: Synthetic oligonucleotide
  Target: SCNA; (-) strand; PAM type: NRG; PAM sequence: AAG
ctggtggcaactatagcagt

SEQ ID NO: 25876 - DNA, 20 bp, Artificial Sequence
  Description of Artificial Sequence: Synthetic oligonucleotide
  Target: SCNA; (-) strand; PAM type: NRG; PAM sequence: CAG
ttctctggtggcaactatag

SEQ ID NO: 25877 - DNA, 20 bp, Artificial Sequence
  Description of Artificial Sequence: Synthetic oligonucleotide
  Target: SCNA; (-) strand; PAM type: NRG; PAM sequence: TAG
acattctctggtggcaacta

SEQ ID NO: 25878 - DNA, 20 bp, Artificial Sequence
  Description of Artificial Sequence: Synthetic oligonucleotide
  Target: SCNA; (-) strand; PAM type: NRG; PAM sequence: TGG
agctttttcacattctctgg

SEQ ID NO: 25879 - DNA, 20 bp, Artificial Sequence
  Description of Artificial Sequence: Synthetic oligonucleotide
  Target: SCNA; (-) strand; PAM type: NRG; PAM sequence: TGG
ctgagctttttcacattctc

SEQ ID NO: 25880 - DNA, 20 bp, Artificial Sequence
  Description of Artificial Sequence: Synthetic oligonucleotide
  Target: SCNA; (-) strand; PAM type: NRG; PAM sequence: GAG
tcctctcttctttctcctct

SEQ ID NO: 25881 - DNA, 20 bp, Artificial Sequence
  Description of Artificial Sequence: Synthetic oligonucleotide
  Target: SCNA; (-) strand; PAM type: NRG; PAM sequence: CAG
atagacacacacactcaaca

SEQ ID NO: 25882 - DNA, 20 bp, Artificial Sequence
  Description of Artificial Sequence: Synthetic oligonucleotide
  Target: SCNA; (-) strand; PAM type: NRG; PAM sequence: TAG
cacactctcatccacaggca

SEQ ID NO: 25883 - DNA, 20 bp, Artificial Sequence
  Description of Artificial Sequence: Synthetic oligonucleotide
  Target: SCNA; (-) strand; PAM type: NRG; PAM sequence: AGG
agacacacactctcatccac

SEQ ID NO: 25884 - DNA, 20 bp, Artificial Sequence
  Description of Artificial Sequence: Synthetic oligonucleotide
  Target: SCNA; (-) strand; PAM type: NRG; PAM sequence: CAG
tagacacacactctcatcca

SEQ ID NO: 25885 - DNA, 20 bp, Artificial Sequence
  Description of Artificial Sequence: Synthetic oligonucleotide
  Target: SCNA; (-) strand; PAM type: NRG; PAM sequence: TAG
ttgaattccttggaaaagaa

SEQ ID NO: 25886 - DNA, 20 bp, Artificial Sequence
  Description of Artificial Sequence: Synthetic oligonucleotide
  Target: SCNA; (-) strand; PAM type: NRG; PAM sequence: AAG
ccactttgaattccttggaa

SEQ ID NO: 25887 - DNA, 20 bp, Artificial Sequence
  Description of Artificial Sequence: Synthetic oligonucleotide
  Target: SCNA; (-) strand; PAM type: NRG; PAM sequence: TGG
acaaaccactttgaattcct

SEQ ID NO: 25888 - DNA, 20 bp, Artificial Sequence
  Description of Artificial Sequence: Synthetic oligonucleotide
  Target: SCNA; (-) strand; PAM type: NRG; PAM sequence: GAG
aacttgaactgtattcaatt

SEQ ID NO: 25889 - DNA, 20 bp, Artificial Sequence
  Description of Artificial Sequence: Synthetic oligonucleotide
  Target: SCNA; (-) strand; PAM type: NRG; PAM sequence: GGG
gttcctaaagttccaccttg

SEQ ID NO: 25890 - DNA, 20 bp, Artificial Sequence
  Description of Artificial Sequence: Synthetic oligonucleotide
  Target: SCNA; (-) strand; PAM type: NRG; PAM sequence: GGG
tgttcctaaagttccacctt

SEQ ID NO: 25891 - DNA, 20 bp, Artificial Sequence
  Description of Artificial Sequence: Synthetic oligonucleotide
  Target: SCNA; (-) strand; PAM type: NRG; PAM sequence: TGG
ttgttcctaaagttccacct

SEQ ID NO: 25892 - DNA, 20 bp, Artificial Sequence
  Description of Artificial Sequence: Synthetic oligonucleotide
  Target: SCNA; (-) strand; PAM type: NRG; PAM sequence: AAG
ttattacctacttgttccta

SEQ ID NO: 25893 - DNA, 20 bp, Artificial Sequence
  Description of Artificial Sequence: Synthetic oligonucleotide
  Target: SCNA; (-) strand; PAM type: NRG; PAM sequence: AAG
acacacatactaaaagaata

SEQ ID NO: 25894 - DNA, 20 bp, Artificial Sequence
  Description of Artificial Sequence: Synthetic oligonucleotide
  Target: SCNA; (-) strand; PAM type: NRG; PAM sequence: AAG
tcaaatgacacacatactaa

SEQ ID NO: 25895 - DNA, 20 bp, Artificial Sequence
  Description of Artificial Sequence: Synthetic oligonucleotide
  Target: SCNA; (-) strand; PAM type: NRG; PAM sequence: TAG
atctctcagaaacatttgta

SEQ ID NO: 25896 - DNA, 20 bp, Artificial Sequence
  Description of Artificial Sequence: Synthetic oligonucleotide
  Target: SCNA; (-) strand; PAM type: NRG; PAM sequence: CAG
gagggctgctactaatctct

SEQ ID NO: 25897 - DNA, 20 bp, Artificial Sequence
  Description of Artificial Sequence: Synthetic oligonucleotide
  Target: SCNA; (-) strand; PAM type: NRG; PAM sequence: GGG
ggacagagaaaagtgcttga

SEQ ID NO: 25898 - DNA, 20 bp, Artificial Sequence
  Description of Artificial Sequence: Synthetic oligonucleotide
  Target: SCNA; (-) strand; PAM type: NRG; PAM sequence: AGG
aggacagagaaaagtgcttg

SEQ ID NO: 25899 - DNA, 20 bp, Artificial Sequence
  Description of Artificial Sequence: Synthetic oligonucleotide
  Target: SCNA; (-) strand; PAM type: NRG; PAM sequence: GAG
gaggacagagaaaagtgctt

SEQ ID NO: 25900 - DNA, 20 bp, Artificial Sequence
  Description of Artificial Sequence: Synthetic oligonucleotide
  Target: SCNA; (-) strand; PAM type: NRG; PAM sequence: AAG
tgaacactgaggacagagaa

SEQ ID NO: 25901 - DNA, 20 bp, Artificial Sequence
  Description of Artificial Sequence: Synthetic oligonucleotide
  Target: SCNA; (-) strand; PAM type: NRG; PAM sequence: GAG
ctctgtgaacactgaggaca

SEQ ID NO: 25902 - DNA, 20 bp, Artificial Sequence
  Description of Artificial Sequence: Synthetic oligonucleotide
  Target: SCNA; (-) strand; PAM type: NRG; PAM sequence: CAG
gtctctgtgaacactgagga

SEQ ID NO: 25903 - DNA, 20 bp, Artificial Sequence
  Description of Artificial Sequence: Synthetic oligonucleotide
  Target: SCNA; (-) strand; PAM type: NRG; PAM sequence: AGG
tttggtctctgtgaacactg

SEQ ID NO: 25904 - DNA, 20 bp, Artificial Sequence
  Description of Artificial Sequence: Synthetic oligonucleotide
  Target: SCNA; (-) strand; PAM type: NRG; PAM sequence: GAG
atttggtctctgtgaacact

SEQ ID NO: 25905 - DNA, 20 bp, Artificial Sequence
  Description of Artificial Sequence: Synthetic oligonucleotide
  Target: SCNA; (-) strand; PAM type: NRG; PAM sequence: TGG
agttacttcatgtgatcatt

SEQ ID NO: 25906 - DNA, 20 bp, Artificial Sequence
  Description of Artificial Sequence: Synthetic oligonucleotide
  Target: SCNA; (-) strand; PAM type: NRG; PAM sequence: GAG
gaacagattagtctttgata

SEQ ID NO: 25907 - DNA, 20 bp, Artificial Sequence
  Description of Artificial Sequence: Synthetic oligonucleotide
  Target: SCNA; (-) strand; PAM type: NRG; PAM sequence: TAG
aagaacagattagtctttga

SEQ ID NO: 25908 - DNA, 20 bp, Artificial Sequence
  Description of Artificial Sequence: Synthetic oligonucleotide
  Target: SCNA; (-) strand; PAM type: NRG; PAM sequence: TAG
ctaaaatggaaagaacagat

SEQ ID NO: 25909 - DNA, 20 bp, Artificial Sequence
  Description of Artificial Sequence: Synthetic oligonucleotide
  Target: SCNA; (-) strand; PAM type: NRG; PAM sequence: CAG
tggccctaaaatggaaagaa

SEQ ID NO: 25910 - DNA, 20 bp, Artificial Sequence
  Description of Artificial Sequence: Synthetic oligonucleotide
  Target: SCNA; (-) strand; PAM type: NRG; PAM sequence: AAG
atttgtggccctaaaatgga

SEQ ID NO: 25911 - DNA, 20 bp, Artificial Sequence
  Description of Artificial Sequence: Synthetic oligonucleotide
  Target: SCNA; (-) strand; PAM type: NRG; PAM sequence: TGG
acctatttgtggccctaaaa

SEQ ID NO: 25912 - DNA, 20 bp, Artificial Sequence
  Description of Artificial Sequence: Synthetic oligonucleotide
  Target: SCNA; (-) strand; PAM type: NRG; PAM sequence: TGG
tgtataaagagacctatttg

SEQ ID NO: 25913 - DNA, 20 bp, Artificial Sequence
  Description of Artificial Sequence: Synthetic oligonucleotide
  Target: SCNA; (-) strand; PAM type: NRG; PAM sequence: GAG
gcccctgtgatgtgtataaa

SEQ ID NO: 25914 - DNA, 20 bp, Artificial Sequence
  Description of Artificial Sequence: Synthetic oligonucleotide
  Target: SCNA; (-) strand; PAM type: NRG; PAM sequence: AAG
atgcccctgtgatgtgtata

SEQ ID NO: 25915 - DNA, 20 bp, Artificial Sequence
  Description of Artificial Sequence: Synthetic oligonucleotide
  Target: SCNA; (-) strand; PAM type: NRG; PAM sequence: TGG
ttaagaatcaaaatcattga

SEQ ID NO: 25916 - DNA, 20 bp, Artificial Sequence
  Description of Artificial Sequence: Synthetic oligonucleotide
  Target: SCNA; (-) strand; PAM type: NRG; PAM sequence: AAG
aaataatcaagaatattctt

SEQ ID NO: 25917 - DNA, 20 bp, Artificial Sequence
  Description of Artificial Sequence: Synthetic oligonucleotide
  Target: SCNA; (-) strand; PAM type: NRG; PAM sequence: AAG
tagtcttttaaaaaataatc

SEQ ID NO: 25918 - DNA, 20 bp, Artificial Sequence
  Description of Artificial Sequence: Synthetic oligonucleotide
  Target: SCNA; (-) strand; PAM type: NRG; PAM sequence: TAG
agaacagttttaaaaactca

SEQ ID NO: 25919 - DNA, 20 bp, Artificial Sequence
  Description of Artificial Sequence: Synthetic oligonucleotide
  Target: SCNA; (-) strand; PAM type: NRG; PAM sequence: CAG
cataattctatttcagagaa

SEQ ID NO: 25920 - DNA, 20 bp, Artificial Sequence
  Description of Artificial Sequence: Synthetic oligonucleotide
  Target: SCNA; (-) strand; PAM type: NRG; PAM sequence: GAG
acctacataattctatttca

SEQ ID NO: 25921 - DNA, 20 bp, Artificial Sequence
  Description of Artificial Sequence: Synthetic oligonucleotide
  Target: SCNA; (-) strand; PAM type: NRG; PAM sequence: CAG
gtacctacataattctattt

SEQ ID NO: 25922 - DNA, 20 bp, Artificial Sequence
  Description of Artificial Sequence: Synthetic oligonucleotide
  Target: SCNA; (-) strand; PAM type: NRG; PAM sequence: CAG
aatgcgactgtttgcttttc

SEQ ID NO: 25923 - DNA, 20 bp, Artificial Sequence
  Description of Artificial Sequence: Synthetic oligonucleotide
  Target: SCNA; (-) strand; PAM type: NRG; PAM sequence: TAG
aacgtgtgtatttgagctaa

SEQ ID NO: 25924 - DNA, 20 bp, Artificial Sequence
  Description of Artificial Sequence: Synthetic oligonucleotide
  Target: SCNA; (-) strand; PAM type: NRG; PAM sequence: GAG
gaatgtgaacgtgtgtattt

SEQ ID NO: 25925 - DNA, 20 bp, Artificial Sequence
  Description of Artificial Sequence: Synthetic oligonucleotide
  Target: SCNA; (-) strand; PAM type: NRG; PAM sequence: AGG
agtcagaggtatgtgtaggt

SEQ ID NO: 25926 - DNA, 20 bp, Artificial Sequence
  Description of Artificial Sequence: Synthetic oligonucleotide
  Target: SCNA; (-) strand; PAM type: NRG; PAM sequence: TAG
gagtcagaggtatgtgtagg

SEQ ID NO: 25927 - DNA, 20 bp, Artificial Sequence
  Description of Artificial Sequence: Synthetic oligonucleotide
  Target: SCNA; (-) strand; PAM type: NRG; PAM sequence: AGG
actgagtcagaggtatgtgt

SEQ ID NO: 25928 - DNA, 20 bp, Artificial Sequence
  Description of Artificial Sequence: Synthetic oligonucleotide
  Target: SCNA; (-) strand; PAM type: NRG; PAM sequence: TAG
gactgagtcagaggtatgtg

SEQ ID NO: 25929 - DNA, 20 bp, Artificial Sequence
  Description of Artificial Sequence: Synthetic oligonucleotide
  Target: SCNA; (-) strand; PAM type: NRG; PAM sequence: AGG
aaaaaggtggactgagtcag

SEQ ID NO: 25930 - DNA, 20 bp, Artificial Sequence
  Description of Artificial Sequence: Synthetic oligonucleotide
  Target: SCNA; (-) strand; PAM type: NRG; PAM sequence: GAG
caaaaaggtggactgagtca

SEQ ID NO: 25931 - DNA, 20 bp, Artificial Sequence
  Description of Artificial Sequence: Synthetic oligonucleotide
  Target: SCNA; (-) strand; PAM type: NRG; PAM sequence: CAG
gtcaaaaaggtggactgagt

SEQ ID NO: 25932 - DNA, 20 bp, Artificial Sequence
  Description of Artificial Sequence: Synthetic oligonucleotide
  Target: SCNA; (-) strand; PAM type: NRG; PAM sequence: GAG
gcttgtcaaaaaggtggact

SEQ ID NO: 25933 - DNA, 20 bp, Artificial Sequence
  Description of Artificial Sequence: Synthetic oligonucleotide
  Target: SCNA; (-) strand; PAM type: NRG; PAM sequence: TGG
atcattgcttgtcaaaaagg

SEQ ID NO: 25934 - DNA, 20 bp, Artificial Sequence
  Description of Artificial Sequence: Synthetic oligonucleotide
  Target: SCNA; (-) strand; PAM type: NRG; PAM sequence: AGG
tgcatcattgcttgtcaaaa

SEQ ID NO: 25935 - DNA, 20 bp, Artificial Sequence
  Description of Artificial Sequence: Synthetic oligonucleotide
  Target: SCNA; (-) strand; PAM type: NRG; PAM sequence: AAG
ttgcatcattgcttgtcaaa

SEQ ID NO: 25936 - DNA, 20 bp, Artificial Sequence
  Description of Artificial Sequence: Synthetic oligonucleotide
  Target: SCNA; (-) strand; PAM type: NRG; PAM sequence: TAG
atcaatactctaaatgctgg

SEQ ID NO: 25937 - DNA, 20 bp, Artificial Sequence
  Description of Artificial Sequence: Synthetic oligonucleotide
  Target: SCNA; (-) strand; PAM type: NRG; PAM sequence: TGG
ataatcaatactctaaatgc

SEQ ID NO: 25938 - DNA, 20 bp, Artificial Sequence
  Description of Artificial Sequence: Synthetic oligonucleotide
  Target: SCNA; (-) strand; PAM type: NRG; PAM sequence: AGG
ttgttcatgagtgatgggtt

SEQ ID NO: 25939 - DNA, 20 bp, Artificial Sequence
  Description of Artificial Sequence: Synthetic oligonucleotide
  Target: SCNA; (-) strand; PAM type: NRG; PAM sequence: TAG
cttgttcatgagtgatgggt

SEQ ID NO: 25940 - DNA, 20 bp, Artificial Sequence
  Description of Artificial Sequence: Synthetic oligonucleotide
  Target: SCNA; (-) strand; PAM type: NRG; PAM sequence: GGG
ggtgcttgttcatgagtgat

SEQ ID NO: 25941 - DNA, 20 bp, Artificial Sequence
  Description of Artificial Sequence: Synthetic oligonucleotide
  Target: SCNA; (-) strand; PAM type: NRG; PAM sequence: TGG
tggtgcttgttcatgagtga

SEQ ID NO: 25942 - DNA, 20 bp, Artificial Sequence
  Description of Artificial Sequence: Synthetic oligonucleotide
  Target: SCNA; (-) strand; PAM type: NRG; PAM sequence: GAG
tcagtttggtgcttgttcat

SEQ ID NO: 25943 - DNA, 20 bp, Artificial Sequence
  Description of Artificial Sequence: Synthetic oligonucleotide
  Target: SCNA; (-) strand; PAM type: NRG; PAM sequence: TGG
gtaaaccccaaatgtcagtt

SEQ ID NO: 25944 - DNA, 20 bp, Artificial Sequence
  Description of Artificial Sequence: Synthetic oligonucleotide
  Target: SCNA; (-) strand; PAM type: NRG; PAM sequence: CAG
ggtaggtaaaccccaaatgt

SEQ ID NO: 25945 - DNA, 20 bp, Artificial Sequence
  Description of Artificial Sequence: Synthetic oligonucleotide
  Target: SCNA; (-) strand; PAM type: NRG; PAM sequence: AGG
agggtgttctctatgtaggt

SEQ ID NO: 25946 - DNA, 20 bp, Artificial Sequence
  Description of Artificial Sequence: Synthetic oligonucleotide
  Target: SCNA; (-) strand; PAM type: NRG; PAM sequence: TAG
gagggtgttctctatgtagg

SEQ ID NO: 25947 - DNA, 20 bp, Artificial Sequence
  Description of Artificial Sequence: Synthetic oligonucleotide
  Target: SCNA; (-) strand; PAM type: NRG; PAM sequence: AGG
aaagagggtgttctctatgt

SEQ ID NO: 25948 - DNA, 20 bp, Artificial Sequence
  Description of Artificial Sequence: Synthetic oligonucleotide
  Target: SCNA; (-) strand; PAM type: NRG; PAM sequence: TAG
aaaagagggtgttctctatg

SEQ ID NO: 25949 - DNA, 20 bp, Artificial Sequence
  Description of Artificial Sequence: Synthetic oligonucleotide
  Target: SCNA; (-) strand; PAM type: NRG; PAM sequence: GGG
gcagcaggaaagacaaaaga

SEQ ID NO: 25950 - DNA, 20 bp, Artificial Sequence
  Description of Artificial Sequence: Synthetic oligonucleotide
  Target: SCNA; (-) strand; PAM type: NRG; PAM sequence: AGG
agcagcaggaaagacaaaag

SEQ ID NO: 25951 - DNA, 20 bp, Artificial Sequence
  Description of Artificial Sequence: Synthetic oligonucleotide
  Target: SCNA; (-) strand; PAM type: NRG; PAM sequence: GAG
aagcagcaggaaagacaaaa

SEQ ID NO: 25952 - DNA, 20 bp, Artificial Sequence
  Description of Artificial Sequence: Synthetic oligonucleotide
  Target: SCNA; (-) strand; PAM type: NRG; PAM sequence: AAG
agaagcagcaggaaagacaa

SEQ ID NO: 25953 - DNA, 20 bp, Artificial Sequence
  Description of Artificial Sequence: Synthetic oligonucleotide
  Target: SCNA; (-) strand; PAM type: NRG; PAM sequence: AAG
gtgtggcagaagcagcagga

SEQ ID NO: 25954 - DNA, 20 bp, Artificial Sequence
  Description of Artificial Sequence: Synthetic oligonucleotide
  Target: SCNA; (-) strand; PAM type: NRG; PAM sequence: AGG
cagggtgtggcagaagcagc

SEQ ID NO: 25955 - DNA, 20 bp, Artificial Sequence
  Description of Artificial Sequence: Synthetic oligonucleotide
  Target: SCNA; (-) strand; PAM type: NRG; PAM sequence: CAG
acagggtgtggcagaagcag

SEQ ID NO: 25956 - DNA, 20 bp, Artificial Sequence
  Description of Artificial Sequence: Synthetic oligonucleotide
  Target: SCNA; (-) strand; PAM type: NRG; PAM sequence: CAG
caaacagggtgtggcagaag

SEQ ID NO: 25957 - DNA, 20 bp, Artificial Sequence
  Description of Artificial Sequence: Synthetic oligonucleotide
  Target: SCNA; (-) strand; PAM type: NRG; PAM sequence: AAG
aaccaaacagggtgtggcag

SEQ ID NO: 25958 - DNA, 20 bp, Artificial Sequence
  Description of Artificial Sequence: Synthetic oligonucleotide
  Target: SCNA; (-) strand; PAM type: NRG; PAM sequence: CAG
gaaaaccaaacagggtgtgg

SEQ ID NO: 25959 - DNA, 20 bp, Artificial Sequence
  Description of Artificial Sequence: Synthetic oligonucleotide
  Target: SCNA; (-) strand; PAM type: NRG; PAM sequence: TGG
tgagaaaaccaaacagggtg

SEQ ID NO: 25960 - DNA, 20 bp, Artificial Sequence
  Description of Artificial Sequence: Synthetic oligonucleotide
  Target: SCNA; (-) strand; PAM type: NRG; PAM sequence: GGG
gctgctgagaaaaccaaaca

SEQ ID NO: 25961 - DNA, 20 bp, Artificial Sequence
  Description of Artificial Sequence: Synthetic oligonucleotide
  Target: SCNA; (-) strand; PAM type: NRG; PAM sequence: AGG
tgctgctgagaaaaccaaac

SEQ ID NO: 25962 - DNA, 20 bp, Artificial Sequence
  Description of Artificial Sequence: Synthetic oligonucleotide
  Target: SCNA; (-) strand; PAM type: NRG; PAM sequence: CAG
ctgctgctgagaaaaccaaa

SEQ ID NO: 25963 - DNA, 20 bp, Artificial Sequence
  Description of Artificial Sequence: Synthetic oligonucleotide
  Target: SCNA; (-) strand; PAM type: NRG; PAM sequence: GAG
agggagttgtggctgctgct

SEQ ID NO: 25964 - DNA, 20 bp, Artificial Sequence
  Description of Artificial Sequence: Synthetic oligonucleotide
  Target: SCNA; (-) strand; PAM type: NRG; PAM sequence: TGG
aaaggccaaggagggagttg

SEQ ID NO: 25965 - DNA, 20 bp, Artificial Sequence
  Description of Artificial Sequence: Synthetic oligonucleotide
  Target: SCNA; (-) strand; PAM type: NRG; PAM sequence: GAG
actttcaaaggccaaggagg

SEQ ID NO: 25966 - DNA, 20 bp, Artificial Sequence
  Description of Artificial Sequence: Synthetic oligonucleotide
  Target: SCNA; (-) strand; PAM type: NRG; PAM sequence: GGG
ggactttcaaaggccaagga

SEQ ID NO: 25967 - DNA, 20 bp, Artificial Sequence
  Description of Artificial Sequence: Synthetic oligonucleotide
  Target: SCNA; (-) strand; PAM type: NRG; PAM sequence: AGG
aggactttcaaaggccaagg

SEQ ID NO: 25968 - DNA, 20 bp, Artificial Sequence
  Description of Artificial Sequence: Synthetic oligonucleotide
  Target: SCNA; (-) strand; PAM type: NRG; PAM sequence: GAG
aaggactttcaaaggccaag

SEQ ID NO: 25969 - DNA, 20 bp, Artificial Sequence
  Description of Artificial Sequence: Synthetic oligonucleotide
  Target: SCNA; (-) strand; PAM type: NRG; PAM sequence: AGG
gaaaggactttcaaaggcca

SEQ ID NO: 25970 - DNA, 20 bp, Artificial Sequence
  Description of Artificial Sequence: Synthetic oligonucleotide
  Target: SCNA; (-) strand; PAM type: NRG; PAM sequence: AAG
tgaaaggactttcaaaggcc

SEQ ID NO: 25971 - DNA, 20 bp, Artificial Sequence
  Description of Artificial Sequence: Synthetic oligonucleotide
  Target: SCNA; (-) strand; PAM type: NRG; PAM sequence: AGG
attcatgaaaggactttcaa

SEQ ID NO: 25972 - DNA, 20 bp, Artificial Sequence
  Description of Artificial Sequence: Synthetic oligonucleotide
  Target: SCNA; (-) strand; PAM type: NRG; PAM sequence: AAG
tattcatgaaaggactttca

SEQ ID NO: 25973 - DNA, 20 bp, Artificial Sequence
  Description of Artificial Sequence: Synthetic oligonucleotide
  Target: SCNA; (-) strand; PAM type: NRG; PAM sequence: AGG
gccatggatgtattcatgaa

SEQ ID NO: 25974 - DNA, 20 bp, Artificial Sequence
  Description of Artificial Sequence: Synthetic oligonucleotide
  Target: SCNA; (-) strand; PAM type: NRG; PAM sequence: AAG
agccatggatgtattcatga

SEQ ID NO: 25975 - DNA, 20 bp, Artificial Sequence
  Description of Artificial Sequence: Synthetic oligonucleotide
  Target: SCNA; (-) strand; PAM type: NRG; PAM sequence: TGG
gtaaaggaattcattagcca

SEQ ID NO: 25976 - DNA, 20 bp, Artificial Sequence
  Description of Artificial Sequence: Synthetic oligonucleotide
  Target: SCNA; (-) strand; PAM type: NRG; PAM sequence: TAG
tgtggtgtaaaggaattcat

SEQ ID NO: 25977 - DNA, 20 bp, Artificial Sequence
  Description of Artificial Sequence: Synthetic oligonucleotide
  Target: SCNA; (-) strand; PAM type: NRG; PAM sequence: AGG
tgttttccagtgtggtgtaa

SEQ ID NO: 25978 - DNA, 20 bp, Artificial Sequence
  Description of Artificial Sequence: Synthetic oligonucleotide
  Target: SCNA; (-) strand; PAM type: NRG; PAM sequence: AAG
atgttttccagtgtggtgta

SEQ ID NO: 25979 - DNA, 20 bp, Artificial Sequence
  Description of Artificial Sequence: Synthetic oligonucleotide
  Target: SCNA; (-) strand; PAM type: NRG; PAM sequence: TGG
gtattttatgttttccagtg

SEQ ID NO: 25980 - DNA, 20 bp, Artificial Sequence
  Description of Artificial Sequence: Synthetic oligonucleotide
  Target: SCNA; (-) strand; PAM type: NRG; PAM sequence: CAG
aaagtgtattttatgttttc

SEQ ID NO: 25981 - DNA, 20 bp, Artificial Sequence
  Description of Artificial Sequence: Synthetic oligonucleotide
  Target: SCNA; (-) strand; PAM type: NRG; PAM sequence: AAG
tccccgaaagttctcattca

SEQ ID NO: 25982 - DNA, 20 bp, Artificial Sequence
  Description of Artificial Sequence: Synthetic oligonucleotide
  Target: SCNA; (-) strand; PAM type: NRG; PAM sequence: AAG
ttttgtttatttttccccga

SEQ ID NO: 25983 - DNA, 20 bp, Artificial Sequence
  Description of Artificial Sequence: Synthetic oligonucleotide
  Target: SCNA; (-) strand; PAM type: NRG; PAM sequence: CAG
gagggtttctcatgattttt

SEQ ID NO: 25984 - DNA, 20 bp, Artificial Sequence
  Description of Artificial Sequence: Synthetic oligonucleotide
  Target: SCNA; (-) strand; PAM type: NRG; PAM sequence: GGG
aaagagtctcacactttgga

SEQ ID NO: 25985 - DNA, 20 bp, Artificial Sequence
  Description of Artificial Sequence: Synthetic oligonucleotide
  Target: SCNA; (-) strand; PAM type: NRG; PAM sequence: AGG
aaaagagtctcacactttgg

SEQ ID NO: 25986 - DNA, 20 bp, Artificial Sequence
  Description of Artificial Sequence: Synthetic oligonucleotide
  Target: SCNA; (-) strand; PAM type: NRG; PAM sequence: GAG
taaaagagtctcacactttg

SEQ ID NO: 25987 - DNA, 20 bp, Artificial Sequence
  Description of Artificial Sequence: Synthetic oligonucleotide
  Target: SCNA; (-) strand; PAM type: NRG; PAM sequence: TGG
cttaaaagagtctcacactt

SEQ ID NO: 25988 - DNA, 20 bp, Artificial Sequence
  Description of Artificial Sequence: Synthetic oligonucleotide
  Target: SCNA; (-) strand; PAM type: NRG; PAM sequence: GAG
aaatgagtgtacacttaaaa

SEQ ID NO: 25989 - DNA, 20 bp, Artificial Sequence
  Description of Artificial Sequence: Synthetic oligonucleotide
  Target: SCNA; (-) strand; PAM type: NRG; PAM sequence: AAG
ttaaatgagtgtacacttaa

SEQ ID NO: 25990 - DNA, 20 bp, Artificial Sequence
  Description of Artificial Sequence: Synthetic oligonucleotide
  Target: SCNA; (-) strand; PAM type: NRG; PAM sequence: GAG
gctttgtccaatggttaaat

SEQ ID NO: 25991 - DNA, 20 bp, Artificial Sequence
  Description of Artificial Sequence: Synthetic oligonucleotide
  Target: SCNA; (-) strand; PAM type: NRG; PAM sequence: TGG
aaaatgtctgctttgtccaa

SEQ ID NO: 25992 - DNA, 20 bp, Artificial Sequence
  Description of Artificial Sequence: Synthetic oligonucleotide
  Target: SCNA; (-) strand; PAM type: NRG; PAM sequence: GAG
atgctaaatttttaatgcca

SEQ ID NO: 25993 - DNA, 20 bp, Artificial Sequence
  Description of Artificial Sequence: Synthetic oligonucleotide
  Target: SCNA; (-) strand; PAM type: NRG; PAM sequence: CAG
agatgctaaatttttaatgc

SEQ ID NO: 25994 - DNA, 20 bp, Artificial Sequence
  Description of Artificial Sequence: Synthetic oligonucleotide
  Target: SCNA; (-) strand; PAM type: NRG; PAM sequence: GAG
ttactagccaagatggatgg

SEQ ID NO: 25995 - DNA, 20 bp, Artificial Sequence
  Description of Artificial Sequence: Synthetic oligonucleotide
  Target: SCNA; (-) strand; PAM type: NRG; PAM sequence: GGG
ttttactagccaagatggat

SEQ ID NO: 25996 - DNA, 20 bp, Artificial Sequence
  Description of Artificial Sequence: Synthetic oligonucleotide
  Target: SCNA; (-) strand; PAM type: NRG; PAM sequence: TGG
cttttactagccaagatgga

SEQ ID NO: 25997 - DNA, 20 bp, Artificial Sequence
  Description of Artificial Sequence: Synthetic oligonucleotide
  Target: SCNA; (-) strand; PAM type: NRG; PAM sequence: TGG
tagacttttactagccaaga

SEQ ID NO: 25998 - DNA, 20 bp, Artificial Sequence
  Description of Artificial Sequence: Synthetic oligonucleotide
  Target: SCNA; (-) strand; PAM type: NRG; PAM sequence: AAG
tggctagacttttactagcc

SEQ ID NO: 25999 - DNA, 20 bp, Artificial Sequence
  Description of Artificial Sequence: Synthetic oligonucleotide
  Target: SCNA; (-) strand; PAM type: NRG; PAM sequence: TAG
ttaggtggctagacttttac

SEQ ID NO: 26000 - DNA, 20 bp, Artificial Sequence
  Description of Artificial Sequence: Synthetic oligonucleotide
  Target: SCNA; (-) strand; PAM type: NRG; PAM sequence: TAG
ctaatccgtggttaggtggc

SEQ ID NO: 26001 - DNA, 20 bp, Artificial Sequence
  Description of Artificial Sequence: Synthetic oligonucleotide
  Target: SCNA; (-) strand; PAM type: NRG; PAM sequence: TGG
catcctaatccgtggttagg

SEQ ID NO: 26002 - DNA, 20 bp, Artificial Sequence
  Description of Artificial Sequence: Synthetic oligonucleotide
  Target: SCNA; (-) strand; PAM type: NRG; PAM sequence: AGG
attcatcctaatccgtggtt

SEQ ID NO: 26003 - DNA, 20 bp, Artificial Sequence
  Description of Artificial Sequence: Synthetic oligonucleotide
  Target: SCNA; (-) strand; PAM type: NRG; PAM sequence: TAG
gattcatcctaatccgtggt

SEQ ID NO: 26004 - DNA, 20 bp, Artificial Sequence
  Description of Artificial Sequence: Synthetic oligonucleotide
  Target: SCNA; (-) strand; PAM type: NRG; PAM sequence: TGG
agaggattcatcctaatccg

SEQ ID NO: 26005 - DNA, 20 bp, Artificial Sequence
  Description of Artificial Sequence: Synthetic oligonucleotide
  Target: SCNA; (-) strand; PAM type: NRG; PAM sequence: AGG
atgcagtaataacaactcag

SEQ ID NO: 26006 - DNA, 20 bp, Artificial Sequence
  Description of Artificial Sequence: Synthetic oligonucleotide
  Target: SCNA; (-) strand; PAM type: NRG; PAM sequence: GAG
aatgcagtaataacaactca

SEQ ID NO: 26007 - DNA, 20 bp, Artificial Sequence
  Description of Artificial Sequence: Synthetic oligonucleotide
  Target: SCNA; (-) strand; PAM type: NRG; PAM sequence: CAG
gaaatgcagtaataacaact

SEQ ID NO: 26008 - DNA, 20 bp, Artificial Sequence
  Description of Artificial Sequence: Synthetic oligonucleotide
  Target: SCNA; (-) strand; PAM type: NRG; PAM sequence: CAG
gcaactccacttctgaaatg

SEQ ID NO: 26009 - DNA, 20 bp, Artificial Sequence
  Description of Artificial Sequence: Synthetic oligonucleotide
  Target: SCNA; (-) strand; PAM type: NRG; PAM sequence: GGG
accccgggaatttaaaaaag

SEQ ID NO: 26010 - DNA, 20 bp, Artificial Sequence
  Description of Artificial Sequence: Synthetic oligonucleotide
  Target: SCNA; (-) strand; PAM type: NRG; PAM sequence: GGG
gaccccgggaatttaaaaaa

SEQ ID NO: 26011 - DNA, 20 bp, Artificial Sequence
  Description of Artificial Sequence: Synthetic oligonucleotide
  Target: SCNA; (-) strand; PAM type: NRG; PAM sequence: AGG
agaccccgggaatttaaaaa

SEQ ID NO: 26012 - DNA, 20 bp, Artificial Sequence
  Description of Artificial Sequence: Synthetic oligonucleotide
  Target: SCNA; (-) strand; PAM type: NRG; PAM sequence: AAG
tagaccccgggaatttaaaa

SEQ ID NO: 26013 - DNA, 20 bp, Artificial Sequence
  Description of Artificial Sequence: Synthetic oligonucleotide
  Target: SCNA; (-) strand; PAM type: NRG; PAM sequence: GGG
actgttaccctttagacccc

SEQ ID NO: 26014 - DNA, 20 bp, Artificial Sequence
  Description of Artificial Sequence: Synthetic oligonucleotide
  Target: SCNA; (-) strand; PAM type: NRG; PAM sequence: CGG
tactgttaccctttagaccc

SEQ ID NO: 26015 - DNA, 20 bp, Artificial Sequence
  Description of Artificial Sequence: Synthetic oligonucleotide
  Target: SCNA; (-) strand; PAM type: NRG; PAM sequence: TAG
taactcatactgttaccctt

SEQ ID NO: 26016 - DNA, 20 bp, Artificial Sequence
  Description of Artificial Sequence: Synthetic oligonucleotide
  Target: SCNA; (-) strand; PAM type: NRG; PAM sequence: CAG
tacccctgaccctaagcctc

SEQ ID NO: 26017 - DNA, 20 bp, Artificial Sequence
  Description of Artificial Sequence: Synthetic oligonucleotide
  Target: SCNA; (-) strand; PAM type: NRG; PAM sequence: AAG
ttaaggatacccctgaccct

SEQ ID NO: 26018 - DNA, 20 bp, Artificial Sequence
  Description of Artificial Sequence: Synthetic oligonucleotide
  Target: SCNA; (-) strand; PAM type: NRG; PAM sequence: AGG
ttcttctgggattcatgtta

SEQ ID NO: 26019 - DNA, 20 bp, Artificial Sequence
  Description of Artificial Sequence: Synthetic oligonucleotide
  Target: SCNA; (-) strand; PAM type: NRG; PAM sequence: AAG
cttcttctgggattcatgtt

SEQ ID NO: 26020 - DNA, 20 bp, Artificial Sequence
  Description of Artificial Sequence: Synthetic oligonucleotide
  Target: SCNA; (-) strand; PAM type: NRG; PAM sequence: GGG
caacctgttagccttcttct

SEQ ID NO: 26021 - DNA, 20 bp, Artificial Sequence
  Description of Artificial Sequence: Synthetic oligonucleotide
  Target: SCNA; (-) strand; PAM type: NRG; PAM sequence: TGG
tcaacctgttagccttcttc

SEQ ID NO: 26022 - DNA, 20 bp, Artificial Sequence
  Description of Artificial Sequence: Synthetic oligonucleotide
  Target: SCNA; (-) strand; PAM type: NRG; PAM sequence: TAG
cctttccaccatcaacctgt

SEQ ID NO: 26023 - DNA, 20 bp, Artificial Sequence
  Description of Artificial Sequence: Synthetic oligonucleotide
  Target: SCNA; (-) strand; PAM type: NRG; PAM sequence: TAG
ccacaccccgagtgagcagt

SEQ ID NO: 26024 - DNA, 20 bp, Artificial Sequence
  Description of Artificial Sequence: Synthetic oligonucleotide
  Target: SCNA; (-) strand; PAM type: NRG; PAM sequence: CAG
tgaaccacaccccgagtgag

SEQ ID NO: 26025 - DNA, 20 bp, Artificial Sequence
  Description of Artificial Sequence: Synthetic oligonucleotide
  Target: SCNA; (-) strand; PAM type: NRG; PAM sequence: GAG
gtttgaaccacaccccgagt

SEQ ID NO: 26026 - DNA, 20 bp, Artificial Sequence
  Description of Artificial Sequence: Synthetic oligonucleotide
  Target: SCNA; (-) strand; PAM type: NRG; PAM sequence: GAG
ctgagtttgaaccacacccc

SEQ ID NO: 26027 - DNA, 20 bp, Artificial Sequence
  Description of Artificial Sequence: Synthetic oligonucleotide
  Target: SCNA; (-) strand; PAM type: NRG; PAM sequence: GAG
cttgggcctgctgtttgcct

SEQ ID NO: 26028 - DNA, 20 bp, Artificial Sequence
  Description of Artificial Sequence: Synthetic oligonucleotide
  Target: SCNA; (-) strand; PAM type: NRG; PAM sequence: GGG
ggattagaaccatcacactt

SEQ ID NO: 26029 - DNA, 20 bp, Artificial Sequence
  Description of Artificial Sequence: Synthetic oligonucleotide
  Target: SCNA; (-) strand; PAM type: NRG; PAM sequence: TGG
tggattagaaccatcacact

SEQ ID NO: 26030 - DNA, 20 bp, Artificial Sequence
  Description of Artificial Sequence: Synthetic oligonucleotide
  Target: SCNA; (-) strand; PAM type: NRG; PAM sequence: TAG
ggggtggatgttggatggat

SEQ ID NO: 26031 - DNA, 20 bp, Artificial Sequence
  Description of Artificial Sequence: Synthetic oligonucleotide
  Target: SCNA; (-) strand; PAM type: NRG; PAM sequence: TGG
gggcgggggtggatgttgga

SEQ ID NO: 26032 - DNA, 20 bp, Artificial Sequence
  Description of Artificial Sequence: Synthetic oligonucleotide
  Target: SCNA; (-) strand; PAM type: NRG; PAM sequence: TGG
ctgagggcgggggtggatgt

SEQ ID NO: 26033 - DNA, 20 bp, Artificial Sequence
  Description of Artificial Sequence: Synthetic oligonucleotide
  Target: SCNA; (-) strand; PAM type: NRG; PAM sequence: TGG
tagatagctgagggcggggg

SEQ ID NO: 26034 - DNA, 20 bp, Artificial Sequence
  Description of Artificial Sequence: Synthetic oligonucleotide
  Target: SCNA; (-) strand; PAM type: NRG; PAM sequence: GGG
gggtagatagctgagggcgg

SEQ ID NO: 26035 - DNA, 20 bp, Artificial Sequence
  Description of Artificial Sequence: Synthetic oligonucleotide
  Target: SCNA; (-) strand; PAM type: NRG; PAM sequence: GGG
agggtagatagctgagggcg

SEQ ID NO: 26036 - DNA, 20 bp, Artificial Sequence
  Description of Artificial Sequence: Synthetic oligonucleotide
  Target: SCNA; (-) strand; PAM type: NRG; PAM sequence: GGG
cagggtagatagctgagggc

SEQ ID NO: 26037 - DNA, 20 bp, Artificial Sequence
  Description of Artificial Sequence: Synthetic oligonucleotide
  Target: SCNA; (-) strand; PAM type: NRG; PAM sequence: CGG
tcagggtagatagctgaggg

SEQ ID NO: 26038 - DNA, 20 bp, Artificial Sequence
  Description of Artificial Sequence: Synthetic oligonucleotide
  Target: SCNA; (-) strand; PAM type: NRG; PAM sequence: GGG
tgctcagggtagatagctga

SEQ ID NO: 26039 - DNA, 20 bp, Artificial Sequence
  Description of Artificial Sequence: Synthetic oligonucleotide
  Target: SCNA; (-) strand; PAM type: NRG; PAM sequence: AGG
ctgctcagggtagatagctg

SEQ ID NO: 26040 - DNA, 20 bp, Artificial Sequence
  Description of Artificial Sequence: Synthetic oligonucleotide
  Target: SCNA; (-) strand; PAM type: NRG; PAM sequence: GAG
cctgctcagggtagatagct

SEQ ID NO: 26041 - DNA, 20 bp, Artificial Sequence
  Description of Artificial Sequence: Synthetic oligonucleotide
  Target: SCNA; (-) strand; PAM type: NRG; PAM sequence: TAG
cggcgcctgctcagggtaga

SEQ ID NO: 26042 - DNA, 20 bp, Artificial Sequence
  Description of Artificial Sequence: Synthetic oligonucleotide
  Target: SCNA; (-) strand; PAM type: NRG; PAM sequence: TAG
tgagcggcgcctgctcaggg

SEQ ID NO: 26043 - DNA, 20 bp, Artificial Sequence
  Description of Artificial Sequence: Synthetic oligonucleotide
  Target: SCNA; (-) strand; PAM type: NRG; PAM sequence: GGG
gtgtgagcggcgcctgctca

SEQ ID NO: 26044 - DNA, 20 bp, Artificial Sequence
  Description of Artificial Sequence: Synthetic oligonucleotide
  Target: SCNA; (-) strand; PAM type: NRG; PAM sequence: AGG
agtgtgagcggcgcctgctc

SEQ ID NO: 26045 - DNA, 20 bp, Artificial Sequence
  Description of Artificial Sequence: Synthetic oligonucleotide
  Target: SCNA; (-) strand; PAM type: NRG; PAM sequence: CAG
gagtgtgagcggcgcctgct

SEQ ID NO: 26046 - DNA, 20 bp, Artificial Sequence
  Description of Artificial Sequence: Synthetic oligonucleotide
  Target: SCNA; (-) strand; PAM type: NRG; PAM sequence: CGG
agacggcccgcgagtgtgag

SEQ ID NO: 26047 - DNA, 20 bp, Artificial Sequence
  Description of Artificial Sequence: Synthetic oligonucleotide
  Target: SCNA; (-) strand; PAM type: NRG; PAM sequence: GAG
tggagacggcccgcgagtgt

SEQ ID NO: 26048 - DNA, 20 bp, Artificial Sequence
  Description of Artificial Sequence: Synthetic oligonucleotide
  Target: SCNA; (-) strand; PAM type: NRG; PAM sequence: GAG
cggggttggagacggcccgc

SEQ ID NO: 26049 - DNA, 20 bp, Artificial Sequence
  Description of Artificial Sequence: Synthetic oligonucleotide
  Target: SCNA; (-) strand; PAM type: NRG; PAM sequence: CGG
ggctggcgcggggttggaga

SEQ ID NO: 26050 - DNA, 20 bp, Artificial Sequence
  Description of Artificial Sequence: Synthetic oligonucleotide
  Target: SCNA; (-) strand; PAM type: NRG; PAM sequence: GAG
gggtggctggcgcggggttg

SEQ ID NO: 26051 - DNA, 20 bp, Artificial Sequence
  Description of Artificial Sequence: Synthetic oligonucleotide
  Target: SCNA; (-) strand; PAM type: NRG; PAM sequence: TGG
tcgggtggctggcgcggggt

SEQ ID NO: 26052 - DNA, 20 bp, Artificial Sequence
  Description of Artificial Sequence: Synthetic oligonucleotide
  Target: SCNA; (-) strand; PAM type: NRG; PAM sequence: GGG
cccctcgggtggctggcgcg

SEQ ID NO: 26053 - DNA, 20 bp, Artificial Sequence
  Description of Artificial Sequence: Synthetic oligonucleotide
  Target: SCNA; (-) strand; PAM type: NRG; PAM sequence: GGG
ccccctcgggtggctggcgc

SEQ ID NO: 26054 - DNA, 20 bp, Artificial Sequence
  Description of Artificial Sequence: Synthetic oligonucleotide
  Target: SCNA; (-) strand; PAM type: NRG; PAM sequence: CGG
gccccctcgggtggctggcg

SEQ ID NO: 26055 - DNA, 20 bp, Artificial Sequence
  Description of Artificial Sequence: Synthetic oligonucleotide
  Target: SCNA; (-) strand; PAM type: NRG; PAM sequence: TGG
agaacgccccctcgggtggc

SEQ ID NO: 26056 - DNA, 20 bp, Artificial Sequence
  Description of Artificial Sequence: Synthetic oligonucleotide
  Target: SCNA; (-) strand; PAM type: NRG; PAM sequence: TGG
gctgagaacgccccctcggg

SEQ ID NO: 26057 - DNA, 20 bp, Artificial Sequence
  Description of Artificial Sequence: Synthetic oligonucleotide
  Target: SCNA; (-) strand; PAM type: NRG; PAM sequence: GGG
gaggctgagaacgccccctc

SEQ ID NO: 26058 - DNA, 20 bp, Artificial Sequence
  Description of Artificial Sequence: Synthetic oligonucleotide
  Target: SCNA; (-) strand; PAM type: NRG; PAM sequence: CGG
ggaggctgagaacgccccct

SEQ ID NO: 26059 - DNA, 20 bp, Artificial Sequence
  Description of Artificial Sequence: Synthetic oligonucleotide
  Target: SCNA; (-) strand; PAM type: NRG; PAM sequence: GAG
ggtccgctagggtggaggct

SEQ ID NO: 26060 - DNA, 20 bp, Artificial Sequence
  Description of Artificial Sequence: Synthetic oligonucleotide
  Target: SCNA; (-) strand; PAM type: NRG; PAM sequence: AGG
cgcggggtccgctagggtgg

SEQ ID NO: 26061 - DNA, 20 bp, Artificial Sequence
  Description of Artificial Sequence: Synthetic oligonucleotide
  Target: SCNA; (-) strand; PAM type: NRG; PAM sequence: GAG
gcgcggggtccgctagggtg

SEQ ID NO: 26062 - DNA, 20 bp, Artificial Sequence
  Description of Artificial Sequence: Synthetic oligonucleotide
  Target: SCNA; (-) strand; PAM type: NRG; PAM sequence: TGG
tggcgcggggtccgctaggg

SEQ ID NO: 26063 - DNA, 20 bp, Artificial Sequence
  Description of Artificial Sequence: Synthetic oligonucleotide
  Target: SCNA; (-) strand; PAM type: NRG; PAM sequence: GGG
tgctggcgcggggtccgcta

SEQ ID NO: 26064 - DNA, 20 bp, Artificial Sequence
  Description of Artificial Sequence: Synthetic oligonucleotide
  Target: SCNA; (-) strand; PAM type: NRG; PAM sequence: AGG
gtgctggcgcggggtccgct

SEQ ID NO: 26065 - DNA, 20 bp, Artificial Sequence
  Description of Artificial Sequence: Synthetic oligonucleotide
  Target: SCNA; (-) strand; PAM type: NRG; PAM sequence: TAG
agtgctggcgcggggtccgc

SEQ ID NO: 26066 - DNA, 20 bp, Artificial Sequence
  Description of Artificial Sequence: Synthetic oligonucleotide
  Target: SCNA; (-) strand; PAM type: NRG; PAM sequence: GGG
ggttaacaagtgctggcgcg

SEQ ID NO: 26067 - DNA, 20 bp, Artificial Sequence
  Description of Artificial Sequence: Synthetic oligonucleotide
  Target: SCNA; (-) strand; PAM type: NRG; PAM sequence: GGG
gggttaacaagtgctggcgc

SEQ ID NO: 26068 - DNA, 20 bp, Artificial Sequence
  Description of Artificial Sequence: Synthetic oligonucleotide
  Target: SCNA; (-) strand; PAM type: NRG; PAM sequence: CGG
cgggttaacaagtgctggcg

SEQ ID NO: 26069 - DNA, 20 bp, Artificial Sequence
  Description of Artificial Sequence: Synthetic oligonucleotide
  Target: SCNA; (-) strand; PAM type: NRG; PAM sequence: TGG
ggtaacgggttaacaagtgc

SEQ ID NO: 26070 - DNA, 20 bp, Artificial Sequence
  Description of Artificial Sequence: Synthetic oligonucleotide
  Target: SCNA; (-) strand; PAM type: NRG; PAM sequence: AAG
acaggtggtaacgggttaac

SEQ ID NO: 26071 - DNA, 20 bp, Artificial Sequence
  Description of Artificial Sequence: Synthetic oligonucleotide
  Target: SCNA; (-) strand; PAM type: NRG; PAM sequence: GGG
ccaagtcaacaggtggtaac

SEQ ID NO: 26072 - DNA, 20 bp, Artificial Sequence
  Description of Artificial Sequence: Synthetic oligonucleotide
  Target: SCNA; (-) strand; PAM type: NRG; PAM sequence: CGG
gccaagtcaacaggtggtaa

SEQ ID NO: 26073 - DNA, 20 bp, Artificial Sequence
  Description of Artificial Sequence: Synthetic oligonucleotide
  Target: SCNA; (-) strand; PAM type: NRG; PAM sequence: TGG
aaggaggccaagtcaacagg

SEQ ID NO: 26074 - DNA, 20 bp, Artificial Sequence
  Description of Artificial Sequence: Synthetic oligonucleotide
  Target: SCNA; (-) strand; PAM type: NRG; PAM sequence: AGG
tgcaaggaggccaagtcaac

SEQ ID NO: 26075 - DNA, 20 bp, Artificial Sequence
  Description of Artificial Sequence: Synthetic oligonucleotide
  Target: SCNA; (-) strand; PAM type: NRG; PAM sequence: CAG
gtgcaaggaggccaagtcaa

SEQ ID NO: 26076 - DNA, 20 bp, Artificial Sequence
  Description of Artificial Sequence: Synthetic oligonucleotide
  Target: SCNA; (-) strand; PAM type: NRG; PAM sequence: AAG
aatggaagtgcaaggaggcc

SEQ ID NO: 26077 - DNA, 20 bp, Artificial Sequence
  Description of Artificial Sequence: Synthetic oligonucleotide
  Target: SCNA; (-) strand; PAM type: NRG; PAM sequence: AGG
aatgaaatggaagtgcaagg

SEQ ID NO: 26078 - DNA, 20 bp, Artificial Sequence
  Description of Artificial Sequence: Synthetic oligonucleotide
  Target: SCNA; (-) strand; PAM type: NRG; PAM sequence: GAG
taatgaaatggaagtgcaag

SEQ ID NO: 26079 - DNA, 20 bp, Artificial Sequence
  Description of Artificial Sequence: Synthetic oligonucleotide
  Target: SCNA; (-) strand; PAM type: NRG; PAM sequence: AGG
aataatgaaatggaagtgca

SEQ ID NO: 26080 - DNA, 20 bp, Artificial Sequence
  Description of Artificial Sequence: Synthetic oligonucleotide
  Target: SCNA; (-) strand; PAM type: NRG; PAM sequence: AAG
aaataatgaaatggaagtgc

SEQ ID NO: 26081 - DNA, 20 bp, Artificial Sequence
  Description of Artificial Sequence: Synthetic oligonucleotide
  Target: SCNA; (-) strand; PAM type: NRG; PAM sequence: AAG
tttggcaaataatgaaatgg

SEQ ID NO: 26082 - DNA, 20 bp, Artificial Sequence
  Description of Artificial Sequence: Synthetic oligonucleotide
  Target: SCNA; (-) strand; PAM type: NRG; PAM sequence: TGG
gcgtttggcaaataatgaaa

SEQ ID NO: 26083 - DNA, 20 bp, Artificial Sequence
  Description of Artificial Sequence: Synthetic oligonucleotide
  Target: SCNA; (-) strand; PAM type: NRG; PAM sequence: TGG
taaagtaagcaagctgcgtt

SEQ ID NO: 26084 - DNA, 20 bp, Artificial Sequence
  Description of Artificial Sequence: Synthetic oligonucleotide
  Target: SCNA; (-) strand; PAM type: NRG; PAM sequence: AAG
tttttctctgtaaagtaagc

SEQ ID NO: 26085 - DNA, 20 bp, Artificial Sequence
  Description of Artificial Sequence: Synthetic oligonucleotide
  Target: SCNA; (-) strand; PAM type: NRG; PAM sequence: AAG
ttggtttttctctgtaaagt

SEQ ID NO: 26086 - DNA, 20 bp, Artificial Sequence
  Description of Artificial Sequence: Synthetic oligonucleotide
  Target: SCNA; (-) strand; PAM type: NRG; PAM sequence: AAG
tctcttggtttttctctgta

SEQ ID NO: 26087 - DNA, 20 bp, Artificial Sequence
  Description of Artificial Sequence: Synthetic oligonucleotide
  Target: SCNA; (-) strand; PAM type: NRG; PAM sequence: TGG
aatctgtctgcccgctctct

SEQ ID NO: 26088 - DNA, 20 bp, Artificial Sequence
  Description of Artificial Sequence: Synthetic oligonucleotide
  Target: SCNA; (-) strand; PAM type: NRG; PAM sequence: GAG
gaggatgctccatggagcgt

SEQ ID NO: 26089 - DNA, 20 bp, Artificial Sequence
  Description of Artificial Sequence: Synthetic oligonucleotide
  Target: SCNA; (-) strand; PAM type: NRG; PAM sequence: GAG
aaacgcgaggatgctccatg

SEQ ID NO: 26090 - DNA, 20 bp, Artificial Sequence
  Description of Artificial Sequence: Synthetic oligonucleotide
  Target: SCNA; (-) strand; PAM type: NRG; PAM sequence: TGG
ggaaacgcgaggatgctcca

SEQ ID NO: 26091 - DNA, 20 bp, Artificial Sequence
  Description of Artificial Sequence: Synthetic oligonucleotide
  Target: SCNA; (-) strand; PAM type: NRG; PAM sequence: AGG
gcttttccccgggaaacgcg

SEQ ID NO: 26092 - DNA, 20 bp, Artificial Sequence
  Description of Artificial Sequence: Synthetic oligonucleotide
  Target: SCNA; (-) strand; PAM type: NRG; PAM sequence: GAG
cgcttttccccgggaaacgc

SEQ ID NO: 26093 - DNA, 20 bp, Artificial Sequence
  Description of Artificial Sequence: Synthetic oligonucleotide
  Target: SCNA; (-) strand; PAM type: NRG; PAM sequence: GGG
tccgggatccgcttttcccc

SEQ ID NO: 26094 - DNA, 20 bp, Artificial Sequence
  Description of Artificial Sequence: Synthetic oligonucleotide
  Target: SCNA; (-) strand; PAM type: NRG; PAM sequence: CGG
ctccgggatccgcttttccc

SEQ ID NO: 26095 - DNA, 20 bp, Artificial Sequence
  Description of Artificial Sequence: Synthetic oligonucleotide
  Target: SCNA; (-) strand; PAM type: NRG; PAM sequence: GGG
agagattaggctgcttctcc

SEQ ID NO: 26096 - DNA, 20 bp, Artificial Sequence
  Description of Artificial Sequence: Synthetic oligonucleotide
  Target: SCNA; (-) strand; PAM type: NRG; PAM sequence: CGG
gagagattaggctgcttctc

SEQ ID NO: 26097 - DNA, 20 bp, Artificial Sequence
  Description of Artificial Sequence: Synthetic oligonucleotide
  Target: SCNA; (-) strand; PAM type: NRG; PAM sequence: AGG
tccacaagggctgagagatt

SEQ ID NO: 26098 - DNA, 20 bp, Artificial Sequence
  Description of Artificial Sequence: Synthetic oligonucleotide
  Target: SCNA; (-) strand; PAM type: NRG; PAM sequence: TAG
ctccacaagggctgagagat

SEQ ID NO: 26099 - DNA, 20 bp, Artificial Sequence
  Description of Artificial Sequence: Synthetic oligonucleotide
  Target: SCNA; (-) strand; PAM type: NRG; PAM sequence: GAG
cccttctccacaagggctga

SEQ ID NO: 26100 - DNA, 20 bp, Artificial Sequence
  Description of Artificial Sequence: Synthetic oligonucleotide
  Target: SCNA; (-) strand; PAM type: NRG; PAM sequence: GAG
ttcccttctccacaagggct

SEQ ID NO: 26101 - DNA, 20 bp, Artificial Sequence
  Description of Artificial Sequence: Synthetic oligonucleotide
  Target: SCNA; (-) strand; PAM type: NRG; PAM sequence: GGG
tgatattcccttctccacaa

SEQ ID NO: 26102 - DNA, 20 bp, Artificial Sequence
  Description of Artificial Sequence: Synthetic oligonucleotide
  Target: SCNA; (-) strand; PAM type: NRG; PAM sequence: AGG
ctgatattcccttctccaca

SEQ ID NO: 26103 - DNA, 20 bp, Artificial Sequence
  Description of Artificial Sequence: Synthetic oligonucleotide
  Target: SCNA; (-) strand; PAM type: NRG; PAM sequence: AAG
tctgatattcccttctccac

SEQ ID NO: 26104 - DNA, 20 bp, Artificial Sequence
  Description of Artificial Sequence: Synthetic oligonucleotide
  Target: SCNA; (-) strand; PAM type: NRG; PAM sequence: TGG
ctaaggaaagagacttgacc

SEQ ID NO: 26105 - DNA, 20 bp, Artificial Sequence
  Description of Artificial Sequence: Synthetic oligonucleotide
  Target: SCNA; (-) strand; PAM type: NRG; PAM sequence: GAG
ctttggggagcctaaggaaa

SEQ ID NO: 26106 - DNA, 20 bp, Artificial Sequence
  Description of Artificial Sequence: Synthetic oligonucleotide
  Target: SCNA; (-) strand; PAM type: NRG; PAM sequence: AAG
ccctttggggagcctaagga

SEQ ID NO: 26107 - DNA, 20 bp, Artificial Sequence
  Description of Artificial Sequence: Synthetic oligonucleotide
  Target: SCNA; (-) strand; PAM type: NRG; PAM sequence: AGG
ttgtccctttggggagccta

SEQ ID NO: 26108 - DNA, 20 bp, Artificial Sequence
  Description of Artificial Sequence: Synthetic oligonucleotide
  Target: SCNA; (-) strand; PAM type: NRG; PAM sequence: AAG
cttgtccctttggggagcct

SEQ ID NO: 26109 - DNA, 20 bp, Artificial Sequence
  Description of Artificial Sequence: Synthetic oligonucleotide
  Target: SCNA; (-) strand; PAM type: NRG; PAM sequence: GAG
tgagtacttgtccctttggg

SEQ ID NO: 26110 - DNA, 20 bp, Artificial Sequence
  Description of Artificial Sequence: Synthetic oligonucleotide
  Target: SCNA; (-) strand; PAM type: NRG; PAM sequence: GGG
ggtgagtacttgtccctttg

SEQ ID NO: 26111 - DNA, 20 bp, Artificial Sequence
  Description of Artificial Sequence: Synthetic oligonucleotide
  Target: SCNA; (-) strand; PAM type: NRG; PAM sequence: GGG
aggtgagtacttgtcccttt

SEQ ID NO: 26112 - DNA, 20 bp, Artificial Sequence
  Description of Artificial Sequence: Synthetic oligonucleotide
  Target: SCNA; (-) strand; PAM type: NRG; PAM sequence: TGG
gaggtgagtacttgtccctt

SEQ ID NO: 26113 - DNA, 20 bp, Artificial Sequence
  Description of Artificial Sequence: Synthetic oligonucleotide
  Target: SCNA; (-) strand; PAM type: NRG; PAM sequence: GAG
gggccaggtctctgggaggt

SEQ ID NO: 26114 - DNA, 20 bp, Artificial Sequence
  Description of Artificial Sequence: Synthetic oligonucleotide
  Target: SCNA; (-) strand; PAM type: NRG; PAM sequence: AGG
cgctgggccaggtctctggg

SEQ ID NO: 26115 - DNA, 20 bp, Artificial Sequence
  Description of Artificial Sequence: Synthetic oligonucleotide
  Target: SCNA; (-) strand; PAM type: NRG; PAM sequence: GAG
ccgctgggccaggtctctgg

SEQ ID NO: 26116 - DNA, 20 bp, Artificial Sequence
  Description of Artificial Sequence: Synthetic oligonucleotide
  Target: SCNA; (-) strand; PAM type: NRG; PAM sequence: GGG
acccgctgggccaggtctct

SEQ ID NO: 26117 - DNA, 20 bp, Artificial Sequence
  Description of Artificial Sequence: Synthetic oligonucleotide
  Target: SCNA; (-) strand; PAM type: NRG; PAM sequence: TGG
gacccgctgggccaggtctc

SEQ ID NO: 26118 - DNA, 20 bp, Artificial Sequence
  Description of Artificial Sequence: Synthetic oligonucleotide
  Target: SCNA; (-) strand; PAM type: NRG; PAM sequence: AGG
ccatgaggacccgctgggcc

SEQ ID NO: 26119 - DNA, 20 bp, Artificial Sequence
  Description of Artificial Sequence: Synthetic oligonucleotide
  Target: SCNA; (-) strand; PAM type: NRG; PAM sequence: CAG
gccatgaggacccgctgggc

SEQ ID NO: 26120 - DNA, 20 bp, Artificial Sequence
  Description of Artificial Sequence: Synthetic oligonucleotide
  Target: SCNA; (-) strand; PAM type: NRG; PAM sequence: GGG
tgctgccatgaggacccgct

SEQ ID NO: 26121 - DNA, 20 bp, Artificial Sequence
  Description of Artificial Sequence: Synthetic oligonucleotide
  Target: SCNA; (-) strand; PAM type: NRG; PAM sequence: TGG
gtgctgccatgaggacccgc

SEQ ID NO: 26122 - DNA, 20 bp, Artificial Sequence
  Description of Artificial Sequence: Synthetic oligonucleotide
  Target: SCNA; (-) strand; PAM type: NRG; PAM sequence: AGG
gagggggtggtgctgccatg

SEQ ID NO: 26123 - DNA, 20 bp, Artificial Sequence
  Description of Artificial Sequence: Synthetic oligonucleotide
  Target: SCNA; (-) strand; PAM type: NRG; PAM sequence: GAG
ggagggggtggtgctgccat

SEQ ID NO: 26124 - DNA, 20 bp, Artificial Sequence
  Description of Artificial Sequence: Synthetic oligonucleotide
  Target: SCNA; (-) strand; PAM type: NRG; PAM sequence: TGG
tcgtgggcaccgggaggggg

SEQ ID NO: 26125 - DNA, 20 bp, Artificial Sequence
  Description of Artificial Sequence: Synthetic oligonucleotide
  Target: SCNA; (-) strand; PAM type: NRG; PAM sequence: GGG
tggtcgtgggcaccgggagg

SEQ ID NO: 26126 - DNA, 20 bp, Artificial Sequence
  Description of Artificial Sequence: Synthetic oligonucleotide
  Target: SCNA; (-) strand; PAM type: NRG; PAM sequence: GGG
atggtcgtgggcaccgggag

SEQ ID NO: 26127 - DNA, 20 bp, Artificial Sequence
  Description of Artificial Sequence: Synthetic oligonucleotide
  Target: SCNA; (-) strand; PAM type: NRG; PAM sequence: GGG
aatggtcgtgggcaccggga

SEQ ID NO: 26128 - DNA, 20 bp, Artificial Sequence
  Description of Artificial Sequence: Synthetic oligonucleotide
  Target: SCNA; (-) strand; PAM type: NRG; PAM sequence: AGG
gaatggtcgtgggcaccggg

SEQ ID NO: 26129 - DNA, 20 bp, Artificial Sequence
  Description of Artificial Sequence: Synthetic oligonucleotide
  Target: SCNA; (-) strand; PAM type: NRG; PAM sequence: GAG
cgaatggtcgtgggcaccgg

SEQ ID NO: 26130 - DNA, 20 bp, Artificial Sequence
  Description of Artificial Sequence: Synthetic oligonucleotide
  Target: SCNA; (-) strand; PAM type: NRG; PAM sequence: GGG
gacgaatggtcgtgggcacc

SEQ ID NO: 26131 - DNA, 20 bp, Artificial Sequence
  Description of Artificial Sequence: Synthetic oligonucleotide
  Target: SCNA; (-) strand; PAM type: NRG; PAM sequence: CGG
agacgaatggtcgtgggcac

SEQ ID NO: 26132 - DNA, 20 bp, Artificial Sequence
  Description of Artificial Sequence: Synthetic oligonucleotide
  Target: SCNA; (-) strand; PAM type: NRG; PAM sequence: GGG
gatgggagacgaatggtcgt

SEQ ID NO: 26133 - DNA, 20 bp, Artificial Sequence
  Description of Artificial Sequence: Synthetic oligonucleotide
  Target: SCNA; (-) strand; PAM type: NRG; PAM sequence: TGG
ggatgggagacgaatggtcg

SEQ ID NO: 26134 - DNA, 20 bp, Artificial Sequence
  Description of Artificial Sequence: Synthetic oligonucleotide
  Target: SCNA; (-) strand; PAM type: NRG; PAM sequence: TGG
aacgccggatgggagacgaa

SEQ ID NO: 26135 - DNA, 20 bp, Artificial Sequence
  Description of Artificial Sequence: Synthetic oligonucleotide
  Target: SCNA; (-) strand; PAM type: NRG; PAM sequence: GAG
tcctggagaacgccggatgg

SEQ ID NO: 26136 - DNA, 20 bp, Artificial Sequence
  Description of Artificial Sequence: Synthetic oligonucleotide
  Target: SCNA; (-) strand; PAM type: NRG; PAM sequence: GGG
aatcctggagaacgccggat

SEQ ID NO: 26137 - DNA, 20 bp, Artificial Sequence
  Description of Artificial Sequence: Synthetic oligonucleotide
  Target: SCNA; (-) strand; PAM type: NRG; PAM sequence: TGG
aaatcctggagaacgccgga

SEQ ID NO: 26138 - DNA, 20 bp, Artificial Sequence
  Description of Artificial Sequence: Synthetic oligonucleotide
  Target: SCNA; (-) strand; PAM type: NRG; PAM sequence: CGG
ttggaaatcctggagaacgc

SEQ ID NO: 26139 - DNA, 20 bp, Artificial Sequence
  Description of Artificial Sequence: Synthetic oligonucleotide
  Target: SCNA; (-) strand; PAM type: NRG; PAM sequence: GAG
gggcgtctttggaaatcctg

SEQ ID NO: 26140 - DNA, 20 bp, Artificial Sequence
  Description of Artificial Sequence: Synthetic oligonucleotide
  Target: SCNA; (-) strand; PAM type: NRG; PAM sequence: TGG
acgggcgtctttggaaatcc

SEQ ID NO: 26141 - DNA, 20 bp, Artificial Sequence
  Description of Artificial Sequence: Synthetic oligonucleotide
  Target: SCNA; (-) strand; PAM type: NRG; PAM sequence: TGG
tggatctaaacgggcgtctt

SEQ ID NO: 26142 - DNA, 20 bp, Artificial Sequence
  Description of Artificial Sequence: Synthetic oligonucleotide
  Target: SCNA; (-) strand; PAM type: NRG; PAM sequence: GGG
aagtacctgtggatctaaac

SEQ ID NO: 26143 - DNA, 20 bp, Artificial Sequence
  Description of Artificial Sequence: Synthetic oligonucleotide
  Target: SCNA; (-) strand; PAM type: NRG; PAM sequence: CGG
taagtacctgtggatctaaa

SEQ ID NO: 26144 - DNA, 20 bp, Artificial Sequence
  Description of Artificial Sequence: Synthetic oligonucleotide
  Target: SCNA; (-) strand; PAM type: NRG; PAM sequence: TGG
gggactcaggtaagtacctg

SEQ ID NO: 26145 - DNA, 20 bp, Artificial Sequence
  Description of Artificial Sequence: Synthetic oligonucleotide
  Target: SCNA; (-) strand; PAM type: NRG; PAM sequence: AAG
agaagcagagggactcaggt

SEQ ID NO: 26146 - DNA, 20 bp, Artificial Sequence
  Description of Artificial Sequence: Synthetic oligonucleotide
  Target: SCNA; (-) strand; PAM type: NRG; PAM sequence: AGG
gtggagaagcagagggactc

SEQ ID NO: 26147 - DNA, 20 bp, Artificial Sequence
  Description of Artificial Sequence: Synthetic oligonucleotide
  Target: SCNA; (-) strand; PAM type: NRG; PAM sequence: CAG
tgtggagaagcagagggact

SEQ ID NO: 26148 - DNA, 20 bp, Artificial Sequence
  Description of Artificial Sequence: Synthetic oligonucleotide
  Target: SCNA; (-) strand; PAM type: NRG; PAM sequence: GGG
cggagttgtggagaagcaga

SEQ ID NO: 26149 - DNA, 20 bp, Artificial Sequence
  Description of Artificial Sequence: Synthetic oligonucleotide
  Target: SCNA; (-) strand; PAM type: NRG; PAM sequence: AGG
tcggagttgtggagaagcag

SEQ ID NO: 26150 - DNA, 20 bp, Artificial Sequence
  Description of Artificial Sequence: Synthetic oligonucleotide
  Target: SCNA; (-) strand; PAM type: NRG; PAM sequence: GAG
gtcggagttgtggagaagca

SEQ ID NO: 26151 - DNA, 20 bp, Artificial Sequence
  Description of Artificial Sequence: Synthetic oligonucleotide
  Target: SCNA; (-) strand; PAM type: NRG; PAM sequence: CAG
gagtcggagttgtggagaag

SEQ ID NO: 26152 - DNA, 20 bp, Artificial Sequence
  Description of Artificial Sequence: Synthetic oligonucleotide
  Target: SCNA; (-) strand; PAM type: NRG; PAM sequence: AAG
gaggagtcggagttgtggag

SEQ ID NO: 26153 - DNA, 20 bp, Artificial Sequence
  Description of Artificial Sequence: Synthetic oligonucleotide
  Target: SCNA; (-) strand; PAM type: NRG; PAM sequence: GAG
ggggaggagtcggagttgtg

SEQ ID NO: 26154 - DNA, 20 bp, Artificial Sequence
  Description of Artificial Sequence: Synthetic oligonucleotide
  Target: SCNA; (-) strand; PAM type: NRG; PAM sequence: TGG
gcggggaggagtcggagttg

SEQ ID NO: 26155 - DNA, 20 bp, Artificial Sequence
  Description of Artificial Sequence: Synthetic oligonucleotide
  Target: SCNA; (-) strand; PAM type: NRG; PAM sequence: GAG
agagaggcggggaggagtcg

SEQ ID NO: 26156 - DNA, 20 bp, Artificial Sequence
  Description of Artificial Sequence: Synthetic oligonucleotide
  Target: SCNA; (-) strand; PAM type: NRG; PAM sequence: CGG
agagagaggcggggaggagt

SEQ ID NO: 26157 - DNA, 20 bp, Artificial Sequence
  Description of Artificial Sequence: Synthetic oligonucleotide
  Target: SCNA; (-) strand; PAM type: NRG; PAM sequence: GAG
aaaaagagagaggcggggag

SEQ ID NO: 26158 - DNA, 20 bp, Artificial Sequence
  Description of Artificial Sequence: Synthetic oligonucleotide
  Target: SCNA; (-) strand; PAM type: NRG; PAM sequence: AGG
aaaaaaagagagaggcgggg

SEQ ID NO: 26159 - DNA, 20 bp, Artificial Sequence
  Description of Artificial Sequence: Synthetic oligonucleotide
  Target: SCNA; (-) strand; PAM type: NRG; PAM sequence: GAG
taaaaaaagagagaggcggg

SEQ ID NO: 26160 - DNA, 20 bp, Artificial Sequence
  Description of Artificial Sequence: Synthetic oligonucleotide
  Target: SCNA; (-) strand; PAM type: NRG; PAM sequence: GGG
tttaaaaaaagagagaggcg

SEQ ID NO: 26161 - DNA, 20 bp, Artificial Sequence
  Description of Artificial Sequence: Synthetic oligonucleotide
  Target: SCNA; (-) strand; PAM type: NRG; PAM sequence: GGG
ttttaaaaaaagagagaggc

SEQ ID NO: 26162 - DNA, 20 bp, Artificial Sequence
  Description of Artificial Sequence: Synthetic oligonucleotide
  Target: SCNA; (-) strand; PAM type: NRG; PAM sequence: CGG
tttttaaaaaaagagagagg

SEQ ID NO: 26163 - DNA, 20 bp, Artificial Sequence
  Description of Artificial Sequence: Synthetic oligonucleotide
  Target: SCNA; (-) strand; PAM type: NRG; PAM sequence: AGG
ttttttttaaaaaaagagag

SEQ ID NO: 26164 - DNA, 20 bp, Artificial Sequence
  Description of Artificial Sequence: Synthetic oligonucleotide
  Target: SCNA; (-) strand; PAM type: NRG; PAM sequence: GAG
tttttttttaaaaaaagaga

SEQ ID NO: 26165 - DNA, 20 bp, Artificial Sequence
  Description of Artificial Sequence: Synthetic oligonucleotide
  Target: SCNA; (-) strand; PAM type: NRG; PAM sequence: GAG
attttttttttaaaaaaaga

SEQ ID NO: 26166 - DNA, 20 bp, Artificial Sequence
  Description of Artificial Sequence: Synthetic oligonucleotide
  Target: SCNA; (-) strand; PAM type: NRG; PAM sequence: GAG
aaattttttttttaaaaaaa

SEQ ID NO: 26167 - DNA, 20 bp, Artificial Sequence
  Description of Artificial Sequence: Synthetic oligonucleotide
  Target: SCNA; (-) strand; PAM type: NRG; PAM sequence: AAG
ttaaattttttttttaaaaa

SEQ ID NO: 26168 - DNA, 20 bp, Artificial Sequence
  Description of Artificial Sequence: Synthetic oligonucleotide
  Target: SCNA; (-) strand; PAM type: NRG; PAM sequence: GGG
tttcctattaaatattattt

SEQ ID NO: 26169 - DNA, 20 bp, Artificial Sequence
  Description of Artificial Sequence: Synthetic oligonucleotide
  Target: SCNA; (-) strand; PAM type: NRG; PAM sequence: TGG
ctttcctattaaatattatt

SEQ ID NO: 26170 - DNA, 20 bp, Artificial Sequence
  Description of Artificial Sequence: Synthetic oligonucleotide
  Target: SCNA; (-) strand; PAM type: NRG; PAM sequence: GGG
ctctggggacagtccccccc

SEQ ID NO: 26171 - DNA, 20 bp, Artificial Sequence
  Description of Artificial Sequence: Synthetic oligonucleotide
  Target: SCNA; (-) strand; PAM type: NRG; PAM sequence: CGG
cctctggggacagtcccccc

SEQ ID NO: 26172 - DNA, 20 bp, Artificial Sequence
  Description of Artificial Sequence: Synthetic oligonucleotide
  Target: SCNA; (-) strand; PAM type: NRG; PAM sequence: CAG
acagcggcctcctctgggga

SEQ ID NO: 26173 - DNA, 20 bp, Artificial Sequence
  Description of Artificial Sequence: Synthetic oligonucleotide
  Target: SCNA; (-) strand; PAM type: NRG; PAM sequence: GGG
gctcacagcggcctcctctg

SEQ ID NO: 26174 - DNA, 20 bp, Artificial Sequence
  Description of Artificial Sequence: Synthetic oligonucleotide
  Target: SCNA; (-) strand; PAM type: NRG; PAM sequence: GGG
ggctcacagcggcctcctct

SEQ ID NO: 26175 - DNA, 20 bp, Artificial Sequence
  Description of Artificial Sequence: Synthetic oligonucleotide
  Target: SCNA; (-) strand; PAM type: NRG; PAM sequence: TGG
cggctcacagcggcctcctc

SEQ ID NO: 26176 - DNA, 20 bp, Artificial Sequence
  Description of Artificial Sequence: Synthetic oligonucleotide
  Target: SCNA; (-) strand; PAM type: NRG; PAM sequence: CGG
ctcgcgtcgccggctcacag

SEQ ID NO: 26177 - DNA, 20 bp, Artificial Sequence
  Description of Artificial Sequence: Synthetic oligonucleotide
  Target: SCNA; (-) strand; PAM type: NRG; PAM sequence: CAG
agcctcgcgtcgccggctca

SEQ ID NO: 26178 - DNA, 20 bp, Artificial Sequence
  Description of Artificial Sequence: Synthetic oligonucleotide
  Target: SCNA; (-) strand; PAM type: NRG; PAM sequence: CGG
ctcccccagcctcgcgtcgc

SEQ ID NO: 26179 - DNA, 20 bp, Artificial Sequence
  Description of Artificial Sequence: Synthetic oligonucleotide
  Target: SCNA; (-) strand; PAM type: NRG; PAM sequence: CAG
gggtttgcctcccactcccc

SEQ ID NO: 26180 - DNA, 20 bp, Artificial Sequence
  Description of Artificial Sequence: Synthetic oligonucleotide
  Target: SCNA; (-) strand; PAM type: NRG; PAM sequence: GGG
ccattcgacgacaggttagc

SEQ ID NO: 26181 - DNA, 20 bp, Artificial Sequence
  Description of Artificial Sequence: Synthetic oligonucleotide
  Target: SCNA; (-) strand; PAM type: NRG; PAM sequence: CGG
gccattcgacgacaggttag

SEQ ID NO: 26182 - DNA, 20 bp, Artificial Sequence
  Description of Artificial Sequence: Synthetic oligonucleotide
  Target: SCNA; (-) strand; PAM type: NRG; PAM sequence: TAG
gtggccattcgacgacaggt

SEQ ID NO: 26183 - DNA, 20 bp, Artificial Sequence
  Description of Artificial Sequence: Synthetic oligonucleotide
  Target: SCNA; (-) strand; PAM type: NRG; PAM sequence: AGG
gggagtggccattcgacgac

SEQ ID NO: 26184 - DNA, 20 bp, Artificial Sequence
  Description of Artificial Sequence: Synthetic oligonucleotide
  Target: SCNA; (-) strand; PAM type: NRG; PAM sequence: CAG
tgggagtggccattcgacga

SEQ ID NO: 26185 - DNA, 20 bp, Artificial Sequence
  Description of Artificial Sequence: Synthetic oligonucleotide
  Target: SCNA; (-) strand; PAM type: NRG; PAM sequence: TGG
cgtgagcggagaactgggag

SEQ ID NO: 26186 - DNA, 20 bp, Artificial Sequence
  Description of Artificial Sequence: Synthetic oligonucleotide
  Target: SCNA; (-) strand; PAM type: NRG; PAM sequence: GAG
cctcgtgagcggagaactgg

SEQ ID NO: 26187 - DNA, 20 bp, Artificial Sequence
  Description of Artificial Sequence: Synthetic oligonucleotide
  Target: SCNA; (-) strand; PAM type: NRG; PAM sequence: GGG
accctcgtgagcggagaact

SEQ ID NO: 26188 - DNA, 20 bp, Artificial Sequence
  Description of Artificial Sequence: Synthetic oligonucleotide
  Target: SCNA; (-) strand; PAM type: NRG; PAM sequence: TGG
caccctcgtgagcggagaac

SEQ ID NO: 26189 - DNA, 20 bp, Artificial Sequence
  Description of Artificial Sequence: Synthetic oligonucleotide
  Target: SCNA; (-) strand; PAM type: NRG; PAM sequence: GAG
cctttccaccctcgtgagcg

SEQ ID NO: 26190 - DNA, 20 bp, Artificial Sequence
  Description of Artificial Sequence: Synthetic oligonucleotide
  Target: SCNA; (-) strand; PAM type: NRG; PAM sequence: CGG
tgcctttccaccctcgtgag

SEQ ID NO: 26191 - DNA, 20 bp, Artificial Sequence
  Description of Artificial Sequence: Synthetic oligonucleotide
  Target: SCNA; (-) strand; PAM type: NRG; PAM sequence: GAG
ttctgcctttccaccctcgt

SEQ ID NO: 26192 - DNA, 20 bp, Artificial Sequence
  Description of Artificial Sequence: Synthetic oligonucleotide
  Target: SCNA; (-) strand; PAM type: NRG; PAM sequence: AAG
ctccctcacgccttgccttc

SEQ ID NO: 26193 - DNA, 20 bp, Artificial Sequence
  Description of Artificial Sequence: Synthetic oligonucleotide
  Target: SCNA; (-) strand; PAM type: NRG; PAM sequence: GGG
ggcccctccgagagcgtcct

SEQ ID NO: 26194 - DNA, 20 bp, Artificial Sequence
  Description of Artificial Sequence: Synthetic oligonucleotide
  Target: SCNA; (-) strand; PAM type: NRG; PAM sequence: TGG
cggcccctccgagagcgtcc

SEQ ID NO: 26195 - DNA, 20 bp, Artificial Sequence
  Description of Artificial Sequence: Synthetic oligonucleotide
  Target: SCNA; (-) strand; PAM type: NRG; PAM sequence: GAG
ccccggcccggcccctccga

SEQ ID NO: 26196 - DNA, 20 bp, Artificial Sequence
  Description of Artificial Sequence: Synthetic oligonucleotide
  Target: SCNA; (-) strand; PAM type: NRG; PAM sequence: GAG
gaccccggcccggcccctcc

SEQ ID NO: 26197 - DNA, 20 bp, Artificial Sequence
  Description of Artificial Sequence: Synthetic oligonucleotide
  Target: SCNA; (-) strand; PAM type: NRG; PAM sequence: CGG
ctgcagcgcagaccccggcc

SEQ ID NO: 26198 - DNA, 20 bp, Artificial Sequence
  Description of Artificial Sequence: Synthetic oligonucleotide
  Target: SCNA; (-) strand; PAM type: NRG; PAM sequence: CGG
gcgggctgcagcgcagaccc

SEQ ID NO: 26199 - DNA, 20 bp, Artificial Sequence
  Description of Artificial Sequence: Synthetic oligonucleotide
  Target: SCNA; (-) strand; PAM type: NRG; PAM sequence: CAG
ggtgcgtgcgggctgcagcg

SEQ ID NO: 26200 - DNA, 20 bp, Artificial Sequence
  Description of Artificial Sequence: Synthetic oligonucleotide
  Target: SCNA; (-) strand; PAM type: NRG; PAM sequence: CAG
agtgaggtgcgtgcgggctg

SEQ ID NO: 26201 - DNA, 20 bp, Artificial Sequence
  Description of Artificial Sequence: Synthetic oligonucleotide
  Target: SCNA; (-) strand; PAM type: NRG; PAM sequence: GGG
cgcggaagtgaggtgcgtgc

SEQ ID NO: 26202 - DNA, 20 bp, Artificial Sequence
  Description of Artificial Sequence: Synthetic oligonucleotide
  Target: SCNA; (-) strand; PAM type: NRG; PAM sequence: CGG
acgcggaagtgaggtgcgtg

SEQ ID NO: 26203 - DNA, 20 bp, Artificial Sequence
  Description of Artificial Sequence: Synthetic oligonucleotide
  Target: SCNA; (-) strand; PAM type: NRG; PAM sequence: AGG
agcgccgcgacgcggaagtg

SEQ ID NO: 26204 - DNA, 20 bp, Artificial Sequence
  Description of Artificial Sequence: Synthetic oligonucleotide
  Target: SCNA; (-) strand; PAM type: NRG; PAM sequence: GAG
gagcgccgcgacgcggaagt

SEQ ID NO: 26205 - DNA, 20 bp, Artificial Sequence
  Description of Artificial Sequence: Synthetic oligonucleotide
  Target: SCNA; (-) strand; PAM type: NRG; PAM sequence: AAG
gaccgagcgccgcgacgcgg

SEQ ID NO: 26206 - DNA, 20 bp, Artificial Sequence
  Description of Artificial Sequence: Synthetic oligonucleotide
  Target: SCNA; (-) strand; PAM type: NRG; PAM sequence: CGG
agcgaccgagcgccgcgacg

SEQ ID NO: 26207 - DNA, 20 bp, Artificial Sequence
  Description of Artificial Sequence: Synthetic oligonucleotide
  Target: SCNA; (-) strand; PAM type: NRG; PAM sequence: GAG
aagagagggggcgagcgacc

SEQ ID NO: 26208 - DNA, 20 bp, Artificial Sequence
  Description of Artificial Sequence: Synthetic oligonucleotide
  Target: SCNA; (-) strand; PAM type: NRG; PAM sequence: GAG
aggggcccaagagagggggc

SEQ ID NO: 26209 - DNA, 20 bp, Artificial Sequence
  Description of Artificial Sequence: Synthetic oligonucleotide
  Target: SCNA; (-) strand; PAM type: NRG; PAM sequence: GGG
cagaaggggcccaagagagg

SEQ ID NO: 26210 - DNA, 20 bp, Artificial Sequence
  Description of Artificial Sequence: Synthetic oligonucleotide
  Target: SCNA; (-) strand; PAM type: NRG; PAM sequence: GGG
ccagaaggggcccaagagag

SEQ ID NO: 26211 - DNA, 20 bp, Artificial Sequence
  Description of Artificial Sequence: Synthetic oligonucleotide
  Target: SCNA; (-) strand; PAM type: NRG; PAM sequence: GGG
accagaaggggcccaagaga

SEQ ID NO: 26212 - DNA, 20 bp, Artificial Sequence
  Description of Artificial Sequence: Synthetic oligonucleotide
  Target: SCNA; (-) strand; PAM type: NRG; PAM sequence: AGG
gaccagaaggggcccaagag

SEQ ID NO: 26213 - DNA, 20 bp, Artificial Sequence
  Description of Artificial Sequence: Synthetic oligonucleotide
  Target: SCNA; (-) strand; PAM type: NRG; PAM sequence: GAG
cgaccagaaggggcccaaga

SEQ ID NO: 26214 - DNA, 20 bp, Artificial Sequence
  Description of Artificial Sequence: Synthetic oligonucleotide
  Target: SCNA; (-) strand; PAM type: NRG; PAM sequence: GAG
gacgaccagaaggggcccaa

SEQ ID NO: 26215 - DNA, 20 bp, Artificial Sequence
  Description of Artificial Sequence: Synthetic oligonucleotide
  Target: SCNA; (-) strand; PAM type: NRG; PAM sequence: AAG
gcgacgaccagaaggggccc

SEQ ID NO: 26216 - DNA, 20 bp, Artificial Sequence
  Description of Artificial Sequence: Synthetic oligonucleotide
  Target: SCNA; (-) strand; PAM type: NRG; PAM sequence: GGG
aggacggcgacgaccagaag

SEQ ID NO: 26217 - DNA, 20 bp, Artificial Sequence
  Description of Artificial Sequence: Synthetic oligonucleotide
  Target: SCNA; (-) strand; PAM type: NRG; PAM sequence: GGG
gaggacggcgacgaccagaa

SEQ ID NO: 26218 - DNA, 20 bp, Artificial Sequence
  Description of Artificial Sequence: Synthetic oligonucleotide
  Target: SCNA; (-) strand; PAM type: NRG; PAM sequence: AGG
ggaggacggcgacgaccaga

SEQ ID NO: 26219 - DNA, 20 bp, Artificial Sequence
  Description of Artificial Sequence: Synthetic oligonucleotide
  Target: SCNA; (-) strand; PAM type: NRG; PAM sequence: AAG
aggaggacggcgacgaccag

SEQ ID NO: 26220 - DNA, 20 bp, Artificial Sequence
  Description of Artificial Sequence: Synthetic oligonucleotide
  Target: SCNA; (-) strand; PAM type: NRG; PAM sequence: CAG
aggaggaggacggcgacgac

SEQ ID NO: 26221 - DNA, 20 bp, Artificial Sequence
  Description of Artificial Sequence: Synthetic oligonucleotide
  Target: SCNA; (-) strand; PAM type: NRG; PAM sequence: CGG
gaggactaggaggaggagga

SEQ ID NO: 26222 - DNA, 20 bp, Artificial Sequence
  Description of Artificial Sequence: Synthetic oligonucleotide
  Target: SCNA; (-) strand; PAM type: NRG; PAM sequence: AGG
ggaggaggactaggaggagg

SEQ ID NO: 26223 - DNA, 20 bp, Artificial Sequence
  Description of Artificial Sequence: Synthetic oligonucleotide
  Target: SCNA; (-) strand; PAM type: NRG; PAM sequence: GAG
aggaggaggactaggaggag

SEQ ID NO: 26224 - DNA, 20 bp, Artificial Sequence
  Description of Artificial Sequence: Synthetic oligonucleotide
  Target: SCNA; (-) strand; PAM type: NRG; PAM sequence: AGG
gaaggaggaggactaggagg

SEQ ID NO: 26225 - DNA, 20 bp, Artificial Sequence
  Description of Artificial Sequence: Synthetic oligonucleotide
  Target: SCNA; (-) strand; PAM type: NRG; PAM sequence: GAG
agaaggaggaggactaggag

SEQ ID NO: 26226 - DNA, 20 bp, Artificial Sequence
  Description of Artificial Sequence: Synthetic oligonucleotide
  Target: SCNA; (-) strand; PAM type: NRG; PAM sequence: AGG
ggagaaggaggaggactagg

SEQ ID NO: 26227 - DNA, 20 bp, Artificial Sequence
  Description of Artificial Sequence: Synthetic oligonucleotide
  Target: SCNA; (-) strand; PAM type: NRG; PAM sequence: GAG
aggagaaggaggaggactag

SEQ ID NO: 26228 - DNA, 20 bp, Artificial Sequence
  Description of Artificial Sequence: Synthetic oligonucleotide
  Target: SCNA; (-) strand; PAM type: NRG; PAM sequence: AGG
gaaggagaaggaggaggact

SEQ ID NO: 26229 - DNA, 20 bp, Artificial Sequence
  Description of Artificial Sequence: Synthetic oligonucleotide
  Target: SCNA; (-) strand; PAM type: NRG; PAM sequence: TAG
agaaggagaaggaggaggac

SEQ ID NO: 26230 - DNA, 20 bp, Artificial Sequence
  Description of Artificial Sequence: Synthetic oligonucleotide
  Target: SCNA; (-) strand; PAM type: NRG; PAM sequence: AGG
cgaggagaaggagaaggagg

SEQ ID NO: 26231 - DNA, 20 bp, Artificial Sequence
  Description of Artificial Sequence: Synthetic oligonucleotide
  Target: SCNA; (-) strand; PAM type: NRG; PAM sequence: GAG
ccgaggagaaggagaaggag

SEQ ID NO: 26232 - DNA, 20 bp, Artificial Sequence
  Description of Artificial Sequence: Synthetic oligonucleotide
  Target: SCNA; (-) strand; PAM type: NRG; PAM sequence: AGG
agccgaggagaaggagaagg

SEQ ID NO: 26233 - DNA, 20 bp, Artificial Sequence
  Description of Artificial Sequence: Synthetic oligonucleotide
  Target: SCNA; (-) strand; PAM type: NRG; PAM sequence: GAG
gagccgaggagaaggagaag

SEQ ID NO: 26234 - DNA, 20 bp, Artificial Sequence
  Description of Artificial Sequence: Synthetic oligonucleotide
  Target: SCNA; (-) strand; PAM type: NRG; PAM sequence: AGG
gagagccgaggagaaggaga

SEQ ID NO: 26235 - DNA, 20 bp, Artificial Sequence
  Description of Artificial Sequence: Synthetic oligonucleotide
  Target: SCNA; (-) strand; PAM type: NRG; PAM sequence: AAG
ggagagccgaggagaaggag

SEQ ID NO: 26236 - DNA, 20 bp, Artificial Sequence
  Description of Artificial Sequence: Synthetic oligonucleotide
  Target: SCNA; (-) strand; PAM type: NRG; PAM sequence: GAG
ggcggagagccgaggagaag

SEQ ID NO: 26237 - DNA, 20 bp, Artificial Sequence
  Description of Artificial Sequence: Synthetic oligonucleotide
  Target: SCNA; (-) strand; PAM type: NRG; PAM sequence: AGG
ggggcggagagccgaggaga

SEQ ID NO: 26238 - DNA, 20 bp, Artificial Sequence
  Description of Artificial Sequence: Synthetic oligonucleotide
  Target: SCNA; (-) strand; PAM type: NRG; PAM sequence: AAG
gggggcggagagccgaggag

SEQ ID NO: 26239 - DNA, 20 bp, Artificial Sequence
  Description of Artificial Sequence: Synthetic oligonucleotide
  Target: SCNA; (-) strand; PAM type: NRG; PAM sequence: GAG
ggtgggggcggagagccgag

SEQ ID NO: 26240 - DNA, 20 bp, Artificial Sequence
  Description of Artificial Sequence: Synthetic oligonucleotide
  Target: SCNA; (-) strand; PAM type: NRG; PAM sequence: AGG
gcggtgggggcggagagccg

SEQ ID NO: 26241 - DNA, 20 bp, Artificial Sequence
  Description of Artificial Sequence: Synthetic oligonucleotide
  Target: SCNA; (-) strand; PAM type: NRG; PAM sequence: GAG
agcggtgggggcggagagcc

SEQ ID NO: 26242 - DNA, 20 bp, Artificial Sequence
  Description of Artificial Sequence: Synthetic oligonucleotide
  Target: SCNA; (-) strand; PAM type: NRG; PAM sequence: GAG
aaatcagcggtgggggcgga

SEQ ID NO: 26243 - DNA, 20 bp, Artificial Sequence
  Description of Artificial Sequence: Synthetic oligonucleotide
  Target: SCNA; (-) strand; PAM type: NRG; PAM sequence: GAG
acaaatcagcggtgggggcg

SEQ ID NO: 26244 - DNA, 20 bp, Artificial Sequence
  Description of Artificial Sequence: Synthetic oligonucleotide
  Target: SCNA; (-) strand; PAM type: NRG; PAM sequence: CGG
tgacaaatcagcggtggggg

SEQ ID NO: 26245 - DNA, 20 bp, Artificial Sequence
  Description of Artificial Sequence: Synthetic oligonucleotide
  Target: SCNA; (-) strand; PAM type: NRG; PAM sequence: GGG
cgctgacaaatcagcggtgg

SEQ ID NO: 26246 - DNA, 20 bp, Artificial Sequence
  Description of Artificial Sequence: Synthetic oligonucleotide
  Target: SCNA; (-) strand; PAM type: NRG; PAM sequence: GGG
gcgctgacaaatcagcggtg

SEQ ID NO: 26247 - DNA, 20 bp, Artificial Sequence
  Description of Artificial Sequence: Synthetic oligonucleotide
  Target: SCNA; (-) strand; PAM type: NRG; PAM sequence: GGG
agcgctgacaaatcagcggt

SEQ ID NO: 26248 - DNA, 20 bp, Artificial Sequence
  Description of Artificial Sequence: Synthetic oligonucleotide
  Target: SCNA; (-) strand; PAM type: NRG; PAM sequence: TGG
aagcgctgacaaatcagcgg

SEQ ID NO: 26249 - DNA, 20 bp, Artificial Sequence
  Description of Artificial Sequence: Synthetic oligonucleotide
  Target: SCNA; (-) strand; PAM type: NRG; PAM sequence: CGG
cagaagcgctgacaaatcag

SEQ ID NO: 26250 - DNA, 20 bp, Artificial Sequence
  Description of Artificial Sequence: Synthetic oligonucleotide
  Target: SCNA; (-) strand; PAM type: NRG; PAM sequence: CAG
gggcagaagcgctgacaaat

SEQ ID NO: 26251 - DNA, 20 bp, Artificial Sequence
  Description of Artificial Sequence: Synthetic oligonucleotide
  Target: SCNA; (-) strand; PAM type: NRG; PAM sequence: AAG
gccgggagaggggcgggcag

SEQ ID NO: 26252 - DNA, 20 bp, Artificial Sequence
  Description of Artificial Sequence: Synthetic oligonucleotide
  Target: SCNA; (-) strand; PAM type: NRG; PAM sequence: CAG
agcgccgggagaggggcggg

SEQ ID NO: 26253 - DNA, 20 bp, Artificial Sequence
  Description of Artificial Sequence: Synthetic oligonucleotide
  Target: SCNA; (-) strand; PAM type: NRG; PAM sequence: GGG
gcgagcgccgggagaggggc

SEQ ID NO: 26254 - DNA, 20 bp, Artificial Sequence
  Description of Artificial Sequence: Synthetic oligonucleotide
  Target: SCNA; (-) strand; PAM type: NRG; PAM sequence: CGG
agcgagcgccgggagagggg

SEQ ID NO: 26255 - DNA, 20 bp, Artificial Sequence
  Description of Artificial Sequence: Synthetic oligonucleotide
  Target: SCNA; (-) strand; PAM type: NRG; PAM sequence: GGG
agcagcgagcgccgggagag

SEQ ID NO: 26256 - DNA, 20 bp, Artificial Sequence
  Description of Artificial Sequence: Synthetic oligonucleotide
  Target: SCNA; (-) strand; PAM type: NRG; PAM sequence: GGG
aagcagcgagcgccgggaga

SEQ ID NO: 26257 - DNA, 20 bp, Artificial Sequence
  Description of Artificial Sequence: Synthetic oligonucleotide
  Target: SCNA; (-) strand; PAM type: NRG; PAM sequence: AGG
aaagcagcgagcgccgggag

SEQ ID NO: 26258 - DNA, 20 bp, Artificial Sequence
  Description of Artificial Sequence: Synthetic oligonucleotide
  Target: SCNA; (-) strand; PAM type: NRG; PAM sequence: GAG
gaaagcagcgagcgccggga

SEQ ID NO: 26259 - DNA, 20 bp, Artificial Sequence
  Description of Artificial Sequence: Synthetic oligonucleotide
  Target: SCNA; (-) strand; PAM type: NRG; PAM sequence: GAG
gggaaagcagcgagcgccgg

SEQ ID NO: 26260 - DNA, 20 bp, Artificial Sequence
  Description of Artificial Sequence: Synthetic oligonucleotide
  Target: SCNA; (-) strand; PAM type: NRG; PAM sequence: GGG
cagggaaagcagcgagcgcc

SEQ ID NO: 26261 - DNA, 20 bp, Artificial Sequence
  Description of Artificial Sequence: Synthetic oligonucleotide
  Target: SCNA; (-) strand; PAM type: NRG; PAM sequence: CGG
gcagggaaagcagcgagcgc

SEQ ID NO: 26262 - DNA, 20 bp, Artificial Sequence
  Description of Artificial Sequence: Synthetic oligonucleotide
  Target: SCNA; (-) strand; PAM type: NRG; PAM sequence: GAG
cacgctgcagggaaagcagc

SEQ ID NO: 26263 - DNA, 20 bp, Artificial Sequence
  Description of Artificial Sequence: Synthetic oligonucleotide
  Target: SCNA; (-) strand; PAM type: NRG; PAM sequence: CAG
ggagcacgctgcagggaaag

SEQ ID NO: 26264 - DNA, 20 bp, Artificial Sequence
  Description of Artificial Sequence: Synthetic oligonucleotide
  Target: SCNA; (-) strand; PAM type: NRG; PAM sequence: AAG
cgaggagcacgctgcaggga

SEQ ID NO: 26265 - DNA, 20 bp, Artificial Sequence
  Description of Artificial Sequence: Synthetic oligonucleotide
  Target: SCNA; (-) strand; PAM type: NRG; PAM sequence: GGG
gggacgaggagcacgctgca

SEQ ID NO: 26266 - DNA, 20 bp, Artificial Sequence
  Description of Artificial Sequence: Synthetic oligonucleotide
  Target: SCNA; (-) strand; PAM type: NRG; PAM sequence: AGG
agggacgaggagcacgctgc

SEQ ID NO: 26267 - DNA, 20 bp, Artificial Sequence
  Description of Artificial Sequence: Synthetic oligonucleotide
  Target: SCNA; (-) strand; PAM type: NRG; PAM sequence: CAG
tagggacgaggagcacgctg

SEQ ID NO: 26268 - DNA, 20 bp, Artificial Sequence
  Description of Artificial Sequence: Synthetic oligonucleotide
  Target: SCNA; (-) strand; PAM type: NRG; PAM sequence: GAG
ccatccgagatagggacgag

SEQ ID NO: 26269 - DNA, 20 bp, Artificial Sequence
  Description of Artificial Sequence: Synthetic oligonucleotide
  Target: SCNA; (-) strand; PAM type: NRG; PAM sequence: AGG
ccccatccgagatagggacg

SEQ ID NO: 26270 - DNA, 20 bp, Artificial Sequence
  Description of Artificial Sequence: Synthetic oligonucleotide
  Target: SCNA; (-) strand; PAM type: NRG; PAM sequence: GAG
tccccatccgagatagggac

SEQ ID NO: 26271 - DNA, 20 bp, Artificial Sequence
  Description of Artificial Sequence: Synthetic oligonucleotide
  Target: SCNA; (-) strand; PAM type: NRG; PAM sequence: GGG
ccccatccccatccgagata

SEQ ID NO: 26272 - DNA, 20 bp, Artificial Sequence
  Description of Artificial Sequence: Synthetic oligonucleotide
  Target: SCNA; (-) strand; PAM type: NRG; PAM sequence: AGG
gccccatccccatccgagat

SEQ ID NO: 26273 - DNA, 20 bp, Artificial Sequence
  Description of Artificial Sequence: Synthetic oligonucleotide
  Target: SCNA; (-) strand; PAM type: NRG; PAM sequence: TAG
tgccccatccccatccgaga

SEQ ID NO: 26274 - DNA, 20 bp, Artificial Sequence
  Description of Artificial Sequence: Synthetic oligonucleotide
  Target: SCNA; (-) strand; PAM type: NRG; PAM sequence: GAG
cccctgccccatccccatcc

SEQ ID NO: 26275 - DNA, 20 bp, Artificial Sequence
  Description of Artificial Sequence: Synthetic oligonucleotide
  Target: SCNA; (-) strand; PAM type: NRG; PAM sequence: TGG
aggcaggcggctggagttga

SEQ ID NO: 26276 - DNA, 20 bp, Artificial Sequence
  Description of Artificial Sequence: Synthetic oligonucleotide
  Target: SCNA; (-) strand; PAM type: NRG; PAM sequence: GAG
cgcggccaggcaggcggctg

SEQ ID NO: 26277 - DNA, 20 bp, Artificial Sequence
  Description of Artificial Sequence: Synthetic oligonucleotide
  Target: SCNA; (-) strand; PAM type: NRG; PAM sequence: TGG
tgcgcggccaggcaggcggc

SEQ ID NO: 26278 - DNA, 20 bp, Artificial Sequence
  Description of Artificial Sequence: Synthetic oligonucleotide
  Target: SCNA; (-) strand; PAM type: NRG; PAM sequence: CGG
gccttgcgcggccaggcagg

SEQ ID NO: 26279 - DNA, 20 bp, Artificial Sequence
  Description of Artificial Sequence: Synthetic oligonucleotide
  Target: SCNA; (-) strand; PAM type: NRG; PAM sequence: AGG
cccgccttgcgcggccaggc

SEQ ID NO: 26280 - DNA, 20 bp, Artificial Sequence
  Description of Artificial Sequence: Synthetic oligonucleotide
  Target: SCNA; (-) strand; PAM type: NRG; PAM sequence: CAG
tcccgccttgcgcggccagg

SEQ ID NO: 26281 - DNA, 20 bp, Artificial Sequence
  Description of Artificial Sequence: Synthetic oligonucleotide
  Target: SCNA; (-) strand; PAM type: NRG; PAM sequence: AGG
ctttcccgccttgcgcggcc

SEQ ID NO: 26282 - DNA, 20 bp, Artificial Sequence
  Description of Artificial Sequence: Synthetic oligonucleotide
  Target: SCNA; (-) strand; PAM type: NRG; PAM sequence: CAG
actttcccgccttgcgcggc

SEQ ID NO: 26283 - DNA, 20 bp, Artificial Sequence
  Description of Artificial Sequence: Synthetic oligonucleotide
  Target: SCNA; (-) strand; PAM type: NRG; PAM sequence: CGG
ccccactttcccgccttgcg

SEQ ID NO: 26284 - DNA, 20 bp, Artificial Sequence
  Description of Artificial Sequence: Synthetic oligonucleotide
  Target: SCNA; (-) strand; PAM type: NRG; PAM sequence: AAG
aaacttaacgtgaggcgcaa

SEQ ID NO: 26285 - DNA, 20 bp, Artificial Sequence
  Description of Artificial Sequence: Synthetic oligonucleotide
  Target: SCNA; (-) strand; PAM type: NRG; PAM sequence: AGG
gtgaccctaaacttaacgtg

SEQ ID NO: 26286 - DNA, 20 bp, Artificial Sequence
  Description of Artificial Sequence: Synthetic oligonucleotide
  Target: SCNA; (-) strand; PAM type: NRG; PAM sequence: GAG
cgtgaccctaaacttaacgt

SEQ ID NO: 26287 - DNA, 20 bp, Artificial Sequence
  Description of Artificial Sequence: Synthetic oligonucleotide
  Target: SCNA; (-) strand; PAM type: NRG; PAM sequence: GAG
accgctcccgatctccacaa

SEQ ID NO: 26288 - DNA, 20 bp, Artificial Sequence
  Description of Artificial Sequence: Synthetic oligonucleotide
  Target: SCNA; (-) strand; PAM type: NRG; PAM sequence: AAG
caaccgctcccgatctccac

SEQ ID NO: 26289 - DNA, 20 bp, Artificial Sequence
  Description of Artificial Sequence: Synthetic oligonucleotide
  Target: SCNA; (-) strand; PAM type: NRG; PAM sequence: TAG
agaggaagaggcatcatccc

SEQ ID NO: 26290 - DNA, 20 bp, Artificial Sequence
  Description of Artificial Sequence: Synthetic oligonucleotide
  Target: SCNA; (-) strand; PAM type: NRG; PAM sequence: AGG
ggggaaggggaaagaggaag

SEQ ID NO: 26291 - DNA, 20 bp, Artificial Sequence
  Description of Artificial Sequence: Synthetic oligonucleotide
  Target: SCNA; (-) strand; PAM type: NRG; PAM sequence: GAG
aggggaaggggaaagaggaa

SEQ ID NO: 26292 - DNA, 20 bp, Artificial Sequence
  Description of Artificial Sequence: Synthetic oligonucleotide
  Target: SCNA; (-) strand; PAM type: NRG; PAM sequence: AAG
ggaggggaaggggaaagagg

SEQ ID NO: 26293 - DNA, 20 bp, Artificial Sequence
  Description of Artificial Sequence: Synthetic oligonucleotide
  Target: SCNA; (-) strand; PAM type: NRG; PAM sequence: AGG
aagggaggggaaggggaaag

SEQ ID NO: 26294 - DNA, 20 bp, Artificial Sequence
  Description of Artificial Sequence: Synthetic oligonucleotide
  Target: SCNA; (-) strand; PAM type: NRG; PAM sequence: GAG
gaagggaggggaaggggaaa

SEQ ID NO: 26295 - DNA, 20 bp, Artificial Sequence
  Description of Artificial Sequence: Synthetic oligonucleotide
  Target: SCNA; (-) strand; PAM type: NRG; PAM sequence: AAG
aagaagggaggggaagggga

SEQ ID NO: 26296 - DNA, 20 bp, Artificial Sequence
  Description of Artificial Sequence: Synthetic oligonucleotide
  Target: SCNA; (-) strand; PAM type: NRG; PAM sequence: GGG
ggacaagaagggaggggaag

SEQ ID NO: 26297 - DNA, 20 bp, Artificial Sequence
  Description of Artificial Sequence: Synthetic oligonucleotide
  Target: SCNA; (-) strand; PAM type: NRG; PAM sequence: GGG
gggacaagaagggaggggaa

SEQ ID NO: 26298 - DNA, 20 bp, Artificial Sequence
  Description of Artificial Sequence: Synthetic oligonucleotide
  Target: SCNA; (-) strand; PAM type: NRG; PAM sequence: AGG
ggggacaagaagggagggga

SEQ ID NO: 26299 - DNA, 20 bp, Artificial Sequence
  Description of Artificial Sequence: Synthetic oligonucleotide
  Target: SCNA; (-) strand; PAM type: NRG; PAM sequence: AAG
cggggacaagaagggagggg

SEQ ID NO: 26300 - DNA, 20 bp, Artificial Sequence
  Description of Artificial Sequence: Synthetic oligonucleotide
  Target: SCNA; (-) strand; PAM type: NRG; PAM sequence: GGG
aggcggggacaagaagggag

SEQ ID NO: 26301 - DNA, 20 bp, Artificial Sequence
  Description of Artificial Sequence: Synthetic oligonucleotide
  Target: SCNA; (-) strand; PAM type: NRG; PAM sequence: GGG
aaggcggggacaagaaggga

SEQ ID NO: 26302 - DNA, 20 bp, Artificial Sequence
  Description of Artificial Sequence: Synthetic oligonucleotide
  Target: SCNA; (-) strand; PAM type: NRG; PAM sequence: AGG
aaaggcggggacaagaaggg

SEQ ID NO: 26303 - DNA, 20 bp, Artificial Sequence
  Description of Artificial Sequence: Synthetic oligonucleotide
  Target: SCNA; (-) strand; PAM type: NRG; PAM sequence: GAG
gaaaggcggggacaagaagg

SEQ ID NO: 26304 - DNA, 20 bp, Artificial Sequence
  Description of Artificial Sequence: Synthetic oligonucleotide
  Target: SCNA; (-) strand; PAM type: NRG; PAM sequence: GGG
aggaaaggcggggacaagaa

SEQ ID NO: 26305 - DNA, 20 bp, Artificial Sequence
  Description of Artificial Sequence: Synthetic oligonucleotide
  Target: SCNA; (-) strand; PAM type: NRG; PAM sequence: AGG
gaggaaaggcggggacaaga

SEQ ID NO: 26306 - DNA, 20 bp, Artificial Sequence
  Description of Artificial Sequence: Synthetic oligonucleotide
  Target: SCNA; (-) strand; PAM type: NRG; PAM sequence: AAG
agaggaaaggcggggacaag

SEQ ID NO: 26307 - DNA, 20 bp, Artificial Sequence
  Description of Artificial Sequence: Synthetic oligonucleotide
  Target: SCNA; (-) strand; PAM type: NRG; PAM sequence: AAG
cccagaggaaaggcggggac

SEQ ID NO: 26308 - DNA, 20 bp, Artificial Sequence
  Description of Artificial Sequence: Synthetic oligonucleotide
  Target: SCNA; (-) strand; PAM type: NRG; PAM sequence: GGG
gaggacccagaggaaaggcg

SEQ ID NO: 26309 - DNA, 20 bp, Artificial Sequence
  Description of Artificial Sequence: Synthetic oligonucleotide
  Target: SCNA; (-) strand; PAM type: NRG; PAM sequence: GGG
ggaggacccagaggaaaggc

SEQ ID NO: 26310 - DNA, 20 bp, Artificial Sequence
  Description of Artificial Sequence: Synthetic oligonucleotide
  Target: SCNA; (-) strand; PAM type: NRG; PAM sequence: CGG
gggaggacccagaggaaagg

SEQ ID NO: 26311 - DNA, 20 bp, Artificial Sequence
  Description of Artificial Sequence: Synthetic oligonucleotide
  Target: SCNA; (-) strand; PAM type: NRG; PAM sequence: AGG
cccgggaggacccagaggaa

SEQ ID NO: 26312 - DNA, 20 bp, Artificial Sequence
  Description of Artificial Sequence: Synthetic oligonucleotide
  Target: SCNA; (-) strand; PAM type: NRG; PAM sequence: AAG
ccccgggaggacccagagga

SEQ ID NO: 26313 - DNA, 20 bp, Artificial Sequence
  Description of Artificial Sequence: Synthetic oligonucleotide
  Target: SCNA; (-) strand; PAM type: NRG; PAM sequence: AGG
tggtccccgggaggacccag

SEQ ID NO: 26314 - DNA, 20 bp, Artificial Sequence
  Description of Artificial Sequence: Synthetic oligonucleotide
  Target: SCNA; (-) strand; PAM type: NRG; PAM sequence: GAG
gtggtccccgggaggaccca

SEQ ID NO: 26315 - DNA, 20 bp, Artificial Sequence
  Description of Artificial Sequence: Synthetic oligonucleotide
  Target: SCNA; (-) strand; PAM type: NRG; PAM sequence: CAG
gggtggtccccgggaggacc

SEQ ID NO: 26316 - DNA, 20 bp, Artificial Sequence
  Description of Artificial Sequence: Synthetic oligonucleotide
  Target: SCNA; (-) strand; PAM type: NRG; PAM sequence: AGG
ggtagggggtggtccccggg

SEQ ID NO: 26317 - DNA, 20 bp, Artificial Sequence
  Description of Artificial Sequence: Synthetic oligonucleotide
  Target: SCNA; (-) strand; PAM type: NRG; PAM sequence: GAG
gggtagggggtggtccccgg

SEQ ID NO: 26318 - DNA, 20 bp, Artificial Sequence
  Description of Artificial Sequence: Synthetic oligonucleotide
  Target: SCNA; (-) strand; PAM type: NRG; PAM sequence: GGG
aggggtagggggtggtcccc

SEQ ID NO: 26319 - DNA, 20 bp, Artificial Sequence
  Description of Artificial Sequence: Synthetic oligonucleotide
  Target: SCNA; (-) strand; PAM type: NRG; PAM sequence: CGG
gaggggtagggggtggtccc

SEQ ID NO: 26320 - DNA, 20 bp, Artificial Sequence
  Description of Artificial Sequence: Synthetic oligonucleotide
  Target: SCNA; (-) strand; PAM type: NRG; PAM sequence: TGG
ctctgacgaggggtaggggg

SEQ ID NO: 26321 - DNA, 20 bp, Artificial Sequence
  Description of Artificial Sequence: Synthetic oligonucleotide
  Target: SCNA; (-) strand; PAM type: NRG; PAM sequence: GGG
cgactctgacgaggggtagg

SEQ ID NO: 26322 - DNA, 20 bp, Artificial Sequence
  Description of Artificial Sequence: Synthetic oligonucleotide
  Target: SCNA; (-) strand; PAM type: NRG; PAM sequence: GGG
gcgactctgacgaggggtag

SEQ ID NO: 26323 - DNA, 20 bp, Artificial Sequence
  Description of Artificial Sequence: Synthetic oligonucleotide
  Target: SCNA; (-) strand; PAM type: NRG; PAM sequence: GGG
ggcgactctgacgaggggta

SEQ ID NO: 26324 - DNA, 20 bp, Artificial Sequence
  Description of Artificial Sequence: Synthetic oligonucleotide
  Target: SCNA; (-) strand; PAM type: NRG; PAM sequence: AGG
gggcgactctgacgaggggt

SEQ ID NO: 26325 - DNA, 20 bp, Artificial Sequence
  Description of Artificial Sequence: Synthetic oligonucleotide
  Target: SCNA; (-) strand; PAM type: NRG; PAM sequence: TAG
agggcgactctgacgagggg

SEQ ID NO: 26326 - DNA, 20 bp, Artificial Sequence
  Description of Artificial Sequence: Synthetic oligonucleotide
  Target: SCNA; (-) strand; PAM type: NRG; PAM sequence: GGG
cccagggcgactctgacgag

SEQ ID NO: 26327 - DNA, 20 bp, Artificial Sequence
  Description of Artificial Sequence: Synthetic oligonucleotide
  Target: SCNA; (-) strand; PAM type: NRG; PAM sequence: GGG
tcccagggcgactctgacga

SEQ ID NO: 26328 - DNA, 20 bp, Artificial Sequence
  Description of Artificial Sequence: Synthetic oligonucleotide
  Target: SCNA; (-) strand; PAM type: NRG; PAM sequence: AGG
ctcccagggcgactctgacg

SEQ ID NO: 26329 - DNA, 20 bp, Artificial Sequence
  Description of Artificial Sequence: Synthetic oligonucleotide
  Target: SCNA; (-) strand; PAM type: NRG; PAM sequence: GAG
tctcccagggcgactctgac

SEQ ID NO: 26330 - DNA, 20 bp, Artificial Sequence
  Description of Artificial Sequence: Synthetic oligonucleotide
  Target: SCNA; (-) strand; PAM type: NRG; PAM sequence: GGG
tcaggccctcggctctccca

SEQ ID NO: 26331 - DNA, 20 bp, Artificial Sequence
  Description of Artificial Sequence: Synthetic oligonucleotide
  Target: SCNA; (-) strand; PAM type: NRG; PAM sequence: AGG
ctcaggccctcggctctccc

SEQ ID NO: 26332 - DNA, 20 bp, Artificial Sequence
  Description of Artificial Sequence: Synthetic oligonucleotide
  Target: SCNA; (-) strand; PAM type: NRG; PAM sequence: CAG
cctcaggccctcggctctcc

SEQ ID NO: 26333 - DNA, 20 bp, Artificial Sequence
  Description of Artificial Sequence: Synthetic oligonucleotide
  Target: SCNA; (-) strand; PAM type: NRG; PAM sequence: CGG
gtggtcgaccctcaggccct

SEQ ID NO: 26334 - DNA, 20 bp, Artificial Sequence
  Description of Artificial Sequence: Synthetic oligonucleotide
  Target: SCNA; (-) strand; PAM type: NRG; PAM sequence: AGG
gcccttggtggtcgaccctc

SEQ ID NO: 26335 - DNA, 20 bp, Artificial Sequence
  Description of Artificial Sequence: Synthetic oligonucleotide
  Target: SCNA; (-) strand; PAM type: NRG; PAM sequence: CAG
tgcccttggtggtcgaccct

SEQ ID NO: 26336 - DNA, 20 bp, Artificial Sequence
  Description of Artificial Sequence: Synthetic oligonucleotide
  Target: SCNA; (-) strand; PAM type: NRG; PAM sequence: TGG
gggataggctctgcccttgg

SEQ ID NO: 26337 - DNA, 20 bp, Artificial Sequence
  Description of Artificial Sequence: Synthetic oligonucleotide
  Target: SCNA; (-) strand; PAM type: NRG; PAM sequence: TGG
caagggataggctctgccct

SEQ ID NO: 26338 - DNA, 20 bp, Artificial Sequence
  Description of Artificial Sequence: Synthetic oligonucleotide
  Target: SCNA; (-) strand; PAM type: NRG; PAM sequence: AGG
ccagcagctccccaagggat

SEQ ID NO: 26339 - DNA, 20 bp, Artificial Sequence
  Description of Artificial Sequence: Synthetic oligonucleotide
  Target: SCNA; (-) strand; PAM type: NRG; PAM sequence: TAG
tccagcagctccccaaggga

SEQ ID NO: 26340 - DNA, 20 bp, Artificial Sequence
  Description of Artificial Sequence: Synthetic oligonucleotide
  Target: SCNA; (-) strand; PAM type: NRG; PAM sequence: GGG
ctcctccagcagctccccaa

SEQ ID NO: 26341 - DNA, 20 bp, Artificial Sequence
  Description of Artificial Sequence: Synthetic oligonucleotide
  Target: SCNA; (-) strand; PAM type: NRG; PAM sequence: AGG
tctcctccagcagctcccca

SEQ ID NO: 26342 - DNA, 20 bp, Artificial Sequence
  Description of Artificial Sequence: Synthetic oligonucleotide
  Target: SCNA; (-) strand; PAM type: NRG; PAM sequence: AAG
gtctcctccagcagctcccc

SEQ ID NO: 26343 - DNA, 20 bp, Artificial Sequence
  Description of Artificial Sequence: Synthetic oligonucleotide
  Target: SCNA; (-) strand; PAM type: NRG; PAM sequence: CAG
gcgctgcctgtctcctccag

SEQ ID NO: 26344 - DNA, 20 bp, Artificial Sequence
  Description of Artificial Sequence: Synthetic oligonucleotide
  Target: SCNA; (-) strand; PAM type: NRG; PAM sequence: CAG
ccggcgctgcctgtctcctc

SEQ ID NO: 26345 - DNA, 20 bp, Artificial Sequence
  Description of Artificial Sequence: Synthetic oligonucleotide
  Target: SCNA; (-) strand; PAM type: NRG; PAM sequence: CGG
gtgcggtgtgagccacctcc

SEQ ID NO: 26346 - DNA, 20 bp, Artificial Sequence
  Description of Artificial Sequence: Synthetic oligonucleotide
  Target: SCNA; (-) strand; PAM type: NRG; PAM sequence: GAG
cgctctcggcggtgcggtgt

SEQ ID NO: 26347 - DNA, 20 bp, Artificial Sequence
  Description of Artificial Sequence: Synthetic oligonucleotide
  Target: SCNA; (-) strand; PAM type: NRG; PAM sequence: CGG
gcaaagcgctctcggcggtg

SEQ ID NO: 26348 - DNA, 20 bp, Artificial Sequence
  Description of Artificial Sequence: Synthetic oligonucleotide
  Target: SCNA; (-) strand; PAM type: NRG; PAM sequence: CGG
cgagggcaaagcgctctcgg

SEQ ID NO: 26349 - DNA, 20 bp, Artificial Sequence
  Description of Artificial Sequence: Synthetic oligonucleotide
  Target: SCNA; (-) strand; PAM type: NRG; PAM sequence: CGG
atgcgagggcaaagcgctct

SEQ ID NO: 26350 - DNA, 20 bp, Artificial Sequence
  Description of Artificial Sequence: Synthetic oligonucleotide
  Target: SCNA; (-) strand; PAM type: NRG; PAM sequence: AAG
atttcagcgatgcgagggca

SEQ ID NO: 26351 - DNA, 20 bp, Artificial Sequence
  Description of Artificial Sequence: Synthetic oligonucleotide
  Target: SCNA; (-) strand; PAM type: NRG; PAM sequence: GGG
attaaatttcagcgatgcga

SEQ ID NO: 26352 - DNA, 20 bp, Artificial Sequence
  Description of Artificial Sequence: Synthetic oligonucleotide
  Target: SCNA; (-) strand; PAM type: NRG; PAM sequence: AGG
gattaaatttcagcgatgcg

SEQ ID NO: 26353 - DNA, 20 bp, Artificial Sequence
  Description of Artificial Sequence: Synthetic oligonucleotide
  Target: SCNA; (-) strand; PAM type: NRG; PAM sequence: GAG
tgattaaatttcagcgatgc

SEQ ID NO: 26354 - DNA, 20 bp, Artificial Sequence
  Description of Artificial Sequence: Synthetic oligonucleotide
  Target: SCNA; (-) strand; PAM type: NRG; PAM sequence: CAG
ctgtgaccgtgattaaattt

SEQ ID NO: 26355 - DNA, 20 bp, Artificial Sequence
  Description of Artificial Sequence: Synthetic oligonucleotide
  Target: SCNA; (-) strand; PAM type: NRG; PAM sequence: AAG
ccttgaagatatttgaacta

SEQ ID NO: 26356 - DNA, 20 bp, Artificial Sequence
  Description of Artificial Sequence: Synthetic oligonucleotide
  Target: SCNA; (-) strand; PAM type: NRG; PAM sequence: AAG
aagagcaaacgaaaaccttg

SEQ ID NO: 26357 - DNA, 20 bp, Artificial Sequence
  Description of Artificial Sequence: Synthetic oligonucleotide
  Target: SCNA; (-) strand; PAM type: NRG; PAM sequence: GAG
tccggctcttcctagattaa

SEQ ID NO: 26358 - DNA, 20 bp, Artificial Sequence
  Description of Artificial Sequence: Synthetic oligonucleotide
  Target: SCNA; (-) strand; PAM type: NRG; PAM sequence: AAG
tttccggctcttcctagatt

SEQ ID NO: 26359 - DNA, 20 bp, Artificial Sequence
  Description of Artificial Sequence: Synthetic oligonucleotide
  Target: SCNA; (-) strand; PAM type: NRG; PAM sequence: TAG
ggaccctttccggctcttcc

SEQ ID NO: 26360 - DNA, 20 bp, Artificial Sequence
  Description of Artificial Sequence: Synthetic oligonucleotide
  Target: SCNA; (-) strand; PAM type: NRG; PAM sequence: CGG
ttcaccctcaggaccctttc

SEQ ID NO: 26361 - DNA, 20 bp, Artificial Sequence
  Description of Artificial Sequence: Synthetic oligonucleotide
  Target: SCNA; (-) strand; PAM type: NRG; PAM sequence: AGG
gtagtctccctttcaccctc

SEQ ID NO: 26362 - DNA, 20 bp, Artificial Sequence
  Description of Artificial Sequence: Synthetic oligonucleotide
  Target: SCNA; (-) strand; PAM type: NRG; PAM sequence: CAG
agtagtctccctttcaccct

SEQ ID NO: 26363 - DNA, 20 bp, Artificial Sequence
  Description of Artificial Sequence: Synthetic oligonucleotide
  Target: SCNA; (-) strand; PAM type: NRG; PAM sequence: TAG
aacctgtgactcttccttag

SEQ ID NO: 26364 - DNA, 20 bp, Artificial Sequence
  Description of Artificial Sequence: Synthetic oligonucleotide
  Target: SCNA; (-) strand; PAM type: NRG; PAM sequence: TAG
ctcaacctgtgactcttcct

SEQ ID NO: 26365 - DNA, 20 bp, Artificial Sequence
  Description of Artificial Sequence: Synthetic oligonucleotide
  Target: SCNA; (-) strand; PAM type: NRG; PAM sequence: GAG
gcgtggaaagaggatttgct

SEQ ID NO: 26366 - DNA, 20 bp, Artificial Sequence
  Description of Artificial Sequence: Synthetic oligonucleotide
  Target: SCNA; (-) strand; PAM type: NRG; PAM sequence: AGG
ggtgatagtggcgtggaaag

SEQ ID NO: 26367 - DNA, 20 bp, Artificial Sequence
  Description of Artificial Sequence: Synthetic oligonucleotide
  Target: SCNA; (-) strand; PAM type: NRG; PAM sequence: GAG
tggtgatagtggcgtggaaa

SEQ ID NO: 26368 - DNA, 20 bp, Artificial Sequence
  Description of Artificial Sequence: Synthetic oligonucleotide
  Target: SCNA; (-) strand; PAM type: NRG; PAM sequence: AAG
aatggtgatagtggcgtgga

SEQ ID NO: 26369 - DNA, 20 bp, Artificial Sequence
  Description of Artificial Sequence: Synthetic oligonucleotide
  Target: SCNA; (-) strand; PAM type: NRG; PAM sequence: TGG
ggaaaatggtgatagtggcg

SEQ ID NO: 26370 - DNA, 20 bp, Artificial Sequence
  Description of Artificial Sequence: Synthetic oligonucleotide
  Target: SCNA; (-) strand; PAM type: NRG; PAM sequence: TGG
ggaaaggaaaatggtgatag

SEQ ID NO: 26371 - DNA, 20 bp, Artificial Sequence
  Description of Artificial Sequence: Synthetic oligonucleotide
  Target: SCNA; (-) strand; PAM type: NRG; PAM sequence: TAG
ggtggaaaggaaaatggtga

SEQ ID NO: 26372 - DNA, 20 bp, Artificial Sequence
  Description of Artificial Sequence: Synthetic oligonucleotide
  Target: SCNA; (-) strand; PAM type: NRG; PAM sequence: TGG
ctgattggtggaaaggaaaa

SEQ ID NO: 26373 - DNA, 20 bp, Artificial Sequence
  Description of Artificial Sequence: Synthetic oligonucleotide
  Target: SCNA; (-) strand; PAM type: NRG; PAM sequence: AGG
gcaggcgctgattggtggaa

SEQ ID NO: 26374 - DNA, 20 bp, Artificial Sequence
  Description of Artificial Sequence: Synthetic oligonucleotide
  Target: SCNA; (-) strand; PAM type: NRG; PAM sequence: AAG
ggcaggcgctgattggtgga

SEQ ID NO: 26375 - DNA, 20 bp, Artificial Sequence
  Description of Artificial Sequence: Synthetic oligonucleotide
  Target: SCNA; (-) strand; PAM type: NRG; PAM sequence: TGG
gtctggcaggcgctgattgg

SEQ ID NO: 26376 - DNA, 20 bp, Artificial Sequence
  Description of Artificial Sequence: Synthetic oligonucleotide
  Target: SCNA; (-) strand; PAM type: NRG; PAM sequence: TGG
agcgtctggcaggcgctgat

SEQ ID NO: 26377 - DNA, 20 bp, Artificial Sequence
  Description of Artificial Sequence: Synthetic oligonucleotide
  Target: SCNA; (-) strand; PAM type: NRG; PAM sequence: AGG
tgggaaaatcagcgtctggc

SEQ ID NO: 26378 - DNA, 20 bp, Artificial Sequence
  Description of Artificial Sequence: Synthetic oligonucleotide
  Target: SCNA; (-) strand; PAM type: NRG; PAM sequence: CAG
atgggaaaatcagcgtctgg

SEQ ID NO: 26379 - DNA, 20 bp, Artificial Sequence
  Description of Artificial Sequence: Synthetic oligonucleotide
  Target: SCNA; (-) strand; PAM type: NRG; PAM sequence: TGG
ctgatgggaaaatcagcgtc

SEQ ID NO: 26380 - DNA, 20 bp, Artificial Sequence
  Description of Artificial Sequence: Synthetic oligonucleotide
  Target: SCNA; (-) strand; PAM type: NRG; PAM sequence: CAG
tgttccactgatgggaaaat

SEQ ID NO: 26381 - DNA, 20 bp, Artificial Sequence
  Description of Artificial Sequence: Synthetic oligonucleotide
  Target: SCNA; (-) strand; PAM type: NRG; PAM sequence: GGG
ttattccttgttccactgat

SEQ ID NO: 26382 - DNA, 20 bp, Artificial Sequence
  Description of Artificial Sequence: Synthetic oligonucleotide
  Target: SCNA; (-) strand; PAM type: NRG; PAM sequence: TGG
tttattccttgttccactga

SEQ ID NO: 26383 - DNA, 20 bp, Artificial Sequence
  Description of Artificial Sequence: Synthetic oligonucleotide
  Target: SCNA; (-) strand; PAM type: NRG; PAM sequence: GGG
ccgcttgttttagacggctg

SEQ ID NO: 26384 - DNA, 20 bp, Artificial Sequence
  Description of Artificial Sequence: Synthetic oligonucleotide
  Target: SCNA; (-) strand; PAM type: NRG; PAM sequence: GGG
accgcttgttttagacggct

SEQ ID NO: 26385 - DNA, 20 bp, Artificial Sequence
  Description of Artificial Sequence: Synthetic oligonucleotide
  Target: SCNA; (-) strand; PAM type: NRG; PAM sequence: TGG
gaccgcttgttttagacggc

SEQ ID NO: 26386 - DNA, 20 bp, Artificial Sequence
  Description of Artificial Sequence: Synthetic oligonucleotide
  Target: SCNA; (-) strand; PAM type: NRG; PAM sequence: CGG
ttaggaccgcttgttttaga

SEQ ID NO: 26387 - DNA, 20 bp, Artificial Sequence
  Description of Artificial Sequence: Synthetic oligonucleotide
  Target: SCNA; (-) strand; PAM type: NRG; PAM sequence: TAG
agccttaggaccgcttgttt

SEQ ID NO: 26388 - DNA, 20 bp, Artificial Sequence
  Description of Artificial Sequence: Synthetic oligonucleotide
  Target: SCNA; (-) strand; PAM type: NRG; PAM sequence: AGG
tttctagagcgaaaagcctt

SEQ ID NO: 26389 - DNA, 20 bp, Artificial Sequence
  Description of Artificial Sequence: Synthetic oligonucleotide
  Target: SCNA; (-) strand; PAM type: NRG; PAM sequence: TAG
atttctagagcgaaaagcct

SEQ ID NO: 26390 - DNA, 20 bp, Artificial Sequence
  Description of Artificial Sequence: Synthetic oligonucleotide
  Target: SCNA; (-) strand; PAM type: NRG; PAM sequence: AAG
agtcccatttctagagcgaa

SEQ ID NO: 26391 - DNA, 20 bp, Artificial Sequence
  Description of Artificial Sequence: Synthetic oligonucleotide
  Target: SCNA; (-) strand; PAM type: NRG; PAM sequence: GAG
caaagtaagtcccatttcta

SEQ ID NO: 26392 - DNA, 20 bp, Artificial Sequence
  Description of Artificial Sequence: Synthetic oligonucleotide
  Target: SCNA; (-) strand; PAM type: NRG; PAM sequence: TAG
tgcaaagtaagtcccatttc

SEQ ID NO: 26393 - DNA, 20 bp, Artificial Sequence
  Description of Artificial Sequence: Synthetic oligonucleotide
  Target: SCNA; (-) strand; PAM type: NRG; PAM sequence: AAG
taaagggaggtctgcaaagt

SEQ ID NO: 26394 - DNA, 20 bp, Artificial Sequence
  Description of Artificial Sequence: Synthetic oligonucleotide
  Target: SCNA; (-) strand; PAM type: NRG; PAM sequence: AAG
cagataaagggaggtctgca

SEQ ID NO: 26395 - DNA, 20 bp, Artificial Sequence
  Description of Artificial Sequence: Synthetic oligonucleotide
  Target: SCNA; (-) strand; PAM type: NRG; PAM sequence: AGG
tttgtctcccagataaaggg

SEQ ID NO: 26396 - DNA, 20 bp, Artificial Sequence
  Description of Artificial Sequence: Synthetic oligonucleotide
  Target: SCNA; (-) strand; PAM type: NRG; PAM sequence: GAG
atttgtctcccagataaagg

SEQ ID NO: 26397 - DNA, 20 bp, Artificial Sequence
  Description of Artificial Sequence: Synthetic oligonucleotide
  Target: SCNA; (-) strand; PAM type: NRG; PAM sequence: GGG
ggatttgtctcccagataaa

SEQ ID NO: 26398 - DNA, 20 bp, Artificial Sequence
  Description of Artificial Sequence: Synthetic oligonucleotide
  Target: SCNA; (-) strand; PAM type: NRG; PAM sequence: AGG
tggatttgtctcccagataa

SEQ ID NO: 26399 - DNA, 20 bp, Artificial Sequence
  Description of Artificial Sequence: Synthetic oligonucleotide
  Target: SCNA; (-) strand; PAM type: NRG; PAM sequence: AAG
ctggatttgtctcccagata

SEQ ID NO: 26400 - DNA, 20 bp, Artificial Sequence
  Description of Artificial Sequence: Synthetic oligonucleotide
  Target: SCNA; (-) strand; PAM type: NRG; PAM sequence: CAG
atcacgctggatttgtctcc

SEQ ID NO: 26401 - DNA, 20 bp, Artificial Sequence
  Description of Artificial Sequence: Synthetic oligonucleotide
  Target: SCNA; (-) strand; PAM type: NRG; PAM sequence: TGG
tccggtaggctaaatcacgc

SEQ ID NO: 26402 - DNA, 20 bp, Artificial Sequence
  Description of Artificial Sequence: Synthetic oligonucleotide
  Target: SCNA; (-) strand; PAM type: NRG; PAM sequence: AGG
attggatatgatggtccggt

SEQ ID NO: 26403 - DNA, 20 bp, Artificial Sequence
  Description of Artificial Sequence: Synthetic oligonucleotide
  Target: SCNA; (-) strand; PAM type: NRG; PAM sequence: TAG
aattggatatgatggtccgg

SEQ ID NO: 26404 - DNA, 20 bp, Artificial Sequence
  Description of Artificial Sequence: Synthetic oligonucleotide
  Target: SCNA; (-) strand; PAM type: NRG; PAM sequence: CGG
agaaattggatatgatggtc

SEQ ID NO: 26405 - DNA, 20 bp, Artificial Sequence
  Description of Artificial Sequence: Synthetic oligonucleotide
  Target: SCNA; (-) strand; PAM type: NRG; PAM sequence: TGG
gaagaagaaattggatatga

SEQ ID NO: 26406 - DNA, 20 bp, Artificial Sequence
  Description of Artificial Sequence: Synthetic oligonucleotide
  Target: SCNA; (-) strand; PAM type: NRG; PAM sequence: TGG
gaaggggctgaagaagaaat

SEQ ID NO: 26407 - DNA, 20 bp, Artificial Sequence
  Description of Artificial Sequence: Synthetic oligonucleotide
  Target: SCNA; (-) strand; PAM type: NRG; PAM sequence: AAG
cctttcagaaggggctgaag

SEQ ID NO: 26408 - DNA, 20 bp, Artificial Sequence
  Description of Artificial Sequence: Synthetic oligonucleotide
  Target: SCNA; (-) strand; PAM type: NRG; PAM sequence: AAG
ctccctttcagaaggggctg

SEQ ID NO: 26409 - DNA, 20 bp, Artificial Sequence
  Description of Artificial Sequence: Synthetic oligonucleotide
  Target: SCNA; (-) strand; PAM type: NRG; PAM sequence: GGG
tagcatctccctttcagaag

SEQ ID NO: 26410 - DNA, 20 bp, Artificial Sequence
  Description of Artificial Sequence: Synthetic oligonucleotide
  Target: SCNA; (-) strand; PAM type: NRG; PAM sequence: GGG
gtagcatctccctttcagaa

SEQ ID NO: 26411 - DNA, 20 bp, Artificial Sequence
  Description of Artificial Sequence: Synthetic oligonucleotide
  Target: SCNA; (-) strand; PAM type: NRG; PAM sequence: AGG
tgtagcatctccctttcaga

SEQ ID NO: 26412 - DNA, 20 bp, Artificial Sequence
  Description of Artificial Sequence: Synthetic oligonucleotide
  Target: SCNA; (-) strand; PAM type: NRG; PAM sequence: AAG
gtgtagcatctccctttcag

SEQ ID NO: 26413 - DNA, 20 bp, Artificial Sequence
  Description of Artificial Sequence: Synthetic oligonucleotide
  Target: SCNA; (-) strand; PAM type: NRG; PAM sequence: CAG
ggtgtgtagcatctcccttt

SEQ ID NO: 26414 - DNA, 20 bp, Artificial Sequence
  Description of Artificial Sequence: Synthetic oligonucleotide
  Target: SCNA; (-) strand; PAM type: NRG; PAM sequence: TAG
tcagaaaggtgagtggtgtg

SEQ ID NO: 26415 - DNA, 20 bp, Artificial Sequence
  Description of Artificial Sequence: Synthetic oligonucleotide
  Target: SCNA; (-) strand; PAM type: NRG; PAM sequence: TGG
tcagaagtcagaaaggtgag

SEQ ID NO: 26416 - DNA, 20 bp, Artificial Sequence
  Description of Artificial Sequence: Synthetic oligonucleotide
  Target: SCNA; (-) strand; PAM type: NRG; PAM sequence: GAG
gaatcagaagtcagaaaggt

SEQ ID NO: 26417 - DNA, 20 bp, Artificial Sequence
  Description of Artificial Sequence: Synthetic oligonucleotide
  Target: SCNA; (-) strand; PAM type: NRG; PAM sequence: AGG
acgagaatcagaagtcagaa

SEQ ID NO: 26418 - DNA, 20 bp, Artificial Sequence
  Description of Artificial Sequence: Synthetic oligonucleotide
  Target: SCNA; (-) strand; PAM type: NRG; PAM sequence: AAG
aacgagaatcagaagtcaga

SEQ ID NO: 26419 - DNA, 20 bp, Artificial Sequence
  Description of Artificial Sequence: Synthetic oligonucleotide
  Target: SCNA; (-) strand; PAM type: NRG; PAM sequence: CAG
gggcaacgagaatcagaagt

SEQ ID NO: 26420 - DNA, 20 bp, Artificial Sequence
  Description of Artificial Sequence: Synthetic oligonucleotide
  Target: SCNA; (-) strand; PAM type: NRG; PAM sequence: AAG
ctgagggcaacgagaatcag

SEQ ID NO: 26421 - DNA, 20 bp, Artificial Sequence
  Description of Artificial Sequence: Synthetic oligonucleotide
  Target: SCNA; (-) strand; PAM type: NRG; PAM sequence: CAG
attctgagggcaacgagaat

SEQ ID NO: 26422 - DNA, 20 bp, Artificial Sequence
  Description of Artificial Sequence: Synthetic oligonucleotide
  Target: SCNA; (-) strand; PAM type: NRG; PAM sequence: GAG
gtgtcaattctgagggcaac

SEQ ID NO: 26423 - DNA, 20 bp, Artificial Sequence
  Description of Artificial Sequence: Synthetic oligonucleotide
  Target: SCNA; (-) strand; PAM type: NRG; PAM sequence: GGG
aaagggggtgtcaattctga

SEQ ID NO: 26424 - DNA, 20 bp, Artificial Sequence
  Description of Artificial Sequence: Synthetic oligonucleotide
  Target: SCNA; (-) strand; PAM type: NRG; PAM sequence: AGG
aaaagggggtgtcaattctg

SEQ ID NO: 26425 - DNA, 20 bp, Artificial Sequence
  Description of Artificial Sequence: Synthetic oligonucleotide
  Target: SCNA; (-) strand; PAM type: NRG; PAM sequence: GAG
gaaaagggggtgtcaattct

SEQ ID NO: 26426 - DNA, 20 bp, Artificial Sequence
  Description of Artificial Sequence: Synthetic oligonucleotide
  Target: SCNA; (-) strand; PAM type: NRG; PAM sequence: GGG
gggtggggggagagaaaagg

SEQ ID NO: 26427 - DNA, 20 bp, Artificial Sequence
  Description of Artificial Sequence: Synthetic oligonucleotide
  Target: SCNA; (-) strand; PAM type: NRG; PAM sequence: GGG
tgggtggggggagagaaaag

SEQ ID NO: 26428 - DNA, 20 bp, Artificial Sequence
  Description of Artificial Sequence: Synthetic oligonucleotide
  Target: SCNA; (-) strand; PAM type: NRG; PAM sequence: GGG
gtgggtggggggagagaaaa

SEQ ID NO: 26429 - DNA, 20 bp, Artificial Sequence
  Description of Artificial Sequence: Synthetic oligonucleotide
  Target: SCNA; (-) strand; PAM type: NRG; PAM sequence: AGG
ggtgggtggggggagagaaa

SEQ ID NO: 26430 - DNA, 20 bp, Artificial Sequence
  Description of Artificial Sequence: Synthetic oligonucleotide
  Target: SCNA; (-) strand; PAM type: NRG; PAM sequence: AAG
tggtgggtggggggagagaa

SEQ ID NO: 26431 - DNA, 20 bp, Artificial Sequence
  Description of Artificial Sequence: Synthetic oligonucleotide
  Target: SCNA; (-) strand; PAM type: NRG; PAM sequence: GAG
gcgtgtggtgggtgggggga

SEQ ID NO: 26432 - DNA, 20 bp, Artificial Sequence
  Description of Artificial Sequence: Synthetic oligonucleotide
  Target: SCNA; (-) strand; PAM type: NRG; PAM sequence: GAG
gtgcgtgtggtgggtggggg

SEQ ID NO: 26433 - DNA, 20 bp, Artificial Sequence
  Description of Artificial Sequence: Synthetic oligonucleotide
  Target: SCNA; (-) strand; PAM type: NRG; PAM sequence: GGG
atgtgcgtgtggtgggtggg

SEQ ID NO: 26434 - DNA, 20 bp, Artificial Sequence
  Description of Artificial Sequence: Synthetic oligonucleotide
  Target: SCNA; (-) strand; PAM type: NRG; PAM sequence: GGG
catgtgcgtgtggtgggtgg

SEQ ID NO: 26435 - DNA, 20 bp, Artificial Sequence
  Description of Artificial Sequence: Synthetic oligonucleotide
  Target: SCNA; (-) strand; PAM type: NRG; PAM sequence: GGG
gcatgtgcgtgtggtgggtg

SEQ ID NO: 26436 - DNA, 20 bp, Artificial Sequence
  Description of Artificial Sequence: Synthetic oligonucleotide
  Target: SCNA; (-) strand; PAM type: NRG; PAM sequence: GGG
tgcatgtgcgtgtggtgggt

SEQ ID NO: 26437 - DNA, 20 bp, Artificial Sequence
  Description of Artificial Sequence: Synthetic oligonucleotide
  Target: SCNA; (-) strand; PAM type: NRG; PAM sequence: TGG
gtgcatgtgcgtgtggtggg

SEQ ID NO: 26438 - DNA, 20 bp, Artificial Sequence
  Description of Artificial Sequence: Synthetic oligonucleotide
  Target: SCNA; (-) strand; PAM type: NRG; PAM sequence: GGG
tgtgtgcatgtgcgtgtggt

SEQ ID NO: 26439 - DNA, 20 bp, Artificial Sequence
  Description of Artificial Sequence: Synthetic oligonucleotide
  Target: SCNA; (-) strand; PAM type: NRG; PAM sequence: TGG
ctgtgtgcatgtgcgtgtgg

SEQ ID NO: 26440 - DNA, 20 bp, Artificial Sequence
  Description of Artificial Sequence: Synthetic oligonucleotide
  Target: SCNA; (-) strand; PAM type: NRG; PAM sequence: TGG
tgtctgtgtgcatgtgcgtg

SEQ ID NO: 26441 - DNA, 20 bp, Artificial Sequence
  Description of Artificial Sequence: Synthetic oligonucleotide
  Target: SCNA; (-) strand; PAM type: NRG; PAM sequence: AAG
gcgatgcaaaaattgtcttg

SEQ ID NO: 26442 - DNA, 20 bp, Artificial Sequence
  Description of Artificial Sequence: Synthetic oligonucleotide
  Target: SCNA; (-) strand; PAM type: NRG; PAM sequence: AAG
gaaagaggtgaaaatgtgtt

SEQ ID NO: 26443 - DNA, 20 bp, Artificial Sequence
  Description of Artificial Sequence: Synthetic oligonucleotide
  Target: SCNA; (-) strand; PAM type: NRG; PAM sequence: AGG
ctgtcttccagctctgaaag

SEQ ID NO: 26444 - DNA, 20 bp, Artificial Sequence
  Description of Artificial Sequence: Synthetic oligonucleotide
  Target: SCNA; (-) strand; PAM type: NRG; PAM sequence: GAG
gctgtcttccagctctgaaa

SEQ ID NO: 26445 - DNA, 20 bp, Artificial Sequence
  Description of Artificial Sequence: Synthetic oligonucleotide
  Target: SCNA; (-) strand; PAM type: NRG; PAM sequence: AAG
cagctgtcttccagctctga

SEQ ID NO: 26446 - DNA, 20 bp, Artificial Sequence
  Description of Artificial Sequence: Synthetic oligonucleotide
  Target: SCNA; (-) strand; PAM type: NRG; PAM sequence: CAG
atccaggaacagctgtcttc

SEQ ID NO: 26447 - DNA, 20 bp, Artificial Sequence
  Description of Artificial Sequence: Synthetic oligonucleotide
  Target: SCNA; (-) strand; PAM type: NRG; PAM sequence: CAG
attctggtgtgatccaggaa

SEQ ID NO: 26448 - DNA, 20 bp, Artificial Sequence
  Description of Artificial Sequence: Synthetic oligonucleotide
  Target: SCNA; (-) strand; PAM type: NRG; PAM sequence: AGG
tctccattctggtgtgatcc

SEQ ID NO: 26449 - DNA, 20 bp, Artificial Sequence
  Description of Artificial Sequence: Synthetic oligonucleotide
  Target: SCNA; (-) strand; PAM type: NRG; PAM sequence: CAG
ttctccattctggtgtgatc

SEQ ID NO: 26450 - DNA, 20 bp, Artificial Sequence
  Description of Artificial Sequence: Synthetic oligonucleotide
  Target: SCNA; (-) strand; PAM type: NRG; PAM sequence: TGG
aggagcttgcttctccattc

SEQ ID NO: 26451 - DNA, 20 bp, Artificial Sequence
  Description of Artificial Sequence: Synthetic oligonucleotide
  Target: SCNA; (-) strand; PAM type: NRG; PAM sequence: GAG
aggctttctgctagtgggag

SEQ ID NO: 26452 - DNA, 20 bp, Artificial Sequence
  Description of Artificial Sequence: Synthetic oligonucleotide
  Target: SCNA; (-) strand; PAM type: NRG; PAM sequence: AGG
aaaggctttctgctagtggg

SEQ ID NO: 26453 - DNA, 20 bp, Artificial Sequence
  Description of Artificial Sequence: Synthetic oligonucleotide
  Target: SCNA; (-) strand; PAM type: NRG; PAM sequence: GAG
caaaggctttctgctagtgg

SEQ ID NO: 26454 - DNA, 20 bp, Artificial Sequence
  Description of Artificial Sequence: Synthetic oligonucleotide
  Target: SCNA; (-) strand; PAM type: NRG; PAM sequence: GGG
agcaaaggctttctgctagt

SEQ ID NO: 26455 - DNA, 20 bp, Artificial Sequence
  Description of Artificial Sequence: Synthetic oligonucleotide
  Target: SCNA; (-) strand; PAM type: NRG; PAM sequence: TGG
aagcaaaggctttctgctag

SEQ ID NO: 26456 - DNA, 20 bp, Artificial Sequence
  Description of Artificial Sequence: Synthetic oligonucleotide
  Target: SCNA; (-) strand; PAM type: NRG; PAM sequence: TAG
agaaagcaaaggctttctgc

SEQ ID NO: 26457 - DNA, 20 bp, Artificial Sequence
  Description of Artificial Sequence: Synthetic oligonucleotide
  Target: SCNA; (-) strand; PAM type: NRG; PAM sequence: AGG
aatccaggcacagaaagcaa

SEQ ID NO: 26458 - DNA, 20 bp, Artificial Sequence
  Description of Artificial Sequence: Synthetic oligonucleotide
  Target: SCNA; (-) strand; PAM type: NRG; PAM sequence: AAG
gaatccaggcacagaaagca

SEQ ID NO: 26459 - DNA, 20 bp, Artificial Sequence
  Description of Artificial Sequence: Synthetic oligonucleotide
  Target: SCNA; (-) strand; PAM type: NRG; PAM sequence: AAG
cttccgaatccaggcacaga

SEQ ID NO: 26460 - DNA, 20 bp, Artificial Sequence
  Description of Artificial Sequence: Synthetic oligonucleotide
  Target: SCNA; (-) strand; PAM type: NRG; PAM sequence: CAG
taatcttccgaatccaggca

SEQ ID NO: 26461 - DNA, 20 bp, Artificial Sequence
  Description of Artificial Sequence: Synthetic oligonucleotide
  Target: SCNA; (-) strand; PAM type: NRG; PAM sequence: AGG
ttaactaatcttccgaatcc

SEQ ID NO: 26462 - DNA, 20 bp, Artificial Sequence
  Description of Artificial Sequence: Synthetic oligonucleotide
  Target: SCNA; (-) strand; PAM type: NRG; PAM sequence: CAG
cttaactaatcttccgaatc

SEQ ID NO: 26463 - DNA, 20 bp, Artificial Sequence
  Description of Artificial Sequence: Synthetic oligonucleotide
  Target: SCNA; (-) strand; PAM type: NRG; PAM sequence: CAG
ttgtttcccccctcctcttc

SEQ ID NO: 26464 - DNA, 20 bp, Artificial Sequence
  Description of Artificial Sequence: Synthetic oligonucleotide
  Target: SCNA; (-) strand; PAM type: NRG; PAM sequence: GAG
aaaaaacatacagcaaaaac

SEQ ID NO: 26465 - DNA, 20 bp, Artificial Sequence
  Description of Artificial Sequence: Synthetic oligonucleotide
  Target: SCNA; (-) strand; PAM type: NRG; PAM sequence: CAG
acaattaaaaaaaaaacata

SEQ ID NO: 26466 - DNA, 20 bp, Artificial Sequence
  Description of Artificial Sequence: Synthetic oligonucleotide
  Target: SCNA; (-) strand; PAM type: NRG; PAM sequence: AAG
attagcgcaagaatcagaca

SEQ ID NO: 26467 - DNA, 20 bp, Artificial Sequence
  Description of Artificial Sequence: Synthetic oligonucleotide
  Target: SCNA; (-) strand; PAM type: NRG; PAM sequence: CAG
acccaaattagcgcaagaat

SEQ ID NO: 26468 - DNA, 20 bp, Artificial Sequence
  Description of Artificial Sequence: Synthetic oligonucleotide
  Target: SCNA; (-) strand; PAM type: NRG; PAM sequence: AAG
ttcagaacccaaattagcgc

SEQ ID NO: 26469 - DNA, 20 bp, Artificial Sequence
  Description of Artificial Sequence: Synthetic oligonucleotide
  Target: SCNA; (-) strand; PAM type: NRG; PAM sequence: TAG
tcaaatttcagaacccaaat

SEQ ID NO: 26470 - DNA, 20 bp, Artificial Sequence
  Description of Artificial Sequence: Synthetic oligonucleotide
  Target: SCNA; (-) strand; PAM type: NRG; PAM sequence: CAG
atttgattttactcaaattt

SEQ ID NO: 26471 - DNA, 20 bp, Artificial Sequence
  Description of Artificial Sequence: Synthetic oligonucleotide
  Target: SCNA; (-) strand; PAM type: NRG; PAM sequence: AAG
tcctgttccttgtggtttta

SEQ ID NO: 26472 - DNA, 20 bp, Artificial Sequence
  Description of Artificial Sequence: Synthetic oligonucleotide
  Target: SCNA; (-) strand; PAM type: NRG; PAM sequence: TGG
catttgcttcctgttccttg

SEQ ID NO: 26473 - DNA, 20 bp, Artificial Sequence
  Description of Artificial Sequence: Synthetic oligonucleotide
  Target: SCNA; (-) strand; PAM type: NRG; PAM sequence: GAG
cagaccaatagttcaaggaa

SEQ ID NO: 26474 - DNA, 20 bp, Artificial Sequence
  Description of Artificial Sequence: Synthetic oligonucleotide
  Target: SCNA; (-) strand; PAM type: NRG; PAM sequence: AAG
ggcagaccaatagttcaagg

SEQ ID NO: 26475 - DNA, 20 bp, Artificial Sequence
  Description of Artificial Sequence: Synthetic oligonucleotide
  Target: SCNA; (-) strand; PAM type: NRG; PAM sequence: AGG
aagggcagaccaatagttca

SEQ ID NO: 26476 - DNA, 20 bp, Artificial Sequence
  Description of Artificial Sequence: Synthetic oligonucleotide
  Target: SCNA; (-) strand; PAM type: NRG; PAM sequence: AAG
aaagggcagaccaatagttc

SEQ ID NO: 26477 - DNA, 20 bp, Artificial Sequence
  Description of Artificial Sequence: Synthetic oligonucleotide
  Target: SCNA; (-) strand; PAM type: NRG; PAM sequence: TAG
ttttccaaagggcagaccaa

SEQ ID NO: 26478 - DNA, 20 bp, Artificial Sequence
  Description of Artificial Sequence: Synthetic oligonucleotide
  Target: SCNA; (-) strand; PAM type: NRG; PAM sequence: CAG
aagtctgcttttccaaaggg

SEQ ID NO: 26479 - DNA, 20 bp, Artificial Sequence
  Description of Artificial Sequence: Synthetic oligonucleotide
  Target: SCNA; (-) strand; PAM type: NRG; PAM sequence: GGG
ggaaagtctgcttttccaaa

SEQ ID NO: 26480 - DNA, 20 bp, Artificial Sequence
  Description of Artificial Sequence: Synthetic oligonucleotide
  Target: SCNA; (-) strand; PAM type: NRG; PAM sequence: AGG
aggaaagtctgcttttccaa

SEQ ID NO: 26481 - DNA, 20 bp, Artificial Sequence
  Description of Artificial Sequence: Synthetic oligonucleotide
  Target: SCNA; (-) strand; PAM type: NRG; PAM sequence: AAG
aaggaaagtctgcttttcca

SEQ ID NO: 26482 - DNA, 20 bp, Artificial Sequence
  Description of Artificial Sequence: Synthetic oligonucleotide
  Target: SCNA; (-) strand; PAM type: NRG; PAM sequence: AAG
atgagctactgcattaagga

SEQ ID NO: 26483 - DNA, 20 bp, Artificial Sequence
  Description of Artificial Sequence: Synthetic oligonucleotide
  Target: SCNA; (-) strand; PAM type: NRG; PAM sequence: AGG
taatatgagctactgcatta

SEQ ID NO: 26484 - DNA, 20 bp, Artificial Sequence
  Description of Artificial Sequence: Synthetic oligonucleotide
  Target: SCNA; (-) strand; PAM type: NRG; PAM sequence: AAG
ttaatatgagctactgcatt

SEQ ID NO: 26485 - DNA, 20 bp, Artificial Sequence
  Description of Artificial Sequence: Synthetic oligonucleotide
  Target: SCNA; (-) strand; PAM type: NRG; PAM sequence: GAG
caaacaaaaaatattaatat

SEQ ID NO: 26486 - DNA, 20 bp, Artificial Sequence
  Description of Artificial Sequence: Synthetic oligonucleotide
  Target: SCNA; (-) strand; PAM type: NRG; PAM sequence: AAG
aaccttcttgctctggtcct

SEQ ID NO: 26487 - DNA, 20 bp, Artificial Sequence
  Description of Artificial Sequence: Synthetic oligonucleotide
  Target: SCNA; (-) strand; PAM type: NRG; PAM sequence: TGG
caagtccaaccttcttgctc

SEQ ID NO: 26488 - DNA, 20 bp, Artificial Sequence
  Description of Artificial Sequence: Synthetic oligonucleotide
  Target: SCNA; (-) strand; PAM type: NRG; PAM sequence: AAG
cagacagcaaactagctccc

SEQ ID NO: 26489 - DNA, 20 bp, Artificial Sequence
  Description of Artificial Sequence: Synthetic oligonucleotide
  Target: SCNA; (-) strand; PAM type: NRG; PAM sequence: TAG
ctcaaagccagacagcaaac

SEQ ID NO: 26490 - DNA, 20 bp, Artificial Sequence
  Description of Artificial Sequence: Synthetic oligonucleotide
  Target: SCNA; (-) strand; PAM type: NRG; PAM sequence: CAG
ttcaaggtctcaaagccaga

SEQ ID NO: 26491 - DNA, 20 bp, Artificial Sequence
  Description of Artificial Sequence: Synthetic oligonucleotide
  Target: SCNA; (-) strand; PAM type: NRG; PAM sequence: CAG
cttgttcaaggtctcaaagc

SEQ ID NO: 26492 - DNA, 20 bp, Artificial Sequence
  Description of Artificial Sequence: Synthetic oligonucleotide
  Target: SCNA; (-) strand; PAM type: NRG; PAM sequence: AAG
aaaacttgttcaaggtctca

SEQ ID NO: 26493 - DNA, 20 bp, Artificial Sequence
  Description of Artificial Sequence: Synthetic oligonucleotide
  Target: SCNA; (-) strand; PAM type: NRG; PAM sequence: AGG
aggagaacaaaacttgttca

SEQ ID NO: 26494 - DNA, 20 bp, Artificial Sequence
  Description of Artificial Sequence: Synthetic oligonucleotide
  Target: SCNA; (-) strand; PAM type: NRG; PAM sequence: AAG
aaggagaacaaaacttgttc

SEQ ID NO: 26495 - DNA, 20 bp, Artificial Sequence
  Description of Artificial Sequence: Synthetic oligonucleotide
  Target: SCNA; (-) strand; PAM type: NRG; PAM sequence: GAG
aagaaaactggaaacagaag

SEQ ID NO: 26496 - DNA, 20 bp, Artificial Sequence
  Description of Artificial Sequence: Synthetic oligonucleotide
  Target: SCNA; (-) strand; PAM type: NRG; PAM sequence: AGG
aaaagaaaactggaaacaga

SEQ ID NO: 26497 - DNA, 20 bp, Artificial Sequence
  Description of Artificial Sequence: Synthetic oligonucleotide
  Target: SCNA; (-) strand; PAM type: NRG; PAM sequence: AAG
aaaaagaaaactggaaacag

SEQ ID NO: 26498 - DNA, 20 bp, Artificial Sequence
  Description of Artificial Sequence: Synthetic oligonucleotide
  Target: SCNA; (-) strand; PAM type: NRG; PAM sequence: CAG
acaaaaaagaaaactggaaa

SEQ ID NO: 26499 - DNA, 20 bp, Artificial Sequence
  Description of Artificial Sequence: Synthetic oligonucleotide
  Target: SCNA; (-) strand; PAM type: NRG; PAM sequence: TGG
taatttacaaaaaagaaaac

SEQ ID NO: 26500 - DNA, 20 bp, Artificial Sequence
  Description of Artificial Sequence: Synthetic oligonucleotide
  Target: SCNA; (-) strand; PAM type: NRG; PAM sequence: AAG
taatctcctaatttacaaaa

SEQ ID NO: 26501 - DNA, 20 bp, Artificial Sequence
  Description of Artificial Sequence: Synthetic oligonucleotide
  Target: SCNA; (-) strand; PAM type: NRG; PAM sequence: GAG
tgaaaatagagtgatcacat

SEQ ID NO: 26502 - DNA, 20 bp, Artificial Sequence
  Description of Artificial Sequence: Synthetic oligonucleotide
  Target: SCNA; (-) strand; PAM type: NRG; PAM sequence: GAG
ataacaaaaagttgaaaata

SEQ ID NO: 26503 - DNA, 20 bp, Artificial Sequence
  Description of Artificial Sequence: Synthetic oligonucleotide
  Target: SCNA; (-) strand; PAM type: NRG; PAM sequence: TAG
ccataacaaaaagttgaaaa

SEQ ID NO: 26504 - DNA, 20 bp, Artificial Sequence
  Description of Artificial Sequence: Synthetic oligonucleotide
  Target: SCNA; (-) strand; PAM type: NRG; PAM sequence: AAG
tgaatatttcccataacaaa

SEQ ID NO: 26505 - DNA, 20 bp, Artificial Sequence
  Description of Artificial Sequence: Synthetic oligonucleotide
  Target: SCNA; (-) strand; PAM type: NRG; PAM sequence: GAG
gttggatgatcttcacatga

SEQ ID NO: 26506 - DNA, 20 bp, Artificial Sequence
  Description of Artificial Sequence: Synthetic oligonucleotide
  Target: SCNA; (-) strand; PAM type: NRG; PAM sequence: GAG
aagttggatgatcttcacat

SEQ ID NO: 26507 - DNA, 20 bp, Artificial Sequence
  Description of Artificial Sequence: Synthetic oligonucleotide
  Target: SCNA; (-) strand; PAM type: NRG; PAM sequence: TGG
cattgaaaaaatgtaaaagt

SEQ ID NO: 26508 - DNA, 20 bp, Artificial Sequence
  Description of Artificial Sequence: Synthetic oligonucleotide
  Target: SCNA; (-) strand; PAM type: NRG; PAM sequence: AAG
catgcattgaaaaaatgtaa

SEQ ID NO: 26509 - DNA, 20 bp, Artificial Sequence
  Description of Artificial Sequence: Synthetic oligonucleotide
  Target: SCNA; (-) strand; PAM type: NRG; PAM sequence: CAG
acttatggatgagacatgat

SEQ ID NO: 26510 - DNA, 20 bp, Artificial Sequence
  Description of Artificial Sequence: Synthetic oligonucleotide
  Target: SCNA; (-) strand; PAM type: NRG; PAM sequence: GAG
aagtgagtggacttatggat

SEQ ID NO: 26511 - DNA, 20 bp, Artificial Sequence
  Description of Artificial Sequence: Synthetic oligonucleotide
  Target: SCNA; (-) strand; PAM type: NRG; PAM sequence: TGG
tgataaagtgagtggactta

SEQ ID NO: 26512 - DNA, 20 bp, Artificial Sequence
  Description of Artificial Sequence: Synthetic oligonucleotide
  Target: SCNA; (-) strand; PAM type: NRG; PAM sequence: TGG
attggtagtgataaagtgag

SEQ ID NO: 26513 - DNA, 20 bp, Artificial Sequence
  Description of Artificial Sequence: Synthetic oligonucleotide
  Target: SCNA; (-) strand; PAM type: NRG; PAM sequence: GAG
aggattggtagtgataaagt

SEQ ID NO: 26514 - DNA, 20 bp, Artificial Sequence
  Description of Artificial Sequence: Synthetic oligonucleotide
  Target: SCNA; (-) strand; PAM type: NRG; PAM sequence: AAG
agggaggattggtagtgata

SEQ ID NO: 26515 - DNA, 20 bp, Artificial Sequence
  Description of Artificial Sequence: Synthetic oligonucleotide
  Target: SCNA; (-) strand; PAM type: NRG; PAM sequence: TAG
aaaaaaagagggaggattgg

SEQ ID NO: 26516 - DNA, 20 bp, Artificial Sequence
  Description of Artificial Sequence: Synthetic oligonucleotide
  Target: SCNA; (-) strand; PAM type: NRG; PAM sequence: TGG
aaaaaaaaaagagggaggat

SEQ ID NO: 26517 - DNA, 20 bp, Artificial Sequence
  Description of Artificial Sequence: Synthetic oligonucleotide
  Target: SCNA; (-) strand; PAM type: NRG; PAM sequence: AGG
aaaaaaaaaaaaaaagaggg

SEQ ID NO: 26518 - DNA, 20 bp, Artificial Sequence
  Description of Artificial Sequence: Synthetic oligonucleotide
  Target: SCNA; (-) strand; PAM type: NRG; PAM sequence: GAG
aaaaaaaaaaaaaaaagagg

SEQ ID NO: 26519 - DNA, 20 bp, Artificial Sequence
  Description of Artificial Sequence: Synthetic oligonucleotide
  Target: SCNA; (-) strand; PAM type: NRG; PAM sequence: GGG
gtaaaaaaaaaaaaaaaaga

SEQ ID NO: 26520 - DNA, 20 bp, Artificial Sequence
  Description of Artificial Sequence: Synthetic oligonucleotide
  Target: SCNA; (-) strand; PAM type: NRG; PAM sequence: AGG
ggtaaaaaaaaaaaaaaaag

SEQ ID NO: 26521 - DNA, 20 bp, Artificial Sequence
  Description of Artificial Sequence: Synthetic oligonucleotide
  Target: SCNA; (-) strand; PAM type: NRG; PAM sequence: GAG
tggtaaaaaaaaaaaaaaaa

SEQ ID NO: 26522 - DNA, 20 bp, Artificial Sequence
  Description of Artificial Sequence: Synthetic oligonucleotide
  Target: SCNA; (-) strand; PAM type: NRG; PAM sequence: AAG
tttggtaaaaaaaaaaaaaa

SEQ ID NO: 26523 - DNA, 20 bp, Artificial Sequence
  Description of Artificial Sequence: Synthetic oligonucleotide
  Target: SCNA; (-) strand; PAM type: NRG; PAM sequence: TGG
atatatataaagcttgaatt

SEQ ID NO: 26524 - DNA, 20 bp, Artificial Sequence
  Description of Artificial Sequence: Synthetic oligonucleotide
  Target: SCNA; (-) strand; PAM type: NRG; PAM sequence: AAG
cagctgaaaagatatatata

SEQ ID NO: 26525 - DNA, 20 bp, Artificial Sequence
  Description of Artificial Sequence: Synthetic oligonucleotide
  Target: SCNA; (-) strand; PAM type: NRG; PAM sequence: AAG
actgaatgtttacagctgaa

SEQ ID NO: 26526 - DNA, 20 bp, Artificial Sequence
  Description of Artificial Sequence: Synthetic oligonucleotide
  Target: SCNA; (-) strand; PAM type: NRG; PAM sequence: CAG
ggatgcatactgaatgttta

SEQ ID NO: 26527 - DNA, 20 bp, Artificial Sequence
  Description of Artificial Sequence: Synthetic oligonucleotide
  Target: SCNA; (-) strand; PAM type: NRG; PAM sequence: TGG
taaacagtccttaaattttg

SEQ ID NO: 26528 - DNA, 20 bp, Artificial Sequence
  Description of Artificial Sequence: Synthetic oligonucleotide
  Target: SCNA; (-) strand; PAM type: NRG; PAM sequence: CAG
atattgtggttatttttaaa

SEQ ID NO: 26529 - DNA, 20 bp, Artificial Sequence
  Description of Artificial Sequence: Synthetic oligonucleotide
  Target: SCNA; (-) strand; PAM type: NRG; PAM sequence: TGG
agaatcatctaatgatattg

SEQ ID NO: 26530 - DNA, 20 bp, Artificial Sequence
  Description of Artificial Sequence: Synthetic oligonucleotide
  Target: SCNA; (-) strand; PAM type: NRG; PAM sequence: AAG
taaattacactgcaatttta

SEQ ID NO: 26531 - DNA, 20 bp, Artificial Sequence
  Description of Artificial Sequence: Synthetic oligonucleotide
  Target: SCNA; (-) strand; PAM type: NRG; PAM sequence: AGG
caacatctgagcatttccct

SEQ ID NO: 26532 - DNA, 20 bp, Artificial Sequence
  Description of Artificial Sequence: Synthetic oligonucleotide
  Target: SCNA; (-) strand; PAM type: NRG; PAM sequence: TAG
acaacatctgagcatttccc

SEQ ID NO: 26533 - DNA, 20 bp, Artificial Sequence
  Description of Artificial Sequence: Synthetic oligonucleotide
  Target: SCNA; (-) strand; PAM type: NRG; PAM sequence: GAG
tttaaagggacacaacatct

SEQ ID NO: 26534 - DNA, 20 bp, Artificial Sequence
  Description of Artificial Sequence: Synthetic oligonucleotide
  Target: SCNA; (-) strand; PAM type: NRG; PAM sequence: GGG
tttttcaaaactgatttaaa

SEQ ID NO: 26535 - DNA, 20 bp, Artificial Sequence
  Description of Artificial Sequence: Synthetic oligonucleotide
  Target: SCNA; (-) strand; PAM type: NRG; PAM sequence: AGG
ctttttcaaaactgatttaa

SEQ ID NO: 26536 - DNA, 20 bp, Artificial Sequence
  Description of Artificial Sequence: Synthetic oligonucleotide
  Target: SCNA; (-) strand; PAM type: NRG; PAM sequence: AAG
gctttttcaaaactgattta

SEQ ID NO: 26537 - DNA, 20 bp, Artificial Sequence
  Description of Artificial Sequence: Synthetic oligonucleotide
  Target: SCNA; (-) strand; PAM type: NRG; PAM sequence: TGG
gtgtgggttacactaatgca

SEQ ID NO: 26538 - DNA, 20 bp, Artificial Sequence
  Description of Artificial Sequence: Synthetic oligonucleotide
  Target: SCNA; (-) strand; PAM type: NRG; PAM sequence: GGG
ctgtgtcttcaaaatagtgt

SEQ ID NO: 26539 - DNA, 20 bp, Artificial Sequence
  Description of Artificial Sequence: Synthetic oligonucleotide
  Target: SCNA; (-) strand; PAM type: NRG; PAM sequence: TGG
cctgtgtcttcaaaatagtg

SEQ ID NO: 26540 - DNA, 20 bp, Artificial Sequence
  Description of Artificial Sequence: Synthetic oligonucleotide
  Target: SCNA; (-) strand; PAM type: NRG; PAM sequence: TAG
aatgtcctgtgtcttcaaaa

SEQ ID NO: 26541 - DNA, 20 bp, Artificial Sequence
  Description of Artificial Sequence: Synthetic oligonucleotide
  Target: SCNA; (-) strand; PAM type: NRG; PAM sequence: TGG
gaaggtacaaggtaactgtc

SEQ ID NO: 26542 - DNA, 20 bp, Artificial Sequence
  Description of Artificial Sequence: Synthetic oligonucleotide
  Target: SCNA; (-) strand; PAM type: NRG; PAM sequence: AGG
aatatgcacatgaaggtaca

SEQ ID NO: 26543 - DNA, 20 bp, Artificial Sequence
  Description of Artificial Sequence: Synthetic oligonucleotide
  Target: SCNA; (-) strand; PAM type: NRG; PAM sequence: AAG
gaatatgcacatgaaggtac

SEQ ID NO: 26544 - DNA, 20 bp, Artificial Sequence
  Description of Artificial Sequence: Synthetic oligonucleotide
  Target: SCNA; (-) strand; PAM type: NRG; PAM sequence: AGG
attctagaatatgcacatga

SEQ ID NO: 26545 - DNA, 20 bp, Artificial Sequence
  Description of Artificial Sequence: Synthetic oligonucleotide
  Target: SCNA; (-) strand; PAM type: NRG; PAM sequence: AAG
cattctagaatatgcacatg

SEQ ID NO: 26546 - DNA, 20 bp, Artificial Sequence
  Description of Artificial Sequence: Synthetic oligonucleotide
  Target: SCNA; (-) strand; PAM type: NRG; PAM sequence: TAG
attagatctttatgacattc

SEQ ID NO: 26547 - DNA, 20 bp, Artificial Sequence
  Description of Artificial Sequence: Synthetic oligonucleotide
  Target: SCNA; (-) strand; PAM type: NRG; PAM sequence: TAG
caaagtttatactacgtgat

SEQ ID NO: 26548 - DNA, 20 bp, Artificial Sequence
  Description of Artificial Sequence: Synthetic oligonucleotide
  Target: SCNA; (-) strand; PAM type: NRG; PAM sequence: AAG
agtcagacaaatataaaaca

SEQ ID NO: 26549 - DNA, 20 bp, Artificial Sequence
  Description of Artificial Sequence: Synthetic oligonucleotide
  Target: SCNA; (-) strand; PAM type: NRG; PAM sequence: CAG
ttatactgagtaaaagaagt

SEQ ID NO: 26550 - DNA, 20 bp, Artificial Sequence
  Description of Artificial Sequence: Synthetic oligonucleotide
  Target: SCNA; (-) strand; PAM type: NRG; PAM sequence: AAG
aatattatactgagtaaaag

SEQ ID NO: 26551 - DNA, 20 bp, Artificial Sequence
  Description of Artificial Sequence: Synthetic oligonucleotide
  Target: SCNA; (-) strand; PAM type: NRG; PAM sequence: AAG
acaaatattatactgagtaa

SEQ ID NO: 26552 - DNA, 20 bp, Artificial Sequence
  Description of Artificial Sequence: Synthetic oligonucleotide
  Target: SCNA; (-) strand; PAM type: NRG; PAM sequence: GAG
aacctcacaaatattatact

SEQ ID NO: 26553 - DNA, 20 bp, Artificial Sequence
  Description of Artificial Sequence: Synthetic oligonucleotide
  Target: SCNA; (-) strand; PAM type: NRG; PAM sequence: AAG
tagtaaaaagaaacaacaaa

SEQ ID NO: 26554 - DNA, 20 bp, Artificial Sequence
  Description of Artificial Sequence: Synthetic oligonucleotide
  Target: SCNA; (-) strand; PAM type: NRG; PAM sequence: AAG
atactattaacagtagtaaa

SEQ ID NO: 26555 - DNA, 20 bp, Artificial Sequence
  Description of Artificial Sequence: Synthetic oligonucleotide
  Target: SCNA; (-) strand; PAM type: NRG; PAM sequence: TAG
aaaacttatactattaacag

SEQ ID NO: 26556 - DNA, 20 bp, Artificial Sequence
  Description of Artificial Sequence: Synthetic oligonucleotide
  Target: SCNA; (-) strand; PAM type: NRG; PAM sequence: CAG
tggaaaacttatactattaa

SEQ ID NO: 26557 - DNA, 20 bp, Artificial Sequence
  Description of Artificial Sequence: Synthetic oligonucleotide
  Target: SCNA; (-) strand; PAM type: NRG; PAM sequence: TGG
ctagttgtaaagaggcacaa

SEQ ID NO: 26558 - DNA, 20 bp, Artificial Sequence
  Description of Artificial Sequence: Synthetic oligonucleotide
  Target: SCNA; (-) strand; PAM type: NRG; PAM sequence: AGG
ttgagatactagttgtaaag

SEQ ID NO: 26559 - DNA, 20 bp, Artificial Sequence
  Description of Artificial Sequence: Synthetic oligonucleotide
  Target: SCNA; (-) strand; PAM type: NRG; PAM sequence: GAG
attgagatactagttgtaaa

SEQ ID NO: 26560 - DNA, 20 bp, Artificial Sequence
  Description of Artificial Sequence: Synthetic oligonucleotide
  Target: SCNA; (-) strand; PAM type: NRG; PAM sequence: AAG
ctattgagatactagttgta

SEQ ID NO: 26561 - DNA, 20 bp, Artificial Sequence
  Description of Artificial Sequence: Synthetic oligonucleotide
  Target: SCNA; (-) strand; PAM type: NRG; PAM sequence: TAG
gtaatactctattgagatac

SEQ ID NO: 26562 - DNA, 20 bp, Artificial Sequence
  Description of Artificial Sequence: Synthetic oligonucleotide
  Target: SCNA; (-) strand; PAM type: NRG; PAM sequence: GAG
aattgttgtaatactctatt

SEQ ID NO: 26563 - DNA, 20 bp, Artificial Sequence
  Description of Artificial Sequence: Synthetic oligonucleotide
  Target: SCNA; (-) strand; PAM type: NRG; PAM sequence: TGG
actaggtctcaaggaggtca

SEQ ID NO: 26564 - DNA, 20 bp, Artificial Sequence
  Description of Artificial Sequence: Synthetic oligonucleotide
  Target: SCNA; (-) strand; PAM type: NRG; PAM sequence: AGG
taaagcactaggtctcaagg

SEQ ID NO: 26565 - DNA, 20 bp, Artificial Sequence
  Description of Artificial Sequence: Synthetic oligonucleotide
  Target: SCNA; (-) strand; PAM type: NRG; PAM sequence: GAG
ttaaagcactaggtctcaag

SEQ ID NO: 26566 - DNA, 20 bp, Artificial Sequence
  Description of Artificial Sequence: Synthetic oligonucleotide
  Target: SCNA; (-) strand; PAM type: NRG; PAM sequence: AGG
acttaaagcactaggtctca

SEQ ID NO: 26567 - DNA, 20 bp, Artificial Sequence
  Description of Artificial Sequence: Synthetic oligonucleotide
  Target: SCNA; (-) strand; PAM type: NRG; PAM sequence: AAG
gacttaaagcactaggtctc

SEQ ID NO: 26568 - DNA, 20 bp, Artificial Sequence
  Description of Artificial Sequence: Synthetic oligonucleotide
  Target: SCNA; (-) strand; PAM type: NRG; PAM sequence: AGG
cctctttgacttaaagcact

SEQ ID NO: 26569 - DNA, 20 bp, Artificial Sequence
  Description of Artificial Sequence: Synthetic oligonucleotide
  Target: SCNA; (-) strand; PAM type: NRG; PAM sequence: TAG
acctctttgacttaaagcac

SEQ ID NO: 26570 - DNA, 20 bp, Artificial Sequence
  Description of Artificial Sequence: Synthetic oligonucleotide
  Target: SCNA; (-) strand; PAM type: NRG; PAM sequence: AAG
ttatttacctctttgactta

SEQ ID NO: 26571 - DNA, 20 bp, Artificial Sequence
  Description of Artificial Sequence: Synthetic oligonucleotide
  Target: SCNA; (-) strand; PAM type: NRG; PAM sequence: GAG
tcacattggtctgttgtaat

SEQ ID NO: 26572 - DNA, 20 bp, Artificial Sequence
  Description of Artificial Sequence: Synthetic oligonucleotide
  Target: SCNA; (-) strand; PAM type: NRG; PAM sequence: TGG
cagaaataattctctcacat

SEQ ID NO: 26573 - DNA, 20 bp, Artificial Sequence
  Description of Artificial Sequence: Synthetic oligonucleotide
  Target: SCNA; (-) strand; PAM type: NRG; PAM sequence: CAG
ttataagaagtgcaactgtc

SEQ ID NO: 26574 - DNA, 20 bp, Artificial Sequence
  Description of Artificial Sequence: Synthetic oligonucleotide
  Target: SCNA; (-) strand; PAM type: NRG; PAM sequence: AAG
tcatgttaaacgtttataag

SEQ ID NO: 26575 - DNA, 20 bp, Artificial Sequence
  Description of Artificial Sequence: Synthetic oligonucleotide
  Target: SCNA; (-) strand; PAM type: NRG; PAM sequence: AAG
gaatcatgttaaacgtttat

SEQ ID NO: 26576 - DNA, 20 bp, Artificial Sequence
  Description of Artificial Sequence: Synthetic oligonucleotide
  Target: SCNA; (-) strand; PAM type: NRG; PAM sequence: TGG
caaattaccaaataaaagtt

SEQ ID NO: 26577 - DNA, 20 bp, Artificial Sequence
  Description of Artificial Sequence: Synthetic oligonucleotide
  Target: SCNA; (-) strand; PAM type: NRG; PAM sequence: AAG
actaacaaattaccaaataa

SEQ ID NO: 26578 - DNA, 20 bp, Artificial Sequence
  Description of Artificial Sequence: Synthetic oligonucleotide
  Target: SCNA; (-) strand; PAM type: NRG; PAM sequence: AGG
gtacattagtcctttgccaa

SEQ ID NO: 26579 - DNA, 20 bp, Artificial Sequence
  Description of Artificial Sequence: Synthetic oligonucleotide
  Target: SCNA; (-) strand; PAM type: NRG; PAM sequence: AAG
agtacattagtcctttgcca

SEQ ID NO: 26580 - DNA, 20 bp, Artificial Sequence
  Description of Artificial Sequence: Synthetic oligonucleotide
  Target: SCNA; (-) strand; PAM type: NRG; PAM sequence: TAG
gactaaataacatagtacat

SEQ ID NO: 26581 - DNA, 20 bp, Artificial Sequence
  Description of Artificial Sequence: Synthetic oligonucleotide
  Target: SCNA; (-) strand; PAM type: NRG; PAM sequence: TAG
cttgttatgactaaataaca

SEQ ID NO: 26582 - DNA, 20 bp, Artificial Sequence
  Description of Artificial Sequence: Synthetic oligonucleotide
  Target: SCNA; (-) strand; PAM type: NRG; PAM sequence: AAG
ctcagtttctctgtctataa

SEQ ID NO: 26583 - DNA, 20 bp, Artificial Sequence
  Description of Artificial Sequence: Synthetic oligonucleotide
  Target: SCNA; (-) strand; PAM type: NRG; PAM sequence: CAG
tcaccaaaactcttggagct

SEQ ID NO: 26584 - DNA, 20 bp, Artificial Sequence
  Description of Artificial Sequence: Synthetic oligonucleotide
  Target: SCNA; (-) strand; PAM type: NRG; PAM sequence: GAG
gcatatcaccaaaactcttg

SEQ ID NO: 26585 - DNA, 20 bp, Artificial Sequence
  Description of Artificial Sequence: Synthetic oligonucleotide
  Target: SCNA; (-) strand; PAM type: NRG; PAM sequence: TGG
cagcatatcaccaaaactct

SEQ ID NO: 26586 - DNA, 20 bp, Artificial Sequence
  Description of Artificial Sequence: Synthetic oligonucleotide
  Target: SCNA; (-) strand; PAM type: NRG; PAM sequence: CAG
ttaaaatagctaggtgatct

SEQ ID NO: 26587 - DNA, 20 bp, Artificial Sequence
  Description of Artificial Sequence: Synthetic oligonucleotide
  Target: SCNA; (-) strand; PAM type: NRG; PAM sequence: AGG
ctctgccacttaaaatagct

SEQ ID NO: 26588 - DNA, 20 bp, Artificial Sequence
  Description of Artificial Sequence: Synthetic oligonucleotide
  Target: SCNA; (-) strand; PAM type: NRG; PAM sequence: TAG
gctctgccacttaaaatagc

SEQ ID NO: 26589 - DNA, 20 bp, Artificial Sequence
  Description of Artificial Sequence: Synthetic oligonucleotide
  Target: SCNA; (-) strand; PAM type: NRG; PAM sequence: TAG
ctcagctctgccacttaaaa

SEQ ID NO: 26590 - DNA, 20 bp, Artificial Sequence
  Description of Artificial Sequence: Synthetic oligonucleotide
  Target: SCNA; (-) strand; PAM type: NRG; PAM sequence: CAG
cagtttctgctaaattgtct

SEQ ID NO: 26591 - DNA, 20 bp, Artificial Sequence
  Description of Artificial Sequence: Synthetic oligonucleotide
  Target: SCNA; (-) strand; PAM type: NRG; PAM sequence: CAG
gacaattgtgccttctgtaa

SEQ ID NO: 26592 - DNA, 20 bp, Artificial Sequence
  Description of Artificial Sequence: Synthetic oligonucleotide
  Target: SCNA; (-) strand; PAM type: NRG; PAM sequence: GAG
gacacaaactgctaattcag

SEQ ID NO: 26593 - DNA, 20 bp, Artificial Sequence
  Description of Artificial Sequence: Synthetic oligonucleotide
  Target: SCNA; (-) strand; PAM type: NRG; PAM sequence: AGG
cagacacaaactgctaattc

SEQ ID NO: 26594 - DNA, 20 bp, Artificial Sequence
  Description of Artificial Sequence: Synthetic oligonucleotide
  Target: SCNA; (-) strand; PAM type: NRG; PAM sequence: CAG
tcagacacaaactgctaatt

SEQ ID NO: 26595 - DNA, 20 bp, Artificial Sequence
  Description of Artificial Sequence: Synthetic oligonucleotide
  Target: SCNA; (-) strand; PAM type: NRG; PAM sequence: CAG
acacccaatctgtgaggctt

SEQ ID NO: 26596 - DNA, 20 bp, Artificial Sequence
  Description of Artificial Sequence: Synthetic oligonucleotide
  Target: SCNA; (-) strand; PAM type: NRG; PAM sequence: AGG
tttaccacacccaatctgtg

SEQ ID NO: 26597 - DNA, 20 bp, Artificial Sequence
  Description of Artificial Sequence: Synthetic oligonucleotide
  Target: SCNA; (-) strand; PAM type: NRG; PAM sequence: GAG
ctttaccacacccaatctgt

SEQ ID NO: 26598 - DNA, 20 bp, Artificial Sequence
  Description of Artificial Sequence: Synthetic oligonucleotide
  Target: SCNA; (-) strand; PAM type: NRG; PAM sequence: GGG
aggctatttctaacacagct

SEQ ID NO: 26599 - DNA, 20 bp, Artificial Sequence
  Description of Artificial Sequence: Synthetic oligonucleotide
  Target: SCNA; (-) strand; PAM type: NRG; PAM sequence: TGG
aaggctatttctaacacagc

SEQ ID NO: 26600 - DNA, 20 bp, Artificial Sequence
  Description of Artificial Sequence: Synthetic oligonucleotide
  Target: SCNA; (-) strand; PAM type: NRG; PAM sequence: CAG
tttgaaggctatttctaaca

SEQ ID NO: 26601 - DNA, 20 bp, Artificial Sequence
  Description of Artificial Sequence: Synthetic oligonucleotide
  Target: SCNA; (-) strand; PAM type: NRG; PAM sequence: AGG
attgtcacatccaaatttga

SEQ ID NO: 26602 - DNA, 20 bp, Artificial Sequence
  Description of Artificial Sequence: Synthetic oligonucleotide
  Target: SCNA; (-) strand; PAM type: NRG; PAM sequence: AAG
cattgtcacatccaaatttg

SEQ ID NO: 26603 - DNA, 20 bp, Artificial Sequence
  Description of Artificial Sequence: Synthetic oligonucleotide
  Target: SCNA; (-) strand; PAM type: NRG; PAM sequence: AAG
gaactgtttcataataacat

SEQ ID NO: 26604 - DNA, 20 bp, Artificial Sequence
  Description of Artificial Sequence: Synthetic oligonucleotide
  Target: SCNA; (-) strand; PAM type: NRG; PAM sequence: AGG
gaggaataccaatatagaaa

SEQ ID NO: 26605 - DNA, 20 bp, Artificial Sequence
  Description of Artificial Sequence: Synthetic oligonucleotide
  Target: SCNA; (-) strand; PAM type: NRG; PAM sequence: AAG
tgaggaataccaatatagaa

SEQ ID NO: 26606 - DNA, 20 bp, Artificial Sequence
  Description of Artificial Sequence: Synthetic oligonucleotide
  Target: SCNA; (-) strand; PAM type: NRG; PAM sequence: TAG
cctattgaggaataccaata

SEQ ID NO: 26607 - DNA, 20 bp, Artificial Sequence
  Description of Artificial Sequence: Synthetic oligonucleotide
  Target: SCNA; (-) strand; PAM type: NRG; PAM sequence: AGG
gaaatcatctccccctattg

SEQ ID NO: 26608 - DNA, 20 bp, Artificial Sequence
  Description of Artificial Sequence: Synthetic oligonucleotide
  Target: SCNA; (-) strand; PAM type: NRG; PAM sequence: GAG
agaaatcatctccccctatt

SEQ ID NO: 26609 - DNA, 20 bp, Artificial Sequence
  Description of Artificial Sequence: Synthetic oligonucleotide
  Target: SCNA; (-) strand; PAM type: NRG; PAM sequence: AAG
tttctttttttgtaggtagt

SEQ ID NO: 26610 - DNA, 20 bp, Artificial Sequence
  Description of Artificial Sequence: Synthetic oligonucleotide
  Target: SCNA; (-) strand; PAM type: NRG; PAM sequence: TAG
cagttttctttttttgtagg

SEQ ID NO: 26611 - DNA, 20 bp, Artificial Sequence
  Description of Artificial Sequence: Synthetic oligonucleotide
  Target: SCNA; (-) strand; PAM type: NRG; PAM sequence: AGG
ttacagttttctttttttgt

SEQ ID NO: 26612 - DNA, 20 bp, Artificial Sequence
  Description of Artificial Sequence: Synthetic oligonucleotide
  Target: SCNA; (-) strand; PAM type: NRG; PAM sequence: TAG
tttacagttttctttttttg

SEQ ID NO: 26613 - DNA, 20 bp, Artificial Sequence
  Description of Artificial Sequence: Synthetic oligonucleotide
  Target: SCNA; (-) strand; PAM type: NRG; PAM sequence: CAG
atgacaacgaaattagttta

SEQ ID NO: 26614 - DNA, 20 bp, Artificial Sequence
  Description of Artificial Sequence: Synthetic oligonucleotide
  Target: SCNA; (-) strand; PAM type: NRG; PAM sequence: TAG
attcaaaatgacaacgaaat

SEQ ID NO: 26615 - DNA, 20 bp, Artificial Sequence
  Description of Artificial Sequence: Synthetic oligonucleotide
  Target: SCNA; (-) strand; PAM type: NRG; PAM sequence: TAG
agtgacaagagttaaacata

SEQ ID NO: 26616 - DNA, 20 bp, Artificial Sequence
  Description of Artificial Sequence: Synthetic oligonucleotide
  Target: SCNA; (-) strand; PAM type: NRG; PAM sequence: GAG
ggcattttaaggagtgacaa

SEQ ID NO: 26617 - DNA, 20 bp, Artificial Sequence
  Description of Artificial Sequence: Synthetic oligonucleotide
  Target: SCNA; (-) strand; PAM type: NRG; PAM sequence: AAG
aaggcattttaaggagtgac

SEQ ID NO: 26618 - DNA, 20 bp, Artificial Sequence
  Description of Artificial Sequence: Synthetic oligonucleotide
  Target: SCNA; (-) strand; PAM type: NRG; PAM sequence: GAG
tgtgttcaaggcattttaag

SEQ ID NO: 26619 - DNA, 20 bp, Artificial Sequence
  Description of Artificial Sequence: Synthetic oligonucleotide
  Target: SCNA; (-) strand; PAM type: NRG; PAM sequence: AGG
actgtgttcaaggcatttta

SEQ ID NO: 26620 - DNA, 20 bp, Artificial Sequence
  Description of Artificial Sequence: Synthetic oligonucleotide
  Target: SCNA; (-) strand; PAM type: NRG; PAM sequence: AAG
tactgtgttcaaggcatttt

SEQ ID NO: 26621 - DNA, 20 bp, Artificial Sequence
  Description of Artificial Sequence: Synthetic oligonucleotide
  Target: SCNA; (-) strand; PAM type: NRG; PAM sequence: AGG
ttggatgtttactgtgttca

SEQ ID NO: 26622 - DNA, 20 bp, Artificial Sequence
  Description of Artificial Sequence: Synthetic oligonucleotide
  Target: SCNA; (-) strand; PAM type: NRG; PAM sequence: AAG
attggatgtttactgtgttc

SEQ ID NO: 26623 - DNA, 20 bp, Artificial Sequence
  Description of Artificial Sequence: Synthetic oligonucleotide
  Target: SCNA; (-) strand; PAM type: NRG; PAM sequence: TGG
atgtgtaattaaaagttcat

SEQ ID NO: 26624 - DNA, 20 bp, Artificial Sequence
  Description of Artificial Sequence: Synthetic oligonucleotide
  Target: SCNA; (-) strand; PAM type: NRG; PAM sequence: AAG
tcaatattatgtgtaattaa

SEQ ID NO: 26625 - DNA, 20 bp, Artificial Sequence
  Description of Artificial Sequence: Synthetic oligonucleotide
  Target: SCNA; (-) strand; PAM type: NRG; PAM sequence: TAG
cctccttaagaatacagacc

SEQ ID NO: 26626 - DNA, 20 bp, Artificial Sequence
  Description of Artificial Sequence: Synthetic oligonucleotide
  Target: SCNA; (-) strand; PAM type: NRG; PAM sequence: CAG
gctttccctccttaagaata

SEQ ID NO: 26627 - DNA, 20 bp, Artificial Sequence
  Description of Artificial Sequence: Synthetic oligonucleotide
  Target: SCNA; (-) strand; PAM type: NRG; PAM sequence: AAG
ttgagcagctttccctcctt

SEQ ID NO: 26628 - DNA, 20 bp, Artificial Sequence
  Description of Artificial Sequence: Synthetic oligonucleotide
  Target: SCNA; (-) strand; PAM type: NRG; PAM sequence: CAG
ttcccttctttgtacttgag

SEQ ID NO: 26629 - DNA, 20 bp, Artificial Sequence
  Description of Artificial Sequence: Synthetic oligonucleotide
  Target: SCNA; (-) strand; PAM type: NRG; PAM sequence: GAG
tagttcccttctttgtactt

SEQ ID NO: 26630 - DNA, 20 bp, Artificial Sequence
  Description of Artificial Sequence: Synthetic oligonucleotide
  Target: SCNA; (-) strand; PAM type: NRG; PAM sequence: TAG
aaaaactttattttaacttc

SEQ ID NO: 26631 - DNA, 20 bp, Artificial Sequence
  Description of Artificial Sequence: Synthetic oligonucleotide
  Target: SCNA; (-) strand; PAM type: NRG; PAM sequence: AAG
tgctgtccatcaataatgaa

SEQ ID NO: 26632 - DNA, 20 bp, Artificial Sequence
  Description of Artificial Sequence: Synthetic oligonucleotide
  Target: SCNA; (-) strand; PAM type: NRG; PAM sequence: AAG
gagaggctaaagatttactg

SEQ ID NO: 26633 - DNA, 20 bp, Artificial Sequence
  Description of Artificial Sequence: Synthetic oligonucleotide
  Target: SCNA; (-) strand; PAM type: NRG; PAM sequence: AAG
cgttatattcagagaggcta

SEQ ID NO: 26634 - DNA, 20 bp, Artificial Sequence
  Description of Artificial Sequence: Synthetic oligonucleotide
  Target: SCNA; (-) strand; PAM type: NRG; PAM sequence: AGG
gtttaacgttatattcagag

SEQ ID NO: 26635 - DNA, 20 bp, Artificial Sequence
  Description of Artificial Sequence: Synthetic oligonucleotide
  Target: SCNA; (-) strand; PAM type: NRG; PAM sequence: GAG
agtttaacgttatattcaga

SEQ ID NO: 26636 - DNA, 20 bp, Artificial Sequence
  Description of Artificial Sequence: Synthetic oligonucleotide
  Target: SCNA; (-) strand; PAM type: NRG; PAM sequence: GAG
ttagtttaacgttatattca

SEQ ID NO: 26637 - DNA, 20 bp, Artificial Sequence
  Description of Artificial Sequence: Synthetic oligonucleotide
  Target: SCNA; (-) strand; PAM type: NRG; PAM sequence: CAG
aattagtttaacgttatatt

SEQ ID NO: 26638 - DNA, 20 bp, Artificial Sequence
  Description of Artificial Sequence: Synthetic oligonucleotide
  Target: SCNA; (-) strand; PAM type: NRG; PAM sequence: TAG
tgaggtacaagccattcaat

SEQ ID NO: 26639 - DNA, 20 bp, Artificial Sequence
  Description of Artificial Sequence: Synthetic oligonucleotide
  Target: SCNA; (-) strand; PAM type: NRG; PAM sequence: AAG
tcatatttcttatgaggtac

SEQ ID NO: 26640 - DNA, 20 bp, Artificial Sequence
  Description of Artificial Sequence: Synthetic oligonucleotide
  Target: SCNA; (-) strand; PAM type: NRG; PAM sequence: AGG
ataacttcatatttcttatg

SEQ ID NO: 26641 - DNA, 20 bp, Artificial Sequence
  Description of Artificial Sequence: Synthetic oligonucleotide
  Target: SCNA; (-) strand; PAM type: NRG; PAM sequence: GAG
cataacttcatatttcttat

SEQ ID NO: 26642 - DNA, 20 bp, Artificial Sequence
  Description of Artificial Sequence: Synthetic oligonucleotide
  Target: SCNA; (-) strand; PAM type: NRG; PAM sequence: TAG
tatgaacagaatatgcatgt

SEQ ID NO: 26643 - DNA, 20 bp, Artificial Sequence
  Description of Artificial Sequence: Synthetic oligonucleotide
  Target: SCNA; (-) strand; PAM type: NRG; PAM sequence: CAG
atgaatattgtagttatgaa

SEQ ID NO: 26644 - DNA, 20 bp, Artificial Sequence
  Description of Artificial Sequence: Synthetic oligonucleotide
  Target: SCNA; (-) strand; PAM type: NRG; PAM sequence: TAG
aaaacaaaacatgaatattg

SEQ ID NO: 26645 - DNA, 20 bp, Artificial Sequence
  Description of Artificial Sequence: Synthetic oligonucleotide
  Target: SCNA; (-) strand; PAM type: NRG; PAM sequence: GAG
tttatatttcacttagcaaa

SEQ ID NO: 26646 - DNA, 20 bp, Artificial Sequence
  Description of Artificial Sequence: Synthetic oligonucleotide
  Target: SCNA; (-) strand; PAM type: NRG; PAM sequence: AAG
tatttatatttcacttagca

SEQ ID NO: 26647 - DNA, 20 bp, Artificial Sequence
  Description of Artificial Sequence: Synthetic oligonucleotide
  Target: SCNA; (-) strand; PAM type: NRG; PAM sequence: TAG
taaaatatttatatttcact

SEQ ID NO: 26648 - DNA, 20 bp, Artificial Sequence
  Description of Artificial Sequence: Synthetic oligonucleotide
  Target: SCNA; (-) strand; PAM type: NRG; PAM sequence: TGG
aaaagaatcctattatggtc

SEQ ID NO: 26649 - DNA, 20 bp, Artificial Sequence
  Description of Artificial Sequence: Synthetic oligonucleotide
  Target: SCNA; (-) strand; PAM type: NRG; PAM sequence: TGG
cagataaaagaatcctatta

SEQ ID NO: 26650 - DNA, 20 bp, Artificial Sequence
  Description of Artificial Sequence: Synthetic oligonucleotide
  Target: SCNA; (-) strand; PAM type: NRG; PAM sequence: AAG
aatgaattaaatccagataa

SEQ ID NO: 26651 - DNA, 20 bp, Artificial Sequence
  Description of Artificial Sequence: Synthetic oligonucleotide
  Target: SCNA; (-) strand; PAM type: NRG; PAM sequence: CAG
caaaattaatgaattaaatc

SEQ ID NO: 26652 - DNA, 20 bp, Artificial Sequence
  Description of Artificial Sequence: Synthetic oligonucleotide
  Target: SCNA; (-) strand; PAM type: NRG; PAM sequence: TAG
tttcatagaatgttaatcta

SEQ ID NO: 26653 - DNA, 20 bp, Artificial Sequence
  Description of Artificial Sequence: Synthetic oligonucleotide
  Target: SCNA; (-) strand; PAM type: NRG; PAM sequence: TAG
taggttaagcatatatttca

SEQ ID NO: 26654 - DNA, 20 bp, Artificial Sequence
  Description of Artificial Sequence: Synthetic oligonucleotide
  Target: SCNA; (-) strand; PAM type: NRG; PAM sequence: AAG
gggtaaacaaagtctaggtt

SEQ ID NO: 26655 - DNA, 20 bp, Artificial Sequence
  Description of Artificial Sequence: Synthetic oligonucleotide
  Target: SCNA; (-) strand; PAM type: NRG; PAM sequence: AGG
tatgggggtaaacaaagtct

SEQ ID NO: 26656 - DNA, 20 bp, Artificial Sequence
  Description of Artificial Sequence: Synthetic oligonucleotide
  Target: SCNA; (-) strand; PAM type: NRG; PAM sequence: TAG
ctatgggggtaaacaaagtc

SEQ ID NO: 26657 - DNA, 20 bp, Artificial Sequence
  Description of Artificial Sequence: Synthetic oligonucleotide
  Target: SCNA; (-) strand; PAM type: NRG; PAM sequence: AAG
ttgttctatgggggtaaaca

SEQ ID NO: 26658 - DNA, 20 bp, Artificial Sequence
  Description of Artificial Sequence: Synthetic oligonucleotide
  Target: SCNA; (-) strand; PAM type: NRG; PAM sequence: GGG
aaaattcagttgttctatgg

SEQ ID NO: 26659 - DNA, 20 bp, Artificial Sequence
  Description of Artificial Sequence: Synthetic oligonucleotide
  Target: SCNA; (-) strand; PAM type: NRG; PAM sequence: GGG
aaaaattcagttgttctatg

SEQ ID NO: 26660 - DNA, 20 bp, Artificial Sequence
  Description of Artificial Sequence: Synthetic oligonucleotide
  Target: SCNA; (-) strand; PAM type: NRG; PAM sequence: GGG
taaaaattcagttgttctat

SEQ ID NO: 26661 - DNA, 20 bp, Artificial Sequence
  Description of Artificial Sequence: Synthetic oligonucleotide
  Target: SCNA; (-) strand; PAM type: NRG; PAM sequence: TGG
ctaaaaattcagttgttcta

SEQ ID NO: 26662 - DNA, 20 bp, Artificial Sequence
  Description of Artificial Sequence: Synthetic oligonucleotide
  Target: SCNA; (-) strand; PAM type: NRG; PAM sequence: CAG
acataccatacctaaaaatt

SEQ ID NO: 26663 - DNA, 20 bp, Artificial Sequence
  Description of Artificial Sequence: Synthetic oligonucleotide
  Target: SCNA; (-) strand; PAM type: NRG; PAM sequence: AAG
tgctgtctttgctatagcac

SEQ ID NO: 26664 - DNA, 20 bp, Artificial Sequence
  Description of Artificial Sequence: Synthetic oligonucleotide
  Target: SCNA; (-) strand; PAM type: NRG; PAM sequence: TAG
ctactctgctgtctttgcta

SEQ ID NO: 26665 - DNA, 20 bp, Artificial Sequence
  Description of Artificial Sequence: Synthetic oligonucleotide
  Target: SCNA; (-) strand; PAM type: NRG; PAM sequence: CAG
tttaatcaattgttaatggg

SEQ ID NO: 26666 - DNA, 20 bp, Artificial Sequence
  Description of Artificial Sequence: Synthetic oligonucleotide
  Target: SCNA; (-) strand; PAM type: NRG; PAM sequence: GGG
ctctttaatcaattgttaat

SEQ ID NO: 26667 - DNA, 20 bp, Artificial Sequence
  Description of Artificial Sequence: Synthetic oligonucleotide
  Target: SCNA; (-) strand; PAM type: NRG; PAM sequence: TGG
tctctttaatcaattgttaa

SEQ ID NO: 26668 - DNA, 20 bp, Artificial Sequence
  Description of Artificial Sequence: Synthetic oligonucleotide
  Target: SCNA; (-) strand; PAM type: NRG; PAM sequence: CAG
ttaacttaaacacattaaat

SEQ ID NO: 26669 - DNA, 20 bp, Artificial Sequence
  Description of Artificial Sequence: Synthetic oligonucleotide
  Target: SCNA; (-) strand; PAM type: NRG; PAM sequence: AAG
caaatacggaatattatcca

SEQ ID NO: 26670 - DNA, 20 bp, Artificial Sequence
  Description of Artificial Sequence: Synthetic oligonucleotide
  Target: SCNA; (-) strand; PAM type: NRG; PAM sequence: CGG
ccttgtgttcacaacaaata

SEQ ID NO: 26671 - DNA, 20 bp, Artificial Sequence
  Description of Artificial Sequence: Synthetic oligonucleotide
  Target: SCNA; (-) strand; PAM type: NRG; PAM sequence: CAG
gaataagaagcaggtggctc

SEQ ID NO: 26672 - DNA, 20 bp, Artificial Sequence
  Description of Artificial Sequence: Synthetic oligonucleotide
  Target: SCNA; (-) strand; PAM type: NRG; PAM sequence: TGG
gatagagaataagaagcagg

SEQ ID NO: 26673 - DNA, 20 bp, Artificial Sequence
  Description of Artificial Sequence: Synthetic oligonucleotide
  Target: SCNA; (-) strand; PAM type: NRG; PAM sequence: AGG
gcagatagagaataagaagc

SEQ ID NO: 26674 - DNA, 20 bp, Artificial Sequence
  Description of Artificial Sequence: Synthetic oligonucleotide
  Target: SCNA; (-) strand; PAM type: NRG; PAM sequence: CAG
tgcagatagagaataagaag

SEQ ID NO: 26675 - DNA, 20 bp, Artificial Sequence
  Description of Artificial Sequence: Synthetic oligonucleotide
  Target: SCNA; (-) strand; PAM type: NRG; PAM sequence: AAG
aggtgcagatagagaataag

SEQ ID NO: 26676 - DNA, 20 bp, Artificial Sequence
  Description of Artificial Sequence: Synthetic oligonucleotide
  Target: SCNA; (-) strand; PAM type: NRG; PAM sequence: AAG
ggaaggtgcagatagagaat

SEQ ID NO: 26677 - DNA, 20 bp, Artificial Sequence
  Description of Artificial Sequence: Synthetic oligonucleotide
  Target: SCNA; (-) strand; PAM type: NRG; PAM sequence: GAG
gtgagaggaaggtgcagata

SEQ ID NO: 26678 - DNA, 20 bp, Artificial Sequence
  Description of Artificial Sequence: Synthetic oligonucleotide
  Target: SCNA; (-) strand; PAM type: NRG; PAM sequence: TAG
aggtgagaggaaggtgcaga

SEQ ID NO: 26679 - DNA, 20 bp, Artificial Sequence
  Description of Artificial Sequence: Synthetic oligonucleotide
  Target: SCNA; (-) strand; PAM type: NRG; PAM sequence: CAG
cagaaggtgagaggaaggtg

SEQ ID NO: 26680 - DNA, 20 bp, Artificial Sequence
  Description of Artificial Sequence: Synthetic oligonucleotide
  Target: SCNA; (-) strand; PAM type: NRG; PAM sequence: AGG
gtttacagaaggtgagagga

SEQ ID NO: 26681 - DNA, 20 bp, Artificial Sequence
  Description of Artificial Sequence: Synthetic oligonucleotide
  Target: SCNA; (-) strand; PAM type: NRG; PAM sequence: AAG
ggtttacagaaggtgagagg

SEQ ID NO: 26682 - DNA, 20 bp, Artificial Sequence
  Description of Artificial Sequence: Synthetic oligonucleotide
  Target: SCNA; (-) strand; PAM type: NRG; PAM sequence: AGG
acaggtttacagaaggtgag

SEQ ID NO: 26683 - DNA, 20 bp, Artificial Sequence
  Description of Artificial Sequence: Synthetic oligonucleotide
  Target: SCNA; (-) strand; PAM type: NRG; PAM sequence: GAG
cacaggtttacagaaggtga

SEQ ID NO: 26684 - DNA, 20 bp, Artificial Sequence
  Description of Artificial Sequence: Synthetic oligonucleotide
  Target: SCNA; (-) strand; PAM type: NRG; PAM sequence: GAG
ctcacaggtttacagaaggt

SEQ ID NO: 26685 - DNA, 20 bp, Artificial Sequence
  Description of Artificial Sequence: Synthetic oligonucleotide
  Target: SCNA; (-) strand; PAM type: NRG; PAM sequence: AGG
ctctctcacaggtttacaga

SEQ ID NO: 26686 - DNA, 20 bp, Artificial Sequence
  Description of Artificial Sequence: Synthetic oligonucleotide
  Target: SCNA; (-) strand; PAM type: NRG; PAM sequence: AAG
tctctctcacaggtttacag

SEQ ID NO: 26687 - DNA, 20 bp, Artificial Sequence
  Description of Artificial Sequence: Synthetic oligonucleotide
  Target: SCNA; (-) strand; PAM type: NRG; PAM sequence: CAG
tcgtctctctcacaggttta

SEQ ID NO: 26688 - DNA, 20 bp, Artificial Sequence
  Description of Artificial Sequence: Synthetic oligonucleotide
  Target: SCNA; (-) strand; PAM type: NRG; PAM sequence: AGG
cactacctcgtctctctcac

SEQ ID NO: 26689 - DNA, 20 bp, Artificial Sequence
  Description of Artificial Sequence: Synthetic oligonucleotide
  Target: SCNA; (-) strand; PAM type: NRG; PAM sequence: CAG
tcactacctcgtctctctca

SEQ ID NO: 26690 - DNA, 20 bp, Artificial Sequence
  Description of Artificial Sequence: Synthetic oligonucleotide
  Target: SCNA; (-) strand; PAM type: NRG; PAM sequence: AAG
ccactatgaaattacacaag

SEQ ID NO: 26691 - DNA, 20 bp, Artificial Sequence
  Description of Artificial Sequence: Synthetic oligonucleotide
  Target: SCNA; (-) strand; PAM type: NRG; PAM sequence: AAG
tacccactatgaaattacac

SEQ ID NO: 26692 - DNA, 20 bp, Artificial Sequence
  Description of Artificial Sequence: Synthetic oligonucleotide
  Target: SCNA; (-) strand; PAM type: NRG; PAM sequence: AGG
atctcccaacagtatgcatt

SEQ ID NO: 26693 - DNA, 20 bp, Artificial Sequence
  Description of Artificial Sequence: Synthetic oligonucleotide
  Target: SCNA; (-) strand; PAM type: NRG; PAM sequence: TAG
gatctcccaacagtatgcat

SEQ ID NO: 26694 - DNA, 20 bp, Artificial Sequence
  Description of Artificial Sequence: Synthetic oligonucleotide
  Target: SCNA; (-) strand; PAM type: NRG; PAM sequence: CAG
catacataatgatctcccaa

SEQ ID NO: 26695 - DNA, 20 bp, Artificial Sequence
  Description of Artificial Sequence: Synthetic oligonucleotide
  Target: SCNA; (-) strand; PAM type: NRG; PAM sequence: GAG
ttgctcttcccatttcttca

SEQ ID NO: 26696 - DNA, 20 bp, Artificial Sequence
  Description of Artificial Sequence: Synthetic oligonucleotide
  Target: SCNA; (-) strand; PAM type: NRG; PAM sequence: CAG
gattgctcttcccatttctt

SEQ ID NO: 26697 - DNA, 20 bp, Artificial Sequence
  Description of Artificial Sequence: Synthetic oligonucleotide
  Target: SCNA; (-) strand; PAM type: NRG; PAM sequence: GAG
ttggccatggggtcaaatta

SEQ ID NO: 26698 - DNA, 20 bp, Artificial Sequence
  Description of Artificial Sequence: Synthetic oligonucleotide
  Target: SCNA; (-) strand; PAM type: NRG; PAM sequence: TAG
agttggccatggggtcaaat

SEQ ID NO: 26699 - DNA, 20 bp, Artificial Sequence
  Description of Artificial Sequence: Synthetic oligonucleotide
  Target: SCNA; (-) strand; PAM type: NRG; PAM sequence: GGG
acaatatgaagttggccatg

SEQ ID NO: 26700 - DNA, 20 bp, Artificial Sequence
  Description of Artificial Sequence: Synthetic oligonucleotide
  Target: SCNA; (-) strand; PAM type: NRG; PAM sequence: GGG
aacaatatgaagttggccat

SEQ ID NO: 26701 - DNA, 20 bp, Artificial Sequence
  Description of Artificial Sequence: Synthetic oligonucleotide
  Target: SCNA; (-) strand; PAM type: NRG; PAM sequence: TGG
aaacaatatgaagttggcca

SEQ ID NO: 26702 - DNA, 20 bp, Artificial Sequence
  Description of Artificial Sequence: Synthetic oligonucleotide
  Target: SCNA; (-) strand; PAM type: NRG; PAM sequence: TGG
tagtggaaacaatatgaagt

SEQ ID NO: 26703 - DNA, 20 bp, Artificial Sequence
  Description of Artificial Sequence: Synthetic oligonucleotide
  Target: SCNA; (-) strand; PAM type: NRG; PAM sequence: AAG
tatctagtggaaacaatatg

SEQ ID NO: 26704 - DNA, 20 bp, Artificial Sequence
  Description of Artificial Sequence: Synthetic oligonucleotide
  Target: SCNA; (-) strand; PAM type: NRG; PAM sequence: TGG
atatttaaaatgatatctag

SEQ ID NO: 26705 - DNA, 20 bp, Artificial Sequence
  Description of Artificial Sequence: Synthetic oligonucleotide
  Target: SCNA; (-) strand; PAM type: NRG; PAM sequence: TAG
ggaatatttaaaatgatatc

SEQ ID NO: 26706 - DNA, 20 bp, Artificial Sequence
  Description of Artificial Sequence: Synthetic oligonucleotide
  Target: SCNA; (-) strand; PAM type: NRG; PAM sequence: AGG
tcttaggaccacgaaaccac

SEQ ID NO: 26707 - DNA, 20 bp, Artificial Sequence
  Description of Artificial Sequence: Synthetic oligonucleotide
  Target: SCNA; (-) strand; PAM type: NRG; PAM sequence: CAG
ttcttaggaccacgaaacca

SEQ ID NO: 26708 - DNA, 20 bp, Artificial Sequence
  Description of Artificial Sequence: Synthetic oligonucleotide
  Target: SCNA; (-) strand; PAM type: NRG; PAM sequence: AGG
ttgcatgccttcatattctt

SEQ ID NO: 26709 - DNA, 20 bp, Artificial Sequence
  Description of Artificial Sequence: Synthetic oligonucleotide
  Target: SCNA; (-) strand; PAM type: NRG; PAM sequence: TAG
cttgcatgccttcatattct

SEQ ID NO: 26710 - DNA, 20 bp, Artificial Sequence
  Description of Artificial Sequence: Synthetic oligonucleotide
  Target: SCNA; (-) strand; PAM type: NRG; PAM sequence: TGG
ggctttaacatctttaatct

SEQ ID NO: 26711 - DNA, 20 bp, Artificial Sequence
  Description of Artificial Sequence: Synthetic oligonucleotide
  Target: SCNA; (-) strand; PAM type: NRG; PAM sequence: TGG
atttaaatatcttttctatc

SEQ ID NO: 26712 - DNA, 20 bp, Artificial Sequence
  Description of Artificial Sequence: Synthetic oligonucleotide
  Target: SCNA; (-) strand; PAM type: NRG; PAM sequence: TAG
ctaaagtcatttgaacttgt

SEQ ID NO: 26713 - DNA, 20 bp, Artificial Sequence
  Description of Artificial Sequence: Synthetic oligonucleotide
  Target: SCNA; (-) strand; PAM type: NRG; PAM sequence: AAG
tttttttctttctaaaacta

SEQ ID NO: 26714 - DNA, 20 bp, Artificial Sequence
  Description of Artificial Sequence: Synthetic oligonucleotide
  Target: SCNA; (-) strand; PAM type: NRG; PAM sequence: GGG
cagagttgcgtgtatttctt

SEQ ID NO: 26715 - DNA, 20 bp, Artificial Sequence
  Description of Artificial Sequence: Synthetic oligonucleotide
  Target: SCNA; (-) strand; PAM type: NRG; PAM sequence: TGG
gcagagttgcgtgtatttct

SEQ ID NO: 26716 - DNA, 20 bp, Artificial Sequence
  Description of Artificial Sequence: Synthetic oligonucleotide
  Target: SCNA; (-) strand; PAM type: NRG; PAM sequence: GAG
tcatgctcaccagagttgca

SEQ ID NO: 26717 - DNA, 20 bp, Artificial Sequence
  Description of Artificial Sequence: Synthetic oligonucleotide
  Target: SCNA; (-) strand; PAM type: NRG; PAM sequence: CAG
tatcatgctcaccagagttg

SEQ ID NO: 26718 - DNA, 20 bp, Artificial Sequence
  Description of Artificial Sequence: Synthetic oligonucleotide
  Target: SCNA; (-) strand; PAM type: NRG; PAM sequence: GAG
gaagtctatcatgctcacca

SEQ ID NO: 26719 - DNA, 20 bp, Artificial Sequence
  Description of Artificial Sequence: Synthetic oligonucleotide
  Target: SCNA; (-) strand; PAM type: NRG; PAM sequence: CAG
tagaagtctatcatgctcac

SEQ ID NO: 26720 - DNA, 20 bp, Artificial Sequence
  Description of Artificial Sequence: Synthetic oligonucleotide
  Target: SCNA; (-) strand; PAM type: NRG; PAM sequence: AAG
tctagtacatttactcttag

SEQ ID NO: 26721 - DNA, 20 bp, Artificial Sequence
  Description of Artificial Sequence: Synthetic oligonucleotide
  Target: SCNA; (-) strand; PAM type: NRG; PAM sequence: TAG
gtatctagtacatttactct

SEQ ID NO: 26722 - DNA, 20 bp, Artificial Sequence
  Description of Artificial Sequence: Synthetic oligonucleotide
  Target: SCNA; (-) strand; PAM type: NRG; PAM sequence: TAG
ccctgaatttaggttgtatc

SEQ ID NO: 26723 - DNA, 20 bp, Artificial Sequence
  Description of Artificial Sequence: Synthetic oligonucleotide
  Target: SCNA; (-) strand; PAM type: NRG; PAM sequence: AGG
tttaataagtccctgaattt

SEQ ID NO: 26724 - DNA, 20 bp, Artificial Sequence
  Description of Artificial Sequence: Synthetic oligonucleotide
  Target: SCNA; (-) strand; PAM type: NRG; PAM sequence: TAG
ctttaataagtccctgaatt

SEQ ID NO: 26725 - DNA, 20 bp, Artificial Sequence
  Description of Artificial Sequence: Synthetic oligonucleotide
  Target: SCNA; (-) strand; PAM type: NRG; PAM sequence: AAG
atgagtagtagagctttaat

SEQ ID NO: 26726 - DNA, 20 bp, Artificial Sequence
  Description of Artificial Sequence: Synthetic oligonucleotide
  Target: SCNA; (-) strand; PAM type: NRG; PAM sequence: GAG
gtcactagtaatgagtagta

SEQ ID NO: 26727 - DNA, 20 bp, Artificial Sequence
  Description of Artificial Sequence: Synthetic oligonucleotide
  Target: SCNA; (-) strand; PAM type: NRG; PAM sequence: TAG
gagtcactagtaatgagtag

SEQ ID NO: 26728 - DNA, 20 bp, Artificial Sequence
  Description of Artificial Sequence: Synthetic oligonucleotide
  Target: SCNA; (-) strand; PAM type: NRG; PAM sequence: TAG
tctgagtcactagtaatgag

SEQ ID NO: 26729 - DNA, 20 bp, Artificial Sequence
  Description of Artificial Sequence: Synthetic oligonucleotide
  Target: SCNA; (-) strand; PAM type: NRG; PAM sequence: GAG
tgctctgagtcactagtaat

SEQ ID NO: 26730 - DNA, 20 bp, Artificial Sequence
  Description of Artificial Sequence: Synthetic oligonucleotide
  Target: SCNA; (-) strand; PAM type: NRG; PAM sequence: TAG
agatacttgctctgagtcac

SEQ ID NO: 26731 - DNA, 20 bp, Artificial Sequence
  Description of Artificial Sequence: Synthetic oligonucleotide
  Target: SCNA; (-) strand; PAM type: NRG; PAM sequence: GAG
aggttatagatacttgctct

SEQ ID NO: 26732 - DNA, 20 bp, Artificial Sequence
  Description of Artificial Sequence: Synthetic oligonucleotide
  Target: SCNA; (-) strand; PAM type: NRG; PAM sequence: TAG
actagagattagagaggtta

SEQ ID NO: 26733 - DNA, 20 bp, Artificial Sequence
  Description of Artificial Sequence: Synthetic oligonucleotide
  Target: SCNA; (-) strand; PAM type: NRG; PAM sequence: AGG
gagaaaactagagattagag

SEQ ID NO: 26734 - DNA, 20 bp, Artificial Sequence
  Description of Artificial Sequence: Synthetic oligonucleotide
  Target: SCNA; (-) strand; PAM type: NRG; PAM sequence: GAG
tgagaaaactagagattaga

SEQ ID NO: 26735 - DNA, 20 bp, Artificial Sequence
  Description of Artificial Sequence: Synthetic oligonucleotide
  Target: SCNA; (-) strand; PAM type: NRG; PAM sequence: GAG
aatgagaaaactagagatta

SEQ ID NO: 26736 - DNA, 20 bp, Artificial Sequence
  Description of Artificial Sequence: Synthetic oligonucleotide
  Target: SCNA; (-) strand; PAM type: NRG; PAM sequence: TAG
ttaatgagaaaactagagat

SEQ ID NO: 26737 - DNA, 20 bp, Artificial Sequence
  Description of Artificial Sequence: Synthetic oligonucleotide
  Target: SCNA; (-) strand; PAM type: NRG; PAM sequence: GAG
attttttaatgagaaaacta

SEQ ID NO: 26738 - DNA, 20 bp, Artificial Sequence
  Description of Artificial Sequence: Synthetic oligonucleotide
  Target: SCNA; (-) strand; PAM type: NRG; PAM sequence: TAG
ccattttttaatgagaaaac

SEQ ID NO: 26739 - DNA, 20 bp, Artificial Sequence
  Description of Artificial Sequence: Synthetic oligonucleotide
  Target: SCNA; (-) strand; PAM type: NRG; PAM sequence: GAG
tatcatgcccattttttaat

SEQ ID NO: 26740 - DNA, 20 bp, Artificial Sequence
  Description of Artificial Sequence: Synthetic oligonucleotide
  Target: SCNA; (-) strand; PAM type: NRG; PAM sequence: AAG
ttacaacaatcaaacaagac

SEQ ID NO: 26741 - DNA, 20 bp, Artificial Sequence
  Description of Artificial Sequence: Synthetic oligonucleotide
  Target: SCNA; (-) strand; PAM type: NRG; PAM sequence: AAG
attccttacaacaatcaaac

SEQ ID NO: 26742 - DNA, 20 bp, Artificial Sequence
  Description of Artificial Sequence: Synthetic oligonucleotide
  Target: SCNA; (-) strand; PAM type: NRG; PAM sequence: GAG
tctgcctggctctttgctat

SEQ ID NO: 26743 - DNA, 20 bp, Artificial Sequence
  Description of Artificial Sequence: Synthetic oligonucleotide
  Target: SCNA; (-) strand; PAM type: NRG; PAM sequence: TGG
ctgagagcttccactctgcc

SEQ ID NO: 26744 - DNA, 20 bp, Artificial Sequence
  Description of Artificial Sequence: Synthetic oligonucleotide
  Target: SCNA; (-) strand; PAM type: NRG; PAM sequence: GAG
acaatagctacttgtactga

SEQ ID NO: 26745 - DNA, 20 bp, Artificial Sequence
  Description of Artificial Sequence: Synthetic oligonucleotide
  Target: SCNA; (-) strand; PAM type: NRG; PAM sequence: GAG
taacaatagctacttgtact

SEQ ID NO: 26746 - DNA, 20 bp, Artificial Sequence
  Description of Artificial Sequence: Synthetic oligonucleotide
  Target: SCNA; (-) strand; PAM type: NRG; PAM sequence: TAG
tggaggctagataataacaa

SEQ ID NO: 26747 - DNA, 20 bp, Artificial Sequence
  Description of Artificial Sequence: Synthetic oligonucleotide
  Target: SCNA; (-) strand; PAM type: NRG; PAM sequence: TAG
gacacccaaaacatggaggc

SEQ ID NO: 26748 - DNA, 20 bp, Artificial Sequence
  Description of Artificial Sequence: Synthetic oligonucleotide
  Target: SCNA; (-) strand; PAM type: NRG; PAM sequence: AGG
ctaggacacccaaaacatgg

SEQ ID NO: 26749 - DNA, 20 bp, Artificial Sequence
  Description of Artificial Sequence: Synthetic oligonucleotide
  Target: SCNA; (-) strand; PAM type: NRG; PAM sequence: GAG
cctaggacacccaaaacatg

SEQ ID NO: 26750 - DNA, 20 bp, Artificial Sequence
  Description of Artificial Sequence: Synthetic oligonucleotide
  Target: SCNA; (-) strand; PAM type: NRG; PAM sequence: TGG
gtcctaggacacccaaaaca

SEQ ID NO: 26751 - DNA, 20 bp, Artificial Sequence
  Description of Artificial Sequence: Synthetic oligonucleotide
  Target: SCNA; (-) strand; PAM type: NRG; PAM sequence: AGG
aaaaaaaaaaagcatgtcct

SEQ ID NO: 26752 - DNA, 20 bp, Artificial Sequence
  Description of Artificial Sequence: Synthetic oligonucleotide
  Target: SCNA; (-) strand; PAM type: NRG; PAM sequence: TAG
aaaaaaaaaaaagcatgtcc

SEQ ID NO: 26753 - DNA, 20 bp, Artificial Sequence
  Description of Artificial Sequence: Synthetic oligonucleotide
  Target: SCNA; (-) strand; PAM type: NRG; PAM sequence: AAG
ctgcaatggaaaaaaaaaaa

SEQ ID NO: 26754 - DNA, 20 bp, Artificial Sequence
  Description of Artificial Sequence: Synthetic oligonucleotide
  Target: SCNA; (-) strand; PAM type: NRG; PAM sequence: TGG
caggtggaaatctactgcaa

SEQ ID NO: 26755 - DNA, 20 bp, Artificial Sequence
  Description of Artificial Sequence: Synthetic oligonucleotide
  Target: SCNA; (-) strand; PAM type: NRG; PAM sequence: TGG
ctgtggaggatgggaacagg

SEQ ID NO: 26756 - DNA, 20 bp, Artificial Sequence
  Description of Artificial Sequence: Synthetic oligonucleotide
  Target: SCNA; (-) strand; PAM type: NRG; PAM sequence: AGG
agactgtggaggatgggaac

SEQ ID NO: 26757 - DNA, 20 bp, Artificial Sequence
  Description of Artificial Sequence: Synthetic oligonucleotide
  Target: SCNA; (-) strand; PAM type: NRG; PAM sequence: CAG
gagactgtggaggatgggaa

SEQ ID NO: 26758 - DNA, 20 bp, Artificial Sequence
  Description of Artificial Sequence: Synthetic oligonucleotide
  Target: SCNA; (-) strand; PAM type: NRG; PAM sequence: GGG
gatgggagactgtggaggat

SEQ ID NO: 26759 - DNA, 20 bp, Artificial Sequence
  Description of Artificial Sequence: Synthetic oligonucleotide
  Target: SCNA; (-) strand; PAM type: NRG; PAM sequence: TGG
ggatgggagactgtggagga

SEQ ID NO: 26760 - DNA, 20 bp, Artificial Sequence
  Description of Artificial Sequence: Synthetic oligonucleotide
  Target: SCNA; (-) strand; PAM type: NRG; PAM sequence: AGG
ggtgggatgggagactgtgg

SEQ ID NO: 26761 - DNA, 20 bp, Artificial Sequence
  Description of Artificial Sequence: Synthetic oligonucleotide
  Target: SCNA; (-) strand; PAM type: NRG; PAM sequence: GAG
tggtgggatgggagactgtg

SEQ ID NO: 26762 - DNA, 20 bp, Artificial Sequence
  Description of Artificial Sequence: Synthetic oligonucleotide
  Target: SCNA; (-) strand; PAM type: NRG; PAM sequence: TGG
gctggtgggatgggagactg

SEQ ID NO: 26763 - DNA, 20 bp, Artificial Sequence
  Description of Artificial Sequence: Synthetic oligonucleotide
  Target: SCNA; (-) strand; PAM type: NRG; PAM sequence: GAG
gtgtgttgctggtgggatgg

SEQ ID NO: 26764 - DNA, 20 bp, Artificial Sequence
  Description of Artificial Sequence: Synthetic oligonucleotide
  Target: SCNA; (-) strand; PAM type: NRG; PAM sequence: GGG
acgtgtgttgctggtgggat

SEQ ID NO: 26765 - DNA, 20 bp, Artificial Sequence
  Description of Artificial Sequence: Synthetic oligonucleotide
  Target: SCNA; (-) strand; PAM type: NRG; PAM sequence: TGG
cacgtgtgttgctggtggga

SEQ ID NO: 26766 - DNA, 20 bp, Artificial Sequence
  Description of Artificial Sequence: Synthetic oligonucleotide
  Target: SCNA; (-) strand; PAM type: NRG; PAM sequence: GGG
atctcacgtgtgttgctggt

SEQ ID NO: 26767 - DNA, 20 bp, Artificial Sequence
  Description of Artificial Sequence: Synthetic oligonucleotide
  Target: SCNA; (-) strand; PAM type: NRG; PAM sequence: TGG
tatctcacgtgtgttgctgg

SEQ ID NO: 26768 - DNA, 20 bp, Artificial Sequence
  Description of Artificial Sequence: Synthetic oligonucleotide
  Target: SCNA; (-) strand; PAM type: NRG; PAM sequence: TGG
agatatctcacgtgtgttgc

SEQ ID NO: 26769 - DNA, 20 bp, Artificial Sequence
  Description of Artificial Sequence: Synthetic oligonucleotide
  Target: SCNA; (-) strand; PAM type: NRG; PAM sequence: CAG
agttattgatgggaaggcat

SEQ ID NO: 26770 - DNA, 20 bp, Artificial Sequence
  Description of Artificial Sequence: Synthetic oligonucleotide
  Target: SCNA; (-) strand; PAM type: NRG; PAM sequence: AGG
agtgagagttattgatggga

SEQ ID NO: 26771 - DNA, 20 bp, Artificial Sequence
  Description of Artificial Sequence: Synthetic oligonucleotide
  Target: SCNA; (-) strand; PAM type: NRG; PAM sequence: AAG
aagtgagagttattgatggg

SEQ ID NO: 26772 - DNA, 20 bp, Artificial Sequence
  Description of Artificial Sequence: Synthetic oligonucleotide
  Target: SCNA; (-) strand; PAM type: NRG; PAM sequence: GGG
actaagtgagagttattgat

SEQ ID NO: 26773 - DNA, 20 bp, Artificial Sequence
  Description of Artificial Sequence: Synthetic oligonucleotide
  Target: SCNA; (-) strand; PAM type: NRG; PAM sequence: TGG
tactaagtgagagttattga

SEQ ID NO: 26774 - DNA, 20 bp, Artificial Sequence
  Description of Artificial Sequence: Synthetic oligonucleotide
  Target: SCNA; (-) strand; PAM type: NRG; PAM sequence: GAG
tgcttacccatactaagtga

SEQ ID NO: 26775 - DNA, 20 bp, Artificial Sequence
  Description of Artificial Sequence: Synthetic oligonucleotide
  Target: SCNA; (-) strand; PAM type: NRG; PAM sequence: GAG
tttgcttacccatactaagt

SEQ ID NO: 26776 - DNA, 20 bp, Artificial Sequence
  Description of Artificial Sequence: Synthetic oligonucleotide
  Target: SCNA; (-) strand; PAM type: NRG; PAM sequence: AAG
attttttgcttacccatact

SEQ ID NO: 26777 - DNA, 20 bp, Artificial Sequence
  Description of Artificial Sequence: Synthetic oligonucleotide
  Target: SCNA; (-) strand; PAM type: NRG; PAM sequence: TGG
ccacaacttccatccctggt

SEQ ID NO: 26778 - DNA, 20 bp, Artificial Sequence
  Description of Artificial Sequence: Synthetic oligonucleotide
  Target: SCNA; (-) strand; PAM type: NRG; PAM sequence: TGG
ctctccacaacttccatccc

SEQ ID NO: 26779 - DNA, 20 bp, Artificial Sequence
  Description of Artificial Sequence: Synthetic oligonucleotide
  Target: SCNA; (-) strand; PAM type: NRG; PAM sequence: GAG
gatccctatcaatgctcctt

SEQ ID NO: 26780 - DNA, 20 bp, Artificial Sequence
  Description of Artificial Sequence: Synthetic oligonucleotide
  Target: SCNA; (-) strand; PAM type: NRG; PAM sequence: TAG
ggagagaaagagatgtttgg

SEQ ID NO: 26781 - DNA, 20 bp, Artificial Sequence
  Description of Artificial Sequence: Synthetic oligonucleotide
  Target: SCNA; (-) strand; PAM type: NRG; PAM sequence: TGG
tagggagagaaagagatgtt

SEQ ID NO: 26782 - DNA, 20 bp, Artificial Sequence
  Description of Artificial Sequence: Synthetic oligonucleotide
  Target: SCNA; (-) strand; PAM type: NRG; PAM sequence: GAG
tcgcacattagggagagaaa

SEQ ID NO: 26783 - DNA, 20 bp, Artificial Sequence
  Description of Artificial Sequence: Synthetic oligonucleotide
  Target: SCNA; (-) strand; PAM type: NRG; PAM sequence: AAG
actcgcacattagggagaga

SEQ ID NO: 26784 - DNA, 20 bp, Artificial Sequence
  Description of Artificial Sequence: Synthetic oligonucleotide
  Target: SCNA; (-) strand; PAM type: NRG; PAM sequence: GAG
tgtaactcgcacattaggga

SEQ ID NO: 26785 - DNA, 20 bp, Artificial Sequence
  Description of Artificial Sequence: Synthetic oligonucleotide
  Target: SCNA; (-) strand; PAM type: NRG; PAM sequence: GAG
attgtaactcgcacattagg

SEQ ID NO: 26786 - DNA, 20 bp, Artificial Sequence
  Description of Artificial Sequence: Synthetic oligonucleotide
  Target: SCNA; (-) strand; PAM type: NRG; PAM sequence: GGG
ttattgtaactcgcacatta

SEQ ID NO: 26787 - DNA, 20 bp, Artificial Sequence
  Description of Artificial Sequence: Synthetic oligonucleotide
  Target: SCNA; (-) strand; PAM type: NRG; PAM sequence: AGG
gttattgtaactcgcacatt

SEQ ID NO: 26788 - DNA, 20 bp, Artificial Sequence
  Description of Artificial Sequence: Synthetic oligonucleotide
  Target: SCNA; (-) strand; PAM type: NRG; PAM sequence: TAG
tgttattgtaactcgcacat

SEQ ID NO: 26789 - DNA, 20 bp, Artificial Sequence
  Description of Artificial Sequence: Synthetic oligonucleotide
  Target: SCNA; (-) strand; PAM type: NRG; PAM sequence: GAG
ctgtggctgcaaactgcttt

SEQ ID NO: 26790 - DNA, 20 bp, Artificial Sequence
  Description of Artificial Sequence: Synthetic oligonucleotide
  Target: SCNA; (-) strand; PAM type: NRG; PAM sequence: TGG
tactgtatttcttcaagctg

SEQ ID NO: 26791 - DNA, 20 bp, Artificial Sequence
  Description of Artificial Sequence: Synthetic oligonucleotide
  Target: SCNA; (-) strand; PAM type: NRG; PAM sequence: AAG
cattgttactgtatttcttc

SEQ ID NO: 26792 - DNA, 20 bp, Artificial Sequence
  Description of Artificial Sequence: Synthetic oligonucleotide
  Target: SCNA; (-) strand; PAM type: NRG; PAM sequence: TAG
agtaaaaatgttaataaaga

SEQ ID NO: 26793 - DNA, 20 bp, Artificial Sequence
  Description of Artificial Sequence: Synthetic oligonucleotide
  Target: SCNA; (-) strand; PAM type: NRG; PAM sequence: AAG
agaaagtaaaaatgttaata

SEQ ID NO: 26794 - DNA, 20 bp, Artificial Sequence
  Description of Artificial Sequence: Synthetic oligonucleotide
  Target: SCNA; (-) strand; PAM type: NRG; PAM sequence: AAG
gaaagaaacaaggtttaaga

SEQ ID NO: 26795 - DNA, 20 bp, Artificial Sequence
  Description of Artificial Sequence: Synthetic oligonucleotide
  Target: SCNA; (-) strand; PAM type: NRG; PAM sequence: AAG
ttttgaaagaaacaaggttt

SEQ ID NO: 26796 - DNA, 20 bp, Artificial Sequence
  Description of Artificial Sequence: Synthetic oligonucleotide
  Target: SCNA; (-) strand; PAM type: NRG; PAM sequence: AGG
agtgtcttttgaaagaaaca

SEQ ID NO: 26797 - DNA, 20 bp, Artificial Sequence
  Description of Artificial Sequence: Synthetic oligonucleotide
  Target: SCNA; (-) strand; PAM type: NRG; PAM sequence: AAG
cagtgtcttttgaaagaaac

SEQ ID NO: 26798 - DNA, 20 bp, Artificial Sequence
  Description of Artificial Sequence: Synthetic oligonucleotide
  Target: SCNA; (-) strand; PAM type: NRG; PAM sequence: AAG
actatgccagtgtcttttga

SEQ ID NO: 26799 - DNA, 20 bp, Artificial Sequence
  Description of Artificial Sequence: Synthetic oligonucleotide
  Target: SCNA; (-) strand; PAM type: NRG; PAM sequence: CAG
taattcatacaggactatgc

SEQ ID NO: 26800 - DNA, 20 bp, Artificial Sequence
  Description of Artificial Sequence: Synthetic oligonucleotide
  Target: SCNA; (-) strand; PAM type: NRG; PAM sequence: AGG
caaatccacataattcatac

SEQ ID NO: 26801 - DNA, 20 bp, Artificial Sequence
  Description of Artificial Sequence: Synthetic oligonucleotide
  Target: SCNA; (-) strand; PAM type: NRG; PAM sequence: CAG
gcaaatccacataattcata

SEQ ID NO: 26802 - DNA, 20 bp, Artificial Sequence
  Description of Artificial Sequence: Synthetic oligonucleotide
  Target: SCNA; (-) strand; PAM type: NRG; PAM sequence: TGG
atcattttatttttttctct

SEQ ID NO: 26803 - DNA, 20 bp, Artificial Sequence
  Description of Artificial Sequence: Synthetic oligonucleotide
  Target: SCNA; (-) strand; PAM type: NRG; PAM sequence: TGG
cacaaagggtctgtcaaact

SEQ ID NO: 26804 - DNA, 20 bp, Artificial Sequence
  Description of Artificial Sequence: Synthetic oligonucleotide
  Target: SCNA; (-) strand; PAM type: NRG; PAM sequence: GGG
ttcagagccactggcacaaa

SEQ ID NO: 26805 - DNA, 20 bp, Artificial Sequence
  Description of Artificial Sequence: Synthetic oligonucleotide
  Target: SCNA; (-) strand; PAM type: NRG; PAM sequence: AGG
tttcagagccactggcacaa

SEQ ID NO: 26806 - DNA, 20 bp, Artificial Sequence
  Description of Artificial Sequence: Synthetic oligonucleotide
  Target: SCNA; (-) strand; PAM type: NRG; PAM sequence: AAG
ctttcagagccactggcaca

SEQ ID NO: 26807 - DNA, 20 bp, Artificial Sequence
  Description of Artificial Sequence: Synthetic oligonucleotide
  Target: SCNA; (-) strand; PAM type: NRG; PAM sequence: TGG
ctgaagcctttcagagccac

SEQ ID NO: 26808 - DNA, 20 bp, Artificial Sequence
  Description of Artificial Sequence: Synthetic oligonucleotide
  Target: SCNA; (-) strand; PAM type: NRG; PAM sequence: GAG
attcattctgaagcctttca

SEQ ID NO: 26809 - DNA, 20 bp, Artificial Sequence
  Description of Artificial Sequence: Synthetic oligonucleotide
  Target: SCNA; (-) strand; PAM type: NRG; PAM sequence: CAG
atattcattctgaagccttt

SEQ ID NO: 26810 - DNA, 20 bp, Artificial Sequence
  Description of Artificial Sequence: Synthetic oligonucleotide
  Target: SCNA; (-) strand; PAM type: NRG; PAM sequence: AAG
tgaattggatattcattctg

SEQ ID NO: 26811 - DNA, 20 bp, Artificial Sequence
  Description of Artificial Sequence: Synthetic oligonucleotide
  Target: SCNA; (-) strand; PAM type: NRG; PAM sequence: TGG
ttagggactgatttctgaat

SEQ ID NO: 26812 - DNA, 20 bp, Artificial Sequence
  Description of Artificial Sequence: Synthetic oligonucleotide
  Target: SCNA; (-) strand; PAM type: NRG; PAM sequence: GGG
ttcactaatctgaaatatta

SEQ ID NO: 26813 - DNA, 20 bp, Artificial Sequence
  Description of Artificial Sequence: Synthetic oligonucleotide
  Target: SCNA; (-) strand; PAM type: NRG; PAM sequence: AGG
cttcactaatctgaaatatt

SEQ ID NO: 26814 - DNA, 20 bp, Artificial Sequence
  Description of Artificial Sequence: Synthetic oligonucleotide
  Target: SCNA; (-) strand; PAM type: NRG; PAM sequence: TAG
tcttcactaatctgaaatat

SEQ ID NO: 26815 - DNA, 20 bp, Artificial Sequence
  Description of Artificial Sequence: Synthetic oligonucleotide
  Target: SCNA; (-) strand; PAM type: NRG; PAM sequence: CAG
ttctgaatacaaatgctgtt

SEQ ID NO: 26816 - DNA, 20 bp, Artificial Sequence
  Description of Artificial Sequence: Synthetic oligonucleotide
  Target: SCNA; (-) strand; PAM type: NRG; PAM sequence: AAG
aacaatacacaaaacattac

SEQ ID NO: 26817 - DNA, 20 bp, Artificial Sequence
  Description of Artificial Sequence: Synthetic oligonucleotide
  Target: SCNA; (-) strand; PAM type: NRG; PAM sequence: CAG
ttgtaacagtattgtaactt

SEQ ID NO: 26818 - DNA, 20 bp, Artificial Sequence
  Description of Artificial Sequence: Synthetic oligonucleotide
  Target: SCNA; (-) strand; PAM type: NRG; PAM sequence: CAG
tgtatatactctgtttgtaa

SEQ ID NO: 26819 - DNA, 20 bp, Artificial Sequence
  Description of Artificial Sequence: Synthetic oligonucleotide
  Target: SCNA; (-) strand; PAM type: NRG; PAM sequence: AGG
tggatattttggatattgta

SEQ ID NO: 26820 - DNA, 20 bp, Artificial Sequence
  Description of Artificial Sequence: Synthetic oligonucleotide
  Target: SCNA; (-) strand; PAM type: NRG; PAM sequence: AAG
ctggatattttggatattgt

SEQ ID NO: 26821 - DNA, 20 bp, Artificial Sequence
  Description of Artificial Sequence: Synthetic oligonucleotide
  Target: SCNA; (-) strand; PAM type: NRG; PAM sequence: TGG
tattagattcctggatattt

SEQ ID NO: 26822 - DNA, 20 bp, Artificial Sequence
  Description of Artificial Sequence: Synthetic oligonucleotide
  Target: SCNA; (-) strand; PAM type: NRG; PAM sequence: TGG
aggaaaacgtattagattcc

SEQ ID NO: 26823 - DNA, 20 bp, Artificial Sequence
  Description of Artificial Sequence: Synthetic oligonucleotide
  Target: SCNA; (-) strand; PAM type: NRG; PAM sequence: TAG
atctagaaaggaaaacgtat

SEQ ID NO: 26824 - DNA, 20 bp, Artificial Sequence
  Description of Artificial Sequence: Synthetic oligonucleotide
  Target: SCNA; (-) strand; PAM type: NRG; PAM sequence: AGG
tactctcaaattatctagaa

SEQ ID NO: 26825 - DNA, 20 bp, Artificial Sequence
  Description of Artificial Sequence: Synthetic oligonucleotide
  Target: SCNA; (-) strand; PAM type: NRG; PAM sequence: AAG
atactctcaaattatctaga

SEQ ID NO: 26826 - DNA, 20 bp, Artificial Sequence
  Description of Artificial Sequence: Synthetic oligonucleotide
  Target: SCNA; (-) strand; PAM type: NRG; PAM sequence: TAG
ctttatactctcaaattatc

SEQ ID NO: 26827 - DNA, 20 bp, Artificial Sequence
  Description of Artificial Sequence: Synthetic oligonucleotide
  Target: SCNA; (-) strand; PAM type: NRG; PAM sequence: AAG
gccaccatgcccgacctaaa

SEQ ID NO: 26828 - DNA, 20 bp, Artificial Sequence
  Description of Artificial Sequence: Synthetic oligonucleotide
  Target: SCNA; (-) strand; PAM type: NRG; PAM sequence: GAG
agtgctgagattacaggcgt

SEQ ID NO: 26829 - DNA, 20 bp, Artificial Sequence
  Description of Artificial Sequence: Synthetic oligonucleotide
  Target: SCNA; (-) strand; PAM type: NRG; PAM sequence: AGG
tcccaaagtgctgagattac

SEQ ID NO: 26830 - DNA, 20 bp, Artificial Sequence
  Description of Artificial Sequence: Synthetic oligonucleotide
  Target: SCNA; (-) strand; PAM type: NRG; PAM sequence: CAG
ctcccaaagtgctgagatta

SEQ ID NO: 26831 - DNA, 20 bp, Artificial Sequence
  Description of Artificial Sequence: Synthetic oligonucleotide
  Target: SCNA; (-) strand; PAM type: NRG; PAM sequence: GAG
cctcagcctcccaaagtgct

SEQ ID NO: 26832 - DNA, 20 bp, Artificial Sequence
  Description of Artificial Sequence: Synthetic oligonucleotide
  Target: SCNA; (-) strand; PAM type: NRG; PAM sequence: AAG
ctgcccacctcagcctccca

SEQ ID NO: 26833 - DNA, 20 bp, Artificial Sequence
  Description of Artificial Sequence: Synthetic oligonucleotide
  Target: SCNA; (-) strand; PAM type: NRG; PAM sequence: CAG
ctcaggtaatctgcccacct

SEQ ID NO: 26834 - DNA, 20 bp, Artificial Sequence
  Description of Artificial Sequence: Synthetic oligonucleotide
  Target: SCNA; (-) strand; PAM type: NRG; PAM sequence: AGG
ggtctctaactcctgacctc

SEQ ID NO: 26835 - DNA, 20 bp, Artificial Sequence
  Description of Artificial Sequence: Synthetic oligonucleotide
  Target: SCNA; (-) strand; PAM type: NRG; PAM sequence: CAG
tggtctctaactcctgacct

SEQ ID NO: 26836 - DNA, 20 bp, Artificial Sequence
  Description of Artificial Sequence: Synthetic oligonucleotide
  Target: SCNA; (-) strand; PAM type: NRG; PAM sequence: TGG
ttttaccatcttggccaggc

SEQ ID NO: 26837 - DNA, 20 bp, Artificial Sequence
  Description of Artificial Sequence: Synthetic oligonucleotide
  Target: SCNA; (-) strand; PAM type: NRG; PAM sequence: AGG
ggggttttaccatcttggcc

SEQ ID NO: 26838 - DNA, 20 bp, Artificial Sequence
  Description of Artificial Sequence: Synthetic oligonucleotide
  Target: SCNA; (-) strand; PAM type: NRG; PAM sequence: CAG
cggggttttaccatcttggc

SEQ ID NO: 26839 - DNA, 20 bp, Artificial Sequence
  Description of Artificial Sequence: Synthetic oligonucleotide
  Target: SCNA; (-) strand; PAM type: NRG; PAM sequence: TGG
gagacggggttttaccatct

SEQ ID NO: 26840 - DNA, 20 bp, Artificial Sequence
  Description of Artificial Sequence: Synthetic oligonucleotide
  Target: SCNA; (-) strand; PAM type: NRG; PAM sequence: GGG
ttgtatttttagtagagacg

SEQ ID NO: 26841 - DNA, 20 bp, Artificial Sequence
  Description of Artificial Sequence: Synthetic oligonucleotide
  Target: SCNA; (-) strand; PAM type: NRG; PAM sequence: GGG
tttgtatttttagtagagac

SEQ ID NO: 26842 - DNA, 20 bp, Artificial Sequence
  Description of Artificial Sequence: Synthetic oligonucleotide
  Target: SCNA; (-) strand; PAM type: NRG; PAM sequence: CGG
ttttgtatttttagtagaga

SEQ ID NO: 26843 - DNA, 20 bp, Artificial Sequence
  Description of Artificial Sequence: Synthetic oligonucleotide
  Target: SCNA; (-) strand; PAM type: NRG; PAM sequence: GAG
tgatttttgtatttttagta

SEQ ID NO: 26844 - DNA, 20 bp, Artificial Sequence
  Description of Artificial Sequence: Synthetic oligonucleotide
  Target: SCNA; (-) strand; PAM type: NRG; PAM sequence: TAG
gctgatttttgtatttttag

SEQ ID NO: 26845 - DNA, 20 bp, Artificial Sequence
  Description of Artificial Sequence: Synthetic oligonucleotide
  Target: SCNA; (-) strand; PAM type: NRG; PAM sequence: TAG
ccagctgatttttgtatttt

SEQ ID NO: 26846 - DNA, 20 bp, Artificial Sequence
  Description of Artificial Sequence: Synthetic oligonucleotide
  Target: SCNA; (-) strand; PAM type: NRG; PAM sequence: CAG
caggcacctgccaccacgtc

SEQ ID NO: 26847 - DNA, 20 bp, Artificial Sequence
  Description of Artificial Sequence: Synthetic oligonucleotide
  Target: SCNA; (-) strand; PAM type: NRG; PAM sequence: AGG
ccccaagtagctgggattac

SEQ ID NO: 26848 - DNA, 20 bp, Artificial Sequence
  Description of Artificial Sequence: Synthetic oligonucleotide
  Target: SCNA; (-) strand; PAM type: NRG; PAM sequence: CAG
cccccaagtagctgggatta

SEQ ID NO: 26849 - DNA, 20 bp, Artificial Sequence
  Description of Artificial Sequence: Synthetic oligonucleotide
  Target: SCNA; (-) strand; PAM type: NRG; PAM sequence: GGG
cctcagccccccaagtagct

SEQ ID NO: 26850 - DNA, 20 bp, Artificial Sequence
  Description of Artificial Sequence: Synthetic oligonucleotide
  Target: SCNA; (-) strand; PAM type: NRG; PAM sequence: TGG
gcctcagccccccaagtagc

SEQ ID NO: 26851 - DNA, 20 bp, Artificial Sequence
  Description of Artificial Sequence: Synthetic oligonucleotide
  Target: SCNA; (-) strand; PAM type: NRG; PAM sequence: TAG
tcctgcctcagccccccaag

SEQ ID NO: 26852 - DNA, 20 bp, Artificial Sequence
  Description of Artificial Sequence: Synthetic oligonucleotide
  Target: SCNA; (-) strand; PAM type: NRG; PAM sequence: AAG
ttctcctgcctcagcccccc

SEQ ID NO: 26853 - DNA, 20 bp, Artificial Sequence
  Description of Artificial Sequence: Synthetic oligonucleotide
  Target: SCNA; (-) strand; PAM type: NRG; PAM sequence: CAG
tacaagcaattctcctgcct

SEQ ID NO: 26854 - DNA, 20 bp, Artificial Sequence
  Description of Artificial Sequence: Synthetic oligonucleotide
  Target: SCNA; (-) strand; PAM type: NRG; PAM sequence: AAG
aacaaccacctcctgggtac

SEQ ID NO: 26855 - DNA, 20 bp, Artificial Sequence
  Description of Artificial Sequence: Synthetic oligonucleotide
  Target: SCNA; (-) strand; PAM type: NRG; PAM sequence: GGG
cagtgcaacaaccacctcct

SEQ ID NO: 26856 - DNA, 20 bp, Artificial Sequence
  Description of Artificial Sequence: Synthetic oligonucleotide
  Target: SCNA; (-) strand; PAM type: NRG; PAM sequence: TGG
tcagtgcaacaaccacctcc

SEQ ID NO: 26857 - DNA, 20 bp, Artificial Sequence
  Description of Artificial Sequence: Synthetic oligonucleotide
  Target: SCNA; (-) strand; PAM type: NRG; PAM sequence: CAG
gcagtagtgcgatctcggct

SEQ ID NO: 26858 - DNA, 20 bp, Artificial Sequence
  Description of Artificial Sequence: Synthetic oligonucleotide
  Target: SCNA; (-) strand; PAM type: NRG; PAM sequence: CGG
ggagcgcagtagtgcgatct

SEQ ID NO: 26859 - DNA, 20 bp, Artificial Sequence
  Description of Artificial Sequence: Synthetic oligonucleotide
  Target: SCNA; (-) strand; PAM type: NRG; PAM sequence: TAG
tcgcccaggctggagcgcag

SEQ ID NO: 26860 - DNA, 20 bp, Artificial Sequence
  Description of Artificial Sequence: Synthetic oligonucleotide
  Target: SCNA; (-) strand; PAM type: NRG; PAM sequence: CAG
ctgtcgcccaggctggagcg

SEQ ID NO: 26861 - DNA, 20 bp, Artificial Sequence
  Description of Artificial Sequence: Synthetic oligonucleotide
  Target: SCNA; (-) strand; PAM type: NRG; PAM sequence: GAG
ttgctctgtcgcccaggctg

SEQ ID NO: 26862 - DNA, 20 bp, Artificial Sequence
  Description of Artificial Sequence: Synthetic oligonucleotide
  Target: SCNA; (-) strand; PAM type: NRG; PAM sequence: TGG
tcttgctctgtcgcccaggc

SEQ ID NO: 26863 - DNA, 20 bp, Artificial Sequence
  Description of Artificial Sequence: Synthetic oligonucleotide
  Target: SCNA; (-) strand; PAM type: NRG; PAM sequence: AGG
ggagtcttgctctgtcgccc

SEQ ID NO: 26864 - DNA, 20 bp, Artificial Sequence
  Description of Artificial Sequence: Synthetic oligonucleotide
  Target: SCNA; (-) strand; PAM type: NRG; PAM sequence: CAG
tggagtcttgctctgtcgcc

SEQ ID NO: 26865 - DNA, 20 bp, Artificial Sequence
  Description of Artificial Sequence: Synthetic oligonucleotide
  Target: SCNA; (-) strand; PAM type: NRG; PAM sequence: GAG
tttctttttcccccaagatg

SEQ ID NO: 26866 - DNA, 20 bp, Artificial Sequence
  Description of Artificial Sequence: Synthetic oligonucleotide
  Target: SCNA; (-) strand; PAM type: NRG; PAM sequence: TGG
tttttctttttcccccaaga

SEQ ID NO: 26867 - DNA, 20 bp, Artificial Sequence
  Description of Artificial Sequence: Synthetic oligonucleotide
  Target: SCNA; (-) strand; PAM type: NRG; PAM sequence: AAG
ttcttttttctttttccccc

SEQ ID NO: 26868 - DNA, 20 bp, Artificial Sequence
  Description of Artificial Sequence: Synthetic oligonucleotide
  Target: SCNA; (-) strand; PAM type: NRG; PAM sequence: AAG
gctttttatatggtgttaaa

SEQ ID NO: 26869 - DNA, 20 bp, Artificial Sequence
  Description of Artificial Sequence: Synthetic oligonucleotide
  Target: SCNA; (-) strand; PAM type: NRG; PAM sequence: TGG
ttagtgatgtgctttttata

SEQ ID NO: 26870 - DNA, 20 bp, Artificial Sequence
  Description of Artificial Sequence: Synthetic oligonucleotide
  Target: SCNA; (-) strand; PAM type: NRG; PAM sequence: TAG
acaccaagttttcaaaccat

SEQ ID NO: 26871 - DNA, 20 bp, Artificial Sequence
  Description of Artificial Sequence: Synthetic oligonucleotide
  Target: SCNA; (-) strand; PAM type: NRG; PAM sequence: AAG
ccagctttatatggaacacc

SEQ ID NO: 26872 - DNA, 20 bp, Artificial Sequence
  Description of Artificial Sequence: Synthetic oligonucleotide
  Target: SCNA; (-) strand; PAM type: NRG; PAM sequence: TGG
cataaatttccagctttata

SEQ ID NO: 26873 - DNA, 20 bp, Artificial Sequence
  Description of Artificial Sequence: Synthetic oligonucleotide
  Target: SCNA; (-) strand; PAM type: NRG; PAM sequence: CAG
ttcttaactacataaatttc

SEQ ID NO: 26874 - DNA, 20 bp, Artificial Sequence
  Description of Artificial Sequence: Synthetic oligonucleotide
  Target: SCNA; (-) strand; PAM type: NRG; PAM sequence: GAG
gtttatcaaatagccattaa

SEQ ID NO: 26875 - DNA, 20 bp, Artificial Sequence
  Description of Artificial Sequence: Synthetic oligonucleotide
  Target: SCNA; (-) strand; PAM type: NRG; PAM sequence: AAG
gtgtttatcaaatagccatt

SEQ ID NO: 26876 - DNA, 20 bp, Artificial Sequence
  Description of Artificial Sequence: Synthetic oligonucleotide
  Target: SCNA; (-) strand; PAM type: NRG; PAM sequence: TAG
atactaaagtgtttatcaaa

SEQ ID NO: 26877 - DNA, 20 bp, Artificial Sequence
  Description of Artificial Sequence: Synthetic oligonucleotide
  Target: SCNA; (-) strand; PAM type: NRG; PAM sequence: AAG
atggatatgtttttatacta

SEQ ID NO: 26878 - DNA, 20 bp, Artificial Sequence
  Description of Artificial Sequence: Synthetic oligonucleotide
  Target: SCNA; (-) strand; PAM type: NRG; PAM sequence: TGG
caaatccatatttattgaca

SEQ ID NO: 26879 - DNA, 20 bp, Artificial Sequence
  Description of Artificial Sequence: Synthetic oligonucleotide
  Target: SCNA; (-) strand; PAM type: NRG; PAM sequence: AAG
cagtataacgttttatagcc

SEQ ID NO: 26880 - DNA, 20 bp, Artificial Sequence
  Description of Artificial Sequence: Synthetic oligonucleotide
  Target: SCNA; (-) strand; PAM type: NRG; PAM sequence: TAG
tgatacagtataacgtttta

SEQ ID NO: 26881 - DNA, 20 bp, Artificial Sequence
  Description of Artificial Sequence: Synthetic oligonucleotide
  Target: SCNA; (-) strand; PAM type: NRG; PAM sequence: CAG
aattaaataaatatatgata

SEQ ID NO: 26882 - DNA, 20 bp, Artificial Sequence
  Description of Artificial Sequence: Synthetic oligonucleotide
  Target: SCNA; (-) strand; PAM type: NRG; PAM sequence: TAG
aagtaacagtaaattaaaaa

SEQ ID NO: 26883 - DNA, 20 bp, Artificial Sequence
  Description of Artificial Sequence: Synthetic oligonucleotide
  Target: SCNA; (-) strand; PAM type: NRG; PAM sequence: CAG
tatacgaaaataaaaagtaa

SEQ ID NO: 26884 - DNA, 20 bp, Artificial Sequence
  Description of Artificial Sequence: Synthetic oligonucleotide
  Target: SCNA; (-) strand; PAM type: NRG; PAM sequence: AAG
ccgatgtatacgaaaataaa

SEQ ID NO: 26885 - DNA, 20 bp, Artificial Sequence
  Description of Artificial Sequence: Synthetic oligonucleotide
  Target: SCNA; (-) strand; PAM type: NRG; PAM sequence: AAG
tattcttggaagacaaaaag

SEQ ID NO: 26886 - DNA, 20 bp, Artificial Sequence
  Description of Artificial Sequence: Synthetic oligonucleotide
  Target: SCNA; (-) strand; PAM type: NRG; PAM sequence: AAG
ttttattcttggaagacaaa

SEQ ID NO: 26887 - DNA, 20 bp, Artificial Sequence
  Description of Artificial Sequence: Synthetic oligonucleotide
  Target: SCNA; (-) strand; PAM type: NRG; PAM sequence: AAG
gacaagcgttttattcttgg

SEQ ID NO: 26888 - DNA, 20 bp, Artificial Sequence
  Description of Artificial Sequence: Synthetic oligonucleotide
  Target: SCNA; (-) strand; PAM type: NRG; PAM sequence: TGG
atagacaagcgttttattct

SEQ ID NO: 26889 - DNA, 20 bp, Artificial Sequence
  Description of Artificial Sequence: Synthetic oligonucleotide
  Target: SCNA; (-) strand; PAM type: NRG; PAM sequence: AAG
attagactgggtatatagac

SEQ ID NO: 26890 - DNA, 20 bp, Artificial Sequence
  Description of Artificial Sequence: Synthetic oligonucleotide
  Target: SCNA; (-) strand; PAM type: NRG; PAM sequence: TAG
gaattattagactgggtata

SEQ ID NO: 26891 - DNA, 20 bp, Artificial Sequence
  Description of Artificial Sequence: Synthetic oligonucleotide
  Target: SCNA; (-) strand; PAM type: NRG; PAM sequence: GGG
atataaagaattattagact

SEQ ID NO: 26892 - DNA, 20 bp, Artificial Sequence
  Description of Artificial Sequence: Synthetic oligonucleotide
  Target: SCNA; (-) strand; PAM type: NRG; PAM sequence: TGG
tatataaagaattattagac

SEQ ID NO: 26893 - DNA, 20 bp, Artificial Sequence
  Description of Artificial Sequence: Synthetic oligonucleotide
  Target: SCNA; (-) strand; PAM type: NRG; PAM sequence: TAG
taacatatataaagaattat

SEQ ID NO: 26894 - DNA, 20 bp, Artificial Sequence
  Description of Artificial Sequence: Synthetic oligonucleotide
  Target: SCNA; (-) strand; PAM type: NRG; PAM sequence: AAG
agtaatatttaacatatata

SEQ ID NO: 26895 - DNA, 20 bp, Artificial Sequence
  Description of Artificial Sequence: Synthetic oligonucleotide
  Target: SCNA; (-) strand; PAM type: NRG; PAM sequence: TAG
ttgatttaagattaacttat

SEQ ID NO: 26896 - DNA, 20 bp, Artificial Sequence
  Description of Artificial Sequence: Synthetic oligonucleotide
  Target: SCNA; (-) strand; PAM type: NRG; PAM sequence: AAG
tattatagagaagttgattt

SEQ ID NO: 26897 - DNA, 20 bp, Artificial Sequence
  Description of Artificial Sequence: Synthetic oligonucleotide
  Target: SCNA; (-) strand; PAM type: NRG; PAM sequence: AAG
gatcattgtctattatagag

SEQ ID NO: 26898 - DNA, 20 bp, Artificial Sequence
  Description of Artificial Sequence: Synthetic oligonucleotide
  Target: SCNA; (-) strand; PAM type: NRG; PAM sequence: GAG
aaggatcattgtctattata

SEQ ID NO: 26899 - DNA, 20 bp, Artificial Sequence
  Description of Artificial Sequence: Synthetic oligonucleotide
  Target: SCNA; (-) strand; PAM type: NRG; PAM sequence: TAG
tgaaggatcattgtctatta

SEQ ID NO: 26900 - DNA, 20 bp, Artificial Sequence
  Description of Artificial Sequence: Synthetic oligonucleotide
  Target: SCNA; (-) strand; PAM type: NRG; PAM sequence: AGG
gaatcagtaagacttagtga

SEQ ID NO: 26901 - DNA, 20 bp, Artificial Sequence
  Description of Artificial Sequence: Synthetic oligonucleotide
  Target: SCNA; (-) strand; PAM type: NRG; PAM sequence: AAG
agaatcagtaagacttagtg

SEQ ID NO: 26902 - DNA, 20 bp, Artificial Sequence
  Description of Artificial Sequence: Synthetic oligonucleotide
  Target: SCNA; (-) strand; PAM type: NRG; PAM sequence: TAG
agaaaagaatcagtaagact

SEQ ID NO: 26903 - DNA, 20 bp, Artificial Sequence
  Description of Artificial Sequence: Synthetic oligonucleotide
  Target: SCNA; (-) strand; PAM type: NRG; PAM sequence: AAG
ggactcagaaaagaatcagt

SEQ ID NO: 26904 - DNA, 20 bp, Artificial Sequence
  Description of Artificial Sequence: Synthetic oligonucleotide
  Target: SCNA; (-) strand; PAM type: NRG; PAM sequence: CAG
aaatggactcagaaaagaat

SEQ ID NO: 26905 - DNA, 20 bp, Artificial Sequence
  Description of Artificial Sequence: Synthetic oligonucleotide
  Target: SCNA; (-) strand; PAM type: NRG; PAM sequence: AAG
aaatagaaatggactcagaa

SEQ ID NO: 26906 - DNA, 20 bp, Artificial Sequence
  Description of Artificial Sequence: Synthetic oligonucleotide
  Target: SCNA; (-) strand; PAM type: NRG; PAM sequence: CAG
aatttaaatagaaatggact

SEQ ID NO: 26907 - DNA, 20 bp, Artificial Sequence
  Description of Artificial Sequence: Synthetic oligonucleotide
  Target: SCNA; (-) strand; PAM type: NRG; PAM sequence: TGG
aaggataatttaaatagaaa

SEQ ID NO: 26908 - DNA, 20 bp, Artificial Sequence
  Description of Artificial Sequence: Synthetic oligonucleotide
  Target: SCNA; (-) strand; PAM type: NRG; PAM sequence: TAG
aaatttaaggataatttaaa

SEQ ID NO: 26909 - DNA, 20 bp, Artificial Sequence
  Description of Artificial Sequence: Synthetic oligonucleotide
  Target: SCNA; (-) strand; PAM type: NRG; PAM sequence: AGG
tattttaatgacgaaattta

SEQ ID NO: 26910 - DNA, 20 bp, Artificial Sequence
  Description of Artificial Sequence: Synthetic oligonucleotide
  Target: SCNA; (-) strand; PAM type: NRG; PAM sequence: AAG
atattttaatgacgaaattt

SEQ ID NO: 26911 - DNA, 20 bp, Artificial Sequence
  Description of Artificial Sequence: Synthetic oligonucleotide
  Target: SCNA; (+) strand; PAM type: NRG; PAM sequence: CAG
tgactaaaacctatacctaa

SEQ ID NO: 26912 - DNA, 20 bp, Artificial Sequence
  Description of Artificial Sequence: Synthetic oligonucleotide
  Target: SCNA; (+) strand; PAM type: NRG; PAM sequence: TGG
aaaacctatacctaacagcc

SEQ ID NO: 26913 - DNA, 20 bp, Artificial Sequence
  Description of Artificial Sequence: Synthetic oligonucleotide
  Target: SCNA; (+) strand; PAM type: NRG; PAM sequence: AAG
acctatacctaacagcctgg

SEQ ID NO: 26914 - DNA, 20 bp, Artificial Sequence
  Description of Artificial Sequence: Synthetic oligonucleotide
  Target: SCNA; (+) strand; PAM type: NRG; PAM sequence: TAG
tatacctaacagcctggaag

SEQ ID NO: 26915 - DNA, 20 bp, Artificial Sequence
  Description of Artificial Sequence: Synthetic oligonucleotide
  Target: SCNA; (+) strand; PAM type: NRG; PAM sequence: AGG
atacctaacagcctggaagt

SEQ ID NO: 26916 - DNA, 20 bp, Artificial Sequence
  Description of Artificial Sequence: Synthetic oligonucleotide
  Target: SCNA; (+) strand; PAM type: NRG; PAM sequence: CAG
ctgatcatcaaaaaccaaca

SEQ ID NO: 26917 - DNA, 20 bp, Artificial Sequence
  Description of Artificial Sequence: Synthetic oligonucleotide
  Target: SCNA; (+) strand; PAM type: NRG; PAM sequence: TAG
catcaaaaaccaacacagtg

SEQ ID NO: 26918 - DNA, 20 bp, Artificial Sequence
  Description of Artificial Sequence: Synthetic oligonucleotide
  Target: SCNA; (+) strand; PAM type: NRG; PAM sequence: TGG
ttgaatgtctattctcacca

SEQ ID NO: 26919 - DNA, 20 bp, Artificial Sequence
  Description of Artificial Sequence: Synthetic oligonucleotide
  Target: SCNA; (+) strand; PAM type: NRG; PAM sequence: GGG
tgaatgtctattctcaccat

SEQ ID NO: 26920 - DNA, 20 bp, Artificial Sequence
  Description of Artificial Sequence: Synthetic oligonucleotide
  Target: SCNA; (+) strand; PAM type: NRG; PAM sequence: CAG
atgtctattctcaccatggg

SEQ ID NO: 26921 - DNA, 20 bp, Artificial Sequence
  Description of Artificial Sequence: Synthetic oligonucleotide
  Target: SCNA; (+) strand; PAM type: NRG; PAM sequence: CAG
caccatgggcagtgaaaaca

SEQ ID NO: 26922 - DNA, 20 bp, Artificial Sequence
  Description of Artificial Sequence: Synthetic oligonucleotide
  Target: SCNA; (+) strand; PAM type: NRG; PAM sequence: TGG
gggcagtgaaaacacagcca

SEQ ID NO: 26923 - DNA, 20 bp, Artificial Sequence
  Description of Artificial Sequence: Synthetic oligonucleotide
  Target: SCNA; (+) strand; PAM type: NRG; PAM sequence: CAG
aactccataatattgatgta

SEQ ID NO: 26924 - DNA, 20 bp, Artificial Sequence
  Description of Artificial Sequence: Synthetic oligonucleotide
  Target: SCNA; (+) strand; PAM type: NRG; PAM sequence: GAG
ctccataatattgatgtaca

SEQ ID NO: 26925 - DNA, 20 bp, Artificial Sequence
  Description of Artificial Sequence: Synthetic oligonucleotide
  Target: SCNA; (+) strand; PAM type: NRG; PAM sequence: TGG
gctgttcttaaacataactt

SEQ ID NO: 26926 - DNA, 20 bp, Artificial Sequence
  Description of Artificial Sequence: Synthetic oligonucleotide
  Target: SCNA; (+) strand; PAM type: NRG; PAM sequence: TGG
aacataactttggattgtgt

SEQ ID NO: 26927 - DNA, 20 bp, Artificial Sequence
  Description of Artificial Sequence: Synthetic oligonucleotide
  Target: SCNA; (+) strand; PAM type: NRG; PAM sequence: TAG
gattgtgttggactccttct

SEQ ID NO: 26928 - DNA, 20 bp, Artificial Sequence
  Description of Artificial Sequence: Synthetic oligonucleotide
  Target: SCNA; (+) strand; PAM type: NRG; PAM sequence: TGG
tgttggactccttcttagaa

SEQ ID NO: 26929 - DNA, 20 bp, Artificial Sequence
  Description of Artificial Sequence: Synthetic oligonucleotide
  Target: SCNA; (+) strand; PAM type: NRG; PAM sequence: AAG
ctccttcttagaatggcacc

SEQ ID NO: 26930 - DNA, 20 bp, Artificial Sequence
  Description of Artificial Sequence: Synthetic oligonucleotide
  Target: SCNA; (+) strand; PAM type: NRG; PAM sequence: CAG
gaatggcaccaagtaaccac

SEQ ID NO: 26931 - DNA, 20 bp, Artificial Sequence
  Description of Artificial Sequence: Synthetic oligonucleotide
  Target: SCNA; (+) strand; PAM type: NRG; PAM sequence: CAG
ccaaacattgctgtgataat

SEQ ID NO: 26932 - DNA, 20 bp, Artificial Sequence
  Description of Artificial Sequence: Synthetic oligonucleotide
  Target: SCNA; (+) strand; PAM type: NRG; PAM sequence: GAG
aaacattgctgtgataatca

SEQ ID NO: 26933 - DNA, 20 bp, Artificial Sequence
  Description of Artificial Sequence: Synthetic oligonucleotide
  Target: SCNA; (+) strand; PAM type: NRG; PAM sequence: CAG
ttgctgtgataatcagagct

SEQ ID NO: 26934 - DNA, 20 bp, Artificial Sequence
  Description of Artificial Sequence: Synthetic oligonucleotide
  Target: SCNA; (+) strand; PAM type: NRG; PAM sequence: CAG
tgataatcagagctcagaat

SEQ ID NO: 26935 - DNA, 20 bp, Artificial Sequence
  Description of Artificial Sequence: Synthetic oligonucleotide
  Target: SCNA; (+) strand; PAM type: NRG; PAM sequence: CAG
tgttaacaatacataattta

SEQ ID NO: 26936 - DNA, 20 bp, Artificial Sequence
  Description of Artificial Sequence: Synthetic oligonucleotide
  Target: SCNA; (+) strand; PAM type: NRG; PAM sequence: CAG
tacataatttacagttcctt

SEQ ID NO: 26937 - DNA, 20 bp, Artificial Sequence
  Description of Artificial Sequence: Synthetic oligonucleotide
  Target: SCNA; (+) strand; PAM type: NRG; PAM sequence: GAG
cataatttacagttccttca

SEQ ID NO: 26938 - DNA, 20 bp, Artificial Sequence
  Description of Artificial Sequence: Synthetic oligonucleotide
  Target: SCNA; (+) strand; PAM type: NRG; PAM sequence: TAG
agatatgtcttcttttgctt

SEQ ID NO: 26939 - DNA, 20 bp, Artificial Sequence
  Description of Artificial Sequence: Synthetic oligonucleotide
  Target: SCNA; (+) strand; PAM type: NRG; PAM sequence: GAG
tgtcttcttttgctttagat

SEQ ID NO: 26940 - DNA, 20 bp, Artificial Sequence
  Description of Artificial Sequence: Synthetic oligonucleotide
  Target: SCNA; (+) strand; PAM type: NRG; PAM sequence: AAG
cttttgctttagatgagatc

SEQ ID NO: 26941 - DNA, 20 bp, Artificial Sequence
  Description of Artificial Sequence: Synthetic oligonucleotide
  Target: SCNA; (+) strand; PAM type: NRG; PAM sequence: TAG
agatgagatcaagaaaattg

SEQ ID NO: 26942 - DNA, 20 bp, Artificial Sequence
  Description of Artificial Sequence: Synthetic oligonucleotide
  Target: SCNA; (+) strand; PAM type: NRG; PAM sequence: AGG
gatgagatcaagaaaattgt

SEQ ID NO: 26943 - DNA, 20 bp, Artificial Sequence
  Description of Artificial Sequence: Synthetic oligonucleotide
  Target: SCNA; (+) strand; PAM type: NRG; PAM sequence: AAG
agatcaagaaaattgtagga

SEQ ID NO: 26944 - DNA, 20 bp, Artificial Sequence
  Description of Artificial Sequence: Synthetic oligonucleotide
  Target: SCNA; (+) strand; PAM type: NRG; PAM sequence: AGG
gatcaagaaaattgtaggaa

SEQ ID NO: 26945 - DNA, 20 bp, Artificial Sequence
  Description of Artificial Sequence: Synthetic oligonucleotide
  Target: SCNA; (+) strand; PAM type: NRG; PAM sequence: CAG
tgtaggaaaggtctttttct

SEQ ID NO: 26946 - DNA, 20 bp, Artificial Sequence
  Description of Artificial Sequence: Synthetic oligonucleotide
  Target: SCNA; (+) strand; PAM type: NRG; PAM sequence: AAG
acccttttgcccatcgatct

SEQ ID NO: 26947 - DNA, 20 bp, Artificial Sequence
  Description of Artificial Sequence: Synthetic oligonucleotide
  Target: SCNA; (+) strand; PAM type: NRG; PAM sequence: AAG
tttgcccatcgatctaagac

SEQ ID NO: 26948 - DNA, 20 bp, Artificial Sequence
  Description of Artificial Sequence: Synthetic oligonucleotide
  Target: SCNA; (+) strand; PAM type: NRG; PAM sequence: TGG
gcccatcgatctaagacaag

SEQ ID NO: 26949 - DNA, 20 bp, Artificial Sequence
  Description of Artificial Sequence: Synthetic oligonucleotide
  Target: SCNA; (+) strand; PAM type: NRG; PAM sequence: TAG
ctaagacaagtggcctaacc

SEQ ID NO: 26950 - DNA, 20 bp, Artificial Sequence
  Description of Artificial Sequence: Synthetic oligonucleotide
  Target: SCNA; (+) strand; PAM type: NRG; PAM sequence: AAG
caagtggcctaacctagcta

SEQ ID NO: 26951 - DNA, 20 bp, Artificial Sequence
  Description of Artificial Sequence: Synthetic oligonucleotide
  Target: SCNA; (+) strand; PAM type: NRG; PAM sequence: AGG
aagtggcctaacctagctaa

SEQ ID NO: 26952 - DNA, 20 bp, Artificial Sequence
  Description of Artificial Sequence: Synthetic oligonucleotide
  Target: SCNA; (+) strand; PAM type: NRG; PAM sequence: TGG
ggcctaacctagctaaagga

SEQ ID NO: 26953 - DNA, 20 bp, Artificial Sequence
  Description of Artificial Sequence: Synthetic oligonucleotide
  Target: SCNA; (+) strand; PAM type: NRG; PAM sequence: CAG
tagctaaaggatggcacaaa

SEQ ID NO: 26954 - DNA, 20 bp, Artificial Sequence
  Description of Artificial Sequence: Synthetic oligonucleotide
  Target: SCNA; (+) strand; PAM type: NRG; PAM sequence: AAG
aaaggatggcacaaacagct

SEQ ID NO: 26955 - DNA, 20 bp, Artificial Sequence
  Description of Artificial Sequence: Synthetic oligonucleotide
  Target: SCNA; (+) strand; PAM type: NRG; PAM sequence: AGG
aaggatggcacaaacagcta

SEQ ID NO: 26956 - DNA, 20 bp, Artificial Sequence
  Description of Artificial Sequence: Synthetic oligonucleotide
  Target: SCNA; (+) strand; PAM type: NRG; PAM sequence: AAG
acaaacagctaaggatgccc

SEQ ID NO: 26957 - DNA, 20 bp, Artificial Sequence
  Description of Artificial Sequence: Synthetic oligonucleotide
  Target: SCNA; (+) strand; PAM type: NRG; PAM sequence: TGG
acagctaaggatgcccaaga

SEQ ID NO: 26958 - DNA, 20 bp, Artificial Sequence
  Description of Artificial Sequence: Synthetic oligonucleotide
  Target: SCNA; (+) strand; PAM type: NRG; PAM sequence: AAG
gatgcccaagatggatttcc

SEQ ID NO: 26959 - DNA, 20 bp, Artificial Sequence
  Description of Artificial Sequence: Synthetic oligonucleotide
  Target: SCNA; (+) strand; PAM type: NRG; PAM sequence: AGG
atgcccaagatggatttcca

SEQ ID NO: 26960 - DNA, 20 bp, Artificial Sequence
  Description of Artificial Sequence: Synthetic oligonucleotide
  Target: SCNA; (+) strand; PAM type: NRG; PAM sequence: AAG
cccaagatggatttccaagg

SEQ ID NO: 26961 - DNA, 20 bp, Artificial Sequence
  Description of Artificial Sequence: Synthetic oligonucleotide
  Target: SCNA; (+) strand; PAM type: NRG; PAM sequence: AAG
ttccaaggaagtttgccaaa

SEQ ID NO: 26962 - DNA, 20 bp, Artificial Sequence
  Description of Artificial Sequence: Synthetic oligonucleotide
  Target: SCNA; (+) strand; PAM type: NRG; PAM sequence: CAG
agtttgccaaaaagacttgc

SEQ ID NO: 26963 - DNA, 20 bp, Artificial Sequence
  Description of Artificial Sequence: Synthetic oligonucleotide
  Target: SCNA; (+) strand; PAM type: NRG; PAM sequence: TGG
agatttctaatcattcaaca

SEQ ID NO: 26964 - DNA, 20 bp, Artificial Sequence
  Description of Artificial Sequence: Synthetic oligonucleotide
  Target: SCNA; (+) strand; PAM type: NRG; PAM sequence: CAG
catggacactccatcttcaa

SEQ ID NO: 26965 - DNA, 20 bp, Artificial Sequence
  Description of Artificial Sequence: Synthetic oligonucleotide
  Target: SCNA; (+) strand; PAM type: NRG; PAM sequence: CAG
ggacactccatcttcaacag

SEQ ID NO: 26966 - DNA, 20 bp, Artificial Sequence
  Description of Artificial Sequence: Synthetic oligonucleotide
  Target: SCNA; (+) strand; PAM type: NRG; PAM sequence: AGG
gacactccatcttcaacagc

SEQ ID NO: 26967 - DNA, 20 bp, Artificial Sequence
  Description of Artificial Sequence: Synthetic oligonucleotide
  Target: SCNA; (+) strand; PAM type: NRG; PAM sequence: GAG
cactccatcttcaacagcag

SEQ ID NO: 26968 - DNA, 20 bp, Artificial Sequence
  Description of Artificial Sequence: Synthetic oligonucleotide
  Target: SCNA; (+) strand; PAM type: NRG; PAM sequence: CAG
ccatcttcaacagcaggagt

SEQ ID NO: 26969 - DNA, 20 bp, Artificial Sequence
  Description of Artificial Sequence: Synthetic oligonucleotide
  Target: SCNA; (+) strand; PAM type: NRG; PAM sequence: TGG
gctgccacattactaatgtt

SEQ ID NO: 26970 - DNA, 20 bp, Artificial Sequence
  Description of Artificial Sequence: Synthetic oligonucleotide
  Target: SCNA; (+) strand; PAM type: NRG; PAM sequence: CAG
gccacattactaatgtttgg

SEQ ID NO: 26971 - DNA, 20 bp, Artificial Sequence
  Description of Artificial Sequence: Synthetic oligonucleotide
  Target: SCNA; (+) strand; PAM type: NRG; PAM sequence: TAG
acttgctttgaccatttcca

SEQ ID NO: 26972 - DNA, 20 bp, Artificial Sequence
  Description of Artificial Sequence: Synthetic oligonucleotide
  Target: SCNA; (+) strand; PAM type: NRG; PAM sequence: GAG
ttgctttgaccatttccata

SEQ ID NO: 26973 - DNA, 20 bp, Artificial Sequence
  Description of Artificial Sequence: Synthetic oligonucleotide
  Target: SCNA; (+) strand; PAM type: NRG; PAM sequence: TGG
tgaccatttccatagagatt

SEQ ID NO: 26974 - DNA, 20 bp, Artificial Sequence
  Description of Artificial Sequence: Synthetic oligonucleotide
  Target: SCNA; (+) strand; PAM type: NRG; PAM sequence: TAG
atgacgccttacacaacacg

SEQ ID NO: 26975 - DNA, 20 bp, Artificial Sequence
  Description of Artificial Sequence: Synthetic oligonucleotide
  Target: SCNA; (+) strand; PAM type: NRG; PAM sequence: TAG
acacaacacgtagtacgttc

SEQ ID NO: 26976 - DNA, 20 bp, Artificial Sequence
  Description of Artificial Sequence: Synthetic oligonucleotide
  Target: SCNA; (+) strand; PAM type: NRG; PAM sequence: GAG
acaacacgtagtacgttcta

SEQ ID NO: 26977 - DNA, 20 bp, Artificial Sequence
  Description of Artificial Sequence: Synthetic oligonucleotide
  Target: SCNA; (+) strand; PAM type: NRG; PAM sequence: AGG
caacacgtagtacgttctag

SEQ ID NO: 26978 - DNA, 20 bp, Artificial Sequence
  Description of Artificial Sequence: Synthetic oligonucleotide
  Target: SCNA; (+) strand; PAM type: NRG; PAM sequence: TAG
gaggctcatctgtccatatt

SEQ ID NO: 26979 - DNA, 20 bp, Artificial Sequence
  Description of Artificial Sequence: Synthetic oligonucleotide
  Target: SCNA; (+) strand; PAM type: NRG; PAM sequence: AAG
gtcttcatttgtttttttac

SEQ ID NO: 26980 - DNA, 20 bp, Artificial Sequence
  Description of Artificial Sequence: Synthetic oligonucleotide
  Target: SCNA; (+) strand; PAM type: NRG; PAM sequence: GAG
cttcatttgtttttttacaa

SEQ ID NO: 26981 - DNA, 20 bp, Artificial Sequence
  Description of Artificial Sequence: Synthetic oligonucleotide
  Target: SCNA; (+) strand; PAM type: NRG; PAM sequence: TAG
tttacaagagttgattttgt

SEQ ID NO: 26982 - DNA, 20 bp, Artificial Sequence
  Description of Artificial Sequence: Synthetic oligonucleotide
  Target: SCNA; (+) strand; PAM type: NRG; PAM sequence: AGG
ttacaagagttgattttgtt

SEQ ID NO: 26983 - DNA, 20 bp, Artificial Sequence
  Description of Artificial Sequence: Synthetic oligonucleotide
  Target: SCNA; (+) strand; PAM type: NRG; PAM sequence: TAG
gttgattttgttaggaaacg

SEQ ID NO: 26984 - DNA, 20 bp, Artificial Sequence
  Description of Artificial Sequence: Synthetic oligonucleotide
  Target: SCNA; (+) strand; PAM type: NRG; PAM sequence: TAG
tttctgctactctcaattcc

SEQ ID NO: 26985 - DNA, 20 bp, Artificial Sequence
  Description of Artificial Sequence: Synthetic oligonucleotide
  Target: SCNA; (+) strand; PAM type: NRG; PAM sequence: AGG
ttctgctactctcaattcct

SEQ ID NO: 26986 - DNA, 20 bp, Artificial Sequence
  Description of Artificial Sequence: Synthetic oligonucleotide
  Target: SCNA; (+) strand; PAM type: NRG; PAM sequence: TAG
tgctactctcaattcctagg

SEQ ID NO: 26987 - DNA, 20 bp, Artificial Sequence
  Description of Artificial Sequence: Synthetic oligonucleotide
  Target: SCNA; (+) strand; PAM type: NRG; PAM sequence: CAG
tcaattcctaggtagtcgta

SEQ ID NO: 26988 - DNA, 20 bp, Artificial Sequence
  Description of Artificial Sequence: Synthetic oligonucleotide
  Target: SCNA; (+) strand; PAM type: NRG; PAM sequence: CAG
ctaggtagtcgtacagtgtc

SEQ ID NO: 26989 - DNA, 20 bp, Artificial Sequence
  Description of Artificial Sequence: Synthetic oligonucleotide
  Target: SCNA; (+) strand; PAM type: NRG; PAM sequence: AAG
ggtagtcgtacagtgtccag

SEQ ID NO: 26990 - DNA, 20 bp, Artificial Sequence
  Description of Artificial Sequence: Synthetic oligonucleotide
  Target: SCNA; (+) strand; PAM type: NRG; PAM sequence: AGG
gtagtcgtacagtgtccaga

SEQ ID NO: 26991 - DNA, 20 bp, Artificial Sequence
  Description of Artificial Sequence: Synthetic oligonucleotide
  Target: SCNA; (+) strand; PAM type: NRG; PAM sequence: AAG
gtacagtgtccagaaggcaa

SEQ ID NO: 26992 - DNA, 20 bp, Artificial Sequence
  Description of Artificial Sequence: Synthetic oligonucleotide
  Target: SCNA; (+) strand; PAM type: NRG; PAM sequence: AGG
tacagtgtccagaaggcaaa

SEQ ID NO: 26993 - DNA, 20 bp, Artificial Sequence
  Description of Artificial Sequence: Synthetic oligonucleotide
  Target: SCNA; (+) strand; PAM type: NRG; PAM sequence: AAG
tgtccagaaggcaaaaggac

SEQ ID NO: 26994 - DNA, 20 bp, Artificial Sequence
  Description of Artificial Sequence: Synthetic oligonucleotide
  Target: SCNA; (+) strand; PAM type: NRG; PAM sequence: CAG
ctactttccacactgctgca

SEQ ID NO: 26995 - DNA, 20 bp, Artificial Sequence
  Description of Artificial Sequence: Synthetic oligonucleotide
  Target: SCNA; (+) strand; PAM type: NRG; PAM sequence: AGG
tactttccacactgctgcac

SEQ ID NO: 26996 - DNA, 20 bp, Artificial Sequence
  Description of Artificial Sequence: Synthetic oligonucleotide
  Target: SCNA; (+) strand; PAM type: NRG; PAM sequence: CAG
tgctgcacaggaaaatctga

SEQ ID NO: 26997 - DNA, 20 bp, Artificial Sequence
  Description of Artificial Sequence: Synthetic oligonucleotide
  Target: SCNA; (+) strand; PAM type: NRG; PAM sequence: GAG
ctgcacaggaaaatctgaca

SEQ ID NO: 26998 - DNA, 20 bp, Artificial Sequence
  Description of Artificial Sequence: Synthetic oligonucleotide
  Target: SCNA; (+) strand; PAM type: NRG; PAM sequence: AGG
tgcacaggaaaatctgacag

SEQ ID NO: 26999 - DNA, 20 bp, Artificial Sequence
  Description of Artificial Sequence: Synthetic oligonucleotide
  Target: SCNA; (+) strand; PAM type: NRG; PAM sequence: CAG
gacaataacaaacatctcac

SEQ ID NO: 27000 - DNA, 20 bp, Artificial Sequence
  Description of Artificial Sequence: Synthetic oligonucleotide
  Target: SCNA; (+) strand; PAM type: NRG; PAM sequence: GAG
tcttttttgatcctaattcc

SEQ ID NO: 27001 - DNA, 20 bp, Artificial Sequence
  Description of Artificial Sequence: Synthetic oligonucleotide
  Target: SCNA; (+) strand; PAM type: NRG; PAM sequence: GAG
ttttttgatcctaattccga

SEQ ID NO: 27002 - DNA, 20 bp, Artificial Sequence
  Description of Artificial Sequence: Synthetic oligonucleotide
  Target: SCNA; (+) strand; PAM type: NRG; PAM sequence: AAG
taattccgagagactcacca

SEQ ID NO: 27003 - DNA, 20 bp, Artificial Sequence
  Description of Artificial Sequence: Synthetic oligonucleotide
  Target: SCNA; (+) strand; PAM type: NRG; PAM sequence: AAG
agagactcaccaaagacatg

SEQ ID NO: 27004 - DNA, 20 bp, Artificial Sequence
  Description of Artificial Sequence: Synthetic oligonucleotide
  Target: SCNA; (+) strand; PAM type: NRG; PAM sequence: GAG
agactcaccaaagacatgaa

SEQ ID NO: 27005 - DNA, 20 bp, Artificial Sequence
  Description of Artificial Sequence: Synthetic oligonucleotide
  Target: SCNA; (+) strand; PAM type: NRG; PAM sequence: TGG
aaaacaaacaatacttttct

SEQ ID NO: 27006 - DNA, 20 bp, Artificial Sequence
  Description of Artificial Sequence: Synthetic oligonucleotide
  Target: SCNA; (+) strand; PAM type: NRG; PAM sequence: TGG
cttggaaatattgtaattgc

SEQ ID NO: 27007 - DNA, 20 bp, Artificial Sequence
  Description of Artificial Sequence: Synthetic oligonucleotide
  Target: SCNA; (+) strand; PAM type: NRG; PAM sequence: TGG
tgctggtacatttgttgttc

SEQ ID NO: 27008 - DNA, 20 bp, Artificial Sequence
  Description of Artificial Sequence: Synthetic oligonucleotide
  Target: SCNA; (+) strand; PAM type: NRG; PAM sequence: AAG
acatttgttgttctggcata

SEQ ID NO: 27009 - DNA, 20 bp, Artificial Sequence
  Description of Artificial Sequence: Synthetic oligonucleotide
  Target: SCNA; (+) strand; PAM type: NRG; PAM sequence: TAG
tttgttgttctggcataaag

SEQ ID NO: 27010 - DNA, 20 bp, Artificial Sequence
  Description of Artificial Sequence: Synthetic oligonucleotide
  Target: SCNA; (+) strand; PAM type: NRG; PAM sequence: CAG
tggcataaagtagaaattgt

SEQ ID NO: 27011 - DNA, 20 bp, Artificial Sequence
  Description of Artificial Sequence: Synthetic oligonucleotide
  Target: SCNA; (+) strand; PAM type: NRG; PAM sequence: AGG
ggcataaagtagaaattgtc

SEQ ID NO: 27012 - DNA, 20 bp, Artificial Sequence
  Description of Artificial Sequence: Synthetic oligonucleotide
  Target: SCNA; (+) strand; PAM type: NRG; PAM sequence: TGG
aggtaaacattgcttccttt

SEQ ID NO: 27013 - DNA, 20 bp, Artificial Sequence
  Description of Artificial Sequence: Synthetic oligonucleotide
  Target: SCNA; (+) strand; PAM type: NRG; PAM sequence: AAG
ttgcttccttttggatcaaa

SEQ ID NO: 27014 - DNA, 20 bp, Artificial Sequence
  Description of Artificial Sequence: Synthetic oligonucleotide
  Target: SCNA; (+) strand; PAM type: NRG; PAM sequence: AAG
aaatttaaccaaataaatgc

SEQ ID NO: 27015 - DNA, 20 bp, Artificial Sequence
  Description of Artificial Sequence: Synthetic oligonucleotide
  Target: SCNA; (+) strand; PAM type: NRG; PAM sequence: GAG
atttaaccaaataaatgcaa

SEQ ID NO: 27016 - DNA, 20 bp, Artificial Sequence
  Description of Artificial Sequence: Synthetic oligonucleotide
  Target: SCNA; (+) strand; PAM type: NRG; PAM sequence: AGG
tttaaccaaataaatgcaag

SEQ ID NO: 27017 - DNA, 20 bp, Artificial Sequence
  Description of Artificial Sequence: Synthetic oligonucleotide
  Target: SCNA; (+) strand; PAM type: NRG; PAM sequence: GAG
caaataaatgcaagaggtat

SEQ ID NO: 27018 - DNA, 20 bp, Artificial Sequence
  Description of Artificial Sequence: Synthetic oligonucleotide
  Target: SCNA; (+) strand; PAM type: NRG; PAM sequence: AGG
aaataaatgcaagaggtatg

SEQ ID NO: 27019 - DNA, 20 bp, Artificial Sequence
  Description of Artificial Sequence: Synthetic oligonucleotide
  Target: SCNA; (+) strand; PAM type: NRG; PAM sequence: GGG
aataaatgcaagaggtatga

SEQ ID NO: 27020 - DNA, 20 bp, Artificial Sequence
  Description of Artificial Sequence: Synthetic oligonucleotide
  Target: SCNA; (+) strand; PAM type: NRG; PAM sequence: AAG
aaatgcaagaggtatgaggg

SEQ ID NO: 27021 - DNA, 20 bp, Artificial Sequence
  Description of Artificial Sequence: Synthetic oligonucleotide
  Target: SCNA; (+) strand; PAM type: NRG; PAM sequence: TGG
agaggtatgagggaagataa

SEQ ID NO: 27022 - DNA, 20 bp, Artificial Sequence
  Description of Artificial Sequence: Synthetic oligonucleotide
  Target: SCNA; (+) strand; PAM type: NRG; PAM sequence: GGG
gaggtatgagggaagataat

SEQ ID NO: 27023 - DNA, 20 bp, Artificial Sequence
  Description of Artificial Sequence: Synthetic oligonucleotide
  Target: SCNA; (+) strand; PAM type: NRG; PAM sequence: GAG
gaagataatgggaaataaat

SEQ ID NO: 27024 - DNA, 20 bp, Artificial Sequence
  Description of Artificial Sequence: Synthetic oligonucleotide
  Target: SCNA; (+) strand; PAM type: NRG; PAM sequence: GAG
atgggaaataaatgagattt

SEQ ID NO: 27025 - DNA, 20 bp, Artificial Sequence
  Description of Artificial Sequence: Synthetic oligonucleotide
  Target: SCNA; (+) strand; PAM type: NRG; PAM sequence: CAG
ataaatgagatttgagaaat

SEQ ID NO: 27026 - DNA, 20 bp, Artificial Sequence
  Description of Artificial Sequence: Synthetic oligonucleotide
  Target: SCNA; (+) strand; PAM type: NRG; PAM sequence: TGG
aatgagatttgagaaatcag

SEQ ID NO: 27027 - DNA, 20 bp, Artificial Sequence
  Description of Artificial Sequence: Synthetic oligonucleotide
  Target: SCNA; (+) strand; PAM type: NRG; PAM sequence: GAG
tgagatttgagaaatcagtg

SEQ ID NO: 27028 - DNA, 20 bp, Artificial Sequence
  Description of Artificial Sequence: Synthetic oligonucleotide
  Target: SCNA; (+) strand; PAM type: NRG; PAM sequence: AGG
gagatttgagaaatcagtgg

SEQ ID NO: 27029 - DNA, 20 bp, Artificial Sequence
  Description of Artificial Sequence: Synthetic oligonucleotide
  Target: SCNA; (+) strand; PAM type: NRG; PAM sequence: AAG
tgagaaatcagtggaggttc

SEQ ID NO: 27030 - DNA, 20 bp, Artificial Sequence
  Description of Artificial Sequence: Synthetic oligonucleotide
  Target: SCNA; (+) strand; PAM type: NRG; PAM sequence: TGG
gaaatcagtggaggttcaag

SEQ ID NO: 27031 - DNA, 20 bp, Artificial Sequence
  Description of Artificial Sequence: Synthetic oligonucleotide
  Target: SCNA; (+) strand; PAM type: NRG; PAM sequence: TAG
gtggttttttttttcttttg

SEQ ID NO: 27032 - DNA, 20 bp, Artificial Sequence
  Description of Artificial Sequence: Synthetic oligonucleotide
  Target: SCNA; (+) strand; PAM type: NRG; PAM sequence: CAG
gataatactctgttttaaat

SEQ ID NO: 27033 - DNA, 20 bp, Artificial Sequence
  Description of Artificial Sequence: Synthetic oligonucleotide
  Target: SCNA; (+) strand; PAM type: NRG; PAM sequence: GAG
atactctgttttaaatcagt

SEQ ID NO: 27034 - DNA, 20 bp, Artificial Sequence
  Description of Artificial Sequence: Synthetic oligonucleotide
  Target: SCNA; (+) strand; PAM type: NRG; PAM sequence: TAG
tgcttgtccttttttttttc

SEQ ID NO: 27035 - DNA, 20 bp, Artificial Sequence
  Description of Artificial Sequence: Synthetic oligonucleotide
  Target: SCNA; (+) strand; PAM type: NRG; PAM sequence: CAG
ccttttttttttctagttac

SEQ ID NO: 27036 - DNA, 20 bp, Artificial Sequence
  Description of Artificial Sequence: Synthetic oligonucleotide
  Target: SCNA; (+) strand; PAM type: NRG; PAM sequence: CAG
ctagttaccagaacaatact

SEQ ID NO: 27037 - DNA, 20 bp, Artificial Sequence
  Description of Artificial Sequence: Synthetic oligonucleotide
  Target: SCNA; (+) strand; PAM type: NRG; PAM sequence: TGG
tcagtgaacttatgaatata

SEQ ID NO: 27038 - DNA, 20 bp, Artificial Sequence
  Description of Artificial Sequence: Synthetic oligonucleotide
  Target: SCNA; (+) strand; PAM type: NRG; PAM sequence: TGG
aatattaaacacatcccact

SEQ ID NO: 27039 - DNA, 20 bp, Artificial Sequence
  Description of Artificial Sequence: Synthetic oligonucleotide
  Target: SCNA; (+) strand; PAM type: NRG; PAM sequence: GAG
taaacacatcccacttggat

SEQ ID NO: 27040 - DNA, 20 bp, Artificial Sequence
  Description of Artificial Sequence: Synthetic oligonucleotide
  Target: SCNA; (+) strand; PAM type: NRG; PAM sequence: AAG
acacatcccacttggatgag

SEQ ID NO: 27041 - DNA, 20 bp, Artificial Sequence
  Description of Artificial Sequence: Synthetic oligonucleotide
  Target: SCNA; (+) strand; PAM type: NRG; PAM sequence: GAG
acttggatgagaagatatgt

SEQ ID NO: 27042 - DNA, 20 bp, Artificial Sequence
  Description of Artificial Sequence: Synthetic oligonucleotide
  Target: SCNA; (+) strand; PAM type: NRG; PAM sequence: GAG
gagaagatatgtgagtcgat

SEQ ID NO: 27043 - DNA, 20 bp, Artificial Sequence
  Description of Artificial Sequence: Synthetic oligonucleotide
  Target: SCNA; (+) strand; PAM type: NRG; PAM sequence: TAG
gatatgtgagtcgatgagta

SEQ ID NO: 27044 - DNA, 20 bp, Artificial Sequence
  Description of Artificial Sequence: Synthetic oligonucleotide
  Target: SCNA; (+) strand; PAM type: NRG; PAM sequence: AAG
gtgagtcgatgagtatagct

SEQ ID NO: 27045 - DNA, 20 bp, Artificial Sequence
  Description of Artificial Sequence: Synthetic oligonucleotide
  Target: SCNA; (+) strand; PAM type: NRG; PAM sequence: AAG
gatgagtatagctaagtcta

SEQ ID NO: 27046 - DNA, 20 bp, Artificial Sequence
  Description of Artificial Sequence: Synthetic oligonucleotide
  Target: SCNA; (+) strand; PAM type: NRG; PAM sequence: TAG
agtatagctaagtctaaagt

SEQ ID NO: 27047 - DNA, 20 bp, Artificial Sequence
  Description of Artificial Sequence: Synthetic oligonucleotide
  Target: SCNA; (+) strand; PAM type: NRG; PAM sequence: TAG
ttagatgtgttccataaaca

SEQ ID NO: 27048 - DNA, 20 bp, Artificial Sequence
  Description of Artificial Sequence: Synthetic oligonucleotide
  Target: SCNA; (+) strand; PAM type: NRG; PAM sequence: TGG
ttccataaacatagtgttta

SEQ ID NO: 27049 - DNA, 20 bp, Artificial Sequence
  Description of Artificial Sequence: Synthetic oligonucleotide
  Target: SCNA; (+) strand; PAM type: NRG; PAM sequence: GAG
ccataaacatagtgtttatg

SEQ ID NO: 27050 - DNA, 20 bp, Artificial Sequence
  Description of Artificial Sequence: Synthetic oligonucleotide
  Target: SCNA; (+) strand; PAM type: NRG; PAM sequence: TGG
aaacatagtgtttatggagt

SEQ ID NO: 27051 - DNA, 20 bp, Artificial Sequence
  Description of Artificial Sequence: Synthetic oligonucleotide
  Target: SCNA; (+) strand; PAM type: NRG; PAM sequence: CAG
gttggtgcatattcacttct

SEQ ID NO: 27052 - DNA, 20 bp, Artificial Sequence
  Description of Artificial Sequence: Synthetic oligonucleotide
  Target: SCNA; (+) strand; PAM type: NRG; PAM sequence: AAG
gtgcatattcacttctcagt

SEQ ID NO: 27053 - DNA, 20 bp, Artificial Sequence
  Description of Artificial Sequence: Synthetic oligonucleotide
  Target: SCNA; (+) strand; PAM type: NRG; PAM sequence: TGG
acactttcttaatttctttt

SEQ ID NO: 27054 - DNA, 20 bp, Artificial Sequence
  Description of Artificial Sequence: Synthetic oligonucleotide
  Target: SCNA; (+) strand; PAM type: NRG; PAM sequence: TAG
tcttaatttctttttggtgc

SEQ ID NO: 27055 - DNA, 20 bp, Artificial Sequence
  Description of Artificial Sequence: Synthetic oligonucleotide
  Target: SCNA; (+) strand; PAM type: NRG; PAM sequence: AGG
cttaatttctttttggtgct

SEQ ID NO: 27056 - DNA, 20 bp, Artificial Sequence
  Description of Artificial Sequence: Synthetic oligonucleotide
  Target: SCNA; (+) strand; PAM type: NRG; PAM sequence: AAG
gtgctaggtgatattctgct

SEQ ID NO: 27057 - DNA, 20 bp, Artificial Sequence
  Description of Artificial Sequence: Synthetic oligonucleotide
  Target: SCNA; (+) strand; PAM type: NRG; PAM sequence: AAG
atattctgctaagtacacat

SEQ ID NO: 27058 - DNA, 20 bp, Artificial Sequence
  Description of Artificial Sequence: Synthetic oligonucleotide
  Target: SCNA; (+) strand; PAM type: NRG; PAM sequence: TAG
ctgctaagtacacataagta

SEQ ID NO: 27059 - DNA, 20 bp, Artificial Sequence
  Description of Artificial Sequence: Synthetic oligonucleotide
  Target: SCNA; (+) strand; PAM type: NRG; PAM sequence: TGG
acacataagtatagtaatat

SEQ ID NO: 27060 - DNA, 20 bp, Artificial Sequence
  Description of Artificial Sequence: Synthetic oligonucleotide
  Target: SCNA; (+) strand; PAM type: NRG; PAM sequence: TAG
ataagtatagtaatattggt

SEQ ID NO: 27061 - DNA, 20 bp, Artificial Sequence
  Description of Artificial Sequence: Synthetic oligonucleotide
  Target: SCNA; (+) strand; PAM type: NRG; PAM sequence: TAG
agtaatattggttagtaaac

SEQ ID NO: 27062 - DNA, 20 bp, Artificial Sequence
  Description of Artificial Sequence: Synthetic oligonucleotide
  Target: SCNA; (+) strand; PAM type: NRG; PAM sequence: TAG
aaactagtaaaatgctcccc

SEQ ID NO: 27063 - DNA, 20 bp, Artificial Sequence
  Description of Artificial Sequence: Synthetic oligonucleotide
  Target: SCNA; (+) strand; PAM type: NRG; PAM sequence: TAG
taaaatgctcccctagctat

SEQ ID NO: 27064 - DNA, 20 bp, Artificial Sequence
  Description of Artificial Sequence: Synthetic oligonucleotide
  Target: SCNA; (+) strand; PAM type: NRG; PAM sequence: TAG
ctcccctagctattagtaaa

SEQ ID NO: 27065 - DNA, 20 bp, Artificial Sequence
  Description of Artificial Sequence: Synthetic oligonucleotide
  Target: SCNA; (+) strand; PAM type: NRG; PAM sequence: AAG
tgattgctattttatattaa

SEQ ID NO: 27066 - DNA, 20 bp, Artificial Sequence
  Description of Artificial Sequence: Synthetic oligonucleotide
  Target: SCNA; (+) strand; PAM type: NRG; PAM sequence: AAG
ttgctattttatattaaaag

SEQ ID NO: 27067 - DNA, 20 bp, Artificial Sequence
  Description of Artificial Sequence: Synthetic oligonucleotide
  Target: SCNA; (+) strand; PAM type: NRG; PAM sequence: CAG
cttatttacctttaaaaata

SEQ ID NO: 27068 - DNA, 20 bp, Artificial Sequence
  Description of Artificial Sequence: Synthetic oligonucleotide
  Target: SCNA; (+) strand; PAM type: NRG; PAM sequence: TAG
aaaaatacagtgtgctgtac

SEQ ID NO: 27069 - DNA, 20 bp, Artificial Sequence
  Description of Artificial Sequence: Synthetic oligonucleotide
  Target: SCNA; (+) strand; PAM type: NRG; PAM sequence: TAG
ctagtactactactaataaa

SEQ ID NO: 27070 - DNA, 20 bp, Artificial Sequence
  Description of Artificial Sequence: Synthetic oligonucleotide
  Target: SCNA; (+) strand; PAM type: NRG; PAM sequence: TAG
taaatagcatcattgactca

SEQ ID NO: 27071 - DNA, 20 bp, Artificial Sequence
  Description of Artificial Sequence: Synthetic oligonucleotide
  Target: SCNA; (+) strand; PAM type: NRG; PAM sequence: CAG
actcatagatcacttactat

SEQ ID NO: 27072 - DNA, 20 bp, Artificial Sequence
  Description of Artificial Sequence: Synthetic oligonucleotide
  Target: SCNA; (+) strand; PAM type: NRG; PAM sequence: CAG
atagatcacttactatcagc

SEQ ID NO: 27073 - DNA, 20 bp, Artificial Sequence
  Description of Artificial Sequence: Synthetic oligonucleotide
  Target: SCNA; (+) strand; PAM type: NRG; PAM sequence: AGG
tagatcacttactatcagcc

SEQ ID NO: 27074 - DNA, 20 bp, Artificial Sequence
  Description of Artificial Sequence: Synthetic oligonucleotide
  Target: SCNA; (+) strand; PAM type: NRG; PAM sequence: CAG
atcacttactatcagccagg

SEQ ID NO: 27075 - DNA, 20 bp, Artificial Sequence
  Description of Artificial Sequence: Synthetic oligonucleotide
  Target: SCNA; (+) strand; PAM type: NRG; PAM sequence: AAG
actatcagccaggcagtcct

SEQ ID NO: 27076 - DNA, 20 bp, Artificial Sequence
  Description of Artificial Sequence: Synthetic oligonucleotide
  Target: SCNA; (+) strand; PAM type: NRG; PAM sequence: GAG
aatgcatgcaacaatgctat

SEQ ID NO: 27077 - DNA, 20 bp, Artificial Sequence
  Description of Artificial Sequence: Synthetic oligonucleotide
  Target: SCNA; (+) strand; PAM type: NRG; PAM sequence: AGG
atgcatgcaacaatgctatg

SEQ ID NO: 27078 - DNA, 20 bp, Artificial Sequence
  Description of Artificial Sequence: Synthetic oligonucleotide
  Target: SCNA; (+) strand; PAM type: NRG; PAM sequence: AAG
tcatttgcatatttacatat

SEQ ID NO: 27079 - DNA, 20 bp, Artificial Sequence
  Description of Artificial Sequence: Synthetic oligonucleotide
  Target: SCNA; (+) strand; PAM type: NRG; PAM sequence: AGG
catttgcatatttacatata

SEQ ID NO: 27080 - DNA, 20 bp, Artificial Sequence
  Description of Artificial Sequence: Synthetic oligonucleotide
  Target: SCNA; (+) strand; PAM type: NRG; PAM sequence: CAG
catatttacatataaggaaa

SEQ ID NO: 27081 - DNA, 20 bp, Artificial Sequence
  Description of Artificial Sequence: Synthetic oligonucleotide
  Target: SCNA; (+) strand; PAM type: NRG; PAM sequence: GAG
tatttacatataaggaaaca

SEQ ID NO: 27082 - DNA, 20 bp, Artificial Sequence
  Description of Artificial Sequence: Synthetic oligonucleotide
  Target: SCNA; (+) strand; PAM type: NRG; PAM sequence: AAG
gaaacagagacactaatatt

SEQ ID NO: 27083 - DNA, 20 bp, Artificial Sequence
  Description of Artificial Sequence: Synthetic oligonucleotide
  Target: SCNA; (+) strand; PAM type: NRG; PAM sequence: TAG
acagagacactaatattaag

SEQ ID NO: 27084 - DNA, 20 bp, Artificial Sequence
  Description of Artificial Sequence: Synthetic oligonucleotide
  Target: SCNA; (+) strand; PAM type: NRG; PAM sequence: AAG
agacactaatattaagtagt

SEQ ID NO: 27085 - DNA, 20 bp, Artificial Sequence
  Description of Artificial Sequence: Synthetic oligonucleotide
  Target: SCNA; (+) strand; PAM type: NRG; PAM sequence: GAG
acactaatattaagtagtaa

SEQ ID NO: 27086 - DNA, 20 bp, Artificial Sequence
  Description of Artificial Sequence: Synthetic oligonucleotide
  Target: SCNA; (+) strand; PAM type: NRG; PAM sequence: TGG
taagtagtaagagacataaa

SEQ ID NO: 27087 - DNA, 20 bp, Artificial Sequence
  Description of Artificial Sequence: Synthetic oligonucleotide
  Target: SCNA; (+) strand; PAM type: NRG; PAM sequence: GGG
aagtagtaagagacataaat

SEQ ID NO: 27088 - DNA, 20 bp, Artificial Sequence
  Description of Artificial Sequence: Synthetic oligonucleotide
  Target: SCNA; (+) strand; PAM type: NRG; PAM sequence: GAG
gtagtaagagacataaatgg

SEQ ID NO: 27089 - DNA, 20 bp, Artificial Sequence
  Description of Artificial Sequence: Synthetic oligonucleotide
  Target: SCNA; (+) strand; PAM type: NRG; PAM sequence: AAG
agagacataaatgggagtcg

SEQ ID NO: 27090 - DNA, 20 bp, Artificial Sequence
  Description of Artificial Sequence: Synthetic oligonucleotide
  Target: SCNA; (+) strand; PAM type: NRG; PAM sequence: TAG
aaatgggagtcgaagttcca

SEQ ID NO: 27091 - DNA, 20 bp, Artificial Sequence
  Description of Artificial Sequence: Synthetic oligonucleotide
  Target: SCNA; (+) strand; PAM type: NRG; PAM sequence: TAG
gaagttccatagtctattaa

SEQ ID NO: 27092 - DNA, 20 bp, Artificial Sequence
  Description of Artificial Sequence: Synthetic oligonucleotide
  Target: SCNA; (+) strand; PAM type: NRG; PAM sequence: TGG
ccatagtctattaatagttt

SEQ ID NO: 27093 - DNA, 20 bp, Artificial Sequence
  Description of Artificial Sequence: Synthetic oligonucleotide
  Target: SCNA; (+) strand; PAM type: NRG; PAM sequence: GAG
atagtctattaatagttttg

SEQ ID NO: 27094 - DNA, 20 bp, Artificial Sequence
  Description of Artificial Sequence: Synthetic oligonucleotide
  Target: SCNA; (+) strand; PAM type: NRG; PAM sequence: CAG
ctattaatagttttggagtt

SEQ ID NO: 27095 - DNA, 20 bp, Artificial Sequence
  Description of Artificial Sequence: Synthetic oligonucleotide
  Target: SCNA; (+) strand; PAM type: NRG; PAM sequence: AGG
tattaatagttttggagttc

SEQ ID NO: 27096 - DNA, 20 bp, Artificial Sequence
  Description of Artificial Sequence: Synthetic oligonucleotide
  Target: SCNA; (+) strand; PAM type: NRG; PAM sequence: TAG
aatagttttggagttcagga

SEQ ID NO: 27097 - DNA, 20 bp, Artificial Sequence
  Description of Artificial Sequence: Synthetic oligonucleotide
  Target: SCNA; (+) strand; PAM type: NRG; PAM sequence: AAG
ttactctaacctacctcatt

SEQ ID NO: 27098 - DNA, 20 bp, Artificial Sequence
  Description of Artificial Sequence: Synthetic oligonucleotide
  Target: SCNA; (+) strand; PAM type: NRG; PAM sequence: CAG
ctctaacctacctcattaag

SEQ ID NO: 27099 - DNA, 20 bp, Artificial Sequence
  Description of Artificial Sequence: Synthetic oligonucleotide
  Target: SCNA; (+) strand; PAM type: NRG; PAM sequence: TAG
agcagcatccttgactattc

SEQ ID NO: 27100 - DNA, 20 bp, Artificial Sequence
  Description of Artificial Sequence: Synthetic oligonucleotide
  Target: SCNA; (+) strand; PAM type: NRG; PAM sequence: AGG
gcagcatccttgactattct

SEQ ID NO: 27101 - DNA, 20 bp, Artificial Sequence
  Description of Artificial Sequence: Synthetic oligonucleotide
  Target: SCNA; (+) strand; PAM type: NRG; PAM sequence: AAG
atccttgactattctaggta

SEQ ID NO: 27102 - DNA, 20 bp, Artificial Sequence
  Description of Artificial Sequence: Synthetic oligonucleotide
  Target: SCNA; (+) strand; PAM type: NRG; PAM sequence: GAG
ccttgactattctaggtaaa

SEQ ID NO: 27103 - DNA, 20 bp, Artificial Sequence
  Description of Artificial Sequence: Synthetic oligonucleotide
  Target: SCNA; (+) strand; PAM type: NRG; PAM sequence: AAG
agagtattgtattcttttct

SEQ ID NO: 27104 - DNA, 20 bp, Artificial Sequence
  Description of Artificial Sequence: Synthetic oligonucleotide
  Target: SCNA; (+) strand; PAM type: NRG; PAM sequence: TGG
gacttgctactatatttgtt

SEQ ID NO: 27105 - DNA, 20 bp, Artificial Sequence
  Description of Artificial Sequence: Synthetic oligonucleotide
  Target: SCNA; (+) strand; PAM type: NRG; PAM sequence: CAG
ctactatatttgtttggatt

SEQ ID NO: 27106 - DNA, 20 bp, Artificial Sequence
  Description of Artificial Sequence: Synthetic oligonucleotide
  Target: SCNA; (+) strand; PAM type: NRG; PAM sequence: TGG
ttgtttggattcagctttac

SEQ ID NO: 27107 - DNA, 20 bp, Artificial Sequence
  Description of Artificial Sequence: Synthetic oligonucleotide
  Target: SCNA; (+) strand; PAM type: NRG; PAM sequence: CAG
gattcagctttactggaaca

SEQ ID NO: 27108 - DNA, 20 bp, Artificial Sequence
  Description of Artificial Sequence: Synthetic oligonucleotide
  Target: SCNA; (+) strand; PAM type: NRG; PAM sequence: TAG
agctttactggaacacagct

SEQ ID NO: 27109 - DNA, 20 bp, Artificial Sequence
  Description of Artificial Sequence: Synthetic oligonucleotide
  Target: SCNA; (+) strand; PAM type: NRG; PAM sequence: CAG
cagcttagctttgacattta

SEQ ID NO: 27110 - DNA, 20 bp, Artificial Sequence
  Description of Artificial Sequence: Synthetic oligonucleotide
  Target: SCNA; (+) strand; PAM type: NRG; PAM sequence: TGG
agctttgacatttacagaca

SEQ ID NO: 27111 - DNA, 20 bp, Artificial Sequence
  Description of Artificial Sequence: Synthetic oligonucleotide
  Target: SCNA; (+) strand; PAM type: NRG; PAM sequence: GGG
gctttgacatttacagacat

SEQ ID NO: 27112 - DNA, 20 bp, Artificial Sequence
  Description of Artificial Sequence: Synthetic oligonucleotide
  Target: SCNA; (+) strand; PAM type: NRG; PAM sequence: TAG
tgacatttacagacatgggt

SEQ ID NO: 27113 - DNA, 20 bp, Artificial Sequence
  Description of Artificial Sequence: Synthetic oligonucleotide
  Target: SCNA; (+) strand; PAM type: NRG; PAM sequence: AGG
gacatttacagacatgggtt

SEQ ID NO: 27114 - DNA, 20 bp, Artificial Sequence
  Description of Artificial Sequence: Synthetic oligonucleotide
  Target: SCNA; (+) strand; PAM type: NRG; PAM sequence: AAG
gttaggtttcattttgttgc

SEQ ID NO: 27115 - DNA, 20 bp, Artificial Sequence
  Description of Artificial Sequence: Synthetic oligonucleotide
  Target: SCNA; (+) strand; PAM type: NRG; PAM sequence: AAG
ttcattttgttgcaagataa

SEQ ID NO: 27116 - DNA, 20 bp, Artificial Sequence
  Description of Artificial Sequence: Synthetic oligonucleotide
  Target: SCNA; (+) strand; PAM type: NRG; PAM sequence: AGG
tcattttgttgcaagataaa

SEQ ID NO: 27117 - DNA, 20 bp, Artificial Sequence
  Description of Artificial Sequence: Synthetic oligonucleotide
  Target: SCNA; (+) strand; PAM type: NRG; PAM sequence: TAG
ataaaaggcaatctgatatt

SEQ ID NO: 27118 - DNA, 20 bp, Artificial Sequence
  Description of Artificial Sequence: Synthetic oligonucleotide
  Target: SCNA; (+) strand; PAM type: NRG; PAM sequence: AAG
gatatttagtttacctgcaa

SEQ ID NO: 27119 - DNA, 20 bp, Artificial Sequence
  Description of Artificial Sequence: Synthetic oligonucleotide
  Target: SCNA; (+) strand; PAM type: NRG; PAM sequence: AGG
atatttagtttacctgcaaa

SEQ ID NO: 27120 - DNA, 20 bp, Artificial Sequence
  Description of Artificial Sequence: Synthetic oligonucleotide
  Target: SCNA; (+) strand; PAM type: NRG; PAM sequence: CAG
tttagtttacctgcaaaagg

SEQ ID NO: 27121 - DNA, 20 bp, Artificial Sequence
  Description of Artificial Sequence: Synthetic oligonucleotide
  Target: SCNA; (+) strand; PAM type: NRG; PAM sequence: TAG
gtttacctgcaaaaggcagt

SEQ ID NO: 27122 - DNA, 20 bp, Artificial Sequence
  Description of Artificial Sequence: Synthetic oligonucleotide
  Target: SCNA; (+) strand; PAM type: NRG; PAM sequence: AGG
tttacctgcaaaaggcagtt

SEQ ID NO: 27123 - DNA, 20 bp, Artificial Sequence
  Description of Artificial Sequence: Synthetic oligonucleotide
  Target: SCNA; (+) strand; PAM type: NRG; PAM sequence: AAG
acctgcaaaaggcagttagg

SEQ ID NO: 27124 - DNA, 20 bp, Artificial Sequence
  Description of Artificial Sequence: Synthetic oligonucleotide
  Target: SCNA; (+) strand; PAM type: NRG; PAM sequence: TAG
aaaaggcagttaggaagccc

SEQ ID NO: 27125 - DNA, 20 bp, Artificial Sequence
  Description of Artificial Sequence: Synthetic oligonucleotide
  Target: SCNA; (+) strand; PAM type: NRG; PAM sequence: GAG
aaggcagttaggaagcccta

SEQ ID NO: 27126 - DNA, 20 bp, Artificial Sequence
  Description of Artificial Sequence: Synthetic oligonucleotide
  Target: SCNA; (+) strand; PAM type: NRG; PAM sequence: AGG
aggcagttaggaagccctag

SEQ ID NO: 27127 - DNA, 20 bp, Artificial Sequence
  Description of Artificial Sequence: Synthetic oligonucleotide
  Target: SCNA; (+) strand; PAM type: NRG; PAM sequence: CAG
agaggaacctaattaaaatg

SEQ ID NO: 27128 - DNA, 20 bp, Artificial Sequence
  Description of Artificial Sequence: Synthetic oligonucleotide
  Target: SCNA; (+) strand; PAM type: NRG; PAM sequence: AAG
ttaaaatgcagcacatttcc

SEQ ID NO: 27129 - DNA, 20 bp, Artificial Sequence
  Description of Artificial Sequence: Synthetic oligonucleotide
  Target: SCNA; (+) strand; PAM type: NRG; PAM sequence: AGG
taaaatgcagcacatttcca

SEQ ID NO: 27130 - DNA, 20 bp, Artificial Sequence
  Description of Artificial Sequence: Synthetic oligonucleotide
  Target: SCNA; (+) strand; PAM type: NRG; PAM sequence: TAG
catatcttgctgtgttgcca

SEQ ID NO: 27131 - DNA, 20 bp, Artificial Sequence
  Description of Artificial Sequence: Synthetic oligonucleotide
  Target: SCNA; (+) strand; PAM type: NRG; PAM sequence: GAG
tgtgttgccatagaaacaac

SEQ ID NO: 27132 - DNA, 20 bp, Artificial Sequence
  Description of Artificial Sequence: Synthetic oligonucleotide
  Target: SCNA; (+) strand; PAM type: NRG; PAM sequence: AGG
gtgttgccatagaaacaacg

SEQ ID NO: 27133 - DNA, 20 bp, Artificial Sequence
  Description of Artificial Sequence: Synthetic oligonucleotide
  Target: SCNA; (+) strand; PAM type: NRG; PAM sequence: TGG
atagaaacaacgaggatttc

SEQ ID NO: 27134 - DNA, 20 bp, Artificial Sequence
  Description of Artificial Sequence: Synthetic oligonucleotide
  Target: SCNA; (+) strand; PAM type: NRG; PAM sequence: CAG
atttctggtcactgaccttc

SEQ ID NO: 27135 - DNA, 20 bp, Artificial Sequence
  Description of Artificial Sequence: Synthetic oligonucleotide
  Target: SCNA; (+) strand; PAM type: NRG; PAM sequence: AGG
tttctggtcactgaccttcc

SEQ ID NO: 27136 - DNA, 20 bp, Artificial Sequence
  Description of Artificial Sequence: Synthetic oligonucleotide
  Target: SCNA; (+) strand; PAM type: NRG; PAM sequence: GGG
ttctggtcactgaccttcca

SEQ ID NO: 27137 - DNA, 20 bp, Artificial Sequence
  Description of Artificial Sequence: Synthetic oligonucleotide
  Target: SCNA; (+) strand; PAM type: NRG; PAM sequence: GAG
actgaccttccagggaatct

SEQ ID NO: 27138 - DNA, 20 bp, Artificial Sequence
  Description of Artificial Sequence: Synthetic oligonucleotide
  Target: SCNA; (+) strand; PAM type: NRG; PAM sequence: AGG
ctgaccttccagggaatctg

SEQ ID NO: 27139 - DNA, 20 bp, Artificial Sequence
  Description of Artificial Sequence: Synthetic oligonucleotide
  Target: SCNA; (+) strand; PAM type: NRG; PAM sequence: AAG
atctgaggatgtattttcat

SEQ ID NO: 27140 - DNA, 20 bp, Artificial Sequence
  Description of Artificial Sequence: Synthetic oligonucleotide
  Target: SCNA; (+) strand; PAM type: NRG; PAM sequence: AGG
tctgaggatgtattttcata

SEQ ID NO: 27141 - DNA, 20 bp, Artificial Sequence
  Description of Artificial Sequence: Synthetic oligonucleotide
  Target: SCNA; (+) strand; PAM type: NRG; PAM sequence: AAG
tgtattttcataaggttcat

SEQ ID NO: 27142 - DNA, 20 bp, Artificial Sequence
  Description of Artificial Sequence: Synthetic oligonucleotide
  Target: SCNA; (+) strand; PAM type: NRG; PAM sequence: GAG
tattttcataaggttcataa

SEQ ID NO: 27143 - DNA, 20 bp, Artificial Sequence
  Description of Artificial Sequence: Synthetic oligonucleotide
  Target: SCNA; (+) strand; PAM type: NRG; PAM sequence: AAG
tttcataaggttcataagag

SEQ ID NO: 27144 - DNA, 20 bp, Artificial Sequence
  Description of Artificial Sequence: Synthetic oligonucleotide
  Target: SCNA; (+) strand; PAM type: NRG; PAM sequence: TAG
gttcataagagaagccatcc

SEQ ID NO: 27145 - DNA, 20 bp, Artificial Sequence
  Description of Artificial Sequence: Synthetic oligonucleotide
  Target: SCNA; (+) strand; PAM type: NRG; PAM sequence: TAG
catcctagtatgttaaccta

SEQ ID NO: 27146 - DNA, 20 bp, Artificial Sequence
  Description of Artificial Sequence: Synthetic oligonucleotide
  Target: SCNA; (+) strand; PAM type: NRG; PAM sequence: CAG
agtatgttaacctatagttg

SEQ ID NO: 27147 - DNA, 20 bp, Artificial Sequence
  Description of Artificial Sequence: Synthetic oligonucleotide
  Target: SCNA; (+) strand; PAM type: NRG; PAM sequence: TGG
tgcagatcaactatacgtta

SEQ ID NO: 27148 - DNA, 20 bp, Artificial Sequence
  Description of Artificial Sequence: Synthetic oligonucleotide
  Target: SCNA; (+) strand; PAM type: NRG; PAM sequence: TAG
ggaaattccctatgcaattc

SEQ ID NO: 27149 - DNA, 20 bp, Artificial Sequence
  Description of Artificial Sequence: Synthetic oligonucleotide
  Target: SCNA; (+) strand; PAM type: NRG; PAM sequence: TAG
attttaaaaccaaattatac

SEQ ID NO: 27150 - DNA, 20 bp, Artificial Sequence
  Description of Artificial Sequence: Synthetic oligonucleotide
  Target: SCNA; (+) strand; PAM type: NRG; PAM sequence: TAG
attatactagcaaaacttac

SEQ ID NO: 27151 - DNA, 20 bp, Artificial Sequence
  Description of Artificial Sequence: Synthetic oligonucleotide
  Target: SCNA; (+) strand; PAM type: NRG; PAM sequence: GAG
tatactagcaaaacttacta

SEQ ID NO: 27152 - DNA, 20 bp, Artificial Sequence
  Description of Artificial Sequence: Synthetic oligonucleotide
  Target: SCNA; (+) strand; PAM type: NRG; PAM sequence: AGG
atactagcaaaacttactag

SEQ ID NO: 27153 - DNA, 20 bp, Artificial Sequence
  Description of Artificial Sequence: Synthetic oligonucleotide
  Target: SCNA; (+) strand; PAM type: NRG; PAM sequence: AAG
acttactagaggctcaaact

SEQ ID NO: 27154 - DNA, 20 bp, Artificial Sequence
  Description of Artificial Sequence: Synthetic oligonucleotide
  Target: SCNA; (+) strand; PAM type: NRG; PAM sequence: AGG
cttactagaggctcaaacta

SEQ ID NO: 27155 - DNA, 20 bp, Artificial Sequence
  Description of Artificial Sequence: Synthetic oligonucleotide
  Target: SCNA; (+) strand; PAM type: NRG; PAM sequence: GGG
ttactagaggctcaaactaa

SEQ ID NO: 27156 - DNA, 20 bp, Artificial Sequence
  Description of Artificial Sequence: Synthetic oligonucleotide
  Target: SCNA; (+) strand; PAM type: NRG; PAM sequence: AAG
ctcaaactaagggctctttg

SEQ ID NO: 27157 - DNA, 20 bp, Artificial Sequence
  Description of Artificial Sequence: Synthetic oligonucleotide
  Target: SCNA; (+) strand; PAM type: NRG; PAM sequence: AGG
tcaaactaagggctctttga

SEQ ID NO: 27158 - DNA, 20 bp, Artificial Sequence
  Description of Artificial Sequence: Synthetic oligonucleotide
  Target: SCNA; (+) strand; PAM type: NRG; PAM sequence: TGG
aagggctctttgaaggaatg

SEQ ID NO: 27159 - DNA, 20 bp, Artificial Sequence
  Description of Artificial Sequence: Synthetic oligonucleotide
  Target: SCNA; (+) strand; PAM type: NRG; PAM sequence: AAG
ggtttaactgcttccaatat

SEQ ID NO: 27160 - DNA, 20 bp, Artificial Sequence
  Description of Artificial Sequence: Synthetic oligonucleotide
  Target: SCNA; (+) strand; PAM type: NRG; PAM sequence: AAG
atataagatttcaaataatt

SEQ ID NO: 27161 - DNA, 20 bp, Artificial Sequence
  Description of Artificial Sequence: Synthetic oligonucleotide
  Target: SCNA; (+) strand; PAM type: NRG; PAM sequence: AGG
tataagatttcaaataatta

SEQ ID NO: 27162 - DNA, 20 bp, Artificial Sequence
  Description of Artificial Sequence: Synthetic oligonucleotide
  Target: SCNA; (+) strand; PAM type: NRG; PAM sequence: TAG
tcaaataattaaggatactg

SEQ ID NO: 27163 - DNA, 20 bp, Artificial Sequence
  Description of Artificial Sequence: Synthetic oligonucleotide
  Target: SCNA; (+) strand; PAM type: NRG; PAM sequence: TAG
aataattaaggatactgtag

SEQ ID NO: 27164 - DNA, 20 bp, Artificial Sequence
  Description of Artificial Sequence: Synthetic oligonucleotide
  Target: SCNA; (+) strand; PAM type: NRG; PAM sequence: CAG
aattaaggatactgtagtag

SEQ ID NO: 27165 - DNA, 20 bp, Artificial Sequence
  Description of Artificial Sequence: Synthetic oligonucleotide
  Target: SCNA; (+) strand; PAM type: NRG; PAM sequence: AAG
tagtagcagcaaaaacatta

SEQ ID NO: 27166 - DNA, 20 bp, Artificial Sequence
  Description of Artificial Sequence: Synthetic oligonucleotide
  Target: SCNA; (+) strand; PAM type: NRG; PAM sequence: AAG
gcagcaaaaacattaaagaa

SEQ ID NO: 27167 - DNA, 20 bp, Artificial Sequence
  Description of Artificial Sequence: Synthetic oligonucleotide
  Target: SCNA; (+) strand; PAM type: NRG; PAM sequence: TAG
aaaaacattaaagaaaagct

SEQ ID NO: 27168 - DNA, 20 bp, Artificial Sequence
  Description of Artificial Sequence: Synthetic oligonucleotide
  Target: SCNA; (+) strand; PAM type: NRG; PAM sequence: AGG
aaaacattaaagaaaagctt

SEQ ID NO: 27169 - DNA, 20 bp, Artificial Sequence
  Description of Artificial Sequence: Synthetic oligonucleotide
  Target: SCNA; (+) strand; PAM type: NRG; PAM sequence: AAG
aaagcttaggtaattacaca

SEQ ID NO: 27170 - DNA, 20 bp, Artificial Sequence
  Description of Artificial Sequence: Synthetic oligonucleotide
  Target: SCNA; (+) strand; PAM type: NRG; PAM sequence: TGG
ggtaattacacaaagaacat

SEQ ID NO: 27171 - DNA, 20 bp, Artificial Sequence
  Description of Artificial Sequence: Synthetic oligonucleotide
  Target: SCNA; (+) strand; PAM type: NRG; PAM sequence: TAG
attggaactaaaatcatatt

SEQ ID NO: 27172 - DNA, 20 bp, Artificial Sequence
  Description of Artificial Sequence: Synthetic oligonucleotide
  Target: SCNA; (+) strand; PAM type: NRG; PAM sequence: AGG
ttggaactaaaatcatattt

SEQ ID NO: 27173 - DNA, 20 bp, Artificial Sequence
  Description of Artificial Sequence: Synthetic oligonucleotide
  Target: SCNA; (+) strand; PAM type: NRG; PAM sequence: TAG
actaaaatcatatttaggaa

SEQ ID NO: 27174 - DNA, 20 bp, Artificial Sequence
  Description of Artificial Sequence: Synthetic oligonucleotide
  Target: SCNA; (+) strand; PAM type: NRG; PAM sequence: TGG
atatctattctattgcattt

SEQ ID NO: 27175 - DNA, 20 bp, Artificial Sequence
  Description of Artificial Sequence: Synthetic oligonucleotide
  Target: SCNA; (+) strand; PAM type: NRG; PAM sequence: GGG
tatctattctattgcatttt

SEQ ID NO: 27176 - DNA, 20 bp, Artificial Sequence
  Description of Artificial Sequence: Synthetic oligonucleotide
  Target: SCNA; (+) strand; PAM type: NRG; PAM sequence: TAG
cattttgggttcttcaattc

SEQ ID NO: 27177 - DNA, 20 bp, Artificial Sequence
  Description of Artificial Sequence: Synthetic oligonucleotide
  Target: SCNA; (+) strand; PAM type: NRG; PAM sequence: AGG
attttgggttcttcaattct

SEQ ID NO: 27178 - DNA, 20 bp, Artificial Sequence
  Description of Artificial Sequence: Synthetic oligonucleotide
  Target: SCNA; (+) strand; PAM type: NRG; PAM sequence: AAG
ttcaattctaggcttactca

SEQ ID NO: 27179 - DNA, 20 bp, Artificial Sequence
  Description of Artificial Sequence: Synthetic oligonucleotide
  Target: SCNA; (+) strand; PAM type: NRG; PAM sequence: AGG
tcaattctaggcttactcaa

SEQ ID NO: 27180 - DNA, 20 bp, Artificial Sequence
  Description of Artificial Sequence: Synthetic oligonucleotide
  Target: SCNA; (+) strand; PAM type: NRG; PAM sequence: TAG
ctgcatcaatcaactacacc

SEQ ID NO: 27181 - DNA, 20 bp, Artificial Sequence
  Description of Artificial Sequence: Synthetic oligonucleotide
  Target: SCNA; (+) strand; PAM type: NRG; PAM sequence: AAG
aaactttattatacaatatt

SEQ ID NO: 27182 - DNA, 20 bp, Artificial Sequence
  Description of Artificial Sequence: Synthetic oligonucleotide
  Target: SCNA; (+) strand; PAM type: NRG; PAM sequence: TAG
gctaatattatttataccta

SEQ ID NO: 27183 - DNA, 20 bp, Artificial Sequence
  Description of Artificial Sequence: Synthetic oligonucleotide
  Target: SCNA; (+) strand; PAM type: NRG; PAM sequence: CAG
atatgtataattgacaatcc

SEQ ID NO: 27184 - DNA, 20 bp, Artificial Sequence
  Description of Artificial Sequence: Synthetic oligonucleotide
  Target: SCNA; (+) strand; PAM type: NRG; PAM sequence: AAG
tttttttgtctatttgacat

SEQ ID NO: 27185 - DNA, 20 bp, Artificial Sequence
  Description of Artificial Sequence: Synthetic oligonucleotide
  Target: SCNA; (+) strand; PAM type: NRG; PAM sequence: AAG
ttgtctatttgacataagcc

SEQ ID NO: 27186 - DNA, 20 bp, Artificial Sequence
  Description of Artificial Sequence: Synthetic oligonucleotide
  Target: SCNA; (+) strand; PAM type: NRG; PAM sequence: CAG
acccatgccatgattcaaca

SEQ ID NO: 27187 - DNA, 20 bp, Artificial Sequence
  Description of Artificial Sequence: Synthetic oligonucleotide
  Target: SCNA; (+) strand; PAM type: NRG; PAM sequence: AAG
attcaacacagaaaattaca

SEQ ID NO: 27188 - DNA, 20 bp, Artificial Sequence
  Description of Artificial Sequence: Synthetic oligonucleotide
  Target: SCNA; (+) strand; PAM type: NRG; PAM sequence: TAG
ttacaaagcccaccttactg

SEQ ID NO: 27189 - DNA, 20 bp, Artificial Sequence
  Description of Artificial Sequence: Synthetic oligonucleotide
  Target: SCNA; (+) strand; PAM type: NRG; PAM sequence: CGG
atcaacattcgtatcttcca

SEQ ID NO: 27190 - DNA, 20 bp, Artificial Sequence
  Description of Artificial Sequence: Synthetic oligonucleotide
  Target: SCNA; (+) strand; PAM type: NRG; PAM sequence: TAG
tccacggaaaataattaact

SEQ ID NO: 27191 - DNA, 20 bp, Artificial Sequence
  Description of Artificial Sequence: Synthetic oligonucleotide
  Target: SCNA; (+) strand; PAM type: NRG; PAM sequence: CAG
aattaacttagttctataat

SEQ ID NO: 27192 - DNA, 20 bp, Artificial Sequence
  Description of Artificial Sequence: Synthetic oligonucleotide
  Target: SCNA; (+) strand; PAM type: NRG; PAM sequence: AGG
attaacttagttctataatc

SEQ ID NO: 27193 - DNA, 20 bp, Artificial Sequence
  Description of Artificial Sequence: Synthetic oligonucleotide
  Target: SCNA; (+) strand; PAM type: NRG; PAM sequence: CGG
ttctataatcaggatatgcc

SEQ ID NO: 27194 - DNA, 20 bp, Artificial Sequence
  Description of Artificial Sequence: Synthetic oligonucleotide
  Target: SCNA; (+) strand; PAM type: NRG; PAM sequence: AAG
gatatgcccggtttatttac

SEQ ID NO: 27195 - DNA, 20 bp, Artificial Sequence
  Description of Artificial Sequence: Synthetic oligonucleotide
  Target: SCNA; (+) strand; PAM type: NRG; PAM sequence: AGG
atatgcccggtttatttaca

SEQ ID NO: 27196 - DNA, 20 bp, Artificial Sequence
  Description of Artificial Sequence: Synthetic oligonucleotide
  Target: SCNA; (+) strand; PAM type: NRG; PAM sequence: CAG
atttacaaggaaatacctat

SEQ ID NO: 27197 - DNA, 20 bp, Artificial Sequence
  Description of Artificial Sequence: Synthetic oligonucleotide
  Target: SCNA; (+) strand; PAM type: NRG; PAM sequence: AGG
tttacaaggaaatacctatc

SEQ ID NO: 27198 - DNA, 20 bp, Artificial Sequence
  Description of Artificial Sequence: Synthetic oligonucleotide
  Target: SCNA; (+) strand; PAM type: NRG; PAM sequence: TAG
tatcaggtgctaatttctct

SEQ ID NO: 27199 - DNA, 20 bp, Artificial Sequence
  Description of Artificial Sequence: Synthetic oligonucleotide
  Target: SCNA; (+) strand; PAM type: NRG; PAM sequence: TAG
gtgctaatttctcttagaat

SEQ ID NO: 27200 - DNA, 20 bp, Artificial Sequence
  Description of Artificial Sequence: Synthetic oligonucleotide
  Target: SCNA; (+) strand; PAM type: NRG; PAM sequence: TGG
tctcttagaattagaaatct

SEQ ID NO: 27201 - DNA, 20 bp, Artificial Sequence
  Description of Artificial Sequence: Synthetic oligonucleotide
  Target: SCNA; (+) strand; PAM type: NRG; PAM sequence: CAG
ttagaattagaaatcttggc

SEQ ID NO: 27202 - DNA, 20 bp, Artificial Sequence
  Description of Artificial Sequence: Synthetic oligonucleotide
  Target: SCNA; (+) strand; PAM type: NRG; PAM sequence: AGG
tagaattagaaatcttggcc

SEQ ID NO: 27203 - DNA, 20 bp, Artificial Sequence
  Description of Artificial Sequence: Synthetic oligonucleotide
  Target: SCNA; (+) strand; PAM type: NRG; PAM sequence: TGG
ttagaaatcttggccaggca

SEQ ID NO: 27204 - DNA, 20 bp, Artificial Sequence
  Description of Artificial Sequence: Synthetic oligonucleotide
  Target: SCNA; (+) strand; PAM type: NRG; PAM sequence: TGG
gaaatcttggccaggcatgg

SEQ ID NO: 27205 - DNA, 20 bp, Artificial Sequence
  Description of Artificial Sequence: Synthetic oligonucleotide
  Target: SCNA; (+) strand; PAM type: NRG; PAM sequence: CAG
gtggctcacacctgtaatcc

SEQ ID NO: 27206 - DNA, 20 bp, Artificial Sequence
  Description of Artificial Sequence: Synthetic oligonucleotide
  Target: SCNA; (+) strand; PAM type: NRG; PAM sequence: TGG
cacctgtaatcccagcactt

SEQ ID NO: 27207 - DNA, 20 bp, Artificial Sequence
  Description of Artificial Sequence: Synthetic oligonucleotide
  Target: SCNA; (+) strand; PAM type: NRG; PAM sequence: GGG
acctgtaatcccagcacttt

SEQ ID NO: 27208 - DNA, 20 bp, Artificial Sequence
  Description of Artificial Sequence: Synthetic oligonucleotide
  Target: SCNA; (+) strand; PAM type: NRG; PAM sequence: GAG
ctgtaatcccagcactttgg

SEQ ID NO: 27209 - DNA, 20 bp, Artificial Sequence
  Description of Artificial Sequence: Synthetic oligonucleotide
  Target: SCNA; (+) strand; PAM type: NRG; PAM sequence: AGG
tgtaatcccagcactttggg

SEQ ID NO: 27210 - DNA, 20 bp, Artificial Sequence
  Description of Artificial Sequence: Synthetic oligonucleotide
  Target: SCNA; (+) strand; PAM type: NRG; PAM sequence: GAG
tcccagcactttgggaggcc

SEQ ID NO: 27211 - DNA, 20 bp, Artificial Sequence
  Description of Artificial Sequence: Synthetic oligonucleotide
  Target: SCNA; (+) strand; PAM type: NRG; PAM sequence: AGG
cccagcactttgggaggccg

SEQ ID NO: 27212 - DNA, 20 bp, Artificial Sequence
  Description of Artificial Sequence: Synthetic oligonucleotide
  Target: SCNA; (+) strand; PAM type: NRG; PAM sequence: TAG
agcactttgggaggccgagg

SEQ ID NO: 27213 - DNA, 20 bp, Artificial Sequence
  Description of Artificial Sequence: Synthetic oligonucleotide
  Target: SCNA; (+) strand; PAM type: NRG; PAM sequence: AGG
gcactttgggaggccgaggt

SEQ ID NO: 27214 - DNA, 20 bp, Artificial Sequence
  Description of Artificial Sequence: Synthetic oligonucleotide
  Target: SCNA; (+) strand; PAM type: NRG; PAM sequence: TGG
ctttgggaggccgaggtagg

SEQ ID NO: 27215 - DNA, 20 bp, Artificial Sequence
  Description of Artificial Sequence: Synthetic oligonucleotide
  Target: SCNA; (+) strand; PAM type: NRG; PAM sequence: GAG
ccgaggtaggtggattacct

SEQ ID NO: 27216 - DNA, 20 bp, Artificial Sequence
  Description of Artificial Sequence: Synthetic oligonucleotide
  Target: SCNA; (+) strand; PAM type: NRG; PAM sequence: AGG
cgaggtaggtggattacctg

SEQ ID NO: 27217 - DNA, 20 bp, Artificial Sequence
  Description of Artificial Sequence: Synthetic oligonucleotide
  Target: SCNA; (+) strand; PAM type: NRG; PAM sequence: CAG
gtaggtggattacctgaggt

SEQ ID NO: 27218 - DNA, 20 bp, Artificial Sequence
  Description of Artificial Sequence: Synthetic oligonucleotide
  Target: SCNA; (+) strand; PAM type: NRG; PAM sequence: AGG
taggtggattacctgaggtc

SEQ ID NO: 27219 - DNA, 20 bp, Artificial Sequence
  Description of Artificial Sequence: Synthetic oligonucleotide
  Target: SCNA; (+) strand; PAM type: NRG; PAM sequence: GAG
ggtggattacctgaggtcag

SEQ ID NO: 27220 - DNA, 20 bp, Artificial Sequence
  Description of Artificial Sequence: Synthetic oligonucleotide
  Target: SCNA; (+) strand; PAM type: NRG; PAM sequence: GAG
ttacctgaggtcaggagttt

SEQ ID NO: 27221 - DNA, 20 bp, Artificial Sequence
  Description of Artificial Sequence: Synthetic oligonucleotide
  Target: SCNA; (+) strand; PAM type: NRG; PAM sequence: CAG
tgaggtcaggagtttgagac

SEQ ID NO: 27222 - DNA, 20 bp, Artificial Sequence
  Description of Artificial Sequence: Synthetic oligonucleotide
  Target: SCNA; (+) strand; PAM type: NRG; PAM sequence: TGG
tcaggagtttgagaccagcc

SEQ ID NO: 27223 - DNA, 20 bp, Artificial Sequence
  Description of Artificial Sequence: Synthetic oligonucleotide
  Target: SCNA; (+) strand; PAM type: NRG; PAM sequence: TGG
tgagaccagcctggccaacg

SEQ ID NO: 27224 - DNA, 20 bp, Artificial Sequence
  Description of Artificial Sequence: Synthetic oligonucleotide
  Target: SCNA; (+) strand; PAM type: NRG; PAM sequence: TAG
tctactaaaaatacaaaaat

SEQ ID NO: 27225 - DNA, 20 bp, Artificial Sequence
  Description of Artificial Sequence: Synthetic oligonucleotide
  Target: SCNA; (+) strand; PAM type: NRG; PAM sequence: CGG
ctaaaaatacaaaaattagt

SEQ ID NO: 27226 - DNA, 20 bp, Artificial Sequence
  Description of Artificial Sequence: Synthetic oligonucleotide
  Target: SCNA; (+) strand; PAM type: NRG; PAM sequence: GGG
taaaaatacaaaaattagtc

SEQ ID NO: 27227 - DNA, 20 bp, Artificial Sequence
  Description of Artificial Sequence: Synthetic oligonucleotide
  Target: SCNA; (+) strand; PAM type: NRG; PAM sequence: AAG
atacaaaaattagtcgggct

SEQ ID NO: 27228 - DNA, 20 bp, Artificial Sequence
  Description of Artificial Sequence: Synthetic oligonucleotide
  Target: SCNA; (+) strand; PAM type: NRG; PAM sequence: AGG
tacaaaaattagtcgggcta

SEQ ID NO: 27229 - DNA, 20 bp, Artificial Sequence
  Description of Artificial Sequence: Synthetic oligonucleotide
  Target: SCNA; (+) strand; PAM type: NRG; PAM sequence: TGG
aaaaattagtcgggctaagg

SEQ ID NO: 27230 - DNA, 20 bp, Artificial Sequence
  Description of Artificial Sequence: Synthetic oligonucleotide
  Target: SCNA; (+) strand; PAM type: NRG; PAM sequence: GAG
tcctgtaatcccacctactc

SEQ ID NO: 27231 - DNA, 20 bp, Artificial Sequence
  Description of Artificial Sequence: Synthetic oligonucleotide
  Target: SCNA; (+) strand; PAM type: NRG; PAM sequence: GAG
ctgtaatcccacctactcga

SEQ ID NO: 27232 - DNA, 20 bp, Artificial Sequence
  Description of Artificial Sequence: Synthetic oligonucleotide
  Target: SCNA; (+) strand; PAM type: NRG; PAM sequence: AGG
tgtaatcccacctactcgag

SEQ ID NO: 27233 - DNA, 20 bp, Artificial Sequence
  Description of Artificial Sequence: Synthetic oligonucleotide
  Target: SCNA; (+) strand; PAM type: NRG; PAM sequence: GAG
tcccacctactcgagaggct

SEQ ID NO: 27234 - DNA, 20 bp, Artificial Sequence
  Description of Artificial Sequence: Synthetic oligonucleotide
  Target: SCNA; (+) strand; PAM type: NRG; PAM sequence: AGG
cccacctactcgagaggctg

SEQ ID NO: 27235 - DNA, 20 bp, Artificial Sequence
  Description of Artificial Sequence: Synthetic oligonucleotide
  Target: SCNA; (+) strand; PAM type: NRG; PAM sequence: CAG
acctactcgagaggctgagg

SEQ ID NO: 27236 - DNA, 20 bp, Artificial Sequence
  Description of Artificial Sequence: Synthetic oligonucleotide
  Target: SCNA; (+) strand; PAM type: NRG; PAM sequence: AGG
cctactcgagaggctgaggc

SEQ ID NO: 27237 - DNA, 20 bp, Artificial Sequence
  Description of Artificial Sequence: Synthetic oligonucleotide
  Target: SCNA; (+) strand; PAM type: NRG; PAM sequence: GAG
tactcgagaggctgaggcag

SEQ ID NO: 27238 - DNA, 20 bp, Artificial Sequence
  Description of Artificial Sequence: Synthetic oligonucleotide
  Target: SCNA; (+) strand; PAM type: NRG; PAM sequence: TGG
gcaggagaatcgcttgaacc

SEQ ID NO: 27239 - DNA, 20 bp, Artificial Sequence
  Description of Artificial Sequence: Synthetic oligonucleotide
  Target: SCNA; (+) strand; PAM type: NRG; PAM sequence: GGG
caggagaatcgcttgaacct

SEQ ID NO: 27240 - DNA, 20 bp, Artificial Sequence
  Description of Artificial Sequence: Synthetic oligonucleotide
  Target: SCNA; (+) strand; PAM type: NRG; PAM sequence: GAG
ggagaatcgcttgaacctgg

SEQ ID NO: 27241 - DNA, 20 bp, Artificial Sequence
  Description of Artificial Sequence: Synthetic oligonucleotide
  Target: SCNA; (+) strand; PAM type: NRG; PAM sequence: AGG
gagaatcgcttgaacctggg

SEQ ID NO: 27242 - DNA, 20 bp, Artificial Sequence
  Description of Artificial Sequence: Synthetic oligonucleotide
  Target: SCNA; (+) strand; PAM type: NRG; PAM sequence: CGG
aatcgcttgaacctgggagg

SEQ ID NO: 27243 - DNA, 20 bp, Artificial Sequence
  Description of Artificial Sequence: Synthetic oligonucleotide
  Target: SCNA; (+) strand; PAM type: NRG; PAM sequence: GAG
tcgcttgaacctgggaggcg

SEQ ID NO: 27244 - DNA, 20 bp, Artificial Sequence
  Description of Artificial Sequence: Synthetic oligonucleotide
  Target: SCNA; (+) strand; PAM type: NRG; PAM sequence: AGG
cgcttgaacctgggaggcgg

SEQ ID NO: 27245 - DNA, 20 bp, Artificial Sequence
  Description of Artificial Sequence: Synthetic oligonucleotide
  Target: SCNA; (+) strand; PAM type: NRG; PAM sequence: CAG
aacctgggaggcggaggttg

SEQ ID NO: 27246 - DNA, 20 bp, Artificial Sequence
  Description of Artificial Sequence: Synthetic oligonucleotide
  Target: SCNA; (+) strand; PAM type: NRG; PAM sequence: GAG
ggcggaggttgcagtgaact

SEQ ID NO: 27247 - DNA, 20 bp, Artificial Sequence
  Description of Artificial Sequence: Synthetic oligonucleotide
  Target: SCNA; (+) strand; PAM type: NRG; PAM sequence: CAG
gagattgtgccattgcactc

SEQ ID NO: 27248 - DNA, 20 bp, Artificial Sequence
  Description of Artificial Sequence: Synthetic oligonucleotide
  Target: SCNA; (+) strand; PAM type: NRG; PAM sequence: TAG
tgtgccattgcactccagcc

SEQ ID NO: 27249 - DNA, 20 bp, Artificial Sequence
  Description of Artificial Sequence: Synthetic oligonucleotide
  Target: SCNA; (+) strand; PAM type: NRG; PAM sequence: AGG
gtgccattgcactccagcct

SEQ ID NO: 27250 - DNA, 20 bp, Artificial Sequence
  Description of Artificial Sequence: Synthetic oligonucleotide
  Target: SCNA; (+) strand; PAM type: NRG; PAM sequence: TGG
ccattgcactccagcctagg

SEQ ID NO: 27251 - DNA, 20 bp, Artificial Sequence
  Description of Artificial Sequence: Synthetic oligonucleotide
  Target: SCNA; (+) strand; PAM type: NRG; PAM sequence: AAG
tgcactccagcctaggtggc

SEQ ID NO: 27252 - DNA, 20 bp, Artificial Sequence
  Description of Artificial Sequence: Synthetic oligonucleotide
  Target: SCNA; (+) strand; PAM type: NRG; PAM sequence: GAG
cactccagcctaggtggcaa

SEQ ID NO: 27253 - DNA, 20 bp, Artificial Sequence
  Description of Artificial Sequence: Synthetic oligonucleotide
  Target: SCNA; (+) strand; PAM type: NRG; PAM sequence: AAG
ccagcctaggtggcaagagc

SEQ ID NO: 27254 - DNA, 20 bp, Artificial Sequence
  Description of Artificial Sequence: Synthetic oligonucleotide
  Target: SCNA; (+) strand; PAM type: NRG; PAM sequence: AAG
ccatctcaaaaaaaaaaaaa

SEQ ID NO: 27255 - DNA, 20 bp, Artificial Sequence
  Description of Artificial Sequence: Synthetic oligonucleotide
  Target: SCNA; (+) strand; PAM type: NRG; PAM sequence: TAG
aatctctctatatgtatcta

SEQ ID NO: 27256 - DNA, 20 bp, Artificial Sequence
  Description of Artificial Sequence: Synthetic oligonucleotide
  Target: SCNA; (+) strand; PAM type: NRG; PAM sequence: TAG
tctatatgtatctatagata

SEQ ID NO: 27257 - DNA, 20 bp, Artificial Sequence
  Description of Artificial Sequence: Synthetic oligonucleotide
  Target: SCNA; (+) strand; PAM type: NRG; PAM sequence: TAG
tatagatatagatatgttta

SEQ ID NO: 27258 - DNA, 20 bp, Artificial Sequence
  Description of Artificial Sequence: Synthetic oligonucleotide
  Target: SCNA; (+) strand; PAM type: NRG; PAM sequence: TAG
tagatatgtttatagatata

SEQ ID NO: 27259 - DNA, 20 bp, Artificial Sequence
  Description of Artificial Sequence: Synthetic oligonucleotide
  Target: SCNA; (+) strand; PAM type: NRG; PAM sequence: CAG
tttatagatatatagatata

SEQ ID NO: 27260 - DNA, 20 bp, Artificial Sequence
  Description of Artificial Sequence: Synthetic oligonucleotide
  Target: SCNA; (+) strand; PAM type: NRG; PAM sequence: GAG
tatagatatatagatataca

SEQ ID NO: 27261 - DNA, 20 bp, Artificial Sequence
  Description of Artificial Sequence: Synthetic oligonucleotide
  Target: SCNA; (+) strand; PAM type: NRG; PAM sequence: TAG
gatatacagagacatatata

SEQ ID NO: 27262 - DNA, 20 bp, Artificial Sequence
  Description of Artificial Sequence: Synthetic oligonucleotide
  Target: SCNA; (+) strand; PAM type: NRG; PAM sequence: GAG
tatacagagacatatatata

SEQ ID NO: 27263 - DNA, 20 bp, Artificial Sequence
  Description of Artificial Sequence: Synthetic oligonucleotide
  Target: SCNA; (+) strand; PAM type: NRG; PAM sequence: GAG
agagacatatatatagagat

SEQ ID NO: 27264 - DNA, 20 bp, Artificial Sequence
  Description of Artificial Sequence: Synthetic oligonucleotide
  Target: SCNA; (+) strand; PAM type: NRG; PAM sequence: GAG
agacatatatatagagatga

SEQ ID NO: 27265 - DNA, 20 bp, Artificial Sequence
  Description of Artificial Sequence: Synthetic oligonucleotide
  Target: SCNA; (+) strand; PAM type: NRG; PAM sequence: TAG
gatatgtgtacacatatata

SEQ ID NO: 27266 - DNA, 20 bp, Artificial Sequence
  Description of Artificial Sequence: Synthetic oligonucleotide
  Target: SCNA; (+) strand; PAM type: NRG; PAM sequence: CAG
tgtgtgtatatgtttgtctt

SEQ ID NO: 27267 - DNA, 20 bp, Artificial Sequence
  Description of Artificial Sequence: Synthetic oligonucleotide
  Target: SCNA; (+) strand; PAM type: NRG; PAM sequence: AGG
gtgtgtatatgtttgtcttc

SEQ ID NO: 27268 - DNA, 20 bp, Artificial Sequence
  Description of Artificial Sequence: Synthetic oligonucleotide
  Target: SCNA; (+) strand; PAM type: NRG; PAM sequence: AAG
tgtttgtcttcaggcacctg

SEQ ID NO: 27269 - DNA, 20 bp, Artificial Sequence
  Description of Artificial Sequence: Synthetic oligonucleotide
  Target: SCNA; (+) strand; PAM type: NRG; PAM sequence: CAG
ttcaggcacctgaagaaaaa

SEQ ID NO: 27270 - DNA, 20 bp, Artificial Sequence
  Description of Artificial Sequence: Synthetic oligonucleotide
  Target: SCNA; (+) strand; PAM type: NRG; PAM sequence: TAG
ctgaagaaaaacagatgtac

SEQ ID NO: 27271 - DNA, 20 bp, Artificial Sequence
  Description of Artificial Sequence: Synthetic oligonucleotide
  Target: SCNA; (+) strand; PAM type: NRG; PAM sequence: AAG
tgtactagcaaaacttacta

SEQ ID NO: 27272 - DNA, 20 bp, Artificial Sequence
  Description of Artificial Sequence: Synthetic oligonucleotide
  Target: SCNA; (+) strand; PAM type: NRG; PAM sequence: AGG
gtactagcaaaacttactaa

SEQ ID NO: 27273 - DNA, 20 bp, Artificial Sequence
  Description of Artificial Sequence: Synthetic oligonucleotide
  Target: SCNA; (+) strand; PAM type: NRG; PAM sequence: TAG
cttactaaaggctcaaactc

SEQ ID NO: 27274 - DNA, 20 bp, Artificial Sequence
  Description of Artificial Sequence: Synthetic oligonucleotide
  Target: SCNA; (+) strand; PAM type: NRG; PAM sequence: TAG
aaactctagtaaattttctt

SEQ ID NO: 27275 - DNA, 20 bp, Artificial Sequence
  Description of Artificial Sequence: Synthetic oligonucleotide
  Target: SCNA; (+) strand; PAM type: NRG; PAM sequence: AGG
aactctagtaaattttcttt

SEQ ID NO: 27276 - DNA, 20 bp, Artificial Sequence
  Description of Artificial Sequence: Synthetic oligonucleotide
  Target: SCNA; (+) strand; PAM type: NRG; PAM sequence: AAG
aaattttctttaggtacctg

SEQ ID NO: 27277 - DNA, 20 bp, Artificial Sequence
  Description of Artificial Sequence: Synthetic oligonucleotide
  Target: SCNA; (+) strand; PAM type: NRG; PAM sequence: TAG
aaatatctaattattatacc

SEQ ID NO: 27278 - DNA, 20 bp, Artificial Sequence
  Description of Artificial Sequence: Synthetic oligonucleotide
  Target: SCNA; (+) strand; PAM type: NRG; PAM sequence: AAG
tctaattattatacctagaa

SEQ ID NO: 27279 - DNA, 20 bp, Artificial Sequence
  Description of Artificial Sequence: Synthetic oligonucleotide
  Target: SCNA; (+) strand; PAM type: NRG; PAM sequence: TGG
aattattatacctagaaaag

SEQ ID NO: 27280 - DNA, 20 bp, Artificial Sequence
  Description of Artificial Sequence: Synthetic oligonucleotide
  Target: SCNA; (+) strand; PAM type: NRG; PAM sequence: GGG
attattatacctagaaaagt

SEQ ID NO: 27281 - DNA, 20 bp, Artificial Sequence
  Description of Artificial Sequence: Synthetic oligonucleotide
  Target: SCNA; (+) strand; PAM type: NRG; PAM sequence: GGG
ttattatacctagaaaagtg

SEQ ID NO: 27282 - DNA, 20 bp, Artificial Sequence
  Description of Artificial Sequence: Synthetic oligonucleotide
  Target: SCNA; (+) strand; PAM type: NRG; PAM sequence: TAG
ggggctatcaccccatttcc

SEQ ID NO: 27283 - DNA, 20 bp, Artificial Sequence
  Description of Artificial Sequence: Synthetic oligonucleotide
  Target: SCNA; (+) strand; PAM type: NRG; PAM sequence: TGG
caccccatttcctagacttc

SEQ ID NO: 27284 - DNA, 20 bp, Artificial Sequence
  Description of Artificial Sequence: Synthetic oligonucleotide
  Target: SCNA; (+) strand; PAM type: NRG; PAM sequence: AAG
cccatttcctagacttctgg

SEQ ID NO: 27285 - DNA, 20 bp, Artificial Sequence
  Description of Artificial Sequence: Synthetic oligonucleotide
  Target: SCNA; (+) strand; PAM type: NRG; PAM sequence: TAG
cttctggaagttttcttaaa

SEQ ID NO: 27286 - DNA, 20 bp, Artificial Sequence
  Description of Artificial Sequence: Synthetic oligonucleotide
  Target: SCNA; (+) strand; PAM type: NRG; PAM sequence: TGG
gtcctcactctgacactatg

SEQ ID NO: 27287 - DNA, 20 bp, Artificial Sequence
  Description of Artificial Sequence: Synthetic oligonucleotide
  Target: SCNA; (+) strand; PAM type: NRG; PAM sequence: AAG
cactctgacactatgtggcc

SEQ ID NO: 27288 - DNA, 20 bp, Artificial Sequence
  Description of Artificial Sequence: Synthetic oligonucleotide
  Target: SCNA; (+) strand; PAM type: NRG; PAM sequence: AGG
actctgacactatgtggcca

SEQ ID NO: 27289 - DNA, 20 bp, Artificial Sequence
  Description of Artificial Sequence: Synthetic oligonucleotide
  Target: SCNA; (+) strand; PAM type: NRG; PAM sequence: GGG
ctctgacactatgtggccaa

SEQ ID NO: 27290 - DNA, 20 bp, Artificial Sequence
  Description of Artificial Sequence: Synthetic oligonucleotide
  Target: SCNA; (+) strand; PAM type: NRG; PAM sequence: GGG
tctgacactatgtggccaag

SEQ ID NO: 27291 - DNA, 20 bp, Artificial Sequence
  Description of Artificial Sequence: Synthetic oligonucleotide
  Target: SCNA; (+) strand; PAM type: NRG; PAM sequence: GAG
cactatgtggccaaggggct

SEQ ID NO: 27292 - DNA, 20 bp, Artificial Sequence
  Description of Artificial Sequence: Synthetic oligonucleotide
  Target: SCNA; (+) strand; PAM type: NRG; PAM sequence: GAG
ctatgtggccaaggggctga

SEQ ID NO: 27293 - DNA, 20 bp, Artificial Sequence
  Description of Artificial Sequence: Synthetic oligonucleotide
  Target: SCNA; (+) strand; PAM type: NRG; PAM sequence: CAG
tggccaaggggctgagagca

SEQ ID NO: 27294 - DNA, 20 bp, Artificial Sequence
  Description of Artificial Sequence: Synthetic oligonucleotide
  Target: SCNA; (+) strand; PAM type: NRG; PAM sequence: TGG
ggggctgagagcacagactg

SEQ ID NO: 27295 - DNA, 20 bp, Artificial Sequence
  Description of Artificial Sequence: Synthetic oligonucleotide
  Target: SCNA; (+) strand; PAM type: NRG; PAM sequence: TGG
agactgtggtgctgtaatgt

SEQ ID NO: 27296 - DNA, 20 bp, Artificial Sequence
  Description of Artificial Sequence: Synthetic oligonucleotide
  Target: SCNA; (+) strand; PAM type: NRG; PAM sequence: GGG
gactgtggtgctgtaatgtt

SEQ ID NO: 27297 - DNA, 20 bp, Artificial Sequence
  Description of Artificial Sequence: Synthetic oligonucleotide
  Target: SCNA; (+) strand; PAM type: NRG; PAM sequence: TGG
tgctgtaatgttgggcctct

SEQ ID NO: 27298 - DNA, 20 bp, Artificial Sequence
  Description of Artificial Sequence: Synthetic oligonucleotide
  Target: SCNA; (+) strand; PAM type: NRG; PAM sequence: TAG
ctcttggctctgccgcttac

SEQ ID NO: 27299 - DNA, 20 bp, Artificial Sequence
  Description of Artificial Sequence: Synthetic oligonucleotide
  Target: SCNA; (+) strand; PAM type: NRG; PAM sequence: TGG
tctgccgcttactagctgtg

SEQ ID NO: 27300 - DNA, 20 bp, Artificial Sequence
  Description of Artificial Sequence: Synthetic oligonucleotide
  Target: SCNA; (+) strand; PAM type: NRG; PAM sequence: TGG
gcttactagctgtgtggccg

SEQ ID NO: 27301 - DNA, 20 bp, Artificial Sequence
  Description of Artificial Sequence: Synthetic oligonucleotide
  Target: SCNA; (+) strand; PAM type: NRG; PAM sequence: GGG
cttactagctgtgtggccgt

SEQ ID NO: 27302 - DNA, 20 bp, Artificial Sequence
  Description of Artificial Sequence: Synthetic oligonucleotide
  Target: SCNA; (+) strand; PAM type: NRG; PAM sequence: AAG
ctagctgtgtggccgtggga

SEQ ID NO: 27303 - DNA, 20 bp, Artificial Sequence
  Description of Artificial Sequence: Synthetic oligonucleotide
  Target: SCNA; (+) strand; PAM type: NRG; PAM sequence: TAG
gtggccgtgggaaagttatc

SEQ ID NO: 27304 - DNA, 20 bp, Artificial Sequence
  Description of Artificial Sequence: Synthetic oligonucleotide
  Target: SCNA; (+) strand; PAM type: NRG; PAM sequence: TGG
tgggaaagttatctagcctg

SEQ ID NO: 27305 - DNA, 20 bp, Artificial Sequence
  Description of Artificial Sequence: Synthetic oligonucleotide
  Target: SCNA; (+) strand; PAM type: NRG; PAM sequence: GGG
gggaaagttatctagcctgt

SEQ ID NO: 27306 - DNA, 20 bp, Artificial Sequence
  Description of Artificial Sequence: Synthetic oligonucleotide
  Target: SCNA; (+) strand; PAM type: NRG; PAM sequence: TGG
tagcctgtgggtgcctcctt

SEQ ID NO: 27307 - DNA, 20 bp, Artificial Sequence
  Description of Artificial Sequence: Synthetic oligonucleotide
  Target: SCNA; (+) strand; PAM type: NRG; PAM sequence: TAG
ctttggcttatgtgtaaaat

SEQ ID NO: 27308 - DNA, 20 bp, Artificial Sequence
  Description of Artificial Sequence: Synthetic oligonucleotide
  Target: SCNA; (+) strand; PAM type: NRG; PAM sequence: TGG
gtgtaaaattagaatcataa

SEQ ID NO: 27309 - DNA, 20 bp, Artificial Sequence
  Description of Artificial Sequence: Synthetic oligonucleotide
  Target: SCNA; (+) strand; PAM type: NRG; PAM sequence: AAG
gaatcataatggaacctatt

SEQ ID NO: 27310 - DNA, 20 bp, Artificial Sequence
  Description of Artificial Sequence: Synthetic oligonucleotide
  Target: SCNA; (+) strand; PAM type: NRG; PAM sequence: AGG
aatcataatggaacctatta

SEQ ID NO: 27311 - DNA, 20 bp, Artificial Sequence
  Description of Artificial Sequence: Synthetic oligonucleotide
  Target: SCNA; (+) strand; PAM type: NRG; PAM sequence: GAG
gaacctattaaggttgtttt

SEQ ID NO: 27312 - DNA, 20 bp, Artificial Sequence
  Description of Artificial Sequence: Synthetic oligonucleotide
  Target: SCNA; (+) strand; PAM type: NRG; PAM sequence: AAG
gacacataataatttgtcta

SEQ ID NO: 27313 - DNA, 20 bp, Artificial Sequence
  Description of Artificial Sequence: Synthetic oligonucleotide
  Target: SCNA; (+) strand; PAM type: NRG; PAM sequence: TAG
ataataatttgtctaaagta

SEQ ID NO: 27314 - DNA, 20 bp, Artificial Sequence
  Description of Artificial Sequence: Synthetic oligonucleotide
  Target: SCNA; (+) strand; PAM type: NRG; PAM sequence: CAG
gtctaaagtatagccaataa

SEQ ID NO: 27315 - DNA, 20 bp, Artificial Sequence
  Description of Artificial Sequence: Synthetic oligonucleotide
  Target: SCNA; (+) strand; PAM type: NRG; PAM sequence: AGG
tctaaagtatagccaataac

SEQ ID NO: 27316 - DNA, 20 bp, Artificial Sequence
  Description of Artificial Sequence: Synthetic oligonucleotide
  Target: SCNA; (+) strand; PAM type: NRG; PAM sequence: GGG
ctaaagtatagccaataaca

SEQ ID NO: 27317 - DNA, 20 bp, Artificial Sequence
  Description of Artificial Sequence: Synthetic oligonucleotide
  Target: SCNA; (+) strand; PAM type: NRG; PAM sequence: CAG
agtatagccaataacaggga

SEQ ID NO: 27318 - DNA, 20 bp, Artificial Sequence
  Description of Artificial Sequence: Synthetic oligonucleotide
  Target: SCNA; (+) strand; PAM type: NRG; PAM sequence: GAG
tatagccaataacagggaca

SEQ ID NO: 27319 - DNA, 20 bp, Artificial Sequence
  Description of Artificial Sequence: Synthetic oligonucleotide
  Target: SCNA; (+) strand; PAM type: NRG; PAM sequence: CAG
cagagctcatatgaaaatgt

SEQ ID NO: 27320 - DNA, 20 bp, Artificial Sequence
  Description of Artificial Sequence: Synthetic oligonucleotide
  Target: SCNA; (+) strand; PAM type: NRG; PAM sequence: AAG
gttgcactcttgccctgccc

SEQ ID NO: 27321 - DNA, 20 bp, Artificial Sequence
  Description of Artificial Sequence: Synthetic oligonucleotide
  Target: SCNA; (+) strand; PAM type: NRG; PAM sequence: CAG
cactcttgccctgcccaaga

SEQ ID NO: 27322 - DNA, 20 bp, Artificial Sequence
  Description of Artificial Sequence: Synthetic oligonucleotide
  Target: SCNA; (+) strand; PAM type: NRG; PAM sequence: AAG
cttgccctgcccaagacaga

SEQ ID NO: 27323 - DNA, 20 bp, Artificial Sequence
  Description of Artificial Sequence: Synthetic oligonucleotide
  Target: SCNA; (+) strand; PAM type: NRG; PAM sequence: AAG
tgcccaagacagaaagaaca

SEQ ID NO: 27324 - DNA, 20 bp, Artificial Sequence
  Description of Artificial Sequence: Synthetic oligonucleotide
  Target: SCNA; (+) strand; PAM type: NRG; PAM sequence: TGG
ccaagacagaaagaacaaag

SEQ ID NO: 27325 - DNA, 20 bp, Artificial Sequence
  Description of Artificial Sequence: Synthetic oligonucleotide
  Target: SCNA; (+) strand; PAM type: NRG; PAM sequence: GGG
caagacagaaagaacaaagt

SEQ ID NO: 27326 - DNA, 20 bp, Artificial Sequence
  Description of Artificial Sequence: Synthetic oligonucleotide
  Target: SCNA; (+) strand; PAM type: NRG; PAM sequence: CAG
aaagtgggatgaacacattt

SEQ ID NO: 27327 - DNA, 20 bp, Artificial Sequence
  Description of Artificial Sequence: Synthetic oligonucleotide
  Target: SCNA; (+) strand; PAM type: NRG; PAM sequence: CAG
aacacatttcagatgaaaca

SEQ ID NO: 27328 - DNA, 20 bp, Artificial Sequence
  Description of Artificial Sequence: Synthetic oligonucleotide
  Target: SCNA; (+) strand; PAM type: NRG; PAM sequence: GAG
cacatttcagatgaaacaca

SEQ ID NO: 27329 - DNA, 20 bp, Artificial Sequence
  Description of Artificial Sequence: Synthetic oligonucleotide
  Target: SCNA; (+) strand; PAM type: NRG; PAM sequence: TAG
gatgaaacacagagttccat

SEQ ID NO: 27330 - DNA, 20 bp, Artificial Sequence
  Description of Artificial Sequence: Synthetic oligonucleotide
  Target: SCNA; (+) strand; PAM type: NRG; PAM sequence: TGG
cacagagttccattagtgtg

SEQ ID NO: 27331 - DNA, 20 bp, Artificial Sequence
  Description of Artificial Sequence: Synthetic oligonucleotide
  Target: SCNA; (+) strand; PAM type: NRG; PAM sequence: CAG
gagttccattagtgtgtgga

SEQ ID NO: 27332 - DNA, 20 bp, Artificial Sequence
  Description of Artificial Sequence: Synthetic oligonucleotide
  Target: SCNA; (+) strand; PAM type: NRG; PAM sequence: GAG
gttccattagtgtgtggaca

SEQ ID NO: 27333 - DNA, 20 bp, Artificial Sequence
  Description of Artificial Sequence: Synthetic oligonucleotide
  Target: SCNA; (+) strand; PAM type: NRG; PAM sequence: AGG
ttccattagtgtgtggacag

SEQ ID NO: 27334 - DNA, 20 bp, Artificial Sequence
  Description of Artificial Sequence: Synthetic oligonucleotide
  Target: SCNA; (+) strand; PAM type: NRG; PAM sequence: CAG
cattagtgtgtggacagagg

SEQ ID NO: 27335 - DNA, 20 bp, Artificial Sequence
  Description of Artificial Sequence: Synthetic oligonucleotide
  Target: SCNA; (+) strand; PAM type: NRG; PAM sequence: CAG
tgtggacagaggcagtctgt

SEQ ID NO: 27336 - DNA, 20 bp, Artificial Sequence
  Description of Artificial Sequence: Synthetic oligonucleotide
  Target: SCNA; (+) strand; PAM type: NRG; PAM sequence: AGG
gtggacagaggcagtctgtc

SEQ ID NO: 27337 - DNA, 20 bp, Artificial Sequence
  Description of Artificial Sequence: Synthetic oligonucleotide
  Target: SCNA; (+) strand; PAM type: NRG; PAM sequence: CAG
gaggcagtctgtcaggttta

SEQ ID NO: 27338 - DNA, 20 bp, Artificial Sequence
  Description of Artificial Sequence: Synthetic oligonucleotide
  Target: SCNA; (+) strand; PAM type: NRG; PAM sequence: AAG
gtcaggtttacagatttgaa

SEQ ID NO: 27339 - DNA, 20 bp, Artificial Sequence
  Description of Artificial Sequence: Synthetic oligonucleotide
  Target: SCNA; (+) strand; PAM type: NRG; PAM sequence: CAG
agaaaatgtgttttcttcct

SEQ ID NO: 27340 - DNA, 20 bp, Artificial Sequence
  Description of Artificial Sequence: Synthetic oligonucleotide
  Target: SCNA; (+) strand; PAM type: NRG; PAM sequence: TGG
atgtgttttcttcctcagta

SEQ ID NO: 27341 - DNA, 20 bp, Artificial Sequence
  Description of Artificial Sequence: Synthetic oligonucleotide
  Target: SCNA; (+) strand; PAM type: NRG; PAM sequence: TAG
tttcttcctcagtatggatt

SEQ ID NO: 27342 - DNA, 20 bp, Artificial Sequence
  Description of Artificial Sequence: Synthetic oligonucleotide
  Target: SCNA; (+) strand; PAM type: NRG; PAM sequence: CAG
ttcctcagtatggatttaga

SEQ ID NO: 27343 - DNA, 20 bp, Artificial Sequence
  Description of Artificial Sequence: Synthetic oligonucleotide
  Target: SCNA; (+) strand; PAM type: NRG; PAM sequence: GAG
atttagacagcactgtcttt

SEQ ID NO: 27344 - DNA, 20 bp, Artificial Sequence
  Description of Artificial Sequence: Synthetic oligonucleotide
  Target: SCNA; (+) strand; PAM type: NRG; PAM sequence: TAG
gcactgtctttgagaattaa

SEQ ID NO: 27345 - DNA, 20 bp, Artificial Sequence
  Description of Artificial Sequence: Synthetic oligonucleotide
  Target: SCNA; (+) strand; PAM type: NRG; PAM sequence: GAG
gagaattaatagttgtcttt

SEQ ID NO: 27346 - DNA, 20 bp, Artificial Sequence
  Description of Artificial Sequence: Synthetic oligonucleotide
  Target: SCNA; (+) strand; PAM type: NRG; PAM sequence: GAG
tttgagatgtgtgaatgcat

SEQ ID NO: 27347 - DNA, 20 bp, Artificial Sequence
  Description of Artificial Sequence: Synthetic oligonucleotide
  Target: SCNA; (+) strand; PAM type: NRG; PAM sequence: TAG
tgagtgtgtttgttttaatc

SEQ ID NO: 27348 - DNA, 20 bp, Artificial Sequence
  Description of Artificial Sequence: Synthetic oligonucleotide
  Target: SCNA; (+) strand; PAM type: NRG; PAM sequence: TAG
gtgtgtttgttttaatctag

SEQ ID NO: 27349 - DNA, 20 bp, Artificial Sequence
  Description of Artificial Sequence: Synthetic oligonucleotide
  Target: SCNA; (+) strand; PAM type: NRG; PAM sequence: AAG
tgttttaatctagtagtgaa

SEQ ID NO: 27350 - DNA, 20 bp, Artificial Sequence
  Description of Artificial Sequence: Synthetic oligonucleotide
  Target: SCNA; (+) strand; PAM type: NRG; PAM sequence: AGG
gttttaatctagtagtgaaa

SEQ ID NO: 27351 - DNA, 20 bp, Artificial Sequence
  Description of Artificial Sequence: Synthetic oligonucleotide
  Target: SCNA; (+) strand; PAM type: NRG; PAM sequence: CGG
ctcacaacactcaatatttc

SEQ ID NO: 27352 - DNA, 20 bp, Artificial Sequence
  Description of Artificial Sequence: Synthetic oligonucleotide
  Target: SCNA; (+) strand; PAM type: NRG; PAM sequence: CGG
tttccggaacacaatatttc

SEQ ID NO: 27353 - DNA, 20 bp, Artificial Sequence
  Description of Artificial Sequence: Synthetic oligonucleotide
  Target: SCNA; (+) strand; PAM type: NRG; PAM sequence: TGG
tctgacaccacatgtgtgtg

SEQ ID NO: 27354 - DNA, 20 bp, Artificial Sequence
  Description of Artificial Sequence: Synthetic oligonucleotide
  Target: SCNA; (+) strand; PAM type: NRG; PAM sequence: GGG
ctgacaccacatgtgtgtgt

SEQ ID NO: 27355 - DNA, 20 bp, Artificial Sequence
  Description of Artificial Sequence: Synthetic oligonucleotide
  Target: SCNA; (+) strand; PAM type: NRG; PAM sequence: GGG
tgacaccacatgtgtgtgtg

SEQ ID NO: 27356 - DNA, 20 bp, Artificial Sequence
  Description of Artificial Sequence: Synthetic oligonucleotide
  Target: SCNA; (+) strand; PAM type: NRG; PAM sequence: AAG
tggggtgtgttttctacacc

SEQ ID NO: 27357 - DNA, 20 bp, Artificial Sequence
  Description of Artificial Sequence: Synthetic oligonucleotide
  Target: SCNA; (+) strand; PAM type: NRG; PAM sequence: TGG
agcaattctcccattctttg

SEQ ID NO: 27358 - DNA, 20 bp, Artificial Sequence
  Description of Artificial Sequence: Synthetic oligonucleotide
  Target: SCNA; (+) strand; PAM type: NRG; PAM sequence: TGG
cattctttgtggctaccaac

SEQ ID NO: 27359 - DNA, 20 bp, Artificial Sequence
  Description of Artificial Sequence: Synthetic oligonucleotide
  Target: SCNA; (+) strand; PAM type: NRG; PAM sequence: GGG
attctttgtggctaccaact

SEQ ID NO: 27360 - DNA, 20 bp, Artificial Sequence
  Description of Artificial Sequence: Synthetic oligonucleotide
  Target: SCNA; (+) strand; PAM type: NRG; PAM sequence: CGG
gggtgtcccgtaattcaaat

SEQ ID NO: 27361 - DNA, 20 bp, Artificial Sequence
  Description of Artificial Sequence: Synthetic oligonucleotide
  Target: SCNA; (+) strand; PAM type: NRG; PAM sequence: TGG
caaatcggacactatctacc

SEQ ID NO: 27362 - DNA, 20 bp, Artificial Sequence
  Description of Artificial Sequence: Synthetic oligonucleotide
  Target: SCNA; (+) strand; PAM type: NRG; PAM sequence: GAG
aatcggacactatctacctg

SEQ ID NO: 27363 - DNA, 20 bp, Artificial Sequence
  Description of Artificial Sequence: Synthetic oligonucleotide
  Target: SCNA; (+) strand; PAM type: NRG; PAM sequence: TAG
ggacactatctacctggagt

SEQ ID NO: 27364 - DNA, 20 bp, Artificial Sequence
  Description of Artificial Sequence: Synthetic oligonucleotide
  Target: SCNA; (+) strand; PAM type: NRG; PAM sequence: CAG
ctggagttagcattgaccca

SEQ ID NO: 27365 - DNA, 20 bp, Artificial Sequence
  Description of Artificial Sequence: Synthetic oligonucleotide
  Target: SCNA; (+) strand; PAM type: NRG; PAM sequence: AGG
tggagttagcattgacccac

SEQ ID NO: 27366 - DNA, 20 bp, Artificial Sequence
  Description of Artificial Sequence: Synthetic oligonucleotide
  Target: SCNA; (+) strand; PAM type: NRG; PAM sequence: AAG
ttagcattgacccacaggtt

SEQ ID NO: 27367 - DNA, 20 bp, Artificial Sequence
  Description of Artificial Sequence: Synthetic oligonucleotide
  Target: SCNA; (+) strand; PAM type: NRG; PAM sequence: AGG
tagcattgacccacaggtta

SEQ ID NO: 27368 - DNA, 20 bp, Artificial Sequence
  Description of Artificial Sequence: Synthetic oligonucleotide
  Target: SCNA; (+) strand; PAM type: NRG; PAM sequence: CAG
tgacccacaggttaaggact

SEQ ID NO: 27369 - DNA, 20 bp, Artificial Sequence
  Description of Artificial Sequence: Synthetic oligonucleotide
  Target: SCNA; (+) strand; PAM type: NRG; PAM sequence: AAG
ggttaaggactcagttttac

SEQ ID NO: 27370 - DNA, 20 bp, Artificial Sequence
  Description of Artificial Sequence: Synthetic oligonucleotide
  Target: SCNA; (+) strand; PAM type: NRG; PAM sequence: AAG
gatttttccccttcccactg

SEQ ID NO: 27371 - DNA, 20 bp, Artificial Sequence
  Description of Artificial Sequence: Synthetic oligonucleotide
  Target: SCNA; (+) strand; PAM type: NRG; PAM sequence: AAG
ccactgaagatgacaatcac

SEQ ID NO: 27372 - DNA, 20 bp, Artificial Sequence
  Description of Artificial Sequence: Synthetic oligonucleotide
  Target: SCNA; (+) strand; PAM type: NRG; PAM sequence: GAG
agatgacaatcacaagcaat

SEQ ID NO: 27373 - DNA, 20 bp, Artificial Sequence
  Description of Artificial Sequence: Synthetic oligonucleotide
  Target: SCNA; (+) strand; PAM type: NRG; PAM sequence: TAG
atgagtcctcatgttactca

SEQ ID NO: 27374 - DNA, 20 bp, Artificial Sequence
  Description of Artificial Sequence: Synthetic oligonucleotide
  Target: SCNA; (+) strand; PAM type: NRG; PAM sequence: AAG
tttgacttgtctacaaatcc

SEQ ID NO: 27375 - DNA, 20 bp, Artificial Sequence
  Description of Artificial Sequence: Synthetic oligonucleotide
  Target: SCNA; (+) strand; PAM type: NRG; PAM sequence: AGG
ttgacttgtctacaaatcca

SEQ ID NO: 27376 - DNA, 20 bp, Artificial Sequence
  Description of Artificial Sequence: Synthetic oligonucleotide
  Target: SCNA; (+) strand; PAM type: NRG; PAM sequence: CGG
ctacaaatccaaggtctcca

SEQ ID NO: 27377 - DNA, 20 bp, Artificial Sequence
  Description of Artificial Sequence: Synthetic oligonucleotide
  Target: SCNA; (+) strand; PAM type: NRG; PAM sequence: CAG
ggtctccacggccctctcct

SEQ ID NO: 27378 - DNA, 20 bp, Artificial Sequence
  Description of Artificial Sequence: Synthetic oligonucleotide
  Target: SCNA; (+) strand; PAM type: NRG; PAM sequence: AGG
gtctccacggccctctcctc

SEQ ID NO: 27379 - DNA, 20 bp, Artificial Sequence
  Description of Artificial Sequence: Synthetic oligonucleotide
  Target: SCNA; (+) strand; PAM type: NRG; PAM sequence: TAG
cctcaggtttgataatttgc

SEQ ID NO: 27380 - DNA, 20 bp, Artificial Sequence
  Description of Artificial Sequence: Synthetic oligonucleotide
  Target: SCNA; (+) strand; PAM type: NRG; PAM sequence: CAG
taatttgctagtgtgattca

SEQ ID NO: 27381 - DNA, 20 bp, Artificial Sequence
  Description of Artificial Sequence: Synthetic oligonucleotide
  Target: SCNA; (+) strand; PAM type: NRG; PAM sequence: CAG
ctagtgtgattcacagactt

SEQ ID NO: 27382 - DNA, 20 bp, Artificial Sequence
  Description of Artificial Sequence: Synthetic oligonucleotide
  Target: SCNA; (+) strand; PAM type: NRG; PAM sequence: AGG
tagtgtgattcacagacttc

SEQ ID NO: 27383 - DNA, 20 bp, Artificial Sequence
  Description of Artificial Sequence: Synthetic oligonucleotide
  Target: SCNA; (+) strand; PAM type: NRG; PAM sequence: CAG
attcacagacttcaggaaaa

SEQ ID NO: 27384 - DNA, 20 bp, Artificial Sequence
  Description of Artificial Sequence: Synthetic oligonucleotide
  Target: SCNA; (+) strand; PAM type: NRG; PAM sequence: TAG
caggaaaacagtttgcttac

SEQ ID NO: 27385 - DNA, 20 bp, Artificial Sequence
  Description of Artificial Sequence: Synthetic oligonucleotide
  Target: SCNA; (+) strand; PAM type: NRG; PAM sequence: CAG
cagtttgcttactagattac

SEQ ID NO: 27386 - DNA, 20 bp, Artificial Sequence
  Description of Artificial Sequence: Synthetic oligonucleotide
  Target: SCNA; (+) strand; PAM type: NRG; PAM sequence: AAG
agattaccagtttgttataa

SEQ ID NO: 27387 - DNA, 20 bp, Artificial Sequence
  Description of Artificial Sequence: Synthetic oligonucleotide
  Target: SCNA; (+) strand; PAM type: NRG; PAM sequence: AGG
gattaccagtttgttataaa

SEQ ID NO: 27388 - DNA, 20 bp, Artificial Sequence
  Description of Artificial Sequence: Synthetic oligonucleotide
  Target: SCNA; (+) strand; PAM type: NRG; PAM sequence: CAG
tgttataaaaggatacaact

SEQ ID NO: 27389 - DNA, 20 bp, Artificial Sequence
  Description of Artificial Sequence: Synthetic oligonucleotide
  Target: SCNA; (+) strand; PAM type: NRG; PAM sequence: AGG
gttataaaaggatacaactc

SEQ ID NO: 27390 - DNA, 20 bp, Artificial Sequence
  Description of Artificial Sequence: Synthetic oligonucleotide
  Target: SCNA; (+) strand; PAM type: NRG; PAM sequence: CAG
aaaaggatacaactcaggaa

SEQ ID NO: 27391 - DNA, 20 bp, Artificial Sequence
  Description of Artificial Sequence: Synthetic oligonucleotide
  Target: SCNA; (+) strand; PAM type: NRG; PAM sequence: CAG
ggatacaactcaggaacagc

SEQ ID NO: 27392 - DNA, 20 bp, Artificial Sequence
  Description of Artificial Sequence: Synthetic oligonucleotide
  Target: SCNA; (+) strand; PAM type: NRG; PAM sequence: TGG
acaactcaggaacagccaga

SEQ ID NO: 27393 - DNA, 20 bp, Artificial Sequence
  Description of Artificial Sequence: Synthetic oligonucleotide
  Target: SCNA; (+) strand; PAM type: NRG; PAM sequence: AAG
actcaggaacagccagatgg

SEQ ID NO: 27394 - DNA, 20 bp, Artificial Sequence
  Description of Artificial Sequence: Synthetic oligonucleotide
  Target: SCNA; (+) strand; PAM type: NRG; PAM sequence: GAG
tcaggaacagccagatggaa

SEQ ID NO: 27395 - DNA, 20 bp, Artificial Sequence
  Description of Artificial Sequence: Synthetic oligonucleotide
  Target: SCNA; (+) strand; PAM type: NRG; PAM sequence: CAG
agccagatggaagagatgca

SEQ ID NO: 27396 - DNA, 20 bp, Artificial Sequence
  Description of Artificial Sequence: Synthetic oligonucleotide
  Target: SCNA; (+) strand; PAM type: NRG; PAM sequence: AGG
gccagatggaagagatgcac

SEQ ID NO: 27397 - DNA, 20 bp, Artificial Sequence
  Description of Artificial Sequence: Synthetic oligonucleotide
  Target: SCNA; (+) strand; PAM type: NRG; PAM sequence: GGG
ccagatggaagagatgcaca

SEQ ID NO: 27398 - DNA, 20 bp, Artificial Sequence
  Description of Artificial Sequence: Synthetic oligonucleotide
  Target: SCNA; (+) strand; PAM type: NRG; PAM sequence: AAG
atggaagagatgcacaggga

SEQ ID NO: 27399 - DNA, 20 bp, Artificial Sequence
  Description of Artificial Sequence: Synthetic oligonucleotide
  Target: SCNA; (+) strand; PAM type: NRG; PAM sequence: AGG
tggaagagatgcacagggaa

SEQ ID NO: 27400 - DNA, 20 bp, Artificial Sequence
  Description of Artificial Sequence: Synthetic oligonucleotide
  Target: SCNA; (+) strand; PAM type: NRG; PAM sequence: TGG
gagatgcacagggaaaggta

SEQ ID NO: 27401 - DNA, 20 bp, Artificial Sequence
  Description of Artificial Sequence: Synthetic oligonucleotide
  Target: SCNA; (+) strand; PAM type: NRG; PAM sequence: GGG
agatgcacagggaaaggtat

SEQ ID NO: 27402 - DNA, 20 bp, Artificial Sequence
  Description of Artificial Sequence: Synthetic oligonucleotide
  Target: SCNA; (+) strand; PAM type: NRG; PAM sequence: GGG
gatgcacagggaaaggtatg

SEQ ID NO: 27403 - DNA, 20 bp, Artificial Sequence
  Description of Artificial Sequence: Synthetic oligonucleotide
  Target: SCNA; (+) strand; PAM type: NRG; PAM sequence: GGG
atgcacagggaaaggtatgg

SEQ ID NO: 27404 - DNA, 20 bp, Artificial Sequence
  Description of Artificial Sequence: Synthetic oligonucleotide
  Target: SCNA; (+) strand; PAM type: NRG; PAM sequence: GAG
gcacagggaaaggtatgggg

SEQ ID NO: 27405 - DNA, 20 bp, Artificial Sequence
  Description of Artificial Sequence: Synthetic oligonucleotide
  Target: SCNA; (+) strand; PAM type: NRG; PAM sequence: AGG
cacagggaaaggtatggggg

SEQ ID NO: 27406 - DNA, 20 bp, Artificial Sequence
  Description of Artificial Sequence: Synthetic oligonucleotide
  Target: SCNA; (+) strand; PAM type: NRG; PAM sequence: TGG
ggaaaggtatgggggaggcg

SEQ ID NO: 27407 - DNA, 20 bp, Artificial Sequence
  Description of Artificial Sequence: Synthetic oligonucleotide
  Target: SCNA; (+) strand; PAM type: NRG; PAM sequence: GGG
gaaaggtatgggggaggcgt

SEQ ID NO: 27408 - DNA, 20 bp, Artificial Sequence
  Description of Artificial Sequence: Synthetic oligonucleotide
  Target: SCNA; (+) strand; PAM type: NRG; PAM sequence: GGG
aaaggtatgggggaggcgtg

SEQ ID NO: 27409 - DNA, 20 bp, Artificial Sequence
  Description of Artificial Sequence: Synthetic oligonucleotide
  Target: SCNA; (+) strand; PAM type: NRG; PAM sequence: GAG
aggtatgggggaggcgtggg

SEQ ID NO: 27410 - DNA, 20 bp, Artificial Sequence
  Description of Artificial Sequence: Synthetic oligonucleotide
  Target: SCNA; (+) strand; PAM type: NRG; PAM sequence: TGG
gggagcttgcatgccttctc

SEQ ID NO: 27411 - DNA, 20 bp, Artificial Sequence
  Description of Artificial Sequence: Synthetic oligonucleotide
  Target: SCNA; (+) strand; PAM type: NRG; PAM sequence: CAG
tctggacacaccacaattcc

SEQ ID NO: 27412 - DNA, 20 bp, Artificial Sequence
  Description of Artificial Sequence: Synthetic oligonucleotide
  Target: SCNA; (+) strand; PAM type: NRG; PAM sequence: AAG
ctgcatgttcacctatttca

SEQ ID NO: 27413 - DNA, 20 bp, Artificial Sequence
  Description of Artificial Sequence: Synthetic oligonucleotide
  Target: SCNA; (+) strand; PAM type: NRG; PAM sequence: TAG
gcactctgaatcctgtcttt

SEQ ID NO: 27414 - DNA, 20 bp, Artificial Sequence
  Description of Artificial Sequence: Synthetic oligonucleotide
  Target: SCNA; (+) strand; PAM type: NRG; PAM sequence: AGG
cactctgaatcctgtctttt

SEQ ID NO: 27415 - DNA, 20 bp, Artificial Sequence
  Description of Artificial Sequence: Synthetic oligonucleotide
  Target: SCNA; (+) strand; PAM type: NRG; PAM sequence: GGG
actctgaatcctgtctttta

SEQ ID NO: 27416 - DNA, 20 bp, Artificial Sequence
  Description of Artificial Sequence: Synthetic oligonucleotide
  Target: SCNA; (+) strand; PAM type: NRG; PAM sequence: TGG
ctgtcttttagggattttta

SEQ ID NO: 27417 - DNA, 20 bp, Artificial Sequence
  Description of Artificial Sequence: Synthetic oligonucleotide
  Target: SCNA; (+) strand; PAM type: NRG; PAM sequence: GAG
gtcttttagggatttttatg

SEQ ID NO: 27418 - DNA, 20 bp, Artificial Sequence
  Description of Artificial Sequence: Synthetic oligonucleotide
  Target: SCNA; (+) strand; PAM type: NRG; PAM sequence: TGG
tttttatggagtcttcatca

SEQ ID NO: 27419 - DNA, 20 bp, Artificial Sequence
  Description of Artificial Sequence: Synthetic oligonucleotide
  Target: SCNA; (+) strand; PAM type: NRG; PAM sequence: AAG
ttatggagtcttcatcatgg

SEQ ID NO: 27420 - DNA, 20 bp, Artificial Sequence
  Description of Artificial Sequence: Synthetic oligonucleotide
  Target: SCNA; (+) strand; PAM type: NRG; PAM sequence: CAG
ttgcttattaactcaatctc

SEQ ID NO: 27421 - DNA, 20 bp, Artificial Sequence
  Description of Artificial Sequence: Synthetic oligonucleotide
  Target: SCNA; (+) strand; PAM type: NRG; PAM sequence: CAG
ctcctcttctctcccgtccc

SEQ ID NO: 27422 - DNA, 20 bp, Artificial Sequence
  Description of Artificial Sequence: Synthetic oligonucleotide
  Target: SCNA; (+) strand; PAM type: NRG; PAM sequence: AAG
ctcttctctcccgtccccag

SEQ ID NO: 27423 - DNA, 20 bp, Artificial Sequence
  Description of Artificial Sequence: Synthetic oligonucleotide
  Target: SCNA; (+) strand; PAM type: NRG; PAM sequence: TGG
ccgtccccagaagatgtgaa

SEQ ID NO: 27424 - DNA, 20 bp, Artificial Sequence
  Description of Artificial Sequence: Synthetic oligonucleotide
  Target: SCNA; (+) strand; PAM type: NRG; PAM sequence: GGG
cgtccccagaagatgtgaat

SEQ ID NO: 27425 - DNA, 20 bp, Artificial Sequence
  Description of Artificial Sequence: Synthetic oligonucleotide
  Target: SCNA; (+) strand; PAM type: NRG; PAM sequence: GGG
gtccccagaagatgtgaatg

SEQ ID NO: 27426 - DNA, 20 bp, Artificial Sequence
  Description of Artificial Sequence: Synthetic oligonucleotide
  Target: SCNA; (+) strand; PAM type: NRG; PAM sequence: AAG
gaagatgtgaatggggccaa

SEQ ID NO: 27427 - DNA, 20 bp, Artificial Sequence
  Description of Artificial Sequence: Synthetic oligonucleotide
  Target: SCNA; (+) strand; PAM type: NRG; PAM sequence: AAG
tgaatggggccaaaagcttc

SEQ ID NO: 27428 - DNA, 20 bp, Artificial Sequence
  Description of Artificial Sequence: Synthetic oligonucleotide
  Target: SCNA; (+) strand; PAM type: NRG; PAM sequence: TGG
aagcttcaagcttcttatca

SEQ ID NO: 27429 - DNA, 20 bp, Artificial Sequence
  Description of Artificial Sequence: Synthetic oligonucleotide
  Target: SCNA; (+) strand; PAM type: NRG; PAM sequence: TGG
ttatcatggcttgacctttc

SEQ ID NO: 27430 - DNA, 20 bp, Artificial Sequence
  Description of Artificial Sequence: Synthetic oligonucleotide
  Target: SCNA; (+) strand; PAM type: NRG; PAM sequence: CAG
ggcttgacctttctggtgac

SEQ ID NO: 27431 - DNA, 20 bp, Artificial Sequence
  Description of Artificial Sequence: Synthetic oligonucleotide
  Target: SCNA; (+) strand; PAM type: NRG; PAM sequence: CAG
tctggtgaccagcccccatc

SEQ ID NO: 27432 - DNA, 20 bp, Artificial Sequence
  Description of Artificial Sequence: Synthetic oligonucleotide
  Target: SCNA; (+) strand; PAM type: NRG; PAM sequence: AGG
ctggtgaccagcccccatcc

SEQ ID NO: 27433 - DNA, 20 bp, Artificial Sequence
  Description of Artificial Sequence: Synthetic oligonucleotide
  Target: SCNA; (+) strand; PAM type: NRG; PAM sequence: CAG
ccagcccccatccaggaacc

SEQ ID NO: 27434 - DNA, 20 bp, Artificial Sequence
  Description of Artificial Sequence: Synthetic oligonucleotide
  Target: SCNA; (+) strand; PAM type: NRG; PAM sequence: AAG
cccccatccaggaacccagc

SEQ ID NO: 27435 - DNA, 20 bp, Artificial Sequence
  Description of Artificial Sequence: Synthetic oligonucleotide
  Target: SCNA; (+) strand; PAM type: NRG; PAM sequence: GAG
cccatccaggaacccagcaa

SEQ ID NO: 27436 - DNA, 20 bp, Artificial Sequence
  Description of Artificial Sequence: Synthetic oligonucleotide
  Target: SCNA; (+) strand; PAM type: NRG; PAM sequence: TAG
cccagcaagagtcacttcat

SEQ ID NO: 27437 - DNA, 20 bp, Artificial Sequence
  Description of Artificial Sequence: Synthetic oligonucleotide
  Target: SCNA; (+) strand; PAM type: NRG; PAM sequence: AAG
agcaagagtcacttcattag

SEQ ID NO: 27438 - DNA, 20 bp, Artificial Sequence
  Description of Artificial Sequence: Synthetic oligonucleotide
  Target: SCNA; (+) strand; PAM type: NRG; PAM sequence: GAG
caagagtcacttcattagaa

SEQ ID NO: 27439 - DNA, 20 bp, Artificial Sequence
  Description of Artificial Sequence: Synthetic oligonucleotide
  Target: SCNA; (+) strand; PAM type: NRG; PAM sequence: AAG
gagtcacttcattagaagag

SEQ ID NO: 27440 - DNA, 20 bp, Artificial Sequence
  Description of Artificial Sequence: Synthetic oligonucleotide
  Target: SCNA; (+) strand; PAM type: NRG; PAM sequence: CAG
gagaagatgctactctcacc

SEQ ID NO: 27441 - DNA, 20 bp, Artificial Sequence
  Description of Artificial Sequence: Synthetic oligonucleotide
  Target: SCNA; (+) strand; PAM type: NRG; PAM sequence: AGG
agaagatgctactctcaccc

SEQ ID NO: 27442 - DNA, 20 bp, Artificial Sequence
  Description of Artificial Sequence: Synthetic oligonucleotide
  Target: SCNA; (+) strand; PAM type: NRG; PAM sequence: GGG
gaagatgctactctcaccca

SEQ ID NO: 27443 - DNA, 20 bp, Artificial Sequence
  Description of Artificial Sequence: Synthetic oligonucleotide
  Target: SCNA; (+) strand; PAM type: NRG; PAM sequence: AAG
gctactctcacccagggact

SEQ ID NO: 27444 - DNA, 20 bp, Artificial Sequence
  Description of Artificial Sequence: Synthetic oligonucleotide
  Target: SCNA; (+) strand; PAM type: NRG; PAM sequence: AGG
ctactctcacccagggacta

SEQ ID NO: 27445 - DNA, 20 bp, Artificial Sequence
  Description of Artificial Sequence: Synthetic oligonucleotide
  Target: SCNA; (+) strand; PAM type: NRG; PAM sequence: GAG
actctcacccagggactaag

SEQ ID NO: 27446 - DNA, 20 bp, Artificial Sequence
  Description of Artificial Sequence: Synthetic oligonucleotide
  Target: SCNA; (+) strand; PAM type: NRG; PAM sequence: CAG
cagggactaaggagctctgt

SEQ ID NO: 27447 - DNA, 20 bp, Artificial Sequence
  Description of Artificial Sequence: Synthetic oligonucleotide
  Target: SCNA; (+) strand; PAM type: NRG; PAM sequence: AAG
gactaaggagctctgtcaga

SEQ ID NO: 27448 - DNA, 20 bp, Artificial Sequence
  Description of Artificial Sequence: Synthetic oligonucleotide
  Target: SCNA; (+) strand; PAM type: NRG; PAM sequence: CAG
taaggagctctgtcagaaag

SEQ ID NO: 27449 - DNA, 20 bp, Artificial Sequence
  Description of Artificial Sequence: Synthetic oligonucleotide
  Target: SCNA; (+) strand; PAM type: NRG; PAM sequence: GAG
aggagctctgtcagaaagca

SEQ ID NO: 27450 - DNA, 20 bp, Artificial Sequence
  Description of Artificial Sequence: Synthetic oligonucleotide
  Target: SCNA; (+) strand; PAM type: NRG; PAM sequence: AAG
tctgtcagaaagcagagtca

SEQ ID NO: 27451 - DNA, 20 bp, Artificial Sequence
  Description of Artificial Sequence: Synthetic oligonucleotide
  Target: SCNA; (+) strand; PAM type: NRG; PAM sequence: TAG
cagagtcaaagaccaaatat

SEQ ID NO: 27452 - DNA, 20 bp, Artificial Sequence
  Description of Artificial Sequence: Synthetic oligonucleotide
  Target: SCNA; (+) strand; PAM type: NRG; PAM sequence: AAG
aagaccaaatattagaacaa

SEQ ID NO: 27453 - DNA, 20 bp, Artificial Sequence
  Description of Artificial Sequence: Synthetic oligonucleotide
  Target: SCNA; (+) strand; PAM type: NRG; PAM sequence: TAG
attagaacaaaagatgaccc

SEQ ID NO: 27454 - DNA, 20 bp, Artificial Sequence
  Description of Artificial Sequence: Synthetic oligonucleotide
  Target: SCNA; (+) strand; PAM type: NRG; PAM sequence: CAG
accctagcacccctactact

SEQ ID NO: 27455 - DNA, 20 bp, Artificial Sequence
  Description of Artificial Sequence: Synthetic oligonucleotide
  Target: SCNA; (+) strand; PAM type: NRG; PAM sequence: AGG
ccctagcacccctactactc

SEQ ID NO: 27456 - DNA, 20 bp, Artificial Sequence
  Description of Artificial Sequence: Synthetic oligonucleotide
  Target: SCNA; (+) strand; PAM type: NRG; PAM sequence: AAG
cctactactcaggaaattac

SEQ ID NO: 27457 - DNA, 20 bp, Artificial Sequence
  Description of Artificial Sequence: Synthetic oligonucleotide
  Target: SCNA; (+) strand; PAM type: NRG; PAM sequence: AGG
ctactactcaggaaattaca

SEQ ID NO: 27458 - DNA, 20 bp, Artificial Sequence
  Description of Artificial Sequence: Synthetic oligonucleotide
  Target: SCNA; (+) strand; PAM type: NRG; PAM sequence: GGG
tactactcaggaaattacaa

SEQ ID NO: 27459 - DNA, 20 bp, Artificial Sequence
  Description of Artificial Sequence: Synthetic oligonucleotide
  Target: SCNA; (+) strand; PAM type: NRG; PAM sequence: TAG
tcaggaaattacaagggttt

SEQ ID NO: 27460 - DNA, 20 bp, Artificial Sequence
  Description of Artificial Sequence: Synthetic oligonucleotide
  Target: SCNA; (+) strand; PAM type: NRG; PAM sequence: AGG
caggaaattacaagggtttt

SEQ ID NO: 27461 - DNA, 20 bp, Artificial Sequence
  Description of Artificial Sequence: Synthetic oligonucleotide
  Target: SCNA; (+) strand; PAM type: NRG; PAM sequence: GAG
ggaaattacaagggttttag

SEQ ID NO: 27462 - DNA, 20 bp, Artificial Sequence
  Description of Artificial Sequence: Synthetic oligonucleotide
  Target: SCNA; (+) strand; PAM type: NRG; PAM sequence: AAG
gggttttaggagctctttgt

SEQ ID NO: 27463 - DNA, 20 bp, Artificial Sequence
  Description of Artificial Sequence: Synthetic oligonucleotide
  Target: SCNA; (+) strand; PAM type: NRG; PAM sequence: TGG
taggagctctttgtaagaac

SEQ ID NO: 27464 - DNA, 20 bp, Artificial Sequence
  Description of Artificial Sequence: Synthetic oligonucleotide
  Target: SCNA; (+) strand; PAM type: NRG; PAM sequence: GAG
ggagctctttgtaagaactg

SEQ ID NO: 27465 - DNA, 20 bp, Artificial Sequence
  Description of Artificial Sequence: Synthetic oligonucleotide
  Target: SCNA; (+) strand; PAM type: NRG; PAM sequence: AGG
gagctctttgtaagaactgg

SEQ ID NO: 27466 - DNA, 20 bp, Artificial Sequence
  Description of Artificial Sequence: Synthetic oligonucleotide
  Target: SCNA; (+) strand; PAM type: NRG; PAM sequence: CAG
ctctttgtaagaactggagg

SEQ ID NO: 27467 - DNA, 20 bp, Artificial Sequence
  Description of Artificial Sequence: Synthetic oligonucleotide
  Target: SCNA; (+) strand; PAM type: NRG; PAM sequence: TAG
tatatttattatgtcacaaa

SEQ ID NO: 27468 - DNA, 20 bp, Artificial Sequence
  Description of Artificial Sequence: Synthetic oligonucleotide
  Target: SCNA; (+) strand; PAM type: NRG; PAM sequence: TGG
tgtcacaaatagctacatac

SEQ ID NO: 27469 - DNA, 20 bp, Artificial Sequence
  Description of Artificial Sequence: Synthetic oligonucleotide
  Target: SCNA; (+) strand; PAM type: NRG; PAM sequence: AAG
caaatagctacatactggat

SEQ ID NO: 27470 - DNA, 20 bp, Artificial Sequence
  Description of Artificial Sequence: Synthetic oligonucleotide
  Target: SCNA; (+) strand; PAM type: NRG; PAM sequence: CAG
tagctacatactggataagc

SEQ ID NO: 27471 - DNA, 20 bp, Artificial Sequence
  Description of Artificial Sequence: Synthetic oligonucleotide
  Target: SCNA; (+) strand; PAM type: NRG; PAM sequence: AAG
tacatactggataagccaga

SEQ ID NO: 27472 - DNA, 20 bp, Artificial Sequence
  Description of Artificial Sequence: Synthetic oligonucleotide
  Target: SCNA; (+) strand; PAM type: NRG; PAM sequence: GAG
actggataagccagaaagat

SEQ ID NO: 27473 - DNA, 20 bp, Artificial Sequence
  Description of Artificial Sequence: Synthetic oligonucleotide
  Target: SCNA; (+) strand; PAM type: NRG; PAM sequence: AGG
ctggataagccagaaagatg

SEQ ID NO: 27474 - DNA, 20 bp, Artificial Sequence
  Description of Artificial Sequence: Synthetic oligonucleotide
  Target: SCNA; (+) strand; PAM type: NRG; PAM sequence: TAG
aacatgtttgcatctcacac

SEQ ID NO: 27475 - DNA, 20 bp, Artificial Sequence
  Description of Artificial Sequence: Synthetic oligonucleotide
  Target: SCNA; (+) strand; PAM type: NRG; PAM sequence: CAG
gtttgcatctcacactagtg

SEQ ID NO: 27476 - DNA, 20 bp, Artificial Sequence
  Description of Artificial Sequence: Synthetic oligonucleotide
  Target: SCNA; (+) strand; PAM type: NRG; PAM sequence: GAG
ttgcatctcacactagtgca

SEQ ID NO: 27477 - DNA, 20 bp, Artificial Sequence
  Description of Artificial Sequence: Synthetic oligonucleotide
  Target: SCNA; (+) strand; PAM type: NRG; PAM sequence: AAG
ctagtgcagagattctgaaa

SEQ ID NO: 27478 - DNA, 20 bp, Artificial Sequence
  Description of Artificial Sequence: Synthetic oligonucleotide
  Target: SCNA; (+) strand; PAM type: NRG; PAM sequence: TGG
attctgaaaaagaccccact

SEQ ID NO: 27479 - DNA, 20 bp, Artificial Sequence
  Description of Artificial Sequence: Synthetic oligonucleotide
  Target: SCNA; (+) strand; PAM type: NRG; PAM sequence: TAG
tggaataccaaaccacacat

SEQ ID NO: 27480 - DNA, 20 bp, Artificial Sequence
  Description of Artificial Sequence: Synthetic oligonucleotide
  Target: SCNA; (+) strand; PAM type: NRG; PAM sequence: AAG
ctgttcccaattgtgtgcca

SEQ ID NO: 27481 - DNA, 20 bp, Artificial Sequence
  Description of Artificial Sequence: Synthetic oligonucleotide
  Target: SCNA; (+) strand; PAM type: NRG; PAM sequence: TGG
aagtgcactctgaactgttt

SEQ ID NO: 27482 - DNA, 20 bp, Artificial Sequence
  Description of Artificial Sequence: Synthetic oligonucleotide
  Target: SCNA; (+) strand; PAM type: NRG; PAM sequence: AAG
cactctgaactgttttggta

SEQ ID NO: 27483 - DNA, 20 bp, Artificial Sequence
  Description of Artificial Sequence: Synthetic oligonucleotide
  Target: SCNA; (+) strand; PAM type: NRG; PAM sequence: TGG
tgttttggtaaagccgaccg

SEQ ID NO: 27484 - DNA, 20 bp, Artificial Sequence
  Description of Artificial Sequence: Synthetic oligonucleotide
  Target: SCNA; (+) strand; PAM type: NRG; PAM sequence: GAG
ttttggtaaagccgaccgtg

SEQ ID NO: 27485 - DNA, 20 bp, Artificial Sequence
  Description of Artificial Sequence: Synthetic oligonucleotide
  Target: SCNA; (+) strand; PAM type: NRG; PAM sequence: GAG
agccgaccgtggagtcatat

SEQ ID NO: 27486 - DNA, 20 bp, Artificial Sequence
  Description of Artificial Sequence: Synthetic oligonucleotide
  Target: SCNA; (+) strand; PAM type: NRG; PAM sequence: AGG
gccgaccgtggagtcatatg

SEQ ID NO: 27487 - DNA, 20 bp, Artificial Sequence
  Description of Artificial Sequence: Synthetic oligonucleotide
  Target: SCNA; (+) strand; PAM type: NRG; PAM sequence: TGG
tcatatgaggctgaataact

SEQ ID NO: 27488 - DNA, 20 bp, Artificial Sequence
  Description of Artificial Sequence: Synthetic oligonucleotide
  Target: SCNA; (+) strand; PAM type: NRG; PAM sequence: GGG
catatgaggctgaataactt

SEQ ID NO: 27489 - DNA, 20 bp, Artificial Sequence
  Description of Artificial Sequence: Synthetic oligonucleotide
  Target: SCNA; (+) strand; PAM type: NRG; PAM sequence: GAG
tatgaggctgaataacttgg

SEQ ID NO: 27490 - DNA, 20 bp, Artificial Sequence
  Description of Artificial Sequence: Synthetic oligonucleotide
  Target: SCNA; (+) strand; PAM type: NRG; PAM sequence: AAG
tgaataacttgggagaatgt

SEQ ID NO: 27491 - DNA, 20 bp, Artificial Sequence
  Description of Artificial Sequence: Synthetic oligonucleotide
  Target: SCNA; (+) strand; PAM type: NRG; PAM sequence: TAG
gtaagtctgcaaaataaacc

SEQ ID NO: 27492 - DNA, 20 bp, Artificial Sequence
  Description of Artificial Sequence: Synthetic oligonucleotide
  Target: SCNA; (+) strand; PAM type: NRG; PAM sequence: AGG
taagtctgcaaaataaacct

SEQ ID NO: 27493 - DNA, 20 bp, Artificial Sequence
  Description of Artificial Sequence: Synthetic oligonucleotide
  Target: SCNA; (+) strand; PAM type: NRG; PAM sequence: TGG
ctgcaaaataaacctaggac

SEQ ID NO: 27494 - DNA, 20 bp, Artificial Sequence
  Description of Artificial Sequence: Synthetic oligonucleotide
  Target: SCNA; (+) strand; PAM type: NRG; PAM sequence: CAG
cctaggactggattgatcct

SEQ ID NO: 27495 - DNA, 20 bp, Artificial Sequence
  Description of Artificial Sequence: Synthetic oligonucleotide
  Target: SCNA; (+) strand; PAM type: NRG; PAM sequence: AGG
ctaggactggattgatcctc

SEQ ID NO: 27496 - DNA, 20 bp, Artificial Sequence
  Description of Artificial Sequence: Synthetic oligonucleotide
  Target: SCNA; (+) strand; PAM type: NRG; PAM sequence: TGG
ggattgatcctcaggccact

SEQ ID NO: 27497 - DNA, 20 bp, Artificial Sequence
  Description of Artificial Sequence: Synthetic oligonucleotide
  Target: SCNA; (+) strand; PAM type: NRG; PAM sequence: CAG
ttgatcctcaggccacttgg

SEQ ID NO: 27498 - DNA, 20 bp, Artificial Sequence
  Description of Artificial Sequence: Synthetic oligonucleotide
  Target: SCNA; (+) strand; PAM type: NRG; PAM sequence: AGG
tgatcctcaggccacttggc

SEQ ID NO: 27499 - DNA, 20 bp, Artificial Sequence
  Description of Artificial Sequence: Synthetic oligonucleotide
  Target: SCNA; (+) strand; PAM type: NRG; PAM sequence: CGG
cacttggcaggtgaatgtct

SEQ ID NO: 27500 - DNA, 20 bp, Artificial Sequence
  Description of Artificial Sequence: Synthetic oligonucleotide
  Target: SCNA; (+) strand; PAM type: NRG; PAM sequence: GGG
acttggcaggtgaatgtctc

SEQ ID NO: 27501 - DNA, 20 bp, Artificial Sequence
  Description of Artificial Sequence: Synthetic oligonucleotide
  Target: SCNA; (+) strand; PAM type: NRG; PAM sequence: GAG
ttggcaggtgaatgtctcgg

SEQ ID NO: 27502 - DNA, 20 bp, Artificial Sequence
  Description of Artificial Sequence: Synthetic oligonucleotide
  Target: SCNA; (+) strand; PAM type: NRG; PAM sequence: GAG
aatgtctcgggagtgaatat

SEQ ID NO: 27503 - DNA, 20 bp, Artificial Sequence
  Description of Artificial Sequence: Synthetic oligonucleotide
  Target: SCNA; (+) strand; PAM type: NRG; PAM sequence: AAG
ctcgggagtgaatatgagac

SEQ ID NO: 27504 - DNA, 20 bp, Artificial Sequence
  Description of Artificial Sequence: Synthetic oligonucleotide
  Target: SCNA; (+) strand; PAM type: NRG; PAM sequence: AAG
tatgagacaagcttcctgaa

SEQ ID NO: 27505 - DNA, 20 bp, Artificial Sequence
  Description of Artificial Sequence: Synthetic oligonucleotide
  Target: SCNA; (+) strand; PAM type: NRG; PAM sequence: AGG
atgagacaagcttcctgaaa

SEQ ID NO: 27506 - DNA, 20 bp, Artificial Sequence
  Description of Artificial Sequence: Synthetic oligonucleotide
  Target: SCNA; (+) strand; PAM type: NRG; PAM sequence: AAG
gaaaaggcttatatgactta

SEQ ID NO: 27507 - DNA, 20 bp, Artificial Sequence
  Description of Artificial Sequence: Synthetic oligonucleotide
  Target: SCNA; (+) strand; PAM type: NRG; PAM sequence: AAG
acttaaagaactttttgttt

SEQ ID NO: 27508 - DNA, 20 bp, Artificial Sequence
  Description of Artificial Sequence: Synthetic oligonucleotide
  Target: SCNA; (+) strand; PAM type: NRG; PAM sequence: TGG
gaactttttgtttaagtgtt

SEQ ID NO: 27509 - DNA, 20 bp, Artificial Sequence
  Description of Artificial Sequence: Synthetic oligonucleotide
  Target: SCNA; (+) strand; PAM type: NRG; PAM sequence: AAG
ttggtcccaaataaactatt

SEQ ID NO: 27510 - DNA, 20 bp, Artificial Sequence
  Description of Artificial Sequence: Synthetic oligonucleotide
  Target: SCNA; (+) strand; PAM type: NRG; PAM sequence: AAG
ataaactattaagatatata

SEQ ID NO: 27511 - DNA, 20 bp, Artificial Sequence
  Description of Artificial Sequence: Synthetic oligonucleotide
  Target: SCNA; (+) strand; PAM type: NRG; PAM sequence: CAG
cactgctcaaaaattaccgt

SEQ ID NO: 27512 - DNA, 20 bp, Artificial Sequence
  Description of Artificial Sequence: Synthetic oligonucleotide
  Target: SCNA; (+) strand; PAM type: NRG; PAM sequence: AAG
attaccgtcagataaatatt

SEQ ID NO: 27513 - DNA, 20 bp, Artificial Sequence
  Description of Artificial Sequence: Synthetic oligonucleotide
  Target: SCNA; (+) strand; PAM type: NRG; PAM sequence: AGG
ttaccgtcagataaatatta

SEQ ID NO: 27514 - DNA, 20 bp, Artificial Sequence
  Description of Artificial Sequence: Synthetic oligonucleotide
  Target: SCNA; (+) strand; PAM type: NRG; PAM sequence: GGG
taccgtcagataaatattaa

SEQ ID NO: 27515 - DNA, 20 bp, Artificial Sequence
  Description of Artificial Sequence: Synthetic oligonucleotide
  Target: SCNA; (+) strand; PAM type: NRG; PAM sequence: AAG
cgtcagataaatattaaggg

SEQ ID NO: 27516 - DNA, 20 bp, Artificial Sequence
  Description of Artificial Sequence: Synthetic oligonucleotide
  Target: SCNA; (+) strand; PAM type: NRG; PAM sequence: AAG
ttaagggaagaaacacttta

SEQ ID NO: 27517 - DNA, 20 bp, Artificial Sequence
  Description of Artificial Sequence: Synthetic oligonucleotide
  Target: SCNA; (+) strand; PAM type: NRG; PAM sequence: AGG
taagggaagaaacactttaa

SEQ ID NO: 27518 - DNA, 20 bp, Artificial Sequence
  Description of Artificial Sequence: Synthetic oligonucleotide
  Target: SCNA; (+) strand; PAM type: NRG; PAM sequence: GAG
agggaagaaacactttaaag

SEQ ID NO: 27519 - DNA, 20 bp, Artificial Sequence
  Description of Artificial Sequence: Synthetic oligonucleotide
  Target: SCNA; (+) strand; PAM type: NRG; PAM sequence: TGG
cacataaatccttaaattca

SEQ ID NO: 27520 - DNA, 20 bp, Artificial Sequence
  Description of Artificial Sequence: Synthetic oligonucleotide
  Target: SCNA; (+) strand; PAM type: NRG; PAM sequence: TAG
ttcctaatctcaaattgttc

SEQ ID NO: 27521 - DNA, 20 bp, Artificial Sequence
  Description of Artificial Sequence: Synthetic oligonucleotide
  Target: SCNA; (+) strand; PAM type: NRG; PAM sequence: AGG
tcctaatctcaaattgttct

SEQ ID NO: 27522 - DNA, 20 bp, Artificial Sequence
  Description of Artificial Sequence: Synthetic oligonucleotide
  Target: SCNA; (+) strand; PAM type: NRG; PAM sequence: CAG
ttgttctaggtcactgctat

SEQ ID NO: 27523 - DNA, 20 bp, Artificial Sequence
  Description of Artificial Sequence: Synthetic oligonucleotide
  Target: SCNA; (+) strand; PAM type: NRG; PAM sequence: TAG
ctaggtcactgctatcagtc

SEQ ID NO: 27524 - DNA, 20 bp, Artificial Sequence
  Description of Artificial Sequence: Synthetic oligonucleotide
  Target: SCNA; (+) strand; PAM type: NRG; PAM sequence: TAG
atttttaaaatatgctgctt

SEQ ID NO: 27525 - DNA, 20 bp, Artificial Sequence
  Description of Artificial Sequence: Synthetic oligonucleotide
  Target: SCNA; (+) strand; PAM type: NRG; PAM sequence: AGG
tttttaaaatatgctgcttt

SEQ ID NO: 27526 - DNA, 20 bp, Artificial Sequence
  Description of Artificial Sequence: Synthetic oligonucleotide
  Target: SCNA; (+) strand; PAM type: NRG; PAM sequence: TAG
ttaaaatatgctgctttagg

SEQ ID NO: 27527 - DNA, 20 bp, Artificial Sequence
  Description of Artificial Sequence: Synthetic oligonucleotide
  Target: SCNA; (+) strand; PAM type: NRG; PAM sequence: AAG
aaacataacttaaataaaac

SEQ ID NO: 27528 - DNA, 20 bp, Artificial Sequence
  Description of Artificial Sequence: Synthetic oligonucleotide
  Target: SCNA; (+) strand; PAM type: NRG; PAM sequence: TAG
agaaacttaccatttctctc

SEQ ID NO: 27529 - DNA, 20 bp, Artificial Sequence
  Description of Artificial Sequence: Synthetic oligonucleotide
  Target: SCNA; (+) strand; PAM type: NRG; PAM sequence: AAG
ttaccatttctctctagtgt

SEQ ID NO: 27530 - DNA, 20 bp, Artificial Sequence
  Description of Artificial Sequence: Synthetic oligonucleotide
  Target: SCNA; (+) strand; PAM type: NRG; PAM sequence: CAG
ctagtgtaagatgacacatg

SEQ ID NO: 27531 - DNA, 20 bp, Artificial Sequence
  Description of Artificial Sequence: Synthetic oligonucleotide
  Target: SCNA; (+) strand; PAM type: NRG; PAM sequence: TAG
gtaagatgacacatgcagct

SEQ ID NO: 27532 - DNA, 20 bp, Artificial Sequence
  Description of Artificial Sequence: Synthetic oligonucleotide
  Target: SCNA; (+) strand; PAM type: NRG; PAM sequence: TAG
acatgcagcttagcactctg

SEQ ID NO: 27533 - DNA, 20 bp, Artificial Sequence
  Description of Artificial Sequence: Synthetic oligonucleotide
  Target: SCNA; (+) strand; PAM type: NRG; PAM sequence: TAG
tgcagcttagcactctgtag

SEQ ID NO: 27534 - DNA, 20 bp, Artificial Sequence
  Description of Artificial Sequence: Synthetic oligonucleotide
  Target: SCNA; (+) strand; PAM type: NRG; PAM sequence: TAG
tgtagtagtctctcttcaat

SEQ ID NO: 27535 - DNA, 20 bp, Artificial Sequence
  Description of Artificial Sequence: Synthetic oligonucleotide
  Target: SCNA; (+) strand; PAM type: NRG; PAM sequence: AGG
gtagtagtctctcttcaatt

SEQ ID NO: 27536 - DNA, 20 bp, Artificial Sequence
  Description of Artificial Sequence: Synthetic oligonucleotide
  Target: SCNA; (+) strand; PAM type: NRG; PAM sequence: AAG
ctctcttcaattaggtaaaa

SEQ ID NO: 27537 - DNA, 20 bp, Artificial Sequence
  Description of Artificial Sequence: Synthetic oligonucleotide
  Target: SCNA; (+) strand; PAM type: NRG; PAM sequence: AGG
tctcttcaattaggtaaaaa

SEQ ID NO: 27538 - DNA, 20 bp, Artificial Sequence
  Description of Artificial Sequence: Synthetic oligonucleotide
  Target: SCNA; (+) strand; PAM type: NRG; PAM sequence: AAG
cttcaattaggtaaaaaagg

SEQ ID NO: 27539 - DNA, 20 bp, Artificial Sequence
  Description of Artificial Sequence: Synthetic oligonucleotide
  Target: SCNA; (+) strand; PAM type: NRG; PAM sequence: TGG
ggtaaaaaaggaagtttcta

SEQ ID NO: 27540 - DNA, 20 bp, Artificial Sequence
  Description of Artificial Sequence: Synthetic oligonucleotide
  Target: SCNA; (+) strand; PAM type: NRG; PAM sequence: TAG
ttctatggtaaccatcctta

SEQ ID NO: 27541 - DNA, 20 bp, Artificial Sequence
  Description of Artificial Sequence: Synthetic oligonucleotide
  Target: SCNA; (+) strand; PAM type: NRG; PAM sequence: CAG
attcctccttccttcctcac

SEQ ID NO: 27542 - DNA, 20 bp, Artificial Sequence
  Description of Artificial Sequence: Synthetic oligonucleotide
  Target: SCNA; (+) strand; PAM type: NRG; PAM sequence: TAG
catgaatacatataaactgc

SEQ ID NO: 27543 - DNA, 20 bp, Artificial Sequence
  Description of Artificial Sequence: Synthetic oligonucleotide
  Target: SCNA; (+) strand; PAM type: NRG; PAM sequence: TAG
atataaactgctagcatgtc

SEQ ID NO: 27544 - DNA, 20 bp, Artificial Sequence
  Description of Artificial Sequence: Synthetic oligonucleotide
  Target: SCNA; (+) strand; PAM type: NRG; PAM sequence: TAG
cttgaaattatactttctac

SEQ ID NO: 27545 - DNA, 20 bp, Artificial Sequence
  Description of Artificial Sequence: Synthetic oligonucleotide
  Target: SCNA; (+) strand; PAM type: NRG; PAM sequence: TAG
tactttctactagtgacttt

SEQ ID NO: 27546 - DNA, 20 bp, Artificial Sequence
  Description of Artificial Sequence: Synthetic oligonucleotide
  Target: SCNA; (+) strand; PAM type: NRG; PAM sequence: CAG
ttttagaaatgactatgccc

SEQ ID NO: 27547 - DNA, 20 bp, Artificial Sequence
  Description of Artificial Sequence: Synthetic oligonucleotide
  Target: SCNA; (+) strand; PAM type: NRG; PAM sequence: AAG
tatgccccagaataattaaa

SEQ ID NO: 27548 - DNA, 20 bp, Artificial Sequence
  Description of Artificial Sequence: Synthetic oligonucleotide
  Target: SCNA; (+) strand; PAM type: NRG; PAM sequence: GAG
tgccccagaataattaaaaa

SEQ ID NO: 27549 - DNA, 20 bp, Artificial Sequence
  Description of Artificial Sequence: Synthetic oligonucleotide
  Target: SCNA; (+) strand; PAM type: NRG; PAM sequence: CAG
aatttttaaattaatttata

SEQ ID NO: 27550 - DNA, 20 bp, Artificial Sequence
  Description of Artificial Sequence: Synthetic oligonucleotide
  Target: SCNA; (+) strand; PAM type: NRG; PAM sequence: GAG
tttttaaattaatttataca

SEQ ID NO: 27551 - DNA, 20 bp, Artificial Sequence
  Description of Artificial Sequence: Synthetic oligonucleotide
  Target: SCNA; (+) strand; PAM type: NRG; PAM sequence: AAG
atacagagtttttcaccatc

SEQ ID NO: 27552 - DNA, 20 bp, Artificial Sequence
  Description of Artificial Sequence: Synthetic oligonucleotide
  Target: SCNA; (+) strand; PAM type: NRG; PAM sequence: CAG
ttcaccatcaagtttatttt

SEQ ID NO: 27553 - DNA, 20 bp, Artificial Sequence
  Description of Artificial Sequence: Synthetic oligonucleotide
  Target: SCNA; (+) strand; PAM type: NRG; PAM sequence: TGG
aagtttattttcagcaccca

SEQ ID NO: 27554 - DNA, 20 bp, Artificial Sequence
  Description of Artificial Sequence: Synthetic oligonucleotide
  Target: SCNA; (+) strand; PAM type: NRG; PAM sequence: GGG
agtttattttcagcacccat

SEQ ID NO: 27555 - DNA, 20 bp, Artificial Sequence
  Description of Artificial Sequence: Synthetic oligonucleotide
  Target: SCNA; (+) strand; PAM type: NRG; PAM sequence: GGG
gtttattttcagcacccatg

SEQ ID NO: 27556 - DNA, 20 bp, Artificial Sequence
  Description of Artificial Sequence: Synthetic oligonucleotide
  Target: SCNA; (+) strand; PAM type: NRG; PAM sequence: GAG
ttattttcagcacccatggg

SEQ ID NO: 27557 - DNA, 20 bp, Artificial Sequence
  Description of Artificial Sequence: Synthetic oligonucleotide
  Target: SCNA; (+) strand; PAM type: NRG; PAM sequence: TAG
cagcacccatggggagttaa

SEQ ID NO: 27558 - DNA, 20 bp, Artificial Sequence
  Description of Artificial Sequence: Synthetic oligonucleotide
  Target: SCNA; (+) strand; PAM type: NRG; PAM sequence: AAG
agttaatagatcttccctga

SEQ ID NO: 27559 - DNA, 20 bp, Artificial Sequence
  Description of Artificial Sequence: Synthetic oligonucleotide
  Target: SCNA; (+) strand; PAM type: NRG; PAM sequence: GAG
ttaatagatcttccctgaaa

SEQ ID NO: 27560 - DNA, 20 bp, Artificial Sequence
  Description of Artificial Sequence: Synthetic oligonucleotide
  Target: SCNA; (+) strand; PAM type: NRG; PAM sequence: AAG
gaaagagaaaaacctttcct

SEQ ID NO: 27561 - DNA, 20 bp, Artificial Sequence
  Description of Artificial Sequence: Synthetic oligonucleotide
  Target: SCNA; (+) strand; PAM type: NRG; PAM sequence: AGG
aaagagaaaaacctttccta

SEQ ID NO: 27562 - DNA, 20 bp, Artificial Sequence
  Description of Artificial Sequence: Synthetic oligonucleotide
  Target: SCNA; (+) strand; PAM type: NRG; PAM sequence: TAG
cctttcctaaggaaaaatcc

SEQ ID NO: 27563 - DNA, 20 bp, Artificial Sequence
  Description of Artificial Sequence: Synthetic oligonucleotide
  Target: SCNA; (+) strand; PAM type: NRG; PAM sequence: TGG
aatcctagaattcatatatt

SEQ ID NO: 27564 - DNA, 20 bp, Artificial Sequence
  Description of Artificial Sequence: Synthetic oligonucleotide
  Target: SCNA; (+) strand; PAM type: NRG; PAM sequence: AAG
catatatttggcaacattta

SEQ ID NO: 27565 - DNA, 20 bp, Artificial Sequence
  Description of Artificial Sequence: Synthetic oligonucleotide
  Target: SCNA; (+) strand; PAM type: NRG; PAM sequence: AGG
atatatttggcaacatttaa

SEQ ID NO: 27566 - DNA, 20 bp, Artificial Sequence
  Description of Artificial Sequence: Synthetic oligonucleotide
  Target: SCNA; (+) strand; PAM type: NRG; PAM sequence: GAG
atatttggcaacatttaaag

SEQ ID NO: 27567 - DNA, 20 bp, Artificial Sequence
  Description of Artificial Sequence: Synthetic oligonucleotide
  Target: SCNA; (+) strand; PAM type: NRG; PAM sequence: AGG
tatttggcaacatttaaagg

SEQ ID NO: 27568 - DNA, 20 bp, Artificial Sequence
  Description of Artificial Sequence: Synthetic oligonucleotide
  Target: SCNA; (+) strand; PAM type: NRG; PAM sequence: CAG
ggaggccatgaaatttttat

SEQ ID NO: 27569 - DNA, 20 bp, Artificial Sequence
  Description of Artificial Sequence: Synthetic oligonucleotide
  Target: SCNA; (+) strand; PAM type: NRG; PAM sequence: TAG
ccatgaaatttttatcagtc

SEQ ID NO: 27570 - DNA, 20 bp, Artificial Sequence
  Description of Artificial Sequence: Synthetic oligonucleotide
  Target: SCNA; (+) strand; PAM type: NRG; PAM sequence: GAG
atgaaatttttatcagtcta

SEQ ID NO: 27571 - DNA, 20 bp, Artificial Sequence
  Description of Artificial Sequence: Synthetic oligonucleotide
  Target: SCNA; (+) strand; PAM type: NRG; PAM sequence: AAG
ctagagaattgatctccttt

SEQ ID NO: 27572 - DNA, 20 bp, Artificial Sequence
  Description of Artificial Sequence: Synthetic oligonucleotide
  Target: SCNA; (+) strand; PAM type: NRG; PAM sequence: AGG
tagagaattgatctccttta

SEQ ID NO: 27573 - DNA, 20 bp, Artificial Sequence
  Description of Artificial Sequence: Synthetic oligonucleotide
  Target: SCNA; (+) strand; PAM type: NRG; PAM sequence: TGG
gatctcctttaaggtgactc

SEQ ID NO: 27574 - DNA, 20 bp, Artificial Sequence
  Description of Artificial Sequence: Synthetic oligonucleotide
  Target: SCNA; (+) strand; PAM type: NRG; PAM sequence: TAG
ctcctttaaggtgactctgg

SEQ ID NO: 27575 - DNA, 20 bp, Artificial Sequence
  Description of Artificial Sequence: Synthetic oligonucleotide
  Target: SCNA; (+) strand; PAM type: NRG; PAM sequence: AAG
ggtagttccaacgatgttta

SEQ ID NO: 27576 - DNA, 20 bp, Artificial Sequence
  Description of Artificial Sequence: Synthetic oligonucleotide
  Target: SCNA; (+) strand; PAM type: NRG; PAM sequence: AGG
gtagttccaacgatgtttaa

SEQ ID NO: 27577 - DNA, 20 bp, Artificial Sequence
  Description of Artificial Sequence: Synthetic oligonucleotide
  Target: SCNA; (+) strand; PAM type: NRG; PAM sequence: AAG
cctgtaaaaaaaaaaaaaaa

SEQ ID NO: 27578 - DNA, 20 bp, Artificial Sequence
  Description of Artificial Sequence: Synthetic oligonucleotide
  Target: SCNA; (+) strand; PAM type: NRG; PAM sequence: GAG
tgtaaaaaaaaaaaaaaaaa

SEQ ID NO: 27579 - DNA, 20 bp, Artificial Sequence
  Description of Artificial Sequence: Synthetic oligonucleotide
  Target: SCNA; (+) strand; PAM type: NRG; PAM sequence: GAG
taaaaaaaaaaaaaaaaaga

SEQ ID NO: 27580 - DNA, 20 bp, Artificial Sequence
  Description of Artificial Sequence: Synthetic oligonucleotide
  Target: SCNA; (+) strand; PAM type: NRG; PAM sequence: GAG
aaaaaaaaaaaaaagagagc

SEQ ID NO: 27581 - DNA, 20 bp, Artificial Sequence
  Description of Artificial Sequence: Synthetic oligonucleotide
  Target: SCNA; (+) strand; PAM type: NRG; PAM sequence: GAG
aaaaaaaaaaaagagagcga

SEQ ID NO: 27582 - DNA, 20 bp, Artificial Sequence
  Description of Artificial Sequence: Synthetic oligonucleotide
  Target: SCNA; (+) strand; PAM type: NRG; PAM sequence: AAG
aaaaaagagagcgagagaaa

SEQ ID NO: 27583 - DNA, 20 bp, Artificial Sequence
  Description of Artificial Sequence: Synthetic oligonucleotide
  Target: SCNA; (+) strand; PAM type: NRG; PAM sequence: GAG
aaaagagagcgagagaaaaa

SEQ ID NO: 27584 - DNA, 20 bp, Artificial Sequence
  Description of Artificial Sequence: Synthetic oligonucleotide
  Target: SCNA; (+) strand; PAM type: NRG; PAM sequence: GAG
aagagagcgagagaaaaaga

SEQ ID NO: 27585 - DNA, 20 bp, Artificial Sequence
  Description of Artificial Sequence: Synthetic oligonucleotide
  Target: SCNA; (+) strand; PAM type: NRG; PAM sequence: GAG
gagagcgagagaaaaagaga

SEQ ID NO: 27586 - DNA, 20 bp, Artificial Sequence
  Description of Artificial Sequence: Synthetic oligonucleotide
  Target: SCNA; (+) strand; PAM type: NRG; PAM sequence: GAG
gagcgagagaaaaagagaga

SEQ ID NO: 27587 - DNA, 20 bp, Artificial Sequence
  Description of Artificial Sequence: Synthetic oligonucleotide
  Target: SCNA; (+) strand; PAM type: NRG; PAM sequence: GAG
gcgagagaaaaagagagaga

SEQ ID NO: 27588 - DNA, 20 bp, Artificial Sequence
  Description of Artificial Sequence: Synthetic oligonucleotide
  Target: SCNA; (+) strand; PAM type: NRG; PAM sequence: GAG
gagagaaaaagagagagaga

SEQ ID NO: 27589 - DNA, 20 bp, Artificial Sequence
  Description of Artificial Sequence: Synthetic oligonucleotide
  Target: SCNA; (+) strand; PAM type: NRG; PAM sequence: GAG
gagaaaaagagagagagaga

SEQ ID NO: 27590 - DNA, 20 bp, Artificial Sequence
  Description of Artificial Sequence: Synthetic oligonucleotide
  Target: SCNA; (+) strand; PAM type: NRG; PAM sequence: GAG
gaaaaagagagagagagaga

SEQ ID NO: 27591 - DNA, 20 bp, Artificial Sequence
  Description of Artificial Sequence: Synthetic oligonucleotide
  Target: SCNA; (+) strand; PAM type: NRG; PAM sequence: AAG
ttctgatgattaaaaaaaaa

SEQ ID NO: 27592 - DNA, 20 bp, Artificial Sequence
  Description of Artificial Sequence: Synthetic oligonucleotide
  Target: SCNA; (+) strand; PAM type: NRG; PAM sequence: GAG
gatgattaaaaaaaaaaagt

SEQ ID NO: 27593 - DNA, 20 bp, Artificial Sequence
  Description of Artificial Sequence: Synthetic oligonucleotide
  Target: SCNA; (+) strand; PAM type: NRG; PAM sequence: AGG
atgattaaaaaaaaaaagtg

SEQ ID NO: 27594 - DNA, 20 bp, Artificial Sequence
  Description of Artificial Sequence: Synthetic oligonucleotide
  Target: SCNA; (+) strand; PAM type: NRG; PAM sequence: GAG
aaaaaaaagtgaggaatgct

SEQ ID NO: 27595 - DNA, 20 bp, Artificial Sequence
  Description of Artificial Sequence: Synthetic oligonucleotide
  Target: SCNA; (+) strand; PAM type: NRG; PAM sequence: AAG
gaggaatgctgagttaaaca

SEQ ID NO: 27596 - DNA, 20 bp, Artificial Sequence
  Description of Artificial Sequence: Synthetic oligonucleotide
  Target: SCNA; (+) strand; PAM type: NRG; PAM sequence: CAG
caaagttaaccacattctct

SEQ ID NO: 27597 - DNA, 20 bp, Artificial Sequence
  Description of Artificial Sequence: Synthetic oligonucleotide
  Target: SCNA; (+) strand; PAM type: NRG; PAM sequence: GAG
aagttaaccacattctctca

SEQ ID NO: 27598 - DNA, 20 bp, Artificial Sequence
  Description of Artificial Sequence: Synthetic oligonucleotide
  Target: SCNA; (+) strand; PAM type: NRG; PAM sequence: TGG
atatgtgctaatgtgtctta

SEQ ID NO: 27599 - DNA, 20 bp, Artificial Sequence
  Description of Artificial Sequence: Synthetic oligonucleotide
  Target: SCNA; (+) strand; PAM type: NRG; PAM sequence: AAG
aatgtgtcttatggctctct

SEQ ID NO: 27600 - DNA, 20 bp, Artificial Sequence
  Description of Artificial Sequence: Synthetic oligonucleotide
  Target: SCNA; (+) strand; PAM type: NRG; PAM sequence: AGG
atgtgtcttatggctctcta

SEQ ID NO: 27601 - DNA, 20 bp, Artificial Sequence
  Description of Artificial Sequence: Synthetic oligonucleotide
  Target: SCNA; (+) strand; PAM type: NRG; PAM sequence: GAG
gtgtcttatggctctctaag

SEQ ID NO: 27602 - DNA, 20 bp, Artificial Sequence
  Description of Artificial Sequence: Synthetic oligonucleotide
  Target: SCNA; (+) strand; PAM type: NRG; PAM sequence: AGG
tgtcttatggctctctaagg

SEQ ID NO: 27603 - DNA, 20 bp, Artificial Sequence
  Description of Artificial Sequence: Synthetic oligonucleotide
  Target: SCNA; (+) strand; PAM type: NRG; PAM sequence: GGG
gtcttatggctctctaagga

SEQ ID NO: 27604 - DNA, 20 bp, Artificial Sequence
  Description of Artificial Sequence: Synthetic oligonucleotide
  Target: SCNA; (+) strand; PAM type: NRG; PAM sequence: TAG
atggctctctaaggagggtg

SEQ ID NO: 27605 - DNA, 20 bp, Artificial Sequence
  Description of Artificial Sequence: Synthetic oligonucleotide
  Target: SCNA; (+) strand; PAM type: NRG; PAM sequence: TAG
aaatcatcttctacactgct

SEQ ID NO: 27606 - DNA, 20 bp, Artificial Sequence
  Description of Artificial Sequence: Synthetic oligonucleotide
  Target: SCNA; (+) strand; PAM type: NRG; PAM sequence: CGG
cttctacactgcttagttcc

SEQ ID NO: 27607 - DNA, 20 bp, Artificial Sequence
  Description of Artificial Sequence: Synthetic oligonucleotide
  Target: SCNA; (+) strand; PAM type: NRG; PAM sequence: GGG
ttctacactgcttagttccc

SEQ ID NO: 27608 - DNA, 20 bp, Artificial Sequence
  Description of Artificial Sequence: Synthetic oligonucleotide
  Target: SCNA; (+) strand; PAM type: NRG; PAM sequence: TGG
tttttttttttttttattca

SEQ ID NO: 27609 - DNA, 20 bp, Artificial Sequence
  Description of Artificial Sequence: Synthetic oligonucleotide
  Target: SCNA; (+) strand; PAM type: NRG; PAM sequence: CAG
ggtcgaatattatttattgt

SEQ ID NO: 27610 - DNA, 20 bp, Artificial Sequence
  Description of Artificial Sequence: Synthetic oligonucleotide
  Target: SCNA; (+) strand; PAM type: NRG; PAM sequence: AAG
gaatattatttattgtcaga

SEQ ID NO: 27611 - DNA, 20 bp, Artificial Sequence
  Description of Artificial Sequence: Synthetic oligonucleotide
  Target: SCNA; (+) strand; PAM type: NRG; PAM sequence: AGG
aatattatttattgtcagaa

SEQ ID NO: 27612 - DNA, 20 bp, Artificial Sequence
  Description of Artificial Sequence: Synthetic oligonucleotide
  Target: SCNA; (+) strand; PAM type: NRG; PAM sequence: CAG
tatttattgtcagaaaggta

SEQ ID NO: 27613 - DNA, 20 bp, Artificial Sequence
  Description of Artificial Sequence: Synthetic oligonucleotide
  Target: SCNA; (+) strand; PAM type: NRG; PAM sequence: CAG
tacagcattcacaccaatat

SEQ ID NO: 27614 - DNA, 20 bp, Artificial Sequence
  Description of Artificial Sequence: Synthetic oligonucleotide
  Target: SCNA; (+) strand; PAM type: NRG; PAM sequence: TAG
cacaccaatatcagacaaaa

SEQ ID NO: 27615 - DNA, 20 bp, Artificial Sequence
  Description of Artificial Sequence: Synthetic oligonucleotide
  Target: SCNA; (+) strand; PAM type: NRG; PAM sequence: GAG
tttaactaaaaaattatttc

SEQ ID NO: 27616 - DNA, 20 bp, Artificial Sequence
  Description of Artificial Sequence: Synthetic oligonucleotide
  Target: SCNA; (+) strand; PAM type: NRG; PAM sequence: AAG
ataacaatatatgttaataa

SEQ ID NO: 27617 - DNA, 20 bp, Artificial Sequence
  Description of Artificial Sequence: Synthetic oligonucleotide
  Target: SCNA; (+) strand; PAM type: NRG; PAM sequence: AGG
taacaatatatgttaataaa

SEQ ID NO: 27618 - DNA, 20 bp, Artificial Sequence
  Description of Artificial Sequence: Synthetic oligonucleotide
  Target: SCNA; (+) strand; PAM type: NRG; PAM sequence: CAG
aacacatacacatcaaacaa

SEQ ID NO: 27619 - DNA, 20 bp, Artificial Sequence
  Description of Artificial Sequence: Synthetic oligonucleotide
  Target: SCNA; (+) strand; PAM type: NRG; PAM sequence: AAG
acagttccccaaaatacgta

SEQ ID NO: 27620 - DNA, 20 bp, Artificial Sequence
  Description of Artificial Sequence: Synthetic oligonucleotide
  Target: SCNA; (+) strand; PAM type: NRG; PAM sequence: CAG
atacgtaaagcaaacattga

SEQ ID NO: 27621 - DNA, 20 bp, Artificial Sequence
  Description of Artificial Sequence: Synthetic oligonucleotide
  Target: SCNA; (+) strand; PAM type: NRG; PAM sequence: AGG
tacgtaaagcaaacattgac

SEQ ID NO: 27622 - DNA, 20 bp, Artificial Sequence
  Description of Artificial Sequence: Synthetic oligonucleotide
  Target: SCNA; (+) strand; PAM type: NRG; PAM sequence: AAG
agcaaacattgacaggattg

SEQ ID NO: 27623 - DNA, 20 bp, Artificial Sequence
  Description of Artificial Sequence: Synthetic oligonucleotide
  Target: SCNA; (+) strand; PAM type: NRG; PAM sequence: AGG
gcaaacattgacaggattga

SEQ ID NO: 27624 - DNA, 20 bp, Artificial Sequence
  Description of Artificial Sequence: Synthetic oligonucleotide
  Target: SCNA; (+) strand; PAM type: NRG; PAM sequence: GGG
caaacattgacaggattgaa

SEQ ID NO: 27625 - DNA, 20 bp, Artificial Sequence
  Description of Artificial Sequence: Synthetic oligonucleotide
  Target: SCNA; (+) strand; PAM type: NRG; PAM sequence: GAG
aacattgacaggattgaagg

SEQ ID NO: 27626 - DNA, 20 bp, Artificial Sequence
  Description of Artificial Sequence: Synthetic oligonucleotide
  Target: SCNA; (+) strand; PAM type: NRG; PAM sequence: TAG
gacaggattgaagggagaaa

SEQ ID NO: 27627 - DNA, 20 bp, Artificial Sequence
  Description of Artificial Sequence: Synthetic oligonucleotide
  Target: SCNA; (+) strand; PAM type: NRG; PAM sequence: TAG
agaaatagaccactctacaa

SEQ ID NO: 27628 - DNA, 20 bp, Artificial Sequence
  Description of Artificial Sequence: Synthetic oligonucleotide
  Target: SCNA; (+) strand; PAM type: NRG; PAM sequence: TAG
aatagaccactctacaatag

SEQ ID NO: 27629 - DNA, 20 bp, Artificial Sequence
  Description of Artificial Sequence: Synthetic oligonucleotide
  Target: SCNA; (+) strand; PAM type: NRG; PAM sequence: TGG
gaccactctacaatagtagt

SEQ ID NO: 27630 - DNA, 20 bp, Artificial Sequence
  Description of Artificial Sequence: Synthetic oligonucleotide
  Target: SCNA; (+) strand; PAM type: NRG; PAM sequence: GGG
accactctacaatagtagtt

SEQ ID NO: 27631 - DNA, 20 bp, Artificial Sequence
  Description of Artificial Sequence: Synthetic oligonucleotide
  Target: SCNA; (+) strand; PAM type: NRG; PAM sequence: GGG
ccactctacaatagtagttg

SEQ ID NO: 27632 - DNA, 20 bp, Artificial Sequence
  Description of Artificial Sequence: Synthetic oligonucleotide
  Target: SCNA; (+) strand; PAM type: NRG; PAM sequence: CAG
ccactttcaataattaatca

SEQ ID NO: 27633 - DNA, 20 bp, Artificial Sequence
  Description of Artificial Sequence: Synthetic oligonucleotide
  Target: SCNA; (+) strand; PAM type: NRG; PAM sequence: AAG
ataattaatcacagccactt

SEQ ID NO: 27634 - DNA, 20 bp, Artificial Sequence
  Description of Artificial Sequence: Synthetic oligonucleotide
  Target: SCNA; (+) strand; PAM type: NRG; PAM sequence: AGG
taattaatcacagccactta

SEQ ID NO: 27635 - DNA, 20 bp, Artificial Sequence
  Description of Artificial Sequence: Synthetic oligonucleotide
  Target: SCNA; (+) strand; PAM type: NRG; PAM sequence: CAG
atcacagccacttaaggaac

SEQ ID NO: 27636 - DNA, 20 bp, Artificial Sequence
  Description of Artificial Sequence: Synthetic oligonucleotide
  Target: SCNA; (+) strand; PAM type: NRG; PAM sequence: TGG
tgcataccaaaacacacttc

SEQ ID NO: 27637 - DNA, 20 bp, Artificial Sequence
  Description of Artificial Sequence: Synthetic oligonucleotide
  Target: SCNA; (+) strand; PAM type: NRG; PAM sequence: CAG
ataccaaaacacacttctgg

SEQ ID NO: 27638 - DNA, 20 bp, Artificial Sequence
  Description of Artificial Sequence: Synthetic oligonucleotide
  Target: SCNA; (+) strand; PAM type: NRG; PAM sequence: CAG
cacttctggcagtgttgctt

SEQ ID NO: 27639 - DNA, 20 bp, Artificial Sequence
  Description of Artificial Sequence: Synthetic oligonucleotide
  Target: SCNA; (+) strand; PAM type: NRG; PAM sequence: AGG
acttctggcagtgttgcttc

SEQ ID NO: 27640 - DNA, 20 bp, Artificial Sequence
  Description of Artificial Sequence: Synthetic oligonucleotide
  Target: SCNA; (+) strand; PAM type: NRG; PAM sequence: GGG
cttctggcagtgttgcttca

SEQ ID NO: 27641 - DNA, 20 bp, Artificial Sequence
  Description of Artificial Sequence: Synthetic oligonucleotide
  Target: SCNA; (+) strand; PAM type: NRG; PAM sequence: GAG
gtgttgcttcagggaattcc

SEQ ID NO: 27642 - DNA, 20 bp, Artificial Sequence
  Description of Artificial Sequence: Synthetic oligonucleotide
  Target: SCNA; (+) strand; PAM type: NRG; PAM sequence: TAG
gcttcagggaattccgagtg

SEQ ID NO: 27643 - DNA, 20 bp, Artificial Sequence
  Description of Artificial Sequence: Synthetic oligonucleotide
  Target: SCNA; (+) strand; PAM type: NRG; PAM sequence: AGG
cttcagggaattccgagtgt

SEQ ID NO: 27644 - DNA, 20 bp, Artificial Sequence
  Description of Artificial Sequence: Synthetic oligonucleotide
  Target: SCNA; (+) strand; PAM type: NRG; PAM sequence: GGG
ttcagggaattccgagtgta

SEQ ID NO: 27645 - DNA, 20 bp, Artificial Sequence
  Description of Artificial Sequence: Synthetic oligonucleotide
  Target: SCNA; (+) strand; PAM type: NRG; PAM sequence: TGG
aaaattcctccttcttcaaa

SEQ ID NO: 27646 - DNA, 20 bp, Artificial Sequence
  Description of Artificial Sequence: Synthetic oligonucleotide
  Target: SCNA; (+) strand; PAM type: NRG; PAM sequence: CAG
tatatttttgtcctttgtgt

SEQ ID NO: 27647 - DNA, 20 bp, Artificial Sequence
  Description of Artificial Sequence: Synthetic oligonucleotide
  Target: SCNA; (+) strand; PAM type: NRG; PAM sequence: AAG
tcttaattcatgttgcttat

SEQ ID NO: 27648 - DNA, 20 bp, Artificial Sequence
  Description of Artificial Sequence: Synthetic oligonucleotide
  Target: SCNA; (+) strand; PAM type: NRG; PAM sequence: AAG
aagcatgatttttattatta

SEQ ID NO: 27649 - DNA, 20 bp, Artificial Sequence
  Description of Artificial Sequence: Synthetic oligonucleotide
  Target: SCNA; (+) strand; PAM type: NRG; PAM sequence: GAG
atgatttttattattaaagt

SEQ ID NO: 27650 - DNA, 20 bp, Artificial Sequence
  Description of Artificial Sequence: Synthetic oligonucleotide
  Target: SCNA; (+) strand; PAM type: NRG; PAM sequence: TGG
tttttattattaaagtgaga

SEQ ID NO: 27651 - DNA, 20 bp, Artificial Sequence
  Description of Artificial Sequence: Synthetic oligonucleotide
  Target: SCNA; (+) strand; PAM type: NRG; PAM sequence: GGG
ttttattattaaagtgagat

SEQ ID NO: 27652 - DNA, 20 bp, Artificial Sequence
  Description of Artificial Sequence: Synthetic oligonucleotide
  Target: SCNA; (+) strand; PAM type: NRG; PAM sequence: GAG
aaataaaatatttttgcaat

SEQ ID NO: 27653 - DNA, 20 bp, Artificial Sequence
  Description of Artificial Sequence: Synthetic oligonucleotide
  Target: SCNA; (+) strand; PAM type: NRG; PAM sequence: AAG
caccatttatatacaaacac

SEQ ID NO: 27654 - DNA, 20 bp, Artificial Sequence
  Description of Artificial Sequence: Synthetic oligonucleotide
  Target: SCNA; (+) strand; PAM type: NRG; PAM sequence: TGG
gaataaaacacatcgcaaaa

SEQ ID NO: 27655 - DNA, 20 bp, Artificial Sequence
  Description of Artificial Sequence: Synthetic oligonucleotide
  Target: SCNA; (+) strand; PAM type: NRG; PAM sequence: TAG
aaatggtaaaatttcatatt

SEQ ID NO: 27656 - DNA, 20 bp, Artificial Sequence
  Description of Artificial Sequence: Synthetic oligonucleotide
  Target: SCNA; (+) strand; PAM type: NRG; PAM sequence: TAG
aatttcatatttagtattta

SEQ ID NO: 27657 - DNA, 20 bp, Artificial Sequence
  Description of Artificial Sequence: Synthetic oligonucleotide
  Target: SCNA; (+) strand; PAM type: NRG; PAM sequence: AGG
atttcatatttagtatttat

SEQ ID NO: 27658 - DNA, 20 bp, Artificial Sequence
  Description of Artificial Sequence: Synthetic oligonucleotide
  Target: SCNA; (+) strand; PAM type: NRG; PAM sequence: TAG
atttagtatttataggtgca

SEQ ID NO: 27659 - DNA, 20 bp, Artificial Sequence
  Description of Artificial Sequence: Synthetic oligonucleotide
  Target: SCNA; (+) strand; PAM type: NRG; PAM sequence: AAG
tttcatgctcacatattttt

SEQ ID NO: 27660 - DNA, 20 bp, Artificial Sequence
  Description of Artificial Sequence: Synthetic oligonucleotide
  Target: SCNA; (+) strand; PAM type: NRG; PAM sequence: TAG
tcacaatacgtcattattct

SEQ ID NO: 27661 - DNA, 20 bp, Artificial Sequence
  Description of Artificial Sequence: Synthetic oligonucleotide
  Target: SCNA; (+) strand; PAM type: NRG; PAM sequence: CAG
aatacgtcattattcttaga

SEQ ID NO: 27662 - DNA, 20 bp, Artificial Sequence
  Description of Artificial Sequence: Synthetic oligonucleotide
  Target: SCNA; (+) strand; PAM type: NRG; PAM sequence: AAG
ttcttagacagtatcattaa

SEQ ID NO: 27663 - DNA, 20 bp, Artificial Sequence
  Description of Artificial Sequence: Synthetic oligonucleotide
  Target: SCNA; (+) strand; PAM type: NRG; PAM sequence: TAG
aaaaatcttataatatatga

SEQ ID NO: 27664 - DNA, 20 bp, Artificial Sequence
  Description of Artificial Sequence: Synthetic oligonucleotide
  Target: SCNA; (+) strand; PAM type: NRG; PAM sequence: CAG
cactaacaacttctgaacaa

SEQ ID NO: 27665 - DNA, 20 bp, Artificial Sequence
  Description of Artificial Sequence: Synthetic oligonucleotide
  Target: SCNA; (+) strand; PAM type: NRG; PAM sequence: TAG
gaacaacagcaacaaaaaaa

SEQ ID NO: 27666 - DNA, 20 bp, Artificial Sequence
  Description of Artificial Sequence: Synthetic oligonucleotide
  Target: SCNA; (+) strand; PAM type: NRG; PAM sequence: GAG
aacagcaacaaaaaaatagt

SEQ ID NO: 27667 - DNA, 20 bp, Artificial Sequence
  Description of Artificial Sequence: Synthetic oligonucleotide
  Target: SCNA; (+) strand; PAM type: NRG; PAM sequence: AGG
acagcaacaaaaaaatagtg

SEQ ID NO: 27668 - DNA, 20 bp, Artificial Sequence
  Description of Artificial Sequence: Synthetic oligonucleotide
  Target: SCNA; (+) strand; PAM type: NRG; PAM sequence: TAG
acaaaaaaatagtgaggatt

SEQ ID NO: 27669 - DNA, 20 bp, Artificial Sequence
  Description of Artificial Sequence: Synthetic oligonucleotide
  Target: SCNA; (+) strand; PAM type: NRG; PAM sequence: AAG
aatagtgaggatttagaaat

SEQ ID NO: 27670 - DNA, 20 bp, Artificial Sequence
  Description of Artificial Sequence: Synthetic oligonucleotide
  Target: SCNA; (+) strand; PAM type: NRG; PAM sequence: TGG
agtgaggatttagaaataag

SEQ ID NO: 27671 - DNA, 20 bp, Artificial Sequence
  Description of Artificial Sequence: Synthetic oligonucleotide
  Target: SCNA; (+) strand; PAM type: NRG; PAM sequence: TAG
gaggatttagaaataagtgg

SEQ ID NO: 27672 - DNA, 20 bp, Artificial Sequence
  Description of Artificial Sequence: Synthetic oligonucleotide
  Target: SCNA; (+) strand; PAM type: NRG; PAM sequence: TAG
agaaataagtggtagtcact

SEQ ID NO: 27673 - DNA, 20 bp, Artificial Sequence
  Description of Artificial Sequence: Synthetic oligonucleotide
  Target: SCNA; (+) strand; PAM type: NRG; PAM sequence: AGG
gaaataagtggtagtcactt

SEQ ID NO: 27674 - DNA, 20 bp, Artificial Sequence
  Description of Artificial Sequence: Synthetic oligonucleotide
  Target: SCNA; (+) strand; PAM type: NRG; PAM sequence: TAG
tttaatttgttttaacatcg

SEQ ID NO: 27675 - DNA, 20 bp, Artificial Sequence
  Description of Artificial Sequence: Synthetic oligonucleotide
  Target: SCNA; (+) strand; PAM type: NRG; PAM sequence: AAG
tgttttaacatcgtagattg

SEQ ID NO: 27676 - DNA, 20 bp, Artificial Sequence
  Description of Artificial Sequence: Synthetic oligonucleotide
  Target: SCNA; (+) strand; PAM type: NRG; PAM sequence: CAG
gattgaagccacaaaatcca

SEQ ID NO: 27677 - DNA, 20 bp, Artificial Sequence
  Description of Artificial Sequence: Synthetic oligonucleotide
  Target: SCNA; (+) strand; PAM type: NRG; PAM sequence: AAG
cacaaaatccacagcacaca

SEQ ID NO: 27678 - DNA, 20 bp, Artificial Sequence
  Description of Artificial Sequence: Synthetic oligonucleotide
  Target: SCNA; (+) strand; PAM type: NRG; PAM sequence: CAG
ctgctaccatgtattcactt

SEQ ID NO: 27679 - DNA, 20 bp, Artificial Sequence
  Description of Artificial Sequence: Synthetic oligonucleotide
  Target: SCNA; (+) strand; PAM type: NRG; PAM sequence: AAG
ccatgtattcacttcagtga

SEQ ID NO: 27680 - DNA, 20 bp, Artificial Sequence
  Description of Artificial Sequence: Synthetic oligonucleotide
  Target: SCNA; (+) strand; PAM type: NRG; PAM sequence: AGG
catgtattcacttcagtgaa

SEQ ID NO: 27681 - DNA, 20 bp, Artificial Sequence
  Description of Artificial Sequence: Synthetic oligonucleotide
  Target: SCNA; (+) strand; PAM type: NRG; PAM sequence: GGG
atgtattcacttcagtgaaa

SEQ ID NO: 27682 - DNA, 20 bp, Artificial Sequence
  Description of Artificial Sequence: Synthetic oligonucleotide
  Target: SCNA; (+) strand; PAM type: NRG; PAM sequence: AAG
tattcacttcagtgaaaggg

SEQ ID NO: 27683 - DNA, 20 bp, Artificial Sequence
  Description of Artificial Sequence: Synthetic oligonucleotide
  Target: SCNA; (+) strand; PAM type: NRG; PAM sequence: GAG
aagggaagcaccgaaatgct

SEQ ID NO: 27684 - DNA, 20 bp, Artificial Sequence
  Description of Artificial Sequence: Synthetic oligonucleotide
  Target: SCNA; (+) strand; PAM type: NRG; PAM sequence: TGG
ggaagcaccgaaatgctgag

SEQ ID NO: 27685 - DNA, 20 bp, Artificial Sequence
  Description of Artificial Sequence: Synthetic oligonucleotide
  Target: SCNA; (+) strand; PAM type: NRG; PAM sequence: GGG
gaagcaccgaaatgctgagt

SEQ ID NO: 27686 - DNA, 20 bp, Artificial Sequence
  Description of Artificial Sequence: Synthetic oligonucleotide
  Target: SCNA; (+) strand; PAM type: NRG; PAM sequence: GGG
aagcaccgaaatgctgagtg

SEQ ID NO: 27687 - DNA, 20 bp, Artificial Sequence
  Description of Artificial Sequence: Synthetic oligonucleotide
  Target: SCNA; (+) strand; PAM type: NRG; PAM sequence: GGG
agcaccgaaatgctgagtgg

SEQ ID NO: 27688 - DNA, 20 bp, Artificial Sequence
  Description of Artificial Sequence: Synthetic oligonucleotide
  Target: SCNA; (+) strand; PAM type: NRG; PAM sequence: CAG
accgaaatgctgagtggggg

SEQ ID NO: 27689 - DNA, 20 bp, Artificial Sequence
  Description of Artificial Sequence: Synthetic oligonucleotide
  Target: SCNA; (+) strand; PAM type: NRG; PAM sequence: AGG
ccgaaatgctgagtgggggc

SEQ ID NO: 27690 - DNA, 20 bp, Artificial Sequence
  Description of Artificial Sequence: Synthetic oligonucleotide
  Target: SCNA; (+) strand; PAM type: NRG; PAM sequence: CAG
atgctgagtgggggcaggta

SEQ ID NO: 27691 - DNA, 20 bp, Artificial Sequence
  Description of Artificial Sequence: Synthetic oligonucleotide
  Target: SCNA; (+) strand; PAM type: NRG; PAM sequence: TGG
gatacttcaatcactgctga

SEQ ID NO: 27692 - DNA, 20 bp, Artificial Sequence
  Description of Artificial Sequence: Synthetic oligonucleotide
  Target: SCNA; (+) strand; PAM type: NRG; PAM sequence: AAG
acttcaatcactgctgatgg

SEQ ID NO: 27693 - DNA, 20 bp, Artificial Sequence
  Description of Artificial Sequence: Synthetic oligonucleotide
  Target: SCNA; (+) strand; PAM type: NRG; PAM sequence: GAG
cactgctgatggaagacttc

SEQ ID NO: 27694 - DNA, 20 bp, Artificial Sequence
  Description of Artificial Sequence: Synthetic oligonucleotide
  Target: SCNA; (+) strand; PAM type: NRG; PAM sequence: GAG
agatacactgtaaaaacttt

SEQ ID NO: 27695 - DNA, 20 bp, Artificial Sequence
  Description of Artificial Sequence: Synthetic oligonucleotide
  Target: SCNA; (+) strand; PAM type: NRG; PAM sequence: TGG
actttgagaaatgtcatgac

SEQ ID NO: 27696 - DNA, 20 bp, Artificial Sequence
  Description of Artificial Sequence: Synthetic oligonucleotide
  Target: SCNA; (+) strand; PAM type: NRG; PAM sequence: GGG
ctttgagaaatgtcatgact

SEQ ID NO: 27697 - DNA, 20 bp, Artificial Sequence
  Description of Artificial Sequence: Synthetic oligonucleotide
  Target: SCNA; (+) strand; PAM type: NRG; PAM sequence: TGG
aatgtcatgactgggcacat

SEQ ID NO: 27698 - DNA, 20 bp, Artificial Sequence
  Description of Artificial Sequence: Synthetic oligonucleotide
  Target: SCNA; (+) strand; PAM type: NRG; PAM sequence: GAG
tgactgggcacattggaact

SEQ ID NO: 27699 - DNA, 20 bp, Artificial Sequence
  Description of Artificial Sequence: Synthetic oligonucleotide
  Target: SCNA; (+) strand; PAM type: NRG; PAM sequence: CAG
attggaactgagcacttgta

SEQ ID NO: 27700 - DNA, 20 bp, Artificial Sequence
  Description of Artificial Sequence: Synthetic oligonucleotide
  Target: SCNA; (+) strand; PAM type: NRG; PAM sequence: AGG
ttggaactgagcacttgtac

SEQ ID NO: 27701 - DNA, 20 bp, Artificial Sequence
  Description of Artificial Sequence: Synthetic oligonucleotide
  Target: SCNA; (+) strand; PAM type: NRG; PAM sequence: TGG
aactgagcacttgtacagga

SEQ ID NO: 27702 - DNA, 20 bp, Artificial Sequence
  Description of Artificial Sequence: Synthetic oligonucleotide
  Target: SCNA; (+) strand; PAM type: NRG; PAM sequence: CAG
gtacaggatggaacatctgt

SEQ ID NO: 27703 - DNA, 20 bp, Artificial Sequence
  Description of Artificial Sequence: Synthetic oligonucleotide
  Target: SCNA; (+) strand; PAM type: NRG; PAM sequence: CAG
caggatggaacatctgtcag

SEQ ID NO: 27704 - DNA, 20 bp, Artificial Sequence
  Description of Artificial Sequence: Synthetic oligonucleotide
  Target: SCNA; (+) strand; PAM type: NRG; PAM sequence: AAG
aacatctgtcagcagatctc

SEQ ID NO: 27705 - DNA, 20 bp, Artificial Sequence
  Description of Artificial Sequence: Synthetic oligonucleotide
  Target: SCNA; (+) strand; PAM type: NRG; PAM sequence: TGG
gtcagcagatctcaagaaac

SEQ ID NO: 27706 - DNA, 20 bp, Artificial Sequence
  Description of Artificial Sequence: Synthetic oligonucleotide
  Target: SCNA; (+) strand; PAM type: NRG; PAM sequence: GGG
tcagcagatctcaagaaact

SEQ ID NO: 27707 - DNA, 20 bp, Artificial Sequence
  Description of Artificial Sequence: Synthetic oligonucleotide
  Target: SCNA; (+) strand; PAM type: NRG; PAM sequence: GAG
agcagatctcaagaaactgg

SEQ ID NO: 27708 - DNA, 20 bp, Artificial Sequence
  Description of Artificial Sequence: Synthetic oligonucleotide
  Target: SCNA; (+) strand; PAM type: NRG; PAM sequence: AAG
atctcaagaaactgggagca

SEQ ID NO: 27709 - DNA, 20 bp, Artificial Sequence
  Description of Artificial Sequence: Synthetic oligonucleotide
  Target: SCNA; (+) strand; PAM type: NRG; PAM sequence: TAG
ctgggagcaaagatatttct

SEQ ID NO: 27710 - DNA, 20 bp, Artificial Sequence
  Description of Artificial Sequence: Synthetic oligonucleotide
  Target: SCNA; (+) strand; PAM type: NRG; PAM sequence: AGG
tgggagcaaagatatttctt

SEQ ID NO: 27711 - DNA, 20 bp, Artificial Sequence
  Description of Artificial Sequence: Synthetic oligonucleotide
  Target: SCNA; (+) strand; PAM type: NRG; PAM sequence: CAG
caaagatatttcttaggctt

SEQ ID NO: 27712 - DNA, 20 bp, Artificial Sequence
  Description of Artificial Sequence: Synthetic oligonucleotide
  Target: SCNA; (+) strand; PAM type: NRG; PAM sequence: AGG
aaagatatttcttaggcttc

SEQ ID NO: 27713 - DNA, 20 bp, Artificial Sequence
  Description of Artificial Sequence: Synthetic oligonucleotide
  Target: SCNA; (+) strand; PAM type: NRG; PAM sequence: TAG
tttcttaggcttcaggttcg

SEQ ID NO: 27714 - DNA, 20 bp, Artificial Sequence
  Description of Artificial Sequence: Synthetic oligonucleotide
  Target: SCNA; (+) strand; PAM type: NRG; PAM sequence: TAG
cttgatacccttcctaatat

SEQ ID NO: 27715 - DNA, 20 bp, Artificial Sequence
  Description of Artificial Sequence: Synthetic oligonucleotide
  Target: SCNA; (+) strand; PAM type: NRG; PAM sequence: AAG
ctaatattagaaaaatcaaa

SEQ ID NO: 27716 - DNA, 20 bp, Artificial Sequence
  Description of Artificial Sequence: Synthetic oligonucleotide
  Target: SCNA; (+) strand; PAM type: NRG; PAM sequence: CAG
tattagaaaaatcaaaaaga

SEQ ID NO: 27717 - DNA, 20 bp, Artificial Sequence
  Description of Artificial Sequence: Synthetic oligonucleotide
  Target: SCNA; (+) strand; PAM type: NRG; PAM sequence: TAG
aaaaagacagcacacactgt

SEQ ID NO: 27718 - DNA, 20 bp, Artificial Sequence
  Description of Artificial Sequence: Synthetic oligonucleotide
  Target: SCNA; (+) strand; PAM type: NRG; PAM sequence: AAG
acagcacacactgttagtat

SEQ ID NO: 27719 - DNA, 20 bp, Artificial Sequence
  Description of Artificial Sequence: Synthetic oligonucleotide
  Target: SCNA; (+) strand; PAM type: NRG; PAM sequence: CAG
tataagtttcaattacgcat

SEQ ID NO: 27720 - DNA, 20 bp, Artificial Sequence
  Description of Artificial Sequence: Synthetic oligonucleotide
  Target: SCNA; (+) strand; PAM type: NRG; PAM sequence: CAG
caattacgcatcagcactga

SEQ ID NO: 27721 - DNA, 20 bp, Artificial Sequence
  Description of Artificial Sequence: Synthetic oligonucleotide
  Target: SCNA; (+) strand; PAM type: NRG; PAM sequence: GAG
catcagcactgacagccaat

SEQ ID NO: 27722 - DNA, 20 bp, Artificial Sequence
  Description of Artificial Sequence: Synthetic oligonucleotide
  Target: SCNA; (+) strand; PAM type: NRG; PAM sequence: TAG
agcactgacagccaatgaga

SEQ ID NO: 27723 - DNA, 20 bp, Artificial Sequence
  Description of Artificial Sequence: Synthetic oligonucleotide
  Target: SCNA; (+) strand; PAM type: NRG; PAM sequence: AGG
gcactgacagccaatgagat

SEQ ID NO: 27724 - DNA, 20 bp, Artificial Sequence
  Description of Artificial Sequence: Synthetic oligonucleotide
  Target: SCNA; (+) strand; PAM type: NRG; PAM sequence: TGG
acagccaatgagataggaaa

SEQ ID NO: 27725 - DNA, 20 bp, Artificial Sequence
  Description of Artificial Sequence: Synthetic oligonucleotide
  Target: SCNA; (+) strand; PAM type: NRG; PAM sequence: CAG
atgtttttgcaaatattctg

SEQ ID NO: 27726 - DNA, 20 bp, Artificial Sequence
  Description of Artificial Sequence: Synthetic oligonucleotide
  Target: SCNA; (+) strand; PAM type: NRG; PAM sequence: TAG
aaatattatcttatttttaa

SEQ ID NO: 27727 - DNA, 20 bp, Artificial Sequence
  Description of Artificial Sequence: Synthetic oligonucleotide
  Target: SCNA; (+) strand; PAM type: NRG; PAM sequence: AAG
gtctttcttgtctgatataa

SEQ ID NO: 27728 - DNA, 20 bp, Artificial Sequence
  Description of Artificial Sequence: Synthetic oligonucleotide
  Target: SCNA; (+) strand; PAM type: NRG; PAM sequence: CAG
tctgatataaaagtgaatta

SEQ ID NO: 27729 - DNA, 20 bp, Artificial Sequence
  Description of Artificial Sequence: Synthetic oligonucleotide
  Target: SCNA; (+) strand; PAM type: NRG; PAM sequence: TAG
gatataaaagtgaattacag

SEQ ID NO: 27730 - DNA, 20 bp, Artificial Sequence
  Description of Artificial Sequence: Synthetic oligonucleotide
  Target: SCNA; (+) strand; PAM type: NRG; PAM sequence: TAG
ataaaagtgaattacagtag

SEQ ID NO: 27731 - DNA, 20 bp, Artificial Sequence
  Description of Artificial Sequence: Synthetic oligonucleotide
  Target: SCNA; (+) strand; PAM type: NRG; PAM sequence: CAG
aagtgaattacagtagtagt

SEQ ID NO: 27732 - DNA, 20 bp, Artificial Sequence
  Description of Artificial Sequence: Synthetic oligonucleotide
  Target: SCNA; (+) strand; PAM type: NRG; PAM sequence: GAG
gtgaattacagtagtagtca

SEQ ID NO: 27733 - DNA, 20 bp, Artificial Sequence
  Description of Artificial Sequence: Synthetic oligonucleotide
  Target: SCNA; (+) strand; PAM type: NRG; PAM sequence: TAG
gtagtcagagttaaaatatc

SEQ ID NO: 27734 - DNA, 20 bp, Artificial Sequence
  Description of Artificial Sequence: Synthetic oligonucleotide
  Target: SCNA; (+) strand; PAM type: NRG; PAM sequence: AGG
tagtcagagttaaaatatct

SEQ ID NO: 27735 - DNA, 20 bp, Artificial Sequence
  Description of Artificial Sequence: Synthetic oligonucleotide
  Target: SCNA; (+) strand; PAM type: NRG; PAM sequence: CGG
aaaatatctaggttctgatc

SEQ ID NO: 27736 - DNA, 20 bp, Artificial Sequence
  Description of Artificial Sequence: Synthetic oligonucleotide
  Target: SCNA; (+) strand; PAM type: NRG; PAM sequence: TAG
ccatttaatgatcatatacc

SEQ ID NO: 27737 - DNA, 20 bp, Artificial Sequence
  Description of Artificial Sequence: Synthetic oligonucleotide
  Target: SCNA; (+) strand; PAM type: NRG; PAM sequence: TGG
taatgatcatatacctagtt

SEQ ID NO: 27738 - DNA, 20 bp, Artificial Sequence
  Description of Artificial Sequence: Synthetic oligonucleotide
  Target: SCNA; (+) strand; PAM type: NRG; PAM sequence: TAG
tgatcatatacctagtttgg

SEQ ID NO: 27739 - DNA, 20 bp, Artificial Sequence
  Description of Artificial Sequence: Synthetic oligonucleotide
  Target: SCNA; (+) strand; PAM type: NRG; PAM sequence: AGG
gatcatatacctagtttggt

SEQ ID NO: 27740 - DNA, 20 bp, Artificial Sequence
  Description of Artificial Sequence: Synthetic oligonucleotide
  Target: SCNA; (+) strand; PAM type: NRG; PAM sequence: AAG
cctagtttggtaggacaaat

SEQ ID NO: 27741 - DNA, 20 bp, Artificial Sequence
  Description of Artificial Sequence: Synthetic oligonucleotide
  Target: SCNA; (+) strand; PAM type: NRG; PAM sequence: TGG
gtttggtaggacaaataagt

SEQ ID NO: 27742 - DNA, 20 bp, Artificial Sequence
  Description of Artificial Sequence: Synthetic oligonucleotide
  Target: SCNA; (+) strand; PAM type: NRG; PAM sequence: TGG
gacaaataagttggactgtc

SEQ ID NO: 27743 - DNA, 20 bp, Artificial Sequence
  Description of Artificial Sequence: Synthetic oligonucleotide
  Target: SCNA; (+) strand; PAM type: NRG; PAM sequence: CAG
aagttggactgtctggttct

SEQ ID NO: 27744 - DNA, 20 bp, Artificial Sequence
  Description of Artificial Sequence: Synthetic oligonucleotide
  Target: SCNA; (+) strand; PAM type: NRG; PAM sequence: GAG
tttcttcacctgtaaaatgt

SEQ ID NO: 27745 - DNA, 20 bp, Artificial Sequence
  Description of Artificial Sequence: Synthetic oligonucleotide
  Target: SCNA; (+) strand; PAM type: NRG; PAM sequence: AAG
taaaatgtgagaacaaaatc

SEQ ID NO: 27746 - DNA, 20 bp, Artificial Sequence
  Description of Artificial Sequence: Synthetic oligonucleotide
  Target: SCNA; (+) strand; PAM type: NRG; PAM sequence: AAG
acaaaatcaagctgtctata

SEQ ID NO: 27747 - DNA, 20 bp, Artificial Sequence
  Description of Artificial Sequence: Synthetic oligonucleotide
  Target: SCNA; (+) strand; PAM type: NRG; PAM sequence: CAG
gctgtctataaagccttttc

SEQ ID NO: 27748 - DNA, 20 bp, Artificial Sequence
  Description of Artificial Sequence: Synthetic oligonucleotide
  Target: SCNA; (+) strand; PAM type: NRG; PAM sequence: AAG
tataaagccttttccagact

SEQ ID NO: 27749 - DNA, 20 bp, Artificial Sequence
  Description of Artificial Sequence: Synthetic oligonucleotide
  Target: SCNA; (+) strand; PAM type: NRG; PAM sequence: CAG
gactaagatgctctaattct

SEQ ID NO: 27750 - DNA, 20 bp, Artificial Sequence
  Description of Artificial Sequence: Synthetic oligonucleotide
  Target: SCNA; (+) strand; PAM type: NRG; PAM sequence: AAG
taagatgctctaattctcag

SEQ ID NO: 27751 - DNA, 20 bp, Artificial Sequence
  Description of Artificial Sequence: Synthetic oligonucleotide
  Target: SCNA; (+) strand; PAM type: NRG; PAM sequence: AGG
aagatgctctaattctcaga

SEQ ID NO: 27752 - DNA, 20 bp, Artificial Sequence
  Description of Artificial Sequence: Synthetic oligonucleotide
  Target: SCNA; (+) strand; PAM type: NRG; PAM sequence: AAG
ctaattctcagaaggaaatt

SEQ ID NO: 27753 - DNA, 20 bp, Artificial Sequence
  Description of Artificial Sequence: Synthetic oligonucleotide
  Target: SCNA; (+) strand; PAM type: NRG; PAM sequence: AAG
gaaggaaattaagatgtttg

SEQ ID NO: 27754 - DNA, 20 bp, Artificial Sequence
  Description of Artificial Sequence: Synthetic oligonucleotide
  Target: SCNA; (+) strand; PAM type: NRG; PAM sequence: AGG
aaggaaattaagatgtttga

SEQ ID NO: 27755 - DNA, 20 bp, Artificial Sequence
  Description of Artificial Sequence: Synthetic oligonucleotide
  Target: SCNA; (+) strand; PAM type: NRG; PAM sequence: AAG
aaattaagatgtttgaaggc

SEQ ID NO: 27756 - DNA, 20 bp, Artificial Sequence
  Description of Artificial Sequence: Synthetic oligonucleotide
  Target: SCNA; (+) strand; PAM type: NRG; PAM sequence: CAG
tttccctactttcactctcc

SEQ ID NO: 27757 - DNA, 20 bp, Artificial Sequence
  Description of Artificial Sequence: Synthetic oligonucleotide
  Target: SCNA; (+) strand; PAM type: NRG; PAM sequence: TGG
gaaaatttcgtcttcatcta

SEQ ID NO: 27758 - DNA, 20 bp, Artificial Sequence
  Description of Artificial Sequence: Synthetic oligonucleotide
  Target: SCNA; (+) strand; PAM type: NRG; PAM sequence: AAG
ttacttgtatttcaaacctc

SEQ ID NO: 27759 - DNA, 20 bp, Artificial Sequence
  Description of Artificial Sequence: Synthetic oligonucleotide
  Target: SCNA; (+) strand; PAM type: NRG; PAM sequence: CAG
caaacctcaagctctccata

SEQ ID NO: 27760 - DNA, 20 bp, Artificial Sequence
  Description of Artificial Sequence: Synthetic oligonucleotide
  Target: SCNA; (+) strand; PAM type: NRG; PAM sequence: TGG
caagctctccatacagtatc

SEQ ID NO: 27761 - DNA, 20 bp, Artificial Sequence
  Description of Artificial Sequence: Synthetic oligonucleotide
  Target: SCNA; (+) strand; PAM type: NRG; PAM sequence: TAG
ctctccatacagtatctgga

SEQ ID NO: 27762 - DNA, 20 bp, Artificial Sequence
  Description of Artificial Sequence: Synthetic oligonucleotide
  Target: SCNA; (+) strand; PAM type: NRG; PAM sequence: TGG
atccacaacacaaatattaa

SEQ ID NO: 27763 - DNA, 20 bp, Artificial Sequence
  Description of Artificial Sequence: Synthetic oligonucleotide
  Target: SCNA; (+) strand; PAM type: NRG; PAM sequence: AAG
aatattaatggatttaatta

SEQ ID NO: 27764 - DNA, 20 bp, Artificial Sequence
  Description of Artificial Sequence: Synthetic oligonucleotide
  Target: SCNA; (+) strand; PAM type: NRG; PAM sequence: AGG
atattaatggatttaattaa

SEQ ID NO: 27765 - DNA, 20 bp, Artificial Sequence
  Description of Artificial Sequence: Synthetic oligonucleotide
  Target: SCNA; (+) strand; PAM type: NRG; PAM sequence: GGG
tattaatggatttaattaaa

SEQ ID NO: 27766 - DNA, 20 bp, Artificial Sequence
  Description of Artificial Sequence: Synthetic oligonucleotide
  Target: SCNA; (+) strand; PAM type: NRG; PAM sequence: CAG
atggatttaattaaagggat

SEQ ID NO: 27767 - DNA, 20 bp, Artificial Sequence
  Description of Artificial Sequence: Synthetic oligonucleotide
  Target: SCNA; (+) strand; PAM type: NRG; PAM sequence: AAG
ggatcagattattcctccta

SEQ ID NO: 27768 - DNA, 20 bp, Artificial Sequence
  Description of Artificial Sequence: Synthetic oligonucleotide
  Target: SCNA; (+) strand; PAM type: NRG; PAM sequence: GAG
atcagattattcctcctaaa

SEQ ID NO: 27769 - DNA, 20 bp, Artificial Sequence
  Description of Artificial Sequence: Synthetic oligonucleotide
  Target: SCNA; (+) strand; PAM type: NRG; PAM sequence: CAG
aagagcaactctaataatat

SEQ ID NO: 27770 - DNA, 20 bp, Artificial Sequence
  Description of Artificial Sequence: Synthetic oligonucleotide
  Target: SCNA; (+) strand; PAM type: NRG; PAM sequence: AGG
agagcaactctaataatatc

SEQ ID NO: 27771 - DNA, 20 bp, Artificial Sequence
  Description of Artificial Sequence: Synthetic oligonucleotide
  Target: SCNA; (+) strand; PAM type: NRG; PAM sequence: AAG
ctgcttaaaaacaaacaaat

SEQ ID NO: 27772 - DNA, 20 bp, Artificial Sequence
  Description of Artificial Sequence: Synthetic oligonucleotide
  Target: SCNA; (+) strand; PAM type: NRG; PAM sequence: AAG
aagcataacttcaataactc

SEQ ID NO: 27773 - DNA, 20 bp, Artificial Sequence
  Description of Artificial Sequence: Synthetic oligonucleotide
  Target: SCNA; (+) strand; PAM type: NRG; PAM sequence: TAG
aactcaagttgttttctgaa

SEQ ID NO: 27774 - DNA, 20 bp, Artificial Sequence
  Description of Artificial Sequence: Synthetic oligonucleotide
  Target: SCNA; (+) strand; PAM type: NRG; PAM sequence: AAG
ttgttttctgaatagaatac

SEQ ID NO: 27775 - DNA, 20 bp, Artificial Sequence
  Description of Artificial Sequence: Synthetic oligonucleotide
  Target: SCNA; (+) strand; PAM type: NRG; PAM sequence: AAG
agaatacaagctgaaatgac

SEQ ID NO: 27776 - DNA, 20 bp, Artificial Sequence
  Description of Artificial Sequence: Synthetic oligonucleotide
  Target: SCNA; (+) strand; PAM type: NRG; PAM sequence: TAG
tataacttgtctttgaccca

SEQ ID NO: 27777 - DNA, 20 bp, Artificial Sequence
  Description of Artificial Sequence: Synthetic oligonucleotide
  Target: SCNA; (+) strand; PAM type: NRG; PAM sequence: AAG
tcaccattttccttgttcct

SEQ ID NO: 27778 - DNA, 20 bp, Artificial Sequence
  Description of Artificial Sequence: Synthetic oligonucleotide
  Target: SCNA; (+) strand; PAM type: NRG; PAM sequence: GAG
ttttccttgttcctaagctt

SEQ ID NO: 27779 - DNA, 20 bp, Artificial Sequence
  Description of Artificial Sequence: Synthetic oligonucleotide
  Target: SCNA; (+) strand; PAM type: NRG; PAM sequence: CAG
tcataattattcactgttct

SEQ ID NO: 27780 - DNA, 20 bp, Artificial Sequence
  Description of Artificial Sequence: Synthetic oligonucleotide
  Target: SCNA; (+) strand; PAM type: NRG; PAM sequence: CAG
gacatatccatttgcatgct

SEQ ID NO: 27781 - DNA, 20 bp, Artificial Sequence
  Description of Artificial Sequence: Synthetic oligonucleotide
  Target: SCNA; (+) strand; PAM type: NRG; PAM sequence: CAG
cttctgatattcccttgtgc

SEQ ID NO: 27782 - DNA, 20 bp, Artificial Sequence
  Description of Artificial Sequence: Synthetic oligonucleotide
  Target: SCNA; (+) strand; PAM type: NRG; PAM sequence: CAG
atctcttaccttttcccacc

SEQ ID NO: 27783 - DNA, 20 bp, Artificial Sequence
  Description of Artificial Sequence: Synthetic oligonucleotide
  Target: SCNA; (+) strand; PAM type: NRG; PAM sequence: CAG
cttctcctgattgattgaaa

SEQ ID NO: 27784 - DNA, 20 bp, Artificial Sequence
  Description of Artificial Sequence: Synthetic oligonucleotide
  Target: SCNA; (+) strand; PAM type: NRG; PAM sequence: TAG
ctttaaaatgttttactttt

SEQ ID NO: 27785 - DNA, 20 bp, Artificial Sequence
  Description of Artificial Sequence: Synthetic oligonucleotide
  Target: SCNA; (+) strand; PAM type: NRG; PAM sequence: TGG
atttttgctcctgtgatgcc

SEQ ID NO: 27786 - DNA, 20 bp, Artificial Sequence
  Description of Artificial Sequence: Synthetic oligonucleotide
  Target: SCNA; (+) strand; PAM type: NRG; PAM sequence: AAG
ctgtgatgcctggtacatcg

SEQ ID NO: 27787 - DNA, 20 bp, Artificial Sequence
  Description of Artificial Sequence: Synthetic oligonucleotide
  Target: SCNA; (+) strand; PAM type: NRG; PAM sequence: AAG
acaatcaattatgtttgtta

SEQ ID NO: 27788 - DNA, 20 bp, Artificial Sequence
  Description of Artificial Sequence: Synthetic oligonucleotide
  Target: SCNA; (+) strand; PAM type: NRG; PAM sequence: AGG
caatcaattatgtttgttaa

SEQ ID NO: 27789 - DNA, 20 bp, Artificial Sequence
  Description of Artificial Sequence: Synthetic oligonucleotide
  Target: SCNA; (+) strand; PAM type: NRG; PAM sequence: AAG
ttgttaaaggaatcataatg

SEQ ID NO: 27790 - DNA, 20 bp, Artificial Sequence
  Description of Artificial Sequence: Synthetic oligonucleotide
  Target: SCNA; (+) strand; PAM type: NRG; PAM sequence: CAG
ttttttttcatcaaacctac

SEQ ID NO: 27791 - DNA, 20 bp, Artificial Sequence
  Description of Artificial Sequence: Synthetic oligonucleotide
  Target: SCNA; (+) strand; PAM type: NRG; PAM sequence: TGG
actgtaaactccttatgtcc

SEQ ID NO: 27792 - DNA, 20 bp, Artificial Sequence
  Description of Artificial Sequence: Synthetic oligonucleotide
  Target: SCNA; (+) strand; PAM type: NRG; PAM sequence: TAG
tggtaatgtcaattactcta

SEQ ID NO: 27793 - DNA, 20 bp, Artificial Sequence
  Description of Artificial Sequence: Synthetic oligonucleotide
  Target: SCNA; (+) strand; PAM type: NRG; PAM sequence: TAG
ctatagttttccattgtgtt

SEQ ID NO: 27794 - DNA, 20 bp, Artificial Sequence
  Description of Artificial Sequence: Synthetic oligonucleotide
  Target: SCNA; (+) strand; PAM type: NRG; PAM sequence: AAG
tagtactgtgtcttgcataa

SEQ ID NO: 27795 - DNA, 20 bp, Artificial Sequence
  Description of Artificial Sequence: Synthetic oligonucleotide
  Target: SCNA; (+) strand; PAM type: NRG; PAM sequence: TGG
cataaaagaccccaaaatat

SEQ ID NO: 27796 - DNA, 20 bp, Artificial Sequence
  Description of Artificial Sequence: Synthetic oligonucleotide
  Target: SCNA; (+) strand; PAM type: NRG; PAM sequence: TAG
aaaatattggaaattcttat

SEQ ID NO: 27797 - DNA, 20 bp, Artificial Sequence
  Description of Artificial Sequence: Synthetic oligonucleotide
  Target: SCNA; (+) strand; PAM type: NRG; PAM sequence: AGG
aaatattggaaattcttatt

SEQ ID NO: 27798 - DNA, 20 bp, Artificial Sequence
  Description of Artificial Sequence: Synthetic oligonucleotide
  Target: SCNA; (+) strand; PAM type: NRG; PAM sequence: AAG
aatttaatctcaatttctat

SEQ ID NO: 27799 - DNA, 20 bp, Artificial Sequence
  Description of Artificial Sequence: Synthetic oligonucleotide
  Target: SCNA; (+) strand; PAM type: NRG; PAM sequence: GAG
tgcctttcgtgtgtctgtgt

SEQ ID NO: 27800 - DNA, 20 bp, Artificial Sequence
  Description of Artificial Sequence: Synthetic oligonucleotide
  Target: SCNA; (+) strand; PAM type: NRG; PAM sequence: CAG
tttcgtgtgtctgtgtgaga

SEQ ID NO: 27801 - DNA, 20 bp, Artificial Sequence
  Description of Artificial Sequence: Synthetic oligonucleotide
  Target: SCNA; (+) strand; PAM type: NRG; PAM sequence: AAG
gacagtcttgctctgttacc

SEQ ID NO: 27802 - DNA, 20 bp, Artificial Sequence
  Description of Artificial Sequence: Synthetic oligonucleotide
  Target: SCNA; (+) strand; PAM type: NRG; PAM sequence: TGG
tcttgctctgttaccaagat

SEQ ID NO: 27803 - DNA, 20 bp, Artificial Sequence
  Description of Artificial Sequence: Synthetic oligonucleotide
  Target: SCNA; (+) strand; PAM type: NRG; PAM sequence: GAG
ttgctctgttaccaagattg

SEQ ID NO: 27804 - DNA, 20 bp, Artificial Sequence
  Description of Artificial Sequence: Synthetic oligonucleotide
  Target: SCNA; (+) strand; PAM type: NRG; PAM sequence: CAG
ctgttaccaagattggagtg

SEQ ID NO: 27805 - DNA, 20 bp, Artificial Sequence
  Description of Artificial Sequence: Synthetic oligonucleotide
  Target: SCNA; (+) strand; PAM type: NRG; PAM sequence: AGG
tgttaccaagattggagtgc

SEQ ID NO: 27806 - DNA, 20 bp, Artificial Sequence
  Description of Artificial Sequence: Synthetic oligonucleotide
  Target: SCNA; (+) strand; PAM type: NRG; PAM sequence: GGG
gttaccaagattggagtgca

SEQ ID NO: 27807 - DNA, 20 bp, Artificial Sequence
  Description of Artificial Sequence: Synthetic oligonucleotide
  Target: SCNA; (+) strand; PAM type: NRG; PAM sequence: GGG
ttaccaagattggagtgcag

SEQ ID NO: 27808 - DNA, 20 bp, Artificial Sequence
  Description of Artificial Sequence: Synthetic oligonucleotide
  Target: SCNA; (+) strand; PAM type: NRG; PAM sequence: CAG
ggagtgcaggggtgccatct

SEQ ID NO: 27809 - DNA, 20 bp, Artificial Sequence
  Description of Artificial Sequence: Synthetic oligonucleotide
  Target: SCNA; (+) strand; PAM type: NRG; PAM sequence: TGG
tcactgcaacctctgcctcc

SEQ ID NO: 27810 - DNA, 20 bp, Artificial Sequence
  Description of Artificial Sequence: Synthetic oligonucleotide
  Target: SCNA; (+) strand; PAM type: NRG; PAM sequence: GGG
cactgcaacctctgcctcct

SEQ ID NO: 27811 - DNA, 20 bp, Artificial Sequence
  Description of Artificial Sequence: Synthetic oligonucleotide
  Target: SCNA; (+) strand; PAM type: NRG; PAM sequence: AAG
aacctctgcctcctgggttc

SEQ ID NO: 27812 - DNA, 20 bp, Artificial Sequence
  Description of Artificial Sequence: Synthetic oligonucleotide
  Target: SCNA; (+) strand; PAM type: NRG; PAM sequence: CAG
ttcaagtgactctcatgcct

SEQ ID NO: 27813 - DNA, 20 bp, Artificial Sequence
  Description of Artificial Sequence: Synthetic oligonucleotide
  Target: SCNA; (+) strand; PAM type: NRG; PAM sequence: AAG
ctctcatgcctcagcctccc

SEQ ID NO: 27814 - DNA, 20 bp, Artificial Sequence
  Description of Artificial Sequence: Synthetic oligonucleotide
  Target: SCNA; (+) strand; PAM type: NRG; PAM sequence: TAG
tcatgcctcagcctcccaag

SEQ ID NO: 27815 - DNA, 20 bp, Artificial Sequence
  Description of Artificial Sequence: Synthetic oligonucleotide
  Target: SCNA; (+) strand; PAM type: NRG; PAM sequence: TGG
gcctcagcctcccaagtagc

SEQ ID NO: 27816 - DNA, 20 bp, Artificial Sequence
  Description of Artificial Sequence: Synthetic oligonucleotide
  Target: SCNA; (+) strand; PAM type: NRG; PAM sequence: TAG
ctcccaagtagctggaacca

SEQ ID NO: 27817 - DNA, 20 bp, Artificial Sequence
  Description of Artificial Sequence: Synthetic oligonucleotide
  Target: SCNA; (+) strand; PAM type: NRG; PAM sequence: AGG
tcccaagtagctggaaccat

SEQ ID NO: 27818 - DNA, 20 bp, Artificial Sequence
  Description of Artificial Sequence: Synthetic oligonucleotide
  Target: SCNA; (+) strand; PAM type: NRG; PAM sequence: CGG
taggcgtgtaccaccatgcc

SEQ ID NO: 27819 - DNA, 20 bp, Artificial Sequence
  Description of Artificial Sequence: Synthetic oligonucleotide
  Target: SCNA; (+) strand; PAM type: NRG; PAM sequence: TAG
ccggctaatttttgtatttt

SEQ ID NO: 27820 - DNA, 20 bp, Artificial Sequence
  Description of Artificial Sequence: Synthetic oligonucleotide
  Target: SCNA; (+) strand; PAM type: NRG; PAM sequence: TAG
gctaatttttgtatttttag

SEQ ID NO: 27821 - DNA, 20 bp, Artificial Sequence
  Description of Artificial Sequence: Synthetic oligonucleotide
  Target: SCNA; (+) strand; PAM type: NRG; PAM sequence: GAG
taatttttgtatttttagta

SEQ ID NO: 27822 - DNA, 20 bp, Artificial Sequence
  Description of Artificial Sequence: Synthetic oligonucleotide
  Target: SCNA; (+) strand; PAM type: NRG; PAM sequence: TGG
ttttgtatttttagtagaga

SEQ ID NO: 27823 - DNA, 20 bp, Artificial Sequence
  Description of Artificial Sequence: Synthetic oligonucleotide
  Target: SCNA; (+) strand; PAM type: NRG; PAM sequence: GGG
tttgtatttttagtagagat

SEQ ID NO: 27824 - DNA, 20 bp, Artificial Sequence
  Description of Artificial Sequence: Synthetic oligonucleotide
  Target: SCNA; (+) strand; PAM type: NRG; PAM sequence: GGG
ttgtatttttagtagagatg

SEQ ID NO: 27825 - DNA, 20 bp, Artificial Sequence
  Description of Artificial Sequence: Synthetic oligonucleotide
  Target: SCNA; (+) strand; PAM type: NRG; PAM sequence: TGG
gagatggggtttcaccatgt

SEQ ID NO: 27826 - DNA, 20 bp, Artificial Sequence
  Description of Artificial Sequence: Synthetic oligonucleotide
  Target: SCNA; (+) strand; PAM type: NRG; PAM sequence: CAG
tggggtttcaccatgttggc

SEQ ID NO: 27827 - DNA, 20 bp, Artificial Sequence
  Description of Artificial Sequence: Synthetic oligonucleotide
  Target: SCNA; (+) strand; PAM type: NRG; PAM sequence: TGG
tttcaccatgttggccagac

SEQ ID NO: 27828 - DNA, 20 bp, Artificial Sequence
  Description of Artificial Sequence: Synthetic oligonucleotide
  Target: SCNA; (+) strand; PAM type: NRG; PAM sequence: TGG
ccagactggtctccaactcc

SEQ ID NO: 27829 - DNA, 20 bp, Artificial Sequence
  Description of Artificial Sequence: Synthetic oligonucleotide
  Target: SCNA; (+) strand; PAM type: NRG; PAM sequence: AAG
ggtctccaactcctggcctc

SEQ ID NO: 27830 - DNA, 20 bp, Artificial Sequence
  Description of Artificial Sequence: Synthetic oligonucleotide
  Target: SCNA; (+) strand; PAM type: NRG; PAM sequence: TGG
actcctggcctcaagtaacc

SEQ ID NO: 27831 - DNA, 20 bp, Artificial Sequence
  Description of Artificial Sequence: Synthetic oligonucleotide
  Target: SCNA; (+) strand; PAM type: NRG; PAM sequence: TGG
ctcaagtaacctggccactt

SEQ ID NO: 27832 - DNA, 20 bp, Artificial Sequence
  Description of Artificial Sequence: Synthetic oligonucleotide
  Target: SCNA; (+) strand; PAM type: NRG; PAM sequence: AAG
cctggccactttggctcaca

SEQ ID NO: 27833 - DNA, 20 bp, Artificial Sequence
  Description of Artificial Sequence: Synthetic oligonucleotide
  Target: SCNA; (+) strand; PAM type: NRG; PAM sequence: CGG
ccactttggctcacaaagtg

SEQ ID NO: 27834 - DNA, 20 bp, Artificial Sequence
  Description of Artificial Sequence: Synthetic oligonucleotide
  Target: SCNA; (+) strand; PAM type: NRG; PAM sequence: GGG
cactttggctcacaaagtgc

SEQ ID NO: 27835 - DNA, 20 bp, Artificial Sequence
  Description of Artificial Sequence: Synthetic oligonucleotide
  Target: SCNA; (+) strand; PAM type: NRG; PAM sequence: CAG
gctcacaaagtgcgggatta

SEQ ID NO: 27836 - DNA, 20 bp, Artificial Sequence
  Description of Artificial Sequence: Synthetic oligonucleotide
  Target: SCNA; (+) strand; PAM type: NRG; PAM sequence: AGG
ctcacaaagtgcgggattac

SEQ ID NO: 27837 - DNA, 20 bp, Artificial Sequence
  Description of Artificial Sequence: Synthetic oligonucleotide
  Target: SCNA; (+) strand; PAM type: NRG; PAM sequence: GAG
atgccttttaataatgccgt

SEQ ID NO: 27838 - DNA, 20 bp, Artificial Sequence
  Description of Artificial Sequence: Synthetic oligonucleotide
  Target: SCNA; (+) strand; PAM type: NRG; PAM sequence: AGG
tgccttttaataatgccgtg

SEQ ID NO: 27839 - DNA, 20 bp, Artificial Sequence
  Description of Artificial Sequence: Synthetic oligonucleotide
  Target: SCNA; (+) strand; PAM type: NRG; PAM sequence: TGG
tacttgaactcaatttttaa

SEQ ID NO: 27840 - DNA, 20 bp, Artificial Sequence
  Description of Artificial Sequence: Synthetic oligonucleotide
  Target: SCNA; (+) strand; PAM type: NRG; PAM sequence: GAG
cttgaactcaatttttaatg

SEQ ID NO: 27841 - DNA, 20 bp, Artificial Sequence
  Description of Artificial Sequence: Synthetic oligonucleotide
  Target: SCNA; (+) strand; PAM type: NRG; PAM sequence: TAG
tttttaatggagccattata

SEQ ID NO: 27842 - DNA, 20 bp, Artificial Sequence
  Description of Artificial Sequence: Synthetic oligonucleotide
  Target: SCNA; (+) strand; PAM type: NRG; PAM sequence: TGG
tttcttgtgatatcttcatt

SEQ ID NO: 27843 - DNA, 20 bp, Artificial Sequence
  Description of Artificial Sequence: Synthetic oligonucleotide
  Target: SCNA; (+) strand; PAM type: NRG; PAM sequence: CAG
cttcatttggttttgattat

SEQ ID NO: 27844 - DNA, 20 bp, Artificial Sequence
  Description of Artificial Sequence: Synthetic oligonucleotide
  Target: SCNA; (+) strand; PAM type: NRG; PAM sequence: AGG
ttcatttggttttgattatc

SEQ ID NO: 27845 - DNA, 20 bp, Artificial Sequence
  Description of Artificial Sequence: Synthetic oligonucleotide
  Target: SCNA; (+) strand; PAM type: NRG; PAM sequence: GGG
tcatttggttttgattatca

SEQ ID NO: 27846 - DNA, 20 bp, Artificial Sequence
  Description of Artificial Sequence: Synthetic oligonucleotide
  Target: SCNA; (+) strand; PAM type: NRG; PAM sequence: TGG
tttgattatcagggtaatat

SEQ ID NO: 27847 - DNA, 20 bp, Artificial Sequence
  Description of Artificial Sequence: Synthetic oligonucleotide
  Target: SCNA; (+) strand; PAM type: NRG; PAM sequence: TAG
taatattggtctcacaaaat

SEQ ID NO: 27848 - DNA, 20 bp, Artificial Sequence
  Description of Artificial Sequence: Synthetic oligonucleotide
  Target: SCNA; (+) strand; PAM type: NRG; PAM sequence: TGG
attggtctcacaaaattagt

SEQ ID NO: 27849 - DNA, 20 bp, Artificial Sequence
  Description of Artificial Sequence: Synthetic oligonucleotide
  Target: SCNA; (+) strand; PAM type: NRG; PAM sequence: GGG
ttggtctcacaaaattagtt

SEQ ID NO: 27850 - DNA, 20 bp, Artificial Sequence
  Description of Artificial Sequence: Synthetic oligonucleotide
  Target: SCNA; (+) strand; PAM type: NRG; PAM sequence: AAG
tgtctcctcttctgttttgt

SEQ ID NO: 27851 - DNA, 20 bp, Artificial Sequence
  Description of Artificial Sequence: Synthetic oligonucleotide
  Target: SCNA; (+) strand; PAM type: NRG; PAM sequence: GAG
tctcctcttctgttttgtaa

SEQ ID NO: 27852 - DNA, 20 bp, Artificial Sequence
  Description of Artificial Sequence: Synthetic oligonucleotide
  Target: SCNA; (+) strand; PAM type: NRG; PAM sequence: TGG
gttttgtaagagatattaat

SEQ ID NO: 27853 - DNA, 20 bp, Artificial Sequence
  Description of Artificial Sequence: Synthetic oligonucleotide
  Target: SCNA; (+) strand; PAM type: NRG; PAM sequence: TAG
attaattggtgttaactaat

SEQ ID NO: 27854 - DNA, 20 bp, Artificial Sequence
  Description of Artificial Sequence: Synthetic oligonucleotide
  Target: SCNA; (+) strand; PAM type: NRG; PAM sequence: TGG
ttaattcctctttaaatgtt

SEQ ID NO: 27855 - DNA, 20 bp, Artificial Sequence
  Description of Artificial Sequence: Synthetic oligonucleotide
  Target: SCNA; (+) strand; PAM type: NRG; PAM sequence: TAG
attcctctttaaatgtttgg

SEQ ID NO: 27856 - DNA, 20 bp, Artificial Sequence
  Description of Artificial Sequence: Synthetic oligonucleotide
  Target: SCNA; (+) strand; PAM type: NRG; PAM sequence: CAG
aaatgtttggtagaatttac

SEQ ID NO: 27857 - DNA, 20 bp, Artificial Sequence
  Description of Artificial Sequence: Synthetic oligonucleotide
  Target: SCNA; (+) strand; PAM type: NRG; PAM sequence: CGG
atttaccagtgatgccatct

SEQ ID NO: 27858 - DNA, 20 bp, Artificial Sequence
  Description of Artificial Sequence: Synthetic oligonucleotide
  Target: SCNA; (+) strand; PAM type: NRG; PAM sequence: TGG
ccagtgatgccatctcggcc

SEQ ID NO: 27859 - DNA, 20 bp, Artificial Sequence
  Description of Artificial Sequence: Synthetic oligonucleotide
  Target: SCNA; (+) strand; PAM type: NRG; PAM sequence: GGG
cagtgatgccatctcggcct

SEQ ID NO: 27860 - DNA, 20 bp, Artificial Sequence
  Description of Artificial Sequence: Synthetic oligonucleotide
  Target: SCNA; (+) strand; PAM type: NRG; PAM sequence: CAG
tcggcctgggattttctttg

SEQ ID NO: 27861 - DNA, 20 bp, Artificial Sequence
  Description of Artificial Sequence: Synthetic oligonucleotide
  Target: SCNA; (+) strand; PAM type: NRG; PAM sequence: AGG
cggcctgggattttctttgc

SEQ ID NO: 27862 - DNA, 20 bp, Artificial Sequence
  Description of Artificial Sequence: Synthetic oligonucleotide
  Target: SCNA; (+) strand; PAM type: NRG; PAM sequence: TAG
cctgggattttctttgcagg

SEQ ID NO: 27863 - DNA, 20 bp, Artificial Sequence
  Description of Artificial Sequence: Synthetic oligonucleotide
  Target: SCNA; (+) strand; PAM type: NRG; PAM sequence: AGG
ctgggattttctttgcaggt

SEQ ID NO: 27864 - DNA, 20 bp, Artificial Sequence
  Description of Artificial Sequence: Synthetic oligonucleotide
  Target: SCNA; (+) strand; PAM type: NRG; PAM sequence: CAG
cgctgtgttacaaatctatt

SEQ ID NO: 27865 - DNA, 20 bp, Artificial Sequence
  Description of Artificial Sequence: Synthetic oligonucleotide
  Target: SCNA; (+) strand; PAM type: NRG; PAM sequence: TGG
tcagatttactgtttcttct

SEQ ID NO: 27866 - DNA, 20 bp, Artificial Sequence
  Description of Artificial Sequence: Synthetic oligonucleotide
  Target: SCNA; (+) strand; PAM type: NRG; PAM sequence: GGG
cagatttactgtttcttctt

SEQ ID NO: 27867 - DNA, 20 bp, Artificial Sequence
  Description of Artificial Sequence: Synthetic oligonucleotide
  Target: SCNA; (+) strand; PAM type: NRG; PAM sequence: CAG
tttactgtttcttcttgggc

SEQ ID NO: 27868 - DNA, 20 bp, Artificial Sequence
  Description of Artificial Sequence: Synthetic oligonucleotide
  Target: SCNA; (+) strand; PAM type: NRG; PAM sequence: CAG
ggccagttttattcatctaa

SEQ ID NO: 27869 - DNA, 20 bp, Artificial Sequence
  Description of Artificial Sequence: Synthetic oligonucleotide
  Target: SCNA; (+) strand; PAM type: NRG; PAM sequence: AAG
ttttgatacattttctatta

SEQ ID NO: 27870 - DNA, 20 bp, Artificial Sequence
  Description of Artificial Sequence: Synthetic oligonucleotide
  Target: SCNA; (+) strand; PAM type: NRG; PAM sequence: TGG
tgttgtttaaaacattatac

SEQ ID NO: 27871 - DNA, 20 bp, Artificial Sequence
  Description of Artificial Sequence: Synthetic oligonucleotide
  Target: SCNA; (+) strand; PAM type: NRG; PAM sequence: TGG
tttttattctataacttgtg

SEQ ID NO: 27872 - DNA, 20 bp, Artificial Sequence
  Description of Artificial Sequence: Synthetic oligonucleotide
  Target: SCNA; (+) strand; PAM type: NRG; PAM sequence: GGG
ttttattctataacttgtgt

SEQ ID NO: 27873 - DNA, 20 bp, Artificial Sequence
  Description of Artificial Sequence: Synthetic oligonucleotide
  Target: SCNA; (+) strand; PAM type: NRG; PAM sequence: TGG
tttactatgcgtcatcccat

SEQ ID NO: 27874 - DNA, 20 bp, Artificial Sequence
  Description of Artificial Sequence: Synthetic oligonucleotide
  Target: SCNA; (+) strand; PAM type: NRG; PAM sequence: TGG
gtcatcccattggacatgta

SEQ ID NO: 27875 - DNA, 20 bp, Artificial Sequence
  Description of Artificial Sequence: Synthetic oligonucleotide
  Target: SCNA; (+) strand; PAM type: NRG; PAM sequence: TGG
aaaaaataataaccttcctt

SEQ ID NO: 27876 - DNA, 20 bp, Artificial Sequence
  Description of Artificial Sequence: Synthetic oligonucleotide
  Target: SCNA; (+) strand; PAM type: NRG; PAM sequence: TAG
gatttccctaactttccatt

SEQ ID NO: 27877 - DNA, 20 bp, Artificial Sequence
  Description of Artificial Sequence: Synthetic oligonucleotide
  Target: SCNA; (+) strand; PAM type: NRG; PAM sequence: TAG
ttccatttagaaatttattt

SEQ ID NO: 27878 - DNA, 20 bp, Artificial Sequence
  Description of Artificial Sequence: Synthetic oligonucleotide
  Target: SCNA; (+) strand; PAM type: NRG; PAM sequence: AAG
gaaatttattttagaatgta

SEQ ID NO: 27879 - DNA, 20 bp, Artificial Sequence
  Description of Artificial Sequence: Synthetic oligonucleotide
  Target: SCNA; (+) strand; PAM type: NRG; PAM sequence: CAG
taaaaatatattctctaatg

SEQ ID NO: 27880 - DNA, 20 bp, Artificial Sequence
  Description of Artificial Sequence: Synthetic oligonucleotide
  Target: SCNA; (+) strand; PAM type: NRG; PAM sequence: AGG
aaaaatatattctctaatgc

SEQ ID NO: 27881 - DNA, 20 bp, Artificial Sequence
  Description of Artificial Sequence: Synthetic oligonucleotide
  Target: SCNA; (+) strand; PAM type: NRG; PAM sequence: GGG
aaaatatattctctaatgca

SEQ ID NO: 27882 - DNA, 20 bp, Artificial Sequence
  Description of Artificial Sequence: Synthetic oligonucleotide
  Target: SCNA; (+) strand; PAM type: NRG; PAM sequence: GGG
aaatatattctctaatgcag

SEQ ID NO: 27883 - DNA, 20 bp, Artificial Sequence
  Description of Artificial Sequence: Synthetic oligonucleotide
  Target: SCNA; (+) strand; PAM type: NRG; PAM sequence: TAG
atattctctaatgcaggggt

SEQ ID NO: 27884 - DNA, 20 bp, Artificial Sequence
  Description of Artificial Sequence: Synthetic oligonucleotide
  Target: SCNA; (+) strand; PAM type: NRG; PAM sequence: AAG
gttagtaaacttttcctgta

SEQ ID NO: 27885 - DNA, 20 bp, Artificial Sequence
  Description of Artificial Sequence: Synthetic oligonucleotide
  Target: SCNA; (+) strand; PAM type: NRG; PAM sequence: AGG
ttagtaaacttttcctgtaa

SEQ ID NO: 27886 - DNA, 20 bp, Artificial Sequence
  Description of Artificial Sequence: Synthetic oligonucleotide
  Target: SCNA; (+) strand; PAM type: NRG; PAM sequence: GGG
tagtaaacttttcctgtaaa

SEQ ID NO: 27887 - DNA, 20 bp, Artificial Sequence
  Description of Artificial Sequence: Synthetic oligonucleotide
  Target: SCNA; (+) strand; PAM type: NRG; PAM sequence: AAG
aacttttcctgtaaagggtc

SEQ ID NO: 27888 - DNA, 20 bp, Artificial Sequence
  Description of Artificial Sequence: Synthetic oligonucleotide
  Target: SCNA; (+) strand; PAM type: NRG; PAM sequence: TAG
ttttcctgtaaagggtcaag

SEQ ID NO: 27889 - DNA, 20 bp, Artificial Sequence
  Description of Artificial Sequence: Synthetic oligonucleotide
  Target: SCNA; (+) strand; PAM type: NRG; PAM sequence: AAG
cctgtaaagggtcaagtagt

SEQ ID NO: 27890 - DNA, 20 bp, Artificial Sequence
  Description of Artificial Sequence: Synthetic oligonucleotide
  Target: SCNA; (+) strand; PAM type: NRG; PAM sequence: AAG
ggtcaagtagtaagtatatt

SEQ ID NO: 27891 - DNA, 20 bp, Artificial Sequence
  Description of Artificial Sequence: Synthetic oligonucleotide
  Target: SCNA; (+) strand; PAM type: NRG; PAM sequence: TGG
agtaagtatattaagctatg

SEQ ID NO: 27892 - DNA, 20 bp, Artificial Sequence
  Description of Artificial Sequence: Synthetic oligonucleotide
  Target: SCNA; (+) strand; PAM type: NRG; PAM sequence: AAG
tcctcctcctcttttttttt

SEQ ID NO: 27893 - DNA, 20 bp, Artificial Sequence
  Description of Artificial Sequence: Synthetic oligonucleotide
  Target: SCNA; (+) strand; PAM type: NRG; PAM sequence: AGG
cctcctcctcttttttttta

SEQ ID NO: 27894 - DNA, 20 bp, Artificial Sequence
  Description of Artificial Sequence: Synthetic oligonucleotide
  Target: SCNA; (+) strand; PAM type: NRG; PAM sequence: AAG
aaaaactattcttaacttgc

SEQ ID NO: 27895 - DNA, 20 bp, Artificial Sequence
  Description of Artificial Sequence: Synthetic oligonucleotide
  Target: SCNA; (+) strand; PAM type: NRG; PAM sequence: GAG
ttgcaagttgtccacgtaat

SEQ ID NO: 27896 - DNA, 20 bp, Artificial Sequence
  Description of Artificial Sequence: Synthetic oligonucleotide
  Target: SCNA; (+) strand; PAM type: NRG; PAM sequence: TAG
ttgtccacgtaatgagcatg

SEQ ID NO: 27897 - DNA, 20 bp, Artificial Sequence
  Description of Artificial Sequence: Synthetic oligonucleotide
  Target: SCNA; (+) strand; PAM type: NRG; PAM sequence: GAG
gtccacgtaatgagcatgta

SEQ ID NO: 27898 - DNA, 20 bp, Artificial Sequence
  Description of Artificial Sequence: Synthetic oligonucleotide
  Target: SCNA; (+) strand; PAM type: NRG; PAM sequence: GAG
ccacgtaatgagcatgtaga

SEQ ID NO: 27899 - DNA, 20 bp, Artificial Sequence
  Description of Artificial Sequence: Synthetic oligonucleotide
  Target: SCNA; (+) strand; PAM type: NRG; PAM sequence: AAG
gagagcaaatgattctcact

SEQ ID NO: 27900 - DNA, 20 bp, Artificial Sequence
  Description of Artificial Sequence: Synthetic oligonucleotide
  Target: SCNA; (+) strand; PAM type: NRG; PAM sequence: AAG
ttctcactaagcactaatga

SEQ ID NO: 27901 - DNA, 20 bp, Artificial Sequence
  Description of Artificial Sequence: Synthetic oligonucleotide
  Target: SCNA; (+) strand; PAM type: NRG; PAM sequence: GAG
ctcactaagcactaatgaaa

SEQ ID NO: 27902 - DNA, 20 bp, Artificial Sequence
  Description of Artificial Sequence: Synthetic oligonucleotide
  Target: SCNA; (+) strand; PAM type: NRG; PAM sequence: CAG
aaagagaaatgtgacaatga

SEQ ID NO: 27903 - DNA, 20 bp, Artificial Sequence
  Description of Artificial Sequence: Synthetic oligonucleotide
  Target: SCNA; (+) strand; PAM type: NRG; PAM sequence: AGG
aagagaaatgtgacaatgac

SEQ ID NO: 27904 - DNA, 20 bp, Artificial Sequence
  Description of Artificial Sequence: Synthetic oligonucleotide
  Target: SCNA; (+) strand; PAM type: NRG; PAM sequence: TGG
atgtgacaatgacaggtttt

SEQ ID NO: 27905 - DNA, 20 bp, Artificial Sequence
  Description of Artificial Sequence: Synthetic oligonucleotide
  Target: SCNA; (+) strand; PAM type: NRG; PAM sequence: TAG
ggtttttggtactgtcttgt

SEQ ID NO: 27906 - DNA, 20 bp, Artificial Sequence
  Description of Artificial Sequence: Synthetic oligonucleotide
  Target: SCNA; (+) strand; PAM type: NRG; PAM sequence: AAG
tttggtactgtcttgttaga

SEQ ID NO: 27907 - DNA, 20 bp, Artificial Sequence
  Description of Artificial Sequence: Synthetic oligonucleotide
  Target: SCNA; (+) strand; PAM type: NRG; PAM sequence: CAG
actgtcttgttagaaagatt

SEQ ID NO: 27908 - DNA, 20 bp, Artificial Sequence
  Description of Artificial Sequence: Synthetic oligonucleotide
  Target: SCNA; (+) strand; PAM type: NRG; PAM sequence: TGG
cttgttagaaagattcagct

SEQ ID NO: 27909 - DNA, 20 bp, Artificial Sequence
  Description of Artificial Sequence: Synthetic oligonucleotide
  Target: SCNA; (+) strand; PAM type: NRG; PAM sequence: CAG
ttcagcttggactcctacct

SEQ ID NO: 27910 - DNA, 20 bp, Artificial Sequence
  Description of Artificial Sequence: Synthetic oligonucleotide
  Target: SCNA; (+) strand; PAM type: NRG; PAM sequence: AAG
agcttggactcctacctcag

SEQ ID NO: 27911 - DNA, 20 bp, Artificial Sequence
  Description of Artificial Sequence: Synthetic oligonucleotide
  Target: SCNA; (+) strand; PAM type: NRG; PAM sequence: AGG
gcttggactcctacctcaga

SEQ ID NO: 27912 - DNA, 20 bp, Artificial Sequence
  Description of Artificial Sequence: Synthetic oligonucleotide
  Target: SCNA; (+) strand; PAM type: NRG; PAM sequence: AAG
tacctcagaaggcatttcat

SEQ ID NO: 27913 - DNA, 20 bp, Artificial Sequence
  Description of Artificial Sequence: Synthetic oligonucleotide
  Target: SCNA; (+) strand; PAM type: NRG; PAM sequence: CAG
catttcataagcctcattgt

SEQ ID NO: 27914 - DNA, 20 bp, Artificial Sequence
  Description of Artificial Sequence: Synthetic oligonucleotide
  Target: SCNA; (+) strand; PAM type: NRG; PAM sequence: AGG
atttcataagcctcattgtc

SEQ ID NO: 27915 - DNA, 20 bp, Artificial Sequence
  Description of Artificial Sequence: Synthetic oligonucleotide
  Target: SCNA; (+) strand; PAM type: NRG; PAM sequence: CAG
agcctcattgtcaggatcca

SEQ ID NO: 27916 - DNA, 20 bp, Artificial Sequence
  Description of Artificial Sequence: Synthetic oligonucleotide
  Target: SCNA; (+) strand; PAM type: NRG; PAM sequence: AGG
gcctcattgtcaggatccac

SEQ ID NO: 27917 - DNA, 20 bp, Artificial Sequence
  Description of Artificial Sequence: Synthetic oligonucleotide
  Target: SCNA; (+) strand; PAM type: NRG; PAM sequence: CAG
ggatccacaggcatatcttc

SEQ ID NO: 27918 - DNA, 20 bp, Artificial Sequence
  Description of Artificial Sequence: Synthetic oligonucleotide
  Target: SCNA; (+) strand; PAM type: NRG; PAM sequence: TGG
tcttccagaattccttcctg

SEQ ID NO: 27919 - DNA, 20 bp, Artificial Sequence
  Description of Artificial Sequence: Synthetic oligonucleotide
  Target: SCNA; (+) strand; PAM type: NRG; PAM sequence: GGG
cttccagaattccttcctgt

SEQ ID NO: 27920 - DNA, 20 bp, Artificial Sequence
  Description of Artificial Sequence: Synthetic oligonucleotide
  Target: SCNA; (+) strand; PAM type: NRG; PAM sequence: GGG
ttccagaattccttcctgtg

SEQ ID NO: 27921 - DNA, 20 bp, Artificial Sequence
  Description of Artificial Sequence: Synthetic oligonucleotide
  Target: SCNA; (+) strand; PAM type: NRG; PAM sequence: AAG
cttcttcattctaatattta

SEQ ID NO: 27922 - DNA, 20 bp, Artificial Sequence
  Description of Artificial Sequence: Synthetic oligonucleotide
  Target: SCNA; (+) strand; PAM type: NRG; PAM sequence: AAG
ttcattctaatatttaaagt

SEQ ID NO: 27923 - DNA, 20 bp, Artificial Sequence
  Description of Artificial Sequence: Synthetic oligonucleotide
  Target: SCNA; (+) strand; PAM type: NRG; PAM sequence: AAG
attctaatatttaaagtaag

SEQ ID NO: 27924 - DNA, 20 bp, Artificial Sequence
  Description of Artificial Sequence: Synthetic oligonucleotide
  Target: SCNA; (+) strand; PAM type: NRG; PAM sequence: AAG
tttaaagtaagaagcacaaa

SEQ ID NO: 27925 - DNA, 20 bp, Artificial Sequence
  Description of Artificial Sequence: Synthetic oligonucleotide
  Target: SCNA; (+) strand; PAM type: NRG; PAM sequence: AAG
agcacaaaaagaacatgatg

SEQ ID NO: 27926 - DNA, 20 bp, Artificial Sequence
  Description of Artificial Sequence: Synthetic oligonucleotide
  Target: SCNA; (+) strand; PAM type: NRG; PAM sequence: TAG
acaaaaagaacatgatgaag

SEQ ID NO: 27927 - DNA, 20 bp, Artificial Sequence
  Description of Artificial Sequence: Synthetic oligonucleotide
  Target: SCNA; (+) strand; PAM type: NRG; PAM sequence: CAG
catttttcacttttaaaaat

SEQ ID NO: 27928 - DNA, 20 bp, Artificial Sequence
  Description of Artificial Sequence: Synthetic oligonucleotide
  Target: SCNA; (+) strand; PAM type: NRG; PAM sequence: TGG
taaaaatcagaaccatgttt

SEQ ID NO: 27929 - DNA, 20 bp, Artificial Sequence
  Description of Artificial Sequence: Synthetic oligonucleotide
  Target: SCNA; (+) strand; PAM type: NRG; PAM sequence: TAG
ttttggaaaaatcttacata

SEQ ID NO: 27930 - DNA, 20 bp, Artificial Sequence
  Description of Artificial Sequence: Synthetic oligonucleotide
  Target: SCNA; (+) strand; PAM type: NRG; PAM sequence: AGG
tttggaaaaatcttacatat

SEQ ID NO: 27931 - DNA, 20 bp, Artificial Sequence
  Description of Artificial Sequence: Synthetic oligonucleotide
  Target: SCNA; (+) strand; PAM type: NRG; PAM sequence: GGG
ttggaaaaatcttacatata

SEQ ID NO: 27932 - DNA, 20 bp, Artificial Sequence
  Description of Artificial Sequence: Synthetic oligonucleotide
  Target: SCNA; (+) strand; PAM type: NRG; PAM sequence: TGG
aatcttacatatagggatgt

SEQ ID NO: 27933 - DNA, 20 bp, Artificial Sequence
  Description of Artificial Sequence: Synthetic oligonucleotide
  Target: SCNA; (+) strand; PAM type: NRG; PAM sequence: CGG
acatatagggatgttggcca

SEQ ID NO: 27934 - DNA, 20 bp, Artificial Sequence
  Description of Artificial Sequence: Synthetic oligonucleotide
  Target: SCNA; (+) strand; PAM type: NRG; PAM sequence: TGG
ttggccacggatcttgaaaa

SEQ ID NO: 27935 - DNA, 20 bp, Artificial Sequence
  Description of Artificial Sequence: Synthetic oligonucleotide
  Target: SCNA; (+) strand; PAM type: NRG; PAM sequence: TGG
gcacaccttaatattactac

SEQ ID NO: 27936 - DNA, 20 bp, Artificial Sequence
  Description of Artificial Sequence: Synthetic oligonucleotide
  Target: SCNA; (+) strand; PAM type: NRG; PAM sequence: CGG
tctaaactccacaatgcctc

SEQ ID NO: 27937 - DNA, 20 bp, Artificial Sequence
  Description of Artificial Sequence: Synthetic oligonucleotide
  Target: SCNA; (+) strand; PAM type: NRG; PAM sequence: GGG
ctaaactccacaatgcctcc

SEQ ID NO: 27938 - DNA, 20 bp, Artificial Sequence
  Description of Artificial Sequence: Synthetic oligonucleotide
  Target: SCNA; (+) strand; PAM type: NRG; PAM sequence: GGG
taaactccacaatgcctccg

SEQ ID NO: 27939 - DNA, 20 bp, Artificial Sequence
  Description of Artificial Sequence: Synthetic oligonucleotide
  Target: SCNA; (+) strand; PAM type: NRG; PAM sequence: CGG
atgcctccggggaaacattg

SEQ ID NO: 27940 - DNA, 20 bp, Artificial Sequence
  Description of Artificial Sequence: Synthetic oligonucleotide
  Target: SCNA; (+) strand; PAM type: NRG; PAM sequence: TGG
ggggaaacattgcggcaaca

SEQ ID NO: 27941 - DNA, 20 bp, Artificial Sequence
  Description of Artificial Sequence: Synthetic oligonucleotide
  Target: SCNA; (+) strand; PAM type: NRG; PAM sequence: GGG
gggaaacattgcggcaacat

SEQ ID NO: 27942 - DNA, 20 bp, Artificial Sequence
  Description of Artificial Sequence: Synthetic oligonucleotide
  Target: SCNA; (+) strand; PAM type: NRG; PAM sequence: AAG
acatgggttatcaaccctca

SEQ ID NO: 27943 - DNA, 20 bp, Artificial Sequence
  Description of Artificial Sequence: Synthetic oligonucleotide
  Target: SCNA; (+) strand; PAM type: NRG; PAM sequence: AAG
agtatgtaaactttttgctc

SEQ ID NO: 27944 - DNA, 20 bp, Artificial Sequence
  Description of Artificial Sequence: Synthetic oligonucleotide
  Target: SCNA; (+) strand; PAM type: NRG; PAM sequence: TAG
tgctcaagtaatttactatt

SEQ ID NO: 27945 - DNA, 20 bp, Artificial Sequence
  Description of Artificial Sequence: Synthetic oligonucleotide
  Target: SCNA; (+) strand; PAM type: NRG; PAM sequence: AGG
gctcaagtaatttactattt

SEQ ID NO: 27946 - DNA, 20 bp, Artificial Sequence
  Description of Artificial Sequence: Synthetic oligonucleotide
  Target: SCNA; (+) strand; PAM type: NRG; PAM sequence: CAG
actatttaggaaataatcca

SEQ ID NO: 27947 - DNA, 20 bp, Artificial Sequence
  Description of Artificial Sequence: Synthetic oligonucleotide
  Target: SCNA; (+) strand; PAM type: NRG; PAM sequence: TAG
taggaaataatccacagcta

SEQ ID NO: 27948 - DNA, 20 bp, Artificial Sequence
  Description of Artificial Sequence: Synthetic oligonucleotide
  Target: SCNA; (+) strand; PAM type: NRG; PAM sequence: AAG
taatccacagctatagtcca

SEQ ID NO: 27949 - DNA, 20 bp, Artificial Sequence
  Description of Artificial Sequence: Synthetic oligonucleotide
  Target: SCNA; (+) strand; PAM type: NRG; PAM sequence: AAG
agtccaaagatatttttcac

SEQ ID NO: 27950 - DNA, 20 bp, Artificial Sequence
  Description of Artificial Sequence: Synthetic oligonucleotide
  Target: SCNA; (+) strand; PAM type: NRG; PAM sequence: CAG
atttttcacaagatcaatga

SEQ ID NO: 27951 - DNA, 20 bp, Artificial Sequence
  Description of Artificial Sequence: Synthetic oligonucleotide
  Target: SCNA; (+) strand; PAM type: NRG; PAM sequence: CAG
tttcacaagatcaatgacag

SEQ ID NO: 27952 - DNA, 20 bp, Artificial Sequence
  Description of Artificial Sequence: Synthetic oligonucleotide
  Target: SCNA; (+) strand; PAM type: NRG; PAM sequence: AGG
ttcacaagatcaatgacagc

SEQ ID NO: 27953 - DNA, 20 bp, Artificial Sequence
  Description of Artificial Sequence: Synthetic oligonucleotide
  Target: SCNA; (+) strand; PAM type: NRG; PAM sequence: TAG
acagcaggaaacaaaatttt

SEQ ID NO: 27954 - DNA, 20 bp, Artificial Sequence
  Description of Artificial Sequence: Synthetic oligonucleotide
  Target: SCNA; (+) strand; PAM type: NRG; PAM sequence: AAG
taaatgttcaatgaataatg

SEQ ID NO: 27955 - DNA, 20 bp, Artificial Sequence
  Description of Artificial Sequence: Synthetic oligonucleotide
  Target: SCNA; (+) strand; PAM type: NRG; PAM sequence: GAG
aatgttcaatgaataatgaa

SEQ ID NO: 27956 - DNA, 20 bp, Artificial Sequence
  Description of Artificial Sequence: Synthetic oligonucleotide
  Target: SCNA; (+) strand; PAM type: NRG; PAM sequence: TGG
aagagttaaaaaattattgc

SEQ ID NO: 27957 - DNA, 20 bp, Artificial Sequence
  Description of Artificial Sequence: Synthetic oligonucleotide
  Target: SCNA; (+) strand; PAM type: NRG; PAM sequence: GGG
agagttaaaaaattattgct

SEQ ID NO: 27958 - DNA, 20 bp, Artificial Sequence
  Description of Artificial Sequence: Synthetic oligonucleotide
  Target: SCNA; (+) strand; PAM type: NRG; PAM sequence: CAG
taaaaaattattgctgggtg

SEQ ID NO: 27959 - DNA, 20 bp, Artificial Sequence
  Description of Artificial Sequence: Synthetic oligonucleotide
  Target: SCNA; (+) strand; PAM type: NRG; PAM sequence: TGG
aaaattattgctgggtgcag

SEQ ID NO: 27960 - DNA, 20 bp, Artificial Sequence
  Description of Artificial Sequence: Synthetic oligonucleotide
  Target: SCNA; (+) strand; PAM type: NRG; PAM sequence: CAG
gtggttcactcctgtgattt

SEQ ID NO: 27961 - DNA, 20 bp, Artificial Sequence
  Description of Artificial Sequence: Synthetic oligonucleotide
  Target: SCNA; (+) strand; PAM type: NRG; PAM sequence: TGG
ctcctgtgatttcagcactt

SEQ ID NO: 27962 - DNA, 20 bp, Artificial Sequence
  Description of Artificial Sequence: Synthetic oligonucleotide
  Target: SCNA; (+) strand; PAM type: NRG; PAM sequence: GGG
tcctgtgatttcagcacttt

SEQ ID NO: 27963 - DNA, 20 bp, Artificial Sequence
  Description of Artificial Sequence: Synthetic oligonucleotide
  Target: SCNA; (+) strand; PAM type: NRG; PAM sequence: GAG
ctgtgatttcagcactttgg

SEQ ID NO: 27964 - DNA, 20 bp, Artificial Sequence
  Description of Artificial Sequence: Synthetic oligonucleotide
  Target: SCNA; (+) strand; PAM type: NRG; PAM sequence: AGG
tgtgatttcagcactttggg

SEQ ID NO: 27965 - DNA, 20 bp, Artificial Sequence
  Description of Artificial Sequence: Synthetic oligonucleotide
  Target: SCNA; (+) strand; PAM type: NRG; PAM sequence: GAG
tttcagcactttgggaggct

SEQ ID NO: 27966 - DNA, 20 bp, Artificial Sequence
  Description of Artificial Sequence: Synthetic oligonucleotide
  Target: SCNA; (+) strand; PAM type: NRG; PAM sequence: AGG
ttcagcactttgggaggctg

SEQ ID NO: 27967 - DNA, 20 bp, Artificial Sequence
  Description of Artificial Sequence: Synthetic oligonucleotide
  Target: SCNA; (+) strand; PAM type: NRG; PAM sequence: CAG
agcactttgggaggctgagg

SEQ ID NO: 27968 - DNA, 20 bp, Artificial Sequence
  Description of Artificial Sequence: Synthetic oligonucleotide
  Target: SCNA; (+) strand; PAM type: NRG; PAM sequence: AGG
gcactttgggaggctgaggc

SEQ ID NO: 27969 - DNA, 20 bp, Artificial Sequence
  Description of Artificial Sequence: Synthetic oligonucleotide
  Target: SCNA; (+) strand; PAM type: NRG; PAM sequence: TGG
ctttgggaggctgaggcagg

SEQ ID NO: 27970 - DNA, 20 bp, Artificial Sequence
  Description of Artificial Sequence: Synthetic oligonucleotide
  Target: SCNA; (+) strand; PAM type: NRG; PAM sequence: GAG
ctgaggcaggtggatcattt

SEQ ID NO: 27971 - DNA, 20 bp, Artificial Sequence
  Description of Artificial Sequence: Synthetic oligonucleotide
  Target: SCNA; (+) strand; PAM type: NRG; PAM sequence: CAG
gcaggtggatcatttgagtc

SEQ ID NO: 27972 - DNA, 20 bp, Artificial Sequence
  Description of Artificial Sequence: Synthetic oligonucleotide
  Target: SCNA; (+) strand; PAM type: NRG; PAM sequence: AGG
caggtggatcatttgagtcc

SEQ ID NO: 27973 - DNA, 20 bp, Artificial Sequence
  Description of Artificial Sequence: Synthetic oligonucleotide
  Target: SCNA; (+) strand; PAM type: NRG; PAM sequence: GAG
ggtggatcatttgagtccag

SEQ ID NO: 27974 - DNA, 20 bp, Artificial Sequence
  Description of Artificial Sequence: Synthetic oligonucleotide
  Target: SCNA; (+) strand; PAM type: NRG; PAM sequence: AAG
tcatttgagtccaggagttc

SEQ ID NO: 27975 - DNA, 20 bp, Artificial Sequence
  Description of Artificial Sequence: Synthetic oligonucleotide
  Target: SCNA; (+) strand; PAM type: NRG; PAM sequence: CAG
tgagtccaggagttcaagac

SEQ ID NO: 27976 - DNA, 20 bp, Artificial Sequence
  Description of Artificial Sequence: Synthetic oligonucleotide
  Target: SCNA; (+) strand; PAM type: NRG; PAM sequence: TGG
ccaggagttcaagaccagcc

SEQ ID NO: 27977 - DNA, 20 bp, Artificial Sequence
  Description of Artificial Sequence: Synthetic oligonucleotide
  Target: SCNA; (+) strand; PAM type: NRG; PAM sequence: GGG
caggagttcaagaccagcct

SEQ ID NO: 27978 - DNA, 20 bp, Artificial Sequence
  Description of Artificial Sequence: Synthetic oligonucleotide
  Target: SCNA; (+) strand; PAM type: NRG; PAM sequence: TAG
ctactaaaaatacaaataaa

SEQ ID NO: 27979 - DNA, 20 bp, Artificial Sequence
  Description of Artificial Sequence: Synthetic oligonucleotide
  Target: SCNA; (+) strand; PAM type: NRG; PAM sequence: TGG
taaaaatacaaataaatagc

SEQ ID NO: 27980 - DNA, 20 bp, Artificial Sequence
  Description of Artificial Sequence: Synthetic oligonucleotide
  Target: SCNA; (+) strand; PAM type: NRG; PAM sequence: GGG
aaaaatacaaataaatagct

SEQ ID NO: 27981 - DNA, 20 bp, Artificial Sequence
  Description of Artificial Sequence: Synthetic oligonucleotide
  Target: SCNA; (+) strand; PAM type: NRG; PAM sequence: TGG
tacaaataaatagctgggca

SEQ ID NO: 27982 - DNA, 20 bp, Artificial Sequence
  Description of Artificial Sequence: Synthetic oligonucleotide
  Target: SCNA; (+) strand; PAM type: NRG; PAM sequence: TGG
aaataaatagctgggcatgg

SEQ ID NO: 27983 - DNA, 20 bp, Artificial Sequence
  Description of Artificial Sequence: Synthetic oligonucleotide
  Target: SCNA; (+) strand; PAM type: NRG; PAM sequence: CAG
ggcatggtggcacatgccta

SEQ ID NO: 27984 - DNA, 20 bp, Artificial Sequence
  Description of Artificial Sequence: Synthetic oligonucleotide
  Target: SCNA; (+) strand; PAM type: NRG; PAM sequence: CAG
gtggcacatgcctacagtcc

SEQ ID NO: 27985 - DNA, 20 bp, Artificial Sequence
  Description of Artificial Sequence: Synthetic oligonucleotide
  Target: SCNA; (+) strand; PAM type: NRG; PAM sequence: TGG
tgcctacagtcccagccact

SEQ ID NO: 27986 - DNA, 20 bp, Artificial Sequence
  Description of Artificial Sequence: Synthetic oligonucleotide
  Target: SCNA; (+) strand; PAM type: NRG; PAM sequence: GGG
gcctacagtcccagccactt

SEQ ID NO: 27987 - DNA, 20 bp, Artificial Sequence
  Description of Artificial Sequence: Synthetic oligonucleotide
  Target: SCNA; (+) strand; PAM type: NRG; PAM sequence: GAG
ctacagtcccagccacttgg

SEQ ID NO: 27988 - DNA, 20 bp, Artificial Sequence
  Description of Artificial Sequence: Synthetic oligonucleotide
  Target: SCNA; (+) strand; PAM type: NRG; PAM sequence: AGG
tacagtcccagccacttggg

SEQ ID NO: 27989 - DNA, 20 bp, Artificial Sequence
  Description of Artificial Sequence: Synthetic oligonucleotide
  Target: SCNA; (+) strand; PAM type: NRG; PAM sequence: GAG
tcccagccacttgggaggct

SEQ ID NO: 27990 - DNA, 20 bp, Artificial Sequence
  Description of Artificial Sequence: Synthetic oligonucleotide
  Target: SCNA; (+) strand; PAM type: NRG; PAM sequence: AGG
cccagccacttgggaggctg

SEQ ID NO: 27991 - DNA, 20 bp, Artificial Sequence
  Description of Artificial Sequence: Synthetic oligonucleotide
  Target: SCNA; (+) strand; PAM type: NRG; PAM sequence: CAG
agccacttgggaggctgagg

SEQ ID NO: 27992 - DNA, 20 bp, Artificial Sequence
  Description of Artificial Sequence: Synthetic oligonucleotide
  Target: SCNA; (+) strand; PAM type: NRG; PAM sequence: AGG
gccacttgggaggctgaggc

SEQ ID NO: 27993 - DNA, 20 bp, Artificial Sequence
  Description of Artificial Sequence: Synthetic oligonucleotide
  Target: SCNA; (+) strand; PAM type: NRG; PAM sequence: GAG
cacttgggaggctgaggcag

SEQ ID NO: 27994 - DNA, 20 bp, Artificial Sequence
  Description of Artificial Sequence: Synthetic oligonucleotide
  Target: SCNA; (+) strand; PAM type: NRG; PAM sequence: AGG
acttgggaggctgaggcagg

SEQ ID NO: 27995 - DNA, 20 bp, Artificial Sequence
  Description of Artificial Sequence: Synthetic oligonucleotide
  Target: SCNA; (+) strand; PAM type: NRG; PAM sequence: GAG
ctgaggcaggaggatcactt

SEQ ID NO: 27996 - DNA, 20 bp, Artificial Sequence
  Description of Artificial Sequence: Synthetic oligonucleotide
  Target: SCNA; (+) strand; PAM type: NRG; PAM sequence: TGG
gcaggaggatcacttgagcc

SEQ ID NO: 27997 - DNA, 20 bp, Artificial Sequence
  Description of Artificial Sequence: Synthetic oligonucleotide
  Target: SCNA; (+) strand; PAM type: NRG; PAM sequence: GGG
caggaggatcacttgagcct

SEQ ID NO: 27998 - DNA, 20 bp, Artificial Sequence
  Description of Artificial Sequence: Synthetic oligonucleotide
  Target: SCNA; (+) strand; PAM type: NRG; PAM sequence: GAG
ggaggatcacttgagcctgg

SEQ ID NO: 27999 - DNA, 20 bp, Artificial Sequence
  Description of Artificial Sequence: Synthetic oligonucleotide
  Target: SCNA; (+) strand; PAM type: NRG; PAM sequence: AGG
gaggatcacttgagcctggg

SEQ ID NO: 28000 - DNA, 20 bp, Artificial Sequence
  Description of Artificial Sequence: Synthetic oligonucleotide
  Target: SCNA; (+) strand; PAM type: NRG; PAM sequence: TAG
gatcacttgagcctgggagg

SEQ ID NO: 28001 - DNA, 20 bp, Artificial Sequence
  Description of Artificial Sequence: Synthetic oligonucleotide
  Target: SCNA; (+) strand; PAM type: NRG; PAM sequence: GAG
tcacttgagcctgggaggta

SEQ ID NO: 28002 - DNA, 20 bp, Artificial Sequence
  Description of Artificial Sequence: Synthetic oligonucleotide
  Target: SCNA; (+) strand; PAM type: NRG; PAM sequence: AGG
cacttgagcctgggaggtag

SEQ ID NO: 28003 - DNA, 20 bp, Artificial Sequence
  Description of Artificial Sequence: Synthetic oligonucleotide
  Target: SCNA; (+) strand; PAM type: NRG; PAM sequence: CAG
agcctgggaggtagaggcta

SEQ ID NO: 28004 - DNA, 20 bp, Artificial Sequence
  Description of Artificial Sequence: Synthetic oligonucleotide
  Target: SCNA; (+) strand; PAM type: NRG; PAM sequence: GAG
tgggaggtagaggctacagt

SEQ ID NO: 28005 - DNA, 20 bp, Artificial Sequence
  Description of Artificial Sequence: Synthetic oligonucleotide
  Target: SCNA; (+) strand; PAM type: NRG; PAM sequence: TAG
atgtgcatgccactgcattc

SEQ ID NO: 28006 - DNA, 20 bp, Artificial Sequence
  Description of Artificial Sequence: Synthetic oligonucleotide
  Target: SCNA; (+) strand; PAM type: NRG; PAM sequence: TGG
catgccactgcattctagcc

SEQ ID NO: 28007 - DNA, 20 bp, Artificial Sequence
  Description of Artificial Sequence: Synthetic oligonucleotide
  Target: SCNA; (+) strand; PAM type: NRG; PAM sequence: GGG
atgccactgcattctagcct

SEQ ID NO: 28008 - DNA, 20 bp, Artificial Sequence
  Description of Artificial Sequence: Synthetic oligonucleotide
  Target: SCNA; (+) strand; PAM type: NRG; PAM sequence: CAG
ctgcattctagcctgggtga

SEQ ID NO: 28009 - DNA, 20 bp, Artificial Sequence
  Description of Artificial Sequence: Synthetic oligonucleotide
  Target: SCNA; (+) strand; PAM type: NRG; PAM sequence: GAG
gcattctagcctgggtgaca

SEQ ID NO: 28010 - DNA, 20 bp, Artificial Sequence
  Description of Artificial Sequence: Synthetic oligonucleotide
  Target: SCNA; (+) strand; PAM type: NRG; PAM sequence: AGG
cattctagcctgggtgacag

SEQ ID NO: 28011 - DNA, 20 bp, Artificial Sequence
  Description of Artificial Sequence: Synthetic oligonucleotide
  Target: SCNA; (+) strand; PAM type: NRG; PAM sequence: GGG
attctagcctgggtgacaga

SEQ ID NO: 28012 - DNA, 20 bp, Artificial Sequence
  Description of Artificial Sequence: Synthetic oligonucleotide
  Target: SCNA; (+) strand; PAM type: NRG; PAM sequence: GAG
tctagcctgggtgacagagg

SEQ ID NO: 28013 - DNA, 20 bp, Artificial Sequence
  Description of Artificial Sequence: Synthetic oligonucleotide
  Target: SCNA; (+) strand; PAM type: NRG; PAM sequence: CAG
aaaattatcattcaactact

SEQ ID NO: 28014 - DNA, 20 bp, Artificial Sequence
  Description of Artificial Sequence: Synthetic oligonucleotide
  Target: SCNA; (+) strand; PAM type: NRG; PAM sequence: TAG
attatcattcaactactcag

SEQ ID NO: 28015 - DNA, 20 bp, Artificial Sequence
  Description of Artificial Sequence: Synthetic oligonucleotide
  Target: SCNA; (+) strand; PAM type: NRG; PAM sequence: AAG
ctactcagtagattatgata

SEQ ID NO: 28016 - DNA, 20 bp, Artificial Sequence
  Description of Artificial Sequence: Synthetic oligonucleotide
  Target: SCNA; (+) strand; PAM type: NRG; PAM sequence: GAG
gacctgtattactattacct

SEQ ID NO: 28017 - DNA, 20 bp, Artificial Sequence
  Description of Artificial Sequence: Synthetic oligonucleotide
  Target: SCNA; (+) strand; PAM type: NRG; PAM sequence: TGG
atgtaacaactacctattta

SEQ ID NO: 28018 - DNA, 20 bp, Artificial Sequence
  Description of Artificial Sequence: Synthetic oligonucleotide
  Target: SCNA; (+) strand; PAM type: NRG; PAM sequence: TAG
cctatttatggtataatatt

SEQ ID NO: 28019 - DNA, 20 bp, Artificial Sequence
  Description of Artificial Sequence: Synthetic oligonucleotide
  Target: SCNA; (+) strand; PAM type: NRG; PAM sequence: CAG
atttatggtataatatttag

SEQ ID NO: 28020 - DNA, 20 bp, Artificial Sequence
  Description of Artificial Sequence: Synthetic oligonucleotide
  Target: SCNA; (+) strand; PAM type: NRG; PAM sequence: AGG
tttatggtataatatttagc

SEQ ID NO: 28021 - DNA, 20 bp, Artificial Sequence
  Description of Artificial Sequence: Synthetic oligonucleotide
  Target: SCNA; (+) strand; PAM type: NRG; PAM sequence: AAG
ataatatttagcaggctata

SEQ ID NO: 28022 - DNA, 20 bp, Artificial Sequence
  Description of Artificial Sequence: Synthetic oligonucleotide
  Target: SCNA; (+) strand; PAM type: NRG; PAM sequence: TAG
ataaagtgttgtctatatta

SEQ ID NO: 28023 - DNA, 20 bp, Artificial Sequence
  Description of Artificial Sequence: Synthetic oligonucleotide
  Target: SCNA; (+) strand; PAM type: NRG; PAM sequence: CAG
tattatagatacaacctaca

SEQ ID NO: 28024 - DNA, 20 bp, Artificial Sequence
  Description of Artificial Sequence: Synthetic oligonucleotide
  Target: SCNA; (+) strand; PAM type: NRG; PAM sequence: CAG
gatacaacctacacagaatt

SEQ ID NO: 28025 - DNA, 20 bp, Artificial Sequence
  Description of Artificial Sequence: Synthetic oligonucleotide
  Target: SCNA; (+) strand; PAM type: NRG; PAM sequence: AAG
ctacacagaattcagacgca

SEQ ID NO: 28026 - DNA, 20 bp, Artificial Sequence
  Description of Artificial Sequence: Synthetic oligonucleotide
  Target: SCNA; (+) strand; PAM type: NRG; PAM sequence: AGG
tacacagaattcagacgcaa

SEQ ID NO: 28027 - DNA, 20 bp, Artificial Sequence
  Description of Artificial Sequence: Synthetic oligonucleotide
  Target: SCNA; (+) strand; PAM type: NRG; PAM sequence: AAG
aattcagacgcaaaggtaaa

SEQ ID NO: 28028 - DNA, 20 bp, Artificial Sequence
  Description of Artificial Sequence: Synthetic oligonucleotide
  Target: SCNA; (+) strand; PAM type: NRG; PAM sequence: TGG
agacgcaaaggtaaaaagtt

SEQ ID NO: 28029 - DNA, 20 bp, Artificial Sequence
  Description of Artificial Sequence: Synthetic oligonucleotide
  Target: SCNA; (+) strand; PAM type: NRG; PAM sequence: AAG
cgcaaaggtaaaaagtttgg

SEQ ID NO: 28030 - DNA, 20 bp, Artificial Sequence
  Description of Artificial Sequence: Synthetic oligonucleotide
  Target: SCNA; (+) strand; PAM type: NRG; PAM sequence: AAG
gaaaacacaataaaatatga

SEQ ID NO: 28031 - DNA, 20 bp, Artificial Sequence
  Description of Artificial Sequence: Synthetic oligonucleotide
  Target: SCNA; (+) strand; PAM type: NRG; PAM sequence: TGG
aaatatgaaagttattttgt

SEQ ID NO: 28032 - DNA, 20 bp, Artificial Sequence
  Description of Artificial Sequence: Synthetic oligonucleotide
  Target: SCNA; (+) strand; PAM type: NRG; PAM sequence: TAG
atgaaagttattttgttgga

SEQ ID NO: 28033 - DNA, 20 bp, Artificial Sequence
  Description of Artificial Sequence: Synthetic oligonucleotide
  Target: SCNA; (+) strand; PAM type: NRG; PAM sequence: AAG
gttattttgactttttttct

SEQ ID NO: 28034 - DNA, 20 bp, Artificial Sequence
  Description of Artificial Sequence: Synthetic oligonucleotide
  Target: SCNA; (+) strand; PAM type: NRG; PAM sequence: AAG
tataaccacttataatgtaa

SEQ ID NO: 28035 - DNA, 20 bp, Artificial Sequence
  Description of Artificial Sequence: Synthetic oligonucleotide
  Target: SCNA; (+) strand; PAM type: NRG; PAM sequence: AAG
attaattttaaatgacaatg

SEQ ID NO: 28036 - DNA, 20 bp, Artificial Sequence
  Description of Artificial Sequence: Synthetic oligonucleotide
  Target: SCNA; (+) strand; PAM type: NRG; PAM sequence: AAG
aaattcttttctgaaatttg

SEQ ID NO: 28037 - DNA, 20 bp, Artificial Sequence
  Description of Artificial Sequence: Synthetic oligonucleotide
  Target: SCNA; (+) strand; PAM type: NRG; PAM sequence: GAG
ttttctgaaatttgaagact

SEQ ID NO: 28038 - DNA, 20 bp, Artificial Sequence
  Description of Artificial Sequence: Synthetic oligonucleotide
  Target: SCNA; (+) strand; PAM type: NRG; PAM sequence: AAG
gactgagactatacatattg

SEQ ID NO: 28039 - DNA, 20 bp, Artificial Sequence
  Description of Artificial Sequence: Synthetic oligonucleotide
  Target: SCNA; (+) strand; PAM type: NRG; PAM sequence: AGG
actgagactatacatattga

SEQ ID NO: 28040 - DNA, 20 bp, Artificial Sequence
  Description of Artificial Sequence: Synthetic oligonucleotide
  Target: SCNA; (+) strand; PAM type: NRG; PAM sequence: TGG
aaggaaaataatcaaataca

SEQ ID NO: 28041 - DNA, 20 bp, Artificial Sequence
  Description of Artificial Sequence: Synthetic oligonucleotide
  Target: SCNA; (+) strand; PAM type: NRG; PAM sequence: CAG
aaaataatcaaatacatggt

SEQ ID NO: 28042 - DNA, 20 bp, Artificial Sequence
  Description of Artificial Sequence: Synthetic oligonucleotide
  Target: SCNA; (+) strand; PAM type: NRG; PAM sequence: TAG
acatggtcagaaaatttttc

SEQ ID NO: 28043 - DNA, 20 bp, Artificial Sequence
  Description of Artificial Sequence: Synthetic oligonucleotide
  Target: SCNA; (+) strand; PAM type: NRG; PAM sequence: AGG
catggtcagaaaatttttct

SEQ ID NO: 28044 - DNA, 20 bp, Artificial Sequence
  Description of Artificial Sequence: Synthetic oligonucleotide
  Target: SCNA; (+) strand; PAM type: NRG; PAM sequence: TAG
tttttctaggtatctcttcc

SEQ ID NO: 28045 - DNA, 20 bp, Artificial Sequence
  Description of Artificial Sequence: Synthetic oligonucleotide
  Target: SCNA; (+) strand; PAM type: NRG; PAM sequence: AAG
taggtatctcttcctagaca

SEQ ID NO: 28046 - DNA, 20 bp, Artificial Sequence
  Description of Artificial Sequence: Synthetic oligonucleotide
  Target: SCNA; (+) strand; PAM type: NRG; PAM sequence: CAG
acaaagaatactacaaaact

SEQ ID NO: 28047 - DNA, 20 bp, Artificial Sequence
  Description of Artificial Sequence: Synthetic oligonucleotide
  Target: SCNA; (+) strand; PAM type: NRG; PAM sequence: TGG
ctacaaaactcagcctgaaa

SEQ ID NO: 28048 - DNA, 20 bp, Artificial Sequence
  Description of Artificial Sequence: Synthetic oligonucleotide
  Target: SCNA; (+) strand; PAM type: NRG; PAM sequence: TGG
aactcagcctgaaatggtca

SEQ ID NO: 28049 - DNA, 20 bp, Artificial Sequence
  Description of Artificial Sequence: Synthetic oligonucleotide
  Target: SCNA; (+) strand; PAM type: NRG; PAM sequence: TGG
tgaaatggtcatggctttgt

SEQ ID NO: 28050 - DNA, 20 bp, Artificial Sequence
  Description of Artificial Sequence: Synthetic oligonucleotide
  Target: SCNA; (+) strand; PAM type: NRG; PAM sequence: CAG
ttgttgctttgcatttattt

SEQ ID NO: 28051 - DNA, 20 bp, Artificial Sequence
  Description of Artificial Sequence: Synthetic oligonucleotide
  Target: SCNA; (+) strand; PAM type: NRG; PAM sequence: AAG
gctttgcatttatttcagca

SEQ ID NO: 28052 - DNA, 20 bp, Artificial Sequence
  Description of Artificial Sequence: Synthetic oligonucleotide
  Target: SCNA; (+) strand; PAM type: NRG; PAM sequence: AAG
tatttcagcaaagtaattat

SEQ ID NO: 28053 - DNA, 20 bp, Artificial Sequence
  Description of Artificial Sequence: Synthetic oligonucleotide
  Target: SCNA; (+) strand; PAM type: NRG; PAM sequence: AAG
ttcagcaaagtaattataag

SEQ ID NO: 28054 - DNA, 20 bp, Artificial Sequence
  Description of Artificial Sequence: Synthetic oligonucleotide
  Target: SCNA; (+) strand; PAM type: NRG; PAM sequence: AAG
aaagtaattataagaagata

SEQ ID NO: 28055 - DNA, 20 bp, Artificial Sequence
  Description of Artificial Sequence: Synthetic oligonucleotide
  Target: SCNA; (+) strand; PAM type: NRG; PAM sequence: AGG
aagtaattataagaagataa

SEQ ID NO: 28056 - DNA, 20 bp, Artificial Sequence
  Description of Artificial Sequence: Synthetic oligonucleotide
  Target: SCNA; (+) strand; PAM type: NRG; PAM sequence: AAG
aattataagaagataaaggt

SEQ ID NO: 28057 - DNA, 20 bp, Artificial Sequence
  Description of Artificial Sequence: Synthetic oligonucleotide
  Target: SCNA; (+) strand; PAM type: NRG; PAM sequence: AAG
taaaggtaagtgaaaattca

SEQ ID NO: 28058 - DNA, 20 bp, Artificial Sequence
  Description of Artificial Sequence: Synthetic oligonucleotide
  Target: SCNA; (+) strand; PAM type: NRG; PAM sequence: CAG
gtaagtgaaaattcaaagaa

SEQ ID NO: 28059 - DNA, 20 bp, Artificial Sequence
  Description of Artificial Sequence: Synthetic oligonucleotide
  Target: SCNA; (+) strand; PAM type: NRG; PAM sequence: GAG
aagtgaaaattcaaagaaca

SEQ ID NO: 28060 - DNA, 20 bp, Artificial Sequence
  Description of Artificial Sequence: Synthetic oligonucleotide
  Target: SCNA; (+) strand; PAM type: NRG; PAM sequence: GAG
gtgaaaattcaaagaacaga

SEQ ID NO: 28061 - DNA, 20 bp, Artificial Sequence
  Description of Artificial Sequence: Synthetic oligonucleotide
  Target: SCNA; (+) strand; PAM type: NRG; PAM sequence: AGG
tgaaaattcaaagaacagag

SEQ ID NO: 28062 - DNA, 20 bp, Artificial Sequence
  Description of Artificial Sequence: Synthetic oligonucleotide
  Target: SCNA; (+) strand; PAM type: NRG; PAM sequence: GAG
aaagaacagagaggcaatgt

SEQ ID NO: 28063 - DNA, 20 bp, Artificial Sequence
  Description of Artificial Sequence: Synthetic oligonucleotide
  Target: SCNA; (+) strand; PAM type: NRG; PAM sequence: AAG
agagaggcaatgtgagccta

SEQ ID NO: 28064 - DNA, 20 bp, Artificial Sequence
  Description of Artificial Sequence: Synthetic oligonucleotide
  Target: SCNA; (+) strand; PAM type: NRG; PAM sequence: AGG
gagaggcaatgtgagcctaa

SEQ ID NO: 28065 - DNA, 20 bp, Artificial Sequence
  Description of Artificial Sequence: Synthetic oligonucleotide
  Target: SCNA; (+) strand; PAM type: NRG; PAM sequence: GGG
agaggcaatgtgagcctaaa

SEQ ID NO: 28066 - DNA, 20 bp, Artificial Sequence
  Description of Artificial Sequence: Synthetic oligonucleotide
  Target: SCNA; (+) strand; PAM type: NRG; PAM sequence: TGG
aatgtgagcctaaagggact

SEQ ID NO: 28067 - DNA, 20 bp, Artificial Sequence
  Description of Artificial Sequence: Synthetic oligonucleotide
  Target: SCNA; (+) strand; PAM type: NRG; PAM sequence: GAG
tgtgagcctaaagggacttg

SEQ ID NO: 28068 - DNA, 20 bp, Artificial Sequence
  Description of Artificial Sequence: Synthetic oligonucleotide
  Target: SCNA; (+) strand; PAM type: NRG; PAM sequence: AAG
agcctaaagggacttggaga

SEQ ID NO: 28069 - DNA, 20 bp, Artificial Sequence
  Description of Artificial Sequence: Synthetic oligonucleotide
  Target: SCNA; (+) strand; PAM type: NRG; PAM sequence: GAG
cctaaagggacttggagaaa

SEQ ID NO: 28070 - DNA, 20 bp, Artificial Sequence
  Description of Artificial Sequence: Synthetic oligonucleotide
  Target: SCNA; (+) strand; PAM type: NRG; PAM sequence: CAG
aaagagatcaaataatccct

SEQ ID NO: 28071 - DNA, 20 bp, Artificial Sequence
  Description of Artificial Sequence: Synthetic oligonucleotide
  Target: SCNA; (+) strand; PAM type: NRG; PAM sequence: CGG
aaataatccctcagccaacg

SEQ ID NO: 28072 - DNA, 20 bp, Artificial Sequence
  Description of Artificial Sequence: Synthetic oligonucleotide
  Target: SCNA; (+) strand; PAM type: NRG; PAM sequence: AAG
acaacatgtctgatgtaaaa

SEQ ID NO: 28073 - DNA, 20 bp, Artificial Sequence
  Description of Artificial Sequence: Synthetic oligonucleotide
  Target: SCNA; (+) strand; PAM type: NRG; PAM sequence: TGG
agcttccccatgtcttcaca

SEQ ID NO: 28074 - DNA, 20 bp, Artificial Sequence
  Description of Artificial Sequence: Synthetic oligonucleotide
  Target: SCNA; (+) strand; PAM type: NRG; PAM sequence: AAG
ttccccatgtcttcacatgg

SEQ ID NO: 28075 - DNA, 20 bp, Artificial Sequence
  Description of Artificial Sequence: Synthetic oligonucleotide
  Target: SCNA; (+) strand; PAM type: NRG; PAM sequence: CAG
cttcacatggaagtgactga

SEQ ID NO: 28076 - DNA, 20 bp, Artificial Sequence
  Description of Artificial Sequence: Synthetic oligonucleotide
  Target: SCNA; (+) strand; PAM type: NRG; PAM sequence: AGG
ttcacatggaagtgactgac

SEQ ID NO: 28077 - DNA, 20 bp, Artificial Sequence
  Description of Artificial Sequence: Synthetic oligonucleotide
  Target: SCNA; (+) strand; PAM type: NRG; PAM sequence: GGG
tcacatggaagtgactgaca

SEQ ID NO: 28078 - DNA, 20 bp, Artificial Sequence
  Description of Artificial Sequence: Synthetic oligonucleotide
  Target: SCNA; (+) strand; PAM type: NRG; PAM sequence: CAG
ggaagtgactgacagggacg

SEQ ID NO: 28079 - DNA, 20 bp, Artificial Sequence
  Description of Artificial Sequence: Synthetic oligonucleotide
  Target: SCNA; (+) strand; PAM type: NRG; PAM sequence: AAG
agtgactgacagggacgcag

SEQ ID NO: 28080 - DNA, 20 bp, Artificial Sequence
  Description of Artificial Sequence: Synthetic oligonucleotide
  Target: SCNA; (+) strand; PAM type: NRG; PAM sequence: AAG
tgacagggacgcagaagtat

SEQ ID NO: 28081 - DNA, 20 bp, Artificial Sequence
  Description of Artificial Sequence: Synthetic oligonucleotide
  Target: SCNA; (+) strand; PAM type: NRG; PAM sequence: TGG
gacgcagaagtataagaaaa

SEQ ID NO: 28082 - DNA, 20 bp, Artificial Sequence
  Description of Artificial Sequence: Synthetic oligonucleotide
  Target: SCNA; (+) strand; PAM type: NRG; PAM sequence: CAG
aagtataagaaaatggctaa

SEQ ID NO: 28083 - DNA, 20 bp, Artificial Sequence
  Description of Artificial Sequence: Synthetic oligonucleotide
  Target: SCNA; (+) strand; PAM type: NRG; PAM sequence: AAG
ataagaaaatggctaacagt

SEQ ID NO: 28084 - DNA, 20 bp, Artificial Sequence
  Description of Artificial Sequence: Synthetic oligonucleotide
  Target: SCNA; (+) strand; PAM type: NRG; PAM sequence: AAG
aaaatggctaacagtaagaa

SEQ ID NO: 28085 - DNA, 20 bp, Artificial Sequence
  Description of Artificial Sequence: Synthetic oligonucleotide
  Target: SCNA; (+) strand; PAM type: NRG; PAM sequence: AGG
aaatggctaacagtaagaaa

SEQ ID NO: 28086 - DNA, 20 bp, Artificial Sequence
  Description of Artificial Sequence: Synthetic oligonucleotide
  Target: SCNA; (+) strand; PAM type: NRG; PAM sequence: AAG
agtaagaaaaggtcacacta

SEQ ID NO: 28087 - DNA, 20 bp, Artificial Sequence
  Description of Artificial Sequence: Synthetic oligonucleotide
  Target: SCNA; (+) strand; PAM type: NRG; PAM sequence: TGG
cacactaaagatcatgctta

SEQ ID NO: 28088 - DNA, 20 bp, Artificial Sequence
  Description of Artificial Sequence: Synthetic oligonucleotide
  Target: SCNA; (+) strand; PAM type: NRG; PAM sequence: TAG
actaaagatcatgcttatgg

SEQ ID NO: 28089 - DNA, 20 bp, Artificial Sequence
  Description of Artificial Sequence: Synthetic oligonucleotide
  Target: SCNA; (+) strand; PAM type: NRG; PAM sequence: AGG
ctaaagatcatgcttatggt

SEQ ID NO: 28090 - DNA, 20 bp, Artificial Sequence
  Description of Artificial Sequence: Synthetic oligonucleotide
  Target: SCNA; (+) strand; PAM type: NRG; PAM sequence: TGG
aagatcatgcttatggtagg

SEQ ID NO: 28091 - DNA, 20 bp, Artificial Sequence
  Description of Artificial Sequence: Synthetic oligonucleotide
  Target: SCNA; (+) strand; PAM type: NRG; PAM sequence: GGG
agatcatgcttatggtaggt

SEQ ID NO: 28092 - DNA, 20 bp, Artificial Sequence
  Description of Artificial Sequence: Synthetic oligonucleotide
  Target: SCNA; (+) strand; PAM type: NRG; PAM sequence: CAG
tcatgcttatggtaggtggg

SEQ ID NO: 28093 - DNA, 20 bp, Artificial Sequence
  Description of Artificial Sequence: Synthetic oligonucleotide
  Target: SCNA; (+) strand; PAM type: NRG; PAM sequence: GAG
atgcttatggtaggtgggca

SEQ ID NO: 28094 - DNA, 20 bp, Artificial Sequence
  Description of Artificial Sequence: Synthetic oligonucleotide
  Target: SCNA; (+) strand; PAM type: NRG; PAM sequence: AAG
cttatggtaggtgggcagag

SEQ ID NO: 28095 - DNA, 20 bp, Artificial Sequence
  Description of Artificial Sequence: Synthetic oligonucleotide
  Target: SCNA; (+) strand; PAM type: NRG; PAM sequence: CAG
taggtgggcagagaagctta

SEQ ID NO: 28096 - DNA, 20 bp, Artificial Sequence
  Description of Artificial Sequence: Synthetic oligonucleotide
  Target: SCNA; (+) strand; PAM type: NRG; PAM sequence: TGG
aactacctcactttaaaatg

SEQ ID NO: 28097 - DNA, 20 bp, Artificial Sequence
  Description of Artificial Sequence: Synthetic oligonucleotide
  Target: SCNA; (+) strand; PAM type: NRG; PAM sequence: GAG
ctacctcactttaaaatgtg

SEQ ID NO: 28098 - DNA, 20 bp, Artificial Sequence
  Description of Artificial Sequence: Synthetic oligonucleotide
  Target: SCNA; (+) strand; PAM type: NRG; PAM sequence: TAG
gagtaaacatactgttttcg

SEQ ID NO: 28099 - DNA, 20 bp, Artificial Sequence
  Description of Artificial Sequence: Synthetic oligonucleotide
  Target: SCNA; (+) strand; PAM type: NRG; PAM sequence: TGG
tttcgtagtgtttcacttct

SEQ ID NO: 28100 - DNA, 20 bp, Artificial Sequence
  Description of Artificial Sequence: Synthetic oligonucleotide
  Target: SCNA; (+) strand; PAM type: NRG; PAM sequence: TAG
cgtagtgtttcacttcttgg

SEQ ID NO: 28101 - DNA, 20 bp, Artificial Sequence
  Description of Artificial Sequence: Synthetic oligonucleotide
  Target: SCNA; (+) strand; PAM type: NRG; PAM sequence: CAG
tggtagatacgcctctgctg

SEQ ID NO: 28102 - DNA, 20 bp, Artificial Sequence
  Description of Artificial Sequence: Synthetic oligonucleotide
  Target: SCNA; (+) strand; PAM type: NRG; PAM sequence: AGG
ggtagatacgcctctgctgc

SEQ ID NO: 28103 - DNA, 20 bp, Artificial Sequence
  Description of Artificial Sequence: Synthetic oligonucleotide
  Target: SCNA; (+) strand; PAM type: NRG; PAM sequence: TGG
gatacgcctctgctgcagga

SEQ ID NO: 28104 - DNA, 20 bp, Artificial Sequence
  Description of Artificial Sequence: Synthetic oligonucleotide
  Target: SCNA; (+) strand; PAM type: NRG; PAM sequence: TAG
cgcctctgctgcaggatggc

SEQ ID NO: 28105 - DNA, 20 bp, Artificial Sequence
  Description of Artificial Sequence: Synthetic oligonucleotide
  Target: SCNA; (+) strand; PAM type: NRG; PAM sequence: AGG
gcctctgctgcaggatggct

SEQ ID NO: 28106 - DNA, 20 bp, Artificial Sequence
  Description of Artificial Sequence: Synthetic oligonucleotide
  Target: SCNA; (+) strand; PAM type: NRG; PAM sequence: AAG
gctgcaggatggctaggcac

SEQ ID NO: 28107 - DNA, 20 bp, Artificial Sequence
  Description of Artificial Sequence: Synthetic oligonucleotide
  Target: SCNA; (+) strand; PAM type: NRG; PAM sequence: AGG
ctgcaggatggctaggcaca

SEQ ID NO: 28108 - DNA, 20 bp, Artificial Sequence
  Description of Artificial Sequence: Synthetic oligonucleotide
  Target: SCNA; (+) strand; PAM type: NRG; PAM sequence: CAG
gcacaaggccttccatgtca

SEQ ID NO: 28109 - DNA, 20 bp, Artificial Sequence
  Description of Artificial Sequence: Synthetic oligonucleotide
  Target: SCNA; (+) strand; PAM type: NRG; PAM sequence: AGG
cacaaggccttccatgtcac

SEQ ID NO: 28110 - DNA, 20 bp, Artificial Sequence
  Description of Artificial Sequence: Synthetic oligonucleotide
  Target: SCNA; (+) strand; PAM type: NRG; PAM sequence: GAG
ccttccatgtcacaggactt

SEQ ID NO: 28111 - DNA, 20 bp, Artificial Sequence
  Description of Artificial Sequence: Synthetic oligonucleotide
  Target: SCNA; (+) strand; PAM type: NRG; PAM sequence: AAG
atgtcacaggacttgagctc

SEQ ID NO: 28112 - DNA, 20 bp, Artificial Sequence
  Description of Artificial Sequence: Synthetic oligonucleotide
  Target: SCNA; (+) strand; PAM type: NRG; PAM sequence: TAG
caggacttgagctcaagtcc

SEQ ID NO: 28113 - DNA, 20 bp, Artificial Sequence
  Description of Artificial Sequence: Synthetic oligonucleotide
  Target: SCNA; (+) strand; PAM type: NRG; PAM sequence: TAG
agctcaagtcctagcttctc

SEQ ID NO: 28114 - DNA, 20 bp, Artificial Sequence
  Description of Artificial Sequence: Synthetic oligonucleotide
  Target: SCNA; (+) strand; PAM type: NRG; PAM sequence: CAG
gtcctagcttctctagatga

SEQ ID NO: 28115 - DNA, 20 bp, Artificial Sequence
  Description of Artificial Sequence: Synthetic oligonucleotide
  Target: SCNA; (+) strand; PAM type: NRG; PAM sequence: GAG
cctagcttctctagatgaca

SEQ ID NO: 28116 - DNA, 20 bp, Artificial Sequence
  Description of Artificial Sequence: Synthetic oligonucleotide
  Target: SCNA; (+) strand; PAM type: NRG; PAM sequence: GAG
gacagagcttttgtgatgct

SEQ ID NO: 28117 - DNA, 20 bp, Artificial Sequence
  Description of Artificial Sequence: Synthetic oligonucleotide
  Target: SCNA; (+) strand; PAM type: NRG; PAM sequence: AAG
agagcttttgtgatgctgag

SEQ ID NO: 28118 - DNA, 20 bp, Artificial Sequence
  Description of Artificial Sequence: Synthetic oligonucleotide
  Target: SCNA; (+) strand; PAM type: NRG; PAM sequence: GAG
aagtttcctatgctttttct

SEQ ID NO: 28119 - DNA, 20 bp, Artificial Sequence
  Description of Artificial Sequence: Synthetic oligonucleotide
  Target: SCNA; (+) strand; PAM type: NRG; PAM sequence: TAG
tgctttttctgagtgtcaat

SEQ ID NO: 28120 - DNA, 20 bp, Artificial Sequence
  Description of Artificial Sequence: Synthetic oligonucleotide
  Target: SCNA; (+) strand; PAM type: NRG; PAM sequence: TAG
ttctgagtgtcaattagtct

SEQ ID NO: 28121 - DNA, 20 bp, Artificial Sequence
  Description of Artificial Sequence: Synthetic oligonucleotide
  Target: SCNA; (+) strand; PAM type: NRG; PAM sequence: CGG
aattagtcttagtgatcaaa

SEQ ID NO: 28122 - DNA, 20 bp, Artificial Sequence
  Description of Artificial Sequence: Synthetic oligonucleotide
  Target: SCNA; (+) strand; PAM type: NRG; PAM sequence: GGG
attagtcttagtgatcaaac

SEQ ID NO: 28123 - DNA, 20 bp, Artificial Sequence
  Description of Artificial Sequence: Synthetic oligonucleotide
  Target: SCNA; (+) strand; PAM type: NRG; PAM sequence: CAG
gtcttagtgatcaaacggga

SEQ ID NO: 28124 - DNA, 20 bp, Artificial Sequence
  Description of Artificial Sequence: Synthetic oligonucleotide
  Target: SCNA; (+) strand; PAM type: NRG; PAM sequence: CAG
cagcaaaaccttctttacaa

SEQ ID NO: 28125 - DNA, 20 bp, Artificial Sequence
  Description of Artificial Sequence: Synthetic oligonucleotide
  Target: SCNA; (+) strand; PAM type: NRG; PAM sequence: AGG
agcaaaaccttctttacaac

SEQ ID NO: 28126 - DNA, 20 bp, Artificial Sequence
  Description of Artificial Sequence: Synthetic oligonucleotide
  Target: SCNA; (+) strand; PAM type: NRG; PAM sequence: GGG
gcaaaaccttctttacaaca

SEQ ID NO: 28127 - DNA, 20 bp, Artificial Sequence
  Description of Artificial Sequence: Synthetic oligonucleotide
  Target: SCNA; (+) strand; PAM type: NRG; PAM sequence: GAG
aaaaccttctttacaacagg

SEQ ID NO: 28128 - DNA, 20 bp, Artificial Sequence
  Description of Artificial Sequence: Synthetic oligonucleotide
  Target: SCNA; (+) strand; PAM type: NRG; PAM sequence: AAG
accttctttacaacagggag

SEQ ID NO: 28129 - DNA, 20 bp, Artificial Sequence
  Description of Artificial Sequence: Synthetic oligonucleotide
  Target: SCNA; (+) strand; PAM type: NRG; PAM sequence: AGG
ccttctttacaacagggaga

SEQ ID NO: 28130 - DNA, 20 bp, Artificial Sequence
  Description of Artificial Sequence: Synthetic oligonucleotide
  Target: SCNA; (+) strand; PAM type: NRG; PAM sequence: TAG
ttaactttctcattaatatt

SEQ ID NO: 28131 - DNA, 20 bp, Artificial Sequence
  Description of Artificial Sequence: Synthetic oligonucleotide
  Target: SCNA; (+) strand; PAM type: NRG; PAM sequence: TAG
attaatatttagattactgt

SEQ ID NO: 28132 - DNA, 20 bp, Artificial Sequence
  Description of Artificial Sequence: Synthetic oligonucleotide
  Target: SCNA; (+) strand; PAM type: NRG; PAM sequence: AGG
ttaatatttagattactgtt

SEQ ID NO: 28133 - DNA, 20 bp, Artificial Sequence
  Description of Artificial Sequence: Synthetic oligonucleotide
  Target: SCNA; (+) strand; PAM type: NRG; PAM sequence: AAG
agattactgttaggatatcc

SEQ ID NO: 28134 - DNA, 20 bp, Artificial Sequence
  Description of Artificial Sequence: Synthetic oligonucleotide
  Target: SCNA; (+) strand; PAM type: NRG; PAM sequence: AAG
ctgttaggatatccaagtat

SEQ ID NO: 28135 - DNA, 20 bp, Artificial Sequence
  Description of Artificial Sequence: Synthetic oligonucleotide
  Target: SCNA; (+) strand; PAM type: NRG; PAM sequence: AGG
tgttaggatatccaagtata

SEQ ID NO: 28136 - DNA, 20 bp, Artificial Sequence
  Description of Artificial Sequence: Synthetic oligonucleotide
  Target: SCNA; (+) strand; PAM type: NRG; PAM sequence: GGG
gttaggatatccaagtataa

SEQ ID NO: 28137 - DNA, 20 bp, Artificial Sequence
  Description of Artificial Sequence: Synthetic oligonucleotide
  Target: SCNA; (+) strand; PAM type: NRG; PAM sequence: AAG
tatccaagtataagggaaat

SEQ ID NO: 28138 - DNA, 20 bp, Artificial Sequence
  Description of Artificial Sequence: Synthetic oligonucleotide
  Target: SCNA; (+) strand; PAM type: NRG; PAM sequence: AGG
atccaagtataagggaaata

SEQ ID NO: 28139 - DNA, 20 bp, Artificial Sequence
  Description of Artificial Sequence: Synthetic oligonucleotide
  Target: SCNA; (+) strand; PAM type: NRG; PAM sequence: CAG
ttccatgattttgaaactga

SEQ ID NO: 28140 - DNA, 20 bp, Artificial Sequence
  Description of Artificial Sequence: Synthetic oligonucleotide
  Target: SCNA; (+) strand; PAM type: NRG; PAM sequence: GAG
ccatgattttgaaactgaca

SEQ ID NO: 28141 - DNA, 20 bp, Artificial Sequence
  Description of Artificial Sequence: Synthetic oligonucleotide
  Target: SCNA; (+) strand; PAM type: NRG; PAM sequence: TAG
gattttctaatataatttgt

SEQ ID NO: 28142 - DNA, 20 bp, Artificial Sequence
  Description of Artificial Sequence: Synthetic oligonucleotide
  Target: SCNA; (+) strand; PAM type: NRG; PAM sequence: TGG
tttgttagaaaattttgata

SEQ ID NO: 28143 - DNA, 20 bp, Artificial Sequence
  Description of Artificial Sequence: Synthetic oligonucleotide
  Target: SCNA; (+) strand; PAM type: NRG; PAM sequence: CAG
tagaaaattttgatatggac

SEQ ID NO: 28144 - DNA, 20 bp, Artificial Sequence
  Description of Artificial Sequence: Synthetic oligonucleotide
  Target: SCNA; (+) strand; PAM type: NRG; PAM sequence: AAG
aattttgatatggaccagac

SEQ ID NO: 28145 - DNA, 20 bp, Artificial Sequence
  Description of Artificial Sequence: Synthetic oligonucleotide
  Target: SCNA; (+) strand; PAM type: NRG; PAM sequence: TGG
atggaccagacaagtaaata

SEQ ID NO: 28146 - DNA, 20 bp, Artificial Sequence
  Description of Artificial Sequence: Synthetic oligonucleotide
  Target: SCNA; (+) strand; PAM type: NRG; PAM sequence: CAG
gaccagacaagtaaatatgg

SEQ ID NO: 28147 - DNA, 20 bp, Artificial Sequence
  Description of Artificial Sequence: Synthetic oligonucleotide
  Target: SCNA; (+) strand; PAM type: NRG; PAM sequence: AAG
tttgttgtttgatgatcaaa

SEQ ID NO: 28148 - DNA, 20 bp, Artificial Sequence
  Description of Artificial Sequence: Synthetic oligonucleotide
  Target: SCNA; (+) strand; PAM type: NRG; PAM sequence: AGG
ttgttgtttgatgatcaaaa

SEQ ID NO: 28149 - DNA, 20 bp, Artificial Sequence
  Description of Artificial Sequence: Synthetic oligonucleotide
  Target: SCNA; (+) strand; PAM type: NRG; PAM sequence: GAG
gttgtttgatgatcaaaaag

SEQ ID NO: 28150 - DNA, 20 bp, Artificial Sequence
  Description of Artificial Sequence: Synthetic oligonucleotide
  Target: SCNA; (+) strand; PAM type: NRG; PAM sequence: CGG
tcaaaaaggagttgttatga

SEQ ID NO: 28151 - DNA, 20 bp, Artificial Sequence
  Description of Artificial Sequence: Synthetic oligonucleotide
  Target: SCNA; (+) strand; PAM type: NRG; PAM sequence: AAG
ggagttgttatgacggaact

SEQ ID NO: 28152 - DNA, 20 bp, Artificial Sequence
  Description of Artificial Sequence: Synthetic oligonucleotide
  Target: SCNA; (+) strand; PAM type: NRG; PAM sequence: TGG
tatgacggaactaagactga

SEQ ID NO: 28153 - DNA, 20 bp, Artificial Sequence
  Description of Artificial Sequence: Synthetic oligonucleotide
  Target: SCNA; (+) strand; PAM type: NRG; PAM sequence: TGG
ctaagactgatggatattac

SEQ ID NO: 28154 - DNA, 20 bp, Artificial Sequence
  Description of Artificial Sequence: Synthetic oligonucleotide
  Target: SCNA; (+) strand; PAM type: NRG; PAM sequence: TGG
ggatttgtttatatgttatt

SEQ ID NO: 28155 - DNA, 20 bp, Artificial Sequence
  Description of Artificial Sequence: Synthetic oligonucleotide
  Target: SCNA; (+) strand; PAM type: NRG; PAM sequence: AAG
tgttatttggctgaactttg

SEQ ID NO: 28156 - DNA, 20 bp, Artificial Sequence
  Description of Artificial Sequence: Synthetic oligonucleotide
  Target: SCNA; (+) strand; PAM type: NRG; PAM sequence: AGG
gttatttggctgaactttga

SEQ ID NO: 28157 - DNA, 20 bp, Artificial Sequence
  Description of Artificial Sequence: Synthetic oligonucleotide
  Target: SCNA; (+) strand; PAM type: NRG; PAM sequence: CAG
tgaactttgaaggatgtaca

SEQ ID NO: 28158 - DNA, 20 bp, Artificial Sequence
  Description of Artificial Sequence: Synthetic oligonucleotide
  Target: SCNA; (+) strand; PAM type: NRG; PAM sequence: TAG
gaaggatgtacacagatgtg

SEQ ID NO: 28159 - DNA, 20 bp, Artificial Sequence
  Description of Artificial Sequence: Synthetic oligonucleotide
  Target: SCNA; (+) strand; PAM type: NRG; PAM sequence: AGG
aaggatgtacacagatgtgt

SEQ ID NO: 28160 - DNA, 20 bp, Artificial Sequence
  Description of Artificial Sequence: Synthetic oligonucleotide
  Target: SCNA; (+) strand; PAM type: NRG; PAM sequence: TAG
atgtacacagatgtgtaggt

SEQ ID NO: 28161 - DNA, 20 bp, Artificial Sequence
  Description of Artificial Sequence: Synthetic oligonucleotide
  Target: SCNA; (+) strand; PAM type: NRG; PAM sequence: AGG
tgtacacagatgtgtaggtt

SEQ ID NO: 28162 - DNA, 20 bp, Artificial Sequence
  Description of Artificial Sequence: Synthetic oligonucleotide
  Target: SCNA; (+) strand; PAM type: NRG; PAM sequence: GAG
cacagatgtgtaggttaggt

SEQ ID NO: 28163 - DNA, 20 bp, Artificial Sequence
  Description of Artificial Sequence: Synthetic oligonucleotide
  Target: SCNA; (+) strand; PAM type: NRG; PAM sequence: TGG
ggtgagtgtgtgtgtctgca

SEQ ID NO: 28164 - DNA, 20 bp, Artificial Sequence
  Description of Artificial Sequence: Synthetic oligonucleotide
  Target: SCNA; (+) strand; PAM type: NRG; PAM sequence: CAG
tgtgtgtgtctgcatggttc

SEQ ID NO: 28165 - DNA, 20 bp, Artificial Sequence
  Description of Artificial Sequence: Synthetic oligonucleotide
  Target: SCNA; (+) strand; PAM type: NRG; PAM sequence: TGG
gtgtctgcatggttccagcc

SEQ ID NO: 28166 - DNA, 20 bp, Artificial Sequence
  Description of Artificial Sequence: Synthetic oligonucleotide
  Target: SCNA; (+) strand; PAM type: NRG; PAM sequence: GGG
tgtctgcatggttccagcct

SEQ ID NO: 28167 - DNA, 20 bp, Artificial Sequence
  Description of Artificial Sequence: Synthetic oligonucleotide
  Target: SCNA; (+) strand; PAM type: NRG; PAM sequence: GAG
tgcatggttccagcctgggt

SEQ ID NO: 28168 - DNA, 20 bp, Artificial Sequence
  Description of Artificial Sequence: Synthetic oligonucleotide
  Target: SCNA; (+) strand; PAM type: NRG; PAM sequence: TGG
atggttccagcctgggtgag

SEQ ID NO: 28169 - DNA, 20 bp, Artificial Sequence
  Description of Artificial Sequence: Synthetic oligonucleotide
  Target: SCNA; (+) strand; PAM type: NRG; PAM sequence: GGG
tggttccagcctgggtgagt

SEQ ID NO: 28170 - DNA, 20 bp, Artificial Sequence
  Description of Artificial Sequence: Synthetic oligonucleotide
  Target: SCNA; (+) strand; PAM type: NRG; PAM sequence: AAG
ctgggtgagtgggtgtgtac

SEQ ID NO: 28171 - DNA, 20 bp, Artificial Sequence
  Description of Artificial Sequence: Synthetic oligonucleotide
  Target: SCNA; (+) strand; PAM type: NRG; PAM sequence: GAG
gggtgagtgggtgtgtacaa

SEQ ID NO: 28172 - DNA, 20 bp, Artificial Sequence
  Description of Artificial Sequence: Synthetic oligonucleotide
  Target: SCNA; (+) strand; PAM type: NRG; PAM sequence: CAG
gtgtgtacaagagcaccctg

SEQ ID NO: 28173 - DNA, 20 bp, Artificial Sequence
  Description of Artificial Sequence: Synthetic oligonucleotide
  Target: SCNA; (+) strand; PAM type: NRG; PAM sequence: TGG
acaagagcaccctgcagtaa

SEQ ID NO: 28174 - DNA, 20 bp, Artificial Sequence
  Description of Artificial Sequence: Synthetic oligonucleotide
  Target: SCNA; (+) strand; PAM type: NRG; PAM sequence: CAG
agcaccctgcagtaatggaa

SEQ ID NO: 28175 - DNA, 20 bp, Artificial Sequence
  Description of Artificial Sequence: Synthetic oligonucleotide
  Target: SCNA; (+) strand; PAM type: NRG; PAM sequence: CGG
taatggaacagcgtcctgtc

SEQ ID NO: 28176 - DNA, 20 bp, Artificial Sequence
  Description of Artificial Sequence: Synthetic oligonucleotide
  Target: SCNA; (+) strand; PAM type: NRG; PAM sequence: GGG
aatggaacagcgtcctgtcc

SEQ ID NO: 28177 - DNA, 20 bp, Artificial Sequence
  Description of Artificial Sequence: Synthetic oligonucleotide
  Target: SCNA; (+) strand; PAM type: NRG; PAM sequence: GGG
atggaacagcgtcctgtccg

SEQ ID NO: 28178 - DNA, 20 bp, Artificial Sequence
  Description of Artificial Sequence: Synthetic oligonucleotide
  Target: SCNA; (+) strand; PAM type: NRG; PAM sequence: TGG
gaacagcgtcctgtccgggg

SEQ ID NO: 28179 - DNA, 20 bp, Artificial Sequence
  Description of Artificial Sequence: Synthetic oligonucleotide
  Target: SCNA; (+) strand; PAM type: NRG; PAM sequence: GGG
aacagcgtcctgtccggggt

SEQ ID NO: 28180 - DNA, 20 bp, Artificial Sequence
  Description of Artificial Sequence: Synthetic oligonucleotide
  Target: SCNA; (+) strand; PAM type: NRG; PAM sequence: GAG
gggttcccatattgctccct

SEQ ID NO: 28181 - DNA, 20 bp, Artificial Sequence
  Description of Artificial Sequence: Synthetic oligonucleotide
  Target: SCNA; (+) strand; PAM type: NRG; PAM sequence: CAG
catattgctccctgagctgc

SEQ ID NO: 28182 - DNA, 20 bp, Artificial Sequence
  Description of Artificial Sequence: Synthetic oligonucleotide
  Target: SCNA; (+) strand; PAM type: NRG; PAM sequence: AGG
atattgctccctgagctgcc

SEQ ID NO: 28183 - DNA, 20 bp, Artificial Sequence
  Description of Artificial Sequence: Synthetic oligonucleotide
  Target: SCNA; (+) strand; PAM type: NRG; PAM sequence: TAG
tgctccctgagctgccagga

SEQ ID NO: 28184 - DNA, 20 bp, Artificial Sequence
  Description of Artificial Sequence: Synthetic oligonucleotide
  Target: SCNA; (+) strand; PAM type: NRG; PAM sequence: AGG
gctccctgagctgccaggat

SEQ ID NO: 28185 - DNA, 20 bp, Artificial Sequence
  Description of Artificial Sequence: Synthetic oligonucleotide
  Target: SCNA; (+) strand; PAM type: NRG; PAM sequence: CGG
ggataggctccaaccacctg

SEQ ID NO: 28186 - DNA, 20 bp, Artificial Sequence
  Description of Artificial Sequence: Synthetic oligonucleotide
  Target: SCNA; (+) strand; PAM type: NRG; PAM sequence: TAG
gcggcctccaccgaaataat

SEQ ID NO: 28187 - DNA, 20 bp, Artificial Sequence
  Description of Artificial Sequence: Synthetic oligonucleotide
  Target: SCNA; (+) strand; PAM type: NRG; PAM sequence: AGG
cggcctccaccgaaataatt

SEQ ID NO: 28188 - DNA, 20 bp, Artificial Sequence
  Description of Artificial Sequence: Synthetic oligonucleotide
  Target: SCNA; (+) strand; PAM type: NRG; PAM sequence: AAG
ctccaccgaaataattaggt

SEQ ID NO: 28189 - DNA, 20 bp, Artificial Sequence
  Description of Artificial Sequence: Synthetic oligonucleotide
  Target: SCNA; (+) strand; PAM type: NRG; PAM sequence: TAG
atctttcttaaacgtatata

SEQ ID NO: 28190 - DNA, 20 bp, Artificial Sequence
  Description of Artificial Sequence: Synthetic oligonucleotide
  Target: SCNA; (+) strand; PAM type: NRG; PAM sequence: CAG
ttaatttcaatgtttaatgt

SEQ ID NO: 28191 - DNA, 20 bp, Artificial Sequence
  Description of Artificial Sequence: Synthetic oligonucleotide
  Target: SCNA; (+) strand; PAM type: NRG; PAM sequence: AAG
atttcaatgtttaatgtcag

SEQ ID NO: 28192 - DNA, 20 bp, Artificial Sequence
  Description of Artificial Sequence: Synthetic oligonucleotide
  Target: SCNA; (+) strand; PAM type: NRG; PAM sequence: TAG
agaagtgatttatctttatt

SEQ ID NO: 28193 - DNA, 20 bp, Artificial Sequence
  Description of Artificial Sequence: Synthetic oligonucleotide
  Target: SCNA; (+) strand; PAM type: NRG; PAM sequence: AGG
gaagtgatttatctttattt

SEQ ID NO: 28194 - DNA, 20 bp, Artificial Sequence
  Description of Artificial Sequence: Synthetic oligonucleotide
  Target: SCNA; (+) strand; PAM type: NRG; PAM sequence: GAG
agtgatttatctttatttag

SEQ ID NO: 28195 - DNA, 20 bp, Artificial Sequence
  Description of Artificial Sequence: Synthetic oligonucleotide
  Target: SCNA; (+) strand; PAM type: NRG; PAM sequence: TGG
atctttatttaggagtttga

SEQ ID NO: 28196 - DNA, 20 bp, Artificial Sequence
  Description of Artificial Sequence: Synthetic oligonucleotide
  Target: SCNA; (+) strand; PAM type: NRG; PAM sequence: CAG
tttgatggtgtttttgtgtc

SEQ ID NO: 28197 - DNA, 20 bp, Artificial Sequence
  Description of Artificial Sequence: Synthetic oligonucleotide
  Target: SCNA; (+) strand; PAM type: NRG; PAM sequence: TAG
ttgtgtccagaaatttgcca

SEQ ID NO: 28198 - DNA, 20 bp, Artificial Sequence
  Description of Artificial Sequence: Synthetic oligonucleotide
  Target: SCNA; (+) strand; PAM type: NRG; PAM sequence: AGG
tgtgtccagaaatttgccat

SEQ ID NO: 28199 - DNA, 20 bp, Artificial Sequence
  Description of Artificial Sequence: Synthetic oligonucleotide
  Target: SCNA; (+) strand; PAM type: NRG; PAM sequence: TAG
taattcttgcttatatcaat

SEQ ID NO: 28200 - DNA, 20 bp, Artificial Sequence
  Description of Artificial Sequence: Synthetic oligonucleotide
  Target: SCNA; (+) strand; PAM type: NRG; PAM sequence: TGG
tgcttatatcaattagccaa

SEQ ID NO: 28201 - DNA, 20 bp, Artificial Sequence
  Description of Artificial Sequence: Synthetic oligonucleotide
  Target: SCNA; (+) strand; PAM type: NRG; PAM sequence: TGG
caattagccaatggtaaaac

SEQ ID NO: 28202 - DNA, 20 bp, Artificial Sequence
  Description of Artificial Sequence: Synthetic oligonucleotide
  Target: SCNA; (+) strand; PAM type: NRG; PAM sequence: AAG
gttatatgttgttttgcttc

SEQ ID NO: 28203 - DNA, 20 bp, Artificial Sequence
  Description of Artificial Sequence: Synthetic oligonucleotide
  Target: SCNA; (+) strand; PAM type: NRG; PAM sequence: CAG
tgttgttttgcttcaagtca

SEQ ID NO: 28204 - DNA, 20 bp, Artificial Sequence
  Description of Artificial Sequence: Synthetic oligonucleotide
  Target: SCNA; (+) strand; PAM type: NRG; PAM sequence: CAG
ttgcttcaagtcacagtttc

SEQ ID NO: 28205 - DNA, 20 bp, Artificial Sequence
  Description of Artificial Sequence: Synthetic oligonucleotide
  Target: SCNA; (+) strand; PAM type: NRG; PAM sequence: AAG
gtttccagaaactattgatg

SEQ ID NO: 28206 - DNA, 20 bp, Artificial Sequence
  Description of Artificial Sequence: Synthetic oligonucleotide
  Target: SCNA; (+) strand; PAM type: NRG; PAM sequence: AAG
cagaaactattgatgaagtt

SEQ ID NO: 28207 - DNA, 20 bp, Artificial Sequence
  Description of Artificial Sequence: Synthetic oligonucleotide
  Target: SCNA; (+) strand; PAM type: NRG; PAM sequence: GAG
aactattgatgaagttaagt

SEQ ID NO: 28208 - DNA, 20 bp, Artificial Sequence
  Description of Artificial Sequence: Synthetic oligonucleotide
  Target: SCNA; (+) strand; PAM type: NRG; PAM sequence: AGG
actattgatgaagttaagtg

SEQ ID NO: 28209 - DNA, 20 bp, Artificial Sequence
  Description of Artificial Sequence: Synthetic oligonucleotide
  Target: SCNA; (+) strand; PAM type: NRG; PAM sequence: TGG
ctgtattatgtgccctctga

SEQ ID NO: 28210 - DNA, 20 bp, Artificial Sequence
  Description of Artificial Sequence: Synthetic oligonucleotide
  Target: SCNA; (+) strand; PAM type: NRG; PAM sequence: AAG
tattatgtgccctctgatgg

SEQ ID NO: 28211 - DNA, 20 bp, Artificial Sequence
  Description of Artificial Sequence: Synthetic oligonucleotide
  Target: SCNA; (+) strand; PAM type: NRG; PAM sequence: AAG
acacatcaccatcttaaact

SEQ ID NO: 28212 - DNA, 20 bp, Artificial Sequence
  Description of Artificial Sequence: Synthetic oligonucleotide
  Target: SCNA; (+) strand; PAM type: NRG; PAM sequence: TAG
atcttaaactaagactgtac

SEQ ID NO: 28213 - DNA, 20 bp, Artificial Sequence
  Description of Artificial Sequence: Synthetic oligonucleotide
  Target: SCNA; (+) strand; PAM type: NRG; PAM sequence: AAG
aactaagactgtactagttt

SEQ ID NO: 28214 - DNA, 20 bp, Artificial Sequence
  Description of Artificial Sequence: Synthetic oligonucleotide
  Target: SCNA; (+) strand; PAM type: NRG; PAM sequence: TGG
taagactgtactagtttaag

SEQ ID NO: 28215 - DNA, 20 bp, Artificial Sequence
  Description of Artificial Sequence: Synthetic oligonucleotide
  Target: SCNA; (+) strand; PAM type: NRG; PAM sequence: GGG
aagactgtactagtttaagt

SEQ ID NO: 28216 - DNA, 20 bp, Artificial Sequence
  Description of Artificial Sequence: Synthetic oligonucleotide
  Target: SCNA; (+) strand; PAM type: NRG; PAM sequence: AAG
actgatccaataacttcatc

SEQ ID NO: 28217 - DNA, 20 bp, Artificial Sequence
  Description of Artificial Sequence: Synthetic oligonucleotide
  Target: SCNA; (+) strand; PAM type: NRG; PAM sequence: TGG
gatccaataacttcatcaag

SEQ ID NO: 28218 - DNA, 20 bp, Artificial Sequence
  Description of Artificial Sequence: Synthetic oligonucleotide
  Target: SCNA; (+) strand; PAM type: NRG; PAM sequence: GGG
atccaataacttcatcaagt

SEQ ID NO: 28219 - DNA, 20 bp, Artificial Sequence
  Description of Artificial Sequence: Synthetic oligonucleotide
  Target: SCNA; (+) strand; PAM type: NRG; PAM sequence: AAG
taacttcatcaagtgggaac

SEQ ID NO: 28220 - DNA, 20 bp, Artificial Sequence
  Description of Artificial Sequence: Synthetic oligonucleotide
  Target: SCNA; (+) strand; PAM type: NRG; PAM sequence: TAG
caagtgggaacaagctacac

SEQ ID NO: 28221 - DNA, 20 bp, Artificial Sequence
  Description of Artificial Sequence: Synthetic oligonucleotide
  Target: SCNA; (+) strand; PAM type: NRG; PAM sequence: AGG
aagtgggaacaagctacact

SEQ ID NO: 28222 - DNA, 20 bp, Artificial Sequence
  Description of Artificial Sequence: Synthetic oligonucleotide
  Target: SCNA; (+) strand; PAM type: NRG; PAM sequence: GGG
agtgggaacaagctacacta

SEQ ID NO: 28223 - DNA, 20 bp, Artificial Sequence
  Description of Artificial Sequence: Synthetic oligonucleotide
  Target: SCNA; (+) strand; PAM type: NRG; PAM sequence: CAG
acaagctacactagggatga

SEQ ID NO: 28224 - DNA, 20 bp, Artificial Sequence
  Description of Artificial Sequence: Synthetic oligonucleotide
  Target: SCNA; (+) strand; PAM type: NRG; PAM sequence: TAG
atgacagcacaatcctattc

SEQ ID NO: 28225 - DNA, 20 bp, Artificial Sequence
  Description of Artificial Sequence: Synthetic oligonucleotide
  Target: SCNA; (+) strand; PAM type: NRG; PAM sequence: GAG
gacagcacaatcctattcta

SEQ ID NO: 28226 - DNA, 20 bp, Artificial Sequence
  Description of Artificial Sequence: Synthetic oligonucleotide
  Target: SCNA; (+) strand; PAM type: NRG; PAM sequence: TAG
tctagagtccaaatcgacaa

SEQ ID NO: 28227 - DNA, 20 bp, Artificial Sequence
  Description of Artificial Sequence: Synthetic oligonucleotide
  Target: SCNA; (+) strand; PAM type: NRG; PAM sequence: AGG
ctagagtccaaatcgacaat

SEQ ID NO: 28228 - DNA, 20 bp, Artificial Sequence
  Description of Artificial Sequence: Synthetic oligonucleotide
  Target: SCNA; (+) strand; PAM type: NRG; PAM sequence: GGG
tagagtccaaatcgacaata

SEQ ID NO: 28229 - DNA, 20 bp, Artificial Sequence
  Description of Artificial Sequence: Synthetic oligonucleotide
  Target: SCNA; (+) strand; PAM type: NRG; PAM sequence: TGG
agggtttacgacctcgatgt

SEQ ID NO: 28230 - DNA, 20 bp, Artificial Sequence
  Description of Artificial Sequence: Synthetic oligonucleotide
  Target: SCNA; (+) strand; PAM type: NRG; PAM sequence: CAG
ttacgacctcgatgttggat

SEQ ID NO: 28231 - DNA, 20 bp, Artificial Sequence
  Description of Artificial Sequence: Synthetic oligonucleotide
  Target: SCNA; (+) strand; PAM type: NRG; PAM sequence: AGG
tacgacctcgatgttggatc

SEQ ID NO: 28232 - DNA, 20 bp, Artificial Sequence
  Description of Artificial Sequence: Synthetic oligonucleotide
  Target: SCNA; (+) strand; PAM type: NRG; PAM sequence: TGG
gttggatcaggtcatcctaa

SEQ ID NO: 28233 - DNA, 20 bp, Artificial Sequence
  Description of Artificial Sequence: Synthetic oligonucleotide
  Target: SCNA; (+) strand; PAM type: NRG; PAM sequence: AAG
taatggtgtaactgctatta

SEQ ID NO: 28234 - DNA, 20 bp, Artificial Sequence
  Description of Artificial Sequence: Synthetic oligonucleotide
  Target: SCNA; (+) strand; PAM type: NRG; PAM sequence: AGG
aatggtgtaactgctattaa

SEQ ID NO: 28235 - DNA, 20 bp, Artificial Sequence
  Description of Artificial Sequence: Synthetic oligonucleotide
  Target: SCNA; (+) strand; PAM type: NRG; PAM sequence: AAG
gttcgtttgttcgacaattg

SEQ ID NO: 28236 - DNA, 20 bp, Artificial Sequence
  Description of Artificial Sequence: Synthetic oligonucleotide
  Target: SCNA; (+) strand; PAM type: NRG; PAM sequence: CGG
caattgaagtcctacatgat

SEQ ID NO: 28237 - DNA, 20 bp, Artificial Sequence
  Description of Artificial Sequence: Synthetic oligonucleotide
  Target: SCNA; (+) strand; PAM type: NRG; PAM sequence: GAG
tgaagtcctacatgatcggt

SEQ ID NO: 28238 - DNA, 20 bp, Artificial Sequence
  Description of Artificial Sequence: Synthetic oligonucleotide
  Target: SCNA; (+) strand; PAM type: NRG; PAM sequence: AGG
gaagtcctacatgatcggtg

SEQ ID NO: 28239 - DNA, 20 bp, Artificial Sequence
  Description of Artificial Sequence: Synthetic oligonucleotide
  Target: SCNA; (+) strand; PAM type: NRG; PAM sequence: CAG
tcctacatgatcggtgaggt

SEQ ID NO: 28240 - DNA, 20 bp, Artificial Sequence
  Description of Artificial Sequence: Synthetic oligonucleotide
  Target: SCNA; (+) strand; PAM type: NRG; PAM sequence: AGG
cctacatgatcggtgaggtc

SEQ ID NO: 28241 - DNA, 20 bp, Artificial Sequence
  Description of Artificial Sequence: Synthetic oligonucleotide
  Target: SCNA; (+) strand; PAM type: NRG; PAM sequence: GAG
tacatgatcggtgaggtcag

SEQ ID NO: 28242 - DNA, 20 bp, Artificial Sequence
  Description of Artificial Sequence: Synthetic oligonucleotide
  Target: SCNA; (+) strand; PAM type: NRG; PAM sequence: TAG
cggtgaggtcaggagatcta

SEQ ID NO: 28243 - DNA, 20 bp, Artificial Sequence
  Description of Artificial Sequence: Synthetic oligonucleotide
  Target: SCNA; (+) strand; PAM type: NRG; PAM sequence: TGG
tcaggagatctatagcatcc

SEQ ID NO: 28244 - DNA, 20 bp, Artificial Sequence
  Description of Artificial Sequence: Synthetic oligonucleotide
  Target: SCNA; (+) strand; PAM type: NRG; PAM sequence: TGG
ctatagcatcctggccaaca

SEQ ID NO: 28245 - DNA, 20 bp, Artificial Sequence
  Description of Artificial Sequence: Synthetic oligonucleotide
  Target: SCNA; (+) strand; PAM type: NRG; PAM sequence: AAG
catctctactaaaatacaaa

SEQ ID NO: 28246 - DNA, 20 bp, Artificial Sequence
  Description of Artificial Sequence: Synthetic oligonucleotide
  Target: SCNA; (+) strand; PAM type: NRG; PAM sequence: TAG
tctactaaaatacaaaaagt

SEQ ID NO: 28247 - DNA, 20 bp, Artificial Sequence
  Description of Artificial Sequence: Synthetic oligonucleotide
  Target: SCNA; (+) strand; PAM type: NRG; PAM sequence: CGG
ctaaaatacaaaaagttagc

SEQ ID NO: 28248 - DNA, 20 bp, Artificial Sequence
  Description of Artificial Sequence: Synthetic oligonucleotide
  Target: SCNA; (+) strand; PAM type: NRG; PAM sequence: GGG
taaaatacaaaaagttagcc

SEQ ID NO: 28249 - DNA, 20 bp, Artificial Sequence
  Description of Artificial Sequence: Synthetic oligonucleotide
  Target: SCNA; (+) strand; PAM type: NRG; PAM sequence: TGG
tacaaaaagttagccgggcg

SEQ ID NO: 28250 - DNA, 20 bp, Artificial Sequence
  Description of Artificial Sequence: Synthetic oligonucleotide
  Target: SCNA; (+) strand; PAM type: NRG; PAM sequence: TGG
aaaaagttagccgggcgtgg

SEQ ID NO: 28251 - DNA, 20 bp, Artificial Sequence
  Description of Artificial Sequence: Synthetic oligonucleotide
  Target: SCNA; (+) strand; PAM type: NRG; PAM sequence: TAG
cgggcgtggtggttctccta

SEQ ID NO: 28252 - DNA, 20 bp, Artificial Sequence
  Description of Artificial Sequence: Synthetic oligonucleotide
  Target: SCNA; (+) strand; PAM type: NRG; PAM sequence: CAG
tggtggttctcctatagtcc

SEQ ID NO: 28253 - DNA, 20 bp, Artificial Sequence
  Description of Artificial Sequence: Synthetic oligonucleotide
  Target: SCNA; (+) strand; PAM type: NRG; PAM sequence: CGG
ctcctatagtcccagctact

SEQ ID NO: 28254 - DNA, 20 bp, Artificial Sequence
  Description of Artificial Sequence: Synthetic oligonucleotide
  Target: SCNA; (+) strand; PAM type: NRG; PAM sequence: GGG
tcctatagtcccagctactc

SEQ ID NO: 28255 - DNA, 20 bp, Artificial Sequence
  Description of Artificial Sequence: Synthetic oligonucleotide
  Target: SCNA; (+) strand; PAM type: NRG; PAM sequence: GAG
ctatagtcccagctactcgg

SEQ ID NO: 28256 - DNA, 20 bp, Artificial Sequence
  Description of Artificial Sequence: Synthetic oligonucleotide
  Target: SCNA; (+) strand; PAM type: NRG; PAM sequence: GAG
tcccagctactcgggagact

SEQ ID NO: 28257 - DNA, 20 bp, Artificial Sequence
  Description of Artificial Sequence: Synthetic oligonucleotide
  Target: SCNA; (+) strand; PAM type: NRG; PAM sequence: CAG
agctactcgggagactgagc

SEQ ID NO: 28258 - DNA, 20 bp, Artificial Sequence
  Description of Artificial Sequence: Synthetic oligonucleotide
  Target: SCNA; (+) strand; PAM type: NRG; PAM sequence: AGG
gctactcgggagactgagcc

SEQ ID NO: 28259 - DNA, 20 bp, Artificial Sequence
  Description of Artificial Sequence: Synthetic oligonucleotide
  Target: SCNA; (+) strand; PAM type: NRG; PAM sequence: GGG
ctactcgggagactgagcca

SEQ ID NO: 28260 - DNA, 20 bp, Artificial Sequence
  Description of Artificial Sequence: Synthetic oligonucleotide
  Target: SCNA; (+) strand; PAM type: NRG; PAM sequence: GGG
tactcgggagactgagccag

SEQ ID NO: 28261 - DNA, 20 bp, Artificial Sequence
  Description of Artificial Sequence: Synthetic oligonucleotide
  Target: SCNA; (+) strand; PAM type: NRG; PAM sequence: CGG
ccaggggaatcacttgaacc

SEQ ID NO: 28262 - DNA, 20 bp, Artificial Sequence
  Description of Artificial Sequence: Synthetic oligonucleotide
  Target: SCNA; (+) strand; PAM type: NRG; PAM sequence: GGG
caggggaatcacttgaaccc

SEQ ID NO: 28263 - DNA, 20 bp, Artificial Sequence
  Description of Artificial Sequence: Synthetic oligonucleotide
  Target: SCNA; (+) strand; PAM type: NRG; PAM sequence: GAG
ggggaatcacttgaacccgg

SEQ ID NO: 28264 - DNA, 20 bp, Artificial Sequence
  Description of Artificial Sequence: Synthetic oligonucleotide
  Target: SCNA; (+) strand; PAM type: NRG; PAM sequence: AGG
gggaatcacttgaacccggg

SEQ ID NO: 28265 - DNA, 20 bp, Artificial Sequence
  Description of Artificial Sequence: Synthetic oligonucleotide
  Target: SCNA; (+) strand; PAM type: NRG; PAM sequence: TGG
aatcacttgaacccgggagg

SEQ ID NO: 28266 - DNA, 20 bp, Artificial Sequence
  Description of Artificial Sequence: Synthetic oligonucleotide
  Target: SCNA; (+) strand; PAM type: NRG; PAM sequence: GAG
tcacttgaacccgggaggtg

SEQ ID NO: 28267 - DNA, 20 bp, Artificial Sequence
  Description of Artificial Sequence: Synthetic oligonucleotide
  Target: SCNA; (+) strand; PAM type: NRG; PAM sequence: CAG
aacccgggaggtggagattg

SEQ ID NO: 28268 - DNA, 20 bp, Artificial Sequence
  Description of Artificial Sequence: Synthetic oligonucleotide
  Target: SCNA; (+) strand; PAM type: NRG; PAM sequence: GAG
cgggaggtggagattgcagt

SEQ ID NO: 28269 - DNA, 20 bp, Artificial Sequence
  Description of Artificial Sequence: Synthetic oligonucleotide
  Target: SCNA; (+) strand; PAM type: NRG; PAM sequence: CAG
ggtggagattgcagtgagcc

SEQ ID NO: 28270 - DNA, 20 bp, Artificial Sequence
  Description of Artificial Sequence: Synthetic oligonucleotide
  Target: SCNA; (+) strand; PAM type: NRG; PAM sequence: CAG
cagatcacaccattgcactc

SEQ ID NO: 28271 - DNA, 20 bp, Artificial Sequence
  Description of Artificial Sequence: Synthetic oligonucleotide
  Target: SCNA; (+) strand; PAM type: NRG; PAM sequence: TGG
cacaccattgcactccagcc

SEQ ID NO: 28272 - DNA, 20 bp, Artificial Sequence
  Description of Artificial Sequence: Synthetic oligonucleotide
  Target: SCNA; (+) strand; PAM type: NRG; PAM sequence: CGG
attgcactccagcctggtga

SEQ ID NO: 28273 - DNA, 20 bp, Artificial Sequence
  Description of Artificial Sequence: Synthetic oligonucleotide
  Target: SCNA; (+) strand; PAM type: NRG; PAM sequence: GAG
tgcactccagcctggtgacg

SEQ ID NO: 28274 - DNA, 20 bp, Artificial Sequence
  Description of Artificial Sequence: Synthetic oligonucleotide
  Target: SCNA; (+) strand; PAM type: NRG; PAM sequence: GAG
ctccagcctggtgacggagt

SEQ ID NO: 28275 - DNA, 20 bp, Artificial Sequence
  Description of Artificial Sequence: Synthetic oligonucleotide
  Target: SCNA; (+) strand; PAM type: NRG; PAM sequence: TAG
taaataaataaatatataaa

SEQ ID NO: 28276 - DNA, 20 bp, Artificial Sequence
  Description of Artificial Sequence: Synthetic oligonucleotide
  Target: SCNA; (+) strand; PAM type: NRG; PAM sequence: AAG
aataaatatataaatagaaa

SEQ ID NO: 28277 - DNA, 20 bp, Artificial Sequence
  Description of Artificial Sequence: Synthetic oligonucleotide
  Target: SCNA; (+) strand; PAM type: NRG; PAM sequence: AAG
atagaaaaagaaaacaaaaa

SEQ ID NO: 28278 - DNA, 20 bp, Artificial Sequence
  Description of Artificial Sequence: Synthetic oligonucleotide
  Target: SCNA; (+) strand; PAM type: NRG; PAM sequence: AAG
aaaagaaaacaaaaaaagaa

SEQ ID NO: 28279 - DNA, 20 bp, Artificial Sequence
  Description of Artificial Sequence: Synthetic oligonucleotide
  Target: SCNA; (+) strand; PAM type: NRG; PAM sequence: CAG
taactatcactgacaactta

SEQ ID NO: 28280 - DNA, 20 bp, Artificial Sequence
  Description of Artificial Sequence: Synthetic oligonucleotide
  Target: SCNA; (+) strand; PAM type: NRG; PAM sequence: AAG
tgacaacttacagcaaatat

SEQ ID NO: 28281 - DNA, 20 bp, Artificial Sequence
  Description of Artificial Sequence: Synthetic oligonucleotide
  Target: SCNA; (+) strand; PAM type: NRG; PAM sequence: AGG
gacaacttacagcaaatata

SEQ ID NO: 28282 - DNA, 20 bp, Artificial Sequence
  Description of Artificial Sequence: Synthetic oligonucleotide
  Target: SCNA; (+) strand; PAM type: NRG; PAM sequence: TGG
aacttacagcaaatataagg

SEQ ID NO: 28283 - DNA, 20 bp, Artificial Sequence
  Description of Artificial Sequence: Synthetic oligonucleotide
  Target: SCNA; (+) strand; PAM type: NRG; PAM sequence: CAG
aacatgttcattgcttacaa

SEQ ID NO: 28284 - DNA, 20 bp, Artificial Sequence
  Description of Artificial Sequence: Synthetic oligonucleotide
  Target: SCNA; (+) strand; PAM type: NRG; PAM sequence: TGG
atgttcattgcttacaacag

SEQ ID NO: 28285 - DNA, 20 bp, Artificial Sequence
  Description of Artificial Sequence: Synthetic oligonucleotide
  Target: SCNA; (+) strand; PAM type: NRG; PAM sequence: CAG
cttacaacagtggctacaat

SEQ ID NO: 28286 - DNA, 20 bp, Artificial Sequence
  Description of Artificial Sequence: Synthetic oligonucleotide
  Target: SCNA; (+) strand; PAM type: NRG; PAM sequence: GAG
atcagcaaattttgcactgt

SEQ ID NO: 28287 - DNA, 20 bp, Artificial Sequence
  Description of Artificial Sequence: Synthetic oligonucleotide
  Target: SCNA; (+) strand; PAM type: NRG; PAM sequence: AAG
tgcactgtgagaaactacac

SEQ ID NO: 28288 - DNA, 20 bp, Artificial Sequence
  Description of Artificial Sequence: Synthetic oligonucleotide
  Target: SCNA; (+) strand; PAM type: NRG; PAM sequence: AAG
gtgagaaactacacaagaca

SEQ ID NO: 28289 - DNA, 20 bp, Artificial Sequence
  Description of Artificial Sequence: Synthetic oligonucleotide
  Target: SCNA; (+) strand; PAM type: NRG; PAM sequence: AAG
agaatacgtctaatttcaat

SEQ ID NO: 28290 - DNA, 20 bp, Artificial Sequence
  Description of Artificial Sequence: Synthetic oligonucleotide
  Target: SCNA; (+) strand; PAM type: NRG; PAM sequence: AAG
ataagtaaattgcaactaaa

SEQ ID NO: 28291 - DNA, 20 bp, Artificial Sequence
  Description of Artificial Sequence: Synthetic oligonucleotide
  Target: SCNA; (+) strand; PAM type: NRG; PAM sequence: AAG
agtaaattgcaactaaaaag

SEQ ID NO: 28292 - DNA, 20 bp, Artificial Sequence
  Description of Artificial Sequence: Synthetic oligonucleotide
  Target: SCNA; (+) strand; PAM type: NRG; PAM sequence: TAG
aattgcaactaaaaagaagt

SEQ ID NO: 28293 - DNA, 20 bp, Artificial Sequence
  Description of Artificial Sequence: Synthetic oligonucleotide
  Target: SCNA; (+) strand; PAM type: NRG; PAM sequence: TGG
tgcaactaaaaagaagttag

SEQ ID NO: 28294 - DNA, 20 bp, Artificial Sequence
  Description of Artificial Sequence: Synthetic oligonucleotide
  Target: SCNA; (+) strand; PAM type: NRG; PAM sequence: GGG
gcaactaaaaagaagttagt

SEQ ID NO: 28295 - DNA, 20 bp, Artificial Sequence
  Description of Artificial Sequence: Synthetic oligonucleotide
  Target: SCNA; (+) strand; PAM type: NRG; PAM sequence: AAG
tagtgggaacctgccgctta

SEQ ID NO: 28296 - DNA, 20 bp, Artificial Sequence
  Description of Artificial Sequence: Synthetic oligonucleotide
  Target: SCNA; (+) strand; PAM type: NRG; PAM sequence: TAG
tgggaacctgccgcttaaag

SEQ ID NO: 28297 - DNA, 20 bp, Artificial Sequence
  Description of Artificial Sequence: Synthetic oligonucleotide
  Target: SCNA; (+) strand; PAM type: NRG; PAM sequence: AAG
gaacctgccgcttaaagtag

SEQ ID NO: 28298 - DNA, 20 bp, Artificial Sequence
  Description of Artificial Sequence: Synthetic oligonucleotide
  Target: SCNA; (+) strand; PAM type: NRG; PAM sequence: GAG
ctgccgcttaaagtagaagt

SEQ ID NO: 28299 - DNA, 20 bp, Artificial Sequence
  Description of Artificial Sequence: Synthetic oligonucleotide
  Target: SCNA; (+) strand; PAM type: NRG; PAM sequence: GAG
gccgcttaaagtagaagtga

SEQ ID NO: 28300 - DNA, 20 bp, Artificial Sequence
  Description of Artificial Sequence: Synthetic oligonucleotide
  Target: SCNA; (+) strand; PAM type: NRG; PAM sequence: GAG
cgcttaaagtagaagtgaga

SEQ ID NO: 28301 - DNA, 20 bp, Artificial Sequence
  Description of Artificial Sequence: Synthetic oligonucleotide
  Target: SCNA; (+) strand; PAM type: NRG; PAM sequence: TAG
aagtagaagtgagagagcat

SEQ ID NO: 28302 - DNA, 20 bp, Artificial Sequence
  Description of Artificial Sequence: Synthetic oligonucleotide
  Target: SCNA; (+) strand; PAM type: NRG; PAM sequence: AAG
gcattagccaattgcaacct

SEQ ID NO: 28303 - DNA, 20 bp, Artificial Sequence
  Description of Artificial Sequence: Synthetic oligonucleotide
  Target: SCNA; (+) strand; PAM type: NRG; PAM sequence: TGG
gaactttatttcattctcat

SEQ ID NO: 28304 - DNA, 20 bp, Artificial Sequence
  Description of Artificial Sequence: Synthetic oligonucleotide
  Target: SCNA; (+) strand; PAM type: NRG; PAM sequence: GGG
aactttatttcattctcatt

SEQ ID NO: 28305 - DNA, 20 bp, Artificial Sequence
  Description of Artificial Sequence: Synthetic oligonucleotide
  Target: SCNA; (+) strand; PAM type: NRG; PAM sequence: AAG
tctcattgggaaccctacat

SEQ ID NO: 28306 - DNA, 20 bp, Artificial Sequence
  Description of Artificial Sequence: Synthetic oligonucleotide
  Target: SCNA; (+) strand; PAM type: NRG; PAM sequence: TGG
gggaaccctacataagcaaa

SEQ ID NO: 28307 - DNA, 20 bp, Artificial Sequence
  Description of Artificial Sequence: Synthetic oligonucleotide
  Target: SCNA; (+) strand; PAM type: NRG; PAM sequence: GAG
agcaaatggaaaacacatat

SEQ ID NO: 28308 - DNA, 20 bp, Artificial Sequence
  Description of Artificial Sequence: Synthetic oligonucleotide
  Target: SCNA; (+) strand; PAM type: NRG; PAM sequence: AGG
gcaaatggaaaacacatatg

SEQ ID NO: 28309 - DNA, 20 bp, Artificial Sequence
  Description of Artificial Sequence: Synthetic oligonucleotide
  Target: SCNA; (+) strand; PAM type: NRG; PAM sequence: TAG
aatggaaaacacatatgagg

SEQ ID NO: 28310 - DNA, 20 bp, Artificial Sequence
  Description of Artificial Sequence: Synthetic oligonucleotide
  Target: SCNA; (+) strand; PAM type: NRG; PAM sequence: TGG
gaaaacacatatgaggtagt

SEQ ID NO: 28311 - DNA, 20 bp, Artificial Sequence
  Description of Artificial Sequence: Synthetic oligonucleotide
  Target: SCNA; (+) strand; PAM type: NRG; PAM sequence: GGG
aaaacacatatgaggtagtt

SEQ ID NO: 28312 - DNA, 20 bp, Artificial Sequence
  Description of Artificial Sequence: Synthetic oligonucleotide
  Target: SCNA; (+) strand; PAM type: NRG; PAM sequence: GGG
aaacacatatgaggtagttg

SEQ ID NO: 28313 - DNA, 20 bp, Artificial Sequence
  Description of Artificial Sequence: Synthetic oligonucleotide
  Target: SCNA; (+) strand; PAM type: NRG; PAM sequence: AAG
tgaacactgacttgatattt

SEQ ID NO: 28314 - DNA, 20 bp, Artificial Sequence
  Description of Artificial Sequence: Synthetic oligonucleotide
  Target: SCNA; (+) strand; PAM type: NRG; PAM sequence: TAG
agaattattgtttatttctt

SEQ ID NO: 28315 - DNA, 20 bp, Artificial Sequence
  Description of Artificial Sequence: Synthetic oligonucleotide
  Target: SCNA; (+) strand; PAM type: NRG; PAM sequence: AGG
gaattattgtttatttcttt

SEQ ID NO: 28316 - DNA, 20 bp, Artificial Sequence
  Description of Artificial Sequence: Synthetic oligonucleotide
  Target: SCNA; (+) strand; PAM type: NRG; PAM sequence: CAG
ttaggtgtgatgatatattg

SEQ ID NO: 28317 - DNA, 20 bp, Artificial Sequence
  Description of Artificial Sequence: Synthetic oligonucleotide
  Target: SCNA; (+) strand; PAM type: NRG; PAM sequence: AAG
tattgcagttttacttcaaa

SEQ ID NO: 28318 - DNA, 20 bp, Artificial Sequence
  Description of Artificial Sequence: Synthetic oligonucleotide
  Target: SCNA; (+) strand; PAM type: NRG; PAM sequence: CAG
acaaattaattaaatgttta

SEQ ID NO: 28319 - DNA, 20 bp, Artificial Sequence
  Description of Artificial Sequence: Synthetic oligonucleotide
  Target: SCNA; (+) strand; PAM type: NRG; PAM sequence: AAG
taaatgtttacagatcaaat

SEQ ID NO: 28320 - DNA, 20 bp, Artificial Sequence
  Description of Artificial Sequence: Synthetic oligonucleotide
  Target: SCNA; (+) strand; PAM type: NRG; PAM sequence: TAG
gatcaaataagatatctatc

SEQ ID NO: 28321 - DNA, 20 bp, Artificial Sequence
  Description of Artificial Sequence: Synthetic oligonucleotide
  Target: SCNA; (+) strand; PAM type: NRG; PAM sequence: AGG
atcaaataagatatctatct

SEQ ID NO: 28322 - DNA, 20 bp, Artificial Sequence
  Description of Artificial Sequence: Synthetic oligonucleotide
  Target: SCNA; (+) strand; PAM type: NRG; PAM sequence: TGG
ataagatatctatctaggtt

SEQ ID NO: 28323 - DNA, 20 bp, Artificial Sequence
  Description of Artificial Sequence: Synthetic oligonucleotide
  Target: SCNA; (+) strand; PAM type: NRG; PAM sequence: GGG
taagatatctatctaggttt

SEQ ID NO: 28324 - DNA, 20 bp, Artificial Sequence
  Description of Artificial Sequence: Synthetic oligonucleotide
  Target: SCNA; (+) strand; PAM type: NRG; PAM sequence: TGG
gatatctatctaggtttggg

SEQ ID NO: 28325 - DNA, 20 bp, Artificial Sequence
  Description of Artificial Sequence: Synthetic oligonucleotide
  Target: SCNA; (+) strand; PAM type: NRG; PAM sequence: GGG
atatctatctaggtttgggt

SEQ ID NO: 28326 - DNA, 20 bp, Artificial Sequence
  Description of Artificial Sequence: Synthetic oligonucleotide
  Target: SCNA; (+) strand; PAM type: NRG; PAM sequence: GGG
tatctatctaggtttgggtg

SEQ ID NO: 28327 - DNA, 20 bp, Artificial Sequence
  Description of Artificial Sequence: Synthetic oligonucleotide
  Target: SCNA; (+) strand; PAM type: NRG; PAM sequence: GGG
atctatctaggtttgggtgg

SEQ ID NO: 28328 - DNA, 20 bp, Artificial Sequence
  Description of Artificial Sequence: Synthetic oligonucleotide
  Target: SCNA; (+) strand; PAM type: NRG; PAM sequence: TGG
ctaggtttgggtgggggaaa

SEQ ID NO: 28329 - DNA, 20 bp, Artificial Sequence
  Description of Artificial Sequence: Synthetic oligonucleotide
  Target: SCNA; (+) strand; PAM type: NRG; PAM sequence: GGG
taggtttgggtgggggaaat

SEQ ID NO: 28330 - DNA, 20 bp, Artificial Sequence
  Description of Artificial Sequence: Synthetic oligonucleotide
  Target: SCNA; (+) strand; PAM type: NRG; PAM sequence: TGG
gtttgggtgggggaaatggg

SEQ ID NO: 28331 - DNA, 20 bp, Artificial Sequence
  Description of Artificial Sequence: Synthetic oligonucleotide
  Target: SCNA; (+) strand; PAM type: NRG; PAM sequence: GGG
tttgggtgggggaaatgggt

SEQ ID NO: 28332 - DNA, 20 bp, Artificial Sequence
  Description of Artificial Sequence: Synthetic oligonucleotide
  Target: SCNA; (+) strand; PAM type: NRG; PAM sequence: TAG
tgggggaaatgggtgggata

SEQ ID NO: 28333 - DNA, 20 bp, Artificial Sequence
  Description of Artificial Sequence: Synthetic oligonucleotide
  Target: SCNA; (+) strand; PAM type: NRG; PAM sequence: AAG
gggaaatgggtgggatatag

SEQ ID NO: 28334 - DNA, 20 bp, Artificial Sequence
  Description of Artificial Sequence: Synthetic oligonucleotide
  Target: SCNA; (+) strand; PAM type: NRG; PAM sequence: GAG
gtgggatatagaagaaacat

SEQ ID NO: 28335 - DNA, 20 bp, Artificial Sequence
  Description of Artificial Sequence: Synthetic oligonucleotide
  Target: SCNA; (+) strand; PAM type: NRG; PAM sequence: CAG
acatgagtttaatatttcat

SEQ ID NO: 28336 - DNA, 20 bp, Artificial Sequence
  Description of Artificial Sequence: Synthetic oligonucleotide
  Target: SCNA; (+) strand; PAM type: NRG; PAM sequence: AAG
aatatttcatcagttttaaa

SEQ ID NO: 28337 - DNA, 20 bp, Artificial Sequence
  Description of Artificial Sequence: Synthetic oligonucleotide
  Target: SCNA; (+) strand; PAM type: NRG; PAM sequence: CAG
tcagttttaaaaagtatata

SEQ ID NO: 28338 - DNA, 20 bp, Artificial Sequence
  Description of Artificial Sequence: Synthetic oligonucleotide
  Target: SCNA; (+) strand; PAM type: NRG; PAM sequence: TAG
gttttaaaaagtatatacag

SEQ ID NO: 28339 - DNA, 20 bp, Artificial Sequence
  Description of Artificial Sequence: Synthetic oligonucleotide
  Target: SCNA; (+) strand; PAM type: NRG; PAM sequence: TGG
cagtagtctccttttatccg

SEQ ID NO: 28340 - DNA, 20 bp, Artificial Sequence
  Description of Artificial Sequence: Synthetic oligonucleotide
  Target: SCNA; (+) strand; PAM type: NRG; PAM sequence: TGG
atccgtggttttgttttcca

SEQ ID NO: 28341 - DNA, 20 bp, Artificial Sequence
  Description of Artificial Sequence: Synthetic oligonucleotide
  Target: SCNA; (+) strand; PAM type: NRG; PAM sequence: CAG
ggttttgttttccatggttt

SEQ ID NO: 28342 - DNA, 20 bp, Artificial Sequence
  Description of Artificial Sequence: Synthetic oligonucleotide
  Target: SCNA; (+) strand; PAM type: NRG; PAM sequence: AAG
aattgcaaccccaaaatact

SEQ ID NO: 28343 - DNA, 20 bp, Artificial Sequence
  Description of Artificial Sequence: Synthetic oligonucleotide
  Target: SCNA; (+) strand; PAM type: NRG; PAM sequence: TAG
ccccaaaatactaagatatt

SEQ ID NO: 28344 - DNA, 20 bp, Artificial Sequence
  Description of Artificial Sequence: Synthetic oligonucleotide
  Target: SCNA; (+) strand; PAM type: NRG; PAM sequence: GAG
ccaaaatactaagatattta

SEQ ID NO: 28345 - DNA, 20 bp, Artificial Sequence
  Description of Artificial Sequence: Synthetic oligonucleotide
  Target: SCNA; (+) strand; PAM type: NRG; PAM sequence: CAG
aatactaagatatttagaga

SEQ ID NO: 28346 - DNA, 20 bp, Artificial Sequence
  Description of Artificial Sequence: Synthetic oligonucleotide
  Target: SCNA; (+) strand; PAM type: NRG; PAM sequence: GAG
tactaagatatttagagaca

SEQ ID NO: 28347 - DNA, 20 bp, Artificial Sequence
  Description of Artificial Sequence: Synthetic oligonucleotide
  Target: SCNA; (+) strand; PAM type: NRG; PAM sequence: GAG
ctaagatatttagagacaga

SEQ ID NO: 28348 - DNA, 20 bp, Artificial Sequence
  Description of Artificial Sequence: Synthetic oligonucleotide
  Target: SCNA; (+) strand; PAM type: NRG; PAM sequence: GAG
aagatatttagagacagaga

SEQ ID NO: 28349 - DNA, 20 bp, Artificial Sequence
  Description of Artificial Sequence: Synthetic oligonucleotide
  Target: SCNA; (+) strand; PAM type: NRG; PAM sequence: GAG
gatatttagagacagagaga

SEQ ID NO: 28350 - DNA, 20 bp, Artificial Sequence
  Description of Artificial Sequence: Synthetic oligonucleotide
  Target: SCNA; (+) strand; PAM type: NRG; PAM sequence: AGG
atatttagagacagagagag

SEQ ID NO: 28351 - DNA, 20 bp, Artificial Sequence
  Description of Artificial Sequence: Synthetic oligonucleotide
  Target: SCNA; (+) strand; PAM type: NRG; PAM sequence: GGG
tatttagagacagagagaga

SEQ ID NO: 28352 - DNA, 20 bp, Artificial Sequence
  Description of Artificial Sequence: Synthetic oligonucleotide
  Target: SCNA; (+) strand; PAM type: NRG; PAM sequence: AAG
tagagacagagagagaggga

SEQ ID NO: 28353 - DNA, 20 bp, Artificial Sequence
  Description of Artificial Sequence: Synthetic oligonucleotide
  Target: SCNA; (+) strand; PAM type: NRG; PAM sequence: GAG
gagacagagagagagggaaa

SEQ ID NO: 28354 - DNA, 20 bp, Artificial Sequence
  Description of Artificial Sequence: Synthetic oligonucleotide
  Target: SCNA; (+) strand; PAM type: NRG; PAM sequence: AAG
cagagagagagggaaagaga

SEQ ID NO: 28355 - DNA, 20 bp, Artificial Sequence
  Description of Artificial Sequence: Synthetic oligonucleotide
  Target: SCNA; (+) strand; PAM type: NRG; PAM sequence: GAG
gagagagggaaagagaaagc

SEQ ID NO: 28356 - DNA, 20 bp, Artificial Sequence
  Description of Artificial Sequence: Synthetic oligonucleotide
  Target: SCNA; (+) strand; PAM type: NRG; PAM sequence: CAG
tacccacataacttttatta

SEQ ID NO: 28357 - DNA, 20 bp, Artificial Sequence
  Description of Artificial Sequence: Synthetic oligonucleotide
  Target: SCNA; (+) strand; PAM type: NRG; PAM sequence: TAG
taattgttctcttttgttat

SEQ ID NO: 28358 - DNA, 20 bp, Artificial Sequence
  Description of Artificial Sequence: Synthetic oligonucleotide
  Target: SCNA; (+) strand; PAM type: NRG; PAM sequence: TAG
tgttaatctcttactgtgcc

SEQ ID NO: 28359 - DNA, 20 bp, Artificial Sequence
  Description of Artificial Sequence: Synthetic oligonucleotide
  Target: SCNA; (+) strand; PAM type: NRG; PAM sequence: TAG
ttataaattaaactttttca

SEQ ID NO: 28360 - DNA, 20 bp, Artificial Sequence
  Description of Artificial Sequence: Synthetic oligonucleotide
  Target: SCNA; (+) strand; PAM type: NRG; PAM sequence: AGG
tataaattaaactttttcat

SEQ ID NO: 28361 - DNA, 20 bp, Artificial Sequence
  Description of Artificial Sequence: Synthetic oligonucleotide
  Target: SCNA; (+) strand; PAM type: NRG; PAM sequence: AAG
aaactttttcataggtacat

SEQ ID NO: 28362 - DNA, 20 bp, Artificial Sequence
  Description of Artificial Sequence: Synthetic oligonucleotide
  Target: SCNA; (+) strand; PAM type: NRG; PAM sequence: TGG
tttcataggtacataagcat

SEQ ID NO: 28363 - DNA, 20 bp, Artificial Sequence
  Description of Artificial Sequence: Synthetic oligonucleotide
  Target: SCNA; (+) strand; PAM type: NRG; PAM sequence: CAG
tacataagcattggaaaaaa

SEQ ID NO: 28364 - DNA, 20 bp, Artificial Sequence
  Description of Artificial Sequence: Synthetic oligonucleotide
  Target: SCNA; (+) strand; PAM type: NRG; PAM sequence: TAG
attggaaaaaacagtatatg

SEQ ID NO: 28365 - DNA, 20 bp, Artificial Sequence
  Description of Artificial Sequence: Synthetic oligonucleotide
  Target: SCNA; (+) strand; PAM type: NRG; PAM sequence: AGG
ttggaaaaaacagtatatgt

SEQ ID NO: 28366 - DNA, 20 bp, Artificial Sequence
  Description of Artificial Sequence: Synthetic oligonucleotide
  Target: SCNA; (+) strand; PAM type: NRG; PAM sequence: GGG
tggaaaaaacagtatatgta

SEQ ID NO: 28367 - DNA, 20 bp, Artificial Sequence
  Description of Artificial Sequence: Synthetic oligonucleotide
  Target: SCNA; (+) strand; PAM type: NRG; PAM sequence: CAG
tttgctactatccgcaattt

SEQ ID NO: 28368 - DNA, 20 bp, Artificial Sequence
  Description of Artificial Sequence: Synthetic oligonucleotide
  Target: SCNA; (+) strand; PAM type: NRG; PAM sequence: AGG
ttgctactatccgcaatttc

SEQ ID NO: 28369 - DNA, 20 bp, Artificial Sequence
  Description of Artificial Sequence: Synthetic oligonucleotide
  Target: SCNA; (+) strand; PAM type: NRG; PAM sequence: TAG
atccgcaatttcaggtgtcc

SEQ ID NO: 28370 - DNA, 20 bp, Artificial Sequence
  Description of Artificial Sequence: Synthetic oligonucleotide
  Target: SCNA; (+) strand; PAM type: NRG; PAM sequence: TGG
cgcaatttcaggtgtcctag

SEQ ID NO: 28371 - DNA, 20 bp, Artificial Sequence
  Description of Artificial Sequence: Synthetic oligonucleotide
  Target: SCNA; (+) strand; PAM type: NRG; PAM sequence: GGG
gcaatttcaggtgtcctagt

SEQ ID NO: 28372 - DNA, 20 bp, Artificial Sequence
  Description of Artificial Sequence: Synthetic oligonucleotide
  Target: SCNA; (+) strand; PAM type: NRG; PAM sequence: GGG
caatttcaggtgtcctagtg

SEQ ID NO: 28373 - DNA, 20 bp, Artificial Sequence
  Description of Artificial Sequence: Synthetic oligonucleotide
  Target: SCNA; (+) strand; PAM type: NRG; PAM sequence: GGG
aatttcaggtgtcctagtgg

SEQ ID NO: 28374 - DNA, 20 bp, Artificial Sequence
  Description of Artificial Sequence: Synthetic oligonucleotide
  Target: SCNA; (+) strand; PAM type: NRG; PAM sequence: CAG
aggtgtcctagtgggggttt

SEQ ID NO: 28375 - DNA, 20 bp, Artificial Sequence
  Description of Artificial Sequence: Synthetic oligonucleotide
  Target: SCNA; (+) strand; PAM type: NRG; PAM sequence: TAG
ggtttcagaatgtatccctg

SEQ ID NO: 28376 - DNA, 20 bp, Artificial Sequence
  Description of Artificial Sequence: Synthetic oligonucleotide
  Target: SCNA; (+) strand; PAM type: NRG; PAM sequence: AAG
agaatgtatccctgtagata

SEQ ID NO: 28377 - DNA, 20 bp, Artificial Sequence
  Description of Artificial Sequence: Synthetic oligonucleotide
  Target: SCNA; (+) strand; PAM type: NRG; PAM sequence: AGG
gaatgtatccctgtagataa

SEQ ID NO: 28378 - DNA, 20 bp, Artificial Sequence
  Description of Artificial Sequence: Synthetic oligonucleotide
  Target: SCNA; (+) strand; PAM type: NRG; PAM sequence: AAG
tgtatccctgtagataaagg

SEQ ID NO: 28379 - DNA, 20 bp, Artificial Sequence
  Description of Artificial Sequence: Synthetic oligonucleotide
  Target: SCNA; (+) strand; PAM type: NRG; PAM sequence: TAG
ctgctgtatgctcatttcaa

SEQ ID NO: 28380 - DNA, 20 bp, Artificial Sequence
  Description of Artificial Sequence: Synthetic oligonucleotide
  Target: SCNA; (+) strand; PAM type: NRG; PAM sequence: TAG
tgtatgctcatttcaatagt

SEQ ID NO: 28381 - DNA, 20 bp, Artificial Sequence
  Description of Artificial Sequence: Synthetic oligonucleotide
  Target: SCNA; (+) strand; PAM type: NRG; PAM sequence: TAG
tgttgactctatcacattcg

SEQ ID NO: 28382 - DNA, 20 bp, Artificial Sequence
  Description of Artificial Sequence: Synthetic oligonucleotide
  Target: SCNA; (+) strand; PAM type: NRG; PAM sequence: AAG
ctatcacattcgtagatttt

SEQ ID NO: 28383 - DNA, 20 bp, Artificial Sequence
  Description of Artificial Sequence: Synthetic oligonucleotide
  Target: SCNA; (+) strand; PAM type: NRG; PAM sequence: TGG
tttaagcatactaaaatatt

SEQ ID NO: 28384 - DNA, 20 bp, Artificial Sequence
  Description of Artificial Sequence: Synthetic oligonucleotide
  Target: SCNA; (+) strand; PAM type: NRG; PAM sequence: CAG
aagcatactaaaatatttgg

SEQ ID NO: 28385 - DNA, 20 bp, Artificial Sequence
  Description of Artificial Sequence: Synthetic oligonucleotide
  Target: SCNA; (+) strand; PAM type: NRG; PAM sequence: AAG
aaatatttggcagctattcc

SEQ ID NO: 28386 - DNA, 20 bp, Artificial Sequence
  Description of Artificial Sequence: Synthetic oligonucleotide
  Target: SCNA; (+) strand; PAM type: NRG; PAM sequence: AGG
aatatttggcagctattcca

SEQ ID NO: 28387 - DNA, 20 bp, Artificial Sequence
  Description of Artificial Sequence: Synthetic oligonucleotide
  Target: SCNA; (+) strand; PAM type: NRG; PAM sequence: GAG
tatttggcagctattccaag

SEQ ID NO: 28388 - DNA, 20 bp, Artificial Sequence
  Description of Artificial Sequence: Synthetic oligonucleotide
  Target: SCNA; (+) strand; PAM type: NRG; PAM sequence: CAG
caaacacttcatatgaccat

SEQ ID NO: 28389 - DNA, 20 bp, Artificial Sequence
  Description of Artificial Sequence: Synthetic oligonucleotide
  Target: SCNA; (+) strand; PAM type: NRG; PAM sequence: AAG
taaaaacattgttatctata

SEQ ID NO: 28390 - DNA, 20 bp, Artificial Sequence
  Description of Artificial Sequence: Synthetic oligonucleotide
  Target: SCNA; (+) strand; PAM type: NRG; PAM sequence: TAG
atttacaactgtgcctaata

SEQ ID NO: 28391 - DNA, 20 bp, Artificial Sequence
  Description of Artificial Sequence: Synthetic oligonucleotide
  Target: SCNA; (+) strand; PAM type: NRG; PAM sequence: TGG
caactgtgcctaatatagtt

SEQ ID NO: 28392 - DNA, 20 bp, Artificial Sequence
  Description of Artificial Sequence: Synthetic oligonucleotide
  Target: SCNA; (+) strand; PAM type: NRG; PAM sequence: AAG
tagtttggctgtaacaaaaa

SEQ ID NO: 28393 - DNA, 20 bp, Artificial Sequence
  Description of Artificial Sequence: Synthetic oligonucleotide
  Target: SCNA; (+) strand; PAM type: NRG; PAM sequence: GAG
cattaaaatttgcattttat

SEQ ID NO: 28394 - DNA, 20 bp, Artificial Sequence
  Description of Artificial Sequence: Synthetic oligonucleotide
  Target: SCNA; (+) strand; PAM type: NRG; PAM sequence: AAG
tcaaaatataatcatacttg

SEQ ID NO: 28395 - DNA, 20 bp, Artificial Sequence
  Description of Artificial Sequence: Synthetic oligonucleotide
  Target: SCNA; (+) strand; PAM type: NRG; PAM sequence: AGG
caaaatataatcatacttga

SEQ ID NO: 28396 - DNA, 20 bp, Artificial Sequence
  Description of Artificial Sequence: Synthetic oligonucleotide
  Target: SCNA; (+) strand; PAM type: NRG; PAM sequence: AAG
taatcatacttgaaggtgtg

SEQ ID NO: 28397 - DNA, 20 bp, Artificial Sequence
  Description of Artificial Sequence: Synthetic oligonucleotide
  Target: SCNA; (+) strand; PAM type: NRG; PAM sequence: AAG
tatttatttttaccacaaac

SEQ ID NO: 28398 - DNA, 20 bp, Artificial Sequence
  Description of Artificial Sequence: Synthetic oligonucleotide
  Target: SCNA; (+) strand; PAM type: NRG; PAM sequence: CAG
attatgatattatattaacc

SEQ ID NO: 28399 - DNA, 20 bp, Artificial Sequence
  Description of Artificial Sequence: Synthetic oligonucleotide
  Target: SCNA; (+) strand; PAM type: NRG; PAM sequence: TAG
tatattaacccagaatatgt

SEQ ID NO: 28400 - DNA, 20 bp, Artificial Sequence
  Description of Artificial Sequence: Synthetic oligonucleotide
  Target: SCNA; (+) strand; PAM type: NRG; PAM sequence: AGG
atattaacccagaatatgtt

SEQ ID NO: 28401 - DNA, 20 bp, Artificial Sequence
  Description of Artificial Sequence: Synthetic oligonucleotide
  Target: SCNA; (+) strand; PAM type: NRG; PAM sequence: GGG
tattaacccagaatatgtta

SEQ ID NO: 28402 - DNA, 20 bp, Artificial Sequence
  Description of Artificial Sequence: Synthetic oligonucleotide
  Target: SCNA; (+) strand; PAM type: NRG; PAM sequence: GAG
gttagggcaataaaataaat

SEQ ID NO: 28403 - DNA, 20 bp, Artificial Sequence
  Description of Artificial Sequence: Synthetic oligonucleotide
  Target: SCNA; (+) strand; PAM type: NRG; PAM sequence: TGG
aaataaatgagaaaaacgtc

SEQ ID NO: 28404 - DNA, 20 bp, Artificial Sequence
  Description of Artificial Sequence: Synthetic oligonucleotide
  Target: SCNA; (+) strand; PAM type: NRG; PAM sequence: TGG
tgagaaaaacgtctggattt

SEQ ID NO: 28405 - DNA, 20 bp, Artificial Sequence
  Description of Artificial Sequence: Synthetic oligonucleotide
  Target: SCNA; (+) strand; PAM type: NRG; PAM sequence: AAG
tatatgcctgtatgcttaat

SEQ ID NO: 28406 - DNA, 20 bp, Artificial Sequence
  Description of Artificial Sequence: Synthetic oligonucleotide
  Target: SCNA; (+) strand; PAM type: NRG; PAM sequence: GAG
tatgcctgtatgcttaataa

SEQ ID NO: 28407 - DNA, 20 bp, Artificial Sequence
  Description of Artificial Sequence: Synthetic oligonucleotide
  Target: SCNA; (+) strand; PAM type: NRG; PAM sequence: CAG
atgcttaataagagaaccta

SEQ ID NO: 28408 - DNA, 20 bp, Artificial Sequence
  Description of Artificial Sequence: Synthetic oligonucleotide
  Target: SCNA; (+) strand; PAM type: NRG; PAM sequence: AGG
tgcttaataagagaacctac

SEQ ID NO: 28409 - DNA, 20 bp, Artificial Sequence
  Description of Artificial Sequence: Synthetic oligonucleotide
  Target: SCNA; (+) strand; PAM type: NRG; PAM sequence: GGG
gcttaataagagaacctaca

SEQ ID NO: 28410 - DNA, 20 bp, Artificial Sequence
  Description of Artificial Sequence: Synthetic oligonucleotide
  Target: SCNA; (+) strand; PAM type: NRG; PAM sequence: TAG
taataagagaacctacaggg

SEQ ID NO: 28411 - DNA, 20 bp, Artificial Sequence
  Description of Artificial Sequence: Synthetic oligonucleotide
  Target: SCNA; (+) strand; PAM type: NRG; PAM sequence: AGG
aataagagaacctacagggt

SEQ ID NO: 28412 - DNA, 20 bp, Artificial Sequence
  Description of Artificial Sequence: Synthetic oligonucleotide
  Target: SCNA; (+) strand; PAM type: NRG; PAM sequence: TAG
agaacctacagggtaggata

SEQ ID NO: 28413 - DNA, 20 bp, Artificial Sequence
  Description of Artificial Sequence: Synthetic oligonucleotide
  Target: SCNA; (+) strand; PAM type: NRG; PAM sequence: GAG
aacctacagggtaggatata

SEQ ID NO: 28414 - DNA, 20 bp, Artificial Sequence
  Description of Artificial Sequence: Synthetic oligonucleotide
  Target: SCNA; (+) strand; PAM type: NRG; PAM sequence: TAG
cagggtaggatatagagaca

SEQ ID NO: 28415 - DNA, 20 bp, Artificial Sequence
  Description of Artificial Sequence: Synthetic oligonucleotide
  Target: SCNA; (+) strand; PAM type: NRG; PAM sequence: AAG
gtaggatatagagacatagt

SEQ ID NO: 28416 - DNA, 20 bp, Artificial Sequence
  Description of Artificial Sequence: Synthetic oligonucleotide
  Target: SCNA; (+) strand; PAM type: NRG; PAM sequence: TAG
accttttattctctctctac

SEQ ID NO: 28417 - DNA, 20 bp, Artificial Sequence
  Description of Artificial Sequence: Synthetic oligonucleotide
  Target: SCNA; (+) strand; PAM type: NRG; PAM sequence: AGG
ccttttattctctctctact

SEQ ID NO: 28418 - DNA, 20 bp, Artificial Sequence
  Description of Artificial Sequence: Synthetic oligonucleotide
  Target: SCNA; (+) strand; PAM type: NRG; PAM sequence: TGG
tctctactaggccctatccc

SEQ ID NO: 28419 - DNA, 20 bp, Artificial Sequence
  Description of Artificial Sequence: Synthetic oligonucleotide
  Target: SCNA; (+) strand; PAM type: NRG; PAM sequence: TAG
actaggccctatccctggaa

SEQ ID NO: 28420 - DNA, 20 bp, Artificial Sequence
  Description of Artificial Sequence: Synthetic oligonucleotide
  Target: SCNA; (+) strand; PAM type: NRG; PAM sequence: TAG
ccctatccctggaatagctg

SEQ ID NO: 28421 - DNA, 20 bp, Artificial Sequence
  Description of Artificial Sequence: Synthetic oligonucleotide
  Target: SCNA; (+) strand; PAM type: NRG; PAM sequence: TGG
gtagacttttttttttcaaa

SEQ ID NO: 28422 - DNA, 20 bp, Artificial Sequence
  Description of Artificial Sequence: Synthetic oligonucleotide
  Target: SCNA; (+) strand; PAM type: NRG; PAM sequence: GGG
tagacttttttttttcaaat

SEQ ID NO: 28423 - DNA, 20 bp, Artificial Sequence
  Description of Artificial Sequence: Synthetic oligonucleotide
  Target: SCNA; (+) strand; PAM type: NRG; PAM sequence: CAG
aaatgggattgttttacgaa

SEQ ID NO: 28424 - DNA, 20 bp, Artificial Sequence
  Description of Artificial Sequence: Synthetic oligonucleotide
  Target: SCNA; (+) strand; PAM type: NRG; PAM sequence: TAG
ttgttttacgaacagtgaaa

SEQ ID NO: 28425 - DNA, 20 bp, Artificial Sequence
  Description of Artificial Sequence: Synthetic oligonucleotide
  Target: SCNA; (+) strand; PAM type: NRG; PAM sequence: CAG
tacgaacagtgaaatagact

SEQ ID NO: 28426 - DNA, 20 bp, Artificial Sequence
  Description of Artificial Sequence: Synthetic oligonucleotide
  Target: SCNA; (+) strand; PAM type: NRG; PAM sequence: CAG
acagtgaaatagactcagtt

SEQ ID NO: 28427 - DNA, 20 bp, Artificial Sequence
  Description of Artificial Sequence: Synthetic oligonucleotide
  Target: SCNA; (+) strand; PAM type: NRG; PAM sequence: CAG
ttatatctgcatttgacaca

SEQ ID NO: 28428 - DNA, 20 bp, Artificial Sequence
  Description of Artificial Sequence: Synthetic oligonucleotide
  Target: SCNA; (+) strand; PAM type: NRG; PAM sequence: AAG
atctgcatttgacacacaga

SEQ ID NO: 28429 - DNA, 20 bp, Artificial Sequence
  Description of Artificial Sequence: Synthetic oligonucleotide
  Target: SCNA; (+) strand; PAM type: NRG; PAM sequence: TGG
ttgacacacagaaagaaaaa

SEQ ID NO: 28430 - DNA, 20 bp, Artificial Sequence
  Description of Artificial Sequence: Synthetic oligonucleotide
  Target: SCNA; (+) strand; PAM type: NRG; PAM sequence: TGG
tggttatcaaaaaattacaa

SEQ ID NO: 28431 - DNA, 20 bp, Artificial Sequence
  Description of Artificial Sequence: Synthetic oligonucleotide
  Target: SCNA; (+) strand; PAM type: NRG; PAM sequence: AAG
gaatgaccctcattgctaat

SEQ ID NO: 28432 - DNA, 20 bp, Artificial Sequence
  Description of Artificial Sequence: Synthetic oligonucleotide
  Target: SCNA; (+) strand; PAM type: NRG; PAM sequence: AGG
aatgaccctcattgctaata

SEQ ID NO: 28433 - DNA, 20 bp, Artificial Sequence
  Description of Artificial Sequence: Synthetic oligonucleotide
  Target: SCNA; (+) strand; PAM type: NRG; PAM sequence: AAG
accctcattgctaataagga

SEQ ID NO: 28434 - DNA, 20 bp, Artificial Sequence
  Description of Artificial Sequence: Synthetic oligonucleotide
  Target: SCNA; (+) strand; PAM type: NRG; PAM sequence: AAG
gctaataaggaaagacttaa

SEQ ID NO: 28435 - DNA, 20 bp, Artificial Sequence
  Description of Artificial Sequence: Synthetic oligonucleotide
  Target: SCNA; (+) strand; PAM type: NRG; PAM sequence: TAG
gaaagacttaaaagctatat

SEQ ID NO: 28436 - DNA, 20 bp, Artificial Sequence
  Description of Artificial Sequence: Synthetic oligonucleotide
  Target: SCNA; (+) strand; PAM type: NRG; PAM sequence: AGG
aaagacttaaaagctatatt

SEQ ID NO: 28437 - DNA, 20 bp, Artificial Sequence
  Description of Artificial Sequence: Synthetic oligonucleotide
  Target: SCNA; (+) strand; PAM type: NRG; PAM sequence: CAG
ttaaaagctatattaggaaa

SEQ ID NO: 28438 - DNA, 20 bp, Artificial Sequence
  Description of Artificial Sequence: Synthetic oligonucleotide
  Target: SCNA; (+) strand; PAM type: NRG; PAM sequence: TGG
gctatattaggaaacagaaa

SEQ ID NO: 28439 - DNA, 20 bp, Artificial Sequence
  Description of Artificial Sequence: Synthetic oligonucleotide
  Target: SCNA; (+) strand; PAM type: NRG; PAM sequence: GAG
attaggaaacagaaatggct

SEQ ID NO: 28440 - DNA, 20 bp, Artificial Sequence
  Description of Artificial Sequence: Synthetic oligonucleotide
  Target: SCNA; (+) strand; PAM type: NRG; PAM sequence: AAG
ctgacctctttctccctaaa

SEQ ID NO: 28441 - DNA, 20 bp, Artificial Sequence
  Description of Artificial Sequence: Synthetic oligonucleotide
  Target: SCNA; (+) strand; PAM type: NRG; PAM sequence: AAG
tctccctaaaaagcttattc

SEQ ID NO: 28442 - DNA, 20 bp, Artificial Sequence
  Description of Artificial Sequence: Synthetic oligonucleotide
  Target: SCNA; (+) strand; PAM type: NRG; PAM sequence: TAG
gttctttttaaataaacctg

SEQ ID NO: 28443 - DNA, 20 bp, Artificial Sequence
  Description of Artificial Sequence: Synthetic oligonucleotide
  Target: SCNA; (+) strand; PAM type: NRG; PAM sequence: AGG
ttctttttaaataaacctgt

SEQ ID NO: 28444 - DNA, 20 bp, Artificial Sequence
  Description of Artificial Sequence: Synthetic oligonucleotide
  Target: SCNA; (+) strand; PAM type: NRG; PAM sequence: GGG
tctttttaaataaacctgta

SEQ ID NO: 28445 - DNA, 20 bp, Artificial Sequence
  Description of Artificial Sequence: Synthetic oligonucleotide
  Target: SCNA; (+) strand; PAM type: NRG; PAM sequence: TAG
aataaacctgtagggttgaa

SEQ ID NO: 28446 - DNA, 20 bp, Artificial Sequence
  Description of Artificial Sequence: Synthetic oligonucleotide
  Target: SCNA; (+) strand; PAM type: NRG; PAM sequence: CAG
ttatcatttcgtactcgtcc

SEQ ID NO: 28447 - DNA, 20 bp, Artificial Sequence
  Description of Artificial Sequence: Synthetic oligonucleotide
  Target: SCNA; (+) strand; PAM type: NRG; PAM sequence: AAG
tttcgtactcgtcccagctg

SEQ ID NO: 28448 - DNA, 20 bp, Artificial Sequence
  Description of Artificial Sequence: Synthetic oligonucleotide
  Target: SCNA; (+) strand; PAM type: NRG; PAM sequence: CAG
agctgaagtgctctataaaa

SEQ ID NO: 28449 - DNA, 20 bp, Artificial Sequence
  Description of Artificial Sequence: Synthetic oligonucleotide
  Target: SCNA; (+) strand; PAM type: NRG; PAM sequence: GAG
tgctctataaaacagatcat

SEQ ID NO: 28450 - DNA, 20 bp, Artificial Sequence
  Description of Artificial Sequence: Synthetic oligonucleotide
  Target: SCNA; (+) strand; PAM type: NRG; PAM sequence: AAG
ataaaacagatcatgagacg

SEQ ID NO: 28451 - DNA, 20 bp, Artificial Sequence
  Description of Artificial Sequence: Synthetic oligonucleotide
  Target: SCNA; (+) strand; PAM type: NRG; PAM sequence: TAG
gaagcttccttcactgctaa

SEQ ID NO: 28452 - DNA, 20 bp, Artificial Sequence
  Description of Artificial Sequence: Synthetic oligonucleotide
  Target: SCNA; (+) strand; PAM type: NRG; PAM sequence: TGG
cttcactgctaatagcttat

SEQ ID NO: 28453 - DNA, 20 bp, Artificial Sequence
  Description of Artificial Sequence: Synthetic oligonucleotide
  Target: SCNA; (+) strand; PAM type: NRG; PAM sequence: GGG
ttcactgctaatagcttatt

SEQ ID NO: 28454 - DNA, 20 bp, Artificial Sequence
  Description of Artificial Sequence: Synthetic oligonucleotide
  Target: SCNA; (+) strand; PAM type: NRG; PAM sequence: AAG
actgctaatagcttattggg

SEQ ID NO: 28455 - DNA, 20 bp, Artificial Sequence
  Description of Artificial Sequence: Synthetic oligonucleotide
  Target: SCNA; (+) strand; PAM type: NRG; PAM sequence: CAG
cttattgggaagtacaattc

SEQ ID NO: 28456 - DNA, 20 bp, Artificial Sequence
  Description of Artificial Sequence: Synthetic oligonucleotide
  Target: SCNA; (+) strand; PAM type: NRG; PAM sequence: AGG
ttattgggaagtacaattcc

SEQ ID NO: 28457 - DNA, 20 bp, Artificial Sequence
  Description of Artificial Sequence: Synthetic oligonucleotide
  Target: SCNA; (+) strand; PAM type: NRG; PAM sequence: GGG
tattgggaagtacaattcca

SEQ ID NO: 28458 - DNA, 20 bp, Artificial Sequence
  Description of Artificial Sequence: Synthetic oligonucleotide
  Target: SCNA; (+) strand; PAM type: NRG; PAM sequence: AAG
tgggaagtacaattccaggg

SEQ ID NO: 28459 - DNA, 20 bp, Artificial Sequence
  Description of Artificial Sequence: Synthetic oligonucleotide
  Target: SCNA; (+) strand; PAM type: NRG; PAM sequence: AAG
gtacaattccagggaagtga

SEQ ID NO: 28460 - DNA, 20 bp, Artificial Sequence
  Description of Artificial Sequence: Synthetic oligonucleotide
  Target: SCNA; (+) strand; PAM type: NRG; PAM sequence: AAG
attccagggaagtgaaagtg

SEQ ID NO: 28461 - DNA, 20 bp, Artificial Sequence
  Description of Artificial Sequence: Synthetic oligonucleotide
  Target: SCNA; (+) strand; PAM type: NRG; PAM sequence: AGG
ttccagggaagtgaaagtga

SEQ ID NO: 28462 - DNA, 20 bp, Artificial Sequence
  Description of Artificial Sequence: Synthetic oligonucleotide
  Target: SCNA; (+) strand; PAM type: NRG; PAM sequence: AAG
gggaagtgaaagtgaaggaa

SEQ ID NO: 28463 - DNA, 20 bp, Artificial Sequence
  Description of Artificial Sequence: Synthetic oligonucleotide
  Target: SCNA; (+) strand; PAM type: NRG; PAM sequence: AGG
ggaagtgaaagtgaaggaaa

SEQ ID NO: 28464 - DNA, 20 bp, Artificial Sequence
  Description of Artificial Sequence: Synthetic oligonucleotide
  Target: SCNA; (+) strand; PAM type: NRG; PAM sequence: GGG
gaagtgaaagtgaaggaaaa

SEQ ID NO: 28465 - DNA, 20 bp, Artificial Sequence
  Description of Artificial Sequence: Synthetic oligonucleotide
  Target: SCNA; (+) strand; PAM type: NRG; PAM sequence: AAG
gtgaaagtgaaggaaaaggg

SEQ ID NO: 28466 - DNA, 20 bp, Artificial Sequence
  Description of Artificial Sequence: Synthetic oligonucleotide
  Target: SCNA; (+) strand; PAM type: NRG; PAM sequence: AAG
aaggaaaagggaagtgatac

SEQ ID NO: 28467 - DNA, 20 bp, Artificial Sequence
  Description of Artificial Sequence: Synthetic oligonucleotide
  Target: SCNA; (+) strand; PAM type: NRG; PAM sequence: AGG
aggaaaagggaagtgataca

SEQ ID NO: 28468 - DNA, 20 bp, Artificial Sequence
  Description of Artificial Sequence: Synthetic oligonucleotide
  Target: SCNA; (+) strand; PAM type: NRG; PAM sequence: GAG
gaaaagggaagtgatacaag

SEQ ID NO: 28469 - DNA, 20 bp, Artificial Sequence
  Description of Artificial Sequence: Synthetic oligonucleotide
  Target: SCNA; (+) strand; PAM type: NRG; PAM sequence: AAG
aagggaagtgatacaaggag

SEQ ID NO: 28470 - DNA, 20 bp, Artificial Sequence
  Description of Artificial Sequence: Synthetic oligonucleotide
  Target: SCNA; (+) strand; PAM type: NRG; PAM sequence: TAG
ggaagtgatacaaggagaag

SEQ ID NO: 28471 - DNA, 20 bp, Artificial Sequence
  Description of Artificial Sequence: Synthetic oligonucleotide
  Target: SCNA; (+) strand; PAM type: NRG; PAM sequence: AGG
gaagtgatacaaggagaagt

SEQ ID NO: 28472 - DNA, 20 bp, Artificial Sequence
  Description of Artificial Sequence: Synthetic oligonucleotide
  Target: SCNA; (+) strand; PAM type: NRG; PAM sequence: CAG
ggagaagtaggaaaaaattt

SEQ ID NO: 28473 - DNA, 20 bp, Artificial Sequence
  Description of Artificial Sequence: Synthetic oligonucleotide
  Target: SCNA; (+) strand; PAM type: NRG; PAM sequence: TAG
aaaatttcagctactgtctt

SEQ ID NO: 28474 - DNA, 20 bp, Artificial Sequence
  Description of Artificial Sequence: Synthetic oligonucleotide
  Target: SCNA; (+) strand; PAM type: NRG; PAM sequence: AGG
aaatttcagctactgtcttt

SEQ ID NO: 28475 - DNA, 20 bp, Artificial Sequence
  Description of Artificial Sequence: Synthetic oligonucleotide
  Target: SCNA; (+) strand; PAM type: NRG; PAM sequence: CAG
tgtctttaggaatacaacta

SEQ ID NO: 28476 - DNA, 20 bp, Artificial Sequence
  Description of Artificial Sequence: Synthetic oligonucleotide
  Target: SCNA; (+) strand; PAM type: NRG; PAM sequence: TAG
gttttgaaccatattgtatt

SEQ ID NO: 28477 - DNA, 20 bp, Artificial Sequence
  Description of Artificial Sequence: Synthetic oligonucleotide
  Target: SCNA; (+) strand; PAM type: NRG; PAM sequence: TAG
ccatattgtatttagatacc

SEQ ID NO: 28478 - DNA, 20 bp, Artificial Sequence
  Description of Artificial Sequence: Synthetic oligonucleotide
  Target: SCNA; (+) strand; PAM type: NRG; PAM sequence: AAG
tacctagtaatactttctgt

SEQ ID NO: 28479 - DNA, 20 bp, Artificial Sequence
  Description of Artificial Sequence: Synthetic oligonucleotide
  Target: SCNA; (+) strand; PAM type: NRG; PAM sequence: AGG
acctagtaatactttctgta

SEQ ID NO: 28480 - DNA, 20 bp, Artificial Sequence
  Description of Artificial Sequence: Synthetic oligonucleotide
  Target: SCNA; (+) strand; PAM type: NRG; PAM sequence: AAG
atttaaaatgacacataata

SEQ ID NO: 28481 - DNA, 20 bp, Artificial Sequence
  Description of Artificial Sequence: Synthetic oligonucleotide
  Target: SCNA; (+) strand; PAM type: NRG; PAM sequence: AGG
tttaaaatgacacataataa

SEQ ID NO: 28482 - DNA, 20 bp, Artificial Sequence
  Description of Artificial Sequence: Synthetic oligonucleotide
  Target: SCNA; (+) strand; PAM type: NRG; PAM sequence: TAG
ctttccaaaccacactcttc

SEQ ID NO: 28483 - DNA, 20 bp, Artificial Sequence
  Description of Artificial Sequence: Synthetic oligonucleotide
  Target: SCNA; (+) strand; PAM type: NRG; PAM sequence: TAG
cacactcttctagaatcatc

SEQ ID NO: 28484 - DNA, 20 bp, Artificial Sequence
  Description of Artificial Sequence: Synthetic oligonucleotide
  Target: SCNA; (+) strand; PAM type: NRG; PAM sequence: AGG
acactcttctagaatcatct

SEQ ID NO: 28485 - DNA, 20 bp, Artificial Sequence
  Description of Artificial Sequence: Synthetic oligonucleotide
  Target: SCNA; (+) strand; PAM type: NRG; PAM sequence: GGG
cactcttctagaatcatcta

SEQ ID NO: 28486 - DNA, 20 bp, Artificial Sequence
  Description of Artificial Sequence: Synthetic oligonucleotide
  Target: SCNA; (+) strand; PAM type: NRG; PAM sequence: CAG
tagggcccttgttaaaaatg

SEQ ID NO: 28487 - DNA, 20 bp, Artificial Sequence
  Description of Artificial Sequence: Synthetic oligonucleotide
  Target: SCNA; (+) strand; PAM type: NRG; PAM sequence: AGG
agggcccttgttaaaaatgc

SEQ ID NO: 28488 - DNA, 20 bp, Artificial Sequence
  Description of Artificial Sequence: Synthetic oligonucleotide
  Target: SCNA; (+) strand; PAM type: NRG; PAM sequence: TAG
ttgttaaaaatgcaggtttg

SEQ ID NO: 28489 - DNA, 20 bp, Artificial Sequence
  Description of Artificial Sequence: Synthetic oligonucleotide
  Target: SCNA; (+) strand; PAM type: NRG; PAM sequence: AGG
tgttaaaaatgcaggtttgt

SEQ ID NO: 28490 - DNA, 20 bp, Artificial Sequence
  Description of Artificial Sequence: Synthetic oligonucleotide
  Target: SCNA; (+) strand; PAM type: NRG; PAM sequence: GGG
gttaaaaatgcaggtttgta

SEQ ID NO: 28491 - DNA, 20 bp, Artificial Sequence
  Description of Artificial Sequence: Synthetic oligonucleotide
  Target: SCNA; (+) strand; PAM type: NRG; PAM sequence: GAG
gcaggtttgtagggccttgt

SEQ ID NO: 28492 - DNA, 20 bp, Artificial Sequence
  Description of Artificial Sequence: Synthetic oligonucleotide
  Target: SCNA; (+) strand; PAM type: NRG; PAM sequence: AAG
ggccttgtgagtgtcttgtt

SEQ ID NO: 28493 - DNA, 20 bp, Artificial Sequence
  Description of Artificial Sequence: Synthetic oligonucleotide
  Target: SCNA; (+) strand; PAM type: NRG; PAM sequence: TGG
gtcttgttaagtatgttcct

SEQ ID NO: 28494 - DNA, 20 bp, Artificial Sequence
  Description of Artificial Sequence: Synthetic oligonucleotide
  Target: SCNA; (+) strand; PAM type: NRG; PAM sequence: TGG
ccaattgtttgtaaaccctg

SEQ ID NO: 28495 - DNA, 20 bp, Artificial Sequence
  Description of Artificial Sequence: Synthetic oligonucleotide
  Target: SCNA; (+) strand; PAM type: NRG; PAM sequence: TAG
ccctgtggtataatttaata

SEQ ID NO: 28496 - DNA, 20 bp, Artificial Sequence
  Description of Artificial Sequence: Synthetic oligonucleotide
  Target: SCNA; (+) strand; PAM type: NRG; PAM sequence: GAG
ctgtggtataatttaatata

SEQ ID NO: 28497 - DNA, 20 bp, Artificial Sequence
  Description of Artificial Sequence: Synthetic oligonucleotide
  Target: SCNA; (+) strand; PAM type: NRG; PAM sequence: CAG
tataccaatgtacttgctgt

SEQ ID NO: 28498 - DNA, 20 bp, Artificial Sequence
  Description of Artificial Sequence: Synthetic oligonucleotide
  Target: SCNA; (+) strand; PAM type: NRG; PAM sequence: AAG
gtgaataattttttttaaaa

SEQ ID NO: 28499 - DNA, 20 bp, Artificial Sequence
  Description of Artificial Sequence: Synthetic oligonucleotide
  Target: SCNA; (+) strand; PAM type: NRG; PAM sequence: AAG
aaaaagatatgctcattttg

SEQ ID NO: 28500 - DNA, 20 bp, Artificial Sequence
  Description of Artificial Sequence: Synthetic oligonucleotide
  Target: SCNA; (+) strand; PAM type: NRG; PAM sequence: TGG
ttttgaagtccatcaaatgt

SEQ ID NO: 28501 - DNA, 20 bp, Artificial Sequence
  Description of Artificial Sequence: Synthetic oligonucleotide
  Target: SCNA; (+) strand; PAM type: NRG; PAM sequence: GAG
atcaaatgttggcaaatgtt

SEQ ID NO: 28502 - DNA, 20 bp, Artificial Sequence
  Description of Artificial Sequence: Synthetic oligonucleotide
  Target: SCNA; (+) strand; PAM type: NRG; PAM sequence: AGG
tcaaatgttggcaaatgttg

SEQ ID NO: 28503 - DNA, 20 bp, Artificial Sequence
  Description of Artificial Sequence: Synthetic oligonucleotide
  Target: SCNA; (+) strand; PAM type: NRG; PAM sequence: GGG
caaatgttggcaaatgttga

SEQ ID NO: 28504 - DNA, 20 bp, Artificial Sequence
  Description of Artificial Sequence: Synthetic oligonucleotide
  Target: SCNA; (+) strand; PAM type: NRG; PAM sequence: AAG
caaatgttgagggttatctg

SEQ ID NO: 28505 - DNA, 20 bp, Artificial Sequence
  Description of Artificial Sequence: Synthetic oligonucleotide
  Target: SCNA; (+) strand; PAM type: NRG; PAM sequence: TGG
tgagggttatctgaagacac

SEQ ID NO: 28506 - DNA, 20 bp, Artificial Sequence
  Description of Artificial Sequence: Synthetic oligonucleotide
  Target: SCNA; (+) strand; PAM type: NRG; PAM sequence: GGG
gagggttatctgaagacact

SEQ ID NO: 28507 - DNA, 20 bp, Artificial Sequence
  Description of Artificial Sequence: Synthetic oligonucleotide
  Target: SCNA; (+) strand; PAM type: NRG; PAM sequence: AAG
ggttatctgaagacactggg

SEQ ID NO: 28508 - DNA, 20 bp, Artificial Sequence
  Description of Artificial Sequence: Synthetic oligonucleotide
  Target: SCNA; (+) strand; PAM type: NRG; PAM sequence: TGG
agacactgggaagtaatcca

SEQ ID NO: 28509 - DNA, 20 bp, Artificial Sequence
  Description of Artificial Sequence: Synthetic oligonucleotide
  Target: SCNA; (+) strand; PAM type: NRG; PAM sequence: TAG
atccatggtgatcgttaaaa

SEQ ID NO: 28510 - DNA, 20 bp, Artificial Sequence
  Description of Artificial Sequence: Synthetic oligonucleotide
  Target: SCNA; (+) strand; PAM type: NRG; PAM sequence: AAG
atggtgatcgttaaaatagc

SEQ ID NO: 28511 - DNA, 20 bp, Artificial Sequence
  Description of Artificial Sequence: Synthetic oligonucleotide
  Target: SCNA; (+) strand; PAM type: NRG; PAM sequence: AGG
tggtgatcgttaaaatagca

SEQ ID NO: 28512 - DNA, 20 bp, Artificial Sequence
  Description of Artificial Sequence: Synthetic oligonucleotide
  Target: SCNA; (+) strand; PAM type: NRG; PAM sequence: TGG
gcaaggtttcatcaattatc

SEQ ID NO: 28513 - DNA, 20 bp, Artificial Sequence
  Description of Artificial Sequence: Synthetic oligonucleotide
  Target: SCNA; (+) strand; PAM type: NRG; PAM sequence: AAG
ctggtatctatgctttgtca

SEQ ID NO: 28514 - DNA, 20 bp, Artificial Sequence
  Description of Artificial Sequence: Synthetic oligonucleotide
  Target: SCNA; (+) strand; PAM type: NRG; PAM sequence: TAG
tatctatgctttgtcaaagt

SEQ ID NO: 28515 - DNA, 20 bp, Artificial Sequence
  Description of Artificial Sequence: Synthetic oligonucleotide
  Target: SCNA; (+) strand; PAM type: NRG; PAM sequence: TAG
ctttgtcaaagttagaaatg

SEQ ID NO: 28516 - DNA, 20 bp, Artificial Sequence
  Description of Artificial Sequence: Synthetic oligonucleotide
  Target: SCNA; (+) strand; PAM type: NRG; PAM sequence: GAG
ttgtcaaagttagaaatgta

SEQ ID NO: 28517 - DNA, 20 bp, Artificial Sequence
  Description of Artificial Sequence: Synthetic oligonucleotide
  Target: SCNA; (+) strand; PAM type: NRG; PAM sequence: TGG
tctaaattaaaacttttatg

SEQ ID NO: 28518 - DNA, 20 bp, Artificial Sequence
  Description of Artificial Sequence: Synthetic oligonucleotide
  Target: SCNA; (+) strand; PAM type: NRG; PAM sequence: GGG
ctaaattaaaacttttatgt

SEQ ID NO: 28519 - DNA, 20 bp, Artificial Sequence
  Description of Artificial Sequence: Synthetic oligonucleotide
  Target: SCNA; (+) strand; PAM type: NRG; PAM sequence: AAG
aattaaaacttttatgtggg

SEQ ID NO: 28520 - DNA, 20 bp, Artificial Sequence
  Description of Artificial Sequence: Synthetic oligonucleotide
  Target: SCNA; (+) strand; PAM type: NRG; PAM sequence: AAG
gggaagaaaaattgaaattc

SEQ ID NO: 28521 - DNA, 20 bp, Artificial Sequence
  Description of Artificial Sequence: Synthetic oligonucleotide
  Target: SCNA; (+) strand; PAM type: NRG; PAM sequence: AGG
ggaagaaaaattgaaattca

SEQ ID NO: 28522 - DNA, 20 bp, Artificial Sequence
  Description of Artificial Sequence: Synthetic oligonucleotide
  Target: SCNA; (+) strand; PAM type: NRG; PAM sequence: TGG
gaaaaattgaaattcaaggc

SEQ ID NO: 28523 - DNA, 20 bp, Artificial Sequence
  Description of Artificial Sequence: Synthetic oligonucleotide
  Target: SCNA; (+) strand; PAM type: NRG; PAM sequence: TGG
aattgaaattcaaggctggt

SEQ ID NO: 28524 - DNA, 20 bp, Artificial Sequence
  Description of Artificial Sequence: Synthetic oligonucleotide
  Target: SCNA; (+) strand; PAM type: NRG; PAM sequence: TGG
attcaaggctggttggtctt

SEQ ID NO: 28525 - DNA, 20 bp, Artificial Sequence
  Description of Artificial Sequence: Synthetic oligonucleotide
  Target: SCNA; (+) strand; PAM type: NRG; PAM sequence: AAG
gttggtctttggtataccca

SEQ ID NO: 28526 - DNA, 20 bp, Artificial Sequence
  Description of Artificial Sequence: Synthetic oligonucleotide
  Target: SCNA; (+) strand; PAM type: NRG; PAM sequence: AAG
tttggtatacccaaagaaca

SEQ ID NO: 28527 - DNA, 20 bp, Artificial Sequence
  Description of Artificial Sequence: Synthetic oligonucleotide
  Target: SCNA; (+) strand; PAM type: NRG; PAM sequence: GAG
tggtatacccaaagaacaaa

SEQ ID NO: 28528 - DNA, 20 bp, Artificial Sequence
  Description of Artificial Sequence: Synthetic oligonucleotide
  Target: SCNA; (+) strand; PAM type: NRG; PAM sequence: AGG
ggtatacccaaagaacaaag

SEQ ID NO: 28529 - DNA, 20 bp, Artificial Sequence
  Description of Artificial Sequence: Synthetic oligonucleotide
  Target: SCNA; (+) strand; PAM type: NRG; PAM sequence: GAG
tatacccaaagaacaaagag

SEQ ID NO: 28530 - DNA, 20 bp, Artificial Sequence
  Description of Artificial Sequence: Synthetic oligonucleotide
  Target: SCNA; (+) strand; PAM type: NRG; PAM sequence: AGG
atacccaaagaacaaagagg

SEQ ID NO: 28531 - DNA, 20 bp, Artificial Sequence
  Description of Artificial Sequence: Synthetic oligonucleotide
  Target: SCNA; (+) strand; PAM type: NRG; PAM sequence: TGG
ccaaagaacaaagaggaggt

SEQ ID NO: 28532 - DNA, 20 bp, Artificial Sequence
  Description of Artificial Sequence: Synthetic oligonucleotide
  Target: SCNA; (+) strand; PAM type: NRG; PAM sequence: GAG
aaagaacaaagaggaggttg

SEQ ID NO: 28533 - DNA, 20 bp, Artificial Sequence
  Description of Artificial Sequence: Synthetic oligonucleotide
  Target: SCNA; (+) strand; PAM type: NRG; PAM sequence: AGG
aagaacaaagaggaggttgg

SEQ ID NO: 28534 - DNA, 20 bp, Artificial Sequence
  Description of Artificial Sequence: Synthetic oligonucleotide
  Target: SCNA; (+) strand; PAM type: NRG; PAM sequence: AAG
aggttggaggtgttctgaaa

SEQ ID NO: 28535 - DNA, 20 bp, Artificial Sequence
  Description of Artificial Sequence: Synthetic oligonucleotide
  Target: SCNA; (+) strand; PAM type: NRG; PAM sequence: GAG
gttggaggtgttctgaaaaa

SEQ ID NO: 28536 - DNA, 20 bp, Artificial Sequence
  Description of Artificial Sequence: Synthetic oligonucleotide
  Target: SCNA; (+) strand; PAM type: NRG; PAM sequence: GAG
aatgatacacgctgctcttt

SEQ ID NO: 28537 - DNA, 20 bp, Artificial Sequence
  Description of Artificial Sequence: Synthetic oligonucleotide
  Target: SCNA; (+) strand; PAM type: NRG; PAM sequence: AAG
atacacgctgctctttgaga

SEQ ID NO: 28538 - DNA, 20 bp, Artificial Sequence
  Description of Artificial Sequence: Synthetic oligonucleotide
  Target: SCNA; (+) strand; PAM type: NRG; PAM sequence: TGG
tgctctttgagaaagttcat

SEQ ID NO: 28539 - DNA, 20 bp, Artificial Sequence
  Description of Artificial Sequence: Synthetic oligonucleotide
  Target: SCNA; (+) strand; PAM type: NRG; PAM sequence: TAG
ttgagaaagttcattggcac

SEQ ID NO: 28540 - DNA, 20 bp, Artificial Sequence
  Description of Artificial Sequence: Synthetic oligonucleotide
  Target: SCNA; (+) strand; PAM type: NRG; PAM sequence: AAG
gaaagttcattggcactaga

SEQ ID NO: 28541 - DNA, 20 bp, Artificial Sequence
  Description of Artificial Sequence: Synthetic oligonucleotide
  Target: SCNA; (+) strand; PAM type: NRG; PAM sequence: AGG
aaagttcattggcactagaa

SEQ ID NO: 28542 - DNA, 20 bp, Artificial Sequence
  Description of Artificial Sequence: Synthetic oligonucleotide
  Target: SCNA; (+) strand; PAM type: NRG; PAM sequence: TGG
cattggcactagaaaggttc

SEQ ID NO: 28543 - DNA, 20 bp, Artificial Sequence
  Description of Artificial Sequence: Synthetic oligonucleotide
  Target: SCNA; (+) strand; PAM type: NRG; PAM sequence: GGG
attggcactagaaaggttct

SEQ ID NO: 28544 - DNA, 20 bp, Artificial Sequence
  Description of Artificial Sequence: Synthetic oligonucleotide
  Target: SCNA; (+) strand; PAM type: NRG; PAM sequence: GGG
ttggcactagaaaggttctg

SEQ ID NO: 28545 - DNA, 20 bp, Artificial Sequence
  Description of Artificial Sequence: Synthetic oligonucleotide
  Target: SCNA; (+) strand; PAM type: NRG; PAM sequence: GAG
ggcactagaaaggttctggg

SEQ ID NO: 28546 - DNA, 20 bp, Artificial Sequence
  Description of Artificial Sequence: Synthetic oligonucleotide
  Target: SCNA; (+) strand; PAM type: NRG; PAM sequence: TAG
ctagaaaggttctggggagc

SEQ ID NO: 28547 - DNA, 20 bp, Artificial Sequence
  Description of Artificial Sequence: Synthetic oligonucleotide
  Target: SCNA; (+) strand; PAM type: NRG; PAM sequence: AAG
aaaggttctggggagctagt

SEQ ID NO: 28548 - DNA, 20 bp, Artificial Sequence
  Description of Artificial Sequence: Synthetic oligonucleotide
  Target: SCNA; (+) strand; PAM type: NRG; PAM sequence: TGG
gggagctagtaagcttcaat

SEQ ID NO: 28549 - DNA, 20 bp, Artificial Sequence
  Description of Artificial Sequence: Synthetic oligonucleotide
  Target: SCNA; (+) strand; PAM type: NRG; PAM sequence: GAG
gctagtaagcttcaattggt

SEQ ID NO: 28550 - DNA, 20 bp, Artificial Sequence
  Description of Artificial Sequence: Synthetic oligonucleotide
  Target: SCNA; (+) strand; PAM type: NRG; PAM sequence: CAG
aagcttcaattggtgagtga

SEQ ID NO: 28551 - DNA, 20 bp, Artificial Sequence
  Description of Artificial Sequence: Synthetic oligonucleotide
  Target: SCNA; (+) strand; PAM type: NRG; PAM sequence: TGG
cttcaattggtgagtgacag

SEQ ID NO: 28552 - DNA, 20 bp, Artificial Sequence
  Description of Artificial Sequence: Synthetic oligonucleotide
  Target: SCNA; (+) strand; PAM type: NRG; PAM sequence: TGG
caattggtgagtgacagtgg

SEQ ID NO: 28553 - DNA, 20 bp, Artificial Sequence
  Description of Artificial Sequence: Synthetic oligonucleotide
  Target: SCNA; (+) strand; PAM type: NRG; PAM sequence: GGG
aattggtgagtgacagtggt

SEQ ID NO: 28554 - DNA, 20 bp, Artificial Sequence
  Description of Artificial Sequence: Synthetic oligonucleotide
  Target: SCNA; (+) strand; PAM type: NRG; PAM sequence: TAG
gtgacagtggtgggcaaaat

SEQ ID NO: 28555 - DNA, 20 bp, Artificial Sequence
  Description of Artificial Sequence: Synthetic oligonucleotide
  Target: SCNA; (+) strand; PAM type: NRG; PAM sequence: TAG
gtggtgggcaaaattagtcc

SEQ ID NO: 28556 - DNA, 20 bp, Artificial Sequence
  Description of Artificial Sequence: Synthetic oligonucleotide
  Target: SCNA; (+) strand; PAM type: NRG; PAM sequence: GAG
ggtgggcaaaattagtccta

SEQ ID NO: 28557 - DNA, 20 bp, Artificial Sequence
  Description of Artificial Sequence: Synthetic oligonucleotide
  Target: SCNA; (+) strand; PAM type: NRG; PAM sequence: CAG
caaaattagtcctagagctg

SEQ ID NO: 28558 - DNA, 20 bp, Artificial Sequence
  Description of Artificial Sequence: Synthetic oligonucleotide
  Target: SCNA; (+) strand; PAM type: NRG; PAM sequence: AAG
attagtcctagagctgcagc

SEQ ID NO: 28559 - DNA, 20 bp, Artificial Sequence
  Description of Artificial Sequence: Synthetic oligonucleotide
  Target: SCNA; (+) strand; PAM type: NRG; PAM sequence: CAG
agagctgcagcaagtttttt

SEQ ID NO: 28560 - DNA, 20 bp, Artificial Sequence
  Description of Artificial Sequence: Synthetic oligonucleotide
  Target: SCNA; (+) strand; PAM type: NRG; PAM sequence: CAG
gctgcagcaagttttttcag

SEQ ID NO: 28561 - DNA, 20 bp, Artificial Sequence
  Description of Artificial Sequence: Synthetic oligonucleotide
  Target: SCNA; (+) strand; PAM type: NRG; PAM sequence: CAG
gcaagttttttcagcagtta

SEQ ID NO: 28562 - DNA, 20 bp, Artificial Sequence
  Description of Artificial Sequence: Synthetic oligonucleotide
  Target: SCNA; (+) strand; PAM type: NRG; PAM sequence: TGG
tcagcagttacagaaaaaat

SEQ ID NO: 28563 - DNA, 20 bp, Artificial Sequence
  Description of Artificial Sequence: Synthetic oligonucleotide
  Target: SCNA; (+) strand; PAM type: NRG; PAM sequence: CAG
gttacagaaaaaattggtcc

SEQ ID NO: 28564 - DNA, 20 bp, Artificial Sequence
  Description of Artificial Sequence: Synthetic oligonucleotide
  Target: SCNA; (+) strand; PAM type: NRG; PAM sequence: AGG
ttacagaaaaaattggtccc

SEQ ID NO: 28565 - DNA, 20 bp, Artificial Sequence
  Description of Artificial Sequence: Synthetic oligonucleotide
  Target: SCNA; (+) strand; PAM type: NRG; PAM sequence: CAG
aaattggtcccaggttacaa

SEQ ID NO: 28566 - DNA, 20 bp, Artificial Sequence
  Description of Artificial Sequence: Synthetic oligonucleotide
  Target: SCNA; (+) strand; PAM type: NRG; PAM sequence: AGG
aattggtcccaggttacaac

SEQ ID NO: 28567 - DNA, 20 bp, Artificial Sequence
  Description of Artificial Sequence: Synthetic oligonucleotide
  Target: SCNA; (+) strand; PAM type: NRG; PAM sequence: CAG
tggtcccaggttacaacagg

SEQ ID NO: 28568 - DNA, 20 bp, Artificial Sequence
  Description of Artificial Sequence: Synthetic oligonucleotide
  Target: SCNA; (+) strand; PAM type: NRG; PAM sequence: CAG
caggttacaacaggcagcct

SEQ ID NO: 28569 - DNA, 20 bp, Artificial Sequence
  Description of Artificial Sequence: Synthetic oligonucleotide
  Target: SCNA; (+) strand; PAM type: NRG; PAM sequence: CGG
caacaggcagcctcagcatg

SEQ ID NO: 28570 - DNA, 20 bp, Artificial Sequence
  Description of Artificial Sequence: Synthetic oligonucleotide
  Target: SCNA; (+) strand; PAM type: NRG; PAM sequence: TAG
agcctcagcatgcggacttg

SEQ ID NO: 28571 - DNA, 20 bp, Artificial Sequence
  Description of Artificial Sequence: Synthetic oligonucleotide
  Target: SCNA; (+) strand; PAM type: NRG; PAM sequence: TGG
cttgtagaaaattacacttt

SEQ ID NO: 28572 - DNA, 20 bp, Artificial Sequence
  Description of Artificial Sequence: Synthetic oligonucleotide
  Target: SCNA; (+) strand; PAM type: NRG; PAM sequence: GAG
tgtagaaaattacacttttg

SEQ ID NO: 28573 - DNA, 20 bp, Artificial Sequence
  Description of Artificial Sequence: Synthetic oligonucleotide
  Target: SCNA; (+) strand; PAM type: NRG; PAM sequence: CAG
ttcttgaatgcttttcctcc

SEQ ID NO: 28574 - DNA, 20 bp, Artificial Sequence
  Description of Artificial Sequence: Synthetic oligonucleotide
  Target: SCNA; (+) strand; PAM type: NRG; PAM sequence: AGG
tcttgaatgcttttcctccc

SEQ ID NO: 28575 - DNA, 20 bp, Artificial Sequence
  Description of Artificial Sequence: Synthetic oligonucleotide
  Target: SCNA; (+) strand; PAM type: NRG; PAM sequence: TAG
cccaggcttcttgattgttt

SEQ ID NO: 28576 - DNA, 20 bp, Artificial Sequence
  Description of Artificial Sequence: Synthetic oligonucleotide
  Target: SCNA; (+) strand; PAM type: NRG; PAM sequence: TGG
ggcttcttgattgttttagt

SEQ ID NO: 28577 - DNA, 20 bp, Artificial Sequence
  Description of Artificial Sequence: Synthetic oligonucleotide
  Target: SCNA; (+) strand; PAM type: NRG; PAM sequence: GGG
gcttcttgattgttttagtt

SEQ ID NO: 28578 - DNA, 20 bp, Artificial Sequence
  Description of Artificial Sequence: Synthetic oligonucleotide
  Target: SCNA; (+) strand; PAM type: NRG; PAM sequence: AAG
ttgttttagttgggtataac

SEQ ID NO: 28579 - DNA, 20 bp, Artificial Sequence
  Description of Artificial Sequence: Synthetic oligonucleotide
  Target: SCNA; (+) strand; PAM type: NRG; PAM sequence: CAG
atttgtgtgatcaactttca

SEQ ID NO: 28580 - DNA, 20 bp, Artificial Sequence
  Description of Artificial Sequence: Synthetic oligonucleotide
  Target: SCNA; (+) strand; PAM type: NRG; PAM sequence: AAG
ttcacagccttaaacattca

SEQ ID NO: 28581 - DNA, 20 bp, Artificial Sequence
  Description of Artificial Sequence: Synthetic oligonucleotide
  Target: SCNA; (+) strand; PAM type: NRG; PAM sequence: CAG
acagccttaaacattcaaag

SEQ ID NO: 28582 - DNA, 20 bp, Artificial Sequence
  Description of Artificial Sequence: Synthetic oligonucleotide
  Target: SCNA; (+) strand; PAM type: NRG; PAM sequence: CAG
gccttaaacattcaaagcag

SEQ ID NO: 28583 - DNA, 20 bp, Artificial Sequence
  Description of Artificial Sequence: Synthetic oligonucleotide
  Target: SCNA; (+) strand; PAM type: NRG; PAM sequence: AAG
ttaaacattcaaagcagcag

SEQ ID NO: 28584 - DNA, 20 bp, Artificial Sequence
  Description of Artificial Sequence: Synthetic oligonucleotide
  Target: SCNA; (+) strand; PAM type: NRG; PAM sequence: AAG
gcccactgcttttacacttg

SEQ ID NO: 28585 - DNA, 20 bp, Artificial Sequence
  Description of Artificial Sequence: Synthetic oligonucleotide
  Target: SCNA; (+) strand; PAM type: NRG; PAM sequence: TGG
ttttacacttgaagatattt

SEQ ID NO: 28586 - DNA, 20 bp, Artificial Sequence
  Description of Artificial Sequence: Synthetic oligonucleotide
  Target: SCNA; (+) strand; PAM type: NRG; PAM sequence: GGG
tttacacttgaagatatttt

SEQ ID NO: 28587 - DNA, 20 bp, Artificial Sequence
  Description of Artificial Sequence: Synthetic oligonucleotide
  Target: SCNA; (+) strand; PAM type: NRG; PAM sequence: TAG
acacttgaagatattttggg

SEQ ID NO: 28588 - DNA, 20 bp, Artificial Sequence
  Description of Artificial Sequence: Synthetic oligonucleotide
  Target: SCNA; (+) strand; PAM type: NRG; PAM sequence: TAG
cattattgaacaatgtcact

SEQ ID NO: 28589 - DNA, 20 bp, Artificial Sequence
  Description of Artificial Sequence: Synthetic oligonucleotide
  Target: SCNA; (+) strand; PAM type: NRG; PAM sequence: TGG
tgtcacttagcctcaaataa

SEQ ID NO: 28590 - DNA, 20 bp, Artificial Sequence
  Description of Artificial Sequence: Synthetic oligonucleotide
  Target: SCNA; (+) strand; PAM type: NRG; PAM sequence: CAG
cttcactcaacaactcacac

SEQ ID NO: 28591 - DNA, 20 bp, Artificial Sequence
  Description of Artificial Sequence: Synthetic oligonucleotide
  Target: SCNA; (+) strand; PAM type: NRG; PAM sequence: AGG
ttcactcaacaactcacacc

SEQ ID NO: 28592 - DNA, 20 bp, Artificial Sequence
  Description of Artificial Sequence: Synthetic oligonucleotide
  Target: SCNA; (+) strand; PAM type: NRG; PAM sequence: GAG
cactcaacaactcacaccag

SEQ ID NO: 28593 - DNA, 20 bp, Artificial Sequence
  Description of Artificial Sequence: Synthetic oligonucleotide
  Target: SCNA; (+) strand; PAM type: NRG; PAM sequence: AGG
actcaacaactcacaccagg

SEQ ID NO: 28594 - DNA, 20 bp, Artificial Sequence
  Description of Artificial Sequence: Synthetic oligonucleotide
  Target: SCNA; (+) strand; PAM type: NRG; PAM sequence: AAG
caactcacaccaggaggatg

SEQ ID NO: 28595 - DNA, 20 bp, Artificial Sequence
  Description of Artificial Sequence: Synthetic oligonucleotide
  Target: SCNA; (+) strand; PAM type: NRG; PAM sequence: AGG
aactcacaccaggaggatga

SEQ ID NO: 28596 - DNA, 20 bp, Artificial Sequence
  Description of Artificial Sequence: Synthetic oligonucleotide
  Target: SCNA; (+) strand; PAM type: NRG; PAM sequence: GAG
ctcacaccaggaggatgaag

SEQ ID NO: 28597 - DNA, 20 bp, Artificial Sequence
  Description of Artificial Sequence: Synthetic oligonucleotide
  Target: SCNA; (+) strand; PAM type: NRG; PAM sequence: GAG
cacaccaggaggatgaagga

SEQ ID NO: 28598 - DNA, 20 bp, Artificial Sequence
  Description of Artificial Sequence: Synthetic oligonucleotide
  Target: SCNA; (+) strand; PAM type: NRG; PAM sequence: GAG
caccaggaggatgaaggaga

SEQ ID NO: 28599 - DNA, 20 bp, Artificial Sequence
  Description of Artificial Sequence: Synthetic oligonucleotide
  Target: SCNA; (+) strand; PAM type: NRG; PAM sequence: TAG
aggaggatgaaggagagaga

SEQ ID NO: 28600 - DNA, 20 bp, Artificial Sequence
  Description of Artificial Sequence: Synthetic oligonucleotide
  Target: SCNA; (+) strand; PAM type: NRG; PAM sequence: TAG
aggatgaaggagagagatag

SEQ ID NO: 28601 - DNA, 20 bp, Artificial Sequence
  Description of Artificial Sequence: Synthetic oligonucleotide
  Target: SCNA; (+) strand; PAM type: NRG; PAM sequence: AAG
ggagagagatagtagccaaa

SEQ ID NO: 28602 - DNA, 20 bp, Artificial Sequence
  Description of Artificial Sequence: Synthetic oligonucleotide
  Target: SCNA; (+) strand; PAM type: NRG; PAM sequence: AAG
gatagtagccaaaaagataa

SEQ ID NO: 28603 - DNA, 20 bp, Artificial Sequence
  Description of Artificial Sequence: Synthetic oligonucleotide
  Target: SCNA; (+) strand; PAM type: NRG; PAM sequence: AAG
agtagccaaaaagataaaag

SEQ ID NO: 28604 - DNA, 20 bp, Artificial Sequence
  Description of Artificial Sequence: Synthetic oligonucleotide
  Target: SCNA; (+) strand; PAM type: NRG; PAM sequence: AAG
gataaaagaagaaactaaaa

SEQ ID NO: 28605 - DNA, 20 bp, Artificial Sequence
  Description of Artificial Sequence: Synthetic oligonucleotide
  Target: SCNA; (+) strand; PAM type: NRG; PAM sequence: AAG
ctaaaaaagaactttgactt

SEQ ID NO: 28606 - DNA, 20 bp, Artificial Sequence
  Description of Artificial Sequence: Synthetic oligonucleotide
  Target: SCNA; (+) strand; PAM type: NRG; PAM sequence: GAG
aaaaaagaactttgacttaa

SEQ ID NO: 28607 - DNA, 20 bp, Artificial Sequence
  Description of Artificial Sequence: Synthetic oligonucleotide
  Target: SCNA; (+) strand; PAM type: NRG; PAM sequence: AGG
aaaaagaactttgacttaag

SEQ ID NO: 28608 - DNA, 20 bp, Artificial Sequence
  Description of Artificial Sequence: Synthetic oligonucleotide
  Target: SCNA; (+) strand; PAM type: NRG; PAM sequence: AAG
ctttgacttaagaggaaaaa

SEQ ID NO: 28609 - DNA, 20 bp, Artificial Sequence
  Description of Artificial Sequence: Synthetic oligonucleotide
  Target: SCNA; (+) strand; PAM type: NRG; PAM sequence: AGG
tttgacttaagaggaaaaaa

SEQ ID NO: 28610 - DNA, 20 bp, Artificial Sequence
  Description of Artificial Sequence: Synthetic oligonucleotide
  Target: SCNA; (+) strand; PAM type: NRG; PAM sequence: AAG
aggaaaaaaaggttcaactt

SEQ ID NO: 28611 - DNA, 20 bp, Artificial Sequence
  Description of Artificial Sequence: Synthetic oligonucleotide
  Target: SCNA; (+) strand; PAM type: NRG; PAM sequence: AAG
ccgtgttccaaaatgaaatc

SEQ ID NO: 28612 - DNA, 20 bp, Artificial Sequence
  Description of Artificial Sequence: Synthetic oligonucleotide
  Target: SCNA; (+) strand; PAM type: NRG; PAM sequence: CAG
ttccaaaatgaaatcaagcc

SEQ ID NO: 28613 - DNA, 20 bp, Artificial Sequence
  Description of Artificial Sequence: Synthetic oligonucleotide
  Target: SCNA; (+) strand; PAM type: NRG; PAM sequence: TAG
aactcgtatttaaataaaaa

SEQ ID NO: 28614 - DNA, 20 bp, Artificial Sequence
  Description of Artificial Sequence: Synthetic oligonucleotide
  Target: SCNA; (+) strand; PAM type: NRG; PAM sequence: TAG
gtatttaaataaaaatagca

SEQ ID NO: 28615 - DNA, 20 bp, Artificial Sequence
  Description of Artificial Sequence: Synthetic oligonucleotide
  Target: SCNA; (+) strand; PAM type: NRG; PAM sequence: CAG
tattctctacttctctacct

SEQ ID NO: 28616 - DNA, 20 bp, Artificial Sequence
  Description of Artificial Sequence: Synthetic oligonucleotide
  Target: SCNA; (+) strand; PAM type: NRG; PAM sequence: CAG
ctctacttctctacctcaga

SEQ ID NO: 28617 - DNA, 20 bp, Artificial Sequence
  Description of Artificial Sequence: Synthetic oligonucleotide
  Target: SCNA; (+) strand; PAM type: NRG; PAM sequence: AGG
tctacttctctacctcagac

SEQ ID NO: 28618 - DNA, 20 bp, Artificial Sequence
  Description of Artificial Sequence: Synthetic oligonucleotide
  Target: SCNA; (+) strand; PAM type: NRG; PAM sequence: GGG
ctacttctctacctcagaca

SEQ ID NO: 28619 - DNA, 20 bp, Artificial Sequence
  Description of Artificial Sequence: Synthetic oligonucleotide
  Target: SCNA; (+) strand; PAM type: NRG; PAM sequence: GGG
tacttctctacctcagacag

SEQ ID NO: 28620 - DNA, 20 bp, Artificial Sequence
  Description of Artificial Sequence: Synthetic oligonucleotide
  Target: SCNA; (+) strand; PAM type: NRG; PAM sequence: GAG
cttctctacctcagacaggg

SEQ ID NO: 28621 - DNA, 20 bp, Artificial Sequence
  Description of Artificial Sequence: Synthetic oligonucleotide
  Target: SCNA; (+) strand; PAM type: NRG; PAM sequence: TAG
cagacaggggagtgtgtaca

SEQ ID NO: 28622 - DNA, 20 bp, Artificial Sequence
  Description of Artificial Sequence: Synthetic oligonucleotide
  Target: SCNA; (+) strand; PAM type: NRG; PAM sequence: TAG
aggggagtgtgtacatagtg

SEQ ID NO: 28623 - DNA, 20 bp, Artificial Sequence
  Description of Artificial Sequence: Synthetic oligonucleotide
  Target: SCNA; (+) strand; PAM type: NRG; PAM sequence: TAG
gagtgtgtacatagtgtaga

SEQ ID NO: 28624 - DNA, 20 bp, Artificial Sequence
  Description of Artificial Sequence: Synthetic oligonucleotide
  Target: SCNA; (+) strand; PAM type: NRG; PAM sequence: AAG
tgtagatagtatatttcact

SEQ ID NO: 28625 - DNA, 20 bp, Artificial Sequence
  Description of Artificial Sequence: Synthetic oligonucleotide
  Target: SCNA; (+) strand; PAM type: NRG; PAM sequence: GAG
tagatagtatatttcactaa

SEQ ID NO: 28626 - DNA, 20 bp, Artificial Sequence
  Description of Artificial Sequence: Synthetic oligonucleotide
  Target: SCNA; (+) strand; PAM type: NRG; PAM sequence: AAG
tattgatgcacttaaaaatg

SEQ ID NO: 28627 - DNA, 20 bp, Artificial Sequence
  Description of Artificial Sequence: Synthetic oligonucleotide
  Target: SCNA; (+) strand; PAM type: NRG; PAM sequence: AGG
attgatgcacttaaaaatga

SEQ ID NO: 28628 - DNA, 20 bp, Artificial Sequence
  Description of Artificial Sequence: Synthetic oligonucleotide
  Target: SCNA; (+) strand; PAM type: NRG; PAM sequence: TAG
gcacttaaaaatgaaggcga

SEQ ID NO: 28629 - DNA, 20 bp, Artificial Sequence
  Description of Artificial Sequence: Synthetic oligonucleotide
  Target: SCNA; (+) strand; PAM type: NRG; PAM sequence: AAG
gacatgaataccttgttaaa

SEQ ID NO: 28630 - DNA, 20 bp, Artificial Sequence
  Description of Artificial Sequence: Synthetic oligonucleotide
  Target: SCNA; (+) strand; PAM type: NRG; PAM sequence: AAG
tgaataccttgttaaaaagc

SEQ ID NO: 28631 - DNA, 20 bp, Artificial Sequence
  Description of Artificial Sequence: Synthetic oligonucleotide
  Target: SCNA; (+) strand; PAM type: NRG; PAM sequence: AGG
gaataccttgttaaaaagca

SEQ ID NO: 28632 - DNA, 20 bp, Artificial Sequence
  Description of Artificial Sequence: Synthetic oligonucleotide
  Target: SCNA; (+) strand; PAM type: NRG; PAM sequence: AAG
ccttgttaaaaagcaaggta

SEQ ID NO: 28633 - DNA, 20 bp, Artificial Sequence
  Description of Artificial Sequence: Synthetic oligonucleotide
  Target: SCNA; (+) strand; PAM type: NRG; PAM sequence: TAG
aattttctattatcaattcc

SEQ ID NO: 28634 - DNA, 20 bp, Artificial Sequence
  Description of Artificial Sequence: Synthetic oligonucleotide
  Target: SCNA; (+) strand; PAM type: NRG; PAM sequence: TGG
gtctgctcataatgccattt

SEQ ID NO: 28635 - DNA, 20 bp, Artificial Sequence
  Description of Artificial Sequence: Synthetic oligonucleotide
  Target: SCNA; (+) strand; PAM type: NRG; PAM sequence: GGG
tctgctcataatgccatttt

SEQ ID NO: 28636 - DNA, 20 bp, Artificial Sequence
  Description of Artificial Sequence: Synthetic oligonucleotide
  Target: SCNA; (+) strand; PAM type: NRG; PAM sequence: GGG
ctgctcataatgccattttg

SEQ ID NO: 28637 - DNA, 20 bp, Artificial Sequence
  Description of Artificial Sequence: Synthetic oligonucleotide
  Target: SCNA; (+) strand; PAM type: NRG; PAM sequence: TGG
ctcataatgccattttgggg

SEQ ID NO: 28638 - DNA, 20 bp, Artificial Sequence
  Description of Artificial Sequence: Synthetic oligonucleotide
  Target: SCNA; (+) strand; PAM type: NRG; PAM sequence: GGG
tcataatgccattttggggt

SEQ ID NO: 28639 - DNA, 20 bp, Artificial Sequence
  Description of Artificial Sequence: Synthetic oligonucleotide
  Target: SCNA; (+) strand; PAM type: NRG; PAM sequence: GGG
cataatgccattttggggtg

SEQ ID NO: 28640 - DNA, 20 bp, Artificial Sequence
  Description of Artificial Sequence: Synthetic oligonucleotide
  Target: SCNA; (+) strand; PAM type: NRG; PAM sequence: GAG
taatgccattttggggtggg

SEQ ID NO: 28641 - DNA, 20 bp, Artificial Sequence
  Description of Artificial Sequence: Synthetic oligonucleotide
  Target: SCNA; (+) strand; PAM type: NRG; PAM sequence: AAG
ccattttggggtggggagca

SEQ ID NO: 28642 - DNA, 20 bp, Artificial Sequence
  Description of Artificial Sequence: Synthetic oligonucleotide
  Target: SCNA; (+) strand; PAM type: NRG; PAM sequence: AGG
cattttggggtggggagcaa

SEQ ID NO: 28643 - DNA, 20 bp, Artificial Sequence
  Description of Artificial Sequence: Synthetic oligonucleotide
  Target: SCNA; (+) strand; PAM type: NRG; PAM sequence: GGG
attttggggtggggagcaaa

SEQ ID NO: 28644 - DNA, 20 bp, Artificial Sequence
  Description of Artificial Sequence: Synthetic oligonucleotide
  Target: SCNA; (+) strand; PAM type: NRG; PAM sequence: AAG
ctcaatttttgataaaatct

SEQ ID NO: 28645 - DNA, 20 bp, Artificial Sequence
  Description of Artificial Sequence: Synthetic oligonucleotide
  Target: SCNA; (+) strand; PAM type: NRG; PAM sequence: AGG
tcaatttttgataaaatcta

SEQ ID NO: 28646 - DNA, 20 bp, Artificial Sequence
  Description of Artificial Sequence: Synthetic oligonucleotide
  Target: SCNA; (+) strand; PAM type: NRG; PAM sequence: AAG
atttttaaaacattgaatta

SEQ ID NO: 28647 - DNA, 20 bp, Artificial Sequence
  Description of Artificial Sequence: Synthetic oligonucleotide
  Target: SCNA; (+) strand; PAM type: NRG; PAM sequence: TGG
cattgaattaaagcaaactt

SEQ ID NO: 28648 - DNA, 20 bp, Artificial Sequence
  Description of Artificial Sequence: Synthetic oligonucleotide
  Target: SCNA; (+) strand; PAM type: NRG; PAM sequence: GAG
tggatactctgatttctctt

SEQ ID NO: 28649 - DNA, 20 bp, Artificial Sequence
  Description of Artificial Sequence: Synthetic oligonucleotide
  Target: SCNA; (+) strand; PAM type: NRG; PAM sequence: AGG
ggatactctgatttctcttg

SEQ ID NO: 28650 - DNA, 20 bp, Artificial Sequence
  Description of Artificial Sequence: Synthetic oligonucleotide
  Target: SCNA; (+) strand; PAM type: NRG; PAM sequence: AAG
cataaatcctctgccttttt

SEQ ID NO: 28651 - DNA, 20 bp, Artificial Sequence
  Description of Artificial Sequence: Synthetic oligonucleotide
  Target: SCNA; (+) strand; PAM type: NRG; PAM sequence: GAG
taaatcctctgcctttttaa

SEQ ID NO: 28652 - DNA, 20 bp, Artificial Sequence
  Description of Artificial Sequence: Synthetic oligonucleotide
  Target: SCNA; (+) strand; PAM type: NRG; PAM sequence: TGG
gcctttttaagagatctatg

SEQ ID NO: 28653 - DNA, 20 bp, Artificial Sequence
  Description of Artificial Sequence: Synthetic oligonucleotide
  Target: SCNA; (+) strand; PAM type: NRG; PAM sequence: GAG
ctttttaagagatctatgtg

SEQ ID NO: 28654 - DNA, 20 bp, Artificial Sequence
  Description of Artificial Sequence: Synthetic oligonucleotide
  Target: SCNA; (+) strand; PAM type: NRG; PAM sequence: GAG
ttttaagagatctatgtgga

SEQ ID NO: 28655 - DNA, 20 bp, Artificial Sequence
  Description of Artificial Sequence: Synthetic oligonucleotide
  Target: SCNA; (+) strand; PAM type: NRG; PAM sequence: AGG
tttaagagatctatgtggag

SEQ ID NO: 28656 - DNA, 20 bp, Artificial Sequence
  Description of Artificial Sequence: Synthetic oligonucleotide
  Target: SCNA; (+) strand; PAM type: NRG; PAM sequence: TGG
tatgtggagaggaacaactc

SEQ ID NO: 28657 - DNA, 20 bp, Artificial Sequence
  Description of Artificial Sequence: Synthetic oligonucleotide
  Target: SCNA; (+) strand; PAM type: NRG; PAM sequence: GGG
atgtggagaggaacaactct

SEQ ID NO: 28658 - DNA, 20 bp, Artificial Sequence
  Description of Artificial Sequence: Synthetic oligonucleotide
  Target: SCNA; (+) strand; PAM type: NRG; PAM sequence: GAG
tgggtcttaaacgaattatt

SEQ ID NO: 28659 - DNA, 20 bp, Artificial Sequence
  Description of Artificial Sequence: Synthetic oligonucleotide
  Target: SCNA; (+) strand; PAM type: NRG; PAM sequence: AGG
gggtcttaaacgaattattg

SEQ ID NO: 28660 - DNA, 20 bp, Artificial Sequence
  Description of Artificial Sequence: Synthetic oligonucleotide
  Target: SCNA; (+) strand; PAM type: NRG; PAM sequence: TGG
gaattattgaggtcttgttt

SEQ ID NO: 28661 - DNA, 20 bp, Artificial Sequence
  Description of Artificial Sequence: Synthetic oligonucleotide
  Target: SCNA; (+) strand; PAM type: NRG; PAM sequence: AAG
tattgaggtcttgttttgga

SEQ ID NO: 28662 - DNA, 20 bp, Artificial Sequence
  Description of Artificial Sequence: Synthetic oligonucleotide
  Target: SCNA; (+) strand; PAM type: NRG; PAM sequence: AGG
attgaggtcttgttttggaa

SEQ ID NO: 28663 - DNA, 20 bp, Artificial Sequence
  Description of Artificial Sequence: Synthetic oligonucleotide
  Target: SCNA; (+) strand; PAM type: NRG; PAM sequence: TAG
aggtcttgttttggaaaggc

SEQ ID NO: 28664 - DNA, 20 bp, Artificial Sequence
  Description of Artificial Sequence: Synthetic oligonucleotide
  Target: SCNA; (+) strand; PAM type: NRG; PAM sequence: AAG
gatattttgttaaaaaatat

SEQ ID NO: 28665 - DNA, 20 bp, Artificial Sequence
  Description of Artificial Sequence: Synthetic oligonucleotide
  Target: SCNA; (+) strand; PAM type: NRG; PAM sequence: TGG
tttcaaaaaacctaaaactt

SEQ ID NO: 28666 - DNA, 20 bp, Artificial Sequence
  Description of Artificial Sequence: Synthetic oligonucleotide
  Target: SCNA; (+) strand; PAM type: NRG; PAM sequence: AAG
caatgttatttaatcatcaa

SEQ ID NO: 28667 - DNA, 20 bp, Artificial Sequence
  Description of Artificial Sequence: Synthetic oligonucleotide
  Target: SCNA; (+) strand; PAM type: NRG; PAM sequence: CAG
gcaaaacaatatgcatattt

SEQ ID NO: 28668 - DNA, 20 bp, Artificial Sequence
  Description of Artificial Sequence: Synthetic oligonucleotide
  Target: SCNA; (+) strand; PAM type: NRG; PAM sequence: CAG
cagaaataacactatatttt

SEQ ID NO: 28669 - DNA, 20 bp, Artificial Sequence
  Description of Artificial Sequence: Synthetic oligonucleotide
  Target: SCNA; (+) strand; PAM type: NRG; PAM sequence: AAG
tcagtcttactattatgcat

SEQ ID NO: 28670 - DNA, 20 bp, Artificial Sequence
  Description of Artificial Sequence: Synthetic oligonucleotide
  Target: SCNA; (+) strand; PAM type: NRG; PAM sequence: AAG
tcttactattatgcataaga

SEQ ID NO: 28671 - DNA, 20 bp, Artificial Sequence
  Description of Artificial Sequence: Synthetic oligonucleotide
  Target: SCNA; (+) strand; PAM type: NRG; PAM sequence: GAG
atttattgtttacatactct

SEQ ID NO: 28672 - DNA, 20 bp, Artificial Sequence
  Description of Artificial Sequence: Synthetic oligonucleotide
  Target: SCNA; (+) strand; PAM type: NRG; PAM sequence: AGG
tttattgtttacatactctg

SEQ ID NO: 28673 - DNA, 20 bp, Artificial Sequence
  Description of Artificial Sequence: Synthetic oligonucleotide
  Target: SCNA; (+) strand; PAM type: NRG; PAM sequence: GAG
tattgtttacatactctgag

SEQ ID NO: 28674 - DNA, 20 bp, Artificial Sequence
  Description of Artificial Sequence: Synthetic oligonucleotide
  Target: SCNA; (+) strand; PAM type: NRG; PAM sequence: TAG
aggagtatttaattgcatcc

SEQ ID NO: 28675 - DNA, 20 bp, Artificial Sequence
  Description of Artificial Sequence: Synthetic oligonucleotide
  Target: SCNA; (+) strand; PAM type: NRG; PAM sequence: AAG
gtatttaattgcatcctagt

SEQ ID NO: 28676 - DNA, 20 bp, Artificial Sequence
  Description of Artificial Sequence: Synthetic oligonucleotide
  Target: SCNA; (+) strand; PAM type: NRG; PAM sequence: GAG
gtaagtatattctgtcacat

SEQ ID NO: 28677 - DNA, 20 bp, Artificial Sequence
  Description of Artificial Sequence: Synthetic oligonucleotide
  Target: SCNA; (+) strand; PAM type: NRG; PAM sequence: AAG
agtatattctgtcacatgag

SEQ ID NO: 28678 - DNA, 20 bp, Artificial Sequence
  Description of Artificial Sequence: Synthetic oligonucleotide
  Target: SCNA; (+) strand; PAM type: NRG; PAM sequence: TAG
ttctgtcacatgagaagcca

SEQ ID NO: 28679 - DNA, 20 bp, Artificial Sequence
  Description of Artificial Sequence: Synthetic oligonucleotide
  Target: SCNA; (+) strand; PAM type: NRG; PAM sequence: TGG
acatgagaagccatagaaat

SEQ ID NO: 28680 - DNA, 20 bp, Artificial Sequence
  Description of Artificial Sequence: Synthetic oligonucleotide
  Target: SCNA; (+) strand; PAM type: NRG; PAM sequence: AAG
tctgctgtatccaatgccca

SEQ ID NO: 28681 - DNA, 20 bp, Artificial Sequence
  Description of Artificial Sequence: Synthetic oligonucleotide
  Target: SCNA; (+) strand; PAM type: NRG; PAM sequence: AGG
ctgctgtatccaatgcccaa

SEQ ID NO: 28682 - DNA, 20 bp, Artificial Sequence
  Description of Artificial Sequence: Synthetic oligonucleotide
  Target: SCNA; (+) strand; PAM type: NRG; PAM sequence: AAG
ccaatgcccaaaggataata

SEQ ID NO: 28683 - DNA, 20 bp, Artificial Sequence
  Description of Artificial Sequence: Synthetic oligonucleotide
  Target: SCNA; (+) strand; PAM type: NRG; PAM sequence: TGG
cctccttttccaattatata

SEQ ID NO: 28684 - DNA, 20 bp, Artificial Sequence
  Description of Artificial Sequence: Synthetic oligonucleotide
  Target: SCNA; (+) strand; PAM type: NRG; PAM sequence: AAG
ttttccaattatatatggtt

SEQ ID NO: 28685 - DNA, 20 bp, Artificial Sequence
  Description of Artificial Sequence: Synthetic oligonucleotide
  Target: SCNA; (+) strand; PAM type: NRG; PAM sequence: TGG
aaaattcaaactttaatttt

SEQ ID NO: 28686 - DNA, 20 bp, Artificial Sequence
  Description of Artificial Sequence: Synthetic oligonucleotide
  Target: SCNA; (+) strand; PAM type: NRG; PAM sequence: GGG
aaattcaaactttaattttt

SEQ ID NO: 28687 - DNA, 20 bp, Artificial Sequence
  Description of Artificial Sequence: Synthetic oligonucleotide
  Target: SCNA; (+) strand; PAM type: NRG; PAM sequence: AAG
tcaaactttaatttttggga

SEQ ID NO: 28688 - DNA, 20 bp, Artificial Sequence
  Description of Artificial Sequence: Synthetic oligonucleotide
  Target: SCNA; (+) strand; PAM type: NRG; PAM sequence: TAG
ctttaatttttgggaaagta

SEQ ID NO: 28689 - DNA, 20 bp, Artificial Sequence
  Description of Artificial Sequence: Synthetic oligonucleotide
  Target: SCNA; (+) strand; PAM type: NRG; PAM sequence: TGG
tttttgggaaagtatagtta

SEQ ID NO: 28690 - DNA, 20 bp, Artificial Sequence
  Description of Artificial Sequence: Synthetic oligonucleotide
  Target: SCNA; (+) strand; PAM type: NRG; PAM sequence: TAG
gggaaagtatagttatggct

SEQ ID NO: 28691 - DNA, 20 bp, Artificial Sequence
  Description of Artificial Sequence: Synthetic oligonucleotide
  Target: SCNA; (+) strand; PAM type: NRG; PAM sequence: AAG
tatagttatggcttagatct

SEQ ID NO: 28692 - DNA, 20 bp, Artificial Sequence
  Description of Artificial Sequence: Synthetic oligonucleotide
  Target: SCNA; (+) strand; PAM type: NRG; PAM sequence: AGG
atagttatggcttagatcta

SEQ ID NO: 28693 - DNA, 20 bp, Artificial Sequence
  Description of Artificial Sequence: Synthetic oligonucleotide
  Target: SCNA; (+) strand; PAM type: NRG; PAM sequence: TAG
gttatggcttagatctaagg

SEQ ID NO: 28694 - DNA, 20 bp, Artificial Sequence
  Description of Artificial Sequence: Synthetic oligonucleotide
  Target: SCNA; (+) strand; PAM type: NRG; PAM sequence: AAG
aggtagaaataaaatgacca

SEQ ID NO: 28695 - DNA, 20 bp, Artificial Sequence
  Description of Artificial Sequence: Synthetic oligonucleotide
  Target: SCNA; (+) strand; PAM type: NRG; PAM sequence: AGG
ggtagaaataaaatgaccaa

SEQ ID NO: 28696 - DNA, 20 bp, Artificial Sequence
  Description of Artificial Sequence: Synthetic oligonucleotide
  Target: SCNA; (+) strand; PAM type: NRG; PAM sequence: TGG
aataaaatgaccaaaggact

SEQ ID NO: 28697 - DNA, 20 bp, Artificial Sequence
  Description of Artificial Sequence: Synthetic oligonucleotide
  Target: SCNA; (+) strand; PAM type: NRG; PAM sequence: TAG
catttaacattctataactt

SEQ ID NO: 28698 - DNA, 20 bp, Artificial Sequence
  Description of Artificial Sequence: Synthetic oligonucleotide
  Target: SCNA; (+) strand; PAM type: NRG; PAM sequence: AAG
ataactttagaaatgcatca

SEQ ID NO: 28699 - DNA, 20 bp, Artificial Sequence
  Description of Artificial Sequence: Synthetic oligonucleotide
  Target: SCNA; (+) strand; PAM type: NRG; PAM sequence: TGG
actttagaaatgcatcaaag

SEQ ID NO: 28700 - DNA, 20 bp, Artificial Sequence
  Description of Artificial Sequence: Synthetic oligonucleotide
  Target: SCNA; (+) strand; PAM type: NRG; PAM sequence: AAG
tagaaatgcatcaaagtggc

SEQ ID NO: 28701 - DNA, 20 bp, Artificial Sequence
  Description of Artificial Sequence: Synthetic oligonucleotide
  Target: SCNA; (+) strand; PAM type: NRG; PAM sequence: CAG
atgcatcaaagtggcaagcc

SEQ ID NO: 28702 - DNA, 20 bp, Artificial Sequence
  Description of Artificial Sequence: Synthetic oligonucleotide
  Target: SCNA; (+) strand; PAM type: NRG; PAM sequence: AAG
aaagtggcaagcccagcatt

SEQ ID NO: 28703 - DNA, 20 bp, Artificial Sequence
  Description of Artificial Sequence: Synthetic oligonucleotide
  Target: SCNA; (+) strand; PAM type: NRG; PAM sequence: GAG
agtggcaagcccagcattaa

SEQ ID NO: 28704 - DNA, 20 bp, Artificial Sequence
  Description of Artificial Sequence: Synthetic oligonucleotide
  Target: SCNA; (+) strand; PAM type: NRG; PAM sequence: AAG
attaagagctatttgtcact

SEQ ID NO: 28705 - DNA, 20 bp, Artificial Sequence
  Description of Artificial Sequence: Synthetic oligonucleotide
  Target: SCNA; (+) strand; PAM type: NRG; PAM sequence: AGG
ttaagagctatttgtcacta

SEQ ID NO: 28706 - DNA, 20 bp, Artificial Sequence
  Description of Artificial Sequence: Synthetic oligonucleotide
  Target: SCNA; (+) strand; PAM type: NRG; PAM sequence: GGG
taagagctatttgtcactaa

SEQ ID NO: 28707 - DNA, 20 bp, Artificial Sequence
  Description of Artificial Sequence: Synthetic oligonucleotide
  Target: SCNA; (+) strand; PAM type: NRG; PAM sequence: TGG
tatttgtcactaagggcctg

SEQ ID NO: 28708 - DNA, 20 bp, Artificial Sequence
  Description of Artificial Sequence: Synthetic oligonucleotide
  Target: SCNA; (+) strand; PAM type: NRG; PAM sequence: AAG
tcactaagggcctgtggttg

SEQ ID NO: 28709 - DNA, 20 bp, Artificial Sequence
  Description of Artificial Sequence: Synthetic oligonucleotide
  Target: SCNA; (+) strand; PAM type: NRG; PAM sequence: TGG
ggcctgtggttgaagtctgt

SEQ ID NO: 28710 - DNA, 20 bp, Artificial Sequence
  Description of Artificial Sequence: Synthetic oligonucleotide
  Target: SCNA; (+) strand; PAM type: NRG; PAM sequence: GAG
tggatccatctgttctttct

SEQ ID NO: 28711 - DNA, 20 bp, Artificial Sequence
  Description of Artificial Sequence: Synthetic oligonucleotide
  Target: SCNA; (+) strand; PAM type: NRG; PAM sequence: AGG
ggatccatctgttctttctg

SEQ ID NO: 28712 - DNA, 20 bp, Artificial Sequence
  Description of Artificial Sequence: Synthetic oligonucleotide
  Target: SCNA; (+) strand; PAM type: NRG; PAM sequence: CAG
gttctttctgaggcaatatg

SEQ ID NO: 28713 - DNA, 20 bp, Artificial Sequence
  Description of Artificial Sequence: Synthetic oligonucleotide
  Target: SCNA; (+) strand; PAM type: NRG; PAM sequence: AAG
ctgaggcaatatgcagacga

SEQ ID NO: 28714 - DNA, 20 bp, Artificial Sequence
  Description of Artificial Sequence: Synthetic oligonucleotide
  Target: SCNA; (+) strand; PAM type: NRG; PAM sequence: AGG
tgaggcaatatgcagacgaa

SEQ ID NO: 28715 - DNA, 20 bp, Artificial Sequence
  Description of Artificial Sequence: Synthetic oligonucleotide
  Target: SCNA; (+) strand; PAM type: NRG; PAM sequence: AAG
gcaatatgcagacgaaaggt

SEQ ID NO: 28716 - DNA, 20 bp, Artificial Sequence
  Description of Artificial Sequence: Synthetic oligonucleotide
  Target: SCNA; (+) strand; PAM type: NRG; PAM sequence: AGG
caatatgcagacgaaaggta

SEQ ID NO: 28717 - DNA, 20 bp, Artificial Sequence
  Description of Artificial Sequence: Synthetic oligonucleotide
  Target: SCNA; (+) strand; PAM type: NRG; PAM sequence: GGG
aatatgcagacgaaaggtaa

SEQ ID NO: 28718 - DNA, 20 bp, Artificial Sequence
  Description of Artificial Sequence: Synthetic oligonucleotide
  Target: SCNA; (+) strand; PAM type: NRG; PAM sequence: GGG
atatgcagacgaaaggtaag

SEQ ID NO: 28719 - DNA, 20 bp, Artificial Sequence
  Description of Artificial Sequence: Synthetic oligonucleotide
  Target: SCNA; (+) strand; PAM type: NRG; PAM sequence: GAG
atgcagacgaaaggtaaggg

SEQ ID NO: 28720 - DNA, 20 bp, Artificial Sequence
  Description of Artificial Sequence: Synthetic oligonucleotide
  Target: SCNA; (+) strand; PAM type: NRG; PAM sequence: TAG
catgataaattataatatat

SEQ ID NO: 28721 - DNA, 20 bp, Artificial Sequence
  Description of Artificial Sequence: Synthetic oligonucleotide
  Target: SCNA; (+) strand; PAM type: NRG; PAM sequence: TAG
tatattagaaatataattta

SEQ ID NO: 28722 - DNA, 20 bp, Artificial Sequence
  Description of Artificial Sequence: Synthetic oligonucleotide
  Target: SCNA; (+) strand; PAM type: NRG; PAM sequence: TAG
ataatttatagcattacatc

SEQ ID NO: 28723 - DNA, 20 bp, Artificial Sequence
  Description of Artificial Sequence: Synthetic oligonucleotide
  Target: SCNA; (+) strand; PAM type: NRG; PAM sequence: AAG
tttatagcattacatctagt

SEQ ID NO: 28724 - DNA, 20 bp, Artificial Sequence
  Description of Artificial Sequence: Synthetic oligonucleotide
  Target: SCNA; (+) strand; PAM type: NRG; PAM sequence: TAG
tagcattacatctagtaaga

SEQ ID NO: 28725 - DNA, 20 bp, Artificial Sequence
  Description of Artificial Sequence: Synthetic oligonucleotide
  Target: SCNA; (+) strand; PAM type: NRG; PAM sequence: AAG
atctagtaagatagatgtaa

SEQ ID NO: 28726 - DNA, 20 bp, Artificial Sequence
  Description of Artificial Sequence: Synthetic oligonucleotide
  Target: SCNA; (+) strand; PAM type: NRG; PAM sequence: AGG
tctagtaagatagatgtaaa

SEQ ID NO: 28727 - DNA, 20 bp, Artificial Sequence
  Description of Artificial Sequence: Synthetic oligonucleotide
  Target: SCNA; (+) strand; PAM type: NRG; PAM sequence: GGG
ctagtaagatagatgtaaaa

SEQ ID NO: 28728 - DNA, 20 bp, Artificial Sequence
  Description of Artificial Sequence: Synthetic oligonucleotide
  Target: SCNA; (+) strand; PAM type: NRG; PAM sequence: CAG
aagatagatgtaaaagggaa

SEQ ID NO: 28729 - DNA, 20 bp, Artificial Sequence
  Description of Artificial Sequence: Synthetic oligonucleotide
  Target: SCNA; (+) strand; PAM type: NRG; PAM sequence: AGG
agatagatgtaaaagggaac

SEQ ID NO: 28730 - DNA, 20 bp, Artificial Sequence
  Description of Artificial Sequence: Synthetic oligonucleotide
  Target: SCNA; (+) strand; PAM type: NRG; PAM sequence: AAG
agatgtaaaagggaacaggt

SEQ ID NO: 28731 - DNA, 20 bp, Artificial Sequence
  Description of Artificial Sequence: Synthetic oligonucleotide
  Target: SCNA; (+) strand; PAM type: NRG; PAM sequence: AAG
aaaagggaacaggtaagtga

SEQ ID NO: 28732 - DNA, 20 bp, Artificial Sequence
  Description of Artificial Sequence: Synthetic oligonucleotide
  Target: SCNA; (+) strand; PAM type: NRG; PAM sequence: AGG
aaagggaacaggtaagtgaa

SEQ ID NO: 28733 - DNA, 20 bp, Artificial Sequence
  Description of Artificial Sequence: Synthetic oligonucleotide
  Target: SCNA; (+) strand; PAM type: NRG; PAM sequence: GGG
aagggaacaggtaagtgaaa

SEQ ID NO: 28734 - DNA, 20 bp, Artificial Sequence
  Description of Artificial Sequence: Synthetic oligonucleotide
  Target: SCNA; (+) strand; PAM type: NRG; PAM sequence: AAG
gaacaggtaagtgaaagggc

SEQ ID NO: 28735 - DNA, 20 bp, Artificial Sequence
  Description of Artificial Sequence: Synthetic oligonucleotide
  Target: SCNA; (+) strand; PAM type: NRG; PAM sequence: AGG
aacaggtaagtgaaagggca

SEQ ID NO: 28736 - DNA, 20 bp, Artificial Sequence
  Description of Artificial Sequence: Synthetic oligonucleotide
  Target: SCNA; (+) strand; PAM type: NRG; PAM sequence: AAG
taagtgaaagggcaaggcat

SEQ ID NO: 28737 - DNA, 20 bp, Artificial Sequence
  Description of Artificial Sequence: Synthetic oligonucleotide
  Target: SCNA; (+) strand; PAM type: NRG; PAM sequence: TAG
ggcaaggcataagtcttgta

SEQ ID NO: 28738 - DNA, 20 bp, Artificial Sequence
  Description of Artificial Sequence: Synthetic oligonucleotide
  Target: SCNA; (+) strand; PAM type: NRG; PAM sequence: GAG
caaggcataagtcttgtata

SEQ ID NO: 28739 - DNA, 20 bp, Artificial Sequence
  Description of Artificial Sequence: Synthetic oligonucleotide
  Target: SCNA; (+) strand; PAM type: NRG; PAM sequence: CAG
ataagtcttgtatagagtga

SEQ ID NO: 28740 - DNA, 20 bp, Artificial Sequence
  Description of Artificial Sequence: Synthetic oligonucleotide
  Target: SCNA; (+) strand; PAM type: NRG; PAM sequence: AGG
taagtcttgtatagagtgac

SEQ ID NO: 28741 - DNA, 20 bp, Artificial Sequence
  Description of Artificial Sequence: Synthetic oligonucleotide
  Target: SCNA; (+) strand; PAM type: NRG; PAM sequence: TGG
cttgtatagagtgacaggtc

SEQ ID NO: 28742 - DNA, 20 bp, Artificial Sequence
  Description of Artificial Sequence: Synthetic oligonucleotide
  Target: SCNA; (+) strand; PAM type: NRG; PAM sequence: CAG
atagagtgacaggtctggta

SEQ ID NO: 28743 - DNA, 20 bp, Artificial Sequence
  Description of Artificial Sequence: Synthetic oligonucleotide
  Target: SCNA; (+) strand; PAM type: NRG; PAM sequence: TAG
tactaccaaatctataacta

SEQ ID NO: 28744 - DNA, 20 bp, Artificial Sequence
  Description of Artificial Sequence: Synthetic oligonucleotide
  Target: SCNA; (+) strand; PAM type: NRG; PAM sequence: TAG
tattttgcactatttcaatg

SEQ ID NO: 28745 - DNA, 20 bp, Artificial Sequence
  Description of Artificial Sequence: Synthetic oligonucleotide
  Target: SCNA; (+) strand; PAM type: NRG; PAM sequence: CAG
tttgcactatttcaatgtag

SEQ ID NO: 28746 - DNA, 20 bp, Artificial Sequence
  Description of Artificial Sequence: Synthetic oligonucleotide
  Target: SCNA; (+) strand; PAM type: NRG; PAM sequence: TAG
atttcaatgtagcagtattt

SEQ ID NO: 28747 - DNA, 20 bp, Artificial Sequence
  Description of Artificial Sequence: Synthetic oligonucleotide
  Target: SCNA; (+) strand; PAM type: NRG; PAM sequence: AGG
tttcaatgtagcagtatttt

SEQ ID NO: 28748 - DNA, 20 bp, Artificial Sequence
  Description of Artificial Sequence: Synthetic oligonucleotide
  Target: SCNA; (+) strand; PAM type: NRG; PAM sequence: TGG
atgtagcagtattttaggtt

SEQ ID NO: 28749 - DNA, 20 bp, Artificial Sequence
  Description of Artificial Sequence: Synthetic oligonucleotide
  Target: SCNA; (+) strand; PAM type: NRG; PAM sequence: TGG
agcagtattttaggtttggt

SEQ ID NO: 28750 - DNA, 20 bp, Artificial Sequence
  Description of Artificial Sequence: Synthetic oligonucleotide
  Target: SCNA; (+) strand; PAM type: NRG; PAM sequence: AAG
ggttggcctgactttacaac

SEQ ID NO: 28751 - DNA, 20 bp, Artificial Sequence
  Description of Artificial Sequence: Synthetic oligonucleotide
  Target: SCNA; (+) strand; PAM type: NRG; PAM sequence: AAG
acaacaagataaaaaattcc

SEQ ID NO: 28752 - DNA, 20 bp, Artificial Sequence
  Description of Artificial Sequence: Synthetic oligonucleotide
  Target: SCNA; (+) strand; PAM type: NRG; PAM sequence: TAG
aattccaagttttaacaatg

SEQ ID NO: 28753 - DNA, 20 bp, Artificial Sequence
  Description of Artificial Sequence: Synthetic oligonucleotide
  Target: SCNA; (+) strand; PAM type: NRG; PAM sequence: TAG
tgtagtgacctactgtgttt

SEQ ID NO: 28754 - DNA, 20 bp, Artificial Sequence
  Description of Artificial Sequence: Synthetic oligonucleotide
  Target: SCNA; (+) strand; PAM type: NRG; PAM sequence: AAG
cattttctactaacctgtaa

SEQ ID NO: 28755 - DNA, 20 bp, Artificial Sequence
  Description of Artificial Sequence: Synthetic oligonucleotide
  Target: SCNA; (+) strand; PAM type: NRG; PAM sequence: TAG
aacctgtaaaagacatgcct

SEQ ID NO: 28756 - DNA, 20 bp, Artificial Sequence
  Description of Artificial Sequence: Synthetic oligonucleotide
  Target: SCNA; (+) strand; PAM type: NRG; PAM sequence: TGG
aaaagacatgccttagaatg

SEQ ID NO: 28757 - DNA, 20 bp, Artificial Sequence
  Description of Artificial Sequence: Synthetic oligonucleotide
  Target: SCNA; (+) strand; PAM type: NRG; PAM sequence: GGG
aaagacatgccttagaatgt

SEQ ID NO: 28758 - DNA, 20 bp, Artificial Sequence
  Description of Artificial Sequence: Synthetic oligonucleotide
  Target: SCNA; (+) strand; PAM type: NRG; PAM sequence: CAG
cacaaacacatacatactca

SEQ ID NO: 28759 - DNA, 20 bp, Artificial Sequence
  Description of Artificial Sequence: Synthetic oligonucleotide
  Target: SCNA; (+) strand; PAM type: NRG; PAM sequence: AAG
ctcacagacacatacacacg

SEQ ID NO: 28760 - DNA, 20 bp, Artificial Sequence
  Description of Artificial Sequence: Synthetic oligonucleotide
  Target: SCNA; (+) strand; PAM type: NRG; PAM sequence: CAG
agacacatacacacgaagta

SEQ ID NO: 28761 - DNA, 20 bp, Artificial Sequence
  Description of Artificial Sequence: Synthetic oligonucleotide
  Target: SCNA; (+) strand; PAM type: NRG; PAM sequence: TAG
cacatacacacgaagtacag

SEQ ID NO: 28762 - DNA, 20 bp, Artificial Sequence
  Description of Artificial Sequence: Synthetic oligonucleotide
  Target: SCNA; (+) strand; PAM type: NRG; PAM sequence: TGG
agtagaccactgatgatctc

SEQ ID NO: 28763 - DNA, 20 bp, Artificial Sequence
  Description of Artificial Sequence: Synthetic oligonucleotide
  Target: SCNA; (+) strand; PAM type: NRG; PAM sequence: GAG
gatctctggtgccacttcct

SEQ ID NO: 28764 - DNA, 20 bp, Artificial Sequence
  Description of Artificial Sequence: Synthetic oligonucleotide
  Target: SCNA; (+) strand; PAM type: NRG; PAM sequence: AAG
ttttgaatgttctaattaaa

SEQ ID NO: 28765 - DNA, 20 bp, Artificial Sequence
  Description of Artificial Sequence: Synthetic oligonucleotide
  Target: SCNA; (+) strand; PAM type: NRG; PAM sequence: AAG
tgttctaattaaaaagtgca

SEQ ID NO: 28766 - DNA, 20 bp, Artificial Sequence
  Description of Artificial Sequence: Synthetic oligonucleotide
  Target: SCNA; (+) strand; PAM type: NRG; PAM sequence: AAG
gctatgctattatatatgct

SEQ ID NO: 28767 - DNA, 20 bp, Artificial Sequence
  Description of Artificial Sequence: Synthetic oligonucleotide
  Target: SCNA; (+) strand; PAM type: NRG; PAM sequence: TAG
tatatatgctaagccaaacc

SEQ ID NO: 28768 - DNA, 20 bp, Artificial Sequence
  Description of Artificial Sequence: Synthetic oligonucleotide
  Target: SCNA; (+) strand; PAM type: NRG; PAM sequence: AAG
gctaagccaaacctagcaac

SEQ ID NO: 28769 - DNA, 20 bp, Artificial Sequence
  Description of Artificial Sequence: Synthetic oligonucleotide
  Target: SCNA; (+) strand; PAM type: NRG; PAM sequence: AGG
ctaagccaaacctagcaaca

SEQ ID NO: 28770 - DNA, 20 bp, Artificial Sequence
  Description of Artificial Sequence: Synthetic oligonucleotide
  Target: SCNA; (+) strand; PAM type: NRG; PAM sequence: GAG
ccaaacctagcaacaaggct

SEQ ID NO: 28771 - DNA, 20 bp, Artificial Sequence
  Description of Artificial Sequence: Synthetic oligonucleotide
  Target: SCNA; (+) strand; PAM type: NRG; PAM sequence: AAG
cctagcaacaaggctgagtg

SEQ ID NO: 28772 - DNA, 20 bp, Artificial Sequence
  Description of Artificial Sequence: Synthetic oligonucleotide
  Target: SCNA; (+) strand; PAM type: NRG; PAM sequence: TGG
aacaaggctgagtgaagatg

SEQ ID NO: 28773 - DNA, 20 bp, Artificial Sequence
  Description of Artificial Sequence: Synthetic oligonucleotide
  Target: SCNA; (+) strand; PAM type: NRG; PAM sequence: TGG
ctgagtgaagatgtggctcc

SEQ ID NO: 28774 - DNA, 20 bp, Artificial Sequence
  Description of Artificial Sequence: Synthetic oligonucleotide
  Target: SCNA; (+) strand; PAM type: NRG; PAM sequence: GGG
tgagtgaagatgtggctcct

SEQ ID NO: 28775 - DNA, 20 bp, Artificial Sequence
  Description of Artificial Sequence: Synthetic oligonucleotide
  Target: SCNA; (+) strand; PAM type: NRG; PAM sequence: TAG
gtggctcctgggtcatatgc

SEQ ID NO: 28776 - DNA, 20 bp, Artificial Sequence
  Description of Artificial Sequence: Synthetic oligonucleotide
  Target: SCNA; (+) strand; PAM type: NRG; PAM sequence: AGG
tggctcctgggtcatatgct

SEQ ID NO: 28777 - DNA, 20 bp, Artificial Sequence
  Description of Artificial Sequence: Synthetic oligonucleotide
  Target: SCNA; (+) strand; PAM type: NRG; PAM sequence: CGG
tcatatgctaggctttcttt

SEQ ID NO: 28778 - DNA, 20 bp, Artificial Sequence
  Description of Artificial Sequence: Synthetic oligonucleotide
  Target: SCNA; (+) strand; PAM type: NRG; PAM sequence: TGG
ctaggctttctttcggcaaa

SEQ ID NO: 28779 - DNA, 20 bp, Artificial Sequence
  Description of Artificial Sequence: Synthetic oligonucleotide
  Target: SCNA; (+) strand; PAM type: NRG; PAM sequence: CAG
caaatggacttgctctccct

SEQ ID NO: 28780 - DNA, 20 bp, Artificial Sequence
  Description of Artificial Sequence: Synthetic oligonucleotide
  Target: SCNA; (+) strand; PAM type: NRG; PAM sequence: CAG
agttatgttacatacctact

SEQ ID NO: 28781 - DNA, 20 bp, Artificial Sequence
  Description of Artificial Sequence: Synthetic oligonucleotide
  Target: SCNA; (+) strand; PAM type: NRG; PAM sequence: CAG
tgttacatacctactcagat

SEQ ID NO: 28782 - DNA, 20 bp, Artificial Sequence
  Description of Artificial Sequence: Synthetic oligonucleotide
  Target: SCNA; (+) strand; PAM type: NRG; PAM sequence: AGG
gttacatacctactcagatc

SEQ ID NO: 28783 - DNA, 20 bp, Artificial Sequence
  Description of Artificial Sequence: Synthetic oligonucleotide
  Target: SCNA; (+) strand; PAM type: NRG; PAM sequence: CAG
tacctactcagatcaggtct

SEQ ID NO: 28784 - DNA, 20 bp, Artificial Sequence
  Description of Artificial Sequence: Synthetic oligonucleotide
  Target: SCNA; (+) strand; PAM type: NRG; PAM sequence: CAG
tgtacaaattactatgtcat

SEQ ID NO: 28785 - DNA, 20 bp, Artificial Sequence
  Description of Artificial Sequence: Synthetic oligonucleotide
  Target: SCNA; (+) strand; PAM type: NRG; PAM sequence: TGG
ttactatgtcatcagccatc

SEQ ID NO: 28786 - DNA, 20 bp, Artificial Sequence
  Description of Artificial Sequence: Synthetic oligonucleotide
  Target: SCNA; (+) strand; PAM type: NRG; PAM sequence: TGG
catcagccatctggatcact

SEQ ID NO: 28787 - DNA, 20 bp, Artificial Sequence
  Description of Artificial Sequence: Synthetic oligonucleotide
  Target: SCNA; (+) strand; PAM type: NRG; PAM sequence: GGG
atcagccatctggatcactt

SEQ ID NO: 28788 - DNA, 20 bp, Artificial Sequence
  Description of Artificial Sequence: Synthetic oligonucleotide
  Target: SCNA; (+) strand; PAM type: NRG; PAM sequence: TAG
ccatctggatcacttgggaa

SEQ ID NO: 28789 - DNA, 20 bp, Artificial Sequence
  Description of Artificial Sequence: Synthetic oligonucleotide
  Target: SCNA; (+) strand; PAM type: NRG; PAM sequence: TGG
tcacttgggaatagtcacat

SEQ ID NO: 28790 - DNA, 20 bp, Artificial Sequence
  Description of Artificial Sequence: Synthetic oligonucleotide
  Target: SCNA; (+) strand; PAM type: NRG; PAM sequence: AAG
gtcacattggtgaacgctgt

SEQ ID NO: 28791 - DNA, 20 bp, Artificial Sequence
  Description of Artificial Sequence: Synthetic oligonucleotide
  Target: SCNA; (+) strand; PAM type: NRG; PAM sequence: CAG
ttatacataatccataccta

SEQ ID NO: 28792 - DNA, 20 bp, Artificial Sequence
  Description of Artificial Sequence: Synthetic oligonucleotide
  Target: SCNA; (+) strand; PAM type: NRG; PAM sequence: GAG
ataatccatacctacagatt

SEQ ID NO: 28793 - DNA, 20 bp, Artificial Sequence
  Description of Artificial Sequence: Synthetic oligonucleotide
  Target: SCNA; (+) strand; PAM type: NRG; PAM sequence: TAG
ttttaattaaatgatacctt

SEQ ID NO: 28794 - DNA, 20 bp, Artificial Sequence
  Description of Artificial Sequence: Synthetic oligonucleotide
  Target: SCNA; (+) strand; PAM type: NRG; PAM sequence: GAG
ttaattaaatgataccttta

SEQ ID NO: 28795 - DNA, 20 bp, Artificial Sequence
  Description of Artificial Sequence: Synthetic oligonucleotide
  Target: SCNA; (+) strand; PAM type: NRG; PAM sequence: CAG
aatgatacctttagagaacc

SEQ ID NO: 28796 - DNA, 20 bp, Artificial Sequence
  Description of Artificial Sequence: Synthetic oligonucleotide
  Target: SCNA; (+) strand; PAM type: NRG; PAM sequence: TAG
acacataaataacatatatt

SEQ ID NO: 28797 - DNA, 20 bp, Artificial Sequence
  Description of Artificial Sequence: Synthetic oligonucleotide
  Target: SCNA; (+) strand; PAM type: NRG; PAM sequence: AAG
cataaataacatatatttag

SEQ ID NO: 28798 - DNA, 20 bp, Artificial Sequence
  Description of Artificial Sequence: Synthetic oligonucleotide
  Target: SCNA; (+) strand; PAM type: NRG; PAM sequence: TAG
tactttgtttatcttttgtt

SEQ ID NO: 28799 - DNA, 20 bp, Artificial Sequence
  Description of Artificial Sequence: Synthetic oligonucleotide
  Target: SCNA; (+) strand; PAM type: NRG; PAM sequence: GAG
ctttgtttatcttttgttta

SEQ ID NO: 28800 - DNA, 20 bp, Artificial Sequence
  Description of Artificial Sequence: Synthetic oligonucleotide
  Target: SCNA; (+) strand; PAM type: NRG; PAM sequence: AGG
tttgtttatcttttgtttag

SEQ ID NO: 28801 - DNA, 20 bp, Artificial Sequence
  Description of Artificial Sequence: Synthetic oligonucleotide
  Target: SCNA; (+) strand; PAM type: NRG; PAM sequence: CAG
gtttatcttttgtttagagg

SEQ ID NO: 28802 - DNA, 20 bp, Artificial Sequence
  Description of Artificial Sequence: Synthetic oligonucleotide
  Target: SCNA; (+) strand; PAM type: NRG; PAM sequence: AGG
tttatcttttgtttagaggc

SEQ ID NO: 28803 - DNA, 20 bp, Artificial Sequence
  Description of Artificial Sequence: Synthetic oligonucleotide
  Target: SCNA; (+) strand; PAM type: NRG; PAM sequence: GGG
ttatcttttgtttagaggca

SEQ ID NO: 28804 - DNA, 20 bp, Artificial Sequence
  Description of Artificial Sequence: Synthetic oligonucleotide
  Target: SCNA; (+) strand; PAM type: NRG; PAM sequence: CAG
cagggtcttgccctattgcc

SEQ ID NO: 28805 - DNA, 20 bp, Artificial Sequence
  Description of Artificial Sequence: Synthetic oligonucleotide
  Target: SCNA; (+) strand; PAM type: NRG; PAM sequence: AGG
agggtcttgccctattgccc

SEQ ID NO: 28806 - DNA, 20 bp, Artificial Sequence
  Description of Artificial Sequence: Synthetic oligonucleotide
  Target: SCNA; (+) strand; PAM type: NRG; PAM sequence: CAG
ctattgcccaggctgtaatg

SEQ ID NO: 28807 - DNA, 20 bp, Artificial Sequence
  Description of Artificial Sequence: Synthetic oligonucleotide
  Target: SCNA; (+) strand; PAM type: NRG; PAM sequence: TAG
gtaatgcagtgatacaatca

SEQ ID NO: 28808 - DNA, 20 bp, Artificial Sequence
  Description of Artificial Sequence: Synthetic oligonucleotide
  Target: SCNA; (+) strand; PAM type: NRG; PAM sequence: TAG
gatacaatcatagctcactg

SEQ ID NO: 28809 - DNA, 20 bp, Artificial Sequence
  Description of Artificial Sequence: Synthetic oligonucleotide
  Target: SCNA; (+) strand; PAM type: NRG; PAM sequence: TGG
tcactgtagtctccaactcc

SEQ ID NO: 28810 - DNA, 20 bp, Artificial Sequence
  Description of Artificial Sequence: Synthetic oligonucleotide
  Target: SCNA; (+) strand; PAM type: NRG; PAM sequence: GGG
cactgtagtctccaactcct

SEQ ID NO: 28811 - DNA, 20 bp, Artificial Sequence
  Description of Artificial Sequence: Synthetic oligonucleotide
  Target: SCNA; (+) strand; PAM type: NRG; PAM sequence: AAG
agtctccaactcctgggccc

SEQ ID NO: 28812 - DNA, 20 bp, Artificial Sequence
  Description of Artificial Sequence: Synthetic oligonucleotide
  Target: SCNA; (+) strand; PAM type: NRG; PAM sequence: CAG
cctgggcccaagtgatcctc

SEQ ID NO: 28813 - DNA, 20 bp, Artificial Sequence
  Description of Artificial Sequence: Synthetic oligonucleotide
  Target: SCNA; (+) strand; PAM type: NRG; PAM sequence: CAG
cccaagtgatcctccagcct

SEQ ID NO: 28814 - DNA, 20 bp, Artificial Sequence
  Description of Artificial Sequence: Synthetic oligonucleotide
  Target: SCNA; (+) strand; PAM type: NRG; PAM sequence: TAG
tccagcctcagcctcccaaa

SEQ ID NO: 28815 - DNA, 20 bp, Artificial Sequence
  Description of Artificial Sequence: Synthetic oligonucleotide
  Target: SCNA; (+) strand; PAM type: NRG; PAM sequence: TGG
gcctcagcctcccaaatagc

SEQ ID NO: 28816 - DNA, 20 bp, Artificial Sequence
  Description of Artificial Sequence: Synthetic oligonucleotide
  Target: SCNA; (+) strand; PAM type: NRG; PAM sequence: GGG
cctcagcctcccaaatagct

SEQ ID NO: 28817 - DNA, 20 bp, Artificial Sequence
  Description of Artificial Sequence: Synthetic oligonucleotide
  Target: SCNA; (+) strand; PAM type: NRG; PAM sequence: TAG
ctcccaaatagctgggacta

SEQ ID NO: 28818 - DNA, 20 bp, Artificial Sequence
  Description of Artificial Sequence: Synthetic oligonucleotide
  Target: SCNA; (+) strand; PAM type: NRG; PAM sequence: AGG
tcccaaatagctgggactat

SEQ ID NO: 28819 - DNA, 20 bp, Artificial Sequence
  Description of Artificial Sequence: Synthetic oligonucleotide
  Target: SCNA; (+) strand; PAM type: NRG; PAM sequence: CGG
taggcttacaccaccatgct

SEQ ID NO: 28820 - DNA, 20 bp, Artificial Sequence
  Description of Artificial Sequence: Synthetic oligonucleotide
  Target: SCNA; (+) strand; PAM type: NRG; PAM sequence: TAG
atttaaatttttttttttta

SEQ ID NO: 28821 - DNA, 20 bp, Artificial Sequence
  Description of Artificial Sequence: Synthetic oligonucleotide
  Target: SCNA; (+) strand; PAM type: NRG; PAM sequence: GAG
ttaaattttttttttttata

SEQ ID NO: 28822 - DNA, 20 bp, Artificial Sequence
  Description of Artificial Sequence: Synthetic oligonucleotide
  Target: SCNA; (+) strand; PAM type: NRG; PAM sequence: AAG
tttttttttttatagagatg

SEQ ID NO: 28823 - DNA, 20 bp, Artificial Sequence
  Description of Artificial Sequence: Synthetic oligonucleotide
  Target: SCNA; (+) strand; PAM type: NRG; PAM sequence: CAG
tgaagtttcattatgttgcc

SEQ ID NO: 28824 - DNA, 20 bp, Artificial Sequence
  Description of Artificial Sequence: Synthetic oligonucleotide
  Target: SCNA; (+) strand; PAM type: NRG; PAM sequence: AGG
gaagtttcattatgttgccc

SEQ ID NO: 28825 - DNA, 20 bp, Artificial Sequence
  Description of Artificial Sequence: Synthetic oligonucleotide
  Target: SCNA; (+) strand; PAM type: NRG; PAM sequence: TGG
tttcattatgttgcccaggc

SEQ ID NO: 28826 - DNA, 20 bp, Artificial Sequence
  Description of Artificial Sequence: Synthetic oligonucleotide
  Target: SCNA; (+) strand; PAM type: NRG; PAM sequence: TGG
ccaggctggtctcaaactcc

SEQ ID NO: 28827 - DNA, 20 bp, Artificial Sequence
  Description of Artificial Sequence: Synthetic oligonucleotide
  Target: SCNA; (+) strand; PAM type: NRG; PAM sequence: AAG
ggtctcaaactcctggactc

SEQ ID NO: 28828 - DNA, 20 bp, Artificial Sequence
  Description of Artificial Sequence: Synthetic oligonucleotide
  Target: SCNA; (+) strand; PAM type: NRG; PAM sequence: CAG
ctcaagtgatcctcctgcgt

SEQ ID NO: 28829 - DNA, 20 bp, Artificial Sequence
  Description of Artificial Sequence: Synthetic oligonucleotide
  Target: SCNA; (+) strand; PAM type: NRG; PAM sequence: AAG
cctcctgcgtcagcctccga

SEQ ID NO: 28830 - DNA, 20 bp, Artificial Sequence
  Description of Artificial Sequence: Synthetic oligonucleotide
  Target: SCNA; (+) strand; PAM type: NRG; PAM sequence: TGG
gcgtcagcctccgaaagtgc

SEQ ID NO: 28831 - DNA, 20 bp, Artificial Sequence
  Description of Artificial Sequence: Synthetic oligonucleotide
  Target: SCNA; (+) strand; PAM type: NRG; PAM sequence: GGG
cgtcagcctccgaaagtgct

SEQ ID NO: 28832 - DNA, 20 bp, Artificial Sequence
  Description of Artificial Sequence: Synthetic oligonucleotide
  Target: SCNA; (+) strand; PAM type: NRG; PAM sequence: CAG
ctccgaaagtgctgggatta

SEQ ID NO: 28833 - DNA, 20 bp, Artificial Sequence
  Description of Artificial Sequence: Synthetic oligonucleotide
  Target: SCNA; (+) strand; PAM type: NRG; PAM sequence: AGG
tccgaaagtgctgggattac

SEQ ID NO: 28834 - DNA, 20 bp, Artificial Sequence
  Description of Artificial Sequence: Synthetic oligonucleotide
  Target: SCNA; (+) strand; PAM type: NRG; PAM sequence: GAG
agtgctgggattacaggcat

SEQ ID NO: 28835 - DNA, 20 bp, Artificial Sequence
  Description of Artificial Sequence: Synthetic oligonucleotide
  Target: SCNA; (+) strand; PAM type: NRG; PAM sequence: GAG
aggcatgagccactgcacct

SEQ ID NO: 28836 - DNA, 20 bp, Artificial Sequence
  Description of Artificial Sequence: Synthetic oligonucleotide
  Target: SCNA; (+) strand; PAM type: NRG; PAM sequence: TGG
acctgagccgtgctctactt

SEQ ID NO: 28837 - DNA, 20 bp, Artificial Sequence
  Description of Artificial Sequence: Synthetic oligonucleotide
  Target: SCNA; (+) strand; PAM type: NRG; PAM sequence: TAG
tttcttgtcttttgcccttc

SEQ ID NO: 28838 - DNA, 20 bp, Artificial Sequence
  Description of Artificial Sequence: Synthetic oligonucleotide
  Target: SCNA; (+) strand; PAM type: NRG; PAM sequence: TAG
tgcccttctagctgtttctt

SEQ ID NO: 28839 - DNA, 20 bp, Artificial Sequence
  Description of Artificial Sequence: Synthetic oligonucleotide
  Target: SCNA; (+) strand; PAM type: NRG; PAM sequence: TGG
tctagctgtttctttagtct

SEQ ID NO: 28840 - DNA, 20 bp, Artificial Sequence
  Description of Artificial Sequence: Synthetic oligonucleotide
  Target: SCNA; (+) strand; PAM type: NRG; PAM sequence: TAG
tttagtcttggcaatcacct

SEQ ID NO: 28841 - DNA, 20 bp, Artificial Sequence
  Description of Artificial Sequence: Synthetic oligonucleotide
  Target: SCNA; (+) strand; PAM type: NRG; PAM sequence: GAG
tagtcttggcaatcacctta

SEQ ID NO: 28842 - DNA, 20 bp, Artificial Sequence
  Description of Artificial Sequence: Synthetic oligonucleotide
  Target: SCNA; (+) strand; PAM type: NRG; PAM sequence: GAG
gtcttggcaatcaccttaga

SEQ ID NO: 28843 - DNA, 20 bp, Artificial Sequence
  Description of Artificial Sequence: Synthetic oligonucleotide
  Target: SCNA; (+) strand; PAM type: NRG; PAM sequence: GAG
cttggcaatcaccttagaga

SEQ ID NO: 28844 - DNA, 20 bp, Artificial Sequence
  Description of Artificial Sequence: Synthetic oligonucleotide
  Target: SCNA; (+) strand; PAM type: NRG; PAM sequence: GAG
tggcaatcaccttagagaga

SEQ ID NO: 28845 - DNA, 20 bp, Artificial Sequence
  Description of Artificial Sequence: Synthetic oligonucleotide
  Target: SCNA; (+) strand; PAM type: NRG; PAM sequence: AAG
tcaccttagagagagagaaa

SEQ ID NO: 28846 - DNA, 20 bp, Artificial Sequence
  Description of Artificial Sequence: Synthetic oligonucleotide
  Target: SCNA; (+) strand; PAM type: NRG; PAM sequence: GAG
accttagagagagagaaaaa

SEQ ID NO: 28847 - DNA, 20 bp, Artificial Sequence
  Description of Artificial Sequence: Synthetic oligonucleotide
  Target: SCNA; (+) strand; PAM type: NRG; PAM sequence: AAG
agagagagagaaaaagagaa

SEQ ID NO: 28848 - DNA, 20 bp, Artificial Sequence
  Description of Artificial Sequence: Synthetic oligonucleotide
  Target: SCNA; (+) strand; PAM type: NRG; PAM sequence: CAG
gaaataaaaacaatttattt

SEQ ID NO: 28849 - DNA, 20 bp, Artificial Sequence
  Description of Artificial Sequence: Synthetic oligonucleotide
  Target: SCNA; (+) strand; PAM type: NRG; PAM sequence: AAG
acaatttatttcagttttta

SEQ ID NO: 28850 - DNA, 20 bp, Artificial Sequence
  Description of Artificial Sequence: Synthetic oligonucleotide
  Target: SCNA; (+) strand; PAM type: NRG; PAM sequence: AGG
caatttatttcagtttttaa

SEQ ID NO: 28851 - DNA, 20 bp, Artificial Sequence
  Description of Artificial Sequence: Synthetic oligonucleotide
  Target: SCNA; (+) strand; PAM type: NRG; PAM sequence: TGG
tatttcagtttttaaaggtt

SEQ ID NO: 28852 - DNA, 20 bp, Artificial Sequence
  Description of Artificial Sequence: Synthetic oligonucleotide
  Target: SCNA; (+) strand; PAM type: NRG; PAM sequence: CAG
ttcagtttttaaaggtttgg

SEQ ID NO: 28853 - DNA, 20 bp, Artificial Sequence
  Description of Artificial Sequence: Synthetic oligonucleotide
  Target: SCNA; (+) strand; PAM type: NRG; PAM sequence: TGG
agtttttaaaggtttggcag

SEQ ID NO: 28854 - DNA, 20 bp, Artificial Sequence
  Description of Artificial Sequence: Synthetic oligonucleotide
  Target: SCNA; (+) strand; PAM type: NRG; PAM sequence: GAG
tttttaaaggtttggcagtg

SEQ ID NO: 28855 - DNA, 20 bp, Artificial Sequence
  Description of Artificial Sequence: Synthetic oligonucleotide
  Target: SCNA; (+) strand; PAM type: NRG; PAM sequence: AGG
ttttaaaggtttggcagtgg

SEQ ID NO: 28856 - DNA, 20 bp, Artificial Sequence
  Description of Artificial Sequence: Synthetic oligonucleotide
  Target: SCNA; (+) strand; PAM type: NRG; PAM sequence: GAG
ttaaaggtttggcagtggag

SEQ ID NO: 28857 - DNA, 20 bp, Artificial Sequence
  Description of Artificial Sequence: Synthetic oligonucleotide
  Target: SCNA; (+) strand; PAM type: NRG; PAM sequence: GAG
aaaggtttggcagtggagga

SEQ ID NO: 28858 - DNA, 20 bp, Artificial Sequence
  Description of Artificial Sequence: Synthetic oligonucleotide
  Target: SCNA; (+) strand; PAM type: NRG; PAM sequence: GAG
aggtttggcagtggaggaga

SEQ ID NO: 28859 - DNA, 20 bp, Artificial Sequence
  Description of Artificial Sequence: Synthetic oligonucleotide
  Target: SCNA; (+) strand; PAM type: NRG; PAM sequence: AAG
tggcagtggaggagagagta

SEQ ID NO: 28860 - DNA, 20 bp, Artificial Sequence
  Description of Artificial Sequence: Synthetic oligonucleotide
  Target: SCNA; (+) strand; PAM type: NRG; PAM sequence: TGG
gctaatatattaaatatatt

SEQ ID NO: 28861 - DNA, 20 bp, Artificial Sequence
  Description of Artificial Sequence: Synthetic oligonucleotide
  Target: SCNA; (+) strand; PAM type: NRG; PAM sequence: GGG
ctaatatattaaatatattt

SEQ ID NO: 28862 - DNA, 20 bp, Artificial Sequence
  Description of Artificial Sequence: Synthetic oligonucleotide
  Target: SCNA; (+) strand; PAM type: NRG; PAM sequence: GGG
taatatattaaatatatttg

SEQ ID NO: 28863 - DNA, 20 bp, Artificial Sequence
  Description of Artificial Sequence: Synthetic oligonucleotide
  Target: SCNA; (+) strand; PAM type: NRG; PAM sequence: TGG
aaatatatttggggttattt

SEQ ID NO: 28864 - DNA, 20 bp, Artificial Sequence
  Description of Artificial Sequence: Synthetic oligonucleotide
  Target: SCNA; (+) strand; PAM type: NRG; PAM sequence: GGG
aatatatttggggttatttt

SEQ ID NO: 28865 - DNA, 20 bp, Artificial Sequence
  Description of Artificial Sequence: Synthetic oligonucleotide
  Target: SCNA; (+) strand; PAM type: NRG; PAM sequence: GGG
atatatttggggttattttg

SEQ ID NO: 28866 - DNA, 20 bp, Artificial Sequence
  Description of Artificial Sequence: Synthetic oligonucleotide
  Target: SCNA; (+) strand; PAM type: NRG; PAM sequence: GAG
atatttggggttattttggg

SEQ ID NO: 28867 - DNA, 20 bp, Artificial Sequence
  Description of Artificial Sequence: Synthetic oligonucleotide
  Target: SCNA; (+) strand; PAM type: NRG; PAM sequence: TAG
tattttggggagctatttac

SEQ ID NO: 28868 - DNA, 20 bp, Artificial Sequence
  Description of Artificial Sequence: Synthetic oligonucleotide
  Target: SCNA; (+) strand; PAM type: NRG; PAM sequence: CAG
actagttttatctctgaatt

SEQ ID NO: 28869 - DNA, 20 bp, Artificial Sequence
  Description of Artificial Sequence: Synthetic oligonucleotide
  Target: SCNA; (+) strand; PAM type: NRG; PAM sequence: AGG
ctagttttatctctgaattc

SEQ ID NO: 28870 - DNA, 20 bp, Artificial Sequence
  Description of Artificial Sequence: Synthetic oligonucleotide
  Target: SCNA; (+) strand; PAM type: NRG; PAM sequence: TGG
accataaattaaaaaataat

SEQ ID NO: 28871 - DNA, 20 bp, Artificial Sequence
  Description of Artificial Sequence: Synthetic oligonucleotide
  Target: SCNA; (+) strand; PAM type: NRG; PAM sequence: TGG
ataaattaaaaaataattgg

SEQ ID NO: 28872 - DNA, 20 bp, Artificial Sequence
  Description of Artificial Sequence: Synthetic oligonucleotide
  Target: SCNA; (+) strand; PAM type: NRG; PAM sequence: CAG
aaaataattggtggataaat

SEQ ID NO: 28873 - DNA, 20 bp, Artificial Sequence
  Description of Artificial Sequence: Synthetic oligonucleotide
  Target: SCNA; (+) strand; PAM type: NRG; PAM sequence: AGG
aaataattggtggataaatc

SEQ ID NO: 28874 - DNA, 20 bp, Artificial Sequence
  Description of Artificial Sequence: Synthetic oligonucleotide
  Target: SCNA; (+) strand; PAM type: NRG; PAM sequence: TGG
ttggtggataaatcaggaat

SEQ ID NO: 28875 - DNA, 20 bp, Artificial Sequence
  Description of Artificial Sequence: Synthetic oligonucleotide
  Target: SCNA; (+) strand; PAM type: NRG; PAM sequence: AAG
attggtgcaaaatcattttt

SEQ ID NO: 28876 - DNA, 20 bp, Artificial Sequence
  Description of Artificial Sequence: Synthetic oligonucleotide
  Target: SCNA; (+) strand; PAM type: NRG; PAM sequence: AAG
ggtgcaaaatcatttttaag

SEQ ID NO: 28877 - DNA, 20 bp, Artificial Sequence
  Description of Artificial Sequence: Synthetic oligonucleotide
  Target: SCNA; (+) strand; PAM type: NRG; PAM sequence: TAG
aagaagaaaatgtcattata

SEQ ID NO: 28878 - DNA, 20 bp, Artificial Sequence
  Description of Artificial Sequence: Synthetic oligonucleotide
  Target: SCNA; (+) strand; PAM type: NRG; PAM sequence: AAG
gaaaatgtcattatatagca

SEQ ID NO: 28879 - DNA, 20 bp, Artificial Sequence
  Description of Artificial Sequence: Synthetic oligonucleotide
  Target: SCNA; (+) strand; PAM type: NRG; PAM sequence: GAG
aaatgtcattatatagcaaa

SEQ ID NO: 28880 - DNA, 20 bp, Artificial Sequence
  Description of Artificial Sequence: Synthetic oligonucleotide
  Target: SCNA; (+) strand; PAM type: NRG; PAM sequence: AGG
aatgtcattatatagcaaag

SEQ ID NO: 28881 - DNA, 20 bp, Artificial Sequence
  Description of Artificial Sequence: Synthetic oligonucleotide
  Target: SCNA; (+) strand; PAM type: NRG; PAM sequence: TAG
gtcattatatagcaaagagg

SEQ ID NO: 28882 - DNA, 20 bp, Artificial Sequence
  Description of Artificial Sequence: Synthetic oligonucleotide
  Target: SCNA; (+) strand; PAM type: NRG; PAM sequence: TGG
ctttaaatccttattttcct

SEQ ID NO: 28883 - DNA, 20 bp, Artificial Sequence
  Description of Artificial Sequence: Synthetic oligonucleotide
  Target: SCNA; (+) strand; PAM type: NRG; PAM sequence: AAG
aaatccttattttccttggc

SEQ ID NO: 28884 - DNA, 20 bp, Artificial Sequence
  Description of Artificial Sequence: Synthetic oligonucleotide
  Target: SCNA; (+) strand; PAM type: NRG; PAM sequence: AAG
ttttccttggcaagcctaac

SEQ ID NO: 28885 - DNA, 20 bp, Artificial Sequence
  Description of Artificial Sequence: Synthetic oligonucleotide
  Target: SCNA; (+) strand; PAM type: NRG; PAM sequence: CAG
tccttggcaagcctaacaag

SEQ ID NO: 28886 - DNA, 20 bp, Artificial Sequence
  Description of Artificial Sequence: Synthetic oligonucleotide
  Target: SCNA; (+) strand; PAM type: NRG; PAM sequence: AGG
ccttggcaagcctaacaagc

SEQ ID NO: 28887 - DNA, 20 bp, Artificial Sequence
  Description of Artificial Sequence: Synthetic oligonucleotide
  Target: SCNA; (+) strand; PAM type: NRG; PAM sequence: GGG
cttggcaagcctaacaagca

SEQ ID NO: 28888 - DNA, 20 bp, Artificial Sequence
  Description of Artificial Sequence: Synthetic oligonucleotide
  Target: SCNA; (+) strand; PAM type: NRG; PAM sequence: CAG
ggcaagcctaacaagcaggg

SEQ ID NO: 28889 - DNA, 20 bp, Artificial Sequence
  Description of Artificial Sequence: Synthetic oligonucleotide
  Target: SCNA; (+) strand; PAM type: NRG; PAM sequence: TGG
ggcagtgcctgctgtattta

SEQ ID NO: 28890 - DNA, 20 bp, Artificial Sequence
  Description of Artificial Sequence: Synthetic oligonucleotide
  Target: SCNA; (+) strand; PAM type: NRG; PAM sequence: TAG
agtgcctgctgtatttatgg

SEQ ID NO: 28891 - DNA, 20 bp, Artificial Sequence
  Description of Artificial Sequence: Synthetic oligonucleotide
  Target: SCNA; (+) strand; PAM type: NRG; PAM sequence: TAG
ttatggtagtgccatataat

SEQ ID NO: 28892 - DNA, 20 bp, Artificial Sequence
  Description of Artificial Sequence: Synthetic oligonucleotide
  Target: SCNA; (+) strand; PAM type: NRG; PAM sequence: AAG
aattagctgactcacctaat

SEQ ID NO: 28893 - DNA, 20 bp, Artificial Sequence
  Description of Artificial Sequence: Synthetic oligonucleotide
  Target: SCNA; (+) strand; PAM type: NRG; PAM sequence: CAG
actcacctaataagacttca

SEQ ID NO: 28894 - DNA, 20 bp, Artificial Sequence
  Description of Artificial Sequence: Synthetic oligonucleotide
  Target: SCNA; (+) strand; PAM type: NRG; PAM sequence: CAG
cctaataagacttcacagcg

SEQ ID NO: 28895 - DNA, 20 bp, Artificial Sequence
  Description of Artificial Sequence: Synthetic oligonucleotide
  Target: SCNA; (+) strand; PAM type: NRG; PAM sequence: CAG
cacagcgcagcaacaactgc

SEQ ID NO: 28896 - DNA, 20 bp, Artificial Sequence
  Description of Artificial Sequence: Synthetic oligonucleotide
  Target: SCNA; (+) strand; PAM type: NRG; PAM sequence: TGG
gctttttttgtcctgttact

SEQ ID NO: 28897 - DNA, 20 bp, Artificial Sequence
  Description of Artificial Sequence: Synthetic oligonucleotide
  Target: SCNA; (+) strand; PAM type: NRG; PAM sequence: TAG
tttttgtcctgttacttgga

SEQ ID NO: 28898 - DNA, 20 bp, Artificial Sequence
  Description of Artificial Sequence: Synthetic oligonucleotide
  Target: SCNA; (+) strand; PAM type: NRG; PAM sequence: CGG
tcctgttacttggatagact

SEQ ID NO: 28899 - DNA, 20 bp, Artificial Sequence
  Description of Artificial Sequence: Synthetic oligonucleotide
  Target: SCNA; (+) strand; PAM type: NRG; PAM sequence: AAG
gttgaatatactaatgcaca

SEQ ID NO: 28900 - DNA, 20 bp, Artificial Sequence
  Description of Artificial Sequence: Synthetic oligonucleotide
  Target: SCNA; (+) strand; PAM type: NRG; PAM sequence: AGG
ttgaatatactaatgcacaa

SEQ ID NO: 28901 - DNA, 20 bp, Artificial Sequence
  Description of Artificial Sequence: Synthetic oligonucleotide
  Target: SCNA; (+) strand; PAM type: NRG; PAM sequence: GGG
tgaatatactaatgcacaaa

SEQ ID NO: 28902 - DNA, 20 bp, Artificial Sequence
  Description of Artificial Sequence: Synthetic oligonucleotide
  Target: SCNA; (+) strand; PAM type: NRG; PAM sequence: TGG
ctaatgcacaaagggaaatc

SEQ ID NO: 28903 - DNA, 20 bp, Artificial Sequence
  Description of Artificial Sequence: Synthetic oligonucleotide
  Target: SCNA; (+) strand; PAM type: NRG; PAM sequence: GGG
taatgcacaaagggaaatct

SEQ ID NO: 28904 - DNA, 20 bp, Artificial Sequence
  Description of Artificial Sequence: Synthetic oligonucleotide
  Target: SCNA; (+) strand; PAM type: NRG; PAM sequence: AAG
tatttttacttttcatgtct

SEQ ID NO: 28905 - DNA, 20 bp, Artificial Sequence
  Description of Artificial Sequence: Synthetic oligonucleotide
  Target: SCNA; (+) strand; PAM type: NRG; PAM sequence: AGG
atttttacttttcatgtcta

SEQ ID NO: 28906 - DNA, 20 bp, Artificial Sequence
  Description of Artificial Sequence: Synthetic oligonucleotide
  Target: SCNA; (+) strand; PAM type: NRG; PAM sequence: GGG
tttttacttttcatgtctaa

SEQ ID NO: 28907 - DNA, 20 bp, Artificial Sequence
  Description of Artificial Sequence: Synthetic oligonucleotide
  Target: SCNA; (+) strand; PAM type: NRG; PAM sequence: TAG
aagggctgatcctcctcttc

SEQ ID NO: 28908 - DNA, 20 bp, Artificial Sequence
  Description of Artificial Sequence: Synthetic oligonucleotide
  Target: SCNA; (+) strand; PAM type: NRG; PAM sequence: AAG
tcaaatttgtttactatttt

SEQ ID NO: 28909 - DNA, 20 bp, Artificial Sequence
  Description of Artificial Sequence: Synthetic oligonucleotide
  Target: SCNA; (+) strand; PAM type: NRG; PAM sequence: TGG
tttactattttaagctttca

SEQ ID NO: 28910 - DNA, 20 bp, Artificial Sequence
  Description of Artificial Sequence: Synthetic oligonucleotide
  Target: SCNA; (+) strand; PAM type: NRG; PAM sequence: TAG
tattttaagctttcatggat

SEQ ID NO: 28911 - DNA, 20 bp, Artificial Sequence
  Description of Artificial Sequence: Synthetic oligonucleotide
  Target: SCNA; (+) strand; PAM type: NRG; PAM sequence: AAG
tttcatggattagaatcttg

SEQ ID NO: 28912 - DNA, 20 bp, Artificial Sequence
  Description of Artificial Sequence: Synthetic oligonucleotide
  Target: SCNA; (+) strand; PAM type: NRG; PAM sequence: AGG
ttcatggattagaatcttga

SEQ ID NO: 28913 - DNA, 20 bp, Artificial Sequence
  Description of Artificial Sequence: Synthetic oligonucleotide
  Target: SCNA; (+) strand; PAM type: NRG; PAM sequence: CAG
tggattagaatcttgaaggt

SEQ ID NO: 28914 - DNA, 20 bp, Artificial Sequence
  Description of Artificial Sequence: Synthetic oligonucleotide
  Target: SCNA; (+) strand; PAM type: NRG; PAM sequence: TGG
aatcttgaaggtcagcccct

SEQ ID NO: 28915 - DNA, 20 bp, Artificial Sequence
  Description of Artificial Sequence: Synthetic oligonucleotide
  Target: SCNA; (+) strand; PAM type: NRG; PAM sequence: GGG
atcttgaaggtcagcccctt

SEQ ID NO: 28916 - DNA, 20 bp, Artificial Sequence
  Description of Artificial Sequence: Synthetic oligonucleotide
  Target: SCNA; (+) strand; PAM type: NRG; PAM sequence: TAG
ttgaaggtcagccccttggg

SEQ ID NO: 28917 - DNA, 20 bp, Artificial Sequence
  Description of Artificial Sequence: Synthetic oligonucleotide
  Target: SCNA; (+) strand; PAM type: NRG; PAM sequence: AAG
cccttgggtagtgactgaat

SEQ ID NO: 28918 - DNA, 20 bp, Artificial Sequence
  Description of Artificial Sequence: Synthetic oligonucleotide
  Target: SCNA; (+) strand; PAM type: NRG; PAM sequence: AAG
aataagacattaacgatgtg

SEQ ID NO: 28919 - DNA, 20 bp, Artificial Sequence
  Description of Artificial Sequence: Synthetic oligonucleotide
  Target: SCNA; (+) strand; PAM type: NRG; PAM sequence: TGG
agacattaacgatgtgaaga

SEQ ID NO: 28920 - DNA, 20 bp, Artificial Sequence
  Description of Artificial Sequence: Synthetic oligonucleotide
  Target: SCNA; (+) strand; PAM type: NRG; PAM sequence: GGG
gacattaacgatgtgaagat

SEQ ID NO: 28921 - DNA, 20 bp, Artificial Sequence
  Description of Artificial Sequence: Synthetic oligonucleotide
  Target: SCNA; (+) strand; PAM type: NRG; PAM sequence: AAG
taacgatgtgaagatgggtc

SEQ ID NO: 28922 - DNA, 20 bp, Artificial Sequence
  Description of Artificial Sequence: Synthetic oligonucleotide
  Target: SCNA; (+) strand; PAM type: NRG; PAM sequence: GAG
atgtgaagatgggtcaagct

SEQ ID NO: 28923 - DNA, 20 bp, Artificial Sequence
  Description of Artificial Sequence: Synthetic oligonucleotide
  Target: SCNA; (+) strand; PAM type: NRG; PAM sequence: AAG
gaagatgggtcaagctgaga

SEQ ID NO: 28924 - DNA, 20 bp, Artificial Sequence
  Description of Artificial Sequence: Synthetic oligonucleotide
  Target: SCNA; (+) strand; PAM type: NRG; PAM sequence: AGG
aagatgggtcaagctgagaa

SEQ ID NO: 28925 - DNA, 20 bp, Artificial Sequence
  Description of Artificial Sequence: Synthetic oligonucleotide
  Target: SCNA; (+) strand; PAM type: NRG; PAM sequence: GAG
gaaaggtttgctcttgtgct

SEQ ID NO: 28926 - DNA, 20 bp, Artificial Sequence
  Description of Artificial Sequence: Synthetic oligonucleotide
  Target: SCNA; (+) strand; PAM type: NRG; PAM sequence: CAG
gtttgctcttgtgctgagct

SEQ ID NO: 28927 - DNA, 20 bp, Artificial Sequence
  Description of Artificial Sequence: Synthetic oligonucleotide
  Target: SCNA; (+) strand; PAM type: NRG; PAM sequence: AAG
gtgctgagctcagaatcaat

SEQ ID NO: 28928 - DNA, 20 bp, Artificial Sequence
  Description of Artificial Sequence: Synthetic oligonucleotide
  Target: SCNA; (+) strand; PAM type: NRG; PAM sequence: TGG
tttgcaaatacaatgatatt

SEQ ID NO: 28929 - DNA, 20 bp, Artificial Sequence
  Description of Artificial Sequence: Synthetic oligonucleotide
  Target: SCNA; (+) strand; PAM type: NRG; PAM sequence: GAG
tgcaaatacaatgatatttg

SEQ ID NO: 28930 - DNA, 20 bp, Artificial Sequence
  Description of Artificial Sequence: Synthetic oligonucleotide
  Target: SCNA; (+) strand; PAM type: NRG; PAM sequence: AGG
gcaaatacaatgatatttgg

SEQ ID NO: 28931 - DNA, 20 bp, Artificial Sequence
  Description of Artificial Sequence: Synthetic oligonucleotide
  Target: SCNA; (+) strand; PAM type: NRG; PAM sequence: CAG
aatacaatgatatttggagg

SEQ ID NO: 28932 - DNA, 20 bp, Artificial Sequence
  Description of Artificial Sequence: Synthetic oligonucleotide
  Target: SCNA; (+) strand; PAM type: NRG; PAM sequence: AGG
atacaatgatatttggaggc

SEQ ID NO: 28933 - DNA, 20 bp, Artificial Sequence
  Description of Artificial Sequence: Synthetic oligonucleotide
  Target: SCNA; (+) strand; PAM type: NRG; PAM sequence: GAG
tttttttttttttttttttt

SEQ ID NO: 28934 - DNA, 20 bp, Artificial Sequence
  Description of Artificial Sequence: Synthetic oligonucleotide
  Target: SCNA; (+) strand; PAM type: NRG; PAM sequence: CAG
ttttttttttttttttgaga

SEQ ID NO: 28935 - DNA, 20 bp, Artificial Sequence
  Description of Artificial Sequence: Synthetic oligonucleotide
  Target: SCNA; (+) strand; PAM type: NRG; PAM sequence: GAG
ttttttttttttttgagaca

SEQ ID NO: 28936 - DNA, 20 bp, Artificial Sequence
  Description of Artificial Sequence: Synthetic oligonucleotide
  Target: SCNA; (+) strand; PAM type: NRG; PAM sequence: CAG
cagagtctcgctctgtcgcc

SEQ ID NO: 28937 - DNA, 20 bp, Artificial Sequence
  Description of Artificial Sequence: Synthetic oligonucleotide
  Target: SCNA; (+) strand; PAM type: NRG; PAM sequence: AGG
agagtctcgctctgtcgccc

SEQ ID NO: 28938 - DNA, 20 bp, Artificial Sequence
  Description of Artificial Sequence: Synthetic oligonucleotide
  Target: SCNA; (+) strand; PAM type: NRG; PAM sequence: TGG
tctcgctctgtcgcccaggc

SEQ ID NO: 28939 - DNA, 20 bp, Artificial Sequence
  Description of Artificial Sequence: Synthetic oligonucleotide
  Target: SCNA; (+) strand; PAM type: NRG; PAM sequence: GAG
tcgctctgtcgcccaggctg

SEQ ID NO: 28940 - DNA, 20 bp, Artificial Sequence
  Description of Artificial Sequence: Synthetic oligonucleotide
  Target: SCNA; (+) strand; PAM type: NRG; PAM sequence: CAG
ctgtcgcccaggctggagtg

SEQ ID NO: 28941 - DNA, 20 bp, Artificial Sequence
  Description of Artificial Sequence: Synthetic oligonucleotide
  Target: SCNA; (+) strand; PAM type: NRG; PAM sequence: TGG
tcgcccaggctggagtgcag

SEQ ID NO: 28942 - DNA, 20 bp, Artificial Sequence
  Description of Artificial Sequence: Synthetic oligonucleotide
  Target: SCNA; (+) strand; PAM type: NRG; PAM sequence: CAG
ggagtgcagtggcgcgatct

SEQ ID NO: 28943 - DNA, 20 bp, Artificial Sequence
  Description of Artificial Sequence: Synthetic oligonucleotide
  Target: SCNA; (+) strand; PAM type: NRG; PAM sequence: AAG
gcgcgatctcagctcactgc

SEQ ID NO: 28944 - DNA, 20 bp, Artificial Sequence
  Description of Artificial Sequence: Synthetic oligonucleotide
  Target: SCNA; (+) strand; PAM type: NRG; PAM sequence: CGG
tcactgcaagctctgcctca

SEQ ID NO: 28945 - DNA, 20 bp, Artificial Sequence
  Description of Artificial Sequence: Synthetic oligonucleotide
  Target: SCNA; (+) strand; PAM type: NRG; PAM sequence: GGG
cactgcaagctctgcctcac

SEQ ID NO: 28946 - DNA, 20 bp, Artificial Sequence
  Description of Artificial Sequence: Synthetic oligonucleotide
  Target: SCNA; (+) strand; PAM type: NRG; PAM sequence: CAG
atcacgccattctcctgctt

SEQ ID NO: 28947 - DNA, 20 bp, Artificial Sequence
  Description of Artificial Sequence: Synthetic oligonucleotide
  Target: SCNA; (+) strand; PAM type: NRG; PAM sequence: GAG
ttctcctgcttcagcctccc

SEQ ID NO: 28948 - DNA, 20 bp, Artificial Sequence
  Description of Artificial Sequence: Synthetic oligonucleotide
  Target: SCNA; (+) strand; PAM type: NRG; PAM sequence: TAG
tcctgcttcagcctcccgag

SEQ ID NO: 28949 - DNA, 20 bp, Artificial Sequence
  Description of Artificial Sequence: Synthetic oligonucleotide
  Target: SCNA; (+) strand; PAM type: NRG; PAM sequence: TGG
gcttcagcctcccgagtagc

SEQ ID NO: 28950 - DNA, 20 bp, Artificial Sequence
  Description of Artificial Sequence: Synthetic oligonucleotide
  Target: SCNA; (+) strand; PAM type: NRG; PAM sequence: GGG
cttcagcctcccgagtagct

SEQ ID NO: 28951 - DNA, 20 bp, Artificial Sequence
  Description of Artificial Sequence: Synthetic oligonucleotide
  Target: SCNA; (+) strand; PAM type: NRG; PAM sequence: CAG
ctcccgagtagctgggacta

SEQ ID NO: 28952 - DNA, 20 bp, Artificial Sequence
  Description of Artificial Sequence: Synthetic oligonucleotide
  Target: SCNA; (+) strand; PAM type: NRG; PAM sequence: AGG
tcccgagtagctgggactac

SEQ ID NO: 28953 - DNA, 20 bp, Artificial Sequence
  Description of Artificial Sequence: Synthetic oligonucleotide
  Target: SCNA; (+) strand; PAM type: NRG; PAM sequence: TGG
caggcgctcaccaccacgcc

SEQ ID NO: 28954 - DNA, 20 bp, Artificial Sequence
  Description of Artificial Sequence: Synthetic oligonucleotide
  Target: SCNA; (+) strand; PAM type: NRG; PAM sequence: TAG
ggctaatttttttgtaattt

SEQ ID NO: 28955 - DNA, 20 bp, Artificial Sequence
  Description of Artificial Sequence: Synthetic oligonucleotide
  Target: SCNA; (+) strand; PAM type: NRG; PAM sequence: TAG
taatttttttgtaattttag

SEQ ID NO: 28956 - DNA, 20 bp, Artificial Sequence
  Description of Artificial Sequence: Synthetic oligonucleotide
  Target: SCNA; (+) strand; PAM type: NRG; PAM sequence: GAG
atttttttgtaattttagta

SEQ ID NO: 28957 - DNA, 20 bp, Artificial Sequence
  Description of Artificial Sequence: Synthetic oligonucleotide
  Target: SCNA; (+) strand; PAM type: NRG; PAM sequence: CAG
ttttgtaattttagtagaga

SEQ ID NO: 28958 - DNA, 20 bp, Artificial Sequence
  Description of Artificial Sequence: Synthetic oligonucleotide
  Target: SCNA; (+) strand; PAM type: NRG; PAM sequence: AGG
tttgtaattttagtagagac

SEQ ID NO: 28959 - DNA, 20 bp, Artificial Sequence
  Description of Artificial Sequence: Synthetic oligonucleotide
  Target: SCNA; (+) strand; PAM type: NRG; PAM sequence: GGG
ttgtaattttagtagagaca

SEQ ID NO: 28960 - DNA, 20 bp, Artificial Sequence
  Description of Artificial Sequence: Synthetic oligonucleotide
  Target: SCNA; (+) strand; PAM type: NRG; PAM sequence: TAG
gagacagggtttcactgtgt

SEQ ID NO: 28961 - DNA, 20 bp, Artificial Sequence
  Description of Artificial Sequence: Synthetic oligonucleotide
  Target: SCNA; (+) strand; PAM type: NRG; PAM sequence: CAG
cagggtttcactgtgttagc

SEQ ID NO: 28962 - DNA, 20 bp, Artificial Sequence
  Description of Artificial Sequence: Synthetic oligonucleotide
  Target: SCNA; (+) strand; PAM type: NRG; PAM sequence: AGG
agggtttcactgtgttagcc

SEQ ID NO: 28963 - DNA, 20 bp, Artificial Sequence
  Description of Artificial Sequence: Synthetic oligonucleotide
  Target: SCNA; (+) strand; PAM type: NRG; PAM sequence: TGG
tttcactgtgttagccagga

SEQ ID NO: 28964 - DNA, 20 bp, Artificial Sequence
  Description of Artificial Sequence: Synthetic oligonucleotide
  Target: SCNA; (+) strand; PAM type: NRG; PAM sequence: TGG
acctcgtgatccacctacct

SEQ ID NO: 28965 - DNA, 20 bp, Artificial Sequence
  Description of Artificial Sequence: Synthetic oligonucleotide
  Target: SCNA; (+) strand; PAM type: NRG; PAM sequence: AAG
ccacctaccttggcctccca

SEQ ID NO: 28966 - DNA, 20 bp, Artificial Sequence
  Description of Artificial Sequence: Synthetic oligonucleotide
  Target: SCNA; (+) strand; PAM type: NRG; PAM sequence: TGG
accttggcctcccaaagtgc

SEQ ID NO: 28967 - DNA, 20 bp, Artificial Sequence
  Description of Artificial Sequence: Synthetic oligonucleotide
  Target: SCNA; (+) strand; PAM type: NRG; PAM sequence: GGG
ccttggcctcccaaagtgct

SEQ ID NO: 28968 - DNA, 20 bp, Artificial Sequence
  Description of Artificial Sequence: Synthetic oligonucleotide
  Target: SCNA; (+) strand; PAM type: NRG; PAM sequence: CAG
ctcccaaagtgctgggatta

SEQ ID NO: 28969 - DNA, 20 bp, Artificial Sequence
  Description of Artificial Sequence: Synthetic oligonucleotide
  Target: SCNA; (+) strand; PAM type: NRG; PAM sequence: AGG
tcccaaagtgctgggattac

SEQ ID NO: 28970 - DNA, 20 bp, Artificial Sequence
  Description of Artificial Sequence: Synthetic oligonucleotide
  Target: SCNA; (+) strand; PAM type: NRG; PAM sequence: GAG
agtgctgggattacaggcgt

SEQ ID NO: 28971 - DNA, 20 bp, Artificial Sequence
  Description of Artificial Sequence: Synthetic oligonucleotide
  Target: SCNA; (+) strand; PAM type: NRG; PAM sequence: CGG
caggcgtgagccactgcgcc

SEQ ID NO: 28972 - DNA, 20 bp, Artificial Sequence
  Description of Artificial Sequence: Synthetic oligonucleotide
  Target: SCNA; (+) strand; PAM type: NRG; PAM sequence: CAG
cgtgagccactgcgcccggc

SEQ ID NO: 28973 - DNA, 20 bp, Artificial Sequence
  Description of Artificial Sequence: Synthetic oligonucleotide
  Target: SCNA; (+) strand; PAM type: NRG; PAM sequence: GAG
tgagccactgcgcccggcca

SEQ ID NO: 28974 - DNA, 20 bp, Artificial Sequence
  Description of Artificial Sequence: Synthetic oligonucleotide
  Target: SCNA; (+) strand; PAM type: NRG; PAM sequence: AGG
gagccactgcgcccggccag

SEQ ID NO: 28975 - DNA, 20 bp, Artificial Sequence
  Description of Artificial Sequence: Synthetic oligonucleotide
  Target: SCNA; (+) strand; PAM type: NRG; PAM sequence: CAG
ccactgcgcccggccagagg

SEQ ID NO: 28976 - DNA, 20 bp, Artificial Sequence
  Description of Artificial Sequence: Synthetic oligonucleotide
  Target: SCNA; (+) strand; PAM type: NRG; PAM sequence: AGG
cactgcgcccggccagaggc

SEQ ID NO: 28977 - DNA, 20 bp, Artificial Sequence
  Description of Artificial Sequence: Synthetic oligonucleotide
  Target: SCNA; (+) strand; PAM type: NRG; PAM sequence: TAG
ccagaggcaggtcttaaaac

SEQ ID NO: 28978 - DNA, 20 bp, Artificial Sequence
  Description of Artificial Sequence: Synthetic oligonucleotide
  Target: SCNA; (+) strand; PAM type: NRG; PAM sequence: TGG
caggtcttaaaactagcaac

SEQ ID NO: 28979 - DNA, 20 bp, Artificial Sequence
  Description of Artificial Sequence: Synthetic oligonucleotide
  Target: SCNA; (+) strand; PAM type: NRG; PAM sequence: GGG
aggtcttaaaactagcaact

SEQ ID NO: 28980 - DNA, 20 bp, Artificial Sequence
  Description of Artificial Sequence: Synthetic oligonucleotide
  Target: SCNA; (+) strand; PAM type: NRG; PAM sequence: GAG
cttaaaactagcaactgggt

SEQ ID NO: 28981 - DNA, 20 bp, Artificial Sequence
  Description of Artificial Sequence: Synthetic oligonucleotide
  Target: SCNA; (+) strand; PAM type: NRG; PAM sequence: CAG
ctagcaactgggtgagaaat

SEQ ID NO: 28982 - DNA, 20 bp, Artificial Sequence
  Description of Artificial Sequence: Synthetic oligonucleotide
  Target: SCNA; (+) strand; PAM type: NRG; PAM sequence: TGG
gcaactgggtgagaaatcag

SEQ ID NO: 28983 - DNA, 20 bp, Artificial Sequence
  Description of Artificial Sequence: Synthetic oligonucleotide
  Target: SCNA; (+) strand; PAM type: NRG; PAM sequence: GGG
caactgggtgagaaatcagt

SEQ ID NO: 28984 - DNA, 20 bp, Artificial Sequence
  Description of Artificial Sequence: Synthetic oligonucleotide
  Target: SCNA; (+) strand; PAM type: NRG; PAM sequence: GGG
aactgggtgagaaatcagtg

SEQ ID NO: 28985 - DNA, 20 bp, Artificial Sequence
  Description of Artificial Sequence: Synthetic oligonucleotide
  Target: SCNA; (+) strand; PAM type: NRG; PAM sequence: GAG
ctgggtgagaaatcagtggg

SEQ ID NO: 28986 - DNA, 20 bp, Artificial Sequence
  Description of Artificial Sequence: Synthetic oligonucleotide
  Target: SCNA; (+) strand; PAM type: NRG; PAM sequence: AGG
tgggtgagaaatcagtgggg

SEQ ID NO: 28987 - DNA, 20 bp, Artificial Sequence
  Description of Artificial Sequence: Synthetic oligonucleotide
  Target: SCNA; (+) strand; PAM type: NRG; PAM sequence: GGG
gggtgagaaatcagtgggga

SEQ ID NO: 28988 - DNA, 20 bp, Artificial Sequence
  Description of Artificial Sequence: Synthetic oligonucleotide
  Target: SCNA; (+) strand; PAM type: NRG; PAM sequence: TAG
tgagaaatcagtggggaggg

SEQ ID NO: 28989 - DNA, 20 bp, Artificial Sequence
  Description of Artificial Sequence: Synthetic oligonucleotide
  Target: SCNA; (+) strand; PAM type: NRG; PAM sequence: AGG
gagaaatcagtggggagggt

SEQ ID NO: 28990 - DNA, 20 bp, Artificial Sequence
  Description of Artificial Sequence: Synthetic oligonucleotide
  Target: SCNA; (+) strand; PAM type: NRG; PAM sequence: AAG
ggggagggtaggctttgaca

SEQ ID NO: 28991 - DNA, 20 bp, Artificial Sequence
  Description of Artificial Sequence: Synthetic oligonucleotide
  Target: SCNA; (+) strand; PAM type: NRG; PAM sequence: AAG
agggtaggctttgacaaagt

SEQ ID NO: 28992 - DNA, 20 bp, Artificial Sequence
  Description of Artificial Sequence: Synthetic oligonucleotide
  Target: SCNA; (+) strand; PAM type: NRG; PAM sequence: GAG
ggtaggctttgacaaagtaa

SEQ ID NO: 28993 - DNA, 20 bp, Artificial Sequence
  Description of Artificial Sequence: Synthetic oligonucleotide
  Target: SCNA; (+) strand; PAM type: NRG; PAM sequence: AAG
ctttgacaaagtaagagata

SEQ ID NO: 28994 - DNA, 20 bp, Artificial Sequence
  Description of Artificial Sequence: Synthetic oligonucleotide
  Target: SCNA; (+) strand; PAM type: NRG; PAM sequence: GAG
ttgacaaagtaagagataaa

SEQ ID NO: 28995 - DNA, 20 bp, Artificial Sequence
  Description of Artificial Sequence: Synthetic oligonucleotide
  Target: SCNA; (+) strand; PAM type: NRG; PAM sequence: TAG
aagagtctgctttcatattt

SEQ ID NO: 28996 - DNA, 20 bp, Artificial Sequence
  Description of Artificial Sequence: Synthetic oligonucleotide
  Target: SCNA; (+) strand; PAM type: NRG; PAM sequence: CAG
tttcatattttagaaaaacc

SEQ ID NO: 28997 - DNA, 20 bp, Artificial Sequence
  Description of Artificial Sequence: Synthetic oligonucleotide
  Target: SCNA; (+) strand; PAM type: NRG; PAM sequence: AGG
ttcatattttagaaaaaccc

SEQ ID NO: 28998 - DNA, 20 bp, Artificial Sequence
  Description of Artificial Sequence: Synthetic oligonucleotide
  Target: SCNA; (+) strand; PAM type: NRG; PAM sequence: GGG
tcatattttagaaaaaccca

SEQ ID NO: 28999 - DNA, 20 bp, Artificial Sequence
  Description of Artificial Sequence: Synthetic oligonucleotide
  Target: SCNA; (+) strand; PAM type: NRG; PAM sequence: AAG
aaaacccagggaatgctgaa

SEQ ID NO: 29000 - DNA, 20 bp, Artificial Sequence
  Description of Artificial Sequence: Synthetic oligonucleotide
  Target: SCNA; (+) strand; PAM type: NRG; PAM sequence: TAG
agggaatgctgaaaagccca

SEQ ID NO: 29001 - DNA, 20 bp, Artificial Sequence
  Description of Artificial Sequence: Synthetic oligonucleotide
  Target: SCNA; (+) strand; PAM type: NRG; PAM sequence: AGG
gggaatgctgaaaagcccat

SEQ ID NO: 29002 - DNA, 20 bp, Artificial Sequence
  Description of Artificial Sequence: Synthetic oligonucleotide
  Target: SCNA; (+) strand; PAM type: NRG; PAM sequence: AAG
atgctgaaaagcccatagga

SEQ ID NO: 29003 - DNA, 20 bp, Artificial Sequence
  Description of Artificial Sequence: Synthetic oligonucleotide
  Target: SCNA; (+) strand; PAM type: NRG; PAM sequence: AAG
ctgaaaagcccataggaaag

SEQ ID NO: 29004 - DNA, 20 bp, Artificial Sequence
  Description of Artificial Sequence: Synthetic oligonucleotide
  Target: SCNA; (+) strand; PAM type: NRG; PAM sequence: AAG
gaaagaagaaatatgctgtc

SEQ ID NO: 29005 - DNA, 20 bp, Artificial Sequence
  Description of Artificial Sequence: Synthetic oligonucleotide
  Target: SCNA; (+) strand; PAM type: NRG; PAM sequence: TAG
gaaatatgctgtcaagatgt

SEQ ID NO: 29006 - DNA, 20 bp, Artificial Sequence
  Description of Artificial Sequence: Synthetic oligonucleotide
  Target: SCNA; (+) strand; PAM type: NRG; PAM sequence: GAG
tatgctgtcaagatgttagt

SEQ ID NO: 29007 - DNA, 20 bp, Artificial Sequence
  Description of Artificial Sequence: Synthetic oligonucleotide
  Target: SCNA; (+) strand; PAM type: NRG; PAM sequence: AAG
tgtcaagatgttagtgagcc

SEQ ID NO: 29008 - DNA, 20 bp, Artificial Sequence
  Description of Artificial Sequence: Synthetic oligonucleotide
  Target: SCNA; (+) strand; PAM type: NRG; PAM sequence: AGG
gtcaagatgttagtgagcca

SEQ ID NO: 29009 - DNA, 20 bp, Artificial Sequence
  Description of Artificial Sequence: Synthetic oligonucleotide
  Target: SCNA; (+) strand; PAM type: NRG; PAM sequence: CAG
gatgttagtgagccaaggcc

SEQ ID NO: 29010 - DNA, 20 bp, Artificial Sequence
  Description of Artificial Sequence: Synthetic oligonucleotide
  Target: SCNA; (+) strand; PAM type: NRG; PAM sequence: AGG
atgttagtgagccaaggccc

SEQ ID NO: 29011 - DNA, 20 bp, Artificial Sequence
  Description of Artificial Sequence: Synthetic oligonucleotide
  Target: SCNA; (+) strand; PAM type: NRG; PAM sequence: GAG
gttagtgagccaaggcccag

SEQ ID NO: 29012 - DNA, 20 bp, Artificial Sequence
  Description of Artificial Sequence: Synthetic oligonucleotide
  Target: SCNA; (+) strand; PAM type: NRG; PAM sequence: CAG
caggagtttgctctcaaaaa

SEQ ID NO: 29013 - DNA, 20 bp, Artificial Sequence
  Description of Artificial Sequence: Synthetic oligonucleotide
  Target: SCNA; (+) strand; PAM type: NRG; PAM sequence: GAG
gtttgctctcaaaaacagat

SEQ ID NO: 29014 - DNA, 20 bp, Artificial Sequence
  Description of Artificial Sequence: Synthetic oligonucleotide
  Target: SCNA; (+) strand; PAM type: NRG; PAM sequence: TGG
ctcaaaaacagatgagaaac

SEQ ID NO: 29015 - DNA, 20 bp, Artificial Sequence
  Description of Artificial Sequence: Synthetic oligonucleotide
  Target: SCNA; (+) strand; PAM type: NRG; PAM sequence: TGG
aactggacttaaaatctgac

SEQ ID NO: 29016 - DNA, 20 bp, Artificial Sequence
  Description of Artificial Sequence: Synthetic oligonucleotide
  Target: SCNA; (+) strand; PAM type: NRG; PAM sequence: GGG
actggacttaaaatctgact

SEQ ID NO: 29017 - DNA, 20 bp, Artificial Sequence
  Description of Artificial Sequence: Synthetic oligonucleotide
  Target: SCNA; (+) strand; PAM type: NRG; PAM sequence: GAG
tggacttaaaatctgactgg

SEQ ID NO: 29018 - DNA, 20 bp, Artificial Sequence
  Description of Artificial Sequence: Synthetic oligonucleotide
  Target: SCNA; (+) strand; PAM type: NRG; PAM sequence: AAG
cttaaaatctgactgggaga

SEQ ID NO: 29019 - DNA, 20 bp, Artificial Sequence
  Description of Artificial Sequence: Synthetic oligonucleotide
  Target: SCNA; (+) strand; PAM type: NRG; PAM sequence: TAG
ctgactgggagaaagtactt

SEQ ID NO: 29020 - DNA, 20 bp, Artificial Sequence
  Description of Artificial Sequence: Synthetic oligonucleotide
  Target: SCNA; (+) strand; PAM type: NRG; PAM sequence: AGG
tgactgggagaaagtacttt

SEQ ID NO: 29021 - DNA, 20 bp, Artificial Sequence
  Description of Artificial Sequence: Synthetic oligonucleotide
  Target: SCNA; (+) strand; PAM type: NRG; PAM sequence: AAG
aacaaactactcatatacaa

SEQ ID NO: 29022 - DNA, 20 bp, Artificial Sequence
  Description of Artificial Sequence: Synthetic oligonucleotide
  Target: SCNA; (+) strand; PAM type: NRG; PAM sequence: AGG
acaaactactcatatacaaa

SEQ ID NO: 29023 - DNA, 20 bp, Artificial Sequence
  Description of Artificial Sequence: Synthetic oligonucleotide
  Target: SCNA; (+) strand; PAM type: NRG; PAM sequence: TGG
actactcatatacaaaagga

SEQ ID NO: 29024 - DNA, 20 bp, Artificial Sequence
  Description of Artificial Sequence: Synthetic oligonucleotide
  Target: SCNA; (+) strand; PAM type: NRG; PAM sequence: GGG
ctactcatatacaaaaggat

SEQ ID NO: 29025 - DNA, 20 bp, Artificial Sequence
  Description of Artificial Sequence: Synthetic oligonucleotide
  Target: SCNA; (+) strand; PAM type: NRG; PAM sequence: AAG
atacaaaaggatgggctctg

SEQ ID NO: 29026 - DNA, 20 bp, Artificial Sequence
  Description of Artificial Sequence: Synthetic oligonucleotide
  Target: SCNA; (+) strand; PAM type: NRG; PAM sequence: CAG
caaaaggatgggctctgaag

SEQ ID NO: 29027 - DNA, 20 bp, Artificial Sequence
  Description of Artificial Sequence: Synthetic oligonucleotide
  Target: SCNA; (+) strand; PAM type: NRG; PAM sequence: GAG
aaaggatgggctctgaagca

SEQ ID NO: 29028 - DNA, 20 bp, Artificial Sequence
  Description of Artificial Sequence: Synthetic oligonucleotide
  Target: SCNA; (+) strand; PAM type: NRG; PAM sequence: GAG
aggatgggctctgaagcaga

SEQ ID NO: 29029 - DNA, 20 bp, Artificial Sequence
  Description of Artificial Sequence: Synthetic oligonucleotide
  Target: SCNA; (+) strand; PAM type: NRG; PAM sequence: AAG
gggctctgaagcagagagtg

SEQ ID NO: 29030 - DNA, 20 bp, Artificial Sequence
  Description of Artificial Sequence: Synthetic oligonucleotide
  Target: SCNA; (+) strand; PAM type: NRG; PAM sequence: AGG
ggctctgaagcagagagtga

SEQ ID NO: 29031 - DNA, 20 bp, Artificial Sequence
  Description of Artificial Sequence: Synthetic oligonucleotide
  Target: SCNA; (+) strand; PAM type: NRG; PAM sequence: TAG
gaagcagagagtgaaggcaa

SEQ ID NO: 29032 - DNA, 20 bp, Artificial Sequence
  Description of Artificial Sequence: Synthetic oligonucleotide
  Target: SCNA; (+) strand; PAM type: NRG; PAM sequence: AAG
agagtgaaggcaatagcttc

SEQ ID NO: 29033 - DNA, 20 bp, Artificial Sequence
  Description of Artificial Sequence: Synthetic oligonucleotide
  Target: SCNA; (+) strand; PAM type: NRG; PAM sequence: CGG
gaaggcaatagcttcaagat

SEQ ID NO: 29034 - DNA, 20 bp, Artificial Sequence
  Description of Artificial Sequence: Synthetic oligonucleotide
  Target: SCNA; (+) strand; PAM type: NRG; PAM sequence: TGG
ggcaatagcttcaagatcgg

SEQ ID NO: 29035 - DNA, 20 bp, Artificial Sequence
  Description of Artificial Sequence: Synthetic oligonucleotide
  Target: SCNA; (+) strand; PAM type: NRG; PAM sequence: TAG
agatcggtggatttaaaacc

SEQ ID NO: 29036 - DNA, 20 bp, Artificial Sequence
  Description of Artificial Sequence: Synthetic oligonucleotide
  Target: SCNA; (+) strand; PAM type: NRG; PAM sequence: AAG
tcggtggatttaaaacctag

SEQ ID NO: 29037 - DNA, 20 bp, Artificial Sequence
  Description of Artificial Sequence: Synthetic oligonucleotide
  Target: SCNA; (+) strand; PAM type: NRG; PAM sequence: AAG
cctagaagtatcttctctaa

SEQ ID NO: 29038 - DNA, 20 bp, Artificial Sequence
  Description of Artificial Sequence: Synthetic oligonucleotide
  Target: SCNA; (+) strand; PAM type: NRG; PAM sequence: AAG
gtatcttctctaaaagataa

SEQ ID NO: 29039 - DNA, 20 bp, Artificial Sequence
  Description of Artificial Sequence: Synthetic oligonucleotide
  Target: SCNA; (+) strand; PAM type: NRG; PAM sequence: AAG
tctctaaaagataaaagatt

SEQ ID NO: 29040 - DNA, 20 bp, Artificial Sequence
  Description of Artificial Sequence: Synthetic oligonucleotide
  Target: SCNA; (+) strand; PAM type: NRG; PAM sequence: AAG
taaaagataaaagattaaga

SEQ ID NO: 29041 - DNA, 20 bp, Artificial Sequence
  Description of Artificial Sequence: Synthetic oligonucleotide
  Target: SCNA; (+) strand; PAM type: NRG; PAM sequence: AGG
aaaagataaaagattaagaa

SEQ ID NO: 29042 - DNA, 20 bp, Artificial Sequence
  Description of Artificial Sequence: Synthetic oligonucleotide
  Target: SCNA; (+) strand; PAM type: NRG; PAM sequence: AAG
aaaagattaagaaaggcttt

SEQ ID NO: 29043 - DNA, 20 bp, Artificial Sequence
  Description of Artificial Sequence: Synthetic oligonucleotide
  Target: SCNA; (+) strand; PAM type: NRG; PAM sequence: TAG
gattaagaaaggctttaaga

SEQ ID NO: 29044 - DNA, 20 bp, Artificial Sequence
  Description of Artificial Sequence: Synthetic oligonucleotide
  Target: SCNA; (+) strand; PAM type: NRG; PAM sequence: TAG
aagaaaggctttaagatagc

SEQ ID NO: 29045 - DNA, 20 bp, Artificial Sequence
  Description of Artificial Sequence: Synthetic oligonucleotide
  Target: SCNA; (+) strand; PAM type: NRG; PAM sequence: GAG
gaaaggctttaagatagcta

SEQ ID NO: 29046 - DNA, 20 bp, Artificial Sequence
  Description of Artificial Sequence: Synthetic oligonucleotide
  Target: SCNA; (+) strand; PAM type: NRG; PAM sequence: CAG
aggctttaagatagctagag

SEQ ID NO: 29047 - DNA, 20 bp, Artificial Sequence
  Description of Artificial Sequence: Synthetic oligonucleotide
  Target: SCNA; (+) strand; PAM type: NRG; PAM sequence: AGG
ggctttaagatagctagagc

SEQ ID NO: 29048 - DNA, 20 bp, Artificial Sequence
  Description of Artificial Sequence: Synthetic oligonucleotide
  Target: SCNA; (+) strand; PAM type: NRG; PAM sequence: AAG
agatagctagagcaggaata

SEQ ID NO: 29049 - DNA, 20 bp, Artificial Sequence
  Description of Artificial Sequence: Synthetic oligonucleotide
  Target: SCNA; (+) strand; PAM type: NRG; PAM sequence: TAG
tagctagagcaggaataaag

SEQ ID NO: 29050 - DNA, 20 bp, Artificial Sequence
  Description of Artificial Sequence: Synthetic oligonucleotide
  Target: SCNA; (+) strand; PAM type: NRG; PAM sequence: AAG
agagcaggaataaagtagtc

SEQ ID NO: 29051 - DNA, 20 bp, Artificial Sequence
  Description of Artificial Sequence: Synthetic oligonucleotide
  Target: SCNA; (+) strand; PAM type: NRG; PAM sequence: AAG
tcaagtgaatgtgataccac

SEQ ID NO: 29052 - DNA, 20 bp, Artificial Sequence
  Description of Artificial Sequence: Synthetic oligonucleotide
  Target: SCNA; (+) strand; PAM type: NRG; PAM sequence: AGG
caagtgaatgtgataccaca

SEQ ID NO: 29053 - DNA, 20 bp, Artificial Sequence
  Description of Artificial Sequence: Synthetic oligonucleotide
  Target: SCNA; (+) strand; PAM type: NRG; PAM sequence: CAG
aatgtgataccacaaggttc

SEQ ID NO: 29054 - DNA, 20 bp, Artificial Sequence
  Description of Artificial Sequence: Synthetic oligonucleotide
  Target: SCNA; (+) strand; PAM type: NRG; PAM sequence: AAG
gtgataccacaaggttccag

SEQ ID NO: 29055 - DNA, 20 bp, Artificial Sequence
  Description of Artificial Sequence: Synthetic oligonucleotide
  Target: SCNA; (+) strand; PAM type: NRG; PAM sequence: TAG
tccagaagtttccatactaa

SEQ ID NO: 29056 - DNA, 20 bp, Artificial Sequence
  Description of Artificial Sequence: Synthetic oligonucleotide
  Target: SCNA; (+) strand; PAM type: NRG; PAM sequence: CAG
agtttccatactaatagaaa

SEQ ID NO: 29057 - DNA, 20 bp, Artificial Sequence
  Description of Artificial Sequence: Synthetic oligonucleotide
  Target: SCNA; (+) strand; PAM type: NRG; PAM sequence: AAG
tactaatagaaacagatact

SEQ ID NO: 29058 - DNA, 20 bp, Artificial Sequence
  Description of Artificial Sequence: Synthetic oligonucleotide
  Target: SCNA; (+) strand; PAM type: NRG; PAM sequence: AAG
atagaaacagatactaagtg

SEQ ID NO: 29059 - DNA, 20 bp, Artificial Sequence
  Description of Artificial Sequence: Synthetic oligonucleotide
  Target: SCNA; (+) strand; PAM type: NRG; PAM sequence: GAG
acagatactaagtgaagttt

SEQ ID NO: 29060 - DNA, 20 bp, Artificial Sequence
  Description of Artificial Sequence: Synthetic oligonucleotide
  Target: SCNA; (+) strand; PAM type: NRG; PAM sequence: AGG
cagatactaagtgaagtttg

SEQ ID NO: 29061 - DNA, 20 bp, Artificial Sequence
  Description of Artificial Sequence: Synthetic oligonucleotide
  Target: SCNA; (+) strand; PAM type: NRG; PAM sequence: GGG
agatactaagtgaagtttga

SEQ ID NO: 29062 - DNA, 20 bp, Artificial Sequence
  Description of Artificial Sequence: Synthetic oligonucleotide
  Target: SCNA; (+) strand; PAM type: NRG; PAM sequence: GGG
gatactaagtgaagtttgag

SEQ ID NO: 29063 - DNA, 20 bp, Artificial Sequence
  Description of Artificial Sequence: Synthetic oligonucleotide
  Target: SCNA; (+) strand; PAM type: NRG; PAM sequence: TGG
tttgaggggccctcacaatc

SEQ ID NO: 29064 - DNA, 20 bp, Artificial Sequence
  Description of Artificial Sequence: Synthetic oligonucleotide
  Target: SCNA; (+) strand; PAM type: NRG; PAM sequence: TAG
aggggccctcacaatctgga

SEQ ID NO: 29065 - DNA, 20 bp, Artificial Sequence
  Description of Artificial Sequence: Synthetic oligonucleotide
  Target: SCNA; (+) strand; PAM type: NRG; PAM sequence: AAG
atctggatagaaaactcttc

SEQ ID NO: 29066 - DNA, 20 bp, Artificial Sequence
  Description of Artificial Sequence: Synthetic oligonucleotide
  Target: SCNA; (+) strand; PAM type: NRG; PAM sequence: TAG
tggatagaaaactcttcaag

SEQ ID NO: 29067 - DNA, 20 bp, Artificial Sequence
  Description of Artificial Sequence: Synthetic oligonucleotide
  Target: SCNA; (+) strand; PAM type: NRG; PAM sequence: CAG
ttcaagtagatctcaacctt

SEQ ID NO: 29068 - DNA, 20 bp, Artificial Sequence
  Description of Artificial Sequence: Synthetic oligonucleotide
  Target: SCNA; (+) strand; PAM type: NRG; PAM sequence: AGG
tcaagtagatctcaaccttc

SEQ ID NO: 29069 - DNA, 20 bp, Artificial Sequence
  Description of Artificial Sequence: Synthetic oligonucleotide
  Target: SCNA; (+) strand; PAM type: NRG; PAM sequence: TGG
gtagatctcaaccttcaggc

SEQ ID NO: 29070 - DNA, 20 bp, Artificial Sequence
  Description of Artificial Sequence: Synthetic oligonucleotide
  Target: SCNA; (+) strand; PAM type: NRG; PAM sequence: TAG
caggctggaatatctttgct

SEQ ID NO: 29071 - DNA, 20 bp, Artificial Sequence
  Description of Artificial Sequence: Synthetic oligonucleotide
  Target: SCNA; (+) strand; PAM type: NRG; PAM sequence: CAG
atatctttgcttagctatcc

SEQ ID NO: 29072 - DNA, 20 bp, Artificial Sequence
  Description of Artificial Sequence: Synthetic oligonucleotide
  Target: SCNA; (+) strand; PAM type: NRG; PAM sequence: CAG
ctttgcttagctatcccagc

SEQ ID NO: 29073 - DNA, 20 bp, Artificial Sequence
  Description of Artificial Sequence: Synthetic oligonucleotide
  Target: SCNA; (+) strand; PAM type: NRG; PAM sequence: GAG
ttgcttagctatcccagcca

SEQ ID NO: 29074 - DNA, 20 bp, Artificial Sequence
  Description of Artificial Sequence: Synthetic oligonucleotide
  Target: SCNA; (+) strand; PAM type: NRG; PAM sequence: AGG
tgcttagctatcccagccag

SEQ ID NO: 29075 - DNA, 20 bp, Artificial Sequence
  Description of Artificial Sequence: Synthetic oligonucleotide
  Target: SCNA; (+) strand; PAM type: NRG; PAM sequence: TAG
ctatcccagccagaggacca

SEQ ID NO: 29076 - DNA, 20 bp, Artificial Sequence
  Description of Artificial Sequence: Synthetic oligonucleotide
  Target: SCNA; (+) strand; PAM type: NRG; PAM sequence: TGG
tcccagccagaggaccatag

SEQ ID NO: 29077 - DNA, 20 bp, Artificial Sequence
  Description of Artificial Sequence: Synthetic oligonucleotide
  Target: SCNA; (+) strand; PAM type: NRG; PAM sequence: AAG
accatagtggttgatttcaa

SEQ ID NO: 29078 - DNA, 20 bp, Artificial Sequence
  Description of Artificial Sequence: Synthetic oligonucleotide
  Target: SCNA; (+) strand; PAM type: NRG; PAM sequence: AGG
ccatagtggttgatttcaaa

SEQ ID NO: 29079 - DNA, 20 bp, Artificial Sequence
  Description of Artificial Sequence: Synthetic oligonucleotide
  Target: SCNA; (+) strand; PAM type: NRG; PAM sequence: GAG
atagtggttgatttcaaaag

SEQ ID NO: 29080 - DNA, 20 bp, Artificial Sequence
  Description of Artificial Sequence: Synthetic oligonucleotide
  Target: SCNA; (+) strand; PAM type: NRG; PAM sequence: AAG
ttgtaaattctctcattgtt

SEQ ID NO: 29081 - DNA, 20 bp, Artificial Sequence
  Description of Artificial Sequence: Synthetic oligonucleotide
  Target: SCNA; (+) strand; PAM type: NRG; PAM sequence: CAG
ctcattgttaagttttgtca

SEQ ID NO: 29082 - DNA, 20 bp, Artificial Sequence
  Description of Artificial Sequence: Synthetic oligonucleotide
  Target: SCNA; (+) strand; PAM type: NRG; PAM sequence: CAG
ttgttgttgctactttcttt

SEQ ID NO: 29083 - DNA, 20 bp, Artificial Sequence
  Description of Artificial Sequence: Synthetic oligonucleotide
  Target: SCNA; (+) strand; PAM type: NRG; PAM sequence: TAG
gctactttctttcagttacc

SEQ ID NO: 29084 - DNA, 20 bp, Artificial Sequence
  Description of Artificial Sequence: Synthetic oligonucleotide
  Target: SCNA; (+) strand; PAM type: NRG; PAM sequence: CAG
aacctctatccatgcctcaa

SEQ ID NO: 29085 - DNA, 20 bp, Artificial Sequence
  Description of Artificial Sequence: Synthetic oligonucleotide
  Target: SCNA; (+) strand; PAM type: NRG; PAM sequence: CGG
ctatccatgcctcaacagat

SEQ ID NO: 29086 - DNA, 20 bp, Artificial Sequence
  Description of Artificial Sequence: Synthetic oligonucleotide
  Target: SCNA; (+) strand; PAM type: NRG; PAM sequence: GAG
atccatgcctcaacagatcg

SEQ ID NO: 29087 - DNA, 20 bp, Artificial Sequence
  Description of Artificial Sequence: Synthetic oligonucleotide
  Target: SCNA; (+) strand; PAM type: NRG; PAM sequence: AAG
tcaacagatcggagataaaa

SEQ ID NO: 29088 - DNA, 20 bp, Artificial Sequence
  Description of Artificial Sequence: Synthetic oligonucleotide
  Target: SCNA; (+) strand; PAM type: NRG; PAM sequence: AGG
caacagatcggagataaaaa

SEQ ID NO: 29089 - DNA, 20 bp, Artificial Sequence
  Description of Artificial Sequence: Synthetic oligonucleotide
  Target: SCNA; (+) strand; PAM type: NRG; PAM sequence: AAG
taaaaaaggaatcatcttac

SEQ ID NO: 29090 - DNA, 20 bp, Artificial Sequence
  Description of Artificial Sequence: Synthetic oligonucleotide
  Target: SCNA; (+) strand; PAM type: NRG; PAM sequence: AAG
aatcatcttacaagattatc

SEQ ID NO: 29091 - DNA, 20 bp, Artificial Sequence
  Description of Artificial Sequence: Synthetic oligonucleotide
  Target: SCNA; (+) strand; PAM type: NRG; PAM sequence: AAG
atcttacaagattatcaaga

SEQ ID NO: 29092 - DNA, 20 bp, Artificial Sequence
  Description of Artificial Sequence: Synthetic oligonucleotide
  Target: SCNA; (+) strand; PAM type: NRG; PAM sequence: TGG
aagattatcaagaaagataa

SEQ ID NO: 29093 - DNA, 20 bp, Artificial Sequence
  Description of Artificial Sequence: Synthetic oligonucleotide
  Target: SCNA; (+) strand; PAM type: NRG; PAM sequence: GGG
agattatcaagaaagataat

SEQ ID NO: 29094 - DNA, 20 bp, Artificial Sequence
  Description of Artificial Sequence: Synthetic oligonucleotide
  Target: SCNA; (+) strand; PAM type: NRG; PAM sequence: TAG
tatcaagaaagataatgggc

SEQ ID NO: 29095 - DNA, 20 bp, Artificial Sequence
  Description of Artificial Sequence: Synthetic oligonucleotide
  Target: SCNA; (+) strand; PAM type: NRG; PAM sequence: AGG
atcaagaaagataatgggct

SEQ ID NO: 29096 - DNA, 20 bp, Artificial Sequence
  Description of Artificial Sequence: Synthetic oligonucleotide
  Target: SCNA; (+) strand; PAM type: NRG; PAM sequence: AAG
tgggctaggtgtatccttaa

SEQ ID NO: 29097 - DNA, 20 bp, Artificial Sequence
  Description of Artificial Sequence: Synthetic oligonucleotide
  Target: SCNA; (+) strand; PAM type: NRG; PAM sequence: AGG
gggctaggtgtatccttaaa

SEQ ID NO: 29098 - DNA, 20 bp, Artificial Sequence
  Description of Artificial Sequence: Synthetic oligonucleotide
  Target: SCNA; (+) strand; PAM type: NRG; PAM sequence: CGG
tcttacttttctgtgttatt

SEQ ID NO: 29099 - DNA, 20 bp, Artificial Sequence
  Description of Artificial Sequence: Synthetic oligonucleotide
  Target: SCNA; (+) strand; PAM type: NRG; PAM sequence: TGG
ttttctgtgttattcggaca

SEQ ID NO: 29100 - DNA, 20 bp, Artificial Sequence
  Description of Artificial Sequence: Synthetic oligonucleotide
  Target: SCNA; (+) strand; PAM type: NRG; PAM sequence: CAG
cggacatggaataacaataa

SEQ ID NO: 29101 - DNA, 20 bp, Artificial Sequence
  Description of Artificial Sequence: Synthetic oligonucleotide
  Target: SCNA; (+) strand; PAM type: NRG; PAM sequence: TGG
aataacagttaatgtttatt

SEQ ID NO: 29102 - DNA, 20 bp, Artificial Sequence
  Description of Artificial Sequence: Synthetic oligonucleotide
  Target: SCNA; (+) strand; PAM type: NRG; PAM sequence: TGG
tttggtgcttactctgtatt

SEQ ID NO: 29103 - DNA, 20 bp, Artificial Sequence
  Description of Artificial Sequence: Synthetic oligonucleotide
  Target: SCNA; (+) strand; PAM type: NRG; PAM sequence: AAG
tctgtatttggtaccatttc

SEQ ID NO: 29104 - DNA, 20 bp, Artificial Sequence
  Description of Artificial Sequence: Synthetic oligonucleotide
  Target: SCNA; (+) strand; PAM type: NRG; PAM sequence: GAG
tgtatttggtaccatttcaa

SEQ ID NO: 29105 - DNA, 20 bp, Artificial Sequence
  Description of Artificial Sequence: Synthetic oligonucleotide
  Target: SCNA; (+) strand; PAM type: NRG; PAM sequence: GAG
atcttaaaaaacaactcttt

SEQ ID NO: 29106 - DNA, 20 bp, Artificial Sequence
  Description of Artificial Sequence: Synthetic oligonucleotide
  Target: SCNA; (+) strand; PAM type: NRG; PAM sequence: AGG
tcttaaaaaacaactctttg

SEQ ID NO: 29107 - DNA, 20 bp, Artificial Sequence
  Description of Artificial Sequence: Synthetic oligonucleotide
  Target: SCNA; (+) strand; PAM type: NRG; PAM sequence: AAG
taaaaaacaactctttgagg

SEQ ID NO: 29108 - DNA, 20 bp, Artificial Sequence
  Description of Artificial Sequence: Synthetic oligonucleotide
  Target: SCNA; (+) strand; PAM type: NRG; PAM sequence: CAG
tactactgtctccattttat

SEQ ID NO: 29109 - DNA, 20 bp, Artificial Sequence
  Description of Artificial Sequence: Synthetic oligonucleotide
  Target: SCNA; (+) strand; PAM type: NRG; PAM sequence: CAG
ccattttatcagtgaatgaa

SEQ ID NO: 29110 - DNA, 20 bp, Artificial Sequence
  Description of Artificial Sequence: Synthetic oligonucleotide
  Target: SCNA; (+) strand; PAM type: NRG; PAM sequence: GAG
attttatcagtgaatgaaca

SEQ ID NO: 29111 - DNA, 20 bp, Artificial Sequence
  Description of Artificial Sequence: Synthetic oligonucleotide
  Target: SCNA; (+) strand; PAM type: NRG; PAM sequence: TAG
tatcagtgaatgaacagaga

SEQ ID NO: 29112 - DNA, 20 bp, Artificial Sequence
  Description of Artificial Sequence: Synthetic oligonucleotide
  Target: SCNA; (+) strand; PAM type: NRG; PAM sequence: AGG
atcagtgaatgaacagagat

SEQ ID NO: 29113 - DNA, 20 bp, Artificial Sequence
  Description of Artificial Sequence: Synthetic oligonucleotide
  Target: SCNA; (+) strand; PAM type: NRG; PAM sequence: AAG
agtgaatgaacagagatagg

SEQ ID NO: 29114 - DNA, 20 bp, Artificial Sequence
  Description of Artificial Sequence: Synthetic oligonucleotide
  Target: SCNA; (+) strand; PAM type: NRG; PAM sequence: TGG
atgaacagagataggaagtc

SEQ ID NO: 29115 - DNA, 20 bp, Artificial Sequence
  Description of Artificial Sequence: Synthetic oligonucleotide
  Target: SCNA; (+) strand; PAM type: NRG; PAM sequence: AAG
agataggaagtctggctcca

SEQ ID NO: 29116 - DNA, 20 bp, Artificial Sequence
  Description of Artificial Sequence: Synthetic oligonucleotide
  Target: SCNA; (+) strand; PAM type: NRG; PAM sequence: TAG
tcttaactattatgcaatat

SEQ ID NO: 29117 - DNA, 20 bp, Artificial Sequence
  Description of Artificial Sequence: Synthetic oligonucleotide
  Target: SCNA; (+) strand; PAM type: NRG; PAM sequence: TGG
taattactaaaatattacgc

SEQ ID NO: 29118 - DNA, 20 bp, Artificial Sequence
  Description of Artificial Sequence: Synthetic oligonucleotide
  Target: SCNA; (+) strand; PAM type: NRG; PAM sequence: GGG
aattactaaaatattacgct

SEQ ID NO: 29119 - DNA, 20 bp, Artificial Sequence
  Description of Artificial Sequence: Synthetic oligonucleotide
  Target: SCNA; (+) strand; PAM type: NRG; PAM sequence: AAG
attacgctgggctacttatt

SEQ ID NO: 29120 - DNA, 20 bp, Artificial Sequence
  Description of Artificial Sequence: Synthetic oligonucleotide
  Target: SCNA; (+) strand; PAM type: NRG; PAM sequence: AGG
ttacgctgggctacttatta

SEQ ID NO: 29121 - DNA, 20 bp, Artificial Sequence
  Description of Artificial Sequence: Synthetic oligonucleotide
  Target: SCNA; (+) strand; PAM type: NRG; PAM sequence: CAG
aactattcatgatgaaatat

SEQ ID NO: 29122 - DNA, 20 bp, Artificial Sequence
  Description of Artificial Sequence: Synthetic oligonucleotide
  Target: SCNA; (+) strand; PAM type: NRG; PAM sequence: TGG
tctaataccaatatttttat

SEQ ID NO: 29123 - DNA, 20 bp, Artificial Sequence
  Description of Artificial Sequence: Synthetic oligonucleotide
  Target: SCNA; (+) strand; PAM type: NRG; PAM sequence: TAG
atatttttattggaataaaa

SEQ ID NO: 29124 - DNA, 20 bp, Artificial Sequence
  Description of Artificial Sequence: Synthetic oligonucleotide
  Target: SCNA; (+) strand; PAM type: NRG; PAM sequence: AGG
tatttttattggaataaaat

SEQ ID NO: 29125 - DNA, 20 bp, Artificial Sequence
  Description of Artificial Sequence: Synthetic oligonucleotide
  Target: SCNA; (+) strand; PAM type: NRG; PAM sequence: GAG
tttttattggaataaaatag

SEQ ID NO: 29126 - DNA, 20 bp, Artificial Sequence
  Description of Artificial Sequence: Synthetic oligonucleotide
  Target: SCNA; (+) strand; PAM type: NRG; PAM sequence: AGG
ttttattggaataaaatagg

SEQ ID NO: 29127 - DNA, 20 bp, Artificial Sequence
  Description of Artificial Sequence: Synthetic oligonucleotide
  Target: SCNA; (+) strand; PAM type: NRG; PAM sequence: AAG
tggaataaaataggaggtta

SEQ ID NO: 29128 - DNA, 20 bp, Artificial Sequence
  Description of Artificial Sequence: Synthetic oligonucleotide
  Target: SCNA; (+) strand; PAM type: NRG; PAM sequence: AGG
ggaataaaataggaggttaa

SEQ ID NO: 29129 - DNA, 20 bp, Artificial Sequence
  Description of Artificial Sequence: Synthetic oligonucleotide
  Target: SCNA; (+) strand; PAM type: NRG; PAM sequence: AAG
gtatatatatgattttttgc

SEQ ID NO: 29130 - DNA, 20 bp, Artificial Sequence
  Description of Artificial Sequence: Synthetic oligonucleotide
  Target: SCNA; (+) strand; PAM type: NRG; PAM sequence: AGG
tatatatatgattttttgca

SEQ ID NO: 29131 - DNA, 20 bp, Artificial Sequence
  Description of Artificial Sequence: Synthetic oligonucleotide
  Target: SCNA; (+) strand; PAM type: NRG; PAM sequence: GGG
atatatatgattttttgcaa

SEQ ID NO: 29132 - DNA, 20 bp, Artificial Sequence
  Description of Artificial Sequence: Synthetic oligonucleotide
  Target: SCNA; (+) strand; PAM type: NRG; PAM sequence: CAG
ttttttgcaagggcaaaaac

SEQ ID NO: 29133 - DNA, 20 bp, Artificial Sequence
  Description of Artificial Sequence: Synthetic oligonucleotide
  Target: SCNA; (+) strand; PAM type: NRG; PAM sequence: AAG
tcattaaatctgcaaatatc

SEQ ID NO: 29134 - DNA, 20 bp, Artificial Sequence
  Description of Artificial Sequence: Synthetic oligonucleotide
  Target: SCNA; (+) strand; PAM type: NRG; PAM sequence: CAG
agtttatcaattttttgtta

SEQ ID NO: 29135 - DNA, 20 bp, Artificial Sequence
  Description of Artificial Sequence: Synthetic oligonucleotide
  Target: SCNA; (+) strand; PAM type: NRG; PAM sequence: AGG
gtttatcaattttttgttac

SEQ ID NO: 29136 - DNA, 20 bp, Artificial Sequence
  Description of Artificial Sequence: Synthetic oligonucleotide
  Target: SCNA; (+) strand; PAM type: NRG; PAM sequence: TAG
ttttttgttacaggaaaaaa

SEQ ID NO: 29137 - DNA, 20 bp, Artificial Sequence
  Description of Artificial Sequence: Synthetic oligonucleotide
  Target: SCNA; (+) strand; PAM type: NRG; PAM sequence: TAG
tttattataaattcaatgca

SEQ ID NO: 29138 - DNA, 20 bp, Artificial Sequence
  Description of Artificial Sequence: Synthetic oligonucleotide
  Target: SCNA; (+) strand; PAM type: NRG; PAM sequence: TGG
attcaatgcatagcattttc

SEQ ID NO: 29139 - DNA, 20 bp, Artificial Sequence
  Description of Artificial Sequence: Synthetic oligonucleotide
  Target: SCNA; (+) strand; PAM type: NRG; PAM sequence: TAG
atgcatagcattttctggtt

SEQ ID NO: 29140 - DNA, 20 bp, Artificial Sequence
  Description of Artificial Sequence: Synthetic oligonucleotide
  Target: SCNA; (+) strand; PAM type: NRG; PAM sequence: CAG
cctttccattattgttctga

SEQ ID NO: 29141 - DNA, 20 bp, Artificial Sequence
  Description of Artificial Sequence: Synthetic oligonucleotide
  Target: SCNA; (+) strand; PAM type: NRG; PAM sequence: AAG
attattgttctgacagaaca

SEQ ID NO: 29142 - DNA, 20 bp, Artificial Sequence
  Description of Artificial Sequence: Synthetic oligonucleotide
  Target: SCNA; (+) strand; PAM type: NRG; PAM sequence: GAG
tctgacagaacaaagactat

SEQ ID NO: 29143 - DNA, 20 bp, Artificial Sequence
  Description of Artificial Sequence: Synthetic oligonucleotide
  Target: SCNA; (+) strand; PAM type: NRG; PAM sequence: AGG
ctgacagaacaaagactatg

SEQ ID NO: 29144 - DNA, 20 bp, Artificial Sequence
  Description of Artificial Sequence: Synthetic oligonucleotide
  Target: SCNA; (+) strand; PAM type: NRG; PAM sequence: CAG
aacaaagactatgaggttgt

SEQ ID NO: 29145 - DNA, 20 bp, Artificial Sequence
  Description of Artificial Sequence: Synthetic oligonucleotide
  Target: SCNA; (+) strand; PAM type: NRG; PAM sequence: TGG
cattttgtttcctaaatatg

SEQ ID NO: 29146 - DNA, 20 bp, Artificial Sequence
  Description of Artificial Sequence: Synthetic oligonucleotide
  Target: SCNA; (+) strand; PAM type: NRG; PAM sequence: AAG
tgtttcctaaatatgtggca

SEQ ID NO: 29147 - DNA, 20 bp, Artificial Sequence
  Description of Artificial Sequence: Synthetic oligonucleotide
  Target: SCNA; (+) strand; PAM type: NRG; PAM sequence: TAG
gtttgcttgtttgtttgttt

SEQ ID NO: 29148 - DNA, 20 bp, Artificial Sequence
  Description of Artificial Sequence: Synthetic oligonucleotide
  Target: SCNA; (+) strand; PAM type: NRG; PAM sequence: TAG
cttgtttgtttgttttagaa

SEQ ID NO: 29149 - DNA, 20 bp, Artificial Sequence
  Description of Artificial Sequence: Synthetic oligonucleotide
  Target: SCNA; (+) strand; PAM type: NRG; PAM sequence: AAG
ttcaaaccttttgaccaacc

SEQ ID NO: 29150 - DNA, 20 bp, Artificial Sequence
  Description of Artificial Sequence: Synthetic oligonucleotide
  Target: SCNA; (+) strand; PAM type: NRG; PAM sequence: AAG
aaccttttgaccaaccaaga

SEQ ID NO: 29151 - DNA, 20 bp, Artificial Sequence
  Description of Artificial Sequence: Synthetic oligonucleotide
  Target: SCNA; (+) strand; PAM type: NRG; PAM sequence: TGG
caaccaagaaagcttttgcc

SEQ ID NO: 29152 - DNA, 20 bp, Artificial Sequence
  Description of Artificial Sequence: Synthetic oligonucleotide
  Target: SCNA; (+) strand; PAM type: NRG; PAM sequence: GGG
aaccaagaaagcttttgcct

SEQ ID NO: 29153 - DNA, 20 bp, Artificial Sequence
  Description of Artificial Sequence: Synthetic oligonucleotide
  Target: SCNA; (+) strand; PAM type: NRG; PAM sequence: CAG
agaaagcttttgcctgggca

SEQ ID NO: 29154 - DNA, 20 bp, Artificial Sequence
  Description of Artificial Sequence: Synthetic oligonucleotide
  Target: SCNA; (+) strand; PAM type: NRG; PAM sequence: AGG
gaaagcttttgcctgggcac

SEQ ID NO: 29155 - DNA, 20 bp, Artificial Sequence
  Description of Artificial Sequence: Synthetic oligonucleotide
  Target: SCNA; (+) strand; PAM type: NRG; PAM sequence: TAG
ggcacaggctttatctttct

SEQ ID NO: 29156 - DNA, 20 bp, Artificial Sequence
  Description of Artificial Sequence: Synthetic oligonucleotide
  Target: SCNA; (+) strand; PAM type: NRG; PAM sequence: TAG
tatctttcttagcattacac

SEQ ID NO: 29157 - DNA, 20 bp, Artificial Sequence
  Description of Artificial Sequence: Synthetic oligonucleotide
  Target: SCNA; (+) strand; PAM type: NRG; PAM sequence: GAG
tctttcttagcattacacta

SEQ ID NO: 29158 - DNA, 20 bp, Artificial Sequence
  Description of Artificial Sequence: Synthetic oligonucleotide
  Target: SCNA; (+) strand; PAM type: NRG; PAM sequence: AAG
ataaaatataacgatccatt

SEQ ID NO: 29159 - DNA, 20 bp, Artificial Sequence
  Description of Artificial Sequence: Synthetic oligonucleotide
  Target: SCNA; (+) strand; PAM type: NRG; PAM sequence: TGG
ataacgatccattaagtcca

SEQ ID NO: 29160 - DNA, 20 bp, Artificial Sequence
  Description of Artificial Sequence: Synthetic oligonucleotide
  Target: SCNA; (+) strand; PAM type: NRG; PAM sequence: GGG
taacgatccattaagtccat

SEQ ID NO: 29161 - DNA, 20 bp, Artificial Sequence
  Description of Artificial Sequence: Synthetic oligonucleotide
  Target: SCNA; (+) strand; PAM type: NRG; PAM sequence: GGG
aacgatccattaagtccatg

SEQ ID NO: 29162 - DNA, 20 bp, Artificial Sequence
  Description of Artificial Sequence: Synthetic oligonucleotide
  Target: SCNA; (+) strand; PAM type: NRG; PAM sequence: CAG
gatccattaagtccatgggg

SEQ ID NO: 29163 - DNA, 20 bp, Artificial Sequence
  Description of Artificial Sequence: Synthetic oligonucleotide
  Target: SCNA; (+) strand; PAM type: NRG; PAM sequence: CAG
tataaccatgccttattcca

SEQ ID NO: 29164 - DNA, 20 bp, Artificial Sequence
  Description of Artificial Sequence: Synthetic oligonucleotide
  Target: SCNA; (+) strand; PAM type: NRG; PAM sequence: GAG
taaccatgccttattccaca

SEQ ID NO: 29165 - DNA, 20 bp, Artificial Sequence
  Description of Artificial Sequence: Synthetic oligonucleotide
  Target: SCNA; (+) strand; PAM type: NRG; PAM sequence: AAG
cttattccacagagaattta

SEQ ID NO: 29166 - DNA, 20 bp, Artificial Sequence
  Description of Artificial Sequence: Synthetic oligonucleotide
  Target: SCNA; (+) strand; PAM type: NRG; PAM sequence: GAG
tattccacagagaatttaaa

SEQ ID NO: 29167 - DNA, 20 bp, Artificial Sequence
  Description of Artificial Sequence: Synthetic oligonucleotide
  Target: SCNA; (+) strand; PAM type: NRG; PAM sequence: AGG
attccacagagaatttaaag

SEQ ID NO: 29168 - DNA, 20 bp, Artificial Sequence
  Description of Artificial Sequence: Synthetic oligonucleotide
  Target: SCNA; (+) strand; PAM type: NRG; PAM sequence: AAG
gagaatttaaagaggaataa

SEQ ID NO: 29169 - DNA, 20 bp, Artificial Sequence
  Description of Artificial Sequence: Synthetic oligonucleotide
  Target: SCNA; (+) strand; PAM type: NRG; PAM sequence: TGG
tgtatttctttttctttaat

SEQ ID NO: 29170 - DNA, 20 bp, Artificial Sequence
  Description of Artificial Sequence: Synthetic oligonucleotide
  Target: SCNA; (+) strand; PAM type: NRG; PAM sequence: AAG
gcattcttttaattactttt

SEQ ID NO: 29171 - DNA, 20 bp, Artificial Sequence
  Description of Artificial Sequence: Synthetic oligonucleotide
  Target: SCNA; (+) strand; PAM type: NRG; PAM sequence: AGG
cattcttttaattactttta

SEQ ID NO: 29172 - DNA, 20 bp, Artificial Sequence
  Description of Artificial Sequence: Synthetic oligonucleotide
  Target: SCNA; (+) strand; PAM type: NRG; PAM sequence: TGG
tttaaggcatccattatttc

SEQ ID NO: 29173 - DNA, 20 bp, Artificial Sequence
  Description of Artificial Sequence: Synthetic oligonucleotide
  Target: SCNA; (+) strand; PAM type: NRG; PAM sequence: TAG
actctcaataaatcaataca

SEQ ID NO: 29174 - DNA, 20 bp, Artificial Sequence
  Description of Artificial Sequence: Synthetic oligonucleotide
  Target: SCNA; (+) strand; PAM type: NRG; PAM sequence: TGG
cattttttccttctttaatt

SEQ ID NO: 29175 - DNA, 20 bp, Artificial Sequence
  Description of Artificial Sequence: Synthetic oligonucleotide
  Target: SCNA; (+) strand; PAM type: NRG; PAM sequence: GAG
atctccctttgctgtttatt

SEQ ID NO: 29176 - DNA, 20 bp, Artificial Sequence
  Description of Artificial Sequence: Synthetic oligonucleotide
  Target: SCNA; (+) strand; PAM type: NRG; PAM sequence: TAG
tccctttgctgtttattgag

SEQ ID NO: 29177 - DNA, 20 bp, Artificial Sequence
  Description of Artificial Sequence: Synthetic oligonucleotide
  Target: SCNA; (+) strand; PAM type: NRG; PAM sequence: TAG
agtagaaattctgatttttg

SEQ ID NO: 29178 - DNA, 20 bp, Artificial Sequence
  Description of Artificial Sequence: Synthetic oligonucleotide
  Target: SCNA; (+) strand; PAM type: NRG; PAM sequence: AAG
aaattctgatttttgtagca

SEQ ID NO: 29179 - DNA, 20 bp, Artificial Sequence
  Description of Artificial Sequence: Synthetic oligonucleotide
  Target: SCNA; (+) strand; PAM type: NRG; PAM sequence: AGG
aattctgatttttgtagcaa

SEQ ID NO: 29180 - DNA, 20 bp, Artificial Sequence
  Description of Artificial Sequence: Synthetic oligonucleotide
  Target: SCNA; (+) strand; PAM type: NRG; PAM sequence: GGG
attctgatttttgtagcaaa

SEQ ID NO: 29181 - DNA, 20 bp, Artificial Sequence
  Description of Artificial Sequence: Synthetic oligonucleotide
  Target: SCNA; (+) strand; PAM type: NRG; PAM sequence: GAG
tctgatttttgtagcaaagg

SEQ ID NO: 29182 - DNA, 20 bp, Artificial Sequence
  Description of Artificial Sequence: Synthetic oligonucleotide
  Target: SCNA; (+) strand; PAM type: NRG; PAM sequence: CAG
gagaacaaacaaacaacaca

SEQ ID NO: 29183 - DNA, 20 bp, Artificial Sequence
  Description of Artificial Sequence: Synthetic oligonucleotide
  Target: SCNA; (+) strand; PAM type: NRG; PAM sequence: TGG
taatgctgcaattgtctcta

SEQ ID NO: 29184 - DNA, 20 bp, Artificial Sequence
  Description of Artificial Sequence: Synthetic oligonucleotide
  Target: SCNA; (+) strand; PAM type: NRG; PAM sequence: TAG
gtctctatggttgcaatgtg

SEQ ID NO: 29185 - DNA, 20 bp, Artificial Sequence
  Description of Artificial Sequence: Synthetic oligonucleotide
  Target: SCNA; (+) strand; PAM type: NRG; PAM sequence: AGG
tctctatggttgcaatgtgt

SEQ ID NO: 29186 - DNA, 20 bp, Artificial Sequence
  Description of Artificial Sequence: Synthetic oligonucleotide
  Target: SCNA; (+) strand; PAM type: NRG; PAM sequence: TGG
ctatggttgcaatgtgtagg

SEQ ID NO: 29187 - DNA, 20 bp, Artificial Sequence
  Description of Artificial Sequence: Synthetic oligonucleotide
  Target: SCNA; (+) strand; PAM type: NRG; PAM sequence: GGG
tatggttgcaatgtgtaggt

SEQ ID NO: 29188 - DNA, 20 bp, Artificial Sequence
  Description of Artificial Sequence: Synthetic oligonucleotide
  Target: SCNA; (+) strand; PAM type: NRG; PAM sequence: GGG
atggttgcaatgtgtaggtg

SEQ ID NO: 29189 - DNA, 20 bp, Artificial Sequence
  Description of Artificial Sequence: Synthetic oligonucleotide
  Target: SCNA; (+) strand; PAM type: NRG; PAM sequence: AAG
tgtgtaggtggggtgcattc

SEQ ID NO: 29190 - DNA, 20 bp, Artificial Sequence
  Description of Artificial Sequence: Synthetic oligonucleotide
  Target: SCNA; (+) strand; PAM type: NRG; PAM sequence: TGG
gtaggtggggtgcattcaag

SEQ ID NO: 29191 - DNA, 20 bp, Artificial Sequence
  Description of Artificial Sequence: Synthetic oligonucleotide
  Target: SCNA; (+) strand; PAM type: NRG; PAM sequence: GGG
taggtggggtgcattcaagt

SEQ ID NO: 29192 - DNA, 20 bp, Artificial Sequence
  Description of Artificial Sequence: Synthetic oligonucleotide
  Target: SCNA; (+) strand; PAM type: NRG; PAM sequence: TGG
ggtgcattcaagtgggcttg

SEQ ID NO: 29193 - DNA, 20 bp, Artificial Sequence
  Description of Artificial Sequence: Synthetic oligonucleotide
  Target: SCNA; (+) strand; PAM type: NRG; PAM sequence: TGG
gtgtatgtgtgtgtgtgtgt

SEQ ID NO: 29194 - DNA, 20 bp, Artificial Sequence
  Description of Artificial Sequence: Synthetic oligonucleotide
  Target: SCNA; (+) strand; PAM type: NRG; PAM sequence: AAG
tatgtgtgtgtgtgtgttgg

SEQ ID NO: 29195 - DNA, 20 bp, Artificial Sequence
  Description of Artificial Sequence: Synthetic oligonucleotide
  Target: SCNA; (+) strand; PAM type: NRG; PAM sequence: GAG
gtgttggaagaatatatatt

SEQ ID NO: 29196 - DNA, 20 bp, Artificial Sequence
  Description of Artificial Sequence: Synthetic oligonucleotide
  Target: SCNA; (+) strand; PAM type: NRG; PAM sequence: AGG
tgttggaagaatatatattg

SEQ ID NO: 29197 - DNA, 20 bp, Artificial Sequence
  Description of Artificial Sequence: Synthetic oligonucleotide
  Target: SCNA; (+) strand; PAM type: NRG; PAM sequence: GAG
cctaattttatcactttgtt

SEQ ID NO: 29198 - DNA, 20 bp, Artificial Sequence
  Description of Artificial Sequence: Synthetic oligonucleotide
  Target: SCNA; (+) strand; PAM type: NRG; PAM sequence: AGG
ctaattttatcactttgttg

SEQ ID NO: 29199 - DNA, 20 bp, Artificial Sequence
  Description of Artificial Sequence: Synthetic oligonucleotide
  Target: SCNA; (+) strand; PAM type: NRG; PAM sequence: TGG
ttgttgaggaactgaaattg

SEQ ID NO: 29200 - DNA, 20 bp, Artificial Sequence
  Description of Artificial Sequence: Synthetic oligonucleotide
  Target: SCNA; (+) strand; PAM type: NRG; PAM sequence: CAG
actctaaatattttgtctca

SEQ ID NO: 29201 - DNA, 20 bp, Artificial Sequence
  Description of Artificial Sequence: Synthetic oligonucleotide
  Target: SCNA; (+) strand; PAM type: NRG; PAM sequence: CAG
ctcccttcaacaattatata

SEQ ID NO: 29202 - DNA, 20 bp, Artificial Sequence
  Description of Artificial Sequence: Synthetic oligonucleotide
  Target: SCNA; (+) strand; PAM type: NRG; PAM sequence: TGG
atatacagtacactatttgt

SEQ ID NO: 29203 - DNA, 20 bp, Artificial Sequence
  Description of Artificial Sequence: Synthetic oligonucleotide
  Target: SCNA; (+) strand; PAM type: NRG; PAM sequence: AAG
tacagtacactatttgttgg

SEQ ID NO: 29204 - DNA, 20 bp, Artificial Sequence
  Description of Artificial Sequence: Synthetic oligonucleotide
  Target: SCNA; (+) strand; PAM type: NRG; PAM sequence: CAG
tacactatttgttggaagct

SEQ ID NO: 29205 - DNA, 20 bp, Artificial Sequence
  Description of Artificial Sequence: Synthetic oligonucleotide
  Target: SCNA; (+) strand; PAM type: NRG; PAM sequence: AGG
acactatttgttggaagctc

SEQ ID NO: 29206 - DNA, 20 bp, Artificial Sequence
  Description of Artificial Sequence: Synthetic oligonucleotide
  Target: SCNA; (+) strand; PAM type: NRG; PAM sequence: GAG
actatttgttggaagctcag

SEQ ID NO: 29207 - DNA, 20 bp, Artificial Sequence
  Description of Artificial Sequence: Synthetic oligonucleotide
  Target: SCNA; (+) strand; PAM type: NRG; PAM sequence: AAG
tgttggaagctcaggagaaa

SEQ ID NO: 29208 - DNA, 20 bp, Artificial Sequence
  Description of Artificial Sequence: Synthetic oligonucleotide
  Target: SCNA; (+) strand; PAM type: NRG; PAM sequence: AGG
gttggaagctcaggagaaaa

SEQ ID NO: 29209 - DNA, 20 bp, Artificial Sequence
  Description of Artificial Sequence: Synthetic oligonucleotide
  Target: SCNA; (+) strand; PAM type: NRG; PAM sequence: GGG
ttggaagctcaggagaaaaa

SEQ ID NO: 29210 - DNA, 20 bp, Artificial Sequence
  Description of Artificial Sequence: Synthetic oligonucleotide
  Target: SCNA; (+) strand; PAM type: NRG; PAM sequence: AAG
tcaggagaaaaagggcattt

SEQ ID NO: 29211 - DNA, 20 bp, Artificial Sequence
  Description of Artificial Sequence: Synthetic oligonucleotide
  Target: SCNA; (+) strand; PAM type: NRG; PAM sequence: GAG
aggagaaaaagggcatttaa

SEQ ID NO: 29212 - DNA, 20 bp, Artificial Sequence
  Description of Artificial Sequence: Synthetic oligonucleotide
  Target: SCNA; (+) strand; PAM type: NRG; PAM sequence: GAG
aaaagggcatttaagagcat

SEQ ID NO: 29213 - DNA, 20 bp, Artificial Sequence
  Description of Artificial Sequence: Synthetic oligonucleotide
  Target: SCNA; (+) strand; PAM type: NRG; PAM sequence: TGG
gcatttaagagcatgagatt

SEQ ID NO: 29214 - DNA, 20 bp, Artificial Sequence
  Description of Artificial Sequence: Synthetic oligonucleotide
  Target: SCNA; (+) strand; PAM type: NRG; PAM sequence: TGG
tttaagagcatgagatttgg

SEQ ID NO: 29215 - DNA, 20 bp, Artificial Sequence
  Description of Artificial Sequence: Synthetic oligonucleotide
  Target: SCNA; (+) strand; PAM type: NRG; PAM sequence: CAG
aagagcatgagatttggtgg

SEQ ID NO: 29216 - DNA, 20 bp, Artificial Sequence
  Description of Artificial Sequence: Synthetic oligonucleotide
  Target: SCNA; (+) strand; PAM type: NRG; PAM sequence: TAG
ttggtggcagactgacctaa

SEQ ID NO: 29217 - DNA, 20 bp, Artificial Sequence
  Description of Artificial Sequence: Synthetic oligonucleotide
  Target: SCNA; (+) strand; PAM type: NRG; PAM sequence: TAG
gtggcagactgacctaatag

SEQ ID NO: 29218 - DNA, 20 bp, Artificial Sequence
  Description of Artificial Sequence: Synthetic oligonucleotide
  Target: SCNA; (+) strand; PAM type: NRG; PAM sequence: TGG
cagactgacctaatagtaga

SEQ ID NO: 29219 - DNA, 20 bp, Artificial Sequence
  Description of Artificial Sequence: Synthetic oligonucleotide
  Target: SCNA; (+) strand; PAM type: NRG; PAM sequence: CAG
gacctaatagtagatggtac

SEQ ID NO: 29220 - DNA, 20 bp, Artificial Sequence
  Description of Artificial Sequence: Synthetic oligonucleotide
  Target: SCNA; (+) strand; PAM type: NRG; PAM sequence: GAG
taatagtagatggtaccagt

SEQ ID NO: 29221 - DNA, 20 bp, Artificial Sequence
  Description of Artificial Sequence: Synthetic oligonucleotide
  Target: SCNA; (+) strand; PAM type: NRG; PAM sequence: GAG
gatggtaccagtgagatctt

SEQ ID NO: 29222 - DNA, 20 bp, Artificial Sequence
  Description of Artificial Sequence: Synthetic oligonucleotide
  Target: SCNA; (+) strand; PAM type: NRG; PAM sequence: CGG
taaatgtttcaactgaaaaa

SEQ ID NO: 29223 - DNA, 20 bp, Artificial Sequence
  Description of Artificial Sequence: Synthetic oligonucleotide
  Target: SCNA; (+) strand; PAM type: NRG; PAM sequence: CAG
ggtaacaataaaacattttt

SEQ ID NO: 29224 - DNA, 20 bp, Artificial Sequence
  Description of Artificial Sequence: Synthetic oligonucleotide
  Target: SCNA; (+) strand; PAM type: NRG; PAM sequence: GAG
taacaataaaacatttttca

SEQ ID NO: 29225 - DNA, 20 bp, Artificial Sequence
  Description of Artificial Sequence: Synthetic oligonucleotide
  Target: SCNA; (+) strand; PAM type: NRG; PAM sequence: AAG
taaatgaaatgatatacata

SEQ ID NO: 29226 - DNA, 20 bp, Artificial Sequence
  Description of Artificial Sequence: Synthetic oligonucleotide
  Target: SCNA; (+) strand; PAM type: NRG; PAM sequence: TAG
atgaaatgatatacataaag

SEQ ID NO: 29227 - DNA, 20 bp, Artificial Sequence
  Description of Artificial Sequence: Synthetic oligonucleotide
  Target: SCNA; (+) strand; PAM type: NRG; PAM sequence: CAG
agcctataatgacccatgca

SEQ ID NO: 29228 - DNA, 20 bp, Artificial Sequence
  Description of Artificial Sequence: Synthetic oligonucleotide
  Target: SCNA; (+) strand; PAM type: NRG; PAM sequence: GAG
cataatatcaaatatttact

SEQ ID NO: 29229 - DNA, 20 bp, Artificial Sequence
  Description of Artificial Sequence: Synthetic oligonucleotide
  Target: SCNA; (+) strand; PAM type: NRG; PAM sequence: TAG
actgagcatctactatgtgc

SEQ ID NO: 29230 - DNA, 20 bp, Artificial Sequence
  Description of Artificial Sequence: Synthetic oligonucleotide
  Target: SCNA; (+) strand; PAM type: NRG; PAM sequence: AAG
actatgtgctagattatttt

SEQ ID NO: 29231 - DNA, 20 bp, Artificial Sequence
  Description of Artificial Sequence: Synthetic oligonucleotide
  Target: SCNA; (+) strand; PAM type: NRG; PAM sequence: AAG
ttaagcacttttgaaaatat

SEQ ID NO: 29232 - DNA, 20 bp, Artificial Sequence
  Description of Artificial Sequence: Synthetic oligonucleotide
  Target: SCNA; (+) strand; PAM type: NRG; PAM sequence: AAG
atatcatatattgtcttaat

SEQ ID NO: 29233 - DNA, 20 bp, Artificial Sequence
  Description of Artificial Sequence: Synthetic oligonucleotide
  Target: SCNA; (+) strand; PAM type: NRG; PAM sequence: AAG
attgctaattttattttttt

SEQ ID NO: 29234 - DNA, 20 bp, Artificial Sequence
  Description of Artificial Sequence: Synthetic oligonucleotide
  Target: SCNA; (+) strand; PAM type: NRG; PAM sequence: TGG
tttttaagaaaacctttttt

SEQ ID NO: 29235 - DNA, 20 bp, Artificial Sequence
  Description of Artificial Sequence: Synthetic oligonucleotide
  Target: SCNA; (+) strand; PAM type: NRG; PAM sequence: AAG
taagaaaacctttttttgga

SEQ ID NO: 29236 - DNA, 20 bp, Artificial Sequence
  Description of Artificial Sequence: Synthetic oligonucleotide
  Target: SCNA; (+) strand; PAM type: NRG; PAM sequence: TGG
aaacccaactatttaaaaaa

SEQ ID NO: 29237 - DNA, 20 bp, Artificial Sequence
  Description of Artificial Sequence: Synthetic oligonucleotide
  Target: SCNA; (+) strand; PAM type: NRG; PAM sequence: TGG
atttaaaaaatggaaacttt

SEQ ID NO: 29238 - DNA, 20 bp, Artificial Sequence
  Description of Artificial Sequence: Synthetic oligonucleotide
  Target: SCNA; (+) strand; PAM type: NRG; PAM sequence: CGG
aaaaaatggaaacttttggc

SEQ ID NO: 29239 - DNA, 20 bp, Artificial Sequence
  Description of Artificial Sequence: Synthetic oligonucleotide
  Target: SCNA; (+) strand; PAM type: NRG; PAM sequence: GGG
aaaaatggaaacttttggcc

SEQ ID NO: 29240 - DNA, 20 bp, Artificial Sequence
  Description of Artificial Sequence: Synthetic oligonucleotide
  Target: SCNA; (+) strand; PAM type: NRG; PAM sequence: CGG
tggaaacttttggccgggaa

SEQ ID NO: 29241 - DNA, 20 bp, Artificial Sequence
  Description of Artificial Sequence: Synthetic oligonucleotide
  Target: SCNA; (+) strand; PAM type: NRG; PAM sequence: GAG
gaaacttttggccgggaacg

SEQ ID NO: 29242 - DNA, 20 bp, Artificial Sequence
  Description of Artificial Sequence: Synthetic oligonucleotide
  Target: SCNA; (+) strand; PAM type: NRG; PAM sequence: AGG
aaacttttggccgggaacgg

SEQ ID NO: 29243 - DNA, 20 bp, Artificial Sequence
  Description of Artificial Sequence: Synthetic oligonucleotide
  Target: SCNA; (+) strand; PAM type: NRG; PAM sequence: CAG
gaggctcacacctataatct

SEQ ID NO: 29244 - DNA, 20 bp, Artificial Sequence
  Description of Artificial Sequence: Synthetic oligonucleotide
  Target: SCNA; (+) strand; PAM type: NRG; PAM sequence: TGG
cacctataatctcagcactt

SEQ ID NO: 29245 - DNA, 20 bp, Artificial Sequence
  Description of Artificial Sequence: Synthetic oligonucleotide
  Target: SCNA; (+) strand; PAM type: NRG; PAM sequence: GGG
acctataatctcagcacttt

SEQ ID NO: 29246 - DNA, 20 bp, Artificial Sequence
  Description of Artificial Sequence: Synthetic oligonucleotide
  Target: SCNA; (+) strand; PAM type: NRG; PAM sequence: GAG
ctataatctcagcactttgg

SEQ ID NO: 29247 - DNA, 20 bp, Artificial Sequence
  Description of Artificial Sequence: Synthetic oligonucleotide
  Target: SCNA; (+) strand; PAM type: NRG; PAM sequence: AGG
tataatctcagcactttggg

SEQ ID NO: 29248 - DNA, 20 bp, Artificial Sequence
  Description of Artificial Sequence: Synthetic oligonucleotide
  Target: SCNA; (+) strand; PAM type: NRG; PAM sequence: TGG
cagcactttgggaggccgaa

SEQ ID NO: 29249 - DNA, 20 bp, Artificial Sequence
  Description of Artificial Sequence: Synthetic oligonucleotide
  Target: SCNA; (+) strand; PAM type: NRG; PAM sequence: GGG
agcactttgggaggccgaat

SEQ ID NO: 29250 - DNA, 20 bp, Artificial Sequence
  Description of Artificial Sequence: Synthetic oligonucleotide
  Target: SCNA; (+) strand; PAM type: NRG; PAM sequence: CGG
actttgggaggccgaatggg

SEQ ID NO: 29251 - DNA, 20 bp, Artificial Sequence
  Description of Artificial Sequence: Synthetic oligonucleotide
  Target: SCNA; (+) strand; PAM type: NRG; PAM sequence: AAG
aggccgaatgggcggatcac

SEQ ID NO: 29252 - DNA, 20 bp, Artificial Sequence
  Description of Artificial Sequence: Synthetic oligonucleotide
  Target: SCNA; (+) strand; PAM type: NRG; PAM sequence: AGG
ggccgaatgggcggatcaca

SEQ ID NO: 29253 - DNA, 20 bp, Artificial Sequence
  Description of Artificial Sequence: Synthetic oligonucleotide
  Target: SCNA; (+) strand; PAM type: NRG; PAM sequence: AAG
aatgggcggatcacaaggtc

SEQ ID NO: 29254 - DNA, 20 bp, Artificial Sequence
  Description of Artificial Sequence: Synthetic oligonucleotide
  Target: SCNA; (+) strand; PAM type: NRG; PAM sequence: GAG
tgggcggatcacaaggtcaa

SEQ ID NO: 29255 - DNA, 20 bp, Artificial Sequence
  Description of Artificial Sequence: Synthetic oligonucleotide
  Target: SCNA; (+) strand; PAM type: NRG; PAM sequence: GAG
gatcacaaggtcaagagatt

SEQ ID NO: 29256 - DNA, 20 bp, Artificial Sequence
  Description of Artificial Sequence: Synthetic oligonucleotide
  Target: SCNA; (+) strand; PAM type: NRG; PAM sequence: TGG
tcaagagattgagaccatcc

SEQ ID NO: 29257 - DNA, 20 bp, Artificial Sequence
  Description of Artificial Sequence: Synthetic oligonucleotide
  Target: SCNA; (+) strand; PAM type: NRG; PAM sequence: TGG
tgagaccatcctggccaacg

SEQ ID NO: 29258 - DNA, 20 bp, Artificial Sequence
  Description of Artificial Sequence: Synthetic oligonucleotide
  Target: SCNA; (+) strand; PAM type: NRG; PAM sequence: AAG
cgtctctactaaaaatacaa

SEQ ID NO: 29259 - DNA, 20 bp, Artificial Sequence
  Description of Artificial Sequence: Synthetic oligonucleotide
  Target: SCNA; (+) strand; PAM type: NRG; PAM sequence: TAG
tctactaaaaatacaaaagt

SEQ ID NO: 29260 - DNA, 20 bp, Artificial Sequence
  Description of Artificial Sequence: Synthetic oligonucleotide
  Target: SCNA; (+) strand; PAM type: NRG; PAM sequence: TGG
ctaaaaatacaaaagttagc

SEQ ID NO: 29261 - DNA, 20 bp, Artificial Sequence
  Description of Artificial Sequence: Synthetic oligonucleotide
  Target: SCNA; (+) strand; PAM type: NRG; PAM sequence: GGG
taaaaatacaaaagttagct

SEQ ID NO: 29262 - DNA, 20 bp, Artificial Sequence
  Description of Artificial Sequence: Synthetic oligonucleotide
  Target: SCNA; (+) strand; PAM type: NRG; PAM sequence: TGG
atacaaaagttagctgggca

SEQ ID NO: 29263 - DNA, 20 bp, Artificial Sequence
  Description of Artificial Sequence: Synthetic oligonucleotide
  Target: SCNA; (+) strand; PAM type: NRG; PAM sequence: TGG
caaaagttagctgggcatgg

SEQ ID NO: 29264 - DNA, 20 bp, Artificial Sequence
  Description of Artificial Sequence: Synthetic oligonucleotide
  Target: SCNA; (+) strand; PAM type: NRG; PAM sequence: TAG
ggcatggtggcacatgcctg

SEQ ID NO: 29265 - DNA, 20 bp, Artificial Sequence
  Description of Artificial Sequence: Synthetic oligonucleotide
  Target: SCNA; (+) strand; PAM type: NRG; PAM sequence: CAG
gtggcacatgcctgtagtcc

SEQ ID NO: 29266 - DNA, 20 bp, Artificial Sequence
  Description of Artificial Sequence: Synthetic oligonucleotide
  Target: SCNA; (+) strand; PAM type: NRG; PAM sequence: CGG
tgcctgtagtcccagctact

SEQ ID NO: 29267 - DNA, 20 bp, Artificial Sequence
  Description of Artificial Sequence: Synthetic oligonucleotide
  Target: SCNA; (+) strand; PAM type: NRG; PAM sequence: GGG
gcctgtagtcccagctactc

SEQ ID NO: 29268 - DNA, 20 bp, Artificial Sequence
  Description of Artificial Sequence: Synthetic oligonucleotide
  Target: SCNA; (+) strand; PAM type: NRG; PAM sequence: GAG
ctgtagtcccagctactcgg

SEQ ID NO: 29269 - DNA, 20 bp, Artificial Sequence
  Description of Artificial Sequence: Synthetic oligonucleotide
  Target: SCNA; (+) strand; PAM type: NRG; PAM sequence: AGG
tgtagtcccagctactcggg

SEQ ID NO: 29270 - DNA, 20 bp, Artificial Sequence
  Description of Artificial Sequence: Synthetic oligonucleotide
  Target: SCNA; (+) strand; PAM type: NRG; PAM sequence: GAG
tcccagctactcgggaggct

SEQ ID NO: 29271 - DNA, 20 bp, Artificial Sequence
  Description of Artificial Sequence: Synthetic oligonucleotide
  Target: SCNA; (+) strand; PAM type: NRG; PAM sequence: AGG
cccagctactcgggaggctg

SEQ ID NO: 29272 - DNA, 20 bp, Artificial Sequence
  Description of Artificial Sequence: Synthetic oligonucleotide
  Target: SCNA; (+) strand; PAM type: NRG; PAM sequence: CAG
agctactcgggaggctgagg

SEQ ID NO: 29273 - DNA, 20 bp, Artificial Sequence
  Description of Artificial Sequence: Synthetic oligonucleotide
  Target: SCNA; (+) strand; PAM type: NRG; PAM sequence: AAG
tactcgggaggctgaggcag

SEQ ID NO: 29274 - DNA, 20 bp, Artificial Sequence
  Description of Artificial Sequence: Synthetic oligonucleotide
  Target: SCNA; (+) strand; PAM type: NRG; PAM sequence: TGG
ggctgaggcagaagaatcgc

SEQ ID NO: 29275 - DNA, 20 bp, Artificial Sequence
  Description of Artificial Sequence: Synthetic oligonucleotide
  Target: SCNA; (+) strand; PAM type: NRG; PAM sequence: CAG
gcagaagaatcgctggaacc

SEQ ID NO: 29276 - DNA, 20 bp, Artificial Sequence
  Description of Artificial Sequence: Synthetic oligonucleotide
  Target: SCNA; (+) strand; PAM type: NRG; PAM sequence: AGG
cagaagaatcgctggaaccc

SEQ ID NO: 29277 - DNA, 20 bp, Artificial Sequence
  Description of Artificial Sequence: Synthetic oligonucleotide
  Target: SCNA; (+) strand; PAM type: NRG; PAM sequence: GAG
gaagaatcgctggaacccag

SEQ ID NO: 29278 - DNA, 20 bp, Artificial Sequence
  Description of Artificial Sequence: Synthetic oligonucleotide
  Target: SCNA; (+) strand; PAM type: NRG; PAM sequence: AGG
aagaatcgctggaacccagg

SEQ ID NO: 29279 - DNA, 20 bp, Artificial Sequence
  Description of Artificial Sequence: Synthetic oligonucleotide
  Target: SCNA; (+) strand; PAM type: NRG; PAM sequence: CGG
aatcgctggaacccaggagg

SEQ ID NO: 29280 - DNA, 20 bp, Artificial Sequence
  Description of Artificial Sequence: Synthetic oligonucleotide
  Target: SCNA; (+) strand; PAM type: NRG; PAM sequence: GAG
tcgctggaacccaggaggcg

SEQ ID NO: 29281 - DNA, 20 bp, Artificial Sequence
  Description of Artificial Sequence: Synthetic oligonucleotide
  Target: SCNA; (+) strand; PAM type: NRG; PAM sequence: AGG
cgctggaacccaggaggcgg

SEQ ID NO: 29282 - DNA, 20 bp, Artificial Sequence
  Description of Artificial Sequence: Synthetic oligonucleotide
  Target: SCNA; (+) strand; PAM type: NRG; PAM sequence: CAG
aacccaggaggcggaggttg

SEQ ID NO: 29283 - DNA, 20 bp, Artificial Sequence
  Description of Artificial Sequence: Synthetic oligonucleotide
  Target: SCNA; (+) strand; PAM type: NRG; PAM sequence: GAG
caggaggcggaggttgcagt

SEQ ID NO: 29284 - DNA, 20 bp, Artificial Sequence
  Description of Artificial Sequence: Synthetic oligonucleotide
  Target: SCNA; (+) strand; PAM type: NRG; PAM sequence: GAG
ggcggaggttgcagtgagcc

SEQ ID NO: 29285 - DNA, 20 bp, Artificial Sequence
  Description of Artificial Sequence: Synthetic oligonucleotide
  Target: SCNA; (+) strand; PAM type: NRG; PAM sequence: CAG
gaggttgcagtgagccgaga

SEQ ID NO: 29286 - DNA, 20 bp, Artificial Sequence
  Description of Artificial Sequence: Synthetic oligonucleotide
  Target: SCNA; (+) strand; PAM type: NRG; PAM sequence: CAG
gagacagcaccactgcactc

SEQ ID NO: 29287 - DNA, 20 bp, Artificial Sequence
  Description of Artificial Sequence: Synthetic oligonucleotide
  Target: SCNA; (+) strand; PAM type: NRG; PAM sequence: TGG
agcaccactgcactccagac

SEQ ID NO: 29288 - DNA, 20 bp, Artificial Sequence
  Description of Artificial Sequence: Synthetic oligonucleotide
  Target: SCNA; (+) strand; PAM type: NRG; PAM sequence: CAG
actgcactccagactggcga

SEQ ID NO: 29289 - DNA, 20 bp, Artificial Sequence
  Description of Artificial Sequence: Synthetic oligonucleotide
  Target: SCNA; (+) strand; PAM type: NRG; PAM sequence: GAG
tgcactccagactggcgaca

SEQ ID NO: 29290 - DNA, 20 bp, Artificial Sequence
  Description of Artificial Sequence: Synthetic oligonucleotide
  Target: SCNA; (+) strand; PAM type: NRG; PAM sequence: GAG
ctccagactggcgacagagt

SEQ ID NO: 29291 - DNA, 20 bp, Artificial Sequence
  Description of Artificial Sequence: Synthetic oligonucleotide
  Target: SCNA; (+) strand; PAM type: NRG; PAM sequence: AAG
ctccatctaaaaaaaaaaaa

SEQ ID NO: 29292 - DNA, 20 bp, Artificial Sequence
  Description of Artificial Sequence: Synthetic oligonucleotide
  Target: SCNA; (+) strand; PAM type: NRG; PAM sequence: AGG
tccatctaaaaaaaaaaaaa

SEQ ID NO: 29293 - DNA, 20 bp, Artificial Sequence
  Description of Artificial Sequence: Synthetic oligonucleotide
  Target: SCNA; (+) strand; PAM type: NRG; PAM sequence: TAG
ttttgccttacttcgtttgc

SEQ ID NO: 29294 - DNA, 20 bp, Artificial Sequence
  Description of Artificial Sequence: Synthetic oligonucleotide
  Target: SCNA; (+) strand; PAM type: NRG; PAM sequence: AAG
ttcgtttgctagctacattc

SEQ ID NO: 29295 - DNA, 20 bp, Artificial Sequence
  Description of Artificial Sequence: Synthetic oligonucleotide
  Target: SCNA; (+) strand; PAM type: NRG; PAM sequence: AAG
ctacattcaagtctgcaatt

SEQ ID NO: 29296 - DNA, 20 bp, Artificial Sequence
  Description of Artificial Sequence: Synthetic oligonucleotide
  Target: SCNA; (+) strand; PAM type: NRG; PAM sequence: CGG
ttcaagtctgcaattaagct

SEQ ID NO: 29297 - DNA, 20 bp, Artificial Sequence
  Description of Artificial Sequence: Synthetic oligonucleotide
  Target: SCNA; (+) strand; PAM type: NRG; PAM sequence: CAG
tgcctttctcaaactgtgca

SEQ ID NO: 29298 - DNA, 20 bp, Artificial Sequence
  Description of Artificial Sequence: Synthetic oligonucleotide
  Target: SCNA; (+) strand; PAM type: NRG; PAM sequence: AGG
gcctttctcaaactgtgcac

SEQ ID NO: 29299 - DNA, 20 bp, Artificial Sequence
  Description of Artificial Sequence: Synthetic oligonucleotide
  Target: SCNA; (+) strand; PAM type: NRG; PAM sequence: TAG
ttccccttctctctgttgcc

SEQ ID NO: 29300 - DNA, 20 bp, Artificial Sequence
  Description of Artificial Sequence: Synthetic oligonucleotide
  Target: SCNA; (+) strand; PAM type: NRG; PAM sequence: AGG
tccccttctctctgttgcct

SEQ ID NO: 29301 - DNA, 20 bp, Artificial Sequence
  Description of Artificial Sequence: Synthetic oligonucleotide
  Target: SCNA; (+) strand; PAM type: NRG; PAM sequence: CAG
ctctctgttgcctaggaata

SEQ ID NO: 29302 - DNA, 20 bp, Artificial Sequence
  Description of Artificial Sequence: Synthetic oligonucleotide
  Target: SCNA; (+) strand; PAM type: NRG; PAM sequence: GAG
aggaatacagccaaaaactt

SEQ ID NO: 29303 - DNA, 20 bp, Artificial Sequence
  Description of Artificial Sequence: Synthetic oligonucleotide
  Target: SCNA; (+) strand; PAM type: NRG; PAM sequence: TAG
acagccaaaaacttgagtaa

SEQ ID NO: 29304 - DNA, 20 bp, Artificial Sequence
  Description of Artificial Sequence: Synthetic oligonucleotide
  Target: SCNA; (+) strand; PAM type: NRG; PAM sequence: TAG
aaaacttgagtaatagatga

SEQ ID NO: 29305 - DNA, 20 bp, Artificial Sequence
  Description of Artificial Sequence: Synthetic oligonucleotide
  Target: SCNA; (+) strand; PAM type: NRG; PAM sequence: TGG
cttgagtaatagatgataga

SEQ ID NO: 29306 - DNA, 20 bp, Artificial Sequence
  Description of Artificial Sequence: Synthetic oligonucleotide
  Target: SCNA; (+) strand; PAM type: NRG; PAM sequence: GGG
ttgagtaatagatgatagat

SEQ ID NO: 29307 - DNA, 20 bp, Artificial Sequence
  Description of Artificial Sequence: Synthetic oligonucleotide
  Target: SCNA; (+) strand; PAM type: NRG; PAM sequence: AAG
tgatagatgggtctgtcact

SEQ ID NO: 29308 - DNA, 20 bp, Artificial Sequence
  Description of Artificial Sequence: Synthetic oligonucleotide
  Target: SCNA; (+) strand; PAM type: NRG; PAM sequence: TAG
gtctgtcactaagcacatcc

SEQ ID NO: 29309 - DNA, 20 bp, Artificial Sequence
  Description of Artificial Sequence: Synthetic oligonucleotide
  Target: SCNA; (+) strand; PAM type: NRG; PAM sequence: TAG
ctaagcacatcctagtgaca

SEQ ID NO: 29310 - DNA, 20 bp, Artificial Sequence
  Description of Artificial Sequence: Synthetic oligonucleotide
  Target: SCNA; (+) strand; PAM type: NRG; PAM sequence: AAG
cacatcctagtgacatagat

SEQ ID NO: 29311 - DNA, 20 bp, Artificial Sequence
  Description of Artificial Sequence: Synthetic oligonucleotide
  Target: SCNA; (+) strand; PAM type: NRG; PAM sequence: AAG
atcctagtgacatagataag

SEQ ID NO: 29312 - DNA, 20 bp, Artificial Sequence
  Description of Artificial Sequence: Synthetic oligonucleotide
  Target: SCNA; (+) strand; PAM type: NRG; PAM sequence: TAG
aagcaaatgctacaaaatta

SEQ ID NO: 29313 - DNA, 20 bp, Artificial Sequence
  Description of Artificial Sequence: Synthetic oligonucleotide
  Target: SCNA; (+) strand; PAM type: NRG; PAM sequence: AGG
agcaaatgctacaaaattat

SEQ ID NO: 29314 - DNA, 20 bp, Artificial Sequence
  Description of Artificial Sequence: Synthetic oligonucleotide
  Target: SCNA; (+) strand; PAM type: NRG; PAM sequence: AAG
aaattataggtgcaaactac

SEQ ID NO: 29315 - DNA, 20 bp, Artificial Sequence
  Description of Artificial Sequence: Synthetic oligonucleotide
  Target: SCNA; (+) strand; PAM type: NRG; PAM sequence: TGG
actacaagttgtgttttaat

SEQ ID NO: 29316 - DNA, 20 bp, Artificial Sequence
  Description of Artificial Sequence: Synthetic oligonucleotide
  Target: SCNA; (+) strand; PAM type: NRG; PAM sequence: AAG
gtgttttaattggttttaac

SEQ ID NO: 29317 - DNA, 20 bp, Artificial Sequence
  Description of Artificial Sequence: Synthetic oligonucleotide
  Target: SCNA; (+) strand; PAM type: NRG; PAM sequence: AAG
tggttttaacaagtacttat

SEQ ID NO: 29318 - DNA, 20 bp, Artificial Sequence
  Description of Artificial Sequence: Synthetic oligonucleotide
  Target: SCNA; (+) strand; PAM type: NRG; PAM sequence: CAG
ttttaacaagtacttataag

SEQ ID NO: 29319 - DNA, 20 bp, Artificial Sequence
  Description of Artificial Sequence: Synthetic oligonucleotide
  Target: SCNA; (+) strand; PAM type: NRG; PAM sequence: AAG
taacaagtacttataagcag

SEQ ID NO: 29320 - DNA, 20 bp, Artificial Sequence
  Description of Artificial Sequence: Synthetic oligonucleotide
  Target: SCNA; (+) strand; PAM type: NRG; PAM sequence: AAG
taacattttgtcctacttgc

SEQ ID NO: 29321 - DNA, 20 bp, Artificial Sequence
  Description of Artificial Sequence: Synthetic oligonucleotide
  Target: SCNA; (+) strand; PAM type: NRG; PAM sequence: CAG
tgtcctacttgcaagcctgc

SEQ ID NO: 29322 - DNA, 20 bp, Artificial Sequence
  Description of Artificial Sequence: Synthetic oligonucleotide
  Target: SCNA; (+) strand; PAM type: NRG; PAM sequence: GAG
tgcaagcctgccagtctttt

SEQ ID NO: 29323 - DNA, 20 bp, Artificial Sequence
  Description of Artificial Sequence: Synthetic oligonucleotide
  Target: SCNA; (+) strand; PAM type: NRG; PAM sequence: TGG
cctgccagtcttttgagtgc

SEQ ID NO: 29324 - DNA, 20 bp, Artificial Sequence
  Description of Artificial Sequence: Synthetic oligonucleotide
  Target: SCNA; (+) strand; PAM type: NRG; PAM sequence: GGG
ctgccagtcttttgagtgct

SEQ ID NO: 29325 - DNA, 20 bp, Artificial Sequence
  Description of Artificial Sequence: Synthetic oligonucleotide
  Target: SCNA; (+) strand; PAM type: NRG; PAM sequence: AAG
agtcttttgagtgctgggca

SEQ ID NO: 29326 - DNA, 20 bp, Artificial Sequence
  Description of Artificial Sequence: Synthetic oligonucleotide
  Target: SCNA; (+) strand; PAM type: NRG; PAM sequence: TAG
agtgctgggcaaagacacaa

SEQ ID NO: 29327 - DNA, 20 bp, Artificial Sequence
  Description of Artificial Sequence: Synthetic oligonucleotide
  Target: SCNA; (+) strand; PAM type: NRG; PAM sequence: TGG
gggcaaagacacaatagtgc

SEQ ID NO: 29328 - DNA, 20 bp, Artificial Sequence
  Description of Artificial Sequence: Synthetic oligonucleotide
  Target: SCNA; (+) strand; PAM type: NRG; PAM sequence: GGG
ggcaaagacacaatagtgct

SEQ ID NO: 29329 - DNA, 20 bp, Artificial Sequence
  Description of Artificial Sequence: Synthetic oligonucleotide
  Target: SCNA; (+) strand; PAM type: NRG; PAM sequence: CAG
aagacacaatagtgctgggt

SEQ ID NO: 29330 - DNA, 20 bp, Artificial Sequence
  Description of Artificial Sequence: Synthetic oligonucleotide
  Target: SCNA; (+) strand; PAM type: NRG; PAM sequence: GAG
gacacaatagtgctgggtca

SEQ ID NO: 29331 - DNA, 20 bp, Artificial Sequence
  Description of Artificial Sequence: Synthetic oligonucleotide
  Target: SCNA; (+) strand; PAM type: NRG; PAM sequence: TAG
aactttactactcacattaa

SEQ ID NO: 29332 - DNA, 20 bp, Artificial Sequence
  Description of Artificial Sequence: Synthetic oligonucleotide
  Target: SCNA; (+) strand; PAM type: NRG; PAM sequence: TAG
actactcacattaatagcat

SEQ ID NO: 29333 - DNA, 20 bp, Artificial Sequence
  Description of Artificial Sequence: Synthetic oligonucleotide
  Target: SCNA; (+) strand; PAM type: NRG; PAM sequence: AAG
ctcacattaatagcattagc

SEQ ID NO: 29334 - DNA, 20 bp, Artificial Sequence
  Description of Artificial Sequence: Synthetic oligonucleotide
  Target: SCNA; (+) strand; PAM type: NRG; PAM sequence: GAG
cacattaatagcattagcaa

SEQ ID NO: 29335 - DNA, 20 bp, Artificial Sequence
  Description of Artificial Sequence: Synthetic oligonucleotide
  Target: SCNA; (+) strand; PAM type: NRG; PAM sequence: AAG
ttttcttgcactgattcctc

SEQ ID NO: 29336 - DNA, 20 bp, Artificial Sequence
  Description of Artificial Sequence: Synthetic oligonucleotide
  Target: SCNA; (+) strand; PAM type: NRG; PAM sequence: CAG
tcctcaagccgcaattccca

SEQ ID NO: 29337 - DNA, 20 bp, Artificial Sequence
  Description of Artificial Sequence: Synthetic oligonucleotide
  Target: SCNA; (+) strand; PAM type: NRG; PAM sequence: AAG
aagccgcaattcccacagaa

SEQ ID NO: 29338 - DNA, 20 bp, Artificial Sequence
  Description of Artificial Sequence: Synthetic oligonucleotide
  Target: SCNA; (+) strand; PAM type: NRG; PAM sequence: CAG
gcaattcccacagaaaagct

SEQ ID NO: 29339 - DNA, 20 bp, Artificial Sequence
  Description of Artificial Sequence: Synthetic oligonucleotide
  Target: SCNA; (+) strand; PAM type: NRG; PAM sequence: AGG
caattcccacagaaaagctc

SEQ ID NO: 29340 - DNA, 20 bp, Artificial Sequence
  Description of Artificial Sequence: Synthetic oligonucleotide
  Target: SCNA; (+) strand; PAM type: NRG; PAM sequence: CAG
tcaggtgacacctacatgct

SEQ ID NO: 29341 - DNA, 20 bp, Artificial Sequence
  Description of Artificial Sequence: Synthetic oligonucleotide
  Target: SCNA; (+) strand; PAM type: NRG; PAM sequence: TGG
ggtgacacctacatgctcag

SEQ ID NO: 29342 - DNA, 20 bp, Artificial Sequence
  Description of Artificial Sequence: Synthetic oligonucleotide
  Target: SCNA; (+) strand; PAM type: NRG; PAM sequence: GGG
gtgacacctacatgctcagt

SEQ ID NO: 29343 - DNA, 20 bp, Artificial Sequence
  Description of Artificial Sequence: Synthetic oligonucleotide
  Target: SCNA; (+) strand; PAM type: NRG; PAM sequence: TAG
acatgctcagtgggttgcat

SEQ ID NO: 29344 - DNA, 20 bp, Artificial Sequence
  Description of Artificial Sequence: Synthetic oligonucleotide
  Target: SCNA; (+) strand; PAM type: NRG; PAM sequence: AAG
ctcagtgggttgcattagaa

SEQ ID NO: 29345 - DNA, 20 bp, Artificial Sequence
  Description of Artificial Sequence: Synthetic oligonucleotide
  Target: SCNA; (+) strand; PAM type: NRG; PAM sequence: GAG
cagtgggttgcattagaaaa

SEQ ID NO: 29346 - DNA, 20 bp, Artificial Sequence
  Description of Artificial Sequence: Synthetic oligonucleotide
  Target: SCNA; (+) strand; PAM type: NRG; PAM sequence: AGG
agtgggttgcattagaaaag

SEQ ID NO: 29347 - DNA, 20 bp, Artificial Sequence
  Description of Artificial Sequence: Synthetic oligonucleotide
  Target: SCNA; (+) strand; PAM type: NRG; PAM sequence: CAG
tgcattagaaaagaggaacg

SEQ ID NO: 29348 - DNA, 20 bp, Artificial Sequence
  Description of Artificial Sequence: Synthetic oligonucleotide
  Target: SCNA; (+) strand; PAM type: NRG; PAM sequence: GAG
cattagaaaagaggaacgca

SEQ ID NO: 29349 - DNA, 20 bp, Artificial Sequence
  Description of Artificial Sequence: Synthetic oligonucleotide
  Target: SCNA; (+) strand; PAM type: NRG; PAM sequence: CAG
gaaaagaggaacgcagagct

SEQ ID NO: 29350 - DNA, 20 bp, Artificial Sequence
  Description of Artificial Sequence: Synthetic oligonucleotide
  Target: SCNA; (+) strand; PAM type: NRG; PAM sequence: AGG
aaaagaggaacgcagagctc

SEQ ID NO: 29351 - DNA, 20 bp, Artificial Sequence
  Description of Artificial Sequence: Synthetic oligonucleotide
  Target: SCNA; (+) strand; PAM type: NRG; PAM sequence: TGG
aacgcagagctcaggaaaca

SEQ ID NO: 29352 - DNA, 20 bp, Artificial Sequence
  Description of Artificial Sequence: Synthetic oligonucleotide
  Target: SCNA; (+) strand; PAM type: NRG; PAM sequence: TGG
gaaacatggatattttataa

SEQ ID NO: 29353 - DNA, 20 bp, Artificial Sequence
  Description of Artificial Sequence: Synthetic oligonucleotide
  Target: SCNA; (+) strand; PAM type: NRG; PAM sequence: CAG
catggatattttataatggc

SEQ ID NO: 29354 - DNA, 20 bp, Artificial Sequence
  Description of Artificial Sequence: Synthetic oligonucleotide
  Target: SCNA; (+) strand; PAM type: NRG; PAM sequence: AAG
atattttataatggccagta

SEQ ID NO: 29355 - DNA, 20 bp, Artificial Sequence
  Description of Artificial Sequence: Synthetic oligonucleotide
  Target: SCNA; (+) strand; PAM type: NRG; PAM sequence: TAG
gtaaagatgtccctttgctt

SEQ ID NO: 29356 - DNA, 20 bp, Artificial Sequence
  Description of Artificial Sequence: Synthetic oligonucleotide
  Target: SCNA; (+) strand; PAM type: NRG; PAM sequence: AAG
agatgtccctttgctttaga

SEQ ID NO: 29357 - DNA, 20 bp, Artificial Sequence
  Description of Artificial Sequence: Synthetic oligonucleotide
  Target: SCNA; (+) strand; PAM type: NRG; PAM sequence: GAG
atgtccctttgctttagaaa

SEQ ID NO: 29358 - DNA, 20 bp, Artificial Sequence
  Description of Artificial Sequence: Synthetic oligonucleotide
  Target: SCNA; (+) strand; PAM type: NRG; PAM sequence: AGG
tgtccctttgctttagaaag

SEQ ID NO: 29359 - DNA, 20 bp, Artificial Sequence
  Description of Artificial Sequence: Synthetic oligonucleotide
  Target: SCNA; (+) strand; PAM type: NRG; PAM sequence: AAG
aagaggcactacctctatcc

SEQ ID NO: 29360 - DNA, 20 bp, Artificial Sequence
  Description of Artificial Sequence: Synthetic oligonucleotide
  Target: SCNA; (+) strand; PAM type: NRG; PAM sequence: AGG
agaggcactacctctatcca

SEQ ID NO: 29361 - DNA, 20 bp, Artificial Sequence
  Description of Artificial Sequence: Synthetic oligonucleotide
  Target: SCNA; (+) strand; PAM type: NRG; PAM sequence: AAG
ctacctctatccaaggctgc

SEQ ID NO: 29362 - DNA, 20 bp, Artificial Sequence
  Description of Artificial Sequence: Synthetic oligonucleotide
  Target: SCNA; (+) strand; PAM type: NRG; PAM sequence: TAG
agcacacctgccttttgttt

SEQ ID NO: 29363 - DNA, 20 bp, Artificial Sequence
  Description of Artificial Sequence: Synthetic oligonucleotide
  Target: SCNA; (+) strand; PAM type: NRG; PAM sequence: AAG
acacctgccttttgttttag

SEQ ID NO: 29364 - DNA, 20 bp, Artificial Sequence
  Description of Artificial Sequence: Synthetic oligonucleotide
  Target: SCNA; (+) strand; PAM type: NRG; PAM sequence: AGG
cacctgccttttgttttaga

SEQ ID NO: 29365 - DNA, 20 bp, Artificial Sequence
  Description of Artificial Sequence: Synthetic oligonucleotide
  Target: SCNA; (+) strand; PAM type: NRG; PAM sequence: GAG
cctgccttttgttttagaag

SEQ ID NO: 29366 - DNA, 20 bp, Artificial Sequence
  Description of Artificial Sequence: Synthetic oligonucleotide
  Target: SCNA; (+) strand; PAM type: NRG; PAM sequence: AAG
agaaatgatttctatcttcc

SEQ ID NO: 29367 - DNA, 20 bp, Artificial Sequence
  Description of Artificial Sequence: Synthetic oligonucleotide
  Target: SCNA; (+) strand; PAM type: NRG; PAM sequence: AGG
gaaatgatttctatcttcca

SEQ ID NO: 29368 - DNA, 20 bp, Artificial Sequence
  Description of Artificial Sequence: Synthetic oligonucleotide
  Target: SCNA; (+) strand; PAM type: NRG; PAM sequence: AAG
aaggctgttcactatatgaa

SEQ ID NO: 29369 - DNA, 20 bp, Artificial Sequence
  Description of Artificial Sequence: Synthetic oligonucleotide
  Target: SCNA; (+) strand; PAM type: NRG; PAM sequence: CAG
ctgttcactatatgaaaaga

SEQ ID NO: 29370 - DNA, 20 bp, Artificial Sequence
  Description of Artificial Sequence: Synthetic oligonucleotide
  Target: SCNA; (+) strand; PAM type: NRG; PAM sequence: AAG
gaaaagacagtcccaaacaa

SEQ ID NO: 29371 - DNA, 20 bp, Artificial Sequence
  Description of Artificial Sequence: Synthetic oligonucleotide
  Target: SCNA; (+) strand; PAM type: NRG; PAM sequence: AGG
aaaagacagtcccaaacaaa

SEQ ID NO: 29372 - DNA, 20 bp, Artificial Sequence
  Description of Artificial Sequence: Synthetic oligonucleotide
  Target: SCNA; (+) strand; PAM type: NRG; PAM sequence: CAG
agacagtcccaaacaaaagg

SEQ ID NO: 29373 - DNA, 20 bp, Artificial Sequence
  Description of Artificial Sequence: Synthetic oligonucleotide
  Target: SCNA; (+) strand; PAM type: NRG; PAM sequence: CAG
tgacttgcttgaaaaatgtg

SEQ ID NO: 29374 - DNA, 20 bp, Artificial Sequence
  Description of Artificial Sequence: Synthetic oligonucleotide
  Target: SCNA; (+) strand; PAM type: NRG; PAM sequence: TGG
aatgatacgctgcttgaatg

SEQ ID NO: 29375 - DNA, 20 bp, Artificial Sequence
  Description of Artificial Sequence: Synthetic oligonucleotide
  Target: SCNA; (+) strand; PAM type: NRG; PAM sequence: CAG
atacgctgcttgaatgtgga

SEQ ID NO: 29376 - DNA, 20 bp, Artificial Sequence
  Description of Artificial Sequence: Synthetic oligonucleotide
  Target: SCNA; (+) strand; PAM type: NRG; PAM sequence: CAG
ttgaatgtggacagctgaca

SEQ ID NO: 29377 - DNA, 20 bp, Artificial Sequence
  Description of Artificial Sequence: Synthetic oligonucleotide
  Target: SCNA; (+) strand; PAM type: NRG; PAM sequence: AGG
tgaatgtggacagctgacac

SEQ ID NO: 29378 - DNA, 20 bp, Artificial Sequence
  Description of Artificial Sequence: Synthetic oligonucleotide
  Target: SCNA; (+) strand; PAM type: NRG; PAM sequence: GGG
gaatgtggacagctgacaca

SEQ ID NO: 29379 - DNA, 20 bp, Artificial Sequence
  Description of Artificial Sequence: Synthetic oligonucleotide
  Target: SCNA; (+) strand; PAM type: NRG; PAM sequence: AAG
tggacagctgacacagggac

SEQ ID NO: 29380 - DNA, 20 bp, Artificial Sequence
  Description of Artificial Sequence: Synthetic oligonucleotide
  Target: SCNA; (+) strand; PAM type: NRG; PAM sequence: AGG
ggacagctgacacagggaca

SEQ ID NO: 29381 - DNA, 20 bp, Artificial Sequence
  Description of Artificial Sequence: Synthetic oligonucleotide
  Target: SCNA; (+) strand; PAM type: NRG; PAM sequence: GAG
acagctgacacagggacaag

SEQ ID NO: 29382 - DNA, 20 bp, Artificial Sequence
  Description of Artificial Sequence: Synthetic oligonucleotide
  Target: SCNA; (+) strand; PAM type: NRG; PAM sequence: TAG
ggacaaggagtaaaaatgat

SEQ ID NO: 29383 - DNA, 20 bp, Artificial Sequence
  Description of Artificial Sequence: Synthetic oligonucleotide
  Target: SCNA; (+) strand; PAM type: NRG; PAM sequence: AGG
gacaaggagtaaaaatgatt

SEQ ID NO: 29384 - DNA, 20 bp, Artificial Sequence
  Description of Artificial Sequence: Synthetic oligonucleotide
  Target: SCNA; (+) strand; PAM type: NRG; PAM sequence: GAG
agtaaaaatgattaggtttt

SEQ ID NO: 29385 - DNA, 20 bp, Artificial Sequence
  Description of Artificial Sequence: Synthetic oligonucleotide
  Target: SCNA; (+) strand; PAM type: NRG; PAM sequence: TAG
aggttttgagcttgaccaac

SEQ ID NO: 29386 - DNA, 20 bp, Artificial Sequence
  Description of Artificial Sequence: Synthetic oligonucleotide
  Target: SCNA; (+) strand; PAM type: NRG; PAM sequence: AGG
ggttttgagcttgaccaact

SEQ ID NO: 29387 - DNA, 20 bp, Artificial Sequence
  Description of Artificial Sequence: Synthetic oligonucleotide
  Target: SCNA; (+) strand; PAM type: NRG; PAM sequence: AAG
tttgagcttgaccaactagg

SEQ ID NO: 29388 - DNA, 20 bp, Artificial Sequence
  Description of Artificial Sequence: Synthetic oligonucleotide
  Target: SCNA; (+) strand; PAM type: NRG; PAM sequence: TAG
ccaactaggaagataattat

SEQ ID NO: 29389 - DNA, 20 bp, Artificial Sequence
  Description of Artificial Sequence: Synthetic oligonucleotide
  Target: SCNA; (+) strand; PAM type: NRG; PAM sequence: CAG
actaggaagataattattag

SEQ ID NO: 29390 - DNA, 20 bp, Artificial Sequence
  Description of Artificial Sequence: Synthetic oligonucleotide
  Target: SCNA; (+) strand; PAM type: NRG; PAM sequence: TAG
aggaagataattattagcag

SEQ ID NO: 29391 - DNA, 20 bp, Artificial Sequence
  Description of Artificial Sequence: Synthetic oligonucleotide
  Target: SCNA; (+) strand; PAM type: NRG; PAM sequence: GAG
gaagataattattagcagta

SEQ ID NO: 29392 - DNA, 20 bp, Artificial Sequence
  Description of Artificial Sequence: Synthetic oligonucleotide
  Target: SCNA; (+) strand; PAM type: NRG; PAM sequence: AAG
ttattagcagtagagaaaaa

SEQ ID NO: 29393 - DNA, 20 bp, Artificial Sequence
  Description of Artificial Sequence: Synthetic oligonucleotide
  Target: SCNA; (+) strand; PAM type: NRG; PAM sequence: AAG
cagtagagaaaaaaagaaca

SEQ ID NO: 29394 - DNA, 20 bp, Artificial Sequence
  Description of Artificial Sequence: Synthetic oligonucleotide
  Target: SCNA; (+) strand; PAM type: NRG; PAM sequence: TAG
tagagaaaaaaagaacaaag

SEQ ID NO: 29395 - DNA, 20 bp, Artificial Sequence
  Description of Artificial Sequence: Synthetic oligonucleotide
  Target: SCNA; (+) strand; PAM type: NRG; PAM sequence: TAG
aaaaagaacaaagtagattt

SEQ ID NO: 29396 - DNA, 20 bp, Artificial Sequence
  Description of Artificial Sequence: Synthetic oligonucleotide
  Target: SCNA; (+) strand; PAM type: NRG; PAM sequence: AGG
aaaagaacaaagtagatttt

SEQ ID NO: 29397 - DNA, 20 bp, Artificial Sequence
  Description of Artificial Sequence: Synthetic oligonucleotide
  Target: SCNA; (+) strand; PAM type: NRG; PAM sequence: GGG
aaagaacaaagtagatttta

SEQ ID NO: 29398 - DNA, 20 bp, Artificial Sequence
  Description of Artificial Sequence: Synthetic oligonucleotide
  Target: SCNA; (+) strand; PAM type: NRG; PAM sequence: CAG
gaacaaagtagattttaggg

SEQ ID NO: 29399 - DNA, 20 bp, Artificial Sequence
  Description of Artificial Sequence: Synthetic oligonucleotide
  Target: SCNA; (+) strand; PAM type: NRG; PAM sequence: AAG
aagtagattttagggcagat

SEQ ID NO: 29400 - DNA, 20 bp, Artificial Sequence
  Description of Artificial Sequence: Synthetic oligonucleotide
  Target: SCNA; (+) strand; PAM type: NRG; PAM sequence: TAG
agggcagataagccattttt

SEQ ID NO: 29401 - DNA, 20 bp, Artificial Sequence
  Description of Artificial Sequence: Synthetic oligonucleotide
  Target: SCNA; (+) strand; PAM type: NRG; PAM sequence: AGG
gggcagataagccatttttt

SEQ ID NO: 29402 - DNA, 20 bp, Artificial Sequence
  Description of Artificial Sequence: Synthetic oligonucleotide
  Target: SCNA; (+) strand; PAM type: NRG; PAM sequence: TAG
cagataagccattttttagg

SEQ ID NO: 29403 - DNA, 20 bp, Artificial Sequence
  Description of Artificial Sequence: Synthetic oligonucleotide
  Target: SCNA; (+) strand; PAM type: NRG; PAM sequence: AGG
agataagccattttttaggt

SEQ ID NO: 29404 - DNA, 20 bp, Artificial Sequence
  Description of Artificial Sequence: Synthetic oligonucleotide
  Target: SCNA; (+) strand; PAM type: NRG; PAM sequence: GAG
agccattttttaggtaggtt

SEQ ID NO: 29405 - DNA, 20 bp, Artificial Sequence
  Description of Artificial Sequence: Synthetic oligonucleotide
  Target: SCNA; (+) strand; PAM type: NRG; PAM sequence: GAG
tttttaggtaggttgagtct

SEQ ID NO: 29406 - DNA, 20 bp, Artificial Sequence
  Description of Artificial Sequence: Synthetic oligonucleotide
  Target: SCNA; (+) strand; PAM type: NRG; PAM sequence: AAG
tgagatgcctccataaatat

SEQ ID NO: 29407 - DNA, 20 bp, Artificial Sequence
  Description of Artificial Sequence: Synthetic oligonucleotide
  Target: SCNA; (+) strand; PAM type: NRG; PAM sequence: GAG
taaatataagttgaaaatat

SEQ ID NO: 29408 - DNA, 20 bp, Artificial Sequence
  Description of Artificial Sequence: Synthetic oligonucleotide
  Target: SCNA; (+) strand; PAM type: NRG; PAM sequence: TGG
ataagttgaaaatatgagat

SEQ ID NO: 29409 - DNA, 20 bp, Artificial Sequence
  Description of Artificial Sequence: Synthetic oligonucleotide
  Target: SCNA; (+) strand; PAM type: NRG; PAM sequence: GAG
aagttgaaaatatgagattg

SEQ ID NO: 29410 - DNA, 20 bp, Artificial Sequence
  Description of Artificial Sequence: Synthetic oligonucleotide
  Target: SCNA; (+) strand; PAM type: NRG; PAM sequence: GAG
gaaaatatgagattggagtt

SEQ ID NO: 29411 - DNA, 20 bp, Artificial Sequence
  Description of Artificial Sequence: Synthetic oligonucleotide
  Target: SCNA; (+) strand; PAM type: NRG; PAM sequence: CAG
tgagattggagttgagactt

SEQ ID NO: 29412 - DNA, 20 bp, Artificial Sequence
  Description of Artificial Sequence: Synthetic oligonucleotide
  Target: SCNA; (+) strand; PAM type: NRG; PAM sequence: GAG
acttcagaaatacatatttt

SEQ ID NO: 29413 - DNA, 20 bp, Artificial Sequence
  Description of Artificial Sequence: Synthetic oligonucleotide
  Target: SCNA; (+) strand; PAM type: NRG; PAM sequence: TAG
tcagaaatacatattttgag

SEQ ID NO: 29414 - DNA, 20 bp, Artificial Sequence
  Description of Artificial Sequence: Synthetic oligonucleotide
  Target: SCNA; (+) strand; PAM type: NRG; PAM sequence: CAG
tattttgagtagttacacta

SEQ ID NO: 29415 - DNA, 20 bp, Artificial Sequence
  Description of Artificial Sequence: Synthetic oligonucleotide
  Target: SCNA; (+) strand; PAM type: NRG; PAM sequence: GAG
ttttgagtagttacactaca

SEQ ID NO: 29416 - DNA, 20 bp, Artificial Sequence
  Description of Artificial Sequence: Synthetic oligonucleotide
  Target: SCNA; (+) strand; PAM type: NRG; PAM sequence: AGG
tttgagtagttacactacag

SEQ ID NO: 29417 - DNA, 20 bp, Artificial Sequence
  Description of Artificial Sequence: Synthetic oligonucleotide
  Target: SCNA; (+) strand; PAM type: NRG; PAM sequence: AAG
agtagttacactacagaggt

SEQ ID NO: 29418 - DNA, 20 bp, Artificial Sequence
  Description of Artificial Sequence: Synthetic oligonucleotide
  Target: SCNA; (+) strand; PAM type: NRG; PAM sequence: CAG
acactacagaggtaagtcat

SEQ ID NO: 29419 - DNA, 20 bp, Artificial Sequence
  Description of Artificial Sequence: Synthetic oligonucleotide
  Target: SCNA; (+) strand; PAM type: NRG; PAM sequence: GAG
actacagaggtaagtcatca

SEQ ID NO: 29420 - DNA, 20 bp, Artificial Sequence
  Description of Artificial Sequence: Synthetic oligonucleotide
  Target: SCNA; (+) strand; PAM type: NRG; PAM sequence: AAG
catcagagttcataaaatta

SEQ ID NO: 29421 - DNA, 20 bp, Artificial Sequence
  Description of Artificial Sequence: Synthetic oligonucleotide
  Target: SCNA; (+) strand; PAM type: NRG; PAM sequence: GAG
agagttcataaaattaaagt

SEQ ID NO: 29422 - DNA, 20 bp, Artificial Sequence
  Description of Artificial Sequence: Synthetic oligonucleotide
  Target: SCNA; (+) strand; PAM type: NRG; PAM sequence: AAG
cataaaattaaagtgagaaa

SEQ ID NO: 29423 - DNA, 20 bp, Artificial Sequence
  Description of Artificial Sequence: Synthetic oligonucleotide
  Target: SCNA; (+) strand; PAM type: NRG; PAM sequence: GAG
taaaattaaagtgagaaaaa

SEQ ID NO: 29424 - DNA, 20 bp, Artificial Sequence
  Description of Artificial Sequence: Synthetic oligonucleotide
  Target: SCNA; (+) strand; PAM type: NRG; PAM sequence: AGG
aaaattaaagtgagaaaaag

SEQ ID NO: 29425 - DNA, 20 bp, Artificial Sequence
  Description of Artificial Sequence: Synthetic oligonucleotide
  Target: SCNA; (+) strand; PAM type: NRG; PAM sequence: AAG
ttaaagtgagaaaaagaggc

SEQ ID NO: 29426 - DNA, 20 bp, Artificial Sequence
  Description of Artificial Sequence: Synthetic oligonucleotide
  Target: SCNA; (+) strand; PAM type: NRG; PAM sequence: AAG
gtgagaaaaagaggcaagtg

SEQ ID NO: 29427 - DNA, 20 bp, Artificial Sequence
  Description of Artificial Sequence: Synthetic oligonucleotide
  Target: SCNA; (+) strand; PAM type: NRG; PAM sequence: AAG
agaggcaagtgaagaaaaac

SEQ ID NO: 29428 - DNA, 20 bp, Artificial Sequence
  Description of Artificial Sequence: Synthetic oligonucleotide
  Target: SCNA; (+) strand; PAM type: NRG; PAM sequence: TGG
gcaagtgaagaaaaacaaga

SEQ ID NO: 29429 - DNA, 20 bp, Artificial Sequence
  Description of Artificial Sequence: Synthetic oligonucleotide
  Target: SCNA; (+) strand; PAM type: NRG; PAM sequence: AAG
aaacaagatggcattgcatg

SEQ ID NO: 29430 - DNA, 20 bp, Artificial Sequence
  Description of Artificial Sequence: Synthetic oligonucleotide
  Target: SCNA; (+) strand; PAM type: NRG; PAM sequence: TAG
cattgcatgaagaactttct

SEQ ID NO: 29431 - DNA, 20 bp, Artificial Sequence
  Description of Artificial Sequence: Synthetic oligonucleotide
  Target: SCNA; (+) strand; PAM type: NRG; PAM sequence: AGG
attgcatgaagaactttctt

SEQ ID NO: 29432 - DNA, 20 bp, Artificial Sequence
  Description of Artificial Sequence: Synthetic oligonucleotide
  Target: SCNA; (+) strand; PAM type: NRG; PAM sequence: AAG
gcatgaagaactttcttagg

SEQ ID NO: 29433 - DNA, 20 bp, Artificial Sequence
  Description of Artificial Sequence: Synthetic oligonucleotide
  Target: SCNA; (+) strand; PAM type: NRG; PAM sequence: AGG
catgaagaactttcttagga

SEQ ID NO: 29434 - DNA, 20 bp, Artificial Sequence
  Description of Artificial Sequence: Synthetic oligonucleotide
  Target: SCNA; (+) strand; PAM type: NRG; PAM sequence: AAG
gaagaactttcttaggaagg

SEQ ID NO: 29435 - DNA, 20 bp, Artificial Sequence
  Description of Artificial Sequence: Synthetic oligonucleotide
  Target: SCNA; (+) strand; PAM type: NRG; PAM sequence: AGG
aagaactttcttaggaagga

SEQ ID NO: 29436 - DNA, 20 bp, Artificial Sequence
  Description of Artificial Sequence: Synthetic oligonucleotide
  Target: SCNA; (+) strand; PAM type: NRG; PAM sequence: CAG
aactttcttaggaaggaagg

SEQ ID NO: 29437 - DNA, 20 bp, Artificial Sequence
  Description of Artificial Sequence: Synthetic oligonucleotide
  Target: SCNA; (+) strand; PAM type: NRG; PAM sequence: AAG
tcttaggaaggaaggcagca

SEQ ID NO: 29438 - DNA, 20 bp, Artificial Sequence
  Description of Artificial Sequence: Synthetic oligonucleotide
  Target: SCNA; (+) strand; PAM type: NRG; PAM sequence: GAG
ttaggaaggaaggcagcaaa

SEQ ID NO: 29439 - DNA, 20 bp, Artificial Sequence
  Description of Artificial Sequence: Synthetic oligonucleotide
  Target: SCNA; (+) strand; PAM type: NRG; PAM sequence: AGG
taggaaggaaggcagcaaag

SEQ ID NO: 29440 - DNA, 20 bp, Artificial Sequence
  Description of Artificial Sequence: Synthetic oligonucleotide
  Target: SCNA; (+) strand; PAM type: NRG; PAM sequence: TGG
aggcagcaaagaggtaaaat

SEQ ID NO: 29441 - DNA, 20 bp, Artificial Sequence
  Description of Artificial Sequence: Synthetic oligonucleotide
  Target: SCNA; (+) strand; PAM type: NRG; PAM sequence: GAG
gcagcaaagaggtaaaattg

SEQ ID NO: 29442 - DNA, 20 bp, Artificial Sequence
  Description of Artificial Sequence: Synthetic oligonucleotide
  Target: SCNA; (+) strand; PAM type: NRG; PAM sequence: AGG
cagcaaagaggtaaaattgg

SEQ ID NO: 29443 - DNA, 20 bp, Artificial Sequence
  Description of Artificial Sequence: Synthetic oligonucleotide
  Target: SCNA; (+) strand; PAM type: NRG; PAM sequence: TAG
aagaggtaaaattggaggtg

SEQ ID NO: 29444 - DNA, 20 bp, Artificial Sequence
  Description of Artificial Sequence: Synthetic oligonucleotide
  Target: SCNA; (+) strand; PAM type: NRG; PAM sequence: CAG
ggtaaaattggaggtgtagt

SEQ ID NO: 29445 - DNA, 20 bp, Artificial Sequence
  Description of Artificial Sequence: Synthetic oligonucleotide
  Target: SCNA; (+) strand; PAM type: NRG; PAM sequence: GAG
taaaattggaggtgtagtca

SEQ ID NO: 29446 - DNA, 20 bp, Artificial Sequence
  Description of Artificial Sequence: Synthetic oligonucleotide
  Target: SCNA; (+) strand; PAM type: NRG; PAM sequence: TGG
attggaggtgtagtcagaga

SEQ ID NO: 29447 - DNA, 20 bp, Artificial Sequence
  Description of Artificial Sequence: Synthetic oligonucleotide
  Target: SCNA; (+) strand; PAM type: NRG; PAM sequence: AAG
ggaggtgtagtcagagatgg

SEQ ID NO: 29448 - DNA, 20 bp, Artificial Sequence
  Description of Artificial Sequence: Synthetic oligonucleotide
  Target: SCNA; (+) strand; PAM type: NRG; PAM sequence: AAG
gtcagagatggaagatgaaa

SEQ ID NO: 29449 - DNA, 20 bp, Artificial Sequence
  Description of Artificial Sequence: Synthetic oligonucleotide
  Target: SCNA; (+) strand; PAM type: NRG; PAM sequence: AGG
tcagagatggaagatgaaaa

SEQ ID NO: 29450 - DNA, 20 bp, Artificial Sequence
  Description of Artificial Sequence: Synthetic oligonucleotide
  Target: SCNA; (+) strand; PAM type: NRG; PAM sequence: CAG
aaaggaaaataacaatattt

SEQ ID NO: 29451 - DNA, 20 bp, Artificial Sequence
  Description of Artificial Sequence: Synthetic oligonucleotide
  Target: SCNA; (+) strand; PAM type: NRG; PAM sequence: AAG
atttcagaaatgaaatgaaa

SEQ ID NO: 29452 - DNA, 20 bp, Artificial Sequence
  Description of Artificial Sequence: Synthetic oligonucleotide
  Target: SCNA; (+) strand; PAM type: NRG; PAM sequence: AGG
tttcagaaatgaaatgaaaa

SEQ ID NO: 29453 - DNA, 20 bp, Artificial Sequence
  Description of Artificial Sequence: Synthetic oligonucleotide
  Target: SCNA; (+) strand; PAM type: NRG; PAM sequence: AAG
aatgaaaaaggtcttttact

SEQ ID NO: 29454 - DNA, 20 bp, Artificial Sequence
  Description of Artificial Sequence: Synthetic oligonucleotide
  Target: SCNA; (+) strand; PAM type: NRG; PAM sequence: TGG
aaggtcttttactaagtaat

SEQ ID NO: 29455 - DNA, 20 bp, Artificial Sequence
  Description of Artificial Sequence: Synthetic oligonucleotide
  Target: SCNA; (+) strand; PAM type: NRG; PAM sequence: CAG
taattggtactactacttgt

SEQ ID NO: 29456 - DNA, 20 bp, Artificial Sequence
  Description of Artificial Sequence: Synthetic oligonucleotide
  Target: SCNA; (+) strand; PAM type: NRG; PAM sequence: AAG
tactactacttgtcagtttc

SEQ ID NO: 29457 - DNA, 20 bp, Artificial Sequence
  Description of Artificial Sequence: Synthetic oligonucleotide
  Target: SCNA; (+) strand; PAM type: NRG; PAM sequence: TGG
ttcaagtgctgtaaaaaaaa

SEQ ID NO: 29458 - DNA, 20 bp, Artificial Sequence
  Description of Artificial Sequence: Synthetic oligonucleotide
  Target: SCNA; (+) strand; PAM type: NRG; PAM sequence: GGG
tcaagtgctgtaaaaaaaat

SEQ ID NO: 29459 - DNA, 20 bp, Artificial Sequence
  Description of Artificial Sequence: Synthetic oligonucleotide
  Target: SCNA; (+) strand; PAM type: NRG; PAM sequence: AAG
agtgctgtaaaaaaaatggg

SEQ ID NO: 29460 - DNA, 20 bp, Artificial Sequence
  Description of Artificial Sequence: Synthetic oligonucleotide
  Target: SCNA; (+) strand; PAM type: NRG; PAM sequence: CAG
gaaccacacatgtgcacttt

SEQ ID NO: 29461 - DNA, 20 bp, Artificial Sequence
  Description of Artificial Sequence: Synthetic oligonucleotide
  Target: SCNA; (+) strand; PAM type: NRG; PAM sequence: CAG
gtactatgtattttatgctt

SEQ ID NO: 29462 - DNA, 20 bp, Artificial Sequence
  Description of Artificial Sequence: Synthetic oligonucleotide
  Target: SCNA; (+) strand; PAM type: NRG; PAM sequence: AGG
tactatgtattttatgcttc

SEQ ID NO: 29463 - DNA, 20 bp, Artificial Sequence
  Description of Artificial Sequence: Synthetic oligonucleotide
  Target: SCNA; (+) strand; PAM type: NRG; PAM sequence: GGG
actatgtattttatgcttca

SEQ ID NO: 29464 - DNA, 20 bp, Artificial Sequence
  Description of Artificial Sequence: Synthetic oligonucleotide
  Target: SCNA; (+) strand; PAM type: NRG; PAM sequence: AAG
gatgcatacctgtttaacaa

SEQ ID NO: 29465 - DNA, 20 bp, Artificial Sequence
  Description of Artificial Sequence: Synthetic oligonucleotide
  Target: SCNA; (+) strand; PAM type: NRG; PAM sequence: AAG
caaaagtatgttttttctca

SEQ ID NO: 29466 - DNA, 20 bp, Artificial Sequence
  Description of Artificial Sequence: Synthetic oligonucleotide
  Target: SCNA; (+) strand; PAM type: NRG; PAM sequence: TAG
ttttctcaaagtgtgttgaa

SEQ ID NO: 29467 - DNA, 20 bp, Artificial Sequence
  Description of Artificial Sequence: Synthetic oligonucleotide
  Target: SCNA; (+) strand; PAM type: NRG; PAM sequence: CAG
tcaaagtgtgttgaatagtc

SEQ ID NO: 29468 - DNA, 20 bp, Artificial Sequence
  Description of Artificial Sequence: Synthetic oligonucleotide
  Target: SCNA; (+) strand; PAM type: NRG; PAM sequence: AAG
tgtgttgaatagtccagaaa

SEQ ID NO: 29469 - DNA, 20 bp, Artificial Sequence
  Description of Artificial Sequence: Synthetic oligonucleotide
  Target: SCNA; (+) strand; PAM type: NRG; PAM sequence: TGG
ttgaatagtccagaaaaaga

SEQ ID NO: 29470 - DNA, 20 bp, Artificial Sequence
  Description of Artificial Sequence: Synthetic oligonucleotide
  Target: SCNA; (+) strand; PAM type: NRG; PAM sequence: GAG
gaatagtccagaaaaagatg

SEQ ID NO: 29471 - DNA, 20 bp, Artificial Sequence
  Description of Artificial Sequence: Synthetic oligonucleotide
  Target: SCNA; (+) strand; PAM type: NRG; PAM sequence: AGG
aatagtccagaaaaagatgg

SEQ ID NO: 29472 - DNA, 20 bp, Artificial Sequence
  Description of Artificial Sequence: Synthetic oligonucleotide
  Target: SCNA; (+) strand; PAM type: NRG; PAM sequence: TAG
agtccagaaaaagatggagg

SEQ ID NO: 29473 - DNA, 20 bp, Artificial Sequence
  Description of Artificial Sequence: Synthetic oligonucleotide
  Target: SCNA; (+) strand; PAM type: NRG; PAM sequence: AAG
ccagaaaaagatggaggtag

SEQ ID NO: 29474 - DNA, 20 bp, Artificial Sequence
  Description of Artificial Sequence: Synthetic oligonucleotide
  Target: SCNA; (+) strand; PAM type: NRG; PAM sequence: CAG
aaaaagatggaggtagaagt

SEQ ID NO: 29475 - DNA, 20 bp, Artificial Sequence
  Description of Artificial Sequence: Synthetic oligonucleotide
  Target: SCNA; (+) strand; PAM type: NRG; PAM sequence: CAG
tggaggtagaagtcagactt

SEQ ID NO: 29476 - DNA, 20 bp, Artificial Sequence
  Description of Artificial Sequence: Synthetic oligonucleotide
  Target: SCNA; (+) strand; PAM type: NRG; PAM sequence: AGG
ggaggtagaagtcagacttc

SEQ ID NO: 29477 - DNA, 20 bp, Artificial Sequence
  Description of Artificial Sequence: Synthetic oligonucleotide
  Target: SCNA; (+) strand; PAM type: NRG; PAM sequence: GAG
aggtagaagtcagacttcag

SEQ ID NO: 29478 - DNA, 20 bp, Artificial Sequence
  Description of Artificial Sequence: Synthetic oligonucleotide
  Target: SCNA; (+) strand; PAM type: NRG; PAM sequence: AAG
aagtcagacttcaggagata

SEQ ID NO: 29479 - DNA, 20 bp, Artificial Sequence
  Description of Artificial Sequence: Synthetic oligonucleotide
  Target: SCNA; (+) strand; PAM type: NRG; PAM sequence: AGG
agtcagacttcaggagataa

SEQ ID NO: 29480 - DNA, 20 bp, Artificial Sequence
  Description of Artificial Sequence: Synthetic oligonucleotide
  Target: SCNA; (+) strand; PAM type: NRG; PAM sequence: CAG
acttcaggagataaaggaac

SEQ ID NO: 29481 - DNA, 20 bp, Artificial Sequence
  Description of Artificial Sequence: Synthetic oligonucleotide
  Target: SCNA; (+) strand; PAM type: NRG; PAM sequence: AAG
caggagataaaggaaccaga

SEQ ID NO: 29482 - DNA, 20 bp, Artificial Sequence
  Description of Artificial Sequence: Synthetic oligonucleotide
  Target: SCNA; (+) strand; PAM type: NRG; PAM sequence: AAG
aggaaccagaaagatcattg

SEQ ID NO: 29483 - DNA, 20 bp, Artificial Sequence
  Description of Artificial Sequence: Synthetic oligonucleotide
  Target: SCNA; (+) strand; PAM type: NRG; PAM sequence: AGG
ggaaccagaaagatcattga

SEQ ID NO: 29484 - DNA, 20 bp, Artificial Sequence
  Description of Artificial Sequence: Synthetic oligonucleotide
  Target: SCNA; (+) strand; PAM type: NRG; PAM sequence: TGG
aagatcattgaaggctgtga

SEQ ID NO: 29485 - DNA, 20 bp, Artificial Sequence
  Description of Artificial Sequence: Synthetic oligonucleotide
  Target: SCNA; (+) strand; PAM type: NRG; PAM sequence: TAG
atcattgaaggctgtgatgg

SEQ ID NO: 29486 - DNA, 20 bp, Artificial Sequence
  Description of Artificial Sequence: Synthetic oligonucleotide
  Target: SCNA; (+) strand; PAM type: NRG; PAM sequence: AAG
tggtagaaaacattttgaca

SEQ ID NO: 29487 - DNA, 20 bp, Artificial Sequence
  Description of Artificial Sequence: Synthetic oligonucleotide
  Target: SCNA; (+) strand; PAM type: NRG; PAM sequence: GAG
gtagaaaacattttgacaaa

SEQ ID NO: 29488 - DNA, 20 bp, Artificial Sequence
  Description of Artificial Sequence: Synthetic oligonucleotide
  Target: SCNA; (+) strand; PAM type: NRG; PAM sequence: GAG
ttgacaaagagttgtgcaat

SEQ ID NO: 29489 - DNA, 20 bp, Artificial Sequence
  Description of Artificial Sequence: Synthetic oligonucleotide
  Target: SCNA; (+) strand; PAM type: NRG; PAM sequence: AAG
caaagagttgtgcaatgaga

SEQ ID NO: 29490 - DNA, 20 bp, Artificial Sequence
  Description of Artificial Sequence: Synthetic oligonucleotide
  Target: SCNA; (+) strand; PAM type: NRG; PAM sequence: TAG
gagttgtgcaatgagaaagc

SEQ ID NO: 29491 - DNA, 20 bp, Artificial Sequence
  Description of Artificial Sequence: Synthetic oligonucleotide
  Target: SCNA; (+) strand; PAM type: NRG; PAM sequence: AGG
agttgtgcaatgagaaagct

SEQ ID NO: 29492 - DNA, 20 bp, Artificial Sequence
  Description of Artificial Sequence: Synthetic oligonucleotide
  Target: SCNA; (+) strand; PAM type: NRG; PAM sequence: GGG
gttgtgcaatgagaaagcta

SEQ ID NO: 29493 - DNA, 20 bp, Artificial Sequence
  Description of Artificial Sequence: Synthetic oligonucleotide
  Target: SCNA; (+) strand; PAM type: NRG; PAM sequence: GGG
ttgtgcaatgagaaagctag

SEQ ID NO: 29494 - DNA, 20 bp, Artificial Sequence
  Description of Artificial Sequence: Synthetic oligonucleotide
  Target: SCNA; (+) strand; PAM type: NRG; PAM sequence: TGG
tgcaatgagaaagctagggg

SEQ ID NO: 29495 - DNA, 20 bp, Artificial Sequence
  Description of Artificial Sequence: Synthetic oligonucleotide
  Target: SCNA; (+) strand; PAM type: NRG; PAM sequence: GGG
gcaatgagaaagctaggggt

SEQ ID NO: 29496 - DNA, 20 bp, Artificial Sequence
  Description of Artificial Sequence: Synthetic oligonucleotide
  Target: SCNA; (+) strand; PAM type: NRG; PAM sequence: GAG
ggggtgggacaattaatttt

SEQ ID NO: 29497 - DNA, 20 bp, Artificial Sequence
  Description of Artificial Sequence: Synthetic oligonucleotide
  Target: SCNA; (+) strand; PAM type: NRG; PAM sequence: AGG
gggtgggacaattaattttg

SEQ ID NO: 29498 - DNA, 20 bp, Artificial Sequence
  Description of Artificial Sequence: Synthetic oligonucleotide
  Target: SCNA; (+) strand; PAM type: NRG; PAM sequence: GGG
ggtgggacaattaattttga

SEQ ID NO: 29499 - DNA, 20 bp, Artificial Sequence
  Description of Artificial Sequence: Synthetic oligonucleotide
  Target: SCNA; (+) strand; PAM type: NRG; PAM sequence: TGG
ttaattttgagggtaacaat

SEQ ID NO: 29500 - DNA, 20 bp, Artificial Sequence
  Description of Artificial Sequence: Synthetic oligonucleotide
  Target: SCNA; (+) strand; PAM type: NRG; PAM sequence: GGG
taattttgagggtaacaatt

SEQ ID NO: 29501 - DNA, 20 bp, Artificial Sequence
  Description of Artificial Sequence: Synthetic oligonucleotide
  Target: SCNA; (+) strand; PAM type: NRG; PAM sequence: GGG
aattttgagggtaacaattg

SEQ ID NO: 29502 - DNA, 20 bp, Artificial Sequence
  Description of Artificial Sequence: Synthetic oligonucleotide
  Target: SCNA; (+) strand; PAM type: NRG; PAM sequence: GAG
agggtaacaattggggattt

SEQ ID NO: 29503 - DNA, 20 bp, Artificial Sequence
  Description of Artificial Sequence: Synthetic oligonucleotide
  Target: SCNA; (+) strand; PAM type: NRG; PAM sequence: TAG
gtaacaattggggatttgag

SEQ ID NO: 29504 - DNA, 20 bp, Artificial Sequence
  Description of Artificial Sequence: Synthetic oligonucleotide
  Target: SCNA; (+) strand; PAM type: NRG; PAM sequence: AAG
attgttttgtcttcttttta

SEQ ID NO: 29505 - DNA, 20 bp, Artificial Sequence
  Description of Artificial Sequence: Synthetic oligonucleotide
  Target: SCNA; (+) strand; PAM type: NRG; PAM sequence: AAG
gtcttctttttaaagaaacc

SEQ ID NO: 29506 - DNA, 20 bp, Artificial Sequence
  Description of Artificial Sequence: Synthetic oligonucleotide
  Target: SCNA; (+) strand; PAM type: NRG; PAM sequence: GAG
cttctttttaaagaaaccaa

SEQ ID NO: 29507 - DNA, 20 bp, Artificial Sequence
  Description of Artificial Sequence: Synthetic oligonucleotide
  Target: SCNA; (+) strand; PAM type: NRG; PAM sequence: TAG
aaaccaagagactgttaatg

SEQ ID NO: 29508 - DNA, 20 bp, Artificial Sequence
  Description of Artificial Sequence: Synthetic oligonucleotide
  Target: SCNA; (+) strand; PAM type: NRG; PAM sequence: TAG
ccaagagactgttaatgtag

SEQ ID NO: 29509 - DNA, 20 bp, Artificial Sequence
  Description of Artificial Sequence: Synthetic oligonucleotide
  Target: SCNA; (+) strand; PAM type: NRG; PAM sequence: AGG
caagagactgttaatgtagt

SEQ ID NO: 29510 - DNA, 20 bp, Artificial Sequence
  Description of Artificial Sequence: Synthetic oligonucleotide
  Target: SCNA; (+) strand; PAM type: NRG; PAM sequence: GAG
agagactgttaatgtagtag

SEQ ID NO: 29511 - DNA, 20 bp, Artificial Sequence
  Description of Artificial Sequence: Synthetic oligonucleotide
  Target: SCNA; (+) strand; PAM type: NRG; PAM sequence: CAG
gactgttaatgtagtaggag

SEQ ID NO: 29512 - DNA, 20 bp, Artificial Sequence
  Description of Artificial Sequence: Synthetic oligonucleotide
  Target: SCNA; (+) strand; PAM type: NRG; PAM sequence: GAG
ctgttaatgtagtaggagca

SEQ ID NO: 29513 - DNA, 20 bp, Artificial Sequence
  Description of Artificial Sequence: Synthetic oligonucleotide
  Target: SCNA; (+) strand; PAM type: NRG; PAM sequence: CAG
aggagcagagtttcacaata

SEQ ID NO: 29514 - DNA, 20 bp, Artificial Sequence
  Description of Artificial Sequence: Synthetic oligonucleotide
  Target: SCNA; (+) strand; PAM type: NRG; PAM sequence: GAG
gagcagagtttcacaataca

SEQ ID NO: 29515 - DNA, 20 bp, Artificial Sequence
  Description of Artificial Sequence: Synthetic oligonucleotide
  Target: SCNA; (+) strand; PAM type: NRG; PAM sequence: CAG
cagagtttcacaatacagag

SEQ ID NO: 29516 - DNA, 20 bp, Artificial Sequence
  Description of Artificial Sequence: Synthetic oligonucleotide
  Target: SCNA; (+) strand; PAM type: NRG; PAM sequence: GAG
gagtttcacaatacagagca

SEQ ID NO: 29517 - DNA, 20 bp, Artificial Sequence
  Description of Artificial Sequence: Synthetic oligonucleotide
  Target: SCNA; (+) strand; PAM type: NRG; PAM sequence: GAG
gtttcacaatacagagcaga

SEQ ID NO: 29518 - DNA, 20 bp, Artificial Sequence
  Description of Artificial Sequence: Synthetic oligonucleotide
  Target: SCNA; (+) strand; PAM type: NRG; PAM sequence: AGG
tttcacaatacagagcagag

SEQ ID NO: 29519 - DNA, 20 bp, Artificial Sequence
  Description of Artificial Sequence: Synthetic oligonucleotide
  Target: SCNA; (+) strand; PAM type: NRG; PAM sequence: GGG
ttcacaatacagagcagaga

SEQ ID NO: 29520 - DNA, 20 bp, Artificial Sequence
  Description of Artificial Sequence: Synthetic oligonucleotide
  Target: SCNA; (+) strand; PAM type: NRG; PAM sequence: TGG
atacagagcagagagggtgt

SEQ ID NO: 29521 - DNA, 20 bp, Artificial Sequence
  Description of Artificial Sequence: Synthetic oligonucleotide
  Target: SCNA; (+) strand; PAM type: NRG; PAM sequence: AAG
agagagggtgttggttgata

SEQ ID NO: 29522 - DNA, 20 bp, Artificial Sequence
  Description of Artificial Sequence: Synthetic oligonucleotide
  Target: SCNA; (+) strand; PAM type: NRG; PAM sequence: GAG
gataaagaattgtctcaaat

SEQ ID NO: 29523 - DNA, 20 bp, Artificial Sequence
  Description of Artificial Sequence: Synthetic oligonucleotide
  Target: SCNA; (+) strand; PAM type: NRG; PAM sequence: GAG
taaagaattgtctcaaatga

SEQ ID NO: 29524 - DNA, 20 bp, Artificial Sequence
  Description of Artificial Sequence: Synthetic oligonucleotide
  Target: SCNA; (+) strand; PAM type: NRG; PAM sequence: AGG
aaagaattgtctcaaatgag

SEQ ID NO: 29525 - DNA, 20 bp, Artificial Sequence
  Description of Artificial Sequence: Synthetic oligonucleotide
  Target: SCNA; (+) strand; PAM type: NRG; PAM sequence: AAG
attgtctcaaatgagaggaa

SEQ ID NO: 29526 - DNA, 20 bp, Artificial Sequence
  Description of Artificial Sequence: Synthetic oligonucleotide
  Target: SCNA; (+) strand; PAM type: NRG; PAM sequence: TGG
ctcaaatgagaggaaaagaa

SEQ ID NO: 29527 - DNA, 20 bp, Artificial Sequence
  Description of Artificial Sequence: Synthetic oligonucleotide
  Target: SCNA; (+) strand; PAM type: NRG; PAM sequence: GAG
caaatgagaggaaaagaatg

SEQ ID NO: 29528 - DNA, 20 bp, Artificial Sequence
  Description of Artificial Sequence: Synthetic oligonucleotide
  Target: SCNA; (+) strand; PAM type: NRG; PAM sequence: CAG
gaaaagaatggagccaataa

SEQ ID NO: 29529 - DNA, 20 bp, Artificial Sequence
  Description of Artificial Sequence: Synthetic oligonucleotide
  Target: SCNA; (+) strand; PAM type: NRG; PAM sequence: GAG
aaagaatggagccaataaca

SEQ ID NO: 29530 - DNA, 20 bp, Artificial Sequence
  Description of Artificial Sequence: Synthetic oligonucleotide
  Target: SCNA; (+) strand; PAM type: NRG; PAM sequence: TGG
aacagagatgatgtttaatt

SEQ ID NO: 29531 - DNA, 20 bp, Artificial Sequence
  Description of Artificial Sequence: Synthetic oligonucleotide
  Target: SCNA; (+) strand; PAM type: NRG; PAM sequence: GGG
acagagatgatgtttaattt

SEQ ID NO: 29532 - DNA, 20 bp, Artificial Sequence
  Description of Artificial Sequence: Synthetic oligonucleotide
  Target: SCNA; (+) strand; PAM type: NRG; PAM sequence: AAG
agatgatgtttaatttggga

SEQ ID NO: 29533 - DNA, 20 bp, Artificial Sequence
  Description of Artificial Sequence: Synthetic oligonucleotide
  Target: SCNA; (+) strand; PAM type: NRG; PAM sequence: AGG
gatgatgtttaatttgggaa

SEQ ID NO: 29534 - DNA, 20 bp, Artificial Sequence
  Description of Artificial Sequence: Synthetic oligonucleotide
  Target: SCNA; (+) strand; PAM type: NRG; PAM sequence: TGG
gatgtttaatttgggaaagg

SEQ ID NO: 29535 - DNA, 20 bp, Artificial Sequence
  Description of Artificial Sequence: Synthetic oligonucleotide
  Target: SCNA; (+) strand; PAM type: NRG; PAM sequence: GGG
atgtttaatttgggaaaggt

SEQ ID NO: 29536 - DNA, 20 bp, Artificial Sequence
  Description of Artificial Sequence: Synthetic oligonucleotide
  Target: SCNA; (+) strand; PAM type: NRG; PAM sequence: GAG
aaggtgggacatgttaacat

SEQ ID NO: 29537 - DNA, 20 bp, Artificial Sequence
  Description of Artificial Sequence: Synthetic oligonucleotide
  Target: SCNA; (+) strand; PAM type: NRG; PAM sequence: CAG
gggacatgttaacatgagtc

SEQ ID NO: 29538 - DNA, 20 bp, Artificial Sequence
  Description of Artificial Sequence: Synthetic oligonucleotide
  Target: SCNA; (+) strand; PAM type: NRG; PAM sequence: GAG
gacatgttaacatgagtcca

SEQ ID NO: 29539 - DNA, 20 bp, Artificial Sequence
  Description of Artificial Sequence: Synthetic oligonucleotide
  Target: SCNA; (+) strand; PAM type: NRG; PAM sequence: GAG
tgagtccagagaactaaaat

SEQ ID NO: 29540 - DNA, 20 bp, Artificial Sequence
  Description of Artificial Sequence: Synthetic oligonucleotide
  Target: SCNA; (+) strand; PAM type: NRG; PAM sequence: TGG
agagaactaaaatgagctta

SEQ ID NO: 29541 - DNA, 20 bp, Artificial Sequence
  Description of Artificial Sequence: Synthetic oligonucleotide
  Target: SCNA; (+) strand; PAM type: NRG; PAM sequence: CAG
taaaatgagcttatggcatg

SEQ ID NO: 29542 - DNA, 20 bp, Artificial Sequence
  Description of Artificial Sequence: Synthetic oligonucleotide
  Target: SCNA; (+) strand; PAM type: NRG; PAM sequence: AAG
cttatggcatgcagatgctg

SEQ ID NO: 29543 - DNA, 20 bp, Artificial Sequence
  Description of Artificial Sequence: Synthetic oligonucleotide
  Target: SCNA; (+) strand; PAM type: NRG; PAM sequence: AAG
gcatgcagatgctgaagatg

SEQ ID NO: 29544 - DNA, 20 bp, Artificial Sequence
  Description of Artificial Sequence: Synthetic oligonucleotide
  Target: SCNA; (+) strand; PAM type: NRG; PAM sequence: AAG
gcagatgctgaagatgaaga

SEQ ID NO: 29545 - DNA, 20 bp, Artificial Sequence
  Description of Artificial Sequence: Synthetic oligonucleotide
  Target: SCNA; (+) strand; PAM type: NRG; PAM sequence: AGG
cagatgctgaagatgaagaa

SEQ ID NO: 29546 - DNA, 20 bp, Artificial Sequence
  Description of Artificial Sequence: Synthetic oligonucleotide
  Target: SCNA; (+) strand; PAM type: NRG; PAM sequence: AAG
tgctgaagatgaagaaagga

SEQ ID NO: 29547 - DNA, 20 bp, Artificial Sequence
  Description of Artificial Sequence: Synthetic oligonucleotide
  Target: SCNA; (+) strand; PAM type: NRG; PAM sequence: AGG
gctgaagatgaagaaaggaa

SEQ ID NO: 29548 - DNA, 20 bp, Artificial Sequence
  Description of Artificial Sequence: Synthetic oligonucleotide
  Target: SCNA; (+) strand; PAM type: NRG; PAM sequence: AAG
gaagatgaagaaaggaaagg

SEQ ID NO: 29549 - DNA, 20 bp, Artificial Sequence
  Description of Artificial Sequence: Synthetic oligonucleotide
  Target: SCNA; (+) strand; PAM type: NRG; PAM sequence: AGG
aagatgaagaaaggaaagga

SEQ ID NO: 29550 - DNA, 20 bp, Artificial Sequence
  Description of Artificial Sequence: Synthetic oligonucleotide
  Target: SCNA; (+) strand; PAM type: NRG; PAM sequence: AAG
gaagaaaggaaaggaaggaa

SEQ ID NO: 29551 - DNA, 20 bp, Artificial Sequence
  Description of Artificial Sequence: Synthetic oligonucleotide
  Target: SCNA; (+) strand; PAM type: NRG; PAM sequence: AGG
aagaaaggaaaggaaggaaa

SEQ ID NO: 29552 - DNA, 20 bp, Artificial Sequence
  Description of Artificial Sequence: Synthetic oligonucleotide
  Target: SCNA; (+) strand; PAM type: NRG; PAM sequence: GAG
gaaaggaaaggaaggaaaag

SEQ ID NO: 29553 - DNA, 20 bp, Artificial Sequence
  Description of Artificial Sequence: Synthetic oligonucleotide
  Target: SCNA; (+) strand; PAM type: NRG; PAM sequence: AGG
aaaggaaaggaaggaaaagg

SEQ ID NO: 29554 - DNA, 20 bp, Artificial Sequence
  Description of Artificial Sequence: Synthetic oligonucleotide
  Target: SCNA; (+) strand; PAM type: NRG; PAM sequence: AAG
cacccctttttactgacgat

SEQ ID NO: 29555 - DNA, 20 bp, Artificial Sequence
  Description of Artificial Sequence: Synthetic oligonucleotide
  Target: SCNA; (+) strand; PAM type: NRG; PAM sequence: CAG
tgacgataagacataaatgt

SEQ ID NO: 29556 - DNA, 20 bp, Artificial Sequence
  Description of Artificial Sequence: Synthetic oligonucleotide
  Target: SCNA; (+) strand; PAM type: NRG; PAM sequence: GAG
acgataagacataaatgtca

SEQ ID NO: 29557 - DNA, 20 bp, Artificial Sequence
  Description of Artificial Sequence: Synthetic oligonucleotide
  Target: SCNA; (+) strand; PAM type: NRG; PAM sequence: AGG
cgataagacataaatgtcag

SEQ ID NO: 29558 - DNA, 20 bp, Artificial Sequence
  Description of Artificial Sequence: Synthetic oligonucleotide
  Target: SCNA; (+) strand; PAM type: NRG; PAM sequence: AAG
tgtcagaggtgttttgccta

SEQ ID NO: 29559 - DNA, 20 bp, Artificial Sequence
  Description of Artificial Sequence: Synthetic oligonucleotide
  Target: SCNA; (+) strand; PAM type: NRG; PAM sequence: TAG
gcctaaagtaaaaaattcga

SEQ ID NO: 29560 - DNA, 20 bp, Artificial Sequence
  Description of Artificial Sequence: Synthetic oligonucleotide
  Target: SCNA; (+) strand; PAM type: NRG; PAM sequence: AAG
aagtaaaaaattcgatagtc

SEQ ID NO: 29561 - DNA, 20 bp, Artificial Sequence
  Description of Artificial Sequence: Synthetic oligonucleotide
  Target: SCNA; (+) strand; PAM type: NRG; PAM sequence: TGG
aaaaaattcgatagtcaagc

SEQ ID NO: 29562 - DNA, 20 bp, Artificial Sequence
  Description of Artificial Sequence: Synthetic oligonucleotide
  Target: SCNA; (+) strand; PAM type: NRG; PAM sequence: GGG
aaaaattcgatagtcaagct

SEQ ID NO: 29563 - DNA, 20 bp, Artificial Sequence
  Description of Artificial Sequence: Synthetic oligonucleotide
  Target: SCNA; (+) strand; PAM type: NRG; PAM sequence: CAG
agctgggtttaaaaccatat

SEQ ID NO: 29564 - DNA, 20 bp, Artificial Sequence
  Description of Artificial Sequence: Synthetic oligonucleotide
  Target: SCNA; (+) strand; PAM type: NRG; PAM sequence: AAG
accatatcagtcttacgtca

SEQ ID NO: 29565 - DNA, 20 bp, Artificial Sequence
  Description of Artificial Sequence: Synthetic oligonucleotide
  Target: SCNA; (+) strand; PAM type: NRG; PAM sequence: TGG
atgttttaattgctgttgtg

SEQ ID NO: 29566 - DNA, 20 bp, Artificial Sequence
  Description of Artificial Sequence: Synthetic oligonucleotide
  Target: SCNA; (+) strand; PAM type: NRG; PAM sequence: AAG
tgttgtgtggttgtgatttt

SEQ ID NO: 29567 - DNA, 20 bp, Artificial Sequence
  Description of Artificial Sequence: Synthetic oligonucleotide
  Target: SCNA; (+) strand; PAM type: NRG; PAM sequence: AGG
gttgtgtggttgtgatttta

SEQ ID NO: 29568 - DNA, 20 bp, Artificial Sequence
  Description of Artificial Sequence: Synthetic oligonucleotide
  Target: SCNA; (+) strand; PAM type: NRG; PAM sequence: GGG
ttgtgtggttgtgattttaa

SEQ ID NO: 29569 - DNA, 20 bp, Artificial Sequence
  Description of Artificial Sequence: Synthetic oligonucleotide
  Target: SCNA; (+) strand; PAM type: NRG; PAM sequence: AAG
tgtggttgtgattttaaggg

SEQ ID NO: 29570 - DNA, 20 bp, Artificial Sequence
  Description of Artificial Sequence: Synthetic oligonucleotide
  Target: SCNA; (+) strand; PAM type: NRG; PAM sequence: AAG
ggttgtgattttaagggaag

SEQ ID NO: 29571 - DNA, 20 bp, Artificial Sequence
  Description of Artificial Sequence: Synthetic oligonucleotide
  Target: SCNA; (+) strand; PAM type: NRG; PAM sequence: AAG
tgtgattttaagggaagaag

SEQ ID NO: 29572 - DNA, 20 bp, Artificial Sequence
  Description of Artificial Sequence: Synthetic oligonucleotide
  Target: SCNA; (+) strand; PAM type: NRG; PAM sequence: GAG
tgattttaagggaagaagaa

SEQ ID NO: 29573 - DNA, 20 bp, Artificial Sequence
  Description of Artificial Sequence: Synthetic oligonucleotide
  Target: SCNA; (+) strand; PAM type: NRG; PAM sequence: TGG
gaagaagaagagttttataa

SEQ ID NO: 29574 - DNA, 20 bp, Artificial Sequence
  Description of Artificial Sequence: Synthetic oligonucleotide
  Target: SCNA; (+) strand; PAM type: NRG; PAM sequence: GGG
aagaagaagagttttataat

SEQ ID NO: 29575 - DNA, 20 bp, Artificial Sequence
  Description of Artificial Sequence: Synthetic oligonucleotide
  Target: SCNA; (+) strand; PAM type: NRG; PAM sequence: TAG
ctgaaaaataaaatatcaat

SEQ ID NO: 29576 - DNA, 20 bp, Artificial Sequence
  Description of Artificial Sequence: Synthetic oligonucleotide
  Target: SCNA; (+) strand; PAM type: NRG; PAM sequence: AAG
aaaataaaatatcaattaga

SEQ ID NO: 29577 - DNA, 20 bp, Artificial Sequence
  Description of Artificial Sequence: Synthetic oligonucleotide
  Target: SCNA; (+) strand; PAM type: NRG; PAM sequence: GAG
aaagaaacaaaacaactgct

SEQ ID NO: 29578 - DNA, 20 bp, Artificial Sequence
  Description of Artificial Sequence: Synthetic oligonucleotide
  Target: SCNA; (+) strand; PAM type: NRG; PAM sequence: AAG
gaaacaaaacaactgctgag

SEQ ID NO: 29579 - DNA, 20 bp, Artificial Sequence
  Description of Artificial Sequence: Synthetic oligonucleotide
  Target: SCNA; (+) strand; PAM type: NRG; PAM sequence: CAG
acaaaacaactgctgagaag

SEQ ID NO: 29580 - DNA, 20 bp, Artificial Sequence
  Description of Artificial Sequence: Synthetic oligonucleotide
  Target: SCNA; (+) strand; PAM type: NRG; PAM sequence: AAG
tgctgagaagcagtgaatcc

SEQ ID NO: 29581 - DNA, 20 bp, Artificial Sequence
  Description of Artificial Sequence: Synthetic oligonucleotide
  Target: SCNA; (+) strand; PAM type: NRG; PAM sequence: CAG
tgagaagcagtgaatccaag

SEQ ID NO: 29582 - DNA, 20 bp, Artificial Sequence
  Description of Artificial Sequence: Synthetic oligonucleotide
  Target: SCNA; (+) strand; PAM type: NRG; PAM sequence: GAG
agtgaatccaagcagaatct

SEQ ID NO: 29583 - DNA, 20 bp, Artificial Sequence
  Description of Artificial Sequence: Synthetic oligonucleotide
  Target: SCNA; (+) strand; PAM type: NRG; PAM sequence: TAG
atctgagtatcatcactttt

SEQ ID NO: 29584 - DNA, 20 bp, Artificial Sequence
  Description of Artificial Sequence: Synthetic oligonucleotide
  Target: SCNA; (+) strand; PAM type: NRG; PAM sequence: CAG
cactttttagttaaactaac

SEQ ID NO: 29585 - DNA, 20 bp, Artificial Sequence
  Description of Artificial Sequence: Synthetic oligonucleotide
  Target: SCNA; (+) strand; PAM type: NRG; PAM sequence: CAG
atatcctgatttttctttaa

SEQ ID NO: 29586 - DNA, 20 bp, Artificial Sequence
  Description of Artificial Sequence: Synthetic oligonucleotide
  Target: SCNA; (+) strand; PAM type: NRG; PAM sequence: AGG
tatcctgatttttctttaac

SEQ ID NO: 29587 - DNA, 20 bp, Artificial Sequence
  Description of Artificial Sequence: Synthetic oligonucleotide
  Target: SCNA; (+) strand; PAM type: NRG; PAM sequence: AAG
tgatttttctttaacaggca

SEQ ID NO: 29588 - DNA, 20 bp, Artificial Sequence
  Description of Artificial Sequence: Synthetic oligonucleotide
  Target: SCNA; (+) strand; PAM type: NRG; PAM sequence: GAG
ttaacaggcaaagaattttt

SEQ ID NO: 29589 - DNA, 20 bp, Artificial Sequence
  Description of Artificial Sequence: Synthetic oligonucleotide
  Target: SCNA; (+) strand; PAM type: NRG; PAM sequence: TAG
gaatttttgagtctttccca

SEQ ID NO: 29590 - DNA, 20 bp, Artificial Sequence
  Description of Artificial Sequence: Synthetic oligonucleotide
  Target: SCNA; (+) strand; PAM type: NRG; PAM sequence: GAG
ttgagtctttcccatagact

SEQ ID NO: 29591 - DNA, 20 bp, Artificial Sequence
  Description of Artificial Sequence: Synthetic oligonucleotide
  Target: SCNA; (+) strand; PAM type: NRG; PAM sequence: CAG
agttcttgtgaactatttta

SEQ ID NO: 29592 - DNA, 20 bp, Artificial Sequence
  Description of Artificial Sequence: Synthetic oligonucleotide
  Target: SCNA; (+) strand; PAM type: NRG; PAM sequence: TGG
gaactattttacagcaataa

SEQ ID NO: 29593 - DNA, 20 bp, Artificial Sequence
  Description of Artificial Sequence: Synthetic oligonucleotide
  Target: SCNA; (+) strand; PAM type: NRG; PAM sequence: TAG
aataatggcatccaatccta

SEQ ID NO: 29594 - DNA, 20 bp, Artificial Sequence
  Description of Artificial Sequence: Synthetic oligonucleotide
  Target: SCNA; (+) strand; PAM type: NRG; PAM sequence: AAG
tcctatagataacaataaca

SEQ ID NO: 29595 - DNA, 20 bp, Artificial Sequence
  Description of Artificial Sequence: Synthetic oligonucleotide
  Target: SCNA; (+) strand; PAM type: NRG; PAM sequence: CAG
agataacaataacaaagctg

SEQ ID NO: 29596 - DNA, 20 bp, Artificial Sequence
  Description of Artificial Sequence: Synthetic oligonucleotide
  Target: SCNA; (+) strand; PAM type: NRG; PAM sequence: CAG
gctgcagaccattttgttgc

SEQ ID NO: 29597 - DNA, 20 bp, Artificial Sequence
  Description of Artificial Sequence: Synthetic oligonucleotide
  Target: SCNA; (+) strand; PAM type: NRG; PAM sequence: AGG
ctgcagaccattttgttgcc

SEQ ID NO: 29598 - DNA, 20 bp, Artificial Sequence
  Description of Artificial Sequence: Synthetic oligonucleotide
  Target: SCNA; (+) strand; PAM type: NRG; PAM sequence: CAG
ttgttgccaggtttctcctc

SEQ ID NO: 29599 - DNA, 20 bp, Artificial Sequence
  Description of Artificial Sequence: Synthetic oligonucleotide
  Target: SCNA; (+) strand; PAM type: NRG; PAM sequence: AGG
tgttgccaggtttctcctcc

SEQ ID NO: 29600 - DNA, 20 bp, Artificial Sequence
  Description of Artificial Sequence: Synthetic oligonucleotide
  Target: SCNA; (+) strand; PAM type: NRG; PAM sequence: GGG
gttgccaggtttctcctcca

SEQ ID NO: 29601 - DNA, 20 bp, Artificial Sequence
  Description of Artificial Sequence: Synthetic oligonucleotide
  Target: SCNA; (+) strand; PAM type: NRG; PAM sequence: TGG
gccaggtttctcctccaggg

SEQ ID NO: 29602 - DNA, 20 bp, Artificial Sequence
  Description of Artificial Sequence: Synthetic oligonucleotide
  Target: SCNA; (+) strand; PAM type: NRG; PAM sequence: CAG
tctcctccagggtggctttc

SEQ ID NO: 29603 - DNA, 20 bp, Artificial Sequence
  Description of Artificial Sequence: Synthetic oligonucleotide
  Target: SCNA; (+) strand; PAM type: NRG; PAM sequence: TAG
ctccagggtggctttccagc

SEQ ID NO: 29604 - DNA, 20 bp, Artificial Sequence
  Description of Artificial Sequence: Synthetic oligonucleotide
  Target: SCNA; (+) strand; PAM type: NRG; PAM sequence: CAG
tagtttgtaaacaaataact

SEQ ID NO: 29605 - DNA, 20 bp, Artificial Sequence
  Description of Artificial Sequence: Synthetic oligonucleotide
  Target: SCNA; (+) strand; PAM type: NRG; PAM sequence: AGG
agtttgtaaacaaataactc

SEQ ID NO: 29606 - DNA, 20 bp, Artificial Sequence
  Description of Artificial Sequence: Synthetic oligonucleotide
  Target: SCNA; (+) strand; PAM type: NRG; PAM sequence: TGG
ttgtaaacaaataactcagg

SEQ ID NO: 29607 - DNA, 20 bp, Artificial Sequence
  Description of Artificial Sequence: Synthetic oligonucleotide
  Target: SCNA; (+) strand; PAM type: NRG; PAM sequence: AAG
tgttacattaactaaaaacc

SEQ ID NO: 29608 - DNA, 20 bp, Artificial Sequence
  Description of Artificial Sequence: Synthetic oligonucleotide
  Target: SCNA; (+) strand; PAM type: NRG; PAM sequence: AAG
ttaactaaaaaccaagtcta

SEQ ID NO: 29609 - DNA, 20 bp, Artificial Sequence
  Description of Artificial Sequence: Synthetic oligonucleotide
  Target: SCNA; (+) strand; PAM type: NRG; PAM sequence: TGG
taacatatgtgtgtgcaaac

SEQ ID NO: 29610 - DNA, 20 bp, Artificial Sequence
  Description of Artificial Sequence: Synthetic oligonucleotide
  Target: SCNA; (+) strand; PAM type: NRG; PAM sequence: TGG
attttaaaaataactgtatt

SEQ ID NO: 29611 - DNA, 20 bp, Artificial Sequence
  Description of Artificial Sequence: Synthetic oligonucleotide
  Target: SCNA; (+) strand; PAM type: NRG; PAM sequence: AAG
aaataactgtatttggaaac

SEQ ID NO: 29612 - DNA, 20 bp, Artificial Sequence
  Description of Artificial Sequence: Synthetic oligonucleotide
  Target: SCNA; (+) strand; PAM type: NRG; PAM sequence: AAG
tgtatttggaaacaagaaaa

SEQ ID NO: 29613 - DNA, 20 bp, Artificial Sequence
  Description of Artificial Sequence: Synthetic oligonucleotide
  Target: SCNA; (+) strand; PAM type: NRG; PAM sequence: AAG
acacccaactgatgtatata

SEQ ID NO: 29614 - DNA, 20 bp, Artificial Sequence
  Description of Artificial Sequence: Synthetic oligonucleotide
  Target: SCNA; (+) strand; PAM type: NRG; PAM sequence: AGG
cacccaactgatgtatataa

SEQ ID NO: 29615 - DNA, 20 bp, Artificial Sequence
  Description of Artificial Sequence: Synthetic oligonucleotide
  Target: SCNA; (+) strand; PAM type: NRG; PAM sequence: GAG
cccaactgatgtatataaag

SEQ ID NO: 29616 - DNA, 20 bp, Artificial Sequence
  Description of Artificial Sequence: Synthetic oligonucleotide
  Target: SCNA; (+) strand; PAM type: NRG; PAM sequence: TGG
tataaaggagactgtgcata

SEQ ID NO: 29617 - DNA, 20 bp, Artificial Sequence
  Description of Artificial Sequence: Synthetic oligonucleotide
  Target: SCNA; (+) strand; PAM type: NRG; PAM sequence: GGG
ataaaggagactgtgcatat

SEQ ID NO: 29618 - DNA, 20 bp, Artificial Sequence
  Description of Artificial Sequence: Synthetic oligonucleotide
  Target: SCNA; (+) strand; PAM type: NRG; PAM sequence: GAG
gtgcatatgggttttaaaat

SEQ ID NO: 29619 - DNA, 20 bp, Artificial Sequence
  Description of Artificial Sequence: Synthetic oligonucleotide
  Target: SCNA; (+) strand; PAM type: NRG; PAM sequence: GAG
aaaattgaaatttgatcttt

SEQ ID NO: 29620 - DNA, 20 bp, Artificial Sequence
  Description of Artificial Sequence: Synthetic oligonucleotide
  Target: SCNA; (+) strand; PAM type: NRG; PAM sequence: AAG
ttttgatatctctgaattta

SEQ ID NO: 29621 - DNA, 20 bp, Artificial Sequence
  Description of Artificial Sequence: Synthetic oligonucleotide
  Target: SCNA; (+) strand; PAM type: NRG; PAM sequence: TAG
atatctctgaatttaaagtc

SEQ ID NO: 29622 - DNA, 20 bp, Artificial Sequence
  Description of Artificial Sequence: Synthetic oligonucleotide
  Target: SCNA; (+) strand; PAM type: NRG; PAM sequence: GAG
atctctgaatttaaagtcta

SEQ ID NO: 29623 - DNA, 20 bp, Artificial Sequence
  Description of Artificial Sequence: Synthetic oligonucleotide
  Target: SCNA; (+) strand; PAM type: NRG; PAM sequence: TAG
agagaatgattcatcttcac

SEQ ID NO: 29624 - DNA, 20 bp, Artificial Sequence
  Description of Artificial Sequence: Synthetic oligonucleotide
  Target: SCNA; (+) strand; PAM type: NRG; PAM sequence: CAG
ttcactagttctatcttttc

SEQ ID NO: 29625 - DNA, 20 bp, Artificial Sequence
  Description of Artificial Sequence: Synthetic oligonucleotide
  Target: SCNA; (+) strand; PAM type: NRG; PAM sequence: TAG
agttctatcttttccagtgc

SEQ ID NO: 29626 - DNA, 20 bp, Artificial Sequence
  Description of Artificial Sequence: Synthetic oligonucleotide
  Target: SCNA; (+) strand; PAM type: NRG; PAM sequence: GAG
gtgctagtatttttgttttt

SEQ ID NO: 29627 - DNA, 20 bp, Artificial Sequence
  Description of Artificial Sequence: Synthetic oligonucleotide
  Target: SCNA; (+) strand; PAM type: NRG; PAM sequence: TGG
gtatttttgtttttgagctg

SEQ ID NO: 29628 - DNA, 20 bp, Artificial Sequence
  Description of Artificial Sequence: Synthetic oligonucleotide
  Target: SCNA; (+) strand; PAM type: NRG; PAM sequence: GAG
ggtttccctatcccattttt

SEQ ID NO: 29629 - DNA, 20 bp, Artificial Sequence
  Description of Artificial Sequence: Synthetic oligonucleotide
  Target: SCNA; (+) strand; PAM type: NRG; PAM sequence: TGG
tgagatctcaaactataatt

SEQ ID NO: 29630 - DNA, 20 bp, Artificial Sequence
  Description of Artificial Sequence: Synthetic oligonucleotide
  Target: SCNA; (+) strand; PAM type: NRG; PAM sequence: GAG
tcaaactataatttggtgtc

SEQ ID NO: 29631 - DNA, 20 bp, Artificial Sequence
  Description of Artificial Sequence: Synthetic oligonucleotide
  Target: SCNA; (+) strand; PAM type: NRG; PAM sequence: CAG
ataatttggtgtcgagtacc

SEQ ID NO: 29632 - DNA, 20 bp, Artificial Sequence
  Description of Artificial Sequence: Synthetic oligonucleotide
  Target: SCNA; (+) strand; PAM type: NRG; PAM sequence: AGG
taatttggtgtcgagtaccc

SEQ ID NO: 29633 - DNA, 20 bp, Artificial Sequence
  Description of Artificial Sequence: Synthetic oligonucleotide
  Target: SCNA; (+) strand; PAM type: NRG; PAM sequence: AAG
acccaggtatcttatcttta

SEQ ID NO: 29634 - DNA, 20 bp, Artificial Sequence
  Description of Artificial Sequence: Synthetic oligonucleotide
  Target: SCNA; (+) strand; PAM type: NRG; PAM sequence: AAG
ggtatcttatctttaaagtg

SEQ ID NO: 29635 - DNA, 20 bp, Artificial Sequence
  Description of Artificial Sequence: Synthetic oligonucleotide
  Target: SCNA; (+) strand; PAM type: NRG; PAM sequence: TAG
ttatctttaaagtgaagacg

SEQ ID NO: 29636 - DNA, 20 bp, Artificial Sequence
  Description of Artificial Sequence: Synthetic oligonucleotide
  Target: SCNA; (+) strand; PAM type: NRG; PAM sequence: AGG
tatctttaaagtgaagacgt

SEQ ID NO: 29637 - DNA, 20 bp, Artificial Sequence
  Description of Artificial Sequence: Synthetic oligonucleotide
  Target: SCNA; (+) strand; PAM type: NRG; PAM sequence: CAG
ctttaaagtgaagacgtagg

SEQ ID NO: 29638 - DNA, 20 bp, Artificial Sequence
  Description of Artificial Sequence: Synthetic oligonucleotide
  Target: SCNA; (+) strand; PAM type: NRG; PAM sequence: AAG
gtgaagacgtaggcagcaca

SEQ ID NO: 29639 - DNA, 20 bp, Artificial Sequence
  Description of Artificial Sequence: Synthetic oligonucleotide
  Target: SCNA; (+) strand; PAM type: NRG; PAM sequence: AGG
tgaagacgtaggcagcacaa

SEQ ID NO: 29640 - DNA, 20 bp, Artificial Sequence
  Description of Artificial Sequence: Synthetic oligonucleotide
  Target: SCNA; (+) strand; PAM type: NRG; PAM sequence: TAG
cagcacaaaggtgcttttat

SEQ ID NO: 29641 - DNA, 20 bp, Artificial Sequence
  Description of Artificial Sequence: Synthetic oligonucleotide
  Target: SCNA; (+) strand; PAM type: NRG; PAM sequence: TAG
gcttttattagaacgtccac

SEQ ID NO: 29642 - DNA, 20 bp, Artificial Sequence
  Description of Artificial Sequence: Synthetic oligonucleotide
  Target: SCNA; (+) strand; PAM type: NRG; PAM sequence: CAG
tattagaacgtccactagat

SEQ ID NO: 29643 - DNA, 20 bp, Artificial Sequence
  Description of Artificial Sequence: Synthetic oligonucleotide
  Target: SCNA; (+) strand; PAM type: NRG; PAM sequence: CAG
gtccactagatcagaatgac

SEQ ID NO: 29644 - DNA, 20 bp, Artificial Sequence
  Description of Artificial Sequence: Synthetic oligonucleotide
  Target: SCNA; (+) strand; PAM type: NRG; PAM sequence: TAG
gtgcacaaaatttattttcc

SEQ ID NO: 29645 - DNA, 20 bp, Artificial Sequence
  Description of Artificial Sequence: Synthetic oligonucleotide
  Target: SCNA; (+) strand; PAM type: NRG; PAM sequence: CAG
cacaaaatttattttcctag

SEQ ID NO: 29646 - DNA, 20 bp, Artificial Sequence
  Description of Artificial Sequence: Synthetic oligonucleotide
  Target: SCNA; (+) strand; PAM type: NRG; PAM sequence: TGG
cagactcaccaaatttaacc

SEQ ID NO: 29647 - DNA, 20 bp, Artificial Sequence
  Description of Artificial Sequence: Synthetic oligonucleotide
  Target: SCNA; (+) strand; PAM type: NRG; PAM sequence: AAG
actcaccaaatttaacctgg

SEQ ID NO: 29648 - DNA, 20 bp, Artificial Sequence
  Description of Artificial Sequence: Synthetic oligonucleotide
  Target: SCNA; (+) strand; PAM type: NRG; PAM sequence: GAG
tcaccaaatttaacctggaa

SEQ ID NO: 29649 - DNA, 20 bp, Artificial Sequence
  Description of Artificial Sequence: Synthetic oligonucleotide
  Target: SCNA; (+) strand; PAM type: NRG; PAM sequence: TAG
ctgactctgttgaattttct

SEQ ID NO: 29650 - DNA, 20 bp, Artificial Sequence
  Description of Artificial Sequence: Synthetic oligonucleotide
  Target: SCNA; (+) strand; PAM type: NRG; PAM sequence: AGG
tgactctgttgaattttctt

SEQ ID NO: 29651 - DNA, 20 bp, Artificial Sequence
  Description of Artificial Sequence: Synthetic oligonucleotide
  Target: SCNA; (+) strand; PAM type: NRG; PAM sequence: AAG
taggcaaatacaatatttga

SEQ ID NO: 29652 - DNA, 20 bp, Artificial Sequence
  Description of Artificial Sequence: Synthetic oligonucleotide
  Target: SCNA; (+) strand; PAM type: NRG; PAM sequence: CAG
aaacaaaatataacaacatt

SEQ ID NO: 29653 - DNA, 20 bp, Artificial Sequence
  Description of Artificial Sequence: Synthetic oligonucleotide
  Target: SCNA; (+) strand; PAM type: NRG; PAM sequence: CAG
atataacaacattcagataa

SEQ ID NO: 29654 - DNA, 20 bp, Artificial Sequence
  Description of Artificial Sequence: Synthetic oligonucleotide
  Target: SCNA; (+) strand; PAM type: NRG; PAM sequence: CAG
tgttctcatgtgtttatgcc

SEQ ID NO: 29655 - DNA, 20 bp, Artificial Sequence
  Description of Artificial Sequence: Synthetic oligonucleotide
  Target: SCNA; (+) strand; PAM type: NRG; PAM sequence: AAG
tgtgtttatgcccagaaaat

SEQ ID NO: 29656 - DNA, 20 bp, Artificial Sequence
  Description of Artificial Sequence: Synthetic oligonucleotide
  Target: SCNA; (+) strand; PAM type: NRG; PAM sequence: CAG
gtttatgcccagaaaataag

SEQ ID NO: 29657 - DNA, 20 bp, Artificial Sequence
  Description of Artificial Sequence: Synthetic oligonucleotide
  Target: SCNA; (+) strand; PAM type: NRG; PAM sequence: TGG
tgcccagaaaataagcagac

SEQ ID NO: 29658 - DNA, 20 bp, Artificial Sequence
  Description of Artificial Sequence: Synthetic oligonucleotide
  Target: SCNA; (+) strand; PAM type: NRG; PAM sequence: GAG
cccagaaaataagcagactg

SEQ ID NO: 29659 - DNA, 20 bp, Artificial Sequence
  Description of Artificial Sequence: Synthetic oligonucleotide
  Target: SCNA; (+) strand; PAM type: NRG; PAM sequence: AAG
aagcagactggagcttctct

SEQ ID NO: 29660 - DNA, 20 bp, Artificial Sequence
  Description of Artificial Sequence: Synthetic oligonucleotide
  Target: SCNA; (+) strand; PAM type: NRG; PAM sequence: AAG
tggagcttctctaagattaa

SEQ ID NO: 29661 - DNA, 20 bp, Artificial Sequence
  Description of Artificial Sequence: Synthetic oligonucleotide
  Target: SCNA; (+) strand; PAM type: NRG; PAM sequence: CAG
tctaagattaaaagtcaaaa

SEQ ID NO: 29662 - DNA, 20 bp, Artificial Sequence
  Description of Artificial Sequence: Synthetic oligonucleotide
  Target: SCNA; (+) strand; PAM type: NRG; PAM sequence: CAG
tcaaaacagtattacaattc

SEQ ID NO: 29663 - DNA, 20 bp, Artificial Sequence
  Description of Artificial Sequence: Synthetic oligonucleotide
  Target: SCNA; (+) strand; PAM type: NRG; PAM sequence: CAG
acagtattacaattccagcc

SEQ ID NO: 29664 - DNA, 20 bp, Artificial Sequence
  Description of Artificial Sequence: Synthetic oligonucleotide
  Target: SCNA; (+) strand; PAM type: NRG; PAM sequence: TAG
ctatctaatcatttaaacct

SEQ ID NO: 29665 - DNA, 20 bp, Artificial Sequence
  Description of Artificial Sequence: Synthetic oligonucleotide
  Target: SCNA; (+) strand; PAM type: NRG; PAM sequence: AAG
accgtcactgcatactcatt

SEQ ID NO: 29666 - DNA, 20 bp, Artificial Sequence
  Description of Artificial Sequence: Synthetic oligonucleotide
  Target: SCNA; (+) strand; PAM type: NRG; PAM sequence: TGG
aaaaattcctttaaaataaa

SEQ ID NO: 29667 - DNA, 20 bp, Artificial Sequence
  Description of Artificial Sequence: Synthetic oligonucleotide
  Target: SCNA; (+) strand; PAM type: NRG; PAM sequence: AAG
ttcctttaaaataaatggaa

SEQ ID NO: 29668 - DNA, 20 bp, Artificial Sequence
  Description of Artificial Sequence: Synthetic oligonucleotide
  Target: SCNA; (+) strand; PAM type: NRG; PAM sequence: TAG
aaagaaaatatctgtgtaaa

SEQ ID NO: 29669 - DNA, 20 bp, Artificial Sequence
  Description of Artificial Sequence: Synthetic oligonucleotide
  Target: SCNA; (+) strand; PAM type: NRG; PAM sequence: AAG
atatctgtgtaaatagatta

SEQ ID NO: 29670 - DNA, 20 bp, Artificial Sequence
  Description of Artificial Sequence: Synthetic oligonucleotide
  Target: SCNA; (+) strand; PAM type: NRG; PAM sequence: TGG
ctcaccactccctttctccc

SEQ ID NO: 29671 - DNA, 20 bp, Artificial Sequence
  Description of Artificial Sequence: Synthetic oligonucleotide
  Target: SCNA; (+) strand; PAM type: NRG; PAM sequence: GGG
tcaccactccctttctccct

SEQ ID NO: 29672 - DNA, 20 bp, Artificial Sequence
  Description of Artificial Sequence: Synthetic oligonucleotide
  Target: SCNA; (+) strand; PAM type: NRG; PAM sequence: GGG
caccactccctttctccctg

SEQ ID NO: 29673 - DNA, 20 bp, Artificial Sequence
  Description of Artificial Sequence: Synthetic oligonucleotide
  Target: SCNA; (+) strand; PAM type: NRG; PAM sequence: CAG
cactccctttctccctgggg

SEQ ID NO: 29674 - DNA, 20 bp, Artificial Sequence
  Description of Artificial Sequence: Synthetic oligonucleotide
  Target: SCNA; (+) strand; PAM type: NRG; PAM sequence: AGG
actccctttctccctggggc

SEQ ID NO: 29675 - DNA, 20 bp, Artificial Sequence
  Description of Artificial Sequence: Synthetic oligonucleotide
  Target: SCNA; (+) strand; PAM type: NRG; PAM sequence: GAG
tccctttctccctggggcag

SEQ ID NO: 29676 - DNA, 20 bp, Artificial Sequence
  Description of Artificial Sequence: Synthetic oligonucleotide
  Target: SCNA; (+) strand; PAM type: NRG; PAM sequence: GAG
ctccctggggcaggagactt

SEQ ID NO: 29677 - DNA, 20 bp, Artificial Sequence
  Description of Artificial Sequence: Synthetic oligonucleotide
  Target: SCNA; (+) strand; PAM type: NRG; PAM sequence: AAG
caggagacttgagcacatca

SEQ ID NO: 29678 - DNA, 20 bp, Artificial Sequence
  Description of Artificial Sequence: Synthetic oligonucleotide
  Target: SCNA; (+) strand; PAM type: NRG; PAM sequence: AGG
aggagacttgagcacatcaa

SEQ ID NO: 29679 - DNA, 20 bp, Artificial Sequence
  Description of Artificial Sequence: Synthetic oligonucleotide
  Target: SCNA; (+) strand; PAM type: NRG; PAM sequence: TAG
gagcacatcaaaggaactca

SEQ ID NO: 29680 - DNA, 20 bp, Artificial Sequence
  Description of Artificial Sequence: Synthetic oligonucleotide
  Target: SCNA; (+) strand; PAM type: NRG; PAM sequence: TGG
aaaggaactcatagcgttct

SEQ ID NO: 29681 - DNA, 20 bp, Artificial Sequence
  Description of Artificial Sequence: Synthetic oligonucleotide
  Target: SCNA; (+) strand; PAM type: NRG; PAM sequence: GAG
aggaactcatagcgttcttg

SEQ ID NO: 29682 - DNA, 20 bp, Artificial Sequence
  Description of Artificial Sequence: Synthetic oligonucleotide
  Target: SCNA; (+) strand; PAM type: NRG; PAM sequence: AAG
actcatagcgttcttggagt

SEQ ID NO: 29683 - DNA, 20 bp, Artificial Sequence
  Description of Artificial Sequence: Synthetic oligonucleotide
  Target: SCNA; (+) strand; PAM type: NRG; PAM sequence: AAG
cgttcttggagtaagtgtga

SEQ ID NO: 29684 - DNA, 20 bp, Artificial Sequence
  Description of Artificial Sequence: Synthetic oligonucleotide
  Target: SCNA; (+) strand; PAM type: NRG; PAM sequence: AAG
taaatgaatgcttacatcta

SEQ ID NO: 29685 - DNA, 20 bp, Artificial Sequence
  Description of Artificial Sequence: Synthetic oligonucleotide
  Target: SCNA; (+) strand; PAM type: NRG; PAM sequence: AAG
tgaatgcttacatctaaaga

SEQ ID NO: 29686 - DNA, 20 bp, Artificial Sequence
  Description of Artificial Sequence: Synthetic oligonucleotide
  Target: SCNA; (+) strand; PAM type: NRG; PAM sequence: AAG
atgtaaacatattacattaa

SEQ ID NO: 29687 - DNA, 20 bp, Artificial Sequence
  Description of Artificial Sequence: Synthetic oligonucleotide
  Target: SCNA; (+) strand; PAM type: NRG; PAM sequence: AGG
tgtaaacatattacattaaa

SEQ ID NO: 29688 - DNA, 20 bp, Artificial Sequence
  Description of Artificial Sequence: Synthetic oligonucleotide
  Target: SCNA; (+) strand; PAM type: NRG; PAM sequence: TGG
aaacatattacattaaaagg

SEQ ID NO: 29689 - DNA, 20 bp, Artificial Sequence
  Description of Artificial Sequence: Synthetic oligonucleotide
  Target: SCNA; (+) strand; PAM type: NRG; PAM sequence: TGG
taaaaggtggcatgacataa

SEQ ID NO: 29690 - DNA, 20 bp, Artificial Sequence
  Description of Artificial Sequence: Synthetic oligonucleotide
  Target: SCNA; (+) strand; PAM type: NRG; PAM sequence: AAG
ataatggtatatcactgatt

SEQ ID NO: 29691 - DNA, 20 bp, Artificial Sequence
  Description of Artificial Sequence: Synthetic oligonucleotide
  Target: SCNA; (+) strand; PAM type: NRG; PAM sequence: GAG
tatcactgattaagaaatgt

SEQ ID NO: 29692 - DNA, 20 bp, Artificial Sequence
  Description of Artificial Sequence: Synthetic oligonucleotide
  Target: SCNA; (+) strand; PAM type: NRG; PAM sequence: AGG
atcactgattaagaaatgtg

SEQ ID NO: 29693 - DNA, 20 bp, Artificial Sequence
  Description of Artificial Sequence: Synthetic oligonucleotide
  Target: SCNA; (+) strand; PAM type: NRG; PAM sequence: TAG
taaatcattataatttgaca

SEQ ID NO: 29694 - DNA, 20 bp, Artificial Sequence
  Description of Artificial Sequence: Synthetic oligonucleotide
  Target: SCNA; (+) strand; PAM type: NRG; PAM sequence: TAG
atcattataatttgacatag

SEQ ID NO: 29695 - DNA, 20 bp, Artificial Sequence
  Description of Artificial Sequence: Synthetic oligonucleotide
  Target: SCNA; (+) strand; PAM type: NRG; PAM sequence: TGG
ctatatttcatctgcatacc

SEQ ID NO: 29696 - DNA, 20 bp, Artificial Sequence
  Description of Artificial Sequence: Synthetic oligonucleotide
  Target: SCNA; (+) strand; PAM type: NRG; PAM sequence: GAG
catctgcatacctggaaaat

SEQ ID NO: 29697 - DNA, 20 bp, Artificial Sequence
  Description of Artificial Sequence: Synthetic oligonucleotide
  Target: SCNA; (+) strand; PAM type: NRG; PAM sequence: AGG
atctgcatacctggaaaatg

SEQ ID NO: 29698 - DNA, 20 bp, Artificial Sequence
  Description of Artificial Sequence: Synthetic oligonucleotide
  Target: SCNA; (+) strand; PAM type: NRG; PAM sequence: CAG
ctttcaaaacatattcctgc

SEQ ID NO: 29699 - DNA, 20 bp, Artificial Sequence
  Description of Artificial Sequence: Synthetic oligonucleotide
  Target: SCNA; (+) strand; PAM type: NRG; PAM sequence: CAG
aaacatattcctgccagtta

SEQ ID NO: 29700 - DNA, 20 bp, Artificial Sequence
  Description of Artificial Sequence: Synthetic oligonucleotide
  Target: SCNA; (+) strand; PAM type: NRG; PAM sequence: CAG
atattcctgccagttacagt

SEQ ID NO: 29701 - DNA, 20 bp, Artificial Sequence
  Description of Artificial Sequence: Synthetic oligonucleotide
  Target: SCNA; (+) strand; PAM type: NRG; PAM sequence: AGG
tattcctgccagttacagtc

SEQ ID NO: 29702 - DNA, 20 bp, Artificial Sequence
  Description of Artificial Sequence: Synthetic oligonucleotide
  Target: SCNA; (+) strand; PAM type: NRG; PAM sequence: AAG
acagtcaggtattgcaaaac

SEQ ID NO: 29703 - DNA, 20 bp, Artificial Sequence
  Description of Artificial Sequence: Synthetic oligonucleotide
  Target: SCNA; (+) strand; PAM type: NRG; PAM sequence: TAG
ggtattgcaaaacaagcatt

SEQ ID NO: 29704 - DNA, 20 bp, Artificial Sequence
  Description of Artificial Sequence: Synthetic oligonucleotide
  Target: SCNA; (+) strand; PAM type: NRG; PAM sequence: GAG
ttgcaaaacaagcatttagt

SEQ ID NO: 29705 - DNA, 20 bp, Artificial Sequence
  Description of Artificial Sequence: Synthetic oligonucleotide
  Target: SCNA; (+) strand; PAM type: NRG; PAM sequence: AAG
tttagtgagcatctaaactg

SEQ ID NO: 29706 - DNA, 20 bp, Artificial Sequence
  Description of Artificial Sequence: Synthetic oligonucleotide
  Target: SCNA; (+) strand; PAM type: NRG; PAM sequence: TAG
tgagcatctaaactgaagct

SEQ ID NO: 29707 - DNA, 20 bp, Artificial Sequence
  Description of Artificial Sequence: Synthetic oligonucleotide
  Target: SCNA; (+) strand; PAM type: NRG; PAM sequence: CAG
taaactgaagcttagaactt

SEQ ID NO: 29708 - DNA, 20 bp, Artificial Sequence
  Description of Artificial Sequence: Synthetic oligonucleotide
  Target: SCNA; (+) strand; PAM type: NRG; PAM sequence: TGG
agcttagaacttcagttttg

SEQ ID NO: 29709 - DNA, 20 bp, Artificial Sequence
  Description of Artificial Sequence: Synthetic oligonucleotide
  Target: SCNA; (+) strand; PAM type: NRG; PAM sequence: CGG
ttagaacttcagttttgtgg

SEQ ID NO: 29710 - DNA, 20 bp, Artificial Sequence
  Description of Artificial Sequence: Synthetic oligonucleotide
  Target: SCNA; (+) strand; PAM type: NRG; PAM sequence: GGG
tagaacttcagttttgtggc

SEQ ID NO: 29711 - DNA, 20 bp, Artificial Sequence
  Description of Artificial Sequence: Synthetic oligonucleotide
  Target: SCNA; (+) strand; PAM type: NRG; PAM sequence: GGG
agaacttcagttttgtggcg

SEQ ID NO: 29712 - DNA, 20 bp, Artificial Sequence
  Description of Artificial Sequence: Synthetic oligonucleotide
  Target: SCNA; (+) strand; PAM type: NRG; PAM sequence: CGG
ttcagttttgtggcggggcg

SEQ ID NO: 29713 - DNA, 20 bp, Artificial Sequence
  Description of Artificial Sequence: Synthetic oligonucleotide
  Target: SCNA; (+) strand; PAM type: NRG; PAM sequence: TGG
agttttgtggcggggcgcgg

SEQ ID NO: 29714 - DNA, 20 bp, Artificial Sequence
  Description of Artificial Sequence: Synthetic oligonucleotide
  Target: SCNA; (+) strand; PAM type: NRG; PAM sequence: CAG
gtggctcacgcctgtaatcc

SEQ ID NO: 29715 - DNA, 20 bp, Artificial Sequence
  Description of Artificial Sequence: Synthetic oligonucleotide
  Target: SCNA; (+) strand; PAM type: NRG; PAM sequence: TGG
cgcctgtaatcccagcacct

SEQ ID NO: 29716 - DNA, 20 bp, Artificial Sequence
  Description of Artificial Sequence: Synthetic oligonucleotide
  Target: SCNA; (+) strand; PAM type: NRG; PAM sequence: GGG
gcctgtaatcccagcacctt

SEQ ID NO: 29717 - DNA, 20 bp, Artificial Sequence
  Description of Artificial Sequence: Synthetic oligonucleotide
  Target: SCNA; (+) strand; PAM type: NRG; PAM sequence: GAG
ctgtaatcccagcaccttgg

SEQ ID NO: 29718 - DNA, 20 bp, Artificial Sequence
  Description of Artificial Sequence: Synthetic oligonucleotide
  Target: SCNA; (+) strand; PAM type: NRG; PAM sequence: AGG
tgtaatcccagcaccttggg

SEQ ID NO: 29719 - DNA, 20 bp, Artificial Sequence
  Description of Artificial Sequence: Synthetic oligonucleotide
  Target: SCNA; (+) strand; PAM type: NRG; PAM sequence: AAG
tcccagcaccttgggaggcc

SEQ ID NO: 29720 - DNA, 20 bp, Artificial Sequence
  Description of Artificial Sequence: Synthetic oligonucleotide
  Target: SCNA; (+) strand; PAM type: NRG; PAM sequence: CAG
agcaccttgggaggccaaga

SEQ ID NO: 29721 - DNA, 20 bp, Artificial Sequence
  Description of Artificial Sequence: Synthetic oligonucleotide
  Target: SCNA; (+) strand; PAM type: NRG; PAM sequence: AGG
gcaccttgggaggccaagac

SEQ ID NO: 29722 - DNA, 20 bp, Artificial Sequence
  Description of Artificial Sequence: Synthetic oligonucleotide
  Target: SCNA; (+) strand; PAM type: NRG; PAM sequence: CGG
ccttgggaggccaagacagg

SEQ ID NO: 29723 - DNA, 20 bp, Artificial Sequence
  Description of Artificial Sequence: Synthetic oligonucleotide
  Target: SCNA; (+) strand; PAM type: NRG; PAM sequence: GAG
ccaagacaggcggatcactt

SEQ ID NO: 29724 - DNA, 20 bp, Artificial Sequence
  Description of Artificial Sequence: Synthetic oligonucleotide
  Target: SCNA; (+) strand; PAM type: NRG; PAM sequence: AGG
caagacaggcggatcacttg

SEQ ID NO: 29725 - DNA, 20 bp, Artificial Sequence
  Description of Artificial Sequence: Synthetic oligonucleotide
  Target: SCNA; (+) strand; PAM type: NRG; PAM sequence: CAG
acaggcggatcacttgaggt

SEQ ID NO: 29726 - DNA, 20 bp, Artificial Sequence
  Description of Artificial Sequence: Synthetic oligonucleotide
  Target: SCNA; (+) strand; PAM type: NRG; PAM sequence: AGG
caggcggatcacttgaggtc

SEQ ID NO: 29727 - DNA, 20 bp, Artificial Sequence
  Description of Artificial Sequence: Synthetic oligonucleotide
  Target: SCNA; (+) strand; PAM type: NRG; PAM sequence: GAG
ggcggatcacttgaggtcag

SEQ ID NO: 29728 - DNA, 20 bp, Artificial Sequence
  Description of Artificial Sequence: Synthetic oligonucleotide
  Target: SCNA; (+) strand; PAM type: NRG; PAM sequence: TGG
atcacttgaggtcaggagtt

SEQ ID NO: 29729 - DNA, 20 bp, Artificial Sequence
  Description of Artificial Sequence: Synthetic oligonucleotide
  Target: SCNA; (+) strand; PAM type: NRG; PAM sequence: GGG
tcacttgaggtcaggagttt

SEQ ID NO: 29730 - DNA, 20 bp, Artificial Sequence
  Description of Artificial Sequence: Synthetic oligonucleotide
  Target: SCNA; (+) strand; PAM type: NRG; PAM sequence: CAG
tgaggtcaggagtttgggac

SEQ ID NO: 29731 - DNA, 20 bp, Artificial Sequence
  Description of Artificial Sequence: Synthetic oligonucleotide
  Target: SCNA; (+) strand; PAM type: NRG; PAM sequence: TGG
tcaggagtttgggaccagcc

SEQ ID NO: 29732 - DNA, 20 bp, Artificial Sequence
  Description of Artificial Sequence: Synthetic oligonucleotide
  Target: SCNA; (+) strand; PAM type: NRG; PAM sequence: TGG
tgggaccagcctggcccaca

SEQ ID NO: 29733 - DNA, 20 bp, Artificial Sequence
  Description of Artificial Sequence: Synthetic oligonucleotide
  Target: SCNA; (+) strand; PAM type: NRG; PAM sequence: TAG
tctactaaaaatacaaaaat

SEQ ID NO: 29734 - DNA, 20 bp, Artificial Sequence
  Description of Artificial Sequence: Synthetic oligonucleotide
  Target: SCNA; (+) strand; PAM type: NRG; PAM sequence: CAG
ctaaaaatacaaaaattagc

SEQ ID NO: 29735 - DNA, 20 bp, Artificial Sequence
  Description of Artificial Sequence: Synthetic oligonucleotide
  Target: SCNA; (+) strand; PAM type: NRG; PAM sequence: AGG
taaaaatacaaaaattagcc

SEQ ID NO: 29736 - DNA, 20 bp, Artificial Sequence
  Description of Artificial Sequence: Synthetic oligonucleotide
  Target: SCNA; (+) strand; PAM type: NRG; PAM sequence: TGG
atacaaaaattagccaggca

SEQ ID NO: 29737 - DNA, 20 bp, Artificial Sequence
  Description of Artificial Sequence: Synthetic oligonucleotide
  Target: SCNA; (+) strand; PAM type: NRG; PAM sequence: TAG
ggcatggttgcacgcacctg

SEQ ID NO: 29738 - DNA, 20 bp, Artificial Sequence
  Description of Artificial Sequence: Synthetic oligonucleotide
  Target: SCNA; (+) strand; PAM type: NRG; PAM sequence: CAG
gttgcacgcacctgtagtcc

SEQ ID NO: 29739 - DNA, 20 bp, Artificial Sequence
  Description of Artificial Sequence: Synthetic oligonucleotide
  Target: SCNA; (+) strand; PAM type: NRG; PAM sequence: CAG
cacctgtagtcccagttact

SEQ ID NO: 29740 - DNA, 20 bp, Artificial Sequence
  Description of Artificial Sequence: Synthetic oligonucleotide
  Target: SCNA; (+) strand; PAM type: NRG; PAM sequence: AGG
acctgtagtcccagttactc

SEQ ID NO: 29741 - DNA, 20 bp, Artificial Sequence
  Description of Artificial Sequence: Synthetic oligonucleotide
  Target: SCNA; (+) strand; PAM type: NRG; PAM sequence: TGG
tgtagtcccagttactcagg

SEQ ID NO: 29742 - DNA, 20 bp, Artificial Sequence
  Description of Artificial Sequence: Synthetic oligonucleotide
  Target: SCNA; (+) strand; PAM type: NRG; PAM sequence: GAG
tcccagttactcaggtggct

SEQ ID NO: 29743 - DNA, 20 bp, Artificial Sequence
  Description of Artificial Sequence: Synthetic oligonucleotide
  Target: SCNA; (+) strand; PAM type: NRG; PAM sequence: AGG
cccagttactcaggtggctg

SEQ ID NO: 29744 - DNA, 20 bp, Artificial Sequence
  Description of Artificial Sequence: Synthetic oligonucleotide
  Target: SCNA; (+) strand; PAM type: NRG; PAM sequence: CAG
agttactcaggtggctgagg

SEQ ID NO: 29745 - DNA, 20 bp, Artificial Sequence
  Description of Artificial Sequence: Synthetic oligonucleotide
  Target: SCNA; (+) strand; PAM type: NRG; PAM sequence: AAG
tactcaggtggctgaggcag

SEQ ID NO: 29746 - DNA, 20 bp, Artificial Sequence
  Description of Artificial Sequence: Synthetic oligonucleotide
  Target: SCNA; (+) strand; PAM type: NRG; PAM sequence: TGG
gcagaagaatcgcttgaacc

SEQ ID NO: 29747 - DNA, 20 bp, Artificial Sequence
  Description of Artificial Sequence: Synthetic oligonucleotide
  Target: SCNA; (+) strand; PAM type: NRG; PAM sequence: GGG
cagaagaatcgcttgaacct

SEQ ID NO: 29748 - DNA, 20 bp, Artificial Sequence
  Description of Artificial Sequence: Synthetic oligonucleotide
  Target: SCNA; (+) strand; PAM type: NRG; PAM sequence: TGG
aagaatcgcttgaacctggg

SEQ ID NO: 29749 - DNA, 20 bp, Artificial Sequence
  Description of Artificial Sequence: Synthetic oligonucleotide
  Target: SCNA; (+) strand; PAM type: NRG; PAM sequence: TGG
aatcgcttgaacctgggtgg

SEQ ID NO: 29750 - DNA, 20 bp, Artificial Sequence
  Description of Artificial Sequence: Synthetic oligonucleotide
  Target: SCNA; (+) strand; PAM type: NRG; PAM sequence: GAG
tcgcttgaacctgggtggtg

SEQ ID NO: 29751 - DNA, 20 bp, Artificial Sequence
  Description of Artificial Sequence: Synthetic oligonucleotide
  Target: SCNA; (+) strand; PAM type: NRG; PAM sequence: CAG
aacctgggtggtggagattg

SEQ ID NO: 29752 - DNA, 20 bp, Artificial Sequence
  Description of Artificial Sequence: Synthetic oligonucleotide
  Target: SCNA; (+) strand; PAM type: NRG; PAM sequence: GAG
tgggtggtggagattgcagt

SEQ ID NO: 29753 - DNA, 20 bp, Artificial Sequence
  Description of Artificial Sequence: Synthetic oligonucleotide
  Target: SCNA; (+) strand; PAM type: NRG; PAM sequence: GAG
ggtggagattgcagtgagct

SEQ ID NO: 29754 - DNA, 20 bp, Artificial Sequence
  Description of Artificial Sequence: Synthetic oligonucleotide
  Target: SCNA; (+) strand; PAM type: NRG; PAM sequence: CAG
gagatcctgccactgcactc

SEQ ID NO: 29755 - DNA, 20 bp, Artificial Sequence
  Description of Artificial Sequence: Synthetic oligonucleotide
  Target: SCNA; (+) strand; PAM type: NRG; PAM sequence: TGG
cctgccactgcactccagcc

SEQ ID NO: 29756 - DNA, 20 bp, Artificial Sequence
  Description of Artificial Sequence: Synthetic oligonucleotide
  Target: SCNA; (+) strand; PAM type: NRG; PAM sequence: GGG
ctgccactgcactccagcct

SEQ ID NO: 29757 - DNA, 20 bp, Artificial Sequence
  Description of Artificial Sequence: Synthetic oligonucleotide
  Target: SCNA; (+) strand; PAM type: NRG; PAM sequence: AAG
cactgcactccagcctgggc

SEQ ID NO: 29758 - DNA, 20 bp, Artificial Sequence
  Description of Artificial Sequence: Synthetic oligonucleotide
  Target: SCNA; (+) strand; PAM type: NRG; PAM sequence: GAG
ctgcactccagcctgggcaa

SEQ ID NO: 29759 - DNA, 20 bp, Artificial Sequence
  Description of Artificial Sequence: Synthetic oligonucleotide
  Target: SCNA; (+) strand; PAM type: NRG; PAM sequence: GAG
gcactccagcctgggcaaga

SEQ ID NO: 29760 - DNA, 20 bp, Artificial Sequence
  Description of Artificial Sequence: Synthetic oligonucleotide
  Target: SCNA; (+) strand; PAM type: NRG; PAM sequence: GAG
tccagcctgggcaagagagt

SEQ ID NO: 29761 - DNA, 20 bp, Artificial Sequence
  Description of Artificial Sequence: Synthetic oligonucleotide
  Target: SCNA; (+) strand; PAM type: NRG; PAM sequence: AAG
gactccatctcaaaaaaata

SEQ ID NO: 29762 - DNA, 20 bp, Artificial Sequence
  Description of Artificial Sequence: Synthetic oligonucleotide
  Target: SCNA; (+) strand; PAM type: NRG; PAM sequence: TGG
ctccaattttattttcttca

SEQ ID NO: 29763 - DNA, 20 bp, Artificial Sequence
  Description of Artificial Sequence: Synthetic oligonucleotide
  Target: SCNA; (+) strand; PAM type: NRG; PAM sequence: TAG
attttattttcttcatggca

SEQ ID NO: 29764 - DNA, 20 bp, Artificial Sequence
  Description of Artificial Sequence: Synthetic oligonucleotide
  Target: SCNA; (+) strand; PAM type: NRG; PAM sequence: TAG
ttcttcatggcatagcataa

SEQ ID NO: 29765 - DNA, 20 bp, Artificial Sequence
  Description of Artificial Sequence: Synthetic oligonucleotide
  Target: SCNA; (+) strand; PAM type: NRG; PAM sequence: GAG
catggcatagcataatagat

SEQ ID NO: 29766 - DNA, 20 bp, Artificial Sequence
  Description of Artificial Sequence: Synthetic oligonucleotide
  Target: SCNA; (+) strand; PAM type: NRG; PAM sequence: CAG
gagttaacaaattaatgaaa

SEQ ID NO: 29767 - DNA, 20 bp, Artificial Sequence
  Description of Artificial Sequence: Synthetic oligonucleotide
  Target: SCNA; (+) strand; PAM type: NRG; PAM sequence: CAG
gtgttaattgcaatcatata

SEQ ID NO: 29768 - DNA, 20 bp, Artificial Sequence
  Description of Artificial Sequence: Synthetic oligonucleotide
  Target: SCNA; (+) strand; PAM type: NRG; PAM sequence: CAG
aattgcaatcatatacagaa

SEQ ID NO: 29769 - DNA, 20 bp, Artificial Sequence
  Description of Artificial Sequence: Synthetic oligonucleotide
  Target: SCNA; (+) strand; PAM type: NRG; PAM sequence: TAG
acttcccctaaatctctctg

SEQ ID NO: 29770 - DNA, 20 bp, Artificial Sequence
  Description of Artificial Sequence: Synthetic oligonucleotide
  Target: SCNA; (+) strand; PAM type: NRG; PAM sequence: TAG
tgatgccccaatttcactat

SEQ ID NO: 29771 - DNA, 20 bp, Artificial Sequence
  Description of Artificial Sequence: Synthetic oligonucleotide
  Target: SCNA; (+) strand; PAM type: NRG; PAM sequence: CAG
caatttcactattagctctt

SEQ ID NO: 29772 - DNA, 20 bp, Artificial Sequence
  Description of Artificial Sequence: Synthetic oligonucleotide
  Target: SCNA; (+) strand; PAM type: NRG; PAM sequence: TGG
cactattagctcttcagact

SEQ ID NO: 29773 - DNA, 20 bp, Artificial Sequence
  Description of Artificial Sequence: Synthetic oligonucleotide
  Target: SCNA; (+) strand; PAM type: NRG; PAM sequence: AAG
gctcttcagacttggatgtt

SEQ ID NO: 29774 - DNA, 20 bp, Artificial Sequence
  Description of Artificial Sequence: Synthetic oligonucleotide
  Target: SCNA; (+) strand; PAM type: NRG; PAM sequence: TGG
ttaagcactgtgccttcccc

SEQ ID NO: 29775 - DNA, 20 bp, Artificial Sequence
  Description of Artificial Sequence: Synthetic oligonucleotide
  Target: SCNA; (+) strand; PAM type: NRG; PAM sequence: CAG
ggacctctctttaaatgtca

SEQ ID NO: 29776 - DNA, 20 bp, Artificial Sequence
  Description of Artificial Sequence: Synthetic oligonucleotide
  Target: SCNA; (+) strand; PAM type: NRG; PAM sequence: TGG
ttaaatgtcacagctatttc

SEQ ID NO: 29777 - DNA, 20 bp, Artificial Sequence
  Description of Artificial Sequence: Synthetic oligonucleotide
  Target: SCNA; (+) strand; PAM type: NRG; PAM sequence: CAG
aatgtcacagctatttctgg

SEQ ID NO: 29778 - DNA, 20 bp, Artificial Sequence
  Description of Artificial Sequence: Synthetic oligonucleotide
  Target: SCNA; (+) strand; PAM type: NRG; PAM sequence: AGG
atgtcacagctatttctggc

SEQ ID NO: 29779 - DNA, 20 bp, Artificial Sequence
  Description of Artificial Sequence: Synthetic oligonucleotide
  Target: SCNA; (+) strand; PAM type: NRG; PAM sequence: AAG
cacagctatttctggcaggt

SEQ ID NO: 29780 - DNA, 20 bp, Artificial Sequence
  Description of Artificial Sequence: Synthetic oligonucleotide
  Target: SCNA; (+) strand; PAM type: NRG; PAM sequence: TGG
ggcaggtaagactattgctt

SEQ ID NO: 29781 - DNA, 20 bp, Artificial Sequence
  Description of Artificial Sequence: Synthetic oligonucleotide
  Target: SCNA; (+) strand; PAM type: NRG; PAM sequence: TAG
ggtaagactattgctttggt

SEQ ID NO: 29782 - DNA, 20 bp, Artificial Sequence
  Description of Artificial Sequence: Synthetic oligonucleotide
  Target: SCNA; (+) strand; PAM type: NRG; PAM sequence: TGG
agtgtgaacacacaccactg

SEQ ID NO: 29783 - DNA, 20 bp, Artificial Sequence
  Description of Artificial Sequence: Synthetic oligonucleotide
  Target: SCNA; (+) strand; PAM type: NRG; PAM sequence: AAG
cacacaccactgtggatcac

SEQ ID NO: 29784 - DNA, 20 bp, Artificial Sequence
  Description of Artificial Sequence: Synthetic oligonucleotide
  Target: SCNA; (+) strand; PAM type: NRG; PAM sequence: AGG
acacaccactgtggatcaca

SEQ ID NO: 29785 - DNA, 20 bp, Artificial Sequence
  Description of Artificial Sequence: Synthetic oligonucleotide
  Target: SCNA; (+) strand; PAM type: NRG; PAM sequence: GAG
ctgtggatcacaaggcacct

SEQ ID NO: 29786 - DNA, 20 bp, Artificial Sequence
  Description of Artificial Sequence: Synthetic oligonucleotide
  Target: SCNA; (+) strand; PAM type: NRG; PAM sequence: GAG
gtggatcacaaggcacctga

SEQ ID NO: 29787 - DNA, 20 bp, Artificial Sequence
  Description of Artificial Sequence: Synthetic oligonucleotide
  Target: SCNA; (+) strand; PAM type: NRG; PAM sequence: AAG
tcacaaggcacctgagagaa

SEQ ID NO: 29788 - DNA, 20 bp, Artificial Sequence
  Description of Artificial Sequence: Synthetic oligonucleotide
  Target: SCNA; (+) strand; PAM type: NRG; PAM sequence: AGG
cacaaggcacctgagagaaa

SEQ ID NO: 29789 - DNA, 20 bp, Artificial Sequence
  Description of Artificial Sequence: Synthetic oligonucleotide
  Target: SCNA; (+) strand; PAM type: NRG; PAM sequence: AAG
ctgagagaaaaggctgccga

SEQ ID NO: 29790 - DNA, 20 bp, Artificial Sequence
  Description of Artificial Sequence: Synthetic oligonucleotide
  Target: SCNA; (+) strand; PAM type: NRG; PAM sequence: CAG
agagaaaaggctgccgaaag

SEQ ID NO: 29791 - DNA, 20 bp, Artificial Sequence
  Description of Artificial Sequence: Synthetic oligonucleotide
  Target: SCNA; (+) strand; PAM type: NRG; PAM sequence: AGG
gagaaaaggctgccgaaagc

SEQ ID NO: 29792 - DNA, 20 bp, Artificial Sequence
  Description of Artificial Sequence: Synthetic oligonucleotide
  Target: SCNA; (+) strand; PAM type: NRG; PAM sequence: CAG
ccgaaagcaggaaaataact

SEQ ID NO: 29793 - DNA, 20 bp, Artificial Sequence
  Description of Artificial Sequence: Synthetic oligonucleotide
  Target: SCNA; (+) strand; PAM type: NRG; PAM sequence: AAG
caggaaaataactcagaaaa

SEQ ID NO: 29794 - DNA, 20 bp, Artificial Sequence
  Description of Artificial Sequence: Synthetic oligonucleotide
  Target: SCNA; (+) strand; PAM type: NRG; PAM sequence: TGG
aaaaaagaaaaaaaaacaca

SEQ ID NO: 29795 - DNA, 20 bp, Artificial Sequence
  Description of Artificial Sequence: Synthetic oligonucleotide
  Target: SCNA; (+) strand; PAM type: NRG; PAM sequence: CAG
catggtgctgaaaaatacaa

SEQ ID NO: 29796 - DNA, 20 bp, Artificial Sequence
  Description of Artificial Sequence: Synthetic oligonucleotide
  Target: SCNA; (+) strand; PAM type: NRG; PAM sequence: CAG
acttatgatctaatttatgt

SEQ ID NO: 29797 - DNA, 20 bp, Artificial Sequence
  Description of Artificial Sequence: Synthetic oligonucleotide
  Target: SCNA; (+) strand; PAM type: NRG; PAM sequence: AAG
taatttatgtcagtcattaa

SEQ ID NO: 29798 - DNA, 20 bp, Artificial Sequence
  Description of Artificial Sequence: Synthetic oligonucleotide
  Target: SCNA; (+) strand; PAM type: NRG; PAM sequence: AAG
gtcagtcattaaaagaaaat

SEQ ID NO: 29799 - DNA, 20 bp, Artificial Sequence
  Description of Artificial Sequence: Synthetic oligonucleotide
  Target: SCNA; (+) strand; PAM type: NRG; PAM sequence: AGG
tcagtcattaaaagaaaata

SEQ ID NO: 29800 - DNA, 20 bp, Artificial Sequence
  Description of Artificial Sequence: Synthetic oligonucleotide
  Target: SCNA; (+) strand; PAM type: NRG; PAM sequence: TAG
ttaaaagaaaataaggtgtt

SEQ ID NO: 29801 - DNA, 20 bp, Artificial Sequence
  Description of Artificial Sequence: Synthetic oligonucleotide
  Target: SCNA; (+) strand; PAM type: NRG; PAM sequence: CAG
aataaggtgtttagaaaata

SEQ ID NO: 29802 - DNA, 20 bp, Artificial Sequence
  Description of Artificial Sequence: Synthetic oligonucleotide
  Target: SCNA; (+) strand; PAM type: NRG; PAM sequence: TGG
agaaaatacagtgctgtcta

SEQ ID NO: 29803 - DNA, 20 bp, Artificial Sequence
  Description of Artificial Sequence: Synthetic oligonucleotide
  Target: SCNA; (+) strand; PAM type: NRG; PAM sequence: AAG
tattgtgaccacttaataca

SEQ ID NO: 29804 - DNA, 20 bp, Artificial Sequence
  Description of Artificial Sequence: Synthetic oligonucleotide
  Target: SCNA; (+) strand; PAM type: NRG; PAM sequence: AAG
tgaccacttaatacaaagca

SEQ ID NO: 29805 - DNA, 20 bp, Artificial Sequence
  Description of Artificial Sequence: Synthetic oligonucleotide
  Target: SCNA; (+) strand; PAM type: NRG; PAM sequence: TGG
agcattcttgcttgctctca

SEQ ID NO: 29806 - DNA, 20 bp, Artificial Sequence
  Description of Artificial Sequence: Synthetic oligonucleotide
  Target: SCNA; (+) strand; PAM type: NRG; PAM sequence: GAG
cattcttgcttgctctcatg

SEQ ID NO: 29807 - DNA, 20 bp, Artificial Sequence
  Description of Artificial Sequence: Synthetic oligonucleotide
  Target: SCNA; (+) strand; PAM type: NRG; PAM sequence: GAG
ttcttgcttgctctcatgga

SEQ ID NO: 29808 - DNA, 20 bp, Artificial Sequence
  Description of Artificial Sequence: Synthetic oligonucleotide
  Target: SCNA; (+) strand; PAM type: NRG; PAM sequence: TAG
ctctcatggagagtgcaatt

SEQ ID NO: 29809 - DNA, 20 bp, Artificial Sequence
  Description of Artificial Sequence: Synthetic oligonucleotide
  Target: SCNA; (+) strand; PAM type: NRG; PAM sequence: GAG
ggagagtgcaatttagaatt

SEQ ID NO: 29810 - DNA, 20 bp, Artificial Sequence
  Description of Artificial Sequence: Synthetic oligonucleotide
  Target: SCNA; (+) strand; PAM type: NRG; PAM sequence: GAG
agagtgcaatttagaattga

SEQ ID NO: 29811 - DNA, 20 bp, Artificial Sequence
  Description of Artificial Sequence: Synthetic oligonucleotide
  Target: SCNA; (+) strand; PAM type: NRG; PAM sequence: AAG
gaattgagagctcaatttct

SEQ ID NO: 29812 - DNA, 20 bp, Artificial Sequence
  Description of Artificial Sequence: Synthetic oligonucleotide
  Target: SCNA; (+) strand; PAM type: NRG; PAM sequence: AGG
aattgagagctcaatttcta

SEQ ID NO: 29813 - DNA, 20 bp, Artificial Sequence
  Description of Artificial Sequence: Synthetic oligonucleotide
  Target: SCNA; (+) strand; PAM type: NRG; PAM sequence: GAG
ttgagagctcaatttctaag

SEQ ID NO: 29814 - DNA, 20 bp, Artificial Sequence
  Description of Artificial Sequence: Synthetic oligonucleotide
  Target: SCNA; (+) strand; PAM type: NRG; PAM sequence: AGG
tgagagctcaatttctaagg

SEQ ID NO: 29815 - DNA, 20 bp, Artificial Sequence
  Description of Artificial Sequence: Synthetic oligonucleotide
  Target: SCNA; (+) strand; PAM type: NRG; PAM sequence: GGG
gagagctcaatttctaagga

SEQ ID NO: 29816 - DNA, 20 bp, Artificial Sequence
  Description of Artificial Sequence: Synthetic oligonucleotide
  Target: SCNA; (+) strand; PAM type: NRG; PAM sequence: GAG
gggtttatgtactctatctt

SEQ ID NO: 29817 - DNA, 20 bp, Artificial Sequence
  Description of Artificial Sequence: Synthetic oligonucleotide
  Target: SCNA; (+) strand; PAM type: NRG; PAM sequence: AGG
ggtttatgtactctatcttg

SEQ ID NO: 29818 - DNA, 20 bp, Artificial Sequence
  Description of Artificial Sequence: Synthetic oligonucleotide
  Target: SCNA; (+) strand; PAM type: NRG; PAM sequence: AAG
actctatcttgaggcacacc

SEQ ID NO: 29819 - DNA, 20 bp, Artificial Sequence
  Description of Artificial Sequence: Synthetic oligonucleotide
  Target: SCNA; (+) strand; PAM type: NRG; PAM sequence: AGG
ctctatcttgaggcacacca

SEQ ID NO: 29820 - DNA, 20 bp, Artificial Sequence
  Description of Artificial Sequence: Synthetic oligonucleotide
  Target: SCNA; (+) strand; PAM type: NRG; PAM sequence: GAG
ctatcttgaggcacaccaag

SEQ ID NO: 29821 - DNA, 20 bp, Artificial Sequence
  Description of Artificial Sequence: Synthetic oligonucleotide
  Target: SCNA; (+) strand; PAM type: NRG; PAM sequence: GAG
tgaggcacaccaaggagatt

SEQ ID NO: 29822 - DNA, 20 bp, Artificial Sequence
  Description of Artificial Sequence: Synthetic oligonucleotide
  Target: SCNA; (+) strand; PAM type: NRG; PAM sequence: CAG
accaaggagattgagtttac

SEQ ID NO: 29823 - DNA, 20 bp, Artificial Sequence
  Description of Artificial Sequence: Synthetic oligonucleotide
  Target: SCNA; (+) strand; PAM type: NRG; PAM sequence: TAG
ggagattgagtttaccagtt

SEQ ID NO: 29824 - DNA, 20 bp, Artificial Sequence
  Description of Artificial Sequence: Synthetic oligonucleotide
  Target: SCNA; (+) strand; PAM type: NRG; PAM sequence: AAG
attgagtttaccagtttaga

SEQ ID NO: 29825 - DNA, 20 bp, Artificial Sequence
  Description of Artificial Sequence: Synthetic oligonucleotide
  Target: SCNA; (+) strand; PAM type: NRG; PAM sequence: AAG
agaaagcactgccataattc

SEQ ID NO: 29826 - DNA, 20 bp, Artificial Sequence
  Description of Artificial Sequence: Synthetic oligonucleotide
  Target: SCNA; (+) strand; PAM type: NRG; PAM sequence: CAG
agcactgccataattcaagt

SEQ ID NO: 29827 - DNA, 20 bp, Artificial Sequence
  Description of Artificial Sequence: Synthetic oligonucleotide
  Target: SCNA; (+) strand; PAM type: NRG; PAM sequence: AGG
gcactgccataattcaagtc

SEQ ID NO: 29828 - DNA, 20 bp, Artificial Sequence
  Description of Artificial Sequence: Synthetic oligonucleotide
  Target: SCNA; (+) strand; PAM type: NRG; PAM sequence: GGG
cactgccataattcaagtca

SEQ ID NO: 29829 - DNA, 20 bp, Artificial Sequence
  Description of Artificial Sequence: Synthetic oligonucleotide
  Target: SCNA; (+) strand; PAM type: NRG; PAM sequence: GAG
ctgccataattcaagtcagg

SEQ ID NO: 29830 - DNA, 20 bp, Artificial Sequence
  Description of Artificial Sequence: Synthetic oligonucleotide
  Target: SCNA; (+) strand; PAM type: NRG; PAM sequence: GAG
gccataattcaagtcaggga

SEQ ID NO: 29831 - DNA, 20 bp, Artificial Sequence
  Description of Artificial Sequence: Synthetic oligonucleotide
  Target: SCNA; (+) strand; PAM type: NRG; PAM sequence: AGG
ccataattcaagtcagggag

SEQ ID NO: 29832 - DNA, 20 bp, Artificial Sequence
  Description of Artificial Sequence: Synthetic oligonucleotide
  Target: SCNA; (+) strand; PAM type: NRG; PAM sequence: GGG
cataattcaagtcagggaga

SEQ ID NO: 29833 - DNA, 20 bp, Artificial Sequence
  Description of Artificial Sequence: Synthetic oligonucleotide
  Target: SCNA; (+) strand; PAM type: NRG; PAM sequence: TGG
caagtcagggagagggctga

SEQ ID NO: 29834 - DNA, 20 bp, Artificial Sequence
  Description of Artificial Sequence: Synthetic oligonucleotide
  Target: SCNA; (+) strand; PAM type: NRG; PAM sequence: AAG
gtcagggagagggctgatgg

SEQ ID NO: 29835 - DNA, 20 bp, Artificial Sequence
  Description of Artificial Sequence: Synthetic oligonucleotide
  Target: SCNA; (+) strand; PAM type: NRG; PAM sequence: AAG
ggctgatggaagatttttaa

SEQ ID NO: 29836 - DNA, 20 bp, Artificial Sequence
  Description of Artificial Sequence: Synthetic oligonucleotide
  Target: SCNA; (+) strand; PAM type: NRG; PAM sequence: AAG
agatttttaaaagattttaa

SEQ ID NO: 29837 - DNA, 20 bp, Artificial Sequence
  Description of Artificial Sequence: Synthetic oligonucleotide
  Target: SCNA; (+) strand; PAM type: NRG; PAM sequence: GAG
aaaagattttaaaagatcat

SEQ ID NO: 29838 - DNA, 20 bp, Artificial Sequence
  Description of Artificial Sequence: Synthetic oligonucleotide
  Target: SCNA; (+) strand; PAM type: NRG; PAM sequence: AGG
aaagattttaaaagatcatg

SEQ ID NO: 29839 - DNA, 20 bp, Artificial Sequence
  Description of Artificial Sequence: Synthetic oligonucleotide
  Target: SCNA; (+) strand; PAM type: NRG; PAM sequence: GGG
aagattttaaaagatcatga

SEQ ID NO: 29840 - DNA, 20 bp, Artificial Sequence
  Description of Artificial Sequence: Synthetic oligonucleotide
  Target: SCNA; (+) strand; PAM type: NRG; PAM sequence: AAG
ttttaaaagatcatgagggc

SEQ ID NO: 29841 - DNA, 20 bp, Artificial Sequence
  Description of Artificial Sequence: Synthetic oligonucleotide
  Target: SCNA; (+) strand; PAM type: NRG; PAM sequence: TGG
aaaagatcatgagggcaagc

SEQ ID NO: 29842 - DNA, 20 bp, Artificial Sequence
  Description of Artificial Sequence: Synthetic oligonucleotide
  Target: SCNA; (+) strand; PAM type: NRG; PAM sequence: TGG
caaaacaaaatatttccatg

SEQ ID NO: 29843 - DNA, 20 bp, Artificial Sequence
  Description of Artificial Sequence: Synthetic oligonucleotide
  Target: SCNA; (+) strand; PAM type: NRG; PAM sequence: TGG
aaatatttccatgtggcttc

SEQ ID NO: 29844 - DNA, 20 bp, Artificial Sequence
  Description of Artificial Sequence: Synthetic oligonucleotide
  Target: SCNA; (+) strand; PAM type: NRG; PAM sequence: AAG
ttctggctgactgaattaat

SEQ ID NO: 29845 - DNA, 20 bp, Artificial Sequence
  Description of Artificial Sequence: Synthetic oligonucleotide
  Target: SCNA; (+) strand; PAM type: NRG; PAM sequence: AGG
tctggctgactgaattaata

SEQ ID NO: 29846 - DNA, 20 bp, Artificial Sequence
  Description of Artificial Sequence: Synthetic oligonucleotide
  Target: SCNA; (+) strand; PAM type: NRG; PAM sequence: CAG
ctgactgaattaataaggcc

SEQ ID NO: 29847 - DNA, 20 bp, Artificial Sequence
  Description of Artificial Sequence: Synthetic oligonucleotide
  Target: SCNA; (+) strand; PAM type: NRG; PAM sequence: GAG
gactgaattaataaggccca

SEQ ID NO: 29848 - DNA, 20 bp, Artificial Sequence
  Description of Artificial Sequence: Synthetic oligonucleotide
  Target: SCNA; (+) strand; PAM type: NRG; PAM sequence: AAG
aaggcccagagactgatctg

SEQ ID NO: 29849 - DNA, 20 bp, Artificial Sequence
  Description of Artificial Sequence: Synthetic oligonucleotide
  Target: SCNA; (+) strand; PAM type: NRG; PAM sequence: AGG
aggcccagagactgatctga

SEQ ID NO: 29850 - DNA, 20 bp, Artificial Sequence
  Description of Artificial Sequence: Synthetic oligonucleotide
  Target: SCNA; (+) strand; PAM type: NRG; PAM sequence: AAG
agagactgatctgaaggcaa

SEQ ID NO: 29851 - DNA, 20 bp, Artificial Sequence
  Description of Artificial Sequence: Synthetic oligonucleotide
  Target: SCNA; (+) strand; PAM type: NRG; PAM sequence: TGG
gcctttattttttattgcaa

SEQ ID NO: 29852 - DNA, 20 bp, Artificial Sequence
  Description of Artificial Sequence: Synthetic oligonucleotide
  Target: SCNA; (+) strand; PAM type: NRG; PAM sequence: GAG
ctttattttttattgcaatg

SEQ ID NO: 29853 - DNA, 20 bp, Artificial Sequence
  Description of Artificial Sequence: Synthetic oligonucleotide
  Target: SCNA; (+) strand; PAM type: NRG; PAM sequence: CAG
actgaacattatttgactat

SEQ ID NO: 29854 - DNA, 20 bp, Artificial Sequence
  Description of Artificial Sequence: Synthetic oligonucleotide
  Target: SCNA; (+) strand; PAM type: NRG; PAM sequence: AAG
ttatttgactatcagttgtg

SEQ ID NO: 29855 - DNA, 20 bp, Artificial Sequence
  Description of Artificial Sequence: Synthetic oligonucleotide
  Target: SCNA; (+) strand; PAM type: NRG; PAM sequence: TAG
tgactatcagttgtgaagtt

SEQ ID NO: 29856 - DNA, 20 bp, Artificial Sequence
  Description of Artificial Sequence: Synthetic oligonucleotide
  Target: SCNA; (+) strand; PAM type: NRG; PAM sequence: AAG
cagttgtgaagtttagtaaa

SEQ ID NO: 29857 - DNA, 20 bp, Artificial Sequence
  Description of Artificial Sequence: Synthetic oligonucleotide
  Target: SCNA; (+) strand; PAM type: NRG; PAM sequence: TGG
agtaaaaagattttcactaa

SEQ ID NO: 29858 - DNA, 20 bp, Artificial Sequence
  Description of Artificial Sequence: Synthetic oligonucleotide
  Target: SCNA; (+) strand; PAM type: NRG; PAM sequence: GGG
gtaaaaagattttcactaat

SEQ ID NO: 29859 - DNA, 20 bp, Artificial Sequence
  Description of Artificial Sequence: Synthetic oligonucleotide
  Target: SCNA; (+) strand; PAM type: NRG; PAM sequence: TGG
aaaagattttcactaatggg

SEQ ID NO: 29860 - DNA, 20 bp, Artificial Sequence
  Description of Artificial Sequence: Synthetic oligonucleotide
  Target: SCNA; (+) strand; PAM type: NRG; PAM sequence: TGG
tttaatatttatgaatgtga

SEQ ID NO: 29861 - DNA, 20 bp, Artificial Sequence
  Description of Artificial Sequence: Synthetic oligonucleotide
  Target: SCNA; (+) strand; PAM type: NRG; PAM sequence: CAG
tatttatgaatgtgatggtt

SEQ ID NO: 29862 - DNA, 20 bp, Artificial Sequence
  Description of Artificial Sequence: Synthetic oligonucleotide
  Target: SCNA; (+) strand; PAM type: NRG; PAM sequence: AAG
aattttctccaatgttttgc

SEQ ID NO: 29863 - DNA, 20 bp, Artificial Sequence
  Description of Artificial Sequence: Synthetic oligonucleotide
  Target: SCNA; (+) strand; PAM type: NRG; PAM sequence: TGG
ttaataatcatctttacaaa

SEQ ID NO: 29864 - DNA, 20 bp, Artificial Sequence
  Description of Artificial Sequence: Synthetic oligonucleotide
  Target: SCNA; (+) strand; PAM type: NRG; PAM sequence: GAG
ttctctatttatttctacct

SEQ ID NO: 29865 - DNA, 20 bp, Artificial Sequence
  Description of Artificial Sequence: Synthetic oligonucleotide
  Target: SCNA; (+) strand; PAM type: NRG; PAM sequence: CAG
catttcttaatttttttatt

SEQ ID NO: 29866 - DNA, 20 bp, Artificial Sequence
  Description of Artificial Sequence: Synthetic oligonucleotide
  Target: SCNA; (+) strand; PAM type: NRG; PAM sequence: TAG
cagtcctgttattctcactg

SEQ ID NO: 29867 - DNA, 20 bp, Artificial Sequence
  Description of Artificial Sequence: Synthetic oligonucleotide
  Target: SCNA; (+) strand; PAM type: NRG; PAM sequence: AGG
agtcctgttattctcactgt

SEQ ID NO: 29868 - DNA, 20 bp, Artificial Sequence
  Description of Artificial Sequence: Synthetic oligonucleotide
  Target: SCNA; (+) strand; PAM type: NRG; PAM sequence: AAG
tctcactgtaggatttttaa

SEQ ID NO: 29869 - DNA, 20 bp, Artificial Sequence
  Description of Artificial Sequence: Synthetic oligonucleotide
  Target: SCNA; (+) strand; PAM type: NRG; PAM sequence: TGG
actgtaggatttttaaaagc

SEQ ID NO: 29870 - DNA, 20 bp, Artificial Sequence
  Description of Artificial Sequence: Synthetic oligonucleotide
  Target: SCNA; (+) strand; PAM type: NRG; PAM sequence: CAG
aaatccttcaactgtgaatt

SEQ ID NO: 29871 - DNA, 20 bp, Artificial Sequence
  Description of Artificial Sequence: Synthetic oligonucleotide
  Target: SCNA; (+) strand; PAM type: NRG; PAM sequence: GAG
tgtgaattcagcaatgtttt

SEQ ID NO: 29872 - DNA, 20 bp, Artificial Sequence
  Description of Artificial Sequence: Synthetic oligonucleotide
  Target: SCNA; (+) strand; PAM type: NRG; PAM sequence: CAG
ttcagcaatgttttgagttc

SEQ ID NO: 29873 - DNA, 20 bp, Artificial Sequence
  Description of Artificial Sequence: Synthetic oligonucleotide
  Target: SCNA; (+) strand; PAM type: NRG; PAM sequence: AGG
tcagcaatgttttgagttcc

SEQ ID NO: 29874 - DNA, 20 bp, Artificial Sequence
  Description of Artificial Sequence: Synthetic oligonucleotide
  Target: SCNA; (+) strand; PAM type: NRG; PAM sequence: GGG
cagcaatgttttgagttcca

SEQ ID NO: 29875 - DNA, 20 bp, Artificial Sequence
  Description of Artificial Sequence: Synthetic oligonucleotide
  Target: SCNA; (+) strand; PAM type: NRG; PAM sequence: TGG
ttgagttccagggattcatc

SEQ ID NO: 29876 - DNA, 20 bp, Artificial Sequence
  Description of Artificial Sequence: Synthetic oligonucleotide
  Target: SCNA; (+) strand; PAM type: NRG; PAM sequence: TAG
tccagggattcatctggcat

SEQ ID NO: 29877 - DNA, 20 bp, Artificial Sequence
  Description of Artificial Sequence: Synthetic oligonucleotide
  Target: SCNA; (+) strand; PAM type: NRG; PAM sequence: AGG
ccagggattcatctggcatt

SEQ ID NO: 29878 - DNA, 20 bp, Artificial Sequence
  Description of Artificial Sequence: Synthetic oligonucleotide
  Target: SCNA; (+) strand; PAM type: NRG; PAM sequence: AAG
ggcattaggctgaccttgtc

SEQ ID NO: 29879 - DNA, 20 bp, Artificial Sequence
  Description of Artificial Sequence: Synthetic oligonucleotide
  Target: SCNA; (+) strand; PAM type: NRG; PAM sequence: AAG
aagcataaacatcaacatta

SEQ ID NO: 29880 - DNA, 20 bp, Artificial Sequence
  Description of Artificial Sequence: Synthetic oligonucleotide
  Target: SCNA; (+) strand; PAM type: NRG; PAM sequence: AAG
caacattaaagaaaatattt

SEQ ID NO: 29881 - DNA, 20 bp, Artificial Sequence
  Description of Artificial Sequence: Synthetic oligonucleotide
  Target: SCNA; (+) strand; PAM type: NRG; PAM sequence: AAG
agaaaatatttaagaaatga

SEQ ID NO: 29882 - DNA, 20 bp, Artificial Sequence
  Description of Artificial Sequence: Synthetic oligonucleotide
  Target: SCNA; (+) strand; PAM type: NRG; PAM sequence: AGG
gaaaatatttaagaaatgaa

SEQ ID NO: 29883 - DNA, 20 bp, Artificial Sequence
  Description of Artificial Sequence: Synthetic oligonucleotide
  Target: SCNA; (+) strand; PAM type: NRG; PAM sequence: AAG
tgaaaggcctgaatcaaaat

SEQ ID NO: 29884 - DNA, 20 bp, Artificial Sequence
  Description of Artificial Sequence: Synthetic oligonucleotide
  Target: SCNA; (+) strand; PAM type: NRG; PAM sequence: GAG
aaaggcctgaatcaaaataa

SEQ ID NO: 29885 - DNA, 20 bp, Artificial Sequence
  Description of Artificial Sequence: Synthetic oligonucleotide
  Target: SCNA; (+) strand; PAM type: NRG; PAM sequence: AGG
aaggcctgaatcaaaataag

SEQ ID NO: 29886 - DNA, 20 bp, Artificial Sequence
  Description of Artificial Sequence: Synthetic oligonucleotide
  Target: SCNA; (+) strand; PAM type: NRG; PAM sequence: CAG
aaataagaggtcaaattttc

SEQ ID NO: 29887 - DNA, 20 bp, Artificial Sequence
  Description of Artificial Sequence: Synthetic oligonucleotide
  Target: SCNA; (+) strand; PAM type: NRG; PAM sequence: AGG
aataagaggtcaaattttcc

SEQ ID NO: 29888 - DNA, 20 bp, Artificial Sequence
  Description of Artificial Sequence: Synthetic oligonucleotide
  Target: SCNA; (+) strand; PAM type: NRG; PAM sequence: GGG
ataagaggtcaaattttcca

SEQ ID NO: 29889 - DNA, 20 bp, Artificial Sequence
  Description of Artificial Sequence: Synthetic oligonucleotide
  Target: SCNA; (+) strand; PAM type: NRG; PAM sequence: AAG
ctttctgctgtaattaccta

SEQ ID NO: 29890 - DNA, 20 bp, Artificial Sequence
  Description of Artificial Sequence: Synthetic oligonucleotide
  Target: SCNA; (+) strand; PAM type: NRG; PAM sequence: TGG
ctgtaattacctaaagactg

SEQ ID NO: 29891 - DNA, 20 bp, Artificial Sequence
  Description of Artificial Sequence: Synthetic oligonucleotide
  Target: SCNA; (+) strand; PAM type: NRG; PAM sequence: TAG
aattacctaaagactgtggt

SEQ ID NO: 29892 - DNA, 20 bp, Artificial Sequence
  Description of Artificial Sequence: Synthetic oligonucleotide
  Target: SCNA; (+) strand; PAM type: NRG; PAM sequence: GAG
actgtggttagataattatt

SEQ ID NO: 29893 - DNA, 20 bp, Artificial Sequence
  Description of Artificial Sequence: Synthetic oligonucleotide
  Target: SCNA; (+) strand; PAM type: NRG; PAM sequence: AGG
ctgtggttagataattattg

SEQ ID NO: 29894 - DNA, 20 bp, Artificial Sequence
  Description of Artificial Sequence: Synthetic oligonucleotide
  Target: SCNA; (+) strand; PAM type: NRG; PAM sequence: GGG
tgtggttagataattattga

SEQ ID NO: 29895 - DNA, 20 bp, Artificial Sequence
  Description of Artificial Sequence: Synthetic oligonucleotide
  Target: SCNA; (+) strand; PAM type: NRG; PAM sequence: TAG
aattgtcccttttctctata

SEQ ID NO: 29896 - DNA, 20 bp, Artificial Sequence
  Description of Artificial Sequence: Synthetic oligonucleotide
  Target: SCNA; (+) strand; PAM type: NRG; PAM sequence: GAG
gatcaccacattaattaaac

SEQ ID NO: 29897 - DNA, 20 bp, Artificial Sequence
  Description of Artificial Sequence: Synthetic oligonucleotide
  Target: SCNA; (+) strand; PAM type: NRG; PAM sequence: GAG
tcaccacattaattaaacga

SEQ ID NO: 29898 - DNA, 20 bp, Artificial Sequence
  Description of Artificial Sequence: Synthetic oligonucleotide
  Target: SCNA; (+) strand; PAM type: NRG; PAM sequence: TGG
taattaaacgagagtctcac

SEQ ID NO: 29899 - DNA, 20 bp, Artificial Sequence
  Description of Artificial Sequence: Synthetic oligonucleotide
  Target: SCNA; (+) strand; PAM type: NRG; PAM sequence: GGG
aattaaacgagagtctcact

SEQ ID NO: 29900 - DNA, 20 bp, Artificial Sequence
  Description of Artificial Sequence: Synthetic oligonucleotide
  Target: SCNA; (+) strand; PAM type: NRG; PAM sequence: CAG
aacgagagtctcactgggaa

SEQ ID NO: 29901 - DNA, 20 bp, Artificial Sequence
  Description of Artificial Sequence: Synthetic oligonucleotide
  Target: SCNA; (+) strand; PAM type: NRG; PAM sequence: AGG
acgagagtctcactgggaac

SEQ ID NO: 29902 - DNA, 20 bp, Artificial Sequence
  Description of Artificial Sequence: Synthetic oligonucleotide
  Target: SCNA; (+) strand; PAM type: NRG; PAM sequence: AAG
ggttgctgttctgcatcttt

SEQ ID NO: 29903 - DNA, 20 bp, Artificial Sequence
  Description of Artificial Sequence: Synthetic oligonucleotide
  Target: SCNA; (+) strand; PAM type: NRG; PAM sequence: TAG
tctgcatctttaagtatttt

SEQ ID NO: 29904 - DNA, 20 bp, Artificial Sequence
  Description of Artificial Sequence: Synthetic oligonucleotide
  Target: SCNA; (+) strand; PAM type: NRG; PAM sequence: AAG
ttttagtactttattttcaa

SEQ ID NO: 29905 - DNA, 20 bp, Artificial Sequence
  Description of Artificial Sequence: Synthetic oligonucleotide
  Target: SCNA; (+) strand; PAM type: NRG; PAM sequence: GAG
ttagtactttattttcaaaa

SEQ ID NO: 29906 - DNA, 20 bp, Artificial Sequence
  Description of Artificial Sequence: Synthetic oligonucleotide
  Target: SCNA; (+) strand; PAM type: NRG; PAM sequence: AAG
ctttattttcaaaagagaaa

SEQ ID NO: 29907 - DNA, 20 bp, Artificial Sequence
  Description of Artificial Sequence: Synthetic oligonucleotide
  Target: SCNA; (+) strand; PAM type: NRG; PAM sequence: AAG
aaaagagaaaaagaaccact

SEQ ID NO: 29908 - DNA, 20 bp, Artificial Sequence
  Description of Artificial Sequence: Synthetic oligonucleotide
  Target: SCNA; (+) strand; PAM type: NRG; PAM sequence: AAG
agagaaaaagaaccactaag

SEQ ID NO: 29909 - DNA, 20 bp, Artificial Sequence
  Description of Artificial Sequence: Synthetic oligonucleotide
  Target: SCNA; (+) strand; PAM type: NRG; PAM sequence: AAG
gaaaaagaaccactaagaag

SEQ ID NO: 29910 - DNA, 20 bp, Artificial Sequence
  Description of Artificial Sequence: Synthetic oligonucleotide
  Target: SCNA; (+) strand; PAM type: NRG; PAM sequence: CAG
ctaagaagaagattgcttct

SEQ ID NO: 29911 - DNA, 20 bp, Artificial Sequence
  Description of Artificial Sequence: Synthetic oligonucleotide
  Target: SCNA; (+) strand; PAM type: NRG; PAM sequence: CAG
cagccaaattttctgatata

SEQ ID NO: 29912 - DNA, 20 bp, Artificial Sequence
  Description of Artificial Sequence: Synthetic oligonucleotide
  Target: SCNA; (+) strand; PAM type: NRG; PAM sequence: AAG
tgatatacagatattctcaa

SEQ ID NO: 29913 - DNA, 20 bp, Artificial Sequence
  Description of Artificial Sequence: Synthetic oligonucleotide
  Target: SCNA; (+) strand; PAM type: NRG; PAM sequence: AAG
tacagatattctcaaaagac

SEQ ID NO: 29914 - DNA, 20 bp, Artificial Sequence
  Description of Artificial Sequence: Synthetic oligonucleotide
  Target: SCNA; (+) strand; PAM type: NRG; PAM sequence: AAG
cacacacacacacacccccc

SEQ ID NO: 29915 - DNA, 20 bp, Artificial Sequence
  Description of Artificial Sequence: Synthetic oligonucleotide
  Target: SCNA; (+) strand; PAM type: NRG; PAM sequence: AGG
acacacacacacacccccca

SEQ ID NO: 29916 - DNA, 20 bp, Artificial Sequence
  Description of Artificial Sequence: Synthetic oligonucleotide
  Target: SCNA; (+) strand; PAM type: NRG; PAM sequence: TGG
acacacaccccccaaggctc

SEQ ID NO: 29917 - DNA, 20 bp, Artificial Sequence
  Description of Artificial Sequence: Synthetic oligonucleotide
  Target: SCNA; (+) strand; PAM type: NRG; PAM sequence: AAG
cttatttttgcacattttaa

SEQ ID NO: 29918 - DNA, 20 bp, Artificial Sequence
  Description of Artificial Sequence: Synthetic oligonucleotide
  Target: SCNA; (+) strand; PAM type: NRG; PAM sequence: AGG
ttatttttgcacattttaaa

SEQ ID NO: 29919 - DNA, 20 bp, Artificial Sequence
  Description of Artificial Sequence: Synthetic oligonucleotide
  Target: SCNA; (+) strand; PAM type: NRG; PAM sequence: GAG
atttttgcacattttaaaag

SEQ ID NO: 29920 - DNA, 20 bp, Artificial Sequence
  Description of Artificial Sequence: Synthetic oligonucleotide
  Target: SCNA; (+) strand; PAM type: NRG; PAM sequence: AGG
tttttgcacattttaaaagg

SEQ ID NO: 29921 - DNA, 20 bp, Artificial Sequence
  Description of Artificial Sequence: Synthetic oligonucleotide
  Target: SCNA; (+) strand; PAM type: NRG; PAM sequence: GAG
tctctgatctgatttcactt

SEQ ID NO: 29922 - DNA, 20 bp, Artificial Sequence
  Description of Artificial Sequence: Synthetic oligonucleotide
  Target: SCNA; (+) strand; PAM type: NRG; PAM sequence: CAG
gctaataaaaaaatacaaat

SEQ ID NO: 29923 - DNA, 20 bp, Artificial Sequence
  Description of Artificial Sequence: Synthetic oligonucleotide
  Target: SCNA; (+) strand; PAM type: NRG; PAM sequence: AGG
ctaataaaaaaatacaaatc

SEQ ID NO: 29924 - DNA, 20 bp, Artificial Sequence
  Description of Artificial Sequence: Synthetic oligonucleotide
  Target: SCNA; (+) strand; PAM type: NRG; PAM sequence: AAG
atcaggtgcttgctgtgatc

SEQ ID NO: 29925 - DNA, 20 bp, Artificial Sequence
  Description of Artificial Sequence: Synthetic oligonucleotide
  Target: SCNA; (+) strand; PAM type: NRG; PAM sequence: AAG
ttgctgtgatcaagatgcta

SEQ ID NO: 29926 - DNA, 20 bp, Artificial Sequence
  Description of Artificial Sequence: Synthetic oligonucleotide
  Target: SCNA; (+) strand; PAM type: NRG; PAM sequence: AAG
ttacactgcttcataaatgt

SEQ ID NO: 29927 - DNA, 20 bp, Artificial Sequence
  Description of Artificial Sequence: Synthetic oligonucleotide
  Target: SCNA; (+) strand; PAM type: NRG; PAM sequence: AGG
tacactgcttcataaatgta

SEQ ID NO: 29928 - DNA, 20 bp, Artificial Sequence
  Description of Artificial Sequence: Synthetic oligonucleotide
  Target: SCNA; (+) strand; PAM type: NRG; PAM sequence: AAG
ttcataaatgtaaggtgtta

SEQ ID NO: 29929 - DNA, 20 bp, Artificial Sequence
  Description of Artificial Sequence: Synthetic oligonucleotide
  Target: SCNA; (+) strand; PAM type: NRG; PAM sequence: TAG
aaatgtaaggtgttaaagct

SEQ ID NO: 29930 - DNA, 20 bp, Artificial Sequence
  Description of Artificial Sequence: Synthetic oligonucleotide
  Target: SCNA; (+) strand; PAM type: NRG; PAM sequence: GAG
gtaaggtgttaaagcttagt

SEQ ID NO: 29931 - DNA, 20 bp, Artificial Sequence
  Description of Artificial Sequence: Synthetic oligonucleotide
  Target: SCNA; (+) strand; PAM type: NRG; PAM sequence: AAG
gtgttaaagcttagtgagac

SEQ ID NO: 29932 - DNA, 20 bp, Artificial Sequence
  Description of Artificial Sequence: Synthetic oligonucleotide
  Target: SCNA; (+) strand; PAM type: NRG; PAM sequence: AAG
ttaaagcttagtgagacaag

SEQ ID NO: 29933 - DNA, 20 bp, Artificial Sequence
  Description of Artificial Sequence: Synthetic oligonucleotide
  Target: SCNA; (+) strand; PAM type: NRG; PAM sequence: CAG
taaactgataattgattaac

SEQ ID NO: 29934 - DNA, 20 bp, Artificial Sequence
  Description of Artificial Sequence: Synthetic oligonucleotide
  Target: SCNA; (+) strand; PAM type: NRG; PAM sequence: AGG
aaactgataattgattaacc

SEQ ID NO: 29935 - DNA, 20 bp, Artificial Sequence
  Description of Artificial Sequence: Synthetic oligonucleotide
  Target: SCNA; (+) strand; PAM type: NRG; PAM sequence: GGG
aactgataattgattaacca

SEQ ID NO: 29936 - DNA, 20 bp, Artificial Sequence
  Description of Artificial Sequence: Synthetic oligonucleotide
  Target: SCNA; (+) strand; PAM type: NRG; PAM sequence: TAG
gggtgctatacaaatctacc

SEQ ID NO: 29937 - DNA, 20 bp, Artificial Sequence
  Description of Artificial Sequence: Synthetic oligonucleotide
  Target: SCNA; (+) strand; PAM type: NRG; PAM sequence: GAG
gtgctatacaaatctaccta

SEQ ID NO: 29938 - DNA, 20 bp, Artificial Sequence
  Description of Artificial Sequence: Synthetic oligonucleotide
  Target: SCNA; (+) strand; PAM type: NRG; PAM sequence: AGG
tgctatacaaatctacctag

SEQ ID NO: 29939 - DNA, 20 bp, Artificial Sequence
  Description of Artificial Sequence: Synthetic oligonucleotide
  Target: SCNA; (+) strand; PAM type: NRG; PAM sequence: GGG
gctatacaaatctacctaga

SEQ ID NO: 29940 - DNA, 20 bp, Artificial Sequence
  Description of Artificial Sequence: Synthetic oligonucleotide
  Target: SCNA; (+) strand; PAM type: NRG; PAM sequence: CAG
ctacctagagggtgccttcc

SEQ ID NO: 29941 - DNA, 20 bp, Artificial Sequence
  Description of Artificial Sequence: Synthetic oligonucleotide
  Target: SCNA; (+) strand; PAM type: NRG; PAM sequence: AGG
tacctagagggtgccttccc

SEQ ID NO: 29942 - DNA, 20 bp, Artificial Sequence
  Description of Artificial Sequence: Synthetic oligonucleotide
  Target: SCNA; (+) strand; PAM type: NRG; PAM sequence: TGG
ttcccaggttaatgcaatta

SEQ ID NO: 29943 - DNA, 20 bp, Artificial Sequence
  Description of Artificial Sequence: Synthetic oligonucleotide
  Target: SCNA; (+) strand; PAM type: NRG; PAM sequence: GGG
tcccaggttaatgcaattat

SEQ ID NO: 29944 - DNA, 20 bp, Artificial Sequence
  Description of Artificial Sequence: Synthetic oligonucleotide
  Target: SCNA; (+) strand; PAM type: NRG; PAM sequence: GAG
ccaggttaatgcaattatgg

SEQ ID NO: 29945 - DNA, 20 bp, Artificial Sequence
  Description of Artificial Sequence: Synthetic oligonucleotide
  Target: SCNA; (+) strand; PAM type: NRG; PAM sequence: AAG
gttaatgcaattatgggaga

SEQ ID NO: 29946 - DNA, 20 bp, Artificial Sequence
  Description of Artificial Sequence: Synthetic oligonucleotide
  Target: SCNA; (+) strand; PAM type: NRG; PAM sequence: TGG
caattatgggagaaagatcc

SEQ ID NO: 29947 - DNA, 20 bp, Artificial Sequence
  Description of Artificial Sequence: Synthetic oligonucleotide
  Target: SCNA; (+) strand; PAM type: NRG; PAM sequence: TGG
gggagaaagatcctggctcc

SEQ ID NO: 29948 - DNA, 20 bp, Artificial Sequence
  Description of Artificial Sequence: Synthetic oligonucleotide
  Target: SCNA; (+) strand; PAM type: NRG; PAM sequence: CAG
aagatcctggctcctggcta

SEQ ID NO: 29949 - DNA, 20 bp, Artificial Sequence
  Description of Artificial Sequence: Synthetic oligonucleotide
  Target: SCNA; (+) strand; PAM type: NRG; PAM sequence: AAG
ggctacagaaatgccaacta

SEQ ID NO: 29950 - DNA, 20 bp, Artificial Sequence
  Description of Artificial Sequence: Synthetic oligonucleotide
  Target: SCNA; (+) strand; PAM type: NRG; PAM sequence: TGG
atccaccccatccttcactt

SEQ ID NO: 29951 - DNA, 20 bp, Artificial Sequence
  Description of Artificial Sequence: Synthetic oligonucleotide
  Target: SCNA; (+) strand; PAM type: NRG; PAM sequence: GAG
ccaccccatccttcactttg

SEQ ID NO: 29952 - DNA, 20 bp, Artificial Sequence
  Description of Artificial Sequence: Synthetic oligonucleotide
  Target: SCNA; (+) strand; PAM type: NRG; PAM sequence: AGG
caccccatccttcactttgg

SEQ ID NO: 29953 - DNA, 20 bp, Artificial Sequence
  Description of Artificial Sequence: Synthetic oligonucleotide
  Target: SCNA; (+) strand; PAM type: NRG; PAM sequence: AAG
ttcactttggaggatgcgtt

SEQ ID NO: 29954 - DNA, 20 bp, Artificial Sequence
  Description of Artificial Sequence: Synthetic oligonucleotide
  Target: SCNA; (+) strand; PAM type: NRG; PAM sequence: AAG
caaaatgaaaatacaaacaa

SEQ ID NO: 29955 - DNA, 20 bp, Artificial Sequence
  Description of Artificial Sequence: Synthetic oligonucleotide
  Target: SCNA; (+) strand; PAM type: NRG; PAM sequence: GAG
caaacaaaagcaaataaacc

SEQ ID NO: 29956 - DNA, 20 bp, Artificial Sequence
  Description of Artificial Sequence: Synthetic oligonucleotide
  Target: SCNA; (+) strand; PAM type: NRG; PAM sequence: GAG
cgagtgataataaataaacc

SEQ ID NO: 29957 - DNA, 20 bp, Artificial Sequence
  Description of Artificial Sequence: Synthetic oligonucleotide
  Target: SCNA; (+) strand; PAM type: NRG; PAM sequence: CAG
aataaataaaccgagtgact

SEQ ID NO: 29958 - DNA, 20 bp, Artificial Sequence
  Description of Artificial Sequence: Synthetic oligonucleotide
  Target: SCNA; (+) strand; PAM type: NRG; PAM sequence: CAG
cagtttccttatccattttc

SEQ ID NO: 29959 - DNA, 20 bp, Artificial Sequence
  Description of Artificial Sequence: Synthetic oligonucleotide
  Target: SCNA; (+) strand; PAM type: NRG; PAM sequence: TAG
tccagttacctttttttttt

SEQ ID NO: 29960 - DNA, 20 bp, Artificial Sequence
  Description of Artificial Sequence: Synthetic oligonucleotide
  Target: SCNA; (+) strand; PAM type: NRG; PAM sequence: AGG
ccagttaccttttttttttt

SEQ ID NO: 29961 - DNA, 20 bp, Artificial Sequence
  Description of Artificial Sequence: Synthetic oligonucleotide
  Target: SCNA; (+) strand; PAM type: NRG; PAM sequence: CAG
ttacctttttttttttaggc

SEQ ID NO: 29962 - DNA, 20 bp, Artificial Sequence
  Description of Artificial Sequence: Synthetic oligonucleotide
  Target: SCNA; (+) strand; PAM type: NRG; PAM sequence: TAG
aggccagtctgcatgtccac

SEQ ID NO: 29963 - DNA, 20 bp, Artificial Sequence
  Description of Artificial Sequence: Synthetic oligonucleotide
  Target: SCNA; (+) strand; PAM type: NRG; PAM sequence: AAG
ccagtctgcatgtccactag

SEQ ID NO: 29964 - DNA, 20 bp, Artificial Sequence
  Description of Artificial Sequence: Synthetic oligonucleotide
  Target: SCNA; (+) strand; PAM type: NRG; PAM sequence: AAG
ctgcatgtccactagaagaa

SEQ ID NO: 29965 - DNA, 20 bp, Artificial Sequence
  Description of Artificial Sequence: Synthetic oligonucleotide
  Target: SCNA; (+) strand; PAM type: NRG; PAM sequence: AGG
tgcatgtccactagaagaaa

SEQ ID NO: 29966 - DNA, 20 bp, Artificial Sequence
  Description of Artificial Sequence: Synthetic oligonucleotide
  Target: SCNA; (+) strand; PAM type: NRG; PAM sequence: GGG
gcatgtccactagaagaaaa

SEQ ID NO: 29967 - DNA, 20 bp, Artificial Sequence
  Description of Artificial Sequence: Synthetic oligonucleotide
  Target: SCNA; (+) strand; PAM type: NRG; PAM sequence: TGG
ccactagaagaaaagggacc

SEQ ID NO: 29968 - DNA, 20 bp, Artificial Sequence
  Description of Artificial Sequence: Synthetic oligonucleotide
  Target: SCNA; (+) strand; PAM type: NRG; PAM sequence: GGG
cactagaagaaaagggacct

SEQ ID NO: 29969 - DNA, 20 bp, Artificial Sequence
  Description of Artificial Sequence: Synthetic oligonucleotide
  Target: SCNA; (+) strand; PAM type: NRG; PAM sequence: CAG
aagggacctgggttcttcat

SEQ ID NO: 29970 - DNA, 20 bp, Artificial Sequence
  Description of Artificial Sequence: Synthetic oligonucleotide
  Target: SCNA; (+) strand; PAM type: NRG; PAM sequence: TAG
gttcttcatcagcccatcct

SEQ ID NO: 29971 - DNA, 20 bp, Artificial Sequence
  Description of Artificial Sequence: Synthetic oligonucleotide
  Target: SCNA; (+) strand; PAM type: NRG; PAM sequence: TAG
atcagcccatccttagatct

SEQ ID NO: 29972 - DNA, 20 bp, Artificial Sequence
  Description of Artificial Sequence: Synthetic oligonucleotide
  Target: SCNA; (+) strand; PAM type: NRG; PAM sequence: TAG
tcttagtgcacatatgcacc

SEQ ID NO: 29973 - DNA, 20 bp, Artificial Sequence
  Description of Artificial Sequence: Synthetic oligonucleotide
  Target: SCNA; (+) strand; PAM type: NRG; PAM sequence: AAG
agtgcacatatgcacctagt

SEQ ID NO: 29974 - DNA, 20 bp, Artificial Sequence
  Description of Artificial Sequence: Synthetic oligonucleotide
  Target: SCNA; (+) strand; PAM type: NRG; PAM sequence: GAG
atatgcacctagtaagtgcc

SEQ ID NO: 29975 - DNA, 20 bp, Artificial Sequence
  Description of Artificial Sequence: Synthetic oligonucleotide
  Target: SCNA; (+) strand; PAM type: NRG; PAM sequence: AAG
tgaatgactgtacctttcct

SEQ ID NO: 29976 - DNA, 20 bp, Artificial Sequence
  Description of Artificial Sequence: Synthetic oligonucleotide
  Target: SCNA; (+) strand; PAM type: NRG; PAM sequence: CAG
cttcgttgattatccttcaa

SEQ ID NO: 29977 - DNA, 20 bp, Artificial Sequence
  Description of Artificial Sequence: Synthetic oligonucleotide
  Target: SCNA; (+) strand; PAM type: NRG; PAM sequence: GAG
tcgttgattatccttcaaca

SEQ ID NO: 29978 - DNA, 20 bp, Artificial Sequence
  Description of Artificial Sequence: Synthetic oligonucleotide
  Target: SCNA; (+) strand; PAM type: NRG; PAM sequence: CAG
aacttctctccctatgtgct

SEQ ID NO: 29979 - DNA, 20 bp, Artificial Sequence
  Description of Artificial Sequence: Synthetic oligonucleotide
  Target: SCNA; (+) strand; PAM type: NRG; PAM sequence: TGG
tcagtcaaatgctctcccat

SEQ ID NO: 29980 - DNA, 20 bp, Artificial Sequence
  Description of Artificial Sequence: Synthetic oligonucleotide
  Target: SCNA; (+) strand; PAM type: NRG; PAM sequence: GAG
aaatgctctcccattggact

SEQ ID NO: 29981 - DNA, 20 bp, Artificial Sequence
  Description of Artificial Sequence: Synthetic oligonucleotide
  Target: SCNA; (+) strand; PAM type: NRG; PAM sequence: CAG
ctctcccattggactgagtt

SEQ ID NO: 29982 - DNA, 20 bp, Artificial Sequence
  Description of Artificial Sequence: Synthetic oligonucleotide
  Target: SCNA; (+) strand; PAM type: NRG; PAM sequence: GAG
agcataaactgccatgtttt

SEQ ID NO: 29983 - DNA, 20 bp, Artificial Sequence
  Description of Artificial Sequence: Synthetic oligonucleotide
  Target: SCNA; (+) strand; PAM type: NRG; PAM sequence: TGG
ctgccatgttttgagatgat

SEQ ID NO: 29984 - DNA, 20 bp, Artificial Sequence
  Description of Artificial Sequence: Synthetic oligonucleotide
  Target: SCNA; (+) strand; PAM type: NRG; PAM sequence: AAG
tgttttgagatgattggtgt

SEQ ID NO: 29985 - DNA, 20 bp, Artificial Sequence
  Description of Artificial Sequence: Synthetic oligonucleotide
  Target: SCNA; (+) strand; PAM type: NRG; PAM sequence: GAG
gtaagcgaatgtcctctcct

SEQ ID NO: 29986 - DNA, 20 bp, Artificial Sequence
  Description of Artificial Sequence: Synthetic oligonucleotide
  Target: SCNA; (+) strand; PAM type: NRG; PAM sequence: GAG
aatgtcctctcctgagttgc

SEQ ID NO: 29987 - DNA, 20 bp, Artificial Sequence
  Description of Artificial Sequence: Synthetic oligonucleotide
  Target: SCNA; (+) strand; PAM type: NRG; PAM sequence: AAG
ctcctgagttgcgagaatct

SEQ ID NO: 29988 - DNA, 20 bp, Artificial Sequence
  Description of Artificial Sequence: Synthetic oligonucleotide
  Target: SCNA; (+) strand; PAM type: NRG; PAM sequence: GAG
cctgagttgcgagaatctaa

SEQ ID NO: 29989 - DNA, 20 bp, Artificial Sequence
  Description of Artificial Sequence: Synthetic oligonucleotide
  Target: SCNA; (+) strand; PAM type: NRG; PAM sequence: CAG
gagttgcgagaatctaagag

SEQ ID NO: 29990 - DNA, 20 bp, Artificial Sequence
  Description of Artificial Sequence: Synthetic oligonucleotide
  Target: SCNA; (+) strand; PAM type: NRG; PAM sequence: AGG
agttgcgagaatctaagagc

SEQ ID NO: 29991 - DNA, 20 bp, Artificial Sequence
  Description of Artificial Sequence: Synthetic oligonucleotide
  Target: SCNA; (+) strand; PAM type: NRG; PAM sequence: TAG
acatgcttctctactttcta

SEQ ID NO: 29992 - DNA, 20 bp, Artificial Sequence
  Description of Artificial Sequence: Synthetic oligonucleotide
  Target: SCNA; (+) strand; PAM type: NRG; PAM sequence: AAG
actgtctaacaaataatgcc

SEQ ID NO: 29993 - DNA, 20 bp, Artificial Sequence
  Description of Artificial Sequence: Synthetic oligonucleotide
  Target: SCNA; (+) strand; PAM type: NRG; PAM sequence: AAG
acaaataatgccaagtgaaa

SEQ ID NO: 29994 - DNA, 20 bp, Artificial Sequence
  Description of Artificial Sequence: Synthetic oligonucleotide
  Target: SCNA; (+) strand; PAM type: NRG; PAM sequence: AGG
caaataatgccaagtgaaaa

SEQ ID NO: 29995 - DNA, 20 bp, Artificial Sequence
  Description of Artificial Sequence: Synthetic oligonucleotide
  Target: SCNA; (+) strand; PAM type: NRG; PAM sequence: GGG
aaataatgccaagtgaaaaa

SEQ ID NO: 29996 - DNA, 20 bp, Artificial Sequence
  Description of Artificial Sequence: Synthetic oligonucleotide
  Target: SCNA; (+) strand; PAM type: NRG; PAM sequence: AAG
aatgaatgaataaattttgt

SEQ ID NO: 29997 - DNA, 20 bp, Artificial Sequence
  Description of Artificial Sequence: Synthetic oligonucleotide
  Target: SCNA; (+) strand; PAM type: NRG; PAM sequence: TGG
taaattttgtaagatgccaa

SEQ ID NO: 29998 - DNA, 20 bp, Artificial Sequence
  Description of Artificial Sequence: Synthetic oligonucleotide
  Target: SCNA; (+) strand; PAM type: NRG; PAM sequence: CAG
aagatgccaatggaaaaaaa

SEQ ID NO: 29999 - DNA, 20 bp, Artificial Sequence
  Description of Artificial Sequence: Synthetic oligonucleotide
  Target: SCNA; (+) strand; PAM type: NRG; PAM sequence: AAG
atggaaaaaaacagaaaatc

SEQ ID NO: 30000 - DNA, 20 bp, Artificial Sequence
  Description of Artificial Sequence: Synthetic oligonucleotide
  Target: SCNA; (+) strand; PAM type: NRG; PAM sequence: GAG
ggaaaaaaacagaaaatcaa

SEQ ID NO: 30001 - DNA, 20 bp, Artificial Sequence
  Description of Artificial Sequence: Synthetic oligonucleotide
  Target: SCNA; (+) strand; PAM type: NRG; PAM sequence: TAG
ctaactccatttaattgttt

SEQ ID NO: 30002 - DNA, 20 bp, Artificial Sequence
  Description of Artificial Sequence: Synthetic oligonucleotide
  Target: SCNA; (+) strand; PAM type: NRG; PAM sequence: AAG
ccatttaattgttttagact

SEQ ID NO: 30003 - DNA, 20 bp, Artificial Sequence
  Description of Artificial Sequence: Synthetic oligonucleotide
  Target: SCNA; (+) strand; PAM type: NRG; PAM sequence: CAG
gttttagactaagaatccct

SEQ ID NO: 30004 - DNA, 20 bp, Artificial Sequence
  Description of Artificial Sequence: Synthetic oligonucleotide
  Target: SCNA; (+) strand; PAM type: NRG; PAM sequence: TAG
aagaatccctcagtgatacc

SEQ ID NO: 30005 - DNA, 20 bp, Artificial Sequence
  Description of Artificial Sequence: Synthetic oligonucleotide
  Target: SCNA; (+) strand; PAM type: NRG; PAM sequence: TAG
cagtgatacctagccaaaat

SEQ ID NO: 30006 - DNA, 20 bp, Artificial Sequence
  Description of Artificial Sequence: Synthetic oligonucleotide
  Target: SCNA; (+) strand; PAM type: NRG; PAM sequence: AGG
agtgatacctagccaaaatt

SEQ ID NO: 30007 - DNA, 20 bp, Artificial Sequence
  Description of Artificial Sequence: Synthetic oligonucleotide
  Target: SCNA; (+) strand; PAM type: NRG; PAM sequence: CAG
acctagccaaaattaggatt

SEQ ID NO: 30008 - DNA, 20 bp, Artificial Sequence
  Description of Artificial Sequence: Synthetic oligonucleotide
  Target: SCNA; (+) strand; PAM type: NRG; PAM sequence: AAG
aggattcagatccaaaataa

SEQ ID NO: 30009 - DNA, 20 bp, Artificial Sequence
  Description of Artificial Sequence: Synthetic oligonucleotide
  Target: SCNA; (+) strand; PAM type: NRG; PAM sequence: AAG
ataaaagatactgttgcccc

SEQ ID NO: 30010 - DNA, 20 bp, Artificial Sequence
  Description of Artificial Sequence: Synthetic oligonucleotide
  Target: SCNA; (+) strand; PAM type: NRG; PAM sequence: TAG
aaagatactgttgccccaag

SEQ ID NO: 30011 - DNA, 20 bp, Artificial Sequence
  Description of Artificial Sequence: Synthetic oligonucleotide
  Target: SCNA; (+) strand; PAM type: NRG; PAM sequence: AAG
atatcataatttgttacaat

SEQ ID NO: 30012 - DNA, 20 bp, Artificial Sequence
  Description of Artificial Sequence: Synthetic oligonucleotide
  Target: SCNA; (+) strand; PAM type: NRG; PAM sequence: AAG
aaactgttataccacatttc

SEQ ID NO: 30013 - DNA, 20 bp, Artificial Sequence
  Description of Artificial Sequence: Synthetic oligonucleotide
  Target: SCNA; (+) strand; PAM type: NRG; PAM sequence: TAG
ctttatcttccttttatgca

SEQ ID NO: 30014 - DNA, 20 bp, Artificial Sequence
  Description of Artificial Sequence: Synthetic oligonucleotide
  Target: SCNA; (+) strand; PAM type: NRG; PAM sequence: TAG
atcttccttttatgcataga

SEQ ID NO: 30015 - DNA, 20 bp, Artificial Sequence
  Description of Artificial Sequence: Synthetic oligonucleotide
  Target: SCNA; (+) strand; PAM type: NRG; PAM sequence: TAG
ttccttttatgcatagatag

SEQ ID NO: 30016 - DNA, 20 bp, Artificial Sequence
  Description of Artificial Sequence: Synthetic oligonucleotide
  Target: SCNA; (+) strand; PAM type: NRG; PAM sequence: TAG
cttttatgcatagatagtag

SEQ ID NO: 30017 - DNA, 20 bp, Artificial Sequence
  Description of Artificial Sequence: Synthetic oligonucleotide
  Target: SCNA; (+) strand; PAM type: NRG; PAM sequence: GAG
tttatgcatagatagtagta

SEQ ID NO: 30018 - DNA, 20 bp, Artificial Sequence
  Description of Artificial Sequence: Synthetic oligonucleotide
  Target: SCNA; (+) strand; PAM type: NRG; PAM sequence: AAG
atagatagtagtagagcatt

SEQ ID NO: 30019 - DNA, 20 bp, Artificial Sequence
  Description of Artificial Sequence: Synthetic oligonucleotide
  Target: SCNA; (+) strand; PAM type: NRG; PAM sequence: TGG
tagagcattaagaacatgca

SEQ ID NO: 30020 - DNA, 20 bp, Artificial Sequence
  Description of Artificial Sequence: Synthetic oligonucleotide
  Target: SCNA; (+) strand; PAM type: NRG; PAM sequence: GAG
aacatgcatggctatcacct

SEQ ID NO: 30021 - DNA, 20 bp, Artificial Sequence
  Description of Artificial Sequence: Synthetic oligonucleotide
  Target: SCNA; (+) strand; PAM type: NRG; PAM sequence: AGG
acatgcatggctatcacctg

SEQ ID NO: 30022 - DNA, 20 bp, Artificial Sequence
  Description of Artificial Sequence: Synthetic oligonucleotide
  Target: SCNA; (+) strand; PAM type: NRG; PAM sequence: TAG
tgattgtaaattcacattcc

SEQ ID NO: 30023 - DNA, 20 bp, Artificial Sequence
  Description of Artificial Sequence: Synthetic oligonucleotide
  Target: SCNA; (+) strand; PAM type: NRG; PAM sequence: AGG
gattgtaaattcacattcct

SEQ ID NO: 30024 - DNA, 20 bp, Artificial Sequence
  Description of Artificial Sequence: Synthetic oligonucleotide
  Target: SCNA; (+) strand; PAM type: NRG; PAM sequence: CGG
ttgtctcttaactactgaat

SEQ ID NO: 30025 - DNA, 20 bp, Artificial Sequence
  Description of Artificial Sequence: Synthetic oligonucleotide
  Target: SCNA; (+) strand; PAM type: NRG; PAM sequence: TGG
aactactgaatcggaatctt

SEQ ID NO: 30026 - DNA, 20 bp, Artificial Sequence
  Description of Artificial Sequence: Synthetic oligonucleotide
  Target: SCNA; (+) strand; PAM type: NRG; PAM sequence: GGG
actactgaatcggaatcttt

SEQ ID NO: 30027 - DNA, 20 bp, Artificial Sequence
  Description of Artificial Sequence: Synthetic oligonucleotide
  Target: SCNA; (+) strand; PAM type: NRG; PAM sequence: GAG
tactgaatcggaatctttgg

SEQ ID NO: 30028 - DNA, 20 bp, Artificial Sequence
  Description of Artificial Sequence: Synthetic oligonucleotide
  Target: SCNA; (+) strand; PAM type: NRG; PAM sequence: CAG
aatctttgggagtgaactga

SEQ ID NO: 30029 - DNA, 20 bp, Artificial Sequence
  Description of Artificial Sequence: Synthetic oligonucleotide
  Target: SCNA; (+) strand; PAM type: NRG; PAM sequence: AGG
atctttgggagtgaactgac

SEQ ID NO: 30030 - DNA, 20 bp, Artificial Sequence
  Description of Artificial Sequence: Synthetic oligonucleotide
  Target: SCNA; (+) strand; PAM type: NRG; PAM sequence: AAG
ggaatctgaattttaaaaat

SEQ ID NO: 30031 - DNA, 20 bp, Artificial Sequence
  Description of Artificial Sequence: Synthetic oligonucleotide
  Target: SCNA; (+) strand; PAM type: NRG; PAM sequence: AGG
gaatctgaattttaaaaata

SEQ ID NO: 30032 - DNA, 20 bp, Artificial Sequence
  Description of Artificial Sequence: Synthetic oligonucleotide
  Target: SCNA; (+) strand; PAM type: NRG; PAM sequence: CAG
aattttaaaaataaggtctt

SEQ ID NO: 30033 - DNA, 20 bp, Artificial Sequence
  Description of Artificial Sequence: Synthetic oligonucleotide
  Target: SCNA; (+) strand; PAM type: NRG; PAM sequence: AGG
attttaaaaataaggtcttc

SEQ ID NO: 30034 - DNA, 20 bp, Artificial Sequence
  Description of Artificial Sequence: Synthetic oligonucleotide
  Target: SCNA; (+) strand; PAM type: NRG; PAM sequence: AAG
aggtgattctcatgcatcta

SEQ ID NO: 30035 - DNA, 20 bp, Artificial Sequence
  Description of Artificial Sequence: Synthetic oligonucleotide
  Target: SCNA; (+) strand; PAM type: NRG; PAM sequence: AAG
aactgctttaatatataaca

SEQ ID NO: 30036 - DNA, 20 bp, Artificial Sequence
  Description of Artificial Sequence: Synthetic oligonucleotide
  Target: SCNA; (+) strand; PAM type: NRG; PAM sequence: AAG
atatataacaaagaaaccca

SEQ ID NO: 30037 - DNA, 20 bp, Artificial Sequence
  Description of Artificial Sequence: Synthetic oligonucleotide
  Target: SCNA; (+) strand; PAM type: NRG; PAM sequence: GAG
atataacaaagaaacccaaa

SEQ ID NO: 30038 - DNA, 20 bp, Artificial Sequence
  Description of Artificial Sequence: Synthetic oligonucleotide
  Target: SCNA; (+) strand; PAM type: NRG; PAM sequence: AGG
tataacaaagaaacccaaag

SEQ ID NO: 30039 - DNA, 20 bp, Artificial Sequence
  Description of Artificial Sequence: Synthetic oligonucleotide
  Target: SCNA; (+) strand; PAM type: NRG; PAM sequence: GGG
ataacaaagaaacccaaaga

SEQ ID NO: 30040 - DNA, 20 bp, Artificial Sequence
  Description of Artificial Sequence: Synthetic oligonucleotide
  Target: SCNA; (+) strand; PAM type: NRG; PAM sequence: GAG
aaacccaaagagggacactt

SEQ ID NO: 30041 - DNA, 20 bp, Artificial Sequence
  Description of Artificial Sequence: Synthetic oligonucleotide
  Target: SCNA; (+) strand; PAM type: NRG; PAM sequence: AGG
aacccaaagagggacacttg

SEQ ID NO: 30042 - DNA, 20 bp, Artificial Sequence
  Description of Artificial Sequence: Synthetic oligonucleotide
  Target: SCNA; (+) strand; PAM type: NRG; PAM sequence: CAG
tttcaatatatcttcttttg

SEQ ID NO: 30043 - DNA, 20 bp, Artificial Sequence
  Description of Artificial Sequence: Synthetic oligonucleotide
  Target: SCNA; (+) strand; PAM type: NRG; PAM sequence: GAG
tcaatatatcttcttttgca

SEQ ID NO: 30044 - DNA, 20 bp, Artificial Sequence
  Description of Artificial Sequence: Synthetic oligonucleotide
  Target: SCNA; (+) strand; PAM type: NRG; PAM sequence: TAG
tcttcttttgcagagattaa

SEQ ID NO: 30045 - DNA, 20 bp, Artificial Sequence
  Description of Artificial Sequence: Synthetic oligonucleotide
  Target: SCNA; (+) strand; PAM type: NRG; PAM sequence: TAG
atgttgttttatctgctgtt

SEQ ID NO: 30046 - DNA, 20 bp, Artificial Sequence
  Description of Artificial Sequence: Synthetic oligonucleotide
  Target: SCNA; (+) strand; PAM type: NRG; PAM sequence: TGG
ttagaattttacatatgcat

SEQ ID NO: 30047 - DNA, 20 bp, Artificial Sequence
  Description of Artificial Sequence: Synthetic oligonucleotide
  Target: SCNA; (+) strand; PAM type: NRG; PAM sequence: AAG
catcttcttttactgacaaa

SEQ ID NO: 30048 - DNA, 20 bp, Artificial Sequence
  Description of Artificial Sequence: Synthetic oligonucleotide
  Target: SCNA; (+) strand; PAM type: NRG; PAM sequence: AGG
atcttcttttactgacaaaa

SEQ ID NO: 30049 - DNA, 20 bp, Artificial Sequence
  Description of Artificial Sequence: Synthetic oligonucleotide
  Target: SCNA; (+) strand; PAM type: NRG; PAM sequence: TGG
ctgacaaaaaggcttttctc

SEQ ID NO: 30050 - DNA, 20 bp, Artificial Sequence
  Description of Artificial Sequence: Synthetic oligonucleotide
  Target: SCNA; (+) strand; PAM type: NRG; PAM sequence: GAG
gacaaaaaggcttttctctg

SEQ ID NO: 30051 - DNA, 20 bp, Artificial Sequence
  Description of Artificial Sequence: Synthetic oligonucleotide
  Target: SCNA; (+) strand; PAM type: NRG; PAM sequence: AAG
ttttctctggagaaaataaa

SEQ ID NO: 30052 - DNA, 20 bp, Artificial Sequence
  Description of Artificial Sequence: Synthetic oligonucleotide
  Target: SCNA; (+) strand; PAM type: NRG; PAM sequence: AGG
tttctctggagaaaataaaa

SEQ ID NO: 30053 - DNA, 20 bp, Artificial Sequence
  Description of Artificial Sequence: Synthetic oligonucleotide
  Target: SCNA; (+) strand; PAM type: NRG; PAM sequence: CAG
ctctggagaaaataaaaagg

SEQ ID NO: 30054 - DNA, 20 bp, Artificial Sequence
  Description of Artificial Sequence: Synthetic oligonucleotide
  Target: SCNA; (+) strand; PAM type: NRG; PAM sequence: GAG
ataaaaaggcagctttccct

SEQ ID NO: 30055 - DNA, 20 bp, Artificial Sequence
  Description of Artificial Sequence: Synthetic oligonucleotide
  Target: SCNA; (+) strand; PAM type: NRG; PAM sequence: GAG
aaaaaggcagctttccctga

SEQ ID NO: 30056 - DNA, 20 bp, Artificial Sequence
  Description of Artificial Sequence: Synthetic oligonucleotide
  Target: SCNA; (+) strand; PAM type: NRG; PAM sequence: TAG
tccctgagagcacacacttc

SEQ ID NO: 30057 - DNA, 20 bp, Artificial Sequence
  Description of Artificial Sequence: Synthetic oligonucleotide
  Target: SCNA; (+) strand; PAM type: NRG; PAM sequence: AAG
gagagcacacacttctagca

SEQ ID NO: 30058 - DNA, 20 bp, Artificial Sequence
  Description of Artificial Sequence: Synthetic oligonucleotide
  Target: SCNA; (+) strand; PAM type: NRG; PAM sequence: AAG
gccccaatccatatgactct

SEQ ID NO: 30059 - DNA, 20 bp, Artificial Sequence
  Description of Artificial Sequence: Synthetic oligonucleotide
  Target: SCNA; (+) strand; PAM type: NRG; PAM sequence: CAG
caatccatatgactctaaga

SEQ ID NO: 30060 - DNA, 20 bp, Artificial Sequence
  Description of Artificial Sequence: Synthetic oligonucleotide
  Target: SCNA; (+) strand; PAM type: NRG; PAM sequence: GAG
atccatatgactctaagaca

SEQ ID NO: 30061 - DNA, 20 bp, Artificial Sequence
  Description of Artificial Sequence: Synthetic oligonucleotide
  Target: SCNA; (+) strand; PAM type: NRG; PAM sequence: TAG
acagagtgatttccaccttc

SEQ ID NO: 30062 - DNA, 20 bp, Artificial Sequence
  Description of Artificial Sequence: Synthetic oligonucleotide
  Target: SCNA; (+) strand; PAM type: NRG; PAM sequence: AAG
tagtccttactttcttgcaa

SEQ ID NO: 30063 - DNA, 20 bp, Artificial Sequence
  Description of Artificial Sequence: Synthetic oligonucleotide
  Target: SCNA; (+) strand; PAM type: NRG; PAM sequence: AGG
agtccttactttcttgcaaa

SEQ ID NO: 30064 - DNA, 20 bp, Artificial Sequence
  Description of Artificial Sequence: Synthetic oligonucleotide
  Target: SCNA; (+) strand; PAM type: NRG; PAM sequence: GGG
gtccttactttcttgcaaaa

SEQ ID NO: 30065 - DNA, 20 bp, Artificial Sequence
  Description of Artificial Sequence: Synthetic oligonucleotide
  Target: SCNA; (+) strand; PAM type: NRG; PAM sequence: GGG
tccttactttcttgcaaaag

SEQ ID NO: 30066 - DNA, 20 bp, Artificial Sequence
  Description of Artificial Sequence: Synthetic oligonucleotide
  Target: SCNA; (+) strand; PAM type: NRG; PAM sequence: TGG
ctttcaaatctcattactga

SEQ ID NO: 30067 - DNA, 20 bp, Artificial Sequence
  Description of Artificial Sequence: Synthetic oligonucleotide
  Target: SCNA; (+) strand; PAM type: NRG; PAM sequence: TGG
atggtcccatcttttattac

SEQ ID NO: 30068 - DNA, 20 bp, Artificial Sequence
  Description of Artificial Sequence: Synthetic oligonucleotide
  Target: SCNA; (+) strand; PAM type: NRG; PAM sequence: TGG
tttattactggtgttatcaa

SEQ ID NO: 30069 - DNA, 20 bp, Artificial Sequence
  Description of Artificial Sequence: Synthetic oligonucleotide
  Target: SCNA; (+) strand; PAM type: NRG; PAM sequence: GGG
ttattactggtgttatcaat

SEQ ID NO: 30070 - DNA, 20 bp, Artificial Sequence
  Description of Artificial Sequence: Synthetic oligonucleotide
  Target: SCNA; (+) strand; PAM type: NRG; PAM sequence: CAG
tgttatcaatgggatgcttg

SEQ ID NO: 30071 - DNA, 20 bp, Artificial Sequence
  Description of Artificial Sequence: Synthetic oligonucleotide
  Target: SCNA; (+) strand; PAM type: NRG; PAM sequence: CAG
tatcaatgggatgcttgcag

SEQ ID NO: 30072 - DNA, 20 bp, Artificial Sequence
  Description of Artificial Sequence: Synthetic oligonucleotide
  Target: SCNA; (+) strand; PAM type: NRG; PAM sequence: AAG
tgggatgcttgcagcagctt

SEQ ID NO: 30073 - DNA, 20 bp, Artificial Sequence
  Description of Artificial Sequence: Synthetic oligonucleotide
  Target: SCNA; (+) strand; PAM type: NRG; PAM sequence: TGG
cttgcagcagcttaagtatg

SEQ ID NO: 30074 - DNA, 20 bp, Artificial Sequence
  Description of Artificial Sequence: Synthetic oligonucleotide
  Target: SCNA; (+) strand; PAM type: NRG; PAM sequence: AAG
gcagcttaagtatgtggata

SEQ ID NO: 30075 - DNA, 20 bp, Artificial Sequence
  Description of Artificial Sequence: Synthetic oligonucleotide
  Target: SCNA; (+) strand; PAM type: NRG; PAM sequence: AAG
gcttaagtatgtggataaag

SEQ ID NO: 30076 - DNA, 20 bp, Artificial Sequence
  Description of Artificial Sequence: Synthetic oligonucleotide
  Target: SCNA; (+) strand; PAM type: NRG; PAM sequence: AGG
cttaagtatgtggataaaga

SEQ ID NO: 30077 - DNA, 20 bp, Artificial Sequence
  Description of Artificial Sequence: Synthetic oligonucleotide
  Target: SCNA; (+) strand; PAM type: NRG; PAM sequence: CGG
aagaaggaatgcacaatata

SEQ ID NO: 30078 - DNA, 20 bp, Artificial Sequence
  Description of Artificial Sequence: Synthetic oligonucleotide
  Target: SCNA; (+) strand; PAM type: NRG; PAM sequence: AAG
cggtactgaatatttttaaa

SEQ ID NO: 30079 - DNA, 20 bp, Artificial Sequence
  Description of Artificial Sequence: Synthetic oligonucleotide
  Target: SCNA; (+) strand; PAM type: NRG; PAM sequence: TGG
tactgaatatttttaaaaag

SEQ ID NO: 30080 - DNA, 20 bp, Artificial Sequence
  Description of Artificial Sequence: Synthetic oligonucleotide
  Target: SCNA; (+) strand; PAM type: NRG; PAM sequence: CAG
atttttaaaaagtggtcttt

SEQ ID NO: 30081 - DNA, 20 bp, Artificial Sequence
  Description of Artificial Sequence: Synthetic oligonucleotide
  Target: SCNA; (+) strand; PAM type: NRG; PAM sequence: TGG
tttcagaatgtctgtatgtg

SEQ ID NO: 30082 - DNA, 20 bp, Artificial Sequence
  Description of Artificial Sequence: Synthetic oligonucleotide
  Target: SCNA; (+) strand; PAM type: NRG; PAM sequence: GGG
ttcagaatgtctgtatgtgt

SEQ ID NO: 30083 - DNA, 20 bp, Artificial Sequence
  Description of Artificial Sequence: Synthetic oligonucleotide
  Target: SCNA; (+) strand; PAM type: NRG; PAM sequence: GGG
tcagaatgtctgtatgtgtg

SEQ ID NO: 30084 - DNA, 20 bp, Artificial Sequence
  Description of Artificial Sequence: Synthetic oligonucleotide
  Target: SCNA; (+) strand; PAM type: NRG; PAM sequence: GGG
cagaatgtctgtatgtgtgg

SEQ ID NO: 30085 - DNA, 20 bp, Artificial Sequence
  Description of Artificial Sequence: Synthetic oligonucleotide
  Target: SCNA; (+) strand; PAM type: NRG; PAM sequence: TAG
tatgtgtgggggcccatgct

SEQ ID NO: 30086 - DNA, 20 bp, Artificial Sequence
  Description of Artificial Sequence: Synthetic oligonucleotide
  Target: SCNA; (+) strand; PAM type: NRG; PAM sequence: AGG
atgtgtgggggcccatgctt

SEQ ID NO: 30087 - DNA, 20 bp, Artificial Sequence
  Description of Artificial Sequence: Synthetic oligonucleotide
  Target: SCNA; (+) strand; PAM type: NRG; PAM sequence: CAG
gcttaggcatatgtgcatgc

SEQ ID NO: 30088 - DNA, 20 bp, Artificial Sequence
  Description of Artificial Sequence: Synthetic oligonucleotide
  Target: SCNA; (+) strand; PAM type: NRG; PAM sequence: TGG
aaaccaatgttttacattaa

SEQ ID NO: 30089 - DNA, 20 bp, Artificial Sequence
  Description of Artificial Sequence: Synthetic oligonucleotide
  Target: SCNA; (+) strand; PAM type: NRG; PAM sequence: TGG
caatgttttacattaatggc

SEQ ID NO: 30090 - DNA, 20 bp, Artificial Sequence
  Description of Artificial Sequence: Synthetic oligonucleotide
  Target: SCNA; (+) strand; PAM type: NRG; PAM sequence: CAG
tacattaatggctggaattc

SEQ ID NO: 30091 - DNA, 20 bp, Artificial Sequence
  Description of Artificial Sequence: Synthetic oligonucleotide
  Target: SCNA; (+) strand; PAM type: NRG; PAM sequence: AAG
ggctggaattccagaaaaat

SEQ ID NO: 30092 - DNA, 20 bp, Artificial Sequence
  Description of Artificial Sequence: Synthetic oligonucleotide
  Target: SCNA; (+) strand; PAM type: NRG; PAM sequence: AAG
tgtattttctaaaccattaa

SEQ ID NO: 30093 - DNA, 20 bp, Artificial Sequence
  Description of Artificial Sequence: Synthetic oligonucleotide
  Target: SCNA; (+) strand; PAM type: NRG; PAM sequence: TAG
tttctaaaccattaaaagtt

SEQ ID NO: 30094 - DNA, 20 bp, Artificial Sequence
  Description of Artificial Sequence: Synthetic oligonucleotide
  Target: SCNA; (+) strand; PAM type: NRG; PAM sequence: TGG
ctaaaccattaaaagtttag

SEQ ID NO: 30095 - DNA, 20 bp, Artificial Sequence
  Description of Artificial Sequence: Synthetic oligonucleotide
  Target: SCNA; (+) strand; PAM type: NRG; PAM sequence: TAG
agtttagtggaactcattaa

SEQ ID NO: 30096 - DNA, 20 bp, Artificial Sequence
  Description of Artificial Sequence: Synthetic oligonucleotide
  Target: SCNA; (+) strand; PAM type: NRG; PAM sequence: CAG
tatcatctctctgtatattt

SEQ ID NO: 30097 - DNA, 20 bp, Artificial Sequence
  Description of Artificial Sequence: Synthetic oligonucleotide
  Target: SCNA; (+) strand; PAM type: NRG; PAM sequence: AAG
catctctctgtatatttcag

SEQ ID NO: 30098 - DNA, 20 bp, Artificial Sequence
  Description of Artificial Sequence: Synthetic oligonucleotide
  Target: SCNA; (+) strand; PAM type: NRG; PAM sequence: AAG
atatttcagaagtacatttt

SEQ ID NO: 30099 - DNA, 20 bp, Artificial Sequence
  Description of Artificial Sequence: Synthetic oligonucleotide
  Target: SCNA; (+) strand; PAM type: NRG; PAM sequence: CAG
gaagtacattttaagtgtaa

SEQ ID NO: 30100 - DNA, 20 bp, Artificial Sequence
  Description of Artificial Sequence: Synthetic oligonucleotide
  Target: SCNA; (+) strand; PAM type: NRG; PAM sequence: TAG
tacattttaagtgtaacagc

SEQ ID NO: 30101 - DNA, 20 bp, Artificial Sequence
  Description of Artificial Sequence: Synthetic oligonucleotide
  Target: SCNA; (+) strand; PAM type: NRG; PAM sequence: AGG
acattttaagtgtaacagct

SEQ ID NO: 30102 - DNA, 20 bp, Artificial Sequence
  Description of Artificial Sequence: Synthetic oligonucleotide
  Target: SCNA; (+) strand; PAM type: NRG; PAM sequence: GGG
cattttaagtgtaacagcta

SEQ ID NO: 30103 - DNA, 20 bp, Artificial Sequence
  Description of Artificial Sequence: Synthetic oligonucleotide
  Target: SCNA; (+) strand; PAM type: NRG; PAM sequence: GGG
attttaagtgtaacagctag

SEQ ID NO: 30104 - DNA, 20 bp, Artificial Sequence
  Description of Artificial Sequence: Synthetic oligonucleotide
  Target: SCNA; (+) strand; PAM type: NRG; PAM sequence: AAG
taactgtatgatttgaacac

SEQ ID NO: 30105 - DNA, 20 bp, Artificial Sequence
  Description of Artificial Sequence: Synthetic oligonucleotide
  Target: SCNA; (+) strand; PAM type: NRG; PAM sequence: AAG
tatgatttgaacacaagtac

SEQ ID NO: 30106 - DNA, 20 bp, Artificial Sequence
  Description of Artificial Sequence: Synthetic oligonucleotide
  Target: SCNA; (+) strand; PAM type: NRG; PAM sequence: AAG
cacaagtacaagaaatattc

SEQ ID NO: 30107 - DNA, 20 bp, Artificial Sequence
  Description of Artificial Sequence: Synthetic oligonucleotide
  Target: SCNA; (+) strand; PAM type: NRG; PAM sequence: AGG
acaagtacaagaaatattca

SEQ ID NO: 30108 - DNA, 20 bp, Artificial Sequence
  Description of Artificial Sequence: Synthetic oligonucleotide
  Target: SCNA; (+) strand; PAM type: NRG; PAM sequence: TAG
tttcttttcttttttttttt

SEQ ID NO: 30109 - DNA, 20 bp, Artificial Sequence
  Description of Artificial Sequence: Synthetic oligonucleotide
  Target: SCNA; (+) strand; PAM type: NRG; PAM sequence: AAG
ttcttttttttttttagatg

SEQ ID NO: 30110 - DNA, 20 bp, Artificial Sequence
  Description of Artificial Sequence: Synthetic oligonucleotide
  Target: SCNA; (+) strand; PAM type: NRG; PAM sequence: TAG
aagtctcactcttatcgccg

SEQ ID NO: 30111 - DNA, 20 bp, Artificial Sequence
  Description of Artificial Sequence: Synthetic oligonucleotide
  Target: SCNA; (+) strand; PAM type: NRG; PAM sequence: TAG
cactcttatcgccgtagcta

SEQ ID NO: 30112 - DNA, 20 bp, Artificial Sequence
  Description of Artificial Sequence: Synthetic oligonucleotide
  Target: SCNA; (+) strand; PAM type: NRG; PAM sequence: TGG
tcgccgtagctatagtgcaa

SEQ ID NO: 30113 - DNA, 20 bp, Artificial Sequence
  Description of Artificial Sequence: Synthetic oligonucleotide
  Target: SCNA; (+) strand; PAM type: NRG; PAM sequence: CAG
atagtgcaatggcgctgtct

SEQ ID NO: 30114 - DNA, 20 bp, Artificial Sequence
  Description of Artificial Sequence: Synthetic oligonucleotide
  Target: SCNA; (+) strand; PAM type: NRG; PAM sequence: TAG
tcactgcaacctccgcctcc

SEQ ID NO: 30115 - DNA, 20 bp, Artificial Sequence
  Description of Artificial Sequence: Synthetic oligonucleotide
  Target: SCNA; (+) strand; PAM type: NRG; PAM sequence: AGG
cactgcaacctccgcctcct

SEQ ID NO: 30116 - DNA, 20 bp, Artificial Sequence
  Description of Artificial Sequence: Synthetic oligonucleotide
  Target: SCNA; (+) strand; PAM type: NRG; PAM sequence: AAG
aacctccgcctcctaggtta

SEQ ID NO: 30117 - DNA, 20 bp, Artificial Sequence
  Description of Artificial Sequence: Synthetic oligonucleotide
  Target: SCNA; (+) strand; PAM type: NRG; PAM sequence: CAG
ttaaagcaattctcctgcct

SEQ ID NO: 30118 - DNA, 20 bp, Artificial Sequence
  Description of Artificial Sequence: Synthetic oligonucleotide
  Target: SCNA; (+) strand; PAM type: NRG; PAM sequence: TAG
ttctcctgcctcagcctccg

SEQ ID NO: 30119 - DNA, 20 bp, Artificial Sequence
  Description of Artificial Sequence: Synthetic oligonucleotide
  Target: SCNA; (+) strand; PAM type: NRG; PAM sequence: TAG
tcctgcctcagcctccgtag

SEQ ID NO: 30120 - DNA, 20 bp, Artificial Sequence
  Description of Artificial Sequence: Synthetic oligonucleotide
  Target: SCNA; (+) strand; PAM type: NRG; PAM sequence: TGG
gcctcagcctccgtagtagc

SEQ ID NO: 30121 - DNA, 20 bp, Artificial Sequence
  Description of Artificial Sequence: Synthetic oligonucleotide
  Target: SCNA; (+) strand; PAM type: NRG; PAM sequence: GGG
cctcagcctccgtagtagct

SEQ ID NO: 30122 - DNA, 20 bp, Artificial Sequence
  Description of Artificial Sequence: Synthetic oligonucleotide
  Target: SCNA; (+) strand; PAM type: NRG; PAM sequence: CAG
ctccgtagtagctgggatta

SEQ ID NO: 30123 - DNA, 20 bp, Artificial Sequence
  Description of Artificial Sequence: Synthetic oligonucleotide
  Target: SCNA; (+) strand; PAM type: NRG; PAM sequence: AGG
tccgtagtagctgggattac

SEQ ID NO: 30124 - DNA, 20 bp, Artificial Sequence
  Description of Artificial Sequence: Synthetic oligonucleotide
  Target: SCNA; (+) strand; PAM type: NRG; PAM sequence: TGG
cccactaatttttgtatttt

SEQ ID NO: 30125 - DNA, 20 bp, Artificial Sequence
  Description of Artificial Sequence: Synthetic oligonucleotide
  Target: SCNA; (+) strand; PAM type: NRG; PAM sequence: TAG
actaatttttgtatttttgg

SEQ ID NO: 30126 - DNA, 20 bp, Artificial Sequence
  Description of Artificial Sequence: Synthetic oligonucleotide
  Target: SCNA; (+) strand; PAM type: NRG; PAM sequence: GAG
taatttttgtatttttggta

SEQ ID NO: 30127 - DNA, 20 bp, Artificial Sequence
  Description of Artificial Sequence: Synthetic oligonucleotide
  Target: SCNA; (+) strand; PAM type: NRG; PAM sequence: TGG
tttgtatttttggtagagaa

SEQ ID NO: 30128 - DNA, 20 bp, Artificial Sequence
  Description of Artificial Sequence: Synthetic oligonucleotide
  Target: SCNA; (+) strand; PAM type: NRG; PAM sequence: GGG
ttgtatttttggtagagaat

SEQ ID NO: 30129 - DNA, 20 bp, Artificial Sequence
  Description of Artificial Sequence: Synthetic oligonucleotide
  Target: SCNA; (+) strand; PAM type: NRG; PAM sequence: TGG
gagaatgggtttcaccatgt

SEQ ID NO: 30130 - DNA, 20 bp, Artificial Sequence
  Description of Artificial Sequence: Synthetic oligonucleotide
  Target: SCNA; (+) strand; PAM type: NRG; PAM sequence: CAG
atgggtttcaccatgttgga

SEQ ID NO: 30131 - DNA, 20 bp, Artificial Sequence
  Description of Artificial Sequence: Synthetic oligonucleotide
  Target: SCNA; (+) strand; PAM type: NRG; PAM sequence: AGG
tgggtttcaccatgttggac

SEQ ID NO: 30132 - DNA, 20 bp, Artificial Sequence
  Description of Artificial Sequence: Synthetic oligonucleotide
  Target: SCNA; (+) strand; PAM type: NRG; PAM sequence: TGG
tttcaccatgttggacaggc

SEQ ID NO: 30133 - DNA, 20 bp, Artificial Sequence
  Description of Artificial Sequence: Synthetic oligonucleotide
  Target: SCNA; (+) strand; PAM type: NRG; PAM sequence: CAG
tggtcatgaactcctgacct

SEQ ID NO: 30134 - DNA, 20 bp, Artificial Sequence
  Description of Artificial Sequence: Synthetic oligonucleotide
  Target: SCNA; (+) strand; PAM type: NRG; PAM sequence: TGG
ctcagtcgatccacccgcct

SEQ ID NO: 30135 - DNA, 20 bp, Artificial Sequence
  Description of Artificial Sequence: Synthetic oligonucleotide
  Target: SCNA; (+) strand; PAM type: NRG; PAM sequence: AAG
ccacccgccttggcctccca

SEQ ID NO: 30136 - DNA, 20 bp, Artificial Sequence
  Description of Artificial Sequence: Synthetic oligonucleotide
  Target: SCNA; (+) strand; PAM type: NRG; PAM sequence: TGG
gccttggcctcccaaagtgc

SEQ ID NO: 30137 - DNA, 20 bp, Artificial Sequence
  Description of Artificial Sequence: Synthetic oligonucleotide
  Target: SCNA; (+) strand; PAM type: NRG; PAM sequence: CAG
cctcccaaagtgctggatta

SEQ ID NO: 30138 - DNA, 20 bp, Artificial Sequence
  Description of Artificial Sequence: Synthetic oligonucleotide
  Target: SCNA; (+) strand; PAM type: NRG; PAM sequence: AGG
ctcccaaagtgctggattac

SEQ ID NO: 30139 - DNA, 20 bp, Artificial Sequence
  Description of Artificial Sequence: Synthetic oligonucleotide
  Target: SCNA; (+) strand; PAM type: NRG; PAM sequence: TGG
ttacaggtgtccaccgcgcc

SEQ ID NO: 30140 - DNA, 20 bp, Artificial Sequence
  Description of Artificial Sequence: Synthetic oligonucleotide
  Target: SCNA; (+) strand; PAM type: NRG; PAM sequence: AAG
accgcgcctggccaatattc

SEQ ID NO: 30141 - DNA, 20 bp, Artificial Sequence
  Description of Artificial Sequence: Synthetic oligonucleotide
  Target: SCNA; (+) strand; PAM type: NRG; PAM sequence: CAG
ggccaatattcaagtttaca

SEQ ID NO: 30142 - DNA, 20 bp, Artificial Sequence
  Description of Artificial Sequence: Synthetic oligonucleotide
  Target: SCNA; (+) strand; PAM type: NRG; PAM sequence: AGG
gccaatattcaagtttacac

SEQ ID NO: 30143 - DNA, 20 bp, Artificial Sequence
  Description of Artificial Sequence: Synthetic oligonucleotide
  Target: SCNA; (+) strand; PAM type: NRG; PAM sequence: AAG
attcaagtttacacaggaaa

SEQ ID NO: 30144 - DNA, 20 bp, Artificial Sequence
  Description of Artificial Sequence: Synthetic oligonucleotide
  Target: SCNA; (+) strand; PAM type: NRG; PAM sequence: AAG
acctttacttatttactcat

SEQ ID NO: 30145 - DNA, 20 bp, Artificial Sequence
  Description of Artificial Sequence: Synthetic oligonucleotide
  Target: SCNA; (+) strand; PAM type: NRG; PAM sequence: TAG
cttatttactcataagcctc

SEQ ID NO: 30146 - DNA, 20 bp, Artificial Sequence
  Description of Artificial Sequence: Synthetic oligonucleotide
  Target: SCNA; (+) strand; PAM type: NRG; PAM sequence: TGG
cataagcctctagttctctc

SEQ ID NO: 30147 - DNA, 20 bp, Artificial Sequence
  Description of Artificial Sequence: Synthetic oligonucleotide
  Target: SCNA; (+) strand; PAM type: NRG; PAM sequence: CAG
gtaaatctcaacacatttcc

SEQ ID NO: 30148 - DNA, 20 bp, Artificial Sequence
  Description of Artificial Sequence: Synthetic oligonucleotide
  Target: SCNA; (+) strand; PAM type: NRG; PAM sequence: TGG
tcccagaaactaacatcttc

SEQ ID NO: 30149 - DNA, 20 bp, Artificial Sequence
  Description of Artificial Sequence: Synthetic oligonucleotide
  Target: SCNA; (+) strand; PAM type: NRG; PAM sequence: CAG
gctgacttctattaaaaatt

SEQ ID NO: 30150 - DNA, 20 bp, Artificial Sequence
  Description of Artificial Sequence: Synthetic oligonucleotide
  Target: SCNA; (+) strand; PAM type: NRG; PAM sequence: AAG
ttctattaaaaattcagaca

SEQ ID NO: 30151 - DNA, 20 bp, Artificial Sequence
  Description of Artificial Sequence: Synthetic oligonucleotide
  Target: SCNA; (+) strand; PAM type: NRG; PAM sequence: TGG
aagaaaaaaactgaatacaa

SEQ ID NO: 30152 - DNA, 20 bp, Artificial Sequence
  Description of Artificial Sequence: Synthetic oligonucleotide
  Target: SCNA; (+) strand; PAM type: NRG; PAM sequence: GAG
gaaaaaaactgaatacaatg

SEQ ID NO: 30153 - DNA, 20 bp, Artificial Sequence
  Description of Artificial Sequence: Synthetic oligonucleotide
  Target: SCNA; (+) strand; PAM type: NRG; PAM sequence: GAG
aaaaaactgaatacaatgga

SEQ ID NO: 30154 - DNA, 20 bp, Artificial Sequence
  Description of Artificial Sequence: Synthetic oligonucleotide
  Target: SCNA; (+) strand; PAM type: NRG; PAM sequence: GAG
aaaactgaatacaatggaga

SEQ ID NO: 30155 - DNA, 20 bp, Artificial Sequence
  Description of Artificial Sequence: Synthetic oligonucleotide
  Target: SCNA; (+) strand; PAM type: NRG; PAM sequence: CAG
tctcccattctctctctcta

SEQ ID NO: 30156 - DNA, 20 bp, Artificial Sequence
  Description of Artificial Sequence: Synthetic oligonucleotide
  Target: SCNA; (+) strand; PAM type: NRG; PAM sequence: CAG
catatcacctcctccaaaat

SEQ ID NO: 30157 - DNA, 20 bp, Artificial Sequence
  Description of Artificial Sequence: Synthetic oligonucleotide
  Target: SCNA; (+) strand; PAM type: NRG; PAM sequence: TAG
atcagttcatatctaactcc

SEQ ID NO: 30158 - DNA, 20 bp, Artificial Sequence
  Description of Artificial Sequence: Synthetic oligonucleotide
  Target: SCNA; (+) strand; PAM type: NRG; PAM sequence: TAG
tctaactcctagcacatttt

SEQ ID NO: 30159 - DNA, 20 bp, Artificial Sequence
  Description of Artificial Sequence: Synthetic oligonucleotide
  Target: SCNA; (+) strand; PAM type: NRG; PAM sequence: AAG
gtgtatatatatatacacaa

SEQ ID NO: 30160 - DNA, 20 bp, Artificial Sequence
  Description of Artificial Sequence: Synthetic oligonucleotide
  Target: SCNA; (+) strand; PAM type: NRG; PAM sequence: CAG
tatatatatatacacaaaag

SEQ ID NO: 30161 - DNA, 20 bp, Artificial Sequence
  Description of Artificial Sequence: Synthetic oligonucleotide
  Target: SCNA; (+) strand; PAM type: NRG; PAM sequence: AAG
atatatatatatatacacaa

SEQ ID NO: 30162 - DNA, 20 bp, Artificial Sequence
  Description of Artificial Sequence: Synthetic oligonucleotide
  Target: SCNA; (+) strand; PAM type: NRG; PAM sequence: CAG
tatatatatatacacaaaag

SEQ ID NO: 30163 - DNA, 20 bp, Artificial Sequence
  Description of Artificial Sequence: Synthetic oligonucleotide
  Target: SCNA; (+) strand; PAM type: NRG; PAM sequence: CAG
tatatatatatgctttcttg

SEQ ID NO: 30164 - DNA, 20 bp, Artificial Sequence
  Description of Artificial Sequence: Synthetic oligonucleotide
  Target: SCNA; (+) strand; PAM type: NRG; PAM sequence: AGG
atatatatatgctttcttgc

SEQ ID NO: 30165 - DNA, 20 bp, Artificial Sequence
  Description of Artificial Sequence: Synthetic oligonucleotide
  Target: SCNA; (+) strand; PAM type: NRG; PAM sequence: TAG
atatgctttcttgcaggtga

SEQ ID NO: 30166 - DNA, 20 bp, Artificial Sequence
  Description of Artificial Sequence: Synthetic oligonucleotide
  Target: SCNA; (+) strand; PAM type: NRG; PAM sequence: TGG
caggtgatagaatgcttttt

SEQ ID NO: 30167 - DNA, 20 bp, Artificial Sequence
  Description of Artificial Sequence: Synthetic oligonucleotide
  Target: SCNA; (+) strand; PAM type: NRG; PAM sequence: GAG
ggtgatagaatgcttttttg

SEQ ID NO: 30168 - DNA, 20 bp, Artificial Sequence
  Description of Artificial Sequence: Synthetic oligonucleotide
  Target: SCNA; (+) strand; PAM type: NRG; PAM sequence: AGG
gtgatagaatgcttttttgg

SEQ ID NO: 30169 - DNA, 20 bp, Artificial Sequence
  Description of Artificial Sequence: Synthetic oligonucleotide
  Target: SCNA; (+) strand; PAM type: NRG; PAM sequence: TGG
atagaatgcttttttggagg

SEQ ID NO: 30170 - DNA, 20 bp, Artificial Sequence
  Description of Artificial Sequence: Synthetic oligonucleotide
  Target: SCNA; (+) strand; PAM type: NRG; PAM sequence: TGG
cttttttggaggtggttttg

SEQ ID NO: 30171 - DNA, 20 bp, Artificial Sequence
  Description of Artificial Sequence: Synthetic oligonucleotide
  Target: SCNA; (+) strand; PAM type: NRG; PAM sequence: GGG
ttttttggaggtggttttgt

SEQ ID NO: 30172 - DNA, 20 bp, Artificial Sequence
  Description of Artificial Sequence: Synthetic oligonucleotide
  Target: SCNA; (+) strand; PAM type: NRG; PAM sequence: AAG
tctctattgttatattttaa

SEQ ID NO: 30173 - DNA, 20 bp, Artificial Sequence
  Description of Artificial Sequence: Synthetic oligonucleotide
  Target: SCNA; (+) strand; PAM type: NRG; PAM sequence: GAG
ttttgtttgtttgtttgttt

SEQ ID NO: 30174 - DNA, 20 bp, Artificial Sequence
  Description of Artificial Sequence: Synthetic oligonucleotide
  Target: SCNA; (+) strand; PAM type: NRG; PAM sequence: TGG
gtttgtttgtttgtttgaga

SEQ ID NO: 30175 - DNA, 20 bp, Artificial Sequence
  Description of Artificial Sequence: Synthetic oligonucleotide
  Target: SCNA; (+) strand; PAM type: NRG; PAM sequence: GAG
ttgtttgtttgtttgagatg

SEQ ID NO: 30176 - DNA, 20 bp, Artificial Sequence
  Description of Artificial Sequence: Synthetic oligonucleotide
  Target: SCNA; (+) strand; PAM type: NRG; PAM sequence: TAG
tgagatggagtctccctctg

SEQ ID NO: 30177 - DNA, 20 bp, Artificial Sequence
  Description of Artificial Sequence: Synthetic oligonucleotide
  Target: SCNA; (+) strand; PAM type: NRG; PAM sequence: CAG
tggagtctccctctgtagcc

SEQ ID NO: 30178 - DNA, 20 bp, Artificial Sequence
  Description of Artificial Sequence: Synthetic oligonucleotide
  Target: SCNA; (+) strand; PAM type: NRG; PAM sequence: AGG
ggagtctccctctgtagccc

SEQ ID NO: 30179 - DNA, 20 bp, Artificial Sequence
  Description of Artificial Sequence: Synthetic oligonucleotide
  Target: SCNA; (+) strand; PAM type: NRG; PAM sequence: TGG
tctccctctgtagcccaggc

SEQ ID NO: 30180 - DNA, 20 bp, Artificial Sequence
  Description of Artificial Sequence: Synthetic oligonucleotide
  Target: SCNA; (+) strand; PAM type: NRG; PAM sequence: GAG
tccctctgtagcccaggctg

SEQ ID NO: 30181 - DNA, 20 bp, Artificial Sequence
  Description of Artificial Sequence: Synthetic oligonucleotide
  Target: SCNA; (+) strand; PAM type: NRG; PAM sequence: CAG
ctgtagcccaggctggagtg

SEQ ID NO: 30182 - DNA, 20 bp, Artificial Sequence
  Description of Artificial Sequence: Synthetic oligonucleotide
  Target: SCNA; (+) strand; PAM type: NRG; PAM sequence: TGG
tagcccaggctggagtgcag

SEQ ID NO: 30183 - DNA, 20 bp, Artificial Sequence
  Description of Artificial Sequence: Synthetic oligonucleotide
  Target: SCNA; (+) strand; PAM type: NRG; PAM sequence: CAG
cccaggctggagtgcagtgg

SEQ ID NO: 30184 - DNA, 20 bp, Artificial Sequence
  Description of Artificial Sequence: Synthetic oligonucleotide
  Target: SCNA; (+) strand; PAM type: NRG; PAM sequence: AGG
ccaggctggagtgcagtggc

SEQ ID NO: 30185 - DNA, 20 bp, Artificial Sequence
  Description of Artificial Sequence: Synthetic oligonucleotide
  Target: SCNA; (+) strand; PAM type: NRG; PAM sequence: CGG
ggagtgcagtggcaggatct

SEQ ID NO: 30186 - DNA, 20 bp, Artificial Sequence
  Description of Artificial Sequence: Synthetic oligonucleotide
  Target: SCNA; (+) strand; PAM type: NRG; PAM sequence: CGG
tcactgcaacctctgcctcc

SEQ ID NO: 30187 - DNA, 20 bp, Artificial Sequence
  Description of Artificial Sequence: Synthetic oligonucleotide
  Target: SCNA; (+) strand; PAM type: NRG; PAM sequence: GGG
cactgcaacctctgcctccc

SEQ ID NO: 30188 - DNA, 20 bp, Artificial Sequence
  Description of Artificial Sequence: Synthetic oligonucleotide
  Target: SCNA; (+) strand; PAM type: NRG; PAM sequence: AAG
aacctctgcctcccgggttc

SEQ ID NO: 30189 - DNA, 20 bp, Artificial Sequence
  Description of Artificial Sequence: Synthetic oligonucleotide
  Target: SCNA; (+) strand; PAM type: NRG; PAM sequence: CAG
ttcaagtgactctcgtgcct

SEQ ID NO: 30190 - DNA, 20 bp, Artificial Sequence
  Description of Artificial Sequence: Synthetic oligonucleotide
  Target: SCNA; (+) strand; PAM type: NRG; PAM sequence: CAG
gactctcgtgcctcagcctc

SEQ ID NO: 30191 - DNA, 20 bp, Artificial Sequence
  Description of Artificial Sequence: Synthetic oligonucleotide
  Target: SCNA; (+) strand; PAM type: NRG; PAM sequence: GAG
ctctcgtgcctcagcctcca

SEQ ID NO: 30192 - DNA, 20 bp, Artificial Sequence
  Description of Artificial Sequence: Synthetic oligonucleotide
  Target: SCNA; (+) strand; PAM type: NRG; PAM sequence: TAG
tcgtgcctcagcctccagag

SEQ ID NO: 30193 - DNA, 20 bp, Artificial Sequence
  Description of Artificial Sequence: Synthetic oligonucleotide
  Target: SCNA; (+) strand; PAM type: NRG; PAM sequence: CAG
gcctcagcctccagagtagc

SEQ ID NO: 30194 - DNA, 20 bp, Artificial Sequence
  Description of Artificial Sequence: Synthetic oligonucleotide
  Target: SCNA; (+) strand; PAM type: NRG; PAM sequence: AGG
cctcagcctccagagtagcc

SEQ ID NO: 30195 - DNA, 20 bp, Artificial Sequence
  Description of Artificial Sequence: Synthetic oligonucleotide
  Target: SCNA; (+) strand; PAM type: NRG; PAM sequence: CAG
ctccagagtagccaggatta

SEQ ID NO: 30196 - DNA, 20 bp, Artificial Sequence
  Description of Artificial Sequence: Synthetic oligonucleotide
  Target: SCNA; (+) strand; PAM type: NRG; PAM sequence: AGG
tccagagtagccaggattac

SEQ ID NO: 30197 - DNA, 20 bp, Artificial Sequence
  Description of Artificial Sequence: Synthetic oligonucleotide
  Target: SCNA; (+) strand; PAM type: NRG; PAM sequence: TAG
tttttttttttttgtatttt

SEQ ID NO: 30198 - DNA, 20 bp, Artificial Sequence
  Description of Artificial Sequence: Synthetic oligonucleotide
  Target: SCNA; (+) strand; PAM type: NRG; PAM sequence: TAG
ttttttttttgtatttttag

SEQ ID NO: 30199 - DNA, 20 bp, Artificial Sequence
  Description of Artificial Sequence: Synthetic oligonucleotide
  Target: SCNA; (+) strand; PAM type: NRG; PAM sequence: GAG
ttttttttgtatttttagta

SEQ ID NO: 30200 - DNA, 20 bp, Artificial Sequence
  Description of Artificial Sequence: Synthetic oligonucleotide
  Target: SCNA; (+) strand; PAM type: NRG; PAM sequence: AAG
tttgtatttttagtagagac

SEQ ID NO: 30201 - DNA, 20 bp, Artificial Sequence
  Description of Artificial Sequence: Synthetic oligonucleotide
  Target: SCNA; (+) strand; PAM type: NRG; PAM sequence: AGG
ttgtatttttagtagagaca

SEQ ID NO: 30202 - DNA, 20 bp, Artificial Sequence
  Description of Artificial Sequence: Synthetic oligonucleotide
  Target: SCNA; (+) strand; PAM type: NRG; PAM sequence: TGG
gagacaaggtttcaccatgt

SEQ ID NO: 30203 - DNA, 20 bp, Artificial Sequence
  Description of Artificial Sequence: Synthetic oligonucleotide
  Target: SCNA; (+) strand; PAM type: NRG; PAM sequence: CAG
caaggtttcaccatgttggc

SEQ ID NO: 30204 - DNA, 20 bp, Artificial Sequence
  Description of Artificial Sequence: Synthetic oligonucleotide
  Target: SCNA; (+) strand; PAM type: NRG; PAM sequence: AGG
aaggtttcaccatgttggcc

SEQ ID NO: 30205 - DNA, 20 bp, Artificial Sequence
  Description of Artificial Sequence: Synthetic oligonucleotide
  Target: SCNA; (+) strand; PAM type: NRG; PAM sequence: GGG
aggtttcaccatgttggcca

SEQ ID NO: 30206 - DNA, 20 bp, Artificial Sequence
  Description of Artificial Sequence: Synthetic oligonucleotide
  Target: SCNA; (+) strand; PAM type: NRG; PAM sequence: TGG
tttcaccatgttggccaggg

SEQ ID NO: 30207 - DNA, 20 bp, Artificial Sequence
  Description of Artificial Sequence: Synthetic oligonucleotide
  Target: SCNA; (+) strand; PAM type: NRG; PAM sequence: AAG
ggtctcaaactactgatctc

SEQ ID NO: 30208 - DNA, 20 bp, Artificial Sequence
  Description of Artificial Sequence: Synthetic oligonucleotide
  Target: SCNA; (+) strand; PAM type: NRG; PAM sequence: TGG
aactactgatctcaagtaat

SEQ ID NO: 30209 - DNA, 20 bp, Artificial Sequence
  Description of Artificial Sequence: Synthetic oligonucleotide
  Target: SCNA; (+) strand; PAM type: NRG; PAM sequence: CAG
actgatctcaagtaattggc

SEQ ID NO: 30210 - DNA, 20 bp, Artificial Sequence
  Description of Artificial Sequence: Synthetic oligonucleotide
  Target: SCNA; (+) strand; PAM type: NRG; PAM sequence: TGG
ctcaagtaattggccagcct

SEQ ID NO: 30211 - DNA, 20 bp, Artificial Sequence
  Description of Artificial Sequence: Synthetic oligonucleotide
  Target: SCNA; (+) strand; PAM type: NRG; PAM sequence: AAG
tggccagccttggcgtccca

SEQ ID NO: 30212 - DNA, 20 bp, Artificial Sequence
  Description of Artificial Sequence: Synthetic oligonucleotide
  Target: SCNA; (+) strand; PAM type: NRG; PAM sequence: AAG
gccttggcgtcccaaagtgc

SEQ ID NO: 30213 - DNA, 20 bp, Artificial Sequence
  Description of Artificial Sequence: Synthetic oligonucleotide
  Target: SCNA; (+) strand; PAM type: NRG; PAM sequence: CAG
cgtcccaaagtgcaagactg

SEQ ID NO: 30214 - DNA, 20 bp, Artificial Sequence
  Description of Artificial Sequence: Synthetic oligonucleotide
  Target: SCNA; (+) strand; PAM type: NRG; PAM sequence: AGG
gtcccaaagtgcaagactgc

SEQ ID NO: 30215 - DNA, 20 bp, Artificial Sequence
  Description of Artificial Sequence: Synthetic oligonucleotide
  Target: SCNA; (+) strand; PAM type: NRG; PAM sequence: GAG
aagtgcaagactgcaggctt

SEQ ID NO: 30216 - DNA, 20 bp, Artificial Sequence
  Description of Artificial Sequence: Synthetic oligonucleotide
  Target: SCNA; (+) strand; PAM type: NRG; PAM sequence: AAG
gagccaccacgctccaccaa

SEQ ID NO: 30217 - DNA, 20 bp, Artificial Sequence
  Description of Artificial Sequence: Synthetic oligonucleotide
  Target: SCNA; (+) strand; PAM type: NRG; PAM sequence: TAG
acgctccaccaaaagtttct

SEQ ID NO: 30218 - DNA, 20 bp, Artificial Sequence
  Description of Artificial Sequence: Synthetic oligonucleotide
  Target: SCNA; (+) strand; PAM type: NRG; PAM sequence: GAG
ttcttagcactcattctcat

SEQ ID NO: 30219 - DNA, 20 bp, Artificial Sequence
  Description of Artificial Sequence: Synthetic oligonucleotide
  Target: SCNA; (+) strand; PAM type: NRG; PAM sequence: TGG
gagaaaaattgctgaaaact

SEQ ID NO: 30220 - DNA, 20 bp, Artificial Sequence
  Description of Artificial Sequence: Synthetic oligonucleotide
  Target: SCNA; (+) strand; PAM type: NRG; PAM sequence: AAG
ttgctgaaaacttggcaata

SEQ ID NO: 30221 - DNA, 20 bp, Artificial Sequence
  Description of Artificial Sequence: Synthetic oligonucleotide
  Target: SCNA; (+) strand; PAM type: NRG; PAM sequence: CAG
aaaacttggcaataaagaaa

SEQ ID NO: 30222 - DNA, 20 bp, Artificial Sequence
  Description of Artificial Sequence: Synthetic oligonucleotide
  Target: SCNA; (+) strand; PAM type: NRG; PAM sequence: AAG
gtcctttaaatgttattttt

SEQ ID NO: 30223 - DNA, 20 bp, Artificial Sequence
  Description of Artificial Sequence: Synthetic oligonucleotide
  Target: SCNA; (+) strand; PAM type: NRG; PAM sequence: AGG
tcctttaaatgttattttta

SEQ ID NO: 30224 - DNA, 20 bp, Artificial Sequence
  Description of Artificial Sequence: Synthetic oligonucleotide
  Target: SCNA; (+) strand; PAM type: NRG; PAM sequence: GGG
cctttaaatgttatttttaa

SEQ ID NO: 30225 - DNA, 20 bp, Artificial Sequence
  Description of Artificial Sequence: Synthetic oligonucleotide
  Target: SCNA; (+) strand; PAM type: NRG; PAM sequence: GGG
ctttaaatgttatttttaag

SEQ ID NO: 30226 - DNA, 20 bp, Artificial Sequence
  Description of Artificial Sequence: Synthetic oligonucleotide
  Target: SCNA; (+) strand; PAM type: NRG; PAM sequence: AAG
gggctcaatcaatgactatg

SEQ ID NO: 30227 - DNA, 20 bp, Artificial Sequence
  Description of Artificial Sequence: Synthetic oligonucleotide
  Target: SCNA; (+) strand; PAM type: NRG; PAM sequence: AAG
caatgactatgaagttatct

SEQ ID NO: 30228 - DNA, 20 bp, Artificial Sequence
  Description of Artificial Sequence: Synthetic oligonucleotide
  Target: SCNA; (+) strand; PAM type: NRG; PAM sequence: CAG
agttatctaagataaaacac

SEQ ID NO: 30229 - DNA, 20 bp, Artificial Sequence
  Description of Artificial Sequence: Synthetic oligonucleotide
  Target: SCNA; (+) strand; PAM type: NRG; PAM sequence: TAG
attgccattaacttttttat

SEQ ID NO: 30230 - DNA, 20 bp, Artificial Sequence
  Description of Artificial Sequence: Synthetic oligonucleotide
  Target: SCNA; (+) strand; PAM type: NRG; PAM sequence: GAG
tgccattaacttttttatta

SEQ ID NO: 30231 - DNA, 20 bp, Artificial Sequence
  Description of Artificial Sequence: Synthetic oligonucleotide
  Target: SCNA; (+) strand; PAM type: NRG; PAM sequence: CAG
aacttttttattagagcccc

SEQ ID NO: 30232 - DNA, 20 bp, Artificial Sequence
  Description of Artificial Sequence: Synthetic oligonucleotide
  Target: SCNA; (+) strand; PAM type: NRG; PAM sequence: CAG
tattagagcccccagatcta

SEQ ID NO: 30233 - DNA, 20 bp, Artificial Sequence
  Description of Artificial Sequence: Synthetic oligonucleotide
  Target: SCNA; (+) strand; PAM type: NRG; PAM sequence: AGG
attagagcccccagatctac

SEQ ID NO: 30234 - DNA, 20 bp, Artificial Sequence
  Description of Artificial Sequence: Synthetic oligonucleotide
  Target: SCNA; (+) strand; PAM type: NRG; PAM sequence: CAG
agatctacaggttatatgtg

SEQ ID NO: 30235 - DNA, 20 bp, Artificial Sequence
  Description of Artificial Sequence: Synthetic oligonucleotide
  Target: SCNA; (+) strand; PAM type: NRG; PAM sequence: CAG
aggttatatgtgcagatgtg

SEQ ID NO: 30236 - DNA, 20 bp, Artificial Sequence
  Description of Artificial Sequence: Synthetic oligonucleotide
  Target: SCNA; (+) strand; PAM type: NRG; PAM sequence: TGG
ttatatgtgcagatgtgcag

SEQ ID NO: 30237 - DNA, 20 bp, Artificial Sequence
  Description of Artificial Sequence: Synthetic oligonucleotide
  Target: SCNA; (+) strand; PAM type: NRG; PAM sequence: AAG
gctgctttatttcccttttc

SEQ ID NO: 30238 - DNA, 20 bp, Artificial Sequence
  Description of Artificial Sequence: Synthetic oligonucleotide
  Target: SCNA; (+) strand; PAM type: NRG; PAM sequence: GAG
tgctttatttcccttttcaa

SEQ ID NO: 30239 - DNA, 20 bp, Artificial Sequence
  Description of Artificial Sequence: Synthetic oligonucleotide
  Target: SCNA; (+) strand; PAM type: NRG; PAM sequence: CAG
tttcaagagcttttcttata

SEQ ID NO: 30240 - DNA, 20 bp, Artificial Sequence
  Description of Artificial Sequence: Synthetic oligonucleotide
  Target: SCNA; (+) strand; PAM type: NRG; PAM sequence: TAG
agcatctatccactctccta

SEQ ID NO: 30241 - DNA, 20 bp, Artificial Sequence
  Description of Artificial Sequence: Synthetic oligonucleotide
  Target: SCNA; (+) strand; PAM type: NRG; PAM sequence: GAG
catctatccactctcctata

SEQ ID NO: 30242 - DNA, 20 bp, Artificial Sequence
  Description of Artificial Sequence: Synthetic oligonucleotide
  Target: SCNA; (+) strand; PAM type: NRG; PAM sequence: AAG
tccactctcctatagagatg

SEQ ID NO: 30243 - DNA, 20 bp, Artificial Sequence
  Description of Artificial Sequence: Synthetic oligonucleotide
  Target: SCNA; (+) strand; PAM type: NRG; PAM sequence: AAG
ccacttgacatacaaaccca

SEQ ID NO: 30244 - DNA, 20 bp, Artificial Sequence
  Description of Artificial Sequence: Synthetic oligonucleotide
  Target: SCNA; (+) strand; PAM type: NRG; PAM sequence: GAG
acttgacatacaaacccaaa

SEQ ID NO: 30245 - DNA, 20 bp, Artificial Sequence
  Description of Artificial Sequence: Synthetic oligonucleotide
  Target: SCNA; (+) strand; PAM type: NRG; PAM sequence: CAG
gattcatgctcatttatgct

SEQ ID NO: 30246 - DNA, 20 bp, Artificial Sequence
  Description of Artificial Sequence: Synthetic oligonucleotide
  Target: SCNA; (+) strand; PAM type: NRG; PAM sequence: TAG
tcatgctcatttatgctcag

SEQ ID NO: 30247 - DNA, 20 bp, Artificial Sequence
  Description of Artificial Sequence: Synthetic oligonucleotide
  Target: SCNA; (+) strand; PAM type: NRG; PAM sequence: TAG
cagtagaaaacataattcca

SEQ ID NO: 30248 - DNA, 20 bp, Artificial Sequence
  Description of Artificial Sequence: Synthetic oligonucleotide
  Target: SCNA; (+) strand; PAM type: NRG; PAM sequence: AGG
agtagaaaacataattccat

SEQ ID NO: 30249 - DNA, 20 bp, Artificial Sequence
  Description of Artificial Sequence: Synthetic oligonucleotide
  Target: SCNA; (+) strand; PAM type: NRG; PAM sequence: TAG
attattaatcaaatatttac

SEQ ID NO: 30250 - DNA, 20 bp, Artificial Sequence
  Description of Artificial Sequence: Synthetic oligonucleotide
  Target: SCNA; (+) strand; PAM type: NRG; PAM sequence: TAG
tttactagatttatatctat

SEQ ID NO: 30251 - DNA, 20 bp, Artificial Sequence
  Description of Artificial Sequence: Synthetic oligonucleotide
  Target: SCNA; (+) strand; PAM type: NRG; PAM sequence: TAG
atctattagtcaattctctt

SEQ ID NO: 30252 - DNA, 20 bp, Artificial Sequence
  Description of Artificial Sequence: Synthetic oligonucleotide
  Target: SCNA; (+) strand; PAM type: NRG; PAM sequence: CAG
ttctataaatctttattcct

SEQ ID NO: 30253 - DNA, 20 bp, Artificial Sequence
  Description of Artificial Sequence: Synthetic oligonucleotide
  Target: SCNA; (+) strand; PAM type: NRG; PAM sequence: CAG
cctcagatattcctttaaac

SEQ ID NO: 30254 - DNA, 20 bp, Artificial Sequence
  Description of Artificial Sequence: Synthetic oligonucleotide
  Target: SCNA; (+) strand; PAM type: NRG; PAM sequence: CAG
ttcctttaaaccagtcttac

SEQ ID NO: 30255 - DNA, 20 bp, Artificial Sequence
  Description of Artificial Sequence: Synthetic oligonucleotide
  Target: SCNA; (+) strand; PAM type: NRG; PAM sequence: TGG
aaccagtcttaccagcttat

SEQ ID NO: 30256 - DNA, 20 bp, Artificial Sequence
  Description of Artificial Sequence: Synthetic oligonucleotide
  Target: SCNA; (+) strand; PAM type: NRG; PAM sequence: TAG
tggctccactactaattaat

SEQ ID NO: 30257 - DNA, 20 bp, Artificial Sequence
  Description of Artificial Sequence: Synthetic oligonucleotide
  Target: SCNA; (+) strand; PAM type: NRG; PAM sequence: GAG
acttttcaaaaactatactt

SEQ ID NO: 30258 - DNA, 20 bp, Artificial Sequence
  Description of Artificial Sequence: Synthetic oligonucleotide
  Target: SCNA; (+) strand; PAM type: NRG; PAM sequence: AAG
atacttgagcacactgtgaa

SEQ ID NO: 30259 - DNA, 20 bp, Artificial Sequence
  Description of Artificial Sequence: Synthetic oligonucleotide
  Target: SCNA; (+) strand; PAM type: NRG; PAM sequence: TAG
actgtgaaaagataaattgc

SEQ ID NO: 30260 - DNA, 20 bp, Artificial Sequence
  Description of Artificial Sequence: Synthetic oligonucleotide
  Target: SCNA; (+) strand; PAM type: NRG; PAM sequence: AGG
ctgtgaaaagataaattgct

SEQ ID NO: 30261 - DNA, 20 bp, Artificial Sequence
  Description of Artificial Sequence: Synthetic oligonucleotide
  Target: SCNA; (+) strand; PAM type: NRG; PAM sequence: GAG
ataaattgctaggttcaact

SEQ ID NO: 30262 - DNA, 20 bp, Artificial Sequence
  Description of Artificial Sequence: Synthetic oligonucleotide
  Target: SCNA; (+) strand; PAM type: NRG; PAM sequence: AGG
taaattgctaggttcaactg

SEQ ID NO: 30263 - DNA, 20 bp, Artificial Sequence
  Description of Artificial Sequence: Synthetic oligonucleotide
  Target: SCNA; (+) strand; PAM type: NRG; PAM sequence: TAG
tgaataattttttcctcttt

SEQ ID NO: 30264 - DNA, 20 bp, Artificial Sequence
  Description of Artificial Sequence: Synthetic oligonucleotide
  Target: SCNA; (+) strand; PAM type: NRG; PAM sequence: CAG
atctaaattattttaaaact

SEQ ID NO: 30265 - DNA, 20 bp, Artificial Sequence
  Description of Artificial Sequence: Synthetic oligonucleotide
  Target: SCNA; (+) strand; PAM type: NRG; PAM sequence: AAG
taaaactcagaaaatgcttt

SEQ ID NO: 30266 - DNA, 20 bp, Artificial Sequence
  Description of Artificial Sequence: Synthetic oligonucleotide
  Target: SCNA; (+) strand; PAM type: NRG; PAM sequence: TAG
atgctttaagctcatattta

SEQ ID NO: 30267 - DNA, 20 bp, Artificial Sequence
  Description of Artificial Sequence: Synthetic oligonucleotide
  Target: SCNA; (+) strand; PAM type: NRG; PAM sequence: AAG
ctcatatttatagacttccc

SEQ ID NO: 30268 - DNA, 20 bp, Artificial Sequence
  Description of Artificial Sequence: Synthetic oligonucleotide
  Target: SCNA; (+) strand; PAM type: NRG; PAM sequence: TAG
atatttatagacttcccaag

SEQ ID NO: 30269 - DNA, 20 bp, Artificial Sequence
  Description of Artificial Sequence: Synthetic oligonucleotide
  Target: SCNA; (+) strand; PAM type: NRG; PAM sequence: GAG
agtagtacaatctgttaact

SEQ ID NO: 30270 - DNA, 20 bp, Artificial Sequence
  Description of Artificial Sequence: Synthetic oligonucleotide
  Target: SCNA; (+) strand; PAM type: NRG; PAM sequence: AGG
gtagtacaatctgttaactg

SEQ ID NO: 30271 - DNA, 20 bp, Artificial Sequence
  Description of Artificial Sequence: Synthetic oligonucleotide
  Target: SCNA; (+) strand; PAM type: NRG; PAM sequence: TAG
gtacaatctgttaactgagg

SEQ ID NO: 30272 - DNA, 20 bp, Artificial Sequence
  Description of Artificial Sequence: Synthetic oligonucleotide
  Target: SCNA; (+) strand; PAM type: NRG; PAM sequence: AGG
tacaatctgttaactgaggt

SEQ ID NO: 30273 - DNA, 20 bp, Artificial Sequence
  Description of Artificial Sequence: Synthetic oligonucleotide
  Target: SCNA; (+) strand; PAM type: NRG; PAM sequence: AAG
atctgttaactgaggtaggt

SEQ ID NO: 30274 - DNA, 20 bp, Artificial Sequence
  Description of Artificial Sequence: Synthetic oligonucleotide
  Target: SCNA; (+) strand; PAM type: NRG; PAM sequence: TGG
ttgaaaacttccataaatga

SEQ ID NO: 30275 - DNA, 20 bp, Artificial Sequence
  Description of Artificial Sequence: Synthetic oligonucleotide
  Target: SCNA; (+) strand; PAM type: NRG; PAM sequence: AAG
atgatggtgaataaattaaa

SEQ ID NO: 30276 - DNA, 20 bp, Artificial Sequence
  Description of Artificial Sequence: Synthetic oligonucleotide
  Target: SCNA; (+) strand; PAM type: NRG; PAM sequence: AGG
tgatggtgaataaattaaaa

SEQ ID NO: 30277 - DNA, 20 bp, Artificial Sequence
  Description of Artificial Sequence: Synthetic oligonucleotide
  Target: SCNA; (+) strand; PAM type: NRG; PAM sequence: TGG
tggtgaataaattaaaaagg

SEQ ID NO: 30278 - DNA, 20 bp, Artificial Sequence
  Description of Artificial Sequence: Synthetic oligonucleotide
  Target: SCNA; (+) strand; PAM type: NRG; PAM sequence: CAG
aaaaggtggaaacaattttc

SEQ ID NO: 30279 - DNA, 20 bp, Artificial Sequence
  Description of Artificial Sequence: Synthetic oligonucleotide
  Target: SCNA; (+) strand; PAM type: NRG; PAM sequence: AGG
aaaggtggaaacaattttcc

SEQ ID NO: 30280 - DNA, 20 bp, Artificial Sequence
  Description of Artificial Sequence: Synthetic oligonucleotide
  Target: SCNA; (+) strand; PAM type: NRG; PAM sequence: GAG
aaacaattttccaggtctct

SEQ ID NO: 30281 - DNA, 20 bp, Artificial Sequence
  Description of Artificial Sequence: Synthetic oligonucleotide
  Target: SCNA; (+) strand; PAM type: NRG; PAM sequence: TAG
tcaatataatgaatcctgaa

SEQ ID NO: 30282 - DNA, 20 bp, Artificial Sequence
  Description of Artificial Sequence: Synthetic oligonucleotide
  Target: SCNA; (+) strand; PAM type: NRG; PAM sequence: AGG
caatataatgaatcctgaat

SEQ ID NO: 30283 - DNA, 20 bp, Artificial Sequence
  Description of Artificial Sequence: Synthetic oligonucleotide
  Target: SCNA; (+) strand; PAM type: NRG; PAM sequence: GAG
atataatgaatcctgaatag

SEQ ID NO: 30284 - DNA, 20 bp, Artificial Sequence
  Description of Artificial Sequence: Synthetic oligonucleotide
  Target: SCNA; (+) strand; PAM type: NRG; PAM sequence: AAG
ctgaataggagttcaatgaa

SEQ ID NO: 30285 - DNA, 20 bp, Artificial Sequence
  Description of Artificial Sequence: Synthetic oligonucleotide
  Target: SCNA; (+) strand; PAM type: NRG; PAM sequence: TAG
taggagttcaatgaaaagat

SEQ ID NO: 30286 - DNA, 20 bp, Artificial Sequence
  Description of Artificial Sequence: Synthetic oligonucleotide
  Target: SCNA; (+) strand; PAM type: NRG; PAM sequence: AGG
aggagttcaatgaaaagatt

SEQ ID NO: 30287 - DNA, 20 bp, Artificial Sequence
  Description of Artificial Sequence: Synthetic oligonucleotide
  Target: SCNA; (+) strand; PAM type: NRG; PAM sequence: TAG
agttcaatgaaaagattagg

SEQ ID NO: 30288 - DNA, 20 bp, Artificial Sequence
  Description of Artificial Sequence: Synthetic oligonucleotide
  Target: SCNA; (+) strand; PAM type: NRG; PAM sequence: TGG
taaaaaaaacccatatccca

SEQ ID NO: 30289 - DNA, 20 bp, Artificial Sequence
  Description of Artificial Sequence: Synthetic oligonucleotide
  Target: SCNA; (+) strand; PAM type: NRG; PAM sequence: GGG
aaaaaaaacccatatcccat

SEQ ID NO: 30290 - DNA, 20 bp, Artificial Sequence
  Description of Artificial Sequence: Synthetic oligonucleotide
  Target: SCNA; (+) strand; PAM type: NRG; PAM sequence: AAG
atcccatgggatcctgctgt

SEQ ID NO: 30291 - DNA, 20 bp, Artificial Sequence
  Description of Artificial Sequence: Synthetic oligonucleotide
  Target: SCNA; (+) strand; PAM type: NRG; PAM sequence: AGG
tcccatgggatcctgctgta

SEQ ID NO: 30292 - DNA, 20 bp, Artificial Sequence
  Description of Artificial Sequence: Synthetic oligonucleotide
  Target: SCNA; (+) strand; PAM type: NRG; PAM sequence: TGG
ttgccatgtgttatatactt

SEQ ID NO: 30293 - DNA, 20 bp, Artificial Sequence
  Description of Artificial Sequence: Synthetic oligonucleotide
  Target: SCNA; (+) strand; PAM type: NRG; PAM sequence: GAG
tatatactttggtgatcttt

SEQ ID NO: 30294 - DNA, 20 bp, Artificial Sequence
  Description of Artificial Sequence: Synthetic oligonucleotide
  Target: SCNA; (+) strand; PAM type: NRG; PAM sequence: AAG
tactttggtgatctttgaga

SEQ ID NO: 30295 - DNA, 20 bp, Artificial Sequence
  Description of Artificial Sequence: Synthetic oligonucleotide
  Target: SCNA; (+) strand; PAM type: NRG; PAM sequence: CAG
agaaagcatttaacctatta

SEQ ID NO: 30296 - DNA, 20 bp, Artificial Sequence
  Description of Artificial Sequence: Synthetic oligonucleotide
  Target: SCNA; (+) strand; PAM type: NRG; PAM sequence: AGG
gaaagcatttaacctattac

SEQ ID NO: 30297 - DNA, 20 bp, Artificial Sequence
  Description of Artificial Sequence: Synthetic oligonucleotide
  Target: SCNA; (+) strand; PAM type: NRG; PAM sequence: AAG
acaggcatttttttccccta

SEQ ID NO: 30298 - DNA, 20 bp, Artificial Sequence
  Description of Artificial Sequence: Synthetic oligonucleotide
  Target: SCNA; (+) strand; PAM type: NRG; PAM sequence: AAG
atttttttcccctaaagtac

SEQ ID NO: 30299 - DNA, 20 bp, Artificial Sequence
  Description of Artificial Sequence: Synthetic oligonucleotide
  Target: SCNA; (+) strand; PAM type: NRG; PAM sequence: TAG
tttttcccctaaagtacaag

SEQ ID NO: 30300 - DNA, 20 bp, Artificial Sequence
  Description of Artificial Sequence: Synthetic oligonucleotide
  Target: SCNA; (+) strand; PAM type: NRG; PAM sequence: AGG
ttttcccctaaagtacaagt

SEQ ID NO: 30301 - DNA, 20 bp, Artificial Sequence
  Description of Artificial Sequence: Synthetic oligonucleotide
  Target: SCNA; (+) strand; PAM type: NRG; PAM sequence: TAG
tcccctaaagtacaagtagg

SEQ ID NO: 30302 - DNA, 20 bp, Artificial Sequence
  Description of Artificial Sequence: Synthetic oligonucleotide
  Target: SCNA; (+) strand; PAM type: NRG; PAM sequence: AGG
cccctaaagtacaagtaggt

SEQ ID NO: 30303 - DNA, 20 bp, Artificial Sequence
  Description of Artificial Sequence: Synthetic oligonucleotide
  Target: SCNA; (+) strand; PAM type: NRG; PAM sequence: AAG
agtacaagtaggtaggtcaa

SEQ ID NO: 30304 - DNA, 20 bp, Artificial Sequence
  Description of Artificial Sequence: Synthetic oligonucleotide
  Target: SCNA; (+) strand; PAM type: NRG; PAM sequence: CAG
aagtaggtaggtcaaaagaa

SEQ ID NO: 30305 - DNA, 20 bp, Artificial Sequence
  Description of Artificial Sequence: Synthetic oligonucleotide
  Target: SCNA; (+) strand; PAM type: NRG; PAM sequence: AAG
aggtaggtcaaaagaacagc

SEQ ID NO: 30306 - DNA, 20 bp, Artificial Sequence
  Description of Artificial Sequence: Synthetic oligonucleotide
  Target: SCNA; (+) strand; PAM type: NRG; PAM sequence: AGG
ggtaggtcaaaagaacagca

SEQ ID NO: 30307 - DNA, 20 bp, Artificial Sequence
  Description of Artificial Sequence: Synthetic oligonucleotide
  Target: SCNA; (+) strand; PAM type: NRG; PAM sequence: TGG
caatgtctatccacccaatc

SEQ ID NO: 30308 - DNA, 20 bp, Artificial Sequence
  Description of Artificial Sequence: Synthetic oligonucleotide
  Target: SCNA; (+) strand; PAM type: NRG; PAM sequence: TGG
tgtctatccacccaatctgg

SEQ ID NO: 30309 - DNA, 20 bp, Artificial Sequence
  Description of Artificial Sequence: Synthetic oligonucleotide
  Target: SCNA; (+) strand; PAM type: NRG; PAM sequence: AAG
acccaatctggtggcctccg

SEQ ID NO: 30310 - DNA, 20 bp, Artificial Sequence
  Description of Artificial Sequence: Synthetic oligonucleotide
  Target: SCNA; (+) strand; PAM type: NRG; PAM sequence: AGG
cccaatctggtggcctccga

SEQ ID NO: 30311 - DNA, 20 bp, Artificial Sequence
  Description of Artificial Sequence: Synthetic oligonucleotide
  Target: SCNA; (+) strand; PAM type: NRG; PAM sequence: AAG
tggtggcctccgaaggacaa

SEQ ID NO: 30312 - DNA, 20 bp, Artificial Sequence
  Description of Artificial Sequence: Synthetic oligonucleotide
  Target: SCNA; (+) strand; PAM type: NRG; PAM sequence: CAG
ggcctccgaaggacaaaagc

SEQ ID NO: 30313 - DNA, 20 bp, Artificial Sequence
  Description of Artificial Sequence: Synthetic oligonucleotide
  Target: SCNA; (+) strand; PAM type: NRG; PAM sequence: GAG
cctccgaaggacaaaagcca

SEQ ID NO: 30314 - DNA, 20 bp, Artificial Sequence
  Description of Artificial Sequence: Synthetic oligonucleotide
  Target: SCNA; (+) strand; PAM type: NRG; PAM sequence: AAG
caaaagccagagttaatcta

SEQ ID NO: 30315 - DNA, 20 bp, Artificial Sequence
  Description of Artificial Sequence: Synthetic oligonucleotide
  Target: SCNA; (+) strand; PAM type: NRG; PAM sequence: AAG
agagttaatctaaagcaatc

SEQ ID NO: 30316 - DNA, 20 bp, Artificial Sequence
  Description of Artificial Sequence: Synthetic oligonucleotide
  Target: SCNA; (+) strand; PAM type: NRG; PAM sequence: AGG
gagttaatctaaagcaatca

SEQ ID NO: 30317 - DNA, 20 bp, Artificial Sequence
  Description of Artificial Sequence: Synthetic oligonucleotide
  Target: SCNA; (+) strand; PAM type: NRG; PAM sequence: GAG
gttaatctaaagcaatcaag

SEQ ID NO: 30318 - DNA, 20 bp, Artificial Sequence
  Description of Artificial Sequence: Synthetic oligonucleotide
  Target: SCNA; (+) strand; PAM type: NRG; PAM sequence: TGG
atcaaggagtctgaccacca

SEQ ID NO: 30319 - DNA, 20 bp, Artificial Sequence
  Description of Artificial Sequence: Synthetic oligonucleotide
  Target: SCNA; (+) strand; PAM type: NRG; PAM sequence: AAG
aaggagtctgaccaccatgg

SEQ ID NO: 30320 - DNA, 20 bp, Artificial Sequence
  Description of Artificial Sequence: Synthetic oligonucleotide
  Target: SCNA; (+) strand; PAM type: NRG; PAM sequence: GAG
ctgaccaccatggaagccct

SEQ ID NO: 30321 - DNA, 20 bp, Artificial Sequence
  Description of Artificial Sequence: Synthetic oligonucleotide
  Target: SCNA; (+) strand; PAM type: NRG; PAM sequence: AGG
tgaccaccatggaagccctg

SEQ ID NO: 30322 - DNA, 20 bp, Artificial Sequence
  Description of Artificial Sequence: Synthetic oligonucleotide
  Target: SCNA; (+) strand; PAM type: NRG; PAM sequence: AAG
ccaccatggaagccctgagg

SEQ ID NO: 30323 - DNA, 20 bp, Artificial Sequence
  Description of Artificial Sequence: Synthetic oligonucleotide
  Target: SCNA; (+) strand; PAM type: NRG; PAM sequence: TGG
ccatggaagccctgaggaag

SEQ ID NO: 30324 - DNA, 20 bp, Artificial Sequence
  Description of Artificial Sequence: Synthetic oligonucleotide
  Target: SCNA; (+) strand; PAM type: NRG; PAM sequence: AAG
gctgctgtatttcccttttc

SEQ ID NO: 30325 - DNA, 20 bp, Artificial Sequence
  Description of Artificial Sequence: Synthetic oligonucleotide
  Target: SCNA; (+) strand; PAM type: NRG; PAM sequence: GAG
tgctgtatttcccttttcaa

SEQ ID NO: 30326 - DNA, 20 bp, Artificial Sequence
  Description of Artificial Sequence: Synthetic oligonucleotide
  Target: SCNA; (+) strand; PAM type: NRG; PAM sequence: CAG
tttcaagagcttttcgtata

SEQ ID NO: 30327 - DNA, 20 bp, Artificial Sequence
  Description of Artificial Sequence: Synthetic oligonucleotide
  Target: SCNA; (+) strand; PAM type: NRG; PAM sequence: TAG
agcgtctatccactctccta

SEQ ID NO: 30328 - DNA, 20 bp, Artificial Sequence
  Description of Artificial Sequence: Synthetic oligonucleotide
  Target: SCNA; (+) strand; PAM type: NRG; PAM sequence: GAG
cgtctatccactctcctata

SEQ ID NO: 30329 - DNA, 20 bp, Artificial Sequence
  Description of Artificial Sequence: Synthetic oligonucleotide
  Target: SCNA; (+) strand; PAM type: NRG; PAM sequence: AAG
tccactctcctatagagatg

SEQ ID NO: 30330 - DNA, 20 bp, Artificial Sequence
  Description of Artificial Sequence: Synthetic oligonucleotide
  Target: SCNA; (+) strand; PAM type: NRG; PAM sequence: TAG
tagagatgaagttaactccc

SEQ ID NO: 30331 - DNA, 20 bp, Artificial Sequence
  Description of Artificial Sequence: Synthetic oligonucleotide
  Target: SCNA; (+) strand; PAM type: NRG; PAM sequence: AAG
ccacttgacatacaaaccca

SEQ ID NO: 30332 - DNA, 20 bp, Artificial Sequence
  Description of Artificial Sequence: Synthetic oligonucleotide
  Target: SCNA; (+) strand; PAM type: NRG; PAM sequence: GAG
acttgacatacaaacccaaa

SEQ ID NO: 30333 - DNA, 20 bp, Artificial Sequence
  Description of Artificial Sequence: Synthetic oligonucleotide
  Target: SCNA; (+) strand; PAM type: NRG; PAM sequence: CAG
agattaattaacatttgttc

SEQ ID NO: 30334 - DNA, 20 bp, Artificial Sequence
  Description of Artificial Sequence: Synthetic oligonucleotide
  Target: SCNA; (+) strand; PAM type: NRG; PAM sequence: AGG
gattaattaacatttgttcc

SEQ ID NO: 30335 - DNA, 20 bp, Artificial Sequence
  Description of Artificial Sequence: Synthetic oligonucleotide
  Target: SCNA; (+) strand; PAM type: NRG; PAM sequence: AAG
taattaacatttgttccagg

SEQ ID NO: 30336 - DNA, 20 bp, Artificial Sequence
  Description of Artificial Sequence: Synthetic oligonucleotide
  Target: SCNA; (+) strand; PAM type: NRG; PAM sequence: GAG
attaacatttgttccaggaa

SEQ ID NO: 30337 - DNA, 20 bp, Artificial Sequence
  Description of Artificial Sequence: Synthetic oligonucleotide
  Target: SCNA; (+) strand; PAM type: NRG; PAM sequence: CAG
atttgttccaggaagagaca

SEQ ID NO: 30338 - DNA, 20 bp, Artificial Sequence
  Description of Artificial Sequence: Synthetic oligonucleotide
  Target: SCNA; (+) strand; PAM type: NRG; PAM sequence: TGG
cagacaaaaacatccgatat

SEQ ID NO: 30339 - DNA, 20 bp, Artificial Sequence
  Description of Artificial Sequence: Synthetic oligonucleotide
  Target: SCNA; (+) strand; PAM type: NRG; PAM sequence: TGG
gtgaataaatataaaactta

SEQ ID NO: 30340 - DNA, 20 bp, Artificial Sequence
  Description of Artificial Sequence: Synthetic oligonucleotide
  Target: SCNA; (+) strand; PAM type: NRG; PAM sequence: GAG
gaataaatataaaacttatg

SEQ ID NO: 30341 - DNA, 20 bp, Artificial Sequence
  Description of Artificial Sequence: Synthetic oligonucleotide
  Target: SCNA; (+) strand; PAM type: NRG; PAM sequence: GAG
ataaatataaaacttatgga

SEQ ID NO: 30342 - DNA, 20 bp, Artificial Sequence
  Description of Artificial Sequence: Synthetic oligonucleotide
  Target: SCNA; (+) strand; PAM type: NRG; PAM sequence: AGG
taaatataaaacttatggag

SEQ ID NO: 30343 - DNA, 20 bp, Artificial Sequence
  Description of Artificial Sequence: Synthetic oligonucleotide
  Target: SCNA; (+) strand; PAM type: NRG; PAM sequence: GGG
aaatataaaacttatggaga

SEQ ID NO: 30344 - DNA, 20 bp, Artificial Sequence
  Description of Artificial Sequence: Synthetic oligonucleotide
  Target: SCNA; (+) strand; PAM type: NRG; PAM sequence: GAG
atataaaacttatggagagg

SEQ ID NO: 30345 - DNA, 20 bp, Artificial Sequence
  Description of Artificial Sequence: Synthetic oligonucleotide
  Target: SCNA; (+) strand; PAM type: NRG; PAM sequence: AGG
tataaaacttatggagaggg

SEQ ID NO: 30346 - DNA, 20 bp, Artificial Sequence
  Description of Artificial Sequence: Synthetic oligonucleotide
  Target: SCNA; (+) strand; PAM type: NRG; PAM sequence: AAG
aaaacttatggagagggagg

SEQ ID NO: 30347 - DNA, 20 bp, Artificial Sequence
  Description of Artificial Sequence: Synthetic oligonucleotide
  Target: SCNA; (+) strand; PAM type: NRG; PAM sequence: AAG
gagggaggaagatattttga

SEQ ID NO: 30348 - DNA, 20 bp, Artificial Sequence
  Description of Artificial Sequence: Synthetic oligonucleotide
  Target: SCNA; (+) strand; PAM type: NRG; PAM sequence: AGG
agggaggaagatattttgaa

SEQ ID NO: 30349 - DNA, 20 bp, Artificial Sequence
  Description of Artificial Sequence: Synthetic oligonucleotide
  Target: SCNA; (+) strand; PAM type: NRG; PAM sequence: TGG
tttgaaaggaaaaaaatcat

SEQ ID NO: 30350 - DNA, 20 bp, Artificial Sequence
  Description of Artificial Sequence: Synthetic oligonucleotide
  Target: SCNA; (+) strand; PAM type: NRG; PAM sequence: AAG
tcattggactttattgctca

SEQ ID NO: 30351 - DNA, 20 bp, Artificial Sequence
  Description of Artificial Sequence: Synthetic oligonucleotide
  Target: SCNA; (+) strand; PAM type: NRG; PAM sequence: AAG
actttattgctcaaagccaa

SEQ ID NO: 30352 - DNA, 20 bp, Artificial Sequence
  Description of Artificial Sequence: Synthetic oligonucleotide
  Target: SCNA; (+) strand; PAM type: NRG; PAM sequence: TGG
ccaaaagaaattgttttttg

SEQ ID NO: 30353 - DNA, 20 bp, Artificial Sequence
  Description of Artificial Sequence: Synthetic oligonucleotide
  Target: SCNA; (+) strand; PAM type: NRG; PAM sequence: AAG
gaaattgttttttgtggcaa

SEQ ID NO: 30354 - DNA, 20 bp, Artificial Sequence
  Description of Artificial Sequence: Synthetic oligonucleotide
  Target: SCNA; (+) strand; PAM type: NRG; PAM sequence: AAG
ttttgtggcaaaagtaaaac

SEQ ID NO: 30355 - DNA, 20 bp, Artificial Sequence
  Description of Artificial Sequence: Synthetic oligonucleotide
  Target: SCNA; (+) strand; PAM type: NRG; PAM sequence: AGG
tttgtggcaaaagtaaaaca

SEQ ID NO: 30356 - DNA, 20 bp, Artificial Sequence
  Description of Artificial Sequence: Synthetic oligonucleotide
  Target: SCNA; (+) strand; PAM type: NRG; PAM sequence: TGG
tgtactgtgtgctgtatttc

SEQ ID NO: 30357 - DNA, 20 bp, Artificial Sequence
  Description of Artificial Sequence: Synthetic oligonucleotide
  Target: SCNA; (+) strand; PAM type: NRG; PAM sequence: AAG
tggcaattatctgttatctt

SEQ ID NO: 30358 - DNA, 20 bp, Artificial Sequence
  Description of Artificial Sequence: Synthetic oligonucleotide
  Target: SCNA; (+) strand; PAM type: NRG; PAM sequence: GAG
gcaattatctgttatcttaa

SEQ ID NO: 30359 - DNA, 20 bp, Artificial Sequence
  Description of Artificial Sequence: Synthetic oligonucleotide
  Target: SCNA; (+) strand; PAM type: NRG; PAM sequence: AGG
caattatctgttatcttaag

SEQ ID NO: 30360 - DNA, 20 bp, Artificial Sequence
  Description of Artificial Sequence: Synthetic oligonucleotide
  Target: SCNA; (+) strand; PAM type: NRG; PAM sequence: TAG
gttatcttaagaggcttata

SEQ ID NO: 30361 - DNA, 20 bp, Artificial Sequence
  Description of Artificial Sequence: Synthetic oligonucleotide
  Target: SCNA; (+) strand; PAM type: NRG; PAM sequence: AAG
tcttaagaggcttatataga

SEQ ID NO: 30362 - DNA, 20 bp, Artificial Sequence
  Description of Artificial Sequence: Synthetic oligonucleotide
  Target: SCNA; (+) strand; PAM type: NRG; PAM sequence: CAG
aacaattgtacctactttca

SEQ ID NO: 30363 - DNA, 20 bp, Artificial Sequence
  Description of Artificial Sequence: Synthetic oligonucleotide
  Target: SCNA; (+) strand; PAM type: NRG; PAM sequence: GAG
ctactttcacagcatgctct

SEQ ID NO: 30364 - DNA, 20 bp, Artificial Sequence
  Description of Artificial Sequence: Synthetic oligonucleotide
  Target: SCNA; (+) strand; PAM type: NRG; PAM sequence: AGG
tactttcacagcatgctctg

SEQ ID NO: 30365 - DNA, 20 bp, Artificial Sequence
  Description of Artificial Sequence: Synthetic oligonucleotide
  Target: SCNA; (+) strand; PAM type: NRG; PAM sequence: AAG
acagcatgctctgaggatct

SEQ ID NO: 30366 - DNA, 20 bp, Artificial Sequence
  Description of Artificial Sequence: Synthetic oligonucleotide
  Target: SCNA; (+) strand; PAM type: NRG; PAM sequence: AGG
cagcatgctctgaggatcta

SEQ ID NO: 30367 - DNA, 20 bp, Artificial Sequence
  Description of Artificial Sequence: Synthetic oligonucleotide
  Target: SCNA; (+) strand; PAM type: NRG; PAM sequence: TAG
atctaaggaccctcaacaaa

SEQ ID NO: 30368 - DNA, 20 bp, Artificial Sequence
  Description of Artificial Sequence: Synthetic oligonucleotide
  Target: SCNA; (+) strand; PAM type: NRG; PAM sequence: AAG
acaaatagttttcatgctac

SEQ ID NO: 30369 - DNA, 20 bp, Artificial Sequence
  Description of Artificial Sequence: Synthetic oligonucleotide
  Target: SCNA; (+) strand; PAM type: NRG; PAM sequence: CAG
aatagttttcatgctacaag

SEQ ID NO: 30370 - DNA, 20 bp, Artificial Sequence
  Description of Artificial Sequence: Synthetic oligonucleotide
  Target: SCNA; (+) strand; PAM type: NRG; PAM sequence: AGG
atagttttcatgctacaagc

SEQ ID NO: 30371 - DNA, 20 bp, Artificial Sequence
  Description of Artificial Sequence: Synthetic oligonucleotide
  Target: SCNA; (+) strand; PAM type: NRG; PAM sequence: TAG
gctacaagcaggcacttatt

SEQ ID NO: 30372 - DNA, 20 bp, Artificial Sequence
  Description of Artificial Sequence: Synthetic oligonucleotide
  Target: SCNA; (+) strand; PAM type: NRG; PAM sequence: AGG
ctacaagcaggcacttattt

SEQ ID NO: 30373 - DNA, 20 bp, Artificial Sequence
  Description of Artificial Sequence: Synthetic oligonucleotide
  Target: SCNA; (+) strand; PAM type: NRG; PAM sequence: TAG
ggcacttatttaggcacaaa

SEQ ID NO: 30374 - DNA, 20 bp, Artificial Sequence
  Description of Artificial Sequence: Synthetic oligonucleotide
  Target: SCNA; (+) strand; PAM type: NRG; PAM sequence: AGG
gcacttatttaggcacaaat

SEQ ID NO: 30375 - DNA, 20 bp, Artificial Sequence
  Description of Artificial Sequence: Synthetic oligonucleotide
  Target: SCNA; (+) strand; PAM type: NRG; PAM sequence: TGG
ttatttaggcacaaatagga

SEQ ID NO: 30376 - DNA, 20 bp, Artificial Sequence
  Description of Artificial Sequence: Synthetic oligonucleotide
  Target: SCNA; (+) strand; PAM type: NRG; PAM sequence: GGG
tatttaggcacaaataggat

SEQ ID NO: 30377 - DNA, 20 bp, Artificial Sequence
  Description of Artificial Sequence: Synthetic oligonucleotide
  Target: SCNA; (+) strand; PAM type: NRG; PAM sequence: TAG
tgggattctttttttaactg

SEQ ID NO: 30378 - DNA, 20 bp, Artificial Sequence
  Description of Artificial Sequence: Synthetic oligonucleotide
  Target: SCNA; (+) strand; PAM type: NRG; PAM sequence: CAG
ataaataattttatataata

SEQ ID NO: 30379 - DNA, 20 bp, Artificial Sequence
  Description of Artificial Sequence: Synthetic oligonucleotide
  Target: SCNA; (+) strand; PAM type: NRG; PAM sequence: TAG
ttttatataatacagttata

SEQ ID NO: 30380 - DNA, 20 bp, Artificial Sequence
  Description of Artificial Sequence: Synthetic oligonucleotide
  Target: SCNA; (+) strand; PAM type: NRG; PAM sequence: AGG
tttatataatacagttatat

SEQ ID NO: 30381 - DNA, 20 bp, Artificial Sequence
  Description of Artificial Sequence: Synthetic oligonucleotide
  Target: SCNA; (+) strand; PAM type: NRG; PAM sequence: CAG
aggcttttttaaacaaaata

SEQ ID NO: 30382 - DNA, 20 bp, Artificial Sequence
  Description of Artificial Sequence: Synthetic oligonucleotide
  Target: SCNA; (+) strand; PAM type: NRG; PAM sequence: CAG
ttttttaaacaaaatacagt

SEQ ID NO: 30383 - DNA, 20 bp, Artificial Sequence
  Description of Artificial Sequence: Synthetic oligonucleotide
  Target: SCNA; (+) strand; PAM type: NRG; PAM sequence: AAG
attttaaatctctctattct

SEQ ID NO: 30384 - DNA, 20 bp, Artificial Sequence
  Description of Artificial Sequence: Synthetic oligonucleotide
  Target: SCNA; (+) strand; PAM type: NRG; PAM sequence: TAG
taaatctctctattctaaga

SEQ ID NO: 30385 - DNA, 20 bp, Artificial Sequence
  Description of Artificial Sequence: Synthetic oligonucleotide
  Target: SCNA; (+) strand; PAM type: NRG; PAM sequence: AAG
acacttcacaatttaaattc

SEQ ID NO: 30386 - DNA, 20 bp, Artificial Sequence
  Description of Artificial Sequence: Synthetic oligonucleotide
  Target: SCNA; (+) strand; PAM type: NRG; PAM sequence: AAG
tcaagactccttgtttcttg

SEQ ID NO: 30387 - DNA, 20 bp, Artificial Sequence
  Description of Artificial Sequence: Synthetic oligonucleotide
  Target: SCNA; (+) strand; PAM type: NRG; PAM sequence: AAG
tttcttgaagacatctatga

SEQ ID NO: 30388 - DNA, 20 bp, Artificial Sequence
  Description of Artificial Sequence: Synthetic oligonucleotide
  Target: SCNA; (+) strand; PAM type: NRG; PAM sequence: GAG
ctatgaaagcaaatgttttt

SEQ ID NO: 30389 - DNA, 20 bp, Artificial Sequence
  Description of Artificial Sequence: Synthetic oligonucleotide
  Target: SCNA; (+) strand; PAM type: NRG; PAM sequence: TGG
agcaaatgtttttgagaact

SEQ ID NO: 30390 - DNA, 20 bp, Artificial Sequence
  Description of Artificial Sequence: Synthetic oligonucleotide
  Target: SCNA; (+) strand; PAM type: NRG; PAM sequence: GAG
ttgagaacttggctgaatct

SEQ ID NO: 30391 - DNA, 20 bp, Artificial Sequence
  Description of Artificial Sequence: Synthetic oligonucleotide
  Target: SCNA; (+) strand; PAM type: NRG; PAM sequence: TAG
gaatctgagtccattccgat

SEQ ID NO: 30392 - DNA, 20 bp, Artificial Sequence
  Description of Artificial Sequence: Synthetic oligonucleotide
  Target: SCNA; (+) strand; PAM type: NRG; PAM sequence: CAG
tctgagtccattccgattag

SEQ ID NO: 30393 - DNA, 20 bp, Artificial Sequence
  Description of Artificial Sequence: Synthetic oligonucleotide
  Target: SCNA; (+) strand; PAM type: NRG; PAM sequence: GAG
cagattccacattcactttt

SEQ ID NO: 30394 - DNA, 20 bp, Artificial Sequence
  Description of Artificial Sequence: Synthetic oligonucleotide
  Target: SCNA; (+) strand; PAM type: NRG; PAM sequence: TAG
ttcacttttgagccatgact

SEQ ID NO: 30395 - DNA, 20 bp, Artificial Sequence
  Description of Artificial Sequence: Synthetic oligonucleotide
  Target: SCNA; (+) strand; PAM type: NRG; PAM sequence: AAG
acttttgagccatgacttag

SEQ ID NO: 30396 - DNA, 20 bp, Artificial Sequence
  Description of Artificial Sequence: Synthetic oligonucleotide
  Target: SCNA; (+) strand; PAM type: NRG; PAM sequence: AAG
gccatgacttagaagctatc

SEQ ID NO: 30397 - DNA, 20 bp, Artificial Sequence
  Description of Artificial Sequence: Synthetic oligonucleotide
  Target: SCNA; (+) strand; PAM type: NRG; PAM sequence: TAG
gaagctatcaagacattatg

SEQ ID NO: 30398 - DNA, 20 bp, Artificial Sequence
  Description of Artificial Sequence: Synthetic oligonucleotide
  Target: SCNA; (+) strand; PAM type: NRG; PAM sequence: CAG
ttatgtagcaacctttttct

SEQ ID NO: 30399 - DNA, 20 bp, Artificial Sequence
  Description of Artificial Sequence: Synthetic oligonucleotide
  Target: SCNA; (+) strand; PAM type: NRG; PAM sequence: CAG
caacctttttctcagtattc

SEQ ID NO: 30400 - DNA, 20 bp, Artificial Sequence
  Description of Artificial Sequence: Synthetic oligonucleotide
  Target: SCNA; (+) strand; PAM type: NRG; PAM sequence: AGG
aacctttttctcagtattcc

SEQ ID NO: 30401 - DNA, 20 bp, Artificial Sequence
  Description of Artificial Sequence: Synthetic oligonucleotide
  Target: SCNA; (+) strand; PAM type: NRG; PAM sequence: TAG
atgtgcatgcattaactcaa

SEQ ID NO: 30402 - DNA, 20 bp, Artificial Sequence
  Description of Artificial Sequence: Synthetic oligonucleotide
  Target: SCNA; (+) strand; PAM type: NRG; PAM sequence: AGG
tgtgcatgcattaactcaat

SEQ ID NO: 30403 - DNA, 20 bp, Artificial Sequence
  Description of Artificial Sequence: Synthetic oligonucleotide
  Target: SCNA; (+) strand; PAM type: NRG; PAM sequence: CAG
gcattaactcaataggtatt

SEQ ID NO: 30404 - DNA, 20 bp, Artificial Sequence
  Description of Artificial Sequence: Synthetic oligonucleotide
  Target: SCNA; (+) strand; PAM type: NRG; PAM sequence: TAG
ggtattcagatgtttcccat

SEQ ID NO: 30405 - DNA, 20 bp, Artificial Sequence
  Description of Artificial Sequence: Synthetic oligonucleotide
  Target: SCNA; (+) strand; PAM type: NRG; PAM sequence: AAG
ttcagatgtttcccattagt

SEQ ID NO: 30406 - DNA, 20 bp, Artificial Sequence
  Description of Artificial Sequence: Synthetic oligonucleotide
  Target: SCNA; (+) strand; PAM type: NRG; PAM sequence: AAG
aatattccccaataaacttc

SEQ ID NO: 30407 - DNA, 20 bp, Artificial Sequence
  Description of Artificial Sequence: Synthetic oligonucleotide
  Target: SCNA; (+) strand; PAM type: NRG; PAM sequence: AAG
caataaacttcaagatttgt

SEQ ID NO: 30408 - DNA, 20 bp, Artificial Sequence
  Description of Artificial Sequence: Synthetic oligonucleotide
  Target: SCNA; (+) strand; PAM type: NRG; PAM sequence: TAG
tatttttgcattgtgaaaaa

SEQ ID NO: 30409 - DNA, 20 bp, Artificial Sequence
  Description of Artificial Sequence: Synthetic oligonucleotide
  Target: SCNA; (+) strand; PAM type: NRG; PAM sequence: CAG
tgtgaccaaaaccatcacca

SEQ ID NO: 30410 - DNA, 20 bp, Artificial Sequence
  Description of Artificial Sequence: Synthetic oligonucleotide
  Target: SCNA; (+) strand; PAM type: NRG; PAM sequence: TGG
attattattattattatttt

SEQ ID NO: 30411 - DNA, 20 bp, Artificial Sequence
  Description of Artificial Sequence: Synthetic oligonucleotide
  Target: SCNA; (+) strand; PAM type: NRG; PAM sequence: TGG
atttttggtttgtttgtatc

SEQ ID NO: 30412 - DNA, 20 bp, Artificial Sequence
  Description of Artificial Sequence: Synthetic oligonucleotide
  Target: SCNA; (+) strand; PAM type: NRG; PAM sequence: TGG
ttgtttgtatctggcacatt

SEQ ID NO: 30413 - DNA, 20 bp, Artificial Sequence
  Description of Artificial Sequence: Synthetic oligonucleotide
  Target: SCNA; (+) strand; PAM type: NRG; PAM sequence: GGG
tgtttgtatctggcacattt

SEQ ID NO: 30414 - DNA, 20 bp, Artificial Sequence
  Description of Artificial Sequence: Synthetic oligonucleotide
  Target: SCNA; (+) strand; PAM type: NRG; PAM sequence: GGG
gtttgtatctggcacatttg

SEQ ID NO: 30415 - DNA, 20 bp, Artificial Sequence
  Description of Artificial Sequence: Synthetic oligonucleotide
  Target: SCNA; (+) strand; PAM type: NRG; PAM sequence: AAG
aaatcacaaataacataaat

SEQ ID NO: 30416 - DNA, 20 bp, Artificial Sequence
  Description of Artificial Sequence: Synthetic oligonucleotide
  Target: SCNA; (+) strand; PAM type: NRG; PAM sequence: TGG
ctccttcttacaaaatccaa

SEQ ID NO: 30417 - DNA, 20 bp, Artificial Sequence
  Description of Artificial Sequence: Synthetic oligonucleotide
  Target: SCNA; (+) strand; PAM type: NRG; PAM sequence: AAG
aaaatccaatggcttcccac

SEQ ID NO: 30418 - DNA, 20 bp, Artificial Sequence
  Description of Artificial Sequence: Synthetic oligonucleotide
  Target: SCNA; (+) strand; PAM type: NRG; PAM sequence: TAG
aatatgcaaatttcttacta

SEQ ID NO: 30419 - DNA, 20 bp, Artificial Sequence
  Description of Artificial Sequence: Synthetic oligonucleotide
  Target: SCNA; (+) strand; PAM type: NRG; PAM sequence: AAG
aatttcttactatagcttat

SEQ ID NO: 30420 - DNA, 20 bp, Artificial Sequence
  Description of Artificial Sequence: Synthetic oligonucleotide
  Target: SCNA; (+) strand; PAM type: NRG; PAM sequence: TGG
ttactatagcttataagatc

SEQ ID NO: 30421 - DNA, 20 bp, Artificial Sequence
  Description of Artificial Sequence: Synthetic oligonucleotide
  Target: SCNA; (+) strand; PAM type: NRG; PAM sequence: CAG
ggaataatttttcctatctc

SEQ ID NO: 30422 - DNA, 20 bp, Artificial Sequence
  Description of Artificial Sequence: Synthetic oligonucleotide
  Target: SCNA; (+) strand; PAM type: NRG; PAM sequence: TAG
ttctcacattcatcatattc

SEQ ID NO: 30423 - DNA, 20 bp, Artificial Sequence
  Description of Artificial Sequence: Synthetic oligonucleotide
  Target: SCNA; (+) strand; PAM type: NRG; PAM sequence: CAG
ttcatcatattctagctaat

SEQ ID NO: 30424 - DNA, 20 bp, Artificial Sequence
  Description of Artificial Sequence: Synthetic oligonucleotide
  Target: SCNA; (+) strand; PAM type: NRG; PAM sequence: AGG
tcatcatattctagctaatc

SEQ ID NO: 30425 - DNA, 20 bp, Artificial Sequence
  Description of Artificial Sequence: Synthetic oligonucleotide
  Target: SCNA; (+) strand; PAM type: NRG; PAM sequence: TAG
ttttatgtcataaaatatgc

SEQ ID NO: 30426 - DNA, 20 bp, Artificial Sequence
  Description of Artificial Sequence: Synthetic oligonucleotide
  Target: SCNA; (+) strand; PAM type: NRG; PAM sequence: AAG
gctagatttgcacaccctta

SEQ ID NO: 30427 - DNA, 20 bp, Artificial Sequence
  Description of Artificial Sequence: Synthetic oligonucleotide
  Target: SCNA; (+) strand; PAM type: NRG; PAM sequence: GAG
cccttaaagccttcatatac

SEQ ID NO: 30428 - DNA, 20 bp, Artificial Sequence
  Description of Artificial Sequence: Synthetic oligonucleotide
  Target: SCNA; (+) strand; PAM type: NRG; PAM sequence: TGG
tatacgagtttgttctgcct

SEQ ID NO: 30429 - DNA, 20 bp, Artificial Sequence
  Description of Artificial Sequence: Synthetic oligonucleotide
  Target: SCNA; (+) strand; PAM type: NRG; PAM sequence: CAG
acattctctctctcatcaca

SEQ ID NO: 30430 - DNA, 20 bp, Artificial Sequence
  Description of Artificial Sequence: Synthetic oligonucleotide
  Target: SCNA; (+) strand; PAM type: NRG; PAM sequence: TGG
tctctctctcatcacacagc

SEQ ID NO: 30431 - DNA, 20 bp, Artificial Sequence
  Description of Artificial Sequence: Synthetic oligonucleotide
  Target: SCNA; (+) strand; PAM type: NRG; PAM sequence: GAG
ttcctgtataaactttccat

SEQ ID NO: 30432 - DNA, 20 bp, Artificial Sequence
  Description of Artificial Sequence: Synthetic oligonucleotide
  Target: SCNA; (+) strand; PAM type: NRG; PAM sequence: TGG
tgtataaactttccatgagc

SEQ ID NO: 30433 - DNA, 20 bp, Artificial Sequence
  Description of Artificial Sequence: Synthetic oligonucleotide
  Target: SCNA; (+) strand; PAM type: NRG; PAM sequence: TGG
cttgtctgactgaacccaaa

SEQ ID NO: 30434 - DNA, 20 bp, Artificial Sequence
  Description of Artificial Sequence: Synthetic oligonucleotide
  Target: SCNA; (+) strand; PAM type: NRG; PAM sequence: TGG
gactgaacccaaatggctaa

SEQ ID NO: 30435 - DNA, 20 bp, Artificial Sequence
  Description of Artificial Sequence: Synthetic oligonucleotide
  Target: SCNA; (+) strand; PAM type: NRG; PAM sequence: TGG
ctaatttatgatgctttgct

SEQ ID NO: 30436 - DNA, 20 bp, Artificial Sequence
  Description of Artificial Sequence: Synthetic oligonucleotide
  Target: SCNA; (+) strand; PAM type: NRG; PAM sequence: GGG
taatttatgatgctttgctt

SEQ ID NO: 30437 - DNA, 20 bp, Artificial Sequence
  Description of Artificial Sequence: Synthetic oligonucleotide
  Target: SCNA; (+) strand; PAM type: NRG; PAM sequence: GGG
aatttatgatgctttgcttg

SEQ ID NO: 30438 - DNA, 20 bp, Artificial Sequence
  Description of Artificial Sequence: Synthetic oligonucleotide
  Target: SCNA; (+) strand; PAM type: NRG; PAM sequence: GGG
atttatgatgctttgcttgg

SEQ ID NO: 30439 - DNA, 20 bp, Artificial Sequence
  Description of Artificial Sequence: Synthetic oligonucleotide
  Target: SCNA; (+) strand; PAM type: NRG; PAM sequence: GGG
tttatgatgctttgcttggg

SEQ ID NO: 30440 - DNA, 20 bp, Artificial Sequence
  Description of Artificial Sequence: Synthetic oligonucleotide
  Target: SCNA; (+) strand; PAM type: NRG; PAM sequence: GAG
gctttgcttggggggaaaat

SEQ ID NO: 30441 - DNA, 20 bp, Artificial Sequence
  Description of Artificial Sequence: Synthetic oligonucleotide
  Target: SCNA; (+) strand; PAM type: NRG; PAM sequence: GAG
tttgcttggggggaaaatga

SEQ ID NO: 30442 - DNA, 20 bp, Artificial Sequence
  Description of Artificial Sequence: Synthetic oligonucleotide
  Target: SCNA; (+) strand; PAM type: NRG; PAM sequence: AGG
ttgcttggggggaaaatgag

SEQ ID NO: 30443 - DNA, 20 bp, Artificial Sequence
  Description of Artificial Sequence: Synthetic oligonucleotide
  Target: SCNA; (+) strand; PAM type: NRG; PAM sequence: TGG
cttggggggaaaatgagagg

SEQ ID NO: 30444 - DNA, 20 bp, Artificial Sequence
  Description of Artificial Sequence: Synthetic oligonucleotide
  Target: SCNA; (+) strand; PAM type: NRG; PAM sequence: GGG
ttggggggaaaatgagaggt

SEQ ID NO: 30445 - DNA, 20 bp, Artificial Sequence
  Description of Artificial Sequence: Synthetic oligonucleotide
  Target: SCNA; (+) strand; PAM type: NRG; PAM sequence: GAG
ggggggaaaatgagaggtgg

SEQ ID NO: 30446 - DNA, 20 bp, Artificial Sequence
  Description of Artificial Sequence: Synthetic oligonucleotide
  Target: SCNA; (+) strand; PAM type: NRG; PAM sequence: CGG
gagaggtgggagtctgttta

SEQ ID NO: 30447 - DNA, 20 bp, Artificial Sequence
  Description of Artificial Sequence: Synthetic oligonucleotide
  Target: SCNA; (+) strand; PAM type: NRG; PAM sequence: TGG
gggagtctgtttacggaaca

SEQ ID NO: 30448 - DNA, 20 bp, Artificial Sequence
  Description of Artificial Sequence: Synthetic oligonucleotide
  Target: SCNA; (+) strand; PAM type: NRG; PAM sequence: AAG
agtctgtttacggaacatgg

SEQ ID NO: 30449 - DNA, 20 bp, Artificial Sequence
  Description of Artificial Sequence: Synthetic oligonucleotide
  Target: SCNA; (+) strand; PAM type: NRG; PAM sequence: CAG
ggaacatggaagtccttttg

SEQ ID NO: 30450 - DNA, 20 bp, Artificial Sequence
  Description of Artificial Sequence: Synthetic oligonucleotide
  Target: SCNA; (+) strand; PAM type: NRG; PAM sequence: GAG
aacatggaagtccttttgca

SEQ ID NO: 30451 - DNA, 20 bp, Artificial Sequence
  Description of Artificial Sequence: Synthetic oligonucleotide
  Target: SCNA; (+) strand; PAM type: NRG; PAM sequence: AGG
acatggaagtccttttgcag

SEQ ID NO: 30452 - DNA, 20 bp, Artificial Sequence
  Description of Artificial Sequence: Synthetic oligonucleotide
  Target: SCNA; (+) strand; PAM type: NRG; PAM sequence: AAG
aagtccttttgcagaggtac

SEQ ID NO: 30453 - DNA, 20 bp, Artificial Sequence
  Description of Artificial Sequence: Synthetic oligonucleotide
  Target: SCNA; (+) strand; PAM type: NRG; PAM sequence: GAG
gtccttttgcagaggtacaa

SEQ ID NO: 30454 - DNA, 20 bp, Artificial Sequence
  Description of Artificial Sequence: Synthetic oligonucleotide
  Target: SCNA; (+) strand; PAM type: NRG; PAM sequence: TGG
cttttgcagaggtacaagag

SEQ ID NO: 30455 - DNA, 20 bp, Artificial Sequence
  Description of Artificial Sequence: Synthetic oligonucleotide
  Target: SCNA; (+) strand; PAM type: NRG; PAM sequence: TGG
cagaggtacaagagtggaaa

SEQ ID NO: 30456 - DNA, 20 bp, Artificial Sequence
  Description of Artificial Sequence: Synthetic oligonucleotide
  Target: SCNA; (+) strand; PAM type: NRG; PAM sequence: CAG
gagtggaaatggctgttccc

SEQ ID NO: 30457 - DNA, 20 bp, Artificial Sequence
  Description of Artificial Sequence: Synthetic oligonucleotide
  Target: SCNA; (+) strand; PAM type: NRG; PAM sequence: TGG
gaaatggctgttccccagcc

SEQ ID NO: 30458 - DNA, 20 bp, Artificial Sequence
  Description of Artificial Sequence: Synthetic oligonucleotide
  Target: SCNA; (+) strand; PAM type: NRG; PAM sequence: GAG
gttccccagcctggctctct

SEQ ID NO: 30459 - DNA, 20 bp, Artificial Sequence
  Description of Artificial Sequence: Synthetic oligonucleotide
  Target: SCNA; (+) strand; PAM type: NRG; PAM sequence: CAG
cccagcctggctctctgagt

SEQ ID NO: 30460 - DNA, 20 bp, Artificial Sequence
  Description of Artificial Sequence: Synthetic oligonucleotide
  Target: SCNA; (+) strand; PAM type: NRG; PAM sequence: CAG
tgagtcagacctgacatcca

SEQ ID NO: 30461 - DNA, 20 bp, Artificial Sequence
  Description of Artificial Sequence: Synthetic oligonucleotide
  Target: SCNA; (+) strand; PAM type: NRG; PAM sequence: GAG
agtcagacctgacatccaca

SEQ ID NO: 30462 - DNA, 20 bp, Artificial Sequence
  Description of Artificial Sequence: Synthetic oligonucleotide
  Target: SCNA; (+) strand; PAM type: NRG; PAM sequence: GAG
tcagacctgacatccacaga

SEQ ID NO: 30463 - DNA, 20 bp, Artificial Sequence
  Description of Artificial Sequence: Synthetic oligonucleotide
  Target: SCNA; (+) strand; PAM type: NRG; PAM sequence: GAG
agacctgacatccacagaga

SEQ ID NO: 30464 - DNA, 20 bp, Artificial Sequence
  Description of Artificial Sequence: Synthetic oligonucleotide
  Target: SCNA; (+) strand; PAM type: NRG; PAM sequence: CAG
catccacagagagagcactg

SEQ ID NO: 30465 - DNA, 20 bp, Artificial Sequence
  Description of Artificial Sequence: Synthetic oligonucleotide
  Target: SCNA; (+) strand; PAM type: NRG; PAM sequence: TGG
aaacgcttctgttttgattg

SEQ ID NO: 30466 - DNA, 20 bp, Artificial Sequence
  Description of Artificial Sequence: Synthetic oligonucleotide
  Target: SCNA; (+) strand; PAM type: NRG; PAM sequence: TGG
tctgttttgattgtggtaat

SEQ ID NO: 30467 - DNA, 20 bp, Artificial Sequence
  Description of Artificial Sequence: Synthetic oligonucleotide
  Target: SCNA; (+) strand; PAM type: NRG; PAM sequence: CAG
attgtggtaattggaacaat

SEQ ID NO: 30468 - DNA, 20 bp, Artificial Sequence
  Description of Artificial Sequence: Synthetic oligonucleotide
  Target: SCNA; (+) strand; PAM type: NRG; PAM sequence: AGG
ttgtggtaattggaacaatc

SEQ ID NO: 30469 - DNA, 20 bp, Artificial Sequence
  Description of Artificial Sequence: Synthetic oligonucleotide
  Target: SCNA; (+) strand; PAM type: NRG; PAM sequence: GGG
tgtggtaattggaacaatca

SEQ ID NO: 30470 - DNA, 20 bp, Artificial Sequence
  Description of Artificial Sequence: Synthetic oligonucleotide
  Target: SCNA; (+) strand; PAM type: NRG; PAM sequence: AAG
acaatcagggcacaaactgc

SEQ ID NO: 30471 - DNA, 20 bp, Artificial Sequence
  Description of Artificial Sequence: Synthetic oligonucleotide
  Target: SCNA; (+) strand; PAM type: NRG; PAM sequence: AGG
caatcagggcacaaactgca

SEQ ID NO: 30472 - DNA, 20 bp, Artificial Sequence
  Description of Artificial Sequence: Synthetic oligonucleotide
  Target: SCNA; (+) strand; PAM type: NRG; PAM sequence: TGG
ggcacaaactgcaaggtcac

SEQ ID NO: 30473 - DNA, 20 bp, Artificial Sequence
  Description of Artificial Sequence: Synthetic oligonucleotide
  Target: SCNA; (+) strand; PAM type: NRG; PAM sequence: AAG
caaactgcaaggtcactggc

SEQ ID NO: 30474 - DNA, 20 bp, Artificial Sequence
  Description of Artificial Sequence: Synthetic oligonucleotide
  Target: SCNA; (+) strand; PAM type: NRG; PAM sequence: AGG
aaactgcaaggtcactggca

SEQ ID NO: 30475 - DNA, 20 bp, Artificial Sequence
  Description of Artificial Sequence: Synthetic oligonucleotide
  Target: SCNA; (+) strand; PAM type: NRG; PAM sequence: GGG
aactgcaaggtcactggcaa

SEQ ID NO: 30476 - DNA, 20 bp, Artificial Sequence
  Description of Artificial Sequence: Synthetic oligonucleotide
  Target: SCNA; (+) strand; PAM type: NRG; PAM sequence: TAG
tgcaaggtcactggcaaggg

SEQ ID NO: 30477 - DNA, 20 bp, Artificial Sequence
  Description of Artificial Sequence: Synthetic oligonucleotide
  Target: SCNA; (+) strand; PAM type: NRG; PAM sequence: CAG
aaggtcactggcaagggtag

SEQ ID NO: 30478 - DNA, 20 bp, Artificial Sequence
  Description of Artificial Sequence: Synthetic oligonucleotide
  Target: SCNA; (+) strand; PAM type: NRG; PAM sequence: CAG
gtcactggcaagggtagcag

SEQ ID NO: 30479 - DNA, 20 bp, Artificial Sequence
  Description of Artificial Sequence: Synthetic oligonucleotide
  Target: SCNA; (+) strand; PAM type: NRG; PAM sequence: AGG
tcactggcaagggtagcagc

SEQ ID NO: 30480 - DNA, 20 bp, Artificial Sequence
  Description of Artificial Sequence: Synthetic oligonucleotide
  Target: SCNA; (+) strand; PAM type: NRG; PAM sequence: TAG
agcaggcatgattcctccct

SEQ ID NO: 30481 - DNA, 20 bp, Artificial Sequence
  Description of Artificial Sequence: Synthetic oligonucleotide
  Target: SCNA; (+) strand; PAM type: NRG; PAM sequence: AAG
ttcctcccttagtaatttta

SEQ ID NO: 30482 - DNA, 20 bp, Artificial Sequence
  Description of Artificial Sequence: Synthetic oligonucleotide
  Target: SCNA; (+) strand; PAM type: NRG; PAM sequence: CAG
ctcccttagtaattttaaag

SEQ ID NO: 30483 - DNA, 20 bp, Artificial Sequence
  Description of Artificial Sequence: Synthetic oligonucleotide
  Target: SCNA; (+) strand; PAM type: NRG; PAM sequence: CAG
ccttagtaattttaaagcag

SEQ ID NO: 30484 - DNA, 20 bp, Artificial Sequence
  Description of Artificial Sequence: Synthetic oligonucleotide
  Target: SCNA; (+) strand; PAM type: NRG; PAM sequence: AAG
tttaaagcagcagatttcaa

SEQ ID NO: 30485 - DNA, 20 bp, Artificial Sequence
  Description of Artificial Sequence: Synthetic oligonucleotide
  Target: SCNA; (+) strand; PAM type: NRG; PAM sequence: AGG
ttaaagcagcagatttcaaa

SEQ ID NO: 30486 - DNA, 20 bp, Artificial Sequence
  Description of Artificial Sequence: Synthetic oligonucleotide
  Target: SCNA; (+) strand; PAM type: NRG; PAM sequence: GGG
taaagcagcagatttcaaaa

SEQ ID NO: 30487 - DNA, 20 bp, Artificial Sequence
  Description of Artificial Sequence: Synthetic oligonucleotide
  Target: SCNA; (+) strand; PAM type: NRG; PAM sequence: AAG
agatttcaaaagggaaaacc

SEQ ID NO: 30488 - DNA, 20 bp, Artificial Sequence
  Description of Artificial Sequence: Synthetic oligonucleotide
  Target: SCNA; (+) strand; PAM type: NRG; PAM sequence: CAG
tttcaaaagggaaaaccaag

SEQ ID NO: 30489 - DNA, 20 bp, Artificial Sequence
  Description of Artificial Sequence: Synthetic oligonucleotide
  Target: SCNA; (+) strand; PAM type: NRG; PAM sequence: AAG
agggaaaaccaagcagatga

SEQ ID NO: 30490 - DNA, 20 bp, Artificial Sequence
  Description of Artificial Sequence: Synthetic oligonucleotide
  Target: SCNA; (+) strand; PAM type: NRG; PAM sequence: GAG
aaaaccaagcagatgaaagt

SEQ ID NO: 30491 - DNA, 20 bp, Artificial Sequence
  Description of Artificial Sequence: Synthetic oligonucleotide
  Target: SCNA; (+) strand; PAM type: NRG; PAM sequence: CAG
accaagcagatgaaagtgag

SEQ ID NO: 30492 - DNA, 20 bp, Artificial Sequence
  Description of Artificial Sequence: Synthetic oligonucleotide
  Target: SCNA; (+) strand; PAM type: NRG; PAM sequence: CAG
aagtgagcagatttgttctt

SEQ ID NO: 30493 - DNA, 20 bp, Artificial Sequence
  Description of Artificial Sequence: Synthetic oligonucleotide
  Target: SCNA; (+) strand; PAM type: NRG; PAM sequence: GAG
atttgttcttcagcacatgt

SEQ ID NO: 30494 - DNA, 20 bp, Artificial Sequence
  Description of Artificial Sequence: Synthetic oligonucleotide
  Target: SCNA; (+) strand; PAM type: NRG; PAM sequence: TGG
cagcacatgtgagataccct

SEQ ID NO: 30495 - DNA, 20 bp, Artificial Sequence
  Description of Artificial Sequence: Synthetic oligonucleotide
  Target: SCNA; (+) strand; PAM type: NRG; PAM sequence: GAG
gcacatgtgagatacccttg

SEQ ID NO: 30496 - DNA, 20 bp, Artificial Sequence
  Description of Artificial Sequence: Synthetic oligonucleotide
  Target: SCNA; (+) strand; PAM type: NRG; PAM sequence: TGG
tggagatgccaataaatcac

SEQ ID NO: 30497 - DNA, 20 bp, Artificial Sequence
  Description of Artificial Sequence: Synthetic oligonucleotide
  Target: SCNA; (+) strand; PAM type: NRG; PAM sequence: GAG
gagatgccaataaatcactg

SEQ ID NO: 30498 - DNA, 20 bp, Artificial Sequence
  Description of Artificial Sequence: Synthetic oligonucleotide
  Target: SCNA; (+) strand; PAM type: NRG; PAM sequence: GAG
gatgccaataaatcactgga

SEQ ID NO: 30499 - DNA, 20 bp, Artificial Sequence
  Description of Artificial Sequence: Synthetic oligonucleotide
  Target: SCNA; (+) strand; PAM type: NRG; PAM sequence: AAG
aaatcactggagagactgtg

SEQ ID NO: 30500 - DNA, 20 bp, Artificial Sequence
  Description of Artificial Sequence: Synthetic oligonucleotide
  Target: SCNA; (+) strand; PAM type: NRG; PAM sequence: AGG
aatcactggagagactgtga

SEQ ID NO: 30501 - DNA, 20 bp, Artificial Sequence
  Description of Artificial Sequence: Synthetic oligonucleotide
  Target: SCNA; (+) strand; PAM type: NRG; PAM sequence: GAG
tcactggagagactgtgaag

SEQ ID NO: 30502 - DNA, 20 bp, Artificial Sequence
  Description of Artificial Sequence: Synthetic oligonucleotide
  Target: SCNA; (+) strand; PAM type: NRG; PAM sequence: AGG
cactggagagactgtgaagg

SEQ ID NO: 30503 - DNA, 20 bp, Artificial Sequence
  Description of Artificial Sequence: Synthetic oligonucleotide
  Target: SCNA; (+) strand; PAM type: NRG; PAM sequence: TAG
gagagactgtgaaggaggct

SEQ ID NO: 30504 - DNA, 20 bp, Artificial Sequence
  Description of Artificial Sequence: Synthetic oligonucleotide
  Target: SCNA; (+) strand; PAM type: NRG; PAM sequence: AGG
agagactgtgaaggaggctt

SEQ ID NO: 30505 - DNA, 20 bp, Artificial Sequence
  Description of Artificial Sequence: Synthetic oligonucleotide
  Target: SCNA; (+) strand; PAM type: NRG; PAM sequence: CAG
tgaaggaggcttaggccctg

SEQ ID NO: 30506 - DNA, 20 bp, Artificial Sequence
  Description of Artificial Sequence: Synthetic oligonucleotide
  Target: SCNA; (+) strand; PAM type: NRG; PAM sequence: AAG
aggcttaggccctgcagatg

SEQ ID NO: 30507 - DNA, 20 bp, Artificial Sequence
  Description of Artificial Sequence: Synthetic oligonucleotide
  Target: SCNA; (+) strand; PAM type: NRG; PAM sequence: TAG
ttaggccctgcagatgaagt

SEQ ID NO: 30508 - DNA, 20 bp, Artificial Sequence
  Description of Artificial Sequence: Synthetic oligonucleotide
  Target: SCNA; (+) strand; PAM type: NRG; PAM sequence: TGG
cctgcagatgaagttagtga

SEQ ID NO: 30509 - DNA, 20 bp, Artificial Sequence
  Description of Artificial Sequence: Synthetic oligonucleotide
  Target: SCNA; (+) strand; PAM type: NRG; PAM sequence: GAG
tgcagatgaagttagtgatg

SEQ ID NO: 30510 - DNA, 20 bp, Artificial Sequence
  Description of Artificial Sequence: Synthetic oligonucleotide
  Target: SCNA; (+) strand; PAM type: NRG; PAM sequence: AGG
gcagatgaagttagtgatgg

SEQ ID NO: 30511 - DNA, 20 bp, Artificial Sequence
  Description of Artificial Sequence: Synthetic oligonucleotide
  Target: SCNA; (+) strand; PAM type: NRG; PAM sequence: GGG
cagatgaagttagtgatgga

SEQ ID NO: 30512 - DNA, 20 bp, Artificial Sequence
  Description of Artificial Sequence: Synthetic oligonucleotide
  Target: SCNA; (+) strand; PAM type: NRG; PAM sequence: CGG
agggaaatcgtgtttatcct

SEQ ID NO: 30513 - DNA, 20 bp, Artificial Sequence
  Description of Artificial Sequence: Synthetic oligonucleotide
  Target: SCNA; (+) strand; PAM type: NRG; PAM sequence: GGG
gggaaatcgtgtttatcctc

SEQ ID NO: 30514 - DNA, 20 bp, Artificial Sequence
  Description of Artificial Sequence: Synthetic oligonucleotide
  Target: SCNA; (+) strand; PAM type: NRG; PAM sequence: CAG
cgtgtttatcctcgggctgt

SEQ ID NO: 30515 - DNA, 20 bp, Artificial Sequence
  Description of Artificial Sequence: Synthetic oligonucleotide
  Target: SCNA; (+) strand; PAM type: NRG; PAM sequence: AGG
gtgtttatcctcgggctgtc

SEQ ID NO: 30516 - DNA, 20 bp, Artificial Sequence
  Description of Artificial Sequence: Synthetic oligonucleotide
  Target: SCNA; (+) strand; PAM type: NRG; PAM sequence: TGG
gctgtcaggtctgaaatacc

SEQ ID NO: 30517 - DNA, 20 bp, Artificial Sequence
  Description of Artificial Sequence: Synthetic oligonucleotide
  Target: SCNA; (+) strand; PAM type: NRG; PAM sequence: GGG
ctgtcaggtctgaaatacct

SEQ ID NO: 30518 - DNA, 20 bp, Artificial Sequence
  Description of Artificial Sequence: Synthetic oligonucleotide
  Target: SCNA; (+) strand; PAM type: NRG; PAM sequence: AAG
aggtctgaaatacctgggtt

SEQ ID NO: 30519 - DNA, 20 bp, Artificial Sequence
  Description of Artificial Sequence: Synthetic oligonucleotide
  Target: SCNA; (+) strand; PAM type: NRG; PAM sequence: TGG
aaatacctgggttaagtaaa

SEQ ID NO: 30520 - DNA, 20 bp, Artificial Sequence
  Description of Artificial Sequence: Synthetic oligonucleotide
  Target: SCNA; (+) strand; PAM type: NRG; PAM sequence: TGG
tgggttaagtaaatggcctc

SEQ ID NO: 30521 - DNA, 20 bp, Artificial Sequence
  Description of Artificial Sequence: Synthetic oligonucleotide
  Target: SCNA; (+) strand; PAM type: NRG; PAM sequence: GGG
gggttaagtaaatggcctct

SEQ ID NO: 30522 - DNA, 20 bp, Artificial Sequence
  Description of Artificial Sequence: Synthetic oligonucleotide
  Target: SCNA; (+) strand; PAM type: NRG; PAM sequence: TGG
taagtaaatggcctctggga

SEQ ID NO: 30523 - DNA, 20 bp, Artificial Sequence
  Description of Artificial Sequence: Synthetic oligonucleotide
  Target: SCNA; (+) strand; PAM type: NRG; PAM sequence: CAG
aatggcctctgggatggtca

SEQ ID NO: 30524 - DNA, 20 bp, Artificial Sequence
  Description of Artificial Sequence: Synthetic oligonucleotide
  Target: SCNA; (+) strand; PAM type: NRG; PAM sequence: CGG
gcctctgggatggtcacagt

SEQ ID NO: 30525 - DNA, 20 bp, Artificial Sequence
  Description of Artificial Sequence: Synthetic oligonucleotide
  Target: SCNA; (+) strand; PAM type: NRG; PAM sequence: TAG
tggtcacagtcggcaattat

SEQ ID NO: 30526 - DNA, 20 bp, Artificial Sequence
  Description of Artificial Sequence: Synthetic oligonucleotide
  Target: SCNA; (+) strand; PAM type: NRG; PAM sequence: CAG
tcacagtcggcaattattag

SEQ ID NO: 30527 - DNA, 20 bp, Artificial Sequence
  Description of Artificial Sequence: Synthetic oligonucleotide
  Target: SCNA; (+) strand; PAM type: NRG; PAM sequence: CAG
tcggcaattattagcagtta

SEQ ID NO: 30528 - DNA, 20 bp, Artificial Sequence
  Description of Artificial Sequence: Synthetic oligonucleotide
  Target: SCNA; (+) strand; PAM type: NRG; PAM sequence: CAG
gatccatctctatgccaaaa

SEQ ID NO: 30529 - DNA, 20 bp, Artificial Sequence
  Description of Artificial Sequence: Synthetic oligonucleotide
  Target: SCNA; (+) strand; PAM type: NRG; PAM sequence: CAG
ctctatgccaaaacagataa

SEQ ID NO: 30530 - DNA, 20 bp, Artificial Sequence
  Description of Artificial Sequence: Synthetic oligonucleotide
  Target: SCNA; (+) strand; PAM type: NRG; PAM sequence: CAG
ccaaaacagataacagcatc

SEQ ID NO: 30531 - DNA, 20 bp, Artificial Sequence
  Description of Artificial Sequence: Synthetic oligonucleotide
  Target: SCNA; (+) strand; PAM type: NRG; PAM sequence: AGG
caaaacagataacagcatcc

SEQ ID NO: 30532 - DNA, 20 bp, Artificial Sequence
  Description of Artificial Sequence: Synthetic oligonucleotide
  Target: SCNA; (+) strand; PAM type: NRG; PAM sequence: AAG
cagcatccaggaattatcca

SEQ ID NO: 30533 - DNA, 20 bp, Artificial Sequence
  Description of Artificial Sequence: Synthetic oligonucleotide
  Target: SCNA; (+) strand; PAM type: NRG; PAM sequence: CAG
aattatccaaagtcacaaat

SEQ ID NO: 30534 - DNA, 20 bp, Artificial Sequence
  Description of Artificial Sequence: Synthetic oligonucleotide
  Target: SCNA; (+) strand; PAM type: NRG; PAM sequence: CAG
ccaaagtcacaaatcagtgt

SEQ ID NO: 30535 - DNA, 20 bp, Artificial Sequence
  Description of Artificial Sequence: Synthetic oligonucleotide
  Target: SCNA; (+) strand; PAM type: NRG; PAM sequence: TAG
tgtcttgtcactcacccacg

SEQ ID NO: 30536 - DNA, 20 bp, Artificial Sequence
  Description of Artificial Sequence: Synthetic oligonucleotide
  Target: SCNA; (+) strand; PAM type: NRG; PAM sequence: TAG
tagtgcttttcccttcctcc

SEQ ID NO: 30537 - DNA, 20 bp, Artificial Sequence
  Description of Artificial Sequence: Synthetic oligonucleotide
  Target: SCNA; (+) strand; PAM type: NRG; PAM sequence: TGG
ccttcctcctagttacttaa

SEQ ID NO: 30538 - DNA, 20 bp, Artificial Sequence
  Description of Artificial Sequence: Synthetic oligonucleotide
  Target: SCNA; (+) strand; PAM type: NRG; PAM sequence: AAG
ctcctagttacttaatggat

SEQ ID NO: 30539 - DNA, 20 bp, Artificial Sequence
  Description of Artificial Sequence: Synthetic oligonucleotide
  Target: SCNA; (+) strand; PAM type: NRG; PAM sequence: AGG
tcctagttacttaatggata

SEQ ID NO: 30540 - DNA, 20 bp, Artificial Sequence
  Description of Artificial Sequence: Synthetic oligonucleotide
  Target: SCNA; (+) strand; PAM type: NRG; PAM sequence: GGG
cctagttacttaatggataa

SEQ ID NO: 30541 - DNA, 20 bp, Artificial Sequence
  Description of Artificial Sequence: Synthetic oligonucleotide
  Target: SCNA; (+) strand; PAM type: NRG; PAM sequence: AAG
acattgtcaaataaacaaac

SEQ ID NO: 30542 - DNA, 20 bp, Artificial Sequence
  Description of Artificial Sequence: Synthetic oligonucleotide
  Target: SCNA; (+) strand; PAM type: NRG; PAM sequence: GAG
tgtcaaataaacaaacaagt

SEQ ID NO: 30543 - DNA, 20 bp, Artificial Sequence
  Description of Artificial Sequence: Synthetic oligonucleotide
  Target: SCNA; (+) strand; PAM type: NRG; PAM sequence: AGG
gtcaaataaacaaacaagtg

SEQ ID NO: 30544 - DNA, 20 bp, Artificial Sequence
  Description of Artificial Sequence: Synthetic oligonucleotide
  Target: SCNA; (+) strand; PAM type: NRG; PAM sequence: AAG
taaatgttgctccgaaattt

SEQ ID NO: 30545 - DNA, 20 bp, Artificial Sequence
  Description of Artificial Sequence: Synthetic oligonucleotide
  Target: SCNA; (+) strand; PAM type: NRG; PAM sequence: AGG
aaatgttgctccgaaattta

SEQ ID NO: 30546 - DNA, 20 bp, Artificial Sequence
  Description of Artificial Sequence: Synthetic oligonucleotide
  Target: SCNA; (+) strand; PAM type: NRG; PAM sequence: TAG
cgaaatttaaggtgaatcat

SEQ ID NO: 30547 - DNA, 20 bp, Artificial Sequence
  Description of Artificial Sequence: Synthetic oligonucleotide
  Target: SCNA; (+) strand; PAM type: NRG; PAM sequence: CAG
atttaaggtgaatcattagt

SEQ ID NO: 30548 - DNA, 20 bp, Artificial Sequence
  Description of Artificial Sequence: Synthetic oligonucleotide
  Target: SCNA; (+) strand; PAM type: NRG; PAM sequence: TGG
ggtgaatcattagtcagact

SEQ ID NO: 30549 - DNA, 20 bp, Artificial Sequence
  Description of Artificial Sequence: Synthetic oligonucleotide
  Target: SCNA; (+) strand; PAM type: NRG; PAM sequence: TGG
agtcagacttggtatcgtca

SEQ ID NO: 30550 - DNA, 20 bp, Artificial Sequence
  Description of Artificial Sequence: Synthetic oligonucleotide
  Target: SCNA; (+) strand; PAM type: NRG; PAM sequence: TGG
cttggtatcgtcatggaatt

SEQ ID NO: 30551 - DNA, 20 bp, Artificial Sequence
  Description of Artificial Sequence: Synthetic oligonucleotide
  Target: SCNA; (+) strand; PAM type: NRG; PAM sequence: TAG
aatttggtctgttttctaac

SEQ ID NO: 30552 - DNA, 20 bp, Artificial Sequence
  Description of Artificial Sequence: Synthetic oligonucleotide
  Target: SCNA; (+) strand; PAM type: NRG; PAM sequence: TAG
ttttctaactagctttattt

SEQ ID NO: 30553 - DNA, 20 bp, Artificial Sequence
  Description of Artificial Sequence: Synthetic oligonucleotide
  Target: SCNA; (+) strand; PAM type: NRG; PAM sequence: CAG
taactagctttattttagca

SEQ ID NO: 30554 - DNA, 20 bp, Artificial Sequence
  Description of Artificial Sequence: Synthetic oligonucleotide
  Target: SCNA; (+) strand; PAM type: NRG; PAM sequence: TGG
ttttagcacagccataaatc

SEQ ID NO: 30555 - DNA, 20 bp, Artificial Sequence
  Description of Artificial Sequence: Synthetic oligonucleotide
  Target: SCNA; (+) strand; PAM type: NRG; PAM sequence: AAG
ctccgatgactcatacatct

SEQ ID NO: 30556 - DNA, 20 bp, Artificial Sequence
  Description of Artificial Sequence: Synthetic oligonucleotide
  Target: SCNA; (+) strand; PAM type: NRG; PAM sequence: TGG
gtgaaaaattccaactgatt

SEQ ID NO: 30557 - DNA, 20 bp, Artificial Sequence
  Description of Artificial Sequence: Synthetic oligonucleotide
  Target: SCNA; (+) strand; PAM type: NRG; PAM sequence: CAG
atatgatcatatgatgctgt

SEQ ID NO: 30558 - DNA, 20 bp, Artificial Sequence
  Description of Artificial Sequence: Synthetic oligonucleotide
  Target: SCNA; (+) strand; PAM type: NRG; PAM sequence: TGG
acaacatctgtttttgttct

SEQ ID NO: 30559 - DNA, 20 bp, Artificial Sequence
  Description of Artificial Sequence: Synthetic oligonucleotide
  Target: SCNA; (+) strand; PAM type: NRG; PAM sequence: GGG
caacatctgtttttgttctt

SEQ ID NO: 30560 - DNA, 20 bp, Artificial Sequence
  Description of Artificial Sequence: Synthetic oligonucleotide
  Target: SCNA; (+) strand; PAM type: NRG; PAM sequence: TGG
ttttgttcttgggatgttga

SEQ ID NO: 30561 - DNA, 20 bp, Artificial Sequence
  Description of Artificial Sequence: Synthetic oligonucleotide
  Target: SCNA; (+) strand; PAM type: NRG; PAM sequence: CAG
gaaccatcttataactttcc

SEQ ID NO: 30562 - DNA, 20 bp, Artificial Sequence
  Description of Artificial Sequence: Synthetic oligonucleotide
  Target: SCNA; (+) strand; PAM type: NRG; PAM sequence: AAG
taactttcccagtccccttt

SEQ ID NO: 30563 - DNA, 20 bp, Artificial Sequence
  Description of Artificial Sequence: Synthetic oligonucleotide
  Target: SCNA; (+) strand; PAM type: NRG; PAM sequence: AAG
tcccagtcccctttaagtcc

SEQ ID NO: 30564 - DNA, 20 bp, Artificial Sequence
  Description of Artificial Sequence: Synthetic oligonucleotide
  Target: SCNA; (+) strand; PAM type: NRG; PAM sequence: GAG
ccagtcccctttaagtccaa

SEQ ID NO: 30565 - DNA, 20 bp, Artificial Sequence
  Description of Artificial Sequence: Synthetic oligonucleotide
  Target: SCNA; (+) strand; PAM type: NRG; PAM sequence: AGG
cagtcccctttaagtccaag

SEQ ID NO: 30566 - DNA, 20 bp, Artificial Sequence
  Description of Artificial Sequence: Synthetic oligonucleotide
  Target: SCNA; (+) strand; PAM type: NRG; PAM sequence: GAG
aagtccaagaggatacaact

SEQ ID NO: 30567 - DNA, 20 bp, Artificial Sequence
  Description of Artificial Sequence: Synthetic oligonucleotide
  Target: SCNA; (+) strand; PAM type: NRG; PAM sequence: AAG
tccaagaggatacaactgag

SEQ ID NO: 30568 - DNA, 20 bp, Artificial Sequence
  Description of Artificial Sequence: Synthetic oligonucleotide
  Target: SCNA; (+) strand; PAM type: NRG; PAM sequence: AGG
ccaagaggatacaactgaga

SEQ ID NO: 30569 - DNA, 20 bp, Artificial Sequence
  Description of Artificial Sequence: Synthetic oligonucleotide
  Target: SCNA; (+) strand; PAM type: NRG; PAM sequence: CAG
agaggatacaactgagaagg

SEQ ID NO: 30570 - DNA, 20 bp, Artificial Sequence
  Description of Artificial Sequence: Synthetic oligonucleotide
  Target: SCNA; (+) strand; PAM type: NRG; PAM sequence: AGG
gaggatacaactgagaaggc

SEQ ID NO: 30571 - DNA, 20 bp, Artificial Sequence
  Description of Artificial Sequence: Synthetic oligonucleotide
  Target: SCNA; (+) strand; PAM type: NRG; PAM sequence: TAG
gatacaactgagaaggcagg

SEQ ID NO: 30572 - DNA, 20 bp, Artificial Sequence
  Description of Artificial Sequence: Synthetic oligonucleotide
  Target: SCNA; (+) strand; PAM type: NRG; PAM sequence: GAG
tacaactgagaaggcaggta

SEQ ID NO: 30573 - DNA, 20 bp, Artificial Sequence
  Description of Artificial Sequence: Synthetic oligonucleotide
  Target: SCNA; (+) strand; PAM type: NRG; PAM sequence: TGG
gagaaggcaggtagagtttt

SEQ ID NO: 30574 - DNA, 20 bp, Artificial Sequence
  Description of Artificial Sequence: Synthetic oligonucleotide
  Target: SCNA; (+) strand; PAM type: NRG; PAM sequence: CAG
aggcaggtagagtttttggt

SEQ ID NO: 30575 - DNA, 20 bp, Artificial Sequence
  Description of Artificial Sequence: Synthetic oligonucleotide
  Target: SCNA; (+) strand; PAM type: NRG; PAM sequence: TGG
caggtagagtttttggtcag

SEQ ID NO: 30576 - DNA, 20 bp, Artificial Sequence
  Description of Artificial Sequence: Synthetic oligonucleotide
  Target: SCNA; (+) strand; PAM type: NRG; PAM sequence: TAG
tagagtttttggtcagtggc

SEQ ID NO: 30577 - DNA, 20 bp, Artificial Sequence
  Description of Artificial Sequence: Synthetic oligonucleotide
  Target: SCNA; (+) strand; PAM type: NRG; PAM sequence: AGG
agagtttttggtcagtggct

SEQ ID NO: 30578 - DNA, 20 bp, Artificial Sequence
  Description of Artificial Sequence: Synthetic oligonucleotide
  Target: SCNA; (+) strand; PAM type: NRG; PAM sequence: TGG
tgaatatcaaacaaattgcc

SEQ ID NO: 30579 - DNA, 20 bp, Artificial Sequence
  Description of Artificial Sequence: Synthetic oligonucleotide
  Target: SCNA; (+) strand; PAM type: NRG; PAM sequence: GAG
tcaaacaaattgcctggtat

SEQ ID NO: 30580 - DNA, 20 bp, Artificial Sequence
  Description of Artificial Sequence: Synthetic oligonucleotide
  Target: SCNA; (+) strand; PAM type: NRG; PAM sequence: CAG
tgcctggtatgagaatttaa

SEQ ID NO: 30581 - DNA, 20 bp, Artificial Sequence
  Description of Artificial Sequence: Synthetic oligonucleotide
  Target: SCNA; (+) strand; PAM type: NRG; PAM sequence: CAG
tatgaccacaatttttttaa

SEQ ID NO: 30582 - DNA, 20 bp, Artificial Sequence
  Description of Artificial Sequence: Synthetic oligonucleotide
  Target: SCNA; (+) strand; PAM type: NRG; PAM sequence: CAG
atctacttgaaacatcgcct

SEQ ID NO: 30583 - DNA, 20 bp, Artificial Sequence
  Description of Artificial Sequence: Synthetic oligonucleotide
  Target: SCNA; (+) strand; PAM type: NRG; PAM sequence: AAG
aaacatcgcctcagtcaatg

SEQ ID NO: 30584 - DNA, 20 bp, Artificial Sequence
  Description of Artificial Sequence: Synthetic oligonucleotide
  Target: SCNA; (+) strand; PAM type: NRG; PAM sequence: AAG
tgttctataactaataataa

SEQ ID NO: 30585 - DNA, 20 bp, Artificial Sequence
  Description of Artificial Sequence: Synthetic oligonucleotide
  Target: SCNA; (+) strand; PAM type: NRG; PAM sequence: GAG
caaattgctgttttaatcat

SEQ ID NO: 30586 - DNA, 20 bp, Artificial Sequence
  Description of Artificial Sequence: Synthetic oligonucleotide
  Target: SCNA; (+) strand; PAM type: NRG; PAM sequence: AGG
aaattgctgttttaatcatg

SEQ ID NO: 30587 - DNA, 20 bp, Artificial Sequence
  Description of Artificial Sequence: Synthetic oligonucleotide
  Target: SCNA; (+) strand; PAM type: NRG; PAM sequence: TAG
taatcatgaggattaccatt

SEQ ID NO: 30588 - DNA, 20 bp, Artificial Sequence
  Description of Artificial Sequence: Synthetic oligonucleotide
  Target: SCNA; (+) strand; PAM type: NRG; PAM sequence: CAG
atgaggattaccatttagaa

SEQ ID NO: 30589 - DNA, 20 bp, Artificial Sequence
  Description of Artificial Sequence: Synthetic oligonucleotide
  Target: SCNA; (+) strand; PAM type: NRG; PAM sequence: TAG
ggattaccatttagaacagc

SEQ ID NO: 30590 - DNA, 20 bp, Artificial Sequence
  Description of Artificial Sequence: Synthetic oligonucleotide
  Target: SCNA; (+) strand; PAM type: NRG; PAM sequence: AGG
gattaccatttagaacagct

SEQ ID NO: 30591 - DNA, 20 bp, Artificial Sequence
  Description of Artificial Sequence: Synthetic oligonucleotide
  Target: SCNA; (+) strand; PAM type: NRG; PAM sequence: CGG
taaacatttactttttaatc

SEQ ID NO: 30592 - DNA, 20 bp, Artificial Sequence
  Description of Artificial Sequence: Synthetic oligonucleotide
  Target: SCNA; (+) strand; PAM type: NRG; PAM sequence: AAG
ttactttttaatccggaaat

SEQ ID NO: 30593 - DNA, 20 bp, Artificial Sequence
  Description of Artificial Sequence: Synthetic oligonucleotide
  Target: SCNA; (+) strand; PAM type: NRG; PAM sequence: AAG
tttaatccggaaataagtta

SEQ ID NO: 30594 - DNA, 20 bp, Artificial Sequence
  Description of Artificial Sequence: Synthetic oligonucleotide
  Target: SCNA; (+) strand; PAM type: NRG; PAM sequence: AAG
atgaataataaatgttttta

SEQ ID NO: 30595 - DNA, 20 bp, Artificial Sequence
  Description of Artificial Sequence: Synthetic oligonucleotide
  Target: SCNA; (+) strand; PAM type: NRG; PAM sequence: TGG
aaaatgtacttgttaccttg

SEQ ID NO: 30596 - DNA, 20 bp, Artificial Sequence
  Description of Artificial Sequence: Synthetic oligonucleotide
  Target: SCNA; (+) strand; PAM type: NRG; PAM sequence: GGG
aaatgtacttgttaccttgt

SEQ ID NO: 30597 - DNA, 20 bp, Artificial Sequence
  Description of Artificial Sequence: Synthetic oligonucleotide
  Target: SCNA; (+) strand; PAM type: NRG; PAM sequence: TAG
tgggtattcctgaacatgat

SEQ ID NO: 30598 - DNA, 20 bp, Artificial Sequence
  Description of Artificial Sequence: Synthetic oligonucleotide
  Target: SCNA; (+) strand; PAM type: NRG; PAM sequence: AGG
gggtattcctgaacatgatt

SEQ ID NO: 30599 - DNA, 20 bp, Artificial Sequence
  Description of Artificial Sequence: Synthetic oligonucleotide
  Target: SCNA; (+) strand; PAM type: NRG; PAM sequence: AAG
attaggatttttatttctcc

SEQ ID NO: 30600 - DNA, 20 bp, Artificial Sequence
  Description of Artificial Sequence: Synthetic oligonucleotide
  Target: SCNA; (+) strand; PAM type: NRG; PAM sequence: CAG
caagtatttttattcactca

SEQ ID NO: 30601 - DNA, 20 bp, Artificial Sequence
  Description of Artificial Sequence: Synthetic oligonucleotide
  Target: SCNA; (+) strand; PAM type: NRG; PAM sequence: AAG
actcacagaatcaaaatgtc

SEQ ID NO: 30602 - DNA, 20 bp, Artificial Sequence
  Description of Artificial Sequence: Synthetic oligonucleotide
  Target: SCNA; (+) strand; PAM type: NRG; PAM sequence: AGG
ctcacagaatcaaaatgtca

SEQ ID NO: 30603 - DNA, 20 bp, Artificial Sequence
  Description of Artificial Sequence: Synthetic oligonucleotide
  Target: SCNA; (+) strand; PAM type: NRG; PAM sequence: AAG
tcaaaatgtcaaggctatat

SEQ ID NO: 30604 - DNA, 20 bp, Artificial Sequence
  Description of Artificial Sequence: Synthetic oligonucleotide
  Target: SCNA; (+) strand; PAM type: NRG; PAM sequence: AAG
aggctatataagttttcatc

SEQ ID NO: 30605 - DNA, 20 bp, Artificial Sequence
  Description of Artificial Sequence: Synthetic oligonucleotide
  Target: SCNA; (+) strand; PAM type: NRG; PAM sequence: TAG
gttttcatcaagtgctaatt

SEQ ID NO: 30606 - DNA, 20 bp, Artificial Sequence
  Description of Artificial Sequence: Synthetic oligonucleotide
  Target: SCNA; (+) strand; PAM type: NRG; PAM sequence: AAG
caagtgctaatttagcatct

SEQ ID NO: 30607 - DNA, 20 bp, Artificial Sequence
  Description of Artificial Sequence: Synthetic oligonucleotide
  Target: SCNA; (+) strand; PAM type: NRG; PAM sequence: AAG
tttttattaattaatttgta

SEQ ID NO: 30608 - DNA, 20 bp, Artificial Sequence
  Description of Artificial Sequence: Synthetic oligonucleotide
  Target: SCNA; (+) strand; PAM type: NRG; PAM sequence: AGG
ttttattaattaatttgtaa

SEQ ID NO: 30609 - DNA, 20 bp, Artificial Sequence
  Description of Artificial Sequence: Synthetic oligonucleotide
  Target: SCNA; (+) strand; PAM type: NRG; PAM sequence: GAG
tttgtaaaggaaataataat

SEQ ID NO: 30610 - DNA, 20 bp, Artificial Sequence
  Description of Artificial Sequence: Synthetic oligonucleotide
  Target: SCNA; (+) strand; PAM type: NRG; PAM sequence: GAG
tgtaaaggaaataataatga

SEQ ID NO: 30611 - DNA, 20 bp, Artificial Sequence
  Description of Artificial Sequence: Synthetic oligonucleotide
  Target: SCNA; (+) strand; PAM type: NRG; PAM sequence: AAG
ggaaataataatgagagtca

SEQ ID NO: 30612 - DNA, 20 bp, Artificial Sequence
  Description of Artificial Sequence: Synthetic oligonucleotide
  Target: SCNA; (+) strand; PAM type: NRG; PAM sequence: AGG
gaaataataatgagagtcaa

SEQ ID NO: 30613 - DNA, 20 bp, Artificial Sequence
  Description of Artificial Sequence: Synthetic oligonucleotide
  Target: SCNA; (+) strand; PAM type: NRG; PAM sequence: AAG
ataataatgagagtcaaagg

SEQ ID NO: 30614 - DNA, 20 bp, Artificial Sequence
  Description of Artificial Sequence: Synthetic oligonucleotide
  Target: SCNA; (+) strand; PAM type: NRG; PAM sequence: AAG
ataatgagagtcaaaggaag

SEQ ID NO: 30615 - DNA, 20 bp, Artificial Sequence
  Description of Artificial Sequence: Synthetic oligonucleotide
  Target: SCNA; (+) strand; PAM type: NRG; PAM sequence: TGG
aaaggaagaagcatctcctg

SEQ ID NO: 30616 - DNA, 20 bp, Artificial Sequence
  Description of Artificial Sequence: Synthetic oligonucleotide
  Target: SCNA; (+) strand; PAM type: NRG; PAM sequence: GAG
gaagaagcatctcctgtggt

SEQ ID NO: 30617 - DNA, 20 bp, Artificial Sequence
  Description of Artificial Sequence: Synthetic oligonucleotide
  Target: SCNA; (+) strand; PAM type: NRG; PAM sequence: CAG
cctgtggtgagctccatttc

SEQ ID NO: 30618 - DNA, 20 bp, Artificial Sequence
  Description of Artificial Sequence: Synthetic oligonucleotide
  Target: SCNA; (+) strand; PAM type: NRG; PAM sequence: TGG
cgaaaccattaaaatattta

SEQ ID NO: 30619 - DNA, 20 bp, Artificial Sequence
  Description of Artificial Sequence: Synthetic oligonucleotide
  Target: SCNA; (+) strand; PAM type: NRG; PAM sequence: GAG
attaaaatatttatggcact

SEQ ID NO: 30620 - DNA, 20 bp, Artificial Sequence
  Description of Artificial Sequence: Synthetic oligonucleotide
  Target: SCNA; (+) strand; PAM type: NRG; PAM sequence: AGG
ttaaaatatttatggcactg

SEQ ID NO: 30621 - DNA, 20 bp, Artificial Sequence
  Description of Artificial Sequence: Synthetic oligonucleotide
  Target: SCNA; (+) strand; PAM type: NRG; PAM sequence: CAG
ttatggcactgaggctgaat

SEQ ID NO: 30622 - DNA, 20 bp, Artificial Sequence
  Description of Artificial Sequence: Synthetic oligonucleotide
  Target: SCNA; (+) strand; PAM type: NRG; PAM sequence: CGG
ggcactgaggctgaatcaga

SEQ ID NO: 30623 - DNA, 20 bp, Artificial Sequence
  Description of Artificial Sequence: Synthetic oligonucleotide
  Target: SCNA; (+) strand; PAM type: NRG; PAM sequence: GGG
gcactgaggctgaatcagac

SEQ ID NO: 30624 - DNA, 20 bp, Artificial Sequence
  Description of Artificial Sequence: Synthetic oligonucleotide
  Target: SCNA; (+) strand; PAM type: NRG; PAM sequence: TGG
gtcttgtgtactctcttgtg

SEQ ID NO: 30625 - DNA, 20 bp, Artificial Sequence
  Description of Artificial Sequence: Synthetic oligonucleotide
  Target: SCNA; (+) strand; PAM type: NRG; PAM sequence: TAG
tcttgtgtggccatattgtg

SEQ ID NO: 30626 - DNA, 20 bp, Artificial Sequence
  Description of Artificial Sequence: Synthetic oligonucleotide
  Target: SCNA; (+) strand; PAM type: NRG; PAM sequence: CAG
gtggccatattgtgtagcaa

SEQ ID NO: 30627 - DNA, 20 bp, Artificial Sequence
  Description of Artificial Sequence: Synthetic oligonucleotide
  Target: SCNA; (+) strand; PAM type: NRG; PAM sequence: TGG
gccatattgtgtagcaacag

SEQ ID NO: 30628 - DNA, 20 bp, Artificial Sequence
  Description of Artificial Sequence: Synthetic oligonucleotide
  Target: SCNA; (+) strand; PAM type: NRG; PAM sequence: GGG
ccatattgtgtagcaacagt

SEQ ID NO: 30629 - DNA, 20 bp, Artificial Sequence
  Description of Artificial Sequence: Synthetic oligonucleotide
  Target: SCNA; (+) strand; PAM type: NRG; PAM sequence: AAG
aacagtgggtttcgaataat

SEQ ID NO: 30630 - DNA, 20 bp, Artificial Sequence
  Description of Artificial Sequence: Synthetic oligonucleotide
  Target: SCNA; (+) strand; PAM type: NRG; PAM sequence: CAG
gggtttcgaataataagatt

SEQ ID NO: 30631 - DNA, 20 bp, Artificial Sequence
  Description of Artificial Sequence: Synthetic oligonucleotide
  Target: SCNA; (+) strand; PAM type: NRG; PAM sequence: TAG
ataagattcagtcatccatt

SEQ ID NO: 30632 - DNA, 20 bp, Artificial Sequence
  Description of Artificial Sequence: Synthetic oligonucleotide
  Target: SCNA; (+) strand; PAM type: NRG; PAM sequence: TGG
tcatccatttagactccaat

SEQ ID NO: 30633 - DNA, 20 bp, Artificial Sequence
  Description of Artificial Sequence: Synthetic oligonucleotide
  Target: SCNA; (+) strand; PAM type: NRG; PAM sequence: GAG
atccatttagactccaattg

SEQ ID NO: 30634 - DNA, 20 bp, Artificial Sequence
  Description of Artificial Sequence: Synthetic oligonucleotide
  Target: SCNA; (+) strand; PAM type: NRG; PAM sequence: CAG
tttagactccaattggagct

SEQ ID NO: 30635 - DNA, 20 bp, Artificial Sequence
  Description of Artificial Sequence: Synthetic oligonucleotide
  Target: SCNA; (+) strand; PAM type: NRG; PAM sequence: AGG
ttagactccaattggagctc

SEQ ID NO: 30636 - DNA, 20 bp, Artificial Sequence
  Description of Artificial Sequence: Synthetic oligonucleotide
  Target: SCNA; (+) strand; PAM type: NRG; PAM sequence: AAG
ttataatgattaacttcaaa

SEQ ID NO: 30637 - DNA, 20 bp, Artificial Sequence
  Description of Artificial Sequence: Synthetic oligonucleotide
  Target: SCNA; (+) strand; PAM type: NRG; PAM sequence: TAG
tcaaaaagatgcactatttg

SEQ ID NO: 30638 - DNA, 20 bp, Artificial Sequence
  Description of Artificial Sequence: Synthetic oligonucleotide
  Target: SCNA; (+) strand; PAM type: NRG; PAM sequence: CAG
gacctatgttgaaacttatg

SEQ ID NO: 30639 - DNA, 20 bp, Artificial Sequence
  Description of Artificial Sequence: Synthetic oligonucleotide
  Target: SCNA; (+) strand; PAM type: NRG; PAM sequence: TGG
ctatgttgaaacttatgcag

SEQ ID NO: 30640 - DNA, 20 bp, Artificial Sequence
  Description of Artificial Sequence: Synthetic oligonucleotide
  Target: SCNA; (+) strand; PAM type: NRG; PAM sequence: AAG
acttatgcagtggaactaaa

SEQ ID NO: 30641 - DNA, 20 bp, Artificial Sequence
  Description of Artificial Sequence: Synthetic oligonucleotide
  Target: SCNA; (+) strand; PAM type: NRG; PAM sequence: AAG
ccacctatttttataataaa

SEQ ID NO: 30642 - DNA, 20 bp, Artificial Sequence
  Description of Artificial Sequence: Synthetic oligonucleotide
  Target: SCNA; (+) strand; PAM type: NRG; PAM sequence: AGG
cacctatttttataataaaa

SEQ ID NO: 30643 - DNA, 20 bp, Artificial Sequence
  Description of Artificial Sequence: Synthetic oligonucleotide
  Target: SCNA; (+) strand; PAM type: NRG; PAM sequence: AAG
gcacaaatacgcaaatgcaa

SEQ ID NO: 30644 - DNA, 20 bp, Artificial Sequence
  Description of Artificial Sequence: Synthetic oligonucleotide
  Target: SCNA; (+) strand; PAM type: NRG; PAM sequence: TGG
caaatgcaaaagaaattcat

SEQ ID NO: 30645 - DNA, 20 bp, Artificial Sequence
  Description of Artificial Sequence: Synthetic oligonucleotide
  Target: SCNA; (+) strand; PAM type: NRG; PAM sequence: CAG
atattatactttcatttaat

SEQ ID NO: 30646 - DNA, 20 bp, Artificial Sequence
  Description of Artificial Sequence: Synthetic oligonucleotide
  Target: SCNA; (+) strand; PAM type: NRG; PAM sequence: AAG
ttcatttaatcagttcttct

SEQ ID NO: 30647 - DNA, 20 bp, Artificial Sequence
  Description of Artificial Sequence: Synthetic oligonucleotide
  Target: SCNA; (+) strand; PAM type: NRG; PAM sequence: AAG
tttaatcagttcttctaagt

SEQ ID NO: 30648 - DNA, 20 bp, Artificial Sequence
  Description of Artificial Sequence: Synthetic oligonucleotide
  Target: SCNA; (+) strand; PAM type: NRG; PAM sequence: AGG
ttaatcagttcttctaagta

SEQ ID NO: 30649 - DNA, 20 bp, Artificial Sequence
  Description of Artificial Sequence: Synthetic oligonucleotide
  Target: SCNA; (+) strand; PAM type: NRG; PAM sequence: AAG
tacccccccaaaactccatt

SEQ ID NO: 30650 - DNA, 20 bp, Artificial Sequence
  Description of Artificial Sequence: Synthetic oligonucleotide
  Target: SCNA; (+) strand; PAM type: NRG; PAM sequence: TGG
aagtatatctatatgaccat

SEQ ID NO: 30651 - DNA, 20 bp, Artificial Sequence
  Description of Artificial Sequence: Synthetic oligonucleotide
  Target: SCNA; (+) strand; PAM type: NRG; PAM sequence: GGG
agtatatctatatgaccatt

SEQ ID NO: 30652 - DNA, 20 bp, Artificial Sequence
  Description of Artificial Sequence: Synthetic oligonucleotide
  Target: SCNA; (+) strand; PAM type: NRG; PAM sequence: AAG
tatctatatgaccattgggt

SEQ ID NO: 30653 - DNA, 20 bp, Artificial Sequence
  Description of Artificial Sequence: Synthetic oligonucleotide
  Target: SCNA; (+) strand; PAM type: NRG; PAM sequence: TAG
gtaagattttttatgattat

SEQ ID NO: 30654 - DNA, 20 bp, Artificial Sequence
  Description of Artificial Sequence: Synthetic oligonucleotide
  Target: SCNA; (+) strand; PAM type: NRG; PAM sequence: TGG
attttttatgattattagta

SEQ ID NO: 30655 - DNA, 20 bp, Artificial Sequence
  Description of Artificial Sequence: Synthetic oligonucleotide
  Target: SCNA; (+) strand; PAM type: NRG; PAM sequence: GGG
ttttttatgattattagtat

SEQ ID NO: 30656 - DNA, 20 bp, Artificial Sequence
  Description of Artificial Sequence: Synthetic oligonucleotide
  Target: SCNA; (+) strand; PAM type: NRG; PAM sequence: TAG
atgggaaaattgtgactgtt

SEQ ID NO: 30657 - DNA, 20 bp, Artificial Sequence
  Description of Artificial Sequence: Synthetic oligonucleotide
  Target: SCNA; (+) strand; PAM type: NRG; PAM sequence: AAG
ttagatatattaaatatatt

SEQ ID NO: 30658 - DNA, 20 bp, Artificial Sequence
  Description of Artificial Sequence: Synthetic oligonucleotide
  Target: SCNA; (+) strand; PAM type: NRG; PAM sequence: AAG
agtaatatatttaatgattt

SEQ ID NO: 30659 - DNA, 20 bp, Artificial Sequence
  Description of Artificial Sequence: Synthetic oligonucleotide
  Target: SCNA; (+) strand; PAM type: NRG; PAM sequence: CAG
aaattgaaacctcattttgc

SEQ ID NO: 30660 - DNA, 20 bp, Artificial Sequence
  Description of Artificial Sequence: Synthetic oligonucleotide
  Target: SCNA; (+) strand; PAM type: NRG; PAM sequence: AAG
tgttactttgtcctgaacat

SEQ ID NO: 30661 - DNA, 20 bp, Artificial Sequence
  Description of Artificial Sequence: Synthetic oligonucleotide
  Target: SCNA; (+) strand; PAM type: NRG; PAM sequence: AAG
gtcctgaacataagttttaa

SEQ ID NO: 30662 - DNA, 20 bp, Artificial Sequence
  Description of Artificial Sequence: Synthetic oligonucleotide
  Target: SCNA; (+) strand; PAM type: NRG; PAM sequence: AAG
cataagttttaaaagaattt

SEQ ID NO: 30663 - DNA, 20 bp, Artificial Sequence
  Description of Artificial Sequence: Synthetic oligonucleotide
  Target: SCNA; (+) strand; PAM type: NRG; PAM sequence: GAG
tattctcctaaatgctttgt

SEQ ID NO: 30664 - DNA, 20 bp, Artificial Sequence
  Description of Artificial Sequence: Synthetic oligonucleotide
  Target: SCNA; (+) strand; PAM type: NRG; PAM sequence: AAG
ctaaatgctttgtgagactt

SEQ ID NO: 30665 - DNA, 20 bp, Artificial Sequence
  Description of Artificial Sequence: Synthetic oligonucleotide
  Target: SCNA; (+) strand; PAM type: NRG; PAM sequence: CAG
gtgagacttaagataaaaaa

SEQ ID NO: 30666 - DNA, 20 bp, Artificial Sequence
  Description of Artificial Sequence: Synthetic oligonucleotide
  Target: SCNA; (+) strand; PAM type: NRG; PAM sequence: CAG
taagataaaaaacagttcct

SEQ ID NO: 30667 - DNA, 20 bp, Artificial Sequence
  Description of Artificial Sequence: Synthetic oligonucleotide
  Target: SCNA; (+) strand; PAM type: NRG; PAM sequence: AAG
gttcctcagaactcctgaca

SEQ ID NO: 30668 - DNA, 20 bp, Artificial Sequence
  Description of Artificial Sequence: Synthetic oligonucleotide
  Target: SCNA; (+) strand; PAM type: NRG; PAM sequence: AGG
ttcctcagaactcctgacaa

SEQ ID NO: 30669 - DNA, 20 bp, Artificial Sequence
  Description of Artificial Sequence: Synthetic oligonucleotide
  Target: SCNA; (+) strand; PAM type: NRG; PAM sequence: GGG
tcctcagaactcctgacaaa

SEQ ID NO: 30670 - DNA, 20 bp, Artificial Sequence
  Description of Artificial Sequence: Synthetic oligonucleotide
  Target: SCNA; (+) strand; PAM type: NRG; PAM sequence: GGG
cctcagaactcctgacaaag

SEQ ID NO: 30671 - DNA, 20 bp, Artificial Sequence
  Description of Artificial Sequence: Synthetic oligonucleotide
  Target: SCNA; (+) strand; PAM type: NRG; PAM sequence: GGG
ctcagaactcctgacaaagg

SEQ ID NO: 30672 - DNA, 20 bp, Artificial Sequence
  Description of Artificial Sequence: Synthetic oligonucleotide
  Target: SCNA; (+) strand; PAM type: NRG; PAM sequence: GGG
tcagaactcctgacaaaggg

SEQ ID NO: 30673 - DNA, 20 bp, Artificial Sequence
  Description of Artificial Sequence: Synthetic oligonucleotide
  Target: SCNA; (+) strand; PAM type: NRG; PAM sequence: CAG
gaactcctgacaaagggggg

SEQ ID NO: 30674 - DNA, 20 bp, Artificial Sequence
  Description of Artificial Sequence: Synthetic oligonucleotide
  Target: SCNA; (+) strand; PAM type: NRG; PAM sequence: AAG
cctgacaaaggggggcagta

SEQ ID NO: 30675 - DNA, 20 bp, Artificial Sequence
  Description of Artificial Sequence: Synthetic oligonucleotide
  Target: SCNA; (+) strand; PAM type: NRG; PAM sequence: AAG
gacaaaggggggcagtaaag

SEQ ID NO: 30676 - DNA, 20 bp, Artificial Sequence
  Description of Artificial Sequence: Synthetic oligonucleotide
  Target: SCNA; (+) strand; PAM type: NRG; PAM sequence: AAG
gggggcagtaaagaagcaaa

SEQ ID NO: 30677 - DNA, 20 bp, Artificial Sequence
  Description of Artificial Sequence: Synthetic oligonucleotide
  Target: SCNA; (+) strand; PAM type: NRG; PAM sequence: TGG
aagaagcaaaaagattttta

SEQ ID NO: 30678 - DNA, 20 bp, Artificial Sequence
  Description of Artificial Sequence: Synthetic oligonucleotide
  Target: SCNA; (+) strand; PAM type: NRG; PAM sequence: GAG
gaagcaaaaagatttttatg

SEQ ID NO: 30679 - DNA, 20 bp, Artificial Sequence
  Description of Artificial Sequence: Synthetic oligonucleotide
  Target: SCNA; (+) strand; PAM type: NRG; PAM sequence: CAG
aaaaagatttttatggagtt

SEQ ID NO: 30680 - DNA, 20 bp, Artificial Sequence
  Description of Artificial Sequence: Synthetic oligonucleotide
  Target: SCNA; (+) strand; PAM type: NRG; PAM sequence: AGG
aaaagatttttatggagttc

SEQ ID NO: 30681 - DNA, 20 bp, Artificial Sequence
  Description of Artificial Sequence: Synthetic oligonucleotide
  Target: SCNA; (+) strand; PAM type: NRG; PAM sequence: GGG
aaagatttttatggagttca

SEQ ID NO: 30682 - DNA, 20 bp, Artificial Sequence
  Description of Artificial Sequence: Synthetic oligonucleotide
  Target: SCNA; (+) strand; PAM type: NRG; PAM sequence: AAG
atttttatggagttcaggga

SEQ ID NO: 30683 - DNA, 20 bp, Artificial Sequence
  Description of Artificial Sequence: Synthetic oligonucleotide
  Target: SCNA; (+) strand; PAM type: NRG; PAM sequence: AAG
tggagttcagggaaagctga

SEQ ID NO: 30684 - DNA, 20 bp, Artificial Sequence
  Description of Artificial Sequence: Synthetic oligonucleotide
  Target: SCNA; (+) strand; PAM type: NRG; PAM sequence: AGG
ggagttcagggaaagctgaa

SEQ ID NO: 30685 - DNA, 20 bp, Artificial Sequence
  Description of Artificial Sequence: Synthetic oligonucleotide
  Target: SCNA; (+) strand; PAM type: NRG; PAM sequence: CAG
tacattccctattttctaaa

SEQ ID NO: 30686 - DNA, 20 bp, Artificial Sequence
  Description of Artificial Sequence: Synthetic oligonucleotide
  Target: SCNA; (+) strand; PAM type: NRG; PAM sequence: TGG
attttctaaacagtaaatga

SEQ ID NO: 30687 - DNA, 20 bp, Artificial Sequence
  Description of Artificial Sequence: Synthetic oligonucleotide
  Target: SCNA; (+) strand; PAM type: NRG; PAM sequence: TAG
gtaaatgatggattgcattt

SEQ ID NO: 30688 - DNA, 20 bp, Artificial Sequence
  Description of Artificial Sequence: Synthetic oligonucleotide
  Target: SCNA; (+) strand; PAM type: NRG; PAM sequence: AGG
taaatgatggattgcatttt

SEQ ID NO: 30689 - DNA, 20 bp, Artificial Sequence
  Description of Artificial Sequence: Synthetic oligonucleotide
  Target: SCNA; (+) strand; PAM type: NRG; PAM sequence: CAG
atgatggattgcattttagg

SEQ ID NO: 30690 - DNA, 20 bp, Artificial Sequence
  Description of Artificial Sequence: Synthetic oligonucleotide
  Target: SCNA; (+) strand; PAM type: NRG; PAM sequence: TGG
aaattgctaaaattaaatgt

SEQ ID NO: 30691 - DNA, 20 bp, Artificial Sequence
  Description of Artificial Sequence: Synthetic oligonucleotide
  Target: SCNA; (+) strand; PAM type: NRG; PAM sequence: GGG
aattgctaaaattaaatgtt

SEQ ID NO: 30692 - DNA, 20 bp, Artificial Sequence
  Description of Artificial Sequence: Synthetic oligonucleotide
  Target: SCNA; (+) strand; PAM type: NRG; PAM sequence: TGG
gctaaaattaaatgttggga

SEQ ID NO: 30693 - DNA, 20 bp, Artificial Sequence
  Description of Artificial Sequence: Synthetic oligonucleotide
  Target: SCNA; (+) strand; PAM type: NRG; PAM sequence: TGG
taaatgttgggatggaaatg

SEQ ID NO: 30694 - DNA, 20 bp, Artificial Sequence
  Description of Artificial Sequence: Synthetic oligonucleotide
  Target: SCNA; (+) strand; PAM type: NRG; PAM sequence: CAG
tgggatggaaatgtggaatg

SEQ ID NO: 30695 - DNA, 20 bp, Artificial Sequence
  Description of Artificial Sequence: Synthetic oligonucleotide
  Target: SCNA; (+) strand; PAM type: NRG; PAM sequence: GAG
ggatggaaatgtggaatgca

SEQ ID NO: 30696 - DNA, 20 bp, Artificial Sequence
  Description of Artificial Sequence: Synthetic oligonucleotide
  Target: SCNA; (+) strand; PAM type: NRG; PAM sequence: AAG
cttttaatttaatattttca

SEQ ID NO: 30697 - DNA, 20 bp, Artificial Sequence
  Description of Artificial Sequence: Synthetic oligonucleotide
  Target: SCNA; (+) strand; PAM type: NRG; PAM sequence: AAG
tttaatattttcaaagaatt

SEQ ID NO: 30698 - DNA, 20 bp, Artificial Sequence
  Description of Artificial Sequence: Synthetic oligonucleotide
  Target: SCNA; (+) strand; PAM type: NRG; PAM sequence: GAG
taatattttcaaagaattaa

SEQ ID NO: 30699 - DNA, 20 bp, Artificial Sequence
  Description of Artificial Sequence: Synthetic oligonucleotide
  Target: SCNA; (+) strand; PAM type: NRG; PAM sequence: TAG
aatgaatgttattgcaaacc

SEQ ID NO: 30700 - DNA, 20 bp, Artificial Sequence
  Description of Artificial Sequence: Synthetic oligonucleotide
  Target: SCNA; (+) strand; PAM type: NRG; PAM sequence: AGG
atgaatgttattgcaaacct

SEQ ID NO: 30701 - DNA, 20 bp, Artificial Sequence
  Description of Artificial Sequence: Synthetic oligonucleotide
  Target: SCNA; (+) strand; PAM type: NRG; PAM sequence: AAG
tattgcaaacctaggcttat

SEQ ID NO: 30702 - DNA, 20 bp, Artificial Sequence
  Description of Artificial Sequence: Synthetic oligonucleotide
  Target: SCNA; (+) strand; PAM type: NRG; PAM sequence: AAG
tgcaaacctaggcttataag

SEQ ID NO: 30703 - DNA, 20 bp, Artificial Sequence
  Description of Artificial Sequence: Synthetic oligonucleotide
  Target: SCNA; (+) strand; PAM type: NRG; PAM sequence: TAG
gcttataagaagaatgcatt

SEQ ID NO: 30704 - DNA, 20 bp, Artificial Sequence
  Description of Artificial Sequence: Synthetic oligonucleotide
  Target: SCNA; (+) strand; PAM type: NRG; PAM sequence: AAG
tataagaagaatgcatttag

SEQ ID NO: 30705 - DNA, 20 bp, Artificial Sequence
  Description of Artificial Sequence: Synthetic oligonucleotide
  Target: SCNA; (+) strand; PAM type: NRG; PAM sequence: TAG
aagaatgcatttagaagccc

SEQ ID NO: 30706 - DNA, 20 bp, Artificial Sequence
  Description of Artificial Sequence: Synthetic oligonucleotide
  Target: SCNA; (+) strand; PAM type: NRG; PAM sequence: GAG
ttcttttttttttttttttt

SEQ ID NO: 30707 - DNA, 20 bp, Artificial Sequence
  Description of Artificial Sequence: Synthetic oligonucleotide
  Target: SCNA; (+) strand; PAM type: NRG; PAM sequence: TGG
ttttttttttttttttgaga

SEQ ID NO: 30708 - DNA, 20 bp, Artificial Sequence
  Description of Artificial Sequence: Synthetic oligonucleotide
  Target: SCNA; (+) strand; PAM type: NRG; PAM sequence: GAG
ttttttttttttttgagatg

SEQ ID NO: 30709 - DNA, 20 bp, Artificial Sequence
  Description of Artificial Sequence: Synthetic oligonucleotide
  Target: SCNA; (+) strand; PAM type: NRG; PAM sequence: TAG
ggagtttcgctcatgttgcc

SEQ ID NO: 30710 - DNA, 20 bp, Artificial Sequence
  Description of Artificial Sequence: Synthetic oligonucleotide
  Target: SCNA; (+) strand; PAM type: NRG; PAM sequence: AGG
gagtttcgctcatgttgcct

SEQ ID NO: 30711 - DNA, 20 bp, Artificial Sequence
  Description of Artificial Sequence: Synthetic oligonucleotide
  Target: SCNA; (+) strand; PAM type: NRG; PAM sequence: TAG
ttcgctcatgttgcctaggc

SEQ ID NO: 30712 - DNA, 20 bp, Artificial Sequence
  Description of Artificial Sequence: Synthetic oligonucleotide
  Target: SCNA; (+) strand; PAM type: NRG; PAM sequence: CAG
atgttgcctaggctagaata

SEQ ID NO: 30713 - DNA, 20 bp, Artificial Sequence
  Description of Artificial Sequence: Synthetic oligonucleotide
  Target: SCNA; (+) strand; PAM type: NRG; PAM sequence: TGG
ttgcctaggctagaatacag

SEQ ID NO: 30714 - DNA, 20 bp, Artificial Sequence
  Description of Artificial Sequence: Synthetic oligonucleotide
  Target: SCNA; (+) strand; PAM type: NRG; PAM sequence: CGG
agaatacagtggcacaatct

SEQ ID NO: 30715 - DNA, 20 bp, Artificial Sequence
  Description of Artificial Sequence: Synthetic oligonucleotide
  Target: SCNA; (+) strand; PAM type: NRG; PAM sequence: TGG
tcactgcaaccaccgcctcc

SEQ ID NO: 30716 - DNA, 20 bp, Artificial Sequence
  Description of Artificial Sequence: Synthetic oligonucleotide
  Target: SCNA; (+) strand; PAM type: NRG; PAM sequence: GGG
cactgcaaccaccgcctcct

SEQ ID NO: 30717 - DNA, 20 bp, Artificial Sequence
  Description of Artificial Sequence: Synthetic oligonucleotide
  Target: SCNA; (+) strand; PAM type: NRG; PAM sequence: CAG
ttcaaacgattcttctgcct

SEQ ID NO: 30718 - DNA, 20 bp, Artificial Sequence
  Description of Artificial Sequence: Synthetic oligonucleotide
  Target: SCNA; (+) strand; PAM type: NRG; PAM sequence: CAG
ttcttctgcctcagcctccc

SEQ ID NO: 30719 - DNA, 20 bp, Artificial Sequence
  Description of Artificial Sequence: Synthetic oligonucleotide
  Target: SCNA; (+) strand; PAM type: NRG; PAM sequence: TAG
ttctgcctcagcctccccag

SEQ ID NO: 30720 - DNA, 20 bp, Artificial Sequence
  Description of Artificial Sequence: Synthetic oligonucleotide
  Target: SCNA; (+) strand; PAM type: NRG; PAM sequence: TGG
gcctcagcctccccagtagt

SEQ ID NO: 30721 - DNA, 20 bp, Artificial Sequence
  Description of Artificial Sequence: Synthetic oligonucleotide
  Target: SCNA; (+) strand; PAM type: NRG; PAM sequence: GGG
cctcagcctccccagtagtt

SEQ ID NO: 30722 - DNA, 20 bp, Artificial Sequence
  Description of Artificial Sequence: Synthetic oligonucleotide
  Target: SCNA; (+) strand; PAM type: NRG; PAM sequence: CAG
ctccccagtagttgggatta

SEQ ID NO: 30723 - DNA, 20 bp, Artificial Sequence
  Description of Artificial Sequence: Synthetic oligonucleotide
  Target: SCNA; (+) strand; PAM type: NRG; PAM sequence: AGG
tccccagtagttgggattac

SEQ ID NO: 30724 - DNA, 20 bp, Artificial Sequence
  Description of Artificial Sequence: Synthetic oligonucleotide
  Target: SCNA; (+) strand; PAM type: NRG; PAM sequence: CGG
caggtatgtgccaccatgcc

SEQ ID NO: 30725 - DNA, 20 bp, Artificial Sequence
  Description of Artificial Sequence: Synthetic oligonucleotide
  Target: SCNA; (+) strand; PAM type: NRG; PAM sequence: TAG
cccggctaattttgtatttt

SEQ ID NO: 30726 - DNA, 20 bp, Artificial Sequence
  Description of Artificial Sequence: Synthetic oligonucleotide
  Target: SCNA; (+) strand; PAM type: NRG; PAM sequence: TAG
ggctaattttgtatttttag

SEQ ID NO: 30727 - DNA, 20 bp, Artificial Sequence
  Description of Artificial Sequence: Synthetic oligonucleotide
  Target: SCNA; (+) strand; PAM type: NRG; PAM sequence: GAG
ctaattttgtatttttagta

SEQ ID NO: 30728 - DNA, 20 bp, Artificial Sequence
  Description of Artificial Sequence: Synthetic oligonucleotide
  Target: SCNA; (+) strand; PAM type: NRG; PAM sequence: TGG
ttttgtatttttagtagaga

SEQ ID NO: 30729 - DNA, 20 bp, Artificial Sequence
  Description of Artificial Sequence: Synthetic oligonucleotide
  Target: SCNA; (+) strand; PAM type: NRG; PAM sequence: GAG
ttgtatttttagtagagatg

SEQ ID NO: 30730 - DNA, 20 bp, Artificial Sequence
  Description of Artificial Sequence: Synthetic oligonucleotide
  Target: SCNA; (+) strand; PAM type: NRG; PAM sequence: TGG
gagatggagtttctccatgt

SEQ ID NO: 30731 - DNA, 20 bp, Artificial Sequence
  Description of Artificial Sequence: Synthetic oligonucleotide
  Target: SCNA; (+) strand; PAM type: NRG; PAM sequence: AAG
ggagtttctccatgttggtc

SEQ ID NO: 30732 - DNA, 20 bp, Artificial Sequence
  Description of Artificial Sequence: Synthetic oligonucleotide
  Target: SCNA; (+) strand; PAM type: NRG; PAM sequence: TGG
tttctccatgttggtcaagc

SEQ ID NO: 30733 - DNA, 20 bp, Artificial Sequence
  Description of Artificial Sequence: Synthetic oligonucleotide
  Target: SCNA; (+) strand; PAM type: NRG; PAM sequence: CAG
tggtcttgaactcccgacct

SEQ ID NO: 30734 - DNA, 20 bp, Artificial Sequence
  Description of Artificial Sequence: Synthetic oligonucleotide
  Target: SCNA; (+) strand; PAM type: NRG; PAM sequence: AGG
ggtcttgaactcccgacctc

SEQ ID NO: 30735 - DNA, 20 bp, Artificial Sequence
  Description of Artificial Sequence: Synthetic oligonucleotide
  Target: SCNA; (+) strand; PAM type: NRG; PAM sequence: TGG
ctcaggtgatccacccgcct

SEQ ID NO: 30736 - DNA, 20 bp, Artificial Sequence
  Description of Artificial Sequence: Synthetic oligonucleotide
  Target: SCNA; (+) strand; PAM type: NRG; PAM sequence: AAG
ccacccgccttggcctccca

SEQ ID NO: 30737 - DNA, 20 bp, Artificial Sequence
  Description of Artificial Sequence: Synthetic oligonucleotide
  Target: SCNA; (+) strand; PAM type: NRG; PAM sequence: TGG
gccttggcctcccaaagtgc

SEQ ID NO: 30738 - DNA, 20 bp, Artificial Sequence
  Description of Artificial Sequence: Synthetic oligonucleotide
  Target: SCNA; (+) strand; PAM type: NRG; PAM sequence: GGG
ccttggcctcccaaagtgct

SEQ ID NO: 30739 - DNA, 20 bp, Artificial Sequence
  Description of Artificial Sequence: Synthetic oligonucleotide
  Target: SCNA; (+) strand; PAM type: NRG; PAM sequence: CAG
ctcccaaagtgctgggatta

SEQ ID NO: 30740 - DNA, 20 bp, Artificial Sequence
  Description of Artificial Sequence: Synthetic oligonucleotide
  Target: SCNA; (+) strand; PAM type: NRG; PAM sequence: AGG
tcccaaagtgctgggattac

SEQ ID NO: 30741 - DNA, 20 bp, Artificial Sequence
  Description of Artificial Sequence: Synthetic oligonucleotide
  Target: SCNA; (+) strand; PAM type: NRG; PAM sequence: GAG
agtgctgggattacaggcct

SEQ ID NO: 30742 - DNA, 20 bp, Artificial Sequence
  Description of Artificial Sequence: Synthetic oligonucleotide
  Target: SCNA; (+) strand; PAM type: NRG; PAM sequence: TGG
caggcctgagccaccgcgcc

SEQ ID NO: 30743 - DNA, 20 bp, Artificial Sequence
  Description of Artificial Sequence: Synthetic oligonucleotide
  Target: SCNA; (+) strand; PAM type: NRG; PAM sequence: AAG
gcctggcctgttttcatttt

SEQ ID NO: 30744 - DNA, 20 bp, Artificial Sequence
  Description of Artificial Sequence: Synthetic oligonucleotide
  Target: SCNA; (+) strand; PAM type: NRG; PAM sequence: TAG
gcctgttttcattttaagtg

SEQ ID NO: 30745 - DNA, 20 bp, Artificial Sequence
  Description of Artificial Sequence: Synthetic oligonucleotide
  Target: SCNA; (+) strand; PAM type: NRG; PAM sequence: TAG
tcattttaagtgtagttgtc

SEQ ID NO: 30746 - DNA, 20 bp, Artificial Sequence
  Description of Artificial Sequence: Synthetic oligonucleotide
  Target: SCNA; (+) strand; PAM type: NRG; PAM sequence: TAG
acaaattttatcttgccatt

SEQ ID NO: 30747 - DNA, 20 bp, Artificial Sequence
  Description of Artificial Sequence: Synthetic oligonucleotide
  Target: SCNA; (+) strand; PAM type: NRG; PAM sequence: TGG
ttatcttgccatttagctaa

SEQ ID NO: 30748 - DNA, 20 bp, Artificial Sequence
  Description of Artificial Sequence: Synthetic oligonucleotide
  Target: SCNA; (+) strand; PAM type: NRG; PAM sequence: GGG
tatcttgccatttagctaat

SEQ ID NO: 30749 - DNA, 20 bp, Artificial Sequence
  Description of Artificial Sequence: Synthetic oligonucleotide
  Target: SCNA; (+) strand; PAM type: NRG; PAM sequence: AAG
ttgccatttagctaatgggc

SEQ ID NO: 30750 - DNA, 20 bp, Artificial Sequence
  Description of Artificial Sequence: Synthetic oligonucleotide
  Target: SCNA; (+) strand; PAM type: NRG; PAM sequence: AAG
taatgggcaagcaaaaaatt

SEQ ID NO: 30751 - DNA, 20 bp, Artificial Sequence
  Description of Artificial Sequence: Synthetic oligonucleotide
  Target: SCNA; (+) strand; PAM type: NRG; PAM sequence: TGG
tgggcaagcaaaaaattaag

SEQ ID NO: 30752 - DNA, 20 bp, Artificial Sequence
  Description of Artificial Sequence: Synthetic oligonucleotide
  Target: SCNA; (+) strand; PAM type: NRG; PAM sequence: TGG
aaaaaattaagtggaataat

SEQ ID NO: 30753 - DNA, 20 bp, Artificial Sequence
  Description of Artificial Sequence: Synthetic oligonucleotide
  Target: SCNA; (+) strand; PAM type: NRG; PAM sequence: CAG
aattaagtggaataattgga

SEQ ID NO: 30754 - DNA, 20 bp, Artificial Sequence
  Description of Artificial Sequence: Synthetic oligonucleotide
  Target: SCNA; (+) strand; PAM type: NRG; PAM sequence: TGG
aattggacagaacaattatc

SEQ ID NO: 30755 - DNA, 20 bp, Artificial Sequence
  Description of Artificial Sequence: Synthetic oligonucleotide
  Target: SCNA; (+) strand; PAM type: NRG; PAM sequence: TGG
ttatctggtaacctaaacaa

SEQ ID NO: 30756 - DNA, 20 bp, Artificial Sequence
  Description of Artificial Sequence: Synthetic oligonucleotide
  Target: SCNA; (+) strand; PAM type: NRG; PAM sequence: GAG
aacctaaacaatggtaacat

SEQ ID NO: 30757 - DNA, 20 bp, Artificial Sequence
  Description of Artificial Sequence: Synthetic oligonucleotide
  Target: SCNA; (+) strand; PAM type: NRG; PAM sequence: TAG
taaacaatggtaacatgaga

SEQ ID NO: 30758 - DNA, 20 bp, Artificial Sequence
  Description of Artificial Sequence: Synthetic oligonucleotide
  Target: SCNA; (+) strand; PAM type: NRG; PAM sequence: AGG
aaacaatggtaacatgagat

SEQ ID NO: 30759 - DNA, 20 bp, Artificial Sequence
  Description of Artificial Sequence: Synthetic oligonucleotide
  Target: SCNA; (+) strand; PAM type: NRG; PAM sequence: TGG
taggtattttatgcattgtt

SEQ ID NO: 30760 - DNA, 20 bp, Artificial Sequence
  Description of Artificial Sequence: Synthetic oligonucleotide
  Target: SCNA; (+) strand; PAM type: NRG; PAM sequence: TAG
gtttggacttataaactatc

SEQ ID NO: 30761 - DNA, 20 bp, Artificial Sequence
  Description of Artificial Sequence: Synthetic oligonucleotide
  Target: SCNA; (+) strand; PAM type: NRG; PAM sequence: TAG
actatctagtgttctaataa

SEQ ID NO: 30762 - DNA, 20 bp, Artificial Sequence
  Description of Artificial Sequence: Synthetic oligonucleotide
  Target: SCNA; (+) strand; PAM type: NRG; PAM sequence: TGG
tgttctaataatagacataa

SEQ ID NO: 30763 - DNA, 20 bp, Artificial Sequence
  Description of Artificial Sequence: Synthetic oligonucleotide
  Target: SCNA; (+) strand; PAM type: NRG; PAM sequence: TAG
ataatggtttattcaactaa

SEQ ID NO: 30764 - DNA, 20 bp, Artificial Sequence
  Description of Artificial Sequence: Synthetic oligonucleotide
  Target: SCNA; (+) strand; PAM type: NRG; PAM sequence: TAG
ctaatagctactgtcatcct

SEQ ID NO: 30765 - DNA, 20 bp, Artificial Sequence
  Description of Artificial Sequence: Synthetic oligonucleotide
  Target: SCNA; (+) strand; PAM type: NRG; PAM sequence: GAG
aatagctactgtcatcctta

SEQ ID NO: 30766 - DNA, 20 bp, Artificial Sequence
  Description of Artificial Sequence: Synthetic oligonucleotide
  Target: SCNA; (+) strand; PAM type: NRG; PAM sequence: AGG
atagctactgtcatccttag

SEQ ID NO: 30767 - DNA, 20 bp, Artificial Sequence
  Description of Artificial Sequence: Synthetic oligonucleotide
  Target: SCNA; (+) strand; PAM type: NRG; PAM sequence: AAG
tagaggttattaacaactca

SEQ ID NO: 30768 - DNA, 20 bp, Artificial Sequence
  Description of Artificial Sequence: Synthetic oligonucleotide
  Target: SCNA; (+) strand; PAM type: NRG; PAM sequence: TAG
aggttattaacaactcaaag

SEQ ID NO: 30769 - DNA, 20 bp, Artificial Sequence
  Description of Artificial Sequence: Synthetic oligonucleotide
  Target: SCNA; (+) strand; PAM type: NRG; PAM sequence: AAG
tagtgaattacatccaacta

SEQ ID NO: 30770 - DNA, 20 bp, Artificial Sequence
  Description of Artificial Sequence: Synthetic oligonucleotide
  Target: SCNA; (+) strand; PAM type: NRG; PAM sequence: AGG
agtgaattacatccaactaa

SEQ ID NO: 30771 - DNA, 20 bp, Artificial Sequence
  Description of Artificial Sequence: Synthetic oligonucleotide
  Target: SCNA; (+) strand; PAM type: NRG; PAM sequence: GGG
gtgaattacatccaactaaa

SEQ ID NO: 30772 - DNA, 20 bp, Artificial Sequence
  Description of Artificial Sequence: Synthetic oligonucleotide
  Target: SCNA; (+) strand; PAM type: NRG; PAM sequence: TAG
aactaaagggtgcttttgta

SEQ ID NO: 30773 - DNA, 20 bp, Artificial Sequence
  Description of Artificial Sequence: Synthetic oligonucleotide
  Target: SCNA; (+) strand; PAM type: NRG; PAM sequence: TGG
tagacatttgttcttattgc

SEQ ID NO: 30774 - DNA, 20 bp, Artificial Sequence
  Description of Artificial Sequence: Synthetic oligonucleotide
  Target: SCNA; (+) strand; PAM type: NRG; PAM sequence: TAG
cttattcttcaaatatcttt

SEQ ID NO: 30775 - DNA, 20 bp, Artificial Sequence
  Description of Artificial Sequence: Synthetic oligonucleotide
  Target: SCNA; (+) strand; PAM type: NRG; PAM sequence: AGG
ttattcttcaaatatctttt

SEQ ID NO: 30776 - DNA, 20 bp, Artificial Sequence
  Description of Artificial Sequence: Synthetic oligonucleotide
  Target: SCNA; (+) strand; PAM type: NRG; PAM sequence: AAG
tcttttaggcaccatttaca

SEQ ID NO: 30777 - DNA, 20 bp, Artificial Sequence
  Description of Artificial Sequence: Synthetic oligonucleotide
  Target: SCNA; (+) strand; PAM type: NRG; PAM sequence: CAG
gcaccatttacaaagatgac

SEQ ID NO: 30778 - DNA, 20 bp, Artificial Sequence
  Description of Artificial Sequence: Synthetic oligonucleotide
  Target: SCNA; (+) strand; PAM type: NRG; PAM sequence: GAG
accatttacaaagatgacca

SEQ ID NO: 30779 - DNA, 20 bp, Artificial Sequence
  Description of Artificial Sequence: Synthetic oligonucleotide
  Target: SCNA; (+) strand; PAM type: NRG; PAM sequence: AGG
ccatttacaaagatgaccag

SEQ ID NO: 30780 - DNA, 20 bp, Artificial Sequence
  Description of Artificial Sequence: Synthetic oligonucleotide
  Target: SCNA; (+) strand; PAM type: NRG; PAM sequence: TAG
tacaaaatctgcatatataa

SEQ ID NO: 30781 - DNA, 20 bp, Artificial Sequence
  Description of Artificial Sequence: Synthetic oligonucleotide
  Target: SCNA; (+) strand; PAM type: NRG; PAM sequence: AAG
aaatctgcatatataataga

SEQ ID NO: 30782 - DNA, 20 bp, Artificial Sequence
  Description of Artificial Sequence: Synthetic oligonucleotide
  Target: SCNA; (+) strand; PAM type: NRG; PAM sequence: GAG
atctgcatatataatagaaa

SEQ ID NO: 30783 - DNA, 20 bp, Artificial Sequence
  Description of Artificial Sequence: Synthetic oligonucleotide
  Target: SCNA; (+) strand; PAM type: NRG; PAM sequence: CAG
gcatatataatagaaagagc

SEQ ID NO: 30784 - DNA, 20 bp, Artificial Sequence
  Description of Artificial Sequence: Synthetic oligonucleotide
  Target: SCNA; (+) strand; PAM type: NRG; PAM sequence: AGG
catatataatagaaagagcc

SEQ ID NO: 30785 - DNA, 20 bp, Artificial Sequence
  Description of Artificial Sequence: Synthetic oligonucleotide
  Target: SCNA; (+) strand; PAM type: NRG; PAM sequence: TAG
atataatagaaagagccagg

SEQ ID NO: 30786 - DNA, 20 bp, Artificial Sequence
  Description of Artificial Sequence: Synthetic oligonucleotide
  Target: SCNA; (+) strand; PAM type: NRG; PAM sequence: AAG
gccaggtagtcattcaataa

SEQ ID NO: 30787 - DNA, 20 bp, Artificial Sequence
  Description of Artificial Sequence: Synthetic oligonucleotide
  Target: SCNA; (+) strand; PAM type: NRG; PAM sequence: AAG
aggtagtcattcaataaaag

SEQ ID NO: 30788 - DNA, 20 bp, Artificial Sequence
  Description of Artificial Sequence: Synthetic oligonucleotide
  Target: SCNA; (+) strand; PAM type: NRG; PAM sequence: AGG
ggtagtcattcaataaaaga

SEQ ID NO: 30789 - DNA, 20 bp, Artificial Sequence
  Description of Artificial Sequence: Synthetic oligonucleotide
  Target: SCNA; (+) strand; PAM type: NRG; PAM sequence: TAG
attcaataaaagaaggtata

SEQ ID NO: 30790 - DNA, 20 bp, Artificial Sequence
  Description of Artificial Sequence: Synthetic oligonucleotide
  Target: SCNA; (+) strand; PAM type: NRG; PAM sequence: CAG
taaaagaaggtatatagtac

SEQ ID NO: 30791 - DNA, 20 bp, Artificial Sequence
  Description of Artificial Sequence: Synthetic oligonucleotide
  Target: SCNA; (+) strand; PAM type: NRG; PAM sequence: AGG
aaaagaaggtatatagtacc

SEQ ID NO: 30792 - DNA, 20 bp, Artificial Sequence
  Description of Artificial Sequence: Synthetic oligonucleotide
  Target: SCNA; (+) strand; PAM type: NRG; PAM sequence: AAG
aaggtatatagtaccaggaa

SEQ ID NO: 30793 - DNA, 20 bp, Artificial Sequence
  Description of Artificial Sequence: Synthetic oligonucleotide
  Target: SCNA; (+) strand; PAM type: NRG; PAM sequence: TAG
ccaggaaaagatttttatct

SEQ ID NO: 30794 - DNA, 20 bp, Artificial Sequence
  Description of Artificial Sequence: Synthetic oligonucleotide
  Target: SCNA; (+) strand; PAM type: NRG; PAM sequence: AAG
aaagatttttatcttagcct

SEQ ID NO: 30795 - DNA, 20 bp, Artificial Sequence
  Description of Artificial Sequence: Synthetic oligonucleotide
  Target: SCNA; (+) strand; PAM type: NRG; PAM sequence: AGG
aagatttttatcttagccta

SEQ ID NO: 30796 - DNA, 20 bp, Artificial Sequence
  Description of Artificial Sequence: Synthetic oligonucleotide
  Target: SCNA; (+) strand; PAM type: NRG; PAM sequence: CAG
atttttatcttagcctaagg

SEQ ID NO: 30797 - DNA, 20 bp, Artificial Sequence
  Description of Artificial Sequence: Synthetic oligonucleotide
  Target: SCNA; (+) strand; PAM type: NRG; PAM sequence: AAG
ctaaggcagtctgaattctc

SEQ ID NO: 30798 - DNA, 20 bp, Artificial Sequence
  Description of Artificial Sequence: Synthetic oligonucleotide
  Target: SCNA; (+) strand; PAM type: NRG; PAM sequence: AAG
agtctgaattctcaagccca

SEQ ID NO: 30799 - DNA, 20 bp, Artificial Sequence
  Description of Artificial Sequence: Synthetic oligonucleotide
  Target: SCNA; (+) strand; PAM type: NRG; PAM sequence: TGG
cccaaagcacataaatttgt

SEQ ID NO: 30800 - DNA, 20 bp, Artificial Sequence
  Description of Artificial Sequence: Synthetic oligonucleotide
  Target: SCNA; (+) strand; PAM type: NRG; PAM sequence: TAG
gttggaattatttcaatttc

SEQ ID NO: 30801 - DNA, 20 bp, Artificial Sequence
  Description of Artificial Sequence: Synthetic oligonucleotide
  Target: SCNA; (+) strand; PAM type: NRG; PAM sequence: CAG
aatgtgacgcacatttacac

SEQ ID NO: 30802 - DNA, 20 bp, Artificial Sequence
  Description of Artificial Sequence: Synthetic oligonucleotide
  Target: SCNA; (+) strand; PAM type: NRG; PAM sequence: TGG
gtgacgcacatttacaccag

SEQ ID NO: 30803 - DNA, 20 bp, Artificial Sequence
  Description of Artificial Sequence: Synthetic oligonucleotide
  Target: SCNA; (+) strand; PAM type: NRG; PAM sequence: CGG
gcacatttacaccagtggtt

SEQ ID NO: 30804 - DNA, 20 bp, Artificial Sequence
  Description of Artificial Sequence: Synthetic oligonucleotide
  Target: SCNA; (+) strand; PAM type: NRG; PAM sequence: CAG
ttcggttgattacttctctt

SEQ ID NO: 30805 - DNA, 20 bp, Artificial Sequence
  Description of Artificial Sequence: Synthetic oligonucleotide
  Target: SCNA; (+) strand; PAM type: NRG; PAM sequence: TAG
tgattacttctcttcagccc

SEQ ID NO: 30806 - DNA, 20 bp, Artificial Sequence
  Description of Artificial Sequence: Synthetic oligonucleotide
  Target: SCNA; (+) strand; PAM type: NRG; PAM sequence: AAG
ctcttcagccctagtctctt

SEQ ID NO: 30807 - DNA, 20 bp, Artificial Sequence
  Description of Artificial Sequence: Synthetic oligonucleotide
  Target: SCNA; (+) strand; PAM type: NRG; PAM sequence: CAG
cagccctagtctcttaagca

SEQ ID NO: 30808 - DNA, 20 bp, Artificial Sequence
  Description of Artificial Sequence: Synthetic oligonucleotide
  Target: SCNA; (+) strand; PAM type: NRG; PAM sequence: AGG
agccctagtctcttaagcac

SEQ ID NO: 30809 - DNA, 20 bp, Artificial Sequence
  Description of Artificial Sequence: Synthetic oligonucleotide
  Target: SCNA; (+) strand; PAM type: NRG; PAM sequence: CAG
agcacaggtatacacactta

SEQ ID NO: 30810 - DNA, 20 bp, Artificial Sequence
  Description of Artificial Sequence: Synthetic oligonucleotide
  Target: SCNA; (+) strand; PAM type: NRG; PAM sequence: CAG
tctgcatacaatatttttga

SEQ ID NO: 30811 - DNA, 20 bp, Artificial Sequence
  Description of Artificial Sequence: Synthetic oligonucleotide
  Target: SCNA; (+) strand; PAM type: NRG; PAM sequence: AAG
atatttttgacagaatgaaa

SEQ ID NO: 30812 - DNA, 20 bp, Artificial Sequence
  Description of Artificial Sequence: Synthetic oligonucleotide
  Target: SCNA; (+) strand; PAM type: NRG; PAM sequence: CAG
aaaaatattgatgtttattt

SEQ ID NO: 30813 - DNA, 20 bp, Artificial Sequence
  Description of Artificial Sequence: Synthetic oligonucleotide
  Target: SCNA; (+) strand; PAM type: NRG; PAM sequence: TGG
ttatttcagcgattctgaaa

SEQ ID NO: 30814 - DNA, 20 bp, Artificial Sequence
  Description of Artificial Sequence: Synthetic oligonucleotide
  Target: SCNA; (+) strand; PAM type: NRG; PAM sequence: AAG
tataaaaattctatgactat

SEQ ID NO: 30815 - DNA, 20 bp, Artificial Sequence
  Description of Artificial Sequence: Synthetic oligonucleotide
  Target: SCNA; (+) strand; PAM type: NRG; PAM sequence: GAG
tatgactataagaaattcat

SEQ ID NO: 30816 - DNA, 20 bp, Artificial Sequence
  Description of Artificial Sequence: Synthetic oligonucleotide
  Target: SCNA; (+) strand; PAM type: NRG; PAM sequence: AGG
atgactataagaaattcatg

SEQ ID NO: 30817 - DNA, 20 bp, Artificial Sequence
  Description of Artificial Sequence: Synthetic oligonucleotide
  Target: SCNA; (+) strand; PAM type: NRG; PAM sequence: CAG
tcatgaggaatgcaatatat

SEQ ID NO: 30818 - DNA, 20 bp, Artificial Sequence
  Description of Artificial Sequence: Synthetic oligonucleotide
  Target: SCNA; (+) strand; PAM type: NRG; PAM sequence: AGG
catgaggaatgcaatatatc

SEQ ID NO: 30819 - DNA, 20 bp, Artificial Sequence
  Description of Artificial Sequence: Synthetic oligonucleotide
  Target: SCNA; (+) strand; PAM type: NRG; PAM sequence: AAG
aggaatgcaatatatcagga

SEQ ID NO: 30820 - DNA, 20 bp, Artificial Sequence
  Description of Artificial Sequence: Synthetic oligonucleotide
  Target: SCNA; (+) strand; PAM type: NRG; PAM sequence: AAG
caatgtcatctttacataaa

SEQ ID NO: 30821 - DNA, 20 bp, Artificial Sequence
  Description of Artificial Sequence: Synthetic oligonucleotide
  Target: SCNA; (+) strand; PAM type: NRG; PAM sequence: AGG
aatgtcatctttacataaaa

SEQ ID NO: 30822 - DNA, 20 bp, Artificial Sequence
  Description of Artificial Sequence: Synthetic oligonucleotide
  Target: SCNA; (+) strand; PAM type: NRG; PAM sequence: CAG
tacataaaaaggatgcgtgt

SEQ ID NO: 30823 - DNA, 20 bp, Artificial Sequence
  Description of Artificial Sequence: Synthetic oligonucleotide
  Target: SCNA; (+) strand; PAM type: NRG; PAM sequence: GAG
aggatgcgtgtcagtaattt

SEQ ID NO: 30824 - DNA, 20 bp, Artificial Sequence
  Description of Artificial Sequence: Synthetic oligonucleotide
  Target: SCNA; (+) strand; PAM type: NRG; PAM sequence: GAG
gatgcgtgtcagtaatttga

SEQ ID NO: 30825 - DNA, 20 bp, Artificial Sequence
  Description of Artificial Sequence: Synthetic oligonucleotide
  Target: SCNA; (+) strand; PAM type: NRG; PAM sequence: AGG
atgcgtgtcagtaatttgag

SEQ ID NO: 30826 - DNA, 20 bp, Artificial Sequence
  Description of Artificial Sequence: Synthetic oligonucleotide
  Target: SCNA; (+) strand; PAM type: NRG; PAM sequence: TGG
gtgtcagtaatttgagaggc

SEQ ID NO: 30827 - DNA, 20 bp, Artificial Sequence
  Description of Artificial Sequence: Synthetic oligonucleotide
  Target: SCNA; (+) strand; PAM type: NRG; PAM sequence: TAG
taatttgagaggctggaatc

SEQ ID NO: 30828 - DNA, 20 bp, Artificial Sequence
  Description of Artificial Sequence: Synthetic oligonucleotide
  Target: SCNA; (+) strand; PAM type: NRG; PAM sequence: AAG
tgacaaatgtgtcacttttt

SEQ ID NO: 30829 - DNA, 20 bp, Artificial Sequence
  Description of Artificial Sequence: Synthetic oligonucleotide
  Target: SCNA; (+) strand; PAM type: NRG; PAM sequence: AGG
gacaaatgtgtcacttttta

SEQ ID NO: 30830 - DNA, 20 bp, Artificial Sequence
  Description of Artificial Sequence: Synthetic oligonucleotide
  Target: SCNA; (+) strand; PAM type: NRG; PAM sequence: CAG
tttaaggtgtgcttgattca

SEQ ID NO: 30831 - DNA, 20 bp, Artificial Sequence
  Description of Artificial Sequence: Synthetic oligonucleotide
  Target: SCNA; (+) strand; PAM type: NRG; PAM sequence: CAG
tgtgcttgattcacagctga

SEQ ID NO: 30832 - DNA, 20 bp, Artificial Sequence
  Description of Artificial Sequence: Synthetic oligonucleotide
  Target: SCNA; (+) strand; PAM type: NRG; PAM sequence: CAG
ttaaaacaatgtctatgtat

SEQ ID NO: 30833 - DNA, 20 bp, Artificial Sequence
  Description of Artificial Sequence: Synthetic oligonucleotide
  Target: SCNA; (+) strand; PAM type: NRG; PAM sequence: AAG
gtgcaatgaattctaaccaa

SEQ ID NO: 30834 - DNA, 20 bp, Artificial Sequence
  Description of Artificial Sequence: Synthetic oligonucleotide
  Target: SCNA; (+) strand; PAM type: NRG; PAM sequence: TGG
aattctaaccaaaagcttgt

SEQ ID NO: 30835 - DNA, 20 bp, Artificial Sequence
  Description of Artificial Sequence: Synthetic oligonucleotide
  Target: SCNA; (+) strand; PAM type: NRG; PAM sequence: GAG
ttctaaccaaaagcttgttg

SEQ ID NO: 30836 - DNA, 20 bp, Artificial Sequence
  Description of Artificial Sequence: Synthetic oligonucleotide
  Target: SCNA; (+) strand; PAM type: NRG; PAM sequence: CAG
aagcttgttggagctaacca

SEQ ID NO: 30837 - DNA, 20 bp, Artificial Sequence
  Description of Artificial Sequence: Synthetic oligonucleotide
  Target: SCNA; (+) strand; PAM type: NRG; PAM sequence: AAG
accacagtacctatatattc

SEQ ID NO: 30838 - DNA, 20 bp, Artificial Sequence
  Description of Artificial Sequence: Synthetic oligonucleotide
  Target: SCNA; (+) strand; PAM type: NRG; PAM sequence: TGG
ctatatattcaagatgttca

SEQ ID NO: 30839 - DNA, 20 bp, Artificial Sequence
  Description of Artificial Sequence: Synthetic oligonucleotide
  Target: SCNA; (+) strand; PAM type: NRG; PAM sequence: GGG
tatatattcaagatgttcat

SEQ ID NO: 30840 - DNA, 20 bp, Artificial Sequence
  Description of Artificial Sequence: Synthetic oligonucleotide
  Target: SCNA; (+) strand; PAM type: NRG; PAM sequence: GAG
tatattcaagatgttcatgg

SEQ ID NO: 30841 - DNA, 20 bp, Artificial Sequence
  Description of Artificial Sequence: Synthetic oligonucleotide
  Target: SCNA; (+) strand; PAM type: NRG; PAM sequence: AGG
atattcaagatgttcatggg

SEQ ID NO: 30842 - DNA, 20 bp, Artificial Sequence
  Description of Artificial Sequence: Synthetic oligonucleotide
  Target: SCNA; (+) strand; PAM type: NRG; PAM sequence: TGG
caagatgttcatgggaggaa

SEQ ID NO: 30843 - DNA, 20 bp, Artificial Sequence
  Description of Artificial Sequence: Synthetic oligonucleotide
  Target: SCNA; (+) strand; PAM type: NRG; PAM sequence: AAG
gatgttcatgggaggaatgg

SEQ ID NO: 30844 - DNA, 20 bp, Artificial Sequence
  Description of Artificial Sequence: Synthetic oligonucleotide
  Target: SCNA; (+) strand; PAM type: NRG; PAM sequence: TAG
ggaatggaagatttgatatt

SEQ ID NO: 30845 - DNA, 20 bp, Artificial Sequence
  Description of Artificial Sequence: Synthetic oligonucleotide
  Target: SCNA; (+) strand; PAM type: NRG; PAM sequence: AGG
gaatggaagatttgatattt

SEQ ID NO: 30846 - DNA, 20 bp, Artificial Sequence
  Description of Artificial Sequence: Synthetic oligonucleotide
  Target: SCNA; (+) strand; PAM type: NRG; PAM sequence: AAG
gatttgatatttaggcactg

SEQ ID NO: 30847 - DNA, 20 bp, Artificial Sequence
  Description of Artificial Sequence: Synthetic oligonucleotide
  Target: SCNA; (+) strand; PAM type: NRG; PAM sequence: AGG
atttgatatttaggcactga

SEQ ID NO: 30848 - DNA, 20 bp, Artificial Sequence
  Description of Artificial Sequence: Synthetic oligonucleotide
  Target: SCNA; (+) strand; PAM type: NRG; PAM sequence: GGG
tttgatatttaggcactgaa

SEQ ID NO: 30849 - DNA, 20 bp, Artificial Sequence
  Description of Artificial Sequence: Synthetic oligonucleotide
  Target: SCNA; (+) strand; PAM type: NRG; PAM sequence: TAG
gcactgaagggttgctatga

SEQ ID NO: 30850 - DNA, 20 bp, Artificial Sequence
  Description of Artificial Sequence: Synthetic oligonucleotide
  Target: SCNA; (+) strand; PAM type: NRG; PAM sequence: GAG
gatagttattatacacaatt

SEQ ID NO: 30851 - DNA, 20 bp, Artificial Sequence
  Description of Artificial Sequence: Synthetic oligonucleotide
  Target: SCNA; (+) strand; PAM type: NRG; PAM sequence: CAG
tttaaaatgaatatatgtgt

SEQ ID NO: 30852 - DNA, 20 bp, Artificial Sequence
  Description of Artificial Sequence: Synthetic oligonucleotide
  Target: SCNA; (+) strand; PAM type: NRG; PAM sequence: GAG
tattaaatgttataaaatat

SEQ ID NO: 30853 - DNA, 20 bp, Artificial Sequence
  Description of Artificial Sequence: Synthetic oligonucleotide
  Target: SCNA; (+) strand; PAM type: NRG; PAM sequence: AGG
attaaatgttataaaatatg

SEQ ID NO: 30854 - DNA, 20 bp, Artificial Sequence
  Description of Artificial Sequence: Synthetic oligonucleotide
  Target: SCNA; (+) strand; PAM type: NRG; PAM sequence: GGG
ttaaatgttataaaatatga

SEQ ID NO: 30855 - DNA, 20 bp, Artificial Sequence
  Description of Artificial Sequence: Synthetic oligonucleotide
  Target: SCNA; (+) strand; PAM type: NRG; PAM sequence: AAG
ctatgtaatttataaactac

SEQ ID NO: 30856 - DNA, 20 bp, Artificial Sequence
  Description of Artificial Sequence: Synthetic oligonucleotide
  Target: SCNA; (+) strand; PAM type: NRG; PAM sequence: CAG
aactacaagaaaatttatat

SEQ ID NO: 30857 - DNA, 20 bp, Artificial Sequence
  Description of Artificial Sequence: Synthetic oligonucleotide
  Target: SCNA; (+) strand; PAM type: NRG; PAM sequence: AGG
actacaagaaaatttatatc

SEQ ID NO: 30858 - DNA, 20 bp, Artificial Sequence
  Description of Artificial Sequence: Synthetic oligonucleotide
  Target: SCNA; (+) strand; PAM type: NRG; PAM sequence: CAG
cctaatatatgcactgtctt

SEQ ID NO: 30859 - DNA, 20 bp, Artificial Sequence
  Description of Artificial Sequence: Synthetic oligonucleotide
  Target: SCNA; (+) strand; PAM type: NRG; PAM sequence: TAG
gtcaactctgccaatgtgac

SEQ ID NO: 30860 - DNA, 20 bp, Artificial Sequence
  Description of Artificial Sequence: Synthetic oligonucleotide
  Target: SCNA; (+) strand; PAM type: NRG; PAM sequence: CAG
aactctgccaatgtgactag

SEQ ID NO: 30861 - DNA, 20 bp, Artificial Sequence
  Description of Artificial Sequence: Synthetic oligonucleotide
  Target: SCNA; (+) strand; PAM type: NRG; PAM sequence: GAG
caatgtgactagcagatgat

SEQ ID NO: 30862 - DNA, 20 bp, Artificial Sequence
  Description of Artificial Sequence: Synthetic oligonucleotide
  Target: SCNA; (+) strand; PAM type: NRG; PAM sequence: CAG
tgtgactagcagatgatgag

SEQ ID NO: 30863 - DNA, 20 bp, Artificial Sequence
  Description of Artificial Sequence: Synthetic oligonucleotide
  Target: SCNA; (+) strand; PAM type: NRG; PAM sequence: AGG
gtgactagcagatgatgagc

SEQ ID NO: 30864 - DNA, 20 bp, Artificial Sequence
  Description of Artificial Sequence: Synthetic oligonucleotide
  Target: SCNA; (+) strand; PAM type: NRG; PAM sequence: CAG
actagcagatgatgagcagg

SEQ ID NO: 30865 - DNA, 20 bp, Artificial Sequence
  Description of Artificial Sequence: Synthetic oligonucleotide
  Target: SCNA; (+) strand; PAM type: NRG; PAM sequence: TAG
gtgtgatattatcaattaca

SEQ ID NO: 30866 - DNA, 20 bp, Artificial Sequence
  Description of Artificial Sequence: Synthetic oligonucleotide
  Target: SCNA; (+) strand; PAM type: NRG; PAM sequence: CAG
gatattatcaattacatagt

SEQ ID NO: 30867 - DNA, 20 bp, Artificial Sequence
  Description of Artificial Sequence: Synthetic oligonucleotide
  Target: SCNA; (+) strand; PAM type: NRG; PAM sequence: GAG
aattacatagtcagaaatct

SEQ ID NO: 30868 - DNA, 20 bp, Artificial Sequence
  Description of Artificial Sequence: Synthetic oligonucleotide
  Target: SCNA; (+) strand; PAM type: NRG; PAM sequence: GAG
gagtctttctttcaccttat

SEQ ID NO: 30869 - DNA, 20 bp, Artificial Sequence
  Description of Artificial Sequence: Synthetic oligonucleotide
  Target: SCNA; (+) strand; PAM type: NRG; PAM sequence: TAG
ctttcaccttatgagctgtt

SEQ ID NO: 30870 - DNA, 20 bp, Artificial Sequence
  Description of Artificial Sequence: Synthetic oligonucleotide
  Target: SCNA; (+) strand; PAM type: NRG; PAM sequence: AGG
tttcaccttatgagctgttt

SEQ ID NO: 30871 - DNA, 20 bp, Artificial Sequence
  Description of Artificial Sequence: Synthetic oligonucleotide
  Target: SCNA; (+) strand; PAM type: NRG; PAM sequence: AAG
caccttatgagctgtttagg

SEQ ID NO: 30872 - DNA, 20 bp, Artificial Sequence
  Description of Artificial Sequence: Synthetic oligonucleotide
  Target: SCNA; (+) strand; PAM type: NRG; PAM sequence: AAG
cttatgagctgtttaggaag

SEQ ID NO: 30873 - DNA, 20 bp, Artificial Sequence
  Description of Artificial Sequence: Synthetic oligonucleotide
  Target: SCNA; (+) strand; PAM type: NRG; PAM sequence: AGG
ttatgagctgtttaggaaga

SEQ ID NO: 30874 - DNA, 20 bp, Artificial Sequence
  Description of Artificial Sequence: Synthetic oligonucleotide
  Target: SCNA; (+) strand; PAM type: NRG; PAM sequence: CAG
gaaggtgtatatgtgtgtaa

SEQ ID NO: 30875 - DNA, 20 bp, Artificial Sequence
  Description of Artificial Sequence: Synthetic oligonucleotide
  Target: SCNA; (+) strand; PAM type: NRG; PAM sequence: AGG
aaggtgtatatgtgtgtaac

SEQ ID NO: 30876 - DNA, 20 bp, Artificial Sequence
  Description of Artificial Sequence: Synthetic oligonucleotide
  Target: SCNA; (+) strand; PAM type: NRG; PAM sequence: GGG
aggtgtatatgtgtgtaaca

SEQ ID NO: 30877 - DNA, 20 bp, Artificial Sequence
  Description of Artificial Sequence: Synthetic oligonucleotide
  Target: SCNA; (+) strand; PAM type: NRG; PAM sequence: GAG
gtgtatatgtgtgtaacagg

SEQ ID NO: 30878 - DNA, 20 bp, Artificial Sequence
  Description of Artificial Sequence: Synthetic oligonucleotide
  Target: SCNA; (+) strand; PAM type: NRG; PAM sequence: AAG
atatgtgtgtaacagggagc

SEQ ID NO: 30879 - DNA, 20 bp, Artificial Sequence
  Description of Artificial Sequence: Synthetic oligonucleotide
  Target: SCNA; (+) strand; PAM type: NRG; PAM sequence: GAG
atgtgtgtaacagggagcaa

SEQ ID NO: 30880 - DNA, 20 bp, Artificial Sequence
  Description of Artificial Sequence: Synthetic oligonucleotide
  Target: SCNA; (+) strand; PAM type: NRG; PAM sequence: AGG
tgtgtgtaacagggagcaag

SEQ ID NO: 30881 - DNA, 20 bp, Artificial Sequence
  Description of Artificial Sequence: Synthetic oligonucleotide
  Target: SCNA; (+) strand; PAM type: NRG; PAM sequence: GAG
tgtgtaacagggagcaagag

SEQ ID NO: 30882 - DNA, 20 bp, Artificial Sequence
  Description of Artificial Sequence: Synthetic oligonucleotide
  Target: SCNA; (+) strand; PAM type: NRG; PAM sequence: AAG
gcaagaggagattaacttgt

SEQ ID NO: 30883 - DNA, 20 bp, Artificial Sequence
  Description of Artificial Sequence: Synthetic oligonucleotide
  Target: SCNA; (+) strand; PAM type: NRG; PAM sequence: AAG
gtaagccattatctgatgca

SEQ ID NO: 30884 - DNA, 20 bp, Artificial Sequence
  Description of Artificial Sequence: Synthetic oligonucleotide
  Target: SCNA; (+) strand; PAM type: NRG; PAM sequence: AGG
taagccattatctgatgcaa

SEQ ID NO: 30885 - DNA, 20 bp, Artificial Sequence
  Description of Artificial Sequence: Synthetic oligonucleotide
  Target: SCNA; (+) strand; PAM type: NRG; PAM sequence: CAG
gccattatctgatgcaaagg

SEQ ID NO: 30886 - DNA, 20 bp, Artificial Sequence
  Description of Artificial Sequence: Synthetic oligonucleotide
  Target: SCNA; (+) strand; PAM type: NRG; PAM sequence: AAG
tgcaaaggcagacatttact

SEQ ID NO: 30887 - DNA, 20 bp, Artificial Sequence
  Description of Artificial Sequence: Synthetic oligonucleotide
  Target: SCNA; (+) strand; PAM type: NRG; PAM sequence: AAG
catttactaagtcatctgtg

SEQ ID NO: 30888 - DNA, 20 bp, Artificial Sequence
  Description of Artificial Sequence: Synthetic oligonucleotide
  Target: SCNA; (+) strand; PAM type: NRG; PAM sequence: GAG
tttactaagtcatctgtgaa

SEQ ID NO: 30889 - DNA, 20 bp, Artificial Sequence
  Description of Artificial Sequence: Synthetic oligonucleotide
  Target: SCNA; (+) strand; PAM type: NRG; PAM sequence: TGG
ctaagtcatctgtgaagaga

SEQ ID NO: 30890 - DNA, 20 bp, Artificial Sequence
  Description of Artificial Sequence: Synthetic oligonucleotide
  Target: SCNA; (+) strand; PAM type: NRG; PAM sequence: TAG
gtgaagagatggttcgataa

SEQ ID NO: 30891 - DNA, 20 bp, Artificial Sequence
  Description of Artificial Sequence: Synthetic oligonucleotide
  Target: SCNA; (+) strand; PAM type: NRG; PAM sequence: AAG
gagatggttcgataatagct

SEQ ID NO: 30892 - DNA, 20 bp, Artificial Sequence
  Description of Artificial Sequence: Synthetic oligonucleotide
  Target: SCNA; (+) strand; PAM type: NRG; PAM sequence: CAG
taagcattcatataaatctt

SEQ ID NO: 30893 - DNA, 20 bp, Artificial Sequence
  Description of Artificial Sequence: Synthetic oligonucleotide
  Target: SCNA; (+) strand; PAM type: NRG; PAM sequence: AGG
aagcattcatataaatcttc

SEQ ID NO: 30894 - DNA, 20 bp, Artificial Sequence
  Description of Artificial Sequence: Synthetic oligonucleotide
  Target: SCNA; (+) strand; PAM type: NRG; PAM sequence: GGG
agcattcatataaatcttca

SEQ ID NO: 30895 - DNA, 20 bp, Artificial Sequence
  Description of Artificial Sequence: Synthetic oligonucleotide
  Target: SCNA; (+) strand; PAM type: NRG; PAM sequence: AAG
tcagggactcgaattctctc

SEQ ID NO: 30896 - DNA, 20 bp, Artificial Sequence
  Description of Artificial Sequence: Synthetic oligonucleotide
  Target: SCNA; (+) strand; PAM type: NRG; PAM sequence: CAG
tcgaattctctcaagtgtga

SEQ ID NO: 30897 - DNA, 20 bp, Artificial Sequence
  Description of Artificial Sequence: Synthetic oligonucleotide
  Target: SCNA; (+) strand; PAM type: NRG; PAM sequence: CAG
agaatactcctctcaactgc

SEQ ID NO: 30898 - DNA, 20 bp, Artificial Sequence
  Description of Artificial Sequence: Synthetic oligonucleotide
  Target: SCNA; (+) strand; PAM type: NRG; PAM sequence: TGG
ctgttgtaaaaaatcacatt

SEQ ID NO: 30899 - DNA, 20 bp, Artificial Sequence
  Description of Artificial Sequence: Synthetic oligonucleotide
  Target: SCNA; (+) strand; PAM type: NRG; PAM sequence: AAG
gtaaaaaatcacatttggca

SEQ ID NO: 30900 - DNA, 20 bp, Artificial Sequence
  Description of Artificial Sequence: Synthetic oligonucleotide
  Target: SCNA; (+) strand; PAM type: NRG; PAM sequence: AGG
taaaaaatcacatttggcaa

SEQ ID NO: 30901 - DNA, 20 bp, Artificial Sequence
  Description of Artificial Sequence: Synthetic oligonucleotide
  Target: SCNA; (+) strand; PAM type: NRG; PAM sequence: GGG
aaaaaatcacatttggcaaa

SEQ ID NO: 30902 - DNA, 20 bp, Artificial Sequence
  Description of Artificial Sequence: Synthetic oligonucleotide
  Target: SCNA; (+) strand; PAM type: NRG; PAM sequence: TGG
tcacatttggcaaagggctc

SEQ ID NO: 30903 - DNA, 20 bp, Artificial Sequence
  Description of Artificial Sequence: Synthetic oligonucleotide
  Target: SCNA; (+) strand; PAM type: NRG; PAM sequence: GAG
gcaaagggctctggtgtttt

SEQ ID NO: 30904 - DNA, 20 bp, Artificial Sequence
  Description of Artificial Sequence: Synthetic oligonucleotide
  Target: SCNA; (+) strand; PAM type: NRG; PAM sequence: CAG
ctggtgttttgagttctgct

SEQ ID NO: 30905 - DNA, 20 bp, Artificial Sequence
  Description of Artificial Sequence: Synthetic oligonucleotide
  Target: SCNA; (+) strand; PAM type: NRG; PAM sequence: CAG
ttttgagttctgctcagtga

SEQ ID NO: 30906 - DNA, 20 bp, Artificial Sequence
  Description of Artificial Sequence: Synthetic oligonucleotide
  Target: SCNA; (+) strand; PAM type: NRG; PAM sequence: AGG
tttgagttctgctcagtgac

SEQ ID NO: 30907 - DNA, 20 bp, Artificial Sequence
  Description of Artificial Sequence: Synthetic oligonucleotide
  Target: SCNA; (+) strand; PAM type: NRG; PAM sequence: AAG
ctcagtgacaggtttgtttt

SEQ ID NO: 30908 - DNA, 20 bp, Artificial Sequence
  Description of Artificial Sequence: Synthetic oligonucleotide
  Target: SCNA; (+) strand; PAM type: NRG; PAM sequence: AAG
gtgacaggtttgttttaagt

SEQ ID NO: 30909 - DNA, 20 bp, Artificial Sequence
  Description of Artificial Sequence: Synthetic oligonucleotide
  Target: SCNA; (+) strand; PAM type: NRG; PAM sequence: GAG
ttttaagtaagattaatact

SEQ ID NO: 30910 - DNA, 20 bp, Artificial Sequence
  Description of Artificial Sequence: Synthetic oligonucleotide
  Target: SCNA; (+) strand; PAM type: NRG; PAM sequence: AGG
tttaagtaagattaatactg

SEQ ID NO: 30911 - DNA, 20 bp, Artificial Sequence
  Description of Artificial Sequence: Synthetic oligonucleotide
  Target: SCNA; (+) strand; PAM type: NRG; PAM sequence: AAG
caataaaatgaccttcaatt

SEQ ID NO: 30912 - DNA, 20 bp, Artificial Sequence
  Description of Artificial Sequence: Synthetic oligonucleotide
  Target: SCNA; (+) strand; PAM type: NRG; PAM sequence: TGG
tgtctacctgatttccacta

SEQ ID NO: 30913 - DNA, 20 bp, Artificial Sequence
  Description of Artificial Sequence: Synthetic oligonucleotide
  Target: SCNA; (+) strand; PAM type: NRG; PAM sequence: TAG
tttccactatggttcgtgtc

SEQ ID NO: 30914 - DNA, 20 bp, Artificial Sequence
  Description of Artificial Sequence: Synthetic oligonucleotide
  Target: SCNA; (+) strand; PAM type: NRG; PAM sequence: AAG
tgtctagctgtactctatct

SEQ ID NO: 30915 - DNA, 20 bp, Artificial Sequence
  Description of Artificial Sequence: Synthetic oligonucleotide
  Target: SCNA; (+) strand; PAM type: NRG; PAM sequence: CAG
agaatgatctttaaaacatt

SEQ ID NO: 30916 - DNA, 20 bp, Artificial Sequence
  Description of Artificial Sequence: Synthetic oligonucleotide
  Target: SCNA; (+) strand; PAM type: NRG; PAM sequence: AGG
gaatgatctttaaaacattc

SEQ ID NO: 30917 - DNA, 20 bp, Artificial Sequence
  Description of Artificial Sequence: Synthetic oligonucleotide
  Target: SCNA; (+) strand; PAM type: NRG; PAM sequence: GAG
tttaaaacattcaggattat

SEQ ID NO: 30918 - DNA, 20 bp, Artificial Sequence
  Description of Artificial Sequence: Synthetic oligonucleotide
  Target: SCNA; (+) strand; PAM type: NRG; PAM sequence: GAG
taaaacattcaggattatga

SEQ ID NO: 30919 - DNA, 20 bp, Artificial Sequence
  Description of Artificial Sequence: Synthetic oligonucleotide
  Target: SCNA; (+) strand; PAM type: NRG; PAM sequence: GAG
aaacattcaggattatgaga

SEQ ID NO: 30920 - DNA, 20 bp, Artificial Sequence
  Description of Artificial Sequence: Synthetic oligonucleotide
  Target: SCNA; (+) strand; PAM type: NRG; PAM sequence: TAG
aggattatgagagagatatc

SEQ ID NO: 30921 - DNA, 20 bp, Artificial Sequence
  Description of Artificial Sequence: Synthetic oligonucleotide
  Target: SCNA; (+) strand; PAM type: NRG; PAM sequence: AGG
ggattatgagagagatatct

SEQ ID NO: 30922 - DNA, 20 bp, Artificial Sequence
  Description of Artificial Sequence: Synthetic oligonucleotide
  Target: SCNA; (+) strand; PAM type: NRG; PAM sequence: AAG
ttatgagagagatatctagg

SEQ ID NO: 30923 - DNA, 20 bp, Artificial Sequence
  Description of Artificial Sequence: Synthetic oligonucleotide
  Target: SCNA; (+) strand; PAM type: NRG; PAM sequence: TAG
gagagatatctaggaagtca

SEQ ID NO: 30924 - DNA, 20 bp, Artificial Sequence
  Description of Artificial Sequence: Synthetic oligonucleotide
  Target: SCNA; (+) strand; PAM type: NRG; PAM sequence: AGG
agagatatctaggaagtcat

SEQ ID NO: 30925 - DNA, 20 bp, Artificial Sequence
  Description of Artificial Sequence: Synthetic oligonucleotide
  Target: SCNA; (+) strand; PAM type: NRG; PAM sequence: TAG
aatgctgttctgtacaccat

SEQ ID NO: 30926 - DNA, 20 bp, Artificial Sequence
  Description of Artificial Sequence: Synthetic oligonucleotide
  Target: SCNA; (+) strand; PAM type: NRG; PAM sequence: AAG
gtacaccattagtaaaccat

SEQ ID NO: 30927 - DNA, 20 bp, Artificial Sequence
  Description of Artificial Sequence: Synthetic oligonucleotide
  Target: SCNA; (+) strand; PAM type: NRG; PAM sequence: GAG
acaccattagtaaaccataa

SEQ ID NO: 30928 - DNA, 20 bp, Artificial Sequence
  Description of Artificial Sequence: Synthetic oligonucleotide
  Target: SCNA; (+) strand; PAM type: NRG; PAM sequence: GAG
accattagtaaaccataaga

SEQ ID NO: 30929 - DNA, 20 bp, Artificial Sequence
  Description of Artificial Sequence: Synthetic oligonucleotide
  Target: SCNA; (+) strand; PAM type: NRG; PAM sequence: AGG
ccattagtaaaccataagag

SEQ ID NO: 30930 - DNA, 20 bp, Artificial Sequence
  Description of Artificial Sequence: Synthetic oligonucleotide
  Target: SCNA; (+) strand; PAM type: NRG; PAM sequence: AAG
gagaggacaaacatttatcc

SEQ ID NO: 30931 - DNA, 20 bp, Artificial Sequence
  Description of Artificial Sequence: Synthetic oligonucleotide
  Target: SCNA; (+) strand; PAM type: NRG; PAM sequence: AAG
ggacaaacatttatccaaga

SEQ ID NO: 30932 - DNA, 20 bp, Artificial Sequence
  Description of Artificial Sequence: Synthetic oligonucleotide
  Target: SCNA; (+) strand; PAM type: NRG; PAM sequence: GAG
acaaacatttatccaagaaa

SEQ ID NO: 30933 - DNA, 20 bp, Artificial Sequence
  Description of Artificial Sequence: Synthetic oligonucleotide
  Target: SCNA; (+) strand; PAM type: NRG; PAM sequence: TAG
ccaagaaagagactattaca

SEQ ID NO: 30934 - DNA, 20 bp, Artificial Sequence
  Description of Artificial Sequence: Synthetic oligonucleotide
  Target: SCNA; (+) strand; PAM type: NRG; PAM sequence: CAG
agagactattacatagccac

SEQ ID NO: 30935 - DNA, 20 bp, Artificial Sequence
  Description of Artificial Sequence: Synthetic oligonucleotide
  Target: SCNA; (+) strand; PAM type: NRG; PAM sequence: AGG
gagactattacatagccacc

SEQ ID NO: 30936 - DNA, 20 bp, Artificial Sequence
  Description of Artificial Sequence: Synthetic oligonucleotide
  Target: SCNA; (+) strand; PAM type: NRG; PAM sequence: TGG
atagccaccaggacccaata

SEQ ID NO: 30937 - DNA, 20 bp, Artificial Sequence
  Description of Artificial Sequence: Synthetic oligonucleotide
  Target: SCNA; (+) strand; PAM type: NRG; PAM sequence: CAG
accaggacccaatatggatt

SEQ ID NO: 30938 - DNA, 20 bp, Artificial Sequence
  Description of Artificial Sequence: Synthetic oligonucleotide
  Target: SCNA; (+) strand; PAM type: NRG; PAM sequence: GAG
aatatggattcagcacaatt

SEQ ID NO: 30939 - DNA, 20 bp, Artificial Sequence
  Description of Artificial Sequence: Synthetic oligonucleotide
  Target: SCNA; (+) strand; PAM type: NRG; PAM sequence: CAG
caattgagcaatacatgtaa

SEQ ID NO: 30940 - DNA, 20 bp, Artificial Sequence
  Description of Artificial Sequence: Synthetic oligonucleotide
  Target: SCNA; (+) strand; PAM type: NRG; PAM sequence: TGG
caatacatgtaacagatttg

SEQ ID NO: 30941 - DNA, 20 bp, Artificial Sequence
  Description of Artificial Sequence: Synthetic oligonucleotide
  Target: SCNA; (+) strand; PAM type: NRG; PAM sequence: CAG
aacagatttgtggtgaaaaa

SEQ ID NO: 30942 - DNA, 20 bp, Artificial Sequence
  Description of Artificial Sequence: Synthetic oligonucleotide
  Target: SCNA; (+) strand; PAM type: NRG; PAM sequence: AGG
acagatttgtggtgaaaaac

SEQ ID NO: 30943 - DNA, 20 bp, Artificial Sequence
  Description of Artificial Sequence: Synthetic oligonucleotide
  Target: SCNA; (+) strand; PAM type: NRG; PAM sequence: TAG
acaggtgctgctcaattgct

SEQ ID NO: 30944 - DNA, 20 bp, Artificial Sequence
  Description of Artificial Sequence: Synthetic oligonucleotide
  Target: SCNA; (+) strand; PAM type: NRG; PAM sequence: TAG
cacctaatttgtttgacatc

SEQ ID NO: 30945 - DNA, 20 bp, Artificial Sequence
  Description of Artificial Sequence: Synthetic oligonucleotide
  Target: SCNA; (+) strand; PAM type: NRG; PAM sequence: TAG
agtctttttacattataata

SEQ ID NO: 30946 - DNA, 20 bp, Artificial Sequence
  Description of Artificial Sequence: Synthetic oligonucleotide
  Target: SCNA; (+) strand; PAM type: NRG; PAM sequence: AAG
ttataatatagtatattaaa

SEQ ID NO: 30947 - DNA, 20 bp, Artificial Sequence
  Description of Artificial Sequence: Synthetic oligonucleotide
  Target: SCNA; (+) strand; PAM type: NRG; PAM sequence: TGG
atattaaaaagttcttatta

SEQ ID NO: 30948 - DNA, 20 bp, Artificial Sequence
  Description of Artificial Sequence: Synthetic oligonucleotide
  Target: SCNA; (+) strand; PAM type: NRG; PAM sequence: GAG
ttattatggttttttttttt

SEQ ID NO: 30949 - DNA, 20 bp, Artificial Sequence
  Description of Artificial Sequence: Synthetic oligonucleotide
  Target: SCNA; (+) strand; PAM type: NRG; PAM sequence: TGG
tatggtttttttttttgaga

SEQ ID NO: 30950 - DNA, 20 bp, Artificial Sequence
  Description of Artificial Sequence: Synthetic oligonucleotide
  Target: SCNA; (+) strand; PAM type: NRG; PAM sequence: GGG
atggtttttttttttgagat

SEQ ID NO: 30951 - DNA, 20 bp, Artificial Sequence
  Description of Artificial Sequence: Synthetic oligonucleotide
  Target: SCNA; (+) strand; PAM type: NRG; PAM sequence: GGG
tggtttttttttttgagatg

SEQ ID NO: 30952 - DNA, 20 bp, Artificial Sequence
  Description of Artificial Sequence: Synthetic oligonucleotide
  Target: SCNA; (+) strand; PAM type: NRG; PAM sequence: CAG
tggggtctcgctctgtcgtt

SEQ ID NO: 30953 - DNA, 20 bp, Artificial Sequence
  Description of Artificial Sequence: Synthetic oligonucleotide
  Target: SCNA; (+) strand; PAM type: NRG; PAM sequence: AGG
ggggtctcgctctgtcgttc

SEQ ID NO: 30954 - DNA, 20 bp, Artificial Sequence
  Description of Artificial Sequence: Synthetic oligonucleotide
  Target: SCNA; (+) strand; PAM type: NRG; PAM sequence: TGG
tctcgctctgtcgttcaggc

SEQ ID NO: 30955 - DNA, 20 bp, Artificial Sequence
  Description of Artificial Sequence: Synthetic oligonucleotide
  Target: SCNA; (+) strand; PAM type: NRG; PAM sequence: GAG
tcgctctgtcgttcaggctg

SEQ ID NO: 30956 - DNA, 20 bp, Artificial Sequence
  Description of Artificial Sequence: Synthetic oligonucleotide
  Target: SCNA; (+) strand; PAM type: NRG; PAM sequence: GAG
gctctgtcgttcaggctgga

SEQ ID NO: 30957 - DNA, 20 bp, Artificial Sequence
  Description of Artificial Sequence: Synthetic oligonucleotide
  Target: SCNA; (+) strand; PAM type: NRG; PAM sequence: TAG
ctgtcgttcaggctggagag

SEQ ID NO: 30958 - DNA, 20 bp, Artificial Sequence
  Description of Artificial Sequence: Synthetic oligonucleotide
  Target: SCNA; (+) strand; PAM type: NRG; PAM sequence: AGG
tgtcgttcaggctggagagt

SEQ ID NO: 30959 - DNA, 20 bp, Artificial Sequence
  Description of Artificial Sequence: Synthetic oligonucleotide
  Target: SCNA; (+) strand; PAM type: NRG; PAM sequence: CAG
ttcaggctggagagtaggct

SEQ ID NO: 30960 - DNA, 20 bp, Artificial Sequence
  Description of Artificial Sequence: Synthetic oligonucleotide
  Target: SCNA; (+) strand; PAM type: NRG; PAM sequence: TGG
tcagtgcaaactctgcctcc

SEQ ID NO: 30961 - DNA, 20 bp, Artificial Sequence
  Description of Artificial Sequence: Synthetic oligonucleotide
  Target: SCNA; (+) strand; PAM type: NRG; PAM sequence: GGG
cagtgcaaactctgcctcct

SEQ ID NO: 30962 - DNA, 20 bp, Artificial Sequence
  Description of Artificial Sequence: Synthetic oligonucleotide
  Target: SCNA; (+) strand; PAM type: NRG; PAM sequence: CAG
ttcatgccattctcctgcct

SEQ ID NO: 30963 - DNA, 20 bp, Artificial Sequence
  Description of Artificial Sequence: Synthetic oligonucleotide
  Target: SCNA; (+) strand; PAM type: NRG; PAM sequence: GAG
ttctcctgcctcagcctccc

SEQ ID NO: 30964 - DNA, 20 bp, Artificial Sequence
  Description of Artificial Sequence: Synthetic oligonucleotide
  Target: SCNA; (+) strand; PAM type: NRG; PAM sequence: TAG
tcctgcctcagcctcccgag

SEQ ID NO: 30965 - DNA, 20 bp, Artificial Sequence
  Description of Artificial Sequence: Synthetic oligonucleotide
  Target: SCNA; (+) strand; PAM type: NRG; PAM sequence: TGG
gcctcagcctcccgagtagc

SEQ ID NO: 30966 - DNA, 20 bp, Artificial Sequence
  Description of Artificial Sequence: Synthetic oligonucleotide
  Target: SCNA; (+) strand; PAM type: NRG; PAM sequence: GGG
cctcagcctcccgagtagct

SEQ ID NO: 30967 - DNA, 20 bp, Artificial Sequence
  Description of Artificial Sequence: Synthetic oligonucleotide
  Target: SCNA; (+) strand; PAM type: NRG; PAM sequence: CAG
ctcccgagtagctgggacta

SEQ ID NO: 30968 - DNA, 20 bp, Artificial Sequence
  Description of Artificial Sequence: Synthetic oligonucleotide
  Target: SCNA; (+) strand; PAM type: NRG; PAM sequence: AGG
tcccgagtagctgggactac

SEQ ID NO: 30969 - DNA, 20 bp, Artificial Sequence
  Description of Artificial Sequence: Synthetic oligonucleotide
  Target: SCNA; (+) strand; PAM type: NRG; PAM sequence: TGG
caggatcccgccaccacgtc

SEQ ID NO: 30970 - DNA, 20 bp, Artificial Sequence
  Description of Artificial Sequence: Synthetic oligonucleotide
  Target: SCNA; (+) strand; PAM type: NRG; PAM sequence: GGG
aggatcccgccaccacgtct

SEQ ID NO: 30971 - DNA, 20 bp, Artificial Sequence
  Description of Artificial Sequence: Synthetic oligonucleotide
  Target: SCNA; (+) strand; PAM type: NRG; PAM sequence: TAG
gggccaattttttgtatttt

SEQ ID NO: 30972 - DNA, 20 bp, Artificial Sequence
  Description of Artificial Sequence: Synthetic oligonucleotide
  Target: SCNA; (+) strand; PAM type: NRG; PAM sequence: AAG
aattttttgtatttttagta

SEQ ID NO: 30973 - DNA, 20 bp, Artificial Sequence
  Description of Artificial Sequence: Synthetic oligonucleotide
  Target: SCNA; (+) strand; PAM type: NRG; PAM sequence: TGG
tttgtatttttagtaaagac

SEQ ID NO: 30974 - DNA, 20 bp, Artificial Sequence
  Description of Artificial Sequence: Synthetic oligonucleotide
  Target: SCNA; (+) strand; PAM type: NRG; PAM sequence: GGG
ttgtatttttagtaaagact

SEQ ID NO: 30975 - DNA, 20 bp, Artificial Sequence
  Description of Artificial Sequence: Synthetic oligonucleotide
  Target: SCNA; (+) strand; PAM type: NRG; PAM sequence: TGG
ttagtaaagactgggtttca

SEQ ID NO: 30976 - DNA, 20 bp, Artificial Sequence
  Description of Artificial Sequence: Synthetic oligonucleotide
  Target: SCNA; (+) strand; PAM type: NRG; PAM sequence: TAG
aagactgggtttcatggtgt

SEQ ID NO: 30977 - DNA, 20 bp, Artificial Sequence
  Description of Artificial Sequence: Synthetic oligonucleotide
  Target: SCNA; (+) strand; PAM type: NRG; PAM sequence: TAG
ctgggtttcatggtgttagc

SEQ ID NO: 30978 - DNA, 20 bp, Artificial Sequence
  Description of Artificial Sequence: Synthetic oligonucleotide
  Target: SCNA; (+) strand; PAM type: NRG; PAM sequence: AGG
tgggtttcatggtgttagct

SEQ ID NO: 30979 - DNA, 20 bp, Artificial Sequence
  Description of Artificial Sequence: Synthetic oligonucleotide
  Target: SCNA; (+) strand; PAM type: NRG; PAM sequence: TGG
tttcatggtgttagctagga

SEQ ID NO: 30980 - DNA, 20 bp, Artificial Sequence
  Description of Artificial Sequence: Synthetic oligonucleotide
  Target: SCNA; (+) strand; PAM type: NRG; PAM sequence: TGG
acctcatgatttgcccacct

SEQ ID NO: 30981 - DNA, 20 bp, Artificial Sequence
  Description of Artificial Sequence: Synthetic oligonucleotide
  Target: SCNA; (+) strand; PAM type: NRG; PAM sequence: GAG
ccttggcctcccaaaatgct

SEQ ID NO: 30982 - DNA, 20 bp, Artificial Sequence
  Description of Artificial Sequence: Synthetic oligonucleotide
  Target: SCNA; (+) strand; PAM type: NRG; PAM sequence: CAG
ctcccaaaatgctgagatta

SEQ ID NO: 30983 - DNA, 20 bp, Artificial Sequence
  Description of Artificial Sequence: Synthetic oligonucleotide
  Target: SCNA; (+) strand; PAM type: NRG; PAM sequence: AGG
tcccaaaatgctgagattac

SEQ ID NO: 30984 - DNA, 20 bp, Artificial Sequence
  Description of Artificial Sequence: Synthetic oligonucleotide
  Target: SCNA; (+) strand; PAM type: NRG; PAM sequence: GAG
aatgctgagattacaggtgt

SEQ ID NO: 30985 - DNA, 20 bp, Artificial Sequence
  Description of Artificial Sequence: Synthetic oligonucleotide
  Target: SCNA; (+) strand; PAM type: NRG; PAM sequence: TGG
caggtgtgagccaccgcgcc

SEQ ID NO: 30986 - DNA, 20 bp, Artificial Sequence
  Description of Artificial Sequence: Synthetic oligonucleotide
  Target: SCNA; (+) strand; PAM type: NRG; PAM sequence: TAG
accgcgcctggcccttatta

SEQ ID NO: 30987 - DNA, 20 bp, Artificial Sequence
  Description of Artificial Sequence: Synthetic oligonucleotide
  Target: SCNA; (+) strand; PAM type: NRG; PAM sequence: TGG
ggcccttattatagaatttt

SEQ ID NO: 30988 - DNA, 20 bp, Artificial Sequence
  Description of Artificial Sequence: Synthetic oligonucleotide
  Target: SCNA; (+) strand; PAM type: NRG; PAM sequence: GGG
gcccttattatagaattttt

SEQ ID NO: 30989 - DNA, 20 bp, Artificial Sequence
  Description of Artificial Sequence: Synthetic oligonucleotide
  Target: SCNA; (+) strand; PAM type: NRG; PAM sequence: AAG
gtgcttcaataataccaaac

SEQ ID NO: 30990 - DNA, 20 bp, Artificial Sequence
  Description of Artificial Sequence: Synthetic oligonucleotide
  Target: SCNA; (+) strand; PAM type: NRG; PAM sequence: TGG
cttcaataataccaaacaag

SEQ ID NO: 30991 - DNA, 20 bp, Artificial Sequence
  Description of Artificial Sequence: Synthetic oligonucleotide
  Target: SCNA; (+) strand; PAM type: NRG; PAM sequence: GGG
ttcaataataccaaacaagt

SEQ ID NO: 30992 - DNA, 20 bp, Artificial Sequence
  Description of Artificial Sequence: Synthetic oligonucleotide
  Target: SCNA; (+) strand; PAM type: NRG; PAM sequence: TGG
caagtgggcaaatgcttcac

SEQ ID NO: 30993 - DNA, 20 bp, Artificial Sequence
  Description of Artificial Sequence: Synthetic oligonucleotide
  Target: SCNA; (+) strand; PAM type: NRG; PAM sequence: GGG
aagtgggcaaatgcttcact

SEQ ID NO: 30994 - DNA, 20 bp, Artificial Sequence
  Description of Artificial Sequence: Synthetic oligonucleotide
  Target: SCNA; (+) strand; PAM type: NRG; PAM sequence: GAG
tgggctacatttgcatccct

SEQ ID NO: 30995 - DNA, 20 bp, Artificial Sequence
  Description of Artificial Sequence: Synthetic oligonucleotide
  Target: SCNA; (+) strand; PAM type: NRG; PAM sequence: TGG
ccctgagtacaatttcacat

SEQ ID NO: 30996 - DNA, 20 bp, Artificial Sequence
  Description of Artificial Sequence: Synthetic oligonucleotide
  Target: SCNA; (+) strand; PAM type: NRG; PAM sequence: TGG
gtacaatttcacattggttt

SEQ ID NO: 30997 - DNA, 20 bp, Artificial Sequence
  Description of Artificial Sequence: Synthetic oligonucleotide
  Target: SCNA; (+) strand; PAM type: NRG; PAM sequence: TGG
ggttttggttttgtgaattt

SEQ ID NO: 30998 - DNA, 20 bp, Artificial Sequence
  Description of Artificial Sequence: Synthetic oligonucleotide
  Target: SCNA; (+) strand; PAM type: NRG; PAM sequence: GAG
ttttggttttgtgaattttg

SEQ ID NO: 30999 - DNA, 20 bp, Artificial Sequence
  Description of Artificial Sequence: Synthetic oligonucleotide
  Target: SCNA; (+) strand; PAM type: NRG; PAM sequence: AGG
tttggttttgtgaattttgg

SEQ ID NO: 31000 - DNA, 20 bp, Artificial Sequence
  Description of Artificial Sequence: Synthetic oligonucleotide
  Target: SCNA; (+) strand; PAM type: NRG; PAM sequence: GAG
attttggaggaatttatttt

SEQ ID NO: 31001 - DNA, 20 bp, Artificial Sequence
  Description of Artificial Sequence: Synthetic oligonucleotide
  Target: SCNA; (+) strand; PAM type: NRG; PAM sequence: GAG
tttggaggaatttattttga

SEQ ID NO: 31002 - DNA, 20 bp, Artificial Sequence
  Description of Artificial Sequence: Synthetic oligonucleotide
  Target: SCNA; (+) strand; PAM type: NRG; PAM sequence: TGG
tttattttgagagatgcccc

SEQ ID NO: 31003 - DNA, 20 bp, Artificial Sequence
  Description of Artificial Sequence: Synthetic oligonucleotide
  Target: SCNA; (+) strand; PAM type: NRG; PAM sequence: TGG
aataaataatgctgatgttt

SEQ ID NO: 31004 - DNA, 20 bp, Artificial Sequence
  Description of Artificial Sequence: Synthetic oligonucleotide
  Target: SCNA; (+) strand; PAM type: NRG; PAM sequence: TGG
aattttatttattgcattaa

SEQ ID NO: 31005 - DNA, 20 bp, Artificial Sequence
  Description of Artificial Sequence: Synthetic oligonucleotide
  Target: SCNA; (+) strand; PAM type: NRG; PAM sequence: CAG
aatatgtaaatacaatctat

SEQ ID NO: 31006 - DNA, 20 bp, Artificial Sequence
  Description of Artificial Sequence: Synthetic oligonucleotide
  Target: SCNA; (+) strand; PAM type: NRG; PAM sequence: TAG
taaatacaatctatcagcat

SEQ ID NO: 31007 - DNA, 20 bp, Artificial Sequence
  Description of Artificial Sequence: Synthetic oligonucleotide
  Target: SCNA; (+) strand; PAM type: NRG; PAM sequence: AGG
aaatacaatctatcagcatt

SEQ ID NO: 31008 - DNA, 20 bp, Artificial Sequence
  Description of Artificial Sequence: Synthetic oligonucleotide
  Target: SCNA; (+) strand; PAM type: NRG; PAM sequence: CAG
tacaatctatcagcattagg

SEQ ID NO: 31009 - DNA, 20 bp, Artificial Sequence
  Description of Artificial Sequence: Synthetic oligonucleotide
  Target: SCNA; (+) strand; PAM type: NRG; PAM sequence: AAG
gcattaggcagaaaatattt

SEQ ID NO: 31010 - DNA, 20 bp, Artificial Sequence
  Description of Artificial Sequence: Synthetic oligonucleotide
  Target: SCNA; (+) strand; PAM type: NRG; PAM sequence: GAG
attaggcagaaaatatttaa

SEQ ID NO: 31011 - DNA, 20 bp, Artificial Sequence
  Description of Artificial Sequence: Synthetic oligonucleotide
  Target: SCNA; (+) strand; PAM type: NRG; PAM sequence: GAG
agatatcaaattcttttgcc

SEQ ID NO: 31012 - DNA, 20 bp, Artificial Sequence
  Description of Artificial Sequence: Synthetic oligonucleotide
  Target: SCNA; (+) strand; PAM type: NRG; PAM sequence: AAG
atcaaattcttttgccgaga

SEQ ID NO: 31013 - DNA, 20 bp, Artificial Sequence
  Description of Artificial Sequence: Synthetic oligonucleotide
  Target: SCNA; (+) strand; PAM type: NRG; PAM sequence: AGG
tcaaattcttttgccgagaa

SEQ ID NO: 31014 - DNA, 20 bp, Artificial Sequence
  Description of Artificial Sequence: Synthetic oligonucleotide
  Target: SCNA; (+) strand; PAM type: NRG; PAM sequence: TAG
aattcttttgccgagaaagg

SEQ ID NO: 31015 - DNA, 20 bp, Artificial Sequence
  Description of Artificial Sequence: Synthetic oligonucleotide
  Target: SCNA; (+) strand; PAM type: NRG; PAM sequence: TAG
tcttttgccgagaaaggtag

SEQ ID NO: 31016 - DNA, 20 bp, Artificial Sequence
  Description of Artificial Sequence: Synthetic oligonucleotide
  Target: SCNA; (+) strand; PAM type: NRG; PAM sequence: CAG
cgagaaaggtagtagtttgc

SEQ ID NO: 31017 - DNA, 20 bp, Artificial Sequence
  Description of Artificial Sequence: Synthetic oligonucleotide
  Target: SCNA; (+) strand; PAM type: NRG; PAM sequence: AGG
gagaaaggtagtagtttgcc

SEQ ID NO: 31018 - DNA, 20 bp, Artificial Sequence
  Description of Artificial Sequence: Synthetic oligonucleotide
  Target: SCNA; (+) strand; PAM type: NRG; PAM sequence: AAG
agtagtttgccaggaactac

SEQ ID NO: 31019 - DNA, 20 bp, Artificial Sequence
  Description of Artificial Sequence: Synthetic oligonucleotide
  Target: SCNA; (+) strand; PAM type: NRG; PAM sequence: TAG
attttaatttttaattttga

SEQ ID NO: 31020 - DNA, 20 bp, Artificial Sequence
  Description of Artificial Sequence: Synthetic oligonucleotide
  Target: SCNA; (+) strand; PAM type: NRG; PAM sequence: TAG
ttaattttgatagatcatca

SEQ ID NO: 31021 - DNA, 20 bp, Artificial Sequence
  Description of Artificial Sequence: Synthetic oligonucleotide
  Target: SCNA; (+) strand; PAM type: NRG; PAM sequence: AAG
catcatagttgcacatattt

SEQ ID NO: 31022 - DNA, 20 bp, Artificial Sequence
  Description of Artificial Sequence: Synthetic oligonucleotide
  Target: SCNA; (+) strand; PAM type: NRG; PAM sequence: AGG
atcatagttgcacatattta

SEQ ID NO: 31023 - DNA, 20 bp, Artificial Sequence
  Description of Artificial Sequence: Synthetic oligonucleotide
  Target: SCNA; (+) strand; PAM type: NRG; PAM sequence: GGG
tcatagttgcacatatttaa

SEQ ID NO: 31024 - DNA, 20 bp, Artificial Sequence
  Description of Artificial Sequence: Synthetic oligonucleotide
  Target: SCNA; (+) strand; PAM type: NRG; PAM sequence: TAG
tttactgccactattcacaa

SEQ ID NO: 31025 - DNA, 20 bp, Artificial Sequence
  Description of Artificial Sequence: Synthetic oligonucleotide
  Target: SCNA; (+) strand; PAM type: NRG; PAM sequence: TGG
tattcacaatagccacgata

SEQ ID NO: 31026 - DNA, 20 bp, Artificial Sequence
  Description of Artificial Sequence: Synthetic oligonucleotide
  Target: SCNA; (+) strand; PAM type: NRG; PAM sequence: CAG
aatcaacctttgttcatcaa

SEQ ID NO: 31027 - DNA, 20 bp, Artificial Sequence
  Description of Artificial Sequence: Synthetic oligonucleotide
  Target: SCNA; (+) strand; PAM type: NRG; PAM sequence: AAG
caacctttgttcatcaacag

SEQ ID NO: 31028 - DNA, 20 bp, Artificial Sequence
  Description of Artificial Sequence: Synthetic oligonucleotide
  Target: SCNA; (+) strand; PAM type: NRG; PAM sequence: GAG
acctttgttcatcaacagaa

SEQ ID NO: 31029 - DNA, 20 bp, Artificial Sequence
  Description of Artificial Sequence: Synthetic oligonucleotide
  Target: SCNA; (+) strand; PAM type: NRG; PAM sequence: AGG
cctttgttcatcaacagaag

SEQ ID NO: 31030 - DNA, 20 bp, Artificial Sequence
  Description of Artificial Sequence: Synthetic oligonucleotide
  Target: SCNA; (+) strand; PAM type: NRG; PAM sequence: GAG
tttgttcatcaacagaagag

SEQ ID NO: 31031 - DNA, 20 bp, Artificial Sequence
  Description of Artificial Sequence: Synthetic oligonucleotide
  Target: SCNA; (+) strand; PAM type: NRG; PAM sequence: TGG
agaggagacaaacctgactt

SEQ ID NO: 31032 - DNA, 20 bp, Artificial Sequence
  Description of Artificial Sequence: Synthetic oligonucleotide
  Target: SCNA; (+) strand; PAM type: NRG; PAM sequence: TGG
aacctgactttggtctgtgc

SEQ ID NO: 31033 - DNA, 20 bp, Artificial Sequence
  Description of Artificial Sequence: Synthetic oligonucleotide
  Target: SCNA; (+) strand; PAM type: NRG; PAM sequence: CAG
actttggtctgtgctggctg

SEQ ID NO: 31034 - DNA, 20 bp, Artificial Sequence
  Description of Artificial Sequence: Synthetic oligonucleotide
  Target: SCNA; (+) strand; PAM type: NRG; PAM sequence: AGG
ctttggtctgtgctggctgc

SEQ ID NO: 31035 - DNA, 20 bp, Artificial Sequence
  Description of Artificial Sequence: Synthetic oligonucleotide
  Target: SCNA; (+) strand; PAM type: NRG; PAM sequence: TGG
tctgtgctggctgcaggttc

SEQ ID NO: 31036 - DNA, 20 bp, Artificial Sequence
  Description of Artificial Sequence: Synthetic oligonucleotide
  Target: SCNA; (+) strand; PAM type: NRG; PAM sequence: GAG
tgtgctggctgcaggttctg

SEQ ID NO: 31037 - DNA, 20 bp, Artificial Sequence
  Description of Artificial Sequence: Synthetic oligonucleotide
  Target: SCNA; (+) strand; PAM type: NRG; PAM sequence: GAG
tgctggctgcaggttctgga

SEQ ID NO: 31038 - DNA, 20 bp, Artificial Sequence
  Description of Artificial Sequence: Synthetic oligonucleotide
  Target: SCNA; (+) strand; PAM type: NRG; PAM sequence: AAG
aggttctggagagctgtttg

SEQ ID NO: 31039 - DNA, 20 bp, Artificial Sequence
  Description of Artificial Sequence: Synthetic oligonucleotide
  Target: SCNA; (+) strand; PAM type: NRG; PAM sequence: AAG
ggagagctgtttgaagtgac

SEQ ID NO: 31040 - DNA, 20 bp, Artificial Sequence
  Description of Artificial Sequence: Synthetic oligonucleotide
  Target: SCNA; (+) strand; PAM type: NRG; PAM sequence: TGG
agctgtttgaagtgacaaga

SEQ ID NO: 31041 - DNA, 20 bp, Artificial Sequence
  Description of Artificial Sequence: Synthetic oligonucleotide
  Target: SCNA; (+) strand; PAM type: NRG; PAM sequence: AAG
agtgacaagatggcaaatga

SEQ ID NO: 31042 - DNA, 20 bp, Artificial Sequence
  Description of Artificial Sequence: Synthetic oligonucleotide
  Target: SCNA; (+) strand; PAM type: NRG; PAM sequence: AGG
gtgacaagatggcaaatgaa

SEQ ID NO: 31043 - DNA, 20 bp, Artificial Sequence
  Description of Artificial Sequence: Synthetic oligonucleotide
  Target: SCNA; (+) strand; PAM type: NRG; PAM sequence: GGG
tgacaagatggcaaatgaaa

SEQ ID NO: 31044 - DNA, 20 bp, Artificial Sequence
  Description of Artificial Sequence: Synthetic oligonucleotide
  Target: SCNA; (+) strand; PAM type: NRG; PAM sequence: CAG
aagatggcaaatgaaagggt

SEQ ID NO: 31045 - DNA, 20 bp, Artificial Sequence
  Description of Artificial Sequence: Synthetic oligonucleotide
  Target: SCNA; (+) strand; PAM type: NRG; PAM sequence: TGG
tggcaaatgaaagggtcagt

SEQ ID NO: 31046 - DNA, 20 bp, Artificial Sequence
  Description of Artificial Sequence: Synthetic oligonucleotide
  Target: SCNA; (+) strand; PAM type: NRG; PAM sequence: TGG
gaaagggtcagttggttgcc

SEQ ID NO: 31047 - DNA, 20 bp, Artificial Sequence
  Description of Artificial Sequence: Synthetic oligonucleotide
  Target: SCNA; (+) strand; PAM type: NRG; PAM sequence: TGG
agggtcagttggttgcctgg

SEQ ID NO: 31048 - DNA, 20 bp, Artificial Sequence
  Description of Artificial Sequence: Synthetic oligonucleotide
  Target: SCNA; (+) strand; PAM type: NRG; PAM sequence: TAG
cgtcctcataacactttacc

SEQ ID NO: 31049 - DNA, 20 bp, Artificial Sequence
  Description of Artificial Sequence: Synthetic oligonucleotide
  Target: SCNA; (+) strand; PAM type: NRG; PAM sequence: TGG
ttctcacaaaaccataataa

SEQ ID NO: 31050 - DNA, 20 bp, Artificial Sequence
  Description of Artificial Sequence: Synthetic oligonucleotide
  Target: SCNA; (+) strand; PAM type: NRG; PAM sequence: CAG
aaaccataataatggacaaa

SEQ ID NO: 31051 - DNA, 20 bp, Artificial Sequence
  Description of Artificial Sequence: Synthetic oligonucleotide
  Target: SCNA; (+) strand; PAM type: NRG; PAM sequence: TAG
atggacaaacagcatgaacc

SEQ ID NO: 31052 - DNA, 20 bp, Artificial Sequence
  Description of Artificial Sequence: Synthetic oligonucleotide
  Target: SCNA; (+) strand; PAM type: NRG; PAM sequence: CAG
tgaacctagatatgcacccc

SEQ ID NO: 31053 - DNA, 20 bp, Artificial Sequence
  Description of Artificial Sequence: Synthetic oligonucleotide
  Target: SCNA; (+) strand; PAM type: NRG; PAM sequence: AAG
gcacccccagtcactatcgt

SEQ ID NO: 31054 - DNA, 20 bp, Artificial Sequence
  Description of Artificial Sequence: Synthetic oligonucleotide
  Target: SCNA; (+) strand; PAM type: NRG; PAM sequence: AGG
cacccccagtcactatcgta

SEQ ID NO: 31055 - DNA, 20 bp, Artificial Sequence
  Description of Artificial Sequence: Synthetic oligonucleotide
  Target: SCNA; (+) strand; PAM type: NRG; PAM sequence: AAG
ccagtcactatcgtaaggtc

SEQ ID NO: 31056 - DNA, 20 bp, Artificial Sequence
  Description of Artificial Sequence: Synthetic oligonucleotide
  Target: SCNA; (+) strand; PAM type: NRG; PAM sequence: TGG
tcactatcgtaaggtcaagt

SEQ ID NO: 31057 - DNA, 20 bp, Artificial Sequence
  Description of Artificial Sequence: Synthetic oligonucleotide
  Target: SCNA; (+) strand; PAM type: NRG; PAM sequence: GAG
tcgtaaggtcaagttggtat

SEQ ID NO: 31058 - DNA, 20 bp, Artificial Sequence
  Description of Artificial Sequence: Synthetic oligonucleotide
  Target: SCNA; (+) strand; PAM type: NRG; PAM sequence: AAG
caagttggtatgagtcacat

SEQ ID NO: 31059 - DNA, 20 bp, Artificial Sequence
  Description of Artificial Sequence: Synthetic oligonucleotide
  Target: SCNA; (+) strand; PAM type: NRG; PAM sequence: TAG
gttggtatgagtcacataag

SEQ ID NO: 31060 - DNA, 20 bp, Artificial Sequence
  Description of Artificial Sequence: Synthetic oligonucleotide
  Target: SCNA; (+) strand; PAM type: NRG; PAM sequence: GAG
tggtatgagtcacataagta

SEQ ID NO: 31061 - DNA, 20 bp, Artificial Sequence
  Description of Artificial Sequence: Synthetic oligonucleotide
  Target: SCNA; (+) strand; PAM type: NRG; PAM sequence: AGG
ggtatgagtcacataagtag

SEQ ID NO: 31062 - DNA, 20 bp, Artificial Sequence
  Description of Artificial Sequence: Synthetic oligonucleotide
  Target: SCNA; (+) strand; PAM type: NRG; PAM sequence: TAG
gagtcacataagtagaggac

SEQ ID NO: 31063 - DNA, 20 bp, Artificial Sequence
  Description of Artificial Sequence: Synthetic oligonucleotide
  Target: SCNA; (+) strand; PAM type: NRG; PAM sequence: AAG
tcacataagtagaggactag

SEQ ID NO: 31064 - DNA, 20 bp, Artificial Sequence
  Description of Artificial Sequence: Synthetic oligonucleotide
  Target: SCNA; (+) strand; PAM type: NRG; PAM sequence: TAG
gactagaagttttatctgaa

SEQ ID NO: 31065 - DNA, 20 bp, Artificial Sequence
  Description of Artificial Sequence: Synthetic oligonucleotide
  Target: SCNA; (+) strand; PAM type: NRG; PAM sequence: TAG
ttatctgaatagtattgtca

SEQ ID NO: 31066 - DNA, 20 bp, Artificial Sequence
  Description of Artificial Sequence: Synthetic oligonucleotide
  Target: SCNA; (+) strand; PAM type: NRG; PAM sequence: TGG
tctgaatagtattgtcatag

SEQ ID NO: 31067 - DNA, 20 bp, Artificial Sequence
  Description of Artificial Sequence: Synthetic oligonucleotide
  Target: SCNA; (+) strand; PAM type: NRG; PAM sequence: TAG
aatagtattgtcatagtggc

SEQ ID NO: 31068 - DNA, 20 bp, Artificial Sequence
  Description of Artificial Sequence: Synthetic oligonucleotide
  Target: SCNA; (+) strand; PAM type: NRG; PAM sequence: AGG
atagtattgtcatagtggct

SEQ ID NO: 31069 - DNA, 20 bp, Artificial Sequence
  Description of Artificial Sequence: Synthetic oligonucleotide
  Target: SCNA; (+) strand; PAM type: NRG; PAM sequence: GAG
ttgtcatagtggctaggaat

SEQ ID NO: 31070 - DNA, 20 bp, Artificial Sequence
  Description of Artificial Sequence: Synthetic oligonucleotide
  Target: SCNA; (+) strand; PAM type: NRG; PAM sequence: GAG
gtcatagtggctaggaatga

SEQ ID NO: 31071 - DNA, 20 bp, Artificial Sequence
  Description of Artificial Sequence: Synthetic oligonucleotide
  Target: SCNA; (+) strand; PAM type: NRG; PAM sequence: AAG
tggctaggaatgagagtgaa

SEQ ID NO: 31072 - DNA, 20 bp, Artificial Sequence
  Description of Artificial Sequence: Synthetic oligonucleotide
  Target: SCNA; (+) strand; PAM type: NRG; PAM sequence: TAG
ctaggaatgagagtgaaaag

SEQ ID NO: 31073 - DNA, 20 bp, Artificial Sequence
  Description of Artificial Sequence: Synthetic oligonucleotide
  Target: SCNA; (+) strand; PAM type: NRG; PAM sequence: TAG
aatgagagtgaaaagtagac

SEQ ID NO: 31074 - DNA, 20 bp, Artificial Sequence
  Description of Artificial Sequence: Synthetic oligonucleotide
  Target: SCNA; (+) strand; PAM type: NRG; PAM sequence: TGG
actagatgtgtgctttgata

SEQ ID NO: 31075 - DNA, 20 bp, Artificial Sequence
  Description of Artificial Sequence: Synthetic oligonucleotide
  Target: SCNA; (+) strand; PAM type: NRG; PAM sequence: TGG
atgtgtgctttgatatggct

SEQ ID NO: 31076 - DNA, 20 bp, Artificial Sequence
  Description of Artificial Sequence: Synthetic oligonucleotide
  Target: SCNA; (+) strand; PAM type: NRG; PAM sequence: GAG
gtgtgctttgatatggcttg

SEQ ID NO: 31077 - DNA, 20 bp, Artificial Sequence
  Description of Artificial Sequence: Synthetic oligonucleotide
  Target: SCNA; (+) strand; PAM type: NRG; PAM sequence: AAG
tttgatatggcttggagcaa

SEQ ID NO: 31078 - DNA, 20 bp, Artificial Sequence
  Description of Artificial Sequence: Synthetic oligonucleotide
  Target: SCNA; (+) strand; PAM type: NRG; PAM sequence: AGG
ttgatatggcttggagcaaa

SEQ ID NO: 31079 - DNA, 20 bp, Artificial Sequence
  Description of Artificial Sequence: Synthetic oligonucleotide
  Target: SCNA; (+) strand; PAM type: NRG; PAM sequence: CAG
tatggcttggagcaaaaggt

SEQ ID NO: 31080 - DNA, 20 bp, Artificial Sequence
  Description of Artificial Sequence: Synthetic oligonucleotide
  Target: SCNA; (+) strand; PAM type: NRG; PAM sequence: AGG
atggcttggagcaaaaggtc

SEQ ID NO: 31081 - DNA, 20 bp, Artificial Sequence
  Description of Artificial Sequence: Synthetic oligonucleotide
  Target: SCNA; (+) strand; PAM type: NRG; PAM sequence: TGG
tggagcaaaaggtcaggtat

SEQ ID NO: 31082 - DNA, 20 bp, Artificial Sequence
  Description of Artificial Sequence: Synthetic oligonucleotide
  Target: SCNA; (+) strand; PAM type: NRG; PAM sequence: GGG
ggagcaaaaggtcaggtatt

SEQ ID NO: 31083 - DNA, 20 bp, Artificial Sequence
  Description of Artificial Sequence: Synthetic oligonucleotide
  Target: SCNA; (+) strand; PAM type: NRG; PAM sequence: GGG
gagcaaaaggtcaggtattg

SEQ ID NO: 31084 - DNA, 20 bp, Artificial Sequence
  Description of Artificial Sequence: Synthetic oligonucleotide
  Target: SCNA; (+) strand; PAM type: NRG; PAM sequence: TAG
ctgaaatgatatctattatt

SEQ ID NO: 31085 - DNA, 20 bp, Artificial Sequence
  Description of Artificial Sequence: Synthetic oligonucleotide
  Target: SCNA; (+) strand; PAM type: NRG; PAM sequence: AGG
tgaaatgatatctattattt

SEQ ID NO: 31086 - DNA, 20 bp, Artificial Sequence
  Description of Artificial Sequence: Synthetic oligonucleotide
  Target: SCNA; (+) strand; PAM type: NRG; PAM sequence: TGG
gatatctattatttaggaac

SEQ ID NO: 31087 - DNA, 20 bp, Artificial Sequence
  Description of Artificial Sequence: Synthetic oligonucleotide
  Target: SCNA; (+) strand; PAM type: NRG; PAM sequence: GGG
atatctattatttaggaact

SEQ ID NO: 31088 - DNA, 20 bp, Artificial Sequence
  Description of Artificial Sequence: Synthetic oligonucleotide
  Target: SCNA; (+) strand; PAM type: NRG; PAM sequence: CAG
ctattatttaggaactgggt

SEQ ID NO: 31089 - DNA, 20 bp, Artificial Sequence
  Description of Artificial Sequence: Synthetic oligonucleotide
  Target: SCNA; (+) strand; PAM type: NRG; PAM sequence: AGG
tattatttaggaactgggtc

SEQ ID NO: 31090 - DNA, 20 bp, Artificial Sequence
  Description of Artificial Sequence: Synthetic oligonucleotide
  Target: SCNA; (+) strand; PAM type: NRG; PAM sequence: AAG
tttacataccattcattcct

SEQ ID NO: 31091 - DNA, 20 bp, Artificial Sequence
  Description of Artificial Sequence: Synthetic oligonucleotide
  Target: SCNA; (+) strand; PAM type: NRG; PAM sequence: GAG
tacataccattcattcctaa

SEQ ID NO: 31092 - DNA, 20 bp, Artificial Sequence
  Description of Artificial Sequence: Synthetic oligonucleotide
  Target: SCNA; (+) strand; PAM type: NRG; PAM sequence: GAG
cataccattcattcctaaga

SEQ ID NO: 31093 - DNA, 20 bp, Artificial Sequence
  Description of Artificial Sequence: Synthetic oligonucleotide
  Target: SCNA; (+) strand; PAM type: NRG; PAM sequence: AAG
ctcttccaaaaaaaaaaaaa

SEQ ID NO: 31094 - DNA, 20 bp, Artificial Sequence
  Description of Artificial Sequence: Synthetic oligonucleotide
  Target: SCNA; (+) strand; PAM type: NRG; PAM sequence: GAG
cttccaaaaaaaaaaaaaaa

SEQ ID NO: 31095 - DNA, 20 bp, Artificial Sequence
  Description of Artificial Sequence: Synthetic oligonucleotide
  Target: SCNA; (+) strand; PAM type: NRG; PAM sequence: CAG
aaaaaaaaaaaaagagatgt

SEQ ID NO: 31096 - DNA, 20 bp, Artificial Sequence
  Description of Artificial Sequence: Synthetic oligonucleotide
  Target: SCNA; (+) strand; PAM type: NRG; PAM sequence: AAG
ataaactccatttctttctc

SEQ ID NO: 31097 - DNA, 20 bp, Artificial Sequence
  Description of Artificial Sequence: Synthetic oligonucleotide
  Target: SCNA; (+) strand; PAM type: NRG; PAM sequence: AAG
ccatttctttctcaagccca

SEQ ID NO: 31098 - DNA, 20 bp, Artificial Sequence
  Description of Artificial Sequence: Synthetic oligonucleotide
  Target: SCNA; (+) strand; PAM type: NRG; PAM sequence: CAG
acataaatcttgaaattttc

SEQ ID NO: 31099 - DNA, 20 bp, Artificial Sequence
  Description of Artificial Sequence: Synthetic oligonucleotide
  Target: SCNA; (+) strand; PAM type: NRG; PAM sequence: TAG
gaaattttccagctaaaaaa

SEQ ID NO: 31100 - DNA, 20 bp, Artificial Sequence
  Description of Artificial Sequence: Synthetic oligonucleotide
  Target: SCNA; (+) strand; PAM type: NRG; PAM sequence: AGG
aaattttccagctaaaaaat

SEQ ID NO: 31101 - DNA, 20 bp, Artificial Sequence
  Description of Artificial Sequence: Synthetic oligonucleotide
  Target: SCNA; (+) strand; PAM type: NRG; PAM sequence: TAG
taaaaaataggcatatgttc

SEQ ID NO: 31102 - DNA, 20 bp, Artificial Sequence
  Description of Artificial Sequence: Synthetic oligonucleotide
  Target: SCNA; (+) strand; PAM type: NRG; PAM sequence: CAG
ataggcatatgttctagcat

SEQ ID NO: 31103 - DNA, 20 bp, Artificial Sequence
  Description of Artificial Sequence: Synthetic oligonucleotide
  Target: SCNA; (+) strand; PAM type: NRG; PAM sequence: AAG
attcattctctgctacaata

SEQ ID NO: 31104 - DNA, 20 bp, Artificial Sequence
  Description of Artificial Sequence: Synthetic oligonucleotide
  Target: SCNA; (+) strand; PAM type: NRG; PAM sequence: AAG
tctgctacaataaagtgaca

SEQ ID NO: 31105 - DNA, 20 bp, Artificial Sequence
  Description of Artificial Sequence: Synthetic oligonucleotide
  Target: SCNA; (+) strand; PAM type: NRG; PAM sequence: CAG
acatctaattatctgttttt

SEQ ID NO: 31106 - DNA, 20 bp, Artificial Sequence
  Description of Artificial Sequence: Synthetic oligonucleotide
  Target: SCNA; (+) strand; PAM type: NRG; PAM sequence: TAG
ctaattatctgtttttcagt

SEQ ID NO: 31107 - DNA, 20 bp, Artificial Sequence
  Description of Artificial Sequence: Synthetic oligonucleotide
  Target: SCNA; (+) strand; PAM type: NRG; PAM sequence: TAG
gataaatatgctttatatcc

SEQ ID NO: 31108 - DNA, 20 bp, Artificial Sequence
  Description of Artificial Sequence: Synthetic oligonucleotide
  Target: SCNA; (+) strand; PAM type: NRG; PAM sequence: AGG
ataaatatgctttatatcct

SEQ ID NO: 31109 - DNA, 20 bp, Artificial Sequence
  Description of Artificial Sequence: Synthetic oligonucleotide
  Target: SCNA; (+) strand; PAM type: NRG; PAM sequence: CAG
ctttatatcctaggtaccat

SEQ ID NO: 31110 - DNA, 20 bp, Artificial Sequence
  Description of Artificial Sequence: Synthetic oligonucleotide
  Target: SCNA; (+) strand; PAM type: NRG; PAM sequence: AAG
taggtaccatcagaatttca

SEQ ID NO: 31111 - DNA, 20 bp, Artificial Sequence
  Description of Artificial Sequence: Synthetic oligonucleotide
  Target: SCNA; (+) strand; PAM type: NRG; PAM sequence: CAG
accatcagaatttcaaagct

SEQ ID NO: 31112 - DNA, 20 bp, Artificial Sequence
  Description of Artificial Sequence: Synthetic oligonucleotide
  Target: SCNA; (+) strand; PAM type: NRG; PAM sequence: GAG
aagctcagaaaatcactaat

SEQ ID NO: 31113 - DNA, 20 bp, Artificial Sequence
  Description of Artificial Sequence: Synthetic oligonucleotide
  Target: SCNA; (+) strand; PAM type: NRG; PAM sequence: TGG
cagaaaatcactaatgagaa

SEQ ID NO: 31114 - DNA, 20 bp, Artificial Sequence
  Description of Artificial Sequence: Synthetic oligonucleotide
  Target: SCNA; (+) strand; PAM type: NRG; PAM sequence: AAG
aaaatcactaatgagaatgg

SEQ ID NO: 31115 - DNA, 20 bp, Artificial Sequence
  Description of Artificial Sequence: Synthetic oligonucleotide
  Target: SCNA; (+) strand; PAM type: NRG; PAM sequence: AGG
aaatcactaatgagaatgga

SEQ ID NO: 31116 - DNA, 20 bp, Artificial Sequence
  Description of Artificial Sequence: Synthetic oligonucleotide
  Target: SCNA; (+) strand; PAM type: NRG; PAM sequence: AAG
gaaggaattaaccatcatgc

SEQ ID NO: 31117 - DNA, 20 bp, Artificial Sequence
  Description of Artificial Sequence: Synthetic oligonucleotide
  Target: SCNA; (+) strand; PAM type: NRG; PAM sequence: CAG
ggaattaaccatcatgcaag

SEQ ID NO: 31118 - DNA, 20 bp, Artificial Sequence
  Description of Artificial Sequence: Synthetic oligonucleotide
  Target: SCNA; (+) strand; PAM type: NRG; PAM sequence: AAG
attaaccatcatgcaagcag

SEQ ID NO: 31119 - DNA, 20 bp, Artificial Sequence
  Description of Artificial Sequence: Synthetic oligonucleotide
  Target: SCNA; (+) strand; PAM type: NRG; PAM sequence: CGG
atcatgcaagcagaagcatg

SEQ ID NO: 31120 - DNA, 20 bp, Artificial Sequence
  Description of Artificial Sequence: Synthetic oligonucleotide
  Target: SCNA; (+) strand; PAM type: NRG; PAM sequence: CAG
ggctaccatgctacattgct

SEQ ID NO: 31121 - DNA, 20 bp, Artificial Sequence
  Description of Artificial Sequence: Synthetic oligonucleotide
  Target: SCNA; (+) strand; PAM type: NRG; PAM sequence: GAG
ctaccatgctacattgctca

SEQ ID NO: 31122 - DNA, 20 bp, Artificial Sequence
  Description of Artificial Sequence: Synthetic oligonucleotide
  Target: SCNA; (+) strand; PAM type: NRG; PAM sequence: TAG
tacattgctcagagttcatg

SEQ ID NO: 31123 - DNA, 20 bp, Artificial Sequence
  Description of Artificial Sequence: Synthetic oligonucleotide
  Target: SCNA; (+) strand; PAM type: NRG; PAM sequence: CAG
attgctcagagttcatgtag

SEQ ID NO: 31124 - DNA, 20 bp, Artificial Sequence
  Description of Artificial Sequence: Synthetic oligonucleotide
  Target: SCNA; (+) strand; PAM type: NRG; PAM sequence: CAG
agttcatgtagcagtttaat

SEQ ID NO: 31125 - DNA, 20 bp, Artificial Sequence
  Description of Artificial Sequence: Synthetic oligonucleotide
  Target: SCNA; (+) strand; PAM type: NRG; PAM sequence: AGG
gttcatgtagcagtttaatc

SEQ ID NO: 31126 - DNA, 20 bp, Artificial Sequence
  Description of Artificial Sequence: Synthetic oligonucleotide
  Target: SCNA; (+) strand; PAM type: NRG; PAM sequence: GGG
ttcatgtagcagtttaatca

SEQ ID NO: 31127 - DNA, 20 bp, Artificial Sequence
  Description of Artificial Sequence: Synthetic oligonucleotide
  Target: SCNA; (+) strand; PAM type: NRG; PAM sequence: TAG
atgtagcagtttaatcaggg

SEQ ID NO: 31128 - DNA, 20 bp, Artificial Sequence
  Description of Artificial Sequence: Synthetic oligonucleotide
  Target: SCNA; (+) strand; PAM type: NRG; PAM sequence: CAG
tagcagtttaatcagggtag

SEQ ID NO: 31129 - DNA, 20 bp, Artificial Sequence
  Description of Artificial Sequence: Synthetic oligonucleotide
  Target: SCNA; (+) strand; PAM type: NRG; PAM sequence: GAG
cagggtagcagctgtgcaat

SEQ ID NO: 31130 - DNA, 20 bp, Artificial Sequence
  Description of Artificial Sequence: Synthetic oligonucleotide
  Target: SCNA; (+) strand; PAM type: NRG; PAM sequence: TGG
agctgtgcaatgagctttgt

SEQ ID NO: 31131 - DNA, 20 bp, Artificial Sequence
  Description of Artificial Sequence: Synthetic oligonucleotide
  Target: SCNA; (+) strand; PAM type: NRG; PAM sequence: TGG
gcaatgagctttgttggaac

SEQ ID NO: 31132 - DNA, 20 bp, Artificial Sequence
  Description of Artificial Sequence: Synthetic oligonucleotide
  Target: SCNA; (+) strand; PAM type: NRG; PAM sequence: GAG
aatgagctttgttggaactg

SEQ ID NO: 31133 - DNA, 20 bp, Artificial Sequence
  Description of Artificial Sequence: Synthetic oligonucleotide
  Target: SCNA; (+) strand; PAM type: NRG; PAM sequence: AAG
gtgaaatatctactgtttga

SEQ ID NO: 31134 - DNA, 20 bp, Artificial Sequence
  Description of Artificial Sequence: Synthetic oligonucleotide
  Target: SCNA; (+) strand; PAM type: NRG; PAM sequence: AGG
tgaaatatctactgtttgaa

SEQ ID NO: 31135 - DNA, 20 bp, Artificial Sequence
  Description of Artificial Sequence: Synthetic oligonucleotide
  Target: SCNA; (+) strand; PAM type: NRG; PAM sequence: GGG
gaaatatctactgtttgaaa

SEQ ID NO: 31136 - DNA, 20 bp, Artificial Sequence
  Description of Artificial Sequence: Synthetic oligonucleotide
  Target: SCNA; (+) strand; PAM type: NRG; PAM sequence: AAG
tgataactttatgccttgca

SEQ ID NO: 31137 - DNA, 20 bp, Artificial Sequence
  Description of Artificial Sequence: Synthetic oligonucleotide
  Target: SCNA; (+) strand; PAM type: NRG; PAM sequence: CAG
tttatgccttgcaaagaaaa

SEQ ID NO: 31138 - DNA, 20 bp, Artificial Sequence
  Description of Artificial Sequence: Synthetic oligonucleotide
  Target: SCNA; (+) strand; PAM type: NRG; PAM sequence: AAG
ttgcaaagaaaacagtcctc

SEQ ID NO: 31139 - DNA, 20 bp, Artificial Sequence
  Description of Artificial Sequence: Synthetic oligonucleotide
  Target: SCNA; (+) strand; PAM type: NRG; PAM sequence: CAG
tttttttttttttttgccct

SEQ ID NO: 31140 - DNA, 20 bp, Artificial Sequence
  Description of Artificial Sequence: Synthetic oligonucleotide
  Target: SCNA; (+) strand; PAM type: NRG; PAM sequence: AAG
ttttttttttttgccctcag

SEQ ID NO: 31141 - DNA, 20 bp, Artificial Sequence
  Description of Artificial Sequence: Synthetic oligonucleotide
  Target: SCNA; (+) strand; PAM type: NRG; PAM sequence: AAG
tttgccctcagaagtattta

SEQ ID NO: 31142 - DNA, 20 bp, Artificial Sequence
  Description of Artificial Sequence: Synthetic oligonucleotide
  Target: SCNA; (+) strand; PAM type: NRG; PAM sequence: AGG
ttgccctcagaagtatttaa

SEQ ID NO: 31143 - DNA, 20 bp, Artificial Sequence
  Description of Artificial Sequence: Synthetic oligonucleotide
  Target: SCNA; (+) strand; PAM type: NRG; PAM sequence: TAG
atatgataactcacactgcc

SEQ ID NO: 31144 - DNA, 20 bp, Artificial Sequence
  Description of Artificial Sequence: Synthetic oligonucleotide
  Target: SCNA; (+) strand; PAM type: NRG; PAM sequence: CAG
taactcacactgcctagctt

SEQ ID NO: 31145 - DNA, 20 bp, Artificial Sequence
  Description of Artificial Sequence: Synthetic oligonucleotide
  Target: SCNA; (+) strand; PAM type: NRG; PAM sequence: CAG
gtacaatgtctcatacattg

SEQ ID NO: 31146 - DNA, 20 bp, Artificial Sequence
  Description of Artificial Sequence: Synthetic oligonucleotide
  Target: SCNA; (+) strand; PAM type: NRG; PAM sequence: AGG
tacaatgtctcatacattgc

SEQ ID NO: 31147 - DNA, 20 bp, Artificial Sequence
  Description of Artificial Sequence: Synthetic oligonucleotide
  Target: SCNA; (+) strand; PAM type: NRG; PAM sequence: AAG
catttgtttaatgaatgaat

SEQ ID NO: 31148 - DNA, 20 bp, Artificial Sequence
  Description of Artificial Sequence: Synthetic oligonucleotide
  Target: SCNA; (+) strand; PAM type: NRG; PAM sequence: AAG
tttaatgaatgaataagtga

SEQ ID NO: 31149 - DNA, 20 bp, Artificial Sequence
  Description of Artificial Sequence: Synthetic oligonucleotide
  Target: SCNA; (+) strand; PAM type: NRG; PAM sequence: TGG
atgaataagtgaaagtccaa

SEQ ID NO: 31150 - DNA, 20 bp, Artificial Sequence
  Description of Artificial Sequence: Synthetic oligonucleotide
  Target: SCNA; (+) strand; PAM type: NRG; PAM sequence: TGG
ttacactgttgaatttacaa

SEQ ID NO: 31151 - DNA, 20 bp, Artificial Sequence
  Description of Artificial Sequence: Synthetic oligonucleotide
  Target: SCNA; (+) strand; PAM type: NRG; PAM sequence: TAG
tgttgaatttacaatggttt

SEQ ID NO: 31152 - DNA, 20 bp, Artificial Sequence
  Description of Artificial Sequence: Synthetic oligonucleotide
  Target: SCNA; (+) strand; PAM type: NRG; PAM sequence: GAG
ttgaatttacaatggtttta

SEQ ID NO: 31153 - DNA, 20 bp, Artificial Sequence
  Description of Artificial Sequence: Synthetic oligonucleotide
  Target: SCNA; (+) strand; PAM type: NRG; PAM sequence: AGG
tgaatttacaatggttttag

SEQ ID NO: 31154 - DNA, 20 bp, Artificial Sequence
  Description of Artificial Sequence: Synthetic oligonucleotide
  Target: SCNA; (+) strand; PAM type: NRG; PAM sequence: TAG
tctaaatttgttgatttatt

SEQ ID NO: 31155 - DNA, 20 bp, Artificial Sequence
  Description of Artificial Sequence: Synthetic oligonucleotide
  Target: SCNA; (+) strand; PAM type: NRG; PAM sequence: AGG
ctaaatttgttgatttattt

SEQ ID NO: 31156 - DNA, 20 bp, Artificial Sequence
  Description of Artificial Sequence: Synthetic oligonucleotide
  Target: SCNA; (+) strand; PAM type: NRG; PAM sequence: AAG
aaatttcatattattcatta

SEQ ID NO: 31157 - DNA, 20 bp, Artificial Sequence
  Description of Artificial Sequence: Synthetic oligonucleotide
  Target: SCNA; (+) strand; PAM type: NRG; PAM sequence: AAG
ttcatattattcattaaaga

SEQ ID NO: 31158 - DNA, 20 bp, Artificial Sequence
  Description of Artificial Sequence: Synthetic oligonucleotide
  Target: SCNA; (+) strand; PAM type: NRG; PAM sequence: AGG
tcatattattcattaaagaa

SEQ ID NO: 31159 - DNA, 20 bp, Artificial Sequence
  Description of Artificial Sequence: Synthetic oligonucleotide
  Target: SCNA; (+) strand; PAM type: NRG; PAM sequence: CAG
tattattcattaaagaaagg

SEQ ID NO: 31160 - DNA, 20 bp, Artificial Sequence
  Description of Artificial Sequence: Synthetic oligonucleotide
  Target: SCNA; (+) strand; PAM type: NRG; PAM sequence: TGG
tcattaaagaaaggcagtgt

SEQ ID NO: 31161 - DNA, 20 bp, Artificial Sequence
  Description of Artificial Sequence: Synthetic oligonucleotide
  Target: SCNA; (+) strand; PAM type: NRG; PAM sequence: GAG
attaaagaaaggcagtgttg

SEQ ID NO: 31162 - DNA, 20 bp, Artificial Sequence
  Description of Artificial Sequence: Synthetic oligonucleotide
  Target: SCNA; (+) strand; PAM type: NRG; PAM sequence: GAG
taaagaaaggcagtgttgga

SEQ ID NO: 31163 - DNA, 20 bp, Artificial Sequence
  Description of Artificial Sequence: Synthetic oligonucleotide
  Target: SCNA; (+) strand; PAM type: NRG; PAM sequence: TAG
ggcagtgttggagagtttta

SEQ ID NO: 31164 - DNA, 20 bp, Artificial Sequence
  Description of Artificial Sequence: Synthetic oligonucleotide
  Target: SCNA; (+) strand; PAM type: NRG; PAM sequence: CAG
ttggagagttttatagttga

SEQ ID NO: 31165 - DNA, 20 bp, Artificial Sequence
  Description of Artificial Sequence: Synthetic oligonucleotide
  Target: SCNA; (+) strand; PAM type: NRG; PAM sequence: CAG
tctataacttctaatatact

SEQ ID NO: 31166 - DNA, 20 bp, Artificial Sequence
  Description of Artificial Sequence: Synthetic oligonucleotide
  Target: SCNA; (+) strand; PAM type: NRG; PAM sequence: TAG
actcagacatcatgtttttc

SEQ ID NO: 31167 - DNA, 20 bp, Artificial Sequence
  Description of Artificial Sequence: Synthetic oligonucleotide
  Target: SCNA; (+) strand; PAM type: NRG; PAM sequence: AAG
tataaactctccaacattta

SEQ ID NO: 31168 - DNA, 20 bp, Artificial Sequence
  Description of Artificial Sequence: Synthetic oligonucleotide
  Target: SCNA; (+) strand; PAM type: NRG; PAM sequence: TAG
tttaaagttttaacactttt

SEQ ID NO: 31169 - DNA, 20 bp, Artificial Sequence
  Description of Artificial Sequence: Synthetic oligonucleotide
  Target: SCNA; (+) strand; PAM type: NRG; PAM sequence: AAG
acactttttagtaatttttt

SEQ ID NO: 31170 - DNA, 20 bp, Artificial Sequence
  Description of Artificial Sequence: Synthetic oligonucleotide
  Target: SCNA; (+) strand; PAM type: NRG; PAM sequence: CAG
agtaattttttaagaaatga

SEQ ID NO: 31171 - DNA, 20 bp, Artificial Sequence
  Description of Artificial Sequence: Synthetic oligonucleotide
  Target: SCNA; (+) strand; PAM type: NRG; PAM sequence: TAG
tttaagaaatgacagatcaa

SEQ ID NO: 31172 - DNA, 20 bp, Artificial Sequence
  Description of Artificial Sequence: Synthetic oligonucleotide
  Target: SCNA; (+) strand; PAM type: NRG; PAM sequence: TAG
aagaaatgacagatcaatag

SEQ ID NO: 31173 - DNA, 20 bp, Artificial Sequence
  Description of Artificial Sequence: Synthetic oligonucleotide
  Target: SCNA; (+) strand; PAM type: NRG; PAM sequence: AAG
tagtagctttccataaataa

SEQ ID NO: 31174 - DNA, 20 bp, Artificial Sequence
  Description of Artificial Sequence: Synthetic oligonucleotide
  Target: SCNA; (+) strand; PAM type: NRG; PAM sequence: CAG
ttgtataacataacaaaatt

SEQ ID NO: 31175 - DNA, 20 bp, Artificial Sequence
  Description of Artificial Sequence: Synthetic oligonucleotide
  Target: SCNA; (+) strand; PAM type: NRG; PAM sequence: TAG
cagtgcaacataaattcata

SEQ ID NO: 31176 - DNA, 20 bp, Artificial Sequence
  Description of Artificial Sequence: Synthetic oligonucleotide
  Target: SCNA; (+) strand; PAM type: NRG; PAM sequence: AAG
aattcatatagtactcctac

SEQ ID NO: 31177 - DNA, 20 bp, Artificial Sequence
  Description of Artificial Sequence: Synthetic oligonucleotide
  Target: SCNA; (+) strand; PAM type: NRG; PAM sequence: TAG
gtactcctacaagaaatcta

SEQ ID NO: 31178 - DNA, 20 bp, Artificial Sequence
  Description of Artificial Sequence: Synthetic oligonucleotide
  Target: SCNA; (+) strand; PAM type: NRG; PAM sequence: AGG
tactcctacaagaaatctat

SEQ ID NO: 31179 - DNA, 20 bp, Artificial Sequence
  Description of Artificial Sequence: Synthetic oligonucleotide
  Target: SCNA; (+) strand; PAM type: NRG; PAM sequence: GAG
ctcctacaagaaatctatag

SEQ ID NO: 31180 - DNA, 20 bp, Artificial Sequence
  Description of Artificial Sequence: Synthetic oligonucleotide
  Target: SCNA; (+) strand; PAM type: NRG; PAM sequence: CAG
attatgattataaaaatcaa

SEQ ID NO: 31181 - DNA, 20 bp, Artificial Sequence
  Description of Artificial Sequence: Synthetic oligonucleotide
  Target: SCNA; (+) strand; PAM type: NRG; PAM sequence: CAG
agacttaaacaaacaaataa

SEQ ID NO: 31182 - DNA, 20 bp, Artificial Sequence
  Description of Artificial Sequence: Synthetic oligonucleotide
  Target: SCNA; (+) strand; PAM type: NRG; PAM sequence: AAG
acaaataacagctttcaatt

SEQ ID NO: 31183 - DNA, 20 bp, Artificial Sequence
  Description of Artificial Sequence: Synthetic oligonucleotide
  Target: SCNA; (+) strand; PAM type: NRG; PAM sequence: TAG
acagctttcaattaagttta

SEQ ID NO: 31184 - DNA, 20 bp, Artificial Sequence
  Description of Artificial Sequence: Synthetic oligonucleotide
  Target: SCNA; (+) strand; PAM type: NRG; PAM sequence: AAG
aattaagtttatagatacca

SEQ ID NO: 31185 - DNA, 20 bp, Artificial Sequence
  Description of Artificial Sequence: Synthetic oligonucleotide
  Target: SCNA; (+) strand; PAM type: NRG; PAM sequence: TGG
tcccactgtgtaaaatcaaa

SEQ ID NO: 31186 - DNA, 20 bp, Artificial Sequence
  Description of Artificial Sequence: Synthetic oligonucleotide
  Target: SCNA; (+) strand; PAM type: NRG; PAM sequence: GGG
cccactgtgtaaaatcaaat

SEQ ID NO: 31187 - DNA, 20 bp, Artificial Sequence
  Description of Artificial Sequence: Synthetic oligonucleotide
  Target: SCNA; (+) strand; PAM type: NRG; PAM sequence: AAG
ctgtgtaaaatcaaatggga

SEQ ID NO: 31188 - DNA, 20 bp, Artificial Sequence
  Description of Artificial Sequence: Synthetic oligonucleotide
  Target: SCNA; (+) strand; PAM type: NRG; PAM sequence: AGG
tgtgtaaaatcaaatgggaa

SEQ ID NO: 31189 - DNA, 20 bp, Artificial Sequence
  Description of Artificial Sequence: Synthetic oligonucleotide
  Target: SCNA; (+) strand; PAM type: NRG; PAM sequence: AAG
aatcaaatgggaaaggataa

SEQ ID NO: 31190 - DNA, 20 bp, Artificial Sequence
  Description of Artificial Sequence: Synthetic oligonucleotide
  Target: SCNA; (+) strand; PAM type: NRG; PAM sequence: AGG
atcaaatgggaaaggataaa

SEQ ID NO: 31191 - DNA, 20 bp, Artificial Sequence
  Description of Artificial Sequence: Synthetic oligonucleotide
  Target: SCNA; (+) strand; PAM type: NRG; PAM sequence: AAG
gggaaaggataaaaggacca

SEQ ID NO: 31192 - DNA, 20 bp, Artificial Sequence
  Description of Artificial Sequence: Synthetic oligonucleotide
  Target: SCNA; (+) strand; PAM type: NRG; PAM sequence: TGG
ggataaaaggaccaaagcta

SEQ ID NO: 31193 - DNA, 20 bp, Artificial Sequence
  Description of Artificial Sequence: Synthetic oligonucleotide
  Target: SCNA; (+) strand; PAM type: NRG; PAM sequence: TAG
aaaaggaccaaagctatggt

SEQ ID NO: 31194 - DNA, 20 bp, Artificial Sequence
  Description of Artificial Sequence: Synthetic oligonucleotide
  Target: SCNA; (+) strand; PAM type: NRG; PAM sequence: TAG
atttgttttaatatctgtgc

SEQ ID NO: 31195 - DNA, 20 bp, Artificial Sequence
  Description of Artificial Sequence: Synthetic oligonucleotide
  Target: SCNA; (+) strand; PAM type: NRG; PAM sequence: CAG
tttaatatctgtgctagaac

SEQ ID NO: 31196 - DNA, 20 bp, Artificial Sequence
  Description of Artificial Sequence: Synthetic oligonucleotide
  Target: SCNA; (+) strand; PAM type: NRG; PAM sequence: TAG
tatgttaccccttttaactt

SEQ ID NO: 31197 - DNA, 20 bp, Artificial Sequence
  Description of Artificial Sequence: Synthetic oligonucleotide
  Target: SCNA; (+) strand; PAM type: NRG; PAM sequence: CAG
tttatacaaaccttactatg

SEQ ID NO: 31198 - DNA, 20 bp, Artificial Sequence
  Description of Artificial Sequence: Synthetic oligonucleotide
  Target: SCNA; (+) strand; PAM type: NRG; PAM sequence: GAG
tatacaaaccttactatgca

SEQ ID NO: 31199 - DNA, 20 bp, Artificial Sequence
  Description of Artificial Sequence: Synthetic oligonucleotide
  Target: SCNA; (+) strand; PAM type: NRG; PAM sequence: AAG
tatgcagagctatctttaac

SEQ ID NO: 31200 - DNA, 20 bp, Artificial Sequence
  Description of Artificial Sequence: Synthetic oligonucleotide
  Target: SCNA; (+) strand; PAM type: NRG; PAM sequence: GAG
tgcagagctatctttaacaa

SEQ ID NO: 31201 - DNA, 20 bp, Artificial Sequence
  Description of Artificial Sequence: Synthetic oligonucleotide
  Target: SCNA; (+) strand; PAM type: NRG; PAM sequence: GAG
tttaacaagagcatcccatt

SEQ ID NO: 31202 - DNA, 20 bp, Artificial Sequence
  Description of Artificial Sequence: Synthetic oligonucleotide
  Target: SCNA; (+) strand; PAM type: NRG; PAM sequence: AGG
ttaacaagagcatcccattg

SEQ ID NO: 31203 - DNA, 20 bp, Artificial Sequence
  Description of Artificial Sequence: Synthetic oligonucleotide
  Target: SCNA; (+) strand; PAM type: NRG; PAM sequence: AAG
gagcatcccattgaggaaaa

SEQ ID NO: 31204 - DNA, 20 bp, Artificial Sequence
  Description of Artificial Sequence: Synthetic oligonucleotide
  Target: SCNA; (+) strand; PAM type: NRG; PAM sequence: TAG
ccattgaggaaaaaagaaaa

SEQ ID NO: 31205 - DNA, 20 bp, Artificial Sequence
  Description of Artificial Sequence: Synthetic oligonucleotide
  Target: SCNA; (+) strand; PAM type: NRG; PAM sequence: AAG
tgaggaaaaaagaaaataga

SEQ ID NO: 31206 - DNA, 20 bp, Artificial Sequence
  Description of Artificial Sequence: Synthetic oligonucleotide
  Target: SCNA; (+) strand; PAM type: NRG; PAM sequence: CAG
tcacttttttctaataccaa

SEQ ID NO: 31207 - DNA, 20 bp, Artificial Sequence
  Description of Artificial Sequence: Synthetic oligonucleotide
  Target: SCNA; (+) strand; PAM type: NRG; PAM sequence: TAG
catttctgtatataatgaca

SEQ ID NO: 31208 - DNA, 20 bp, Artificial Sequence
  Description of Artificial Sequence: Synthetic oligonucleotide
  Target: SCNA; (+) strand; PAM type: NRG; PAM sequence: GAG
tatataatgacatagaatat

SEQ ID NO: 31209 - DNA, 20 bp, Artificial Sequence
  Description of Artificial Sequence: Synthetic oligonucleotide
  Target: SCNA; (+) strand; PAM type: NRG; PAM sequence: TAG
tagaatatgagcattccctg

SEQ ID NO: 31210 - DNA, 20 bp, Artificial Sequence
  Description of Artificial Sequence: Synthetic oligonucleotide
  Target: SCNA; (+) strand; PAM type: NRG; PAM sequence: CAG
tatgagcattccctgtagtt

SEQ ID NO: 31211 - DNA, 20 bp, Artificial Sequence
  Description of Artificial Sequence: Synthetic oligonucleotide
  Target: SCNA; (+) strand; PAM type: NRG; PAM sequence: CAG
ctgtagttcagttttactga

SEQ ID NO: 31212 - DNA, 20 bp, Artificial Sequence
  Description of Artificial Sequence: Synthetic oligonucleotide
  Target: SCNA; (+) strand; PAM type: NRG; PAM sequence: TAG
taacattgcacaaatcattt

SEQ ID NO: 31213 - DNA, 20 bp, Artificial Sequence
  Description of Artificial Sequence: Synthetic oligonucleotide
  Target: SCNA; (+) strand; PAM type: NRG; PAM sequence: AGG
aacattgcacaaatcatttt

SEQ ID NO: 31214 - DNA, 20 bp, Artificial Sequence
  Description of Artificial Sequence: Synthetic oligonucleotide
  Target: SCNA; (+) strand; PAM type: NRG; PAM sequence: GGG
acattgcacaaatcatttta

SEQ ID NO: 31215 - DNA, 20 bp, Artificial Sequence
  Description of Artificial Sequence: Synthetic oligonucleotide
  Target: SCNA; (+) strand; PAM type: NRG; PAM sequence: CAG
ttttagggctatgtgctatg

SEQ ID NO: 31216 - DNA, 20 bp, Artificial Sequence
  Description of Artificial Sequence: Synthetic oligonucleotide
  Target: SCNA; (+) strand; PAM type: NRG; PAM sequence: GAG
ttagggctatgtgctatgca

SEQ ID NO: 31217 - DNA, 20 bp, Artificial Sequence
  Description of Artificial Sequence: Synthetic oligonucleotide
  Target: SCNA; (+) strand; PAM type: NRG; PAM sequence: CAG
tgctatgcagagacattgta

SEQ ID NO: 31218 - DNA, 20 bp, Artificial Sequence
  Description of Artificial Sequence: Synthetic oligonucleotide
  Target: SCNA; (+) strand; PAM type: NRG; PAM sequence: TGG
agagacattgtacagttaat

SEQ ID NO: 31219 - DNA, 20 bp, Artificial Sequence
  Description of Artificial Sequence: Synthetic oligonucleotide
  Target: SCNA; (+) strand; PAM type: NRG; PAM sequence: AAG
tacagttaattggcatcatt

SEQ ID NO: 31220 - DNA, 20 bp, Artificial Sequence
  Description of Artificial Sequence: Synthetic oligonucleotide
  Target: SCNA; (+) strand; PAM type: NRG; PAM sequence: GAG
aagtaacattttgaaatgat

SEQ ID NO: 31221 - DNA, 20 bp, Artificial Sequence
  Description of Artificial Sequence: Synthetic oligonucleotide
  Target: SCNA; (+) strand; PAM type: NRG; PAM sequence: AGG
agtaacattttgaaatgatg

SEQ ID NO: 31222 - DNA, 20 bp, Artificial Sequence
  Description of Artificial Sequence: Synthetic oligonucleotide
  Target: SCNA; (+) strand; PAM type: NRG; PAM sequence: TAG
aatgatgaggtgttcaaatg

SEQ ID NO: 31223 - DNA, 20 bp, Artificial Sequence
  Description of Artificial Sequence: Synthetic oligonucleotide
  Target: SCNA; (+) strand; PAM type: NRG; PAM sequence: TAG
gatgaggtgttcaaatgtag

SEQ ID NO: 31224 - DNA, 20 bp, Artificial Sequence
  Description of Artificial Sequence: Synthetic oligonucleotide
  Target: SCNA; (+) strand; PAM type: NRG; PAM sequence: AAG
gtgttcaaatgtagtagtta

SEQ ID NO: 31225 - DNA, 20 bp, Artificial Sequence
  Description of Artificial Sequence: Synthetic oligonucleotide
  Target: SCNA; (+) strand; PAM type: NRG; PAM sequence: AGG
tgttcaaatgtagtagttaa

SEQ ID NO: 31226 - DNA, 20 bp, Artificial Sequence
  Description of Artificial Sequence: Synthetic oligonucleotide
  Target: SCNA; (+) strand; PAM type: NRG; PAM sequence: TGG
gtagtagttaaaggcttgat

SEQ ID NO: 31227 - DNA, 20 bp, Artificial Sequence
  Description of Artificial Sequence: Synthetic oligonucleotide
  Target: SCNA; (+) strand; PAM type: NRG; PAM sequence: TGG
ttgattggacattgctaaat

SEQ ID NO: 31228 - DNA, 20 bp, Artificial Sequence
  Description of Artificial Sequence: Synthetic oligonucleotide
  Target: SCNA; (+) strand; PAM type: NRG; PAM sequence: GGG
tgattggacattgctaaatt

SEQ ID NO: 31229 - DNA, 20 bp, Artificial Sequence
  Description of Artificial Sequence: Synthetic oligonucleotide
  Target: SCNA; (+) strand; PAM type: NRG; PAM sequence: TAG
gacattgctaaattgggtac

SEQ ID NO: 31230 - DNA, 20 bp, Artificial Sequence
  Description of Artificial Sequence: Synthetic oligonucleotide
  Target: SCNA; (+) strand; PAM type: NRG; PAM sequence: AAG
aattgggtactagatctcta

SEQ ID NO: 31231 - DNA, 20 bp, Artificial Sequence
  Description of Artificial Sequence: Synthetic oligonucleotide
  Target: SCNA; (+) strand; PAM type: NRG; PAM sequence: GAG
ttgggtactagatctctaaa

SEQ ID NO: 31232 - DNA, 20 bp, Artificial Sequence
  Description of Artificial Sequence: Synthetic oligonucleotide
  Target: SCNA; (+) strand; PAM type: NRG; PAM sequence: TGG
gtactagatctctaaagaga

SEQ ID NO: 31233 - DNA, 20 bp, Artificial Sequence
  Description of Artificial Sequence: Synthetic oligonucleotide
  Target: SCNA; (+) strand; PAM type: NRG; PAM sequence: TAG
aagagatggaatttaccccc

SEQ ID NO: 31234 - DNA, 20 bp, Artificial Sequence
  Description of Artificial Sequence: Synthetic oligonucleotide
  Target: SCNA; (+) strand; PAM type: NRG; PAM sequence: TAG
agatggaatttaccccctag

SEQ ID NO: 31235 - DNA, 20 bp, Artificial Sequence
  Description of Artificial Sequence: Synthetic oligonucleotide
  Target: SCNA; (+) strand; PAM type: NRG; PAM sequence: AGG
gatggaatttaccccctagt

SEQ ID NO: 31236 - DNA, 20 bp, Artificial Sequence
  Description of Artificial Sequence: Synthetic oligonucleotide
  Target: SCNA; (+) strand; PAM type: NRG; PAM sequence: CAG
ttatcctttttcacttgtct

SEQ ID NO: 31237 - DNA, 20 bp, Artificial Sequence
  Description of Artificial Sequence: Synthetic oligonucleotide
  Target: SCNA; (+) strand; PAM type: NRG; PAM sequence: TGG
tttttcacttgtctcagatt

SEQ ID NO: 31238 - DNA, 20 bp, Artificial Sequence
  Description of Artificial Sequence: Synthetic oligonucleotide
  Target: SCNA; (+) strand; PAM type: NRG; PAM sequence: TAG
gatttggaactcatttcttt

SEQ ID NO: 31239 - DNA, 20 bp, Artificial Sequence
  Description of Artificial Sequence: Synthetic oligonucleotide
  Target: SCNA; (+) strand; PAM type: NRG; PAM sequence: AGG
atttggaactcatttctttt

SEQ ID NO: 31240 - DNA, 20 bp, Artificial Sequence
  Description of Artificial Sequence: Synthetic oligonucleotide
  Target: SCNA; (+) strand; PAM type: NRG; PAM sequence: TGG
tgaaaattttatgttcatgt

SEQ ID NO: 31241 - DNA, 20 bp, Artificial Sequence
  Description of Artificial Sequence: Synthetic oligonucleotide
  Target: SCNA; (+) strand; PAM type: NRG; PAM sequence: AAG
acttaaattttaacaattaa

SEQ ID NO: 31242 - DNA, 20 bp, Artificial Sequence
  Description of Artificial Sequence: Synthetic oligonucleotide
  Target: SCNA; (+) strand; PAM type: NRG; PAM sequence: CGG
ttgaaatgcaatgctaccca

SEQ ID NO: 31243 - DNA, 20 bp, Artificial Sequence
  Description of Artificial Sequence: Synthetic oligonucleotide
  Target: SCNA; (+) strand; PAM type: NRG; PAM sequence: TGG
cccacggctgcctgtcattt

SEQ ID NO: 31244 - DNA, 20 bp, Artificial Sequence
  Description of Artificial Sequence: Synthetic oligonucleotide
  Target: SCNA; (+) strand; PAM type: NRG; PAM sequence: GGG
ccacggctgcctgtcatttt

SEQ ID NO: 31245 - DNA, 20 bp, Artificial Sequence
  Description of Artificial Sequence: Synthetic oligonucleotide
  Target: SCNA; (+) strand; PAM type: NRG; PAM sequence: GAG
acggctgcctgtcattttgg

SEQ ID NO: 31246 - DNA, 20 bp, Artificial Sequence
  Description of Artificial Sequence: Synthetic oligonucleotide
  Target: SCNA; (+) strand; PAM type: NRG; PAM sequence: TAG
gtcattttgggagtttctta

SEQ ID NO: 31247 - DNA, 20 bp, Artificial Sequence
  Description of Artificial Sequence: Synthetic oligonucleotide
  Target: SCNA; (+) strand; PAM type: NRG; PAM sequence: TAG
agtttcttatagattctttt

SEQ ID NO: 31248 - DNA, 20 bp, Artificial Sequence
  Description of Artificial Sequence: Synthetic oligonucleotide
  Target: SCNA; (+) strand; PAM type: NRG; PAM sequence: AGG
gtttcttatagattcttttt

SEQ ID NO: 31249 - DNA, 20 bp, Artificial Sequence
  Description of Artificial Sequence: Synthetic oligonucleotide
  Target: SCNA; (+) strand; PAM type: NRG; PAM sequence: GGG
tttcttatagattcttttta

SEQ ID NO: 31250 - DNA, 20 bp, Artificial Sequence
  Description of Artificial Sequence: Synthetic oligonucleotide
  Target: SCNA; (+) strand; PAM type: NRG; PAM sequence: AAG
tatagattctttttagggat

SEQ ID NO: 31251 - DNA, 20 bp, Artificial Sequence
  Description of Artificial Sequence: Synthetic oligonucleotide
  Target: SCNA; (+) strand; PAM type: NRG; PAM sequence: CAG
gataagaattatgttaaaac

SEQ ID NO: 31252 - DNA, 20 bp, Artificial Sequence
  Description of Artificial Sequence: Synthetic oligonucleotide
  Target: SCNA; (+) strand; PAM type: NRG; PAM sequence: TAG
attatgttaaaaccagatgc

SEQ ID NO: 31253 - DNA, 20 bp, Artificial Sequence
  Description of Artificial Sequence: Synthetic oligonucleotide
  Target: SCNA; (+) strand; PAM type: NRG; PAM sequence: CAG
ttgctttaatttttattccc

SEQ ID NO: 31254 - DNA, 20 bp, Artificial Sequence
  Description of Artificial Sequence: Synthetic oligonucleotide
  Target: SCNA; (+) strand; PAM type: NRG; PAM sequence: AAG
ttctcatttccattttgaca

SEQ ID NO: 31255 - DNA, 20 bp, Artificial Sequence
  Description of Artificial Sequence: Synthetic oligonucleotide
  Target: SCNA; (+) strand; PAM type: NRG; PAM sequence: GAG
ctcatttccattttgacaaa

SEQ ID NO: 31256 - DNA, 20 bp, Artificial Sequence
  Description of Artificial Sequence: Synthetic oligonucleotide
  Target: SCNA; (+) strand; PAM type: NRG; PAM sequence: AGG
tcatttccattttgacaaag

SEQ ID NO: 31257 - DNA, 20 bp, Artificial Sequence
  Description of Artificial Sequence: Synthetic oligonucleotide
  Target: SCNA; (+) strand; PAM type: NRG; PAM sequence: TAG
aaagaggcccaaaacatgaa

SEQ ID NO: 31258 - DNA, 20 bp, Artificial Sequence
  Description of Artificial Sequence: Synthetic oligonucleotide
  Target: SCNA; (+) strand; PAM type: NRG; PAM sequence: CAG
tctgtttttttctcccatat

SEQ ID NO: 31259 - DNA, 20 bp, Artificial Sequence
  Description of Artificial Sequence: Synthetic oligonucleotide
  Target: SCNA; (+) strand; PAM type: NRG; PAM sequence: GAG
tctcccatatcagttcccat

SEQ ID NO: 31260 - DNA, 20 bp, Artificial Sequence
  Description of Artificial Sequence: Synthetic oligonucleotide
  Target: SCNA; (+) strand; PAM type: NRG; PAM sequence: CAG
catatcagttcccatgagac

SEQ ID NO: 31261 - DNA, 20 bp, Artificial Sequence
  Description of Artificial Sequence: Synthetic oligonucleotide
  Target: SCNA; (+) strand; PAM type: NRG; PAM sequence: CAG
cttcattctttctgttattg

SEQ ID NO: 31262 - DNA, 20 bp, Artificial Sequence
  Description of Artificial Sequence: Synthetic oligonucleotide
  Target: SCNA; (+) strand; PAM type: NRG; PAM sequence: AGG
ttcattctttctgttattgc

SEQ ID NO: 31263 - DNA, 20 bp, Artificial Sequence
  Description of Artificial Sequence: Synthetic oligonucleotide
  Target: SCNA; (+) strand; PAM type: NRG; PAM sequence: CAG
tattgcaggtttacattttg

SEQ ID NO: 31264 - DNA, 20 bp, Artificial Sequence
  Description of Artificial Sequence: Synthetic oligonucleotide
  Target: SCNA; (+) strand; PAM type: NRG; PAM sequence: TGG
atcactatcttcaatcattg

SEQ ID NO: 31265 - DNA, 20 bp, Artificial Sequence
  Description of Artificial Sequence: Synthetic oligonucleotide
  Target: SCNA; (+) strand; PAM type: NRG; PAM sequence: CAG
tcattgtggccaattctttc

SEQ ID NO: 31266 - DNA, 20 bp, Artificial Sequence
  Description of Artificial Sequence: Synthetic oligonucleotide
  Target: SCNA; (+) strand; PAM type: NRG; PAM sequence: AGG
cattgtggccaattctttcc

SEQ ID NO: 31267 - DNA, 20 bp, Artificial Sequence
  Description of Artificial Sequence: Synthetic oligonucleotide
  Target: SCNA; (+) strand; PAM type: NRG; PAM sequence: AAG
attctcaaacctccatatca

SEQ ID NO: 31268 - DNA, 20 bp, Artificial Sequence
  Description of Artificial Sequence: Synthetic oligonucleotide
  Target: SCNA; (+) strand; PAM type: NRG; PAM sequence: TAG
aaacctccatatcaaagcta

SEQ ID NO: 31269 - DNA, 20 bp, Artificial Sequence
  Description of Artificial Sequence: Synthetic oligonucleotide
  Target: SCNA; (+) strand; PAM type: NRG; PAM sequence: CAG
agctatagatcaataactat

SEQ ID NO: 31270 - DNA, 20 bp, Artificial Sequence
  Description of Artificial Sequence: Synthetic oligonucleotide
  Target: SCNA; (+) strand; PAM type: NRG; PAM sequence: AAG
agatcaataactatcagaac

SEQ ID NO: 31271 - DNA, 20 bp, Artificial Sequence
  Description of Artificial Sequence: Synthetic oligonucleotide
  Target: SCNA; (+) strand; PAM type: NRG; PAM sequence: AAG
atcagaacaagttaaacatt

SEQ ID NO: 31272 - DNA, 20 bp, Artificial Sequence
  Description of Artificial Sequence: Synthetic oligonucleotide
  Target: SCNA; (+) strand; PAM type: NRG; PAM sequence: AAG
acaagttaaacattaagata

SEQ ID NO: 31273 - DNA, 20 bp, Artificial Sequence
  Description of Artificial Sequence: Synthetic oligonucleotide
  Target: SCNA; (+) strand; PAM type: NRG; PAM sequence: GAG
cactgaattgcaattgttat

SEQ ID NO: 31274 - DNA, 20 bp, Artificial Sequence
  Description of Artificial Sequence: Synthetic oligonucleotide
  Target: SCNA; (+) strand; PAM type: NRG; PAM sequence: AGG
actgaattgcaattgttatg

SEQ ID NO: 31275 - DNA, 20 bp, Artificial Sequence
  Description of Artificial Sequence: Synthetic oligonucleotide
  Target: SCNA; (+) strand; PAM type: NRG; PAM sequence: TAG
ctttatcaaatcttatgaaa

SEQ ID NO: 31276 - DNA, 20 bp, Artificial Sequence
  Description of Artificial Sequence: Synthetic oligonucleotide
  Target: SCNA; (+) strand; PAM type: NRG; PAM sequence: AGG
tttatcaaatcttatgaaat

SEQ ID NO: 31277 - DNA, 20 bp, Artificial Sequence
  Description of Artificial Sequence: Synthetic oligonucleotide
  Target: SCNA; (+) strand; PAM type: NRG; PAM sequence: GGG
ttatcaaatcttatgaaata

SEQ ID NO: 31278 - DNA, 20 bp, Artificial Sequence
  Description of Artificial Sequence: Synthetic oligonucleotide
  Target: SCNA; (+) strand; PAM type: NRG; PAM sequence: GGG
tatcaaatcttatgaaatag

SEQ ID NO: 31279 - DNA, 20 bp, Artificial Sequence
  Description of Artificial Sequence: Synthetic oligonucleotide
  Target: SCNA; (+) strand; PAM type: NRG; PAM sequence: GAG
tttttattctcatctcacat

SEQ ID NO: 31280 - DNA, 20 bp, Artificial Sequence
  Description of Artificial Sequence: Synthetic oligonucleotide
  Target: SCNA; (+) strand; PAM type: NRG; PAM sequence: GAG
ctcatctcacatgagaactt

SEQ ID NO: 31281 - DNA, 20 bp, Artificial Sequence
  Description of Artificial Sequence: Synthetic oligonucleotide
  Target: SCNA; (+) strand; PAM type: NRG; PAM sequence: AGG
tcatctcacatgagaacttg

SEQ ID NO: 31282 - DNA, 20 bp, Artificial Sequence
  Description of Artificial Sequence: Synthetic oligonucleotide
  Target: SCNA; (+) strand; PAM type: NRG; PAM sequence: AAG
acttgaggcacataaaaatt

SEQ ID NO: 31283 - DNA, 20 bp, Artificial Sequence
  Description of Artificial Sequence: Synthetic oligonucleotide
  Target: SCNA; (+) strand; PAM type: NRG; PAM sequence: AGG
cttgaggcacataaaaatta

SEQ ID NO: 31284 - DNA, 20 bp, Artificial Sequence
  Description of Artificial Sequence: Synthetic oligonucleotide
  Target: SCNA; (+) strand; PAM type: NRG; PAM sequence: CAG
aaaattaaggcattttgccc

SEQ ID NO: 31285 - DNA, 20 bp, Artificial Sequence
  Description of Artificial Sequence: Synthetic oligonucleotide
  Target: SCNA; (+) strand; PAM type: NRG; PAM sequence: AGG
aaattaaggcattttgcccc

SEQ ID NO: 31286 - DNA, 20 bp, Artificial Sequence
  Description of Artificial Sequence: Synthetic oligonucleotide
  Target: SCNA; (+) strand; PAM type: NRG; PAM sequence: TGG
gcattttgccccaggtctca

SEQ ID NO: 31287 - DNA, 20 bp, Artificial Sequence
  Description of Artificial Sequence: Synthetic oligonucleotide
  Target: SCNA; (+) strand; PAM type: NRG; PAM sequence: TGG
tttgccccaggtctcatggc

SEQ ID NO: 31288 - DNA, 20 bp, Artificial Sequence
  Description of Artificial Sequence: Synthetic oligonucleotide
  Target: SCNA; (+) strand; PAM type: NRG; PAM sequence: AAG
ccccaggtctcatggctggc

SEQ ID NO: 31289 - DNA, 20 bp, Artificial Sequence
  Description of Artificial Sequence: Synthetic oligonucleotide
  Target: SCNA; (+) strand; PAM type: NRG; PAM sequence: TGG
caggtctcatggctggcaag

SEQ ID NO: 31290 - DNA, 20 bp, Artificial Sequence
  Description of Artificial Sequence: Synthetic oligonucleotide
  Target: SCNA; (+) strand; PAM type: NRG; PAM sequence: CAG
ctggcaagtggtctgtctga

SEQ ID NO: 31291 - DNA, 20 bp, Artificial Sequence
  Description of Artificial Sequence: Synthetic oligonucleotide
  Target: SCNA; (+) strand; PAM type: NRG; PAM sequence: TAG
gcaagtggtctgtctgacag

SEQ ID NO: 31292 - DNA, 20 bp, Artificial Sequence
  Description of Artificial Sequence: Synthetic oligonucleotide
  Target: SCNA; (+) strand; PAM type: NRG; PAM sequence: GAG
aagtggtctgtctgacagta

SEQ ID NO: 31293 - DNA, 20 bp, Artificial Sequence
  Description of Artificial Sequence: Synthetic oligonucleotide
  Target: SCNA; (+) strand; PAM type: NRG; PAM sequence: GAG
gtggtctgtctgacagtaga

SEQ ID NO: 31294 - DNA, 20 bp, Artificial Sequence
  Description of Artificial Sequence: Synthetic oligonucleotide
  Target: SCNA; (+) strand; PAM type: NRG; PAM sequence: CAG
tctgtctgacagtagagagc

SEQ ID NO: 31295 - DNA, 20 bp, Artificial Sequence
  Description of Artificial Sequence: Synthetic oligonucleotide
  Target: SCNA; (+) strand; PAM type: NRG; PAM sequence: AAG
gacagtagagagccagcttc

SEQ ID NO: 31296 - DNA, 20 bp, Artificial Sequence
  Description of Artificial Sequence: Synthetic oligonucleotide
  Target: SCNA; (+) strand; PAM type: NRG; PAM sequence: TAG
cagcttcaagcactgtacta

SEQ ID NO: 31297 - DNA, 20 bp, Artificial Sequence
  Description of Artificial Sequence: Synthetic oligonucleotide
  Target: SCNA; (+) strand; PAM type: NRG; PAM sequence: AGG
agcttcaagcactgtactat

SEQ ID NO: 31298 - DNA, 20 bp, Artificial Sequence
  Description of Artificial Sequence: Synthetic oligonucleotide
  Target: SCNA; (+) strand; PAM type: NRG; PAM sequence: GGG
gcttcaagcactgtactata

SEQ ID NO: 31299 - DNA, 20 bp, Artificial Sequence
  Description of Artificial Sequence: Synthetic oligonucleotide
  Target: SCNA; (+) strand; PAM type: NRG; PAM sequence: TGG
tcatgactataaacctttca

SEQ ID NO: 31300 - DNA, 20 bp, Artificial Sequence
  Description of Artificial Sequence: Synthetic oligonucleotide
  Target: SCNA; (+) strand; PAM type: NRG; PAM sequence: TGG
actataaacctttcatggca

SEQ ID NO: 31301 - DNA, 20 bp, Artificial Sequence
  Description of Artificial Sequence: Synthetic oligonucleotide
  Target: SCNA; (+) strand; PAM type: NRG; PAM sequence: TGG
catggcatggtctatacatt

SEQ ID NO: 31302 - DNA, 20 bp, Artificial Sequence
  Description of Artificial Sequence: Synthetic oligonucleotide
  Target: SCNA; (+) strand; PAM type: NRG; PAM sequence: GGG
atggcatggtctatacattt

SEQ ID NO: 31303 - DNA, 20 bp, Artificial Sequence
  Description of Artificial Sequence: Synthetic oligonucleotide
  Target: SCNA; (+) strand; PAM type: NRG; PAM sequence: CAG
gtctatacatttgggctctt

SEQ ID NO: 31304 - DNA, 20 bp, Artificial Sequence
  Description of Artificial Sequence: Synthetic oligonucleotide
  Target: SCNA; (+) strand; PAM type: NRG; PAM sequence: CAG
cttcaaatttatctatcatg

SEQ ID NO: 31305 - DNA, 20 bp, Artificial Sequence
  Description of Artificial Sequence: Synthetic oligonucleotide
  Target: SCNA; (+) strand; PAM type: NRG; PAM sequence: AGG
ttcaaatttatctatcatgc

SEQ ID NO: 31306 - DNA, 20 bp, Artificial Sequence
  Description of Artificial Sequence: Synthetic oligonucleotide
  Target: SCNA; (+) strand; PAM type: NRG; PAM sequence: TAG
ctatcatgcaggcatgacac

SEQ ID NO: 31307 - DNA, 20 bp, Artificial Sequence
  Description of Artificial Sequence: Synthetic oligonucleotide
  Target: SCNA; (+) strand; PAM type: NRG; PAM sequence: AGG
tatcatgcaggcatgacact

SEQ ID NO: 31308 - DNA, 20 bp, Artificial Sequence
  Description of Artificial Sequence: Synthetic oligonucleotide
  Target: SCNA; (+) strand; PAM type: NRG; PAM sequence: TGG
cactaggttttcacttgcac

SEQ ID NO: 31309 - DNA, 20 bp, Artificial Sequence
  Description of Artificial Sequence: Synthetic oligonucleotide
  Target: SCNA; (+) strand; PAM type: NRG; PAM sequence: AAG
taggttttcacttgcactgg

SEQ ID NO: 31310 - DNA, 20 bp, Artificial Sequence
  Description of Artificial Sequence: Synthetic oligonucleotide
  Target: SCNA; (+) strand; PAM type: NRG; PAM sequence: TGG
ttgcactggaagtcaactgc

SEQ ID NO: 31311 - DNA, 20 bp, Artificial Sequence
  Description of Artificial Sequence: Synthetic oligonucleotide
  Target: SCNA; (+) strand; PAM type: NRG; PAM sequence: TAG
gaagtcaactgctggaaaat

SEQ ID NO: 31312 - DNA, 20 bp, Artificial Sequence
  Description of Artificial Sequence: Synthetic oligonucleotide
  Target: SCNA; (+) strand; PAM type: NRG; PAM sequence: TAG
actgctggaaaattagtctg

SEQ ID NO: 31313 - DNA, 20 bp, Artificial Sequence
  Description of Artificial Sequence: Synthetic oligonucleotide
  Target: SCNA; (+) strand; PAM type: NRG; PAM sequence: TAG
aattagtctgtagaaaaccg

SEQ ID NO: 31314 - DNA, 20 bp, Artificial Sequence
  Description of Artificial Sequence: Synthetic oligonucleotide
  Target: SCNA; (+) strand; PAM type: NRG; PAM sequence: AGG
attagtctgtagaaaaccgt

SEQ ID NO: 31315 - DNA, 20 bp, Artificial Sequence
  Description of Artificial Sequence: Synthetic oligonucleotide
  Target: SCNA; (+) strand; PAM type: NRG; PAM sequence: CAG
ctgtagaaaaccgtaggcca

SEQ ID NO: 31316 - DNA, 20 bp, Artificial Sequence
  Description of Artificial Sequence: Synthetic oligonucleotide
  Target: SCNA; (+) strand; PAM type: NRG; PAM sequence: GAG
gtagaaaaccgtaggccaca

SEQ ID NO: 31317 - DNA, 20 bp, Artificial Sequence
  Description of Artificial Sequence: Synthetic oligonucleotide
  Target: SCNA; (+) strand; PAM type: NRG; PAM sequence: TAG
cacagagttcctgaatgtgt

SEQ ID NO: 31318 - DNA, 20 bp, Artificial Sequence
  Description of Artificial Sequence: Synthetic oligonucleotide
  Target: SCNA; (+) strand; PAM type: NRG; PAM sequence: AAG
gagttcctgaatgtgttagt

SEQ ID NO: 31319 - DNA, 20 bp, Artificial Sequence
  Description of Artificial Sequence: Synthetic oligonucleotide
  Target: SCNA; (+) strand; PAM type: NRG; PAM sequence: GAG
gttcctgaatgtgttagtaa

SEQ ID NO: 31320 - DNA, 20 bp, Artificial Sequence
  Description of Artificial Sequence: Synthetic oligonucleotide
  Target: SCNA; (+) strand; PAM type: NRG; PAM sequence: AGG
ttcctgaatgtgttagtaag

SEQ ID NO: 31321 - DNA, 20 bp, Artificial Sequence
  Description of Artificial Sequence: Synthetic oligonucleotide
  Target: SCNA; (+) strand; PAM type: NRG; PAM sequence: TAG
gaatgtgttagtaagaggct

SEQ ID NO: 31322 - DNA, 20 bp, Artificial Sequence
  Description of Artificial Sequence: Synthetic oligonucleotide
  Target: SCNA; (+) strand; PAM type: NRG; PAM sequence: TGG
aagaggcttagattttattt

SEQ ID NO: 31323 - DNA, 20 bp, Artificial Sequence
  Description of Artificial Sequence: Synthetic oligonucleotide
  Target: SCNA; (+) strand; PAM type: NRG; PAM sequence: TGG
ggcttagattttattttgga

SEQ ID NO: 31324 - DNA, 20 bp, Artificial Sequence
  Description of Artificial Sequence: Synthetic oligonucleotide
  Target: SCNA; (+) strand; PAM type: NRG; PAM sequence: GGG
gcttagattttattttggat

SEQ ID NO: 31325 - DNA, 20 bp, Artificial Sequence
  Description of Artificial Sequence: Synthetic oligonucleotide
  Target: SCNA; (+) strand; PAM type: NRG; PAM sequence: TGG
agattttattttggatgggc

SEQ ID NO: 31326 - DNA, 20 bp, Artificial Sequence
  Description of Artificial Sequence: Synthetic oligonucleotide
  Target: SCNA; (+) strand; PAM type: NRG; PAM sequence: GGG
gattttattttggatgggct

SEQ ID NO: 31327 - DNA, 20 bp, Artificial Sequence
  Description of Artificial Sequence: Synthetic oligonucleotide
  Target: SCNA; (+) strand; PAM type: NRG; PAM sequence: AAG
gatgggctgggaaataattg

SEQ ID NO: 31328 - DNA, 20 bp, Artificial Sequence
  Description of Artificial Sequence: Synthetic oligonucleotide
  Target: SCNA; (+) strand; PAM type: NRG; PAM sequence: AGG
atgggctgggaaataattga

SEQ ID NO: 31329 - DNA, 20 bp, Artificial Sequence
  Description of Artificial Sequence: Synthetic oligonucleotide
  Target: SCNA; (+) strand; PAM type: NRG; PAM sequence: GGG
tgggctgggaaataattgaa

SEQ ID NO: 31330 - DNA, 20 bp, Artificial Sequence
  Description of Artificial Sequence: Synthetic oligonucleotide
  Target: SCNA; (+) strand; PAM type: NRG; PAM sequence: CAG
aaataattgaagggttgtaa

SEQ ID NO: 31331 - DNA, 20 bp, Artificial Sequence
  Description of Artificial Sequence: Synthetic oligonucleotide
  Target: SCNA; (+) strand; PAM type: NRG; PAM sequence: AGG
aataattgaagggttgtaac

SEQ ID NO: 31332 - DNA, 20 bp, Artificial Sequence
  Description of Artificial Sequence: Synthetic oligonucleotide
  Target: SCNA; (+) strand; PAM type: NRG; PAM sequence: GGG
ataattgaagggttgtaaca

SEQ ID NO: 31333 - DNA, 20 bp, Artificial Sequence
  Description of Artificial Sequence: Synthetic oligonucleotide
  Target: SCNA; (+) strand; PAM type: NRG; PAM sequence: CAG
gggttgtaacagggaatgtg

SEQ ID NO: 31334 - DNA, 20 bp, Artificial Sequence
  Description of Artificial Sequence: Synthetic oligonucleotide
  Target: SCNA; (+) strand; PAM type: NRG; PAM sequence: TGG
gaatgtgcagaattgcattg

SEQ ID NO: 31335 - DNA, 20 bp, Artificial Sequence
  Description of Artificial Sequence: Synthetic oligonucleotide
  Target: SCNA; (+) strand; PAM type: NRG; PAM sequence: GAG
atgtgcagaattgcattgtg

SEQ ID NO: 31336 - DNA, 20 bp, Artificial Sequence
  Description of Artificial Sequence: Synthetic oligonucleotide
  Target: SCNA; (+) strand; PAM type: NRG; PAM sequence: GAG
gtgcagaattgcattgtgga

SEQ ID NO: 31337 - DNA, 20 bp, Artificial Sequence
  Description of Artificial Sequence: Synthetic oligonucleotide
  Target: SCNA; (+) strand; PAM type: NRG; PAM sequence: TGG
gcattgtggagagatctaat

SEQ ID NO: 31338 - DNA, 20 bp, Artificial Sequence
  Description of Artificial Sequence: Synthetic oligonucleotide
  Target: SCNA; (+) strand; PAM type: NRG; PAM sequence: GAG
attgtggagagatctaattg

SEQ ID NO: 31339 - DNA, 20 bp, Artificial Sequence
  Description of Artificial Sequence: Synthetic oligonucleotide
  Target: SCNA; (+) strand; PAM type: NRG; PAM sequence: TGG
ggagagatctaattggagat

SEQ ID NO: 31340 - DNA, 20 bp, Artificial Sequence
  Description of Artificial Sequence: Synthetic oligonucleotide
  Target: SCNA; (+) strand; PAM type: NRG; PAM sequence: GGG
gagagatctaattggagatt

SEQ ID NO: 31341 - DNA, 20 bp, Artificial Sequence
  Description of Artificial Sequence: Synthetic oligonucleotide
  Target: SCNA; (+) strand; PAM type: NRG; PAM sequence: GGG
agagatctaattggagattg

SEQ ID NO: 31342 - DNA, 20 bp, Artificial Sequence
  Description of Artificial Sequence: Synthetic oligonucleotide
  Target: SCNA; (+) strand; PAM type: NRG; PAM sequence: GGG
gagatctaattggagattgg

SEQ ID NO: 31343 - DNA, 20 bp, Artificial Sequence
  Description of Artificial Sequence: Synthetic oligonucleotide
  Target: SCNA; (+) strand; PAM type: NRG; PAM sequence: AAG
tctaattggagattggggga

SEQ ID NO: 31344 - DNA, 20 bp, Artificial Sequence
  Description of Artificial Sequence: Synthetic oligonucleotide
  Target: SCNA; (+) strand; PAM type: NRG; PAM sequence: GAG
ttggagattgggggaaagat

SEQ ID NO: 31345 - DNA, 20 bp, Artificial Sequence
  Description of Artificial Sequence: Synthetic oligonucleotide
  Target: SCNA; (+) strand; PAM type: NRG; PAM sequence: CAG
gagattgggggaaagatgag

SEQ ID NO: 31346 - DNA, 20 bp, Artificial Sequence
  Description of Artificial Sequence: Synthetic oligonucleotide
  Target: SCNA; (+) strand; PAM type: NRG; PAM sequence: AGG
agattgggggaaagatgagc

SEQ ID NO: 31347 - DNA, 20 bp, Artificial Sequence
  Description of Artificial Sequence: Synthetic oligonucleotide
  Target: SCNA; (+) strand; PAM type: NRG; PAM sequence: TGG
gccctaaactgtgataatgt

SEQ ID NO: 31348 - DNA, 20 bp, Artificial Sequence
  Description of Artificial Sequence: Synthetic oligonucleotide
  Target: SCNA; (+) strand; PAM type: NRG; PAM sequence: AAG
taaactgtgataatgttggc

SEQ ID NO: 31349 - DNA, 20 bp, Artificial Sequence
  Description of Artificial Sequence: Synthetic oligonucleotide
  Target: SCNA; (+) strand; PAM type: NRG; PAM sequence: AAG
tgataatgttggcaagcttg

SEQ ID NO: 31350 - DNA, 20 bp, Artificial Sequence
  Description of Artificial Sequence: Synthetic oligonucleotide
  Target: SCNA; (+) strand; PAM type: NRG; PAM sequence: AGG
gataatgttggcaagcttga

SEQ ID NO: 31351 - DNA, 20 bp, Artificial Sequence
  Description of Artificial Sequence: Synthetic oligonucleotide
  Target: SCNA; (+) strand; PAM type: NRG; PAM sequence: GGG
ataatgttggcaagcttgaa

SEQ ID NO: 31352 - DNA, 20 bp, Artificial Sequence
  Description of Artificial Sequence: Synthetic oligonucleotide
  Target: SCNA; (+) strand; PAM type: NRG; PAM sequence: GAG
aatgttggcaagcttgaagg

SEQ ID NO: 31353 - DNA, 20 bp, Artificial Sequence
  Description of Artificial Sequence: Synthetic oligonucleotide
  Target: SCNA; (+) strand; PAM type: NRG; PAM sequence: AGG
atgttggcaagcttgaaggg

SEQ ID NO: 31354 - DNA, 20 bp, Artificial Sequence
  Description of Artificial Sequence: Synthetic oligonucleotide
  Target: SCNA; (+) strand; PAM type: NRG; PAM sequence: GGG
tgttggcaagcttgaaggga

SEQ ID NO: 31355 - DNA, 20 bp, Artificial Sequence
  Description of Artificial Sequence: Synthetic oligonucleotide
  Target: SCNA; (+) strand; PAM type: NRG; PAM sequence: CAG
ggcaagcttgaagggaggga

SEQ ID NO: 31356 - DNA, 20 bp, Artificial Sequence
  Description of Artificial Sequence: Synthetic oligonucleotide
  Target: SCNA; (+) strand; PAM type: NRG; PAM sequence: CAG
cttgaagggagggacagaat

SEQ ID NO: 31357 - DNA, 20 bp, Artificial Sequence
  Description of Artificial Sequence: Synthetic oligonucleotide
  Target: SCNA; (+) strand; PAM type: NRG; PAM sequence: AAG
cagaatcagaaaatatttgt

SEQ ID NO: 31358 - DNA, 20 bp, Artificial Sequence
  Description of Artificial Sequence: Synthetic oligonucleotide
  Target: SCNA; (+) strand; PAM type: NRG; PAM sequence: TAG
atatttgtaagtgacatttc

SEQ ID NO: 31359 - DNA, 20 bp, Artificial Sequence
  Description of Artificial Sequence: Synthetic oligonucleotide
  Target: SCNA; (+) strand; PAM type: NRG; PAM sequence: AGG
tatttgtaagtgacatttct

SEQ ID NO: 31360 - DNA, 20 bp, Artificial Sequence
  Description of Artificial Sequence: Synthetic oligonucleotide
  Target: SCNA; (+) strand; PAM type: NRG; PAM sequence: TGG
tctaggcccctgtgatttac

SEQ ID NO: 31361 - DNA, 20 bp, Artificial Sequence
  Description of Artificial Sequence: Synthetic oligonucleotide
  Target: SCNA; (+) strand; PAM type: NRG; PAM sequence: TGG
ggcccctgtgatttactggc

SEQ ID NO: 31362 - DNA, 20 bp, Artificial Sequence
  Description of Artificial Sequence: Synthetic oligonucleotide
  Target: SCNA; (+) strand; PAM type: NRG; PAM sequence: GAG
cccctgtgatttactggctg

SEQ ID NO: 31363 - DNA, 20 bp, Artificial Sequence
  Description of Artificial Sequence: Synthetic oligonucleotide
  Target: SCNA; (+) strand; PAM type: NRG; PAM sequence: AGG
ccctgtgatttactggctgg

SEQ ID NO: 31364 - DNA, 20 bp, Artificial Sequence
  Description of Artificial Sequence: Synthetic oligonucleotide
  Target: SCNA; (+) strand; PAM type: NRG; PAM sequence: GAG
tgatttactggctggaggat

SEQ ID NO: 31365 - DNA, 20 bp, Artificial Sequence
  Description of Artificial Sequence: Synthetic oligonucleotide
  Target: SCNA; (+) strand; PAM type: NRG; PAM sequence: CAG
tttactggctggaggatgag

SEQ ID NO: 31366 - DNA, 20 bp, Artificial Sequence
  Description of Artificial Sequence: Synthetic oligonucleotide
  Target: SCNA; (+) strand; PAM type: NRG; PAM sequence: AGG
ttactggctggaggatgagc

SEQ ID NO: 31367 - DNA, 20 bp, Artificial Sequence
  Description of Artificial Sequence: Synthetic oligonucleotide
  Target: SCNA; (+) strand; PAM type: NRG; PAM sequence: GAG
tggctggaggatgagcaggt

SEQ ID NO: 31368 - DNA, 20 bp, Artificial Sequence
  Description of Artificial Sequence: Synthetic oligonucleotide
  Target: SCNA; (+) strand; PAM type: NRG; PAM sequence: GAG
gctggaggatgagcaggtga

SEQ ID NO: 31369 - DNA, 20 bp, Artificial Sequence
  Description of Artificial Sequence: Synthetic oligonucleotide
  Target: SCNA; (+) strand; PAM type: NRG; PAM sequence: AGG
ctggaggatgagcaggtgag

SEQ ID NO: 31370 - DNA, 20 bp, Artificial Sequence
  Description of Artificial Sequence: Synthetic oligonucleotide
  Target: SCNA; (+) strand; PAM type: NRG; PAM sequence: AAG
agaggtgtttgttttgaaaa

SEQ ID NO: 31371 - DNA, 20 bp, Artificial Sequence
  Description of Artificial Sequence: Synthetic oligonucleotide
  Target: SCNA; (+) strand; PAM type: NRG; PAM sequence: AAG
ttttgaaaaaagtgattttg

SEQ ID NO: 31372 - DNA, 20 bp, Artificial Sequence
  Description of Artificial Sequence: Synthetic oligonucleotide
  Target: SCNA; (+) strand; PAM type: NRG; PAM sequence: GAG
ttgaaaaaagtgattttgaa

SEQ ID NO: 31373 - DNA, 20 bp, Artificial Sequence
  Description of Artificial Sequence: Synthetic oligonucleotide
  Target: SCNA; (+) strand; PAM type: NRG; PAM sequence: GAG
gaaaaaagtgattttgaaga

SEQ ID NO: 31374 - DNA, 20 bp, Artificial Sequence
  Description of Artificial Sequence: Synthetic oligonucleotide
  Target: SCNA; (+) strand; PAM type: NRG; PAM sequence: AGG
aaaaaagtgattttgaagag

SEQ ID NO: 31375 - DNA, 20 bp, Artificial Sequence
  Description of Artificial Sequence: Synthetic oligonucleotide
  Target: SCNA; (+) strand; PAM type: NRG; PAM sequence: CAG
aagtgattttgaagagaggt

SEQ ID NO: 31376 - DNA, 20 bp, Artificial Sequence
  Description of Artificial Sequence: Synthetic oligonucleotide
  Target: SCNA; (+) strand; PAM type: NRG; PAM sequence: AAG
ttttgaagagaggtcagaaa

SEQ ID NO: 31377 - DNA, 20 bp, Artificial Sequence
  Description of Artificial Sequence: Synthetic oligonucleotide
  Target: SCNA; (+) strand; PAM type: NRG; PAM sequence: GAG
tttttacttcatgtgttcat

SEQ ID NO: 31378 - DNA, 20 bp, Artificial Sequence
  Description of Artificial Sequence: Synthetic oligonucleotide
  Target: SCNA; (+) strand; PAM type: NRG; PAM sequence: TGG
tacttcatgtgttcatgagt

SEQ ID NO: 31379 - DNA, 20 bp, Artificial Sequence
  Description of Artificial Sequence: Synthetic oligonucleotide
  Target: SCNA; (+) strand; PAM type: NRG; PAM sequence: GGG
acttcatgtgttcatgagtt

SEQ ID NO: 31380 - DNA, 20 bp, Artificial Sequence
  Description of Artificial Sequence: Synthetic oligonucleotide
  Target: SCNA; (+) strand; PAM type: NRG; PAM sequence: GGG
cttcatgtgttcatgagttg

SEQ ID NO: 31381 - DNA, 20 bp, Artificial Sequence
  Description of Artificial Sequence: Synthetic oligonucleotide
  Target: SCNA; (+) strand; PAM type: NRG; PAM sequence: GAG
tcatgtgttcatgagttggg

SEQ ID NO: 31382 - DNA, 20 bp, Artificial Sequence
  Description of Artificial Sequence: Synthetic oligonucleotide
  Target: SCNA; (+) strand; PAM type: NRG; PAM sequence: CAG
gtgttcatgagttggggagt

SEQ ID NO: 31383 - DNA, 20 bp, Artificial Sequence
  Description of Artificial Sequence: Synthetic oligonucleotide
  Target: SCNA; (+) strand; PAM type: NRG; PAM sequence: AGG
tgttcatgagttggggagtc

SEQ ID NO: 31384 - DNA, 20 bp, Artificial Sequence
  Description of Artificial Sequence: Synthetic oligonucleotide
  Target: SCNA; (+) strand; PAM type: NRG; PAM sequence: GGG
gttcatgagttggggagtca

SEQ ID NO: 31385 - DNA, 20 bp, Artificial Sequence
  Description of Artificial Sequence: Synthetic oligonucleotide
  Target: SCNA; (+) strand; PAM type: NRG; PAM sequence: CAG
tgagttggggagtcagggta

SEQ ID NO: 31386 - DNA, 20 bp, Artificial Sequence
  Description of Artificial Sequence: Synthetic oligonucleotide
  Target: SCNA; (+) strand; PAM type: NRG; PAM sequence: AAG
gttggggagtcagggtacag

SEQ ID NO: 31387 - DNA, 20 bp, Artificial Sequence
  Description of Artificial Sequence: Synthetic oligonucleotide
  Target: SCNA; (+) strand; PAM type: NRG; PAM sequence: AGG
ttggggagtcagggtacaga

SEQ ID NO: 31388 - DNA, 20 bp, Artificial Sequence
  Description of Artificial Sequence: Synthetic oligonucleotide
  Target: SCNA; (+) strand; PAM type: NRG; PAM sequence: AAG
ggagtcagggtacagaagga

SEQ ID NO: 31389 - DNA, 20 bp, Artificial Sequence
  Description of Artificial Sequence: Synthetic oligonucleotide
  Target: SCNA; (+) strand; PAM type: NRG; PAM sequence: AAG
tacagaaggaaagacacatg

SEQ ID NO: 31390 - DNA, 20 bp, Artificial Sequence
  Description of Artificial Sequence: Synthetic oligonucleotide
  Target: SCNA; (+) strand; PAM type: NRG; PAM sequence: CAG
gaaggaaagacacatgaagc

SEQ ID NO: 31391 - DNA, 20 bp, Artificial Sequence
  Description of Artificial Sequence: Synthetic oligonucleotide
  Target: SCNA; (+) strand; PAM type: NRG; PAM sequence: AGG
aaggaaagacacatgaagcc

SEQ ID NO: 31392 - DNA, 20 bp, Artificial Sequence
  Description of Artificial Sequence: Synthetic oligonucleotide
  Target: SCNA; (+) strand; PAM type: NRG; PAM sequence: GGG
aggaaagacacatgaagcca

SEQ ID NO: 31393 - DNA, 20 bp, Artificial Sequence
  Description of Artificial Sequence: Synthetic oligonucleotide
  Target: SCNA; (+) strand; PAM type: NRG; PAM sequence: CAG
catgaagccagggactgaca

SEQ ID NO: 31394 - DNA, 20 bp, Artificial Sequence
  Description of Artificial Sequence: Synthetic oligonucleotide
  Target: SCNA; (+) strand; PAM type: NRG; PAM sequence: GAG
tgaagccagggactgacaca

SEQ ID NO: 31395 - DNA, 20 bp, Artificial Sequence
  Description of Artificial Sequence: Synthetic oligonucleotide
  Target: SCNA; (+) strand; PAM type: NRG; PAM sequence: CAG
ccagggactgacacagagac

SEQ ID NO: 31396 - DNA, 20 bp, Artificial Sequence
  Description of Artificial Sequence: Synthetic oligonucleotide
  Target: SCNA; (+) strand; PAM type: NRG; PAM sequence: CAG
tgacacagagaccagacaca

SEQ ID NO: 31397 - DNA, 20 bp, Artificial Sequence
  Description of Artificial Sequence: Synthetic oligonucleotide
  Target: SCNA; (+) strand; PAM type: NRG; PAM sequence: TGG
cacagagaccagacacacag

SEQ ID NO: 31398 - DNA, 20 bp, Artificial Sequence
  Description of Artificial Sequence: Synthetic oligonucleotide
  Target: SCNA; (+) strand; PAM type: NRG; PAM sequence: GGG
acagagaccagacacacagt

SEQ ID NO: 31399 - DNA, 20 bp, Artificial Sequence
  Description of Artificial Sequence: Synthetic oligonucleotide
  Target: SCNA; (+) strand; PAM type: NRG; PAM sequence: TGG
gacacacagtgggtgcttca

SEQ ID NO: 31400 - DNA, 20 bp, Artificial Sequence
  Description of Artificial Sequence: Synthetic oligonucleotide
  Target: SCNA; (+) strand; PAM type: NRG; PAM sequence: TAG
cacagtgggtgcttcatgga

SEQ ID NO: 31401 - DNA, 20 bp, Artificial Sequence
  Description of Artificial Sequence: Synthetic oligonucleotide
  Target: SCNA; (+) strand; PAM type: NRG; PAM sequence: CAG
gttgaatgatttgtgaaaat

SEQ ID NO: 31402 - DNA, 20 bp, Artificial Sequence
  Description of Artificial Sequence: Synthetic oligonucleotide
  Target: SCNA; (+) strand; PAM type: NRG; PAM sequence: TAG
aatgatttgtgaaaatcaga

SEQ ID NO: 31403 - DNA, 20 bp, Artificial Sequence
  Description of Artificial Sequence: Synthetic oligonucleotide
  Target: SCNA; (+) strand; PAM type: NRG; PAM sequence: CAG
gatttgtgaaaatcagatag

SEQ ID NO: 31404 - DNA, 20 bp, Artificial Sequence
  Description of Artificial Sequence: Synthetic oligonucleotide
  Target: SCNA; (+) strand; PAM type: NRG; PAM sequence: TGG
ttgtgaaaatcagatagcag

SEQ ID NO: 31405 - DNA, 20 bp, Artificial Sequence
  Description of Artificial Sequence: Synthetic oligonucleotide
  Target: SCNA; (+) strand; PAM type: NRG; PAM sequence: GAG
gaaaatcagatagcagtggt

SEQ ID NO: 31406 - DNA, 20 bp, Artificial Sequence
  Description of Artificial Sequence: Synthetic oligonucleotide
  Target: SCNA; (+) strand; PAM type: NRG; PAM sequence: AGG
aaaatcagatagcagtggtg

SEQ ID NO: 31407 - DNA, 20 bp, Artificial Sequence
  Description of Artificial Sequence: Synthetic oligonucleotide
  Target: SCNA; (+) strand; PAM type: NRG; PAM sequence: GGG
aaatcagatagcagtggtga

SEQ ID NO: 31408 - DNA, 20 bp, Artificial Sequence
  Description of Artificial Sequence: Synthetic oligonucleotide
  Target: SCNA; (+) strand; PAM type: NRG; PAM sequence: AAG
agtggtgagggtttttatgc

SEQ ID NO: 31409 - DNA, 20 bp, Artificial Sequence
  Description of Artificial Sequence: Synthetic oligonucleotide
  Target: SCNA; (+) strand; PAM type: NRG; PAM sequence: AAG
gaaatacaaatgaacttctc

SEQ ID NO: 31410 - DNA, 20 bp, Artificial Sequence
  Description of Artificial Sequence: Synthetic oligonucleotide
  Target: SCNA; (+) strand; PAM type: NRG; PAM sequence: AGG
aaatacaaatgaacttctca

SEQ ID NO: 31411 - DNA, 20 bp, Artificial Sequence
  Description of Artificial Sequence: Synthetic oligonucleotide
  Target: SCNA; (+) strand; PAM type: NRG; PAM sequence: GAG
cttctcaaggtgccatatct

SEQ ID NO: 31412 - DNA, 20 bp, Artificial Sequence
  Description of Artificial Sequence: Synthetic oligonucleotide
  Target: SCNA; (+) strand; PAM type: NRG; PAM sequence: TGG
aaggtgccatatctgagttg

SEQ ID NO: 31413 - DNA, 20 bp, Artificial Sequence
  Description of Artificial Sequence: Synthetic oligonucleotide
  Target: SCNA; (+) strand; PAM type: NRG; PAM sequence: TGG
tctgagttgtggctttgatc

SEQ ID NO: 31414 - DNA, 20 bp, Artificial Sequence
  Description of Artificial Sequence: Synthetic oligonucleotide
  Target: SCNA; (+) strand; PAM type: NRG; PAM sequence: AAG
tgaattattttgttcctatg

SEQ ID NO: 31415 - DNA, 20 bp, Artificial Sequence
  Description of Artificial Sequence: Synthetic oligonucleotide
  Target: SCNA; (+) strand; PAM type: NRG; PAM sequence: CAG
tattttgttcctatgaagta

SEQ ID NO: 31416 - DNA, 20 bp, Artificial Sequence
  Description of Artificial Sequence: Synthetic oligonucleotide
  Target: SCNA; (+) strand; PAM type: NRG; PAM sequence: AGG
attttgttcctatgaagtac

SEQ ID NO: 31417 - DNA, 20 bp, Artificial Sequence
  Description of Artificial Sequence: Synthetic oligonucleotide
  Target: SCNA; (+) strand; PAM type: NRG; PAM sequence: TGG
ccaccatacacaaaatcccc

SEQ ID NO: 31418 - DNA, 20 bp, Artificial Sequence
  Description of Artificial Sequence: Synthetic oligonucleotide
  Target: SCNA; (+) strand; PAM type: NRG; PAM sequence: AAG
acacaaaatcccctggactt

SEQ ID NO: 31419 - DNA, 20 bp, Artificial Sequence
  Description of Artificial Sequence: Synthetic oligonucleotide
  Target: SCNA; (+) strand; PAM type: NRG; PAM sequence: AAG
ggacttaagaatatctccac

SEQ ID NO: 31420 - DNA, 20 bp, Artificial Sequence
  Description of Artificial Sequence: Synthetic oligonucleotide
  Target: SCNA; (+) strand; PAM type: NRG; PAM sequence: AAG
agaatatctccacaagttat

SEQ ID NO: 31421 - DNA, 20 bp, Artificial Sequence
  Description of Artificial Sequence: Synthetic oligonucleotide
  Target: SCNA; (+) strand; PAM type: NRG; PAM sequence: TAG
ttataagaattgaaactgct

SEQ ID NO: 31422 - DNA, 20 bp, Artificial Sequence
  Description of Artificial Sequence: Synthetic oligonucleotide
  Target: SCNA; (+) strand; PAM type: NRG; PAM sequence: AAG
taagaattgaaactgcttag

SEQ ID NO: 31423 - DNA, 20 bp, Artificial Sequence
  Description of Artificial Sequence: Synthetic oligonucleotide
  Target: SCNA; (+) strand; PAM type: NRG; PAM sequence: AGG
aagaattgaaactgcttaga

SEQ ID NO: 31424 - DNA, 20 bp, Artificial Sequence
  Description of Artificial Sequence: Synthetic oligonucleotide
  Target: SCNA; (+) strand; PAM type: NRG; PAM sequence: CAG
aaggaacaattgcttgtact

SEQ ID NO: 31425 - DNA, 20 bp, Artificial Sequence
  Description of Artificial Sequence: Synthetic oligonucleotide
  Target: SCNA; (+) strand; PAM type: NRG; PAM sequence: CAG
aacaattgcttgtactcagc

SEQ ID NO: 31426 - DNA, 20 bp, Artificial Sequence
  Description of Artificial Sequence: Synthetic oligonucleotide
  Target: SCNA; (+) strand; PAM type: NRG; PAM sequence: CAG
tgtactcagccagtcatcct

SEQ ID NO: 31427 - DNA, 20 bp, Artificial Sequence
  Description of Artificial Sequence: Synthetic oligonucleotide
  Target: SCNA; (+) strand; PAM type: NRG; PAM sequence: GAG
ccagtcatcctcagctgcat

SEQ ID NO: 31428 - DNA, 20 bp, Artificial Sequence
  Description of Artificial Sequence: Synthetic oligonucleotide
  Target: SCNA; (+) strand; PAM type: NRG; PAM sequence: CGG
cagctgcatgagtctcaaaa

SEQ ID NO: 31429 - DNA, 20 bp, Artificial Sequence
  Description of Artificial Sequence: Synthetic oligonucleotide
  Target: SCNA; (+) strand; PAM type: NRG; PAM sequence: GGG
agctgcatgagtctcaaaac

SEQ ID NO: 31430 - DNA, 20 bp, Artificial Sequence
  Description of Artificial Sequence: Synthetic oligonucleotide
  Target: SCNA; (+) strand; PAM type: NRG; PAM sequence: GGG
gctgcatgagtctcaaaacg

SEQ ID NO: 31431 - DNA, 20 bp, Artificial Sequence
  Description of Artificial Sequence: Synthetic oligonucleotide
  Target: SCNA; (+) strand; PAM type: NRG; PAM sequence: GGG
ctgcatgagtctcaaaacgg

SEQ ID NO: 31432 - DNA, 20 bp, Artificial Sequence
  Description of Artificial Sequence: Synthetic oligonucleotide
  Target: SCNA; (+) strand; PAM type: NRG; PAM sequence: TGG
catgagtctcaaaacggggg

SEQ ID NO: 31433 - DNA, 20 bp, Artificial Sequence
  Description of Artificial Sequence: Synthetic oligonucleotide
  Target: SCNA; (+) strand; PAM type: NRG; PAM sequence: GAG
tgagtctcaaaacgggggtg

SEQ ID NO: 31434 - DNA, 20 bp, Artificial Sequence
  Description of Artificial Sequence: Synthetic oligonucleotide
  Target: SCNA; (+) strand; PAM type: NRG; PAM sequence: GAG
agtctcaaaacgggggtgga

SEQ ID NO: 31435 - DNA, 20 bp, Artificial Sequence
  Description of Artificial Sequence: Synthetic oligonucleotide
  Target: SCNA; (+) strand; PAM type: NRG; PAM sequence: CAG
tggagagtgtctacctcctc

SEQ ID NO: 31436 - DNA, 20 bp, Artificial Sequence
  Description of Artificial Sequence: Synthetic oligonucleotide
  Target: SCNA; (+) strand; PAM type: NRG; PAM sequence: AAG
agtgtctacctcctccagaa

SEQ ID NO: 31437 - DNA, 20 bp, Artificial Sequence
  Description of Artificial Sequence: Synthetic oligonucleotide
  Target: SCNA; (+) strand; PAM type: NRG; PAM sequence: AGG
gtgtctacctcctccagaaa

SEQ ID NO: 31438 - DNA, 20 bp, Artificial Sequence
  Description of Artificial Sequence: Synthetic oligonucleotide
  Target: SCNA; (+) strand; PAM type: NRG; PAM sequence: TAG
cctcctccagaaaaggtttt

SEQ ID NO: 31439 - DNA, 20 bp, Artificial Sequence
  Description of Artificial Sequence: Synthetic oligonucleotide
  Target: SCNA; (+) strand; PAM type: NRG; PAM sequence: GAG
tcctccagaaaaggttttta

SEQ ID NO: 31440 - DNA, 20 bp, Artificial Sequence
  Description of Artificial Sequence: Synthetic oligonucleotide
  Target: SCNA; (+) strand; PAM type: NRG; PAM sequence: AAG
aggtttttagagcgaaatca

SEQ ID NO: 31441 - DNA, 20 bp, Artificial Sequence
  Description of Artificial Sequence: Synthetic oligonucleotide
  Target: SCNA; (+) strand; PAM type: NRG; PAM sequence: GAG
gtttttagagcgaaatcaaa

SEQ ID NO: 31442 - DNA, 20 bp, Artificial Sequence
  Description of Artificial Sequence: Synthetic oligonucleotide
  Target: SCNA; (+) strand; PAM type: NRG; PAM sequence: AAG
ccaccaaaattatttgtctt

SEQ ID NO: 31443 - DNA, 20 bp, Artificial Sequence
  Description of Artificial Sequence: Synthetic oligonucleotide
  Target: SCNA; (+) strand; PAM type: NRG; PAM sequence: TGG
caaaattatttgtcttaaga

SEQ ID NO: 31444 - DNA, 20 bp, Artificial Sequence
  Description of Artificial Sequence: Synthetic oligonucleotide
  Target: SCNA; (+) strand; PAM type: NRG; PAM sequence: GGG
aaaattatttgtcttaagat

SEQ ID NO: 31445 - DNA, 20 bp, Artificial Sequence
  Description of Artificial Sequence: Synthetic oligonucleotide
  Target: SCNA; (+) strand; PAM type: NRG; PAM sequence: GGG
aaattatttgtcttaagatg

SEQ ID NO: 31446 - DNA, 20 bp, Artificial Sequence
  Description of Artificial Sequence: Synthetic oligonucleotide
  Target: SCNA; (+) strand; PAM type: NRG; PAM sequence: AAG
atttgtcttaagatggggac

SEQ ID NO: 31447 - DNA, 20 bp, Artificial Sequence
  Description of Artificial Sequence: Synthetic oligonucleotide
  Target: SCNA; (+) strand; PAM type: NRG; PAM sequence: TGG
taagatggggacaagaaacc

SEQ ID NO: 31448 - DNA, 20 bp, Artificial Sequence
  Description of Artificial Sequence: Synthetic oligonucleotide
  Target: SCNA; (+) strand; PAM type: NRG; PAM sequence: CAG
gggacaagaaacctggcacc

SEQ ID NO: 31449 - DNA, 20 bp, Artificial Sequence
  Description of Artificial Sequence: Synthetic oligonucleotide
  Target: SCNA; (+) strand; PAM type: NRG; PAM sequence: AGG
ggacaagaaacctggcaccc

SEQ ID NO: 31450 - DNA, 20 bp, Artificial Sequence
  Description of Artificial Sequence: Synthetic oligonucleotide
  Target: SCNA; (+) strand; PAM type: NRG; PAM sequence: GAG
acaagaaacctggcacccag

SEQ ID NO: 31451 - DNA, 20 bp, Artificial Sequence
  Description of Artificial Sequence: Synthetic oligonucleotide
  Target: SCNA; (+) strand; PAM type: NRG; PAM sequence: AAG
gaaacctggcacccaggagt

SEQ ID NO: 31452 - DNA, 20 bp, Artificial Sequence
  Description of Artificial Sequence: Synthetic oligonucleotide
  Target: SCNA; (+) strand; PAM type: NRG; PAM sequence: AGG
aaacctggcacccaggagta

SEQ ID NO: 31453 - DNA, 20 bp, Artificial Sequence
  Description of Artificial Sequence: Synthetic oligonucleotide
  Target: SCNA; (+) strand; PAM type: NRG; PAM sequence: CAG
ggcacccaggagtaaggaca

SEQ ID NO: 31454 - DNA, 20 bp, Artificial Sequence
  Description of Artificial Sequence: Synthetic oligonucleotide
  Target: SCNA; (+) strand; PAM type: NRG; PAM sequence: AAG
cagacgtgctctctcatttt

SEQ ID NO: 31455 - DNA, 20 bp, Artificial Sequence
  Description of Artificial Sequence: Synthetic oligonucleotide
  Target: SCNA; (+) strand; PAM type: NRG; PAM sequence: AAG
tgctctctcattttaagctg

SEQ ID NO: 31456 - DNA, 20 bp, Artificial Sequence
  Description of Artificial Sequence: Synthetic oligonucleotide
  Target: SCNA; (+) strand; PAM type: NRG; PAM sequence: CAG
ttgtcctaaaaacatatgcc

SEQ ID NO: 31457 - DNA, 20 bp, Artificial Sequence
  Description of Artificial Sequence: Synthetic oligonucleotide
  Target: SCNA; (+) strand; PAM type: NRG; PAM sequence: TAG
aaaaacatatgcccagactc

SEQ ID NO: 31458 - DNA, 20 bp, Artificial Sequence
  Description of Artificial Sequence: Synthetic oligonucleotide
  Target: SCNA; (+) strand; PAM type: NRG; PAM sequence: AAG
catatgcccagactctagaa

SEQ ID NO: 31459 - DNA, 20 bp, Artificial Sequence
  Description of Artificial Sequence: Synthetic oligonucleotide
  Target: SCNA; (+) strand; PAM type: NRG; PAM sequence: TAG
agactctagaaaagctctct

SEQ ID NO: 31460 - DNA, 20 bp, Artificial Sequence
  Description of Artificial Sequence: Synthetic oligonucleotide
  Target: SCNA; (+) strand; PAM type: NRG; PAM sequence: CAG
tctagaaaagctctcttaga

SEQ ID NO: 31461 - DNA, 20 bp, Artificial Sequence
  Description of Artificial Sequence: Synthetic oligonucleotide
  Target: SCNA; (+) strand; PAM type: NRG; PAM sequence: AAG
tttctccatttctgtcactt

SEQ ID NO: 31462 - DNA, 20 bp, Artificial Sequence
  Description of Artificial Sequence: Synthetic oligonucleotide
  Target: SCNA; (+) strand; PAM type: NRG; PAM sequence: GAG
tctccatttctgtcacttaa

SEQ ID NO: 31463 - DNA, 20 bp, Artificial Sequence
  Description of Artificial Sequence: Synthetic oligonucleotide
  Target: SCNA; (+) strand; PAM type: NRG; PAM sequence: AGG
ctccatttctgtcacttaag

SEQ ID NO: 31464 - DNA, 20 bp, Artificial Sequence
  Description of Artificial Sequence: Synthetic oligonucleotide
  Target: SCNA; (+) strand; PAM type: NRG; PAM sequence: TAG
tctgtcacttaagaggattt

SEQ ID NO: 31465 - DNA, 20 bp, Artificial Sequence
  Description of Artificial Sequence: Synthetic oligonucleotide
  Target: SCNA; (+) strand; PAM type: NRG; PAM sequence: AGG
ctgtcacttaagaggatttt

SEQ ID NO: 31466 - DNA, 20 bp, Artificial Sequence
  Description of Artificial Sequence: Synthetic oligonucleotide
  Target: SCNA; (+) strand; PAM type: NRG; PAM sequence: GGG
tgtcacttaagaggatttta

SEQ ID NO: 31467 - DNA, 20 bp, Artificial Sequence
  Description of Artificial Sequence: Synthetic oligonucleotide
  Target: SCNA; (+) strand; PAM type: NRG; PAM sequence: GAG
ttttagggacatataacttt

SEQ ID NO: 31468 - DNA, 20 bp, Artificial Sequence
  Description of Artificial Sequence: Synthetic oligonucleotide
  Target: SCNA; (+) strand; PAM type: NRG; PAM sequence: CAG
actttgagaattccattctg

SEQ ID NO: 31469 - DNA, 20 bp, Artificial Sequence
  Description of Artificial Sequence: Synthetic oligonucleotide
  Target: SCNA; (+) strand; PAM type: NRG; PAM sequence: CAG
gaattccattctgcagcttt

SEQ ID NO: 31470 - DNA, 20 bp, Artificial Sequence
  Description of Artificial Sequence: Synthetic oligonucleotide
  Target: SCNA; (+) strand; PAM type: NRG; PAM sequence: GAG
attccattctgcagctttca

SEQ ID NO: 31471 - DNA, 20 bp, Artificial Sequence
  Description of Artificial Sequence: Synthetic oligonucleotide
  Target: SCNA; (+) strand; PAM type: NRG; PAM sequence: AGG
ttccattctgcagctttcag

SEQ ID NO: 31472 - DNA, 20 bp, Artificial Sequence
  Description of Artificial Sequence: Synthetic oligonucleotide
  Target: SCNA; (+) strand; PAM type: NRG; PAM sequence: TAG
gtaatacaatccaatactca

SEQ ID NO: 31473 - DNA, 20 bp, Artificial Sequence
  Description of Artificial Sequence: Synthetic oligonucleotide
  Target: SCNA; (+) strand; PAM type: NRG; PAM sequence: TGG
atacaatccaatactcatag

SEQ ID NO: 31474 - DNA, 20 bp, Artificial Sequence
  Description of Artificial Sequence: Synthetic oligonucleotide
  Target: SCNA; (+) strand; PAM type: NRG; PAM sequence: GGG
tacaatccaatactcatagt

SEQ ID NO: 31475 - DNA, 20 bp, Artificial Sequence
  Description of Artificial Sequence: Synthetic oligonucleotide
  Target: SCNA; (+) strand; PAM type: NRG; PAM sequence: TGG
caatactcatagtgggctta

SEQ ID NO: 31476 - DNA, 20 bp, Artificial Sequence
  Description of Artificial Sequence: Synthetic oligonucleotide
  Target: SCNA; (+) strand; PAM type: NRG; PAM sequence: CGG
tagtgggcttatggtgtacc

SEQ ID NO: 31477 - DNA, 20 bp, Artificial Sequence
  Description of Artificial Sequence: Synthetic oligonucleotide
  Target: SCNA; (+) strand; PAM type: NRG; PAM sequence: TAG
tccaaacattctacttgtta

SEQ ID NO: 31478 - DNA, 20 bp, Artificial Sequence
  Description of Artificial Sequence: Synthetic oligonucleotide
  Target: SCNA; (+) strand; PAM type: NRG; PAM sequence: GAG
ttgttatagcttctttaatt

SEQ ID NO: 31479 - DNA, 20 bp, Artificial Sequence
  Description of Artificial Sequence: Synthetic oligonucleotide
  Target: SCNA; (+) strand; PAM type: NRG; PAM sequence: AGG
tgttatagcttctttaattg

SEQ ID NO: 31480 - DNA, 20 bp, Artificial Sequence
  Description of Artificial Sequence: Synthetic oligonucleotide
  Target: SCNA; (+) strand; PAM type: NRG; PAM sequence: TGG
tattcttatcattctccatt

SEQ ID NO: 31481 - DNA, 20 bp, Artificial Sequence
  Description of Artificial Sequence: Synthetic oligonucleotide
  Target: SCNA; (+) strand; PAM type: NRG; PAM sequence: GGG
attcttatcattctccattt

SEQ ID NO: 31482 - DNA, 20 bp, Artificial Sequence
  Description of Artificial Sequence: Synthetic oligonucleotide
  Target: SCNA; (+) strand; PAM type: NRG; PAM sequence: GAG
tcttatcattctccatttgg

SEQ ID NO: 31483 - DNA, 20 bp, Artificial Sequence
  Description of Artificial Sequence: Synthetic oligonucleotide
  Target: SCNA; (+) strand; PAM type: NRG; PAM sequence: GAG
attctccatttgggagattt

SEQ ID NO: 31484 - DNA, 20 bp, Artificial Sequence
  Description of Artificial Sequence: Synthetic oligonucleotide
  Target: SCNA; (+) strand; PAM type: NRG; PAM sequence: GAG
tctccatttgggagatttga

SEQ ID NO: 31485 - DNA, 20 bp, Artificial Sequence
  Description of Artificial Sequence: Synthetic oligonucleotide
  Target: SCNA; (+) strand; PAM type: NRG; PAM sequence: GAG
tccatttgggagatttgaga

SEQ ID NO: 31486 - DNA, 20 bp, Artificial Sequence
  Description of Artificial Sequence: Synthetic oligonucleotide
  Target: SCNA; (+) strand; PAM type: NRG; PAM sequence: GAG
catttgggagatttgagaga

SEQ ID NO: 31487 - DNA, 20 bp, Artificial Sequence
  Description of Artificial Sequence: Synthetic oligonucleotide
  Target: SCNA; (+) strand; PAM type: NRG; PAM sequence: AGG
atttgggagatttgagagag

SEQ ID NO: 31488 - DNA, 20 bp, Artificial Sequence
  Description of Artificial Sequence: Synthetic oligonucleotide
  Target: SCNA; (+) strand; PAM type: NRG; PAM sequence: AAG
ggagatttgagagagaggca

SEQ ID NO: 31489 - DNA, 20 bp, Artificial Sequence
  Description of Artificial Sequence: Synthetic oligonucleotide
  Target: SCNA; (+) strand; PAM type: NRG; PAM sequence: AAG
agaggcaaagtatgtgcctt

SEQ ID NO: 31490 - DNA, 20 bp, Artificial Sequence
  Description of Artificial Sequence: Synthetic oligonucleotide
  Target: SCNA; (+) strand; PAM type: NRG; PAM sequence: CAG
gtatgtgccttaagatgaca

SEQ ID NO: 31491 - DNA, 20 bp, Artificial Sequence
  Description of Artificial Sequence: Synthetic oligonucleotide
  Target: SCNA; (+) strand; PAM type: NRG; PAM sequence: TGG
gtgccttaagatgacacagt

SEQ ID NO: 31492 - DNA, 20 bp, Artificial Sequence
  Description of Artificial Sequence: Synthetic oligonucleotide
  Target: SCNA; (+) strand; PAM type: NRG; PAM sequence: AAG
cttaagatgacacagttggt

SEQ ID NO: 31493 - DNA, 20 bp, Artificial Sequence
  Description of Artificial Sequence: Synthetic oligonucleotide
  Target: SCNA; (+) strand; PAM type: NRG; PAM sequence: TAG
aagatgacacagttggtaag

SEQ ID NO: 31494 - DNA, 20 bp, Artificial Sequence
  Description of Artificial Sequence: Synthetic oligonucleotide
  Target: SCNA; (+) strand; PAM type: NRG; PAM sequence: AGG
agatgacacagttggtaagt

SEQ ID NO: 31495 - DNA, 20 bp, Artificial Sequence
  Description of Artificial Sequence: Synthetic oligonucleotide
  Target: SCNA; (+) strand; PAM type: NRG; PAM sequence: AAG
gacacagttggtaagtagga

SEQ ID NO: 31496 - DNA, 20 bp, Artificial Sequence
  Description of Artificial Sequence: Synthetic oligonucleotide
  Target: SCNA; (+) strand; PAM type: NRG; PAM sequence: CAG
acagttggtaagtaggaaag

SEQ ID NO: 31497 - DNA, 20 bp, Artificial Sequence
  Description of Artificial Sequence: Synthetic oligonucleotide
  Target: SCNA; (+) strand; PAM type: NRG; PAM sequence: CAG
ggaaagcagaactttaacat

SEQ ID NO: 31498 - DNA, 20 bp, Artificial Sequence
  Description of Artificial Sequence: Synthetic oligonucleotide
  Target: SCNA; (+) strand; PAM type: NRG; PAM sequence: CAG
aagcagaactttaacatcag

SEQ ID NO: 31499 - DNA, 20 bp, Artificial Sequence
  Description of Artificial Sequence: Synthetic oligonucleotide
  Target: SCNA; (+) strand; PAM type: NRG; PAM sequence: GAG
aacatcagcagtaaaaccct

SEQ ID NO: 31500 - DNA, 20 bp, Artificial Sequence
  Description of Artificial Sequence: Synthetic oligonucleotide
  Target: SCNA; (+) strand; PAM type: NRG; PAM sequence: AAG
tgtttaataaatgccccact

SEQ ID NO: 31501 - DNA, 20 bp, Artificial Sequence
  Description of Artificial Sequence: Synthetic oligonucleotide
  Target: SCNA; (+) strand; PAM type: NRG; PAM sequence: CAG
taaatgccccactaagaaac

SEQ ID NO: 31502 - DNA, 20 bp, Artificial Sequence
  Description of Artificial Sequence: Synthetic oligonucleotide
  Target: SCNA; (+) strand; PAM type: NRG; PAM sequence: GAG
aatgccccactaagaaacca

SEQ ID NO: 31503 - DNA, 20 bp, Artificial Sequence
  Description of Artificial Sequence: Synthetic oligonucleotide
  Target: SCNA; (+) strand; PAM type: NRG; PAM sequence: AAG
aagaaaccagagcaaattaa

SEQ ID NO: 31504 - DNA, 20 bp, Artificial Sequence
  Description of Artificial Sequence: Synthetic oligonucleotide
  Target: SCNA; (+) strand; PAM type: NRG; PAM sequence: CAG
tgtgttctattaatttgata

SEQ ID NO: 31505 - DNA, 20 bp, Artificial Sequence
  Description of Artificial Sequence: Synthetic oligonucleotide
  Target: SCNA; (+) strand; PAM type: NRG; PAM sequence: AGG
gtgttctattaatttgatac

SEQ ID NO: 31506 - DNA, 20 bp, Artificial Sequence
  Description of Artificial Sequence: Synthetic oligonucleotide
  Target: SCNA; (+) strand; PAM type: NRG; PAM sequence: CAG
ttctattaatttgatacagg

SEQ ID NO: 31507 - DNA, 20 bp, Artificial Sequence
  Description of Artificial Sequence: Synthetic oligonucleotide
  Target: SCNA; (+) strand; PAM type: NRG; PAM sequence: AAG
tattaatttgatacaggcag

SEQ ID NO: 31508 - DNA, 20 bp, Artificial Sequence
  Description of Artificial Sequence: Synthetic oligonucleotide
  Target: SCNA; (+) strand; PAM type: NRG; PAM sequence: CAG
aggcagaagaaatctaaaaa

SEQ ID NO: 31509 - DNA, 20 bp, Artificial Sequence
  Description of Artificial Sequence: Synthetic oligonucleotide
  Target: SCNA; (+) strand; PAM type: NRG; PAM sequence: AAG
gaagaaatctaaaaacagca

SEQ ID NO: 31510 - DNA, 20 bp, Artificial Sequence
  Description of Artificial Sequence: Synthetic oligonucleotide
  Target: SCNA; (+) strand; PAM type: NRG; PAM sequence: AAG
aacagcaaagaatgatattt

SEQ ID NO: 31511 - DNA, 20 bp, Artificial Sequence
  Description of Artificial Sequence: Synthetic oligonucleotide
  Target: SCNA; (+) strand; PAM type: NRG; PAM sequence: AAG
agcaaagaatgatatttaag

SEQ ID NO: 31512 - DNA, 20 bp, Artificial Sequence
  Description of Artificial Sequence: Synthetic oligonucleotide
  Target: SCNA; (+) strand; PAM type: NRG; PAM sequence: AAG
tttaagaagaactctatttt

SEQ ID NO: 31513 - DNA, 20 bp, Artificial Sequence
  Description of Artificial Sequence: Synthetic oligonucleotide
  Target: SCNA; (+) strand; PAM type: NRG; PAM sequence: TAG
aagaagaactctattttaag

SEQ ID NO: 31514 - DNA, 20 bp, Artificial Sequence
  Description of Artificial Sequence: Synthetic oligonucleotide
  Target: SCNA; (+) strand; PAM type: NRG; PAM sequence: TAG
aactctattttaagtagtta

SEQ ID NO: 31515 - DNA, 20 bp, Artificial Sequence
  Description of Artificial Sequence: Synthetic oligonucleotide
  Target: SCNA; (+) strand; PAM type: NRG; PAM sequence: AGG
actctattttaagtagttat

SEQ ID NO: 31516 - DNA, 20 bp, Artificial Sequence
  Description of Artificial Sequence: Synthetic oligonucleotide
  Target: SCNA; (+) strand; PAM type: NRG; PAM sequence: GAG
ataggacatatgcttaaact

SEQ ID NO: 31517 - DNA, 20 bp, Artificial Sequence
  Description of Artificial Sequence: Synthetic oligonucleotide
  Target: SCNA; (+) strand; PAM type: NRG; PAM sequence: CAG
actttttatgaacttttcat

SEQ ID NO: 31518 - DNA, 20 bp, Artificial Sequence
  Description of Artificial Sequence: Synthetic oligonucleotide
  Target: SCNA; (+) strand; PAM type: NRG; PAM sequence: GAG
tttttatgaacttttcatca

SEQ ID NO: 31519 - DNA, 20 bp, Artificial Sequence
  Description of Artificial Sequence: Synthetic oligonucleotide
  Target: SCNA; (+) strand; PAM type: NRG; PAM sequence: TGG
tgtgtctgtgactgaataaa

SEQ ID NO: 31520 - DNA, 20 bp, Artificial Sequence
  Description of Artificial Sequence: Synthetic oligonucleotide
  Target: SCNA; (+) strand; PAM type: NRG; PAM sequence: TGG
aataaatggcctctgttcac

SEQ ID NO: 31521 - DNA, 20 bp, Artificial Sequence
  Description of Artificial Sequence: Synthetic oligonucleotide
  Target: SCNA; (+) strand; PAM type: NRG; PAM sequence: CAG
gcttcacatgcttcctctct

SEQ ID NO: 31522 - DNA, 20 bp, Artificial Sequence
  Description of Artificial Sequence: Synthetic oligonucleotide
  Target: SCNA; (+) strand; PAM type: NRG; PAM sequence: TAG
catgcttcctctctcagttg

SEQ ID NO: 31523 - DNA, 20 bp, Artificial Sequence
  Description of Artificial Sequence: Synthetic oligonucleotide
  Target: SCNA; (+) strand; PAM type: NRG; PAM sequence: AGG
atgcttcctctctcagttgt

SEQ ID NO: 31524 - DNA, 20 bp, Artificial Sequence
  Description of Artificial Sequence: Synthetic oligonucleotide
  Target: SCNA; (+) strand; PAM type: NRG; PAM sequence: CAG
taggtgtgtttatttctatt

SEQ ID NO: 31525 - DNA, 20 bp, Artificial Sequence
  Description of Artificial Sequence: Synthetic oligonucleotide
  Target: SCNA; (+) strand; PAM type: NRG; PAM sequence: AAG
ttatttctattcagacacca

SEQ ID NO: 31526 - DNA, 20 bp, Artificial Sequence
  Description of Artificial Sequence: Synthetic oligonucleotide
  Target: SCNA; (+) strand; PAM type: NRG; PAM sequence: AGG
tatttctattcagacaccaa

SEQ ID NO: 31527 - DNA, 20 bp, Artificial Sequence
  Description of Artificial Sequence: Synthetic oligonucleotide
  Target: SCNA; (+) strand; PAM type: NRG; PAM sequence: TGG
attcagacaccaaaggccta

SEQ ID NO: 31528 - DNA, 20 bp, Artificial Sequence
  Description of Artificial Sequence: Synthetic oligonucleotide
  Target: SCNA; (+) strand; PAM type: NRG; PAM sequence: GGG
ttcagacaccaaaggcctat

SEQ ID NO: 31529 - DNA, 20 bp, Artificial Sequence
  Description of Artificial Sequence: Synthetic oligonucleotide
  Target: SCNA; (+) strand; PAM type: NRG; PAM sequence: CAG
tatgggtatctgcaaattaa

SEQ ID NO: 31530 - DNA, 20 bp, Artificial Sequence
  Description of Artificial Sequence: Synthetic oligonucleotide
  Target: SCNA; (+) strand; PAM type: NRG; PAM sequence: AAG
tattatgttccatcattgtg

SEQ ID NO: 31531 - DNA, 20 bp, Artificial Sequence
  Description of Artificial Sequence: Synthetic oligonucleotide
  Target: SCNA; (+) strand; PAM type: NRG; PAM sequence: CAG
tatgttccatcattgtgaag

SEQ ID NO: 31532 - DNA, 20 bp, Artificial Sequence
  Description of Artificial Sequence: Synthetic oligonucleotide
  Target: SCNA; (+) strand; PAM type: NRG; PAM sequence: CAG
tccatcattgtgaagcagca

SEQ ID NO: 31533 - DNA, 20 bp, Artificial Sequence
  Description of Artificial Sequence: Synthetic oligonucleotide
  Target: SCNA; (+) strand; PAM type: NRG; PAM sequence: AGG
ccatcattgtgaagcagcac

SEQ ID NO: 31534 - DNA, 20 bp, Artificial Sequence
  Description of Artificial Sequence: Synthetic oligonucleotide
  Target: SCNA; (+) strand; PAM type: NRG; PAM sequence: AAG
gcccttactatataatatga

SEQ ID NO: 31535 - DNA, 20 bp, Artificial Sequence
  Description of Artificial Sequence: Synthetic oligonucleotide
  Target: SCNA; (+) strand; PAM type: NRG; PAM sequence: GAG
catgccgtgttcattaaact

SEQ ID NO: 31536 - DNA, 20 bp, Artificial Sequence
  Description of Artificial Sequence: Synthetic oligonucleotide
  Target: SCNA; (+) strand; PAM type: NRG; PAM sequence: AAG
aaaaccacattttgaaaata

SEQ ID NO: 31537 - DNA, 20 bp, Artificial Sequence
  Description of Artificial Sequence: Synthetic oligonucleotide
  Target: SCNA; (+) strand; PAM type: NRG; PAM sequence: TAG
cacattttgaaaataaagtt

SEQ ID NO: 31538 - DNA, 20 bp, Artificial Sequence
  Description of Artificial Sequence: Synthetic oligonucleotide
  Target: SCNA; (+) strand; PAM type: NRG; PAM sequence: AAG
ttttgaaaataaagtttagt

SEQ ID NO: 31539 - DNA, 20 bp, Artificial Sequence
  Description of Artificial Sequence: Synthetic oligonucleotide
  Target: SCNA; (+) strand; PAM type: NRG; PAM sequence: TGG
tgaaaataaagtttagtaag

SEQ ID NO: 31540 - DNA, 20 bp, Artificial Sequence
  Description of Artificial Sequence: Synthetic oligonucleotide
  Target: SCNA; (+) strand; PAM type: NRG; PAM sequence: TAG
aagtttagtaagtggatact

SEQ ID NO: 31541 - DNA, 20 bp, Artificial Sequence
  Description of Artificial Sequence: Synthetic oligonucleotide
  Target: SCNA; (+) strand; PAM type: NRG; PAM sequence: TGG
gtggatacttagtatcacat

SEQ ID NO: 31542 - DNA, 20 bp, Artificial Sequence
  Description of Artificial Sequence: Synthetic oligonucleotide
  Target: SCNA; (+) strand; PAM type: NRG; PAM sequence: AAG
agtatcacattggcgatact

SEQ ID NO: 31543 - DNA, 20 bp, Artificial Sequence
  Description of Artificial Sequence: Synthetic oligonucleotide
  Target: SCNA; (+) strand; PAM type: NRG; PAM sequence: TGG
tatgacttgcttttaatatt

SEQ ID NO: 31544 - DNA, 20 bp, Artificial Sequence
  Description of Artificial Sequence: Synthetic oligonucleotide
  Target: SCNA; (+) strand; PAM type: NRG; PAM sequence: TGG
atttggattgcaaataaatt

SEQ ID NO: 31545 - DNA, 20 bp, Artificial Sequence
  Description of Artificial Sequence: Synthetic oligonucleotide
  Target: SCNA; (+) strand; PAM type: NRG; PAM sequence: AAG
tggattgcaaataaatttgg

SEQ ID NO: 31546 - DNA, 20 bp, Artificial Sequence
  Description of Artificial Sequence: Synthetic oligonucleotide
  Target: SCNA; (+) strand; PAM type: NRG; PAM sequence: TGG
taaatttggaagctaatgta

SEQ ID NO: 31547 - DNA, 20 bp, Artificial Sequence
  Description of Artificial Sequence: Synthetic oligonucleotide
  Target: SCNA; (+) strand; PAM type: NRG; PAM sequence: GAG
aatttggaagctaatgtatg

SEQ ID NO: 31548 - DNA, 20 bp, Artificial Sequence
  Description of Artificial Sequence: Synthetic oligonucleotide
  Target: SCNA; (+) strand; PAM type: NRG; PAM sequence: TAG
taatgtatggagtacaataa

SEQ ID NO: 31549 - DNA, 20 bp, Artificial Sequence
  Description of Artificial Sequence: Synthetic oligonucleotide
  Target: SCNA; (+) strand; PAM type: NRG; PAM sequence: AAG
tggagtacaataatagcgaa

SEQ ID NO: 31550 - DNA, 20 bp, Artificial Sequence
  Description of Artificial Sequence: Synthetic oligonucleotide
  Target: SCNA; (+) strand; PAM type: NRG; PAM sequence: TGG
tacaataatagcgaaaagca

SEQ ID NO: 31551 - DNA, 20 bp, Artificial Sequence
  Description of Artificial Sequence: Synthetic oligonucleotide
  Target: SCNA; (+) strand; PAM type: NRG; PAM sequence: GGG
acaataatagcgaaaagcat

SEQ ID NO: 31552 - DNA, 20 bp, Artificial Sequence
  Description of Artificial Sequence: Synthetic oligonucleotide
  Target: SCNA; (+) strand; PAM type: NRG; PAM sequence: TAG
aaaagcatgggctttgatat

SEQ ID NO: 31553 - DNA, 20 bp, Artificial Sequence
  Description of Artificial Sequence: Synthetic oligonucleotide
  Target: SCNA; (+) strand; PAM type: NRG; PAM sequence: TGG
atgggctttgatattagaca

SEQ ID NO: 31554 - DNA, 20 bp, Artificial Sequence
  Description of Artificial Sequence: Synthetic oligonucleotide
  Target: SCNA; (+) strand; PAM type: NRG; PAM sequence: TGG
gcatccgaatatcttattat

SEQ ID NO: 31555 - DNA, 20 bp, Artificial Sequence
  Description of Artificial Sequence: Synthetic oligonucleotide
  Target: SCNA; (+) strand; PAM type: NRG; PAM sequence: AAG
tattattggatattcgattc

SEQ ID NO: 31556 - DNA, 20 bp, Artificial Sequence
  Description of Artificial Sequence: Synthetic oligonucleotide
  Target: SCNA; (+) strand; PAM type: NRG; PAM sequence: CAG
tattcgattcaagaacatat

SEQ ID NO: 31557 - DNA, 20 bp, Artificial Sequence
  Description of Artificial Sequence: Synthetic oligonucleotide
  Target: SCNA; (+) strand; PAM type: NRG; PAM sequence: TAG
gattcaagaacatatcagaa

SEQ ID NO: 31558 - DNA, 20 bp, Artificial Sequence
  Description of Artificial Sequence: Synthetic oligonucleotide
  Target: SCNA; (+) strand; PAM type: NRG; PAM sequence: CAG
taattatgttgtatttgatt

SEQ ID NO: 31559 - DNA, 20 bp, Artificial Sequence
  Description of Artificial Sequence: Synthetic oligonucleotide
  Target: SCNA; (+) strand; PAM type: NRG; PAM sequence: TGG
ttatgttgtatttgattcag

SEQ ID NO: 31560 - DNA, 20 bp, Artificial Sequence
  Description of Artificial Sequence: Synthetic oligonucleotide
  Target: SCNA; (+) strand; PAM type: NRG; PAM sequence: GAG
ttgtatttgattcagtggct

SEQ ID NO: 31561 - DNA, 20 bp, Artificial Sequence
  Description of Artificial Sequence: Synthetic oligonucleotide
  Target: SCNA; (+) strand; PAM type: NRG; PAM sequence: AAG
tgattcagtggctgagattg

SEQ ID NO: 31562 - DNA, 20 bp, Artificial Sequence
  Description of Artificial Sequence: Synthetic oligonucleotide
  Target: SCNA; (+) strand; PAM type: NRG; PAM sequence: AGG
gattcagtggctgagattga

SEQ ID NO: 31563 - DNA, 20 bp, Artificial Sequence
  Description of Artificial Sequence: Synthetic oligonucleotide
  Target: SCNA; (+) strand; PAM type: NRG; PAM sequence: GGG
attcagtggctgagattgaa

SEQ ID NO: 31564 - DNA, 20 bp, Artificial Sequence
  Description of Artificial Sequence: Synthetic oligonucleotide
  Target: SCNA; (+) strand; PAM type: NRG; PAM sequence: CAG
attgaagggcaactaaccaa

SEQ ID NO: 31565 - DNA, 20 bp, Artificial Sequence
  Description of Artificial Sequence: Synthetic oligonucleotide
  Target: SCNA; (+) strand; PAM type: NRG; PAM sequence: GAG
tgaagggcaactaaccaaca

SEQ ID NO: 31566 - DNA, 20 bp, Artificial Sequence
  Description of Artificial Sequence: Synthetic oligonucleotide
  Target: SCNA; (+) strand; PAM type: NRG; PAM sequence: AGG
gaagggcaactaaccaacag

SEQ ID NO: 31567 - DNA, 20 bp, Artificial Sequence
  Description of Artificial Sequence: Synthetic oligonucleotide
  Target: SCNA; (+) strand; PAM type: NRG; PAM sequence: GAG
agggcaactaaccaacagag

SEQ ID NO: 31568 - DNA, 20 bp, Artificial Sequence
  Description of Artificial Sequence: Synthetic oligonucleotide
  Target: SCNA; (+) strand; PAM type: NRG; PAM sequence: AAG
gcaactaaccaacagaggag

SEQ ID NO: 31569 - DNA, 20 bp, Artificial Sequence
  Description of Artificial Sequence: Synthetic oligonucleotide
  Target: SCNA; (+) strand; PAM type: NRG; PAM sequence: AAG
agatattattgattgttcta

SEQ ID NO: 31570 - DNA, 20 bp, Artificial Sequence
  Description of Artificial Sequence: Synthetic oligonucleotide
  Target: SCNA; (+) strand; PAM type: NRG; PAM sequence: AAG
ttctaaagatttatcctcca

SEQ ID NO: 31571 - DNA, 20 bp, Artificial Sequence
  Description of Artificial Sequence: Synthetic oligonucleotide
  Target: SCNA; (+) strand; PAM type: NRG; PAM sequence: CAG
catattcttattcaactcct

SEQ ID NO: 31572 - DNA, 20 bp, Artificial Sequence
  Description of Artificial Sequence: Synthetic oligonucleotide
  Target: SCNA; (+) strand; PAM type: NRG; PAM sequence: GAG
ttctatgtgaccaacattct

SEQ ID NO: 31573 - DNA, 20 bp, Artificial Sequence
  Description of Artificial Sequence: Synthetic oligonucleotide
  Target: SCNA; (+) strand; PAM type: NRG; PAM sequence: GAG
ctatgtgaccaacattctga

SEQ ID NO: 31574 - DNA, 20 bp, Artificial Sequence
  Description of Artificial Sequence: Synthetic oligonucleotide
  Target: SCNA; (+) strand; PAM type: NRG; PAM sequence: AGG
tatgtgaccaacattctgag

SEQ ID NO: 31575 - DNA, 20 bp, Artificial Sequence
  Description of Artificial Sequence: Synthetic oligonucleotide
  Target: SCNA; (+) strand; PAM type: NRG; PAM sequence: TGG
accaacattctgagaggtgc

SEQ ID NO: 31576 - DNA, 20 bp, Artificial Sequence
  Description of Artificial Sequence: Synthetic oligonucleotide
  Target: SCNA; (+) strand; PAM type: NRG; PAM sequence: GAG
caacattctgagaggtgctg

SEQ ID NO: 31577 - DNA, 20 bp, Artificial Sequence
  Description of Artificial Sequence: Synthetic oligonucleotide
  Target: SCNA; (+) strand; PAM type: NRG; PAM sequence: CAG
tctgagaggtgctggagatg

SEQ ID NO: 31578 - DNA, 20 bp, Artificial Sequence
  Description of Artificial Sequence: Synthetic oligonucleotide
  Target: SCNA; (+) strand; PAM type: NRG; PAM sequence: AGG
ctgagaggtgctggagatgc

SEQ ID NO: 31579 - DNA, 20 bp, Artificial Sequence
  Description of Artificial Sequence: Synthetic oligonucleotide
  Target: SCNA; (+) strand; PAM type: NRG; PAM sequence: GGG
tgagaggtgctggagatgca

SEQ ID NO: 31580 - DNA, 20 bp, Artificial Sequence
  Description of Artificial Sequence: Synthetic oligonucleotide
  Target: SCNA; (+) strand; PAM type: NRG; PAM sequence: AAG
gaggtgctggagatgcaggg

SEQ ID NO: 31581 - DNA, 20 bp, Artificial Sequence
  Description of Artificial Sequence: Synthetic oligonucleotide
  Target: SCNA; (+) strand; PAM type: NRG; PAM sequence: GAG
ggtgctggagatgcagggaa

SEQ ID NO: 31582 - DNA, 20 bp, Artificial Sequence
  Description of Artificial Sequence: Synthetic oligonucleotide
  Target: SCNA; (+) strand; PAM type: NRG; PAM sequence: AAG
ctggagatgcagggaagagt

SEQ ID NO: 31583 - DNA, 20 bp, Artificial Sequence
  Description of Artificial Sequence: Synthetic oligonucleotide
  Target: SCNA; (+) strand; PAM type: NRG; PAM sequence: CAG
aagatgctatgcttgacctg

SEQ ID NO: 31584 - DNA, 20 bp, Artificial Sequence
  Description of Artificial Sequence: Synthetic oligonucleotide
  Target: SCNA; (+) strand; PAM type: NRG; PAM sequence: AAG
gcttgacctgcagtatcttg

SEQ ID NO: 31585 - DNA, 20 bp, Artificial Sequence
  Description of Artificial Sequence: Synthetic oligonucleotide
  Target: SCNA; (+) strand; PAM type: NRG; PAM sequence: TAG
gacctgcagtatcttgaagc

SEQ ID NO: 31586 - DNA, 20 bp, Artificial Sequence
  Description of Artificial Sequence: Synthetic oligonucleotide
  Target: SCNA; (+) strand; PAM type: NRG; PAM sequence: TGG
tgcagtatcttgaagctagt

SEQ ID NO: 31587 - DNA, 20 bp, Artificial Sequence
  Description of Artificial Sequence: Synthetic oligonucleotide
  Target: SCNA; (+) strand; PAM type: NRG; PAM sequence: GGG
gcagtatcttgaagctagtt

SEQ ID NO: 31588 - DNA, 20 bp, Artificial Sequence
  Description of Artificial Sequence: Synthetic oligonucleotide
  Target: SCNA; (+) strand; PAM type: NRG; PAM sequence: GGG
cagtatcttgaagctagttg

SEQ ID NO: 31589 - DNA, 20 bp, Artificial Sequence
  Description of Artificial Sequence: Synthetic oligonucleotide
  Target: SCNA; (+) strand; PAM type: NRG; PAM sequence: CAG
tatcttgaagctagttgggg

SEQ ID NO: 31590 - DNA, 20 bp, Artificial Sequence
  Description of Artificial Sequence: Synthetic oligonucleotide
  Target: SCNA; (+) strand; PAM type: NRG; PAM sequence: AAG
agttggggcagcaaaccatt

SEQ ID NO: 31591 - DNA, 20 bp, Artificial Sequence
  Description of Artificial Sequence: Synthetic oligonucleotide
  Target: SCNA; (+) strand; PAM type: NRG; PAM sequence: CAG
cagcaaaccattaagacatt

SEQ ID NO: 31592 - DNA, 20 bp, Artificial Sequence
  Description of Artificial Sequence: Synthetic oligonucleotide
  Target: SCNA; (+) strand; PAM type: NRG; PAM sequence: CAG
caaaccattaagacattcag

SEQ ID NO: 31593 - DNA, 20 bp, Artificial Sequence
  Description of Artificial Sequence: Synthetic oligonucleotide
  Target: SCNA; (+) strand; PAM type: NRG; PAM sequence: TAG
cattaagacattcagcagca

SEQ ID NO: 31594 - DNA, 20 bp, Artificial Sequence
  Description of Artificial Sequence: Synthetic oligonucleotide
  Target: SCNA; (+) strand; PAM type: NRG; PAM sequence: CAG
agcagcatagctgttgtctg

SEQ ID NO: 31595 - DNA, 20 bp, Artificial Sequence
  Description of Artificial Sequence: Synthetic oligonucleotide
  Target: SCNA; (+) strand; PAM type: NRG; PAM sequence: CAG
atagctgttgtctgcagaaa

SEQ ID NO: 31596 - DNA, 20 bp, Artificial Sequence
  Description of Artificial Sequence: Synthetic oligonucleotide
  Target: SCNA; (+) strand; PAM type: NRG; PAM sequence: TGG
ctgttgtctgcagaaacaga

SEQ ID NO: 31597 - DNA, 20 bp, Artificial Sequence
  Description of Artificial Sequence: Synthetic oligonucleotide
  Target: SCNA; (+) strand; PAM type: NRG; PAM sequence: GGG
tgttgtctgcagaaacagat

SEQ ID NO: 31598 - DNA, 20 bp, Artificial Sequence
  Description of Artificial Sequence: Synthetic oligonucleotide
  Target: SCNA; (+) strand; PAM type: NRG; PAM sequence: GGG
gttgtctgcagaaacagatg

SEQ ID NO: 31599 - DNA, 20 bp, Artificial Sequence
  Description of Artificial Sequence: Synthetic oligonucleotide
  Target: SCNA; (+) strand; PAM type: NRG; PAM sequence: AAG
gcagaaacagatggggatcc

SEQ ID NO: 31600 - DNA, 20 bp, Artificial Sequence
  Description of Artificial Sequence: Synthetic oligonucleotide
  Target: SCNA; (+) strand; PAM type: NRG; PAM sequence: AGG
cagaaacagatggggatcca

SEQ ID NO: 31601 - DNA, 20 bp, Artificial Sequence
  Description of Artificial Sequence: Synthetic oligonucleotide
  Target: SCNA; (+) strand; PAM type: NRG; PAM sequence: GGG
agaaacagatggggatccaa

SEQ ID NO: 31602 - DNA, 20 bp, Artificial Sequence
  Description of Artificial Sequence: Synthetic oligonucleotide
  Target: SCNA; (+) strand; PAM type: NRG; PAM sequence: TGG
acagatggggatccaagggt

SEQ ID NO: 31603 - DNA, 20 bp, Artificial Sequence
  Description of Artificial Sequence: Synthetic oligonucleotide
  Target: SCNA; (+) strand; PAM type: NRG; PAM sequence: CAG
tccaagggttggaaataata

SEQ ID NO: 31604 - DNA, 20 bp, Artificial Sequence
  Description of Artificial Sequence: Synthetic oligonucleotide
  Target: SCNA; (+) strand; PAM type: NRG; PAM sequence: GAG
caagggttggaaataataca

SEQ ID NO: 31605 - DNA, 20 bp, Artificial Sequence
  Description of Artificial Sequence: Synthetic oligonucleotide
  Target: SCNA; (+) strand; PAM type: NRG; PAM sequence: AGG
aagggttggaaataatacag

SEQ ID NO: 31606 - DNA, 20 bp, Artificial Sequence
  Description of Artificial Sequence: Synthetic oligonucleotide
  Target: SCNA; (+) strand; PAM type: NRG; PAM sequence: GAG
gggttggaaataatacagag

SEQ ID NO: 31607 - DNA, 20 bp, Artificial Sequence
  Description of Artificial Sequence: Synthetic oligonucleotide
  Target: SCNA; (+) strand; PAM type: NRG; PAM sequence: GAG
gttggaaataatacagagga

SEQ ID NO: 31608 - DNA, 20 bp, Artificial Sequence
  Description of Artificial Sequence: Synthetic oligonucleotide
  Target: SCNA; (+) strand; PAM type: NRG; PAM sequence: TGG
gaaataatacagaggagaga

SEQ ID NO: 31609 - DNA, 20 bp, Artificial Sequence
  Description of Artificial Sequence: Synthetic oligonucleotide
  Target: SCNA; (+) strand; PAM type: NRG; PAM sequence: AAG
aggagagatggattcatttg

SEQ ID NO: 31610 - DNA, 20 bp, Artificial Sequence
  Description of Artificial Sequence: Synthetic oligonucleotide
  Target: SCNA; (+) strand; PAM type: NRG; PAM sequence: GAG
gagagatggattcatttgaa

SEQ ID NO: 31611 - DNA, 20 bp, Artificial Sequence
  Description of Artificial Sequence: Synthetic oligonucleotide
  Target: SCNA; (+) strand; PAM type: NRG; PAM sequence: AAG
ttgcatgcttaatataatta

SEQ ID NO: 31612 - DNA, 20 bp, Artificial Sequence
  Description of Artificial Sequence: Synthetic oligonucleotide
  Target: SCNA; (+) strand; PAM type: NRG; PAM sequence: TAG
cttaatataattaaagtgcc

SEQ ID NO: 31613 - DNA, 20 bp, Artificial Sequence
  Description of Artificial Sequence: Synthetic oligonucleotide
  Target: SCNA; (+) strand; PAM type: NRG; PAM sequence: TAG
taattaaagtgcctagccac

SEQ ID NO: 31614 - DNA, 20 bp, Artificial Sequence
  Description of Artificial Sequence: Synthetic oligonucleotide
  Target: SCNA; (+) strand; PAM type: NRG; PAM sequence: TAG
ttaaagtgcctagccactag

SEQ ID NO: 31615 - DNA, 20 bp, Artificial Sequence
  Description of Artificial Sequence: Synthetic oligonucleotide
  Target: SCNA; (+) strand; PAM type: NRG; PAM sequence: CAG
gcctagccactagtagatga

SEQ ID NO: 31616 - DNA, 20 bp, Artificial Sequence
  Description of Artificial Sequence: Synthetic oligonucleotide
  Target: SCNA; (+) strand; PAM type: NRG; PAM sequence: TAG
tacacatcatgtaatcccct

SEQ ID NO: 31617 - DNA, 20 bp, Artificial Sequence
  Description of Artificial Sequence: Synthetic oligonucleotide
  Target: SCNA; (+) strand; PAM type: NRG; PAM sequence: AAG
atgtaatccccttagtcttg

SEQ ID NO: 31618 - DNA, 20 bp, Artificial Sequence
  Description of Artificial Sequence: Synthetic oligonucleotide
  Target: SCNA; (+) strand; PAM type: NRG; PAM sequence: TGG
cttagtcttgaagatattga

SEQ ID NO: 31619 - DNA, 20 bp, Artificial Sequence
  Description of Artificial Sequence: Synthetic oligonucleotide
  Target: SCNA; (+) strand; PAM type: NRG; PAM sequence: CAG
tggtgttaatcacttgaatg

SEQ ID NO: 31620 - DNA, 20 bp, Artificial Sequence
  Description of Artificial Sequence: Synthetic oligonucleotide
  Target: SCNA; (+) strand; PAM type: NRG; PAM sequence: TAG
cagtgacattaataatttct

SEQ ID NO: 31621 - DNA, 20 bp, Artificial Sequence
  Description of Artificial Sequence: Synthetic oligonucleotide
  Target: SCNA; (+) strand; PAM type: NRG; PAM sequence: AAG
ttaataatttcttagataaa

SEQ ID NO: 31622 - DNA, 20 bp, Artificial Sequence
  Description of Artificial Sequence: Synthetic oligonucleotide
  Target: SCNA; (+) strand; PAM type: NRG; PAM sequence: CAG
atcataaattccctgcctcc

SEQ ID NO: 31623 - DNA, 20 bp, Artificial Sequence
  Description of Artificial Sequence: Synthetic oligonucleotide
  Target: SCNA; (+) strand; PAM type: NRG; PAM sequence: GAG
ctgcctcccagactctctgt

SEQ ID NO: 31624 - DNA, 20 bp, Artificial Sequence
  Description of Artificial Sequence: Synthetic oligonucleotide
  Target: SCNA; (+) strand; PAM type: NRG; PAM sequence: AAG
tctgtgagcctcatgtgcat

SEQ ID NO: 31625 - DNA, 20 bp, Artificial Sequence
  Description of Artificial Sequence: Synthetic oligonucleotide
  Target: SCNA; (+) strand; PAM type: NRG; PAM sequence: TGG
gtgagcctcatgtgcataag

SEQ ID NO: 31626 - DNA, 20 bp, Artificial Sequence
  Description of Artificial Sequence: Synthetic oligonucleotide
  Target: SCNA; (+) strand; PAM type: NRG; PAM sequence: GAG
gagcctcatgtgcataagtg

SEQ ID NO: 31627 - DNA, 20 bp, Artificial Sequence
  Description of Artificial Sequence: Synthetic oligonucleotide
  Target: SCNA; (+) strand; PAM type: NRG; PAM sequence: AGG
agcctcatgtgcataagtgg

SEQ ID NO: 31628 - DNA, 20 bp, Artificial Sequence
  Description of Artificial Sequence: Synthetic oligonucleotide
  Target: SCNA; (+) strand; PAM type: NRG; PAM sequence: GGG
gcctcatgtgcataagtgga

SEQ ID NO: 31629 - DNA, 20 bp, Artificial Sequence
  Description of Artificial Sequence: Synthetic oligonucleotide
  Target: SCNA; (+) strand; PAM type: NRG; PAM sequence: AAG
tcatgtgcataagtggaggg

SEQ ID NO: 31630 - DNA, 20 bp, Artificial Sequence
  Description of Artificial Sequence: Synthetic oligonucleotide
  Target: SCNA; (+) strand; PAM type: NRG; PAM sequence: AGG
catgtgcataagtggaggga

SEQ ID NO: 31631 - DNA, 20 bp, Artificial Sequence
  Description of Artificial Sequence: Synthetic oligonucleotide
  Target: SCNA; (+) strand; PAM type: NRG; PAM sequence: AAG
agggaaggacctgctgatct

SEQ ID NO: 31632 - DNA, 20 bp, Artificial Sequence
  Description of Artificial Sequence: Synthetic oligonucleotide
  Target: SCNA; (+) strand; PAM type: NRG; PAM sequence: TAG
tgctgatctaagaatacccc

SEQ ID NO: 31633 - DNA, 20 bp, Artificial Sequence
  Description of Artificial Sequence: Synthetic oligonucleotide
  Target: SCNA; (+) strand; PAM type: NRG; PAM sequence: AAG
taagaatacccctagtgtca

SEQ ID NO: 31634 - DNA, 20 bp, Artificial Sequence
  Description of Artificial Sequence: Synthetic oligonucleotide
  Target: SCNA; (+) strand; PAM type: NRG; PAM sequence: AAG
gaatacccctagtgtcaaag

SEQ ID NO: 31635 - DNA, 20 bp, Artificial Sequence
  Description of Artificial Sequence: Synthetic oligonucleotide
  Target: SCNA; (+) strand; PAM type: NRG; PAM sequence: TGG
cctagtgtcaaagaagtaaa

SEQ ID NO: 31636 - DNA, 20 bp, Artificial Sequence
  Description of Artificial Sequence: Synthetic oligonucleotide
  Target: SCNA; (+) strand; PAM type: NRG; PAM sequence: AAG
tgtcaaagaagtaaatggtc

SEQ ID NO: 31637 - DNA, 20 bp, Artificial Sequence
  Description of Artificial Sequence: Synthetic oligonucleotide
  Target: SCNA; (+) strand; PAM type: NRG; PAM sequence: AAG
aaagaagtaaatggtcaagt

SEQ ID NO: 31638 - DNA, 20 bp, Artificial Sequence
  Description of Artificial Sequence: Synthetic oligonucleotide
  Target: SCNA; (+) strand; PAM type: NRG; PAM sequence: AGG
aagaagtaaatggtcaagta

SEQ ID NO: 31639 - DNA, 20 bp, Artificial Sequence
  Description of Artificial Sequence: Synthetic oligonucleotide
  Target: SCNA; (+) strand; PAM type: NRG; PAM sequence: AAG
tggtcaagtaaggttgtcct

SEQ ID NO: 31640 - DNA, 20 bp, Artificial Sequence
  Description of Artificial Sequence: Synthetic oligonucleotide
  Target: SCNA; (+) strand; PAM type: NRG; PAM sequence: AAG
tcaagtaaggttgtcctaag

SEQ ID NO: 31641 - DNA, 20 bp, Artificial Sequence
  Description of Artificial Sequence: Synthetic oligonucleotide
  Target: SCNA; (+) strand; PAM type: NRG; PAM sequence: TGG
agccatgttaccccttctgc

SEQ ID NO: 31642 - DNA, 20 bp, Artificial Sequence
  Description of Artificial Sequence: Synthetic oligonucleotide
  Target: SCNA; (+) strand; PAM type: NRG; PAM sequence: GAG
atgttaccccttctgctggt

SEQ ID NO: 31643 - DNA, 20 bp, Artificial Sequence
  Description of Artificial Sequence: Synthetic oligonucleotide
  Target: SCNA; (+) strand; PAM type: NRG; PAM sequence: CAG
accccttctgctggtgagca

SEQ ID NO: 31644 - DNA, 20 bp, Artificial Sequence
  Description of Artificial Sequence: Synthetic oligonucleotide
  Target: SCNA; (+) strand; PAM type: NRG; PAM sequence: GAG
cccttctgctggtgagcaca

SEQ ID NO: 31645 - DNA, 20 bp, Artificial Sequence
  Description of Artificial Sequence: Synthetic oligonucleotide
  Target: SCNA; (+) strand; PAM type: NRG; PAM sequence: CAG
ctgctggtgagcacagagcc

SEQ ID NO: 31646 - DNA, 20 bp, Artificial Sequence
  Description of Artificial Sequence: Synthetic oligonucleotide
  Target: SCNA; (+) strand; PAM type: NRG; PAM sequence: AGG
tgctggtgagcacagagccc

SEQ ID NO: 31647 - DNA, 20 bp, Artificial Sequence
  Description of Artificial Sequence: Synthetic oligonucleotide
  Target: SCNA; (+) strand; PAM type: NRG; PAM sequence: GAG
aatttttttttttttttttt

SEQ ID NO: 31648 - DNA, 20 bp, Artificial Sequence
  Description of Artificial Sequence: Synthetic oligonucleotide
  Target: SCNA; (+) strand; PAM type: NRG; PAM sequence: CAG
ttttttttttttttttgaga

SEQ ID NO: 31649 - DNA, 20 bp, Artificial Sequence
  Description of Artificial Sequence: Synthetic oligonucleotide
  Target: SCNA; (+) strand; PAM type: NRG; PAM sequence: GAG
ttttttttttttttgagaca

SEQ ID NO: 31650 - DNA, 20 bp, Artificial Sequence
  Description of Artificial Sequence: Synthetic oligonucleotide
  Target: SCNA; (+) strand; PAM type: NRG; PAM sequence: CAG
cagagtctcgctctgtcacc

SEQ ID NO: 31651 - DNA, 20 bp, Artificial Sequence
  Description of Artificial Sequence: Synthetic oligonucleotide
  Target: SCNA; (+) strand; PAM type: NRG; PAM sequence: AGG
agagtctcgctctgtcaccc

SEQ ID NO: 31652 - DNA, 20 bp, Artificial Sequence
  Description of Artificial Sequence: Synthetic oligonucleotide
  Target: SCNA; (+) strand; PAM type: NRG; PAM sequence: TGG
tctcgctctgtcacccaggc

SEQ ID NO: 31653 - DNA, 20 bp, Artificial Sequence
  Description of Artificial Sequence: Synthetic oligonucleotide
  Target: SCNA; (+) strand; PAM type: NRG; PAM sequence: GAG
tcgctctgtcacccaggctg

SEQ ID NO: 31654 - DNA, 20 bp, Artificial Sequence
  Description of Artificial Sequence: Synthetic oligonucleotide
  Target: SCNA; (+) strand; PAM type: NRG; PAM sequence: CAG
ctgtcacccaggctggagtg

SEQ ID NO: 31655 - DNA, 20 bp, Artificial Sequence
  Description of Artificial Sequence: Synthetic oligonucleotide
  Target: SCNA; (+) strand; PAM type: NRG; PAM sequence: TGG
tcacccaggctggagtgcag

SEQ ID NO: 31656 - DNA, 20 bp, Artificial Sequence
  Description of Artificial Sequence: Synthetic oligonucleotide
  Target: SCNA; (+) strand; PAM type: NRG; PAM sequence: CGG
ggagtgcagtggtgcaatct

SEQ ID NO: 31657 - DNA, 20 bp, Artificial Sequence
  Description of Artificial Sequence: Synthetic oligonucleotide
  Target: SCNA; (+) strand; PAM type: NRG; PAM sequence: CGG
tcaccgcaacctccacctcc

SEQ ID NO: 31658 - DNA, 20 bp, Artificial Sequence
  Description of Artificial Sequence: Synthetic oligonucleotide
  Target: SCNA; (+) strand; PAM type: NRG; PAM sequence: GGG
caccgcaacctccacctccc

SEQ ID NO: 31659 - DNA, 20 bp, Artificial Sequence
  Description of Artificial Sequence: Synthetic oligonucleotide
  Target: SCNA; (+) strand; PAM type: NRG; PAM sequence: AAG
aacctccacctcccgggttc

SEQ ID NO: 31660 - DNA, 20 bp, Artificial Sequence
  Description of Artificial Sequence: Synthetic oligonucleotide
  Target: SCNA; (+) strand; PAM type: NRG; PAM sequence: TAG
ttcaagcgattctcctgcct

SEQ ID NO: 31661 - DNA, 20 bp, Artificial Sequence
  Description of Artificial Sequence: Synthetic oligonucleotide
  Target: SCNA; (+) strand; PAM type: NRG; PAM sequence: GAG
ttctcctgccttagcctccc

SEQ ID NO: 31662 - DNA, 20 bp, Artificial Sequence
  Description of Artificial Sequence: Synthetic oligonucleotide
  Target: SCNA; (+) strand; PAM type: NRG; PAM sequence: CAG
tcctgccttagcctcccgag

SEQ ID NO: 31663 - DNA, 20 bp, Artificial Sequence
  Description of Artificial Sequence: Synthetic oligonucleotide
  Target: SCNA; (+) strand; PAM type: NRG; PAM sequence: TGG
gccttagcctcccgagcagc

SEQ ID NO: 31664 - DNA, 20 bp, Artificial Sequence
  Description of Artificial Sequence: Synthetic oligonucleotide
  Target: SCNA; (+) strand; PAM type: NRG; PAM sequence: GGG
ccttagcctcccgagcagct

SEQ ID NO: 31665 - DNA, 20 bp, Artificial Sequence
  Description of Artificial Sequence: Synthetic oligonucleotide
  Target: SCNA; (+) strand; PAM type: NRG; PAM sequence: AAG
tcccgagcagctgggactac

SEQ ID NO: 31666 - DNA, 20 bp, Artificial Sequence
  Description of Artificial Sequence: Synthetic oligonucleotide
  Target: SCNA; (+) strand; PAM type: NRG; PAM sequence: TGG
caagcacatgacaccacacc

SEQ ID NO: 31667 - DNA, 20 bp, Artificial Sequence
  Description of Artificial Sequence: Synthetic oligonucleotide
  Target: SCNA; (+) strand; PAM type: NRG; PAM sequence: TAG
tggctaattttttgtatttt

SEQ ID NO: 31668 - DNA, 20 bp, Artificial Sequence
  Description of Artificial Sequence: Synthetic oligonucleotide
  Target: SCNA; (+) strand; PAM type: NRG; PAM sequence: TAG
ctaattttttgtatttttag

SEQ ID NO: 31669 - DNA, 20 bp, Artificial Sequence
  Description of Artificial Sequence: Synthetic oligonucleotide
  Target: SCNA; (+) strand; PAM type: NRG; PAM sequence: GAG
aattttttgtatttttagta

SEQ ID NO: 31670 - DNA, 20 bp, Artificial Sequence
  Description of Artificial Sequence: Synthetic oligonucleotide
  Target: SCNA; (+) strand; PAM type: NRG; PAM sequence: TGG
ttttgtatttttagtagaga

SEQ ID NO: 31671 - DNA, 20 bp, Artificial Sequence
  Description of Artificial Sequence: Synthetic oligonucleotide
  Target: SCNA; (+) strand; PAM type: NRG; PAM sequence: GGG
tttgtatttttagtagagat

SEQ ID NO: 31672 - DNA, 20 bp, Artificial Sequence
  Description of Artificial Sequence: Synthetic oligonucleotide
  Target: SCNA; (+) strand; PAM type: NRG; PAM sequence: GGG
ttgtatttttagtagagatg

SEQ ID NO: 31673 - DNA, 20 bp, Artificial Sequence
  Description of Artificial Sequence: Synthetic oligonucleotide
  Target: SCNA; (+) strand; PAM type: NRG; PAM sequence: TAG
gagatggggtttcaccatgt

SEQ ID NO: 31674 - DNA, 20 bp, Artificial Sequence
  Description of Artificial Sequence: Synthetic oligonucleotide
  Target: SCNA; (+) strand; PAM type: NRG; PAM sequence: CAG
tggggtttcaccatgttagc

SEQ ID NO: 31675 - DNA, 20 bp, Artificial Sequence
  Description of Artificial Sequence: Synthetic oligonucleotide
  Target: SCNA; (+) strand; PAM type: NRG; PAM sequence: AGG
ggggtttcaccatgttagcc

SEQ ID NO: 31676 - DNA, 20 bp, Artificial Sequence
  Description of Artificial Sequence: Synthetic oligonucleotide
  Target: SCNA; (+) strand; PAM type: NRG; PAM sequence: TAG
tttcaccatgttagccagga

SEQ ID NO: 31677 - DNA, 20 bp, Artificial Sequence
  Description of Artificial Sequence: Synthetic oligonucleotide
  Target: SCNA; (+) strand; PAM type: NRG; PAM sequence: CAG
acctcatgatctgcccgcct

SEQ ID NO: 31678 - DNA, 20 bp, Artificial Sequence
  Description of Artificial Sequence: Synthetic oligonucleotide
  Target: SCNA; (+) strand; PAM type: NRG; PAM sequence: AAG
ctgcccgcctcagcctccca

SEQ ID NO: 31679 - DNA, 20 bp, Artificial Sequence
  Description of Artificial Sequence: Synthetic oligonucleotide
  Target: SCNA; (+) strand; PAM type: NRG; PAM sequence: TGG
gcctcagcctcccaaagtgc

SEQ ID NO: 31680 - DNA, 20 bp, Artificial Sequence
  Description of Artificial Sequence: Synthetic oligonucleotide
  Target: SCNA; (+) strand; PAM type: NRG; PAM sequence: GGG
cctcagcctcccaaagtgct

SEQ ID NO: 31681 - DNA, 20 bp, Artificial Sequence
  Description of Artificial Sequence: Synthetic oligonucleotide
  Target: SCNA; (+) strand; PAM type: NRG; PAM sequence: CAG
ctcccaaagtgctgggatta

SEQ ID NO: 31682 - DNA, 20 bp, Artificial Sequence
  Description of Artificial Sequence: Synthetic oligonucleotide
  Target: SCNA; (+) strand; PAM type: NRG; PAM sequence: AGG
tcccaaagtgctgggattac

SEQ ID NO: 31683 - DNA, 20 bp, Artificial Sequence
  Description of Artificial Sequence: Synthetic oligonucleotide
  Target: SCNA; (+) strand; PAM type: NRG; PAM sequence: GAG
agtgctgggattacaggtgt

SEQ ID NO: 31684 - DNA, 20 bp, Artificial Sequence
  Description of Artificial Sequence: Synthetic oligonucleotide
  Target: SCNA; (+) strand; PAM type: NRG; PAM sequence: TGG
caggtgtgagccaccacgcc

SEQ ID NO: 31685 - DNA, 20 bp, Artificial Sequence
  Description of Artificial Sequence: Synthetic oligonucleotide
  Target: SCNA; (+) strand; PAM type: NRG; PAM sequence: CAG
tgagccaccacgcctggctg

SEQ ID NO: 31686 - DNA, 20 bp, Artificial Sequence
  Description of Artificial Sequence: Synthetic oligonucleotide
  Target: SCNA; (+) strand; PAM type: NRG; PAM sequence: TAG
ctggctgcagaatctttacc

SEQ ID NO: 31687 - DNA, 20 bp, Artificial Sequence
  Description of Artificial Sequence: Synthetic oligonucleotide
  Target: SCNA; (+) strand; PAM type: NRG; PAM sequence: AGG
tggctgcagaatctttacct

SEQ ID NO: 31688 - DNA, 20 bp, Artificial Sequence
  Description of Artificial Sequence: Synthetic oligonucleotide
  Target: SCNA; (+) strand; PAM type: NRG; PAM sequence: TGG
ctaggttactgttgtccatg

SEQ ID NO: 31689 - DNA, 20 bp, Artificial Sequence
  Description of Artificial Sequence: Synthetic oligonucleotide
  Target: SCNA; (+) strand; PAM type: NRG; PAM sequence: GGG
taggttactgttgtccatgt

SEQ ID NO: 31690 - DNA, 20 bp, Artificial Sequence
  Description of Artificial Sequence: Synthetic oligonucleotide
  Target: SCNA; (+) strand; PAM type: NRG; PAM sequence: AAG
ggtaacaatcttgacatctg

SEQ ID NO: 31691 - DNA, 20 bp, Artificial Sequence
  Description of Artificial Sequence: Synthetic oligonucleotide
  Target: SCNA; (+) strand; PAM type: NRG; PAM sequence: AAG
cttctaacaaaatctgaaaa

SEQ ID NO: 31692 - DNA, 20 bp, Artificial Sequence
  Description of Artificial Sequence: Synthetic oligonucleotide
  Target: SCNA; (+) strand; PAM type: NRG; PAM sequence: CAG
aacaaaatctgaaaaaagta

SEQ ID NO: 31693 - DNA, 20 bp, Artificial Sequence
  Description of Artificial Sequence: Synthetic oligonucleotide
  Target: SCNA; (+) strand; PAM type: NRG; PAM sequence: GAG
caaaatctgaaaaaagtaca

SEQ ID NO: 31694 - DNA, 20 bp, Artificial Sequence
  Description of Artificial Sequence: Synthetic oligonucleotide
  Target: SCNA; (+) strand; PAM type: NRG; PAM sequence: TGG
gtacagagctatttttgaaa

SEQ ID NO: 31695 - DNA, 20 bp, Artificial Sequence
  Description of Artificial Sequence: Synthetic oligonucleotide
  Target: SCNA; (+) strand; PAM type: NRG; PAM sequence: GAG
gagctatttttgaaatggat

SEQ ID NO: 31696 - DNA, 20 bp, Artificial Sequence
  Description of Artificial Sequence: Synthetic oligonucleotide
  Target: SCNA; (+) strand; PAM type: NRG; PAM sequence: TGG
ttgaaatggatgagaatgta

SEQ ID NO: 31697 - DNA, 20 bp, Artificial Sequence
  Description of Artificial Sequence: Synthetic oligonucleotide
  Target: SCNA; (+) strand; PAM type: NRG; PAM sequence: TAG
gatgagaatgtatggtaatt

SEQ ID NO: 31698 - DNA, 20 bp, Artificial Sequence
  Description of Artificial Sequence: Synthetic oligonucleotide
  Target: SCNA; (+) strand; PAM type: NRG; PAM sequence: TAG
agaatgtatggtaatttagc

SEQ ID NO: 31699 - DNA, 20 bp, Artificial Sequence
  Description of Artificial Sequence: Synthetic oligonucleotide
  Target: SCNA; (+) strand; PAM type: NRG; PAM sequence: CAG
cattgtatgtgtcctgtttt

SEQ ID NO: 31700 - DNA, 20 bp, Artificial Sequence
  Description of Artificial Sequence: Synthetic oligonucleotide
  Target: SCNA; (+) strand; PAM type: NRG; PAM sequence: TAG
gctactgaattatttatctt

SEQ ID NO: 31701 - DNA, 20 bp, Artificial Sequence
  Description of Artificial Sequence: Synthetic oligonucleotide
  Target: SCNA; (+) strand; PAM type: NRG; PAM sequence: AGG
ctactgaattatttatcttt

SEQ ID NO: 31702 - DNA, 20 bp, Artificial Sequence
  Description of Artificial Sequence: Synthetic oligonucleotide
  Target: SCNA; (+) strand; PAM type: NRG; PAM sequence: TAG
atctttaggtgtataaatta

SEQ ID NO: 31703 - DNA, 20 bp, Artificial Sequence
  Description of Artificial Sequence: Synthetic oligonucleotide
  Target: SCNA; (+) strand; PAM type: NRG; PAM sequence: AAG
taggtgtataaattatagtc

SEQ ID NO: 31704 - DNA, 20 bp, Artificial Sequence
  Description of Artificial Sequence: Synthetic oligonucleotide
  Target: SCNA; (+) strand; PAM type: NRG; PAM sequence: AAG
caagatgcttacaattgatg

SEQ ID NO: 31705 - DNA, 20 bp, Artificial Sequence
  Description of Artificial Sequence: Synthetic oligonucleotide
  Target: SCNA; (+) strand; PAM type: NRG; PAM sequence: AGG
aagatgcttacaattgatga

SEQ ID NO: 31706 - DNA, 20 bp, Artificial Sequence
  Description of Artificial Sequence: Synthetic oligonucleotide
  Target: SCNA; (+) strand; PAM type: NRG; PAM sequence: AAG
atgcttacaattgatgaagg

SEQ ID NO: 31707 - DNA, 20 bp, Artificial Sequence
  Description of Artificial Sequence: Synthetic oligonucleotide
  Target: SCNA; (+) strand; PAM type: NRG; PAM sequence: CAG
ggaagaatgattttaaaaca

SEQ ID NO: 31708 - DNA, 20 bp, Artificial Sequence
  Description of Artificial Sequence: Synthetic oligonucleotide
  Target: SCNA; (+) strand; PAM type: NRG; PAM sequence: GAG
aagaatgattttaaaacaca

SEQ ID NO: 31709 - DNA, 20 bp, Artificial Sequence
  Description of Artificial Sequence: Synthetic oligonucleotide
  Target: SCNA; (+) strand; PAM type: NRG; PAM sequence: CAG
gcaaaatgttattttaaata

SEQ ID NO: 31710 - DNA, 20 bp, Artificial Sequence
  Description of Artificial Sequence: Synthetic oligonucleotide
  Target: SCNA; (+) strand; PAM type: NRG; PAM sequence: AAG
aaatgttattttaaatacag

SEQ ID NO: 31711 - DNA, 20 bp, Artificial Sequence
  Description of Artificial Sequence: Synthetic oligonucleotide
  Target: SCNA; (+) strand; PAM type: NRG; PAM sequence: TGG
tcttctcctccatgaataac

SEQ ID NO: 31712 - DNA, 20 bp, Artificial Sequence
  Description of Artificial Sequence: Synthetic oligonucleotide
  Target: SCNA; (+) strand; PAM type: NRG; PAM sequence: TAG
attctgtttctattgtatat

SEQ ID NO: 31713 - DNA, 20 bp, Artificial Sequence
  Description of Artificial Sequence: Synthetic oligonucleotide
  Target: SCNA; (+) strand; PAM type: NRG; PAM sequence: AGG
ttctgtttctattgtatatt

SEQ ID NO: 31714 - DNA, 20 bp, Artificial Sequence
  Description of Artificial Sequence: Synthetic oligonucleotide
  Target: SCNA; (+) strand; PAM type: NRG; PAM sequence: CAG
atatgtgtttttgtcattac

SEQ ID NO: 31715 - DNA, 20 bp, Artificial Sequence
  Description of Artificial Sequence: Synthetic oligonucleotide
  Target: SCNA; (+) strand; PAM type: NRG; PAM sequence: CAG
tgtcattaccagtgtttcca

SEQ ID NO: 31716 - DNA, 20 bp, Artificial Sequence
  Description of Artificial Sequence: Synthetic oligonucleotide
  Target: SCNA; (+) strand; PAM type: NRG; PAM sequence: AGG
gtcattaccagtgtttccac

SEQ ID NO: 31717 - DNA, 20 bp, Artificial Sequence
  Description of Artificial Sequence: Synthetic oligonucleotide
  Target: SCNA; (+) strand; PAM type: NRG; PAM sequence: AAG
taccagtgtttccacaggat

SEQ ID NO: 31718 - DNA, 20 bp, Artificial Sequence
  Description of Artificial Sequence: Synthetic oligonucleotide
  Target: SCNA; (+) strand; PAM type: NRG; PAM sequence: AAG
gtttccacaggataagactg

SEQ ID NO: 31719 - DNA, 20 bp, Artificial Sequence
  Description of Artificial Sequence: Synthetic oligonucleotide
  Target: SCNA; (+) strand; PAM type: NRG; PAM sequence: AGG
tttccacaggataagactga

SEQ ID NO: 31720 - DNA, 20 bp, Artificial Sequence
  Description of Artificial Sequence: Synthetic oligonucleotide
  Target: SCNA; (+) strand; PAM type: NRG; PAM sequence: AAG
caggataagactgaaggcac

SEQ ID NO: 31721 - DNA, 20 bp, Artificial Sequence
  Description of Artificial Sequence: Synthetic oligonucleotide
  Target: SCNA; (+) strand; PAM type: NRG; PAM sequence: AAG
aagcatttaatatttgctga

SEQ ID NO: 31722 - DNA, 20 bp, Artificial Sequence
  Description of Artificial Sequence: Synthetic oligonucleotide
  Target: SCNA; (+) strand; PAM type: NRG; PAM sequence: CAG
atttgctgaaagcacttaaa

SEQ ID NO: 31723 - DNA, 20 bp, Artificial Sequence
  Description of Artificial Sequence: Synthetic oligonucleotide
  Target: SCNA; (+) strand; PAM type: NRG; PAM sequence: TGG
cacttaaacagaaaaaatat

SEQ ID NO: 31724 - DNA, 20 bp, Artificial Sequence
  Description of Artificial Sequence: Synthetic oligonucleotide
  Target: SCNA; (+) strand; PAM type: NRG; PAM sequence: TAG
taaacagaaaaaatattggc

SEQ ID NO: 31725 - DNA, 20 bp, Artificial Sequence
  Description of Artificial Sequence: Synthetic oligonucleotide
  Target: SCNA; (+) strand; PAM type: NRG; PAM sequence: GAG
cagaaaaaatattggctagt

SEQ ID NO: 31726 - DNA, 20 bp, Artificial Sequence
  Description of Artificial Sequence: Synthetic oligonucleotide
  Target: SCNA; (+) strand; PAM type: NRG; PAM sequence: AAG
aaatattggctagtgagatt

SEQ ID NO: 31727 - DNA, 20 bp, Artificial Sequence
  Description of Artificial Sequence: Synthetic oligonucleotide
  Target: SCNA; (+) strand; PAM type: NRG; PAM sequence: AAG
agtgagattaagaatgaaat

SEQ ID NO: 31728 - DNA, 20 bp, Artificial Sequence
  Description of Artificial Sequence: Synthetic oligonucleotide
  Target: SCNA; (+) strand; PAM type: NRG; PAM sequence: AGG
gtgagattaagaatgaaata

SEQ ID NO: 31729 - DNA, 20 bp, Artificial Sequence
  Description of Artificial Sequence: Synthetic oligonucleotide
  Target: SCNA; (+) strand; PAM type: NRG; PAM sequence: TAG
agattaagaatgaaataagg

SEQ ID NO: 31730 - DNA, 20 bp, Artificial Sequence
  Description of Artificial Sequence: Synthetic oligonucleotide
  Target: SCNA; (+) strand; PAM type: NRG; PAM sequence: TAG
aatgaaataaggtagacaaa

SEQ ID NO: 31731 - DNA, 20 bp, Artificial Sequence
  Description of Artificial Sequence: Synthetic oligonucleotide
  Target: SCNA; (+) strand; PAM type: NRG; PAM sequence: TGG
aaataaggtagacaaatagc

SEQ ID NO: 31732 - DNA, 20 bp, Artificial Sequence
  Description of Artificial Sequence: Synthetic oligonucleotide
  Target: SCNA; (+) strand; PAM type: NRG; PAM sequence: AAG
agacaaatagctggctgcaa

SEQ ID NO: 31733 - DNA, 20 bp, Artificial Sequence
  Description of Artificial Sequence: Synthetic oligonucleotide
  Target: SCNA; (+) strand; PAM type: NRG; PAM sequence: GAG
acaaatagctggctgcaaaa

SEQ ID NO: 31734 - DNA, 20 bp, Artificial Sequence
  Description of Artificial Sequence: Synthetic oligonucleotide
  Target: SCNA; (+) strand; PAM type: NRG; PAM sequence: AAG
gctgcaaaagagaccttaaa

SEQ ID NO: 31735 - DNA, 20 bp, Artificial Sequence
  Description of Artificial Sequence: Synthetic oligonucleotide
  Target: SCNA; (+) strand; PAM type: NRG; PAM sequence: CAG
agagaccttaaaaagtttct

SEQ ID NO: 31736 - DNA, 20 bp, Artificial Sequence
  Description of Artificial Sequence: Synthetic oligonucleotide
  Target: SCNA; (+) strand; PAM type: NRG; PAM sequence: GAG
agaccttaaaaagtttctca

SEQ ID NO: 31737 - DNA, 20 bp, Artificial Sequence
  Description of Artificial Sequence: Synthetic oligonucleotide
  Target: SCNA; (+) strand; PAM type: NRG; PAM sequence: TGG
ttaaaaagtttctcagagcc

SEQ ID NO: 31738 - DNA, 20 bp, Artificial Sequence
  Description of Artificial Sequence: Synthetic oligonucleotide
  Target: SCNA; (+) strand; PAM type: NRG; PAM sequence: TGG
ttctcagagcctggccaaaa

SEQ ID NO: 31739 - DNA, 20 bp, Artificial Sequence
  Description of Artificial Sequence: Synthetic oligonucleotide
  Target: SCNA; (+) strand; PAM type: NRG; PAM sequence: AAG
ggcaaaaccccatctctact

SEQ ID NO: 31740 - DNA, 20 bp, Artificial Sequence
  Description of Artificial Sequence: Synthetic oligonucleotide
  Target: SCNA; (+) strand; PAM type: NRG; PAM sequence: TAG
tctactaagaatacaaaaat

SEQ ID NO: 31741 - DNA, 20 bp, Artificial Sequence
  Description of Artificial Sequence: Synthetic oligonucleotide
  Target: SCNA; (+) strand; PAM type: NRG; PAM sequence: TGG
actaagaatacaaaaattag

SEQ ID NO: 31742 - DNA, 20 bp, Artificial Sequence
  Description of Artificial Sequence: Synthetic oligonucleotide
  Target: SCNA; (+) strand; PAM type: NRG; PAM sequence: GGG
ctaagaatacaaaaattagt

SEQ ID NO: 31743 - DNA, 20 bp, Artificial Sequence
  Description of Artificial Sequence: Synthetic oligonucleotide
  Target: SCNA; (+) strand; PAM type: NRG; PAM sequence: GGG
taagaatacaaaaattagtg

SEQ ID NO: 31744 - DNA, 20 bp, Artificial Sequence
  Description of Artificial Sequence: Synthetic oligonucleotide
  Target: SCNA; (+) strand; PAM type: NRG; PAM sequence: TGG
atacaaaaattagtggggtg

SEQ ID NO: 31745 - DNA, 20 bp, Artificial Sequence
  Description of Artificial Sequence: Synthetic oligonucleotide
  Target: SCNA; (+) strand; PAM type: NRG; PAM sequence: CAG
gtaccatgcacctgtaatct

SEQ ID NO: 31746 - DNA, 20 bp, Artificial Sequence
  Description of Artificial Sequence: Synthetic oligonucleotide
  Target: SCNA; (+) strand; PAM type: NRG; PAM sequence: AAG
acctgtaatctcagctactc

SEQ ID NO: 31747 - DNA, 20 bp, Artificial Sequence
  Description of Artificial Sequence: Synthetic oligonucleotide
  Target: SCNA; (+) strand; PAM type: NRG; PAM sequence: GAG
ctgtaatctcagctactcaa

SEQ ID NO: 31748 - DNA, 20 bp, Artificial Sequence
  Description of Artificial Sequence: Synthetic oligonucleotide
  Target: SCNA; (+) strand; PAM type: NRG; PAM sequence: AGG
tgtaatctcagctactcaag

SEQ ID NO: 31749 - DNA, 20 bp, Artificial Sequence
  Description of Artificial Sequence: Synthetic oligonucleotide
  Target: SCNA; (+) strand; PAM type: NRG; PAM sequence: GAG
tctcagctactcaagaggct

SEQ ID NO: 31750 - DNA, 20 bp, Artificial Sequence
  Description of Artificial Sequence: Synthetic oligonucleotide
  Target: SCNA; (+) strand; PAM type: NRG; PAM sequence: AGG
ctcagctactcaagaggctg

SEQ ID NO: 31751 - DNA, 20 bp, Artificial Sequence
  Description of Artificial Sequence: Synthetic oligonucleotide
  Target: SCNA; (+) strand; PAM type: NRG; PAM sequence: CAG
agctactcaagaggctgagg

SEQ ID NO: 31752 - DNA, 20 bp, Artificial Sequence
  Description of Artificial Sequence: Synthetic oligonucleotide
  Target: SCNA; (+) strand; PAM type: NRG; PAM sequence: AGG
gctactcaagaggctgaggc

SEQ ID NO: 31753 - DNA, 20 bp, Artificial Sequence
  Description of Artificial Sequence: Synthetic oligonucleotide
  Target: SCNA; (+) strand; PAM type: NRG; PAM sequence: GAG
tactcaagaggctgaggcag

SEQ ID NO: 31754 - DNA, 20 bp, Artificial Sequence
  Description of Artificial Sequence: Synthetic oligonucleotide
  Target: SCNA; (+) strand; PAM type: NRG; PAM sequence: CAG
gcaggagaattgcttgaacc

SEQ ID NO: 31755 - DNA, 20 bp, Artificial Sequence
  Description of Artificial Sequence: Synthetic oligonucleotide
  Target: SCNA; (+) strand; PAM type: NRG; PAM sequence: AGG
caggagaattgcttgaaccc

SEQ ID NO: 31756 - DNA, 20 bp, Artificial Sequence
  Description of Artificial Sequence: Synthetic oligonucleotide
  Target: SCNA; (+) strand; PAM type: NRG; PAM sequence: GAG
ggagaattgcttgaacccag

SEQ ID NO: 31757 - DNA, 20 bp, Artificial Sequence
  Description of Artificial Sequence: Synthetic oligonucleotide
  Target: SCNA; (+) strand; PAM type: NRG; PAM sequence: AGG
gagaattgcttgaacccagg

SEQ ID NO: 31758 - DNA, 20 bp, Artificial Sequence
  Description of Artificial Sequence: Synthetic oligonucleotide
  Target: SCNA; (+) strand; PAM type: NRG; PAM sequence: CAG
aattgcttgaacccaggagg

SEQ ID NO: 31759 - DNA, 20 bp, Artificial Sequence
  Description of Artificial Sequence: Synthetic oligonucleotide
  Target: SCNA; (+) strand; PAM type: NRG; PAM sequence: GAG
ttgcttgaacccaggaggca

SEQ ID NO: 31760 - DNA, 20 bp, Artificial Sequence
  Description of Artificial Sequence: Synthetic oligonucleotide
  Target: SCNA; (+) strand; PAM type: NRG; PAM sequence: AGG
tgcttgaacccaggaggcag

SEQ ID NO: 31761 - DNA, 20 bp, Artificial Sequence
  Description of Artificial Sequence: Synthetic oligonucleotide
  Target: SCNA; (+) strand; PAM type: NRG; PAM sequence: TAG
ttgaacccaggaggcagagg

SEQ ID NO: 31762 - DNA, 20 bp, Artificial Sequence
  Description of Artificial Sequence: Synthetic oligonucleotide
  Target: SCNA; (+) strand; PAM type: NRG; PAM sequence: AGG
tgaacccaggaggcagaggt

SEQ ID NO: 31763 - DNA, 20 bp, Artificial Sequence
  Description of Artificial Sequence: Synthetic oligonucleotide
  Target: SCNA; (+) strand; PAM type: NRG; PAM sequence: CAG
caggaggcagaggtaggttg

SEQ ID NO: 31764 - DNA, 20 bp, Artificial Sequence
  Description of Artificial Sequence: Synthetic oligonucleotide
  Target: SCNA; (+) strand; PAM type: NRG; PAM sequence: GAG
aggcagaggtaggttgcagt

SEQ ID NO: 31765 - DNA, 20 bp, Artificial Sequence
  Description of Artificial Sequence: Synthetic oligonucleotide
  Target: SCNA; (+) strand; PAM type: NRG; PAM sequence: AAG
gaggtaggttgcagtgagcc

SEQ ID NO: 31766 - DNA, 20 bp, Artificial Sequence
  Description of Artificial Sequence: Synthetic oligonucleotide
  Target: SCNA; (+) strand; PAM type: NRG; PAM sequence: TGG
gttgcagtgagccaagatca

SEQ ID NO: 31767 - DNA, 20 bp, Artificial Sequence
  Description of Artificial Sequence: Synthetic oligonucleotide
  Target: SCNA; (+) strand; PAM type: NRG; PAM sequence: CAG
aagatcatggcactgtattc

SEQ ID NO: 31768 - DNA, 20 bp, Artificial Sequence
  Description of Artificial Sequence: Synthetic oligonucleotide
  Target: SCNA; (+) strand; PAM type: NRG; PAM sequence: TGG
catggcactgtattccagcc

SEQ ID NO: 31769 - DNA, 20 bp, Artificial Sequence
  Description of Artificial Sequence: Synthetic oligonucleotide
  Target: SCNA; (+) strand; PAM type: NRG; PAM sequence: GGG
atggcactgtattccagcct

SEQ ID NO: 31770 - DNA, 20 bp, Artificial Sequence
  Description of Artificial Sequence: Synthetic oligonucleotide
  Target: SCNA; (+) strand; PAM type: NRG; PAM sequence: TAG
ctgtattccagcctgggcaa

SEQ ID NO: 31771 - DNA, 20 bp, Artificial Sequence
  Description of Artificial Sequence: Synthetic oligonucleotide
  Target: SCNA; (+) strand; PAM type: NRG; PAM sequence: GAG
gtattccagcctgggcaata

SEQ ID NO: 31772 - DNA, 20 bp, Artificial Sequence
  Description of Artificial Sequence: Synthetic oligonucleotide
  Target: SCNA; (+) strand; PAM type: NRG; PAM sequence: AAG
tccagcctgggcaatagagc

SEQ ID NO: 31773 - DNA, 20 bp, Artificial Sequence
  Description of Artificial Sequence: Synthetic oligonucleotide
  Target: SCNA; (+) strand; PAM type: NRG; PAM sequence: AAG
gcaagactctgtctcaaaaa

SEQ ID NO: 31774 - DNA, 20 bp, Artificial Sequence
  Description of Artificial Sequence: Synthetic oligonucleotide
  Target: SCNA; (+) strand; PAM type: NRG; PAM sequence: AAG
gactctgtctcaaaaaaaga

SEQ ID NO: 31775 - DNA, 20 bp, Artificial Sequence
  Description of Artificial Sequence: Synthetic oligonucleotide
  Target: SCNA; (+) strand; PAM type: NRG; PAM sequence: CAG
ctcaaaaaaagaaagtttat

SEQ ID NO: 31776 - DNA, 20 bp, Artificial Sequence
  Description of Artificial Sequence: Synthetic oligonucleotide
  Target: SCNA; (+) strand; PAM type: NRG; PAM sequence: AAG
agaaagtttatcagtctatt

SEQ ID NO: 31777 - DNA, 20 bp, Artificial Sequence
  Description of Artificial Sequence: Synthetic oligonucleotide
  Target: SCNA; (+) strand; PAM type: NRG; PAM sequence: AAG
agaatatacttgatttttac

SEQ ID NO: 31778 - DNA, 20 bp, Artificial Sequence
  Description of Artificial Sequence: Synthetic oligonucleotide
  Target: SCNA; (+) strand; PAM type: NRG; PAM sequence: AAG
atatacttgatttttacaag

SEQ ID NO: 31779 - DNA, 20 bp, Artificial Sequence
  Description of Artificial Sequence: Synthetic oligonucleotide
  Target: SCNA; (+) strand; PAM type: NRG; PAM sequence: AAG
gaagaatcaattgctttaca

SEQ ID NO: 31780 - DNA, 20 bp, Artificial Sequence
  Description of Artificial Sequence: Synthetic oligonucleotide
  Target: SCNA; (+) strand; PAM type: NRG; PAM sequence: TAG
tataaacatatctataaaac

SEQ ID NO: 31781 - DNA, 20 bp, Artificial Sequence
  Description of Artificial Sequence: Synthetic oligonucleotide
  Target: SCNA; (+) strand; PAM type: NRG; PAM sequence: AAG
acatatctataaaactagta

SEQ ID NO: 31782 - DNA, 20 bp, Artificial Sequence
  Description of Artificial Sequence: Synthetic oligonucleotide
  Target: SCNA; (+) strand; PAM type: NRG; PAM sequence: AAG
ataaaactagtaaagatcaa

SEQ ID NO: 31783 - DNA, 20 bp, Artificial Sequence
  Description of Artificial Sequence: Synthetic oligonucleotide
  Target: SCNA; (+) strand; PAM type: NRG; PAM sequence: CAG
actagtaaagatcaaaagct

SEQ ID NO: 31784 - DNA, 20 bp, Artificial Sequence
  Description of Artificial Sequence: Synthetic oligonucleotide
  Target: SCNA; (+) strand; PAM type: NRG; PAM sequence: AGG
ctagtaaagatcaaaagctc

SEQ ID NO: 31785 - DNA, 20 bp, Artificial Sequence
  Description of Artificial Sequence: Synthetic oligonucleotide
  Target: SCNA; (+) strand; PAM type: NRG; PAM sequence: CAG
tattcacaaaaatatttgct

SEQ ID NO: 31786 - DNA, 20 bp, Artificial Sequence
  Description of Artificial Sequence: Synthetic oligonucleotide
  Target: SCNA; (+) strand; PAM type: NRG; PAM sequence: GAG
ttcacaaaaatatttgctca

SEQ ID NO: 31787 - DNA, 20 bp, Artificial Sequence
  Description of Artificial Sequence: Synthetic oligonucleotide
  Target: SCNA; (+) strand; PAM type: NRG; PAM sequence: CAG
aaaatatttgctcagagaca

SEQ ID NO: 31788 - DNA, 20 bp, Artificial Sequence
  Description of Artificial Sequence: Synthetic oligonucleotide
  Target: SCNA; (+) strand; PAM type: NRG; PAM sequence: AAG
agacacagaaactcatcttc

SEQ ID NO: 31789 - DNA, 20 bp, Artificial Sequence
  Description of Artificial Sequence: Synthetic oligonucleotide
  Target: SCNA; (+) strand; PAM type: NRG; PAM sequence: TGG
cttcaagatttatttttatc

SEQ ID NO: 31790 - DNA, 20 bp, Artificial Sequence
  Description of Artificial Sequence: Synthetic oligonucleotide
  Target: SCNA; (+) strand; PAM type: NRG; PAM sequence: GGG
ttcaagatttatttttatct

SEQ ID NO: 31791 - DNA, 20 bp, Artificial Sequence
  Description of Artificial Sequence: Synthetic oligonucleotide
  Target: SCNA; (+) strand; PAM type: NRG; PAM sequence: TGG
aagatttatttttatctggg

SEQ ID NO: 31792 - DNA, 20 bp, Artificial Sequence
  Description of Artificial Sequence: Synthetic oligonucleotide
  Target: SCNA; (+) strand; PAM type: NRG; PAM sequence: GAG
gatttatttttatctgggtg

SEQ ID NO: 31793 - DNA, 20 bp, Artificial Sequence
  Description of Artificial Sequence: Synthetic oligonucleotide
  Target: SCNA; (+) strand; PAM type: NRG; PAM sequence: CAG
tttttatctgggtggagtta

SEQ ID NO: 31794 - DNA, 20 bp, Artificial Sequence
  Description of Artificial Sequence: Synthetic oligonucleotide
  Target: SCNA; (+) strand; PAM type: NRG; PAM sequence: GAG
tttatctgggtggagttaca

SEQ ID NO: 31795 - DNA, 20 bp, Artificial Sequence
  Description of Artificial Sequence: Synthetic oligonucleotide
  Target: SCNA; (+) strand; PAM type: NRG; PAM sequence: TGG
gtggagttacagagttgcct

SEQ ID NO: 31796 - DNA, 20 bp, Artificial Sequence
  Description of Artificial Sequence: Synthetic oligonucleotide
  Target: SCNA; (+) strand; PAM type: NRG; PAM sequence: CAG
ttacagagttgccttggtaa

SEQ ID NO: 31797 - DNA, 20 bp, Artificial Sequence
  Description of Artificial Sequence: Synthetic oligonucleotide
  Target: SCNA; (+) strand; PAM type: NRG; PAM sequence: AAG
acagcaactatcaccaaatt

SEQ ID NO: 31798 - DNA, 20 bp, Artificial Sequence
  Description of Artificial Sequence: Synthetic oligonucleotide
  Target: SCNA; (+) strand; PAM type: NRG; PAM sequence: AAG
ctatcaccaaattaagtgtt

SEQ ID NO: 31799 - DNA, 20 bp, Artificial Sequence
  Description of Artificial Sequence: Synthetic oligonucleotide
  Target: SCNA; (+) strand; PAM type: NRG; PAM sequence: CAG
tttttaacattttaaaaatg

SEQ ID NO: 31800 - DNA, 20 bp, Artificial Sequence
  Description of Artificial Sequence: Synthetic oligonucleotide
  Target: SCNA; (+) strand; PAM type: NRG; PAM sequence: AAG
ttttaaaaatgcagatgcca

SEQ ID NO: 31801 - DNA, 20 bp, Artificial Sequence
  Description of Artificial Sequence: Synthetic oligonucleotide
  Target: SCNA; (+) strand; PAM type: NRG; PAM sequence: AGG
tttaaaaatgcagatgccaa

SEQ ID NO: 31802 - DNA, 20 bp, Artificial Sequence
  Description of Artificial Sequence: Synthetic oligonucleotide
  Target: SCNA; (+) strand; PAM type: NRG; PAM sequence: GAG
taaaaatgcagatgccaaag

SEQ ID NO: 31803 - DNA, 20 bp, Artificial Sequence
  Description of Artificial Sequence: Synthetic oligonucleotide
  Target: SCNA; (+) strand; PAM type: NRG; PAM sequence: GAG
aaaatgcagatgccaaagga

SEQ ID NO: 31804 - DNA, 20 bp, Artificial Sequence
  Description of Artificial Sequence: Synthetic oligonucleotide
  Target: SCNA; (+) strand; PAM type: NRG; PAM sequence: CAG
atgccaaaggagagcaatgt

SEQ ID NO: 31805 - DNA, 20 bp, Artificial Sequence
  Description of Artificial Sequence: Synthetic oligonucleotide
  Target: SCNA; (+) strand; PAM type: NRG; PAM sequence: AGG
tgccaaaggagagcaatgtc

SEQ ID NO: 31806 - DNA, 20 bp, Artificial Sequence
  Description of Artificial Sequence: Synthetic oligonucleotide
  Target: SCNA; (+) strand; PAM type: NRG; PAM sequence: GAG
ccaaaggagagcaatgtcag

SEQ ID NO: 31807 - DNA, 20 bp, Artificial Sequence
  Description of Artificial Sequence: Synthetic oligonucleotide
  Target: SCNA; (+) strand; PAM type: NRG; PAM sequence: GAG
aaaggagagcaatgtcagga

SEQ ID NO: 31808 - DNA, 20 bp, Artificial Sequence
  Description of Artificial Sequence: Synthetic oligonucleotide
  Target: SCNA; (+) strand; PAM type: NRG; PAM sequence: AAG
ccacatctacttgacattac

SEQ ID NO: 31809 - DNA, 20 bp, Artificial Sequence
  Description of Artificial Sequence: Synthetic oligonucleotide
  Target: SCNA; (+) strand; PAM type: NRG; PAM sequence: AGG
cacatctacttgacattaca

SEQ ID NO: 31810 - DNA, 20 bp, Artificial Sequence
  Description of Artificial Sequence: Synthetic oligonucleotide
  Target: SCNA; (+) strand; PAM type: NRG; PAM sequence: CAG
tacaaggtttgtactacttt

SEQ ID NO: 31811 - DNA, 20 bp, Artificial Sequence
  Description of Artificial Sequence: Synthetic oligonucleotide
  Target: SCNA; (+) strand; PAM type: NRG; PAM sequence: CAG
tactactttcagaaattctc

SEQ ID NO: 31812 - DNA, 20 bp, Artificial Sequence
  Description of Artificial Sequence: Synthetic oligonucleotide
  Target: SCNA; (+) strand; PAM type: NRG; PAM sequence: CAG
tctataaacacacatataca

SEQ ID NO: 31813 - DNA, 20 bp, Artificial Sequence
  Description of Artificial Sequence: Synthetic oligonucleotide
  Target: SCNA; (+) strand; PAM type: NRG; PAM sequence: GAG
tataaacacacatatacaca

SEQ ID NO: 31814 - DNA, 20 bp, Artificial Sequence
  Description of Artificial Sequence: Synthetic oligonucleotide
  Target: SCNA; (+) strand; PAM type: NRG; PAM sequence: AAG
acacagagcacttcttattg

SEQ ID NO: 31815 - DNA, 20 bp, Artificial Sequence
  Description of Artificial Sequence: Synthetic oligonucleotide
  Target: SCNA; (+) strand; PAM type: NRG; PAM sequence: TGG
taatgcaatgaaaaccacaa

SEQ ID NO: 31816 - DNA, 20 bp, Artificial Sequence
  Description of Artificial Sequence: Synthetic oligonucleotide
  Target: SCNA; (+) strand; PAM type: NRG; PAM sequence: AAG
tggttttcctaccattgact

SEQ ID NO: 31817 - DNA, 20 bp, Artificial Sequence
  Description of Artificial Sequence: Synthetic oligonucleotide
  Target: SCNA; (+) strand; PAM type: NRG; PAM sequence: AAG
tttcctaccattgactaaga

SEQ ID NO: 31818 - DNA, 20 bp, Artificial Sequence
  Description of Artificial Sequence: Synthetic oligonucleotide
  Target: SCNA; (+) strand; PAM type: NRG; PAM sequence: AAG
taccattgactaagaaagca

SEQ ID NO: 31819 - DNA, 20 bp, Artificial Sequence
  Description of Artificial Sequence: Synthetic oligonucleotide
  Target: SCNA; (+) strand; PAM type: NRG; PAM sequence: AGG
accattgactaagaaagcaa

SEQ ID NO: 31820 - DNA, 20 bp, Artificial Sequence
  Description of Artificial Sequence: Synthetic oligonucleotide
  Target: SCNA; (+) strand; PAM type: NRG; PAM sequence: AAG
gcaaaggacctttcttctga

SEQ ID NO: 31821 - DNA, 20 bp, Artificial Sequence
  Description of Artificial Sequence: Synthetic oligonucleotide
  Target: SCNA; (+) strand; PAM type: NRG; PAM sequence: GAG
aggacctttcttctgaaagt

SEQ ID NO: 31822 - DNA, 20 bp, Artificial Sequence
  Description of Artificial Sequence: Synthetic oligonucleotide
  Target: SCNA; (+) strand; PAM type: NRG; PAM sequence: AGG
ggacctttcttctgaaagtg

SEQ ID NO: 31823 - DNA, 20 bp, Artificial Sequence
  Description of Artificial Sequence: Synthetic oligonucleotide
  Target: SCNA; (+) strand; PAM type: NRG; PAM sequence: GAG
acctttcttctgaaagtgag

SEQ ID NO: 31824 - DNA, 20 bp, Artificial Sequence
  Description of Artificial Sequence: Synthetic oligonucleotide
  Target: SCNA; (+) strand; PAM type: NRG; PAM sequence: AGG
cctttcttctgaaagtgagg

SEQ ID NO: 31825 - DNA, 20 bp, Artificial Sequence
  Description of Artificial Sequence: Synthetic oligonucleotide
  Target: SCNA; (+) strand; PAM type: NRG; PAM sequence: TAG
tgcctcctgtcatttgtgaa

SEQ ID NO: 31826 - DNA, 20 bp, Artificial Sequence
  Description of Artificial Sequence: Synthetic oligonucleotide
  Target: SCNA; (+) strand; PAM type: NRG; PAM sequence: TAG
catttgtgaatagaactctg

SEQ ID NO: 31827 - DNA, 20 bp, Artificial Sequence
  Description of Artificial Sequence: Synthetic oligonucleotide
  Target: SCNA; (+) strand; PAM type: NRG; PAM sequence: CAG
tgtgaatagaactctgtagt

SEQ ID NO: 31828 - DNA, 20 bp, Artificial Sequence
  Description of Artificial Sequence: Synthetic oligonucleotide
  Target: SCNA; (+) strand; PAM type: NRG; PAM sequence: CAG
tagaactctgtagtcagaac

SEQ ID NO: 31829 - DNA, 20 bp, Artificial Sequence
  Description of Artificial Sequence: Synthetic oligonucleotide
  Target: SCNA; (+) strand; PAM type: NRG; PAM sequence: GAG
gaactctgtagtcagaacca

SEQ ID NO: 31830 - DNA, 20 bp, Artificial Sequence
  Description of Artificial Sequence: Synthetic oligonucleotide
  Target: SCNA; (+) strand; PAM type: NRG; PAM sequence: TGG
agtcagaaccagagcatttc

SEQ ID NO: 31831 - DNA, 20 bp, Artificial Sequence
  Description of Artificial Sequence: Synthetic oligonucleotide
  Target: SCNA; (+) strand; PAM type: NRG; PAM sequence: TGG
accagagcatttctggcatt

SEQ ID NO: 31832 - DNA, 20 bp, Artificial Sequence
  Description of Artificial Sequence: Synthetic oligonucleotide
  Target: SCNA; (+) strand; PAM type: NRG; PAM sequence: TAG
agcatttctggcatttggtc

SEQ ID NO: 31833 - DNA, 20 bp, Artificial Sequence
  Description of Artificial Sequence: Synthetic oligonucleotide
  Target: SCNA; (+) strand; PAM type: NRG; PAM sequence: AAG
tttggtctagaatcattctg

SEQ ID NO: 31834 - DNA, 20 bp, Artificial Sequence
  Description of Artificial Sequence: Synthetic oligonucleotide
  Target: SCNA; (+) strand; PAM type: NRG; PAM sequence: AGG
ttggtctagaatcattctga

SEQ ID NO: 31835 - DNA, 20 bp, Artificial Sequence
  Description of Artificial Sequence: Synthetic oligonucleotide
  Target: SCNA; (+) strand; PAM type: NRG; PAM sequence: GGG
tggtctagaatcattctgaa

SEQ ID NO: 31836 - DNA, 20 bp, Artificial Sequence
  Description of Artificial Sequence: Synthetic oligonucleotide
  Target: SCNA; (+) strand; PAM type: NRG; PAM sequence: AAG
ctagaatcattctgaagggc

SEQ ID NO: 31837 - DNA, 20 bp, Artificial Sequence
  Description of Artificial Sequence: Synthetic oligonucleotide
  Target: SCNA; (+) strand; PAM type: NRG; PAM sequence: TGG
atcattctgaagggcaagcc

SEQ ID NO: 31838 - DNA, 20 bp, Artificial Sequence
  Description of Artificial Sequence: Synthetic oligonucleotide
  Target: SCNA; (+) strand; PAM type: NRG; PAM sequence: AAG
aagcctggtgctgtgttgct

SEQ ID NO: 31839 - DNA, 20 bp, Artificial Sequence
  Description of Artificial Sequence: Synthetic oligonucleotide
  Target: SCNA; (+) strand; PAM type: NRG; PAM sequence: TGG
gttgctaagcacaaacaatt

SEQ ID NO: 31840 - DNA, 20 bp, Artificial Sequence
  Description of Artificial Sequence: Synthetic oligonucleotide
  Target: SCNA; (+) strand; PAM type: NRG; PAM sequence: TGG
agcacaaacaatttggtatt

SEQ ID NO: 31841 - DNA, 20 bp, Artificial Sequence
  Description of Artificial Sequence: Synthetic oligonucleotide
  Target: SCNA; (+) strand; PAM type: NRG; PAM sequence: GAG
ttggctccaaaaatatgctc

SEQ ID NO: 31842 - DNA, 20 bp, Artificial Sequence
  Description of Artificial Sequence: Synthetic oligonucleotide
  Target: SCNA; (+) strand; PAM type: NRG; PAM sequence: TAG
tccaaaaatatgctcgagat

SEQ ID NO: 31843 - DNA, 20 bp, Artificial Sequence
  Description of Artificial Sequence: Synthetic oligonucleotide
  Target: SCNA; (+) strand; PAM type: NRG; PAM sequence: CAG
ctcgagattagttcttccct

SEQ ID NO: 31844 - DNA, 20 bp, Artificial Sequence
  Description of Artificial Sequence: Synthetic oligonucleotide
  Target: SCNA; (+) strand; PAM type: NRG; PAM sequence: CAG
attagttcttccctcagcaa

SEQ ID NO: 31845 - DNA, 20 bp, Artificial Sequence
  Description of Artificial Sequence: Synthetic oligonucleotide
  Target: SCNA; (+) strand; PAM type: NRG; PAM sequence: AGG
ttagttcttccctcagcaac

SEQ ID NO: 31846 - DNA, 20 bp, Artificial Sequence
  Description of Artificial Sequence: Synthetic oligonucleotide
  Target: SCNA; (+) strand; PAM type: NRG; PAM sequence: CAG
ttccctcagcaacaggcgct

SEQ ID NO: 31847 - DNA, 20 bp, Artificial Sequence
  Description of Artificial Sequence: Synthetic oligonucleotide
  Target: SCNA; (+) strand; PAM type: NRG; PAM sequence: CAG
aataatttttaaccaactct

SEQ ID NO: 31848 - DNA, 20 bp, Artificial Sequence
  Description of Artificial Sequence: Synthetic oligonucleotide
  Target: SCNA; (+) strand; PAM type: NRG; PAM sequence: GAG
taatttttaaccaactctca

SEQ ID NO: 31849 - DNA, 20 bp, Artificial Sequence
  Description of Artificial Sequence: Synthetic oligonucleotide
  Target: SCNA; (+) strand; PAM type: NRG; PAM sequence: CAG
tttaaccaactctcagagcc

SEQ ID NO: 31850 - DNA, 20 bp, Artificial Sequence
  Description of Artificial Sequence: Synthetic oligonucleotide
  Target: SCNA; (+) strand; PAM type: NRG; PAM sequence: GAG
ctcagagcccagtattgctt

SEQ ID NO: 31851 - DNA, 20 bp, Artificial Sequence
  Description of Artificial Sequence: Synthetic oligonucleotide
  Target: SCNA; (+) strand; PAM type: NRG; PAM sequence: GAG
ccagtattgcttgagctact

SEQ ID NO: 31852 - DNA, 20 bp, Artificial Sequence
  Description of Artificial Sequence: Synthetic oligonucleotide
  Target: SCNA; (+) strand; PAM type: NRG; PAM sequence: AAG
agctactgagatcctatttc

SEQ ID NO: 31853 - DNA, 20 bp, Artificial Sequence
  Description of Artificial Sequence: Synthetic oligonucleotide
  Target: SCNA; (+) strand; PAM type: NRG; PAM sequence: AAG
tatttcaagttattgctatc

SEQ ID NO: 31854 - DNA, 20 bp, Artificial Sequence
  Description of Artificial Sequence: Synthetic oligonucleotide
  Target: SCNA; (+) strand; PAM type: NRG; PAM sequence: TGG
aagttattgctatcaagata

SEQ ID NO: 31855 - DNA, 20 bp, Artificial Sequence
  Description of Artificial Sequence: Synthetic oligonucleotide
  Target: SCNA; (+) strand; PAM type: NRG; PAM sequence: GAG
gttattgctatcaagatatg

SEQ ID NO: 31856 - DNA, 20 bp, Artificial Sequence
  Description of Artificial Sequence: Synthetic oligonucleotide
  Target: SCNA; (+) strand; PAM type: NRG; PAM sequence: AGG
ttattgctatcaagatatgg

SEQ ID NO: 31857 - DNA, 20 bp, Artificial Sequence
  Description of Artificial Sequence: Synthetic oligonucleotide
  Target: SCNA; (+) strand; PAM type: NRG; PAM sequence: GAG
attgctatcaagatatggag

SEQ ID NO: 31858 - DNA, 20 bp, Artificial Sequence
  Description of Artificial Sequence: Synthetic oligonucleotide
  Target: SCNA; (+) strand; PAM type: NRG; PAM sequence: GAG
tgctatcaagatatggagga

SEQ ID NO: 31859 - DNA, 20 bp, Artificial Sequence
  Description of Artificial Sequence: Synthetic oligonucleotide
  Target: SCNA; (+) strand; PAM type: NRG; PAM sequence: GAG
agtgaaatactgacacttgt

SEQ ID NO: 31860 - DNA, 20 bp, Artificial Sequence
  Description of Artificial Sequence: Synthetic oligonucleotide
  Target: SCNA; (+) strand; PAM type: NRG; PAM sequence: AAG
actgacacttgtgagatccc

SEQ ID NO: 31861 - DNA, 20 bp, Artificial Sequence
  Description of Artificial Sequence: Synthetic oligonucleotide
  Target: SCNA; (+) strand; PAM type: NRG; PAM sequence: AAG
aattaaaaatttttttaaaa

SEQ ID NO: 31862 - DNA, 20 bp, Artificial Sequence
  Description of Artificial Sequence: Synthetic oligonucleotide
  Target: SCNA; (+) strand; PAM type: NRG; PAM sequence: GAG
ttaaaaatttttttaaaaaa

SEQ ID NO: 31863 - DNA, 20 bp, Artificial Sequence
  Description of Artificial Sequence: Synthetic oligonucleotide
  Target: SCNA; (+) strand; PAM type: NRG; PAM sequence: AAG
ttttttaaaaaagagatgaa

SEQ ID NO: 31864 - DNA, 20 bp, Artificial Sequence
  Description of Artificial Sequence: Synthetic oligonucleotide
  Target: SCNA; (+) strand; PAM type: NRG; PAM sequence: TGG
acatttccaaaccacgtaat

SEQ ID NO: 31865 - DNA, 20 bp, Artificial Sequence
  Description of Artificial Sequence: Synthetic oligonucleotide
  Target: SCNA; (+) strand; PAM type: NRG; PAM sequence: AAG
tttctttcaccttaaactcc

SEQ ID NO: 31866 - DNA, 20 bp, Artificial Sequence
  Description of Artificial Sequence: Synthetic oligonucleotide
  Target: SCNA; (+) strand; PAM type: NRG; PAM sequence: TAG
tttcaccttaaactccaagt

SEQ ID NO: 31867 - DNA, 20 bp, Artificial Sequence
  Description of Artificial Sequence: Synthetic oligonucleotide
  Target: SCNA; (+) strand; PAM type: NRG; PAM sequence: GAG
tcaccttaaactccaagtta

SEQ ID NO: 31868 - DNA, 20 bp, Artificial Sequence
  Description of Artificial Sequence: Synthetic oligonucleotide
  Target: SCNA; (+) strand; PAM type: NRG; PAM sequence: AAG
ccttaaactccaagttagag

SEQ ID NO: 31869 - DNA, 20 bp, Artificial Sequence
  Description of Artificial Sequence: Synthetic oligonucleotide
  Target: SCNA; (+) strand; PAM type: NRG; PAM sequence: TAG
tgtttgttttgttttaaaac

SEQ ID NO: 31870 - DNA, 20 bp, Artificial Sequence
  Description of Artificial Sequence: Synthetic oligonucleotide
  Target: SCNA; (+) strand; PAM type: NRG; PAM sequence: TGG
ttttgttttaaaactagact

SEQ ID NO: 31871 - DNA, 20 bp, Artificial Sequence
  Description of Artificial Sequence: Synthetic oligonucleotide
  Target: SCNA; (+) strand; PAM type: NRG; PAM sequence: TGG
tgttttaaaactagacttgg

SEQ ID NO: 31872 - DNA, 20 bp, Artificial Sequence
  Description of Artificial Sequence: Synthetic oligonucleotide
  Target: SCNA; (+) strand; PAM type: NRG; PAM sequence: CAG
aaactagacttggtggaata

SEQ ID NO: 31873 - DNA, 20 bp, Artificial Sequence
  Description of Artificial Sequence: Synthetic oligonucleotide
  Target: SCNA; (+) strand; PAM type: NRG; PAM sequence: TAG
taaacaaaatattaaacttc

SEQ ID NO: 31874 - DNA, 20 bp, Artificial Sequence
  Description of Artificial Sequence: Synthetic oligonucleotide
  Target: SCNA; (+) strand; PAM type: NRG; PAM sequence: CAG
aaaatattaaacttctagaa

SEQ ID NO: 31875 - DNA, 20 bp, Artificial Sequence
  Description of Artificial Sequence: Synthetic oligonucleotide
  Target: SCNA; (+) strand; PAM type: NRG; PAM sequence: TGG
atattaaacttctagaacag

SEQ ID NO: 31876 - DNA, 20 bp, Artificial Sequence
  Description of Artificial Sequence: Synthetic oligonucleotide
  Target: SCNA; (+) strand; PAM type: NRG; PAM sequence: AAG
tcacttaaaatgaaaacttt

SEQ ID NO: 31877 - DNA, 20 bp, Artificial Sequence
  Description of Artificial Sequence: Synthetic oligonucleotide
  Target: SCNA; (+) strand; PAM type: NRG; PAM sequence: TAG
gaaaactttaagactttcct

SEQ ID NO: 31878 - DNA, 20 bp, Artificial Sequence
  Description of Artificial Sequence: Synthetic oligonucleotide
  Target: SCNA; (+) strand; PAM type: NRG; PAM sequence: GAG
tttaagactttccttagact

SEQ ID NO: 31879 - DNA, 20 bp, Artificial Sequence
  Description of Artificial Sequence: Synthetic oligonucleotide
  Target: SCNA; (+) strand; PAM type: NRG; PAM sequence: AAG
ttattcttaaaaaaaattaa

SEQ ID NO: 31880 - DNA, 20 bp, Artificial Sequence
  Description of Artificial Sequence: Synthetic oligonucleotide
  Target: SCNA; (+) strand; PAM type: NRG; PAM sequence: AGG
tattcttaaaaaaaattaaa

SEQ ID NO: 31881 - DNA, 20 bp, Artificial Sequence
  Description of Artificial Sequence: Synthetic oligonucleotide
  Target: SCNA; (+) strand; PAM type: NRG; PAM sequence: AAG
tcttaaaaaaaattaaaagg

SEQ ID NO: 31882 - DNA, 20 bp, Artificial Sequence
  Description of Artificial Sequence: Synthetic oligonucleotide
  Target: SCNA; (+) strand; PAM type: NRG; PAM sequence: CGG
agttgaattttatttctaaa

SEQ ID NO: 31883 - DNA, 20 bp, Artificial Sequence
  Description of Artificial Sequence: Synthetic oligonucleotide
  Target: SCNA; (+) strand; PAM type: NRG; PAM sequence: CAG
aattttatttctaaacggtg

SEQ ID NO: 31884 - DNA, 20 bp, Artificial Sequence
  Description of Artificial Sequence: Synthetic oligonucleotide
  Target: SCNA; (+) strand; PAM type: NRG; PAM sequence: AGG
attttatttctaaacggtgc

SEQ ID NO: 31885 - DNA, 20 bp, Artificial Sequence
  Description of Artificial Sequence: Synthetic oligonucleotide
  Target: SCNA; (+) strand; PAM type: NRG; PAM sequence: TAG
ttttgcctctgtcttaaact

SEQ ID NO: 31886 - DNA, 20 bp, Artificial Sequence
  Description of Artificial Sequence: Synthetic oligonucleotide
  Target: SCNA; (+) strand; PAM type: NRG; PAM sequence: CAG
cctctgtcttaaacttagaa

SEQ ID NO: 31887 - DNA, 20 bp, Artificial Sequence
  Description of Artificial Sequence: Synthetic oligonucleotide
  Target: SCNA; (+) strand; PAM type: NRG; PAM sequence: CAG
cagatacgcaatctctttaa

SEQ ID NO: 31888 - DNA, 20 bp, Artificial Sequence
  Description of Artificial Sequence: Synthetic oligonucleotide
  Target: SCNA; (+) strand; PAM type: NRG; PAM sequence: CAG
tttaacagtatgtaaaaatt

SEQ ID NO: 31889 - DNA, 20 bp, Artificial Sequence
  Description of Artificial Sequence: Synthetic oligonucleotide
  Target: SCNA; (+) strand; PAM type: NRG; PAM sequence: TGG
aattcagtcttttctttctt

SEQ ID NO: 31890 - DNA, 20 bp, Artificial Sequence
  Description of Artificial Sequence: Synthetic oligonucleotide
  Target: SCNA; (+) strand; PAM type: NRG; PAM sequence: CAG
tttctttggtttccaaatta

SEQ ID NO: 31891 - DNA, 20 bp, Artificial Sequence
  Description of Artificial Sequence: Synthetic oligonucleotide
  Target: SCNA; (+) strand; PAM type: NRG; PAM sequence: TAG
attttccttttatgtgtaat

SEQ ID NO: 31892 - DNA, 20 bp, Artificial Sequence
  Description of Artificial Sequence: Synthetic oligonucleotide
  Target: SCNA; (+) strand; PAM type: NRG; PAM sequence: CAG
ccttttatgtgtaattagtg

SEQ ID NO: 31893 - DNA, 20 bp, Artificial Sequence
  Description of Artificial Sequence: Synthetic oligonucleotide
  Target: SCNA; (+) strand; PAM type: NRG; PAM sequence: AAG
gtaattagtgcagtttaact

SEQ ID NO: 31894 - DNA, 20 bp, Artificial Sequence
  Description of Artificial Sequence: Synthetic oligonucleotide
  Target: SCNA; (+) strand; PAM type: NRG; PAM sequence: GAG
aattagtgcagtttaactaa

SEQ ID NO: 31895 - DNA, 20 bp, Artificial Sequence
  Description of Artificial Sequence: Synthetic oligonucleotide
  Target: SCNA; (+) strand; PAM type: NRG; PAM sequence: TGG
tgcagtttaactaagagtta

SEQ ID NO: 31896 - DNA, 20 bp, Artificial Sequence
  Description of Artificial Sequence: Synthetic oligonucleotide
  Target: SCNA; (+) strand; PAM type: NRG; PAM sequence: GAG
cagtttaactaagagttatg

SEQ ID NO: 31897 - DNA, 20 bp, Artificial Sequence
  Description of Artificial Sequence: Synthetic oligonucleotide
  Target: SCNA; (+) strand; PAM type: NRG; PAM sequence: TGG
tggagcatctttccacctca

SEQ ID NO: 31898 - DNA, 20 bp, Artificial Sequence
  Description of Artificial Sequence: Synthetic oligonucleotide
  Target: SCNA; (+) strand; PAM type: NRG; PAM sequence: TAG
cacctcatggtgtatccatg

SEQ ID NO: 31899 - DNA, 20 bp, Artificial Sequence
  Description of Artificial Sequence: Synthetic oligonucleotide
  Target: SCNA; (+) strand; PAM type: NRG; PAM sequence: CAG
tccatgtagctgaatttctt

SEQ ID NO: 31900 - DNA, 20 bp, Artificial Sequence
  Description of Artificial Sequence: Synthetic oligonucleotide
  Target: SCNA; (+) strand; PAM type: NRG; PAM sequence: AAG
tttgcttttttaatttgtat

SEQ ID NO: 31901 - DNA, 20 bp, Artificial Sequence
  Description of Artificial Sequence: Synthetic oligonucleotide
  Target: SCNA; (+) strand; PAM type: NRG; PAM sequence: AGG
ttgcttttttaatttgtata

SEQ ID NO: 31902 - DNA, 20 bp, Artificial Sequence
  Description of Artificial Sequence: Synthetic oligonucleotide
  Target: SCNA; (+) strand; PAM type: NRG; PAM sequence: GAG
gcttttttaatttgtataag

SEQ ID NO: 31903 - DNA, 20 bp, Artificial Sequence
  Description of Artificial Sequence: Synthetic oligonucleotide
  Target: SCNA; (+) strand; PAM type: NRG; PAM sequence: TAG
ggagtaactgttccatatct

SEQ ID NO: 31904 - DNA, 20 bp, Artificial Sequence
  Description of Artificial Sequence: Synthetic oligonucleotide
  Target: SCNA; (+) strand; PAM type: NRG; PAM sequence: TAG
atcttagaaatctttgaaat

SEQ ID NO: 31905 - DNA, 20 bp, Artificial Sequence
  Description of Artificial Sequence: Synthetic oligonucleotide
  Target: SCNA; (+) strand; PAM type: NRG; PAM sequence: AAG
ttagaaatctttgaaattag

SEQ ID NO: 31906 - DNA, 20 bp, Artificial Sequence
  Description of Artificial Sequence: Synthetic oligonucleotide
  Target: SCNA; (+) strand; PAM type: NRG; PAM sequence: TAG
gaaattagaagttgatctaa

SEQ ID NO: 31907 - DNA, 20 bp, Artificial Sequence
  Description of Artificial Sequence: Synthetic oligonucleotide
  Target: SCNA; (+) strand; PAM type: NRG; PAM sequence: TAG
atctaatagcatctctaatg

SEQ ID NO: 31908 - DNA, 20 bp, Artificial Sequence
  Description of Artificial Sequence: Synthetic oligonucleotide
  Target: SCNA; (+) strand; PAM type: NRG; PAM sequence: TAG
tccttgaattttaaatataa

SEQ ID NO: 31909 - DNA, 20 bp, Artificial Sequence
  Description of Artificial Sequence: Synthetic oligonucleotide
  Target: SCNA; (+) strand; PAM type: NRG; PAM sequence: AAG
agatatgacctgttatttaa

SEQ ID NO: 31910 - DNA, 20 bp, Artificial Sequence
  Description of Artificial Sequence: Synthetic oligonucleotide
  Target: SCNA; (+) strand; PAM type: NRG; PAM sequence: TAG
gacctgttatttaaaagata

SEQ ID NO: 31911 - DNA, 20 bp, Artificial Sequence
  Description of Artificial Sequence: Synthetic oligonucleotide
  Target: SCNA; (+) strand; PAM type: NRG; PAM sequence: TGG
ttaaaagatatagtgtttac

SEQ ID NO: 31912 - DNA, 20 bp, Artificial Sequence
  Description of Artificial Sequence: Synthetic oligonucleotide
  Target: SCNA; (+) strand; PAM type: NRG; PAM sequence: CAG
tagtgtttactggcatataa

SEQ ID NO: 31913 - DNA, 20 bp, Artificial Sequence
  Description of Artificial Sequence: Synthetic oligonucleotide
  Target: SCNA; (+) strand; PAM type: NRG; PAM sequence: GAG
tggcatataacagttgtgtt

SEQ ID NO: 31914 - DNA, 20 bp, Artificial Sequence
  Description of Artificial Sequence: Synthetic oligonucleotide
  Target: SCNA; (+) strand; PAM type: NRG; PAM sequence: TGG
cccttgaaatttttgtttta

SEQ ID NO: 31915 - DNA, 20 bp, Artificial Sequence
  Description of Artificial Sequence: Synthetic oligonucleotide
  Target: SCNA; (+) strand; PAM type: NRG; PAM sequence: TGG
gaatcaatgaacacttgtat

SEQ ID NO: 31916 - DNA, 20 bp, Artificial Sequence
  Description of Artificial Sequence: Synthetic oligonucleotide
  Target: SCNA; (+) strand; PAM type: NRG; PAM sequence: TGG
tcaatgaacacttgtattgg

SEQ ID NO: 31917 - DNA, 20 bp, Artificial Sequence
  Description of Artificial Sequence: Synthetic oligonucleotide
  Target: SCNA; (+) strand; PAM type: NRG; PAM sequence: GAG
aatgaacacttgtattggtg

SEQ ID NO: 31918 - DNA, 20 bp, Artificial Sequence
  Description of Artificial Sequence: Synthetic oligonucleotide
  Target: SCNA; (+) strand; PAM type: NRG; PAM sequence: AAG
ttgtattggtggagaaaaca

SEQ ID NO: 31919 - DNA, 20 bp, Artificial Sequence
  Description of Artificial Sequence: Synthetic oligonucleotide
  Target: SCNA; (+) strand; PAM type: NRG; PAM sequence: CAG
tggagaaaacaaagatcctt

SEQ ID NO: 31920 - DNA, 20 bp, Artificial Sequence
  Description of Artificial Sequence: Synthetic oligonucleotide
  Target: SCNA; (+) strand; PAM type: NRG; PAM sequence: CAG
gaaaacaaagatccttcaga

SEQ ID NO: 31921 - DNA, 20 bp, Artificial Sequence
  Description of Artificial Sequence: Synthetic oligonucleotide
  Target: SCNA; (+) strand; PAM type: NRG; PAM sequence: TGG
cttcagacagactttctgtg

SEQ ID NO: 31922 - DNA, 20 bp, Artificial Sequence
  Description of Artificial Sequence: Synthetic oligonucleotide
  Target: SCNA; (+) strand; PAM type: NRG; PAM sequence: CAG
acaaatcatcaaatcatact

SEQ ID NO: 31923 - DNA, 20 bp, Artificial Sequence
  Description of Artificial Sequence: Synthetic oligonucleotide
  Target: SCNA; (+) strand; PAM type: NRG; PAM sequence: CAG
aattttattgtatatattta

SEQ ID NO: 31924 - DNA, 20 bp, Artificial Sequence
  Description of Artificial Sequence: Synthetic oligonucleotide
  Target: SCNA; (+) strand; PAM type: NRG; PAM sequence: AAG
agtaaacaacatgctgttat

SEQ ID NO: 31925 - DNA, 20 bp, Artificial Sequence
  Description of Artificial Sequence: Synthetic oligonucleotide
  Target: SCNA; (+) strand; PAM type: NRG; PAM sequence: TGG
tgttataagatgaatgtata

SEQ ID NO: 31926 - DNA, 20 bp, Artificial Sequence
  Description of Artificial Sequence: Synthetic oligonucleotide
  Target: SCNA; (+) strand; PAM type: NRG; PAM sequence: AAG
agatgaatgtatatggtgaa

SEQ ID NO: 31927 - DNA, 20 bp, Artificial Sequence
  Description of Artificial Sequence: Synthetic oligonucleotide
  Target: SCNA; (+) strand; PAM type: NRG; PAM sequence: AGG
gatgaatgtatatggtgaaa

SEQ ID NO: 31928 - DNA, 20 bp, Artificial Sequence
  Description of Artificial Sequence: Synthetic oligonucleotide
  Target: SCNA; (+) strand; PAM type: NRG; PAM sequence: TAG
atatggtgaaaaggttatta

SEQ ID NO: 31929 - DNA, 20 bp, Artificial Sequence
  Description of Artificial Sequence: Synthetic oligonucleotide
  Target: SCNA; (+) strand; PAM type: NRG; PAM sequence: TAG
catccattgtctatctcacg

SEQ ID NO: 31930 - DNA, 20 bp, Artificial Sequence
  Description of Artificial Sequence: Synthetic oligonucleotide
  Target: SCNA; (+) strand; PAM type: NRG; PAM sequence: TGG
gttacccactttttcccctg

SEQ ID NO: 31931 - DNA, 20 bp, Artificial Sequence
  Description of Artificial Sequence: Synthetic oligonucleotide
  Target: SCNA; (+) strand; PAM type: NRG; PAM sequence: AAG
cccactttttcccctgtggc

SEQ ID NO: 31932 - DNA, 20 bp, Artificial Sequence
  Description of Artificial Sequence: Synthetic oligonucleotide
  Target: SCNA; (+) strand; PAM type: NRG; PAM sequence: GAG
cactttttcccctgtggcaa

SEQ ID NO: 31933 - DNA, 20 bp, Artificial Sequence
  Description of Artificial Sequence: Synthetic oligonucleotide
  Target: SCNA; (+) strand; PAM type: NRG; PAM sequence: CAG
tttttcccctgtggcaagag

SEQ ID NO: 31934 - DNA, 20 bp, Artificial Sequence
  Description of Artificial Sequence: Synthetic oligonucleotide
  Target: SCNA; (+) strand; PAM type: NRG; PAM sequence: TAG
gcagctataatctactcaat

SEQ ID NO: 31935 - DNA, 20 bp, Artificial Sequence
  Description of Artificial Sequence: Synthetic oligonucleotide
  Target: SCNA; (+) strand; PAM type: NRG; PAM sequence: TAG
caatacactattactaacta

SEQ ID NO: 31936 - DNA, 20 bp, Artificial Sequence
  Description of Artificial Sequence: Synthetic oligonucleotide
  Target: SCNA; (+) strand; PAM type: NRG; PAM sequence: CAG
atagttgtcatcctgcatgt

SEQ ID NO: 31937 - DNA, 20 bp, Artificial Sequence
  Description of Artificial Sequence: Synthetic oligonucleotide
  Target: SCNA; (+) strand; PAM type: NRG; PAM sequence: TAG
catcctgcatgtcagctttt

SEQ ID NO: 31938 - DNA, 20 bp, Artificial Sequence
  Description of Artificial Sequence: Synthetic oligonucleotide
  Target: SCNA; (+) strand; PAM type: NRG; PAM sequence: TAG
tatctgctactttgtatcct

SEQ ID NO: 31939 - DNA, 20 bp, Artificial Sequence
  Description of Artificial Sequence: Synthetic oligonucleotide
  Target: SCNA; (+) strand; PAM type: NRG; PAM sequence: TGG
cctccctgccacctcactca

SEQ ID NO: 31940 - DNA, 20 bp, Artificial Sequence
  Description of Artificial Sequence: Synthetic oligonucleotide
  Target: SCNA; (+) strand; PAM type: NRG; PAM sequence: CAG
gccacctcactcatggtaac

SEQ ID NO: 31941 - DNA, 20 bp, Artificial Sequence
  Description of Artificial Sequence: Synthetic oligonucleotide
  Target: SCNA; (+) strand; PAM type: NRG; PAM sequence: TGG
cactcatggtaaccagtgtg

SEQ ID NO: 31942 - DNA, 20 bp, Artificial Sequence
  Description of Artificial Sequence: Synthetic oligonucleotide
  Target: SCNA; (+) strand; PAM type: NRG; PAM sequence: GAG
gttttttgtttttttatttt

SEQ ID NO: 31943 - DNA, 20 bp, Artificial Sequence
  Description of Artificial Sequence: Synthetic oligonucleotide
  Target: SCNA; (+) strand; PAM type: NRG; PAM sequence: CAG
tttgtttttttattttgaga

SEQ ID NO: 31944 - DNA, 20 bp, Artificial Sequence
  Description of Artificial Sequence: Synthetic oligonucleotide
  Target: SCNA; (+) strand; PAM type: NRG; PAM sequence: GAG
tgtttttttattttgagaca

SEQ ID NO: 31945 - DNA, 20 bp, Artificial Sequence
  Description of Artificial Sequence: Synthetic oligonucleotide
  Target: SCNA; (+) strand; PAM type: NRG; PAM sequence: CAG
cagagttttgctcttttgcc

SEQ ID NO: 31946 - DNA, 20 bp, Artificial Sequence
  Description of Artificial Sequence: Synthetic oligonucleotide
  Target: SCNA; (+) strand; PAM type: NRG; PAM sequence: AGG
agagttttgctcttttgccc

SEQ ID NO: 31947 - DNA, 20 bp, Artificial Sequence
  Description of Artificial Sequence: Synthetic oligonucleotide
  Target: SCNA; (+) strand; PAM type: NRG; PAM sequence: TGG
ttttgctcttttgcccaggc

SEQ ID NO: 31948 - DNA, 20 bp, Artificial Sequence
  Description of Artificial Sequence: Synthetic oligonucleotide
  Target: SCNA; (+) strand; PAM type: NRG; PAM sequence: GAG
ttgctcttttgcccaggctg

SEQ ID NO: 31949 - DNA, 20 bp, Artificial Sequence
  Description of Artificial Sequence: Synthetic oligonucleotide
  Target: SCNA; (+) strand; PAM type: NRG; PAM sequence: AAG
cttttgcccaggctggagtg

SEQ ID NO: 31950 - DNA, 20 bp, Artificial Sequence
  Description of Artificial Sequence: Synthetic oligonucleotide
  Target: SCNA; (+) strand; PAM type: NRG; PAM sequence: TGG
ttgcccaggctggagtgaag

SEQ ID NO: 31951 - DNA, 20 bp, Artificial Sequence
  Description of Artificial Sequence: Synthetic oligonucleotide
  Target: SCNA; (+) strand; PAM type: NRG; PAM sequence: CGG
ggagtgaagtggcgccatct

SEQ ID NO: 31952 - DNA, 20 bp, Artificial Sequence
  Description of Artificial Sequence: Synthetic oligonucleotide
  Target: SCNA; (+) strand; PAM type: NRG; PAM sequence: GAG
cactgcaacctatgcctcct

SEQ ID NO: 31953 - DNA, 20 bp, Artificial Sequence
  Description of Artificial Sequence: Synthetic oligonucleotide
  Target: SCNA; (+) strand; PAM type: NRG; PAM sequence: AAG
aacctatgcctcctgagttc

SEQ ID NO: 31954 - DNA, 20 bp, Artificial Sequence
  Description of Artificial Sequence: Synthetic oligonucleotide
  Target: SCNA; (+) strand; PAM type: NRG; PAM sequence: GAG
ttctcctttctcaactgcct

SEQ ID NO: 31955 - DNA, 20 bp, Artificial Sequence
  Description of Artificial Sequence: Synthetic oligonucleotide
  Target: SCNA; (+) strand; PAM type: NRG; PAM sequence: TAG
tcctttctcaactgcctgag

SEQ ID NO: 31956 - DNA, 20 bp, Artificial Sequence
  Description of Artificial Sequence: Synthetic oligonucleotide
  Target: SCNA; (+) strand; PAM type: NRG; PAM sequence: TGG
ttctcaactgcctgagtagc

SEQ ID NO: 31957 - DNA, 20 bp, Artificial Sequence
  Description of Artificial Sequence: Synthetic oligonucleotide
  Target: SCNA; (+) strand; PAM type: NRG; PAM sequence: GGG
tctcaactgcctgagtagct

SEQ ID NO: 31958 - DNA, 20 bp, Artificial Sequence
  Description of Artificial Sequence: Synthetic oligonucleotide
  Target: SCNA; (+) strand; PAM type: NRG; PAM sequence: CAG
tgcctgagtagctgggatta

SEQ ID NO: 31959 - DNA, 20 bp, Artificial Sequence
  Description of Artificial Sequence: Synthetic oligonucleotide
  Target: SCNA; (+) strand; PAM type: NRG; PAM sequence: AGG
gcctgagtagctgggattac

SEQ ID NO: 31960 - DNA, 20 bp, Artificial Sequence
  Description of Artificial Sequence: Synthetic oligonucleotide
  Target: SCNA; (+) strand; PAM type: NRG; PAM sequence: CGG
caggcacctgccactatgcc

SEQ ID NO: 31961 - DNA, 20 bp, Artificial Sequence
  Description of Artificial Sequence: Synthetic oligonucleotide
  Target: SCNA; (+) strand; PAM type: NRG; PAM sequence: TAG
ccggctaatttttgtacttt

SEQ ID NO: 31962 - DNA, 20 bp, Artificial Sequence
  Description of Artificial Sequence: Synthetic oligonucleotide
  Target: SCNA; (+) strand; PAM type: NRG; PAM sequence: TAG
gctaatttttgtacttttag

SEQ ID NO: 31963 - DNA, 20 bp, Artificial Sequence
  Description of Artificial Sequence: Synthetic oligonucleotide
  Target: SCNA; (+) strand; PAM type: NRG; PAM sequence: CAG
ttttgtacttttagtagaaa

SEQ ID NO: 31964 - DNA, 20 bp, Artificial Sequence
  Description of Artificial Sequence: Synthetic oligonucleotide
  Target: SCNA; (+) strand; PAM type: NRG; PAM sequence: AGG
tttgtacttttagtagaaac

SEQ ID NO: 31965 - DNA, 20 bp, Artificial Sequence
  Description of Artificial Sequence: Synthetic oligonucleotide
  Target: SCNA; (+) strand; PAM type: NRG; PAM sequence: TGG
gaaacaggatttcaccatgt

SEQ ID NO: 31966 - DNA, 20 bp, Artificial Sequence
  Description of Artificial Sequence: Synthetic oligonucleotide
  Target: SCNA; (+) strand; PAM type: NRG; PAM sequence: CAG
caggatttcaccatgttggt

SEQ ID NO: 31967 - DNA, 20 bp, Artificial Sequence
  Description of Artificial Sequence: Synthetic oligonucleotide
  Target: SCNA; (+) strand; PAM type: NRG; PAM sequence: AGG
aggatttcaccatgttggtc

SEQ ID NO: 31968 - DNA, 20 bp, Artificial Sequence
  Description of Artificial Sequence: Synthetic oligonucleotide
  Target: SCNA; (+) strand; PAM type: NRG; PAM sequence: TGG
tttcaccatgttggtcaggc

SEQ ID NO: 31969 - DNA, 20 bp, Artificial Sequence
  Description of Artificial Sequence: Synthetic oligonucleotide
  Target: SCNA; (+) strand; PAM type: NRG; PAM sequence: CAG
tggtcttgaactcctgacct

SEQ ID NO: 31970 - DNA, 20 bp, Artificial Sequence
  Description of Artificial Sequence: Synthetic oligonucleotide
  Target: SCNA; (+) strand; PAM type: NRG; PAM sequence: AGG
ggtcttgaactcctgacctc

SEQ ID NO: 31971 - DNA, 20 bp, Artificial Sequence
  Description of Artificial Sequence: Synthetic oligonucleotide
  Target: SCNA; (+) strand; PAM type: NRG; PAM sequence: CGG
ctcaggtgattcacccacct

SEQ ID NO: 31972 - DNA, 20 bp, Artificial Sequence
  Description of Artificial Sequence: Synthetic oligonucleotide
  Target: SCNA; (+) strand; PAM type: NRG; PAM sequence: AAG
tcacccacctcggcttccca

SEQ ID NO: 31973 - DNA, 20 bp, Artificial Sequence
  Description of Artificial Sequence: Synthetic oligonucleotide
  Target: SCNA; (+) strand; PAM type: NRG; PAM sequence: AGG
cacccacctcggcttcccaa

SEQ ID NO: 31974 - DNA, 20 bp, Artificial Sequence
  Description of Artificial Sequence: Synthetic oligonucleotide
  Target: SCNA; (+) strand; PAM type: NRG; PAM sequence: GGG
acccacctcggcttcccaaa

SEQ ID NO: 31975 - DNA, 20 bp, Artificial Sequence
  Description of Artificial Sequence: Synthetic oligonucleotide
  Target: SCNA; (+) strand; PAM type: NRG; PAM sequence: TAG
acctcggcttcccaaagggc

SEQ ID NO: 31976 - DNA, 20 bp, Artificial Sequence
  Description of Artificial Sequence: Synthetic oligonucleotide
  Target: SCNA; (+) strand; PAM type: NRG; PAM sequence: AGG
cctcggcttcccaaagggct

SEQ ID NO: 31977 - DNA, 20 bp, Artificial Sequence
  Description of Artificial Sequence: Synthetic oligonucleotide
  Target: SCNA; (+) strand; PAM type: NRG; PAM sequence: CAG
ttcccaaagggctaggatta

SEQ ID NO: 31978 - DNA, 20 bp, Artificial Sequence
  Description of Artificial Sequence: Synthetic oligonucleotide
  Target: SCNA; (+) strand; PAM type: NRG; PAM sequence: AGG
tcccaaagggctaggattac

SEQ ID NO: 31979 - DNA, 20 bp, Artificial Sequence
  Description of Artificial Sequence: Synthetic oligonucleotide
  Target: SCNA; (+) strand; PAM type: NRG; PAM sequence: GAG
agggctaggattacaggcgt

SEQ ID NO: 31980 - DNA, 20 bp, Artificial Sequence
  Description of Artificial Sequence: Synthetic oligonucleotide
  Target: SCNA; (+) strand; PAM type: NRG; PAM sequence: CGG
caggcgtgagctaccacatc

SEQ ID NO: 31981 - DNA, 20 bp, Artificial Sequence
  Description of Artificial Sequence: Synthetic oligonucleotide
  Target: SCNA; (+) strand; PAM type: NRG; PAM sequence: CGG
cgtgagctaccacatccggc

SEQ ID NO: 31982 - DNA, 20 bp, Artificial Sequence
  Description of Artificial Sequence: Synthetic oligonucleotide
  Target: SCNA; (+) strand; PAM type: NRG; PAM sequence: TAG
atatttgaactttttctttt

SEQ ID NO: 31983 - DNA, 20 bp, Artificial Sequence
  Description of Artificial Sequence: Synthetic oligonucleotide
  Target: SCNA; (+) strand; PAM type: NRG; PAM sequence: AAG
tctttttagattccacatat

SEQ ID NO: 31984 - DNA, 20 bp, Artificial Sequence
  Description of Artificial Sequence: Synthetic oligonucleotide
  Target: SCNA; (+) strand; PAM type: NRG; PAM sequence: GAG
tttagattccacatataagt

SEQ ID NO: 31985 - DNA, 20 bp, Artificial Sequence
  Description of Artificial Sequence: Synthetic oligonucleotide
  Target: SCNA; (+) strand; PAM type: NRG; PAM sequence: TGG
agattatgcaattttgtgtg

SEQ ID NO: 31986 - DNA, 20 bp, Artificial Sequence
  Description of Artificial Sequence: Synthetic oligonucleotide
  Target: SCNA; (+) strand; PAM type: NRG; PAM sequence: TGG
ttttgtgtgtggatgtgtgt

SEQ ID NO: 31987 - DNA, 20 bp, Artificial Sequence
  Description of Artificial Sequence: Synthetic oligonucleotide
  Target: SCNA; (+) strand; PAM type: NRG; PAM sequence: CAG
tgtgttggacttatttccca

SEQ ID NO: 31988 - DNA, 20 bp, Artificial Sequence
  Description of Artificial Sequence: Synthetic oligonucleotide
  Target: SCNA; (+) strand; PAM type: NRG; PAM sequence: CAG
tcccacagcttaatatcctc

SEQ ID NO: 31989 - DNA, 20 bp, Artificial Sequence
  Description of Artificial Sequence: Synthetic oligonucleotide
  Target: SCNA; (+) strand; PAM type: NRG; PAM sequence: AGG
cccacagcttaatatcctcc

SEQ ID NO: 31990 - DNA, 20 bp, Artificial Sequence
  Description of Artificial Sequence: Synthetic oligonucleotide
  Target: SCNA; (+) strand; PAM type: NRG; PAM sequence: TGG
ctccaggtccatgcatgttg

SEQ ID NO: 31991 - DNA, 20 bp, Artificial Sequence
  Description of Artificial Sequence: Synthetic oligonucleotide
  Target: SCNA; (+) strand; PAM type: NRG; PAM sequence: CAG
atgcatgttgtggcaaatga

SEQ ID NO: 31992 - DNA, 20 bp, Artificial Sequence
  Description of Artificial Sequence: Synthetic oligonucleotide
  Target: SCNA; (+) strand; PAM type: NRG; PAM sequence: AGG
tgcatgttgtggcaaatgac

SEQ ID NO: 31993 - DNA, 20 bp, Artificial Sequence
  Description of Artificial Sequence: Synthetic oligonucleotide
  Target: SCNA; (+) strand; PAM type: NRG; PAM sequence: GGG
gcatgttgtggcaaatgaca

SEQ ID NO: 31994 - DNA, 20 bp, Artificial Sequence
  Description of Artificial Sequence: Synthetic oligonucleotide
  Target: SCNA; (+) strand; PAM type: NRG; PAM sequence: AAG
acagggtcttctcctttttt

SEQ ID NO: 31995 - DNA, 20 bp, Artificial Sequence
  Description of Artificial Sequence: Synthetic oligonucleotide
  Target: SCNA; (+) strand; PAM type: NRG; PAM sequence: AGG
cagggtcttctcctttttta

SEQ ID NO: 31996 - DNA, 20 bp, Artificial Sequence
  Description of Artificial Sequence: Synthetic oligonucleotide
  Target: SCNA; (+) strand; PAM type: NRG; PAM sequence: CAG
cattgtatatacatatacca

SEQ ID NO: 31997 - DNA, 20 bp, Artificial Sequence
  Description of Artificial Sequence: Synthetic oligonucleotide
  Target: SCNA; (+) strand; PAM type: NRG; PAM sequence: TAG
ttcatgcaccaacacatacc

SEQ ID NO: 31998 - DNA, 20 bp, Artificial Sequence
  Description of Artificial Sequence: Synthetic oligonucleotide
  Target: SCNA; (+) strand; PAM type: NRG; PAM sequence: AGG
tcatgcaccaacacatacct

SEQ ID NO: 31999 - DNA, 20 bp, Artificial Sequence
  Description of Artificial Sequence: Synthetic oligonucleotide
  Target: SCNA; (+) strand; PAM type: NRG; PAM sequence: TGG
tgcaccaacacatacctagg

SEQ ID NO: 32000 - DNA, 20 bp, Artificial Sequence
  Description of Artificial Sequence: Synthetic oligonucleotide
  Target: SCNA; (+) strand; PAM type: NRG; PAM sequence: TGG
cctaggtggtttccatatct

SEQ ID NO: 32001 - DNA, 20 bp, Artificial Sequence
  Description of Artificial Sequence: Synthetic oligonucleotide
  Target: SCNA; (+) strand; PAM type: NRG; PAM sequence: TAG
aaataatgctgcaatgaata

SEQ ID NO: 32002 - DNA, 20 bp, Artificial Sequence
  Description of Artificial Sequence: Synthetic oligonucleotide
  Target: SCNA; (+) strand; PAM type: NRG; PAM sequence: CAG
taatgctgcaatgaatatag

SEQ ID NO: 32003 - DNA, 20 bp, Artificial Sequence
  Description of Artificial Sequence: Synthetic oligonucleotide
  Target: SCNA; (+) strand; PAM type: NRG; PAM sequence: CAG
ctgcaatgaatatagcagtg

SEQ ID NO: 32004 - DNA, 20 bp, Artificial Sequence
  Description of Artificial Sequence: Synthetic oligonucleotide
  Target: SCNA; (+) strand; PAM type: NRG; PAM sequence: GAG
agcagtgcagatatctttat

SEQ ID NO: 32005 - DNA, 20 bp, Artificial Sequence
  Description of Artificial Sequence: Synthetic oligonucleotide
  Target: SCNA; (+) strand; PAM type: NRG; PAM sequence: AGG
gcagtgcagatatctttatg

SEQ ID NO: 32006 - DNA, 20 bp, Artificial Sequence
  Description of Artificial Sequence: Synthetic oligonucleotide
  Target: SCNA; (+) strand; PAM type: NRG; PAM sequence: TGG
ggtgatgattttatttcctt

SEQ ID NO: 32007 - DNA, 20 bp, Artificial Sequence
  Description of Artificial Sequence: Synthetic oligonucleotide
  Target: SCNA; (+) strand; PAM type: NRG; PAM sequence: GGG
gtgatgattttatttccttt

SEQ ID NO: 32008 - DNA, 20 bp, Artificial Sequence
  Description of Artificial Sequence: Synthetic oligonucleotide
  Target: SCNA; (+) strand; PAM type: NRG; PAM sequence: CAG
ttatttcctttgggtacatc

SEQ ID NO: 32009 - DNA, 20 bp, Artificial Sequence
  Description of Artificial Sequence: Synthetic oligonucleotide
  Target: SCNA; (+) strand; PAM type: NRG; PAM sequence: GAG
atttcctttgggtacatcca

SEQ ID NO: 32010 - DNA, 20 bp, Artificial Sequence
  Description of Artificial Sequence: Synthetic oligonucleotide
  Target: SCNA; (+) strand; PAM type: NRG; PAM sequence: AGG
tttcctttgggtacatccag

SEQ ID NO: 32011 - DNA, 20 bp, Artificial Sequence
  Description of Artificial Sequence: Synthetic oligonucleotide
  Target: SCNA; (+) strand; PAM type: NRG; PAM sequence: GAG
tcctttgggtacatccagag

SEQ ID NO: 32012 - DNA, 20 bp, Artificial Sequence
  Description of Artificial Sequence: Synthetic oligonucleotide
  Target: SCNA; (+) strand; PAM type: NRG; PAM sequence: AGG
cctttgggtacatccagagg

SEQ ID NO: 32013 - DNA, 20 bp, Artificial Sequence
  Description of Artificial Sequence: Synthetic oligonucleotide
  Target: SCNA; (+) strand; PAM type: NRG; PAM sequence: GGG
ctttgggtacatccagagga

SEQ ID NO: 32014 - DNA, 20 bp, Artificial Sequence
  Description of Artificial Sequence: Synthetic oligonucleotide
  Target: SCNA; (+) strand; PAM type: NRG; PAM sequence: TGG
acatccagaggagggattgc

SEQ ID NO: 32015 - DNA, 20 bp, Artificial Sequence
  Description of Artificial Sequence: Synthetic oligonucleotide
  Target: SCNA; (+) strand; PAM type: NRG; PAM sequence: GGG
catccagaggagggattgct

SEQ ID NO: 32016 - DNA, 20 bp, Artificial Sequence
  Description of Artificial Sequence: Synthetic oligonucleotide
  Target: SCNA; (+) strand; PAM type: NRG; PAM sequence: TAG
gaggagggattgctgggtct

SEQ ID NO: 32017 - DNA, 20 bp, Artificial Sequence
  Description of Artificial Sequence: Synthetic oligonucleotide
  Target: SCNA; (+) strand; PAM type: NRG; PAM sequence: AGG
aggagggattgctgggtctt

SEQ ID NO: 32018 - DNA, 20 bp, Artificial Sequence
  Description of Artificial Sequence: Synthetic oligonucleotide
  Target: SCNA; (+) strand; PAM type: NRG; PAM sequence: TAG
aattctaattttaatttctt

SEQ ID NO: 32019 - DNA, 20 bp, Artificial Sequence
  Description of Artificial Sequence: Synthetic oligonucleotide
  Target: SCNA; (+) strand; PAM type: NRG; PAM sequence: AGG
attctaattttaatttcttt

SEQ ID NO: 32020 - DNA, 20 bp, Artificial Sequence
  Description of Artificial Sequence: Synthetic oligonucleotide
  Target: SCNA; (+) strand; PAM type: NRG; PAM sequence: AAG
tatttccaccaacaatgtac

SEQ ID NO: 32021 - DNA, 20 bp, Artificial Sequence
  Description of Artificial Sequence: Synthetic oligonucleotide
  Target: SCNA; (+) strand; PAM type: NRG; PAM sequence: AGG
atttccaccaacaatgtaca

SEQ ID NO: 32022 - DNA, 20 bp, Artificial Sequence
  Description of Artificial Sequence: Synthetic oligonucleotide
  Target: SCNA; (+) strand; PAM type: NRG; PAM sequence: GGG
tttccaccaacaatgtacaa

SEQ ID NO: 32023 - DNA, 20 bp, Artificial Sequence
  Description of Artificial Sequence: Synthetic oligonucleotide
  Target: SCNA; (+) strand; PAM type: NRG; PAM sequence: TAG
caacacttaaactgaacatg

SEQ ID NO: 32024 - DNA, 20 bp, Artificial Sequence
  Description of Artificial Sequence: Synthetic oligonucleotide
  Target: SCNA; (+) strand; PAM type: NRG; PAM sequence: TAG
tcattattctctaaacaata

SEQ ID NO: 32025 - DNA, 20 bp, Artificial Sequence
  Description of Artificial Sequence: Synthetic oligonucleotide
  Target: SCNA; (+) strand; PAM type: NRG; PAM sequence: TAG
tagtataaaaactatttaca

SEQ ID NO: 32026 - DNA, 20 bp, Artificial Sequence
  Description of Artificial Sequence: Synthetic oligonucleotide
  Target: SCNA; (+) strand; PAM type: NRG; PAM sequence: TGG
acatagaatttacattgtat

SEQ ID NO: 32027 - DNA, 20 bp, Artificial Sequence
  Description of Artificial Sequence: Synthetic oligonucleotide
  Target: SCNA; (+) strand; PAM type: NRG; PAM sequence: GGG
catagaatttacattgtatt

SEQ ID NO: 32028 - DNA, 20 bp, Artificial Sequence
  Description of Artificial Sequence: Synthetic oligonucleotide
  Target: SCNA; (+) strand; PAM type: NRG; PAM sequence: CAG
tacattgtattgggcattat

SEQ ID NO: 32029 - DNA, 20 bp, Artificial Sequence
  Description of Artificial Sequence: Synthetic oligonucleotide
  Target: SCNA; (+) strand; PAM type: NRG; PAM sequence: TAG
attgggcattatcagtaatc

SEQ ID NO: 32030 - DNA, 20 bp, Artificial Sequence
  Description of Artificial Sequence: Synthetic oligonucleotide
  Target: SCNA; (+) strand; PAM type: NRG; PAM sequence: GAG
tgggcattatcagtaatcta

SEQ ID NO: 32031 - DNA, 20 bp, Artificial Sequence
  Description of Artificial Sequence: Synthetic oligonucleotide
  Target: SCNA; (+) strand; PAM type: NRG; PAM sequence: AAG
agtaatctagagattattta

SEQ ID NO: 32032 - DNA, 20 bp, Artificial Sequence
  Description of Artificial Sequence: Synthetic oligonucleotide
  Target: SCNA; (+) strand; PAM type: NRG; PAM sequence: CAG
aatctagagattatttaaag

SEQ ID NO: 32033 - DNA, 20 bp, Artificial Sequence
  Description of Artificial Sequence: Synthetic oligonucleotide
  Target: SCNA; (+) strand; PAM type: NRG; PAM sequence: CAG
ctagagattatttaaagcag

SEQ ID NO: 32034 - DNA, 20 bp, Artificial Sequence
  Description of Artificial Sequence: Synthetic oligonucleotide
  Target: SCNA; (+) strand; PAM type: NRG; PAM sequence: TGG
gcagcagtccccaacctttc

SEQ ID NO: 32035 - DNA, 20 bp, Artificial Sequence
  Description of Artificial Sequence: Synthetic oligonucleotide
  Target: SCNA; (+) strand; PAM type: NRG; PAM sequence: CAG
gtccccaacctttctggcac

SEQ ID NO: 32036 - DNA, 20 bp, Artificial Sequence
  Description of Artificial Sequence: Synthetic oligonucleotide
  Target: SCNA; (+) strand; PAM type: NRG; PAM sequence: AGG
tccccaacctttctggcacc

SEQ ID NO: 32037 - DNA, 20 bp, Artificial Sequence
  Description of Artificial Sequence: Synthetic oligonucleotide
  Target: SCNA; (+) strand; PAM type: NRG; PAM sequence: GGG
ccccaacctttctggcacca

SEQ ID NO: 32038 - DNA, 20 bp, Artificial Sequence
  Description of Artificial Sequence: Synthetic oligonucleotide
  Target: SCNA; (+) strand; PAM type: NRG; PAM sequence: TGG
acctttctggcaccagggac

SEQ ID NO: 32039 - DNA, 20 bp, Artificial Sequence
  Description of Artificial Sequence: Synthetic oligonucleotide
  Target: SCNA; (+) strand; PAM type: NRG; PAM sequence: TGG
ggcaccagggactggttttc

SEQ ID NO: 32040 - DNA, 20 bp, Artificial Sequence
  Description of Artificial Sequence: Synthetic oligonucleotide
  Target: SCNA; (+) strand; PAM type: NRG; PAM sequence: AAG
accagggactggttttctgg

SEQ ID NO: 32041 - DNA, 20 bp, Artificial Sequence
  Description of Artificial Sequence: Synthetic oligonucleotide
  Target: SCNA; (+) strand; PAM type: NRG; PAM sequence: CGG
ttctggaagaaatgtttcca

SEQ ID NO: 32042 - DNA, 20 bp, Artificial Sequence
  Description of Artificial Sequence: Synthetic oligonucleotide
  Target: SCNA; (+) strand; PAM type: NRG; PAM sequence: CAG
ggaagaaatgtttccacgga

SEQ ID NO: 32043 - DNA, 20 bp, Artificial Sequence
  Description of Artificial Sequence: Synthetic oligonucleotide
  Target: SCNA; (+) strand; PAM type: NRG; PAM sequence: AGG
gaagaaatgtttccacggac

SEQ ID NO: 32044 - DNA, 20 bp, Artificial Sequence
  Description of Artificial Sequence: Synthetic oligonucleotide
  Target: SCNA; (+) strand; PAM type: NRG; PAM sequence: GGG
aagaaatgtttccacggaca

SEQ ID NO: 32045 - DNA, 20 bp, Artificial Sequence
  Description of Artificial Sequence: Synthetic oligonucleotide
  Target: SCNA; (+) strand; PAM type: NRG; PAM sequence: TGG
aatgtttccacggacaggga

SEQ ID NO: 32046 - DNA, 20 bp, Artificial Sequence
  Description of Artificial Sequence: Synthetic oligonucleotide
  Target: SCNA; (+) strand; PAM type: NRG; PAM sequence: GAG
tttccacggacagggatggt

SEQ ID NO: 32047 - DNA, 20 bp, Artificial Sequence
  Description of Artificial Sequence: Synthetic oligonucleotide
  Target: SCNA; (+) strand; PAM type: NRG; PAM sequence: AGG
ttccacggacagggatggtg

SEQ ID NO: 32048 - DNA, 20 bp, Artificial Sequence
  Description of Artificial Sequence: Synthetic oligonucleotide
  Target: SCNA; (+) strand; PAM type: NRG; PAM sequence: GGG
tccacggacagggatggtga

SEQ ID NO: 32049 - DNA, 20 bp, Artificial Sequence
  Description of Artificial Sequence: Synthetic oligonucleotide
  Target: SCNA; (+) strand; PAM type: NRG; PAM sequence: GGG
ccacggacagggatggtgag

SEQ ID NO: 32050 - DNA, 20 bp, Artificial Sequence
  Description of Artificial Sequence: Synthetic oligonucleotide
  Target: SCNA; (+) strand; PAM type: NRG; PAM sequence: AAG
cggacagggatggtgagggg

SEQ ID NO: 32051 - DNA, 20 bp, Artificial Sequence
  Description of Artificial Sequence: Synthetic oligonucleotide
  Target: SCNA; (+) strand; PAM type: NRG; PAM sequence: AGG
ggacagggatggtgagggga

SEQ ID NO: 32052 - DNA, 20 bp, Artificial Sequence
  Description of Artificial Sequence: Synthetic oligonucleotide
  Target: SCNA; (+) strand; PAM type: NRG; PAM sequence: GGG
gacagggatggtgaggggaa

SEQ ID NO: 32053 - DNA, 20 bp, Artificial Sequence
  Description of Artificial Sequence: Synthetic oligonucleotide
  Target: SCNA; (+) strand; PAM type: NRG; PAM sequence: GGG
acagggatggtgaggggaag

SEQ ID NO: 32054 - DNA, 20 bp, Artificial Sequence
  Description of Artificial Sequence: Synthetic oligonucleotide
  Target: SCNA; (+) strand; PAM type: NRG; PAM sequence: TGG
gatggtgaggggaaggggaa

SEQ ID NO: 32055 - DNA, 20 bp, Artificial Sequence
  Description of Artificial Sequence: Synthetic oligonucleotide
  Target: SCNA; (+) strand; PAM type: NRG; PAM sequence: TGG
gaggggaaggggaatggttt

SEQ ID NO: 32056 - DNA, 20 bp, Artificial Sequence
  Description of Artificial Sequence: Synthetic oligonucleotide
  Target: SCNA; (+) strand; PAM type: NRG; PAM sequence: GGG
aggggaaggggaatggtttt

SEQ ID NO: 32057 - DNA, 20 bp, Artificial Sequence
  Description of Artificial Sequence: Synthetic oligonucleotide
  Target: SCNA; (+) strand; PAM type: NRG; PAM sequence: AAG
gaatggttttgggatgattc

SEQ ID NO: 32058 - DNA, 20 bp, Artificial Sequence
  Description of Artificial Sequence: Synthetic oligonucleotide
  Target: SCNA; (+) strand; PAM type: NRG; PAM sequence: TAG
aagcacattacatttatcat

SEQ ID NO: 32059 - DNA, 20 bp, Artificial Sequence
  Description of Artificial Sequence: Synthetic oligonucleotide
  Target: SCNA; (+) strand; PAM type: NRG; PAM sequence: AAG
atttatcattagattctcat

SEQ ID NO: 32060 - DNA, 20 bp, Artificial Sequence
  Description of Artificial Sequence: Synthetic oligonucleotide
  Target: SCNA; (+) strand; PAM type: NRG; PAM sequence: AGG
tttatcattagattctcata

SEQ ID NO: 32061 - DNA, 20 bp, Artificial Sequence
  Description of Artificial Sequence: Synthetic oligonucleotide
  Target: SCNA; (+) strand; PAM type: NRG; PAM sequence: GAG
tatcattagattctcataag

SEQ ID NO: 32062 - DNA, 20 bp, Artificial Sequence
  Description of Artificial Sequence: Synthetic oligonucleotide
  Target: SCNA; (+) strand; PAM type: NRG; PAM sequence: TAG
ctcataaggagcgcacaacc

SEQ ID NO: 32063 - DNA, 20 bp, Artificial Sequence
  Description of Artificial Sequence: Synthetic oligonucleotide
  Target: SCNA; (+) strand; PAM type: NRG; PAM sequence: CAG
acctagatccctcacatgtg

SEQ ID NO: 32064 - DNA, 20 bp, Artificial Sequence
  Description of Artificial Sequence: Synthetic oligonucleotide
  Target: SCNA; (+) strand; PAM type: NRG; PAM sequence: TAG
ctcacatgtgcagttcacaa

SEQ ID NO: 32065 - DNA, 20 bp, Artificial Sequence
  Description of Artificial Sequence: Synthetic oligonucleotide
  Target: SCNA; (+) strand; PAM type: NRG; PAM sequence: AGG
tcacatgtgcagttcacaat

SEQ ID NO: 32066 - DNA, 20 bp, Artificial Sequence
  Description of Artificial Sequence: Synthetic oligonucleotide
  Target: SCNA; (+) strand; PAM type: NRG; PAM sequence: GGG
cacatgtgcagttcacaata

SEQ ID NO: 32067 - DNA, 20 bp, Artificial Sequence
  Description of Artificial Sequence: Synthetic oligonucleotide
  Target: SCNA; (+) strand; PAM type: NRG; PAM sequence: TGG
caatagggttcgtgctccta

SEQ ID NO: 32068 - DNA, 20 bp, Artificial Sequence
  Description of Artificial Sequence: Synthetic oligonucleotide
  Target: SCNA; (+) strand; PAM type: NRG; PAM sequence: GAG
ggcaatctaatgccaccact

SEQ ID NO: 32069 - DNA, 20 bp, Artificial Sequence
  Description of Artificial Sequence: Synthetic oligonucleotide
  Target: SCNA; (+) strand; PAM type: NRG; PAM sequence: CAG
taatgccaccactgagctga

SEQ ID NO: 32070 - DNA, 20 bp, Artificial Sequence
  Description of Artificial Sequence: Synthetic oligonucleotide
  Target: SCNA; (+) strand; PAM type: NRG; PAM sequence: AGG
aatgccaccactgagctgac

SEQ ID NO: 32071 - DNA, 20 bp, Artificial Sequence
  Description of Artificial Sequence: Synthetic oligonucleotide
  Target: SCNA; (+) strand; PAM type: NRG; PAM sequence: GAG
tgccaccactgagctgacag

SEQ ID NO: 32072 - DNA, 20 bp, Artificial Sequence
  Description of Artificial Sequence: Synthetic oligonucleotide
  Target: SCNA; (+) strand; PAM type: NRG; PAM sequence: AGG
gccaccactgagctgacagg

SEQ ID NO: 32073 - DNA, 20 bp, Artificial Sequence
  Description of Artificial Sequence: Synthetic oligonucleotide
  Target: SCNA; (+) strand; PAM type: NRG; PAM sequence: GAG
caccactgagctgacaggag

SEQ ID NO: 32074 - DNA, 20 bp, Artificial Sequence
  Description of Artificial Sequence: Synthetic oligonucleotide
  Target: SCNA; (+) strand; PAM type: NRG; PAM sequence: AGG
accactgagctgacaggagg

SEQ ID NO: 32075 - DNA, 20 bp, Artificial Sequence
  Description of Artificial Sequence: Synthetic oligonucleotide
  Target: SCNA; (+) strand; PAM type: NRG; PAM sequence: GAG
cactgagctgacaggaggag

SEQ ID NO: 32076 - DNA, 20 bp, Artificial Sequence
  Description of Artificial Sequence: Synthetic oligonucleotide
  Target: SCNA; (+) strand; PAM type: NRG; PAM sequence: CAG
agctgacaggaggaggagct

SEQ ID NO: 32077 - DNA, 20 bp, Artificial Sequence
  Description of Artificial Sequence: Synthetic oligonucleotide
  Target: SCNA; (+) strand; PAM type: NRG; PAM sequence: CAG
ggagctcagctcttgctgtg

SEQ ID NO: 32078 - DNA, 20 bp, Artificial Sequence
  Description of Artificial Sequence: Synthetic oligonucleotide
  Target: SCNA; (+) strand; PAM type: NRG; PAM sequence: TGG
tcagctcttgctgtgcagcc

SEQ ID NO: 32079 - DNA, 20 bp, Artificial Sequence
  Description of Artificial Sequence: Synthetic oligonucleotide
  Target: SCNA; (+) strand; PAM type: NRG; PAM sequence: CAG
ctgtgcagcctggtatcgaa

SEQ ID NO: 32080 - DNA, 20 bp, Artificial Sequence
  Description of Artificial Sequence: Synthetic oligonucleotide
  Target: SCNA; (+) strand; PAM type: NRG; PAM sequence: CAG
cctggtatcgaacagcctaa

SEQ ID NO: 32081 - DNA, 20 bp, Artificial Sequence
  Description of Artificial Sequence: Synthetic oligonucleotide
  Target: SCNA; (+) strand; PAM type: NRG; PAM sequence: AGG
ctggtatcgaacagcctaac

SEQ ID NO: 32082 - DNA, 20 bp, Artificial Sequence
  Description of Artificial Sequence: Synthetic oligonucleotide
  Target: SCNA; (+) strand; PAM type: NRG; PAM sequence: TGG
tcgaacagcctaacaggcta

SEQ ID NO: 32083 - DNA, 20 bp, Artificial Sequence
  Description of Artificial Sequence: Synthetic oligonucleotide
  Target: SCNA; (+) strand; PAM type: NRG; PAM sequence: CAG
cagcctaacaggctatggac

SEQ ID NO: 32084 - DNA, 20 bp, Artificial Sequence
  Description of Artificial Sequence: Synthetic oligonucleotide
  Target: SCNA; (+) strand; PAM type: NRG; PAM sequence: TGG
aacaggctatggaccagtac

SEQ ID NO: 32085 - DNA, 20 bp, Artificial Sequence
  Description of Artificial Sequence: Synthetic oligonucleotide
  Target: SCNA; (+) strand; PAM type: NRG; PAM sequence: TGG
ctatggaccagtactggtca

SEQ ID NO: 32086 - DNA, 20 bp, Artificial Sequence
  Description of Artificial Sequence: Synthetic oligonucleotide
  Target: SCNA; (+) strand; PAM type: NRG; PAM sequence: TGG
accagtactggtcatggccc

SEQ ID NO: 32087 - DNA, 20 bp, Artificial Sequence
  Description of Artificial Sequence: Synthetic oligonucleotide
  Target: SCNA; (+) strand; PAM type: NRG; PAM sequence: GGG
ccagtactggtcatggccct

SEQ ID NO: 32088 - DNA, 20 bp, Artificial Sequence
  Description of Artificial Sequence: Synthetic oligonucleotide
  Target: SCNA; (+) strand; PAM type: NRG; PAM sequence: GGG
cagtactggtcatggccctg

SEQ ID NO: 32089 - DNA, 20 bp, Artificial Sequence
  Description of Artificial Sequence: Synthetic oligonucleotide
  Target: SCNA; (+) strand; PAM type: NRG; PAM sequence: TGG
actggtcatggccctggggt

SEQ ID NO: 32090 - DNA, 20 bp, Artificial Sequence
  Description of Artificial Sequence: Synthetic oligonucleotide
  Target: SCNA; (+) strand; PAM type: NRG; PAM sequence: GGG
ctggtcatggccctggggtt

SEQ ID NO: 32091 - DNA, 20 bp, Artificial Sequence
  Description of Artificial Sequence: Synthetic oligonucleotide
  Target: SCNA; (+) strand; PAM type: NRG; PAM sequence: GGG
tggtcatggccctggggttg

SEQ ID NO: 32092 - DNA, 20 bp, Artificial Sequence
  Description of Artificial Sequence: Synthetic oligonucleotide
  Target: SCNA; (+) strand; PAM type: NRG; PAM sequence: AAG
ggttggggacccctgattga

SEQ ID NO: 32093 - DNA, 20 bp, Artificial Sequence
  Description of Artificial Sequence: Synthetic oligonucleotide
  Target: SCNA; (+) strand; PAM type: NRG; PAM sequence: GAG
acccctgattgaaagtatat

SEQ ID NO: 32094 - DNA, 20 bp, Artificial Sequence
  Description of Artificial Sequence: Synthetic oligonucleotide
  Target: SCNA; (+) strand; PAM type: NRG; PAM sequence: GAG
ccctgattgaaagtatatga

SEQ ID NO: 32095 - DNA, 20 bp, Artificial Sequence
  Description of Artificial Sequence: Synthetic oligonucleotide
  Target: SCNA; (+) strand; PAM type: NRG; PAM sequence: AGG
cctgattgaaagtatatgag

SEQ ID NO: 32096 - DNA, 20 bp, Artificial Sequence
  Description of Artificial Sequence: Synthetic oligonucleotide
  Target: SCNA; (+) strand; PAM type: NRG; PAM sequence: TAG
agtatatgagaggatgtgca

SEQ ID NO: 32097 - DNA, 20 bp, Artificial Sequence
  Description of Artificial Sequence: Synthetic oligonucleotide
  Target: SCNA; (+) strand; PAM type: NRG; PAM sequence: AGG
gtatatgagaggatgtgcat

SEQ ID NO: 32098 - DNA, 20 bp, Artificial Sequence
  Description of Artificial Sequence: Synthetic oligonucleotide
  Target: SCNA; (+) strand; PAM type: NRG; PAM sequence: AAG
ataggttatatacaaatact

SEQ ID NO: 32099 - DNA, 20 bp, Artificial Sequence
  Description of Artificial Sequence: Synthetic oligonucleotide
  Target: SCNA; (+) strand; PAM type: NRG; PAM sequence: CAG
aatactaagccattttataa

SEQ ID NO: 32100 - DNA, 20 bp, Artificial Sequence
  Description of Artificial Sequence: Synthetic oligonucleotide
  Target: SCNA; (+) strand; PAM type: NRG; PAM sequence: AGG
atactaagccattttataac

SEQ ID NO: 32101 - DNA, 20 bp, Artificial Sequence
  Description of Artificial Sequence: Synthetic oligonucleotide
  Target: SCNA; (+) strand; PAM type: NRG; PAM sequence: GGG
tactaagccattttataaca

SEQ ID NO: 32102 - DNA, 20 bp, Artificial Sequence
  Description of Artificial Sequence: Synthetic oligonucleotide
  Target: SCNA; (+) strand; PAM type: NRG; PAM sequence: GGG
actaagccattttataacag

SEQ ID NO: 32103 - DNA, 20 bp, Artificial Sequence
  Description of Artificial Sequence: Synthetic oligonucleotide
  Target: SCNA; (+) strand; PAM type: NRG; PAM sequence: TAG
gccattttataacaggggct

SEQ ID NO: 32104 - DNA, 20 bp, Artificial Sequence
  Description of Artificial Sequence: Synthetic oligonucleotide
  Target: SCNA; (+) strand; PAM type: NRG; PAM sequence: AGG
ccattttataacaggggctt

SEQ ID NO: 32105 - DNA, 20 bp, Artificial Sequence
  Description of Artificial Sequence: Synthetic oligonucleotide
  Target: SCNA; (+) strand; PAM type: NRG; PAM sequence: CAG
aacaggggcttaggcatctg

SEQ ID NO: 32106 - DNA, 20 bp, Artificial Sequence
  Description of Artificial Sequence: Synthetic oligonucleotide
  Target: SCNA; (+) strand; PAM type: NRG; PAM sequence: TAG
gcttaggcatctgcagattt

SEQ ID NO: 32107 - DNA, 20 bp, Artificial Sequence
  Description of Artificial Sequence: Synthetic oligonucleotide
  Target: SCNA; (+) strand; PAM type: NRG; PAM sequence: AAG
atctgcagattttagtaccc

SEQ ID NO: 32108 - DNA, 20 bp, Artificial Sequence
  Description of Artificial Sequence: Synthetic oligonucleotide
  Target: SCNA; (+) strand; PAM type: NRG; PAM sequence: AGG
tctgcagattttagtaccca

SEQ ID NO: 32109 - DNA, 20 bp, Artificial Sequence
  Description of Artificial Sequence: Synthetic oligonucleotide
  Target: SCNA; (+) strand; PAM type: NRG; PAM sequence: GGG
ctgcagattttagtacccaa

SEQ ID NO: 32110 - DNA, 20 bp, Artificial Sequence
  Description of Artificial Sequence: Synthetic oligonucleotide
  Target: SCNA; (+) strand; PAM type: NRG; PAM sequence: GAG
gcagattttagtacccaagg

SEQ ID NO: 32111 - DNA, 20 bp, Artificial Sequence
  Description of Artificial Sequence: Synthetic oligonucleotide
  Target: SCNA; (+) strand; PAM type: NRG; PAM sequence: AGG
cagattttagtacccaaggg

SEQ ID NO: 32112 - DNA, 20 bp, Artificial Sequence
  Description of Artificial Sequence: Synthetic oligonucleotide
  Target: SCNA; (+) strand; PAM type: NRG; PAM sequence: TGG
gtcctgaaaccaatccccta

SEQ ID NO: 32113 - DNA, 20 bp, Artificial Sequence
  Description of Artificial Sequence: Synthetic oligonucleotide
  Target: SCNA; (+) strand; PAM type: NRG; PAM sequence: AAG
ccaatcccctatggctactg

SEQ ID NO: 32114 - DNA, 20 bp, Artificial Sequence
  Description of Artificial Sequence: Synthetic oligonucleotide
  Target: SCNA; (+) strand; PAM type: NRG; PAM sequence: AGG
caatcccctatggctactga

SEQ ID NO: 32115 - DNA, 20 bp, Artificial Sequence
  Description of Artificial Sequence: Synthetic oligonucleotide
  Target: SCNA; (+) strand; PAM type: NRG; PAM sequence: CAG
caactgtgtatcattcttaa

SEQ ID NO: 32116 - DNA, 20 bp, Artificial Sequence
  Description of Artificial Sequence: Synthetic oligonucleotide
  Target: SCNA; (+) strand; PAM type: NRG; PAM sequence: TGG
ttattatttccatttcactc

SEQ ID NO: 32117 - DNA, 20 bp, Artificial Sequence
  Description of Artificial Sequence: Synthetic oligonucleotide
  Target: SCNA; (+) strand; PAM type: NRG; PAM sequence: TAG
ttccatttcactctggaatt

SEQ ID NO: 32118 - DNA, 20 bp, Artificial Sequence
  Description of Artificial Sequence: Synthetic oligonucleotide
  Target: SCNA; (+) strand; PAM type: NRG; PAM sequence: TAG
atttcactctggaatttagt

SEQ ID NO: 32119 - DNA, 20 bp, Artificial Sequence
  Description of Artificial Sequence: Synthetic oligonucleotide
  Target: SCNA; (+) strand; PAM type: NRG; PAM sequence: AAG
ctggaatttagttagaaatt

SEQ ID NO: 32120 - DNA, 20 bp, Artificial Sequence
  Description of Artificial Sequence: Synthetic oligonucleotide
  Target: SCNA; (+) strand; PAM type: NRG; PAM sequence: CAG
aattgactactaaaatgtac

SEQ ID NO: 32121 - DNA, 20 bp, Artificial Sequence
  Description of Artificial Sequence: Synthetic oligonucleotide
  Target: SCNA; (+) strand; PAM type: NRG; PAM sequence: TAG
ctactaaaatgtaccagcac

SEQ ID NO: 32122 - DNA, 20 bp, Artificial Sequence
  Description of Artificial Sequence: Synthetic oligonucleotide
  Target: SCNA; (+) strand; PAM type: NRG; PAM sequence: CAG
ctaaaatgtaccagcactag

SEQ ID NO: 32123 - DNA, 20 bp, Artificial Sequence
  Description of Artificial Sequence: Synthetic oligonucleotide
  Target: SCNA; (+) strand; PAM type: NRG; PAM sequence: GAG
actgcatttgtatttcatct

SEQ ID NO: 32124 - DNA, 20 bp, Artificial Sequence
  Description of Artificial Sequence: Synthetic oligonucleotide
  Target: SCNA; (+) strand; PAM type: NRG; PAM sequence: GAG
tgcatttgtatttcatctga

SEQ ID NO: 32125 - DNA, 20 bp, Artificial Sequence
  Description of Artificial Sequence: Synthetic oligonucleotide
  Target: SCNA; (+) strand; PAM type: NRG; PAM sequence: TGG
atttgtatttcatctgagag

SEQ ID NO: 32126 - DNA, 20 bp, Artificial Sequence
  Description of Artificial Sequence: Synthetic oligonucleotide
  Target: SCNA; (+) strand; PAM type: NRG; PAM sequence: TGG
tttcatctgagagtggttta

SEQ ID NO: 32127 - DNA, 20 bp, Artificial Sequence
  Description of Artificial Sequence: Synthetic oligonucleotide
  Target: SCNA; (+) strand; PAM type: NRG; PAM sequence: AAG
ggtttatggttcttccccat

SEQ ID NO: 32128 - DNA, 20 bp, Artificial Sequence
  Description of Artificial Sequence: Synthetic oligonucleotide
  Target: SCNA; (+) strand; PAM type: NRG; PAM sequence: TGG
ttatggttcttccccataag

SEQ ID NO: 32129 - DNA, 20 bp, Artificial Sequence
  Description of Artificial Sequence: Synthetic oligonucleotide
  Target: SCNA; (+) strand; PAM type: NRG; PAM sequence: TGG
ataagtggctgatttattga

SEQ ID NO: 32130 - DNA, 20 bp, Artificial Sequence
  Description of Artificial Sequence: Synthetic oligonucleotide
  Target: SCNA; (+) strand; PAM type: NRG; PAM sequence: TGG
ggccactttttcttaactcc

SEQ ID NO: 32131 - DNA, 20 bp, Artificial Sequence
  Description of Artificial Sequence: Synthetic oligonucleotide
  Target: SCNA; (+) strand; PAM type: NRG; PAM sequence: CAG
cctggtctttctcacaatca

SEQ ID NO: 32132 - DNA, 20 bp, Artificial Sequence
  Description of Artificial Sequence: Synthetic oligonucleotide
  Target: SCNA; (+) strand; PAM type: NRG; PAM sequence: CAG
tttctcacaatcacagaaaa

SEQ ID NO: 32133 - DNA, 20 bp, Artificial Sequence
  Description of Artificial Sequence: Synthetic oligonucleotide
  Target: SCNA; (+) strand; PAM type: NRG; PAM sequence: AAG
cccttatcacacaaataaaa

SEQ ID NO: 32134 - DNA, 20 bp, Artificial Sequence
  Description of Artificial Sequence: Synthetic oligonucleotide
  Target: SCNA; (+) strand; PAM type: NRG; PAM sequence: CAG
ctctgtaccttttatcttaa

SEQ ID NO: 32135 - DNA, 20 bp, Artificial Sequence
  Description of Artificial Sequence: Synthetic oligonucleotide
  Target: SCNA; (+) strand; PAM type: NRG; PAM sequence: GAG
atactattttttaatttttt

SEQ ID NO: 32136 - DNA, 20 bp, Artificial Sequence
  Description of Artificial Sequence: Synthetic oligonucleotide
  Target: SCNA; (+) strand; PAM type: NRG; PAM sequence: CGG
attttttaattttttgagac

SEQ ID NO: 32137 - DNA, 20 bp, Artificial Sequence
  Description of Artificial Sequence: Synthetic oligonucleotide
  Target: SCNA; (+) strand; PAM type: NRG; PAM sequence: GGG
ttttttaattttttgagacc

SEQ ID NO: 32138 - DNA, 20 bp, Artificial Sequence
  Description of Artificial Sequence: Synthetic oligonucleotide
  Target: SCNA; (+) strand; PAM type: NRG; PAM sequence: CAG
ccgggtctttctctgtcacc

SEQ ID NO: 32139 - DNA, 20 bp, Artificial Sequence
  Description of Artificial Sequence: Synthetic oligonucleotide
  Target: SCNA; (+) strand; PAM type: NRG; PAM sequence: TGG
tctttctctgtcacccagtc

SEQ ID NO: 32140 - DNA, 20 bp, Artificial Sequence
  Description of Artificial Sequence: Synthetic oligonucleotide
  Target: SCNA; (+) strand; PAM type: NRG; PAM sequence: GAG
tttctctgtcacccagtctg

SEQ ID NO: 32141 - DNA, 20 bp, Artificial Sequence
  Description of Artificial Sequence: Synthetic oligonucleotide
  Target: SCNA; (+) strand; PAM type: NRG; PAM sequence: CAG
ctgtcacccagtctggagtg

SEQ ID NO: 32142 - DNA, 20 bp, Artificial Sequence
  Description of Artificial Sequence: Synthetic oligonucleotide
  Target: SCNA; (+) strand; PAM type: NRG; PAM sequence: TGG
tggagtgcagtgcgcgatct

SEQ ID NO: 32143 - DNA, 20 bp, Artificial Sequence
  Description of Artificial Sequence: Synthetic oligonucleotide
  Target: SCNA; (+) strand; PAM type: NRG; PAM sequence: CAG
tgcgcgatcttggctcactg

SEQ ID NO: 32144 - DNA, 20 bp, Artificial Sequence
  Description of Artificial Sequence: Synthetic oligonucleotide
  Target: SCNA; (+) strand; PAM type: NRG; PAM sequence: CAG
atcttggctcactgcagccc

SEQ ID NO: 32145 - DNA, 20 bp, Artificial Sequence
  Description of Artificial Sequence: Synthetic oligonucleotide
  Target: SCNA; (+) strand; PAM type: NRG; PAM sequence: CGG
ctcactgcagccccagcttc

SEQ ID NO: 32146 - DNA, 20 bp, Artificial Sequence
  Description of Artificial Sequence: Synthetic oligonucleotide
  Target: SCNA; (+) strand; PAM type: NRG; PAM sequence: GGG
tcactgcagccccagcttcc

SEQ ID NO: 32147 - DNA, 20 bp, Artificial Sequence
  Description of Artificial Sequence: Synthetic oligonucleotide
  Target: SCNA; (+) strand; PAM type: NRG; PAM sequence: AAG
cagccccagcttccgggttc

SEQ ID NO: 32148 - DNA, 20 bp, Artificial Sequence
  Description of Artificial Sequence: Synthetic oligonucleotide
  Target: SCNA; (+) strand; PAM type: NRG; PAM sequence: CAG
ttcaagcaattctcctgctt

SEQ ID NO: 32149 - DNA, 20 bp, Artificial Sequence
  Description of Artificial Sequence: Synthetic oligonucleotide
  Target: SCNA; (+) strand; PAM type: NRG; PAM sequence: GAG
ttctcctgcttcagtttctt

SEQ ID NO: 32150 - DNA, 20 bp, Artificial Sequence
  Description of Artificial Sequence: Synthetic oligonucleotide
  Target: SCNA; (+) strand; PAM type: NRG; PAM sequence: TAG
tcctgcttcagtttcttgag

SEQ ID NO: 32151 - DNA, 20 bp, Artificial Sequence
  Description of Artificial Sequence: Synthetic oligonucleotide
  Target: SCNA; (+) strand; PAM type: NRG; PAM sequence: TGG
gcttcagtttcttgagtagc

SEQ ID NO: 32152 - DNA, 20 bp, Artificial Sequence
  Description of Artificial Sequence: Synthetic oligonucleotide
  Target: SCNA; (+) strand; PAM type: NRG; PAM sequence: GGG
cttcagtttcttgagtagct

SEQ ID NO: 32153 - DNA, 20 bp, Artificial Sequence
  Description of Artificial Sequence: Synthetic oligonucleotide
  Target: SCNA; (+) strand; PAM type: NRG; PAM sequence: CAG
tcttgagtagctgggattac

SEQ ID NO: 32154 - DNA, 20 bp, Artificial Sequence
  Description of Artificial Sequence: Synthetic oligonucleotide
  Target: SCNA; (+) strand; PAM type: NRG; PAM sequence: CAG
ccagcgcccatcaccacacc

SEQ ID NO: 32155 - DNA, 20 bp, Artificial Sequence
  Description of Artificial Sequence: Synthetic oligonucleotide
  Target: SCNA; (+) strand; PAM type: NRG; PAM sequence: TAG
ccagctaatttctgtatttt

SEQ ID NO: 32156 - DNA, 20 bp, Artificial Sequence
  Description of Artificial Sequence: Synthetic oligonucleotide
  Target: SCNA; (+) strand; PAM type: NRG; PAM sequence: TAG
gctaatttctgtatttttag

SEQ ID NO: 32157 - DNA, 20 bp, Artificial Sequence
  Description of Artificial Sequence: Synthetic oligonucleotide
  Target: SCNA; (+) strand; PAM type: NRG; PAM sequence: GAG
taatttctgtatttttagta

SEQ ID NO: 32158 - DNA, 20 bp, Artificial Sequence
  Description of Artificial Sequence: Synthetic oligonucleotide
  Target: SCNA; (+) strand; PAM type: NRG; PAM sequence: TGG
ttctgtatttttagtagaga

SEQ ID NO: 32159 - DNA, 20 bp, Artificial Sequence
  Description of Artificial Sequence: Synthetic oligonucleotide
  Target: SCNA; (+) strand; PAM type: NRG; PAM sequence: GGG
tctgtatttttagtagagat

SEQ ID NO: 32160 - DNA, 20 bp, Artificial Sequence
  Description of Artificial Sequence: Synthetic oligonucleotide
  Target: SCNA; (+) strand; PAM type: NRG; PAM sequence: TGG
agagatgggtttcaccatgt

SEQ ID NO: 32161 - DNA, 20 bp, Artificial Sequence
  Description of Artificial Sequence: Synthetic oligonucleotide
  Target: SCNA; (+) strand; PAM type: NRG; PAM sequence: TAG
atgggtttcaccatgttggc

SEQ ID NO: 32162 - DNA, 20 bp, Artificial Sequence
  Description of Artificial Sequence: Synthetic oligonucleotide
  Target: SCNA; (+) strand; PAM type: NRG; PAM sequence: AGG
tgggtttcaccatgttggct

SEQ ID NO: 32163 - DNA, 20 bp, Artificial Sequence
  Description of Artificial Sequence: Synthetic oligonucleotide
  Target: SCNA; (+) strand; PAM type: NRG; PAM sequence: AAG
tgtctctatcccctgtcctc

SEQ ID NO: 32164 - DNA, 20 bp, Artificial Sequence
  Description of Artificial Sequence: Synthetic oligonucleotide
  Target: SCNA; (+) strand; PAM type: NRG; PAM sequence: AAG
ccctgcaacttgacctccaa

SEQ ID NO: 32165 - DNA, 20 bp, Artificial Sequence
  Description of Artificial Sequence: Synthetic oligonucleotide
  Target: SCNA; (+) strand; PAM type: NRG; PAM sequence: TGG
aacttgacctccaaaagtgc

SEQ ID NO: 32166 - DNA, 20 bp, Artificial Sequence
  Description of Artificial Sequence: Synthetic oligonucleotide
  Target: SCNA; (+) strand; PAM type: NRG; PAM sequence: GGG
acttgacctccaaaagtgct

SEQ ID NO: 32167 - DNA, 20 bp, Artificial Sequence
  Description of Artificial Sequence: Synthetic oligonucleotide
  Target: SCNA; (+) strand; PAM type: NRG; PAM sequence: TAG
ctccaaaagtgctgggatta

SEQ ID NO: 32168 - DNA, 20 bp, Artificial Sequence
  Description of Artificial Sequence: Synthetic oligonucleotide
  Target: SCNA; (+) strand; PAM type: NRG; PAM sequence: AGG
tccaaaagtgctgggattat

SEQ ID NO: 32169 - DNA, 20 bp, Artificial Sequence
  Description of Artificial Sequence: Synthetic oligonucleotide
  Target: SCNA; (+) strand; PAM type: NRG; PAM sequence: GAG
agtgctgggattataggcat

SEQ ID NO: 32170 - DNA, 20 bp, Artificial Sequence
  Description of Artificial Sequence: Synthetic oligonucleotide
  Target: SCNA; (+) strand; PAM type: NRG; PAM sequence: TGG
taggcatgagccaccatgcc

SEQ ID NO: 32171 - DNA, 20 bp, Artificial Sequence
  Description of Artificial Sequence: Synthetic oligonucleotide
  Target: SCNA; (+) strand; PAM type: NRG; PAM sequence: TAG
cactttctgttgtaattctt

SEQ ID NO: 32172 - DNA, 20 bp, Artificial Sequence
  Description of Artificial Sequence: Synthetic oligonucleotide
  Target: SCNA; (+) strand; PAM type: NRG; PAM sequence: AGG
actttctgttgtaattcttt

SEQ ID NO: 32173 - DNA, 20 bp, Artificial Sequence
  Description of Artificial Sequence: Synthetic oligonucleotide
  Target: SCNA; (+) strand; PAM type: NRG; PAM sequence: TAG
cttctttgtatgtttttaat

SEQ ID NO: 32174 - DNA, 20 bp, Artificial Sequence
  Description of Artificial Sequence: Synthetic oligonucleotide
  Target: SCNA; (+) strand; PAM type: NRG; PAM sequence: TAG
gtatgtttttaattagcatg

SEQ ID NO: 32175 - DNA, 20 bp, Artificial Sequence
  Description of Artificial Sequence: Synthetic oligonucleotide
  Target: SCNA; (+) strand; PAM type: NRG; PAM sequence: TAG
ttaattagcatgtagttata

SEQ ID NO: 32176 - DNA, 20 bp, Artificial Sequence
  Description of Artificial Sequence: Synthetic oligonucleotide
  Target: SCNA; (+) strand; PAM type: NRG; PAM sequence: TAG
tatagttatatatttacgtt

SEQ ID NO: 32177 - DNA, 20 bp, Artificial Sequence
  Description of Artificial Sequence: Synthetic oligonucleotide
  Target: SCNA; (+) strand; PAM type: NRG; PAM sequence: AAG
ttacgtttagatatacctcc

SEQ ID NO: 32178 - DNA, 20 bp, Artificial Sequence
  Description of Artificial Sequence: Synthetic oligonucleotide
  Target: SCNA; (+) strand; PAM type: NRG; PAM sequence: TAG
cgtttagatatacctccaag

SEQ ID NO: 32179 - DNA, 20 bp, Artificial Sequence
  Description of Artificial Sequence: Synthetic oligonucleotide
  Target: SCNA; (+) strand; PAM type: NRG; PAM sequence: AAG
agtagccaatattctacatg

SEQ ID NO: 32180 - DNA, 20 bp, Artificial Sequence
  Description of Artificial Sequence: Synthetic oligonucleotide
  Target: SCNA; (+) strand; PAM type: NRG; PAM sequence: AAG
atattctacatgaagtgata

SEQ ID NO: 32181 - DNA, 20 bp, Artificial Sequence
  Description of Artificial Sequence: Synthetic oligonucleotide
  Target: SCNA; (+) strand; PAM type: NRG; PAM sequence: AGG
tattctacatgaagtgataa

SEQ ID NO: 32182 - DNA, 20 bp, Artificial Sequence
  Description of Artificial Sequence: Synthetic oligonucleotide
  Target: SCNA; (+) strand; PAM type: NRG; PAM sequence: AAG
tttatccctgaaattatgaa

SEQ ID NO: 32183 - DNA, 20 bp, Artificial Sequence
  Description of Artificial Sequence: Synthetic oligonucleotide
  Target: SCNA; (+) strand; PAM type: NRG; PAM sequence: CAG
ttctttcttgcattgtgcta

SEQ ID NO: 32184 - DNA, 20 bp, Artificial Sequence
  Description of Artificial Sequence: Synthetic oligonucleotide
  Target: SCNA; (+) strand; PAM type: NRG; PAM sequence: CGG
tgctacagtacacacataca

SEQ ID NO: 32185 - DNA, 20 bp, Artificial Sequence
  Description of Artificial Sequence: Synthetic oligonucleotide
  Target: SCNA; (+) strand; PAM type: NRG; PAM sequence: TGG
gaatgcacacacatgcacac

SEQ ID NO: 32186 - DNA, 20 bp, Artificial Sequence
  Description of Artificial Sequence: Synthetic oligonucleotide
  Target: SCNA; (+) strand; PAM type: NRG; PAM sequence: GGG
aatgcacacacatgcacact

SEQ ID NO: 32187 - DNA, 20 bp, Artificial Sequence
  Description of Artificial Sequence: Synthetic oligonucleotide
  Target: SCNA; (+) strand; PAM type: NRG; PAM sequence: TAG
tctgctaattatcatttcct

SEQ ID NO: 32188 - DNA, 20 bp, Artificial Sequence
  Description of Artificial Sequence: Synthetic oligonucleotide
  Target: SCNA; (+) strand; PAM type: NRG; PAM sequence: AAG
catatcattccccaacccct

SEQ ID NO: 32189 - DNA, 20 bp, Artificial Sequence
  Description of Artificial Sequence: Synthetic oligonucleotide
  Target: SCNA; (+) strand; PAM type: NRG; PAM sequence: CAG
taagccacctgtgtccatac

SEQ ID NO: 32190 - DNA, 20 bp, Artificial Sequence
  Description of Artificial Sequence: Synthetic oligonucleotide
  Target: SCNA; (+) strand; PAM type: NRG; PAM sequence: CAG
ccagtcttcccactgcctac

SEQ ID NO: 32191 - DNA, 20 bp, Artificial Sequence
  Description of Artificial Sequence: Synthetic oligonucleotide
  Target: SCNA; (+) strand; PAM type: NRG; PAM sequence: CAG
actgcctaccagccccatgt

SEQ ID NO: 32192 - DNA, 20 bp, Artificial Sequence
  Description of Artificial Sequence: Synthetic oligonucleotide
  Target: SCNA; (+) strand; PAM type: NRG; PAM sequence: CAG
ccatgtcagatgacctccat

SEQ ID NO: 32193 - DNA, 20 bp, Artificial Sequence
  Description of Artificial Sequence: Synthetic oligonucleotide
  Target: SCNA; (+) strand; PAM type: NRG; PAM sequence: TAG
tgtcagatgacctccatcag

SEQ ID NO: 32194 - DNA, 20 bp, Artificial Sequence
  Description of Artificial Sequence: Synthetic oligonucleotide
  Target: SCNA; (+) strand; PAM type: NRG; PAM sequence: TGG
atcagtagtatctccattta

SEQ ID NO: 32195 - DNA, 20 bp, Artificial Sequence
  Description of Artificial Sequence: Synthetic oligonucleotide
  Target: SCNA; (+) strand; PAM type: NRG; PAM sequence: TAG
tgtctcgcctttctgacaca

SEQ ID NO: 32196 - DNA, 20 bp, Artificial Sequence
  Description of Artificial Sequence: Synthetic oligonucleotide
  Target: SCNA; (+) strand; PAM type: NRG; PAM sequence: AAG
cctttctgacacatagtaac

SEQ ID NO: 32197 - DNA, 20 bp, Artificial Sequence
  Description of Artificial Sequence: Synthetic oligonucleotide
  Target: SCNA; (+) strand; PAM type: NRG; PAM sequence: GAG
tctgacacatagtaacaagt

SEQ ID NO: 32198 - DNA, 20 bp, Artificial Sequence
  Description of Artificial Sequence: Synthetic oligonucleotide
  Target: SCNA; (+) strand; PAM type: NRG; PAM sequence: AGG
ctgacacatagtaacaagtg

SEQ ID NO: 32199 - DNA, 20 bp, Artificial Sequence
  Description of Artificial Sequence: Synthetic oligonucleotide
  Target: SCNA; (+) strand; PAM type: NRG; PAM sequence: AAG
atagtaacaagtgaggtgtt

SEQ ID NO: 32200 - DNA, 20 bp, Artificial Sequence
  Description of Artificial Sequence: Synthetic oligonucleotide
  Target: SCNA; (+) strand; PAM type: NRG; PAM sequence: AAG
agtgaggtgttaagactaac

SEQ ID NO: 32201 - DNA, 20 bp, Artificial Sequence
  Description of Artificial Sequence: Synthetic oligonucleotide
  Target: SCNA; (+) strand; PAM type: NRG; PAM sequence: GAG
tgaggtgttaagactaacaa

SEQ ID NO: 32202 - DNA, 20 bp, Artificial Sequence
  Description of Artificial Sequence: Synthetic oligonucleotide
  Target: SCNA; (+) strand; PAM type: NRG; PAM sequence: AAG
gtgttaagactaacaagaga

SEQ ID NO: 32203 - DNA, 20 bp, Artificial Sequence
  Description of Artificial Sequence: Synthetic oligonucleotide
  Target: SCNA; (+) strand; PAM type: NRG; PAM sequence: AAG
ttaagactaacaagagaaag

SEQ ID NO: 32204 - DNA, 20 bp, Artificial Sequence
  Description of Artificial Sequence: Synthetic oligonucleotide
  Target: SCNA; (+) strand; PAM type: NRG; PAM sequence: AGG
taagactaacaagagaaaga

SEQ ID NO: 32205 - DNA, 20 bp, Artificial Sequence
  Description of Artificial Sequence: Synthetic oligonucleotide
  Target: SCNA; (+) strand; PAM type: NRG; PAM sequence: TGG
aagaaggcattattcttatc

SEQ ID NO: 32206 - DNA, 20 bp, Artificial Sequence
  Description of Artificial Sequence: Synthetic oligonucleotide
  Target: SCNA; (+) strand; PAM type: NRG; PAM sequence: TAG
aggcattattcttatctggc

SEQ ID NO: 32207 - DNA, 20 bp, Artificial Sequence
  Description of Artificial Sequence: Synthetic oligonucleotide
  Target: SCNA; (+) strand; PAM type: NRG; PAM sequence: AAG
attattcttatctggctaga

SEQ ID NO: 32208 - DNA, 20 bp, Artificial Sequence
  Description of Artificial Sequence: Synthetic oligonucleotide
  Target: SCNA; (+) strand; PAM type: NRG; PAM sequence: CAG
ctggctagaaagaaaacaat

SEQ ID NO: 32209 - DNA, 20 bp, Artificial Sequence
  Description of Artificial Sequence: Synthetic oligonucleotide
  Target: SCNA; (+) strand; PAM type: NRG; PAM sequence: AAG
cagcaacttgtcttttattt

SEQ ID NO: 32210 - DNA, 20 bp, Artificial Sequence
  Description of Artificial Sequence: Synthetic oligonucleotide
  Target: SCNA; (+) strand; PAM type: NRG; PAM sequence: AGG
agcaacttgtcttttattta

SEQ ID NO: 32211 - DNA, 20 bp, Artificial Sequence
  Description of Artificial Sequence: Synthetic oligonucleotide
  Target: SCNA; (+) strand; PAM type: NRG; PAM sequence: GGG
gcaacttgtcttttatttaa

SEQ ID NO: 32212 - DNA, 20 bp, Artificial Sequence
  Description of Artificial Sequence: Synthetic oligonucleotide
  Target: SCNA; (+) strand; PAM type: NRG; PAM sequence: AAG
acttgtcttttatttaaggg

SEQ ID NO: 32213 - DNA, 20 bp, Artificial Sequence
  Description of Artificial Sequence: Synthetic oligonucleotide
  Target: SCNA; (+) strand; PAM type: NRG; PAM sequence: AAG
tgtcttttatttaagggaag

SEQ ID NO: 32214 - DNA, 20 bp, Artificial Sequence
  Description of Artificial Sequence: Synthetic oligonucleotide
  Target: SCNA; (+) strand; PAM type: NRG; PAM sequence: AGG
gtcttttatttaagggaaga

SEQ ID NO: 32215 - DNA, 20 bp, Artificial Sequence
  Description of Artificial Sequence: Synthetic oligonucleotide
  Target: SCNA; (+) strand; PAM type: NRG; PAM sequence: AAG
cttcactctactatattttc

SEQ ID NO: 32216 - DNA, 20 bp, Artificial Sequence
  Description of Artificial Sequence: Synthetic oligonucleotide
  Target: SCNA; (+) strand; PAM type: NRG; PAM sequence: CAG
aagatattccaaaactgcaa

SEQ ID NO: 32217 - DNA, 20 bp, Artificial Sequence
  Description of Artificial Sequence: Synthetic oligonucleotide
  Target: SCNA; (+) strand; PAM type: NRG; PAM sequence: AAG
tactttcatctattaccaaa

SEQ ID NO: 32218 - DNA, 20 bp, Artificial Sequence
  Description of Artificial Sequence: Synthetic oligonucleotide
  Target: SCNA; (+) strand; PAM type: NRG; PAM sequence: AGG
actttcatctattaccaaaa

SEQ ID NO: 32219 - DNA, 20 bp, Artificial Sequence
  Description of Artificial Sequence: Synthetic oligonucleotide
  Target: SCNA; (+) strand; PAM type: NRG; PAM sequence: TAG
ttaccaaaaaggccaacttt

SEQ ID NO: 32220 - DNA, 20 bp, Artificial Sequence
  Description of Artificial Sequence: Synthetic oligonucleotide
  Target: SCNA; (+) strand; PAM type: NRG; PAM sequence: GAG
aaaaggccaacttttagatt

SEQ ID NO: 32221 - DNA, 20 bp, Artificial Sequence
  Description of Artificial Sequence: Synthetic oligonucleotide
  Target: SCNA; (+) strand; PAM type: NRG; PAM sequence: AGG
aaaggccaacttttagattg

SEQ ID NO: 32222 - DNA, 20 bp, Artificial Sequence
  Description of Artificial Sequence: Synthetic oligonucleotide
  Target: SCNA; (+) strand; PAM type: NRG; PAM sequence: CAG
agattgaggcaatgaaaact

SEQ ID NO: 32223 - DNA, 20 bp, Artificial Sequence
  Description of Artificial Sequence: Synthetic oligonucleotide
  Target: SCNA; (+) strand; PAM type: NRG; PAM sequence: TGG
tgaaaactcagaaacttttt

SEQ ID NO: 32224 - DNA, 20 bp, Artificial Sequence
  Description of Artificial Sequence: Synthetic oligonucleotide
  Target: SCNA; (+) strand; PAM type: NRG; PAM sequence: CAG
aacttttttggaatgacctt

SEQ ID NO: 32225 - DNA, 20 bp, Artificial Sequence
  Description of Artificial Sequence: Synthetic oligonucleotide
  Target: SCNA; (+) strand; PAM type: NRG; PAM sequence: GAG
ttggaatgaccttcagattt

SEQ ID NO: 32226 - DNA, 20 bp, Artificial Sequence
  Description of Artificial Sequence: Synthetic oligonucleotide
  Target: SCNA; (+) strand; PAM type: NRG; PAM sequence: CAG
ccactgtttcaacaatattt

SEQ ID NO: 32227 - DNA, 20 bp, Artificial Sequence
  Description of Artificial Sequence: Synthetic oligonucleotide
  Target: SCNA; (+) strand; PAM type: NRG; PAM sequence: TAG
attctttctctatattcatt

SEQ ID NO: 32228 - DNA, 20 bp, Artificial Sequence
  Description of Artificial Sequence: Synthetic oligonucleotide
  Target: SCNA; (+) strand; PAM type: NRG; PAM sequence: AGG
ttctttctctatattcattt

SEQ ID NO: 32229 - DNA, 20 bp, Artificial Sequence
  Description of Artificial Sequence: Synthetic oligonucleotide
  Target: SCNA; (+) strand; PAM type: NRG; PAM sequence: GGG
tctttctctatattcattta

SEQ ID NO: 32230 - DNA, 20 bp, Artificial Sequence
  Description of Artificial Sequence: Synthetic oligonucleotide
  Target: SCNA; (+) strand; PAM type: NRG; PAM sequence: TAG
ttgattctgaaaaatacaaa

SEQ ID NO: 32231 - DNA, 20 bp, Artificial Sequence
  Description of Artificial Sequence: Synthetic oligonucleotide
  Target: SCNA; (+) strand; PAM type: NRG; PAM sequence: GAG
caaatagcttcctttctcct

SEQ ID NO: 32232 - DNA, 20 bp, Artificial Sequence
  Description of Artificial Sequence: Synthetic oligonucleotide
  Target: SCNA; (+) strand; PAM type: NRG; PAM sequence: TAG
tagcttcctttctcctgagc

SEQ ID NO: 32233 - DNA, 20 bp, Artificial Sequence
  Description of Artificial Sequence: Synthetic oligonucleotide
  Target: SCNA; (+) strand; PAM type: NRG; PAM sequence: AGG
agcttcctttctcctgagct

SEQ ID NO: 32234 - DNA, 20 bp, Artificial Sequence
  Description of Artificial Sequence: Synthetic oligonucleotide
  Target: SCNA; (+) strand; PAM type: NRG; PAM sequence: TAG
tcctgagctaggactgtatt

SEQ ID NO: 32235 - DNA, 20 bp, Artificial Sequence
  Description of Artificial Sequence: Synthetic oligonucleotide
  Target: SCNA; (+) strand; PAM type: NRG; PAM sequence: AAG
tgagctaggactgtatttag

SEQ ID NO: 32236 - DNA, 20 bp, Artificial Sequence
  Description of Artificial Sequence: Synthetic oligonucleotide
  Target: SCNA; (+) strand; PAM type: NRG; PAM sequence: AGG
gagctaggactgtatttaga

SEQ ID NO: 32237 - DNA, 20 bp, Artificial Sequence
  Description of Artificial Sequence: Synthetic oligonucleotide
  Target: SCNA; (+) strand; PAM type: NRG; PAM sequence: GGG
agctaggactgtatttagaa

SEQ ID NO: 32238 - DNA, 20 bp, Artificial Sequence
  Description of Artificial Sequence: Synthetic oligonucleotide
  Target: SCNA; (+) strand; PAM type: NRG; PAM sequence: TAG
atttagaagggaataaattg

SEQ ID NO: 32239 - DNA, 20 bp, Artificial Sequence
  Description of Artificial Sequence: Synthetic oligonucleotide
  Target: SCNA; (+) strand; PAM type: NRG; PAM sequence: CAG
tctttttttgtgctacgaca

SEQ ID NO: 32240 - DNA, 20 bp, Artificial Sequence
  Description of Artificial Sequence: Synthetic oligonucleotide
  Target: SCNA; (+) strand; PAM type: NRG; PAM sequence: TAG
ttttttgtgctacgacacag

SEQ ID NO: 32241 - DNA, 20 bp, Artificial Sequence
  Description of Artificial Sequence: Synthetic oligonucleotide
  Target: SCNA; (+) strand; PAM type: NRG; PAM sequence: TAG
gctacgacacagtagcaatg

SEQ ID NO: 32242 - DNA, 20 bp, Artificial Sequence
  Description of Artificial Sequence: Synthetic oligonucleotide
  Target: SCNA; (+) strand; PAM type: NRG; PAM sequence: AAG
cacagtagcaatgtagattg

SEQ ID NO: 32243 - DNA, 20 bp, Artificial Sequence
  Description of Artificial Sequence: Synthetic oligonucleotide
  Target: SCNA; (+) strand; PAM type: NRG; PAM sequence: AGG
acagtagcaatgtagattga

SEQ ID NO: 32244 - DNA, 20 bp, Artificial Sequence
  Description of Artificial Sequence: Synthetic oligonucleotide
  Target: SCNA; (+) strand; PAM type: NRG; PAM sequence: TAG
atgtatttttaaaattgcca

SEQ ID NO: 32245 - DNA, 20 bp, Artificial Sequence
  Description of Artificial Sequence: Synthetic oligonucleotide
  Target: SCNA; (+) strand; PAM type: NRG; PAM sequence: GAG
gtatttttaaaattgccata

SEQ ID NO: 32246 - DNA, 20 bp, Artificial Sequence
  Description of Artificial Sequence: Synthetic oligonucleotide
  Target: SCNA; (+) strand; PAM type: NRG; PAM sequence: TAG
agaattatttgtattaatca

SEQ ID NO: 32247 - DNA, 20 bp, Artificial Sequence
  Description of Artificial Sequence: Synthetic oligonucleotide
  Target: SCNA; (+) strand; PAM type: NRG; PAM sequence: AAG
tgtattaatcatagatttcc

SEQ ID NO: 32248 - DNA, 20 bp, Artificial Sequence
  Description of Artificial Sequence: Synthetic oligonucleotide
  Target: SCNA; (+) strand; PAM type: NRG; PAM sequence: AGG
gtattaatcatagatttcca

SEQ ID NO: 32249 - DNA, 20 bp, Artificial Sequence
  Description of Artificial Sequence: Synthetic oligonucleotide
  Target: SCNA; (+) strand; PAM type: NRG; PAM sequence: AAG
atagatttccaaggctgcaa

SEQ ID NO: 32250 - DNA, 20 bp, Artificial Sequence
  Description of Artificial Sequence: Synthetic oligonucleotide
  Target: SCNA; (+) strand; PAM type: NRG; PAM sequence: TAG
ccaaggctgcaaaagctaaa

SEQ ID NO: 32251 - DNA, 20 bp, Artificial Sequence
  Description of Artificial Sequence: Synthetic oligonucleotide
  Target: SCNA; (+) strand; PAM type: NRG; PAM sequence: AAG
gctgcaaaagctaaatagta

SEQ ID NO: 32252 - DNA, 20 bp, Artificial Sequence
  Description of Artificial Sequence: Synthetic oligonucleotide
  Target: SCNA; (+) strand; PAM type: NRG; PAM sequence: TGG
aatagtaaagcatataataa

SEQ ID NO: 32253 - DNA, 20 bp, Artificial Sequence
  Description of Artificial Sequence: Synthetic oligonucleotide
  Target: SCNA; (+) strand; PAM type: NRG; PAM sequence: TAG
agtaaagcatataataatgg

SEQ ID NO: 32254 - DNA, 20 bp, Artificial Sequence
  Description of Artificial Sequence: Synthetic oligonucleotide
  Target: SCNA; (+) strand; PAM type: NRG; PAM sequence: CAG
gttaatttgaaaaaaaattc

SEQ ID NO: 32255 - DNA, 20 bp, Artificial Sequence
  Description of Artificial Sequence: Synthetic oligonucleotide
  Target: SCNA; (+) strand; PAM type: NRG; PAM sequence: TAG
atttgaaaaaaaattccagc

SEQ ID NO: 32256 - DNA, 20 bp, Artificial Sequence
  Description of Artificial Sequence: Synthetic oligonucleotide
  Target: SCNA; (+) strand; PAM type: NRG; PAM sequence: GAG
aattccagctagcaaaacat

SEQ ID NO: 32257 - DNA, 20 bp, Artificial Sequence
  Description of Artificial Sequence: Synthetic oligonucleotide
  Target: SCNA; (+) strand; PAM type: NRG; PAM sequence: TAG
cagctagcaaaacatgagtc

SEQ ID NO: 32258 - DNA, 20 bp, Artificial Sequence
  Description of Artificial Sequence: Synthetic oligonucleotide
  Target: SCNA; (+) strand; PAM type: NRG; PAM sequence: TAG
gcaaaacatgagtctagatg

SEQ ID NO: 32259 - DNA, 20 bp, Artificial Sequence
  Description of Artificial Sequence: Synthetic oligonucleotide
  Target: SCNA; (+) strand; PAM type: NRG; PAM sequence: AAG
tatcatgttcaaaaatcaca

SEQ ID NO: 32260 - DNA, 20 bp, Artificial Sequence
  Description of Artificial Sequence: Synthetic oligonucleotide
  Target: SCNA; (+) strand; PAM type: NRG; PAM sequence: CAG
catgttcaaaaatcacaaag

SEQ ID NO: 32261 - DNA, 20 bp, Artificial Sequence
  Description of Artificial Sequence: Synthetic oligonucleotide
  Target: SCNA; (+) strand; PAM type: NRG; PAM sequence: CAG
aaaatcacaaagcagattgc

SEQ ID NO: 32262 - DNA, 20 bp, Artificial Sequence
  Description of Artificial Sequence: Synthetic oligonucleotide
  Target: SCNA; (+) strand; PAM type: NRG; PAM sequence: AAG
tgccagcaaaaaattgaacc

SEQ ID NO: 32263 - DNA, 20 bp, Artificial Sequence
  Description of Artificial Sequence: Synthetic oligonucleotide
  Target: SCNA; (+) strand; PAM type: NRG; PAM sequence: CAG
tgaaccaagtttttcccctt

SEQ ID NO: 32264 - DNA, 20 bp, Artificial Sequence
  Description of Artificial Sequence: Synthetic oligonucleotide
  Target: SCNA; (+) strand; PAM type: NRG; PAM sequence: TAG
gtttttccccttcagaaaac

SEQ ID NO: 32265 - DNA, 20 bp, Artificial Sequence
  Description of Artificial Sequence: Synthetic oligonucleotide
  Target: SCNA; (+) strand; PAM type: NRG; PAM sequence: AAG
tcacacgtttataactatac

SEQ ID NO: 32266 - DNA, 20 bp, Artificial Sequence
  Description of Artificial Sequence: Synthetic oligonucleotide
  Target: SCNA; (+) strand; PAM type: NRG; PAM sequence: AGG
cacacgtttataactataca

SEQ ID NO: 32267 - DNA, 20 bp, Artificial Sequence
  Description of Artificial Sequence: Synthetic oligonucleotide
  Target: SCNA; (+) strand; PAM type: NRG; PAM sequence: GGG
acacgtttataactatacaa

SEQ ID NO: 32268 - DNA, 20 bp, Artificial Sequence
  Description of Artificial Sequence: Synthetic oligonucleotide
  Target: SCNA; (+) strand; PAM type: NRG; PAM sequence: AAG
agggtttccttgtttcatca

SEQ ID NO: 32269 - DNA, 20 bp, Artificial Sequence
  Description of Artificial Sequence: Synthetic oligonucleotide
  Target: SCNA; (+) strand; PAM type: NRG; PAM sequence: AAG
ccttgtttcatcaaagaaat

SEQ ID NO: 32270 - DNA, 20 bp, Artificial Sequence
  Description of Artificial Sequence: Synthetic oligonucleotide
  Target: SCNA; (+) strand; PAM type: NRG; PAM sequence: GAG
tcaaagaaataagtatgaat

SEQ ID NO: 32271 - DNA, 20 bp, Artificial Sequence
  Description of Artificial Sequence: Synthetic oligonucleotide
  Target: SCNA; (+) strand; PAM type: NRG; PAM sequence: CAG
aagaaataagtatgaatgag

SEQ ID NO: 32272 - DNA, 20 bp, Artificial Sequence
  Description of Artificial Sequence: Synthetic oligonucleotide
  Target: SCNA; (+) strand; PAM type: NRG; PAM sequence: TAG
tatgaatgagcagaatgttt

SEQ ID NO: 32273 - DNA, 20 bp, Artificial Sequence
  Description of Artificial Sequence: Synthetic oligonucleotide
  Target: SCNA; (+) strand; PAM type: NRG; PAM sequence: AAG
agcagaatgttttagtataa

SEQ ID NO: 32274 - DNA, 20 bp, Artificial Sequence
  Description of Artificial Sequence: Synthetic oligonucleotide
  Target: SCNA; (+) strand; PAM type: NRG; PAM sequence: AAG
ttttagtataaaagtttaca

SEQ ID NO: 32275 - DNA, 20 bp, Artificial Sequence
  Description of Artificial Sequence: Synthetic oligonucleotide
  Target: SCNA; (+) strand; PAM type: NRG; PAM sequence: CGG
ttacaaagtttattcacact

SEQ ID NO: 32276 - DNA, 20 bp, Artificial Sequence
  Description of Artificial Sequence: Synthetic oligonucleotide
  Target: SCNA; (+) strand; PAM type: NRG; PAM sequence: AAG
gtttattcacactcggaaca

SEQ ID NO: 32277 - DNA, 20 bp, Artificial Sequence
  Description of Artificial Sequence: Synthetic oligonucleotide
  Target: SCNA; (+) strand; PAM type: NRG; PAM sequence: AGG
tttattcacactcggaacaa

SEQ ID NO: 32278 - DNA, 20 bp, Artificial Sequence
  Description of Artificial Sequence: Synthetic oligonucleotide
  Target: SCNA; (+) strand; PAM type: NRG; PAM sequence: AAG
cacactcggaacaaaggaat

SEQ ID NO: 32279 - DNA, 20 bp, Artificial Sequence
  Description of Artificial Sequence: Synthetic oligonucleotide
  Target: SCNA; (+) strand; PAM type: NRG; PAM sequence: TAG
actcggaacaaaggaataag

SEQ ID NO: 32280 - DNA, 20 bp, Artificial Sequence
  Description of Artificial Sequence: Synthetic oligonucleotide
  Target: SCNA; (+) strand; PAM type: NRG; PAM sequence: AGG
ctcggaacaaaggaataagt

SEQ ID NO: 32281 - DNA, 20 bp, Artificial Sequence
  Description of Artificial Sequence: Synthetic oligonucleotide
  Target: SCNA; (+) strand; PAM type: NRG; PAM sequence: AAG
aaaggaataagtaggaaaaa

SEQ ID NO: 32282 - DNA, 20 bp, Artificial Sequence
  Description of Artificial Sequence: Synthetic oligonucleotide
  Target: SCNA; (+) strand; PAM type: NRG; PAM sequence: GAG
aggaataagtaggaaaaaaa

SEQ ID NO: 32283 - DNA, 20 bp, Artificial Sequence
  Description of Artificial Sequence: Synthetic oligonucleotide
  Target: SCNA; (+) strand; PAM type: NRG; PAM sequence: CAG
ccctctcgtttgtctccaat

SEQ ID NO: 32284 - DNA, 20 bp, Artificial Sequence
  Description of Artificial Sequence: Synthetic oligonucleotide
  Target: SCNA; (+) strand; PAM type: NRG; PAM sequence: AAG
tccttttaatgatatatcat

SEQ ID NO: 32285 - DNA, 20 bp, Artificial Sequence
  Description of Artificial Sequence: Synthetic oligonucleotide
  Target: SCNA; (+) strand; PAM type: NRG; PAM sequence: TAG
ttttaatgatatatcataag

SEQ ID NO: 32286 - DNA, 20 bp, Artificial Sequence
  Description of Artificial Sequence: Synthetic oligonucleotide
  Target: SCNA; (+) strand; PAM type: NRG; PAM sequence: TAG
tcataagtagcttcatgctt

SEQ ID NO: 32287 - DNA, 20 bp, Artificial Sequence
  Description of Artificial Sequence: Synthetic oligonucleotide
  Target: SCNA; (+) strand; PAM type: NRG; PAM sequence: TAG
tacatcattaataatcaaaa

SEQ ID NO: 32288 - DNA, 20 bp, Artificial Sequence
  Description of Artificial Sequence: Synthetic oligonucleotide
  Target: SCNA; (+) strand; PAM type: NRG; PAM sequence: TAG
caaaatagtctttctgtctt

SEQ ID NO: 32289 - DNA, 20 bp, Artificial Sequence
  Description of Artificial Sequence: Synthetic oligonucleotide
  Target: SCNA; (+) strand; PAM type: NRG; PAM sequence: AAG
tctttagttttgctgtctct

SEQ ID NO: 32290 - DNA, 20 bp, Artificial Sequence
  Description of Artificial Sequence: Synthetic oligonucleotide
  Target: SCNA; (+) strand; PAM type: NRG; PAM sequence: CAG
tagttttgctgtctctaagt

SEQ ID NO: 32291 - DNA, 20 bp, Artificial Sequence
  Description of Artificial Sequence: Synthetic oligonucleotide
  Target: SCNA; (+) strand; PAM type: NRG; PAM sequence: AAG
tgctctaaaatacaaatgtt

SEQ ID NO: 32292 - DNA, 20 bp, Artificial Sequence
  Description of Artificial Sequence: Synthetic oligonucleotide
  Target: SCNA; (+) strand; PAM type: NRG; PAM sequence: CAG
caaatgttaagatgattctt

SEQ ID NO: 32293 - DNA, 20 bp, Artificial Sequence
  Description of Artificial Sequence: Synthetic oligonucleotide
  Target: SCNA; (+) strand; PAM type: NRG; PAM sequence: AGG
aaatgttaagatgattcttc

SEQ ID NO: 32294 - DNA, 20 bp, Artificial Sequence
  Description of Artificial Sequence: Synthetic oligonucleotide
  Target: SCNA; (+) strand; PAM type: NRG; PAM sequence: GAG
atgttaagatgattcttcag

SEQ ID NO: 32295 - DNA, 20 bp, Artificial Sequence
  Description of Artificial Sequence: Synthetic oligonucleotide
  Target: SCNA; (+) strand; PAM type: NRG; PAM sequence: TAG
cacctgtactataatgctac

SEQ ID NO: 32296 - DNA, 20 bp, Artificial Sequence
  Description of Artificial Sequence: Synthetic oligonucleotide
  Target: SCNA; (+) strand; PAM type: NRG; PAM sequence: GAG
tactataatgctactagcat

SEQ ID NO: 32297 - DNA, 20 bp, Artificial Sequence
  Description of Artificial Sequence: Synthetic oligonucleotide
  Target: SCNA; (+) strand; PAM type: NRG; PAM sequence: GAG
ctataatgctactagcatga

SEQ ID NO: 32298 - DNA, 20 bp, Artificial Sequence
  Description of Artificial Sequence: Synthetic oligonucleotide
  Target: SCNA; (+) strand; PAM type: NRG; PAM sequence: TAG
ctagcatgagagcacccacc

SEQ ID NO: 32299 - DNA, 20 bp, Artificial Sequence
  Description of Artificial Sequence: Synthetic oligonucleotide
  Target: SCNA; (+) strand; PAM type: NRG; PAM sequence: AAG
ccacctagccttcttatctc

SEQ ID NO: 32300 - DNA, 20 bp, Artificial Sequence
  Description of Artificial Sequence: Synthetic oligonucleotide
  Target: SCNA; (+) strand; PAM type: NRG; PAM sequence: TAG
tcccctctttaattcaccct

SEQ ID NO: 32301 - DNA, 20 bp, Artificial Sequence
  Description of Artificial Sequence: Synthetic oligonucleotide
  Target: SCNA; (+) strand; PAM type: NRG; PAM sequence: CAG
ctctttaattcacccttaga

SEQ ID NO: 32302 - DNA, 20 bp, Artificial Sequence
  Description of Artificial Sequence: Synthetic oligonucleotide
  Target: SCNA; (+) strand; PAM type: NRG; PAM sequence: GAG
ctttaattcacccttagaca

SEQ ID NO: 32303 - DNA, 20 bp, Artificial Sequence
  Description of Artificial Sequence: Synthetic oligonucleotide
  Target: SCNA; (+) strand; PAM type: NRG; PAM sequence: CAG
aattcacccttagacagaga

SEQ ID NO: 32304 - DNA, 20 bp, Artificial Sequence
  Description of Artificial Sequence: Synthetic oligonucleotide
  Target: SCNA; (+) strand; PAM type: NRG; PAM sequence: GAG
ttcacccttagacagagaca

SEQ ID NO: 32305 - DNA, 20 bp, Artificial Sequence
  Description of Artificial Sequence: Synthetic oligonucleotide
  Target: SCNA; (+) strand; PAM type: NRG; PAM sequence: GAG
cacccttagacagagacaga

SEQ ID NO: 32306 - DNA, 20 bp, Artificial Sequence
  Description of Artificial Sequence: Synthetic oligonucleotide
  Target: SCNA; (+) strand; PAM type: NRG; PAM sequence: AGG
acccttagacagagacagag

SEQ ID NO: 32307 - DNA, 20 bp, Artificial Sequence
  Description of Artificial Sequence: Synthetic oligonucleotide
  Target: SCNA; (+) strand; PAM type: NRG; PAM sequence: GGG
cccttagacagagacagaga

SEQ ID NO: 32308 - DNA, 20 bp, Artificial Sequence
  Description of Artificial Sequence: Synthetic oligonucleotide
  Target: SCNA; (+) strand; PAM type: NRG; PAM sequence: TGG
tcttttcctgaattaatatg

SEQ ID NO: 32309 - DNA, 20 bp, Artificial Sequence
  Description of Artificial Sequence: Synthetic oligonucleotide
  Target: SCNA; (+) strand; PAM type: NRG; PAM sequence: TAG
gtggtttttgccccatgctt

SEQ ID NO: 32310 - DNA, 20 bp, Artificial Sequence
  Description of Artificial Sequence: Synthetic oligonucleotide
  Target: SCNA; (+) strand; PAM type: NRG; PAM sequence: CAG
cacatgtgaatccatttgtc

SEQ ID NO: 32311 - DNA, 20 bp, Artificial Sequence
  Description of Artificial Sequence: Synthetic oligonucleotide
  Target: SCNA; (+) strand; PAM type: NRG; PAM sequence: AAG
gcctttgctcacctgtgtac

SEQ ID NO: 32312 - DNA, 20 bp, Artificial Sequence
  Description of Artificial Sequence: Synthetic oligonucleotide
  Target: SCNA; (+) strand; PAM type: NRG; PAM sequence: AAG
tttgctcacctgtgtacaag

SEQ ID NO: 32313 - DNA, 20 bp, Artificial Sequence
  Description of Artificial Sequence: Synthetic oligonucleotide
  Target: SCNA; (+) strand; PAM type: NRG; PAM sequence: GAG
tgctcacctgtgtacaagaa

SEQ ID NO: 32314 - DNA, 20 bp, Artificial Sequence
  Description of Artificial Sequence: Synthetic oligonucleotide
  Target: SCNA; (+) strand; PAM type: NRG; PAM sequence: CAG
gtacaagaagagctacataa

SEQ ID NO: 32315 - DNA, 20 bp, Artificial Sequence
  Description of Artificial Sequence: Synthetic oligonucleotide
  Target: SCNA; (+) strand; PAM type: NRG; PAM sequence: AAG
agagctacataacagatcaa

SEQ ID NO: 32316 - DNA, 20 bp, Artificial Sequence
  Description of Artificial Sequence: Synthetic oligonucleotide
  Target: SCNA; (+) strand; PAM type: NRG; PAM sequence: AGG
gagctacataacagatcaaa

SEQ ID NO: 32317 - DNA, 20 bp, Artificial Sequence
  Description of Artificial Sequence: Synthetic oligonucleotide
  Target: SCNA; (+) strand; PAM type: NRG; PAM sequence: AAG
acagatcaaaaggaacatca

SEQ ID NO: 32318 - DNA, 20 bp, Artificial Sequence
  Description of Artificial Sequence: Synthetic oligonucleotide
  Target: SCNA; (+) strand; PAM type: NRG; PAM sequence: AGG
cagatcaaaaggaacatcaa

SEQ ID NO: 32319 - DNA, 20 bp, Artificial Sequence
  Description of Artificial Sequence: Synthetic oligonucleotide
  Target: SCNA; (+) strand; PAM type: NRG; PAM sequence: TGG
aaaaggaacatcaaaggcgc

SEQ ID NO: 32320 - DNA, 20 bp, Artificial Sequence
  Description of Artificial Sequence: Synthetic oligonucleotide
  Target: SCNA; (+) strand; PAM type: NRG; PAM sequence: TAG
acatcaaaggcgctggttct

SEQ ID NO: 32321 - DNA, 20 bp, Artificial Sequence
  Description of Artificial Sequence: Synthetic oligonucleotide
  Target: SCNA; (+) strand; PAM type: NRG; PAM sequence: GAG
atcaaaggcgctggttctta

SEQ ID NO: 32322 - DNA, 20 bp, Artificial Sequence
  Description of Artificial Sequence: Synthetic oligonucleotide
  Target: SCNA; (+) strand; PAM type: NRG; PAM sequence: TGG
cctccaattctcgccacttc

SEQ ID NO: 32323 - DNA, 20 bp, Artificial Sequence
  Description of Artificial Sequence: Synthetic oligonucleotide
  Target: SCNA; (+) strand; PAM type: NRG; PAM sequence: GAG
ctggatgcactgtttcttat

SEQ ID NO: 32324 - DNA, 20 bp, Artificial Sequence
  Description of Artificial Sequence: Synthetic oligonucleotide
  Target: SCNA; (+) strand; PAM type: NRG; PAM sequence: TGG
gcctttttgctttctgcgta

SEQ ID NO: 32325 - DNA, 20 bp, Artificial Sequence
  Description of Artificial Sequence: Synthetic oligonucleotide
  Target: SCNA; (+) strand; PAM type: NRG; PAM sequence: GGG
cctttttgctttctgcgtat

SEQ ID NO: 32326 - DNA, 20 bp, Artificial Sequence
  Description of Artificial Sequence: Synthetic oligonucleotide
  Target: SCNA; (+) strand; PAM type: NRG; PAM sequence: CAG
tttctgcgtatgggcatctc

SEQ ID NO: 32327 - DNA, 20 bp, Artificial Sequence
  Description of Artificial Sequence: Synthetic oligonucleotide
  Target: SCNA; (+) strand; PAM type: NRG; PAM sequence: AAG
tatgggcatctccagtgcca

SEQ ID NO: 32328 - DNA, 20 bp, Artificial Sequence
  Description of Artificial Sequence: Synthetic oligonucleotide
  Target: SCNA; (+) strand; PAM type: NRG; PAM sequence: AAG
ggcatctccagtgccaaagt

SEQ ID NO: 32329 - DNA, 20 bp, Artificial Sequence
  Description of Artificial Sequence: Synthetic oligonucleotide
  Target: SCNA; (+) strand; PAM type: NRG; PAM sequence: GAG
catctccagtgccaaagtaa

SEQ ID NO: 32330 - DNA, 20 bp, Artificial Sequence
  Description of Artificial Sequence: Synthetic oligonucleotide
  Target: SCNA; (+) strand; PAM type: NRG; PAM sequence: AGG
atctccagtgccaaagtaag

SEQ ID NO: 32331 - DNA, 20 bp, Artificial Sequence
  Description of Artificial Sequence: Synthetic oligonucleotide
  Target: SCNA; (+) strand; PAM type: NRG; PAM sequence: GAG
ctccagtgccaaagtaagag

SEQ ID NO: 32332 - DNA, 20 bp, Artificial Sequence
  Description of Artificial Sequence: Synthetic oligonucleotide
  Target: SCNA; (+) strand; PAM type: NRG; PAM sequence: CAG
aaagtaagaggagatttctg

SEQ ID NO: 32333 - DNA, 20 bp, Artificial Sequence
  Description of Artificial Sequence: Synthetic oligonucleotide
  Target: SCNA; (+) strand; PAM type: NRG; PAM sequence: CAG
aggagatttctgcagaattt

SEQ ID NO: 32334 - DNA, 20 bp, Artificial Sequence
  Description of Artificial Sequence: Synthetic oligonucleotide
  Target: SCNA; (+) strand; PAM type: NRG; PAM sequence: AGG
ggagatttctgcagaatttc

SEQ ID NO: 32335 - DNA, 20 bp, Artificial Sequence
  Description of Artificial Sequence: Synthetic oligonucleotide
  Target: SCNA; (+) strand; PAM type: NRG; PAM sequence: AAG
gatttctgcagaatttcagg

SEQ ID NO: 32336 - DNA, 20 bp, Artificial Sequence
  Description of Artificial Sequence: Synthetic oligonucleotide
  Target: SCNA; (+) strand; PAM type: NRG; PAM sequence: TAG
atttcaggaagttaatatcc

SEQ ID NO: 32337 - DNA, 20 bp, Artificial Sequence
  Description of Artificial Sequence: Synthetic oligonucleotide
  Target: SCNA; (+) strand; PAM type: NRG; PAM sequence: TGG
tcaggaagttaatatcctag

SEQ ID NO: 32338 - DNA, 20 bp, Artificial Sequence
  Description of Artificial Sequence: Synthetic oligonucleotide
  Target: SCNA; (+) strand; PAM type: NRG; PAM sequence: CAG
ggaagttaatatcctagtgg

SEQ ID NO: 32339 - DNA, 20 bp, Artificial Sequence
  Description of Artificial Sequence: Synthetic oligonucleotide
  Target: SCNA; (+) strand; PAM type: NRG; PAM sequence: CAG
aatatcctagtggcagctct

SEQ ID NO: 32340 - DNA, 20 bp, Artificial Sequence
  Description of Artificial Sequence: Synthetic oligonucleotide
  Target: SCNA; (+) strand; PAM type: NRG; PAM sequence: TGG
tagtggcagctctcagacaa

SEQ ID NO: 32341 - DNA, 20 bp, Artificial Sequence
  Description of Artificial Sequence: Synthetic oligonucleotide
  Target: SCNA; (+) strand; PAM type: NRG; PAM sequence: GGG
agtggcagctctcagacaat

SEQ ID NO: 32342 - DNA, 20 bp, Artificial Sequence
  Description of Artificial Sequence: Synthetic oligonucleotide
  Target: SCNA; (+) strand; PAM type: NRG; PAM sequence: GAG
tggcagctctcagacaatgg

SEQ ID NO: 32343 - DNA, 20 bp, Artificial Sequence
  Description of Artificial Sequence: Synthetic oligonucleotide
  Target: SCNA; (+) strand; PAM type: NRG; PAM sequence: CAG
agctctcagacaatgggaga

SEQ ID NO: 32344 - DNA, 20 bp, Artificial Sequence
  Description of Artificial Sequence: Synthetic oligonucleotide
  Target: SCNA; (+) strand; PAM type: NRG; PAM sequence: AGG
gctctcagacaatgggagac

SEQ ID NO: 32345 - DNA, 20 bp, Artificial Sequence
  Description of Artificial Sequence: Synthetic oligonucleotide
  Target: SCNA; (+) strand; PAM type: NRG; PAM sequence: GAG
tctcagacaatgggagacag

SEQ ID NO: 32346 - DNA, 20 bp, Artificial Sequence
  Description of Artificial Sequence: Synthetic oligonucleotide
  Target: SCNA; (+) strand; PAM type: NRG; PAM sequence: TGG
caatgggagacaggagctaa

SEQ ID NO: 32347 - DNA, 20 bp, Artificial Sequence
  Description of Artificial Sequence: Synthetic oligonucleotide
  Target: SCNA; (+) strand; PAM type: NRG; PAM sequence: CAG
tgtttcttcgttttgtcctt

SEQ ID NO: 32348 - DNA, 20 bp, Artificial Sequence
  Description of Artificial Sequence: Synthetic oligonucleotide
  Target: SCNA; (+) strand; PAM type: NRG; PAM sequence: AGG
gtttcttcgttttgtccttc

SEQ ID NO: 32349 - DNA, 20 bp, Artificial Sequence
  Description of Artificial Sequence: Synthetic oligonucleotide
  Target: SCNA; (+) strand; PAM type: NRG; PAM sequence: CAG
tgtccttcaggctgataatc

SEQ ID NO: 32350 - DNA, 20 bp, Artificial Sequence
  Description of Artificial Sequence: Synthetic oligonucleotide
  Target: SCNA; (+) strand; PAM type: NRG; PAM sequence: GAG
aaccaatctgcacaatgctt

SEQ ID NO: 32351 - DNA, 20 bp, Artificial Sequence
  Description of Artificial Sequence: Synthetic oligonucleotide
  Target: SCNA; (+) strand; PAM type: NRG; PAM sequence: AAG
caatctgcacaatgcttgag

SEQ ID NO: 32352 - DNA, 20 bp, Artificial Sequence
  Description of Artificial Sequence: Synthetic oligonucleotide
  Target: SCNA; (+) strand; PAM type: NRG; PAM sequence: AGG
aatctgcacaatgcttgaga

SEQ ID NO: 32353 - DNA, 20 bp, Artificial Sequence
  Description of Artificial Sequence: Synthetic oligonucleotide
  Target: SCNA; (+) strand; PAM type: NRG; PAM sequence: CAG
gcacaatgcttgagaaggtg

SEQ ID NO: 32354 - DNA, 20 bp, Artificial Sequence
  Description of Artificial Sequence: Synthetic oligonucleotide
  Target: SCNA; (+) strand; PAM type: NRG; PAM sequence: GAG
acaatgcttgagaaggtgca

SEQ ID NO: 32355 - DNA, 20 bp, Artificial Sequence
  Description of Artificial Sequence: Synthetic oligonucleotide
  Target: SCNA; (+) strand; PAM type: NRG; PAM sequence: TAG
cttgagaaggtgcagagaat

SEQ ID NO: 32356 - DNA, 20 bp, Artificial Sequence
  Description of Artificial Sequence: Synthetic oligonucleotide
  Target: SCNA; (+) strand; PAM type: NRG; PAM sequence: GAG
tgagaaggtgcagagaatta

SEQ ID NO: 32357 - DNA, 20 bp, Artificial Sequence
  Description of Artificial Sequence: Synthetic oligonucleotide
  Target: SCNA; (+) strand; PAM type: NRG; PAM sequence: CAG
agccctcattgccctcaatg

SEQ ID NO: 32358 - DNA, 20 bp, Artificial Sequence
  Description of Artificial Sequence: Synthetic oligonucleotide
  Target: SCNA; (+) strand; PAM type: NRG; PAM sequence: TGG
tcaatgcagtacctttatat

SEQ ID NO: 32359 - DNA, 20 bp, Artificial Sequence
  Description of Artificial Sequence: Synthetic oligonucleotide
  Target: SCNA; (+) strand; PAM type: NRG; PAM sequence: GAG
atcacatgctcctgtttccc

SEQ ID NO: 32360 - DNA, 20 bp, Artificial Sequence
  Description of Artificial Sequence: Synthetic oligonucleotide
  Target: SCNA; (+) strand; PAM type: NRG; PAM sequence: CAG
ttgcaccctacactatattt

SEQ ID NO: 32361 - DNA, 20 bp, Artificial Sequence
  Description of Artificial Sequence: Synthetic oligonucleotide
  Target: SCNA; (+) strand; PAM type: NRG; PAM sequence: AGG
tgcaccctacactatatttc

SEQ ID NO: 32362 - DNA, 20 bp, Artificial Sequence
  Description of Artificial Sequence: Synthetic oligonucleotide
  Target: SCNA; (+) strand; PAM type: NRG; PAM sequence: CAG
tatatttcaggctcttcctt

SEQ ID NO: 32363 - DNA, 20 bp, Artificial Sequence
  Description of Artificial Sequence: Synthetic oligonucleotide
  Target: SCNA; (+) strand; PAM type: NRG; PAM sequence: AGG
atatttcaggctcttccttc

SEQ ID NO: 32364 - DNA, 20 bp, Artificial Sequence
  Description of Artificial Sequence: Synthetic oligonucleotide
  Target: SCNA; (+) strand; PAM type: NRG; PAM sequence: AAG
tccttcaggataatgaaacc

SEQ ID NO: 32365 - DNA, 20 bp, Artificial Sequence
  Description of Artificial Sequence: Synthetic oligonucleotide
  Target: SCNA; (+) strand; PAM type: NRG; PAM sequence: AAG
aggataatgaaaccaagcta

SEQ ID NO: 32366 - DNA, 20 bp, Artificial Sequence
  Description of Artificial Sequence: Synthetic oligonucleotide
  Target: SCNA; (+) strand; PAM type: NRG; PAM sequence: AGG
ggataatgaaaccaagctaa

SEQ ID NO: 32367 - DNA, 20 bp, Artificial Sequence
  Description of Artificial Sequence: Synthetic oligonucleotide
  Target: SCNA; (+) strand; PAM type: NRG; PAM sequence: GAG
gtttaactcatcctgcttct

SEQ ID NO: 32368 - DNA, 20 bp, Artificial Sequence
  Description of Artificial Sequence: Synthetic oligonucleotide
  Target: SCNA; (+) strand; PAM type: NRG; PAM sequence: AAG
catcctgcttctgagctccc

SEQ ID NO: 32369 - DNA, 20 bp, Artificial Sequence
  Description of Artificial Sequence: Synthetic oligonucleotide
  Target: SCNA; (+) strand; PAM type: NRG; PAM sequence: TAG
ttctcttatataatttatta

SEQ ID NO: 32370 - DNA, 20 bp, Artificial Sequence
  Description of Artificial Sequence: Synthetic oligonucleotide
  Target: SCNA; (+) strand; PAM type: NRG; PAM sequence: AAG
cttatataatttattataga

SEQ ID NO: 32371 - DNA, 20 bp, Artificial Sequence
  Description of Artificial Sequence: Synthetic oligonucleotide
  Target: SCNA; (+) strand; PAM type: NRG; PAM sequence: AAG
tttattatagaaagttattt

SEQ ID NO: 32372 - DNA, 20 bp, Artificial Sequence
  Description of Artificial Sequence: Synthetic oligonucleotide
  Target: SCNA; (+) strand; PAM type: NRG; PAM sequence: GAG
atagaaagttatttaagcat

SEQ ID NO: 32373 - DNA, 20 bp, Artificial Sequence
  Description of Artificial Sequence: Synthetic oligonucleotide
  Target: SCNA; (+) strand; PAM type: NRG; PAM sequence: TAG
atttaagcatgagatttctc

SEQ ID NO: 32374 - DNA, 20 bp, Artificial Sequence
  Description of Artificial Sequence: Synthetic oligonucleotide
  Target: SCNA; (+) strand; PAM type: NRG; PAM sequence: TAG
ttgaatctccactgtcaata

SEQ ID NO: 32375 - DNA, 20 bp, Artificial Sequence
  Description of Artificial Sequence: Synthetic oligonucleotide
  Target: SCNA; (+) strand; PAM type: NRG; PAM sequence: TGG
tccactgtcaatatagtctc

SEQ ID NO: 32376 - DNA, 20 bp, Artificial Sequence
  Description of Artificial Sequence: Synthetic oligonucleotide
  Target: SCNA; (+) strand; PAM type: NRG; PAM sequence: AAG
atatagtctctggccaatga

SEQ ID NO: 32377 - DNA, 20 bp, Artificial Sequence
  Description of Artificial Sequence: Synthetic oligonucleotide
  Target: SCNA; (+) strand; PAM type: NRG; PAM sequence: CAG
tctggccaatgaaagctgtt

SEQ ID NO: 32378 - DNA, 20 bp, Artificial Sequence
  Description of Artificial Sequence: Synthetic oligonucleotide
  Target: SCNA; (+) strand; PAM type: NRG; PAM sequence: TGG
aaagctgttcagttaatgtg

SEQ ID NO: 32379 - DNA, 20 bp, Artificial Sequence
  Description of Artificial Sequence: Synthetic oligonucleotide
  Target: SCNA; (+) strand; PAM type: NRG; PAM sequence: TGG
atgaacattttgttaaatcg

SEQ ID NO: 32380 - DNA, 20 bp, Artificial Sequence
  Description of Artificial Sequence: Synthetic oligonucleotide
  Target: SCNA; (+) strand; PAM type: NRG; PAM sequence: TAG
ttttgttaaatcgtggccta

SEQ ID NO: 32381 - DNA, 20 bp, Artificial Sequence
  Description of Artificial Sequence: Synthetic oligonucleotide
  Target: SCNA; (+) strand; PAM type: NRG; PAM sequence: AGG
tttgttaaatcgtggcctat

SEQ ID NO: 32382 - DNA, 20 bp, Artificial Sequence
  Description of Artificial Sequence: Synthetic oligonucleotide
  Target: SCNA; (+) strand; PAM type: NRG; PAM sequence: TAG
aaatcgtggcctataggaaa

SEQ ID NO: 32383 - DNA, 20 bp, Artificial Sequence
  Description of Artificial Sequence: Synthetic oligonucleotide
  Target: SCNA; (+) strand; PAM type: NRG; PAM sequence: AGG
aatcgtggcctataggaaat

SEQ ID NO: 32384 - DNA, 20 bp, Artificial Sequence
  Description of Artificial Sequence: Synthetic oligonucleotide
  Target: SCNA; (+) strand; PAM type: NRG; PAM sequence: AAG
ggcatgtaaaatgcacctgt

SEQ ID NO: 32385 - DNA, 20 bp, Artificial Sequence
  Description of Artificial Sequence: Synthetic oligonucleotide
  Target: SCNA; (+) strand; PAM type: NRG; PAM sequence: TAG
aaatgcacctgtaagtttta

SEQ ID NO: 32386 - DNA, 20 bp, Artificial Sequence
  Description of Artificial Sequence: Synthetic oligonucleotide
  Target: SCNA; (+) strand; PAM type: NRG; PAM sequence: TAG
cctgtaagttttatagcacc

SEQ ID NO: 32387 - DNA, 20 bp, Artificial Sequence
  Description of Artificial Sequence: Synthetic oligonucleotide
  Target: SCNA; (+) strand; PAM type: NRG; PAM sequence: CAG
aagttttatagcacctagta

SEQ ID NO: 32388 - DNA, 20 bp, Artificial Sequence
  Description of Artificial Sequence: Synthetic oligonucleotide
  Target: SCNA; (+) strand; PAM type: NRG; PAM sequence: GAG
gttttatagcacctagtaca

SEQ ID NO: 32389 - DNA, 20 bp, Artificial Sequence
  Description of Artificial Sequence: Synthetic oligonucleotide
  Target: SCNA; (+) strand; PAM type: NRG; PAM sequence: CAG
tagcacctagtacagagtga

SEQ ID NO: 32390 - DNA, 20 bp, Artificial Sequence
  Description of Artificial Sequence: Synthetic oligonucleotide
  Target: SCNA; (+) strand; PAM type: NRG; PAM sequence: CAG
tgacagctcaaaactatttg

SEQ ID NO: 32391 - DNA, 20 bp, Artificial Sequence
  Description of Artificial Sequence: Synthetic oligonucleotide
  Target: SCNA; (+) strand; PAM type: NRG; PAM sequence: AAG
caaaactatttgcagaatga

SEQ ID NO: 32392 - DNA, 20 bp, Artificial Sequence
  Description of Artificial Sequence: Synthetic oligonucleotide
  Target: SCNA; (+) strand; PAM type: NRG; PAM sequence: AAG
atttgcagaatgaaagaaaa

SEQ ID NO: 32393 - DNA, 20 bp, Artificial Sequence
  Description of Artificial Sequence: Synthetic oligonucleotide
  Target: SCNA; (+) strand; PAM type: NRG; PAM sequence: AGG
tttgcagaatgaaagaaaaa

SEQ ID NO: 32394 - DNA, 20 bp, Artificial Sequence
  Description of Artificial Sequence: Synthetic oligonucleotide
  Target: SCNA; (+) strand; PAM type: NRG; PAM sequence: AAG
gcagaatgaaagaaaaaagg

SEQ ID NO: 32395 - DNA, 20 bp, Artificial Sequence
  Description of Artificial Sequence: Synthetic oligonucleotide
  Target: SCNA; (+) strand; PAM type: NRG; PAM sequence: TGG
actctccaaaacaatacaca

SEQ ID NO: 32396 - DNA, 20 bp, Artificial Sequence
  Description of Artificial Sequence: Synthetic oligonucleotide
  Target: SCNA; (+) strand; PAM type: NRG; PAM sequence: AAG
caaaacaatacacatggcca

SEQ ID NO: 32397 - DNA, 20 bp, Artificial Sequence
  Description of Artificial Sequence: Synthetic oligonucleotide
  Target: SCNA; (+) strand; PAM type: NRG; PAM sequence: TGG
caatacacatggccaaagcc

SEQ ID NO: 32398 - DNA, 20 bp, Artificial Sequence
  Description of Artificial Sequence: Synthetic oligonucleotide
  Target: SCNA; (+) strand; PAM type: NRG; PAM sequence: AAG
catggccaaagcctggaaaa

SEQ ID NO: 32399 - DNA, 20 bp, Artificial Sequence
  Description of Artificial Sequence: Synthetic oligonucleotide
  Target: SCNA; (+) strand; PAM type: NRG; PAM sequence: TAG
caaagcctggaaaaaagtaa

SEQ ID NO: 32400 - DNA, 20 bp, Artificial Sequence
  Description of Artificial Sequence: Synthetic oligonucleotide
  Target: SCNA; (+) strand; PAM type: NRG; PAM sequence: CAG
ggaaaaaagtaatagtgtcc

SEQ ID NO: 32401 - DNA, 20 bp, Artificial Sequence
  Description of Artificial Sequence: Synthetic oligonucleotide
  Target: SCNA; (+) strand; PAM type: NRG; PAM sequence: TAG
tagtgtcccagtgtaacttc

SEQ ID NO: 32402 - DNA, 20 bp, Artificial Sequence
  Description of Artificial Sequence: Synthetic oligonucleotide
  Target: SCNA; (+) strand; PAM type: NRG; PAM sequence: AGG
agtgtcccagtgtaacttct

SEQ ID NO: 32403 - DNA, 20 bp, Artificial Sequence
  Description of Artificial Sequence: Synthetic oligonucleotide
  Target: SCNA; (+) strand; PAM type: NRG; PAM sequence: GAG
tgtcccagtgtaacttctag

SEQ ID NO: 32404 - DNA, 20 bp, Artificial Sequence
  Description of Artificial Sequence: Synthetic oligonucleotide
  Target: SCNA; (+) strand; PAM type: NRG; PAM sequence: AGG
gtcccagtgtaacttctagg

SEQ ID NO: 32405 - DNA, 20 bp, Artificial Sequence
  Description of Artificial Sequence: Synthetic oligonucleotide
  Target: SCNA; (+) strand; PAM type: NRG; PAM sequence: GAG
gtgtaacttctaggaggtgt

SEQ ID NO: 32406 - DNA, 20 bp, Artificial Sequence
  Description of Artificial Sequence: Synthetic oligonucleotide
  Target: SCNA; (+) strand; PAM type: NRG; PAM sequence: AGG
tgtaacttctaggaggtgtg

SEQ ID NO: 32407 - DNA, 20 bp, Artificial Sequence
  Description of Artificial Sequence: Synthetic oligonucleotide
  Target: SCNA; (+) strand; PAM type: NRG; PAM sequence: AAG
aacttctaggaggtgtgagg

SEQ ID NO: 32408 - DNA, 20 bp, Artificial Sequence
  Description of Artificial Sequence: Synthetic oligonucleotide
  Target: SCNA; (+) strand; PAM type: NRG; PAM sequence: AAG
tctaggaggtgtgaggaaga

SEQ ID NO: 32409 - DNA, 20 bp, Artificial Sequence
  Description of Artificial Sequence: Synthetic oligonucleotide
  Target: SCNA; (+) strand; PAM type: NRG; PAM sequence: TGG
ggaagaaagaaaaacaaaat

SEQ ID NO: 32410 - DNA, 20 bp, Artificial Sequence
  Description of Artificial Sequence: Synthetic oligonucleotide
  Target: SCNA; (+) strand; PAM type: NRG; PAM sequence: CAG
acaaaattggcaccttttcc

SEQ ID NO: 32411 - DNA, 20 bp, Artificial Sequence
  Description of Artificial Sequence: Synthetic oligonucleotide
  Target: SCNA; (+) strand; PAM type: NRG; PAM sequence: AGG
caaaattggcaccttttccc

SEQ ID NO: 32412 - DNA, 20 bp, Artificial Sequence
  Description of Artificial Sequence: Synthetic oligonucleotide
  Target: SCNA; (+) strand; PAM type: NRG; PAM sequence: TAG
tggcaccttttcccaggctt

SEQ ID NO: 32413 - DNA, 20 bp, Artificial Sequence
  Description of Artificial Sequence: Synthetic oligonucleotide
  Target: SCNA; (+) strand; PAM type: NRG; PAM sequence: GAG
cttttcccaggctttagact

SEQ ID NO: 32414 - DNA, 20 bp, Artificial Sequence
  Description of Artificial Sequence: Synthetic oligonucleotide
  Target: SCNA; (+) strand; PAM type: NRG; PAM sequence: GAG
tttcccaggctttagactga

SEQ ID NO: 32415 - DNA, 20 bp, Artificial Sequence
  Description of Artificial Sequence: Synthetic oligonucleotide
  Target: SCNA; (+) strand; PAM type: NRG; PAM sequence: TGG
tagactgagagatattaact

SEQ ID NO: 32416 - DNA, 20 bp, Artificial Sequence
  Description of Artificial Sequence: Synthetic oligonucleotide
  Target: SCNA; (+) strand; PAM type: NRG; PAM sequence: GAG
gactgagagatattaacttg

SEQ ID NO: 32417 - DNA, 20 bp, Artificial Sequence
  Description of Artificial Sequence: Synthetic oligonucleotide
  Target: SCNA; (+) strand; PAM type: NRG; PAM sequence: GAG
ctgagagatattaacttgga

SEQ ID NO: 32418 - DNA, 20 bp, Artificial Sequence
  Description of Artificial Sequence: Synthetic oligonucleotide
  Target: SCNA; (+) strand; PAM type: NRG; PAM sequence: AGG
tgagagatattaacttggag

SEQ ID NO: 32419 - DNA, 20 bp, Artificial Sequence
  Description of Artificial Sequence: Synthetic oligonucleotide
  Target: SCNA; (+) strand; PAM type: NRG; PAM sequence: GGG
gagagatattaacttggaga

SEQ ID NO: 32420 - DNA, 20 bp, Artificial Sequence
  Description of Artificial Sequence: Synthetic oligonucleotide
  Target: SCNA; (+) strand; PAM type: NRG; PAM sequence: GGG
agagatattaacttggagag

SEQ ID NO: 32421 - DNA, 20 bp, Artificial Sequence
  Description of Artificial Sequence: Synthetic oligonucleotide
  Target: SCNA; (+) strand; PAM type: NRG; PAM sequence: AAG
atattaacttggagagggga

SEQ ID NO: 32422 - DNA, 20 bp, Artificial Sequence
  Description of Artificial Sequence: Synthetic oligonucleotide
  Target: SCNA; (+) strand; PAM type: NRG; PAM sequence: TAG
aacttggagaggggaaagca

SEQ ID NO: 32423 - DNA, 20 bp, Artificial Sequence
  Description of Artificial Sequence: Synthetic oligonucleotide
  Target: SCNA; (+) strand; PAM type: NRG; PAM sequence: AAG
agaggggaaagcatagtcta

SEQ ID NO: 32424 - DNA, 20 bp, Artificial Sequence
  Description of Artificial Sequence: Synthetic oligonucleotide
  Target: SCNA; (+) strand; PAM type: NRG; PAM sequence: GAG
aggggaaagcatagtctaaa

SEQ ID NO: 32425 - DNA, 20 bp, Artificial Sequence
  Description of Artificial Sequence: Synthetic oligonucleotide
  Target: SCNA; (+) strand; PAM type: NRG; PAM sequence: CAG
aagcatagtctaaagagaaa

SEQ ID NO: 32426 - DNA, 20 bp, Artificial Sequence
  Description of Artificial Sequence: Synthetic oligonucleotide
  Target: SCNA; (+) strand; PAM type: NRG; PAM sequence: AGG
agcatagtctaaagagaaac

SEQ ID NO: 32427 - DNA, 20 bp, Artificial Sequence
  Description of Artificial Sequence: Synthetic oligonucleotide
  Target: SCNA; (+) strand; PAM type: NRG; PAM sequence: GGG
gcatagtctaaagagaaaca

SEQ ID NO: 32428 - DNA, 20 bp, Artificial Sequence
  Description of Artificial Sequence: Synthetic oligonucleotide
  Target: SCNA; (+) strand; PAM type: NRG; PAM sequence: AAG
gtctaaagagaaacagggct

SEQ ID NO: 32429 - DNA, 20 bp, Artificial Sequence
  Description of Artificial Sequence: Synthetic oligonucleotide
  Target: SCNA; (+) strand; PAM type: NRG; PAM sequence: AGG
tctaaagagaaacagggcta

SEQ ID NO: 32430 - DNA, 20 bp, Artificial Sequence
  Description of Artificial Sequence: Synthetic oligonucleotide
  Target: SCNA; (+) strand; PAM type: NRG; PAM sequence: AAG
aaagagaaacagggctaagg

SEQ ID NO: 32431 - DNA, 20 bp, Artificial Sequence
  Description of Artificial Sequence: Synthetic oligonucleotide
  Target: SCNA; (+) strand; PAM type: NRG; PAM sequence: AGG
aagagaaacagggctaagga

SEQ ID NO: 32432 - DNA, 20 bp, Artificial Sequence
  Description of Artificial Sequence: Synthetic oligonucleotide
  Target: SCNA; (+) strand; PAM type: NRG; PAM sequence: CAG
cactttcttttactatctct

SEQ ID NO: 32433 - DNA, 20 bp, Artificial Sequence
  Description of Artificial Sequence: Synthetic oligonucleotide
  Target: SCNA; (+) strand; PAM type: NRG; PAM sequence: CAG
ttcttttactatctctcaga

SEQ ID NO: 32434 - DNA, 20 bp, Artificial Sequence
  Description of Artificial Sequence: Synthetic oligonucleotide
  Target: SCNA; (+) strand; PAM type: NRG; PAM sequence: AAG
acagattgcaatgcaatctc

SEQ ID NO: 32435 - DNA, 20 bp, Artificial Sequence
  Description of Artificial Sequence: Synthetic oligonucleotide
  Target: SCNA; (+) strand; PAM type: NRG; PAM sequence: AGG
cagattgcaatgcaatctca

SEQ ID NO: 32436 - DNA, 20 bp, Artificial Sequence
  Description of Artificial Sequence: Synthetic oligonucleotide
  Target: SCNA; (+) strand; PAM type: NRG; PAM sequence: CAG
attgcaatgcaatctcaagg

SEQ ID NO: 32437 - DNA, 20 bp, Artificial Sequence
  Description of Artificial Sequence: Synthetic oligonucleotide
  Target: SCNA; (+) strand; PAM type: NRG; PAM sequence: TGG
atctcaaggcagcactacac

SEQ ID NO: 32438 - DNA, 20 bp, Artificial Sequence
  Description of Artificial Sequence: Synthetic oligonucleotide
  Target: SCNA; (+) strand; PAM type: NRG; PAM sequence: AAG
aaggcagcactacactggac

SEQ ID NO: 32439 - DNA, 20 bp, Artificial Sequence
  Description of Artificial Sequence: Synthetic oligonucleotide
  Target: SCNA; (+) strand; PAM type: NRG; PAM sequence: AGG
aggcagcactacactggaca

SEQ ID NO: 32440 - DNA, 20 bp, Artificial Sequence
  Description of Artificial Sequence: Synthetic oligonucleotide
  Target: SCNA; (+) strand; PAM type: NRG; PAM sequence: TAG
cactacactggacaaggtac

SEQ ID NO: 32441 - DNA, 20 bp, Artificial Sequence
  Description of Artificial Sequence: Synthetic oligonucleotide
  Target: SCNA; (+) strand; PAM type: NRG; PAM sequence: AGG
actacactggacaaggtact

SEQ ID NO: 32442 - DNA, 20 bp, Artificial Sequence
  Description of Artificial Sequence: Synthetic oligonucleotide
  Target: SCNA; (+) strand; PAM type: NRG; PAM sequence: GAG
ttattctttttttttttttt

SEQ ID NO: 32443 - DNA, 20 bp, Artificial Sequence
  Description of Artificial Sequence: Synthetic oligonucleotide
  Target: SCNA; (+) strand; PAM type: NRG; PAM sequence: CAG
tcttttttttttttttgaga

SEQ ID NO: 32444 - DNA, 20 bp, Artificial Sequence
  Description of Artificial Sequence: Synthetic oligonucleotide
  Target: SCNA; (+) strand; PAM type: NRG; PAM sequence: GAG
ttttttttttttttgagaca

SEQ ID NO: 32445 - DNA, 20 bp, Artificial Sequence
  Description of Artificial Sequence: Synthetic oligonucleotide
  Target: SCNA; (+) strand; PAM type: NRG; PAM sequence: CAG
cagagtctcactatgtcacc

SEQ ID NO: 32446 - DNA, 20 bp, Artificial Sequence
  Description of Artificial Sequence: Synthetic oligonucleotide
  Target: SCNA; (+) strand; PAM type: NRG; PAM sequence: AGG
agagtctcactatgtcaccc

SEQ ID NO: 32447 - DNA, 20 bp, Artificial Sequence
  Description of Artificial Sequence: Synthetic oligonucleotide
  Target: SCNA; (+) strand; PAM type: NRG; PAM sequence: TGG
tctcactatgtcacccaggc

SEQ ID NO: 32448 - DNA, 20 bp, Artificial Sequence
  Description of Artificial Sequence: Synthetic oligonucleotide
  Target: SCNA; (+) strand; PAM type: NRG; PAM sequence: GAG
tcactatgtcacccaggctg

SEQ ID NO: 32449 - DNA, 20 bp, Artificial Sequence
  Description of Artificial Sequence: Synthetic oligonucleotide
  Target: SCNA; (+) strand; PAM type: NRG; PAM sequence: CAG
atgtcacccaggctggagca

SEQ ID NO: 32450 - DNA, 20 bp, Artificial Sequence
  Description of Artificial Sequence: Synthetic oligonucleotide
  Target: SCNA; (+) strand; PAM type: NRG; PAM sequence: TGG
tcacccaggctggagcacag

SEQ ID NO: 32451 - DNA, 20 bp, Artificial Sequence
  Description of Artificial Sequence: Synthetic oligonucleotide
  Target: SCNA; (+) strand; PAM type: NRG; PAM sequence: TGG
ggagcacagtggcactatct

SEQ ID NO: 32452 - DNA, 20 bp, Artificial Sequence
  Description of Artificial Sequence: Synthetic oligonucleotide
  Target: SCNA; (+) strand; PAM type: NRG; PAM sequence: CGG
tcactgcaacctctgcctcc

SEQ ID NO: 32453 - DNA, 20 bp, Artificial Sequence
  Description of Artificial Sequence: Synthetic oligonucleotide
  Target: SCNA; (+) strand; PAM type: NRG; PAM sequence: GGG
cactgcaacctctgcctccc

SEQ ID NO: 32454 - DNA, 20 bp, Artificial Sequence
  Description of Artificial Sequence: Synthetic oligonucleotide
  Target: SCNA; (+) strand; PAM type: NRG; PAM sequence: AAG
aacctctgcctcccgggttc

SEQ ID NO: 32455 - DNA, 20 bp, Artificial Sequence
  Description of Artificial Sequence: Synthetic oligonucleotide
  Target: SCNA; (+) strand; PAM type: NRG; PAM sequence: CAG
ttcaagtgattctcctgcct

SEQ ID NO: 32456 - DNA, 20 bp, Artificial Sequence
  Description of Artificial Sequence: Synthetic oligonucleotide
  Target: SCNA; (+) strand; PAM type: NRG; PAM sequence: AAG
ttctcctgcctcagcctccc

SEQ ID NO: 32457 - DNA, 20 bp, Artificial Sequence
  Description of Artificial Sequence: Synthetic oligonucleotide
  Target: SCNA; (+) strand; PAM type: NRG; PAM sequence: TAG
tcctgcctcagcctcccaag

SEQ ID NO: 32458 - DNA, 20 bp, Artificial Sequence
  Description of Artificial Sequence: Synthetic oligonucleotide
  Target: SCNA; (+) strand; PAM type: NRG; PAM sequence: TGG
gcctcagcctcccaagtagc

SEQ ID NO: 32459 - DNA, 20 bp, Artificial Sequence
  Description of Artificial Sequence: Synthetic oligonucleotide
  Target: SCNA; (+) strand; PAM type: NRG; PAM sequence: GGG
cctcagcctcccaagtagct

SEQ ID NO: 32460 - DNA, 20 bp, Artificial Sequence
  Description of Artificial Sequence: Synthetic oligonucleotide
  Target: SCNA; (+) strand; PAM type: NRG; PAM sequence: CAG
ctcccaagtagctgggaata

SEQ ID NO: 32461 - DNA, 20 bp, Artificial Sequence
  Description of Artificial Sequence: Synthetic oligonucleotide
  Target: SCNA; (+) strand; PAM type: NRG; PAM sequence: AGG
tcccaagtagctgggaatac

SEQ ID NO: 32462 - DNA, 20 bp, Artificial Sequence
  Description of Artificial Sequence: Synthetic oligonucleotide
  Target: SCNA; (+) strand; PAM type: NRG; PAM sequence: TGG
caggtgcctgtcaccacacc

SEQ ID NO: 32463 - DNA, 20 bp, Artificial Sequence
  Description of Artificial Sequence: Synthetic oligonucleotide
  Target: SCNA; (+) strand; PAM type: NRG; PAM sequence: TAG
gtaatttttttttgtatttt

SEQ ID NO: 32464 - DNA, 20 bp, Artificial Sequence
  Description of Artificial Sequence: Synthetic oligonucleotide
  Target: SCNA; (+) strand; PAM type: NRG; PAM sequence: TAG
atttttttttgtatttttag

SEQ ID NO: 32465 - DNA, 20 bp, Artificial Sequence
  Description of Artificial Sequence: Synthetic oligonucleotide
  Target: SCNA; (+) strand; PAM type: NRG; PAM sequence: GAG
ttttttttgtatttttagta

SEQ ID NO: 32466 - DNA, 20 bp, Artificial Sequence
  Description of Artificial Sequence: Synthetic oligonucleotide
  Target: SCNA; (+) strand; PAM type: NRG; PAM sequence: CAG
ttttgtatttttagtagaga

SEQ ID NO: 32467 - DNA, 20 bp, Artificial Sequence
  Description of Artificial Sequence: Synthetic oligonucleotide
  Target: SCNA; (+) strand; PAM type: NRG; PAM sequence: AGG
tttgtatttttagtagagac

SEQ ID NO: 32468 - DNA, 20 bp, Artificial Sequence
  Description of Artificial Sequence: Synthetic oligonucleotide
  Target: SCNA; (+) strand; PAM type: NRG; PAM sequence: GGG
ttgtatttttagtagagaca

SEQ ID NO: 32469 - DNA, 20 bp, Artificial Sequence
  Description of Artificial Sequence: Synthetic oligonucleotide
  Target: SCNA; (+) strand; PAM type: NRG; PAM sequence: TGG
gagacagggtttcactatgt

SEQ ID NO: 32470 - DNA, 20 bp, Artificial Sequence
  Description of Artificial Sequence: Synthetic oligonucleotide
  Target: SCNA; (+) strand; PAM type: NRG; PAM sequence: TGG
agggtttcactatgttggcc

SEQ ID NO: 32471 - DNA, 20 bp, Artificial Sequence
  Description of Artificial Sequence: Synthetic oligonucleotide
  Target: SCNA; (+) strand; PAM type: NRG; PAM sequence: TGG
tttcactatgttggcctggc

SEQ ID NO: 32472 - DNA, 20 bp, Artificial Sequence
  Description of Artificial Sequence: Synthetic oligonucleotide
  Target: SCNA; (+) strand; PAM type: NRG; PAM sequence: TGG
accttgtgatccacccgcct

SEQ ID NO: 32473 - DNA, 20 bp, Artificial Sequence
  Description of Artificial Sequence: Synthetic oligonucleotide
  Target: SCNA; (+) strand; PAM type: NRG; PAM sequence: AAG
acccgccttggcctcccaca

SEQ ID NO: 32474 - DNA, 20 bp, Artificial Sequence
  Description of Artificial Sequence: Synthetic oligonucleotide
  Target: SCNA; (+) strand; PAM type: NRG; PAM sequence: TGG
cttggcctcccacaaagtgc

SEQ ID NO: 32475 - DNA, 20 bp, Artificial Sequence
  Description of Artificial Sequence: Synthetic oligonucleotide
  Target: SCNA; (+) strand; PAM type: NRG; PAM sequence: GGG
ttggcctcccacaaagtgct

SEQ ID NO: 32476 - DNA, 20 bp, Artificial Sequence
  Description of Artificial Sequence: Synthetic oligonucleotide
  Target: SCNA; (+) strand; PAM type: NRG; PAM sequence: CAG
cccacaaagtgctgggatta

SEQ ID NO: 32477 - DNA, 20 bp, Artificial Sequence
  Description of Artificial Sequence: Synthetic oligonucleotide
  Target: SCNA; (+) strand; PAM type: NRG; PAM sequence: AGG
ccacaaagtgctgggattac

SEQ ID NO: 32478 - DNA, 20 bp, Artificial Sequence
  Description of Artificial Sequence: Synthetic oligonucleotide
  Target: SCNA; (+) strand; PAM type: NRG; PAM sequence: GAG
agtgctgggattacaggcat

SEQ ID NO: 32479 - DNA, 20 bp, Artificial Sequence
  Description of Artificial Sequence: Synthetic oligonucleotide
  Target: SCNA; (+) strand; PAM type: NRG; PAM sequence: CGG
ggattacaggcatgagccac

SEQ ID NO: 32480 - DNA, 20 bp, Artificial Sequence
  Description of Artificial Sequence: Synthetic oligonucleotide
  Target: SCNA; (+) strand; PAM type: NRG; PAM sequence: GGG
gattacaggcatgagccacc

SEQ ID NO: 32481 - DNA, 20 bp, Artificial Sequence
  Description of Artificial Sequence: Synthetic oligonucleotide
  Target: SCNA; (+) strand; PAM type: NRG; PAM sequence: CGG
caggcatgagccaccgggcc

SEQ ID NO: 32482 - DNA, 20 bp, Artificial Sequence
  Description of Artificial Sequence: Synthetic oligonucleotide
  Target: SCNA; (+) strand; PAM type: NRG; PAM sequence: AAG
ggcccatatttttattctta

SEQ ID NO: 32483 - DNA, 20 bp, Artificial Sequence
  Description of Artificial Sequence: Synthetic oligonucleotide
  Target: SCNA; (+) strand; PAM type: NRG; PAM sequence: CAG
tatttttattcttaaagaac

SEQ ID NO: 32484 - DNA, 20 bp, Artificial Sequence
  Description of Artificial Sequence: Synthetic oligonucleotide
  Target: SCNA; (+) strand; PAM type: NRG; PAM sequence: TAG
gaaccagaactatatgcatc

SEQ ID NO: 32485 - DNA, 20 bp, Artificial Sequence
  Description of Artificial Sequence: Synthetic oligonucleotide
  Target: SCNA; (+) strand; PAM type: NRG; PAM sequence: AAG
atatgcatctagtgttcccc

SEQ ID NO: 32486 - DNA, 20 bp, Artificial Sequence
  Description of Artificial Sequence: Synthetic oligonucleotide
  Target: SCNA; (+) strand; PAM type: NRG; PAM sequence: CAG
ttctttgtcttttaacattc

SEQ ID NO: 32487 - DNA, 20 bp, Artificial Sequence
  Description of Artificial Sequence: Synthetic oligonucleotide
  Target: SCNA; (+) strand; PAM type: NRG; PAM sequence: AGG
tctttgtcttttaacattcc

SEQ ID NO: 32488 - DNA, 20 bp, Artificial Sequence
  Description of Artificial Sequence: Synthetic oligonucleotide
  Target: SCNA; (+) strand; PAM type: NRG; PAM sequence: CAG
cttttaacattccaggaaaa

SEQ ID NO: 32489 - DNA, 20 bp, Artificial Sequence
  Description of Artificial Sequence: Synthetic oligonucleotide
  Target: SCNA; (+) strand; PAM type: NRG; PAM sequence: GAG
attccaggaaaacagatatt

SEQ ID NO: 32490 - DNA, 20 bp, Artificial Sequence
  Description of Artificial Sequence: Synthetic oligonucleotide
  Target: SCNA; (+) strand; PAM type: NRG; PAM sequence: TGG
acagatattgagtgttttgc

SEQ ID NO: 32491 - DNA, 20 bp, Artificial Sequence
  Description of Artificial Sequence: Synthetic oligonucleotide
  Target: SCNA; (+) strand; PAM type: NRG; PAM sequence: TAG
gtgttttgctggatcatgca

SEQ ID NO: 32492 - DNA, 20 bp, Artificial Sequence
  Description of Artificial Sequence: Synthetic oligonucleotide
  Target: SCNA; (+) strand; PAM type: NRG; PAM sequence: TAG
ttttgaccctctgtttgctg

SEQ ID NO: 32493 - DNA, 20 bp, Artificial Sequence
  Description of Artificial Sequence: Synthetic oligonucleotide
  Target: SCNA; (+) strand; PAM type: NRG; PAM sequence: CAG
gaccctctgtttgctgtagc

SEQ ID NO: 32494 - DNA, 20 bp, Artificial Sequence
  Description of Artificial Sequence: Synthetic oligonucleotide
  Target: SCNA; (+) strand; PAM type: NRG; PAM sequence: TGG
tgtagccagctttgattctt

SEQ ID NO: 32495 - DNA, 20 bp, Artificial Sequence
  Description of Artificial Sequence: Synthetic oligonucleotide
  Target: SCNA; (+) strand; PAM type: NRG; PAM sequence: TGG
gctttgattctttggattca

SEQ ID NO: 32496 - DNA, 20 bp, Artificial Sequence
  Description of Artificial Sequence: Synthetic oligonucleotide
  Target: SCNA; (+) strand; PAM type: NRG; PAM sequence: AAG
attcactaatccaccaatga

SEQ ID NO: 32497 - DNA, 20 bp, Artificial Sequence
  Description of Artificial Sequence: Synthetic oligonucleotide
  Target: SCNA; (+) strand; PAM type: NRG; PAM sequence: AGG
ttcactaatccaccaatgaa

SEQ ID NO: 32498 - DNA, 20 bp, Artificial Sequence
  Description of Artificial Sequence: Synthetic oligonucleotide
  Target: SCNA; (+) strand; PAM type: NRG; PAM sequence: CAG
gtaatgtataacaatcaact

SEQ ID NO: 32499 - DNA, 20 bp, Artificial Sequence
  Description of Artificial Sequence: Synthetic oligonucleotide
  Target: SCNA; (+) strand; PAM type: NRG; PAM sequence: AGG
taatgtataacaatcaactc

SEQ ID NO: 32500 - DNA, 20 bp, Artificial Sequence
  Description of Artificial Sequence: Synthetic oligonucleotide
  Target: SCNA; (+) strand; PAM type: NRG; PAM sequence: GGG
aatgtataacaatcaactca

SEQ ID NO: 32501 - DNA, 20 bp, Artificial Sequence
  Description of Artificial Sequence: Synthetic oligonucleotide
  Target: SCNA; (+) strand; PAM type: NRG; PAM sequence: AAG
aatctttatcaatgttctat

SEQ ID NO: 32502 - DNA, 20 bp, Artificial Sequence
  Description of Artificial Sequence: Synthetic oligonucleotide
  Target: SCNA; (+) strand; PAM type: NRG; PAM sequence: CAG
gcatacttttacaaacttat

SEQ ID NO: 32503 - DNA, 20 bp, Artificial Sequence
  Description of Artificial Sequence: Synthetic oligonucleotide
  Target: SCNA; (+) strand; PAM type: NRG; PAM sequence: CAG
ttacaaacttatcagtcatt

SEQ ID NO: 32504 - DNA, 20 bp, Artificial Sequence
  Description of Artificial Sequence: Synthetic oligonucleotide
  Target: SCNA; (+) strand; PAM type: NRG; PAM sequence: AAG
caaacttatcagtcattcag

SEQ ID NO: 32505 - DNA, 20 bp, Artificial Sequence
  Description of Artificial Sequence: Synthetic oligonucleotide
  Target: SCNA; (+) strand; PAM type: NRG; PAM sequence: TGG
cagtcattcagaagtaaatg

SEQ ID NO: 32506 - DNA, 20 bp, Artificial Sequence
  Description of Artificial Sequence: Synthetic oligonucleotide
  Target: SCNA; (+) strand; PAM type: NRG; PAM sequence: CAG
tcagaagtaaatgtggactt

SEQ ID NO: 32507 - DNA, 20 bp, Artificial Sequence
  Description of Artificial Sequence: Synthetic oligonucleotide
  Target: SCNA; (+) strand; PAM type: NRG; PAM sequence: TGG
aaatgtggacttcagttttg

SEQ ID NO: 32508 - DNA, 20 bp, Artificial Sequence
  Description of Artificial Sequence: Synthetic oligonucleotide
  Target: SCNA; (+) strand; PAM type: NRG; PAM sequence: GGG
aatgtggacttcagttttgt

SEQ ID NO: 32509 - DNA, 20 bp, Artificial Sequence
  Description of Artificial Sequence: Synthetic oligonucleotide
  Target: SCNA; (+) strand; PAM type: NRG; PAM sequence: CAG
gtggacttcagttttgtggg

SEQ ID NO: 32510 - DNA, 20 bp, Artificial Sequence
  Description of Artificial Sequence: Synthetic oligonucleotide
  Target: SCNA; (+) strand; PAM type: NRG; PAM sequence: AGG
tggacttcagttttgtgggc

SEQ ID NO: 32511 - DNA, 20 bp, Artificial Sequence
  Description of Artificial Sequence: Synthetic oligonucleotide
  Target: SCNA; (+) strand; PAM type: NRG; PAM sequence: GGG
ggacttcagttttgtgggca

SEQ ID NO: 32512 - DNA, 20 bp, Artificial Sequence
  Description of Artificial Sequence: Synthetic oligonucleotide
  Target: SCNA; (+) strand; PAM type: NRG; PAM sequence: GGG
gacttcagttttgtgggcag

SEQ ID NO: 32513 - DNA, 20 bp, Artificial Sequence
  Description of Artificial Sequence: Synthetic oligonucleotide
  Target: SCNA; (+) strand; PAM type: NRG; PAM sequence: CAG
gttttgtgggcaggggttta

SEQ ID NO: 32514 - DNA, 20 bp, Artificial Sequence
  Description of Artificial Sequence: Synthetic oligonucleotide
  Target: SCNA; (+) strand; PAM type: NRG; PAM sequence: AAG
ttgtgggcaggggtttacag

SEQ ID NO: 32515 - DNA, 20 bp, Artificial Sequence
  Description of Artificial Sequence: Synthetic oligonucleotide
  Target: SCNA; (+) strand; PAM type: NRG; PAM sequence: AAG
tacagaagtatgttttacta

SEQ ID NO: 32516 - DNA, 20 bp, Artificial Sequence
  Description of Artificial Sequence: Synthetic oligonucleotide
  Target: SCNA; (+) strand; PAM type: NRG; PAM sequence: TGG
aagtatgttttactaaagtt

SEQ ID NO: 32517 - DNA, 20 bp, Artificial Sequence
  Description of Artificial Sequence: Synthetic oligonucleotide
  Target: SCNA; (+) strand; PAM type: NRG; PAM sequence: GAG
gtatgttttactaaagtttg

SEQ ID NO: 32518 - DNA, 20 bp, Artificial Sequence
  Description of Artificial Sequence: Synthetic oligonucleotide
  Target: SCNA; (+) strand; PAM type: NRG; PAM sequence: AAG
ttttactaaagtttggagaa

SEQ ID NO: 32519 - DNA, 20 bp, Artificial Sequence
  Description of Artificial Sequence: Synthetic oligonucleotide
  Target: SCNA; (+) strand; PAM type: NRG; PAM sequence: CAG
ctaaagtttggagaaaagat

SEQ ID NO: 32520 - DNA, 20 bp, Artificial Sequence
  Description of Artificial Sequence: Synthetic oligonucleotide
  Target: SCNA; (+) strand; PAM type: NRG; PAM sequence: TAG
aaaatatgaaattataccaa

SEQ ID NO: 32521 - DNA, 20 bp, Artificial Sequence
  Description of Artificial Sequence: Synthetic oligonucleotide
  Target: SCNA; (+) strand; PAM type: NRG; PAM sequence: TAG
aattataccaatagcattat

SEQ ID NO: 32522 - DNA, 20 bp, Artificial Sequence
  Description of Artificial Sequence: Synthetic oligonucleotide
  Target: SCNA; (+) strand; PAM type: NRG; PAM sequence: TAG
accaatagcattattagaaa

SEQ ID NO: 32523 - DNA, 20 bp, Artificial Sequence
  Description of Artificial Sequence: Synthetic oligonucleotide
  Target: SCNA; (+) strand; PAM type: NRG; PAM sequence: AAG
gcattattagaaatagttaa

SEQ ID NO: 32524 - DNA, 20 bp, Artificial Sequence
  Description of Artificial Sequence: Synthetic oligonucleotide
  Target: SCNA; (+) strand; PAM type: NRG; PAM sequence: AAG
ttagaaatagttaaaagaca

SEQ ID NO: 32525 - DNA, 20 bp, Artificial Sequence
  Description of Artificial Sequence: Synthetic oligonucleotide
  Target: SCNA; (+) strand; PAM type: NRG; PAM sequence: AAG
atagttaaaagacaaagttt

SEQ ID NO: 32526 - DNA, 20 bp, Artificial Sequence
  Description of Artificial Sequence: Synthetic oligonucleotide
  Target: SCNA; (+) strand; PAM type: NRG; PAM sequence: AAG
tcataatcatatcacttttt

SEQ ID NO: 32527 - DNA, 20 bp, Artificial Sequence
  Description of Artificial Sequence: Synthetic oligonucleotide
  Target: SCNA; (+) strand; PAM type: NRG; PAM sequence: AAG
tttaagtgactaaactacta

SEQ ID NO: 32528 - DNA, 20 bp, Artificial Sequence
  Description of Artificial Sequence: Synthetic oligonucleotide
  Target: SCNA; (+) strand; PAM type: NRG; PAM sequence: TAG
taaactactaaagaaacatt

SEQ ID NO: 32529 - DNA, 20 bp, Artificial Sequence
  Description of Artificial Sequence: Synthetic oligonucleotide
  Target: SCNA; (+) strand; PAM type: NRG; PAM sequence: GAG
gtaaaatttctatgtgtttt

SEQ ID NO: 32530 - DNA, 20 bp, Artificial Sequence
  Description of Artificial Sequence: Synthetic oligonucleotide
  Target: SCNA; (+) strand; PAM type: NRG; PAM sequence: AGG
taaaatttctatgtgttttg

SEQ ID NO: 32531 - DNA, 20 bp, Artificial Sequence
  Description of Artificial Sequence: Synthetic oligonucleotide
  Target: SCNA; (+) strand; PAM type: NRG; PAM sequence: TAG
ccatcataaaattttcaact

SEQ ID NO: 32532 - DNA, 20 bp, Artificial Sequence
  Description of Artificial Sequence: Synthetic oligonucleotide
  Target: SCNA; (+) strand; PAM type: NRG; PAM sequence: GAG
atcataaaattttcaactta

SEQ ID NO: 32533 - DNA, 20 bp, Artificial Sequence
  Description of Artificial Sequence: Synthetic oligonucleotide
  Target: SCNA; (+) strand; PAM type: NRG; PAM sequence: AAG
tgaaaaattataatattttc

SEQ ID NO: 32534 - DNA, 20 bp, Artificial Sequence
  Description of Artificial Sequence: Synthetic oligonucleotide
  Target: SCNA; (+) strand; PAM type: NRG; PAM sequence: TGG
ataatattttcaagtaaaaa

SEQ ID NO: 32535 - DNA, 20 bp, Artificial Sequence
  Description of Artificial Sequence: Synthetic oligonucleotide
  Target: SCNA; (+) strand; PAM type: NRG; PAM sequence: AAG
atttattaaaacataaataa

SEQ ID NO: 32536 - DNA, 20 bp, Artificial Sequence
  Description of Artificial Sequence: Synthetic oligonucleotide
  Target: SCNA; (+) strand; PAM type: NRG; PAM sequence: TAG
cccacactttgacacatgat

SEQ ID NO: 32537 - DNA, 20 bp, Artificial Sequence
  Description of Artificial Sequence: Synthetic oligonucleotide
  Target: SCNA; (+) strand; PAM type: NRG; PAM sequence: AAG
gacacatgattagaaaaaaa

SEQ ID NO: 32538 - DNA, 20 bp, Artificial Sequence
  Description of Artificial Sequence: Synthetic oligonucleotide
  Target: SCNA; (+) strand; PAM type: NRG; PAM sequence: AGG
acacatgattagaaaaaaaa

SEQ ID NO: 32539 - DNA, 20 bp, Artificial Sequence
  Description of Artificial Sequence: Synthetic oligonucleotide
  Target: SCNA; (+) strand; PAM type: NRG; PAM sequence: CAG
catgattagaaaaaaaaagg

SEQ ID NO: 32540 - DNA, 20 bp, Artificial Sequence
  Description of Artificial Sequence: Synthetic oligonucleotide
  Target: SCNA; (+) strand; PAM type: NRG; PAM sequence: AAG
attagaaaaaaaaaggcagt

SEQ ID NO: 32541 - DNA, 20 bp, Artificial Sequence
  Description of Artificial Sequence: Synthetic oligonucleotide
  Target: SCNA; (+) strand; PAM type: NRG; PAM sequence: CAG
aaggcagtaagattttcata

SEQ ID NO: 32542 - DNA, 20 bp, Artificial Sequence
  Description of Artificial Sequence: Synthetic oligonucleotide
  Target: SCNA; (+) strand; PAM type: NRG; PAM sequence: TGG
aagattttcatacagaattc

SEQ ID NO: 32543 - DNA, 20 bp, Artificial Sequence
  Description of Artificial Sequence: Synthetic oligonucleotide
  Target: SCNA; (+) strand; PAM type: NRG; PAM sequence: GGG
agattttcatacagaattct

SEQ ID NO: 32544 - DNA, 20 bp, Artificial Sequence
  Description of Artificial Sequence: Synthetic oligonucleotide
  Target: SCNA; (+) strand; PAM type: NRG; PAM sequence: GGG
gattttcatacagaattctg

SEQ ID NO: 32545 - DNA, 20 bp, Artificial Sequence
  Description of Artificial Sequence: Synthetic oligonucleotide
  Target: SCNA; (+) strand; PAM type: NRG; PAM sequence: AAG
tcatacagaattctggggtt

SEQ ID NO: 32546 - DNA, 20 bp, Artificial Sequence
  Description of Artificial Sequence: Synthetic oligonucleotide
  Target: SCNA; (+) strand; PAM type: NRG; PAM sequence: TAG
tacagaattctggggttaag

SEQ ID NO: 32547 - DNA, 20 bp, Artificial Sequence
  Description of Artificial Sequence: Synthetic oligonucleotide
  Target: SCNA; (+) strand; PAM type: NRG; PAM sequence: TGG
tagaattcacttgtgtttgc

SEQ ID NO: 32548 - DNA, 20 bp, Artificial Sequence
  Description of Artificial Sequence: Synthetic oligonucleotide
  Target: SCNA; (+) strand; PAM type: NRG; PAM sequence: AAG
tcacttgtgtttgctggtct

SEQ ID NO: 32549 - DNA, 20 bp, Artificial Sequence
  Description of Artificial Sequence: Synthetic oligonucleotide
  Target: SCNA; (+) strand; PAM type: NRG; PAM sequence: TGG
tttgctggtctaagatgcaa

SEQ ID NO: 32550 - DNA, 20 bp, Artificial Sequence
  Description of Artificial Sequence: Synthetic oligonucleotide
  Target: SCNA; (+) strand; PAM type: NRG; PAM sequence: TGG
gtctaagatgcaatggaatt

SEQ ID NO: 32551 - DNA, 20 bp, Artificial Sequence
  Description of Artificial Sequence: Synthetic oligonucleotide
  Target: SCNA; (+) strand; PAM type: NRG; PAM sequence: GAG
ctaagatgcaatggaatttg

SEQ ID NO: 32552 - DNA, 20 bp, Artificial Sequence
  Description of Artificial Sequence: Synthetic oligonucleotide
  Target: SCNA; (+) strand; PAM type: NRG; PAM sequence: AGG
taagatgcaatggaatttgg

SEQ ID NO: 32553 - DNA, 20 bp, Artificial Sequence
  Description of Artificial Sequence: Synthetic oligonucleotide
  Target: SCNA; (+) strand; PAM type: NRG; PAM sequence: TGG
gcaatggaatttggaggcaa

SEQ ID NO: 32554 - DNA, 20 bp, Artificial Sequence
  Description of Artificial Sequence: Synthetic oligonucleotide
  Target: SCNA; (+) strand; PAM type: NRG; PAM sequence: GGG
caatggaatttggaggcaat

SEQ ID NO: 32555 - DNA, 20 bp, Artificial Sequence
  Description of Artificial Sequence: Synthetic oligonucleotide
  Target: SCNA; (+) strand; PAM type: NRG; PAM sequence: GGG
aatggaatttggaggcaatg

SEQ ID NO: 32556 - DNA, 20 bp, Artificial Sequence
  Description of Artificial Sequence: Synthetic oligonucleotide
  Target: SCNA; (+) strand; PAM type: NRG; PAM sequence: TGG
gaatttggaggcaatggggc

SEQ ID NO: 32557 - DNA, 20 bp, Artificial Sequence
  Description of Artificial Sequence: Synthetic oligonucleotide
  Target: SCNA; (+) strand; PAM type: NRG; PAM sequence: CAG
ggggctggattctatcaaat

SEQ ID NO: 32558 - DNA, 20 bp, Artificial Sequence
  Description of Artificial Sequence: Synthetic oligonucleotide
  Target: SCNA; (+) strand; PAM type: NRG; PAM sequence: CGG
attctatcaaatcagacaca

SEQ ID NO: 32559 - DNA, 20 bp, Artificial Sequence
  Description of Artificial Sequence: Synthetic oligonucleotide
  Target: SCNA; (+) strand; PAM type: NRG; PAM sequence: AAG
ctatcaaatcagacacacgg

SEQ ID NO: 32560 - DNA, 20 bp, Artificial Sequence
  Description of Artificial Sequence: Synthetic oligonucleotide
  Target: SCNA; (+) strand; PAM type: NRG; PAM sequence: GAG
atcaaatcagacacacggaa

SEQ ID NO: 32561 - DNA, 20 bp, Artificial Sequence
  Description of Artificial Sequence: Synthetic oligonucleotide
  Target: SCNA; (+) strand; PAM type: NRG; PAM sequence: AGG
tcaaatcagacacacggaag

SEQ ID NO: 32562 - DNA, 20 bp, Artificial Sequence
  Description of Artificial Sequence: Synthetic oligonucleotide
  Target: SCNA; (+) strand; PAM type: NRG; PAM sequence: GAG
cacggaagaggttataacgt

SEQ ID NO: 32563 - DNA, 20 bp, Artificial Sequence
  Description of Artificial Sequence: Synthetic oligonucleotide
  Target: SCNA; (+) strand; PAM type: NRG; PAM sequence: CAG
tttatattttttcattttct

SEQ ID NO: 32564 - DNA, 20 bp, Artificial Sequence
  Description of Artificial Sequence: Synthetic oligonucleotide
  Target: SCNA; (+) strand; PAM type: NRG; PAM sequence: AAG
cacttgaaataacaatttgc

SEQ ID NO: 32565 - DNA, 20 bp, Artificial Sequence
  Description of Artificial Sequence: Synthetic oligonucleotide
  Target: SCNA; (+) strand; PAM type: NRG; PAM sequence: GAG
cttgaaataacaatttgcaa

SEQ ID NO: 32566 - DNA, 20 bp, Artificial Sequence
  Description of Artificial Sequence: Synthetic oligonucleotide
  Target: SCNA; (+) strand; PAM type: NRG; PAM sequence: TAG
agttttgctttgctcaatat

SEQ ID NO: 32567 - DNA, 20 bp, Artificial Sequence
  Description of Artificial Sequence: Synthetic oligonucleotide
  Target: SCNA; (+) strand; PAM type: NRG; PAM sequence: AGG
gttttgctttgctcaatatt

SEQ ID NO: 32568 - DNA, 20 bp, Artificial Sequence
  Description of Artificial Sequence: Synthetic oligonucleotide
  Target: SCNA; (+) strand; PAM type: NRG; PAM sequence: TAG
tgctcaatattaggcctgat

SEQ ID NO: 32569 - DNA, 20 bp, Artificial Sequence
  Description of Artificial Sequence: Synthetic oligonucleotide
  Target: SCNA; (+) strand; PAM type: NRG; PAM sequence: CAG
ttccattcaatccttaaaaa

SEQ ID NO: 32570 - DNA, 20 bp, Artificial Sequence
  Description of Artificial Sequence: Synthetic oligonucleotide
  Target: SCNA; (+) strand; PAM type: NRG; PAM sequence: TAG
cttaaaaacagatccacact

SEQ ID NO: 32571 - DNA, 20 bp, Artificial Sequence
  Description of Artificial Sequence: Synthetic oligonucleotide
  Target: SCNA; (+) strand; PAM type: NRG; PAM sequence: TAG
tttctctattctcacattta

SEQ ID NO: 32572 - DNA, 20 bp, Artificial Sequence
  Description of Artificial Sequence: Synthetic oligonucleotide
  Target: SCNA; (+) strand; PAM type: NRG; PAM sequence: TGG
ctattctcacatttatagtc

SEQ ID NO: 32573 - DNA, 20 bp, Artificial Sequence
  Description of Artificial Sequence: Synthetic oligonucleotide
  Target: SCNA; (+) strand; PAM type: NRG; PAM sequence: CAG
ctcacatttatagtctggtt

SEQ ID NO: 32574 - DNA, 20 bp, Artificial Sequence
  Description of Artificial Sequence: Synthetic oligonucleotide
  Target: SCNA; (+) strand; PAM type: NRG; PAM sequence: TGG
tgatctgtcacttgctcttg

SEQ ID NO: 32575 - DNA, 20 bp, Artificial Sequence
  Description of Artificial Sequence: Synthetic oligonucleotide
  Target: SCNA; (+) strand; PAM type: NRG; PAM sequence: AAG
ctcttgtggttaaatttctg

SEQ ID NO: 32576 - DNA, 20 bp, Artificial Sequence
  Description of Artificial Sequence: Synthetic oligonucleotide
  Target: SCNA; (+) strand; PAM type: NRG; PAM sequence: CAG
tcttctcctatgtatgtcat

SEQ ID NO: 32577 - DNA, 20 bp, Artificial Sequence
  Description of Artificial Sequence: Synthetic oligonucleotide
  Target: SCNA; (+) strand; PAM type: NRG; PAM sequence: TAG
aacccaaaatgtgttttcac

SEQ ID NO: 32578 - DNA, 20 bp, Artificial Sequence
  Description of Artificial Sequence: Synthetic oligonucleotide
  Target: SCNA; (+) strand; PAM type: NRG; PAM sequence: TGG
aacacatccacattgcccac

SEQ ID NO: 32579 - DNA, 20 bp, Artificial Sequence
  Description of Artificial Sequence: Synthetic oligonucleotide
  Target: SCNA; (+) strand; PAM type: NRG; PAM sequence: TAG
tccacattgcccactggcta

SEQ ID NO: 32580 - DNA, 20 bp, Artificial Sequence
  Description of Artificial Sequence: Synthetic oligonucleotide
  Target: SCNA; (+) strand; PAM type: NRG; PAM sequence: GAG
cacattgcccactggctata

SEQ ID NO: 32581 - DNA, 20 bp, Artificial Sequence
  Description of Artificial Sequence: Synthetic oligonucleotide
  Target: SCNA; (+) strand; PAM type: NRG; PAM sequence: TAG
ctatagagttcaattcaaac

SEQ ID NO: 32582 - DNA, 20 bp, Artificial Sequence
  Description of Artificial Sequence: Synthetic oligonucleotide
  Target: SCNA; (+) strand; PAM type: NRG; PAM sequence: GAG
atagagttcaattcaaacta

SEQ ID NO: 32583 - DNA, 20 bp, Artificial Sequence
  Description of Artificial Sequence: Synthetic oligonucleotide
  Target: SCNA; (+) strand; PAM type: NRG; PAM sequence: TGG
aactagagtcattcactact

SEQ ID NO: 32584 - DNA, 20 bp, Artificial Sequence
  Description of Artificial Sequence: Synthetic oligonucleotide
  Target: SCNA; (+) strand; PAM type: NRG; PAM sequence: CAG
tcattcactacttggacaac

SEQ ID NO: 32585 - DNA, 20 bp, Artificial Sequence
  Description of Artificial Sequence: Synthetic oligonucleotide
  Target: SCNA; (+) strand; PAM type: NRG; PAM sequence: CAG
tacttggacaaccagcttcc

SEQ ID NO: 32586 - DNA, 20 bp, Artificial Sequence
  Description of Artificial Sequence: Synthetic oligonucleotide
  Target: SCNA; (+) strand; PAM type: NRG; PAM sequence: TGG
cagcttcccagctccacctc

SEQ ID NO: 32587 - DNA, 20 bp, Artificial Sequence
  Description of Artificial Sequence: Synthetic oligonucleotide
  Target: SCNA; (+) strand; PAM type: NRG; PAM sequence: GGG
agcttcccagctccacctct

SEQ ID NO: 32588 - DNA, 20 bp, Artificial Sequence
  Description of Artificial Sequence: Synthetic oligonucleotide
  Target: SCNA; (+) strand; PAM type: NRG; PAM sequence: CAG
ggtattctttctcttgcctt

SEQ ID NO: 32589 - DNA, 20 bp, Artificial Sequence
  Description of Artificial Sequence: Synthetic oligonucleotide
  Target: SCNA; (+) strand; PAM type: NRG; PAM sequence: TGG
tctttctcttgccttcagaa

SEQ ID NO: 32590 - DNA, 20 bp, Artificial Sequence
  Description of Artificial Sequence: Synthetic oligonucleotide
  Target: SCNA; (+) strand; PAM type: NRG; PAM sequence: GAG
cttgccttcagaatggtgtt

SEQ ID NO: 32591 - DNA, 20 bp, Artificial Sequence
  Description of Artificial Sequence: Synthetic oligonucleotide
  Target: SCNA; (+) strand; PAM type: NRG; PAM sequence: AGG
ttgccttcagaatggtgttg

SEQ ID NO: 32592 - DNA, 20 bp, Artificial Sequence
  Description of Artificial Sequence: Synthetic oligonucleotide
  Target: SCNA; (+) strand; PAM type: NRG; PAM sequence: AAG
cagaatggtgttgaggatat

SEQ ID NO: 32593 - DNA, 20 bp, Artificial Sequence
  Description of Artificial Sequence: Synthetic oligonucleotide
  Target: SCNA; (+) strand; PAM type: NRG; PAM sequence: AGG
agaatggtgttgaggatata

SEQ ID NO: 32594 - DNA, 20 bp, Artificial Sequence
  Description of Artificial Sequence: Synthetic oligonucleotide
  Target: SCNA; (+) strand; PAM type: NRG; PAM sequence: CAG
aggatataaggtgaatgcaa

SEQ ID NO: 32595 - DNA, 20 bp, Artificial Sequence
  Description of Artificial Sequence: Synthetic oligonucleotide
  Target: SCNA; (+) strand; PAM type: NRG; PAM sequence: CAG
aatgcaacagccattgctct

SEQ ID NO: 32596 - DNA, 20 bp, Artificial Sequence
  Description of Artificial Sequence: Synthetic oligonucleotide
  Target: SCNA; (+) strand; PAM type: NRG; PAM sequence: GAG
caacagccattgctctcagt

SEQ ID NO: 32597 - DNA, 20 bp, Artificial Sequence
  Description of Artificial Sequence: Synthetic oligonucleotide
  Target: SCNA; (+) strand; PAM type: NRG; PAM sequence: TAG
cattgctctcagtgagctca

SEQ ID NO: 32598 - DNA, 20 bp, Artificial Sequence
  Description of Artificial Sequence: Synthetic oligonucleotide
  Target: SCNA; (+) strand; PAM type: NRG; PAM sequence: AAG
tctcagtgagctcatagtct

SEQ ID NO: 32599 - DNA, 20 bp, Artificial Sequence
  Description of Artificial Sequence: Synthetic oligonucleotide
  Target: SCNA; (+) strand; PAM type: NRG; PAM sequence: GAG
agtgagctcatagtctaagt

SEQ ID NO: 32600 - DNA, 20 bp, Artificial Sequence
  Description of Artificial Sequence: Synthetic oligonucleotide
  Target: SCNA; (+) strand; PAM type: NRG; PAM sequence: AGG
gtgagctcatagtctaagtg

SEQ ID NO: 32601 - DNA, 20 bp, Artificial Sequence
  Description of Artificial Sequence: Synthetic oligonucleotide
  Target: SCNA; (+) strand; PAM type: NRG; PAM sequence: GAG
gagctcatagtctaagtgag

SEQ ID NO: 32602 - DNA, 20 bp, Artificial Sequence
  Description of Artificial Sequence: Synthetic oligonucleotide
  Target: SCNA; (+) strand; PAM type: NRG; PAM sequence: CAG
tcatagtctaagtgaggaga

SEQ ID NO: 32603 - DNA, 20 bp, Artificial Sequence
  Description of Artificial Sequence: Synthetic oligonucleotide
  Target: SCNA; (+) strand; PAM type: NRG; PAM sequence: GAG
gtctaagtgaggagacagat

SEQ ID NO: 32604 - DNA, 20 bp, Artificial Sequence
  Description of Artificial Sequence: Synthetic oligonucleotide
  Target: SCNA; (+) strand; PAM type: NRG; PAM sequence: CAG
taagtgaggagacagatgag

SEQ ID NO: 32605 - DNA, 20 bp, Artificial Sequence
  Description of Artificial Sequence: Synthetic oligonucleotide
  Target: SCNA; (+) strand; PAM type: NRG; PAM sequence: TGG
cagatcattataaaacaaat

SEQ ID NO: 32606 - DNA, 20 bp, Artificial Sequence
  Description of Artificial Sequence: Synthetic oligonucleotide
  Target: SCNA; (+) strand; PAM type: NRG; PAM sequence: AAG
tcattataaaacaaattggc

SEQ ID NO: 32607 - DNA, 20 bp, Artificial Sequence
  Description of Artificial Sequence: Synthetic oligonucleotide
  Target: SCNA; (+) strand; PAM type: NRG; PAM sequence: CAG
caaattggcaagtgcaatga

SEQ ID NO: 32608 - DNA, 20 bp, Artificial Sequence
  Description of Artificial Sequence: Synthetic oligonucleotide
  Target: SCNA; (+) strand; PAM type: NRG; PAM sequence: AAG
attggcaagtgcaatgacag

SEQ ID NO: 32609 - DNA, 20 bp, Artificial Sequence
  Description of Artificial Sequence: Synthetic oligonucleotide
  Target: SCNA; (+) strand; PAM type: NRG; PAM sequence: TAG
tgcaatgacagaagtgtgca

SEQ ID NO: 32610 - DNA, 20 bp, Artificial Sequence
  Description of Artificial Sequence: Synthetic oligonucleotide
  Target: SCNA; (+) strand; PAM type: NRG; PAM sequence: AGG
gcaatgacagaagtgtgcat

SEQ ID NO: 32611 - DNA, 20 bp, Artificial Sequence
  Description of Artificial Sequence: Synthetic oligonucleotide
  Target: SCNA; (+) strand; PAM type: NRG; PAM sequence: TGG
agaagtgtgcataggtgcta

SEQ ID NO: 32612 - DNA, 20 bp, Artificial Sequence
  Description of Artificial Sequence: Synthetic oligonucleotide
  Target: SCNA; (+) strand; PAM type: NRG; PAM sequence: GGG
gaagtgtgcataggtgctat

SEQ ID NO: 32613 - DNA, 20 bp, Artificial Sequence
  Description of Artificial Sequence: Synthetic oligonucleotide
  Target: SCNA; (+) strand; PAM type: NRG; PAM sequence: AAG
gcataggtgctatgggaacc

SEQ ID NO: 32614 - DNA, 20 bp, Artificial Sequence
  Description of Artificial Sequence: Synthetic oligonucleotide
  Target: SCNA; (+) strand; PAM type: NRG; PAM sequence: GAG
ataggtgctatgggaaccaa

SEQ ID NO: 32615 - DNA, 20 bp, Artificial Sequence
  Description of Artificial Sequence: Synthetic oligonucleotide
  Target: SCNA; (+) strand; PAM type: NRG; PAM sequence: AGG
taggtgctatgggaaccaag

SEQ ID NO: 32616 - DNA, 20 bp, Artificial Sequence
  Description of Artificial Sequence: Synthetic oligonucleotide
  Target: SCNA; (+) strand; PAM type: NRG; PAM sequence: AAG
gtgctatgggaaccaagagg

SEQ ID NO: 32617 - DNA, 20 bp, Artificial Sequence
  Description of Artificial Sequence: Synthetic oligonucleotide
  Target: SCNA; (+) strand; PAM type: NRG; PAM sequence: AGG
tgctatgggaaccaagagga

SEQ ID NO: 32618 - DNA, 20 bp, Artificial Sequence
  Description of Artificial Sequence: Synthetic oligonucleotide
  Target: SCNA; (+) strand; PAM type: NRG; PAM sequence: AAG
caagaggaaggatatataat

SEQ ID NO: 32619 - DNA, 20 bp, Artificial Sequence
  Description of Artificial Sequence: Synthetic oligonucleotide
  Target: SCNA; (+) strand; PAM type: NRG; PAM sequence: CAG
aggaaggatatataataagc

SEQ ID NO: 32620 - DNA, 20 bp, Artificial Sequence
  Description of Artificial Sequence: Synthetic oligonucleotide
  Target: SCNA; (+) strand; PAM type: NRG; PAM sequence: AGG
ggaaggatatataataagcc

SEQ ID NO: 32621 - DNA, 20 bp, Artificial Sequence
  Description of Artificial Sequence: Synthetic oligonucleotide
  Target: SCNA; (+) strand; PAM type: NRG; PAM sequence: GGG
gaaggatatataataagcca

SEQ ID NO: 32622 - DNA, 20 bp, Artificial Sequence
  Description of Artificial Sequence: Synthetic oligonucleotide
  Target: SCNA; (+) strand; PAM type: NRG; PAM sequence: AAG
ggatatataataagccaggg

SEQ ID NO: 32623 - DNA, 20 bp, Artificial Sequence
  Description of Artificial Sequence: Synthetic oligonucleotide
  Target: SCNA; (+) strand; PAM type: NRG; PAM sequence: AGG
gatatataataagccaggga

SEQ ID NO: 32624 - DNA, 20 bp, Artificial Sequence
  Description of Artificial Sequence: Synthetic oligonucleotide
  Target: SCNA; (+) strand; PAM type: NRG; PAM sequence: AAG
atataataagccagggaagg

SEQ ID NO: 32625 - DNA, 20 bp, Artificial Sequence
  Description of Artificial Sequence: Synthetic oligonucleotide
  Target: SCNA; (+) strand; PAM type: NRG; PAM sequence: GAG
ataataagccagggaaggaa

SEQ ID NO: 32626 - DNA, 20 bp, Artificial Sequence
  Description of Artificial Sequence: Synthetic oligonucleotide
  Target: SCNA; (+) strand; PAM type: NRG; PAM sequence: AAG
ataagccagggaaggaagag

SEQ ID NO: 32627 - DNA, 20 bp, Artificial Sequence
  Description of Artificial Sequence: Synthetic oligonucleotide
  Target: SCNA; (+) strand; PAM type: NRG; PAM sequence: CAG
cagggaaggaagagaagatt

SEQ ID NO: 32628 - DNA, 20 bp, Artificial Sequence
  Description of Artificial Sequence: Synthetic oligonucleotide
  Target: SCNA; (+) strand; PAM type: NRG; PAM sequence: AGG
agggaaggaagagaagattc

SEQ ID NO: 32629 - DNA, 20 bp, Artificial Sequence
  Description of Artificial Sequence: Synthetic oligonucleotide
  Target: SCNA; (+) strand; PAM type: NRG; PAM sequence: GGG
gggaaggaagagaagattca

SEQ ID NO: 32630 - DNA, 20 bp, Artificial Sequence
  Description of Artificial Sequence: Synthetic oligonucleotide
  Target: SCNA; (+) strand; PAM type: NRG; PAM sequence: GAG
gaaggaagagaagattcagg

SEQ ID NO: 32631 - DNA, 20 bp, Artificial Sequence
  Description of Artificial Sequence: Synthetic oligonucleotide
  Target: SCNA; (+) strand; PAM type: NRG; PAM sequence: TGG
gaagattcagggagacttac

SEQ ID NO: 32632 - DNA, 20 bp, Artificial Sequence
  Description of Artificial Sequence: Synthetic oligonucleotide
  Target: SCNA; (+) strand; PAM type: NRG; PAM sequence: GAG
agattcagggagacttactg

SEQ ID NO: 32633 - DNA, 20 bp, Artificial Sequence
  Description of Artificial Sequence: Synthetic oligonucleotide
  Target: SCNA; (+) strand; PAM type: NRG; PAM sequence: AGG
gattcagggagacttactgg

SEQ ID NO: 32634 - DNA, 20 bp, Artificial Sequence
  Description of Artificial Sequence: Synthetic oligonucleotide
  Target: SCNA; (+) strand; PAM type: NRG; PAM sequence: CAG
actggaggatgaattgccct

SEQ ID NO: 32635 - DNA, 20 bp, Artificial Sequence
  Description of Artificial Sequence: Synthetic oligonucleotide
  Target: SCNA; (+) strand; PAM type: NRG; PAM sequence: AAG
gaggatgaattgccctcaga

SEQ ID NO: 32636 - DNA, 20 bp, Artificial Sequence
  Description of Artificial Sequence: Synthetic oligonucleotide
  Target: SCNA; (+) strand; PAM type: NRG; PAM sequence: AAG
attgccctcagaaagtattg

SEQ ID NO: 32637 - DNA, 20 bp, Artificial Sequence
  Description of Artificial Sequence: Synthetic oligonucleotide
  Target: SCNA; (+) strand; PAM type: NRG; PAM sequence: TAG
cctcagaaagtattgaagtg

SEQ ID NO: 32638 - DNA, 20 bp, Artificial Sequence
  Description of Artificial Sequence: Synthetic oligonucleotide
  Target: SCNA; (+) strand; PAM type: NRG; PAM sequence: AGG
ctcagaaagtattgaagtgt

SEQ ID NO: 32639 - DNA, 20 bp, Artificial Sequence
  Description of Artificial Sequence: Synthetic oligonucleotide
  Target: SCNA; (+) strand; PAM type: NRG; PAM sequence: CAG
aagtattgaagtgtaggtaa

SEQ ID NO: 32640 - DNA, 20 bp, Artificial Sequence
  Description of Artificial Sequence: Synthetic oligonucleotide
  Target: SCNA; (+) strand; PAM type: NRG; PAM sequence: TGG
attgaagtgtaggtaacagt

SEQ ID NO: 32641 - DNA, 20 bp, Artificial Sequence
  Description of Artificial Sequence: Synthetic oligonucleotide
  Target: SCNA; (+) strand; PAM type: NRG; PAM sequence: AAG
agtgtaggtaacagttggtt

SEQ ID NO: 32642 - DNA, 20 bp, Artificial Sequence
  Description of Artificial Sequence: Synthetic oligonucleotide
  Target: SCNA; (+) strand; PAM type: NRG; PAM sequence: GAG
tgtaggtaacagttggttaa

SEQ ID NO: 32643 - DNA, 20 bp, Artificial Sequence
  Description of Artificial Sequence: Synthetic oligonucleotide
  Target: SCNA; (+) strand; PAM type: NRG; PAM sequence: AAG
aggtaacagttggttaagag

SEQ ID NO: 32644 - DNA, 20 bp, Artificial Sequence
  Description of Artificial Sequence: Synthetic oligonucleotide
  Target: SCNA; (+) strand; PAM type: NRG; PAM sequence: CAG
taacagttggttaagagaag

SEQ ID NO: 32645 - DNA, 20 bp, Artificial Sequence
  Description of Artificial Sequence: Synthetic oligonucleotide
  Target: SCNA; (+) strand; PAM type: NRG; PAM sequence: AAG
agttggttaagagaagcaga

SEQ ID NO: 32646 - DNA, 20 bp, Artificial Sequence
  Description of Artificial Sequence: Synthetic oligonucleotide
  Target: SCNA; (+) strand; PAM type: NRG; PAM sequence: AAG
tggttaagagaagcagaaag

SEQ ID NO: 32647 - DNA, 20 bp, Artificial Sequence
  Description of Artificial Sequence: Synthetic oligonucleotide
  Target: SCNA; (+) strand; PAM type: NRG; PAM sequence: AGG
ggttaagagaagcagaaaga

SEQ ID NO: 32648 - DNA, 20 bp, Artificial Sequence
  Description of Artificial Sequence: Synthetic oligonucleotide
  Target: SCNA; (+) strand; PAM type: NRG; PAM sequence: AAG
agagaagcagaaagaaggaa

SEQ ID NO: 32649 - DNA, 20 bp, Artificial Sequence
  Description of Artificial Sequence: Synthetic oligonucleotide
  Target: SCNA; (+) strand; PAM type: NRG; PAM sequence: AGG
gagaagcagaaagaaggaaa

SEQ ID NO: 32650 - DNA, 20 bp, Artificial Sequence
  Description of Artificial Sequence: Synthetic oligonucleotide
  Target: SCNA; (+) strand; PAM type: NRG; PAM sequence: GAG
gaagcagaaagaaggaaaag

SEQ ID NO: 32651 - DNA, 20 bp, Artificial Sequence
  Description of Artificial Sequence: Synthetic oligonucleotide
  Target: SCNA; (+) strand; PAM type: NRG; PAM sequence: CAG
cagaaagaaggaaaaggaga

SEQ ID NO: 32652 - DNA, 20 bp, Artificial Sequence
  Description of Artificial Sequence: Synthetic oligonucleotide
  Target: SCNA; (+) strand; PAM type: NRG; PAM sequence: CAG
aaagaaggaaaaggagacag

SEQ ID NO: 32653 - DNA, 20 bp, Artificial Sequence
  Description of Artificial Sequence: Synthetic oligonucleotide
  Target: SCNA; (+) strand; PAM type: NRG; PAM sequence: CAG
aggaaaaggagacagcagca

SEQ ID NO: 32654 - DNA, 20 bp, Artificial Sequence
  Description of Artificial Sequence: Synthetic oligonucleotide
  Target: SCNA; (+) strand; PAM type: NRG; PAM sequence: AGG
ggaaaaggagacagcagcac

SEQ ID NO: 32655 - DNA, 20 bp, Artificial Sequence
  Description of Artificial Sequence: Synthetic oligonucleotide
  Target: SCNA; (+) strand; PAM type: NRG; PAM sequence: GGG
gaaaaggagacagcagcaca

SEQ ID NO: 32656 - DNA, 20 bp, Artificial Sequence
  Description of Artificial Sequence: Synthetic oligonucleotide
  Target: SCNA; (+) strand; PAM type: NRG; PAM sequence: AAG
gcagcacagggtgccaaaat

SEQ ID NO: 32657 - DNA, 20 bp, Artificial Sequence
  Description of Artificial Sequence: Synthetic oligonucleotide
  Target: SCNA; (+) strand; PAM type: NRG; PAM sequence: AAG
acagggtgccaaaataagaa

SEQ ID NO: 32658 - DNA, 20 bp, Artificial Sequence
  Description of Artificial Sequence: Synthetic oligonucleotide
  Target: SCNA; (+) strand; PAM type: NRG; PAM sequence: TGG
gtgccaaaataagaaaagcc

SEQ ID NO: 32659 - DNA, 20 bp, Artificial Sequence
  Description of Artificial Sequence: Synthetic oligonucleotide
  Target: SCNA; (+) strand; PAM type: NRG; PAM sequence: GGG
tgccaaaataagaaaagcct

SEQ ID NO: 32660 - DNA, 20 bp, Artificial Sequence
  Description of Artificial Sequence: Synthetic oligonucleotide
  Target: SCNA; (+) strand; PAM type: NRG; PAM sequence: AAG
aaagcctgggtaatactgcc

SEQ ID NO: 32661 - DNA, 20 bp, Artificial Sequence
  Description of Artificial Sequence: Synthetic oligonucleotide
  Target: SCNA; (+) strand; PAM type: NRG; PAM sequence: GAG
agcctgggtaatactgccaa

SEQ ID NO: 32662 - DNA, 20 bp, Artificial Sequence
  Description of Artificial Sequence: Synthetic oligonucleotide
  Target: SCNA; (+) strand; PAM type: NRG; PAM sequence: CAG
aataccaccatcattcttca

SEQ ID NO: 32663 - DNA, 20 bp, Artificial Sequence
  Description of Artificial Sequence: Synthetic oligonucleotide
  Target: SCNA; (+) strand; PAM type: NRG; PAM sequence: TAG
accatcattcttcacagaac

SEQ ID NO: 32664 - DNA, 20 bp, Artificial Sequence
  Description of Artificial Sequence: Synthetic oligonucleotide
  Target: SCNA; (+) strand; PAM type: NRG; PAM sequence: TGG
aaacaatcctaaaattcata

SEQ ID NO: 32665 - DNA, 20 bp, Artificial Sequence
  Description of Artificial Sequence: Synthetic oligonucleotide
  Target: SCNA; (+) strand; PAM type: NRG; PAM sequence: AAG
aaattcatatggaaccaaaa

SEQ ID NO: 32666 - DNA, 20 bp, Artificial Sequence
  Description of Artificial Sequence: Synthetic oligonucleotide
  Target: SCNA; (+) strand; PAM type: NRG; PAM sequence: GAG
attcatatggaaccaaaaaa

SEQ ID NO: 32667 - DNA, 20 bp, Artificial Sequence
  Description of Artificial Sequence: Synthetic oligonucleotide
  Target: SCNA; (+) strand; PAM type: NRG; PAM sequence: TAG
gaaccaaaaaagagcccaca

SEQ ID NO: 32668 - DNA, 20 bp, Artificial Sequence
  Description of Artificial Sequence: Synthetic oligonucleotide
  Target: SCNA; (+) strand; PAM type: NRG; PAM sequence: AAG
aaaaagagcccacatagcca

SEQ ID NO: 32669 - DNA, 20 bp, Artificial Sequence
  Description of Artificial Sequence: Synthetic oligonucleotide
  Target: SCNA; (+) strand; PAM type: NRG; PAM sequence: AAG
agagcccacatagccaaagc

SEQ ID NO: 32670 - DNA, 20 bp, Artificial Sequence
  Description of Artificial Sequence: Synthetic oligonucleotide
  Target: SCNA; (+) strand; PAM type: NRG; PAM sequence: AAG
cacatagccaaagcaagatt

SEQ ID NO: 32671 - DNA, 20 bp, Artificial Sequence
  Description of Artificial Sequence: Synthetic oligonucleotide
  Target: SCNA; (+) strand; PAM type: NRG; PAM sequence: AAG
ccaaagcaagattaagcaaa

SEQ ID NO: 32672 - DNA, 20 bp, Artificial Sequence
  Description of Artificial Sequence: Synthetic oligonucleotide
  Target: SCNA; (+) strand; PAM type: NRG; PAM sequence: TGG
attaagcaaaaagaaaaatc

SEQ ID NO: 32673 - DNA, 20 bp, Artificial Sequence
  Description of Artificial Sequence: Synthetic oligonucleotide
  Target: SCNA; (+) strand; PAM type: NRG; PAM sequence: GAG
taagcaaaaagaaaaatctg

SEQ ID NO: 32674 - DNA, 20 bp, Artificial Sequence
  Description of Artificial Sequence: Synthetic oligonucleotide
  Target: SCNA; (+) strand; PAM type: NRG; PAM sequence: AGG
aagcaaaaagaaaaatctgg

SEQ ID NO: 32675 - DNA, 20 bp, Artificial Sequence
  Description of Artificial Sequence: Synthetic oligonucleotide
  Target: SCNA; (+) strand; PAM type: NRG; PAM sequence: AAG
ctgctttcaaactatactat

SEQ ID NO: 32676 - DNA, 20 bp, Artificial Sequence
  Description of Artificial Sequence: Synthetic oligonucleotide
  Target: SCNA; (+) strand; PAM type: NRG; PAM sequence: AGG
tgctttcaaactatactata

SEQ ID NO: 32677 - DNA, 20 bp, Artificial Sequence
  Description of Artificial Sequence: Synthetic oligonucleotide
  Target: SCNA; (+) strand; PAM type: NRG; PAM sequence: TAG
caaactatactataaggcca

SEQ ID NO: 32678 - DNA, 20 bp, Artificial Sequence
  Description of Artificial Sequence: Synthetic oligonucleotide
  Target: SCNA; (+) strand; PAM type: NRG; PAM sequence: CAG
taaggccatagtcaccaaaa

SEQ ID NO: 32679 - DNA, 20 bp, Artificial Sequence
  Description of Artificial Sequence: Synthetic oligonucleotide
  Target: SCNA; (+) strand; PAM type: NRG; PAM sequence: TGG
ccatagtcaccaaaacagca

SEQ ID NO: 32680 - DNA, 20 bp, Artificial Sequence
  Description of Artificial Sequence: Synthetic oligonucleotide
  Target: SCNA; (+) strand; PAM type: NRG; PAM sequence: TGG
tcaccaaaacagcatggcac

SEQ ID NO: 32681 - DNA, 20 bp, Artificial Sequence
  Description of Artificial Sequence: Synthetic oligonucleotide
  Target: SCNA; (+) strand; PAM type: NRG; PAM sequence: TAG
gcatggcactggtataaaaa

SEQ ID NO: 32682 - DNA, 20 bp, Artificial Sequence
  Description of Artificial Sequence: Synthetic oligonucleotide
  Target: SCNA; (+) strand; PAM type: NRG; PAM sequence: AGG
catggcactggtataaaaat

SEQ ID NO: 32683 - DNA, 20 bp, Artificial Sequence
  Description of Artificial Sequence: Synthetic oligonucleotide
  Target: SCNA; (+) strand; PAM type: NRG; PAM sequence: CAG
ctggtataaaaataggcaca

SEQ ID NO: 32684 - DNA, 20 bp, Artificial Sequence
  Description of Artificial Sequence: Synthetic oligonucleotide
  Target: SCNA; (+) strand; PAM type: NRG; PAM sequence: CAG
aggcacacagaccaataaaa

SEQ ID NO: 32685 - DNA, 20 bp, Artificial Sequence
  Description of Artificial Sequence: Synthetic oligonucleotide
  Target: SCNA; (+) strand; PAM type: NRG; PAM sequence: TAG
cacagaccaataaaacagaa

SEQ ID NO: 32686 - DNA, 20 bp, Artificial Sequence
  Description of Artificial Sequence: Synthetic oligonucleotide
  Target: SCNA; (+) strand; PAM type: NRG; PAM sequence: GAG
cagaccaataaaacagaata

SEQ ID NO: 32687 - DNA, 20 bp, Artificial Sequence
  Description of Artificial Sequence: Synthetic oligonucleotide
  Target: SCNA; (+) strand; PAM type: NRG; PAM sequence: TAG
ataaaacagaatagagaacc

SEQ ID NO: 32688 - DNA, 20 bp, Artificial Sequence
  Description of Artificial Sequence: Synthetic oligonucleotide
  Target: SCNA; (+) strand; PAM type: NRG; PAM sequence: CAG
gaaataaacccaaatgctaa

SEQ ID NO: 32689 - DNA, 20 bp, Artificial Sequence
  Description of Artificial Sequence: Synthetic oligonucleotide
  Target: SCNA; (+) strand; PAM type: NRG; PAM sequence: AAG
aaacccaaatgctaacagcc

SEQ ID NO: 32690 - DNA, 20 bp, Artificial Sequence
  Description of Artificial Sequence: Synthetic oligonucleotide
  Target: SCNA; (+) strand; PAM type: NRG; PAM sequence: AAG
cagccaagtgatctttgaca

SEQ ID NO: 32691 - DNA, 20 bp, Artificial Sequence
  Description of Artificial Sequence: Synthetic oligonucleotide
  Target: SCNA; (+) strand; PAM type: NRG; PAM sequence: AAG
acaaagcaaataaaaacata

SEQ ID NO: 32692 - DNA, 20 bp, Artificial Sequence
  Description of Artificial Sequence: Synthetic oligonucleotide
  Target: SCNA; (+) strand; PAM type: NRG; PAM sequence: TGG
aagcaaataaaaacataaag

SEQ ID NO: 32693 - DNA, 20 bp, Artificial Sequence
  Description of Artificial Sequence: Synthetic oligonucleotide
  Target: SCNA; (+) strand; PAM type: NRG; PAM sequence: GGG
agcaaataaaaacataaagt

SEQ ID NO: 32694 - DNA, 20 bp, Artificial Sequence
  Description of Artificial Sequence: Synthetic oligonucleotide
  Target: SCNA; (+) strand; PAM type: NRG; PAM sequence: GGG
gcaaataaaaacataaagtg

SEQ ID NO: 32695 - DNA, 20 bp, Artificial Sequence
  Description of Artificial Sequence: Synthetic oligonucleotide
  Target: SCNA; (+) strand; PAM type: NRG; PAM sequence: AAG
ataaaaacataaagtgggga

SEQ ID NO: 32696 - DNA, 20 bp, Artificial Sequence
  Description of Artificial Sequence: Synthetic oligonucleotide
  Target: SCNA; (+) strand; PAM type: NRG; PAM sequence: AGG
taaaaacataaagtggggaa

SEQ ID NO: 32697 - DNA, 20 bp, Artificial Sequence
  Description of Artificial Sequence: Synthetic oligonucleotide
  Target: SCNA; (+) strand; PAM type: NRG; PAM sequence: TGG
aggacatttgatgtattgta

SEQ ID NO: 32698 - DNA, 20 bp, Artificial Sequence
  Description of Artificial Sequence: Synthetic oligonucleotide
  Target: SCNA; (+) strand; PAM type: NRG; PAM sequence: GGG
ggacatttgatgtattgtat

SEQ ID NO: 32699 - DNA, 20 bp, Artificial Sequence
  Description of Artificial Sequence: Synthetic oligonucleotide
  Target: SCNA; (+) strand; PAM type: NRG; PAM sequence: AAG
atgtattgtatgggttacat

SEQ ID NO: 32700 - DNA, 20 bp, Artificial Sequence
  Description of Artificial Sequence: Synthetic oligonucleotide
  Target: SCNA; (+) strand; PAM type: NRG; PAM sequence: AAG
tgggttacataagatcgatt

SEQ ID NO: 32701 - DNA, 20 bp, Artificial Sequence
  Description of Artificial Sequence: Synthetic oligonucleotide
  Target: SCNA; (+) strand; PAM type: NRG; PAM sequence: TGG
gttacataagatcgattaag

SEQ ID NO: 32702 - DNA, 20 bp, Artificial Sequence
  Description of Artificial Sequence: Synthetic oligonucleotide
  Target: SCNA; (+) strand; PAM type: NRG; PAM sequence: GAG
tacataagatcgattaagtg

SEQ ID NO: 32703 - DNA, 20 bp, Artificial Sequence
  Description of Artificial Sequence: Synthetic oligonucleotide
  Target: SCNA; (+) strand; PAM type: NRG; PAM sequence: TGG
taagatcgattaagtggaga

SEQ ID NO: 32704 - DNA, 20 bp, Artificial Sequence
  Description of Artificial Sequence: Synthetic oligonucleotide
  Target: SCNA; (+) strand; PAM type: NRG; PAM sequence: TAG
tgtaaactatttttaaatat

SEQ ID NO: 32705 - DNA, 20 bp, Artificial Sequence
  Description of Artificial Sequence: Synthetic oligonucleotide
  Target: SCNA; (+) strand; PAM type: NRG; PAM sequence: TGG
aaactatttttaaatattag

SEQ ID NO: 32706 - DNA, 20 bp, Artificial Sequence
  Description of Artificial Sequence: Synthetic oligonucleotide
  Target: SCNA; (+) strand; PAM type: NRG; PAM sequence: AAG
ttttaaatattagtggcaaa

SEQ ID NO: 32707 - DNA, 20 bp, Artificial Sequence
  Description of Artificial Sequence: Synthetic oligonucleotide
  Target: SCNA; (+) strand; PAM type: NRG; PAM sequence: TGG
tagtggcaaaaagactaata

SEQ ID NO: 32708 - DNA, 20 bp, Artificial Sequence
  Description of Artificial Sequence: Synthetic oligonucleotide
  Target: SCNA; (+) strand; PAM type: NRG; PAM sequence: GAG
ttgatgtcccaaactattgt

SEQ ID NO: 32709 - DNA, 20 bp, Artificial Sequence
  Description of Artificial Sequence: Synthetic oligonucleotide
  Target: SCNA; (+) strand; PAM type: NRG; PAM sequence: TGG
gtcccaaactattgtgagat

SEQ ID NO: 32710 - DNA, 20 bp, Artificial Sequence
  Description of Artificial Sequence: Synthetic oligonucleotide
  Target: SCNA; (+) strand; PAM type: NRG; PAM sequence: TAG
agattggttataataaaaaa

SEQ ID NO: 32711 - DNA, 20 bp, Artificial Sequence
  Description of Artificial Sequence: Synthetic oligonucleotide
  Target: SCNA; (+) strand; PAM type: NRG; PAM sequence: AAG
taccctgctgatttcccatg

SEQ ID NO: 32712 - DNA, 20 bp, Artificial Sequence
  Description of Artificial Sequence: Synthetic oligonucleotide
  Target: SCNA; (+) strand; PAM type: NRG; PAM sequence: CAG
cttaaccctctctcacattt

SEQ ID NO: 32713 - DNA, 20 bp, Artificial Sequence
  Description of Artificial Sequence: Synthetic oligonucleotide
  Target: SCNA; (+) strand; PAM type: NRG; PAM sequence: CAG
cctctctcacatttcagaac

SEQ ID NO: 32714 - DNA, 20 bp, Artificial Sequence
  Description of Artificial Sequence: Synthetic oligonucleotide
  Target: SCNA; (+) strand; PAM type: NRG; PAM sequence: AAG
tttcagaaccagcctgactt

SEQ ID NO: 32715 - DNA, 20 bp, Artificial Sequence
  Description of Artificial Sequence: Synthetic oligonucleotide
  Target: SCNA; (+) strand; PAM type: NRG; PAM sequence: CAG
taagcctctacatacttaaa

SEQ ID NO: 32716 - DNA, 20 bp, Artificial Sequence
  Description of Artificial Sequence: Synthetic oligonucleotide
  Target: SCNA; (+) strand; PAM type: NRG; PAM sequence: GAG
acagcttcaaatgcctatct

SEQ ID NO: 32717 - DNA, 20 bp, Artificial Sequence
  Description of Artificial Sequence: Synthetic oligonucleotide
  Target: SCNA; (+) strand; PAM type: NRG; PAM sequence: CAG
cttcaaatgcctatctgaga

SEQ ID NO: 32718 - DNA, 20 bp, Artificial Sequence
  Description of Artificial Sequence: Synthetic oligonucleotide
  Target: SCNA; (+) strand; PAM type: NRG; PAM sequence: TGG
tatctgagacagctttgtaa

SEQ ID NO: 32719 - DNA, 20 bp, Artificial Sequence
  Description of Artificial Sequence: Synthetic oligonucleotide
  Target: SCNA; (+) strand; PAM type: NRG; PAM sequence: GGG
atctgagacagctttgtaat

SEQ ID NO: 32720 - DNA, 20 bp, Artificial Sequence
  Description of Artificial Sequence: Synthetic oligonucleotide
  Target: SCNA; (+) strand; PAM type: NRG; PAM sequence: AAG
gcccctgtttctctgtccac

SEQ ID NO: 32721 - DNA, 20 bp, Artificial Sequence
  Description of Artificial Sequence: Synthetic oligonucleotide
  Target: SCNA; (+) strand; PAM type: NRG; PAM sequence: GAG
ccctgtttctctgtccacaa

SEQ ID NO: 32722 - DNA, 20 bp, Artificial Sequence
  Description of Artificial Sequence: Synthetic oligonucleotide
  Target: SCNA; (+) strand; PAM type: NRG; PAM sequence: AGG
cctgtttctctgtccacaag

SEQ ID NO: 32723 - DNA, 20 bp, Artificial Sequence
  Description of Artificial Sequence: Synthetic oligonucleotide
  Target: SCNA; (+) strand; PAM type: NRG; PAM sequence: CAG
ggtactaattcacttctctt

SEQ ID NO: 32724 - DNA, 20 bp, Artificial Sequence
  Description of Artificial Sequence: Synthetic oligonucleotide
  Target: SCNA; (+) strand; PAM type: NRG; PAM sequence: TAG
attcacttctcttcagttgt

SEQ ID NO: 32725 - DNA, 20 bp, Artificial Sequence
  Description of Artificial Sequence: Synthetic oligonucleotide
  Target: SCNA; (+) strand; PAM type: NRG; PAM sequence: TAG
ttctcttcagttgttagacc

SEQ ID NO: 32726 - DNA, 20 bp, Artificial Sequence
  Description of Artificial Sequence: Synthetic oligonucleotide
  Target: SCNA; (+) strand; PAM type: NRG; PAM sequence: AGG
tctcttcagttgttagacct

SEQ ID NO: 32727 - DNA, 20 bp, Artificial Sequence
  Description of Artificial Sequence: Synthetic oligonucleotide
  Target: SCNA; (+) strand; PAM type: NRG; PAM sequence: TAG
ttgttagacctaggacacaa

SEQ ID NO: 32728 - DNA, 20 bp, Artificial Sequence
  Description of Artificial Sequence: Synthetic oligonucleotide
  Target: SCNA; (+) strand; PAM type: NRG; PAM sequence: AAG
cctaggacacaatagacacc

SEQ ID NO: 32729 - DNA, 20 bp, Artificial Sequence
  Description of Artificial Sequence: Synthetic oligonucleotide
  Target: SCNA; (+) strand; PAM type: NRG; PAM sequence: TAG
acaccaagttacatttctgt

SEQ ID NO: 32730 - DNA, 20 bp, Artificial Sequence
  Description of Artificial Sequence: Synthetic oligonucleotide
  Target: SCNA; (+) strand; PAM type: NRG; PAM sequence: AGG
caccaagttacatttctgtt

SEQ ID NO: 32731 - DNA, 20 bp, Artificial Sequence
  Description of Artificial Sequence: Synthetic oligonucleotide
  Target: SCNA; (+) strand; PAM type: NRG; PAM sequence: TGG
catttctgttaggtgcatct

SEQ ID NO: 32732 - DNA, 20 bp, Artificial Sequence
  Description of Artificial Sequence: Synthetic oligonucleotide
  Target: SCNA; (+) strand; PAM type: NRG; PAM sequence: AAG
ttctgttaggtgcatcttgg

SEQ ID NO: 32733 - DNA, 20 bp, Artificial Sequence
  Description of Artificial Sequence: Synthetic oligonucleotide
  Target: SCNA; (+) strand; PAM type: NRG; PAM sequence: GAG
ggtgcatcttggaagtgcct

SEQ ID NO: 32734 - DNA, 20 bp, Artificial Sequence
  Description of Artificial Sequence: Synthetic oligonucleotide
  Target: SCNA; (+) strand; PAM type: NRG; PAM sequence: TGG
agtgcctgagaactgaccac

SEQ ID NO: 32735 - DNA, 20 bp, Artificial Sequence
  Description of Artificial Sequence: Synthetic oligonucleotide
  Target: SCNA; (+) strand; PAM type: NRG; PAM sequence: GGG
gtgcctgagaactgaccact

SEQ ID NO: 32736 - DNA, 20 bp, Artificial Sequence
  Description of Artificial Sequence: Synthetic oligonucleotide
  Target: SCNA; (+) strand; PAM type: NRG; PAM sequence: AAG
gggcacctacctttttacct

SEQ ID NO: 32737 - DNA, 20 bp, Artificial Sequence
  Description of Artificial Sequence: Synthetic oligonucleotide
  Target: SCNA; (+) strand; PAM type: NRG; PAM sequence: TGG
acctaagtctctgttaatgt

SEQ ID NO: 32738 - DNA, 20 bp, Artificial Sequence
  Description of Artificial Sequence: Synthetic oligonucleotide
  Target: SCNA; (+) strand; PAM type: NRG; PAM sequence: TAG
atgttggtctgtttacctgt

SEQ ID NO: 32739 - DNA, 20 bp, Artificial Sequence
  Description of Artificial Sequence: Synthetic oligonucleotide
  Target: SCNA; (+) strand; PAM type: NRG; PAM sequence: TAG
ttggtctgtttacctgttag

SEQ ID NO: 32740 - DNA, 20 bp, Artificial Sequence
  Description of Artificial Sequence: Synthetic oligonucleotide
  Target: SCNA; (+) strand; PAM type: NRG; PAM sequence: TGG
gtctgtttacctgttagtag

SEQ ID NO: 32741 - DNA, 20 bp, Artificial Sequence
  Description of Artificial Sequence: Synthetic oligonucleotide
  Target: SCNA; (+) strand; PAM type: NRG; PAM sequence: GAG
ctgtttacctgttagtagtg

SEQ ID NO: 32742 - DNA, 20 bp, Artificial Sequence
  Description of Artificial Sequence: Synthetic oligonucleotide
  Target: SCNA; (+) strand; PAM type: NRG; PAM sequence: TGG
tacctgttagtagtggagcc

SEQ ID NO: 32743 - DNA, 20 bp, Artificial Sequence
  Description of Artificial Sequence: Synthetic oligonucleotide
  Target: SCNA; (+) strand; PAM type: NRG; PAM sequence: TAG
tagtagtggagcctggtgca

SEQ ID NO: 32744 - DNA, 20 bp, Artificial Sequence
  Description of Artificial Sequence: Synthetic oligonucleotide
  Target: SCNA; (+) strand; PAM type: NRG; PAM sequence: TGG
cacatatataaccccctgca

SEQ ID NO: 32745 - DNA, 20 bp, Artificial Sequence
  Description of Artificial Sequence: Synthetic oligonucleotide
  Target: SCNA; (+) strand; PAM type: NRG; PAM sequence: GAG
taaccccctgcatggcatat

SEQ ID NO: 32746 - DNA, 20 bp, Artificial Sequence
  Description of Artificial Sequence: Synthetic oligonucleotide
  Target: SCNA; (+) strand; PAM type: NRG; PAM sequence: AGG
aaccccctgcatggcatatg

SEQ ID NO: 32747 - DNA, 20 bp, Artificial Sequence
  Description of Artificial Sequence: Synthetic oligonucleotide
  Target: SCNA; (+) strand; PAM type: NRG; PAM sequence: GAG
tggcatatgaggcctttcct

SEQ ID NO: 32748 - DNA, 20 bp, Artificial Sequence
  Description of Artificial Sequence: Synthetic oligonucleotide
  Target: SCNA; (+) strand; PAM type: NRG; PAM sequence: GAG
gcatatgaggcctttcctga

SEQ ID NO: 32749 - DNA, 20 bp, Artificial Sequence
  Description of Artificial Sequence: Synthetic oligonucleotide
  Target: SCNA; (+) strand; PAM type: NRG; PAM sequence: AGG
catatgaggcctttcctgag

SEQ ID NO: 32750 - DNA, 20 bp, Artificial Sequence
  Description of Artificial Sequence: Synthetic oligonucleotide
  Target: SCNA; (+) strand; PAM type: NRG; PAM sequence: GGG
atatgaggcctttcctgaga

SEQ ID NO: 32751 - DNA, 20 bp, Artificial Sequence
  Description of Artificial Sequence: Synthetic oligonucleotide
  Target: SCNA; (+) strand; PAM type: NRG; PAM sequence: GGG
tatgaggcctttcctgagag

SEQ ID NO: 32752 - DNA, 20 bp, Artificial Sequence
  Description of Artificial Sequence: Synthetic oligonucleotide
  Target: SCNA; (+) strand; PAM type: NRG; PAM sequence: AAG
ttcctgagaggggtgctttt

SEQ ID NO: 32753 - DNA, 20 bp, Artificial Sequence
  Description of Artificial Sequence: Synthetic oligonucleotide
  Target: SCNA; (+) strand; PAM type: NRG; PAM sequence: CAG
gtgcttttaagccaacattc

SEQ ID NO: 32754 - DNA, 20 bp, Artificial Sequence
  Description of Artificial Sequence: Synthetic oligonucleotide
  Target: SCNA; (+) strand; PAM type: NRG; PAM sequence: GAG
gcttttaagccaacattcca

SEQ ID NO: 32755 - DNA, 20 bp, Artificial Sequence
  Description of Artificial Sequence: Synthetic oligonucleotide
  Target: SCNA; (+) strand; PAM type: NRG; PAM sequence: TAG
aagccaacattccagagacc

SEQ ID NO: 32756 - DNA, 20 bp, Artificial Sequence
  Description of Artificial Sequence: Synthetic oligonucleotide
  Target: SCNA; (+) strand; PAM type: NRG; PAM sequence: CAG
gagacctagttcccctgccc

SEQ ID NO: 32757 - DNA, 20 bp, Artificial Sequence
  Description of Artificial Sequence: Synthetic oligonucleotide
  Target: SCNA; (+) strand; PAM type: NRG; PAM sequence: AGG
agacctagttcccctgcccc

SEQ ID NO: 32758 - DNA, 20 bp, Artificial Sequence
  Description of Artificial Sequence: Synthetic oligonucleotide
  Target: SCNA; (+) strand; PAM type: NRG; PAM sequence: CAG
ttcccctgccccaggtgcct

SEQ ID NO: 32759 - DNA, 20 bp, Artificial Sequence
  Description of Artificial Sequence: Synthetic oligonucleotide
  Target: SCNA; (+) strand; PAM type: NRG; PAM sequence: TAG
ggtgcctcagtttttacacc

SEQ ID NO: 32760 - DNA, 20 bp, Artificial Sequence
  Description of Artificial Sequence: Synthetic oligonucleotide
  Target: SCNA; (+) strand; PAM type: NRG; PAM sequence: AGG
gtgcctcagtttttacacct

SEQ ID NO: 32761 - DNA, 20 bp, Artificial Sequence
  Description of Artificial Sequence: Synthetic oligonucleotide
  Target: SCNA; (+) strand; PAM type: NRG; PAM sequence: AAG
tgaatcttctcctcaatgac

SEQ ID NO: 32762 - DNA, 20 bp, Artificial Sequence
  Description of Artificial Sequence: Synthetic oligonucleotide
  Target: SCNA; (+) strand; PAM type: NRG; PAM sequence: TAG
gacaagtatctgtactcact

SEQ ID NO: 32763 - DNA, 20 bp, Artificial Sequence
  Description of Artificial Sequence: Synthetic oligonucleotide
  Target: SCNA; (+) strand; PAM type: NRG; PAM sequence: TGG
gtatctgtactcacttagtt

SEQ ID NO: 32764 - DNA, 20 bp, Artificial Sequence
  Description of Artificial Sequence: Synthetic oligonucleotide
  Target: SCNA; (+) strand; PAM type: NRG; PAM sequence: GGG
tatctgtactcacttagttt

SEQ ID NO: 32765 - DNA, 20 bp, Artificial Sequence
  Description of Artificial Sequence: Synthetic oligonucleotide
  Target: SCNA; (+) strand; PAM type: NRG; PAM sequence: GAG
tgggtccatgccacattcct

SEQ ID NO: 32766 - DNA, 20 bp, Artificial Sequence
  Description of Artificial Sequence: Synthetic oligonucleotide
  Target: SCNA; (+) strand; PAM type: NRG; PAM sequence: AGG
gggtccatgccacattcctg

SEQ ID NO: 32767 - DNA, 20 bp, Artificial Sequence
  Description of Artificial Sequence: Synthetic oligonucleotide
  Target: SCNA; (+) strand; PAM type: NRG; PAM sequence: TGG
gaaacccacctactccttga

SEQ ID NO: 32768 - DNA, 20 bp, Artificial Sequence
  Description of Artificial Sequence: Synthetic oligonucleotide
  Target: SCNA; (+) strand; PAM type: NRG; PAM sequence: CAG
cctactccttgatggccttc

SEQ ID NO: 32769 - DNA, 20 bp, Artificial Sequence
  Description of Artificial Sequence: Synthetic oligonucleotide
  Target: SCNA; (+) strand; PAM type: NRG; PAM sequence: AGG
ctactccttgatggccttcc

SEQ ID NO: 32770 - DNA, 20 bp, Artificial Sequence
  Description of Artificial Sequence: Synthetic oligonucleotide
  Target: SCNA; (+) strand; PAM type: NRG; PAM sequence: TAG
caggatgcttgtctgtacta

SEQ ID NO: 32771 - DNA, 20 bp, Artificial Sequence
  Description of Artificial Sequence: Synthetic oligonucleotide
  Target: SCNA; (+) strand; PAM type: NRG; PAM sequence: TGG
gatgcttgtctgtactatag

SEQ ID NO: 32772 - DNA, 20 bp, Artificial Sequence
  Description of Artificial Sequence: Synthetic oligonucleotide
  Target: SCNA; (+) strand; PAM type: NRG; PAM sequence: CGG
ggacatcccttcctgcctca

SEQ ID NO: 32773 - DNA, 20 bp, Artificial Sequence
  Description of Artificial Sequence: Synthetic oligonucleotide
  Target: SCNA; (+) strand; PAM type: NRG; PAM sequence: TGG
cgtgtgtgtgtgtgtatgtt

SEQ ID NO: 32774 - DNA, 20 bp, Artificial Sequence
  Description of Artificial Sequence: Synthetic oligonucleotide
  Target: SCNA; (+) strand; PAM type: NRG; PAM sequence: TGG
tgtgtatgtttggtttttac

SEQ ID NO: 32775 - DNA, 20 bp, Artificial Sequence
  Description of Artificial Sequence: Synthetic oligonucleotide
  Target: SCNA; (+) strand; PAM type: NRG; PAM sequence: GAG
ttggtttttactggattcct

SEQ ID NO: 32776 - DNA, 20 bp, Artificial Sequence
  Description of Artificial Sequence: Synthetic oligonucleotide
  Target: SCNA; (+) strand; PAM type: NRG; PAM sequence: AGG
tggtttttactggattcctg

SEQ ID NO: 32777 - DNA, 20 bp, Artificial Sequence
  Description of Artificial Sequence: Synthetic oligonucleotide
  Target: SCNA; (+) strand; PAM type: NRG; PAM sequence: AAG
tttttactggattcctgagg

SEQ ID NO: 32778 - DNA, 20 bp, Artificial Sequence
  Description of Artificial Sequence: Synthetic oligonucleotide
  Target: SCNA; (+) strand; PAM type: NRG; PAM sequence: AGG
ttttactggattcctgagga

SEQ ID NO: 32779 - DNA, 20 bp, Artificial Sequence
  Description of Artificial Sequence: Synthetic oligonucleotide
  Target: SCNA; (+) strand; PAM type: NRG; PAM sequence: TAG
tcatgtgctttgctacctgt

SEQ ID NO: 32780 - DNA, 20 bp, Artificial Sequence
  Description of Artificial Sequence: Synthetic oligonucleotide
  Target: SCNA; (+) strand; PAM type: NRG; PAM sequence: TGG
ctaatgtaaatgtaaacctc

SEQ ID NO: 32781 - DNA, 20 bp, Artificial Sequence
  Description of Artificial Sequence: Synthetic oligonucleotide
  Target: SCNA; (+) strand; PAM type: NRG; PAM sequence: TAG
atgtaaacctctggtgcctc

SEQ ID NO: 32782 - DNA, 20 bp, Artificial Sequence
  Description of Artificial Sequence: Synthetic oligonucleotide
  Target: SCNA; (+) strand; PAM type: NRG; PAM sequence: TGG
gacttatgttatataaatct

SEQ ID NO: 32783 - DNA, 20 bp, Artificial Sequence
  Description of Artificial Sequence: Synthetic oligonucleotide
  Target: SCNA; (+) strand; PAM type: NRG; PAM sequence: TGG
gttatataaatcttggttcc

SEQ ID NO: 32784 - DNA, 20 bp, Artificial Sequence
  Description of Artificial Sequence: Synthetic oligonucleotide
  Target: SCNA; (+) strand; PAM type: NRG; PAM sequence: GAG
tctttctgttgccctgttat

SEQ ID NO: 32785 - DNA, 20 bp, Artificial Sequence
  Description of Artificial Sequence: Synthetic oligonucleotide
  Target: SCNA; (+) strand; PAM type: NRG; PAM sequence: AAG
gttatgagatgtatcactct

SEQ ID NO: 32786 - DNA, 20 bp, Artificial Sequence
  Description of Artificial Sequence: Synthetic oligonucleotide
  Target: SCNA; (+) strand; PAM type: NRG; PAM sequence: AAG
gagatgtatcactctaagcc

SEQ ID NO: 32787 - DNA, 20 bp, Artificial Sequence
  Description of Artificial Sequence: Synthetic oligonucleotide
  Target: SCNA; (+) strand; PAM type: NRG; PAM sequence: AAG
ctaagccaagcccaaacact

SEQ ID NO: 32788 - DNA, 20 bp, Artificial Sequence
  Description of Artificial Sequence: Synthetic oligonucleotide
  Target: SCNA; (+) strand; PAM type: NRG; PAM sequence: AAG
agcccaaacactaagataac

SEQ ID NO: 32789 - DNA, 20 bp, Artificial Sequence
  Description of Artificial Sequence: Synthetic oligonucleotide
  Target: SCNA; (+) strand; PAM type: NRG; PAM sequence: AAG
cactaagataacaagtgcta

SEQ ID NO: 32790 - DNA, 20 bp, Artificial Sequence
  Description of Artificial Sequence: Synthetic oligonucleotide
  Target: SCNA; (+) strand; PAM type: NRG; PAM sequence: AAG
taaagatgacgaatattctg

SEQ ID NO: 32791 - DNA, 20 bp, Artificial Sequence
  Description of Artificial Sequence: Synthetic oligonucleotide
  Target: SCNA; (+) strand; PAM type: NRG; PAM sequence: GAG
aagatgacgaatattctgaa

SEQ ID NO: 32792 - DNA, 20 bp, Artificial Sequence
  Description of Artificial Sequence: Synthetic oligonucleotide
  Target: SCNA; (+) strand; PAM type: NRG; PAM sequence: CAG
cgaatattctgaagagtttt

SEQ ID NO: 32793 - DNA, 20 bp, Artificial Sequence
  Description of Artificial Sequence: Synthetic oligonucleotide
  Target: SCNA; (+) strand; PAM type: NRG; PAM sequence: AGG
gaatattctgaagagttttc

SEQ ID NO: 32794 - DNA, 20 bp, Artificial Sequence
  Description of Artificial Sequence: Synthetic oligonucleotide
  Target: SCNA; (+) strand; PAM type: NRG; PAM sequence: CAG
tgaagagttttcaggacaca

SEQ ID NO: 32795 - DNA, 20 bp, Artificial Sequence
  Description of Artificial Sequence: Synthetic oligonucleotide
  Target: SCNA; (+) strand; PAM type: NRG; PAM sequence: TGG
aggacacacagaattgtttg

SEQ ID NO: 32796 - DNA, 20 bp, Artificial Sequence
  Description of Artificial Sequence: Synthetic oligonucleotide
  Target: SCNA; (+) strand; PAM type: NRG; PAM sequence: CAG
cacacagaattgtttgtggc

SEQ ID NO: 32797 - DNA, 20 bp, Artificial Sequence
  Description of Artificial Sequence: Synthetic oligonucleotide
  Target: SCNA; (+) strand; PAM type: NRG; PAM sequence: CAG
attgtttgtggccagcacct

SEQ ID NO: 32798 - DNA, 20 bp, Artificial Sequence
  Description of Artificial Sequence: Synthetic oligonucleotide
  Target: SCNA; (+) strand; PAM type: NRG; PAM sequence: CAG
cagcacctcagtaccaataa

SEQ ID NO: 32799 - DNA, 20 bp, Artificial Sequence
  Description of Artificial Sequence: Synthetic oligonucleotide
  Target: SCNA; (+) strand; PAM type: NRG; PAM sequence: TAG
aacagatatttcatgttata

SEQ ID NO: 32800 - DNA, 20 bp, Artificial Sequence
  Description of Artificial Sequence: Synthetic oligonucleotide
  Target: SCNA; (+) strand; PAM type: NRG; PAM sequence: TGG
agatatttcatgttatatag

SEQ ID NO: 32801 - DNA, 20 bp, Artificial Sequence
  Description of Artificial Sequence: Synthetic oligonucleotide
  Target: SCNA; (+) strand; PAM type: NRG; PAM sequence: GGG
gatatttcatgttatatagt

SEQ ID NO: 32802 - DNA, 20 bp, Artificial Sequence
  Description of Artificial Sequence: Synthetic oligonucleotide
  Target: SCNA; (+) strand; PAM type: NRG; PAM sequence: GGG
atatttcatgttatatagtg

SEQ ID NO: 32803 - DNA, 20 bp, Artificial Sequence
  Description of Artificial Sequence: Synthetic oligonucleotide
  Target: SCNA; (+) strand; PAM type: NRG; PAM sequence: AAG
tgttatatagtggggtcatt

SEQ ID NO: 32804 - DNA, 20 bp, Artificial Sequence
  Description of Artificial Sequence: Synthetic oligonucleotide
  Target: SCNA; (+) strand; PAM type: NRG; PAM sequence: AGG
gttatatagtggggtcatta

SEQ ID NO: 32805 - DNA, 20 bp, Artificial Sequence
  Description of Artificial Sequence: Synthetic oligonucleotide
  Target: SCNA; (+) strand; PAM type: NRG; PAM sequence: GAG
gggtcattaaggacttattt

SEQ ID NO: 32806 - DNA, 20 bp, Artificial Sequence
  Description of Artificial Sequence: Synthetic oligonucleotide
  Target: SCNA; (+) strand; PAM type: NRG; PAM sequence: AGG
ggtcattaaggacttatttg

SEQ ID NO: 32807 - DNA, 20 bp, Artificial Sequence
  Description of Artificial Sequence: Synthetic oligonucleotide
  Target: SCNA; (+) strand; PAM type: NRG; PAM sequence: GGG
gtcattaaggacttatttga

SEQ ID NO: 32808 - DNA, 20 bp, Artificial Sequence
  Description of Artificial Sequence: Synthetic oligonucleotide
  Target: SCNA; (+) strand; PAM type: NRG; PAM sequence: AAG
acttatttgagggaataatc

SEQ ID NO: 32809 - DNA, 20 bp, Artificial Sequence
  Description of Artificial Sequence: Synthetic oligonucleotide
  Target: SCNA; (+) strand; PAM type: NRG; PAM sequence: TAG
aataatcaagaaaaacttcc

SEQ ID NO: 32810 - DNA, 20 bp, Artificial Sequence
  Description of Artificial Sequence: Synthetic oligonucleotide
  Target: SCNA; (+) strand; PAM type: NRG; PAM sequence: TAG
gaaaaacttcctagtcttgc

SEQ ID NO: 32811 - DNA, 20 bp, Artificial Sequence
  Description of Artificial Sequence: Synthetic oligonucleotide
  Target: SCNA; (+) strand; PAM type: NRG; PAM sequence: GAG
aaaacttcctagtcttgcta

SEQ ID NO: 32812 - DNA, 20 bp, Artificial Sequence
  Description of Artificial Sequence: Synthetic oligonucleotide
  Target: SCNA; (+) strand; PAM type: NRG; PAM sequence: TAG
tcctagtcttgctagagatc

SEQ ID NO: 32813 - DNA, 20 bp, Artificial Sequence
  Description of Artificial Sequence: Synthetic oligonucleotide
  Target: SCNA; (+) strand; PAM type: NRG; PAM sequence: AAG
agatctagatatccaaatat

SEQ ID NO: 32814 - DNA, 20 bp, Artificial Sequence
  Description of Artificial Sequence: Synthetic oligonucleotide
  Target: SCNA; (+) strand; PAM type: NRG; PAM sequence: AAG
tctagatatccaaatataag

SEQ ID NO: 32815 - DNA, 20 bp, Artificial Sequence
  Description of Artificial Sequence: Synthetic oligonucleotide
  Target: SCNA; (+) strand; PAM type: NRG; PAM sequence: AAG
atccaaatataagaagcaca

SEQ ID NO: 32816 - DNA, 20 bp, Artificial Sequence
  Description of Artificial Sequence: Synthetic oligonucleotide
  Target: SCNA; (+) strand; PAM type: NRG; PAM sequence: TGG
taagaagcacaaagaacacc

SEQ ID NO: 32817 - DNA, 20 bp, Artificial Sequence
  Description of Artificial Sequence: Synthetic oligonucleotide
  Target: SCNA; (+) strand; PAM type: NRG; PAM sequence: GGG
aagaagcacaaagaacacct

SEQ ID NO: 32818 - DNA, 20 bp, Artificial Sequence
  Description of Artificial Sequence: Synthetic oligonucleotide
  Target: SCNA; (+) strand; PAM type: NRG; PAM sequence: AAG
cctgggaaattcaatgcaaa

SEQ ID NO: 32819 - DNA, 20 bp, Artificial Sequence
  Description of Artificial Sequence: Synthetic oligonucleotide
  Target: SCNA; (+) strand; PAM type: NRG; PAM sequence: TGG
aatgcaaaaagattaccacc

SEQ ID NO: 32820 - DNA, 20 bp, Artificial Sequence
  Description of Artificial Sequence: Synthetic oligonucleotide
  Target: SCNA; (+) strand; PAM type: NRG; PAM sequence: GGG
atgcaaaaagattaccacct

SEQ ID NO: 32821 - DNA, 20 bp, Artificial Sequence
  Description of Artificial Sequence: Synthetic oligonucleotide
  Target: SCNA; (+) strand; PAM type: NRG; PAM sequence: CAG
aagattaccacctgggcaca

SEQ ID NO: 32822 - DNA, 20 bp, Artificial Sequence
  Description of Artificial Sequence: Synthetic oligonucleotide
  Target: SCNA; (+) strand; PAM type: NRG; PAM sequence: CAG
ccacctgggcacacagccat

SEQ ID NO: 32823 - DNA, 20 bp, Artificial Sequence
  Description of Artificial Sequence: Synthetic oligonucleotide
  Target: SCNA; (+) strand; PAM type: NRG; PAM sequence: AGG
cacctgggcacacagccatc

SEQ ID NO: 32824 - DNA, 20 bp, Artificial Sequence
  Description of Artificial Sequence: Synthetic oligonucleotide
  Target: SCNA; (+) strand; PAM type: NRG; PAM sequence: AAG
cacagccatcaggttgtcta

SEQ ID NO: 32825 - DNA, 20 bp, Artificial Sequence
  Description of Artificial Sequence: Synthetic oligonucleotide
  Target: SCNA; (+) strand; PAM type: NRG; PAM sequence: AAG
ccatcaggttgtctaaagtc

SEQ ID NO: 32826 - DNA, 20 bp, Artificial Sequence
  Description of Artificial Sequence: Synthetic oligonucleotide
  Target: SCNA; (+) strand; PAM type: NRG; PAM sequence: AAG
ggttgtctaaagtcaagatg

SEQ ID NO: 32827 - DNA, 20 bp, Artificial Sequence
  Description of Artificial Sequence: Synthetic oligonucleotide
  Target: SCNA; (+) strand; PAM type: NRG; PAM sequence: AGG
gttgtctaaagtcaagatga

SEQ ID NO: 32828 - DNA, 20 bp, Artificial Sequence
  Description of Artificial Sequence: Synthetic oligonucleotide
  Target: SCNA; (+) strand; PAM type: NRG; PAM sequence: AAG
tctaaagtcaagatgaagga

SEQ ID NO: 32829 - DNA, 20 bp, Artificial Sequence
  Description of Artificial Sequence: Synthetic oligonucleotide
  Target: SCNA; (+) strand; PAM type: NRG; PAM sequence: AAG
aagatgaaggaaagaatctt

SEQ ID NO: 32830 - DNA, 20 bp, Artificial Sequence
  Description of Artificial Sequence: Synthetic oligonucleotide
  Target: SCNA; (+) strand; PAM type: NRG; PAM sequence: GAG
gatgaaggaaagaatcttaa

SEQ ID NO: 32831 - DNA, 20 bp, Artificial Sequence
  Description of Artificial Sequence: Synthetic oligonucleotide
  Target: SCNA; (+) strand; PAM type: NRG; PAM sequence: GAG
gaaagaatcttaagagctgt

SEQ ID NO: 32832 - DNA, 20 bp, Artificial Sequence
  Description of Artificial Sequence: Synthetic oligonucleotide
  Target: SCNA; (+) strand; PAM type: NRG; PAM sequence: AGG
aaagaatcttaagagctgtg

SEQ ID NO: 32833 - DNA, 20 bp, Artificial Sequence
  Description of Artificial Sequence: Synthetic oligonucleotide
  Target: SCNA; (+) strand; PAM type: NRG; PAM sequence: AAG
tcttaagagctgtgaggcaa

SEQ ID NO: 32834 - DNA, 20 bp, Artificial Sequence
  Description of Artificial Sequence: Synthetic oligonucleotide
  Target: SCNA; (+) strand; PAM type: NRG; PAM sequence: CAG
gagctgtgaggcaaaagcat

SEQ ID NO: 32835 - DNA, 20 bp, Artificial Sequence
  Description of Artificial Sequence: Synthetic oligonucleotide
  Target: SCNA; (+) strand; PAM type: NRG; PAM sequence: AGG
agctgtgaggcaaaagcatc

SEQ ID NO: 32836 - DNA, 20 bp, Artificial Sequence
  Description of Artificial Sequence: Synthetic oligonucleotide
  Target: SCNA; (+) strand; PAM type: NRG; PAM sequence: AAG
aagcatcaggtatcctataa

SEQ ID NO: 32837 - DNA, 20 bp, Artificial Sequence
  Description of Artificial Sequence: Synthetic oligonucleotide
  Target: SCNA; (+) strand; PAM type: NRG; PAM sequence: TAG
gtatcctataaaagaaaaca

SEQ ID NO: 32838 - DNA, 20 bp, Artificial Sequence
  Description of Artificial Sequence: Synthetic oligonucleotide
  Target: SCNA; (+) strand; PAM type: NRG; PAM sequence: CAG
tcctataaaagaaaacatag

SEQ ID NO: 32839 - DNA, 20 bp, Artificial Sequence
  Description of Artificial Sequence: Synthetic oligonucleotide
  Target: SCNA; (+) strand; PAM type: NRG; PAM sequence: TAG
aagaaaacatagcagattaa

SEQ ID NO: 32840 - DNA, 20 bp, Artificial Sequence
  Description of Artificial Sequence: Synthetic oligonucleotide
  Target: SCNA; (+) strand; PAM type: NRG; PAM sequence: CAG
aaaacatagcagattaatag

SEQ ID NO: 32841 - DNA, 20 bp, Artificial Sequence
  Description of Artificial Sequence: Synthetic oligonucleotide
  Target: SCNA; (+) strand; PAM type: NRG; PAM sequence: CAG
cagattaatagcagatttct

SEQ ID NO: 32842 - DNA, 20 bp, Artificial Sequence
  Description of Artificial Sequence: Synthetic oligonucleotide
  Target: SCNA; (+) strand; PAM type: NRG; PAM sequence: TAG
tttctcagcataaaccctgc

SEQ ID NO: 32843 - DNA, 20 bp, Artificial Sequence
  Description of Artificial Sequence: Synthetic oligonucleotide
  Target: SCNA; (+) strand; PAM type: NRG; PAM sequence: CAG
tcagcataaaccctgctagc

SEQ ID NO: 32844 - DNA, 20 bp, Artificial Sequence
  Description of Artificial Sequence: Synthetic oligonucleotide
  Target: SCNA; (+) strand; PAM type: NRG; PAM sequence: AAG
gcataaaccctgctagccag

SEQ ID NO: 32845 - DNA, 20 bp, Artificial Sequence
  Description of Artificial Sequence: Synthetic oligonucleotide
  Target: SCNA; (+) strand; PAM type: NRG; PAM sequence: GAG
ataaaccctgctagccagaa

SEQ ID NO: 32846 - DNA, 20 bp, Artificial Sequence
  Description of Artificial Sequence: Synthetic oligonucleotide
  Target: SCNA; (+) strand; PAM type: NRG; PAM sequence: TGG
ccctgctagccagaagagat

SEQ ID NO: 32847 - DNA, 20 bp, Artificial Sequence
  Description of Artificial Sequence: Synthetic oligonucleotide
  Target: SCNA; (+) strand; PAM type: NRG; PAM sequence: GGG
cctgctagccagaagagatt

SEQ ID NO: 32848 - DNA, 20 bp, Artificial Sequence
  Description of Artificial Sequence: Synthetic oligonucleotide
  Target: SCNA; (+) strand; PAM type: NRG; PAM sequence: TAG
aagagattgggccctatatt

SEQ ID NO: 32849 - DNA, 20 bp, Artificial Sequence
  Description of Artificial Sequence: Synthetic oligonucleotide
  Target: SCNA; (+) strand; PAM type: NRG; PAM sequence: CAG
ctcttaaacaaaataattat

SEQ ID NO: 32850 - DNA, 20 bp, Artificial Sequence
  Description of Artificial Sequence: Synthetic oligonucleotide
  Target: SCNA; (+) strand; PAM type: NRG; PAM sequence: AAG
aaacaaaataattatcagcc

SEQ ID NO: 32851 - DNA, 20 bp, Artificial Sequence
  Description of Artificial Sequence: Synthetic oligonucleotide
  Target: SCNA; (+) strand; PAM type: NRG; PAM sequence: CAG
tcagccaagaattttgtatc

SEQ ID NO: 32852 - DNA, 20 bp, Artificial Sequence
  Description of Artificial Sequence: Synthetic oligonucleotide
  Target: SCNA; (+) strand; PAM type: NRG; PAM sequence: AAG
attttgtatccagtgaaact

SEQ ID NO: 32853 - DNA, 20 bp, Artificial Sequence
  Description of Artificial Sequence: Synthetic oligonucleotide
  Target: SCNA; (+) strand; PAM type: NRG; PAM sequence: AAG
aaactaagcttcataaatga

SEQ ID NO: 32854 - DNA, 20 bp, Artificial Sequence
  Description of Artificial Sequence: Synthetic oligonucleotide
  Target: SCNA; (+) strand; PAM type: NRG; PAM sequence: GAG
actaagcttcataaatgaaa

SEQ ID NO: 32855 - DNA, 20 bp, Artificial Sequence
  Description of Artificial Sequence: Synthetic oligonucleotide
  Target: SCNA; (+) strand; PAM type: NRG; PAM sequence: GAG
taagcttcataaatgaaaga

SEQ ID NO: 32856 - DNA, 20 bp, Artificial Sequence
  Description of Artificial Sequence: Synthetic oligonucleotide
  Target: SCNA; (+) strand; PAM type: NRG; PAM sequence: AAG
tcataaatgaaagagagata

SEQ ID NO: 32857 - DNA, 20 bp, Artificial Sequence
  Description of Artificial Sequence: Synthetic oligonucleotide
  Target: SCNA; (+) strand; PAM type: NRG; PAM sequence: CAG
aagagagataaagtcttttt

SEQ ID NO: 32858 - DNA, 20 bp, Artificial Sequence
  Description of Artificial Sequence: Synthetic oligonucleotide
  Target: SCNA; (+) strand; PAM type: NRG; PAM sequence: AAG
atgctgaatttgccactacc

SEQ ID NO: 32859 - DNA, 20 bp, Artificial Sequence
  Description of Artificial Sequence: Synthetic oligonucleotide
  Target: SCNA; (+) strand; PAM type: NRG; PAM sequence: CAG
tgaatttgccactaccaagc

SEQ ID NO: 32860 - DNA, 20 bp, Artificial Sequence
  Description of Artificial Sequence: Synthetic oligonucleotide
  Target: SCNA; (+) strand; PAM type: NRG; PAM sequence: GAG
gccactaccaagccagcact

SEQ ID NO: 32861 - DNA, 20 bp, Artificial Sequence
  Description of Artificial Sequence: Synthetic oligonucleotide
  Target: SCNA; (+) strand; PAM type: NRG; PAM sequence: AAG
ccagcactgagaaatgctaa

SEQ ID NO: 32862 - DNA, 20 bp, Artificial Sequence
  Description of Artificial Sequence: Synthetic oligonucleotide
  Target: SCNA; (+) strand; PAM type: NRG; PAM sequence: AGG
cagcactgagaaatgctaaa

SEQ ID NO: 32863 - DNA, 20 bp, Artificial Sequence
  Description of Artificial Sequence: Synthetic oligonucleotide
  Target: SCNA; (+) strand; PAM type: NRG; PAM sequence: GAG
gcactgagaaatgctaaaag

SEQ ID NO: 32864 - DNA, 20 bp, Artificial Sequence
  Description of Artificial Sequence: Synthetic oligonucleotide
  Target: SCNA; (+) strand; PAM type: NRG; PAM sequence: CAG
aggagctctaaatcttgaaa

SEQ ID NO: 32865 - DNA, 20 bp, Artificial Sequence
  Description of Artificial Sequence: Synthetic oligonucleotide
  Target: SCNA; (+) strand; PAM type: NRG; PAM sequence: TAG
gtaacttgaatacatcaaaa

SEQ ID NO: 32866 - DNA, 20 bp, Artificial Sequence
  Description of Artificial Sequence: Synthetic oligonucleotide
  Target: SCNA; (+) strand; PAM type: NRG; PAM sequence: AAG
atcaaaatagaacctcctta

SEQ ID NO: 32867 - DNA, 20 bp, Artificial Sequence
  Description of Artificial Sequence: Synthetic oligonucleotide
  Target: SCNA; (+) strand; PAM type: NRG; PAM sequence: CAG
tccttaaagcataaatttaa

SEQ ID NO: 32868 - DNA, 20 bp, Artificial Sequence
  Description of Artificial Sequence: Synthetic oligonucleotide
  Target: SCNA; (+) strand; PAM type: NRG; PAM sequence: AGG
ccttaaagcataaatttaac

SEQ ID NO: 32869 - DNA, 20 bp, Artificial Sequence
  Description of Artificial Sequence: Synthetic oligonucleotide
  Target: SCNA; (+) strand; PAM type: NRG; PAM sequence: CAG
aataataacacaattaacaa

SEQ ID NO: 32870 - DNA, 20 bp, Artificial Sequence
  Description of Artificial Sequence: Synthetic oligonucleotide
  Target: SCNA; (+) strand; PAM type: NRG; PAM sequence: AAG
caattaacaacagcaacaac

SEQ ID NO: 32871 - DNA, 20 bp, Artificial Sequence
  Description of Artificial Sequence: Synthetic oligonucleotide
  Target: SCNA; (+) strand; PAM type: NRG; PAM sequence: AAG
ttaacaacagcaacaacaag

SEQ ID NO: 32872 - DNA, 20 bp, Artificial Sequence
  Description of Artificial Sequence: Synthetic oligonucleotide
  Target: SCNA; (+) strand; PAM type: NRG; PAM sequence: AGG
taacaacagcaacaacaaga

SEQ ID NO: 32873 - DNA, 20 bp, Artificial Sequence
  Description of Artificial Sequence: Synthetic oligonucleotide
  Target: SCNA; (+) strand; PAM type: NRG; PAM sequence: GAG
agcaacaacaagaaggtatt

SEQ ID NO: 32874 - DNA, 20 bp, Artificial Sequence
  Description of Artificial Sequence: Synthetic oligonucleotide
  Target: SCNA; (+) strand; PAM type: NRG; PAM sequence: AGG
gcaacaacaagaaggtattg

SEQ ID NO: 32875 - DNA, 20 bp, Artificial Sequence
  Description of Artificial Sequence: Synthetic oligonucleotide
  Target: SCNA; (+) strand; PAM type: NRG; PAM sequence: TAG
gcaacaactatcatgatgaa

SEQ ID NO: 32876 - DNA, 20 bp, Artificial Sequence
  Description of Artificial Sequence: Synthetic oligonucleotide
  Target: SCNA; (+) strand; PAM type: NRG; PAM sequence: CAG
aactatcatgatgaatagaa

SEQ ID NO: 32877 - DNA, 20 bp, Artificial Sequence
  Description of Artificial Sequence: Synthetic oligonucleotide
  Target: SCNA; (+) strand; PAM type: NRG; PAM sequence: TGG
atactaatgttgaatgtaaa

SEQ ID NO: 32878 - DNA, 20 bp, Artificial Sequence
  Description of Artificial Sequence: Synthetic oligonucleotide
  Target: SCNA; (+) strand; PAM type: NRG; PAM sequence: AAG
ggcctaaatgctccacttaa

SEQ ID NO: 32879 - DNA, 20 bp, Artificial Sequence
  Description of Artificial Sequence: Synthetic oligonucleotide
  Target: SCNA; (+) strand; PAM type: NRG; PAM sequence: CAG
aatgctccacttaaaagata

SEQ ID NO: 32880 - DNA, 20 bp, Artificial Sequence
  Description of Artificial Sequence: Synthetic oligonucleotide
  Target: SCNA; (+) strand; PAM type: NRG; PAM sequence: TGG
tccacttaaaagatacagaa

SEQ ID NO: 32881 - DNA, 20 bp, Artificial Sequence
  Description of Artificial Sequence: Synthetic oligonucleotide
  Target: SCNA; (+) strand; PAM type: NRG; PAM sequence: CAG
acttaaaagatacagaatgg

SEQ ID NO: 32882 - DNA, 20 bp, Artificial Sequence
  Description of Artificial Sequence: Synthetic oligonucleotide
  Target: SCNA; (+) strand; PAM type: NRG; PAM sequence: TGG
aaagatacagaatggcagaa

SEQ ID NO: 32883 - DNA, 20 bp, Artificial Sequence
  Description of Artificial Sequence: Synthetic oligonucleotide
  Target: SCNA; (+) strand; PAM type: NRG; PAM sequence: AAG
tggataaaaatccatcaacc

SEQ ID NO: 32884 - DNA, 20 bp, Artificial Sequence
  Description of Artificial Sequence: Synthetic oligonucleotide
  Target: SCNA; (+) strand; PAM type: NRG; PAM sequence: AAG
accaagtatctgctgtcttc

SEQ ID NO: 32885 - DNA, 20 bp, Artificial Sequence
  Description of Artificial Sequence: Synthetic oligonucleotide
  Target: SCNA; (+) strand; PAM type: NRG; PAM sequence: GAG
caagtatctgctgtcttcaa

SEQ ID NO: 32886 - DNA, 20 bp, Artificial Sequence
  Description of Artificial Sequence: Synthetic oligonucleotide
  Target: SCNA; (+) strand; PAM type: NRG; PAM sequence: AAG
aagagactcacctaacacgt

SEQ ID NO: 32887 - DNA, 20 bp, Artificial Sequence
  Description of Artificial Sequence: Synthetic oligonucleotide
  Target: SCNA; (+) strand; PAM type: NRG; PAM sequence: AGG
agagactcacctaacacgta

SEQ ID NO: 32888 - DNA, 20 bp, Artificial Sequence
  Description of Artificial Sequence: Synthetic oligonucleotide
  Target: SCNA; (+) strand; PAM type: NRG; PAM sequence: AAG
gtaaggactcacataaactt

SEQ ID NO: 32889 - DNA, 20 bp, Artificial Sequence
  Description of Artificial Sequence: Synthetic oligonucleotide
  Target: SCNA; (+) strand; PAM type: NRG; PAM sequence: AGG
taaggactcacataaactta

SEQ ID NO: 32890 - DNA, 20 bp, Artificial Sequence
  Description of Artificial Sequence: Synthetic oligonucleotide
  Target: SCNA; (+) strand; PAM type: NRG; PAM sequence: AAG
actcacataaacttaaggta

SEQ ID NO: 32891 - DNA, 20 bp, Artificial Sequence
  Description of Artificial Sequence: Synthetic oligonucleotide
  Target: SCNA; (+) strand; PAM type: NRG; PAM sequence: AGG
ctcacataaacttaaggtaa

SEQ ID NO: 32892 - DNA, 20 bp, Artificial Sequence
  Description of Artificial Sequence: Synthetic oligonucleotide
  Target: SCNA; (+) strand; PAM type: NRG; PAM sequence: GGG
tcacataaacttaaggtaaa

SEQ ID NO: 32893 - DNA, 20 bp, Artificial Sequence
  Description of Artificial Sequence: Synthetic oligonucleotide
  Target: SCNA; (+) strand; PAM type: NRG; PAM sequence: GGG
cacataaacttaaggtaaag

SEQ ID NO: 32894 - DNA, 20 bp, Artificial Sequence
  Description of Artificial Sequence: Synthetic oligonucleotide
  Target: SCNA; (+) strand; PAM type: NRG; PAM sequence: TGG
ataaacttaaggtaaagggg

SEQ ID NO: 32895 - DNA, 20 bp, Artificial Sequence
  Description of Artificial Sequence: Synthetic oligonucleotide
  Target: SCNA; (+) strand; PAM type: NRG; PAM sequence: AAG
ttaaggtaaaggggtggaaa

SEQ ID NO: 32896 - DNA, 20 bp, Artificial Sequence
  Description of Artificial Sequence: Synthetic oligonucleotide
  Target: SCNA; (+) strand; PAM type: NRG; PAM sequence: TGG
aaaaagatattccatgcaaa

SEQ ID NO: 32897 - DNA, 20 bp, Artificial Sequence
  Description of Artificial Sequence: Synthetic oligonucleotide
  Target: SCNA; (+) strand; PAM type: NRG; PAM sequence: AAG
tccatgcaaatggaaactca

SEQ ID NO: 32898 - DNA, 20 bp, Artificial Sequence
  Description of Artificial Sequence: Synthetic oligonucleotide
  Target: SCNA; (+) strand; PAM type: NRG; PAM sequence: GAG
tgcaaatggaaactcaaagt

SEQ ID NO: 32899 - DNA, 20 bp, Artificial Sequence
  Description of Artificial Sequence: Synthetic oligonucleotide
  Target: SCNA; (+) strand; PAM type: NRG; PAM sequence: AAG
aatggaaactcaaagtgaga

SEQ ID NO: 32900 - DNA, 20 bp, Artificial Sequence
  Description of Artificial Sequence: Synthetic oligonucleotide
  Target: SCNA; (+) strand; PAM type: NRG; PAM sequence: TAG
aaactcaaagtgagaaagaa

SEQ ID NO: 32901 - DNA, 20 bp, Artificial Sequence
  Description of Artificial Sequence: Synthetic oligonucleotide
  Target: SCNA; (+) strand; PAM type: NRG; PAM sequence: CAG
aagaatagcaattcttatat

SEQ ID NO: 32902 - DNA, 20 bp, Artificial Sequence
  Description of Artificial Sequence: Synthetic oligonucleotide
  Target: SCNA; (+) strand; PAM type: NRG; PAM sequence: AAG
aattcttatatcagacaaaa

SEQ ID NO: 32903 - DNA, 20 bp, Artificial Sequence
  Description of Artificial Sequence: Synthetic oligonucleotide
  Target: SCNA; (+) strand; PAM type: NRG; PAM sequence: AAG
atcagacaaaaaagatttta

SEQ ID NO: 32904 - DNA, 20 bp, Artificial Sequence
  Description of Artificial Sequence: Synthetic oligonucleotide
  Target: SCNA; (+) strand; PAM type: NRG; PAM sequence: AAG
taaagcaacaacaattaaaa

SEQ ID NO: 32905 - DNA, 20 bp, Artificial Sequence
  Description of Artificial Sequence: Synthetic oligonucleotide
  Target: SCNA; (+) strand; PAM type: NRG; PAM sequence: AAG
aacaacaattaaaaaagaca

SEQ ID NO: 32906 - DNA, 20 bp, Artificial Sequence
  Description of Artificial Sequence: Synthetic oligonucleotide
  Target: SCNA; (+) strand; PAM type: NRG; PAM sequence: GAG
caacaattaaaaaagacaaa

SEQ ID NO: 32907 - DNA, 20 bp, Artificial Sequence
  Description of Artificial Sequence: Synthetic oligonucleotide
  Target: SCNA; (+) strand; PAM type: NRG; PAM sequence: GAG
acaattaaaaaagacaaaga

SEQ ID NO: 32908 - DNA, 20 bp, Artificial Sequence
  Description of Artificial Sequence: Synthetic oligonucleotide
  Target: SCNA; (+) strand; PAM type: NRG; PAM sequence: TAG
ttatataatgataaaataat

SEQ ID NO: 32909 - DNA, 20 bp, Artificial Sequence
  Description of Artificial Sequence: Synthetic oligonucleotide
  Target: SCNA; (+) strand; PAM type: NRG; PAM sequence: CAG
tgataaaataattagttcaa

SEQ ID NO: 32910 - DNA, 20 bp, Artificial Sequence
  Description of Artificial Sequence: Synthetic oligonucleotide
  Target: SCNA; (+) strand; PAM type: NRG; PAM sequence: AGG
gataaaataattagttcaac

SEQ ID NO: 32911 - DNA, 20 bp, Artificial Sequence
  Description of Artificial Sequence: Synthetic oligonucleotide
  Target: SCNA; (+) strand; PAM type: NRG; PAM sequence: AAG
caggaaaaatttacaatctt

SEQ ID NO: 32912 - DNA, 20 bp, Artificial Sequence
  Description of Artificial Sequence: Synthetic oligonucleotide
  Target: SCNA; (+) strand; PAM type: NRG; PAM sequence: TGG
gtgtatatgcatctaacact

SEQ ID NO: 32913 - DNA, 20 bp, Artificial Sequence
  Description of Artificial Sequence: Synthetic oligonucleotide
  Target: SCNA; (+) strand; PAM type: NRG; PAM sequence: GGG
tgtatatgcatctaacactt

SEQ ID NO: 32914 - DNA, 20 bp, Artificial Sequence
  Description of Artificial Sequence: Synthetic oligonucleotide
  Target: SCNA; (+) strand; PAM type: NRG; PAM sequence: AAG
cttgggctcccaaatttata

SEQ ID NO: 32915 - DNA, 20 bp, Artificial Sequence
  Description of Artificial Sequence: Synthetic oligonucleotide
  Target: SCNA; (+) strand; PAM type: NRG; PAM sequence: TAG
atttataaagcaatcactac

SEQ ID NO: 32916 - DNA, 20 bp, Artificial Sequence
  Description of Artificial Sequence: Synthetic oligonucleotide
  Target: SCNA; (+) strand; PAM type: NRG; PAM sequence: AAG
aagcaatcactactagacct

SEQ ID NO: 32917 - DNA, 20 bp, Artificial Sequence
  Description of Artificial Sequence: Synthetic oligonucleotide
  Target: SCNA; (+) strand; PAM type: NRG; PAM sequence: GAG
cactactagacctaagacat

SEQ ID NO: 32918 - DNA, 20 bp, Artificial Sequence
  Description of Artificial Sequence: Synthetic oligonucleotide
  Target: SCNA; (+) strand; PAM type: NRG; PAM sequence: TAG
actagacctaagacatgaga

SEQ ID NO: 32919 - DNA, 20 bp, Artificial Sequence
  Description of Artificial Sequence: Synthetic oligonucleotide
  Target: SCNA; (+) strand; PAM type: NRG; PAM sequence: CAG
gacctaagacatgagataga

SEQ ID NO: 32920 - DNA, 20 bp, Artificial Sequence
  Description of Artificial Sequence: Synthetic oligonucleotide
  Target: SCNA; (+) strand; PAM type: NRG; PAM sequence: TAG
gatagacagcaacacaataa

SEQ ID NO: 32921 - DNA, 20 bp, Artificial Sequence
  Description of Artificial Sequence: Synthetic oligonucleotide
  Target: SCNA; (+) strand; PAM type: NRG; PAM sequence: TGG
agacagcaacacaataatag

SEQ ID NO: 32922 - DNA, 20 bp, Artificial Sequence
  Description of Artificial Sequence: Synthetic oligonucleotide
  Target: SCNA; (+) strand; PAM type: NRG; PAM sequence: GGG
gacagcaacacaataatagt

SEQ ID NO: 32923 - DNA, 20 bp, Artificial Sequence
  Description of Artificial Sequence: Synthetic oligonucleotide
  Target: SCNA; (+) strand; PAM type: NRG; PAM sequence: GGG
acagcaacacaataatagtg

SEQ ID NO: 32924 - DNA, 20 bp, Artificial Sequence
  Description of Artificial Sequence: Synthetic oligonucleotide
  Target: SCNA; (+) strand; PAM type: NRG; PAM sequence: GGG
cagcaacacaataatagtgg

SEQ ID NO: 32925 - DNA, 20 bp, Artificial Sequence
  Description of Artificial Sequence: Synthetic oligonucleotide
  Target: SCNA; (+) strand; PAM type: NRG; PAM sequence: CAG
acaataatagtgggggactt

SEQ ID NO: 32926 - DNA, 20 bp, Artificial Sequence
  Description of Artificial Sequence: Synthetic oligonucleotide
  Target: SCNA; (+) strand; PAM type: NRG; PAM sequence: CAG
ggacttcagtactccactga

SEQ ID NO: 32927 - DNA, 20 bp, Artificial Sequence
  Description of Artificial Sequence: Synthetic oligonucleotide
  Target: SCNA; (+) strand; PAM type: NRG; PAM sequence: TAG
cagtactccactgacagcac

SEQ ID NO: 32928 - DNA, 20 bp, Artificial Sequence
  Description of Artificial Sequence: Synthetic oligonucleotide
  Target: SCNA; (+) strand; PAM type: NRG; PAM sequence: CAG
actccactgacagcactaga

SEQ ID NO: 32929 - DNA, 20 bp, Artificial Sequence
  Description of Artificial Sequence: Synthetic oligonucleotide
  Target: SCNA; (+) strand; PAM type: NRG; PAM sequence: AGG
ctccactgacagcactagac

SEQ ID NO: 32930 - DNA, 20 bp, Artificial Sequence
  Description of Artificial Sequence: Synthetic oligonucleotide
  Target: SCNA; (+) strand; PAM type: NRG; PAM sequence: AAG
acagcactagacaggtcatc

SEQ ID NO: 32931 - DNA, 20 bp, Artificial Sequence
  Description of Artificial Sequence: Synthetic oligonucleotide
  Target: SCNA; (+) strand; PAM type: NRG; PAM sequence: CAG
cactagacaggtcatcaaga

SEQ ID NO: 32932 - DNA, 20 bp, Artificial Sequence
  Description of Artificial Sequence: Synthetic oligonucleotide
  Target: SCNA; (+) strand; PAM type: NRG; PAM sequence: AAG
agacaggtcatcaagacaga

SEQ ID NO: 32933 - DNA, 20 bp, Artificial Sequence
  Description of Artificial Sequence: Synthetic oligonucleotide
  Target: SCNA; (+) strand; PAM type: NRG; PAM sequence: AAG
atcaagacagaaagtcaaca

SEQ ID NO: 32934 - DNA, 20 bp, Artificial Sequence
  Description of Artificial Sequence: Synthetic oligonucleotide
  Target: SCNA; (+) strand; PAM type: NRG; PAM sequence: TGG
agaaagtcaacaaagaaaca

SEQ ID NO: 32935 - DNA, 20 bp, Artificial Sequence
  Description of Artificial Sequence: Synthetic oligonucleotide
  Target: SCNA; (+) strand; PAM type: NRG; PAM sequence: TAG
catggacttaaactataccc

SEQ ID NO: 32936 - DNA, 20 bp, Artificial Sequence
  Description of Artificial Sequence: Synthetic oligonucleotide
  Target: SCNA; (+) strand; PAM type: NRG; PAM sequence: TGG
aaactataccctagaacaaa

SEQ ID NO: 32937 - DNA, 20 bp, Artificial Sequence
  Description of Artificial Sequence: Synthetic oligonucleotide
  Target: SCNA; (+) strand; PAM type: NRG; PAM sequence: CAG
cctagaacaaatggacttaa

SEQ ID NO: 32938 - DNA, 20 bp, Artificial Sequence
  Description of Artificial Sequence: Synthetic oligonucleotide
  Target: SCNA; (+) strand; PAM type: NRG; PAM sequence: TGG
acatccttttcatcaacaca

SEQ ID NO: 32939 - DNA, 20 bp, Artificial Sequence
  Description of Artificial Sequence: Synthetic oligonucleotide
  Target: SCNA; (+) strand; PAM type: NRG; PAM sequence: AAG
caacacatggaatattctcc

SEQ ID NO: 32940 - DNA, 20 bp, Artificial Sequence
  Description of Artificial Sequence: Synthetic oligonucleotide
  Target: SCNA; (+) strand; PAM type: NRG; PAM sequence: CAG
acatggaatattctccaaga

SEQ ID NO: 32941 - DNA, 20 bp, Artificial Sequence
  Description of Artificial Sequence: Synthetic oligonucleotide
  Target: SCNA; (+) strand; PAM type: NRG; PAM sequence: AAG
ccaagacagaccatatgaac

SEQ ID NO: 32942 - DNA, 20 bp, Artificial Sequence
  Description of Artificial Sequence: Synthetic oligonucleotide
  Target: SCNA; (+) strand; PAM type: NRG; PAM sequence: AAG
gaacaagtctcaataaattt

SEQ ID NO: 32943 - DNA, 20 bp, Artificial Sequence
  Description of Artificial Sequence: Synthetic oligonucleotide
  Target: SCNA; (+) strand; PAM type: NRG; PAM sequence: AAG
aagaaaatcaaaattatatc

SEQ ID NO: 32944 - DNA, 20 bp, Artificial Sequence
  Description of Artificial Sequence: Synthetic oligonucleotide
  Target: SCNA; (+) strand; PAM type: NRG; PAM sequence: CAG
aattatatcaagtattctct

SEQ ID NO: 32945 - DNA, 20 bp, Artificial Sequence
  Description of Artificial Sequence: Synthetic oligonucleotide
  Target: SCNA; (+) strand; PAM type: NRG; PAM sequence: CAG
tcaagtattctctcagacca

SEQ ID NO: 32946 - DNA, 20 bp, Artificial Sequence
  Description of Artificial Sequence: Synthetic oligonucleotide
  Target: SCNA; (+) strand; PAM type: NRG; PAM sequence: TGG
agtattctctcagaccacag

SEQ ID NO: 32947 - DNA, 20 bp, Artificial Sequence
  Description of Artificial Sequence: Synthetic oligonucleotide
  Target: SCNA; (+) strand; PAM type: NRG; PAM sequence: AAG
aaattaaaaattaactccaa

SEQ ID NO: 32948 - DNA, 20 bp, Artificial Sequence
  Description of Artificial Sequence: Synthetic oligonucleotide
  Target: SCNA; (+) strand; PAM type: NRG; PAM sequence: TGG
ctcaaaactatacaaataca

SEQ ID NO: 32949 - DNA, 20 bp, Artificial Sequence
  Description of Artificial Sequence: Synthetic oligonucleotide
  Target: SCNA; (+) strand; PAM type: NRG; PAM sequence: TGG
atctgctcctgaatgatctt

SEQ ID NO: 32950 - DNA, 20 bp, Artificial Sequence
  Description of Artificial Sequence: Synthetic oligonucleotide
  Target: SCNA; (+) strand; PAM type: NRG; PAM sequence: GGG
tctgctcctgaatgatcttt

SEQ ID NO: 32951 - DNA, 20 bp, Artificial Sequence
  Description of Artificial Sequence: Synthetic oligonucleotide
  Target: SCNA; (+) strand; PAM type: NRG; PAM sequence: AAG
tttgggtcaacaatgaaatc

SEQ ID NO: 32952 - DNA, 20 bp, Artificial Sequence
  Description of Artificial Sequence: Synthetic oligonucleotide
  Target: SCNA; (+) strand; PAM type: NRG; PAM sequence: AAG
ggtcaacaatgaaatcaaga

SEQ ID NO: 32953 - DNA, 20 bp, Artificial Sequence
  Description of Artificial Sequence: Synthetic oligonucleotide
  Target: SCNA; (+) strand; PAM type: NRG; PAM sequence: TGG
acaaaacctatcacaacctc

SEQ ID NO: 32954 - DNA, 20 bp, Artificial Sequence
  Description of Artificial Sequence: Synthetic oligonucleotide
  Target: SCNA; (+) strand; PAM type: NRG; PAM sequence: GGG
caaaacctatcacaacctct

SEQ ID NO: 32955 - DNA, 20 bp, Artificial Sequence
  Description of Artificial Sequence: Synthetic oligonucleotide
  Target: SCNA; (+) strand; PAM type: NRG; PAM sequence: CAG
ctatcacaacctctgggata

SEQ ID NO: 32956 - DNA, 20 bp, Artificial Sequence
  Description of Artificial Sequence: Synthetic oligonucleotide
  Target: SCNA; (+) strand; PAM type: NRG; PAM sequence: AAG
caacctctgggatacagcaa

SEQ ID NO: 32957 - DNA, 20 bp, Artificial Sequence
  Description of Artificial Sequence: Synthetic oligonucleotide
  Target: SCNA; (+) strand; PAM type: NRG; PAM sequence: AAG
gatacagcaaaagccatgtt

SEQ ID NO: 32958 - DNA, 20 bp, Artificial Sequence
  Description of Artificial Sequence: Synthetic oligonucleotide
  Target: SCNA; (+) strand; PAM type: NRG; PAM sequence: GAG
tacagcaaaagccatgttaa

SEQ ID NO: 32959 - DNA, 20 bp, Artificial Sequence
  Description of Artificial Sequence: Synthetic oligonucleotide
  Target: SCNA; (+) strand; PAM type: NRG; PAM sequence: AAG
caaaagccatgttaagagca

SEQ ID NO: 32960 - DNA, 20 bp, Artificial Sequence
  Description of Artificial Sequence: Synthetic oligonucleotide
  Target: SCNA; (+) strand; PAM type: NRG; PAM sequence: TAG
catgttaagagcaaagttca

SEQ ID NO: 32961 - DNA, 20 bp, Artificial Sequence
  Description of Artificial Sequence: Synthetic oligonucleotide
  Target: SCNA; (+) strand; PAM type: NRG; PAM sequence: AAG
cattaaatatctacatcaaa

SEQ ID NO: 32962 - DNA, 20 bp, Artificial Sequence
  Description of Artificial Sequence: Synthetic oligonucleotide
  Target: SCNA; (+) strand; PAM type: NRG; PAM sequence: AAG
atctacatcaaaaagtctga

SEQ ID NO: 32963 - DNA, 20 bp, Artificial Sequence
  Description of Artificial Sequence: Synthetic oligonucleotide
  Target: SCNA; (+) strand; PAM type: NRG; PAM sequence: GAG
ctacatcaaaaagtctgaaa

SEQ ID NO: 32964 - DNA, 20 bp, Artificial Sequence
  Description of Artificial Sequence: Synthetic oligonucleotide
  Target: SCNA; (+) strand; PAM type: NRG; PAM sequence: TAG
aaagtctgaaagagcacaaa

SEQ ID NO: 32965 - DNA, 20 bp, Artificial Sequence
  Description of Artificial Sequence: Synthetic oligonucleotide
  Target: SCNA; (+) strand; PAM type: NRG; PAM sequence: GAG
agagcacaaatagacaatct

SEQ ID NO: 32966 - DNA, 20 bp, Artificial Sequence
  Description of Artificial Sequence: Synthetic oligonucleotide
  Target: SCNA; (+) strand; PAM type: NRG; PAM sequence: TAG
acaatctgagcttacacctc

SEQ ID NO: 32967 - DNA, 20 bp, Artificial Sequence
  Description of Artificial Sequence: Synthetic oligonucleotide
  Target: SCNA; (+) strand; PAM type: NRG; PAM sequence: AGG
caatctgagcttacacctct

SEQ ID NO: 32968 - DNA, 20 bp, Artificial Sequence
  Description of Artificial Sequence: Synthetic oligonucleotide
  Target: SCNA; (+) strand; PAM type: NRG; PAM sequence: TGG
gagcttacacctctaggaac

SEQ ID NO: 32969 - DNA, 20 bp, Artificial Sequence
  Description of Artificial Sequence: Synthetic oligonucleotide
  Target: SCNA; (+) strand; PAM type: NRG; PAM sequence: AAG
cctctaggaactggaaaaac

SEQ ID NO: 32970 - DNA, 20 bp, Artificial Sequence
  Description of Artificial Sequence: Synthetic oligonucleotide
  Target: SCNA; (+) strand; PAM type: NRG; PAM sequence: AAG
ggaactggaaaaacaagaca

SEQ ID NO: 32971 - DNA, 20 bp, Artificial Sequence
  Description of Artificial Sequence: Synthetic oligonucleotide
  Target: SCNA; (+) strand; PAM type: NRG; PAM sequence: CAG
agacaaagcaaacccaaacc

SEQ ID NO: 32972 - DNA, 20 bp, Artificial Sequence
  Description of Artificial Sequence: Synthetic oligonucleotide
  Target: SCNA; (+) strand; PAM type: NRG; PAM sequence: CAG
caaagcaaacccaaacccag

SEQ ID NO: 32973 - DNA, 20 bp, Artificial Sequence
  Description of Artificial Sequence: Synthetic oligonucleotide
  Target: SCNA; (+) strand; PAM type: NRG; PAM sequence: AAG
agcaaacccaaacccagcag

SEQ ID NO: 32974 - DNA, 20 bp, Artificial Sequence
  Description of Artificial Sequence: Synthetic oligonucleotide
  Target: SCNA; (+) strand; PAM type: NRG; PAM sequence: AAG
acccaaacccagcagaagaa

SEQ ID NO: 32975 - DNA, 20 bp, Artificial Sequence
  Description of Artificial Sequence: Synthetic oligonucleotide
  Target: SCNA; (+) strand; PAM type: NRG; PAM sequence: AAG
gcagaagaaaagaaataaca

SEQ ID NO: 32976 - DNA, 20 bp, Artificial Sequence
  Description of Artificial Sequence: Synthetic oligonucleotide
  Target: SCNA; (+) strand; PAM type: NRG; PAM sequence: CAG
agaaaagaaataacaaagat

SEQ ID NO: 32977 - DNA, 20 bp, Artificial Sequence
  Description of Artificial Sequence: Synthetic oligonucleotide
  Target: SCNA; (+) strand; PAM type: NRG; PAM sequence: TAG
agaaataacaaagatcagaa

SEQ ID NO: 32978 - DNA, 20 bp, Artificial Sequence
  Description of Artificial Sequence: Synthetic oligonucleotide
  Target: SCNA; (+) strand; PAM type: NRG; PAM sequence: GAG
gaatagaaataaataaaatt

SEQ ID NO: 32979 - DNA, 20 bp, Artificial Sequence
  Description of Artificial Sequence: Synthetic oligonucleotide
  Target: SCNA; (+) strand; PAM type: NRG; PAM sequence: TAG
aaataaataaaattgagtct

SEQ ID NO: 32980 - DNA, 20 bp, Artificial Sequence
  Description of Artificial Sequence: Synthetic oligonucleotide
  Target: SCNA; (+) strand; PAM type: NRG; PAM sequence: TGG
aataaaattgagtcttagtg

SEQ ID NO: 32981 - DNA, 20 bp, Artificial Sequence
  Description of Artificial Sequence: Synthetic oligonucleotide
  Target: SCNA; (+) strand; PAM type: NRG; PAM sequence: TGG
aaaattgagtcttagtgtgg

SEQ ID NO: 32982 - DNA, 20 bp, Artificial Sequence
  Description of Artificial Sequence: Synthetic oligonucleotide
  Target: SCNA; (+) strand; PAM type: NRG; PAM sequence: CAG
gtggctcacacctgtaatcg

SEQ ID NO: 32983 - DNA, 20 bp, Artificial Sequence
  Description of Artificial Sequence: Synthetic oligonucleotide
  Target: SCNA; (+) strand; PAM type: NRG; PAM sequence: TGG
cacctgtaatcgcagcactt

SEQ ID NO: 32984 - DNA, 20 bp, Artificial Sequence
  Description of Artificial Sequence: Synthetic oligonucleotide
  Target: SCNA; (+) strand; PAM type: NRG; PAM sequence: GGG
acctgtaatcgcagcacttt

SEQ ID NO: 32985 - DNA, 20 bp, Artificial Sequence
  Description of Artificial Sequence: Synthetic oligonucleotide
  Target: SCNA; (+) strand; PAM type: NRG; PAM sequence: GAG
ctgtaatcgcagcactttgg

SEQ ID NO: 32986 - DNA, 20 bp, Artificial Sequence
  Description of Artificial Sequence: Synthetic oligonucleotide
  Target: SCNA; (+) strand; PAM type: NRG; PAM sequence: AGG
tgtaatcgcagcactttggg

SEQ ID NO: 32987 - DNA, 20 bp, Artificial Sequence
  Description of Artificial Sequence: Synthetic oligonucleotide
  Target: SCNA; (+) strand; PAM type: NRG; PAM sequence: AAG
tcgcagcactttgggaggcc

SEQ ID NO: 32988 - DNA, 20 bp, Artificial Sequence
  Description of Artificial Sequence: Synthetic oligonucleotide
  Target: SCNA; (+) strand; PAM type: NRG; PAM sequence: AGG
cgcagcactttgggaggcca

SEQ ID NO: 32989 - DNA, 20 bp, Artificial Sequence
  Description of Artificial Sequence: Synthetic oligonucleotide
  Target: SCNA; (+) strand; PAM type: NRG; PAM sequence: CAG
agcactttgggaggccaagg

SEQ ID NO: 32990 - DNA, 20 bp, Artificial Sequence
  Description of Artificial Sequence: Synthetic oligonucleotide
  Target: SCNA; (+) strand; PAM type: NRG; PAM sequence: AGG
gcactttgggaggccaaggc

SEQ ID NO: 32991 - DNA, 20 bp, Artificial Sequence
  Description of Artificial Sequence: Synthetic oligonucleotide
  Target: SCNA; (+) strand; PAM type: NRG; PAM sequence: CGG
ctttgggaggccaaggcagg

SEQ ID NO: 32992 - DNA, 20 bp, Artificial Sequence
  Description of Artificial Sequence: Synthetic oligonucleotide
  Target: SCNA; (+) strand; PAM type: NRG; PAM sequence: AAG
caaggcaggcggatcaccat

SEQ ID NO: 32993 - DNA, 20 bp, Artificial Sequence
  Description of Artificial Sequence: Synthetic oligonucleotide
  Target: SCNA; (+) strand; PAM type: NRG; PAM sequence: CAG
gcaggcggatcaccataagt

SEQ ID NO: 32994 - DNA, 20 bp, Artificial Sequence
  Description of Artificial Sequence: Synthetic oligonucleotide
  Target: SCNA; (+) strand; PAM type: NRG; PAM sequence: AGG
caggcggatcaccataagtc

SEQ ID NO: 32995 - DNA, 20 bp, Artificial Sequence
  Description of Artificial Sequence: Synthetic oligonucleotide
  Target: SCNA; (+) strand; PAM type: NRG; PAM sequence: GAG
ggcggatcaccataagtcag

SEQ ID NO: 32996 - DNA, 20 bp, Artificial Sequence
  Description of Artificial Sequence: Synthetic oligonucleotide
  Target: SCNA; (+) strand; PAM type: NRG; PAM sequence: GAG
tcaccataagtcaggagttt

SEQ ID NO: 32997 - DNA, 20 bp, Artificial Sequence
  Description of Artificial Sequence: Synthetic oligonucleotide
  Target: SCNA; (+) strand; PAM type: NRG; PAM sequence: TGG
tcaggagtttgagacctgcc

SEQ ID NO: 32998 - DNA, 20 bp, Artificial Sequence
  Description of Artificial Sequence: Synthetic oligonucleotide
  Target: SCNA; (+) strand; PAM type: NRG; PAM sequence: TGG
tgagacctgcctggccaaca

SEQ ID NO: 32999 - DNA, 20 bp, Artificial Sequence
  Description of Artificial Sequence: Synthetic oligonucleotide
  Target: SCNA; (+) strand; PAM type: NRG; PAM sequence: TAG
tctactaaaaatacaaaaat

SEQ ID NO: 33000 - DNA, 20 bp, Artificial Sequence
  Description of Artificial Sequence: Synthetic oligonucleotide
  Target: SCNA; (+) strand; PAM type: NRG; PAM sequence: CAG
ctaaaaatacaaaaattagc

SEQ ID NO: 33001 - DNA, 20 bp, Artificial Sequence
  Description of Artificial Sequence: Synthetic oligonucleotide
  Target: SCNA; (+) strand; PAM type: NRG; PAM sequence: AGG
taaaaatacaaaaattagcc

SEQ ID NO: 33002 - DNA, 20 bp, Artificial Sequence
  Description of Artificial Sequence: Synthetic oligonucleotide
  Target: SCNA; (+) strand; PAM type: NRG; PAM sequence: TGG
atacaaaaattagccaggtg

SEQ ID NO: 33003 - DNA, 20 bp, Artificial Sequence
  Description of Artificial Sequence: Synthetic oligonucleotide
  Target: SCNA; (+) strand; PAM type: NRG; PAM sequence: TGG
caaaaattagccaggtgtgg

SEQ ID NO: 33004 - DNA, 20 bp, Artificial Sequence
  Description of Artificial Sequence: Synthetic oligonucleotide
  Target: SCNA; (+) strand; PAM type: NRG; PAM sequence: CAG
aaattagccaggtgtggtgg

SEQ ID NO: 33005 - DNA, 20 bp, Artificial Sequence
  Description of Artificial Sequence: Synthetic oligonucleotide
  Target: SCNA; (+) strand; PAM type: NRG; PAM sequence: AGG
aattagccaggtgtggtggc

SEQ ID NO: 33006 - DNA, 20 bp, Artificial Sequence
  Description of Artificial Sequence: Synthetic oligonucleotide
  Target: SCNA; (+) strand; PAM type: NRG; PAM sequence: TAG
ggtgtggtggcaggcacctg

SEQ ID NO: 33007 - DNA, 20 bp, Artificial Sequence
  Description of Artificial Sequence: Synthetic oligonucleotide
  Target: SCNA; (+) strand; PAM type: NRG; PAM sequence: CAG
gtggcaggcacctgtagtcc

SEQ ID NO: 33008 - DNA, 20 bp, Artificial Sequence
  Description of Artificial Sequence: Synthetic oligonucleotide
  Target: SCNA; (+) strand; PAM type: NRG; PAM sequence: CGG
cacctgtagtcccagctact

SEQ ID NO: 33009 - DNA, 20 bp, Artificial Sequence
  Description of Artificial Sequence: Synthetic oligonucleotide
  Target: SCNA; (+) strand; PAM type: NRG; PAM sequence: GGG
acctgtagtcccagctactc

SEQ ID NO: 33010 - DNA, 20 bp, Artificial Sequence
  Description of Artificial Sequence: Synthetic oligonucleotide
  Target: SCNA; (+) strand; PAM type: NRG; PAM sequence: CAG
tgtagtcccagctactcggg

SEQ ID NO: 33011 - DNA, 20 bp, Artificial Sequence
  Description of Artificial Sequence: Synthetic oligonucleotide
  Target: SCNA; (+) strand; PAM type: NRG; PAM sequence: GAG
tcccagctactcgggcagct

SEQ ID NO: 33012 - DNA, 20 bp, Artificial Sequence
  Description of Artificial Sequence: Synthetic oligonucleotide
  Target: SCNA; (+) strand; PAM type: NRG; PAM sequence: AGG
cccagctactcgggcagctg

SEQ ID NO: 33013 - DNA, 20 bp, Artificial Sequence
  Description of Artificial Sequence: Synthetic oligonucleotide
  Target: SCNA; (+) strand; PAM type: NRG; PAM sequence: AAG
gctactcgggcagctgaggc

SEQ ID NO: 33014 - DNA, 20 bp, Artificial Sequence
  Description of Artificial Sequence: Synthetic oligonucleotide
  Target: SCNA; (+) strand; PAM type: NRG; PAM sequence: GAG
tactcgggcagctgaggcaa

SEQ ID NO: 33015 - DNA, 20 bp, Artificial Sequence
  Description of Artificial Sequence: Synthetic oligonucleotide
  Target: SCNA; (+) strand; PAM type: NRG; PAM sequence: TGG
gcaagagaatcacttgaacc

SEQ ID NO: 33016 - DNA, 20 bp, Artificial Sequence
  Description of Artificial Sequence: Synthetic oligonucleotide
  Target: SCNA; (+) strand; PAM type: NRG; PAM sequence: AAG
agagaatcacttgaacctgg

SEQ ID NO: 33017 - DNA, 20 bp, Artificial Sequence
  Description of Artificial Sequence: Synthetic oligonucleotide
  Target: SCNA; (+) strand; PAM type: NRG; PAM sequence: AGG
gagaatcacttgaacctgga

SEQ ID NO: 33018 - DNA, 20 bp, Artificial Sequence
  Description of Artificial Sequence: Synthetic oligonucleotide
  Target: SCNA; (+) strand; PAM type: NRG; PAM sequence: CAG
aatcacttgaacctggaagg

SEQ ID NO: 33019 - DNA, 20 bp, Artificial Sequence
  Description of Artificial Sequence: Synthetic oligonucleotide
  Target: SCNA; (+) strand; PAM type: NRG; PAM sequence: CAG
aacctggaaggcagatgttg

SEQ ID NO: 33020 - DNA, 20 bp, Artificial Sequence
  Description of Artificial Sequence: Synthetic oligonucleotide
  Target: SCNA; (+) strand; PAM type: NRG; PAM sequence: GAG
tggaaggcagatgttgcagt

SEQ ID NO: 33021 - DNA, 20 bp, Artificial Sequence
  Description of Artificial Sequence: Synthetic oligonucleotide
  Target: SCNA; (+) strand; PAM type: NRG; PAM sequence: AAG
ggcagatgttgcagtgagcc

SEQ ID NO: 33022 - DNA, 20 bp, Artificial Sequence
  Description of Artificial Sequence: Synthetic oligonucleotide
  Target: SCNA; (+) strand; PAM type: NRG; PAM sequence: CAG
aagatcatactgttgcattc

SEQ ID NO: 33023 - DNA, 20 bp, Artificial Sequence
  Description of Artificial Sequence: Synthetic oligonucleotide
  Target: SCNA; (+) strand; PAM type: NRG; PAM sequence: TGG
catactgttgcattccagcc

SEQ ID NO: 33024 - DNA, 20 bp, Artificial Sequence
  Description of Artificial Sequence: Synthetic oligonucleotide
  Target: SCNA; (+) strand; PAM type: NRG; PAM sequence: GGG
atactgttgcattccagcct

SEQ ID NO: 33025 - DNA, 20 bp, Artificial Sequence
  Description of Artificial Sequence: Synthetic oligonucleotide
  Target: SCNA; (+) strand; PAM type: NRG; PAM sequence: AAG
tgcattccagcctgggtaac

SEQ ID NO: 33026 - DNA, 20 bp, Artificial Sequence
  Description of Artificial Sequence: Synthetic oligonucleotide
  Target: SCNA; (+) strand; PAM type: NRG; PAM sequence: GAG
cattccagcctgggtaacaa

SEQ ID NO: 33027 - DNA, 20 bp, Artificial Sequence
  Description of Artificial Sequence: Synthetic oligonucleotide
  Target: SCNA; (+) strand; PAM type: NRG; PAM sequence: GAG
ccagcctgggtaacaagagt

SEQ ID NO: 33028 - DNA, 20 bp, Artificial Sequence
  Description of Artificial Sequence: Synthetic oligonucleotide
  Target: SCNA; (+) strand; PAM type: NRG; PAM sequence: AAG
aaacacaaaatacaatacaa

SEQ ID NO: 33029 - DNA, 20 bp, Artificial Sequence
  Description of Artificial Sequence: Synthetic oligonucleotide
  Target: SCNA; (+) strand; PAM type: NRG; PAM sequence: AAG
caaaaacctgcttctttgaa

SEQ ID NO: 33030 - DNA, 20 bp, Artificial Sequence
  Description of Artificial Sequence: Synthetic oligonucleotide
  Target: SCNA; (+) strand; PAM type: NRG; PAM sequence: TAG
gaaaagataaacaaaatcaa

SEQ ID NO: 33031 - DNA, 20 bp, Artificial Sequence
  Description of Artificial Sequence: Synthetic oligonucleotide
  Target: SCNA; (+) strand; PAM type: NRG; PAM sequence: TGG
aaacaaaatcaatagaccat

SEQ ID NO: 33032 - DNA, 20 bp, Artificial Sequence
  Description of Artificial Sequence: Synthetic oligonucleotide
  Target: SCNA; (+) strand; PAM type: NRG; PAM sequence: AAG
aaaatcaatagaccattggc

SEQ ID NO: 33033 - DNA, 20 bp, Artificial Sequence
  Description of Artificial Sequence: Synthetic oligonucleotide
  Target: SCNA; (+) strand; PAM type: NRG; PAM sequence: AAG
gaccattggcaagattaacc

SEQ ID NO: 33034 - DNA, 20 bp, Artificial Sequence
  Description of Artificial Sequence: Synthetic oligonucleotide
  Target: SCNA; (+) strand; PAM type: NRG; PAM sequence: AAG
gcaagattaaccaagaaaac

SEQ ID NO: 33035 - DNA, 20 bp, Artificial Sequence
  Description of Artificial Sequence: Synthetic oligonucleotide
  Target: SCNA; (+) strand; PAM type: NRG; PAM sequence: AAG
taaccaagaaaacaagaaaa

SEQ ID NO: 33036 - DNA, 20 bp, Artificial Sequence
  Description of Artificial Sequence: Synthetic oligonucleotide
  Target: SCNA; (+) strand; PAM type: NRG; PAM sequence: AAG
acaagaaaaaagatctaaac

SEQ ID NO: 33037 - DNA, 20 bp, Artificial Sequence
  Description of Artificial Sequence: Synthetic oligonucleotide
  Target: SCNA; (+) strand; PAM type: NRG; PAM sequence: TAG
aagatctaaacaagctcaat

SEQ ID NO: 33038 - DNA, 20 bp, Artificial Sequence
  Description of Artificial Sequence: Synthetic oligonucleotide
  Target: SCNA; (+) strand; PAM type: NRG; PAM sequence: TGG
aagctcaattagaaatgaaa

SEQ ID NO: 33039 - DNA, 20 bp, Artificial Sequence
  Description of Artificial Sequence: Synthetic oligonucleotide
  Target: SCNA; (+) strand; PAM type: NRG; PAM sequence: GGG
agctcaattagaaatgaaat

SEQ ID NO: 33040 - DNA, 20 bp, Artificial Sequence
  Description of Artificial Sequence: Synthetic oligonucleotide
  Target: SCNA; (+) strand; PAM type: NRG; PAM sequence: GAG
ctcaattagaaatgaaatgg

SEQ ID NO: 33041 - DNA, 20 bp, Artificial Sequence
  Description of Artificial Sequence: Synthetic oligonucleotide
  Target: SCNA; (+) strand; PAM type: NRG; PAM sequence: CAG
agatactacaactgatacca

SEQ ID NO: 33042 - DNA, 20 bp, Artificial Sequence
  Description of Artificial Sequence: Synthetic oligonucleotide
  Target: SCNA; (+) strand; PAM type: NRG; PAM sequence: AAG
ctgataccacagaaataaaa

SEQ ID NO: 33043 - DNA, 20 bp, Artificial Sequence
  Description of Artificial Sequence: Synthetic oligonucleotide
  Target: SCNA; (+) strand; PAM type: NRG; PAM sequence: AAG
agaaataaaaaagattattc

SEQ ID NO: 33044 - DNA, 20 bp, Artificial Sequence
  Description of Artificial Sequence: Synthetic oligonucleotide
  Target: SCNA; (+) strand; PAM type: NRG; PAM sequence: TAG
acacatttacgtacacaaac

SEQ ID NO: 33045 - DNA, 20 bp, Artificial Sequence
  Description of Artificial Sequence: Synthetic oligonucleotide
  Target: SCNA; (+) strand; PAM type: NRG; PAM sequence: AAG
cgtacacaaactagaaaacc

SEQ ID NO: 33046 - DNA, 20 bp, Artificial Sequence
  Description of Artificial Sequence: Synthetic oligonucleotide
  Target: SCNA; (+) strand; PAM type: NRG; PAM sequence: AAG
acacaaactagaaaaccaag

SEQ ID NO: 33047 - DNA, 20 bp, Artificial Sequence
  Description of Artificial Sequence: Synthetic oligonucleotide
  Target: SCNA; (+) strand; PAM type: NRG; PAM sequence: GAG
acaaactagaaaaccaagaa

SEQ ID NO: 33048 - DNA, 20 bp, Artificial Sequence
  Description of Artificial Sequence: Synthetic oligonucleotide
  Target: SCNA; (+) strand; PAM type: NRG; PAM sequence: TGG
actagaaaaccaagaagaga

SEQ ID NO: 33049 - DNA, 20 bp, Artificial Sequence
  Description of Artificial Sequence: Synthetic oligonucleotide
  Target: SCNA; (+) strand; PAM type: NRG; PAM sequence: TAG
ctgcatatatacaaacctcc

SEQ ID NO: 33050 - DNA, 20 bp, Artificial Sequence
  Description of Artificial Sequence: Synthetic oligonucleotide
  Target: SCNA; (+) strand; PAM type: NRG; PAM sequence: CAG
acaaacctcctagattaaaa

SEQ ID NO: 33051 - DNA, 20 bp, Artificial Sequence
  Description of Artificial Sequence: Synthetic oligonucleotide
  Target: SCNA; (+) strand; PAM type: NRG; PAM sequence: AGG
caaacctcctagattaaaac

SEQ ID NO: 33052 - DNA, 20 bp, Artificial Sequence
  Description of Artificial Sequence: Synthetic oligonucleotide
  Target: SCNA; (+) strand; PAM type: NRG; PAM sequence: AAG
acctcctagattaaaacagg

SEQ ID NO: 33053 - DNA, 20 bp, Artificial Sequence
  Description of Artificial Sequence: Synthetic oligonucleotide
  Target: SCNA; (+) strand; PAM type: NRG; PAM sequence: TAG
tagattaaaacaggaagaaa

SEQ ID NO: 33054 - DNA, 20 bp, Artificial Sequence
  Description of Artificial Sequence: Synthetic oligonucleotide
  Target: SCNA; (+) strand; PAM type: NRG; PAM sequence: CAG
gaagaaatagaaattattaa

SEQ ID NO: 33055 - DNA, 20 bp, Artificial Sequence
  Description of Artificial Sequence: Synthetic oligonucleotide
  Target: SCNA; (+) strand; PAM type: NRG; PAM sequence: TAG
attaacagaccaataatgca

SEQ ID NO: 33056 - DNA, 20 bp, Artificial Sequence
  Description of Artificial Sequence: Synthetic oligonucleotide
  Target: SCNA; (+) strand; PAM type: NRG; PAM sequence: GAG
acagaccaataatgcatagt

SEQ ID NO: 33057 - DNA, 20 bp, Artificial Sequence
  Description of Artificial Sequence: Synthetic oligonucleotide
  Target: SCNA; (+) strand; PAM type: NRG; PAM sequence: GAG
agaccaataatgcatagtga

SEQ ID NO: 33058 - DNA, 20 bp, Artificial Sequence
  Description of Artificial Sequence: Synthetic oligonucleotide
  Target: SCNA; (+) strand; PAM type: NRG; PAM sequence: TAG
tagtgagagtgaaacaataa

SEQ ID NO: 33059 - DNA, 20 bp, Artificial Sequence
  Description of Artificial Sequence: Synthetic oligonucleotide
  Target: SCNA; (+) strand; PAM type: NRG; PAM sequence: CAG
aacaataatagaaaaaatgt

SEQ ID NO: 33060 - DNA, 20 bp, Artificial Sequence
  Description of Artificial Sequence: Synthetic oligonucleotide
  Target: SCNA; (+) strand; PAM type: NRG; PAM sequence: AGG
acaataatagaaaaaatgtc

SEQ ID NO: 33061 - DNA, 20 bp, Artificial Sequence
  Description of Artificial Sequence: Synthetic oligonucleotide
  Target: SCNA; (+) strand; PAM type: NRG; PAM sequence: AAG
aaaatgtcaggaaacaaaaa

SEQ ID NO: 33062 - DNA, 20 bp, Artificial Sequence
  Description of Artificial Sequence: Synthetic oligonucleotide
  Target: SCNA; (+) strand; PAM type: NRG; PAM sequence: TAG
gtcaggaaacaaaaaaagtc

SEQ ID NO: 33063 - DNA, 20 bp, Artificial Sequence
  Description of Artificial Sequence: Synthetic oligonucleotide
  Target: SCNA; (+) strand; PAM type: NRG; PAM sequence: AGG
tcaggaaacaaaaaaagtct

SEQ ID NO: 33064 - DNA, 20 bp, Artificial Sequence
  Description of Artificial Sequence: Synthetic oligonucleotide
  Target: SCNA; (+) strand; PAM type: NRG; PAM sequence: CAG
aaacaaaaaaagtctaggac

SEQ ID NO: 33065 - DNA, 20 bp, Artificial Sequence
  Description of Artificial Sequence: Synthetic oligonucleotide
  Target: SCNA; (+) strand; PAM type: NRG; PAM sequence: TGG
aaaaaaagtctaggaccaga

SEQ ID NO: 33066 - DNA, 20 bp, Artificial Sequence
  Description of Artificial Sequence: Synthetic oligonucleotide
  Target: SCNA; (+) strand; PAM type: NRG; PAM sequence: CAG
tctaggaccagatggattca

SEQ ID NO: 33067 - DNA, 20 bp, Artificial Sequence
  Description of Artificial Sequence: Synthetic oligonucleotide
  Target: SCNA; (+) strand; PAM type: NRG; PAM sequence: AGG
ctaggaccagatggattcac

SEQ ID NO: 33068 - DNA, 20 bp, Artificial Sequence
  Description of Artificial Sequence: Synthetic oligonucleotide
  Target: SCNA; (+) strand; PAM type: NRG; PAM sequence: CAG
gattcacaggtgaatgctat

SEQ ID NO: 33069 - DNA, 20 bp, Artificial Sequence
  Description of Artificial Sequence: Synthetic oligonucleotide
  Target: SCNA; (+) strand; PAM type: NRG; PAM sequence: AAG
tgaatgctatcagaaattca

SEQ ID NO: 33070 - DNA, 20 bp, Artificial Sequence
  Description of Artificial Sequence: Synthetic oligonucleotide
  Target: SCNA; (+) strand; PAM type: NRG; PAM sequence: TGG
tcagaaattcaaagaaaaat

SEQ ID NO: 33071 - DNA, 20 bp, Artificial Sequence
  Description of Artificial Sequence: Synthetic oligonucleotide
  Target: SCNA; (+) strand; PAM type: NRG; PAM sequence: AAG
ttctattgaaactgttccaa

SEQ ID NO: 33072 - DNA, 20 bp, Artificial Sequence
  Description of Artificial Sequence: Synthetic oligonucleotide
  Target: SCNA; (+) strand; PAM type: NRG; PAM sequence: TAG
attgaaactgttccaaaaga

SEQ ID NO: 33073 - DNA, 20 bp, Artificial Sequence
  Description of Artificial Sequence: Synthetic oligonucleotide
  Target: SCNA; (+) strand; PAM type: NRG; PAM sequence: GAG
tgaaactgttccaaaagata

SEQ ID NO: 33074 - DNA, 20 bp, Artificial Sequence
  Description of Artificial Sequence: Synthetic oligonucleotide
  Target: SCNA; (+) strand; PAM type: NRG; PAM sequence: CAG
actgttccaaaagatagaga

SEQ ID NO: 33075 - DNA, 20 bp, Artificial Sequence
  Description of Artificial Sequence: Synthetic oligonucleotide
  Target: SCNA; (+) strand; PAM type: NRG; PAM sequence: GAG
tgttccaaaagatagagaca

SEQ ID NO: 33076 - DNA, 20 bp, Artificial Sequence
  Description of Artificial Sequence: Synthetic oligonucleotide
  Target: SCNA; (+) strand; PAM type: NRG; PAM sequence: AGG
gttccaaaagatagagacag

SEQ ID NO: 33077 - DNA, 20 bp, Artificial Sequence
  Description of Artificial Sequence: Synthetic oligonucleotide
  Target: SCNA; (+) strand; PAM type: NRG; PAM sequence: GGG
ttccaaaagatagagacaga

SEQ ID NO: 33078 - DNA, 20 bp, Artificial Sequence
  Description of Artificial Sequence: Synthetic oligonucleotide
  Target: SCNA; (+) strand; PAM type: NRG; PAM sequence: AAG
cctccctaaatcattctatg

SEQ ID NO: 33079 - DNA, 20 bp, Artificial Sequence
  Description of Artificial Sequence: Synthetic oligonucleotide
  Target: SCNA; (+) strand; PAM type: NRG; PAM sequence: CAG
cctaaatcattctatgaagc

SEQ ID NO: 33080 - DNA, 20 bp, Artificial Sequence
  Description of Artificial Sequence: Synthetic oligonucleotide
  Target: SCNA; (+) strand; PAM type: NRG; PAM sequence: CAG
tattaccctaatatcaaaac

SEQ ID NO: 33081 - DNA, 20 bp, Artificial Sequence
  Description of Artificial Sequence: Synthetic oligonucleotide
  Target: SCNA; (+) strand; PAM type: NRG; PAM sequence: AAG
ccctaatatcaaaaccagaa

SEQ ID NO: 33082 - DNA, 20 bp, Artificial Sequence
  Description of Artificial Sequence: Synthetic oligonucleotide
  Target: SCNA; (+) strand; PAM type: NRG; PAM sequence: AGG
cctaatatcaaaaccagaaa

SEQ ID NO: 33083 - DNA, 20 bp, Artificial Sequence
  Description of Artificial Sequence: Synthetic oligonucleotide
  Target: SCNA; (+) strand; PAM type: NRG; PAM sequence: AAG
agaaaaggacataacaaaaa

SEQ ID NO: 33084 - DNA, 20 bp, Artificial Sequence
  Description of Artificial Sequence: Synthetic oligonucleotide
  Target: SCNA; (+) strand; PAM type: NRG; PAM sequence: CAG
ataacaaaaaaagaaaacta

SEQ ID NO: 33085 - DNA, 20 bp, Artificial Sequence
  Description of Artificial Sequence: Synthetic oligonucleotide
  Target: SCNA; (+) strand; PAM type: NRG; PAM sequence: CAG
agaccaatatccctgatgaa

SEQ ID NO: 33086 - DNA, 20 bp, Artificial Sequence
  Description of Artificial Sequence: Synthetic oligonucleotide
  Target: SCNA; (+) strand; PAM type: NRG; PAM sequence: GAG
accaatatccctgatgaaca

SEQ ID NO: 33087 - DNA, 20 bp, Artificial Sequence
  Description of Artificial Sequence: Synthetic oligonucleotide
  Target: SCNA; (+) strand; PAM type: NRG; PAM sequence: TAG
aaaaatcctcaataaaatac

SEQ ID NO: 33088 - DNA, 20 bp, Artificial Sequence
  Description of Artificial Sequence: Synthetic oligonucleotide
  Target: SCNA; (+) strand; PAM type: NRG; PAM sequence: CAG
aaatactagctaaatgaatc

SEQ ID NO: 33089 - DNA, 20 bp, Artificial Sequence
  Description of Artificial Sequence: Synthetic oligonucleotide
  Target: SCNA; (+) strand; PAM type: NRG; PAM sequence: CAG
tactagctaaatgaatccag

SEQ ID NO: 33090 - DNA, 20 bp, Artificial Sequence
  Description of Artificial Sequence: Synthetic oligonucleotide
  Target: SCNA; (+) strand; PAM type: NRG; PAM sequence: AAG
gaatccagcagcatatcaaa

SEQ ID NO: 33091 - DNA, 20 bp, Artificial Sequence
  Description of Artificial Sequence: Synthetic oligonucleotide
  Target: SCNA; (+) strand; PAM type: NRG; PAM sequence: CAG
aaaagataatccaccatgat

SEQ ID NO: 33092 - DNA, 20 bp, Artificial Sequence
  Description of Artificial Sequence: Synthetic oligonucleotide
  Target: SCNA; (+) strand; PAM type: NRG; PAM sequence: AGG
aaagataatccaccatgatc

SEQ ID NO: 33093 - DNA, 20 bp, Artificial Sequence
  Description of Artificial Sequence: Synthetic oligonucleotide
  Target: SCNA; (+) strand; PAM type: NRG; PAM sequence: TGG
gataatccaccatgatcagg

SEQ ID NO: 33094 - DNA, 20 bp, Artificial Sequence
  Description of Artificial Sequence: Synthetic oligonucleotide
  Target: SCNA; (+) strand; PAM type: NRG; PAM sequence: GGG
ataatccaccatgatcaggt

SEQ ID NO: 33095 - DNA, 20 bp, Artificial Sequence
  Description of Artificial Sequence: Synthetic oligonucleotide
  Target: SCNA; (+) strand; PAM type: NRG; PAM sequence: CGG
tgatcaggtgggtttcatac

SEQ ID NO: 33096 - DNA, 20 bp, Artificial Sequence
  Description of Artificial Sequence: Synthetic oligonucleotide
  Target: SCNA; (+) strand; PAM type: NRG; PAM sequence: GGG
gatcaggtgggtttcatacc

SEQ ID NO: 33097 - DNA, 20 bp, Artificial Sequence
  Description of Artificial Sequence: Synthetic oligonucleotide
  Target: SCNA; (+) strand; PAM type: NRG; PAM sequence: GGG
atcaggtgggtttcataccg

SEQ ID NO: 33098 - DNA, 20 bp, Artificial Sequence
  Description of Artificial Sequence: Synthetic oligonucleotide
  Target: SCNA; (+) strand; PAM type: NRG; PAM sequence: CAG
tgggtttcataccggggatg

SEQ ID NO: 33099 - DNA, 20 bp, Artificial Sequence
  Description of Artificial Sequence: Synthetic oligonucleotide
  Target: SCNA; (+) strand; PAM type: NRG; PAM sequence: AGG
gggtttcataccggggatgc

SEQ ID NO: 33100 - DNA, 20 bp, Artificial Sequence
  Description of Artificial Sequence: Synthetic oligonucleotide
  Target: SCNA; (+) strand; PAM type: NRG; PAM sequence: GGG
ggtttcataccggggatgca

SEQ ID NO: 33101 - DNA, 20 bp, Artificial Sequence
  Description of Artificial Sequence: Synthetic oligonucleotide
  Target: SCNA; (+) strand; PAM type: NRG; PAM sequence: AAG
agggttgctttaacatatgc

SEQ ID NO: 33102 - DNA, 20 bp, Artificial Sequence
  Description of Artificial Sequence: Synthetic oligonucleotide
  Target: SCNA; (+) strand; PAM type: NRG; PAM sequence: AAG
ataaatgtgatacaccatat

SEQ ID NO: 33103 - DNA, 20 bp, Artificial Sequence
  Description of Artificial Sequence: Synthetic oligonucleotide
  Target: SCNA; (+) strand; PAM type: NRG; PAM sequence: CAG
aatgtgatacaccatataag

SEQ ID NO: 33104 - DNA, 20 bp, Artificial Sequence
  Description of Artificial Sequence: Synthetic oligonucleotide
  Target: SCNA; (+) strand; PAM type: NRG; PAM sequence: AGG
atgtgatacaccatataagc

SEQ ID NO: 33105 - DNA, 20 bp, Artificial Sequence
  Description of Artificial Sequence: Synthetic oligonucleotide
  Target: SCNA; (+) strand; PAM type: NRG; PAM sequence: GAG
gtgatacaccatataagcag

SEQ ID NO: 33106 - DNA, 20 bp, Artificial Sequence
  Description of Artificial Sequence: Synthetic oligonucleotide
  Target: SCNA; (+) strand; PAM type: NRG; PAM sequence: TAG
aaatcatatgataaactcaa

SEQ ID NO: 33107 - DNA, 20 bp, Artificial Sequence
  Description of Artificial Sequence: Synthetic oligonucleotide
  Target: SCNA; (+) strand; PAM type: NRG; PAM sequence: CAG
tatgataaactcaatagatg

SEQ ID NO: 33108 - DNA, 20 bp, Artificial Sequence
  Description of Artificial Sequence: Synthetic oligonucleotide
  Target: SCNA; (+) strand; PAM type: NRG; PAM sequence: AAG
aaactcaatagatgcagaaa

SEQ ID NO: 33109 - DNA, 20 bp, Artificial Sequence
  Description of Artificial Sequence: Synthetic oligonucleotide
  Target: SCNA; (+) strand; PAM type: NRG; PAM sequence: CAG
aaaaagcatttgacaaaatt

SEQ ID NO: 33110 - DNA, 20 bp, Artificial Sequence
  Description of Artificial Sequence: Synthetic oligonucleotide
  Target: SCNA; (+) strand; PAM type: NRG; PAM sequence: CAG
tgctttatgattaaaaccct

SEQ ID NO: 33111 - DNA, 20 bp, Artificial Sequence
  Description of Artificial Sequence: Synthetic oligonucleotide
  Target: SCNA; (+) strand; PAM type: NRG; PAM sequence: TGG
attaaaaccctcagcaaaac

SEQ ID NO: 33112 - DNA, 20 bp, Artificial Sequence
  Description of Artificial Sequence: Synthetic oligonucleotide
  Target: SCNA; (+) strand; PAM type: NRG; PAM sequence: AAG
cctcagcaaaactggcatat

SEQ ID NO: 33113 - DNA, 20 bp, Artificial Sequence
  Description of Artificial Sequence: Synthetic oligonucleotide
  Target: SCNA; (+) strand; PAM type: NRG; PAM sequence: AAG
gcatataagatacacacctt

SEQ ID NO: 33114 - DNA, 20 bp, Artificial Sequence
  Description of Artificial Sequence: Synthetic oligonucleotide
  Target: SCNA; (+) strand; PAM type: NRG; PAM sequence: AGG
catataagatacacacctta

SEQ ID NO: 33115 - DNA, 20 bp, Artificial Sequence
  Description of Artificial Sequence: Synthetic oligonucleotide
  Target: SCNA; (+) strand; PAM type: NRG; PAM sequence: AAG
tacacaccttaaggtaataa

SEQ ID NO: 33116 - DNA, 20 bp, Artificial Sequence
  Description of Artificial Sequence: Synthetic oligonucleotide
  Target: SCNA; (+) strand; PAM type: NRG; PAM sequence: CAG
agccacttatgacaaaccca

SEQ ID NO: 33117 - DNA, 20 bp, Artificial Sequence
  Description of Artificial Sequence: Synthetic oligonucleotide
  Target: SCNA; (+) strand; PAM type: NRG; PAM sequence: CGG
acagccaacattatattgaa

SEQ ID NO: 33118 - DNA, 20 bp, Artificial Sequence
  Description of Artificial Sequence: Synthetic oligonucleotide
  Target: SCNA; (+) strand; PAM type: NRG; PAM sequence: GGG
cagccaacattatattgaac

SEQ ID NO: 33119 - DNA, 20 bp, Artificial Sequence
  Description of Artificial Sequence: Synthetic oligonucleotide
  Target: SCNA; (+) strand; PAM type: NRG; PAM sequence: GGG
agccaacattatattgaacg

SEQ ID NO: 33120 - DNA, 20 bp, Artificial Sequence
  Description of Artificial Sequence: Synthetic oligonucleotide
  Target: SCNA; (+) strand; PAM type: NRG; PAM sequence: GGG
gccaacattatattgaacgg

SEQ ID NO: 33121 - DNA, 20 bp, Artificial Sequence
  Description of Artificial Sequence: Synthetic oligonucleotide
  Target: SCNA; (+) strand; PAM type: NRG; PAM sequence: AAG
ttgaacgggggaaaatttga

SEQ ID NO: 33122 - DNA, 20 bp, Artificial Sequence
  Description of Artificial Sequence: Synthetic oligonucleotide
  Target: SCNA; (+) strand; PAM type: NRG; PAM sequence: GAG
aatttgaaagcatttccccc

SEQ ID NO: 33123 - DNA, 20 bp, Artificial Sequence
  Description of Artificial Sequence: Synthetic oligonucleotide
  Target: SCNA; (+) strand; PAM type: NRG; PAM sequence: TGG
aaagcatttcccccgagaac

SEQ ID NO: 33124 - DNA, 20 bp, Artificial Sequence
  Description of Artificial Sequence: Synthetic oligonucleotide
  Target: SCNA; (+) strand; PAM type: NRG; PAM sequence: AAG
tttcccccgagaactggaat

SEQ ID NO: 33125 - DNA, 20 bp, Artificial Sequence
  Description of Artificial Sequence: Synthetic oligonucleotide
  Target: SCNA; (+) strand; PAM type: NRG; PAM sequence: AAG
cccgagaactggaataagac

SEQ ID NO: 33126 - DNA, 20 bp, Artificial Sequence
  Description of Artificial Sequence: Synthetic oligonucleotide
  Target: SCNA; (+) strand; PAM type: NRG; PAM sequence: TAG
ttcaccacttctattcaaca

SEQ ID NO: 33127 - DNA, 20 bp, Artificial Sequence
  Description of Artificial Sequence: Synthetic oligonucleotide
  Target: SCNA; (+) strand; PAM type: NRG; PAM sequence: TGG
acttctattcaacatagtac

SEQ ID NO: 33128 - DNA, 20 bp, Artificial Sequence
  Description of Artificial Sequence: Synthetic oligonucleotide
  Target: SCNA; (+) strand; PAM type: NRG; PAM sequence: TAG
caacatagtactggaaatcc

SEQ ID NO: 33129 - DNA, 20 bp, Artificial Sequence
  Description of Artificial Sequence: Synthetic oligonucleotide
  Target: SCNA; (+) strand; PAM type: NRG; PAM sequence: CAG
atagtactggaaatcctagc

SEQ ID NO: 33130 - DNA, 20 bp, Artificial Sequence
  Description of Artificial Sequence: Synthetic oligonucleotide
  Target: SCNA; (+) strand; PAM type: NRG; PAM sequence: GAG
agtactggaaatcctagcca

SEQ ID NO: 33131 - DNA, 20 bp, Artificial Sequence
  Description of Artificial Sequence: Synthetic oligonucleotide
  Target: SCNA; (+) strand; PAM type: NRG; PAM sequence: CAG
gaaatcctagccagagcaat

SEQ ID NO: 33132 - DNA, 20 bp, Artificial Sequence
  Description of Artificial Sequence: Synthetic oligonucleotide
  Target: SCNA; (+) strand; PAM type: NRG; PAM sequence: AAG
cctagccagagcaatcagac

SEQ ID NO: 33133 - DNA, 20 bp, Artificial Sequence
  Description of Artificial Sequence: Synthetic oligonucleotide
  Target: SCNA; (+) strand; PAM type: NRG; PAM sequence: GAG
tagccagagcaatcagacaa

SEQ ID NO: 33134 - DNA, 20 bp, Artificial Sequence
  Description of Artificial Sequence: Synthetic oligonucleotide
  Target: SCNA; (+) strand; PAM type: NRG; PAM sequence: AAG
cagagcaatcagacaagaga

SEQ ID NO: 33135 - DNA, 20 bp, Artificial Sequence
  Description of Artificial Sequence: Synthetic oligonucleotide
  Target: SCNA; (+) strand; PAM type: NRG; PAM sequence: AAG
tcagacaagagaaagaaata

SEQ ID NO: 33136 - DNA, 20 bp, Artificial Sequence
  Description of Artificial Sequence: Synthetic oligonucleotide
  Target: SCNA; (+) strand; PAM type: NRG; PAM sequence: GAG
agacaagagaaagaaataaa

SEQ ID NO: 33137 - DNA, 20 bp, Artificial Sequence
  Description of Artificial Sequence: Synthetic oligonucleotide
  Target: SCNA; (+) strand; PAM type: NRG; PAM sequence: AAG
aaagagcatccaaactgcta

SEQ ID NO: 33138 - DNA, 20 bp, Artificial Sequence
  Description of Artificial Sequence: Synthetic oligonucleotide
  Target: SCNA; (+) strand; PAM type: NRG; PAM sequence: GAG
agagcatccaaactgctaaa

SEQ ID NO: 33139 - DNA, 20 bp, Artificial Sequence
  Description of Artificial Sequence: Synthetic oligonucleotide
  Target: SCNA; (+) strand; PAM type: NRG; PAM sequence: AGG
gagcatccaaactgctaaag

SEQ ID NO: 33140 - DNA, 20 bp, Artificial Sequence
  Description of Artificial Sequence: Synthetic oligonucleotide
  Target: SCNA; (+) strand; PAM type: NRG; PAM sequence: AAG
catccaaactgctaaagagg

SEQ ID NO: 33141 - DNA, 20 bp, Artificial Sequence
  Description of Artificial Sequence: Synthetic oligonucleotide
  Target: SCNA; (+) strand; PAM type: NRG; PAM sequence: TAG
cgatgatatgtttgtatacc

SEQ ID NO: 33142 - DNA, 20 bp, Artificial Sequence
  Description of Artificial Sequence: Synthetic oligonucleotide
  Target: SCNA; (+) strand; PAM type: NRG; PAM sequence: AAG
ttgtatacctagaaaaccta

SEQ ID NO: 33143 - DNA, 20 bp, Artificial Sequence
  Description of Artificial Sequence: Synthetic oligonucleotide
  Target: SCNA; (+) strand; PAM type: NRG; PAM sequence: AAG
aacctaaagactcatccaaa

SEQ ID NO: 33144 - DNA, 20 bp, Artificial Sequence
  Description of Artificial Sequence: Synthetic oligonucleotide
  Target: SCNA; (+) strand; PAM type: NRG; PAM sequence: TAG
agactcatccaaaaagctcc

SEQ ID NO: 33145 - DNA, 20 bp, Artificial Sequence
  Description of Artificial Sequence: Synthetic oligonucleotide
  Target: SCNA; (+) strand; PAM type: NRG; PAM sequence: AAG
aaaaagctcctagatctgat

SEQ ID NO: 33146 - DNA, 20 bp, Artificial Sequence
  Description of Artificial Sequence: Synthetic oligonucleotide
  Target: SCNA; (+) strand; PAM type: NRG; PAM sequence: CAG
ctagatctgataagttaatt

SEQ ID NO: 33147 - DNA, 20 bp, Artificial Sequence
  Description of Artificial Sequence: Synthetic oligonucleotide
  Target: SCNA; (+) strand; PAM type: NRG; PAM sequence: AAG
tctgataagttaattcagta

SEQ ID NO: 33148 - DNA, 20 bp, Artificial Sequence
  Description of Artificial Sequence: Synthetic oligonucleotide
  Target: SCNA; (+) strand; PAM type: NRG; PAM sequence: CAG
agttaattcagtaaagtttc

SEQ ID NO: 33149 - DNA, 20 bp, Artificial Sequence
  Description of Artificial Sequence: Synthetic oligonucleotide
  Target: SCNA; (+) strand; PAM type: NRG; PAM sequence: CAG
caaaatcaatgtacacaaat

SEQ ID NO: 33150 - DNA, 20 bp, Artificial Sequence
  Description of Artificial Sequence: Synthetic oligonucleotide
  Target: SCNA; (+) strand; PAM type: NRG; PAM sequence: CAG
caatgtacacaaatcagtac

SEQ ID NO: 33151 - DNA, 20 bp, Artificial Sequence
  Description of Artificial Sequence: Synthetic oligonucleotide
  Target: SCNA; (+) strand; PAM type: NRG; PAM sequence: CAG
gtaccagtgctatacaccaa

SEQ ID NO: 33152 - DNA, 20 bp, Artificial Sequence
  Description of Artificial Sequence: Synthetic oligonucleotide
  Target: SCNA; (+) strand; PAM type: NRG; PAM sequence: GAG
acaccaacagcaacaaaact

SEQ ID NO: 33153 - DNA, 20 bp, Artificial Sequence
  Description of Artificial Sequence: Synthetic oligonucleotide
  Target: SCNA; (+) strand; PAM type: NRG; PAM sequence: AAG
acaaaactgagaatcaaatt

SEQ ID NO: 33154 - DNA, 20 bp, Artificial Sequence
  Description of Artificial Sequence: Synthetic oligonucleotide
  Target: SCNA; (+) strand; PAM type: NRG; PAM sequence: GAG
gagaatcaaattaagaactt

SEQ ID NO: 33155 - DNA, 20 bp, Artificial Sequence
  Description of Artificial Sequence: Synthetic oligonucleotide
  Target: SCNA; (+) strand; PAM type: NRG; PAM sequence: CAG
gaacttgagcctttttacaa

SEQ ID NO: 33156 - DNA, 20 bp, Artificial Sequence
  Description of Artificial Sequence: Synthetic oligonucleotide
  Target: SCNA; (+) strand; PAM type: NRG; PAM sequence: TAG
ctgcaaaaaaaaaaaatgct

SEQ ID NO: 33157 - DNA, 20 bp, Artificial Sequence
  Description of Artificial Sequence: Synthetic oligonucleotide
  Target: SCNA; (+) strand; PAM type: NRG; PAM sequence: AGG
tgcaaaaaaaaaaaatgctt

SEQ ID NO: 33158 - DNA, 20 bp, Artificial Sequence
  Description of Artificial Sequence: Synthetic oligonucleotide
  Target: SCNA; (+) strand; PAM type: NRG; PAM sequence: AAG
cttaggaatatacctaacca

SEQ ID NO: 33159 - DNA, 20 bp, Artificial Sequence
  Description of Artificial Sequence: Synthetic oligonucleotide
  Target: SCNA; (+) strand; PAM type: NRG; PAM sequence: GAG
taggaatatacctaaccaaa

SEQ ID NO: 33160 - DNA, 20 bp, Artificial Sequence
  Description of Artificial Sequence: Synthetic oligonucleotide
  Target: SCNA; (+) strand; PAM type: NRG; PAM sequence: AGG
aggaatatacctaaccaaag

SEQ ID NO: 33161 - DNA, 20 bp, Artificial Sequence
  Description of Artificial Sequence: Synthetic oligonucleotide
  Target: SCNA; (+) strand; PAM type: NRG; PAM sequence: TGG
aatatacctaaccaaagagg

SEQ ID NO: 33162 - DNA, 20 bp, Artificial Sequence
  Description of Artificial Sequence: Synthetic oligonucleotide
  Target: SCNA; (+) strand; PAM type: NRG; PAM sequence: AAG
atacctaaccaaagaggtgg

SEQ ID NO: 33163 - DNA, 20 bp, Artificial Sequence
  Description of Artificial Sequence: Synthetic oligonucleotide
  Target: SCNA; (+) strand; PAM type: NRG; PAM sequence: CAG
aaagaggtggaagatctcta

SEQ ID NO: 33164 - DNA, 20 bp, Artificial Sequence
  Description of Artificial Sequence: Synthetic oligonucleotide
  Target: SCNA; (+) strand; PAM type: NRG; PAM sequence: AGG
aagaggtggaagatctctac

SEQ ID NO: 33165 - DNA, 20 bp, Artificial Sequence
  Description of Artificial Sequence: Synthetic oligonucleotide
  Target: SCNA; (+) strand; PAM type: NRG; PAM sequence: AAG
aaactacaaaatattgctga

SEQ ID NO: 33166 - DNA, 20 bp, Artificial Sequence
  Description of Artificial Sequence: Synthetic oligonucleotide
  Target: SCNA; (+) strand; PAM type: NRG; PAM sequence: CAG
aatattgctgaaagaaatca

SEQ ID NO: 33167 - DNA, 20 bp, Artificial Sequence
  Description of Artificial Sequence: Synthetic oligonucleotide
  Target: SCNA; (+) strand; PAM type: NRG; PAM sequence: CAG
ctgaaagaaatcacagacaa

SEQ ID NO: 33168 - DNA, 20 bp, Artificial Sequence
  Description of Artificial Sequence: Synthetic oligonucleotide
  Target: SCNA; (+) strand; PAM type: NRG; PAM sequence: TGG
gaaaacacatcccttattca

SEQ ID NO: 33169 - DNA, 20 bp, Artificial Sequence
  Description of Artificial Sequence: Synthetic oligonucleotide
  Target: SCNA; (+) strand; PAM type: NRG; PAM sequence: TGG
cacatcccttattcatggat

SEQ ID NO: 33170 - DNA, 20 bp, Artificial Sequence
  Description of Artificial Sequence: Synthetic oligonucleotide
  Target: SCNA; (+) strand; PAM type: NRG; PAM sequence: CAG
atcccttattcatggattgg

SEQ ID NO: 33171 - DNA, 20 bp, Artificial Sequence
  Description of Artificial Sequence: Synthetic oligonucleotide
  Target: SCNA; (+) strand; PAM type: NRG; PAM sequence: GAG
agaatcaatattgtgaaaat

SEQ ID NO: 33172 - DNA, 20 bp, Artificial Sequence
  Description of Artificial Sequence: Synthetic oligonucleotide
  Target: SCNA; (+) strand; PAM type: NRG; PAM sequence: AAG
aatgccaccatcattcttca

SEQ ID NO: 33173 - DNA, 20 bp, Artificial Sequence
  Description of Artificial Sequence: Synthetic oligonucleotide
  Target: SCNA; (+) strand; PAM type: NRG; PAM sequence: AAG
accatcattcttcaaagaac

SEQ ID NO: 33174 - DNA, 20 bp, Artificial Sequence
  Description of Artificial Sequence: Synthetic oligonucleotide
  Target: SCNA; (+) strand; PAM type: NRG; PAM sequence: TGG
aaaaaatcttaaaattcaca

SEQ ID NO: 33175 - DNA, 20 bp, Artificial Sequence
  Description of Artificial Sequence: Synthetic oligonucleotide
  Target: SCNA; (+) strand; PAM type: NRG; PAM sequence: CAG
attcacatggaacaaaacaa

SEQ ID NO: 33176 - DNA, 20 bp, Artificial Sequence
  Description of Artificial Sequence: Synthetic oligonucleotide
  Target: SCNA; (+) strand; PAM type: NRG; PAM sequence: CAG
gaacaaaacaacagcccata

SEQ ID NO: 33177 - DNA, 20 bp, Artificial Sequence
  Description of Artificial Sequence: Synthetic oligonucleotide
  Target: SCNA; (+) strand; PAM type: NRG; PAM sequence: AAG
aacaacagcccatacagcca

SEQ ID NO: 33178 - DNA, 20 bp, Artificial Sequence
  Description of Artificial Sequence: Synthetic oligonucleotide
  Target: SCNA; (+) strand; PAM type: NRG; PAM sequence: AAG
acagcccatacagccaaagc

SEQ ID NO: 33179 - DNA, 20 bp, Artificial Sequence
  Description of Artificial Sequence: Synthetic oligonucleotide
  Target: SCNA; (+) strand; PAM type: NRG; PAM sequence: AAG
catacagccaaagcaagact

SEQ ID NO: 33180 - DNA, 20 bp, Artificial Sequence
  Description of Artificial Sequence: Synthetic oligonucleotide
  Target: SCNA; (+) strand; PAM type: NRG; PAM sequence: TGG
taagcaaaaaataacaaatc

SEQ ID NO: 33181 - DNA, 20 bp, Artificial Sequence
  Description of Artificial Sequence: Synthetic oligonucleotide
  Target: SCNA; (+) strand; PAM type: NRG; PAM sequence: GAG
agcaaaaaataacaaatctg

SEQ ID NO: 33182 - DNA, 20 bp, Artificial Sequence
  Description of Artificial Sequence: Synthetic oligonucleotide
  Target: SCNA; (+) strand; PAM type: NRG; PAM sequence: AGG
gcaaaaaataacaaatctgg

SEQ ID NO: 33183 - DNA, 20 bp, Artificial Sequence
  Description of Artificial Sequence: Synthetic oligonucleotide
  Target: SCNA; (+) strand; PAM type: NRG; PAM sequence: TAG
aataacaaatctggaggcac

SEQ ID NO: 33184 - DNA, 20 bp, Artificial Sequence
  Description of Artificial Sequence: Synthetic oligonucleotide
  Target: SCNA; (+) strand; PAM type: NRG; PAM sequence: AAG
ccaacttcaaactatactac

SEQ ID NO: 33185 - DNA, 20 bp, Artificial Sequence
  Description of Artificial Sequence: Synthetic oligonucleotide
  Target: SCNA; (+) strand; PAM type: NRG; PAM sequence: TAG
caaactatactacaagacta

SEQ ID NO: 33186 - DNA, 20 bp, Artificial Sequence
  Description of Artificial Sequence: Synthetic oligonucleotide
  Target: SCNA; (+) strand; PAM type: NRG; PAM sequence: TAG
ctatactacaagactatagt

SEQ ID NO: 33187 - DNA, 20 bp, Artificial Sequence
  Description of Artificial Sequence: Synthetic oligonucleotide
  Target: SCNA; (+) strand; PAM type: NRG; PAM sequence: AGG
tatactacaagactatagtt

SEQ ID NO: 33188 - DNA, 20 bp, Artificial Sequence
  Description of Artificial Sequence: Synthetic oligonucleotide
  Target: SCNA; (+) strand; PAM type: NRG; PAM sequence: CAG
caagactatagttaggaaaa

SEQ ID NO: 33189 - DNA, 20 bp, Artificial Sequence
  Description of Artificial Sequence: Synthetic oligonucleotide
  Target: SCNA; (+) strand; PAM type: NRG; PAM sequence: TGG
ctatagttaggaaaacagca

SEQ ID NO: 33190 - DNA, 20 bp, Artificial Sequence
  Description of Artificial Sequence: Synthetic oligonucleotide
  Target: SCNA; (+) strand; PAM type: NRG; PAM sequence: TAG
gcatggtactactataaaaa

SEQ ID NO: 33191 - DNA, 20 bp, Artificial Sequence
  Description of Artificial Sequence: Synthetic oligonucleotide
  Target: SCNA; (+) strand; PAM type: NRG; PAM sequence: TAG
ctactataaaaatagacatg

SEQ ID NO: 33192 - DNA, 20 bp, Artificial Sequence
  Description of Artificial Sequence: Synthetic oligonucleotide
  Target: SCNA; (+) strand; PAM type: NRG; PAM sequence: TGG
aaaatagacatgtagatcaa

SEQ ID NO: 33193 - DNA, 20 bp, Artificial Sequence
  Description of Artificial Sequence: Synthetic oligonucleotide
  Target: SCNA; (+) strand; PAM type: NRG; PAM sequence: GAG
aatagacatgtagatcaatg

SEQ ID NO: 33194 - DNA, 20 bp, Artificial Sequence
  Description of Artificial Sequence: Synthetic oligonucleotide
  Target: SCNA; (+) strand; PAM type: NRG; PAM sequence: CAG
agacatgtagatcaatggag

SEQ ID NO: 33195 - DNA, 20 bp, Artificial Sequence
  Description of Artificial Sequence: Synthetic oligonucleotide
  Target: SCNA; (+) strand; PAM type: NRG; PAM sequence: TAG
tgtagatcaatggagcagaa

SEQ ID NO: 33196 - DNA, 20 bp, Artificial Sequence
  Description of Artificial Sequence: Synthetic oligonucleotide
  Target: SCNA; (+) strand; PAM type: NRG; PAM sequence: CAG
atggagcagaatagaaaatc

SEQ ID NO: 33197 - DNA, 20 bp, Artificial Sequence
  Description of Artificial Sequence: Synthetic oligonucleotide
  Target: SCNA; (+) strand; PAM type: NRG; PAM sequence: AAG
gaatagaaaatccagaaata

SEQ ID NO: 33198 - DNA, 20 bp, Artificial Sequence
  Description of Artificial Sequence: Synthetic oligonucleotide
  Target: SCNA; (+) strand; PAM type: NRG; PAM sequence: CAG
gaaataaagctaaatactta

SEQ ID NO: 33199 - DNA, 20 bp, Artificial Sequence
  Description of Artificial Sequence: Synthetic oligonucleotide
  Target: SCNA; (+) strand; PAM type: NRG; PAM sequence: AAG
cagccaactgatcttcaaca

SEQ ID NO: 33200 - DNA, 20 bp, Artificial Sequence
  Description of Artificial Sequence: Synthetic oligonucleotide
  Target: SCNA; (+) strand; PAM type: NRG; PAM sequence: AAG
aacaaagcaaacaaaaacat

SEQ ID NO: 33201 - DNA, 20 bp, Artificial Sequence
  Description of Artificial Sequence: Synthetic oligonucleotide
  Target: SCNA; (+) strand; PAM type: NRG; PAM sequence: AGG
acaaagcaaacaaaaacata

SEQ ID NO: 33202 - DNA, 20 bp, Artificial Sequence
  Description of Artificial Sequence: Synthetic oligonucleotide
  Target: SCNA; (+) strand; PAM type: NRG; PAM sequence: TGG
aagcaaacaaaaacataagg

SEQ ID NO: 33203 - DNA, 20 bp, Artificial Sequence
  Description of Artificial Sequence: Synthetic oligonucleotide
  Target: SCNA; (+) strand; PAM type: NRG; PAM sequence: GGG
agcaaacaaaaacataaggt

SEQ ID NO: 33204 - DNA, 20 bp, Artificial Sequence
  Description of Artificial Sequence: Synthetic oligonucleotide
  Target: SCNA; (+) strand; PAM type: NRG; PAM sequence: GGG
gcaaacaaaaacataaggtg

SEQ ID NO: 33205 - DNA, 20 bp, Artificial Sequence
  Description of Artificial Sequence: Synthetic oligonucleotide
  Target: SCNA; (+) strand; PAM type: NRG; PAM sequence: AAG
acaaaaacataaggtgggga

SEQ ID NO: 33206 - DNA, 20 bp, Artificial Sequence
  Description of Artificial Sequence: Synthetic oligonucleotide
  Target: SCNA; (+) strand; PAM type: NRG; PAM sequence: AGG
caaaaacataaggtggggaa

SEQ ID NO: 33207 - DNA, 20 bp, Artificial Sequence
  Description of Artificial Sequence: Synthetic oligonucleotide
  Target: SCNA; (+) strand; PAM type: NRG; PAM sequence: TGG
aggacatcctattcaacaaa

SEQ ID NO: 33208 - DNA, 20 bp, Artificial Sequence
  Description of Artificial Sequence: Synthetic oligonucleotide
  Target: SCNA; (+) strand; PAM type: NRG; PAM sequence: TGG
tcctattcaacaaatggtgt

SEQ ID NO: 33209 - DNA, 20 bp, Artificial Sequence
  Description of Artificial Sequence: Synthetic oligonucleotide
  Target: SCNA; (+) strand; PAM type: NRG; PAM sequence: GGG
cctattcaacaaatggtgtt

SEQ ID NO: 33210 - DNA, 20 bp, Artificial Sequence
  Description of Artificial Sequence: Synthetic oligonucleotide
  Target: SCNA; (+) strand; PAM type: NRG; PAM sequence: TGG
acaaatggtgttgggataat

SEQ ID NO: 33211 - DNA, 20 bp, Artificial Sequence
  Description of Artificial Sequence: Synthetic oligonucleotide
  Target: SCNA; (+) strand; PAM type: NRG; PAM sequence: AAG
atggtgttgggataattggc

SEQ ID NO: 33212 - DNA, 20 bp, Artificial Sequence
  Description of Artificial Sequence: Synthetic oligonucleotide
  Target: SCNA; (+) strand; PAM type: NRG; PAM sequence: TAG
gataattggcaagccacatg

SEQ ID NO: 33213 - DNA, 20 bp, Artificial Sequence
  Description of Artificial Sequence: Synthetic oligonucleotide
  Target: SCNA; (+) strand; PAM type: NRG; PAM sequence: AAG
aattggcaagccacatgtag

SEQ ID NO: 33214 - DNA, 20 bp, Artificial Sequence
  Description of Artificial Sequence: Synthetic oligonucleotide
  Target: SCNA; (+) strand; PAM type: NRG; PAM sequence: AAG
aagccacatgtagaagaatg

SEQ ID NO: 33215 - DNA, 20 bp, Artificial Sequence
  Description of Artificial Sequence: Synthetic oligonucleotide
  Target: SCNA; (+) strand; PAM type: NRG; PAM sequence: TGG
cacatgtagaagaatgaagc

SEQ ID NO: 33216 - DNA, 20 bp, Artificial Sequence
  Description of Artificial Sequence: Synthetic oligonucleotide
  Target: SCNA; (+) strand; PAM type: NRG; PAM sequence: AAG
acttatacaaaaatccactc

SEQ ID NO: 33217 - DNA, 20 bp, Artificial Sequence
  Description of Artificial Sequence: Synthetic oligonucleotide
  Target: SCNA; (+) strand; PAM type: NRG; PAM sequence: TGG
atacaaaaatccactcaaga

SEQ ID NO: 33218 - DNA, 20 bp, Artificial Sequence
  Description of Artificial Sequence: Synthetic oligonucleotide
  Target: SCNA; (+) strand; PAM type: NRG; PAM sequence: AAG
aatccactcaagatggatca

SEQ ID NO: 33219 - DNA, 20 bp, Artificial Sequence
  Description of Artificial Sequence: Synthetic oligonucleotide
  Target: SCNA; (+) strand; PAM type: NRG; PAM sequence: AAG
tggatcaaagacttaaatct

SEQ ID NO: 33220 - DNA, 20 bp, Artificial Sequence
  Description of Artificial Sequence: Synthetic oligonucleotide
  Target: SCNA; (+) strand; PAM type: NRG; PAM sequence: TAG
acccaaaaccttaaaaatta

SEQ ID NO: 33221 - DNA, 20 bp, Artificial Sequence
  Description of Artificial Sequence: Synthetic oligonucleotide
  Target: SCNA; (+) strand; PAM type: NRG; PAM sequence: AAG
caaaaccttaaaaattatag

SEQ ID NO: 33222 - DNA, 20 bp, Artificial Sequence
  Description of Artificial Sequence: Synthetic oligonucleotide
  Target: SCNA; (+) strand; PAM type: NRG; PAM sequence: TGG
aaaattatagaagataacat

SEQ ID NO: 33223 - DNA, 20 bp, Artificial Sequence
  Description of Artificial Sequence: Synthetic oligonucleotide
  Target: SCNA; (+) strand; PAM type: NRG; PAM sequence: TAG
taacattggtaaaactcttc

SEQ ID NO: 33224 - DNA, 20 bp, Artificial Sequence
  Description of Artificial Sequence: Synthetic oligonucleotide
  Target: SCNA; (+) strand; PAM type: NRG; PAM sequence: TGG
ggtaaaactcttctagacac

SEQ ID NO: 33225 - DNA, 20 bp, Artificial Sequence
  Description of Artificial Sequence: Synthetic oligonucleotide
  Target: SCNA; (+) strand; PAM type: NRG; PAM sequence: AAG
actcttctagacactggctt

SEQ ID NO: 33226 - DNA, 20 bp, Artificial Sequence
  Description of Artificial Sequence: Synthetic oligonucleotide
  Target: SCNA; (+) strand; PAM type: NRG; PAM sequence: AAG
tctagacactggcttaagca

SEQ ID NO: 33227 - DNA, 20 bp, Artificial Sequence
  Description of Artificial Sequence: Synthetic oligonucleotide
  Target: SCNA; (+) strand; PAM type: NRG; PAM sequence: GAG
tagacactggcttaagcaaa

SEQ ID NO: 33228 - DNA, 20 bp, Artificial Sequence
  Description of Artificial Sequence: Synthetic oligonucleotide
  Target: SCNA; (+) strand; PAM type: NRG; PAM sequence: AAG
taagcaaagagttcatgacc

SEQ ID NO: 33229 - DNA, 20 bp, Artificial Sequence
  Description of Artificial Sequence: Synthetic oligonucleotide
  Target: SCNA; (+) strand; PAM type: NRG; PAM sequence: AAG
gttcatgaccaagaaaccaa

SEQ ID NO: 33230 - DNA, 20 bp, Artificial Sequence
  Description of Artificial Sequence: Synthetic oligonucleotide
  Target: SCNA; (+) strand; PAM type: NRG; PAM sequence: AAG
caaatgcaacaacaacaaaa

SEQ ID NO: 33231 - DNA, 20 bp, Artificial Sequence
  Description of Artificial Sequence: Synthetic oligonucleotide
  Target: SCNA; (+) strand; PAM type: NRG; PAM sequence: TAG
acaacaacaaaaaagataaa

SEQ ID NO: 33232 - DNA, 20 bp, Artificial Sequence
  Description of Artificial Sequence: Synthetic oligonucleotide
  Target: SCNA; (+) strand; PAM type: NRG; PAM sequence: TGG
caacaaaaaagataaataga

SEQ ID NO: 33233 - DNA, 20 bp, Artificial Sequence
  Description of Artificial Sequence: Synthetic oligonucleotide
  Target: SCNA; (+) strand; PAM type: NRG; PAM sequence: GGG
aacaaaaaagataaatagat

SEQ ID NO: 33234 - DNA, 20 bp, Artificial Sequence
  Description of Artificial Sequence: Synthetic oligonucleotide
  Target: SCNA; (+) strand; PAM type: NRG; PAM sequence: AAG
agatgggacctaaaactata

SEQ ID NO: 33235 - DNA, 20 bp, Artificial Sequence
  Description of Artificial Sequence: Synthetic oligonucleotide
  Target: SCNA; (+) strand; PAM type: NRG; PAM sequence: CAG
aaaactataaagcttctgca

SEQ ID NO: 33236 - DNA, 20 bp, Artificial Sequence
  Description of Artificial Sequence: Synthetic oligonucleotide
  Target: SCNA; (+) strand; PAM type: NRG; PAM sequence: AAG
ataaagcttctgcacagcaa

SEQ ID NO: 33237 - DNA, 20 bp, Artificial Sequence
  Description of Artificial Sequence: Synthetic oligonucleotide
  Target: SCNA; (+) strand; PAM type: NRG; PAM sequence: CAG
acagcaaaagaaataatcat

SEQ ID NO: 33238 - DNA, 20 bp, Artificial Sequence
  Description of Artificial Sequence: Synthetic oligonucleotide
  Target: SCNA; (+) strand; PAM type: NRG; PAM sequence: GAG
agcaaaagaaataatcatca

SEQ ID NO: 33239 - DNA, 20 bp, Artificial Sequence
  Description of Artificial Sequence: Synthetic oligonucleotide
  Target: SCNA; (+) strand; PAM type: NRG; PAM sequence: CAG
gaaataatcatcagagtaaa

SEQ ID NO: 33240 - DNA, 20 bp, Artificial Sequence
  Description of Artificial Sequence: Synthetic oligonucleotide
  Target: SCNA; (+) strand; PAM type: NRG; PAM sequence: CAG
cagagtaaacagacaaccca

SEQ ID NO: 33241 - DNA, 20 bp, Artificial Sequence
  Description of Artificial Sequence: Synthetic oligonucleotide
  Target: SCNA; (+) strand; PAM type: NRG; PAM sequence: TGG
taaacagacaacccacagaa

SEQ ID NO: 33242 - DNA, 20 bp, Artificial Sequence
  Description of Artificial Sequence: Synthetic oligonucleotide
  Target: SCNA; (+) strand; PAM type: NRG; PAM sequence: GGG
aaacagacaacccacagaat

SEQ ID NO: 33243 - DNA, 20 bp, Artificial Sequence
  Description of Artificial Sequence: Synthetic oligonucleotide
  Target: SCNA; (+) strand; PAM type: NRG; PAM sequence: GAG
acagacaacccacagaatgg

SEQ ID NO: 33244 - DNA, 20 bp, Artificial Sequence
  Description of Artificial Sequence: Synthetic oligonucleotide
  Target: SCNA; (+) strand; PAM type: NRG; PAM sequence: AAG
tgcaaactatccatctgaca

SEQ ID NO: 33245 - DNA, 20 bp, Artificial Sequence
  Description of Artificial Sequence: Synthetic oligonucleotide
  Target: SCNA; (+) strand; PAM type: NRG; PAM sequence: AGG
gcaaactatccatctgacaa

SEQ ID NO: 33246 - DNA, 20 bp, Artificial Sequence
  Description of Artificial Sequence: Synthetic oligonucleotide
  Target: SCNA; (+) strand; PAM type: NRG; PAM sequence: CAG
tctgacaaaggactaatatc

SEQ ID NO: 33247 - DNA, 20 bp, Artificial Sequence
  Description of Artificial Sequence: Synthetic oligonucleotide
  Target: SCNA; (+) strand; PAM type: NRG; PAM sequence: AAG
gactaatatccagaatctac

SEQ ID NO: 33248 - DNA, 20 bp, Artificial Sequence
  Description of Artificial Sequence: Synthetic oligonucleotide
  Target: SCNA; (+) strand; PAM type: NRG; PAM sequence: AGG
actaatatccagaatctaca

SEQ ID NO: 33249 - DNA, 20 bp, Artificial Sequence
  Description of Artificial Sequence: Synthetic oligonucleotide
  Target: SCNA; (+) strand; PAM type: NRG; PAM sequence: CAG
tacaaggaactcaaacaaat

SEQ ID NO: 33250 - DNA, 20 bp, Artificial Sequence
  Description of Artificial Sequence: Synthetic oligonucleotide
  Target: SCNA; (+) strand; PAM type: NRG; PAM sequence: AAG
aggaactcaaacaaatcagt

SEQ ID NO: 33251 - DNA, 20 bp, Artificial Sequence
  Description of Artificial Sequence: Synthetic oligonucleotide
  Target: SCNA; (+) strand; PAM type: NRG; PAM sequence: AAG
aaacaaataatcctatcaaa

SEQ ID NO: 33252 - DNA, 20 bp, Artificial Sequence
  Description of Artificial Sequence: Synthetic oligonucleotide
  Target: SCNA; (+) strand; PAM type: NRG; PAM sequence: TGG
caaataatcctatcaaaaag

SEQ ID NO: 33253 - DNA, 20 bp, Artificial Sequence
  Description of Artificial Sequence: Synthetic oligonucleotide
  Target: SCNA; (+) strand; PAM type: NRG; PAM sequence: GGG
aaataatcctatcaaaaagt

SEQ ID NO: 33254 - DNA, 20 bp, Artificial Sequence
  Description of Artificial Sequence: Synthetic oligonucleotide
  Target: SCNA; (+) strand; PAM type: NRG; PAM sequence: AAG
atcctatcaaaaagtgggct

SEQ ID NO: 33255 - DNA, 20 bp, Artificial Sequence
  Description of Artificial Sequence: Synthetic oligonucleotide
  Target: SCNA; (+) strand; PAM type: NRG; PAM sequence: AGG
tcctatcaaaaagtgggcta

SEQ ID NO: 33256 - DNA, 20 bp, Artificial Sequence
  Description of Artificial Sequence: Synthetic oligonucleotide
  Target: SCNA; (+) strand; PAM type: NRG; PAM sequence: TAG
aagtgggctaaggacatgaa

SEQ ID NO: 33257 - DNA, 20 bp, Artificial Sequence
  Description of Artificial Sequence: Synthetic oligonucleotide
  Target: SCNA; (+) strand; PAM type: NRG; PAM sequence: AAG
catgaatagacaattctcaa

SEQ ID NO: 33258 - DNA, 20 bp, Artificial Sequence
  Description of Artificial Sequence: Synthetic oligonucleotide
  Target: SCNA; (+) strand; PAM type: NRG; PAM sequence: AAG
gaatagacaattctcaaaag

SEQ ID NO: 33259 - DNA, 20 bp, Artificial Sequence
  Description of Artificial Sequence: Synthetic oligonucleotide
  Target: SCNA; (+) strand; PAM type: NRG; PAM sequence: TAG
agacaattctcaaaagaaga

SEQ ID NO: 33260 - DNA, 20 bp, Artificial Sequence
  Description of Artificial Sequence: Synthetic oligonucleotide
  Target: SCNA; (+) strand; PAM type: NRG; PAM sequence: CAG
ctcaaaagaagatagacaaa

SEQ ID NO: 33261 - DNA, 20 bp, Artificial Sequence
  Description of Artificial Sequence: Synthetic oligonucleotide
  Target: SCNA; (+) strand; PAM type: NRG; PAM sequence: CAG
tgctcaacatctttaatgac

SEQ ID NO: 33262 - DNA, 20 bp, Artificial Sequence
  Description of Artificial Sequence: Synthetic oligonucleotide
  Target: SCNA; (+) strand; PAM type: NRG; PAM sequence: AGG
gctcaacatctttaatgacc

SEQ ID NO: 33263 - DNA, 20 bp, Artificial Sequence
  Description of Artificial Sequence: Synthetic oligonucleotide
  Target: SCNA; (+) strand; PAM type: NRG; PAM sequence: GGG
ctcaacatctttaatgacca

SEQ ID NO: 33264 - DNA, 20 bp, Artificial Sequence
  Description of Artificial Sequence: Synthetic oligonucleotide
  Target: SCNA; (+) strand; PAM type: NRG; PAM sequence: AAG
tgataccaccttactcctgc

SEQ ID NO: 33265 - DNA, 20 bp, Artificial Sequence
  Description of Artificial Sequence: Synthetic oligonucleotide
  Target: SCNA; (+) strand; PAM type: NRG; PAM sequence: TGG
aaaaataaaaaaataaacgt

SEQ ID NO: 33266 - DNA, 20 bp, Artificial Sequence
  Description of Artificial Sequence: Synthetic oligonucleotide
  Target: SCNA; (+) strand; PAM type: NRG; PAM sequence: TGG
taaaaaaataaacgttggca

SEQ ID NO: 33267 - DNA, 20 bp, Artificial Sequence
  Description of Artificial Sequence: Synthetic oligonucleotide
  Target: SCNA; (+) strand; PAM type: NRG; PAM sequence: AAG
aaaaataaacgttggcatgg

SEQ ID NO: 33268 - DNA, 20 bp, Artificial Sequence
  Description of Artificial Sequence: Synthetic oligonucleotide
  Target: SCNA; (+) strand; PAM type: NRG; PAM sequence: TGG
aataaacgttggcatggaag

SEQ ID NO: 33269 - DNA, 20 bp, Artificial Sequence
  Description of Artificial Sequence: Synthetic oligonucleotide
  Target: SCNA; (+) strand; PAM type: NRG; PAM sequence: AAG
gttggcatggaagtggtaaa

SEQ ID NO: 33270 - DNA, 20 bp, Artificial Sequence
  Description of Artificial Sequence: Synthetic oligonucleotide
  Target: SCNA; (+) strand; PAM type: NRG; PAM sequence: AGG
ttggcatggaagtggtaaaa

SEQ ID NO: 33271 - DNA, 20 bp, Artificial Sequence
  Description of Artificial Sequence: Synthetic oligonucleotide
  Target: SCNA; (+) strand; PAM type: NRG; PAM sequence: GGG
tggcatggaagtggtaaaaa

SEQ ID NO: 33272 - DNA, 20 bp, Artificial Sequence
  Description of Artificial Sequence: Synthetic oligonucleotide
  Target: SCNA; (+) strand; PAM type: NRG; PAM sequence: TGG
ggaacatttttttacactgc

SEQ ID NO: 33273 - DNA, 20 bp, Artificial Sequence
  Description of Artificial Sequence: Synthetic oligonucleotide
  Target: SCNA; (+) strand; PAM type: NRG; PAM sequence: TAG
acatttttttacactgctgg

SEQ ID NO: 33274 - DNA, 20 bp, Artificial Sequence
  Description of Artificial Sequence: Synthetic oligonucleotide
  Target: SCNA; (+) strand; PAM type: NRG; PAM sequence: AGG
catttttttacactgctggt

SEQ ID NO: 33275 - DNA, 20 bp, Artificial Sequence
  Description of Artificial Sequence: Synthetic oligonucleotide
  Target: SCNA; (+) strand; PAM type: NRG; PAM sequence: TAG
ctgctggtaggaatgtaaac

SEQ ID NO: 33276 - DNA, 20 bp, Artificial Sequence
  Description of Artificial Sequence: Synthetic oligonucleotide
  Target: SCNA; (+) strand; PAM type: NRG; PAM sequence: TGG
gtaaactagtacaaccacca

SEQ ID NO: 33277 - DNA, 20 bp, Artificial Sequence
  Description of Artificial Sequence: Synthetic oligonucleotide
  Target: SCNA; (+) strand; PAM type: NRG; PAM sequence: AAG
ctagtacaaccaccatggaa

SEQ ID NO: 33278 - DNA, 20 bp, Artificial Sequence
  Description of Artificial Sequence: Synthetic oligonucleotide
  Target: SCNA; (+) strand; PAM type: NRG; PAM sequence: TGG
caaccaccatggaaaagtta

SEQ ID NO: 33279 - DNA, 20 bp, Artificial Sequence
  Description of Artificial Sequence: Synthetic oligonucleotide
  Target: SCNA; (+) strand; PAM type: NRG; PAM sequence: GAG
accaccatggaaaagttatg

SEQ ID NO: 33280 - DNA, 20 bp, Artificial Sequence
  Description of Artificial Sequence: Synthetic oligonucleotide
  Target: SCNA; (+) strand; PAM type: NRG; PAM sequence: AAG
aaagttatggagattcctta

SEQ ID NO: 33281 - DNA, 20 bp, Artificial Sequence
  Description of Artificial Sequence: Synthetic oligonucleotide
  Target: SCNA; (+) strand; PAM type: NRG; PAM sequence: AAG
gagattccttaaagaactaa

SEQ ID NO: 33282 - DNA, 20 bp, Artificial Sequence
  Description of Artificial Sequence: Synthetic oligonucleotide
  Target: SCNA; (+) strand; PAM type: NRG; PAM sequence: TAG
attccttaaagaactaaaag

SEQ ID NO: 33283 - DNA, 20 bp, Artificial Sequence
  Description of Artificial Sequence: Synthetic oligonucleotide
  Target: SCNA; (+) strand; PAM type: NRG; PAM sequence: CAG
agtagaacaatcatttgttc

SEQ ID NO: 33284 - DNA, 20 bp, Artificial Sequence
  Description of Artificial Sequence: Synthetic oligonucleotide
  Target: SCNA; (+) strand; PAM type: NRG; PAM sequence: TAG
tgttccagcgatcccactcc

SEQ ID NO: 33285 - DNA, 20 bp, Artificial Sequence
  Description of Artificial Sequence: Synthetic oligonucleotide
  Target: SCNA; (+) strand; PAM type: NRG; PAM sequence: AGG
gttccagcgatcccactcct

SEQ ID NO: 33286 - DNA, 20 bp, Artificial Sequence
  Description of Artificial Sequence: Synthetic oligonucleotide
  Target: SCNA; (+) strand; PAM type: NRG; PAM sequence: CAG
cccactcctaggtatctacc

SEQ ID NO: 33287 - DNA, 20 bp, Artificial Sequence
  Description of Artificial Sequence: Synthetic oligonucleotide
  Target: SCNA; (+) strand; PAM type: NRG; PAM sequence: GAG
cactcctaggtatctaccca

SEQ ID NO: 33288 - DNA, 20 bp, Artificial Sequence
  Description of Artificial Sequence: Synthetic oligonucleotide
  Target: SCNA; (+) strand; PAM type: NRG; PAM sequence: AGG
actcctaggtatctacccag

SEQ ID NO: 33289 - DNA, 20 bp, Artificial Sequence
  Description of Artificial Sequence: Synthetic oligonucleotide
  Target: SCNA; (+) strand; PAM type: NRG; PAM sequence: AAG
taggtatctacccagaggaa

SEQ ID NO: 33290 - DNA, 20 bp, Artificial Sequence
  Description of Artificial Sequence: Synthetic oligonucleotide
  Target: SCNA; (+) strand; PAM type: NRG; PAM sequence: AAG
gtatctacccagaggaaaag

SEQ ID NO: 33291 - DNA, 20 bp, Artificial Sequence
  Description of Artificial Sequence: Synthetic oligonucleotide
  Target: SCNA; (+) strand; PAM type: NRG; PAM sequence: AAG
aaagaagtcattatatgaaa

SEQ ID NO: 33292 - DNA, 20 bp, Artificial Sequence
  Description of Artificial Sequence: Synthetic oligonucleotide
  Target: SCNA; (+) strand; PAM type: NRG; PAM sequence: TAG
cacttgcacatgcatgttta

SEQ ID NO: 33293 - DNA, 20 bp, Artificial Sequence
  Description of Artificial Sequence: Synthetic oligonucleotide
  Target: SCNA; (+) strand; PAM type: NRG; PAM sequence: TGG
aattcacaattgcaaaaata

SEQ ID NO: 33294 - DNA, 20 bp, Artificial Sequence
  Description of Artificial Sequence: Synthetic oligonucleotide
  Target: SCNA; (+) strand; PAM type: NRG; PAM sequence: CAG
caattgcaaaaatatggaac

SEQ ID NO: 33295 - DNA, 20 bp, Artificial Sequence
  Description of Artificial Sequence: Synthetic oligonucleotide
  Target: SCNA; (+) strand; PAM type: NRG; PAM sequence: GAG
ctaaatacccatcaaccaat

SEQ ID NO: 33296 - DNA, 20 bp, Artificial Sequence
  Description of Artificial Sequence: Synthetic oligonucleotide
  Target: SCNA; (+) strand; PAM type: NRG; PAM sequence: TGG
aatacccatcaaccaatgag

SEQ ID NO: 33297 - DNA, 20 bp, Artificial Sequence
  Description of Artificial Sequence: Synthetic oligonucleotide
  Target: SCNA; (+) strand; PAM type: NRG; PAM sequence: AAG
catcaaccaatgagtggata

SEQ ID NO: 33298 - DNA, 20 bp, Artificial Sequence
  Description of Artificial Sequence: Synthetic oligonucleotide
  Target: SCNA; (+) strand; PAM type: NRG; PAM sequence: AAG
tatatttacatatatatata

SEQ ID NO: 33299 - DNA, 20 bp, Artificial Sequence
  Description of Artificial Sequence: Synthetic oligonucleotide
  Target: SCNA; (+) strand; PAM type: NRG; PAM sequence: TAG
ttacatatatatataaagca

SEQ ID NO: 33300 - DNA, 20 bp, Artificial Sequence
  Description of Artificial Sequence: Synthetic oligonucleotide
  Target: SCNA; (+) strand; PAM type: NRG; PAM sequence: AGG
tacatatatatataaagcat

SEQ ID NO: 33301 - DNA, 20 bp, Artificial Sequence
  Description of Artificial Sequence: Synthetic oligonucleotide
  Target: SCNA; (+) strand; PAM type: NRG; PAM sequence: GGG
acatatatatataaagcata

SEQ ID NO: 33302 - DNA, 20 bp, Artificial Sequence
  Description of Artificial Sequence: Synthetic oligonucleotide
  Target: SCNA; (+) strand; PAM type: NRG; PAM sequence: GGG
catatatatataaagcatag

SEQ ID NO: 33303 - DNA, 20 bp, Artificial Sequence
  Description of Artificial Sequence: Synthetic oligonucleotide
  Target: SCNA; (+) strand; PAM type: NRG; PAM sequence: GGG
atatatatataaagcatagg

SEQ ID NO: 33304 - DNA, 20 bp, Artificial Sequence
  Description of Artificial Sequence: Synthetic oligonucleotide
  Target: SCNA; (+) strand; PAM type: NRG; PAM sequence: GGG
tatatatataaagcataggg

SEQ ID NO: 33305 - DNA, 20 bp, Artificial Sequence
  Description of Artificial Sequence: Synthetic oligonucleotide
  Target: SCNA; (+) strand; PAM type: NRG; PAM sequence: TGG
aaagcataggggggtgtgtg

SEQ ID NO: 33306 - DNA, 20 bp, Artificial Sequence
  Description of Artificial Sequence: Synthetic oligonucleotide
  Target: SCNA; (+) strand; PAM type: NRG; PAM sequence: TGG
gggggtgtgtgtggatgcta

SEQ ID NO: 33307 - DNA, 20 bp, Artificial Sequence
  Description of Artificial Sequence: Synthetic oligonucleotide
  Target: SCNA; (+) strand; PAM type: NRG; PAM sequence: CAG
ggatgctatggaatactact

SEQ ID NO: 33308 - DNA, 20 bp, Artificial Sequence
  Description of Artificial Sequence: Synthetic oligonucleotide
  Target: SCNA; (+) strand; PAM type: NRG; PAM sequence: AAG
gaatactactcagccataaa

SEQ ID NO: 33309 - DNA, 20 bp, Artificial Sequence
  Description of Artificial Sequence: Synthetic oligonucleotide
  Target: SCNA; (+) strand; PAM type: NRG; PAM sequence: AGG
aatactactcagccataaaa

SEQ ID NO: 33310 - DNA, 20 bp, Artificial Sequence
  Description of Artificial Sequence: Synthetic oligonucleotide
  Target: SCNA; (+) strand; PAM type: NRG; PAM sequence: TGG
cataaaaaggaacaaaataa

SEQ ID NO: 33311 - DNA, 20 bp, Artificial Sequence
  Description of Artificial Sequence: Synthetic oligonucleotide
  Target: SCNA; (+) strand; PAM type: NRG; PAM sequence: TAG
gaacaaaataatggcatttg

SEQ ID NO: 33312 - DNA, 20 bp, Artificial Sequence
  Description of Artificial Sequence: Synthetic oligonucleotide
  Target: SCNA; (+) strand; PAM type: NRG; PAM sequence: TAG
taatggcatttgtagctacg

SEQ ID NO: 33313 - DNA, 20 bp, Artificial Sequence
  Description of Artificial Sequence: Synthetic oligonucleotide
  Target: SCNA; (+) strand; PAM type: NRG; PAM sequence: TAG
ggcatttgtagctacgtaga

SEQ ID NO: 33314 - DNA, 20 bp, Artificial Sequence
  Description of Artificial Sequence: Synthetic oligonucleotide
  Target: SCNA; (+) strand; PAM type: NRG; PAM sequence: GAG
catttgtagctacgtagata

SEQ ID NO: 33315 - DNA, 20 bp, Artificial Sequence
  Description of Artificial Sequence: Synthetic oligonucleotide
  Target: SCNA; (+) strand; PAM type: NRG; PAM sequence: TGG
tgtagctacgtagatagagt

SEQ ID NO: 33316 - DNA, 20 bp, Artificial Sequence
  Description of Artificial Sequence: Synthetic oligonucleotide
  Target: SCNA; (+) strand; PAM type: NRG; PAM sequence: GAG
tagctacgtagatagagttg

SEQ ID NO: 33317 - DNA, 20 bp, Artificial Sequence
  Description of Artificial Sequence: Synthetic oligonucleotide
  Target: SCNA; (+) strand; PAM type: NRG; PAM sequence: AAG
gagttggagaccattattct

SEQ ID NO: 33318 - DNA, 20 bp, Artificial Sequence
  Description of Artificial Sequence: Synthetic oligonucleotide
  Target: SCNA; (+) strand; PAM type: NRG; PAM sequence: AAG
ggagaccattattctaagtg

SEQ ID NO: 33319 - DNA, 20 bp, Artificial Sequence
  Description of Artificial Sequence: Synthetic oligonucleotide
  Target: SCNA; (+) strand; PAM type: NRG; PAM sequence: CAG
ttattctaagtgaagtaact

SEQ ID NO: 33320 - DNA, 20 bp, Artificial Sequence
  Description of Artificial Sequence: Synthetic oligonucleotide
  Target: SCNA; (+) strand; PAM type: NRG; PAM sequence: AGG
tattctaagtgaagtaactc

SEQ ID NO: 33321 - DNA, 20 bp, Artificial Sequence
  Description of Artificial Sequence: Synthetic oligonucleotide
  Target: SCNA; (+) strand; PAM type: NRG; PAM sequence: GAG
ttctaagtgaagtaactcag

SEQ ID NO: 33322 - DNA, 20 bp, Artificial Sequence
  Description of Artificial Sequence: Synthetic oligonucleotide
  Target: SCNA; (+) strand; PAM type: NRG; PAM sequence: TGG
taagtgaagtaactcaggag

SEQ ID NO: 33323 - DNA, 20 bp, Artificial Sequence
  Description of Artificial Sequence: Synthetic oligonucleotide
  Target: SCNA; (+) strand; PAM type: NRG; PAM sequence: AAG
tataactgccacctaaacta

SEQ ID NO: 33324 - DNA, 20 bp, Artificial Sequence
  Description of Artificial Sequence: Synthetic oligonucleotide
  Target: SCNA; (+) strand; PAM type: NRG; PAM sequence: AGG
ataactgccacctaaactaa

SEQ ID NO: 33325 - DNA, 20 bp, Artificial Sequence
  Description of Artificial Sequence: Synthetic oligonucleotide
  Target: SCNA; (+) strand; PAM type: NRG; PAM sequence: AAG
cacctaaactaaaggatgca

SEQ ID NO: 33326 - DNA, 20 bp, Artificial Sequence
  Description of Artificial Sequence: Synthetic oligonucleotide
  Target: SCNA; (+) strand; PAM type: NRG; PAM sequence: AGG
acctaaactaaaggatgcaa

SEQ ID NO: 33327 - DNA, 20 bp, Artificial Sequence
  Description of Artificial Sequence: Synthetic oligonucleotide
  Target: SCNA; (+) strand; PAM type: NRG; PAM sequence: AAG
actaaaggatgcaaaggcat

SEQ ID NO: 33328 - DNA, 20 bp, Artificial Sequence
  Description of Artificial Sequence: Synthetic oligonucleotide
  Target: SCNA; (+) strand; PAM type: NRG; PAM sequence: TGG
aaggcataagaatgatataa

SEQ ID NO: 33329 - DNA, 20 bp, Artificial Sequence
  Description of Artificial Sequence: Synthetic oligonucleotide
  Target: SCNA; (+) strand; PAM type: NRG; PAM sequence: TGG
aagaatgatataatggactc

SEQ ID NO: 33330 - DNA, 20 bp, Artificial Sequence
  Description of Artificial Sequence: Synthetic oligonucleotide
  Target: SCNA; (+) strand; PAM type: NRG; PAM sequence: GAG
gaatgatataatggactctg

SEQ ID NO: 33331 - DNA, 20 bp, Artificial Sequence
  Description of Artificial Sequence: Synthetic oligonucleotide
  Target: SCNA; (+) strand; PAM type: NRG; PAM sequence: GAG
ataatggactctggagactt

SEQ ID NO: 33332 - DNA, 20 bp, Artificial Sequence
  Description of Artificial Sequence: Synthetic oligonucleotide
  Target: SCNA; (+) strand; PAM type: NRG; PAM sequence: AGG
taatggactctggagacttg

SEQ ID NO: 33333 - DNA, 20 bp, Artificial Sequence
  Description of Artificial Sequence: Synthetic oligonucleotide
  Target: SCNA; (+) strand; PAM type: NRG; PAM sequence: GGG
aatggactctggagacttga

SEQ ID NO: 33334 - DNA, 20 bp, Artificial Sequence
  Description of Artificial Sequence: Synthetic oligonucleotide
  Target: SCNA; (+) strand; PAM type: NRG; PAM sequence: GGG
atggactctggagacttgag

SEQ ID NO: 33335 - DNA, 20 bp, Artificial Sequence
  Description of Artificial Sequence: Synthetic oligonucleotide
  Target: SCNA; (+) strand; PAM type: NRG; PAM sequence: AAG
gactctggagacttgagggg

SEQ ID NO: 33336 - DNA, 20 bp, Artificial Sequence
  Description of Artificial Sequence: Synthetic oligonucleotide
  Target: SCNA; (+) strand; PAM type: NRG; PAM sequence: AGG
actctggagacttgagggga

SEQ ID NO: 33337 - DNA, 20 bp, Artificial Sequence
  Description of Artificial Sequence: Synthetic oligonucleotide
  Target: SCNA; (+) strand; PAM type: NRG; PAM sequence: GGG
ctctggagacttgaggggaa

SEQ ID NO: 33338 - DNA, 20 bp, Artificial Sequence
  Description of Artificial Sequence: Synthetic oligonucleotide
  Target: SCNA; (+) strand; PAM type: NRG; PAM sequence: TGG
tggagacttgaggggaaggg

SEQ ID NO: 33339 - DNA, 20 bp, Artificial Sequence
  Description of Artificial Sequence: Synthetic oligonucleotide
  Target: SCNA; (+) strand; PAM type: NRG; PAM sequence: GGG
ggagacttgaggggaagggt

SEQ ID NO: 33340 - DNA, 20 bp, Artificial Sequence
  Description of Artificial Sequence: Synthetic oligonucleotide
  Target: SCNA; (+) strand; PAM type: NRG; PAM sequence: GAG
agacttgaggggaagggtgg

SEQ ID NO: 33341 - DNA, 20 bp, Artificial Sequence
  Description of Artificial Sequence: Synthetic oligonucleotide
  Target: SCNA; (+) strand; PAM type: NRG; PAM sequence: AGG
gacttgaggggaagggtggg

SEQ ID NO: 33342 - DNA, 20 bp, Artificial Sequence
  Description of Artificial Sequence: Synthetic oligonucleotide
  Target: SCNA; (+) strand; PAM type: NRG; PAM sequence: AAG
ttgaggggaagggtgggagg

SEQ ID NO: 33343 - DNA, 20 bp, Artificial Sequence
  Description of Artificial Sequence: Synthetic oligonucleotide
  Target: SCNA; (+) strand; PAM type: NRG; PAM sequence: AGG
tgaggggaagggtgggagga

SEQ ID NO: 33344 - DNA, 20 bp, Artificial Sequence
  Description of Artificial Sequence: Synthetic oligonucleotide
  Target: SCNA; (+) strand; PAM type: NRG; PAM sequence: GAG
gggaagggtgggaggaaggt

SEQ ID NO: 33345 - DNA, 20 bp, Artificial Sequence
  Description of Artificial Sequence: Synthetic oligonucleotide
  Target: SCNA; (+) strand; PAM type: NRG; PAM sequence: AGG
ggaagggtgggaggaaggtg

SEQ ID NO: 33346 - DNA, 20 bp, Artificial Sequence
  Description of Artificial Sequence: Synthetic oligonucleotide
  Target: SCNA; (+) strand; PAM type: NRG; PAM sequence: AAG
gggaggaaggtgaggaatga

SEQ ID NO: 33347 - DNA, 20 bp, Artificial Sequence
  Description of Artificial Sequence: Synthetic oligonucleotide
  Target: SCNA; (+) strand; PAM type: NRG; PAM sequence: TGG
aggaatgaaagactacacat

SEQ ID NO: 33348 - DNA, 20 bp, Artificial Sequence
  Description of Artificial Sequence: Synthetic oligonucleotide
  Target: SCNA; (+) strand; PAM type: NRG; PAM sequence: GGG
ggaatgaaagactacacatt

SEQ ID NO: 33349 - DNA, 20 bp, Artificial Sequence
  Description of Artificial Sequence: Synthetic oligonucleotide
  Target: SCNA; (+) strand; PAM type: NRG; PAM sequence: CAG
gaaagactacacattgggtg

SEQ ID NO: 33350 - DNA, 20 bp, Artificial Sequence
  Description of Artificial Sequence: Synthetic oligonucleotide
  Target: SCNA; (+) strand; PAM type: NRG; PAM sequence: CAG
tgggtgcagtgtatgctgct

SEQ ID NO: 33351 - DNA, 20 bp, Artificial Sequence
  Description of Artificial Sequence: Synthetic oligonucleotide
  Target: SCNA; (+) strand; PAM type: NRG; PAM sequence: AGG
gggtgcagtgtatgctgctc

SEQ ID NO: 33352 - DNA, 20 bp, Artificial Sequence
  Description of Artificial Sequence: Synthetic oligonucleotide
  Target: SCNA; (+) strand; PAM type: NRG; PAM sequence: GAG
gtgtatgctgctcaggttat

SEQ ID NO: 33353 - DNA, 20 bp, Artificial Sequence
  Description of Artificial Sequence: Synthetic oligonucleotide
  Target: SCNA; (+) strand; PAM type: NRG; PAM sequence: CAG
ttatgagtgtaccaaaatct

SEQ ID NO: 33354 - DNA, 20 bp, Artificial Sequence
  Description of Artificial Sequence: Synthetic oligonucleotide
  Target: SCNA; (+) strand; PAM type: NRG; PAM sequence: AAG
aaaaaccacctgctccccaa

SEQ ID NO: 33355 - DNA, 20 bp, Artificial Sequence
  Description of Artificial Sequence: Synthetic oligonucleotide
  Target: SCNA; (+) strand; PAM type: NRG; PAM sequence: AAG
ctattgaaataataataata

SEQ ID NO: 33356 - DNA, 20 bp, Artificial Sequence
  Description of Artificial Sequence: Synthetic oligonucleotide
  Target: SCNA; (+) strand; PAM type: NRG; PAM sequence: CAG
ataataataataaagttaat

SEQ ID NO: 33357 - DNA, 20 bp, Artificial Sequence
  Description of Artificial Sequence: Synthetic oligonucleotide
  Target: SCNA; (+) strand; PAM type: NRG; PAM sequence: TAG
ttatttgtcattaattaaat

SEQ ID NO: 33358 - DNA, 20 bp, Artificial Sequence
  Description of Artificial Sequence: Synthetic oligonucleotide
  Target: SCNA; (+) strand; PAM type: NRG; PAM sequence: TAG
tttgtcattaattaaattag

SEQ ID NO: 33359 - DNA, 20 bp, Artificial Sequence
  Description of Artificial Sequence: Synthetic oligonucleotide
  Target: SCNA; (+) strand; PAM type: NRG; PAM sequence: AAG
aaattagtagttacactatt

SEQ ID NO: 33360 - DNA, 20 bp, Artificial Sequence
  Description of Artificial Sequence: Synthetic oligonucleotide
  Target: SCNA; (+) strand; PAM type: NRG; PAM sequence: AAG
cctttatcaattaaattata

SEQ ID NO: 33361 - DNA, 20 bp, Artificial Sequence
  Description of Artificial Sequence: Synthetic oligonucleotide
  Target: SCNA; (+) strand; PAM type: NRG; PAM sequence: AAG
aattaaattataaagccctg

SEQ ID NO: 33362 - DNA, 20 bp, Artificial Sequence
  Description of Artificial Sequence: Synthetic oligonucleotide
  Target: SCNA; (+) strand; PAM type: NRG; PAM sequence: AGG
attaaattataaagccctga

SEQ ID NO: 33363 - DNA, 20 bp, Artificial Sequence
  Description of Artificial Sequence: Synthetic oligonucleotide
  Target: SCNA; (+) strand; PAM type: NRG; PAM sequence: GAG
ataaagccctgaaggcaact

SEQ ID NO: 33364 - DNA, 20 bp, Artificial Sequence
  Description of Artificial Sequence: Synthetic oligonucleotide
  Target: SCNA; (+) strand; PAM type: NRG; PAM sequence: TAG
aagccctgaaggcaactgag

SEQ ID NO: 33365 - DNA, 20 bp, Artificial Sequence
  Description of Artificial Sequence: Synthetic oligonucleotide
  Target: SCNA; (+) strand; PAM type: NRG; PAM sequence: GAG
gccctgaaggcaactgagta

SEQ ID NO: 33366 - DNA, 20 bp, Artificial Sequence
  Description of Artificial Sequence: Synthetic oligonucleotide
  Target: SCNA; (+) strand; PAM type: NRG; PAM sequence: AGG
ccctgaaggcaactgagtag

SEQ ID NO: 33367 - DNA, 20 bp, Artificial Sequence
  Description of Artificial Sequence: Synthetic oligonucleotide
  Target: SCNA; (+) strand; PAM type: NRG; PAM sequence: AAG
caactgagtagaggcccaat

SEQ ID NO: 33368 - DNA, 20 bp, Artificial Sequence
  Description of Artificial Sequence: Synthetic oligonucleotide
  Target: SCNA; (+) strand; PAM type: NRG; PAM sequence: TAG
ctgaattatacttcattata

SEQ ID NO: 33369 - DNA, 20 bp, Artificial Sequence
  Description of Artificial Sequence: Synthetic oligonucleotide
  Target: SCNA; (+) strand; PAM type: NRG; PAM sequence: AAG
attatacttcattatataga

SEQ ID NO: 33370 - DNA, 20 bp, Artificial Sequence
  Description of Artificial Sequence: Synthetic oligonucleotide
  Target: SCNA; (+) strand; PAM type: NRG; PAM sequence: TAG
tatatagaaagcctcatata

SEQ ID NO: 33371 - DNA, 20 bp, Artificial Sequence
  Description of Artificial Sequence: Synthetic oligonucleotide
  Target: SCNA; (+) strand; PAM type: NRG; PAM sequence: AGG
atatagaaagcctcatatat

SEQ ID NO: 33372 - DNA, 20 bp, Artificial Sequence
  Description of Artificial Sequence: Synthetic oligonucleotide
  Target: SCNA; (+) strand; PAM type: NRG; PAM sequence: GGG
tatagaaagcctcatatata

SEQ ID NO: 33373 - DNA, 20 bp, Artificial Sequence
  Description of Artificial Sequence: Synthetic oligonucleotide
  Target: SCNA; (+) strand; PAM type: NRG; PAM sequence: AAG
tatacccttacacaaaatat

SEQ ID NO: 33374 - DNA, 20 bp, Artificial Sequence
  Description of Artificial Sequence: Synthetic oligonucleotide
  Target: SCNA; (+) strand; PAM type: NRG; PAM sequence: TGG
cacttcatcgattaatcaac

SEQ ID NO: 33375 - DNA, 20 bp, Artificial Sequence
  Description of Artificial Sequence: Synthetic oligonucleotide
  Target: SCNA; (+) strand; PAM type: NRG; PAM sequence: AAG
aactggctgtactttgtaac

SEQ ID NO: 33376 - DNA, 20 bp, Artificial Sequence
  Description of Artificial Sequence: Synthetic oligonucleotide
  Target: SCNA; (+) strand; PAM type: NRG; PAM sequence: AGG
actggctgtactttgtaaca

SEQ ID NO: 33377 - DNA, 20 bp, Artificial Sequence
  Description of Artificial Sequence: Synthetic oligonucleotide
  Target: SCNA; (+) strand; PAM type: NRG; PAM sequence: CAG
tgcacaaataaaatatcttt

SEQ ID NO: 33378 - DNA, 20 bp, Artificial Sequence
  Description of Artificial Sequence: Synthetic oligonucleotide
  Target: SCNA; (+) strand; PAM type: NRG; PAM sequence: AGG
gcacaaataaaatatctttc

SEQ ID NO: 33379 - DNA, 20 bp, Artificial Sequence
  Description of Artificial Sequence: Synthetic oligonucleotide
  Target: SCNA; (+) strand; PAM type: NRG; PAM sequence: AAG
aataaaatatctttcaggaa

SEQ ID NO: 33380 - DNA, 20 bp, Artificial Sequence
  Description of Artificial Sequence: Synthetic oligonucleotide
  Target: SCNA; (+) strand; PAM type: NRG; PAM sequence: TGG
ttaatctgtgaaaatgcaac

SEQ ID NO: 33381 - DNA, 20 bp, Artificial Sequence
  Description of Artificial Sequence: Synthetic oligonucleotide
  Target: SCNA; (+) strand; PAM type: NRG; PAM sequence: AAG
atctgtgaaaatgcaactgg

SEQ ID NO: 33382 - DNA, 20 bp, Artificial Sequence
  Description of Artificial Sequence: Synthetic oligonucleotide
  Target: SCNA; (+) strand; PAM type: NRG; PAM sequence: TGG
aaatgcaactggaagttttg

SEQ ID NO: 33383 - DNA, 20 bp, Artificial Sequence
  Description of Artificial Sequence: Synthetic oligonucleotide
  Target: SCNA; (+) strand; PAM type: NRG; PAM sequence: TAG
ctggaagttttgtggcttcc

SEQ ID NO: 33384 - DNA, 20 bp, Artificial Sequence
  Description of Artificial Sequence: Synthetic oligonucleotide
  Target: SCNA; (+) strand; PAM type: NRG; PAM sequence: AAG
tcctagtttgaactccgccc

SEQ ID NO: 33385 - DNA, 20 bp, Artificial Sequence
  Description of Artificial Sequence: Synthetic oligonucleotide
  Target: SCNA; (+) strand; PAM type: NRG; PAM sequence: AAG
tagtttgaactccgcccaag

SEQ ID NO: 33386 - DNA, 20 bp, Artificial Sequence
  Description of Artificial Sequence: Synthetic oligonucleotide
  Target: SCNA; (+) strand; PAM type: NRG; PAM sequence: AGG
agtttgaactccgcccaaga

SEQ ID NO: 33387 - DNA, 20 bp, Artificial Sequence
  Description of Artificial Sequence: Synthetic oligonucleotide
  Target: SCNA; (+) strand; PAM type: NRG; PAM sequence: TAG
ccaagaaggcaaaaccttta

SEQ ID NO: 33388 - DNA, 20 bp, Artificial Sequence
  Description of Artificial Sequence: Synthetic oligonucleotide
  Target: SCNA; (+) strand; PAM type: NRG; PAM sequence: TAG
gcaaaacctttatagaccca

SEQ ID NO: 33389 - DNA, 20 bp, Artificial Sequence
  Description of Artificial Sequence: Synthetic oligonucleotide
  Target: SCNA; (+) strand; PAM type: NRG; PAM sequence: TAG
tagacccatagtttcccgtc

SEQ ID NO: 33390 - DNA, 20 bp, Artificial Sequence
  Description of Artificial Sequence: Synthetic oligonucleotide
  Target: SCNA; (+) strand; PAM type: NRG; PAM sequence: AGG
agacccatagtttcccgtct

SEQ ID NO: 33391 - DNA, 20 bp, Artificial Sequence
  Description of Artificial Sequence: Synthetic oligonucleotide
  Target: SCNA; (+) strand; PAM type: NRG; PAM sequence: AAG
ctgctctttcacacatctct

SEQ ID NO: 33392 - DNA, 20 bp, Artificial Sequence
  Description of Artificial Sequence: Synthetic oligonucleotide
  Target: SCNA; (+) strand; PAM type: NRG; PAM sequence: TAG
cacacatctctaagtctgac

SEQ ID NO: 33393 - DNA, 20 bp, Artificial Sequence
  Description of Artificial Sequence: Synthetic oligonucleotide
  Target: SCNA; (+) strand; PAM type: NRG; PAM sequence: AAG
gactagacacattgtaacat

SEQ ID NO: 33394 - DNA, 20 bp, Artificial Sequence
  Description of Artificial Sequence: Synthetic oligonucleotide
  Target: SCNA; (+) strand; PAM type: NRG; PAM sequence: TGG
acacattgtaacataagctg

SEQ ID NO: 33395 - DNA, 20 bp, Artificial Sequence
  Description of Artificial Sequence: Synthetic oligonucleotide
  Target: SCNA; (+) strand; PAM type: NRG; PAM sequence: CAG
cataagctgtggtcacatga

SEQ ID NO: 33396 - DNA, 20 bp, Artificial Sequence
  Description of Artificial Sequence: Synthetic oligonucleotide
  Target: SCNA; (+) strand; PAM type: NRG; PAM sequence: AGG
ataagctgtggtcacatgac

SEQ ID NO: 33397 - DNA, 20 bp, Artificial Sequence
  Description of Artificial Sequence: Synthetic oligonucleotide
  Target: SCNA; (+) strand; PAM type: NRG; PAM sequence: TAG
agctgtggtcacatgacagg

SEQ ID NO: 33398 - DNA, 20 bp, Artificial Sequence
  Description of Artificial Sequence: Synthetic oligonucleotide
  Target: SCNA; (+) strand; PAM type: NRG; PAM sequence: AGG
gctgtggtcacatgacaggt

SEQ ID NO: 33399 - DNA, 20 bp, Artificial Sequence
  Description of Artificial Sequence: Synthetic oligonucleotide
  Target: SCNA; (+) strand; PAM type: NRG; PAM sequence: CAG
cacatgacaggtaggtgtct

SEQ ID NO: 33400 - DNA, 20 bp, Artificial Sequence
  Description of Artificial Sequence: Synthetic oligonucleotide
  Target: SCNA; (+) strand; PAM type: NRG; PAM sequence: CAG
acaggtaggtgtctcagtaa

SEQ ID NO: 33401 - DNA, 20 bp, Artificial Sequence
  Description of Artificial Sequence: Synthetic oligonucleotide
  Target: SCNA; (+) strand; PAM type: NRG; PAM sequence: AGG
caggtaggtgtctcagtaac

SEQ ID NO: 33402 - DNA, 20 bp, Artificial Sequence
  Description of Artificial Sequence: Synthetic oligonucleotide
  Target: SCNA; (+) strand; PAM type: NRG; PAM sequence: CAG
gtctcagtaacaggcaacac

SEQ ID NO: 33403 - DNA, 20 bp, Artificial Sequence
  Description of Artificial Sequence: Synthetic oligonucleotide
  Target: SCNA; (+) strand; PAM type: NRG; PAM sequence: TGG
gtaacaggcaacaccagtca

SEQ ID NO: 33404 - DNA, 20 bp, Artificial Sequence
  Description of Artificial Sequence: Synthetic oligonucleotide
  Target: SCNA; (+) strand; PAM type: NRG; PAM sequence: AAG
agtcatggaaaaacaaaact

SEQ ID NO: 33405 - DNA, 20 bp, Artificial Sequence
  Description of Artificial Sequence: Synthetic oligonucleotide
  Target: SCNA; (+) strand; PAM type: NRG; PAM sequence: GAG
acaaaactaagtgtccaaat

SEQ ID NO: 33406 - DNA, 20 bp, Artificial Sequence
  Description of Artificial Sequence: Synthetic oligonucleotide
  Target: SCNA; (+) strand; PAM type: NRG; PAM sequence: CAG
actaagtgtccaaatgagtg

SEQ ID NO: 33407 - DNA, 20 bp, Artificial Sequence
  Description of Artificial Sequence: Synthetic oligonucleotide
  Target: SCNA; (+) strand; PAM type: NRG; PAM sequence: CAG
tgagtgcagaatcctgattg

SEQ ID NO: 33408 - DNA, 20 bp, Artificial Sequence
  Description of Artificial Sequence: Synthetic oligonucleotide
  Target: SCNA; (+) strand; PAM type: NRG; PAM sequence: AAG
gctcacatttactcttaaac

SEQ ID NO: 33409 - DNA, 20 bp, Artificial Sequence
  Description of Artificial Sequence: Synthetic oligonucleotide
  Target: SCNA; (+) strand; PAM type: NRG; PAM sequence: GAG
tcacatttactcttaaacaa

SEQ ID NO: 33410 - DNA, 20 bp, Artificial Sequence
  Description of Artificial Sequence: Synthetic oligonucleotide
  Target: SCNA; (+) strand; PAM type: NRG; PAM sequence: AGG
cacatttactcttaaacaag

SEQ ID NO: 33411 - DNA, 20 bp, Artificial Sequence
  Description of Artificial Sequence: Synthetic oligonucleotide
  Target: SCNA; (+) strand; PAM type: NRG; PAM sequence: CAG
aggccctcttcttatattct

SEQ ID NO: 33412 - DNA, 20 bp, Artificial Sequence
  Description of Artificial Sequence: Synthetic oligonucleotide
  Target: SCNA; (+) strand; PAM type: NRG; PAM sequence: AGG
ggccctcttcttatattctc

SEQ ID NO: 33413 - DNA, 20 bp, Artificial Sequence
  Description of Artificial Sequence: Synthetic oligonucleotide
  Target: SCNA; (+) strand; PAM type: NRG; PAM sequence: AAG
ctcttcttatattctcaggt

SEQ ID NO: 33414 - DNA, 20 bp, Artificial Sequence
  Description of Artificial Sequence: Synthetic oligonucleotide
  Target: SCNA; (+) strand; PAM type: NRG; PAM sequence: AAG
caggtaagtgactctgtaat

SEQ ID NO: 33415 - DNA, 20 bp, Artificial Sequence
  Description of Artificial Sequence: Synthetic oligonucleotide
  Target: SCNA; (+) strand; PAM type: NRG; PAM sequence: GAG
ggtaagtgactctgtaataa

SEQ ID NO: 33416 - DNA, 20 bp, Artificial Sequence
  Description of Artificial Sequence: Synthetic oligonucleotide
  Target: SCNA; (+) strand; PAM type: NRG; PAM sequence: AGG
gtaagtgactctgtaataag

SEQ ID NO: 33417 - DNA, 20 bp, Artificial Sequence
  Description of Artificial Sequence: Synthetic oligonucleotide
  Target: SCNA; (+) strand; PAM type: NRG; PAM sequence: TAG
tctgtaataagaggattgtg

SEQ ID NO: 33418 - DNA, 20 bp, Artificial Sequence
  Description of Artificial Sequence: Synthetic oligonucleotide
  Target: SCNA; (+) strand; PAM type: NRG; PAM sequence: CAG
attgtgtagcatttacctaa

SEQ ID NO: 33419 - DNA, 20 bp, Artificial Sequence
  Description of Artificial Sequence: Synthetic oligonucleotide
  Target: SCNA; (+) strand; PAM type: NRG; PAM sequence: TAG
tttacctaacagctttactt

SEQ ID NO: 33420 - DNA, 20 bp, Artificial Sequence
  Description of Artificial Sequence: Synthetic oligonucleotide
  Target: SCNA; (+) strand; PAM type: NRG; PAM sequence: AGG
ttacctaacagctttacttt

SEQ ID NO: 33421 - DNA, 20 bp, Artificial Sequence
  Description of Artificial Sequence: Synthetic oligonucleotide
  Target: SCNA; (+) strand; PAM type: NRG; PAM sequence: TAG
ttaggactgtatactgtcct

SEQ ID NO: 33422 - DNA, 20 bp, Artificial Sequence
  Description of Artificial Sequence: Synthetic oligonucleotide
  Target: SCNA; (+) strand; PAM type: NRG; PAM sequence: AAG
tttatatttcatttctaaat

SEQ ID NO: 33423 - DNA, 20 bp, Artificial Sequence
  Description of Artificial Sequence: Synthetic oligonucleotide
  Target: SCNA; (+) strand; PAM type: NRG; PAM sequence: AAG
tttatataacataattctca

SEQ ID NO: 33424 - DNA, 20 bp, Artificial Sequence
  Description of Artificial Sequence: Synthetic oligonucleotide
  Target: SCNA; (+) strand; PAM type: NRG; PAM sequence: TAG
atataacataattctcaaag

SEQ ID NO: 33425 - DNA, 20 bp, Artificial Sequence
  Description of Artificial Sequence: Synthetic oligonucleotide
  Target: SCNA; (+) strand; PAM type: NRG; PAM sequence: TAG
aacataattctcaaagtaga

SEQ ID NO: 33426 - DNA, 20 bp, Artificial Sequence
  Description of Artificial Sequence: Synthetic oligonucleotide
  Target: SCNA; (+) strand; PAM type: NRG; PAM sequence: GAG
cataattctcaaagtagata

SEQ ID NO: 33427 - DNA, 20 bp, Artificial Sequence
  Description of Artificial Sequence: Synthetic oligonucleotide
  Target: SCNA; (+) strand; PAM type: NRG; PAM sequence: TAG
gccaaataactgacttctgc

SEQ ID NO: 33428 - DNA, 20 bp, Artificial Sequence
  Description of Artificial Sequence: Synthetic oligonucleotide
  Target: SCNA; (+) strand; PAM type: NRG; PAM sequence: CAG
acttctgctagttttttttc

SEQ ID NO: 33429 - DNA, 20 bp, Artificial Sequence
  Description of Artificial Sequence: Synthetic oligonucleotide
  Target: SCNA; (+) strand; PAM type: NRG; PAM sequence: TGG
atatttgtcttttatgtaca

SEQ ID NO: 33430 - DNA, 20 bp, Artificial Sequence
  Description of Artificial Sequence: Synthetic oligonucleotide
  Target: SCNA; (+) strand; PAM type: NRG; PAM sequence: CAG
ttgtcttttatgtacatggc

SEQ ID NO: 33431 - DNA, 20 bp, Artificial Sequence
  Description of Artificial Sequence: Synthetic oligonucleotide
  Target: SCNA; (+) strand; PAM type: NRG; PAM sequence: TAG
gtacatggccagaaaccact

SEQ ID NO: 33432 - DNA, 20 bp, Artificial Sequence
  Description of Artificial Sequence: Synthetic oligonucleotide
  Target: SCNA; (+) strand; PAM type: NRG; PAM sequence: AAG
cttagaacttgcataaaaac

SEQ ID NO: 33433 - DNA, 20 bp, Artificial Sequence
  Description of Artificial Sequence: Synthetic oligonucleotide
  Target: SCNA; (+) strand; PAM type: NRG; PAM sequence: AAG
aacttgcataaaaacaagtt

SEQ ID NO: 33434 - DNA, 20 bp, Artificial Sequence
  Description of Artificial Sequence: Synthetic oligonucleotide
  Target: SCNA; (+) strand; PAM type: NRG; PAM sequence: AAG
ttgcataaaaacaagttaag

SEQ ID NO: 33435 - DNA, 20 bp, Artificial Sequence
  Description of Artificial Sequence: Synthetic oligonucleotide
  Target: SCNA; (+) strand; PAM type: NRG; PAM sequence: CAG
caagttaagaagcaaaatgt

SEQ ID NO: 33436 - DNA, 20 bp, Artificial Sequence
  Description of Artificial Sequence: Synthetic oligonucleotide
  Target: SCNA; (+) strand; PAM type: NRG; PAM sequence: TAG
ttaagaagcaaaatgtcagt

SEQ ID NO: 33437 - DNA, 20 bp, Artificial Sequence
  Description of Artificial Sequence: Synthetic oligonucleotide
  Target: SCNA; (+) strand; PAM type: NRG; PAM sequence: CAG
gttagttcctttctctatcc

SEQ ID NO: 33438 - DNA, 20 bp, Artificial Sequence
  Description of Artificial Sequence: Synthetic oligonucleotide
  Target: SCNA; (+) strand; PAM type: NRG; PAM sequence: GAG
tagttcctttctctatccca

SEQ ID NO: 33439 - DNA, 20 bp, Artificial Sequence
  Description of Artificial Sequence: Synthetic oligonucleotide
  Target: SCNA; (+) strand; PAM type: NRG; PAM sequence: TAG
cccagagcgcactgtttcat

SEQ ID NO: 33440 - DNA, 20 bp, Artificial Sequence
  Description of Artificial Sequence: Synthetic oligonucleotide
  Target: SCNA; (+) strand; PAM type: NRG; PAM sequence: AGG
ccagagcgcactgtttcatt

SEQ ID NO: 33441 - DNA, 20 bp, Artificial Sequence
  Description of Artificial Sequence: Synthetic oligonucleotide
  Target: SCNA; (+) strand; PAM type: NRG; PAM sequence: TAG
tttcaataaaaataataatg

SEQ ID NO: 33442 - DNA, 20 bp, Artificial Sequence
  Description of Artificial Sequence: Synthetic oligonucleotide
  Target: SCNA; (+) strand; PAM type: NRG; PAM sequence: AAG
caataaaaataataatgtag

SEQ ID NO: 33443 - DNA, 20 bp, Artificial Sequence
  Description of Artificial Sequence: Synthetic oligonucleotide
  Target: SCNA; (+) strand; PAM type: NRG; PAM sequence: AGG
aataaaaataataatgtaga

SEQ ID NO: 33444 - DNA, 20 bp, Artificial Sequence
  Description of Artificial Sequence: Synthetic oligonucleotide
  Target: SCNA; (+) strand; PAM type: NRG; PAM sequence: CAG
tgtagaaggtgtgattttta

SEQ ID NO: 33445 - DNA, 20 bp, Artificial Sequence
  Description of Artificial Sequence: Synthetic oligonucleotide
  Target: SCNA; (+) strand; PAM type: NRG; PAM sequence: TAG
agttttcatgtcttgatata

SEQ ID NO: 33446 - DNA, 20 bp, Artificial Sequence
  Description of Artificial Sequence: Synthetic oligonucleotide
  Target: SCNA; (+) strand; PAM type: NRG; PAM sequence: GAG
tcttgatatatagtgaaatt

SEQ ID NO: 33447 - DNA, 20 bp, Artificial Sequence
  Description of Artificial Sequence: Synthetic oligonucleotide
  Target: SCNA; (+) strand; PAM type: NRG; PAM sequence: GAG
atagtgaaattgagcaatgt

SEQ ID NO: 33448 - DNA, 20 bp, Artificial Sequence
  Description of Artificial Sequence: Synthetic oligonucleotide
  Target: SCNA; (+) strand; PAM type: NRG; PAM sequence: TAG
atgtgagaataaatgtgatc

SEQ ID NO: 33449 - DNA, 20 bp, Artificial Sequence
  Description of Artificial Sequence: Synthetic oligonucleotide
  Target: SCNA; (+) strand; PAM type: NRG; PAM sequence: AAG
agaataaatgtgatctagaa

SEQ ID NO: 33450 - DNA, 20 bp, Artificial Sequence
  Description of Artificial Sequence: Synthetic oligonucleotide
  Target: SCNA; (+) strand; PAM type: NRG; PAM sequence: GAG
agaaaaatatctttcgattt

SEQ ID NO: 33451 - DNA, 20 bp, Artificial Sequence
  Description of Artificial Sequence: Synthetic oligonucleotide
  Target: SCNA; (+) strand; PAM type: NRG; PAM sequence: CAG
aatatctttcgatttgagaa

SEQ ID NO: 33452 - DNA, 20 bp, Artificial Sequence
  Description of Artificial Sequence: Synthetic oligonucleotide
  Target: SCNA; (+) strand; PAM type: NRG; PAM sequence: TGG
tctttcgatttgagaacaga

SEQ ID NO: 33453 - DNA, 20 bp, Artificial Sequence
  Description of Artificial Sequence: Synthetic oligonucleotide
  Target: SCNA; (+) strand; PAM type: NRG; PAM sequence: CAG
atggttaataataatcatga

SEQ ID NO: 33454 - DNA, 20 bp, Artificial Sequence
  Description of Artificial Sequence: Synthetic oligonucleotide
  Target: SCNA; (+) strand; PAM type: NRG; PAM sequence: AAG
aataatcatgacagtgattc

SEQ ID NO: 33455 - DNA, 20 bp, Artificial Sequence
  Description of Artificial Sequence: Synthetic oligonucleotide
  Target: SCNA; (+) strand; PAM type: NRG; PAM sequence: AGG
ataatcatgacagtgattca

SEQ ID NO: 33456 - DNA, 20 bp, Artificial Sequence
  Description of Artificial Sequence: Synthetic oligonucleotide
  Target: SCNA; (+) strand; PAM type: NRG; PAM sequence: AAG
aaacttgttttaatttttaa

SEQ ID NO: 33457 - DNA, 20 bp, Artificial Sequence
  Description of Artificial Sequence: Synthetic oligonucleotide
  Target: SCNA; (+) strand; PAM type: NRG; PAM sequence: TAG
taactgaaaactccctgctt

SEQ ID NO: 33458 - DNA, 20 bp, Artificial Sequence
  Description of Artificial Sequence: Synthetic oligonucleotide
  Target: SCNA; (+) strand; PAM type: NRG; PAM sequence: AAG
tagctgaaccaacacttaac

SEQ ID NO: 33459 - DNA, 20 bp, Artificial Sequence
  Description of Artificial Sequence: Synthetic oligonucleotide
  Target: SCNA; (+) strand; PAM type: NRG; PAM sequence: AAG
cacttaacaagtgtttttta

SEQ ID NO: 33460 - DNA, 20 bp, Artificial Sequence
  Description of Artificial Sequence: Synthetic oligonucleotide
  Target: SCNA; (+) strand; PAM type: NRG; PAM sequence: CAG
taaagatgtcttgatacctt

SEQ ID NO: 33461 - DNA, 20 bp, Artificial Sequence
  Description of Artificial Sequence: Synthetic oligonucleotide
  Target: SCNA; (+) strand; PAM type: NRG; PAM sequence: GAG
aagatgtcttgataccttca

SEQ ID NO: 33462 - DNA, 20 bp, Artificial Sequence
  Description of Artificial Sequence: Synthetic oligonucleotide
  Target: SCNA; (+) strand; PAM type: NRG; PAM sequence: AAG
atgtcttgataccttcagag

SEQ ID NO: 33463 - DNA, 20 bp, Artificial Sequence
  Description of Artificial Sequence: Synthetic oligonucleotide
  Target: SCNA; (+) strand; PAM type: NRG; PAM sequence: TAG
cagagaagttctcctgctgc

SEQ ID NO: 33464 - DNA, 20 bp, Artificial Sequence
  Description of Artificial Sequence: Synthetic oligonucleotide
  Target: SCNA; (+) strand; PAM type: NRG; PAM sequence: TGG
ctcctgctgctagttttctc

SEQ ID NO: 33465 - DNA, 20 bp, Artificial Sequence
  Description of Artificial Sequence: Synthetic oligonucleotide
  Target: SCNA; (+) strand; PAM type: NRG; PAM sequence: GAG
cctgctgctagttttctctg

SEQ ID NO: 33466 - DNA, 20 bp, Artificial Sequence
  Description of Artificial Sequence: Synthetic oligonucleotide
  Target: SCNA; (+) strand; PAM type: NRG; PAM sequence: CAG
gctagttttctctggagcaa

SEQ ID NO: 33467 - DNA, 20 bp, Artificial Sequence
  Description of Artificial Sequence: Synthetic oligonucleotide
  Target: SCNA; (+) strand; PAM type: NRG; PAM sequence: TGG
agttttctctggagcaacag

SEQ ID NO: 33468 - DNA, 20 bp, Artificial Sequence
  Description of Artificial Sequence: Synthetic oligonucleotide
  Target: SCNA; (+) strand; PAM type: NRG; PAM sequence: GGG
gttttctctggagcaacagt

SEQ ID NO: 33469 - DNA, 20 bp, Artificial Sequence
  Description of Artificial Sequence: Synthetic oligonucleotide
  Target: SCNA; (+) strand; PAM type: NRG; PAM sequence: CAG
ggagcaacagtgggaaaccc

SEQ ID NO: 33470 - DNA, 20 bp, Artificial Sequence
  Description of Artificial Sequence: Synthetic oligonucleotide
  Target: SCNA; (+) strand; PAM type: NRG; PAM sequence: AGG
gagcaacagtgggaaacccc

SEQ ID NO: 33471 - DNA, 20 bp, Artificial Sequence
  Description of Artificial Sequence: Synthetic oligonucleotide
  Target: SCNA; (+) strand; PAM type: NRG; PAM sequence: TGG
caacagtgggaaaccccagg

SEQ ID NO: 33472 - DNA, 20 bp, Artificial Sequence
  Description of Artificial Sequence: Synthetic oligonucleotide
  Target: SCNA; (+) strand; PAM type: NRG; PAM sequence: AAG
ggttactcctttgtgaatat

SEQ ID NO: 33473 - DNA, 20 bp, Artificial Sequence
  Description of Artificial Sequence: Synthetic oligonucleotide
  Target: SCNA; (+) strand; PAM type: NRG; PAM sequence: TGG
tataagcatccacatgaaat

SEQ ID NO: 33474 - DNA, 20 bp, Artificial Sequence
  Description of Artificial Sequence: Synthetic oligonucleotide
  Target: SCNA; (+) strand; PAM type: NRG; PAM sequence: CGG
attggttgtttccgcatgca

SEQ ID NO: 33475 - DNA, 20 bp, Artificial Sequence
  Description of Artificial Sequence: Synthetic oligonucleotide
  Target: SCNA; (+) strand; PAM type: NRG; PAM sequence: GGG
ttggttgtttccgcatgcac

SEQ ID NO: 33476 - DNA, 20 bp, Artificial Sequence
  Description of Artificial Sequence: Synthetic oligonucleotide
  Target: SCNA; (+) strand; PAM type: NRG; PAM sequence: AAG
ttttgttatactaatgtctg

SEQ ID NO: 33477 - DNA, 20 bp, Artificial Sequence
  Description of Artificial Sequence: Synthetic oligonucleotide
  Target: SCNA; (+) strand; PAM type: NRG; PAM sequence: TAG
gtctgaagtacaaattgttg

SEQ ID NO: 33478 - DNA, 20 bp, Artificial Sequence
  Description of Artificial Sequence: Synthetic oligonucleotide
  Target: SCNA; (+) strand; PAM type: NRG; PAM sequence: TAG
tgtagaatcattttattcca

SEQ ID NO: 33479 - DNA, 20 bp, Artificial Sequence
  Description of Artificial Sequence: Synthetic oligonucleotide
  Target: SCNA; (+) strand; PAM type: NRG; PAM sequence: AAG
attttattccatagacttcc

SEQ ID NO: 33480 - DNA, 20 bp, Artificial Sequence
  Description of Artificial Sequence: Synthetic oligonucleotide
  Target: SCNA; (+) strand; PAM type: NRG; PAM sequence: TAG
ctaatactaacttccatcaa

SEQ ID NO: 33481 - DNA, 20 bp, Artificial Sequence
  Description of Artificial Sequence: Synthetic oligonucleotide
  Target: SCNA; (+) strand; PAM type: NRG; PAM sequence: AAG
tattatttatcttctatcca

SEQ ID NO: 33482 - DNA, 20 bp, Artificial Sequence
  Description of Artificial Sequence: Synthetic oligonucleotide
  Target: SCNA; (+) strand; PAM type: NRG; PAM sequence: AGG
attatttatcttctatccaa

SEQ ID NO: 33483 - DNA, 20 bp, Artificial Sequence
  Description of Artificial Sequence: Synthetic oligonucleotide
  Target: SCNA; (+) strand; PAM type: NRG; PAM sequence: AAG
ttctatccaaaggctacctg

SEQ ID NO: 33484 - DNA, 20 bp, Artificial Sequence
  Description of Artificial Sequence: Synthetic oligonucleotide
  Target: SCNA; (+) strand; PAM type: NRG; PAM sequence: AGG
tctatccaaaggctacctga

SEQ ID NO: 33485 - DNA, 20 bp, Artificial Sequence
  Description of Artificial Sequence: Synthetic oligonucleotide
  Target: SCNA; (+) strand; PAM type: NRG; PAM sequence: TGG
acctgaaggtcctatcactt

SEQ ID NO: 33486 - DNA, 20 bp, Artificial Sequence
  Description of Artificial Sequence: Synthetic oligonucleotide
  Target: SCNA; (+) strand; PAM type: NRG; PAM sequence: GAG
aggtcctatcactttggtgt

SEQ ID NO: 33487 - DNA, 20 bp, Artificial Sequence
  Description of Artificial Sequence: Synthetic oligonucleotide
  Target: SCNA; (+) strand; PAM type: NRG; PAM sequence: AAG
tcctatcactttggtgtgag

SEQ ID NO: 33488 - DNA, 20 bp, Artificial Sequence
  Description of Artificial Sequence: Synthetic oligonucleotide
  Target: SCNA; (+) strand; PAM type: NRG; PAM sequence: CGG
cactttggtgtgagaagaat

SEQ ID NO: 33489 - DNA, 20 bp, Artificial Sequence
  Description of Artificial Sequence: Synthetic oligonucleotide
  Target: SCNA; (+) strand; PAM type: NRG; PAM sequence: GGG
actttggtgtgagaagaatc

SEQ ID NO: 33490 - DNA, 20 bp, Artificial Sequence
  Description of Artificial Sequence: Synthetic oligonucleotide
  Target: SCNA; (+) strand; PAM type: NRG; PAM sequence: AAG
tggtgtgagaagaatcgggt

SEQ ID NO: 33491 - DNA, 20 bp, Artificial Sequence
  Description of Artificial Sequence: Synthetic oligonucleotide
  Target: SCNA; (+) strand; PAM type: NRG; PAM sequence: AAG
gaagaatcgggtaagacaaa

SEQ ID NO: 33492 - DNA, 20 bp, Artificial Sequence
  Description of Artificial Sequence: Synthetic oligonucleotide
  Target: SCNA; (+) strand; PAM type: NRG; PAM sequence: TAG
aatcgggtaagacaaaaagt

SEQ ID NO: 33493 - DNA, 20 bp, Artificial Sequence
  Description of Artificial Sequence: Synthetic oligonucleotide
  Target: SCNA; (+) strand; PAM type: NRG; PAM sequence: AGG
atcgggtaagacaaaaagtt

SEQ ID NO: 33494 - DNA, 20 bp, Artificial Sequence
  Description of Artificial Sequence: Synthetic oligonucleotide
  Target: SCNA; (+) strand; PAM type: NRG; PAM sequence: CAG
acaaaaagttaggcttgcac

SEQ ID NO: 33495 - DNA, 20 bp, Artificial Sequence
  Description of Artificial Sequence: Synthetic oligonucleotide
  Target: SCNA; (+) strand; PAM type: NRG; PAM sequence: TAG
aggcttgcaccagttatcaa

SEQ ID NO: 33496 - DNA, 20 bp, Artificial Sequence
  Description of Artificial Sequence: Synthetic oligonucleotide
  Target: SCNA; (+) strand; PAM type: NRG; PAM sequence: AAG
ccagttatcaatagaatatt

SEQ ID NO: 33497 - DNA, 20 bp, Artificial Sequence
  Description of Artificial Sequence: Synthetic oligonucleotide
  Target: SCNA; (+) strand; PAM type: NRG; PAM sequence: AAG
ttatcaatagaatattaaga

SEQ ID NO: 33498 - DNA, 20 bp, Artificial Sequence
  Description of Artificial Sequence: Synthetic oligonucleotide
  Target: SCNA; (+) strand; PAM type: NRG; PAM sequence: AAG
gaatattaagaaagattttt

SEQ ID NO: 33499 - DNA, 20 bp, Artificial Sequence
  Description of Artificial Sequence: Synthetic oligonucleotide
  Target: SCNA; (+) strand; PAM type: NRG; PAM sequence: AAG
tattaagaaagatttttaag

SEQ ID NO: 33500 - DNA, 20 bp, Artificial Sequence
  Description of Artificial Sequence: Synthetic oligonucleotide
  Target: SCNA; (+) strand; PAM type: NRG; PAM sequence: AGG
attaagaaagatttttaaga

SEQ ID NO: 33501 - DNA, 20 bp, Artificial Sequence
  Description of Artificial Sequence: Synthetic oligonucleotide
  Target: SCNA; (+) strand; PAM type: NRG; PAM sequence: GAG
taagaaagatttttaagaag

SEQ ID NO: 33502 - DNA, 20 bp, Artificial Sequence
  Description of Artificial Sequence: Synthetic oligonucleotide
  Target: SCNA; (+) strand; PAM type: NRG; PAM sequence: TAG
aagatttttaagaaggagaa

SEQ ID NO: 33503 - DNA, 20 bp, Artificial Sequence
  Description of Artificial Sequence: Synthetic oligonucleotide
  Target: SCNA; (+) strand; PAM type: NRG; PAM sequence: CAG
atttttaagaaggagaatag

SEQ ID NO: 33504 - DNA, 20 bp, Artificial Sequence
  Description of Artificial Sequence: Synthetic oligonucleotide
  Target: SCNA; (+) strand; PAM type: NRG; PAM sequence: CAG
aagaaggagaatagcagttc

SEQ ID NO: 33505 - DNA, 20 bp, Artificial Sequence
  Description of Artificial Sequence: Synthetic oligonucleotide
  Target: SCNA; (+) strand; PAM type: NRG; PAM sequence: AGG
agaaggagaatagcagttcc

SEQ ID NO: 33506 - DNA, 20 bp, Artificial Sequence
  Description of Artificial Sequence: Synthetic oligonucleotide
  Target: SCNA; (+) strand; PAM type: NRG; PAM sequence: CAG
acatatttgatacttttcac

SEQ ID NO: 33507 - DNA, 20 bp, Artificial Sequence
  Description of Artificial Sequence: Synthetic oligonucleotide
  Target: SCNA; (+) strand; PAM type: NRG; PAM sequence: TAG
tgatacttttcaccagaaaa

SEQ ID NO: 33508 - DNA, 20 bp, Artificial Sequence
  Description of Artificial Sequence: Synthetic oligonucleotide
  Target: SCNA; (+) strand; PAM type: NRG; PAM sequence: AGG
gatacttttcaccagaaaat

SEQ ID NO: 33509 - DNA, 20 bp, Artificial Sequence
  Description of Artificial Sequence: Synthetic oligonucleotide
  Target: SCNA; (+) strand; PAM type: NRG; PAM sequence: AAG
cttttcaccagaaaatagga

SEQ ID NO: 33510 - DNA, 20 bp, Artificial Sequence
  Description of Artificial Sequence: Synthetic oligonucleotide
  Target: SCNA; (+) strand; PAM type: NRG; PAM sequence: CGG
tcaccagaaaataggaaaga

SEQ ID NO: 33511 - DNA, 20 bp, Artificial Sequence
  Description of Artificial Sequence: Synthetic oligonucleotide
  Target: SCNA; (+) strand; PAM type: NRG; PAM sequence: TGG
agaaaataggaaagacggat

SEQ ID NO: 33512 - DNA, 20 bp, Artificial Sequence
  Description of Artificial Sequence: Synthetic oligonucleotide
  Target: SCNA; (+) strand; PAM type: NRG; PAM sequence: GGG
gaaaataggaaagacggatt

SEQ ID NO: 33513 - DNA, 20 bp, Artificial Sequence
  Description of Artificial Sequence: Synthetic oligonucleotide
  Target: SCNA; (+) strand; PAM type: NRG; PAM sequence: AAG
gggtctgcaatgtattttca

SEQ ID NO: 33514 - DNA, 20 bp, Artificial Sequence
  Description of Artificial Sequence: Synthetic oligonucleotide
  Target: SCNA; (+) strand; PAM type: NRG; PAM sequence: CAG
ctctatttaatgtattttta

SEQ ID NO: 33515 - DNA, 20 bp, Artificial Sequence
  Description of Artificial Sequence: Synthetic oligonucleotide
  Target: SCNA; (+) strand; PAM type: NRG; PAM sequence: GAG
ctatttaatgtatttttaca

SEQ ID NO: 33516 - DNA, 20 bp, Artificial Sequence
  Description of Artificial Sequence: Synthetic oligonucleotide
  Target: SCNA; (+) strand; PAM type: NRG; PAM sequence: GAG
tatttttacagagatgactt

SEQ ID NO: 33517 - DNA, 20 bp, Artificial Sequence
  Description of Artificial Sequence: Synthetic oligonucleotide
  Target: SCNA; (+) strand; PAM type: NRG; PAM sequence: CGG
cttgatgtatatatttttga

SEQ ID NO: 33518 - DNA, 20 bp, Artificial Sequence
  Description of Artificial Sequence: Synthetic oligonucleotide
  Target: SCNA; (+) strand; PAM type: NRG; PAM sequence: CAG
tgtatatatttttgacggat

SEQ ID NO: 33519 - DNA, 20 bp, Artificial Sequence
  Description of Artificial Sequence: Synthetic oligonucleotide
  Target: SCNA; (+) strand; PAM type: NRG; PAM sequence: GAG
cggatcagacactcttactt

SEQ ID NO: 33520 - DNA, 20 bp, Artificial Sequence
  Description of Artificial Sequence: Synthetic oligonucleotide
  Target: SCNA; (+) strand; PAM type: NRG; PAM sequence: TAG
tcagacactcttacttgagc

SEQ ID NO: 33521 - DNA, 20 bp, Artificial Sequence
  Description of Artificial Sequence: Synthetic oligonucleotide
  Target: SCNA; (+) strand; PAM type: NRG; PAM sequence: AGG
cagacactcttacttgagct

SEQ ID NO: 33522 - DNA, 20 bp, Artificial Sequence
  Description of Artificial Sequence: Synthetic oligonucleotide
  Target: SCNA; (+) strand; PAM type: NRG; PAM sequence: TAG
gctatgtgctattgtttctg

SEQ ID NO: 33523 - DNA, 20 bp, Artificial Sequence
  Description of Artificial Sequence: Synthetic oligonucleotide
  Target: SCNA; (+) strand; PAM type: NRG; PAM sequence: TGG
tgtttctgtagccaaatgaa

SEQ ID NO: 33524 - DNA, 20 bp, Artificial Sequence
  Description of Artificial Sequence: Synthetic oligonucleotide
  Target: SCNA; (+) strand; PAM type: NRG; PAM sequence: GGG
gtttctgtagccaaatgaat

SEQ ID NO: 33525 - DNA, 20 bp, Artificial Sequence
  Description of Artificial Sequence: Synthetic oligonucleotide
  Target: SCNA; (+) strand; PAM type: NRG; PAM sequence: TGG
tagccaaatgaatgggccat

SEQ ID NO: 33526 - DNA, 20 bp, Artificial Sequence
  Description of Artificial Sequence: Synthetic oligonucleotide
  Target: SCNA; (+) strand; PAM type: NRG; PAM sequence: AAG
tgaatgggccattggcaatc

SEQ ID NO: 33527 - DNA, 20 bp, Artificial Sequence
  Description of Artificial Sequence: Synthetic oligonucleotide
  Target: SCNA; (+) strand; PAM type: NRG; PAM sequence: TAG
tttgcttttacacccgattt

SEQ ID NO: 33528 - DNA, 20 bp, Artificial Sequence
  Description of Artificial Sequence: Synthetic oligonucleotide
  Target: SCNA; (+) strand; PAM type: NRG; PAM sequence: CAG
ccgattttagcattaatcta

SEQ ID NO: 33529 - DNA, 20 bp, Artificial Sequence
  Description of Artificial Sequence: Synthetic oligonucleotide
  Target: SCNA; (+) strand; PAM type: NRG; PAM sequence: CGG
ttagcattaatctacagaca

SEQ ID NO: 33530 - DNA, 20 bp, Artificial Sequence
  Description of Artificial Sequence: Synthetic oligonucleotide
  Target: SCNA; (+) strand; PAM type: NRG; PAM sequence: TAG
ctacagacacggcttttcaa

SEQ ID NO: 33531 - DNA, 20 bp, Artificial Sequence
  Description of Artificial Sequence: Synthetic oligonucleotide
  Target: SCNA; (+) strand; PAM type: NRG; PAM sequence: TAG
cagacacggcttttcaatag

SEQ ID NO: 33532 - DNA, 20 bp, Artificial Sequence
  Description of Artificial Sequence: Synthetic oligonucleotide
  Target: SCNA; (+) strand; PAM type: NRG; PAM sequence: AAG
acggcttttcaatagtagaa

SEQ ID NO: 33533 - DNA, 20 bp, Artificial Sequence
  Description of Artificial Sequence: Synthetic oligonucleotide
  Target: SCNA; (+) strand; PAM type: NRG; PAM sequence: TAG
agaaaagatatctcccattt

SEQ ID NO: 33534 - DNA, 20 bp, Artificial Sequence
  Description of Artificial Sequence: Synthetic oligonucleotide
  Target: SCNA; (+) strand; PAM type: NRG; PAM sequence: AAG
tcccattttagtccaaattt

SEQ ID NO: 33535 - DNA, 20 bp, Artificial Sequence
  Description of Artificial Sequence: Synthetic oligonucleotide
  Target: SCNA; (+) strand; PAM type: NRG; PAM sequence: TAG
ttttagtccaaatttaagta

SEQ ID NO: 33536 - DNA, 20 bp, Artificial Sequence
  Description of Artificial Sequence: Synthetic oligonucleotide
  Target: SCNA; (+) strand; PAM type: NRG; PAM sequence: AAG
tccaaatttaagtatagtta

SEQ ID NO: 33537 - DNA, 20 bp, Artificial Sequence
  Description of Artificial Sequence: Synthetic oligonucleotide
  Target: SCNA; (+) strand; PAM type: NRG; PAM sequence: TGG
gtatagttaaagctacattt

SEQ ID NO: 33538 - DNA, 20 bp, Artificial Sequence
  Description of Artificial Sequence: Synthetic oligonucleotide
  Target: SCNA; (+) strand; PAM type: NRG; PAM sequence: GGG
tatagttaaagctacatttt

SEQ ID NO: 33539 - DNA, 20 bp, Artificial Sequence
  Description of Artificial Sequence: Synthetic oligonucleotide
  Target: SCNA; (+) strand; PAM type: NRG; PAM sequence: TGG
atcatttttttgttcacttg

SEQ ID NO: 33540 - DNA, 20 bp, Artificial Sequence
  Description of Artificial Sequence: Synthetic oligonucleotide
  Target: SCNA; (+) strand; PAM type: NRG; PAM sequence: GGG
tcatttttttgttcacttgt

SEQ ID NO: 33541 - DNA, 20 bp, Artificial Sequence
  Description of Artificial Sequence: Synthetic oligonucleotide
  Target: SCNA; (+) strand; PAM type: NRG; PAM sequence: AAG
ttgttcacttgtgggatgaa

SEQ ID NO: 33542 - DNA, 20 bp, Artificial Sequence
  Description of Artificial Sequence: Synthetic oligonucleotide
  Target: SCNA; (+) strand; PAM type: NRG; PAM sequence: TAG
ttcacttgtgggatgaaaag

SEQ ID NO: 33543 - DNA, 20 bp, Artificial Sequence
  Description of Artificial Sequence: Synthetic oligonucleotide
  Target: SCNA; (+) strand; PAM type: NRG; PAM sequence: AGG
tcacttgtgggatgaaaagt

SEQ ID NO: 33544 - DNA, 20 bp, Artificial Sequence
  Description of Artificial Sequence: Synthetic oligonucleotide
  Target: SCNA; (+) strand; PAM type: NRG; PAM sequence: CAG
ggatgaaaagtaggattaaa

SEQ ID NO: 33545 - DNA, 20 bp, Artificial Sequence
  Description of Artificial Sequence: Synthetic oligonucleotide
  Target: SCNA; (+) strand; PAM type: NRG; PAM sequence: AAG
attttaaaatatttcttttg

SEQ ID NO: 33546 - DNA, 20 bp, Artificial Sequence
  Description of Artificial Sequence: Synthetic oligonucleotide
  Target: SCNA; (+) strand; PAM type: NRG; PAM sequence: AAG
tatttgccattaaatcttaa

SEQ ID NO: 33547 - DNA, 20 bp, Artificial Sequence
  Description of Artificial Sequence: Synthetic oligonucleotide
  Target: SCNA; (+) strand; PAM type: NRG; PAM sequence: TGG
ttaaaagtatgacaactaaa

SEQ ID NO: 33548 - DNA, 20 bp, Artificial Sequence
  Description of Artificial Sequence: Synthetic oligonucleotide
  Target: SCNA; (+) strand; PAM type: NRG; PAM sequence: AAG
atgacaactaaatggatgct

SEQ ID NO: 33549 - DNA, 20 bp, Artificial Sequence
  Description of Artificial Sequence: Synthetic oligonucleotide
  Target: SCNA; (+) strand; PAM type: NRG; PAM sequence: TGG
agacaattgtgtttcaactg

SEQ ID NO: 33550 - DNA, 20 bp, Artificial Sequence
  Description of Artificial Sequence: Synthetic oligonucleotide
  Target: SCNA; (+) strand; PAM type: NRG; PAM sequence: GGG
gacaattgtgtttcaactgt

SEQ ID NO: 33551 - DNA, 20 bp, Artificial Sequence
  Description of Artificial Sequence: Synthetic oligonucleotide
  Target: SCNA; (+) strand; PAM type: NRG; PAM sequence: GAG
gtgggcttataaactctatt

SEQ ID NO: 33552 - DNA, 20 bp, Artificial Sequence
  Description of Artificial Sequence: Synthetic oligonucleotide
  Target: SCNA; (+) strand; PAM type: NRG; PAM sequence: GAG
agaaactcatttatgatcat

SEQ ID NO: 33553 - DNA, 20 bp, Artificial Sequence
  Description of Artificial Sequence: Synthetic oligonucleotide
  Target: SCNA; (+) strand; PAM type: NRG; PAM sequence: CAG
ttatgatcatgagttttttc

SEQ ID NO: 33554 - DNA, 20 bp, Artificial Sequence
  Description of Artificial Sequence: Synthetic oligonucleotide
  Target: SCNA; (+) strand; PAM type: NRG; PAM sequence: AGG
tatgatcatgagttttttcc

SEQ ID NO: 33555 - DNA, 20 bp, Artificial Sequence
  Description of Artificial Sequence: Synthetic oligonucleotide
  Target: SCNA; (+) strand; PAM type: NRG; PAM sequence: TGG
atcatgagttttttccagga

SEQ ID NO: 33556 - DNA, 20 bp, Artificial Sequence
  Description of Artificial Sequence: Synthetic oligonucleotide
  Target: SCNA; (+) strand; PAM type: NRG; PAM sequence: AAG
ttttccaggatggacatata

SEQ ID NO: 33557 - DNA, 20 bp, Artificial Sequence
  Description of Artificial Sequence: Synthetic oligonucleotide
  Target: SCNA; (+) strand; PAM type: NRG; PAM sequence: TGG
ccaggatggacatataaaga

SEQ ID NO: 33558 - DNA, 20 bp, Artificial Sequence
  Description of Artificial Sequence: Synthetic oligonucleotide
  Target: SCNA; (+) strand; PAM type: NRG; PAM sequence: TGG
aagatggatttttaaaacac

SEQ ID NO: 33559 - DNA, 20 bp, Artificial Sequence
  Description of Artificial Sequence: Synthetic oligonucleotide
  Target: SCNA; (+) strand; PAM type: NRG; PAM sequence: TGG
ggatttttaaaacactggcc

SEQ ID NO: 33560 - DNA, 20 bp, Artificial Sequence
  Description of Artificial Sequence: Synthetic oligonucleotide
  Target: SCNA; (+) strand; PAM type: NRG; PAM sequence: GAG
atttttaaaacactggcctg

SEQ ID NO: 33561 - DNA, 20 bp, Artificial Sequence
  Description of Artificial Sequence: Synthetic oligonucleotide
  Target: SCNA; (+) strand; PAM type: NRG; PAM sequence: TAG
taaaacactggcctggagaa

SEQ ID NO: 33562 - DNA, 20 bp, Artificial Sequence
  Description of Artificial Sequence: Synthetic oligonucleotide
  Target: SCNA; (+) strand; PAM type: NRG; PAM sequence: AGG
aaaacactggcctggagaat

SEQ ID NO: 33563 - DNA, 20 bp, Artificial Sequence
  Description of Artificial Sequence: Synthetic oligonucleotide
  Target: SCNA; (+) strand; PAM type: NRG; PAM sequence: GGG
aaacactggcctggagaata

SEQ ID NO: 33564 - DNA, 20 bp, Artificial Sequence
  Description of Artificial Sequence: Synthetic oligonucleotide
  Target: SCNA; (+) strand; PAM type: NRG; PAM sequence: GAG
acactggcctggagaatagg

SEQ ID NO: 33565 - DNA, 20 bp, Artificial Sequence
  Description of Artificial Sequence: Synthetic oligonucleotide
  Target: SCNA; (+) strand; PAM type: NRG; PAM sequence: GAG
actggcctggagaataggga

SEQ ID NO: 33566 - DNA, 20 bp, Artificial Sequence
  Description of Artificial Sequence: Synthetic oligonucleotide
  Target: SCNA; (+) strand; PAM type: NRG; PAM sequence: AAG
ggcctggagaatagggagag

SEQ ID NO: 33567 - DNA, 20 bp, Artificial Sequence
  Description of Artificial Sequence: Synthetic oligonucleotide
  Target: SCNA; (+) strand; PAM type: NRG; PAM sequence: GAG
cctggagaatagggagagaa

SEQ ID NO: 33568 - DNA, 20 bp, Artificial Sequence
  Description of Artificial Sequence: Synthetic oligonucleotide
  Target: SCNA; (+) strand; PAM type: NRG; PAM sequence: AGG
ctggagaatagggagagaag

SEQ ID NO: 33569 - DNA, 20 bp, Artificial Sequence
  Description of Artificial Sequence: Synthetic oligonucleotide
  Target: SCNA; (+) strand; PAM type: NRG; PAM sequence: AAG
ggagagaagaggtaataaaa

SEQ ID NO: 33570 - DNA, 20 bp, Artificial Sequence
  Description of Artificial Sequence: Synthetic oligonucleotide
  Target: SCNA; (+) strand; PAM type: NRG; PAM sequence: GAG
agtatttatattacttatat

SEQ ID NO: 33571 - DNA, 20 bp, Artificial Sequence
  Description of Artificial Sequence: Synthetic oligonucleotide
  Target: SCNA; (+) strand; PAM type: NRG; PAM sequence: AAG
tctatatttaaaacatttta

SEQ ID NO: 33572 - DNA, 20 bp, Artificial Sequence
  Description of Artificial Sequence: Synthetic oligonucleotide
  Target: SCNA; (+) strand; PAM type: NRG; PAM sequence: CAG
ctgtactataatacaatata

SEQ ID NO: 33573 - DNA, 20 bp, Artificial Sequence
  Description of Artificial Sequence: Synthetic oligonucleotide
  Target: SCNA; (+) strand; PAM type: NRG; PAM sequence: TAG
taatacaatatacagtatta

SEQ ID NO: 33574 - DNA, 20 bp, Artificial Sequence
  Description of Artificial Sequence: Synthetic oligonucleotide
  Target: SCNA; (+) strand; PAM type: NRG; PAM sequence: TGG
atatacagtattatagttta

SEQ ID NO: 33575 - DNA, 20 bp, Artificial Sequence
  Description of Artificial Sequence: Synthetic oligonucleotide
  Target: SCNA; (+) strand; PAM type: NRG; PAM sequence: CGG
agtttatggtctgtgattta

SEQ ID NO: 33576 - DNA, 20 bp, Artificial Sequence
  Description of Artificial Sequence: Synthetic oligonucleotide
  Target: SCNA; (+) strand; PAM type: NRG; PAM sequence: TGG
gtgatttacggtaattactg

SEQ ID NO: 33577 - DNA, 20 bp, Artificial Sequence
  Description of Artificial Sequence: Synthetic oligonucleotide
  Target: SCNA; (+) strand; PAM type: NRG; PAM sequence: GGG
tgatttacggtaattactgt

SEQ ID NO: 33578 - DNA, 20 bp, Artificial Sequence
  Description of Artificial Sequence: Synthetic oligonucleotide
  Target: SCNA; (+) strand; PAM type: NRG; PAM sequence: AAG
tttttctgaattaattttat

SEQ ID NO: 33579 - DNA, 20 bp, Artificial Sequence
  Description of Artificial Sequence: Synthetic oligonucleotide
  Target: SCNA; (+) strand; PAM type: NRG; PAM sequence: AAG
aattaattttataagtgaac

SEQ ID NO: 33580 - DNA, 20 bp, Artificial Sequence
  Description of Artificial Sequence: Synthetic oligonucleotide
  Target: SCNA; (+) strand; PAM type: NRG; PAM sequence: AAG
attttataagtgaacaagca

SEQ ID NO: 33581 - DNA, 20 bp, Artificial Sequence
  Description of Artificial Sequence: Synthetic oligonucleotide
  Target: SCNA; (+) strand; PAM type: NRG; PAM sequence: AAG
agtgaacaagcaaagtgacc

SEQ ID NO: 33582 - DNA, 20 bp, Artificial Sequence
  Description of Artificial Sequence: Synthetic oligonucleotide
  Target: SCNA; (+) strand; PAM type: NRG; PAM sequence: GAG
tgaacaagcaaagtgaccaa

SEQ ID NO: 33583 - DNA, 20 bp, Artificial Sequence
  Description of Artificial Sequence: Synthetic oligonucleotide
  Target: SCNA; (+) strand; PAM type: NRG; PAM sequence: CAG
caagagaatgatctatgatc

SEQ ID NO: 33584 - DNA, 20 bp, Artificial Sequence
  Description of Artificial Sequence: Synthetic oligonucleotide
  Target: SCNA; (+) strand; PAM type: NRG; PAM sequence: AAG
tttcaatgataaaaaacctg

SEQ ID NO: 33585 - DNA, 20 bp, Artificial Sequence
  Description of Artificial Sequence: Synthetic oligonucleotide
  Target: SCNA; (+) strand; PAM type: NRG; PAM sequence: AAG
aaaaaacctgaagtacaaca

SEQ ID NO: 33586 - DNA, 20 bp, Artificial Sequence
  Description of Artificial Sequence: Synthetic oligonucleotide
  Target: SCNA; (+) strand; PAM type: NRG; PAM sequence: AAG
aaacctgaagtacaacaaag

SEQ ID NO: 33587 - DNA, 20 bp, Artificial Sequence
  Description of Artificial Sequence: Synthetic oligonucleotide
  Target: SCNA; (+) strand; PAM type: NRG; PAM sequence: CAG
ctgaagtacaacaaagaagt

SEQ ID NO: 33588 - DNA, 20 bp, Artificial Sequence
  Description of Artificial Sequence: Synthetic oligonucleotide
  Target: SCNA; (+) strand; PAM type: NRG; PAM sequence: GAG
gaagtacaacaaagaagtca

SEQ ID NO: 33589 - DNA, 20 bp, Artificial Sequence
  Description of Artificial Sequence: Synthetic oligonucleotide
  Target: SCNA; (+) strand; PAM type: NRG; PAM sequence: AGG
aagtacaacaaagaagtcag

SEQ ID NO: 33590 - DNA, 20 bp, Artificial Sequence
  Description of Artificial Sequence: Synthetic oligonucleotide
  Target: SCNA; (+) strand; PAM type: NRG; PAM sequence: CAG
tacaacaaagaagtcagagg

SEQ ID NO: 33591 - DNA, 20 bp, Artificial Sequence
  Description of Artificial Sequence: Synthetic oligonucleotide
  Target: SCNA; (+) strand; PAM type: NRG; PAM sequence: AGG
acaacaaagaagtcagaggc

SEQ ID NO: 33592 - DNA, 20 bp, Artificial Sequence
  Description of Artificial Sequence: Synthetic oligonucleotide
  Target: SCNA; (+) strand; PAM type: NRG; PAM sequence: GGG
caacaaagaagtcagaggca

SEQ ID NO: 33593 - DNA, 20 bp, Artificial Sequence
  Description of Artificial Sequence: Synthetic oligonucleotide
  Target: SCNA; (+) strand; PAM type: NRG; PAM sequence: TAG
aaagaagtcagaggcagggc

SEQ ID NO: 33594 - DNA, 20 bp, Artificial Sequence
  Description of Artificial Sequence: Synthetic oligonucleotide
  Target: SCNA; (+) strand; PAM type: NRG; PAM sequence: TGG
agaggcagggctagacaaaa

SEQ ID NO: 33595 - DNA, 20 bp, Artificial Sequence
  Description of Artificial Sequence: Synthetic oligonucleotide
  Target: SCNA; (+) strand; PAM type: NRG; PAM sequence: AAG
aaaatggaactaaatatact

SEQ ID NO: 33596 - DNA, 20 bp, Artificial Sequence
  Description of Artificial Sequence: Synthetic oligonucleotide
  Target: SCNA; (+) strand; PAM type: NRG; PAM sequence: AAG
atggaactaaatatactaag

SEQ ID NO: 33597 - DNA, 20 bp, Artificial Sequence
  Description of Artificial Sequence: Synthetic oligonucleotide
  Target: SCNA; (+) strand; PAM type: NRG; PAM sequence: AGG
tggaactaaatatactaaga

SEQ ID NO: 33598 - DNA, 20 bp, Artificial Sequence
  Description of Artificial Sequence: Synthetic oligonucleotide
  Target: SCNA; (+) strand; PAM type: NRG; PAM sequence: CAG
ctaaatatactaagaaggtg

SEQ ID NO: 33599 - DNA, 20 bp, Artificial Sequence
  Description of Artificial Sequence: Synthetic oligonucleotide
  Target: SCNA; (+) strand; PAM type: NRG; PAM sequence: AAG
atactaagaaggtgcagaaa

SEQ ID NO: 33600 - DNA, 20 bp, Artificial Sequence
  Description of Artificial Sequence: Synthetic oligonucleotide
  Target: SCNA; (+) strand; PAM type: NRG; PAM sequence: AAG
ctaagaaggtgcagaaaaag

SEQ ID NO: 33601 - DNA, 20 bp, Artificial Sequence
  Description of Artificial Sequence: Synthetic oligonucleotide
  Target: SCNA; (+) strand; PAM type: NRG; PAM sequence: GAG
aagaaggtgcagaaaaagaa

SEQ ID NO: 33602 - DNA, 20 bp, Artificial Sequence
  Description of Artificial Sequence: Synthetic oligonucleotide
  Target: SCNA; (+) strand; PAM type: NRG; PAM sequence: AAG
aaggtgcagaaaaagaagag

SEQ ID NO: 33603 - DNA, 20 bp, Artificial Sequence
  Description of Artificial Sequence: Synthetic oligonucleotide
  Target: SCNA; (+) strand; PAM type: NRG; PAM sequence: GAG
ggtgcagaaaaagaagagaa

SEQ ID NO: 33604 - DNA, 20 bp, Artificial Sequence
  Description of Artificial Sequence: Synthetic oligonucleotide
  Target: SCNA; (+) strand; PAM type: NRG; PAM sequence: TGG
aagaagagaagagtatgttg

SEQ ID NO: 33605 - DNA, 20 bp, Artificial Sequence
  Description of Artificial Sequence: Synthetic oligonucleotide
  Target: SCNA; (+) strand; PAM type: NRG; PAM sequence: TGG
cttaaccccatatttcccca

SEQ ID NO: 33606 - DNA, 20 bp, Artificial Sequence
  Description of Artificial Sequence: Synthetic oligonucleotide
  Target: SCNA; (+) strand; PAM type: NRG; PAM sequence: CAG
aaccccatatttccccatgg

SEQ ID NO: 33607 - DNA, 20 bp, Artificial Sequence
  Description of Artificial Sequence: Synthetic oligonucleotide
  Target: SCNA; (+) strand; PAM type: NRG; PAM sequence: AAG
cccatatttccccatggcag

SEQ ID NO: 33608 - DNA, 20 bp, Artificial Sequence
  Description of Artificial Sequence: Synthetic oligonucleotide
  Target: SCNA; (+) strand; PAM type: NRG; PAM sequence: AGG
ccatatttccccatggcaga

SEQ ID NO: 33609 - DNA, 20 bp, Artificial Sequence
  Description of Artificial Sequence: Synthetic oligonucleotide
  Target: SCNA; (+) strand; PAM type: NRG; PAM sequence: CAG
atttccccatggcagaagga

SEQ ID NO: 33610 - DNA, 20 bp, Artificial Sequence
  Description of Artificial Sequence: Synthetic oligonucleotide
  Target: SCNA; (+) strand; PAM type: NRG; PAM sequence: GAG
gaaggacagaaactaaatct

SEQ ID NO: 33611 - DNA, 20 bp, Artificial Sequence
  Description of Artificial Sequence: Synthetic oligonucleotide
  Target: SCNA; (+) strand; PAM type: NRG; PAM sequence: AGG
aaggacagaaactaaatctg

SEQ ID NO: 33612 - DNA, 20 bp, Artificial Sequence
  Description of Artificial Sequence: Synthetic oligonucleotide
  Target: SCNA; (+) strand; PAM type: NRG; PAM sequence: GGG
aggacagaaactaaatctga

SEQ ID NO: 33613 - DNA, 20 bp, Artificial Sequence
  Description of Artificial Sequence: Synthetic oligonucleotide
  Target: SCNA; (+) strand; PAM type: NRG; PAM sequence: CAG
taaatctgagggcaactcaa

SEQ ID NO: 33614 - DNA, 20 bp, Artificial Sequence
  Description of Artificial Sequence: Synthetic oligonucleotide
  Target: SCNA; (+) strand; PAM type: NRG; PAM sequence: TAG
atctgagggcaactcaacag

SEQ ID NO: 33615 - DNA, 20 bp, Artificial Sequence
  Description of Artificial Sequence: Synthetic oligonucleotide
  Target: SCNA; (+) strand; PAM type: NRG; PAM sequence: CAG
caacagtagtcaataattat

SEQ ID NO: 33616 - DNA, 20 bp, Artificial Sequence
  Description of Artificial Sequence: Synthetic oligonucleotide
  Target: SCNA; (+) strand; PAM type: NRG; PAM sequence: TGG
ataattatcagccaaatcaa

SEQ ID NO: 33617 - DNA, 20 bp, Artificial Sequence
  Description of Artificial Sequence: Synthetic oligonucleotide
  Target: SCNA; (+) strand; PAM type: NRG; PAM sequence: TAG
cagccaaatcaatggatgaa

SEQ ID NO: 33618 - DNA, 20 bp, Artificial Sequence
  Description of Artificial Sequence: Synthetic oligonucleotide
  Target: SCNA; (+) strand; PAM type: NRG; PAM sequence: AGG
agccaaatcaatggatgaat

SEQ ID NO: 33619 - DNA, 20 bp, Artificial Sequence
  Description of Artificial Sequence: Synthetic oligonucleotide
  Target: SCNA; (+) strand; PAM type: NRG; PAM sequence: TGG
caaatcaatggatgaatagg

SEQ ID NO: 33620 - DNA, 20 bp, Artificial Sequence
  Description of Artificial Sequence: Synthetic oligonucleotide
  Target: SCNA; (+) strand; PAM type: NRG; PAM sequence: TGG
tcaatggatgaataggtgga

SEQ ID NO: 33621 - DNA, 20 bp, Artificial Sequence
  Description of Artificial Sequence: Synthetic oligonucleotide
  Target: SCNA; (+) strand; PAM type: NRG; PAM sequence: TGG
taggtggatggatgaatgca

SEQ ID NO: 33622 - DNA, 20 bp, Artificial Sequence
  Description of Artificial Sequence: Synthetic oligonucleotide
  Target: SCNA; (+) strand; PAM type: NRG; PAM sequence: TGG
catggatgaatgtttgtgcc

SEQ ID NO: 33623 - DNA, 20 bp, Artificial Sequence
  Description of Artificial Sequence: Synthetic oligonucleotide
  Target: SCNA; (+) strand; PAM type: NRG; PAM sequence: GGG
atggatgaatgtttgtgcct

SEQ ID NO: 33624 - DNA, 20 bp, Artificial Sequence
  Description of Artificial Sequence: Synthetic oligonucleotide
  Target: SCNA; (+) strand; PAM type: NRG; PAM sequence: AAG
acccttctgtcatcatgcat

SEQ ID NO: 33625 - DNA, 20 bp, Artificial Sequence
  Description of Artificial Sequence: Synthetic oligonucleotide
  Target: SCNA; (+) strand; PAM type: NRG; PAM sequence: CAG
cttctgtcatcatgcataag

SEQ ID NO: 33626 - DNA, 20 bp, Artificial Sequence
  Description of Artificial Sequence: Synthetic oligonucleotide
  Target: SCNA; (+) strand; PAM type: NRG; PAM sequence: GAG
tcatcatgcataagcagcct

SEQ ID NO: 33627 - DNA, 20 bp, Artificial Sequence
  Description of Artificial Sequence: Synthetic oligonucleotide
  Target: SCNA; (+) strand; PAM type: NRG; PAM sequence: TAG
tgcataagcagcctgagtct

SEQ ID NO: 33628 - DNA, 20 bp, Artificial Sequence
  Description of Artificial Sequence: Synthetic oligonucleotide
  Target: SCNA; (+) strand; PAM type: NRG; PAM sequence: CAG
gctttcttcatgtgaataaa

SEQ ID NO: 33629 - DNA, 20 bp, Artificial Sequence
  Description of Artificial Sequence: Synthetic oligonucleotide
  Target: SCNA; (+) strand; PAM type: NRG; PAM sequence: AAG
catgtgaataaacagaccta

SEQ ID NO: 33630 - DNA, 20 bp, Artificial Sequence
  Description of Artificial Sequence: Synthetic oligonucleotide
  Target: SCNA; (+) strand; PAM type: NRG; PAM sequence: CAG
tgaataaacagacctaaaga

SEQ ID NO: 33631 - DNA, 20 bp, Artificial Sequence
  Description of Artificial Sequence: Synthetic oligonucleotide
  Target: SCNA; (+) strand; PAM type: NRG; PAM sequence: AGG
gaataaacagacctaaagac

SEQ ID NO: 33632 - DNA, 20 bp, Artificial Sequence
  Description of Artificial Sequence: Synthetic oligonucleotide
  Target: SCNA; (+) strand; PAM type: NRG; PAM sequence: TAG
acagacctaaagacaggcac

SEQ ID NO: 33633 - DNA, 20 bp, Artificial Sequence
  Description of Artificial Sequence: Synthetic oligonucleotide
  Target: SCNA; (+) strand; PAM type: NRG; PAM sequence: AGG
cagacctaaagacaggcact

SEQ ID NO: 33634 - DNA, 20 bp, Artificial Sequence
  Description of Artificial Sequence: Synthetic oligonucleotide
  Target: SCNA; (+) strand; PAM type: NRG; PAM sequence: GAG
gacctaaagacaggcactag

SEQ ID NO: 33635 - DNA, 20 bp, Artificial Sequence
  Description of Artificial Sequence: Synthetic oligonucleotide
  Target: SCNA; (+) strand; PAM type: NRG; PAM sequence: TGG
agacaggcactaggagaccc

SEQ ID NO: 33636 - DNA, 20 bp, Artificial Sequence
  Description of Artificial Sequence: Synthetic oligonucleotide
  Target: SCNA; (+) strand; PAM type: NRG; PAM sequence: GGG
gacaggcactaggagaccct

SEQ ID NO: 33637 - DNA, 20 bp, Artificial Sequence
  Description of Artificial Sequence: Synthetic oligonucleotide
  Target: SCNA; (+) strand; PAM type: NRG; PAM sequence: AAG
taggagaccctgggaccaca

SEQ ID NO: 33638 - DNA, 20 bp, Artificial Sequence
  Description of Artificial Sequence: Synthetic oligonucleotide
  Target: SCNA; (+) strand; PAM type: NRG; PAM sequence: CAG
gaccctgggaccacaaagct

SEQ ID NO: 33639 - DNA, 20 bp, Artificial Sequence
  Description of Artificial Sequence: Synthetic oligonucleotide
  Target: SCNA; (+) strand; PAM type: NRG; PAM sequence: AAG
agctcagattgttataataa

SEQ ID NO: 33640 - DNA, 20 bp, Artificial Sequence
  Description of Artificial Sequence: Synthetic oligonucleotide
  Target: SCNA; (+) strand; PAM type: NRG; PAM sequence: AGG
gctcagattgttataataaa

SEQ ID NO: 33641 - DNA, 20 bp, Artificial Sequence
  Description of Artificial Sequence: Synthetic oligonucleotide
  Target: SCNA; (+) strand; PAM type: NRG; PAM sequence: GAG
tcagattgttataataaaag

SEQ ID NO: 33642 - DNA, 20 bp, Artificial Sequence
  Description of Artificial Sequence: Synthetic oligonucleotide
  Target: SCNA; (+) strand; PAM type: NRG; PAM sequence: AGG
cagattgttataataaaagg

SEQ ID NO: 33643 - DNA, 20 bp, Artificial Sequence
  Description of Artificial Sequence: Synthetic oligonucleotide
  Target: SCNA; (+) strand; PAM type: NRG; PAM sequence: GGG
agattgttataataaaagga

SEQ ID NO: 33644 - DNA, 20 bp, Artificial Sequence
  Description of Artificial Sequence: Synthetic oligonucleotide
  Target: SCNA; (+) strand; PAM type: NRG; PAM sequence: AAG
ataataaaaggagggaaaca

SEQ ID NO: 33645 - DNA, 20 bp, Artificial Sequence
  Description of Artificial Sequence: Synthetic oligonucleotide
  Target: SCNA; (+) strand; PAM type: NRG; PAM sequence: AAG
ggaaacaaagctccctgttg

SEQ ID NO: 33646 - DNA, 20 bp, Artificial Sequence
  Description of Artificial Sequence: Synthetic oligonucleotide
  Target: SCNA; (+) strand; PAM type: NRG; PAM sequence: CAG
acaatatttctactaatgaa

SEQ ID NO: 33647 - DNA, 20 bp, Artificial Sequence
  Description of Artificial Sequence: Synthetic oligonucleotide
  Target: SCNA; (+) strand; PAM type: NRG; PAM sequence: GAG
aatatttctactaatgaaca

SEQ ID NO: 33648 - DNA, 20 bp, Artificial Sequence
  Description of Artificial Sequence: Synthetic oligonucleotide
  Target: SCNA; (+) strand; PAM type: NRG; PAM sequence: AAG
tttctactaatgaacagaga

SEQ ID NO: 33649 - DNA, 20 bp, Artificial Sequence
  Description of Artificial Sequence: Synthetic oligonucleotide
  Target: SCNA; (+) strand; PAM type: NRG; PAM sequence: AAG
acagagaaagcttgacttga

SEQ ID NO: 33650 - DNA, 20 bp, Artificial Sequence
  Description of Artificial Sequence: Synthetic oligonucleotide
  Target: SCNA; (+) strand; PAM type: NRG; PAM sequence: AGG
cagagaaagcttgacttgaa

SEQ ID NO: 33651 - DNA, 20 bp, Artificial Sequence
  Description of Artificial Sequence: Synthetic oligonucleotide
  Target: SCNA; (+) strand; PAM type: NRG; PAM sequence: TAG
ttgaaaggacacatttatat

SEQ ID NO: 33652 - DNA, 20 bp, Artificial Sequence
  Description of Artificial Sequence: Synthetic oligonucleotide
  Target: SCNA; (+) strand; PAM type: NRG; PAM sequence: TAG
tattagatgtcatccctatc

SEQ ID NO: 33653 - DNA, 20 bp, Artificial Sequence
  Description of Artificial Sequence: Synthetic oligonucleotide
  Target: SCNA; (+) strand; PAM type: NRG; PAM sequence: GAG
ttagatgtcatccctatcta

SEQ ID NO: 33654 - DNA, 20 bp, Artificial Sequence
  Description of Artificial Sequence: Synthetic oligonucleotide
  Target: SCNA; (+) strand; PAM type: NRG; PAM sequence: AGG
tagatgtcatccctatctag

SEQ ID NO: 33655 - DNA, 20 bp, Artificial Sequence
  Description of Artificial Sequence: Synthetic oligonucleotide
  Target: SCNA; (+) strand; PAM type: NRG; PAM sequence: AAG
atctagaggccattactatc

SEQ ID NO: 33656 - DNA, 20 bp, Artificial Sequence
  Description of Artificial Sequence: Synthetic oligonucleotide
  Target: SCNA; (+) strand; PAM type: NRG; PAM sequence: CAG
cattactatcaagcatctgt

SEQ ID NO: 33657 - DNA, 20 bp, Artificial Sequence
  Description of Artificial Sequence: Synthetic oligonucleotide
  Target: SCNA; (+) strand; PAM type: NRG; PAM sequence: AGG
attactatcaagcatctgtc

SEQ ID NO: 33658 - DNA, 20 bp, Artificial Sequence
  Description of Artificial Sequence: Synthetic oligonucleotide
  Target: SCNA; (+) strand; PAM type: NRG; PAM sequence: AAG
tatcaagcatctgtcaggta

SEQ ID NO: 33659 - DNA, 20 bp, Artificial Sequence
  Description of Artificial Sequence: Synthetic oligonucleotide
  Target: SCNA; (+) strand; PAM type: NRG; PAM sequence: AGG
atcaagcatctgtcaggtaa

SEQ ID NO: 33660 - DNA, 20 bp, Artificial Sequence
  Description of Artificial Sequence: Synthetic oligonucleotide
  Target: SCNA; (+) strand; PAM type: NRG; PAM sequence: GAG
caagcatctgtcaggtaaag

SEQ ID NO: 33661 - DNA, 20 bp, Artificial Sequence
  Description of Artificial Sequence: Synthetic oligonucleotide
  Target: SCNA; (+) strand; PAM type: NRG; PAM sequence: GAG
atctgtcaggtaaaggagat

SEQ ID NO: 33662 - DNA, 20 bp, Artificial Sequence
  Description of Artificial Sequence: Synthetic oligonucleotide
  Target: SCNA; (+) strand; PAM type: NRG; PAM sequence: AAG
ctttaaatattgttttttct

SEQ ID NO: 33663 - DNA, 20 bp, Artificial Sequence
  Description of Artificial Sequence: Synthetic oligonucleotide
  Target: SCNA; (+) strand; PAM type: NRG; PAM sequence: TGG
ttgttttttctaagttgtgt

SEQ ID NO: 33664 - DNA, 20 bp, Artificial Sequence
  Description of Artificial Sequence: Synthetic oligonucleotide
  Target: SCNA; (+) strand; PAM type: NRG; PAM sequence: TGG
tttctaagttgtgttggaaa

SEQ ID NO: 33665 - DNA, 20 bp, Artificial Sequence
  Description of Artificial Sequence: Synthetic oligonucleotide
  Target: SCNA; (+) strand; PAM type: NRG; PAM sequence: GGG
ttctaagttgtgttggaaat

SEQ ID NO: 33666 - DNA, 20 bp, Artificial Sequence
  Description of Artificial Sequence: Synthetic oligonucleotide
  Target: SCNA; (+) strand; PAM type: NRG; PAM sequence: GGG
tctaagttgtgttggaaatg

SEQ ID NO: 33667 - DNA, 20 bp, Artificial Sequence
  Description of Artificial Sequence: Synthetic oligonucleotide
  Target: SCNA; (+) strand; PAM type: NRG; PAM sequence: GAG
taagttgtgttggaaatggg

SEQ ID NO: 33668 - DNA, 20 bp, Artificial Sequence
  Description of Artificial Sequence: Synthetic oligonucleotide
  Target: SCNA; (+) strand; PAM type: NRG; PAM sequence: AAG
tgttggaaatggggagttgc

SEQ ID NO: 33669 - DNA, 20 bp, Artificial Sequence
  Description of Artificial Sequence: Synthetic oligonucleotide
  Target: SCNA; (+) strand; PAM type: NRG; PAM sequence: TAG
gtatttccattgcttaaaaa

SEQ ID NO: 33670 - DNA, 20 bp, Artificial Sequence
  Description of Artificial Sequence: Synthetic oligonucleotide
  Target: SCNA; (+) strand; PAM type: NRG; PAM sequence: CAG
cattgcttaaaaatagaaaa

SEQ ID NO: 33671 - DNA, 20 bp, Artificial Sequence
  Description of Artificial Sequence: Synthetic oligonucleotide
  Target: SCNA; (+) strand; PAM type: NRG; PAM sequence: AAG
ttaaaaatagaaaacagatg

SEQ ID NO: 33672 - DNA, 20 bp, Artificial Sequence
  Description of Artificial Sequence: Synthetic oligonucleotide
  Target: SCNA; (+) strand; PAM type: NRG; PAM sequence: AAG
aaatagaaaacagatgaaga

SEQ ID NO: 33673 - DNA, 20 bp, Artificial Sequence
  Description of Artificial Sequence: Synthetic oligonucleotide
  Target: SCNA; (+) strand; PAM type: NRG; PAM sequence: AGG
aatagaaaacagatgaagaa

SEQ ID NO: 33674 - DNA, 20 bp, Artificial Sequence
  Description of Artificial Sequence: Synthetic oligonucleotide
  Target: SCNA; (+) strand; PAM type: NRG; PAM sequence: GAG
tagaaaacagatgaagaaag

SEQ ID NO: 33675 - DNA, 20 bp, Artificial Sequence
  Description of Artificial Sequence: Synthetic oligonucleotide
  Target: SCNA; (+) strand; PAM type: NRG; PAM sequence: CAG
atgaagaaaggagatatcat

SEQ ID NO: 33676 - DNA, 20 bp, Artificial Sequence
  Description of Artificial Sequence: Synthetic oligonucleotide
  Target: SCNA; (+) strand; PAM type: NRG; PAM sequence: CAG
aagaaaggagatatcatcag

SEQ ID NO: 33677 - DNA, 20 bp, Artificial Sequence
  Description of Artificial Sequence: Synthetic oligonucleotide
  Target: SCNA; (+) strand; PAM type: NRG; PAM sequence: TAG
gagatatcatcagcagaaca

SEQ ID NO: 33678 - DNA, 20 bp, Artificial Sequence
  Description of Artificial Sequence: Synthetic oligonucleotide
  Target: SCNA; (+) strand; PAM type: NRG; PAM sequence: AAG
atatcatcagcagaacatag

SEQ ID NO: 33679 - DNA, 20 bp, Artificial Sequence
  Description of Artificial Sequence: Synthetic oligonucleotide
  Target: SCNA; (+) strand; PAM type: NRG; PAM sequence: CGG
acatagaagatttcataata

SEQ ID NO: 33680 - DNA, 20 bp, Artificial Sequence
  Description of Artificial Sequence: Synthetic oligonucleotide
  Target: SCNA; (+) strand; PAM type: NRG; PAM sequence: GAG
atagaagatttcataatacg

SEQ ID NO: 33681 - DNA, 20 bp, Artificial Sequence
  Description of Artificial Sequence: Synthetic oligonucleotide
  Target: SCNA; (+) strand; PAM type: NRG; PAM sequence: AGG
tagaagatttcataatacgg

SEQ ID NO: 33682 - DNA, 20 bp, Artificial Sequence
  Description of Artificial Sequence: Synthetic oligonucleotide
  Target: SCNA; (+) strand; PAM type: NRG; PAM sequence: AAG
atacggaggctaaaactctt

SEQ ID NO: 33683 - DNA, 20 bp, Artificial Sequence
  Description of Artificial Sequence: Synthetic oligonucleotide
  Target: SCNA; (+) strand; PAM type: NRG; PAM sequence: AAG
aggctaaaactcttaagaaa

SEQ ID NO: 33684 - DNA, 20 bp, Artificial Sequence
  Description of Artificial Sequence: Synthetic oligonucleotide
  Target: SCNA; (+) strand; PAM type: NRG; PAM sequence: TAG
agaaaaagcaatatttattc

SEQ ID NO: 33685 - DNA, 20 bp, Artificial Sequence
  Description of Artificial Sequence: Synthetic oligonucleotide
  Target: SCNA; (+) strand; PAM type: NRG; PAM sequence: GAG
tctagtgcccaacctaccat

SEQ ID NO: 33686 - DNA, 20 bp, Artificial Sequence
  Description of Artificial Sequence: Synthetic oligonucleotide
  Target: SCNA; (+) strand; PAM type: NRG; PAM sequence: AAG
gtgcccaacctaccatgaga

SEQ ID NO: 33687 - DNA, 20 bp, Artificial Sequence
  Description of Artificial Sequence: Synthetic oligonucleotide
  Target: SCNA; (+) strand; PAM type: NRG; PAM sequence: TGG
atgagaaagttgtgcgactt

SEQ ID NO: 33688 - DNA, 20 bp, Artificial Sequence
  Description of Artificial Sequence: Synthetic oligonucleotide
  Target: SCNA; (+) strand; PAM type: NRG; PAM sequence: GGG
tgagaaagttgtgcgacttt

SEQ ID NO: 33689 - DNA, 20 bp, Artificial Sequence
  Description of Artificial Sequence: Synthetic oligonucleotide
  Target: SCNA; (+) strand; PAM type: NRG; PAM sequence: AAG
aaagttgtgcgactttgggc

SEQ ID NO: 33690 - DNA, 20 bp, Artificial Sequence
  Description of Artificial Sequence: Synthetic oligonucleotide
  Target: SCNA; (+) strand; PAM type: NRG; PAM sequence: TGG
ggcaagttatttaattcctc

SEQ ID NO: 33691 - DNA, 20 bp, Artificial Sequence
  Description of Artificial Sequence: Synthetic oligonucleotide
  Target: SCNA; (+) strand; PAM type: NRG; PAM sequence: GGG
gcaagttatttaattcctct

SEQ ID NO: 33692 - DNA, 20 bp, Artificial Sequence
  Description of Artificial Sequence: Synthetic oligonucleotide
  Target: SCNA; (+) strand; PAM type: NRG; PAM sequence: AAG
atttaattcctctgggtctg

SEQ ID NO: 33693 - DNA, 20 bp, Artificial Sequence
  Description of Artificial Sequence: Synthetic oligonucleotide
  Target: SCNA; (+) strand; PAM type: NRG; PAM sequence: GAG
attcctctgggtctgaagat

SEQ ID NO: 33694 - DNA, 20 bp, Artificial Sequence
  Description of Artificial Sequence: Synthetic oligonucleotide
  Target: SCNA; (+) strand; PAM type: NRG; PAM sequence: AAG
ctgaagatgagtctgcacac

SEQ ID NO: 33695 - DNA, 20 bp, Artificial Sequence
  Description of Artificial Sequence: Synthetic oligonucleotide
  Target: SCNA; (+) strand; PAM type: NRG; PAM sequence: GAG
gaagatgagtctgcacacaa

SEQ ID NO: 33696 - DNA, 20 bp, Artificial Sequence
  Description of Artificial Sequence: Synthetic oligonucleotide
  Target: SCNA; (+) strand; PAM type: NRG; PAM sequence: CGG
ataatgatcccttccaacac

SEQ ID NO: 33697 - DNA, 20 bp, Artificial Sequence
  Description of Artificial Sequence: Synthetic oligonucleotide
  Target: SCNA; (+) strand; PAM type: NRG; PAM sequence: GGG
taatgatcccttccaacacc

SEQ ID NO: 33698 - DNA, 20 bp, Artificial Sequence
  Description of Artificial Sequence: Synthetic oligonucleotide
  Target: SCNA; (+) strand; PAM type: NRG; PAM sequence: TGG
atcccttccaacaccgggac

SEQ ID NO: 33699 - DNA, 20 bp, Artificial Sequence
  Description of Artificial Sequence: Synthetic oligonucleotide
  Target: SCNA; (+) strand; PAM type: NRG; PAM sequence: CGG
ccttccaacaccgggactgg

SEQ ID NO: 33700 - DNA, 20 bp, Artificial Sequence
  Description of Artificial Sequence: Synthetic oligonucleotide
  Target: SCNA; (+) strand; PAM type: NRG; PAM sequence: GGG
cttccaacaccgggactggc

SEQ ID NO: 33701 - DNA, 20 bp, Artificial Sequence
  Description of Artificial Sequence: Synthetic oligonucleotide
  Target: SCNA; (+) strand; PAM type: NRG; PAM sequence: CAG
caccgggactggcgggtctg

SEQ ID NO: 33702 - DNA, 20 bp, Artificial Sequence
  Description of Artificial Sequence: Synthetic oligonucleotide
  Target: SCNA; (+) strand; PAM type: NRG; PAM sequence: CAG
gactggcgggtctgcagcca

SEQ ID NO: 33703 - DNA, 20 bp, Artificial Sequence
  Description of Artificial Sequence: Synthetic oligonucleotide
  Target: SCNA; (+) strand; PAM type: NRG; PAM sequence: TGG
tctgcagccacagttacatc

SEQ ID NO: 33704 - DNA, 20 bp, Artificial Sequence
  Description of Artificial Sequence: Synthetic oligonucleotide
  Target: SCNA; (+) strand; PAM type: NRG; PAM sequence: TGG
gttacatctggaaactccac

SEQ ID NO: 33705 - DNA, 20 bp, Artificial Sequence
  Description of Artificial Sequence: Synthetic oligonucleotide
  Target: SCNA; (+) strand; PAM type: NRG; PAM sequence: TGG
ggaaactccactggtgcttt

SEQ ID NO: 33706 - DNA, 20 bp, Artificial Sequence
  Description of Artificial Sequence: Synthetic oligonucleotide
  Target: SCNA; (+) strand; PAM type: NRG; PAM sequence: GAG
aaactccactggtgcttttg

SEQ ID NO: 33707 - DNA, 20 bp, Artificial Sequence
  Description of Artificial Sequence: Synthetic oligonucleotide
  Target: SCNA; (+) strand; PAM type: NRG; PAM sequence: AAG
tggtgcttttggagcttccc

SEQ ID NO: 33708 - DNA, 20 bp, Artificial Sequence
  Description of Artificial Sequence: Synthetic oligonucleotide
  Target: SCNA; (+) strand; PAM type: NRG; PAM sequence: GAG
gtgcttttggagcttcccaa

SEQ ID NO: 33709 - DNA, 20 bp, Artificial Sequence
  Description of Artificial Sequence: Synthetic oligonucleotide
  Target: SCNA; (+) strand; PAM type: NRG; PAM sequence: CAG
ttggagcttcccaagagtat

SEQ ID NO: 33710 - DNA, 20 bp, Artificial Sequence
  Description of Artificial Sequence: Synthetic oligonucleotide
  Target: SCNA; (+) strand; PAM type: NRG; PAM sequence: AGG
tggagcttcccaagagtatc

SEQ ID NO: 33711 - DNA, 20 bp, Artificial Sequence
  Description of Artificial Sequence: Synthetic oligonucleotide
  Target: SCNA; (+) strand; PAM type: NRG; PAM sequence: CAG
agtatcaggaattcaatatg

SEQ ID NO: 33712 - DNA, 20 bp, Artificial Sequence
  Description of Artificial Sequence: Synthetic oligonucleotide
  Target: SCNA; (+) strand; PAM type: NRG; PAM sequence: TGG
tatgcagtcataaaaaattt

SEQ ID NO: 33713 - DNA, 20 bp, Artificial Sequence
  Description of Artificial Sequence: Synthetic oligonucleotide
  Target: SCNA; (+) strand; PAM type: NRG; PAM sequence: GGG
atgcagtcataaaaaatttt

SEQ ID NO: 33714 - DNA, 20 bp, Artificial Sequence
  Description of Artificial Sequence: Synthetic oligonucleotide
  Target: SCNA; (+) strand; PAM type: NRG; PAM sequence: AAG
aattttgggtcatgttctct

SEQ ID NO: 33715 - DNA, 20 bp, Artificial Sequence
  Description of Artificial Sequence: Synthetic oligonucleotide
  Target: SCNA; (+) strand; PAM type: NRG; PAM sequence: AAG
acaacactgccatgtgtgtg

SEQ ID NO: 33716 - DNA, 20 bp, Artificial Sequence
  Description of Artificial Sequence: Synthetic oligonucleotide
  Target: SCNA; (+) strand; PAM type: NRG; PAM sequence: GAG
aacactgccatgtgtgtgaa

SEQ ID NO: 33717 - DNA, 20 bp, Artificial Sequence
  Description of Artificial Sequence: Synthetic oligonucleotide
  Target: SCNA; (+) strand; PAM type: NRG; PAM sequence: AAG
tctttattaaaatttttctt

SEQ ID NO: 33718 - DNA, 20 bp, Artificial Sequence
  Description of Artificial Sequence: Synthetic oligonucleotide
  Target: SCNA; (+) strand; PAM type: NRG; PAM sequence: AAG
tcttaagttgttccttccta

SEQ ID NO: 33719 - DNA, 20 bp, Artificial Sequence
  Description of Artificial Sequence: Synthetic oligonucleotide
  Target: SCNA; (+) strand; PAM type: NRG; PAM sequence: TAG
taagttgttccttcctaaag

SEQ ID NO: 33720 - DNA, 20 bp, Artificial Sequence
  Description of Artificial Sequence: Synthetic oligonucleotide
  Target: SCNA; (+) strand; PAM type: NRG; PAM sequence: AAG
gttccttcctaaagtagtga

SEQ ID NO: 33721 - DNA, 20 bp, Artificial Sequence
  Description of Artificial Sequence: Synthetic oligonucleotide
  Target: SCNA; (+) strand; PAM type: NRG; PAM sequence: GAG
ttcctaaagtagtgaaagct

SEQ ID NO: 33722 - DNA, 20 bp, Artificial Sequence
  Description of Artificial Sequence: Synthetic oligonucleotide
  Target: SCNA; (+) strand; PAM type: NRG; PAM sequence: CAG
ctaaagtagtgaaagctgag

SEQ ID NO: 33723 - DNA, 20 bp, Artificial Sequence
  Description of Artificial Sequence: Synthetic oligonucleotide
  Target: SCNA; (+) strand; PAM type: NRG; PAM sequence: TAG
agtgaaagctgagcagatct

SEQ ID NO: 33724 - DNA, 20 bp, Artificial Sequence
  Description of Artificial Sequence: Synthetic oligonucleotide
  Target: SCNA; (+) strand; PAM type: NRG; PAM sequence: TAG
gcagatcttagaaattcatt

SEQ ID NO: 33725 - DNA, 20 bp, Artificial Sequence
  Description of Artificial Sequence: Synthetic oligonucleotide
  Target: SCNA; (+) strand; PAM type: NRG; PAM sequence: AAG
tacacttgactataacactt

SEQ ID NO: 33726 - DNA, 20 bp, Artificial Sequence
  Description of Artificial Sequence: Synthetic oligonucleotide
  Target: SCNA; (+) strand; PAM type: NRG; PAM sequence: TAG
gactataacacttaagaatc

SEQ ID NO: 33727 - DNA, 20 bp, Artificial Sequence
  Description of Artificial Sequence: Synthetic oligonucleotide
  Target: SCNA; (+) strand; PAM type: NRG; PAM sequence: TAG
atctagttattttccttttg

SEQ ID NO: 33728 - DNA, 20 bp, Artificial Sequence
  Description of Artificial Sequence: Synthetic oligonucleotide
  Target: SCNA; (+) strand; PAM type: NRG; PAM sequence: TGG
ttttatttgaaatatgtgaa

SEQ ID NO: 33729 - DNA, 20 bp, Artificial Sequence
  Description of Artificial Sequence: Synthetic oligonucleotide
  Target: SCNA; (+) strand; PAM type: NRG; PAM sequence: TAG
gaaatatgtgaatggttact

SEQ ID NO: 33730 - DNA, 20 bp, Artificial Sequence
  Description of Artificial Sequence: Synthetic oligonucleotide
  Target: SCNA; (+) strand; PAM type: NRG; PAM sequence: AAG
acatgaaaaatttaacctta

SEQ ID NO: 33731 - DNA, 20 bp, Artificial Sequence
  Description of Artificial Sequence: Synthetic oligonucleotide
  Target: SCNA; (+) strand; PAM type: NRG; PAM sequence: GAG
ctattttaaaaatatgaaat

SEQ ID NO: 33732 - DNA, 20 bp, Artificial Sequence
  Description of Artificial Sequence: Synthetic oligonucleotide
  Target: SCNA; (+) strand; PAM type: NRG; PAM sequence: CGG
tatgaaatgagactatcaat

SEQ ID NO: 33733 - DNA, 20 bp, Artificial Sequence
  Description of Artificial Sequence: Synthetic oligonucleotide
  Target: SCNA; (+) strand; PAM type: NRG; PAM sequence: AAG
actatcaatcggtacttatg

SEQ ID NO: 33734 - DNA, 20 bp, Artificial Sequence
  Description of Artificial Sequence: Synthetic oligonucleotide
  Target: SCNA; (+) strand; PAM type: NRG; PAM sequence: TAG
caatgtttattcttctaata

SEQ ID NO: 33735 - DNA, 20 bp, Artificial Sequence
  Description of Artificial Sequence: Synthetic oligonucleotide
  Target: SCNA; (+) strand; PAM type: NRG; PAM sequence: TGG
tttattcttctaatatagtg

SEQ ID NO: 33736 - DNA, 20 bp, Artificial Sequence
  Description of Artificial Sequence: Synthetic oligonucleotide
  Target: SCNA; (+) strand; PAM type: NRG; PAM sequence: GGG
ttattcttctaatatagtgt

SEQ ID NO: 33737 - DNA, 20 bp, Artificial Sequence
  Description of Artificial Sequence: Synthetic oligonucleotide
  Target: SCNA; (+) strand; PAM type: NRG; PAM sequence: AAG
ttcttctaatatagtgtggg

SEQ ID NO: 33738 - DNA, 20 bp, Artificial Sequence
  Description of Artificial Sequence: Synthetic oligonucleotide
  Target: SCNA; (+) strand; PAM type: NRG; PAM sequence: GAG
cttctaatatagtgtgggaa

SEQ ID NO: 33739 - DNA, 20 bp, Artificial Sequence
  Description of Artificial Sequence: Synthetic oligonucleotide
  Target: SCNA; (+) strand; PAM type: NRG; PAM sequence: AAG
gtgtgggaagagaaatgtaa

SEQ ID NO: 33740 - DNA, 20 bp, Artificial Sequence
  Description of Artificial Sequence: Synthetic oligonucleotide
  Target: SCNA; (+) strand; PAM type: NRG; PAM sequence: AAG
gtaaaagtcttgcaacacaa

SEQ ID NO: 33741 - DNA, 20 bp, Artificial Sequence
  Description of Artificial Sequence: Synthetic oligonucleotide
  Target: SCNA; (+) strand; PAM type: NRG; PAM sequence: AGG
taaaagtcttgcaacacaaa

SEQ ID NO: 33742 - DNA, 20 bp, Artificial Sequence
  Description of Artificial Sequence: Synthetic oligonucleotide
  Target: SCNA; (+) strand; PAM type: NRG; PAM sequence: GGG
aaaagtcttgcaacacaaaa

SEQ ID NO: 33743 - DNA, 20 bp, Artificial Sequence
  Description of Artificial Sequence: Synthetic oligonucleotide
  Target: SCNA; (+) strand; PAM type: NRG; PAM sequence: TAG
gggattgttctcacaaatca

SEQ ID NO: 33744 - DNA, 20 bp, Artificial Sequence
  Description of Artificial Sequence: Synthetic oligonucleotide
  Target: SCNA; (+) strand; PAM type: NRG; PAM sequence: AGG
ggattgttctcacaaatcat

SEQ ID NO: 33745 - DNA, 20 bp, Artificial Sequence
  Description of Artificial Sequence: Synthetic oligonucleotide
  Target: SCNA; (+) strand; PAM type: NRG; PAM sequence: GAG
ctcacaaatcataggtttgt

SEQ ID NO: 33746 - DNA, 20 bp, Artificial Sequence
  Description of Artificial Sequence: Synthetic oligonucleotide
  Target: SCNA; (+) strand; PAM type: NRG; PAM sequence: TGG
caaatcataggtttgtgaga

SEQ ID NO: 33747 - DNA, 20 bp, Artificial Sequence
  Description of Artificial Sequence: Synthetic oligonucleotide
  Target: SCNA; (+) strand; PAM type: NRG; PAM sequence: GGG
aaatcataggtttgtgagat

SEQ ID NO: 33748 - DNA, 20 bp, Artificial Sequence
  Description of Artificial Sequence: Synthetic oligonucleotide
  Target: SCNA; (+) strand; PAM type: NRG; PAM sequence: GGG
aatcataggtttgtgagatg

SEQ ID NO: 33749 - DNA, 20 bp, Artificial Sequence
  Description of Artificial Sequence: Synthetic oligonucleotide
  Target: SCNA; (+) strand; PAM type: NRG; PAM sequence: TGG
cataggtttgtgagatgggg

SEQ ID NO: 33750 - DNA, 20 bp, Artificial Sequence
  Description of Artificial Sequence: Synthetic oligonucleotide
  Target: SCNA; (+) strand; PAM type: NRG; PAM sequence: AAG
gcaaaatctcattgttttta

SEQ ID NO: 33751 - DNA, 20 bp, Artificial Sequence
  Description of Artificial Sequence: Synthetic oligonucleotide
  Target: SCNA; (+) strand; PAM type: NRG; PAM sequence: AAG
ctcattgtttttaaagaacc

SEQ ID NO: 33752 - DNA, 20 bp, Artificial Sequence
  Description of Artificial Sequence: Synthetic oligonucleotide
  Target: SCNA; (+) strand; PAM type: NRG; PAM sequence: GAG
agaaccaagctgttcttcat

SEQ ID NO: 33753 - DNA, 20 bp, Artificial Sequence
  Description of Artificial Sequence: Synthetic oligonucleotide
  Target: SCNA; (+) strand; PAM type: NRG; PAM sequence: AAG
ccaagctgttcttcatgagc

SEQ ID NO: 33754 - DNA, 20 bp, Artificial Sequence
  Description of Artificial Sequence: Synthetic oligonucleotide
  Target: SCNA; (+) strand; PAM type: NRG; PAM sequence: TGG
agcaagaacactgaattccc

SEQ ID NO: 33755 - DNA, 20 bp, Artificial Sequence
  Description of Artificial Sequence: Synthetic oligonucleotide
  Target: SCNA; (+) strand; PAM type: NRG; PAM sequence: TAG
attccctggttttctttttc

SEQ ID NO: 33756 - DNA, 20 bp, Artificial Sequence
  Description of Artificial Sequence: Synthetic oligonucleotide
  Target: SCNA; (+) strand; PAM type: NRG; PAM sequence: TGG
ttttctagtcactatacccc

SEQ ID NO: 33757 - DNA, 20 bp, Artificial Sequence
  Description of Artificial Sequence: Synthetic oligonucleotide
  Target: SCNA; (+) strand; PAM type: NRG; PAM sequence: CAG
tactgtcaatcaactgcatc

SEQ ID NO: 33758 - DNA, 20 bp, Artificial Sequence
  Description of Artificial Sequence: Synthetic oligonucleotide
  Target: SCNA; (+) strand; PAM type: NRG; PAM sequence: AAG
tgtcaatcaactgcatccag

SEQ ID NO: 33759 - DNA, 20 bp, Artificial Sequence
  Description of Artificial Sequence: Synthetic oligonucleotide
  Target: SCNA; (+) strand; PAM type: NRG; PAM sequence: AGG
gtcaatcaactgcatccaga

SEQ ID NO: 33760 - DNA, 20 bp, Artificial Sequence
  Description of Artificial Sequence: Synthetic oligonucleotide
  Target: SCNA; (+) strand; PAM type: NRG; PAM sequence: TAG
aatcaactgcatccagaagg

SEQ ID NO: 33761 - DNA, 20 bp, Artificial Sequence
  Description of Artificial Sequence: Synthetic oligonucleotide
  Target: SCNA; (+) strand; PAM type: NRG; PAM sequence: AAG
agaaggtagaataaaatgcc

SEQ ID NO: 33762 - DNA, 20 bp, Artificial Sequence
  Description of Artificial Sequence: Synthetic oligonucleotide
  Target: SCNA; (+) strand; PAM type: NRG; PAM sequence: CGG
aaaatgccaagtgatacttt

SEQ ID NO: 33763 - DNA, 20 bp, Artificial Sequence
  Description of Artificial Sequence: Synthetic oligonucleotide
  Target: SCNA; (+) strand; PAM type: NRG; PAM sequence: CAG
atgccaagtgatactttcgg

SEQ ID NO: 33764 - DNA, 20 bp, Artificial Sequence
  Description of Artificial Sequence: Synthetic oligonucleotide
  Target: SCNA; (+) strand; PAM type: NRG; PAM sequence: CAG
tgatactttcggcagaattc

SEQ ID NO: 33765 - DNA, 20 bp, Artificial Sequence
  Description of Artificial Sequence: Synthetic oligonucleotide
  Target: SCNA; (+) strand; PAM type: NRG; PAM sequence: GAG
atactttcggcagaattcca

SEQ ID NO: 33766 - DNA, 20 bp, Artificial Sequence
  Description of Artificial Sequence: Synthetic oligonucleotide
  Target: SCNA; (+) strand; PAM type: NRG; PAM sequence: CAG
ggcagaattccagagattct

SEQ ID NO: 33767 - DNA, 20 bp, Artificial Sequence
  Description of Artificial Sequence: Synthetic oligonucleotide
  Target: SCNA; (+) strand; PAM type: NRG; PAM sequence: TGG
gaattccagagattctcaga

SEQ ID NO: 33768 - DNA, 20 bp, Artificial Sequence
  Description of Artificial Sequence: Synthetic oligonucleotide
  Target: SCNA; (+) strand; PAM type: NRG; PAM sequence: GAG
tcttaaaaactgtaccatat

SEQ ID NO: 33769 - DNA, 20 bp, Artificial Sequence
  Description of Artificial Sequence: Synthetic oligonucleotide
  Target: SCNA; (+) strand; PAM type: NRG; PAM sequence: TAG
aaaaactgtaccatatgagt

SEQ ID NO: 33770 - DNA, 20 bp, Artificial Sequence
  Description of Artificial Sequence: Synthetic oligonucleotide
  Target: SCNA; (+) strand; PAM type: NRG; PAM sequence: AGG
aaaactgtaccatatgagtt

SEQ ID NO: 33771 - DNA, 20 bp, Artificial Sequence
  Description of Artificial Sequence: Synthetic oligonucleotide
  Target: SCNA; (+) strand; PAM type: NRG; PAM sequence: AAG
attttgaaatgtccatgaaa

SEQ ID NO: 33772 - DNA, 20 bp, Artificial Sequence
  Description of Artificial Sequence: Synthetic oligonucleotide
  Target: SCNA; (+) strand; PAM type: NRG; PAM sequence: AAG
ttgaaatgtccatgaaaaag

SEQ ID NO: 33773 - DNA, 20 bp, Artificial Sequence
  Description of Artificial Sequence: Synthetic oligonucleotide
  Target: SCNA; (+) strand; PAM type: NRG; PAM sequence: CAG
aatgtccatgaaaaagaagt

SEQ ID NO: 33774 - DNA, 20 bp, Artificial Sequence
  Description of Artificial Sequence: Synthetic oligonucleotide
  Target: SCNA; (+) strand; PAM type: NRG; PAM sequence: TGG
agtcagatatttcttaaaat

SEQ ID NO: 33775 - DNA, 20 bp, Artificial Sequence
  Description of Artificial Sequence: Synthetic oligonucleotide
  Target: SCNA; (+) strand; PAM type: NRG; PAM sequence: TAG
ttcttaaaattggcccctct

SEQ ID NO: 33776 - DNA, 20 bp, Artificial Sequence
  Description of Artificial Sequence: Synthetic oligonucleotide
  Target: SCNA; (+) strand; PAM type: NRG; PAM sequence: TGG
tggcccctcttagatatttc

SEQ ID NO: 33777 - DNA, 20 bp, Artificial Sequence
  Description of Artificial Sequence: Synthetic oligonucleotide
  Target: SCNA; (+) strand; PAM type: NRG; PAM sequence: GGG
ggcccctcttagatatttct

SEQ ID NO: 33778 - DNA, 20 bp, Artificial Sequence
  Description of Artificial Sequence: Synthetic oligonucleotide
  Target: SCNA; (+) strand; PAM type: NRG; PAM sequence: GGG
gcccctcttagatatttctg

SEQ ID NO: 33779 - DNA, 20 bp, Artificial Sequence
  Description of Artificial Sequence: Synthetic oligonucleotide
  Target: SCNA; (+) strand; PAM type: NRG; PAM sequence: AAG
cctcttagatatttctgggg

SEQ ID NO: 33780 - DNA, 20 bp, Artificial Sequence
  Description of Artificial Sequence: Synthetic oligonucleotide
  Target: SCNA; (+) strand; PAM type: NRG; PAM sequence: CAG
tattccttttcatcataaat

SEQ ID NO: 33781 - DNA, 20 bp, Artificial Sequence
  Description of Artificial Sequence: Synthetic oligonucleotide
  Target: SCNA; (+) strand; PAM type: NRG; PAM sequence: AAG
tcataaatcagtcctctata

SEQ ID NO: 33782 - DNA, 20 bp, Artificial Sequence
  Description of Artificial Sequence: Synthetic oligonucleotide
  Target: SCNA; (+) strand; PAM type: NRG; PAM sequence: GAG
ataaatcagtcctctataaa

SEQ ID NO: 33783 - DNA, 20 bp, Artificial Sequence
  Description of Artificial Sequence: Synthetic oligonucleotide
  Target: SCNA; (+) strand; PAM type: NRG; PAM sequence: AAG
tacctaatatgtttgatcga

SEQ ID NO: 33784 - DNA, 20 bp, Artificial Sequence
  Description of Artificial Sequence: Synthetic oligonucleotide
  Target: SCNA; (+) strand; PAM type: NRG; PAM sequence: CAG
taatatgtttgatcgaaaga

SEQ ID NO: 33785 - DNA, 20 bp, Artificial Sequence
  Description of Artificial Sequence: Synthetic oligonucleotide
  Target: SCNA; (+) strand; PAM type: NRG; PAM sequence: TAG
tatgtttgatcgaaagacag

SEQ ID NO: 33786 - DNA, 20 bp, Artificial Sequence
  Description of Artificial Sequence: Synthetic oligonucleotide
  Target: SCNA; (+) strand; PAM type: NRG; PAM sequence: TAG
acagtagtcaatatatttat

SEQ ID NO: 33787 - DNA, 20 bp, Artificial Sequence
  Description of Artificial Sequence: Synthetic oligonucleotide
  Target: SCNA; (+) strand; PAM type: NRG; PAM sequence: AGG
cagtagtcaatatatttatt

SEQ ID NO: 33788 - DNA, 20 bp, Artificial Sequence
  Description of Artificial Sequence: Synthetic oligonucleotide
  Target: SCNA; (+) strand; PAM type: NRG; PAM sequence: GAG
gtagtcaatatatttattag

SEQ ID NO: 33789 - DNA, 20 bp, Artificial Sequence
  Description of Artificial Sequence: Synthetic oligonucleotide
  Target: SCNA; (+) strand; PAM type: NRG; PAM sequence: AAG
atactttattcactaatctt

SEQ ID NO: 33790 - DNA, 20 bp, Artificial Sequence
  Description of Artificial Sequence: Synthetic oligonucleotide
  Target: SCNA; (+) strand; PAM type: NRG; PAM sequence: TAG
tcactaatcttaagaaatac

SEQ ID NO: 33791 - DNA, 20 bp, Artificial Sequence
  Description of Artificial Sequence: Synthetic oligonucleotide
  Target: SCNA; (+) strand; PAM type: NRG; PAM sequence: GAG
actaatcttaagaaatacta

SEQ ID NO: 33792 - DNA, 20 bp, Artificial Sequence
  Description of Artificial Sequence: Synthetic oligonucleotide
  Target: SCNA; (+) strand; PAM type: NRG; PAM sequence: AGG
ctaatcttaagaaatactag

SEQ ID NO: 33793 - DNA, 20 bp, Artificial Sequence
  Description of Artificial Sequence: Synthetic oligonucleotide
  Target: SCNA; (+) strand; PAM type: NRG; PAM sequence: CAG
aagaaatactagaggaaatc

SEQ ID NO: 33794 - DNA, 20 bp, Artificial Sequence
  Description of Artificial Sequence: Synthetic oligonucleotide
  Target: SCNA; (+) strand; PAM type: NRG; PAM sequence: AAG
aggaaatccagtacaatctg

SEQ ID NO: 33795 - DNA, 20 bp, Artificial Sequence
  Description of Artificial Sequence: Synthetic oligonucleotide
  Target: SCNA; (+) strand; PAM type: NRG; PAM sequence: TAG
attttattaaaaattaataa

SEQ ID NO: 33796 - DNA, 20 bp, Artificial Sequence
  Description of Artificial Sequence: Synthetic oligonucleotide
  Target: SCNA; (+) strand; PAM type: NRG; PAM sequence: AAG
aatagtaataaaaaactaca

SEQ ID NO: 33797 - DNA, 20 bp, Artificial Sequence
  Description of Artificial Sequence: Synthetic oligonucleotide
  Target: SCNA; (+) strand; PAM type: NRG; PAM sequence: AAG
ataactctgcttttacacat

SEQ ID NO: 33798 - DNA, 20 bp, Artificial Sequence
  Description of Artificial Sequence: Synthetic oligonucleotide
  Target: SCNA; (+) strand; PAM type: NRG; PAM sequence: AAG
ataaccctcttactatatgt

SEQ ID NO: 33799 - DNA, 20 bp, Artificial Sequence
  Description of Artificial Sequence: Synthetic oligonucleotide
  Target: SCNA; (+) strand; PAM type: NRG; PAM sequence: CAG
ctcttactatatgtaagatt

SEQ ID NO: 33800 - DNA, 20 bp, Artificial Sequence
  Description of Artificial Sequence: Synthetic oligonucleotide
  Target: SCNA; (+) strand; PAM type: NRG; PAM sequence: GAG
cttactatatgtaagattca

SEQ ID NO: 33801 - DNA, 20 bp, Artificial Sequence
  Description of Artificial Sequence: Synthetic oligonucleotide
  Target: SCNA; (+) strand; PAM type: NRG; PAM sequence: GAG
tactatatgtaagattcaga

SEQ ID NO: 33802 - DNA, 20 bp, Artificial Sequence
  Description of Artificial Sequence: Synthetic oligonucleotide
  Target: SCNA; (+) strand; PAM type: NRG; PAM sequence: AGG
actatatgtaagattcagag

SEQ ID NO: 33803 - DNA, 20 bp, Artificial Sequence
  Description of Artificial Sequence: Synthetic oligonucleotide
  Target: SCNA; (+) strand; PAM type: NRG; PAM sequence: GGG
ctatatgtaagattcagaga

SEQ ID NO: 33804 - DNA, 20 bp, Artificial Sequence
  Description of Artificial Sequence: Synthetic oligonucleotide
  Target: SCNA; (+) strand; PAM type: NRG; PAM sequence: AAG
agagggtaaataacatgaat

SEQ ID NO: 33805 - DNA, 20 bp, Artificial Sequence
  Description of Artificial Sequence: Synthetic oligonucleotide
  Target: SCNA; (+) strand; PAM type: NRG; PAM sequence: CAG
aaataacatgaataagacca

SEQ ID NO: 33806 - DNA, 20 bp, Artificial Sequence
  Description of Artificial Sequence: Synthetic oligonucleotide
  Target: SCNA; (+) strand; PAM type: NRG; PAM sequence: AGG
aataacatgaataagaccac

SEQ ID NO: 33807 - DNA, 20 bp, Artificial Sequence
  Description of Artificial Sequence: Synthetic oligonucleotide
  Target: SCNA; (+) strand; PAM type: NRG; PAM sequence: TAG
aggactcttaaattatgtgc

SEQ ID NO: 33808 - DNA, 20 bp, Artificial Sequence
  Description of Artificial Sequence: Synthetic oligonucleotide
  Target: SCNA; (+) strand; PAM type: NRG; PAM sequence: TAG
taattcctacattatttcta

SEQ ID NO: 33809 - DNA, 20 bp, Artificial Sequence
  Description of Artificial Sequence: Synthetic oligonucleotide
  Target: SCNA; (+) strand; PAM type: NRG; PAM sequence: AGG
aattcctacattatttctat

SEQ ID NO: 33810 - DNA, 20 bp, Artificial Sequence
  Description of Artificial Sequence: Synthetic oligonucleotide
  Target: SCNA; (+) strand; PAM type: NRG; PAM sequence: CAG
ctacattatttctataggat

SEQ ID NO: 33811 - DNA, 20 bp, Artificial Sequence
  Description of Artificial Sequence: Synthetic oligonucleotide
  Target: SCNA; (+) strand; PAM type: NRG; PAM sequence: TGG
attatttctataggatcagc

SEQ ID NO: 33812 - DNA, 20 bp, Artificial Sequence
  Description of Artificial Sequence: Synthetic oligonucleotide
  Target: SCNA; (+) strand; PAM type: NRG; PAM sequence: AAG
gctggcttcactgatatcaa

SEQ ID NO: 33813 - DNA, 20 bp, Artificial Sequence
  Description of Artificial Sequence: Synthetic oligonucleotide
  Target: SCNA; (+) strand; PAM type: NRG; PAM sequence: TAG
tgatatcaaaagattatata

SEQ ID NO: 33814 - DNA, 20 bp, Artificial Sequence
  Description of Artificial Sequence: Synthetic oligonucleotide
  Target: SCNA; (+) strand; PAM type: NRG; PAM sequence: AAG
tatagttatataattttata

SEQ ID NO: 33815 - DNA, 20 bp, Artificial Sequence
  Description of Artificial Sequence: Synthetic oligonucleotide
  Target: SCNA; (+) strand; PAM type: NRG; PAM sequence: TAG
tttataaagttctgctaact

SEQ ID NO: 33816 - DNA, 20 bp, Artificial Sequence
  Description of Artificial Sequence: Synthetic oligonucleotide
  Target: SCNA; (+) strand; PAM type: NRG; PAM sequence: CAG
gtgactttatatgcattttt

SEQ ID NO: 33817 - DNA, 20 bp, Artificial Sequence
  Description of Artificial Sequence: Synthetic oligonucleotide
  Target: SCNA; (+) strand; PAM type: NRG; PAM sequence: AGG
tgactttatatgcatttttc

SEQ ID NO: 33818 - DNA, 20 bp, Artificial Sequence
  Description of Artificial Sequence: Synthetic oligonucleotide
  Target: SCNA; (+) strand; PAM type: NRG; PAM sequence: AAG
ttcaggaaacttgcaaaaac

SEQ ID NO: 33819 - DNA, 20 bp, Artificial Sequence
  Description of Artificial Sequence: Synthetic oligonucleotide
  Target: SCNA; (+) strand; PAM type: NRG; PAM sequence: AAG
aggaaacttgcaaaaacaag

SEQ ID NO: 33820 - DNA, 20 bp, Artificial Sequence
  Description of Artificial Sequence: Synthetic oligonucleotide
  Target: SCNA; (+) strand; PAM type: NRG; PAM sequence: AGG
ggaaacttgcaaaaacaaga

SEQ ID NO: 33821 - DNA, 20 bp, Artificial Sequence
  Description of Artificial Sequence: Synthetic oligonucleotide
  Target: SCNA; (+) strand; PAM type: NRG; PAM sequence: GAG
aggtgaataaacttcgaaat

SEQ ID NO: 33822 - DNA, 20 bp, Artificial Sequence
  Description of Artificial Sequence: Synthetic oligonucleotide
  Target: SCNA; (+) strand; PAM type: NRG; PAM sequence: AAG
tgaataaacttcgaaatgag

SEQ ID NO: 33823 - DNA, 20 bp, Artificial Sequence
  Description of Artificial Sequence: Synthetic oligonucleotide
  Target: SCNA; (+) strand; PAM type: NRG; PAM sequence: GAG
aataaacttcgaaatgagaa

SEQ ID NO: 33824 - DNA, 20 bp, Artificial Sequence
  Description of Artificial Sequence: Synthetic oligonucleotide
  Target: SCNA; (+) strand; PAM type: NRG; PAM sequence: AAG
cgaaatgagaagagttcact

SEQ ID NO: 33825 - DNA, 20 bp, Artificial Sequence
  Description of Artificial Sequence: Synthetic oligonucleotide
  Target: SCNA; (+) strand; PAM type: NRG; PAM sequence: CAG
ataatgcatttattttgcat

SEQ ID NO: 33826 - DNA, 20 bp, Artificial Sequence
  Description of Artificial Sequence: Synthetic oligonucleotide
  Target: SCNA; (+) strand; PAM type: NRG; PAM sequence: AGG
taatgcatttattttgcatc

SEQ ID NO: 33827 - DNA, 20 bp, Artificial Sequence
  Description of Artificial Sequence: Synthetic oligonucleotide
  Target: SCNA; (+) strand; PAM type: NRG; PAM sequence: TAG
aaaaaattaaacatttttaa

SEQ ID NO: 33828 - DNA, 20 bp, Artificial Sequence
  Description of Artificial Sequence: Synthetic oligonucleotide
  Target: SCNA; (+) strand; PAM type: NRG; PAM sequence: AAG
tacttctccaatctttccaa

SEQ ID NO: 33829 - DNA, 20 bp, Artificial Sequence
  Description of Artificial Sequence: Synthetic oligonucleotide
  Target: SCNA; (+) strand; PAM type: NRG; PAM sequence: AAG
aattgatgaaaatgtaaacc

SEQ ID NO: 33830 - DNA, 20 bp, Artificial Sequence
  Description of Artificial Sequence: Synthetic oligonucleotide
  Target: SCNA; (+) strand; PAM type: NRG; PAM sequence: TAG
tgaaaatgtaaaccaagatt

SEQ ID NO: 33831 - DNA, 20 bp, Artificial Sequence
  Description of Artificial Sequence: Synthetic oligonucleotide
  Target: SCNA; (+) strand; PAM type: NRG; PAM sequence: AAG
gtaaaccaagatttagatgt

SEQ ID NO: 33832 - DNA, 20 bp, Artificial Sequence
  Description of Artificial Sequence: Synthetic oligonucleotide
  Target: SCNA; (+) strand; PAM type: NRG; PAM sequence: AGG
taaaccaagatttagatgta

SEQ ID NO: 33833 - DNA, 20 bp, Artificial Sequence
  Description of Artificial Sequence: Synthetic oligonucleotide
  Target: SCNA; (+) strand; PAM type: NRG; PAM sequence: AAG
gatgatcattataacattat

SEQ ID NO: 33834 - DNA, 20 bp, Artificial Sequence
  Description of Artificial Sequence: Synthetic oligonucleotide
  Target: SCNA; (+) strand; PAM type: NRG; PAM sequence: AAG
gatcattataacattataag

SEQ ID NO: 33835 - DNA, 20 bp, Artificial Sequence
  Description of Artificial Sequence: Synthetic oligonucleotide
  Target: SCNA; (+) strand; PAM type: NRG; PAM sequence: CAG
attataagaagcaaaaatta

SEQ ID NO: 33836 - DNA, 20 bp, Artificial Sequence
  Description of Artificial Sequence: Synthetic oligonucleotide
  Target: SCNA; (+) strand; PAM type: NRG; PAM sequence: CAG
aaaaacattgtattcaaaaa

SEQ ID NO: 33837 - DNA, 20 bp, Artificial Sequence
  Description of Artificial Sequence: Synthetic oligonucleotide
  Target: SCNA; (+) strand; PAM type: NRG; PAM sequence: AGG
aaaacattgtattcaaaaac

SEQ ID NO: 33838 - DNA, 20 bp, Artificial Sequence
  Description of Artificial Sequence: Synthetic oligonucleotide
  Target: SCNA; (+) strand; PAM type: NRG; PAM sequence: AAG
ttcaaaaacaggtgttgatg

SEQ ID NO: 33839 - DNA, 20 bp, Artificial Sequence
  Description of Artificial Sequence: Synthetic oligonucleotide
  Target: SCNA; (+) strand; PAM type: NRG; PAM sequence: AGG
tcaaaaacaggtgttgatga

SEQ ID NO: 33840 - DNA, 20 bp, Artificial Sequence
  Description of Artificial Sequence: Synthetic oligonucleotide
  Target: SCNA; (+) strand; PAM type: NRG; PAM sequence: AAG
aaggtatttactttattcac

SEQ ID NO: 33841 - DNA, 20 bp, Artificial Sequence
  Description of Artificial Sequence: Synthetic oligonucleotide
  Target: SCNA; (+) strand; PAM type: NRG; PAM sequence: CAG
attcacaagtaaactgaaac

SEQ ID NO: 33842 - DNA, 20 bp, Artificial Sequence
  Description of Artificial Sequence: Synthetic oligonucleotide
  Target: SCNA; (+) strand; PAM type: NRG; PAM sequence: GAG
tcacaagtaaactgaaacca

SEQ ID NO: 33843 - DNA, 20 bp, Artificial Sequence
  Description of Artificial Sequence: Synthetic oligonucleotide
  Target: SCNA; (+) strand; PAM type: NRG; PAM sequence: GAG
acaagtaaactgaaaccaga

SEQ ID NO: 33844 - DNA, 20 bp, Artificial Sequence
  Description of Artificial Sequence: Synthetic oligonucleotide
  Target: SCNA; (+) strand; PAM type: NRG; PAM sequence: TGG
accagagagatcacatgatt

SEQ ID NO: 33845 - DNA, 20 bp, Artificial Sequence
  Description of Artificial Sequence: Synthetic oligonucleotide
  Target: SCNA; (+) strand; PAM type: NRG; PAM sequence: CAG
gagatcacatgatttggtca

SEQ ID NO: 33846 - DNA, 20 bp, Artificial Sequence
  Description of Artificial Sequence: Synthetic oligonucleotide
  Target: SCNA; (+) strand; PAM type: NRG; PAM sequence: AGG
agatcacatgatttggtcac

SEQ ID NO: 33847 - DNA, 20 bp, Artificial Sequence
  Description of Artificial Sequence: Synthetic oligonucleotide
  Target: SCNA; (+) strand; PAM type: NRG; PAM sequence: CAG
acatgatttggtcacaggca

SEQ ID NO: 33848 - DNA, 20 bp, Artificial Sequence
  Description of Artificial Sequence: Synthetic oligonucleotide
  Target: SCNA; (+) strand; PAM type: NRG; PAM sequence: CAG
tttggtcacaggcacagcaa

SEQ ID NO: 33849 - DNA, 20 bp, Artificial Sequence
  Description of Artificial Sequence: Synthetic oligonucleotide
  Target: SCNA; (+) strand; PAM type: NRG; PAM sequence: AGG
ttggtcacaggcacagcaac

SEQ ID NO: 33850 - DNA, 20 bp, Artificial Sequence
  Description of Artificial Sequence: Synthetic oligonucleotide
  Target: SCNA; (+) strand; PAM type: NRG; PAM sequence: TAG
gtcacaggcacagcaacagg

SEQ ID NO: 33851 - DNA, 20 bp, Artificial Sequence
  Description of Artificial Sequence: Synthetic oligonucleotide
  Target: SCNA; (+) strand; PAM type: NRG; PAM sequence: AGG
tcacaggcacagcaacaggt

SEQ ID NO: 33852 - DNA, 20 bp, Artificial Sequence
  Description of Artificial Sequence: Synthetic oligonucleotide
  Target: SCNA; (+) strand; PAM type: NRG; PAM sequence: GAG
acaggcacagcaacaggtag

SEQ ID NO: 33853 - DNA, 20 bp, Artificial Sequence
  Description of Artificial Sequence: Synthetic oligonucleotide
  Target: SCNA; (+) strand; PAM type: NRG; PAM sequence: CAG
ggcacagcaacaggtaggag

SEQ ID NO: 33854 - DNA, 20 bp, Artificial Sequence
  Description of Artificial Sequence: Synthetic oligonucleotide
  Target: SCNA; (+) strand; PAM type: NRG; PAM sequence: TGG
gcaacaggtaggagcagatc

SEQ ID NO: 33855 - DNA, 20 bp, Artificial Sequence
  Description of Artificial Sequence: Synthetic oligonucleotide
  Target: SCNA; (+) strand; PAM type: NRG; PAM sequence: GGG
caacaggtaggagcagatct

SEQ ID NO: 33856 - DNA, 20 bp, Artificial Sequence
  Description of Artificial Sequence: Synthetic oligonucleotide
  Target: SCNA; (+) strand; PAM type: NRG; PAM sequence: TAG
tctgggatccaaatccatgt

SEQ ID NO: 33857 - DNA, 20 bp, Artificial Sequence
  Description of Artificial Sequence: Synthetic oligonucleotide
  Target: SCNA; (+) strand; PAM type: NRG; PAM sequence: CAG
aaatccatgttagctatctc

SEQ ID NO: 33858 - DNA, 20 bp, Artificial Sequence
  Description of Artificial Sequence: Synthetic oligonucleotide
  Target: SCNA; (+) strand; PAM type: NRG; PAM sequence: TAG
atgttagctatctccagaca

SEQ ID NO: 33859 - DNA, 20 bp, Artificial Sequence
  Description of Artificial Sequence: Synthetic oligonucleotide
  Target: SCNA; (+) strand; PAM type: NRG; PAM sequence: CAG
ctctccaccaaaacacactt

SEQ ID NO: 33860 - DNA, 20 bp, Artificial Sequence
  Description of Artificial Sequence: Synthetic oligonucleotide
  Target: SCNA; (+) strand; PAM type: NRG; PAM sequence: TGG
ttcagaccacactccaacta

SEQ ID NO: 33861 - DNA, 20 bp, Artificial Sequence
  Description of Artificial Sequence: Synthetic oligonucleotide
  Target: SCNA; (+) strand; PAM type: NRG; PAM sequence: GGG
tcagaccacactccaactat

SEQ ID NO: 33862 - DNA, 20 bp, Artificial Sequence
  Description of Artificial Sequence: Synthetic oligonucleotide
  Target: SCNA; (+) strand; PAM type: NRG; PAM sequence: TGG
cactccaactatgggaccaa

SEQ ID NO: 33863 - DNA, 20 bp, Artificial Sequence
  Description of Artificial Sequence: Synthetic oligonucleotide
  Target: SCNA; (+) strand; PAM type: NRG; PAM sequence: TGG
gccccattgtttattgccta

SEQ ID NO: 33864 - DNA, 20 bp, Artificial Sequence
  Description of Artificial Sequence: Synthetic oligonucleotide
  Target: SCNA; (+) strand; PAM type: NRG; PAM sequence: TGG
ttgtttattgcctatggtaa

SEQ ID NO: 33865 - DNA, 20 bp, Artificial Sequence
  Description of Artificial Sequence: Synthetic oligonucleotide
  Target: SCNA; (+) strand; PAM type: NRG; PAM sequence: GGG
tgtttattgcctatggtaat

SEQ ID NO: 33866 - DNA, 20 bp, Artificial Sequence
  Description of Artificial Sequence: Synthetic oligonucleotide
  Target: SCNA; (+) strand; PAM type: NRG; PAM sequence: AAG
tcattatccttttaaattga

SEQ ID NO: 33867 - DNA, 20 bp, Artificial Sequence
  Description of Artificial Sequence: Synthetic oligonucleotide
  Target: SCNA; (+) strand; PAM type: NRG; PAM sequence: AAG
tatccttttaaattgaaaga

SEQ ID NO: 33868 - DNA, 20 bp, Artificial Sequence
  Description of Artificial Sequence: Synthetic oligonucleotide
  Target: SCNA; (+) strand; PAM type: NRG; PAM sequence: TGG
cttttaaattgaaagaaaga

SEQ ID NO: 33869 - DNA, 20 bp, Artificial Sequence
  Description of Artificial Sequence: Synthetic oligonucleotide
  Target: SCNA; (+) strand; PAM type: NRG; PAM sequence: GGG
ttttaaattgaaagaaagat

SEQ ID NO: 33870 - DNA, 20 bp, Artificial Sequence
  Description of Artificial Sequence: Synthetic oligonucleotide
  Target: SCNA; (+) strand; PAM type: NRG; PAM sequence: TGG
aaattgaaagaaagatggga

SEQ ID NO: 33871 - DNA, 20 bp, Artificial Sequence
  Description of Artificial Sequence: Synthetic oligonucleotide
  Target: SCNA; (+) strand; PAM type: NRG; PAM sequence: GGG
aattgaaagaaagatgggat

SEQ ID NO: 33872 - DNA, 20 bp, Artificial Sequence
  Description of Artificial Sequence: Synthetic oligonucleotide
  Target: SCNA; (+) strand; PAM type: NRG; PAM sequence: TGG
tgaaagaaagatgggatggg

SEQ ID NO: 33873 - DNA, 20 bp, Artificial Sequence
  Description of Artificial Sequence: Synthetic oligonucleotide
  Target: SCNA; (+) strand; PAM type: NRG; PAM sequence: GGG
gaaagaaagatgggatgggt

SEQ ID NO: 33874 - DNA, 20 bp, Artificial Sequence
  Description of Artificial Sequence: Synthetic oligonucleotide
  Target: SCNA; (+) strand; PAM type: NRG; PAM sequence: TAG
agatgggatgggtgggtaaa

SEQ ID NO: 33875 - DNA, 20 bp, Artificial Sequence
  Description of Artificial Sequence: Synthetic oligonucleotide
  Target: SCNA; (+) strand; PAM type: NRG; PAM sequence: CAG
atgggtgggtaaatagatta

SEQ ID NO: 33876 - DNA, 20 bp, Artificial Sequence
  Description of Artificial Sequence: Synthetic oligonucleotide
  Target: SCNA; (+) strand; PAM type: NRG; PAM sequence: CAG
ggtgggtaaatagattacag

SEQ ID NO: 33877 - DNA, 20 bp, Artificial Sequence
  Description of Artificial Sequence: Synthetic oligonucleotide
  Target: SCNA; (+) strand; PAM type: NRG; PAM sequence: AAG
aaatagattacagcagaacc

SEQ ID NO: 33878 - DNA, 20 bp, Artificial Sequence
  Description of Artificial Sequence: Synthetic oligonucleotide
  Target: SCNA; (+) strand; PAM type: NRG; PAM sequence: CAG
tagattacagcagaaccaag

SEQ ID NO: 33879 - DNA, 20 bp, Artificial Sequence
  Description of Artificial Sequence: Synthetic oligonucleotide
  Target: SCNA; (+) strand; PAM type: NRG; PAM sequence: TAG
attacagcagaaccaagcag

SEQ ID NO: 33880 - DNA, 20 bp, Artificial Sequence
  Description of Artificial Sequence: Synthetic oligonucleotide
  Target: SCNA; (+) strand; PAM type: NRG; PAM sequence: TAG
ttgccacacataccaaatat

SEQ ID NO: 33881 - DNA, 20 bp, Artificial Sequence
  Description of Artificial Sequence: Synthetic oligonucleotide
  Target: SCNA; (+) strand; PAM type: NRG; PAM sequence: TAG
ttcatattaaatatcttctc

SEQ ID NO: 33882 - DNA, 20 bp, Artificial Sequence
  Description of Artificial Sequence: Synthetic oligonucleotide
  Target: SCNA; (+) strand; PAM type: NRG; PAM sequence: AGG
tcatattaaatatcttctct

SEQ ID NO: 33883 - DNA, 20 bp, Artificial Sequence
  Description of Artificial Sequence: Synthetic oligonucleotide
  Target: SCNA; (+) strand; PAM type: NRG; PAM sequence: TAG
ctaggtctttatcttcatca

SEQ ID NO: 33884 - DNA, 20 bp, Artificial Sequence
  Description of Artificial Sequence: Synthetic oligonucleotide
  Target: SCNA; (+) strand; PAM type: NRG; PAM sequence: TGG
cacaatgttgtatgatgctc

SEQ ID NO: 33885 - DNA, 20 bp, Artificial Sequence
  Description of Artificial Sequence: Synthetic oligonucleotide
  Target: SCNA; (+) strand; PAM type: NRG; PAM sequence: CAG
aatgttgtatgatgctctgg

SEQ ID NO: 33886 - DNA, 20 bp, Artificial Sequence
  Description of Artificial Sequence: Synthetic oligonucleotide
  Target: SCNA; (+) strand; PAM type: NRG; PAM sequence: TAG
gaaactaaaaactatgcttg

SEQ ID NO: 33887 - DNA, 20 bp, Artificial Sequence
  Description of Artificial Sequence: Synthetic oligonucleotide
  Target: SCNA; (+) strand; PAM type: NRG; PAM sequence: CAG
atgtctcatttatatgacaa

SEQ ID NO: 33888 - DNA, 20 bp, Artificial Sequence
  Description of Artificial Sequence: Synthetic oligonucleotide
  Target: SCNA; (+) strand; PAM type: NRG; PAM sequence: GAG
tatatgacaacagaacgact

SEQ ID NO: 33889 - DNA, 20 bp, Artificial Sequence
  Description of Artificial Sequence: Synthetic oligonucleotide
  Target: SCNA; (+) strand; PAM type: NRG; PAM sequence: TGG
aacagaacgactgagtgaaa

SEQ ID NO: 33890 - DNA, 20 bp, Artificial Sequence
  Description of Artificial Sequence: Synthetic oligonucleotide
  Target: SCNA; (+) strand; PAM type: NRG; PAM sequence: GAG
cagaacgactgagtgaaatg

SEQ ID NO: 33891 - DNA, 20 bp, Artificial Sequence
  Description of Artificial Sequence: Synthetic oligonucleotide
  Target: SCNA; (+) strand; PAM type: NRG; PAM sequence: AAG
gtgaaatggagcttaatatt

SEQ ID NO: 33892 - DNA, 20 bp, Artificial Sequence
  Description of Artificial Sequence: Synthetic oligonucleotide
  Target: SCNA; (+) strand; PAM type: NRG; PAM sequence: AAG
agcttaatattaagtctgtt

SEQ ID NO: 33893 - DNA, 20 bp, Artificial Sequence
  Description of Artificial Sequence: Synthetic oligonucleotide
  Target: SCNA; (+) strand; PAM type: NRG; PAM sequence: GAG
cttaatattaagtctgttaa

SEQ ID NO: 33894 - DNA, 20 bp, Artificial Sequence
  Description of Artificial Sequence: Synthetic oligonucleotide
  Target: SCNA; (+) strand; PAM type: NRG; PAM sequence: AGG
ttaatattaagtctgttaag

SEQ ID NO: 33895 - DNA, 20 bp, Artificial Sequence
  Description of Artificial Sequence: Synthetic oligonucleotide
  Target: SCNA; (+) strand; PAM type: NRG; PAM sequence: TAG
tattaagtctgttaagaggt

SEQ ID NO: 33896 - DNA, 20 bp, Artificial Sequence
  Description of Artificial Sequence: Synthetic oligonucleotide
  Target: SCNA; (+) strand; PAM type: NRG; PAM sequence: AGG
attaagtctgttaagaggtt

SEQ ID NO: 33897 - DNA, 20 bp, Artificial Sequence
  Description of Artificial Sequence: Synthetic oligonucleotide
  Target: SCNA; (+) strand; PAM type: NRG; PAM sequence: GGG
ttaagtctgttaagaggtta

SEQ ID NO: 33898 - DNA, 20 bp, Artificial Sequence
  Description of Artificial Sequence: Synthetic oligonucleotide
  Target: SCNA; (+) strand; PAM type: NRG; PAM sequence: AAG
tctgttaagaggttagggac

SEQ ID NO: 33899 - DNA, 20 bp, Artificial Sequence
  Description of Artificial Sequence: Synthetic oligonucleotide
  Target: SCNA; (+) strand; PAM type: NRG; PAM sequence: AAG
aagaggttagggacaagcca

SEQ ID NO: 33900 - DNA, 20 bp, Artificial Sequence
  Description of Artificial Sequence: Synthetic oligonucleotide
  Target: SCNA; (+) strand; PAM type: NRG; PAM sequence: CAG
ggttagggacaagccaaaga

SEQ ID NO: 33901 - DNA, 20 bp, Artificial Sequence
  Description of Artificial Sequence: Synthetic oligonucleotide
  Target: SCNA; (+) strand; PAM type: NRG; PAM sequence: GAG
ttagggacaagccaaagaca

SEQ ID NO: 33902 - DNA, 20 bp, Artificial Sequence
  Description of Artificial Sequence: Synthetic oligonucleotide
  Target: SCNA; (+) strand; PAM type: NRG; PAM sequence: GAG
ggacaagccaaagacagagt

SEQ ID NO: 33903 - DNA, 20 bp, Artificial Sequence
  Description of Artificial Sequence: Synthetic oligonucleotide
  Target: SCNA; (+) strand; PAM type: NRG; PAM sequence: AAG
tctcaaaaaaaaaaaaaaaa

SEQ ID NO: 33904 - DNA, 20 bp, Artificial Sequence
  Description of Artificial Sequence: Synthetic oligonucleotide
  Target: SCNA; (+) strand; PAM type: NRG; PAM sequence: CAG
aaaaaaaaaaaaaagtaact

SEQ ID NO: 33905 - DNA, 20 bp, Artificial Sequence
  Description of Artificial Sequence: Synthetic oligonucleotide
  Target: SCNA; (+) strand; PAM type: NRG; PAM sequence: GAG
aaaaaaaaaaaagtaactca

SEQ ID NO: 33906 - DNA, 20 bp, Artificial Sequence
  Description of Artificial Sequence: Synthetic oligonucleotide
  Target: SCNA; (+) strand; PAM type: NRG; PAM sequence: AAG
agtaactcagagataaataa

SEQ ID NO: 33907 - DNA, 20 bp, Artificial Sequence
  Description of Artificial Sequence: Synthetic oligonucleotide
  Target: SCNA; (+) strand; PAM type: NRG; PAM sequence: AAG
actcagagataaataaaagt

SEQ ID NO: 33908 - DNA, 20 bp, Artificial Sequence
  Description of Artificial Sequence: Synthetic oligonucleotide
  Target: SCNA; (+) strand; PAM type: NRG; PAM sequence: GAG
gataaataaaagtaagttct

SEQ ID NO: 33909 - DNA, 20 bp, Artificial Sequence
  Description of Artificial Sequence: Synthetic oligonucleotide
  Target: SCNA; (+) strand; PAM type: NRG; PAM sequence: TGG
tgacatccataaatgctttg

SEQ ID NO: 33910 - DNA, 20 bp, Artificial Sequence
  Description of Artificial Sequence: Synthetic oligonucleotide
  Target: SCNA; (+) strand; PAM type: NRG; PAM sequence: TAG
ccataaatgctttgtggcat

SEQ ID NO: 33911 - DNA, 20 bp, Artificial Sequence
  Description of Artificial Sequence: Synthetic oligonucleotide
  Target: SCNA; (+) strand; PAM type: NRG; PAM sequence: AAG
ttgtggcattagatgctgct

SEQ ID NO: 33912 - DNA, 20 bp, Artificial Sequence
  Description of Artificial Sequence: Synthetic oligonucleotide
  Target: SCNA; (+) strand; PAM type: NRG; PAM sequence: GAG
gtggcattagatgctgctaa

SEQ ID NO: 33913 - DNA, 20 bp, Artificial Sequence
  Description of Artificial Sequence: Synthetic oligonucleotide
  Target: SCNA; (+) strand; PAM type: NRG; PAM sequence: AAG
aagagtgaattatttccatg

SEQ ID NO: 33914 - DNA, 20 bp, Artificial Sequence
  Description of Artificial Sequence: Synthetic oligonucleotide
  Target: SCNA; (+) strand; PAM type: NRG; PAM sequence: AAG
tgaattatttccatgaagcc

SEQ ID NO: 33915 - DNA, 20 bp, Artificial Sequence
  Description of Artificial Sequence: Synthetic oligonucleotide
  Target: SCNA; (+) strand; PAM type: NRG; PAM sequence: AAG
atttccatgaagccaagatc

SEQ ID NO: 33916 - DNA, 20 bp, Artificial Sequence
  Description of Artificial Sequence: Synthetic oligonucleotide
  Target: SCNA; (+) strand; PAM type: NRG; PAM sequence: AAG
ccaagatcaagctgttgcac

SEQ ID NO: 33917 - DNA, 20 bp, Artificial Sequence
  Description of Artificial Sequence: Synthetic oligonucleotide
  Target: SCNA; (+) strand; PAM type: NRG; PAM sequence: CAG
aattacttgaaaaaaattcc

SEQ ID NO: 33918 - DNA, 20 bp, Artificial Sequence
  Description of Artificial Sequence: Synthetic oligonucleotide
  Target: SCNA; (+) strand; PAM type: NRG; PAM sequence: TAG
tacttgaaaaaaattcccag

SEQ ID NO: 33919 - DNA, 20 bp, Artificial Sequence
  Description of Artificial Sequence: Synthetic oligonucleotide
  Target: SCNA; (+) strand; PAM type: NRG; PAM sequence: AGG
acttgaaaaaaattcccagt

SEQ ID NO: 33920 - DNA, 20 bp, Artificial Sequence
  Description of Artificial Sequence: Synthetic oligonucleotide
  Target: SCNA; (+) strand; PAM type: NRG; PAM sequence: GGG
cttgaaaaaaattcccagta

SEQ ID NO: 33921 - DNA, 20 bp, Artificial Sequence
  Description of Artificial Sequence: Synthetic oligonucleotide
  Target: SCNA; (+) strand; PAM type: NRG; PAM sequence: GAG
atgtctaaatatatttccat

SEQ ID NO: 33922 - DNA, 20 bp, Artificial Sequence
  Description of Artificial Sequence: Synthetic oligonucleotide
  Target: SCNA; (+) strand; PAM type: NRG; PAM sequence: TAG
taaatatatttccatgagaa

SEQ ID NO: 33923 - DNA, 20 bp, Artificial Sequence
  Description of Artificial Sequence: Synthetic oligonucleotide
  Target: SCNA; (+) strand; PAM type: NRG; PAM sequence: AAG
tagtatatatatttgttata

SEQ ID NO: 33924 - DNA, 20 bp, Artificial Sequence
  Description of Artificial Sequence: Synthetic oligonucleotide
  Target: SCNA; (+) strand; PAM type: NRG; PAM sequence: AGG
agtatatatatttgttataa

SEQ ID NO: 33925 - DNA, 20 bp, Artificial Sequence
  Description of Artificial Sequence: Synthetic oligonucleotide
  Target: SCNA; (+) strand; PAM type: NRG; PAM sequence: TAG
ttgttataaaggtgatgatc

SEQ ID NO: 33926 - DNA, 20 bp, Artificial Sequence
  Description of Artificial Sequence: Synthetic oligonucleotide
  Target: SCNA; (+) strand; PAM type: NRG; PAM sequence: AAG
ataaaggtgatgatctagcc

SEQ ID NO: 33927 - DNA, 20 bp, Artificial Sequence
  Description of Artificial Sequence: Synthetic oligonucleotide
  Target: SCNA; (+) strand; PAM type: NRG; PAM sequence: GAG
aaaggtgatgatctagccaa

SEQ ID NO: 33928 - DNA, 20 bp, Artificial Sequence
  Description of Artificial Sequence: Synthetic oligonucleotide
  Target: SCNA; (+) strand; PAM type: NRG; PAM sequence: AGG
aaggtgatgatctagccaag

SEQ ID NO: 33929 - DNA, 20 bp, Artificial Sequence
  Description of Artificial Sequence: Synthetic oligonucleotide
  Target: SCNA; (+) strand; PAM type: NRG; PAM sequence: GGG
aggtgatgatctagccaaga

SEQ ID NO: 33930 - DNA, 20 bp, Artificial Sequence
  Description of Artificial Sequence: Synthetic oligonucleotide
  Target: SCNA; (+) strand; PAM type: NRG; PAM sequence: AAG
tccactaataaaaaaaatcc

SEQ ID NO: 33931 - DNA, 20 bp, Artificial Sequence
  Description of Artificial Sequence: Synthetic oligonucleotide
  Target: SCNA; (+) strand; PAM type: NRG; PAM sequence: AGG
ccactaataaaaaaaatcca

SEQ ID NO: 33932 - DNA, 20 bp, Artificial Sequence
  Description of Artificial Sequence: Synthetic oligonucleotide
  Target: SCNA; (+) strand; PAM type: NRG; PAM sequence: GAG
actaataaaaaaaatccaag

SEQ ID NO: 33933 - DNA, 20 bp, Artificial Sequence
  Description of Artificial Sequence: Synthetic oligonucleotide
  Target: SCNA; (+) strand; PAM type: NRG; PAM sequence: TGG
aaaaaaatccaaggagcatt

SEQ ID NO: 33934 - DNA, 20 bp, Artificial Sequence
  Description of Artificial Sequence: Synthetic oligonucleotide
  Target: SCNA; (+) strand; PAM type: NRG; PAM sequence: CAG
tccaaggagcatttggataa

SEQ ID NO: 33935 - DNA, 20 bp, Artificial Sequence
  Description of Artificial Sequence: Synthetic oligonucleotide
  Target: SCNA; (+) strand; PAM type: NRG; PAM sequence: TGG
aaggagcatttggataacag

SEQ ID NO: 33936 - DNA, 20 bp, Artificial Sequence
  Description of Artificial Sequence: Synthetic oligonucleotide
  Target: SCNA; (+) strand; PAM type: NRG; PAM sequence: CAG
ggttaaaaaaaattgcaaaa

SEQ ID NO: 33937 - DNA, 20 bp, Artificial Sequence
  Description of Artificial Sequence: Synthetic oligonucleotide
  Target: SCNA; (+) strand; PAM type: NRG; PAM sequence: TGG
aaaaaaaattgcaaaacaga

SEQ ID NO: 33938 - DNA, 20 bp, Artificial Sequence
  Description of Artificial Sequence: Synthetic oligonucleotide
  Target: SCNA; (+) strand; PAM type: NRG; PAM sequence: TGG
aacagatggacttcacattt

SEQ ID NO: 33939 - DNA, 20 bp, Artificial Sequence
  Description of Artificial Sequence: Synthetic oligonucleotide
  Target: SCNA; (+) strand; PAM type: NRG; PAM sequence: GGG
acagatggacttcacatttt

SEQ ID NO: 33940 - DNA, 20 bp, Artificial Sequence
  Description of Artificial Sequence: Synthetic oligonucleotide
  Target: SCNA; (+) strand; PAM type: NRG; PAM sequence: TGG
tttgggcatgactacacacg

SEQ ID NO: 33941 - DNA, 20 bp, Artificial Sequence
  Description of Artificial Sequence: Synthetic oligonucleotide
  Target: SCNA; (+) strand; PAM type: NRG; PAM sequence: CAG
ggcatgactacacacgtggc

SEQ ID NO: 33942 - DNA, 20 bp, Artificial Sequence
  Description of Artificial Sequence: Synthetic oligonucleotide
  Target: SCNA; (+) strand; PAM type: NRG; PAM sequence: CAG
acacgtggccagatcaatcc

SEQ ID NO: 33943 - DNA, 20 bp, Artificial Sequence
  Description of Artificial Sequence: Synthetic oligonucleotide
  Target: SCNA; (+) strand; PAM type: NRG; PAM sequence: TAG
attcttccatgcaaatatgt

SEQ ID NO: 33944 - DNA, 20 bp, Artificial Sequence
  Description of Artificial Sequence: Synthetic oligonucleotide
  Target: SCNA; (+) strand; PAM type: NRG; PAM sequence: TAG
tgcaaatatgttagtgtgat

SEQ ID NO: 33945 - DNA, 20 bp, Artificial Sequence
  Description of Artificial Sequence: Synthetic oligonucleotide
  Target: SCNA; (+) strand; PAM type: NRG; PAM sequence: TAG
ttagtgtgattagttgattg

SEQ ID NO: 33946 - DNA, 20 bp, Artificial Sequence
  Description of Artificial Sequence: Synthetic oligonucleotide
  Target: SCNA; (+) strand; PAM type: NRG; PAM sequence: AGG
tagtgtgattagttgattgt

SEQ ID NO: 33947 - DNA, 20 bp, Artificial Sequence
  Description of Artificial Sequence: Synthetic oligonucleotide
  Target: SCNA; (+) strand; PAM type: NRG; PAM sequence: TGG
ttagttgattgtaggaaatg

SEQ ID NO: 33948 - DNA, 20 bp, Artificial Sequence
  Description of Artificial Sequence: Synthetic oligonucleotide
  Target: SCNA; (+) strand; PAM type: NRG; PAM sequence: TGG
aatatgttttgttcttgtca

SEQ ID NO: 33949 - DNA, 20 bp, Artificial Sequence
  Description of Artificial Sequence: Synthetic oligonucleotide
  Target: SCNA; (+) strand; PAM type: NRG; PAM sequence: CAG
tcttgtcatggttgtaaaaa

SEQ ID NO: 33950 - DNA, 20 bp, Artificial Sequence
  Description of Artificial Sequence: Synthetic oligonucleotide
  Target: SCNA; (+) strand; PAM type: NRG; PAM sequence: TAG
ttgtaaaaacagtctttact

SEQ ID NO: 33951 - DNA, 20 bp, Artificial Sequence
  Description of Artificial Sequence: Synthetic oligonucleotide
  Target: SCNA; (+) strand; PAM type: NRG; PAM sequence: AAG
aaaaacagtctttacttagc

SEQ ID NO: 33952 - DNA, 20 bp, Artificial Sequence
  Description of Artificial Sequence: Synthetic oligonucleotide
  Target: SCNA; (+) strand; PAM type: NRG; PAM sequence: TAG
tacttagcaagtataaatgt

SEQ ID NO: 33953 - DNA, 20 bp, Artificial Sequence
  Description of Artificial Sequence: Synthetic oligonucleotide
  Target: SCNA; (+) strand; PAM type: NRG; PAM sequence: AAG
tagcaagtataaatgttagc

SEQ ID NO: 33954 - DNA, 20 bp, Artificial Sequence
  Description of Artificial Sequence: Synthetic oligonucleotide
  Target: SCNA; (+) strand; PAM type: NRG; PAM sequence: AAG
tatgtttaaacataaaaaat

SEQ ID NO: 33955 - DNA, 20 bp, Artificial Sequence
  Description of Artificial Sequence: Synthetic oligonucleotide
  Target: SCNA; (+) strand; PAM type: NRG; PAM sequence: AAG
cataaaaaataagactaaac

SEQ ID NO: 33956 - DNA, 20 bp, Artificial Sequence
  Description of Artificial Sequence: Synthetic oligonucleotide
  Target: SCNA; (+) strand; PAM type: NRG; PAM sequence: AAG
tgtttttaactataattatc

SEQ ID NO: 33957 - DNA, 20 bp, Artificial Sequence
  Description of Artificial Sequence: Synthetic oligonucleotide
  Target: SCNA; (+) strand; PAM type: NRG; PAM sequence: AAG
ttatcaagtctacaacccaa

SEQ ID NO: 33958 - DNA, 20 bp, Artificial Sequence
  Description of Artificial Sequence: Synthetic oligonucleotide
  Target: SCNA; (+) strand; PAM type: NRG; PAM sequence: TAG
catgatttttaatgatctcg

SEQ ID NO: 33959 - DNA, 20 bp, Artificial Sequence
  Description of Artificial Sequence: Synthetic oligonucleotide
  Target: SCNA; (+) strand; PAM type: NRG; PAM sequence: AAG
aataatgtttcattttactt

SEQ ID NO: 33960 - DNA, 20 bp, Artificial Sequence
  Description of Artificial Sequence: Synthetic oligonucleotide
  Target: SCNA; (+) strand; PAM type: NRG; PAM sequence: TGG
aatgtttcattttacttaag

SEQ ID NO: 33961 - DNA, 20 bp, Artificial Sequence
  Description of Artificial Sequence: Synthetic oligonucleotide
  Target: SCNA; (+) strand; PAM type: NRG; PAM sequence: AAG
tcattttacttaagtggcac

SEQ ID NO: 33962 - DNA, 20 bp, Artificial Sequence
  Description of Artificial Sequence: Synthetic oligonucleotide
  Target: SCNA; (+) strand; PAM type: NRG; PAM sequence: TAG
taagtggcacaagccccctg

SEQ ID NO: 33963 - DNA, 20 bp, Artificial Sequence
  Description of Artificial Sequence: Synthetic oligonucleotide
  Target: SCNA; (+) strand; PAM type: NRG; PAM sequence: AGG
aagtggcacaagccccctgt

SEQ ID NO: 33964 - DNA, 20 bp, Artificial Sequence
  Description of Artificial Sequence: Synthetic oligonucleotide
  Target: SCNA; (+) strand; PAM type: NRG; PAM sequence: GAG
tccgcatactaattcttctt

SEQ ID NO: 33965 - DNA, 20 bp, Artificial Sequence
  Description of Artificial Sequence: Synthetic oligonucleotide
  Target: SCNA; (+) strand; PAM type: NRG; PAM sequence: CAG
attcttcttgagctcactga

SEQ ID NO: 33966 - DNA, 20 bp, Artificial Sequence
  Description of Artificial Sequence: Synthetic oligonucleotide
  Target: SCNA; (+) strand; PAM type: NRG; PAM sequence: AAG
cttcttgagctcactgacag

SEQ ID NO: 33967 - DNA, 20 bp, Artificial Sequence
  Description of Artificial Sequence: Synthetic oligonucleotide
  Target: SCNA; (+) strand; PAM type: NRG; PAM sequence: TAG
atttctatactcccatgatc

SEQ ID NO: 33968 - DNA, 20 bp, Artificial Sequence
  Description of Artificial Sequence: Synthetic oligonucleotide
  Target: SCNA; (+) strand; PAM type: NRG; PAM sequence: TAG
tatactcccatgatctagct

SEQ ID NO: 33969 - DNA, 20 bp, Artificial Sequence
  Description of Artificial Sequence: Synthetic oligonucleotide
  Target: SCNA; (+) strand; PAM type: NRG; PAM sequence: CGG
cttagtttcaaccaaataaa

SEQ ID NO: 33970 - DNA, 20 bp, Artificial Sequence
  Description of Artificial Sequence: Synthetic oligonucleotide
  Target: SCNA; (+) strand; PAM type: NRG; PAM sequence: CAG
tcaaccaaataaacggcatt

SEQ ID NO: 33971 - DNA, 20 bp, Artificial Sequence
  Description of Artificial Sequence: Synthetic oligonucleotide
  Target: SCNA; (+) strand; PAM type: NRG; PAM sequence: AAG
cattcagtttatatttgctg

SEQ ID NO: 33972 - DNA, 20 bp, Artificial Sequence
  Description of Artificial Sequence: Synthetic oligonucleotide
  Target: SCNA; (+) strand; PAM type: NRG; PAM sequence: AGG
attcagtttatatttgctga

SEQ ID NO: 33973 - DNA, 20 bp, Artificial Sequence
  Description of Artificial Sequence: Synthetic oligonucleotide
  Target: SCNA; (+) strand; PAM type: NRG; PAM sequence: GGG
ttcagtttatatttgctgaa

SEQ ID NO: 33974 - DNA, 20 bp, Artificial Sequence
  Description of Artificial Sequence: Synthetic oligonucleotide
  Target: SCNA; (+) strand; PAM type: NRG; PAM sequence: AAG
agtttatatttgctgaaggg

SEQ ID NO: 33975 - DNA, 20 bp, Artificial Sequence
  Description of Artificial Sequence: Synthetic oligonucleotide
  Target: SCNA; (+) strand; PAM type: NRG; PAM sequence: TAG
aagggaagataatctccttc

SEQ ID NO: 33976 - DNA, 20 bp, Artificial Sequence
  Description of Artificial Sequence: Synthetic oligonucleotide
  Target: SCNA; (+) strand; PAM type: NRG; PAM sequence: TAG
gaagataatctccttctagt

SEQ ID NO: 33977 - DNA, 20 bp, Artificial Sequence
  Description of Artificial Sequence: Synthetic oligonucleotide
  Target: SCNA; (+) strand; PAM type: NRG; PAM sequence: CAG
agttagcatctatccacaca

SEQ ID NO: 33978 - DNA, 20 bp, Artificial Sequence
  Description of Artificial Sequence: Synthetic oligonucleotide
  Target: SCNA; (+) strand; PAM type: NRG; PAM sequence: CAG
ccacacacagtgcttaataa

SEQ ID NO: 33979 - DNA, 20 bp, Artificial Sequence
  Description of Artificial Sequence: Synthetic oligonucleotide
  Target: SCNA; (+) strand; PAM type: NRG; PAM sequence: CAG
tgcttaataacagattgtat

SEQ ID NO: 33980 - DNA, 20 bp, Artificial Sequence
  Description of Artificial Sequence: Synthetic oligonucleotide
  Target: SCNA; (+) strand; PAM type: NRG; PAM sequence: GAG
cttaataacagattgtatca

SEQ ID NO: 33981 - DNA, 20 bp, Artificial Sequence
  Description of Artificial Sequence: Synthetic oligonucleotide
  Target: SCNA; (+) strand; PAM type: NRG; PAM sequence: TAG
cagattgtatcagagtttgc

SEQ ID NO: 33982 - DNA, 20 bp, Artificial Sequence
  Description of Artificial Sequence: Synthetic oligonucleotide
  Target: SCNA; (+) strand; PAM type: NRG; PAM sequence: CAG
atctgttctcccttctttgt

SEQ ID NO: 33983 - DNA, 20 bp, Artificial Sequence
  Description of Artificial Sequence: Synthetic oligonucleotide
  Target: SCNA; (+) strand; PAM type: NRG; PAM sequence: AGG
tctgttctcccttctttgtc

SEQ ID NO: 33984 - DNA, 20 bp, Artificial Sequence
  Description of Artificial Sequence: Synthetic oligonucleotide
  Target: SCNA; (+) strand; PAM type: NRG; PAM sequence: GGG
ctgttctcccttctttgtca

SEQ ID NO: 33985 - DNA, 20 bp, Artificial Sequence
  Description of Artificial Sequence: Synthetic oligonucleotide
  Target: SCNA; (+) strand; PAM type: NRG; PAM sequence: TGG
cccttctttgtcagggcata

SEQ ID NO: 33986 - DNA, 20 bp, Artificial Sequence
  Description of Artificial Sequence: Synthetic oligonucleotide
  Target: SCNA; (+) strand; PAM type: NRG; PAM sequence: TGG
tgtctaccttgaataaattg

SEQ ID NO: 33987 - DNA, 20 bp, Artificial Sequence
  Description of Artificial Sequence: Synthetic oligonucleotide
  Target: SCNA; (+) strand; PAM type: NRG; PAM sequence: TGG
taccttgaataaattgtggc

SEQ ID NO: 33988 - DNA, 20 bp, Artificial Sequence
  Description of Artificial Sequence: Synthetic oligonucleotide
  Target: SCNA; (+) strand; PAM type: NRG; PAM sequence: AAG
taaattgtggctggtatcca

SEQ ID NO: 33989 - DNA, 20 bp, Artificial Sequence
  Description of Artificial Sequence: Synthetic oligonucleotide
  Target: SCNA; (+) strand; PAM type: NRG; PAM sequence: AGG
aaattgtggctggtatccaa

SEQ ID NO: 33990 - DNA, 20 bp, Artificial Sequence
  Description of Artificial Sequence: Synthetic oligonucleotide
  Target: SCNA; (+) strand; PAM type: NRG; PAM sequence: GAG
tggctggtatccaaaggaat

SEQ ID NO: 33991 - DNA, 20 bp, Artificial Sequence
  Description of Artificial Sequence: Synthetic oligonucleotide
  Target: SCNA; (+) strand; PAM type: NRG; PAM sequence: AAG
tggtatccaaaggaatgaga

SEQ ID NO: 33992 - DNA, 20 bp, Artificial Sequence
  Description of Artificial Sequence: Synthetic oligonucleotide
  Target: SCNA; (+) strand; PAM type: NRG; PAM sequence: AGG
ggtatccaaaggaatgagaa

SEQ ID NO: 33993 - DNA, 20 bp, Artificial Sequence
  Description of Artificial Sequence: Synthetic oligonucleotide
  Target: SCNA; (+) strand; PAM type: NRG; PAM sequence: AAG
aaataatgtatgctacttcg

SEQ ID NO: 33994 - DNA, 20 bp, Artificial Sequence
  Description of Artificial Sequence: Synthetic oligonucleotide
  Target: SCNA; (+) strand; PAM type: NRG; PAM sequence: TGG
taatgtatgctacttcgaag

SEQ ID NO: 33995 - DNA, 20 bp, Artificial Sequence
  Description of Artificial Sequence: Synthetic oligonucleotide
  Target: SCNA; (+) strand; PAM type: NRG; PAM sequence: GGG
aatgtatgctacttcgaagt

SEQ ID NO: 33996 - DNA, 20 bp, Artificial Sequence
  Description of Artificial Sequence: Synthetic oligonucleotide
  Target: SCNA; (+) strand; PAM type: NRG; PAM sequence: TGG
atgctacttcgaagtgggta

SEQ ID NO: 33997 - DNA, 20 bp, Artificial Sequence
  Description of Artificial Sequence: Synthetic oligonucleotide
  Target: SCNA; (+) strand; PAM type: NRG; PAM sequence: CAG
tgggtatggatgcatcccct

SEQ ID NO: 33998 - DNA, 20 bp, Artificial Sequence
  Description of Artificial Sequence: Synthetic oligonucleotide
  Target: SCNA; (+) strand; PAM type: NRG; PAM sequence: AAG
gtatggatgcatcccctcag

SEQ ID NO: 33999 - DNA, 20 bp, Artificial Sequence
  Description of Artificial Sequence: Synthetic oligonucleotide
  Target: SCNA; (+) strand; PAM type: NRG; PAM sequence: CGG
ggatgcatcccctcagaaga

SEQ ID NO: 34000 - DNA, 20 bp, Artificial Sequence
  Description of Artificial Sequence: Synthetic oligonucleotide
  Target: SCNA; (+) strand; PAM type: NRG; PAM sequence: TGG
tgcatcccctcagaagacgg

SEQ ID NO: 34001 - DNA, 20 bp, Artificial Sequence
  Description of Artificial Sequence: Synthetic oligonucleotide
  Target: SCNA; (+) strand; PAM type: NRG; PAM sequence: GGG
gcatcccctcagaagacggt

SEQ ID NO: 34002 - DNA, 20 bp, Artificial Sequence
  Description of Artificial Sequence: Synthetic oligonucleotide
  Target: SCNA; (+) strand; PAM type: NRG; PAM sequence: GGG
catcccctcagaagacggtg

SEQ ID NO: 34003 - DNA, 20 bp, Artificial Sequence
  Description of Artificial Sequence: Synthetic oligonucleotide
  Target: SCNA; (+) strand; PAM type: NRG; PAM sequence: TGG
aagacggtggggctgcaact

SEQ ID NO: 34004 - DNA, 20 bp, Artificial Sequence
  Description of Artificial Sequence: Synthetic oligonucleotide
  Target: SCNA; (+) strand; PAM type: NRG; PAM sequence: GGG
agacggtggggctgcaactt

SEQ ID NO: 34005 - DNA, 20 bp, Artificial Sequence
  Description of Artificial Sequence: Synthetic oligonucleotide
  Target: SCNA; (+) strand; PAM type: NRG; PAM sequence: GAG
acggtggggctgcaacttgg

SEQ ID NO: 34006 - DNA, 20 bp, Artificial Sequence
  Description of Artificial Sequence: Synthetic oligonucleotide
  Target: SCNA; (+) strand; PAM type: NRG; PAM sequence: AGG
cggtggggctgcaacttggg

SEQ ID NO: 34007 - DNA, 20 bp, Artificial Sequence
  Description of Artificial Sequence: Synthetic oligonucleotide
  Target: SCNA; (+) strand; PAM type: NRG; PAM sequence: GAG
gtggggctgcaacttgggag

SEQ ID NO: 34008 - DNA, 20 bp, Artificial Sequence
  Description of Artificial Sequence: Synthetic oligonucleotide
  Target: SCNA; (+) strand; PAM type: NRG; PAM sequence: TGG
gctgcaacttgggaggagtc

SEQ ID NO: 34009 - DNA, 20 bp, Artificial Sequence
  Description of Artificial Sequence: Synthetic oligonucleotide
  Target: SCNA; (+) strand; PAM type: NRG; PAM sequence: GGG
ctgcaacttgggaggagtct

SEQ ID NO: 34010 - DNA, 20 bp, Artificial Sequence
  Description of Artificial Sequence: Synthetic oligonucleotide
  Target: SCNA; (+) strand; PAM type: NRG; PAM sequence: AAG
ctgggttcctcaatctccct

SEQ ID NO: 34011 - DNA, 20 bp, Artificial Sequence
  Description of Artificial Sequence: Synthetic oligonucleotide
  Target: SCNA; (+) strand; PAM type: NRG; PAM sequence: AGG
tgggttcctcaatctcccta

SEQ ID NO: 34012 - DNA, 20 bp, Artificial Sequence
  Description of Artificial Sequence: Synthetic oligonucleotide
  Target: SCNA; (+) strand; PAM type: NRG; PAM sequence: GGG
gggttcctcaatctccctaa

SEQ ID NO: 34013 - DNA, 20 bp, Artificial Sequence
  Description of Artificial Sequence: Synthetic oligonucleotide
  Target: SCNA; (+) strand; PAM type: NRG; PAM sequence: GAG
gttcctcaatctccctaagg

SEQ ID NO: 34014 - DNA, 20 bp, Artificial Sequence
  Description of Artificial Sequence: Synthetic oligonucleotide
  Target: SCNA; (+) strand; PAM type: NRG; PAM sequence: TGG
cctgccaaaaacacctacca

SEQ ID NO: 34015 - DNA, 20 bp, Artificial Sequence
  Description of Artificial Sequence: Synthetic oligonucleotide
  Target: SCNA; (+) strand; PAM type: NRG; PAM sequence: GAG
taccatggacttatgtgaat

SEQ ID NO: 34016 - DNA, 20 bp, Artificial Sequence
  Description of Artificial Sequence: Synthetic oligonucleotide
  Target: SCNA; (+) strand; PAM type: NRG; PAM sequence: GAG
aatcaacctctactgtgttt

SEQ ID NO: 34017 - DNA, 20 bp, Artificial Sequence
  Description of Artificial Sequence: Synthetic oligonucleotide
  Target: SCNA; (+) strand; PAM type: NRG; PAM sequence: CAG
atttaacactatttaatata

SEQ ID NO: 34018 - DNA, 20 bp, Artificial Sequence
  Description of Artificial Sequence: Synthetic oligonucleotide
  Target: SCNA; (+) strand; PAM type: NRG; PAM sequence: CAG
ctatttaatatacagatgtt

SEQ ID NO: 34019 - DNA, 20 bp, Artificial Sequence
  Description of Artificial Sequence: Synthetic oligonucleotide
  Target: SCNA; (+) strand; PAM type: NRG; PAM sequence: TAG
tttaatatacagatgttcag

SEQ ID NO: 34020 - DNA, 20 bp, Artificial Sequence
  Description of Artificial Sequence: Synthetic oligonucleotide
  Target: SCNA; (+) strand; PAM type: NRG; PAM sequence: AAG
agatgttcactaaatgaatt

SEQ ID NO: 34021 - DNA, 20 bp, Artificial Sequence
  Description of Artificial Sequence: Synthetic oligonucleotide
  Target: SCNA; (+) strand; PAM type: NRG; PAM sequence: TAG
ctaaatgaattaagtttttg

SEQ ID NO: 34022 - DNA, 20 bp, Artificial Sequence
  Description of Artificial Sequence: Synthetic oligonucleotide
  Target: SCNA; (+) strand; PAM type: NRG; PAM sequence: AAG
ttttgtagtttgattttctg

SEQ ID NO: 34023 - DNA, 20 bp, Artificial Sequence
  Description of Artificial Sequence: Synthetic oligonucleotide
  Target: SCNA; (+) strand; PAM type: NRG; PAM sequence: CAG
attttctgaagaatttgaaa

SEQ ID NO: 34024 - DNA, 20 bp, Artificial Sequence
  Description of Artificial Sequence: Synthetic oligonucleotide
  Target: SCNA; (+) strand; PAM type: NRG; PAM sequence: TAG
tttgaaacagatcaaatgta

SEQ ID NO: 34025 - DNA, 20 bp, Artificial Sequence
  Description of Artificial Sequence: Synthetic oligonucleotide
  Target: SCNA; (+) strand; PAM type: NRG; PAM sequence: GAG
tgaaacagatcaaatgtata

SEQ ID NO: 34026 - DNA, 20 bp, Artificial Sequence
  Description of Artificial Sequence: Synthetic oligonucleotide
  Target: SCNA; (+) strand; PAM type: NRG; PAM sequence: AAG
aacagatcaaatgtatagag

SEQ ID NO: 34027 - DNA, 20 bp, Artificial Sequence
  Description of Artificial Sequence: Synthetic oligonucleotide
  Target: SCNA; (+) strand; PAM type: NRG; PAM sequence: AAG
caaatgtatagagaagtttc

SEQ ID NO: 34028 - DNA, 20 bp, Artificial Sequence
  Description of Artificial Sequence: Synthetic oligonucleotide
  Target: SCNA; (+) strand; PAM type: NRG; PAM sequence: CAG
gtatagagaagtttcaagaa

SEQ ID NO: 34029 - DNA, 20 bp, Artificial Sequence
  Description of Artificial Sequence: Synthetic oligonucleotide
  Target: SCNA; (+) strand; PAM type: NRG; PAM sequence: AAG
agaagtttcaagaacagtca

SEQ ID NO: 34030 - DNA, 20 bp, Artificial Sequence
  Description of Artificial Sequence: Synthetic oligonucleotide
  Target: SCNA; (+) strand; PAM type: NRG; PAM sequence: GAG
aagtttcaagaacagtcaaa

SEQ ID NO: 34031 - DNA, 20 bp, Artificial Sequence
  Description of Artificial Sequence: Synthetic oligonucleotide
  Target: SCNA; (+) strand; PAM type: NRG; PAM sequence: CAG
gtccctctatccacttcacc

SEQ ID NO: 34032 - DNA, 20 bp, Artificial Sequence
  Description of Artificial Sequence: Synthetic oligonucleotide
  Target: SCNA; (+) strand; PAM type: NRG; PAM sequence: TGG
tgctccctctgcctaacaca

SEQ ID NO: 34033 - DNA, 20 bp, Artificial Sequence
  Description of Artificial Sequence: Synthetic oligonucleotide
  Target: SCNA; (+) strand; PAM type: NRG; PAM sequence: GAG
atgtatttgtgcgtgtgtgt

SEQ ID NO: 34034 - DNA, 20 bp, Artificial Sequence
  Description of Artificial Sequence: Synthetic oligonucleotide
  Target: SCNA; (+) strand; PAM type: NRG; PAM sequence: GAG
gtatttgtgcgtgtgtgtga

SEQ ID NO: 34035 - DNA, 20 bp, Artificial Sequence
  Description of Artificial Sequence: Synthetic oligonucleotide
  Target: SCNA; (+) strand; PAM type: NRG; PAM sequence: CAG
tgtgtgtgcgtatctttttc

SEQ ID NO: 34036 - DNA, 20 bp, Artificial Sequence
  Description of Artificial Sequence: Synthetic oligonucleotide
  Target: SCNA; (+) strand; PAM type: NRG; PAM sequence: TGG
cgtatctttttccagcacaa

SEQ ID NO: 34037 - DNA, 20 bp, Artificial Sequence
  Description of Artificial Sequence: Synthetic oligonucleotide
  Target: SCNA; (+) strand; PAM type: NRG; PAM sequence: AAG
cacaatggtgcattaaccct

SEQ ID NO: 34038 - DNA, 20 bp, Artificial Sequence
  Description of Artificial Sequence: Synthetic oligonucleotide
  Target: SCNA; (+) strand; PAM type: NRG; PAM sequence: CAG
tgcattaaccctaagtactt

SEQ ID NO: 34039 - DNA, 20 bp, Artificial Sequence
  Description of Artificial Sequence: Synthetic oligonucleotide
  Target: SCNA; (+) strand; PAM type: NRG; PAM sequence: AAG
ttaaccctaagtacttcagt

SEQ ID NO: 34040 - DNA, 20 bp, Artificial Sequence
  Description of Artificial Sequence: Synthetic oligonucleotide
  Target: SCNA; (+) strand; PAM type: NRG; PAM sequence: AAG
cttcagtaagtacctctcta

SEQ ID NO: 34041 - DNA, 20 bp, Artificial Sequence
  Description of Artificial Sequence: Synthetic oligonucleotide
  Target: SCNA; (+) strand; PAM type: NRG; PAM sequence: AAG
agtaagtacctctctaaagc

SEQ ID NO: 34042 - DNA, 20 bp, Artificial Sequence
  Description of Artificial Sequence: Synthetic oligonucleotide
  Target: SCNA; (+) strand; PAM type: NRG; PAM sequence: AGG
gtaagtacctctctaaagca

SEQ ID NO: 34043 - DNA, 20 bp, Artificial Sequence
  Description of Artificial Sequence: Synthetic oligonucleotide
  Target: SCNA; (+) strand; PAM type: NRG; PAM sequence: CAG
cactgtaaaactgtcacaac

SEQ ID NO: 34044 - DNA, 20 bp, Artificial Sequence
  Description of Artificial Sequence: Synthetic oligonucleotide
  Target: SCNA; (+) strand; PAM type: NRG; PAM sequence: AGG
actgtaaaactgtcacaacc

SEQ ID NO: 34045 - DNA, 20 bp, Artificial Sequence
  Description of Artificial Sequence: Synthetic oligonucleotide
  Target: SCNA; (+) strand; PAM type: NRG; PAM sequence: AAG
gtaaaactgtcacaaccagg

SEQ ID NO: 34046 - DNA, 20 bp, Artificial Sequence
  Description of Artificial Sequence: Synthetic oligonucleotide
  Target: SCNA; (+) strand; PAM type: NRG; PAM sequence: TAG
aaccaggaagtcaacactga

SEQ ID NO: 34047 - DNA, 20 bp, Artificial Sequence
  Description of Artificial Sequence: Synthetic oligonucleotide
  Target: SCNA; (+) strand; PAM type: NRG; PAM sequence: AAG
ctgatagaacactgccatcc

SEQ ID NO: 34048 - DNA, 20 bp, Artificial Sequence
  Description of Artificial Sequence: Synthetic oligonucleotide
  Target: SCNA; (+) strand; PAM type: NRG; PAM sequence: CAG
tagaacactgccatccaagc

SEQ ID NO: 34049 - DNA, 20 bp, Artificial Sequence
  Description of Artificial Sequence: Synthetic oligonucleotide
  Target: SCNA; (+) strand; PAM type: NRG; PAM sequence: GAG
gaacactgccatccaagcca

SEQ ID NO: 34050 - DNA, 20 bp, Artificial Sequence
  Description of Artificial Sequence: Synthetic oligonucleotide
  Target: SCNA; (+) strand; PAM type: NRG; PAM sequence: AGG
aacactgccatccaagccag

SEQ ID NO: 34051 - DNA, 20 bp, Artificial Sequence
  Description of Artificial Sequence: Synthetic oligonucleotide
  Target: SCNA; (+) strand; PAM type: NRG; PAM sequence: TGG
ttaaattattatgtgcttat

SEQ ID NO: 34052 - DNA, 20 bp, Artificial Sequence
  Description of Artificial Sequence: Synthetic oligonucleotide
  Target: SCNA; (+) strand; PAM type: NRG; PAM sequence: GGG
taaattattatgtgcttatt

SEQ ID NO: 34053 - DNA, 20 bp, Artificial Sequence
  Description of Artificial Sequence: Synthetic oligonucleotide
  Target: SCNA; (+) strand; PAM type: NRG; PAM sequence: TGG
gtgcttattgggtgctcaat

SEQ ID NO: 34054 - DNA, 20 bp, Artificial Sequence
  Description of Artificial Sequence: Synthetic oligonucleotide
  Target: SCNA; (+) strand; PAM type: NRG; PAM sequence: GGG
tgcttattgggtgctcaatt

SEQ ID NO: 34055 - DNA, 20 bp, Artificial Sequence
  Description of Artificial Sequence: Synthetic oligonucleotide
  Target: SCNA; (+) strand; PAM type: NRG; PAM sequence: CAG
tgggtgctcaattgggtgtt

SEQ ID NO: 34056 - DNA, 20 bp, Artificial Sequence
  Description of Artificial Sequence: Synthetic oligonucleotide
  Target: SCNA; (+) strand; PAM type: NRG; PAM sequence: AAG
aattgggtgttcagcatgac

SEQ ID NO: 34057 - DNA, 20 bp, Artificial Sequence
  Description of Artificial Sequence: Synthetic oligonucleotide
  Target: SCNA; (+) strand; PAM type: NRG; PAM sequence: TGG
cataaccaccataatcatcc

SEQ ID NO: 34058 - DNA, 20 bp, Artificial Sequence
  Description of Artificial Sequence: Synthetic oligonucleotide
  Target: SCNA; (+) strand; PAM type: NRG; PAM sequence: TAG
ctcttttccctcctacttcc

SEQ ID NO: 34059 - DNA, 20 bp, Artificial Sequence
  Description of Artificial Sequence: Synthetic oligonucleotide
  Target: SCNA; (+) strand; PAM type: NRG; PAM sequence: AGG
tcttttccctcctacttcct

SEQ ID NO: 34060 - DNA, 20 bp, Artificial Sequence
  Description of Artificial Sequence: Synthetic oligonucleotide
  Target: SCNA; (+) strand; PAM type: NRG; PAM sequence: TGG
cctcctacttcctaggctgc

SEQ ID NO: 34061 - DNA, 20 bp, Artificial Sequence
  Description of Artificial Sequence: Synthetic oligonucleotide
  Target: SCNA; (+) strand; PAM type: NRG; PAM sequence: GGG
ctcctacttcctaggctgct

SEQ ID NO: 34062 - DNA, 20 bp, Artificial Sequence
  Description of Artificial Sequence: Synthetic oligonucleotide
  Target: SCNA; (+) strand; PAM type: NRG; PAM sequence: CAG
catctccttcctccccctgt

SEQ ID NO: 34063 - DNA, 20 bp, Artificial Sequence
  Description of Artificial Sequence: Synthetic oligonucleotide
  Target: SCNA; (+) strand; PAM type: NRG; PAM sequence: CAG
ctccttcctccccctgtcag

SEQ ID NO: 34064 - DNA, 20 bp, Artificial Sequence
  Description of Artificial Sequence: Synthetic oligonucleotide
  Target: SCNA; (+) strand; PAM type: NRG; PAM sequence: CAG
cccctgtcagcagccttgct

SEQ ID NO: 34065 - DNA, 20 bp, Artificial Sequence
  Description of Artificial Sequence: Synthetic oligonucleotide
  Target: SCNA; (+) strand; PAM type: NRG; PAM sequence: CAG
cttgctcagacatcaaccac

SEQ ID NO: 34066 - DNA, 20 bp, Artificial Sequence
  Description of Artificial Sequence: Synthetic oligonucleotide
  Target: SCNA; (+) strand; PAM type: NRG; PAM sequence: TGG
ccagtgtttgcatgtcccca

SEQ ID NO: 34067 - DNA, 20 bp, Artificial Sequence
  Description of Artificial Sequence: Synthetic oligonucleotide
  Target: SCNA; (+) strand; PAM type: NRG; PAM sequence: AAG
tgtttgcatgtccccatggc

SEQ ID NO: 34068 - DNA, 20 bp, Artificial Sequence
  Description of Artificial Sequence: Synthetic oligonucleotide
  Target: SCNA; (+) strand; PAM type: NRG; PAM sequence: AAG
catgtccccatggcaagaac

SEQ ID NO: 34069 - DNA, 20 bp, Artificial Sequence
  Description of Artificial Sequence: Synthetic oligonucleotide
  Target: SCNA; (+) strand; PAM type: NRG; PAM sequence: AGG
atgtccccatggcaagaaca

SEQ ID NO: 34070 - DNA, 20 bp, Artificial Sequence
  Description of Artificial Sequence: Synthetic oligonucleotide
  Target: SCNA; (+) strand; PAM type: NRG; PAM sequence: GGG
tgtccccatggcaagaacaa

SEQ ID NO: 34071 - DNA, 20 bp, Artificial Sequence
  Description of Artificial Sequence: Synthetic oligonucleotide
  Target: SCNA; (+) strand; PAM type: NRG; PAM sequence: GGG
gtccccatggcaagaacaag

SEQ ID NO: 34072 - DNA, 20 bp, Artificial Sequence
  Description of Artificial Sequence: Synthetic oligonucleotide
  Target: SCNA; (+) strand; PAM type: NRG; PAM sequence: GGG
tccccatggcaagaacaagg

SEQ ID NO: 34073 - DNA, 20 bp, Artificial Sequence
  Description of Artificial Sequence: Synthetic oligonucleotide
  Target: SCNA; (+) strand; PAM type: NRG; PAM sequence: AAG
ccatggcaagaacaaggggg

SEQ ID NO: 34074 - DNA, 20 bp, Artificial Sequence
  Description of Artificial Sequence: Synthetic oligonucleotide
  Target: SCNA; (+) strand; PAM type: NRG; PAM sequence: AGG
catggcaagaacaaggggga

SEQ ID NO: 34075 - DNA, 20 bp, Artificial Sequence
  Description of Artificial Sequence: Synthetic oligonucleotide
  Target: SCNA; (+) strand; PAM type: NRG; PAM sequence: GGG
atggcaagaacaagggggaa

SEQ ID NO: 34076 - DNA, 20 bp, Artificial Sequence
  Description of Artificial Sequence: Synthetic oligonucleotide
  Target: SCNA; (+) strand; PAM type: NRG; PAM sequence: GAG
ggcaagaacaagggggaagg

SEQ ID NO: 34077 - DNA, 20 bp, Artificial Sequence
  Description of Artificial Sequence: Synthetic oligonucleotide
  Target: SCNA; (+) strand; PAM type: NRG; PAM sequence: TAG
aagaacaagggggaagggag

SEQ ID NO: 34078 - DNA, 20 bp, Artificial Sequence
  Description of Artificial Sequence: Synthetic oligonucleotide
  Target: SCNA; (+) strand; PAM type: NRG; PAM sequence: AGG
agaacaagggggaagggagt

SEQ ID NO: 34079 - DNA, 20 bp, Artificial Sequence
  Description of Artificial Sequence: Synthetic oligonucleotide
  Target: SCNA; (+) strand; PAM type: NRG; PAM sequence: GAG
aacaagggggaagggagtag

SEQ ID NO: 34080 - DNA, 20 bp, Artificial Sequence
  Description of Artificial Sequence: Synthetic oligonucleotide
  Target: SCNA; (+) strand; PAM type: NRG; PAM sequence: AGG
acaagggggaagggagtagg

SEQ ID NO: 34081 - DNA, 20 bp, Artificial Sequence
  Description of Artificial Sequence: Synthetic oligonucleotide
  Target: SCNA; (+) strand; PAM type: NRG; PAM sequence: GGG
caagggggaagggagtagga

SEQ ID NO: 34082 - DNA, 20 bp, Artificial Sequence
  Description of Artificial Sequence: Synthetic oligonucleotide
  Target: SCNA; (+) strand; PAM type: NRG; PAM sequence: TAG
aagggagtaggagggaaaat

SEQ ID NO: 34083 - DNA, 20 bp, Artificial Sequence
  Description of Artificial Sequence: Synthetic oligonucleotide
  Target: SCNA; (+) strand; PAM type: NRG; PAM sequence: AAG
gagtaggagggaaaattagt

SEQ ID NO: 34084 - DNA, 20 bp, Artificial Sequence
  Description of Artificial Sequence: Synthetic oligonucleotide
  Target: SCNA; (+) strand; PAM type: NRG; PAM sequence: AGG
agtaggagggaaaattagta

SEQ ID NO: 34085 - DNA, 20 bp, Artificial Sequence
  Description of Artificial Sequence: Synthetic oligonucleotide
  Target: SCNA; (+) strand; PAM type: NRG; PAM sequence: AAG
gagggaaaattagtaaggac

SEQ ID NO: 34086 - DNA, 20 bp, Artificial Sequence
  Description of Artificial Sequence: Synthetic oligonucleotide
  Target: SCNA; (+) strand; PAM type: NRG; PAM sequence: AGG
agggaaaattagtaaggaca

SEQ ID NO: 34087 - DNA, 20 bp, Artificial Sequence
  Description of Artificial Sequence: Synthetic oligonucleotide
  Target: SCNA; (+) strand; PAM type: NRG; PAM sequence: GGG
gggaaaattagtaaggacaa

SEQ ID NO: 34088 - DNA, 20 bp, Artificial Sequence
  Description of Artificial Sequence: Synthetic oligonucleotide
  Target: SCNA; (+) strand; PAM type: NRG; PAM sequence: AAG
aaaattagtaaggacaaggg

SEQ ID NO: 34089 - DNA, 20 bp, Artificial Sequence
  Description of Artificial Sequence: Synthetic oligonucleotide
  Target: SCNA; (+) strand; PAM type: NRG; PAM sequence: AGG
aaattagtaaggacaaggga

SEQ ID NO: 34090 - DNA, 20 bp, Artificial Sequence
  Description of Artificial Sequence: Synthetic oligonucleotide
  Target: SCNA; (+) strand; PAM type: NRG; PAM sequence: TGG
ttagtaaggacaagggaagg

SEQ ID NO: 34091 - DNA, 20 bp, Artificial Sequence
  Description of Artificial Sequence: Synthetic oligonucleotide
  Target: SCNA; (+) strand; PAM type: NRG; PAM sequence: AAG
ttaatataatgctacgtgaa

SEQ ID NO: 34092 - DNA, 20 bp, Artificial Sequence
  Description of Artificial Sequence: Synthetic oligonucleotide
  Target: SCNA; (+) strand; PAM type: NRG; PAM sequence: CAG
tgctacgtgaaaagaaatgc

SEQ ID NO: 34093 - DNA, 20 bp, Artificial Sequence
  Description of Artificial Sequence: Synthetic oligonucleotide
  Target: SCNA; (+) strand; PAM type: NRG; PAM sequence: AAG
acgtgaaaagaaatgccaga

SEQ ID NO: 34094 - DNA, 20 bp, Artificial Sequence
  Description of Artificial Sequence: Synthetic oligonucleotide
  Target: SCNA; (+) strand; PAM type: NRG; PAM sequence: TGG
agtaacattctgaaaatcac

SEQ ID NO: 34095 - DNA, 20 bp, Artificial Sequence
  Description of Artificial Sequence: Synthetic oligonucleotide
  Target: SCNA; (+) strand; PAM type: NRG; PAM sequence: AAG
attctgaaaatcactggtaa

SEQ ID NO: 34096 - DNA, 20 bp, Artificial Sequence
  Description of Artificial Sequence: Synthetic oligonucleotide
  Target: SCNA; (+) strand; PAM type: NRG; PAM sequence: AAG
cactggtaaaagcatcccca

SEQ ID NO: 34097 - DNA, 20 bp, Artificial Sequence
  Description of Artificial Sequence: Synthetic oligonucleotide
  Target: SCNA; (+) strand; PAM type: NRG; PAM sequence: TGG
tccccaaagtctacctgata

SEQ ID NO: 34098 - DNA, 20 bp, Artificial Sequence
  Description of Artificial Sequence: Synthetic oligonucleotide
  Target: SCNA; (+) strand; PAM type: NRG; PAM sequence: GAG
ttaaattcattaaaaattct

SEQ ID NO: 34099 - DNA, 20 bp, Artificial Sequence
  Description of Artificial Sequence: Synthetic oligonucleotide
  Target: SCNA; (+) strand; PAM type: NRG; PAM sequence: AAG
tcattaaaaattctgagttt

SEQ ID NO: 34100 - DNA, 20 bp, Artificial Sequence
  Description of Artificial Sequence: Synthetic oligonucleotide
  Target: SCNA; (+) strand; PAM type: NRG; PAM sequence: CAG
aaattctgagtttaagaaaa

SEQ ID NO: 34101 - DNA, 20 bp, Artificial Sequence
  Description of Artificial Sequence: Synthetic oligonucleotide
  Target: SCNA; (+) strand; PAM type: NRG; PAM sequence: AAG
ctgagtttaagaaaacagct

SEQ ID NO: 34102 - DNA, 20 bp, Artificial Sequence
  Description of Artificial Sequence: Synthetic oligonucleotide
  Target: SCNA; (+) strand; PAM type: NRG; PAM sequence: GAG
gagtttaagaaaacagctaa

SEQ ID NO: 34103 - DNA, 20 bp, Artificial Sequence
  Description of Artificial Sequence: Synthetic oligonucleotide
  Target: SCNA; (+) strand; PAM type: NRG; PAM sequence: AGG
agtttaagaaaacagctaag

SEQ ID NO: 34104 - DNA, 20 bp, Artificial Sequence
  Description of Artificial Sequence: Synthetic oligonucleotide
  Target: SCNA; (+) strand; PAM type: NRG; PAM sequence: GAG
aagaaaacagctaagaggtt

SEQ ID NO: 34105 - DNA, 20 bp, Artificial Sequence
  Description of Artificial Sequence: Synthetic oligonucleotide
  Target: SCNA; (+) strand; PAM type: NRG; PAM sequence: CAG
cagctaagaggttgagaaat

SEQ ID NO: 34106 - DNA, 20 bp, Artificial Sequence
  Description of Artificial Sequence: Synthetic oligonucleotide
  Target: SCNA; (+) strand; PAM type: NRG; PAM sequence: GAG
gctaagaggttgagaaatca

SEQ ID NO: 34107 - DNA, 20 bp, Artificial Sequence
  Description of Artificial Sequence: Synthetic oligonucleotide
  Target: SCNA; (+) strand; PAM type: NRG; PAM sequence: TGG
agaggttgagaaatcagagt

SEQ ID NO: 34108 - DNA, 20 bp, Artificial Sequence
  Description of Artificial Sequence: Synthetic oligonucleotide
  Target: SCNA; (+) strand; PAM type: NRG; PAM sequence: CAG
ttacaattctccttgctgac

SEQ ID NO: 34109 - DNA, 20 bp, Artificial Sequence
  Description of Artificial Sequence: Synthetic oligonucleotide
  Target: SCNA; (+) strand; PAM type: NRG; PAM sequence: TGG
ccttgctgaccagcatcttt

SEQ ID NO: 34110 - DNA, 20 bp, Artificial Sequence
  Description of Artificial Sequence: Synthetic oligonucleotide
  Target: SCNA; (+) strand; PAM type: NRG; PAM sequence: CAG
ttggctgcctctcaaaataa

SEQ ID NO: 34111 - DNA, 20 bp, Artificial Sequence
  Description of Artificial Sequence: Synthetic oligonucleotide
  Target: SCNA; (+) strand; PAM type: NRG; PAM sequence: AGG
tggctgcctctcaaaataac

SEQ ID NO: 34112 - DNA, 20 bp, Artificial Sequence
  Description of Artificial Sequence: Synthetic oligonucleotide
  Target: SCNA; (+) strand; PAM type: NRG; PAM sequence: AAG
gcctctcaaaataacaggat

SEQ ID NO: 34113 - DNA, 20 bp, Artificial Sequence
  Description of Artificial Sequence: Synthetic oligonucleotide
  Target: SCNA; (+) strand; PAM type: NRG; PAM sequence: AGG
cctctcaaaataacaggata

SEQ ID NO: 34114 - DNA, 20 bp, Artificial Sequence
  Description of Artificial Sequence: Synthetic oligonucleotide
  Target: SCNA; (+) strand; PAM type: NRG; PAM sequence: TGG
acaaaactgaattcttcact

SEQ ID NO: 34115 - DNA, 20 bp, Artificial Sequence
  Description of Artificial Sequence: Synthetic oligonucleotide
  Target: SCNA; (+) strand; PAM type: NRG; PAM sequence: TAG
ttgcttataaaatatcttcc

SEQ ID NO: 34116 - DNA, 20 bp, Artificial Sequence
  Description of Artificial Sequence: Synthetic oligonucleotide
  Target: SCNA; (+) strand; PAM type: NRG; PAM sequence: AGG
tgcttataaaatatcttcct

SEQ ID NO: 34117 - DNA, 20 bp, Artificial Sequence
  Description of Artificial Sequence: Synthetic oligonucleotide
  Target: SCNA; (+) strand; PAM type: NRG; PAM sequence: GAG
taaaatatcttcctaggctt

SEQ ID NO: 34118 - DNA, 20 bp, Artificial Sequence
  Description of Artificial Sequence: Synthetic oligonucleotide
  Target: SCNA; (+) strand; PAM type: NRG; PAM sequence: CAG
atatcttcctaggcttgaga

SEQ ID NO: 34119 - DNA, 20 bp, Artificial Sequence
  Description of Artificial Sequence: Synthetic oligonucleotide
  Target: SCNA; (+) strand; PAM type: NRG; PAM sequence: TAG
ttcctaggcttgagacagtc

SEQ ID NO: 34120 - DNA, 20 bp, Artificial Sequence
  Description of Artificial Sequence: Synthetic oligonucleotide
  Target: SCNA; (+) strand; PAM type: NRG; PAM sequence: GAG
cctaggcttgagacagtcta

SEQ ID NO: 34121 - DNA, 20 bp, Artificial Sequence
  Description of Artificial Sequence: Synthetic oligonucleotide
  Target: SCNA; (+) strand; PAM type: NRG; PAM sequence: GAG
agacagtctagagaccacct

SEQ ID NO: 34122 - DNA, 20 bp, Artificial Sequence
  Description of Artificial Sequence: Synthetic oligonucleotide
  Target: SCNA; (+) strand; PAM type: NRG; PAM sequence: GAG
gaacactgaatgttcctttt

SEQ ID NO: 34123 - DNA, 20 bp, Artificial Sequence
  Description of Artificial Sequence: Synthetic oligonucleotide
  Target: SCNA; (+) strand; PAM type: NRG; PAM sequence: CAG
gaatgttccttttgagtatc

SEQ ID NO: 34124 - DNA, 20 bp, Artificial Sequence
  Description of Artificial Sequence: Synthetic oligonucleotide
  Target: SCNA; (+) strand; PAM type: NRG; PAM sequence: TAG
tgttccttttgagtatccag

SEQ ID NO: 34125 - DNA, 20 bp, Artificial Sequence
  Description of Artificial Sequence: Synthetic oligonucleotide
  Target: SCNA; (+) strand; PAM type: NRG; PAM sequence: AAG
gcataactcacactgtcaac

SEQ ID NO: 34126 - DNA, 20 bp, Artificial Sequence
  Description of Artificial Sequence: Synthetic oligonucleotide
  Target: SCNA; (+) strand; PAM type: NRG; PAM sequence: AGG
cataactcacactgtcaaca

SEQ ID NO: 34127 - DNA, 20 bp, Artificial Sequence
  Description of Artificial Sequence: Synthetic oligonucleotide
  Target: SCNA; (+) strand; PAM type: NRG; PAM sequence: TAG
atcacaaaccaaacactgct

SEQ ID NO: 34128 - DNA, 20 bp, Artificial Sequence
  Description of Artificial Sequence: Synthetic oligonucleotide
  Target: SCNA; (+) strand; PAM type: NRG; PAM sequence: AAG
tagttataaaatatatgtgt

SEQ ID NO: 34129 - DNA, 20 bp, Artificial Sequence
  Description of Artificial Sequence: Synthetic oligonucleotide
  Target: SCNA; (+) strand; PAM type: NRG; PAM sequence: AAG
caacataattttttttgtca

SEQ ID NO: 34130 - DNA, 20 bp, Artificial Sequence
  Description of Artificial Sequence: Synthetic oligonucleotide
  Target: SCNA; (+) strand; PAM type: NRG; PAM sequence: AAG
taattttttttgtcaaagca

SEQ ID NO: 34131 - DNA, 20 bp, Artificial Sequence
  Description of Artificial Sequence: Synthetic oligonucleotide
  Target: SCNA; (+) strand; PAM type: NRG; PAM sequence: TAG
aaagatttttctccaaaata

SEQ ID NO: 34132 - DNA, 20 bp, Artificial Sequence
  Description of Artificial Sequence: Synthetic oligonucleotide
  Target: SCNA; (+) strand; PAM type: NRG; PAM sequence: CAG
ttttctccaaaatatagcta

SEQ ID NO: 34133 - DNA, 20 bp, Artificial Sequence
  Description of Artificial Sequence: Synthetic oligonucleotide
  Target: SCNA; (+) strand; PAM type: NRG; PAM sequence: AAG
tctccaaaatatagctacag

SEQ ID NO: 34134 - DNA, 20 bp, Artificial Sequence
  Description of Artificial Sequence: Synthetic oligonucleotide
  Target: SCNA; (+) strand; PAM type: NRG; PAM sequence: AAG
aaaatatagctacagaagaa

SEQ ID NO: 34135 - DNA, 20 bp, Artificial Sequence
  Description of Artificial Sequence: Synthetic oligonucleotide
  Target: SCNA; (+) strand; PAM type: NRG; PAM sequence: AGG
aaatatagctacagaagaaa

SEQ ID NO: 34136 - DNA, 20 bp, Artificial Sequence
  Description of Artificial Sequence: Synthetic oligonucleotide
  Target: SCNA; (+) strand; PAM type: NRG; PAM sequence: GGG
aatatagctacagaagaaaa

SEQ ID NO: 34137 - DNA, 20 bp, Artificial Sequence
  Description of Artificial Sequence: Synthetic oligonucleotide
  Target: SCNA; (+) strand; PAM type: NRG; PAM sequence: GGG
atatagctacagaagaaaag

SEQ ID NO: 34138 - DNA, 20 bp, Artificial Sequence
  Description of Artificial Sequence: Synthetic oligonucleotide
  Target: SCNA; (+) strand; PAM type: NRG; PAM sequence: AAG
gaagaaaaggggcttataac

SEQ ID NO: 34139 - DNA, 20 bp, Artificial Sequence
  Description of Artificial Sequence: Synthetic oligonucleotide
  Target: SCNA; (+) strand; PAM type: NRG; PAM sequence: TAG
aggggcttataacaagtgta

SEQ ID NO: 34140 - DNA, 20 bp, Artificial Sequence
  Description of Artificial Sequence: Synthetic oligonucleotide
  Target: SCNA; (+) strand; PAM type: NRG; PAM sequence: CAG
acaagtgtatagtacacatt

SEQ ID NO: 34141 - DNA, 20 bp, Artificial Sequence
  Description of Artificial Sequence: Synthetic oligonucleotide
  Target: SCNA; (+) strand; PAM type: NRG; PAM sequence: TGG
ttcagaaacattttgtttca

SEQ ID NO: 34142 - DNA, 20 bp, Artificial Sequence
  Description of Artificial Sequence: Synthetic oligonucleotide
  Target: SCNA; (+) strand; PAM type: NRG; PAM sequence: CAG
attttgtttcatggatgttt

SEQ ID NO: 34143 - DNA, 20 bp, Artificial Sequence
  Description of Artificial Sequence: Synthetic oligonucleotide
  Target: SCNA; (+) strand; PAM type: NRG; PAM sequence: TAG
gtaaatgcttcatttctatg

SEQ ID NO: 34144 - DNA, 20 bp, Artificial Sequence
  Description of Artificial Sequence: Synthetic oligonucleotide
  Target: SCNA; (+) strand; PAM type: NRG; PAM sequence: AGG
taaatgcttcatttctatgt

SEQ ID NO: 34145 - DNA, 20 bp, Artificial Sequence
  Description of Artificial Sequence: Synthetic oligonucleotide
  Target: SCNA; (+) strand; PAM type: NRG; PAM sequence: GAG
aatgcttcatttctatgtag

SEQ ID NO: 34146 - DNA, 20 bp, Artificial Sequence
  Description of Artificial Sequence: Synthetic oligonucleotide
  Target: SCNA; (+) strand; PAM type: NRG; PAM sequence: AGG
atgcttcatttctatgtagg

SEQ ID NO: 34147 - DNA, 20 bp, Artificial Sequence
  Description of Artificial Sequence: Synthetic oligonucleotide
  Target: SCNA; (+) strand; PAM type: NRG; PAM sequence: AAG
catttctatgtaggaggtat

SEQ ID NO: 34148 - DNA, 20 bp, Artificial Sequence
  Description of Artificial Sequence: Synthetic oligonucleotide
  Target: SCNA; (+) strand; PAM type: NRG; PAM sequence: TAG
ccttccctgaatattcacaa

SEQ ID NO: 34149 - DNA, 20 bp, Artificial Sequence
  Description of Artificial Sequence: Synthetic oligonucleotide
  Target: SCNA; (+) strand; PAM type: NRG; PAM sequence: AAG
aaaattctcacaaatgaata

SEQ ID NO: 34150 - DNA, 20 bp, Artificial Sequence
  Description of Artificial Sequence: Synthetic oligonucleotide
  Target: SCNA; (+) strand; PAM type: NRG; PAM sequence: CAG
ttctcacaaatgaataaaga

SEQ ID NO: 34151 - DNA, 20 bp, Artificial Sequence
  Description of Artificial Sequence: Synthetic oligonucleotide
  Target: SCNA; (+) strand; PAM type: NRG; PAM sequence: AAG
cagaactgattaactgtatt

SEQ ID NO: 34152 - DNA, 20 bp, Artificial Sequence
  Description of Artificial Sequence: Synthetic oligonucleotide
  Target: SCNA; (+) strand; PAM type: NRG; PAM sequence: CAG
tacttaatacaataataatt

SEQ ID NO: 34153 - DNA, 20 bp, Artificial Sequence
  Description of Artificial Sequence: Synthetic oligonucleotide
  Target: SCNA; (+) strand; PAM type: NRG; PAM sequence: AGG
acttaatacaataataattc

SEQ ID NO: 34154 - DNA, 20 bp, Artificial Sequence
  Description of Artificial Sequence: Synthetic oligonucleotide
  Target: SCNA; (+) strand; PAM type: NRG; PAM sequence: CAG
gttttaaataatttcaacat

SEQ ID NO: 34155 - DNA, 20 bp, Artificial Sequence
  Description of Artificial Sequence: Synthetic oligonucleotide
  Target: SCNA; (+) strand; PAM type: NRG; PAM sequence: AAG
tactatgtataaattttatc

SEQ ID NO: 34156 - DNA, 20 bp, Artificial Sequence
  Description of Artificial Sequence: Synthetic oligonucleotide
  Target: SCNA; (+) strand; PAM type: NRG; PAM sequence: AAG
atcaagtactttgatgaatt

SEQ ID NO: 34157 - DNA, 20 bp, Artificial Sequence
  Description of Artificial Sequence: Synthetic oligonucleotide
  Target: SCNA; (+) strand; PAM type: NRG; PAM sequence: GAG
caagtactttgatgaattaa

SEQ ID NO: 34158 - DNA, 20 bp, Artificial Sequence
  Description of Artificial Sequence: Synthetic oligonucleotide
  Target: SCNA; (+) strand; PAM type: NRG; PAM sequence: AGG
aagtactttgatgaattaag

SEQ ID NO: 34159 - DNA, 20 bp, Artificial Sequence
  Description of Artificial Sequence: Synthetic oligonucleotide
  Target: SCNA; (+) strand; PAM type: NRG; PAM sequence: AAG
tactttgatgaattaagagg

SEQ ID NO: 34160 - DNA, 20 bp, Artificial Sequence
  Description of Artificial Sequence: Synthetic oligonucleotide
  Target: SCNA; (+) strand; PAM type: NRG; PAM sequence: AGG
actttgatgaattaagagga

SEQ ID NO: 34161 - DNA, 20 bp, Artificial Sequence
  Description of Artificial Sequence: Synthetic oligonucleotide
  Target: SCNA; (+) strand; PAM type: NRG; PAM sequence: AAG
gatgaattaagaggaaggta

SEQ ID NO: 34162 - DNA, 20 bp, Artificial Sequence
  Description of Artificial Sequence: Synthetic oligonucleotide
  Target: SCNA; (+) strand; PAM type: NRG; PAM sequence: AGG
atgaattaagaggaaggtaa

SEQ ID NO: 34163 - DNA, 20 bp, Artificial Sequence
  Description of Artificial Sequence: Synthetic oligonucleotide
  Target: SCNA; (+) strand; PAM type: NRG; PAM sequence: TGG
ctgcaataatattattaaat

SEQ ID NO: 34164 - DNA, 20 bp, Artificial Sequence
  Description of Artificial Sequence: Synthetic oligonucleotide
  Target: SCNA; (+) strand; PAM type: NRG; PAM sequence: GGG
tgcaataatattattaaatt

SEQ ID NO: 34165 - DNA, 20 bp, Artificial Sequence
  Description of Artificial Sequence: Synthetic oligonucleotide
  Target: SCNA; (+) strand; PAM type: NRG; PAM sequence: AAG
atattattaaattgggctaa

SEQ ID NO: 34166 - DNA, 20 bp, Artificial Sequence
  Description of Artificial Sequence: Synthetic oligonucleotide
  Target: SCNA; (+) strand; PAM type: NRG; PAM sequence: AGG
tattattaaattgggctaaa

SEQ ID NO: 34167 - DNA, 20 bp, Artificial Sequence
  Description of Artificial Sequence: Synthetic oligonucleotide
  Target: SCNA; (+) strand; PAM type: NRG; PAM sequence: AAG
aaattgggctaaaaggaacc

SEQ ID NO: 34168 - DNA, 20 bp, Artificial Sequence
  Description of Artificial Sequence: Synthetic oligonucleotide
  Target: SCNA; (+) strand; PAM type: NRG; PAM sequence: AAG
aaaaggaaccaagacaaatg

SEQ ID NO: 34169 - DNA, 20 bp, Artificial Sequence
  Description of Artificial Sequence: Synthetic oligonucleotide
  Target: SCNA; (+) strand; PAM type: NRG; PAM sequence: AAG
caagacaaatgaagatatat

SEQ ID NO: 34170 - DNA, 20 bp, Artificial Sequence
  Description of Artificial Sequence: Synthetic oligonucleotide
  Target: SCNA; (+) strand; PAM type: NRG; PAM sequence: TAG
aagaaaactaatcattattt

SEQ ID NO: 34171 - DNA, 20 bp, Artificial Sequence
  Description of Artificial Sequence: Synthetic oligonucleotide
  Target: SCNA; (+) strand; PAM type: NRG; PAM sequence: CAG
atcattattttagactaaaa

SEQ ID NO: 34172 - DNA, 20 bp, Artificial Sequence
  Description of Artificial Sequence: Synthetic oligonucleotide
  Target: SCNA; (+) strand; PAM type: NRG; PAM sequence: AGG
tcattattttagactaaaac

SEQ ID NO: 34173 - DNA, 20 bp, Artificial Sequence
  Description of Artificial Sequence: Synthetic oligonucleotide
  Target: SCNA; (+) strand; PAM type: NRG; PAM sequence: AAG
attttagactaaaacaggaa

SEQ ID NO: 34174 - DNA, 20 bp, Artificial Sequence
  Description of Artificial Sequence: Synthetic oligonucleotide
  Target: SCNA; (+) strand; PAM type: NRG; PAM sequence: TAG
actaaaacaggaaaagaaca

SEQ ID NO: 34175 - DNA, 20 bp, Artificial Sequence
  Description of Artificial Sequence: Synthetic oligonucleotide
  Target: SCNA; (+) strand; PAM type: NRG; PAM sequence: TAG
aggaaaagaacatagttatc

SEQ ID NO: 34176 - DNA, 20 bp, Artificial Sequence
  Description of Artificial Sequence: Synthetic oligonucleotide
  Target: SCNA; (+) strand; PAM type: NRG; PAM sequence: AGG
ggaaaagaacatagttatct

SEQ ID NO: 34177 - DNA, 20 bp, Artificial Sequence
  Description of Artificial Sequence: Synthetic oligonucleotide
  Target: SCNA; (+) strand; PAM type: NRG; PAM sequence: TAG
tatctaggacactgtctcct

SEQ ID NO: 34178 - DNA, 20 bp, Artificial Sequence
  Description of Artificial Sequence: Synthetic oligonucleotide
  Target: SCNA; (+) strand; PAM type: NRG; PAM sequence: CAG
agtttttaatgtttcttccc

SEQ ID NO: 34179 - DNA, 20 bp, Artificial Sequence
  Description of Artificial Sequence: Synthetic oligonucleotide
  Target: SCNA; (+) strand; PAM type: NRG; PAM sequence: TGG
tttaatgtttcttccccaga

SEQ ID NO: 34180 - DNA, 20 bp, Artificial Sequence
  Description of Artificial Sequence: Synthetic oligonucleotide
  Target: SCNA; (+) strand; PAM type: NRG; PAM sequence: GGG
ttaatgtttcttccccagat

SEQ ID NO: 34181 - DNA, 20 bp, Artificial Sequence
  Description of Artificial Sequence: Synthetic oligonucleotide
  Target: SCNA; (+) strand; PAM type: NRG; PAM sequence: AAG
gcacatcttttgcctgaaaa

SEQ ID NO: 34182 - DNA, 20 bp, Artificial Sequence
  Description of Artificial Sequence: Synthetic oligonucleotide
  Target: SCNA; (+) strand; PAM type: NRG; PAM sequence: AAG
agaacttatttccaccacac

SEQ ID NO: 34183 - DNA, 20 bp, Artificial Sequence
  Description of Artificial Sequence: Synthetic oligonucleotide
  Target: SCNA; (+) strand; PAM type: NRG; PAM sequence: TAG
gttacattaaatacgtcttt

SEQ ID NO: 34184 - DNA, 20 bp, Artificial Sequence
  Description of Artificial Sequence: Synthetic oligonucleotide
  Target: SCNA; (+) strand; PAM type: NRG; PAM sequence: TAG
taaatacgtcttttagctcc

SEQ ID NO: 34185 - DNA, 20 bp, Artificial Sequence
  Description of Artificial Sequence: Synthetic oligonucleotide
  Target: SCNA; (+) strand; PAM type: NRG; PAM sequence: AGG
aaatacgtcttttagctcct

SEQ ID NO: 34186 - DNA, 20 bp, Artificial Sequence
  Description of Artificial Sequence: Synthetic oligonucleotide
  Target: SCNA; (+) strand; PAM type: NRG; PAM sequence: GGG
aatacgtcttttagctccta

SEQ ID NO: 34187 - DNA, 20 bp, Artificial Sequence
  Description of Artificial Sequence: Synthetic oligonucleotide
  Target: SCNA; (+) strand; PAM type: NRG; PAM sequence: GAG
tacgtcttttagctcctagg

SEQ ID NO: 34188 - DNA, 20 bp, Artificial Sequence
  Description of Artificial Sequence: Synthetic oligonucleotide
  Target: SCNA; (+) strand; PAM type: NRG; PAM sequence: AAG
tttagctcctagggagctga

SEQ ID NO: 34189 - DNA, 20 bp, Artificial Sequence
  Description of Artificial Sequence: Synthetic oligonucleotide
  Target: SCNA; (+) strand; PAM type: NRG; PAM sequence: AGG
ttagctcctagggagctgaa

SEQ ID NO: 34190 - DNA, 20 bp, Artificial Sequence
  Description of Artificial Sequence: Synthetic oligonucleotide
  Target: SCNA; (+) strand; PAM type: NRG; PAM sequence: AAG
ctcctagggagctgaaaggc

SEQ ID NO: 34191 - DNA, 20 bp, Artificial Sequence
  Description of Artificial Sequence: Synthetic oligonucleotide
  Target: SCNA; (+) strand; PAM type: NRG; PAM sequence: AAG
taatacacctctaatcaata

SEQ ID NO: 34192 - DNA, 20 bp, Artificial Sequence
  Description of Artificial Sequence: Synthetic oligonucleotide
  Target: SCNA; (+) strand; PAM type: NRG; PAM sequence: AAG
aagcctaaaaatccattccc

SEQ ID NO: 34193 - DNA, 20 bp, Artificial Sequence
  Description of Artificial Sequence: Synthetic oligonucleotide
  Target: SCNA; (+) strand; PAM type: NRG; PAM sequence: GAG
gcctaaaaatccattcccaa

SEQ ID NO: 34194 - DNA, 20 bp, Artificial Sequence
  Description of Artificial Sequence: Synthetic oligonucleotide
  Target: SCNA; (+) strand; PAM type: NRG; PAM sequence: CAG
aaatccattcccaagagacc

SEQ ID NO: 34195 - DNA, 20 bp, Artificial Sequence
  Description of Artificial Sequence: Synthetic oligonucleotide
  Target: SCNA; (+) strand; PAM type: NRG; PAM sequence: CAG
agagacccagatttctctac

SEQ ID NO: 34196 - DNA, 20 bp, Artificial Sequence
  Description of Artificial Sequence: Synthetic oligonucleotide
  Target: SCNA; (+) strand; PAM type: NRG; PAM sequence: TAG
ccagatttctctaccagttc

SEQ ID NO: 34197 - DNA, 20 bp, Artificial Sequence
  Description of Artificial Sequence: Synthetic oligonucleotide
  Target: SCNA; (+) strand; PAM type: NRG; PAM sequence: TAG
tctaccagttctagttgtac

SEQ ID NO: 34198 - DNA, 20 bp, Artificial Sequence
  Description of Artificial Sequence: Synthetic oligonucleotide
  Target: SCNA; (+) strand; PAM type: NRG; PAM sequence: CAG
ctagttgtactagttattct

SEQ ID NO: 34199 - DNA, 20 bp, Artificial Sequence
  Description of Artificial Sequence: Synthetic oligonucleotide
  Target: SCNA; (+) strand; PAM type: NRG; PAM sequence: CGG
gttgtactagttattctcag

SEQ ID NO: 34200 - DNA, 20 bp, Artificial Sequence
  Description of Artificial Sequence: Synthetic oligonucleotide
  Target: SCNA; (+) strand; PAM type: NRG; PAM sequence: AAG
tactagttattctcagcggt

SEQ ID NO: 34201 - DNA, 20 bp, Artificial Sequence
  Description of Artificial Sequence: Synthetic oligonucleotide
  Target: SCNA; (+) strand; PAM type: NRG; PAM sequence: TAG
ttctcagcggtaagttttcc

SEQ ID NO: 34202 - DNA, 20 bp, Artificial Sequence
  Description of Artificial Sequence: Synthetic oligonucleotide
  Target: SCNA; (+) strand; PAM type: NRG; PAM sequence: GAG
ctagttcttaatattaaaat

SEQ ID NO: 34203 - DNA, 20 bp, Artificial Sequence
  Description of Artificial Sequence: Synthetic oligonucleotide
  Target: SCNA; (+) strand; PAM type: NRG; PAM sequence: GAG
agttcttaatattaaaatga

SEQ ID NO: 34204 - DNA, 20 bp, Artificial Sequence
  Description of Artificial Sequence: Synthetic oligonucleotide
  Target: SCNA; (+) strand; PAM type: NRG; PAM sequence: AGG
gttcttaatattaaaatgag

SEQ ID NO: 34205 - DNA, 20 bp, Artificial Sequence
  Description of Artificial Sequence: Synthetic oligonucleotide
  Target: SCNA; (+) strand; PAM type: NRG; PAM sequence: CAG
taatattaaaatgagaggtc

SEQ ID NO: 34206 - DNA, 20 bp, Artificial Sequence
  Description of Artificial Sequence: Synthetic oligonucleotide
  Target: SCNA; (+) strand; PAM type: NRG; PAM sequence: GAG
atattaaaatgagaggtcca

SEQ ID NO: 34207 - DNA, 20 bp, Artificial Sequence
  Description of Artificial Sequence: Synthetic oligonucleotide
  Target: SCNA; (+) strand; PAM type: NRG; PAM sequence: AGG
tattaaaatgagaggtccag

SEQ ID NO: 34208 - DNA, 20 bp, Artificial Sequence
  Description of Artificial Sequence: Synthetic oligonucleotide
  Target: SCNA; (+) strand; PAM type: NRG; PAM sequence: TAG
aatgagaggtccagaggctc

SEQ ID NO: 34209 - DNA, 20 bp, Artificial Sequence
  Description of Artificial Sequence: Synthetic oligonucleotide
  Target: SCNA; (+) strand; PAM type: NRG; PAM sequence: AGG
atgagaggtccagaggctct

SEQ ID NO: 34210 - DNA, 20 bp, Artificial Sequence
  Description of Artificial Sequence: Synthetic oligonucleotide
  Target: SCNA; (+) strand; PAM type: NRG; PAM sequence: TGG
agaggtccagaggctctagg

SEQ ID NO: 34211 - DNA, 20 bp, Artificial Sequence
  Description of Artificial Sequence: Synthetic oligonucleotide
  Target: SCNA; (+) strand; PAM type: NRG; PAM sequence: TGG
ggtccagaggctctaggtgg

SEQ ID NO: 34212 - DNA, 20 bp, Artificial Sequence
  Description of Artificial Sequence: Synthetic oligonucleotide
  Target: SCNA; (+) strand; PAM type: NRG; PAM sequence: GAG
tccagaggctctaggtggtg

SEQ ID NO: 34213 - DNA, 20 bp, Artificial Sequence
  Description of Artificial Sequence: Synthetic oligonucleotide
  Target: SCNA; (+) strand; PAM type: NRG; PAM sequence: AGG
ccagaggctctaggtggtgg

SEQ ID NO: 34214 - DNA, 20 bp, Artificial Sequence
  Description of Artificial Sequence: Synthetic oligonucleotide
  Target: SCNA; (+) strand; PAM type: NRG; PAM sequence: GGG
cagaggctctaggtggtgga

SEQ ID NO: 34215 - DNA, 20 bp, Artificial Sequence
  Description of Artificial Sequence: Synthetic oligonucleotide
  Target: SCNA; (+) strand; PAM type: NRG; PAM sequence: GGG
agaggctctaggtggtggag

SEQ ID NO: 34216 - DNA, 20 bp, Artificial Sequence
  Description of Artificial Sequence: Synthetic oligonucleotide
  Target: SCNA; (+) strand; PAM type: NRG; PAM sequence: TAG
ctaggtggtggaggggttgc

SEQ ID NO: 34217 - DNA, 20 bp, Artificial Sequence
  Description of Artificial Sequence: Synthetic oligonucleotide
  Target: SCNA; (+) strand; PAM type: NRG; PAM sequence: AAG
gtggaggggttgctagctaa

SEQ ID NO: 34218 - DNA, 20 bp, Artificial Sequence
  Description of Artificial Sequence: Synthetic oligonucleotide
  Target: SCNA; (+) strand; PAM type: NRG; PAM sequence: AGG
tggaggggttgctagctaaa

SEQ ID NO: 34219 - DNA, 20 bp, Artificial Sequence
  Description of Artificial Sequence: Synthetic oligonucleotide
  Target: SCNA; (+) strand; PAM type: NRG; PAM sequence: GAG
gaggggttgctagctaaaag

SEQ ID NO: 34220 - DNA, 20 bp, Artificial Sequence
  Description of Artificial Sequence: Synthetic oligonucleotide
  Target: SCNA; (+) strand; PAM type: NRG; PAM sequence: AGG
aggggttgctagctaaaagg

SEQ ID NO: 34221 - DNA, 20 bp, Artificial Sequence
  Description of Artificial Sequence: Synthetic oligonucleotide
  Target: SCNA; (+) strand; PAM type: NRG; PAM sequence: GGG
ggggttgctagctaaaagga

SEQ ID NO: 34222 - DNA, 20 bp, Artificial Sequence
  Description of Artificial Sequence: Synthetic oligonucleotide
  Target: SCNA; (+) strand; PAM type: NRG; PAM sequence: CAG
gctaaaaggagggtgtccta

SEQ ID NO: 34223 - DNA, 20 bp, Artificial Sequence
  Description of Artificial Sequence: Synthetic oligonucleotide
  Target: SCNA; (+) strand; PAM type: NRG; PAM sequence: AAG
aaaggagggtgtcctacaga

SEQ ID NO: 34224 - DNA, 20 bp, Artificial Sequence
  Description of Artificial Sequence: Synthetic oligonucleotide
  Target: SCNA; (+) strand; PAM type: NRG; PAM sequence: AGG
aaggagggtgtcctacagaa

SEQ ID NO: 34225 - DNA, 20 bp, Artificial Sequence
  Description of Artificial Sequence: Synthetic oligonucleotide
  Target: SCNA; (+) strand; PAM type: NRG; PAM sequence: GGG
aggagggtgtcctacagaaa

SEQ ID NO: 34226 - DNA, 20 bp, Artificial Sequence
  Description of Artificial Sequence: Synthetic oligonucleotide
  Target: SCNA; (+) strand; PAM type: NRG; PAM sequence: CAG
gggtgtcctacagaaaggga

SEQ ID NO: 34227 - DNA, 20 bp, Artificial Sequence
  Description of Artificial Sequence: Synthetic oligonucleotide
  Target: SCNA; (+) strand; PAM type: NRG; PAM sequence: GAG
gtgtcctacagaaagggaca

SEQ ID NO: 34228 - DNA, 20 bp, Artificial Sequence
  Description of Artificial Sequence: Synthetic oligonucleotide
  Target: SCNA; (+) strand; PAM type: NRG; PAM sequence: GAG
gaaagggacagagtctccat

SEQ ID NO: 34229 - DNA, 20 bp, Artificial Sequence
  Description of Artificial Sequence: Synthetic oligonucleotide
  Target: SCNA; (+) strand; PAM type: NRG; PAM sequence: TGG
agagtctccatgagcaatgc

SEQ ID NO: 34230 - DNA, 20 bp, Artificial Sequence
  Description of Artificial Sequence: Synthetic oligonucleotide
  Target: SCNA; (+) strand; PAM type: NRG; PAM sequence: TGG
tctccatgagcaatgctgga

SEQ ID NO: 34231 - DNA, 20 bp, Artificial Sequence
  Description of Artificial Sequence: Synthetic oligonucleotide
  Target: SCNA; (+) strand; PAM type: NRG; PAM sequence: TGG
gcaatgctggatggtacctg

SEQ ID NO: 34232 - DNA, 20 bp, Artificial Sequence
  Description of Artificial Sequence: Synthetic oligonucleotide
  Target: SCNA; (+) strand; PAM type: NRG; PAM sequence: CAG
gctggatggtacctgtggtc

SEQ ID NO: 34233 - DNA, 20 bp, Artificial Sequence
  Description of Artificial Sequence: Synthetic oligonucleotide
  Target: SCNA; (+) strand; PAM type: NRG; PAM sequence: TGG
ggtacctgtggtccagttct

SEQ ID NO: 34234 - DNA, 20 bp, Artificial Sequence
  Description of Artificial Sequence: Synthetic oligonucleotide
  Target: SCNA; (+) strand; PAM type: NRG; PAM sequence: TGG
gtggtccagttcttggcaca

SEQ ID NO: 34235 - DNA, 20 bp, Artificial Sequence
  Description of Artificial Sequence: Synthetic oligonucleotide
  Target: SCNA; (+) strand; PAM type: NRG; PAM sequence: GAG
tccagttcttggcacatggt

SEQ ID NO: 34236 - DNA, 20 bp, Artificial Sequence
  Description of Artificial Sequence: Synthetic oligonucleotide
  Target: SCNA; (+) strand; PAM type: NRG; PAM sequence: AAG
gcacatggtgagtgctgcct

SEQ ID NO: 34237 - DNA, 20 bp, Artificial Sequence
  Description of Artificial Sequence: Synthetic oligonucleotide
  Target: SCNA; (+) strand; PAM type: NRG; PAM sequence: TGG
ggtgagtgctgcctaagtct

SEQ ID NO: 34238 - DNA, 20 bp, Artificial Sequence
  Description of Artificial Sequence: Synthetic oligonucleotide
  Target: SCNA; (+) strand; PAM type: NRG; PAM sequence: TAG
ctgcctaagtcttggtgccc

SEQ ID NO: 34239 - DNA, 20 bp, Artificial Sequence
  Description of Artificial Sequence: Synthetic oligonucleotide
  Target: SCNA; (+) strand; PAM type: NRG; PAM sequence: CAG
gtcttggtgccctagacctg

SEQ ID NO: 34240 - DNA, 20 bp, Artificial Sequence
  Description of Artificial Sequence: Synthetic oligonucleotide
  Target: SCNA; (+) strand; PAM type: NRG; PAM sequence: CAG
ttggtgccctagacctgcag

SEQ ID NO: 34241 - DNA, 20 bp, Artificial Sequence
  Description of Artificial Sequence: Synthetic oligonucleotide
  Target: SCNA; (+) strand; PAM type: NRG; PAM sequence: CGG
cctagacctgcagcagcaat

SEQ ID NO: 34242 - DNA, 20 bp, Artificial Sequence
  Description of Artificial Sequence: Synthetic oligonucleotide
  Target: SCNA; (+) strand; PAM type: NRG; PAM sequence: CGG
agacctgcagcagcaatcgg

SEQ ID NO: 34243 - DNA, 20 bp, Artificial Sequence
  Description of Artificial Sequence: Synthetic oligonucleotide
  Target: SCNA; (+) strand; PAM type: NRG; PAM sequence: GGG
gacctgcagcagcaatcggc

SEQ ID NO: 34244 - DNA, 20 bp, Artificial Sequence
  Description of Artificial Sequence: Synthetic oligonucleotide
  Target: SCNA; (+) strand; PAM type: NRG; PAM sequence: GGG
acctgcagcagcaatcggcg

SEQ ID NO: 34245 - DNA, 20 bp, Artificial Sequence
  Description of Artificial Sequence: Synthetic oligonucleotide
  Target: SCNA; (+) strand; PAM type: NRG; PAM sequence: AAG
gcagcagcaatcggcgggga

SEQ ID NO: 34246 - DNA, 20 bp, Artificial Sequence
  Description of Artificial Sequence: Synthetic oligonucleotide
  Target: SCNA; (+) strand; PAM type: NRG; PAM sequence: AGG
cagcagcaatcggcggggaa

SEQ ID NO: 34247 - DNA, 20 bp, Artificial Sequence
  Description of Artificial Sequence: Synthetic oligonucleotide
  Target: SCNA; (+) strand; PAM type: NRG; PAM sequence: TGG
cggggaaaggaccatgactt

SEQ ID NO: 34248 - DNA, 20 bp, Artificial Sequence
  Description of Artificial Sequence: Synthetic oligonucleotide
  Target: SCNA; (+) strand; PAM type: NRG; PAM sequence: AAG
gaccatgactttggtgacaa

SEQ ID NO: 34249 - DNA, 20 bp, Artificial Sequence
  Description of Artificial Sequence: Synthetic oligonucleotide
  Target: SCNA; (+) strand; PAM type: NRG; PAM sequence: TGG
gactttggtgacaaaagtga

SEQ ID NO: 34250 - DNA, 20 bp, Artificial Sequence
  Description of Artificial Sequence: Synthetic oligonucleotide
  Target: SCNA; (+) strand; PAM type: NRG; PAM sequence: CAG
tttggtgacaaaagtgatgg

SEQ ID NO: 34251 - DNA, 20 bp, Artificial Sequence
  Description of Artificial Sequence: Synthetic oligonucleotide
  Target: SCNA; (+) strand; PAM type: NRG; PAM sequence: AAG
ggtgacaaaagtgatggcag

SEQ ID NO: 34252 - DNA, 20 bp, Artificial Sequence
  Description of Artificial Sequence: Synthetic oligonucleotide
  Target: SCNA; (+) strand; PAM type: NRG; PAM sequence: GAG
tgacaaaagtgatggcagaa

SEQ ID NO: 34253 - DNA, 20 bp, Artificial Sequence
  Description of Artificial Sequence: Synthetic oligonucleotide
  Target: SCNA; (+) strand; PAM type: NRG; PAM sequence: TGG
caaaagtgatggcagaagag

SEQ ID NO: 34254 - DNA, 20 bp, Artificial Sequence
  Description of Artificial Sequence: Synthetic oligonucleotide
  Target: SCNA; (+) strand; PAM type: NRG; PAM sequence: AAG
agtgatggcagaagagtgga

SEQ ID NO: 34255 - DNA, 20 bp, Artificial Sequence
  Description of Artificial Sequence: Synthetic oligonucleotide
  Target: SCNA; (+) strand; PAM type: NRG; PAM sequence: GAG
tgatggcagaagagtggaaa

SEQ ID NO: 34256 - DNA, 20 bp, Artificial Sequence
  Description of Artificial Sequence: Synthetic oligonucleotide
  Target: SCNA; (+) strand; PAM type: NRG; PAM sequence: AGG
gatggcagaagagtggaaag

SEQ ID NO: 34257 - DNA, 20 bp, Artificial Sequence
  Description of Artificial Sequence: Synthetic oligonucleotide
  Target: SCNA; (+) strand; PAM type: NRG; PAM sequence: GAG
agaagagtggaaagaggtat

SEQ ID NO: 34258 - DNA, 20 bp, Artificial Sequence
  Description of Artificial Sequence: Synthetic oligonucleotide
  Target: SCNA; (+) strand; PAM type: NRG; PAM sequence: AAG
aagaggtatgagtgatgact

SEQ ID NO: 34259 - DNA, 20 bp, Artificial Sequence
  Description of Artificial Sequence: Synthetic oligonucleotide
  Target: SCNA; (+) strand; PAM type: NRG; PAM sequence: AGG
agaggtatgagtgatgacta

SEQ ID NO: 34260 - DNA, 20 bp, Artificial Sequence
  Description of Artificial Sequence: Synthetic oligonucleotide
  Target: SCNA; (+) strand; PAM type: NRG; PAM sequence: AAG
atgagtgatgactaaggaca

SEQ ID NO: 34261 - DNA, 20 bp, Artificial Sequence
  Description of Artificial Sequence: Synthetic oligonucleotide
  Target: SCNA; (+) strand; PAM type: NRG; PAM sequence: AAG
atgactaaggacaaagaaac

SEQ ID NO: 34262 - DNA, 20 bp, Artificial Sequence
  Description of Artificial Sequence: Synthetic oligonucleotide
  Target: SCNA; (+) strand; PAM type: NRG; PAM sequence: AGG
tgactaaggacaaagaaaca

SEQ ID NO: 34263 - DNA, 20 bp, Artificial Sequence
  Description of Artificial Sequence: Synthetic oligonucleotide
  Target: SCNA; (+) strand; PAM type: NRG; PAM sequence: GGG
gactaaggacaaagaaacaa

SEQ ID NO: 34264 - DNA, 20 bp, Artificial Sequence
  Description of Artificial Sequence: Synthetic oligonucleotide
  Target: SCNA; (+) strand; PAM type: NRG; PAM sequence: TAG
taaggacaaagaaacaaggg

SEQ ID NO: 34265 - DNA, 20 bp, Artificial Sequence
  Description of Artificial Sequence: Synthetic oligonucleotide
  Target: SCNA; (+) strand; PAM type: NRG; PAM sequence: AAG
ggacaaagaaacaagggtag

SEQ ID NO: 34266 - DNA, 20 bp, Artificial Sequence
  Description of Artificial Sequence: Synthetic oligonucleotide
  Target: SCNA; (+) strand; PAM type: NRG; PAM sequence: AGG
gacaaagaaacaagggtaga

SEQ ID NO: 34267 - DNA, 20 bp, Artificial Sequence
  Description of Artificial Sequence: Synthetic oligonucleotide
  Target: SCNA; (+) strand; PAM type: NRG; PAM sequence: CAG
caagggtagaaggacaattc

SEQ ID NO: 34268 - DNA, 20 bp, Artificial Sequence
  Description of Artificial Sequence: Synthetic oligonucleotide
  Target: SCNA; (+) strand; PAM type: NRG; PAM sequence: CAG
gggtagaaggacaattccag

SEQ ID NO: 34269 - DNA, 20 bp, Artificial Sequence
  Description of Artificial Sequence: Synthetic oligonucleotide
  Target: SCNA; (+) strand; PAM type: NRG; PAM sequence: CAG
tagaaggacaattccagcag

SEQ ID NO: 34270 - DNA, 20 bp, Artificial Sequence
  Description of Artificial Sequence: Synthetic oligonucleotide
  Target: SCNA; (+) strand; PAM type: NRG; PAM sequence: CAG
gaataacaaaatccttatct

SEQ ID NO: 34271 - DNA, 20 bp, Artificial Sequence
  Description of Artificial Sequence: Synthetic oligonucleotide
  Target: SCNA; (+) strand; PAM type: NRG; PAM sequence: AGG
aataacaaaatccttatctc

SEQ ID NO: 34272 - DNA, 20 bp, Artificial Sequence
  Description of Artificial Sequence: Synthetic oligonucleotide
  Target: SCNA; (+) strand; PAM type: NRG; PAM sequence: CAG
atacacacacatatattcat

SEQ ID NO: 34273 - DNA, 20 bp, Artificial Sequence
  Description of Artificial Sequence: Synthetic oligonucleotide
  Target: SCNA; (+) strand; PAM type: NRG; PAM sequence: AGG
tacacacacatatattcatc

SEQ ID NO: 34274 - DNA, 20 bp, Artificial Sequence
  Description of Artificial Sequence: Synthetic oligonucleotide
  Target: SCNA; (+) strand; PAM type: NRG; PAM sequence: TGG
gtatcaatttaattactgat

SEQ ID NO: 34275 - DNA, 20 bp, Artificial Sequence
  Description of Artificial Sequence: Synthetic oligonucleotide
  Target: SCNA; (+) strand; PAM type: NRG; PAM sequence: TAG
cactgtaaacttgttcaaaa

SEQ ID NO: 34276 - DNA, 20 bp, Artificial Sequence
  Description of Artificial Sequence: Synthetic oligonucleotide
  Target: SCNA; (+) strand; PAM type: NRG; PAM sequence: GAG
ctgtaaacttgttcaaaata

SEQ ID NO: 34277 - DNA, 20 bp, Artificial Sequence
  Description of Artificial Sequence: Synthetic oligonucleotide
  Target: SCNA; (+) strand; PAM type: NRG; PAM sequence: AGG
tgtaaacttgttcaaaatag

SEQ ID NO: 34278 - DNA, 20 bp, Artificial Sequence
  Description of Artificial Sequence: Synthetic oligonucleotide
  Target: SCNA; (+) strand; PAM type: NRG; PAM sequence: CAG
tcaaaatagaggttattatt

SEQ ID NO: 34279 - DNA, 20 bp, Artificial Sequence
  Description of Artificial Sequence: Synthetic oligonucleotide
  Target: SCNA; (+) strand; PAM type: NRG; PAM sequence: CAG
aggttattattcagtatctt

SEQ ID NO: 34280 - DNA, 20 bp, Artificial Sequence
  Description of Artificial Sequence: Synthetic oligonucleotide
  Target: SCNA; (+) strand; PAM type: NRG; PAM sequence: CGG
attcagtatcttcagctgtc

SEQ ID NO: 34281 - DNA, 20 bp, Artificial Sequence
  Description of Artificial Sequence: Synthetic oligonucleotide
  Target: SCNA; (+) strand; PAM type: NRG; PAM sequence: TAG
tgtccggattcaccatttta

SEQ ID NO: 34282 - DNA, 20 bp, Artificial Sequence
  Description of Artificial Sequence: Synthetic oligonucleotide
  Target: SCNA; (+) strand; PAM type: NRG; PAM sequence: TAG
tatagcatgctctctgacat

SEQ ID NO: 34283 - DNA, 20 bp, Artificial Sequence
  Description of Artificial Sequence: Synthetic oligonucleotide
  Target: SCNA; (+) strand; PAM type: NRG; PAM sequence: GAG
gcatgctctctgacattagt

SEQ ID NO: 34284 - DNA, 20 bp, Artificial Sequence
  Description of Artificial Sequence: Synthetic oligonucleotide
  Target: SCNA; (+) strand; PAM type: NRG; PAM sequence: TAG
tgaattgtactctacatatt

SEQ ID NO: 34285 - DNA, 20 bp, Artificial Sequence
  Description of Artificial Sequence: Synthetic oligonucleotide
  Target: SCNA; (+) strand; PAM type: NRG; PAM sequence: AGG
gaattgtactctacatattt

SEQ ID NO: 34286 - DNA, 20 bp, Artificial Sequence
  Description of Artificial Sequence: Synthetic oligonucleotide
  Target: SCNA; (+) strand; PAM type: NRG; PAM sequence: TGG
tactctacatatttaggtaa

SEQ ID NO: 34287 - DNA, 20 bp, Artificial Sequence
  Description of Artificial Sequence: Synthetic oligonucleotide
  Target: SCNA; (+) strand; PAM type: NRG; PAM sequence: TGG
tacatatttaggtaatggtt

SEQ ID NO: 34288 - DNA, 20 bp, Artificial Sequence
  Description of Artificial Sequence: Synthetic oligonucleotide
  Target: SCNA; (+) strand; PAM type: NRG; PAM sequence: CAG
ttaggtaatggtttggtata

SEQ ID NO: 34289 - DNA, 20 bp, Artificial Sequence
  Description of Artificial Sequence: Synthetic oligonucleotide
  Target: SCNA; (+) strand; PAM type: NRG; PAM sequence: TGG
tgtgtgctatgcaatatttg

SEQ ID NO: 34290 - DNA, 20 bp, Artificial Sequence
  Description of Artificial Sequence: Synthetic oligonucleotide
  Target: SCNA; (+) strand; PAM type: NRG; PAM sequence: CAG
tggtctcctgtcacccacct

SEQ ID NO: 34291 - DNA, 20 bp, Artificial Sequence
  Description of Artificial Sequence: Synthetic oligonucleotide
  Target: SCNA; (+) strand; PAM type: NRG; PAM sequence: AGG
ggtctcctgtcacccacctc

SEQ ID NO: 34292 - DNA, 20 bp, Artificial Sequence
  Description of Artificial Sequence: Synthetic oligonucleotide
  Target: SCNA; (+) strand; PAM type: NRG; PAM sequence: GAG
tctcctgtcacccacctcag

SEQ ID NO: 34293 - DNA, 20 bp, Artificial Sequence
  Description of Artificial Sequence: Synthetic oligonucleotide
  Target: SCNA; (+) strand; PAM type: NRG; PAM sequence: AAG
tcaggagacacaactgatgt

SEQ ID NO: 34294 - DNA, 20 bp, Artificial Sequence
  Description of Artificial Sequence: Synthetic oligonucleotide
  Target: SCNA; (+) strand; PAM type: NRG; PAM sequence: GAG
gagacacaactgatgtaagt

SEQ ID NO: 34295 - DNA, 20 bp, Artificial Sequence
  Description of Artificial Sequence: Synthetic oligonucleotide
  Target: SCNA; (+) strand; PAM type: NRG; PAM sequence: CAG
cacaactgatgtaagtgaga

SEQ ID NO: 34296 - DNA, 20 bp, Artificial Sequence
  Description of Artificial Sequence: Synthetic oligonucleotide
  Target: SCNA; (+) strand; PAM type: NRG; PAM sequence: CAG
ctgatgtaagtgagacagct

SEQ ID NO: 34297 - DNA, 20 bp, Artificial Sequence
  Description of Artificial Sequence: Synthetic oligonucleotide
  Target: SCNA; (+) strand; PAM type: NRG; PAM sequence: TGG
agacagctcagcatatccta

SEQ ID NO: 34298 - DNA, 20 bp, Artificial Sequence
  Description of Artificial Sequence: Synthetic oligonucleotide
  Target: SCNA; (+) strand; PAM type: NRG; PAM sequence: AAG
gaaaaatctcttattaaata

SEQ ID NO: 34299 - DNA, 20 bp, Artificial Sequence
  Description of Artificial Sequence: Synthetic oligonucleotide
  Target: SCNA; (+) strand; PAM type: NRG; PAM sequence: AGG
aaaaatctcttattaaataa

SEQ ID NO: 34300 - DNA, 20 bp, Artificial Sequence
  Description of Artificial Sequence: Synthetic oligonucleotide
  Target: SCNA; (+) strand; PAM type: NRG; PAM sequence: AAG
ttaaataaaggtcaatgatt

SEQ ID NO: 34301 - DNA, 20 bp, Artificial Sequence
  Description of Artificial Sequence: Synthetic oligonucleotide
  Target: SCNA; (+) strand; PAM type: NRG; PAM sequence: TAG
aataaaggtcaatgattaag

SEQ ID NO: 34302 - DNA, 20 bp, Artificial Sequence
  Description of Artificial Sequence: Synthetic oligonucleotide
  Target: SCNA; (+) strand; PAM type: NRG; PAM sequence: TAG
aggtcaatgattaagtagta

SEQ ID NO: 34303 - DNA, 20 bp, Artificial Sequence
  Description of Artificial Sequence: Synthetic oligonucleotide
  Target: SCNA; (+) strand; PAM type: NRG; PAM sequence: AAG
tgaattaatttgttttcctt

SEQ ID NO: 34304 - DNA, 20 bp, Artificial Sequence
  Description of Artificial Sequence: Synthetic oligonucleotide
  Target: SCNA; (+) strand; PAM type: NRG; PAM sequence: GAG
aattaatttgttttccttaa

SEQ ID NO: 34305 - DNA, 20 bp, Artificial Sequence
  Description of Artificial Sequence: Synthetic oligonucleotide
  Target: SCNA; (+) strand; PAM type: NRG; PAM sequence: AGG
attaatttgttttccttaag

SEQ ID NO: 34306 - DNA, 20 bp, Artificial Sequence
  Description of Artificial Sequence: Synthetic oligonucleotide
  Target: SCNA; (+) strand; PAM type: NRG; PAM sequence: GAG
taatttgttttccttaagag

SEQ ID NO: 34307 - DNA, 20 bp, Artificial Sequence
  Description of Artificial Sequence: Synthetic oligonucleotide
  Target: SCNA; (+) strand; PAM type: NRG; PAM sequence: CAG
tccttaagaggagctctcct

SEQ ID NO: 34308 - DNA, 20 bp, Artificial Sequence
  Description of Artificial Sequence: Synthetic oligonucleotide
  Target: SCNA; (+) strand; PAM type: NRG; PAM sequence: AGG
ccttaagaggagctctcctc

SEQ ID NO: 34309 - DNA, 20 bp, Artificial Sequence
  Description of Artificial Sequence: Synthetic oligonucleotide
  Target: SCNA; (+) strand; PAM type: NRG; PAM sequence: AAG
ctctcctcaggtcaaaatta

SEQ ID NO: 34310 - DNA, 20 bp, Artificial Sequence
  Description of Artificial Sequence: Synthetic oligonucleotide
  Target: SCNA; (+) strand; PAM type: NRG; PAM sequence: CAG
cctcaggtcaaaattaaagt

SEQ ID NO: 34311 - DNA, 20 bp, Artificial Sequence
  Description of Artificial Sequence: Synthetic oligonucleotide
  Target: SCNA; (+) strand; PAM type: NRG; PAM sequence: AGG
ctcaggtcaaaattaaagtc

SEQ ID NO: 34312 - DNA, 20 bp, Artificial Sequence
  Description of Artificial Sequence: Synthetic oligonucleotide
  Target: SCNA; (+) strand; PAM type: NRG; PAM sequence: GGG
tcaggtcaaaattaaagtca

SEQ ID NO: 34313 - DNA, 20 bp, Artificial Sequence
  Description of Artificial Sequence: Synthetic oligonucleotide
  Target: SCNA; (+) strand; PAM type: NRG; PAM sequence: TAG
gtcaaaattaaagtcaggga

SEQ ID NO: 34314 - DNA, 20 bp, Artificial Sequence
  Description of Artificial Sequence: Synthetic oligonucleotide
  Target: SCNA; (+) strand; PAM type: NRG; PAM sequence: AAG
aattaaagtcagggatagat

SEQ ID NO: 34315 - DNA, 20 bp, Artificial Sequence
  Description of Artificial Sequence: Synthetic oligonucleotide
  Target: SCNA; (+) strand; PAM type: NRG; PAM sequence: TGG
ggatagataagtctctcata

SEQ ID NO: 34316 - DNA, 20 bp, Artificial Sequence
  Description of Artificial Sequence: Synthetic oligonucleotide
  Target: SCNA; (+) strand; PAM type: NRG; PAM sequence: CAG
agtctctcatatggttcccc

SEQ ID NO: 34317 - DNA, 20 bp, Artificial Sequence
  Description of Artificial Sequence: Synthetic oligonucleotide
  Target: SCNA; (+) strand; PAM type: NRG; PAM sequence: GAG
tcatatggttcccccagtgt

SEQ ID NO: 34318 - DNA, 20 bp, Artificial Sequence
  Description of Artificial Sequence: Synthetic oligonucleotide
  Target: SCNA; (+) strand; PAM type: NRG; PAM sequence: GAG
atatggttcccccagtgtga

SEQ ID NO: 34319 - DNA, 20 bp, Artificial Sequence
  Description of Artificial Sequence: Synthetic oligonucleotide
  Target: SCNA; (+) strand; PAM type: NRG; PAM sequence: AGG
tatggttcccccagtgtgag

SEQ ID NO: 34320 - DNA, 20 bp, Artificial Sequence
  Description of Artificial Sequence: Synthetic oligonucleotide
  Target: SCNA; (+) strand; PAM type: NRG; PAM sequence: GAG
tggttcccccagtgtgagag

SEQ ID NO: 34321 - DNA, 20 bp, Artificial Sequence
  Description of Artificial Sequence: Synthetic oligonucleotide
  Target: SCNA; (+) strand; PAM type: NRG; PAM sequence: AAG
tcccccagtgtgagaggagc

SEQ ID NO: 34322 - DNA, 20 bp, Artificial Sequence
  Description of Artificial Sequence: Synthetic oligonucleotide
  Target: SCNA; (+) strand; PAM type: NRG; PAM sequence: TGG
gtgtgagaggagcaagctgt

SEQ ID NO: 34323 - DNA, 20 bp, Artificial Sequence
  Description of Artificial Sequence: Synthetic oligonucleotide
  Target: SCNA; (+) strand; PAM type: NRG; PAM sequence: TGG
agcaagctgttggtttcctt

SEQ ID NO: 34324 - DNA, 20 bp, Artificial Sequence
  Description of Artificial Sequence: Synthetic oligonucleotide
  Target: SCNA; (+) strand; PAM type: NRG; PAM sequence: TGG
aagctgttggtttcctttgg

SEQ ID NO: 34325 - DNA, 20 bp, Artificial Sequence
  Description of Artificial Sequence: Synthetic oligonucleotide
  Target: SCNA; (+) strand; PAM type: NRG; PAM sequence: CAG
tggtggcttttttcttgtct

SEQ ID NO: 34326 - DNA, 20 bp, Artificial Sequence
  Description of Artificial Sequence: Synthetic oligonucleotide
  Target: SCNA; (+) strand; PAM type: NRG; PAM sequence: AAG
tggcttttttcttgtctcag

SEQ ID NO: 34327 - DNA, 20 bp, Artificial Sequence
  Description of Artificial Sequence: Synthetic oligonucleotide
  Target: SCNA; (+) strand; PAM type: NRG; PAM sequence: TAG
ataaattaataaattctgca

SEQ ID NO: 34328 - DNA, 20 bp, Artificial Sequence
  Description of Artificial Sequence: Synthetic oligonucleotide
  Target: SCNA; (+) strand; PAM type: NRG; PAM sequence: AAG
gattttgtgtgacaaaaatg

SEQ ID NO: 34329 - DNA, 20 bp, Artificial Sequence
  Description of Artificial Sequence: Synthetic oligonucleotide
  Target: SCNA; (+) strand; PAM type: NRG; PAM sequence: AAG
aacctgtgcctctgtttaca

SEQ ID NO: 34330 - DNA, 20 bp, Artificial Sequence
  Description of Artificial Sequence: Synthetic oligonucleotide
  Target: SCNA; (+) strand; PAM type: NRG; PAM sequence: TGG
ctgtttacaaagcaatgcaa

SEQ ID NO: 34331 - DNA, 20 bp, Artificial Sequence
  Description of Artificial Sequence: Synthetic oligonucleotide
  Target: SCNA; (+) strand; PAM type: NRG; PAM sequence: GGG
tgtttacaaagcaatgcaat

SEQ ID NO: 34332 - DNA, 20 bp, Artificial Sequence
  Description of Artificial Sequence: Synthetic oligonucleotide
  Target: SCNA; (+) strand; PAM type: NRG; PAM sequence: TGG
gcaatgggaatcacctcccc

SEQ ID NO: 34333 - DNA, 20 bp, Artificial Sequence
  Description of Artificial Sequence: Synthetic oligonucleotide
  Target: SCNA; (+) strand; PAM type: NRG; PAM sequence: AAG
cttaaccccacccaccataa

SEQ ID NO: 34334 - DNA, 20 bp, Artificial Sequence
  Description of Artificial Sequence: Synthetic oligonucleotide
  Target: SCNA; (+) strand; PAM type: NRG; PAM sequence: AGG
ttaaccccacccaccataaa

SEQ ID NO: 34335 - DNA, 20 bp, Artificial Sequence
  Description of Artificial Sequence: Synthetic oligonucleotide
  Target: SCNA; (+) strand; PAM type: NRG; PAM sequence: CAG
tcatgctgattgaaattttc

SEQ ID NO: 34336 - DNA, 20 bp, Artificial Sequence
  Description of Artificial Sequence: Synthetic oligonucleotide
  Target: SCNA; (+) strand; PAM type: NRG; PAM sequence: TGG
ttttaaataacccccactac

SEQ ID NO: 34337 - DNA, 20 bp, Artificial Sequence
  Description of Artificial Sequence: Synthetic oligonucleotide
  Target: SCNA; (+) strand; PAM type: NRG; PAM sequence: CAG
ttatatgacaatgcttcttt

SEQ ID NO: 34338 - DNA, 20 bp, Artificial Sequence
  Description of Artificial Sequence: Synthetic oligonucleotide
  Target: SCNA; (+) strand; PAM type: NRG; PAM sequence: AGG
tatatgacaatgcttctttc

SEQ ID NO: 34339 - DNA, 20 bp, Artificial Sequence
  Description of Artificial Sequence: Synthetic oligonucleotide
  Target: SCNA; (+) strand; PAM type: NRG; PAM sequence: TGG
tctttcaggtgaaaatgtcc

SEQ ID NO: 34340 - DNA, 20 bp, Artificial Sequence
  Description of Artificial Sequence: Synthetic oligonucleotide
  Target: SCNA; (+) strand; PAM type: NRG; PAM sequence: AAG
ggtgaaaatgtcctggaaac

SEQ ID NO: 34341 - DNA, 20 bp, Artificial Sequence
  Description of Artificial Sequence: Synthetic oligonucleotide
  Target: SCNA; (+) strand; PAM type: NRG; PAM sequence: TGG
ggaaacaagtaatttttacc

SEQ ID NO: 34342 - DNA, 20 bp, Artificial Sequence
  Description of Artificial Sequence: Synthetic oligonucleotide
  Target: SCNA; (+) strand; PAM type: NRG; PAM sequence: AAG
tttttttttttttttttata

SEQ ID NO: 34343 - DNA, 20 bp, Artificial Sequence
  Description of Artificial Sequence: Synthetic oligonucleotide
  Target: SCNA; (+) strand; PAM type: NRG; PAM sequence: AAG
tttttttttttttataaaga

SEQ ID NO: 34344 - DNA, 20 bp, Artificial Sequence
  Description of Artificial Sequence: Synthetic oligonucleotide
  Target: SCNA; (+) strand; PAM type: NRG; PAM sequence: AAG
ttttttttttataaagaaag

SEQ ID NO: 34345 - DNA, 20 bp, Artificial Sequence
  Description of Artificial Sequence: Synthetic oligonucleotide
  Target: SCNA; (+) strand; PAM type: NRG; PAM sequence: TAG
aattgactcaccgttctgca

SEQ ID NO: 34346 - DNA, 20 bp, Artificial Sequence
  Description of Artificial Sequence: Synthetic oligonucleotide
  Target: SCNA; (+) strand; PAM type: NRG; PAM sequence: GAG
actcaccgttctgcatagct

SEQ ID NO: 34347 - DNA, 20 bp, Artificial Sequence
  Description of Artificial Sequence: Synthetic oligonucleotide
  Target: SCNA; (+) strand; PAM type: NRG; PAM sequence: AGG
ctcaccgttctgcatagctg

SEQ ID NO: 34348 - DNA, 20 bp, Artificial Sequence
  Description of Artificial Sequence: Synthetic oligonucleotide
  Target: SCNA; (+) strand; PAM type: NRG; PAM sequence: GAG
caccgttctgcatagctgag

SEQ ID NO: 34349 - DNA, 20 bp, Artificial Sequence
  Description of Artificial Sequence: Synthetic oligonucleotide
  Target: SCNA; (+) strand; PAM type: NRG; PAM sequence: AGG
accgttctgcatagctgagg

SEQ ID NO: 34350 - DNA, 20 bp, Artificial Sequence
  Description of Artificial Sequence: Synthetic oligonucleotide
  Target: SCNA; (+) strand; PAM type: NRG; PAM sequence: CAG
ctgcatagctgaggaggcct

SEQ ID NO: 34351 - DNA, 20 bp, Artificial Sequence
  Description of Artificial Sequence: Synthetic oligonucleotide
  Target: SCNA; (+) strand; PAM type: NRG; PAM sequence: AGG
tgcatagctgaggaggcctc

SEQ ID NO: 34352 - DNA, 20 bp, Artificial Sequence
  Description of Artificial Sequence: Synthetic oligonucleotide
  Target: SCNA; (+) strand; PAM type: NRG; PAM sequence: TAG
cctcaggaaacttacaatca

SEQ ID NO: 34353 - DNA, 20 bp, Artificial Sequence
  Description of Artificial Sequence: Synthetic oligonucleotide
  Target: SCNA; (+) strand; PAM type: NRG; PAM sequence: CAG
caggaaacttacaatcatag

SEQ ID NO: 34354 - DNA, 20 bp, Artificial Sequence
  Description of Artificial Sequence: Synthetic oligonucleotide
  Target: SCNA; (+) strand; PAM type: NRG; PAM sequence: AAG
gaaacttacaatcatagcag

SEQ ID NO: 34355 - DNA, 20 bp, Artificial Sequence
  Description of Artificial Sequence: Synthetic oligonucleotide
  Target: SCNA; (+) strand; PAM type: NRG; PAM sequence: AGG
aaacttacaatcatagcaga

SEQ ID NO: 34356 - DNA, 20 bp, Artificial Sequence
  Description of Artificial Sequence: Synthetic oligonucleotide
  Target: SCNA; (+) strand; PAM type: NRG; PAM sequence: GGG
aacttacaatcatagcagaa

SEQ ID NO: 34357 - DNA, 20 bp, Artificial Sequence
  Description of Artificial Sequence: Synthetic oligonucleotide
  Target: SCNA; (+) strand; PAM type: NRG; PAM sequence: GGG
acttacaatcatagcagaag

SEQ ID NO: 34358 - DNA, 20 bp, Artificial Sequence
  Description of Artificial Sequence: Synthetic oligonucleotide
  Target: SCNA; (+) strand; PAM type: NRG; PAM sequence: AAG
tacaatcatagcagaagggg

SEQ ID NO: 34359 - DNA, 20 bp, Artificial Sequence
  Description of Artificial Sequence: Synthetic oligonucleotide
  Target: SCNA; (+) strand; PAM type: NRG; PAM sequence: AGG
acaatcatagcagaagggga

SEQ ID NO: 34360 - DNA, 20 bp, Artificial Sequence
  Description of Artificial Sequence: Synthetic oligonucleotide
  Target: SCNA; (+) strand; PAM type: NRG; PAM sequence: GGG
caatcatagcagaaggggaa

SEQ ID NO: 34361 - DNA, 20 bp, Artificial Sequence
  Description of Artificial Sequence: Synthetic oligonucleotide
  Target: SCNA; (+) strand; PAM type: NRG; PAM sequence: GGG
aatcatagcagaaggggaag

SEQ ID NO: 34362 - DNA, 20 bp, Artificial Sequence
  Description of Artificial Sequence: Synthetic oligonucleotide
  Target: SCNA; (+) strand; PAM type: NRG; PAM sequence: AAG
catagcagaaggggaagggg

SEQ ID NO: 34363 - DNA, 20 bp, Artificial Sequence
  Description of Artificial Sequence: Synthetic oligonucleotide
  Target: SCNA; (+) strand; PAM type: NRG; PAM sequence: AAG
gcagaaggggaaggggaagc

SEQ ID NO: 34364 - DNA, 20 bp, Artificial Sequence
  Description of Artificial Sequence: Synthetic oligonucleotide
  Target: SCNA; (+) strand; PAM type: NRG; PAM sequence: AGG
cagaaggggaaggggaagca

SEQ ID NO: 34365 - DNA, 20 bp, Artificial Sequence
  Description of Artificial Sequence: Synthetic oligonucleotide
  Target: SCNA; (+) strand; PAM type: NRG; PAM sequence: TGG
gaagcaaggcacacctcaca

SEQ ID NO: 34366 - DNA, 20 bp, Artificial Sequence
  Description of Artificial Sequence: Synthetic oligonucleotide
  Target: SCNA; (+) strand; PAM type: NRG; PAM sequence: CAG
gcaaggcacacctcacatgg

SEQ ID NO: 34367 - DNA, 20 bp, Artificial Sequence
  Description of Artificial Sequence: Synthetic oligonucleotide
  Target: SCNA; (+) strand; PAM type: NRG; PAM sequence: AGG
caaggcacacctcacatggc

SEQ ID NO: 34368 - DNA, 20 bp, Artificial Sequence
  Description of Artificial Sequence: Synthetic oligonucleotide
  Target: SCNA; (+) strand; PAM type: NRG; PAM sequence: GAG
aggcacacctcacatggcag

SEQ ID NO: 34369 - DNA, 20 bp, Artificial Sequence
  Description of Artificial Sequence: Synthetic oligonucleotide
  Target: SCNA; (+) strand; PAM type: NRG; PAM sequence: AAG
acacctcacatggcaggaga

SEQ ID NO: 34370 - DNA, 20 bp, Artificial Sequence
  Description of Artificial Sequence: Synthetic oligonucleotide
  Target: SCNA; (+) strand; PAM type: NRG; PAM sequence: GAG
acctcacatggcaggagaaa

SEQ ID NO: 34371 - DNA, 20 bp, Artificial Sequence
  Description of Artificial Sequence: Synthetic oligonucleotide
  Target: SCNA; (+) strand; PAM type: NRG; PAM sequence: GAG
ctcacatggcaggagaaaga

SEQ ID NO: 34372 - DNA, 20 bp, Artificial Sequence
  Description of Artificial Sequence: Synthetic oligonucleotide
  Target: SCNA; (+) strand; PAM type: NRG; PAM sequence: GAG
cacatggcaggagaaagaga

SEQ ID NO: 34373 - DNA, 20 bp, Artificial Sequence
  Description of Artificial Sequence: Synthetic oligonucleotide
  Target: SCNA; (+) strand; PAM type: NRG; PAM sequence: AAG
gcaggagaaagagagagcaa

SEQ ID NO: 34374 - DNA, 20 bp, Artificial Sequence
  Description of Artificial Sequence: Synthetic oligonucleotide
  Target: SCNA; (+) strand; PAM type: NRG; PAM sequence: AGG
caggagaaagagagagcaaa

SEQ ID NO: 34375 - DNA, 20 bp, Artificial Sequence
  Description of Artificial Sequence: Synthetic oligonucleotide
  Target: SCNA; (+) strand; PAM type: NRG; PAM sequence: AAG
gagaaagagagagcaaaagg

SEQ ID NO: 34376 - DNA, 20 bp, Artificial Sequence
  Description of Artificial Sequence: Synthetic oligonucleotide
  Target: SCNA; (+) strand; PAM type: NRG; PAM sequence: TAG
gtgccatgattttaaaccat

SEQ ID NO: 34377 - DNA, 20 bp, Artificial Sequence
  Description of Artificial Sequence: Synthetic oligonucleotide
  Target: SCNA; (+) strand; PAM type: NRG; PAM sequence: GAG
tttaaaccattagatcttat

SEQ ID NO: 34378 - DNA, 20 bp, Artificial Sequence
  Description of Artificial Sequence: Synthetic oligonucleotide
  Target: SCNA; (+) strand; PAM type: NRG; PAM sequence: GAG
gagaactcattcactatcat

SEQ ID NO: 34379 - DNA, 20 bp, Artificial Sequence
  Description of Artificial Sequence: Synthetic oligonucleotide
  Target: SCNA; (+) strand; PAM type: NRG; PAM sequence: CAG
ctcattcactatcatgagaa

SEQ ID NO: 34380 - DNA, 20 bp, Artificial Sequence
  Description of Artificial Sequence: Synthetic oligonucleotide
  Target: SCNA; (+) strand; PAM type: NRG; PAM sequence: TGG
tcactatcatgagaacagca

SEQ ID NO: 34381 - DNA, 20 bp, Artificial Sequence
  Description of Artificial Sequence: Synthetic oligonucleotide
  Target: SCNA; (+) strand; PAM type: NRG; PAM sequence: GAG
actatcatgagaacagcatg

SEQ ID NO: 34382 - DNA, 20 bp, Artificial Sequence
  Description of Artificial Sequence: Synthetic oligonucleotide
  Target: SCNA; (+) strand; PAM type: NRG; PAM sequence: AAG
atgatccaatcacctcccat

SEQ ID NO: 34383 - DNA, 20 bp, Artificial Sequence
  Description of Artificial Sequence: Synthetic oligonucleotide
  Target: SCNA; (+) strand; PAM type: NRG; PAM sequence: AGG
tgatccaatcacctcccata

SEQ ID NO: 34384 - DNA, 20 bp, Artificial Sequence
  Description of Artificial Sequence: Synthetic oligonucleotide
  Target: SCNA; (+) strand; PAM type: NRG; PAM sequence: TGG
aaggtccctccctcaacaca

SEQ ID NO: 34385 - DNA, 20 bp, Artificial Sequence
  Description of Artificial Sequence: Synthetic oligonucleotide
  Target: SCNA; (+) strand; PAM type: NRG; PAM sequence: GGG
aggtccctccctcaacacat

SEQ ID NO: 34386 - DNA, 20 bp, Artificial Sequence
  Description of Artificial Sequence: Synthetic oligonucleotide
  Target: SCNA; (+) strand; PAM type: NRG; PAM sequence: GGG
ggtccctccctcaacacatg

SEQ ID NO: 34387 - DNA, 20 bp, Artificial Sequence
  Description of Artificial Sequence: Synthetic oligonucleotide
  Target: SCNA; (+) strand; PAM type: NRG; PAM sequence: GGG
gtccctccctcaacacatgg

SEQ ID NO: 34388 - DNA, 20 bp, Artificial Sequence
  Description of Artificial Sequence: Synthetic oligonucleotide
  Target: SCNA; (+) strand; PAM type: NRG; PAM sequence: AAG
acacatgggggttacaattc

SEQ ID NO: 34389 - DNA, 20 bp, Artificial Sequence
  Description of Artificial Sequence: Synthetic oligonucleotide
  Target: SCNA; (+) strand; PAM type: NRG; PAM sequence: GAG
tgggggttacaattcaagat

SEQ ID NO: 34390 - DNA, 20 bp, Artificial Sequence
  Description of Artificial Sequence: Synthetic oligonucleotide
  Target: SCNA; (+) strand; PAM type: NRG; PAM sequence: TGG
ttacaattcaagatgagatt

SEQ ID NO: 34391 - DNA, 20 bp, Artificial Sequence
  Description of Artificial Sequence: Synthetic oligonucleotide
  Target: SCNA; (+) strand; PAM type: NRG; PAM sequence: GGG
tacaattcaagatgagattt

SEQ ID NO: 34392 - DNA, 20 bp, Artificial Sequence
  Description of Artificial Sequence: Synthetic oligonucleotide
  Target: SCNA; (+) strand; PAM type: NRG; PAM sequence: TGG
aattcaagatgagatttggg

SEQ ID NO: 34393 - DNA, 20 bp, Artificial Sequence
  Description of Artificial Sequence: Synthetic oligonucleotide
  Target: SCNA; (+) strand; PAM type: NRG; PAM sequence: GGG
attcaagatgagatttgggt

SEQ ID NO: 34394 - DNA, 20 bp, Artificial Sequence
  Description of Artificial Sequence: Synthetic oligonucleotide
  Target: SCNA; (+) strand; PAM type: NRG; PAM sequence: GGG
ttcaagatgagatttgggtg

SEQ ID NO: 34395 - DNA, 20 bp, Artificial Sequence
  Description of Artificial Sequence: Synthetic oligonucleotide
  Target: SCNA; (+) strand; PAM type: NRG; PAM sequence: AAG
gagatttgggtggggacaca

SEQ ID NO: 34396 - DNA, 20 bp, Artificial Sequence
  Description of Artificial Sequence: Synthetic oligonucleotide
  Target: SCNA; (+) strand; PAM type: NRG; PAM sequence: TGG
aaagccaaaccgtatcacta

SEQ ID NO: 34397 - DNA, 20 bp, Artificial Sequence
  Description of Artificial Sequence: Synthetic oligonucleotide
  Target: SCNA; (+) strand; PAM type: NRG; PAM sequence: TGG
ccaaaccgtatcactatgga

SEQ ID NO: 34398 - DNA, 20 bp, Artificial Sequence
  Description of Artificial Sequence: Synthetic oligonucleotide
  Target: SCNA; (+) strand; PAM type: NRG; PAM sequence: TAG
aaccgtatcactatggatgg

SEQ ID NO: 34399 - DNA, 20 bp, Artificial Sequence
  Description of Artificial Sequence: Synthetic oligonucleotide
  Target: SCNA; (+) strand; PAM type: NRG; PAM sequence: CAG
atcactatggatggtagtat

SEQ ID NO: 34400 - DNA, 20 bp, Artificial Sequence
  Description of Artificial Sequence: Synthetic oligonucleotide
  Target: SCNA; (+) strand; PAM type: NRG; PAM sequence: AGG
tcactatggatggtagtatc

SEQ ID NO: 34401 - DNA, 20 bp, Artificial Sequence
  Description of Artificial Sequence: Synthetic oligonucleotide
  Target: SCNA; (+) strand; PAM type: NRG; PAM sequence: GGG
cactatggatggtagtatca

SEQ ID NO: 34402 - DNA, 20 bp, Artificial Sequence
  Description of Artificial Sequence: Synthetic oligonucleotide
  Target: SCNA; (+) strand; PAM type: NRG; PAM sequence: AAG
ttttttttaaattatacttt

SEQ ID NO: 34403 - DNA, 20 bp, Artificial Sequence
  Description of Artificial Sequence: Synthetic oligonucleotide
  Target: SCNA; (+) strand; PAM type: NRG; PAM sequence: TAG
ttaaattatactttaagttt

SEQ ID NO: 34404 - DNA, 20 bp, Artificial Sequence
  Description of Artificial Sequence: Synthetic oligonucleotide
  Target: SCNA; (+) strand; PAM type: NRG; PAM sequence: AGG
taaattatactttaagtttt

SEQ ID NO: 34405 - DNA, 20 bp, Artificial Sequence
  Description of Artificial Sequence: Synthetic oligonucleotide
  Target: SCNA; (+) strand; PAM type: NRG; PAM sequence: GGG
aaattatactttaagtttta

SEQ ID NO: 34406 - DNA, 20 bp, Artificial Sequence
  Description of Artificial Sequence: Synthetic oligonucleotide
  Target: SCNA; (+) strand; PAM type: NRG; PAM sequence: CAG
gggtacatgtgcacattgtg

SEQ ID NO: 34407 - DNA, 20 bp, Artificial Sequence
  Description of Artificial Sequence: Synthetic oligonucleotide
  Target: SCNA; (+) strand; PAM type: NRG; PAM sequence: AGG
ggtacatgtgcacattgtgc

SEQ ID NO: 34408 - DNA, 20 bp, Artificial Sequence
  Description of Artificial Sequence: Synthetic oligonucleotide
  Target: SCNA; (+) strand; PAM type: NRG; PAM sequence: TAG
catgtgcacattgtgcaggt

SEQ ID NO: 34409 - DNA, 20 bp, Artificial Sequence
  Description of Artificial Sequence: Synthetic oligonucleotide
  Target: SCNA; (+) strand; PAM type: NRG; PAM sequence: TGG
acatatgtatacatgtgacc

SEQ ID NO: 34410 - DNA, 20 bp, Artificial Sequence
  Description of Artificial Sequence: Synthetic oligonucleotide
  Target: SCNA; (+) strand; PAM type: NRG; PAM sequence: AAG
atgtgacctggctaccttta

SEQ ID NO: 34411 - DNA, 20 bp, Artificial Sequence
  Description of Artificial Sequence: Synthetic oligonucleotide
  Target: SCNA; (+) strand; PAM type: NRG; PAM sequence: TGG
gacctggctacctttaaaga

SEQ ID NO: 34412 - DNA, 20 bp, Artificial Sequence
  Description of Artificial Sequence: Synthetic oligonucleotide
  Target: SCNA; (+) strand; PAM type: NRG; PAM sequence: AAG
tgctttcacttgaaaaaaaa

SEQ ID NO: 34413 - DNA, 20 bp, Artificial Sequence
  Description of Artificial Sequence: Synthetic oligonucleotide
  Target: SCNA; (+) strand; PAM type: NRG; PAM sequence: AAG
tttcacttgaaaaaaaaaag

SEQ ID NO: 34414 - DNA, 20 bp, Artificial Sequence
  Description of Artificial Sequence: Synthetic oligonucleotide
  Target: SCNA; (+) strand; PAM type: NRG; PAM sequence: GAG
aagaaaaaaacctcaaaaat

SEQ ID NO: 34415 - DNA, 20 bp, Artificial Sequence
  Description of Artificial Sequence: Synthetic oligonucleotide
  Target: SCNA; (+) strand; PAM type: NRG; PAM sequence: AAG
aaaaaaacctcaaaaatgag

SEQ ID NO: 34416 - DNA, 20 bp, Artificial Sequence
  Description of Artificial Sequence: Synthetic oligonucleotide
  Target: SCNA; (+) strand; PAM type: NRG; PAM sequence: AGG
aaaaaacctcaaaaatgaga

SEQ ID NO: 34417 - DNA, 20 bp, Artificial Sequence
  Description of Artificial Sequence: Synthetic oligonucleotide
  Target: SCNA; (+) strand; PAM type: NRG; PAM sequence: GGG
aaaaacctcaaaaatgagaa

SEQ ID NO: 34418 - DNA, 20 bp, Artificial Sequence
  Description of Artificial Sequence: Synthetic oligonucleotide
  Target: SCNA; (+) strand; PAM type: NRG; PAM sequence: GAG
tgagaagggctttccgactt

SEQ ID NO: 34419 - DNA, 20 bp, Artificial Sequence
  Description of Artificial Sequence: Synthetic oligonucleotide
  Target: SCNA; (+) strand; PAM type: NRG; PAM sequence: AGG
gagaagggctttccgacttg

SEQ ID NO: 34420 - DNA, 20 bp, Artificial Sequence
  Description of Artificial Sequence: Synthetic oligonucleotide
  Target: SCNA; (+) strand; PAM type: NRG; PAM sequence: AAG
agggctttccgacttgagga

SEQ ID NO: 34421 - DNA, 20 bp, Artificial Sequence
  Description of Artificial Sequence: Synthetic oligonucleotide
  Target: SCNA; (+) strand; PAM type: NRG; PAM sequence: TAG
caaatctttttaacttgcac

SEQ ID NO: 34422 - DNA, 20 bp, Artificial Sequence
  Description of Artificial Sequence: Synthetic oligonucleotide
  Target: SCNA; (+) strand; PAM type: NRG; PAM sequence: AGG
aaatctttttaacttgcact

SEQ ID NO: 34423 - DNA, 20 bp, Artificial Sequence
  Description of Artificial Sequence: Synthetic oligonucleotide
  Target: SCNA; (+) strand; PAM type: NRG; PAM sequence: TAG
cacgacattttcttgcctct

SEQ ID NO: 34424 - DNA, 20 bp, Artificial Sequence
  Description of Artificial Sequence: Synthetic oligonucleotide
  Target: SCNA; (+) strand; PAM type: NRG; PAM sequence: TGG
acattttcttgcctcttaga

SEQ ID NO: 34425 - DNA, 20 bp, Artificial Sequence
  Description of Artificial Sequence: Synthetic oligonucleotide
  Target: SCNA; (+) strand; PAM type: NRG; PAM sequence: TGG
ctcttagatggtttgtattt

SEQ ID NO: 34426 - DNA, 20 bp, Artificial Sequence
  Description of Artificial Sequence: Synthetic oligonucleotide
  Target: SCNA; (+) strand; PAM type: NRG; PAM sequence: AAG
ttgtattttggatgcttctg

SEQ ID NO: 34427 - DNA, 20 bp, Artificial Sequence
  Description of Artificial Sequence: Synthetic oligonucleotide
  Target: SCNA; (+) strand; PAM type: NRG; PAM sequence: GAG
gtattttggatgcttctgaa

SEQ ID NO: 34428 - DNA, 20 bp, Artificial Sequence
  Description of Artificial Sequence: Synthetic oligonucleotide
  Target: SCNA; (+) strand; PAM type: NRG; PAM sequence: AAG
gatgcttctgaagagaaaca

SEQ ID NO: 34429 - DNA, 20 bp, Artificial Sequence
  Description of Artificial Sequence: Synthetic oligonucleotide
  Target: SCNA; (+) strand; PAM type: NRG; PAM sequence: TAG
tgaagagaaacaaagacata

SEQ ID NO: 34430 - DNA, 20 bp, Artificial Sequence
  Description of Artificial Sequence: Synthetic oligonucleotide
  Target: SCNA; (+) strand; PAM type: NRG; PAM sequence: TAG
acattatctgtgtttatttg

SEQ ID NO: 34431 - DNA, 20 bp, Artificial Sequence
  Description of Artificial Sequence: Synthetic oligonucleotide
  Target: SCNA; (+) strand; PAM type: NRG; PAM sequence: GAG
ttgtattttgttttttaaat

SEQ ID NO: 34432 - DNA, 20 bp, Artificial Sequence
  Description of Artificial Sequence: Synthetic oligonucleotide
  Target: SCNA; (+) strand; PAM type: NRG; PAM sequence: TAG
tgtctgatatctcatacatt

SEQ ID NO: 34433 - DNA, 20 bp, Artificial Sequence
  Description of Artificial Sequence: Synthetic oligonucleotide
  Target: SCNA; (+) strand; PAM type: NRG; PAM sequence: TAG
tacatttagaatatttgtaa

SEQ ID NO: 34434 - DNA, 20 bp, Artificial Sequence
  Description of Artificial Sequence: Synthetic oligonucleotide
  Target: SCNA; (+) strand; PAM type: NRG; PAM sequence: TAG
ttagaatatttgtaatagaa

SEQ ID NO: 34435 - DNA, 20 bp, Artificial Sequence
  Description of Artificial Sequence: Synthetic oligonucleotide
  Target: SCNA; (+) strand; PAM type: NRG; PAM sequence: TGG
agaatagcaaatttccacca

SEQ ID NO: 34436 - DNA, 20 bp, Artificial Sequence
  Description of Artificial Sequence: Synthetic oligonucleotide
  Target: SCNA; (+) strand; PAM type: NRG; PAM sequence: CAG
gcaaatttccaccatggaat

SEQ ID NO: 34437 - DNA, 20 bp, Artificial Sequence
  Description of Artificial Sequence: Synthetic oligonucleotide
  Target: SCNA; (+) strand; PAM type: NRG; PAM sequence: TGG
aatttccaccatggaatcag

SEQ ID NO: 34438 - DNA, 20 bp, Artificial Sequence
  Description of Artificial Sequence: Synthetic oligonucleotide
  Target: SCNA; (+) strand; PAM type: NRG; PAM sequence: GAG
tttccaccatggaatcagtg

SEQ ID NO: 34439 - DNA, 20 bp, Artificial Sequence
  Description of Artificial Sequence: Synthetic oligonucleotide
  Target: SCNA; (+) strand; PAM type: NRG; PAM sequence: GAG
tccaccatggaatcagtgga

SEQ ID NO: 34440 - DNA, 20 bp, Artificial Sequence
  Description of Artificial Sequence: Synthetic oligonucleotide
  Target: SCNA; (+) strand; PAM type: NRG; PAM sequence: AAG
tatgcaatttaacaactgca

SEQ ID NO: 34441 - DNA, 20 bp, Artificial Sequence
  Description of Artificial Sequence: Synthetic oligonucleotide
  Target: SCNA; (+) strand; PAM type: NRG; PAM sequence: TAG
ttaacaactgcaaagaatct

SEQ ID NO: 34442 - DNA, 20 bp, Artificial Sequence
  Description of Artificial Sequence: Synthetic oligonucleotide
  Target: SCNA; (+) strand; PAM type: NRG; PAM sequence: GAG
aacaactgcaaagaatctta

SEQ ID NO: 34443 - DNA, 20 bp, Artificial Sequence
  Description of Artificial Sequence: Synthetic oligonucleotide
  Target: SCNA; (+) strand; PAM type: NRG; PAM sequence: TAG
caaagaatcttagagatcct

SEQ ID NO: 34444 - DNA, 20 bp, Artificial Sequence
  Description of Artificial Sequence: Synthetic oligonucleotide
  Target: SCNA; (+) strand; PAM type: NRG; PAM sequence: GAG
aagaatcttagagatcctta

SEQ ID NO: 34445 - DNA, 20 bp, Artificial Sequence
  Description of Artificial Sequence: Synthetic oligonucleotide
  Target: SCNA; (+) strand; PAM type: NRG; PAM sequence: TGG
cacatcctcttatttacaaa

SEQ ID NO: 34446 - DNA, 20 bp, Artificial Sequence
  Description of Artificial Sequence: Synthetic oligonucleotide
  Target: SCNA; (+) strand; PAM type: NRG; PAM sequence: GGG
acatcctcttatttacaaat

SEQ ID NO: 34447 - DNA, 20 bp, Artificial Sequence
  Description of Artificial Sequence: Synthetic oligonucleotide
  Target: SCNA; (+) strand; PAM type: NRG; PAM sequence: GGG
catcctcttatttacaaatg

SEQ ID NO: 34448 - DNA, 20 bp, Artificial Sequence
  Description of Artificial Sequence: Synthetic oligonucleotide
  Target: SCNA; (+) strand; PAM type: NRG; PAM sequence: CAG
cttatttacaaatggggaaa

SEQ ID NO: 34449 - DNA, 20 bp, Artificial Sequence
  Description of Artificial Sequence: Synthetic oligonucleotide
  Target: SCNA; (+) strand; PAM type: NRG; PAM sequence: AGG
ttatttacaaatggggaaac

SEQ ID NO: 34450 - DNA, 20 bp, Artificial Sequence
  Description of Artificial Sequence: Synthetic oligonucleotide
  Target: SCNA; (+) strand; PAM type: NRG; PAM sequence: GGG
tatttacaaatggggaaaca

SEQ ID NO: 34451 - DNA, 20 bp, Artificial Sequence
  Description of Artificial Sequence: Synthetic oligonucleotide
  Target: SCNA; (+) strand; PAM type: NRG; PAM sequence: GAG
aatggggaaacagggtatac

SEQ ID NO: 34452 - DNA, 20 bp, Artificial Sequence
  Description of Artificial Sequence: Synthetic oligonucleotide
  Target: SCNA; (+) strand; PAM type: NRG; PAM sequence: TAG
ggggaaacagggtatacgag

SEQ ID NO: 34453 - DNA, 20 bp, Artificial Sequence
  Description of Artificial Sequence: Synthetic oligonucleotide
  Target: SCNA; (+) strand; PAM type: NRG; PAM sequence: AAG
gaaacagggtatacgagtag

SEQ ID NO: 34454 - DNA, 20 bp, Artificial Sequence
  Description of Artificial Sequence: Synthetic oligonucleotide
  Target: SCNA; (+) strand; PAM type: NRG; PAM sequence: AAG
aagtgacttgcctaatccat

SEQ ID NO: 34455 - DNA, 20 bp, Artificial Sequence
  Description of Artificial Sequence: Synthetic oligonucleotide
  Target: SCNA; (+) strand; PAM type: NRG; PAM sequence: TAG
gacttgcctaatccataagc

SEQ ID NO: 34456 - DNA, 20 bp, Artificial Sequence
  Description of Artificial Sequence: Synthetic oligonucleotide
  Target: SCNA; (+) strand; PAM type: NRG; PAM sequence: AGG
acttgcctaatccataagct

SEQ ID NO: 34457 - DNA, 20 bp, Artificial Sequence
  Description of Artificial Sequence: Synthetic oligonucleotide
  Target: SCNA; (+) strand; PAM type: NRG; PAM sequence: GGG
cttgcctaatccataagcta

SEQ ID NO: 34458 - DNA, 20 bp, Artificial Sequence
  Description of Artificial Sequence: Synthetic oligonucleotide
  Target: SCNA; (+) strand; PAM type: NRG; PAM sequence: GGG
ttgcctaatccataagctag

SEQ ID NO: 34459 - DNA, 20 bp, Artificial Sequence
  Description of Artificial Sequence: Synthetic oligonucleotide
  Target: SCNA; (+) strand; PAM type: NRG; PAM sequence: CAG
tccataagctaggggtacaa

SEQ ID NO: 34460 - DNA, 20 bp, Artificial Sequence
  Description of Artificial Sequence: Synthetic oligonucleotide
  Target: SCNA; (+) strand; PAM type: NRG; PAM sequence: AGG
ccataagctaggggtacaac

SEQ ID NO: 34461 - DNA, 20 bp, Artificial Sequence
  Description of Artificial Sequence: Synthetic oligonucleotide
  Target: SCNA; (+) strand; PAM type: NRG; PAM sequence: GGG
cataagctaggggtacaaca

SEQ ID NO: 34462 - DNA, 20 bp, Artificial Sequence
  Description of Artificial Sequence: Synthetic oligonucleotide
  Target: SCNA; (+) strand; PAM type: NRG; PAM sequence: TAG
taggggtacaacagggtcat

SEQ ID NO: 34463 - DNA, 20 bp, Artificial Sequence
  Description of Artificial Sequence: Synthetic oligonucleotide
  Target: SCNA; (+) strand; PAM type: NRG; PAM sequence: AGG
aggggtacaacagggtcatt

SEQ ID NO: 34464 - DNA, 20 bp, Artificial Sequence
  Description of Artificial Sequence: Synthetic oligonucleotide
  Target: SCNA; (+) strand; PAM type: NRG; PAM sequence: GGG
ggggtacaacagggtcatta

SEQ ID NO: 34465 - DNA, 20 bp, Artificial Sequence
  Description of Artificial Sequence: Synthetic oligonucleotide
  Target: SCNA; (+) strand; PAM type: NRG; PAM sequence: TAG
atttctccctgatatgatcc

SEQ ID NO: 34466 - DNA, 20 bp, Artificial Sequence
  Description of Artificial Sequence: Synthetic oligonucleotide
  Target: SCNA; (+) strand; PAM type: NRG; PAM sequence: TGG
ccctgatatgatcctagcga

SEQ ID NO: 34467 - DNA, 20 bp, Artificial Sequence
  Description of Artificial Sequence: Synthetic oligonucleotide
  Target: SCNA; (+) strand; PAM type: NRG; PAM sequence: GAG
ctgatatgatcctagcgatg

SEQ ID NO: 34468 - DNA, 20 bp, Artificial Sequence
  Description of Artificial Sequence: Synthetic oligonucleotide
  Target: SCNA; (+) strand; PAM type: NRG; PAM sequence: TAG
cctaccaactttctttacaa

SEQ ID NO: 34469 - DNA, 20 bp, Artificial Sequence
  Description of Artificial Sequence: Synthetic oligonucleotide
  Target: SCNA; (+) strand; PAM type: NRG; PAM sequence: TAG
ctttacaatagcccaacgtc

SEQ ID NO: 34470 - DNA, 20 bp, Artificial Sequence
  Description of Artificial Sequence: Synthetic oligonucleotide
  Target: SCNA; (+) strand; PAM type: NRG; PAM sequence: GAG
aatagcccaacgtctagtat

SEQ ID NO: 34471 - DNA, 20 bp, Artificial Sequence
  Description of Artificial Sequence: Synthetic oligonucleotide
  Target: SCNA; (+) strand; PAM type: NRG; PAM sequence: TGG
ctagtatgagaatcattctg

SEQ ID NO: 34472 - DNA, 20 bp, Artificial Sequence
  Description of Artificial Sequence: Synthetic oligonucleotide
  Target: SCNA; (+) strand; PAM type: NRG; PAM sequence: TGG
ccaaattgaaacaatctcct

SEQ ID NO: 34473 - DNA, 20 bp, Artificial Sequence
  Description of Artificial Sequence: Synthetic oligonucleotide
  Target: SCNA; (+) strand; PAM type: NRG; PAM sequence: TGG
caatctccttggattactcc

SEQ ID NO: 34474 - DNA, 20 bp, Artificial Sequence
  Description of Artificial Sequence: Synthetic oligonucleotide
  Target: SCNA; (+) strand; PAM type: NRG; PAM sequence: CAG
tccttggattactcctggca

SEQ ID NO: 34475 - DNA, 20 bp, Artificial Sequence
  Description of Artificial Sequence: Synthetic oligonucleotide
  Target: SCNA; (+) strand; PAM type: NRG; PAM sequence: TAG
gcacagcttatgtattctca

SEQ ID NO: 34476 - DNA, 20 bp, Artificial Sequence
  Description of Artificial Sequence: Synthetic oligonucleotide
  Target: SCNA; (+) strand; PAM type: NRG; PAM sequence: TGG
tattctcatagccaatcccc

SEQ ID NO: 34477 - DNA, 20 bp, Artificial Sequence
  Description of Artificial Sequence: Synthetic oligonucleotide
  Target: SCNA; (+) strand; PAM type: NRG; PAM sequence: TAG
cctggtcatgactctgacac

SEQ ID NO: 34478 - DNA, 20 bp, Artificial Sequence
  Description of Artificial Sequence: Synthetic oligonucleotide
  Target: SCNA; (+) strand; PAM type: NRG; PAM sequence: TAG
ggtcatgactctgacactag

SEQ ID NO: 34479 - DNA, 20 bp, Artificial Sequence
  Description of Artificial Sequence: Synthetic oligonucleotide
  Target: SCNA; (+) strand; PAM type: NRG; PAM sequence: AAG
ctctgacactagtagataaa

SEQ ID NO: 34480 - DNA, 20 bp, Artificial Sequence
  Description of Artificial Sequence: Synthetic oligonucleotide
  Target: SCNA; (+) strand; PAM type: NRG; PAM sequence: CAG
tgcctttatttttacacatg

SEQ ID NO: 34481 - DNA, 20 bp, Artificial Sequence
  Description of Artificial Sequence: Synthetic oligonucleotide
  Target: SCNA; (+) strand; PAM type: NRG; PAM sequence: CAG
atttttacacatgcagtact

SEQ ID NO: 34482 - DNA, 20 bp, Artificial Sequence
  Description of Artificial Sequence: Synthetic oligonucleotide
  Target: SCNA; (+) strand; PAM type: NRG; PAM sequence: GAG
ttttacacatgcagtactca

SEQ ID NO: 34483 - DNA, 20 bp, Artificial Sequence
  Description of Artificial Sequence: Synthetic oligonucleotide
  Target: SCNA; (+) strand; PAM type: NRG; PAM sequence: TAG
ctcagagtctaaacaaacct

SEQ ID NO: 34484 - DNA, 20 bp, Artificial Sequence
  Description of Artificial Sequence: Synthetic oligonucleotide
  Target: SCNA; (+) strand; PAM type: NRG; PAM sequence: AAG
agcttgcattttcctcttaa

SEQ ID NO: 34485 - DNA, 20 bp, Artificial Sequence
  Description of Artificial Sequence: Synthetic oligonucleotide
  Target: SCNA; (+) strand; PAM type: NRG; PAM sequence: TGG
ttcctcttaaaagcccacca

SEQ ID NO: 34486 - DNA, 20 bp, Artificial Sequence
  Description of Artificial Sequence: Synthetic oligonucleotide
  Target: SCNA; (+) strand; PAM type: NRG; PAM sequence: CAG
aaagcccaccatggatctca

SEQ ID NO: 34487 - DNA, 20 bp, Artificial Sequence
  Description of Artificial Sequence: Synthetic oligonucleotide
  Target: SCNA; (+) strand; PAM type: NRG; PAM sequence: GAG
ttgttgttgttgttgttgtt

SEQ ID NO: 34488 - DNA, 20 bp, Artificial Sequence
  Description of Artificial Sequence: Synthetic oligonucleotide
  Target: SCNA; (+) strand; PAM type: NRG; PAM sequence: CGG
tgttgttgttgttgttgaga

SEQ ID NO: 34489 - DNA, 20 bp, Artificial Sequence
  Description of Artificial Sequence: Synthetic oligonucleotide
  Target: SCNA; (+) strand; PAM type: NRG; PAM sequence: GGG
gttgttgttgttgttgagac

SEQ ID NO: 34490 - DNA, 20 bp, Artificial Sequence
  Description of Artificial Sequence: Synthetic oligonucleotide
  Target: SCNA; (+) strand; PAM type: NRG; PAM sequence: CAG
acgggatctcactctgttgc

SEQ ID NO: 34491 - DNA, 20 bp, Artificial Sequence
  Description of Artificial Sequence: Synthetic oligonucleotide
  Target: SCNA; (+) strand; PAM type: NRG; PAM sequence: AGG
cgggatctcactctgttgcc

SEQ ID NO: 34492 - DNA, 20 bp, Artificial Sequence
  Description of Artificial Sequence: Synthetic oligonucleotide
  Target: SCNA; (+) strand; PAM type: NRG; PAM sequence: TGG
atctcactctgttgccaggc

SEQ ID NO: 34493 - DNA, 20 bp, Artificial Sequence
  Description of Artificial Sequence: Synthetic oligonucleotide
  Target: SCNA; (+) strand; PAM type: NRG; PAM sequence: GAG
ctcactctgttgccaggctg

SEQ ID NO: 34494 - DNA, 20 bp, Artificial Sequence
  Description of Artificial Sequence: Synthetic oligonucleotide
  Target: SCNA; (+) strand; PAM type: NRG; PAM sequence: CAG
tctgttgccaggctggagtg

SEQ ID NO: 34495 - DNA, 20 bp, Artificial Sequence
  Description of Artificial Sequence: Synthetic oligonucleotide
  Target: SCNA; (+) strand; PAM type: NRG; PAM sequence: TGG
gttgccaggctggagtgcag

SEQ ID NO: 34496 - DNA, 20 bp, Artificial Sequence
  Description of Artificial Sequence: Synthetic oligonucleotide
  Target: SCNA; (+) strand; PAM type: NRG; PAM sequence: TGG
ggagtgcagtggcacaatct

SEQ ID NO: 34497 - DNA, 20 bp, Artificial Sequence
  Description of Artificial Sequence: Synthetic oligonucleotide
  Target: SCNA; (+) strand; PAM type: NRG; PAM sequence: TGG
cactgcaacctccgactcct

SEQ ID NO: 34498 - DNA, 20 bp, Artificial Sequence
  Description of Artificial Sequence: Synthetic oligonucleotide
  Target: SCNA; (+) strand; PAM type: NRG; PAM sequence: AAG
ctccgactccttggttgttc

SEQ ID NO: 34499 - DNA, 20 bp, Artificial Sequence
  Description of Artificial Sequence: Synthetic oligonucleotide
  Target: SCNA; (+) strand; PAM type: NRG; PAM sequence: CAG
ttcaagtgattctcttgcct

SEQ ID NO: 34500 - DNA, 20 bp, Artificial Sequence
  Description of Artificial Sequence: Synthetic oligonucleotide
  Target: SCNA; (+) strand; PAM type: NRG; PAM sequence: TAG
tcttgcctcagcctcccaaa

SEQ ID NO: 34501 - DNA, 20 bp, Artificial Sequence
  Description of Artificial Sequence: Synthetic oligonucleotide
  Target: SCNA; (+) strand; PAM type: NRG; PAM sequence: GAG
cctcagcctcccaaatagct

SEQ ID NO: 34502 - DNA, 20 bp, Artificial Sequence
  Description of Artificial Sequence: Synthetic oligonucleotide
  Target: SCNA; (+) strand; PAM type: NRG; PAM sequence: CAG
ctcccaaatagctgagatta

SEQ ID NO: 34503 - DNA, 20 bp, Artificial Sequence
  Description of Artificial Sequence: Synthetic oligonucleotide
  Target: SCNA; (+) strand; PAM type: NRG; PAM sequence: AGG
tcccaaatagctgagattac

SEQ ID NO: 34504 - DNA, 20 bp, Artificial Sequence
  Description of Artificial Sequence: Synthetic oligonucleotide
  Target: SCNA; (+) strand; PAM type: NRG; PAM sequence: CAG
agattacaggcacgcgccac

SEQ ID NO: 34505 - DNA, 20 bp, Artificial Sequence
  Description of Artificial Sequence: Synthetic oligonucleotide
  Target: SCNA; (+) strand; PAM type: NRG; PAM sequence: AGG
gattacaggcacgcgccacc

SEQ ID NO: 34506 - DNA, 20 bp, Artificial Sequence
  Description of Artificial Sequence: Synthetic oligonucleotide
  Target: SCNA; (+) strand; PAM type: NRG; PAM sequence: CAG
caggcacgcgccaccaggcc

SEQ ID NO: 34507 - DNA, 20 bp, Artificial Sequence
  Description of Artificial Sequence: Synthetic oligonucleotide
  Target: SCNA; (+) strand; PAM type: NRG; PAM sequence: TAG
ccagctaatttttgtatttt

SEQ ID NO: 34508 - DNA, 20 bp, Artificial Sequence
  Description of Artificial Sequence: Synthetic oligonucleotide
  Target: SCNA; (+) strand; PAM type: NRG; PAM sequence: TAG
gctaatttttgtatttttag

SEQ ID NO: 34509 - DNA, 20 bp, Artificial Sequence
  Description of Artificial Sequence: Synthetic oligonucleotide
  Target: SCNA; (+) strand; PAM type: NRG; PAM sequence: GAG
taatttttgtatttttagta

SEQ ID NO: 34510 - DNA, 20 bp, Artificial Sequence
  Description of Artificial Sequence: Synthetic oligonucleotide
  Target: SCNA; (+) strand; PAM type: NRG; PAM sequence: CAG
ttttgtatttttagtagaga

SEQ ID NO: 34511 - DNA, 20 bp, Artificial Sequence
  Description of Artificial Sequence: Synthetic oligonucleotide
  Target: SCNA; (+) strand; PAM type: NRG; PAM sequence: TGG
gagacagcgtttcaccatgt

SEQ ID NO: 34512 - DNA, 20 bp, Artificial Sequence
  Description of Artificial Sequence: Synthetic oligonucleotide
  Target: SCNA; (+) strand; PAM type: NRG; PAM sequence: CAG
cagcgtttcaccatgttggc

SEQ ID NO: 34513 - DNA, 20 bp, Artificial Sequence
  Description of Artificial Sequence: Synthetic oligonucleotide
  Target: SCNA; (+) strand; PAM type: NRG; PAM sequence: AGG
agcgtttcaccatgttggcc

SEQ ID NO: 34514 - DNA, 20 bp, Artificial Sequence
  Description of Artificial Sequence: Synthetic oligonucleotide
  Target: SCNA; (+) strand; PAM type: NRG; PAM sequence: TGG
tttcaccatgttggccagga

SEQ ID NO: 34515 - DNA, 20 bp, Artificial Sequence
  Description of Artificial Sequence: Synthetic oligonucleotide
  Target: SCNA; (+) strand; PAM type: NRG; PAM sequence: CAG
acctcgtgatccacccacct

SEQ ID NO: 34516 - DNA, 20 bp, Artificial Sequence
  Description of Artificial Sequence: Synthetic oligonucleotide
  Target: SCNA; (+) strand; PAM type: NRG; PAM sequence: AAG
ccacccacctcagccttcca

SEQ ID NO: 34517 - DNA, 20 bp, Artificial Sequence
  Description of Artificial Sequence: Synthetic oligonucleotide
  Target: SCNA; (+) strand; PAM type: NRG; PAM sequence: TGG
acctcagccttccaaagtgc

SEQ ID NO: 34518 - DNA, 20 bp, Artificial Sequence
  Description of Artificial Sequence: Synthetic oligonucleotide
  Target: SCNA; (+) strand; PAM type: NRG; PAM sequence: GGG
cctcagccttccaaagtgct

SEQ ID NO: 34519 - DNA, 20 bp, Artificial Sequence
  Description of Artificial Sequence: Synthetic oligonucleotide
  Target: SCNA; (+) strand; PAM type: NRG; PAM sequence: TAG
cttccaaagtgctgggatta

SEQ ID NO: 34520 - DNA, 20 bp, Artificial Sequence
  Description of Artificial Sequence: Synthetic oligonucleotide
  Target: SCNA; (+) strand; PAM type: NRG; PAM sequence: AGG
ttccaaagtgctgggattat

SEQ ID NO: 34521 - DNA, 20 bp, Artificial Sequence
  Description of Artificial Sequence: Synthetic oligonucleotide
  Target: SCNA; (+) strand; PAM type: NRG; PAM sequence: GAG
agtgctgggattataggcgt

SEQ ID NO: 34522 - DNA, 20 bp, Artificial Sequence
  Description of Artificial Sequence: Synthetic oligonucleotide
  Target: SCNA; (+) strand; PAM type: NRG; PAM sequence: CGG
taggcgtgagccaccgcgcc

SEQ ID NO: 34523 - DNA, 20 bp, Artificial Sequence
  Description of Artificial Sequence: Synthetic oligonucleotide
  Target: SCNA; (+) strand; PAM type: NRG; PAM sequence: TAG
ccaccgcgcccggcctcttg

SEQ ID NO: 34524 - DNA, 20 bp, Artificial Sequence
  Description of Artificial Sequence: Synthetic oligonucleotide
  Target: SCNA; (+) strand; PAM type: NRG; PAM sequence: TAG
atttaatccaataaaacatt

SEQ ID NO: 34525 - DNA, 20 bp, Artificial Sequence
  Description of Artificial Sequence: Synthetic oligonucleotide
  Target: SCNA; (+) strand; PAM type: NRG; PAM sequence: TGG
acatttagtttgcctttatt

SEQ ID NO: 34526 - DNA, 20 bp, Artificial Sequence
  Description of Artificial Sequence: Synthetic oligonucleotide
  Target: SCNA; (+) strand; PAM type: NRG; PAM sequence: CAG
ctctattaatacctcctctt

SEQ ID NO: 34527 - DNA, 20 bp, Artificial Sequence
  Description of Artificial Sequence: Synthetic oligonucleotide
  Target: SCNA; (+) strand; PAM type: NRG; PAM sequence: AAG
attaatacctcctcttcagc

SEQ ID NO: 34528 - DNA, 20 bp, Artificial Sequence
  Description of Artificial Sequence: Synthetic oligonucleotide
  Target: SCNA; (+) strand; PAM type: NRG; PAM sequence: AGG
ttaatacctcctcttcagca

SEQ ID NO: 34529 - DNA, 20 bp, Artificial Sequence
  Description of Artificial Sequence: Synthetic oligonucleotide
  Target: SCNA; (+) strand; PAM type: NRG; PAM sequence: TAG
cttacacgtacatcatttgt

SEQ ID NO: 34530 - DNA, 20 bp, Artificial Sequence
  Description of Artificial Sequence: Synthetic oligonucleotide
  Target: SCNA; (+) strand; PAM type: NRG; PAM sequence: GAG
tacacgtacatcatttgtta

SEQ ID NO: 34531 - DNA, 20 bp, Artificial Sequence
  Description of Artificial Sequence: Synthetic oligonucleotide
  Target: SCNA; (+) strand; PAM type: NRG; PAM sequence: TGG
ttgttagagcccctaaatat

SEQ ID NO: 34532 - DNA, 20 bp, Artificial Sequence
  Description of Artificial Sequence: Synthetic oligonucleotide
  Target: SCNA; (+) strand; PAM type: NRG; PAM sequence: TAG
taatgatgatgatgatatta

SEQ ID NO: 34533 - DNA, 20 bp, Artificial Sequence
  Description of Artificial Sequence: Synthetic oligonucleotide
  Target: SCNA; (+) strand; PAM type: NRG; PAM sequence: TGG
aattactttacgttgaacat

SEQ ID NO: 34534 - DNA, 20 bp, Artificial Sequence
  Description of Artificial Sequence: Synthetic oligonucleotide
  Target: SCNA; (+) strand; PAM type: NRG; PAM sequence: AAG
tttacgttgaacattggcct

SEQ ID NO: 34535 - DNA, 20 bp, Artificial Sequence
  Description of Artificial Sequence: Synthetic oligonucleotide
  Target: SCNA; (+) strand; PAM type: NRG; PAM sequence: TAG
ctttaaacacattatttgcc

SEQ ID NO: 34536 - DNA, 20 bp, Artificial Sequence
  Description of Artificial Sequence: Synthetic oligonucleotide
  Target: SCNA; (+) strand; PAM type: NRG; PAM sequence: TAG
tagcatttacaacatttttg

SEQ ID NO: 34537 - DNA, 20 bp, Artificial Sequence
  Description of Artificial Sequence: Synthetic oligonucleotide
  Target: SCNA; (+) strand; PAM type: NRG; PAM sequence: AGG
agcatttacaacatttttgt

SEQ ID NO: 34538 - DNA, 20 bp, Artificial Sequence
  Description of Artificial Sequence: Synthetic oligonucleotide
  Target: SCNA; (+) strand; PAM type: NRG; PAM sequence: TAG
aatttgttttgatatcgtat

SEQ ID NO: 34539 - DNA, 20 bp, Artificial Sequence
  Description of Artificial Sequence: Synthetic oligonucleotide
  Target: SCNA; (+) strand; PAM type: NRG; PAM sequence: TGG
accacaaatttattacattg

SEQ ID NO: 34540 - DNA, 20 bp, Artificial Sequence
  Description of Artificial Sequence: Synthetic oligonucleotide
  Target: SCNA; (+) strand; PAM type: NRG; PAM sequence: GGG
ccacaaatttattacattgt

SEQ ID NO: 34541 - DNA, 20 bp, Artificial Sequence
  Description of Artificial Sequence: Synthetic oligonucleotide
  Target: SCNA; (+) strand; PAM type: NRG; PAM sequence: AAG
ttattacattgtgggattgt

SEQ ID NO: 34542 - DNA, 20 bp, Artificial Sequence
  Description of Artificial Sequence: Synthetic oligonucleotide
  Target: SCNA; (+) strand; PAM type: NRG; PAM sequence: AAG
attgtgggattgtaagtctg

SEQ ID NO: 34543 - DNA, 20 bp, Artificial Sequence
  Description of Artificial Sequence: Synthetic oligonucleotide
  Target: SCNA; (+) strand; PAM type: NRG; PAM sequence: TAG
attgtaagtctgaagtccaa

SEQ ID NO: 34544 - DNA, 20 bp, Artificial Sequence
  Description of Artificial Sequence: Synthetic oligonucleotide
  Target: SCNA; (+) strand; PAM type: NRG; PAM sequence: AGG
ttgtaagtctgaagtccaat

SEQ ID NO: 34545 - DNA, 20 bp, Artificial Sequence
  Description of Artificial Sequence: Synthetic oligonucleotide
  Target: SCNA; (+) strand; PAM type: NRG; PAM sequence: GGG
tgtaagtctgaagtccaata

SEQ ID NO: 34546 - DNA, 20 bp, Artificial Sequence
  Description of Artificial Sequence: Synthetic oligonucleotide
  Target: SCNA; (+) strand; PAM type: NRG; PAM sequence: GGG
gtaagtctgaagtccaatag

SEQ ID NO: 34547 - DNA, 20 bp, Artificial Sequence
  Description of Artificial Sequence: Synthetic oligonucleotide
  Target: SCNA; (+) strand; PAM type: NRG; PAM sequence: TAG
aagtccaataggggtctcac

SEQ ID NO: 34548 - DNA, 20 bp, Artificial Sequence
  Description of Artificial Sequence: Synthetic oligonucleotide
  Target: SCNA; (+) strand; PAM type: NRG; PAM sequence: AAG
ataggggtctcactagccta

SEQ ID NO: 34549 - DNA, 20 bp, Artificial Sequence
  Description of Artificial Sequence: Synthetic oligonucleotide
  Target: SCNA; (+) strand; PAM type: NRG; PAM sequence: AAG
ggtctcactagcctaaagtt

SEQ ID NO: 34550 - DNA, 20 bp, Artificial Sequence
  Description of Artificial Sequence: Synthetic oligonucleotide
  Target: SCNA; (+) strand; PAM type: NRG; PAM sequence: AGG
gtctcactagcctaaagtta

SEQ ID NO: 34551 - DNA, 20 bp, Artificial Sequence
  Description of Artificial Sequence: Synthetic oligonucleotide
  Target: SCNA; (+) strand; PAM type: NRG; PAM sequence: CGG
ctagcctaaagttaaggtgt

SEQ ID NO: 34552 - DNA, 20 bp, Artificial Sequence
  Description of Artificial Sequence: Synthetic oligonucleotide
  Target: SCNA; (+) strand; PAM type: NRG; PAM sequence: CAG
gcctaaagttaaggtgtcgg

SEQ ID NO: 34553 - DNA, 20 bp, Artificial Sequence
  Description of Artificial Sequence: Synthetic oligonucleotide
  Target: SCNA; (+) strand; PAM type: NRG; PAM sequence: AGG
cctaaagttaaggtgtcggc

SEQ ID NO: 34554 - DNA, 20 bp, Artificial Sequence
  Description of Artificial Sequence: Synthetic oligonucleotide
  Target: SCNA; (+) strand; PAM type: NRG; PAM sequence: TGG
ggcaggactgtgttctgttt

SEQ ID NO: 34555 - DNA, 20 bp, Artificial Sequence
  Description of Artificial Sequence: Synthetic oligonucleotide
  Target: SCNA; (+) strand; PAM type: NRG; PAM sequence: GAG
caggactgtgttctgttttg

SEQ ID NO: 34556 - DNA, 20 bp, Artificial Sequence
  Description of Artificial Sequence: Synthetic oligonucleotide
  Target: SCNA; (+) strand; PAM type: NRG; PAM sequence: TAG
gtgttctgttttggagactc

SEQ ID NO: 34557 - DNA, 20 bp, Artificial Sequence
  Description of Artificial Sequence: Synthetic oligonucleotide
  Target: SCNA; (+) strand; PAM type: NRG; PAM sequence: AGG
tgttctgttttggagactct

SEQ ID NO: 34558 - DNA, 20 bp, Artificial Sequence
  Description of Artificial Sequence: Synthetic oligonucleotide
  Target: SCNA; (+) strand; PAM type: NRG; PAM sequence: GAG
ttctgttttggagactctag

SEQ ID NO: 34559 - DNA, 20 bp, Artificial Sequence
  Description of Artificial Sequence: Synthetic oligonucleotide
  Target: SCNA; (+) strand; PAM type: NRG; PAM sequence: CAG
atctgtctccttgccttttc

SEQ ID NO: 34560 - DNA, 20 bp, Artificial Sequence
  Description of Artificial Sequence: Synthetic oligonucleotide
  Target: SCNA; (+) strand; PAM type: NRG; PAM sequence: TAG
cagcttcttgatgccattca

SEQ ID NO: 34561 - DNA, 20 bp, Artificial Sequence
  Description of Artificial Sequence: Synthetic oligonucleotide
  Target: SCNA; (+) strand; PAM type: NRG; PAM sequence: TGG
tcatagcttctttcatgatc

SEQ ID NO: 34562 - DNA, 20 bp, Artificial Sequence
  Description of Artificial Sequence: Synthetic oligonucleotide
  Target: SCNA; (+) strand; PAM type: NRG; PAM sequence: GAG
atattttgcctaacctctgt

SEQ ID NO: 34563 - DNA, 20 bp, Artificial Sequence
  Description of Artificial Sequence: Synthetic oligonucleotide
  Target: SCNA; (+) strand; PAM type: NRG; PAM sequence: GAG
ctgtgagatattaattattt

SEQ ID NO: 34564 - DNA, 20 bp, Artificial Sequence
  Description of Artificial Sequence: Synthetic oligonucleotide
  Target: SCNA; (+) strand; PAM type: NRG; PAM sequence: AGG
tgtgagatattaattatttg

SEQ ID NO: 34565 - DNA, 20 bp, Artificial Sequence
  Description of Artificial Sequence: Synthetic oligonucleotide
  Target: SCNA; (+) strand; PAM type: NRG; PAM sequence: GGG
gtgagatattaattatttga

SEQ ID NO: 34566 - DNA, 20 bp, Artificial Sequence
  Description of Artificial Sequence: Synthetic oligonucleotide
  Target: SCNA; (+) strand; PAM type: NRG; PAM sequence: CAG
agatattaattatttgaggg

SEQ ID NO: 34567 - DNA, 20 bp, Artificial Sequence
  Description of Artificial Sequence: Synthetic oligonucleotide
  Target: SCNA; (+) strand; PAM type: NRG; PAM sequence: GAG
atattaattatttgagggca

SEQ ID NO: 34568 - DNA, 20 bp, Artificial Sequence
  Description of Artificial Sequence: Synthetic oligonucleotide
  Target: SCNA; (+) strand; PAM type: NRG; PAM sequence: CAG
tgtttgttcataactatatc

SEQ ID NO: 34569 - DNA, 20 bp, Artificial Sequence
  Description of Artificial Sequence: Synthetic oligonucleotide
  Target: SCNA; (+) strand; PAM type: NRG; PAM sequence: AGG
gtttgttcataactatatcc

SEQ ID NO: 34570 - DNA, 20 bp, Artificial Sequence
  Description of Artificial Sequence: Synthetic oligonucleotide
  Target: SCNA; (+) strand; PAM type: NRG; PAM sequence: TAG
aaatgatgcctgacacaaaa

SEQ ID NO: 34571 - DNA, 20 bp, Artificial Sequence
  Description of Artificial Sequence: Synthetic oligonucleotide
  Target: SCNA; (+) strand; PAM type: NRG; PAM sequence: AGG
aatgatgcctgacacaaaat

SEQ ID NO: 34572 - DNA, 20 bp, Artificial Sequence
  Description of Artificial Sequence: Synthetic oligonucleotide
  Target: SCNA; (+) strand; PAM type: NRG; PAM sequence: TAG
aaataggtactcaatcaaca

SEQ ID NO: 34573 - DNA, 20 bp, Artificial Sequence
  Description of Artificial Sequence: Synthetic oligonucleotide
  Target: SCNA; (+) strand; PAM type: NRG; PAM sequence: AGG
aataggtactcaatcaacat

SEQ ID NO: 34574 - DNA, 20 bp, Artificial Sequence
  Description of Artificial Sequence: Synthetic oligonucleotide
  Target: SCNA; (+) strand; PAM type: NRG; PAM sequence: GAG
acataggttaataaatgaat

SEQ ID NO: 34575 - DNA, 20 bp, Artificial Sequence
  Description of Artificial Sequence: Synthetic oligonucleotide
  Target: SCNA; (+) strand; PAM type: NRG; PAM sequence: AAG
ttaataaatgaatgagcaaa

SEQ ID NO: 34576 - DNA, 20 bp, Artificial Sequence
  Description of Artificial Sequence: Synthetic oligonucleotide
  Target: SCNA; (+) strand; PAM type: NRG; PAM sequence: TGG
tgtgcatattaattgttacc

SEQ ID NO: 34577 - DNA, 20 bp, Artificial Sequence
  Description of Artificial Sequence: Synthetic oligonucleotide
  Target: SCNA; (+) strand; PAM type: NRG; PAM sequence: GGG
gtgcatattaattgttacct

SEQ ID NO: 34578 - DNA, 20 bp, Artificial Sequence
  Description of Artificial Sequence: Synthetic oligonucleotide
  Target: SCNA; (+) strand; PAM type: NRG; PAM sequence: GGG
tgcatattaattgttacctg

SEQ ID NO: 34579 - DNA, 20 bp, Artificial Sequence
  Description of Artificial Sequence: Synthetic oligonucleotide
  Target: SCNA; (+) strand; PAM type: NRG; PAM sequence: GGG
gcatattaattgttacctgg

SEQ ID NO: 34580 - DNA, 20 bp, Artificial Sequence
  Description of Artificial Sequence: Synthetic oligonucleotide
  Target: SCNA; (+) strand; PAM type: NRG; PAM sequence: CAG
gttacctgggggaatatact

SEQ ID NO: 34581 - DNA, 20 bp, Artificial Sequence
  Description of Artificial Sequence: Synthetic oligonucleotide
  Target: SCNA; (+) strand; PAM type: NRG; PAM sequence: AAG
ggaatatactcagacatctt

SEQ ID NO: 34582 - DNA, 20 bp, Artificial Sequence
  Description of Artificial Sequence: Synthetic oligonucleotide
  Target: SCNA; (+) strand; PAM type: NRG; PAM sequence: TGG
ttaagtctcatatgtaaact

SEQ ID NO: 34583 - DNA, 20 bp, Artificial Sequence
  Description of Artificial Sequence: Synthetic oligonucleotide
  Target: SCNA; (+) strand; PAM type: NRG; PAM sequence: GGG
taagtctcatatgtaaactt

SEQ ID NO: 34584 - DNA, 20 bp, Artificial Sequence
  Description of Artificial Sequence: Synthetic oligonucleotide
  Target: SCNA; (+) strand; PAM type: NRG; PAM sequence: GGG
aagtctcatatgtaaacttg

SEQ ID NO: 34585 - DNA, 20 bp, Artificial Sequence
  Description of Artificial Sequence: Synthetic oligonucleotide
  Target: SCNA; (+) strand; PAM type: NRG; PAM sequence: GAG
tgatatcaacatgccatttt

SEQ ID NO: 34586 - DNA, 20 bp, Artificial Sequence
  Description of Artificial Sequence: Synthetic oligonucleotide
  Target: SCNA; (+) strand; PAM type: NRG; PAM sequence: AGG
gatatcaacatgccattttg

SEQ ID NO: 34587 - DNA, 20 bp, Artificial Sequence
  Description of Artificial Sequence: Synthetic oligonucleotide
  Target: SCNA; (+) strand; PAM type: NRG; PAM sequence: GAG
tgccattttgaggattaatt

SEQ ID NO: 34588 - DNA, 20 bp, Artificial Sequence
  Description of Artificial Sequence: Synthetic oligonucleotide
  Target: SCNA; (+) strand; PAM type: NRG; PAM sequence: AGG
gccattttgaggattaattg

SEQ ID NO: 34589 - DNA, 20 bp, Artificial Sequence
  Description of Artificial Sequence: Synthetic oligonucleotide
  Target: SCNA; (+) strand; PAM type: NRG; PAM sequence: TAG
ttatgtctataaatacctac

SEQ ID NO: 34590 - DNA, 20 bp, Artificial Sequence
  Description of Artificial Sequence: Synthetic oligonucleotide
  Target: SCNA; (+) strand; PAM type: NRG; PAM sequence: TAG
tctataaatacctactagca

SEQ ID NO: 34591 - DNA, 20 bp, Artificial Sequence
  Description of Artificial Sequence: Synthetic oligonucleotide
  Target: SCNA; (+) strand; PAM type: NRG; PAM sequence: TAG
atacctactagcatagtgtc

SEQ ID NO: 34592 - DNA, 20 bp, Artificial Sequence
  Description of Artificial Sequence: Synthetic oligonucleotide
  Target: SCNA; (+) strand; PAM type: NRG; PAM sequence: TAG
ctagcatagtgtctagcaca

SEQ ID NO: 34593 - DNA, 20 bp, Artificial Sequence
  Description of Artificial Sequence: Synthetic oligonucleotide
  Target: SCNA; (+) strand; PAM type: NRG; PAM sequence: TGG
attattattatttattaaaa

SEQ ID NO: 34594 - DNA, 20 bp, Artificial Sequence
  Description of Artificial Sequence: Synthetic oligonucleotide
  Target: SCNA; (+) strand; PAM type: NRG; PAM sequence: TAG
atggcattttgttttcttta

SEQ ID NO: 34595 - DNA, 20 bp, Artificial Sequence
  Description of Artificial Sequence: Synthetic oligonucleotide
  Target: SCNA; (+) strand; PAM type: NRG; PAM sequence: AAG
tatttcttaattgtttcaca

SEQ ID NO: 34596 - DNA, 20 bp, Artificial Sequence
  Description of Artificial Sequence: Synthetic oligonucleotide
  Target: SCNA; (+) strand; PAM type: NRG; PAM sequence: AGG
atttcttaattgtttcacaa

SEQ ID NO: 34597 - DNA, 20 bp, Artificial Sequence
  Description of Artificial Sequence: Synthetic oligonucleotide
  Target: SCNA; (+) strand; PAM type: NRG; PAM sequence: CAG
tcttaattgtttcacaaagg

SEQ ID NO: 34598 - DNA, 20 bp, Artificial Sequence
  Description of Artificial Sequence: Synthetic oligonucleotide
  Target: SCNA; (+) strand; PAM type: NRG; PAM sequence: GAG
ttaattgtttcacaaaggca

SEQ ID NO: 34599 - DNA, 20 bp, Artificial Sequence
  Description of Artificial Sequence: Synthetic oligonucleotide
  Target: SCNA; (+) strand; PAM type: NRG; PAM sequence: TAG
atgctttgcctctatgtctt

SEQ ID NO: 34600 - DNA, 20 bp, Artificial Sequence
  Description of Artificial Sequence: Synthetic oligonucleotide
  Target: SCNA; (+) strand; PAM type: NRG; PAM sequence: TAG
gcctctatgtctttagtacc

SEQ ID NO: 34601 - DNA, 20 bp, Artificial Sequence
  Description of Artificial Sequence: Synthetic oligonucleotide
  Target: SCNA; (+) strand; PAM type: NRG; PAM sequence: TAG
tatgtctttagtacctagaa

SEQ ID NO: 34602 - DNA, 20 bp, Artificial Sequence
  Description of Artificial Sequence: Synthetic oligonucleotide
  Target: SCNA; (+) strand; PAM type: NRG; PAM sequence: AAG
ctagaatagtgcctgtttaa

SEQ ID NO: 34603 - DNA, 20 bp, Artificial Sequence
  Description of Artificial Sequence: Synthetic oligonucleotide
  Target: SCNA; (+) strand; PAM type: NRG; PAM sequence: TAG
gaatagtgcctgtttaaaag

SEQ ID NO: 34604 - DNA, 20 bp, Artificial Sequence
  Description of Artificial Sequence: Synthetic oligonucleotide
  Target: SCNA; (+) strand; PAM type: NRG; PAM sequence: AGG
aatagtgcctgtttaaaagt

SEQ ID NO: 34605 - DNA, 20 bp, Artificial Sequence
  Description of Artificial Sequence: Synthetic oligonucleotide
  Target: SCNA; (+) strand; PAM type: NRG; PAM sequence: GAG
tagtgcctgtttaaaagtag

SEQ ID NO: 34606 - DNA, 20 bp, Artificial Sequence
  Description of Artificial Sequence: Synthetic oligonucleotide
  Target: SCNA; (+) strand; PAM type: NRG; PAM sequence: TAG
gaattaatattaatcatgtg

SEQ ID NO: 34607 - DNA, 20 bp, Artificial Sequence
  Description of Artificial Sequence: Synthetic oligonucleotide
  Target: SCNA; (+) strand; PAM type: NRG; PAM sequence: AGG
aattaatattaatcatgtgt

SEQ ID NO: 34608 - DNA, 20 bp, Artificial Sequence
  Description of Artificial Sequence: Synthetic oligonucleotide
  Target: SCNA; (+) strand; PAM type: NRG; PAM sequence: AAG
atattaatcatgtgtaggaa

SEQ ID NO: 34609 - DNA, 20 bp, Artificial Sequence
  Description of Artificial Sequence: Synthetic oligonucleotide
  Target: SCNA; (+) strand; PAM type: NRG; PAM sequence: AAG
ttaatcatgtgtaggaaaag

SEQ ID NO: 34610 - DNA, 20 bp, Artificial Sequence
  Description of Artificial Sequence: Synthetic oligonucleotide
  Target: SCNA; (+) strand; PAM type: NRG; PAM sequence: TGG
catgtgtaggaaaagaagct

SEQ ID NO: 34611 - DNA, 20 bp, Artificial Sequence
  Description of Artificial Sequence: Synthetic oligonucleotide
  Target: SCNA; (+) strand; PAM type: NRG; PAM sequence: GGG
atgtgtaggaaaagaagctt

SEQ ID NO: 34612 - DNA, 20 bp, Artificial Sequence
  Description of Artificial Sequence: Synthetic oligonucleotide
  Target: SCNA; (+) strand; PAM type: NRG; PAM sequence: CAG
gaatgttattctaccaccca

SEQ ID NO: 34613 - DNA, 20 bp, Artificial Sequence
  Description of Artificial Sequence: Synthetic oligonucleotide
  Target: SCNA; (+) strand; PAM type: NRG; PAM sequence: TGG
agctgtgcccactattatga

SEQ ID NO: 34614 - DNA, 20 bp, Artificial Sequence
  Description of Artificial Sequence: Synthetic oligonucleotide
  Target: SCNA; (+) strand; PAM type: NRG; PAM sequence: AAG
tgttttgtgtgttctttctc

SEQ ID NO: 34615 - DNA, 20 bp, Artificial Sequence
  Description of Artificial Sequence: Synthetic oligonucleotide
  Target: SCNA; (+) strand; PAM type: NRG; PAM sequence: AGG
gttttgtgtgttctttctca

SEQ ID NO: 34616 - DNA, 20 bp, Artificial Sequence
  Description of Artificial Sequence: Synthetic oligonucleotide
  Target: SCNA; (+) strand; PAM type: NRG; PAM sequence: CAG
ctttctcaaggattcacttt

SEQ ID NO: 34617 - DNA, 20 bp, Artificial Sequence
  Description of Artificial Sequence: Synthetic oligonucleotide
  Target: SCNA; (+) strand; PAM type: NRG; PAM sequence: TGG
ttcactttcagaactcaaaa

SEQ ID NO: 34618 - DNA, 20 bp, Artificial Sequence
  Description of Artificial Sequence: Synthetic oligonucleotide
  Target: SCNA; (+) strand; PAM type: NRG; PAM sequence: GGG
tcactttcagaactcaaaat

SEQ ID NO: 34619 - DNA, 20 bp, Artificial Sequence
  Description of Artificial Sequence: Synthetic oligonucleotide
  Target: SCNA; (+) strand; PAM type: NRG; PAM sequence: GGG
cactttcagaactcaaaatg

SEQ ID NO: 34620 - DNA, 20 bp, Artificial Sequence
  Description of Artificial Sequence: Synthetic oligonucleotide
  Target: SCNA; (+) strand; PAM type: NRG; PAM sequence: TAG
tcagaactcaaaatggggtg

SEQ ID NO: 34621 - DNA, 20 bp, Artificial Sequence
  Description of Artificial Sequence: Synthetic oligonucleotide
  Target: SCNA; (+) strand; PAM type: NRG; PAM sequence: AGG
cagaactcaaaatggggtgt

SEQ ID NO: 34622 - DNA, 20 bp, Artificial Sequence
  Description of Artificial Sequence: Synthetic oligonucleotide
  Target: SCNA; (+) strand; PAM type: NRG; PAM sequence: GGG
agaactcaaaatggggtgta

SEQ ID NO: 34623 - DNA, 20 bp, Artificial Sequence
  Description of Artificial Sequence: Synthetic oligonucleotide
  Target: SCNA; (+) strand; PAM type: NRG; PAM sequence: TGG
actcaaaatggggtgtaggg

SEQ ID NO: 34624 - DNA, 20 bp, Artificial Sequence
  Description of Artificial Sequence: Synthetic oligonucleotide
  Target: SCNA; (+) strand; PAM type: NRG; PAM sequence: TGG
caaaatggggtgtagggtgg

SEQ ID NO: 34625 - DNA, 20 bp, Artificial Sequence
  Description of Artificial Sequence: Synthetic oligonucleotide
  Target: SCNA; (+) strand; PAM type: NRG; PAM sequence: TGG
aatggggtgtagggtggtgg

SEQ ID NO: 34626 - DNA, 20 bp, Artificial Sequence
  Description of Artificial Sequence: Synthetic oligonucleotide
  Target: SCNA; (+) strand; PAM type: NRG; PAM sequence: CAG
gtgtagggtggtggtggtgc

SEQ ID NO: 34627 - DNA, 20 bp, Artificial Sequence
  Description of Artificial Sequence: Synthetic oligonucleotide
  Target: SCNA; (+) strand; PAM type: NRG; PAM sequence: CAG
tagggtggtggtggtgccag

SEQ ID NO: 34628 - DNA, 20 bp, Artificial Sequence
  Description of Artificial Sequence: Synthetic oligonucleotide
  Target: SCNA; (+) strand; PAM type: NRG; PAM sequence: TGG
ggtggtggtggtgccagcag

SEQ ID NO: 34629 - DNA, 20 bp, Artificial Sequence
  Description of Artificial Sequence: Synthetic oligonucleotide
  Target: SCNA; (+) strand; PAM type: NRG; PAM sequence: GGG
gtggtggtggtgccagcagt

SEQ ID NO: 34630 - DNA, 20 bp, Artificial Sequence
  Description of Artificial Sequence: Synthetic oligonucleotide
  Target: SCNA; (+) strand; PAM type: NRG; PAM sequence: GGG
tggtggtggtgccagcagtg

SEQ ID NO: 34631 - DNA, 20 bp, Artificial Sequence
  Description of Artificial Sequence: Synthetic oligonucleotide
  Target: SCNA; (+) strand; PAM type: NRG; PAM sequence: TGG
ggtggtgccagcagtgggga

SEQ ID NO: 34632 - DNA, 20 bp, Artificial Sequence
  Description of Artificial Sequence: Synthetic oligonucleotide
  Target: SCNA; (+) strand; PAM type: NRG; PAM sequence: GGG
gtggtgccagcagtggggat

SEQ ID NO: 34633 - DNA, 20 bp, Artificial Sequence
  Description of Artificial Sequence: Synthetic oligonucleotide
  Target: SCNA; (+) strand; PAM type: NRG; PAM sequence: GAG
ggtgccagcagtggggatgg

SEQ ID NO: 34634 - DNA, 20 bp, Artificial Sequence
  Description of Artificial Sequence: Synthetic oligonucleotide
  Target: SCNA; (+) strand; PAM type: NRG; PAM sequence: AAG
gccagcagtggggatgggag

SEQ ID NO: 34635 - DNA, 20 bp, Artificial Sequence
  Description of Artificial Sequence: Synthetic oligonucleotide
  Target: SCNA; (+) strand; PAM type: NRG; PAM sequence: CAG
agaagctcgatctctcccta

SEQ ID NO: 34636 - DNA, 20 bp, Artificial Sequence
  Description of Artificial Sequence: Synthetic oligonucleotide
  Target: SCNA; (+) strand; PAM type: NRG; PAM sequence: TAG
agctcgatctctccctacag

SEQ ID NO: 34637 - DNA, 20 bp, Artificial Sequence
  Description of Artificial Sequence: Synthetic oligonucleotide
  Target: SCNA; (+) strand; PAM type: NRG; PAM sequence: AAG
tcgatctctccctacagtag

SEQ ID NO: 34638 - DNA, 20 bp, Artificial Sequence
  Description of Artificial Sequence: Synthetic oligonucleotide
  Target: SCNA; (+) strand; PAM type: NRG; PAM sequence: CAG
ttactgctctatgtgttctt

SEQ ID NO: 34639 - DNA, 20 bp, Artificial Sequence
  Description of Artificial Sequence: Synthetic oligonucleotide
  Target: SCNA; (+) strand; PAM type: NRG; PAM sequence: AAG
tatgtgttcttcagccctat

SEQ ID NO: 34640 - DNA, 20 bp, Artificial Sequence
  Description of Artificial Sequence: Synthetic oligonucleotide
  Target: SCNA; (+) strand; PAM type: NRG; PAM sequence: AAG
agccctataagaaccaatga

SEQ ID NO: 34641 - DNA, 20 bp, Artificial Sequence
  Description of Artificial Sequence: Synthetic oligonucleotide
  Target: SCNA; (+) strand; PAM type: NRG; PAM sequence: TGG
atccacacttccctcgatac

SEQ ID NO: 34642 - DNA, 20 bp, Artificial Sequence
  Description of Artificial Sequence: Synthetic oligonucleotide
  Target: SCNA; (+) strand; PAM type: NRG; PAM sequence: CAG
tggacatccctacatactca

SEQ ID NO: 34643 - DNA, 20 bp, Artificial Sequence
  Description of Artificial Sequence: Synthetic oligonucleotide
  Target: SCNA; (+) strand; PAM type: NRG; PAM sequence: CAG
acatccctacatactcacag

SEQ ID NO: 34644 - DNA, 20 bp, Artificial Sequence
  Description of Artificial Sequence: Synthetic oligonucleotide
  Target: SCNA; (+) strand; PAM type: NRG; PAM sequence: AAG
gcagtctgcaaaacatatcc

SEQ ID NO: 34645 - DNA, 20 bp, Artificial Sequence
  Description of Artificial Sequence: Synthetic oligonucleotide
  Target: SCNA; (+) strand; PAM type: NRG; PAM sequence: AGG
cagtctgcaaaacatatcca

SEQ ID NO: 34646 - DNA, 20 bp, Artificial Sequence
  Description of Artificial Sequence: Synthetic oligonucleotide
  Target: SCNA; (+) strand; PAM type: NRG; PAM sequence: GGG
agtctgcaaaacatatccaa

SEQ ID NO: 34647 - DNA, 20 bp, Artificial Sequence
  Description of Artificial Sequence: Synthetic oligonucleotide
  Target: SCNA; (+) strand; PAM type: NRG; PAM sequence: GAG
aacatatccaagggcccact

SEQ ID NO: 34648 - DNA, 20 bp, Artificial Sequence
  Description of Artificial Sequence: Synthetic oligonucleotide
  Target: SCNA; (+) strand; PAM type: NRG; PAM sequence: AAG
aagggcccactgagacactg

SEQ ID NO: 34649 - DNA, 20 bp, Artificial Sequence
  Description of Artificial Sequence: Synthetic oligonucleotide
  Target: SCNA; (+) strand; PAM type: NRG; PAM sequence: AAG
ttgatttaatacatatttgc

SEQ ID NO: 34650 - DNA, 20 bp, Artificial Sequence
  Description of Artificial Sequence: Synthetic oligonucleotide
  Target: SCNA; (+) strand; PAM type: NRG; PAM sequence: AGG
tgatttaatacatatttgca

SEQ ID NO: 34651 - DNA, 20 bp, Artificial Sequence
  Description of Artificial Sequence: Synthetic oligonucleotide
  Target: SCNA; (+) strand; PAM type: NRG; PAM sequence: GAG
atatttgcaaggctctgatt

SEQ ID NO: 34652 - DNA, 20 bp, Artificial Sequence
  Description of Artificial Sequence: Synthetic oligonucleotide
  Target: SCNA; (+) strand; PAM type: NRG; PAM sequence: TGG
aggctctgattgagaacctc

SEQ ID NO: 34653 - DNA, 20 bp, Artificial Sequence
  Description of Artificial Sequence: Synthetic oligonucleotide
  Target: SCNA; (+) strand; PAM type: NRG; PAM sequence: CAG
tctgattgagaacctctgga

SEQ ID NO: 34654 - DNA, 20 bp, Artificial Sequence
  Description of Artificial Sequence: Synthetic oligonucleotide
  Target: SCNA; (+) strand; PAM type: NRG; PAM sequence: AGG
ctgattgagaacctctggac

SEQ ID NO: 34655 - DNA, 20 bp, Artificial Sequence
  Description of Artificial Sequence: Synthetic oligonucleotide
  Target: SCNA; (+) strand; PAM type: NRG; PAM sequence: TAG
cctctggacaggcgcttatc

SEQ ID NO: 34656 - DNA, 20 bp, Artificial Sequence
  Description of Artificial Sequence: Synthetic oligonucleotide
  Target: SCNA; (+) strand; PAM type: NRG; PAM sequence: GAG
tctggacaggcgcttatcta

SEQ ID NO: 34657 - DNA, 20 bp, Artificial Sequence
  Description of Artificial Sequence: Synthetic oligonucleotide
  Target: SCNA; (+) strand; PAM type: NRG; PAM sequence: AGG
ctggacaggcgcttatctag

SEQ ID NO: 34658 - DNA, 20 bp, Artificial Sequence
  Description of Artificial Sequence: Synthetic oligonucleotide
  Target: SCNA; (+) strand; PAM type: NRG; PAM sequence: CAG
aggcgcttatctagaggtta

SEQ ID NO: 34659 - DNA, 20 bp, Artificial Sequence
  Description of Artificial Sequence: Synthetic oligonucleotide
  Target: SCNA; (+) strand; PAM type: NRG; PAM sequence: CAG
agtgtgtgactaacacgaca

SEQ ID NO: 34660 - DNA, 20 bp, Artificial Sequence
  Description of Artificial Sequence: Synthetic oligonucleotide
  Target: SCNA; (+) strand; PAM type: NRG; PAM sequence: TAG
gtgactaacacgacacagtt

SEQ ID NO: 34661 - DNA, 20 bp, Artificial Sequence
  Description of Artificial Sequence: Synthetic oligonucleotide
  Target: SCNA; (+) strand; PAM type: NRG; PAM sequence: AGG
tgactaacacgacacagttt

SEQ ID NO: 34662 - DNA, 20 bp, Artificial Sequence
  Description of Artificial Sequence: Synthetic oligonucleotide
  Target: SCNA; (+) strand; PAM type: NRG; PAM sequence: CAG
acagtttaggatttatgtaa

SEQ ID NO: 34663 - DNA, 20 bp, Artificial Sequence
  Description of Artificial Sequence: Synthetic oligonucleotide
  Target: SCNA; (+) strand; PAM type: NRG; PAM sequence: AGG
cagtttaggatttatgtaac

SEQ ID NO: 34664 - DNA, 20 bp, Artificial Sequence
  Description of Artificial Sequence: Synthetic oligonucleotide
  Target: SCNA; (+) strand; PAM type: NRG; PAM sequence: TAG
tatgtaacaggaatatgcta

SEQ ID NO: 34665 - DNA, 20 bp, Artificial Sequence
  Description of Artificial Sequence: Synthetic oligonucleotide
  Target: SCNA; (+) strand; PAM type: NRG; PAM sequence: AGG
atgtaacaggaatatgctat

SEQ ID NO: 34666 - DNA, 20 bp, Artificial Sequence
  Description of Artificial Sequence: Synthetic oligonucleotide
  Target: SCNA; (+) strand; PAM type: NRG; PAM sequence: GGG
tgtaacaggaatatgctata

SEQ ID NO: 34667 - DNA, 20 bp, Artificial Sequence
  Description of Artificial Sequence: Synthetic oligonucleotide
  Target: SCNA; (+) strand; PAM type: NRG; PAM sequence: GAG
taacaggaatatgctatagg

SEQ ID NO: 34668 - DNA, 20 bp, Artificial Sequence
  Description of Artificial Sequence: Synthetic oligonucleotide
  Target: SCNA; (+) strand; PAM type: NRG; PAM sequence: GAG
acaggaatatgctataggga

SEQ ID NO: 34669 - DNA, 20 bp, Artificial Sequence
  Description of Artificial Sequence: Synthetic oligonucleotide
  Target: SCNA; (+) strand; PAM type: NRG; PAM sequence: AAG
gaatatgctatagggagaga

SEQ ID NO: 34670 - DNA, 20 bp, Artificial Sequence
  Description of Artificial Sequence: Synthetic oligonucleotide
  Target: SCNA; (+) strand; PAM type: NRG; PAM sequence: CAG
tgctatagggagagaaagaa

SEQ ID NO: 34671 - DNA, 20 bp, Artificial Sequence
  Description of Artificial Sequence: Synthetic oligonucleotide
  Target: SCNA; (+) strand; PAM type: NRG; PAM sequence: AAG
tatagggagagaaagaacag

SEQ ID NO: 34672 - DNA, 20 bp, Artificial Sequence
  Description of Artificial Sequence: Synthetic oligonucleotide
  Target: SCNA; (+) strand; PAM type: NRG; PAM sequence: CAG
agagaaagaacagaagacct

SEQ ID NO: 34673 - DNA, 20 bp, Artificial Sequence
  Description of Artificial Sequence: Synthetic oligonucleotide
  Target: SCNA; (+) strand; PAM type: NRG; PAM sequence: CGG
acagaagacctcagttgaca

SEQ ID NO: 34674 - DNA, 20 bp, Artificial Sequence
  Description of Artificial Sequence: Synthetic oligonucleotide
  Target: SCNA; (+) strand; PAM type: NRG; PAM sequence: TGG
gaagacctcagttgacacgg

SEQ ID NO: 34675 - DNA, 20 bp, Artificial Sequence
  Description of Artificial Sequence: Synthetic oligonucleotide
  Target: SCNA; (+) strand; PAM type: NRG; PAM sequence: TGG
ctcagttgacacggtggaat

SEQ ID NO: 34676 - DNA, 20 bp, Artificial Sequence
  Description of Artificial Sequence: Synthetic oligonucleotide
  Target: SCNA; (+) strand; PAM type: NRG; PAM sequence: GAG
cagttgacacggtggaattg

SEQ ID NO: 34677 - DNA, 20 bp, Artificial Sequence
  Description of Artificial Sequence: Synthetic oligonucleotide
  Target: SCNA; (+) strand; PAM type: NRG; PAM sequence: GAG
tgacacggtggaattggagt

SEQ ID NO: 34678 - DNA, 20 bp, Artificial Sequence
  Description of Artificial Sequence: Synthetic oligonucleotide
  Target: SCNA; (+) strand; PAM type: NRG; PAM sequence: GAG
acacggtggaattggagtga

SEQ ID NO: 34679 - DNA, 20 bp, Artificial Sequence
  Description of Artificial Sequence: Synthetic oligonucleotide
  Target: SCNA; (+) strand; PAM type: NRG; PAM sequence: GAG
acggtggaattggagtgaga

SEQ ID NO: 34680 - DNA, 20 bp, Artificial Sequence
  Description of Artificial Sequence: Synthetic oligonucleotide
  Target: SCNA; (+) strand; PAM type: NRG; PAM sequence: AAG
gagtgagagagatttccatg

SEQ ID NO: 34681 - DNA, 20 bp, Artificial Sequence
  Description of Artificial Sequence: Synthetic oligonucleotide
  Target: SCNA; (+) strand; PAM type: NRG; PAM sequence: AAG
agagagatttccatgaagcc

SEQ ID NO: 34682 - DNA, 20 bp, Artificial Sequence
  Description of Artificial Sequence: Synthetic oligonucleotide
  Target: SCNA; (+) strand; PAM type: NRG; PAM sequence: TAG
tttccatgaagccaagtaaa

SEQ ID NO: 34683 - DNA, 20 bp, Artificial Sequence
  Description of Artificial Sequence: Synthetic oligonucleotide
  Target: SCNA; (+) strand; PAM type: NRG; PAM sequence: TGG
aagccaagtaaatagtattt

SEQ ID NO: 34684 - DNA, 20 bp, Artificial Sequence
  Description of Artificial Sequence: Synthetic oligonucleotide
  Target: SCNA; (+) strand; PAM type: NRG; PAM sequence: GAG
gccaagtaaatagtattttg

SEQ ID NO: 34685 - DNA, 20 bp, Artificial Sequence
  Description of Artificial Sequence: Synthetic oligonucleotide
  Target: SCNA; (+) strand; PAM type: NRG; PAM sequence: GAG
caagtaaatagtattttgga

SEQ ID NO: 34686 - DNA, 20 bp, Artificial Sequence
  Description of Artificial Sequence: Synthetic oligonucleotide
  Target: SCNA; (+) strand; PAM type: NRG; PAM sequence: AAG
aaatagtattttggagagtg

SEQ ID NO: 34687 - DNA, 20 bp, Artificial Sequence
  Description of Artificial Sequence: Synthetic oligonucleotide
  Target: SCNA; (+) strand; PAM type: NRG; PAM sequence: AGG
aatagtattttggagagtga

SEQ ID NO: 34688 - DNA, 20 bp, Artificial Sequence
  Description of Artificial Sequence: Synthetic oligonucleotide
  Target: SCNA; (+) strand; PAM type: NRG; PAM sequence: GAG
tagtattttggagagtgaag

SEQ ID NO: 34689 - DNA, 20 bp, Artificial Sequence
  Description of Artificial Sequence: Synthetic oligonucleotide
  Target: SCNA; (+) strand; PAM type: NRG; PAM sequence: AGG
agtattttggagagtgaagg

SEQ ID NO: 34690 - DNA, 20 bp, Artificial Sequence
  Description of Artificial Sequence: Synthetic oligonucleotide
  Target: SCNA; (+) strand; PAM type: NRG; PAM sequence: GAG
tattttggagagtgaaggag

SEQ ID NO: 34691 - DNA, 20 bp, Artificial Sequence
  Description of Artificial Sequence: Synthetic oligonucleotide
  Target: SCNA; (+) strand; PAM type: NRG; PAM sequence: TAG
ttcaatattattatcctgtg

SEQ ID NO: 34692 - DNA, 20 bp, Artificial Sequence
  Description of Artificial Sequence: Synthetic oligonucleotide
  Target: SCNA; (+) strand; PAM type: NRG; PAM sequence: AAG
actttgtgtattttttactt

SEQ ID NO: 34693 - DNA, 20 bp, Artificial Sequence
  Description of Artificial Sequence: Synthetic oligonucleotide
  Target: SCNA; (+) strand; PAM type: NRG; PAM sequence: GAG
tttgtgtattttttacttaa

SEQ ID NO: 34694 - DNA, 20 bp, Artificial Sequence
  Description of Artificial Sequence: Synthetic oligonucleotide
  Target: SCNA; (+) strand; PAM type: NRG; PAM sequence: TAG
tttttacttaagagaaaaaa

SEQ ID NO: 34695 - DNA, 20 bp, Artificial Sequence
  Description of Artificial Sequence: Synthetic oligonucleotide
  Target: SCNA; (+) strand; PAM type: NRG; PAM sequence: TAG
aaaatagtaataatattcgc

SEQ ID NO: 34696 - DNA, 20 bp, Artificial Sequence
  Description of Artificial Sequence: Synthetic oligonucleotide
  Target: SCNA; (+) strand; PAM type: NRG; PAM sequence: AGG
aaatagtaataatattcgct

SEQ ID NO: 34697 - DNA, 20 bp, Artificial Sequence
  Description of Artificial Sequence: Synthetic oligonucleotide
  Target: SCNA; (+) strand; PAM type: NRG; PAM sequence: GAG
atagtaataatattcgctag

SEQ ID NO: 34698 - DNA, 20 bp, Artificial Sequence
  Description of Artificial Sequence: Synthetic oligonucleotide
  Target: SCNA; (+) strand; PAM type: NRG; PAM sequence: AAG
tcgctaggagaaacactttg

SEQ ID NO: 34699 - DNA, 20 bp, Artificial Sequence
  Description of Artificial Sequence: Synthetic oligonucleotide
  Target: SCNA; (+) strand; PAM type: NRG; PAM sequence: AAG
taggagaaacactttgaaga

SEQ ID NO: 34700 - DNA, 20 bp, Artificial Sequence
  Description of Artificial Sequence: Synthetic oligonucleotide
  Target: SCNA; (+) strand; PAM type: NRG; PAM sequence: AAG
aacactttgaagaaagaaat

SEQ ID NO: 34701 - DNA, 20 bp, Artificial Sequence
  Description of Artificial Sequence: Synthetic oligonucleotide
  Target: SCNA; (+) strand; PAM type: NRG; PAM sequence: CAG
tttgaagaaagaaataagtc

SEQ ID NO: 34702 - DNA, 20 bp, Artificial Sequence
  Description of Artificial Sequence: Synthetic oligonucleotide
  Target: SCNA; (+) strand; PAM type: NRG; PAM sequence: AGG
ttgaagaaagaaataagtcc

SEQ ID NO: 34703 - DNA, 20 bp, Artificial Sequence
  Description of Artificial Sequence: Synthetic oligonucleotide
  Target: SCNA; (+) strand; PAM type: NRG; PAM sequence: GAG
gaagaaagaaataagtccag

SEQ ID NO: 34704 - DNA, 20 bp, Artificial Sequence
  Description of Artificial Sequence: Synthetic oligonucleotide
  Target: SCNA; (+) strand; PAM type: NRG; PAM sequence: AAG
ttatttcccacataaaatta

SEQ ID NO: 34705 - DNA, 20 bp, Artificial Sequence
  Description of Artificial Sequence: Synthetic oligonucleotide
  Target: SCNA; (+) strand; PAM type: NRG; PAM sequence: TAG
acataaaattaaagctgttt

SEQ ID NO: 34706 - DNA, 20 bp, Artificial Sequence
  Description of Artificial Sequence: Synthetic oligonucleotide
  Target: SCNA; (+) strand; PAM type: NRG; PAM sequence: CAG
tttaaatattccttaaccta

SEQ ID NO: 34707 - DNA, 20 bp, Artificial Sequence
  Description of Artificial Sequence: Synthetic oligonucleotide
  Target: SCNA; (+) strand; PAM type: NRG; PAM sequence: GAG
taaatattccttaacctaca

SEQ ID NO: 34708 - DNA, 20 bp, Artificial Sequence
  Description of Artificial Sequence: Synthetic oligonucleotide
  Target: SCNA; (+) strand; PAM type: NRG; PAM sequence: GAG
aatattccttaacctacaga

SEQ ID NO: 34709 - DNA, 20 bp, Artificial Sequence
  Description of Artificial Sequence: Synthetic oligonucleotide
  Target: SCNA; (+) strand; PAM type: NRG; PAM sequence: TGG
attccttaacctacagagag

SEQ ID NO: 34710 - DNA, 20 bp, Artificial Sequence
  Description of Artificial Sequence: Synthetic oligonucleotide
  Target: SCNA; (+) strand; PAM type: NRG; PAM sequence: AAG
gagtggacttaactgctaaa

SEQ ID NO: 34711 - DNA, 20 bp, Artificial Sequence
  Description of Artificial Sequence: Synthetic oligonucleotide
  Target: SCNA; (+) strand; PAM type: NRG; PAM sequence: AAG
agtacttaatacatgttccc

SEQ ID NO: 34712 - DNA, 20 bp, Artificial Sequence
  Description of Artificial Sequence: Synthetic oligonucleotide
  Target: SCNA; (+) strand; PAM type: NRG; PAM sequence: AGG
gtacttaatacatgttccca

SEQ ID NO: 34713 - DNA, 20 bp, Artificial Sequence
  Description of Artificial Sequence: Synthetic oligonucleotide
  Target: SCNA; (+) strand; PAM type: NRG; PAM sequence: AAG
gcttcaattaccactgcaca

SEQ ID NO: 34714 - DNA, 20 bp, Artificial Sequence
  Description of Artificial Sequence: Synthetic oligonucleotide
  Target: SCNA; (+) strand; PAM type: NRG; PAM sequence: AGG
cttcaattaccactgcacaa

SEQ ID NO: 34715 - DNA, 20 bp, Artificial Sequence
  Description of Artificial Sequence: Synthetic oligonucleotide
  Target: SCNA; (+) strand; PAM type: NRG; PAM sequence: CAG
tttgtttgtttttaataata

SEQ ID NO: 34716 - DNA, 20 bp, Artificial Sequence
  Description of Artificial Sequence: Synthetic oligonucleotide
  Target: SCNA; (+) strand; PAM type: NRG; PAM sequence: TAG
taataatacagtattattac

SEQ ID NO: 34717 - DNA, 20 bp, Artificial Sequence
  Description of Artificial Sequence: Synthetic oligonucleotide
  Target: SCNA; (+) strand; PAM type: NRG; PAM sequence: AAG
taatacagtattattactag

SEQ ID NO: 34718 - DNA, 20 bp, Artificial Sequence
  Description of Artificial Sequence: Synthetic oligonucleotide
  Target: SCNA; (+) strand; PAM type: NRG; PAM sequence: AAG
ttattactagaagtatcatc

SEQ ID NO: 34719 - DNA, 20 bp, Artificial Sequence
  Description of Artificial Sequence: Synthetic oligonucleotide
  Target: SCNA; (+) strand; PAM type: NRG; PAM sequence: TGG
ctagaagtatcatcaagtca

SEQ ID NO: 34720 - DNA, 20 bp, Artificial Sequence
  Description of Artificial Sequence: Synthetic oligonucleotide
  Target: SCNA; (+) strand; PAM type: NRG; PAM sequence: TGG
agtatcatcaagtcatggaa

SEQ ID NO: 34721 - DNA, 20 bp, Artificial Sequence
  Description of Artificial Sequence: Synthetic oligonucleotide
  Target: SCNA; (+) strand; PAM type: NRG; PAM sequence: TAG
aatattcttacttctattgc

SEQ ID NO: 34722 - DNA, 20 bp, Artificial Sequence
  Description of Artificial Sequence: Synthetic oligonucleotide
  Target: SCNA; (+) strand; PAM type: NRG; PAM sequence: AGG
atattcttacttctattgct

SEQ ID NO: 34723 - DNA, 20 bp, Artificial Sequence
  Description of Artificial Sequence: Synthetic oligonucleotide
  Target: SCNA; (+) strand; PAM type: NRG; PAM sequence: GGG
tattcttacttctattgcta

SEQ ID NO: 34724 - DNA, 20 bp, Artificial Sequence
  Description of Artificial Sequence: Synthetic oligonucleotide
  Target: SCNA; (+) strand; PAM type: NRG; PAM sequence: TAG
tacttctattgctagggtgt

SEQ ID NO: 34725 - DNA, 20 bp, Artificial Sequence
  Description of Artificial Sequence: Synthetic oligonucleotide
  Target: SCNA; (+) strand; PAM type: NRG; PAM sequence: AAG
tctattgctagggtgttaga

SEQ ID NO: 34726 - DNA, 20 bp, Artificial Sequence
  Description of Artificial Sequence: Synthetic oligonucleotide
  Target: SCNA; (+) strand; PAM type: NRG; PAM sequence: AGG
ctattgctagggtgttagaa

SEQ ID NO: 34727 - DNA, 20 bp, Artificial Sequence
  Description of Artificial Sequence: Synthetic oligonucleotide
  Target: SCNA; (+) strand; PAM type: NRG; PAM sequence: TGG
tagggtgttagaaaggactc

SEQ ID NO: 34728 - DNA, 20 bp, Artificial Sequence
  Description of Artificial Sequence: Synthetic oligonucleotide
  Target: SCNA; (+) strand; PAM type: NRG; PAM sequence: TAG
actctggactacttgatgtc

SEQ ID NO: 34729 - DNA, 20 bp, Artificial Sequence
  Description of Artificial Sequence: Synthetic oligonucleotide
  Target: SCNA; (+) strand; PAM type: NRG; PAM sequence: CAG
gactacttgatgtctagatg

SEQ ID NO: 34730 - DNA, 20 bp, Artificial Sequence
  Description of Artificial Sequence: Synthetic oligonucleotide
  Target: SCNA; (+) strand; PAM type: NRG; PAM sequence: AAG
tgtctagatgcagataaaaa

SEQ ID NO: 34731 - DNA, 20 bp, Artificial Sequence
  Description of Artificial Sequence: Synthetic oligonucleotide
  Target: SCNA; (+) strand; PAM type: NRG; PAM sequence: CAG
ctagatgcagataaaaaaag

SEQ ID NO: 34732 - DNA, 20 bp, Artificial Sequence
  Description of Artificial Sequence: Synthetic oligonucleotide
  Target: SCNA; (+) strand; PAM type: NRG; PAM sequence: AAG
gcagctgttcacttcacata

SEQ ID NO: 34733 - DNA, 20 bp, Artificial Sequence
  Description of Artificial Sequence: Synthetic oligonucleotide
  Target: SCNA; (+) strand; PAM type: NRG; PAM sequence: TAG
gctgttcacttcacataaag

SEQ ID NO: 34734 - DNA, 20 bp, Artificial Sequence
  Description of Artificial Sequence: Synthetic oligonucleotide
  Target: SCNA; (+) strand; PAM type: NRG; PAM sequence: AAG
aaagtagccgctactgctta

SEQ ID NO: 34735 - DNA, 20 bp, Artificial Sequence
  Description of Artificial Sequence: Synthetic oligonucleotide
  Target: SCNA; (+) strand; PAM type: NRG; PAM sequence: AGG
aagtagccgctactgcttaa

SEQ ID NO: 34736 - DNA, 20 bp, Artificial Sequence
  Description of Artificial Sequence: Synthetic oligonucleotide
  Target: SCNA; (+) strand; PAM type: NRG; PAM sequence: AAG
agccgctactgcttaaaggt

SEQ ID NO: 34737 - DNA, 20 bp, Artificial Sequence
  Description of Artificial Sequence: Synthetic oligonucleotide
  Target: SCNA; (+) strand; PAM type: NRG; PAM sequence: AGG
gccgctactgcttaaaggta

SEQ ID NO: 34738 - DNA, 20 bp, Artificial Sequence
  Description of Artificial Sequence: Synthetic oligonucleotide
  Target: SCNA; (+) strand; PAM type: NRG; PAM sequence: GGG
ccgctactgcttaaaggtaa

SEQ ID NO: 34739 - DNA, 20 bp, Artificial Sequence
  Description of Artificial Sequence: Synthetic oligonucleotide
  Target: SCNA; (+) strand; PAM type: NRG; PAM sequence: TGG
agggtaaatcttgttcactg

SEQ ID NO: 34740 - DNA, 20 bp, Artificial Sequence
  Description of Artificial Sequence: Synthetic oligonucleotide
  Target: SCNA; (+) strand; PAM type: NRG; PAM sequence: AAG
aatcttgttcactgtggatg

SEQ ID NO: 34741 - DNA, 20 bp, Artificial Sequence
  Description of Artificial Sequence: Synthetic oligonucleotide
  Target: SCNA; (+) strand; PAM type: NRG; PAM sequence: AGG
atcttgttcactgtggatga

SEQ ID NO: 34742 - DNA, 20 bp, Artificial Sequence
  Description of Artificial Sequence: Synthetic oligonucleotide
  Target: SCNA; (+) strand; PAM type: NRG; PAM sequence: AAG
actgtggatgaaggttacta

SEQ ID NO: 34743 - DNA, 20 bp, Artificial Sequence
  Description of Artificial Sequence: Synthetic oligonucleotide
  Target: SCNA; (+) strand; PAM type: NRG; PAM sequence: GAG
tgtggatgaaggttactaaa

SEQ ID NO: 34744 - DNA, 20 bp, Artificial Sequence
  Description of Artificial Sequence: Synthetic oligonucleotide
  Target: SCNA; (+) strand; PAM type: NRG; PAM sequence: AAG
ggatgaaggttactaaagag

SEQ ID NO: 34745 - DNA, 20 bp, Artificial Sequence
  Description of Artificial Sequence: Synthetic oligonucleotide
  Target: SCNA; (+) strand; PAM type: NRG; PAM sequence: AGG
gatgaaggttactaaagaga

SEQ ID NO: 34746 - DNA, 20 bp, Artificial Sequence
  Description of Artificial Sequence: Synthetic oligonucleotide
  Target: SCNA; (+) strand; PAM type: NRG; PAM sequence: TAG
agaaggactaacatataaaa

SEQ ID NO: 34747 - DNA, 20 bp, Artificial Sequence
  Description of Artificial Sequence: Synthetic oligonucleotide
  Target: SCNA; (+) strand; PAM type: NRG; PAM sequence: AGG
gaaggactaacatataaaat

SEQ ID NO: 34748 - DNA, 20 bp, Artificial Sequence
  Description of Artificial Sequence: Synthetic oligonucleotide
  Target: SCNA; (+) strand; PAM type: NRG; PAM sequence: CGG
aaaataggttcaaatatata

SEQ ID NO: 34749 - DNA, 20 bp, Artificial Sequence
  Description of Artificial Sequence: Synthetic oligonucleotide
  Target: SCNA; (+) strand; PAM type: NRG; PAM sequence: GAG
aataggttcaaatatatacg

SEQ ID NO: 34750 - DNA, 20 bp, Artificial Sequence
  Description of Artificial Sequence: Synthetic oligonucleotide
  Target: SCNA; (+) strand; PAM type: NRG; PAM sequence: TAG
ttcaaatatatacggagata

SEQ ID NO: 34751 - DNA, 20 bp, Artificial Sequence
  Description of Artificial Sequence: Synthetic oligonucleotide
  Target: SCNA; (+) strand; PAM type: NRG; PAM sequence: AAG
agatatagacttaaaaaatt

SEQ ID NO: 34752 - DNA, 20 bp, Artificial Sequence
  Description of Artificial Sequence: Synthetic oligonucleotide
  Target: SCNA; (+) strand; PAM type: NRG; PAM sequence: AAG
tctccttcaattaatattcc

SEQ ID NO: 34753 - DNA, 20 bp, Artificial Sequence
  Description of Artificial Sequence: Synthetic oligonucleotide
  Target: SCNA; (+) strand; PAM type: NRG; PAM sequence: AAG
ttcaattaatattccaagaa

SEQ ID NO: 34754 - DNA, 20 bp, Artificial Sequence
  Description of Artificial Sequence: Synthetic oligonucleotide
  Target: SCNA; (+) strand; PAM type: NRG; PAM sequence: CAG
tccatattgccatctaaaca

SEQ ID NO: 34755 - DNA, 20 bp, Artificial Sequence
  Description of Artificial Sequence: Synthetic oligonucleotide
  Target: SCNA; (+) strand; PAM type: NRG; PAM sequence: AAG
atattgccatctaaacacag

SEQ ID NO: 34756 - DNA, 20 bp, Artificial Sequence
  Description of Artificial Sequence: Synthetic oligonucleotide
  Target: SCNA; (+) strand; PAM type: NRG; PAM sequence: TGG
acacagaagcttttctgtaa

SEQ ID NO: 34757 - DNA, 20 bp, Artificial Sequence
  Description of Artificial Sequence: Synthetic oligonucleotide
  Target: SCNA; (+) strand; PAM type: NRG; PAM sequence: CAG
gcttttctgtaatggtattc

SEQ ID NO: 34758 - DNA, 20 bp, Artificial Sequence
  Description of Artificial Sequence: Synthetic oligonucleotide
  Target: SCNA; (+) strand; PAM type: NRG; PAM sequence: AAG
ctgtaatggtattccagtga

SEQ ID NO: 34759 - DNA, 20 bp, Artificial Sequence
  Description of Artificial Sequence: Synthetic oligonucleotide
  Target: SCNA; (+) strand; PAM type: NRG; PAM sequence: TAG
gaaagtcatttaaattcgaa

SEQ ID NO: 34760 - DNA, 20 bp, Artificial Sequence
  Description of Artificial Sequence: Synthetic oligonucleotide
  Target: SCNA; (+) strand; PAM type: NRG; PAM sequence: GAG
cgaatagaaaaatttaactt

SEQ ID NO: 34761 - DNA, 20 bp, Artificial Sequence
  Description of Artificial Sequence: Synthetic oligonucleotide
  Target: SCNA; (+) strand; PAM type: NRG; PAM sequence: AAG
ttgagatctgcccttatgaa

SEQ ID NO: 34762 - DNA, 20 bp, Artificial Sequence
  Description of Artificial Sequence: Synthetic oligonucleotide
  Target: SCNA; (+) strand; PAM type: NRG; PAM sequence: TGG
agatctgcccttatgaaaag

SEQ ID NO: 34763 - DNA, 20 bp, Artificial Sequence
  Description of Artificial Sequence: Synthetic oligonucleotide
  Target: SCNA; (+) strand; PAM type: NRG; PAM sequence: GAG
ctgcccttatgaaaagtggt

SEQ ID NO: 34764 - DNA, 20 bp, Artificial Sequence
  Description of Artificial Sequence: Synthetic oligonucleotide
  Target: SCNA; (+) strand; PAM type: NRG; PAM sequence: TAG
aaaagtggtgagaattcaaa

SEQ ID NO: 34765 - DNA, 20 bp, Artificial Sequence
  Description of Artificial Sequence: Synthetic oligonucleotide
  Target: SCNA; (+) strand; PAM type: NRG; PAM sequence: AAG
tttgtcatatcacttcctga

SEQ ID NO: 34766 - DNA, 20 bp, Artificial Sequence
  Description of Artificial Sequence: Synthetic oligonucleotide
  Target: SCNA; (+) strand; PAM type: NRG; PAM sequence: AGG
ttgtcatatcacttcctgaa

SEQ ID NO: 34767 - DNA, 20 bp, Artificial Sequence
  Description of Artificial Sequence: Synthetic oligonucleotide
  Target: SCNA; (+) strand; PAM type: NRG; PAM sequence: TGG
ttctattattttgtacttta

SEQ ID NO: 34768 - DNA, 20 bp, Artificial Sequence
  Description of Artificial Sequence: Synthetic oligonucleotide
  Target: SCNA; (+) strand; PAM type: NRG; PAM sequence: TAG
gtactttatggaaaaatatt

SEQ ID NO: 34769 - DNA, 20 bp, Artificial Sequence
  Description of Artificial Sequence: Synthetic oligonucleotide
  Target: SCNA; (+) strand; PAM type: NRG; PAM sequence: AGG
tactttatggaaaaatattt

SEQ ID NO: 34770 - DNA, 20 bp, Artificial Sequence
  Description of Artificial Sequence: Synthetic oligonucleotide
  Target: SCNA; (+) strand; PAM type: NRG; PAM sequence: AAG
tttatggaaaaatatttagg

SEQ ID NO: 34771 - DNA, 20 bp, Artificial Sequence
  Description of Artificial Sequence: Synthetic oligonucleotide
  Target: SCNA; (+) strand; PAM type: NRG; PAM sequence: TAG
aaaaatatttaggaagatta

SEQ ID NO: 34772 - DNA, 20 bp, Artificial Sequence
  Description of Artificial Sequence: Synthetic oligonucleotide
  Target: SCNA; (+) strand; PAM type: NRG; PAM sequence: AAG
atatttaggaagattataga

SEQ ID NO: 34773 - DNA, 20 bp, Artificial Sequence
  Description of Artificial Sequence: Synthetic oligonucleotide
  Target: SCNA; (+) strand; PAM type: NRG; PAM sequence: TAG
gattatagaaagaaaatttt

SEQ ID NO: 34774 - DNA, 20 bp, Artificial Sequence
  Description of Artificial Sequence: Synthetic oligonucleotide
  Target: SCNA; (+) strand; PAM type: NRG; PAM sequence: AGG
attatagaaagaaaattttt

SEQ ID NO: 34775 - DNA, 20 bp, Artificial Sequence
  Description of Artificial Sequence: Synthetic oligonucleotide
  Target: SCNA; (+) strand; PAM type: NRG; PAM sequence: AAG
atagaaagaaaatttttagg

SEQ ID NO: 34776 - DNA, 20 bp, Artificial Sequence
  Description of Artificial Sequence: Synthetic oligonucleotide
  Target: SCNA; (+) strand; PAM type: NRG; PAM sequence: TAG
gaaagaaaatttttaggaag

SEQ ID NO: 34777 - DNA, 20 bp, Artificial Sequence
  Description of Artificial Sequence: Synthetic oligonucleotide
  Target: SCNA; (+) strand; PAM type: NRG; PAM sequence: TAG
tttttaggaagtagcgtctc

SEQ ID NO: 34778 - DNA, 20 bp, Artificial Sequence
  Description of Artificial Sequence: Synthetic oligonucleotide
  Target: SCNA; (+) strand; PAM type: NRG; PAM sequence: CGG
cctaaaatttatgtcaaacc

SEQ ID NO: 34779 - DNA, 20 bp, Artificial Sequence
  Description of Artificial Sequence: Synthetic oligonucleotide
  Target: SCNA; (+) strand; PAM type: NRG; PAM sequence: AAG
ttatttattttacatataaa

SEQ ID NO: 34780 - DNA, 20 bp, Artificial Sequence
  Description of Artificial Sequence: Synthetic oligonucleotide
  Target: SCNA; (+) strand; PAM type: NRG; PAM sequence: AAG
ttaaaactatattaaaacaa

SEQ ID NO: 34781 - DNA, 20 bp, Artificial Sequence
  Description of Artificial Sequence: Synthetic oligonucleotide
  Target: SCNA; (+) strand; PAM type: NRG; PAM sequence: GAG
aaaactatattaaaacaaaa

SEQ ID NO: 34782 - DNA, 20 bp, Artificial Sequence
  Description of Artificial Sequence: Synthetic oligonucleotide
  Target: SCNA; (+) strand; PAM type: NRG; PAM sequence: AAG
actatattaaaacaaaagag

SEQ ID NO: 34783 - DNA, 20 bp, Artificial Sequence
  Description of Artificial Sequence: Synthetic oligonucleotide
  Target: SCNA; (+) strand; PAM type: NRG; PAM sequence: TGG
aataattgattaatttcatt

SEQ ID NO: 34784 - DNA, 20 bp, Artificial Sequence
  Description of Artificial Sequence: Synthetic oligonucleotide
  Target: SCNA; (+) strand; PAM type: NRG; PAM sequence: GAG
taattgattaatttcatttg

SEQ ID NO: 34785 - DNA, 20 bp, Artificial Sequence
  Description of Artificial Sequence: Synthetic oligonucleotide
  Target: SCNA; (+) strand; PAM type: NRG; PAM sequence: AGG
aattgattaatttcatttgg

SEQ ID NO: 34786 - DNA, 20 bp, Artificial Sequence
  Description of Artificial Sequence: Synthetic oligonucleotide
  Target: SCNA; (+) strand; PAM type: NRG; PAM sequence: TAG
atttggaggtcttctatgtt

SEQ ID NO: 34787 - DNA, 20 bp, Artificial Sequence
  Description of Artificial Sequence: Synthetic oligonucleotide
  Target: SCNA; (+) strand; PAM type: NRG; PAM sequence: TGG
ttctatgtttagtatgttta

SEQ ID NO: 34788 - DNA, 20 bp, Artificial Sequence
  Description of Artificial Sequence: Synthetic oligonucleotide
  Target: SCNA; (+) strand; PAM type: NRG; PAM sequence: GAG
ttatggactttttaaacact

SEQ ID NO: 34789 - DNA, 20 bp, Artificial Sequence
  Description of Artificial Sequence: Synthetic oligonucleotide
  Target: SCNA; (+) strand; PAM type: NRG; PAM sequence: AGG
tatggactttttaaacactg

SEQ ID NO: 34790 - DNA, 20 bp, Artificial Sequence
  Description of Artificial Sequence: Synthetic oligonucleotide
  Target: SCNA; (+) strand; PAM type: NRG; PAM sequence: GAG
tttttttttttttttttttt

SEQ ID NO: 34791 - DNA, 20 bp, Artificial Sequence
  Description of Artificial Sequence: Synthetic oligonucleotide
  Target: SCNA; (+) strand; PAM type: NRG; PAM sequence: CAG
ttttttttttttttttgaga

SEQ ID NO: 34792 - DNA, 20 bp, Artificial Sequence
  Description of Artificial Sequence: Synthetic oligonucleotide
  Target: SCNA; (+) strand; PAM type: NRG; PAM sequence: AGG
tttttttttttttttgagac

SEQ ID NO: 34793 - DNA, 20 bp, Artificial Sequence
  Description of Artificial Sequence: Synthetic oligonucleotide
  Target: SCNA; (+) strand; PAM type: NRG; PAM sequence: CAG
caggatcttacttttttgcc

SEQ ID NO: 34794 - DNA, 20 bp, Artificial Sequence
  Description of Artificial Sequence: Synthetic oligonucleotide
  Target: SCNA; (+) strand; PAM type: NRG; PAM sequence: AGG
aggatcttacttttttgccc

SEQ ID NO: 34795 - DNA, 20 bp, Artificial Sequence
  Description of Artificial Sequence: Synthetic oligonucleotide
  Target: SCNA; (+) strand; PAM type: NRG; PAM sequence: TGG
tcttacttttttgcccaggc

SEQ ID NO: 34796 - DNA, 20 bp, Artificial Sequence
  Description of Artificial Sequence: Synthetic oligonucleotide
  Target: SCNA; (+) strand; PAM type: NRG; PAM sequence: GAG
ttacttttttgcccaggctg

SEQ ID NO: 34797 - DNA, 20 bp, Artificial Sequence
  Description of Artificial Sequence: Synthetic oligonucleotide
  Target: SCNA; (+) strand; PAM type: NRG; PAM sequence: CAG
tttttgcccaggctggagtg

SEQ ID NO: 34798 - DNA, 20 bp, Artificial Sequence
  Description of Artificial Sequence: Synthetic oligonucleotide
  Target: SCNA; (+) strand; PAM type: NRG; PAM sequence: CAG
ggagtgcagtgatacaatca

SEQ ID NO: 34799 - DNA, 20 bp, Artificial Sequence
  Description of Artificial Sequence: Synthetic oligonucleotide
  Target: SCNA; (+) strand; PAM type: NRG; PAM sequence: CAG
tcactgcaacctcaaccatc

SEQ ID NO: 34800 - DNA, 20 bp, Artificial Sequence
  Description of Artificial Sequence: Synthetic oligonucleotide
  Target: SCNA; (+) strand; PAM type: NRG; PAM sequence: AGG
cactgcaacctcaaccatcc

SEQ ID NO: 34801 - DNA, 20 bp, Artificial Sequence
  Description of Artificial Sequence: Synthetic oligonucleotide
  Target: SCNA; (+) strand; PAM type: NRG; PAM sequence: AAG
aacctcaaccatccaggctc

SEQ ID NO: 34802 - DNA, 20 bp, Artificial Sequence
  Description of Artificial Sequence: Synthetic oligonucleotide
  Target: SCNA; (+) strand; PAM type: NRG; PAM sequence: CAG
ctcaagtgatcctctcacct

SEQ ID NO: 34803 - DNA, 20 bp, Artificial Sequence
  Description of Artificial Sequence: Synthetic oligonucleotide
  Target: SCNA; (+) strand; PAM type: NRG; PAM sequence: CAG
gatcctctcacctcagctac

SEQ ID NO: 34804 - DNA, 20 bp, Artificial Sequence
  Description of Artificial Sequence: Synthetic oligonucleotide
  Target: SCNA; (+) strand; PAM type: NRG; PAM sequence: TAG
tctcacctcagctaccagac

SEQ ID NO: 34805 - DNA, 20 bp, Artificial Sequence
  Description of Artificial Sequence: Synthetic oligonucleotide
  Target: SCNA; (+) strand; PAM type: NRG; PAM sequence: GAG
cctcagctaccagactagct

SEQ ID NO: 34806 - DNA, 20 bp, Artificial Sequence
  Description of Artificial Sequence: Synthetic oligonucleotide
  Target: SCNA; (+) strand; PAM type: NRG; PAM sequence: CGG
taccagactagctgagacta

SEQ ID NO: 34807 - DNA, 20 bp, Artificial Sequence
  Description of Artificial Sequence: Synthetic oligonucleotide
  Target: SCNA; (+) strand; PAM type: NRG; PAM sequence: GGG
accagactagctgagactac

SEQ ID NO: 34808 - DNA, 20 bp, Artificial Sequence
  Description of Artificial Sequence: Synthetic oligonucleotide
  Target: SCNA; (+) strand; PAM type: NRG; PAM sequence: GGG
ccagactagctgagactacg

SEQ ID NO: 34809 - DNA, 20 bp, Artificial Sequence
  Description of Artificial Sequence: Synthetic oligonucleotide
  Target: SCNA; (+) strand; PAM type: NRG; PAM sequence: GGG
cagactagctgagactacgg

SEQ ID NO: 34810 - DNA, 20 bp, Artificial Sequence
  Description of Artificial Sequence: Synthetic oligonucleotide
  Target: SCNA; (+) strand; PAM type: NRG; PAM sequence: CAG
acgggggtgtgccaccatgc

SEQ ID NO: 34811 - DNA, 20 bp, Artificial Sequence
  Description of Artificial Sequence: Synthetic oligonucleotide
  Target: SCNA; (+) strand; PAM type: NRG; PAM sequence: AGG
cgggggtgtgccaccatgcc

SEQ ID NO: 34812 - DNA, 20 bp, Artificial Sequence
  Description of Artificial Sequence: Synthetic oligonucleotide
  Target: SCNA; (+) strand; PAM type: NRG; PAM sequence: TGG
tttcgtatatattttttttt

SEQ ID NO: 34813 - DNA, 20 bp, Artificial Sequence
  Description of Artificial Sequence: Synthetic oligonucleotide
  Target: SCNA; (+) strand; PAM type: NRG; PAM sequence: CAG
tttggtctaactgtgttgcc

SEQ ID NO: 34814 - DNA, 20 bp, Artificial Sequence
  Description of Artificial Sequence: Synthetic oligonucleotide
  Target: SCNA; (+) strand; PAM type: NRG; PAM sequence: AGG
ttggtctaactgtgttgccc

SEQ ID NO: 34815 - DNA, 20 bp, Artificial Sequence
  Description of Artificial Sequence: Synthetic oligonucleotide
  Target: SCNA; (+) strand; PAM type: NRG; PAM sequence: TGG
tctaactgtgttgcccaggc

SEQ ID NO: 34816 - DNA, 20 bp, Artificial Sequence
  Description of Artificial Sequence: Synthetic oligonucleotide
  Target: SCNA; (+) strand; PAM type: NRG; PAM sequence: TAG
ccaggctggtcatgaactcc

SEQ ID NO: 34817 - DNA, 20 bp, Artificial Sequence
  Description of Artificial Sequence: Synthetic oligonucleotide
  Target: SCNA; (+) strand; PAM type: NRG; PAM sequence: AGG
caggctggtcatgaactcct

SEQ ID NO: 34818 - DNA, 20 bp, Artificial Sequence
  Description of Artificial Sequence: Synthetic oligonucleotide
  Target: SCNA; (+) strand; PAM type: NRG; PAM sequence: AAG
ggtcatgaactcctaggctc

SEQ ID NO: 34819 - DNA, 20 bp, Artificial Sequence
  Description of Artificial Sequence: Synthetic oligonucleotide
  Target: SCNA; (+) strand; PAM type: NRG; PAM sequence: TAG
ctcaagtgatctgtccacct

SEQ ID NO: 34820 - DNA, 20 bp, Artificial Sequence
  Description of Artificial Sequence: Synthetic oligonucleotide
  Target: SCNA; (+) strand; PAM type: NRG; PAM sequence: AAG
ctgtccaccttagcctccca

SEQ ID NO: 34821 - DNA, 20 bp, Artificial Sequence
  Description of Artificial Sequence: Synthetic oligonucleotide
  Target: SCNA; (+) strand; PAM type: NRG; PAM sequence: TGG
caccttagcctcccaaagtg

SEQ ID NO: 34822 - DNA, 20 bp, Artificial Sequence
  Description of Artificial Sequence: Synthetic oligonucleotide
  Target: SCNA; (+) strand; PAM type: NRG; PAM sequence: GGG
accttagcctcccaaagtgt

SEQ ID NO: 34823 - DNA, 20 bp, Artificial Sequence
  Description of Artificial Sequence: Synthetic oligonucleotide
  Target: SCNA; (+) strand; PAM type: NRG; PAM sequence: CAG
cctcccaaagtgtgggatta

SEQ ID NO: 34824 - DNA, 20 bp, Artificial Sequence
  Description of Artificial Sequence: Synthetic oligonucleotide
  Target: SCNA; (+) strand; PAM type: NRG; PAM sequence: AGG
ctcccaaagtgtgggattac

SEQ ID NO: 34825 - DNA, 20 bp, Artificial Sequence
  Description of Artificial Sequence: Synthetic oligonucleotide
  Target: SCNA; (+) strand; PAM type: NRG; PAM sequence: GAG
aagtgtgggattacaggcat

SEQ ID NO: 34826 - DNA, 20 bp, Artificial Sequence
  Description of Artificial Sequence: Synthetic oligonucleotide
  Target: SCNA; (+) strand; PAM type: NRG; PAM sequence: CAG
acaggcatgagccaccatgc

SEQ ID NO: 34827 - DNA, 20 bp, Artificial Sequence
  Description of Artificial Sequence: Synthetic oligonucleotide
  Target: SCNA; (+) strand; PAM type: NRG; PAM sequence: AGG
caggcatgagccaccatgcc

SEQ ID NO: 34828 - DNA, 20 bp, Artificial Sequence
  Description of Artificial Sequence: Synthetic oligonucleotide
  Target: SCNA; (+) strand; PAM type: NRG; PAM sequence: GAG
catgagccaccatgccaggc

SEQ ID NO: 34829 - DNA, 20 bp, Artificial Sequence
  Description of Artificial Sequence: Synthetic oligonucleotide
  Target: SCNA; (+) strand; PAM type: NRG; PAM sequence: GAG
gcgagaatttgcttttaaat

SEQ ID NO: 34830 - DNA, 20 bp, Artificial Sequence
  Description of Artificial Sequence: Synthetic oligonucleotide
  Target: SCNA; (+) strand; PAM type: NRG; PAM sequence: AAG
gaatttgcttttaaatgaga

SEQ ID NO: 34831 - DNA, 20 bp, Artificial Sequence
  Description of Artificial Sequence: Synthetic oligonucleotide
  Target: SCNA; (+) strand; PAM type: NRG; PAM sequence: CGG
aaagacacaatacctgcctt

SEQ ID NO: 34832 - DNA, 20 bp, Artificial Sequence
  Description of Artificial Sequence: Synthetic oligonucleotide
  Target: SCNA; (+) strand; PAM type: NRG; PAM sequence: AAG
acacaatacctgccttcgga

SEQ ID NO: 34833 - DNA, 20 bp, Artificial Sequence
  Description of Artificial Sequence: Synthetic oligonucleotide
  Target: SCNA; (+) strand; PAM type: NRG; PAM sequence: TAG
gaaagttccctgtcaaattt

SEQ ID NO: 34834 - DNA, 20 bp, Artificial Sequence
  Description of Artificial Sequence: Synthetic oligonucleotide
  Target: SCNA; (+) strand; PAM type: NRG; PAM sequence: AAG
tagaaataaataattaaaca

SEQ ID NO: 34835 - DNA, 20 bp, Artificial Sequence
  Description of Artificial Sequence: Synthetic oligonucleotide
  Target: SCNA; (+) strand; PAM type: NRG; PAM sequence: TAG
aaataattaaacaaagttta

SEQ ID NO: 34836 - DNA, 20 bp, Artificial Sequence
  Description of Artificial Sequence: Synthetic oligonucleotide
  Target: SCNA; (+) strand; PAM type: NRG; PAM sequence: AGG
aataattaaacaaagtttat

SEQ ID NO: 34837 - DNA, 20 bp, Artificial Sequence
  Description of Artificial Sequence: Synthetic oligonucleotide
  Target: SCNA; (+) strand; PAM type: NRG; PAM sequence: AAG
acaaagtttataggcataat

SEQ ID NO: 34838 - DNA, 20 bp, Artificial Sequence
  Description of Artificial Sequence: Synthetic oligonucleotide
  Target: SCNA; (+) strand; PAM type: NRG; PAM sequence: AAG
taagtcataatattcttgaa

SEQ ID NO: 34839 - DNA, 20 bp, Artificial Sequence
  Description of Artificial Sequence: Synthetic oligonucleotide
  Target: SCNA; (+) strand; PAM type: NRG; PAM sequence: CAG
aatattcttgaaaagatatg

SEQ ID NO: 34840 - DNA, 20 bp, Artificial Sequence
  Description of Artificial Sequence: Synthetic oligonucleotide
  Target: SCNA; (+) strand; PAM type: NRG; PAM sequence: GAG
tattcttgaaaagatatgca

SEQ ID NO: 34841 - DNA, 20 bp, Artificial Sequence
  Description of Artificial Sequence: Synthetic oligonucleotide
  Target: SCNA; (+) strand; PAM type: NRG; PAM sequence: AGG
attcttgaaaagatatgcag

SEQ ID NO: 34842 - DNA, 20 bp, Artificial Sequence
  Description of Artificial Sequence: Synthetic oligonucleotide
  Target: SCNA; (+) strand; PAM type: NRG; PAM sequence: GGG
ttcttgaaaagatatgcaga

SEQ ID NO: 34843 - DNA, 20 bp, Artificial Sequence
  Description of Artificial Sequence: Synthetic oligonucleotide
  Target: SCNA; (+) strand; PAM type: NRG; PAM sequence: AAG
aagatatgcagagggttcca

SEQ ID NO: 34844 - DNA, 20 bp, Artificial Sequence
  Description of Artificial Sequence: Synthetic oligonucleotide
  Target: SCNA; (+) strand; PAM type: NRG; PAM sequence: AGG
agatatgcagagggttccaa

SEQ ID NO: 34845 - DNA, 20 bp, Artificial Sequence
  Description of Artificial Sequence: Synthetic oligonucleotide
  Target: SCNA; (+) strand; PAM type: NRG; PAM sequence: GAG
atatgcagagggttccaaag

SEQ ID NO: 34846 - DNA, 20 bp, Artificial Sequence
  Description of Artificial Sequence: Synthetic oligonucleotide
  Target: SCNA; (+) strand; PAM type: NRG; PAM sequence: CAG
ccaaaggagcaccaaccaac

SEQ ID NO: 34847 - DNA, 20 bp, Artificial Sequence
  Description of Artificial Sequence: Synthetic oligonucleotide
  Target: SCNA; (+) strand; PAM type: NRG; PAM sequence: GAG
aaaggagcaccaaccaacca

SEQ ID NO: 34848 - DNA, 20 bp, Artificial Sequence
  Description of Artificial Sequence: Synthetic oligonucleotide
  Target: SCNA; (+) strand; PAM type: NRG; PAM sequence: AGG
aaggagcaccaaccaaccag

SEQ ID NO: 34849 - DNA, 20 bp, Artificial Sequence
  Description of Artificial Sequence: Synthetic oligonucleotide
  Target: SCNA; (+) strand; PAM type: NRG; PAM sequence: GGG
aggagcaccaaccaaccaga

SEQ ID NO: 34850 - DNA, 20 bp, Artificial Sequence
  Description of Artificial Sequence: Synthetic oligonucleotide
  Target: SCNA; (+) strand; PAM type: NRG; PAM sequence: GGG
ggagcaccaaccaaccagag

SEQ ID NO: 34851 - DNA, 20 bp, Artificial Sequence
  Description of Artificial Sequence: Synthetic oligonucleotide
  Target: SCNA; (+) strand; PAM type: NRG; PAM sequence: TGG
accaaccagaggggaaaata

SEQ ID NO: 34852 - DNA, 20 bp, Artificial Sequence
  Description of Artificial Sequence: Synthetic oligonucleotide
  Target: SCNA; (+) strand; PAM type: NRG; PAM sequence: GGG
ccaaccagaggggaaaatat

SEQ ID NO: 34853 - DNA, 20 bp, Artificial Sequence
  Description of Artificial Sequence: Synthetic oligonucleotide
  Target: SCNA; (+) strand; PAM type: NRG; PAM sequence: GGG
caaccagaggggaaaatatg

SEQ ID NO: 34854 - DNA, 20 bp, Artificial Sequence
  Description of Artificial Sequence: Synthetic oligonucleotide
  Target: SCNA; (+) strand; PAM type: NRG; PAM sequence: GGG
aaccagaggggaaaatatgg

SEQ ID NO: 34855 - DNA, 20 bp, Artificial Sequence
  Description of Artificial Sequence: Synthetic oligonucleotide
  Target: SCNA; (+) strand; PAM type: NRG; PAM sequence: CAG
aggggaaaatatgggggcaa

SEQ ID NO: 34856 - DNA, 20 bp, Artificial Sequence
  Description of Artificial Sequence: Synthetic oligonucleotide
  Target: SCNA; (+) strand; PAM type: NRG; PAM sequence: GAG
gggaaaatatgggggcaaca

SEQ ID NO: 34857 - DNA, 20 bp, Artificial Sequence
  Description of Artificial Sequence: Synthetic oligonucleotide
  Target: SCNA; (+) strand; PAM type: NRG; PAM sequence: GAG
gaaaatatgggggcaacaga

SEQ ID NO: 34858 - DNA, 20 bp, Artificial Sequence
  Description of Artificial Sequence: Synthetic oligonucleotide
  Target: SCNA; (+) strand; PAM type: NRG; PAM sequence: AGG
aaaatatgggggcaacagag

SEQ ID NO: 34859 - DNA, 20 bp, Artificial Sequence
  Description of Artificial Sequence: Synthetic oligonucleotide
  Target: SCNA; (+) strand; PAM type: NRG; PAM sequence: AAG
tatgggggcaacagagaggc

SEQ ID NO: 34860 - DNA, 20 bp, Artificial Sequence
  Description of Artificial Sequence: Synthetic oligonucleotide
  Target: SCNA; (+) strand; PAM type: NRG; PAM sequence: GAG
tgggggcaacagagaggcaa

SEQ ID NO: 34861 - DNA, 20 bp, Artificial Sequence
  Description of Artificial Sequence: Synthetic oligonucleotide
  Target: SCNA; (+) strand; PAM type: NRG; PAM sequence: AGG
gggggcaacagagaggcaag

SEQ ID NO: 34862 - DNA, 20 bp, Artificial Sequence
  Description of Artificial Sequence: Synthetic oligonucleotide
  Target: SCNA; (+) strand; PAM type: NRG; PAM sequence: GAG
agagaggcaagaggtgatat

SEQ ID NO: 34863 - DNA, 20 bp, Artificial Sequence
  Description of Artificial Sequence: Synthetic oligonucleotide
  Target: SCNA; (+) strand; PAM type: NRG; PAM sequence: GAG
agaggcaagaggtgatatga

SEQ ID NO: 34864 - DNA, 20 bp, Artificial Sequence
  Description of Artificial Sequence: Synthetic oligonucleotide
  Target: SCNA; (+) strand; PAM type: NRG; PAM sequence: GAG
aggcaagaggtgatatgaga

SEQ ID NO: 34865 - DNA, 20 bp, Artificial Sequence
  Description of Artificial Sequence: Synthetic oligonucleotide
  Target: SCNA; (+) strand; PAM type: NRG; PAM sequence: AAG
aagaggtgatatgagagaga

SEQ ID NO: 34866 - DNA, 20 bp, Artificial Sequence
  Description of Artificial Sequence: Synthetic oligonucleotide
  Target: SCNA; (+) strand; PAM type: NRG; PAM sequence: GAG
tgatatgagagagaaagcct

SEQ ID NO: 34867 - DNA, 20 bp, Artificial Sequence
  Description of Artificial Sequence: Synthetic oligonucleotide
  Target: SCNA; (+) strand; PAM type: NRG; PAM sequence: TAG
atgagagagaaagcctgagc

SEQ ID NO: 34868 - DNA, 20 bp, Artificial Sequence
  Description of Artificial Sequence: Synthetic oligonucleotide
  Target: SCNA; (+) strand; PAM type: NRG; PAM sequence: CAG
agaaagcctgagctagaaca

SEQ ID NO: 34869 - DNA, 20 bp, Artificial Sequence
  Description of Artificial Sequence: Synthetic oligonucleotide
  Target: SCNA; (+) strand; PAM type: NRG; PAM sequence: GAG
aaagcctgagctagaacaca

SEQ ID NO: 34870 - DNA, 20 bp, Artificial Sequence
  Description of Artificial Sequence: Synthetic oligonucleotide
  Target: SCNA; (+) strand; PAM type: NRG; PAM sequence: CAG
cctgagctagaacacagagc

SEQ ID NO: 34871 - DNA, 20 bp, Artificial Sequence
  Description of Artificial Sequence: Synthetic oligonucleotide
  Target: SCNA; (+) strand; PAM type: NRG; PAM sequence: AGG
ctgagctagaacacagagcc

SEQ ID NO: 34872 - DNA, 20 bp, Artificial Sequence
  Description of Artificial Sequence: Synthetic oligonucleotide
  Target: SCNA; (+) strand; PAM type: NRG; PAM sequence: AAG
agagccaggtcatgaatctg

SEQ ID NO: 34873 - DNA, 20 bp, Artificial Sequence
  Description of Artificial Sequence: Synthetic oligonucleotide
  Target: SCNA; (+) strand; PAM type: NRG; PAM sequence: AGG
gagccaggtcatgaatctga

SEQ ID NO: 34874 - DNA, 20 bp, Artificial Sequence
  Description of Artificial Sequence: Synthetic oligonucleotide
  Target: SCNA; (+) strand; PAM type: NRG; PAM sequence: CAG
ccaggtcatgaatctgaagg

SEQ ID NO: 34875 - DNA, 20 bp, Artificial Sequence
  Description of Artificial Sequence: Synthetic oligonucleotide
  Target: SCNA; (+) strand; PAM type: NRG; PAM sequence: AGG
caggtcatgaatctgaaggc

SEQ ID NO: 34876 - DNA, 20 bp, Artificial Sequence
  Description of Artificial Sequence: Synthetic oligonucleotide
  Target: SCNA; (+) strand; PAM type: NRG; PAM sequence: CAG
gaaggcaggaacaactctgt

SEQ ID NO: 34877 - DNA, 20 bp, Artificial Sequence
  Description of Artificial Sequence: Synthetic oligonucleotide
  Target: SCNA; (+) strand; PAM type: NRG; PAM sequence: GAG
ggaacaactctgtcagctgt

SEQ ID NO: 34878 - DNA, 20 bp, Artificial Sequence
  Description of Artificial Sequence: Synthetic oligonucleotide
  Target: SCNA; (+) strand; PAM type: NRG; PAM sequence: TGG
tcagctgtgagacatgaatt

SEQ ID NO: 34879 - DNA, 20 bp, Artificial Sequence
  Description of Artificial Sequence: Synthetic oligonucleotide
  Target: SCNA; (+) strand; PAM type: NRG; PAM sequence: AAG
gctgtgagacatgaatttgg

SEQ ID NO: 34880 - DNA, 20 bp, Artificial Sequence
  Description of Artificial Sequence: Synthetic oligonucleotide
  Target: SCNA; (+) strand; PAM type: NRG; PAM sequence: AGG
ctgtgagacatgaatttgga

SEQ ID NO: 34881 - DNA, 20 bp, Artificial Sequence
  Description of Artificial Sequence: Synthetic oligonucleotide
  Target: SCNA; (+) strand; PAM type: NRG; PAM sequence: TGG
acatgaatttggaaggctgc

SEQ ID NO: 34882 - DNA, 20 bp, Artificial Sequence
  Description of Artificial Sequence: Synthetic oligonucleotide
  Target: SCNA; (+) strand; PAM type: NRG; PAM sequence: GGG
catgaatttggaaggctgct

SEQ ID NO: 34883 - DNA, 20 bp, Artificial Sequence
  Description of Artificial Sequence: Synthetic oligonucleotide
  Target: SCNA; (+) strand; PAM type: NRG; PAM sequence: GAG
tgaatttggaaggctgctgg

SEQ ID NO: 34884 - DNA, 20 bp, Artificial Sequence
  Description of Artificial Sequence: Synthetic oligonucleotide
  Target: SCNA; (+) strand; PAM type: NRG; PAM sequence: GAG
aatttggaaggctgctggga

SEQ ID NO: 34885 - DNA, 20 bp, Artificial Sequence
  Description of Artificial Sequence: Synthetic oligonucleotide
  Target: SCNA; (+) strand; PAM type: NRG; PAM sequence: AAG
ggaaggctgctgggagagaa

SEQ ID NO: 34886 - DNA, 20 bp, Artificial Sequence
  Description of Artificial Sequence: Synthetic oligonucleotide
  Target: SCNA; (+) strand; PAM type: NRG; PAM sequence: CAG
aggctgctgggagagaaaag

SEQ ID NO: 34887 - DNA, 20 bp, Artificial Sequence
  Description of Artificial Sequence: Synthetic oligonucleotide
  Target: SCNA; (+) strand; PAM type: NRG; PAM sequence: GAG
gctgctgggagagaaaagca

SEQ ID NO: 34888 - DNA, 20 bp, Artificial Sequence
  Description of Artificial Sequence: Synthetic oligonucleotide
  Target: SCNA; (+) strand; PAM type: NRG; PAM sequence: TAG
tgggagagaaaagcagagat

SEQ ID NO: 34889 - DNA, 20 bp, Artificial Sequence
  Description of Artificial Sequence: Synthetic oligonucleotide
  Target: SCNA; (+) strand; PAM type: NRG; PAM sequence: AAG
agtcgtgcaattatctactt

SEQ ID NO: 34890 - DNA, 20 bp, Artificial Sequence
  Description of Artificial Sequence: Synthetic oligonucleotide
  Target: SCNA; (+) strand; PAM type: NRG; PAM sequence: TGG
attatctacttaagatattt

SEQ ID NO: 34891 - DNA, 20 bp, Artificial Sequence
  Description of Artificial Sequence: Synthetic oligonucleotide
  Target: SCNA; (+) strand; PAM type: NRG; PAM sequence: GGG
ttatctacttaagatatttt

SEQ ID NO: 34892 - DNA, 20 bp, Artificial Sequence
  Description of Artificial Sequence: Synthetic oligonucleotide
  Target: SCNA; (+) strand; PAM type: NRG; PAM sequence: TGG
ctacttaagatattttgggc

SEQ ID NO: 34893 - DNA, 20 bp, Artificial Sequence
  Description of Artificial Sequence: Synthetic oligonucleotide
  Target: SCNA; (+) strand; PAM type: NRG; PAM sequence: AAG
cttaagatattttgggctgg

SEQ ID NO: 34894 - DNA, 20 bp, Artificial Sequence
  Description of Artificial Sequence: Synthetic oligonucleotide
  Target: SCNA; (+) strand; PAM type: NRG; PAM sequence: CAG
aagatattttgggctggaag

SEQ ID NO: 34895 - DNA, 20 bp, Artificial Sequence
  Description of Artificial Sequence: Synthetic oligonucleotide
  Target: SCNA; (+) strand; PAM type: NRG; PAM sequence: TGG
atattttgggctggaagcag

SEQ ID NO: 34896 - DNA, 20 bp, Artificial Sequence
  Description of Artificial Sequence: Synthetic oligonucleotide
  Target: SCNA; (+) strand; PAM type: NRG; PAM sequence: CAG
gtggctcacacctgtaattc

SEQ ID NO: 34897 - DNA, 20 bp, Artificial Sequence
  Description of Artificial Sequence: Synthetic oligonucleotide
  Target: SCNA; (+) strand; PAM type: NRG; PAM sequence: TGG
cacctgtaattccagcactt

SEQ ID NO: 34898 - DNA, 20 bp, Artificial Sequence
  Description of Artificial Sequence: Synthetic oligonucleotide
  Target: SCNA; (+) strand; PAM type: NRG; PAM sequence: GGG
acctgtaattccagcacttt

SEQ ID NO: 34899 - DNA, 20 bp, Artificial Sequence
  Description of Artificial Sequence: Synthetic oligonucleotide
  Target: SCNA; (+) strand; PAM type: NRG; PAM sequence: GAG
ctgtaattccagcactttgg

SEQ ID NO: 34900 - DNA, 20 bp, Artificial Sequence
  Description of Artificial Sequence: Synthetic oligonucleotide
  Target: SCNA; (+) strand; PAM type: NRG; PAM sequence: AGG
tgtaattccagcactttggg

SEQ ID NO: 34901 - DNA, 20 bp, Artificial Sequence
  Description of Artificial Sequence: Synthetic oligonucleotide
  Target: SCNA; (+) strand; PAM type: NRG; PAM sequence: CGG
agcactttgggaggctgacg

SEQ ID NO: 34902 - DNA, 20 bp, Artificial Sequence
  Description of Artificial Sequence: Synthetic oligonucleotide
  Target: SCNA; (+) strand; PAM type: NRG; PAM sequence: GGG
gcactttgggaggctgacgc

SEQ ID NO: 34903 - DNA, 20 bp, Artificial Sequence
  Description of Artificial Sequence: Synthetic oligonucleotide
  Target: SCNA; (+) strand; PAM type: NRG; PAM sequence: TGG
ctttgggaggctgacgcggg

SEQ ID NO: 34904 - DNA, 20 bp, Artificial Sequence
  Description of Artificial Sequence: Synthetic oligonucleotide
  Target: SCNA; (+) strand; PAM type: NRG; PAM sequence: GAG
ctgacgcgggtggatcacct

SEQ ID NO: 34905 - DNA, 20 bp, Artificial Sequence
  Description of Artificial Sequence: Synthetic oligonucleotide
  Target: SCNA; (+) strand; PAM type: NRG; PAM sequence: AGG
tgacgcgggtggatcacctg

SEQ ID NO: 34906 - DNA, 20 bp, Artificial Sequence
  Description of Artificial Sequence: Synthetic oligonucleotide
  Target: SCNA; (+) strand; PAM type: NRG; PAM sequence: CAG
gcgggtggatcacctgaggt

SEQ ID NO: 34907 - DNA, 20 bp, Artificial Sequence
  Description of Artificial Sequence: Synthetic oligonucleotide
  Target: SCNA; (+) strand; PAM type: NRG; PAM sequence: AGG
cgggtggatcacctgaggtc

SEQ ID NO: 34908 - DNA, 20 bp, Artificial Sequence
  Description of Artificial Sequence: Synthetic oligonucleotide
  Target: SCNA; (+) strand; PAM type: NRG; PAM sequence: GAG
ggtggatcacctgaggtcag

SEQ ID NO: 34909 - DNA, 20 bp, Artificial Sequence
  Description of Artificial Sequence: Synthetic oligonucleotide
  Target: SCNA; (+) strand; PAM type: NRG; PAM sequence: GAG
tcacctgaggtcaggagttc

SEQ ID NO: 34910 - DNA, 20 bp, Artificial Sequence
  Description of Artificial Sequence: Synthetic oligonucleotide
  Target: SCNA; (+) strand; PAM type: NRG; PAM sequence: CAG
tgaggtcaggagttcgagat

SEQ ID NO: 34911 - DNA, 20 bp, Artificial Sequence
  Description of Artificial Sequence: Synthetic oligonucleotide
  Target: SCNA; (+) strand; PAM type: NRG; PAM sequence: TGG
tcaggagttcgagatcagcc

SEQ ID NO: 34912 - DNA, 20 bp, Artificial Sequence
  Description of Artificial Sequence: Synthetic oligonucleotide
  Target: SCNA; (+) strand; PAM type: NRG; PAM sequence: TGG
cgagatcagcctggccaaca

SEQ ID NO: 34913 - DNA, 20 bp, Artificial Sequence
  Description of Artificial Sequence: Synthetic oligonucleotide
  Target: SCNA; (+) strand; PAM type: NRG; PAM sequence: CAG
ctgaaaatacaaaaattaac

SEQ ID NO: 34914 - DNA, 20 bp, Artificial Sequence
  Description of Artificial Sequence: Synthetic oligonucleotide
  Target: SCNA; (+) strand; PAM type: NRG; PAM sequence: AGG
tgaaaatacaaaaattaacc

SEQ ID NO: 34915 - DNA, 20 bp, Artificial Sequence
  Description of Artificial Sequence: Synthetic oligonucleotide
  Target: SCNA; (+) strand; PAM type: NRG; PAM sequence: TGG
atacaaaaattaaccaggcg

SEQ ID NO: 34916 - DNA, 20 bp, Artificial Sequence
  Description of Artificial Sequence: Synthetic oligonucleotide
  Target: SCNA; (+) strand; PAM type: NRG; PAM sequence: TGG
caaaaattaaccaggcgtgg

SEQ ID NO: 34917 - DNA, 20 bp, Artificial Sequence
  Description of Artificial Sequence: Synthetic oligonucleotide
  Target: SCNA; (+) strand; PAM type: NRG; PAM sequence: CAG
aaattaaccaggcgtggtgg

SEQ ID NO: 34918 - DNA, 20 bp, Artificial Sequence
  Description of Artificial Sequence: Synthetic oligonucleotide
  Target: SCNA; (+) strand; PAM type: NRG; PAM sequence: CAG
gtggcagatgcctgtaatcc

SEQ ID NO: 34919 - DNA, 20 bp, Artificial Sequence
  Description of Artificial Sequence: Synthetic oligonucleotide
  Target: SCNA; (+) strand; PAM type: NRG; PAM sequence: CAG
tgcctgtaatcccagctact

SEQ ID NO: 34920 - DNA, 20 bp, Artificial Sequence
  Description of Artificial Sequence: Synthetic oligonucleotide
  Target: SCNA; (+) strand; PAM type: NRG; PAM sequence: AGG
gcctgtaatcccagctactc

SEQ ID NO: 34921 - DNA, 20 bp, Artificial Sequence
  Description of Artificial Sequence: Synthetic oligonucleotide
  Target: SCNA; (+) strand; PAM type: NRG; PAM sequence: GAG
ctgtaatcccagctactcag

SEQ ID NO: 34922 - DNA, 20 bp, Artificial Sequence
  Description of Artificial Sequence: Synthetic oligonucleotide
  Target: SCNA; (+) strand; PAM type: NRG; PAM sequence: AGG
tgtaatcccagctactcagg

SEQ ID NO: 34923 - DNA, 20 bp, Artificial Sequence
  Description of Artificial Sequence: Synthetic oligonucleotide
  Target: SCNA; (+) strand; PAM type: NRG; PAM sequence: TAG
agctactcaggaggctgaac

SEQ ID NO: 34924 - DNA, 20 bp, Artificial Sequence
  Description of Artificial Sequence: Synthetic oligonucleotide
  Target: SCNA; (+) strand; PAM type: NRG; PAM sequence: AGG
gctactcaggaggctgaact

SEQ ID NO: 34925 - DNA, 20 bp, Artificial Sequence
  Description of Artificial Sequence: Synthetic oligonucleotide
  Target: SCNA; (+) strand; PAM type: NRG; PAM sequence: GAG
tactcaggaggctgaactag

SEQ ID NO: 34926 - DNA, 20 bp, Artificial Sequence
  Description of Artificial Sequence: Synthetic oligonucleotide
  Target: SCNA; (+) strand; PAM type: NRG; PAM sequence: TGG
ctaggagaatcgcttgaacc

SEQ ID NO: 34927 - DNA, 20 bp, Artificial Sequence
  Description of Artificial Sequence: Synthetic oligonucleotide
  Target: SCNA; (+) strand; PAM type: NRG; PAM sequence: GGG
taggagaatcgcttgaacct

SEQ ID NO: 34928 - DNA, 20 bp, Artificial Sequence
  Description of Artificial Sequence: Synthetic oligonucleotide
  Target: SCNA; (+) strand; PAM type: NRG; PAM sequence: TGG
gagaatcgcttgaacctggg

SEQ ID NO: 34929 - DNA, 20 bp, Artificial Sequence
  Description of Artificial Sequence: Synthetic oligonucleotide
  Target: SCNA; (+) strand; PAM type: NRG; PAM sequence: CAG
aatcgcttgaacctgggtgg

SEQ ID NO: 34930 - DNA, 20 bp, Artificial Sequence
  Description of Artificial Sequence: Synthetic oligonucleotide
  Target: SCNA; (+) strand; PAM type: NRG; PAM sequence: GAG
tcgcttgaacctgggtggca

SEQ ID NO: 34931 - DNA, 20 bp, Artificial Sequence
  Description of Artificial Sequence: Synthetic oligonucleotide
  Target: SCNA; (+) strand; PAM type: NRG; PAM sequence: AGG
cgcttgaacctgggtggcag

SEQ ID NO: 34932 - DNA, 20 bp, Artificial Sequence
  Description of Artificial Sequence: Synthetic oligonucleotide
  Target: SCNA; (+) strand; PAM type: NRG; PAM sequence: GAG
tgggtggcagaggctgctgt

SEQ ID NO: 34933 - DNA, 20 bp, Artificial Sequence
  Description of Artificial Sequence: Synthetic oligonucleotide
  Target: SCNA; (+) strand; PAM type: NRG; PAM sequence: GAG
ggcagaggctgctgtgagct

SEQ ID NO: 34934 - DNA, 20 bp, Artificial Sequence
  Description of Artificial Sequence: Synthetic oligonucleotide
  Target: SCNA; (+) strand; PAM type: NRG; PAM sequence: CGG
tgtgagctgagattgcacca

SEQ ID NO: 34935 - DNA, 20 bp, Artificial Sequence
  Description of Artificial Sequence: Synthetic oligonucleotide
  Target: SCNA; (+) strand; PAM type: NRG; PAM sequence: CAG
gagattgcaccacggcactc

SEQ ID NO: 34936 - DNA, 20 bp, Artificial Sequence
  Description of Artificial Sequence: Synthetic oligonucleotide
  Target: SCNA; (+) strand; PAM type: NRG; PAM sequence: TGG
tgcaccacggcactccagcc

SEQ ID NO: 34937 - DNA, 20 bp, Artificial Sequence
  Description of Artificial Sequence: Synthetic oligonucleotide
  Target: SCNA; (+) strand; PAM type: NRG; PAM sequence: GGG
gcaccacggcactccagcct

SEQ ID NO: 34938 - DNA, 20 bp, Artificial Sequence
  Description of Artificial Sequence: Synthetic oligonucleotide
  Target: SCNA; (+) strand; PAM type: NRG; PAM sequence: CAG
cggcactccagcctgggcaa

SEQ ID NO: 34939 - DNA, 20 bp, Artificial Sequence
  Description of Artificial Sequence: Synthetic oligonucleotide
  Target: SCNA; (+) strand; PAM type: NRG; PAM sequence: GAG
gcactccagcctgggcaaca

SEQ ID NO: 34940 - DNA, 20 bp, Artificial Sequence
  Description of Artificial Sequence: Synthetic oligonucleotide
  Target: SCNA; (+) strand; PAM type: NRG; PAM sequence: GAG
tccagcctgggcaacagagc

SEQ ID NO: 34941 - DNA, 20 bp, Artificial Sequence
  Description of Artificial Sequence: Synthetic oligonucleotide
  Target: SCNA; (+) strand; PAM type: NRG; PAM sequence: AAG
atatatatatatatattttg

SEQ ID NO: 34942 - DNA, 20 bp, Artificial Sequence
  Description of Artificial Sequence: Synthetic oligonucleotide
  Target: SCNA; (+) strand; PAM type: NRG; PAM sequence: TAG
tatatatatattttgaagtc

SEQ ID NO: 34943 - DNA, 20 bp, Artificial Sequence
  Description of Artificial Sequence: Synthetic oligonucleotide
  Target: SCNA; (+) strand; PAM type: NRG; PAM sequence: GAG
tatatatattttgaagtcta

SEQ ID NO: 34944 - DNA, 20 bp, Artificial Sequence
  Description of Artificial Sequence: Synthetic oligonucleotide
  Target: SCNA; (+) strand; PAM type: NRG; PAM sequence: CAG
tgaagtctagagatgaattc

SEQ ID NO: 34945 - DNA, 20 bp, Artificial Sequence
  Description of Artificial Sequence: Synthetic oligonucleotide
  Target: SCNA; (+) strand; PAM type: NRG; PAM sequence: AAG
tagagatgaattccagaaat

SEQ ID NO: 34946 - DNA, 20 bp, Artificial Sequence
  Description of Artificial Sequence: Synthetic oligonucleotide
  Target: SCNA; (+) strand; PAM type: NRG; PAM sequence: AGG
agagatgaattccagaaata

SEQ ID NO: 34947 - DNA, 20 bp, Artificial Sequence
  Description of Artificial Sequence: Synthetic oligonucleotide
  Target: SCNA; (+) strand; PAM type: NRG; PAM sequence: CAG
aattccagaaataaggtata

SEQ ID NO: 34948 - DNA, 20 bp, Artificial Sequence
  Description of Artificial Sequence: Synthetic oligonucleotide
  Target: SCNA; (+) strand; PAM type: NRG; PAM sequence: AAG
ccagaaataaggtatacaga

SEQ ID NO: 34949 - DNA, 20 bp, Artificial Sequence
  Description of Artificial Sequence: Synthetic oligonucleotide
  Target: SCNA; (+) strand; PAM type: NRG; PAM sequence: TAG
gtatacagaaagtgaaactg

SEQ ID NO: 34950 - DNA, 20 bp, Artificial Sequence
  Description of Artificial Sequence: Synthetic oligonucleotide
  Target: SCNA; (+) strand; PAM type: NRG; PAM sequence: AGG
tatacagaaagtgaaactgt

SEQ ID NO: 34951 - DNA, 20 bp, Artificial Sequence
  Description of Artificial Sequence: Synthetic oligonucleotide
  Target: SCNA; (+) strand; PAM type: NRG; PAM sequence: TAG
tgtaggactttgtgattgac

SEQ ID NO: 34952 - DNA, 20 bp, Artificial Sequence
  Description of Artificial Sequence: Synthetic oligonucleotide
  Target: SCNA; (+) strand; PAM type: NRG; PAM sequence: GAG
ctttgtgattgactagaact

SEQ ID NO: 34953 - DNA, 20 bp, Artificial Sequence
  Description of Artificial Sequence: Synthetic oligonucleotide
  Target: SCNA; (+) strand; PAM type: NRG; PAM sequence: AGG
tttgtgattgactagaactg

SEQ ID NO: 34954 - DNA, 20 bp, Artificial Sequence
  Description of Artificial Sequence: Synthetic oligonucleotide
  Target: SCNA; (+) strand; PAM type: NRG; PAM sequence: GGG
ttgtgattgactagaactga

SEQ ID NO: 34955 - DNA, 20 bp, Artificial Sequence
  Description of Artificial Sequence: Synthetic oligonucleotide
  Target: SCNA; (+) strand; PAM type: NRG; PAM sequence: AAG
attgactagaactgagggac

SEQ ID NO: 34956 - DNA, 20 bp, Artificial Sequence
  Description of Artificial Sequence: Synthetic oligonucleotide
  Target: SCNA; (+) strand; PAM type: NRG; PAM sequence: AGG
ttgactagaactgagggaca

SEQ ID NO: 34957 - DNA, 20 bp, Artificial Sequence
  Description of Artificial Sequence: Synthetic oligonucleotide
  Target: SCNA; (+) strand; PAM type: NRG; PAM sequence: GGG
tgactagaactgagggacaa

SEQ ID NO: 34958 - DNA, 20 bp, Artificial Sequence
  Description of Artificial Sequence: Synthetic oligonucleotide
  Target: SCNA; (+) strand; PAM type: NRG; PAM sequence: GAG
actagaactgagggacaagg

SEQ ID NO: 34959 - DNA, 20 bp, Artificial Sequence
  Description of Artificial Sequence: Synthetic oligonucleotide
  Target: SCNA; (+) strand; PAM type: NRG; PAM sequence: GAG
tagaactgagggacaaggga

SEQ ID NO: 34960 - DNA, 20 bp, Artificial Sequence
  Description of Artificial Sequence: Synthetic oligonucleotide
  Target: SCNA; (+) strand; PAM type: NRG; PAM sequence: AGG
agaactgagggacaagggag

SEQ ID NO: 34961 - DNA, 20 bp, Artificial Sequence
  Description of Artificial Sequence: Synthetic oligonucleotide
  Target: SCNA; (+) strand; PAM type: NRG; PAM sequence: GGG
gaactgagggacaagggaga

SEQ ID NO: 34962 - DNA, 20 bp, Artificial Sequence
  Description of Artificial Sequence: Synthetic oligonucleotide
  Target: SCNA; (+) strand; PAM type: NRG; PAM sequence: AAG
tgagggacaagggagaggga

SEQ ID NO: 34963 - DNA, 20 bp, Artificial Sequence
  Description of Artificial Sequence: Synthetic oligonucleotide
  Target: SCNA; (+) strand; PAM type: NRG; PAM sequence: AGG
gagggacaagggagagggaa

SEQ ID NO: 34964 - DNA, 20 bp, Artificial Sequence
  Description of Artificial Sequence: Synthetic oligonucleotide
  Target: SCNA; (+) strand; PAM type: NRG; PAM sequence: GGG
agggacaagggagagggaaa

SEQ ID NO: 34965 - DNA, 20 bp, Artificial Sequence
  Description of Artificial Sequence: Synthetic oligonucleotide
  Target: SCNA; (+) strand; PAM type: NRG; PAM sequence: AAG
gacaagggagagggaaaggg

SEQ ID NO: 34966 - DNA, 20 bp, Artificial Sequence
  Description of Artificial Sequence: Synthetic oligonucleotide
  Target: SCNA; (+) strand; PAM type: NRG; PAM sequence: GAG
caagggagagggaaagggaa

SEQ ID NO: 34967 - DNA, 20 bp, Artificial Sequence
  Description of Artificial Sequence: Synthetic oligonucleotide
  Target: SCNA; (+) strand; PAM type: NRG; PAM sequence: AAG
agagggaaagggaagagttg

SEQ ID NO: 34968 - DNA, 20 bp, Artificial Sequence
  Description of Artificial Sequence: Synthetic oligonucleotide
  Target: SCNA; (+) strand; PAM type: NRG; PAM sequence: TGG
aagggaagagttgaagatga

SEQ ID NO: 34969 - DNA, 20 bp, Artificial Sequence
  Description of Artificial Sequence: Synthetic oligonucleotide
  Target: SCNA; (+) strand; PAM type: NRG; PAM sequence: TAG
gttgaagatgatggaaacaa

SEQ ID NO: 34970 - DNA, 20 bp, Artificial Sequence
  Description of Artificial Sequence: Synthetic oligonucleotide
  Target: SCNA; (+) strand; PAM type: NRG; PAM sequence: CAG
atgatggaaacaatagatta

SEQ ID NO: 34971 - DNA, 20 bp, Artificial Sequence
  Description of Artificial Sequence: Synthetic oligonucleotide
  Target: SCNA; (+) strand; PAM type: NRG; PAM sequence: AGG
tgatggaaacaatagattac

SEQ ID NO: 34972 - DNA, 20 bp, Artificial Sequence
  Description of Artificial Sequence: Synthetic oligonucleotide
  Target: SCNA; (+) strand; PAM type: NRG; PAM sequence: AAG
tggaaacaatagattacagg

SEQ ID NO: 34973 - DNA, 20 bp, Artificial Sequence
  Description of Artificial Sequence: Synthetic oligonucleotide
  Target: SCNA; (+) strand; PAM type: NRG; PAM sequence: GAG
gaaacaatagattacaggaa

SEQ ID NO: 34974 - DNA, 20 bp, Artificial Sequence
  Description of Artificial Sequence: Synthetic oligonucleotide
  Target: SCNA; (+) strand; PAM type: NRG; PAM sequence: AGG
aaacaatagattacaggaag

SEQ ID NO: 34975 - DNA, 20 bp, Artificial Sequence
  Description of Artificial Sequence: Synthetic oligonucleotide
  Target: SCNA; (+) strand; PAM type: NRG; PAM sequence: TAG
tacaggaagaggatcaaatt

SEQ ID NO: 34976 - DNA, 20 bp, Artificial Sequence
  Description of Artificial Sequence: Synthetic oligonucleotide
  Target: SCNA; (+) strand; PAM type: NRG; PAM sequence: AGG
acaggaagaggatcaaattt

SEQ ID NO: 34977 - DNA, 20 bp, Artificial Sequence
  Description of Artificial Sequence: Synthetic oligonucleotide
  Target: SCNA; (+) strand; PAM type: NRG; PAM sequence: GGG
caggaagaggatcaaattta

SEQ ID NO: 34978 - DNA, 20 bp, Artificial Sequence
  Description of Artificial Sequence: Synthetic oligonucleotide
  Target: SCNA; (+) strand; PAM type: NRG; PAM sequence: GGG
aggaagaggatcaaatttag

SEQ ID NO: 34979 - DNA, 20 bp, Artificial Sequence
  Description of Artificial Sequence: Synthetic oligonucleotide
  Target: SCNA; (+) strand; PAM type: NRG; PAM sequence: GGG
ggaagaggatcaaatttagg

SEQ ID NO: 34980 - DNA, 20 bp, Artificial Sequence
  Description of Artificial Sequence: Synthetic oligonucleotide
  Target: SCNA; (+) strand; PAM type: NRG; PAM sequence: AAG
agaggatcaaatttaggggg

SEQ ID NO: 34981 - DNA, 20 bp, Artificial Sequence
  Description of Artificial Sequence: Synthetic oligonucleotide
  Target: SCNA; (+) strand; PAM type: NRG; PAM sequence: AAG
ggatcaaatttagggggaag

SEQ ID NO: 34982 - DNA, 20 bp, Artificial Sequence
  Description of Artificial Sequence: Synthetic oligonucleotide
  Target: SCNA; (+) strand; PAM type: NRG; PAM sequence: CAG
aaatttagggggaagaagat

SEQ ID NO: 34983 - DNA, 20 bp, Artificial Sequence
  Description of Artificial Sequence: Synthetic oligonucleotide
  Target: SCNA; (+) strand; PAM type: NRG; PAM sequence: AAG
cttaattccacatgttctga

SEQ ID NO: 34984 - DNA, 20 bp, Artificial Sequence
  Description of Artificial Sequence: Synthetic oligonucleotide
  Target: SCNA; (+) strand; PAM type: NRG; PAM sequence: TAG
tgaaagttaaatatctcctc

SEQ ID NO: 34985 - DNA, 20 bp, Artificial Sequence
  Description of Artificial Sequence: Synthetic oligonucleotide
  Target: SCNA; (+) strand; PAM type: NRG; PAM sequence: AAG
taaatatctcctctagccaa

SEQ ID NO: 34986 - DNA, 20 bp, Artificial Sequence
  Description of Artificial Sequence: Synthetic oligonucleotide
  Target: SCNA; (+) strand; PAM type: NRG; PAM sequence: TGG
cccttcctattttacttctc

SEQ ID NO: 34987 - DNA, 20 bp, Artificial Sequence
  Description of Artificial Sequence: Synthetic oligonucleotide
  Target: SCNA; (+) strand; PAM type: NRG; PAM sequence: CAG
caaataatttaaccccttta

SEQ ID NO: 34988 - DNA, 20 bp, Artificial Sequence
  Description of Artificial Sequence: Synthetic oligonucleotide
  Target: SCNA; (+) strand; PAM type: NRG; PAM sequence: TAG
tttacagatccaaaatttta

SEQ ID NO: 34989 - DNA, 20 bp, Artificial Sequence
  Description of Artificial Sequence: Synthetic oligonucleotide
  Target: SCNA; (+) strand; PAM type: NRG; PAM sequence: TAG
acagatccaaaattttatag

SEQ ID NO: 34990 - DNA, 20 bp, Artificial Sequence
  Description of Artificial Sequence: Synthetic oligonucleotide
  Target: SCNA; (+) strand; PAM type: NRG; PAM sequence: AGG
cagatccaaaattttatagt

SEQ ID NO: 34991 - DNA, 20 bp, Artificial Sequence
  Description of Artificial Sequence: Synthetic oligonucleotide
  Target: SCNA; (+) strand; PAM type: NRG; PAM sequence: TAG
ttgaaaatgtatgttatgaa

SEQ ID NO: 34992 - DNA, 20 bp, Artificial Sequence
  Description of Artificial Sequence: Synthetic oligonucleotide
  Target: SCNA; (+) strand; PAM type: NRG; PAM sequence: TAG
tatgttatgaatagcctttg

SEQ ID NO: 34993 - DNA, 20 bp, Artificial Sequence
  Description of Artificial Sequence: Synthetic oligonucleotide
  Target: SCNA; (+) strand; PAM type: NRG; PAM sequence: AGG
atgttatgaatagcctttgt

SEQ ID NO: 34994 - DNA, 20 bp, Artificial Sequence
  Description of Artificial Sequence: Synthetic oligonucleotide
  Target: SCNA; (+) strand; PAM type: NRG; PAM sequence: CAG
ctttgtaggtgatatttttg

SEQ ID NO: 34995 - DNA, 20 bp, Artificial Sequence
  Description of Artificial Sequence: Synthetic oligonucleotide
  Target: SCNA; (+) strand; PAM type: NRG; PAM sequence: TGG
taggtgatatttttgcagtt

SEQ ID NO: 34996 - DNA, 20 bp, Artificial Sequence
  Description of Artificial Sequence: Synthetic oligonucleotide
  Target: SCNA; (+) strand; PAM type: NRG; PAM sequence: TAG
atttttgcagtttggtaact

SEQ ID NO: 34997 - DNA, 20 bp, Artificial Sequence
  Description of Artificial Sequence: Synthetic oligonucleotide
  Target: SCNA; (+) strand; PAM type: NRG; PAM sequence: AGG
tttttgcagtttggtaactt

SEQ ID NO: 34998 - DNA, 20 bp, Artificial Sequence
  Description of Artificial Sequence: Synthetic oligonucleotide
  Target: SCNA; (+) strand; PAM type: NRG; PAM sequence: AAG
gcagtttggtaacttaggac

SEQ ID NO: 34999 - DNA, 20 bp, Artificial Sequence
  Description of Artificial Sequence: Synthetic oligonucleotide
  Target: SCNA; (+) strand; PAM type: NRG; PAM sequence: AGG
cagtttggtaacttaggaca

SEQ ID NO: 35000 - DNA, 20 bp, Artificial Sequence
  Description of Artificial Sequence: Synthetic oligonucleotide
  Target: SCNA; (+) strand; PAM type: NRG; PAM sequence: AAG
tgtcccttgttaaatgtcac

SEQ ID NO: 35001 - DNA, 20 bp, Artificial Sequence
  Description of Artificial Sequence: Synthetic oligonucleotide
  Target: SCNA; (+) strand; PAM type: NRG; PAM sequence: AAG
ttctctacctatatatcaca

SEQ ID NO: 35002 - DNA, 20 bp, Artificial Sequence
  Description of Artificial Sequence: Synthetic oligonucleotide
  Target: SCNA; (+) strand; PAM type: NRG; PAM sequence: AAG
ccttctgctctgctgatcac

SEQ ID NO: 35003 - DNA, 20 bp, Artificial Sequence
  Description of Artificial Sequence: Synthetic oligonucleotide
  Target: SCNA; (+) strand; PAM type: NRG; PAM sequence: AGG
cttctgctctgctgatcaca

SEQ ID NO: 35004 - DNA, 20 bp, Artificial Sequence
  Description of Artificial Sequence: Synthetic oligonucleotide
  Target: SCNA; (+) strand; PAM type: NRG; PAM sequence: AAG
ctgctgatcacaaggtaatt

SEQ ID NO: 35005 - DNA, 20 bp, Artificial Sequence
  Description of Artificial Sequence: Synthetic oligonucleotide
  Target: SCNA; (+) strand; PAM type: NRG; PAM sequence: TGG
atcacaaggtaattaagttt

SEQ ID NO: 35006 - DNA, 20 bp, Artificial Sequence
  Description of Artificial Sequence: Synthetic oligonucleotide
  Target: SCNA; (+) strand; PAM type: NRG; PAM sequence: GAG
cacaaggtaattaagttttg

SEQ ID NO: 35007 - DNA, 20 bp, Artificial Sequence
  Description of Artificial Sequence: Synthetic oligonucleotide
  Target: SCNA; (+) strand; PAM type: NRG; PAM sequence: TGG
aaggtaattaagttttggag

SEQ ID NO: 35008 - DNA, 20 bp, Artificial Sequence
  Description of Artificial Sequence: Synthetic oligonucleotide
  Target: SCNA; (+) strand; PAM type: NRG; PAM sequence: GAG
ggtaattaagttttggagtg

SEQ ID NO: 35009 - DNA, 20 bp, Artificial Sequence
  Description of Artificial Sequence: Synthetic oligonucleotide
  Target: SCNA; (+) strand; PAM type: NRG; PAM sequence: AGG
gtaattaagttttggagtgg

SEQ ID NO: 35010 - DNA, 20 bp, Artificial Sequence
  Description of Artificial Sequence: Synthetic oligonucleotide
  Target: SCNA; (+) strand; PAM type: NRG; PAM sequence: GAG
aattaagttttggagtggag

SEQ ID NO: 35011 - DNA, 20 bp, Artificial Sequence
  Description of Artificial Sequence: Synthetic oligonucleotide
  Target: SCNA; (+) strand; PAM type: NRG; PAM sequence: TAG
tttggagtggaggagtgtct

SEQ ID NO: 35012 - DNA, 20 bp, Artificial Sequence
  Description of Artificial Sequence: Synthetic oligonucleotide
  Target: SCNA; (+) strand; PAM type: NRG; PAM sequence: AGG
ttggagtggaggagtgtctt

SEQ ID NO: 35013 - DNA, 20 bp, Artificial Sequence
  Description of Artificial Sequence: Synthetic oligonucleotide
  Target: SCNA; (+) strand; PAM type: NRG; PAM sequence: AAG
atgttcatgcattaaatata

SEQ ID NO: 35014 - DNA, 20 bp, Artificial Sequence
  Description of Artificial Sequence: Synthetic oligonucleotide
  Target: SCNA; (+) strand; PAM type: NRG; PAM sequence: GAG
tttaaaaaattaactatatt

SEQ ID NO: 35015 - DNA, 20 bp, Artificial Sequence
  Description of Artificial Sequence: Synthetic oligonucleotide
  Target: SCNA; (+) strand; PAM type: NRG; PAM sequence: AGG
ttaaaaaattaactatattg

SEQ ID NO: 35016 - DNA, 20 bp, Artificial Sequence
  Description of Artificial Sequence: Synthetic oligonucleotide
  Target: SCNA; (+) strand; PAM type: NRG; PAM sequence: GAG
attttaaatgtacatttctt

SEQ ID NO: 35017 - DNA, 20 bp, Artificial Sequence
  Description of Artificial Sequence: Synthetic oligonucleotide
  Target: SCNA; (+) strand; PAM type: NRG; PAM sequence: GAG
atgtaacgaccaccacaatt

SEQ ID NO: 35018 - DNA, 20 bp, Artificial Sequence
  Description of Artificial Sequence: Synthetic oligonucleotide
  Target: SCNA; (+) strand; PAM type: NRG; PAM sequence: TAG
ttttcctttgtgcctttttc

SEQ ID NO: 35019 - DNA, 20 bp, Artificial Sequence
  Description of Artificial Sequence: Synthetic oligonucleotide
  Target: SCNA; (+) strand; PAM type: NRG; PAM sequence: CAG
cttctcctccacctccaccc

SEQ ID NO: 35020 - DNA, 20 bp, Artificial Sequence
  Description of Artificial Sequence: Synthetic oligonucleotide
  Target: SCNA; (+) strand; PAM type: NRG; PAM sequence: TGG
ccacctccaccccagcccca

SEQ ID NO: 35021 - DNA, 20 bp, Artificial Sequence
  Description of Artificial Sequence: Synthetic oligonucleotide
  Target: SCNA; (+) strand; PAM type: NRG; PAM sequence: GGG
cacctccaccccagccccat

SEQ ID NO: 35022 - DNA, 20 bp, Artificial Sequence
  Description of Artificial Sequence: Synthetic oligonucleotide
  Target: SCNA; (+) strand; PAM type: NRG; PAM sequence: GGG
acctccaccccagccccatg

SEQ ID NO: 35023 - DNA, 20 bp, Artificial Sequence
  Description of Artificial Sequence: Synthetic oligonucleotide
  Target: SCNA; (+) strand; PAM type: NRG; PAM sequence: GGG
cctccaccccagccccatgg

SEQ ID NO: 35024 - DNA, 20 bp, Artificial Sequence
  Description of Artificial Sequence: Synthetic oligonucleotide
  Target: SCNA; (+) strand; PAM type: NRG; PAM sequence: TAG
ccaccccagccccatggggg

SEQ ID NO: 35025 - DNA, 20 bp, Artificial Sequence
  Description of Artificial Sequence: Synthetic oligonucleotide
  Target: SCNA; (+) strand; PAM type: NRG; PAM sequence: AAG
gccccatgggggtagccatg

SEQ ID NO: 35026 - DNA, 20 bp, Artificial Sequence
  Description of Artificial Sequence: Synthetic oligonucleotide
  Target: SCNA; (+) strand; PAM type: NRG; PAM sequence: AGG
ccccatgggggtagccatga

SEQ ID NO: 35027 - DNA, 20 bp, Artificial Sequence
  Description of Artificial Sequence: Synthetic oligonucleotide
  Target: SCNA; (+) strand; PAM type: NRG; PAM sequence: TGG
agccatgaaggtacacctct

SEQ ID NO: 35028 - DNA, 20 bp, Artificial Sequence
  Description of Artificial Sequence: Synthetic oligonucleotide
  Target: SCNA; (+) strand; PAM type: NRG; PAM sequence: TAG
ttggatcttttctctccaat

SEQ ID NO: 35029 - DNA, 20 bp, Artificial Sequence
  Description of Artificial Sequence: Synthetic oligonucleotide
  Target: SCNA; (+) strand; PAM type: NRG; PAM sequence: CAG
ttttctctccaattagctgc

SEQ ID NO: 35030 - DNA, 20 bp, Artificial Sequence
  Description of Artificial Sequence: Synthetic oligonucleotide
  Target: SCNA; (+) strand; PAM type: NRG; PAM sequence: AGG
tttctctccaattagctgcc

SEQ ID NO: 35031 - DNA, 20 bp, Artificial Sequence
  Description of Artificial Sequence: Synthetic oligonucleotide
  Target: SCNA; (+) strand; PAM type: NRG; PAM sequence: GAG
tctctccaattagctgccag

SEQ ID NO: 35032 - DNA, 20 bp, Artificial Sequence
  Description of Artificial Sequence: Synthetic oligonucleotide
  Target: SCNA; (+) strand; PAM type: NRG; PAM sequence: TGG
ttagctgccaggagtgctat

SEQ ID NO: 35033 - DNA, 20 bp, Artificial Sequence
  Description of Artificial Sequence: Synthetic oligonucleotide
  Target: SCNA; (+) strand; PAM type: NRG; PAM sequence: CAG
gtgctattggcctcctgctg

SEQ ID NO: 35034 - DNA, 20 bp, Artificial Sequence
  Description of Artificial Sequence: Synthetic oligonucleotide
  Target: SCNA; (+) strand; PAM type: NRG; PAM sequence: CAG
ctattggcctcctgctgcag

SEQ ID NO: 35035 - DNA, 20 bp, Artificial Sequence
  Description of Artificial Sequence: Synthetic oligonucleotide
  Target: SCNA; (+) strand; PAM type: NRG; PAM sequence: TGG
gcctcctgctgcagcagcaa

SEQ ID NO: 35036 - DNA, 20 bp, Artificial Sequence
  Description of Artificial Sequence: Synthetic oligonucleotide
  Target: SCNA; (+) strand; PAM type: NRG; PAM sequence: GGG
cctcctgctgcagcagcaat

SEQ ID NO: 35037 - DNA, 20 bp, Artificial Sequence
  Description of Artificial Sequence: Synthetic oligonucleotide
  Target: SCNA; (+) strand; PAM type: NRG; PAM sequence: CAG
agcagcaatgggatccacca

SEQ ID NO: 35038 - DNA, 20 bp, Artificial Sequence
  Description of Artificial Sequence: Synthetic oligonucleotide
  Target: SCNA; (+) strand; PAM type: NRG; PAM sequence: CAG
caatgggatccaccacagca

SEQ ID NO: 35039 - DNA, 20 bp, Artificial Sequence
  Description of Artificial Sequence: Synthetic oligonucleotide
  Target: SCNA; (+) strand; PAM type: NRG; PAM sequence: AGG
aatgggatccaccacagcac

SEQ ID NO: 35040 - DNA, 20 bp, Artificial Sequence
  Description of Artificial Sequence: Synthetic oligonucleotide
  Target: SCNA; (+) strand; PAM type: NRG; PAM sequence: CAG
tccaccacagcacaggaacc

SEQ ID NO: 35041 - DNA, 20 bp, Artificial Sequence
  Description of Artificial Sequence: Synthetic oligonucleotide
  Target: SCNA; (+) strand; PAM type: NRG; PAM sequence: TGG
cacagcacaggaacccagac

SEQ ID NO: 35042 - DNA, 20 bp, Artificial Sequence
  Description of Artificial Sequence: Synthetic oligonucleotide
  Target: SCNA; (+) strand; PAM type: NRG; PAM sequence: CAG
caggaacccagactggcctc

SEQ ID NO: 35043 - DNA, 20 bp, Artificial Sequence
  Description of Artificial Sequence: Synthetic oligonucleotide
  Target: SCNA; (+) strand; PAM type: NRG; PAM sequence: TGG
actggcctccagccaatgac

SEQ ID NO: 35044 - DNA, 20 bp, Artificial Sequence
  Description of Artificial Sequence: Synthetic oligonucleotide
  Target: SCNA; (+) strand; PAM type: NRG; PAM sequence: GGG
ctggcctccagccaatgact

SEQ ID NO: 35045 - DNA, 20 bp, Artificial Sequence
  Description of Artificial Sequence: Synthetic oligonucleotide
  Target: SCNA; (+) strand; PAM type: NRG; PAM sequence: GAG
ggcctccagccaatgactgg

SEQ ID NO: 35046 - DNA, 20 bp, Artificial Sequence
  Description of Artificial Sequence: Synthetic oligonucleotide
  Target: SCNA; (+) strand; PAM type: NRG; PAM sequence: CAG
ctccagccaatgactgggag

SEQ ID NO: 35047 - DNA, 20 bp, Artificial Sequence
  Description of Artificial Sequence: Synthetic oligonucleotide
  Target: SCNA; (+) strand; PAM type: NRG; PAM sequence: AAG
agccaatgactgggagcagc

SEQ ID NO: 35048 - DNA, 20 bp, Artificial Sequence
  Description of Artificial Sequence: Synthetic oligonucleotide
  Target: SCNA; (+) strand; PAM type: NRG; PAM sequence: AGG
gccaatgactgggagcagca

SEQ ID NO: 35049 - DNA, 20 bp, Artificial Sequence
  Description of Artificial Sequence: Synthetic oligonucleotide
  Target: SCNA; (+) strand; PAM type: NRG; PAM sequence: CAG
tgggagcagcaaggaaacta

SEQ ID NO: 35050 - DNA, 20 bp, Artificial Sequence
  Description of Artificial Sequence: Synthetic oligonucleotide
  Target: SCNA; (+) strand; PAM type: NRG; PAM sequence: CAG
gcagcaaggaaactacagcc

SEQ ID NO: 35051 - DNA, 20 bp, Artificial Sequence
  Description of Artificial Sequence: Synthetic oligonucleotide
  Target: SCNA; (+) strand; PAM type: NRG; PAM sequence: AAG
ctaatgcatgactcctcaac

SEQ ID NO: 35052 - DNA, 20 bp, Artificial Sequence
  Description of Artificial Sequence: Synthetic oligonucleotide
  Target: SCNA; (+) strand; PAM type: NRG; PAM sequence: TGG
cctcaacaagtaacctttgt

SEQ ID NO: 35053 - DNA, 20 bp, Artificial Sequence
  Description of Artificial Sequence: Synthetic oligonucleotide
  Target: SCNA; (+) strand; PAM type: NRG; PAM sequence: AAG
caacaagtaacctttgttgg

SEQ ID NO: 35054 - DNA, 20 bp, Artificial Sequence
  Description of Artificial Sequence: Synthetic oligonucleotide
  Target: SCNA; (+) strand; PAM type: NRG; PAM sequence: AAG
agtaacctttgttggaagcc

SEQ ID NO: 35055 - DNA, 20 bp, Artificial Sequence
  Description of Artificial Sequence: Synthetic oligonucleotide
  Target: SCNA; (+) strand; PAM type: NRG; PAM sequence: TGG
tgtaactgcactgtaatctg

SEQ ID NO: 35056 - DNA, 20 bp, Artificial Sequence
  Description of Artificial Sequence: Synthetic oligonucleotide
  Target: SCNA; (+) strand; PAM type: NRG; PAM sequence: AAG
cttccttctgcctccctttg

SEQ ID NO: 35057 - DNA, 20 bp, Artificial Sequence
  Description of Artificial Sequence: Synthetic oligonucleotide
  Target: SCNA; (+) strand; PAM type: NRG; PAM sequence: TGG
gtgatatcacaactacattg

SEQ ID NO: 35058 - DNA, 20 bp, Artificial Sequence
  Description of Artificial Sequence: Synthetic oligonucleotide
  Target: SCNA; (+) strand; PAM type: NRG; PAM sequence: TGG
cattgtggtttttccttgcc

SEQ ID NO: 35059 - DNA, 20 bp, Artificial Sequence
  Description of Artificial Sequence: Synthetic oligonucleotide
  Target: SCNA; (+) strand; PAM type: NRG; PAM sequence: TAG
tgttctctttctacctttca

SEQ ID NO: 35060 - DNA, 20 bp, Artificial Sequence
  Description of Artificial Sequence: Synthetic oligonucleotide
  Target: SCNA; (+) strand; PAM type: NRG; PAM sequence: TGG
tgcctgcaataaatctcttg

SEQ ID NO: 35061 - DNA, 20 bp, Artificial Sequence
  Description of Artificial Sequence: Synthetic oligonucleotide
  Target: SCNA; (+) strand; PAM type: NRG; PAM sequence: TGG
tgcaataaatctcttgtgga

SEQ ID NO: 35062 - DNA, 20 bp, Artificial Sequence
  Description of Artificial Sequence: Synthetic oligonucleotide
  Target: SCNA; (+) strand; PAM type: NRG; PAM sequence: TGG
ttgtaattctaacaccatct

SEQ ID NO: 35063 - DNA, 20 bp, Artificial Sequence
  Description of Artificial Sequence: Synthetic oligonucleotide
  Target: SCNA; (+) strand; PAM type: NRG; PAM sequence: CAG
ttctaacaccatcttggaat

SEQ ID NO: 35064 - DNA, 20 bp, Artificial Sequence
  Description of Artificial Sequence: Synthetic oligonucleotide
  Target: SCNA; (+) strand; PAM type: NRG; PAM sequence: CAG
tgaactgatgcctctacctc

SEQ ID NO: 35065 - DNA, 20 bp, Artificial Sequence
  Description of Artificial Sequence: Synthetic oligonucleotide
  Target: SCNA; (+) strand; PAM type: NRG; PAM sequence: AAG
ctgatgcctctacctccagc

SEQ ID NO: 35066 - DNA, 20 bp, Artificial Sequence
  Description of Artificial Sequence: Synthetic oligonucleotide
  Target: SCNA; (+) strand; PAM type: NRG; PAM sequence: TGG
gcctctacctccagcaagca

SEQ ID NO: 35067 - DNA, 20 bp, Artificial Sequence
  Description of Artificial Sequence: Synthetic oligonucleotide
  Target: SCNA; (+) strand; PAM type: NRG; PAM sequence: TGG
catggatcttgttgttacca

SEQ ID NO: 35068 - DNA, 20 bp, Artificial Sequence
  Description of Artificial Sequence: Synthetic oligonucleotide
  Target: SCNA; (+) strand; PAM type: NRG; PAM sequence: TGG
tggatgacatttgtcttttc

SEQ ID NO: 35069 - DNA, 20 bp, Artificial Sequence
  Description of Artificial Sequence: Synthetic oligonucleotide
  Target: SCNA; (+) strand; PAM type: NRG; PAM sequence: TAG
atttgtcttttctggaatta

SEQ ID NO: 35070 - DNA, 20 bp, Artificial Sequence
  Description of Artificial Sequence: Synthetic oligonucleotide
  Target: SCNA; (+) strand; PAM type: NRG; PAM sequence: TGG
agtatgtactgatttgtgcc

SEQ ID NO: 35071 - DNA, 20 bp, Artificial Sequence
  Description of Artificial Sequence: Synthetic oligonucleotide
  Target: SCNA; (+) strand; PAM type: NRG; PAM sequence: CAG
gatttgtgcctggcatcaca

SEQ ID NO: 35072 - DNA, 20 bp, Artificial Sequence
  Description of Artificial Sequence: Synthetic oligonucleotide
  Target: SCNA; (+) strand; PAM type: NRG; PAM sequence: TAG
cctggcatcacacagcatga

SEQ ID NO: 35073 - DNA, 20 bp, Artificial Sequence
  Description of Artificial Sequence: Synthetic oligonucleotide
  Target: SCNA; (+) strand; PAM type: NRG; PAM sequence: GAG
tcacacagcatgatagtttt

SEQ ID NO: 35074 - DNA, 20 bp, Artificial Sequence
  Description of Artificial Sequence: Synthetic oligonucleotide
  Target: SCNA; (+) strand; PAM type: NRG; PAM sequence: GAG
tgagattcatccatgttgtt

SEQ ID NO: 35075 - DNA, 20 bp, Artificial Sequence
  Description of Artificial Sequence: Synthetic oligonucleotide
  Target: SCNA; (+) strand; PAM type: NRG; PAM sequence: AGG
gagattcatccatgttgttg

SEQ ID NO: 35076 - DNA, 20 bp, Artificial Sequence
  Description of Artificial Sequence: Synthetic oligonucleotide
  Target: SCNA; (+) strand; PAM type: NRG; PAM sequence: CAG
atccatgttgttgaggttat

SEQ ID NO: 35077 - DNA, 20 bp, Artificial Sequence
  Description of Artificial Sequence: Synthetic oligonucleotide
  Target: SCNA; (+) strand; PAM type: NRG; PAM sequence: TAG
catgttgttgaggttatcag

SEQ ID NO: 35078 - DNA, 20 bp, Artificial Sequence
  Description of Artificial Sequence: Synthetic oligonucleotide
  Target: SCNA; (+) strand; PAM type: NRG; PAM sequence: AAG
tccattccatttttgttgct

SEQ ID NO: 35079 - DNA, 20 bp, Artificial Sequence
  Description of Artificial Sequence: Synthetic oligonucleotide
  Target: SCNA; (+) strand; PAM type: NRG; PAM sequence: TAG
attccatttttgttgctaag

SEQ ID NO: 35080 - DNA, 20 bp, Artificial Sequence
  Description of Artificial Sequence: Synthetic oligonucleotide
  Target: SCNA; (+) strand; PAM type: NRG; PAM sequence: CAG
agtattctgctgtatgaata

SEQ ID NO: 35081 - DNA, 20 bp, Artificial Sequence
  Description of Artificial Sequence: Synthetic oligonucleotide
  Target: SCNA; (+) strand; PAM type: NRG; PAM sequence: CAG
attgattattgtgttgttac

SEQ ID NO: 35082 - DNA, 20 bp, Artificial Sequence
  Description of Artificial Sequence: Synthetic oligonucleotide
  Target: SCNA; (+) strand; PAM type: NRG; PAM sequence: TAG
attattgtgttgttaccagt

SEQ ID NO: 35083 - DNA, 20 bp, Artificial Sequence
  Description of Artificial Sequence: Synthetic oligonucleotide
  Target: SCNA; (+) strand; PAM type: NRG; PAM sequence: GAG
tattgtgttgttaccagtta

SEQ ID NO: 35084 - DNA, 20 bp, Artificial Sequence
  Description of Artificial Sequence: Synthetic oligonucleotide
  Target: SCNA; (+) strand; PAM type: NRG; PAM sequence: AAG
tgttaccagttagagctatt

SEQ ID NO: 35085 - DNA, 20 bp, Artificial Sequence
  Description of Artificial Sequence: Synthetic oligonucleotide
  Target: SCNA; (+) strand; PAM type: NRG; PAM sequence: GAG
ttaccagttagagctattaa

SEQ ID NO: 35086 - DNA, 20 bp, Artificial Sequence
  Description of Artificial Sequence: Synthetic oligonucleotide
  Target: SCNA; (+) strand; PAM type: NRG; PAM sequence: AAG
tatcgtgaataattctgtac

SEQ ID NO: 35087 - DNA, 20 bp, Artificial Sequence
  Description of Artificial Sequence: Synthetic oligonucleotide
  Target: SCNA; (+) strand; PAM type: NRG; PAM sequence: AAG
catatgcttccattaatctt

SEQ ID NO: 35088 - DNA, 20 bp, Artificial Sequence
  Description of Artificial Sequence: Synthetic oligonucleotide
  Target: SCNA; (+) strand; PAM type: NRG; PAM sequence: TAG
attaatcttaagtaaatacc

SEQ ID NO: 35089 - DNA, 20 bp, Artificial Sequence
  Description of Artificial Sequence: Synthetic oligonucleotide
  Target: SCNA; (+) strand; PAM type: NRG; PAM sequence: AGG
ttaatcttaagtaaatacct

SEQ ID NO: 35090 - DNA, 20 bp, Artificial Sequence
  Description of Artificial Sequence: Synthetic oligonucleotide
  Target: SCNA; (+) strand; PAM type: NRG; PAM sequence: GGG
taatcttaagtaaataccta

SEQ ID NO: 35091 - DNA, 20 bp, Artificial Sequence
  Description of Artificial Sequence: Synthetic oligonucleotide
  Target: SCNA; (+) strand; PAM type: NRG; PAM sequence: GGG
aatcttaagtaaatacctag

SEQ ID NO: 35092 - DNA, 20 bp, Artificial Sequence
  Description of Artificial Sequence: Synthetic oligonucleotide
  Target: SCNA; (+) strand; PAM type: NRG; PAM sequence: TAG
cttaagtaaatacctagggg

SEQ ID NO: 35093 - DNA, 20 bp, Artificial Sequence
  Description of Artificial Sequence: Synthetic oligonucleotide
  Target: SCNA; (+) strand; PAM type: NRG; PAM sequence: CAG
atacctaggggtagaactta

SEQ ID NO: 35094 - DNA, 20 bp, Artificial Sequence
  Description of Artificial Sequence: Synthetic oligonucleotide
  Target: SCNA; (+) strand; PAM type: NRG; PAM sequence: AAG
aggggtagaacttacagatg

SEQ ID NO: 35095 - DNA, 20 bp, Artificial Sequence
  Description of Artificial Sequence: Synthetic oligonucleotide
  Target: SCNA; (+) strand; PAM type: NRG; PAM sequence: CAG
agaacttacagatgaagaaa

SEQ ID NO: 35096 - DNA, 20 bp, Artificial Sequence
  Description of Artificial Sequence: Synthetic oligonucleotide
  Target: SCNA; (+) strand; PAM type: NRG; PAM sequence: AAG
acttacagatgaagaaacag

SEQ ID NO: 35097 - DNA, 20 bp, Artificial Sequence
  Description of Artificial Sequence: Synthetic oligonucleotide
  Target: SCNA; (+) strand; PAM type: NRG; PAM sequence: CAG
cagatgaagaaacagaagta

SEQ ID NO: 35098 - DNA, 20 bp, Artificial Sequence
  Description of Artificial Sequence: Synthetic oligonucleotide
  Target: SCNA; (+) strand; PAM type: NRG; PAM sequence: AAG
gaaacagaagtacagcatgt

SEQ ID NO: 35099 - DNA, 20 bp, Artificial Sequence
  Description of Artificial Sequence: Synthetic oligonucleotide
  Target: SCNA; (+) strand; PAM type: NRG; PAM sequence: AAG
gcatgtaagtgactttgcac

SEQ ID NO: 35100 - DNA, 20 bp, Artificial Sequence
  Description of Artificial Sequence: Synthetic oligonucleotide
  Target: SCNA; (+) strand; PAM type: NRG; PAM sequence: TAG
tgtaagtgactttgcacaag

SEQ ID NO: 35101 - DNA, 20 bp, Artificial Sequence
  Description of Artificial Sequence: Synthetic oligonucleotide
  Target: SCNA; (+) strand; PAM type: NRG; PAM sequence: AGG
gtaagtgactttgcacaagt

SEQ ID NO: 35102 - DNA, 20 bp, Artificial Sequence
  Description of Artificial Sequence: Synthetic oligonucleotide
  Target: SCNA; (+) strand; PAM type: NRG; PAM sequence: CAG
agtgactttgcacaagtagg

SEQ ID NO: 35103 - DNA, 20 bp, Artificial Sequence
  Description of Artificial Sequence: Synthetic oligonucleotide
  Target: SCNA; (+) strand; PAM type: NRG; PAM sequence: CAG
ctttgcacaagtaggcagca

SEQ ID NO: 35104 - DNA, 20 bp, Artificial Sequence
  Description of Artificial Sequence: Synthetic oligonucleotide
  Target: SCNA; (+) strand; PAM type: NRG; PAM sequence: AGG
tttgcacaagtaggcagcac

SEQ ID NO: 35105 - DNA, 20 bp, Artificial Sequence
  Description of Artificial Sequence: Synthetic oligonucleotide
  Target: SCNA; (+) strand; PAM type: NRG; PAM sequence: TGG
ctatgccgtattgttcttca

SEQ ID NO: 35106 - DNA, 20 bp, Artificial Sequence
  Description of Artificial Sequence: Synthetic oligonucleotide
  Target: SCNA; (+) strand; PAM type: NRG; PAM sequence: GGG
tatgccgtattgttcttcat

SEQ ID NO: 35107 - DNA, 20 bp, Artificial Sequence
  Description of Artificial Sequence: Synthetic oligonucleotide
  Target: SCNA; (+) strand; PAM type: NRG; PAM sequence: AAG
gccgtattgttcttcatggg

SEQ ID NO: 35108 - DNA, 20 bp, Artificial Sequence
  Description of Artificial Sequence: Synthetic oligonucleotide
  Target: SCNA; (+) strand; PAM type: NRG; PAM sequence: AAG
attgttcttcatgggaagaa

SEQ ID NO: 35109 - DNA, 20 bp, Artificial Sequence
  Description of Artificial Sequence: Synthetic oligonucleotide
  Target: SCNA; (+) strand; PAM type: NRG; PAM sequence: AAG
aatcaaaatattcaatattt

SEQ ID NO: 35110 - DNA, 20 bp, Artificial Sequence
  Description of Artificial Sequence: Synthetic oligonucleotide
  Target: SCNA; (+) strand; PAM type: NRG; PAM sequence: CAG
ttcaatatttaagttaaaaa

SEQ ID NO: 35111 - DNA, 20 bp, Artificial Sequence
  Description of Artificial Sequence: Synthetic oligonucleotide
  Target: SCNA; (+) strand; PAM type: NRG; PAM sequence: TGG
aagttaaaaacagcaaaatc

SEQ ID NO: 35112 - DNA, 20 bp, Artificial Sequence
  Description of Artificial Sequence: Synthetic oligonucleotide
  Target: SCNA; (+) strand; PAM type: NRG; PAM sequence: GGG
agttaaaaacagcaaaatct

SEQ ID NO: 35113 - DNA, 20 bp, Artificial Sequence
  Description of Artificial Sequence: Synthetic oligonucleotide
  Target: SCNA; (+) strand; PAM type: NRG; PAM sequence: AAG
aacagcaaaatctgggatac

SEQ ID NO: 35114 - DNA, 20 bp, Artificial Sequence
  Description of Artificial Sequence: Synthetic oligonucleotide
  Target: SCNA; (+) strand; PAM type: NRG; PAM sequence: AGG
acagcaaaatctgggataca

SEQ ID NO: 35115 - DNA, 20 bp, Artificial Sequence
  Description of Artificial Sequence: Synthetic oligonucleotide
  Target: SCNA; (+) strand; PAM type: NRG; PAM sequence: AAG
atacaaggtgtaccaacctc

SEQ ID NO: 35116 - DNA, 20 bp, Artificial Sequence
  Description of Artificial Sequence: Synthetic oligonucleotide
  Target: SCNA; (+) strand; PAM type: NRG; PAM sequence: CAG
ccaacctcaagtaaacatgc

SEQ ID NO: 35117 - DNA, 20 bp, Artificial Sequence
  Description of Artificial Sequence: Synthetic oligonucleotide
  Target: SCNA; (+) strand; PAM type: NRG; PAM sequence: AGG
caacctcaagtaaacatgcc

SEQ ID NO: 35118 - DNA, 20 bp, Artificial Sequence
  Description of Artificial Sequence: Synthetic oligonucleotide
  Target: SCNA; (+) strand; PAM type: NRG; PAM sequence: TGG
aagtaaacatgccaggtgtt

SEQ ID NO: 35119 - DNA, 20 bp, Artificial Sequence
  Description of Artificial Sequence: Synthetic oligonucleotide
  Target: SCNA; (+) strand; PAM type: NRG; PAM sequence: AAG
aacatgccaggtgtttggaa

SEQ ID NO: 35120 - DNA, 20 bp, Artificial Sequence
  Description of Artificial Sequence: Synthetic oligonucleotide
  Target: SCNA; (+) strand; PAM type: NRG; PAM sequence: TAG
atgccaggtgtttggaaaag

SEQ ID NO: 35121 - DNA, 20 bp, Artificial Sequence
  Description of Artificial Sequence: Synthetic oligonucleotide
  Target: SCNA; (+) strand; PAM type: NRG; PAM sequence: AAG
ccaggtgtttggaaaagtag

SEQ ID NO: 35122 - DNA, 20 bp, Artificial Sequence
  Description of Artificial Sequence: Synthetic oligonucleotide
  Target: SCNA; (+) strand; PAM type: NRG; PAM sequence: TAG
actacatgcaaactgtgcaa

SEQ ID NO: 35123 - DNA, 20 bp, Artificial Sequence
  Description of Artificial Sequence: Synthetic oligonucleotide
  Target: SCNA; (+) strand; PAM type: NRG; PAM sequence: TAG
aactgtgcaatagttacatg

SEQ ID NO: 35124 - DNA, 20 bp, Artificial Sequence
  Description of Artificial Sequence: Synthetic oligonucleotide
  Target: SCNA; (+) strand; PAM type: NRG; PAM sequence: AAG
gaatgcatctcaaaaaaaaa

SEQ ID NO: 35125 - DNA, 20 bp, Artificial Sequence
  Description of Artificial Sequence: Synthetic oligonucleotide
  Target: SCNA; (+) strand; PAM type: NRG; PAM sequence: AGG
aatgcatctcaaaaaaaaaa

SEQ ID NO: 35126 - DNA, 20 bp, Artificial Sequence
  Description of Artificial Sequence: Synthetic oligonucleotide
  Target: SCNA; (+) strand; PAM type: NRG; PAM sequence: TGG
ctcaaaaaaaaaaaggttcc

SEQ ID NO: 35127 - DNA, 20 bp, Artificial Sequence
  Description of Artificial Sequence: Synthetic oligonucleotide
  Target: SCNA; (+) strand; PAM type: NRG; PAM sequence: CAG
aaaaaggttcctggaaacca

SEQ ID NO: 35128 - DNA, 20 bp, Artificial Sequence
  Description of Artificial Sequence: Synthetic oligonucleotide
  Target: SCNA; (+) strand; PAM type: NRG; PAM sequence: AAG
ggaaaccacagtgctatgaa

SEQ ID NO: 35129 - DNA, 20 bp, Artificial Sequence
  Description of Artificial Sequence: Synthetic oligonucleotide
  Target: SCNA; (+) strand; PAM type: NRG; PAM sequence: TAG
gtgctatgaaaagataatca

SEQ ID NO: 35130 - DNA, 20 bp, Artificial Sequence
  Description of Artificial Sequence: Synthetic oligonucleotide
  Target: SCNA; (+) strand; PAM type: NRG; PAM sequence: AAG
aaaagataatcatagaaaac

SEQ ID NO: 35131 - DNA, 20 bp, Artificial Sequence
  Description of Artificial Sequence: Synthetic oligonucleotide
  Target: SCNA; (+) strand; PAM type: NRG; PAM sequence: AGG
aaagataatcatagaaaaca

SEQ ID NO: 35132 - DNA, 20 bp, Artificial Sequence
  Description of Artificial Sequence: Synthetic oligonucleotide
  Target: SCNA; (+) strand; PAM type: NRG; PAM sequence: AAG
gaataccacatactcatttt

SEQ ID NO: 35133 - DNA, 20 bp, Artificial Sequence
  Description of Artificial Sequence: Synthetic oligonucleotide
  Target: SCNA; (+) strand; PAM type: NRG; PAM sequence: GAG
ttttaagaaaaattttcact

SEQ ID NO: 35134 - DNA, 20 bp, Artificial Sequence
  Description of Artificial Sequence: Synthetic oligonucleotide
  Target: SCNA; (+) strand; PAM type: NRG; PAM sequence: GAG
ttaagaaaaattttcactga

SEQ ID NO: 35135 - DNA, 20 bp, Artificial Sequence
  Description of Artificial Sequence: Synthetic oligonucleotide
  Target: SCNA; (+) strand; PAM type: NRG; PAM sequence: AAG
tcactgagagaaaaaattta

SEQ ID NO: 35136 - DNA, 20 bp, Artificial Sequence
  Description of Artificial Sequence: Synthetic oligonucleotide
  Target: SCNA; (+) strand; PAM type: NRG; PAM sequence: AAG
tgagagaaaaaatttaaagc

SEQ ID NO: 35137 - DNA, 20 bp, Artificial Sequence
  Description of Artificial Sequence: Synthetic oligonucleotide
  Target: SCNA; (+) strand; PAM type: NRG; PAM sequence: TGG
aaaaatttaaagcaagttga

SEQ ID NO: 35138 - DNA, 20 bp, Artificial Sequence
  Description of Artificial Sequence: Synthetic oligonucleotide
  Target: SCNA; (+) strand; PAM type: NRG; PAM sequence: AAG
aaacatccttgaaattcttc

SEQ ID NO: 35139 - DNA, 20 bp, Artificial Sequence
  Description of Artificial Sequence: Synthetic oligonucleotide
  Target: SCNA; (+) strand; PAM type: NRG; PAM sequence: TAG
ttcttcaagtgaatacaaat

SEQ ID NO: 35140 - DNA, 20 bp, Artificial Sequence
  Description of Artificial Sequence: Synthetic oligonucleotide
  Target: SCNA; (+) strand; PAM type: NRG; PAM sequence: GAG
caagtgaatacaaattagtt

SEQ ID NO: 35141 - DNA, 20 bp, Artificial Sequence
  Description of Artificial Sequence: Synthetic oligonucleotide
  Target: SCNA; (+) strand; PAM type: NRG; PAM sequence: AAG
gaatacaaattagttgagtt

SEQ ID NO: 35142 - DNA, 20 bp, Artificial Sequence
  Description of Artificial Sequence: Synthetic oligonucleotide
  Target: SCNA; (+) strand; PAM type: NRG; PAM sequence: CAG
aattagttgagttaagcatt

SEQ ID NO: 35143 - DNA, 20 bp, Artificial Sequence
  Description of Artificial Sequence: Synthetic oligonucleotide
  Target: SCNA; (+) strand; PAM type: NRG; PAM sequence: TGG
agttaagcattcagataatt

SEQ ID NO: 35144 - DNA, 20 bp, Artificial Sequence
  Description of Artificial Sequence: Synthetic oligonucleotide
  Target: SCNA; (+) strand; PAM type: NRG; PAM sequence: GGG
gttaagcattcagataattt

SEQ ID NO: 35145 - DNA, 20 bp, Artificial Sequence
  Description of Artificial Sequence: Synthetic oligonucleotide
  Target: SCNA; (+) strand; PAM type: NRG; PAM sequence: CAG
cagataatttgggtccttct

SEQ ID NO: 35146 - DNA, 20 bp, Artificial Sequence
  Description of Artificial Sequence: Synthetic oligonucleotide
  Target: SCNA; (+) strand; PAM type: NRG; PAM sequence: AGG
agataatttgggtccttctc

SEQ ID NO: 35147 - DNA, 20 bp, Artificial Sequence
  Description of Artificial Sequence: Synthetic oligonucleotide
  Target: SCNA; (+) strand; PAM type: NRG; PAM sequence: TGG
taatttgggtccttctcagg

SEQ ID NO: 35148 - DNA, 20 bp, Artificial Sequence
  Description of Artificial Sequence: Synthetic oligonucleotide
  Target: SCNA; (+) strand; PAM type: NRG; PAM sequence: TAG
tgggtccttctcaggtggcc

SEQ ID NO: 35149 - DNA, 20 bp, Artificial Sequence
  Description of Artificial Sequence: Synthetic oligonucleotide
  Target: SCNA; (+) strand; PAM type: NRG; PAM sequence: AAG
tccttctcaggtggcctagc

SEQ ID NO: 35150 - DNA, 20 bp, Artificial Sequence
  Description of Artificial Sequence: Synthetic oligonucleotide
  Target: SCNA; (+) strand; PAM type: NRG; PAM sequence: TAG
tctcaggtggcctagcaagt

SEQ ID NO: 35151 - DNA, 20 bp, Artificial Sequence
  Description of Artificial Sequence: Synthetic oligonucleotide
  Target: SCNA; (+) strand; PAM type: NRG; PAM sequence: AAG
tggcctagcaagttagtcaa

SEQ ID NO: 35152 - DNA, 20 bp, Artificial Sequence
  Description of Artificial Sequence: Synthetic oligonucleotide
  Target: SCNA; (+) strand; PAM type: NRG; PAM sequence: AAG
tagcaagttagtcaaaagat

SEQ ID NO: 35153 - DNA, 20 bp, Artificial Sequence
  Description of Artificial Sequence: Synthetic oligonucleotide
  Target: SCNA; (+) strand; PAM type: NRG; PAM sequence: AAG
aaaagataagacctgtaatc

SEQ ID NO: 35154 - DNA, 20 bp, Artificial Sequence
  Description of Artificial Sequence: Synthetic oligonucleotide
  Target: SCNA; (+) strand; PAM type: NRG; PAM sequence: TAG
attaccgtcgttaaactgca

SEQ ID NO: 35155 - DNA, 20 bp, Artificial Sequence
  Description of Artificial Sequence: Synthetic oligonucleotide
  Target: SCNA; (+) strand; PAM type: NRG; PAM sequence: AGG
ttaccgtcgttaaactgcat

SEQ ID NO: 35156 - DNA, 20 bp, Artificial Sequence
  Description of Artificial Sequence: Synthetic oligonucleotide
  Target: SCNA; (+) strand; PAM type: NRG; PAM sequence: TAG
ccgtcgttaaactgcatagg

SEQ ID NO: 35157 - DNA, 20 bp, Artificial Sequence
  Description of Artificial Sequence: Synthetic oligonucleotide
  Target: SCNA; (+) strand; PAM type: NRG; PAM sequence: TAG
taccatcaaacaacattaaa

SEQ ID NO: 35158 - DNA, 20 bp, Artificial Sequence
  Description of Artificial Sequence: Synthetic oligonucleotide
  Target: SCNA; (+) strand; PAM type: NRG; PAM sequence: CAG
aacaacattaaatagtctat

SEQ ID NO: 35159 - DNA, 20 bp, Artificial Sequence
  Description of Artificial Sequence: Synthetic oligonucleotide
  Target: SCNA; (+) strand; PAM type: NRG; PAM sequence: TAG
ctatcagatcacactgctta

SEQ ID NO: 35160 - DNA, 20 bp, Artificial Sequence
  Description of Artificial Sequence: Synthetic oligonucleotide
  Target: SCNA; (+) strand; PAM type: NRG; PAM sequence: AAG
ctcatatgctttactatcta

SEQ ID NO: 35161 - DNA, 20 bp, Artificial Sequence
  Description of Artificial Sequence: Synthetic oligonucleotide
  Target: SCNA; (+) strand; PAM type: NRG; PAM sequence: CAG
atatgctttactatctaaag

SEQ ID NO: 35162 - DNA, 20 bp, Artificial Sequence
  Description of Artificial Sequence: Synthetic oligonucleotide
  Target: SCNA; (+) strand; PAM type: NRG; PAM sequence: AGG
tatgctttactatctaaagc

SEQ ID NO: 35163 - DNA, 20 bp, Artificial Sequence
  Description of Artificial Sequence: Synthetic oligonucleotide
  Target: SCNA; (+) strand; PAM type: NRG; PAM sequence: GGG
atgctttactatctaaagca

SEQ ID NO: 35164 - DNA, 20 bp, Artificial Sequence
  Description of Artificial Sequence: Synthetic oligonucleotide
  Target: SCNA; (+) strand; PAM type: NRG; PAM sequence: CAG
ctatctaaagcagggttgtc

SEQ ID NO: 35165 - DNA, 20 bp, Artificial Sequence
  Description of Artificial Sequence: Synthetic oligonucleotide
  Target: SCNA; (+) strand; PAM type: NRG; PAM sequence: TGG
agcagggttgtccagtcttt

SEQ ID NO: 35166 - DNA, 20 bp, Artificial Sequence
  Description of Artificial Sequence: Synthetic oligonucleotide
  Target: SCNA; (+) strand; PAM type: NRG; PAM sequence: TGG
gtccagtcttttggcttccc

SEQ ID NO: 35167 - DNA, 20 bp, Artificial Sequence
  Description of Artificial Sequence: Synthetic oligonucleotide
  Target: SCNA; (+) strand; PAM type: NRG; PAM sequence: GGG
tccagtcttttggcttccct

SEQ ID NO: 35168 - DNA, 20 bp, Artificial Sequence
  Description of Artificial Sequence: Synthetic oligonucleotide
  Target: SCNA; (+) strand; PAM type: NRG; PAM sequence: AAG
gcttccctgggccatatttg

SEQ ID NO: 35169 - DNA, 20 bp, Artificial Sequence
  Description of Artificial Sequence: Synthetic oligonucleotide
  Target: SCNA; (+) strand; PAM type: NRG; PAM sequence: AAG
tccctgggccatatttgaag

SEQ ID NO: 35170 - DNA, 20 bp, Artificial Sequence
  Description of Artificial Sequence: Synthetic oligonucleotide
  Target: SCNA; (+) strand; PAM type: NRG; PAM sequence: GAG
gaagaagaattaattgtctt

SEQ ID NO: 35171 - DNA, 20 bp, Artificial Sequence
  Description of Artificial Sequence: Synthetic oligonucleotide
  Target: SCNA; (+) strand; PAM type: NRG; PAM sequence: TAG
aaatacactaacactcatga

SEQ ID NO: 35172 - DNA, 20 bp, Artificial Sequence
  Description of Artificial Sequence: Synthetic oligonucleotide
  Target: SCNA; (+) strand; PAM type: NRG; PAM sequence: GAG
taacactcatgatagctgat

SEQ ID NO: 35173 - DNA, 20 bp, Artificial Sequence
  Description of Artificial Sequence: Synthetic oligonucleotide
  Target: SCNA; (+) strand; PAM type: NRG; PAM sequence: AAG
caaaaaattcataatgtttt

SEQ ID NO: 35174 - DNA, 20 bp, Artificial Sequence
  Description of Artificial Sequence: Synthetic oligonucleotide
  Target: SCNA; (+) strand; PAM type: NRG; PAM sequence: AGG
aaaaaattcataatgtttta

SEQ ID NO: 35175 - DNA, 20 bp, Artificial Sequence
  Description of Artificial Sequence: Synthetic oligonucleotide
  Target: SCNA; (+) strand; PAM type: NRG; PAM sequence: AAG
aaattcataatgttttaagg

SEQ ID NO: 35176 - DNA, 20 bp, Artificial Sequence
  Description of Artificial Sequence: Synthetic oligonucleotide
  Target: SCNA; (+) strand; PAM type: NRG; PAM sequence: TGG
ggaagttcacacatttgtgt

SEQ ID NO: 35177 - DNA, 20 bp, Artificial Sequence
  Description of Artificial Sequence: Synthetic oligonucleotide
  Target: SCNA; (+) strand; PAM type: NRG; PAM sequence: TGG
gatctcattcaaaaccatcc

SEQ ID NO: 35178 - DNA, 20 bp, Artificial Sequence
  Description of Artificial Sequence: Synthetic oligonucleotide
  Target: SCNA; (+) strand; PAM type: NRG; PAM sequence: GGG
atctcattcaaaaccatcct

SEQ ID NO: 35179 - DNA, 20 bp, Artificial Sequence
  Description of Artificial Sequence: Synthetic oligonucleotide
  Target: SCNA; (+) strand; PAM type: NRG; PAM sequence: TGG
aaaccatcctgggccgcttg

SEQ ID NO: 35180 - DNA, 20 bp, Artificial Sequence
  Description of Artificial Sequence: Synthetic oligonucleotide
  Target: SCNA; (+) strand; PAM type: NRG; PAM sequence: TGG
cctgggccgcttgtggccca

SEQ ID NO: 35181 - DNA, 20 bp, Artificial Sequence
  Description of Artificial Sequence: Synthetic oligonucleotide
  Target: SCNA; (+) strand; PAM type: NRG; PAM sequence: GGG
ctgggccgcttgtggcccat

SEQ ID NO: 35182 - DNA, 20 bp, Artificial Sequence
  Description of Artificial Sequence: Synthetic oligonucleotide
  Target: SCNA; (+) strand; PAM type: NRG; PAM sequence: CGG
cgcttgtggcccatgggcca

SEQ ID NO: 35183 - DNA, 20 bp, Artificial Sequence
  Description of Artificial Sequence: Synthetic oligonucleotide
  Target: SCNA; (+) strand; PAM type: NRG; PAM sequence: GGG
gcttgtggcccatgggccac

SEQ ID NO: 35184 - DNA, 20 bp, Artificial Sequence
  Description of Artificial Sequence: Synthetic oligonucleotide
  Target: SCNA; (+) strand; PAM type: NRG; PAM sequence: TAG
gtggcccatgggccacgggt

SEQ ID NO: 35185 - DNA, 20 bp, Artificial Sequence
  Description of Artificial Sequence: Synthetic oligonucleotide
  Target: SCNA; (+) strand; PAM type: NRG; PAM sequence: AAG
ggttagacaaacttgatcta

SEQ ID NO: 35186 - DNA, 20 bp, Artificial Sequence
  Description of Artificial Sequence: Synthetic oligonucleotide
  Target: SCNA; (+) strand; PAM type: NRG; PAM sequence: GAG
atccattataattattctgt

SEQ ID NO: 35187 - DNA, 20 bp, Artificial Sequence
  Description of Artificial Sequence: Synthetic oligonucleotide
  Target: SCNA; (+) strand; PAM type: NRG; PAM sequence: TAG
ttatgtaattttaaattttc

SEQ ID NO: 35188 - DNA, 20 bp, Artificial Sequence
  Description of Artificial Sequence: Synthetic oligonucleotide
  Target: SCNA; (+) strand; PAM type: NRG; PAM sequence: AAG
accacatttaacaaattaaa

SEQ ID NO: 35189 - DNA, 20 bp, Artificial Sequence
  Description of Artificial Sequence: Synthetic oligonucleotide
  Target: SCNA; (+) strand; PAM type: NRG; PAM sequence: CGG
tttaacaaattaaaaagaac

SEQ ID NO: 35190 - DNA, 20 bp, Artificial Sequence
  Description of Artificial Sequence: Synthetic oligonucleotide
  Target: SCNA; (+) strand; PAM type: NRG; PAM sequence: GGG
ttaacaaattaaaaagaacc

SEQ ID NO: 35191 - DNA, 20 bp, Artificial Sequence
  Description of Artificial Sequence: Synthetic oligonucleotide
  Target: SCNA; (+) strand; PAM type: NRG; PAM sequence: TAG
acaacttattcaaaatgtta

SEQ ID NO: 35192 - DNA, 20 bp, Artificial Sequence
  Description of Artificial Sequence: Synthetic oligonucleotide
  Target: SCNA; (+) strand; PAM type: NRG; PAM sequence: GAG
taatctataaaaaaattact

SEQ ID NO: 35193 - DNA, 20 bp, Artificial Sequence
  Description of Artificial Sequence: Synthetic oligonucleotide
  Target: SCNA; (+) strand; PAM type: NRG; PAM sequence: TGG
aaaattactgagaaatttta

SEQ ID NO: 35194 - DNA, 20 bp, Artificial Sequence
  Description of Artificial Sequence: Synthetic oligonucleotide
  Target: SCNA; (+) strand; PAM type: NRG; PAM sequence: GGG
aaattactgagaaattttat

SEQ ID NO: 35195 - DNA, 20 bp, Artificial Sequence
  Description of Artificial Sequence: Synthetic oligonucleotide
  Target: SCNA; (+) strand; PAM type: NRG; PAM sequence: CAG
tttacccctatatctcaact

SEQ ID NO: 35196 - DNA, 20 bp, Artificial Sequence
  Description of Artificial Sequence: Synthetic oligonucleotide
  Target: SCNA; (+) strand; PAM type: NRG; PAM sequence: AGG
ttacccctatatctcaactc

SEQ ID NO: 35197 - DNA, 20 bp, Artificial Sequence
  Description of Artificial Sequence: Synthetic oligonucleotide
  Target: SCNA; (+) strand; PAM type: NRG; PAM sequence: TAG
ccctatatctcaactcaggc

SEQ ID NO: 35198 - DNA, 20 bp, Artificial Sequence
  Description of Artificial Sequence: Synthetic oligonucleotide
  Target: SCNA; (+) strand; PAM type: NRG; PAM sequence: TAG
gctacttttgaaatgcttga

SEQ ID NO: 35199 - DNA, 20 bp, Artificial Sequence
  Description of Artificial Sequence: Synthetic oligonucleotide
  Target: SCNA; (+) strand; PAM type: NRG; PAM sequence: TAG
gcttgatagcaacatgtgtc

SEQ ID NO: 35200 - DNA, 20 bp, Artificial Sequence
  Description of Artificial Sequence: Synthetic oligonucleotide
  Target: SCNA; (+) strand; PAM type: NRG; PAM sequence: TGG
caacatgtgtctagtcacta

SEQ ID NO: 35201 - DNA, 20 bp, Artificial Sequence
  Description of Artificial Sequence: Synthetic oligonucleotide
  Target: SCNA; (+) strand; PAM type: NRG; PAM sequence: CAG
ctagtcactatggtattgta

SEQ ID NO: 35202 - DNA, 20 bp, Artificial Sequence
  Description of Artificial Sequence: Synthetic oligonucleotide
  Target: SCNA; (+) strand; PAM type: NRG; PAM sequence: GAG
agtcactatggtattgtaca

SEQ ID NO: 35203 - DNA, 20 bp, Artificial Sequence
  Description of Artificial Sequence: Synthetic oligonucleotide
  Target: SCNA; (+) strand; PAM type: NRG; PAM sequence: TAG
cactatggtattgtacagag

SEQ ID NO: 35204 - DNA, 20 bp, Artificial Sequence
  Description of Artificial Sequence: Synthetic oligonucleotide
  Target: SCNA; (+) strand; PAM type: NRG; PAM sequence: AGG
actatggtattgtacagagt

SEQ ID NO: 35205 - DNA, 20 bp, Artificial Sequence
  Description of Artificial Sequence: Synthetic oligonucleotide
  Target: SCNA; (+) strand; PAM type: NRG; PAM sequence: TAG
ggtattgtacagagtaggtg

SEQ ID NO: 35206 - DNA, 20 bp, Artificial Sequence
  Description of Artificial Sequence: Synthetic oligonucleotide
  Target: SCNA; (+) strand; PAM type: NRG; PAM sequence: GAG
tattgtacagagtaggtgta

SEQ ID NO: 35207 - DNA, 20 bp, Artificial Sequence
  Description of Artificial Sequence: Synthetic oligonucleotide
  Target: SCNA; (+) strand; PAM type: NRG; PAM sequence: CAG
agagtaggtgtagagatcaa

SEQ ID NO: 35208 - DNA, 20 bp, Artificial Sequence
  Description of Artificial Sequence: Synthetic oligonucleotide
  Target: SCNA; (+) strand; PAM type: NRG; PAM sequence: AGG
gagtaggtgtagagatcaac

SEQ ID NO: 35209 - DNA, 20 bp, Artificial Sequence
  Description of Artificial Sequence: Synthetic oligonucleotide
  Target: SCNA; (+) strand; PAM type: NRG; PAM sequence: GAG
atcaacaggaaacatttatt

SEQ ID NO: 35210 - DNA, 20 bp, Artificial Sequence
  Description of Artificial Sequence: Synthetic oligonucleotide
  Target: SCNA; (+) strand; PAM type: NRG; PAM sequence: AAG
catttattgagtacctatat

SEQ ID NO: 35211 - DNA, 20 bp, Artificial Sequence
  Description of Artificial Sequence: Synthetic oligonucleotide
  Target: SCNA; (+) strand; PAM type: NRG; PAM sequence: TAG
acctatataagaaattatac

SEQ ID NO: 35212 - DNA, 20 bp, Artificial Sequence
  Description of Artificial Sequence: Synthetic oligonucleotide
  Target: SCNA; (+) strand; PAM type: NRG; PAM sequence: CAG
taagaaattatactagatac

SEQ ID NO: 35213 - DNA, 20 bp, Artificial Sequence
  Description of Artificial Sequence: Synthetic oligonucleotide
  Target: SCNA; (+) strand; PAM type: NRG; PAM sequence: AGG
aagaaattatactagatacc

SEQ ID NO: 35214 - DNA, 20 bp, Artificial Sequence
  Description of Artificial Sequence: Synthetic oligonucleotide
  Target: SCNA; (+) strand; PAM type: NRG; PAM sequence: GGG
agaaattatactagatacca

SEQ ID NO: 35215 - DNA, 20 bp, Artificial Sequence
  Description of Artificial Sequence: Synthetic oligonucleotide
  Target: SCNA; (+) strand; PAM type: NRG; PAM sequence: AAG
tagataccagggaaaccaaa

SEQ ID NO: 35216 - DNA, 20 bp, Artificial Sequence
  Description of Artificial Sequence: Synthetic oligonucleotide
  Target: SCNA; (+) strand; PAM type: NRG; PAM sequence: AAG
agggaaaccaaaaagaaaaa

SEQ ID NO: 35217 - DNA, 20 bp, Artificial Sequence
  Description of Artificial Sequence: Synthetic oligonucleotide
  Target: SCNA; (+) strand; PAM type: NRG; PAM sequence: AAG
aaagaaaaaaagtcatctgt

SEQ ID NO: 35218 - DNA, 20 bp, Artificial Sequence
  Description of Artificial Sequence: Synthetic oligonucleotide
  Target: SCNA; (+) strand; PAM type: NRG; PAM sequence: AAG
gaaaaaaagtcatctgtaag

SEQ ID NO: 35219 - DNA, 20 bp, Artificial Sequence
  Description of Artificial Sequence: Synthetic oligonucleotide
  Target: SCNA; (+) strand; PAM type: NRG; PAM sequence: TAG
aaagtcatctgtaagaagtt

SEQ ID NO: 35220 - DNA, 20 bp, Artificial Sequence
  Description of Artificial Sequence: Synthetic oligonucleotide
  Target: SCNA; (+) strand; PAM type: NRG; PAM sequence: CAG
gtcatctgtaagaagtttag

SEQ ID NO: 35221 - DNA, 20 bp, Artificial Sequence
  Description of Artificial Sequence: Synthetic oligonucleotide
  Target: SCNA; (+) strand; PAM type: NRG; PAM sequence: AGG
tcatctgtaagaagtttagc

SEQ ID NO: 35222 - DNA, 20 bp, Artificial Sequence
  Description of Artificial Sequence: Synthetic oligonucleotide
  Target: SCNA; (+) strand; PAM type: NRG; PAM sequence: GAG
atctgtaagaagtttagcag

SEQ ID NO: 35223 - DNA, 20 bp, Artificial Sequence
  Description of Artificial Sequence: Synthetic oligonucleotide
  Target: SCNA; (+) strand; PAM type: NRG; PAM sequence: CAG
gaagtttagcaggagcaaca

SEQ ID NO: 35224 - DNA, 20 bp, Artificial Sequence
  Description of Artificial Sequence: Synthetic oligonucleotide
  Target: SCNA; (+) strand; PAM type: NRG; PAM sequence: CAG
agcaggagcaacacagtgaa

SEQ ID NO: 35225 - DNA, 20 bp, Artificial Sequence
  Description of Artificial Sequence: Synthetic oligonucleotide
  Target: SCNA; (+) strand; PAM type: NRG; PAM sequence: CAG
gcaacacagtgaacagattc

SEQ ID NO: 35226 - DNA, 20 bp, Artificial Sequence
  Description of Artificial Sequence: Synthetic oligonucleotide
  Target: SCNA; (+) strand; PAM type: NRG; PAM sequence: CAG
acacagtgaacagattccag

SEQ ID NO: 35227 - DNA, 20 bp, Artificial Sequence
  Description of Artificial Sequence: Synthetic oligonucleotide
  Target: SCNA; (+) strand; PAM type: NRG; PAM sequence: GAG
acagtgaacagattccagca

SEQ ID NO: 35228 - DNA, 20 bp, Artificial Sequence
  Description of Artificial Sequence: Synthetic oligonucleotide
  Target: SCNA; (+) strand; PAM type: NRG; PAM sequence: TGG
acagattccagcagagatta

SEQ ID NO: 35229 - DNA, 20 bp, Artificial Sequence
  Description of Artificial Sequence: Synthetic oligonucleotide
  Target: SCNA; (+) strand; PAM type: NRG; PAM sequence: CAG
gattccagcagagattatgg

SEQ ID NO: 35230 - DNA, 20 bp, Artificial Sequence
  Description of Artificial Sequence: Synthetic oligonucleotide
  Target: SCNA; (+) strand; PAM type: NRG; PAM sequence: GAG
ttccagcagagattatggca

SEQ ID NO: 35231 - DNA, 20 bp, Artificial Sequence
  Description of Artificial Sequence: Synthetic oligonucleotide
  Target: SCNA; (+) strand; PAM type: NRG; PAM sequence: TGG
ggcagagattactgtgatct

SEQ ID NO: 35232 - DNA, 20 bp, Artificial Sequence
  Description of Artificial Sequence: Synthetic oligonucleotide
  Target: SCNA; (+) strand; PAM type: NRG; PAM sequence: GGG
gcagagattactgtgatctt

SEQ ID NO: 35233 - DNA, 20 bp, Artificial Sequence
  Description of Artificial Sequence: Synthetic oligonucleotide
  Target: SCNA; (+) strand; PAM type: NRG; PAM sequence: AAG
attactgtgatcttgggcaa

SEQ ID NO: 35234 - DNA, 20 bp, Artificial Sequence
  Description of Artificial Sequence: Synthetic oligonucleotide
  Target: SCNA; (+) strand; PAM type: NRG; PAM sequence: TAG
ttgggcaaaagtgtgtatct

SEQ ID NO: 35235 - DNA, 20 bp, Artificial Sequence
  Description of Artificial Sequence: Synthetic oligonucleotide
  Target: SCNA; (+) strand; PAM type: NRG; PAM sequence: AGG
tgggcaaaagtgtgtatctt

SEQ ID NO: 35236 - DNA, 20 bp, Artificial Sequence
  Description of Artificial Sequence: Synthetic oligonucleotide
  Target: SCNA; (+) strand; PAM type: NRG; PAM sequence: AAG
agtgtgtatcttaggaattt

SEQ ID NO: 35237 - DNA, 20 bp, Artificial Sequence
  Description of Artificial Sequence: Synthetic oligonucleotide
  Target: SCNA; (+) strand; PAM type: NRG; PAM sequence: AAG
atcttaggaatttaagattt

SEQ ID NO: 35238 - DNA, 20 bp, Artificial Sequence
  Description of Artificial Sequence: Synthetic oligonucleotide
  Target: SCNA; (+) strand; PAM type: NRG; PAM sequence: AAG
taggaatttaagatttaaga

SEQ ID NO: 35239 - DNA, 20 bp, Artificial Sequence
  Description of Artificial Sequence: Synthetic oligonucleotide
  Target: SCNA; (+) strand; PAM type: NRG; PAM sequence: TAG
taagatttaagaaagaattt

SEQ ID NO: 35240 - DNA, 20 bp, Artificial Sequence
  Description of Artificial Sequence: Synthetic oligonucleotide
  Target: SCNA; (+) strand; PAM type: NRG; PAM sequence: AGG
aagatttaagaaagaatttt

SEQ ID NO: 35241 - DNA, 20 bp, Artificial Sequence
  Description of Artificial Sequence: Synthetic oligonucleotide
  Target: SCNA; (+) strand; PAM type: NRG; PAM sequence: AAG
ctatatgacaaacatacata

SEQ ID NO: 35242 - DNA, 20 bp, Artificial Sequence
  Description of Artificial Sequence: Synthetic oligonucleotide
  Target: SCNA; (+) strand; PAM type: NRG; PAM sequence: AGG
tatatgacaaacatacataa

SEQ ID NO: 35243 - DNA, 20 bp, Artificial Sequence
  Description of Artificial Sequence: Synthetic oligonucleotide
  Target: SCNA; (+) strand; PAM type: NRG; PAM sequence: CAG
atgacaaacatacataaagg

SEQ ID NO: 35244 - DNA, 20 bp, Artificial Sequence
  Description of Artificial Sequence: Synthetic oligonucleotide
  Target: SCNA; (+) strand; PAM type: NRG; PAM sequence: AGG
tgacaaacatacataaaggc

SEQ ID NO: 35245 - DNA, 20 bp, Artificial Sequence
  Description of Artificial Sequence: Synthetic oligonucleotide
  Target: SCNA; (+) strand; PAM type: NRG; PAM sequence: GAG
acaaacatacataaaggcag

SEQ ID NO: 35246 - DNA, 20 bp, Artificial Sequence
  Description of Artificial Sequence: Synthetic oligonucleotide
  Target: SCNA; (+) strand; PAM type: NRG; PAM sequence: AAG
aacatacataaaggcaggag

SEQ ID NO: 35247 - DNA, 20 bp, Artificial Sequence
  Description of Artificial Sequence: Synthetic oligonucleotide
  Target: SCNA; (+) strand; PAM type: NRG; PAM sequence: TGG
aggagaagcctgctatgctc

SEQ ID NO: 35248 - DNA, 20 bp, Artificial Sequence
  Description of Artificial Sequence: Synthetic oligonucleotide
  Target: SCNA; (+) strand; PAM type: NRG; PAM sequence: TGG
ctgctatgctctggtgacaa

SEQ ID NO: 35249 - DNA, 20 bp, Artificial Sequence
  Description of Artificial Sequence: Synthetic oligonucleotide
  Target: SCNA; (+) strand; PAM type: NRG; PAM sequence: CAG
tctggtgacaatggatcaac

SEQ ID NO: 35250 - DNA, 20 bp, Artificial Sequence
  Description of Artificial Sequence: Synthetic oligonucleotide
  Target: SCNA; (+) strand; PAM type: NRG; PAM sequence: TAG
gacaatggatcaaccagtat

SEQ ID NO: 35251 - DNA, 20 bp, Artificial Sequence
  Description of Artificial Sequence: Synthetic oligonucleotide
  Target: SCNA; (+) strand; PAM type: NRG; PAM sequence: GAG
caatggatcaaccagtatta

SEQ ID NO: 35252 - DNA, 20 bp, Artificial Sequence
  Description of Artificial Sequence: Synthetic oligonucleotide
  Target: SCNA; (+) strand; PAM type: NRG; PAM sequence: TAG
gtattagagaattcacatga

SEQ ID NO: 35253 - DNA, 20 bp, Artificial Sequence
  Description of Artificial Sequence: Synthetic oligonucleotide
  Target: SCNA; (+) strand; PAM type: NRG; PAM sequence: TGG
atgatagatactgaatttcc

SEQ ID NO: 35254 - DNA, 20 bp, Artificial Sequence
  Description of Artificial Sequence: Synthetic oligonucleotide
  Target: SCNA; (+) strand; PAM type: NRG; PAM sequence: CAG
tactgaatttcctggatgct

SEQ ID NO: 35255 - DNA, 20 bp, Artificial Sequence
  Description of Artificial Sequence: Synthetic oligonucleotide
  Target: SCNA; (+) strand; PAM type: NRG; PAM sequence: TGG
tgaatttcctggatgctcag

SEQ ID NO: 35256 - DNA, 20 bp, Artificial Sequence
  Description of Artificial Sequence: Synthetic oligonucleotide
  Target: SCNA; (+) strand; PAM type: NRG; PAM sequence: TAG
tttcctggatgctcagtggt

SEQ ID NO: 35257 - DNA, 20 bp, Artificial Sequence
  Description of Artificial Sequence: Synthetic oligonucleotide
  Target: SCNA; (+) strand; PAM type: NRG; PAM sequence: AAG
tggatgctcagtggttagct

SEQ ID NO: 35258 - DNA, 20 bp, Artificial Sequence
  Description of Artificial Sequence: Synthetic oligonucleotide
  Target: SCNA; (+) strand; PAM type: NRG; PAM sequence: AAG
tcagtggttagctaagtctt

SEQ ID NO: 35259 - DNA, 20 bp, Artificial Sequence
  Description of Artificial Sequence: Synthetic oligonucleotide
  Target: SCNA; (+) strand; PAM type: NRG; PAM sequence: AAG
tatgaatgaacaaatgacac

SEQ ID NO: 35260 - DNA, 20 bp, Artificial Sequence
  Description of Artificial Sequence: Synthetic oligonucleotide
  Target: SCNA; (+) strand; PAM type: NRG; PAM sequence: TAG
aatgacacaagatacaacat

SEQ ID NO: 35261 - DNA, 20 bp, Artificial Sequence
  Description of Artificial Sequence: Synthetic oligonucleotide
  Target: SCNA; (+) strand; PAM type: NRG; PAM sequence: GAG
acaagatacaacattagaac

SEQ ID NO: 35262 - DNA, 20 bp, Artificial Sequence
  Description of Artificial Sequence: Synthetic oligonucleotide
  Target: SCNA; (+) strand; PAM type: NRG; PAM sequence: AGG
caagatacaacattagaacg

SEQ ID NO: 35263 - DNA, 20 bp, Artificial Sequence
  Description of Artificial Sequence: Synthetic oligonucleotide
  Target: SCNA; (+) strand; PAM type: NRG; PAM sequence: TGG
atacaacattagaacgagga

SEQ ID NO: 35264 - DNA, 20 bp, Artificial Sequence
  Description of Artificial Sequence: Synthetic oligonucleotide
  Target: SCNA; (+) strand; PAM type: NRG; PAM sequence: GAG
acaacattagaacgaggatg

SEQ ID NO: 35265 - DNA, 20 bp, Artificial Sequence
  Description of Artificial Sequence: Synthetic oligonucleotide
  Target: SCNA; (+) strand; PAM type: NRG; PAM sequence: CAG
atataaaatctttaaaatat

SEQ ID NO: 35266 - DNA, 20 bp, Artificial Sequence
  Description of Artificial Sequence: Synthetic oligonucleotide
  Target: SCNA; (+) strand; PAM type: NRG; PAM sequence: CAG
atcagtcaaacgacaaattc

SEQ ID NO: 35267 - DNA, 20 bp, Artificial Sequence
  Description of Artificial Sequence: Synthetic oligonucleotide
  Target: SCNA; (+) strand; PAM type: NRG; PAM sequence: AAG
attccagcttcttatgaatg

SEQ ID NO: 35268 - DNA, 20 bp, Artificial Sequence
  Description of Artificial Sequence: Synthetic oligonucleotide
  Target: SCNA; (+) strand; PAM type: NRG; PAM sequence: GAG
tccagcttcttatgaatgaa

SEQ ID NO: 35269 - DNA, 20 bp, Artificial Sequence
  Description of Artificial Sequence: Synthetic oligonucleotide
  Target: SCNA; (+) strand; PAM type: NRG; PAM sequence: CAG
gcttcttatgaatgaagagc

SEQ ID NO: 35270 - DNA, 20 bp, Artificial Sequence
  Description of Artificial Sequence: Synthetic oligonucleotide
  Target: SCNA; (+) strand; PAM type: NRG; PAM sequence: AAG
tgaatgaaaaatgacgtgtg

SEQ ID NO: 35271 - DNA, 20 bp, Artificial Sequence
  Description of Artificial Sequence: Synthetic oligonucleotide
  Target: SCNA; (+) strand; PAM type: NRG; PAM sequence: TGG
gacgtgtgaagtgatatatg

SEQ ID NO: 35272 - DNA, 20 bp, Artificial Sequence
  Description of Artificial Sequence: Synthetic oligonucleotide
  Target: SCNA; (+) strand; PAM type: NRG; PAM sequence: CAG
gtgtgaagtgatatatgtgg

SEQ ID NO: 35273 - DNA, 20 bp, Artificial Sequence
  Description of Artificial Sequence: Synthetic oligonucleotide
  Target: SCNA; (+) strand; PAM type: NRG; PAM sequence: AAG
agtgatatatgtggcagtta

SEQ ID NO: 35274 - DNA, 20 bp, Artificial Sequence
  Description of Artificial Sequence: Synthetic oligonucleotide
  Target: SCNA; (+) strand; PAM type: NRG; PAM sequence: CAG
atgtggcagttaaagttaac

SEQ ID NO: 35275 - DNA, 20 bp, Artificial Sequence
  Description of Artificial Sequence: Synthetic oligonucleotide
  Target: SCNA; (+) strand; PAM type: NRG; PAM sequence: AGG
tgtggcagttaaagttaacc

SEQ ID NO: 35276 - DNA, 20 bp, Artificial Sequence
  Description of Artificial Sequence: Synthetic oligonucleotide
  Target: SCNA; (+) strand; PAM type: NRG; PAM sequence: GAG
tggcagttaaagttaaccag

SEQ ID NO: 35277 - DNA, 20 bp, Artificial Sequence
  Description of Artificial Sequence: Synthetic oligonucleotide
  Target: SCNA; (+) strand; PAM type: NRG; PAM sequence: GAG
gcagttaaagttaaccagga

SEQ ID NO: 35278 - DNA, 20 bp, Artificial Sequence
  Description of Artificial Sequence: Synthetic oligonucleotide
  Target: SCNA; (+) strand; PAM type: NRG; PAM sequence: AAG
ttaaagttaaccaggagaga

SEQ ID NO: 35279 - DNA, 20 bp, Artificial Sequence
  Description of Artificial Sequence: Synthetic oligonucleotide
  Target: SCNA; (+) strand; PAM type: NRG; PAM sequence: CAG
aaagctaaactaccgctgca

SEQ ID NO: 35280 - DNA, 20 bp, Artificial Sequence
  Description of Artificial Sequence: Synthetic oligonucleotide
  Target: SCNA; (+) strand; PAM type: NRG; PAM sequence: AGG
aagctaaactaccgctgcac

SEQ ID NO: 35281 - DNA, 20 bp, Artificial Sequence
  Description of Artificial Sequence: Synthetic oligonucleotide
  Target: SCNA; (+) strand; PAM type: NRG; PAM sequence: CAG
aaactaccgctgcacaggct

SEQ ID NO: 35282 - DNA, 20 bp, Artificial Sequence
  Description of Artificial Sequence: Synthetic oligonucleotide
  Target: SCNA; (+) strand; PAM type: NRG; PAM sequence: TAG
cagcatctattgcactaatc

SEQ ID NO: 35283 - DNA, 20 bp, Artificial Sequence
  Description of Artificial Sequence: Synthetic oligonucleotide
  Target: SCNA; (+) strand; PAM type: NRG; PAM sequence: AGG
agcatctattgcactaatct

SEQ ID NO: 35284 - DNA, 20 bp, Artificial Sequence
  Description of Artificial Sequence: Synthetic oligonucleotide
  Target: SCNA; (+) strand; PAM type: NRG; PAM sequence: GAG
tattgcactaatctaggcat

SEQ ID NO: 35285 - DNA, 20 bp, Artificial Sequence
  Description of Artificial Sequence: Synthetic oligonucleotide
  Target: SCNA; (+) strand; PAM type: NRG; PAM sequence: TGG
tcctatccaaaccttcataa

SEQ ID NO: 35286 - DNA, 20 bp, Artificial Sequence
  Description of Artificial Sequence: Synthetic oligonucleotide
  Target: SCNA; (+) strand; PAM type: NRG; PAM sequence: AAG
tatccaaaccttcataatgg

SEQ ID NO: 35287 - DNA, 20 bp, Artificial Sequence
  Description of Artificial Sequence: Synthetic oligonucleotide
  Target: SCNA; (+) strand; PAM type: NRG; PAM sequence: GAG
tccaaaccttcataatggaa

SEQ ID NO: 35288 - DNA, 20 bp, Artificial Sequence
  Description of Artificial Sequence: Synthetic oligonucleotide
  Target: SCNA; (+) strand; PAM type: NRG; PAM sequence: TGG
aaccttcataatggaagaga

SEQ ID NO: 35289 - DNA, 20 bp, Artificial Sequence
  Description of Artificial Sequence: Synthetic oligonucleotide
  Target: SCNA; (+) strand; PAM type: NRG; PAM sequence: GGG
accttcataatggaagagat

SEQ ID NO: 35290 - DNA, 20 bp, Artificial Sequence
  Description of Artificial Sequence: Synthetic oligonucleotide
  Target: SCNA; (+) strand; PAM type: NRG; PAM sequence: GGG
ccttcataatggaagagatg

SEQ ID NO: 35291 - DNA, 20 bp, Artificial Sequence
  Description of Artificial Sequence: Synthetic oligonucleotide
  Target: SCNA; (+) strand; PAM type: NRG; PAM sequence: GGG
cttcataatggaagagatgg

SEQ ID NO: 35292 - DNA, 20 bp, Artificial Sequence
  Description of Artificial Sequence: Synthetic oligonucleotide
  Target: SCNA; (+) strand; PAM type: NRG; PAM sequence: GAG
tcataatggaagagatgggg

SEQ ID NO: 35293 - DNA, 20 bp, Artificial Sequence
  Description of Artificial Sequence: Synthetic oligonucleotide
  Target: SCNA; (+) strand; PAM type: NRG; PAM sequence: GAG
ataatggaagagatggggga

SEQ ID NO: 35294 - DNA, 20 bp, Artificial Sequence
  Description of Artificial Sequence: Synthetic oligonucleotide
  Target: SCNA; (+) strand; PAM type: NRG; PAM sequence: AAG
agagatgggggagagaatga

SEQ ID NO: 35295 - DNA, 20 bp, Artificial Sequence
  Description of Artificial Sequence: Synthetic oligonucleotide
  Target: SCNA; (+) strand; PAM type: NRG; PAM sequence: GAG
agatgggggagagaatgaaa

SEQ ID NO: 35296 - DNA, 20 bp, Artificial Sequence
  Description of Artificial Sequence: Synthetic oligonucleotide
  Target: SCNA; (+) strand; PAM type: NRG; PAM sequence: GAG
atgggggagagaatgaaaga

SEQ ID NO: 35297 - DNA, 20 bp, Artificial Sequence
  Description of Artificial Sequence: Synthetic oligonucleotide
  Target: SCNA; (+) strand; PAM type: NRG; PAM sequence: TGG
ggagagaatgaaagagagat

SEQ ID NO: 35298 - DNA, 20 bp, Artificial Sequence
  Description of Artificial Sequence: Synthetic oligonucleotide
  Target: SCNA; (+) strand; PAM type: NRG; PAM sequence: AAG
aaagagagattggaaaaaac

SEQ ID NO: 35299 - DNA, 20 bp, Artificial Sequence
  Description of Artificial Sequence: Synthetic oligonucleotide
  Target: SCNA; (+) strand; PAM type: NRG; PAM sequence: AGG
aagagagattggaaaaaaca

SEQ ID NO: 35300 - DNA, 20 bp, Artificial Sequence
  Description of Artificial Sequence: Synthetic oligonucleotide
  Target: SCNA; (+) strand; PAM type: NRG; PAM sequence: TGG
aggatcctaaaatcatctta

SEQ ID NO: 35301 - DNA, 20 bp, Artificial Sequence
  Description of Artificial Sequence: Synthetic oligonucleotide
  Target: SCNA; (+) strand; PAM type: NRG; PAM sequence: GAG
atcatcttatggctaaattt

SEQ ID NO: 35302 - DNA, 20 bp, Artificial Sequence
  Description of Artificial Sequence: Synthetic oligonucleotide
  Target: SCNA; (+) strand; PAM type: NRG; PAM sequence: GAG
catcttatggctaaatttga

SEQ ID NO: 35303 - DNA, 20 bp, Artificial Sequence
  Description of Artificial Sequence: Synthetic oligonucleotide
  Target: SCNA; (+) strand; PAM type: NRG; PAM sequence: AGG
atcttatggctaaatttgag

SEQ ID NO: 35304 - DNA, 20 bp, Artificial Sequence
  Description of Artificial Sequence: Synthetic oligonucleotide
  Target: SCNA; (+) strand; PAM type: NRG; PAM sequence: GGG
tcttatggctaaatttgaga

SEQ ID NO: 35305 - DNA, 20 bp, Artificial Sequence
  Description of Artificial Sequence: Synthetic oligonucleotide
  Target: SCNA; (+) strand; PAM type: NRG; PAM sequence: GAG
ttatggctaaatttgagagg

SEQ ID NO: 35306 - DNA, 20 bp, Artificial Sequence
  Description of Artificial Sequence: Synthetic oligonucleotide
  Target: SCNA; (+) strand; PAM type: NRG; PAM sequence: AGG
tatggctaaatttgagaggg

SEQ ID NO: 35307 - DNA, 20 bp, Artificial Sequence
  Description of Artificial Sequence: Synthetic oligonucleotide
  Target: SCNA; (+) strand; PAM type: NRG; PAM sequence: GGG
atggctaaatttgagaggga

SEQ ID NO: 35308 - DNA, 20 bp, Artificial Sequence
  Description of Artificial Sequence: Synthetic oligonucleotide
  Target: SCNA; (+) strand; PAM type: NRG; PAM sequence: TGG
atttgagagggagggaacta

SEQ ID NO: 35309 - DNA, 20 bp, Artificial Sequence
  Description of Artificial Sequence: Synthetic oligonucleotide
  Target: SCNA; (+) strand; PAM type: NRG; PAM sequence: GAG
ttgagagggagggaactatg

SEQ ID NO: 35310 - DNA, 20 bp, Artificial Sequence
  Description of Artificial Sequence: Synthetic oligonucleotide
  Target: SCNA; (+) strand; PAM type: NRG; PAM sequence: AGG
tgagagggagggaactatgg

SEQ ID NO: 35311 - DNA, 20 bp, Artificial Sequence
  Description of Artificial Sequence: Synthetic oligonucleotide
  Target: SCNA; (+) strand; PAM type: NRG; PAM sequence: CAG
ggagggaactatggaggcat

SEQ ID NO: 35312 - DNA, 20 bp, Artificial Sequence
  Description of Artificial Sequence: Synthetic oligonucleotide
  Target: SCNA; (+) strand; PAM type: NRG; PAM sequence: TGG
ggaggcatcagtgatttata

SEQ ID NO: 35313 - DNA, 20 bp, Artificial Sequence
  Description of Artificial Sequence: Synthetic oligonucleotide
  Target: SCNA; (+) strand; PAM type: NRG; PAM sequence: TAG
gatttatatggtttatattg

SEQ ID NO: 35314 - DNA, 20 bp, Artificial Sequence
  Description of Artificial Sequence: Synthetic oligonucleotide
  Target: SCNA; (+) strand; PAM type: NRG; PAM sequence: AGG
atttatatggtttatattgt

SEQ ID NO: 35315 - DNA, 20 bp, Artificial Sequence
  Description of Artificial Sequence: Synthetic oligonucleotide
  Target: SCNA; (+) strand; PAM type: NRG; PAM sequence: TGG
atggtttatattgtaggtca

SEQ ID NO: 35316 - DNA, 20 bp, Artificial Sequence
  Description of Artificial Sequence: Synthetic oligonucleotide
  Target: SCNA; (+) strand; PAM type: NRG; PAM sequence: GGG
tggtttatattgtaggtcat

SEQ ID NO: 35317 - DNA, 20 bp, Artificial Sequence
  Description of Artificial Sequence: Synthetic oligonucleotide
  Target: SCNA; (+) strand; PAM type: NRG; PAM sequence: AAG
tttatattgtaggtcatggg

SEQ ID NO: 35318 - DNA, 20 bp, Artificial Sequence
  Description of Artificial Sequence: Synthetic oligonucleotide
  Target: SCNA; (+) strand; PAM type: NRG; PAM sequence: AAG
tgtaggtcatgggaagtcat

SEQ ID NO: 35319 - DNA, 20 bp, Artificial Sequence
  Description of Artificial Sequence: Synthetic oligonucleotide
  Target: SCNA; (+) strand; PAM type: NRG; PAM sequence: TGG
ggaagtcataagaaaaattc

SEQ ID NO: 35320 - DNA, 20 bp, Artificial Sequence
  Description of Artificial Sequence: Synthetic oligonucleotide
  Target: SCNA; (+) strand; PAM type: NRG; PAM sequence: TGG
aagaaaaattctggtgccaa

SEQ ID NO: 35321 - DNA, 20 bp, Artificial Sequence
  Description of Artificial Sequence: Synthetic oligonucleotide
  Target: SCNA; (+) strand; PAM type: NRG; PAM sequence: AAG
caatggtgataactgatatg

SEQ ID NO: 35322 - DNA, 20 bp, Artificial Sequence
  Description of Artificial Sequence: Synthetic oligonucleotide
  Target: SCNA; (+) strand; PAM type: NRG; PAM sequence: AGG
aatggtgataactgatatga

SEQ ID NO: 35323 - DNA, 20 bp, Artificial Sequence
  Description of Artificial Sequence: Synthetic oligonucleotide
  Target: SCNA; (+) strand; PAM type: NRG; PAM sequence: GGG
atggtgataactgatatgaa

SEQ ID NO: 35324 - DNA, 20 bp, Artificial Sequence
  Description of Artificial Sequence: Synthetic oligonucleotide
  Target: SCNA; (+) strand; PAM type: NRG; PAM sequence: AAG
atgaagggactccttgcttg

SEQ ID NO: 35325 - DNA, 20 bp, Artificial Sequence
  Description of Artificial Sequence: Synthetic oligonucleotide
  Target: SCNA; (+) strand; PAM type: NRG; PAM sequence: AGG
tgaagggactccttgcttga

SEQ ID NO: 35326 - DNA, 20 bp, Artificial Sequence
  Description of Artificial Sequence: Synthetic oligonucleotide
  Target: SCNA; (+) strand; PAM type: NRG; PAM sequence: AAG
ccttgcttgaaggaaaaatt

SEQ ID NO: 35327 - DNA, 20 bp, Artificial Sequence
  Description of Artificial Sequence: Synthetic oligonucleotide
  Target: SCNA; (+) strand; PAM type: NRG; PAM sequence: GAG
aggaaaaattaagttaaact

SEQ ID NO: 35328 - DNA, 20 bp, Artificial Sequence
  Description of Artificial Sequence: Synthetic oligonucleotide
  Target: SCNA; (+) strand; PAM type: NRG; PAM sequence: AAG
actgagacctgttgaaatca

SEQ ID NO: 35329 - DNA, 20 bp, Artificial Sequence
  Description of Artificial Sequence: Synthetic oligonucleotide
  Target: SCNA; (+) strand; PAM type: NRG; PAM sequence: TAG
gagacctgttgaaatcaaag

SEQ ID NO: 35330 - DNA, 20 bp, Artificial Sequence
  Description of Artificial Sequence: Synthetic oligonucleotide
  Target: SCNA; (+) strand; PAM type: NRG; PAM sequence: TAG
acctgttgaaatcaaagtag

SEQ ID NO: 35331 - DNA, 20 bp, Artificial Sequence
  Description of Artificial Sequence: Synthetic oligonucleotide
  Target: SCNA; (+) strand; PAM type: NRG; PAM sequence: TAG
gatatctaaataaaaatgtg

SEQ ID NO: 35332 - DNA, 20 bp, Artificial Sequence
  Description of Artificial Sequence: Synthetic oligonucleotide
  Target: SCNA; (+) strand; PAM type: NRG; PAM sequence: AAG
ataaaaatgtgtagcgtgca

SEQ ID NO: 35333 - DNA, 20 bp, Artificial Sequence
  Description of Artificial Sequence: Synthetic oligonucleotide
  Target: SCNA; (+) strand; PAM type: NRG; PAM sequence: GAG
aaaaatgtgtagcgtgcaaa

SEQ ID NO: 35334 - DNA, 20 bp, Artificial Sequence
  Description of Artificial Sequence: Synthetic oligonucleotide
  Target: SCNA; (+) strand; PAM type: NRG; PAM sequence: GAG
tagcgtgcaaagagaaatat

SEQ ID NO: 35335 - DNA, 20 bp, Artificial Sequence
  Description of Artificial Sequence: Synthetic oligonucleotide
  Target: SCNA; (+) strand; PAM type: NRG; PAM sequence: GAG
gcgtgcaaagagaaatatga

SEQ ID NO: 35336 - DNA, 20 bp, Artificial Sequence
  Description of Artificial Sequence: Synthetic oligonucleotide
  Target: SCNA; (+) strand; PAM type: NRG; PAM sequence: CAG
agaaatatgagagtgtgtat

SEQ ID NO: 35337 - DNA, 20 bp, Artificial Sequence
  Description of Artificial Sequence: Synthetic oligonucleotide
  Target: SCNA; (+) strand; PAM type: NRG; PAM sequence: AGG
gaaatatgagagtgtgtatc

SEQ ID NO: 35338 - DNA, 20 bp, Artificial Sequence
  Description of Artificial Sequence: Synthetic oligonucleotide
  Target: SCNA; (+) strand; PAM type: NRG; PAM sequence: AAG
tatgagagtgtgtatcaggc

SEQ ID NO: 35339 - DNA, 20 bp, Artificial Sequence
  Description of Artificial Sequence: Synthetic oligonucleotide
  Target: SCNA; (+) strand; PAM type: NRG; PAM sequence: GAG
tgagagtgtgtatcaggcaa

SEQ ID NO: 35340 - DNA, 20 bp, Artificial Sequence
  Description of Artificial Sequence: Synthetic oligonucleotide
  Target: SCNA; (+) strand; PAM type: NRG; PAM sequence: TGG
tgtgtatcaggcaagagatc

SEQ ID NO: 35341 - DNA, 20 bp, Artificial Sequence
  Description of Artificial Sequence: Synthetic oligonucleotide
  Target: SCNA; (+) strand; PAM type: NRG; PAM sequence: TAG
tatcaggcaagagatctggc

SEQ ID NO: 35342 - DNA, 20 bp, Artificial Sequence
  Description of Artificial Sequence: Synthetic oligonucleotide
  Target: SCNA; (+) strand; PAM type: NRG; PAM sequence: TAG
aagagatctggctagaaatg

SEQ ID NO: 35343 - DNA, 20 bp, Artificial Sequence
  Description of Artificial Sequence: Synthetic oligonucleotide
  Target: SCNA; (+) strand; PAM type: NRG; PAM sequence: AGG
agagatctggctagaaatgt

SEQ ID NO: 35344 - DNA, 20 bp, Artificial Sequence
  Description of Artificial Sequence: Synthetic oligonucleotide
  Target: SCNA; (+) strand; PAM type: NRG; PAM sequence: AAG
tctggctagaaatgtaggca

SEQ ID NO: 35345 - DNA, 20 bp, Artificial Sequence
  Description of Artificial Sequence: Synthetic oligonucleotide
  Target: SCNA; (+) strand; PAM type: NRG; PAM sequence: AGG
ctggctagaaatgtaggcaa

SEQ ID NO: 35346 - DNA, 20 bp, Artificial Sequence
  Description of Artificial Sequence: Synthetic oligonucleotide
  Target: SCNA; (+) strand; PAM type: NRG; PAM sequence: GGG
tggctagaaatgtaggcaaa

SEQ ID NO: 35347 - DNA, 20 bp, Artificial Sequence
  Description of Artificial Sequence: Synthetic oligonucleotide
  Target: SCNA; (+) strand; PAM type: NRG; PAM sequence: TAG
aatgtaggcaaagggataaa

SEQ ID NO: 35348 - DNA, 20 bp, Artificial Sequence
  Description of Artificial Sequence: Synthetic oligonucleotide
  Target: SCNA; (+) strand; PAM type: NRG; PAM sequence: AAG
gcaaagggataaatagtcat

SEQ ID NO: 35349 - DNA, 20 bp, Artificial Sequence
  Description of Artificial Sequence: Synthetic oligonucleotide
  Target: SCNA; (+) strand; PAM type: NRG; PAM sequence: AAG
ataaatagtcataagactat

SEQ ID NO: 35350 - DNA, 20 bp, Artificial Sequence
  Description of Artificial Sequence: Synthetic oligonucleotide
  Target: SCNA; (+) strand; PAM type: NRG; PAM sequence: AGG
taaatagtcataagactata

SEQ ID NO: 35351 - DNA, 20 bp, Artificial Sequence
  Description of Artificial Sequence: Synthetic oligonucleotide
  Target: SCNA; (+) strand; PAM type: NRG; PAM sequence: CGG
cataagactataaggcattg

SEQ ID NO: 35352 - DNA, 20 bp, Artificial Sequence
  Description of Artificial Sequence: Synthetic oligonucleotide
  Target: SCNA; (+) strand; PAM type: NRG; PAM sequence: GAG
taagactataaggcattgcg

SEQ ID NO: 35353 - DNA, 20 bp, Artificial Sequence
  Description of Artificial Sequence: Synthetic oligonucleotide
  Target: SCNA; (+) strand; PAM type: NRG; PAM sequence: AGG
aagactataaggcattgcgg

SEQ ID NO: 35354 - DNA, 20 bp, Artificial Sequence
  Description of Artificial Sequence: Synthetic oligonucleotide
  Target: SCNA; (+) strand; PAM type: NRG; PAM sequence: GGG
agactataaggcattgcgga

SEQ ID NO: 35355 - DNA, 20 bp, Artificial Sequence
  Description of Artificial Sequence: Synthetic oligonucleotide
  Target: SCNA; (+) strand; PAM type: NRG; PAM sequence: AAG
ctataaggcattgcggaggg

SEQ ID NO: 35356 - DNA, 20 bp, Artificial Sequence
  Description of Artificial Sequence: Synthetic oligonucleotide
  Target: SCNA; (+) strand; PAM type: NRG; PAM sequence: GAG
ataaggcattgcggagggaa

SEQ ID NO: 35357 - DNA, 20 bp, Artificial Sequence
  Description of Artificial Sequence: Synthetic oligonucleotide
  Target: SCNA; (+) strand; PAM type: NRG; PAM sequence: AGG
taaggcattgcggagggaag

SEQ ID NO: 35358 - DNA, 20 bp, Artificial Sequence
  Description of Artificial Sequence: Synthetic oligonucleotide
  Target: SCNA; (+) strand; PAM type: NRG; PAM sequence: AAG
cattgcggagggaagaggaa

SEQ ID NO: 35359 - DNA, 20 bp, Artificial Sequence
  Description of Artificial Sequence: Synthetic oligonucleotide
  Target: SCNA; (+) strand; PAM type: NRG; PAM sequence: TGG
cggagggaagaggaaaagct

SEQ ID NO: 35360 - DNA, 20 bp, Artificial Sequence
  Description of Artificial Sequence: Synthetic oligonucleotide
  Target: SCNA; (+) strand; PAM type: NRG; PAM sequence: GAG
gagggaagaggaaaagcttg

SEQ ID NO: 35361 - DNA, 20 bp, Artificial Sequence
  Description of Artificial Sequence: Synthetic oligonucleotide
  Target: SCNA; (+) strand; PAM type: NRG; PAM sequence: GAG
agaggaaaagcttggagaat

SEQ ID NO: 35362 - DNA, 20 bp, Artificial Sequence
  Description of Artificial Sequence: Synthetic oligonucleotide
  Target: SCNA; (+) strand; PAM type: NRG; PAM sequence: CAG
gaaaagcttggagaatgagt

SEQ ID NO: 35363 - DNA, 20 bp, Artificial Sequence
  Description of Artificial Sequence: Synthetic oligonucleotide
  Target: SCNA; (+) strand; PAM type: NRG; PAM sequence: TAG
tgagtcagaaatccacacaa

SEQ ID NO: 35364 - DNA, 20 bp, Artificial Sequence
  Description of Artificial Sequence: Synthetic oligonucleotide
  Target: SCNA; (+) strand; PAM type: NRG; PAM sequence: AAG
gaaatccacacaatagatta

SEQ ID NO: 35365 - DNA, 20 bp, Artificial Sequence
  Description of Artificial Sequence: Synthetic oligonucleotide
  Target: SCNA; (+) strand; PAM type: NRG; PAM sequence: AAG
acacaatagattaaagattt

SEQ ID NO: 35366 - DNA, 20 bp, Artificial Sequence
  Description of Artificial Sequence: Synthetic oligonucleotide
  Target: SCNA; (+) strand; PAM type: NRG; PAM sequence: GAG
agattaaagatttaagttgt

SEQ ID NO: 35367 - DNA, 20 bp, Artificial Sequence
  Description of Artificial Sequence: Synthetic oligonucleotide
  Target: SCNA; (+) strand; PAM type: NRG; PAM sequence: AAG
taaagatttaagttgtgaga

SEQ ID NO: 35368 - DNA, 20 bp, Artificial Sequence
  Description of Artificial Sequence: Synthetic oligonucleotide
  Target: SCNA; (+) strand; PAM type: NRG; PAM sequence: TGG
aagttgtgagaaagttttta

SEQ ID NO: 35369 - DNA, 20 bp, Artificial Sequence
  Description of Artificial Sequence: Synthetic oligonucleotide
  Target: SCNA; (+) strand; PAM type: NRG; PAM sequence: GAG
gttgtgagaaagtttttatg

SEQ ID NO: 35370 - DNA, 20 bp, Artificial Sequence
  Description of Artificial Sequence: Synthetic oligonucleotide
  Target: SCNA; (+) strand; PAM type: NRG; PAM sequence: GAG
tgtgagaaagtttttatgga

SEQ ID NO: 35371 - DNA, 20 bp, Artificial Sequence
  Description of Artificial Sequence: Synthetic oligonucleotide
  Target: SCNA; (+) strand; PAM type: NRG; PAM sequence: TGG
agtttttatggagagtgttc

SEQ ID NO: 35372 - DNA, 20 bp, Artificial Sequence
  Description of Artificial Sequence: Synthetic oligonucleotide
  Target: SCNA; (+) strand; PAM type: NRG; PAM sequence: GGG
gtttttatggagagtgttct

SEQ ID NO: 35373 - DNA, 20 bp, Artificial Sequence
  Description of Artificial Sequence: Synthetic oligonucleotide
  Target: SCNA; (+) strand; PAM type: NRG; PAM sequence: GGG
tttttatggagagtgttctg

SEQ ID NO: 35374 - DNA, 20 bp, Artificial Sequence
  Description of Artificial Sequence: Synthetic oligonucleotide
  Target: SCNA; (+) strand; PAM type: NRG; PAM sequence: TAG
gagtgttctggggaataaat

SEQ ID NO: 35375 - DNA, 20 bp, Artificial Sequence
  Description of Artificial Sequence: Synthetic oligonucleotide
  Target: SCNA; (+) strand; PAM type: NRG; PAM sequence: GAG
gtgttctggggaataaatta

SEQ ID NO: 35376 - DNA, 20 bp, Artificial Sequence
  Description of Artificial Sequence: Synthetic oligonucleotide
  Target: SCNA; (+) strand; PAM type: NRG; PAM sequence: AAG
aataaattagagattaataa

SEQ ID NO: 35377 - DNA, 20 bp, Artificial Sequence
  Description of Artificial Sequence: Synthetic oligonucleotide
  Target: SCNA; (+) strand; PAM type: NRG; PAM sequence: CAG
taaaagaataaaaaatcaac

SEQ ID NO: 35378 - DNA, 20 bp, Artificial Sequence
  Description of Artificial Sequence: Synthetic oligonucleotide
  Target: SCNA; (+) strand; PAM type: NRG; PAM sequence: AGG
aaaagaataaaaaatcaacc

SEQ ID NO: 35379 - DNA, 20 bp, Artificial Sequence
  Description of Artificial Sequence: Synthetic oligonucleotide
  Target: SCNA; (+) strand; PAM type: NRG; PAM sequence: TAG
agaataaaaaatcaaccagg

SEQ ID NO: 35380 - DNA, 20 bp, Artificial Sequence
  Description of Artificial Sequence: Synthetic oligonucleotide
  Target: SCNA; (+) strand; PAM type: NRG; PAM sequence: AAG
taaaaaatcaaccaggtaga

SEQ ID NO: 35381 - DNA, 20 bp, Artificial Sequence
  Description of Artificial Sequence: Synthetic oligonucleotide
  Target: SCNA; (+) strand; PAM type: NRG; PAM sequence: AGG
aaaaaatcaaccaggtagaa

SEQ ID NO: 35382 - DNA, 20 bp, Artificial Sequence
  Description of Artificial Sequence: Synthetic oligonucleotide
  Target: SCNA; (+) strand; PAM type: NRG; PAM sequence: GGG
aaaaatcaaccaggtagaaa

SEQ ID NO: 35383 - DNA, 20 bp, Artificial Sequence
  Description of Artificial Sequence: Synthetic oligonucleotide
  Target: SCNA; (+) strand; PAM type: NRG; PAM sequence: TGG
ggtagaaagggcatgcatcc

SEQ ID NO: 35384 - DNA, 20 bp, Artificial Sequence
  Description of Artificial Sequence: Synthetic oligonucleotide
  Target: SCNA; (+) strand; PAM type: NRG; PAM sequence: TAG
ctggtgtgtgcaaacatgta

SEQ ID NO: 35385 - DNA, 20 bp, Artificial Sequence
  Description of Artificial Sequence: Synthetic oligonucleotide
  Target: SCNA; (+) strand; PAM type: NRG; PAM sequence: AAG
tgtatagctgcatgaatgtc

SEQ ID NO: 35386 - DNA, 20 bp, Artificial Sequence
  Description of Artificial Sequence: Synthetic oligonucleotide
  Target: SCNA; (+) strand; PAM type: NRG; PAM sequence: TGG
gtcaagtttactatcttacg

SEQ ID NO: 35387 - DNA, 20 bp, Artificial Sequence
  Description of Artificial Sequence: Synthetic oligonucleotide
  Target: SCNA; (+) strand; PAM type: NRG; PAM sequence: TAG
ctatatcactatgcaaacta

SEQ ID NO: 35388 - DNA, 20 bp, Artificial Sequence
  Description of Artificial Sequence: Synthetic oligonucleotide
  Target: SCNA; (+) strand; PAM type: NRG; PAM sequence: TAG
atgcaaactatagcctttca

SEQ ID NO: 35389 - DNA, 20 bp, Artificial Sequence
  Description of Artificial Sequence: Synthetic oligonucleotide
  Target: SCNA; (+) strand; PAM type: NRG; PAM sequence: AAG
tatagcctttcatagtacgt

SEQ ID NO: 35390 - DNA, 20 bp, Artificial Sequence
  Description of Artificial Sequence: Synthetic oligonucleotide
  Target: SCNA; (+) strand; PAM type: NRG; PAM sequence: AAG
ctttcatagtacgtaagtga

SEQ ID NO: 35391 - DNA, 20 bp, Artificial Sequence
  Description of Artificial Sequence: Synthetic oligonucleotide
  Target: SCNA; (+) strand; PAM type: NRG; PAM sequence: TAG
tagtacgtaagtgaaagcat

SEQ ID NO: 35392 - DNA, 20 bp, Artificial Sequence
  Description of Artificial Sequence: Synthetic oligonucleotide
  Target: SCNA; (+) strand; PAM type: NRG; PAM sequence: GAG
gtacgtaagtgaaagcatta

SEQ ID NO: 35393 - DNA, 20 bp, Artificial Sequence
  Description of Artificial Sequence: Synthetic oligonucleotide
  Target: SCNA; (+) strand; PAM type: NRG; PAM sequence: AGG
tacgtaagtgaaagcattag

SEQ ID NO: 35394 - DNA, 20 bp, Artificial Sequence
  Description of Artificial Sequence: Synthetic oligonucleotide
  Target: SCNA; (+) strand; PAM type: NRG; PAM sequence: TAG
gcattagaggattatctgtg

SEQ ID NO: 35395 - DNA, 20 bp, Artificial Sequence
  Description of Artificial Sequence: Synthetic oligonucleotide
  Target: SCNA; (+) strand; PAM type: NRG; PAM sequence: CAG
ttgcccatgttttacataac

SEQ ID NO: 35396 - DNA, 20 bp, Artificial Sequence
  Description of Artificial Sequence: Synthetic oligonucleotide
  Target: SCNA; (+) strand; PAM type: NRG; PAM sequence: GAG
aaccagactgactgtaatat

SEQ ID NO: 35397 - DNA, 20 bp, Artificial Sequence
  Description of Artificial Sequence: Synthetic oligonucleotide
  Target: SCNA; (+) strand; PAM type: NRG; PAM sequence: AAG
aatccttgtataaaccccac

SEQ ID NO: 35398 - DNA, 20 bp, Artificial Sequence
  Description of Artificial Sequence: Synthetic oligonucleotide
  Target: SCNA; (+) strand; PAM type: NRG; PAM sequence: AGG
atccttgtataaaccccaca

SEQ ID NO: 35399 - DNA, 20 bp, Artificial Sequence
  Description of Artificial Sequence: Synthetic oligonucleotide
  Target: SCNA; (+) strand; PAM type: NRG; PAM sequence: AAG
accccacaaggatttctcta

SEQ ID NO: 35400 - DNA, 20 bp, Artificial Sequence
  Description of Artificial Sequence: Synthetic oligonucleotide
  Target: SCNA; (+) strand; PAM type: NRG; PAM sequence: TGG
gatttctctaaagacaaacc

SEQ ID NO: 35401 - DNA, 20 bp, Artificial Sequence
  Description of Artificial Sequence: Synthetic oligonucleotide
  Target: SCNA; (+) strand; PAM type: NRG; PAM sequence: CAG
ttgctaaatattactcactc

SEQ ID NO: 35402 - DNA, 20 bp, Artificial Sequence
  Description of Artificial Sequence: Synthetic oligonucleotide
  Target: SCNA; (+) strand; PAM type: NRG; PAM sequence: AGG
tgctaaatattactcactcc

SEQ ID NO: 35403 - DNA, 20 bp, Artificial Sequence
  Description of Artificial Sequence: Synthetic oligonucleotide
  Target: SCNA; (+) strand; PAM type: NRG; PAM sequence: CAG
taaattccataaaacactat

SEQ ID NO: 35404 - DNA, 20 bp, Artificial Sequence
  Description of Artificial Sequence: Synthetic oligonucleotide
  Target: SCNA; (+) strand; PAM type: NRG; PAM sequence: GAG
acactatcagatatattcct

SEQ ID NO: 35405 - DNA, 20 bp, Artificial Sequence
  Description of Artificial Sequence: Synthetic oligonucleotide
  Target: SCNA; (+) strand; PAM type: NRG; PAM sequence: AAG
tcctgagacttttgtatttt

SEQ ID NO: 35406 - DNA, 20 bp, Artificial Sequence
  Description of Artificial Sequence: Synthetic oligonucleotide
  Target: SCNA; (+) strand; PAM type: NRG; PAM sequence: TGG
aagtgctgtcttttcctatt

SEQ ID NO: 35407 - DNA, 20 bp, Artificial Sequence
  Description of Artificial Sequence: Synthetic oligonucleotide
  Target: SCNA; (+) strand; PAM type: NRG; PAM sequence: TGG
ttcctatttggtatttgcat

SEQ ID NO: 35408 - DNA, 20 bp, Artificial Sequence
  Description of Artificial Sequence: Synthetic oligonucleotide
  Target: SCNA; (+) strand; PAM type: NRG; PAM sequence: TGG
atttgcattggttacttttg

SEQ ID NO: 35409 - DNA, 20 bp, Artificial Sequence
  Description of Artificial Sequence: Synthetic oligonucleotide
  Target: SCNA; (+) strand; PAM type: NRG; PAM sequence: GGG
tttgcattggttacttttgt

SEQ ID NO: 35410 - DNA, 20 bp, Artificial Sequence
  Description of Artificial Sequence: Synthetic oligonucleotide
  Target: SCNA; (+) strand; PAM type: NRG; PAM sequence: GGG
ttgcattggttacttttgtg

SEQ ID NO: 35411 - DNA, 20 bp, Artificial Sequence
  Description of Artificial Sequence: Synthetic oligonucleotide
  Target: SCNA; (+) strand; PAM type: NRG; PAM sequence: TGG
gttacttttgtggggtgtgc

SEQ ID NO: 35412 - DNA, 20 bp, Artificial Sequence
  Description of Artificial Sequence: Synthetic oligonucleotide
  Target: SCNA; (+) strand; PAM type: NRG; PAM sequence: CAG
gtttcttccttcttcccctt

SEQ ID NO: 35413 - DNA, 20 bp, Artificial Sequence
  Description of Artificial Sequence: Synthetic oligonucleotide
  Target: SCNA; (+) strand; PAM type: NRG; PAM sequence: TGG
ccccactcctgcactgtgcc

SEQ ID NO: 35414 - DNA, 20 bp, Artificial Sequence
  Description of Artificial Sequence: Synthetic oligonucleotide
  Target: SCNA; (+) strand; PAM type: NRG; PAM sequence: GAG
ccactcctgcactgtgcctg

SEQ ID NO: 35415 - DNA, 20 bp, Artificial Sequence
  Description of Artificial Sequence: Synthetic oligonucleotide
  Target: SCNA; (+) strand; PAM type: NRG; PAM sequence: AAG
ctcctgcactgtgcctggag

SEQ ID NO: 35416 - DNA, 20 bp, Artificial Sequence
  Description of Artificial Sequence: Synthetic oligonucleotide
  Target: SCNA; (+) strand; PAM type: NRG; PAM sequence: CGG
gaattgtactgactacacca

SEQ ID NO: 35417 - DNA, 20 bp, Artificial Sequence
  Description of Artificial Sequence: Synthetic oligonucleotide
  Target: SCNA; (+) strand; PAM type: NRG; PAM sequence: TGG
acaccacggtttttcaacct

SEQ ID NO: 35418 - DNA, 20 bp, Artificial Sequence
  Description of Artificial Sequence: Synthetic oligonucleotide
  Target: SCNA; (+) strand; PAM type: NRG; PAM sequence: CAG
ccacggtttttcaaccttgg

SEQ ID NO: 35419 - DNA, 20 bp, Artificial Sequence
  Description of Artificial Sequence: Synthetic oligonucleotide
  Target: SCNA; (+) strand; PAM type: NRG; PAM sequence: TGG
cagtaatgacattttttaac

SEQ ID NO: 35420 - DNA, 20 bp, Artificial Sequence
  Description of Artificial Sequence: Synthetic oligonucleotide
  Target: SCNA; (+) strand; PAM type: NRG; PAM sequence: TGG
tttaactggatactttgttg

SEQ ID NO: 35421 - DNA, 20 bp, Artificial Sequence
  Description of Artificial Sequence: Synthetic oligonucleotide
  Target: SCNA; (+) strand; PAM type: NRG; PAM sequence: AAG
aactggatactttgttgtgg

SEQ ID NO: 35422 - DNA, 20 bp, Artificial Sequence
  Description of Artificial Sequence: Synthetic oligonucleotide
  Target: SCNA; (+) strand; PAM type: NRG; PAM sequence: AGG
actggatactttgttgtgga

SEQ ID NO: 35423 - DNA, 20 bp, Artificial Sequence
  Description of Artificial Sequence: Synthetic oligonucleotide
  Target: SCNA; (+) strand; PAM type: NRG; PAM sequence: TAG
gaaggatgtcctgtgcattg

SEQ ID NO: 35424 - DNA, 20 bp, Artificial Sequence
  Description of Artificial Sequence: Synthetic oligonucleotide
  Target: SCNA; (+) strand; PAM type: NRG; PAM sequence: CAG
agatgtttaaaaaaatccct

SEQ ID NO: 35425 - DNA, 20 bp, Artificial Sequence
  Description of Artificial Sequence: Synthetic oligonucleotide
  Target: SCNA; (+) strand; PAM type: NRG; PAM sequence: TAG
aaaaatccctcagtgaatca

SEQ ID NO: 35426 - DNA, 20 bp, Artificial Sequence
  Description of Artificial Sequence: Synthetic oligonucleotide
  Target: SCNA; (+) strand; PAM type: NRG; PAM sequence: TAG
aatccctcagtgaatcatag

SEQ ID NO: 35427 - DNA, 20 bp, Artificial Sequence
  Description of Artificial Sequence: Synthetic oligonucleotide
  Target: SCNA; (+) strand; PAM type: NRG; PAM sequence: GAG
ctcctctcccttcctcccct

SEQ ID NO: 35428 - DNA, 20 bp, Artificial Sequence
  Description of Artificial Sequence: Synthetic oligonucleotide
  Target: SCNA; (+) strand; PAM type: NRG; PAM sequence: TGG
tgataaccactaatgttccc

SEQ ID NO: 35429 - DNA, 20 bp, Artificial Sequence
  Description of Artificial Sequence: Synthetic oligonucleotide
  Target: SCNA; (+) strand; PAM type: NRG; PAM sequence: GGG
gataaccactaatgttccct

SEQ ID NO: 35430 - DNA, 20 bp, Artificial Sequence
  Description of Artificial Sequence: Synthetic oligonucleotide
  Target: SCNA; (+) strand; PAM type: NRG; PAM sequence: GAG
taaccactaatgttccctgg

SEQ ID NO: 35431 - DNA, 20 bp, Artificial Sequence
  Description of Artificial Sequence: Synthetic oligonucleotide
  Target: SCNA; (+) strand; PAM type: NRG; PAM sequence: TGG
atgttccctgggagcacaat

SEQ ID NO: 35432 - DNA, 20 bp, Artificial Sequence
  Description of Artificial Sequence: Synthetic oligonucleotide
  Target: SCNA; (+) strand; PAM type: NRG; PAM sequence: TGG
cctgggagcacaattggccc

SEQ ID NO: 35433 - DNA, 20 bp, Artificial Sequence
  Description of Artificial Sequence: Synthetic oligonucleotide
  Target: SCNA; (+) strand; PAM type: NRG; PAM sequence: TAG
gagcacaattggccctggat

SEQ ID NO: 35434 - DNA, 20 bp, Artificial Sequence
  Description of Artificial Sequence: Synthetic oligonucleotide
  Target: SCNA; (+) strand; PAM type: NRG; PAM sequence: GAG
actccttttgtctacgctgt

SEQ ID NO: 35435 - DNA, 20 bp, Artificial Sequence
  Description of Artificial Sequence: Synthetic oligonucleotide
  Target: SCNA; (+) strand; PAM type: NRG; PAM sequence: TGG
ttttgtctacgctgtgagtt

SEQ ID NO: 35436 - DNA, 20 bp, Artificial Sequence
  Description of Artificial Sequence: Synthetic oligonucleotide
  Target: SCNA; (+) strand; PAM type: NRG; PAM sequence: CAG
gtctacgctgtgagtttggc

SEQ ID NO: 35437 - DNA, 20 bp, Artificial Sequence
  Description of Artificial Sequence: Synthetic oligonucleotide
  Target: SCNA; (+) strand; PAM type: NRG; PAM sequence: TGG
tacgctgtgagtttggccag

SEQ ID NO: 35438 - DNA, 20 bp, Artificial Sequence
  Description of Artificial Sequence: Synthetic oligonucleotide
  Target: SCNA; (+) strand; PAM type: NRG; PAM sequence: AAG
tggccagtggaaacaccaca

SEQ ID NO: 35439 - DNA, 20 bp, Artificial Sequence
  Description of Artificial Sequence: Synthetic oligonucleotide
  Target: SCNA; (+) strand; PAM type: NRG; PAM sequence: GAG
gccagtggaaacaccacaaa

SEQ ID NO: 35440 - DNA, 20 bp, Artificial Sequence
  Description of Artificial Sequence: Synthetic oligonucleotide
  Target: SCNA; (+) strand; PAM type: NRG; PAM sequence: AGG
ccagtggaaacaccacaaag

SEQ ID NO: 35441 - DNA, 20 bp, Artificial Sequence
  Description of Artificial Sequence: Synthetic oligonucleotide
  Target: SCNA; (+) strand; PAM type: NRG; PAM sequence: CAG
gaaacaccacaaagaggaaa

SEQ ID NO: 35442 - DNA, 20 bp, Artificial Sequence
  Description of Artificial Sequence: Synthetic oligonucleotide
  Target: SCNA; (+) strand; PAM type: NRG; PAM sequence: AGG
aaacaccacaaagaggaaac

SEQ ID NO: 35443 - DNA, 20 bp, Artificial Sequence
  Description of Artificial Sequence: Synthetic oligonucleotide
  Target: SCNA; (+) strand; PAM type: NRG; PAM sequence: GGG
aacaccacaaagaggaaaca

SEQ ID NO: 35444 - DNA, 20 bp, Artificial Sequence
  Description of Artificial Sequence: Synthetic oligonucleotide
  Target: SCNA; (+) strand; PAM type: NRG; PAM sequence: GAG
caccacaaagaggaaacagg

SEQ ID NO: 35445 - DNA, 20 bp, Artificial Sequence
  Description of Artificial Sequence: Synthetic oligonucleotide
  Target: SCNA; (+) strand; PAM type: NRG; PAM sequence: AGG
accacaaagaggaaacaggg

SEQ ID NO: 35446 - DNA, 20 bp, Artificial Sequence
  Description of Artificial Sequence: Synthetic oligonucleotide
  Target: SCNA; (+) strand; PAM type: NRG; PAM sequence: GGG
ccacaaagaggaaacaggga

SEQ ID NO: 35447 - DNA, 20 bp, Artificial Sequence
  Description of Artificial Sequence: Synthetic oligonucleotide
  Target: SCNA; (+) strand; PAM type: NRG; PAM sequence: GAG
acaaagaggaaacagggagg

SEQ ID NO: 35448 - DNA, 20 bp, Artificial Sequence
  Description of Artificial Sequence: Synthetic oligonucleotide
  Target: SCNA; (+) strand; PAM type: NRG; PAM sequence: AGG
caaagaggaaacagggaggg

SEQ ID NO: 35449 - DNA, 20 bp, Artificial Sequence
  Description of Artificial Sequence: Synthetic oligonucleotide
  Target: SCNA; (+) strand; PAM type: NRG; PAM sequence: AAG
gaggaaacagggagggagga

SEQ ID NO: 35450 - DNA, 20 bp, Artificial Sequence
  Description of Artificial Sequence: Synthetic oligonucleotide
  Target: SCNA; (+) strand; PAM type: NRG; PAM sequence: AAG
aaacagggagggaggaaagt

SEQ ID NO: 35451 - DNA, 20 bp, Artificial Sequence
  Description of Artificial Sequence: Synthetic oligonucleotide
  Target: SCNA; (+) strand; PAM type: NRG; PAM sequence: AGG
aacagggagggaggaaagta

SEQ ID NO: 35452 - DNA, 20 bp, Artificial Sequence
  Description of Artificial Sequence: Synthetic oligonucleotide
  Target: SCNA; (+) strand; PAM type: NRG; PAM sequence: CAG
gggagggaggaaagtaaggt

SEQ ID NO: 35453 - DNA, 20 bp, Artificial Sequence
  Description of Artificial Sequence: Synthetic oligonucleotide
  Target: SCNA; (+) strand; PAM type: NRG; PAM sequence: AGG
ggagggaggaaagtaaggtc

SEQ ID NO: 35454 - DNA, 20 bp, Artificial Sequence
  Description of Artificial Sequence: Synthetic oligonucleotide
  Target: SCNA; (+) strand; PAM type: NRG; PAM sequence: CAG
aggtcaggtgatccattttc

SEQ ID NO: 35455 - DNA, 20 bp, Artificial Sequence
  Description of Artificial Sequence: Synthetic oligonucleotide
  Target: SCNA; (+) strand; PAM type: NRG; PAM sequence: TAG
attgactattctcgccctgc

SEQ ID NO: 35456 - DNA, 20 bp, Artificial Sequence
  Description of Artificial Sequence: Synthetic oligonucleotide
  Target: SCNA; (+) strand; PAM type: NRG; PAM sequence: AGG
ttgactattctcgccctgct

SEQ ID NO: 35457 - DNA, 20 bp, Artificial Sequence
  Description of Artificial Sequence: Synthetic oligonucleotide
  Target: SCNA; (+) strand; PAM type: NRG; PAM sequence: CAG
ctattctcgccctgctaggc

SEQ ID NO: 35458 - DNA, 20 bp, Artificial Sequence
  Description of Artificial Sequence: Synthetic oligonucleotide
  Target: SCNA; (+) strand; PAM type: NRG; PAM sequence: CAG
ctcgccctgctaggccagtg

SEQ ID NO: 35459 - DNA, 20 bp, Artificial Sequence
  Description of Artificial Sequence: Synthetic oligonucleotide
  Target: SCNA; (+) strand; PAM type: NRG; PAM sequence: AGG
tcgccctgctaggccagtgc

SEQ ID NO: 35460 - DNA, 20 bp, Artificial Sequence
  Description of Artificial Sequence: Synthetic oligonucleotide
  Target: SCNA; (+) strand; PAM type: NRG; PAM sequence: CAG
ccctgctaggccagtgcagg

SEQ ID NO: 35461 - DNA, 20 bp, Artificial Sequence
  Description of Artificial Sequence: Synthetic oligonucleotide
  Target: SCNA; (+) strand; PAM type: NRG; PAM sequence: AGG
cctgctaggccagtgcaggc

SEQ ID NO: 35462 - DNA, 20 bp, Artificial Sequence
  Description of Artificial Sequence: Synthetic oligonucleotide
  Target: SCNA; (+) strand; PAM type: NRG; PAM sequence: TGG
gctaggccagtgcaggcagg

SEQ ID NO: 35463 - DNA, 20 bp, Artificial Sequence
  Description of Artificial Sequence: Synthetic oligonucleotide
  Target: SCNA; (+) strand; PAM type: NRG; PAM sequence: CAG
ccagtgcaggcaggtggtat

SEQ ID NO: 35464 - DNA, 20 bp, Artificial Sequence
  Description of Artificial Sequence: Synthetic oligonucleotide
  Target: SCNA; (+) strand; PAM type: NRG; PAM sequence: AAG
aggcaggtggtatcagtcca

SEQ ID NO: 35465 - DNA, 20 bp, Artificial Sequence
  Description of Artificial Sequence: Synthetic oligonucleotide
  Target: SCNA; (+) strand; PAM type: NRG; PAM sequence: CAG
gtatcagtccaaagatcaca

SEQ ID NO: 35466 - DNA, 20 bp, Artificial Sequence
  Description of Artificial Sequence: Synthetic oligonucleotide
  Target: SCNA; (+) strand; PAM type: NRG; PAM sequence: AAG
gtccaaagatcacacagctc

SEQ ID NO: 35467 - DNA, 20 bp, Artificial Sequence
  Description of Artificial Sequence: Synthetic oligonucleotide
  Target: SCNA; (+) strand; PAM type: NRG; PAM sequence: CAG
aaagatcacacagctcaagt

SEQ ID NO: 35468 - DNA, 20 bp, Artificial Sequence
  Description of Artificial Sequence: Synthetic oligonucleotide
  Target: SCNA; (+) strand; PAM type: NRG; PAM sequence: AGG
aagatcacacagctcaagtc

SEQ ID NO: 35469 - DNA, 20 bp, Artificial Sequence
  Description of Artificial Sequence: Synthetic oligonucleotide
  Target: SCNA; (+) strand; PAM type: NRG; PAM sequence: CAG
atcacacagctcaagtcagg

SEQ ID NO: 35470 - DNA, 20 bp, Artificial Sequence
  Description of Artificial Sequence: Synthetic oligonucleotide
  Target: SCNA; (+) strand; PAM type: NRG; PAM sequence: TAG
gtcaggcagccgtcttcaca

SEQ ID NO: 35471 - DNA, 20 bp, Artificial Sequence
  Description of Artificial Sequence: Synthetic oligonucleotide
  Target: SCNA; (+) strand; PAM type: NRG; PAM sequence: AGG
tcaggcagccgtcttcacat

SEQ ID NO: 35472 - DNA, 20 bp, Artificial Sequence
  Description of Artificial Sequence: Synthetic oligonucleotide
  Target: SCNA; (+) strand; PAM type: NRG; PAM sequence: TGG
gtcttcacataggacttgct

SEQ ID NO: 35473 - DNA, 20 bp, Artificial Sequence
  Description of Artificial Sequence: Synthetic oligonucleotide
  Target: SCNA; (+) strand; PAM type: NRG; PAM sequence: TGG
ctccctctttttctgataaa

SEQ ID NO: 35474 - DNA, 20 bp, Artificial Sequence
  Description of Artificial Sequence: Synthetic oligonucleotide
  Target: SCNA; (+) strand; PAM type: NRG; PAM sequence: TAG
tggtaatctccctgttcatt

SEQ ID NO: 35475 - DNA, 20 bp, Artificial Sequence
  Description of Artificial Sequence: Synthetic oligonucleotide
  Target: SCNA; (+) strand; PAM type: NRG; PAM sequence: TGG
cctgttcatttagttcattt

SEQ ID NO: 35476 - DNA, 20 bp, Artificial Sequence
  Description of Artificial Sequence: Synthetic oligonucleotide
  Target: SCNA; (+) strand; PAM type: NRG; PAM sequence: TAG
tcatttagttcattttggcc

SEQ ID NO: 35477 - DNA, 20 bp, Artificial Sequence
  Description of Artificial Sequence: Synthetic oligonucleotide
  Target: SCNA; (+) strand; PAM type: NRG; PAM sequence: TGG
tttagttcattttggcctag

SEQ ID NO: 35478 - DNA, 20 bp, Artificial Sequence
  Description of Artificial Sequence: Synthetic oligonucleotide
  Target: SCNA; (+) strand; PAM type: NRG; PAM sequence: CGG
ttttggcctagtggttataa

SEQ ID NO: 35479 - DNA, 20 bp, Artificial Sequence
  Description of Artificial Sequence: Synthetic oligonucleotide
  Target: SCNA; (+) strand; PAM type: NRG; PAM sequence: AAG
tgctcgctgttgccatccta

SEQ ID NO: 35480 - DNA, 20 bp, Artificial Sequence
  Description of Artificial Sequence: Synthetic oligonucleotide
  Target: SCNA; (+) strand; PAM type: NRG; PAM sequence: CGG
tccgtgtgtttttcctaacc

SEQ ID NO: 35481 - DNA, 20 bp, Artificial Sequence
  Description of Artificial Sequence: Synthetic oligonucleotide
  Target: SCNA; (+) strand; PAM type: NRG; PAM sequence: TAG
ccggtctaaaccttcgtaat

SEQ ID NO: 35482 - DNA, 20 bp, Artificial Sequence
  Description of Artificial Sequence: Synthetic oligonucleotide
  Target: SCNA; (+) strand; PAM type: NRG; PAM sequence: AAG
tcgtaattagtccctttata

SEQ ID NO: 35483 - DNA, 20 bp, Artificial Sequence
  Description of Artificial Sequence: Synthetic oligonucleotide
  Target: SCNA; (+) strand; PAM type: NRG; PAM sequence: CAG
ttgtgtgcactgtttgtttt

SEQ ID NO: 35484 - DNA, 20 bp, Artificial Sequence
  Description of Artificial Sequence: Synthetic oligonucleotide
  Target: SCNA; (+) strand; PAM type: NRG; PAM sequence: CAG
tgtgcactgtttgttttcag

SEQ ID NO: 35485 - DNA, 20 bp, Artificial Sequence
  Description of Artificial Sequence: Synthetic oligonucleotide
  Target: SCNA; (+) strand; PAM type: NRG; PAM sequence: AGG
gtgcactgtttgttttcagc

SEQ ID NO: 35486 - DNA, 20 bp, Artificial Sequence
  Description of Artificial Sequence: Synthetic oligonucleotide
  Target: SCNA; (+) strand; PAM type: NRG; PAM sequence: GAG
gcactgtttgttttcagcag

SEQ ID NO: 35487 - DNA, 20 bp, Artificial Sequence
  Description of Artificial Sequence: Synthetic oligonucleotide
  Target: SCNA; (+) strand; PAM type: NRG; PAM sequence: AAG
agttataattgatatgatgt

SEQ ID NO: 35488 - DNA, 20 bp, Artificial Sequence
  Description of Artificial Sequence: Synthetic oligonucleotide
  Target: SCNA; (+) strand; PAM type: NRG; PAM sequence: AAG
tatgatgtaagtacatatca

SEQ ID NO: 35489 - DNA, 20 bp, Artificial Sequence
  Description of Artificial Sequence: Synthetic oligonucleotide
  Target: SCNA; (+) strand; PAM type: NRG; PAM sequence: CAG
agtacatatcaaagtattta

SEQ ID NO: 35490 - DNA, 20 bp, Artificial Sequence
  Description of Artificial Sequence: Synthetic oligonucleotide
  Target: SCNA; (+) strand; PAM type: NRG; PAM sequence: AAG
atatcaaagtatttacagaa

SEQ ID NO: 35491 - DNA, 20 bp, Artificial Sequence
  Description of Artificial Sequence: Synthetic oligonucleotide
  Target: SCNA; (+) strand; PAM type: NRG; PAM sequence: GAG
aaagcaaaattccaaatatt

SEQ ID NO: 35492 - DNA, 20 bp, Artificial Sequence
  Description of Artificial Sequence: Synthetic oligonucleotide
  Target: SCNA; (+) strand; PAM type: NRG; PAM sequence: TGG
ttgagatgttttctctgtat

SEQ ID NO: 35493 - DNA, 20 bp, Artificial Sequence
  Description of Artificial Sequence: Synthetic oligonucleotide
  Target: SCNA; (+) strand; PAM type: NRG; PAM sequence: TGG
tctgtattggccccaatcat

SEQ ID NO: 35494 - DNA, 20 bp, Artificial Sequence
  Description of Artificial Sequence: Synthetic oligonucleotide
  Target: SCNA; (+) strand; PAM type: NRG; PAM sequence: TAG
ttgatttgctcaatgaatgc

SEQ ID NO: 35495 - DNA, 20 bp, Artificial Sequence
  Description of Artificial Sequence: Synthetic oligonucleotide
  Target: SCNA; (+) strand; PAM type: NRG; PAM sequence: AAG
gaatgctagttataaaaaac

SEQ ID NO: 35496 - DNA, 20 bp, Artificial Sequence
  Description of Artificial Sequence: Synthetic oligonucleotide
  Target: SCNA; (+) strand; PAM type: NRG; PAM sequence: CAG
ttccttgcctttattattct

SEQ ID NO: 35497 - DNA, 20 bp, Artificial Sequence
  Description of Artificial Sequence: Synthetic oligonucleotide
  Target: SCNA; (+) strand; PAM type: NRG; PAM sequence: AGG
tccttgcctttattattctc

SEQ ID NO: 35498 - DNA, 20 bp, Artificial Sequence
  Description of Artificial Sequence: Synthetic oligonucleotide
  Target: SCNA; (+) strand; PAM type: NRG; PAM sequence: TGG
tttattattctcaggtgaaa

SEQ ID NO: 35499 - DNA, 20 bp, Artificial Sequence
  Description of Artificial Sequence: Synthetic oligonucleotide
  Target: SCNA; (+) strand; PAM type: NRG; PAM sequence: GAG
tattattctcaggtgaaatg

SEQ ID NO: 35500 - DNA, 20 bp, Artificial Sequence
  Description of Artificial Sequence: Synthetic oligonucleotide
  Target: SCNA; (+) strand; PAM type: NRG; PAM sequence: AAG
ggagatatgaatttataata

SEQ ID NO: 35501 - DNA, 20 bp, Artificial Sequence
  Description of Artificial Sequence: Synthetic oligonucleotide
  Target: SCNA; (+) strand; PAM type: NRG; PAM sequence: GAG
agatatgaatttataataaa

SEQ ID NO: 35502 - DNA, 20 bp, Artificial Sequence
  Description of Artificial Sequence: Synthetic oligonucleotide
  Target: SCNA; (+) strand; PAM type: NRG; PAM sequence: AAG
aatttataataaagagtgac

SEQ ID NO: 35503 - DNA, 20 bp, Artificial Sequence
  Description of Artificial Sequence: Synthetic oligonucleotide
  Target: SCNA; (+) strand; PAM type: NRG; PAM sequence: TAG
tataataaagagtgacaagt

SEQ ID NO: 35504 - DNA, 20 bp, Artificial Sequence
  Description of Artificial Sequence: Synthetic oligonucleotide
  Target: SCNA; (+) strand; PAM type: NRG; PAM sequence: TGG
aataaagagtgacaagttag

SEQ ID NO: 35505 - DNA, 20 bp, Artificial Sequence
  Description of Artificial Sequence: Synthetic oligonucleotide
  Target: SCNA; (+) strand; PAM type: NRG; PAM sequence: AAG
aaataacattatactcaaaa

SEQ ID NO: 35506 - DNA, 20 bp, Artificial Sequence
  Description of Artificial Sequence: Synthetic oligonucleotide
  Target: SCNA; (+) strand; PAM type: NRG; PAM sequence: AAG
taacattatactcaaaaaag

SEQ ID NO: 35507 - DNA, 20 bp, Artificial Sequence
  Description of Artificial Sequence: Synthetic oligonucleotide
  Target: SCNA; (+) strand; PAM type: NRG; PAM sequence: TAG
ttatactcaaaaaagaagaa

SEQ ID NO: 35508 - DNA, 20 bp, Artificial Sequence
  Description of Artificial Sequence: Synthetic oligonucleotide
  Target: SCNA; (+) strand; PAM type: NRG; PAM sequence: GAG
atactcaaaaaagaagaata

SEQ ID NO: 35509 - DNA, 20 bp, Artificial Sequence
  Description of Artificial Sequence: Synthetic oligonucleotide
  Target: SCNA; (+) strand; PAM type: NRG; PAM sequence: AAG
aaagaagaatagagattgta

SEQ ID NO: 35510 - DNA, 20 bp, Artificial Sequence
  Description of Artificial Sequence: Synthetic oligonucleotide
  Target: SCNA; (+) strand; PAM type: NRG; PAM sequence: GAG
aatagagattgtaaagaaat

SEQ ID NO: 35511 - DNA, 20 bp, Artificial Sequence
  Description of Artificial Sequence: Synthetic oligonucleotide
  Target: SCNA; (+) strand; PAM type: NRG; PAM sequence: GAG
gattgtaaagaaatgagatt

SEQ ID NO: 35512 - DNA, 20 bp, Artificial Sequence
  Description of Artificial Sequence: Synthetic oligonucleotide
  Target: SCNA; (+) strand; PAM type: NRG; PAM sequence: AAG
agaaatgagattgagtccgt

SEQ ID NO: 35513 - DNA, 20 bp, Artificial Sequence
  Description of Artificial Sequence: Synthetic oligonucleotide
  Target: SCNA; (+) strand; PAM type: NRG; PAM sequence: CAG
taagtaatgtataactgtct

SEQ ID NO: 35514 - DNA, 20 bp, Artificial Sequence
  Description of Artificial Sequence: Synthetic oligonucleotide
  Target: SCNA; (+) strand; PAM type: NRG; PAM sequence: AAG
atttcattgtcataccttat

SEQ ID NO: 35515 - DNA, 20 bp, Artificial Sequence
  Description of Artificial Sequence: Synthetic oligonucleotide
  Target: SCNA; (+) strand; PAM type: NRG; PAM sequence: AAG
cattgtcataccttataagt

SEQ ID NO: 35516 - DNA, 20 bp, Artificial Sequence
  Description of Artificial Sequence: Synthetic oligonucleotide
  Target: SCNA; (+) strand; PAM type: NRG; PAM sequence: CAG
tgtcataccttataagtaag

SEQ ID NO: 35517 - DNA, 20 bp, Artificial Sequence
  Description of Artificial Sequence: Synthetic oligonucleotide
  Target: SCNA; (+) strand; PAM type: NRG; PAM sequence: AGG
gtcataccttataagtaagc

SEQ ID NO: 35518 - DNA, 20 bp, Artificial Sequence
  Description of Artificial Sequence: Synthetic oligonucleotide
  Target: SCNA; (+) strand; PAM type: NRG; PAM sequence: GGG
tcataccttataagtaagca

SEQ ID NO: 35519 - DNA, 20 bp, Artificial Sequence
  Description of Artificial Sequence: Synthetic oligonucleotide
  Target: SCNA; (+) strand; PAM type: NRG; PAM sequence: AAG
taccttataagtaagcaggg

SEQ ID NO: 35520 - DNA, 20 bp, Artificial Sequence
  Description of Artificial Sequence: Synthetic oligonucleotide
  Target: SCNA; (+) strand; PAM type: NRG; PAM sequence: TAG
agtaagcagggaagtacaaa

SEQ ID NO: 35521 - DNA, 20 bp, Artificial Sequence
  Description of Artificial Sequence: Synthetic oligonucleotide
  Target: SCNA; (+) strand; PAM type: NRG; PAM sequence: TAG
tagatgtgtacttattaatt

SEQ ID NO: 35522 - DNA, 20 bp, Artificial Sequence
  Description of Artificial Sequence: Synthetic oligonucleotide
  Target: SCNA; (+) strand; PAM type: NRG; PAM sequence: CAG
tacttattaatttagtcttt

SEQ ID NO: 35523 - DNA, 20 bp, Artificial Sequence
  Description of Artificial Sequence: Synthetic oligonucleotide
  Target: SCNA; (+) strand; PAM type: NRG; PAM sequence: GAG
tagtctttcagtcactcatt

SEQ ID NO: 35524 - DNA, 20 bp, Artificial Sequence
  Description of Artificial Sequence: Synthetic oligonucleotide
  Target: SCNA; (+) strand; PAM type: NRG; PAM sequence: GAG
cattgagtcaatcaattctt

SEQ ID NO: 35525 - DNA, 20 bp, Artificial Sequence
  Description of Artificial Sequence: Synthetic oligonucleotide
  Target: SCNA; (+) strand; PAM type: NRG; PAM sequence: AGG
attgagtcaatcaattcttg

SEQ ID NO: 35526 - DNA, 20 bp, Artificial Sequence
  Description of Artificial Sequence: Synthetic oligonucleotide
  Target: SCNA; (+) strand; PAM type: NRG; PAM sequence: AAG
cttgaggccaattgtttttg

SEQ ID NO: 35527 - DNA, 20 bp, Artificial Sequence
  Description of Artificial Sequence: Synthetic oligonucleotide
  Target: SCNA; (+) strand; PAM type: NRG; PAM sequence: AGG
ttgaggccaattgtttttga

SEQ ID NO: 35528 - DNA, 20 bp, Artificial Sequence
  Description of Artificial Sequence: Synthetic oligonucleotide
  Target: SCNA; (+) strand; PAM type: NRG; PAM sequence: TAG
tttgaaggcactgattgtgc

SEQ ID NO: 35529 - DNA, 20 bp, Artificial Sequence
  Description of Artificial Sequence: Synthetic oligonucleotide
  Target: SCNA; (+) strand; PAM type: NRG; PAM sequence: TGG
actgattgtgctagatactg

SEQ ID NO: 35530 - DNA, 20 bp, Artificial Sequence
  Description of Artificial Sequence: Synthetic oligonucleotide
  Target: SCNA; (+) strand; PAM type: NRG; PAM sequence: AAG
tagatactgtggatgttaca

SEQ ID NO: 35531 - DNA, 20 bp, Artificial Sequence
  Description of Artificial Sequence: Synthetic oligonucleotide
  Target: SCNA; (+) strand; PAM type: NRG; PAM sequence: AGG
agatactgtggatgttacaa

SEQ ID NO: 35532 - DNA, 20 bp, Artificial Sequence
  Description of Artificial Sequence: Synthetic oligonucleotide
  Target: SCNA; (+) strand; PAM type: NRG; PAM sequence: GAG
tgaataaaatgtcttaatct

SEQ ID NO: 35533 - DNA, 20 bp, Artificial Sequence
  Description of Artificial Sequence: Synthetic oligonucleotide
  Target: SCNA; (+) strand; PAM type: NRG; PAM sequence: AGG
gaataaaatgtcttaatctg

SEQ ID NO: 35534 - DNA, 20 bp, Artificial Sequence
  Description of Artificial Sequence: Synthetic oligonucleotide
  Target: SCNA; (+) strand; PAM type: NRG; PAM sequence: AAG
taaaatgtcttaatctgagg

SEQ ID NO: 35535 - DNA, 20 bp, Artificial Sequence
  Description of Artificial Sequence: Synthetic oligonucleotide
  Target: SCNA; (+) strand; PAM type: NRG; PAM sequence: CAG
ggaagaatttacaatctaca

SEQ ID NO: 35536 - DNA, 20 bp, Artificial Sequence
  Description of Artificial Sequence: Synthetic oligonucleotide
  Target: SCNA; (+) strand; PAM type: NRG; PAM sequence: AGG
gaagaatttacaatctacac

SEQ ID NO: 35537 - DNA, 20 bp, Artificial Sequence
  Description of Artificial Sequence: Synthetic oligonucleotide
  Target: SCNA; (+) strand; PAM type: NRG; PAM sequence: AAG
ctacacaggcatgaaaaaac

SEQ ID NO: 35538 - DNA, 20 bp, Artificial Sequence
  Description of Artificial Sequence: Synthetic oligonucleotide
  Target: SCNA; (+) strand; PAM type: NRG; PAM sequence: AGG
tacacaggcatgaaaaaaca

SEQ ID NO: 35539 - DNA, 20 bp, Artificial Sequence
  Description of Artificial Sequence: Synthetic oligonucleotide
  Target: SCNA; (+) strand; PAM type: NRG; PAM sequence: AAG
acaggcatgaaaaaacaagg

SEQ ID NO: 35540 - DNA, 20 bp, Artificial Sequence
  Description of Artificial Sequence: Synthetic oligonucleotide
  Target: SCNA; (+) strand; PAM type: NRG; PAM sequence: GAG
aggcatgaaaaaacaaggaa

SEQ ID NO: 35541 - DNA, 20 bp, Artificial Sequence
  Description of Artificial Sequence: Synthetic oligonucleotide
  Target: SCNA; (+) strand; PAM type: NRG; PAM sequence: TAG
tgaaaaaacaaggaagagtg

SEQ ID NO: 35542 - DNA, 20 bp, Artificial Sequence
  Description of Artificial Sequence: Synthetic oligonucleotide
  Target: SCNA; (+) strand; PAM type: NRG; PAM sequence: AGG
gaaaaaacaaggaagagtgt

SEQ ID NO: 35543 - DNA, 20 bp, Artificial Sequence
  Description of Artificial Sequence: Synthetic oligonucleotide
  Target: SCNA; (+) strand; PAM type: NRG; PAM sequence: AAG
acaaggaagagtgtaggtga

SEQ ID NO: 35544 - DNA, 20 bp, Artificial Sequence
  Description of Artificial Sequence: Synthetic oligonucleotide
  Target: SCNA; (+) strand; PAM type: NRG; PAM sequence: AGG
caaggaagagtgtaggtgaa

SEQ ID NO: 35545 - DNA, 20 bp, Artificial Sequence
  Description of Artificial Sequence: Synthetic oligonucleotide
  Target: SCNA; (+) strand; PAM type: NRG; PAM sequence: GGG
aaggaagagtgtaggtgaaa

SEQ ID NO: 35546 - DNA, 20 bp, Artificial Sequence
  Description of Artificial Sequence: Synthetic oligonucleotide
  Target: SCNA; (+) strand; PAM type: NRG; PAM sequence: AAG
aatttgaatgtgaaatcacc

SEQ ID NO: 35547 - DNA, 20 bp, Artificial Sequence
  Description of Artificial Sequence: Synthetic oligonucleotide
  Target: SCNA; (+) strand; PAM type: NRG; PAM sequence: AGG
atttgaatgtgaaatcacca

SEQ ID NO: 35548 - DNA, 20 bp, Artificial Sequence
  Description of Artificial Sequence: Synthetic oligonucleotide
  Target: SCNA; (+) strand; PAM type: NRG; PAM sequence: AAG
gtgaaatcaccaaggtcaca

SEQ ID NO: 35549 - DNA, 20 bp, Artificial Sequence
  Description of Artificial Sequence: Synthetic oligonucleotide
  Target: SCNA; (+) strand; PAM type: NRG; PAM sequence: CAG
ggtcacaaagcatgtctcct

SEQ ID NO: 35550 - DNA, 20 bp, Artificial Sequence
  Description of Artificial Sequence: Synthetic oligonucleotide
  Target: SCNA; (+) strand; PAM type: NRG; PAM sequence: TAG
aaagcatgtctcctcagtgc

SEQ ID NO: 35551 - DNA, 20 bp, Artificial Sequence
  Description of Artificial Sequence: Synthetic oligonucleotide
  Target: SCNA; (+) strand; PAM type: NRG; PAM sequence: AAG
atgtctcctcagtgctagcg

SEQ ID NO: 35552 - DNA, 20 bp, Artificial Sequence
  Description of Artificial Sequence: Synthetic oligonucleotide
  Target: SCNA; (+) strand; PAM type: NRG; PAM sequence: AGG
tgtctcctcagtgctagcga

SEQ ID NO: 35553 - DNA, 20 bp, Artificial Sequence
  Description of Artificial Sequence: Synthetic oligonucleotide
  Target: SCNA; (+) strand; PAM type: NRG; PAM sequence: TAG
gctagcgaaggactatataa

SEQ ID NO: 35554 - DNA, 20 bp, Artificial Sequence
  Description of Artificial Sequence: Synthetic oligonucleotide
  Target: SCNA; (+) strand; PAM type: NRG; PAM sequence: AGG
ctagcgaaggactatataat

SEQ ID NO: 35555 - DNA, 20 bp, Artificial Sequence
  Description of Artificial Sequence: Synthetic oligonucleotide
  Target: SCNA; (+) strand; PAM type: NRG; PAM sequence: AAG
atgtaattaaatgaaatttg

SEQ ID NO: 35556 - DNA, 20 bp, Artificial Sequence
  Description of Artificial Sequence: Synthetic oligonucleotide
  Target: SCNA; (+) strand; PAM type: NRG; PAM sequence: AAG
aattaaatgaaatttgaaga

SEQ ID NO: 35557 - DNA, 20 bp, Artificial Sequence
  Description of Artificial Sequence: Synthetic oligonucleotide
  Target: SCNA; (+) strand; PAM type: NRG; PAM sequence: CAG
taaatgaaatttgaagaaag

SEQ ID NO: 35558 - DNA, 20 bp, Artificial Sequence
  Description of Artificial Sequence: Synthetic oligonucleotide
  Target: SCNA; (+) strand; PAM type: NRG; PAM sequence: TGG
aaatgtctcacaatgctatg

SEQ ID NO: 35559 - DNA, 20 bp, Artificial Sequence
  Description of Artificial Sequence: Synthetic oligonucleotide
  Target: SCNA; (+) strand; PAM type: NRG; PAM sequence: AAG
tgtctcacaatgctatgtgg

SEQ ID NO: 35560 - DNA, 20 bp, Artificial Sequence
  Description of Artificial Sequence: Synthetic oligonucleotide
  Target: SCNA; (+) strand; PAM type: NRG; PAM sequence: TAG
caatgctatgtggaagttat

SEQ ID NO: 35561 - DNA, 20 bp, Artificial Sequence
  Description of Artificial Sequence: Synthetic oligonucleotide
  Target: SCNA; (+) strand; PAM type: NRG; PAM sequence: CAG
ttagaataacacccccttcc

SEQ ID NO: 35562 - DNA, 20 bp, Artificial Sequence
  Description of Artificial Sequence: Synthetic oligonucleotide
  Target: SCNA; (+) strand; PAM type: NRG; PAM sequence: TGG
ccagttcctaattgcattcc

SEQ ID NO: 35563 - DNA, 20 bp, Artificial Sequence
  Description of Artificial Sequence: Synthetic oligonucleotide
  Target: SCNA; (+) strand; PAM type: NRG; PAM sequence: TGG
aacattaactgctttattaa

SEQ ID NO: 35564 - DNA, 20 bp, Artificial Sequence
  Description of Artificial Sequence: Synthetic oligonucleotide
  Target: SCNA; (+) strand; PAM type: NRG; PAM sequence: TAG
tgctttattaatggctactt

SEQ ID NO: 35565 - DNA, 20 bp, Artificial Sequence
  Description of Artificial Sequence: Synthetic oligonucleotide
  Target: SCNA; (+) strand; PAM type: NRG; PAM sequence: AAG
tttattaatggctactttag

SEQ ID NO: 35566 - DNA, 20 bp, Artificial Sequence
  Description of Artificial Sequence: Synthetic oligonucleotide
  Target: SCNA; (+) strand; PAM type: NRG; PAM sequence: AGG
ttattaatggctactttaga

SEQ ID NO: 35567 - DNA, 20 bp, Artificial Sequence
  Description of Artificial Sequence: Synthetic oligonucleotide
  Target: SCNA; (+) strand; PAM type: NRG; PAM sequence: GAG
attaatggctactttagaag

SEQ ID NO: 35568 - DNA, 20 bp, Artificial Sequence
  Description of Artificial Sequence: Synthetic oligonucleotide
  Target: SCNA; (+) strand; PAM type: NRG; PAM sequence: AAG
ttagaaggagtgcattcatt

SEQ ID NO: 35569 - DNA, 20 bp, Artificial Sequence
  Description of Artificial Sequence: Synthetic oligonucleotide
  Target: SCNA; (+) strand; PAM type: NRG; PAM sequence: AGG
tagaaggagtgcattcatta

SEQ ID NO: 35570 - DNA, 20 bp, Artificial Sequence
  Description of Artificial Sequence: Synthetic oligonucleotide
  Target: SCNA; (+) strand; PAM type: NRG; PAM sequence: TGG
aaatcttacattcacatatt

SEQ ID NO: 35571 - DNA, 20 bp, Artificial Sequence
  Description of Artificial Sequence: Synthetic oligonucleotide
  Target: SCNA; (+) strand; PAM type: NRG; PAM sequence: GAG
cattcacatatttggattct

SEQ ID NO: 35572 - DNA, 20 bp, Artificial Sequence
  Description of Artificial Sequence: Synthetic oligonucleotide
  Target: SCNA; (+) strand; PAM type: NRG; PAM sequence: AAG
ttggattctgagttttaccc

SEQ ID NO: 35573 - DNA, 20 bp, Artificial Sequence
  Description of Artificial Sequence: Synthetic oligonucleotide
  Target: SCNA; (+) strand; PAM type: NRG; PAM sequence: TGG
gattctgagttttacccaag

SEQ ID NO: 35574 - DNA, 20 bp, Artificial Sequence
  Description of Artificial Sequence: Synthetic oligonucleotide
  Target: SCNA; (+) strand; PAM type: NRG; PAM sequence: TAG
tggcacacaaccataatttg

SEQ ID NO: 35575 - DNA, 20 bp, Artificial Sequence
  Description of Artificial Sequence: Synthetic oligonucleotide
  Target: SCNA; (+) strand; PAM type: NRG; PAM sequence: AGG
ggcacacaaccataatttgt

SEQ ID NO: 35576 - DNA, 20 bp, Artificial Sequence
  Description of Artificial Sequence: Synthetic oligonucleotide
  Target: SCNA; (+) strand; PAM type: NRG; PAM sequence: CAG
cacaaccataatttgtagga

SEQ ID NO: 35577 - DNA, 20 bp, Artificial Sequence
  Description of Artificial Sequence: Synthetic oligonucleotide
  Target: SCNA; (+) strand; PAM type: NRG; PAM sequence: AGG
acaaccataatttgtaggac

SEQ ID NO: 35578 - DNA, 20 bp, Artificial Sequence
  Description of Artificial Sequence: Synthetic oligonucleotide
  Target: SCNA; (+) strand; PAM type: NRG; PAM sequence: AAG
tttgtaggacaggtgaaata

SEQ ID NO: 35579 - DNA, 20 bp, Artificial Sequence
  Description of Artificial Sequence: Synthetic oligonucleotide
  Target: SCNA; (+) strand; PAM type: NRG; PAM sequence: TGG
aaataaagttcctactattc

SEQ ID NO: 35580 - DNA, 20 bp, Artificial Sequence
  Description of Artificial Sequence: Synthetic oligonucleotide
  Target: SCNA; (+) strand; PAM type: NRG; PAM sequence: TAG
tactattctggtactgtatc

SEQ ID NO: 35581 - DNA, 20 bp, Artificial Sequence
  Description of Artificial Sequence: Synthetic oligonucleotide
  Target: SCNA; (+) strand; PAM type: NRG; PAM sequence: GAG
tctggtactgtatctagact

SEQ ID NO: 35582 - DNA, 20 bp, Artificial Sequence
  Description of Artificial Sequence: Synthetic oligonucleotide
  Target: SCNA; (+) strand; PAM type: NRG; PAM sequence: TAG
tgagctttacatatttttaa

SEQ ID NO: 35583 - DNA, 20 bp, Artificial Sequence
  Description of Artificial Sequence: Synthetic oligonucleotide
  Target: SCNA; (+) strand; PAM type: NRG; PAM sequence: GAG
agcttttttttttttttttt

SEQ ID NO: 35584 - DNA, 20 bp, Artificial Sequence
  Description of Artificial Sequence: Synthetic oligonucleotide
  Target: SCNA; (+) strand; PAM type: NRG; PAM sequence: CAG
ttttttttttttttttgaga

SEQ ID NO: 35585 - DNA, 20 bp, Artificial Sequence
  Description of Artificial Sequence: Synthetic oligonucleotide
  Target: SCNA; (+) strand; PAM type: NRG; PAM sequence: GAG
ttttttttttttttgagaca

SEQ ID NO: 35586 - DNA, 20 bp, Artificial Sequence
  Description of Artificial Sequence: Synthetic oligonucleotide
  Target: SCNA; (+) strand; PAM type: NRG; PAM sequence: CAG
cagagccttgctctgtcacc

SEQ ID NO: 35587 - DNA, 20 bp, Artificial Sequence
  Description of Artificial Sequence: Synthetic oligonucleotide
  Target: SCNA; (+) strand; PAM type: NRG; PAM sequence: AGG
agagccttgctctgtcaccc

SEQ ID NO: 35588 - DNA, 20 bp, Artificial Sequence
  Description of Artificial Sequence: Synthetic oligonucleotide
  Target: SCNA; (+) strand; PAM type: NRG; PAM sequence: TGG
ccttgctctgtcacccaggc

SEQ ID NO: 35589 - DNA, 20 bp, Artificial Sequence
  Description of Artificial Sequence: Synthetic oligonucleotide
  Target: SCNA; (+) strand; PAM type: NRG; PAM sequence: GAG
ttgctctgtcacccaggctg

SEQ ID NO: 35590 - DNA, 20 bp, Artificial Sequence
  Description of Artificial Sequence: Synthetic oligonucleotide
  Target: SCNA; (+) strand; PAM type: NRG; PAM sequence: CAG
ctgtcacccaggctggagtg

SEQ ID NO: 35591 - DNA, 20 bp, Artificial Sequence
  Description of Artificial Sequence: Synthetic oligonucleotide
  Target: SCNA; (+) strand; PAM type: NRG; PAM sequence: TGG
tcacccaggctggagtgcag

SEQ ID NO: 35592 - DNA, 20 bp, Artificial Sequence
  Description of Artificial Sequence: Synthetic oligonucleotide
  Target: SCNA; (+) strand; PAM type: NRG; PAM sequence: GAG
tactgcaacctccaccttct

SEQ ID NO: 35593 - DNA, 20 bp, Artificial Sequence
  Description of Artificial Sequence: Synthetic oligonucleotide
  Target: SCNA; (+) strand; PAM type: NRG; PAM sequence: CAG
caacctccaccttctgagtt

SEQ ID NO: 35594 - DNA, 20 bp, Artificial Sequence
  Description of Artificial Sequence: Synthetic oligonucleotide
  Target: SCNA; (+) strand; PAM type: NRG; PAM sequence: AGG
aacctccaccttctgagttc

SEQ ID NO: 35595 - DNA, 20 bp, Artificial Sequence
  Description of Artificial Sequence: Synthetic oligonucleotide
  Target: SCNA; (+) strand; PAM type: NRG; PAM sequence: CAG
ttcaggcgattctcatgcct

SEQ ID NO: 35596 - DNA, 20 bp, Artificial Sequence
  Description of Artificial Sequence: Synthetic oligonucleotide
  Target: SCNA; (+) strand; PAM type: NRG; PAM sequence: GAG
ttctcatgcctcagtctccc

SEQ ID NO: 35597 - DNA, 20 bp, Artificial Sequence
  Description of Artificial Sequence: Synthetic oligonucleotide
  Target: SCNA; (+) strand; PAM type: NRG; PAM sequence: TAG
tcatgcctcagtctcccgag

SEQ ID NO: 35598 - DNA, 20 bp, Artificial Sequence
  Description of Artificial Sequence: Synthetic oligonucleotide
  Target: SCNA; (+) strand; PAM type: NRG; PAM sequence: AAG
tcccgagtagttgtgattac

SEQ ID NO: 35599 - DNA, 20 bp, Artificial Sequence
  Description of Artificial Sequence: Synthetic oligonucleotide
  Target: SCNA; (+) strand; PAM type: NRG; PAM sequence: GAG
gtagttgtgattacaagcat

SEQ ID NO: 35600 - DNA, 20 bp, Artificial Sequence
  Description of Artificial Sequence: Synthetic oligonucleotide
  Target: SCNA; (+) strand; PAM type: NRG; PAM sequence: TAG
tttttttttttttgtatttt

SEQ ID NO: 35601 - DNA, 20 bp, Artificial Sequence
  Description of Artificial Sequence: Synthetic oligonucleotide
  Target: SCNA; (+) strand; PAM type: NRG; PAM sequence: TAG
ttttttttttgtatttttag

SEQ ID NO: 35602 - DNA, 20 bp, Artificial Sequence
  Description of Artificial Sequence: Synthetic oligonucleotide
  Target: SCNA; (+) strand; PAM type: NRG; PAM sequence: GAG
ttttttttgtatttttagta

SEQ ID NO: 35603 - DNA, 20 bp, Artificial Sequence
  Description of Artificial Sequence: Synthetic oligonucleotide
  Target: SCNA; (+) strand; PAM type: NRG; PAM sequence: CAG
ttttgtatttttagtagaga

SEQ ID NO: 35604 - DNA, 20 bp, Artificial Sequence
  Description of Artificial Sequence: Synthetic oligonucleotide
  Target: SCNA; (+) strand; PAM type: NRG; PAM sequence: AGG
tttgtatttttagtagagac

SEQ ID NO: 35605 - DNA, 20 bp, Artificial Sequence
  Description of Artificial Sequence: Synthetic oligonucleotide
  Target: SCNA; (+) strand; PAM type: NRG; PAM sequence: TGG
gagacaggatttcaccatgt

SEQ ID NO: 35606 - DNA, 20 bp, Artificial Sequence
  Description of Artificial Sequence: Synthetic oligonucleotide
  Target: SCNA; (+) strand; PAM type: NRG; PAM sequence: CAG
caggatttcaccatgttggc

SEQ ID NO: 35607 - DNA, 20 bp, Artificial Sequence
  Description of Artificial Sequence: Synthetic oligonucleotide
  Target: SCNA; (+) strand; PAM type: NRG; PAM sequence: AGG
aggatttcaccatgttggcc

SEQ ID NO: 35608 - DNA, 20 bp, Artificial Sequence
  Description of Artificial Sequence: Synthetic oligonucleotide
  Target: SCNA; (+) strand; PAM type: NRG; PAM sequence: TGG
tttcaccatgttggccaggc

SEQ ID NO: 35609 - DNA, 20 bp, Artificial Sequence
  Description of Artificial Sequence: Synthetic oligonucleotide
  Target: SCNA; (+) strand; PAM type: NRG; PAM sequence: TGG
ccaggctggtctcgaactcc

SEQ ID NO: 35610 - DNA, 20 bp, Artificial Sequence
  Description of Artificial Sequence: Synthetic oligonucleotide
  Target: SCNA; (+) strand; PAM type: NRG; PAM sequence: AAG
ggtctcgaactcctggcctc

SEQ ID NO: 35611 - DNA, 20 bp, Artificial Sequence
  Description of Artificial Sequence: Synthetic oligonucleotide
  Target: SCNA; (+) strand; PAM type: NRG; PAM sequence: GAG
ctcctggcctcaagtgatct

SEQ ID NO: 35612 - DNA, 20 bp, Artificial Sequence
  Description of Artificial Sequence: Synthetic oligonucleotide
  Target: SCNA; (+) strand; PAM type: NRG; PAM sequence: AGG
tcctggcctcaagtgatctg

SEQ ID NO: 35613 - DNA, 20 bp, Artificial Sequence
  Description of Artificial Sequence: Synthetic oligonucleotide
  Target: SCNA; (+) strand; PAM type: NRG; PAM sequence: GGG
cctggcctcaagtgatctga

SEQ ID NO: 35614 - DNA, 20 bp, Artificial Sequence
  Description of Artificial Sequence: Synthetic oligonucleotide
  Target: SCNA; (+) strand; PAM type: NRG; PAM sequence: AAG
ctgagggtcttgacttccca

SEQ ID NO: 35615 - DNA, 20 bp, Artificial Sequence
  Description of Artificial Sequence: Synthetic oligonucleotide
  Target: SCNA; (+) strand; PAM type: NRG; PAM sequence: GAG
tcttgacttcccaaagtgct

SEQ ID NO: 35616 - DNA, 20 bp, Artificial Sequence
  Description of Artificial Sequence: Synthetic oligonucleotide
  Target: SCNA; (+) strand; PAM type: NRG; PAM sequence: TGG
tcccaaagtgctgagattac

SEQ ID NO: 35617 - DNA, 20 bp, Artificial Sequence
  Description of Artificial Sequence: Synthetic oligonucleotide
  Target: SCNA; (+) strand; PAM type: NRG; PAM sequence: AAG
agtgctgagattactggtat

SEQ ID NO: 35618 - DNA, 20 bp, Artificial Sequence
  Description of Artificial Sequence: Synthetic oligonucleotide
  Target: SCNA; (+) strand; PAM type: NRG; PAM sequence: TAG
aagccatcacacctgaccaa

SEQ ID NO: 35619 - DNA, 20 bp, Artificial Sequence
  Description of Artificial Sequence: Synthetic oligonucleotide
  Target: SCNA; (+) strand; PAM type: NRG; PAM sequence: AAG
ccaatagcttgtatttttga

SEQ ID NO: 35620 - DNA, 20 bp, Artificial Sequence
  Description of Artificial Sequence: Synthetic oligonucleotide
  Target: SCNA; (+) strand; PAM type: NRG; PAM sequence: AAG
atagcttgtatttttgaaag

SEQ ID NO: 35621 - DNA, 20 bp, Artificial Sequence
  Description of Artificial Sequence: Synthetic oligonucleotide
  Target: SCNA; (+) strand; PAM type: NRG; PAM sequence: TAG
tgtatttttgaaagaagttt

SEQ ID NO: 35622 - DNA, 20 bp, Artificial Sequence
  Description of Artificial Sequence: Synthetic oligonucleotide
  Target: SCNA; (+) strand; PAM type: NRG; PAM sequence: AGG
gtatttttgaaagaagtttt

SEQ ID NO: 35623 - DNA, 20 bp, Artificial Sequence
  Description of Artificial Sequence: Synthetic oligonucleotide
  Target: SCNA; (+) strand; PAM type: NRG; PAM sequence: TGG
tgaaagaagttttaggtttg

SEQ ID NO: 35624 - DNA, 20 bp, Artificial Sequence
  Description of Artificial Sequence: Synthetic oligonucleotide
  Target: SCNA; (+) strand; PAM type: NRG; PAM sequence: GAG
gtttgtggaataattgtact

SEQ ID NO: 35625 - DNA, 20 bp, Artificial Sequence
  Description of Artificial Sequence: Synthetic oligonucleotide
  Target: SCNA; (+) strand; PAM type: NRG; PAM sequence: CAG
gaataattgtactgagatta

SEQ ID NO: 35626 - DNA, 20 bp, Artificial Sequence
  Description of Artificial Sequence: Synthetic oligonucleotide
  Target: SCNA; (+) strand; PAM type: NRG; PAM sequence: TAG
ctattattataattttgcat

SEQ ID NO: 35627 - DNA, 20 bp, Artificial Sequence
  Description of Artificial Sequence: Synthetic oligonucleotide
  Target: SCNA; (+) strand; PAM type: NRG; PAM sequence: TGG
attataattttgcattagtg

SEQ ID NO: 35628 - DNA, 20 bp, Artificial Sequence
  Description of Artificial Sequence: Synthetic oligonucleotide
  Target: SCNA; (+) strand; PAM type: NRG; PAM sequence: AAG
ttgataccttattacaacta

SEQ ID NO: 35629 - DNA, 20 bp, Artificial Sequence
  Description of Artificial Sequence: Synthetic oligonucleotide
  Target: SCNA; (+) strand; PAM type: NRG; PAM sequence: TAG
cttattacaactaaagtcca

SEQ ID NO: 35630 - DNA, 20 bp, Artificial Sequence
  Description of Artificial Sequence: Synthetic oligonucleotide
  Target: SCNA; (+) strand; PAM type: NRG; PAM sequence: TAG
ctaaagtccatagtttatat

SEQ ID NO: 35631 - DNA, 20 bp, Artificial Sequence
  Description of Artificial Sequence: Synthetic oligonucleotide
  Target: SCNA; (+) strand; PAM type: NRG; PAM sequence: GAG
actctgtattgtaaaattct

SEQ ID NO: 35632 - DNA, 20 bp, Artificial Sequence
  Description of Artificial Sequence: Synthetic oligonucleotide
  Target: SCNA; (+) strand; PAM type: NRG; PAM sequence: AAG
taaaattctgagttttaaca

SEQ ID NO: 35633 - DNA, 20 bp, Artificial Sequence
  Description of Artificial Sequence: Synthetic oligonucleotide
  Target: SCNA; (+) strand; PAM type: NRG; PAM sequence: AGG
aaaattctgagttttaacaa

SEQ ID NO: 35634 - DNA, 20 bp, Artificial Sequence
  Description of Artificial Sequence: Synthetic oligonucleotide
  Target: SCNA; (+) strand; PAM type: NRG; PAM sequence: AAG
ctgagttttaacaaaggtat

SEQ ID NO: 35635 - DNA, 20 bp, Artificial Sequence
  Description of Artificial Sequence: Synthetic oligonucleotide
  Target: SCNA; (+) strand; PAM type: NRG; PAM sequence: AGG
tgagttttaacaaaggtata

SEQ ID NO: 35636 - DNA, 20 bp, Artificial Sequence
  Description of Artificial Sequence: Synthetic oligonucleotide
  Target: SCNA; (+) strand; PAM type: NRG; PAM sequence: CAG
aggtcatgtatccaccatga

SEQ ID NO: 35637 - DNA, 20 bp, Artificial Sequence
  Description of Artificial Sequence: Synthetic oligonucleotide
  Target: SCNA; (+) strand; PAM type: NRG; PAM sequence: TAG
tatccaccatgacagtatca

SEQ ID NO: 35638 - DNA, 20 bp, Artificial Sequence
  Description of Artificial Sequence: Synthetic oligonucleotide
  Target: SCNA; (+) strand; PAM type: NRG; PAM sequence: GAG
tccaccatgacagtatcata

SEQ ID NO: 35639 - DNA, 20 bp, Artificial Sequence
  Description of Artificial Sequence: Synthetic oligonucleotide
  Target: SCNA; (+) strand; PAM type: NRG; PAM sequence: TAG
catgacagtatcatagagaa

SEQ ID NO: 35640 - DNA, 20 bp, Artificial Sequence
  Description of Artificial Sequence: Synthetic oligonucleotide
  Target: SCNA; (+) strand; PAM type: NRG; PAM sequence: CAG
ttcatccctctgcactttct

SEQ ID NO: 35641 - DNA, 20 bp, Artificial Sequence
  Description of Artificial Sequence: Synthetic oligonucleotide
  Target: SCNA; (+) strand; PAM type: NRG; PAM sequence: GAG
catccctctgcactttctca

SEQ ID NO: 35642 - DNA, 20 bp, Artificial Sequence
  Description of Artificial Sequence: Synthetic oligonucleotide
  Target: SCNA; (+) strand; PAM type: NRG; PAM sequence: CAG
tctgcactttctcagagccc

SEQ ID NO: 35643 - DNA, 20 bp, Artificial Sequence
  Description of Artificial Sequence: Synthetic oligonucleotide
  Target: SCNA; (+) strand; PAM type: NRG; PAM sequence: AGG
ctgcactttctcagagcccc

SEQ ID NO: 35644 - DNA, 20 bp, Artificial Sequence
  Description of Artificial Sequence: Synthetic oligonucleotide
  Target: SCNA; (+) strand; PAM type: NRG; PAM sequence: CAG
actgatctttttactgtctc

SEQ ID NO: 35645 - DNA, 20 bp, Artificial Sequence
  Description of Artificial Sequence: Synthetic oligonucleotide
  Target: SCNA; (+) strand; PAM type: NRG; PAM sequence: CAG
ctccagaattttgtctcttt

SEQ ID NO: 35646 - DNA, 20 bp, Artificial Sequence
  Description of Artificial Sequence: Synthetic oligonucleotide
  Target: SCNA; (+) strand; PAM type: NRG; PAM sequence: TGG
tctttcagaatgtcatatat

SEQ ID NO: 35647 - DNA, 20 bp, Artificial Sequence
  Description of Artificial Sequence: Synthetic oligonucleotide
  Target: SCNA; (+) strand; PAM type: NRG; PAM sequence: TAG
tgtcatatattggaatcata

SEQ ID NO: 35648 - DNA, 20 bp, Artificial Sequence
  Description of Artificial Sequence: Synthetic oligonucleotide
  Target: SCNA; (+) strand; PAM type: NRG; PAM sequence: TGG
tagaatgcaacctttcaaac

SEQ ID NO: 35649 - DNA, 20 bp, Artificial Sequence
  Description of Artificial Sequence: Synthetic oligonucleotide
  Target: SCNA; (+) strand; PAM type: NRG; PAM sequence: AAG
tcaaactggcttacgtacct

SEQ ID NO: 35650 - DNA, 20 bp, Artificial Sequence
  Description of Artificial Sequence: Synthetic oligonucleotide
  Target: SCNA; (+) strand; PAM type: NRG; PAM sequence: TGG
gttttctccatgtgtttttg

SEQ ID NO: 35651 - DNA, 20 bp, Artificial Sequence
  Description of Artificial Sequence: Synthetic oligonucleotide
  Target: SCNA; (+) strand; PAM type: NRG; PAM sequence: TAG
catgtgtttttgtggcttga

SEQ ID NO: 35652 - DNA, 20 bp, Artificial Sequence
  Description of Artificial Sequence: Synthetic oligonucleotide
  Target: SCNA; (+) strand; PAM type: NRG; PAM sequence: GAG
tcactgaataatattccatt

SEQ ID NO: 35653 - DNA, 20 bp, Artificial Sequence
  Description of Artificial Sequence: Synthetic oligonucleotide
  Target: SCNA; (+) strand; PAM type: NRG; PAM sequence: CAG
attccattgagtacatgtgc

SEQ ID NO: 35654 - DNA, 20 bp, Artificial Sequence
  Description of Artificial Sequence: Synthetic oligonucleotide
  Target: SCNA; (+) strand; PAM type: NRG; PAM sequence: GAG
tttttgttcattcacctatt

SEQ ID NO: 35655 - DNA, 20 bp, Artificial Sequence
  Description of Artificial Sequence: Synthetic oligonucleotide
  Target: SCNA; (+) strand; PAM type: NRG; PAM sequence: AGG
ttttgttcattcacctattg

SEQ ID NO: 35656 - DNA, 20 bp, Artificial Sequence
  Description of Artificial Sequence: Synthetic oligonucleotide
  Target: SCNA; (+) strand; PAM type: NRG; PAM sequence: TGG
tcacctattgaggaacatct

SEQ ID NO: 35657 - DNA, 20 bp, Artificial Sequence
  Description of Artificial Sequence: Synthetic oligonucleotide
  Target: SCNA; (+) strand; PAM type: NRG; PAM sequence: AAG
ggaacatcttggttgcttcc

SEQ ID NO: 35658 - DNA, 20 bp, Artificial Sequence
  Description of Artificial Sequence: Synthetic oligonucleotide
  Target: SCNA; (+) strand; PAM type: NRG; PAM sequence: TGG
tcttggttgcttccaagttt

SEQ ID NO: 35659 - DNA, 20 bp, Artificial Sequence
  Description of Artificial Sequence: Synthetic oligonucleotide
  Target: SCNA; (+) strand; PAM type: NRG; PAM sequence: AAG
agttttggcaattatgaata

SEQ ID NO: 35660 - DNA, 20 bp, Artificial Sequence
  Description of Artificial Sequence: Synthetic oligonucleotide
  Target: SCNA; (+) strand; PAM type: NRG; PAM sequence: CAG
ctgctataaacgtgcatgtg

SEQ ID NO: 35661 - DNA, 20 bp, Artificial Sequence
  Description of Artificial Sequence: Synthetic oligonucleotide
  Target: SCNA; (+) strand; PAM type: NRG; PAM sequence: AGG
tgctataaacgtgcatgtgc

SEQ ID NO: 35662 - DNA, 20 bp, Artificial Sequence
  Description of Artificial Sequence: Synthetic oligonucleotide
  Target: SCNA; (+) strand; PAM type: NRG; PAM sequence: TGG
aaacgtgcatgtgcaggttt

SEQ ID NO: 35663 - DNA, 20 bp, Artificial Sequence
  Description of Artificial Sequence: Synthetic oligonucleotide
  Target: SCNA; (+) strand; PAM type: NRG; PAM sequence: TGG
tgcatgtgcaggttttggtg

SEQ ID NO: 35664 - DNA, 20 bp, Artificial Sequence
  Description of Artificial Sequence: Synthetic oligonucleotide
  Target: SCNA; (+) strand; PAM type: NRG; PAM sequence: CAG
tgcaggttttggtgtggaca

SEQ ID NO: 35665 - DNA, 20 bp, Artificial Sequence
  Description of Artificial Sequence: Synthetic oligonucleotide
  Target: SCNA; (+) strand; PAM type: NRG; PAM sequence: TGG
gacacagtttacatttcctt

SEQ ID NO: 35666 - DNA, 20 bp, Artificial Sequence
  Description of Artificial Sequence: Synthetic oligonucleotide
  Target: SCNA; (+) strand; PAM type: NRG; PAM sequence: GGG
acacagtttacatttccttt

SEQ ID NO: 35667 - DNA, 20 bp, Artificial Sequence
  Description of Artificial Sequence: Synthetic oligonucleotide
  Target: SCNA; (+) strand; PAM type: NRG; PAM sequence: TAG
tcctttgggtgaatatcatg

SEQ ID NO: 35668 - DNA, 20 bp, Artificial Sequence
  Description of Artificial Sequence: Synthetic oligonucleotide
  Target: SCNA; (+) strand; PAM type: NRG; PAM sequence: TGG
aatatcatgtagcatgattt

SEQ ID NO: 35669 - DNA, 20 bp, Artificial Sequence
  Description of Artificial Sequence: Synthetic oligonucleotide
  Target: SCNA; (+) strand; PAM type: NRG; PAM sequence: TGG
tagcatgattttggatcata

SEQ ID NO: 35670 - DNA, 20 bp, Artificial Sequence
  Description of Artificial Sequence: Synthetic oligonucleotide
  Target: SCNA; (+) strand; PAM type: NRG; PAM sequence: TGG
ttttggatcatatggtgata

SEQ ID NO: 35671 - DNA, 20 bp, Artificial Sequence
  Description of Artificial Sequence: Synthetic oligonucleotide
  Target: SCNA; (+) strand; PAM type: NRG; PAM sequence: TAG
ggatcatatggtgatatggt

SEQ ID NO: 35672 - DNA, 20 bp, Artificial Sequence
  Description of Artificial Sequence: Synthetic oligonucleotide
  Target: SCNA; (+) strand; PAM type: NRG; PAM sequence: AGG
gatcatatggtgatatggtt

SEQ ID NO: 35673 - DNA, 20 bp, Artificial Sequence
  Description of Artificial Sequence: Synthetic oligonucleotide
  Target: SCNA; (+) strand; PAM type: NRG; PAM sequence: AAG
ccccataatccccacatgtc

SEQ ID NO: 35674 - DNA, 20 bp, Artificial Sequence
  Description of Artificial Sequence: Synthetic oligonucleotide
  Target: SCNA; (+) strand; PAM type: NRG; PAM sequence: AGG
cccataatccccacatgtca

SEQ ID NO: 35675 - DNA, 20 bp, Artificial Sequence
  Description of Artificial Sequence: Synthetic oligonucleotide
  Target: SCNA; (+) strand; PAM type: NRG; PAM sequence: GGG
ccataatccccacatgtcaa

SEQ ID NO: 35676 - DNA, 20 bp, Artificial Sequence
  Description of Artificial Sequence: Synthetic oligonucleotide
  Target: SCNA; (+) strand; PAM type: NRG; PAM sequence: GAG
ataatccccacatgtcaagg

SEQ ID NO: 35677 - DNA, 20 bp, Artificial Sequence
  Description of Artificial Sequence: Synthetic oligonucleotide
  Target: SCNA; (+) strand; PAM type: NRG; PAM sequence: GAG
aatccccacatgtcaaggga

SEQ ID NO: 35678 - DNA, 20 bp, Artificial Sequence
  Description of Artificial Sequence: Synthetic oligonucleotide
  Target: SCNA; (+) strand; PAM type: NRG; PAM sequence: CAG
ccacatgtcaagggagagac

SEQ ID NO: 35679 - DNA, 20 bp, Artificial Sequence
  Description of Artificial Sequence: Synthetic oligonucleotide
  Target: SCNA; (+) strand; PAM type: NRG; PAM sequence: AGG
cacatgtcaagggagagacc

SEQ ID NO: 35680 - DNA, 20 bp, Artificial Sequence
  Description of Artificial Sequence: Synthetic oligonucleotide
  Target: SCNA; (+) strand; PAM type: NRG; PAM sequence: TGG
atgtcaagggagagaccagg

SEQ ID NO: 35681 - DNA, 20 bp, Artificial Sequence
  Description of Artificial Sequence: Synthetic oligonucleotide
  Target: SCNA; (+) strand; PAM type: NRG; PAM sequence: GAG
gtcaagggagagaccaggtg

SEQ ID NO: 35682 - DNA, 20 bp, Artificial Sequence
  Description of Artificial Sequence: Synthetic oligonucleotide
  Target: SCNA; (+) strand; PAM type: NRG; PAM sequence: AGG
tcaagggagagaccaggtgg

SEQ ID NO: 35683 - DNA, 20 bp, Artificial Sequence
  Description of Artificial Sequence: Synthetic oligonucleotide
  Target: SCNA; (+) strand; PAM type: NRG; PAM sequence: TAG
agagaccaggtggaggtaac

SEQ ID NO: 35684 - DNA, 20 bp, Artificial Sequence
  Description of Artificial Sequence: Synthetic oligonucleotide
  Target: SCNA; (+) strand; PAM type: NRG; PAM sequence: GAG
ggtggaggtaactagatcat

SEQ ID NO: 35685 - DNA, 20 bp, Artificial Sequence
  Description of Artificial Sequence: Synthetic oligonucleotide
  Target: SCNA; (+) strand; PAM type: NRG; PAM sequence: GAG
tggaggtaactagatcatga

SEQ ID NO: 35686 - DNA, 20 bp, Artificial Sequence
  Description of Artificial Sequence: Synthetic oligonucleotide
  Target: SCNA; (+) strand; PAM type: NRG; PAM sequence: TAG
cccccatgctgttctcatga

SEQ ID NO: 35687 - DNA, 20 bp, Artificial Sequence
  Description of Artificial Sequence: Synthetic oligonucleotide
  Target: SCNA; (+) strand; PAM type: NRG; PAM sequence: GAG
catgctgttctcatgatagc

SEQ ID NO: 35688 - DNA, 20 bp, Artificial Sequence
  Description of Artificial Sequence: Synthetic oligonucleotide
  Target: SCNA; (+) strand; PAM type: NRG; PAM sequence: GAG
ctgttctcatgatagcgagt

SEQ ID NO: 35689 - DNA, 20 bp, Artificial Sequence
  Description of Artificial Sequence: Synthetic oligonucleotide
  Target: SCNA; (+) strand; PAM type: NRG; PAM sequence: GAG
gatagcgagtgagttctcac

SEQ ID NO: 35690 - DNA, 20 bp, Artificial Sequence
  Description of Artificial Sequence: Synthetic oligonucleotide
  Target: SCNA; (+) strand; PAM type: NRG; PAM sequence: GAG
tagcgagtgagttctcacga

SEQ ID NO: 35691 - DNA, 20 bp, Artificial Sequence
  Description of Artificial Sequence: Synthetic oligonucleotide
  Target: SCNA; (+) strand; PAM type: NRG; PAM sequence: TGG
tgagttctcacgagagctaa

SEQ ID NO: 35692 - DNA, 20 bp, Artificial Sequence
  Description of Artificial Sequence: Synthetic oligonucleotide
  Target: SCNA; (+) strand; PAM type: NRG; PAM sequence: TGG
agctaatggttttatgtgtt

SEQ ID NO: 35693 - DNA, 20 bp, Artificial Sequence
  Description of Artificial Sequence: Synthetic oligonucleotide
  Target: SCNA; (+) strand; PAM type: NRG; PAM sequence: TAG
taatggttttatgtgtttgg

SEQ ID NO: 35694 - DNA, 20 bp, Artificial Sequence
  Description of Artificial Sequence: Synthetic oligonucleotide
  Target: SCNA; (+) strand; PAM type: NRG; PAM sequence: AAG
ctccttcctgtcaccttgtg

SEQ ID NO: 35695 - DNA, 20 bp, Artificial Sequence
  Description of Artificial Sequence: Synthetic oligonucleotide
  Target: SCNA; (+) strand; PAM type: NRG; PAM sequence: TAG
cttcctgtcaccttgtgaag

SEQ ID NO: 35696 - DNA, 20 bp, Artificial Sequence
  Description of Artificial Sequence: Synthetic oligonucleotide
  Target: SCNA; (+) strand; PAM type: NRG; PAM sequence: AGG
ttcctgtcaccttgtgaagt

SEQ ID NO: 35697 - DNA, 20 bp, Artificial Sequence
  Description of Artificial Sequence: Synthetic oligonucleotide
  Target: SCNA; (+) strand; PAM type: NRG; PAM sequence: AAG
tctccttccaccatgattat

SEQ ID NO: 35698 - DNA, 20 bp, Artificial Sequence
  Description of Artificial Sequence: Synthetic oligonucleotide
  Target: SCNA; (+) strand; PAM type: NRG; PAM sequence: GAG
accatgattataagctttct

SEQ ID NO: 35699 - DNA, 20 bp, Artificial Sequence
  Description of Artificial Sequence: Synthetic oligonucleotide
  Target: SCNA; (+) strand; PAM type: NRG; PAM sequence: AGG
ccatgattataagctttctg

SEQ ID NO: 35700 - DNA, 20 bp, Artificial Sequence
  Description of Artificial Sequence: Synthetic oligonucleotide
  Target: SCNA; (+) strand; PAM type: NRG; PAM sequence: CAG
taagctttctgaggcctcct

SEQ ID NO: 35701 - DNA, 20 bp, Artificial Sequence
  Description of Artificial Sequence: Synthetic oligonucleotide
  Target: SCNA; (+) strand; PAM type: NRG; PAM sequence: GAG
gaggcctcctcagccatgct

SEQ ID NO: 35702 - DNA, 20 bp, Artificial Sequence
  Description of Artificial Sequence: Synthetic oligonucleotide
  Target: SCNA; (+) strand; PAM type: NRG; PAM sequence: GAG
cctcagccatgctgagctgt

SEQ ID NO: 35703 - DNA, 20 bp, Artificial Sequence
  Description of Artificial Sequence: Synthetic oligonucleotide
  Target: SCNA; (+) strand; PAM type: NRG; PAM sequence: CAG
tctttcctttataaatttcc

SEQ ID NO: 35704 - DNA, 20 bp, Artificial Sequence
  Description of Artificial Sequence: Synthetic oligonucleotide
  Target: SCNA; (+) strand; PAM type: NRG; PAM sequence: CGG
ctttataaatttcccagtct

SEQ ID NO: 35705 - DNA, 20 bp, Artificial Sequence
  Description of Artificial Sequence: Synthetic oligonucleotide
  Target: SCNA; (+) strand; PAM type: NRG; PAM sequence: GGG
tttataaatttcccagtctc

SEQ ID NO: 35706 - DNA, 20 bp, Artificial Sequence
  Description of Artificial Sequence: Synthetic oligonucleotide
  Target: SCNA; (+) strand; PAM type: NRG; PAM sequence: TAG
cagtctcgggaacttctttt

SEQ ID NO: 35707 - DNA, 20 bp, Artificial Sequence
  Description of Artificial Sequence: Synthetic oligonucleotide
  Target: SCNA; (+) strand; PAM type: NRG; PAM sequence: TGG
tctttttagcactgtgaaaa

SEQ ID NO: 35708 - DNA, 20 bp, Artificial Sequence
  Description of Artificial Sequence: Synthetic oligonucleotide
  Target: SCNA; (+) strand; PAM type: NRG; PAM sequence: AAG
aatggacaaatatatatgtt

SEQ ID NO: 35709 - DNA, 20 bp, Artificial Sequence
  Description of Artificial Sequence: Synthetic oligonucleotide
  Target: SCNA; (+) strand; PAM type: NRG; PAM sequence: TAG
acaaatatatatgttaagta

SEQ ID NO: 35710 - DNA, 20 bp, Artificial Sequence
  Description of Artificial Sequence: Synthetic oligonucleotide
  Target: SCNA; (+) strand; PAM type: NRG; PAM sequence: TAG
tatatatgttaagtatagtt

SEQ ID NO: 35711 - DNA, 20 bp, Artificial Sequence
  Description of Artificial Sequence: Synthetic oligonucleotide
  Target: SCNA; (+) strand; PAM type: NRG; PAM sequence: AAG
taagtatagtttagcttcgt

SEQ ID NO: 35712 - DNA, 20 bp, Artificial Sequence
  Description of Artificial Sequence: Synthetic oligonucleotide
  Target: SCNA; (+) strand; PAM type: NRG; PAM sequence: AAG
aattgtcaacctatcttcca

SEQ ID NO: 35713 - DNA, 20 bp, Artificial Sequence
  Description of Artificial Sequence: Synthetic oligonucleotide
  Target: SCNA; (+) strand; PAM type: NRG; PAM sequence: CAG
actgtaccattttgtattgc

SEQ ID NO: 35714 - DNA, 20 bp, Artificial Sequence
  Description of Artificial Sequence: Synthetic oligonucleotide
  Target: SCNA; (+) strand; PAM type: NRG; PAM sequence: TAG
ccattttgtattgccagcat

SEQ ID NO: 35715 - DNA, 20 bp, Artificial Sequence
  Description of Artificial Sequence: Synthetic oligonucleotide
  Target: SCNA; (+) strand; PAM type: NRG; PAM sequence: AAG
cagcattagtgaatgaatga

SEQ ID NO: 35716 - DNA, 20 bp, Artificial Sequence
  Description of Artificial Sequence: Synthetic oligonucleotide
  Target: SCNA; (+) strand; PAM type: NRG; PAM sequence: CAG
cttgttgctccacatctcac

SEQ ID NO: 35717 - DNA, 20 bp, Artificial Sequence
  Description of Artificial Sequence: Synthetic oligonucleotide
  Target: SCNA; (+) strand; PAM type: NRG; PAM sequence: TGG
tcaccagcatgctgtgctct

SEQ ID NO: 35718 - DNA, 20 bp, Artificial Sequence
  Description of Artificial Sequence: Synthetic oligonucleotide
  Target: SCNA; (+) strand; PAM type: NRG; PAM sequence: TGG
atgctgtgctcttggtgttt

SEQ ID NO: 35719 - DNA, 20 bp, Artificial Sequence
  Description of Artificial Sequence: Synthetic oligonucleotide
  Target: SCNA; (+) strand; PAM type: NRG; PAM sequence: TAG
gctcttggtgttttggattt

SEQ ID NO: 35720 - DNA, 20 bp, Artificial Sequence
  Description of Artificial Sequence: Synthetic oligonucleotide
  Target: SCNA; (+) strand; PAM type: NRG; PAM sequence: AAG
tggattttagtcattttaat

SEQ ID NO: 35721 - DNA, 20 bp, Artificial Sequence
  Description of Artificial Sequence: Synthetic oligonucleotide
  Target: SCNA; (+) strand; PAM type: NRG; PAM sequence: GAG
cattttaataagtgttttgt

SEQ ID NO: 35722 - DNA, 20 bp, Artificial Sequence
  Description of Artificial Sequence: Synthetic oligonucleotide
  Target: SCNA; (+) strand; PAM type: NRG; PAM sequence: TAG
ttgtgagctttactgtttga

SEQ ID NO: 35723 - DNA, 20 bp, Artificial Sequence
  Description of Artificial Sequence: Synthetic oligonucleotide
  Target: SCNA; (+) strand; PAM type: NRG; PAM sequence: GAG
agctttactgtttgatagct

SEQ ID NO: 35724 - DNA, 20 bp, Artificial Sequence
  Description of Artificial Sequence: Synthetic oligonucleotide
  Target: SCNA; (+) strand; PAM type: NRG; PAM sequence: TGG
ttgatagctgagttacaaac

SEQ ID NO: 35725 - DNA, 20 bp, Artificial Sequence
  Description of Artificial Sequence: Synthetic oligonucleotide
  Target: SCNA; (+) strand; PAM type: NRG; PAM sequence: AAG
tagctgagttacaaactggc

SEQ ID NO: 35726 - DNA, 20 bp, Artificial Sequence
  Description of Artificial Sequence: Synthetic oligonucleotide
  Target: SCNA; (+) strand; PAM type: NRG; PAM sequence: AAG
ttacaaactggcaagtatcc

SEQ ID NO: 35727 - DNA, 20 bp, Artificial Sequence
  Description of Artificial Sequence: Synthetic oligonucleotide
  Target: SCNA; (+) strand; PAM type: NRG; PAM sequence: AAG
aactggcaagtatccaagca

SEQ ID NO: 35728 - DNA, 20 bp, Artificial Sequence
  Description of Artificial Sequence: Synthetic oligonucleotide
  Target: SCNA; (+) strand; PAM type: NRG; PAM sequence: CAG
gcaagtatccaagcaaagaa

SEQ ID NO: 35729 - DNA, 20 bp, Artificial Sequence
  Description of Artificial Sequence: Synthetic oligonucleotide
  Target: SCNA; (+) strand; PAM type: NRG; PAM sequence: GAG
aagtatccaagcaaagaaca

SEQ ID NO: 35730 - DNA, 20 bp, Artificial Sequence
  Description of Artificial Sequence: Synthetic oligonucleotide
  Target: SCNA; (+) strand; PAM type: NRG; PAM sequence: TGG
ccaagcaaagaacagagaac

SEQ ID NO: 35731 - DNA, 20 bp, Artificial Sequence
  Description of Artificial Sequence: Synthetic oligonucleotide
  Target: SCNA; (+) strand; PAM type: NRG; PAM sequence: GAG
aagcaaagaacagagaactg

SEQ ID NO: 35732 - DNA, 20 bp, Artificial Sequence
  Description of Artificial Sequence: Synthetic oligonucleotide
  Target: SCNA; (+) strand; PAM type: NRG; PAM sequence: AGG
agcaaagaacagagaactgg

SEQ ID NO: 35733 - DNA, 20 bp, Artificial Sequence
  Description of Artificial Sequence: Synthetic oligonucleotide
  Target: SCNA; (+) strand; PAM type: NRG; PAM sequence: AAG
ggaggtttgcttttctaccg

SEQ ID NO: 35734 - DNA, 20 bp, Artificial Sequence
  Description of Artificial Sequence: Synthetic oligonucleotide
  Target: SCNA; (+) strand; PAM type: NRG; PAM sequence: AGG
gaggtttgcttttctaccga

SEQ ID NO: 35735 - DNA, 20 bp, Artificial Sequence
  Description of Artificial Sequence: Synthetic oligonucleotide
  Target: SCNA; (+) strand; PAM type: NRG; PAM sequence: GAG
tctaccgaaggaaatatgtt

SEQ ID NO: 35736 - DNA, 20 bp, Artificial Sequence
  Description of Artificial Sequence: Synthetic oligonucleotide
  Target: SCNA; (+) strand; PAM type: NRG; PAM sequence: CAG
aaggaaatatgttgagaata

SEQ ID NO: 35737 - DNA, 20 bp, Artificial Sequence
  Description of Artificial Sequence: Synthetic oligonucleotide
  Target: SCNA; (+) strand; PAM type: NRG; PAM sequence: AGG
aggaaatatgttgagaatac

SEQ ID NO: 35738 - DNA, 20 bp, Artificial Sequence
  Description of Artificial Sequence: Synthetic oligonucleotide
  Target: SCNA; (+) strand; PAM type: NRG; PAM sequence: AAG
aatatgttgagaatacagga

SEQ ID NO: 35739 - DNA, 20 bp, Artificial Sequence
  Description of Artificial Sequence: Synthetic oligonucleotide
  Target: SCNA; (+) strand; PAM type: NRG; PAM sequence: CAG
taaatgtaaataatttttta

SEQ ID NO: 35740 - DNA, 20 bp, Artificial Sequence
  Description of Artificial Sequence: Synthetic oligonucleotide
  Target: SCNA; (+) strand; PAM type: NRG; PAM sequence: GAG
tttacagttaaactaataat

SEQ ID NO: 35741 - DNA, 20 bp, Artificial Sequence
  Description of Artificial Sequence: Synthetic oligonucleotide
  Target: SCNA; (+) strand; PAM type: NRG; PAM sequence: AAG
taataatgagtgattgaaaa

SEQ ID NO: 35742 - DNA, 20 bp, Artificial Sequence
  Description of Artificial Sequence: Synthetic oligonucleotide
  Target: SCNA; (+) strand; PAM type: NRG; PAM sequence: TGG
tttcattgtcctctctttca

SEQ ID NO: 35743 - DNA, 20 bp, Artificial Sequence
  Description of Artificial Sequence: Synthetic oligonucleotide
  Target: SCNA; (+) strand; PAM type: NRG; PAM sequence: GGG
ttcattgtcctctctttcat

SEQ ID NO: 35744 - DNA, 20 bp, Artificial Sequence
  Description of Artificial Sequence: Synthetic oligonucleotide
  Target: SCNA; (+) strand; PAM type: NRG; PAM sequence: AAG
tattaatatttcatttgata

SEQ ID NO: 35745 - DNA, 20 bp, Artificial Sequence
  Description of Artificial Sequence: Synthetic oligonucleotide
  Target: SCNA; (+) strand; PAM type: NRG; PAM sequence: AAG
atttcatttgataaagattt

SEQ ID NO: 35746 - DNA, 20 bp, Artificial Sequence
  Description of Artificial Sequence: Synthetic oligonucleotide
  Target: SCNA; (+) strand; PAM type: NRG; PAM sequence: CAG
atttaagtactaatgactat

SEQ ID NO: 35747 - DNA, 20 bp, Artificial Sequence
  Description of Artificial Sequence: Synthetic oligonucleotide
  Target: SCNA; (+) strand; PAM type: NRG; PAM sequence: TAG
tatcagtatctgttgattgc

SEQ ID NO: 35748 - DNA, 20 bp, Artificial Sequence
  Description of Artificial Sequence: Synthetic oligonucleotide
  Target: SCNA; (+) strand; PAM type: NRG; PAM sequence: GAG
tgttgattgctagcaatttt

SEQ ID NO: 35749 - DNA, 20 bp, Artificial Sequence
  Description of Artificial Sequence: Synthetic oligonucleotide
  Target: SCNA; (+) strand; PAM type: NRG; PAM sequence: TAG
tgattgctagcaattttgag

SEQ ID NO: 35750 - DNA, 20 bp, Artificial Sequence
  Description of Artificial Sequence: Synthetic oligonucleotide
  Target: SCNA; (+) strand; PAM type: NRG; PAM sequence: TAG
ttctgatatgtatgaatata

SEQ ID NO: 35751 - DNA, 20 bp, Artificial Sequence
  Description of Artificial Sequence: Synthetic oligonucleotide
  Target: SCNA; (+) strand; PAM type: NRG; PAM sequence: AAG
atatgtatgaatatatagac

SEQ ID NO: 35752 - DNA, 20 bp, Artificial Sequence
  Description of Artificial Sequence: Synthetic oligonucleotide
  Target: SCNA; (+) strand; PAM type: NRG; PAM sequence: TGG
caagaatcatatgatacacc

SEQ ID NO: 35753 - DNA, 20 bp, Artificial Sequence
  Description of Artificial Sequence: Synthetic oligonucleotide
  Target: SCNA; (+) strand; PAM type: NRG; PAM sequence: TAG
gatacacctggattgtgtaa

SEQ ID NO: 35754 - DNA, 20 bp, Artificial Sequence
  Description of Artificial Sequence: Synthetic oligonucleotide
  Target: SCNA; (+) strand; PAM type: NRG; PAM sequence: CAG
gtgtaatagcctttatgatg

SEQ ID NO: 35755 - DNA, 20 bp, Artificial Sequence
  Description of Artificial Sequence: Synthetic oligonucleotide
  Target: SCNA; (+) strand; PAM type: NRG; PAM sequence: AAG
aatagcctttatgatgcagt

SEQ ID NO: 35756 - DNA, 20 bp, Artificial Sequence
  Description of Artificial Sequence: Synthetic oligonucleotide
  Target: SCNA; (+) strand; PAM type: NRG; PAM sequence: AGG
atagcctttatgatgcagta

SEQ ID NO: 35757 - DNA, 20 bp, Artificial Sequence
  Description of Artificial Sequence: Synthetic oligonucleotide
  Target: SCNA; (+) strand; PAM type: NRG; PAM sequence: TGG
agtaaggcaaccactgaact

SEQ ID NO: 35758 - DNA, 20 bp, Artificial Sequence
  Description of Artificial Sequence: Synthetic oligonucleotide
  Target: SCNA; (+) strand; PAM type: NRG; PAM sequence: CAG
gcaaccactgaacttggaat

SEQ ID NO: 35759 - DNA, 20 bp, Artificial Sequence
  Description of Artificial Sequence: Synthetic oligonucleotide
  Target: SCNA; (+) strand; PAM type: NRG; PAM sequence: TGG
gaattacaatttgtttcttc

SEQ ID NO: 35760 - DNA, 20 bp, Artificial Sequence
  Description of Artificial Sequence: Synthetic oligonucleotide
  Target: SCNA; (+) strand; PAM type: NRG; PAM sequence: GGG
aattacaatttgtttcttct

SEQ ID NO: 35761 - DNA, 20 bp, Artificial Sequence
  Description of Artificial Sequence: Synthetic oligonucleotide
  Target: SCNA; (+) strand; PAM type: NRG; PAM sequence: TAG
gtttcttctgggtccctcac

SEQ ID NO: 35762 - DNA, 20 bp, Artificial Sequence
  Description of Artificial Sequence: Synthetic oligonucleotide
  Target: SCNA; (+) strand; PAM type: NRG; PAM sequence: TGG
cctcactagccctgtgactt

SEQ ID NO: 35763 - DNA, 20 bp, Artificial Sequence
  Description of Artificial Sequence: Synthetic oligonucleotide
  Target: SCNA; (+) strand; PAM type: NRG; PAM sequence: GAG
ttggtctatttgacttctgt

SEQ ID NO: 35764 - DNA, 20 bp, Artificial Sequence
  Description of Artificial Sequence: Synthetic oligonucleotide
  Target: SCNA; (+) strand; PAM type: NRG; PAM sequence: AAG
ttgacttctgtgagcctcaa

SEQ ID NO: 35765 - DNA, 20 bp, Artificial Sequence
  Description of Artificial Sequence: Synthetic oligonucleotide
  Target: SCNA; (+) strand; PAM type: NRG; PAM sequence: TGG
tcaaaagtgcatttgtaaaa

SEQ ID NO: 35766 - DNA, 20 bp, Artificial Sequence
  Description of Artificial Sequence: Synthetic oligonucleotide
  Target: SCNA; (+) strand; PAM type: NRG; PAM sequence: AAG
tttctgcccatcttactgtg

SEQ ID NO: 35767 - DNA, 20 bp, Artificial Sequence
  Description of Artificial Sequence: Synthetic oligonucleotide
  Target: SCNA; (+) strand; PAM type: NRG; PAM sequence: TAG
tgtaataataatattgacaa

SEQ ID NO: 35768 - DNA, 20 bp, Artificial Sequence
  Description of Artificial Sequence: Synthetic oligonucleotide
  Target: SCNA; (+) strand; PAM type: NRG; PAM sequence: AAG
gcaataattatactaataaa

SEQ ID NO: 35769 - DNA, 20 bp, Artificial Sequence
  Description of Artificial Sequence: Synthetic oligonucleotide
  Target: SCNA; (+) strand; PAM type: NRG; PAM sequence: TAG
tgcaaacaatttgaaaatca

SEQ ID NO: 35770 - DNA, 20 bp, Artificial Sequence
  Description of Artificial Sequence: Synthetic oligonucleotide
  Target: SCNA; (+) strand; PAM type: NRG; PAM sequence: TAG
tataaaatgtaacgtcacat

SEQ ID NO: 35771 - DNA, 20 bp, Artificial Sequence
  Description of Artificial Sequence: Synthetic oligonucleotide
  Target: SCNA; (+) strand; PAM type: NRG; PAM sequence: TGG
atgtaacgtcacattagtgt

SEQ ID NO: 35772 - DNA, 20 bp, Artificial Sequence
  Description of Artificial Sequence: Synthetic oligonucleotide
  Target: SCNA; (+) strand; PAM type: NRG; PAM sequence: GAG
gtaacgtcacattagtgttg

SEQ ID NO: 35773 - DNA, 20 bp, Artificial Sequence
  Description of Artificial Sequence: Synthetic oligonucleotide
  Target: SCNA; (+) strand; PAM type: NRG; PAM sequence: TGG
tagtgttggagtttacaatt

SEQ ID NO: 35774 - DNA, 20 bp, Artificial Sequence
  Description of Artificial Sequence: Synthetic oligonucleotide
  Target: SCNA; (+) strand; PAM type: NRG; PAM sequence: CAG
tgttggagtttacaatttgg

SEQ ID NO: 35775 - DNA, 20 bp, Artificial Sequence
  Description of Artificial Sequence: Synthetic oligonucleotide
  Target: SCNA; (+) strand; PAM type: NRG; PAM sequence: AGG
gttggagtttacaatttggc

SEQ ID NO: 35776 - DNA, 20 bp, Artificial Sequence
  Description of Artificial Sequence: Synthetic oligonucleotide
  Target: SCNA; (+) strand; PAM type: NRG; PAM sequence: GGG
ttggagtttacaatttggca

SEQ ID NO: 35777 - DNA, 20 bp, Artificial Sequence
  Description of Artificial Sequence: Synthetic oligonucleotide
  Target: SCNA; (+) strand; PAM type: NRG; PAM sequence: AAG
gagtttacaatttggcaggg

SEQ ID NO: 35778 - DNA, 20 bp, Artificial Sequence
  Description of Artificial Sequence: Synthetic oligonucleotide
  Target: SCNA; (+) strand; PAM type: NRG; PAM sequence: CGG
ggaagctgtacaactaacca

SEQ ID NO: 35779 - DNA, 20 bp, Artificial Sequence
  Description of Artificial Sequence: Synthetic oligonucleotide
  Target: SCNA; (+) strand; PAM type: NRG; PAM sequence: AAG
taaccacggcacaatttgat

SEQ ID NO: 35780 - DNA, 20 bp, Artificial Sequence
  Description of Artificial Sequence: Synthetic oligonucleotide
  Target: SCNA; (+) strand; PAM type: NRG; PAM sequence: TAG
gataagcaataaacttcctt

SEQ ID NO: 35781 - DNA, 20 bp, Artificial Sequence
  Description of Artificial Sequence: Synthetic oligonucleotide
  Target: SCNA; (+) strand; PAM type: NRG; PAM sequence: GAG
taagcaataaacttccttta

SEQ ID NO: 35782 - DNA, 20 bp, Artificial Sequence
  Description of Artificial Sequence: Synthetic oligonucleotide
  Target: SCNA; (+) strand; PAM type: NRG; PAM sequence: CGG
taaacttcctttagagtata

SEQ ID NO: 35783 - DNA, 20 bp, Artificial Sequence
  Description of Artificial Sequence: Synthetic oligonucleotide
  Target: SCNA; (+) strand; PAM type: NRG; PAM sequence: GAG
aacttcctttagagtatacg

SEQ ID NO: 35784 - DNA, 20 bp, Artificial Sequence
  Description of Artificial Sequence: Synthetic oligonucleotide
  Target: SCNA; (+) strand; PAM type: NRG; PAM sequence: TGG
ctttagagtatacggagaaa

SEQ ID NO: 35785 - DNA, 20 bp, Artificial Sequence
  Description of Artificial Sequence: Synthetic oligonucleotide
  Target: SCNA; (+) strand; PAM type: NRG; PAM sequence: GGG
tttagagtatacggagaaat

SEQ ID NO: 35786 - DNA, 20 bp, Artificial Sequence
  Description of Artificial Sequence: Synthetic oligonucleotide
  Target: SCNA; (+) strand; PAM type: NRG; PAM sequence: GGG
ttagagtatacggagaaatg

SEQ ID NO: 35787 - DNA, 20 bp, Artificial Sequence
  Description of Artificial Sequence: Synthetic oligonucleotide
  Target: SCNA; (+) strand; PAM type: NRG; PAM sequence: GAG
agagtatacggagaaatggg

SEQ ID NO: 35788 - DNA, 20 bp, Artificial Sequence
  Description of Artificial Sequence: Synthetic oligonucleotide
  Target: SCNA; (+) strand; PAM type: NRG; PAM sequence: AGG
gagtatacggagaaatgggg

SEQ ID NO: 35789 - DNA, 20 bp, Artificial Sequence
  Description of Artificial Sequence: Synthetic oligonucleotide
  Target: SCNA; (+) strand; PAM type: NRG; PAM sequence: AAG
tggggaggattataaatatt

SEQ ID NO: 35790 - DNA, 20 bp, Artificial Sequence
  Description of Artificial Sequence: Synthetic oligonucleotide
  Target: SCNA; (+) strand; PAM type: NRG; PAM sequence: CAG
aatattaagcccttttgtgc

SEQ ID NO: 35791 - DNA, 20 bp, Artificial Sequence
  Description of Artificial Sequence: Synthetic oligonucleotide
  Target: SCNA; (+) strand; PAM type: NRG; PAM sequence: AGG
atattaagcccttttgtgcc

SEQ ID NO: 35792 - DNA, 20 bp, Artificial Sequence
  Description of Artificial Sequence: Synthetic oligonucleotide
  Target: SCNA; (+) strand; PAM type: NRG; PAM sequence: TGG
agcccttttgtgccaggctc

SEQ ID NO: 35793 - DNA, 20 bp, Artificial Sequence
  Description of Artificial Sequence: Synthetic oligonucleotide
  Target: SCNA; (+) strand; PAM type: NRG; PAM sequence: GGG
gcccttttgtgccaggctct

SEQ ID NO: 35794 - DNA, 20 bp, Artificial Sequence
  Description of Artificial Sequence: Synthetic oligonucleotide
  Target: SCNA; (+) strand; PAM type: NRG; PAM sequence: CAG
gtgatctccatcacaccttg

SEQ ID NO: 35795 - DNA, 20 bp, Artificial Sequence
  Description of Artificial Sequence: Synthetic oligonucleotide
  Target: SCNA; (+) strand; PAM type: NRG; PAM sequence: CAG
tttcttattcttattttata

SEQ ID NO: 35796 - DNA, 20 bp, Artificial Sequence
  Description of Artificial Sequence: Synthetic oligonucleotide
  Target: SCNA; (+) strand; PAM type: NRG; PAM sequence: AAG
ttatacagatgatgcaactg

SEQ ID NO: 35797 - DNA, 20 bp, Artificial Sequence
  Description of Artificial Sequence: Synthetic oligonucleotide
  Target: SCNA; (+) strand; PAM type: NRG; PAM sequence: AAG
gatgatgcaactgaagaacg

SEQ ID NO: 35798 - DNA, 20 bp, Artificial Sequence
  Description of Artificial Sequence: Synthetic oligonucleotide
  Target: SCNA; (+) strand; PAM type: NRG; PAM sequence: AAG
atgcaactgaagaacgaagc

SEQ ID NO: 35799 - DNA, 20 bp, Artificial Sequence
  Description of Artificial Sequence: Synthetic oligonucleotide
  Target: SCNA; (+) strand; PAM type: NRG; PAM sequence: TGG
agaacgaagcaagttgtcca

SEQ ID NO: 35800 - DNA, 20 bp, Artificial Sequence
  Description of Artificial Sequence: Synthetic oligonucleotide
  Target: SCNA; (+) strand; PAM type: NRG; PAM sequence: CAG
gcaagttgtccatggtcaca

SEQ ID NO: 35801 - DNA, 20 bp, Artificial Sequence
  Description of Artificial Sequence: Synthetic oligonucleotide
  Target: SCNA; (+) strand; PAM type: NRG; PAM sequence: TAG
ggtcacacagctaataatga

SEQ ID NO: 35802 - DNA, 20 bp, Artificial Sequence
  Description of Artificial Sequence: Synthetic oligonucleotide
  Target: SCNA; (+) strand; PAM type: NRG; PAM sequence: TAG
tagtattttcctattcctca

SEQ ID NO: 35803 - DNA, 20 bp, Artificial Sequence
  Description of Artificial Sequence: Synthetic oligonucleotide
  Target: SCNA; (+) strand; PAM type: NRG; PAM sequence: TGG
tcctattcctcatagaaaac

SEQ ID NO: 35804 - DNA, 20 bp, Artificial Sequence
  Description of Artificial Sequence: Synthetic oligonucleotide
  Target: SCNA; (+) strand; PAM type: NRG; PAM sequence: GAG
ctattcctcatagaaaactg

SEQ ID NO: 35805 - DNA, 20 bp, Artificial Sequence
  Description of Artificial Sequence: Synthetic oligonucleotide
  Target: SCNA; (+) strand; PAM type: NRG; PAM sequence: CGG
tcctcatagaaaactggaga

SEQ ID NO: 35806 - DNA, 20 bp, Artificial Sequence
  Description of Artificial Sequence: Synthetic oligonucleotide
  Target: SCNA; (+) strand; PAM type: NRG; PAM sequence: CAG
acattatatatccttaacta

SEQ ID NO: 35807 - DNA, 20 bp, Artificial Sequence
  Description of Artificial Sequence: Synthetic oligonucleotide
  Target: SCNA; (+) strand; PAM type: NRG; PAM sequence: AGG
cattatatatccttaactac

SEQ ID NO: 35808 - DNA, 20 bp, Artificial Sequence
  Description of Artificial Sequence: Synthetic oligonucleotide
  Target: SCNA; (+) strand; PAM type: NRG; PAM sequence: GGG
attatatatccttaactaca

SEQ ID NO: 35809 - DNA, 20 bp, Artificial Sequence
  Description of Artificial Sequence: Synthetic oligonucleotide
  Target: SCNA; (+) strand; PAM type: NRG; PAM sequence: TAG
ttaactacagggaccatttc

SEQ ID NO: 35810 - DNA, 20 bp, Artificial Sequence
  Description of Artificial Sequence: Synthetic oligonucleotide
  Target: SCNA; (+) strand; PAM type: NRG; PAM sequence: TAG
atttctagaaatcaaatttc

SEQ ID NO: 35811 - DNA, 20 bp, Artificial Sequence
  Description of Artificial Sequence: Synthetic oligonucleotide
  Target: SCNA; (+) strand; PAM type: NRG; PAM sequence: AAG
aaatcaaatttctagaattc

SEQ ID NO: 35812 - DNA, 20 bp, Artificial Sequence
  Description of Artificial Sequence: Synthetic oligonucleotide
  Target: SCNA; (+) strand; PAM type: NRG; PAM sequence: TAG
acatacaatatattacccca

SEQ ID NO: 35813 - DNA, 20 bp, Artificial Sequence
  Description of Artificial Sequence: Synthetic oligonucleotide
  Target: SCNA; (+) strand; PAM type: NRG; PAM sequence: TGG
ttattgataatgctaaaata

SEQ ID NO: 35814 - DNA, 20 bp, Artificial Sequence
  Description of Artificial Sequence: Synthetic oligonucleotide
  Target: SCNA; (+) strand; PAM type: NRG; PAM sequence: GGG
tattgataatgctaaaatat

SEQ ID NO: 35815 - DNA, 20 bp, Artificial Sequence
  Description of Artificial Sequence: Synthetic oligonucleotide
  Target: SCNA; (+) strand; PAM type: NRG; PAM sequence: TAG
aaatatgggatatctttgca

SEQ ID NO: 35816 - DNA, 20 bp, Artificial Sequence
  Description of Artificial Sequence: Synthetic oligonucleotide
  Target: SCNA; (+) strand; PAM type: NRG; PAM sequence: GAG
atatgggatatctttgcata

SEQ ID NO: 35817 - DNA, 20 bp, Artificial Sequence
  Description of Artificial Sequence: Synthetic oligonucleotide
  Target: SCNA; (+) strand; PAM type: NRG; PAM sequence: TAG
tagagatccttaaattgtgc

SEQ ID NO: 35818 - DNA, 20 bp, Artificial Sequence
  Description of Artificial Sequence: Synthetic oligonucleotide
  Target: SCNA; (+) strand; PAM type: NRG; PAM sequence: GAG
cttaaattgtgctagaatat

SEQ ID NO: 35819 - DNA, 20 bp, Artificial Sequence
  Description of Artificial Sequence: Synthetic oligonucleotide
  Target: SCNA; (+) strand; PAM type: NRG; PAM sequence: TAG
gaatatgagatctttttgca

SEQ ID NO: 35820 - DNA, 20 bp, Artificial Sequence
  Description of Artificial Sequence: Synthetic oligonucleotide
  Target: SCNA; (+) strand; PAM type: NRG; PAM sequence: GAG
atatgagatctttttgcata

SEQ ID NO: 35821 - DNA, 20 bp, Artificial Sequence
  Description of Artificial Sequence: Synthetic oligonucleotide
  Target: SCNA; (+) strand; PAM type: NRG; PAM sequence: TAG
tgcatagagatcctctcgca

SEQ ID NO: 35822 - DNA, 20 bp, Artificial Sequence
  Description of Artificial Sequence: Synthetic oligonucleotide
  Target: SCNA; (+) strand; PAM type: NRG; PAM sequence: GAG
catagagatcctctcgcata

SEQ ID NO: 35823 - DNA, 20 bp, Artificial Sequence
  Description of Artificial Sequence: Synthetic oligonucleotide
  Target: SCNA; (+) strand; PAM type: NRG; PAM sequence: AAG
atagagaattcctgctactc

SEQ ID NO: 35824 - DNA, 20 bp, Artificial Sequence
  Description of Artificial Sequence: Synthetic oligonucleotide
  Target: SCNA; (+) strand; PAM type: NRG; PAM sequence: TAG
tgctactcaagaatcaatgt

SEQ ID NO: 35825 - DNA, 20 bp, Artificial Sequence
  Description of Artificial Sequence: Synthetic oligonucleotide
  Target: SCNA; (+) strand; PAM type: NRG; PAM sequence: CAG
agacattcactctgtgctca

SEQ ID NO: 35826 - DNA, 20 bp, Artificial Sequence
  Description of Artificial Sequence: Synthetic oligonucleotide
  Target: SCNA; (+) strand; PAM type: NRG; PAM sequence: CAG
cttattttacttgtgacctt

SEQ ID NO: 35827 - DNA, 20 bp, Artificial Sequence
  Description of Artificial Sequence: Synthetic oligonucleotide
  Target: SCNA; (+) strand; PAM type: NRG; PAM sequence: AAG
tacttgtgaccttcagtacc

SEQ ID NO: 35828 - DNA, 20 bp, Artificial Sequence
  Description of Artificial Sequence: Synthetic oligonucleotide
  Target: SCNA; (+) strand; PAM type: NRG; PAM sequence: AAG
tgtgaccttcagtaccaagt

SEQ ID NO: 35829 - DNA, 20 bp, Artificial Sequence
  Description of Artificial Sequence: Synthetic oligonucleotide
  Target: SCNA; (+) strand; PAM type: NRG; PAM sequence: TGG
ccttcagtaccaagtaagac

SEQ ID NO: 35830 - DNA, 20 bp, Artificial Sequence
  Description of Artificial Sequence: Synthetic oligonucleotide
  Target: SCNA; (+) strand; PAM type: NRG; PAM sequence: TAG
cagtaccaagtaagactgga

SEQ ID NO: 35831 - DNA, 20 bp, Artificial Sequence
  Description of Artificial Sequence: Synthetic oligonucleotide
  Target: SCNA; (+) strand; PAM type: NRG; PAM sequence: AAG
gtaagactggatagaatatc

SEQ ID NO: 35832 - DNA, 20 bp, Artificial Sequence
  Description of Artificial Sequence: Synthetic oligonucleotide
  Target: SCNA; (+) strand; PAM type: NRG; PAM sequence: CAG
atatcaagataaatttgcga

SEQ ID NO: 35833 - DNA, 20 bp, Artificial Sequence
  Description of Artificial Sequence: Synthetic oligonucleotide
  Target: SCNA; (+) strand; PAM type: NRG; PAM sequence: TAG
agataaatttgcgacagatt

SEQ ID NO: 35834 - DNA, 20 bp, Artificial Sequence
  Description of Artificial Sequence: Synthetic oligonucleotide
  Target: SCNA; (+) strand; PAM type: NRG; PAM sequence: TGG
tcctttctgtcgcattatca

SEQ ID NO: 35835 - DNA, 20 bp, Artificial Sequence
  Description of Artificial Sequence: Synthetic oligonucleotide
  Target: SCNA; (+) strand; PAM type: NRG; PAM sequence: CAG
gtcgcattatcatggttgcc

SEQ ID NO: 35836 - DNA, 20 bp, Artificial Sequence
  Description of Artificial Sequence: Synthetic oligonucleotide
  Target: SCNA; (+) strand; PAM type: NRG; PAM sequence: AAG
gcattatcatggttgcccag

SEQ ID NO: 35837 - DNA, 20 bp, Artificial Sequence
  Description of Artificial Sequence: Synthetic oligonucleotide
  Target: SCNA; (+) strand; PAM type: NRG; PAM sequence: AAG
atcatggttgcccagaagtt

SEQ ID NO: 35838 - DNA, 20 bp, Artificial Sequence
  Description of Artificial Sequence: Synthetic oligonucleotide
  Target: SCNA; (+) strand; PAM type: NRG; PAM sequence: GAG
catggttgcccagaagttaa

SEQ ID NO: 35839 - DNA, 20 bp, Artificial Sequence
  Description of Artificial Sequence: Synthetic oligonucleotide
  Target: SCNA; (+) strand; PAM type: NRG; PAM sequence: AGG
atggttgcccagaagttaag

SEQ ID NO: 35840 - DNA, 20 bp, Artificial Sequence
  Description of Artificial Sequence: Synthetic oligonucleotide
  Target: SCNA; (+) strand; PAM type: NRG; PAM sequence: TGG
tgcccagaagttaagaggtt

SEQ ID NO: 35841 - DNA, 20 bp, Artificial Sequence
  Description of Artificial Sequence: Synthetic oligonucleotide
  Target: SCNA; (+) strand; PAM type: NRG; PAM sequence: CAG
taagaggtttggaatgattc

SEQ ID NO: 35842 - DNA, 20 bp, Artificial Sequence
  Description of Artificial Sequence: Synthetic oligonucleotide
  Target: SCNA; (+) strand; PAM type: NRG; PAM sequence: AAG
tggaatgattccagtctgat

SEQ ID NO: 35843 - DNA, 20 bp, Artificial Sequence
  Description of Artificial Sequence: Synthetic oligonucleotide
  Target: SCNA; (+) strand; PAM type: NRG; PAM sequence: AGG
ggaatgattccagtctgata

SEQ ID NO: 35844 - DNA, 20 bp, Artificial Sequence
  Description of Artificial Sequence: Synthetic oligonucleotide
  Target: SCNA; (+) strand; PAM type: NRG; PAM sequence: GAG
aatgattccagtctgataag

SEQ ID NO: 35845 - DNA, 20 bp, Artificial Sequence
  Description of Artificial Sequence: Synthetic oligonucleotide
  Target: SCNA; (+) strand; PAM type: NRG; PAM sequence: AAG
tccagtctgataaggagaac

SEQ ID NO: 35846 - DNA, 20 bp, Artificial Sequence
  Description of Artificial Sequence: Synthetic oligonucleotide
  Target: SCNA; (+) strand; PAM type: NRG; PAM sequence: AAG
ataaggagaacaagacattg

SEQ ID NO: 35847 - DNA, 20 bp, Artificial Sequence
  Description of Artificial Sequence: Synthetic oligonucleotide
  Target: SCNA; (+) strand; PAM type: NRG; PAM sequence: AAG
ggagaacaagacattgaagt

SEQ ID NO: 35848 - DNA, 20 bp, Artificial Sequence
  Description of Artificial Sequence: Synthetic oligonucleotide
  Target: SCNA; (+) strand; PAM type: NRG; PAM sequence: TGG
aagacattgaagtaagtgtc

SEQ ID NO: 35849 - DNA, 20 bp, Artificial Sequence
  Description of Artificial Sequence: Synthetic oligonucleotide
  Target: SCNA; (+) strand; PAM type: NRG; PAM sequence: GAG
gacattgaagtaagtgtctg

SEQ ID NO: 35850 - DNA, 20 bp, Artificial Sequence
  Description of Artificial Sequence: Synthetic oligonucleotide
  Target: SCNA; (+) strand; PAM type: NRG; PAM sequence: TAG
taagtgtctggagtctaaaa

SEQ ID NO: 35851 - DNA, 20 bp, Artificial Sequence
  Description of Artificial Sequence: Synthetic oligonucleotide
  Target: SCNA; (+) strand; PAM type: NRG; PAM sequence: TGG
tctggagtctaaaatagatc

SEQ ID NO: 35852 - DNA, 20 bp, Artificial Sequence
  Description of Artificial Sequence: Synthetic oligonucleotide
  Target: SCNA; (+) strand; PAM type: NRG; PAM sequence: GGG
ctggagtctaaaatagatct

SEQ ID NO: 35853 - DNA, 20 bp, Artificial Sequence
  Description of Artificial Sequence: Synthetic oligonucleotide
  Target: SCNA; (+) strand; PAM type: NRG; PAM sequence: TAG
agtctaaaatagatctggga

SEQ ID NO: 35854 - DNA, 20 bp, Artificial Sequence
  Description of Artificial Sequence: Synthetic oligonucleotide
  Target: SCNA; (+) strand; PAM type: NRG; PAM sequence: TAG
atctgggatagctattactt

SEQ ID NO: 35855 - DNA, 20 bp, Artificial Sequence
  Description of Artificial Sequence: Synthetic oligonucleotide
  Target: SCNA; (+) strand; PAM type: NRG; PAM sequence: GAG
gctattactttagcttttct

SEQ ID NO: 35856 - DNA, 20 bp, Artificial Sequence
  Description of Artificial Sequence: Synthetic oligonucleotide
  Target: SCNA; (+) strand; PAM type: NRG; PAM sequence: TGG
agcttttctgagatttaata

SEQ ID NO: 35857 - DNA, 20 bp, Artificial Sequence
  Description of Artificial Sequence: Synthetic oligonucleotide
  Target: SCNA; (+) strand; PAM type: NRG; PAM sequence: GGG
gcttttctgagatttaatat

SEQ ID NO: 35858 - DNA, 20 bp, Artificial Sequence
  Description of Artificial Sequence: Synthetic oligonucleotide
  Target: SCNA; (+) strand; PAM type: NRG; PAM sequence: GAG
ctgagatttaatatgggaat

SEQ ID NO: 35859 - DNA, 20 bp, Artificial Sequence
  Description of Artificial Sequence: Synthetic oligonucleotide
  Target: SCNA; (+) strand; PAM type: NRG; PAM sequence: AGG
tgagatttaatatgggaatg

SEQ ID NO: 35860 - DNA, 20 bp, Artificial Sequence
  Description of Artificial Sequence: Synthetic oligonucleotide
  Target: SCNA; (+) strand; PAM type: NRG; PAM sequence: AAG
aatatgggaatgaggtgtaa

SEQ ID NO: 35861 - DNA, 20 bp, Artificial Sequence
  Description of Artificial Sequence: Synthetic oligonucleotide
  Target: SCNA; (+) strand; PAM type: NRG; PAM sequence: AAG
atgggaatgaggtgtaaaag

SEQ ID NO: 35862 - DNA, 20 bp, Artificial Sequence
  Description of Artificial Sequence: Synthetic oligonucleotide
  Target: SCNA; (+) strand; PAM type: NRG; PAM sequence: GAG
gggaatgaggtgtaaaagaa

SEQ ID NO: 35863 - DNA, 20 bp, Artificial Sequence
  Description of Artificial Sequence: Synthetic oligonucleotide
  Target: SCNA; (+) strand; PAM type: NRG; PAM sequence: CAG
gagttgaaataactattaca

SEQ ID NO: 35864 - DNA, 20 bp, Artificial Sequence
  Description of Artificial Sequence: Synthetic oligonucleotide
  Target: SCNA; (+) strand; PAM type: NRG; PAM sequence: GAG
gttgaaataactattacaca

SEQ ID NO: 35865 - DNA, 20 bp, Artificial Sequence
  Description of Artificial Sequence: Synthetic oligonucleotide
  Target: SCNA; (+) strand; PAM type: NRG; PAM sequence: AAG
gatgcttgttccttcttcct

SEQ ID NO: 35866 - DNA, 20 bp, Artificial Sequence
  Description of Artificial Sequence: Synthetic oligonucleotide
  Target: SCNA; (+) strand; PAM type: NRG; PAM sequence: AGG
atgcttgttccttcttccta

SEQ ID NO: 35867 - DNA, 20 bp, Artificial Sequence
  Description of Artificial Sequence: Synthetic oligonucleotide
  Target: SCNA; (+) strand; PAM type: NRG; PAM sequence: AAG
gttccttcttcctaaggcct

SEQ ID NO: 35868 - DNA, 20 bp, Artificial Sequence
  Description of Artificial Sequence: Synthetic oligonucleotide
  Target: SCNA; (+) strand; PAM type: NRG; PAM sequence: TAG
tctcactcattcttctatcc

SEQ ID NO: 35869 - DNA, 20 bp, Artificial Sequence
  Description of Artificial Sequence: Synthetic oligonucleotide
  Target: SCNA; (+) strand; PAM type: NRG; PAM sequence: TGG
ttctatcctagaattcataa

SEQ ID NO: 35870 - DNA, 20 bp, Artificial Sequence
  Description of Artificial Sequence: Synthetic oligonucleotide
  Target: SCNA; (+) strand; PAM type: NRG; PAM sequence: TGG
ctagaattcataatggtata

SEQ ID NO: 35871 - DNA, 20 bp, Artificial Sequence
  Description of Artificial Sequence: Synthetic oligonucleotide
  Target: SCNA; (+) strand; PAM type: NRG; PAM sequence: CAG
taatggtatatggcactgca

SEQ ID NO: 35872 - DNA, 20 bp, Artificial Sequence
  Description of Artificial Sequence: Synthetic oligonucleotide
  Target: SCNA; (+) strand; PAM type: NRG; PAM sequence: TAG
cacagaaattcattaaatgt

SEQ ID NO: 35873 - DNA, 20 bp, Artificial Sequence
  Description of Artificial Sequence: Synthetic oligonucleotide
  Target: SCNA; (+) strand; PAM type: NRG; PAM sequence: AAG
tagtgaaatattacatgtga

SEQ ID NO: 35874 - DNA, 20 bp, Artificial Sequence
  Description of Artificial Sequence: Synthetic oligonucleotide
  Target: SCNA; (+) strand; PAM type: NRG; PAM sequence: AAG
tgaaatattacatgtgaaag

SEQ ID NO: 35875 - DNA, 20 bp, Artificial Sequence
  Description of Artificial Sequence: Synthetic oligonucleotide
  Target: SCNA; (+) strand; PAM type: NRG; PAM sequence: AGG
gaaatattacatgtgaaaga

SEQ ID NO: 35876 - DNA, 20 bp, Artificial Sequence
  Description of Artificial Sequence: Synthetic oligonucleotide
  Target: SCNA; (+) strand; PAM type: NRG; PAM sequence: TAG
atattacatgtgaaagaagg

SEQ ID NO: 35877 - DNA, 20 bp, Artificial Sequence
  Description of Artificial Sequence: Synthetic oligonucleotide
  Target: SCNA; (+) strand; PAM type: NRG; PAM sequence: TAG
aaagaaggtagtaatgtaaa

SEQ ID NO: 35878 - DNA, 20 bp, Artificial Sequence
  Description of Artificial Sequence: Synthetic oligonucleotide
  Target: SCNA; (+) strand; PAM type: NRG; PAM sequence: TGG
gaacctaatataatttttta

SEQ ID NO: 35879 - DNA, 20 bp, Artificial Sequence
  Description of Artificial Sequence: Synthetic oligonucleotide
  Target: SCNA; (+) strand; PAM type: NRG; PAM sequence: GGG
aacctaatataattttttat

SEQ ID NO: 35880 - DNA, 20 bp, Artificial Sequence
  Description of Artificial Sequence: Synthetic oligonucleotide
  Target: SCNA; (+) strand; PAM type: NRG; PAM sequence: TAG
tttcttataaaattactttt

SEQ ID NO: 35881 - DNA, 20 bp, Artificial Sequence
  Description of Artificial Sequence: Synthetic oligonucleotide
  Target: SCNA; (+) strand; PAM type: NRG; PAM sequence: TGG
tttgctgctcgaatcattac

SEQ ID NO: 35882 - DNA, 20 bp, Artificial Sequence
  Description of Artificial Sequence: Synthetic oligonucleotide
  Target: SCNA; (+) strand; PAM type: NRG; PAM sequence: TAG
aatcattactggttgctatc

SEQ ID NO: 35883 - DNA, 20 bp, Artificial Sequence
  Description of Artificial Sequence: Synthetic oligonucleotide
  Target: SCNA; (+) strand; PAM type: NRG; PAM sequence: AGG
atcattactggttgctatct

SEQ ID NO: 35884 - DNA, 20 bp, Artificial Sequence
  Description of Artificial Sequence: Synthetic oligonucleotide
  Target: SCNA; (+) strand; PAM type: NRG; PAM sequence: GGG
tcattactggttgctatcta

SEQ ID NO: 35885 - DNA, 20 bp, Artificial Sequence
  Description of Artificial Sequence: Synthetic oligonucleotide
  Target: SCNA; (+) strand; PAM type: NRG; PAM sequence: AAG
tgttcaaaaaaaataaaaac

SEQ ID NO: 35886 - DNA, 20 bp, Artificial Sequence
  Description of Artificial Sequence: Synthetic oligonucleotide
  Target: SCNA; (+) strand; PAM type: NRG; PAM sequence: AGG
gttcaaaaaaaataaaaaca

SEQ ID NO: 35887 - DNA, 20 bp, Artificial Sequence
  Description of Artificial Sequence: Synthetic oligonucleotide
  Target: SCNA; (+) strand; PAM type: NRG; PAM sequence: GGG
ttcaaaaaaaataaaaacaa

SEQ ID NO: 35888 - DNA, 20 bp, Artificial Sequence
  Description of Artificial Sequence: Synthetic oligonucleotide
  Target: SCNA; (+) strand; PAM type: NRG; PAM sequence: TGG
aaaaaataaaaacaagggcc

SEQ ID NO: 35889 - DNA, 20 bp, Artificial Sequence
  Description of Artificial Sequence: Synthetic oligonucleotide
  Target: SCNA; (+) strand; PAM type: NRG; PAM sequence: TGG
aaaacaagggcctggcacaa

SEQ ID NO: 35890 - DNA, 20 bp, Artificial Sequence
  Description of Artificial Sequence: Synthetic oligonucleotide
  Target: SCNA; (+) strand; PAM type: NRG; PAM sequence: CAG
aatggctcacacctgtatcc

SEQ ID NO: 35891 - DNA, 20 bp, Artificial Sequence
  Description of Artificial Sequence: Synthetic oligonucleotide
  Target: SCNA; (+) strand; PAM type: NRG; PAM sequence: TGG
cacctgtatcccagcactgt

SEQ ID NO: 35892 - DNA, 20 bp, Artificial Sequence
  Description of Artificial Sequence: Synthetic oligonucleotide
  Target: SCNA; (+) strand; PAM type: NRG; PAM sequence: GGG
acctgtatcccagcactgtt

SEQ ID NO: 35893 - DNA, 20 bp, Artificial Sequence
  Description of Artificial Sequence: Synthetic oligonucleotide
  Target: SCNA; (+) strand; PAM type: NRG; PAM sequence: GAG
ctgtatcccagcactgttgg

SEQ ID NO: 35894 - DNA, 20 bp, Artificial Sequence
  Description of Artificial Sequence: Synthetic oligonucleotide
  Target: SCNA; (+) strand; PAM type: NRG; PAM sequence: AGG
tgtatcccagcactgttggg

SEQ ID NO: 35895 - DNA, 20 bp, Artificial Sequence
  Description of Artificial Sequence: Synthetic oligonucleotide
  Target: SCNA; (+) strand; PAM type: NRG; PAM sequence: GAG
cccagcactgttgggaggcc

SEQ ID NO: 35896 - DNA, 20 bp, Artificial Sequence
  Description of Artificial Sequence: Synthetic oligonucleotide
  Target: SCNA; (+) strand; PAM type: NRG; PAM sequence: AGG
ccagcactgttgggaggccg

SEQ ID NO: 35897 - DNA, 20 bp, Artificial Sequence
  Description of Artificial Sequence: Synthetic oligonucleotide
  Target: SCNA; (+) strand; PAM type: NRG; PAM sequence: CAG
gcactgttgggaggccgagg

SEQ ID NO: 35898 - DNA, 20 bp, Artificial Sequence
  Description of Artificial Sequence: Synthetic oligonucleotide
  Target: SCNA; (+) strand; PAM type: NRG; PAM sequence: AGG
cactgttgggaggccgaggc

SEQ ID NO: 35899 - DNA, 20 bp, Artificial Sequence
  Description of Artificial Sequence: Synthetic oligonucleotide
  Target: SCNA; (+) strand; PAM type: NRG; PAM sequence: GAG
ctgttgggaggccgaggcag

SEQ ID NO: 35900 - DNA, 20 bp, Artificial Sequence
  Description of Artificial Sequence: Synthetic oligonucleotide
  Target: SCNA; (+) strand; PAM type: NRG; PAM sequence: GAG
ccgaggcaggagaattgctt

SEQ ID NO: 35901 - DNA, 20 bp, Artificial Sequence
  Description of Artificial Sequence: Synthetic oligonucleotide
  Target: SCNA; (+) strand; PAM type: NRG; PAM sequence: CAG
gcaggagaattgcttgagcc

SEQ ID NO: 35902 - DNA, 20 bp, Artificial Sequence
  Description of Artificial Sequence: Synthetic oligonucleotide
  Target: SCNA; (+) strand; PAM type: NRG; PAM sequence: AGG
caggagaattgcttgagccc

SEQ ID NO: 35903 - DNA, 20 bp, Artificial Sequence
  Description of Artificial Sequence: Synthetic oligonucleotide
  Target: SCNA; (+) strand; PAM type: NRG; PAM sequence: GAG
ggagaattgcttgagcccag

SEQ ID NO: 35904 - DNA, 20 bp, Artificial Sequence
  Description of Artificial Sequence: Synthetic oligonucleotide
  Target: SCNA; (+) strand; PAM type: NRG; PAM sequence: GAG
ttgcttgagcccaggagttc

SEQ ID NO: 35905 - DNA, 20 bp, Artificial Sequence
  Description of Artificial Sequence: Synthetic oligonucleotide
  Target: SCNA; (+) strand; PAM type: NRG; PAM sequence: AGG
tgcttgagcccaggagttcg

SEQ ID NO: 35906 - DNA, 20 bp, Artificial Sequence
  Description of Artificial Sequence: Synthetic oligonucleotide
  Target: SCNA; (+) strand; PAM type: NRG; PAM sequence: CAG
tgagcccaggagttcgaggc

SEQ ID NO: 35907 - DNA, 20 bp, Artificial Sequence
  Description of Artificial Sequence: Synthetic oligonucleotide
  Target: SCNA; (+) strand; PAM type: NRG; PAM sequence: TGG
ccaggagttcgaggccagcc

SEQ ID NO: 35908 - DNA, 20 bp, Artificial Sequence
  Description of Artificial Sequence: Synthetic oligonucleotide
  Target: SCNA; (+) strand; PAM type: NRG; PAM sequence: GGG
caggagttcgaggccagcct

SEQ ID NO: 35909 - DNA, 20 bp, Artificial Sequence
  Description of Artificial Sequence: Synthetic oligonucleotide
  Target: SCNA; (+) strand; PAM type: NRG; PAM sequence: TAG
cgaggccagcctgggcaaca

SEQ ID NO: 35910 - DNA, 20 bp, Artificial Sequence
  Description of Artificial Sequence: Synthetic oligonucleotide
  Target: SCNA; (+) strand; PAM type: NRG; PAM sequence: GAG
aggccagcctgggcaacata

SEQ ID NO: 35911 - DNA, 20 bp, Artificial Sequence
  Description of Artificial Sequence: Synthetic oligonucleotide
  Target: SCNA; (+) strand; PAM type: NRG; PAM sequence: GAG
gccagcctgggcaacataga

SEQ ID NO: 35912 - DNA, 20 bp, Artificial Sequence
  Description of Artificial Sequence: Synthetic oligonucleotide
  Target: SCNA; (+) strand; PAM type: NRG; PAM sequence: TGG
aataaataaataaatatttt

SEQ ID NO: 35913 - DNA, 20 bp, Artificial Sequence
  Description of Artificial Sequence: Synthetic oligonucleotide
  Target: SCNA; (+) strand; PAM type: NRG; PAM sequence: TAG
atgctgttaaaatgcatttc

SEQ ID NO: 35914 - DNA, 20 bp, Artificial Sequence
  Description of Artificial Sequence: Synthetic oligonucleotide
  Target: SCNA; (+) strand; PAM type: NRG; PAM sequence: TAG
gttaaaatgcatttctagct

SEQ ID NO: 35915 - DNA, 20 bp, Artificial Sequence
  Description of Artificial Sequence: Synthetic oligonucleotide
  Target: SCNA; (+) strand; PAM type: NRG; PAM sequence: AGG
ttaaaatgcatttctagctt

SEQ ID NO: 35916 - DNA, 20 bp, Artificial Sequence
  Description of Artificial Sequence: Synthetic oligonucleotide
  Target: SCNA; (+) strand; PAM type: NRG; PAM sequence: AAG
tttctagcttaggtcacata

SEQ ID NO: 35917 - DNA, 20 bp, Artificial Sequence
  Description of Artificial Sequence: Synthetic oligonucleotide
  Target: SCNA; (+) strand; PAM type: NRG; PAM sequence: AGG
ttctagcttaggtcacataa

SEQ ID NO: 35918 - DNA, 20 bp, Artificial Sequence
  Description of Artificial Sequence: Synthetic oligonucleotide
  Target: SCNA; (+) strand; PAM type: NRG; PAM sequence: TGG
gtcacataaaggatctgaaa

SEQ ID NO: 35919 - DNA, 20 bp, Artificial Sequence
  Description of Artificial Sequence: Synthetic oligonucleotide
  Target: SCNA; (+) strand; PAM type: NRG; PAM sequence: GGG
tcacataaaggatctgaaat

SEQ ID NO: 35920 - DNA, 20 bp, Artificial Sequence
  Description of Artificial Sequence: Synthetic oligonucleotide
  Target: SCNA; (+) strand; PAM type: NRG; PAM sequence: TGG
tgaaatgggcatgtaaacaa

SEQ ID NO: 35921 - DNA, 20 bp, Artificial Sequence
  Description of Artificial Sequence: Synthetic oligonucleotide
  Target: SCNA; (+) strand; PAM type: NRG; PAM sequence: AAG
atgggcatgtaaacaatggc

SEQ ID NO: 35922 - DNA, 20 bp, Artificial Sequence
  Description of Artificial Sequence: Synthetic oligonucleotide
  Target: SCNA; (+) strand; PAM type: NRG; PAM sequence: CAG
tttttatatatatcaattaa

SEQ ID NO: 35923 - DNA, 20 bp, Artificial Sequence
  Description of Artificial Sequence: Synthetic oligonucleotide
  Target: SCNA; (+) strand; PAM type: NRG; PAM sequence: AGG
ttttatatatatcaattaac

SEQ ID NO: 35924 - DNA, 20 bp, Artificial Sequence
  Description of Artificial Sequence: Synthetic oligonucleotide
  Target: SCNA; (+) strand; PAM type: NRG; PAM sequence: AAG
caattaacaggtcttgaaaa

SEQ ID NO: 35925 - DNA, 20 bp, Artificial Sequence
  Description of Artificial Sequence: Synthetic oligonucleotide
  Target: SCNA; (+) strand; PAM type: NRG; PAM sequence: TGG
gaaaaaagtattgactctac

SEQ ID NO: 35926 - DNA, 20 bp, Artificial Sequence
  Description of Artificial Sequence: Synthetic oligonucleotide
  Target: SCNA; (+) strand; PAM type: NRG; PAM sequence: CAG
gaaatttccctgaatgaaat

SEQ ID NO: 35927 - DNA, 20 bp, Artificial Sequence
  Description of Artificial Sequence: Synthetic oligonucleotide
  Target: SCNA; (+) strand; PAM type: NRG; PAM sequence: TGG
ccctgaatgaaatcagacaa

SEQ ID NO: 35928 - DNA, 20 bp, Artificial Sequence
  Description of Artificial Sequence: Synthetic oligonucleotide
  Target: SCNA; (+) strand; PAM type: NRG; PAM sequence: CAG
aaatcagacaatggtgttct

SEQ ID NO: 35929 - DNA, 20 bp, Artificial Sequence
  Description of Artificial Sequence: Synthetic oligonucleotide
  Target: SCNA; (+) strand; PAM type: NRG; PAM sequence: TAG
ttctcagaaacaatgcatct

SEQ ID NO: 35930 - DNA, 20 bp, Artificial Sequence
  Description of Artificial Sequence: Synthetic oligonucleotide
  Target: SCNA; (+) strand; PAM type: NRG; PAM sequence: AAG
tcagaaacaatgcatcttag

SEQ ID NO: 35931 - DNA, 20 bp, Artificial Sequence
  Description of Artificial Sequence: Synthetic oligonucleotide
  Target: SCNA; (+) strand; PAM type: NRG; PAM sequence: GAG
agaaacaatgcatcttagaa

SEQ ID NO: 35932 - DNA, 20 bp, Artificial Sequence
  Description of Artificial Sequence: Synthetic oligonucleotide
  Target: SCNA; (+) strand; PAM type: NRG; PAM sequence: CAG
catcttagaagagttaatat

SEQ ID NO: 35933 - DNA, 20 bp, Artificial Sequence
  Description of Artificial Sequence: Synthetic oligonucleotide
  Target: SCNA; (+) strand; PAM type: NRG; PAM sequence: AAG
agaagagttaatatcagcca

SEQ ID NO: 35934 - DNA, 20 bp, Artificial Sequence
  Description of Artificial Sequence: Synthetic oligonucleotide
  Target: SCNA; (+) strand; PAM type: NRG; PAM sequence: TAG
ttctctcccaataaaatgcc

SEQ ID NO: 35935 - DNA, 20 bp, Artificial Sequence
  Description of Artificial Sequence: Synthetic oligonucleotide
  Target: SCNA; (+) strand; PAM type: NRG; PAM sequence: AAG
gaaaacaatgtatctctaac

SEQ ID NO: 35936 - DNA, 20 bp, Artificial Sequence
  Description of Artificial Sequence: Synthetic oligonucleotide
  Target: SCNA; (+) strand; PAM type: NRG; PAM sequence: AAG
aatgtatctctaacaagaaa

SEQ ID NO: 35937 - DNA, 20 bp, Artificial Sequence
  Description of Artificial Sequence: Synthetic oligonucleotide
  Target: SCNA; (+) strand; PAM type: NRG; PAM sequence: TGG
aagttcaatgctgtgttaac

SEQ ID NO: 35938 - DNA, 20 bp, Artificial Sequence
  Description of Artificial Sequence: Synthetic oligonucleotide
  Target: SCNA; (+) strand; PAM type: NRG; PAM sequence: AAG
tattttcaaacacattccct

SEQ ID NO: 35939 - DNA, 20 bp, Artificial Sequence
  Description of Artificial Sequence: Synthetic oligonucleotide
  Target: SCNA; (+) strand; PAM type: NRG; PAM sequence: AGG
attttcaaacacattcccta

SEQ ID NO: 35940 - DNA, 20 bp, Artificial Sequence
  Description of Artificial Sequence: Synthetic oligonucleotide
  Target: SCNA; (+) strand; PAM type: NRG; PAM sequence: AAG
gtaacaaatataattattaa

SEQ ID NO: 35941 - DNA, 20 bp, Artificial Sequence
  Description of Artificial Sequence: Synthetic oligonucleotide
  Target: SCNA; (+) strand; PAM type: NRG; PAM sequence: CAG
taataaatcttttaataatc

SEQ ID NO: 35942 - DNA, 20 bp, Artificial Sequence
  Description of Artificial Sequence: Synthetic oligonucleotide
  Target: SCNA; (+) strand; PAM type: NRG; PAM sequence: AAG
aaatcttttaataatccaga

SEQ ID NO: 35943 - DNA, 20 bp, Artificial Sequence
  Description of Artificial Sequence: Synthetic oligonucleotide
  Target: SCNA; (+) strand; PAM type: NRG; PAM sequence: TAG
ataatccagaaagaaacatt

SEQ ID NO: 35944 - DNA, 20 bp, Artificial Sequence
  Description of Artificial Sequence: Synthetic oligonucleotide
  Target: SCNA; (+) strand; PAM type: NRG; PAM sequence: AAG
atccagaaagaaacatttag

SEQ ID NO: 35945 - DNA, 20 bp, Artificial Sequence
  Description of Artificial Sequence: Synthetic oligonucleotide
  Target: SCNA; (+) strand; PAM type: NRG; PAM sequence: AAG
agaaacatttagaagacatt

SEQ ID NO: 35946 - DNA, 20 bp, Artificial Sequence
  Description of Artificial Sequence: Synthetic oligonucleotide
  Target: SCNA; (+) strand; PAM type: NRG; PAM sequence: AAG
acatttagaagacattaaga

SEQ ID NO: 35947 - DNA, 20 bp, Artificial Sequence
  Description of Artificial Sequence: Synthetic oligonucleotide
  Target: SCNA; (+) strand; PAM type: NRG; PAM sequence: CAG
gacattaagaaagacatatt

SEQ ID NO: 35948 - DNA, 20 bp, Artificial Sequence
  Description of Artificial Sequence: Synthetic oligonucleotide
  Target: SCNA; (+) strand; PAM type: NRG; PAM sequence: CAG
agaaagacatattcagaatt

SEQ ID NO: 35949 - DNA, 20 bp, Artificial Sequence
  Description of Artificial Sequence: Synthetic oligonucleotide
  Target: SCNA; (+) strand; PAM type: NRG; PAM sequence: CAG
agacatattcagaattcaga

SEQ ID NO: 35950 - DNA, 20 bp, Artificial Sequence
  Description of Artificial Sequence: Synthetic oligonucleotide
  Target: SCNA; (+) strand; PAM type: NRG; PAM sequence: AAG
catattcagaattcagacag

SEQ ID NO: 35951 - DNA, 20 bp, Artificial Sequence
  Description of Artificial Sequence: Synthetic oligonucleotide
  Target: SCNA; (+) strand; PAM type: NRG; PAM sequence: AAG
attcagacagaagctcataa

SEQ ID NO: 35952 - DNA, 20 bp, Artificial Sequence
  Description of Artificial Sequence: Synthetic oligonucleotide
  Target: SCNA; (+) strand; PAM type: NRG; PAM sequence: AAG
ctcataaaagctaacataaa

SEQ ID NO: 35953 - DNA, 20 bp, Artificial Sequence
  Description of Artificial Sequence: Synthetic oligonucleotide
  Target: SCNA; (+) strand; PAM type: NRG; PAM sequence: CAG
ataaaagctaacataaaaag

SEQ ID NO: 35954 - DNA, 20 bp, Artificial Sequence
  Description of Artificial Sequence: Synthetic oligonucleotide
  Target: SCNA; (+) strand; PAM type: NRG; PAM sequence: AGG
taaaagctaacataaaaagc

SEQ ID NO: 35955 - DNA, 20 bp, Artificial Sequence
  Description of Artificial Sequence: Synthetic oligonucleotide
  Target: SCNA; (+) strand; PAM type: NRG; PAM sequence: AAG
ggttaaaaatcaatttctac

SEQ ID NO: 35956 - DNA, 20 bp, Artificial Sequence
  Description of Artificial Sequence: Synthetic oligonucleotide
  Target: SCNA; (+) strand; PAM type: NRG; PAM sequence: TAG
caatttctacaagaaaaata

SEQ ID NO: 35957 - DNA, 20 bp, Artificial Sequence
  Description of Artificial Sequence: Synthetic oligonucleotide
  Target: SCNA; (+) strand; PAM type: NRG; PAM sequence: AAG
atagacatataatcaaacaa

SEQ ID NO: 35958 - DNA, 20 bp, Artificial Sequence
  Description of Artificial Sequence: Synthetic oligonucleotide
  Target: SCNA; (+) strand; PAM type: NRG; PAM sequence: AGG
tagacatataatcaaacaaa

SEQ ID NO: 35959 - DNA, 20 bp, Artificial Sequence
  Description of Artificial Sequence: Synthetic oligonucleotide
  Target: SCNA; (+) strand; PAM type: NRG; PAM sequence: GGG
agacatataatcaaacaaaa

SEQ ID NO: 35960 - DNA, 20 bp, Artificial Sequence
  Description of Artificial Sequence: Synthetic oligonucleotide
  Target: SCNA; (+) strand; PAM type: NRG; PAM sequence: GGG
gacatataatcaaacaaaag

SEQ ID NO: 35961 - DNA, 20 bp, Artificial Sequence
  Description of Artificial Sequence: Synthetic oligonucleotide
  Target: SCNA; (+) strand; PAM type: NRG; PAM sequence: GGG
acatataatcaaacaaaagg

SEQ ID NO: 35962 - DNA, 20 bp, Artificial Sequence
  Description of Artificial Sequence: Synthetic oligonucleotide
  Target: SCNA; (+) strand; PAM type: NRG; PAM sequence: TAG
gggaaatacataacaaacac

SEQ ID NO: 35963 - DNA, 20 bp, Artificial Sequence
  Description of Artificial Sequence: Synthetic oligonucleotide
  Target: SCNA; (+) strand; PAM type: NRG; PAM sequence: AAG
tagacgaatgcaaattttca

SEQ ID NO: 35964 - DNA, 20 bp, Artificial Sequence
  Description of Artificial Sequence: Synthetic oligonucleotide
  Target: SCNA; (+) strand; PAM type: NRG; PAM sequence: AAG
tatattttaccaaattttaa

SEQ ID NO: 35965 - DNA, 20 bp, Artificial Sequence
  Description of Artificial Sequence: Synthetic oligonucleotide
  Target: SCNA; (+) strand; PAM type: NRG; PAM sequence: AAG
attttaaaagttaactttaa

SEQ ID NO: 35966 - DNA, 20 bp, Artificial Sequence
  Description of Artificial Sequence: Synthetic oligonucleotide
  Target: SCNA; (+) strand; PAM type: NRG; PAM sequence: AAG
ttaaaagttaactttaaaag

SEQ ID NO: 35967 - DNA, 20 bp, Artificial Sequence
  Description of Artificial Sequence: Synthetic oligonucleotide
  Target: SCNA; (+) strand; PAM type: NRG; PAM sequence: TGG
tttaaaagaagaattaacct

SEQ ID NO: 35968 - DNA, 20 bp, Artificial Sequence
  Description of Artificial Sequence: Synthetic oligonucleotide
  Target: SCNA; (+) strand; PAM type: NRG; PAM sequence: TGG
aaaagaagaattaaccttgg

SEQ ID NO: 35969 - DNA, 20 bp, Artificial Sequence
  Description of Artificial Sequence: Synthetic oligonucleotide
  Target: SCNA; (+) strand; PAM type: NRG; PAM sequence: CAG
agaagaattaaccttggtgg

SEQ ID NO: 35970 - DNA, 20 bp, Artificial Sequence
  Description of Artificial Sequence: Synthetic oligonucleotide
  Target: SCNA; (+) strand; PAM type: NRG; PAM sequence: TGG
aaaatccatgtctgtgtgtc

SEQ ID NO: 35971 - DNA, 20 bp, Artificial Sequence
  Description of Artificial Sequence: Synthetic oligonucleotide
  Target: SCNA; (+) strand; PAM type: NRG; PAM sequence: TGG
gtctgtgtgtctggctgatt

SEQ ID NO: 35972 - DNA, 20 bp, Artificial Sequence
  Description of Artificial Sequence: Synthetic oligonucleotide
  Target: SCNA; (+) strand; PAM type: NRG; PAM sequence: GGG
tctgtgtgtctggctgattt

SEQ ID NO: 35973 - DNA, 20 bp, Artificial Sequence
  Description of Artificial Sequence: Synthetic oligonucleotide
  Target: SCNA; (+) strand; PAM type: NRG; PAM sequence: TGG
tttgggttcaattaaaatct

SEQ ID NO: 35974 - DNA, 20 bp, Artificial Sequence
  Description of Artificial Sequence: Synthetic oligonucleotide
  Target: SCNA; (+) strand; PAM type: NRG; PAM sequence: GGG
ttgggttcaattaaaatctt

SEQ ID NO: 35975 - DNA, 20 bp, Artificial Sequence
  Description of Artificial Sequence: Synthetic oligonucleotide
  Target: SCNA; (+) strand; PAM type: NRG; PAM sequence: TAG
ggttcaattaaaatcttggg

SEQ ID NO: 35976 - DNA, 20 bp, Artificial Sequence
  Description of Artificial Sequence: Synthetic oligonucleotide
  Target: SCNA; (+) strand; PAM type: NRG; PAM sequence: GAG
ttcaattaaaatcttgggta

SEQ ID NO: 35977 - DNA, 20 bp, Artificial Sequence
  Description of Artificial Sequence: Synthetic oligonucleotide
  Target: SCNA; (+) strand; PAM type: NRG; PAM sequence: AAG
atcttgggtagagaacactt

SEQ ID NO: 35978 - DNA, 20 bp, Artificial Sequence
  Description of Artificial Sequence: Synthetic oligonucleotide
  Target: SCNA; (+) strand; PAM type: NRG; PAM sequence: TAG
agaacacttaagtgaaaata

SEQ ID NO: 35979 - DNA, 20 bp, Artificial Sequence
  Description of Artificial Sequence: Synthetic oligonucleotide
  Target: SCNA; (+) strand; PAM type: NRG; PAM sequence: AGG
gaacacttaagtgaaaatat

SEQ ID NO: 35980 - DNA, 20 bp, Artificial Sequence
  Description of Artificial Sequence: Synthetic oligonucleotide
  Target: SCNA; (+) strand; PAM type: NRG; PAM sequence: GGG
aacacttaagtgaaaatata

SEQ ID NO: 35981 - DNA, 20 bp, Artificial Sequence
  Description of Artificial Sequence: Synthetic oligonucleotide
  Target: SCNA; (+) strand; PAM type: NRG; PAM sequence: TAG
tacaaaatataatgaataaa

SEQ ID NO: 35982 - DNA, 20 bp, Artificial Sequence
  Description of Artificial Sequence: Synthetic oligonucleotide
  Target: SCNA; (+) strand; PAM type: NRG; PAM sequence: GAG
caaaatataatgaataaata

SEQ ID NO: 35983 - DNA, 20 bp, Artificial Sequence
  Description of Artificial Sequence: Synthetic oligonucleotide
  Target: SCNA; (+) strand; PAM type: NRG; PAM sequence: AAG
taaccaaattccaacatttt

SEQ ID NO: 35984 - DNA, 20 bp, Artificial Sequence
  Description of Artificial Sequence: Synthetic oligonucleotide
  Target: SCNA; (+) strand; PAM type: NRG; PAM sequence: AGG
aaccaaattccaacatttta

SEQ ID NO: 35985 - DNA, 20 bp, Artificial Sequence
  Description of Artificial Sequence: Synthetic oligonucleotide
  Target: SCNA; (+) strand; PAM type: NRG; PAM sequence: AAG
caaattccaacattttaagg

SEQ ID NO: 35986 - DNA, 20 bp, Artificial Sequence
  Description of Artificial Sequence: Synthetic oligonucleotide
  Target: SCNA; (+) strand; PAM type: NRG; PAM sequence: AGG
aaattccaacattttaagga

SEQ ID NO: 35987 - DNA, 20 bp, Artificial Sequence
  Description of Artificial Sequence: Synthetic oligonucleotide
  Target: SCNA; (+) strand; PAM type: NRG; PAM sequence: AAG
ttaaggaaggtattaatttc

SEQ ID NO: 35988 - DNA, 20 bp, Artificial Sequence
  Description of Artificial Sequence: Synthetic oligonucleotide
  Target: SCNA; (+) strand; PAM type: NRG; PAM sequence: TGG
agctaatatccaaatttgtc

SEQ ID NO: 35989 - DNA, 20 bp, Artificial Sequence
  Description of Artificial Sequence: Synthetic oligonucleotide
  Target: SCNA; (+) strand; PAM type: NRG; PAM sequence: AAG
aatatccaaatttgtctggt

SEQ ID NO: 35990 - DNA, 20 bp, Artificial Sequence
  Description of Artificial Sequence: Synthetic oligonucleotide
  Target: SCNA; (+) strand; PAM type: NRG; PAM sequence: AAG
caaatttgtctggtaagaaa

SEQ ID NO: 35991 - DNA, 20 bp, Artificial Sequence
  Description of Artificial Sequence: Synthetic oligonucleotide
  Target: SCNA; (+) strand; PAM type: NRG; PAM sequence: AGG
aaatttgtctggtaagaaaa

SEQ ID NO: 35992 - DNA, 20 bp, Artificial Sequence
  Description of Artificial Sequence: Synthetic oligonucleotide
  Target: SCNA; (+) strand; PAM type: NRG; PAM sequence: GAG
ttgtctggtaagaaaaaggt

SEQ ID NO: 35993 - DNA, 20 bp, Artificial Sequence
  Description of Artificial Sequence: Synthetic oligonucleotide
  Target: SCNA; (+) strand; PAM type: NRG; PAM sequence: TAG
ggtgagcatgatccctatga

SEQ ID NO: 35994 - DNA, 20 bp, Artificial Sequence
  Description of Artificial Sequence: Synthetic oligonucleotide
  Target: SCNA; (+) strand; PAM type: NRG; PAM sequence: TGG
gagcatgatccctatgatag

SEQ ID NO: 35995 - DNA, 20 bp, Artificial Sequence
  Description of Artificial Sequence: Synthetic oligonucleotide
  Target: SCNA; (+) strand; PAM type: NRG; PAM sequence: GAG
gccattacttctacttttgt

SEQ ID NO: 35996 - DNA, 20 bp, Artificial Sequence
  Description of Artificial Sequence: Synthetic oligonucleotide
  Target: SCNA; (+) strand; PAM type: NRG; PAM sequence: AGG
ccattacttctacttttgtg

SEQ ID NO: 35997 - DNA, 20 bp, Artificial Sequence
  Description of Artificial Sequence: Synthetic oligonucleotide
  Target: SCNA; (+) strand; PAM type: NRG; PAM sequence: CAG
ttacttctacttttgtgagg

SEQ ID NO: 35998 - DNA, 20 bp, Artificial Sequence
  Description of Artificial Sequence: Synthetic oligonucleotide
  Target: SCNA; (+) strand; PAM type: NRG; PAM sequence: TAG
tctacttttgtgaggcagaa

SEQ ID NO: 35999 - DNA, 20 bp, Artificial Sequence
  Description of Artificial Sequence: Synthetic oligonucleotide
  Target: SCNA; (+) strand; PAM type: NRG; PAM sequence: AGG
ctacttttgtgaggcagaat

SEQ ID NO: 36000 - DNA, 20 bp, Artificial Sequence
  Description of Artificial Sequence: Synthetic oligonucleotide
  Target: SCNA; (+) strand; PAM type: NRG; PAM sequence: TGG
cttttgtgaggcagaatagg

SEQ ID NO: 36001 - DNA, 20 bp, Artificial Sequence
  Description of Artificial Sequence: Synthetic oligonucleotide
  Target: SCNA; (+) strand; PAM type: NRG; PAM sequence: GGG
ttttgtgaggcagaataggt

SEQ ID NO: 36002 - DNA, 20 bp, Artificial Sequence
  Description of Artificial Sequence: Synthetic oligonucleotide
  Target: SCNA; (+) strand; PAM type: NRG; PAM sequence: CAG
gtgaggcagaataggtggga

SEQ ID NO: 36003 - DNA, 20 bp, Artificial Sequence
  Description of Artificial Sequence: Synthetic oligonucleotide
  Target: SCNA; (+) strand; PAM type: NRG; PAM sequence: TAG
cagaataggtgggacagctc

SEQ ID NO: 36004 - DNA, 20 bp, Artificial Sequence
  Description of Artificial Sequence: Synthetic oligonucleotide
  Target: SCNA; (+) strand; PAM type: NRG; PAM sequence: AGG
agaataggtgggacagctct

SEQ ID NO: 36005 - DNA, 20 bp, Artificial Sequence
  Description of Artificial Sequence: Synthetic oligonucleotide
  Target: SCNA; (+) strand; PAM type: NRG; PAM sequence: GGG
gaataggtgggacagctcta

SEQ ID NO: 36006 - DNA, 20 bp, Artificial Sequence
  Description of Artificial Sequence: Synthetic oligonucleotide
  Target: SCNA; (+) strand; PAM type: NRG; PAM sequence: AAG
gattttattctatcaattat

SEQ ID NO: 36007 - DNA, 20 bp, Artificial Sequence
  Description of Artificial Sequence: Synthetic oligonucleotide
  Target: SCNA; (+) strand; PAM type: NRG; PAM sequence: GAG
ttttattctatcaattataa

SEQ ID NO: 36008 - DNA, 20 bp, Artificial Sequence
  Description of Artificial Sequence: Synthetic oligonucleotide
  Target: SCNA; (+) strand; PAM type: NRG; PAM sequence: AGG
tttattctatcaattataag

SEQ ID NO: 36009 - DNA, 20 bp, Artificial Sequence
  Description of Artificial Sequence: Synthetic oligonucleotide
  Target: SCNA; (+) strand; PAM type: NRG; PAM sequence: GAG
ctatcaattataagaggtct

SEQ ID NO: 36010 - DNA, 20 bp, Artificial Sequence
  Description of Artificial Sequence: Synthetic oligonucleotide
  Target: SCNA; (+) strand; PAM type: NRG; PAM sequence: CAG
aattataagaggtctgagaa

SEQ ID NO: 36011 - DNA, 20 bp, Artificial Sequence
  Description of Artificial Sequence: Synthetic oligonucleotide
  Target: SCNA; (+) strand; PAM type: NRG; PAM sequence: AGG
attataagaggtctgagaac

SEQ ID NO: 36012 - DNA, 20 bp, Artificial Sequence
  Description of Artificial Sequence: Synthetic oligonucleotide
  Target: SCNA; (+) strand; PAM type: NRG; PAM sequence: AAG
ctgagaacaggaaatgaaaa

SEQ ID NO: 36013 - DNA, 20 bp, Artificial Sequence
  Description of Artificial Sequence: Synthetic oligonucleotide
  Target: SCNA; (+) strand; PAM type: NRG; PAM sequence: AAG
tgaaaaaagctatgaccctc

SEQ ID NO: 36014 - DNA, 20 bp, Artificial Sequence
  Description of Artificial Sequence: Synthetic oligonucleotide
  Target: SCNA; (+) strand; PAM type: NRG; PAM sequence: TAG
gctatgaccctcaagccatc

SEQ ID NO: 36015 - DNA, 20 bp, Artificial Sequence
  Description of Artificial Sequence: Synthetic oligonucleotide
  Target: SCNA; (+) strand; PAM type: NRG; PAM sequence: TGG
tctagctcaaacgatttcac

SEQ ID NO: 36016 - DNA, 20 bp, Artificial Sequence
  Description of Artificial Sequence: Synthetic oligonucleotide
  Target: SCNA; (+) strand; PAM type: NRG; PAM sequence: TAG
caaacgatttcactggcatc

SEQ ID NO: 36017 - DNA, 20 bp, Artificial Sequence
  Description of Artificial Sequence: Synthetic oligonucleotide
  Target: SCNA; (+) strand; PAM type: NRG; PAM sequence: AGG
aaacgatttcactggcatct

SEQ ID NO: 36018 - DNA, 20 bp, Artificial Sequence
  Description of Artificial Sequence: Synthetic oligonucleotide
  Target: SCNA; (+) strand; PAM type: NRG; PAM sequence: TGG
atctaggatctgatatattt

SEQ ID NO: 36019 - DNA, 20 bp, Artificial Sequence
  Description of Artificial Sequence: Synthetic oligonucleotide
  Target: SCNA; (+) strand; PAM type: NRG; PAM sequence: TGG
ggatctgatatattttggat

SEQ ID NO: 36020 - DNA, 20 bp, Artificial Sequence
  Description of Artificial Sequence: Synthetic oligonucleotide
  Target: SCNA; (+) strand; PAM type: NRG; PAM sequence: GGG
gatctgatatattttggatt

SEQ ID NO: 36021 - DNA, 20 bp, Artificial Sequence
  Description of Artificial Sequence: Synthetic oligonucleotide
  Target: SCNA; (+) strand; PAM type: NRG; PAM sequence: GGG
atctgatatattttggattg

SEQ ID NO: 36022 - DNA, 20 bp, Artificial Sequence
  Description of Artificial Sequence: Synthetic oligonucleotide
  Target: SCNA; (+) strand; PAM type: NRG; PAM sequence: AAG
tgatatattttggattgggg

SEQ ID NO: 36023 - DNA, 20 bp, Artificial Sequence
  Description of Artificial Sequence: Synthetic oligonucleotide
  Target: SCNA; (+) strand; PAM type: NRG; PAM sequence: GAG
atatattttggattggggaa

SEQ ID NO: 36024 - DNA, 20 bp, Artificial Sequence
  Description of Artificial Sequence: Synthetic oligonucleotide
  Target: SCNA; (+) strand; PAM type: NRG; PAM sequence: CAG
ggattggggaagagtaaaca

SEQ ID NO: 36025 - DNA, 20 bp, Artificial Sequence
  Description of Artificial Sequence: Synthetic oligonucleotide
  Target: SCNA; (+) strand; PAM type: NRG; PAM sequence: AGG
gattggggaagagtaaacac

SEQ ID NO: 36026 - DNA, 20 bp, Artificial Sequence
  Description of Artificial Sequence: Synthetic oligonucleotide
  Target: SCNA; (+) strand; PAM type: NRG; PAM sequence: TGG
aacacaggcaaaatttgcat

SEQ ID NO: 36027 - DNA, 20 bp, Artificial Sequence
  Description of Artificial Sequence: Synthetic oligonucleotide
  Target: SCNA; (+) strand; PAM type: NRG; PAM sequence: AAG
caaaatttgcattggatgtg

SEQ ID NO: 36028 - DNA, 20 bp, Artificial Sequence
  Description of Artificial Sequence: Synthetic oligonucleotide
  Target: SCNA; (+) strand; PAM type: NRG; PAM sequence: TGG
tgcattggatgtgaagctaa

SEQ ID NO: 36029 - DNA, 20 bp, Artificial Sequence
  Description of Artificial Sequence: Synthetic oligonucleotide
  Target: SCNA; (+) strand; PAM type: NRG; PAM sequence: TAG
ccttccacataattttgctg

SEQ ID NO: 36030 - DNA, 20 bp, Artificial Sequence
  Description of Artificial Sequence: Synthetic oligonucleotide
  Target: SCNA; (+) strand; PAM type: NRG; PAM sequence: AGG
cttccacataattttgctgt

SEQ ID NO: 36031 - DNA, 20 bp, Artificial Sequence
  Description of Artificial Sequence: Synthetic oligonucleotide
  Target: SCNA; (+) strand; PAM type: NRG; PAM sequence: CAG
tatcaattgattccctgttt

SEQ ID NO: 36032 - DNA, 20 bp, Artificial Sequence
  Description of Artificial Sequence: Synthetic oligonucleotide
  Target: SCNA; (+) strand; PAM type: NRG; PAM sequence: GAG
tcaattgattccctgtttca

SEQ ID NO: 36033 - DNA, 20 bp, Artificial Sequence
  Description of Artificial Sequence: Synthetic oligonucleotide
  Target: SCNA; (+) strand; PAM type: NRG; PAM sequence: AGG
caattgattccctgtttcag

SEQ ID NO: 36034 - DNA, 20 bp, Artificial Sequence
  Description of Artificial Sequence: Synthetic oligonucleotide
  Target: SCNA; (+) strand; PAM type: NRG; PAM sequence: AAG
ttgattccctgtttcagagg

SEQ ID NO: 36035 - DNA, 20 bp, Artificial Sequence
  Description of Artificial Sequence: Synthetic oligonucleotide
  Target: SCNA; (+) strand; PAM type: NRG; PAM sequence: AGG
tgattccctgtttcagagga

SEQ ID NO: 36036 - DNA, 20 bp, Artificial Sequence
  Description of Artificial Sequence: Synthetic oligonucleotide
  Target: SCNA; (+) strand; PAM type: NRG; PAM sequence: AAG
gtttcagaggaaggattgtt

SEQ ID NO: 36037 - DNA, 20 bp, Artificial Sequence
  Description of Artificial Sequence: Synthetic oligonucleotide
  Target: SCNA; (+) strand; PAM type: NRG; PAM sequence: TGG
gaaggattgttaagctaaaa

SEQ ID NO: 36038 - DNA, 20 bp, Artificial Sequence
  Description of Artificial Sequence: Synthetic oligonucleotide
  Target: SCNA; (+) strand; PAM type: NRG; PAM sequence: CAG
taagctaaaatggtttcaac

SEQ ID NO: 36039 - DNA, 20 bp, Artificial Sequence
  Description of Artificial Sequence: Synthetic oligonucleotide
  Target: SCNA; (+) strand; PAM type: NRG; PAM sequence: AAG
ttcaaccagatcaaacatta

SEQ ID NO: 36040 - DNA, 20 bp, Artificial Sequence
  Description of Artificial Sequence: Synthetic oligonucleotide
  Target: SCNA; (+) strand; PAM type: NRG; PAM sequence: AAG
accagatcaaacattaaagt

SEQ ID NO: 36041 - DNA, 20 bp, Artificial Sequence
  Description of Artificial Sequence: Synthetic oligonucleotide
  Target: SCNA; (+) strand; PAM type: NRG; PAM sequence: CAG
agatcaaacattaaagtaag

SEQ ID NO: 36042 - DNA, 20 bp, Artificial Sequence
  Description of Artificial Sequence: Synthetic oligonucleotide
  Target: SCNA; (+) strand; PAM type: NRG; PAM sequence: GAG
atcaaacattaaagtaagca

SEQ ID NO: 36043 - DNA, 20 bp, Artificial Sequence
  Description of Artificial Sequence: Synthetic oligonucleotide
  Target: SCNA; (+) strand; PAM type: NRG; PAM sequence: CAG
ttaaagtaagcagagttttt

SEQ ID NO: 36044 - DNA, 20 bp, Artificial Sequence
  Description of Artificial Sequence: Synthetic oligonucleotide
  Target: SCNA; (+) strand; PAM type: NRG; PAM sequence: TAG
aagtaagcagagtttttcag

SEQ ID NO: 36045 - DNA, 20 bp, Artificial Sequence
  Description of Artificial Sequence: Synthetic oligonucleotide
  Target: SCNA; (+) strand; PAM type: NRG; PAM sequence: TAG
agtttttcagtagatttgac

SEQ ID NO: 36046 - DNA, 20 bp, Artificial Sequence
  Description of Artificial Sequence: Synthetic oligonucleotide
  Target: SCNA; (+) strand; PAM type: NRG; PAM sequence: AAG
tagattcttcatttactata

SEQ ID NO: 36047 - DNA, 20 bp, Artificial Sequence
  Description of Artificial Sequence: Synthetic oligonucleotide
  Target: SCNA; (+) strand; PAM type: NRG; PAM sequence: TAG
cccgaaataccacctgaaat

SEQ ID NO: 36048 - DNA, 20 bp, Artificial Sequence
  Description of Artificial Sequence: Synthetic oligonucleotide
  Target: SCNA; (+) strand; PAM type: NRG; PAM sequence: TAG
accacctgaaattagttttc

SEQ ID NO: 36049 - DNA, 20 bp, Artificial Sequence
  Description of Artificial Sequence: Synthetic oligonucleotide
  Target: SCNA; (+) strand; PAM type: NRG; PAM sequence: CAG
aattagttttctagttaaat

SEQ ID NO: 36050 - DNA, 20 bp, Artificial Sequence
  Description of Artificial Sequence: Synthetic oligonucleotide
  Target: SCNA; (+) strand; PAM type: NRG; PAM sequence: TAG
gttttctagttaaatcagta

SEQ ID NO: 36051 - DNA, 20 bp, Artificial Sequence
  Description of Artificial Sequence: Synthetic oligonucleotide
  Target: SCNA; (+) strand; PAM type: NRG; PAM sequence: TGG
agttaaatcagtatagacta

SEQ ID NO: 36052 - DNA, 20 bp, Artificial Sequence
  Description of Artificial Sequence: Synthetic oligonucleotide
  Target: SCNA; (+) strand; PAM type: NRG; PAM sequence: AAG
tcagtatagactatggataa

SEQ ID NO: 36053 - DNA, 20 bp, Artificial Sequence
  Description of Artificial Sequence: Synthetic oligonucleotide
  Target: SCNA; (+) strand; PAM type: NRG; PAM sequence: AAG
gtatagactatggataaaag

SEQ ID NO: 36054 - DNA, 20 bp, Artificial Sequence
  Description of Artificial Sequence: Synthetic oligonucleotide
  Target: SCNA; (+) strand; PAM type: NRG; PAM sequence: AAG
tatggataaaagaagttacg

SEQ ID NO: 36055 - DNA, 20 bp, Artificial Sequence
  Description of Artificial Sequence: Synthetic oligonucleotide
  Target: SCNA; (+) strand; PAM type: NRG; PAM sequence: CAG
tcttaatcttgatcaatatt

SEQ ID NO: 36056 - DNA, 20 bp, Artificial Sequence
  Description of Artificial Sequence: Synthetic oligonucleotide
  Target: SCNA; (+) strand; PAM type: NRG; PAM sequence: GAG
ttaatcttgatcaatattca

SEQ ID NO: 36057 - DNA, 20 bp, Artificial Sequence
  Description of Artificial Sequence: Synthetic oligonucleotide
  Target: SCNA; (+) strand; PAM type: NRG; PAM sequence: AAG
atgactactccccatcacaa

SEQ ID NO: 36058 - DNA, 20 bp, Artificial Sequence
  Description of Artificial Sequence: Synthetic oligonucleotide
  Target: SCNA; (+) strand; PAM type: NRG; PAM sequence: AAG
taatgaaatcttttttgctg

SEQ ID NO: 36059 - DNA, 20 bp, Artificial Sequence
  Description of Artificial Sequence: Synthetic oligonucleotide
  Target: SCNA; (+) strand; PAM type: NRG; PAM sequence: AAG
cttttttgctgaagtttctg

SEQ ID NO: 36060 - DNA, 20 bp, Artificial Sequence
  Description of Artificial Sequence: Synthetic oligonucleotide
  Target: SCNA; (+) strand; PAM type: NRG; PAM sequence: AAG
agtttctgaagaaataaata

SEQ ID NO: 36061 - DNA, 20 bp, Artificial Sequence
  Description of Artificial Sequence: Synthetic oligonucleotide
  Target: SCNA; (+) strand; PAM type: NRG; PAM sequence: AAG
ttctgaagaaataaataaag

SEQ ID NO: 36062 - DNA, 20 bp, Artificial Sequence
  Description of Artificial Sequence: Synthetic oligonucleotide
  Target: SCNA; (+) strand; PAM type: NRG; PAM sequence: TGG
aagaaataaataaagaagcc

SEQ ID NO: 36063 - DNA, 20 bp, Artificial Sequence
  Description of Artificial Sequence: Synthetic oligonucleotide
  Target: SCNA; (+) strand; PAM type: NRG; PAM sequence: CAG
taaagaagcctggtgcctct

SEQ ID NO: 36064 - DNA, 20 bp, Artificial Sequence
  Description of Artificial Sequence: Synthetic oligonucleotide
  Target: SCNA; (+) strand; PAM type: NRG; PAM sequence: GAG
aagaagcctggtgcctctca

SEQ ID NO: 36065 - DNA, 20 bp, Artificial Sequence
  Description of Artificial Sequence: Synthetic oligonucleotide
  Target: SCNA; (+) strand; PAM type: NRG; PAM sequence: CAG
gtgcctctcagagttccaca

SEQ ID NO: 36066 - DNA, 20 bp, Artificial Sequence
  Description of Artificial Sequence: Synthetic oligonucleotide
  Target: SCNA; (+) strand; PAM type: NRG; PAM sequence: GAG
cagagttccacacagctgat

SEQ ID NO: 36067 - DNA, 20 bp, Artificial Sequence
  Description of Artificial Sequence: Synthetic oligonucleotide
  Target: SCNA; (+) strand; PAM type: NRG; PAM sequence: TAG
ttccacacagctgatgagtc

SEQ ID NO: 36068 - DNA, 20 bp, Artificial Sequence
  Description of Artificial Sequence: Synthetic oligonucleotide
  Target: SCNA; (+) strand; PAM type: NRG; PAM sequence: AGG
tccacacagctgatgagtct

SEQ ID NO: 36069 - DNA, 20 bp, Artificial Sequence
  Description of Artificial Sequence: Synthetic oligonucleotide
  Target: SCNA; (+) strand; PAM type: NRG; PAM sequence: CAG
acacagctgatgagtctagg

SEQ ID NO: 36070 - DNA, 20 bp, Artificial Sequence
  Description of Artificial Sequence: Synthetic oligonucleotide
  Target: SCNA; (+) strand; PAM type: NRG; PAM sequence: CAG
acaaatgacactatattcct

SEQ ID NO: 36071 - DNA, 20 bp, Artificial Sequence
  Description of Artificial Sequence: Synthetic oligonucleotide
  Target: SCNA; (+) strand; PAM type: NRG; PAM sequence: TGG
tccctctcatcttcttgcaa

SEQ ID NO: 36072 - DNA, 20 bp, Artificial Sequence
  Description of Artificial Sequence: Synthetic oligonucleotide
  Target: SCNA; (+) strand; PAM type: NRG; PAM sequence: CAG
gaacactgctacattccttg

SEQ ID NO: 36073 - DNA, 20 bp, Artificial Sequence
  Description of Artificial Sequence: Synthetic oligonucleotide
  Target: SCNA; (+) strand; PAM type: NRG; PAM sequence: GAG
acactgctacattccttgca

SEQ ID NO: 36074 - DNA, 20 bp, Artificial Sequence
  Description of Artificial Sequence: Synthetic oligonucleotide
  Target: SCNA; (+) strand; PAM type: NRG; PAM sequence: AGG
cactgctacattccttgcag

SEQ ID NO: 36075 - DNA, 20 bp, Artificial Sequence
  Description of Artificial Sequence: Synthetic oligonucleotide
  Target: SCNA; (+) strand; PAM type: NRG; PAM sequence: TAG
gaaacgtactgtacatttca

SEQ ID NO: 36076 - DNA, 20 bp, Artificial Sequence
  Description of Artificial Sequence: Synthetic oligonucleotide
  Target: SCNA; (+) strand; PAM type: NRG; PAM sequence: TGG
acatttcatagctgtcacct

SEQ ID NO: 36077 - DNA, 20 bp, Artificial Sequence
  Description of Artificial Sequence: Synthetic oligonucleotide
  Target: SCNA; (+) strand; PAM type: NRG; PAM sequence: AAG
tagctgtcaccttggcataa

SEQ ID NO: 36078 - DNA, 20 bp, Artificial Sequence
  Description of Artificial Sequence: Synthetic oligonucleotide
  Target: SCNA; (+) strand; PAM type: NRG; PAM sequence: AGG
agctgtcaccttggcataaa

SEQ ID NO: 36079 - DNA, 20 bp, Artificial Sequence
  Description of Artificial Sequence: Synthetic oligonucleotide
  Target: SCNA; (+) strand; PAM type: NRG; PAM sequence: CAG
tgtcaccttggcataaaagg

SEQ ID NO: 36080 - DNA, 20 bp, Artificial Sequence
  Description of Artificial Sequence: Synthetic oligonucleotide
  Target: SCNA; (+) strand; PAM type: NRG; PAM sequence: GAG
tcaccttggcataaaaggca

SEQ ID NO: 36081 - DNA, 20 bp, Artificial Sequence
  Description of Artificial Sequence: Synthetic oligonucleotide
  Target: SCNA; (+) strand; PAM type: NRG; PAM sequence: AGG
caccttggcataaaaggcag

SEQ ID NO: 36082 - DNA, 20 bp, Artificial Sequence
  Description of Artificial Sequence: Synthetic oligonucleotide
  Target: SCNA; (+) strand; PAM type: NRG; PAM sequence: GGG
accttggcataaaaggcaga

SEQ ID NO: 36083 - DNA, 20 bp, Artificial Sequence
  Description of Artificial Sequence: Synthetic oligonucleotide
  Target: SCNA; (+) strand; PAM type: NRG; PAM sequence: GAG
cttggcataaaaggcagagg

SEQ ID NO: 36084 - DNA, 20 bp, Artificial Sequence
  Description of Artificial Sequence: Synthetic oligonucleotide
  Target: SCNA; (+) strand; PAM type: NRG; PAM sequence: AGG
ttggcataaaaggcagaggg

SEQ ID NO: 36085 - DNA, 20 bp, Artificial Sequence
  Description of Artificial Sequence: Synthetic oligonucleotide
  Target: SCNA; (+) strand; PAM type: NRG; PAM sequence: GGG
tggcataaaaggcagaggga

SEQ ID NO: 36086 - DNA, 20 bp, Artificial Sequence
  Description of Artificial Sequence: Synthetic oligonucleotide
  Target: SCNA; (+) strand; PAM type: NRG; PAM sequence: GGG
ggcataaaaggcagagggag

SEQ ID NO: 36087 - DNA, 20 bp, Artificial Sequence
  Description of Artificial Sequence: Synthetic oligonucleotide
  Target: SCNA; (+) strand; PAM type: NRG; PAM sequence: GGG
gcataaaaggcagagggagg

SEQ ID NO: 36088 - DNA, 20 bp, Artificial Sequence
  Description of Artificial Sequence: Synthetic oligonucleotide
  Target: SCNA; (+) strand; PAM type: NRG; PAM sequence: TGG
ggagggggaaattcttcttt

SEQ ID NO: 36089 - DNA, 20 bp, Artificial Sequence
  Description of Artificial Sequence: Synthetic oligonucleotide
  Target: SCNA; (+) strand; PAM type: NRG; PAM sequence: GAG
ttttatatatcaataaccat

SEQ ID NO: 36090 - DNA, 20 bp, Artificial Sequence
  Description of Artificial Sequence: Synthetic oligonucleotide
  Target: SCNA; (+) strand; PAM type: NRG; PAM sequence: GAG
aataaccatgagaaactatt

SEQ ID NO: 36091 - DNA, 20 bp, Artificial Sequence
  Description of Artificial Sequence: Synthetic oligonucleotide
  Target: SCNA; (+) strand; PAM type: NRG; PAM sequence: AAG
accatgagaaactattgagt

SEQ ID NO: 36092 - DNA, 20 bp, Artificial Sequence
  Description of Artificial Sequence: Synthetic oligonucleotide
  Target: SCNA; (+) strand; PAM type: NRG; PAM sequence: TAG
gagaaactattgagtaagtt

SEQ ID NO: 36093 - DNA, 20 bp, Artificial Sequence
  Description of Artificial Sequence: Synthetic oligonucleotide
  Target: SCNA; (+) strand; PAM type: NRG; PAM sequence: CAG
gagtaagtttagatataaaa

SEQ ID NO: 36094 - DNA, 20 bp, Artificial Sequence
  Description of Artificial Sequence: Synthetic oligonucleotide
  Target: SCNA; (+) strand; PAM type: NRG; PAM sequence: GAG
gtaagtttagatataaaaca

SEQ ID NO: 36095 - DNA, 20 bp, Artificial Sequence
  Description of Artificial Sequence: Synthetic oligonucleotide
  Target: SCNA; (+) strand; PAM type: NRG; PAM sequence: TGG
taaaacagagaactttgttt

SEQ ID NO: 36096 - DNA, 20 bp, Artificial Sequence
  Description of Artificial Sequence: Synthetic oligonucleotide
  Target: SCNA; (+) strand; PAM type: NRG; PAM sequence: AAG
aacagagaactttgttttgg

SEQ ID NO: 36097 - DNA, 20 bp, Artificial Sequence
  Description of Artificial Sequence: Synthetic oligonucleotide
  Target: SCNA; (+) strand; PAM type: NRG; PAM sequence: AGG
acagagaactttgttttgga

SEQ ID NO: 36098 - DNA, 20 bp, Artificial Sequence
  Description of Artificial Sequence: Synthetic oligonucleotide
  Target: SCNA; (+) strand; PAM type: NRG; PAM sequence: AAG
ttggaaggcattacttttca

SEQ ID NO: 36099 - DNA, 20 bp, Artificial Sequence
  Description of Artificial Sequence: Synthetic oligonucleotide
  Target: SCNA; (+) strand; PAM type: NRG; PAM sequence: AGG
tggaaggcattacttttcaa

SEQ ID NO: 36100 - DNA, 20 bp, Artificial Sequence
  Description of Artificial Sequence: Synthetic oligonucleotide
  Target: SCNA; (+) strand; PAM type: NRG; PAM sequence: TGG
ttttcaaaggaaatgcatcg

SEQ ID NO: 36101 - DNA, 20 bp, Artificial Sequence
  Description of Artificial Sequence: Synthetic oligonucleotide
  Target: SCNA; (+) strand; PAM type: NRG; PAM sequence: GAG
ttcaaaggaaatgcatcgtg

SEQ ID NO: 36102 - DNA, 20 bp, Artificial Sequence
  Description of Artificial Sequence: Synthetic oligonucleotide
  Target: SCNA; (+) strand; PAM type: NRG; PAM sequence: GAG
caaaggaaatgcatcgtgga

SEQ ID NO: 36103 - DNA, 20 bp, Artificial Sequence
  Description of Artificial Sequence: Synthetic oligonucleotide
  Target: SCNA; (+) strand; PAM type: NRG; PAM sequence: GAG
ggaaatgcatcgtggagagt

SEQ ID NO: 36104 - DNA, 20 bp, Artificial Sequence
  Description of Artificial Sequence: Synthetic oligonucleotide
  Target: SCNA; (+) strand; PAM type: NRG; PAM sequence: AGG
gaaatgcatcgtggagagtg

SEQ ID NO: 36105 - DNA, 20 bp, Artificial Sequence
  Description of Artificial Sequence: Synthetic oligonucleotide
  Target: SCNA; (+) strand; PAM type: NRG; PAM sequence: GAG
aatgcatcgtggagagtgag

SEQ ID NO: 36106 - DNA, 20 bp, Artificial Sequence
  Description of Artificial Sequence: Synthetic oligonucleotide
  Target: SCNA; (+) strand; PAM type: NRG; PAM sequence: AAG
atcgtggagagtgaggagtg

SEQ ID NO: 36107 - DNA, 20 bp, Artificial Sequence
  Description of Artificial Sequence: Synthetic oligonucleotide
  Target: SCNA; (+) strand; PAM type: NRG; PAM sequence: AGG
tcgtggagagtgaggagtga

SEQ ID NO: 36108 - DNA, 20 bp, Artificial Sequence
  Description of Artificial Sequence: Synthetic oligonucleotide
  Target: SCNA; (+) strand; PAM type: NRG; PAM sequence: GGG
cgtggagagtgaggagtgaa

SEQ ID NO: 36109 - DNA, 20 bp, Artificial Sequence
  Description of Artificial Sequence: Synthetic oligonucleotide
  Target: SCNA; (+) strand; PAM type: NRG; PAM sequence: AAG
agtgaagggtcaatgttttc

SEQ ID NO: 36110 - DNA, 20 bp, Artificial Sequence
  Description of Artificial Sequence: Synthetic oligonucleotide
  Target: SCNA; (+) strand; PAM type: NRG; PAM sequence: GAG
tgaagggtcaatgttttcaa

SEQ ID NO: 36111 - DNA, 20 bp, Artificial Sequence
  Description of Artificial Sequence: Synthetic oligonucleotide
  Target: SCNA; (+) strand; PAM type: NRG; PAM sequence: CGG
tcaatgttttcaagagcgat

SEQ ID NO: 36112 - DNA, 20 bp, Artificial Sequence
  Description of Artificial Sequence: Synthetic oligonucleotide
  Target: SCNA; (+) strand; PAM type: NRG; PAM sequence: AAG
atgttttcaagagcgatcgg

SEQ ID NO: 36113 - DNA, 20 bp, Artificial Sequence
  Description of Artificial Sequence: Synthetic oligonucleotide
  Target: SCNA; (+) strand; PAM type: NRG; PAM sequence: TGG
gatattcctaatcttctttc

SEQ ID NO: 36114 - DNA, 20 bp, Artificial Sequence
  Description of Artificial Sequence: Synthetic oligonucleotide
  Target: SCNA; (+) strand; PAM type: NRG; PAM sequence: TAG
tatgctcaccaactgcctaa

SEQ ID NO: 36115 - DNA, 20 bp, Artificial Sequence
  Description of Artificial Sequence: Synthetic oligonucleotide
  Target: SCNA; (+) strand; PAM type: NRG; PAM sequence: TGG
gctcaccaactgcctaatag

SEQ ID NO: 36116 - DNA, 20 bp, Artificial Sequence
  Description of Artificial Sequence: Synthetic oligonucleotide
  Target: SCNA; (+) strand; PAM type: NRG; PAM sequence: TGG
tgcctaatagtggatgcatg

SEQ ID NO: 36117 - DNA, 20 bp, Artificial Sequence
  Description of Artificial Sequence: Synthetic oligonucleotide
  Target: SCNA; (+) strand; PAM type: NRG; PAM sequence: TGG
aattgccattctaaattatg

SEQ ID NO: 36118 - DNA, 20 bp, Artificial Sequence
  Description of Artificial Sequence: Synthetic oligonucleotide
  Target: SCNA; (+) strand; PAM type: NRG; PAM sequence: AAG
tctaaattatgtggtttact

SEQ ID NO: 36119 - DNA, 20 bp, Artificial Sequence
  Description of Artificial Sequence: Synthetic oligonucleotide
  Target: SCNA; (+) strand; PAM type: NRG; PAM sequence: AAG
aataatgtataattaattat

SEQ ID NO: 36120 - DNA, 20 bp, Artificial Sequence
  Description of Artificial Sequence: Synthetic oligonucleotide
  Target: SCNA; (+) strand; PAM type: NRG; PAM sequence: TAG
aatgtataattaattataag

SEQ ID NO: 36121 - DNA, 20 bp, Artificial Sequence
  Description of Artificial Sequence: Synthetic oligonucleotide
  Target: SCNA; (+) strand; PAM type: NRG; PAM sequence: AAG
taagtagtttttaaatcttc

SEQ ID NO: 36122 - DNA, 20 bp, Artificial Sequence
  Description of Artificial Sequence: Synthetic oligonucleotide
  Target: SCNA; (+) strand; PAM type: NRG; PAM sequence: GAG
atcttcaagatttatctcat

SEQ ID NO: 36123 - DNA, 20 bp, Artificial Sequence
  Description of Artificial Sequence: Synthetic oligonucleotide
  Target: SCNA; (+) strand; PAM type: NRG; PAM sequence: TGG
gatttatctcatgagtgaaa

SEQ ID NO: 36124 - DNA, 20 bp, Artificial Sequence
  Description of Artificial Sequence: Synthetic oligonucleotide
  Target: SCNA; (+) strand; PAM type: NRG; PAM sequence: AAG
gaaatggttgctttgttctt

SEQ ID NO: 36125 - DNA, 20 bp, Artificial Sequence
  Description of Artificial Sequence: Synthetic oligonucleotide
  Target: SCNA; (+) strand; PAM type: NRG; PAM sequence: AGG
aaatggttgctttgttctta

SEQ ID NO: 36126 - DNA, 20 bp, Artificial Sequence
  Description of Artificial Sequence: Synthetic oligonucleotide
  Target: SCNA; (+) strand; PAM type: NRG; PAM sequence: GAG
atggttgctttgttcttaag

SEQ ID NO: 36127 - DNA, 20 bp, Artificial Sequence
  Description of Artificial Sequence: Synthetic oligonucleotide
  Target: SCNA; (+) strand; PAM type: NRG; PAM sequence: AAG
cccacgtatccatgtacaat

SEQ ID NO: 36128 - DNA, 20 bp, Artificial Sequence
  Description of Artificial Sequence: Synthetic oligonucleotide
  Target: SCNA; (+) strand; PAM type: NRG; PAM sequence: TAG
acgtatccatgtacaataag

SEQ ID NO: 36129 - DNA, 20 bp, Artificial Sequence
  Description of Artificial Sequence: Synthetic oligonucleotide
  Target: SCNA; (+) strand; PAM type: NRG; PAM sequence: AAG
tagtgctgttataaacatat

SEQ ID NO: 36130 - DNA, 20 bp, Artificial Sequence
  Description of Artificial Sequence: Synthetic oligonucleotide
  Target: SCNA; (+) strand; PAM type: NRG; PAM sequence: GAG
ttataaacatataagaaaat

SEQ ID NO: 36131 - DNA, 20 bp, Artificial Sequence
  Description of Artificial Sequence: Synthetic oligonucleotide
  Target: SCNA; (+) strand; PAM type: NRG; PAM sequence: AAG
agaaaatgagctatcatgat

SEQ ID NO: 36132 - DNA, 20 bp, Artificial Sequence
  Description of Artificial Sequence: Synthetic oligonucleotide
  Target: SCNA; (+) strand; PAM type: NRG; PAM sequence: CAG
gagctatcatgataagtata

SEQ ID NO: 36133 - DNA, 20 bp, Artificial Sequence
  Description of Artificial Sequence: Synthetic oligonucleotide
  Target: SCNA; (+) strand; PAM type: NRG; PAM sequence: TAG
atcatgataagtatacagca

SEQ ID NO: 36134 - DNA, 20 bp, Artificial Sequence
  Description of Artificial Sequence: Synthetic oligonucleotide
  Target: SCNA; (+) strand; PAM type: NRG; PAM sequence: GAG
catgataagtatacagcata

SEQ ID NO: 36135 - DNA, 20 bp, Artificial Sequence
  Description of Artificial Sequence: Synthetic oligonucleotide
  Target: SCNA; (+) strand; PAM type: NRG; PAM sequence: AAG
taagtatacagcatagagtt

SEQ ID NO: 36136 - DNA, 20 bp, Artificial Sequence
  Description of Artificial Sequence: Synthetic oligonucleotide
  Target: SCNA; (+) strand; PAM type: NRG; PAM sequence: TAG
cagcatagagttaagtttat

SEQ ID NO: 36137 - DNA, 20 bp, Artificial Sequence
  Description of Artificial Sequence: Synthetic oligonucleotide
  Target: SCNA; (+) strand; PAM type: NRG; PAM sequence: CAG
tatacaaaattactaacgtg

SEQ ID NO: 36138 - DNA, 20 bp, Artificial Sequence
  Description of Artificial Sequence: Synthetic oligonucleotide
  Target: SCNA; (+) strand; PAM type: NRG; PAM sequence: TAG
taacgtgcagtgaaatcata

SEQ ID NO: 36139 - DNA, 20 bp, Artificial Sequence
  Description of Artificial Sequence: Synthetic oligonucleotide
  Target: SCNA; (+) strand; PAM type: NRG; PAM sequence: AAG
tgaaatcatatagaattctg

SEQ ID NO: 36140 - DNA, 20 bp, Artificial Sequence
  Description of Artificial Sequence: Synthetic oligonucleotide
  Target: SCNA; (+) strand; PAM type: NRG; PAM sequence: TAG
aatcatatagaattctgaag

SEQ ID NO: 36141 - DNA, 20 bp, Artificial Sequence
  Description of Artificial Sequence: Synthetic oligonucleotide
  Target: SCNA; (+) strand; PAM type: NRG; PAM sequence: CAG
tactgtttaacacattcttg

SEQ ID NO: 36142 - DNA, 20 bp, Artificial Sequence
  Description of Artificial Sequence: Synthetic oligonucleotide
  Target: SCNA; (+) strand; PAM type: NRG; PAM sequence: CAG
tgtctttttaaaattaaaat

SEQ ID NO: 36143 - DNA, 20 bp, Artificial Sequence
  Description of Artificial Sequence: Synthetic oligonucleotide
  Target: SCNA; (+) strand; PAM type: NRG; PAM sequence: AGG
gtctttttaaaattaaaatc

SEQ ID NO: 36144 - DNA, 20 bp, Artificial Sequence
  Description of Artificial Sequence: Synthetic oligonucleotide
  Target: SCNA; (+) strand; PAM type: NRG; PAM sequence: TGG
aaaattaaaatcaggaattc

SEQ ID NO: 36145 - DNA, 20 bp, Artificial Sequence
  Description of Artificial Sequence: Synthetic oligonucleotide
  Target: SCNA; (+) strand; PAM type: NRG; PAM sequence: GGG
aaattaaaatcaggaattct

SEQ ID NO: 36146 - DNA, 20 bp, Artificial Sequence
  Description of Artificial Sequence: Synthetic oligonucleotide
  Target: SCNA; (+) strand; PAM type: NRG; PAM sequence: CAG
ttaaaatcaggaattctggg

SEQ ID NO: 36147 - DNA, 20 bp, Artificial Sequence
  Description of Artificial Sequence: Synthetic oligonucleotide
  Target: SCNA; (+) strand; PAM type: NRG; PAM sequence: TAG
aatcaggaattctgggcagt

SEQ ID NO: 36148 - DNA, 20 bp, Artificial Sequence
  Description of Artificial Sequence: Synthetic oligonucleotide
  Target: SCNA; (+) strand; PAM type: NRG; PAM sequence: AAG
tgggcagttagttgtttttg

SEQ ID NO: 36149 - DNA, 20 bp, Artificial Sequence
  Description of Artificial Sequence: Synthetic oligonucleotide
  Target: SCNA; (+) strand; PAM type: NRG; PAM sequence: AAG
atgtcatttatctttgcttt

SEQ ID NO: 36150 - DNA, 20 bp, Artificial Sequence
  Description of Artificial Sequence: Synthetic oligonucleotide
  Target: SCNA; (+) strand; PAM type: NRG; PAM sequence: AAG
tcatttatctttgctttaag

SEQ ID NO: 36151 - DNA, 20 bp, Artificial Sequence
  Description of Artificial Sequence: Synthetic oligonucleotide
  Target: SCNA; (+) strand; PAM type: NRG; PAM sequence: AGG
catttatctttgctttaaga

SEQ ID NO: 36152 - DNA, 20 bp, Artificial Sequence
  Description of Artificial Sequence: Synthetic oligonucleotide
  Target: SCNA; (+) strand; PAM type: NRG; PAM sequence: CAG
tctttgctttaagaaggaaa

SEQ ID NO: 36153 - DNA, 20 bp, Artificial Sequence
  Description of Artificial Sequence: Synthetic oligonucleotide
  Target: SCNA; (+) strand; PAM type: NRG; PAM sequence: GAG
tcattttctacatattaatt

SEQ ID NO: 36154 - DNA, 20 bp, Artificial Sequence
  Description of Artificial Sequence: Synthetic oligonucleotide
  Target: SCNA; (+) strand; PAM type: NRG; PAM sequence: CAG
ttttctacatattaattgag

SEQ ID NO: 36155 - DNA, 20 bp, Artificial Sequence
  Description of Artificial Sequence: Synthetic oligonucleotide
  Target: SCNA; (+) strand; PAM type: NRG; PAM sequence: TGG
ttaattgagcagtgaaaata

SEQ ID NO: 36156 - DNA, 20 bp, Artificial Sequence
  Description of Artificial Sequence: Synthetic oligonucleotide
  Target: SCNA; (+) strand; PAM type: NRG; PAM sequence: TGG
ttgagcagtgaaaatatggt

SEQ ID NO: 36157 - DNA, 20 bp, Artificial Sequence
  Description of Artificial Sequence: Synthetic oligonucleotide
  Target: SCNA; (+) strand; PAM type: NRG; PAM sequence: CAG
agcagtgaaaatatggttgg

SEQ ID NO: 36158 - DNA, 20 bp, Artificial Sequence
  Description of Artificial Sequence: Synthetic oligonucleotide
  Target: SCNA; (+) strand; PAM type: NRG; PAM sequence: AGG
gcagtgaaaatatggttggc

SEQ ID NO: 36159 - DNA, 20 bp, Artificial Sequence
  Description of Artificial Sequence: Synthetic oligonucleotide
  Target: SCNA; (+) strand; PAM type: NRG; PAM sequence: AAG
aaatatggttggcaggtctg

SEQ ID NO: 36160 - DNA, 20 bp, Artificial Sequence
  Description of Artificial Sequence: Synthetic oligonucleotide
  Target: SCNA; (+) strand; PAM type: NRG; PAM sequence: CAG
tggttggcaggtctgaagaa

SEQ ID NO: 36161 - DNA, 20 bp, Artificial Sequence
  Description of Artificial Sequence: Synthetic oligonucleotide
  Target: SCNA; (+) strand; PAM type: NRG; PAM sequence: AGG
ggttggcaggtctgaagaac

SEQ ID NO: 36162 - DNA, 20 bp, Artificial Sequence
  Description of Artificial Sequence: Synthetic oligonucleotide
  Target: SCNA; (+) strand; PAM type: NRG; PAM sequence: GGG
gttggcaggtctgaagaaca

SEQ ID NO: 36163 - DNA, 20 bp, Artificial Sequence
  Description of Artificial Sequence: Synthetic oligonucleotide
  Target: SCNA; (+) strand; PAM type: NRG; PAM sequence: AAG
aggtctgaagaacagggaaa

SEQ ID NO: 36164 - DNA, 20 bp, Artificial Sequence
  Description of Artificial Sequence: Synthetic oligonucleotide
  Target: SCNA; (+) strand; PAM type: NRG; PAM sequence: CAG
ctgaagaacagggaaaaaga

SEQ ID NO: 36165 - DNA, 20 bp, Artificial Sequence
  Description of Artificial Sequence: Synthetic oligonucleotide
  Target: SCNA; (+) strand; PAM type: NRG; PAM sequence: TAG
gaacagggaaaaagacagtg

SEQ ID NO: 36166 - DNA, 20 bp, Artificial Sequence
  Description of Artificial Sequence: Synthetic oligonucleotide
  Target: SCNA; (+) strand; PAM type: NRG; PAM sequence: TAG
agggaaaaagacagtgtagt

SEQ ID NO: 36167 - DNA, 20 bp, Artificial Sequence
  Description of Artificial Sequence: Synthetic oligonucleotide
  Target: SCNA; (+) strand; PAM type: NRG; PAM sequence: GAG
ggaaaaagacagtgtagtta

SEQ ID NO: 36168 - DNA, 20 bp, Artificial Sequence
  Description of Artificial Sequence: Synthetic oligonucleotide
  Target: SCNA; (+) strand; PAM type: NRG; PAM sequence: TAG
aagacagtgtagttagagtg

SEQ ID NO: 36169 - DNA, 20 bp, Artificial Sequence
  Description of Artificial Sequence: Synthetic oligonucleotide
  Target: SCNA; (+) strand; PAM type: NRG; PAM sequence: TGG
cagtgtagttagagtgtagt

SEQ ID NO: 36170 - DNA, 20 bp, Artificial Sequence
  Description of Artificial Sequence: Synthetic oligonucleotide
  Target: SCNA; (+) strand; PAM type: NRG; PAM sequence: GAG
gtgtagttagagtgtagttg

SEQ ID NO: 36171 - DNA, 20 bp, Artificial Sequence
  Description of Artificial Sequence: Synthetic oligonucleotide
  Target: SCNA; (+) strand; PAM type: NRG; PAM sequence: AGG
tgtagttagagtgtagttgg

SEQ ID NO: 36172 - DNA, 20 bp, Artificial Sequence
  Description of Artificial Sequence: Synthetic oligonucleotide
  Target: SCNA; (+) strand; PAM type: NRG; PAM sequence: GGG
gtagttagagtgtagttgga

SEQ ID NO: 36173 - DNA, 20 bp, Artificial Sequence
  Description of Artificial Sequence: Synthetic oligonucleotide
  Target: SCNA; (+) strand; PAM type: NRG; PAM sequence: TGG
gttagagtgtagttggaggg

SEQ ID NO: 36174 - DNA, 20 bp, Artificial Sequence
  Description of Artificial Sequence: Synthetic oligonucleotide
  Target: SCNA; (+) strand; PAM type: NRG; PAM sequence: AAG
gtagttggagggtggcatac

SEQ ID NO: 36175 - DNA, 20 bp, Artificial Sequence
  Description of Artificial Sequence: Synthetic oligonucleotide
  Target: SCNA; (+) strand; PAM type: NRG; PAM sequence: AGG
tagttggagggtggcataca

SEQ ID NO: 36176 - DNA, 20 bp, Artificial Sequence
  Description of Artificial Sequence: Synthetic oligonucleotide
  Target: SCNA; (+) strand; PAM type: NRG; PAM sequence: GAG
gttggagggtggcatacaag

SEQ ID NO: 36177 - DNA, 20 bp, Artificial Sequence
  Description of Artificial Sequence: Synthetic oligonucleotide
  Target: SCNA; (+) strand; PAM type: NRG; PAM sequence: AAG
agggtggcatacaaggagaa

SEQ ID NO: 36178 - DNA, 20 bp, Artificial Sequence
  Description of Artificial Sequence: Synthetic oligonucleotide
  Target: SCNA; (+) strand; PAM type: NRG; PAM sequence: AGG
gggtggcatacaaggagaaa

SEQ ID NO: 36179 - DNA, 20 bp, Artificial Sequence
  Description of Artificial Sequence: Synthetic oligonucleotide
  Target: SCNA; (+) strand; PAM type: NRG; PAM sequence: GGG
ggtggcatacaaggagaaaa

SEQ ID NO: 36180 - DNA, 20 bp, Artificial Sequence
  Description of Artificial Sequence: Synthetic oligonucleotide
  Target: SCNA; (+) strand; PAM type: NRG; PAM sequence: TAG
gcatacaaggagaaaaggga

SEQ ID NO: 36181 - DNA, 20 bp, Artificial Sequence
  Description of Artificial Sequence: Synthetic oligonucleotide
  Target: SCNA; (+) strand; PAM type: NRG; PAM sequence: AGG
catacaaggagaaaagggat

SEQ ID NO: 36182 - DNA, 20 bp, Artificial Sequence
  Description of Artificial Sequence: Synthetic oligonucleotide
  Target: SCNA; (+) strand; PAM type: NRG; PAM sequence: AAG
acaaggagaaaagggatagg

SEQ ID NO: 36183 - DNA, 20 bp, Artificial Sequence
  Description of Artificial Sequence: Synthetic oligonucleotide
  Target: SCNA; (+) strand; PAM type: NRG; PAM sequence: AAG
ggagaaaagggataggaagt

SEQ ID NO: 36184 - DNA, 20 bp, Artificial Sequence
  Description of Artificial Sequence: Synthetic oligonucleotide
  Target: SCNA; (+) strand; PAM type: NRG; PAM sequence: AAG
gaaaagggataggaagtaag

SEQ ID NO: 36185 - DNA, 20 bp, Artificial Sequence
  Description of Artificial Sequence: Synthetic oligonucleotide
  Target: SCNA; (+) strand; PAM type: NRG; PAM sequence: GAG
ataggaagtaagaagttact

SEQ ID NO: 36186 - DNA, 20 bp, Artificial Sequence
  Description of Artificial Sequence: Synthetic oligonucleotide
  Target: SCNA; (+) strand; PAM type: NRG; PAM sequence: AGG
taggaagtaagaagttactg

SEQ ID NO: 36187 - DNA, 20 bp, Artificial Sequence
  Description of Artificial Sequence: Synthetic oligonucleotide
  Target: SCNA; (+) strand; PAM type: NRG; PAM sequence: CAG
agtaagaagttactgaggtc

SEQ ID NO: 36188 - DNA, 20 bp, Artificial Sequence
  Description of Artificial Sequence: Synthetic oligonucleotide
  Target: SCNA; (+) strand; PAM type: NRG; PAM sequence: TAG
ttactgaggtccagataatg

SEQ ID NO: 36189 - DNA, 20 bp, Artificial Sequence
  Description of Artificial Sequence: Synthetic oligonucleotide
  Target: SCNA; (+) strand; PAM type: NRG; PAM sequence: AGG
tactgaggtccagataatgt

SEQ ID NO: 36190 - DNA, 20 bp, Artificial Sequence
  Description of Artificial Sequence: Synthetic oligonucleotide
  Target: SCNA; (+) strand; PAM type: NRG; PAM sequence: GGG
actgaggtccagataatgta

SEQ ID NO: 36191 - DNA, 20 bp, Artificial Sequence
  Description of Artificial Sequence: Synthetic oligonucleotide
  Target: SCNA; (+) strand; PAM type: NRG; PAM sequence: CAG
aatgtagggcctttaaaaca

SEQ ID NO: 36192 - DNA, 20 bp, Artificial Sequence
  Description of Artificial Sequence: Synthetic oligonucleotide
  Target: SCNA; (+) strand; PAM type: NRG; PAM sequence: AAG
agggcctttaaaacacagta

SEQ ID NO: 36193 - DNA, 20 bp, Artificial Sequence
  Description of Artificial Sequence: Synthetic oligonucleotide
  Target: SCNA; (+) strand; PAM type: NRG; PAM sequence: AAG
catttcattctatgtatgat

SEQ ID NO: 36194 - DNA, 20 bp, Artificial Sequence
  Description of Artificial Sequence: Synthetic oligonucleotide
  Target: SCNA; (+) strand; PAM type: NRG; PAM sequence: GAG
tttcattctatgtatgataa

SEQ ID NO: 36195 - DNA, 20 bp, Artificial Sequence
  Description of Artificial Sequence: Synthetic oligonucleotide
  Target: SCNA; (+) strand; PAM type: NRG; PAM sequence: AGG
ttcattctatgtatgataag

SEQ ID NO: 36196 - DNA, 20 bp, Artificial Sequence
  Description of Artificial Sequence: Synthetic oligonucleotide
  Target: SCNA; (+) strand; PAM type: NRG; PAM sequence: TGG
tatgtatgataagaggtcac

SEQ ID NO: 36197 - DNA, 20 bp, Artificial Sequence
  Description of Artificial Sequence: Synthetic oligonucleotide
  Target: SCNA; (+) strand; PAM type: NRG; PAM sequence: TGG
tatgataagaggtcactgga

SEQ ID NO: 36198 - DNA, 20 bp, Artificial Sequence
  Description of Artificial Sequence: Synthetic oligonucleotide
  Target: SCNA; (+) strand; PAM type: NRG; PAM sequence: TGG
ataagaggtcactggatggt

SEQ ID NO: 36199 - DNA, 20 bp, Artificial Sequence
  Description of Artificial Sequence: Synthetic oligonucleotide
  Target: SCNA; (+) strand; PAM type: NRG; PAM sequence: GGG
taagaggtcactggatggtt

SEQ ID NO: 36200 - DNA, 20 bp, Artificial Sequence
  Description of Artificial Sequence: Synthetic oligonucleotide
  Target: SCNA; (+) strand; PAM type: NRG; PAM sequence: GAG
agaggtcactggatggttgg

SEQ ID NO: 36201 - DNA, 20 bp, Artificial Sequence
  Description of Artificial Sequence: Synthetic oligonucleotide
  Target: SCNA; (+) strand; PAM type: NRG; PAM sequence: CAG
ggtcactggatggttgggag

SEQ ID NO: 36202 - DNA, 20 bp, Artificial Sequence
  Description of Artificial Sequence: Synthetic oligonucleotide
  Target: SCNA; (+) strand; PAM type: NRG; PAM sequence: GAG
tcactggatggttgggagca

SEQ ID NO: 36203 - DNA, 20 bp, Artificial Sequence
  Description of Artificial Sequence: Synthetic oligonucleotide
  Target: SCNA; (+) strand; PAM type: NRG; PAM sequence: AGG
cactggatggttgggagcag

SEQ ID NO: 36204 - DNA, 20 bp, Artificial Sequence
  Description of Artificial Sequence: Synthetic oligonucleotide
  Target: SCNA; (+) strand; PAM type: NRG; PAM sequence: GGG
actggatggttgggagcaga

SEQ ID NO: 36205 - DNA, 20 bp, Artificial Sequence
  Description of Artificial Sequence: Synthetic oligonucleotide
  Target: SCNA; (+) strand; PAM type: NRG; PAM sequence: GGG
ctggatggttgggagcagag

SEQ ID NO: 36206 - DNA, 20 bp, Artificial Sequence
  Description of Artificial Sequence: Synthetic oligonucleotide
  Target: SCNA; (+) strand; PAM type: NRG; PAM sequence: GGG
tggatggttgggagcagagg

SEQ ID NO: 36207 - DNA, 20 bp, Artificial Sequence
  Description of Artificial Sequence: Synthetic oligonucleotide
  Target: SCNA; (+) strand; PAM type: NRG; PAM sequence: TGG
gagcagagggggatgtgatc

SEQ ID NO: 36208 - DNA, 20 bp, Artificial Sequence
  Description of Artificial Sequence: Synthetic oligonucleotide
  Target: SCNA; (+) strand; PAM type: NRG; PAM sequence: AAG
tgatctggtttctttcttaa

SEQ ID NO: 36209 - DNA, 20 bp, Artificial Sequence
  Description of Artificial Sequence: Synthetic oligonucleotide
  Target: SCNA; (+) strand; PAM type: NRG; PAM sequence: AAG
aagaattattccgactgctc

SEQ ID NO: 36210 - DNA, 20 bp, Artificial Sequence
  Description of Artificial Sequence: Synthetic oligonucleotide
  Target: SCNA; (+) strand; PAM type: NRG; PAM sequence: TGG
ttattccgactgctcaagaa

SEQ ID NO: 36211 - DNA, 20 bp, Artificial Sequence
  Description of Artificial Sequence: Synthetic oligonucleotide
  Target: SCNA; (+) strand; PAM type: NRG; PAM sequence: TAG
ccgactgctcaagaatggac

SEQ ID NO: 36212 - DNA, 20 bp, Artificial Sequence
  Description of Artificial Sequence: Synthetic oligonucleotide
  Target: SCNA; (+) strand; PAM type: NRG; PAM sequence: AGG
cgactgctcaagaatggact

SEQ ID NO: 36213 - DNA, 20 bp, Artificial Sequence
  Description of Artificial Sequence: Synthetic oligonucleotide
  Target: SCNA; (+) strand; PAM type: NRG; PAM sequence: TGG
tgctcaagaatggactaggt

SEQ ID NO: 36214 - DNA, 20 bp, Artificial Sequence
  Description of Artificial Sequence: Synthetic oligonucleotide
  Target: SCNA; (+) strand; PAM type: NRG; PAM sequence: GGG
gctcaagaatggactaggtt

SEQ ID NO: 36215 - DNA, 20 bp, Artificial Sequence
  Description of Artificial Sequence: Synthetic oligonucleotide
  Target: SCNA; (+) strand; PAM type: NRG; PAM sequence: AAG
atggactaggttgggtgtct

SEQ ID NO: 36216 - DNA, 20 bp, Artificial Sequence
  Description of Artificial Sequence: Synthetic oligonucleotide
  Target: SCNA; (+) strand; PAM type: NRG; PAM sequence: TGG
gactaggttgggtgtctaag

SEQ ID NO: 36217 - DNA, 20 bp, Artificial Sequence
  Description of Artificial Sequence: Synthetic oligonucleotide
  Target: SCNA; (+) strand; PAM type: NRG; PAM sequence: AAG
taggttgggtgtctaagtgg

SEQ ID NO: 36218 - DNA, 20 bp, Artificial Sequence
  Description of Artificial Sequence: Synthetic oligonucleotide
  Target: SCNA; (+) strand; PAM type: NRG; PAM sequence: CAG
gttgggtgtctaagtggaag

SEQ ID NO: 36219 - DNA, 20 bp, Artificial Sequence
  Description of Artificial Sequence: Synthetic oligonucleotide
  Target: SCNA; (+) strand; PAM type: NRG; PAM sequence: AGG
ttgggtgtctaagtggaagc

SEQ ID NO: 36220 - DNA, 20 bp, Artificial Sequence
  Description of Artificial Sequence: Synthetic oligonucleotide
  Target: SCNA; (+) strand; PAM type: NRG; PAM sequence: CAG
ggtgtctaagtggaagcagg

SEQ ID NO: 36221 - DNA, 20 bp, Artificial Sequence
  Description of Artificial Sequence: Synthetic oligonucleotide
  Target: SCNA; (+) strand; PAM type: NRG; PAM sequence: CAG
ctaagtggaagcaggcagat

SEQ ID NO: 36222 - DNA, 20 bp, Artificial Sequence
  Description of Artificial Sequence: Synthetic oligonucleotide
  Target: SCNA; (+) strand; PAM type: NRG; PAM sequence: CAG
tggaagcaggcagatcagtt

SEQ ID NO: 36223 - DNA, 20 bp, Artificial Sequence
  Description of Artificial Sequence: Synthetic oligonucleotide
  Target: SCNA; (+) strand; PAM type: NRG; PAM sequence: GAG
gaagcaggcagatcagttca

SEQ ID NO: 36224 - DNA, 20 bp, Artificial Sequence
  Description of Artificial Sequence: Synthetic oligonucleotide
  Target: SCNA; (+) strand; PAM type: NRG; PAM sequence: AGG
aagcaggcagatcagttcag

SEQ ID NO: 36225 - DNA, 20 bp, Artificial Sequence
  Description of Artificial Sequence: Synthetic oligonucleotide
  Target: SCNA; (+) strand; PAM type: NRG; PAM sequence: TAG
aggcagatcagttcagaggt

SEQ ID NO: 36226 - DNA, 20 bp, Artificial Sequence
  Description of Artificial Sequence: Synthetic oligonucleotide
  Target: SCNA; (+) strand; PAM type: NRG; PAM sequence: AGG
ggcagatcagttcagaggtt

SEQ ID NO: 36227 - DNA, 20 bp, Artificial Sequence
  Description of Artificial Sequence: Synthetic oligonucleotide
  Target: SCNA; (+) strand; PAM type: NRG; PAM sequence: GGG
gcagatcagttcagaggtta

SEQ ID NO: 36228 - DNA, 20 bp, Artificial Sequence
  Description of Artificial Sequence: Synthetic oligonucleotide
  Target: SCNA; (+) strand; PAM type: NRG; PAM sequence: AAG
gatcagttcagaggttaggg

SEQ ID NO: 36229 - DNA, 20 bp, Artificial Sequence
  Description of Artificial Sequence: Synthetic oligonucleotide
  Target: SCNA; (+) strand; PAM type: NRG; PAM sequence: AGG
atcagttcagaggttaggga

SEQ ID NO: 36230 - DNA, 20 bp, Artificial Sequence
  Description of Artificial Sequence: Synthetic oligonucleotide
  Target: SCNA; (+) strand; PAM type: NRG; PAM sequence: GAG
cagttcagaggttagggaag

SEQ ID NO: 36231 - DNA, 20 bp, Artificial Sequence
  Description of Artificial Sequence: Synthetic oligonucleotide
  Target: SCNA; (+) strand; PAM type: NRG; PAM sequence: CAG
cagaggttagggaaggagtc

SEQ ID NO: 36232 - DNA, 20 bp, Artificial Sequence
  Description of Artificial Sequence: Synthetic oligonucleotide
  Target: SCNA; (+) strand; PAM type: NRG; PAM sequence: AGG
agaggttagggaaggagtcc

SEQ ID NO: 36233 - DNA, 20 bp, Artificial Sequence
  Description of Artificial Sequence: Synthetic oligonucleotide
  Target: SCNA; (+) strand; PAM type: NRG; PAM sequence: GAG
gttagggaaggagtccaggt

SEQ ID NO: 36234 - DNA, 20 bp, Artificial Sequence
  Description of Artificial Sequence: Synthetic oligonucleotide
  Target: SCNA; (+) strand; PAM type: NRG; PAM sequence: AAG
agtccaggtgagaaatgatg

SEQ ID NO: 36235 - DNA, 20 bp, Artificial Sequence
  Description of Artificial Sequence: Synthetic oligonucleotide
  Target: SCNA; (+) strand; PAM type: NRG; PAM sequence: AGG
gtccaggtgagaaatgatga

SEQ ID NO: 36236 - DNA, 20 bp, Artificial Sequence
  Description of Artificial Sequence: Synthetic oligonucleotide
  Target: SCNA; (+) strand; PAM type: NRG; PAM sequence: TAG
ggtgagaaatgatgaaggcc

SEQ ID NO: 36237 - DNA, 20 bp, Artificial Sequence
  Description of Artificial Sequence: Synthetic oligonucleotide
  Target: SCNA; (+) strand; PAM type: NRG; PAM sequence: TAG
gaaatgatgaaggcctagcc

SEQ ID NO: 36238 - DNA, 20 bp, Artificial Sequence
  Description of Artificial Sequence: Synthetic oligonucleotide
  Target: SCNA; (+) strand; PAM type: NRG; PAM sequence: AGG
aaatgatgaaggcctagcct

SEQ ID NO: 36239 - DNA, 20 bp, Artificial Sequence
  Description of Artificial Sequence: Synthetic oligonucleotide
  Target: SCNA; (+) strand; PAM type: NRG; PAM sequence: GGG
aatgatgaaggcctagccta

SEQ ID NO: 36240 - DNA, 20 bp, Artificial Sequence
  Description of Artificial Sequence: Synthetic oligonucleotide
  Target: SCNA; (+) strand; PAM type: NRG; PAM sequence: TGG
gatgaaggcctagcctaggg

SEQ ID NO: 36241 - DNA, 20 bp, Artificial Sequence
  Description of Artificial Sequence: Synthetic oligonucleotide
  Target: SCNA; (+) strand; PAM type: NRG; PAM sequence: CAG
ggcctagcctagggtggtaa

SEQ ID NO: 36242 - DNA, 20 bp, Artificial Sequence
  Description of Artificial Sequence: Synthetic oligonucleotide
  Target: SCNA; (+) strand; PAM type: NRG; PAM sequence: TAG
ctagcctagggtggtaacag

SEQ ID NO: 36243 - DNA, 20 bp, Artificial Sequence
  Description of Artificial Sequence: Synthetic oligonucleotide
  Target: SCNA; (+) strand; PAM type: NRG; PAM sequence: GAG
agcctagggtggtaacagta

SEQ ID NO: 36244 - DNA, 20 bp, Artificial Sequence
  Description of Artificial Sequence: Synthetic oligonucleotide
  Target: SCNA; (+) strand; PAM type: NRG; PAM sequence: AAG
ctagggtggtaacagtagag

SEQ ID NO: 36245 - DNA, 20 bp, Artificial Sequence
  Description of Artificial Sequence: Synthetic oligonucleotide
  Target: SCNA; (+) strand; PAM type: NRG; PAM sequence: AGG
tagggtggtaacagtagaga

SEQ ID NO: 36246 - DNA, 20 bp, Artificial Sequence
  Description of Artificial Sequence: Synthetic oligonucleotide
  Target: SCNA; (+) strand; PAM type: NRG; PAM sequence: GGG
agggtggtaacagtagagaa

SEQ ID NO: 36247 - DNA, 20 bp, Artificial Sequence
  Description of Artificial Sequence: Synthetic oligonucleotide
  Target: SCNA; (+) strand; PAM type: NRG; PAM sequence: GAG
ggtggtaacagtagagaagg

SEQ ID NO: 36248 - DNA, 20 bp, Artificial Sequence
  Description of Artificial Sequence: Synthetic oligonucleotide
  Target: SCNA; (+) strand; PAM type: NRG; PAM sequence: TGG
aacagtagagaagggagaca

SEQ ID NO: 36249 - DNA, 20 bp, Artificial Sequence
  Description of Artificial Sequence: Synthetic oligonucleotide
  Target: SCNA; (+) strand; PAM type: NRG; PAM sequence: AAG
gtagagaagggagacatggt

SEQ ID NO: 36250 - DNA, 20 bp, Artificial Sequence
  Description of Artificial Sequence: Synthetic oligonucleotide
  Target: SCNA; (+) strand; PAM type: NRG; PAM sequence: TGG
gaagggagacatggtaagac

SEQ ID NO: 36251 - DNA, 20 bp, Artificial Sequence
  Description of Artificial Sequence: Synthetic oligonucleotide
  Target: SCNA; (+) strand; PAM type: NRG; PAM sequence: GGG
aagggagacatggtaagact

SEQ ID NO: 36252 - DNA, 20 bp, Artificial Sequence
  Description of Artificial Sequence: Synthetic oligonucleotide
  Target: SCNA; (+) strand; PAM type: NRG; PAM sequence: GGG
agggagacatggtaagactg

SEQ ID NO: 36253 - DNA, 20 bp, Artificial Sequence
  Description of Artificial Sequence: Synthetic oligonucleotide
  Target: SCNA; (+) strand; PAM type: NRG; PAM sequence: CAG
tggggatacattttgaatta

SEQ ID NO: 36254 - DNA, 20 bp, Artificial Sequence
  Description of Artificial Sequence: Synthetic oligonucleotide
  Target: SCNA; (+) strand; PAM type: NRG; PAM sequence: TAG
atacattttgaattacagtg

SEQ ID NO: 36255 - DNA, 20 bp, Artificial Sequence
  Description of Artificial Sequence: Synthetic oligonucleotide
  Target: SCNA; (+) strand; PAM type: NRG; PAM sequence: AGG
tacattttgaattacagtgt

SEQ ID NO: 36256 - DNA, 20 bp, Artificial Sequence
  Description of Artificial Sequence: Synthetic oligonucleotide
  Target: SCNA; (+) strand; PAM type: NRG; PAM sequence: TAG
tacagtgtaggtaaaattat

SEQ ID NO: 36257 - DNA, 20 bp, Artificial Sequence
  Description of Artificial Sequence: Synthetic oligonucleotide
  Target: SCNA; (+) strand; PAM type: NRG; PAM sequence: AAG
gtaggtaaaattattagctt

SEQ ID NO: 36258 - DNA, 20 bp, Artificial Sequence
  Description of Artificial Sequence: Synthetic oligonucleotide
  Target: SCNA; (+) strand; PAM type: NRG; PAM sequence: AGG
taggtaaaattattagctta

SEQ ID NO: 36259 - DNA, 20 bp, Artificial Sequence
  Description of Artificial Sequence: Synthetic oligonucleotide
  Target: SCNA; (+) strand; PAM type: NRG; PAM sequence: GGG
aggtaaaattattagcttaa

SEQ ID NO: 36260 - DNA, 20 bp, Artificial Sequence
  Description of Artificial Sequence: Synthetic oligonucleotide
  Target: SCNA; (+) strand; PAM type: NRG; PAM sequence: TAG
aaaattattagcttaagggt

SEQ ID NO: 36261 - DNA, 20 bp, Artificial Sequence
  Description of Artificial Sequence: Synthetic oligonucleotide
  Target: SCNA; (+) strand; PAM type: NRG; PAM sequence: AAG
agcttaagggttagatataa

SEQ ID NO: 36262 - DNA, 20 bp, Artificial Sequence
  Description of Artificial Sequence: Synthetic oligonucleotide
  Target: SCNA; (+) strand; PAM type: NRG; PAM sequence: AGG
gcttaagggttagatataaa

SEQ ID NO: 36263 - DNA, 20 bp, Artificial Sequence
  Description of Artificial Sequence: Synthetic oligonucleotide
  Target: SCNA; (+) strand; PAM type: NRG; PAM sequence: AAG
gttagatataaaaggtatga

SEQ ID NO: 36264 - DNA, 20 bp, Artificial Sequence
  Description of Artificial Sequence: Synthetic oligonucleotide
  Target: SCNA; (+) strand; PAM type: NRG; PAM sequence: AGG
ttagatataaaaggtatgaa

SEQ ID NO: 36265 - DNA, 20 bp, Artificial Sequence
  Description of Artificial Sequence: Synthetic oligonucleotide
  Target: SCNA; (+) strand; PAM type: NRG; PAM sequence: AAG
tataaaaggtatgaaaggaa

SEQ ID NO: 36266 - DNA, 20 bp, Artificial Sequence
  Description of Artificial Sequence: Synthetic oligonucleotide
  Target: SCNA; (+) strand; PAM type: NRG; PAM sequence: AGG
ataaaaggtatgaaaggaaa

SEQ ID NO: 36267 - DNA, 20 bp, Artificial Sequence
  Description of Artificial Sequence: Synthetic oligonucleotide
  Target: SCNA; (+) strand; PAM type: NRG; PAM sequence: AAG
ggtatgaaaggaaaaggatc

SEQ ID NO: 36268 - DNA, 20 bp, Artificial Sequence
  Description of Artificial Sequence: Synthetic oligonucleotide
  Target: SCNA; (+) strand; PAM type: NRG; PAM sequence: AGG
gtatgaaaggaaaaggatca

SEQ ID NO: 36269 - DNA, 20 bp, Artificial Sequence
  Description of Artificial Sequence: Synthetic oligonucleotide
  Target: SCNA; (+) strand; PAM type: NRG; PAM sequence: TGG
aaaaggatcaaggatatgta

SEQ ID NO: 36270 - DNA, 20 bp, Artificial Sequence
  Description of Artificial Sequence: Synthetic oligonucleotide
  Target: SCNA; (+) strand; PAM type: NRG; PAM sequence: TAG
tatggtatatctgcaaatgc

SEQ ID NO: 36271 - DNA, 20 bp, Artificial Sequence
  Description of Artificial Sequence: Synthetic oligonucleotide
  Target: SCNA; (+) strand; PAM type: NRG; PAM sequence: AGG
atggtatatctgcaaatgct

SEQ ID NO: 36272 - DNA, 20 bp, Artificial Sequence
  Description of Artificial Sequence: Synthetic oligonucleotide
  Target: SCNA; (+) strand; PAM type: NRG; PAM sequence: GAG
ggtatatctgcaaatgctag

SEQ ID NO: 36273 - DNA, 20 bp, Artificial Sequence
  Description of Artificial Sequence: Synthetic oligonucleotide
  Target: SCNA; (+) strand; PAM type: NRG; PAM sequence: AAG
ctgcaaatgctaggagacca

SEQ ID NO: 36274 - DNA, 20 bp, Artificial Sequence
  Description of Artificial Sequence: Synthetic oligonucleotide
  Target: SCNA; (+) strand; PAM type: NRG; PAM sequence: TAG
gaccaaagtgaaatttcaca

SEQ ID NO: 36275 - DNA, 20 bp, Artificial Sequence
  Description of Artificial Sequence: Synthetic oligonucleotide
  Target: SCNA; (+) strand; PAM type: NRG; PAM sequence: CAG
atagtgaaattactgtgttt

SEQ ID NO: 36276 - DNA, 20 bp, Artificial Sequence
  Description of Artificial Sequence: Synthetic oligonucleotide
  Target: SCNA; (+) strand; PAM type: NRG; PAM sequence: CAG
gtgaaattactgtgtttcag

SEQ ID NO: 36277 - DNA, 20 bp, Artificial Sequence
  Description of Artificial Sequence: Synthetic oligonucleotide
  Target: SCNA; (+) strand; PAM type: NRG; PAM sequence: TAG
aattactgtgtttcagcagt

SEQ ID NO: 36278 - DNA, 20 bp, Artificial Sequence
  Description of Artificial Sequence: Synthetic oligonucleotide
  Target: SCNA; (+) strand; PAM type: NRG; PAM sequence: AGG
attactgtgtttcagcagtt

SEQ ID NO: 36279 - DNA, 20 bp, Artificial Sequence
  Description of Artificial Sequence: Synthetic oligonucleotide
  Target: SCNA; (+) strand; PAM type: NRG; PAM sequence: GGG
ttactgtgtttcagcagtta

SEQ ID NO: 36280 - DNA, 20 bp, Artificial Sequence
  Description of Artificial Sequence: Synthetic oligonucleotide
  Target: SCNA; (+) strand; PAM type: NRG; PAM sequence: TGG
agcagttagggataactttt

SEQ ID NO: 36281 - DNA, 20 bp, Artificial Sequence
  Description of Artificial Sequence: Synthetic oligonucleotide
  Target: SCNA; (+) strand; PAM type: NRG; PAM sequence: GAG
cagttagggataactttttg

SEQ ID NO: 36282 - DNA, 20 bp, Artificial Sequence
  Description of Artificial Sequence: Synthetic oligonucleotide
  Target: SCNA; (+) strand; PAM type: NRG; PAM sequence: TGG
gggataactttttggagttc

SEQ ID NO: 36283 - DNA, 20 bp, Artificial Sequence
  Description of Artificial Sequence: Synthetic oligonucleotide
  Target: SCNA; (+) strand; PAM type: NRG; PAM sequence: GAG
gataactttttggagttctg

SEQ ID NO: 36284 - DNA, 20 bp, Artificial Sequence
  Description of Artificial Sequence: Synthetic oligonucleotide
  Target: SCNA; (+) strand; PAM type: NRG; PAM sequence: AGG
ataactttttggagttctgg

SEQ ID NO: 36285 - DNA, 20 bp, Artificial Sequence
  Description of Artificial Sequence: Synthetic oligonucleotide
  Target: SCNA; (+) strand; PAM type: NRG; PAM sequence: TGG
tttttggagttctggaggct

SEQ ID NO: 36286 - DNA, 20 bp, Artificial Sequence
  Description of Artificial Sequence: Synthetic oligonucleotide
  Target: SCNA; (+) strand; PAM type: NRG; PAM sequence: GGG
ttttggagttctggaggctt

SEQ ID NO: 36287 - DNA, 20 bp, Artificial Sequence
  Description of Artificial Sequence: Synthetic oligonucleotide
  Target: SCNA; (+) strand; PAM type: NRG; PAM sequence: TGG
ggagttctggaggcttgggc

SEQ ID NO: 36288 - DNA, 20 bp, Artificial Sequence
  Description of Artificial Sequence: Synthetic oligonucleotide
  Target: SCNA; (+) strand; PAM type: NRG; PAM sequence: TGG
ttgggctggacttttttgca

SEQ ID NO: 36289 - DNA, 20 bp, Artificial Sequence
  Description of Artificial Sequence: Synthetic oligonucleotide
  Target: SCNA; (+) strand; PAM type: NRG; PAM sequence: CAG
ttttttgcatggataaaatt

SEQ ID NO: 36290 - DNA, 20 bp, Artificial Sequence
  Description of Artificial Sequence: Synthetic oligonucleotide
  Target: SCNA; (+) strand; PAM type: NRG; PAM sequence: CAG
ttgcatggataaaattcaga

SEQ ID NO: 36291 - DNA, 20 bp, Artificial Sequence
  Description of Artificial Sequence: Synthetic oligonucleotide
  Target: SCNA; (+) strand; PAM type: NRG; PAM sequence: AGG
tgcatggataaaattcagac

SEQ ID NO: 36292 - DNA, 20 bp, Artificial Sequence
  Description of Artificial Sequence: Synthetic oligonucleotide
  Target: SCNA; (+) strand; PAM type: NRG; PAM sequence: GAG
catggataaaattcagacag

SEQ ID NO: 36293 - DNA, 20 bp, Artificial Sequence
  Description of Artificial Sequence: Synthetic oligonucleotide
  Target: SCNA; (+) strand; PAM type: NRG; PAM sequence: AAG
aattcagacaggagacataa

SEQ ID NO: 36294 - DNA, 20 bp, Artificial Sequence
  Description of Artificial Sequence: Synthetic oligonucleotide
  Target: SCNA; (+) strand; PAM type: NRG; PAM sequence: TAG
aggagacataaaagccttct

SEQ ID NO: 36295 - DNA, 20 bp, Artificial Sequence
  Description of Artificial Sequence: Synthetic oligonucleotide
  Target: SCNA; (+) strand; PAM type: NRG; PAM sequence: TGG
agacataaaagccttcttag

SEQ ID NO: 36296 - DNA, 20 bp, Artificial Sequence
  Description of Artificial Sequence: Synthetic oligonucleotide
  Target: SCNA; (+) strand; PAM type: NRG; PAM sequence: AAG
ataaaagccttcttagtggt

SEQ ID NO: 36297 - DNA, 20 bp, Artificial Sequence
  Description of Artificial Sequence: Synthetic oligonucleotide
  Target: SCNA; (+) strand; PAM type: NRG; PAM sequence: CAG
aagccttcttagtggtaaga

SEQ ID NO: 36298 - DNA, 20 bp, Artificial Sequence
  Description of Artificial Sequence: Synthetic oligonucleotide
  Target: SCNA; (+) strand; PAM type: NRG; PAM sequence: TAG
cttagtggtaagacagttat

SEQ ID NO: 36299 - DNA, 20 bp, Artificial Sequence
  Description of Artificial Sequence: Synthetic oligonucleotide
  Target: SCNA; (+) strand; PAM type: NRG; PAM sequence: TGG
taagacagttattagataat

SEQ ID NO: 36300 - DNA, 20 bp, Artificial Sequence
  Description of Artificial Sequence: Synthetic oligonucleotide
  Target: SCNA; (+) strand; PAM type: NRG; PAM sequence: GGG
aagacagttattagataatt

SEQ ID NO: 36301 - DNA, 20 bp, Artificial Sequence
  Description of Artificial Sequence: Synthetic oligonucleotide
  Target: SCNA; (+) strand; PAM type: NRG; PAM sequence: AAG
acagttattagataattggg

SEQ ID NO: 36302 - DNA, 20 bp, Artificial Sequence
  Description of Artificial Sequence: Synthetic oligonucleotide
  Target: SCNA; (+) strand; PAM type: NRG; PAM sequence: AAG
gataattgggaagtattttg

SEQ ID NO: 36303 - DNA, 20 bp, Artificial Sequence
  Description of Artificial Sequence: Synthetic oligonucleotide
  Target: SCNA; (+) strand; PAM type: NRG; PAM sequence: TAG
tttgaagatacttgtctacc

SEQ ID NO: 36304 - DNA, 20 bp, Artificial Sequence
  Description of Artificial Sequence: Synthetic oligonucleotide
  Target: SCNA; (+) strand; PAM type: NRG; PAM sequence: AAG
atacttgtctacctagaatg

SEQ ID NO: 36305 - DNA, 20 bp, Artificial Sequence
  Description of Artificial Sequence: Synthetic oligonucleotide
  Target: SCNA; (+) strand; PAM type: NRG; PAM sequence: GAG
ctagaatgaagaattttgtt

SEQ ID NO: 36306 - DNA, 20 bp, Artificial Sequence
  Description of Artificial Sequence: Synthetic oligonucleotide
  Target: SCNA; (+) strand; PAM type: NRG; PAM sequence: GAG
aagaattttgttgagtattt

SEQ ID NO: 36307 - DNA, 20 bp, Artificial Sequence
  Description of Artificial Sequence: Synthetic oligonucleotide
  Target: SCNA; (+) strand; PAM type: NRG; PAM sequence: GAG
gaattttgttgagtatttga

SEQ ID NO: 36308 - DNA, 20 bp, Artificial Sequence
  Description of Artificial Sequence: Synthetic oligonucleotide
  Target: SCNA; (+) strand; PAM type: NRG; PAM sequence: TGG
ttgagtatttgagagctata

SEQ ID NO: 36309 - DNA, 20 bp, Artificial Sequence
  Description of Artificial Sequence: Synthetic oligonucleotide
  Target: SCNA; (+) strand; PAM type: NRG; PAM sequence: AAG
ttgagagctatatggctgaa

SEQ ID NO: 36310 - DNA, 20 bp, Artificial Sequence
  Description of Artificial Sequence: Synthetic oligonucleotide
  Target: SCNA; (+) strand; PAM type: NRG; PAM sequence: AAG
gagctatatggctgaaaaga

SEQ ID NO: 36311 - DNA, 20 bp, Artificial Sequence
  Description of Artificial Sequence: Synthetic oligonucleotide
  Target: SCNA; (+) strand; PAM type: NRG; PAM sequence: GAG
gctatatggctgaaaagaaa

SEQ ID NO: 36312 - DNA, 20 bp, Artificial Sequence
  Description of Artificial Sequence: Synthetic oligonucleotide
  Target: SCNA; (+) strand; PAM type: NRG; PAM sequence: AGG
ctatatggctgaaaagaaag

SEQ ID NO: 36313 - DNA, 20 bp, Artificial Sequence
  Description of Artificial Sequence: Synthetic oligonucleotide
  Target: SCNA; (+) strand; PAM type: NRG; PAM sequence: CAG
atggctgaaaagaaagaggc

SEQ ID NO: 36314 - DNA, 20 bp, Artificial Sequence
  Description of Artificial Sequence: Synthetic oligonucleotide
  Target: SCNA; (+) strand; PAM type: NRG; PAM sequence: AAG
agaaagaggccagataaaac

SEQ ID NO: 36315 - DNA, 20 bp, Artificial Sequence
  Description of Artificial Sequence: Synthetic oligonucleotide
  Target: SCNA; (+) strand; PAM type: NRG; PAM sequence: AGG
gaaagaggccagataaaaca

SEQ ID NO: 36316 - DNA, 20 bp, Artificial Sequence
  Description of Artificial Sequence: Synthetic oligonucleotide
  Target: SCNA; (+) strand; PAM type: NRG; PAM sequence: GAG
gccagataaaacaaggccct

SEQ ID NO: 36317 - DNA, 20 bp, Artificial Sequence
  Description of Artificial Sequence: Synthetic oligonucleotide
  Target: SCNA; (+) strand; PAM type: NRG; PAM sequence: AAG
aaaacaaggccctgagtaac

SEQ ID NO: 36318 - DNA, 20 bp, Artificial Sequence
  Description of Artificial Sequence: Synthetic oligonucleotide
  Target: SCNA; (+) strand; PAM type: NRG; PAM sequence: GAG
aacaaggccctgagtaacaa

SEQ ID NO: 36319 - DNA, 20 bp, Artificial Sequence
  Description of Artificial Sequence: Synthetic oligonucleotide
  Target: SCNA; (+) strand; PAM type: NRG; PAM sequence: TAG
aaggccctgagtaacaagag

SEQ ID NO: 36320 - DNA, 20 bp, Artificial Sequence
  Description of Artificial Sequence: Synthetic oligonucleotide
  Target: SCNA; (+) strand; PAM type: NRG; PAM sequence: AGG
aggccctgagtaacaagagt

SEQ ID NO: 36321 - DNA, 20 bp, Artificial Sequence
  Description of Artificial Sequence: Synthetic oligonucleotide
  Target: SCNA; (+) strand; PAM type: NRG; PAM sequence: TGG
tgagtaacaagagtaggcct

SEQ ID NO: 36322 - DNA, 20 bp, Artificial Sequence
  Description of Artificial Sequence: Synthetic oligonucleotide
  Target: SCNA; (+) strand; PAM type: NRG; PAM sequence: GGG
gagtaacaagagtaggcctt

SEQ ID NO: 36323 - DNA, 20 bp, Artificial Sequence
  Description of Artificial Sequence: Synthetic oligonucleotide
  Target: SCNA; (+) strand; PAM type: NRG; PAM sequence: TAG
ggccttgggccttgattcta

SEQ ID NO: 36324 - DNA, 20 bp, Artificial Sequence
  Description of Artificial Sequence: Synthetic oligonucleotide
  Target: SCNA; (+) strand; PAM type: NRG; PAM sequence: GAG
ccttgggccttgattctata

SEQ ID NO: 36325 - DNA, 20 bp, Artificial Sequence
  Description of Artificial Sequence: Synthetic oligonucleotide
  Target: SCNA; (+) strand; PAM type: NRG; PAM sequence: GAG
ttgggccttgattctataga

SEQ ID NO: 36326 - DNA, 20 bp, Artificial Sequence
  Description of Artificial Sequence: Synthetic oligonucleotide
  Target: SCNA; (+) strand; PAM type: NRG; PAM sequence: TGG
tatagagagtgcaaaaccac

SEQ ID NO: 36327 - DNA, 20 bp, Artificial Sequence
  Description of Artificial Sequence: Synthetic oligonucleotide
  Target: SCNA; (+) strand; PAM type: NRG; PAM sequence: TGG
ctaattttttgtaactaatc

SEQ ID NO: 36328 - DNA, 20 bp, Artificial Sequence
  Description of Artificial Sequence: Synthetic oligonucleotide
  Target: SCNA; (+) strand; PAM type: NRG; PAM sequence: TAG
ttttttgtaactaatctggc

SEQ ID NO: 36329 - DNA, 20 bp, Artificial Sequence
  Description of Artificial Sequence: Synthetic oligonucleotide
  Target: SCNA; (+) strand; PAM type: NRG; PAM sequence: CAG
ctaatctggctagaaatttc

SEQ ID NO: 36330 - DNA, 20 bp, Artificial Sequence
  Description of Artificial Sequence: Synthetic oligonucleotide
  Target: SCNA; (+) strand; PAM type: NRG; PAM sequence: CAG
gctagaaatttccagatttc

SEQ ID NO: 36331 - DNA, 20 bp, Artificial Sequence
  Description of Artificial Sequence: Synthetic oligonucleotide
  Target: SCNA; (+) strand; PAM type: NRG; PAM sequence: AAG
atttccagcacactatatta

SEQ ID NO: 36332 - DNA, 20 bp, Artificial Sequence
  Description of Artificial Sequence: Synthetic oligonucleotide
  Target: SCNA; (+) strand; PAM type: NRG; PAM sequence: AGG
tttccagcacactatattaa

SEQ ID NO: 36333 - DNA, 20 bp, Artificial Sequence
  Description of Artificial Sequence: Synthetic oligonucleotide
  Target: SCNA; (+) strand; PAM type: NRG; PAM sequence: AAG
ccagcacactatattaaagg

SEQ ID NO: 36334 - DNA, 20 bp, Artificial Sequence
  Description of Artificial Sequence: Synthetic oligonucleotide
  Target: SCNA; (+) strand; PAM type: NRG; PAM sequence: TGG
tactgccaaaaaacatttca

SEQ ID NO: 36335 - DNA, 20 bp, Artificial Sequence
  Description of Artificial Sequence: Synthetic oligonucleotide
  Target: SCNA; (+) strand; PAM type: NRG; PAM sequence: TAG
catttcatggattccaaaaa

SEQ ID NO: 36336 - DNA, 20 bp, Artificial Sequence
  Description of Artificial Sequence: Synthetic oligonucleotide
  Target: SCNA; (+) strand; PAM type: NRG; PAM sequence: GAG
tttcatggattccaaaaata

SEQ ID NO: 36337 - DNA, 20 bp, Artificial Sequence
  Description of Artificial Sequence: Synthetic oligonucleotide
  Target: SCNA; (+) strand; PAM type: NRG; PAM sequence: TAG
tccaaaaatagagatcaatg

SEQ ID NO: 36338 - DNA, 20 bp, Artificial Sequence
  Description of Artificial Sequence: Synthetic oligonucleotide
  Target: SCNA; (+) strand; PAM type: NRG; PAM sequence: AAG
atcaatgtagatgaatttat

SEQ ID NO: 36339 - DNA, 20 bp, Artificial Sequence
  Description of Artificial Sequence: Synthetic oligonucleotide
  Target: SCNA; (+) strand; PAM type: NRG; PAM sequence: TGG
tttataagatgaatgaactc

SEQ ID NO: 36340 - DNA, 20 bp, Artificial Sequence
  Description of Artificial Sequence: Synthetic oligonucleotide
  Target: SCNA; (+) strand; PAM type: NRG; PAM sequence: GGG
ttataagatgaatgaactct

SEQ ID NO: 36341 - DNA, 20 bp, Artificial Sequence
  Description of Artificial Sequence: Synthetic oligonucleotide
  Target: SCNA; (+) strand; PAM type: NRG; PAM sequence: AAG
taagatgaatgaactctggg

SEQ ID NO: 36342 - DNA, 20 bp, Artificial Sequence
  Description of Artificial Sequence: Synthetic oligonucleotide
  Target: SCNA; (+) strand; PAM type: NRG; PAM sequence: AAG
gaatgaactctgggaagacc

SEQ ID NO: 36343 - DNA, 20 bp, Artificial Sequence
  Description of Artificial Sequence: Synthetic oligonucleotide
  Target: SCNA; (+) strand; PAM type: NRG; PAM sequence: CAG
tgaactctgggaagaccaag

SEQ ID NO: 36344 - DNA, 20 bp, Artificial Sequence
  Description of Artificial Sequence: Synthetic oligonucleotide
  Target: SCNA; (+) strand; PAM type: NRG; PAM sequence: CAG
tatttcattatatacacaca

SEQ ID NO: 36345 - DNA, 20 bp, Artificial Sequence
  Description of Artificial Sequence: Synthetic oligonucleotide
  Target: SCNA; (+) strand; PAM type: NRG; PAM sequence: TAG
taatacttatatatacacgt

SEQ ID NO: 36346 - DNA, 20 bp, Artificial Sequence
  Description of Artificial Sequence: Synthetic oligonucleotide
  Target: SCNA; (+) strand; PAM type: NRG; PAM sequence: CAG
atatacacgttagtgctctg

SEQ ID NO: 36347 - DNA, 20 bp, Artificial Sequence
  Description of Artificial Sequence: Synthetic oligonucleotide
  Target: SCNA; (+) strand; PAM type: NRG; PAM sequence: AAG
ctctgcagttaatttttata

SEQ ID NO: 36348 - DNA, 20 bp, Artificial Sequence
  Description of Artificial Sequence: Synthetic oligonucleotide
  Target: SCNA; (+) strand; PAM type: NRG; PAM sequence: AGG
tctgcagttaatttttataa

SEQ ID NO: 36349 - DNA, 20 bp, Artificial Sequence
  Description of Artificial Sequence: Synthetic oligonucleotide
  Target: SCNA; (+) strand; PAM type: NRG; PAM sequence: TAG
atttttataaaggcaccaat

SEQ ID NO: 36350 - DNA, 20 bp, Artificial Sequence
  Description of Artificial Sequence: Synthetic oligonucleotide
  Target: SCNA; (+) strand; PAM type: NRG; PAM sequence: AAG
ggcaccaattagtttctaat

SEQ ID NO: 36351 - DNA, 20 bp, Artificial Sequence
  Description of Artificial Sequence: Synthetic oligonucleotide
  Target: SCNA; (+) strand; PAM type: NRG; PAM sequence: AAG
aattagtttctaataagaaa

SEQ ID NO: 36352 - DNA, 20 bp, Artificial Sequence
  Description of Artificial Sequence: Synthetic oligonucleotide
  Target: SCNA; (+) strand; PAM type: NRG; PAM sequence: AAG
ataagaaaaagaaatgtgta

SEQ ID NO: 36353 - DNA, 20 bp, Artificial Sequence
  Description of Artificial Sequence: Synthetic oligonucleotide
  Target: SCNA; (+) strand; PAM type: NRG; PAM sequence: AAG
agaaaaagaaatgtgtaaag

SEQ ID NO: 36354 - DNA, 20 bp, Artificial Sequence
  Description of Artificial Sequence: Synthetic oligonucleotide
  Target: SCNA; (+) strand; PAM type: NRG; PAM sequence: GAG
aaaaagaaatgtgtaaagaa

SEQ ID NO: 36355 - DNA, 20 bp, Artificial Sequence
  Description of Artificial Sequence: Synthetic oligonucleotide
  Target: SCNA; (+) strand; PAM type: NRG; PAM sequence: AAG
aagaaatgtgtaaagaagag

SEQ ID NO: 36356 - DNA, 20 bp, Artificial Sequence
  Description of Artificial Sequence: Synthetic oligonucleotide
  Target: SCNA; (+) strand; PAM type: NRG; PAM sequence: AAG
gaaatttcattctctccatg

SEQ ID NO: 36357 - DNA, 20 bp, Artificial Sequence
  Description of Artificial Sequence: Synthetic oligonucleotide
  Target: SCNA; (+) strand; PAM type: NRG; PAM sequence: TAG
taaaaaacacaaatatttgt

SEQ ID NO: 36358 - DNA, 20 bp, Artificial Sequence
  Description of Artificial Sequence: Synthetic oligonucleotide
  Target: SCNA; (+) strand; PAM type: NRG; PAM sequence: TGG
gatatttatcacatgaaaaa

SEQ ID NO: 36359 - DNA, 20 bp, Artificial Sequence
  Description of Artificial Sequence: Synthetic oligonucleotide
  Target: SCNA; (+) strand; PAM type: NRG; PAM sequence: GGG
atatttatcacatgaaaaat

SEQ ID NO: 36360 - DNA, 20 bp, Artificial Sequence
  Description of Artificial Sequence: Synthetic oligonucleotide
  Target: SCNA; (+) strand; PAM type: NRG; PAM sequence: TGG
cacatgaaaaatgggtactt

SEQ ID NO: 36361 - DNA, 20 bp, Artificial Sequence
  Description of Artificial Sequence: Synthetic oligonucleotide
  Target: SCNA; (+) strand; PAM type: NRG; PAM sequence: GGG
acatgaaaaatgggtacttt

SEQ ID NO: 36362 - DNA, 20 bp, Artificial Sequence
  Description of Artificial Sequence: Synthetic oligonucleotide
  Target: SCNA; (+) strand; PAM type: NRG; PAM sequence: GGG
catgaaaaatgggtactttg

SEQ ID NO: 36363 - DNA, 20 bp, Artificial Sequence
  Description of Artificial Sequence: Synthetic oligonucleotide
  Target: SCNA; (+) strand; PAM type: NRG; PAM sequence: GAG
tgaaaaatgggtactttggg

SEQ ID NO: 36364 - DNA, 20 bp, Artificial Sequence
  Description of Artificial Sequence: Synthetic oligonucleotide
  Target: SCNA; (+) strand; PAM type: NRG; PAM sequence: AAG
tttggggagattttctccta

SEQ ID NO: 36365 - DNA, 20 bp, Artificial Sequence
  Description of Artificial Sequence: Synthetic oligonucleotide
  Target: SCNA; (+) strand; PAM type: NRG; PAM sequence: TAG
agccttcattttttcatata

SEQ ID NO: 36366 - DNA, 20 bp, Artificial Sequence
  Description of Artificial Sequence: Synthetic oligonucleotide
  Target: SCNA; (+) strand; PAM type: NRG; PAM sequence: GAG
ttcattttttcatatatagt

SEQ ID NO: 36367 - DNA, 20 bp, Artificial Sequence
  Description of Artificial Sequence: Synthetic oligonucleotide
  Target: SCNA; (+) strand; PAM type: NRG; PAM sequence: CAG
aaacaaccaatttctattta

SEQ ID NO: 36368 - DNA, 20 bp, Artificial Sequence
  Description of Artificial Sequence: Synthetic oligonucleotide
  Target: SCNA; (+) strand; PAM type: NRG; PAM sequence: AAG
ttacctttcaataaactgtt

SEQ ID NO: 36369 - DNA, 20 bp, Artificial Sequence
  Description of Artificial Sequence: Synthetic oligonucleotide
  Target: SCNA; (+) strand; PAM type: NRG; PAM sequence: AAG
tcaataaactgttaagccca

SEQ ID NO: 36370 - DNA, 20 bp, Artificial Sequence
  Description of Artificial Sequence: Synthetic oligonucleotide
  Target: SCNA; (+) strand; PAM type: NRG; PAM sequence: TAG
cttattttaaaatgtgaacc

SEQ ID NO: 36371 - DNA, 20 bp, Artificial Sequence
  Description of Artificial Sequence: Synthetic oligonucleotide
  Target: SCNA; (+) strand; PAM type: NRG; PAM sequence: TGG
aaaatgtgaacctagacatt

SEQ ID NO: 36372 - DNA, 20 bp, Artificial Sequence
  Description of Artificial Sequence: Synthetic oligonucleotide
  Target: SCNA; (+) strand; PAM type: NRG; PAM sequence: GGG
aaatgtgaacctagacattt

SEQ ID NO: 36373 - DNA, 20 bp, Artificial Sequence
  Description of Artificial Sequence: Synthetic oligonucleotide
  Target: SCNA; (+) strand; PAM type: NRG; PAM sequence: CAG
acctagacatttgggatgat

SEQ ID NO: 36374 - DNA, 20 bp, Artificial Sequence
  Description of Artificial Sequence: Synthetic oligonucleotide
  Target: SCNA; (+) strand; PAM type: NRG; PAM sequence: AGG
cctagacatttgggatgatc

SEQ ID NO: 36375 - DNA, 20 bp, Artificial Sequence
  Description of Artificial Sequence: Synthetic oligonucleotide
  Target: SCNA; (+) strand; PAM type: NRG; PAM sequence: TAG
tttgggatgatcaggcatgc

SEQ ID NO: 36376 - DNA, 20 bp, Artificial Sequence
  Description of Artificial Sequence: Synthetic oligonucleotide
  Target: SCNA; (+) strand; PAM type: NRG; PAM sequence: AAG
caggcatgctagttactatt

SEQ ID NO: 36377 - DNA, 20 bp, Artificial Sequence
  Description of Artificial Sequence: Synthetic oligonucleotide
  Target: SCNA; (+) strand; PAM type: NRG; PAM sequence: TAG
atgctagttactattaagaa

SEQ ID NO: 36378 - DNA, 20 bp, Artificial Sequence
  Description of Artificial Sequence: Synthetic oligonucleotide
  Target: SCNA; (+) strand; PAM type: NRG; PAM sequence: CAG
ctagttactattaagaatag

SEQ ID NO: 36379 - DNA, 20 bp, Artificial Sequence
  Description of Artificial Sequence: Synthetic oligonucleotide
  Target: SCNA; (+) strand; PAM type: NRG; PAM sequence: TGG
agcagtatgtactaataaaa

SEQ ID NO: 36380 - DNA, 20 bp, Artificial Sequence
  Description of Artificial Sequence: Synthetic oligonucleotide
  Target: SCNA; (+) strand; PAM type: NRG; PAM sequence: CAG
tgtactaataaaatggtatt

SEQ ID NO: 36381 - DNA, 20 bp, Artificial Sequence
  Description of Artificial Sequence: Synthetic oligonucleotide
  Target: SCNA; (+) strand; PAM type: NRG; PAM sequence: GAG
tactaataaaatggtattca

SEQ ID NO: 36382 - DNA, 20 bp, Artificial Sequence
  Description of Artificial Sequence: Synthetic oligonucleotide
  Target: SCNA; (+) strand; PAM type: NRG; PAM sequence: AAG
aaatggtattcagagattat

SEQ ID NO: 36383 - DNA, 20 bp, Artificial Sequence
  Description of Artificial Sequence: Synthetic oligonucleotide
  Target: SCNA; (+) strand; PAM type: NRG; PAM sequence: AGG
aatggtattcagagattata

SEQ ID NO: 36384 - DNA, 20 bp, Artificial Sequence
  Description of Artificial Sequence: Synthetic oligonucleotide
  Target: SCNA; (+) strand; PAM type: NRG; PAM sequence: GGG
atggtattcagagattataa

SEQ ID NO: 36385 - DNA, 20 bp, Artificial Sequence
  Description of Artificial Sequence: Synthetic oligonucleotide
  Target: SCNA; (+) strand; PAM type: NRG; PAM sequence: AAG
gtattcagagattataaggg

SEQ ID NO: 36386 - DNA, 20 bp, Artificial Sequence
  Description of Artificial Sequence: Synthetic oligonucleotide
  Target: SCNA; (+) strand; PAM type: NRG; PAM sequence: AAG
aatgacccaaactatatata

SEQ ID NO: 36387 - DNA, 20 bp, Artificial Sequence
  Description of Artificial Sequence: Synthetic oligonucleotide
  Target: SCNA; (+) strand; PAM type: NRG; PAM sequence: TGG
caaaataaacacatgcacta

SEQ ID NO: 36388 - DNA, 20 bp, Artificial Sequence
  Description of Artificial Sequence: Synthetic oligonucleotide
  Target: SCNA; (+) strand; PAM type: NRG; PAM sequence: TGG
ataaacacatgcactatgga

SEQ ID NO: 36389 - DNA, 20 bp, Artificial Sequence
  Description of Artificial Sequence: Synthetic oligonucleotide
  Target: SCNA; (+) strand; PAM type: NRG; PAM sequence: GGG
taaacacatgcactatggat

SEQ ID NO: 36390 - DNA, 20 bp, Artificial Sequence
  Description of Artificial Sequence: Synthetic oligonucleotide
  Target: SCNA; (+) strand; PAM type: NRG; PAM sequence: GGG
aaacacatgcactatggatg

SEQ ID NO: 36391 - DNA, 20 bp, Artificial Sequence
  Description of Artificial Sequence: Synthetic oligonucleotide
  Target: SCNA; (+) strand; PAM type: NRG; PAM sequence: CAG
tggatggggttctctaacga

SEQ ID NO: 36392 - DNA, 20 bp, Artificial Sequence
  Description of Artificial Sequence: Synthetic oligonucleotide
  Target: SCNA; (+) strand; PAM type: NRG; PAM sequence: TAG
atggggttctctaacgacag

SEQ ID NO: 36393 - DNA, 20 bp, Artificial Sequence
  Description of Artificial Sequence: Synthetic oligonucleotide
  Target: SCNA; (+) strand; PAM type: NRG; PAM sequence: AAG
gggttctctaacgacagtag

SEQ ID NO: 36394 - DNA, 20 bp, Artificial Sequence
  Description of Artificial Sequence: Synthetic oligonucleotide
  Target: SCNA; (+) strand; PAM type: NRG; PAM sequence: CGG
ctaacgacagtagaagtaaa

SEQ ID NO: 36395 - DNA, 20 bp, Artificial Sequence
  Description of Artificial Sequence: Synthetic oligonucleotide
  Target: SCNA; (+) strand; PAM type: NRG; PAM sequence: GGG
taacgacagtagaagtaaac

SEQ ID NO: 36396 - DNA, 20 bp, Artificial Sequence
  Description of Artificial Sequence: Synthetic oligonucleotide
  Target: SCNA; (+) strand; PAM type: NRG; PAM sequence: CAG
cgacagtagaagtaaacggg

SEQ ID NO: 36397 - DNA, 20 bp, Artificial Sequence
  Description of Artificial Sequence: Synthetic oligonucleotide
  Target: SCNA; (+) strand; PAM type: NRG; PAM sequence: AAG
tagaagtaaacgggcagcta

SEQ ID NO: 36398 - DNA, 20 bp, Artificial Sequence
  Description of Artificial Sequence: Synthetic oligonucleotide
  Target: SCNA; (+) strand; PAM type: NRG; PAM sequence: GAG
gaagtaaacgggcagctaaa

SEQ ID NO: 36399 - DNA, 20 bp, Artificial Sequence
  Description of Artificial Sequence: Synthetic oligonucleotide
  Target: SCNA; (+) strand; PAM type: NRG; PAM sequence: CAG
tatcaaaaactgcactttta

SEQ ID NO: 36400 - DNA, 20 bp, Artificial Sequence
  Description of Artificial Sequence: Synthetic oligonucleotide
  Target: SCNA; (+) strand; PAM type: NRG; PAM sequence: CAG
tacagtttcctatatatcgt

SEQ ID NO: 36401 - DNA, 20 bp, Artificial Sequence
  Description of Artificial Sequence: Synthetic oligonucleotide
  Target: SCNA; (+) strand; PAM type: NRG; PAM sequence: CAG
gtttcctatatatcgtcaga

SEQ ID NO: 36402 - DNA, 20 bp, Artificial Sequence
  Description of Artificial Sequence: Synthetic oligonucleotide
  Target: SCNA; (+) strand; PAM type: NRG; PAM sequence: AGG
tttcctatatatcgtcagac

SEQ ID NO: 36403 - DNA, 20 bp, Artificial Sequence
  Description of Artificial Sequence: Synthetic oligonucleotide
  Target: SCNA; (+) strand; PAM type: NRG; PAM sequence: AAG
atcgtcagacaggttaacaa

SEQ ID NO: 36404 - DNA, 20 bp, Artificial Sequence
  Description of Artificial Sequence: Synthetic oligonucleotide
  Target: SCNA; (+) strand; PAM type: NRG; PAM sequence: AAG
aggttaacaaaagtatcgaa

SEQ ID NO: 36405 - DNA, 20 bp, Artificial Sequence
  Description of Artificial Sequence: Synthetic oligonucleotide
  Target: SCNA; (+) strand; PAM type: NRG; PAM sequence: TGG
taacaaaagtatcgaaaagt

SEQ ID NO: 36406 - DNA, 20 bp, Artificial Sequence
  Description of Artificial Sequence: Synthetic oligonucleotide
  Target: SCNA; (+) strand; PAM type: NRG; PAM sequence: TGG
atcgaaaagttggcatactg

SEQ ID NO: 36407 - DNA, 20 bp, Artificial Sequence
  Description of Artificial Sequence: Synthetic oligonucleotide
  Target: SCNA; (+) strand; PAM type: NRG; PAM sequence: AAG
aagttggcatactgtggata

SEQ ID NO: 36408 - DNA, 20 bp, Artificial Sequence
  Description of Artificial Sequence: Synthetic oligonucleotide
  Target: SCNA; (+) strand; PAM type: NRG; PAM sequence: GAG
tggataaagtacattaaaat

SEQ ID NO: 36409 - DNA, 20 bp, Artificial Sequence
  Description of Artificial Sequence: Synthetic oligonucleotide
  Target: SCNA; (+) strand; PAM type: NRG; PAM sequence: AAG
taaagtacattaaaatgaga

SEQ ID NO: 36410 - DNA, 20 bp, Artificial Sequence
  Description of Artificial Sequence: Synthetic oligonucleotide
  Target: SCNA; (+) strand; PAM type: NRG; PAM sequence: AGG
aaagtacattaaaatgagaa

SEQ ID NO: 36411 - DNA, 20 bp, Artificial Sequence
  Description of Artificial Sequence: Synthetic oligonucleotide
  Target: SCNA; (+) strand; PAM type: NRG; PAM sequence: AAG
acattaaaatgagaaaggca

SEQ ID NO: 36412 - DNA, 20 bp, Artificial Sequence
  Description of Artificial Sequence: Synthetic oligonucleotide
  Target: SCNA; (+) strand; PAM type: NRG; PAM sequence: AAG
aatgagaaaggcaaagtttt

SEQ ID NO: 36413 - DNA, 20 bp, Artificial Sequence
  Description of Artificial Sequence: Synthetic oligonucleotide
  Target: SCNA; (+) strand; PAM type: NRG; PAM sequence: AGG
atgagaaaggcaaagtttta

SEQ ID NO: 36414 - DNA, 20 bp, Artificial Sequence
  Description of Artificial Sequence: Synthetic oligonucleotide
  Target: SCNA; (+) strand; PAM type: NRG; PAM sequence: AAG
ttaaggatatatgaaaatga

SEQ ID NO: 36415 - DNA, 20 bp, Artificial Sequence
  Description of Artificial Sequence: Synthetic oligonucleotide
  Target: SCNA; (+) strand; PAM type: NRG; PAM sequence: AGG
taaggatatatgaaaatgaa

SEQ ID NO: 36416 - DNA, 20 bp, Artificial Sequence
  Description of Artificial Sequence: Synthetic oligonucleotide
  Target: SCNA; (+) strand; PAM type: NRG; PAM sequence: TGG
gatatatgaaaatgaaagga

SEQ ID NO: 36417 - DNA, 20 bp, Artificial Sequence
  Description of Artificial Sequence: Synthetic oligonucleotide
  Target: SCNA; (+) strand; PAM type: NRG; PAM sequence: TAG
gaaaatgaaaggatggcaac

SEQ ID NO: 36418 - DNA, 20 bp, Artificial Sequence
  Description of Artificial Sequence: Synthetic oligonucleotide
  Target: SCNA; (+) strand; PAM type: NRG; PAM sequence: TGG
tgaaaggatggcaactagta

SEQ ID NO: 36419 - DNA, 20 bp, Artificial Sequence
  Description of Artificial Sequence: Synthetic oligonucleotide
  Target: SCNA; (+) strand; PAM type: NRG; PAM sequence: TAG
aatcgtaataaccaacgtga

SEQ ID NO: 36420 - DNA, 20 bp, Artificial Sequence
  Description of Artificial Sequence: Synthetic oligonucleotide
  Target: SCNA; (+) strand; PAM type: NRG; PAM sequence: AAG
ataaccaacgtgatagtatt

SEQ ID NO: 36421 - DNA, 20 bp, Artificial Sequence
  Description of Artificial Sequence: Synthetic oligonucleotide
  Target: SCNA; (+) strand; PAM type: NRG; PAM sequence: TGG
accaacgtgatagtattaag

SEQ ID NO: 36422 - DNA, 20 bp, Artificial Sequence
  Description of Artificial Sequence: Synthetic oligonucleotide
  Target: SCNA; (+) strand; PAM type: NRG; PAM sequence: TGG
aacgtgatagtattaagtgg

SEQ ID NO: 36423 - DNA, 20 bp, Artificial Sequence
  Description of Artificial Sequence: Synthetic oligonucleotide
  Target: SCNA; (+) strand; PAM type: NRG; PAM sequence: GGG
acgtgatagtattaagtggt

SEQ ID NO: 36424 - DNA, 20 bp, Artificial Sequence
  Description of Artificial Sequence: Synthetic oligonucleotide
  Target: SCNA; (+) strand; PAM type: NRG; PAM sequence: GGG
cgtgatagtattaagtggtg

SEQ ID NO: 36425 - DNA, 20 bp, Artificial Sequence
  Description of Artificial Sequence: Synthetic oligonucleotide
  Target: SCNA; (+) strand; PAM type: NRG; PAM sequence: CAG
tattaagtggtggggccttg

SEQ ID NO: 36426 - DNA, 20 bp, Artificial Sequence
  Description of Artificial Sequence: Synthetic oligonucleotide
  Target: SCNA; (+) strand; PAM type: NRG; PAM sequence: GAG
ttaagtggtggggccttgca

SEQ ID NO: 36427 - DNA, 20 bp, Artificial Sequence
  Description of Artificial Sequence: Synthetic oligonucleotide
  Target: SCNA; (+) strand; PAM type: NRG; PAM sequence: AGG
taagtggtggggccttgcag

SEQ ID NO: 36428 - DNA, 20 bp, Artificial Sequence
  Description of Artificial Sequence: Synthetic oligonucleotide
  Target: SCNA; (+) strand; PAM type: NRG; PAM sequence: AAG
ggggccttgcagaggtaata

SEQ ID NO: 36429 - DNA, 20 bp, Artificial Sequence
  Description of Artificial Sequence: Synthetic oligonucleotide
  Target: SCNA; (+) strand; PAM type: NRG; PAM sequence: CGG
ttgcagaggtaataaagtca

SEQ ID NO: 36430 - DNA, 20 bp, Artificial Sequence
  Description of Artificial Sequence: Synthetic oligonucleotide
  Target: SCNA; (+) strand; PAM type: NRG; PAM sequence: GGG
tgcagaggtaataaagtcac

SEQ ID NO: 36431 - DNA, 20 bp, Artificial Sequence
  Description of Artificial Sequence: Synthetic oligonucleotide
  Target: SCNA; (+) strand; PAM type: NRG; PAM sequence: GGG
gcagaggtaataaagtcacg

SEQ ID NO: 36432 - DNA, 20 bp, Artificial Sequence
  Description of Artificial Sequence: Synthetic oligonucleotide
  Target: SCNA; (+) strand; PAM type: NRG; PAM sequence: GGG
cagaggtaataaagtcacgg

SEQ ID NO: 36433 - DNA, 20 bp, Artificial Sequence
  Description of Artificial Sequence: Synthetic oligonucleotide
  Target: SCNA; (+) strand; PAM type: NRG; PAM sequence: CAG
aggtaataaagtcacggggg

SEQ ID NO: 36434 - DNA, 20 bp, Artificial Sequence
  Description of Artificial Sequence: Synthetic oligonucleotide
  Target: SCNA; (+) strand; PAM type: NRG; PAM sequence: GAG
gtaataaagtcacgggggca

SEQ ID NO: 36435 - DNA, 20 bp, Artificial Sequence
  Description of Artificial Sequence: Synthetic oligonucleotide
  Target: SCNA; (+) strand; PAM type: NRG; PAM sequence: AAG
cacgggggcagagccctgac

SEQ ID NO: 36436 - DNA, 20 bp, Artificial Sequence
  Description of Artificial Sequence: Synthetic oligonucleotide
  Target: SCNA; (+) strand; PAM type: NRG; PAM sequence: TGG
gggggcagagccctgacaag

SEQ ID NO: 36437 - DNA, 20 bp, Artificial Sequence
  Description of Artificial Sequence: Synthetic oligonucleotide
  Target: SCNA; (+) strand; PAM type: NRG; PAM sequence: TGG
agagccctgacaagtggaat

SEQ ID NO: 36438 - DNA, 20 bp, Artificial Sequence
  Description of Artificial Sequence: Synthetic oligonucleotide
  Target: SCNA; (+) strand; PAM type: NRG; PAM sequence: AAG
tggaattggtaacattatga

SEQ ID NO: 36439 - DNA, 20 bp, Artificial Sequence
  Description of Artificial Sequence: Synthetic oligonucleotide
  Target: SCNA; (+) strand; PAM type: NRG; PAM sequence: AGG
ggaattggtaacattatgaa

SEQ ID NO: 36440 - DNA, 20 bp, Artificial Sequence
  Description of Artificial Sequence: Synthetic oligonucleotide
  Target: SCNA; (+) strand; PAM type: NRG; PAM sequence: GAG
gtaacattatgaaaggcctt

SEQ ID NO: 36441 - DNA, 20 bp, Artificial Sequence
  Description of Artificial Sequence: Synthetic oligonucleotide
  Target: SCNA; (+) strand; PAM type: NRG; PAM sequence: AGG
taacattatgaaaggccttg

SEQ ID NO: 36442 - DNA, 20 bp, Artificial Sequence
  Description of Artificial Sequence: Synthetic oligonucleotide
  Target: SCNA; (+) strand; PAM type: NRG; PAM sequence: GGG
aacattatgaaaggccttga

SEQ ID NO: 36443 - DNA, 20 bp, Artificial Sequence
  Description of Artificial Sequence: Synthetic oligonucleotide
  Target: SCNA; (+) strand; PAM type: NRG; PAM sequence: GAG
cattatgaaaggccttgagg

SEQ ID NO: 36444 - DNA, 20 bp, Artificial Sequence
  Description of Artificial Sequence: Synthetic oligonucleotide
  Target: SCNA; (+) strand; PAM type: NRG; PAM sequence: GAG
atgaaaggccttgagggagt

SEQ ID NO: 36445 - DNA, 20 bp, Artificial Sequence
  Description of Artificial Sequence: Synthetic oligonucleotide
  Target: SCNA; (+) strand; PAM type: NRG; PAM sequence: TGG
aaggccttgagggagtgagt

SEQ ID NO: 36446 - DNA, 20 bp, Artificial Sequence
  Description of Artificial Sequence: Synthetic oligonucleotide
  Target: SCNA; (+) strand; PAM type: NRG; PAM sequence: GAG
tttctatctctctaccatgt

SEQ ID NO: 36447 - DNA, 20 bp, Artificial Sequence
  Description of Artificial Sequence: Synthetic oligonucleotide
  Target: SCNA; (+) strand; PAM type: NRG; PAM sequence: CAG
ctctctaccatgtgagaaca

SEQ ID NO: 36448 - DNA, 20 bp, Artificial Sequence
  Description of Artificial Sequence: Synthetic oligonucleotide
  Target: SCNA; (+) strand; PAM type: NRG; PAM sequence: TGG
ccatgtgagaacacagcatt

SEQ ID NO: 36449 - DNA, 20 bp, Artificial Sequence
  Description of Artificial Sequence: Synthetic oligonucleotide
  Target: SCNA; (+) strand; PAM type: NRG; PAM sequence: TGG
gaacacagcatttggccctc

SEQ ID NO: 36450 - DNA, 20 bp, Artificial Sequence
  Description of Artificial Sequence: Synthetic oligonucleotide
  Target: SCNA; (+) strand; PAM type: NRG; PAM sequence: GAG
acacagcatttggccctctg

SEQ ID NO: 36451 - DNA, 20 bp, Artificial Sequence
  Description of Artificial Sequence: Synthetic oligonucleotide
  Target: SCNA; (+) strand; PAM type: NRG; PAM sequence: AGG
cacagcatttggccctctgg

SEQ ID NO: 36452 - DNA, 20 bp, Artificial Sequence
  Description of Artificial Sequence: Synthetic oligonucleotide
  Target: SCNA; (+) strand; PAM type: NRG; PAM sequence: CAG
atttggccctctggaggata

SEQ ID NO: 36453 - DNA, 20 bp, Artificial Sequence
  Description of Artificial Sequence: Synthetic oligonucleotide
  Target: SCNA; (+) strand; PAM type: NRG; PAM sequence: AAG
cctctggaggatacagtgac

SEQ ID NO: 36454 - DNA, 20 bp, Artificial Sequence
  Description of Artificial Sequence: Synthetic oligonucleotide
  Target: SCNA; (+) strand; PAM type: NRG; PAM sequence: TGG
acagtgacaagacaccatct

SEQ ID NO: 36455 - DNA, 20 bp, Artificial Sequence
  Description of Artificial Sequence: Synthetic oligonucleotide
  Target: SCNA; (+) strand; PAM type: NRG; PAM sequence: GGG
cagtgacaagacaccatctt

SEQ ID NO: 36456 - DNA, 20 bp, Artificial Sequence
  Description of Artificial Sequence: Synthetic oligonucleotide
  Target: SCNA; (+) strand; PAM type: NRG; PAM sequence: GAG
gtgacaagacaccatcttgg

SEQ ID NO: 36457 - DNA, 20 bp, Artificial Sequence
  Description of Artificial Sequence: Synthetic oligonucleotide
  Target: SCNA; (+) strand; PAM type: NRG; PAM sequence: TAG
acaagacaccatcttgggag

SEQ ID NO: 36458 - DNA, 20 bp, Artificial Sequence
  Description of Artificial Sequence: Synthetic oligonucleotide
  Target: SCNA; (+) strand; PAM type: NRG; PAM sequence: GAG
aagacaccatcttgggagta

SEQ ID NO: 36459 - DNA, 20 bp, Artificial Sequence
  Description of Artificial Sequence: Synthetic oligonucleotide
  Target: SCNA; (+) strand; PAM type: NRG; PAM sequence: CGG
ccatcttgggagtagagaac

SEQ ID NO: 36460 - DNA, 20 bp, Artificial Sequence
  Description of Artificial Sequence: Synthetic oligonucleotide
  Target: SCNA; (+) strand; PAM type: NRG; PAM sequence: CAG
agtagagaaccggccctcgc

SEQ ID NO: 36461 - DNA, 20 bp, Artificial Sequence
  Description of Artificial Sequence: Synthetic oligonucleotide
  Target: SCNA; (+) strand; PAM type: NRG; PAM sequence: AAG
ctcgccagatactgaacctg

SEQ ID NO: 36462 - DNA, 20 bp, Artificial Sequence
  Description of Artificial Sequence: Synthetic oligonucleotide
  Target: SCNA; (+) strand; PAM type: NRG; PAM sequence: TGG
gaagacaaatgccttgatct

SEQ ID NO: 36463 - DNA, 20 bp, Artificial Sequence
  Description of Artificial Sequence: Synthetic oligonucleotide
  Target: SCNA; (+) strand; PAM type: NRG; PAM sequence: GAG
agacaaatgccttgatcttg

SEQ ID NO: 36464 - DNA, 20 bp, Artificial Sequence
  Description of Artificial Sequence: Synthetic oligonucleotide
  Target: SCNA; (+) strand; PAM type: NRG; PAM sequence: CAG
tgccttgatcttggagttcc

SEQ ID NO: 36465 - DNA, 20 bp, Artificial Sequence
  Description of Artificial Sequence: Synthetic oligonucleotide
  Target: SCNA; (+) strand; PAM type: NRG; PAM sequence: CAG
atcttggagttcccagcctc

SEQ ID NO: 36466 - DNA, 20 bp, Artificial Sequence
  Description of Artificial Sequence: Synthetic oligonucleotide
  Target: SCNA; (+) strand; PAM type: NRG; PAM sequence: GAG
cttggagttcccagcctcca

SEQ ID NO: 36467 - DNA, 20 bp, Artificial Sequence
  Description of Artificial Sequence: Synthetic oligonucleotide
  Target: SCNA; (+) strand; PAM type: NRG; PAM sequence: GAG
ttcccagcctccagagctat

SEQ ID NO: 36468 - DNA, 20 bp, Artificial Sequence
  Description of Artificial Sequence: Synthetic oligonucleotide
  Target: SCNA; (+) strand; PAM type: NRG; PAM sequence: CAG
tctgttgtttgtaaattacc

SEQ ID NO: 36469 - DNA, 20 bp, Artificial Sequence
  Description of Artificial Sequence: Synthetic oligonucleotide
  Target: SCNA; (+) strand; PAM type: NRG; PAM sequence: CAG
tctcatgtattttgttataa

SEQ ID NO: 36470 - DNA, 20 bp, Artificial Sequence
  Description of Artificial Sequence: Synthetic oligonucleotide
  Target: SCNA; (+) strand; PAM type: NRG; PAM sequence: CAG
ttttgttataacagcacaaa

SEQ ID NO: 36471 - DNA, 20 bp, Artificial Sequence
  Description of Artificial Sequence: Synthetic oligonucleotide
  Target: SCNA; (+) strand; PAM type: NRG; PAM sequence: AAG
tataacagcacaaacagatt

SEQ ID NO: 36472 - DNA, 20 bp, Artificial Sequence
  Description of Artificial Sequence: Synthetic oligonucleotide
  Target: SCNA; (+) strand; PAM type: NRG; PAM sequence: CAG
gcacaaacagattaagacaa

SEQ ID NO: 36473 - DNA, 20 bp, Artificial Sequence
  Description of Artificial Sequence: Synthetic oligonucleotide
  Target: SCNA; (+) strand; PAM type: NRG; PAM sequence: CAG
gattaagacaacagctttct

SEQ ID NO: 36474 - DNA, 20 bp, Artificial Sequence
  Description of Artificial Sequence: Synthetic oligonucleotide
  Target: SCNA; (+) strand; PAM type: NRG; PAM sequence: GAG
ttaagacaacagctttctca

SEQ ID NO: 36475 - DNA, 20 bp, Artificial Sequence
  Description of Artificial Sequence: Synthetic oligonucleotide
  Target: SCNA; (+) strand; PAM type: NRG; PAM sequence: TAG
agagcccaaaacatttataa

SEQ ID NO: 36476 - DNA, 20 bp, Artificial Sequence
  Description of Artificial Sequence: Synthetic oligonucleotide
  Target: SCNA; (+) strand; PAM type: NRG; PAM sequence: AAG
cccaaaacatttataatagt

SEQ ID NO: 36477 - DNA, 20 bp, Artificial Sequence
  Description of Artificial Sequence: Synthetic oligonucleotide
  Target: SCNA; (+) strand; PAM type: NRG; PAM sequence: GAG
aatttgcaaaatcaaacaat

SEQ ID NO: 36478 - DNA, 20 bp, Artificial Sequence
  Description of Artificial Sequence: Synthetic oligonucleotide
  Target: SCNA; (+) strand; PAM type: NRG; PAM sequence: AAG
tgcaaaatcaaacaatgagt

SEQ ID NO: 36479 - DNA, 20 bp, Artificial Sequence
  Description of Artificial Sequence: Synthetic oligonucleotide
  Target: SCNA; (+) strand; PAM type: NRG; PAM sequence: AGG
gcaaaatcaaacaatgagta

SEQ ID NO: 36480 - DNA, 20 bp, Artificial Sequence
  Description of Artificial Sequence: Synthetic oligonucleotide
  Target: SCNA; (+) strand; PAM type: NRG; PAM sequence: CAG
tgagtaaggcctcaaatgat

SEQ ID NO: 36481 - DNA, 20 bp, Artificial Sequence
  Description of Artificial Sequence: Synthetic oligonucleotide
  Target: SCNA; (+) strand; PAM type: NRG; PAM sequence: AAG
gctgtacttgctaaaaatga

SEQ ID NO: 36482 - DNA, 20 bp, Artificial Sequence
  Description of Artificial Sequence: Synthetic oligonucleotide
  Target: SCNA; (+) strand; PAM type: NRG; PAM sequence: TGG
actaaatcactcaattcact

SEQ ID NO: 36483 - DNA, 20 bp, Artificial Sequence
  Description of Artificial Sequence: Synthetic oligonucleotide
  Target: SCNA; (+) strand; PAM type: NRG; PAM sequence: GGG
ctaaatcactcaattcactt

SEQ ID NO: 36484 - DNA, 20 bp, Artificial Sequence
  Description of Artificial Sequence: Synthetic oligonucleotide
  Target: SCNA; (+) strand; PAM type: NRG; PAM sequence: AAG
atcactcaattcacttgggc

SEQ ID NO: 36485 - DNA, 20 bp, Artificial Sequence
  Description of Artificial Sequence: Synthetic oligonucleotide
  Target: SCNA; (+) strand; PAM type: NRG; PAM sequence: TAG
ttttctgatttactatctaa

SEQ ID NO: 36486 - DNA, 20 bp, Artificial Sequence
  Description of Artificial Sequence: Synthetic oligonucleotide
  Target: SCNA; (+) strand; PAM type: NRG; PAM sequence: TGG
gatttactatctaatagtac

SEQ ID NO: 36487 - DNA, 20 bp, Artificial Sequence
  Description of Artificial Sequence: Synthetic oligonucleotide
  Target: SCNA; (+) strand; PAM type: NRG; PAM sequence: TAG
cctacaaatttttttgttaa

SEQ ID NO: 36488 - DNA, 20 bp, Artificial Sequence
  Description of Artificial Sequence: Synthetic oligonucleotide
  Target: SCNA; (+) strand; PAM type: NRG; PAM sequence: TGG
gttttgctttttaataatac

SEQ ID NO: 36489 - DNA, 20 bp, Artificial Sequence
  Description of Artificial Sequence: Synthetic oligonucleotide
  Target: SCNA; (+) strand; PAM type: NRG; PAM sequence: TGG
ataatactggataccaatac

SEQ ID NO: 36490 - DNA, 20 bp, Artificial Sequence
  Description of Artificial Sequence: Synthetic oligonucleotide
  Target: SCNA; (+) strand; PAM type: NRG; PAM sequence: TGG
ccaatactggatatccaaaa

SEQ ID NO: 36491 - DNA, 20 bp, Artificial Sequence
  Description of Artificial Sequence: Synthetic oligonucleotide
  Target: SCNA; (+) strand; PAM type: NRG; PAM sequence: TAG
ggatatccaaaatggtttga

SEQ ID NO: 36492 - DNA, 20 bp, Artificial Sequence
  Description of Artificial Sequence: Synthetic oligonucleotide
  Target: SCNA; (+) strand; PAM type: NRG; PAM sequence: TGG
atccaaaatggtttgatagt

SEQ ID NO: 36493 - DNA, 20 bp, Artificial Sequence
  Description of Artificial Sequence: Synthetic oligonucleotide
  Target: SCNA; (+) strand; PAM type: NRG; PAM sequence: GGG
tccaaaatggtttgatagtt

SEQ ID NO: 36494 - DNA, 20 bp, Artificial Sequence
  Description of Artificial Sequence: Synthetic oligonucleotide
  Target: SCNA; (+) strand; PAM type: NRG; PAM sequence: AAG
tggtttgatagttgggaaca

SEQ ID NO: 36495 - DNA, 20 bp, Artificial Sequence
  Description of Artificial Sequence: Synthetic oligonucleotide
  Target: SCNA; (+) strand; PAM type: NRG; PAM sequence: AGG
ggtttgatagttgggaacaa

SEQ ID NO: 36496 - DNA, 20 bp, Artificial Sequence
  Description of Artificial Sequence: Synthetic oligonucleotide
  Target: SCNA; (+) strand; PAM type: NRG; PAM sequence: GGG
gtttgatagttgggaacaaa

SEQ ID NO: 36497 - DNA, 20 bp, Artificial Sequence
  Description of Artificial Sequence: Synthetic oligonucleotide
  Target: SCNA; (+) strand; PAM type: NRG; PAM sequence: GGG
tttgatagttgggaacaaag

SEQ ID NO: 36498 - DNA, 20 bp, Artificial Sequence
  Description of Artificial Sequence: Synthetic oligonucleotide
  Target: SCNA; (+) strand; PAM type: NRG; PAM sequence: AAG
agttgggaacaaaggggata

SEQ ID NO: 36499 - DNA, 20 bp, Artificial Sequence
  Description of Artificial Sequence: Synthetic oligonucleotide
  Target: SCNA; (+) strand; PAM type: NRG; PAM sequence: AGG
gttgggaacaaaggggataa

SEQ ID NO: 36500 - DNA, 20 bp, Artificial Sequence
  Description of Artificial Sequence: Synthetic oligonucleotide
  Target: SCNA; (+) strand; PAM type: NRG; PAM sequence: AAG
ggaacaaaggggataaagga

SEQ ID NO: 36501 - DNA, 20 bp, Artificial Sequence
  Description of Artificial Sequence: Synthetic oligonucleotide
  Target: SCNA; (+) strand; PAM type: NRG; PAM sequence: CAG
ggaaagaaatgtactataac

SEQ ID NO: 36502 - DNA, 20 bp, Artificial Sequence
  Description of Artificial Sequence: Synthetic oligonucleotide
  Target: SCNA; (+) strand; PAM type: NRG; PAM sequence: GAG
aaagaaatgtactataacca

SEQ ID NO: 36503 - DNA, 20 bp, Artificial Sequence
  Description of Artificial Sequence: Synthetic oligonucleotide
  Target: SCNA; (+) strand; PAM type: NRG; PAM sequence: GAG
agagatttttgaaaaataat

SEQ ID NO: 36504 - DNA, 20 bp, Artificial Sequence
  Description of Artificial Sequence: Synthetic oligonucleotide
  Target: SCNA; (+) strand; PAM type: NRG; PAM sequence: CAG
atgtactatgatacttcact

SEQ ID NO: 36505 - DNA, 20 bp, Artificial Sequence
  Description of Artificial Sequence: Synthetic oligonucleotide
  Target: SCNA; (+) strand; PAM type: NRG; PAM sequence: TGG
aaacctcacttcaaacttaa

SEQ ID NO: 36506 - DNA, 20 bp, Artificial Sequence
  Description of Artificial Sequence: Synthetic oligonucleotide
  Target: SCNA; (+) strand; PAM type: NRG; PAM sequence: GGG
aacctcacttcaaacttaat

SEQ ID NO: 36507 - DNA, 20 bp, Artificial Sequence
  Description of Artificial Sequence: Synthetic oligonucleotide
  Target: SCNA; (+) strand; PAM type: NRG; PAM sequence: AAG
ctcacttcaaacttaatggg

SEQ ID NO: 36508 - DNA, 20 bp, Artificial Sequence
  Description of Artificial Sequence: Synthetic oligonucleotide
  Target: SCNA; (+) strand; PAM type: NRG; PAM sequence: GAG
cacttcaaacttaatgggaa

SEQ ID NO: 36509 - DNA, 20 bp, Artificial Sequence
  Description of Artificial Sequence: Synthetic oligonucleotide
  Target: SCNA; (+) strand; PAM type: NRG; PAM sequence: AAG
aaacttaatgggaagagaaa

SEQ ID NO: 36510 - DNA, 20 bp, Artificial Sequence
  Description of Artificial Sequence: Synthetic oligonucleotide
  Target: SCNA; (+) strand; PAM type: NRG; PAM sequence: TGG
taatgggaagagaaaaagat

SEQ ID NO: 36511 - DNA, 20 bp, Artificial Sequence
  Description of Artificial Sequence: Synthetic oligonucleotide
  Target: SCNA; (+) strand; PAM type: NRG; PAM sequence: GGG
aatgggaagagaaaaagatt

SEQ ID NO: 36512 - DNA, 20 bp, Artificial Sequence
  Description of Artificial Sequence: Synthetic oligonucleotide
  Target: SCNA; (+) strand; PAM type: NRG; PAM sequence: GGG
atgggaagagaaaaagattg

SEQ ID NO: 36513 - DNA, 20 bp, Artificial Sequence
  Description of Artificial Sequence: Synthetic oligonucleotide
  Target: SCNA; (+) strand; PAM type: NRG; PAM sequence: AAG
ggaagagaaaaagattgggg

SEQ ID NO: 36514 - DNA, 20 bp, Artificial Sequence
  Description of Artificial Sequence: Synthetic oligonucleotide
  Target: SCNA; (+) strand; PAM type: NRG; PAM sequence: AAG
agagaaaaagattggggaag

SEQ ID NO: 36515 - DNA, 20 bp, Artificial Sequence
  Description of Artificial Sequence: Synthetic oligonucleotide
  Target: SCNA; (+) strand; PAM type: NRG; PAM sequence: AAG
agattggggaagaagtcttc

SEQ ID NO: 36516 - DNA, 20 bp, Artificial Sequence
  Description of Artificial Sequence: Synthetic oligonucleotide
  Target: SCNA; (+) strand; PAM type: NRG; PAM sequence: CAG
ggggaagaagtcttcaagca

SEQ ID NO: 36517 - DNA, 20 bp, Artificial Sequence
  Description of Artificial Sequence: Synthetic oligonucleotide
  Target: SCNA; (+) strand; PAM type: NRG; PAM sequence: TAG
agcacagtccataatattga

SEQ ID NO: 36518 - DNA, 20 bp, Artificial Sequence
  Description of Artificial Sequence: Synthetic oligonucleotide
  Target: SCNA; (+) strand; PAM type: NRG; PAM sequence: TAG
cagtccataatattgataga

SEQ ID NO: 36519 - DNA, 20 bp, Artificial Sequence
  Description of Artificial Sequence: Synthetic oligonucleotide
  Target: SCNA; (+) strand; PAM type: NRG; PAM sequence: TGG
tagactcctacacatattaa

SEQ ID NO: 36520 - DNA, 20 bp, Artificial Sequence
  Description of Artificial Sequence: Synthetic oligonucleotide
  Target: SCNA; (+) strand; PAM type: NRG; PAM sequence: CAG
ctacacatattaatggttga

SEQ ID NO: 36521 - DNA, 20 bp, Artificial Sequence
  Description of Artificial Sequence: Synthetic oligonucleotide
  Target: SCNA; (+) strand; PAM type: NRG; PAM sequence: TAG
acatattaatggttgacagc

SEQ ID NO: 36522 - DNA, 20 bp, Artificial Sequence
  Description of Artificial Sequence: Synthetic oligonucleotide
  Target: SCNA; (+) strand; PAM type: NRG; PAM sequence: TAG
gacagctagatgtcaatgcc

SEQ ID NO: 36523 - DNA, 20 bp, Artificial Sequence
  Description of Artificial Sequence: Synthetic oligonucleotide
  Target: SCNA; (+) strand; PAM type: NRG; PAM sequence: GAG
cagctagatgtcaatgccta

SEQ ID NO: 36524 - DNA, 20 bp, Artificial Sequence
  Description of Artificial Sequence: Synthetic oligonucleotide
  Target: SCNA; (+) strand; PAM type: NRG; PAM sequence: TAG
aatgcctagagcacaacaaa

SEQ ID NO: 36525 - DNA, 20 bp, Artificial Sequence
  Description of Artificial Sequence: Synthetic oligonucleotide
  Target: SCNA; (+) strand; PAM type: NRG; PAM sequence: AGG
atgcctagagcacaacaaat

SEQ ID NO: 36526 - DNA, 20 bp, Artificial Sequence
  Description of Artificial Sequence: Synthetic oligonucleotide
  Target: SCNA; (+) strand; PAM type: NRG; PAM sequence: TGG
actatattttttatgatgct

SEQ ID NO: 36527 - DNA, 20 bp, Artificial Sequence
  Description of Artificial Sequence: Synthetic oligonucleotide
  Target: SCNA; (+) strand; PAM type: NRG; PAM sequence: GAG
tattttttttgtttgttttt

SEQ ID NO: 36528 - DNA, 20 bp, Artificial Sequence
  Description of Artificial Sequence: Synthetic oligonucleotide
  Target: SCNA; (+) strand; PAM type: NRG; PAM sequence: CGG
ttttttgtttgtttttgaga

SEQ ID NO: 36529 - DNA, 20 bp, Artificial Sequence
  Description of Artificial Sequence: Synthetic oligonucleotide
  Target: SCNA; (+) strand; PAM type: NRG; PAM sequence: GAG
ttttgtttgtttttgagacg

SEQ ID NO: 36530 - DNA, 20 bp, Artificial Sequence
  Description of Artificial Sequence: Synthetic oligonucleotide
  Target: SCNA; (+) strand; PAM type: NRG; PAM sequence: CAG
cggagtcttgctctgtcacc

SEQ ID NO: 36531 - DNA, 20 bp, Artificial Sequence
  Description of Artificial Sequence: Synthetic oligonucleotide
  Target: SCNA; (+) strand; PAM type: NRG; PAM sequence: AGG
ggagtcttgctctgtcaccc

SEQ ID NO: 36532 - DNA, 20 bp, Artificial Sequence
  Description of Artificial Sequence: Synthetic oligonucleotide
  Target: SCNA; (+) strand; PAM type: NRG; PAM sequence: TGG
tcttgctctgtcacccaggc

SEQ ID NO: 36533 - DNA, 20 bp, Artificial Sequence
  Description of Artificial Sequence: Synthetic oligonucleotide
  Target: SCNA; (+) strand; PAM type: NRG; PAM sequence: GAG
ttgctctgtcacccaggctg

SEQ ID NO: 36534 - DNA, 20 bp, Artificial Sequence
  Description of Artificial Sequence: Synthetic oligonucleotide
  Target: SCNA; (+) strand; PAM type: NRG; PAM sequence: TGG
tcacccaggctggagtgtat

SEQ ID NO: 36535 - DNA, 20 bp, Artificial Sequence
  Description of Artificial Sequence: Synthetic oligonucleotide
  Target: SCNA; (+) strand; PAM type: NRG; PAM sequence: CAG
ggagtgtattggcatgatct

SEQ ID NO: 36536 - DNA, 20 bp, Artificial Sequence
  Description of Artificial Sequence: Synthetic oligonucleotide
  Target: SCNA; (+) strand; PAM type: NRG; PAM sequence: TGG
tcactgcaaactccatctcc

SEQ ID NO: 36537 - DNA, 20 bp, Artificial Sequence
  Description of Artificial Sequence: Synthetic oligonucleotide
  Target: SCNA; (+) strand; PAM type: NRG; PAM sequence: GGG
cactgcaaactccatctcct

SEQ ID NO: 36538 - DNA, 20 bp, Artificial Sequence
  Description of Artificial Sequence: Synthetic oligonucleotide
  Target: SCNA; (+) strand; PAM type: NRG; PAM sequence: GAG
aaactccatctcctgggttc

SEQ ID NO: 36539 - DNA, 20 bp, Artificial Sequence
  Description of Artificial Sequence: Synthetic oligonucleotide
  Target: SCNA; (+) strand; PAM type: NRG; PAM sequence: TGG
ctgggttcgagcgattctcc

SEQ ID NO: 36540 - DNA, 20 bp, Artificial Sequence
  Description of Artificial Sequence: Synthetic oligonucleotide
  Target: SCNA; (+) strand; PAM type: NRG; PAM sequence: CAG
ttcgagcgattctcctggtt

SEQ ID NO: 36541 - DNA, 20 bp, Artificial Sequence
  Description of Artificial Sequence: Synthetic oligonucleotide
  Target: SCNA; (+) strand; PAM type: NRG; PAM sequence: AAG
ttctcctggttcagcctcct

SEQ ID NO: 36542 - DNA, 20 bp, Artificial Sequence
  Description of Artificial Sequence: Synthetic oligonucleotide
  Target: SCNA; (+) strand; PAM type: NRG; PAM sequence: TAG
tcctggttcagcctcctaag

SEQ ID NO: 36543 - DNA, 20 bp, Artificial Sequence
  Description of Artificial Sequence: Synthetic oligonucleotide
  Target: SCNA; (+) strand; PAM type: NRG; PAM sequence: TGG
ggttcagcctcctaagtagc

SEQ ID NO: 36544 - DNA, 20 bp, Artificial Sequence
  Description of Artificial Sequence: Synthetic oligonucleotide
  Target: SCNA; (+) strand; PAM type: NRG; PAM sequence: GGG
gttcagcctcctaagtagct

SEQ ID NO: 36545 - DNA, 20 bp, Artificial Sequence
  Description of Artificial Sequence: Synthetic oligonucleotide
  Target: SCNA; (+) strand; PAM type: NRG; PAM sequence: TAG
gcctcctaagtagctgggat

SEQ ID NO: 36546 - DNA, 20 bp, Artificial Sequence
  Description of Artificial Sequence: Synthetic oligonucleotide
  Target: SCNA; (+) strand; PAM type: NRG; PAM sequence: GAG
ctcctaagtagctgggatta

SEQ ID NO: 36547 - DNA, 20 bp, Artificial Sequence
  Description of Artificial Sequence: Synthetic oligonucleotide
  Target: SCNA; (+) strand; PAM type: NRG; PAM sequence: TGG
gagtcgtctgccaccatgcc

SEQ ID NO: 36548 - DNA, 20 bp, Artificial Sequence
  Description of Artificial Sequence: Synthetic oligonucleotide
  Target: SCNA; (+) strand; PAM type: NRG; PAM sequence: TAG
ctggctaatttttgtatttt

SEQ ID NO: 36549 - DNA, 20 bp, Artificial Sequence
  Description of Artificial Sequence: Synthetic oligonucleotide
  Target: SCNA; (+) strand; PAM type: NRG; PAM sequence: TAG
gctaatttttgtatttttag

SEQ ID NO: 36550 - DNA, 20 bp, Artificial Sequence
  Description of Artificial Sequence: Synthetic oligonucleotide
  Target: SCNA; (+) strand; PAM type: NRG; PAM sequence: GAG
taatttttgtatttttagta

SEQ ID NO: 36551 - DNA, 20 bp, Artificial Sequence
  Description of Artificial Sequence: Synthetic oligonucleotide
  Target: SCNA; (+) strand; PAM type: NRG; PAM sequence: CAG
ttttgtatttttagtagaga

SEQ ID NO: 36552 - DNA, 20 bp, Artificial Sequence
  Description of Artificial Sequence: Synthetic oligonucleotide
  Target: SCNA; (+) strand; PAM type: NRG; PAM sequence: AGG
tttgtatttttagtagagac

SEQ ID NO: 36553 - DNA, 20 bp, Artificial Sequence
  Description of Artificial Sequence: Synthetic oligonucleotide
  Target: SCNA; (+) strand; PAM type: NRG; PAM sequence: GGG
ttgtatttttagtagagaca

SEQ ID NO: 36554 - DNA, 20 bp, Artificial Sequence
  Description of Artificial Sequence: Synthetic oligonucleotide
  Target: SCNA; (+) strand; PAM type: NRG; PAM sequence: TGG
gagacagggtttttccacgt

SEQ ID NO: 36555 - DNA, 20 bp, Artificial Sequence
  Description of Artificial Sequence: Synthetic oligonucleotide
  Target: SCNA; (+) strand; PAM type: NRG; PAM sequence: CAG
cagggtttttccacgttggc

SEQ ID NO: 36556 - DNA, 20 bp, Artificial Sequence
  Description of Artificial Sequence: Synthetic oligonucleotide
  Target: SCNA; (+) strand; PAM type: NRG; PAM sequence: AGG
agggtttttccacgttggcc

SEQ ID NO: 36557 - DNA, 20 bp, Artificial Sequence
  Description of Artificial Sequence: Synthetic oligonucleotide
  Target: SCNA; (+) strand; PAM type: NRG; PAM sequence: TGG
tttttccacgttggccaggc

SEQ ID NO: 36558 - DNA, 20 bp, Artificial Sequence
  Description of Artificial Sequence: Synthetic oligonucleotide
  Target: SCNA; (+) strand; PAM type: NRG; PAM sequence: CAG
tggtctcaaacacctgactt

SEQ ID NO: 36559 - DNA, 20 bp, Artificial Sequence
  Description of Artificial Sequence: Synthetic oligonucleotide
  Target: SCNA; (+) strand; PAM type: NRG; PAM sequence: AGG
ggtctcaaacacctgacttc

SEQ ID NO: 36560 - DNA, 20 bp, Artificial Sequence
  Description of Artificial Sequence: Synthetic oligonucleotide
  Target: SCNA; (+) strand; PAM type: NRG; PAM sequence: TGG
ttcaggtgatccacccgcct

SEQ ID NO: 36561 - DNA, 20 bp, Artificial Sequence
  Description of Artificial Sequence: Synthetic oligonucleotide
  Target: SCNA; (+) strand; PAM type: NRG; PAM sequence: AAG
ccacccgccttggcctccca

SEQ ID NO: 36562 - DNA, 20 bp, Artificial Sequence
  Description of Artificial Sequence: Synthetic oligonucleotide
  Target: SCNA; (+) strand; PAM type: NRG; PAM sequence: TGG
gccttggcctcccaaagtcc

SEQ ID NO: 36563 - DNA, 20 bp, Artificial Sequence
  Description of Artificial Sequence: Synthetic oligonucleotide
  Target: SCNA; (+) strand; PAM type: NRG; PAM sequence: CAG
ctcccaaagtcctggaatta

SEQ ID NO: 36564 - DNA, 20 bp, Artificial Sequence
  Description of Artificial Sequence: Synthetic oligonucleotide
  Target: SCNA; (+) strand; PAM type: NRG; PAM sequence: AGG
tcccaaagtcctggaattac

SEQ ID NO: 36565 - DNA, 20 bp, Artificial Sequence
  Description of Artificial Sequence: Synthetic oligonucleotide
  Target: SCNA; (+) strand; PAM type: NRG; PAM sequence: GAG
agtcctggaattacaggcgt

SEQ ID NO: 36566 - DNA, 20 bp, Artificial Sequence
  Description of Artificial Sequence: Synthetic oligonucleotide
  Target: SCNA; (+) strand; PAM type: NRG; PAM sequence: CAG
acaggcgtgagccaccgcac

SEQ ID NO: 36567 - DNA, 20 bp, Artificial Sequence
  Description of Artificial Sequence: Synthetic oligonucleotide
  Target: SCNA; (+) strand; PAM type: NRG; PAM sequence: AGG
caggcgtgagccaccgcacc

SEQ ID NO: 36568 - DNA, 20 bp, Artificial Sequence
  Description of Artificial Sequence: Synthetic oligonucleotide
  Target: SCNA; (+) strand; PAM type: NRG; PAM sequence: TGG
cgtgagccaccgcaccaggc

SEQ ID NO: 36569 - DNA, 20 bp, Artificial Sequence
  Description of Artificial Sequence: Synthetic oligonucleotide
  Target: SCNA; (+) strand; PAM type: NRG; PAM sequence: TAG
gccaccgcaccaggctggtg

SEQ ID NO: 36570 - DNA, 20 bp, Artificial Sequence
  Description of Artificial Sequence: Synthetic oligonucleotide
  Target: SCNA; (+) strand; PAM type: NRG; PAM sequence: CAG
ctggtgtagtattttataca

SEQ ID NO: 36571 - DNA, 20 bp, Artificial Sequence
  Description of Artificial Sequence: Synthetic oligonucleotide
  Target: SCNA; (+) strand; PAM type: NRG; PAM sequence: TGG
cacagcatgcatcaacaaaa

SEQ ID NO: 36572 - DNA, 20 bp, Artificial Sequence
  Description of Artificial Sequence: Synthetic oligonucleotide
  Target: SCNA; (+) strand; PAM type: NRG; PAM sequence: CAG
catgcatcaacaaaatggat

SEQ ID NO: 36573 - DNA, 20 bp, Artificial Sequence
  Description of Artificial Sequence: Synthetic oligonucleotide
  Target: SCNA; (+) strand; PAM type: NRG; PAM sequence: TGG
catcaacaaaatggatcaga

SEQ ID NO: 36574 - DNA, 20 bp, Artificial Sequence
  Description of Artificial Sequence: Synthetic oligonucleotide
  Target: SCNA; (+) strand; PAM type: NRG; PAM sequence: TGG
aacaaaatggatcagatgga

SEQ ID NO: 36575 - DNA, 20 bp, Artificial Sequence
  Description of Artificial Sequence: Synthetic oligonucleotide
  Target: SCNA; (+) strand; PAM type: NRG; PAM sequence: GGG
acaaaatggatcagatggat

SEQ ID NO: 36576 - DNA, 20 bp, Artificial Sequence
  Description of Artificial Sequence: Synthetic oligonucleotide
  Target: SCNA; (+) strand; PAM type: NRG; PAM sequence: TGG
aaatggatcagatggatggg

SEQ ID NO: 36577 - DNA, 20 bp, Artificial Sequence
  Description of Artificial Sequence: Synthetic oligonucleotide
  Target: SCNA; (+) strand; PAM type: NRG; PAM sequence: TGG
cagatggatgggtggacaaa

SEQ ID NO: 36578 - DNA, 20 bp, Artificial Sequence
  Description of Artificial Sequence: Synthetic oligonucleotide
  Target: SCNA; (+) strand; PAM type: NRG; PAM sequence: AAG
gtggacaaatggataattga

SEQ ID NO: 36579 - DNA, 20 bp, Artificial Sequence
  Description of Artificial Sequence: Synthetic oligonucleotide
  Target: SCNA; (+) strand; PAM type: NRG; PAM sequence: TAG
tggataattgaaagaataaa

SEQ ID NO: 36580 - DNA, 20 bp, Artificial Sequence
  Description of Artificial Sequence: Synthetic oligonucleotide
  Target: SCNA; (+) strand; PAM type: NRG; PAM sequence: CAG
ataattgaaagaataaatag

SEQ ID NO: 36581 - DNA, 20 bp, Artificial Sequence
  Description of Artificial Sequence: Synthetic oligonucleotide
  Target: SCNA; (+) strand; PAM type: NRG; PAM sequence: AAG
aaatgataactctaactttt

SEQ ID NO: 36582 - DNA, 20 bp, Artificial Sequence
  Description of Artificial Sequence: Synthetic oligonucleotide
  Target: SCNA; (+) strand; PAM type: NRG; PAM sequence: GAG
atgataactctaacttttaa

SEQ ID NO: 36583 - DNA, 20 bp, Artificial Sequence
  Description of Artificial Sequence: Synthetic oligonucleotide
  Target: SCNA; (+) strand; PAM type: NRG; PAM sequence: AAG
ctaacttttaagagtctatc

SEQ ID NO: 36584 - DNA, 20 bp, Artificial Sequence
  Description of Artificial Sequence: Synthetic oligonucleotide
  Target: SCNA; (+) strand; PAM type: NRG; PAM sequence: CAG
agctaaaatgacttttgaat

SEQ ID NO: 36585 - DNA, 20 bp, Artificial Sequence
  Description of Artificial Sequence: Synthetic oligonucleotide
  Target: SCNA; (+) strand; PAM type: NRG; PAM sequence: TGG
atcagtcgaatgaatgtacg

SEQ ID NO: 36586 - DNA, 20 bp, Artificial Sequence
  Description of Artificial Sequence: Synthetic oligonucleotide
  Target: SCNA; (+) strand; PAM type: NRG; PAM sequence: GGG
tcagtcgaatgaatgtacgt

SEQ ID NO: 36587 - DNA, 20 bp, Artificial Sequence
  Description of Artificial Sequence: Synthetic oligonucleotide
  Target: SCNA; (+) strand; PAM type: NRG; PAM sequence: TGG
gaatgaatgtacgtgggaac

SEQ ID NO: 36588 - DNA, 20 bp, Artificial Sequence
  Description of Artificial Sequence: Synthetic oligonucleotide
  Target: SCNA; (+) strand; PAM type: NRG; PAM sequence: GGG
aatgaatgtacgtgggaact

SEQ ID NO: 36589 - DNA, 20 bp, Artificial Sequence
  Description of Artificial Sequence: Synthetic oligonucleotide
  Target: SCNA; (+) strand; PAM type: NRG; PAM sequence: AAG
tacgtgggaactgggaactt

SEQ ID NO: 36590 - DNA, 20 bp, Artificial Sequence
  Description of Artificial Sequence: Synthetic oligonucleotide
  Target: SCNA; (+) strand; PAM type: NRG; PAM sequence: AAG
tgggaactgggaacttaaga

SEQ ID NO: 36591 - DNA, 20 bp, Artificial Sequence
  Description of Artificial Sequence: Synthetic oligonucleotide
  Target: SCNA; (+) strand; PAM type: NRG; PAM sequence: GAG
ggaactgggaacttaagaaa

SEQ ID NO: 36592 - DNA, 20 bp, Artificial Sequence
  Description of Artificial Sequence: Synthetic oligonucleotide
  Target: SCNA; (+) strand; PAM type: NRG; PAM sequence: AAG
actgggaacttaagaaagag

SEQ ID NO: 36593 - DNA, 20 bp, Artificial Sequence
  Description of Artificial Sequence: Synthetic oligonucleotide
  Target: SCNA; (+) strand; PAM type: NRG; PAM sequence: AGG
ctgggaacttaagaaagaga

SEQ ID NO: 36594 - DNA, 20 bp, Artificial Sequence
  Description of Artificial Sequence: Synthetic oligonucleotide
  Target: SCNA; (+) strand; PAM type: NRG; PAM sequence: GAG
gggaacttaagaaagagaag

SEQ ID NO: 36595 - DNA, 20 bp, Artificial Sequence
  Description of Artificial Sequence: Synthetic oligonucleotide
  Target: SCNA; (+) strand; PAM type: NRG; PAM sequence: TGG
aggagcataaattgcaattg

SEQ ID NO: 36596 - DNA, 20 bp, Artificial Sequence
  Description of Artificial Sequence: Synthetic oligonucleotide
  Target: SCNA; (+) strand; PAM type: NRG; PAM sequence: AAG
ataaattgcaattgtggcta

SEQ ID NO: 36597 - DNA, 20 bp, Artificial Sequence
  Description of Artificial Sequence: Synthetic oligonucleotide
  Target: SCNA; (+) strand; PAM type: NRG; PAM sequence: CAG
aattgcaattgtggctaaag

SEQ ID NO: 36598 - DNA, 20 bp, Artificial Sequence
  Description of Artificial Sequence: Synthetic oligonucleotide
  Target: SCNA; (+) strand; PAM type: NRG; PAM sequence: CAG
tgcaattgtggctaaagcag

SEQ ID NO: 36599 - DNA, 20 bp, Artificial Sequence
  Description of Artificial Sequence: Synthetic oligonucleotide
  Target: SCNA; (+) strand; PAM type: NRG; PAM sequence: AAG
agcagaatgcttatttacat

SEQ ID NO: 36600 - DNA, 20 bp, Artificial Sequence
  Description of Artificial Sequence: Synthetic oligonucleotide
  Target: SCNA; (+) strand; PAM type: NRG; PAM sequence: CAG
ttatttacataagttttaac

SEQ ID NO: 36601 - DNA, 20 bp, Artificial Sequence
  Description of Artificial Sequence: Synthetic oligonucleotide
  Target: SCNA; (+) strand; PAM type: NRG; PAM sequence: CGG
tacataagttttaaccagtg

SEQ ID NO: 36602 - DNA, 20 bp, Artificial Sequence
  Description of Artificial Sequence: Synthetic oligonucleotide
  Target: SCNA; (+) strand; PAM type: NRG; PAM sequence: CAG
atgttgtttttttatgaatc

SEQ ID NO: 36603 - DNA, 20 bp, Artificial Sequence
  Description of Artificial Sequence: Synthetic oligonucleotide
  Target: SCNA; (+) strand; PAM type: NRG; PAM sequence: AAG
aatccagtacatgcttatta

SEQ ID NO: 36604 - DNA, 20 bp, Artificial Sequence
  Description of Artificial Sequence: Synthetic oligonucleotide
  Target: SCNA; (+) strand; PAM type: NRG; PAM sequence: AGG
atccagtacatgcttattaa

SEQ ID NO: 36605 - DNA, 20 bp, Artificial Sequence
  Description of Artificial Sequence: Synthetic oligonucleotide
  Target: SCNA; (+) strand; PAM type: NRG; PAM sequence: GGG
tccagtacatgcttattaaa

SEQ ID NO: 36606 - DNA, 20 bp, Artificial Sequence
  Description of Artificial Sequence: Synthetic oligonucleotide
  Target: SCNA; (+) strand; PAM type: NRG; PAM sequence: TGG
acatgcttattaaagggaat

SEQ ID NO: 36607 - DNA, 20 bp, Artificial Sequence
  Description of Artificial Sequence: Synthetic oligonucleotide
  Target: SCNA; (+) strand; PAM type: NRG; PAM sequence: GAG
atgcttattaaagggaattg

SEQ ID NO: 36608 - DNA, 20 bp, Artificial Sequence
  Description of Artificial Sequence: Synthetic oligonucleotide
  Target: SCNA; (+) strand; PAM type: NRG; PAM sequence: AAG
gaattggagaaaataaaaat

SEQ ID NO: 36609 - DNA, 20 bp, Artificial Sequence
  Description of Artificial Sequence: Synthetic oligonucleotide
  Target: SCNA; (+) strand; PAM type: NRG; PAM sequence: AAG
tggagaaaataaaaataaga

SEQ ID NO: 36610 - DNA, 20 bp, Artificial Sequence
  Description of Artificial Sequence: Synthetic oligonucleotide
  Target: SCNA; (+) strand; PAM type: NRG; PAM sequence: AGG
ggagaaaataaaaataagaa

SEQ ID NO: 36611 - DNA, 20 bp, Artificial Sequence
  Description of Artificial Sequence: Synthetic oligonucleotide
  Target: SCNA; (+) strand; PAM type: NRG; PAM sequence: CAG
aagaaaggaacgcaataatc

SEQ ID NO: 36612 - DNA, 20 bp, Artificial Sequence
  Description of Artificial Sequence: Synthetic oligonucleotide
  Target: SCNA; (+) strand; PAM type: NRG; PAM sequence: TAG
caataatccagactgtaatc

SEQ ID NO: 36613 - DNA, 20 bp, Artificial Sequence
  Description of Artificial Sequence: Synthetic oligonucleotide
  Target: SCNA; (+) strand; PAM type: NRG; PAM sequence: AGG
aataatccagactgtaatct

SEQ ID NO: 36614 - DNA, 20 bp, Artificial Sequence
  Description of Artificial Sequence: Synthetic oligonucleotide
  Target: SCNA; (+) strand; PAM type: NRG; PAM sequence: CAG
ccagactgtaatctaggacc

SEQ ID NO: 36615 - DNA, 20 bp, Artificial Sequence
  Description of Artificial Sequence: Synthetic oligonucleotide
  Target: SCNA; (+) strand; PAM type: NRG; PAM sequence: TAG
tgtaatctaggacccagtaa

SEQ ID NO: 36616 - DNA, 20 bp, Artificial Sequence
  Description of Artificial Sequence: Synthetic oligonucleotide
  Target: SCNA; (+) strand; PAM type: NRG; PAM sequence: TAG
aggacccagtaatagttact

SEQ ID NO: 36617 - DNA, 20 bp, Artificial Sequence
  Description of Artificial Sequence: Synthetic oligonucleotide
  Target: SCNA; (+) strand; PAM type: NRG; PAM sequence: AAG
cttagttgcaaaatttcctc

SEQ ID NO: 36618 - DNA, 20 bp, Artificial Sequence
  Description of Artificial Sequence: Synthetic oligonucleotide
  Target: SCNA; (+) strand; PAM type: NRG; PAM sequence: AGG
ttagttgcaaaatttcctca

SEQ ID NO: 36619 - DNA, 20 bp, Artificial Sequence
  Description of Artificial Sequence: Synthetic oligonucleotide
  Target: SCNA; (+) strand; PAM type: NRG; PAM sequence: GGG
tagttgcaaaatttcctcaa

SEQ ID NO: 36620 - DNA, 20 bp, Artificial Sequence
  Description of Artificial Sequence: Synthetic oligonucleotide
  Target: SCNA; (+) strand; PAM type: NRG; PAM sequence: GAG
aatttcctcaagggcaatat

SEQ ID NO: 36621 - DNA, 20 bp, Artificial Sequence
  Description of Artificial Sequence: Synthetic oligonucleotide
  Target: SCNA; (+) strand; PAM type: NRG; PAM sequence: GAG
tttcctcaagggcaatatga

SEQ ID NO: 36622 - DNA, 20 bp, Artificial Sequence
  Description of Artificial Sequence: Synthetic oligonucleotide
  Target: SCNA; (+) strand; PAM type: NRG; PAM sequence: GAG
tcctcaagggcaatatgaga

SEQ ID NO: 36623 - DNA, 20 bp, Artificial Sequence
  Description of Artificial Sequence: Synthetic oligonucleotide
  Target: SCNA; (+) strand; PAM type: NRG; PAM sequence: TGG
ttttgtgcttgttgccatgc

SEQ ID NO: 36624 - DNA, 20 bp, Artificial Sequence
  Description of Artificial Sequence: Synthetic oligonucleotide
  Target: SCNA; (+) strand; PAM type: NRG; PAM sequence: GGG
tttgtgcttgttgccatgct

SEQ ID NO: 36625 - DNA, 20 bp, Artificial Sequence
  Description of Artificial Sequence: Synthetic oligonucleotide
  Target: SCNA; (+) strand; PAM type: NRG; PAM sequence: GGG
ttgtgcttgttgccatgctg

SEQ ID NO: 36626 - DNA, 20 bp, Artificial Sequence
  Description of Artificial Sequence: Synthetic oligonucleotide
  Target: SCNA; (+) strand; PAM type: NRG; PAM sequence: GGG
tgtgcttgttgccatgctgg

SEQ ID NO: 36627 - DNA, 20 bp, Artificial Sequence
  Description of Artificial Sequence: Synthetic oligonucleotide
  Target: SCNA; (+) strand; PAM type: NRG; PAM sequence: TGG
gccatgctgggggtgcctac

SEQ ID NO: 36628 - DNA, 20 bp, Artificial Sequence
  Description of Artificial Sequence: Synthetic oligonucleotide
  Target: SCNA; (+) strand; PAM type: NRG; PAM sequence: AAG
gggggtgcctactggcgtta

SEQ ID NO: 36629 - DNA, 20 bp, Artificial Sequence
  Description of Artificial Sequence: Synthetic oligonucleotide
  Target: SCNA; (+) strand; PAM type: NRG; PAM sequence: GAG
gggtgcctactggcgttaaa

SEQ ID NO: 36630 - DNA, 20 bp, Artificial Sequence
  Description of Artificial Sequence: Synthetic oligonucleotide
  Target: SCNA; (+) strand; PAM type: NRG; PAM sequence: AGG
ggtgcctactggcgttaaag

SEQ ID NO: 36631 - DNA, 20 bp, Artificial Sequence
  Description of Artificial Sequence: Synthetic oligonucleotide
  Target: SCNA; (+) strand; PAM type: NRG; PAM sequence: AAG
cctactggcgttaaagaggt

SEQ ID NO: 36632 - DNA, 20 bp, Artificial Sequence
  Description of Artificial Sequence: Synthetic oligonucleotide
  Target: SCNA; (+) strand; PAM type: NRG; PAM sequence: AGG
ctactggcgttaaagaggta

SEQ ID NO: 36633 - DNA, 20 bp, Artificial Sequence
  Description of Artificial Sequence: Synthetic oligonucleotide
  Target: SCNA; (+) strand; PAM type: NRG; PAM sequence: CAG
ggcgttaaagaggtaaggcc

SEQ ID NO: 36634 - DNA, 20 bp, Artificial Sequence
  Description of Artificial Sequence: Synthetic oligonucleotide
  Target: SCNA; (+) strand; PAM type: NRG; PAM sequence: AGG
gcgttaaagaggtaaggccc

SEQ ID NO: 36635 - DNA, 20 bp, Artificial Sequence
  Description of Artificial Sequence: Synthetic oligonucleotide
  Target: SCNA; (+) strand; PAM type: NRG; PAM sequence: GGG
cgttaaagaggtaaggccca

SEQ ID NO: 36636 - DNA, 20 bp, Artificial Sequence
  Description of Artificial Sequence: Synthetic oligonucleotide
  Target: SCNA; (+) strand; PAM type: NRG; PAM sequence: GAG
gtaaacatcctacaatgaat

SEQ ID NO: 36637 - DNA, 20 bp, Artificial Sequence
  Description of Artificial Sequence: Synthetic oligonucleotide
  Target: SCNA; (+) strand; PAM type: NRG; PAM sequence: GAG
aaacatcctacaatgaatga

SEQ ID NO: 36638 - DNA, 20 bp, Artificial Sequence
  Description of Artificial Sequence: Synthetic oligonucleotide
  Target: SCNA; (+) strand; PAM type: NRG; PAM sequence: CAG
caatgaatgagagttctcca

SEQ ID NO: 36639 - DNA, 20 bp, Artificial Sequence
  Description of Artificial Sequence: Synthetic oligonucleotide
  Target: SCNA; (+) strand; PAM type: NRG; PAM sequence: AAG
aatgagagttctccacagcg

SEQ ID NO: 36640 - DNA, 20 bp, Artificial Sequence
  Description of Artificial Sequence: Synthetic oligonucleotide
  Target: SCNA; (+) strand; PAM type: NRG; PAM sequence: CAG
ctccacagcgaagaattacc

SEQ ID NO: 36641 - DNA, 20 bp, Artificial Sequence
  Description of Artificial Sequence: Synthetic oligonucleotide
  Target: SCNA; (+) strand; PAM type: NRG; PAM sequence: TGG
acccagcccaaaatgcaaaa

SEQ ID NO: 36642 - DNA, 20 bp, Artificial Sequence
  Description of Artificial Sequence: Synthetic oligonucleotide
  Target: SCNA; (+) strand; PAM type: NRG; PAM sequence: GGG
cccagcccaaaatgcaaaat

SEQ ID NO: 36643 - DNA, 20 bp, Artificial Sequence
  Description of Artificial Sequence: Synthetic oligonucleotide
  Target: SCNA; (+) strand; PAM type: NRG; PAM sequence: GAG
aatgcaaaatgggcttcact

SEQ ID NO: 36644 - DNA, 20 bp, Artificial Sequence
  Description of Artificial Sequence: Synthetic oligonucleotide
  Target: SCNA; (+) strand; PAM type: NRG; PAM sequence: GAG
gggcttcactgagaaaaact

SEQ ID NO: 36645 - DNA, 20 bp, Artificial Sequence
  Description of Artificial Sequence: Synthetic oligonucleotide
  Target: SCNA; (+) strand; PAM type: NRG; PAM sequence: AAG
ccacgtctttatatgtacat

SEQ ID NO: 36646 - DNA, 20 bp, Artificial Sequence
  Description of Artificial Sequence: Synthetic oligonucleotide
  Target: SCNA; (+) strand; PAM type: NRG; PAM sequence: CAG
atatgtacataagccacata

SEQ ID NO: 36647 - DNA, 20 bp, Artificial Sequence
  Description of Artificial Sequence: Synthetic oligonucleotide
  Target: SCNA; (+) strand; PAM type: NRG; PAM sequence: AGG
tatgtacataagccacatac

SEQ ID NO: 36648 - DNA, 20 bp, Artificial Sequence
  Description of Artificial Sequence: Synthetic oligonucleotide
  Target: SCNA; (+) strand; PAM type: NRG; PAM sequence: TAG
cttttcacatactgcaacaa

SEQ ID NO: 36649 - DNA, 20 bp, Artificial Sequence
  Description of Artificial Sequence: Synthetic oligonucleotide
  Target: SCNA; (+) strand; PAM type: NRG; PAM sequence: TGG
attattctacaacattttaa

SEQ ID NO: 36650 - DNA, 20 bp, Artificial Sequence
  Description of Artificial Sequence: Synthetic oligonucleotide
  Target: SCNA; (+) strand; PAM type: NRG; PAM sequence: CAG
acaacattttaatggctgtt

SEQ ID NO: 36651 - DNA, 20 bp, Artificial Sequence
  Description of Artificial Sequence: Synthetic oligonucleotide
  Target: SCNA; (+) strand; PAM type: NRG; PAM sequence: TGG
ctgttcagcaaaccactgca

SEQ ID NO: 36652 - DNA, 20 bp, Artificial Sequence
  Description of Artificial Sequence: Synthetic oligonucleotide
  Target: SCNA; (+) strand; PAM type: NRG; PAM sequence: GAG
tcaaccataatgcatttaat

SEQ ID NO: 36653 - DNA, 20 bp, Artificial Sequence
  Description of Artificial Sequence: Synthetic oligonucleotide
  Target: SCNA; (+) strand; PAM type: NRG; PAM sequence: AGG
caaccataatgcatttaatg

SEQ ID NO: 36654 - DNA, 20 bp, Artificial Sequence
  Description of Artificial Sequence: Synthetic oligonucleotide
  Target: SCNA; (+) strand; PAM type: NRG; PAM sequence: TAG
ggtccctatgatcaaacttc

SEQ ID NO: 36655 - DNA, 20 bp, Artificial Sequence
  Description of Artificial Sequence: Synthetic oligonucleotide
  Target: SCNA; (+) strand; PAM type: NRG; PAM sequence: TAG
tatgatcatatttaaattct

SEQ ID NO: 36656 - DNA, 20 bp, Artificial Sequence
  Description of Artificial Sequence: Synthetic oligonucleotide
  Target: SCNA; (+) strand; PAM type: NRG; PAM sequence: TGG
taaattcttagacatgcgac

SEQ ID NO: 36657 - DNA, 20 bp, Artificial Sequence
  Description of Artificial Sequence: Synthetic oligonucleotide
  Target: SCNA; (+) strand; PAM type: NRG; PAM sequence: CAG
ttcttagacatgcgactggt

SEQ ID NO: 36658 - DNA, 20 bp, Artificial Sequence
  Description of Artificial Sequence: Synthetic oligonucleotide
  Target: SCNA; (+) strand; PAM type: NRG; PAM sequence: GAG
cttagacatgcgactggtca

SEQ ID NO: 36659 - DNA, 20 bp, Artificial Sequence
  Description of Artificial Sequence: Synthetic oligonucleotide
  Target: SCNA; (+) strand; PAM type: NRG; PAM sequence: TAG
cataatttcaatgcttttga

SEQ ID NO: 36660 - DNA, 20 bp, Artificial Sequence
  Description of Artificial Sequence: Synthetic oligonucleotide
  Target: SCNA; (+) strand; PAM type: NRG; PAM sequence: TAG
tcctcaaaaatgacttttat

SEQ ID NO: 36661 - DNA, 20 bp, Artificial Sequence
  Description of Artificial Sequence: Synthetic oligonucleotide
  Target: SCNA; (+) strand; PAM type: NRG; PAM sequence: TGG
aaccatattgttctgattga

SEQ ID NO: 36662 - DNA, 20 bp, Artificial Sequence
  Description of Artificial Sequence: Synthetic oligonucleotide
  Target: SCNA; (+) strand; PAM type: NRG; PAM sequence: AAG
tgatggacatctctaacata

SEQ ID NO: 36663 - DNA, 20 bp, Artificial Sequence
  Description of Artificial Sequence: Synthetic oligonucleotide
  Target: SCNA; (+) strand; PAM type: NRG; PAM sequence: CAG
ttgctgaaaatatgaaacat

SEQ ID NO: 36664 - DNA, 20 bp, Artificial Sequence
  Description of Artificial Sequence: Synthetic oligonucleotide
  Target: SCNA; (+) strand; PAM type: NRG; PAM sequence: GAG
gaaaatatgaaacatcagct

SEQ ID NO: 36665 - DNA, 20 bp, Artificial Sequence
  Description of Artificial Sequence: Synthetic oligonucleotide
  Target: SCNA; (+) strand; PAM type: NRG; PAM sequence: AGG
aaaatatgaaacatcagctg

SEQ ID NO: 36666 - DNA, 20 bp, Artificial Sequence
  Description of Artificial Sequence: Synthetic oligonucleotide
  Target: SCNA; (+) strand; PAM type: NRG; PAM sequence: TGG
cagctgaggcactgtgaccc

SEQ ID NO: 36667 - DNA, 20 bp, Artificial Sequence
  Description of Artificial Sequence: Synthetic oligonucleotide
  Target: SCNA; (+) strand; PAM type: NRG; PAM sequence: GGG
agctgaggcactgtgaccct

SEQ ID NO: 36668 - DNA, 20 bp, Artificial Sequence
  Description of Artificial Sequence: Synthetic oligonucleotide
  Target: SCNA; (+) strand; PAM type: NRG; PAM sequence: TGG
ggcactgtgaccctgggaac

SEQ ID NO: 36669 - DNA, 20 bp, Artificial Sequence
  Description of Artificial Sequence: Synthetic oligonucleotide
  Target: SCNA; (+) strand; PAM type: NRG; PAM sequence: TGG
ctgtgaccctgggaactggc

SEQ ID NO: 36670 - DNA, 20 bp, Artificial Sequence
  Description of Artificial Sequence: Synthetic oligonucleotide
  Target: SCNA; (+) strand; PAM type: NRG; PAM sequence: TAG
ggaactggctggtcccttcc

SEQ ID NO: 36671 - DNA, 20 bp, Artificial Sequence
  Description of Artificial Sequence: Synthetic oligonucleotide
  Target: SCNA; (+) strand; PAM type: NRG; PAM sequence: TAG
tcccttcctagcccacatct

SEQ ID NO: 36672 - DNA, 20 bp, Artificial Sequence
  Description of Artificial Sequence: Synthetic oligonucleotide
  Target: SCNA; (+) strand; PAM type: NRG; PAM sequence: TAG
cttcctagcccacatcttag

SEQ ID NO: 36673 - DNA, 20 bp, Artificial Sequence
  Description of Artificial Sequence: Synthetic oligonucleotide
  Target: SCNA; (+) strand; PAM type: NRG; PAM sequence: AAG
cctagcccacatcttagtag

SEQ ID NO: 36674 - DNA, 20 bp, Artificial Sequence
  Description of Artificial Sequence: Synthetic oligonucleotide
  Target: SCNA; (+) strand; PAM type: NRG; PAM sequence: AAG
cacatcttagtagaagatgc

SEQ ID NO: 36675 - DNA, 20 bp, Artificial Sequence
  Description of Artificial Sequence: Synthetic oligonucleotide
  Target: SCNA; (+) strand; PAM type: NRG; PAM sequence: AGG
acatcttagtagaagatgca

SEQ ID NO: 36676 - DNA, 20 bp, Artificial Sequence
  Description of Artificial Sequence: Synthetic oligonucleotide
  Target: SCNA; (+) strand; PAM type: NRG; PAM sequence: GGG
catcttagtagaagatgcaa

SEQ ID NO: 36677 - DNA, 20 bp, Artificial Sequence
  Description of Artificial Sequence: Synthetic oligonucleotide
  Target: SCNA; (+) strand; PAM type: NRG; PAM sequence: TGG
agaagatgcaagggttattg

SEQ ID NO: 36678 - DNA, 20 bp, Artificial Sequence
  Description of Artificial Sequence: Synthetic oligonucleotide
  Target: SCNA; (+) strand; PAM type: NRG; PAM sequence: CGG
gttattgtggaatacgtccg

SEQ ID NO: 36679 - DNA, 20 bp, Artificial Sequence
  Description of Artificial Sequence: Synthetic oligonucleotide
  Target: SCNA; (+) strand; PAM type: NRG; PAM sequence: GGG
ttattgtggaatacgtccgc

SEQ ID NO: 36680 - DNA, 20 bp, Artificial Sequence
  Description of Artificial Sequence: Synthetic oligonucleotide
  Target: SCNA; (+) strand; PAM type: NRG; PAM sequence: AAG
atgtatcaattctaaattcc

SEQ ID NO: 36681 - DNA, 20 bp, Artificial Sequence
  Description of Artificial Sequence: Synthetic oligonucleotide
  Target: SCNA; (+) strand; PAM type: NRG; PAM sequence: CAG
caattctaaattccaagtgc

SEQ ID NO: 36682 - DNA, 20 bp, Artificial Sequence
  Description of Artificial Sequence: Synthetic oligonucleotide
  Target: SCNA; (+) strand; PAM type: NRG; PAM sequence: TAG
accctttcattacctttcat

SEQ ID NO: 36683 - DNA, 20 bp, Artificial Sequence
  Description of Artificial Sequence: Synthetic oligonucleotide
  Target: SCNA; (+) strand; PAM type: NRG; PAM sequence: AAG
ttcattacctttcattagcg

SEQ ID NO: 36684 - DNA, 20 bp, Artificial Sequence
  Description of Artificial Sequence: Synthetic oligonucleotide
  Target: SCNA; (+) strand; PAM type: NRG; PAM sequence: AAG
tttcattagcgaagtataaa

SEQ ID NO: 36685 - DNA, 20 bp, Artificial Sequence
  Description of Artificial Sequence: Synthetic oligonucleotide
  Target: SCNA; (+) strand; PAM type: NRG; PAM sequence: AAG
attagcgaagtataaaaaga

SEQ ID NO: 36686 - DNA, 20 bp, Artificial Sequence
  Description of Artificial Sequence: Synthetic oligonucleotide
  Target: SCNA; (+) strand; PAM type: NRG; PAM sequence: GAG
tagcgaagtataaaaagaaa

SEQ ID NO: 36687 - DNA, 20 bp, Artificial Sequence
  Description of Artificial Sequence: Synthetic oligonucleotide
  Target: SCNA; (+) strand; PAM type: NRG; PAM sequence: AGG
agcgaagtataaaaagaaag

SEQ ID NO: 36688 - DNA, 20 bp, Artificial Sequence
  Description of Artificial Sequence: Synthetic oligonucleotide
  Target: SCNA; (+) strand; PAM type: NRG; PAM sequence: GGG
gcgaagtataaaaagaaaga

SEQ ID NO: 36689 - DNA, 20 bp, Artificial Sequence
  Description of Artificial Sequence: Synthetic oligonucleotide
  Target: SCNA; (+) strand; PAM type: NRG; PAM sequence: GAG
gaagtataaaaagaaagagg

SEQ ID NO: 36690 - DNA, 20 bp, Artificial Sequence
  Description of Artificial Sequence: Synthetic oligonucleotide
  Target: SCNA; (+) strand; PAM type: NRG; PAM sequence: AAG
gtataaaaagaaagagggag

SEQ ID NO: 36691 - DNA, 20 bp, Artificial Sequence
  Description of Artificial Sequence: Synthetic oligonucleotide
  Target: SCNA; (+) strand; PAM type: NRG; PAM sequence: AGG
tataaaaagaaagagggaga

SEQ ID NO: 36692 - DNA, 20 bp, Artificial Sequence
  Description of Artificial Sequence: Synthetic oligonucleotide
  Target: SCNA; (+) strand; PAM type: NRG; PAM sequence: GGG
ataaaaagaaagagggagaa

SEQ ID NO: 36693 - DNA, 20 bp, Artificial Sequence
  Description of Artificial Sequence: Synthetic oligonucleotide
  Target: SCNA; (+) strand; PAM type: NRG; PAM sequence: AAG
aagagggagaagggattttc

SEQ ID NO: 36694 - DNA, 20 bp, Artificial Sequence
  Description of Artificial Sequence: Synthetic oligonucleotide
  Target: SCNA; (+) strand; PAM type: NRG; PAM sequence: AGG
agagggagaagggattttca

SEQ ID NO: 36695 - DNA, 20 bp, Artificial Sequence
  Description of Artificial Sequence: Synthetic oligonucleotide
  Target: SCNA; (+) strand; PAM type: NRG; PAM sequence: AAG
ggagaagggattttcaagga

SEQ ID NO: 36696 - DNA, 20 bp, Artificial Sequence
  Description of Artificial Sequence: Synthetic oligonucleotide
  Target: SCNA; (+) strand; PAM type: NRG; PAM sequence: AAG
ggattttcaaggaaagtaat

SEQ ID NO: 36697 - DNA, 20 bp, Artificial Sequence
  Description of Artificial Sequence: Synthetic oligonucleotide
  Target: SCNA; (+) strand; PAM type: NRG; PAM sequence: AAG
ttttcaaggaaagtaataag

SEQ ID NO: 36698 - DNA, 20 bp, Artificial Sequence
  Description of Artificial Sequence: Synthetic oligonucleotide
  Target: SCNA; (+) strand; PAM type: NRG; PAM sequence: AGG
tttcaaggaaagtaataaga

SEQ ID NO: 36699 - DNA, 20 bp, Artificial Sequence
  Description of Artificial Sequence: Synthetic oligonucleotide
  Target: SCNA; (+) strand; PAM type: NRG; PAM sequence: GGG
ttcaaggaaagtaataagaa

SEQ ID NO: 36700 - DNA, 20 bp, Artificial Sequence
  Description of Artificial Sequence: Synthetic oligonucleotide
  Target: SCNA; (+) strand; PAM type: NRG; PAM sequence: AAG
aaggaaagtaataagaaggg

SEQ ID NO: 36701 - DNA, 20 bp, Artificial Sequence
  Description of Artificial Sequence: Synthetic oligonucleotide
  Target: SCNA; (+) strand; PAM type: NRG; PAM sequence: TAG
agtaataagaagggaagtat

SEQ ID NO: 36702 - DNA, 20 bp, Artificial Sequence
  Description of Artificial Sequence: Synthetic oligonucleotide
  Target: SCNA; (+) strand; PAM type: NRG; PAM sequence: TGG
aataagaagggaagtattag

SEQ ID NO: 36703 - DNA, 20 bp, Artificial Sequence
  Description of Artificial Sequence: Synthetic oligonucleotide
  Target: SCNA; (+) strand; PAM type: NRG; PAM sequence: TAG
gggaagtattagtggaacat

SEQ ID NO: 36704 - DNA, 20 bp, Artificial Sequence
  Description of Artificial Sequence: Synthetic oligonucleotide
  Target: SCNA; (+) strand; PAM type: NRG; PAM sequence: GAG
gaagtattagtggaacatta

SEQ ID NO: 36705 - DNA, 20 bp, Artificial Sequence
  Description of Artificial Sequence: Synthetic oligonucleotide
  Target: SCNA; (+) strand; PAM type: NRG; PAM sequence: TGG
ggaacattagagtttgtctc

SEQ ID NO: 36706 - DNA, 20 bp, Artificial Sequence
  Description of Artificial Sequence: Synthetic oligonucleotide
  Target: SCNA; (+) strand; PAM type: NRG; PAM sequence: GAG
ttgtctctggtccttcctct

SEQ ID NO: 36707 - DNA, 20 bp, Artificial Sequence
  Description of Artificial Sequence: Synthetic oligonucleotide
  Target: SCNA; (+) strand; PAM type: NRG; PAM sequence: TGG
tctctggtccttcctctgag

SEQ ID NO: 36708 - DNA, 20 bp, Artificial Sequence
  Description of Artificial Sequence: Synthetic oligonucleotide
  Target: SCNA; (+) strand; PAM type: NRG; PAM sequence: GGG
ctctggtccttcctctgagt

SEQ ID NO: 36709 - DNA, 20 bp, Artificial Sequence
  Description of Artificial Sequence: Synthetic oligonucleotide
  Target: SCNA; (+) strand; PAM type: NRG; PAM sequence: GGG
tctggtccttcctctgagtg

SEQ ID NO: 36710 - DNA, 20 bp, Artificial Sequence
  Description of Artificial Sequence: Synthetic oligonucleotide
  Target: SCNA; (+) strand; PAM type: NRG; PAM sequence: GAG
tcctctgagtggggactcat

SEQ ID NO: 36711 - DNA, 20 bp, Artificial Sequence
  Description of Artificial Sequence: Synthetic oligonucleotide
  Target: SCNA; (+) strand; PAM type: NRG; PAM sequence: AGG
cctctgagtggggactcatg

SEQ ID NO: 36712 - DNA, 20 bp, Artificial Sequence
  Description of Artificial Sequence: Synthetic oligonucleotide
  Target: SCNA; (+) strand; PAM type: NRG; PAM sequence: TGG
gagtggggactcatgaggct

SEQ ID NO: 36713 - DNA, 20 bp, Artificial Sequence
  Description of Artificial Sequence: Synthetic oligonucleotide
  Target: SCNA; (+) strand; PAM type: NRG; PAM sequence: AAG
tgaggcttggtgttgtctga

SEQ ID NO: 36714 - DNA, 20 bp, Artificial Sequence
  Description of Artificial Sequence: Synthetic oligonucleotide
  Target: SCNA; (+) strand; PAM type: NRG; PAM sequence: CAG
ggcttggtgttgtctgaaag

SEQ ID NO: 36715 - DNA, 20 bp, Artificial Sequence
  Description of Artificial Sequence: Synthetic oligonucleotide
  Target: SCNA; (+) strand; PAM type: NRG; PAM sequence: AGG
gcttggtgttgtctgaaagc

SEQ ID NO: 36716 - DNA, 20 bp, Artificial Sequence
  Description of Artificial Sequence: Synthetic oligonucleotide
  Target: SCNA; (+) strand; PAM type: NRG; PAM sequence: AAG
tggtgttgtctgaaagcagg

SEQ ID NO: 36717 - DNA, 20 bp, Artificial Sequence
  Description of Artificial Sequence: Synthetic oligonucleotide
  Target: SCNA; (+) strand; PAM type: NRG; PAM sequence: AGG
ggtgttgtctgaaagcagga

SEQ ID NO: 36718 - DNA, 20 bp, Artificial Sequence
  Description of Artificial Sequence: Synthetic oligonucleotide
  Target: SCNA; (+) strand; PAM type: NRG; PAM sequence: TGG
gtctgaaagcaggaaggact

SEQ ID NO: 36719 - DNA, 20 bp, Artificial Sequence
  Description of Artificial Sequence: Synthetic oligonucleotide
  Target: SCNA; (+) strand; PAM type: NRG; PAM sequence: GGG
tctgaaagcaggaaggactt

SEQ ID NO: 36720 - DNA, 20 bp, Artificial Sequence
  Description of Artificial Sequence: Synthetic oligonucleotide
  Target: SCNA; (+) strand; PAM type: NRG; PAM sequence: TGG
aggacttgggtcttactccc

SEQ ID NO: 36721 - DNA, 20 bp, Artificial Sequence
  Description of Artificial Sequence: Synthetic oligonucleotide
  Target: SCNA; (+) strand; PAM type: NRG; PAM sequence: TAG
acttgggtcttactccctgg

SEQ ID NO: 36722 - DNA, 20 bp, Artificial Sequence
  Description of Artificial Sequence: Synthetic oligonucleotide
  Target: SCNA; (+) strand; PAM type: NRG; PAM sequence: AGG
cttgggtcttactccctggt

SEQ ID NO: 36723 - DNA, 20 bp, Artificial Sequence
  Description of Artificial Sequence: Synthetic oligonucleotide
  Target: SCNA; (+) strand; PAM type: NRG; PAM sequence: CAG
tcttactccctggtaggatg

SEQ ID NO: 36724 - DNA, 20 bp, Artificial Sequence
  Description of Artificial Sequence: Synthetic oligonucleotide
  Target: SCNA; (+) strand; PAM type: NRG; PAM sequence: GAG
tccctggtaggatgcagcct

SEQ ID NO: 36725 - DNA, 20 bp, Artificial Sequence
  Description of Artificial Sequence: Synthetic oligonucleotide
  Target: SCNA; (+) strand; PAM type: NRG; PAM sequence: AGG
ccctggtaggatgcagcctg

SEQ ID NO: 36726 - DNA, 20 bp, Artificial Sequence
  Description of Artificial Sequence: Synthetic oligonucleotide
  Target: SCNA; (+) strand; PAM type: NRG; PAM sequence: GAG
ctggtaggatgcagcctgag

SEQ ID NO: 36727 - DNA, 20 bp, Artificial Sequence
  Description of Artificial Sequence: Synthetic oligonucleotide
  Target: SCNA; (+) strand; PAM type: NRG; PAM sequence: AAG
taggatgcagcctgaggagc

SEQ ID NO: 36728 - DNA, 20 bp, Artificial Sequence
  Description of Artificial Sequence: Synthetic oligonucleotide
  Target: SCNA; (+) strand; PAM type: NRG; PAM sequence: AGG
aggatgcagcctgaggagca

SEQ ID NO: 36729 - DNA, 20 bp, Artificial Sequence
  Description of Artificial Sequence: Synthetic oligonucleotide
  Target: SCNA; (+) strand; PAM type: NRG; PAM sequence: CGG
tgcagcctgaggagcaaggc

SEQ ID NO: 36730 - DNA, 20 bp, Artificial Sequence
  Description of Artificial Sequence: Synthetic oligonucleotide
  Target: SCNA; (+) strand; PAM type: NRG; PAM sequence: CAG
agcctgaggagcaaggccgg

SEQ ID NO: 36731 - DNA, 20 bp, Artificial Sequence
  Description of Artificial Sequence: Synthetic oligonucleotide
  Target: SCNA; (+) strand; PAM type: NRG; PAM sequence: CAG
aggagcaaggccggcagtca

SEQ ID NO: 36732 - DNA, 20 bp, Artificial Sequence
  Description of Artificial Sequence: Synthetic oligonucleotide
  Target: SCNA; (+) strand; PAM type: NRG; PAM sequence: GAG
aaggccggcagtcacagtgt

SEQ ID NO: 36733 - DNA, 20 bp, Artificial Sequence
  Description of Artificial Sequence: Synthetic oligonucleotide
  Target: SCNA; (+) strand; PAM type: NRG; PAM sequence: CAG
agtgtgagcaaacattcata

SEQ ID NO: 36734 - DNA, 20 bp, Artificial Sequence
  Description of Artificial Sequence: Synthetic oligonucleotide
  Target: SCNA; (+) strand; PAM type: NRG; PAM sequence: TGG
agcaaacattcatacagacg

SEQ ID NO: 36735 - DNA, 20 bp, Artificial Sequence
  Description of Artificial Sequence: Synthetic oligonucleotide
  Target: SCNA; (+) strand; PAM type: NRG; PAM sequence: GGG
gcaaacattcatacagacgt

SEQ ID NO: 36736 - DNA, 20 bp, Artificial Sequence
  Description of Artificial Sequence: Synthetic oligonucleotide
  Target: SCNA; (+) strand; PAM type: NRG; PAM sequence: GGG
caaacattcatacagacgtg

SEQ ID NO: 36737 - DNA, 20 bp, Artificial Sequence
  Description of Artificial Sequence: Synthetic oligonucleotide
  Target: SCNA; (+) strand; PAM type: NRG; PAM sequence: GGG
aaacattcatacagacgtgg

SEQ ID NO: 36738 - DNA, 20 bp, Artificial Sequence
  Description of Artificial Sequence: Synthetic oligonucleotide
  Target: SCNA; (+) strand; PAM type: NRG; PAM sequence: AAG
gacgtgggggctgacatatc

SEQ ID NO: 36739 - DNA, 20 bp, Artificial Sequence
  Description of Artificial Sequence: Synthetic oligonucleotide
  Target: SCNA; (+) strand; PAM type: NRG; PAM sequence: TGG
tgggggctgacatatcaagt

SEQ ID NO: 36740 - DNA, 20 bp, Artificial Sequence
  Description of Artificial Sequence: Synthetic oligonucleotide
  Target: SCNA; (+) strand; PAM type: NRG; PAM sequence: GAG
ggggctgacatatcaagttg

SEQ ID NO: 36741 - DNA, 20 bp, Artificial Sequence
  Description of Artificial Sequence: Synthetic oligonucleotide
  Target: SCNA; (+) strand; PAM type: NRG; PAM sequence: AAG
ccccatacaccctgattccc

SEQ ID NO: 36742 - DNA, 20 bp, Artificial Sequence
  Description of Artificial Sequence: Synthetic oligonucleotide
  Target: SCNA; (+) strand; PAM type: NRG; PAM sequence: GAG
ccatacaccctgattcccaa

SEQ ID NO: 36743 - DNA, 20 bp, Artificial Sequence
  Description of Artificial Sequence: Synthetic oligonucleotide
  Target: SCNA; (+) strand; PAM type: NRG; PAM sequence: GAG
caccctgattcccaagagtt

SEQ ID NO: 36744 - DNA, 20 bp, Artificial Sequence
  Description of Artificial Sequence: Synthetic oligonucleotide
  Target: SCNA; (+) strand; PAM type: NRG; PAM sequence: AGG
accctgattcccaagagttg

SEQ ID NO: 36745 - DNA, 20 bp, Artificial Sequence
  Description of Artificial Sequence: Synthetic oligonucleotide
  Target: SCNA; (+) strand; PAM type: NRG; PAM sequence: CAG
ctgattcccaagagttgagg

SEQ ID NO: 36746 - DNA, 20 bp, Artificial Sequence
  Description of Artificial Sequence: Synthetic oligonucleotide
  Target: SCNA; (+) strand; PAM type: NRG; PAM sequence: TGG
cccaagagttgaggcagttg

SEQ ID NO: 36747 - DNA, 20 bp, Artificial Sequence
  Description of Artificial Sequence: Synthetic oligonucleotide
  Target: SCNA; (+) strand; PAM type: NRG; PAM sequence: TAG
aagagttgaggcagttgtgg

SEQ ID NO: 36748 - DNA, 20 bp, Artificial Sequence
  Description of Artificial Sequence: Synthetic oligonucleotide
  Target: SCNA; (+) strand; PAM type: NRG; PAM sequence: AGG
agagttgaggcagttgtggt

SEQ ID NO: 36749 - DNA, 20 bp, Artificial Sequence
  Description of Artificial Sequence: Synthetic oligonucleotide
  Target: SCNA; (+) strand; PAM type: NRG; PAM sequence: GGG
gagttgaggcagttgtggta

SEQ ID NO: 36750 - DNA, 20 bp, Artificial Sequence
  Description of Artificial Sequence: Synthetic oligonucleotide
  Target: SCNA; (+) strand; PAM type: NRG; PAM sequence: GGG
agttgaggcagttgtggtag

SEQ ID NO: 36751 - DNA, 20 bp, Artificial Sequence
  Description of Artificial Sequence: Synthetic oligonucleotide
  Target: SCNA; (+) strand; PAM type: NRG; PAM sequence: TAG
gcagttgtggtaggggttct

SEQ ID NO: 36752 - DNA, 20 bp, Artificial Sequence
  Description of Artificial Sequence: Synthetic oligonucleotide
  Target: SCNA; (+) strand; PAM type: NRG; PAM sequence: AGG
cagttgtggtaggggttctt

SEQ ID NO: 36753 - DNA, 20 bp, Artificial Sequence
  Description of Artificial Sequence: Synthetic oligonucleotide
  Target: SCNA; (+) strand; PAM type: NRG; PAM sequence: TGG
aggggttcttaggtttccca

SEQ ID NO: 36754 - DNA, 20 bp, Artificial Sequence
  Description of Artificial Sequence: Synthetic oligonucleotide
  Target: SCNA; (+) strand; PAM type: NRG; PAM sequence: GGG
ggggttcttaggtttcccat

SEQ ID NO: 36755 - DNA, 20 bp, Artificial Sequence
  Description of Artificial Sequence: Synthetic oligonucleotide
  Target: SCNA; (+) strand; PAM type: NRG; PAM sequence: CAG
tcttaggtttcccatgggct

SEQ ID NO: 36756 - DNA, 20 bp, Artificial Sequence
  Description of Artificial Sequence: Synthetic oligonucleotide
  Target: SCNA; (+) strand; PAM type: NRG; PAM sequence: TAG
ggtttcccatgggctcagat

SEQ ID NO: 36757 - DNA, 20 bp, Artificial Sequence
  Description of Artificial Sequence: Synthetic oligonucleotide
  Target: SCNA; (+) strand; PAM type: NRG; PAM sequence: AGG
gtttcccatgggctcagatt

SEQ ID NO: 36758 - DNA, 20 bp, Artificial Sequence
  Description of Artificial Sequence: Synthetic oligonucleotide
  Target: SCNA; (+) strand; PAM type: NRG; PAM sequence: CGG
catgggctcagattaggcct

SEQ ID NO: 36759 - DNA, 20 bp, Artificial Sequence
  Description of Artificial Sequence: Synthetic oligonucleotide
  Target: SCNA; (+) strand; PAM type: NRG; PAM sequence: CGG
ggctcagattaggcctcgga

SEQ ID NO: 36760 - DNA, 20 bp, Artificial Sequence
  Description of Artificial Sequence: Synthetic oligonucleotide
  Target: SCNA; (+) strand; PAM type: NRG; PAM sequence: AAG
tcagattaggcctcggacgg

SEQ ID NO: 36761 - DNA, 20 bp, Artificial Sequence
  Description of Artificial Sequence: Synthetic oligonucleotide
  Target: SCNA; (+) strand; PAM type: NRG; PAM sequence: AAG
ttaggcctcggacggaagtg

SEQ ID NO: 36762 - DNA, 20 bp, Artificial Sequence
  Description of Artificial Sequence: Synthetic oligonucleotide
  Target: SCNA; (+) strand; PAM type: NRG; PAM sequence: AGG
taggcctcggacggaagtga

SEQ ID NO: 36763 - DNA, 20 bp, Artificial Sequence
  Description of Artificial Sequence: Synthetic oligonucleotide
  Target: SCNA; (+) strand; PAM type: NRG; PAM sequence: CAG
gcctcggacggaagtgaagg

SEQ ID NO: 36764 - DNA, 20 bp, Artificial Sequence
  Description of Artificial Sequence: Synthetic oligonucleotide
  Target: SCNA; (+) strand; PAM type: NRG; PAM sequence: TGG
tcggacggaagtgaaggcag

SEQ ID NO: 36765 - DNA, 20 bp, Artificial Sequence
  Description of Artificial Sequence: Synthetic oligonucleotide
  Target: SCNA; (+) strand; PAM type: NRG; PAM sequence: TGG
acggaagtgaaggcagtggc

SEQ ID NO: 36766 - DNA, 20 bp, Artificial Sequence
  Description of Artificial Sequence: Synthetic oligonucleotide
  Target: SCNA; (+) strand; PAM type: NRG; PAM sequence: TGG
aagtgaaggcagtggctggc

SEQ ID NO: 36767 - DNA, 20 bp, Artificial Sequence
  Description of Artificial Sequence: Synthetic oligonucleotide
  Target: SCNA; (+) strand; PAM type: NRG; PAM sequence: GGG
agtgaaggcagtggctggct

SEQ ID NO: 36768 - DNA, 20 bp, Artificial Sequence
  Description of Artificial Sequence: Synthetic oligonucleotide
  Target: SCNA; (+) strand; PAM type: NRG; PAM sequence: TGG
gtggctggctgggtgaaata

SEQ ID NO: 36769 - DNA, 20 bp, Artificial Sequence
  Description of Artificial Sequence: Synthetic oligonucleotide
  Target: SCNA; (+) strand; PAM type: NRG; PAM sequence: CGG
gctggctgggtgaaatatgg

SEQ ID NO: 36770 - DNA, 20 bp, Artificial Sequence
  Description of Artificial Sequence: Synthetic oligonucleotide
  Target: SCNA; (+) strand; PAM type: NRG; PAM sequence: CAG
gctgggtgaaatatggcgga

SEQ ID NO: 36771 - DNA, 20 bp, Artificial Sequence
  Description of Artificial Sequence: Synthetic oligonucleotide
  Target: SCNA; (+) strand; PAM type: NRG; PAM sequence: GAG
tgggtgaaatatggcggaca

SEQ ID NO: 36772 - DNA, 20 bp, Artificial Sequence
  Description of Artificial Sequence: Synthetic oligonucleotide
  Target: SCNA; (+) strand; PAM type: NRG; PAM sequence: CGG
tgaaatatggcggacagagt

SEQ ID NO: 36773 - DNA, 20 bp, Artificial Sequence
  Description of Artificial Sequence: Synthetic oligonucleotide
  Target: SCNA; (+) strand; PAM type: NRG; PAM sequence: GAG
atatggcggacagagtcggt

SEQ ID NO: 36774 - DNA, 20 bp, Artificial Sequence
  Description of Artificial Sequence: Synthetic oligonucleotide
  Target: SCNA; (+) strand; PAM type: NRG; PAM sequence: CAG
cggacagagtcggtgagtaa

SEQ ID NO: 36775 - DNA, 20 bp, Artificial Sequence
  Description of Artificial Sequence: Synthetic oligonucleotide
  Target: SCNA; (+) strand; PAM type: NRG; PAM sequence: AGG
ggacagagtcggtgagtaac

SEQ ID NO: 36776 - DNA, 20 bp, Artificial Sequence
  Description of Artificial Sequence: Synthetic oligonucleotide
  Target: SCNA; (+) strand; PAM type: NRG; PAM sequence: GAG
acagagtcggtgagtaacag

SEQ ID NO: 36777 - DNA, 20 bp, Artificial Sequence
  Description of Artificial Sequence: Synthetic oligonucleotide
  Target: SCNA; (+) strand; PAM type: NRG; PAM sequence: GAG
agagtcggtgagtaacagga

SEQ ID NO: 36778 - DNA, 20 bp, Artificial Sequence
  Description of Artificial Sequence: Synthetic oligonucleotide
  Target: SCNA; (+) strand; PAM type: NRG; PAM sequence: TAG
ggagagcatgttatcccttt

SEQ ID NO: 36779 - DNA, 20 bp, Artificial Sequence
  Description of Artificial Sequence: Synthetic oligonucleotide
  Target: SCNA; (+) strand; PAM type: NRG; PAM sequence: AAG
ttatcccttttagacccctg

SEQ ID NO: 36780 - DNA, 20 bp, Artificial Sequence
  Description of Artificial Sequence: Synthetic oligonucleotide
  Target: SCNA; (+) strand; PAM type: NRG; PAM sequence: TAG
cttttagacccctgaagtat

SEQ ID NO: 36781 - DNA, 20 bp, Artificial Sequence
  Description of Artificial Sequence: Synthetic oligonucleotide
  Target: SCNA; (+) strand; PAM type: NRG; PAM sequence: GAG
tttagacccctgaagtatta

SEQ ID NO: 36782 - DNA, 20 bp, Artificial Sequence
  Description of Artificial Sequence: Synthetic oligonucleotide
  Target: SCNA; (+) strand; PAM type: NRG; PAM sequence: GAG
tagacccctgaagtattaga

SEQ ID NO: 36783 - DNA, 20 bp, Artificial Sequence
  Description of Artificial Sequence: Synthetic oligonucleotide
  Target: SCNA; (+) strand; PAM type: NRG; PAM sequence: AGG
agacccctgaagtattagag

SEQ ID NO: 36784 - DNA, 20 bp, Artificial Sequence
  Description of Artificial Sequence: Synthetic oligonucleotide
  Target: SCNA; (+) strand; PAM type: NRG; PAM sequence: CAG
cctgaagtattagagaggat

SEQ ID NO: 36785 - DNA, 20 bp, Artificial Sequence
  Description of Artificial Sequence: Synthetic oligonucleotide
  Target: SCNA; (+) strand; PAM type: NRG; PAM sequence: CAG
aagtattagagaggatcagc

SEQ ID NO: 36786 - DNA, 20 bp, Artificial Sequence
  Description of Artificial Sequence: Synthetic oligonucleotide
  Target: SCNA; (+) strand; PAM type: NRG; PAM sequence: AGG
agtattagagaggatcagcc

SEQ ID NO: 36787 - DNA, 20 bp, Artificial Sequence
  Description of Artificial Sequence: Synthetic oligonucleotide
  Target: SCNA; (+) strand; PAM type: NRG; PAM sequence: TAG
gaggatcagccaggcacgtt

SEQ ID NO: 36788 - DNA, 20 bp, Artificial Sequence
  Description of Artificial Sequence: Synthetic oligonucleotide
  Target: SCNA; (+) strand; PAM type: NRG; PAM sequence: TAG
ccatatgatgtatcatattg

SEQ ID NO: 36789 - DNA, 20 bp, Artificial Sequence
  Description of Artificial Sequence: Synthetic oligonucleotide
  Target: SCNA; (+) strand; PAM type: NRG; PAM sequence: AAG
tcatattgtagattcacccc

SEQ ID NO: 36790 - DNA, 20 bp, Artificial Sequence
  Description of Artificial Sequence: Synthetic oligonucleotide
  Target: SCNA; (+) strand; PAM type: NRG; PAM sequence: AGG
catattgtagattcacccca

SEQ ID NO: 36791 - DNA, 20 bp, Artificial Sequence
  Description of Artificial Sequence: Synthetic oligonucleotide
  Target: SCNA; (+) strand; PAM type: NRG; PAM sequence: TGG
gattcaccccaaggcatttg

SEQ ID NO: 36792 - DNA, 20 bp, Artificial Sequence
  Description of Artificial Sequence: Synthetic oligonucleotide
  Target: SCNA; (+) strand; PAM type: NRG; PAM sequence: CAG
ccaaggcatttgtggctgtg

SEQ ID NO: 36793 - DNA, 20 bp, Artificial Sequence
  Description of Artificial Sequence: Synthetic oligonucleotide
  Target: SCNA; (+) strand; PAM type: NRG; PAM sequence: AAG
catttgtggctgtgcagtaa

SEQ ID NO: 36794 - DNA, 20 bp, Artificial Sequence
  Description of Artificial Sequence: Synthetic oligonucleotide
  Target: SCNA; (+) strand; PAM type: NRG; PAM sequence: CAG
gtggctgtgcagtaaaagtg

SEQ ID NO: 36795 - DNA, 20 bp, Artificial Sequence
  Description of Artificial Sequence: Synthetic oligonucleotide
  Target: SCNA; (+) strand; PAM type: NRG; PAM sequence: AGG
tggctgtgcagtaaaagtgc

SEQ ID NO: 36796 - DNA, 20 bp, Artificial Sequence
  Description of Artificial Sequence: Synthetic oligonucleotide
  Target: SCNA; (+) strand; PAM type: NRG; PAM sequence: CAG
gtaaaagtgcaggatgaaac

SEQ ID NO: 36797 - DNA, 20 bp, Artificial Sequence
  Description of Artificial Sequence: Synthetic oligonucleotide
  Target: SCNA; (+) strand; PAM type: NRG; PAM sequence: AAG
ggatgaaaccagactctctg

SEQ ID NO: 36798 - DNA, 20 bp, Artificial Sequence
  Description of Artificial Sequence: Synthetic oligonucleotide
  Target: SCNA; (+) strand; PAM type: NRG; PAM sequence: AGG
gatgaaaccagactctctga

SEQ ID NO: 36799 - DNA, 20 bp, Artificial Sequence
  Description of Artificial Sequence: Synthetic oligonucleotide
  Target: SCNA; (+) strand; PAM type: NRG; PAM sequence: GGG
atgaaaccagactctctgaa

SEQ ID NO: 36800 - DNA, 20 bp, Artificial Sequence
  Description of Artificial Sequence: Synthetic oligonucleotide
  Target: SCNA; (+) strand; PAM type: NRG; PAM sequence: TAG
aaaccagactctctgaaggg

SEQ ID NO: 36801 - DNA, 20 bp, Artificial Sequence
  Description of Artificial Sequence: Synthetic oligonucleotide
  Target: SCNA; (+) strand; PAM type: NRG; PAM sequence: AGG
aaccagactctctgaagggt

SEQ ID NO: 36802 - DNA, 20 bp, Artificial Sequence
  Description of Artificial Sequence: Synthetic oligonucleotide
  Target: SCNA; (+) strand; PAM type: NRG; PAM sequence: GGG
accagactctctgaagggta

SEQ ID NO: 36803 - DNA, 20 bp, Artificial Sequence
  Description of Artificial Sequence: Synthetic oligonucleotide
  Target: SCNA; (+) strand; PAM type: NRG; PAM sequence: CAG
cctcatcttttccccctttg

SEQ ID NO: 36804 - DNA, 20 bp, Artificial Sequence
  Description of Artificial Sequence: Synthetic oligonucleotide
  Target: SCNA; (+) strand; PAM type: NRG; PAM sequence: TGG
atcccactttcaaatgaact

SEQ ID NO: 36805 - DNA, 20 bp, Artificial Sequence
  Description of Artificial Sequence: Synthetic oligonucleotide
  Target: SCNA; (+) strand; PAM type: NRG; PAM sequence: GGG
tcccactttcaaatgaactt

SEQ ID NO: 36806 - DNA, 20 bp, Artificial Sequence
  Description of Artificial Sequence: Synthetic oligonucleotide
  Target: SCNA; (+) strand; PAM type: NRG; PAM sequence: GAG
ccactttcaaatgaacttgg

SEQ ID NO: 36807 - DNA, 20 bp, Artificial Sequence
  Description of Artificial Sequence: Synthetic oligonucleotide
  Target: SCNA; (+) strand; PAM type: NRG; PAM sequence: AGG
cactttcaaatgaacttggg

SEQ ID NO: 36808 - DNA, 20 bp, Artificial Sequence
  Description of Artificial Sequence: Synthetic oligonucleotide
  Target: SCNA; (+) strand; PAM type: NRG; PAM sequence: GAG
ctttcaaatgaacttgggag

SEQ ID NO: 36809 - DNA, 20 bp, Artificial Sequence
  Description of Artificial Sequence: Synthetic oligonucleotide
  Target: SCNA; (+) strand; PAM type: NRG; PAM sequence: AGG
tttcaaatgaacttgggagg

SEQ ID NO: 36810 - DNA, 20 bp, Artificial Sequence
  Description of Artificial Sequence: Synthetic oligonucleotide
  Target: SCNA; (+) strand; PAM type: NRG; PAM sequence: GGG
ttcaaatgaacttgggagga

SEQ ID NO: 36811 - DNA, 20 bp, Artificial Sequence
  Description of Artificial Sequence: Synthetic oligonucleotide
  Target: SCNA; (+) strand; PAM type: NRG; PAM sequence: GGG
tcaaatgaacttgggaggag

SEQ ID NO: 36812 - DNA, 20 bp, Artificial Sequence
  Description of Artificial Sequence: Synthetic oligonucleotide
  Target: SCNA; (+) strand; PAM type: NRG; PAM sequence: GGG
caaatgaacttgggaggagg

SEQ ID NO: 36813 - DNA, 20 bp, Artificial Sequence
  Description of Artificial Sequence: Synthetic oligonucleotide
  Target: SCNA; (+) strand; PAM type: NRG; PAM sequence: TGG
agggggctttgaactgtgct

SEQ ID NO: 36814 - DNA, 20 bp, Artificial Sequence
  Description of Artificial Sequence: Synthetic oligonucleotide
  Target: SCNA; (+) strand; PAM type: NRG; PAM sequence: GGG
gggggctttgaactgtgctt

SEQ ID NO: 36815 - DNA, 20 bp, Artificial Sequence
  Description of Artificial Sequence: Synthetic oligonucleotide
  Target: SCNA; (+) strand; PAM type: NRG; PAM sequence: GGG
ggggctttgaactgtgcttg

SEQ ID NO: 36816 - DNA, 20 bp, Artificial Sequence
  Description of Artificial Sequence: Synthetic oligonucleotide
  Target: SCNA; (+) strand; PAM type: NRG; PAM sequence: TGG
gcttggggttgtttctcctc

SEQ ID NO: 36817 - DNA, 20 bp, Artificial Sequence
  Description of Artificial Sequence: Synthetic oligonucleotide
  Target: SCNA; (+) strand; PAM type: NRG; PAM sequence: AAG
ggaaatgcttccattctaaa

SEQ ID NO: 36818 - DNA, 20 bp, Artificial Sequence
  Description of Artificial Sequence: Synthetic oligonucleotide
  Target: SCNA; (+) strand; PAM type: NRG; PAM sequence: TGG
gcttccattctaaaaagttc

SEQ ID NO: 36819 - DNA, 20 bp, Artificial Sequence
  Description of Artificial Sequence: Synthetic oligonucleotide
  Target: SCNA; (+) strand; PAM type: NRG; PAM sequence: TAG
cattctaaaaagttctggca

SEQ ID NO: 36820 - DNA, 20 bp, Artificial Sequence
  Description of Artificial Sequence: Synthetic oligonucleotide
  Target: SCNA; (+) strand; PAM type: NRG; PAM sequence: AGG
attctaaaaagttctggcat

SEQ ID NO: 36821 - DNA, 20 bp, Artificial Sequence
  Description of Artificial Sequence: Synthetic oligonucleotide
  Target: SCNA; (+) strand; PAM type: NRG; PAM sequence: GGG
ttctaaaaagttctggcata

SEQ ID NO: 36822 - DNA, 20 bp, Artificial Sequence
  Description of Artificial Sequence: Synthetic oligonucleotide
  Target: SCNA; (+) strand; PAM type: NRG; PAM sequence: TGG
aaagttctggcatagggaat

SEQ ID NO: 36823 - DNA, 20 bp, Artificial Sequence
  Description of Artificial Sequence: Synthetic oligonucleotide
  Target: SCNA; (+) strand; PAM type: NRG; PAM sequence: AAG
ctggcatagggaattggcct

SEQ ID NO: 36824 - DNA, 20 bp, Artificial Sequence
  Description of Artificial Sequence: Synthetic oligonucleotide
  Target: SCNA; (+) strand; PAM type: NRG; PAM sequence: AGG
tggcatagggaattggccta

SEQ ID NO: 36825 - DNA, 20 bp, Artificial Sequence
  Description of Artificial Sequence: Synthetic oligonucleotide
  Target: SCNA; (+) strand; PAM type: NRG; PAM sequence: TGG
tctgccctccttccccttaa

SEQ ID NO: 36826 - DNA, 20 bp, Artificial Sequence
  Description of Artificial Sequence: Synthetic oligonucleotide
  Target: SCNA; (+) strand; PAM type: NRG; PAM sequence: GAG
taatggactgtcctgccttt

SEQ ID NO: 36827 - DNA, 20 bp, Artificial Sequence
  Description of Artificial Sequence: Synthetic oligonucleotide
  Target: SCNA; (+) strand; PAM type: NRG; PAM sequence: GAG
actgtcctgcctttgagtgt

SEQ ID NO: 36828 - DNA, 20 bp, Artificial Sequence
  Description of Artificial Sequence: Synthetic oligonucleotide
  Target: SCNA; (+) strand; PAM type: NRG; PAM sequence: AAG
ctgcctttgagtgtgagtaa

SEQ ID NO: 36829 - DNA, 20 bp, Artificial Sequence
  Description of Artificial Sequence: Synthetic oligonucleotide
  Target: SCNA; (+) strand; PAM type: NRG; PAM sequence: AGG
tgcctttgagtgtgagtaaa

SEQ ID NO: 36830 - DNA, 20 bp, Artificial Sequence
  Description of Artificial Sequence: Synthetic oligonucleotide
  Target: SCNA; (+) strand; PAM type: NRG; PAM sequence: GGG
gcctttgagtgtgagtaaaa

SEQ ID NO: 36831 - DNA, 20 bp, Artificial Sequence
  Description of Artificial Sequence: Synthetic oligonucleotide
  Target: SCNA; (+) strand; PAM type: NRG; PAM sequence: GGG
cctttgagtgtgagtaaaag

SEQ ID NO: 36832 - DNA, 20 bp, Artificial Sequence
  Description of Artificial Sequence: Synthetic oligonucleotide
  Target: SCNA; (+) strand; PAM type: NRG; PAM sequence: GAG
gagtgtgagtaaaaggggct

SEQ ID NO: 36833 - DNA, 20 bp, Artificial Sequence
  Description of Artificial Sequence: Synthetic oligonucleotide
  Target: SCNA; (+) strand; PAM type: NRG; PAM sequence: CAG
aaggggctgagatcattcat

SEQ ID NO: 36834 - DNA, 20 bp, Artificial Sequence
  Description of Artificial Sequence: Synthetic oligonucleotide
  Target: SCNA; (+) strand; PAM type: NRG; PAM sequence: CAG
tcattcatcagccaatttta

SEQ ID NO: 36835 - DNA, 20 bp, Artificial Sequence
  Description of Artificial Sequence: Synthetic oligonucleotide
  Target: SCNA; (+) strand; PAM type: NRG; PAM sequence: TAG
ttttacagctgcaatctact

SEQ ID NO: 36836 - DNA, 20 bp, Artificial Sequence
  Description of Artificial Sequence: Synthetic oligonucleotide
  Target: SCNA; (+) strand; PAM type: NRG; PAM sequence: TAG
tacttagacctgcccccatc

SEQ ID NO: 36837 - DNA, 20 bp, Artificial Sequence
  Description of Artificial Sequence: Synthetic oligonucleotide
  Target: SCNA; (+) strand; PAM type: NRG; PAM sequence: AGG
acttagacctgcccccatct

SEQ ID NO: 36838 - DNA, 20 bp, Artificial Sequence
  Description of Artificial Sequence: Synthetic oligonucleotide
  Target: SCNA; (+) strand; PAM type: NRG; PAM sequence: AAG
ctgcccccatctaggtcacc

SEQ ID NO: 36839 - DNA, 20 bp, Artificial Sequence
  Description of Artificial Sequence: Synthetic oligonucleotide
  Target: SCNA; (+) strand; PAM type: NRG; PAM sequence: AGG
tgcccccatctaggtcacca

SEQ ID NO: 36840 - DNA, 20 bp, Artificial Sequence
  Description of Artificial Sequence: Synthetic oligonucleotide
  Target: SCNA; (+) strand; PAM type: NRG; PAM sequence: CAG
aggtcaccaaggatctttgt

SEQ ID NO: 36841 - DNA, 20 bp, Artificial Sequence
  Description of Artificial Sequence: Synthetic oligonucleotide
  Target: SCNA; (+) strand; PAM type: NRG; PAM sequence: TGG
caaggatctttgtcagcatt

SEQ ID NO: 36842 - DNA, 20 bp, Artificial Sequence
  Description of Artificial Sequence: Synthetic oligonucleotide
  Target: SCNA; (+) strand; PAM type: NRG; PAM sequence: AAG
ctttgtcagcatttggtaca

SEQ ID NO: 36843 - DNA, 20 bp, Artificial Sequence
  Description of Artificial Sequence: Synthetic oligonucleotide
  Target: SCNA; (+) strand; PAM type: NRG; PAM sequence: AAG
gtacaaagcctatgtgaatg

SEQ ID NO: 36844 - DNA, 20 bp, Artificial Sequence
  Description of Artificial Sequence: Synthetic oligonucleotide
  Target: SCNA; (+) strand; PAM type: NRG; PAM sequence: TGG
aaagcctatgtgaatgaaga

SEQ ID NO: 36845 - DNA, 20 bp, Artificial Sequence
  Description of Artificial Sequence: Synthetic oligonucleotide
  Target: SCNA; (+) strand; PAM type: NRG; PAM sequence: TGG
aatgaagatggtcatttctt

SEQ ID NO: 36846 - DNA, 20 bp, Artificial Sequence
  Description of Artificial Sequence: Synthetic oligonucleotide
  Target: SCNA; (+) strand; PAM type: NRG; PAM sequence: AAG
catttctttggtgttgtccc

SEQ ID NO: 36847 - DNA, 20 bp, Artificial Sequence
  Description of Artificial Sequence: Synthetic oligonucleotide
  Target: SCNA; (+) strand; PAM type: NRG; PAM sequence: CAG
tgttgtcccaagaaatgtaa

SEQ ID NO: 36848 - DNA, 20 bp, Artificial Sequence
  Description of Artificial Sequence: Synthetic oligonucleotide
  Target: SCNA; (+) strand; PAM type: NRG; PAM sequence: AAG
gtaacagaaaatgactataa

SEQ ID NO: 36849 - DNA, 20 bp, Artificial Sequence
  Description of Artificial Sequence: Synthetic oligonucleotide
  Target: SCNA; (+) strand; PAM type: NRG; PAM sequence: TGG
agaaaatgactataaaagaa

SEQ ID NO: 36850 - DNA, 20 bp, Artificial Sequence
  Description of Artificial Sequence: Synthetic oligonucleotide
  Target: SCNA; (+) strand; PAM type: NRG; PAM sequence: TGG
taaaagaatggattctgata

SEQ ID NO: 36851 - DNA, 20 bp, Artificial Sequence
  Description of Artificial Sequence: Synthetic oligonucleotide
  Target: SCNA; (+) strand; PAM type: NRG; PAM sequence: GGG
aaaagaatggattctgatat

SEQ ID NO: 36852 - DNA, 20 bp, Artificial Sequence
  Description of Artificial Sequence: Synthetic oligonucleotide
  Target: SCNA; (+) strand; PAM type: NRG; PAM sequence: GAG
ggattctgatatgggatgct

SEQ ID NO: 36853 - DNA, 20 bp, Artificial Sequence
  Description of Artificial Sequence: Synthetic oligonucleotide
  Target: SCNA; (+) strand; PAM type: NRG; PAM sequence: TAG
ctctctaaatgtctttcatc

SEQ ID NO: 36854 - DNA, 20 bp, Artificial Sequence
  Description of Artificial Sequence: Synthetic oligonucleotide
  Target: SCNA; (+) strand; PAM type: NRG; PAM sequence: AGG
tctctaaatgtctttcatct

SEQ ID NO: 36855 - DNA, 20 bp, Artificial Sequence
  Description of Artificial Sequence: Synthetic oligonucleotide
  Target: SCNA; (+) strand; PAM type: NRG; PAM sequence: CAG
tttcatctaggacctgcaat

SEQ ID NO: 36856 - DNA, 20 bp, Artificial Sequence
  Description of Artificial Sequence: Synthetic oligonucleotide
  Target: SCNA; (+) strand; PAM type: NRG; PAM sequence: AAG
acctgcaatcagccattatt

SEQ ID NO: 36857 - DNA, 20 bp, Artificial Sequence
  Description of Artificial Sequence: Synthetic oligonucleotide
  Target: SCNA; (+) strand; PAM type: NRG; PAM sequence: AAG
aatcagccattattaagaaa

SEQ ID NO: 36858 - DNA, 20 bp, Artificial Sequence
  Description of Artificial Sequence: Synthetic oligonucleotide
  Target: SCNA; (+) strand; PAM type: NRG; PAM sequence: GAG
tcagccattattaagaaaaa

SEQ ID NO: 36859 - DNA, 20 bp, Artificial Sequence
  Description of Artificial Sequence: Synthetic oligonucleotide
  Target: SCNA; (+) strand; PAM type: NRG; PAM sequence: AAG
cattattaagaaaaagagaa

SEQ ID NO: 36860 - DNA, 20 bp, Artificial Sequence
  Description of Artificial Sequence: Synthetic oligonucleotide
  Target: SCNA; (+) strand; PAM type: NRG; PAM sequence: AGG
attattaagaaaaagagaaa

SEQ ID NO: 36861 - DNA, 20 bp, Artificial Sequence
  Description of Artificial Sequence: Synthetic oligonucleotide
  Target: SCNA; (+) strand; PAM type: NRG; PAM sequence: CAG
agaaaaagagaaaaggattg

SEQ ID NO: 36862 - DNA, 20 bp, Artificial Sequence
  Description of Artificial Sequence: Synthetic oligonucleotide
  Target: SCNA; (+) strand; PAM type: NRG; PAM sequence: AGG
gaaaaagagaaaaggattgc

SEQ ID NO: 36863 - DNA, 20 bp, Artificial Sequence
  Description of Artificial Sequence: Synthetic oligonucleotide
  Target: SCNA; (+) strand; PAM type: NRG; PAM sequence: GGG
aaaaagagaaaaggattgca

SEQ ID NO: 36864 - DNA, 20 bp, Artificial Sequence
  Description of Artificial Sequence: Synthetic oligonucleotide
  Target: SCNA; (+) strand; PAM type: NRG; PAM sequence: GGG
aaaagagaaaaggattgcag

SEQ ID NO: 36865 - DNA, 20 bp, Artificial Sequence
  Description of Artificial Sequence: Synthetic oligonucleotide
  Target: SCNA; (+) strand; PAM type: NRG; PAM sequence: CAG
gagaaaaggattgcagggga

SEQ ID NO: 36866 - DNA, 20 bp, Artificial Sequence
  Description of Artificial Sequence: Synthetic oligonucleotide
  Target: SCNA; (+) strand; PAM type: NRG; PAM sequence: TGG
ggacagttccaattaacctg

SEQ ID NO: 36867 - DNA, 20 bp, Artificial Sequence
  Description of Artificial Sequence: Synthetic oligonucleotide
  Target: SCNA; (+) strand; PAM type: NRG; PAM sequence: TAG
tctgtgttttactgaacacc

SEQ ID NO: 36868 - DNA, 20 bp, Artificial Sequence
  Description of Artificial Sequence: Synthetic oligonucleotide
  Target: SCNA; (+) strand; PAM type: NRG; PAM sequence: TGG
acacctagaactattctcca

SEQ ID NO: 36869 - DNA, 20 bp, Artificial Sequence
  Description of Artificial Sequence: Synthetic oligonucleotide
  Target: SCNA; (+) strand; PAM type: NRG; PAM sequence: GGG
cacctagaactattctccat

SEQ ID NO: 36870 - DNA, 20 bp, Artificial Sequence
  Description of Artificial Sequence: Synthetic oligonucleotide
  Target: SCNA; (+) strand; PAM type: NRG; PAM sequence: TGG
agaactattctccatgggtt

SEQ ID NO: 36871 - DNA, 20 bp, Artificial Sequence
  Description of Artificial Sequence: Synthetic oligonucleotide
  Target: SCNA; (+) strand; PAM type: NRG; PAM sequence: AAG
tctccatgggtttggcgtca

SEQ ID NO: 36872 - DNA, 20 bp, Artificial Sequence
  Description of Artificial Sequence: Synthetic oligonucleotide
  Target: SCNA; (+) strand; PAM type: NRG; PAM sequence: GAG
tccatgggtttggcgtcaaa

SEQ ID NO: 36873 - DNA, 20 bp, Artificial Sequence
  Description of Artificial Sequence: Synthetic oligonucleotide
  Target: SCNA; (+) strand; PAM type: NRG; PAM sequence: AGG
ccatgggtttggcgtcaaag

SEQ ID NO: 36874 - DNA, 20 bp, Artificial Sequence
  Description of Artificial Sequence: Synthetic oligonucleotide
  Target: SCNA; (+) strand; PAM type: NRG; PAM sequence: TAG
gtttggcgtcaaagaggcat

SEQ ID NO: 36875 - DNA, 20 bp, Artificial Sequence
  Description of Artificial Sequence: Synthetic oligonucleotide
  Target: SCNA; (+) strand; PAM type: NRG; PAM sequence: AGG
tttggcgtcaaagaggcatt

SEQ ID NO: 36876 - DNA, 20 bp, Artificial Sequence
  Description of Artificial Sequence: Synthetic oligonucleotide
  Target: SCNA; (+) strand; PAM type: NRG; PAM sequence: AAG
gcgtcaaagaggcattagga

SEQ ID NO: 36877 - DNA, 20 bp, Artificial Sequence
  Description of Artificial Sequence: Synthetic oligonucleotide
  Target: SCNA; (+) strand; PAM type: NRG; PAM sequence: TGG
caaagaggcattaggaaaga

SEQ ID NO: 36878 - DNA, 20 bp, Artificial Sequence
  Description of Artificial Sequence: Synthetic oligonucleotide
  Target: SCNA; (+) strand; PAM type: NRG; PAM sequence: AAG
ttcctcttacatacaatatt

SEQ ID NO: 36879 - DNA, 20 bp, Artificial Sequence
  Description of Artificial Sequence: Synthetic oligonucleotide
  Target: SCNA; (+) strand; PAM type: NRG; PAM sequence: AGG
tcctcttacatacaatatta

SEQ ID NO: 36880 - DNA, 20 bp, Artificial Sequence
  Description of Artificial Sequence: Synthetic oligonucleotide
  Target: SCNA; (+) strand; PAM type: NRG; PAM sequence: GAG
catacaatattaaggccttt

SEQ ID NO: 36881 - DNA, 20 bp, Artificial Sequence
  Description of Artificial Sequence: Synthetic oligonucleotide
  Target: SCNA; (+) strand; PAM type: NRG; PAM sequence: CAG
aaggcctttgagatttgctt

SEQ ID NO: 36882 - DNA, 20 bp, Artificial Sequence
  Description of Artificial Sequence: Synthetic oligonucleotide
  Target: SCNA; (+) strand; PAM type: NRG; PAM sequence: CAG
tgagatttgcttcagcttaa

SEQ ID NO: 36883 - DNA, 20 bp, Artificial Sequence
  Description of Artificial Sequence: Synthetic oligonucleotide
  Target: SCNA; (+) strand; PAM type: NRG; PAM sequence: GAG
agatttgcttcagcttaaca

SEQ ID NO: 36884 - DNA, 20 bp, Artificial Sequence
  Description of Artificial Sequence: Synthetic oligonucleotide
  Target: SCNA; (+) strand; PAM type: NRG; PAM sequence: GAG
aatgtttcccaaaattattt

SEQ ID NO: 36885 - DNA, 20 bp, Artificial Sequence
  Description of Artificial Sequence: Synthetic oligonucleotide
  Target: SCNA; (+) strand; PAM type: NRG; PAM sequence: CAG
gtttcccaaaattatttgag

SEQ ID NO: 36886 - DNA, 20 bp, Artificial Sequence
  Description of Artificial Sequence: Synthetic oligonucleotide
  Target: SCNA; (+) strand; PAM type: NRG; PAM sequence: GAG
ttcccaaaattatttgagca

SEQ ID NO: 36887 - DNA, 20 bp, Artificial Sequence
  Description of Artificial Sequence: Synthetic oligonucleotide
  Target: SCNA; (+) strand; PAM type: NRG; PAM sequence: TGG
accatgtgcataatactcaa

SEQ ID NO: 36888 - DNA, 20 bp, Artificial Sequence
  Description of Artificial Sequence: Synthetic oligonucleotide
  Target: SCNA; (+) strand; PAM type: NRG; PAM sequence: TGG
tcaatggaatcacatgactt

SEQ ID NO: 36889 - DNA, 20 bp, Artificial Sequence
  Description of Artificial Sequence: Synthetic oligonucleotide
  Target: SCNA; (+) strand; PAM type: NRG; PAM sequence: GGG
caatggaatcacatgacttt

SEQ ID NO: 36890 - DNA, 20 bp, Artificial Sequence
  Description of Artificial Sequence: Synthetic oligonucleotide
  Target: SCNA; (+) strand; PAM type: NRG; PAM sequence: GGG
aatggaatcacatgactttg

SEQ ID NO: 36891 - DNA, 20 bp, Artificial Sequence
  Description of Artificial Sequence: Synthetic oligonucleotide
  Target: SCNA; (+) strand; PAM type: NRG; PAM sequence: CAG
tcacatgactttggggaaat

SEQ ID NO: 36892 - DNA, 20 bp, Artificial Sequence
  Description of Artificial Sequence: Synthetic oligonucleotide
  Target: SCNA; (+) strand; PAM type: NRG; PAM sequence: GAG
acatgactttggggaaatca

SEQ ID NO: 36893 - DNA, 20 bp, Artificial Sequence
  Description of Artificial Sequence: Synthetic oligonucleotide
  Target: SCNA; (+) strand; PAM type: NRG; PAM sequence: AGG
catgactttggggaaatcag

SEQ ID NO: 36894 - DNA, 20 bp, Artificial Sequence
  Description of Artificial Sequence: Synthetic oligonucleotide
  Target: SCNA; (+) strand; PAM type: NRG; PAM sequence: TAG
ggaaatcagaggaaaactaa

SEQ ID NO: 36895 - DNA, 20 bp, Artificial Sequence
  Description of Artificial Sequence: Synthetic oligonucleotide
  Target: SCNA; (+) strand; PAM type: NRG; PAM sequence: TAG
aatagtgattacattttatt

SEQ ID NO: 36896 - DNA, 20 bp, Artificial Sequence
  Description of Artificial Sequence: Synthetic oligonucleotide
  Target: SCNA; (+) strand; PAM type: NRG; PAM sequence: CGG
ttttatttagctaaataaaa

SEQ ID NO: 36897 - DNA, 20 bp, Artificial Sequence
  Description of Artificial Sequence: Synthetic oligonucleotide
  Target: SCNA; (+) strand; PAM type: NRG; PAM sequence: CAG
gctaaataaaacggcatgtt

SEQ ID NO: 36898 - DNA, 20 bp, Artificial Sequence
  Description of Artificial Sequence: Synthetic oligonucleotide
  Target: SCNA; (+) strand; PAM type: NRG; PAM sequence: AAG
cttaatatcatcaaactaca

SEQ ID NO: 36899 - DNA, 20 bp, Artificial Sequence
  Description of Artificial Sequence: Synthetic oligonucleotide
  Target: SCNA; (+) strand; PAM type: NRG; PAM sequence: AGG
ttaatatcatcaaactacaa

SEQ ID NO: 36900 - DNA, 20 bp, Artificial Sequence
  Description of Artificial Sequence: Synthetic oligonucleotide
  Target: SCNA; (+) strand; PAM type: NRG; PAM sequence: TGG
catcaaactacaaaggaata

SEQ ID NO: 36901 - DNA, 20 bp, Artificial Sequence
  Description of Artificial Sequence: Synthetic oligonucleotide
  Target: SCNA; (+) strand; PAM type: NRG; PAM sequence: AAG
aactacaaaggaatatggaa

SEQ ID NO: 36902 - DNA, 20 bp, Artificial Sequence
  Description of Artificial Sequence: Synthetic oligonucleotide
  Target: SCNA; (+) strand; PAM type: NRG; PAM sequence: TAG
tcatgtatcgacacacttct

SEQ ID NO: 36903 - DNA, 20 bp, Artificial Sequence
  Description of Artificial Sequence: Synthetic oligonucleotide
  Target: SCNA; (+) strand; PAM type: NRG; PAM sequence: GAG
atgtatcgacacacttctta

SEQ ID NO: 36904 - DNA, 20 bp, Artificial Sequence
  Description of Artificial Sequence: Synthetic oligonucleotide
  Target: SCNA; (+) strand; PAM type: NRG; PAM sequence: AAG
acacttcttagagaaaatgt

SEQ ID NO: 36905 - DNA, 20 bp, Artificial Sequence
  Description of Artificial Sequence: Synthetic oligonucleotide
  Target: SCNA; (+) strand; PAM type: NRG; PAM sequence: TGG
ttagagaaaatgtaagttct

SEQ ID NO: 36906 - DNA, 20 bp, Artificial Sequence
  Description of Artificial Sequence: Synthetic oligonucleotide
  Target: SCNA; (+) strand; PAM type: NRG; PAM sequence: TGG
tttcattcacactccaaccc

SEQ ID NO: 36907 - DNA, 20 bp, Artificial Sequence
  Description of Artificial Sequence: Synthetic oligonucleotide
  Target: SCNA; (+) strand; PAM type: NRG; PAM sequence: GGG
ttcattcacactccaaccct

SEQ ID NO: 36908 - DNA, 20 bp, Artificial Sequence
  Description of Artificial Sequence: Synthetic oligonucleotide
  Target: SCNA; (+) strand; PAM type: NRG; PAM sequence: CAG
attcacactccaaccctggg

SEQ ID NO: 36909 - DNA, 20 bp, Artificial Sequence
  Description of Artificial Sequence: Synthetic oligonucleotide
  Target: SCNA; (+) strand; PAM type: NRG; PAM sequence: TGG
acactccaaccctgggcagt

SEQ ID NO: 36910 - DNA, 20 bp, Artificial Sequence
  Description of Artificial Sequence: Synthetic oligonucleotide
  Target: SCNA; (+) strand; PAM type: NRG; PAM sequence: TGG
tccaaccctgggcagttggc

SEQ ID NO: 36911 - DNA, 20 bp, Artificial Sequence
  Description of Artificial Sequence: Synthetic oligonucleotide
  Target: SCNA; (+) strand; PAM type: NRG; PAM sequence: CAG
accctgggcagttggctggc

SEQ ID NO: 36912 - DNA, 20 bp, Artificial Sequence
  Description of Artificial Sequence: Synthetic oligonucleotide
  Target: SCNA; (+) strand; PAM type: NRG; PAM sequence: CAG
ggcagttggctggccagtta

SEQ ID NO: 36913 - DNA, 20 bp, Artificial Sequence
  Description of Artificial Sequence: Synthetic oligonucleotide
  Target: SCNA; (+) strand; PAM type: NRG; PAM sequence: GAG
ttggctggccagttacagat

SEQ ID NO: 36914 - DNA, 20 bp, Artificial Sequence
  Description of Artificial Sequence: Synthetic oligonucleotide
  Target: SCNA; (+) strand; PAM type: NRG; PAM sequence: TAG
gctggccagttacagatgag

SEQ ID NO: 36915 - DNA, 20 bp, Artificial Sequence
  Description of Artificial Sequence: Synthetic oligonucleotide
  Target: SCNA; (+) strand; PAM type: NRG; PAM sequence: TGG
cagttacagatgagtagcta

SEQ ID NO: 36916 - DNA, 20 bp, Artificial Sequence
  Description of Artificial Sequence: Synthetic oligonucleotide
  Target: SCNA; (+) strand; PAM type: NRG; PAM sequence: TAG
acagatgagtagctatggtt

SEQ ID NO: 36917 - DNA, 20 bp, Artificial Sequence
  Description of Artificial Sequence: Synthetic oligonucleotide
  Target: SCNA; (+) strand; PAM type: NRG; PAM sequence: AAG
atgagtagctatggtttaga

SEQ ID NO: 36918 - DNA, 20 bp, Artificial Sequence
  Description of Artificial Sequence: Synthetic oligonucleotide
  Target: SCNA; (+) strand; PAM type: NRG; PAM sequence: AGG
tgagtagctatggtttagaa

SEQ ID NO: 36919 - DNA, 20 bp, Artificial Sequence
  Description of Artificial Sequence: Synthetic oligonucleotide
  Target: SCNA; (+) strand; PAM type: NRG; PAM sequence: GAG
atggtttagaaaggttacat

SEQ ID NO: 36920 - DNA, 20 bp, Artificial Sequence
  Description of Artificial Sequence: Synthetic oligonucleotide
  Target: SCNA; (+) strand; PAM type: NRG; PAM sequence: CAG
agaaaggttacatgagttgc

SEQ ID NO: 36921 - DNA, 20 bp, Artificial Sequence
  Description of Artificial Sequence: Synthetic oligonucleotide
  Target: SCNA; (+) strand; PAM type: NRG; PAM sequence: AGG
gaaaggttacatgagttgcc

SEQ ID NO: 36922 - DNA, 20 bp, Artificial Sequence
  Description of Artificial Sequence: Synthetic oligonucleotide
  Target: SCNA; (+) strand; PAM type: NRG; PAM sequence: GGG
aaaggttacatgagttgcca

SEQ ID NO: 36923 - DNA, 20 bp, Artificial Sequence
  Description of Artificial Sequence: Synthetic oligonucleotide
  Target: SCNA; (+) strand; PAM type: NRG; PAM sequence: TGG
tacatgagttgccagggatc

SEQ ID NO: 36924 - DNA, 20 bp, Artificial Sequence
  Description of Artificial Sequence: Synthetic oligonucleotide
  Target: SCNA; (+) strand; PAM type: NRG; PAM sequence: AAG
ataattgaatacattgtctt

SEQ ID NO: 36925 - DNA, 20 bp, Artificial Sequence
  Description of Artificial Sequence: Synthetic oligonucleotide
  Target: SCNA; (+) strand; PAM type: NRG; PAM sequence: AAG
aatacattgtcttaagattc

SEQ ID NO: 36926 - DNA, 20 bp, Artificial Sequence
  Description of Artificial Sequence: Synthetic oligonucleotide
  Target: SCNA; (+) strand; PAM type: NRG; PAM sequence: CAG
aagattcaagctattaaaca

SEQ ID NO: 36927 - DNA, 20 bp, Artificial Sequence
  Description of Artificial Sequence: Synthetic oligonucleotide
  Target: SCNA; (+) strand; PAM type: NRG; PAM sequence: AAG
agctattaaacacagactga

SEQ ID NO: 36928 - DNA, 20 bp, Artificial Sequence
  Description of Artificial Sequence: Synthetic oligonucleotide
  Target: SCNA; (+) strand; PAM type: NRG; PAM sequence: CAG
aattcaacatttttatttca

SEQ ID NO: 36929 - DNA, 20 bp, Artificial Sequence
  Description of Artificial Sequence: Synthetic oligonucleotide
  Target: SCNA; (+) strand; PAM type: NRG; PAM sequence: AAG
aacatttttatttcacagat

SEQ ID NO: 36930 - DNA, 20 bp, Artificial Sequence
  Description of Artificial Sequence: Synthetic oligonucleotide
  Target: SCNA; (+) strand; PAM type: NRG; PAM sequence: TAG
cagataagaaaactcatgct

SEQ ID NO: 36931 - DNA, 20 bp, Artificial Sequence
  Description of Artificial Sequence: Synthetic oligonucleotide
  Target: SCNA; (+) strand; PAM type: NRG; PAM sequence: GAG
gataagaaaactcatgctta

SEQ ID NO: 36932 - DNA, 20 bp, Artificial Sequence
  Description of Artificial Sequence: Synthetic oligonucleotide
  Target: SCNA; (+) strand; PAM type: NRG; PAM sequence: GAG
taagaaaactcatgcttaga

SEQ ID NO: 36933 - DNA, 20 bp, Artificial Sequence
  Description of Artificial Sequence: Synthetic oligonucleotide
  Target: SCNA; (+) strand; PAM type: NRG; PAM sequence: AGG
aagaaaactcatgcttagag

SEQ ID NO: 36934 - DNA, 20 bp, Artificial Sequence
  Description of Artificial Sequence: Synthetic oligonucleotide
  Target: SCNA; (+) strand; PAM type: NRG; PAM sequence: GGG
agaaaactcatgcttagaga

SEQ ID NO: 36935 - DNA, 20 bp, Artificial Sequence
  Description of Artificial Sequence: Synthetic oligonucleotide
  Target: SCNA; (+) strand; PAM type: NRG; PAM sequence: GGG
gaaaactcatgcttagagag

SEQ ID NO: 36936 - DNA, 20 bp, Artificial Sequence
  Description of Artificial Sequence: Synthetic oligonucleotide
  Target: SCNA; (+) strand; PAM type: NRG; PAM sequence: GAG
aaactcatgcttagagaggg

SEQ ID NO: 36937 - DNA, 20 bp, Artificial Sequence
  Description of Artificial Sequence: Synthetic oligonucleotide
  Target: SCNA; (+) strand; PAM type: NRG; PAM sequence: CAG
agaggggagatgacatcatc

SEQ ID NO: 36938 - DNA, 20 bp, Artificial Sequence
  Description of Artificial Sequence: Synthetic oligonucleotide
  Target: SCNA; (+) strand; PAM type: NRG; PAM sequence: TAG
ggggagatgacatcatccag

SEQ ID NO: 36939 - DNA, 20 bp, Artificial Sequence
  Description of Artificial Sequence: Synthetic oligonucleotide
  Target: SCNA; (+) strand; PAM type: NRG; PAM sequence: GAG
ggagatgacatcatccagta

SEQ ID NO: 36940 - DNA, 20 bp, Artificial Sequence
  Description of Artificial Sequence: Synthetic oligonucleotide
  Target: SCNA; (+) strand; PAM type: NRG; PAM sequence: GAG
atgacatcatccagtagagt

SEQ ID NO: 36941 - DNA, 20 bp, Artificial Sequence
  Description of Artificial Sequence: Synthetic oligonucleotide
  Target: SCNA; (+) strand; PAM type: NRG; PAM sequence: GAG
gacatcatccagtagagtga

SEQ ID NO: 36942 - DNA, 20 bp, Artificial Sequence
  Description of Artificial Sequence: Synthetic oligonucleotide
  Target: SCNA; (+) strand; PAM type: NRG; PAM sequence: GAG
catcatccagtagagtgaga

SEQ ID NO: 36943 - DNA, 20 bp, Artificial Sequence
  Description of Artificial Sequence: Synthetic oligonucleotide
  Target: SCNA; (+) strand; PAM type: NRG; PAM sequence: GAG
tcatccagtagagtgagaga

SEQ ID NO: 36944 - DNA, 20 bp, Artificial Sequence
  Description of Artificial Sequence: Synthetic oligonucleotide
  Target: SCNA; (+) strand; PAM type: NRG; PAM sequence: AAG
tccagtagagtgagagagag

SEQ ID NO: 36945 - DNA, 20 bp, Artificial Sequence
  Description of Artificial Sequence: Synthetic oligonucleotide
  Target: SCNA; (+) strand; PAM type: NRG; PAM sequence: AAG
actctctgttccctgaattc

SEQ ID NO: 36946 - DNA, 20 bp, Artificial Sequence
  Description of Artificial Sequence: Synthetic oligonucleotide
  Target: SCNA; (+) strand; PAM type: NRG; PAM sequence: TGG
ctgtatatgaccaaacaaaa

SEQ ID NO: 36947 - DNA, 20 bp, Artificial Sequence
  Description of Artificial Sequence: Synthetic oligonucleotide
  Target: SCNA; (+) strand; PAM type: NRG; PAM sequence: CAG
tatgaccaaacaaaatggtg

SEQ ID NO: 36948 - DNA, 20 bp, Artificial Sequence
  Description of Artificial Sequence: Synthetic oligonucleotide
  Target: SCNA; (+) strand; PAM type: NRG; PAM sequence: GAG
aaatggtgcagttaaaccac

SEQ ID NO: 36949 - DNA, 20 bp, Artificial Sequence
  Description of Artificial Sequence: Synthetic oligonucleotide
  Target: SCNA; (+) strand; PAM type: NRG; PAM sequence: CAG
aaaccacgagccgtcatgca

SEQ ID NO: 36950 - DNA, 20 bp, Artificial Sequence
  Description of Artificial Sequence: Synthetic oligonucleotide
  Target: SCNA; (+) strand; PAM type: NRG; PAM sequence: AGG
aaccacgagccgtcatgcac

SEQ ID NO: 36951 - DNA, 20 bp, Artificial Sequence
  Description of Artificial Sequence: Synthetic oligonucleotide
  Target: SCNA; (+) strand; PAM type: NRG; PAM sequence: GAG
ccacgagccgtcatgcacag

SEQ ID NO: 36952 - DNA, 20 bp, Artificial Sequence
  Description of Artificial Sequence: Synthetic oligonucleotide
  Target: SCNA; (+) strand; PAM type: NRG; PAM sequence: AGG
cacgagccgtcatgcacagg

SEQ ID NO: 36953 - DNA, 20 bp, Artificial Sequence
  Description of Artificial Sequence: Synthetic oligonucleotide
  Target: SCNA; (+) strand; PAM type: NRG; PAM sequence: GGG
acgagccgtcatgcacagga

SEQ ID NO: 36954 - DNA, 20 bp, Artificial Sequence
  Description of Artificial Sequence: Synthetic oligonucleotide
  Target: SCNA; (+) strand; PAM type: NRG; PAM sequence: CAG
gccgtcatgcacaggagggc

SEQ ID NO: 36955 - DNA, 20 bp, Artificial Sequence
  Description of Artificial Sequence: Synthetic oligonucleotide
  Target: SCNA; (+) strand; PAM type: NRG; PAM sequence: TGG
tcatgcacaggagggccagc

SEQ ID NO: 36956 - DNA, 20 bp, Artificial Sequence
  Description of Artificial Sequence: Synthetic oligonucleotide
  Target: SCNA; (+) strand; PAM type: NRG; PAM sequence: TGG
gggccagctggccatcatgc

SEQ ID NO: 36957 - DNA, 20 bp, Artificial Sequence
  Description of Artificial Sequence: Synthetic oligonucleotide
  Target: SCNA; (+) strand; PAM type: NRG; PAM sequence: CAG
ggccatcatgctggatcaaa

SEQ ID NO: 36958 - DNA, 20 bp, Artificial Sequence
  Description of Artificial Sequence: Synthetic oligonucleotide
  Target: SCNA; (+) strand; PAM type: NRG; PAM sequence: CAG
catcatgctggatcaaacag

SEQ ID NO: 36959 - DNA, 20 bp, Artificial Sequence
  Description of Artificial Sequence: Synthetic oligonucleotide
  Target: SCNA; (+) strand; PAM type: NRG; PAM sequence: TAG
gctggatcaaacagcagata

SEQ ID NO: 36960 - DNA, 20 bp, Artificial Sequence
  Description of Artificial Sequence: Synthetic oligonucleotide
  Target: SCNA; (+) strand; PAM type: NRG; PAM sequence: TAG
cagcagatatagaccatctc

SEQ ID NO: 36961 - DNA, 20 bp, Artificial Sequence
  Description of Artificial Sequence: Synthetic oligonucleotide
  Target: SCNA; (+) strand; PAM type: NRG; PAM sequence: CAG
cagatatagaccatctctag

SEQ ID NO: 36962 - DNA, 20 bp, Artificial Sequence
  Description of Artificial Sequence: Synthetic oligonucleotide
  Target: SCNA; (+) strand; PAM type: NRG; PAM sequence: TAG
tgtttcaaactcataaatgt

SEQ ID NO: 36963 - DNA, 20 bp, Artificial Sequence
  Description of Artificial Sequence: Synthetic oligonucleotide
  Target: SCNA; (+) strand; PAM type: NRG; PAM sequence: TAG
taaatgttagtatacctttg

SEQ ID NO: 36964 - DNA, 20 bp, Artificial Sequence
  Description of Artificial Sequence: Synthetic oligonucleotide
  Target: SCNA; (+) strand; PAM type: NRG; PAM sequence: AGG
aaatgttagtatacctttgt

SEQ ID NO: 36965 - DNA, 20 bp, Artificial Sequence
  Description of Artificial Sequence: Synthetic oligonucleotide
  Target: SCNA; (+) strand; PAM type: NRG; PAM sequence: GAG
atgttagtatacctttgtag

SEQ ID NO: 36966 - DNA, 20 bp, Artificial Sequence
  Description of Artificial Sequence: Synthetic oligonucleotide
  Target: SCNA; (+) strand; PAM type: NRG; PAM sequence: AGG
tgttagtatacctttgtagg

SEQ ID NO: 36967 - DNA, 20 bp, Artificial Sequence
  Description of Artificial Sequence: Synthetic oligonucleotide
  Target: SCNA; (+) strand; PAM type: NRG; PAM sequence: AAG
ttgtaggaggactaccatga

SEQ ID NO: 36968 - DNA, 20 bp, Artificial Sequence
  Description of Artificial Sequence: Synthetic oligonucleotide
  Target: SCNA; (+) strand; PAM type: NRG; PAM sequence: AAG
gaaagatgaattgccactat

SEQ ID NO: 36969 - DNA, 20 bp, Artificial Sequence
  Description of Artificial Sequence: Synthetic oligonucleotide
  Target: SCNA; (+) strand; PAM type: NRG; PAM sequence: CAG
agatgaattgccactataag

SEQ ID NO: 36970 - DNA, 20 bp, Artificial Sequence
  Description of Artificial Sequence: Synthetic oligonucleotide
  Target: SCNA; (+) strand; PAM type: NRG; PAM sequence: TAG
ttgccactataagcagtcat

SEQ ID NO: 36971 - DNA, 20 bp, Artificial Sequence
  Description of Artificial Sequence: Synthetic oligonucleotide
  Target: SCNA; (+) strand; PAM type: NRG; PAM sequence: TAG
tataagcagtcattagtatt

SEQ ID NO: 36972 - DNA, 20 bp, Artificial Sequence
  Description of Artificial Sequence: Synthetic oligonucleotide
  Target: SCNA; (+) strand; PAM type: NRG; PAM sequence: TGG
aagcagtcattagtatttag

SEQ ID NO: 36973 - DNA, 20 bp, Artificial Sequence
  Description of Artificial Sequence: Synthetic oligonucleotide
  Target: SCNA; (+) strand; PAM type: NRG; PAM sequence: GAG
gcagtcattagtatttagtg

SEQ ID NO: 36974 - DNA, 20 bp, Artificial Sequence
  Description of Artificial Sequence: Synthetic oligonucleotide
  Target: SCNA; (+) strand; PAM type: NRG; PAM sequence: AAG
ttagtggagattaactttta

SEQ ID NO: 36975 - DNA, 20 bp, Artificial Sequence
  Description of Artificial Sequence: Synthetic oligonucleotide
  Target: SCNA; (+) strand; PAM type: NRG; PAM sequence: AGG
tagtggagattaacttttaa

SEQ ID NO: 36976 - DNA, 20 bp, Artificial Sequence
  Description of Artificial Sequence: Synthetic oligonucleotide
  Target: SCNA; (+) strand; PAM type: NRG; PAM sequence: TAG
acttttaaaggtgcctactt

SEQ ID NO: 36977 - DNA, 20 bp, Artificial Sequence
  Description of Artificial Sequence: Synthetic oligonucleotide
  Target: SCNA; (+) strand; PAM type: NRG; PAM sequence: TAG
ctttagatatgtcataatat

SEQ ID NO: 36978 - DNA, 20 bp, Artificial Sequence
  Description of Artificial Sequence: Synthetic oligonucleotide
  Target: SCNA; (+) strand; PAM type: NRG; PAM sequence: AAG
atgtcataatattagaaatt

SEQ ID NO: 36979 - DNA, 20 bp, Artificial Sequence
  Description of Artificial Sequence: Synthetic oligonucleotide
  Target: SCNA; (+) strand; PAM type: NRG; PAM sequence: AGG
tgtcataatattagaaatta

SEQ ID NO: 36980 - DNA, 20 bp, Artificial Sequence
  Description of Artificial Sequence: Synthetic oligonucleotide
  Target: SCNA; (+) strand; PAM type: NRG; PAM sequence: AAG
aatattagaaattaaggatg

SEQ ID NO: 36981 - DNA, 20 bp, Artificial Sequence
  Description of Artificial Sequence: Synthetic oligonucleotide
  Target: SCNA; (+) strand; PAM type: NRG; PAM sequence: TAG
ttctatctatctatgctttg

SEQ ID NO: 36982 - DNA, 20 bp, Artificial Sequence
  Description of Artificial Sequence: Synthetic oligonucleotide
  Target: SCNA; (+) strand; PAM type: NRG; PAM sequence: AGG
tctatctatctatgctttgt

SEQ ID NO: 36983 - DNA, 20 bp, Artificial Sequence
  Description of Artificial Sequence: Synthetic oligonucleotide
  Target: SCNA; (+) strand; PAM type: NRG; PAM sequence: AAG
ggacaattatattaatccca

SEQ ID NO: 36984 - DNA, 20 bp, Artificial Sequence
  Description of Artificial Sequence: Synthetic oligonucleotide
  Target: SCNA; (+) strand; PAM type: NRG; PAM sequence: AAG
atcccaaagttacctgacat

SEQ ID NO: 36985 - DNA, 20 bp, Artificial Sequence
  Description of Artificial Sequence: Synthetic oligonucleotide
  Target: SCNA; (+) strand; PAM type: NRG; PAM sequence: TAG
ccaaagttacctgacataag

SEQ ID NO: 36986 - DNA, 20 bp, Artificial Sequence
  Description of Artificial Sequence: Synthetic oligonucleotide
  Target: SCNA; (+) strand; PAM type: NRG; PAM sequence: AGG
caaagttacctgacataagt

SEQ ID NO: 36987 - DNA, 20 bp, Artificial Sequence
  Description of Artificial Sequence: Synthetic oligonucleotide
  Target: SCNA; (+) strand; PAM type: NRG; PAM sequence: AAG
agttacctgacataagtagg

SEQ ID NO: 36988 - DNA, 20 bp, Artificial Sequence
  Description of Artificial Sequence: Synthetic oligonucleotide
  Target: SCNA; (+) strand; PAM type: NRG; PAM sequence: TAG
cacatgcctcttctgatata

SEQ ID NO: 36989 - DNA, 20 bp, Artificial Sequence
  Description of Artificial Sequence: Synthetic oligonucleotide
  Target: SCNA; (+) strand; PAM type: NRG; PAM sequence: GAG
taatatatactcaatccact

SEQ ID NO: 36990 - DNA, 20 bp, Artificial Sequence
  Description of Artificial Sequence: Synthetic oligonucleotide
  Target: SCNA; (+) strand; PAM type: NRG; PAM sequence: TGG
tcaatccactgagcaaaaat

SEQ ID NO: 36991 - DNA, 20 bp, Artificial Sequence
  Description of Artificial Sequence: Synthetic oligonucleotide
  Target: SCNA; (+) strand; PAM type: NRG; PAM sequence: AAG
tgagcaaaaattggaacctc

SEQ ID NO: 36992 - DNA, 20 bp, Artificial Sequence
  Description of Artificial Sequence: Synthetic oligonucleotide
  Target: SCNA; (+) strand; PAM type: NRG; PAM sequence: AGG
gagcaaaaattggaacctca

SEQ ID NO: 36993 - DNA, 20 bp, Artificial Sequence
  Description of Artificial Sequence: Synthetic oligonucleotide
  Target: SCNA; (+) strand; PAM type: NRG; PAM sequence: AAG
aaaattggaacctcaaggca

SEQ ID NO: 36994 - DNA, 20 bp, Artificial Sequence
  Description of Artificial Sequence: Synthetic oligonucleotide
  Target: SCNA; (+) strand; PAM type: NRG; PAM sequence: CAG
caaagctgtatgtacaacct

SEQ ID NO: 36995 - DNA, 20 bp, Artificial Sequence
  Description of Artificial Sequence: Synthetic oligonucleotide
  Target: SCNA; (+) strand; PAM type: NRG; PAM sequence: TGG
acaacctcagaaaatctgtg

SEQ ID NO: 36996 - DNA, 20 bp, Artificial Sequence
  Description of Artificial Sequence: Synthetic oligonucleotide
  Target: SCNA; (+) strand; PAM type: NRG; PAM sequence: AAG
aataccgtaacgtacactga

SEQ ID NO: 36997 - DNA, 20 bp, Artificial Sequence
  Description of Artificial Sequence: Synthetic oligonucleotide
  Target: SCNA; (+) strand; PAM type: NRG; PAM sequence: AGG
ataccgtaacgtacactgaa

SEQ ID NO: 36998 - DNA, 20 bp, Artificial Sequence
  Description of Artificial Sequence: Synthetic oligonucleotide
  Target: SCNA; (+) strand; PAM type: NRG; PAM sequence: GGG
taccgtaacgtacactgaaa

SEQ ID NO: 36999 - DNA, 20 bp, Artificial Sequence
  Description of Artificial Sequence: Synthetic oligonucleotide
  Target: SCNA; (+) strand; PAM type: NRG; PAM sequence: GAG
gggcaattttcgatttttgt

SEQ ID NO: 37000 - DNA, 20 bp, Artificial Sequence
  Description of Artificial Sequence: Synthetic oligonucleotide
  Target: SCNA; (+) strand; PAM type: NRG; PAM sequence: AGG
ggcaattttcgatttttgtg

SEQ ID NO: 37001 - DNA, 20 bp, Artificial Sequence
  Description of Artificial Sequence: Synthetic oligonucleotide
  Target: SCNA; (+) strand; PAM type: NRG; PAM sequence: TAG
atttttgtgaggattcccaa

SEQ ID NO: 37002 - DNA, 20 bp, Artificial Sequence
  Description of Artificial Sequence: Synthetic oligonucleotide
  Target: SCNA; (+) strand; PAM type: NRG; PAM sequence: TAG
gaggattcccaatagccaaa

SEQ ID NO: 37003 - DNA, 20 bp, Artificial Sequence
  Description of Artificial Sequence: Synthetic oligonucleotide
  Target: SCNA; (+) strand; PAM type: NRG; PAM sequence: AAG
ccaatagccaaatagaaaaa

SEQ ID NO: 37004 - DNA, 20 bp, Artificial Sequence
  Description of Artificial Sequence: Synthetic oligonucleotide
  Target: SCNA; (+) strand; PAM type: NRG; PAM sequence: TGG
aagtgtgtatacatgtgaat

SEQ ID NO: 37005 - DNA, 20 bp, Artificial Sequence
  Description of Artificial Sequence: Synthetic oligonucleotide
  Target: SCNA; (+) strand; PAM type: NRG; PAM sequence: GAG
gtgtgtatacatgtgaattg

SEQ ID NO: 37006 - DNA, 20 bp, Artificial Sequence
  Description of Artificial Sequence: Synthetic oligonucleotide
  Target: SCNA; (+) strand; PAM type: NRG; PAM sequence: AAG
attggagatgacttgatatt

SEQ ID NO: 37007 - DNA, 20 bp, Artificial Sequence
  Description of Artificial Sequence: Synthetic oligonucleotide
  Target: SCNA; (+) strand; PAM type: NRG; PAM sequence: AGG
ttggagatgacttgatatta

SEQ ID NO: 37008 - DNA, 20 bp, Artificial Sequence
  Description of Artificial Sequence: Synthetic oligonucleotide
  Target: SCNA; (+) strand; PAM type: NRG; PAM sequence: CAG
gacttgatattaaggattgt

SEQ ID NO: 37009 - DNA, 20 bp, Artificial Sequence
  Description of Artificial Sequence: Synthetic oligonucleotide
  Target: SCNA; (+) strand; PAM type: NRG; PAM sequence: AAG
gacttatgtcaccccattgt

SEQ ID NO: 37010 - DNA, 20 bp, Artificial Sequence
  Description of Artificial Sequence: Synthetic oligonucleotide
  Target: SCNA; (+) strand; PAM type: NRG; PAM sequence: TAG
atgtcaccccattgtaagca

SEQ ID NO: 37011 - DNA, 20 bp, Artificial Sequence
  Description of Artificial Sequence: Synthetic oligonucleotide
  Target: SCNA; (+) strand; PAM type: NRG; PAM sequence: TAG
caccccattgtaagcataga

SEQ ID NO: 37012 - DNA, 20 bp, Artificial Sequence
  Description of Artificial Sequence: Synthetic oligonucleotide
  Target: SCNA; (+) strand; PAM type: NRG; PAM sequence: AAG
atttgatttcattaaattaa

SEQ ID NO: 37013 - DNA, 20 bp, Artificial Sequence
  Description of Artificial Sequence: Synthetic oligonucleotide
  Target: SCNA; (+) strand; PAM type: NRG; PAM sequence: TAG
cctatgaactgaattccaat

SEQ ID NO: 37014 - DNA, 20 bp, Artificial Sequence
  Description of Artificial Sequence: Synthetic oligonucleotide
  Target: SCNA; (+) strand; PAM type: NRG; PAM sequence: CAG
catattgttgttgtgaacac

SEQ ID NO: 37015 - DNA, 20 bp, Artificial Sequence
  Description of Artificial Sequence: Synthetic oligonucleotide
  Target: SCNA; (+) strand; PAM type: NRG; PAM sequence: GAG
tattgttgttgtgaacacca

SEQ ID NO: 37016 - DNA, 20 bp, Artificial Sequence
  Description of Artificial Sequence: Synthetic oligonucleotide
  Target: SCNA; (+) strand; PAM type: NRG; PAM sequence: AAG
ttgttgtgaacaccagagaa

SEQ ID NO: 37017 - DNA, 20 bp, Artificial Sequence
  Description of Artificial Sequence: Synthetic oligonucleotide
  Target: SCNA; (+) strand; PAM type: NRG; PAM sequence: TAG
ttgtgaacaccagagaaaag

SEQ ID NO: 37018 - DNA, 20 bp, Artificial Sequence
  Description of Artificial Sequence: Synthetic oligonucleotide
  Target: SCNA; (+) strand; PAM type: NRG; PAM sequence: AGG
tgtgaacaccagagaaaagt

SEQ ID NO: 37019 - DNA, 20 bp, Artificial Sequence
  Description of Artificial Sequence: Synthetic oligonucleotide
  Target: SCNA; (+) strand; PAM type: NRG; PAM sequence: CAG
aacaccagagaaaagtagga

SEQ ID NO: 37020 - DNA, 20 bp, Artificial Sequence
  Description of Artificial Sequence: Synthetic oligonucleotide
  Target: SCNA; (+) strand; PAM type: NRG; PAM sequence: AAG
agtaggacagtcccacatct

SEQ ID NO: 37021 - DNA, 20 bp, Artificial Sequence
  Description of Artificial Sequence: Synthetic oligonucleotide
  Target: SCNA; (+) strand; PAM type: NRG; PAM sequence: CAG
aggacagtcccacatctaag

SEQ ID NO: 37022 - DNA, 20 bp, Artificial Sequence
  Description of Artificial Sequence: Synthetic oligonucleotide
  Target: SCNA; (+) strand; PAM type: NRG; PAM sequence: AGG
ggacagtcccacatctaagc

SEQ ID NO: 37023 - DNA, 20 bp, Artificial Sequence
  Description of Artificial Sequence: Synthetic oligonucleotide
  Target: SCNA; (+) strand; PAM type: NRG; PAM sequence: AAG
cagtcccacatctaagcagg

SEQ ID NO: 37024 - DNA, 20 bp, Artificial Sequence
  Description of Artificial Sequence: Synthetic oligonucleotide
  Target: SCNA; (+) strand; PAM type: NRG; PAM sequence: AAG
aaataatctatttattcaac

SEQ ID NO: 37025 - DNA, 20 bp, Artificial Sequence
  Description of Artificial Sequence: Synthetic oligonucleotide
  Target: SCNA; (+) strand; PAM type: NRG; PAM sequence: TGG
tattcaacaagcataatttc

SEQ ID NO: 37026 - DNA, 20 bp, Artificial Sequence
  Description of Artificial Sequence: Synthetic oligonucleotide
  Target: SCNA; (+) strand; PAM type: NRG; PAM sequence: CAG
aacaagcataatttctggct

SEQ ID NO: 37027 - DNA, 20 bp, Artificial Sequence
  Description of Artificial Sequence: Synthetic oligonucleotide
  Target: SCNA; (+) strand; PAM type: NRG; PAM sequence: TAG
tggctcagtattctttgcat

SEQ ID NO: 37028 - DNA, 20 bp, Artificial Sequence
  Description of Artificial Sequence: Synthetic oligonucleotide
  Target: SCNA; (+) strand; PAM type: NRG; PAM sequence: AAG
gtattcactatgacattaat

SEQ ID NO: 37029 - DNA, 20 bp, Artificial Sequence
  Description of Artificial Sequence: Synthetic oligonucleotide
  Target: SCNA; (+) strand; PAM type: NRG; PAM sequence: TGG
ataagaattaaatgctactt

SEQ ID NO: 37030 - DNA, 20 bp, Artificial Sequence
  Description of Artificial Sequence: Synthetic oligonucleotide
  Target: SCNA; (+) strand; PAM type: NRG; PAM sequence: AAG
tgctactttggaattttcac

SEQ ID NO: 37031 - DNA, 20 bp, Artificial Sequence
  Description of Artificial Sequence: Synthetic oligonucleotide
  Target: SCNA; (+) strand; PAM type: NRG; PAM sequence: TAG
aattttcacaagtaactgct

SEQ ID NO: 37032 - DNA, 20 bp, Artificial Sequence
  Description of Artificial Sequence: Synthetic oligonucleotide
  Target: SCNA; (+) strand; PAM type: NRG; PAM sequence: CAG
aagtaactgcttagtgattc

SEQ ID NO: 37033 - DNA, 20 bp, Artificial Sequence
  Description of Artificial Sequence: Synthetic oligonucleotide
  Target: SCNA; (+) strand; PAM type: NRG; PAM sequence: TGG
ttagtgattccagaatcacc

SEQ ID NO: 37034 - DNA, 20 bp, Artificial Sequence
  Description of Artificial Sequence: Synthetic oligonucleotide
  Target: SCNA; (+) strand; PAM type: NRG; PAM sequence: TAG
gtgattccagaatcacctgg

SEQ ID NO: 37035 - DNA, 20 bp, Artificial Sequence
  Description of Artificial Sequence: Synthetic oligonucleotide
  Target: SCNA; (+) strand; PAM type: NRG; PAM sequence: AAG
attccagaatcacctggtag

SEQ ID NO: 37036 - DNA, 20 bp, Artificial Sequence
  Description of Artificial Sequence: Synthetic oligonucleotide
  Target: SCNA; (+) strand; PAM type: NRG; PAM sequence: AGG
ttccagaatcacctggtaga

SEQ ID NO: 37037 - DNA, 20 bp, Artificial Sequence
  Description of Artificial Sequence: Synthetic oligonucleotide
  Target: SCNA; (+) strand; PAM type: NRG; PAM sequence: GGG
tccagaatcacctggtagaa

SEQ ID NO: 37038 - DNA, 20 bp, Artificial Sequence
  Description of Artificial Sequence: Synthetic oligonucleotide
  Target: SCNA; (+) strand; PAM type: NRG; PAM sequence: GGG
ccagaatcacctggtagaag

SEQ ID NO: 37039 - DNA, 20 bp, Artificial Sequence
  Description of Artificial Sequence: Synthetic oligonucleotide
  Target: SCNA; (+) strand; PAM type: NRG; PAM sequence: AAG
aaaaatccaaatgttgttaa

SEQ ID NO: 37040 - DNA, 20 bp, Artificial Sequence
  Description of Artificial Sequence: Synthetic oligonucleotide
  Target: SCNA; (+) strand; PAM type: NRG; PAM sequence: GAG
ataaaaattacttcatatac

SEQ ID NO: 37041 - DNA, 20 bp, Artificial Sequence
  Description of Artificial Sequence: Synthetic oligonucleotide
  Target: SCNA; (+) strand; PAM type: NRG; PAM sequence: TAG
aattgttcattttctccttg

SEQ ID NO: 37042 - DNA, 20 bp, Artificial Sequence
  Description of Artificial Sequence: Synthetic oligonucleotide
  Target: SCNA; (+) strand; PAM type: NRG; PAM sequence: AAG
tgttcattttctccttgtag

SEQ ID NO: 37043 - DNA, 20 bp, Artificial Sequence
  Description of Artificial Sequence: Synthetic oligonucleotide
  Target: SCNA; (+) strand; PAM type: NRG; PAM sequence: GAG
agaagaacaattaaattgat

SEQ ID NO: 37044 - DNA, 20 bp, Artificial Sequence
  Description of Artificial Sequence: Synthetic oligonucleotide
  Target: SCNA; (+) strand; PAM type: NRG; PAM sequence: TGG
atttgcatgacaaatacaat

SEQ ID NO: 37045 - DNA, 20 bp, Artificial Sequence
  Description of Artificial Sequence: Synthetic oligonucleotide
  Target: SCNA; (+) strand; PAM type: NRG; PAM sequence: TAG
tgatttttaaatactttgaa

SEQ ID NO: 37046 - DNA, 20 bp, Artificial Sequence
  Description of Artificial Sequence: Synthetic oligonucleotide
  Target: SCNA; (+) strand; PAM type: NRG; PAM sequence: GAG
ttaaatactttgaatagttt

SEQ ID NO: 37047 - DNA, 20 bp, Artificial Sequence
  Description of Artificial Sequence: Synthetic oligonucleotide
  Target: SCNA; (+) strand; PAM type: NRG; PAM sequence: AAG
ttgaatagtttgagaaccaa

SEQ ID NO: 37048 - DNA, 20 bp, Artificial Sequence
  Description of Artificial Sequence: Synthetic oligonucleotide
  Target: SCNA; (+) strand; PAM type: NRG; PAM sequence: AAG
ttgacaatttcctcttgata

SEQ ID NO: 37049 - DNA, 20 bp, Artificial Sequence
  Description of Artificial Sequence: Synthetic oligonucleotide
  Target: SCNA; (+) strand; PAM type: NRG; PAM sequence: TAG
tttcctcttgataaagcaaa

SEQ ID NO: 37050 - DNA, 20 bp, Artificial Sequence
  Description of Artificial Sequence: Synthetic oligonucleotide
  Target: SCNA; (+) strand; PAM type: NRG; PAM sequence: AAG
aatgtctccctaaaacttaa

SEQ ID NO: 37051 - DNA, 20 bp, Artificial Sequence
  Description of Artificial Sequence: Synthetic oligonucleotide
  Target: SCNA; (+) strand; PAM type: NRG; PAM sequence: CAG
ccctaaaacttaaaagctaa

SEQ ID NO: 37052 - DNA, 20 bp, Artificial Sequence
  Description of Artificial Sequence: Synthetic oligonucleotide
  Target: SCNA; (+) strand; PAM type: NRG; PAM sequence: AAG
aagctaacagcctatgcttg

SEQ ID NO: 37053 - DNA, 20 bp, Artificial Sequence
  Description of Artificial Sequence: Synthetic oligonucleotide
  Target: SCNA; (+) strand; PAM type: NRG; PAM sequence: AGG
agctaacagcctatgcttga

SEQ ID NO: 37054 - DNA, 20 bp, Artificial Sequence
  Description of Artificial Sequence: Synthetic oligonucleotide
  Target: SCNA; (+) strand; PAM type: NRG; PAM sequence: GGG
gctaacagcctatgcttgaa

SEQ ID NO: 37055 - DNA, 20 bp, Artificial Sequence
  Description of Artificial Sequence: Synthetic oligonucleotide
  Target: SCNA; (+) strand; PAM type: NRG; PAM sequence: GGG
ctaacagcctatgcttgaag

SEQ ID NO: 37056 - DNA, 20 bp, Artificial Sequence
  Description of Artificial Sequence: Synthetic oligonucleotide
  Target: SCNA; (+) strand; PAM type: NRG; PAM sequence: CAG
acagcctatgcttgaagggg

SEQ ID NO: 37057 - DNA, 20 bp, Artificial Sequence
  Description of Artificial Sequence: Synthetic oligonucleotide
  Target: SCNA; (+) strand; PAM type: NRG; PAM sequence: AAG
ctatgcttgaaggggcagaa

SEQ ID NO: 37058 - DNA, 20 bp, Artificial Sequence
  Description of Artificial Sequence: Synthetic oligonucleotide
  Target: SCNA; (+) strand; PAM type: NRG; PAM sequence: AAG
cttgaaggggcagaaaagtc

SEQ ID NO: 37059 - DNA, 20 bp, Artificial Sequence
  Description of Artificial Sequence: Synthetic oligonucleotide
  Target: SCNA; (+) strand; PAM type: NRG; PAM sequence: TAG
tcaagttatttcttactttt

SEQ ID NO: 37060 - DNA, 20 bp, Artificial Sequence
  Description of Artificial Sequence: Synthetic oligonucleotide
  Target: SCNA; (+) strand; PAM type: NRG; PAM sequence: AGG
caagttatttcttacttttt

SEQ ID NO: 37061 - DNA, 20 bp, Artificial Sequence
  Description of Artificial Sequence: Synthetic oligonucleotide
  Target: SCNA; (+) strand; PAM type: NRG; PAM sequence: GGG
aagttatttcttacttttta

SEQ ID NO: 37062 - DNA, 20 bp, Artificial Sequence
  Description of Artificial Sequence: Synthetic oligonucleotide
  Target: SCNA; (+) strand; PAM type: NRG; PAM sequence: CAG
tcttactttttagggacaaa

SEQ ID NO: 37063 - DNA, 20 bp, Artificial Sequence
  Description of Artificial Sequence: Synthetic oligonucleotide
  Target: SCNA; (+) strand; PAM type: NRG; PAM sequence: AGG
cttactttttagggacaaac

SEQ ID NO: 37064 - DNA, 20 bp, Artificial Sequence
  Description of Artificial Sequence: Synthetic oligonucleotide
  Target: SCNA; (+) strand; PAM type: NRG; PAM sequence: TAG
aaacaggttgtttatcattg

SEQ ID NO: 37065 - DNA, 20 bp, Artificial Sequence
  Description of Artificial Sequence: Synthetic oligonucleotide
  Target: SCNA; (+) strand; PAM type: NRG; PAM sequence: TGG
aggttgtttatcattgtagt

SEQ ID NO: 37066 - DNA, 20 bp, Artificial Sequence
  Description of Artificial Sequence: Synthetic oligonucleotide
  Target: SCNA; (+) strand; PAM type: NRG; PAM sequence: GAG
gttgtttatcattgtagttg

SEQ ID NO: 37067 - DNA, 20 bp, Artificial Sequence
  Description of Artificial Sequence: Synthetic oligonucleotide
  Target: SCNA; (+) strand; PAM type: NRG; PAM sequence: AAG
ttatcattgtagttggagac

SEQ ID NO: 37068 - DNA, 20 bp, Artificial Sequence
  Description of Artificial Sequence: Synthetic oligonucleotide
  Target: SCNA; (+) strand; PAM type: NRG; PAM sequence: TGG
gtagttggagacaagatata

SEQ ID NO: 37069 - DNA, 20 bp, Artificial Sequence
  Description of Artificial Sequence: Synthetic oligonucleotide
  Target: SCNA; (+) strand; PAM type: NRG; PAM sequence: AAG
tgcccgtcacctaaacatat

SEQ ID NO: 37070 - DNA, 20 bp, Artificial Sequence
  Description of Artificial Sequence: Synthetic oligonucleotide
  Target: SCNA; (+) strand; PAM type: NRG; PAM sequence: AAG
catataagtgctatttttcc

SEQ ID NO: 37071 - DNA, 20 bp, Artificial Sequence
  Description of Artificial Sequence: Synthetic oligonucleotide
  Target: SCNA; (+) strand; PAM type: NRG; PAM sequence: AAG
aagtttattatcaaattaca

SEQ ID NO: 37072 - DNA, 20 bp, Artificial Sequence
  Description of Artificial Sequence: Synthetic oligonucleotide
  Target: SCNA; (+) strand; PAM type: NRG; PAM sequence: TGG
tttattatcaaattacaaag

SEQ ID NO: 37073 - DNA, 20 bp, Artificial Sequence
  Description of Artificial Sequence: Synthetic oligonucleotide
  Target: SCNA; (+) strand; PAM type: NRG; PAM sequence: TGG
caaattacaaagtggaaata

SEQ ID NO: 37074 - DNA, 20 bp, Artificial Sequence
  Description of Artificial Sequence: Synthetic oligonucleotide
  Target: SCNA; (+) strand; PAM type: NRG; PAM sequence: CAG
tacaaagtggaaatatggct

SEQ ID NO: 37075 - DNA, 20 bp, Artificial Sequence
  Description of Artificial Sequence: Synthetic oligonucleotide
  Target: SCNA; (+) strand; PAM type: NRG; PAM sequence: TGG
aagtggaaatatggctcaga

SEQ ID NO: 37076 - DNA, 20 bp, Artificial Sequence
  Description of Artificial Sequence: Synthetic oligonucleotide
  Target: SCNA; (+) strand; PAM type: NRG; PAM sequence: TAG
tggaaatatggctcagatgg

SEQ ID NO: 37077 - DNA, 20 bp, Artificial Sequence
  Description of Artificial Sequence: Synthetic oligonucleotide
  Target: SCNA; (+) strand; PAM type: NRG; PAM sequence: TAG
aaatatggctcagatggtag

SEQ ID NO: 37078 - DNA, 20 bp, Artificial Sequence
  Description of Artificial Sequence: Synthetic oligonucleotide
  Target: SCNA; (+) strand; PAM type: NRG; PAM sequence: GAG
atatggctcagatggtagta

SEQ ID NO: 37079 - DNA, 20 bp, Artificial Sequence
  Description of Artificial Sequence: Synthetic oligonucleotide
  Target: SCNA; (+) strand; PAM type: NRG; PAM sequence: AGG
tatggctcagatggtagtag

SEQ ID NO: 37080 - DNA, 20 bp, Artificial Sequence
  Description of Artificial Sequence: Synthetic oligonucleotide
  Target: SCNA; (+) strand; PAM type: NRG; PAM sequence: AAG
gtagaggtaaaaacaaacct

SEQ ID NO: 37081 - DNA, 20 bp, Artificial Sequence
  Description of Artificial Sequence: Synthetic oligonucleotide
  Target: SCNA; (+) strand; PAM type: NRG; PAM sequence: AAG
aaaacaaacctaagtcatgt

SEQ ID NO: 37082 - DNA, 20 bp, Artificial Sequence
  Description of Artificial Sequence: Synthetic oligonucleotide
  Target: SCNA; (+) strand; PAM type: NRG; PAM sequence: GAG
aaacctaagtcatgtaagat

SEQ ID NO: 37083 - DNA, 20 bp, Artificial Sequence
  Description of Artificial Sequence: Synthetic oligonucleotide
  Target: SCNA; (+) strand; PAM type: NRG; PAM sequence: AAG
ctaagtcatgtaagatgagt

SEQ ID NO: 37084 - DNA, 20 bp, Artificial Sequence
  Description of Artificial Sequence: Synthetic oligonucleotide
  Target: SCNA; (+) strand; PAM type: NRG; PAM sequence: AAG
atgtaagatgagtaagtcta

SEQ ID NO: 37085 - DNA, 20 bp, Artificial Sequence
  Description of Artificial Sequence: Synthetic oligonucleotide
  Target: SCNA; (+) strand; PAM type: NRG; PAM sequence: AAG
aagatctaatgtacaacatg

SEQ ID NO: 37086 - DNA, 20 bp, Artificial Sequence
  Description of Artificial Sequence: Synthetic oligonucleotide
  Target: SCNA; (+) strand; PAM type: NRG; PAM sequence: TAG
gattattgttaataatattg

SEQ ID NO: 37087 - DNA, 20 bp, Artificial Sequence
  Description of Artificial Sequence: Synthetic oligonucleotide
  Target: SCNA; (+) strand; PAM type: NRG; PAM sequence: TGG
aataatattgtagtgcatac

SEQ ID NO: 37088 - DNA, 20 bp, Artificial Sequence
  Description of Artificial Sequence: Synthetic oligonucleotide
  Target: SCNA; (+) strand; PAM type: NRG; PAM sequence: AAG
gtgcatactggtaatttttc

SEQ ID NO: 37089 - DNA, 20 bp, Artificial Sequence
  Description of Artificial Sequence: Synthetic oligonucleotide
  Target: SCNA; (+) strand; PAM type: NRG; PAM sequence: AAG
atactggtaatttttcaaga

SEQ ID NO: 37090 - DNA, 20 bp, Artificial Sequence
  Description of Artificial Sequence: Synthetic oligonucleotide
  Target: SCNA; (+) strand; PAM type: NRG; PAM sequence: TAG
ctggtaatttttcaagaaag

SEQ ID NO: 37091 - DNA, 20 bp, Artificial Sequence
  Description of Artificial Sequence: Synthetic oligonucleotide
  Target: SCNA; (+) strand; PAM type: NRG; PAM sequence: TAG
tttttcaagaaagtagattt

SEQ ID NO: 37092 - DNA, 20 bp, Artificial Sequence
  Description of Artificial Sequence: Synthetic oligonucleotide
  Target: SCNA; (+) strand; PAM type: NRG; PAM sequence: AGG
ttttcaagaaagtagatttt

SEQ ID NO: 37093 - DNA, 20 bp, Artificial Sequence
  Description of Artificial Sequence: Synthetic oligonucleotide
  Target: SCNA; (+) strand; PAM type: NRG; PAM sequence: TAG
aagtagattttaggcactga

SEQ ID NO: 37094 - DNA, 20 bp, Artificial Sequence
  Description of Artificial Sequence: Synthetic oligonucleotide
  Target: SCNA; (+) strand; PAM type: NRG; PAM sequence: AAG
tttaggcactgatagtaaaa

SEQ ID NO: 37095 - DNA, 20 bp, Artificial Sequence
  Description of Artificial Sequence: Synthetic oligonucleotide
  Target: SCNA; (+) strand; PAM type: NRG; PAM sequence: AAG
gcactgatagtaaaaaagca

SEQ ID NO: 37096 - DNA, 20 bp, Artificial Sequence
  Description of Artificial Sequence: Synthetic oligonucleotide
  Target: SCNA; (+) strand; PAM type: NRG; PAM sequence: TGG
caaagataaccatatgatga

SEQ ID NO: 37097 - DNA, 20 bp, Artificial Sequence
  Description of Artificial Sequence: Synthetic oligonucleotide
  Target: SCNA; (+) strand; PAM type: NRG; PAM sequence: GGG
aaagataaccatatgatgat

SEQ ID NO: 37098 - DNA, 20 bp, Artificial Sequence
  Description of Artificial Sequence: Synthetic oligonucleotide
  Target: SCNA; (+) strand; PAM type: NRG; PAM sequence: TAG
tatgttaatttgcttcaatg

SEQ ID NO: 37099 - DNA, 20 bp, Artificial Sequence
  Description of Artificial Sequence: Synthetic oligonucleotide
  Target: SCNA; (+) strand; PAM type: NRG; PAM sequence: AGG
atgttaatttgcttcaatgt

SEQ ID NO: 37100 - DNA, 20 bp, Artificial Sequence
  Description of Artificial Sequence: Synthetic oligonucleotide
  Target: SCNA; (+) strand; PAM type: NRG; PAM sequence: AAG
attatatatatatataaata

SEQ ID NO: 37101 - DNA, 20 bp, Artificial Sequence
  Description of Artificial Sequence: Synthetic oligonucleotide
  Target: SCNA; (+) strand; PAM type: NRG; PAM sequence: AAG
atatatatataaataaagat

SEQ ID NO: 37102 - DNA, 20 bp, Artificial Sequence
  Description of Artificial Sequence: Synthetic oligonucleotide
  Target: SCNA; (+) strand; PAM type: NRG; PAM sequence: AAG
aataattttacaatacaact

SEQ ID NO: 37103 - DNA, 20 bp, Artificial Sequence
  Description of Artificial Sequence: Synthetic oligonucleotide
  Target: SCNA; (+) strand; PAM type: NRG; PAM sequence: AAG
ttacaatacaactaagtttg

SEQ ID NO: 37104 - DNA, 20 bp, Artificial Sequence
  Description of Artificial Sequence: Synthetic oligonucleotide
  Target: SCNA; (+) strand; PAM type: NRG; PAM sequence: CAG
tgaagtcatcctacatttaa

SEQ ID NO: 37105 - DNA, 20 bp, Artificial Sequence
  Description of Artificial Sequence: Synthetic oligonucleotide
  Target: SCNA; (+) strand; PAM type: NRG; PAM sequence: CAG
cagtatctcattaatgaaac

SEQ ID NO: 37106 - DNA, 20 bp, Artificial Sequence
  Description of Artificial Sequence: Synthetic oligonucleotide
  Target: SCNA; (+) strand; PAM type: NRG; PAM sequence: AAG
aattatcatgccatctttgc

SEQ ID NO: 37107 - DNA, 20 bp, Artificial Sequence
  Description of Artificial Sequence: Synthetic oligonucleotide
  Target: SCNA; (+) strand; PAM type: NRG; PAM sequence: AAG
tcatgccatctttgcaagtg

SEQ ID NO: 37108 - DNA, 20 bp, Artificial Sequence
  Description of Artificial Sequence: Synthetic oligonucleotide
  Target: SCNA; (+) strand; PAM type: NRG; PAM sequence: AGG
catgccatctttgcaagtga

SEQ ID NO: 37109 - DNA, 20 bp, Artificial Sequence
  Description of Artificial Sequence: Synthetic oligonucleotide
  Target: SCNA; (+) strand; PAM type: NRG; PAM sequence: TAG
aagtgaaggaatactaacaa

SEQ ID NO: 37110 - DNA, 20 bp, Artificial Sequence
  Description of Artificial Sequence: Synthetic oligonucleotide
  Target: SCNA; (+) strand; PAM type: NRG; PAM sequence: TAG
ggaatactaacaatagacgt

SEQ ID NO: 37111 - DNA, 20 bp, Artificial Sequence
  Description of Artificial Sequence: Synthetic oligonucleotide
  Target: SCNA; (+) strand; PAM type: NRG; PAM sequence: CAG
aatagacgttagcacatgca

SEQ ID NO: 37112 - DNA, 20 bp, Artificial Sequence
  Description of Artificial Sequence: Synthetic oligonucleotide
  Target: SCNA; (+) strand; PAM type: NRG; PAM sequence: TGG
tagcacatgcacagtaaaaa

SEQ ID NO: 37113 - DNA, 20 bp, Artificial Sequence
  Description of Artificial Sequence: Synthetic oligonucleotide
  Target: SCNA; (+) strand; PAM type: NRG; PAM sequence: GGG
agcacatgcacagtaaaaat

SEQ ID NO: 37114 - DNA, 20 bp, Artificial Sequence
  Description of Artificial Sequence: Synthetic oligonucleotide
  Target: SCNA; (+) strand; PAM type: NRG; PAM sequence: CAG
gcacagtaaaaatgggttca

SEQ ID NO: 37115 - DNA, 20 bp, Artificial Sequence
  Description of Artificial Sequence: Synthetic oligonucleotide
  Target: SCNA; (+) strand; PAM type: NRG; PAM sequence: AAG
cagtaaaaatgggttcacag

SEQ ID NO: 37116 - DNA, 20 bp, Artificial Sequence
  Description of Artificial Sequence: Synthetic oligonucleotide
  Target: SCNA; (+) strand; PAM type: NRG; PAM sequence: TGG
aaaatgggttcacagaagtg

SEQ ID NO: 37117 - DNA, 20 bp, Artificial Sequence
  Description of Artificial Sequence: Synthetic oligonucleotide
  Target: SCNA; (+) strand; PAM type: NRG; PAM sequence: CAG
tggtcattgctctcacgttg

SEQ ID NO: 37118 - DNA, 20 bp, Artificial Sequence
  Description of Artificial Sequence: Synthetic oligonucleotide
  Target: SCNA; (+) strand; PAM type: NRG; PAM sequence: CAG
tgctctcacgttgcagtcca

SEQ ID NO: 37119 - DNA, 20 bp, Artificial Sequence
  Description of Artificial Sequence: Synthetic oligonucleotide
  Target: SCNA; (+) strand; PAM type: NRG; PAM sequence: AAG
gttgcagtccacagaatttt

SEQ ID NO: 37120 - DNA, 20 bp, Artificial Sequence
  Description of Artificial Sequence: Synthetic oligonucleotide
  Target: SCNA; (+) strand; PAM type: NRG; PAM sequence: AAG
agctatgttaaacatttatg

SEQ ID NO: 37121 - DNA, 20 bp, Artificial Sequence
  Description of Artificial Sequence: Synthetic oligonucleotide
  Target: SCNA; (+) strand; PAM type: NRG; PAM sequence: AGG
gctatgttaaacatttatga

SEQ ID NO: 37122 - DNA, 20 bp, Artificial Sequence
  Description of Artificial Sequence: Synthetic oligonucleotide
  Target: SCNA; (+) strand; PAM type: NRG; PAM sequence: AAG
ttaaacatttatgaaggaac

SEQ ID NO: 37123 - DNA, 20 bp, Artificial Sequence
  Description of Artificial Sequence: Synthetic oligonucleotide
  Target: SCNA; (+) strand; PAM type: NRG; PAM sequence: AGG
taaacatttatgaaggaaca

SEQ ID NO: 37124 - DNA, 20 bp, Artificial Sequence
  Description of Artificial Sequence: Synthetic oligonucleotide
  Target: SCNA; (+) strand; PAM type: NRG; PAM sequence: GGG
aaacatttatgaaggaacaa

SEQ ID NO: 37125 - DNA, 20 bp, Artificial Sequence
  Description of Artificial Sequence: Synthetic oligonucleotide
  Target: SCNA; (+) strand; PAM type: NRG; PAM sequence: AAG
catttatgaaggaacaaggg

SEQ ID NO: 37126 - DNA, 20 bp, Artificial Sequence
  Description of Artificial Sequence: Synthetic oligonucleotide
  Target: SCNA; (+) strand; PAM type: NRG; PAM sequence: TGG
tatgatttaaacctatttgt

SEQ ID NO: 37127 - DNA, 20 bp, Artificial Sequence
  Description of Artificial Sequence: Synthetic oligonucleotide
  Target: SCNA; (+) strand; PAM type: NRG; PAM sequence: CAG
tttgttggtgtaacgtgatg

SEQ ID NO: 37128 - DNA, 20 bp, Artificial Sequence
  Description of Artificial Sequence: Synthetic oligonucleotide
  Target: SCNA; (+) strand; PAM type: NRG; PAM sequence: CAG
aacaaaactatcatcgcaat

SEQ ID NO: 37129 - DNA, 20 bp, Artificial Sequence
  Description of Artificial Sequence: Synthetic oligonucleotide
  Target: SCNA; (+) strand; PAM type: NRG; PAM sequence: TGG
agttctttgaatattaaaat

SEQ ID NO: 37130 - DNA, 20 bp, Artificial Sequence
  Description of Artificial Sequence: Synthetic oligonucleotide
  Target: SCNA; (+) strand; PAM type: NRG; PAM sequence: TAG
gaatattaaaattggatgta

SEQ ID NO: 37131 - DNA, 20 bp, Artificial Sequence
  Description of Artificial Sequence: Synthetic oligonucleotide
  Target: SCNA; (+) strand; PAM type: NRG; PAM sequence: TGG
gtatagtcatgcatatgttg

SEQ ID NO: 37132 - DNA, 20 bp, Artificial Sequence
  Description of Artificial Sequence: Synthetic oligonucleotide
  Target: SCNA; (+) strand; PAM type: NRG; PAM sequence: GGG
tatagtcatgcatatgttgt

SEQ ID NO: 37133 - DNA, 20 bp, Artificial Sequence
  Description of Artificial Sequence: Synthetic oligonucleotide
  Target: SCNA; (+) strand; PAM type: NRG; PAM sequence: CAG
ttgtgggattgtaatgctta

SEQ ID NO: 37134 - DNA, 20 bp, Artificial Sequence
  Description of Artificial Sequence: Synthetic oligonucleotide
  Target: SCNA; (+) strand; PAM type: NRG; PAM sequence: AAG
gactattaaccactgatcct

SEQ ID NO: 37135 - DNA, 20 bp, Artificial Sequence
  Description of Artificial Sequence: Synthetic oligonucleotide
  Target: SCNA; (+) strand; PAM type: NRG; PAM sequence: TGG
taaccactgatcctaagatt

SEQ ID NO: 37136 - DNA, 20 bp, Artificial Sequence
  Description of Artificial Sequence: Synthetic oligonucleotide
  Target: SCNA; (+) strand; PAM type: NRG; PAM sequence: GGG
aaccactgatcctaagattt

SEQ ID NO: 37137 - DNA, 20 bp, Artificial Sequence
  Description of Artificial Sequence: Synthetic oligonucleotide
  Target: SCNA; (+) strand; PAM type: NRG; PAM sequence: TGG
cactgatcctaagatttggg

SEQ ID NO: 37138 - DNA, 20 bp, Artificial Sequence
  Description of Artificial Sequence: Synthetic oligonucleotide
  Target: SCNA; (+) strand; PAM type: NRG; PAM sequence: AAG
tgatcctaagatttgggtgg

SEQ ID NO: 37139 - DNA, 20 bp, Artificial Sequence
  Description of Artificial Sequence: Synthetic oligonucleotide
  Target: SCNA; (+) strand; PAM type: NRG; PAM sequence: AAG
aagtatttgtctctatatct

SEQ ID NO: 37140 - DNA, 20 bp, Artificial Sequence
  Description of Artificial Sequence: Synthetic oligonucleotide
  Target: SCNA; (+) strand; PAM type: NRG; PAM sequence: CAG
tatttgtctctatatctaag

SEQ ID NO: 37141 - DNA, 20 bp, Artificial Sequence
  Description of Artificial Sequence: Synthetic oligonucleotide
  Target: SCNA; (+) strand; PAM type: NRG; PAM sequence: TGG
tctaagcagctaaaatatca

SEQ ID NO: 37142 - DNA, 20 bp, Artificial Sequence
  Description of Artificial Sequence: Synthetic oligonucleotide
  Target: SCNA; (+) strand; PAM type: NRG; PAM sequence: GAG
tactatctgtgcgtgtatgt

SEQ ID NO: 37143 - DNA, 20 bp, Artificial Sequence
  Description of Artificial Sequence: Synthetic oligonucleotide
  Target: SCNA; (+) strand; PAM type: NRG; PAM sequence: AGG
actatctgtgcgtgtatgtg

SEQ ID NO: 37144 - DNA, 20 bp, Artificial Sequence
  Description of Artificial Sequence: Synthetic oligonucleotide
  Target: SCNA; (+) strand; PAM type: NRG; PAM sequence: CAG
gcgtgtatgtgaggtaattt

SEQ ID NO: 37145 - DNA, 20 bp, Artificial Sequence
  Description of Artificial Sequence: Synthetic oligonucleotide
  Target: SCNA; (+) strand; PAM type: NRG; PAM sequence: GAG
tttaatgtatgatatttatt

SEQ ID NO: 37146 - DNA, 20 bp, Artificial Sequence
  Description of Artificial Sequence: Synthetic oligonucleotide
  Target: SCNA; (+) strand; PAM type: NRG; PAM sequence: GAG
taatgtatgatatttattga

SEQ ID NO: 37147 - DNA, 20 bp, Artificial Sequence
  Description of Artificial Sequence: Synthetic oligonucleotide
  Target: SCNA; (+) strand; PAM type: NRG; PAM sequence: CAG
atgatatttattgagagcat

SEQ ID NO: 37148 - DNA, 20 bp, Artificial Sequence
  Description of Artificial Sequence: Synthetic oligonucleotide
  Target: SCNA; (+) strand; PAM type: NRG; PAM sequence: AAG
catcagcctctctcatttct

SEQ ID NO: 37149 - DNA, 20 bp, Artificial Sequence
  Description of Artificial Sequence: Synthetic oligonucleotide
  Target: SCNA; (+) strand; PAM type: NRG; PAM sequence: TGG
aaatctctttttttccatga

SEQ ID NO: 37150 - DNA, 20 bp, Artificial Sequence
  Description of Artificial Sequence: Synthetic oligonucleotide
  Target: SCNA; (+) strand; PAM type: NRG; PAM sequence: CAG
gtaacaaaccatattgttct

SEQ ID NO: 37151 - DNA, 20 bp, Artificial Sequence
  Description of Artificial Sequence: Synthetic oligonucleotide
  Target: SCNA; (+) strand; PAM type: NRG; PAM sequence: GAG
aacaaaccatattgttctca

SEQ ID NO: 37152 - DNA, 20 bp, Artificial Sequence
  Description of Artificial Sequence: Synthetic oligonucleotide
  Target: SCNA; (+) strand; PAM type: NRG; PAM sequence: CAG
catattgttctcagagacca

SEQ ID NO: 37153 - DNA, 20 bp, Artificial Sequence
  Description of Artificial Sequence: Synthetic oligonucleotide
  Target: SCNA; (+) strand; PAM type: NRG; PAM sequence: CAG
cacagctgctccctttttcc

SEQ ID NO: 37154 - DNA, 20 bp, Artificial Sequence
  Description of Artificial Sequence: Synthetic oligonucleotide
  Target: SCNA; (+) strand; PAM type: NRG; PAM sequence: AGG
acagctgctccctttttccc

SEQ ID NO: 37155 - DNA, 20 bp, Artificial Sequence
  Description of Artificial Sequence: Synthetic oligonucleotide
  Target: SCNA; (+) strand; PAM type: NRG; PAM sequence: GGG
cagctgctccctttttccca

SEQ ID NO: 37156 - DNA, 20 bp, Artificial Sequence
  Description of Artificial Sequence: Synthetic oligonucleotide
  Target: SCNA; (+) strand; PAM type: NRG; PAM sequence: CAG
ttttcccagggtaaatatgt

SEQ ID NO: 37157 - DNA, 20 bp, Artificial Sequence
  Description of Artificial Sequence: Synthetic oligonucleotide
  Target: SCNA; (+) strand; PAM type: NRG; PAM sequence: CGG
gggtaaatatgtcagtctcc

SEQ ID NO: 37158 - DNA, 20 bp, Artificial Sequence
  Description of Artificial Sequence: Synthetic oligonucleotide
  Target: SCNA; (+) strand; PAM type: NRG; PAM sequence: AAG
cctgaactgcccatttcttg

SEQ ID NO: 37159 - DNA, 20 bp, Artificial Sequence
  Description of Artificial Sequence: Synthetic oligonucleotide
  Target: SCNA; (+) strand; PAM type: NRG; PAM sequence: AGG
ctgaactgcccatttcttga

SEQ ID NO: 37160 - DNA, 20 bp, Artificial Sequence
  Description of Artificial Sequence: Synthetic oligonucleotide
  Target: SCNA; (+) strand; PAM type: NRG; PAM sequence: CAG
aactgcccatttcttgaagg

SEQ ID NO: 37161 - DNA, 20 bp, Artificial Sequence
  Description of Artificial Sequence: Synthetic oligonucleotide
  Target: SCNA; (+) strand; PAM type: NRG; PAM sequence: AGG
actgcccatttcttgaaggc

SEQ ID NO: 37162 - DNA, 20 bp, Artificial Sequence
  Description of Artificial Sequence: Synthetic oligonucleotide
  Target: SCNA; (+) strand; PAM type: NRG; PAM sequence: GAG
tgcccatttcttgaaggcag

SEQ ID NO: 37163 - DNA, 20 bp, Artificial Sequence
  Description of Artificial Sequence: Synthetic oligonucleotide
  Target: SCNA; (+) strand; PAM type: NRG; PAM sequence: CAG
ggagccacccatatgttact

SEQ ID NO: 37164 - DNA, 20 bp, Artificial Sequence
  Description of Artificial Sequence: Synthetic oligonucleotide
  Target: SCNA; (+) strand; PAM type: NRG; PAM sequence: TGG
actcagttttgtatttctca

SEQ ID NO: 37165 - DNA, 20 bp, Artificial Sequence
  Description of Artificial Sequence: Synthetic oligonucleotide
  Target: SCNA; (+) strand; PAM type: NRG; PAM sequence: CAG
tttgtatttctcatggtgcc

SEQ ID NO: 37166 - DNA, 20 bp, Artificial Sequence
  Description of Artificial Sequence: Synthetic oligonucleotide
  Target: SCNA; (+) strand; PAM type: NRG; PAM sequence: GAG
atttctcatggtgcccagct

SEQ ID NO: 37167 - DNA, 20 bp, Artificial Sequence
  Description of Artificial Sequence: Synthetic oligonucleotide
  Target: SCNA; (+) strand; PAM type: NRG; PAM sequence: TGG
atggtgcccagctgagtgtc

SEQ ID NO: 37168 - DNA, 20 bp, Artificial Sequence
  Description of Artificial Sequence: Synthetic oligonucleotide
  Target: SCNA; (+) strand; PAM type: NRG; PAM sequence: AAG
ctgagtgtctggcacatatt

SEQ ID NO: 37169 - DNA, 20 bp, Artificial Sequence
  Description of Artificial Sequence: Synthetic oligonucleotide
  Target: SCNA; (+) strand; PAM type: NRG; PAM sequence: CAG
tctggcacatattaagtact

SEQ ID NO: 37170 - DNA, 20 bp, Artificial Sequence
  Description of Artificial Sequence: Synthetic oligonucleotide
  Target: SCNA; (+) strand; PAM type: NRG; PAM sequence: TAG
aatgatttttaatgaaaaca

SEQ ID NO: 37171 - DNA, 20 bp, Artificial Sequence
  Description of Artificial Sequence: Synthetic oligonucleotide
  Target: SCNA; (+) strand; PAM type: NRG; PAM sequence: CAG
gatttttaatgaaaacatag

SEQ ID NO: 37172 - DNA, 20 bp, Artificial Sequence
  Description of Artificial Sequence: Synthetic oligonucleotide
  Target: SCNA; (+) strand; PAM type: NRG; PAM sequence: AAG
tttaatgaaaacatagcagt

SEQ ID NO: 37173 - DNA, 20 bp, Artificial Sequence
  Description of Artificial Sequence: Synthetic oligonucleotide
  Target: SCNA; (+) strand; PAM type: NRG; PAM sequence: CAG
tataattttatacataatta

SEQ ID NO: 37174 - DNA, 20 bp, Artificial Sequence
  Description of Artificial Sequence: Synthetic oligonucleotide
  Target: SCNA; (+) strand; PAM type: NRG; PAM sequence: GAG
taattttatacataattaca

SEQ ID NO: 37175 - DNA, 20 bp, Artificial Sequence
  Description of Artificial Sequence: Synthetic oligonucleotide
  Target: SCNA; (+) strand; PAM type: NRG; PAM sequence: TAG
ttacagagtactttcccacc

SEQ ID NO: 37176 - DNA, 20 bp, Artificial Sequence
  Description of Artificial Sequence: Synthetic oligonucleotide
  Target: SCNA; (+) strand; PAM type: NRG; PAM sequence: CAG
ctttcccacctagaacctta

SEQ ID NO: 37177 - DNA, 20 bp, Artificial Sequence
  Description of Artificial Sequence: Synthetic oligonucleotide
  Target: SCNA; (+) strand; PAM type: NRG; PAM sequence: AGG
tttcccacctagaaccttac

SEQ ID NO: 37178 - DNA, 20 bp, Artificial Sequence
  Description of Artificial Sequence: Synthetic oligonucleotide
  Target: SCNA; (+) strand; PAM type: NRG; PAM sequence: AAG
acctagaaccttacaggatt

SEQ ID NO: 37179 - DNA, 20 bp, Artificial Sequence
  Description of Artificial Sequence: Synthetic oligonucleotide
  Target: SCNA; (+) strand; PAM type: NRG; PAM sequence: AGG
cctagaaccttacaggatta

SEQ ID NO: 37180 - DNA, 20 bp, Artificial Sequence
  Description of Artificial Sequence: Synthetic oligonucleotide
  Target: SCNA; (+) strand; PAM type: NRG; PAM sequence: GGG
ctagaaccttacaggattaa

SEQ ID NO: 37181 - DNA, 20 bp, Artificial Sequence
  Description of Artificial Sequence: Synthetic oligonucleotide
  Target: SCNA; (+) strand; PAM type: NRG; PAM sequence: TAG
cttacaggattaagggtcat

SEQ ID NO: 37182 - DNA, 20 bp, Artificial Sequence
  Description of Artificial Sequence: Synthetic oligonucleotide
  Target: SCNA; (+) strand; PAM type: NRG; PAM sequence: CAG
ctattcatccatcttgaacc

SEQ ID NO: 37183 - DNA, 20 bp, Artificial Sequence
  Description of Artificial Sequence: Synthetic oligonucleotide
  Target: SCNA; (+) strand; PAM type: NRG; PAM sequence: CAG
tgaacccagtgaaattttgt

SEQ ID NO: 37184 - DNA, 20 bp, Artificial Sequence
  Description of Artificial Sequence: Synthetic oligonucleotide
  Target: SCNA; (+) strand; PAM type: NRG; PAM sequence: AAG
gtgaaattttgtcagataca

SEQ ID NO: 37185 - DNA, 20 bp, Artificial Sequence
  Description of Artificial Sequence: Synthetic oligonucleotide
  Target: SCNA; (+) strand; PAM type: NRG; PAM sequence: AAG
aattttgtcagatacaaaga

SEQ ID NO: 37186 - DNA, 20 bp, Artificial Sequence
  Description of Artificial Sequence: Synthetic oligonucleotide
  Target: SCNA; (+) strand; PAM type: NRG; PAM sequence: AGG
attttgtcagatacaaagaa

SEQ ID NO: 37187 - DNA, 20 bp, Artificial Sequence
  Description of Artificial Sequence: Synthetic oligonucleotide
  Target: SCNA; (+) strand; PAM type: NRG; PAM sequence: AAG
gccataataattgtgtttct

SEQ ID NO: 37188 - DNA, 20 bp, Artificial Sequence
  Description of Artificial Sequence: Synthetic oligonucleotide
  Target: SCNA; (+) strand; PAM type: NRG; PAM sequence: TGG
ataataattgtgtttctaag

SEQ ID NO: 37189 - DNA, 20 bp, Artificial Sequence
  Description of Artificial Sequence: Synthetic oligonucleotide
  Target: SCNA; (+) strand; PAM type: NRG; PAM sequence: GGG
taataattgtgtttctaagt

SEQ ID NO: 37190 - DNA, 20 bp, Artificial Sequence
  Description of Artificial Sequence: Synthetic oligonucleotide
  Target: SCNA; (+) strand; PAM type: NRG; PAM sequence: GGG
aataattgtgtttctaagtg

SEQ ID NO: 37191 - DNA, 20 bp, Artificial Sequence
  Description of Artificial Sequence: Synthetic oligonucleotide
  Target: SCNA; (+) strand; PAM type: NRG; PAM sequence: CAG
attgtgtttctaagtgggga

SEQ ID NO: 37192 - DNA, 20 bp, Artificial Sequence
  Description of Artificial Sequence: Synthetic oligonucleotide
  Target: SCNA; (+) strand; PAM type: NRG; PAM sequence: TAG
ggggacagtttatgtaccat

SEQ ID NO: 37193 - DNA, 20 bp, Artificial Sequence
  Description of Artificial Sequence: Synthetic oligonucleotide
  Target: SCNA; (+) strand; PAM type: NRG; PAM sequence: TGG
gacagtttatgtaccattag

SEQ ID NO: 37194 - DNA, 20 bp, Artificial Sequence
  Description of Artificial Sequence: Synthetic oligonucleotide
  Target: SCNA; (+) strand; PAM type: NRG; PAM sequence: GGG
acagtttatgtaccattagt

SEQ ID NO: 37195 - DNA, 20 bp, Artificial Sequence
  Description of Artificial Sequence: Synthetic oligonucleotide
  Target: SCNA; (+) strand; PAM type: NRG; PAM sequence: GAG
ccattagtgggctctcatat

SEQ ID NO: 37196 - DNA, 20 bp, Artificial Sequence
  Description of Artificial Sequence: Synthetic oligonucleotide
  Target: SCNA; (+) strand; PAM type: NRG; PAM sequence: GAG
tagtgggctctcatatgagt

SEQ ID NO: 37197 - DNA, 20 bp, Artificial Sequence
  Description of Artificial Sequence: Synthetic oligonucleotide
  Target: SCNA; (+) strand; PAM type: NRG; PAM sequence: TAG
atgtcactgttacatacctt

SEQ ID NO: 37198 - DNA, 20 bp, Artificial Sequence
  Description of Artificial Sequence: Synthetic oligonucleotide
  Target: SCNA; (+) strand; PAM type: NRG; PAM sequence: CAG
aaatttttctttaataatca

SEQ ID NO: 37199 - DNA, 20 bp, Artificial Sequence
  Description of Artificial Sequence: Synthetic oligonucleotide
  Target: SCNA; (+) strand; PAM type: NRG; PAM sequence: AAG
atcacagtatgctttaatct

SEQ ID NO: 37200 - DNA, 20 bp, Artificial Sequence
  Description of Artificial Sequence: Synthetic oligonucleotide
  Target: SCNA; (+) strand; PAM type: NRG; PAM sequence: TAG
tatgctttaatctaagatta

SEQ ID NO: 37201 - DNA, 20 bp, Artificial Sequence
  Description of Artificial Sequence: Synthetic oligonucleotide
  Target: SCNA; (+) strand; PAM type: NRG; PAM sequence: CAG
ttaatctaagattatagtgc

SEQ ID NO: 37202 - DNA, 20 bp, Artificial Sequence
  Description of Artificial Sequence: Synthetic oligonucleotide
  Target: SCNA; (+) strand; PAM type: NRG; PAM sequence: TAG
taagattatagtgccagtaa

SEQ ID NO: 37203 - DNA, 20 bp, Artificial Sequence
  Description of Artificial Sequence: Synthetic oligonucleotide
  Target: SCNA; (+) strand; PAM type: NRG; PAM sequence: CAG
ctcgaaacacaaatacaaat

SEQ ID NO: 37204 - DNA, 20 bp, Artificial Sequence
  Description of Artificial Sequence: Synthetic oligonucleotide
  Target: SCNA; (+) strand; PAM type: NRG; PAM sequence: AGG
tcgaaacacaaatacaaatc

SEQ ID NO: 37205 - DNA, 20 bp, Artificial Sequence
  Description of Artificial Sequence: Synthetic oligonucleotide
  Target: SCNA; (+) strand; PAM type: NRG; PAM sequence: AAG
aggcaattcattgtgtctca

SEQ ID NO: 37206 - DNA, 20 bp, Artificial Sequence
  Description of Artificial Sequence: Synthetic oligonucleotide
  Target: SCNA; (+) strand; PAM type: NRG; PAM sequence: TAG
gtgtctcaaagcttttaatt

SEQ ID NO: 37207 - DNA, 20 bp, Artificial Sequence
  Description of Artificial Sequence: Synthetic oligonucleotide
  Target: SCNA; (+) strand; PAM type: NRG; PAM sequence: AGG
tgtctcaaagcttttaattt

SEQ ID NO: 37208 - DNA, 20 bp, Artificial Sequence
  Description of Artificial Sequence: Synthetic oligonucleotide
  Target: SCNA; (+) strand; PAM type: NRG; PAM sequence: TAG
ttaggtctaaatatacctaa

SEQ ID NO: 37209 - DNA, 20 bp, Artificial Sequence
  Description of Artificial Sequence: Synthetic oligonucleotide
  Target: SCNA; (+) strand; PAM type: NRG; PAM sequence: TGG
aaatatacctaatagtcatc

SEQ ID NO: 37210 - DNA, 20 bp, Artificial Sequence
  Description of Artificial Sequence: Synthetic oligonucleotide
  Target: SCNA; (+) strand; PAM type: NRG; PAM sequence: AAG
agtcatctggttatcttctg

SEQ ID NO: 37211 - DNA, 20 bp, Artificial Sequence
  Description of Artificial Sequence: Synthetic oligonucleotide
  Target: SCNA; (+) strand; PAM type: NRG; PAM sequence: AAG
tctggttatcttctgaagtc

SEQ ID NO: 37212 - DNA, 20 bp, Artificial Sequence
  Description of Artificial Sequence: Synthetic oligonucleotide
  Target: SCNA; (+) strand; PAM type: NRG; PAM sequence: AAG
tatcttctgaagtcaagcac

SEQ ID NO: 37213 - DNA, 20 bp, Artificial Sequence
  Description of Artificial Sequence: Synthetic oligonucleotide
  Target: SCNA; (+) strand; PAM type: NRG; PAM sequence: AGG
atcttctgaagtcaagcaca

SEQ ID NO: 37214 - DNA, 20 bp, Artificial Sequence
  Description of Artificial Sequence: Synthetic oligonucleotide
  Target: SCNA; (+) strand; PAM type: NRG; PAM sequence: AAG
ctgaagtcaagcacaaggac

SEQ ID NO: 37215 - DNA, 20 bp, Artificial Sequence
  Description of Artificial Sequence: Synthetic oligonucleotide
  Target: SCNA; (+) strand; PAM type: NRG; PAM sequence: GAG
aaccaaacttttaattattt

SEQ ID NO: 37216 - DNA, 20 bp, Artificial Sequence
  Description of Artificial Sequence: Synthetic oligonucleotide
  Target: SCNA; (+) strand; PAM type: NRG; PAM sequence: AGG
accaaacttttaattatttg

SEQ ID NO: 37217 - DNA, 20 bp, Artificial Sequence
  Description of Artificial Sequence: Synthetic oligonucleotide
  Target: SCNA; (+) strand; PAM type: NRG; PAM sequence: TAG
tgtattatattaacaattat

SEQ ID NO: 37218 - DNA, 20 bp, Artificial Sequence
  Description of Artificial Sequence: Synthetic oligonucleotide
  Target: SCNA; (+) strand; PAM type: NRG; PAM sequence: AAG
ttaacaattattagacactt

SEQ ID NO: 37219 - DNA, 20 bp, Artificial Sequence
  Description of Artificial Sequence: Synthetic oligonucleotide
  Target: SCNA; (+) strand; PAM type: NRG; PAM sequence: AGG
taacaattattagacactta

SEQ ID NO: 37220 - DNA, 20 bp, Artificial Sequence
  Description of Artificial Sequence: Synthetic oligonucleotide
  Target: SCNA; (+) strand; PAM type: NRG; PAM sequence: GGG
aacaattattagacacttaa

SEQ ID NO: 37221 - DNA, 20 bp, Artificial Sequence
  Description of Artificial Sequence: Synthetic oligonucleotide
  Target: SCNA; (+) strand; PAM type: NRG; PAM sequence: GGG
acaattattagacacttaag

SEQ ID NO: 37222 - DNA, 20 bp, Artificial Sequence
  Description of Artificial Sequence: Synthetic oligonucleotide
  Target: SCNA; (+) strand; PAM type: NRG; PAM sequence: AAG
ttattagacacttaagggga

SEQ ID NO: 37223 - DNA, 20 bp, Artificial Sequence
  Description of Artificial Sequence: Synthetic oligonucleotide
  Target: SCNA; (+) strand; PAM type: NRG; PAM sequence: CAG
tataaattaaaatatttctc

SEQ ID NO: 37224 - DNA, 20 bp, Artificial Sequence
  Description of Artificial Sequence: Synthetic oligonucleotide
  Target: SCNA; (+) strand; PAM type: NRG; PAM sequence: AAG
ccttgttataaaattatttt

SEQ ID NO: 37225 - DNA, 20 bp, Artificial Sequence
  Description of Artificial Sequence: Synthetic oligonucleotide
  Target: SCNA; (+) strand; PAM type: NRG; PAM sequence: AAG
gacctgtgtgtgcttcttca

SEQ ID NO: 37226 - DNA, 20 bp, Artificial Sequence
  Description of Artificial Sequence: Synthetic oligonucleotide
  Target: SCNA; (+) strand; PAM type: NRG; PAM sequence: CAG
gaaatcaacattaaatgatt

SEQ ID NO: 37227 - DNA, 20 bp, Artificial Sequence
  Description of Artificial Sequence: Synthetic oligonucleotide
  Target: SCNA; (+) strand; PAM type: NRG; PAM sequence: TGG
acattaaatgattcagctga

SEQ ID NO: 37228 - DNA, 20 bp, Artificial Sequence
  Description of Artificial Sequence: Synthetic oligonucleotide
  Target: SCNA; (+) strand; PAM type: NRG; PAM sequence: CAG
catctgattaatcatttaat

SEQ ID NO: 37229 - DNA, 20 bp, Artificial Sequence
  Description of Artificial Sequence: Synthetic oligonucleotide
  Target: SCNA; (+) strand; PAM type: NRG; PAM sequence: GAG
tctgattaatcatttaatca

SEQ ID NO: 37230 - DNA, 20 bp, Artificial Sequence
  Description of Artificial Sequence: Synthetic oligonucleotide
  Target: SCNA; (+) strand; PAM type: NRG; PAM sequence: AGG
ctgattaatcatttaatcag

SEQ ID NO: 37231 - DNA, 20 bp, Artificial Sequence
  Description of Artificial Sequence: Synthetic oligonucleotide
  Target: SCNA; (+) strand; PAM type: NRG; PAM sequence: GGG
tgattaatcatttaatcaga

SEQ ID NO: 37232 - DNA, 20 bp, Artificial Sequence
  Description of Artificial Sequence: Synthetic oligonucleotide
  Target: SCNA; (+) strand; PAM type: NRG; PAM sequence: AAG
tcagagggtccataacactc

SEQ ID NO: 37233 - DNA, 20 bp, Artificial Sequence
  Description of Artificial Sequence: Synthetic oligonucleotide
  Target: SCNA; (+) strand; PAM type: NRG; PAM sequence: AAG
tttaaaaataaattttcatg

SEQ ID NO: 37234 - DNA, 20 bp, Artificial Sequence
  Description of Artificial Sequence: Synthetic oligonucleotide
  Target: SCNA; (+) strand; PAM type: NRG; PAM sequence: CAG
tttcatgaagcccaacatga

SEQ ID NO: 37235 - DNA, 20 bp, Artificial Sequence
  Description of Artificial Sequence: Synthetic oligonucleotide
  Target: SCNA; (+) strand; PAM type: NRG; PAM sequence: TAG
gaagcccaacatgacagcca

SEQ ID NO: 37236 - DNA, 20 bp, Artificial Sequence
  Description of Artificial Sequence: Synthetic oligonucleotide
  Target: SCNA; (+) strand; PAM type: NRG; PAM sequence: AAG
cccaacatgacagccatagt

SEQ ID NO: 37237 - DNA, 20 bp, Artificial Sequence
  Description of Artificial Sequence: Synthetic oligonucleotide
  Target: SCNA; (+) strand; PAM type: NRG; PAM sequence: AAG
atgacagccatagtaagtca

SEQ ID NO: 37238 - DNA, 20 bp, Artificial Sequence
  Description of Artificial Sequence: Synthetic oligonucleotide
  Target: SCNA; (+) strand; PAM type: NRG; PAM sequence: AGG
tgacagccatagtaagtcaa

SEQ ID NO: 37239 - DNA, 20 bp, Artificial Sequence
  Description of Artificial Sequence: Synthetic oligonucleotide
  Target: SCNA; (+) strand; PAM type: NRG; PAM sequence: GAG
catagtaagtcaaaggaaat

SEQ ID NO: 37240 - DNA, 20 bp, Artificial Sequence
  Description of Artificial Sequence: Synthetic oligonucleotide
  Target: SCNA; (+) strand; PAM type: NRG; PAM sequence: AAG
aagtcaaaggaaatgagtaa

SEQ ID NO: 37241 - DNA, 20 bp, Artificial Sequence
  Description of Artificial Sequence: Synthetic oligonucleotide
  Target: SCNA; (+) strand; PAM type: NRG; PAM sequence: AGG
agtcaaaggaaatgagtaaa

SEQ ID NO: 37242 - DNA, 20 bp, Artificial Sequence
  Description of Artificial Sequence: Synthetic oligonucleotide
  Target: SCNA; (+) strand; PAM type: NRG; PAM sequence: TAG
gaaatgagtaaaaggatact

SEQ ID NO: 37243 - DNA, 20 bp, Artificial Sequence
  Description of Artificial Sequence: Synthetic oligonucleotide
  Target: SCNA; (+) strand; PAM type: NRG; PAM sequence: TAG
ctgctttttttttattcatc

SEQ ID NO: 37244 - DNA, 20 bp, Artificial Sequence
  Description of Artificial Sequence: Synthetic oligonucleotide
  Target: SCNA; (+) strand; PAM type: NRG; PAM sequence: TGG
ttattcatctagcacacaac

SEQ ID NO: 37245 - DNA, 20 bp, Artificial Sequence
  Description of Artificial Sequence: Synthetic oligonucleotide
  Target: SCNA; (+) strand; PAM type: NRG; PAM sequence: TAG
tcatctagcacacaactggc

SEQ ID NO: 37246 - DNA, 20 bp, Artificial Sequence
  Description of Artificial Sequence: Synthetic oligonucleotide
  Target: SCNA; (+) strand; PAM type: NRG; PAM sequence: AAG
tagctatccttttatgaatt

SEQ ID NO: 37247 - DNA, 20 bp, Artificial Sequence
  Description of Artificial Sequence: Synthetic oligonucleotide
  Target: SCNA; (+) strand; PAM type: NRG; PAM sequence: CAG
tatccttttatgaattaagt

SEQ ID NO: 37248 - DNA, 20 bp, Artificial Sequence
  Description of Artificial Sequence: Synthetic oligonucleotide
  Target: SCNA; (+) strand; PAM type: NRG; PAM sequence: AGG
atccttttatgaattaagtc

SEQ ID NO: 37249 - DNA, 20 bp, Artificial Sequence
  Description of Artificial Sequence: Synthetic oligonucleotide
  Target: SCNA; (+) strand; PAM type: NRG; PAM sequence: CAG
gaattaagtcaggattatta

SEQ ID NO: 37250 - DNA, 20 bp, Artificial Sequence
  Description of Artificial Sequence: Synthetic oligonucleotide
  Target: SCNA; (+) strand; PAM type: NRG; PAM sequence: AAG
gtgtcaatccatttgaaatc

SEQ ID NO: 37251 - DNA, 20 bp, Artificial Sequence
  Description of Artificial Sequence: Synthetic oligonucleotide
  Target: SCNA; (+) strand; PAM type: NRG; PAM sequence: AAG
ttgaaatcaagatttaaaaa

SEQ ID NO: 37252 - DNA, 20 bp, Artificial Sequence
  Description of Artificial Sequence: Synthetic oligonucleotide
  Target: SCNA; (+) strand; PAM type: NRG; PAM sequence: TGG
ttgatgtaatttttccaaaa

SEQ ID NO: 37253 - DNA, 20 bp, Artificial Sequence
  Description of Artificial Sequence: Synthetic oligonucleotide
  Target: SCNA; (+) strand; PAM type: NRG; PAM sequence: TAG
ttttccaaaatggcattgct

SEQ ID NO: 37254 - DNA, 20 bp, Artificial Sequence
  Description of Artificial Sequence: Synthetic oligonucleotide
  Target: SCNA; (+) strand; PAM type: NRG; PAM sequence: AGG
tttccaaaatggcattgctt

SEQ ID NO: 37255 - DNA, 20 bp, Artificial Sequence
  Description of Artificial Sequence: Synthetic oligonucleotide
  Target: SCNA; (+) strand; PAM type: NRG; PAM sequence: TGG
ataaataacatcgctgaacc

SEQ ID NO: 37256 - DNA, 20 bp, Artificial Sequence
  Description of Artificial Sequence: Synthetic oligonucleotide
  Target: SCNA; (+) strand; PAM type: NRG; PAM sequence: AAG
tcgctgaacctggatgtttt

SEQ ID NO: 37257 - DNA, 20 bp, Artificial Sequence
  Description of Artificial Sequence: Synthetic oligonucleotide
  Target: SCNA; (+) strand; PAM type: NRG; PAM sequence: AAG
cctggatgttttaagtatcc

SEQ ID NO: 37258 - DNA, 20 bp, Artificial Sequence
  Description of Artificial Sequence: Synthetic oligonucleotide
  Target: SCNA; (+) strand; PAM type: NRG; PAM sequence: AGG
ctggatgttttaagtatcca

SEQ ID NO: 37259 - DNA, 20 bp, Artificial Sequence
  Description of Artificial Sequence: Synthetic oligonucleotide
  Target: SCNA; (+) strand; PAM type: NRG; PAM sequence: CAG
gttttaagtatccaaggcaa

SEQ ID NO: 37260 - DNA, 20 bp, Artificial Sequence
  Description of Artificial Sequence: Synthetic oligonucleotide
  Target: SCNA; (+) strand; PAM type: NRG; PAM sequence: AAG
tccaaggcaacagacatttc

SEQ ID NO: 37261 - DNA, 20 bp, Artificial Sequence
  Description of Artificial Sequence: Synthetic oligonucleotide
  Target: SCNA; (+) strand; PAM type: NRG; PAM sequence: TAG
gaaaactattaatcatcatg

SEQ ID NO: 37262 - DNA, 20 bp, Artificial Sequence
  Description of Artificial Sequence: Synthetic oligonucleotide
  Target: SCNA; (+) strand; PAM type: NRG; PAM sequence: AAG
ctattaatcatcatgtagat

SEQ ID NO: 37263 - DNA, 20 bp, Artificial Sequence
  Description of Artificial Sequence: Synthetic oligonucleotide
  Target: SCNA; (+) strand; PAM type: NRG; PAM sequence: TGG
gtagataagtcgtgtctcaa

SEQ ID NO: 37264 - DNA, 20 bp, Artificial Sequence
  Description of Artificial Sequence: Synthetic oligonucleotide
  Target: SCNA; (+) strand; PAM type: NRG; PAM sequence: GGG
tagataagtcgtgtctcaat

SEQ ID NO: 37265 - DNA, 20 bp, Artificial Sequence
  Description of Artificial Sequence: Synthetic oligonucleotide
  Target: SCNA; (+) strand; PAM type: NRG; PAM sequence: AAG
ctcaatgggatatgataacg

SEQ ID NO: 37266 - DNA, 20 bp, Artificial Sequence
  Description of Artificial Sequence: Synthetic oligonucleotide
  Target: SCNA; (+) strand; PAM type: NRG; PAM sequence: CAG
ctgactgctgtattatttgt

SEQ ID NO: 37267 - DNA, 20 bp, Artificial Sequence
  Description of Artificial Sequence: Synthetic oligonucleotide
  Target: SCNA; (+) strand; PAM type: NRG; PAM sequence: AGG
tgactgctgtattatttgtc

SEQ ID NO: 37268 - DNA, 20 bp, Artificial Sequence
  Description of Artificial Sequence: Synthetic oligonucleotide
  Target: SCNA; (+) strand; PAM type: NRG; PAM sequence: CAG
ctgctgtattatttgtcagg

SEQ ID NO: 37269 - DNA, 20 bp, Artificial Sequence
  Description of Artificial Sequence: Synthetic oligonucleotide
  Target: SCNA; (+) strand; PAM type: NRG; PAM sequence: TGG
ctgtattatttgtcaggcag

SEQ ID NO: 37270 - DNA, 20 bp, Artificial Sequence
  Description of Artificial Sequence: Synthetic oligonucleotide
  Target: SCNA; (+) strand; PAM type: NRG; PAM sequence: CAG
tttgtcaggcagtggcttca

SEQ ID NO: 37271 - DNA, 20 bp, Artificial Sequence
  Description of Artificial Sequence: Synthetic oligonucleotide
  Target: SCNA; (+) strand; PAM type: NRG; PAM sequence: CAG
cagtggcttcacagtttatt

SEQ ID NO: 37272 - DNA, 20 bp, Artificial Sequence
  Description of Artificial Sequence: Synthetic oligonucleotide
  Target: SCNA; (+) strand; PAM type: NRG; PAM sequence: AGG
agtggcttcacagtttattc

SEQ ID NO: 37273 - DNA, 20 bp, Artificial Sequence
  Description of Artificial Sequence: Synthetic oligonucleotide
  Target: SCNA; (+) strand; PAM type: NRG; PAM sequence: CAG
acttttgctctctaaaactc

SEQ ID NO: 37274 - DNA, 20 bp, Artificial Sequence
  Description of Artificial Sequence: Synthetic oligonucleotide
  Target: SCNA; (+) strand; PAM type: NRG; PAM sequence: CAG
ttacaaaaatataaaaactt

SEQ ID NO: 37275 - DNA, 20 bp, Artificial Sequence
  Description of Artificial Sequence: Synthetic oligonucleotide
  Target: SCNA; (+) strand; PAM type: NRG; PAM sequence: AGG
tacaaaaatataaaaacttc

SEQ ID NO: 37276 - DNA, 20 bp, Artificial Sequence
  Description of Artificial Sequence: Synthetic oligonucleotide
  Target: SCNA; (+) strand; PAM type: NRG; PAM sequence: TAG
acttcaggatccaactcttt

SEQ ID NO: 37277 - DNA, 20 bp, Artificial Sequence
  Description of Artificial Sequence: Synthetic oligonucleotide
  Target: SCNA; (+) strand; PAM type: NRG; PAM sequence: GAG
ttcaggatccaactctttta

SEQ ID NO: 37278 - DNA, 20 bp, Artificial Sequence
  Description of Artificial Sequence: Synthetic oligonucleotide
  Target: SCNA; (+) strand; PAM type: NRG; PAM sequence: TGG
ctcttttagagcattccatg

SEQ ID NO: 37279 - DNA, 20 bp, Artificial Sequence
  Description of Artificial Sequence: Synthetic oligonucleotide
  Target: SCNA; (+) strand; PAM type: NRG; PAM sequence: AAG
gagcattccatgtggcatga

SEQ ID NO: 37280 - DNA, 20 bp, Artificial Sequence
  Description of Artificial Sequence: Synthetic oligonucleotide
  Target: SCNA; (+) strand; PAM type: NRG; PAM sequence: GAG
gcattccatgtggcatgaaa

SEQ ID NO: 37281 - DNA, 20 bp, Artificial Sequence
  Description of Artificial Sequence: Synthetic oligonucleotide
  Target: SCNA; (+) strand; PAM type: NRG; PAM sequence: TAG
ggcatgaaagagatgctcat

SEQ ID NO: 37282 - DNA, 20 bp, Artificial Sequence
  Description of Artificial Sequence: Synthetic oligonucleotide
  Target: SCNA; (+) strand; PAM type: NRG; PAM sequence: CAG
gaaagagatgctcattagtt

SEQ ID NO: 37283 - DNA, 20 bp, Artificial Sequence
  Description of Artificial Sequence: Synthetic oligonucleotide
  Target: SCNA; (+) strand; PAM type: NRG; PAM sequence: AAG
gagatgctcattagttcagc

SEQ ID NO: 37284 - DNA, 20 bp, Artificial Sequence
  Description of Artificial Sequence: Synthetic oligonucleotide
  Target: SCNA; (+) strand; PAM type: NRG; PAM sequence: AGG
agatgctcattagttcagca

SEQ ID NO: 37285 - DNA, 20 bp, Artificial Sequence
  Description of Artificial Sequence: Synthetic oligonucleotide
  Target: SCNA; (+) strand; PAM type: NRG; PAM sequence: GAG
agttcagcaaggatttattt

SEQ ID NO: 37286 - DNA, 20 bp, Artificial Sequence
  Description of Artificial Sequence: Synthetic oligonucleotide
  Target: SCNA; (+) strand; PAM type: NRG; PAM sequence: CAG
gcaaggatttatttgagcac

SEQ ID NO: 37287 - DNA, 20 bp, Artificial Sequence
  Description of Artificial Sequence: Synthetic oligonucleotide
  Target: SCNA; (+) strand; PAM type: NRG; PAM sequence: AAG
tttatttgagcaccagccac

SEQ ID NO: 37288 - DNA, 20 bp, Artificial Sequence
  Description of Artificial Sequence: Synthetic oligonucleotide
  Target: SCNA; (+) strand; PAM type: NRG; PAM sequence: AAG
tttgagcaccagccacaagc

SEQ ID NO: 37289 - DNA, 20 bp, Artificial Sequence
  Description of Artificial Sequence: Synthetic oligonucleotide
  Target: SCNA; (+) strand; PAM type: NRG; PAM sequence: GAG
gccacaagcaagacactgtt

SEQ ID NO: 37290 - DNA, 20 bp, Artificial Sequence
  Description of Artificial Sequence: Synthetic oligonucleotide
  Target: SCNA; (+) strand; PAM type: NRG; PAM sequence: AGG
ccacaagcaagacactgttg

SEQ ID NO: 37291 - DNA, 20 bp, Artificial Sequence
  Description of Artificial Sequence: Synthetic oligonucleotide
  Target: SCNA; (+) strand; PAM type: NRG; PAM sequence: GAG
acaagcaagacactgttgag

SEQ ID NO: 37292 - DNA, 20 bp, Artificial Sequence
  Description of Artificial Sequence: Synthetic oligonucleotide
  Target: SCNA; (+) strand; PAM type: NRG; PAM sequence: TGG
gcaagacactgttgaggagc

SEQ ID NO: 37293 - DNA, 20 bp, Artificial Sequence
  Description of Artificial Sequence: Synthetic oligonucleotide
  Target: SCNA; (+) strand; PAM type: NRG; PAM sequence: GGG
caagacactgttgaggagct

SEQ ID NO: 37294 - DNA, 20 bp, Artificial Sequence
  Description of Artificial Sequence: Synthetic oligonucleotide
  Target: SCNA; (+) strand; PAM type: NRG; PAM sequence: TAG
acactgttgaggagctggga

SEQ ID NO: 37295 - DNA, 20 bp, Artificial Sequence
  Description of Artificial Sequence: Synthetic oligonucleotide
  Target: SCNA; (+) strand; PAM type: NRG; PAM sequence: AAG
ttgaggagctgggatagacc

SEQ ID NO: 37296 - DNA, 20 bp, Artificial Sequence
  Description of Artificial Sequence: Synthetic oligonucleotide
  Target: SCNA; (+) strand; PAM type: NRG; PAM sequence: TAG
ctgggatagaccaagtgttc

SEQ ID NO: 37297 - DNA, 20 bp, Artificial Sequence
  Description of Artificial Sequence: Synthetic oligonucleotide
  Target: SCNA; (+) strand; PAM type: NRG; PAM sequence: TGG
ggatagaccaagtgttctag

SEQ ID NO: 37298 - DNA, 20 bp, Artificial Sequence
  Description of Artificial Sequence: Synthetic oligonucleotide
  Target: SCNA; (+) strand; PAM type: NRG; PAM sequence: TAG
gctactccacactgcacgca

SEQ ID NO: 37299 - DNA, 20 bp, Artificial Sequence
  Description of Artificial Sequence: Synthetic oligonucleotide
  Target: SCNA; (+) strand; PAM type: NRG; PAM sequence: TAG
actccacactgcacgcatag

SEQ ID NO: 37300 - DNA, 20 bp, Artificial Sequence
  Description of Artificial Sequence: Synthetic oligonucleotide
  Target: SCNA; (+) strand; PAM type: NRG; PAM sequence: CAG
ctgcacgcatagtagcatta

SEQ ID NO: 37301 - DNA, 20 bp, Artificial Sequence
  Description of Artificial Sequence: Synthetic oligonucleotide
  Target: SCNA; (+) strand; PAM type: NRG; PAM sequence: AAG
ttacagaataacgctgattc

SEQ ID NO: 37302 - DNA, 20 bp, Artificial Sequence
  Description of Artificial Sequence: Synthetic oligonucleotide
  Target: SCNA; (+) strand; PAM type: NRG; PAM sequence: TAG
ctttctttgtacaatattct

SEQ ID NO: 37303 - DNA, 20 bp, Artificial Sequence
  Description of Artificial Sequence: Synthetic oligonucleotide
  Target: SCNA; (+) strand; PAM type: NRG; PAM sequence: AAG
ttgtacaatattcttagaac

SEQ ID NO: 37304 - DNA, 20 bp, Artificial Sequence
  Description of Artificial Sequence: Synthetic oligonucleotide
  Target: SCNA; (+) strand; PAM type: NRG; PAM sequence: CAG
tacaatattcttagaacaag

SEQ ID NO: 37305 - DNA, 20 bp, Artificial Sequence
  Description of Artificial Sequence: Synthetic oligonucleotide
  Target: SCNA; (+) strand; PAM type: NRG; PAM sequence: TAG
agcagatctttcttcttcaa

SEQ ID NO: 37306 - DNA, 20 bp, Artificial Sequence
  Description of Artificial Sequence: Synthetic oligonucleotide
  Target: SCNA; (+) strand; PAM type: NRG; PAM sequence: AAG
agatctttcttcttcaatag

SEQ ID NO: 37307 - DNA, 20 bp, Artificial Sequence
  Description of Artificial Sequence: Synthetic oligonucleotide
  Target: SCNA; (+) strand; PAM type: NRG; PAM sequence: TAG
tctttcttcttcaatagaag

SEQ ID NO: 37308 - DNA, 20 bp, Artificial Sequence
  Description of Artificial Sequence: Synthetic oligonucleotide
  Target: SCNA; (+) strand; PAM type: NRG; PAM sequence: AGG
ctttcttcttcaatagaagt

SEQ ID NO: 37309 - DNA, 20 bp, Artificial Sequence
  Description of Artificial Sequence: Synthetic oligonucleotide
  Target: SCNA; (+) strand; PAM type: NRG; PAM sequence: AAG
tgtttctactctgccaatga

SEQ ID NO: 37310 - DNA, 20 bp, Artificial Sequence
  Description of Artificial Sequence: Synthetic oligonucleotide
  Target: SCNA; (+) strand; PAM type: NRG; PAM sequence: AGG
gtttctactctgccaatgaa

SEQ ID NO: 37311 - DNA, 20 bp, Artificial Sequence
  Description of Artificial Sequence: Synthetic oligonucleotide
  Target: SCNA; (+) strand; PAM type: NRG; PAM sequence: AAG
caatgaaaggtatgaacttc

SEQ ID NO: 37312 - DNA, 20 bp, Artificial Sequence
  Description of Artificial Sequence: Synthetic oligonucleotide
  Target: SCNA; (+) strand; PAM type: NRG; PAM sequence: GAG
ataacttcttatgtgcacat

SEQ ID NO: 37313 - DNA, 20 bp, Artificial Sequence
  Description of Artificial Sequence: Synthetic oligonucleotide
  Target: SCNA; (+) strand; PAM type: NRG; PAM sequence: TGG
tgtgcacatgagtaaaaata

SEQ ID NO: 37314 - DNA, 20 bp, Artificial Sequence
  Description of Artificial Sequence: Synthetic oligonucleotide
  Target: SCNA; (+) strand; PAM type: NRG; PAM sequence: AAG
tgagtaaaaatatggatcaa

SEQ ID NO: 37315 - DNA, 20 bp, Artificial Sequence
  Description of Artificial Sequence: Synthetic oligonucleotide
  Target: SCNA; (+) strand; PAM type: NRG; PAM sequence: AAG
tattctaatgtactaaacac

SEQ ID NO: 37316 - DNA, 20 bp, Artificial Sequence
  Description of Artificial Sequence: Synthetic oligonucleotide
  Target: SCNA; (+) strand; PAM type: NRG; PAM sequence: GAG
ttctaatgtactaaacacaa

SEQ ID NO: 37317 - DNA, 20 bp, Artificial Sequence
  Description of Artificial Sequence: Synthetic oligonucleotide
  Target: SCNA; (+) strand; PAM type: NRG; PAM sequence: AAG
aaaacaaaatcttataattc

SEQ ID NO: 37318 - DNA, 20 bp, Artificial Sequence
  Description of Artificial Sequence: Synthetic oligonucleotide
  Target: SCNA; (+) strand; PAM type: NRG; PAM sequence: TAG
taactcatttgtcctttaac

SEQ ID NO: 37319 - DNA, 20 bp, Artificial Sequence
  Description of Artificial Sequence: Synthetic oligonucleotide
  Target: SCNA; (+) strand; PAM type: NRG; PAM sequence: TAG
cctttaactagtcttatact

SEQ ID NO: 37320 - DNA, 20 bp, Artificial Sequence
  Description of Artificial Sequence: Synthetic oligonucleotide
  Target: SCNA; (+) strand; PAM type: NRG; PAM sequence: AAG
tatacttagaaattattact

SEQ ID NO: 37321 - DNA, 20 bp, Artificial Sequence
  Description of Artificial Sequence: Synthetic oligonucleotide
  Target: SCNA; (+) strand; PAM type: NRG; PAM sequence: AGG
atacttagaaattattacta

SEQ ID NO: 37322 - DNA, 20 bp, Artificial Sequence
  Description of Artificial Sequence: Synthetic oligonucleotide
  Target: SCNA; (+) strand; PAM type: NRG; PAM sequence: GGG
tacttagaaattattactaa

SEQ ID NO: 37323 - DNA, 20 bp, Artificial Sequence
  Description of Artificial Sequence: Synthetic oligonucleotide
  Target: SCNA; (+) strand; PAM type: NRG; PAM sequence: CAG
ttagaaattattactaaggg

SEQ ID NO: 37324 - DNA, 20 bp, Artificial Sequence
  Description of Artificial Sequence: Synthetic oligonucleotide
  Target: SCNA; (+) strand; PAM type: NRG; PAM sequence: CAG
atatgatcaaattaacaaaa

SEQ ID NO: 37325 - DNA, 20 bp, Artificial Sequence
  Description of Artificial Sequence: Synthetic oligonucleotide
  Target: SCNA; (+) strand; PAM type: NRG; PAM sequence: AGG
tatgatcaaattaacaaaac

SEQ ID NO: 37326 - DNA, 20 bp, Artificial Sequence
  Description of Artificial Sequence: Synthetic oligonucleotide
  Target: SCNA; (+) strand; PAM type: NRG; PAM sequence: TGG
ttgatttactctcgatttat

SEQ ID NO: 37327 - DNA, 20 bp, Artificial Sequence
  Description of Artificial Sequence: Synthetic oligonucleotide
  Target: SCNA; (+) strand; PAM type: NRG; PAM sequence: CAG
ctctcgatttattggttgtt

SEQ ID NO: 37328 - DNA, 20 bp, Artificial Sequence
  Description of Artificial Sequence: Synthetic oligonucleotide
  Target: SCNA; (+) strand; PAM type: NRG; PAM sequence: AAG
ttaatttccacctatttgtg

SEQ ID NO: 37329 - DNA, 20 bp, Artificial Sequence
  Description of Artificial Sequence: Synthetic oligonucleotide
  Target: SCNA; (+) strand; PAM type: NRG; PAM sequence: AGG
taatttccacctatttgtga

SEQ ID NO: 37330 - DNA, 20 bp, Artificial Sequence
  Description of Artificial Sequence: Synthetic oligonucleotide
  Target: SCNA; (+) strand; PAM type: NRG; PAM sequence: GGG
aatttccacctatttgtgaa

SEQ ID NO: 37331 - DNA, 20 bp, Artificial Sequence
  Description of Artificial Sequence: Synthetic oligonucleotide
  Target: SCNA; (+) strand; PAM type: NRG; PAM sequence: GAG
tttccacctatttgtgaagg

SEQ ID NO: 37332 - DNA, 20 bp, Artificial Sequence
  Description of Artificial Sequence: Synthetic oligonucleotide
  Target: SCNA; (+) strand; PAM type: NRG; PAM sequence: GAG
tccacctatttgtgaaggga

SEQ ID NO: 37333 - DNA, 20 bp, Artificial Sequence
  Description of Artificial Sequence: Synthetic oligonucleotide
  Target: SCNA; (+) strand; PAM type: NRG; PAM sequence: AGG
ccacctatttgtgaagggag

SEQ ID NO: 37334 - DNA, 20 bp, Artificial Sequence
  Description of Artificial Sequence: Synthetic oligonucleotide
  Target: SCNA; (+) strand; PAM type: NRG; PAM sequence: GGG
cacctatttgtgaagggaga

SEQ ID NO: 37335 - DNA, 20 bp, Artificial Sequence
  Description of Artificial Sequence: Synthetic oligonucleotide
  Target: SCNA; (+) strand; PAM type: NRG; PAM sequence: TAG
actttccctccctcatcaac

SEQ ID NO: 37336 - DNA, 20 bp, Artificial Sequence
  Description of Artificial Sequence: Synthetic oligonucleotide
  Target: SCNA; (+) strand; PAM type: NRG; PAM sequence: GAG
tttccctccctcatcaacta

SEQ ID NO: 37337 - DNA, 20 bp, Artificial Sequence
  Description of Artificial Sequence: Synthetic oligonucleotide
  Target: SCNA; (+) strand; PAM type: NRG; PAM sequence: AGG
ttccctccctcatcaactag

SEQ ID NO: 37338 - DNA, 20 bp, Artificial Sequence
  Description of Artificial Sequence: Synthetic oligonucleotide
  Target: SCNA; (+) strand; PAM type: NRG; PAM sequence: GGG
tccctccctcatcaactaga

SEQ ID NO: 37339 - DNA, 20 bp, Artificial Sequence
  Description of Artificial Sequence: Synthetic oligonucleotide
  Target: SCNA; (+) strand; PAM type: NRG; PAM sequence: TGG
cctcatcaactagagggtga

SEQ ID NO: 37340 - DNA, 20 bp, Artificial Sequence
  Description of Artificial Sequence: Synthetic oligonucleotide
  Target: SCNA; (+) strand; PAM type: NRG; PAM sequence: CAG
tcaactagagggtgatggac

SEQ ID NO: 37341 - DNA, 20 bp, Artificial Sequence
  Description of Artificial Sequence: Synthetic oligonucleotide
  Target: SCNA; (+) strand; PAM type: NRG; PAM sequence: AAG
tgatggaccagataccctca

SEQ ID NO: 37342 - DNA, 20 bp, Artificial Sequence
  Description of Artificial Sequence: Synthetic oligonucleotide
  Target: SCNA; (+) strand; PAM type: NRG; PAM sequence: AGG
gatggaccagataccctcaa

SEQ ID NO: 37343 - DNA, 20 bp, Artificial Sequence
  Description of Artificial Sequence: Synthetic oligonucleotide
  Target: SCNA; (+) strand; PAM type: NRG; PAM sequence: GGG
atggaccagataccctcaaa

SEQ ID NO: 37344 - DNA, 20 bp, Artificial Sequence
  Description of Artificial Sequence: Synthetic oligonucleotide
  Target: SCNA; (+) strand; PAM type: NRG; PAM sequence: AAG
gataccctcaaagggcatga

SEQ ID NO: 37345 - DNA, 20 bp, Artificial Sequence
  Description of Artificial Sequence: Synthetic oligonucleotide
  Target: SCNA; (+) strand; PAM type: NRG; PAM sequence: AGG
ataccctcaaagggcatgaa

SEQ ID NO: 37346 - DNA, 20 bp, Artificial Sequence
  Description of Artificial Sequence: Synthetic oligonucleotide
  Target: SCNA; (+) strand; PAM type: NRG; PAM sequence: CGG
agggcatgaaaggtgaaaac

SEQ ID NO: 37347 - DNA, 20 bp, Artificial Sequence
  Description of Artificial Sequence: Synthetic oligonucleotide
  Target: SCNA; (+) strand; PAM type: NRG; PAM sequence: CAG
ccggtgccattactcccttt

SEQ ID NO: 37348 - DNA, 20 bp, Artificial Sequence
  Description of Artificial Sequence: Synthetic oligonucleotide
  Target: SCNA; (+) strand; PAM type: NRG; PAM sequence: AAG
ttcagtgttcctgatcttaa

SEQ ID NO: 37349 - DNA, 20 bp, Artificial Sequence
  Description of Artificial Sequence: Synthetic oligonucleotide
  Target: SCNA; (+) strand; PAM type: NRG; PAM sequence: CAG
agtgttcctgatcttaaaag

SEQ ID NO: 37350 - DNA, 20 bp, Artificial Sequence
  Description of Artificial Sequence: Synthetic oligonucleotide
  Target: SCNA; (+) strand; PAM type: NRG; PAM sequence: GAG
tgttcctgatcttaaaagca

SEQ ID NO: 37351 - DNA, 20 bp, Artificial Sequence
  Description of Artificial Sequence: Synthetic oligonucleotide
  Target: SCNA; (+) strand; PAM type: NRG; PAM sequence: AAG
agccattaatccacttctac

SEQ ID NO: 37352 - DNA, 20 bp, Artificial Sequence
  Description of Artificial Sequence: Synthetic oligonucleotide
  Target: SCNA; (+) strand; PAM type: NRG; PAM sequence: TAG
attaatccacttctacaagc

SEQ ID NO: 37353 - DNA, 20 bp, Artificial Sequence
  Description of Artificial Sequence: Synthetic oligonucleotide
  Target: SCNA; (+) strand; PAM type: NRG; PAM sequence: CAG
acttctacaagctagacatc

SEQ ID NO: 37354 - DNA, 20 bp, Artificial Sequence
  Description of Artificial Sequence: Synthetic oligonucleotide
  Target: SCNA; (+) strand; PAM type: NRG; PAM sequence: AAG
tgtcacatccctcttcctcc

SEQ ID NO: 37355 - DNA, 20 bp, Artificial Sequence
  Description of Artificial Sequence: Synthetic oligonucleotide
  Target: SCNA; (+) strand; PAM type: NRG; PAM sequence: TGG
tccctcttcctccaagtttc

SEQ ID NO: 37356 - DNA, 20 bp, Artificial Sequence
  Description of Artificial Sequence: Synthetic oligonucleotide
  Target: SCNA; (+) strand; PAM type: NRG; PAM sequence: CAG
cttcctccaagtttctggca

SEQ ID NO: 37357 - DNA, 20 bp, Artificial Sequence
  Description of Artificial Sequence: Synthetic oligonucleotide
  Target: SCNA; (+) strand; PAM type: NRG; PAM sequence: GAG
ccaagtttctggcacagtgt

SEQ ID NO: 37358 - DNA, 20 bp, Artificial Sequence
  Description of Artificial Sequence: Synthetic oligonucleotide
  Target: SCNA; (+) strand; PAM type: NRG; PAM sequence: GAG
ttctttcttgaatgatgaat

SEQ ID NO: 37359 - DNA, 20 bp, Artificial Sequence
  Description of Artificial Sequence: Synthetic oligonucleotide
  Target: SCNA; (+) strand; PAM type: NRG; PAM sequence: CAG
gatgaatgagtgtctcaatg

SEQ ID NO: 37360 - DNA, 20 bp, Artificial Sequence
  Description of Artificial Sequence: Synthetic oligonucleotide
  Target: SCNA; (+) strand; PAM type: NRG; PAM sequence: AAG
gtctcaatgcagtcattaat

SEQ ID NO: 37361 - DNA, 20 bp, Artificial Sequence
  Description of Artificial Sequence: Synthetic oligonucleotide
  Target: SCNA; (+) strand; PAM type: NRG; PAM sequence: AAG
cagtcattaataagcatttc

SEQ ID NO: 37362 - DNA, 20 bp, Artificial Sequence
  Description of Artificial Sequence: Synthetic oligonucleotide
  Target: SCNA; (+) strand; PAM type: NRG; PAM sequence: AAG
taataagcatttcaagcaaa

SEQ ID NO: 37363 - DNA, 20 bp, Artificial Sequence
  Description of Artificial Sequence: Synthetic oligonucleotide
  Target: SCNA; (+) strand; PAM type: NRG; PAM sequence: GAG
ataagcatttcaagcaaaaa

SEQ ID NO: 37364 - DNA, 20 bp, Artificial Sequence
  Description of Artificial Sequence: Synthetic oligonucleotide
  Target: SCNA; (+) strand; PAM type: NRG; PAM sequence: CAG
gtttgcttatttctatttac

SEQ ID NO: 37365 - DNA, 20 bp, Artificial Sequence
  Description of Artificial Sequence: Synthetic oligonucleotide
  Target: SCNA; (+) strand; PAM type: NRG; PAM sequence: AGG
tttgcttatttctatttacc

SEQ ID NO: 37366 - DNA, 20 bp, Artificial Sequence
  Description of Artificial Sequence: Synthetic oligonucleotide
  Target: SCNA; (+) strand; PAM type: NRG; PAM sequence: GGG
ttgcttatttctatttacca

SEQ ID NO: 37367 - DNA, 20 bp, Artificial Sequence
  Description of Artificial Sequence: Synthetic oligonucleotide
  Target: SCNA; (+) strand; PAM type: NRG; PAM sequence: AAG
taccagggtcattttgatca

SEQ ID NO: 37368 - DNA, 20 bp, Artificial Sequence
  Description of Artificial Sequence: Synthetic oligonucleotide
  Target: SCNA; (+) strand; PAM type: NRG; PAM sequence: AAG
aaatgaaataaattatttca

SEQ ID NO: 37369 - DNA, 20 bp, Artificial Sequence
  Description of Artificial Sequence: Synthetic oligonucleotide
  Target: SCNA; (+) strand; PAM type: NRG; PAM sequence: CAG
atactttcattgaaaccatc

SEQ ID NO: 37370 - DNA, 20 bp, Artificial Sequence
  Description of Artificial Sequence: Synthetic oligonucleotide
  Target: SCNA; (+) strand; PAM type: NRG; PAM sequence: TAG
ttgaaaccatccagattttt

SEQ ID NO: 37371 - DNA, 20 bp, Artificial Sequence
  Description of Artificial Sequence: Synthetic oligonucleotide
  Target: SCNA; (+) strand; PAM type: NRG; PAM sequence: TAG
ccagattttttagcatccca

SEQ ID NO: 37372 - DNA, 20 bp, Artificial Sequence
  Description of Artificial Sequence: Synthetic oligonucleotide
  Target: SCNA; (+) strand; PAM type: NRG; PAM sequence: CAG
catagatgtgaccacaattg

SEQ ID NO: 37373 - DNA, 20 bp, Artificial Sequence
  Description of Artificial Sequence: Synthetic oligonucleotide
  Target: SCNA; (+) strand; PAM type: NRG; PAM sequence: TAG
ccacaattgcagacatttat

SEQ ID NO: 37374 - DNA, 20 bp, Artificial Sequence
  Description of Artificial Sequence: Synthetic oligonucleotide
  Target: SCNA; (+) strand; PAM type: NRG; PAM sequence: GAG
acaattgcagacatttatta

SEQ ID NO: 37375 - DNA, 20 bp, Artificial Sequence
  Description of Artificial Sequence: Synthetic oligonucleotide
  Target: SCNA; (+) strand; PAM type: NRG; PAM sequence: TAG
gagtattctttgaattatta

SEQ ID NO: 37376 - DNA, 20 bp, Artificial Sequence
  Description of Artificial Sequence: Synthetic oligonucleotide
  Target: SCNA; (+) strand; PAM type: NRG; PAM sequence: CAG
tttgaattattatagaaact

SEQ ID NO: 37377 - DNA, 20 bp, Artificial Sequence
  Description of Artificial Sequence: Synthetic oligonucleotide
  Target: SCNA; (+) strand; PAM type: NRG; PAM sequence: TAG
tcagaactttattgctaaat

SEQ ID NO: 37378 - DNA, 20 bp, Artificial Sequence
  Description of Artificial Sequence: Synthetic oligonucleotide
  Target: SCNA; (+) strand; PAM type: NRG; PAM sequence: TAG
attagacttcaacaattttc

SEQ ID NO: 37379 - DNA, 20 bp, Artificial Sequence
  Description of Artificial Sequence: Synthetic oligonucleotide
  Target: SCNA; (+) strand; PAM type: NRG; PAM sequence: TAG
agacttcaacaattttctag

SEQ ID NO: 37380 - DNA, 20 bp, Artificial Sequence
  Description of Artificial Sequence: Synthetic oligonucleotide
  Target: SCNA; (+) strand; PAM type: NRG; PAM sequence: GAG
acttcaacaattttctagta

SEQ ID NO: 37381 - DNA, 20 bp, Artificial Sequence
  Description of Artificial Sequence: Synthetic oligonucleotide
  Target: SCNA; (+) strand; PAM type: NRG; PAM sequence: GAG
gtagagcttcctcattttat

SEQ ID NO: 37382 - DNA, 20 bp, Artificial Sequence
  Description of Artificial Sequence: Synthetic oligonucleotide
  Target: SCNA; (+) strand; PAM type: NRG; PAM sequence: AAG
agcttcctcattttatgaga

SEQ ID NO: 37383 - DNA, 20 bp, Artificial Sequence
  Description of Artificial Sequence: Synthetic oligonucleotide
  Target: SCNA; (+) strand; PAM type: NRG; PAM sequence: TAG
cattttatgagaaagacttt

SEQ ID NO: 37384 - DNA, 20 bp, Artificial Sequence
  Description of Artificial Sequence: Synthetic oligonucleotide
  Target: SCNA; (+) strand; PAM type: NRG; PAM sequence: AGG
attttatgagaaagactttt

SEQ ID NO: 37385 - DNA, 20 bp, Artificial Sequence
  Description of Artificial Sequence: Synthetic oligonucleotide
  Target: SCNA; (+) strand; PAM type: NRG; PAM sequence: GAG
tttatgagaaagacttttag

SEQ ID NO: 37386 - DNA, 20 bp, Artificial Sequence
  Description of Artificial Sequence: Synthetic oligonucleotide
  Target: SCNA; (+) strand; PAM type: NRG; PAM sequence: AAG
gacttttaggagatctgcga

SEQ ID NO: 37387 - DNA, 20 bp, Artificial Sequence
  Description of Artificial Sequence: Synthetic oligonucleotide
  Target: SCNA; (+) strand; PAM type: NRG; PAM sequence: AGG
acttttaggagatctgcgaa

SEQ ID NO: 37388 - DNA, 20 bp, Artificial Sequence
  Description of Artificial Sequence: Synthetic oligonucleotide
  Target: SCNA; (+) strand; PAM type: NRG; PAM sequence: CAG
gagatctgcgaaaggttatc

SEQ ID NO: 37389 - DNA, 20 bp, Artificial Sequence
  Description of Artificial Sequence: Synthetic oligonucleotide
  Target: SCNA; (+) strand; PAM type: NRG; PAM sequence: CAG
tctgcgaaaggttatccagt

SEQ ID NO: 37390 - DNA, 20 bp, Artificial Sequence
  Description of Artificial Sequence: Synthetic oligonucleotide
  Target: SCNA; (+) strand; PAM type: NRG; PAM sequence: AGG
ctgcgaaaggttatccagtc

SEQ ID NO: 37391 - DNA, 20 bp, Artificial Sequence
  Description of Artificial Sequence: Synthetic oligonucleotide
  Target: SCNA; (+) strand; PAM type: NRG; PAM sequence: TGG
cgaaaggttatccagtcagg

SEQ ID NO: 37392 - DNA, 20 bp, Artificial Sequence
  Description of Artificial Sequence: Synthetic oligonucleotide
  Target: SCNA; (+) strand; PAM type: NRG; PAM sequence: GAG
tatccagtcaggtggtgtat

SEQ ID NO: 37393 - DNA, 20 bp, Artificial Sequence
  Description of Artificial Sequence: Synthetic oligonucleotide
  Target: SCNA; (+) strand; PAM type: NRG; PAM sequence: CAG
ccagtcaggtggtgtatgag

SEQ ID NO: 37394 - DNA, 20 bp, Artificial Sequence
  Description of Artificial Sequence: Synthetic oligonucleotide
  Target: SCNA; (+) strand; PAM type: NRG; PAM sequence: GAG
agtcaggtggtgtatgagca

SEQ ID NO: 37395 - DNA, 20 bp, Artificial Sequence
  Description of Artificial Sequence: Synthetic oligonucleotide
  Target: SCNA; (+) strand; PAM type: NRG; PAM sequence: GAG
tcaggtggtgtatgagcaga

SEQ ID NO: 37396 - DNA, 20 bp, Artificial Sequence
  Description of Artificial Sequence: Synthetic oligonucleotide
  Target: SCNA; (+) strand; PAM type: NRG; PAM sequence: AGG
caggtggtgtatgagcagag

SEQ ID NO: 37397 - DNA, 20 bp, Artificial Sequence
  Description of Artificial Sequence: Synthetic oligonucleotide
  Target: SCNA; (+) strand; PAM type: NRG; PAM sequence: AAG
gtggtgtatgagcagagagg

SEQ ID NO: 37398 - DNA, 20 bp, Artificial Sequence
  Description of Artificial Sequence: Synthetic oligonucleotide
  Target: SCNA; (+) strand; PAM type: NRG; PAM sequence: TAG
gtatgagcagagaggaagac

SEQ ID NO: 37399 - DNA, 20 bp, Artificial Sequence
  Description of Artificial Sequence: Synthetic oligonucleotide
  Target: SCNA; (+) strand; PAM type: NRG; PAM sequence: CAG
agactagccattttcactct

SEQ ID NO: 37400 - DNA, 20 bp, Artificial Sequence
  Description of Artificial Sequence: Synthetic oligonucleotide
  Target: SCNA; (+) strand; PAM type: NRG; PAM sequence: TAG
cacaactatgctgcaatttc

SEQ ID NO: 37401 - DNA, 20 bp, Artificial Sequence
  Description of Artificial Sequence: Synthetic oligonucleotide
  Target: SCNA; (+) strand; PAM type: NRG; PAM sequence: AGG
acaactatgctgcaatttct

SEQ ID NO: 37402 - DNA, 20 bp, Artificial Sequence
  Description of Artificial Sequence: Synthetic oligonucleotide
  Target: SCNA; (+) strand; PAM type: NRG; PAM sequence: TGG
gctgcaatttctaggttcta

SEQ ID NO: 37403 - DNA, 20 bp, Artificial Sequence
  Description of Artificial Sequence: Synthetic oligonucleotide
  Target: SCNA; (+) strand; PAM type: NRG; PAM sequence: TAG
ctatggcttcattttcatat

SEQ ID NO: 37404 - DNA, 20 bp, Artificial Sequence
  Description of Artificial Sequence: Synthetic oligonucleotide
  Target: SCNA; (+) strand; PAM type: NRG; PAM sequence: CAG
ttcattttcatattagaaat

SEQ ID NO: 37405 - DNA, 20 bp, Artificial Sequence
  Description of Artificial Sequence: Synthetic oligonucleotide
  Target: SCNA; (+) strand; PAM type: NRG; PAM sequence: AAG
ttttcatattagaaatcagt

SEQ ID NO: 37406 - DNA, 20 bp, Artificial Sequence
  Description of Artificial Sequence: Synthetic oligonucleotide
  Target: SCNA; (+) strand; PAM type: NRG; PAM sequence: AAG
taagaaactatactacctat

SEQ ID NO: 37407 - DNA, 20 bp, Artificial Sequence
  Description of Artificial Sequence: Synthetic oligonucleotide
  Target: SCNA; (+) strand; PAM type: NRG; PAM sequence: AGG
aagaaactatactacctata

SEQ ID NO: 37408 - DNA, 20 bp, Artificial Sequence
  Description of Artificial Sequence: Synthetic oligonucleotide
  Target: SCNA; (+) strand; PAM type: NRG; PAM sequence: GGG
agaaactatactacctataa

SEQ ID NO: 37409 - DNA, 20 bp, Artificial Sequence
  Description of Artificial Sequence: Synthetic oligonucleotide
  Target: SCNA; (+) strand; PAM type: NRG; PAM sequence: TAG
attaattttgtcacatcact

SEQ ID NO: 37410 - DNA, 20 bp, Artificial Sequence
  Description of Artificial Sequence: Synthetic oligonucleotide
  Target: SCNA; (+) strand; PAM type: NRG; PAM sequence: TAG
gctttaaatattaaaataaa

SEQ ID NO: 37411 - DNA, 20 bp, Artificial Sequence
  Description of Artificial Sequence: Synthetic oligonucleotide
  Target: SCNA; (+) strand; PAM type: NRG; PAM sequence: AAG
ttaaatattaaaataaatag

SEQ ID NO: 37412 - DNA, 20 bp, Artificial Sequence
  Description of Artificial Sequence: Synthetic oligonucleotide
  Target: SCNA; (+) strand; PAM type: NRG; PAM sequence: TAG
aaaataaatagaagtatttt

SEQ ID NO: 37413 - DNA, 20 bp, Artificial Sequence
  Description of Artificial Sequence: Synthetic oligonucleotide
  Target: SCNA; (+) strand; PAM type: NRG; PAM sequence: TGG
taaatagaagtatttttaga

SEQ ID NO: 37414 - DNA, 20 bp, Artificial Sequence
  Description of Artificial Sequence: Synthetic oligonucleotide
  Target: SCNA; (+) strand; PAM type: NRG; PAM sequence: GGG
aaatagaagtatttttagat

SEQ ID NO: 37415 - DNA, 20 bp, Artificial Sequence
  Description of Artificial Sequence: Synthetic oligonucleotide
  Target: SCNA; (+) strand; PAM type: NRG; PAM sequence: TGG
tagaagtatttttagatggg

SEQ ID NO: 37416 - DNA, 20 bp, Artificial Sequence
  Description of Artificial Sequence: Synthetic oligonucleotide
  Target: SCNA; (+) strand; PAM type: NRG; PAM sequence: AAG
agtatttttagatgggtgga

SEQ ID NO: 37417 - DNA, 20 bp, Artificial Sequence
  Description of Artificial Sequence: Synthetic oligonucleotide
  Target: SCNA; (+) strand; PAM type: NRG; PAM sequence: CAG
agatgggtggaaagcaaacc

SEQ ID NO: 37418 - DNA, 20 bp, Artificial Sequence
  Description of Artificial Sequence: Synthetic oligonucleotide
  Target: SCNA; (+) strand; PAM type: NRG; PAM sequence: AAG
aagcaaacccagttttgtaa

SEQ ID NO: 37419 - DNA, 20 bp, Artificial Sequence
  Description of Artificial Sequence: Synthetic oligonucleotide
  Target: SCNA; (+) strand; PAM type: NRG; PAM sequence: AAG
acccagttttgtaaaagatt

SEQ ID NO: 37420 - DNA, 20 bp, Artificial Sequence
  Description of Artificial Sequence: Synthetic oligonucleotide
  Target: SCNA; (+) strand; PAM type: NRG; PAM sequence: CAG
tatattgtatgccttaaatg

SEQ ID NO: 37421 - DNA, 20 bp, Artificial Sequence
  Description of Artificial Sequence: Synthetic oligonucleotide
  Target: SCNA; (+) strand; PAM type: NRG; PAM sequence: AGG
atattgtatgccttaaatgc

SEQ ID NO: 37422 - DNA, 20 bp, Artificial Sequence
  Description of Artificial Sequence: Synthetic oligonucleotide
  Target: SCNA; (+) strand; PAM type: NRG; PAM sequence: AAG
ccttaaatgcaggtgaataa

SEQ ID NO: 37423 - DNA, 20 bp, Artificial Sequence
  Description of Artificial Sequence: Synthetic oligonucleotide
  Target: SCNA; (+) strand; PAM type: NRG; PAM sequence: CGG
aaatgcaggtgaataaaaga

SEQ ID NO: 37424 - DNA, 20 bp, Artificial Sequence
  Description of Artificial Sequence: Synthetic oligonucleotide
  Target: SCNA; (+) strand; PAM type: NRG; PAM sequence: AAG
ccctgttgcttaatattctg

SEQ ID NO: 37425 - DNA, 20 bp, Artificial Sequence
  Description of Artificial Sequence: Synthetic oligonucleotide
  Target: SCNA; (+) strand; PAM type: NRG; PAM sequence: TAG
tctgaagcaataaaatcctc

SEQ ID NO: 37426 - DNA, 20 bp, Artificial Sequence
  Description of Artificial Sequence: Synthetic oligonucleotide
  Target: SCNA; (+) strand; PAM type: NRG; PAM sequence: TAG
taaaatcctctagttaaatc

SEQ ID NO: 37427 - DNA, 20 bp, Artificial Sequence
  Description of Artificial Sequence: Synthetic oligonucleotide
  Target: SCNA; (+) strand; PAM type: NRG; PAM sequence: AAG
tgtccataactgaatgtata

SEQ ID NO: 37428 - DNA, 20 bp, Artificial Sequence
  Description of Artificial Sequence: Synthetic oligonucleotide
  Target: SCNA; (+) strand; PAM type: NRG; PAM sequence: AAG
actgaatgtataaagaccca

SEQ ID NO: 37429 - DNA, 20 bp, Artificial Sequence
  Description of Artificial Sequence: Synthetic oligonucleotide
  Target: SCNA; (+) strand; PAM type: NRG; PAM sequence: AGG
ctgaatgtataaagacccaa

SEQ ID NO: 37430 - DNA, 20 bp, Artificial Sequence
  Description of Artificial Sequence: Synthetic oligonucleotide
  Target: SCNA; (+) strand; PAM type: NRG; PAM sequence: AAG
aatgtataaagacccaaagg

SEQ ID NO: 37431 - DNA, 20 bp, Artificial Sequence
  Description of Artificial Sequence: Synthetic oligonucleotide
  Target: SCNA; (+) strand; PAM type: NRG; PAM sequence: AGG
atgtataaagacccaaagga

SEQ ID NO: 37432 - DNA, 20 bp, Artificial Sequence
  Description of Artificial Sequence: Synthetic oligonucleotide
  Target: SCNA; (+) strand; PAM type: NRG; PAM sequence: AAG
ataaagacccaaaggaaggt

SEQ ID NO: 37433 - DNA, 20 bp, Artificial Sequence
  Description of Artificial Sequence: Synthetic oligonucleotide
  Target: SCNA; (+) strand; PAM type: NRG; PAM sequence: GAG
cccaaaggaaggtaagtttt

SEQ ID NO: 37434 - DNA, 20 bp, Artificial Sequence
  Description of Artificial Sequence: Synthetic oligonucleotide
  Target: SCNA; (+) strand; PAM type: NRG; PAM sequence: AGG
ccaaaggaaggtaagttttg

SEQ ID NO: 37435 - DNA, 20 bp, Artificial Sequence
  Description of Artificial Sequence: Synthetic oligonucleotide
  Target: SCNA; (+) strand; PAM type: NRG; PAM sequence: AAG
aaggaaggtaagttttgagg

SEQ ID NO: 37436 - DNA, 20 bp, Artificial Sequence
  Description of Artificial Sequence: Synthetic oligonucleotide
  Target: SCNA; (+) strand; PAM type: NRG; PAM sequence: TGG
gtaagttttgaggaagtgct

SEQ ID NO: 37437 - DNA, 20 bp, Artificial Sequence
  Description of Artificial Sequence: Synthetic oligonucleotide
  Target: SCNA; (+) strand; PAM type: NRG; PAM sequence: GGG
taagttttgaggaagtgctt

SEQ ID NO: 37438 - DNA, 20 bp, Artificial Sequence
  Description of Artificial Sequence: Synthetic oligonucleotide
  Target: SCNA; (+) strand; PAM type: NRG; PAM sequence: GGG
aagttttgaggaagtgcttg

SEQ ID NO: 37439 - DNA, 20 bp, Artificial Sequence
  Description of Artificial Sequence: Synthetic oligonucleotide
  Target: SCNA; (+) strand; PAM type: NRG; PAM sequence: AAG
ttttgaggaagtgcttgggg

SEQ ID NO: 37440 - DNA, 20 bp, Artificial Sequence
  Description of Artificial Sequence: Synthetic oligonucleotide
  Target: SCNA; (+) strand; PAM type: NRG; PAM sequence: TAG
aagtgcttggggaagtgata

SEQ ID NO: 37441 - DNA, 20 bp, Artificial Sequence
  Description of Artificial Sequence: Synthetic oligonucleotide
  Target: SCNA; (+) strand; PAM type: NRG; PAM sequence: TGG
tgcttggggaagtgatatag

SEQ ID NO: 37442 - DNA, 20 bp, Artificial Sequence
  Description of Artificial Sequence: Synthetic oligonucleotide
  Target: SCNA; (+) strand; PAM type: NRG; PAM sequence: TGG
tggggaagtgatatagtggc

SEQ ID NO: 37443 - DNA, 20 bp, Artificial Sequence
  Description of Artificial Sequence: Synthetic oligonucleotide
  Target: SCNA; (+) strand; PAM type: NRG; PAM sequence: AAG
aagtgatatagtggctggaa

SEQ ID NO: 37444 - DNA, 20 bp, Artificial Sequence
  Description of Artificial Sequence: Synthetic oligonucleotide
  Target: SCNA; (+) strand; PAM type: NRG; PAM sequence: TGG
agtggctggaaaagtactac

SEQ ID NO: 37445 - DNA, 20 bp, Artificial Sequence
  Description of Artificial Sequence: Synthetic oligonucleotide
  Target: SCNA; (+) strand; PAM type: NRG; PAM sequence: CAG
ggaaaagtactactggtgtc

SEQ ID NO: 37446 - DNA, 20 bp, Artificial Sequence
  Description of Artificial Sequence: Synthetic oligonucleotide
  Target: SCNA; (+) strand; PAM type: NRG; PAM sequence: TGG
tccaaatgactgtgcaatct

SEQ ID NO: 37447 - DNA, 20 bp, Artificial Sequence
  Description of Artificial Sequence: Synthetic oligonucleotide
  Target: SCNA; (+) strand; PAM type: NRG; PAM sequence: TAG
tggactacccacttcctctg

SEQ ID NO: 37448 - DNA, 20 bp, Artificial Sequence
  Description of Artificial Sequence: Synthetic oligonucleotide
  Target: SCNA; (+) strand; PAM type: NRG; PAM sequence: CAG
tgtttcctcatctctacaat

SEQ ID NO: 37449 - DNA, 20 bp, Artificial Sequence
  Description of Artificial Sequence: Synthetic oligonucleotide
  Target: SCNA; (+) strand; PAM type: NRG; PAM sequence: AAG
ttcctcatctctacaatcag

SEQ ID NO: 37450 - DNA, 20 bp, Artificial Sequence
  Description of Artificial Sequence: Synthetic oligonucleotide
  Target: SCNA; (+) strand; PAM type: NRG; PAM sequence: CAG
aatcagaagattgatctgaa

SEQ ID NO: 37451 - DNA, 20 bp, Artificial Sequence
  Description of Artificial Sequence: Synthetic oligonucleotide
  Target: SCNA; (+) strand; PAM type: NRG; PAM sequence: GAG
tcagaagattgatctgaaca

SEQ ID NO: 37452 - DNA, 20 bp, Artificial Sequence
  Description of Artificial Sequence: Synthetic oligonucleotide
  Target: SCNA; (+) strand; PAM type: NRG; PAM sequence: AGG
cagaagattgatctgaacag

SEQ ID NO: 37453 - DNA, 20 bp, Artificial Sequence
  Description of Artificial Sequence: Synthetic oligonucleotide
  Target: SCNA; (+) strand; PAM type: NRG; PAM sequence: GGG
agaagattgatctgaacaga

SEQ ID NO: 37454 - DNA, 20 bp, Artificial Sequence
  Description of Artificial Sequence: Synthetic oligonucleotide
  Target: SCNA; (+) strand; PAM type: NRG; PAM sequence: TGG
ctgaacagagggtctgtcaa

SEQ ID NO: 37455 - DNA, 20 bp, Artificial Sequence
  Description of Artificial Sequence: Synthetic oligonucleotide
  Target: SCNA; (+) strand; PAM type: NRG; PAM sequence: AAG
ctgtcaatggacttcccatt

SEQ ID NO: 37456 - DNA, 20 bp, Artificial Sequence
  Description of Artificial Sequence: Synthetic oligonucleotide
  Target: SCNA; (+) strand; PAM type: NRG; PAM sequence: GAG
gctctttgatgtgcgtatgt

SEQ ID NO: 37457 - DNA, 20 bp, Artificial Sequence
  Description of Artificial Sequence: Synthetic oligonucleotide
  Target: SCNA; (+) strand; PAM type: NRG; PAM sequence: AAG
tgtgagtgcgcatttttctg

SEQ ID NO: 37458 - DNA, 20 bp, Artificial Sequence
  Description of Artificial Sequence: Synthetic oligonucleotide
  Target: SCNA; (+) strand; PAM type: NRG; PAM sequence: AAG
gtgcgcatttttctgaagct

SEQ ID NO: 37459 - DNA, 20 bp, Artificial Sequence
  Description of Artificial Sequence: Synthetic oligonucleotide
  Target: SCNA; (+) strand; PAM type: NRG; PAM sequence: GAG
gcgcatttttctgaagctaa

SEQ ID NO: 37460 - DNA, 20 bp, Artificial Sequence
  Description of Artificial Sequence: Synthetic oligonucleotide
  Target: SCNA; (+) strand; PAM type: NRG; PAM sequence: AGG
cgcatttttctgaagctaag

SEQ ID NO: 37461 - DNA, 20 bp, Artificial Sequence
  Description of Artificial Sequence: Synthetic oligonucleotide
  Target: SCNA; (+) strand; PAM type: NRG; PAM sequence: GGG
gcatttttctgaagctaaga

SEQ ID NO: 37462 - DNA, 20 bp, Artificial Sequence
  Description of Artificial Sequence: Synthetic oligonucleotide
  Target: SCNA; (+) strand; PAM type: NRG; PAM sequence: TAG
tctgaagctaagagggtcta

SEQ ID NO: 37463 - DNA, 20 bp, Artificial Sequence
  Description of Artificial Sequence: Synthetic oligonucleotide
  Target: SCNA; (+) strand; PAM type: NRG; PAM sequence: TAG
agagggtctatagcttctat

SEQ ID NO: 37464 - DNA, 20 bp, Artificial Sequence
  Description of Artificial Sequence: Synthetic oligonucleotide
  Target: SCNA; (+) strand; PAM type: NRG; PAM sequence: AAG
agcttctattagcccgtgaa

SEQ ID NO: 37465 - DNA, 20 bp, Artificial Sequence
  Description of Artificial Sequence: Synthetic oligonucleotide
  Target: SCNA; (+) strand; PAM type: NRG; PAM sequence: AGG
gcttctattagcccgtgaaa

SEQ ID NO: 37466 - DNA, 20 bp, Artificial Sequence
  Description of Artificial Sequence: Synthetic oligonucleotide
  Target: SCNA; (+) strand; PAM type: NRG; PAM sequence: GGG
cttctattagcccgtgaaaa

SEQ ID NO: 37467 - DNA, 20 bp, Artificial Sequence
  Description of Artificial Sequence: Synthetic oligonucleotide
  Target: SCNA; (+) strand; PAM type: NRG; PAM sequence: CGG
tattagcccgtgaaaagggt

SEQ ID NO: 37468 - DNA, 20 bp, Artificial Sequence
  Description of Artificial Sequence: Synthetic oligonucleotide
  Target: SCNA; (+) strand; PAM type: NRG; PAM sequence: GAG
ttagcccgtgaaaagggtcg

SEQ ID NO: 37469 - DNA, 20 bp, Artificial Sequence
  Description of Artificial Sequence: Synthetic oligonucleotide
  Target: SCNA; (+) strand; PAM type: NRG; PAM sequence: GAG
cctgtgtactaatttaatct

SEQ ID NO: 37470 - DNA, 20 bp, Artificial Sequence
  Description of Artificial Sequence: Synthetic oligonucleotide
  Target: SCNA; (+) strand; PAM type: NRG; PAM sequence: AGG
ctgtgtactaatttaatctg

SEQ ID NO: 37471 - DNA, 20 bp, Artificial Sequence
  Description of Artificial Sequence: Synthetic oligonucleotide
  Target: SCNA; (+) strand; PAM type: NRG; PAM sequence: AAG
ttaacttgtgaaatcttacg

SEQ ID NO: 37472 - DNA, 20 bp, Artificial Sequence
  Description of Artificial Sequence: Synthetic oligonucleotide
  Target: SCNA; (+) strand; PAM type: NRG; PAM sequence: TAG
aaatcttacgaagctataaa

SEQ ID NO: 37473 - DNA, 20 bp, Artificial Sequence
  Description of Artificial Sequence: Synthetic oligonucleotide
  Target: SCNA; (+) strand; PAM type: NRG; PAM sequence: TAG
tataaatagaattaaaattt

SEQ ID NO: 37474 - DNA, 20 bp, Artificial Sequence
  Description of Artificial Sequence: Synthetic oligonucleotide
  Target: SCNA; (+) strand; PAM type: NRG; PAM sequence: TGG
aatagaattaaaattttaga

SEQ ID NO: 37475 - DNA, 20 bp, Artificial Sequence
  Description of Artificial Sequence: Synthetic oligonucleotide
  Target: SCNA; (+) strand; PAM type: NRG; PAM sequence: CAG
ttaaaattttagatggaaac

SEQ ID NO: 37476 - DNA, 20 bp, Artificial Sequence
  Description of Artificial Sequence: Synthetic oligonucleotide
  Target: SCNA; (+) strand; PAM type: NRG; PAM sequence: AGG
taaaattttagatggaaacc

SEQ ID NO: 37477 - DNA, 20 bp, Artificial Sequence
  Description of Artificial Sequence: Synthetic oligonucleotide
  Target: SCNA; (+) strand; PAM type: NRG; PAM sequence: AAG
atataattattatccctaat

SEQ ID NO: 37478 - DNA, 20 bp, Artificial Sequence
  Description of Artificial Sequence: Synthetic oligonucleotide
  Target: SCNA; (+) strand; PAM type: NRG; PAM sequence: AAG
ccctaataagattatttgaa

SEQ ID NO: 37479 - DNA, 20 bp, Artificial Sequence
  Description of Artificial Sequence: Synthetic oligonucleotide
  Target: SCNA; (+) strand; PAM type: NRG; PAM sequence: AAG
tgaaaagcatattttgtaca

SEQ ID NO: 37480 - DNA, 20 bp, Artificial Sequence
  Description of Artificial Sequence: Synthetic oligonucleotide
  Target: SCNA; (+) strand; PAM type: NRG; PAM sequence: AGG
gaaaagcatattttgtacaa

SEQ ID NO: 37481 - DNA, 20 bp, Artificial Sequence
  Description of Artificial Sequence: Synthetic oligonucleotide
  Target: SCNA; (+) strand; PAM type: NRG; PAM sequence: GGG
aaaagcatattttgtacaaa

SEQ ID NO: 37482 - DNA, 20 bp, Artificial Sequence
  Description of Artificial Sequence: Synthetic oligonucleotide
  Target: SCNA; (+) strand; PAM type: NRG; PAM sequence: GGG
aaagcatattttgtacaaag

SEQ ID NO: 37483 - DNA, 20 bp, Artificial Sequence
  Description of Artificial Sequence: Synthetic oligonucleotide
  Target: SCNA; (+) strand; PAM type: NRG; PAM sequence: TAG
ccaaccatgcattcaaacat

SEQ ID NO: 37484 - DNA, 20 bp, Artificial Sequence
  Description of Artificial Sequence: Synthetic oligonucleotide
  Target: SCNA; (+) strand; PAM type: NRG; PAM sequence: AAG
atgcattcaaacattagctg

SEQ ID NO: 37485 - DNA, 20 bp, Artificial Sequence
  Description of Artificial Sequence: Synthetic oligonucleotide
  Target: SCNA; (+) strand; PAM type: NRG; PAM sequence: TAG
cattagctgaagaacttcac

SEQ ID NO: 37486 - DNA, 20 bp, Artificial Sequence
  Description of Artificial Sequence: Synthetic oligonucleotide
  Target: SCNA; (+) strand; PAM type: NRG; PAM sequence: AAG
tagctgaagaacttcactag

SEQ ID NO: 37487 - DNA, 20 bp, Artificial Sequence
  Description of Artificial Sequence: Synthetic oligonucleotide
  Target: SCNA; (+) strand; PAM type: NRG; PAM sequence: CAG
gaagaacttcactagaagcc

SEQ ID NO: 37488 - DNA, 20 bp, Artificial Sequence
  Description of Artificial Sequence: Synthetic oligonucleotide
  Target: SCNA; (+) strand; PAM type: NRG; PAM sequence: AAG
aacttcactagaagcccagt

SEQ ID NO: 37489 - DNA, 20 bp, Artificial Sequence
  Description of Artificial Sequence: Synthetic oligonucleotide
  Target: SCNA; (+) strand; PAM type: NRG; PAM sequence: AGG
acttcactagaagcccagta

SEQ ID NO: 37490 - DNA, 20 bp, Artificial Sequence
  Description of Artificial Sequence: Synthetic oligonucleotide
  Target: SCNA; (+) strand; PAM type: NRG; PAM sequence: TAG
cagtaaggatttgccatcat

SEQ ID NO: 37491 - DNA, 20 bp, Artificial Sequence
  Description of Artificial Sequence: Synthetic oligonucleotide
  Target: SCNA; (+) strand; PAM type: NRG; PAM sequence: CAG
atcattagcatccattgcac

SEQ ID NO: 37492 - DNA, 20 bp, Artificial Sequence
  Description of Artificial Sequence: Synthetic oligonucleotide
  Target: SCNA; (+) strand; PAM type: NRG; PAM sequence: TAG
gcatccattgcaccagacac

SEQ ID NO: 37493 - DNA, 20 bp, Artificial Sequence
  Description of Artificial Sequence: Synthetic oligonucleotide
  Target: SCNA; (+) strand; PAM type: NRG; PAM sequence: AAG
gcaccagacactagacatgt

SEQ ID NO: 37494 - DNA, 20 bp, Artificial Sequence
  Description of Artificial Sequence: Synthetic oligonucleotide
  Target: SCNA; (+) strand; PAM type: NRG; PAM sequence: TAG
actagacatgtaagtacatg

SEQ ID NO: 37495 - DNA, 20 bp, Artificial Sequence
  Description of Artificial Sequence: Synthetic oligonucleotide
  Target: SCNA; (+) strand; PAM type: NRG; PAM sequence: CAG
tagtaaatctaaatatatca

SEQ ID NO: 37496 - DNA, 20 bp, Artificial Sequence
  Description of Artificial Sequence: Synthetic oligonucleotide
  Target: SCNA; (+) strand; PAM type: NRG; PAM sequence: CAG
ttgttctgcctttttattat

SEQ ID NO: 37497 - DNA, 20 bp, Artificial Sequence
  Description of Artificial Sequence: Synthetic oligonucleotide
  Target: SCNA; (+) strand; PAM type: NRG; PAM sequence: GAG
gttctgcctttttattatca

SEQ ID NO: 37498 - DNA, 20 bp, Artificial Sequence
  Description of Artificial Sequence: Synthetic oligonucleotide
  Target: SCNA; (+) strand; PAM type: NRG; PAM sequence: TGG
ttttattatcagagttttaa

SEQ ID NO: 37499 - DNA, 20 bp, Artificial Sequence
  Description of Artificial Sequence: Synthetic oligonucleotide
  Target: SCNA; (+) strand; PAM type: NRG; PAM sequence: GGG
tttattatcagagttttaat

SEQ ID NO: 37500 - DNA, 20 bp, Artificial Sequence
  Description of Artificial Sequence: Synthetic oligonucleotide
  Target: SCNA; (+) strand; PAM type: NRG; PAM sequence: AAG
cagagttttaatgggctatc

SEQ ID NO: 37501 - DNA, 20 bp, Artificial Sequence
  Description of Artificial Sequence: Synthetic oligonucleotide
  Target: SCNA; (+) strand; PAM type: NRG; PAM sequence: AGG
agagttttaatgggctatca

SEQ ID NO: 37502 - DNA, 20 bp, Artificial Sequence
  Description of Artificial Sequence: Synthetic oligonucleotide
  Target: SCNA; (+) strand; PAM type: NRG; PAM sequence: AAG
ttttaatgggctatcaaggt

SEQ ID NO: 37503 - DNA, 20 bp, Artificial Sequence
  Description of Artificial Sequence: Synthetic oligonucleotide
  Target: SCNA; (+) strand; PAM type: NRG; PAM sequence: AGG
tttaatgggctatcaaggta

SEQ ID NO: 37504 - DNA, 20 bp, Artificial Sequence
  Description of Artificial Sequence: Synthetic oligonucleotide
  Target: SCNA; (+) strand; PAM type: NRG; PAM sequence: TAG
atcaaggtaaggctgctact

SEQ ID NO: 37505 - DNA, 20 bp, Artificial Sequence
  Description of Artificial Sequence: Synthetic oligonucleotide
  Target: SCNA; (+) strand; PAM type: NRG; PAM sequence: AGG
tcaaggtaaggctgctactt

SEQ ID NO: 37506 - DNA, 20 bp, Artificial Sequence
  Description of Artificial Sequence: Synthetic oligonucleotide
  Target: SCNA; (+) strand; PAM type: NRG; PAM sequence: AAG
ctgctacttaggattacatg

SEQ ID NO: 37507 - DNA, 20 bp, Artificial Sequence
  Description of Artificial Sequence: Synthetic oligonucleotide
  Target: SCNA; (+) strand; PAM type: NRG; PAM sequence: TGG
ctacttaggattacatgaag

SEQ ID NO: 37508 - DNA, 20 bp, Artificial Sequence
  Description of Artificial Sequence: Synthetic oligonucleotide
  Target: SCNA; (+) strand; PAM type: NRG; PAM sequence: CAG
tacatgaagtggaaacaacc

SEQ ID NO: 37509 - DNA, 20 bp, Artificial Sequence
  Description of Artificial Sequence: Synthetic oligonucleotide
  Target: SCNA; (+) strand; PAM type: NRG; PAM sequence: TAG
gaagtggaaacaacccagaa

SEQ ID NO: 37510 - DNA, 20 bp, Artificial Sequence
  Description of Artificial Sequence: Synthetic oligonucleotide
  Target: SCNA; (+) strand; PAM type: NRG; PAM sequence: CAG
aacaacccagaatagtttgc

SEQ ID NO: 37511 - DNA, 20 bp, Artificial Sequence
  Description of Artificial Sequence: Synthetic oligonucleotide
  Target: SCNA; (+) strand; PAM type: NRG; PAM sequence: AAG
acttctttctcacaattttc

SEQ ID NO: 37512 - DNA, 20 bp, Artificial Sequence
  Description of Artificial Sequence: Synthetic oligonucleotide
  Target: SCNA; (+) strand; PAM type: NRG; PAM sequence: TGG
atcattttgattgtaacttt

SEQ ID NO: 37513 - DNA, 20 bp, Artificial Sequence
  Description of Artificial Sequence: Synthetic oligonucleotide
  Target: SCNA; (+) strand; PAM type: NRG; PAM sequence: TAG
ttttgattgtaacttttgga

SEQ ID NO: 37514 - DNA, 20 bp, Artificial Sequence
  Description of Artificial Sequence: Synthetic oligonucleotide
  Target: SCNA; (+) strand; PAM type: NRG; PAM sequence: TAG
gtaacttttggatagctgaa

SEQ ID NO: 37515 - DNA, 20 bp, Artificial Sequence
  Description of Artificial Sequence: Synthetic oligonucleotide
  Target: SCNA; (+) strand; PAM type: NRG; PAM sequence: AAG
aatagcactgttcttatact

SEQ ID NO: 37516 - DNA, 20 bp, Artificial Sequence
  Description of Artificial Sequence: Synthetic oligonucleotide
  Target: SCNA; (+) strand; PAM type: NRG; PAM sequence: AAG
tactaagcatatgattataa

SEQ ID NO: 37517 - DNA, 20 bp, Artificial Sequence
  Description of Artificial Sequence: Synthetic oligonucleotide
  Target: SCNA; (+) strand; PAM type: NRG; PAM sequence: CAG
gcatatgattataaaagacc

SEQ ID NO: 37518 - DNA, 20 bp, Artificial Sequence
  Description of Artificial Sequence: Synthetic oligonucleotide
  Target: SCNA; (+) strand; PAM type: NRG; PAM sequence: AAG
tataaaagacccagaaatga

SEQ ID NO: 37519 - DNA, 20 bp, Artificial Sequence
  Description of Artificial Sequence: Synthetic oligonucleotide
  Target: SCNA; (+) strand; PAM type: NRG; PAM sequence: AAG
gtttgttaattgtctactgt

SEQ ID NO: 37520 - DNA, 20 bp, Artificial Sequence
  Description of Artificial Sequence: Synthetic oligonucleotide
  Target: SCNA; (+) strand; PAM type: NRG; PAM sequence: TGG
gttaattgtctactgtaagt

SEQ ID NO: 37521 - DNA, 20 bp, Artificial Sequence
  Description of Artificial Sequence: Synthetic oligonucleotide
  Target: SCNA; (+) strand; PAM type: NRG; PAM sequence: CAG
ctgtaagttggaaactctcc

SEQ ID NO: 37522 - DNA, 20 bp, Artificial Sequence
  Description of Artificial Sequence: Synthetic oligonucleotide
  Target: SCNA; (+) strand; PAM type: NRG; PAM sequence: TGG
ataaatatatttcactctca

SEQ ID NO: 37523 - DNA, 20 bp, Artificial Sequence
  Description of Artificial Sequence: Synthetic oligonucleotide
  Target: SCNA; (+) strand; PAM type: NRG; PAM sequence: TAG
ctctcatggtgcctacattc

SEQ ID NO: 37524 - DNA, 20 bp, Artificial Sequence
  Description of Artificial Sequence: Synthetic oligonucleotide
  Target: SCNA; (+) strand; PAM type: NRG; PAM sequence: AAG
tcatggtgcctacattctag

SEQ ID NO: 37525 - DNA, 20 bp, Artificial Sequence
  Description of Artificial Sequence: Synthetic oligonucleotide
  Target: SCNA; (+) strand; PAM type: NRG; PAM sequence: AGG
catggtgcctacattctaga

SEQ ID NO: 37526 - DNA, 20 bp, Artificial Sequence
  Description of Artificial Sequence: Synthetic oligonucleotide
  Target: SCNA; (+) strand; PAM type: NRG; PAM sequence: GGG
atggtgcctacattctagaa

SEQ ID NO: 37527 - DNA, 20 bp, Artificial Sequence
  Description of Artificial Sequence: Synthetic oligonucleotide
  Target: SCNA; (+) strand; PAM type: NRG; PAM sequence: GAG
ggtgcctacattctagaagg

SEQ ID NO: 37528 - DNA, 20 bp, Artificial Sequence
  Description of Artificial Sequence: Synthetic oligonucleotide
  Target: SCNA; (+) strand; PAM type: NRG; PAM sequence: AAG
aaaataaaaatcatacatta

SEQ ID NO: 37529 - DNA, 20 bp, Artificial Sequence
  Description of Artificial Sequence: Synthetic oligonucleotide
  Target: SCNA; (+) strand; PAM type: NRG; PAM sequence: AAG
taaaaatcatacattaaagt

SEQ ID NO: 37530 - DNA, 20 bp, Artificial Sequence
  Description of Artificial Sequence: Synthetic oligonucleotide
  Target: SCNA; (+) strand; PAM type: NRG; PAM sequence: AAG
cacattatgtattatattta

SEQ ID NO: 37531 - DNA, 20 bp, Artificial Sequence
  Description of Artificial Sequence: Synthetic oligonucleotide
  Target: SCNA; (+) strand; PAM type: NRG; PAM sequence: AGG
acattatgtattatatttaa

SEQ ID NO: 37532 - DNA, 20 bp, Artificial Sequence
  Description of Artificial Sequence: Synthetic oligonucleotide
  Target: SCNA; (+) strand; PAM type: NRG; PAM sequence: TGG
tttaaaggtgaataacactt

SEQ ID NO: 37533 - DNA, 20 bp, Artificial Sequence
  Description of Artificial Sequence: Synthetic oligonucleotide
  Target: SCNA; (+) strand; PAM type: NRG; PAM sequence: AAG
aggtgaataacactttggca

SEQ ID NO: 37534 - DNA, 20 bp, Artificial Sequence
  Description of Artificial Sequence: Synthetic oligonucleotide
  Target: SCNA; (+) strand; PAM type: NRG; PAM sequence: AAG
gaataacactttggcaaaga

SEQ ID NO: 37535 - DNA, 20 bp, Artificial Sequence
  Description of Artificial Sequence: Synthetic oligonucleotide
  Target: SCNA; (+) strand; PAM type: NRG; PAM sequence: AGG
aataacactttggcaaagaa

SEQ ID NO: 37536 - DNA, 20 bp, Artificial Sequence
  Description of Artificial Sequence: Synthetic oligonucleotide
  Target: SCNA; (+) strand; PAM type: NRG; PAM sequence: AAG
actttggcaaagaaaggaaa

SEQ ID NO: 37537 - DNA, 20 bp, Artificial Sequence
  Description of Artificial Sequence: Synthetic oligonucleotide
  Target: SCNA; (+) strand; PAM type: NRG; PAM sequence: AAG
tggcaaagaaaggaaaaaga

SEQ ID NO: 37538 - DNA, 20 bp, Artificial Sequence
  Description of Artificial Sequence: Synthetic oligonucleotide
  Target: SCNA; (+) strand; PAM type: NRG; PAM sequence: AAG
aagaaaggaaaaagaaagaa

SEQ ID NO: 37539 - DNA, 20 bp, Artificial Sequence
  Description of Artificial Sequence: Synthetic oligonucleotide
  Target: SCNA; (+) strand; PAM type: NRG; PAM sequence: AGG
agaaaggaaaaagaaagaaa

SEQ ID NO: 37540 - DNA, 20 bp, Artificial Sequence
  Description of Artificial Sequence: Synthetic oligonucleotide
  Target: SCNA; (+) strand; PAM type: NRG; PAM sequence: AAG
aggaaaaagaaagaaaagga

SEQ ID NO: 37541 - DNA, 20 bp, Artificial Sequence
  Description of Artificial Sequence: Synthetic oligonucleotide
  Target: SCNA; (+) strand; PAM type: NRG; PAM sequence: AAG
aaaaagaaagaaaaggaaag

SEQ ID NO: 37542 - DNA, 20 bp, Artificial Sequence
  Description of Artificial Sequence: Synthetic oligonucleotide
  Target: SCNA; (+) strand; PAM type: NRG; PAM sequence: AGG
aaaagaaagaaaaggaaaga

SEQ ID NO: 37543 - DNA, 20 bp, Artificial Sequence
  Description of Artificial Sequence: Synthetic oligonucleotide
  Target: SCNA; (+) strand; PAM type: NRG; PAM sequence: AAG
agaaagaaaaggaaagaagg

SEQ ID NO: 37544 - DNA, 20 bp, Artificial Sequence
  Description of Artificial Sequence: Synthetic oligonucleotide
  Target: SCNA; (+) strand; PAM type: NRG; PAM sequence: AGG
gaaagaaaaggaaagaagga

SEQ ID NO: 37545 - DNA, 20 bp, Artificial Sequence
  Description of Artificial Sequence: Synthetic oligonucleotide
  Target: SCNA; (+) strand; PAM type: NRG; PAM sequence: AAG
agaaaaggaaagaaggaagg

SEQ ID NO: 37546 - DNA, 20 bp, Artificial Sequence
  Description of Artificial Sequence: Synthetic oligonucleotide
  Target: SCNA; (+) strand; PAM type: NRG; PAM sequence: AGG
gaaaaggaaagaaggaagga

SEQ ID NO: 37547 - DNA, 20 bp, Artificial Sequence
  Description of Artificial Sequence: Synthetic oligonucleotide
  Target: SCNA; (+) strand; PAM type: NRG; PAM sequence: AAG
aaggaaagaaggaaggaagg

SEQ ID NO: 37548 - DNA, 20 bp, Artificial Sequence
  Description of Artificial Sequence: Synthetic oligonucleotide
  Target: SCNA; (+) strand; PAM type: NRG; PAM sequence: AAG
aaagaaggaaggaaggaagc

SEQ ID NO: 37549 - DNA, 20 bp, Artificial Sequence
  Description of Artificial Sequence: Synthetic oligonucleotide
  Target: SCNA; (+) strand; PAM type: NRG; PAM sequence: AAG
aaggaaggaaggaagcaaga

SEQ ID NO: 37550 - DNA, 20 bp, Artificial Sequence
  Description of Artificial Sequence: Synthetic oligonucleotide
  Target: SCNA; (+) strand; PAM type: NRG; PAM sequence: AAG
gaaggaagcaagaaagaaaa

SEQ ID NO: 37551 - DNA, 20 bp, Artificial Sequence
  Description of Artificial Sequence: Synthetic oligonucleotide
  Target: SCNA; (+) strand; PAM type: NRG; PAM sequence: GAG
aggaagcaagaaagaaaaaa

SEQ ID NO: 37552 - DNA, 20 bp, Artificial Sequence
  Description of Artificial Sequence: Synthetic oligonucleotide
  Target: SCNA; (+) strand; PAM type: NRG; PAM sequence: AAG
agcaagaaagaaaaaagaga

SEQ ID NO: 37553 - DNA, 20 bp, Artificial Sequence
  Description of Artificial Sequence: Synthetic oligonucleotide
  Target: SCNA; (+) strand; PAM type: NRG; PAM sequence: AAG
agaaagaaaaaagagaaaga

SEQ ID NO: 37554 - DNA, 20 bp, Artificial Sequence
  Description of Artificial Sequence: Synthetic oligonucleotide
  Target: SCNA; (+) strand; PAM type: NRG; PAM sequence: AAG
agaaaaaagagaaagaaaga

SEQ ID NO: 37555 - DNA, 20 bp, Artificial Sequence
  Description of Artificial Sequence: Synthetic oligonucleotide
  Target: SCNA; (+) strand; PAM type: NRG; PAM sequence: AGG
gaaaaaagagaaagaaagaa

SEQ ID NO: 37556 - DNA, 20 bp, Artificial Sequence
  Description of Artificial Sequence: Synthetic oligonucleotide
  Target: SCNA; (+) strand; PAM type: NRG; PAM sequence: GGG
aaaaaagagaaagaaagaaa

SEQ ID NO: 37557 - DNA, 20 bp, Artificial Sequence
  Description of Artificial Sequence: Synthetic oligonucleotide
  Target: SCNA; (+) strand; PAM type: NRG; PAM sequence: GAG
aaaagagaaagaaagaaagg

SEQ ID NO: 37558 - DNA, 20 bp, Artificial Sequence
  Description of Artificial Sequence: Synthetic oligonucleotide
  Target: SCNA; (+) strand; PAM type: NRG; PAM sequence: AGG
aaagagaaagaaagaaaggg

SEQ ID NO: 37559 - DNA, 20 bp, Artificial Sequence
  Description of Artificial Sequence: Synthetic oligonucleotide
  Target: SCNA; (+) strand; PAM type: NRG; PAM sequence: AAG
gagaaagaaagaaagggagg

SEQ ID NO: 37560 - DNA, 20 bp, Artificial Sequence
  Description of Artificial Sequence: Synthetic oligonucleotide
  Target: SCNA; (+) strand; PAM type: NRG; PAM sequence: AGG
agaaagaaagaaagggagga

SEQ ID NO: 37561 - DNA, 20 bp, Artificial Sequence
  Description of Artificial Sequence: Synthetic oligonucleotide
  Target: SCNA; (+) strand; PAM type: NRG; PAM sequence: AAG
aagaaagaaagggaggaagg

SEQ ID NO: 37562 - DNA, 20 bp, Artificial Sequence
  Description of Artificial Sequence: Synthetic oligonucleotide
  Target: SCNA; (+) strand; PAM type: NRG; PAM sequence: AGG
agaaagaaagggaggaagga

SEQ ID NO: 37563 - DNA, 20 bp, Artificial Sequence
  Description of Artificial Sequence: Synthetic oligonucleotide
  Target: SCNA; (+) strand; PAM type: NRG; PAM sequence: GGG
gaaagaaagggaggaaggaa

SEQ ID NO: 37564 - DNA, 20 bp, Artificial Sequence
  Description of Artificial Sequence: Synthetic oligonucleotide
  Target: SCNA; (+) strand; PAM type: NRG; PAM sequence: GAG
aagaaagggaggaaggaagg

SEQ ID NO: 37565 - DNA, 20 bp, Artificial Sequence
  Description of Artificial Sequence: Synthetic oligonucleotide
  Target: SCNA; (+) strand; PAM type: NRG; PAM sequence: AGG
agaaagggaggaaggaaggg

SEQ ID NO: 37566 - DNA, 20 bp, Artificial Sequence
  Description of Artificial Sequence: Synthetic oligonucleotide
  Target: SCNA; (+) strand; PAM type: NRG; PAM sequence: GGG
gaaagggaggaaggaaggga

SEQ ID NO: 37567 - DNA, 20 bp, Artificial Sequence
  Description of Artificial Sequence: Synthetic oligonucleotide
  Target: SCNA; (+) strand; PAM type: NRG; PAM sequence: GAG
aagggaggaaggaagggagg

SEQ ID NO: 37568 - DNA, 20 bp, Artificial Sequence
  Description of Artificial Sequence: Synthetic oligonucleotide
  Target: SCNA; (+) strand; PAM type: NRG; PAM sequence: GAG
gggaggaaggaagggaggga

SEQ ID NO: 37569 - DNA, 20 bp, Artificial Sequence
  Description of Artificial Sequence: Synthetic oligonucleotide
  Target: SCNA; (+) strand; PAM type: NRG; PAM sequence: GAG
gaggaaggaagggagggaga

SEQ ID NO: 37570 - DNA, 20 bp, Artificial Sequence
  Description of Artificial Sequence: Synthetic oligonucleotide
  Target: SCNA; (+) strand; PAM type: NRG; PAM sequence: AGG
aggaaggaagggagggagag

SEQ ID NO: 37571 - DNA, 20 bp, Artificial Sequence
  Description of Artificial Sequence: Synthetic oligonucleotide
  Target: SCNA; (+) strand; PAM type: NRG; PAM sequence: GGG
ggaaggaagggagggagaga

SEQ ID NO: 37572 - DNA, 20 bp, Artificial Sequence
  Description of Artificial Sequence: Synthetic oligonucleotide
  Target: SCNA; (+) strand; PAM type: NRG; PAM sequence: GAG
aaggaagggagggagagagg

SEQ ID NO: 37573 - DNA, 20 bp, Artificial Sequence
  Description of Artificial Sequence: Synthetic oligonucleotide
  Target: SCNA; (+) strand; PAM type: NRG; PAM sequence: AGG
aggaagggagggagagaggg

SEQ ID NO: 37574 - DNA, 20 bp, Artificial Sequence
  Description of Artificial Sequence: Synthetic oligonucleotide
  Target: SCNA; (+) strand; PAM type: NRG; PAM sequence: AAG
aagggagggagagagggagg

SEQ ID NO: 37575 - DNA, 20 bp, Artificial Sequence
  Description of Artificial Sequence: Synthetic oligonucleotide
  Target: SCNA; (+) strand; PAM type: NRG; PAM sequence: AGG
agggagggagagagggagga

SEQ ID NO: 37576 - DNA, 20 bp, Artificial Sequence
  Description of Artificial Sequence: Synthetic oligonucleotide
  Target: SCNA; (+) strand; PAM type: NRG; PAM sequence: AAG
gagggagagagggaggaagg

SEQ ID NO: 37577 - DNA, 20 bp, Artificial Sequence
  Description of Artificial Sequence: Synthetic oligonucleotide
  Target: SCNA; (+) strand; PAM type: NRG; PAM sequence: AGG
agggagagagggaggaagga

SEQ ID NO: 37578 - DNA, 20 bp, Artificial Sequence
  Description of Artificial Sequence: Synthetic oligonucleotide
  Target: SCNA; (+) strand; PAM type: NRG; PAM sequence: AAG
gagagagggaggaaggaagg

SEQ ID NO: 37579 - DNA, 20 bp, Artificial Sequence
  Description of Artificial Sequence: Synthetic oligonucleotide
  Target: SCNA; (+) strand; PAM type: NRG; PAM sequence: AGG
agagagggaggaaggaagga

SEQ ID NO: 37580 - DNA, 20 bp, Artificial Sequence
  Description of Artificial Sequence: Synthetic oligonucleotide
  Target: SCNA; (+) strand; PAM type: NRG; PAM sequence: GGG
gagagggaggaaggaaggaa

SEQ ID NO: 37581 - DNA, 20 bp, Artificial Sequence
  Description of Artificial Sequence: Synthetic oligonucleotide
  Target: SCNA; (+) strand; PAM type: NRG; PAM sequence: GAG
gagggaggaaggaaggaagg

SEQ ID NO: 37582 - DNA, 20 bp, Artificial Sequence
  Description of Artificial Sequence: Synthetic oligonucleotide
  Target: SCNA; (+) strand; PAM type: NRG; PAM sequence: AAG
gaggaaggaaggaagggaga

SEQ ID NO: 37583 - DNA, 20 bp, Artificial Sequence
  Description of Artificial Sequence: Synthetic oligonucleotide
  Target: SCNA; (+) strand; PAM type: NRG; PAM sequence: AGG
aggaaggaaggaagggagaa

SEQ ID NO: 37584 - DNA, 20 bp, Artificial Sequence
  Description of Artificial Sequence: Synthetic oligonucleotide
  Target: SCNA; (+) strand; PAM type: NRG; PAM sequence: AAG
aaggaaggaagggagaaagg

SEQ ID NO: 37585 - DNA, 20 bp, Artificial Sequence
  Description of Artificial Sequence: Synthetic oligonucleotide
  Target: SCNA; (+) strand; PAM type: NRG; PAM sequence: AGG
aggaaggaagggagaaagga

SEQ ID NO: 37586 - DNA, 20 bp, Artificial Sequence
  Description of Artificial Sequence: Synthetic oligonucleotide
  Target: SCNA; (+) strand; PAM type: NRG; PAM sequence: AAG
aaggaagggagaaaggaagg

SEQ ID NO: 37587 - DNA, 20 bp, Artificial Sequence
  Description of Artificial Sequence: Synthetic oligonucleotide
  Target: SCNA; (+) strand; PAM type: NRG; PAM sequence: AGG
aggaagggagaaaggaagga

SEQ ID NO: 37588 - DNA, 20 bp, Artificial Sequence
  Description of Artificial Sequence: Synthetic oligonucleotide
  Target: SCNA; (+) strand; PAM type: NRG; PAM sequence: AAG
aagggagaaaggaaggaagg

SEQ ID NO: 37589 - DNA, 20 bp, Artificial Sequence
  Description of Artificial Sequence: Synthetic oligonucleotide
  Target: SCNA; (+) strand; PAM type: NRG; PAM sequence: AGG
agggagaaaggaaggaagga

SEQ ID NO: 37590 - DNA, 20 bp, Artificial Sequence
  Description of Artificial Sequence: Synthetic oligonucleotide
  Target: SCNA; (+) strand; PAM type: NRG; PAM sequence: GGG
gggagaaaggaaggaaggaa

SEQ ID NO: 37591 - DNA, 20 bp, Artificial Sequence
  Description of Artificial Sequence: Synthetic oligonucleotide
  Target: SCNA; (+) strand; PAM type: NRG; PAM sequence: AAG
aaaggaaggaaggaagggaa

SEQ ID NO: 37592 - DNA, 20 bp, Artificial Sequence
  Description of Artificial Sequence: Synthetic oligonucleotide
  Target: SCNA; (+) strand; PAM type: NRG; PAM sequence: AAG
gaaggaaggaagggaaaaga

SEQ ID NO: 37593 - DNA, 20 bp, Artificial Sequence
  Description of Artificial Sequence: Synthetic oligonucleotide
  Target: SCNA; (+) strand; PAM type: NRG; PAM sequence: AAG
gaaggaagggaaaagaaaga

SEQ ID NO: 37594 - DNA, 20 bp, Artificial Sequence
  Description of Artificial Sequence: Synthetic oligonucleotide
  Target: SCNA; (+) strand; PAM type: NRG; PAM sequence: AGG
aaggaagggaaaagaaagaa

SEQ ID NO: 37595 - DNA, 20 bp, Artificial Sequence
  Description of Artificial Sequence: Synthetic oligonucleotide
  Target: SCNA; (+) strand; PAM type: NRG; PAM sequence: AAG
aagggaaaagaaagaaagga

SEQ ID NO: 37596 - DNA, 20 bp, Artificial Sequence
  Description of Artificial Sequence: Synthetic oligonucleotide
  Target: SCNA; (+) strand; PAM type: NRG; PAM sequence: GAG
gggaaaagaaagaaaggaaa

SEQ ID NO: 37597 - DNA, 20 bp, Artificial Sequence
  Description of Artificial Sequence: Synthetic oligonucleotide
  Target: SCNA; (+) strand; PAM type: NRG; PAM sequence: GAG
gaaaagaaagaaaggaaaga

SEQ ID NO: 37598 - DNA, 20 bp, Artificial Sequence
  Description of Artificial Sequence: Synthetic oligonucleotide
  Target: SCNA; (+) strand; PAM type: NRG; PAM sequence: AAG
agaaagaaaggaaagagaga

SEQ ID NO: 37599 - DNA, 20 bp, Artificial Sequence
  Description of Artificial Sequence: Synthetic oligonucleotide
  Target: SCNA; (+) strand; PAM type: NRG; PAM sequence: AAG
aagaaaggaaagagagaaag

SEQ ID NO: 37600 - DNA, 20 bp, Artificial Sequence
  Description of Artificial Sequence: Synthetic oligonucleotide
  Target: SCNA; (+) strand; PAM type: NRG; PAM sequence: AGG
agaaaggaaagagagaaaga

SEQ ID NO: 37601 - DNA, 20 bp, Artificial Sequence
  Description of Artificial Sequence: Synthetic oligonucleotide
  Target: SCNA; (+) strand; PAM type: NRG; PAM sequence: AAG
aggaaagagagaaagaagga

SEQ ID NO: 37602 - DNA, 20 bp, Artificial Sequence
  Description of Artificial Sequence: Synthetic oligonucleotide
  Target: SCNA; (+) strand; PAM type: NRG; PAM sequence: AAG
aagagagaaagaaggaaaga

SEQ ID NO: 37603 - DNA, 20 bp, Artificial Sequence
  Description of Artificial Sequence: Synthetic oligonucleotide
  Target: SCNA; (+) strand; PAM type: NRG; PAM sequence: AAG
gagaaagaaggaaagaaaga

SEQ ID NO: 37604 - DNA, 20 bp, Artificial Sequence
  Description of Artificial Sequence: Synthetic oligonucleotide
  Target: SCNA; (+) strand; PAM type: NRG; PAM sequence: AAG
gaaggaaagaaagaaagaaa

SEQ ID NO: 37605 - DNA, 20 bp, Artificial Sequence
  Description of Artificial Sequence: Synthetic oligonucleotide
  Target: SCNA; (+) strand; PAM type: NRG; PAM sequence: AAG
aagaaagaaagaaaaagaaa

SEQ ID NO: 37606 - DNA, 20 bp, Artificial Sequence
  Description of Artificial Sequence: Synthetic oligonucleotide
  Target: SCNA; (+) strand; PAM type: NRG; PAM sequence: AAG
aagaaagaaaaagaaaaaga

SEQ ID NO: 37607 - DNA, 20 bp, Artificial Sequence
  Description of Artificial Sequence: Synthetic oligonucleotide
  Target: SCNA; (+) strand; PAM type: NRG; PAM sequence: AAG
aagaaaaagaaaaagaaaga

SEQ ID NO: 37608 - DNA, 20 bp, Artificial Sequence
  Description of Artificial Sequence: Synthetic oligonucleotide
  Target: SCNA; (+) strand; PAM type: NRG; PAM sequence: AAG
aaaaagaaaaagaaagaaag

SEQ ID NO: 37609 - DNA, 20 bp, Artificial Sequence
  Description of Artificial Sequence: Synthetic oligonucleotide
  Target: SCNA; (+) strand; PAM type: NRG; PAM sequence: AGG
aaaagaaaaagaaagaaaga

SEQ ID NO: 37610 - DNA, 20 bp, Artificial Sequence
  Description of Artificial Sequence: Synthetic oligonucleotide
  Target: SCNA; (+) strand; PAM type: NRG; PAM sequence: AAG
aagaaagaaagaaggaaaaa

SEQ ID NO: 37611 - DNA, 20 bp, Artificial Sequence
  Description of Artificial Sequence: Synthetic oligonucleotide
  Target: SCNA; (+) strand; PAM type: NRG; PAM sequence: TAG
aaagaaagaaggaaaaaaag

SEQ ID NO: 37612 - DNA, 20 bp, Artificial Sequence
  Description of Artificial Sequence: Synthetic oligonucleotide
  Target: SCNA; (+) strand; PAM type: NRG; PAM sequence: AGG
aagaaagaaggaaaaaaagt

SEQ ID NO: 37613 - DNA, 20 bp, Artificial Sequence
  Description of Artificial Sequence: Synthetic oligonucleotide
  Target: SCNA; (+) strand; PAM type: NRG; PAM sequence: GGG
agaaagaaggaaaaaaagta

SEQ ID NO: 37614 - DNA, 20 bp, Artificial Sequence
  Description of Artificial Sequence: Synthetic oligonucleotide
  Target: SCNA; (+) strand; PAM type: NRG; PAM sequence: GAG
aaagaaggaaaaaaagtagg

SEQ ID NO: 37615 - DNA, 20 bp, Artificial Sequence
  Description of Artificial Sequence: Synthetic oligonucleotide
  Target: SCNA; (+) strand; PAM type: NRG; PAM sequence: TGG
aggaaaaaaagtagggagac

SEQ ID NO: 37616 - DNA, 20 bp, Artificial Sequence
  Description of Artificial Sequence: Synthetic oligonucleotide
  Target: SCNA; (+) strand; PAM type: NRG; PAM sequence: GGG
ggaaaaaaagtagggagact

SEQ ID NO: 37617 - DNA, 20 bp, Artificial Sequence
  Description of Artificial Sequence: Synthetic oligonucleotide
  Target: SCNA; (+) strand; PAM type: NRG; PAM sequence: CAG
agtagggagactgggaatac

SEQ ID NO: 37618 - DNA, 20 bp, Artificial Sequence
  Description of Artificial Sequence: Synthetic oligonucleotide
  Target: SCNA; (+) strand; PAM type: NRG; PAM sequence: GAG
tagggagactgggaatacca

SEQ ID NO: 37619 - DNA, 20 bp, Artificial Sequence
  Description of Artificial Sequence: Synthetic oligonucleotide
  Target: SCNA; (+) strand; PAM type: NRG; PAM sequence: AGG
agggagactgggaataccag

SEQ ID NO: 37620 - DNA, 20 bp, Artificial Sequence
  Description of Artificial Sequence: Synthetic oligonucleotide
  Target: SCNA; (+) strand; PAM type: NRG; PAM sequence: GAG
agactgggaataccagaggt

SEQ ID NO: 37621 - DNA, 20 bp, Artificial Sequence
  Description of Artificial Sequence: Synthetic oligonucleotide
  Target: SCNA; (+) strand; PAM type: NRG; PAM sequence: AAG
ctgggaataccagaggtgag

SEQ ID NO: 37622 - DNA, 20 bp, Artificial Sequence
  Description of Artificial Sequence: Synthetic oligonucleotide
  Target: SCNA; (+) strand; PAM type: NRG; PAM sequence: TGG
aataccagaggtgagaagaa

SEQ ID NO: 37623 - DNA, 20 bp, Artificial Sequence
  Description of Artificial Sequence: Synthetic oligonucleotide
  Target: SCNA; (+) strand; PAM type: NRG; PAM sequence: TAG
agaatggctccaattttata

SEQ ID NO: 37624 - DNA, 20 bp, Artificial Sequence
  Description of Artificial Sequence: Synthetic oligonucleotide
  Target: SCNA; (+) strand; PAM type: NRG; PAM sequence: TAG
ggctccaattttatatagat

SEQ ID NO: 37625 - DNA, 20 bp, Artificial Sequence
  Description of Artificial Sequence: Synthetic oligonucleotide
  Target: SCNA; (+) strand; PAM type: NRG; PAM sequence: AGG
gctccaattttatatagatt

SEQ ID NO: 37626 - DNA, 20 bp, Artificial Sequence
  Description of Artificial Sequence: Synthetic oligonucleotide
  Target: SCNA; (+) strand; PAM type: NRG; PAM sequence: GGG
ctccaattttatatagatta

SEQ ID NO: 37627 - DNA, 20 bp, Artificial Sequence
  Description of Artificial Sequence: Synthetic oligonucleotide
  Target: SCNA; (+) strand; PAM type: NRG; PAM sequence: CAG
caattttatatagattaggg

SEQ ID NO: 37628 - DNA, 20 bp, Artificial Sequence
  Description of Artificial Sequence: Synthetic oligonucleotide
  Target: SCNA; (+) strand; PAM type: NRG; PAM sequence: AGG
aattttatatagattagggc

SEQ ID NO: 37629 - DNA, 20 bp, Artificial Sequence
  Description of Artificial Sequence: Synthetic oligonucleotide
  Target: SCNA; (+) strand; PAM type: NRG; PAM sequence: AAG
agattagggcaggcctcccc

SEQ ID NO: 37630 - DNA, 20 bp, Artificial Sequence
  Description of Artificial Sequence: Synthetic oligonucleotide
  Target: SCNA; (+) strand; PAM type: NRG; PAM sequence: CAG
aggcctccccaagaacgtgt

SEQ ID NO: 37631 - DNA, 20 bp, Artificial Sequence
  Description of Artificial Sequence: Synthetic oligonucleotide
  Target: SCNA; (+) strand; PAM type: NRG; PAM sequence: AGG
ggcctccccaagaacgtgtc

SEQ ID NO: 37632 - DNA, 20 bp, Artificial Sequence
  Description of Artificial Sequence: Synthetic oligonucleotide
  Target: SCNA; (+) strand; PAM type: NRG; PAM sequence: GGG
gcctccccaagaacgtgtca

SEQ ID NO: 37633 - DNA, 20 bp, Artificial Sequence
  Description of Artificial Sequence: Synthetic oligonucleotide
  Target: SCNA; (+) strand; PAM type: NRG; PAM sequence: AAG
ccccaagaacgtgtcagggc

SEQ ID NO: 37634 - DNA, 20 bp, Artificial Sequence
  Description of Artificial Sequence: Synthetic oligonucleotide
  Target: SCNA; (+) strand; PAM type: NRG; PAM sequence: AGG
cccaagaacgtgtcagggca

SEQ ID NO: 37635 - DNA, 20 bp, Artificial Sequence
  Description of Artificial Sequence: Synthetic oligonucleotide
  Target: SCNA; (+) strand; PAM type: NRG; PAM sequence: GGG
ccaagaacgtgtcagggcaa

SEQ ID NO: 37636 - DNA, 20 bp, Artificial Sequence
  Description of Artificial Sequence: Synthetic oligonucleotide
  Target: SCNA; (+) strand; PAM type: NRG; PAM sequence: AAG
agggtatgcttgatttattc

SEQ ID NO: 37637 - DNA, 20 bp, Artificial Sequence
  Description of Artificial Sequence: Synthetic oligonucleotide
  Target: SCNA; (+) strand; PAM type: NRG; PAM sequence: TAG
tgcttgatttattcaagaaa

SEQ ID NO: 37638 - DNA, 20 bp, Artificial Sequence
  Description of Artificial Sequence: Synthetic oligonucleotide
  Target: SCNA; (+) strand; PAM type: NRG; PAM sequence: AAG
tgatttattcaagaaatagc

SEQ ID NO: 37639 - DNA, 20 bp, Artificial Sequence
  Description of Artificial Sequence: Synthetic oligonucleotide
  Target: SCNA; (+) strand; PAM type: NRG; PAM sequence: AGG
gatttattcaagaaatagca

SEQ ID NO: 37640 - DNA, 20 bp, Artificial Sequence
  Description of Artificial Sequence: Synthetic oligonucleotide
  Target: SCNA; (+) strand; PAM type: NRG; PAM sequence: GAG
tttattcaagaaatagcaag

SEQ ID NO: 37641 - DNA, 20 bp, Artificial Sequence
  Description of Artificial Sequence: Synthetic oligonucleotide
  Target: SCNA; (+) strand; PAM type: NRG; PAM sequence: AGG
ttattcaagaaatagcaagg

SEQ ID NO: 37642 - DNA, 20 bp, Artificial Sequence
  Description of Artificial Sequence: Synthetic oligonucleotide
  Target: SCNA; (+) strand; PAM type: NRG; PAM sequence: TGG
aaatagcaaggaggtcattg

SEQ ID NO: 37643 - DNA, 20 bp, Artificial Sequence
  Description of Artificial Sequence: Synthetic oligonucleotide
  Target: SCNA; (+) strand; PAM type: NRG; PAM sequence: CAG
tagcaaggaggtcattgtgg

SEQ ID NO: 37644 - DNA, 20 bp, Artificial Sequence
  Description of Artificial Sequence: Synthetic oligonucleotide
  Target: SCNA; (+) strand; PAM type: NRG; PAM sequence: AGG
agcaaggaggtcattgtggc

SEQ ID NO: 37645 - DNA, 20 bp, Artificial Sequence
  Description of Artificial Sequence: Synthetic oligonucleotide
  Target: SCNA; (+) strand; PAM type: NRG; PAM sequence: GGG
gcaaggaggtcattgtggca

SEQ ID NO: 37646 - DNA, 20 bp, Artificial Sequence
  Description of Artificial Sequence: Synthetic oligonucleotide
  Target: SCNA; (+) strand; PAM type: NRG; PAM sequence: AAG
aggtcattgtggcagggaaa

SEQ ID NO: 37647 - DNA, 20 bp, Artificial Sequence
  Description of Artificial Sequence: Synthetic oligonucleotide
  Target: SCNA; (+) strand; PAM type: NRG; PAM sequence: TAG
caaaaattattttgctgttg

SEQ ID NO: 37648 - DNA, 20 bp, Artificial Sequence
  Description of Artificial Sequence: Synthetic oligonucleotide
  Target: SCNA; (+) strand; PAM type: NRG; PAM sequence: TGG
aaattattttgctgttgtag

SEQ ID NO: 37649 - DNA, 20 bp, Artificial Sequence
  Description of Artificial Sequence: Synthetic oligonucleotide
  Target: SCNA; (+) strand; PAM type: NRG; PAM sequence: TAG
gttgacacctcatactgtat

SEQ ID NO: 37650 - DNA, 20 bp, Artificial Sequence
  Description of Artificial Sequence: Synthetic oligonucleotide
  Target: SCNA; (+) strand; PAM type: NRG; PAM sequence: AAG
tagttccatatttaaaatga

SEQ ID NO: 37651 - DNA, 20 bp, Artificial Sequence
  Description of Artificial Sequence: Synthetic oligonucleotide
  Target: SCNA; (+) strand; PAM type: NRG; PAM sequence: TGG
aatgaaagttataatatctt

SEQ ID NO: 37652 - DNA, 20 bp, Artificial Sequence
  Description of Artificial Sequence: Synthetic oligonucleotide
  Target: SCNA; (+) strand; PAM type: NRG; PAM sequence: CAG
ccatgtttgtcaaaaaaatt

SEQ ID NO: 37653 - DNA, 20 bp, Artificial Sequence
  Description of Artificial Sequence: Synthetic oligonucleotide
  Target: SCNA; (+) strand; PAM type: NRG; PAM sequence: CAG
aattcagtcaaaattcttct

SEQ ID NO: 37654 - DNA, 20 bp, Artificial Sequence
  Description of Artificial Sequence: Synthetic oligonucleotide
  Target: SCNA; (+) strand; PAM type: NRG; PAM sequence: TGG
ctacctcaaaactatatctc

SEQ ID NO: 37655 - DNA, 20 bp, Artificial Sequence
  Description of Artificial Sequence: Synthetic oligonucleotide
  Target: SCNA; (+) strand; PAM type: NRG; PAM sequence: TGG
ctcaaaactatatctctggt

SEQ ID NO: 37656 - DNA, 20 bp, Artificial Sequence
  Description of Artificial Sequence: Synthetic oligonucleotide
  Target: SCNA; (+) strand; PAM type: NRG; PAM sequence: AAG
ctctggttggtatgtatttt

SEQ ID NO: 37657 - DNA, 20 bp, Artificial Sequence
  Description of Artificial Sequence: Synthetic oligonucleotide
  Target: SCNA; (+) strand; PAM type: NRG; PAM sequence: TGG
atttcccacaaatatgtatt

SEQ ID NO: 37658 - DNA, 20 bp, Artificial Sequence
  Description of Artificial Sequence: Synthetic oligonucleotide
  Target: SCNA; (+) strand; PAM type: NRG; PAM sequence: CAG
atgaactgttatgtaatatg

SEQ ID NO: 37659 - DNA, 20 bp, Artificial Sequence
  Description of Artificial Sequence: Synthetic oligonucleotide
  Target: SCNA; (+) strand; PAM type: NRG; PAM sequence: AAG
atgcagatatgccatttaat

SEQ ID NO: 37660 - DNA, 20 bp, Artificial Sequence
  Description of Artificial Sequence: Synthetic oligonucleotide
  Target: SCNA; (+) strand; PAM type: NRG; PAM sequence: GAG
gcagatatgccatttaataa

SEQ ID NO: 37661 - DNA, 20 bp, Artificial Sequence
  Description of Artificial Sequence: Synthetic oligonucleotide
  Target: SCNA; (+) strand; PAM type: NRG; PAM sequence: AAG
taagagatgatgtcactata

SEQ ID NO: 37662 - DNA, 20 bp, Artificial Sequence
  Description of Artificial Sequence: Synthetic oligonucleotide
  Target: SCNA; (+) strand; PAM type: NRG; PAM sequence: AAG
tgatgtcactataaagaaat

SEQ ID NO: 37663 - DNA, 20 bp, Artificial Sequence
  Description of Artificial Sequence: Synthetic oligonucleotide
  Target: SCNA; (+) strand; PAM type: NRG; PAM sequence: AAG
cactataaagaaataagtaa

SEQ ID NO: 37664 - DNA, 20 bp, Artificial Sequence
  Description of Artificial Sequence: Synthetic oligonucleotide
  Target: SCNA; (+) strand; PAM type: NRG; PAM sequence: TGG
taagtaaaagaactttattt

SEQ ID NO: 37665 - DNA, 20 bp, Artificial Sequence
  Description of Artificial Sequence: Synthetic oligonucleotide
  Target: SCNA; (+) strand; PAM type: NRG; PAM sequence: TAG
aagaactttattttggaaat

SEQ ID NO: 37666 - DNA, 20 bp, Artificial Sequence
  Description of Artificial Sequence: Synthetic oligonucleotide
  Target: SCNA; (+) strand; PAM type: NRG; PAM sequence: AGG
agaactttattttggaaatt

SEQ ID NO: 37667 - DNA, 20 bp, Artificial Sequence
  Description of Artificial Sequence: Synthetic oligonucleotide
  Target: SCNA; (+) strand; PAM type: NRG; PAM sequence: TAG
tattttggaaattaggaaat

SEQ ID NO: 37668 - DNA, 20 bp, Artificial Sequence
  Description of Artificial Sequence: Synthetic oligonucleotide
  Target: SCNA; (+) strand; PAM type: NRG; PAM sequence: AGG
attttggaaattaggaaatt

SEQ ID NO: 37669 - DNA, 20 bp, Artificial Sequence
  Description of Artificial Sequence: Synthetic oligonucleotide
  Target: SCNA; (+) strand; PAM type: NRG; PAM sequence: AAG
aaattaggaaattaggcaca

SEQ ID NO: 37670 - DNA, 20 bp, Artificial Sequence
  Description of Artificial Sequence: Synthetic oligonucleotide
  Target: SCNA; (+) strand; PAM type: NRG; PAM sequence: AGG
aattaggaaattaggcacaa

SEQ ID NO: 37671 - DNA, 20 bp, Artificial Sequence
  Description of Artificial Sequence: Synthetic oligonucleotide
  Target: SCNA; (+) strand; PAM type: NRG; PAM sequence: GGG
attaggaaattaggcacaaa

SEQ ID NO: 37672 - DNA, 20 bp, Artificial Sequence
  Description of Artificial Sequence: Synthetic oligonucleotide
  Target: SCNA; (+) strand; PAM type: NRG; PAM sequence: AAG
acaaagggatttgttactcc

SEQ ID NO: 37673 - DNA, 20 bp, Artificial Sequence
  Description of Artificial Sequence: Synthetic oligonucleotide
  Target: SCNA; (+) strand; PAM type: NRG; PAM sequence: AGG
caaagggatttgttactcca

SEQ ID NO: 37674 - DNA, 20 bp, Artificial Sequence
  Description of Artificial Sequence: Synthetic oligonucleotide
  Target: SCNA; (+) strand; PAM type: NRG; PAM sequence: AAG
agggatttgttactccaagg

SEQ ID NO: 37675 - DNA, 20 bp, Artificial Sequence
  Description of Artificial Sequence: Synthetic oligonucleotide
  Target: SCNA; (+) strand; PAM type: NRG; PAM sequence: GAG
ggatttgttactccaaggaa

SEQ ID NO: 37676 - DNA, 20 bp, Artificial Sequence
  Description of Artificial Sequence: Synthetic oligonucleotide
  Target: SCNA; (+) strand; PAM type: NRG; PAM sequence: AAG
ctccaaggaagagaaattcc

SEQ ID NO: 37677 - DNA, 20 bp, Artificial Sequence
  Description of Artificial Sequence: Synthetic oligonucleotide
  Target: SCNA; (+) strand; PAM type: NRG; PAM sequence: AAG
aagacttacaattaacatga

SEQ ID NO: 37678 - DNA, 20 bp, Artificial Sequence
  Description of Artificial Sequence: Synthetic oligonucleotide
  Target: SCNA; (+) strand; PAM type: NRG; PAM sequence: TGG
ctgaaatgtcactgttcctt

SEQ ID NO: 37679 - DNA, 20 bp, Artificial Sequence
  Description of Artificial Sequence: Synthetic oligonucleotide
  Target: SCNA; (+) strand; PAM type: NRG; PAM sequence: CAG
ttgtttcattaactttcttc

SEQ ID NO: 37680 - DNA, 20 bp, Artificial Sequence
  Description of Artificial Sequence: Synthetic oligonucleotide
  Target: SCNA; (+) strand; PAM type: NRG; PAM sequence: TGG
taataattataaaatttgca

SEQ ID NO: 37681 - DNA, 20 bp, Artificial Sequence
  Description of Artificial Sequence: Synthetic oligonucleotide
  Target: SCNA; (+) strand; PAM type: NRG; PAM sequence: TGG
aaatttgcatggcatttatc

SEQ ID NO: 37682 - DNA, 20 bp, Artificial Sequence
  Description of Artificial Sequence: Synthetic oligonucleotide
  Target: SCNA; (+) strand; PAM type: NRG; PAM sequence: GGG
aatttgcatggcatttatct

SEQ ID NO: 37683 - DNA, 20 bp, Artificial Sequence
  Description of Artificial Sequence: Synthetic oligonucleotide
  Target: SCNA; (+) strand; PAM type: NRG; PAM sequence: AAG
tctgggttaatgcctgaaac

SEQ ID NO: 37684 - DNA, 20 bp, Artificial Sequence
  Description of Artificial Sequence: Synthetic oligonucleotide
  Target: SCNA; (+) strand; PAM type: NRG; PAM sequence: AAG
ggttaatgcctgaaacaagc

SEQ ID NO: 37685 - DNA, 20 bp, Artificial Sequence
  Description of Artificial Sequence: Synthetic oligonucleotide
  Target: SCNA; (+) strand; PAM type: NRG; PAM sequence: AAG
aaacaagcaagaccaatata

SEQ ID NO: 37686 - DNA, 20 bp, Artificial Sequence
  Description of Artificial Sequence: Synthetic oligonucleotide
  Target: SCNA; (+) strand; PAM type: NRG; PAM sequence: AGG
aacaagcaagaccaatataa

SEQ ID NO: 37687 - DNA, 20 bp, Artificial Sequence
  Description of Artificial Sequence: Synthetic oligonucleotide
  Target: SCNA; (+) strand; PAM type: NRG; PAM sequence: TAG
aagcaagaccaatataaagg

SEQ ID NO: 37688 - DNA, 20 bp, Artificial Sequence
  Description of Artificial Sequence: Synthetic oligonucleotide
  Target: SCNA; (+) strand; PAM type: NRG; PAM sequence: AAG
taaaggtagcactttttcac

SEQ ID NO: 37689 - DNA, 20 bp, Artificial Sequence
  Description of Artificial Sequence: Synthetic oligonucleotide
  Target: SCNA; (+) strand; PAM type: NRG; PAM sequence: AGG
aaaggtagcactttttcaca

SEQ ID NO: 37690 - DNA, 20 bp, Artificial Sequence
  Description of Artificial Sequence: Synthetic oligonucleotide
  Target: SCNA; (+) strand; PAM type: NRG; PAM sequence: GGG
aaggtagcactttttcacaa

SEQ ID NO: 37691 - DNA, 20 bp, Artificial Sequence
  Description of Artificial Sequence: Synthetic oligonucleotide
  Target: SCNA; (+) strand; PAM type: NRG; PAM sequence: GGG
aggtagcactttttcacaag

SEQ ID NO: 37692 - DNA, 20 bp, Artificial Sequence
  Description of Artificial Sequence: Synthetic oligonucleotide
  Target: SCNA; (+) strand; PAM type: NRG; PAM sequence: GAG
gtagcactttttcacaaggg

SEQ ID NO: 37693 - DNA, 20 bp, Artificial Sequence
  Description of Artificial Sequence: Synthetic oligonucleotide
  Target: SCNA; (+) strand; PAM type: NRG; PAM sequence: AGG
tagcactttttcacaagggg

SEQ ID NO: 37694 - DNA, 20 bp, Artificial Sequence
  Description of Artificial Sequence: Synthetic oligonucleotide
  Target: SCNA; (+) strand; PAM type: NRG; PAM sequence: GGG
agcactttttcacaagggga

SEQ ID NO: 37695 - DNA, 20 bp, Artificial Sequence
  Description of Artificial Sequence: Synthetic oligonucleotide
  Target: SCNA; (+) strand; PAM type: NRG; PAM sequence: CAG
ctttttcacaaggggagggt

SEQ ID NO: 37696 - DNA, 20 bp, Artificial Sequence
  Description of Artificial Sequence: Synthetic oligonucleotide
  Target: SCNA; (+) strand; PAM type: NRG; PAM sequence: AGG
tttttcacaaggggagggtc

SEQ ID NO: 37697 - DNA, 20 bp, Artificial Sequence
  Description of Artificial Sequence: Synthetic oligonucleotide
  Target: SCNA; (+) strand; PAM type: NRG; PAM sequence: TAG
ttcacaaggggagggtcagg

SEQ ID NO: 37698 - DNA, 20 bp, Artificial Sequence
  Description of Artificial Sequence: Synthetic oligonucleotide
  Target: SCNA; (+) strand; PAM type: NRG; PAM sequence: CAG
ggtcaggtagccgttcccca

SEQ ID NO: 37699 - DNA, 20 bp, Artificial Sequence
  Description of Artificial Sequence: Synthetic oligonucleotide
  Target: SCNA; (+) strand; PAM type: NRG; PAM sequence: AAG
aggtagccgttccccacagt

SEQ ID NO: 37700 - DNA, 20 bp, Artificial Sequence
  Description of Artificial Sequence: Synthetic oligonucleotide
  Target: SCNA; (+) strand; PAM type: NRG; PAM sequence: CAG
aagtatcttgctcctgcctc

SEQ ID NO: 37701 - DNA, 20 bp, Artificial Sequence
  Description of Artificial Sequence: Synthetic oligonucleotide
  Target: SCNA; (+) strand; PAM type: NRG; PAM sequence: AGG
agtatcttgctcctgcctcc

SEQ ID NO: 37702 - DNA, 20 bp, Artificial Sequence
  Description of Artificial Sequence: Synthetic oligonucleotide
  Target: SCNA; (+) strand; PAM type: NRG; PAM sequence: CAG
aaaatgaaccgtaatctcac

SEQ ID NO: 37703 - DNA, 20 bp, Artificial Sequence
  Description of Artificial Sequence: Synthetic oligonucleotide
  Target: SCNA; (+) strand; PAM type: NRG; PAM sequence: CAG
aatgtaacacaaaacgtaca

SEQ ID NO: 37704 - DNA, 20 bp, Artificial Sequence
  Description of Artificial Sequence: Synthetic oligonucleotide
  Target: SCNA; (+) strand; PAM type: NRG; PAM sequence: TGG
acagccataccttgcccaac

SEQ ID NO: 37705 - DNA, 20 bp, Artificial Sequence
  Description of Artificial Sequence: Synthetic oligonucleotide
  Target: SCNA; (+) strand; PAM type: NRG; PAM sequence: AAG
ccaactggtcctttttgaca

SEQ ID NO: 37706 - DNA, 20 bp, Artificial Sequence
  Description of Artificial Sequence: Synthetic oligonucleotide
  Target: SCNA; (+) strand; PAM type: NRG; PAM sequence: CAG
ctggtcctttttgacaaagc

SEQ ID NO: 37707 - DNA, 20 bp, Artificial Sequence
  Description of Artificial Sequence: Synthetic oligonucleotide
  Target: SCNA; (+) strand; PAM type: NRG; PAM sequence: TGG
gtcctttttgacaaagccag

SEQ ID NO: 37708 - DNA, 20 bp, Artificial Sequence
  Description of Artificial Sequence: Synthetic oligonucleotide
  Target: SCNA; (+) strand; PAM type: NRG; PAM sequence: TGG
ctgctccctccactgtcttc

SEQ ID NO: 37709 - DNA, 20 bp, Artificial Sequence
  Description of Artificial Sequence: Synthetic oligonucleotide
  Target: SCNA; (+) strand; PAM type: NRG; PAM sequence: GGG
tgctccctccactgtcttct

SEQ ID NO: 37710 - DNA, 20 bp, Artificial Sequence
  Description of Artificial Sequence: Synthetic oligonucleotide
  Target: SCNA; (+) strand; PAM type: NRG; PAM sequence: TGG
aacatttgtcacttgctctt

SEQ ID NO: 37711 - DNA, 20 bp, Artificial Sequence
  Description of Artificial Sequence: Synthetic oligonucleotide
  Target: SCNA; (+) strand; PAM type: NRG; PAM sequence: CAG
cacttgctctttggtcttct

SEQ ID NO: 37712 - DNA, 20 bp, Artificial Sequence
  Description of Artificial Sequence: Synthetic oligonucleotide
  Target: SCNA; (+) strand; PAM type: NRG; PAM sequence: TGG
tctttggtcttctcagccac

SEQ ID NO: 37713 - DNA, 20 bp, Artificial Sequence
  Description of Artificial Sequence: Synthetic oligonucleotide
  Target: SCNA; (+) strand; PAM type: NRG; PAM sequence: AAG
ctcagccactggtacaaata

SEQ ID NO: 37714 - DNA, 20 bp, Artificial Sequence
  Description of Artificial Sequence: Synthetic oligonucleotide
  Target: SCNA; (+) strand; PAM type: NRG; PAM sequence: GAG
cagccactggtacaaataaa

SEQ ID NO: 37715 - DNA, 20 bp, Artificial Sequence
  Description of Artificial Sequence: Synthetic oligonucleotide
  Target: SCNA; (+) strand; PAM type: NRG; PAM sequence: CAG
gtacaaataaagagcaacaa

SEQ ID NO: 37716 - DNA, 20 bp, Artificial Sequence
  Description of Artificial Sequence: Synthetic oligonucleotide
  Target: SCNA; (+) strand; PAM type: NRG; PAM sequence: AAG
taaagagcaacaacagatta

SEQ ID NO: 37717 - DNA, 20 bp, Artificial Sequence
  Description of Artificial Sequence: Synthetic oligonucleotide
  Target: SCNA; (+) strand; PAM type: NRG; PAM sequence: AGG
aaagagcaacaacagattaa

SEQ ID NO: 37718 - DNA, 20 bp, Artificial Sequence
  Description of Artificial Sequence: Synthetic oligonucleotide
  Target: SCNA; (+) strand; PAM type: NRG; PAM sequence: GGG
aagagcaacaacagattaaa

SEQ ID NO: 37719 - DNA, 20 bp, Artificial Sequence
  Description of Artificial Sequence: Synthetic oligonucleotide
  Target: SCNA; (+) strand; PAM type: NRG; PAM sequence: TGG
agcaacaacagattaaaggg

SEQ ID NO: 37720 - DNA, 20 bp, Artificial Sequence
  Description of Artificial Sequence: Synthetic oligonucleotide
  Target: SCNA; (+) strand; PAM type: NRG; PAM sequence: TAG
aacaacagattaaagggtgg

SEQ ID NO: 37721 - DNA, 20 bp, Artificial Sequence
  Description of Artificial Sequence: Synthetic oligonucleotide
  Target: SCNA; (+) strand; PAM type: NRG; PAM sequence: CAG
attaaagggtggtagaataa

SEQ ID NO: 37722 - DNA, 20 bp, Artificial Sequence
  Description of Artificial Sequence: Synthetic oligonucleotide
  Target: SCNA; (+) strand; PAM type: NRG; PAM sequence: TAG
taaaatcattccacttccac

SEQ ID NO: 37723 - DNA, 20 bp, Artificial Sequence
  Description of Artificial Sequence: Synthetic oligonucleotide
  Target: SCNA; (+) strand; PAM type: NRG; PAM sequence: CGG
attccacttccactagccat

SEQ ID NO: 37724 - DNA, 20 bp, Artificial Sequence
  Description of Artificial Sequence: Synthetic oligonucleotide
  Target: SCNA; (+) strand; PAM type: NRG; PAM sequence: TAG
acctgtatctacacatgcca

SEQ ID NO: 37725 - DNA, 20 bp, Artificial Sequence
  Description of Artificial Sequence: Synthetic oligonucleotide
  Target: SCNA; (+) strand; PAM type: NRG; PAM sequence: GAG
tacacatgccatagataact

SEQ ID NO: 37726 - DNA, 20 bp, Artificial Sequence
  Description of Artificial Sequence: Synthetic oligonucleotide
  Target: SCNA; (+) strand; PAM type: NRG; PAM sequence: TGG
acatgccatagataactgag

SEQ ID NO: 37727 - DNA, 20 bp, Artificial Sequence
  Description of Artificial Sequence: Synthetic oligonucleotide
  Target: SCNA; (+) strand; PAM type: NRG; PAM sequence: CAG
gccatagataactgagtggt

SEQ ID NO: 37728 - DNA, 20 bp, Artificial Sequence
  Description of Artificial Sequence: Synthetic oligonucleotide
  Target: SCNA; (+) strand; PAM type: NRG; PAM sequence: AAG
atagataactgagtggtcag

SEQ ID NO: 37729 - DNA, 20 bp, Artificial Sequence
  Description of Artificial Sequence: Synthetic oligonucleotide
  Target: SCNA; (+) strand; PAM type: NRG; PAM sequence: AAG
tgagtggtcagaagaaacaa

SEQ ID NO: 37730 - DNA, 20 bp, Artificial Sequence
  Description of Artificial Sequence: Synthetic oligonucleotide
  Target: SCNA; (+) strand; PAM type: NRG; PAM sequence: AAG
cagaagaaacaaaagccacc

SEQ ID NO: 37731 - DNA, 20 bp, Artificial Sequence
  Description of Artificial Sequence: Synthetic oligonucleotide
  Target: SCNA; (+) strand; PAM type: NRG; PAM sequence: AAG
caaaagccaccaagatgtcc

SEQ ID NO: 37732 - DNA, 20 bp, Artificial Sequence
  Description of Artificial Sequence: Synthetic oligonucleotide
  Target: SCNA; (+) strand; PAM type: NRG; PAM sequence: GAG
agccaccaagatgtccaagt

SEQ ID NO: 37733 - DNA, 20 bp, Artificial Sequence
  Description of Artificial Sequence: Synthetic oligonucleotide
  Target: SCNA; (+) strand; PAM type: NRG; PAM sequence: TGG
ccaagatgtccaagtgagtg

SEQ ID NO: 37734 - DNA, 20 bp, Artificial Sequence
  Description of Artificial Sequence: Synthetic oligonucleotide
  Target: SCNA; (+) strand; PAM type: NRG; PAM sequence: TGG
ttcaaccaaacattgaatct

SEQ ID NO: 37735 - DNA, 20 bp, Artificial Sequence
  Description of Artificial Sequence: Synthetic oligonucleotide
  Target: SCNA; (+) strand; PAM type: NRG; PAM sequence: AAG
ccaaacattgaatcttggct

SEQ ID NO: 37736 - DNA, 20 bp, Artificial Sequence
  Description of Artificial Sequence: Synthetic oligonucleotide
  Target: SCNA; (+) strand; PAM type: NRG; PAM sequence: TGG
gaatcttggctaagatattt

SEQ ID NO: 37737 - DNA, 20 bp, Artificial Sequence
  Description of Artificial Sequence: Synthetic oligonucleotide
  Target: SCNA; (+) strand; PAM type: NRG; PAM sequence: AAG
tggctaagatattttggcta

SEQ ID NO: 37738 - DNA, 20 bp, Artificial Sequence
  Description of Artificial Sequence: Synthetic oligonucleotide
  Target: SCNA; (+) strand; PAM type: NRG; PAM sequence: CAG
atattttggctaaagtcatg

SEQ ID NO: 37739 - DNA, 20 bp, Artificial Sequence
  Description of Artificial Sequence: Synthetic oligonucleotide
  Target: SCNA; (+) strand; PAM type: NRG; PAM sequence: AAG
taaagtcatgcagtattaaa

SEQ ID NO: 37740 - DNA, 20 bp, Artificial Sequence
  Description of Artificial Sequence: Synthetic oligonucleotide
  Target: SCNA; (+) strand; PAM type: NRG; PAM sequence: AAG
gcagtattaaaaagtgcttc

SEQ ID NO: 37741 - DNA, 20 bp, Artificial Sequence
  Description of Artificial Sequence: Synthetic oligonucleotide
  Target: SCNA; (+) strand; PAM type: NRG; PAM sequence: CAG
agtgcttcaagtttaacgat

SEQ ID NO: 37742 - DNA, 20 bp, Artificial Sequence
  Description of Artificial Sequence: Synthetic oligonucleotide
  Target: SCNA; (+) strand; PAM type: NRG; PAM sequence: AGG
gtgcttcaagtttaacgatc

SEQ ID NO: 37743 - DNA, 20 bp, Artificial Sequence
  Description of Artificial Sequence: Synthetic oligonucleotide
  Target: SCNA; (+) strand; PAM type: NRG; PAM sequence: AAG
gtttaacgatcaggaatgta

SEQ ID NO: 37744 - DNA, 20 bp, Artificial Sequence
  Description of Artificial Sequence: Synthetic oligonucleotide
  Target: SCNA; (+) strand; PAM type: NRG; PAM sequence: GAG
gatcaggaatgtaaagccat

SEQ ID NO: 37745 - DNA, 20 bp, Artificial Sequence
  Description of Artificial Sequence: Synthetic oligonucleotide
  Target: SCNA; (+) strand; PAM type: NRG; PAM sequence: TGG
atgtaaagccatgagtgatt

SEQ ID NO: 37746 - DNA, 20 bp, Artificial Sequence
  Description of Artificial Sequence: Synthetic oligonucleotide
  Target: SCNA; (+) strand; PAM type: NRG; PAM sequence: TGG
agccatgagtgatttggatt

SEQ ID NO: 37747 - DNA, 20 bp, Artificial Sequence
  Description of Artificial Sequence: Synthetic oligonucleotide
  Target: SCNA; (+) strand; PAM type: NRG; PAM sequence: TGG
tttggatttggtttatacta

SEQ ID NO: 37748 - DNA, 20 bp, Artificial Sequence
  Description of Artificial Sequence: Synthetic oligonucleotide
  Target: SCNA; (+) strand; PAM type: NRG; PAM sequence: AAG
gatttggtttatactatgga

SEQ ID NO: 37749 - DNA, 20 bp, Artificial Sequence
  Description of Artificial Sequence: Synthetic oligonucleotide
  Target: SCNA; (+) strand; PAM type: NRG; PAM sequence: CAG
tttatactatggaaagttta

SEQ ID NO: 37750 - DNA, 20 bp, Artificial Sequence
  Description of Artificial Sequence: Synthetic oligonucleotide
  Target: SCNA; (+) strand; PAM type: NRG; PAM sequence: AAG
tactatggaaagtttacaga

SEQ ID NO: 37751 - DNA, 20 bp, Artificial Sequence
  Description of Artificial Sequence: Synthetic oligonucleotide
  Target: SCNA; (+) strand; PAM type: NRG; PAM sequence: CAG
tttacagaaagcaattctta

SEQ ID NO: 37752 - DNA, 20 bp, Artificial Sequence
  Description of Artificial Sequence: Synthetic oligonucleotide
  Target: SCNA; (+) strand; PAM type: NRG; PAM sequence: AGG
ttacagaaagcaattcttac

SEQ ID NO: 37753 - DNA, 20 bp, Artificial Sequence
  Description of Artificial Sequence: Synthetic oligonucleotide
  Target: SCNA; (+) strand; PAM type: NRG; PAM sequence: CAG
gaaagcaattcttacaggtg

SEQ ID NO: 37754 - DNA, 20 bp, Artificial Sequence
  Description of Artificial Sequence: Synthetic oligonucleotide
  Target: SCNA; (+) strand; PAM type: NRG; PAM sequence: CAG
aggtgcagttatatttgaac

SEQ ID NO: 37755 - DNA, 20 bp, Artificial Sequence
  Description of Artificial Sequence: Synthetic oligonucleotide
  Target: SCNA; (+) strand; PAM type: NRG; PAM sequence: CAG
agttatatttgaaccagact

SEQ ID NO: 37756 - DNA, 20 bp, Artificial Sequence
  Description of Artificial Sequence: Synthetic oligonucleotide
  Target: SCNA; (+) strand; PAM type: NRG; PAM sequence: CAG
aatatttctttatttcaatt

SEQ ID NO: 37757 - DNA, 20 bp, Artificial Sequence
  Description of Artificial Sequence: Synthetic oligonucleotide
  Target: SCNA; (+) strand; PAM type: NRG; PAM sequence: CAG
gccaatcctttgatctcact

SEQ ID NO: 37758 - DNA, 20 bp, Artificial Sequence
  Description of Artificial Sequence: Synthetic oligonucleotide
  Target: SCNA; (+) strand; PAM type: NRG; PAM sequence: AAG
atcctttgatctcactcagc

SEQ ID NO: 37759 - DNA, 20 bp, Artificial Sequence
  Description of Artificial Sequence: Synthetic oligonucleotide
  Target: SCNA; (+) strand; PAM type: NRG; PAM sequence: AAG
taatttccaccacaccttct

SEQ ID NO: 37760 - DNA, 20 bp, Artificial Sequence
  Description of Artificial Sequence: Synthetic oligonucleotide
  Target: SCNA; (+) strand; PAM type: NRG; PAM sequence: GAG
ttctatttatttatttattt

SEQ ID NO: 37761 - DNA, 20 bp, Artificial Sequence
  Description of Artificial Sequence: Synthetic oligonucleotide
  Target: SCNA; (+) strand; PAM type: NRG; PAM sequence: TGG
atttatttatttatttgaga

SEQ ID NO: 37762 - DNA, 20 bp, Artificial Sequence
  Description of Artificial Sequence: Synthetic oligonucleotide
  Target: SCNA; (+) strand; PAM type: NRG; PAM sequence: GAG
ttatttatttatttgagatg

SEQ ID NO: 37763 - DNA, 20 bp, Artificial Sequence
  Description of Artificial Sequence: Synthetic oligonucleotide
  Target: SCNA; (+) strand; PAM type: NRG; PAM sequence: CAG
ggagtttcattcttgttgtt

SEQ ID NO: 37764 - DNA, 20 bp, Artificial Sequence
  Description of Artificial Sequence: Synthetic oligonucleotide
  Target: SCNA; (+) strand; PAM type: NRG; PAM sequence: AGG
gagtttcattcttgttgttc

SEQ ID NO: 37765 - DNA, 20 bp, Artificial Sequence
  Description of Artificial Sequence: Synthetic oligonucleotide
  Target: SCNA; (+) strand; PAM type: NRG; PAM sequence: TGG
ttcattcttgttgttcaggc

SEQ ID NO: 37766 - DNA, 20 bp, Artificial Sequence
  Description of Artificial Sequence: Synthetic oligonucleotide
  Target: SCNA; (+) strand; PAM type: NRG; PAM sequence: TGG
ttgttcaggctggaatgcaa

SEQ ID NO: 37767 - DNA, 20 bp, Artificial Sequence
  Description of Artificial Sequence: Synthetic oligonucleotide
  Target: SCNA; (+) strand; PAM type: NRG; PAM sequence: CAG
ggaatgcaatggcacaatct

SEQ ID NO: 37768 - DNA, 20 bp, Artificial Sequence
  Description of Artificial Sequence: Synthetic oligonucleotide
  Target: SCNA; (+) strand; PAM type: NRG; PAM sequence: CAG
aatggcacaatctcagctca

SEQ ID NO: 37769 - DNA, 20 bp, Artificial Sequence
  Description of Artificial Sequence: Synthetic oligonucleotide
  Target: SCNA; (+) strand; PAM type: NRG; PAM sequence: GAG
cacagcaacctccgcctcct

SEQ ID NO: 37770 - DNA, 20 bp, Artificial Sequence
  Description of Artificial Sequence: Synthetic oligonucleotide
  Target: SCNA; (+) strand; PAM type: NRG; PAM sequence: AAG
aacctccgcctcctgagttc

SEQ ID NO: 37771 - DNA, 20 bp, Artificial Sequence
  Description of Artificial Sequence: Synthetic oligonucleotide
  Target: SCNA; (+) strand; PAM type: NRG; PAM sequence: CAG
ttcaagctattctcctgcct

SEQ ID NO: 37772 - DNA, 20 bp, Artificial Sequence
  Description of Artificial Sequence: Synthetic oligonucleotide
  Target: SCNA; (+) strand; PAM type: NRG; PAM sequence: GAG
ttctcctgcctcagtctccc

SEQ ID NO: 37773 - DNA, 20 bp, Artificial Sequence
  Description of Artificial Sequence: Synthetic oligonucleotide
  Target: SCNA; (+) strand; PAM type: NRG; PAM sequence: TAG
tcctgcctcagtctcccgag

SEQ ID NO: 37774 - DNA, 20 bp, Artificial Sequence
  Description of Artificial Sequence: Synthetic oligonucleotide
  Target: SCNA; (+) strand; PAM type: NRG; PAM sequence: TGG
gcctcagtctcccgagtagc

SEQ ID NO: 37775 - DNA, 20 bp, Artificial Sequence
  Description of Artificial Sequence: Synthetic oligonucleotide
  Target: SCNA; (+) strand; PAM type: NRG; PAM sequence: GGG
cctcagtctcccgagtagct

SEQ ID NO: 37776 - DNA, 20 bp, Artificial Sequence
  Description of Artificial Sequence: Synthetic oligonucleotide
  Target: SCNA; (+) strand; PAM type: NRG; PAM sequence: CAG
ctcccgagtagctgggatta

SEQ ID NO: 37777 - DNA, 20 bp, Artificial Sequence
  Description of Artificial Sequence: Synthetic oligonucleotide
  Target: SCNA; (+) strand; PAM type: NRG; PAM sequence: AGG
tcccgagtagctgggattac

SEQ ID NO: 37778 - DNA, 20 bp, Artificial Sequence
  Description of Artificial Sequence: Synthetic oligonucleotide
  Target: SCNA; (+) strand; PAM type: NRG; PAM sequence: TGG
caggtgcccacaaccacacc

SEQ ID NO: 37779 - DNA, 20 bp, Artificial Sequence
  Description of Artificial Sequence: Synthetic oligonucleotide
  Target: SCNA; (+) strand; PAM type: NRG; PAM sequence: TAG
attattattatttgtatttt

SEQ ID NO: 37780 - DNA, 20 bp, Artificial Sequence
  Description of Artificial Sequence: Synthetic oligonucleotide
  Target: SCNA; (+) strand; PAM type: NRG; PAM sequence: TAG
attattatttgtatttttag

SEQ ID NO: 37781 - DNA, 20 bp, Artificial Sequence
  Description of Artificial Sequence: Synthetic oligonucleotide
  Target: SCNA; (+) strand; PAM type: NRG; PAM sequence: CAG
atttgtatttttagtagaaa

SEQ ID NO: 37782 - DNA, 20 bp, Artificial Sequence
  Description of Artificial Sequence: Synthetic oligonucleotide
  Target: SCNA; (+) strand; PAM type: NRG; PAM sequence: AGG
tttgtatttttagtagaaac

SEQ ID NO: 37783 - DNA, 20 bp, Artificial Sequence
  Description of Artificial Sequence: Synthetic oligonucleotide
  Target: SCNA; (+) strand; PAM type: NRG; PAM sequence: GGG
ttgtatttttagtagaaaca

SEQ ID NO: 37784 - DNA, 20 bp, Artificial Sequence
  Description of Artificial Sequence: Synthetic oligonucleotide
  Target: SCNA; (+) strand; PAM type: NRG; PAM sequence: TGG
gaaacagggtttcatcatgt

SEQ ID NO: 37785 - DNA, 20 bp, Artificial Sequence
  Description of Artificial Sequence: Synthetic oligonucleotide
  Target: SCNA; (+) strand; PAM type: NRG; PAM sequence: CAG
cagggtttcatcatgttggc

SEQ ID NO: 37786 - DNA, 20 bp, Artificial Sequence
  Description of Artificial Sequence: Synthetic oligonucleotide
  Target: SCNA; (+) strand; PAM type: NRG; PAM sequence: AGG
agggtttcatcatgttggcc

SEQ ID NO: 37787 - DNA, 20 bp, Artificial Sequence
  Description of Artificial Sequence: Synthetic oligonucleotide
  Target: SCNA; (+) strand; PAM type: NRG; PAM sequence: CGG
tttcatcatgttggccaggc

SEQ ID NO: 37788 - DNA, 20 bp, Artificial Sequence
  Description of Artificial Sequence: Synthetic oligonucleotide
  Target: SCNA; (+) strand; PAM type: NRG; PAM sequence: CAG
cggtctcgaactcctaacct

SEQ ID NO: 37789 - DNA, 20 bp, Artificial Sequence
  Description of Artificial Sequence: Synthetic oligonucleotide
  Target: SCNA; (+) strand; PAM type: NRG; PAM sequence: AGG
ggtctcgaactcctaacctc

SEQ ID NO: 37790 - DNA, 20 bp, Artificial Sequence
  Description of Artificial Sequence: Synthetic oligonucleotide
  Target: SCNA; (+) strand; PAM type: NRG; PAM sequence: TAG
ctcaggtgatccacccgcct

SEQ ID NO: 37791 - DNA, 20 bp, Artificial Sequence
  Description of Artificial Sequence: Synthetic oligonucleotide
  Target: SCNA; (+) strand; PAM type: NRG; PAM sequence: AAG
ccacccgccttagcctccca

SEQ ID NO: 37792 - DNA, 20 bp, Artificial Sequence
  Description of Artificial Sequence: Synthetic oligonucleotide
  Target: SCNA; (+) strand; PAM type: NRG; PAM sequence: TAG
gccttagcctcccaaagtgc

SEQ ID NO: 37793 - DNA, 20 bp, Artificial Sequence
  Description of Artificial Sequence: Synthetic oligonucleotide
  Target: SCNA; (+) strand; PAM type: NRG; PAM sequence: AGG
ccttagcctcccaaagtgct

SEQ ID NO: 37794 - DNA, 20 bp, Artificial Sequence
  Description of Artificial Sequence: Synthetic oligonucleotide
  Target: SCNA; (+) strand; PAM type: NRG; PAM sequence: TAG
ctcccaaagtgctaggatta

SEQ ID NO: 37795 - DNA, 20 bp, Artificial Sequence
  Description of Artificial Sequence: Synthetic oligonucleotide
  Target: SCNA; (+) strand; PAM type: NRG; PAM sequence: AGG
tcccaaagtgctaggattat

SEQ ID NO: 37796 - DNA, 20 bp, Artificial Sequence
  Description of Artificial Sequence: Synthetic oligonucleotide
  Target: SCNA; (+) strand; PAM type: NRG; PAM sequence: CAG
taggcatgatccaccgcacc

SEQ ID NO: 37797 - DNA, 20 bp, Artificial Sequence
  Description of Artificial Sequence: Synthetic oligonucleotide
  Target: SCNA; (+) strand; PAM type: NRG; PAM sequence: CAG
ctacttattatctacgtgtt

SEQ ID NO: 37798 - DNA, 20 bp, Artificial Sequence
  Description of Artificial Sequence: Synthetic oligonucleotide
  Target: SCNA; (+) strand; PAM type: NRG; PAM sequence: TGG
attatctacgtgttcagacg

SEQ ID NO: 37799 - DNA, 20 bp, Artificial Sequence
  Description of Artificial Sequence: Synthetic oligonucleotide
  Target: SCNA; (+) strand; PAM type: NRG; PAM sequence: CAG
tatcacatatgtacgaataa

SEQ ID NO: 37800 - DNA, 20 bp, Artificial Sequence
  Description of Artificial Sequence: Synthetic oligonucleotide
  Target: SCNA; (+) strand; PAM type: NRG; PAM sequence: AAG
atatgtacgaataacagcat

SEQ ID NO: 37801 - DNA, 20 bp, Artificial Sequence
  Description of Artificial Sequence: Synthetic oligonucleotide
  Target: SCNA; (+) strand; PAM type: NRG; PAM sequence: CGG
acgaataacagcataagaaa

SEQ ID NO: 37802 - DNA, 20 bp, Artificial Sequence
  Description of Artificial Sequence: Synthetic oligonucleotide
  Target: SCNA; (+) strand; PAM type: NRG; PAM sequence: AAG
cagcataagaaacggttgtg

SEQ ID NO: 37803 - DNA, 20 bp, Artificial Sequence
  Description of Artificial Sequence: Synthetic oligonucleotide
  Target: SCNA; (+) strand; PAM type: NRG; PAM sequence: AGG
agcataagaaacggttgtga

SEQ ID NO: 37804 - DNA, 20 bp, Artificial Sequence
  Description of Artificial Sequence: Synthetic oligonucleotide
  Target: SCNA; (+) strand; PAM type: NRG; PAM sequence: TGG
gaaacggttgtgaaggaact

SEQ ID NO: 37805 - DNA, 20 bp, Artificial Sequence
  Description of Artificial Sequence: Synthetic oligonucleotide
  Target: SCNA; (+) strand; PAM type: NRG; PAM sequence: TAG
aaggaacttggatcttttta

SEQ ID NO: 37806 - DNA, 20 bp, Artificial Sequence
  Description of Artificial Sequence: Synthetic oligonucleotide
  Target: SCNA; (+) strand; PAM type: NRG; PAM sequence: CAG
tggatctttttatagaactt

SEQ ID NO: 37807 - DNA, 20 bp, Artificial Sequence
  Description of Artificial Sequence: Synthetic oligonucleotide
  Target: SCNA; (+) strand; PAM type: NRG; PAM sequence: AGG
ggatctttttatagaacttc

SEQ ID NO: 37808 - DNA, 20 bp, Artificial Sequence
  Description of Artificial Sequence: Synthetic oligonucleotide
  Target: SCNA; (+) strand; PAM type: NRG; PAM sequence: TAG
tctttttatagaacttcagg

SEQ ID NO: 37809 - DNA, 20 bp, Artificial Sequence
  Description of Artificial Sequence: Synthetic oligonucleotide
  Target: SCNA; (+) strand; PAM type: NRG; PAM sequence: AAG
gaacttcaggtagtgaaaca

SEQ ID NO: 37810 - DNA, 20 bp, Artificial Sequence
  Description of Artificial Sequence: Synthetic oligonucleotide
  Target: SCNA; (+) strand; PAM type: NRG; PAM sequence: AGG
aacttcaggtagtgaaacaa

SEQ ID NO: 37811 - DNA, 20 bp, Artificial Sequence
  Description of Artificial Sequence: Synthetic oligonucleotide
  Target: SCNA; (+) strand; PAM type: NRG; PAM sequence: GGG
acttcaggtagtgaaacaaa

SEQ ID NO: 37812 - DNA, 20 bp, Artificial Sequence
  Description of Artificial Sequence: Synthetic oligonucleotide
  Target: SCNA; (+) strand; PAM type: NRG; PAM sequence: AAG
tgaaacaaagggttcttaaa

SEQ ID NO: 37813 - DNA, 20 bp, Artificial Sequence
  Description of Artificial Sequence: Synthetic oligonucleotide
  Target: SCNA; (+) strand; PAM type: NRG; PAM sequence: CAG
ttcttaaaaagctaaatttg

SEQ ID NO: 37814 - DNA, 20 bp, Artificial Sequence
  Description of Artificial Sequence: Synthetic oligonucleotide
  Target: SCNA; (+) strand; PAM type: NRG; PAM sequence: TAG
taaatttgcagtaattttaa

SEQ ID NO: 37815 - DNA, 20 bp, Artificial Sequence
  Description of Artificial Sequence: Synthetic oligonucleotide
  Target: SCNA; (+) strand; PAM type: NRG; PAM sequence: AGG
aaatttgcagtaattttaat

SEQ ID NO: 37816 - DNA, 20 bp, Artificial Sequence
  Description of Artificial Sequence: Synthetic oligonucleotide
  Target: SCNA; (+) strand; PAM type: NRG; PAM sequence: GAG
atttgcagtaattttaatag

SEQ ID NO: 37817 - DNA, 20 bp, Artificial Sequence
  Description of Artificial Sequence: Synthetic oligonucleotide
  Target: SCNA; (+) strand; PAM type: NRG; PAM sequence: CAG
cagtaattttaataggagca

SEQ ID NO: 37818 - DNA, 20 bp, Artificial Sequence
  Description of Artificial Sequence: Synthetic oligonucleotide
  Target: SCNA; (+) strand; PAM type: NRG; PAM sequence: AGG
agtaattttaataggagcac

SEQ ID NO: 37819 - DNA, 20 bp, Artificial Sequence
  Description of Artificial Sequence: Synthetic oligonucleotide
  Target: SCNA; (+) strand; PAM type: NRG; PAM sequence: GAG
taattttaataggagcacag

SEQ ID NO: 37820 - DNA, 20 bp, Artificial Sequence
  Description of Artificial Sequence: Synthetic oligonucleotide
  Target: SCNA; (+) strand; PAM type: NRG; PAM sequence: TAG
tttaataggagcacaggagc

SEQ ID NO: 37821 - DNA, 20 bp, Artificial Sequence
  Description of Artificial Sequence: Synthetic oligonucleotide
  Target: SCNA; (+) strand; PAM type: NRG; PAM sequence: CAG
ataggagcacaggagctaga

SEQ ID NO: 37822 - DNA, 20 bp, Artificial Sequence
  Description of Artificial Sequence: Synthetic oligonucleotide
  Target: SCNA; (+) strand; PAM type: NRG; PAM sequence: AAG
agctagacagtatgaaaatg

SEQ ID NO: 37823 - DNA, 20 bp, Artificial Sequence
  Description of Artificial Sequence: Synthetic oligonucleotide
  Target: SCNA; (+) strand; PAM type: NRG; PAM sequence: GAG
ctagacagtatgaaaatgaa

SEQ ID NO: 37824 - DNA, 20 bp, Artificial Sequence
  Description of Artificial Sequence: Synthetic oligonucleotide
  Target: SCNA; (+) strand; PAM type: NRG; PAM sequence: AGG
tagacagtatgaaaatgaag

SEQ ID NO: 37825 - DNA, 20 bp, Artificial Sequence
  Description of Artificial Sequence: Synthetic oligonucleotide
  Target: SCNA; (+) strand; PAM type: NRG; PAM sequence: GAG
atgaaaatgaagaggctatt

SEQ ID NO: 37826 - DNA, 20 bp, Artificial Sequence
  Description of Artificial Sequence: Synthetic oligonucleotide
  Target: SCNA; (+) strand; PAM type: NRG; PAM sequence: GAG
ttcttttcataaaacaaaat

SEQ ID NO: 37827 - DNA, 20 bp, Artificial Sequence
  Description of Artificial Sequence: Synthetic oligonucleotide
  Target: SCNA; (+) strand; PAM type: NRG; PAM sequence: CGG
tcataaaacaaaatgagata

SEQ ID NO: 37828 - DNA, 20 bp, Artificial Sequence
  Description of Artificial Sequence: Synthetic oligonucleotide
  Target: SCNA; (+) strand; PAM type: NRG; PAM sequence: CAG
caaaatgagatacggtcatt

SEQ ID NO: 37829 - DNA, 20 bp, Artificial Sequence
  Description of Artificial Sequence: Synthetic oligonucleotide
  Target: SCNA; (+) strand; PAM type: NRG; PAM sequence: TAG
aatgagatacggtcattcag

SEQ ID NO: 37830 - DNA, 20 bp, Artificial Sequence
  Description of Artificial Sequence: Synthetic oligonucleotide
  Target: SCNA; (+) strand; PAM type: NRG; PAM sequence: AAG
ttcagtagatttattaaaat

SEQ ID NO: 37831 - DNA, 20 bp, Artificial Sequence
  Description of Artificial Sequence: Synthetic oligonucleotide
  Target: SCNA; (+) strand; PAM type: NRG; PAM sequence: GAG
taaaataagttaacattttt

SEQ ID NO: 37832 - DNA, 20 bp, Artificial Sequence
  Description of Artificial Sequence: Synthetic oligonucleotide
  Target: SCNA; (+) strand; PAM type: NRG; PAM sequence: AAG
aataagttaacatttttgag

SEQ ID NO: 37833 - DNA, 20 bp, Artificial Sequence
  Description of Artificial Sequence: Synthetic oligonucleotide
  Target: SCNA; (+) strand; PAM type: NRG; PAM sequence: CAG
agttaacatttttgagaaga

SEQ ID NO: 37834 - DNA, 20 bp, Artificial Sequence
  Description of Artificial Sequence: Synthetic oligonucleotide
  Target: SCNA; (+) strand; PAM type: NRG; PAM sequence: TAG
ttttgagaagacagtgtaaa

SEQ ID NO: 37835 - DNA, 20 bp, Artificial Sequence
  Description of Artificial Sequence: Synthetic oligonucleotide
  Target: SCNA; (+) strand; PAM type: NRG; PAM sequence: GAG
cagtgtaaatagtttgaatt

SEQ ID NO: 37836 - DNA, 20 bp, Artificial Sequence
  Description of Artificial Sequence: Synthetic oligonucleotide
  Target: SCNA; (+) strand; PAM type: NRG; PAM sequence: AAG
atagtttgaattgagtttac

SEQ ID NO: 37837 - DNA, 20 bp, Artificial Sequence
  Description of Artificial Sequence: Synthetic oligonucleotide
  Target: SCNA; (+) strand; PAM type: NRG; PAM sequence: CAG
gtttgaattgagtttacaag

SEQ ID NO: 37838 - DNA, 20 bp, Artificial Sequence
  Description of Artificial Sequence: Synthetic oligonucleotide
  Target: SCNA; (+) strand; PAM type: NRG; PAM sequence: AAG
tgaattgagtttacaagcag

SEQ ID NO: 37839 - DNA, 20 bp, Artificial Sequence
  Description of Artificial Sequence: Synthetic oligonucleotide
  Target: SCNA; (+) strand; PAM type: NRG; PAM sequence: CAG
atgtcaaaaactttcttgtt

SEQ ID NO: 37840 - DNA, 20 bp, Artificial Sequence
  Description of Artificial Sequence: Synthetic oligonucleotide
  Target: SCNA; (+) strand; PAM type: NRG; PAM sequence: AAG
actttcttgttcagttaaat

SEQ ID NO: 37841 - DNA, 20 bp, Artificial Sequence
  Description of Artificial Sequence: Synthetic oligonucleotide
  Target: SCNA; (+) strand; PAM type: NRG; PAM sequence: CAG
tcttgttcagttaaataagc

SEQ ID NO: 37842 - DNA, 20 bp, Artificial Sequence
  Description of Artificial Sequence: Synthetic oligonucleotide
  Target: SCNA; (+) strand; PAM type: NRG; PAM sequence: CAG
tcagttaaataagccagaaa

SEQ ID NO: 37843 - DNA, 20 bp, Artificial Sequence
  Description of Artificial Sequence: Synthetic oligonucleotide
  Target: SCNA; (+) strand; PAM type: NRG; PAM sequence: AAG
ttaaataagccagaaacaga

SEQ ID NO: 37844 - DNA, 20 bp, Artificial Sequence
  Description of Artificial Sequence: Synthetic oligonucleotide
  Target: SCNA; (+) strand; PAM type: NRG; PAM sequence: AGG
taaataagccagaaacagaa

SEQ ID NO: 37845 - DNA, 20 bp, Artificial Sequence
  Description of Artificial Sequence: Synthetic oligonucleotide
  Target: SCNA; (+) strand; PAM type: NRG; PAM sequence: TGG
accacatgatctcactcatg

SEQ ID NO: 37846 - DNA, 20 bp, Artificial Sequence
  Description of Artificial Sequence: Synthetic oligonucleotide
  Target: SCNA; (+) strand; PAM type: NRG; PAM sequence: AAG
tctcactcatgtggaatcta

SEQ ID NO: 37847 - DNA, 20 bp, Artificial Sequence
  Description of Artificial Sequence: Synthetic oligonucleotide
  Target: SCNA; (+) strand; PAM type: NRG; PAM sequence: AAG
tcatgtggaatctaaagaaa

SEQ ID NO: 37848 - DNA, 20 bp, Artificial Sequence
  Description of Artificial Sequence: Synthetic oligonucleotide
  Target: SCNA; (+) strand; PAM type: NRG; PAM sequence: AAG
tggaatctaaagaaaaagaa

SEQ ID NO: 37849 - DNA, 20 bp, Artificial Sequence
  Description of Artificial Sequence: Synthetic oligonucleotide
  Target: SCNA; (+) strand; PAM type: NRG; PAM sequence: TAG
aaaaagaaaagttgatatca

SEQ ID NO: 37850 - DNA, 20 bp, Artificial Sequence
  Description of Artificial Sequence: Synthetic oligonucleotide
  Target: SCNA; (+) strand; PAM type: NRG; PAM sequence: AAG
aagaaaagttgatatcatag

SEQ ID NO: 37851 - DNA, 20 bp, Artificial Sequence
  Description of Artificial Sequence: Synthetic oligonucleotide
  Target: SCNA; (+) strand; PAM type: NRG; PAM sequence: CAG
aaaagttgatatcatagaag

SEQ ID NO: 37852 - DNA, 20 bp, Artificial Sequence
  Description of Artificial Sequence: Synthetic oligonucleotide
  Target: SCNA; (+) strand; PAM type: NRG; PAM sequence: GAG
aagttgatatcatagaagca

SEQ ID NO: 37853 - DNA, 20 bp, Artificial Sequence
  Description of Artificial Sequence: Synthetic oligonucleotide
  Target: SCNA; (+) strand; PAM type: NRG; PAM sequence: GAG
gttgatatcatagaagcaga

SEQ ID NO: 37854 - DNA, 20 bp, Artificial Sequence
  Description of Artificial Sequence: Synthetic oligonucleotide
  Target: SCNA; (+) strand; PAM type: NRG; PAM sequence: AGG
ttgatatcatagaagcagag

SEQ ID NO: 37855 - DNA, 20 bp, Artificial Sequence
  Description of Artificial Sequence: Synthetic oligonucleotide
  Target: SCNA; (+) strand; PAM type: NRG; PAM sequence: GAG
gatatcatagaagcagagag

SEQ ID NO: 37856 - DNA, 20 bp, Artificial Sequence
  Description of Artificial Sequence: Synthetic oligonucleotide
  Target: SCNA; (+) strand; PAM type: NRG; PAM sequence: CAG
catagaagcagagaggagaa

SEQ ID NO: 37857 - DNA, 20 bp, Artificial Sequence
  Description of Artificial Sequence: Synthetic oligonucleotide
  Target: SCNA; (+) strand; PAM type: NRG; PAM sequence: TGG
agaagcagagaggagaacag

SEQ ID NO: 37858 - DNA, 20 bp, Artificial Sequence
  Description of Artificial Sequence: Synthetic oligonucleotide
  Target: SCNA; (+) strand; PAM type: NRG; PAM sequence: GAG
aagcagagaggagaacagtg

SEQ ID NO: 37859 - DNA, 20 bp, Artificial Sequence
  Description of Artificial Sequence: Synthetic oligonucleotide
  Target: SCNA; (+) strand; PAM type: NRG; PAM sequence: AGG
agcagagaggagaacagtgg

SEQ ID NO: 37860 - DNA, 20 bp, Artificial Sequence
  Description of Artificial Sequence: Synthetic oligonucleotide
  Target: SCNA; (+) strand; PAM type: NRG; PAM sequence: GAG
cagagaggagaacagtggag

SEQ ID NO: 37861 - DNA, 20 bp, Artificial Sequence
  Description of Artificial Sequence: Synthetic oligonucleotide
  Target: SCNA; (+) strand; PAM type: NRG; PAM sequence: GAG
gagaggagaacagtggagga

SEQ ID NO: 37862 - DNA, 20 bp, Artificial Sequence
  Description of Artificial Sequence: Synthetic oligonucleotide
  Target: SCNA; (+) strand; PAM type: NRG; PAM sequence: TGG
aggagaacagtggaggagag

SEQ ID NO: 37863 - DNA, 20 bp, Artificial Sequence
  Description of Artificial Sequence: Synthetic oligonucleotide
  Target: SCNA; (+) strand; PAM type: NRG; PAM sequence: GAG
gagaacagtggaggagagtg

SEQ ID NO: 37864 - DNA, 20 bp, Artificial Sequence
  Description of Artificial Sequence: Synthetic oligonucleotide
  Target: SCNA; (+) strand; PAM type: NRG; PAM sequence: AGG
agaacagtggaggagagtgg

SEQ ID NO: 37865 - DNA, 20 bp, Artificial Sequence
  Description of Artificial Sequence: Synthetic oligonucleotide
  Target: SCNA; (+) strand; PAM type: NRG; PAM sequence: TGG
cagtggaggagagtggagga

SEQ ID NO: 37866 - DNA, 20 bp, Artificial Sequence
  Description of Artificial Sequence: Synthetic oligonucleotide
  Target: SCNA; (+) strand; PAM type: NRG; PAM sequence: GGG
agtggaggagagtggaggat

SEQ ID NO: 37867 - DNA, 20 bp, Artificial Sequence
  Description of Artificial Sequence: Synthetic oligonucleotide
  Target: SCNA; (+) strand; PAM type: NRG; PAM sequence: GGG
gtggaggagagtggaggatg

SEQ ID NO: 37868 - DNA, 20 bp, Artificial Sequence
  Description of Artificial Sequence: Synthetic oligonucleotide
  Target: SCNA; (+) strand; PAM type: NRG; PAM sequence: AAG
gaggatggggacactcatct

SEQ ID NO: 37869 - DNA, 20 bp, Artificial Sequence
  Description of Artificial Sequence: Synthetic oligonucleotide
  Target: SCNA; (+) strand; PAM type: NRG; PAM sequence: AGG
aggatggggacactcatcta

SEQ ID NO: 37870 - DNA, 20 bp, Artificial Sequence
  Description of Artificial Sequence: Synthetic oligonucleotide
  Target: SCNA; (+) strand; PAM type: NRG; PAM sequence: AAG
gacactcatctaaggaaatg

SEQ ID NO: 37871 - DNA, 20 bp, Artificial Sequence
  Description of Artificial Sequence: Synthetic oligonucleotide
  Target: SCNA; (+) strand; PAM type: NRG; PAM sequence: AGG
acactcatctaaggaaatga

SEQ ID NO: 37872 - DNA, 20 bp, Artificial Sequence
  Description of Artificial Sequence: Synthetic oligonucleotide
  Target: SCNA; (+) strand; PAM type: NRG; PAM sequence: CAG
ttgacatgctttgtactccc

SEQ ID NO: 37873 - DNA, 20 bp, Artificial Sequence
  Description of Artificial Sequence: Synthetic oligonucleotide
  Target: SCNA; (+) strand; PAM type: NRG; PAM sequence: AAG
atgctttgtactccccagat

SEQ ID NO: 37874 - DNA, 20 bp, Artificial Sequence
  Description of Artificial Sequence: Synthetic oligonucleotide
  Target: SCNA; (+) strand; PAM type: NRG; PAM sequence: CAG
tgtactccccagataagcct

SEQ ID NO: 37875 - DNA, 20 bp, Artificial Sequence
  Description of Artificial Sequence: Synthetic oligonucleotide
  Target: SCNA; (+) strand; PAM type: NRG; PAM sequence: GAG
ccccagataagcctcagtct

SEQ ID NO: 37876 - DNA, 20 bp, Artificial Sequence
  Description of Artificial Sequence: Synthetic oligonucleotide
  Target: SCNA; (+) strand; PAM type: NRG; PAM sequence: GAG
ccagataagcctcagtctga

SEQ ID NO: 37877 - DNA, 20 bp, Artificial Sequence
  Description of Artificial Sequence: Synthetic oligonucleotide
  Target: SCNA; (+) strand; PAM type: NRG; PAM sequence: AGG
cagataagcctcagtctgag

SEQ ID NO: 37878 - DNA, 20 bp, Artificial Sequence
  Description of Artificial Sequence: Synthetic oligonucleotide
  Target: SCNA; (+) strand; PAM type: NRG; PAM sequence: GAG
gataagcctcagtctgagag

SEQ ID NO: 37879 - DNA, 20 bp, Artificial Sequence
  Description of Artificial Sequence: Synthetic oligonucleotide
  Target: SCNA; (+) strand; PAM type: NRG; PAM sequence: CAG
tgagaggagttacaccatgt

SEQ ID NO: 37880 - DNA, 20 bp, Artificial Sequence
  Description of Artificial Sequence: Synthetic oligonucleotide
  Target: SCNA; (+) strand; PAM type: NRG; PAM sequence: TAG
gttacaccatgtcagctgtt

SEQ ID NO: 37881 - DNA, 20 bp, Artificial Sequence
  Description of Artificial Sequence: Synthetic oligonucleotide
  Target: SCNA; (+) strand; PAM type: NRG; PAM sequence: TAG
ctattcacatgactattgta

SEQ ID NO: 37882 - DNA, 20 bp, Artificial Sequence
  Description of Artificial Sequence: Synthetic oligonucleotide
  Target: SCNA; (+) strand; PAM type: NRG; PAM sequence: AGG
tattcacatgactattgtat

SEQ ID NO: 37883 - DNA, 20 bp, Artificial Sequence
  Description of Artificial Sequence: Synthetic oligonucleotide
  Target: SCNA; (+) strand; PAM type: NRG; PAM sequence: CAG
ttgtataggtttcatctcac

SEQ ID NO: 37884 - DNA, 20 bp, Artificial Sequence
  Description of Artificial Sequence: Synthetic oligonucleotide
  Target: SCNA; (+) strand; PAM type: NRG; PAM sequence: AAG
aggtttcatctcaccagttg

SEQ ID NO: 37885 - DNA, 20 bp, Artificial Sequence
  Description of Artificial Sequence: Synthetic oligonucleotide
  Target: SCNA; (+) strand; PAM type: NRG; PAM sequence: AAG
tttcatctcaccagttgaag

SEQ ID NO: 37886 - DNA, 20 bp, Artificial Sequence
  Description of Artificial Sequence: Synthetic oligonucleotide
  Target: SCNA; (+) strand; PAM type: NRG; PAM sequence: GAG
tttatttatttatttatttt

SEQ ID NO: 37887 - DNA, 20 bp, Artificial Sequence
  Description of Artificial Sequence: Synthetic oligonucleotide
  Target: SCNA; (+) strand; PAM type: NRG; PAM sequence: CGG
tttatttatttattttgaga

SEQ ID NO: 37888 - DNA, 20 bp, Artificial Sequence
  Description of Artificial Sequence: Synthetic oligonucleotide
  Target: SCNA; (+) strand; PAM type: NRG; PAM sequence: GAG
tatttatttattttgagacg

SEQ ID NO: 37889 - DNA, 20 bp, Artificial Sequence
  Description of Artificial Sequence: Synthetic oligonucleotide
  Target: SCNA; (+) strand; PAM type: NRG; PAM sequence: CAG
cggagtcttgctctgtcacc

SEQ ID NO: 37890 - DNA, 20 bp, Artificial Sequence
  Description of Artificial Sequence: Synthetic oligonucleotide
  Target: SCNA; (+) strand; PAM type: NRG; PAM sequence: AGG
ggagtcttgctctgtcaccc

SEQ ID NO: 37891 - DNA, 20 bp, Artificial Sequence
  Description of Artificial Sequence: Synthetic oligonucleotide
  Target: SCNA; (+) strand; PAM type: NRG; PAM sequence: TGG
tcttgctctgtcacccaggc

SEQ ID NO: 37892 - DNA, 20 bp, Artificial Sequence
  Description of Artificial Sequence: Synthetic oligonucleotide
  Target: SCNA; (+) strand; PAM type: NRG; PAM sequence: GAG
ttgctctgtcacccaggctg

SEQ ID NO: 37893 - DNA, 20 bp, Artificial Sequence
  Description of Artificial Sequence: Synthetic oligonucleotide
  Target: SCNA; (+) strand; PAM type: NRG; PAM sequence: CAG
ctgtcacccaggctggagtg

SEQ ID NO: 37894 - DNA, 20 bp, Artificial Sequence
  Description of Artificial Sequence: Synthetic oligonucleotide
  Target: SCNA; (+) strand; PAM type: NRG; PAM sequence: TGG
tcacccaggctggagtgcag

SEQ ID NO: 37895 - DNA, 20 bp, Artificial Sequence
  Description of Artificial Sequence: Synthetic oligonucleotide
  Target: SCNA; (+) strand; PAM type: NRG; PAM sequence: CGG
ggagtgcagtggcacgatgt

SEQ ID NO: 37896 - DNA, 20 bp, Artificial Sequence
  Description of Artificial Sequence: Synthetic oligonucleotide
  Target: SCNA; (+) strand; PAM type: NRG; PAM sequence: CGG
tcactgcaaactccgactcc

SEQ ID NO: 37897 - DNA, 20 bp, Artificial Sequence
  Description of Artificial Sequence: Synthetic oligonucleotide
  Target: SCNA; (+) strand; PAM type: NRG; PAM sequence: GGG
cactgcaaactccgactccc

SEQ ID NO: 37898 - DNA, 20 bp, Artificial Sequence
  Description of Artificial Sequence: Synthetic oligonucleotide
  Target: SCNA; (+) strand; PAM type: NRG; PAM sequence: CAG
caaactccgactcccgggtt

SEQ ID NO: 37899 - DNA, 20 bp, Artificial Sequence
  Description of Artificial Sequence: Synthetic oligonucleotide
  Target: SCNA; (+) strand; PAM type: NRG; PAM sequence: AGG
aaactccgactcccgggttc

SEQ ID NO: 37900 - DNA, 20 bp, Artificial Sequence
  Description of Artificial Sequence: Synthetic oligonucleotide
  Target: SCNA; (+) strand; PAM type: NRG; PAM sequence: CAG
ttcaggccattctcctgcct

SEQ ID NO: 37901 - DNA, 20 bp, Artificial Sequence
  Description of Artificial Sequence: Synthetic oligonucleotide
  Target: SCNA; (+) strand; PAM type: NRG; PAM sequence: CAG
ttctcctgcctcagcctccc

SEQ ID NO: 37902 - DNA, 20 bp, Artificial Sequence
  Description of Artificial Sequence: Synthetic oligonucleotide
  Target: SCNA; (+) strand; PAM type: NRG; PAM sequence: CAG
tcctgcctcagcctccccag

SEQ ID NO: 37903 - DNA, 20 bp, Artificial Sequence
  Description of Artificial Sequence: Synthetic oligonucleotide
  Target: SCNA; (+) strand; PAM type: NRG; PAM sequence: TGG
gcctcagcctccccagcagc

SEQ ID NO: 37904 - DNA, 20 bp, Artificial Sequence
  Description of Artificial Sequence: Synthetic oligonucleotide
  Target: SCNA; (+) strand; PAM type: NRG; PAM sequence: GGG
cctcagcctccccagcagct

SEQ ID NO: 37905 - DNA, 20 bp, Artificial Sequence
  Description of Artificial Sequence: Synthetic oligonucleotide
  Target: SCNA; (+) strand; PAM type: NRG; PAM sequence: CAG
ctccccagcagctgggacta

SEQ ID NO: 37906 - DNA, 20 bp, Artificial Sequence
  Description of Artificial Sequence: Synthetic oligonucleotide
  Target: SCNA; (+) strand; PAM type: NRG; PAM sequence: AGG
tccccagcagctgggactac

SEQ ID NO: 37907 - DNA, 20 bp, Artificial Sequence
  Description of Artificial Sequence: Synthetic oligonucleotide
  Target: SCNA; (+) strand; PAM type: NRG; PAM sequence: CGG
caggtgcgcgccaccacacc

SEQ ID NO: 37908 - DNA, 20 bp, Artificial Sequence
  Description of Artificial Sequence: Synthetic oligonucleotide
  Target: SCNA; (+) strand; PAM type: NRG; PAM sequence: TAG
ggctaatttttttatatttt

SEQ ID NO: 37909 - DNA, 20 bp, Artificial Sequence
  Description of Artificial Sequence: Synthetic oligonucleotide
  Target: SCNA; (+) strand; PAM type: NRG; PAM sequence: TAG
taatttttttatatttttag

SEQ ID NO: 37910 - DNA, 20 bp, Artificial Sequence
  Description of Artificial Sequence: Synthetic oligonucleotide
  Target: SCNA; (+) strand; PAM type: NRG; PAM sequence: GAG
atttttttatatttttagta

SEQ ID NO: 37911 - DNA, 20 bp, Artificial Sequence
  Description of Artificial Sequence: Synthetic oligonucleotide
  Target: SCNA; (+) strand; PAM type: NRG; PAM sequence: CAG
ttttatatttttagtagaga

SEQ ID NO: 37912 - DNA, 20 bp, Artificial Sequence
  Description of Artificial Sequence: Synthetic oligonucleotide
  Target: SCNA; (+) strand; PAM type: NRG; PAM sequence: AGG
tttatatttttagtagagac

SEQ ID NO: 37913 - DNA, 20 bp, Artificial Sequence
  Description of Artificial Sequence: Synthetic oligonucleotide
  Target: SCNA; (+) strand; PAM type: NRG; PAM sequence: GGG
ttatatttttagtagagaca

SEQ ID NO: 37914 - DNA, 20 bp, Artificial Sequence
  Description of Artificial Sequence: Synthetic oligonucleotide
  Target: SCNA; (+) strand; PAM type: NRG; PAM sequence: TAG
gagacagggtttcaccgtgt

SEQ ID NO: 37915 - DNA, 20 bp, Artificial Sequence
  Description of Artificial Sequence: Synthetic oligonucleotide
  Target: SCNA; (+) strand; PAM type: NRG; PAM sequence: CAG
cagggtttcaccgtgttagc

SEQ ID NO: 37916 - DNA, 20 bp, Artificial Sequence
  Description of Artificial Sequence: Synthetic oligonucleotide
  Target: SCNA; (+) strand; PAM type: NRG; PAM sequence: AGG
agggtttcaccgtgttagcc

SEQ ID NO: 37917 - DNA, 20 bp, Artificial Sequence
  Description of Artificial Sequence: Synthetic oligonucleotide
  Target: SCNA; (+) strand; PAM type: NRG; PAM sequence: TGG
tttcaccgtgttagccagga

SEQ ID NO: 37918 - DNA, 20 bp, Artificial Sequence
  Description of Artificial Sequence: Synthetic oligonucleotide
  Target: SCNA; (+) strand; PAM type: NRG; PAM sequence: CAG
acctcgtgatctgcccgcct

SEQ ID NO: 37919 - DNA, 20 bp, Artificial Sequence
  Description of Artificial Sequence: Synthetic oligonucleotide
  Target: SCNA; (+) strand; PAM type: NRG; PAM sequence: AAG
ctgcccgcctcagcctccca

SEQ ID NO: 37920 - DNA, 20 bp, Artificial Sequence
  Description of Artificial Sequence: Synthetic oligonucleotide
  Target: SCNA; (+) strand; PAM type: NRG; PAM sequence: TGG
gcctcagcctcccaaagtgc

SEQ ID NO: 37921 - DNA, 20 bp, Artificial Sequence
  Description of Artificial Sequence: Synthetic oligonucleotide
  Target: SCNA; (+) strand; PAM type: NRG; PAM sequence: GGG
cctcagcctcccaaagtgct

SEQ ID NO: 37922 - DNA, 20 bp, Artificial Sequence
  Description of Artificial Sequence: Synthetic oligonucleotide
  Target: SCNA; (+) strand; PAM type: NRG; PAM sequence: CAG
ctcccaaagtgctgggataa

SEQ ID NO: 37923 - DNA, 20 bp, Artificial Sequence
  Description of Artificial Sequence: Synthetic oligonucleotide
  Target: SCNA; (+) strand; PAM type: NRG; PAM sequence: AGG
tcccaaagtgctgggataac

SEQ ID NO: 37924 - DNA, 20 bp, Artificial Sequence
  Description of Artificial Sequence: Synthetic oligonucleotide
  Target: SCNA; (+) strand; PAM type: NRG; PAM sequence: GAG
agtgctgggataacaggcgt

SEQ ID NO: 37925 - DNA, 20 bp, Artificial Sequence
  Description of Artificial Sequence: Synthetic oligonucleotide
  Target: SCNA; (+) strand; PAM type: NRG; PAM sequence: TGG
caggcgtgagccaccgcgcc

SEQ ID NO: 37926 - DNA, 20 bp, Artificial Sequence
  Description of Artificial Sequence: Synthetic oligonucleotide
  Target: SCNA; (+) strand; PAM type: NRG; PAM sequence: AAG
gagccaccgcgcctggcctg

SEQ ID NO: 37927 - DNA, 20 bp, Artificial Sequence
  Description of Artificial Sequence: Synthetic oligonucleotide
  Target: SCNA; (+) strand; PAM type: NRG; PAM sequence: TGG
gcctgaagccaatatttaaa

SEQ ID NO: 37928 - DNA, 20 bp, Artificial Sequence
  Description of Artificial Sequence: Synthetic oligonucleotide
  Target: SCNA; (+) strand; PAM type: NRG; PAM sequence: TGG
aagccaatatttaaatggtg

SEQ ID NO: 37929 - DNA, 20 bp, Artificial Sequence
  Description of Artificial Sequence: Synthetic oligonucleotide
  Target: SCNA; (+) strand; PAM type: NRG; PAM sequence: AAG
atatttaaatggtgtggaca

SEQ ID NO: 37930 - DNA, 20 bp, Artificial Sequence
  Description of Artificial Sequence: Synthetic oligonucleotide
  Target: SCNA; (+) strand; PAM type: NRG; PAM sequence: TAG
caaagcaatttgttttcaaa

SEQ ID NO: 37931 - DNA, 20 bp, Artificial Sequence
  Description of Artificial Sequence: Synthetic oligonucleotide
  Target: SCNA; (+) strand; PAM type: NRG; PAM sequence: AAG
tgttttcaaatagactatgt

SEQ ID NO: 37932 - DNA, 20 bp, Artificial Sequence
  Description of Artificial Sequence: Synthetic oligonucleotide
  Target: SCNA; (+) strand; PAM type: NRG; PAM sequence: AAG
tcaaatagactatgtaagct

SEQ ID NO: 37933 - DNA, 20 bp, Artificial Sequence
  Description of Artificial Sequence: Synthetic oligonucleotide
  Target: SCNA; (+) strand; PAM type: NRG; PAM sequence: AGG
caaatagactatgtaagcta

SEQ ID NO: 37934 - DNA, 20 bp, Artificial Sequence
  Description of Artificial Sequence: Synthetic oligonucleotide
  Target: SCNA; (+) strand; PAM type: NRG; PAM sequence: GGG
aaatagactatgtaagctaa

SEQ ID NO: 37935 - DNA, 20 bp, Artificial Sequence
  Description of Artificial Sequence: Synthetic oligonucleotide
  Target: SCNA; (+) strand; PAM type: NRG; PAM sequence: GGG
aatagactatgtaagctaag

SEQ ID NO: 37936 - DNA, 20 bp, Artificial Sequence
  Description of Artificial Sequence: Synthetic oligonucleotide
  Target: SCNA; (+) strand; PAM type: NRG; PAM sequence: GGG
atagactatgtaagctaagg

SEQ ID NO: 37937 - DNA, 20 bp, Artificial Sequence
  Description of Artificial Sequence: Synthetic oligonucleotide
  Target: SCNA; (+) strand; PAM type: NRG; PAM sequence: AAG
tgtaagctaagggggtctgt

SEQ ID NO: 37938 - DNA, 20 bp, Artificial Sequence
  Description of Artificial Sequence: Synthetic oligonucleotide
  Target: SCNA; (+) strand; PAM type: NRG; PAM sequence: AGG
gtaagctaagggggtctgta

SEQ ID NO: 37939 - DNA, 20 bp, Artificial Sequence
  Description of Artificial Sequence: Synthetic oligonucleotide
  Target: SCNA; (+) strand; PAM type: NRG; PAM sequence: AAG
ctaagggggtctgtaaggac

SEQ ID NO: 37940 - DNA, 20 bp, Artificial Sequence
  Description of Artificial Sequence: Synthetic oligonucleotide
  Target: SCNA; (+) strand; PAM type: NRG; PAM sequence: GAG
aagggggtctgtaaggacaa

SEQ ID NO: 37941 - DNA, 20 bp, Artificial Sequence
  Description of Artificial Sequence: Synthetic oligonucleotide
  Target: SCNA; (+) strand; PAM type: NRG; PAM sequence: AGG
agggggtctgtaaggacaag

SEQ ID NO: 37942 - DNA, 20 bp, Artificial Sequence
  Description of Artificial Sequence: Synthetic oligonucleotide
  Target: SCNA; (+) strand; PAM type: NRG; PAM sequence: TAG
aggacaagaggctttctcct

SEQ ID NO: 37943 - DNA, 20 bp, Artificial Sequence
  Description of Artificial Sequence: Synthetic oligonucleotide
  Target: SCNA; (+) strand; PAM type: NRG; PAM sequence: CAG
aagaggctttctccttagta

SEQ ID NO: 37944 - DNA, 20 bp, Artificial Sequence
  Description of Artificial Sequence: Synthetic oligonucleotide
  Target: SCNA; (+) strand; PAM type: NRG; PAM sequence: AGG
agaggctttctccttagtac

SEQ ID NO: 37945 - DNA, 20 bp, Artificial Sequence
  Description of Artificial Sequence: Synthetic oligonucleotide
  Target: SCNA; (+) strand; PAM type: NRG; PAM sequence: TGG
tctccttagtacaggcaatg

SEQ ID NO: 37946 - DNA, 20 bp, Artificial Sequence
  Description of Artificial Sequence: Synthetic oligonucleotide
  Target: SCNA; (+) strand; PAM type: NRG; PAM sequence: GGG
ctccttagtacaggcaatgt

SEQ ID NO: 37947 - DNA, 20 bp, Artificial Sequence
  Description of Artificial Sequence: Synthetic oligonucleotide
  Target: SCNA; (+) strand; PAM type: NRG; PAM sequence: AAG
ttagtacaggcaatgtgggc

SEQ ID NO: 37948 - DNA, 20 bp, Artificial Sequence
  Description of Artificial Sequence: Synthetic oligonucleotide
  Target: SCNA; (+) strand; PAM type: NRG; PAM sequence: TAG
caatgtgggcaagcctgaca

SEQ ID NO: 37949 - DNA, 20 bp, Artificial Sequence
  Description of Artificial Sequence: Synthetic oligonucleotide
  Target: SCNA; (+) strand; PAM type: NRG; PAM sequence: CAG
gcaagcctgacatagccaca

SEQ ID NO: 37950 - DNA, 20 bp, Artificial Sequence
  Description of Artificial Sequence: Synthetic oligonucleotide
  Target: SCNA; (+) strand; PAM type: NRG; PAM sequence: AAG
ctgacatagccacacagccc

SEQ ID NO: 37951 - DNA, 20 bp, Artificial Sequence
  Description of Artificial Sequence: Synthetic oligonucleotide
  Target: SCNA; (+) strand; PAM type: NRG; PAM sequence: CAG
atagccacacagcccaagac

SEQ ID NO: 37952 - DNA, 20 bp, Artificial Sequence
  Description of Artificial Sequence: Synthetic oligonucleotide
  Target: SCNA; (+) strand; PAM type: NRG; PAM sequence: CGG
acacagcccaagaccagaaa

SEQ ID NO: 37953 - DNA, 20 bp, Artificial Sequence
  Description of Artificial Sequence: Synthetic oligonucleotide
  Target: SCNA; (+) strand; PAM type: NRG; PAM sequence: CAG
ccaagaccagaaacggtcca

SEQ ID NO: 37954 - DNA, 20 bp, Artificial Sequence
  Description of Artificial Sequence: Synthetic oligonucleotide
  Target: SCNA; (+) strand; PAM type: NRG; PAM sequence: TAG
agaccagaaacggtccacag

SEQ ID NO: 37955 - DNA, 20 bp, Artificial Sequence
  Description of Artificial Sequence: Synthetic oligonucleotide
  Target: SCNA; (+) strand; PAM type: NRG; PAM sequence: TAG
gttgctccctatttgtcttt

SEQ ID NO: 37956 - DNA, 20 bp, Artificial Sequence
  Description of Artificial Sequence: Synthetic oligonucleotide
  Target: SCNA; (+) strand; PAM type: NRG; PAM sequence: AGG
ttgctccctatttgtctttt

SEQ ID NO: 37957 - DNA, 20 bp, Artificial Sequence
  Description of Artificial Sequence: Synthetic oligonucleotide
  Target: SCNA; (+) strand; PAM type: NRG; PAM sequence: TAG
tccctatttgtcttttaggc

SEQ ID NO: 37958 - DNA, 20 bp, Artificial Sequence
  Description of Artificial Sequence: Synthetic oligonucleotide
  Target: SCNA; (+) strand; PAM type: NRG; PAM sequence: AAG
aacaactccgtgccacttct

SEQ ID NO: 37959 - DNA, 20 bp, Artificial Sequence
  Description of Artificial Sequence: Synthetic oligonucleotide
  Target: SCNA; (+) strand; PAM type: NRG; PAM sequence: AGG
acaactccgtgccacttcta

SEQ ID NO: 37960 - DNA, 20 bp, Artificial Sequence
  Description of Artificial Sequence: Synthetic oligonucleotide
  Target: SCNA; (+) strand; PAM type: NRG; PAM sequence: TGG
ccgtgccacttctaaggata

SEQ ID NO: 37961 - DNA, 20 bp, Artificial Sequence
  Description of Artificial Sequence: Synthetic oligonucleotide
  Target: SCNA; (+) strand; PAM type: NRG; PAM sequence: AAG
gatatggctgatgtctcctt

SEQ ID NO: 37962 - DNA, 20 bp, Artificial Sequence
  Description of Artificial Sequence: Synthetic oligonucleotide
  Target: SCNA; (+) strand; PAM type: NRG; PAM sequence: GAG
tatggctgatgtctccttaa

SEQ ID NO: 37963 - DNA, 20 bp, Artificial Sequence
  Description of Artificial Sequence: Synthetic oligonucleotide
  Target: SCNA; (+) strand; PAM type: NRG; PAM sequence: AAG
gctgatgtctccttaagagc

SEQ ID NO: 37964 - DNA, 20 bp, Artificial Sequence
  Description of Artificial Sequence: Synthetic oligonucleotide
  Target: SCNA; (+) strand; PAM type: NRG; PAM sequence: GAG
tgatgtctccttaagagcaa

SEQ ID NO: 37965 - DNA, 20 bp, Artificial Sequence
  Description of Artificial Sequence: Synthetic oligonucleotide
  Target: SCNA; (+) strand; PAM type: NRG; PAM sequence: AAG
caagagctatttacaattca

SEQ ID NO: 37966 - DNA, 20 bp, Artificial Sequence
  Description of Artificial Sequence: Synthetic oligonucleotide
  Target: SCNA; (+) strand; PAM type: NRG; PAM sequence: CAG
tcaaagttcgatttaaatgc

SEQ ID NO: 37967 - DNA, 20 bp, Artificial Sequence
  Description of Artificial Sequence: Synthetic oligonucleotide
  Target: SCNA; (+) strand; PAM type: NRG; PAM sequence: AAG
tcgatttaaatgccagcgaa

SEQ ID NO: 37968 - DNA, 20 bp, Artificial Sequence
  Description of Artificial Sequence: Synthetic oligonucleotide
  Target: SCNA; (+) strand; PAM type: NRG; PAM sequence: TAG
aaatgttgatcctttaaaaa

SEQ ID NO: 37969 - DNA, 20 bp, Artificial Sequence
  Description of Artificial Sequence: Synthetic oligonucleotide
  Target: SCNA; (+) strand; PAM type: NRG; PAM sequence: AAG
aatagtcaattatgtgtttc

SEQ ID NO: 37970 - DNA, 20 bp, Artificial Sequence
  Description of Artificial Sequence: Synthetic oligonucleotide
  Target: SCNA; (+) strand; PAM type: NRG; PAM sequence: AAG
ttgtcatttttttccttttc

SEQ ID NO: 37971 - DNA, 20 bp, Artificial Sequence
  Description of Artificial Sequence: Synthetic oligonucleotide
  Target: SCNA; (+) strand; PAM type: NRG; PAM sequence: AGG
tgtcatttttttccttttca

SEQ ID NO: 37972 - DNA, 20 bp, Artificial Sequence
  Description of Artificial Sequence: Synthetic oligonucleotide
  Target: SCNA; (+) strand; PAM type: NRG; PAM sequence: AAG
tttcttgttataaaatctca

SEQ ID NO: 37973 - DNA, 20 bp, Artificial Sequence
  Description of Artificial Sequence: Synthetic oligonucleotide
  Target: SCNA; (+) strand; PAM type: NRG; PAM sequence: GAG
ttgttataaaatctcaaagc

SEQ ID NO: 37974 - DNA, 20 bp, Artificial Sequence
  Description of Artificial Sequence: Synthetic oligonucleotide
  Target: SCNA; (+) strand; PAM type: NRG; PAM sequence: TAG
tctcaaagcgagattaaaaa

SEQ ID NO: 37975 - DNA, 20 bp, Artificial Sequence
  Description of Artificial Sequence: Synthetic oligonucleotide
  Target: SCNA; (+) strand; PAM type: NRG; PAM sequence: AGG
ctcaaagcgagattaaaaat

SEQ ID NO: 37976 - DNA, 20 bp, Artificial Sequence
  Description of Artificial Sequence: Synthetic oligonucleotide
  Target: SCNA; (+) strand; PAM type: NRG; PAM sequence: CAG
aataggttttgaatttttta

SEQ ID NO: 37977 - DNA, 20 bp, Artificial Sequence
  Description of Artificial Sequence: Synthetic oligonucleotide
  Target: SCNA; (+) strand; PAM type: NRG; PAM sequence: CAG
ttttgaattttttacagatc

SEQ ID NO: 37978 - DNA, 20 bp, Artificial Sequence
  Description of Artificial Sequence: Synthetic oligonucleotide
  Target: SCNA; (+) strand; PAM type: NRG; PAM sequence: TAG
gccataaattttataatatc

SEQ ID NO: 37979 - DNA, 20 bp, Artificial Sequence
  Description of Artificial Sequence: Synthetic oligonucleotide
  Target: SCNA; (+) strand; PAM type: NRG; PAM sequence: TAG
taaattttataatatctaga

SEQ ID NO: 37980 - DNA, 20 bp, Artificial Sequence
  Description of Artificial Sequence: Synthetic oligonucleotide
  Target: SCNA; (+) strand; PAM type: NRG; PAM sequence: TAG
tatatgtataaattttaatc

SEQ ID NO: 37981 - DNA, 20 bp, Artificial Sequence
  Description of Artificial Sequence: Synthetic oligonucleotide
  Target: SCNA; (+) strand; PAM type: NRG; PAM sequence: CAG
ttttaatgcaatacactgca

SEQ ID NO: 37982 - DNA, 20 bp, Artificial Sequence
  Description of Artificial Sequence: Synthetic oligonucleotide
  Target: SCNA; (+) strand; PAM type: NRG; PAM sequence: TGG
tattataatcataaataaaa

SEQ ID NO: 37983 - DNA, 20 bp, Artificial Sequence
  Description of Artificial Sequence: Synthetic oligonucleotide
  Target: SCNA; (+) strand; PAM type: NRG; PAM sequence: CAG
atggctacattacaaaatga

SEQ ID NO: 37984 - DNA, 20 bp, Artificial Sequence
  Description of Artificial Sequence: Synthetic oligonucleotide
  Target: SCNA; (+) strand; PAM type: NRG; PAM sequence: GAG
ggctacattacaaaatgaca

SEQ ID NO: 37985 - DNA, 20 bp, Artificial Sequence
  Description of Artificial Sequence: Synthetic oligonucleotide
  Target: SCNA; (+) strand; PAM type: NRG; PAM sequence: TAG
aaaatgacagagtgtacatg

SEQ ID NO: 37986 - DNA, 20 bp, Artificial Sequence
  Description of Artificial Sequence: Synthetic oligonucleotide
  Target: SCNA; (+) strand; PAM type: NRG; PAM sequence: TAG
cacatttaaaaacatttctg

SEQ ID NO: 37987 - DNA, 20 bp, Artificial Sequence
  Description of Artificial Sequence: Synthetic oligonucleotide
  Target: SCNA; (+) strand; PAM type: NRG; PAM sequence: TAG
ttctgtagaactgatttctc

SEQ ID NO: 37988 - DNA, 20 bp, Artificial Sequence
  Description of Artificial Sequence: Synthetic oligonucleotide
  Target: SCNA; (+) strand; PAM type: NRG; PAM sequence: TAG
tgtagaactgatttctctag

SEQ ID NO: 37989 - DNA, 20 bp, Artificial Sequence
  Description of Artificial Sequence: Synthetic oligonucleotide
  Target: SCNA; (+) strand; PAM type: NRG; PAM sequence: AGG
gtagaactgatttctctagt

SEQ ID NO: 37990 - DNA, 20 bp, Artificial Sequence
  Description of Artificial Sequence: Synthetic oligonucleotide
  Target: SCNA; (+) strand; PAM type: NRG; PAM sequence: GGG
tagaactgatttctctagta

SEQ ID NO: 37991 - DNA, 20 bp, Artificial Sequence
  Description of Artificial Sequence: Synthetic oligonucleotide
  Target: SCNA; (+) strand; PAM type: NRG; PAM sequence: GAG
taacctctatttttcccctt

SEQ ID NO: 37992 - DNA, 20 bp, Artificial Sequence
  Description of Artificial Sequence: Synthetic oligonucleotide
  Target: SCNA; (+) strand; PAM type: NRG; PAM sequence: AGG
aacctctatttttccccttg

SEQ ID NO: 37993 - DNA, 20 bp, Artificial Sequence
  Description of Artificial Sequence: Synthetic oligonucleotide
  Target: SCNA; (+) strand; PAM type: NRG; PAM sequence: GGG
acctctatttttccccttga

SEQ ID NO: 37994 - DNA, 20 bp, Artificial Sequence
  Description of Artificial Sequence: Synthetic oligonucleotide
  Target: SCNA; (+) strand; PAM type: NRG; PAM sequence: CGG
ctcactgacattccaaatga

SEQ ID NO: 37995 - DNA, 20 bp, Artificial Sequence
  Description of Artificial Sequence: Synthetic oligonucleotide
  Target: SCNA; (+) strand; PAM type: NRG; PAM sequence: GGG
tcactgacattccaaatgac

SEQ ID NO: 37996 - DNA, 20 bp, Artificial Sequence
  Description of Artificial Sequence: Synthetic oligonucleotide
  Target: SCNA; (+) strand; PAM type: NRG; PAM sequence: AAG
aatgacgggtgacaaaacaa

SEQ ID NO: 37997 - DNA, 20 bp, Artificial Sequence
  Description of Artificial Sequence: Synthetic oligonucleotide
  Target: SCNA; (+) strand; PAM type: NRG; PAM sequence: AGG
atgacgggtgacaaaacaaa

SEQ ID NO: 37998 - DNA, 20 bp, Artificial Sequence
  Description of Artificial Sequence: Synthetic oligonucleotide
  Target: SCNA; (+) strand; PAM type: NRG; PAM sequence: AAG
gggtgacaaaacaaaaggaa

SEQ ID NO: 37999 - DNA, 20 bp, Artificial Sequence
  Description of Artificial Sequence: Synthetic oligonucleotide
  Target: SCNA; (+) strand; PAM type: NRG; PAM sequence: GAG
gtgacaaaacaaaaggaaaa

SEQ ID NO: 38000 - DNA, 20 bp, Artificial Sequence
  Description of Artificial Sequence: Synthetic oligonucleotide
  Target: SCNA; (+) strand; PAM type: NRG; PAM sequence: TAG
gaaaagagacacactcatat

SEQ ID NO: 38001 - DNA, 20 bp, Artificial Sequence
  Description of Artificial Sequence: Synthetic oligonucleotide
  Target: SCNA; (+) strand; PAM type: NRG; PAM sequence: TGG
acactcatattagtacattt

SEQ ID NO: 38002 - DNA, 20 bp, Artificial Sequence
  Description of Artificial Sequence: Synthetic oligonucleotide
  Target: SCNA; (+) strand; PAM type: NRG; PAM sequence: GGG
cactcatattagtacatttt

SEQ ID NO: 38003 - DNA, 20 bp, Artificial Sequence
  Description of Artificial Sequence: Synthetic oligonucleotide
  Target: SCNA; (+) strand; PAM type: NRG; PAM sequence: TGG
tacattttgggtctaataaa

SEQ ID NO: 38004 - DNA, 20 bp, Artificial Sequence
  Description of Artificial Sequence: Synthetic oligonucleotide
  Target: SCNA; (+) strand; PAM type: NRG; PAM sequence: CGG
aataaatggtaactgttttt

SEQ ID NO: 38005 - DNA, 20 bp, Artificial Sequence
  Description of Artificial Sequence: Synthetic oligonucleotide
  Target: SCNA; (+) strand; PAM type: NRG; PAM sequence: GAG
gtaactgtttttcggcaatt

SEQ ID NO: 38006 - DNA, 20 bp, Artificial Sequence
  Description of Artificial Sequence: Synthetic oligonucleotide
  Target: SCNA; (+) strand; PAM type: NRG; PAM sequence: CAG
gcaattgagttctttgaaat

SEQ ID NO: 38007 - DNA, 20 bp, Artificial Sequence
  Description of Artificial Sequence: Synthetic oligonucleotide
  Target: SCNA; (+) strand; PAM type: NRG; PAM sequence: AGG
caattgagttctttgaaatc

SEQ ID NO: 38008 - DNA, 20 bp, Artificial Sequence
  Description of Artificial Sequence: Synthetic oligonucleotide
  Target: SCNA; (+) strand; PAM type: NRG; PAM sequence: GGG
aattgagttctttgaaatca

SEQ ID NO: 38009 - DNA, 20 bp, Artificial Sequence
  Description of Artificial Sequence: Synthetic oligonucleotide
  Target: SCNA; (+) strand; PAM type: NRG; PAM sequence: TAG
tttttctttatattatttca

SEQ ID NO: 38010 - DNA, 20 bp, Artificial Sequence
  Description of Artificial Sequence: Synthetic oligonucleotide
  Target: SCNA; (+) strand; PAM type: NRG; PAM sequence: TAG
ttctttatattatttcatag

SEQ ID NO: 38011 - DNA, 20 bp, Artificial Sequence
  Description of Artificial Sequence: Synthetic oligonucleotide
  Target: SCNA; (+) strand; PAM type: NRG; PAM sequence: TAG
atagtagataataaataatt

SEQ ID NO: 38012 - DNA, 20 bp, Artificial Sequence
  Description of Artificial Sequence: Synthetic oligonucleotide
  Target: SCNA; (+) strand; PAM type: NRG; PAM sequence: TAG
agaatatactaaaatgaatt

SEQ ID NO: 38013 - DNA, 20 bp, Artificial Sequence
  Description of Artificial Sequence: Synthetic oligonucleotide
  Target: SCNA; (+) strand; PAM type: NRG; PAM sequence: TAG
gtctgcattaatataaataa

SEQ ID NO: 38014 - DNA, 20 bp, Artificial Sequence
  Description of Artificial Sequence: Synthetic oligonucleotide
  Target: SCNA; (+) strand; PAM type: NRG; PAM sequence: AGG
tctgcattaatataaataat

SEQ ID NO: 38015 - DNA, 20 bp, Artificial Sequence
  Description of Artificial Sequence: Synthetic oligonucleotide
  Target: SCNA; (+) strand; PAM type: NRG; PAM sequence: TAG
aataggtttatatttgactt

SEQ ID NO: 38016 - DNA, 20 bp, Artificial Sequence
  Description of Artificial Sequence: Synthetic oligonucleotide
  Target: SCNA; (+) strand; PAM type: NRG; PAM sequence: AAG
tttaaaaataaaattccaaa

SEQ ID NO: 38017 - DNA, 20 bp, Artificial Sequence
  Description of Artificial Sequence: Synthetic oligonucleotide
  Target: SCNA; (+) strand; PAM type: NRG; PAM sequence: AGG
ttaaaaataaaattccaaaa

SEQ ID NO: 38018 - DNA, 20 bp, Artificial Sequence
  Description of Artificial Sequence: Synthetic oligonucleotide
  Target: SCNA; (+) strand; PAM type: NRG; PAM sequence: TAG
ggaaatgtgataccaacttt

SEQ ID NO: 38019 - DNA, 20 bp, Artificial Sequence
  Description of Artificial Sequence: Synthetic oligonucleotide
  Target: SCNA; (+) strand; PAM type: NRG; PAM sequence: TAG
tgtgataccaacttttagaa

SEQ ID NO: 38020 - DNA, 20 bp, Artificial Sequence
  Description of Artificial Sequence: Synthetic oligonucleotide
  Target: SCNA; (+) strand; PAM type: NRG; PAM sequence: TAG
accaacttttagaatagata

SEQ ID NO: 38021 - DNA, 20 bp, Artificial Sequence
  Description of Artificial Sequence: Synthetic oligonucleotide
  Target: SCNA; (+) strand; PAM type: NRG; PAM sequence: TGG
aaaattataaaattaatata

SEQ ID NO: 38022 - DNA, 20 bp, Artificial Sequence
  Description of Artificial Sequence: Synthetic oligonucleotide
  Target: SCNA; (+) strand; PAM type: NRG; PAM sequence: AAG
atggttttgaattgttatac

SEQ ID NO: 38023 - DNA, 20 bp, Artificial Sequence
  Description of Artificial Sequence: Synthetic oligonucleotide
  Target: SCNA; (+) strand; PAM type: NRG; PAM sequence: TGG
taaatatacatatgtaaata

SEQ ID NO: 38024 - DNA, 20 bp, Artificial Sequence
  Description of Artificial Sequence: Synthetic oligonucleotide
  Target: SCNA; (+) strand; PAM type: NRG; PAM sequence: AAG
catatgtaaatatggattta

SEQ ID NO: 38025 - DNA, 20 bp, Artificial Sequence
  Description of Artificial Sequence: Synthetic oligonucleotide
  Target: SCNA; (+) strand; PAM type: NRG; PAM sequence: AAG
taaatttgaaacaatttact

SEQ ID NO: 38026 - DNA, 20 bp, Artificial Sequence
  Description of Artificial Sequence: Synthetic oligonucleotide
  Target: SCNA; (+) strand; PAM type: NRG; PAM sequence: AGG
aaatttgaaacaatttacta

SEQ ID NO: 38027 - DNA, 20 bp, Artificial Sequence
  Description of Artificial Sequence: Synthetic oligonucleotide
  Target: SCNA; (+) strand; PAM type: NRG; PAM sequence: TAG
aatcataatatgttgaaaat

SEQ ID NO: 38028 - DNA, 20 bp, Artificial Sequence
  Description of Artificial Sequence: Synthetic oligonucleotide
  Target: SCNA; (+) strand; PAM type: NRG; PAM sequence: AAG
ttatgatgtaataaatttat

SEQ ID NO: 38029 - DNA, 20 bp, Artificial Sequence
  Description of Artificial Sequence: Synthetic oligonucleotide
  Target: SCNA; (+) strand; PAM type: NRG; PAM sequence: CAG
tttataagaatcaaaacctt

SEQ ID NO: 38030 - DNA, 20 bp, Artificial Sequence
  Description of Artificial Sequence: Synthetic oligonucleotide
  Target: SCNA; (+) strand; PAM type: NRG; PAM sequence: CAG
caaaaccttcagaaaatctc

SEQ ID NO: 38031 - DNA, 20 bp, Artificial Sequence
  Description of Artificial Sequence: Synthetic oligonucleotide
  Target: SCNA; (+) strand; PAM type: NRG; PAM sequence: TAG
cttcagaaaatctccagtgt

SEQ ID NO: 38032 - DNA, 20 bp, Artificial Sequence
  Description of Artificial Sequence: Synthetic oligonucleotide
  Target: SCNA; (+) strand; PAM type: NRG; PAM sequence: TAG
tactatacttgcatgaaaaa

SEQ ID NO: 38033 - DNA, 20 bp, Artificial Sequence
  Description of Artificial Sequence: Synthetic oligonucleotide
  Target: SCNA; (+) strand; PAM type: NRG; PAM sequence: AGG
actatacttgcatgaaaaat

SEQ ID NO: 38034 - DNA, 20 bp, Artificial Sequence
  Description of Artificial Sequence: Synthetic oligonucleotide
  Target: SCNA; (+) strand; PAM type: NRG; PAM sequence: TAG
aaataggtaactttatatca

SEQ ID NO: 38035 - DNA, 20 bp, Artificial Sequence
  Description of Artificial Sequence: Synthetic oligonucleotide
  Target: SCNA; (+) strand; PAM type: NRG; PAM sequence: AAG
tatatcatagtttattttta

SEQ ID NO: 38036 - DNA, 20 bp, Artificial Sequence
  Description of Artificial Sequence: Synthetic oligonucleotide
  Target: SCNA; (+) strand; PAM type: NRG; PAM sequence: CAG
acctgaaaaaacatatcatt

SEQ ID NO: 38037 - DNA, 20 bp, Artificial Sequence
  Description of Artificial Sequence: Synthetic oligonucleotide
  Target: SCNA; (+) strand; PAM type: NRG; PAM sequence: AAG
gaaaaaacatatcattcagt

SEQ ID NO: 38038 - DNA, 20 bp, Artificial Sequence
  Description of Artificial Sequence: Synthetic oligonucleotide
  Target: SCNA; (+) strand; PAM type: NRG; PAM sequence: AAG
tttctataatatgatgcatt

SEQ ID NO: 38039 - DNA, 20 bp, Artificial Sequence
  Description of Artificial Sequence: Synthetic oligonucleotide
  Target: SCNA; (+) strand; PAM type: NRG; PAM sequence: GAG
gataactgaaataatttcct

SEQ ID NO: 38040 - DNA, 20 bp, Artificial Sequence
  Description of Artificial Sequence: Synthetic oligonucleotide
  Target: SCNA; (+) strand; PAM type: NRG; PAM sequence: CAG
aataatttcctgagatcaaa

SEQ ID NO: 38041 - DNA, 20 bp, Artificial Sequence
  Description of Artificial Sequence: Synthetic oligonucleotide
  Target: SCNA; (+) strand; PAM type: NRG; PAM sequence: CAG
atttcctgagatcaaacagc

SEQ ID NO: 38042 - DNA, 20 bp, Artificial Sequence
  Description of Artificial Sequence: Synthetic oligonucleotide
  Target: SCNA; (+) strand; PAM type: NRG; PAM sequence: AGG
tttcctgagatcaaacagcc

SEQ ID NO: 38043 - DNA, 20 bp, Artificial Sequence
  Description of Artificial Sequence: Synthetic oligonucleotide
  Target: SCNA; (+) strand; PAM type: NRG; PAM sequence: AAG
agatcaaacagccaggattt

SEQ ID NO: 38044 - DNA, 20 bp, Artificial Sequence
  Description of Artificial Sequence: Synthetic oligonucleotide
  Target: SCNA; (+) strand; PAM type: NRG; PAM sequence: TGG
caaacagccaggatttaagt

SEQ ID NO: 38045 - DNA, 20 bp, Artificial Sequence
  Description of Artificial Sequence: Synthetic oligonucleotide
  Target: SCNA; (+) strand; PAM type: NRG; PAM sequence: TGG
acagccaggatttaagttgg

SEQ ID NO: 38046 - DNA, 20 bp, Artificial Sequence
  Description of Artificial Sequence: Synthetic oligonucleotide
  Target: SCNA; (+) strand; PAM type: NRG; PAM sequence: TAG
tttcattgatattatctaac

SEQ ID NO: 38047 - DNA, 20 bp, Artificial Sequence
  Description of Artificial Sequence: Synthetic oligonucleotide
  Target: SCNA; (+) strand; PAM type: NRG; PAM sequence: AGG
ttcattgatattatctaact

SEQ ID NO: 38048 - DNA, 20 bp, Artificial Sequence
  Description of Artificial Sequence: Synthetic oligonucleotide
  Target: SCNA; (+) strand; PAM type: NRG; PAM sequence: TAG
tttattttatttgaactttg

SEQ ID NO: 38049 - DNA, 20 bp, Artificial Sequence
  Description of Artificial Sequence: Synthetic oligonucleotide
  Target: SCNA; (+) strand; PAM type: NRG; PAM sequence: AGG
ttattttatttgaactttgt

SEQ ID NO: 38050 - DNA, 20 bp, Artificial Sequence
  Description of Artificial Sequence: Synthetic oligonucleotide
  Target: SCNA; (+) strand; PAM type: NRG; PAM sequence: TAG
ttttatttgaactttgtagg

SEQ ID NO: 38051 - DNA, 20 bp, Artificial Sequence
  Description of Artificial Sequence: Synthetic oligonucleotide
  Target: SCNA; (+) strand; PAM type: NRG; PAM sequence: AAG
atttgaactttgtaggtaga

SEQ ID NO: 38052 - DNA, 20 bp, Artificial Sequence
  Description of Artificial Sequence: Synthetic oligonucleotide
  Target: SCNA; (+) strand; PAM type: NRG; PAM sequence: CAG
ctttgtaggtagaaagttcc

SEQ ID NO: 38053 - DNA, 20 bp, Artificial Sequence
  Description of Artificial Sequence: Synthetic oligonucleotide
  Target: SCNA; (+) strand; PAM type: NRG; PAM sequence: AAG
aggtagaaagttcccagccc

SEQ ID NO: 38054 - DNA, 20 bp, Artificial Sequence
  Description of Artificial Sequence: Synthetic oligonucleotide
  Target: SCNA; (+) strand; PAM type: NRG; PAM sequence: AAG
ttcccagcccaagtttactg

SEQ ID NO: 38055 - DNA, 20 bp, Artificial Sequence
  Description of Artificial Sequence: Synthetic oligonucleotide
  Target: SCNA; (+) strand; PAM type: NRG; PAM sequence: AAG
ctgccccaccgaaaaaaaaa

SEQ ID NO: 38056 - DNA, 20 bp, Artificial Sequence
  Description of Artificial Sequence: Synthetic oligonucleotide
  Target: SCNA; (+) strand; PAM type: NRG; PAM sequence: TGG
accgaaaaaaaaaaagctaa

SEQ ID NO: 38057 - DNA, 20 bp, Artificial Sequence
  Description of Artificial Sequence: Synthetic oligonucleotide
  Target: SCNA; (+) strand; PAM type: NRG; PAM sequence: GGG
ccgaaaaaaaaaaagctaat

SEQ ID NO: 38058 - DNA, 20 bp, Artificial Sequence
  Description of Artificial Sequence: Synthetic oligonucleotide
  Target: SCNA; (+) strand; PAM type: NRG; PAM sequence: TAG
aaaagctaatgggatgaatt

SEQ ID NO: 38059 - DNA, 20 bp, Artificial Sequence
  Description of Artificial Sequence: Synthetic oligonucleotide
  Target: SCNA; (+) strand; PAM type: NRG; PAM sequence: AGG
aaagctaatgggatgaattt

SEQ ID NO: 38060 - DNA, 20 bp, Artificial Sequence
  Description of Artificial Sequence: Synthetic oligonucleotide
  Target: SCNA; (+) strand; PAM type: NRG; PAM sequence: GGG
aagctaatgggatgaattta

SEQ ID NO: 38061 - DNA, 20 bp, Artificial Sequence
  Description of Artificial Sequence: Synthetic oligonucleotide
  Target: SCNA; (+) strand; PAM type: NRG; PAM sequence: GGG
agctaatgggatgaatttag

SEQ ID NO: 38062 - DNA, 20 bp, Artificial Sequence
  Description of Artificial Sequence: Synthetic oligonucleotide
  Target: SCNA; (+) strand; PAM type: NRG; PAM sequence: TAG
ggaaattgtttctttaatat

SEQ ID NO: 38063 - DNA, 20 bp, Artificial Sequence
  Description of Artificial Sequence: Synthetic oligonucleotide
  Target: SCNA; (+) strand; PAM type: NRG; PAM sequence: AAG
aattgtttctttaatattag

SEQ ID NO: 38064 - DNA, 20 bp, Artificial Sequence
  Description of Artificial Sequence: Synthetic oligonucleotide
  Target: SCNA; (+) strand; PAM type: NRG; PAM sequence: TAG
ttaatattagaagataatat

SEQ ID NO: 38065 - DNA, 20 bp, Artificial Sequence
  Description of Artificial Sequence: Synthetic oligonucleotide
  Target: SCNA; (+) strand; PAM type: NRG; PAM sequence: AGG
taatattagaagataatatt

SEQ ID NO: 38066 - DNA, 20 bp, Artificial Sequence
  Description of Artificial Sequence: Synthetic oligonucleotide
  Target: SCNA; (+) strand; PAM type: NRG; PAM sequence: AAG
atttcttgtttccctgcatt

SEQ ID NO: 38067 - DNA, 20 bp, Artificial Sequence
  Description of Artificial Sequence: Synthetic oligonucleotide
  Target: SCNA; (+) strand; PAM type: NRG; PAM sequence: TAG
tttccctgcattaagacttg

SEQ ID NO: 38068 - DNA, 20 bp, Artificial Sequence
  Description of Artificial Sequence: Synthetic oligonucleotide
  Target: SCNA; (+) strand; PAM type: NRG; PAM sequence: AAG
cctgcattaagacttgtagc

SEQ ID NO: 38069 - DNA, 20 bp, Artificial Sequence
  Description of Artificial Sequence: Synthetic oligonucleotide
  Target: SCNA; (+) strand; PAM type: NRG; PAM sequence: TAG
tagcaagaacaattaacaat

SEQ ID NO: 38070 - DNA, 20 bp, Artificial Sequence
  Description of Artificial Sequence: Synthetic oligonucleotide
  Target: SCNA; (+) strand; PAM type: NRG; PAM sequence: TAG
aagaacaattaacaattagt

SEQ ID NO: 38071 - DNA, 20 bp, Artificial Sequence
  Description of Artificial Sequence: Synthetic oligonucleotide
  Target: SCNA; (+) strand; PAM type: NRG; PAM sequence: CAG
ccataataaacattttacat

SEQ ID NO: 38072 - DNA, 20 bp, Artificial Sequence
  Description of Artificial Sequence: Synthetic oligonucleotide
  Target: SCNA; (+) strand; PAM type: NRG; PAM sequence: AGG
cataataaacattttacatc

SEQ ID NO: 38073 - DNA, 20 bp, Artificial Sequence
  Description of Artificial Sequence: Synthetic oligonucleotide
  Target: SCNA; (+) strand; PAM type: NRG; PAM sequence: AAG
ctccctctctttaaccattg

SEQ ID NO: 38074 - DNA, 20 bp, Artificial Sequence
  Description of Artificial Sequence: Synthetic oligonucleotide
  Target: SCNA; (+) strand; PAM type: NRG; PAM sequence: TAG
atcttatttcttctcataat

SEQ ID NO: 38075 - DNA, 20 bp, Artificial Sequence
  Description of Artificial Sequence: Synthetic oligonucleotide
  Target: SCNA; (+) strand; PAM type: NRG; PAM sequence: AAG
ttcttctcataattagactt

SEQ ID NO: 38076 - DNA, 20 bp, Artificial Sequence
  Description of Artificial Sequence: Synthetic oligonucleotide
  Target: SCNA; (+) strand; PAM type: NRG; PAM sequence: AAG
attaaataaccctattcaaa

SEQ ID NO: 38077 - DNA, 20 bp, Artificial Sequence
  Description of Artificial Sequence: Synthetic oligonucleotide
  Target: SCNA; (+) strand; PAM type: NRG; PAM sequence: TGG
gttaattcatttatctgatg

SEQ ID NO: 38078 - DNA, 20 bp, Artificial Sequence
  Description of Artificial Sequence: Synthetic oligonucleotide
  Target: SCNA; (+) strand; PAM type: NRG; PAM sequence: GGG
ttaattcatttatctgatgt

SEQ ID NO: 38079 - DNA, 20 bp, Artificial Sequence
  Description of Artificial Sequence: Synthetic oligonucleotide
  Target: SCNA; (+) strand; PAM type: NRG; PAM sequence: GAG
aattcatttatctgatgtgg

SEQ ID NO: 38080 - DNA, 20 bp, Artificial Sequence
  Description of Artificial Sequence: Synthetic oligonucleotide
  Target: SCNA; (+) strand; PAM type: NRG; PAM sequence: GAG
ttcatttatctgatgtggga

SEQ ID NO: 38081 - DNA, 20 bp, Artificial Sequence
  Description of Artificial Sequence: Synthetic oligonucleotide
  Target: SCNA; (+) strand; PAM type: NRG; PAM sequence: AGG
tcatttatctgatgtgggag

SEQ ID NO: 38082 - DNA, 20 bp, Artificial Sequence
  Description of Artificial Sequence: Synthetic oligonucleotide
  Target: SCNA; (+) strand; PAM type: NRG; PAM sequence: TAG
tgggagaggaatgattatga

SEQ ID NO: 38083 - DNA, 20 bp, Artificial Sequence
  Description of Artificial Sequence: Synthetic oligonucleotide
  Target: SCNA; (+) strand; PAM type: NRG; PAM sequence: CAG
gagaggaatgattatgatag

SEQ ID NO: 38084 - DNA, 20 bp, Artificial Sequence
  Description of Artificial Sequence: Synthetic oligonucleotide
  Target: SCNA; (+) strand; PAM type: NRG; PAM sequence: TAG
ttatcccaatgtgtttctca

SEQ ID NO: 38085 - DNA, 20 bp, Artificial Sequence
  Description of Artificial Sequence: Synthetic oligonucleotide
  Target: SCNA; (+) strand; PAM type: NRG; PAM sequence: TAG
tgtgtttctcatagccatac

SEQ ID NO: 38086 - DNA, 20 bp, Artificial Sequence
  Description of Artificial Sequence: Synthetic oligonucleotide
  Target: SCNA; (+) strand; PAM type: NRG; PAM sequence: CAG
catagccatactagttatga

SEQ ID NO: 38087 - DNA, 20 bp, Artificial Sequence
  Description of Artificial Sequence: Synthetic oligonucleotide
  Target: SCNA; (+) strand; PAM type: NRG; PAM sequence: TGG
actagttatgacagcatttt

SEQ ID NO: 38088 - DNA, 20 bp, Artificial Sequence
  Description of Artificial Sequence: Synthetic oligonucleotide
  Target: SCNA; (+) strand; PAM type: NRG; PAM sequence: CAG
tttggttatttcactactgc

SEQ ID NO: 38089 - DNA, 20 bp, Artificial Sequence
  Description of Artificial Sequence: Synthetic oligonucleotide
  Target: SCNA; (+) strand; PAM type: NRG; PAM sequence: AGG
ttggttatttcactactgcc

SEQ ID NO: 38090 - DNA, 20 bp, Artificial Sequence
  Description of Artificial Sequence: Synthetic oligonucleotide
  Target: SCNA; (+) strand; PAM type: NRG; PAM sequence: GGG
tggttatttcactactgcca

SEQ ID NO: 38091 - DNA, 20 bp, Artificial Sequence
  Description of Artificial Sequence: Synthetic oligonucleotide
  Target: SCNA; (+) strand; PAM type: NRG; PAM sequence: TGG
ttatttcactactgccaggg

SEQ ID NO: 38092 - DNA, 20 bp, Artificial Sequence
  Description of Artificial Sequence: Synthetic oligonucleotide
  Target: SCNA; (+) strand; PAM type: NRG; PAM sequence: TGG
actactgccagggtggtcca

SEQ ID NO: 38093 - DNA, 20 bp, Artificial Sequence
  Description of Artificial Sequence: Synthetic oligonucleotide
  Target: SCNA; (+) strand; PAM type: NRG; PAM sequence: GGG
ctactgccagggtggtccat

SEQ ID NO: 38094 - DNA, 20 bp, Artificial Sequence
  Description of Artificial Sequence: Synthetic oligonucleotide
  Target: SCNA; (+) strand; PAM type: NRG; PAM sequence: TAG
atcaccatgtccttactgcc

SEQ ID NO: 38095 - DNA, 20 bp, Artificial Sequence
  Description of Artificial Sequence: Synthetic oligonucleotide
  Target: SCNA; (+) strand; PAM type: NRG; PAM sequence: TAG
ctgcctagcaacatttccca

SEQ ID NO: 38096 - DNA, 20 bp, Artificial Sequence
  Description of Artificial Sequence: Synthetic oligonucleotide
  Target: SCNA; (+) strand; PAM type: NRG; PAM sequence: TGG
acatttcccatagttttctg

SEQ ID NO: 38097 - DNA, 20 bp, Artificial Sequence
  Description of Artificial Sequence: Synthetic oligonucleotide
  Target: SCNA; (+) strand; PAM type: NRG; PAM sequence: TAG
catagttttctgtggaacac

SEQ ID NO: 38098 - DNA, 20 bp, Artificial Sequence
  Description of Artificial Sequence: Synthetic oligonucleotide
  Target: SCNA; (+) strand; PAM type: NRG; PAM sequence: TAG
acactagtttcattcaaccc

SEQ ID NO: 38099 - DNA, 20 bp, Artificial Sequence
  Description of Artificial Sequence: Synthetic oligonucleotide
  Target: SCNA; (+) strand; PAM type: NRG; PAM sequence: AAG
ttcaaccctagtaactaatg

SEQ ID NO: 38100 - DNA, 20 bp, Artificial Sequence
  Description of Artificial Sequence: Synthetic oligonucleotide
  Target: SCNA; (+) strand; PAM type: NRG; PAM sequence: AAG
accctagtaactaatgaaga

SEQ ID NO: 38101 - DNA, 20 bp, Artificial Sequence
  Description of Artificial Sequence: Synthetic oligonucleotide
  Target: SCNA; (+) strand; PAM type: NRG; PAM sequence: AAG
gaaagttttcaataatcaaa

SEQ ID NO: 38102 - DNA, 20 bp, Artificial Sequence
  Description of Artificial Sequence: Synthetic oligonucleotide
  Target: SCNA; (+) strand; PAM type: NRG; PAM sequence: TAG
taatgcaaatttctttactg

SEQ ID NO: 38103 - DNA, 20 bp, Artificial Sequence
  Description of Artificial Sequence: Synthetic oligonucleotide
  Target: SCNA; (+) strand; PAM type: NRG; PAM sequence: AGG
aatgcaaatttctttactgt

SEQ ID NO: 38104 - DNA, 20 bp, Artificial Sequence
  Description of Artificial Sequence: Synthetic oligonucleotide
  Target: SCNA; (+) strand; PAM type: NRG; PAM sequence: CAG
ttctttactgtaggacatct

SEQ ID NO: 38105 - DNA, 20 bp, Artificial Sequence
  Description of Artificial Sequence: Synthetic oligonucleotide
  Target: SCNA; (+) strand; PAM type: NRG; PAM sequence: AAG
tcagattccttaatacgcta

SEQ ID NO: 38106 - DNA, 20 bp, Artificial Sequence
  Description of Artificial Sequence: Synthetic oligonucleotide
  Target: SCNA; (+) strand; PAM type: NRG; PAM sequence: GAG
agattccttaatacgctaaa

SEQ ID NO: 38107 - DNA, 20 bp, Artificial Sequence
  Description of Artificial Sequence: Synthetic oligonucleotide
  Target: SCNA; (+) strand; PAM type: NRG; PAM sequence: AAG
aatacgctaaagagaaaata

SEQ ID NO: 38108 - DNA, 20 bp, Artificial Sequence
  Description of Artificial Sequence: Synthetic oligonucleotide
  Target: SCNA; (+) strand; PAM type: NRG; PAM sequence: AAG
aagagaaaataaagtataca

SEQ ID NO: 38109 - DNA, 20 bp, Artificial Sequence
  Description of Artificial Sequence: Synthetic oligonucleotide
  Target: SCNA; (+) strand; PAM type: NRG; PAM sequence: TAG
ctcccaacattgtacaatgt

SEQ ID NO: 38110 - DNA, 20 bp, Artificial Sequence
  Description of Artificial Sequence: Synthetic oligonucleotide
  Target: SCNA; (+) strand; PAM type: NRG; PAM sequence: AAG
ttgtacaatgttagaaactt

SEQ ID NO: 38111 - DNA, 20 bp, Artificial Sequence
  Description of Artificial Sequence: Synthetic oligonucleotide
  Target: SCNA; (+) strand; PAM type: NRG; PAM sequence: GAG
tgttagaaacttaagattgt

SEQ ID NO: 38112 - DNA, 20 bp, Artificial Sequence
  Description of Artificial Sequence: Synthetic oligonucleotide
  Target: SCNA; (+) strand; PAM type: NRG; PAM sequence: CAG
gattgtgagccactgtcctt

SEQ ID NO: 38113 - DNA, 20 bp, Artificial Sequence
  Description of Artificial Sequence: Synthetic oligonucleotide
  Target: SCNA; (+) strand; PAM type: NRG; PAM sequence: CAG
atgtctaattgtacaaactt

SEQ ID NO: 38114 - DNA, 20 bp, Artificial Sequence
  Description of Artificial Sequence: Synthetic oligonucleotide
  Target: SCNA; (+) strand; PAM type: NRG; PAM sequence: CAG
cacacacacacacacacaca

SEQ ID NO: 38115 - DNA, 20 bp, Artificial Sequence
  Description of Artificial Sequence: Synthetic oligonucleotide
  Target: SCNA; (+) strand; PAM type: NRG; PAM sequence: TGG
acagatatgtgtttacattt

SEQ ID NO: 38116 - DNA, 20 bp, Artificial Sequence
  Description of Artificial Sequence: Synthetic oligonucleotide
  Target: SCNA; (+) strand; PAM type: NRG; PAM sequence: TGG
gtgtttacattttggcattc

SEQ ID NO: 38117 - DNA, 20 bp, Artificial Sequence
  Description of Artificial Sequence: Synthetic oligonucleotide
  Target: SCNA; (+) strand; PAM type: NRG; PAM sequence: AAG
tacattttggcattctggaa

SEQ ID NO: 38118 - DNA, 20 bp, Artificial Sequence
  Description of Artificial Sequence: Synthetic oligonucleotide
  Target: SCNA; (+) strand; PAM type: NRG; PAM sequence: CAG
tggaaaagactaaaaaaatg

SEQ ID NO: 38119 - DNA, 20 bp, Artificial Sequence
  Description of Artificial Sequence: Synthetic oligonucleotide
  Target: SCNA; (+) strand; PAM type: NRG; PAM sequence: CAG
aaaaatgcagcccatctcca

SEQ ID NO: 38120 - DNA, 20 bp, Artificial Sequence
  Description of Artificial Sequence: Synthetic oligonucleotide
  Target: SCNA; (+) strand; PAM type: NRG; PAM sequence: TAG
cccatctccacagtctccat

SEQ ID NO: 38121 - DNA, 20 bp, Artificial Sequence
  Description of Artificial Sequence: Synthetic oligonucleotide
  Target: SCNA; (+) strand; PAM type: NRG; PAM sequence: CAG
cacagtctccattagatcat

SEQ ID NO: 38122 - DNA, 20 bp, Artificial Sequence
  Description of Artificial Sequence: Synthetic oligonucleotide
  Target: SCNA; (+) strand; PAM type: NRG; PAM sequence: AGG
acagtctccattagatcatc

SEQ ID NO: 38123 - DNA, 20 bp, Artificial Sequence
  Description of Artificial Sequence: Synthetic oligonucleotide
  Target: SCNA; (+) strand; PAM type: NRG; PAM sequence: CAG
tccattagatcatcaggtga

SEQ ID NO: 38124 - DNA, 20 bp, Artificial Sequence
  Description of Artificial Sequence: Synthetic oligonucleotide
  Target: SCNA; (+) strand; PAM type: NRG; PAM sequence: TAG
agatcatcaggtgacagtaa

SEQ ID NO: 38125 - DNA, 20 bp, Artificial Sequence
  Description of Artificial Sequence: Synthetic oligonucleotide
  Target: SCNA; (+) strand; PAM type: NRG; PAM sequence: TGG
catcaggtgacagtaatagt

SEQ ID NO: 38126 - DNA, 20 bp, Artificial Sequence
  Description of Artificial Sequence: Synthetic oligonucleotide
  Target: SCNA; (+) strand; PAM type: NRG; PAM sequence: GGG
atcaggtgacagtaatagtt

SEQ ID NO: 38127 - DNA, 20 bp, Artificial Sequence
  Description of Artificial Sequence: Synthetic oligonucleotide
  Target: SCNA; (+) strand; PAM type: NRG; PAM sequence: CAG
ttaatttttaccactgactc

SEQ ID NO: 38128 - DNA, 20 bp, Artificial Sequence
  Description of Artificial Sequence: Synthetic oligonucleotide
  Target: SCNA; (+) strand; PAM type: NRG; PAM sequence: TGG
tgtctgctttctaaacctca

SEQ ID NO: 38129 - DNA, 20 bp, Artificial Sequence
  Description of Artificial Sequence: Synthetic oligonucleotide
  Target: SCNA; (+) strand; PAM type: NRG; PAM sequence: GGG
gtctgctttctaaacctcat

SEQ ID NO: 38130 - DNA, 20 bp, Artificial Sequence
  Description of Artificial Sequence: Synthetic oligonucleotide
  Target: SCNA; (+) strand; PAM type: NRG; PAM sequence: TGG
gttcttcctcaactactaaa

SEQ ID NO: 38131 - DNA, 20 bp, Artificial Sequence
  Description of Artificial Sequence: Synthetic oligonucleotide
  Target: SCNA; (+) strand; PAM type: NRG; PAM sequence: TAG
taaatggaacaccattcatc

SEQ ID NO: 38132 - DNA, 20 bp, Artificial Sequence
  Description of Artificial Sequence: Synthetic oligonucleotide
  Target: SCNA; (+) strand; PAM type: NRG; PAM sequence: AGG
aaatggaacaccattcatct

SEQ ID NO: 38133 - DNA, 20 bp, Artificial Sequence
  Description of Artificial Sequence: Synthetic oligonucleotide
  Target: SCNA; (+) strand; PAM type: NRG; PAM sequence: CAG
tcatctaggttgaccgtctt

SEQ ID NO: 38134 - DNA, 20 bp, Artificial Sequence
  Description of Artificial Sequence: Synthetic oligonucleotide
  Target: SCNA; (+) strand; PAM type: NRG; PAM sequence: TAG
ctaggttgaccgtcttcaga

SEQ ID NO: 38135 - DNA, 20 bp, Artificial Sequence
  Description of Artificial Sequence: Synthetic oligonucleotide
  Target: SCNA; (+) strand; PAM type: NRG; PAM sequence: TGG
ggttgaccgtcttcagatag

SEQ ID NO: 38136 - DNA, 20 bp, Artificial Sequence
  Description of Artificial Sequence: Synthetic oligonucleotide
  Target: SCNA; (+) strand; PAM type: NRG; PAM sequence: GAG
ttgaccgtcttcagatagtg

SEQ ID NO: 38137 - DNA, 20 bp, Artificial Sequence
  Description of Artificial Sequence: Synthetic oligonucleotide
  Target: SCNA; (+) strand; PAM type: NRG; PAM sequence: TAG
gtctccacctgtctgttatc

SEQ ID NO: 38138 - DNA, 20 bp, Artificial Sequence
  Description of Artificial Sequence: Synthetic oligonucleotide
  Target: SCNA; (+) strand; PAM type: NRG; PAM sequence: TAG
gcttcacaatatcatattta

SEQ ID NO: 38139 - DNA, 20 bp, Artificial Sequence
  Description of Artificial Sequence: Synthetic oligonucleotide
  Target: SCNA; (+) strand; PAM type: NRG; PAM sequence: AGG
cttcacaatatcatatttat

SEQ ID NO: 38140 - DNA, 20 bp, Artificial Sequence
  Description of Artificial Sequence: Synthetic oligonucleotide
  Target: SCNA; (+) strand; PAM type: NRG; PAM sequence: GAG
tcacaatatcatatttatag

SEQ ID NO: 38141 - DNA, 20 bp, Artificial Sequence
  Description of Artificial Sequence: Synthetic oligonucleotide
  Target: SCNA; (+) strand; PAM type: NRG; PAM sequence: AGG
cacaatatcatatttatagg

SEQ ID NO: 38142 - DNA, 20 bp, Artificial Sequence
  Description of Artificial Sequence: Synthetic oligonucleotide
  Target: SCNA; (+) strand; PAM type: NRG; PAM sequence: TAG
tcatatttataggaggtccc

SEQ ID NO: 38143 - DNA, 20 bp, Artificial Sequence
  Description of Artificial Sequence: Synthetic oligonucleotide
  Target: SCNA; (+) strand; PAM type: NRG; PAM sequence: AAG
tatttataggaggtccctag

SEQ ID NO: 38144 - DNA, 20 bp, Artificial Sequence
  Description of Artificial Sequence: Synthetic oligonucleotide
  Target: SCNA; (+) strand; PAM type: NRG; PAM sequence: AGG
atttataggaggtccctaga

SEQ ID NO: 38145 - DNA, 20 bp, Artificial Sequence
  Description of Artificial Sequence: Synthetic oligonucleotide
  Target: SCNA; (+) strand; PAM type: NRG; PAM sequence: TAG
gaggtccctagaaggcatca

SEQ ID NO: 38146 - DNA, 20 bp, Artificial Sequence
  Description of Artificial Sequence: Synthetic oligonucleotide
  Target: SCNA; (+) strand; PAM type: NRG; PAM sequence: TGG
ttacttaactacttctctgt

SEQ ID NO: 38147 - DNA, 20 bp, Artificial Sequence
  Description of Artificial Sequence: Synthetic oligonucleotide
  Target: SCNA; (+) strand; PAM type: NRG; PAM sequence: CAG
acttctctgttggattgcaa

SEQ ID NO: 38148 - DNA, 20 bp, Artificial Sequence
  Description of Artificial Sequence: Synthetic oligonucleotide
  Target: SCNA; (+) strand; PAM type: NRG; PAM sequence: GAG
ttctctgttggattgcaaca

SEQ ID NO: 38149 - DNA, 20 bp, Artificial Sequence
  Description of Artificial Sequence: Synthetic oligonucleotide
  Target: SCNA; (+) strand; PAM type: NRG; PAM sequence: AAG
gattgcaacagagcccatta

SEQ ID NO: 38150 - DNA, 20 bp, Artificial Sequence
  Description of Artificial Sequence: Synthetic oligonucleotide
  Target: SCNA; (+) strand; PAM type: NRG; PAM sequence: AGG
attgcaacagagcccattaa

SEQ ID NO: 38151 - DNA, 20 bp, Artificial Sequence
  Description of Artificial Sequence: Synthetic oligonucleotide
  Target: SCNA; (+) strand; PAM type: NRG; PAM sequence: CAG
ggtgcacaattaacttctaa

SEQ ID NO: 38152 - DNA, 20 bp, Artificial Sequence
  Description of Artificial Sequence: Synthetic oligonucleotide
  Target: SCNA; (+) strand; PAM type: NRG; PAM sequence: TAG
caattaacttctaacagaac

SEQ ID NO: 38153 - DNA, 20 bp, Artificial Sequence
  Description of Artificial Sequence: Synthetic oligonucleotide
  Target: SCNA; (+) strand; PAM type: NRG; PAM sequence: AAG
ttctaacagaactagtttca

SEQ ID NO: 38154 - DNA, 20 bp, Artificial Sequence
  Description of Artificial Sequence: Synthetic oligonucleotide
  Target: SCNA; (+) strand; PAM type: NRG; PAM sequence: AGG
tctaacagaactagtttcaa

SEQ ID NO: 38155 - DNA, 20 bp, Artificial Sequence
  Description of Artificial Sequence: Synthetic oligonucleotide
  Target: SCNA; (+) strand; PAM type: NRG; PAM sequence: GAG
taacagaactagtttcaaag

SEQ ID NO: 38156 - DNA, 20 bp, Artificial Sequence
  Description of Artificial Sequence: Synthetic oligonucleotide
  Target: SCNA; (+) strand; PAM type: NRG; PAM sequence: AAG
cactctgatttttaaatcaa

SEQ ID NO: 38157 - DNA, 20 bp, Artificial Sequence
  Description of Artificial Sequence: Synthetic oligonucleotide
  Target: SCNA; (+) strand; PAM type: NRG; PAM sequence: AAG
aaatcaaaagtattcattta

SEQ ID NO: 38158 - DNA, 20 bp, Artificial Sequence
  Description of Artificial Sequence: Synthetic oligonucleotide
  Target: SCNA; (+) strand; PAM type: NRG; PAM sequence: TAG
aaagaaatatttttctccac

SEQ ID NO: 38159 - DNA, 20 bp, Artificial Sequence
  Description of Artificial Sequence: Synthetic oligonucleotide
  Target: SCNA; (+) strand; PAM type: NRG; PAM sequence: AAG
tagttgtaaaaatgttgcac

SEQ ID NO: 38160 - DNA, 20 bp, Artificial Sequence
  Description of Artificial Sequence: Synthetic oligonucleotide
  Target: SCNA; (+) strand; PAM type: NRG; PAM sequence: AAG
tgtaaaaatgttgcacaaga

SEQ ID NO: 38161 - DNA, 20 bp, Artificial Sequence
  Description of Artificial Sequence: Synthetic oligonucleotide
  Target: SCNA; (+) strand; PAM type: NRG; PAM sequence: AAG
aaagttcactataaaactat

SEQ ID NO: 38162 - DNA, 20 bp, Artificial Sequence
  Description of Artificial Sequence: Synthetic oligonucleotide
  Target: SCNA; (+) strand; PAM type: NRG; PAM sequence: CAG
tattgtttgcttttgttttc

SEQ ID NO: 38163 - DNA, 20 bp, Artificial Sequence
  Description of Artificial Sequence: Synthetic oligonucleotide
  Target: SCNA; (+) strand; PAM type: NRG; PAM sequence: TAG
taattcactgaattatttta

SEQ ID NO: 38164 - DNA, 20 bp, Artificial Sequence
  Description of Artificial Sequence: Synthetic oligonucleotide
  Target: SCNA; (+) strand; PAM type: NRG; PAM sequence: GAG
cactgaattattttatagat

SEQ ID NO: 38165 - DNA, 20 bp, Artificial Sequence
  Description of Artificial Sequence: Synthetic oligonucleotide
  Target: SCNA; (+) strand; PAM type: NRG; PAM sequence: AGG
actgaattattttatagatg

SEQ ID NO: 38166 - DNA, 20 bp, Artificial Sequence
  Description of Artificial Sequence: Synthetic oligonucleotide
  Target: SCNA; (+) strand; PAM type: NRG; PAM sequence: AAG
gaattattttatagatgagg

SEQ ID NO: 38167 - DNA, 20 bp, Artificial Sequence
  Description of Artificial Sequence: Synthetic oligonucleotide
  Target: SCNA; (+) strand; PAM type: NRG; PAM sequence: CAG
gatgaggaagctaaatcaca

SEQ ID NO: 38168 - DNA, 20 bp, Artificial Sequence
  Description of Artificial Sequence: Synthetic oligonucleotide
  Target: SCNA; (+) strand; PAM type: NRG; PAM sequence: GAG
tgaggaagctaaatcacaca

SEQ ID NO: 38169 - DNA, 20 bp, Artificial Sequence
  Description of Artificial Sequence: Synthetic oligonucleotide
  Target: SCNA; (+) strand; PAM type: NRG; PAM sequence: AGG
gaggaagctaaatcacacag

SEQ ID NO: 38170 - DNA, 20 bp, Artificial Sequence
  Description of Artificial Sequence: Synthetic oligonucleotide
  Target: SCNA; (+) strand; PAM type: NRG; PAM sequence: AAG
agctaaatcacacagaggtg

SEQ ID NO: 38171 - DNA, 20 bp, Artificial Sequence
  Description of Artificial Sequence: Synthetic oligonucleotide
  Target: SCNA; (+) strand; PAM type: NRG; PAM sequence: CAG
agaatcttgcaaaaaacaca

SEQ ID NO: 38172 - DNA, 20 bp, Artificial Sequence
  Description of Artificial Sequence: Synthetic oligonucleotide
  Target: SCNA; (+) strand; PAM type: NRG; PAM sequence: TGG
tcttgcaaaaaacacacagc

SEQ ID NO: 38173 - DNA, 20 bp, Artificial Sequence
  Description of Artificial Sequence: Synthetic oligonucleotide
  Target: SCNA; (+) strand; PAM type: NRG; PAM sequence: AAG
gcaaaaaacacacagctggt

SEQ ID NO: 38174 - DNA, 20 bp, Artificial Sequence
  Description of Artificial Sequence: Synthetic oligonucleotide
  Target: SCNA; (+) strand; PAM type: NRG; PAM sequence: AGG
caaaaaacacacagctggta

SEQ ID NO: 38175 - DNA, 20 bp, Artificial Sequence
  Description of Artificial Sequence: Synthetic oligonucleotide
  Target: SCNA; (+) strand; PAM type: NRG; PAM sequence: GAG
aaaaacacacagctggtaag

SEQ ID NO: 38176 - DNA, 20 bp, Artificial Sequence
  Description of Artificial Sequence: Synthetic oligonucleotide
  Target: SCNA; (+) strand; PAM type: NRG; PAM sequence: AAG
acacacagctggtaaggagt

SEQ ID NO: 38177 - DNA, 20 bp, Artificial Sequence
  Description of Artificial Sequence: Synthetic oligonucleotide
  Target: SCNA; (+) strand; PAM type: NRG; PAM sequence: CAG
cacagctggtaaggagtaag

SEQ ID NO: 38178 - DNA, 20 bp, Artificial Sequence
  Description of Artificial Sequence: Synthetic oligonucleotide
  Target: SCNA; (+) strand; PAM type: NRG; PAM sequence: AGG
acagctggtaaggagtaagc

SEQ ID NO: 38179 - DNA, 20 bp, Artificial Sequence
  Description of Artificial Sequence: Synthetic oligonucleotide
  Target: SCNA; (+) strand; PAM type: NRG; PAM sequence: AAG
gctggtaaggagtaagcagg

SEQ ID NO: 38180 - DNA, 20 bp, Artificial Sequence
  Description of Artificial Sequence: Synthetic oligonucleotide
  Target: SCNA; (+) strand; PAM type: NRG; PAM sequence: AAG
agtaagcaggaagttgaacc

SEQ ID NO: 38181 - DNA, 20 bp, Artificial Sequence
  Description of Artificial Sequence: Synthetic oligonucleotide
  Target: SCNA; (+) strand; PAM type: NRG; PAM sequence: AAG
aagcaggaagttgaaccaag

SEQ ID NO: 38182 - DNA, 20 bp, Artificial Sequence
  Description of Artificial Sequence: Synthetic oligonucleotide
  Target: SCNA; (+) strand; PAM type: NRG; PAM sequence: TAG
agatctgactcctgtgtttt

SEQ ID NO: 38183 - DNA, 20 bp, Artificial Sequence
  Description of Artificial Sequence: Synthetic oligonucleotide
  Target: SCNA; (+) strand; PAM type: NRG; PAM sequence: AAG
catatccacaacactgtatt

SEQ ID NO: 38184 - DNA, 20 bp, Artificial Sequence
  Description of Artificial Sequence: Synthetic oligonucleotide
  Target: SCNA; (+) strand; PAM type: NRG; PAM sequence: TAG
cattgtcctcatttccattt

SEQ ID NO: 38185 - DNA, 20 bp, Artificial Sequence
  Description of Artificial Sequence: Synthetic oligonucleotide
  Target: SCNA; (+) strand; PAM type: NRG; PAM sequence: AAG
tgtcctcatttccattttag

SEQ ID NO: 38186 - DNA, 20 bp, Artificial Sequence
  Description of Artificial Sequence: Synthetic oligonucleotide
  Target: SCNA; (+) strand; PAM type: NRG; PAM sequence: CAG
ctcatttccattttagaagt

SEQ ID NO: 38187 - DNA, 20 bp, Artificial Sequence
  Description of Artificial Sequence: Synthetic oligonucleotide
  Target: SCNA; (+) strand; PAM type: NRG; PAM sequence: TAG
tccattttagaagtcagtga

SEQ ID NO: 38188 - DNA, 20 bp, Artificial Sequence
  Description of Artificial Sequence: Synthetic oligonucleotide
  Target: SCNA; (+) strand; PAM type: NRG; PAM sequence: AGG
ccattttagaagtcagtgat

SEQ ID NO: 38189 - DNA, 20 bp, Artificial Sequence
  Description of Artificial Sequence: Synthetic oligonucleotide
  Target: SCNA; (+) strand; PAM type: NRG; PAM sequence: TAG
ataggaacattttatttgta

SEQ ID NO: 38190 - DNA, 20 bp, Artificial Sequence
  Description of Artificial Sequence: Synthetic oligonucleotide
  Target: SCNA; (+) strand; PAM type: NRG; PAM sequence: AGG
taggaacattttatttgtat

SEQ ID NO: 38191 - DNA, 20 bp, Artificial Sequence
  Description of Artificial Sequence: Synthetic oligonucleotide
  Target: SCNA; (+) strand; PAM type: NRG; PAM sequence: CAG
ttttgcttcaccacatctgc

SEQ ID NO: 38192 - DNA, 20 bp, Artificial Sequence
  Description of Artificial Sequence: Synthetic oligonucleotide
  Target: SCNA; (+) strand; PAM type: NRG; PAM sequence: AGG
tttgcttcaccacatctgcc

SEQ ID NO: 38193 - DNA, 20 bp, Artificial Sequence
  Description of Artificial Sequence: Synthetic oligonucleotide
  Target: SCNA; (+) strand; PAM type: NRG; PAM sequence: TGG
accacatctgccaggaaacg

SEQ ID NO: 38194 - DNA, 20 bp, Artificial Sequence
  Description of Artificial Sequence: Synthetic oligonucleotide
  Target: SCNA; (+) strand; PAM type: NRG; PAM sequence: GAG
cacatctgccaggaaacgtg

SEQ ID NO: 38195 - DNA, 20 bp, Artificial Sequence
  Description of Artificial Sequence: Synthetic oligonucleotide
  Target: SCNA; (+) strand; PAM type: NRG; PAM sequence: CAG
gaaacgtggagtacttacaa

SEQ ID NO: 38196 - DNA, 20 bp, Artificial Sequence
  Description of Artificial Sequence: Synthetic oligonucleotide
  Target: SCNA; (+) strand; PAM type: NRG; PAM sequence: CAG
tacaacagaaaacttaatta

SEQ ID NO: 38197 - DNA, 20 bp, Artificial Sequence
  Description of Artificial Sequence: Synthetic oligonucleotide
  Target: SCNA; (+) strand; PAM type: NRG; PAM sequence: AAG
acagaaaacttaattacagc

SEQ ID NO: 38198 - DNA, 20 bp, Artificial Sequence
  Description of Artificial Sequence: Synthetic oligonucleotide
  Target: SCNA; (+) strand; PAM type: NRG; PAM sequence: TGG
acttaattacagcaagtctg

SEQ ID NO: 38199 - DNA, 20 bp, Artificial Sequence
  Description of Artificial Sequence: Synthetic oligonucleotide
  Target: SCNA; (+) strand; PAM type: NRG; PAM sequence: GGG
cttaattacagcaagtctgt

SEQ ID NO: 38200 - DNA, 20 bp, Artificial Sequence
  Description of Artificial Sequence: Synthetic oligonucleotide
  Target: SCNA; (+) strand; PAM type: NRG; PAM sequence: TGG
gcttttaatttgttaaattt

SEQ ID NO: 38201 - DNA, 20 bp, Artificial Sequence
  Description of Artificial Sequence: Synthetic oligonucleotide
  Target: SCNA; (+) strand; PAM type: NRG; PAM sequence: TGG
tcctttgatttctctatttc

SEQ ID NO: 38202 - DNA, 20 bp, Artificial Sequence
  Description of Artificial Sequence: Synthetic oligonucleotide
  Target: SCNA; (+) strand; PAM type: NRG; PAM sequence: CGG
aattgacttgttcaaattct

SEQ ID NO: 38203 - DNA, 20 bp, Artificial Sequence
  Description of Artificial Sequence: Synthetic oligonucleotide
  Target: SCNA; (+) strand; PAM type: NRG; PAM sequence: TAG
gttcaaattctcggtaaatt

SEQ ID NO: 38204 - DNA, 20 bp, Artificial Sequence
  Description of Artificial Sequence: Synthetic oligonucleotide
  Target: SCNA; (+) strand; PAM type: NRG; PAM sequence: AGG
ttcaaattctcggtaaattt

SEQ ID NO: 38205 - DNA, 20 bp, Artificial Sequence
  Description of Artificial Sequence: Synthetic oligonucleotide
  Target: SCNA; (+) strand; PAM type: NRG; PAM sequence: CAG
ggccaaatgaataatataat

SEQ ID NO: 38206 - DNA, 20 bp, Artificial Sequence
  Description of Artificial Sequence: Synthetic oligonucleotide
  Target: SCNA; (+) strand; PAM type: NRG; PAM sequence: TAG
cacaataatatttgtacaaa

SEQ ID NO: 38207 - DNA, 20 bp, Artificial Sequence
  Description of Artificial Sequence: Synthetic oligonucleotide
  Target: SCNA; (+) strand; PAM type: NRG; PAM sequence: AAG
agctataccataacaataca

SEQ ID NO: 38208 - DNA, 20 bp, Artificial Sequence
  Description of Artificial Sequence: Synthetic oligonucleotide
  Target: SCNA; (+) strand; PAM type: NRG; PAM sequence: AAG
aaacattttactgactgtcc

SEQ ID NO: 38209 - DNA, 20 bp, Artificial Sequence
  Description of Artificial Sequence: Synthetic oligonucleotide
  Target: SCNA; (+) strand; PAM type: NRG; PAM sequence: AGG
aacattttactgactgtcca

SEQ ID NO: 38210 - DNA, 20 bp, Artificial Sequence
  Description of Artificial Sequence: Synthetic oligonucleotide
  Target: SCNA; (+) strand; PAM type: NRG; PAM sequence: GGG
acattttactgactgtccaa

SEQ ID NO: 38211 - DNA, 20 bp, Artificial Sequence
  Description of Artificial Sequence: Synthetic oligonucleotide
  Target: SCNA; (+) strand; PAM type: NRG; PAM sequence: AAG
aaatgcactctgaattatca

SEQ ID NO: 38212 - DNA, 20 bp, Artificial Sequence
  Description of Artificial Sequence: Synthetic oligonucleotide
  Target: SCNA; (+) strand; PAM type: NRG; PAM sequence: AGG
aatgcactctgaattatcaa

SEQ ID NO: 38213 - DNA, 20 bp, Artificial Sequence
  Description of Artificial Sequence: Synthetic oligonucleotide
  Target: SCNA; (+) strand; PAM type: NRG; PAM sequence: AAG
tattgtaatcaacataattt

SEQ ID NO: 38214 - DNA, 20 bp, Artificial Sequence
  Description of Artificial Sequence: Synthetic oligonucleotide
  Target: SCNA; (+) strand; PAM type: NRG; PAM sequence: AGG
attgtaatcaacataattta

SEQ ID NO: 38215 - DNA, 20 bp, Artificial Sequence
  Description of Artificial Sequence: Synthetic oligonucleotide
  Target: SCNA; (+) strand; PAM type: NRG; PAM sequence: CAG
aaatattttactgtaatcaa

SEQ ID NO: 38216 - DNA, 20 bp, Artificial Sequence
  Description of Artificial Sequence: Synthetic oligonucleotide
  Target: SCNA; (+) strand; PAM type: NRG; PAM sequence: TGG
ttttactttttttaaaatta

SEQ ID NO: 38217 - DNA, 20 bp, Artificial Sequence
  Description of Artificial Sequence: Synthetic oligonucleotide
  Target: SCNA; (+) strand; PAM type: NRG; PAM sequence: CAG
tattcacattttatttttgt

SEQ ID NO: 38218 - DNA, 20 bp, Artificial Sequence
  Description of Artificial Sequence: Synthetic oligonucleotide
  Target: SCNA; (+) strand; PAM type: NRG; PAM sequence: CAG
tcacattttatttttgtcag

SEQ ID NO: 38219 - DNA, 20 bp, Artificial Sequence
  Description of Artificial Sequence: Synthetic oligonucleotide
  Target: SCNA; (+) strand; PAM type: NRG; PAM sequence: TGG
gcagtttgtcaatacatttt

SEQ ID NO: 38220 - DNA, 20 bp, Artificial Sequence
  Description of Artificial Sequence: Synthetic oligonucleotide
  Target: SCNA; (+) strand; PAM type: NRG; PAM sequence: CAG
tttgtcaatacatttttggt

SEQ ID NO: 38221 - DNA, 20 bp, Artificial Sequence
  Description of Artificial Sequence: Synthetic oligonucleotide
  Target: SCNA; (+) strand; PAM type: NRG; PAM sequence: TAG
cacttactataaattaaaca

SEQ ID NO: 38222 - DNA, 20 bp, Artificial Sequence
  Description of Artificial Sequence: Synthetic oligonucleotide
  Target: SCNA; (+) strand; PAM type: NRG; PAM sequence: AAG
aaacatagcttatcaattca

SEQ ID NO: 38223 - DNA, 20 bp, Artificial Sequence
  Description of Artificial Sequence: Synthetic oligonucleotide
  Target: SCNA; (+) strand; PAM type: NRG; PAM sequence: TGG
ttcaaagccctcattattct

SEQ ID NO: 38224 - DNA, 20 bp, Artificial Sequence
  Description of Artificial Sequence: Synthetic oligonucleotide
  Target: SCNA; (+) strand; PAM type: NRG; PAM sequence: AAG
aagccctcattattcttggc

SEQ ID NO: 38225 - DNA, 20 bp, Artificial Sequence
  Description of Artificial Sequence: Synthetic oligonucleotide
  Target: SCNA; (+) strand; PAM type: NRG; PAM sequence: AAG
ctatttaaaaatactttata

SEQ ID NO: 38226 - DNA, 20 bp, Artificial Sequence
  Description of Artificial Sequence: Synthetic oligonucleotide
  Target: SCNA; (+) strand; PAM type: NRG; PAM sequence: CAG
aaaatactttataaagaatt

SEQ ID NO: 38227 - DNA, 20 bp, Artificial Sequence
  Description of Artificial Sequence: Synthetic oligonucleotide
  Target: SCNA; (+) strand; PAM type: NRG; PAM sequence: AAG
ataaagaattcagtttcaat

SEQ ID NO: 38228 - DNA, 20 bp, Artificial Sequence
  Description of Artificial Sequence: Synthetic oligonucleotide
  Target: SCNA; (+) strand; PAM type: NRG; PAM sequence: TAG
caataagactgatatgttct

SEQ ID NO: 38229 - DNA, 20 bp, Artificial Sequence
  Description of Artificial Sequence: Synthetic oligonucleotide
  Target: SCNA; (+) strand; PAM type: NRG; PAM sequence: CAG
tgatatgttcttagaatgct

SEQ ID NO: 38230 - DNA, 20 bp, Artificial Sequence
  Description of Artificial Sequence: Synthetic oligonucleotide
  Target: SCNA; (+) strand; PAM type: NRG; PAM sequence: TAG
gtgattgttttacaatttca

SEQ ID NO: 38231 - DNA, 20 bp, Artificial Sequence
  Description of Artificial Sequence: Synthetic oligonucleotide
  Target: SCNA; (+) strand; PAM type: NRG; PAM sequence: AGG
tgattgttttacaatttcat

SEQ ID NO: 38232 - DNA, 20 bp, Artificial Sequence
  Description of Artificial Sequence: Synthetic oligonucleotide
  Target: SCNA; (+) strand; PAM type: NRG; PAM sequence: TGG
ttcataggaatcttgaatac

SEQ ID NO: 38233 - DNA, 20 bp, Artificial Sequence
  Description of Artificial Sequence: Synthetic oligonucleotide
  Target: SCNA; (+) strand; PAM type: NRG; PAM sequence: GGG
tcataggaatcttgaatact

SEQ ID NO: 38234 - DNA, 20 bp, Artificial Sequence
  Description of Artificial Sequence: Synthetic oligonucleotide
  Target: SCNA; (+) strand; PAM type: NRG; PAM sequence: TAG
tactgggccacactaatcac

SEQ ID NO: 38235 - DNA, 20 bp, Artificial Sequence
  Description of Artificial Sequence: Synthetic oligonucleotide
  Target: SCNA; (+) strand; PAM type: NRG; PAM sequence: TGG
gatactttaaatatcatctt

SEQ ID NO: 38236 - DNA, 20 bp, Artificial Sequence
  Description of Artificial Sequence: Synthetic oligonucleotide
  Target: SCNA; (+) strand; PAM type: NRG; PAM sequence: AAG
taaatatcatctttggatat

SEQ ID NO: 38237 - DNA, 20 bp, Artificial Sequence
  Description of Artificial Sequence: Synthetic oligonucleotide
  Target: SCNA; (+) strand; PAM type: NRG; PAM sequence: TGG
atctttggatataagcacaa

SEQ ID NO: 38238 - DNA, 20 bp, Artificial Sequence
  Description of Artificial Sequence: Synthetic oligonucleotide
  Target: SCNA; (+) strand; PAM type: NRG; PAM sequence: GAG
ctttggatataagcacaatg

SEQ ID NO: 38239 - DNA, 20 bp, Artificial Sequence
  Description of Artificial Sequence: Synthetic oligonucleotide
  Target: SCNA; (+) strand; PAM type: NRG; PAM sequence: TGG
accatgcaccactccctcct

SEQ ID NO: 38240 - DNA, 20 bp, Artificial Sequence
  Description of Artificial Sequence: Synthetic oligonucleotide
  Target: SCNA; (+) strand; PAM type: NRG; PAM sequence: TGG
caccactccctccttggttt

SEQ ID NO: 38241 - DNA, 20 bp, Artificial Sequence
  Description of Artificial Sequence: Synthetic oligonucleotide
  Target: SCNA; (+) strand; PAM type: NRG; PAM sequence: GAG
ccactccctccttggttttg

SEQ ID NO: 38242 - DNA, 20 bp, Artificial Sequence
  Description of Artificial Sequence: Synthetic oligonucleotide
  Target: SCNA; (+) strand; PAM type: NRG; PAM sequence: AAG
gagcctacaaaaacaaattc

SEQ ID NO: 38243 - DNA, 20 bp, Artificial Sequence
  Description of Artificial Sequence: Synthetic oligonucleotide
  Target: SCNA; (+) strand; PAM type: NRG; PAM sequence: AAG
caaaaacaaattcaagacat

SEQ ID NO: 38244 - DNA, 20 bp, Artificial Sequence
  Description of Artificial Sequence: Synthetic oligonucleotide
  Target: SCNA; (+) strand; PAM type: NRG; PAM sequence: AAG
aaattcaagacataagtctc

SEQ ID NO: 38245 - DNA, 20 bp, Artificial Sequence
  Description of Artificial Sequence: Synthetic oligonucleotide
  Target: SCNA; (+) strand; PAM type: NRG; PAM sequence: TAG
tcaagacataagtctcaagc

SEQ ID NO: 38246 - DNA, 20 bp, Artificial Sequence
  Description of Artificial Sequence: Synthetic oligonucleotide
  Target: SCNA; (+) strand; PAM type: NRG; PAM sequence: TAG
gctagccttaaattgctgat

SEQ ID NO: 38247 - DNA, 20 bp, Artificial Sequence
  Description of Artificial Sequence: Synthetic oligonucleotide
  Target: SCNA; (+) strand; PAM type: NRG; PAM sequence: TAG
gccttaaattgctgattagc

SEQ ID NO: 38248 - DNA, 20 bp, Artificial Sequence
  Description of Artificial Sequence: Synthetic oligonucleotide
  Target: SCNA; (+) strand; PAM type: NRG; PAM sequence: CAG
aatttaaaaatctcaatctt

SEQ ID NO: 38249 - DNA, 20 bp, Artificial Sequence
  Description of Artificial Sequence: Synthetic oligonucleotide
  Target: SCNA; (+) strand; PAM type: NRG; PAM sequence: AAG
ttaaaaatctcaatcttcag

SEQ ID NO: 38250 - DNA, 20 bp, Artificial Sequence
  Description of Artificial Sequence: Synthetic oligonucleotide
  Target: SCNA; (+) strand; PAM type: NRG; PAM sequence: CAG
tatatatattattatatctt

SEQ ID NO: 38251 - DNA, 20 bp, Artificial Sequence
  Description of Artificial Sequence: Synthetic oligonucleotide
  Target: SCNA; (+) strand; PAM type: NRG; PAM sequence: AGG
atatatattattatatcttc

SEQ ID NO: 38252 - DNA, 20 bp, Artificial Sequence
  Description of Artificial Sequence: Synthetic oligonucleotide
  Target: SCNA; (+) strand; PAM type: NRG; PAM sequence: GGG
tatatattattatatcttca

SEQ ID NO: 38253 - DNA, 20 bp, Artificial Sequence
  Description of Artificial Sequence: Synthetic oligonucleotide
  Target: SCNA; (+) strand; PAM type: NRG; PAM sequence: AAG
tattattatatcttcaggga

SEQ ID NO: 38254 - DNA, 20 bp, Artificial Sequence
  Description of Artificial Sequence: Synthetic oligonucleotide
  Target: SCNA; (+) strand; PAM type: NRG; PAM sequence: TAG
atatatatatatcctaaaac

SEQ ID NO: 38255 - DNA, 20 bp, Artificial Sequence
  Description of Artificial Sequence: Synthetic oligonucleotide
  Target: SCNA; (+) strand; PAM type: NRG; PAM sequence: AAG
tatatatatcctaaaactag

SEQ ID NO: 38256 - DNA, 20 bp, Artificial Sequence
  Description of Artificial Sequence: Synthetic oligonucleotide
  Target: SCNA; (+) strand; PAM type: NRG; PAM sequence: AAG
atatatcctaaaactagaag

SEQ ID NO: 38257 - DNA, 20 bp, Artificial Sequence
  Description of Artificial Sequence: Synthetic oligonucleotide
  Target: SCNA; (+) strand; PAM type: NRG; PAM sequence: AGG
tatatcctaaaactagaaga

SEQ ID NO: 38258 - DNA, 20 bp, Artificial Sequence
  Description of Artificial Sequence: Synthetic oligonucleotide
  Target: SCNA; (+) strand; PAM type: NRG; PAM sequence: CAG
aaaactagaagaaggaactc

SEQ ID NO: 38259 - DNA, 20 bp, Artificial Sequence
  Description of Artificial Sequence: Synthetic oligonucleotide
  Target: SCNA; (+) strand; PAM type: NRG; PAM sequence: TAG
ccagtaaccaccacaataaa

SEQ ID NO: 38260 - DNA, 20 bp, Artificial Sequence
  Description of Artificial Sequence: Synthetic oligonucleotide
  Target: SCNA; (+) strand; PAM type: NRG; PAM sequence: AAG
gtaaccaccacaataaatag

SEQ ID NO: 38261 - DNA, 20 bp, Artificial Sequence
  Description of Artificial Sequence: Synthetic oligonucleotide
  Target: SCNA; (+) strand; PAM type: NRG; PAM sequence: AAG
ccaccacaataaatagaaga

SEQ ID NO: 38262 - DNA, 20 bp, Artificial Sequence
  Description of Artificial Sequence: Synthetic oligonucleotide
  Target: SCNA; (+) strand; PAM type: NRG; PAM sequence: CAG
acaataaatagaagaaagcc

SEQ ID NO: 38263 - DNA, 20 bp, Artificial Sequence
  Description of Artificial Sequence: Synthetic oligonucleotide
  Target: SCNA; (+) strand; PAM type: NRG; PAM sequence: CAG
atagaagaaagcccagctaa

SEQ ID NO: 38264 - DNA, 20 bp, Artificial Sequence
  Description of Artificial Sequence: Synthetic oligonucleotide
  Target: SCNA; (+) strand; PAM type: NRG; PAM sequence: AGG
tagaagaaagcccagctaac

SEQ ID NO: 38265 - DNA, 20 bp, Artificial Sequence
  Description of Artificial Sequence: Synthetic oligonucleotide
  Target: SCNA; (+) strand; PAM type: NRG; PAM sequence: GAG
gaagaaagcccagctaacag

SEQ ID NO: 38266 - DNA, 20 bp, Artificial Sequence
  Description of Artificial Sequence: Synthetic oligonucleotide
  Target: SCNA; (+) strand; PAM type: NRG; PAM sequence: AGG
aagaaagcccagctaacagg

SEQ ID NO: 38267 - DNA, 20 bp, Artificial Sequence
  Description of Artificial Sequence: Synthetic oligonucleotide
  Target: SCNA; (+) strand; PAM type: NRG; PAM sequence: TAG
gtcctctccaattacgattt

SEQ ID NO: 38268 - DNA, 20 bp, Artificial Sequence
  Description of Artificial Sequence: Synthetic oligonucleotide
  Target: SCNA; (+) strand; PAM type: NRG; PAM sequence: CAG
ccacatcacatgtcaactta

SEQ ID NO: 38269 - DNA, 20 bp, Artificial Sequence
  Description of Artificial Sequence: Synthetic oligonucleotide
  Target: SCNA; (+) strand; PAM type: NRG; PAM sequence: GAG
acatcacatgtcaacttaca

SEQ ID NO: 38270 - DNA, 20 bp, Artificial Sequence
  Description of Artificial Sequence: Synthetic oligonucleotide
  Target: SCNA; (+) strand; PAM type: NRG; PAM sequence: AGG
catcacatgtcaacttacag

SEQ ID NO: 38271 - DNA, 20 bp, Artificial Sequence
  Description of Artificial Sequence: Synthetic oligonucleotide
  Target: SCNA; (+) strand; PAM type: NRG; PAM sequence: GAG
tcacatgtcaacttacagag

SEQ ID NO: 38272 - DNA, 20 bp, Artificial Sequence
  Description of Artificial Sequence: Synthetic oligonucleotide
  Target: SCNA; (+) strand; PAM type: NRG; PAM sequence: AAG
tcaacttacagaggagaaaa

SEQ ID NO: 38273 - DNA, 20 bp, Artificial Sequence
  Description of Artificial Sequence: Synthetic oligonucleotide
  Target: SCNA; (+) strand; PAM type: NRG; PAM sequence: GAG
tacagaggagaaaaaagaat

SEQ ID NO: 38274 - DNA, 20 bp, Artificial Sequence
  Description of Artificial Sequence: Synthetic oligonucleotide
  Target: SCNA; (+) strand; PAM type: NRG; PAM sequence: CGG
aaaaaagaatgagataacac

SEQ ID NO: 38275 - DNA, 20 bp, Artificial Sequence
  Description of Artificial Sequence: Synthetic oligonucleotide
  Target: SCNA; (+) strand; PAM type: NRG; PAM sequence: GGG
aaaaagaatgagataacacc

SEQ ID NO: 38276 - DNA, 20 bp, Artificial Sequence
  Description of Artificial Sequence: Synthetic oligonucleotide
  Target: SCNA; (+) strand; PAM type: NRG; PAM sequence: GGG
aaaagaatgagataacaccg

SEQ ID NO: 38277 - DNA, 20 bp, Artificial Sequence
  Description of Artificial Sequence: Synthetic oligonucleotide
  Target: SCNA; (+) strand; PAM type: NRG; PAM sequence: CAG
aatgagataacaccggggcc

SEQ ID NO: 38278 - DNA, 20 bp, Artificial Sequence
  Description of Artificial Sequence: Synthetic oligonucleotide
  Target: SCNA; (+) strand; PAM type: NRG; PAM sequence: GAG
agataacaccggggcccagt

SEQ ID NO: 38279 - DNA, 20 bp, Artificial Sequence
  Description of Artificial Sequence: Synthetic oligonucleotide
  Target: SCNA; (+) strand; PAM type: NRG; PAM sequence: AAG
taacaccggggcccagtgag

SEQ ID NO: 38280 - DNA, 20 bp, Artificial Sequence
  Description of Artificial Sequence: Synthetic oligonucleotide
  Target: SCNA; (+) strand; PAM type: NRG; PAM sequence: CAG
tgagaagataattttgaatt

SEQ ID NO: 38281 - DNA, 20 bp, Artificial Sequence
  Description of Artificial Sequence: Synthetic oligonucleotide
  Target: SCNA; (+) strand; PAM type: NRG; PAM sequence: TAG
taattttgaattcagaactg

SEQ ID NO: 38282 - DNA, 20 bp, Artificial Sequence
  Description of Artificial Sequence: Synthetic oligonucleotide
  Target: SCNA; (+) strand; PAM type: NRG; PAM sequence: AAG
ttttgaattcagaactgtag

SEQ ID NO: 38283 - DNA, 20 bp, Artificial Sequence
  Description of Artificial Sequence: Synthetic oligonucleotide
  Target: SCNA; (+) strand; PAM type: NRG; PAM sequence: AAG
cagaactgtagaagctttaa

SEQ ID NO: 38284 - DNA, 20 bp, Artificial Sequence
  Description of Artificial Sequence: Synthetic oligonucleotide
  Target: SCNA; (+) strand; PAM type: NRG; PAM sequence: CAG
ctgtagaagctttaaaagta

SEQ ID NO: 38285 - DNA, 20 bp, Artificial Sequence
  Description of Artificial Sequence: Synthetic oligonucleotide
  Target: SCNA; (+) strand; PAM type: NRG; PAM sequence: TAG
aagctttaaaagtacagcac

SEQ ID NO: 38286 - DNA, 20 bp, Artificial Sequence
  Description of Artificial Sequence: Synthetic oligonucleotide
  Target: SCNA; (+) strand; PAM type: NRG; PAM sequence: GAG
gctttaaaagtacagcacta

SEQ ID NO: 38287 - DNA, 20 bp, Artificial Sequence
  Description of Artificial Sequence: Synthetic oligonucleotide
  Target: SCNA; (+) strand; PAM type: NRG; PAM sequence: CAG
taaaagtacagcactagaga

SEQ ID NO: 38288 - DNA, 20 bp, Artificial Sequence
  Description of Artificial Sequence: Synthetic oligonucleotide
  Target: SCNA; (+) strand; PAM type: NRG; PAM sequence: CAG
gtacagcactagagacagat

SEQ ID NO: 38289 - DNA, 20 bp, Artificial Sequence
  Description of Artificial Sequence: Synthetic oligonucleotide
  Target: SCNA; (+) strand; PAM type: NRG; PAM sequence: AAG
tcagtcaacccatgaaacaa

SEQ ID NO: 38290 - DNA, 20 bp, Artificial Sequence
  Description of Artificial Sequence: Synthetic oligonucleotide
  Target: SCNA; (+) strand; PAM type: NRG; PAM sequence: AGG
cagtcaacccatgaaacaaa

SEQ ID NO: 38291 - DNA, 20 bp, Artificial Sequence
  Description of Artificial Sequence: Synthetic oligonucleotide
  Target: SCNA; (+) strand; PAM type: NRG; PAM sequence: GGG
agtcaacccatgaaacaaaa

SEQ ID NO: 38292 - DNA, 20 bp, Artificial Sequence
  Description of Artificial Sequence: Synthetic oligonucleotide
  Target: SCNA; (+) strand; PAM type: NRG; PAM sequence: AAG
caacccatgaaacaaaaggg

SEQ ID NO: 38293 - DNA, 20 bp, Artificial Sequence
  Description of Artificial Sequence: Synthetic oligonucleotide
  Target: SCNA; (+) strand; PAM type: NRG; PAM sequence: AAG
cccatgaaacaaaagggaag

SEQ ID NO: 38294 - DNA, 20 bp, Artificial Sequence
  Description of Artificial Sequence: Synthetic oligonucleotide
  Target: SCNA; (+) strand; PAM type: NRG; PAM sequence: AGG
ccatgaaacaaaagggaaga

SEQ ID NO: 38295 - DNA, 20 bp, Artificial Sequence
  Description of Artificial Sequence: Synthetic oligonucleotide
  Target: SCNA; (+) strand; PAM type: NRG; PAM sequence: TGG
gaaacaaaagggaagaagga

SEQ ID NO: 38296 - DNA, 20 bp, Artificial Sequence
  Description of Artificial Sequence: Synthetic oligonucleotide
  Target: SCNA; (+) strand; PAM type: NRG; PAM sequence: GAG
aacaaaagggaagaaggatg

SEQ ID NO: 38297 - DNA, 20 bp, Artificial Sequence
  Description of Artificial Sequence: Synthetic oligonucleotide
  Target: SCNA; (+) strand; PAM type: NRG; PAM sequence: GAG
caaaagggaagaaggatgga

SEQ ID NO: 38298 - DNA, 20 bp, Artificial Sequence
  Description of Artificial Sequence: Synthetic oligonucleotide
  Target: SCNA; (+) strand; PAM type: NRG; PAM sequence: AAG
aagggaagaaggatggagag

SEQ ID NO: 38299 - DNA, 20 bp, Artificial Sequence
  Description of Artificial Sequence: Synthetic oligonucleotide
  Target: SCNA; (+) strand; PAM type: NRG; PAM sequence: AGG
agggaagaaggatggagaga

SEQ ID NO: 38300 - DNA, 20 bp, Artificial Sequence
  Description of Artificial Sequence: Synthetic oligonucleotide
  Target: SCNA; (+) strand; PAM type: NRG; PAM sequence: TAG
attatgtaaaaaaaacattt

SEQ ID NO: 38301 - DNA, 20 bp, Artificial Sequence
  Description of Artificial Sequence: Synthetic oligonucleotide
  Target: SCNA; (+) strand; PAM type: NRG; PAM sequence: AGG
ttatgtaaaaaaaacatttt

SEQ ID NO: 38302 - DNA, 20 bp, Artificial Sequence
  Description of Artificial Sequence: Synthetic oligonucleotide
  Target: SCNA; (+) strand; PAM type: NRG; PAM sequence: TGG
gtaaaaaaaacattttaggc

SEQ ID NO: 38303 - DNA, 20 bp, Artificial Sequence
  Description of Artificial Sequence: Synthetic oligonucleotide
  Target: SCNA; (+) strand; PAM type: NRG; PAM sequence: GGG
taaaaaaaacattttaggct

SEQ ID NO: 38304 - DNA, 20 bp, Artificial Sequence
  Description of Artificial Sequence: Synthetic oligonucleotide
  Target: SCNA; (+) strand; PAM type: NRG; PAM sequence: CAG
aaaacattttaggctgggcg

SEQ ID NO: 38305 - DNA, 20 bp, Artificial Sequence
  Description of Artificial Sequence: Synthetic oligonucleotide
  Target: SCNA; (+) strand; PAM type: NRG; PAM sequence: TGG
acattttaggctgggcgcag

SEQ ID NO: 38306 - DNA, 20 bp, Artificial Sequence
  Description of Artificial Sequence: Synthetic oligonucleotide
  Target: SCNA; (+) strand; PAM type: NRG; PAM sequence: CAG
gtggctcatgcctgtaatcc

SEQ ID NO: 38307 - DNA, 20 bp, Artificial Sequence
  Description of Artificial Sequence: Synthetic oligonucleotide
  Target: SCNA; (+) strand; PAM type: NRG; PAM sequence: TGG
tgcctgtaatcccagcaatt

SEQ ID NO: 38308 - DNA, 20 bp, Artificial Sequence
  Description of Artificial Sequence: Synthetic oligonucleotide
  Target: SCNA; (+) strand; PAM type: NRG; PAM sequence: GGG
gcctgtaatcccagcaattt

SEQ ID NO: 38309 - DNA, 20 bp, Artificial Sequence
  Description of Artificial Sequence: Synthetic oligonucleotide
  Target: SCNA; (+) strand; PAM type: NRG; PAM sequence: GAG
ctgtaatcccagcaatttgg

SEQ ID NO: 38310 - DNA, 20 bp, Artificial Sequence
  Description of Artificial Sequence: Synthetic oligonucleotide
  Target: SCNA; (+) strand; PAM type: NRG; PAM sequence: AGG
tgtaatcccagcaatttggg

SEQ ID NO: 38311 - DNA, 20 bp, Artificial Sequence
  Description of Artificial Sequence: Synthetic oligonucleotide
  Target: SCNA; (+) strand; PAM type: NRG; PAM sequence: GAG
tcccagcaatttgggaggcc

SEQ ID NO: 38312 - DNA, 20 bp, Artificial Sequence
  Description of Artificial Sequence: Synthetic oligonucleotide
  Target: SCNA; (+) strand; PAM type: NRG; PAM sequence: AGG
cccagcaatttgggaggccg

SEQ ID NO: 38313 - DNA, 20 bp, Artificial Sequence
  Description of Artificial Sequence: Synthetic oligonucleotide
  Target: SCNA; (+) strand; PAM type: NRG; PAM sequence: TGG
agcaatttgggaggccgagg

SEQ ID NO: 38314 - DNA, 20 bp, Artificial Sequence
  Description of Artificial Sequence: Synthetic oligonucleotide
  Target: SCNA; (+) strand; PAM type: NRG; PAM sequence: GGG
gcaatttgggaggccgaggt

SEQ ID NO: 38315 - DNA, 20 bp, Artificial Sequence
  Description of Artificial Sequence: Synthetic oligonucleotide
  Target: SCNA; (+) strand; PAM type: NRG; PAM sequence: CAG
atttgggaggccgaggtggg

SEQ ID NO: 38316 - DNA, 20 bp, Artificial Sequence
  Description of Artificial Sequence: Synthetic oligonucleotide
  Target: SCNA; (+) strand; PAM type: NRG; PAM sequence: GAG
ggccgaggtgggcagatcac

SEQ ID NO: 38317 - DNA, 20 bp, Artificial Sequence
  Description of Artificial Sequence: Synthetic oligonucleotide
  Target: SCNA; (+) strand; PAM type: NRG; PAM sequence: AGG
gccgaggtgggcagatcacg

SEQ ID NO: 38318 - DNA, 20 bp, Artificial Sequence
  Description of Artificial Sequence: Synthetic oligonucleotide
  Target: SCNA; (+) strand; PAM type: NRG; PAM sequence: CAG
aggtgggcagatcacgaggt

SEQ ID NO: 38319 - DNA, 20 bp, Artificial Sequence
  Description of Artificial Sequence: Synthetic oligonucleotide
  Target: SCNA; (+) strand; PAM type: NRG; PAM sequence: AGG
ggtgggcagatcacgaggtc

SEQ ID NO: 38320 - DNA, 20 bp, Artificial Sequence
  Description of Artificial Sequence: Synthetic oligonucleotide
  Target: SCNA; (+) strand; PAM type: NRG; PAM sequence: GAG
tgggcagatcacgaggtcag

SEQ ID NO: 38321 - DNA, 20 bp, Artificial Sequence
  Description of Artificial Sequence: Synthetic oligonucleotide
  Target: SCNA; (+) strand; PAM type: NRG; PAM sequence: GAG
gatcacgaggtcaggagatc

SEQ ID NO: 38322 - DNA, 20 bp, Artificial Sequence
  Description of Artificial Sequence: Synthetic oligonucleotide
  Target: SCNA; (+) strand; PAM type: NRG; PAM sequence: TGG
tcaggagatcgagaccatcc

SEQ ID NO: 38323 - DNA, 20 bp, Artificial Sequence
  Description of Artificial Sequence: Synthetic oligonucleotide
  Target: SCNA; (+) strand; PAM type: NRG; PAM sequence: TGG
cgagaccatcctggctaata

SEQ ID NO: 38324 - DNA, 20 bp, Artificial Sequence
  Description of Artificial Sequence: Synthetic oligonucleotide
  Target: SCNA; (+) strand; PAM type: NRG; PAM sequence: TAG
ctaccaaaaatacaaaaaat

SEQ ID NO: 38325 - DNA, 20 bp, Artificial Sequence
  Description of Artificial Sequence: Synthetic oligonucleotide
  Target: SCNA; (+) strand; PAM type: NRG; PAM sequence: CAG
caaaaatacaaaaaattagc

SEQ ID NO: 38326 - DNA, 20 bp, Artificial Sequence
  Description of Artificial Sequence: Synthetic oligonucleotide
  Target: SCNA; (+) strand; PAM type: NRG; PAM sequence: AGG
aaaaatacaaaaaattagcc

SEQ ID NO: 38327 - DNA, 20 bp, Artificial Sequence
  Description of Artificial Sequence: Synthetic oligonucleotide
  Target: SCNA; (+) strand; PAM type: NRG; PAM sequence: TGG
tacaaaaaattagccaggcg

SEQ ID NO: 38328 - DNA, 20 bp, Artificial Sequence
  Description of Artificial Sequence: Synthetic oligonucleotide
  Target: SCNA; (+) strand; PAM type: NRG; PAM sequence: TGG
aaaaaattagccaggcgtgg

SEQ ID NO: 38329 - DNA, 20 bp, Artificial Sequence
  Description of Artificial Sequence: Synthetic oligonucleotide
  Target: SCNA; (+) strand; PAM type: NRG; PAM sequence: CGG
aaattagccaggcgtggtgg

SEQ ID NO: 38330 - DNA, 20 bp, Artificial Sequence
  Description of Artificial Sequence: Synthetic oligonucleotide
  Target: SCNA; (+) strand; PAM type: NRG; PAM sequence: GGG
aattagccaggcgtggtggc

SEQ ID NO: 38331 - DNA, 20 bp, Artificial Sequence
  Description of Artificial Sequence: Synthetic oligonucleotide
  Target: SCNA; (+) strand; PAM type: NRG; PAM sequence: TAG
ggcgtggtggcgggtgcctg

SEQ ID NO: 38332 - DNA, 20 bp, Artificial Sequence
  Description of Artificial Sequence: Synthetic oligonucleotide
  Target: SCNA; (+) strand; PAM type: NRG; PAM sequence: CAG
gtggcgggtgcctgtagtcc

SEQ ID NO: 38333 - DNA, 20 bp, Artificial Sequence
  Description of Artificial Sequence: Synthetic oligonucleotide
  Target: SCNA; (+) strand; PAM type: NRG; PAM sequence: TGG
tgcctgtagtcccagctact

SEQ ID NO: 38334 - DNA, 20 bp, Artificial Sequence
  Description of Artificial Sequence: Synthetic oligonucleotide
  Target: SCNA; (+) strand; PAM type: NRG; PAM sequence: GGG
gcctgtagtcccagctactt

SEQ ID NO: 38335 - DNA, 20 bp, Artificial Sequence
  Description of Artificial Sequence: Synthetic oligonucleotide
  Target: SCNA; (+) strand; PAM type: NRG; PAM sequence: GAG
ctgtagtcccagctacttgg

SEQ ID NO: 38336 - DNA, 20 bp, Artificial Sequence
  Description of Artificial Sequence: Synthetic oligonucleotide
  Target: SCNA; (+) strand; PAM type: NRG; PAM sequence: AGG
tgtagtcccagctacttggg

SEQ ID NO: 38337 - DNA, 20 bp, Artificial Sequence
  Description of Artificial Sequence: Synthetic oligonucleotide
  Target: SCNA; (+) strand; PAM type: NRG; PAM sequence: GGG
gtagtcccagctacttggga

SEQ ID NO: 38338 - DNA, 20 bp, Artificial Sequence
  Description of Artificial Sequence: Synthetic oligonucleotide
  Target: SCNA; (+) strand; PAM type: NRG; PAM sequence: GGG
tagtcccagctacttgggag

SEQ ID NO: 38339 - DNA, 20 bp, Artificial Sequence
  Description of Artificial Sequence: Synthetic oligonucleotide
  Target: SCNA; (+) strand; PAM type: NRG; PAM sequence: GAG
ccagctacttgggaggggct

SEQ ID NO: 38340 - DNA, 20 bp, Artificial Sequence
  Description of Artificial Sequence: Synthetic oligonucleotide
  Target: SCNA; (+) strand; PAM type: NRG; PAM sequence: AGG
cagctacttgggaggggctg

SEQ ID NO: 38341 - DNA, 20 bp, Artificial Sequence
  Description of Artificial Sequence: Synthetic oligonucleotide
  Target: SCNA; (+) strand; PAM type: NRG; PAM sequence: CAG
ctacttgggaggggctgagg

SEQ ID NO: 38342 - DNA, 20 bp, Artificial Sequence
  Description of Artificial Sequence: Synthetic oligonucleotide
  Target: SCNA; (+) strand; PAM type: NRG; PAM sequence: AGG
tacttgggaggggctgaggc

SEQ ID NO: 38343 - DNA, 20 bp, Artificial Sequence
  Description of Artificial Sequence: Synthetic oligonucleotide
  Target: SCNA; (+) strand; PAM type: NRG; PAM sequence: GAG
cttgggaggggctgaggcag

SEQ ID NO: 38344 - DNA, 20 bp, Artificial Sequence
  Description of Artificial Sequence: Synthetic oligonucleotide
  Target: SCNA; (+) strand; PAM type: NRG; PAM sequence: TGG
gaggggctgaggcaggagaa

SEQ ID NO: 38345 - DNA, 20 bp, Artificial Sequence
  Description of Artificial Sequence: Synthetic oligonucleotide
  Target: SCNA; (+) strand; PAM type: NRG; PAM sequence: CGG
gcaggagaatggcatgaact

SEQ ID NO: 38346 - DNA, 20 bp, Artificial Sequence
  Description of Artificial Sequence: Synthetic oligonucleotide
  Target: SCNA; (+) strand; PAM type: NRG; PAM sequence: GGG
caggagaatggcatgaactc

SEQ ID NO: 38347 - DNA, 20 bp, Artificial Sequence
  Description of Artificial Sequence: Synthetic oligonucleotide
  Target: SCNA; (+) strand; PAM type: NRG; PAM sequence: GAG
ggagaatggcatgaactcgg

SEQ ID NO: 38348 - DNA, 20 bp, Artificial Sequence
  Description of Artificial Sequence: Synthetic oligonucleotide
  Target: SCNA; (+) strand; PAM type: NRG; PAM sequence: AGG
gagaatggcatgaactcggg

SEQ ID NO: 38349 - DNA, 20 bp, Artificial Sequence
  Description of Artificial Sequence: Synthetic oligonucleotide
  Target: SCNA; (+) strand; PAM type: NRG; PAM sequence: CAG
aatggcatgaactcgggagg

SEQ ID NO: 38350 - DNA, 20 bp, Artificial Sequence
  Description of Artificial Sequence: Synthetic oligonucleotide
  Target: SCNA; (+) strand; PAM type: NRG; PAM sequence: CAG
aactcgggaggcagaacttg

SEQ ID NO: 38351 - DNA, 20 bp, Artificial Sequence
  Description of Artificial Sequence: Synthetic oligonucleotide
  Target: SCNA; (+) strand; PAM type: NRG; PAM sequence: GAG
cgggaggcagaacttgcagt

SEQ ID NO: 38352 - DNA, 20 bp, Artificial Sequence
  Description of Artificial Sequence: Synthetic oligonucleotide
  Target: SCNA; (+) strand; PAM type: NRG; PAM sequence: AAG
ggcagaacttgcagtgagcc

SEQ ID NO: 38353 - DNA, 20 bp, Artificial Sequence
  Description of Artificial Sequence: Synthetic oligonucleotide
  Target: SCNA; (+) strand; PAM type: NRG; PAM sequence: CAG
aagattgtgccactgcactc

SEQ ID NO: 38354 - DNA, 20 bp, Artificial Sequence
  Description of Artificial Sequence: Synthetic oligonucleotide
  Target: SCNA; (+) strand; PAM type: NRG; PAM sequence: TGG
tgtgccactgcactccagcc

SEQ ID NO: 38355 - DNA, 20 bp, Artificial Sequence
  Description of Artificial Sequence: Synthetic oligonucleotide
  Target: SCNA; (+) strand; PAM type: NRG; PAM sequence: GGG
gtgccactgcactccagcct

SEQ ID NO: 38356 - DNA, 20 bp, Artificial Sequence
  Description of Artificial Sequence: Synthetic oligonucleotide
  Target: SCNA; (+) strand; PAM type: NRG; PAM sequence: CAG
ctgcactccagcctgggtaa

SEQ ID NO: 38357 - DNA, 20 bp, Artificial Sequence
  Description of Artificial Sequence: Synthetic oligonucleotide
  Target: SCNA; (+) strand; PAM type: NRG; PAM sequence: GAG
gcactccagcctgggtaaca

SEQ ID NO: 38358 - DNA, 20 bp, Artificial Sequence
  Description of Artificial Sequence: Synthetic oligonucleotide
  Target: SCNA; (+) strand; PAM type: NRG; PAM sequence: AAG
tccagcctgggtaacagagc

SEQ ID NO: 38359 - DNA, 20 bp, Artificial Sequence
  Description of Artificial Sequence: Synthetic oligonucleotide
  Target: SCNA; (+) strand; PAM type: NRG; PAM sequence: CAG
ctctgtctcaaaaaaacaaa

SEQ ID NO: 38360 - DNA, 20 bp, Artificial Sequence
  Description of Artificial Sequence: Synthetic oligonucleotide
  Target: SCNA; (+) strand; PAM type: NRG; PAM sequence: CAG
atcttatttaatcttcataa

SEQ ID NO: 38361 - DNA, 20 bp, Artificial Sequence
  Description of Artificial Sequence: Synthetic oligonucleotide
  Target: SCNA; (+) strand; PAM type: NRG; PAM sequence: TAG
ttcataacagccatttaata

SEQ ID NO: 38362 - DNA, 20 bp, Artificial Sequence
  Description of Artificial Sequence: Synthetic oligonucleotide
  Target: SCNA; (+) strand; PAM type: NRG; PAM sequence: TAG
tatattatgcccattttaaa

SEQ ID NO: 38363 - DNA, 20 bp, Artificial Sequence
  Description of Artificial Sequence: Synthetic oligonucleotide
  Target: SCNA; (+) strand; PAM type: NRG; PAM sequence: GAG
gctgatgaaattaaaaatcc

SEQ ID NO: 38364 - DNA, 20 bp, Artificial Sequence
  Description of Artificial Sequence: Synthetic oligonucleotide
  Target: SCNA; (+) strand; PAM type: NRG; PAM sequence: AAG
tgaaattaaaaatccgagtt

SEQ ID NO: 38365 - DNA, 20 bp, Artificial Sequence
  Description of Artificial Sequence: Synthetic oligonucleotide
  Target: SCNA; (+) strand; PAM type: NRG; PAM sequence: TAG
taacattacacatgtaataa

SEQ ID NO: 38366 - DNA, 20 bp, Artificial Sequence
  Description of Artificial Sequence: Synthetic oligonucleotide
  Target: SCNA; (+) strand; PAM type: NRG; PAM sequence: AGG
aacattacacatgtaataat

SEQ ID NO: 38367 - DNA, 20 bp, Artificial Sequence
  Description of Artificial Sequence: Synthetic oligonucleotide
  Target: SCNA; (+) strand; PAM type: NRG; PAM sequence: AAG
cacatgtaataataggctat

SEQ ID NO: 38368 - DNA, 20 bp, Artificial Sequence
  Description of Artificial Sequence: Synthetic oligonucleotide
  Target: SCNA; (+) strand; PAM type: NRG; PAM sequence: TAG
ggctataagcacattcaaac

SEQ ID NO: 38369 - DNA, 20 bp, Artificial Sequence
  Description of Artificial Sequence: Synthetic oligonucleotide
  Target: SCNA; (+) strand; PAM type: NRG; PAM sequence: AGG
gctataagcacattcaaact

SEQ ID NO: 38370 - DNA, 20 bp, Artificial Sequence
  Description of Artificial Sequence: Synthetic oligonucleotide
  Target: SCNA; (+) strand; PAM type: NRG; PAM sequence: GGG
ctataagcacattcaaacta

SEQ ID NO: 38371 - DNA, 20 bp, Artificial Sequence
  Description of Artificial Sequence: Synthetic oligonucleotide
  Target: SCNA; (+) strand; PAM type: NRG; PAM sequence: CAG
ttcaaactagggtctctaca

SEQ ID NO: 38372 - DNA, 20 bp, Artificial Sequence
  Description of Artificial Sequence: Synthetic oligonucleotide
  Target: SCNA; (+) strand; PAM type: NRG; PAM sequence: AGG
tcaaactagggtctctacac

SEQ ID NO: 38373 - DNA, 20 bp, Artificial Sequence
  Description of Artificial Sequence: Synthetic oligonucleotide
  Target: SCNA; (+) strand; PAM type: NRG; PAM sequence: CAG
ctagggtctctacacaggat

SEQ ID NO: 38374 - DNA, 20 bp, Artificial Sequence
  Description of Artificial Sequence: Synthetic oligonucleotide
  Target: SCNA; (+) strand; PAM type: NRG; PAM sequence: TGG
attcatatcctctctaatgt

SEQ ID NO: 38375 - DNA, 20 bp, Artificial Sequence
  Description of Artificial Sequence: Synthetic oligonucleotide
  Target: SCNA; (+) strand; PAM type: NRG; PAM sequence: CAG
ctctctaatgttggattttt

SEQ ID NO: 38376 - DNA, 20 bp, Artificial Sequence
  Description of Artificial Sequence: Synthetic oligonucleotide
  Target: SCNA; (+) strand; PAM type: NRG; PAM sequence: TGG
aattcacactgtataattta

SEQ ID NO: 38377 - DNA, 20 bp, Artificial Sequence
  Description of Artificial Sequence: Synthetic oligonucleotide
  Target: SCNA; (+) strand; PAM type: NRG; PAM sequence: CGG
cactgtataatttatggaat

SEQ ID NO: 38378 - DNA, 20 bp, Artificial Sequence
  Description of Artificial Sequence: Synthetic oligonucleotide
  Target: SCNA; (+) strand; PAM type: NRG; PAM sequence: CAG
ggcatgatttttatgtttta

SEQ ID NO: 38379 - DNA, 20 bp, Artificial Sequence
  Description of Artificial Sequence: Synthetic oligonucleotide
  Target: SCNA; (+) strand; PAM type: NRG; PAM sequence: AAG
gaattatcatactccttttt

SEQ ID NO: 38380 - DNA, 20 bp, Artificial Sequence
  Description of Artificial Sequence: Synthetic oligonucleotide
  Target: SCNA; (+) strand; PAM type: NRG; PAM sequence: TGG
atcatactcctttttaagtt

SEQ ID NO: 38381 - DNA, 20 bp, Artificial Sequence
  Description of Artificial Sequence: Synthetic oligonucleotide
  Target: SCNA; (+) strand; PAM type: NRG; PAM sequence: CAG
actcctttttaagtttggat

SEQ ID NO: 38382 - DNA, 20 bp, Artificial Sequence
  Description of Artificial Sequence: Synthetic oligonucleotide
  Target: SCNA; (+) strand; PAM type: NRG; PAM sequence: CAG
ttaatgtcatgatatactga

SEQ ID NO: 38383 - DNA, 20 bp, Artificial Sequence
  Description of Artificial Sequence: Synthetic oligonucleotide
  Target: SCNA; (+) strand; PAM type: NRG; PAM sequence: AAG
actgacagtgtatttaacat

SEQ ID NO: 38384 - DNA, 20 bp, Artificial Sequence
  Description of Artificial Sequence: Synthetic oligonucleotide
  Target: SCNA; (+) strand; PAM type: NRG; PAM sequence: AGG
ctgacagtgtatttaacata

SEQ ID NO: 38385 - DNA, 20 bp, Artificial Sequence
  Description of Artificial Sequence: Synthetic oligonucleotide
  Target: SCNA; (+) strand; PAM type: NRG; PAM sequence: CAG
ttaacataaggtgtattttt

SEQ ID NO: 38386 - DNA, 20 bp, Artificial Sequence
  Description of Artificial Sequence: Synthetic oligonucleotide
  Target: SCNA; (+) strand; PAM type: NRG; PAM sequence: TGG
tttttcagcaacacttcctc

SEQ ID NO: 38387 - DNA, 20 bp, Artificial Sequence
  Description of Artificial Sequence: Synthetic oligonucleotide
  Target: SCNA; (+) strand; PAM type: NRG; PAM sequence: GGG
ttttcagcaacacttcctct

SEQ ID NO: 38388 - DNA, 20 bp, Artificial Sequence
  Description of Artificial Sequence: Synthetic oligonucleotide
  Target: SCNA; (+) strand; PAM type: NRG; PAM sequence: CGG
caacctctttccccattata

SEQ ID NO: 38389 - DNA, 20 bp, Artificial Sequence
  Description of Artificial Sequence: Synthetic oligonucleotide
  Target: SCNA; (+) strand; PAM type: NRG; PAM sequence: TAG
cgttcctctgactgcatatt

SEQ ID NO: 38390 - DNA, 20 bp, Artificial Sequence
  Description of Artificial Sequence: Synthetic oligonucleotide
  Target: SCNA; (+) strand; PAM type: NRG; PAM sequence: GAG
ttcctctgactgcatattta

SEQ ID NO: 38391 - DNA, 20 bp, Artificial Sequence
  Description of Artificial Sequence: Synthetic oligonucleotide
  Target: SCNA; (+) strand; PAM type: NRG; PAM sequence: CAG
atttagagtctcctgaattg

SEQ ID NO: 38392 - DNA, 20 bp, Artificial Sequence
  Description of Artificial Sequence: Synthetic oligonucleotide
  Target: SCNA; (+) strand; PAM type: NRG; PAM sequence: CAG
tagagtctcctgaattgcag

SEQ ID NO: 38393 - DNA, 20 bp, Artificial Sequence
  Description of Artificial Sequence: Synthetic oligonucleotide
  Target: SCNA; (+) strand; PAM type: NRG; PAM sequence: CAG
tgcagcagtgacaacatcct

SEQ ID NO: 38394 - DNA, 20 bp, Artificial Sequence
  Description of Artificial Sequence: Synthetic oligonucleotide
  Target: SCNA; (+) strand; PAM type: NRG; PAM sequence: AGG
gcagcagtgacaacatcctc

SEQ ID NO: 38395 - DNA, 20 bp, Artificial Sequence
  Description of Artificial Sequence: Synthetic oligonucleotide
  Target: SCNA; (+) strand; PAM type: NRG; PAM sequence: GGG
cagcagtgacaacatcctca

SEQ ID NO: 38396 - DNA, 20 bp, Artificial Sequence
  Description of Artificial Sequence: Synthetic oligonucleotide
  Target: SCNA; (+) strand; PAM type: NRG; PAM sequence: TAG
cagtgacaacatcctcaggg

SEQ ID NO: 38397 - DNA, 20 bp, Artificial Sequence
  Description of Artificial Sequence: Synthetic oligonucleotide
  Target: SCNA; (+) strand; PAM type: NRG; PAM sequence: CAG
tttgattcaaattttacttc

SEQ ID NO: 38398 - DNA, 20 bp, Artificial Sequence
  Description of Artificial Sequence: Synthetic oligonucleotide
  Target: SCNA; (+) strand; PAM type: NRG; PAM sequence: TGG
tgctactctttcatctttgc

SEQ ID NO: 38399 - DNA, 20 bp, Artificial Sequence
  Description of Artificial Sequence: Synthetic oligonucleotide
  Target: SCNA; (+) strand; PAM type: NRG; PAM sequence: CAG
actctttcatctttgctggc

SEQ ID NO: 38400 - DNA, 20 bp, Artificial Sequence
  Description of Artificial Sequence: Synthetic oligonucleotide
  Target: SCNA; (+) strand; PAM type: NRG; PAM sequence: TGG
cattttcgtgaaacatcaca

SEQ ID NO: 38401 - DNA, 20 bp, Artificial Sequence
  Description of Artificial Sequence: Synthetic oligonucleotide
  Target: SCNA; (+) strand; PAM type: NRG; PAM sequence: GGG
attttcgtgaaacatcacat

SEQ ID NO: 38402 - DNA, 20 bp, Artificial Sequence
  Description of Artificial Sequence: Synthetic oligonucleotide
  Target: SCNA; (+) strand; PAM type: NRG; PAM sequence: TGG
acatcacatgggctcaccac

SEQ ID NO: 38403 - DNA, 20 bp, Artificial Sequence
  Description of Artificial Sequence: Synthetic oligonucleotide
  Target: SCNA; (+) strand; PAM type: NRG; PAM sequence: GGG
catcacatgggctcaccact

SEQ ID NO: 38404 - DNA, 20 bp, Artificial Sequence
  Description of Artificial Sequence: Synthetic oligonucleotide
  Target: SCNA; (+) strand; PAM type: NRG; PAM sequence: GAG
tcacatgggctcaccactgg

SEQ ID NO: 38405 - DNA, 20 bp, Artificial Sequence
  Description of Artificial Sequence: Synthetic oligonucleotide
  Target: SCNA; (+) strand; PAM type: NRG; PAM sequence: TGG
ctcaccactgggagacaatg

SEQ ID NO: 38406 - DNA, 20 bp, Artificial Sequence
  Description of Artificial Sequence: Synthetic oligonucleotide
  Target: SCNA; (+) strand; PAM type: NRG; PAM sequence: AAG
gggagacaatgtggccacac

SEQ ID NO: 38407 - DNA, 20 bp, Artificial Sequence
  Description of Artificial Sequence: Synthetic oligonucleotide
  Target: SCNA; (+) strand; PAM type: NRG; PAM sequence: CGG
acaatgtggccacacaagtc

SEQ ID NO: 38408 - DNA, 20 bp, Artificial Sequence
  Description of Artificial Sequence: Synthetic oligonucleotide
  Target: SCNA; (+) strand; PAM type: NRG; PAM sequence: GGG
caatgtggccacacaagtcc

SEQ ID NO: 38409 - DNA, 20 bp, Artificial Sequence
  Description of Artificial Sequence: Synthetic oligonucleotide
  Target: SCNA; (+) strand; PAM type: NRG; PAM sequence: CAG
tgtctgtatgaactgcataa

SEQ ID NO: 38410 - DNA, 20 bp, Artificial Sequence
  Description of Artificial Sequence: Synthetic oligonucleotide
  Target: SCNA; (+) strand; PAM type: NRG; PAM sequence: AAG
tgaactgcataacagatgtg

SEQ ID NO: 38411 - DNA, 20 bp, Artificial Sequence
  Description of Artificial Sequence: Synthetic oligonucleotide
  Target: SCNA; (+) strand; PAM type: NRG; PAM sequence: AAG
tgaagcaaccaatctccaaa

SEQ ID NO: 38412 - DNA, 20 bp, Artificial Sequence
  Description of Artificial Sequence: Synthetic oligonucleotide
  Target: SCNA; (+) strand; PAM type: NRG; PAM sequence: AAG
caatctccaaaaagctttga

SEQ ID NO: 38413 - DNA, 20 bp, Artificial Sequence
  Description of Artificial Sequence: Synthetic oligonucleotide
  Target: SCNA; (+) strand; PAM type: NRG; PAM sequence: AAG
tctccaaaaagctttgaaag

SEQ ID NO: 38414 - DNA, 20 bp, Artificial Sequence
  Description of Artificial Sequence: Synthetic oligonucleotide
  Target: SCNA; (+) strand; PAM type: NRG; PAM sequence: TGG
aagctttgaaagaagtgctg

SEQ ID NO: 38415 - DNA, 20 bp, Artificial Sequence
  Description of Artificial Sequence: Synthetic oligonucleotide
  Target: SCNA; (+) strand; PAM type: NRG; PAM sequence: TGG
ggttttgtcactgattataa

SEQ ID NO: 38416 - DNA, 20 bp, Artificial Sequence
  Description of Artificial Sequence: Synthetic oligonucleotide
  Target: SCNA; (+) strand; PAM type: NRG; PAM sequence: GGG
gttttgtcactgattataat

SEQ ID NO: 38417 - DNA, 20 bp, Artificial Sequence
  Description of Artificial Sequence: Synthetic oligonucleotide
  Target: SCNA; (+) strand; PAM type: NRG; PAM sequence: AAG
gttatttatgtaatgatttg

SEQ ID NO: 38418 - DNA, 20 bp, Artificial Sequence
  Description of Artificial Sequence: Synthetic oligonucleotide
  Target: SCNA; (+) strand; PAM type: NRG; PAM sequence: AGG
ttatttatgtaatgatttga

SEQ ID NO: 38419 - DNA, 20 bp, Artificial Sequence
  Description of Artificial Sequence: Synthetic oligonucleotide
  Target: SCNA; (+) strand; PAM type: NRG; PAM sequence: AAG
atgtaatgatttgaaggctg

SEQ ID NO: 38420 - DNA, 20 bp, Artificial Sequence
  Description of Artificial Sequence: Synthetic oligonucleotide
  Target: SCNA; (+) strand; PAM type: NRG; PAM sequence: GAG
gtaatgatttgaaggctgaa

SEQ ID NO: 38421 - DNA, 20 bp, Artificial Sequence
  Description of Artificial Sequence: Synthetic oligonucleotide
  Target: SCNA; (+) strand; PAM type: NRG; PAM sequence: TAG
tgatttgaaggctgaagagt

SEQ ID NO: 38422 - DNA, 20 bp, Artificial Sequence
  Description of Artificial Sequence: Synthetic oligonucleotide
  Target: SCNA; (+) strand; PAM type: NRG; PAM sequence: CAG
tttgaaggctgaagagttag

SEQ ID NO: 38423 - DNA, 20 bp, Artificial Sequence
  Description of Artificial Sequence: Synthetic oligonucleotide
  Target: SCNA; (+) strand; PAM type: NRG; PAM sequence: AAG
aggctgaagagttagcagca

SEQ ID NO: 38424 - DNA, 20 bp, Artificial Sequence
  Description of Artificial Sequence: Synthetic oligonucleotide
  Target: SCNA; (+) strand; PAM type: NRG; PAM sequence: CGG
gtactttatgcaatgacttt

SEQ ID NO: 38425 - DNA, 20 bp, Artificial Sequence
  Description of Artificial Sequence: Synthetic oligonucleotide
  Target: SCNA; (+) strand; PAM type: NRG; PAM sequence: TGG
caatgactttcggtatactg

SEQ ID NO: 38426 - DNA, 20 bp, Artificial Sequence
  Description of Artificial Sequence: Synthetic oligonucleotide
  Target: SCNA; (+) strand; PAM type: NRG; PAM sequence: CAG
ctttcggtatactgtggtaa

SEQ ID NO: 38427 - DNA, 20 bp, Artificial Sequence
  Description of Artificial Sequence: Synthetic oligonucleotide
  Target: SCNA; (+) strand; PAM type: NRG; PAM sequence: TAG
agaaatttgaattgtgttgt

SEQ ID NO: 38428 - DNA, 20 bp, Artificial Sequence
  Description of Artificial Sequence: Synthetic oligonucleotide
  Target: SCNA; (+) strand; PAM type: NRG; PAM sequence: TGG
aatttgaattgtgttgttag

SEQ ID NO: 38429 - DNA, 20 bp, Artificial Sequence
  Description of Artificial Sequence: Synthetic oligonucleotide
  Target: SCNA; (+) strand; PAM type: NRG; PAM sequence: TGG
tgaattgtgttgttagtggc

SEQ ID NO: 38430 - DNA, 20 bp, Artificial Sequence
  Description of Artificial Sequence: Synthetic oligonucleotide
  Target: SCNA; (+) strand; PAM type: NRG; PAM sequence: TAG
tggtgttatttaactaacca

SEQ ID NO: 38431 - DNA, 20 bp, Artificial Sequence
  Description of Artificial Sequence: Synthetic oligonucleotide
  Target: SCNA; (+) strand; PAM type: NRG; PAM sequence: TGG
atttaactaaccatagtacc

SEQ ID NO: 38432 - DNA, 20 bp, Artificial Sequence
  Description of Artificial Sequence: Synthetic oligonucleotide
  Target: SCNA; (+) strand; PAM type: NRG; PAM sequence: TGG
tacctggaatttgtttgtgc

SEQ ID NO: 38433 - DNA, 20 bp, Artificial Sequence
  Description of Artificial Sequence: Synthetic oligonucleotide
  Target: SCNA; (+) strand; PAM type: NRG; PAM sequence: CAG
ttgtttgtgctggaactatg

SEQ ID NO: 38434 - DNA, 20 bp, Artificial Sequence
  Description of Artificial Sequence: Synthetic oligonucleotide
  Target: SCNA; (+) strand; PAM type: NRG; PAM sequence: GAG
gtttgtgctggaactatgca

SEQ ID NO: 38435 - DNA, 20 bp, Artificial Sequence
  Description of Artificial Sequence: Synthetic oligonucleotide
  Target: SCNA; (+) strand; PAM type: NRG; PAM sequence: GAG
gtgctggaactatgcagagt

SEQ ID NO: 38436 - DNA, 20 bp, Artificial Sequence
  Description of Artificial Sequence: Synthetic oligonucleotide
  Target: SCNA; (+) strand; PAM type: NRG; PAM sequence: CAG
ggaactatgcagagtgagaa

SEQ ID NO: 38437 - DNA, 20 bp, Artificial Sequence
  Description of Artificial Sequence: Synthetic oligonucleotide
  Target: SCNA; (+) strand; PAM type: NRG; PAM sequence: AAG
agtgagaacagctgatattt

SEQ ID NO: 38438 - DNA, 20 bp, Artificial Sequence
  Description of Artificial Sequence: Synthetic oligonucleotide
  Target: SCNA; (+) strand; PAM type: NRG; PAM sequence: GAG
tgagaacagctgatatttaa

SEQ ID NO: 38439 - DNA, 20 bp, Artificial Sequence
  Description of Artificial Sequence: Synthetic oligonucleotide
  Target: SCNA; (+) strand; PAM type: NRG; PAM sequence: TAG
catgttgtcttaaaaatgac

SEQ ID NO: 38440 - DNA, 20 bp, Artificial Sequence
  Description of Artificial Sequence: Synthetic oligonucleotide
  Target: SCNA; (+) strand; PAM type: NRG; PAM sequence: TAG
gttgtcttaaaaatgactag

SEQ ID NO: 38441 - DNA, 20 bp, Artificial Sequence
  Description of Artificial Sequence: Synthetic oligonucleotide
  Target: SCNA; (+) strand; PAM type: NRG; PAM sequence: AAG
tcttaaaaatgactagtagt

SEQ ID NO: 38442 - DNA, 20 bp, Artificial Sequence
  Description of Artificial Sequence: Synthetic oligonucleotide
  Target: SCNA; (+) strand; PAM type: NRG; PAM sequence: CAG
tagtagtaagaaatgtctaa

SEQ ID NO: 38443 - DNA, 20 bp, Artificial Sequence
  Description of Artificial Sequence: Synthetic oligonucleotide
  Target: SCNA; (+) strand; PAM type: NRG; PAM sequence: TGG
agtaagaaatgtctaacagc

SEQ ID NO: 38444 - DNA, 20 bp, Artificial Sequence
  Description of Artificial Sequence: Synthetic oligonucleotide
  Target: SCNA; (+) strand; PAM type: NRG; PAM sequence: TAG
gcgatctttgttctttgcct

SEQ ID NO: 38445 - DNA, 20 bp, Artificial Sequence
  Description of Artificial Sequence: Synthetic oligonucleotide
  Target: SCNA; (+) strand; PAM type: NRG; PAM sequence: CAG
atctttgttctttgccttag

SEQ ID NO: 38446 - DNA, 20 bp, Artificial Sequence
  Description of Artificial Sequence: Synthetic oligonucleotide
  Target: SCNA; (+) strand; PAM type: NRG; PAM sequence: AAG
tctttgccttagcagtacct

SEQ ID NO: 38447 - DNA, 20 bp, Artificial Sequence
  Description of Artificial Sequence: Synthetic oligonucleotide
  Target: SCNA; (+) strand; PAM type: NRG; PAM sequence: TGG
gtacctaagaatttgacctt

SEQ ID NO: 38448 - DNA, 20 bp, Artificial Sequence
  Description of Artificial Sequence: Synthetic oligonucleotide
  Target: SCNA; (+) strand; PAM type: NRG; PAM sequence: AAG
atgaaacatattctaaatca

SEQ ID NO: 38449 - DNA, 20 bp, Artificial Sequence
  Description of Artificial Sequence: Synthetic oligonucleotide
  Target: SCNA; (+) strand; PAM type: NRG; PAM sequence: GAG
tattctaaatcaaagacaat

SEQ ID NO: 38450 - DNA, 20 bp, Artificial Sequence
  Description of Artificial Sequence: Synthetic oligonucleotide
  Target: SCNA; (+) strand; PAM type: NRG; PAM sequence: TAG
ctaaatcaaagacaatgaga

SEQ ID NO: 38451 - DNA, 20 bp, Artificial Sequence
  Description of Artificial Sequence: Synthetic oligonucleotide
  Target: SCNA; (+) strand; PAM type: NRG; PAM sequence: AAG
aatcaaagacaatgagatag

SEQ ID NO: 38452 - DNA, 20 bp, Artificial Sequence
  Description of Artificial Sequence: Synthetic oligonucleotide
  Target: SCNA; (+) strand; PAM type: NRG; PAM sequence: TAG
caaagacaatgagatagaag

SEQ ID NO: 38453 - DNA, 20 bp, Artificial Sequence
  Description of Artificial Sequence: Synthetic oligonucleotide
  Target: SCNA; (+) strand; PAM type: NRG; PAM sequence: GAG
aagacaatgagatagaagta

SEQ ID NO: 38454 - DNA, 20 bp, Artificial Sequence
  Description of Artificial Sequence: Synthetic oligonucleotide
  Target: SCNA; (+) strand; PAM type: NRG; PAM sequence: GAG
gacaatgagatagaagtaga

SEQ ID NO: 38455 - DNA, 20 bp, Artificial Sequence
  Description of Artificial Sequence: Synthetic oligonucleotide
  Target: SCNA; (+) strand; PAM type: NRG; PAM sequence: TAG
aatgagatagaagtagagag

SEQ ID NO: 38456 - DNA, 20 bp, Artificial Sequence
  Description of Artificial Sequence: Synthetic oligonucleotide
  Target: SCNA; (+) strand; PAM type: NRG; PAM sequence: TAG
gagagtagaattatgattat

SEQ ID NO: 38457 - DNA, 20 bp, Artificial Sequence
  Description of Artificial Sequence: Synthetic oligonucleotide
  Target: SCNA; (+) strand; PAM type: NRG; PAM sequence: GAG
gagtagaattatgattatta

SEQ ID NO: 38458 - DNA, 20 bp, Artificial Sequence
  Description of Artificial Sequence: Synthetic oligonucleotide
  Target: SCNA; (+) strand; PAM type: NRG; PAM sequence: AGG
agtagaattatgattattag

SEQ ID NO: 38459 - DNA, 20 bp, Artificial Sequence
  Description of Artificial Sequence: Synthetic oligonucleotide
  Target: SCNA; (+) strand; PAM type: NRG; PAM sequence: CGG
tgattattagaggctgacaa

SEQ ID NO: 38460 - DNA, 20 bp, Artificial Sequence
  Description of Artificial Sequence: Synthetic oligonucleotide
  Target: SCNA; (+) strand; PAM type: NRG; PAM sequence: AAG
tattagaggctgacaacggt

SEQ ID NO: 38461 - DNA, 20 bp, Artificial Sequence
  Description of Artificial Sequence: Synthetic oligonucleotide
  Target: SCNA; (+) strand; PAM type: NRG; PAM sequence: GAG
ttagaggctgacaacggtaa

SEQ ID NO: 38462 - DNA, 20 bp, Artificial Sequence
  Description of Artificial Sequence: Synthetic oligonucleotide
  Target: SCNA; (+) strand; PAM type: NRG; PAM sequence: AGG
tagaggctgacaacggtaag

SEQ ID NO: 38463 - DNA, 20 bp, Artificial Sequence
  Description of Artificial Sequence: Synthetic oligonucleotide
  Target: SCNA; (+) strand; PAM type: NRG; PAM sequence: GGG
agaggctgacaacggtaaga

SEQ ID NO: 38464 - DNA, 20 bp, Artificial Sequence
  Description of Artificial Sequence: Synthetic oligonucleotide
  Target: SCNA; (+) strand; PAM type: NRG; PAM sequence: GAG
aggctgacaacggtaagagg

SEQ ID NO: 38465 - DNA, 20 bp, Artificial Sequence
  Description of Artificial Sequence: Synthetic oligonucleotide
  Target: SCNA; (+) strand; PAM type: NRG; PAM sequence: AGG
ggctgacaacggtaagaggg

SEQ ID NO: 38466 - DNA, 20 bp, Artificial Sequence
  Description of Artificial Sequence: Synthetic oligonucleotide
  Target: SCNA; (+) strand; PAM type: NRG; PAM sequence: GGG
gctgacaacggtaagaggga

SEQ ID NO: 38467 - DNA, 20 bp, Artificial Sequence
  Description of Artificial Sequence: Synthetic oligonucleotide
  Target: SCNA; (+) strand; PAM type: NRG; PAM sequence: GGG
ctgacaacggtaagagggag

SEQ ID NO: 38468 - DNA, 20 bp, Artificial Sequence
  Description of Artificial Sequence: Synthetic oligonucleotide
  Target: SCNA; (+) strand; PAM type: NRG; PAM sequence: GAG
gacaacggtaagagggaggg

SEQ ID NO: 38469 - DNA, 20 bp, Artificial Sequence
  Description of Artificial Sequence: Synthetic oligonucleotide
  Target: SCNA; (+) strand; PAM type: NRG; PAM sequence: AGG
acaacggtaagagggagggg

SEQ ID NO: 38470 - DNA, 20 bp, Artificial Sequence
  Description of Artificial Sequence: Synthetic oligonucleotide
  Target: SCNA; (+) strand; PAM type: NRG; PAM sequence: TGG
gtaagagggaggggaggata

SEQ ID NO: 38471 - DNA, 20 bp, Artificial Sequence
  Description of Artificial Sequence: Synthetic oligonucleotide
  Target: SCNA; (+) strand; PAM type: NRG; PAM sequence: GAG
aagagggaggggaggatatg

SEQ ID NO: 38472 - DNA, 20 bp, Artificial Sequence
  Description of Artificial Sequence: Synthetic oligonucleotide
  Target: SCNA; (+) strand; PAM type: NRG; PAM sequence: GAG
gagggaggggaggatatgga

SEQ ID NO: 38473 - DNA, 20 bp, Artificial Sequence
  Description of Artificial Sequence: Synthetic oligonucleotide
  Target: SCNA; (+) strand; PAM type: NRG; PAM sequence: AGG
agggaggggaggatatggag

SEQ ID NO: 38474 - DNA, 20 bp, Artificial Sequence
  Description of Artificial Sequence: Synthetic oligonucleotide
  Target: SCNA; (+) strand; PAM type: NRG; PAM sequence: TGG
aggggaggatatggagaggt

SEQ ID NO: 38475 - DNA, 20 bp, Artificial Sequence
  Description of Artificial Sequence: Synthetic oligonucleotide
  Target: SCNA; (+) strand; PAM type: NRG; PAM sequence: AAG
ggatatggagaggttggtta

SEQ ID NO: 38476 - DNA, 20 bp, Artificial Sequence
  Description of Artificial Sequence: Synthetic oligonucleotide
  Target: SCNA; (+) strand; PAM type: NRG; PAM sequence: TGG
ttggttaaagaatatgaaat

SEQ ID NO: 38477 - DNA, 20 bp, Artificial Sequence
  Description of Artificial Sequence: Synthetic oligonucleotide
  Target: SCNA; (+) strand; PAM type: NRG; PAM sequence: GAG
ggttaaagaatatgaaattg

SEQ ID NO: 38478 - DNA, 20 bp, Artificial Sequence
  Description of Artificial Sequence: Synthetic oligonucleotide
  Target: SCNA; (+) strand; PAM type: NRG; PAM sequence: GAG
atgaaattggagccaaatat

SEQ ID NO: 38479 - DNA, 20 bp, Artificial Sequence
  Description of Artificial Sequence: Synthetic oligonucleotide
  Target: SCNA; (+) strand; PAM type: NRG; PAM sequence: AGG
tgaaattggagccaaatatg

SEQ ID NO: 38480 - DNA, 20 bp, Artificial Sequence
  Description of Artificial Sequence: Synthetic oligonucleotide
  Target: SCNA; (+) strand; PAM type: NRG; PAM sequence: GAG
tggagccaaatatgaggaat

SEQ ID NO: 38481 - DNA, 20 bp, Artificial Sequence
  Description of Artificial Sequence: Synthetic oligonucleotide
  Target: SCNA; (+) strand; PAM type: NRG; PAM sequence: TAG
caaatatgaggaatgagttc

SEQ ID NO: 38482 - DNA, 20 bp, Artificial Sequence
  Description of Artificial Sequence: Synthetic oligonucleotide
  Target: SCNA; (+) strand; PAM type: NRG; PAM sequence: TAG
gaatgagttctagcattctg

SEQ ID NO: 38483 - DNA, 20 bp, Artificial Sequence
  Description of Artificial Sequence: Synthetic oligonucleotide
  Target: SCNA; (+) strand; PAM type: NRG; PAM sequence: TAG
tctagcattctgtagtactg

SEQ ID NO: 38484 - DNA, 20 bp, Artificial Sequence
  Description of Artificial Sequence: Synthetic oligonucleotide
  Target: SCNA; (+) strand; PAM type: NRG; PAM sequence: AGG
ctagcattctgtagtactgt

SEQ ID NO: 38485 - DNA, 20 bp, Artificial Sequence
  Description of Artificial Sequence: Synthetic oligonucleotide
  Target: SCNA; (+) strand; PAM type: NRG; PAM sequence: GGG
tagcattctgtagtactgta

SEQ ID NO: 38486 - DNA, 20 bp, Artificial Sequence
  Description of Artificial Sequence: Synthetic oligonucleotide
  Target: SCNA; (+) strand; PAM type: NRG; PAM sequence: TAG
tagggtgatatacttaacaa

SEQ ID NO: 38487 - DNA, 20 bp, Artificial Sequence
  Description of Artificial Sequence: Synthetic oligonucleotide
  Target: SCNA; (+) strand; PAM type: NRG; PAM sequence: TAG
attgcatatgttcaaaaatc

SEQ ID NO: 38488 - DNA, 20 bp, Artificial Sequence
  Description of Artificial Sequence: Synthetic oligonucleotide
  Target: SCNA; (+) strand; PAM type: NRG; PAM sequence: AAG
gcatatgttcaaaaatctag

SEQ ID NO: 38489 - DNA, 20 bp, Artificial Sequence
  Description of Artificial Sequence: Synthetic oligonucleotide
  Target: SCNA; (+) strand; PAM type: NRG; PAM sequence: GAG
atatgttcaaaaatctagaa

SEQ ID NO: 38490 - DNA, 20 bp, Artificial Sequence
  Description of Artificial Sequence: Synthetic oligonucleotide
  Target: SCNA; (+) strand; PAM type: NRG; PAM sequence: GAG
atgttcaaaaatctagaaga

SEQ ID NO: 38491 - DNA, 20 bp, Artificial Sequence
  Description of Artificial Sequence: Synthetic oligonucleotide
  Target: SCNA; (+) strand; PAM type: NRG; PAM sequence: AAG
tttttactgttcccaccaca

SEQ ID NO: 38492 - DNA, 20 bp, Artificial Sequence
  Description of Artificial Sequence: Synthetic oligonucleotide
  Target: SCNA; (+) strand; PAM type: NRG; PAM sequence: AGG
ttttactgttcccaccacaa

SEQ ID NO: 38493 - DNA, 20 bp, Artificial Sequence
  Description of Artificial Sequence: Synthetic oligonucleotide
  Target: SCNA; (+) strand; PAM type: NRG; PAM sequence: CAG
caaaggaatgataaatgttt

SEQ ID NO: 38494 - DNA, 20 bp, Artificial Sequence
  Description of Artificial Sequence: Synthetic oligonucleotide
  Target: SCNA; (+) strand; PAM type: NRG; PAM sequence: AGG
aaaggaatgataaatgtttc

SEQ ID NO: 38495 - DNA, 20 bp, Artificial Sequence
  Description of Artificial Sequence: Synthetic oligonucleotide
  Target: SCNA; (+) strand; PAM type: NRG; PAM sequence: TGG
atgataaatgtttcaggtaa

SEQ ID NO: 38496 - DNA, 20 bp, Artificial Sequence
  Description of Artificial Sequence: Synthetic oligonucleotide
  Target: SCNA; (+) strand; PAM type: NRG; PAM sequence: TGG
tcacacattgtatacatgta

SEQ ID NO: 38497 - DNA, 20 bp, Artificial Sequence
  Description of Artificial Sequence: Synthetic oligonucleotide
  Target: SCNA; (+) strand; PAM type: NRG; PAM sequence: TGG
catgtatggaaatataattc

SEQ ID NO: 38498 - DNA, 20 bp, Artificial Sequence
  Description of Artificial Sequence: Synthetic oligonucleotide
  Target: SCNA; (+) strand; PAM type: NRG; PAM sequence: AAG
tacatattcactaaaaataa

SEQ ID NO: 38499 - DNA, 20 bp, Artificial Sequence
  Description of Artificial Sequence: Synthetic oligonucleotide
  Target: SCNA; (+) strand; PAM type: NRG; PAM sequence: TAG
aataaaagaaaaattaaaaa

SEQ ID NO: 38500 - DNA, 20 bp, Artificial Sequence
  Description of Artificial Sequence: Synthetic oligonucleotide
  Target: SCNA; (+) strand; PAM type: NRG; PAM sequence: GAG
taaaagaaaaattaaaaata

SEQ ID NO: 38501 - DNA, 20 bp, Artificial Sequence
  Description of Artificial Sequence: Synthetic oligonucleotide
  Target: SCNA; (+) strand; PAM type: NRG; PAM sequence: TAG
aagaaaaattaaaaatagag

SEQ ID NO: 38502 - DNA, 20 bp, Artificial Sequence
  Description of Artificial Sequence: Synthetic oligonucleotide
  Target: SCNA; (+) strand; PAM type: NRG; PAM sequence: CAG
aaatagagtagcatatgacc

SEQ ID NO: 38503 - DNA, 20 bp, Artificial Sequence
  Description of Artificial Sequence: Synthetic oligonucleotide
  Target: SCNA; (+) strand; PAM type: NRG; PAM sequence: TGG
tgacccagcaatccctcttc

SEQ ID NO: 38504 - DNA, 20 bp, Artificial Sequence
  Description of Artificial Sequence: Synthetic oligonucleotide
  Target: SCNA; (+) strand; PAM type: NRG; PAM sequence: GGG
gacccagcaatccctcttct

SEQ ID NO: 38505 - DNA, 20 bp, Artificial Sequence
  Description of Artificial Sequence: Synthetic oligonucleotide
  Target: SCNA; (+) strand; PAM type: NRG; PAM sequence: TAG
agcaatccctcttctgggtg

SEQ ID NO: 38506 - DNA, 20 bp, Artificial Sequence
  Description of Artificial Sequence: Synthetic oligonucleotide
  Target: SCNA; (+) strand; PAM type: NRG; PAM sequence: AAG
tcttctgggtgtagatccac

SEQ ID NO: 38507 - DNA, 20 bp, Artificial Sequence
  Description of Artificial Sequence: Synthetic oligonucleotide
  Target: SCNA; (+) strand; PAM type: NRG; PAM sequence: AAG
tgggtgtagatccacaagaa

SEQ ID NO: 38508 - DNA, 20 bp, Artificial Sequence
  Description of Artificial Sequence: Synthetic oligonucleotide
  Target: SCNA; (+) strand; PAM type: NRG; PAM sequence: CAG
agatccacaagaaaagattt

SEQ ID NO: 38509 - DNA, 20 bp, Artificial Sequence
  Description of Artificial Sequence: Synthetic oligonucleotide
  Target: SCNA; (+) strand; PAM type: NRG; PAM sequence: AAG
atttcagcatatctgtttcc

SEQ ID NO: 38510 - DNA, 20 bp, Artificial Sequence
  Description of Artificial Sequence: Synthetic oligonucleotide
  Target: SCNA; (+) strand; PAM type: NRG; PAM sequence: AGG
tttcagcatatctgtttcca

SEQ ID NO: 38511 - DNA, 20 bp, Artificial Sequence
  Description of Artificial Sequence: Synthetic oligonucleotide
  Target: SCNA; (+) strand; PAM type: NRG; PAM sequence: GGG
ttcagcatatctgtttccaa

SEQ ID NO: 38512 - DNA, 20 bp, Artificial Sequence
  Description of Artificial Sequence: Synthetic oligonucleotide
  Target: SCNA; (+) strand; PAM type: NRG; PAM sequence: CAG
tgtttccaagggccccaaca

SEQ ID NO: 38513 - DNA, 20 bp, Artificial Sequence
  Description of Artificial Sequence: Synthetic oligonucleotide
  Target: SCNA; (+) strand; PAM type: NRG; PAM sequence: TGG
ttccaagggccccaacacag

SEQ ID NO: 38514 - DNA, 20 bp, Artificial Sequence
  Description of Artificial Sequence: Synthetic oligonucleotide
  Target: SCNA; (+) strand; PAM type: NRG; PAM sequence: TGG
ccaacacagtggctcttgct

SEQ ID NO: 38515 - DNA, 20 bp, Artificial Sequence
  Description of Artificial Sequence: Synthetic oligonucleotide
  Target: SCNA; (+) strand; PAM type: NRG; PAM sequence: CAG
gtggctcttgcttggaatcc

SEQ ID NO: 38516 - DNA, 20 bp, Artificial Sequence
  Description of Artificial Sequence: Synthetic oligonucleotide
  Target: SCNA; (+) strand; PAM type: NRG; PAM sequence: TGG
tgcttggaatcccagtgctt

SEQ ID NO: 38517 - DNA, 20 bp, Artificial Sequence
  Description of Artificial Sequence: Synthetic oligonucleotide
  Target: SCNA; (+) strand; PAM type: NRG; PAM sequence: GGG
gcttggaatcccagtgcttt

SEQ ID NO: 38518 - DNA, 20 bp, Artificial Sequence
  Description of Artificial Sequence: Synthetic oligonucleotide
  Target: SCNA; (+) strand; PAM type: NRG; PAM sequence: GAG
ttggaatcccagtgctttgg

SEQ ID NO: 38519 - DNA, 20 bp, Artificial Sequence
  Description of Artificial Sequence: Synthetic oligonucleotide
  Target: SCNA; (+) strand; PAM type: NRG; PAM sequence: AGG
tggaatcccagtgctttggg

SEQ ID NO: 38520 - DNA, 20 bp, Artificial Sequence
  Description of Artificial Sequence: Synthetic oligonucleotide
  Target: SCNA; (+) strand; PAM type: NRG; PAM sequence: GAG
tcccagtgctttgggaggct

SEQ ID NO: 38521 - DNA, 20 bp, Artificial Sequence
  Description of Artificial Sequence: Synthetic oligonucleotide
  Target: SCNA; (+) strand; PAM type: NRG; PAM sequence: AGG
cccagtgctttgggaggctg

SEQ ID NO: 38522 - DNA, 20 bp, Artificial Sequence
  Description of Artificial Sequence: Synthetic oligonucleotide
  Target: SCNA; (+) strand; PAM type: NRG; PAM sequence: CAG
agtgctttgggaggctgagg

SEQ ID NO: 38523 - DNA, 20 bp, Artificial Sequence
  Description of Artificial Sequence: Synthetic oligonucleotide
  Target: SCNA; (+) strand; PAM type: NRG; PAM sequence: AGG
gtgctttgggaggctgaggc

SEQ ID NO: 38524 - DNA, 20 bp, Artificial Sequence
  Description of Artificial Sequence: Synthetic oligonucleotide
  Target: SCNA; (+) strand; PAM type: NRG; PAM sequence: AAG
ctttgggaggctgaggcagg

SEQ ID NO: 38525 - DNA, 20 bp, Artificial Sequence
  Description of Artificial Sequence: Synthetic oligonucleotide
  Target: SCNA; (+) strand; PAM type: NRG; PAM sequence: AAG
aagatcacttataactatat

SEQ ID NO: 38526 - DNA, 20 bp, Artificial Sequence
  Description of Artificial Sequence: Synthetic oligonucleotide
  Target: SCNA; (+) strand; PAM type: NRG; PAM sequence: AGG
agatcacttataactatata

SEQ ID NO: 38527 - DNA, 20 bp, Artificial Sequence
  Description of Artificial Sequence: Synthetic oligonucleotide
  Target: SCNA; (+) strand; PAM type: NRG; PAM sequence: TAG
aaaactaatatttatttatt

SEQ ID NO: 38528 - DNA, 20 bp, Artificial Sequence
  Description of Artificial Sequence: Synthetic oligonucleotide
  Target: SCNA; (+) strand; PAM type: NRG; PAM sequence: CAG
tatttatttatttagcaaac

SEQ ID NO: 38529 - DNA, 20 bp, Artificial Sequence
  Description of Artificial Sequence: Synthetic oligonucleotide
  Target: SCNA; (+) strand; PAM type: NRG; PAM sequence: TAG
caaaccagaatttaaaacat

SEQ ID NO: 38530 - DNA, 20 bp, Artificial Sequence
  Description of Artificial Sequence: Synthetic oligonucleotide
  Target: SCNA; (+) strand; PAM type: NRG; PAM sequence: AAG
atttaaaacattagaaatta

SEQ ID NO: 38531 - DNA, 20 bp, Artificial Sequence
  Description of Artificial Sequence: Synthetic oligonucleotide
  Target: SCNA; (+) strand; PAM type: NRG; PAM sequence: AAG
ttctttgtaaaaaacttatc

SEQ ID NO: 38532 - DNA, 20 bp, Artificial Sequence
  Description of Artificial Sequence: Synthetic oligonucleotide
  Target: SCNA; (+) strand; PAM type: NRG; PAM sequence: GAG
ctttgtaaaaaacttatcaa

SEQ ID NO: 38533 - DNA, 20 bp, Artificial Sequence
  Description of Artificial Sequence: Synthetic oligonucleotide
  Target: SCNA; (+) strand; PAM type: NRG; PAM sequence: TAG
cttatcaagagtaatgtaaa

SEQ ID NO: 38534 - DNA, 20 bp, Artificial Sequence
  Description of Artificial Sequence: Synthetic oligonucleotide
  Target: SCNA; (+) strand; PAM type: NRG; PAM sequence: CGG
tcattgtataacttcctata

SEQ ID NO: 38535 - DNA, 20 bp, Artificial Sequence
  Description of Artificial Sequence: Synthetic oligonucleotide
  Target: SCNA; (+) strand; PAM type: NRG; PAM sequence: GAG
attgtataacttcctatacg

SEQ ID NO: 38536 - DNA, 20 bp, Artificial Sequence
  Description of Artificial Sequence: Synthetic oligonucleotide
  Target: SCNA; (+) strand; PAM type: NRG; PAM sequence: TGG
gtataacttcctatacggag

SEQ ID NO: 38537 - DNA, 20 bp, Artificial Sequence
  Description of Artificial Sequence: Synthetic oligonucleotide
  Target: SCNA; (+) strand; PAM type: NRG; PAM sequence: CAG
gacatgttttttatatttta

SEQ ID NO: 38538 - DNA, 20 bp, Artificial Sequence
  Description of Artificial Sequence: Synthetic oligonucleotide
  Target: SCNA; (+) strand; PAM type: NRG; PAM sequence: TAG
actctattctaaatttgaat

SEQ ID NO: 38539 - DNA, 20 bp, Artificial Sequence
  Description of Artificial Sequence: Synthetic oligonucleotide
  Target: SCNA; (+) strand; PAM type: NRG; PAM sequence: AGG
ctctattctaaatttgaatt

SEQ ID NO: 38540 - DNA, 20 bp, Artificial Sequence
  Description of Artificial Sequence: Synthetic oligonucleotide
  Target: SCNA; (+) strand; PAM type: NRG; PAM sequence: GAG
ctattctaaatttgaattag

SEQ ID NO: 38541 - DNA, 20 bp, Artificial Sequence
  Description of Artificial Sequence: Synthetic oligonucleotide
  Target: SCNA; (+) strand; PAM type: NRG; PAM sequence: GAG
taaatttgaattaggagttt

SEQ ID NO: 38542 - DNA, 20 bp, Artificial Sequence
  Description of Artificial Sequence: Synthetic oligonucleotide
  Target: SCNA; (+) strand; PAM type: NRG; PAM sequence: CAG
ttgaattaggagtttgagac

SEQ ID NO: 38543 - DNA, 20 bp, Artificial Sequence
  Description of Artificial Sequence: Synthetic oligonucleotide
  Target: SCNA; (+) strand; PAM type: NRG; PAM sequence: TGG
ttaggagtttgagaccagtc

SEQ ID NO: 38544 - DNA, 20 bp, Artificial Sequence
  Description of Artificial Sequence: Synthetic oligonucleotide
  Target: SCNA; (+) strand; PAM type: NRG; PAM sequence: GGG
taggagtttgagaccagtct

SEQ ID NO: 38545 - DNA, 20 bp, Artificial Sequence
  Description of Artificial Sequence: Synthetic oligonucleotide
  Target: SCNA; (+) strand; PAM type: NRG; PAM sequence: CAG
tttgagaccagtctgggcaa

SEQ ID NO: 38546 - DNA, 20 bp, Artificial Sequence
  Description of Artificial Sequence: Synthetic oligonucleotide
  Target: SCNA; (+) strand; PAM type: NRG; PAM sequence: GAG
tgagaccagtctgggcaaca

SEQ ID NO: 38547 - DNA, 20 bp, Artificial Sequence
  Description of Artificial Sequence: Synthetic oligonucleotide
  Target: SCNA; (+) strand; PAM type: NRG; PAM sequence: GAG
accagtctgggcaacagagt

SEQ ID NO: 38548 - DNA, 20 bp, Artificial Sequence
  Description of Artificial Sequence: Synthetic oligonucleotide
  Target: SCNA; (+) strand; PAM type: NRG; PAM sequence: TAG
ctacaaaaaatattaaaaat

SEQ ID NO: 38549 - DNA, 20 bp, Artificial Sequence
  Description of Artificial Sequence: Synthetic oligonucleotide
  Target: SCNA; (+) strand; PAM type: NRG; PAM sequence: CAG
aaaaaatattaaaaattagc

SEQ ID NO: 38550 - DNA, 20 bp, Artificial Sequence
  Description of Artificial Sequence: Synthetic oligonucleotide
  Target: SCNA; (+) strand; PAM type: NRG; PAM sequence: AGG
aaaaatattaaaaattagcc

SEQ ID NO: 38551 - DNA, 20 bp, Artificial Sequence
  Description of Artificial Sequence: Synthetic oligonucleotide
  Target: SCNA; (+) strand; PAM type: NRG; PAM sequence: TGG
tattaaaaattagccaggca

SEQ ID NO: 38552 - DNA, 20 bp, Artificial Sequence
  Description of Artificial Sequence: Synthetic oligonucleotide
  Target: SCNA; (+) strand; PAM type: NRG; PAM sequence: TAG
ggcatggtaatgtatgcctg

SEQ ID NO: 38553 - DNA, 20 bp, Artificial Sequence
  Description of Artificial Sequence: Synthetic oligonucleotide
  Target: SCNA; (+) strand; PAM type: NRG; PAM sequence: CAG
gtaatgtatgcctgtagtct

SEQ ID NO: 38554 - DNA, 20 bp, Artificial Sequence
  Description of Artificial Sequence: Synthetic oligonucleotide
  Target: SCNA; (+) strand; PAM type: NRG; PAM sequence: TGG
tgcctgtagtctcagctact

SEQ ID NO: 38555 - DNA, 20 bp, Artificial Sequence
  Description of Artificial Sequence: Synthetic oligonucleotide
  Target: SCNA; (+) strand; PAM type: NRG; PAM sequence: GGG
gcctgtagtctcagctactt

SEQ ID NO: 38556 - DNA, 20 bp, Artificial Sequence
  Description of Artificial Sequence: Synthetic oligonucleotide
  Target: SCNA; (+) strand; PAM type: NRG; PAM sequence: GAG
ctgtagtctcagctacttgg

SEQ ID NO: 38557 - DNA, 20 bp, Artificial Sequence
  Description of Artificial Sequence: Synthetic oligonucleotide
  Target: SCNA; (+) strand; PAM type: NRG; PAM sequence: AGG
tgtagtctcagctacttggg

SEQ ID NO: 38558 - DNA, 20 bp, Artificial Sequence
  Description of Artificial Sequence: Synthetic oligonucleotide
  Target: SCNA; (+) strand; PAM type: NRG; PAM sequence: AAG
tctcagctacttgggaggcc

SEQ ID NO: 38559 - DNA, 20 bp, Artificial Sequence
  Description of Artificial Sequence: Synthetic oligonucleotide
  Target: SCNA; (+) strand; PAM type: NRG; PAM sequence: AGG
ctcagctacttgggaggcca

SEQ ID NO: 38560 - DNA, 20 bp, Artificial Sequence
  Description of Artificial Sequence: Synthetic oligonucleotide
  Target: SCNA; (+) strand; PAM type: NRG; PAM sequence: CAG
agctacttgggaggccaagg

SEQ ID NO: 38561 - DNA, 20 bp, Artificial Sequence
  Description of Artificial Sequence: Synthetic oligonucleotide
  Target: SCNA; (+) strand; PAM type: NRG; PAM sequence: AGG
gctacttgggaggccaaggc

SEQ ID NO: 38562 - DNA, 20 bp, Artificial Sequence
  Description of Artificial Sequence: Synthetic oligonucleotide
  Target: SCNA; (+) strand; PAM type: NRG; PAM sequence: GAG
tacttgggaggccaaggcag

SEQ ID NO: 38563 - DNA, 20 bp, Artificial Sequence
  Description of Artificial Sequence: Synthetic oligonucleotide
  Target: SCNA; (+) strand; PAM type: NRG; PAM sequence: AGG
acttgggaggccaaggcagg

SEQ ID NO: 38564 - DNA, 20 bp, Artificial Sequence
  Description of Artificial Sequence: Synthetic oligonucleotide
  Target: SCNA; (+) strand; PAM type: NRG; PAM sequence: GAG
ccaaggcaggaggatctctt

SEQ ID NO: 38565 - DNA, 20 bp, Artificial Sequence
  Description of Artificial Sequence: Synthetic oligonucleotide
  Target: SCNA; (+) strand; PAM type: NRG; PAM sequence: CAG
gcaggaggatctcttgagcc

SEQ ID NO: 38566 - DNA, 20 bp, Artificial Sequence
  Description of Artificial Sequence: Synthetic oligonucleotide
  Target: SCNA; (+) strand; PAM type: NRG; PAM sequence: AAG
ggaggatctcttgagcccag

SEQ ID NO: 38567 - DNA, 20 bp, Artificial Sequence
  Description of Artificial Sequence: Synthetic oligonucleotide
  Target: SCNA; (+) strand; PAM type: NRG; PAM sequence: GAG
tctcttgagcccagaagttt

SEQ ID NO: 38568 - DNA, 20 bp, Artificial Sequence
  Description of Artificial Sequence: Synthetic oligonucleotide
  Target: SCNA; (+) strand; PAM type: NRG; PAM sequence: AGG
ctcttgagcccagaagtttg

SEQ ID NO: 38569 - DNA, 20 bp, Artificial Sequence
  Description of Artificial Sequence: Synthetic oligonucleotide
  Target: SCNA; (+) strand; PAM type: NRG; PAM sequence: CAG
agcccagaagtttgaggtta

SEQ ID NO: 38570 - DNA, 20 bp, Artificial Sequence
  Description of Artificial Sequence: Synthetic oligonucleotide
  Target: SCNA; (+) strand; PAM type: NRG; PAM sequence: GAG
cagaagtttgaggttacagt

SEQ ID NO: 38571 - DNA, 20 bp, Artificial Sequence
  Description of Artificial Sequence: Synthetic oligonucleotide
  Target: SCNA; (+) strand; PAM type: NRG; PAM sequence: CAG
atgataacaccactccattg

SEQ ID NO: 38572 - DNA, 20 bp, Artificial Sequence
  Description of Artificial Sequence: Synthetic oligonucleotide
  Target: SCNA; (+) strand; PAM type: NRG; PAM sequence: TGG
aacaccactccattgcagcc

SEQ ID NO: 38573 - DNA, 20 bp, Artificial Sequence
  Description of Artificial Sequence: Synthetic oligonucleotide
  Target: SCNA; (+) strand; PAM type: NRG; PAM sequence: GGG
acaccactccattgcagcct

SEQ ID NO: 38574 - DNA, 20 bp, Artificial Sequence
  Description of Artificial Sequence: Synthetic oligonucleotide
  Target: SCNA; (+) strand; PAM type: NRG; PAM sequence: CAG
ctccattgcagcctgggtga

SEQ ID NO: 38575 - DNA, 20 bp, Artificial Sequence
  Description of Artificial Sequence: Synthetic oligonucleotide
  Target: SCNA; (+) strand; PAM type: NRG; PAM sequence: AAG
attgcagcctgggtgacagc

SEQ ID NO: 38576 - DNA, 20 bp, Artificial Sequence
  Description of Artificial Sequence: Synthetic oligonucleotide
  Target: SCNA; (+) strand; PAM type: NRG; PAM sequence: AAG
gcaagaccctgtctccaaaa

SEQ ID NO: 38577 - DNA, 20 bp, Artificial Sequence
  Description of Artificial Sequence: Synthetic oligonucleotide
  Target: SCNA; (+) strand; PAM type: NRG; PAM sequence: AAG
ctgtctccaaaaaagaaaaa

SEQ ID NO: 38578 - DNA, 20 bp, Artificial Sequence
  Description of Artificial Sequence: Synthetic oligonucleotide
  Target: SCNA; (+) strand; PAM type: NRG; PAM sequence: TAG
agaaaaaaagaaaaacataa

SEQ ID NO: 38579 - DNA, 20 bp, Artificial Sequence
  Description of Artificial Sequence: Synthetic oligonucleotide
  Target: SCNA; (+) strand; PAM type: NRG; PAM sequence: AAG
aaacataatagccacaacta

SEQ ID NO: 38580 - DNA, 20 bp, Artificial Sequence
  Description of Artificial Sequence: Synthetic oligonucleotide
  Target: SCNA; (+) strand; PAM type: NRG; PAM sequence: TAG
acaactaaagtgtctactga

SEQ ID NO: 38581 - DNA, 20 bp, Artificial Sequence
  Description of Artificial Sequence: Synthetic oligonucleotide
  Target: SCNA; (+) strand; PAM type: NRG; PAM sequence: TAG
ctaaagtgtctactgataga

SEQ ID NO: 38582 - DNA, 20 bp, Artificial Sequence
  Description of Artificial Sequence: Synthetic oligonucleotide
  Target: SCNA; (+) strand; PAM type: NRG; PAM sequence: AGG
taaagtgtctactgatagat

SEQ ID NO: 38583 - DNA, 20 bp, Artificial Sequence
  Description of Artificial Sequence: Synthetic oligonucleotide
  Target: SCNA; (+) strand; PAM type: NRG; PAM sequence: TAG
agtgtctactgatagatagg

SEQ ID NO: 38584 - DNA, 20 bp, Artificial Sequence
  Description of Artificial Sequence: Synthetic oligonucleotide
  Target: SCNA; (+) strand; PAM type: NRG; PAM sequence: AAG
ctgatagataggtagataaa

SEQ ID NO: 38585 - DNA, 20 bp, Artificial Sequence
  Description of Artificial Sequence: Synthetic oligonucleotide
  Target: SCNA; (+) strand; PAM type: NRG; PAM sequence: TGG
ataggtagataaaaagattg

SEQ ID NO: 38586 - DNA, 20 bp, Artificial Sequence
  Description of Artificial Sequence: Synthetic oligonucleotide
  Target: SCNA; (+) strand; PAM type: NRG; PAM sequence: TAG
gataaaaagattgtggtaca

SEQ ID NO: 38587 - DNA, 20 bp, Artificial Sequence
  Description of Artificial Sequence: Synthetic oligonucleotide
  Target: SCNA; (+) strand; PAM type: NRG; PAM sequence: TGG
attgtggtacatagatacaa

SEQ ID NO: 38588 - DNA, 20 bp, Artificial Sequence
  Description of Artificial Sequence: Synthetic oligonucleotide
  Target: SCNA; (+) strand; PAM type: NRG; PAM sequence: CAG
acatagatacaatggaatat

SEQ ID NO: 38589 - DNA, 20 bp, Artificial Sequence
  Description of Artificial Sequence: Synthetic oligonucleotide
  Target: SCNA; (+) strand; PAM type: NRG; PAM sequence: CAG
agatacaatggaatatcagt

SEQ ID NO: 38590 - DNA, 20 bp, Artificial Sequence
  Description of Artificial Sequence: Synthetic oligonucleotide
  Target: SCNA; (+) strand; PAM type: NRG; PAM sequence: AAG
tcagtcagccctaaaaaaac

SEQ ID NO: 38591 - DNA, 20 bp, Artificial Sequence
  Description of Artificial Sequence: Synthetic oligonucleotide
  Target: SCNA; (+) strand; PAM type: NRG; PAM sequence: TGG
agatcctaccatttacaaca

SEQ ID NO: 38592 - DNA, 20 bp, Artificial Sequence
  Description of Artificial Sequence: Synthetic oligonucleotide
  Target: SCNA; (+) strand; PAM type: NRG; PAM sequence: CAG
atttacaacatggatgaacc

SEQ ID NO: 38593 - DNA, 20 bp, Artificial Sequence
  Description of Artificial Sequence: Synthetic oligonucleotide
  Target: SCNA; (+) strand; PAM type: NRG; PAM sequence: AAG
aacccagacaaaattatgct

SEQ ID NO: 38594 - DNA, 20 bp, Artificial Sequence
  Description of Artificial Sequence: Synthetic oligonucleotide
  Target: SCNA; (+) strand; PAM type: NRG; PAM sequence: AAG
aaaattatgctaagtgaaat

SEQ ID NO: 38595 - DNA, 20 bp, Artificial Sequence
  Description of Artificial Sequence: Synthetic oligonucleotide
  Target: SCNA; (+) strand; PAM type: NRG; PAM sequence: CAG
taagtgaaataagccaaaca

SEQ ID NO: 38596 - DNA, 20 bp, Artificial Sequence
  Description of Artificial Sequence: Synthetic oligonucleotide
  Target: SCNA; (+) strand; PAM type: NRG; PAM sequence: AAG
tgaaataagccaaacacaga

SEQ ID NO: 38597 - DNA, 20 bp, Artificial Sequence
  Description of Artificial Sequence: Synthetic oligonucleotide
  Target: SCNA; (+) strand; PAM type: NRG; PAM sequence: TGG
tacattatctcacatatatg

SEQ ID NO: 38598 - DNA, 20 bp, Artificial Sequence
  Description of Artificial Sequence: Synthetic oligonucleotide
  Target: SCNA; (+) strand; PAM type: NRG; PAM sequence: AAG
attatctcacatatatgtgg

SEQ ID NO: 38599 - DNA, 20 bp, Artificial Sequence
  Description of Artificial Sequence: Synthetic oligonucleotide
  Target: SCNA; (+) strand; PAM type: NRG; PAM sequence: CAG
tgaaacaaaattcaaatata

SEQ ID NO: 38600 - DNA, 20 bp, Artificial Sequence
  Description of Artificial Sequence: Synthetic oligonucleotide
  Target: SCNA; (+) strand; PAM type: NRG; PAM sequence: GAG
aaacaaaattcaaatataca

SEQ ID NO: 38601 - DNA, 20 bp, Artificial Sequence
  Description of Artificial Sequence: Synthetic oligonucleotide
  Target: SCNA; (+) strand; PAM type: NRG; PAM sequence: CAG
tacagagactacgtaaaaaa

SEQ ID NO: 38602 - DNA, 20 bp, Artificial Sequence
  Description of Artificial Sequence: Synthetic oligonucleotide
  Target: SCNA; (+) strand; PAM type: NRG; PAM sequence: AGG
acagagactacgtaaaaaac

SEQ ID NO: 38603 - DNA, 20 bp, Artificial Sequence
  Description of Artificial Sequence: Synthetic oligonucleotide
  Target: SCNA; (+) strand; PAM type: NRG; PAM sequence: GGG
cagagactacgtaaaaaaca

SEQ ID NO: 38604 - DNA, 20 bp, Artificial Sequence
  Description of Artificial Sequence: Synthetic oligonucleotide
  Target: SCNA; (+) strand; PAM type: NRG; PAM sequence: TAG
tacgtaaaaaacagggttaa

SEQ ID NO: 38605 - DNA, 20 bp, Artificial Sequence
  Description of Artificial Sequence: Synthetic oligonucleotide
  Target: SCNA; (+) strand; PAM type: NRG; PAM sequence: AGG
acgtaaaaaacagggttaat

SEQ ID NO: 38606 - DNA, 20 bp, Artificial Sequence
  Description of Artificial Sequence: Synthetic oligonucleotide
  Target: SCNA; (+) strand; PAM type: NRG; PAM sequence: GGG
cgtaaaaaacagggttaata

SEQ ID NO: 38607 - DNA, 20 bp, Artificial Sequence
  Description of Artificial Sequence: Synthetic oligonucleotide
  Target: SCNA; (+) strand; PAM type: NRG; PAM sequence: GGG
gtaaaaaacagggttaatag

SEQ ID NO: 38608 - DNA, 20 bp, Artificial Sequence
  Description of Artificial Sequence: Synthetic oligonucleotide
  Target: SCNA; (+) strand; PAM type: NRG; PAM sequence: TGG
aaaaacagggttaatagggg

SEQ ID NO: 38609 - DNA, 20 bp, Artificial Sequence
  Description of Artificial Sequence: Synthetic oligonucleotide
  Target: SCNA; (+) strand; PAM type: NRG; PAM sequence: AAG
cagggttaataggggtggaa

SEQ ID NO: 38610 - DNA, 20 bp, Artificial Sequence
  Description of Artificial Sequence: Synthetic oligonucleotide
  Target: SCNA; (+) strand; PAM type: NRG; PAM sequence: TAG
ggttaataggggtggaaaag

SEQ ID NO: 38611 - DNA, 20 bp, Artificial Sequence
  Description of Artificial Sequence: Synthetic oligonucleotide
  Target: SCNA; (+) strand; PAM type: NRG; PAM sequence: AGG
gttaataggggtggaaaagt

SEQ ID NO: 38612 - DNA, 20 bp, Artificial Sequence
  Description of Artificial Sequence: Synthetic oligonucleotide
  Target: SCNA; (+) strand; PAM type: NRG; PAM sequence: TAG
aataggggtggaaaagtagg

SEQ ID NO: 38613 - DNA, 20 bp, Artificial Sequence
  Description of Artificial Sequence: Synthetic oligonucleotide
  Target: SCNA; (+) strand; PAM type: NRG; PAM sequence: TAG
gtggaaaagtaggtagaaaa

SEQ ID NO: 38614 - DNA, 20 bp, Artificial Sequence
  Description of Artificial Sequence: Synthetic oligonucleotide
  Target: SCNA; (+) strand; PAM type: NRG; PAM sequence: AGG
tggaaaagtaggtagaaaat

SEQ ID NO: 38615 - DNA, 20 bp, Artificial Sequence
  Description of Artificial Sequence: Synthetic oligonucleotide
  Target: SCNA; (+) strand; PAM type: NRG; PAM sequence: GGG
ggaaaagtaggtagaaaata

SEQ ID NO: 38616 - DNA, 20 bp, Artificial Sequence
  Description of Artificial Sequence: Synthetic oligonucleotide
  Target: SCNA; (+) strand; PAM type: NRG; PAM sequence: TAG
aggtagaaaatagggacata

SEQ ID NO: 38617 - DNA, 20 bp, Artificial Sequence
  Description of Artificial Sequence: Synthetic oligonucleotide
  Target: SCNA; (+) strand; PAM type: NRG; PAM sequence: AGG
ggtagaaaatagggacatat

SEQ ID NO: 38618 - DNA, 20 bp, Artificial Sequence
  Description of Artificial Sequence: Synthetic oligonucleotide
  Target: SCNA; (+) strand; PAM type: NRG; PAM sequence: TAG
aaatagggacatataggcca

SEQ ID NO: 38619 - DNA, 20 bp, Artificial Sequence
  Description of Artificial Sequence: Synthetic oligonucleotide
  Target: SCNA; (+) strand; PAM type: NRG; PAM sequence: AGG
aatagggacatataggccat

SEQ ID NO: 38620 - DNA, 20 bp, Artificial Sequence
  Description of Artificial Sequence: Synthetic oligonucleotide
  Target: SCNA; (+) strand; PAM type: NRG; PAM sequence: AAG
acatataggccataggatcc

SEQ ID NO: 38621 - DNA, 20 bp, Artificial Sequence
  Description of Artificial Sequence: Synthetic oligonucleotide
  Target: SCNA; (+) strand; PAM type: NRG; PAM sequence: AAG
ataggccataggatccaagc

SEQ ID NO: 38622 - DNA, 20 bp, Artificial Sequence
  Description of Artificial Sequence: Synthetic oligonucleotide
  Target: SCNA; (+) strand; PAM type: NRG; PAM sequence: TAG
ggccataggatccaagcaag

SEQ ID NO: 38623 - DNA, 20 bp, Artificial Sequence
  Description of Artificial Sequence: Synthetic oligonucleotide
  Target: SCNA; (+) strand; PAM type: NRG; PAM sequence: CAG
cataggatccaagcaagtag

SEQ ID NO: 38624 - DNA, 20 bp, Artificial Sequence
  Description of Artificial Sequence: Synthetic oligonucleotide
  Target: SCNA; (+) strand; PAM type: NRG; PAM sequence: AAG
caagcaagtagcagatgtgt

SEQ ID NO: 38625 - DNA, 20 bp, Artificial Sequence
  Description of Artificial Sequence: Synthetic oligonucleotide
  Target: SCNA; (+) strand; PAM type: NRG; PAM sequence: AAG
agcagatgtgtaagatgaaa

SEQ ID NO: 38626 - DNA, 20 bp, Artificial Sequence
  Description of Artificial Sequence: Synthetic oligonucleotide
  Target: SCNA; (+) strand; PAM type: NRG; PAM sequence: CAG
gtgtaagatgaaaaagtgta

SEQ ID NO: 38627 - DNA, 20 bp, Artificial Sequence
  Description of Artificial Sequence: Synthetic oligonucleotide
  Target: SCNA; (+) strand; PAM type: NRG; PAM sequence: GAG
agtgtacagatctaatgtat

SEQ ID NO: 38628 - DNA, 20 bp, Artificial Sequence
  Description of Artificial Sequence: Synthetic oligonucleotide
  Target: SCNA; (+) strand; PAM type: NRG; PAM sequence: AGG
gtgtacagatctaatgtatg

SEQ ID NO: 38629 - DNA, 20 bp, Artificial Sequence
  Description of Artificial Sequence: Synthetic oligonucleotide
  Target: SCNA; (+) strand; PAM type: NRG; PAM sequence: TAG
gatctaatgtatgaggactg

SEQ ID NO: 38630 - DNA, 20 bp, Artificial Sequence
  Description of Artificial Sequence: Synthetic oligonucleotide
  Target: SCNA; (+) strand; PAM type: NRG; PAM sequence: AGG
atctaatgtatgaggactgt

SEQ ID NO: 38631 - DNA, 20 bp, Artificial Sequence
  Description of Artificial Sequence: Synthetic oligonucleotide
  Target: SCNA; (+) strand; PAM type: NRG; PAM sequence: GAG
gataaaattgtactatattt

SEQ ID NO: 38632 - DNA, 20 bp, Artificial Sequence
  Description of Artificial Sequence: Synthetic oligonucleotide
  Target: SCNA; (+) strand; PAM type: NRG; PAM sequence: AAG
atttgagattcatgataaat

SEQ ID NO: 38633 - DNA, 20 bp, Artificial Sequence
  Description of Artificial Sequence: Synthetic oligonucleotide
  Target: SCNA; (+) strand; PAM type: NRG; PAM sequence: TGG
tgagattcatgataaataag

SEQ ID NO: 38634 - DNA, 20 bp, Artificial Sequence
  Description of Artificial Sequence: Synthetic oligonucleotide
  Target: SCNA; (+) strand; PAM type: NRG; PAM sequence: TAG
catgataaataagtggattt

SEQ ID NO: 38635 - DNA, 20 bp, Artificial Sequence
  Description of Artificial Sequence: Synthetic oligonucleotide
  Target: SCNA; (+) strand; PAM type: NRG; PAM sequence: AAG
ttgccacaaaaacaacaaaa

SEQ ID NO: 38636 - DNA, 20 bp, Artificial Sequence
  Description of Artificial Sequence: Synthetic oligonucleotide
  Target: SCNA; (+) strand; PAM type: NRG; PAM sequence: AGG
tgccacaaaaacaacaaaaa

SEQ ID NO: 38637 - DNA, 20 bp, Artificial Sequence
  Description of Artificial Sequence: Synthetic oligonucleotide
  Target: SCNA; (+) strand; PAM type: NRG; PAM sequence: GAG
acaacaaaaaaggtaactat

SEQ ID NO: 38638 - DNA, 20 bp, Artificial Sequence
  Description of Artificial Sequence: Synthetic oligonucleotide
  Target: SCNA; (+) strand; PAM type: NRG; PAM sequence: GAG
aacaaaaaaggtaactatga

SEQ ID NO: 38639 - DNA, 20 bp, Artificial Sequence
  Description of Artificial Sequence: Synthetic oligonucleotide
  Target: SCNA; (+) strand; PAM type: NRG; PAM sequence: TAG
tatattaatttgcttcaata

SEQ ID NO: 38640 - DNA, 20 bp, Artificial Sequence
  Description of Artificial Sequence: Synthetic oligonucleotide
  Target: SCNA; (+) strand; PAM type: NRG; PAM sequence: TAG
gcttcaatatagtaattttt

SEQ ID NO: 38641 - DNA, 20 bp, Artificial Sequence
  Description of Artificial Sequence: Synthetic oligonucleotide
  Target: SCNA; (+) strand; PAM type: NRG; PAM sequence: TAG
ttagtgtctaatgtatctga

SEQ ID NO: 38642 - DNA, 20 bp, Artificial Sequence
  Description of Artificial Sequence: Synthetic oligonucleotide
  Target: SCNA; (+) strand; PAM type: NRG; PAM sequence: AAG
aattaaatttatttttaaaa

SEQ ID NO: 38643 - DNA, 20 bp, Artificial Sequence
  Description of Artificial Sequence: Synthetic oligonucleotide
  Target: SCNA; (+) strand; PAM type: NRG; PAM sequence: TAG
tttttaaaaaagaatgccac

SEQ ID NO: 38644 - DNA, 20 bp, Artificial Sequence
  Description of Artificial Sequence: Synthetic oligonucleotide
  Target: SCNA; (+) strand; PAM type: NRG; PAM sequence: AGG
ttttaaaaaagaatgccact

SEQ ID NO: 38645 - DNA, 20 bp, Artificial Sequence
  Description of Artificial Sequence: Synthetic oligonucleotide
  Target: SCNA; (+) strand; PAM type: NRG; PAM sequence: CGG
aaaaaagaatgccactaggc

SEQ ID NO: 38646 - DNA, 20 bp, Artificial Sequence
  Description of Artificial Sequence: Synthetic oligonucleotide
  Target: SCNA; (+) strand; PAM type: NRG; PAM sequence: GGG
aaaaagaatgccactaggcc

SEQ ID NO: 38647 - DNA, 20 bp, Artificial Sequence
  Description of Artificial Sequence: Synthetic oligonucleotide
  Target: SCNA; (+) strand; PAM type: NRG; PAM sequence: TGG
tgccactaggccgggtgcaa

SEQ ID NO: 38648 - DNA, 20 bp, Artificial Sequence
  Description of Artificial Sequence: Synthetic oligonucleotide
  Target: SCNA; (+) strand; PAM type: NRG; PAM sequence: CAG
atggctcacgcctgtaatcc

SEQ ID NO: 38649 - DNA, 20 bp, Artificial Sequence
  Description of Artificial Sequence: Synthetic oligonucleotide
  Target: SCNA; (+) strand; PAM type: NRG; PAM sequence: TGG
cgcctgtaatcccagcattt

SEQ ID NO: 38650 - DNA, 20 bp, Artificial Sequence
  Description of Artificial Sequence: Synthetic oligonucleotide
  Target: SCNA; (+) strand; PAM type: NRG; PAM sequence: GGG
gcctgtaatcccagcatttt

SEQ ID NO: 38651 - DNA, 20 bp, Artificial Sequence
  Description of Artificial Sequence: Synthetic oligonucleotide
  Target: SCNA; (+) strand; PAM type: NRG; PAM sequence: GAG
ctgtaatcccagcattttgg

SEQ ID NO: 38652 - DNA, 20 bp, Artificial Sequence
  Description of Artificial Sequence: Synthetic oligonucleotide
  Target: SCNA; (+) strand; PAM type: NRG; PAM sequence: AGG
tgtaatcccagcattttggg

SEQ ID NO: 38653 - DNA, 20 bp, Artificial Sequence
  Description of Artificial Sequence: Synthetic oligonucleotide
  Target: SCNA; (+) strand; PAM type: NRG; PAM sequence: GAG
tcccagcattttgggaggcc

SEQ ID NO: 38654 - DNA, 20 bp, Artificial Sequence
  Description of Artificial Sequence: Synthetic oligonucleotide
  Target: SCNA; (+) strand; PAM type: NRG; PAM sequence: AGG
cccagcattttgggaggccg

SEQ ID NO: 38655 - DNA, 20 bp, Artificial Sequence
  Description of Artificial Sequence: Synthetic oligonucleotide
  Target: SCNA; (+) strand; PAM type: NRG; PAM sequence: CGG
gcattttgggaggccgaggt

SEQ ID NO: 38656 - DNA, 20 bp, Artificial Sequence
  Description of Artificial Sequence: Synthetic oligonucleotide
  Target: SCNA; (+) strand; PAM type: NRG; PAM sequence: GGG
cattttgggaggccgaggtc

SEQ ID NO: 38657 - DNA, 20 bp, Artificial Sequence
  Description of Artificial Sequence: Synthetic oligonucleotide
  Target: SCNA; (+) strand; PAM type: NRG; PAM sequence: GGG
attttgggaggccgaggtcg

SEQ ID NO: 38658 - DNA, 20 bp, Artificial Sequence
  Description of Artificial Sequence: Synthetic oligonucleotide
  Target: SCNA; (+) strand; PAM type: NRG; PAM sequence: GAG
aggccgaggtcggggatgat

SEQ ID NO: 38659 - DNA, 20 bp, Artificial Sequence
  Description of Artificial Sequence: Synthetic oligonucleotide
  Target: SCNA; (+) strand; PAM type: NRG; PAM sequence: CAG
gaggtcggggatgatgagat

SEQ ID NO: 38660 - DNA, 20 bp, Artificial Sequence
  Description of Artificial Sequence: Synthetic oligonucleotide
  Target: SCNA; (+) strand; PAM type: NRG; PAM sequence: AGG
aggtcggggatgatgagatc

SEQ ID NO: 38661 - DNA, 20 bp, Artificial Sequence
  Description of Artificial Sequence: Synthetic oligonucleotide
  Target: SCNA; (+) strand; PAM type: NRG; PAM sequence: GAG
gtcggggatgatgagatcag

SEQ ID NO: 38662 - DNA, 20 bp, Artificial Sequence
  Description of Artificial Sequence: Synthetic oligonucleotide
  Target: SCNA; (+) strand; PAM type: NRG; PAM sequence: GAG
gatgatgagatcaggagttc

SEQ ID NO: 38663 - DNA, 20 bp, Artificial Sequence
  Description of Artificial Sequence: Synthetic oligonucleotide
  Target: SCNA; (+) strand; PAM type: NRG; PAM sequence: TGG
tcaggagttcgagaccatcc

SEQ ID NO: 38664 - DNA, 20 bp, Artificial Sequence
  Description of Artificial Sequence: Synthetic oligonucleotide
  Target: SCNA; (+) strand; PAM type: NRG; PAM sequence: TGG
cgagaccatcctggctaaca

SEQ ID NO: 38665 - DNA, 20 bp, Artificial Sequence
  Description of Artificial Sequence: Synthetic oligonucleotide
  Target: SCNA; (+) strand; PAM type: NRG; PAM sequence: TAG
tctactaaaaatacaaaaat

SEQ ID NO: 38666 - DNA, 20 bp, Artificial Sequence
  Description of Artificial Sequence: Synthetic oligonucleotide
  Target: SCNA; (+) strand; PAM type: NRG; PAM sequence: CGG
ctaaaaatacaaaaattagc

SEQ ID NO: 38667 - DNA, 20 bp, Artificial Sequence
  Description of Artificial Sequence: Synthetic oligonucleotide
  Target: SCNA; (+) strand; PAM type: NRG; PAM sequence: GGG
taaaaatacaaaaattagcc

SEQ ID NO: 38668 - DNA, 20 bp, Artificial Sequence
  Description of Artificial Sequence: Synthetic oligonucleotide
  Target: SCNA; (+) strand; PAM type: NRG; PAM sequence: TGG
atacaaaaattagccgggca

SEQ ID NO: 38669 - DNA, 20 bp, Artificial Sequence
  Description of Artificial Sequence: Synthetic oligonucleotide
  Target: SCNA; (+) strand; PAM type: NRG; PAM sequence: TGG
caaaaattagccgggcatgg

SEQ ID NO: 38670 - DNA, 20 bp, Artificial Sequence
  Description of Artificial Sequence: Synthetic oligonucleotide
  Target: SCNA; (+) strand; PAM type: NRG; PAM sequence: CAG
gtggtgcatgcctgtaattt

SEQ ID NO: 38671 - DNA, 20 bp, Artificial Sequence
  Description of Artificial Sequence: Synthetic oligonucleotide
  Target: SCNA; (+) strand; PAM type: NRG; PAM sequence: CAG
tgcctgtaatttcagctact

SEQ ID NO: 38672 - DNA, 20 bp, Artificial Sequence
  Description of Artificial Sequence: Synthetic oligonucleotide
  Target: SCNA; (+) strand; PAM type: NRG; PAM sequence: AGG
gcctgtaatttcagctactc

SEQ ID NO: 38673 - DNA, 20 bp, Artificial Sequence
  Description of Artificial Sequence: Synthetic oligonucleotide
  Target: SCNA; (+) strand; PAM type: NRG; PAM sequence: GAG
ctgtaatttcagctactcag

SEQ ID NO: 38674 - DNA, 20 bp, Artificial Sequence
  Description of Artificial Sequence: Synthetic oligonucleotide
  Target: SCNA; (+) strand; PAM type: NRG; PAM sequence: AGG
tgtaatttcagctactcagg

SEQ ID NO: 38675 - DNA, 20 bp, Artificial Sequence
  Description of Artificial Sequence: Synthetic oligonucleotide
  Target: SCNA; (+) strand; PAM type: NRG; PAM sequence: GAG
tttcagctactcaggaggct

SEQ ID NO: 38676 - DNA, 20 bp, Artificial Sequence
  Description of Artificial Sequence: Synthetic oligonucleotide
  Target: SCNA; (+) strand; PAM type: NRG; PAM sequence: CAG
agctactcaggaggctgagt

SEQ ID NO: 38677 - DNA, 20 bp, Artificial Sequence
  Description of Artificial Sequence: Synthetic oligonucleotide
  Target: SCNA; (+) strand; PAM type: NRG; PAM sequence: AGG
gctactcaggaggctgagtc

SEQ ID NO: 38678 - DNA, 20 bp, Artificial Sequence
  Description of Artificial Sequence: Synthetic oligonucleotide
  Target: SCNA; (+) strand; PAM type: NRG; PAM sequence: GAG
tactcaggaggctgagtcag

SEQ ID NO: 38679 - DNA, 20 bp, Artificial Sequence
  Description of Artificial Sequence: Synthetic oligonucleotide
  Target: SCNA; (+) strand; PAM type: NRG; PAM sequence: CAG
tcaggagaataacttgaacc

SEQ ID NO: 38680 - DNA, 20 bp, Artificial Sequence
  Description of Artificial Sequence: Synthetic oligonucleotide
  Target: SCNA; (+) strand; PAM type: NRG; PAM sequence: AGG
caggagaataacttgaaccc

SEQ ID NO: 38681 - DNA, 20 bp, Artificial Sequence
  Description of Artificial Sequence: Synthetic oligonucleotide
  Target: SCNA; (+) strand; PAM type: NRG; PAM sequence: GAG
ggagaataacttgaacccag

SEQ ID NO: 38682 - DNA, 20 bp, Artificial Sequence
  Description of Artificial Sequence: Synthetic oligonucleotide
  Target: SCNA; (+) strand; PAM type: NRG; PAM sequence: AGG
gagaataacttgaacccagg

SEQ ID NO: 38683 - DNA, 20 bp, Artificial Sequence
  Description of Artificial Sequence: Synthetic oligonucleotide
  Target: SCNA; (+) strand; PAM type: NRG; PAM sequence: CGG
aataacttgaacccaggagg

SEQ ID NO: 38684 - DNA, 20 bp, Artificial Sequence
  Description of Artificial Sequence: Synthetic oligonucleotide
  Target: SCNA; (+) strand; PAM type: NRG; PAM sequence: GAG
taacttgaacccaggaggcg

SEQ ID NO: 38685 - DNA, 20 bp, Artificial Sequence
  Description of Artificial Sequence: Synthetic oligonucleotide
  Target: SCNA; (+) strand; PAM type: NRG; PAM sequence: AGG
aacttgaacccaggaggcgg

SEQ ID NO: 38686 - DNA, 20 bp, Artificial Sequence
  Description of Artificial Sequence: Synthetic oligonucleotide
  Target: SCNA; (+) strand; PAM type: NRG; PAM sequence: CAG
aacccaggaggcggaggttg

SEQ ID NO: 38687 - DNA, 20 bp, Artificial Sequence
  Description of Artificial Sequence: Synthetic oligonucleotide
  Target: SCNA; (+) strand; PAM type: NRG; PAM sequence: GAG
caggaggcggaggttgcagt

SEQ ID NO: 38688 - DNA, 20 bp, Artificial Sequence
  Description of Artificial Sequence: Synthetic oligonucleotide
  Target: SCNA; (+) strand; PAM type: NRG; PAM sequence: GAG
ggcggaggttgcagtgagcc

SEQ ID NO: 38689 - DNA, 20 bp, Artificial Sequence
  Description of Artificial Sequence: Synthetic oligonucleotide
  Target: SCNA; (+) strand; PAM type: NRG; PAM sequence: CAG
gagatcacaccactgcactt

SEQ ID NO: 38690 - DNA, 20 bp, Artificial Sequence
  Description of Artificial Sequence: Synthetic oligonucleotide
  Target: SCNA; (+) strand; PAM type: NRG; PAM sequence: TGG
cacaccactgcacttcagcc

SEQ ID NO: 38691 - DNA, 20 bp, Artificial Sequence
  Description of Artificial Sequence: Synthetic oligonucleotide
  Target: SCNA; (+) strand; PAM type: NRG; PAM sequence: GAG
caccactgcacttcagcctg

SEQ ID NO: 38692 - DNA, 20 bp, Artificial Sequence
  Description of Artificial Sequence: Synthetic oligonucleotide
  Target: SCNA; (+) strand; PAM type: NRG; PAM sequence: CAG
ttcagcctggagtgaaatga

SEQ ID NO: 38693 - DNA, 20 bp, Artificial Sequence
  Description of Artificial Sequence: Synthetic oligonucleotide
  Target: SCNA; (+) strand; PAM type: NRG; PAM sequence: GAG
ctggagtgaaatgacagatt

SEQ ID NO: 38694 - DNA, 20 bp, Artificial Sequence
  Description of Artificial Sequence: Synthetic oligonucleotide
  Target: SCNA; (+) strand; PAM type: NRG; PAM sequence: CAG
gacagattgagaccctatct

SEQ ID NO: 38695 - DNA, 20 bp, Artificial Sequence
  Description of Artificial Sequence: Synthetic oligonucleotide
  Target: SCNA; (+) strand; PAM type: NRG; PAM sequence: AAG
gagaccctatctcagaaaaa

SEQ ID NO: 38696 - DNA, 20 bp, Artificial Sequence
  Description of Artificial Sequence: Synthetic oligonucleotide
  Target: SCNA; (+) strand; PAM type: NRG; PAM sequence: AAG
tcagaaaaaaagaaaaaaaa

SEQ ID NO: 38697 - DNA, 20 bp, Artificial Sequence
  Description of Artificial Sequence: Synthetic oligonucleotide
  Target: SCNA; (+) strand; PAM type: NRG; PAM sequence: TAG
atgccactaaaccacaccat

SEQ ID NO: 38698 - DNA, 20 bp, Artificial Sequence
  Description of Artificial Sequence: Synthetic oligonucleotide
  Target: SCNA; (+) strand; PAM type: NRG; PAM sequence: TAG
caacatattttatatttttg

SEQ ID NO: 38699 - DNA, 20 bp, Artificial Sequence
  Description of Artificial Sequence: Synthetic oligonucleotide
  Target: SCNA; (+) strand; PAM type: NRG; PAM sequence: AAG
atttttgtagtgcaacccca

SEQ ID NO: 38700 - DNA, 20 bp, Artificial Sequence
  Description of Artificial Sequence: Synthetic oligonucleotide
  Target: SCNA; (+) strand; PAM type: NRG; PAM sequence: GAG
ttttgtagtgcaaccccaaa

SEQ ID NO: 38701 - DNA, 20 bp, Artificial Sequence
  Description of Artificial Sequence: Synthetic oligonucleotide
  Target: SCNA; (+) strand; PAM type: NRG; PAM sequence: TAG
gtagtgcaaccccaaagaga

SEQ ID NO: 38702 - DNA, 20 bp, Artificial Sequence
  Description of Artificial Sequence: Synthetic oligonucleotide
  Target: SCNA; (+) strand; PAM type: NRG; PAM sequence: AGG
tagtgcaaccccaaagagat

SEQ ID NO: 38703 - DNA, 20 bp, Artificial Sequence
  Description of Artificial Sequence: Synthetic oligonucleotide
  Target: SCNA; (+) strand; PAM type: NRG; PAM sequence: GAG
ggtatataacttaaaaaaac

SEQ ID NO: 38704 - DNA, 20 bp, Artificial Sequence
  Description of Artificial Sequence: Synthetic oligonucleotide
  Target: SCNA; (+) strand; PAM type: NRG; PAM sequence: GAG
cttaaaaaaacgagataaat

SEQ ID NO: 38705 - DNA, 20 bp, Artificial Sequence
  Description of Artificial Sequence: Synthetic oligonucleotide
  Target: SCNA; (+) strand; PAM type: NRG; PAM sequence: GAG
taaaaaaacgagataaatga

SEQ ID NO: 38706 - DNA, 20 bp, Artificial Sequence
  Description of Artificial Sequence: Synthetic oligonucleotide
  Target: SCNA; (+) strand; PAM type: NRG; PAM sequence: AAG
agataaatgagagtcctcat

SEQ ID NO: 38707 - DNA, 20 bp, Artificial Sequence
  Description of Artificial Sequence: Synthetic oligonucleotide
  Target: SCNA; (+) strand; PAM type: NRG; PAM sequence: AGG
gataaatgagagtcctcata

SEQ ID NO: 38708 - DNA, 20 bp, Artificial Sequence
  Description of Artificial Sequence: Synthetic oligonucleotide
  Target: SCNA; (+) strand; PAM type: NRG; PAM sequence: CAG
ttaccatgtatcaaaccaat

SEQ ID NO: 38709 - DNA, 20 bp, Artificial Sequence
  Description of Artificial Sequence: Synthetic oligonucleotide
  Target: SCNA; (+) strand; PAM type: NRG; PAM sequence: GAG
aaaccaatcagttgttcttt

SEQ ID NO: 38710 - DNA, 20 bp, Artificial Sequence
  Description of Artificial Sequence: Synthetic oligonucleotide
  Target: SCNA; (+) strand; PAM type: NRG; PAM sequence: AGG
aaccaatcagttgttctttg

SEQ ID NO: 38711 - DNA, 20 bp, Artificial Sequence
  Description of Artificial Sequence: Synthetic oligonucleotide
  Target: SCNA; (+) strand; PAM type: NRG; PAM sequence: TGG
tactaataatctgtaattga

SEQ ID NO: 38712 - DNA, 20 bp, Artificial Sequence
  Description of Artificial Sequence: Synthetic oligonucleotide
  Target: SCNA; (+) strand; PAM type: NRG; PAM sequence: TAG
aataatctgtaattgatggt

SEQ ID NO: 38713 - DNA, 20 bp, Artificial Sequence
  Description of Artificial Sequence: Synthetic oligonucleotide
  Target: SCNA; (+) strand; PAM type: NRG; PAM sequence: GAG
atggttagcctttaatttat

SEQ ID NO: 38714 - DNA, 20 bp, Artificial Sequence
  Description of Artificial Sequence: Synthetic oligonucleotide
  Target: SCNA; (+) strand; PAM type: NRG; PAM sequence: TAG
gataacgtacacctacaaaa

SEQ ID NO: 38715 - DNA, 20 bp, Artificial Sequence
  Description of Artificial Sequence: Synthetic oligonucleotide
  Target: SCNA; (+) strand; PAM type: NRG; PAM sequence: AGG
ataacgtacacctacaaaat

SEQ ID NO: 38716 - DNA, 20 bp, Artificial Sequence
  Description of Artificial Sequence: Synthetic oligonucleotide
  Target: SCNA; (+) strand; PAM type: NRG; PAM sequence: AAG
acacctacaaaataggtgcc

SEQ ID NO: 38717 - DNA, 20 bp, Artificial Sequence
  Description of Artificial Sequence: Synthetic oligonucleotide
  Target: SCNA; (+) strand; PAM type: NRG; PAM sequence: TGG
cctacaaaataggtgccaag

SEQ ID NO: 38718 - DNA, 20 bp, Artificial Sequence
  Description of Artificial Sequence: Synthetic oligonucleotide
  Target: SCNA; (+) strand; PAM type: NRG; PAM sequence: TAG
gtgccaagtggttatgtgac

SEQ ID NO: 38719 - DNA, 20 bp, Artificial Sequence
  Description of Artificial Sequence: Synthetic oligonucleotide
  Target: SCNA; (+) strand; PAM type: NRG; PAM sequence: AAG
caagtggttatgtgactagc

SEQ ID NO: 38720 - DNA, 20 bp, Artificial Sequence
  Description of Artificial Sequence: Synthetic oligonucleotide
  Target: SCNA; (+) strand; PAM type: NRG; PAM sequence: AGG
aagtggttatgtgactagca

SEQ ID NO: 38721 - DNA, 20 bp, Artificial Sequence
  Description of Artificial Sequence: Synthetic oligonucleotide
  Target: SCNA; (+) strand; PAM type: NRG; PAM sequence: TAG
ctagcaaggtataaatgctg

SEQ ID NO: 38722 - DNA, 20 bp, Artificial Sequence
  Description of Artificial Sequence: Synthetic oligonucleotide
  Target: SCNA; (+) strand; PAM type: NRG; PAM sequence: AGG
tagcaaggtataaatgctgt

SEQ ID NO: 38723 - DNA, 20 bp, Artificial Sequence
  Description of Artificial Sequence: Synthetic oligonucleotide
  Target: SCNA; (+) strand; PAM type: NRG; PAM sequence: GGG
agcaaggtataaatgctgta

SEQ ID NO: 38724 - DNA, 20 bp, Artificial Sequence
  Description of Artificial Sequence: Synthetic oligonucleotide
  Target: SCNA; (+) strand; PAM type: NRG; PAM sequence: CAG
tataaatgctgtagggacac

SEQ ID NO: 38725 - DNA, 20 bp, Artificial Sequence
  Description of Artificial Sequence: Synthetic oligonucleotide
  Target: SCNA; (+) strand; PAM type: NRG; PAM sequence: GAG
taaatgctgtagggacacca

SEQ ID NO: 38726 - DNA, 20 bp, Artificial Sequence
  Description of Artificial Sequence: Synthetic oligonucleotide
  Target: SCNA; (+) strand; PAM type: NRG; PAM sequence: TGG
tgtagggacaccagagctga

SEQ ID NO: 38727 - DNA, 20 bp, Artificial Sequence
  Description of Artificial Sequence: Synthetic oligonucleotide
  Target: SCNA; (+) strand; PAM type: NRG; PAM sequence: GAG
ccagagctgatggcttccct

SEQ ID NO: 38728 - DNA, 20 bp, Artificial Sequence
  Description of Artificial Sequence: Synthetic oligonucleotide
  Target: SCNA; (+) strand; PAM type: NRG; PAM sequence: CGG
gagctgatggcttccctgag

SEQ ID NO: 38729 - DNA, 20 bp, Artificial Sequence
  Description of Artificial Sequence: Synthetic oligonucleotide
  Target: SCNA; (+) strand; PAM type: NRG; PAM sequence: GAG
gctgatggcttccctgagcg

SEQ ID NO: 38730 - DNA, 20 bp, Artificial Sequence
  Description of Artificial Sequence: Synthetic oligonucleotide
  Target: SCNA; (+) strand; PAM type: NRG; PAM sequence: AGG
ctgatggcttccctgagcgg

SEQ ID NO: 38731 - DNA, 20 bp, Artificial Sequence
  Description of Artificial Sequence: Synthetic oligonucleotide
  Target: SCNA; (+) strand; PAM type: NRG; PAM sequence: AAG
tcttgtcttcccaacctcaa

SEQ ID NO: 38732 - DNA, 20 bp, Artificial Sequence
  Description of Artificial Sequence: Synthetic oligonucleotide
  Target: SCNA; (+) strand; PAM type: NRG; PAM sequence: GAG
ttgtcttcccaacctcaaaa

SEQ ID NO: 38733 - DNA, 20 bp, Artificial Sequence
  Description of Artificial Sequence: Synthetic oligonucleotide
  Target: SCNA; (+) strand; PAM type: NRG; PAM sequence: CAG
ttcccaacctcaaaagagca

SEQ ID NO: 38734 - DNA, 20 bp, Artificial Sequence
  Description of Artificial Sequence: Synthetic oligonucleotide
  Target: SCNA; (+) strand; PAM type: NRG; PAM sequence: GAG
cccaacctcaaaagagcaca

SEQ ID NO: 38735 - DNA, 20 bp, Artificial Sequence
  Description of Artificial Sequence: Synthetic oligonucleotide
  Target: SCNA; (+) strand; PAM type: NRG; PAM sequence: TGG
aacctcaaaagagcacagag

SEQ ID NO: 38736 - DNA, 20 bp, Artificial Sequence
  Description of Artificial Sequence: Synthetic oligonucleotide
  Target: SCNA; (+) strand; PAM type: NRG; PAM sequence: GAG
cctcaaaagagcacagagtg

SEQ ID NO: 38737 - DNA, 20 bp, Artificial Sequence
  Description of Artificial Sequence: Synthetic oligonucleotide
  Target: SCNA; (+) strand; PAM type: NRG; PAM sequence: AAG
caaaagagcacagagtggag

SEQ ID NO: 38738 - DNA, 20 bp, Artificial Sequence
  Description of Artificial Sequence: Synthetic oligonucleotide
  Target: SCNA; (+) strand; PAM type: NRG; PAM sequence: AAG
aagagcacagagtggagaag

SEQ ID NO: 38739 - DNA, 20 bp, Artificial Sequence
  Description of Artificial Sequence: Synthetic oligonucleotide
  Target: SCNA; (+) strand; PAM type: NRG; PAM sequence: AGG
agagcacagagtggagaaga

SEQ ID NO: 38740 - DNA, 20 bp, Artificial Sequence
  Description of Artificial Sequence: Synthetic oligonucleotide
  Target: SCNA; (+) strand; PAM type: NRG; PAM sequence: CAG
cacagagtggagaagaaggt

SEQ ID NO: 38741 - DNA, 20 bp, Artificial Sequence
  Description of Artificial Sequence: Synthetic oligonucleotide
  Target: SCNA; (+) strand; PAM type: NRG; PAM sequence: AAG
agagtggagaagaaggtcag

SEQ ID NO: 38742 - DNA, 20 bp, Artificial Sequence
  Description of Artificial Sequence: Synthetic oligonucleotide
  Target: SCNA; (+) strand; PAM type: NRG; PAM sequence: GAG
gaaggtcagaagtaatacct

SEQ ID NO: 38743 - DNA, 20 bp, Artificial Sequence
  Description of Artificial Sequence: Synthetic oligonucleotide
  Target: SCNA; (+) strand; PAM type: NRG; PAM sequence: GAG
aggtcagaagtaatacctga

SEQ ID NO: 38744 - DNA, 20 bp, Artificial Sequence
  Description of Artificial Sequence: Synthetic oligonucleotide
  Target: SCNA; (+) strand; PAM type: NRG; PAM sequence: GAG
aagtaatacctgagagtttt

SEQ ID NO: 38745 - DNA, 20 bp, Artificial Sequence
  Description of Artificial Sequence: Synthetic oligonucleotide
  Target: SCNA; (+) strand; PAM type: NRG; PAM sequence: CAG
acctgagagttttgagaact

SEQ ID NO: 38746 - DNA, 20 bp, Artificial Sequence
  Description of Artificial Sequence: Synthetic oligonucleotide
  Target: SCNA; (+) strand; PAM type: NRG; PAM sequence: CAG
gcatgttatgttgactttgt

SEQ ID NO: 38747 - DNA, 20 bp, Artificial Sequence
  Description of Artificial Sequence: Synthetic oligonucleotide
  Target: SCNA; (+) strand; PAM type: NRG; PAM sequence: TAG
ttatgttgactttgtcagct

SEQ ID NO: 38748 - DNA, 20 bp, Artificial Sequence
  Description of Artificial Sequence: Synthetic oligonucleotide
  Target: SCNA; (+) strand; PAM type: NRG; PAM sequence: GAG
gttgactttgtcagcttagt

SEQ ID NO: 38749 - DNA, 20 bp, Artificial Sequence
  Description of Artificial Sequence: Synthetic oligonucleotide
  Target: SCNA; (+) strand; PAM type: NRG; PAM sequence: AGG
ttgactttgtcagcttagtg

SEQ ID NO: 38750 - DNA, 20 bp, Artificial Sequence
  Description of Artificial Sequence: Synthetic oligonucleotide
  Target: SCNA; (+) strand; PAM type: NRG; PAM sequence: AAG
tttgtcagcttagtgaggtg

SEQ ID NO: 38751 - DNA, 20 bp, Artificial Sequence
  Description of Artificial Sequence: Synthetic oligonucleotide
  Target: SCNA; (+) strand; PAM type: NRG; PAM sequence: GAG
ggtgaagcacattttgactt

SEQ ID NO: 38752 - DNA, 20 bp, Artificial Sequence
  Description of Artificial Sequence: Synthetic oligonucleotide
  Target: SCNA; (+) strand; PAM type: NRG; PAM sequence: TGG
tttgctatcaatttcactga

SEQ ID NO: 38753 - DNA, 20 bp, Artificial Sequence
  Description of Artificial Sequence: Synthetic oligonucleotide
  Target: SCNA; (+) strand; PAM type: NRG; PAM sequence: GAG
gatggccactgctgcttatt

SEQ ID NO: 38754 - DNA, 20 bp, Artificial Sequence
  Description of Artificial Sequence: Synthetic oligonucleotide
  Target: SCNA; (+) strand; PAM type: NRG; PAM sequence: CAG
ggccactgctgcttattgag

SEQ ID NO: 38755 - DNA, 20 bp, Artificial Sequence
  Description of Artificial Sequence: Synthetic oligonucleotide
  Target: SCNA; (+) strand; PAM type: NRG; PAM sequence: GAG
ccactgctgcttattgagca

SEQ ID NO: 38756 - DNA, 20 bp, Artificial Sequence
  Description of Artificial Sequence: Synthetic oligonucleotide
  Target: SCNA; (+) strand; PAM type: NRG; PAM sequence: TGG
ctgctgcttattgagcagag

SEQ ID NO: 38757 - DNA, 20 bp, Artificial Sequence
  Description of Artificial Sequence: Synthetic oligonucleotide
  Target: SCNA; (+) strand; PAM type: NRG; PAM sequence: TGG
cttattgagcagagtggcat

SEQ ID NO: 38758 - DNA, 20 bp, Artificial Sequence
  Description of Artificial Sequence: Synthetic oligonucleotide
  Target: SCNA; (+) strand; PAM type: NRG; PAM sequence: AAG
attgagcagagtggcattgg

SEQ ID NO: 38759 - DNA, 20 bp, Artificial Sequence
  Description of Artificial Sequence: Synthetic oligonucleotide
  Target: SCNA; (+) strand; PAM type: NRG; PAM sequence: AAG
gtggcattggaagacactca

SEQ ID NO: 38760 - DNA, 20 bp, Artificial Sequence
  Description of Artificial Sequence: Synthetic oligonucleotide
  Target: SCNA; (+) strand; PAM type: NRG; PAM sequence: GAG
tttattgcatttatattact

SEQ ID NO: 38761 - DNA, 20 bp, Artificial Sequence
  Description of Artificial Sequence: Synthetic oligonucleotide
  Target: SCNA; (+) strand; PAM type: NRG; PAM sequence: AAG
atattactgagcattatata

SEQ ID NO: 38762 - DNA, 20 bp, Artificial Sequence
  Description of Artificial Sequence: Synthetic oligonucleotide
  Target: SCNA; (+) strand; PAM type: NRG; PAM sequence: TGG
taattaaatctttctgcttt

SEQ ID NO: 38763 - DNA, 20 bp, Artificial Sequence
  Description of Artificial Sequence: Synthetic oligonucleotide
  Target: SCNA; (+) strand; PAM type: NRG; PAM sequence: TAG
aatctttctgcttttggatt

SEQ ID NO: 38764 - DNA, 20 bp, Artificial Sequence
  Description of Artificial Sequence: Synthetic oligonucleotide
  Target: SCNA; (+) strand; PAM type: NRG; PAM sequence: GAG
tttagatctaattaatttct

SEQ ID NO: 38765 - DNA, 20 bp, Artificial Sequence
  Description of Artificial Sequence: Synthetic oligonucleotide
  Target: SCNA; (+) strand; PAM type: NRG; PAM sequence: AAG
attaatttctgagtcatttg

SEQ ID NO: 38766 - DNA, 20 bp, Artificial Sequence
  Description of Artificial Sequence: Synthetic oligonucleotide
  Target: SCNA; (+) strand; PAM type: NRG; PAM sequence: AAG
aatttttgtctattaaattg

SEQ ID NO: 38767 - DNA, 20 bp, Artificial Sequence
  Description of Artificial Sequence: Synthetic oligonucleotide
  Target: SCNA; (+) strand; PAM type: NRG; PAM sequence: TGG
gaagtatgttgattgaaaat

SEQ ID NO: 38768 - DNA, 20 bp, Artificial Sequence
  Description of Artificial Sequence: Synthetic oligonucleotide
  Target: SCNA; (+) strand; PAM type: NRG; PAM sequence: CAG
tgattgaaaattggtgtacg

SEQ ID NO: 38769 - DNA, 20 bp, Artificial Sequence
  Description of Artificial Sequence: Synthetic oligonucleotide
  Target: SCNA; (+) strand; PAM type: NRG; PAM sequence: TGG
gtgtacgcagataacaaaaa

SEQ ID NO: 38770 - DNA, 20 bp, Artificial Sequence
  Description of Artificial Sequence: Synthetic oligonucleotide
  Target: SCNA; (+) strand; PAM type: NRG; PAM sequence: GAG
gtacgcagataacaaaaatg

SEQ ID NO: 38771 - DNA, 20 bp, Artificial Sequence
  Description of Artificial Sequence: Synthetic oligonucleotide
  Target: SCNA; (+) strand; PAM type: NRG; PAM sequence: AGG
tacgcagataacaaaaatgg

SEQ ID NO: 38772 - DNA, 20 bp, Artificial Sequence
  Description of Artificial Sequence: Synthetic oligonucleotide
  Target: SCNA; (+) strand; PAM type: NRG; PAM sequence: GGG
acgcagataacaaaaatgga

SEQ ID NO: 38773 - DNA, 20 bp, Artificial Sequence
  Description of Artificial Sequence: Synthetic oligonucleotide
  Target: SCNA; (+) strand; PAM type: NRG; PAM sequence: AAG
taaaaataacactgatcatt

SEQ ID NO: 38774 - DNA, 20 bp, Artificial Sequence
  Description of Artificial Sequence: Synthetic oligonucleotide
  Target: SCNA; (+) strand; PAM type: NRG; PAM sequence: AGG
aaaaataacactgatcatta

SEQ ID NO: 38775 - DNA, 20 bp, Artificial Sequence
  Description of Artificial Sequence: Synthetic oligonucleotide
  Target: SCNA; (+) strand; PAM type: NRG; PAM sequence: TAG
aataacactgatcattaagg

SEQ ID NO: 38776 - DNA, 20 bp, Artificial Sequence
  Description of Artificial Sequence: Synthetic oligonucleotide
  Target: SCNA; (+) strand; PAM type: NRG; PAM sequence: GAG
cattaaggtagttcttcaat

SEQ ID NO: 38777 - DNA, 20 bp, Artificial Sequence
  Description of Artificial Sequence: Synthetic oligonucleotide
  Target: SCNA; (+) strand; PAM type: NRG; PAM sequence: AAG
tagttcttcaatgagttaaa

SEQ ID NO: 38778 - DNA, 20 bp, Artificial Sequence
  Description of Artificial Sequence: Synthetic oligonucleotide
  Target: SCNA; (+) strand; PAM type: NRG; PAM sequence: TAG
ttcttcaatgagttaaaaag

SEQ ID NO: 38779 - DNA, 20 bp, Artificial Sequence
  Description of Artificial Sequence: Synthetic oligonucleotide
  Target: SCNA; (+) strand; PAM type: NRG; PAM sequence: AAG
agttaaaaagtagttgttaa

SEQ ID NO: 38780 - DNA, 20 bp, Artificial Sequence
  Description of Artificial Sequence: Synthetic oligonucleotide
  Target: SCNA; (+) strand; PAM type: NRG; PAM sequence: AAG
gttaaaagtatattcttata

SEQ ID NO: 38781 - DNA, 20 bp, Artificial Sequence
  Description of Artificial Sequence: Synthetic oligonucleotide
  Target: SCNA; (+) strand; PAM type: NRG; PAM sequence: AGG
ttaaaagtatattcttataa

SEQ ID NO: 38782 - DNA, 20 bp, Artificial Sequence
  Description of Artificial Sequence: Synthetic oligonucleotide
  Target: SCNA; (+) strand; PAM type: NRG; PAM sequence: GAG
gtatattcttataaaggaat

SEQ ID NO: 38783 - DNA, 20 bp, Artificial Sequence
  Description of Artificial Sequence: Synthetic oligonucleotide
  Target: SCNA; (+) strand; PAM type: NRG; PAM sequence: GAG
aatgagattacttttcttat

SEQ ID NO: 38784 - DNA, 20 bp, Artificial Sequence
  Description of Artificial Sequence: Synthetic oligonucleotide
  Target: SCNA; (+) strand; PAM type: NRG; PAM sequence: AGG
atgagattacttttcttatg

SEQ ID NO: 38785 - DNA, 20 bp, Artificial Sequence
  Description of Artificial Sequence: Synthetic oligonucleotide
  Target: SCNA; (+) strand; PAM type: NRG; PAM sequence: CAG
aggcttctaccaaacatctt

SEQ ID NO: 38786 - DNA, 20 bp, Artificial Sequence
  Description of Artificial Sequence: Synthetic oligonucleotide
  Target: SCNA; (+) strand; PAM type: NRG; PAM sequence: AAG
taccaaacatcttcagccat

SEQ ID NO: 38787 - DNA, 20 bp, Artificial Sequence
  Description of Artificial Sequence: Synthetic oligonucleotide
  Target: SCNA; (+) strand; PAM type: NRG; PAM sequence: TGG
ccataagtgaaattataaaa

SEQ ID NO: 38788 - DNA, 20 bp, Artificial Sequence
  Description of Artificial Sequence: Synthetic oligonucleotide
  Target: SCNA; (+) strand; PAM type: NRG; PAM sequence: TGG
tgaaattataaaatggtctt

SEQ ID NO: 38789 - DNA, 20 bp, Artificial Sequence
  Description of Artificial Sequence: Synthetic oligonucleotide
  Target: SCNA; (+) strand; PAM type: NRG; PAM sequence: TAG
tcgcctccaatctttcaaac

SEQ ID NO: 38790 - DNA, 20 bp, Artificial Sequence
  Description of Artificial Sequence: Synthetic oligonucleotide
  Target: SCNA; (+) strand; PAM type: NRG; PAM sequence: AAG
ttcaaactagttatgtaatg

SEQ ID NO: 38791 - DNA, 20 bp, Artificial Sequence
  Description of Artificial Sequence: Synthetic oligonucleotide
  Target: SCNA; (+) strand; PAM type: NRG; PAM sequence: AGG
tcaaactagttatgtaatga

SEQ ID NO: 38792 - DNA, 20 bp, Artificial Sequence
  Description of Artificial Sequence: Synthetic oligonucleotide
  Target: SCNA; (+) strand; PAM type: NRG; PAM sequence: AAG
agttatgtaatgaaggataa

SEQ ID NO: 38793 - DNA, 20 bp, Artificial Sequence
  Description of Artificial Sequence: Synthetic oligonucleotide
  Target: SCNA; (+) strand; PAM type: NRG; PAM sequence: TGG
atgaaggataaaagaataaa

SEQ ID NO: 38794 - DNA, 20 bp, Artificial Sequence
  Description of Artificial Sequence: Synthetic oligonucleotide
  Target: SCNA; (+) strand; PAM type: NRG; PAM sequence: TGG
agaataaatggaaaacgtgt

SEQ ID NO: 38795 - DNA, 20 bp, Artificial Sequence
  Description of Artificial Sequence: Synthetic oligonucleotide
  Target: SCNA; (+) strand; PAM type: NRG; PAM sequence: AAG
aaatggaaaacgtgttggca

SEQ ID NO: 38796 - DNA, 20 bp, Artificial Sequence
  Description of Artificial Sequence: Synthetic oligonucleotide
  Target: SCNA; (+) strand; PAM type: NRG; PAM sequence: TGG
tggcaaagtaattattccgt

SEQ ID NO: 38797 - DNA, 20 bp, Artificial Sequence
  Description of Artificial Sequence: Synthetic oligonucleotide
  Target: SCNA; (+) strand; PAM type: NRG; PAM sequence: GAG
gcaaagtaattattccgttg

SEQ ID NO: 38798 - DNA, 20 bp, Artificial Sequence
  Description of Artificial Sequence: Synthetic oligonucleotide
  Target: SCNA; (+) strand; PAM type: NRG; PAM sequence: GAG
aaagtaattattccgttgga

SEQ ID NO: 38799 - DNA, 20 bp, Artificial Sequence
  Description of Artificial Sequence: Synthetic oligonucleotide
  Target: SCNA; (+) strand; PAM type: NRG; PAM sequence: TGG
ttatttgataataataacca

SEQ ID NO: 38800 - DNA, 20 bp, Artificial Sequence
  Description of Artificial Sequence: Synthetic oligonucleotide
  Target: SCNA; (+) strand; PAM type: NRG; PAM sequence: AAG
accatggttcctatatataa

SEQ ID NO: 38801 - DNA, 20 bp, Artificial Sequence
  Description of Artificial Sequence: Synthetic oligonucleotide
  Target: SCNA; (+) strand; PAM type: NRG; PAM sequence: AAG
gacattcccacaaaaactgc

SEQ ID NO: 38802 - DNA, 20 bp, Artificial Sequence
  Description of Artificial Sequence: Synthetic oligonucleotide
  Target: SCNA; (+) strand; PAM type: NRG; PAM sequence: AGG
acattcccacaaaaactgca

SEQ ID NO: 38803 - DNA, 20 bp, Artificial Sequence
  Description of Artificial Sequence: Synthetic oligonucleotide
  Target: SCNA; (+) strand; PAM type: NRG; PAM sequence: TAG
ttcccacaaaaactgcaagg

SEQ ID NO: 38804 - DNA, 20 bp, Artificial Sequence
  Description of Artificial Sequence: Synthetic oligonucleotide
  Target: SCNA; (+) strand; PAM type: NRG; PAM sequence: CAG
caaaaactgcaaggtagttg

SEQ ID NO: 38805 - DNA, 20 bp, Artificial Sequence
  Description of Artificial Sequence: Synthetic oligonucleotide
  Target: SCNA; (+) strand; PAM type: NRG; PAM sequence: CAG
aaatcatattttttactaat

SEQ ID NO: 38806 - DNA, 20 bp, Artificial Sequence
  Description of Artificial Sequence: Synthetic oligonucleotide
  Target: SCNA; (+) strand; PAM type: NRG; PAM sequence: AGG
aatcatattttttactaatc

SEQ ID NO: 38807 - DNA, 20 bp, Artificial Sequence
  Description of Artificial Sequence: Synthetic oligonucleotide
  Target: SCNA; (+) strand; PAM type: NRG; PAM sequence: GGG
atcatattttttactaatca

SEQ ID NO: 38808 - DNA, 20 bp, Artificial Sequence
  Description of Artificial Sequence: Synthetic oligonucleotide
  Target: SCNA; (+) strand; PAM type: NRG; PAM sequence: AAG
atattttttactaatcaggg

SEQ ID NO: 38809 - DNA, 20 bp, Artificial Sequence
  Description of Artificial Sequence: Synthetic oligonucleotide
  Target: SCNA; (+) strand; PAM type: NRG; PAM sequence: CAG
ctaatcagggaagtgatgct

SEQ ID NO: 38810 - DNA, 20 bp, Artificial Sequence
  Description of Artificial Sequence: Synthetic oligonucleotide
  Target: SCNA; (+) strand; PAM type: NRG; PAM sequence: GAG
aatcagggaagtgatgctca

SEQ ID NO: 38811 - DNA, 20 bp, Artificial Sequence
  Description of Artificial Sequence: Synthetic oligonucleotide
  Target: SCNA; (+) strand; PAM type: NRG; PAM sequence: AAG
aagtgatgctcagagatgtt

SEQ ID NO: 38812 - DNA, 20 bp, Artificial Sequence
  Description of Artificial Sequence: Synthetic oligonucleotide
  Target: SCNA; (+) strand; PAM type: NRG; PAM sequence: AAG
gatgttaagtacgcttcccc

SEQ ID NO: 38813 - DNA, 20 bp, Artificial Sequence
  Description of Artificial Sequence: Synthetic oligonucleotide
  Target: SCNA; (+) strand; PAM type: NRG; PAM sequence: AAG
tacgcttccccaagacccta

SEQ ID NO: 38814 - DNA, 20 bp, Artificial Sequence
  Description of Artificial Sequence: Synthetic oligonucleotide
  Target: SCNA; (+) strand; PAM type: NRG; PAM sequence: AGG
acgcttccccaagaccctaa

SEQ ID NO: 38815 - DNA, 20 bp, Artificial Sequence
  Description of Artificial Sequence: Synthetic oligonucleotide
  Target: SCNA; (+) strand; PAM type: NRG; PAM sequence: AAG
cccaagaccctaaaggtgat

SEQ ID NO: 38816 - DNA, 20 bp, Artificial Sequence
  Description of Artificial Sequence: Synthetic oligonucleotide
  Target: SCNA; (+) strand; PAM type: NRG; PAM sequence: TAG
cctaaaggtgataagtgatg

SEQ ID NO: 38817 - DNA, 20 bp, Artificial Sequence
  Description of Artificial Sequence: Synthetic oligonucleotide
  Target: SCNA; (+) strand; PAM type: NRG; PAM sequence: TGG
tgtagtctcaactaaaactt

SEQ ID NO: 38818 - DNA, 20 bp, Artificial Sequence
  Description of Artificial Sequence: Synthetic oligonucleotide
  Target: SCNA; (+) strand; PAM type: NRG; PAM sequence: TAG
aaaactttggtttgtgtgat

SEQ ID NO: 38819 - DNA, 20 bp, Artificial Sequence
  Description of Artificial Sequence: Synthetic oligonucleotide
  Target: SCNA; (+) strand; PAM type: NRG; PAM sequence: CAG
gcatgttctttccactctat

SEQ ID NO: 38820 - DNA, 20 bp, Artificial Sequence
  Description of Artificial Sequence: Synthetic oligonucleotide
  Target: SCNA; (+) strand; PAM type: NRG; PAM sequence: TAG
tgttctttccactctatcag

SEQ ID NO: 38821 - DNA, 20 bp, Artificial Sequence
  Description of Artificial Sequence: Synthetic oligonucleotide
  Target: SCNA; (+) strand; PAM type: NRG; PAM sequence: CAG
ctttccactctatcagtagt

SEQ ID NO: 38822 - DNA, 20 bp, Artificial Sequence
  Description of Artificial Sequence: Synthetic oligonucleotide
  Target: SCNA; (+) strand; PAM type: NRG; PAM sequence: AAG
ccactctatcagtagtcagc

SEQ ID NO: 38823 - DNA, 20 bp, Artificial Sequence
  Description of Artificial Sequence: Synthetic oligonucleotide
  Target: SCNA; (+) strand; PAM type: NRG; PAM sequence: AAG
gtcagcaagctacaacatac

SEQ ID NO: 38824 - DNA, 20 bp, Artificial Sequence
  Description of Artificial Sequence: Synthetic oligonucleotide
  Target: SCNA; (+) strand; PAM type: NRG; PAM sequence: CAG
tacaacatacaagacaattc

SEQ ID NO: 38825 - DNA, 20 bp, Artificial Sequence
  Description of Artificial Sequence: Synthetic oligonucleotide
  Target: SCNA; (+) strand; PAM type: NRG; PAM sequence: AAG
accacctgttttgataaatg

SEQ ID NO: 38826 - DNA, 20 bp, Artificial Sequence
  Description of Artificial Sequence: Synthetic oligonucleotide
  Target: SCNA; (+) strand; PAM type: NRG; PAM sequence: TGG
tttgataaatgaagttttat

SEQ ID NO: 38827 - DNA, 20 bp, Artificial Sequence
  Description of Artificial Sequence: Synthetic oligonucleotide
  Target: SCNA; (+) strand; PAM type: NRG; PAM sequence: GGG
ttgataaatgaagttttatt

SEQ ID NO: 38828 - DNA, 20 bp, Artificial Sequence
  Description of Artificial Sequence: Synthetic oligonucleotide
  Target: SCNA; (+) strand; PAM type: NRG; PAM sequence: CAG
aatgaagttttattgggaca

SEQ ID NO: 38829 - DNA, 20 bp, Artificial Sequence
  Description of Artificial Sequence: Synthetic oligonucleotide
  Target: SCNA; (+) strand; PAM type: NRG; PAM sequence: TAG
ttattgggacacagccacac

SEQ ID NO: 38830 - DNA, 20 bp, Artificial Sequence
  Description of Artificial Sequence: Synthetic oligonucleotide
  Target: SCNA; (+) strand; PAM type: NRG; PAM sequence: CAG
tgactaccttcacacttcaa

SEQ ID NO: 38831 - DNA, 20 bp, Artificial Sequence
  Description of Artificial Sequence: Synthetic oligonucleotide
  Target: SCNA; (+) strand; PAM type: NRG; PAM sequence: CAG
ctaccttcacacttcaacag

SEQ ID NO: 38832 - DNA, 20 bp, Artificial Sequence
  Description of Artificial Sequence: Synthetic oligonucleotide
  Target: SCNA; (+) strand; PAM type: NRG; PAM sequence: GAG
cacacttcaacagcagaatt

SEQ ID NO: 38833 - DNA, 20 bp, Artificial Sequence
  Description of Artificial Sequence: Synthetic oligonucleotide
  Target: SCNA; (+) strand; PAM type: NRG; PAM sequence: TAG
tcaacagcagaattgagaca

SEQ ID NO: 38834 - DNA, 20 bp, Artificial Sequence
  Description of Artificial Sequence: Synthetic oligonucleotide
  Target: SCNA; (+) strand; PAM type: NRG; PAM sequence: TAG
agatttttttttcttttttt

SEQ ID NO: 38835 - DNA, 20 bp, Artificial Sequence
  Description of Artificial Sequence: Synthetic oligonucleotide
  Target: SCNA; (+) strand; PAM type: NRG; PAM sequence: CAG
ttttttttcttttttttaga

SEQ ID NO: 38836 - DNA, 20 bp, Artificial Sequence
  Description of Artificial Sequence: Synthetic oligonucleotide
  Target: SCNA; (+) strand; PAM type: NRG; PAM sequence: AGG
tttttttcttttttttagac

SEQ ID NO: 38837 - DNA, 20 bp, Artificial Sequence
  Description of Artificial Sequence: Synthetic oligonucleotide
  Target: SCNA; (+) strand; PAM type: NRG; PAM sequence: GGG
ttttttcttttttttagaca

SEQ ID NO: 38838 - DNA, 20 bp, Artificial Sequence
  Description of Artificial Sequence: Synthetic oligonucleotide
  Target: SCNA; (+) strand; PAM type: NRG; PAM sequence: CAG
cagggtatcactctgccacc

SEQ ID NO: 38839 - DNA, 20 bp, Artificial Sequence
  Description of Artificial Sequence: Synthetic oligonucleotide
  Target: SCNA; (+) strand; PAM type: NRG; PAM sequence: AGG
agggtatcactctgccaccc

SEQ ID NO: 38840 - DNA, 20 bp, Artificial Sequence
  Description of Artificial Sequence: Synthetic oligonucleotide
  Target: SCNA; (+) strand; PAM type: NRG; PAM sequence: TGG
tatcactctgccacccaggc

SEQ ID NO: 38841 - DNA, 20 bp, Artificial Sequence
  Description of Artificial Sequence: Synthetic oligonucleotide
  Target: SCNA; (+) strand; PAM type: NRG; PAM sequence: GAG
tcactctgccacccaggctg

SEQ ID NO: 38842 - DNA, 20 bp, Artificial Sequence
  Description of Artificial Sequence: Synthetic oligonucleotide
  Target: SCNA; (+) strand; PAM type: NRG; PAM sequence: CAG
ctgccacccaggctggagtg

SEQ ID NO: 38843 - DNA, 20 bp, Artificial Sequence
  Description of Artificial Sequence: Synthetic oligonucleotide
  Target: SCNA; (+) strand; PAM type: NRG; PAM sequence: TGG
ccacccaggctggagtgcag

SEQ ID NO: 38844 - DNA, 20 bp, Artificial Sequence
  Description of Artificial Sequence: Synthetic oligonucleotide
  Target: SCNA; (+) strand; PAM type: NRG; PAM sequence: CAG
ggagtgcagtggctcgatct

SEQ ID NO: 38845 - DNA, 20 bp, Artificial Sequence
  Description of Artificial Sequence: Synthetic oligonucleotide
  Target: SCNA; (+) strand; PAM type: NRG; PAM sequence: CAG
tcagctcactgcaacctctg

SEQ ID NO: 38846 - DNA, 20 bp, Artificial Sequence
  Description of Artificial Sequence: Synthetic oligonucleotide
  Target: SCNA; (+) strand; PAM type: NRG; PAM sequence: GAG
ctcactgcaacctctgcagt

SEQ ID NO: 38847 - DNA, 20 bp, Artificial Sequence
  Description of Artificial Sequence: Synthetic oligonucleotide
  Target: SCNA; (+) strand; PAM type: NRG; PAM sequence: TGG
aacctctgcagtgagctgta

SEQ ID NO: 38848 - DNA, 20 bp, Artificial Sequence
  Description of Artificial Sequence: Synthetic oligonucleotide
  Target: SCNA; (+) strand; PAM type: NRG; PAM sequence: AAG
tgcagtgagctgtatggctc

SEQ ID NO: 38849 - DNA, 20 bp, Artificial Sequence
  Description of Artificial Sequence: Synthetic oligonucleotide
  Target: SCNA; (+) strand; PAM type: NRG; PAM sequence: CAG
ctcaagccatcctcctacct

SEQ ID NO: 38850 - DNA, 20 bp, Artificial Sequence
  Description of Artificial Sequence: Synthetic oligonucleotide
  Target: SCNA; (+) strand; PAM type: NRG; PAM sequence: TGG
atcctcctacctcagcctcc

SEQ ID NO: 38851 - DNA, 20 bp, Artificial Sequence
  Description of Artificial Sequence: Synthetic oligonucleotide
  Target: SCNA; (+) strand; PAM type: NRG; PAM sequence: GGG
tcctcctacctcagcctcct

SEQ ID NO: 38852 - DNA, 20 bp, Artificial Sequence
  Description of Artificial Sequence: Synthetic oligonucleotide
  Target: SCNA; (+) strand; PAM type: NRG; PAM sequence: TAG
tcctacctcagcctcctggg

SEQ ID NO: 38853 - DNA, 20 bp, Artificial Sequence
  Description of Artificial Sequence: Synthetic oligonucleotide
  Target: SCNA; (+) strand; PAM type: NRG; PAM sequence: TGG
acctcagcctcctgggtagc

SEQ ID NO: 38854 - DNA, 20 bp, Artificial Sequence
  Description of Artificial Sequence: Synthetic oligonucleotide
  Target: SCNA; (+) strand; PAM type: NRG; PAM sequence: CGG
cacatgcatgctaccatacc

SEQ ID NO: 38855 - DNA, 20 bp, Artificial Sequence
  Description of Artificial Sequence: Synthetic oligonucleotide
  Target: SCNA; (+) strand; PAM type: NRG; PAM sequence: TAG
gctaatttttgcgttgtttg

SEQ ID NO: 38856 - DNA, 20 bp, Artificial Sequence
  Description of Artificial Sequence: Synthetic oligonucleotide
  Target: SCNA; (+) strand; PAM type: NRG; PAM sequence: CAG
ttttgcgttgtttgtagaca

SEQ ID NO: 38857 - DNA, 20 bp, Artificial Sequence
  Description of Artificial Sequence: Synthetic oligonucleotide
  Target: SCNA; (+) strand; PAM type: NRG; PAM sequence: AGG
tttgcgttgtttgtagacac

SEQ ID NO: 38858 - DNA, 20 bp, Artificial Sequence
  Description of Artificial Sequence: Synthetic oligonucleotide
  Target: SCNA; (+) strand; PAM type: NRG; PAM sequence: GGG
ttgcgttgtttgtagacaca

SEQ ID NO: 38859 - DNA, 20 bp, Artificial Sequence
  Description of Artificial Sequence: Synthetic oligonucleotide
  Target: SCNA; (+) strand; PAM type: NRG; PAM sequence: TGG
agacacagggtttcaccatg

SEQ ID NO: 38860 - DNA, 20 bp, Artificial Sequence
  Description of Artificial Sequence: Synthetic oligonucleotide
  Target: SCNA; (+) strand; PAM type: NRG; PAM sequence: CAG
cagggtttcaccatgtggcc

SEQ ID NO: 38861 - DNA, 20 bp, Artificial Sequence
  Description of Artificial Sequence: Synthetic oligonucleotide
  Target: SCNA; (+) strand; PAM type: NRG; PAM sequence: AGG
agggtttcaccatgtggccc

SEQ ID NO: 38862 - DNA, 20 bp, Artificial Sequence
  Description of Artificial Sequence: Synthetic oligonucleotide
  Target: SCNA; (+) strand; PAM type: NRG; PAM sequence: TGG
tttcaccatgtggcccaggc

SEQ ID NO: 38863 - DNA, 20 bp, Artificial Sequence
  Description of Artificial Sequence: Synthetic oligonucleotide
  Target: SCNA; (+) strand; PAM type: NRG; PAM sequence: TGG
ccaggctggtctcaaacccc

SEQ ID NO: 38864 - DNA, 20 bp, Artificial Sequence
  Description of Artificial Sequence: Synthetic oligonucleotide
  Target: SCNA; (+) strand; PAM type: NRG; PAM sequence: GGG
caggctggtctcaaacccct

SEQ ID NO: 38865 - DNA, 20 bp, Artificial Sequence
  Description of Artificial Sequence: Synthetic oligonucleotide
  Target: SCNA; (+) strand; PAM type: NRG; PAM sequence: AAG
ggtctcaaacccctgggctc

SEQ ID NO: 38866 - DNA, 20 bp, Artificial Sequence
  Description of Artificial Sequence: Synthetic oligonucleotide
  Target: SCNA; (+) strand; PAM type: NRG; PAM sequence: CAG
cctgggctcaagtgatccac

SEQ ID NO: 38867 - DNA, 20 bp, Artificial Sequence
  Description of Artificial Sequence: Synthetic oligonucleotide
  Target: SCNA; (+) strand; PAM type: NRG; PAM sequence: CGG
ctcaagtgatccaccagcct

SEQ ID NO: 38868 - DNA, 20 bp, Artificial Sequence
  Description of Artificial Sequence: Synthetic oligonucleotide
  Target: SCNA; (+) strand; PAM type: NRG; PAM sequence: GGG
tcaagtgatccaccagcctc

SEQ ID NO: 38869 - DNA, 20 bp, Artificial Sequence
  Description of Artificial Sequence: Synthetic oligonucleotide
  Target: SCNA; (+) strand; PAM type: NRG; PAM sequence: AAG
ccaccagcctcgggctctca

SEQ ID NO: 38870 - DNA, 20 bp, Artificial Sequence
  Description of Artificial Sequence: Synthetic oligonucleotide
  Target: SCNA; (+) strand; PAM type: NRG; PAM sequence: TGG
gcctcgggctctcaaagtgc

SEQ ID NO: 38871 - DNA, 20 bp, Artificial Sequence
  Description of Artificial Sequence: Synthetic oligonucleotide
  Target: SCNA; (+) strand; PAM type: NRG; PAM sequence: GGG
cctcgggctctcaaagtgct

SEQ ID NO: 38872 - DNA, 20 bp, Artificial Sequence
  Description of Artificial Sequence: Synthetic oligonucleotide
  Target: SCNA; (+) strand; PAM type: NRG; PAM sequence: AAG
ctctcaaagtgctgggatta

SEQ ID NO: 38873 - DNA, 20 bp, Artificial Sequence
  Description of Artificial Sequence: Synthetic oligonucleotide
  Target: SCNA; (+) strand; PAM type: NRG; PAM sequence: GAG
agtgctgggattaaagacct

SEQ ID NO: 38874 - DNA, 20 bp, Artificial Sequence
  Description of Artificial Sequence: Synthetic oligonucleotide
  Target: SCNA; (+) strand; PAM type: NRG; PAM sequence: CGG
gggattaaagacctgagcca

SEQ ID NO: 38875 - DNA, 20 bp, Artificial Sequence
  Description of Artificial Sequence: Synthetic oligonucleotide
  Target: SCNA; (+) strand; PAM type: NRG; PAM sequence: TGG
aagacctgagccacggcacc

SEQ ID NO: 38876 - DNA, 20 bp, Artificial Sequence
  Description of Artificial Sequence: Synthetic oligonucleotide
  Target: SCNA; (+) strand; PAM type: NRG; PAM sequence: AAG
ctgagccacggcacctggcc

SEQ ID NO: 38877 - DNA, 20 bp, Artificial Sequence
  Description of Artificial Sequence: Synthetic oligonucleotide
  Target: SCNA; (+) strand; PAM type: NRG; PAM sequence: TAG
cacggcacctggccaagaca

SEQ ID NO: 38878 - DNA, 20 bp, Artificial Sequence
  Description of Artificial Sequence: Synthetic oligonucleotide
  Target: SCNA; (+) strand; PAM type: NRG; PAM sequence: TGG
tggccaagacatagatctca

SEQ ID NO: 38879 - DNA, 20 bp, Artificial Sequence
  Description of Artificial Sequence: Synthetic oligonucleotide
  Target: SCNA; (+) strand; PAM type: NRG; PAM sequence: TGG
cccaaaattttgccaatccc

SEQ ID NO: 38880 - DNA, 20 bp, Artificial Sequence
  Description of Artificial Sequence: Synthetic oligonucleotide
  Target: SCNA; (+) strand; PAM type: NRG; PAM sequence: TGG
tatactattgtgtcttcaca

SEQ ID NO: 38881 - DNA, 20 bp, Artificial Sequence
  Description of Artificial Sequence: Synthetic oligonucleotide
  Target: SCNA; (+) strand; PAM type: NRG; PAM sequence: AAG
ttatcttaaattctgtgtgt

SEQ ID NO: 38882 - DNA, 20 bp, Artificial Sequence
  Description of Artificial Sequence: Synthetic oligonucleotide
  Target: SCNA; (+) strand; PAM type: NRG; PAM sequence: TAG
gtgtaagttcaactctcaat

SEQ ID NO: 38883 - DNA, 20 bp, Artificial Sequence
  Description of Artificial Sequence: Synthetic oligonucleotide
  Target: SCNA; (+) strand; PAM type: NRG; PAM sequence: CAG
ttcaactctcaattagaact

SEQ ID NO: 38884 - DNA, 20 bp, Artificial Sequence
  Description of Artificial Sequence: Synthetic oligonucleotide
  Target: SCNA; (+) strand; PAM type: NRG; PAM sequence: TAG
tgtaaccaataaaaaattta

SEQ ID NO: 38885 - DNA, 20 bp, Artificial Sequence
  Description of Artificial Sequence: Synthetic oligonucleotide
  Target: SCNA; (+) strand; PAM type: NRG; PAM sequence: GAG
tgctatgtgttaaatgccat

SEQ ID NO: 38886 - DNA, 20 bp, Artificial Sequence
  Description of Artificial Sequence: Synthetic oligonucleotide
  Target: SCNA; (+) strand; PAM type: NRG; PAM sequence: GAG
ctatgtgttaaatgccatga

SEQ ID NO: 38887 - DNA, 20 bp, Artificial Sequence
  Description of Artificial Sequence: Synthetic oligonucleotide
  Target: SCNA; (+) strand; PAM type: NRG; PAM sequence: CAG
ttgaaaatgatttcaatgaa

SEQ ID NO: 38888 - DNA, 20 bp, Artificial Sequence
  Description of Artificial Sequence: Synthetic oligonucleotide
  Target: SCNA; (+) strand; PAM type: NRG; PAM sequence: AAG
tgatttcaatgaacagttaa

SEQ ID NO: 38889 - DNA, 20 bp, Artificial Sequence
  Description of Artificial Sequence: Synthetic oligonucleotide
  Target: SCNA; (+) strand; PAM type: NRG; PAM sequence: AGG
gatttcaatgaacagttaaa

SEQ ID NO: 38890 - DNA, 20 bp, Artificial Sequence
  Description of Artificial Sequence: Synthetic oligonucleotide
  Target: SCNA; (+) strand; PAM type: NRG; PAM sequence: AAG
tgaacagttaaaaggtaact

SEQ ID NO: 38891 - DNA, 20 bp, Artificial Sequence
  Description of Artificial Sequence: Synthetic oligonucleotide
  Target: SCNA; (+) strand; PAM type: NRG; PAM sequence: AAG
gttaaaaggtaactaagtca

SEQ ID NO: 38892 - DNA, 20 bp, Artificial Sequence
  Description of Artificial Sequence: Synthetic oligonucleotide
  Target: SCNA; (+) strand; PAM type: NRG; PAM sequence: CAG
gtcaaagaaacttgtgcttg

SEQ ID NO: 38893 - DNA, 20 bp, Artificial Sequence
  Description of Artificial Sequence: Synthetic oligonucleotide
  Target: SCNA; (+) strand; PAM type: NRG; PAM sequence: TGG
aaacttgtgcttgcagaact

SEQ ID NO: 38894 - DNA, 20 bp, Artificial Sequence
  Description of Artificial Sequence: Synthetic oligonucleotide
  Target: SCNA; (+) strand; PAM type: NRG; PAM sequence: GAG
cttgcagaacttggaaatct

SEQ ID NO: 38895 - DNA, 20 bp, Artificial Sequence
  Description of Artificial Sequence: Synthetic oligonucleotide
  Target: SCNA; (+) strand; PAM type: NRG; PAM sequence: AGG
ttgcagaacttggaaatctg

SEQ ID NO: 38896 - DNA, 20 bp, Artificial Sequence
  Description of Artificial Sequence: Synthetic oligonucleotide
  Target: SCNA; (+) strand; PAM type: NRG; PAM sequence: CGG
cttggaaatctgaggacaaa

SEQ ID NO: 38897 - DNA, 20 bp, Artificial Sequence
  Description of Artificial Sequence: Synthetic oligonucleotide
  Target: SCNA; (+) strand; PAM type: NRG; PAM sequence: AAG
gaaatctgaggacaaacgga

SEQ ID NO: 38898 - DNA, 20 bp, Artificial Sequence
  Description of Artificial Sequence: Synthetic oligonucleotide
  Target: SCNA; (+) strand; PAM type: NRG; PAM sequence: CAG
taaactgcatgtcactgatt

SEQ ID NO: 38899 - DNA, 20 bp, Artificial Sequence
  Description of Artificial Sequence: Synthetic oligonucleotide
  Target: SCNA; (+) strand; PAM type: NRG; PAM sequence: AAG
tattccaaattccatctaaa

SEQ ID NO: 38900 - DNA, 20 bp, Artificial Sequence
  Description of Artificial Sequence: Synthetic oligonucleotide
  Target: SCNA; (+) strand; PAM type: NRG; PAM sequence: AGG
attccaaattccatctaaaa

SEQ ID NO: 38901 - DNA, 20 bp, Artificial Sequence
  Description of Artificial Sequence: Synthetic oligonucleotide
  Target: SCNA; (+) strand; PAM type: NRG; PAM sequence: AAG
actttctgaaaatatgtttt

SEQ ID NO: 38902 - DNA, 20 bp, Artificial Sequence
  Description of Artificial Sequence: Synthetic oligonucleotide
  Target: SCNA; (+) strand; PAM type: NRG; PAM sequence: AGG
ctttctgaaaatatgtttta

SEQ ID NO: 38903 - DNA, 20 bp, Artificial Sequence
  Description of Artificial Sequence: Synthetic oligonucleotide
  Target: SCNA; (+) strand; PAM type: NRG; PAM sequence: TAG
tctgaaaatatgttttaagg

SEQ ID NO: 38904 - DNA, 20 bp, Artificial Sequence
  Description of Artificial Sequence: Synthetic oligonucleotide
  Target: SCNA; (+) strand; PAM type: NRG; PAM sequence: AAG
tatgttttaaggtagaaaaa

SEQ ID NO: 38905 - DNA, 20 bp, Artificial Sequence
  Description of Artificial Sequence: Synthetic oligonucleotide
  Target: SCNA; (+) strand; PAM type: NRG; PAM sequence: AAG
gaaaaaaagtaatttaattg

SEQ ID NO: 38906 - DNA, 20 bp, Artificial Sequence
  Description of Artificial Sequence: Synthetic oligonucleotide
  Target: SCNA; (+) strand; PAM type: NRG; PAM sequence: TGG
gtaatttaattgaagatttg

SEQ ID NO: 38907 - DNA, 20 bp, Artificial Sequence
  Description of Artificial Sequence: Synthetic oligonucleotide
  Target: SCNA; (+) strand; PAM type: NRG; PAM sequence: GGG
taatttaattgaagatttgt

SEQ ID NO: 38908 - DNA, 20 bp, Artificial Sequence
  Description of Artificial Sequence: Synthetic oligonucleotide
  Target: SCNA; (+) strand; PAM type: NRG; PAM sequence: AAG
tttaattgaagatttgtggg

SEQ ID NO: 38909 - DNA, 20 bp, Artificial Sequence
  Description of Artificial Sequence: Synthetic oligonucleotide
  Target: SCNA; (+) strand; PAM type: NRG; PAM sequence: AAG
tgaagatttgtgggaagatt

SEQ ID NO: 38910 - DNA, 20 bp, Artificial Sequence
  Description of Artificial Sequence: Synthetic oligonucleotide
  Target: SCNA; (+) strand; PAM type: NRG; PAM sequence: AAG
tgggaagattaagtcaacat

SEQ ID NO: 38911 - DNA, 20 bp, Artificial Sequence
  Description of Artificial Sequence: Synthetic oligonucleotide
  Target: SCNA; (+) strand; PAM type: NRG; PAM sequence: AAG
agattaagtcaacataagaa

SEQ ID NO: 38912 - DNA, 20 bp, Artificial Sequence
  Description of Artificial Sequence: Synthetic oligonucleotide
  Target: SCNA; (+) strand; PAM type: NRG; PAM sequence: GAG
ataagaaaagtctaaataat

SEQ ID NO: 38913 - DNA, 20 bp, Artificial Sequence
  Description of Artificial Sequence: Synthetic oligonucleotide
  Target: SCNA; (+) strand; PAM type: NRG; PAM sequence: AGG
taagaaaagtctaaataatg

SEQ ID NO: 38914 - DNA, 20 bp, Artificial Sequence
  Description of Artificial Sequence: Synthetic oligonucleotide
  Target: SCNA; (+) strand; PAM type: NRG; PAM sequence: CAG
gaaaagtctaaataatgagg

SEQ ID NO: 38915 - DNA, 20 bp, Artificial Sequence
  Description of Artificial Sequence: Synthetic oligonucleotide
  Target: SCNA; (+) strand; PAM type: NRG; PAM sequence: TGG
aagtctaaataatgaggcag

SEQ ID NO: 38916 - DNA, 20 bp, Artificial Sequence
  Description of Artificial Sequence: Synthetic oligonucleotide
  Target: SCNA; (+) strand; PAM type: NRG; PAM sequence: TGG
gtggcacatgcctataatcc

SEQ ID NO: 38917 - DNA, 20 bp, Artificial Sequence
  Description of Artificial Sequence: Synthetic oligonucleotide
  Target: SCNA; (+) strand; PAM type: NRG; PAM sequence: CAG
tgcctataatcctggctact

SEQ ID NO: 38918 - DNA, 20 bp, Artificial Sequence
  Description of Artificial Sequence: Synthetic oligonucleotide
  Target: SCNA; (+) strand; PAM type: NRG; PAM sequence: AGG
gcctataatcctggctactc

SEQ ID NO: 38919 - DNA, 20 bp, Artificial Sequence
  Description of Artificial Sequence: Synthetic oligonucleotide
  Target: SCNA; (+) strand; PAM type: NRG; PAM sequence: GAG
ctataatcctggctactcag

SEQ ID NO: 38920 - DNA, 20 bp, Artificial Sequence
  Description of Artificial Sequence: Synthetic oligonucleotide
  Target: SCNA; (+) strand; PAM type: NRG; PAM sequence: AGG
tataatcctggctactcagg

SEQ ID NO: 38921 - DNA, 20 bp, Artificial Sequence
  Description of Artificial Sequence: Synthetic oligonucleotide
  Target: SCNA; (+) strand; PAM type: NRG; PAM sequence: GAG
tcctggctactcaggaggct

SEQ ID NO: 38922 - DNA, 20 bp, Artificial Sequence
  Description of Artificial Sequence: Synthetic oligonucleotide
  Target: SCNA; (+) strand; PAM type: NRG; PAM sequence: AGG
cctggctactcaggaggctg

SEQ ID NO: 38923 - DNA, 20 bp, Artificial Sequence
  Description of Artificial Sequence: Synthetic oligonucleotide
  Target: SCNA; (+) strand; PAM type: NRG; PAM sequence: TGG
ggctactcaggaggctgagg

SEQ ID NO: 38924 - DNA, 20 bp, Artificial Sequence
  Description of Artificial Sequence: Synthetic oligonucleotide
  Target: SCNA; (+) strand; PAM type: NRG; PAM sequence: GGG
gctactcaggaggctgaggt

SEQ ID NO: 38925 - DNA, 20 bp, Artificial Sequence
  Description of Artificial Sequence: Synthetic oligonucleotide
  Target: SCNA; (+) strand; PAM type: NRG; PAM sequence: GGG
ctactcaggaggctgaggtg

SEQ ID NO: 38926 - DNA, 20 bp, Artificial Sequence
  Description of Artificial Sequence: Synthetic oligonucleotide
  Target: SCNA; (+) strand; PAM type: NRG; PAM sequence: GGG
tactcaggaggctgaggtgg

SEQ ID NO: 38927 - DNA, 20 bp, Artificial Sequence
  Description of Artificial Sequence: Synthetic oligonucleotide
  Target: SCNA; (+) strand; PAM type: NRG; PAM sequence: GAG
ctgaggtgggggcatgactt

SEQ ID NO: 38928 - DNA, 20 bp, Artificial Sequence
  Description of Artificial Sequence: Synthetic oligonucleotide
  Target: SCNA; (+) strand; PAM type: NRG; PAM sequence: CAG
gtgggggcatgacttgagcc

SEQ ID NO: 38929 - DNA, 20 bp, Artificial Sequence
  Description of Artificial Sequence: Synthetic oligonucleotide
  Target: SCNA; (+) strand; PAM type: NRG; PAM sequence: AGG
tgggggcatgacttgagccc

SEQ ID NO: 38930 - DNA, 20 bp, Artificial Sequence
  Description of Artificial Sequence: Synthetic oligonucleotide
  Target: SCNA; (+) strand; PAM type: NRG; PAM sequence: AAG
tgacttgagcccaggaattc

SEQ ID NO: 38931 - DNA, 20 bp, Artificial Sequence
  Description of Artificial Sequence: Synthetic oligonucleotide
  Target: SCNA; (+) strand; PAM type: NRG; PAM sequence: AGG
gacttgagcccaggaattca

SEQ ID NO: 38932 - DNA, 20 bp, Artificial Sequence
  Description of Artificial Sequence: Synthetic oligonucleotide
  Target: SCNA; (+) strand; PAM type: NRG; PAM sequence: CAG
agcccaggaattcaaggatg

SEQ ID NO: 38933 - DNA, 20 bp, Artificial Sequence
  Description of Artificial Sequence: Synthetic oligonucleotide
  Target: SCNA; (+) strand; PAM type: NRG; PAM sequence: GAG
caggaattcaaggatgcagt

SEQ ID NO: 38934 - DNA, 20 bp, Artificial Sequence
  Description of Artificial Sequence: Synthetic oligonucleotide
  Target: SCNA; (+) strand; PAM type: NRG; PAM sequence: TAG
aaggatgcagtgagctatga

SEQ ID NO: 38935 - DNA, 20 bp, Artificial Sequence
  Description of Artificial Sequence: Synthetic oligonucleotide
  Target: SCNA; (+) strand; PAM type: NRG; PAM sequence: CAG
gagctatgatagcatcactg

SEQ ID NO: 38936 - DNA, 20 bp, Artificial Sequence
  Description of Artificial Sequence: Synthetic oligonucleotide
  Target: SCNA; (+) strand; PAM type: NRG; PAM sequence: CAG
atgatagcatcactgcagtc

SEQ ID NO: 38937 - DNA, 20 bp, Artificial Sequence
  Description of Artificial Sequence: Synthetic oligonucleotide
  Target: SCNA; (+) strand; PAM type: NRG; PAM sequence: TGG
agcatcactgcagtccagcc

SEQ ID NO: 38938 - DNA, 20 bp, Artificial Sequence
  Description of Artificial Sequence: Synthetic oligonucleotide
  Target: SCNA; (+) strand; PAM type: NRG; PAM sequence: GGG
gcatcactgcagtccagcct

SEQ ID NO: 38939 - DNA, 20 bp, Artificial Sequence
  Description of Artificial Sequence: Synthetic oligonucleotide
  Target: SCNA; (+) strand; PAM type: NRG; PAM sequence: CAG
ctgcagtccagcctgggcga

SEQ ID NO: 38940 - DNA, 20 bp, Artificial Sequence
  Description of Artificial Sequence: Synthetic oligonucleotide
  Target: SCNA; (+) strand; PAM type: NRG; PAM sequence: GAG
gcagtccagcctgggcgaca

SEQ ID NO: 38941 - DNA, 20 bp, Artificial Sequence
  Description of Artificial Sequence: Synthetic oligonucleotide
  Target: SCNA; (+) strand; PAM type: NRG; PAM sequence: AAG
tccagcctgggcgacagagc

SEQ ID NO: 38942 - DNA, 20 bp, Artificial Sequence
  Description of Artificial Sequence: Synthetic oligonucleotide
  Target: SCNA; (+) strand; PAM type: NRG; PAM sequence: AGG
ccagcctgggcgacagagca

SEQ ID NO: 38943 - DNA, 20 bp, Artificial Sequence
  Description of Artificial Sequence: Synthetic oligonucleotide
  Target: SCNA; (+) strand; PAM type: NRG; PAM sequence: GAG
aatgtgttgtgaactttgat

SEQ ID NO: 38944 - DNA, 20 bp, Artificial Sequence
  Description of Artificial Sequence: Synthetic oligonucleotide
  Target: SCNA; (+) strand; PAM type: NRG; PAM sequence: AAG
gcattcatataaatcatccc

SEQ ID NO: 38945 - DNA, 20 bp, Artificial Sequence
  Description of Artificial Sequence: Synthetic oligonucleotide
  Target: SCNA; (+) strand; PAM type: NRG; PAM sequence: AAG
tcccccactgatctatgttg

SEQ ID NO: 38946 - DNA, 20 bp, Artificial Sequence
  Description of Artificial Sequence: Synthetic oligonucleotide
  Target: SCNA; (+) strand; PAM type: NRG; PAM sequence: GAG
ccccactgatctatgttgaa

SEQ ID NO: 38947 - DNA, 20 bp, Artificial Sequence
  Description of Artificial Sequence: Synthetic oligonucleotide
  Target: SCNA; (+) strand; PAM type: NRG; PAM sequence: TAG
actgatctatgttgaagaga

SEQ ID NO: 38948 - DNA, 20 bp, Artificial Sequence
  Description of Artificial Sequence: Synthetic oligonucleotide
  Target: SCNA; (+) strand; PAM type: NRG; PAM sequence: TAG
tctatgttgaagagatagtg

SEQ ID NO: 38949 - DNA, 20 bp, Artificial Sequence
  Description of Artificial Sequence: Synthetic oligonucleotide
  Target: SCNA; (+) strand; PAM type: NRG; PAM sequence: CAG
tgtagctttctttcactttg

SEQ ID NO: 38950 - DNA, 20 bp, Artificial Sequence
  Description of Artificial Sequence: Synthetic oligonucleotide
  Target: SCNA; (+) strand; PAM type: NRG; PAM sequence: TAG
tttctttcactttgcagaca

SEQ ID NO: 38951 - DNA, 20 bp, Artificial Sequence
  Description of Artificial Sequence: Synthetic oligonucleotide
  Target: SCNA; (+) strand; PAM type: NRG; PAM sequence: CGG
tttcactttgcagacataga

SEQ ID NO: 38952 - DNA, 20 bp, Artificial Sequence
  Description of Artificial Sequence: Synthetic oligonucleotide
  Target: SCNA; (+) strand; PAM type: NRG; PAM sequence: GAG
tcactttgcagacatagacg

SEQ ID NO: 38953 - DNA, 20 bp, Artificial Sequence
  Description of Artificial Sequence: Synthetic oligonucleotide
  Target: SCNA; (+) strand; PAM type: NRG; PAM sequence: CAG
catagacggagcacatgttt

SEQ ID NO: 38954 - DNA, 20 bp, Artificial Sequence
  Description of Artificial Sequence: Synthetic oligonucleotide
  Target: SCNA; (+) strand; PAM type: NRG; PAM sequence: TAG
gacggagcacatgtttcagc

SEQ ID NO: 38955 - DNA, 20 bp, Artificial Sequence
  Description of Artificial Sequence: Synthetic oligonucleotide
  Target: SCNA; (+) strand; PAM type: NRG; PAM sequence: AGG
acggagcacatgtttcagct

SEQ ID NO: 38956 - DNA, 20 bp, Artificial Sequence
  Description of Artificial Sequence: Synthetic oligonucleotide
  Target: SCNA; (+) strand; PAM type: NRG; PAM sequence: TGG
ttcagctaggcaactcaatg

SEQ ID NO: 38957 - DNA, 20 bp, Artificial Sequence
  Description of Artificial Sequence: Synthetic oligonucleotide
  Target: SCNA; (+) strand; PAM type: NRG; PAM sequence: TAG
tcctgtgactcttactgcta

SEQ ID NO: 38958 - DNA, 20 bp, Artificial Sequence
  Description of Artificial Sequence: Synthetic oligonucleotide
  Target: SCNA; (+) strand; PAM type: NRG; PAM sequence: CAG
cttactgctatagttgccac

SEQ ID NO: 38959 - DNA, 20 bp, Artificial Sequence
  Description of Artificial Sequence: Synthetic oligonucleotide
  Target: SCNA; (+) strand; PAM type: NRG; PAM sequence: GAG
tactgctatagttgccacca

SEQ ID NO: 38960 - DNA, 20 bp, Artificial Sequence
  Description of Artificial Sequence: Synthetic oligonucleotide
  Target: SCNA; (+) strand; PAM type: NRG; PAM sequence: AAG
tgccaccagagaatgtgaaa

SEQ ID NO: 38961 - DNA, 20 bp, Artificial Sequence
  Description of Artificial Sequence: Synthetic oligonucleotide
  Target: SCNA; (+) strand; PAM type: NRG; PAM sequence: CAG
ccagagaatgtgaaaaagct

SEQ ID NO: 38962 - DNA, 20 bp, Artificial Sequence
  Description of Artificial Sequence: Synthetic oligonucleotide
  Target: SCNA; (+) strand; PAM type: NRG; PAM sequence: GAG
agagaatgtgaaaaagctca

SEQ ID NO: 38963 - DNA, 20 bp, Artificial Sequence
  Description of Artificial Sequence: Synthetic oligonucleotide
  Target: SCNA; (+) strand; PAM type: NRG; PAM sequence: AGG
gagaatgtgaaaaagctcag

SEQ ID NO: 38964 - DNA, 20 bp, Artificial Sequence
  Description of Artificial Sequence: Synthetic oligonucleotide
  Target: SCNA; (+) strand; PAM type: NRG; PAM sequence: GAG
gaatgtgaaaaagctcagag

SEQ ID NO: 38965 - DNA, 20 bp, Artificial Sequence
  Description of Artificial Sequence: Synthetic oligonucleotide
  Target: SCNA; (+) strand; PAM type: NRG; PAM sequence: AAG
gtgaaaaagctcagaggaga

SEQ ID NO: 38966 - DNA, 20 bp, Artificial Sequence
  Description of Artificial Sequence: Synthetic oligonucleotide
  Target: SCNA; (+) strand; PAM type: NRG; PAM sequence: AAG
aaaaagctcagaggagaaag

SEQ ID NO: 38967 - DNA, 20 bp, Artificial Sequence
  Description of Artificial Sequence: Synthetic oligonucleotide
  Target: SCNA; (+) strand; PAM type: NRG; PAM sequence: GAG
aaagctcagaggagaaagaa

SEQ ID NO: 38968 - DNA, 20 bp, Artificial Sequence
  Description of Artificial Sequence: Synthetic oligonucleotide
  Target: SCNA; (+) strand; PAM type: NRG; PAM sequence: GAG
agctcagaggagaaagaaga

SEQ ID NO: 38969 - DNA, 20 bp, Artificial Sequence
  Description of Artificial Sequence: Synthetic oligonucleotide
  Target: SCNA; (+) strand; PAM type: NRG; PAM sequence: AGG
gctcagaggagaaagaagag

SEQ ID NO: 38970 - DNA, 20 bp, Artificial Sequence
  Description of Artificial Sequence: Synthetic oligonucleotide
  Target: SCNA; (+) strand; PAM type: NRG; PAM sequence: AAG
cagaggagaaagaagagagg

SEQ ID NO: 38971 - DNA, 20 bp, Artificial Sequence
  Description of Artificial Sequence: Synthetic oligonucleotide
  Target: SCNA; (+) strand; PAM type: NRG; PAM sequence: TGG
gagaaagaagagaggaagaa

SEQ ID NO: 38972 - DNA, 20 bp, Artificial Sequence
  Description of Artificial Sequence: Synthetic oligonucleotide
  Target: SCNA; (+) strand; PAM type: NRG; PAM sequence: GGG
agaaagaagagaggaagaat

SEQ ID NO: 38973 - DNA, 20 bp, Artificial Sequence
  Description of Artificial Sequence: Synthetic oligonucleotide
  Target: SCNA; (+) strand; PAM type: NRG; PAM sequence: GAG
atgggcaatgtgtctgtgtt

SEQ ID NO: 38974 - DNA, 20 bp, Artificial Sequence
  Description of Artificial Sequence: Synthetic oligonucleotide
  Target: SCNA; (+) strand; PAM type: NRG; PAM sequence: TGG
agtgtgtgtgtctatgcctg

SEQ ID NO: 38975 - DNA, 20 bp, Artificial Sequence
  Description of Artificial Sequence: Synthetic oligonucleotide
  Target: SCNA; (+) strand; PAM type: NRG; PAM sequence: GAG
gtgtgtctatgcctgtggat

SEQ ID NO: 38976 - DNA, 20 bp, Artificial Sequence
  Description of Artificial Sequence: Synthetic oligonucleotide
  Target: SCNA; (+) strand; PAM type: NRG; PAM sequence: GAG
gtgtctatgcctgtggatga

SEQ ID NO: 38977 - DNA, 20 bp, Artificial Sequence
  Description of Artificial Sequence: Synthetic oligonucleotide
  Target: SCNA; (+) strand; PAM type: NRG; PAM sequence: AAG
gtgtgtgtctattcttttcc

SEQ ID NO: 38978 - DNA, 20 bp, Artificial Sequence
  Description of Artificial Sequence: Synthetic oligonucleotide
  Target: SCNA; (+) strand; PAM type: NRG; PAM sequence: AGG
tgtgtgtctattcttttcca

SEQ ID NO: 38979 - DNA, 20 bp, Artificial Sequence
  Description of Artificial Sequence: Synthetic oligonucleotide
  Target: SCNA; (+) strand; PAM type: NRG; PAM sequence: AAG
attcttttccaaggaattca

SEQ ID NO: 38980 - DNA, 20 bp, Artificial Sequence
  Description of Artificial Sequence: Synthetic oligonucleotide
  Target: SCNA; (+) strand; PAM type: NRG; PAM sequence: TGG
cttttccaaggaattcaaag

SEQ ID NO: 38981 - DNA, 20 bp, Artificial Sequence
  Description of Artificial Sequence: Synthetic oligonucleotide
  Target: SCNA; (+) strand; PAM type: NRG; PAM sequence: CAG
aaataacactcaattgaata

SEQ ID NO: 38982 - DNA, 20 bp, Artificial Sequence
  Description of Artificial Sequence: Synthetic oligonucleotide
  Target: SCNA; (+) strand; PAM type: NRG; PAM sequence: AAG
cactcaattgaatacagttc

SEQ ID NO: 38983 - DNA, 20 bp, Artificial Sequence
  Description of Artificial Sequence: Synthetic oligonucleotide
  Target: SCNA; (+) strand; PAM type: NRG; PAM sequence: CAG
attgaatacagttcaagtta

SEQ ID NO: 38984 - DNA, 20 bp, Artificial Sequence
  Description of Artificial Sequence: Synthetic oligonucleotide
  Target: SCNA; (+) strand; PAM type: NRG; PAM sequence: AAG
atacagttcaagttacagaa

SEQ ID NO: 38985 - DNA, 20 bp, Artificial Sequence
  Description of Artificial Sequence: Synthetic oligonucleotide
  Target: SCNA; (+) strand; PAM type: NRG; PAM sequence: GAG
acagttcaagttacagaaaa

SEQ ID NO: 38986 - DNA, 20 bp, Artificial Sequence
  Description of Artificial Sequence: Synthetic oligonucleotide
  Target: SCNA; (+) strand; PAM type: NRG; PAM sequence: GAG
agttcaagttacagaaaaga

SEQ ID NO: 38987 - DNA, 20 bp, Artificial Sequence
  Description of Artificial Sequence: Synthetic oligonucleotide
  Target: SCNA; (+) strand; PAM type: NRG; PAM sequence: CAG
caagttacagaaaagagagt

SEQ ID NO: 38988 - DNA, 20 bp, Artificial Sequence
  Description of Artificial Sequence: Synthetic oligonucleotide
  Target: SCNA; (+) strand; PAM type: NRG; PAM sequence: GAG
agttacagaaaagagagtca

SEQ ID NO: 38989 - DNA, 20 bp, Artificial Sequence
  Description of Artificial Sequence: Synthetic oligonucleotide
  Target: SCNA; (+) strand; PAM type: NRG; PAM sequence: TGG
cagaaaagagagtcagagtt

SEQ ID NO: 38990 - DNA, 20 bp, Artificial Sequence
  Description of Artificial Sequence: Synthetic oligonucleotide
  Target: SCNA; (+) strand; PAM type: NRG; PAM sequence: GGG
agaaaagagagtcagagttt

SEQ ID NO: 38991 - DNA, 20 bp, Artificial Sequence
  Description of Artificial Sequence: Synthetic oligonucleotide
  Target: SCNA; (+) strand; PAM type: NRG; PAM sequence: AAG
agagtttgggtgtatacccc

SEQ ID NO: 38992 - DNA, 20 bp, Artificial Sequence
  Description of Artificial Sequence: Synthetic oligonucleotide
  Target: SCNA; (+) strand; PAM type: NRG; PAM sequence: AGG
gagtttgggtgtatacccca

SEQ ID NO: 38993 - DNA, 20 bp, Artificial Sequence
  Description of Artificial Sequence: Synthetic oligonucleotide
  Target: SCNA; (+) strand; PAM type: NRG; PAM sequence: TGG
tttgggtgtataccccaagg

SEQ ID NO: 38994 - DNA, 20 bp, Artificial Sequence
  Description of Artificial Sequence: Synthetic oligonucleotide
  Target: SCNA; (+) strand; PAM type: NRG; PAM sequence: TAG
tataccccaaggtggaactt

SEQ ID NO: 38995 - DNA, 20 bp, Artificial Sequence
  Description of Artificial Sequence: Synthetic oligonucleotide
  Target: SCNA; (+) strand; PAM type: NRG; PAM sequence: AGG
ataccccaaggtggaacttt

SEQ ID NO: 38996 - DNA, 20 bp, Artificial Sequence
  Description of Artificial Sequence: Synthetic oligonucleotide
  Target: SCNA; (+) strand; PAM type: NRG; PAM sequence: AAG
caaggtggaactttaggaac

SEQ ID NO: 38997 - DNA, 20 bp, Artificial Sequence
  Description of Artificial Sequence: Synthetic oligonucleotide
  Target: SCNA; (+) strand; PAM type: NRG; PAM sequence: TAG
ggtggaactttaggaacaag

SEQ ID NO: 38998 - DNA, 20 bp, Artificial Sequence
  Description of Artificial Sequence: Synthetic oligonucleotide
  Target: SCNA; (+) strand; PAM type: NRG; PAM sequence: AGG
gtggaactttaggaacaagt

SEQ ID NO: 38999 - DNA, 20 bp, Artificial Sequence
  Description of Artificial Sequence: Synthetic oligonucleotide
  Target: SCNA; (+) strand; PAM type: NRG; PAM sequence: AAG
tttaggaacaagtaggtaat

SEQ ID NO: 39000 - DNA, 20 bp, Artificial Sequence
  Description of Artificial Sequence: Synthetic oligonucleotide
  Target: SCNA; (+) strand; PAM type: NRG; PAM sequence: TAG
catcaatttctttattcttt

SEQ ID NO: 39001 - DNA, 20 bp, Artificial Sequence
  Description of Artificial Sequence: Synthetic oligonucleotide
  Target: SCNA; (+) strand; PAM type: NRG; PAM sequence: TGG
ttagtatgtgtgtcatttga

SEQ ID NO: 39002 - DNA, 20 bp, Artificial Sequence
  Description of Artificial Sequence: Synthetic oligonucleotide
  Target: SCNA; (+) strand; PAM type: NRG; PAM sequence: GAG
tgaactatacaaatgtttct

SEQ ID NO: 39003 - DNA, 20 bp, Artificial Sequence
  Description of Artificial Sequence: Synthetic oligonucleotide
  Target: SCNA; (+) strand; PAM type: NRG; PAM sequence: GAG
aactatacaaatgtttctga

SEQ ID NO: 39004 - DNA, 20 bp, Artificial Sequence
  Description of Artificial Sequence: Synthetic oligonucleotide
  Target: SCNA; (+) strand; PAM type: NRG; PAM sequence: TAG
tacaaatgtttctgagagat

SEQ ID NO: 39005 - DNA, 20 bp, Artificial Sequence
  Description of Artificial Sequence: Synthetic oligonucleotide
  Target: SCNA; (+) strand; PAM type: NRG; PAM sequence: TAG
aaatgtttctgagagattag

SEQ ID NO: 39006 - DNA, 20 bp, Artificial Sequence
  Description of Artificial Sequence: Synthetic oligonucleotide
  Target: SCNA; (+) strand; PAM type: NRG; PAM sequence: CAG
tgtttctgagagattagtag

SEQ ID NO: 39007 - DNA, 20 bp, Artificial Sequence
  Description of Artificial Sequence: Synthetic oligonucleotide
  Target: SCNA; (+) strand; PAM type: NRG; PAM sequence: AAG
agagattagtagcagccctc

SEQ ID NO: 39008 - DNA, 20 bp, Artificial Sequence
  Description of Artificial Sequence: Synthetic oligonucleotide
  Target: SCNA; (+) strand; PAM type: NRG; PAM sequence: CAG
caagcacttttctctgtcct

SEQ ID NO: 39009 - DNA, 20 bp, Artificial Sequence
  Description of Artificial Sequence: Synthetic oligonucleotide
  Target: SCNA; (+) strand; PAM type: NRG; PAM sequence: CAG
ttctctgtcctcagtgttca

SEQ ID NO: 39010 - DNA, 20 bp, Artificial Sequence
  Description of Artificial Sequence: Synthetic oligonucleotide
  Target: SCNA; (+) strand; PAM type: NRG; PAM sequence: GAG
ctctgtcctcagtgttcaca

SEQ ID NO: 39011 - DNA, 20 bp, Artificial Sequence
  Description of Artificial Sequence: Synthetic oligonucleotide
  Target: SCNA; (+) strand; PAM type: NRG; PAM sequence: AAG
agagaccaaatgatcacatg

SEQ ID NO: 39012 - DNA, 20 bp, Artificial Sequence
  Description of Artificial Sequence: Synthetic oligonucleotide
  Target: SCNA; (+) strand; PAM type: NRG; PAM sequence: AAG
cacatgaagtaactctatca

SEQ ID NO: 39013 - DNA, 20 bp, Artificial Sequence
  Description of Artificial Sequence: Synthetic oligonucleotide
  Target: SCNA; (+) strand; PAM type: NRG; PAM sequence: TAG
ctaatctgttctttccattt

SEQ ID NO: 39014 - DNA, 20 bp, Artificial Sequence
  Description of Artificial Sequence: Synthetic oligonucleotide
  Target: SCNA; (+) strand; PAM type: NRG; PAM sequence: AGG
taatctgttctttccatttt

SEQ ID NO: 39015 - DNA, 20 bp, Artificial Sequence
  Description of Artificial Sequence: Synthetic oligonucleotide
  Target: SCNA; (+) strand; PAM type: NRG; PAM sequence: GGG
aatctgttctttccatttta

SEQ ID NO: 39016 - DNA, 20 bp, Artificial Sequence
  Description of Artificial Sequence: Synthetic oligonucleotide
  Target: SCNA; (+) strand; PAM type: NRG; PAM sequence: TAG
ttccattttagggccacaaa

SEQ ID NO: 39017 - DNA, 20 bp, Artificial Sequence
  Description of Artificial Sequence: Synthetic oligonucleotide
  Target: SCNA; (+) strand; PAM type: NRG; PAM sequence: AGG
tccattttagggccacaaat

SEQ ID NO: 39018 - DNA, 20 bp, Artificial Sequence
  Description of Artificial Sequence: Synthetic oligonucleotide
  Target: SCNA; (+) strand; PAM type: NRG; PAM sequence: CAG
aggtctctttatacacatca

SEQ ID NO: 39019 - DNA, 20 bp, Artificial Sequence
  Description of Artificial Sequence: Synthetic oligonucleotide
  Target: SCNA; (+) strand; PAM type: NRG; PAM sequence: AGG
ggtctctttatacacatcac

SEQ ID NO: 39020 - DNA, 20 bp, Artificial Sequence
  Description of Artificial Sequence: Synthetic oligonucleotide
  Target: SCNA; (+) strand; PAM type: NRG; PAM sequence: GGG
gtctctttatacacatcaca

SEQ ID NO: 39021 - DNA, 20 bp, Artificial Sequence
  Description of Artificial Sequence: Synthetic oligonucleotide
  Target: SCNA; (+) strand; PAM type: NRG; PAM sequence: GGG
tctctttatacacatcacag

SEQ ID NO: 39022 - DNA, 20 bp, Artificial Sequence
  Description of Artificial Sequence: Synthetic oligonucleotide
  Target: SCNA; (+) strand; PAM type: NRG; PAM sequence: AAG
cacatcacaggggcatatca

SEQ ID NO: 39023 - DNA, 20 bp, Artificial Sequence
  Description of Artificial Sequence: Synthetic oligonucleotide
  Target: SCNA; (+) strand; PAM type: NRG; PAM sequence: CAG
caaagtcatattttaaaaat

SEQ ID NO: 39024 - DNA, 20 bp, Artificial Sequence
  Description of Artificial Sequence: Synthetic oligonucleotide
  Target: SCNA; (+) strand; PAM type: NRG; PAM sequence: TGG
tcatattttaaaaatcagaa

SEQ ID NO: 39025 - DNA, 20 bp, Artificial Sequence
  Description of Artificial Sequence: Synthetic oligonucleotide
  Target: SCNA; (+) strand; PAM type: NRG; PAM sequence: TGG
ttgacaaacatttttcatga

SEQ ID NO: 39026 - DNA, 20 bp, Artificial Sequence
  Description of Artificial Sequence: Synthetic oligonucleotide
  Target: SCNA; (+) strand; PAM type: NRG; PAM sequence: AAG
aacatttttcatgatggtaa

SEQ ID NO: 39027 - DNA, 20 bp, Artificial Sequence
  Description of Artificial Sequence: Synthetic oligonucleotide
  Target: SCNA; (+) strand; PAM type: NRG; PAM sequence: CAG
catgatggtaaaagaaatca

SEQ ID NO: 39028 - DNA, 20 bp, Artificial Sequence
  Description of Artificial Sequence: Synthetic oligonucleotide
  Target: SCNA; (+) strand; PAM type: NRG; PAM sequence: AAG
catcaatgattttgattctt

SEQ ID NO: 39029 - DNA, 20 bp, Artificial Sequence
  Description of Artificial Sequence: Synthetic oligonucleotide
  Target: SCNA; (+) strand; PAM type: NRG; PAM sequence: AAG
tattcttgattattttttaa

SEQ ID NO: 39030 - DNA, 20 bp, Artificial Sequence
  Description of Artificial Sequence: Synthetic oligonucleotide
  Target: SCNA; (+) strand; PAM type: NRG; PAM sequence: GAG
attattttttaaaagactat

SEQ ID NO: 39031 - DNA, 20 bp, Artificial Sequence
  Description of Artificial Sequence: Synthetic oligonucleotide
  Target: SCNA; (+) strand; PAM type: NRG; PAM sequence: TAG
tttaaaactgttctctgaaa

SEQ ID NO: 39032 - DNA, 20 bp, Artificial Sequence
  Description of Artificial Sequence: Synthetic oligonucleotide
  Target: SCNA; (+) strand; PAM type: NRG; PAM sequence: TAG
ttctctgaaatagaattatg

SEQ ID NO: 39033 - DNA, 20 bp, Artificial Sequence
  Description of Artificial Sequence: Synthetic oligonucleotide
  Target: SCNA; (+) strand; PAM type: NRG; PAM sequence: AGG
tctctgaaatagaattatgt

SEQ ID NO: 39034 - DNA, 20 bp, Artificial Sequence
  Description of Artificial Sequence: Synthetic oligonucleotide
  Target: SCNA; (+) strand; PAM type: NRG; PAM sequence: CAG
gaaatagaattatgtaggta

SEQ ID NO: 39035 - DNA, 20 bp, Artificial Sequence
  Description of Artificial Sequence: Synthetic oligonucleotide
  Target: SCNA; (+) strand; PAM type: NRG; PAM sequence: AAG
cagaaacattcatttttaaa

SEQ ID NO: 39036 - DNA, 20 bp, Artificial Sequence
  Description of Artificial Sequence: Synthetic oligonucleotide
  Target: SCNA; (+) strand; PAM type: NRG; PAM sequence: TAG
ttttaaaaagtcataaatat

SEQ ID NO: 39037 - DNA, 20 bp, Artificial Sequence
  Description of Artificial Sequence: Synthetic oligonucleotide
  Target: SCNA; (+) strand; PAM type: NRG; PAM sequence: AGG
tttaaaaagtcataaatatt

SEQ ID NO: 39038 - DNA, 20 bp, Artificial Sequence
  Description of Artificial Sequence: Synthetic oligonucleotide
  Target: SCNA; (+) strand; PAM type: NRG; PAM sequence: GGG
ttaaaaagtcataaatatta

SEQ ID NO: 39039 - DNA, 20 bp, Artificial Sequence
  Description of Artificial Sequence: Synthetic oligonucleotide
  Target: SCNA; (+) strand; PAM type: NRG; PAM sequence: TGG
ttagggcaaaattaaaaatc

SEQ ID NO: 39040 - DNA, 20 bp, Artificial Sequence
  Description of Artificial Sequence: Synthetic oligonucleotide
  Target: SCNA; (+) strand; PAM type: NRG; PAM sequence: AAG
gcaaaattaaaaatctggaa

SEQ ID NO: 39041 - DNA, 20 bp, Artificial Sequence
  Description of Artificial Sequence: Synthetic oligonucleotide
  Target: SCNA; (+) strand; PAM type: NRG; PAM sequence: CAG
taaaaatctggaaaagcaaa

SEQ ID NO: 39042 - DNA, 20 bp, Artificial Sequence
  Description of Artificial Sequence: Synthetic oligonucleotide
  Target: SCNA; (+) strand; PAM type: NRG; PAM sequence: TAG
acagtcgcattttttactat

SEQ ID NO: 39043 - DNA, 20 bp, Artificial Sequence
  Description of Artificial Sequence: Synthetic oligonucleotide
  Target: SCNA; (+) strand; PAM type: NRG; PAM sequence: CAG
acctacacatacctctgact

SEQ ID NO: 39044 - DNA, 20 bp, Artificial Sequence
  Description of Artificial Sequence: Synthetic oligonucleotide
  Target: SCNA; (+) strand; PAM type: NRG; PAM sequence: AAG
actcagtccacctttttgac

SEQ ID NO: 39045 - DNA, 20 bp, Artificial Sequence
  Description of Artificial Sequence: Synthetic oligonucleotide
  Target: SCNA; (+) strand; PAM type: NRG; PAM sequence: AAG
caatgatgcaaaaatgaatc

SEQ ID NO: 39046 - DNA, 20 bp, Artificial Sequence
  Description of Artificial Sequence: Synthetic oligonucleotide
  Target: SCNA; (+) strand; PAM type: NRG; PAM sequence: GAG
atgatgcaaaaatgaatcaa

SEQ ID NO: 39047 - DNA, 20 bp, Artificial Sequence
  Description of Artificial Sequence: Synthetic oligonucleotide
  Target: SCNA; (+) strand; PAM type: NRG; PAM sequence: GAG
gatgcaaaaatgaatcaaga

SEQ ID NO: 39048 - DNA, 20 bp, Artificial Sequence
  Description of Artificial Sequence: Synthetic oligonucleotide
  Target: SCNA; (+) strand; PAM type: NRG; PAM sequence: GAG
tgcaaaaatgaatcaagaga

SEQ ID NO: 39049 - DNA, 20 bp, Artificial Sequence
  Description of Artificial Sequence: Synthetic oligonucleotide
  Target: SCNA; (+) strand; PAM type: NRG; PAM sequence: CAG
gaatcaagagagagaactac

SEQ ID NO: 39050 - DNA, 20 bp, Artificial Sequence
  Description of Artificial Sequence: Synthetic oligonucleotide
  Target: SCNA; (+) strand; PAM type: NRG; PAM sequence: TAG
gagagagaactaccagcatt

SEQ ID NO: 39051 - DNA, 20 bp, Artificial Sequence
  Description of Artificial Sequence: Synthetic oligonucleotide
  Target: SCNA; (+) strand; PAM type: NRG; PAM sequence: GAG
gagagaactaccagcattta

SEQ ID NO: 39052 - DNA, 20 bp, Artificial Sequence
  Description of Artificial Sequence: Synthetic oligonucleotide
  Target: SCNA; (+) strand; PAM type: NRG; PAM sequence: AAG
ctaacccatcactcatgaac

SEQ ID NO: 39053 - DNA, 20 bp, Artificial Sequence
  Description of Artificial Sequence: Synthetic oligonucleotide
  Target: SCNA; (+) strand; PAM type: NRG; PAM sequence: TGG
acaagcaccaaactgacatt

SEQ ID NO: 39054 - DNA, 20 bp, Artificial Sequence
  Description of Artificial Sequence: Synthetic oligonucleotide
  Target: SCNA; (+) strand; PAM type: NRG; PAM sequence: GGG
caagcaccaaactgacattt

SEQ ID NO: 39055 - DNA, 20 bp, Artificial Sequence
  Description of Artificial Sequence: Synthetic oligonucleotide
  Target: SCNA; (+) strand; PAM type: NRG; PAM sequence: GGG
aagcaccaaactgacatttg

SEQ ID NO: 39056 - DNA, 20 bp, Artificial Sequence
  Description of Artificial Sequence: Synthetic oligonucleotide
  Target: SCNA; (+) strand; PAM type: NRG; PAM sequence: TAG
ttggggtttacctacctaca

SEQ ID NO: 39057 - DNA, 20 bp, Artificial Sequence
  Description of Artificial Sequence: Synthetic oligonucleotide
  Target: SCNA; (+) strand; PAM type: NRG; PAM sequence: GAG
ggggtttacctacctacata

SEQ ID NO: 39058 - DNA, 20 bp, Artificial Sequence
  Description of Artificial Sequence: Synthetic oligonucleotide
  Target: SCNA; (+) strand; PAM type: NRG; PAM sequence: TGG
tgcttctgccacaccctgtt

SEQ ID NO: 39059 - DNA, 20 bp, Artificial Sequence
  Description of Artificial Sequence: Synthetic oligonucleotide
  Target: SCNA; (+) strand; PAM type: NRG; PAM sequence: CAG
cacaccctgtttggttttct

SEQ ID NO: 39060 - DNA, 20 bp, Artificial Sequence
  Description of Artificial Sequence: Synthetic oligonucleotide
  Target: SCNA; (+) strand; PAM type: NRG; PAM sequence: CAG
accctgtttggttttctcag

SEQ ID NO: 39061 - DNA, 20 bp, Artificial Sequence
  Description of Artificial Sequence: Synthetic oligonucleotide
  Target: SCNA; (+) strand; PAM type: NRG; PAM sequence: CAG
ctgtttggttttctcagcag

SEQ ID NO: 39062 - DNA, 20 bp, Artificial Sequence
  Description of Artificial Sequence: Synthetic oligonucleotide
  Target: SCNA; (+) strand; PAM type: NRG; PAM sequence: TGG
agcagccacaactccctcct

SEQ ID NO: 39063 - DNA, 20 bp, Artificial Sequence
  Description of Artificial Sequence: Synthetic oligonucleotide
  Target: SCNA; (+) strand; PAM type: NRG; PAM sequence: AAG
actccctccttggcctttga

SEQ ID NO: 39064 - DNA, 20 bp, Artificial Sequence
  Description of Artificial Sequence: Synthetic oligonucleotide
  Target: SCNA; (+) strand; PAM type: NRG; PAM sequence: TGG
tcctttcatgaatacatcca

SEQ ID NO: 39065 - DNA, 20 bp, Artificial Sequence
  Description of Artificial Sequence: Synthetic oligonucleotide
  Target: SCNA; (+) strand; PAM type: NRG; PAM sequence: TGG
tgaattcctttacaccacac

SEQ ID NO: 39066 - DNA, 20 bp, Artificial Sequence
  Description of Artificial Sequence: Synthetic oligonucleotide
  Target: SCNA; (+) strand; PAM type: NRG; PAM sequence: GAG
acataaaatacactttgaat

SEQ ID NO: 39067 - DNA, 20 bp, Artificial Sequence
  Description of Artificial Sequence: Synthetic oligonucleotide
  Target: SCNA; (+) strand; PAM type: NRG; PAM sequence: CGG
acactttgaatgagaacttt

SEQ ID NO: 39068 - DNA, 20 bp, Artificial Sequence
  Description of Artificial Sequence: Synthetic oligonucleotide
  Target: SCNA; (+) strand; PAM type: NRG; PAM sequence: GGG
cactttgaatgagaactttc

SEQ ID NO: 39069 - DNA, 20 bp, Artificial Sequence
  Description of Artificial Sequence: Synthetic oligonucleotide
  Target: SCNA; (+) strand; PAM type: NRG; PAM sequence: GGG
actttgaatgagaactttcg

SEQ ID NO: 39070 - DNA, 20 bp, Artificial Sequence
  Description of Artificial Sequence: Synthetic oligonucleotide
  Target: SCNA; (+) strand; PAM type: NRG; PAM sequence: GAG
aaaaaacactgaaaaatcat

SEQ ID NO: 39071 - DNA, 20 bp, Artificial Sequence
  Description of Artificial Sequence: Synthetic oligonucleotide
  Target: SCNA; (+) strand; PAM type: NRG; PAM sequence: AAG
aaatcatgagaaaccctcca

SEQ ID NO: 39072 - DNA, 20 bp, Artificial Sequence
  Description of Artificial Sequence: Synthetic oligonucleotide
  Target: SCNA; (+) strand; PAM type: NRG; PAM sequence: GAG
tgagaaaccctccaaagtgt

SEQ ID NO: 39073 - DNA, 20 bp, Artificial Sequence
  Description of Artificial Sequence: Synthetic oligonucleotide
  Target: SCNA; (+) strand; PAM type: NRG; PAM sequence: AAG
ccaaagtgtgagactctttt

SEQ ID NO: 39074 - DNA, 20 bp, Artificial Sequence
  Description of Artificial Sequence: Synthetic oligonucleotide
  Target: SCNA; (+) strand; PAM type: NRG; PAM sequence: TGG
gtgtacactcatttaaccat

SEQ ID NO: 39075 - DNA, 20 bp, Artificial Sequence
  Description of Artificial Sequence: Synthetic oligonucleotide
  Target: SCNA; (+) strand; PAM type: NRG; PAM sequence: AAG
actcatttaaccattggaca

SEQ ID NO: 39076 - DNA, 20 bp, Artificial Sequence
  Description of Artificial Sequence: Synthetic oligonucleotide
  Target: SCNA; (+) strand; PAM type: NRG; PAM sequence: CAG
catttaaccattggacaaag

SEQ ID NO: 39077 - DNA, 20 bp, Artificial Sequence
  Description of Artificial Sequence: Synthetic oligonucleotide
  Target: SCNA; (+) strand; PAM type: NRG; PAM sequence: TAG
ttggacaaagcagacatttt

SEQ ID NO: 39078 - DNA, 20 bp, Artificial Sequence
  Description of Artificial Sequence: Synthetic oligonucleotide
  Target: SCNA; (+) strand; PAM type: NRG; PAM sequence: TGG
aaagcagacatttttagctc

SEQ ID NO: 39079 - DNA, 20 bp, Artificial Sequence
  Description of Artificial Sequence: Synthetic oligonucleotide
  Target: SCNA; (+) strand; PAM type: NRG; PAM sequence: TAG
tagctctggcattaaaaatt

SEQ ID NO: 39080 - DNA, 20 bp, Artificial Sequence
  Description of Artificial Sequence: Synthetic oligonucleotide
  Target: SCNA; (+) strand; PAM type: NRG; PAM sequence: TGG
ttagcatctcccatccatct

SEQ ID NO: 39081 - DNA, 20 bp, Artificial Sequence
  Description of Artificial Sequence: Synthetic oligonucleotide
  Target: SCNA; (+) strand; PAM type: NRG; PAM sequence: TAG
catctcccatccatcttggc

SEQ ID NO: 39082 - DNA, 20 bp, Artificial Sequence
  Description of Artificial Sequence: Synthetic oligonucleotide
  Target: SCNA; (+) strand; PAM type: NRG; PAM sequence: AAG
ccatccatcttggctagtaa

SEQ ID NO: 39083 - DNA, 20 bp, Artificial Sequence
  Description of Artificial Sequence: Synthetic oligonucleotide
  Target: SCNA; (+) strand; PAM type: NRG; PAM sequence: TAG
catcttggctagtaaaagtc

SEQ ID NO: 39084 - DNA, 20 bp, Artificial Sequence
  Description of Artificial Sequence: Synthetic oligonucleotide
  Target: SCNA; (+) strand; PAM type: NRG; PAM sequence: CGG
aaagtctagccacctaacca

SEQ ID NO: 39085 - DNA, 20 bp, Artificial Sequence
  Description of Artificial Sequence: Synthetic oligonucleotide
  Target: SCNA; (+) strand; PAM type: NRG; PAM sequence: TAG
ctagccacctaaccacggat

SEQ ID NO: 39086 - DNA, 20 bp, Artificial Sequence
  Description of Artificial Sequence: Synthetic oligonucleotide
  Target: SCNA; (+) strand; PAM type: NRG; PAM sequence: AGG
tagccacctaaccacggatt

SEQ ID NO: 39087 - DNA, 20 bp, Artificial Sequence
  Description of Artificial Sequence: Synthetic oligonucleotide
  Target: SCNA; (+) strand; PAM type: NRG; PAM sequence: GAG
cggattaggatgaatcctct

SEQ ID NO: 39088 - DNA, 20 bp, Artificial Sequence
  Description of Artificial Sequence: Synthetic oligonucleotide
  Target: SCNA; (+) strand; PAM type: NRG; PAM sequence: CAG
gagttgttattactgcattt

SEQ ID NO: 39089 - DNA, 20 bp, Artificial Sequence
  Description of Artificial Sequence: Synthetic oligonucleotide
  Target: SCNA; (+) strand; PAM type: NRG; PAM sequence: AAG
ttgttattactgcatttcag

SEQ ID NO: 39090 - DNA, 20 bp, Artificial Sequence
  Description of Artificial Sequence: Synthetic oligonucleotide
  Target: SCNA; (+) strand; PAM type: NRG; PAM sequence: TGG
ttattactgcatttcagaag

SEQ ID NO: 39091 - DNA, 20 bp, Artificial Sequence
  Description of Artificial Sequence: Synthetic oligonucleotide
  Target: SCNA; (+) strand; PAM type: NRG; PAM sequence: GAG
attactgcatttcagaagtg

SEQ ID NO: 39092 - DNA, 20 bp, Artificial Sequence
  Description of Artificial Sequence: Synthetic oligonucleotide
  Target: SCNA; (+) strand; PAM type: NRG; PAM sequence: AAG
cagaagtggagttgcatgaa

SEQ ID NO: 39093 - DNA, 20 bp, Artificial Sequence
  Description of Artificial Sequence: Synthetic oligonucleotide
  Target: SCNA; (+) strand; PAM type: NRG; PAM sequence: CGG
taaccccttttttaaattcc

SEQ ID NO: 39094 - DNA, 20 bp, Artificial Sequence
  Description of Artificial Sequence: Synthetic oligonucleotide
  Target: SCNA; (+) strand; PAM type: NRG; PAM sequence: GGG
aaccccttttttaaattccc

SEQ ID NO: 39095 - DNA, 20 bp, Artificial Sequence
  Description of Artificial Sequence: Synthetic oligonucleotide
  Target: SCNA; (+) strand; PAM type: NRG; PAM sequence: GGG
accccttttttaaattcccg

SEQ ID NO: 39096 - DNA, 20 bp, Artificial Sequence
  Description of Artificial Sequence: Synthetic oligonucleotide
  Target: SCNA; (+) strand; PAM type: NRG; PAM sequence: AAG
ttttaaattcccggggtcta

SEQ ID NO: 39097 - DNA, 20 bp, Artificial Sequence
  Description of Artificial Sequence: Synthetic oligonucleotide
  Target: SCNA; (+) strand; PAM type: NRG; PAM sequence: AGG
tttaaattcccggggtctaa

SEQ ID NO: 39098 - DNA, 20 bp, Artificial Sequence
  Description of Artificial Sequence: Synthetic oligonucleotide
  Target: SCNA; (+) strand; PAM type: NRG; PAM sequence: GGG
ttaaattcccggggtctaaa

SEQ ID NO: 39099 - DNA, 20 bp, Artificial Sequence
  Description of Artificial Sequence: Synthetic oligonucleotide
  Target: SCNA; (+) strand; PAM type: NRG; PAM sequence: CAG
tcccggggtctaaagggtaa

SEQ ID NO: 39100 - DNA, 20 bp, Artificial Sequence
  Description of Artificial Sequence: Synthetic oligonucleotide
  Target: SCNA; (+) strand; PAM type: NRG; PAM sequence: GAG
ggtctaaagggtaacagtat

SEQ ID NO: 39101 - DNA, 20 bp, Artificial Sequence
  Description of Artificial Sequence: Synthetic oligonucleotide
  Target: SCNA; (+) strand; PAM type: NRG; PAM sequence: TAG
taaagggtaacagtatgagt

SEQ ID NO: 39102 - DNA, 20 bp, Artificial Sequence
  Description of Artificial Sequence: Synthetic oligonucleotide
  Target: SCNA; (+) strand; PAM type: NRG; PAM sequence: AAG
agggtaacagtatgagttag

SEQ ID NO: 39103 - DNA, 20 bp, Artificial Sequence
  Description of Artificial Sequence: Synthetic oligonucleotide
  Target: SCNA; (+) strand; PAM type: NRG; PAM sequence: TGG
aacagtatgagttagaagca

SEQ ID NO: 39104 - DNA, 20 bp, Artificial Sequence
  Description of Artificial Sequence: Synthetic oligonucleotide
  Target: SCNA; (+) strand; PAM type: NRG; PAM sequence: AAG
agtatgagttagaagcatgg

SEQ ID NO: 39105 - DNA, 20 bp, Artificial Sequence
  Description of Artificial Sequence: Synthetic oligonucleotide
  Target: SCNA; (+) strand; PAM type: NRG; PAM sequence: TGG
tgagttagaagcatggaagc

SEQ ID NO: 39106 - DNA, 20 bp, Artificial Sequence
  Description of Artificial Sequence: Synthetic oligonucleotide
  Target: SCNA; (+) strand; PAM type: NRG; PAM sequence: GAG
agttagaagcatggaagctg

SEQ ID NO: 39107 - DNA, 20 bp, Artificial Sequence
  Description of Artificial Sequence: Synthetic oligonucleotide
  Target: SCNA; (+) strand; PAM type: NRG; PAM sequence: AGG
gttagaagcatggaagctgg

SEQ ID NO: 39108 - DNA, 20 bp, Artificial Sequence
  Description of Artificial Sequence: Synthetic oligonucleotide
  Target: SCNA; (+) strand; PAM type: NRG; PAM sequence: TAG
aagcatggaagctggaggct

SEQ ID NO: 39109 - DNA, 20 bp, Artificial Sequence
  Description of Artificial Sequence: Synthetic oligonucleotide
  Target: SCNA; (+) strand; PAM type: NRG; PAM sequence: AGG
agcatggaagctggaggctt

SEQ ID NO: 39110 - DNA, 20 bp, Artificial Sequence
  Description of Artificial Sequence: Synthetic oligonucleotide
  Target: SCNA; (+) strand; PAM type: NRG; PAM sequence: GGG
gcatggaagctggaggctta

SEQ ID NO: 39111 - DNA, 20 bp, Artificial Sequence
  Description of Artificial Sequence: Synthetic oligonucleotide
  Target: SCNA; (+) strand; PAM type: NRG; PAM sequence: CAG
ggaagctggaggcttagggt

SEQ ID NO: 39112 - DNA, 20 bp, Artificial Sequence
  Description of Artificial Sequence: Synthetic oligonucleotide
  Target: SCNA; (+) strand; PAM type: NRG; PAM sequence: AGG
gaagctggaggcttagggtc

SEQ ID NO: 39113 - DNA, 20 bp, Artificial Sequence
  Description of Artificial Sequence: Synthetic oligonucleotide
  Target: SCNA; (+) strand; PAM type: NRG; PAM sequence: GGG
aagctggaggcttagggtca

SEQ ID NO: 39114 - DNA, 20 bp, Artificial Sequence
  Description of Artificial Sequence: Synthetic oligonucleotide
  Target: SCNA; (+) strand; PAM type: NRG; PAM sequence: GGG
agctggaggcttagggtcag

SEQ ID NO: 39115 - DNA, 20 bp, Artificial Sequence
  Description of Artificial Sequence: Synthetic oligonucleotide
  Target: SCNA; (+) strand; PAM type: NRG; PAM sequence: CAG
ggtatccttaacatgaatcc

SEQ ID NO: 39116 - DNA, 20 bp, Artificial Sequence
  Description of Artificial Sequence: Synthetic oligonucleotide
  Target: SCNA; (+) strand; PAM type: NRG; PAM sequence: AAG
atccttaacatgaatcccag

SEQ ID NO: 39117 - DNA, 20 bp, Artificial Sequence
  Description of Artificial Sequence: Synthetic oligonucleotide
  Target: SCNA; (+) strand; PAM type: NRG; PAM sequence: AAG
cttaacatgaatcccagaag

SEQ ID NO: 39118 - DNA, 20 bp, Artificial Sequence
  Description of Artificial Sequence: Synthetic oligonucleotide
  Target: SCNA; (+) strand; PAM type: NRG; PAM sequence: AGG
ttaacatgaatcccagaaga

SEQ ID NO: 39119 - DNA, 20 bp, Artificial Sequence
  Description of Artificial Sequence: Synthetic oligonucleotide
  Target: SCNA; (+) strand; PAM type: NRG; PAM sequence: CAG
gaatcccagaagaaggctaa

SEQ ID NO: 39120 - DNA, 20 bp, Artificial Sequence
  Description of Artificial Sequence: Synthetic oligonucleotide
  Target: SCNA; (+) strand; PAM type: NRG; PAM sequence: AGG
aatcccagaagaaggctaac

SEQ ID NO: 39121 - DNA, 20 bp, Artificial Sequence
  Description of Artificial Sequence: Synthetic oligonucleotide
  Target: SCNA; (+) strand; PAM type: NRG; PAM sequence: TGG
gaagaaggctaacaggttga

SEQ ID NO: 39122 - DNA, 20 bp, Artificial Sequence
  Description of Artificial Sequence: Synthetic oligonucleotide
  Target: SCNA; (+) strand; PAM type: NRG; PAM sequence: TGG
gaaggctaacaggttgatgg

SEQ ID NO: 39123 - DNA, 20 bp, Artificial Sequence
  Description of Artificial Sequence: Synthetic oligonucleotide
  Target: SCNA; (+) strand; PAM type: NRG; PAM sequence: AAG
gctaacaggttgatggtgga

SEQ ID NO: 39124 - DNA, 20 bp, Artificial Sequence
  Description of Artificial Sequence: Synthetic oligonucleotide
  Target: SCNA; (+) strand; PAM type: NRG; PAM sequence: AGG
ctaacaggttgatggtggaa

SEQ ID NO: 39125 - DNA, 20 bp, Artificial Sequence
  Description of Artificial Sequence: Synthetic oligonucleotide
  Target: SCNA; (+) strand; PAM type: NRG; PAM sequence: TAG
aggttgatggtggaaaggcg

SEQ ID NO: 39126 - DNA, 20 bp, Artificial Sequence
  Description of Artificial Sequence: Synthetic oligonucleotide
  Target: SCNA; (+) strand; PAM type: NRG; PAM sequence: AGG
ggttgatggtggaaaggcgt

SEQ ID NO: 39127 - DNA, 20 bp, Artificial Sequence
  Description of Artificial Sequence: Synthetic oligonucleotide
  Target: SCNA; (+) strand; PAM type: NRG; PAM sequence: CAG
tggtggaaaggcgtaggcaa

SEQ ID NO: 39128 - DNA, 20 bp, Artificial Sequence
  Description of Artificial Sequence: Synthetic oligonucleotide
  Target: SCNA; (+) strand; PAM type: NRG; PAM sequence: CGG
aacagaactaactgctcact

SEQ ID NO: 39129 - DNA, 20 bp, Artificial Sequence
  Description of Artificial Sequence: Synthetic oligonucleotide
  Target: SCNA; (+) strand; PAM type: NRG; PAM sequence: GGG
acagaactaactgctcactc

SEQ ID NO: 39130 - DNA, 20 bp, Artificial Sequence
  Description of Artificial Sequence: Synthetic oligonucleotide
  Target: SCNA; (+) strand; PAM type: NRG; PAM sequence: GGG
cagaactaactgctcactcg

SEQ ID NO: 39131 - DNA, 20 bp, Artificial Sequence
  Description of Artificial Sequence: Synthetic oligonucleotide
  Target: SCNA; (+) strand; PAM type: NRG; PAM sequence: TGG
ctaactgctcactcggggtg

SEQ ID NO: 39132 - DNA, 20 bp, Artificial Sequence
  Description of Artificial Sequence: Synthetic oligonucleotide
  Target: SCNA; (+) strand; PAM type: NRG; PAM sequence: CAG
ctcggggtgtggttcaaact

SEQ ID NO: 39133 - DNA, 20 bp, Artificial Sequence
  Description of Artificial Sequence: Synthetic oligonucleotide
  Target: SCNA; (+) strand; PAM type: NRG; PAM sequence: AGG
tcggggtgtggttcaaactc

SEQ ID NO: 39134 - DNA, 20 bp, Artificial Sequence
  Description of Artificial Sequence: Synthetic oligonucleotide
  Target: SCNA; (+) strand; PAM type: NRG; PAM sequence: CAG
gtggttcaaactcaggcaaa

SEQ ID NO: 39135 - DNA, 20 bp, Artificial Sequence
  Description of Artificial Sequence: Synthetic oligonucleotide
  Target: SCNA; (+) strand; PAM type: NRG; PAM sequence: CAG
gttcaaactcaggcaaacag

SEQ ID NO: 39136 - DNA, 20 bp, Artificial Sequence
  Description of Artificial Sequence: Synthetic oligonucleotide
  Target: SCNA; (+) strand; PAM type: NRG; PAM sequence: AGG
ttcaaactcaggcaaacagc

SEQ ID NO: 39137 - DNA, 20 bp, Artificial Sequence
  Description of Artificial Sequence: Synthetic oligonucleotide
  Target: SCNA; (+) strand; PAM type: NRG; PAM sequence: AAG
ctcaggcaaacagcaggccc

SEQ ID NO: 39138 - DNA, 20 bp, Artificial Sequence
  Description of Artificial Sequence: Synthetic oligonucleotide
  Target: SCNA; (+) strand; PAM type: NRG; PAM sequence: TGG
aacagcaggcccaagtgtga

SEQ ID NO: 39139 - DNA, 20 bp, Artificial Sequence
  Description of Artificial Sequence: Synthetic oligonucleotide
  Target: SCNA; (+) strand; PAM type: NRG; PAM sequence: CAG
ccaacatccacccccgccct

SEQ ID NO: 39140 - DNA, 20 bp, Artificial Sequence
  Description of Artificial Sequence: Synthetic oligonucleotide
  Target: SCNA; (+) strand; PAM type: NRG; PAM sequence: GAG
cgccctcagctatctaccct

SEQ ID NO: 39141 - DNA, 20 bp, Artificial Sequence
  Description of Artificial Sequence: Synthetic oligonucleotide
  Target: SCNA; (+) strand; PAM type: NRG; PAM sequence: CAG
cctcagctatctaccctgag

SEQ ID NO: 39142 - DNA, 20 bp, Artificial Sequence
  Description of Artificial Sequence: Synthetic oligonucleotide
  Target: SCNA; (+) strand; PAM type: NRG; PAM sequence: AGG
ctcagctatctaccctgagc

SEQ ID NO: 39143 - DNA, 20 bp, Artificial Sequence
  Description of Artificial Sequence: Synthetic oligonucleotide
  Target: SCNA; (+) strand; PAM type: NRG; PAM sequence: CGG
gcaggcgccgctcacactcg

SEQ ID NO: 39144 - DNA, 20 bp, Artificial Sequence
  Description of Artificial Sequence: Synthetic oligonucleotide
  Target: SCNA; (+) strand; PAM type: NRG; PAM sequence: GGG
caggcgccgctcacactcgc

SEQ ID NO: 39145 - DNA, 20 bp, Artificial Sequence
  Description of Artificial Sequence: Synthetic oligonucleotide
  Target: SCNA; (+) strand; PAM type: NRG; PAM sequence: CAG
ggccgtctccaaccccgcgc

SEQ ID NO: 39146 - DNA, 20 bp, Artificial Sequence
  Description of Artificial Sequence: Synthetic oligonucleotide
  Target: SCNA; (+) strand; PAM type: NRG; PAM sequence: GAG
caaccccgcgccagccaccc

SEQ ID NO: 39147 - DNA, 20 bp, Artificial Sequence
  Description of Artificial Sequence: Synthetic oligonucleotide
  Target: SCNA; (+) strand; PAM type: NRG; PAM sequence: AGG
aaccccgcgccagccacccg

SEQ ID NO: 39148 - DNA, 20 bp, Artificial Sequence
  Description of Artificial Sequence: Synthetic oligonucleotide
  Target: SCNA; (+) strand; PAM type: NRG; PAM sequence: GGG
accccgcgccagccacccga

SEQ ID NO: 39149 - DNA, 20 bp, Artificial Sequence
  Description of Artificial Sequence: Synthetic oligonucleotide
  Target: SCNA; (+) strand; PAM type: NRG; PAM sequence: GGG
ccccgcgccagccacccgag

SEQ ID NO: 39150 - DNA, 20 bp, Artificial Sequence
  Description of Artificial Sequence: Synthetic oligonucleotide
  Target: SCNA; (+) strand; PAM type: NRG; PAM sequence: GGG
cccgcgccagccacccgagg

SEQ ID NO: 39151 - DNA, 20 bp, Artificial Sequence
  Description of Artificial Sequence: Synthetic oligonucleotide
  Target: SCNA; (+) strand; PAM type: NRG; PAM sequence: CAG
gccacccgagggggcgttct

SEQ ID NO: 39152 - DNA, 20 bp, Artificial Sequence
  Description of Artificial Sequence: Synthetic oligonucleotide
  Target: SCNA; (+) strand; PAM type: NRG; PAM sequence: TAG
ggcgttctcagcctccaccc

SEQ ID NO: 39153 - DNA, 20 bp, Artificial Sequence
  Description of Artificial Sequence: Synthetic oligonucleotide
  Target: SCNA; (+) strand; PAM type: NRG; PAM sequence: CGG
gttctcagcctccaccctag

SEQ ID NO: 39154 - DNA, 20 bp, Artificial Sequence
  Description of Artificial Sequence: Synthetic oligonucleotide
  Target: SCNA; (+) strand; PAM type: NRG; PAM sequence: CAG
caccctagcggaccccgcgc

SEQ ID NO: 39155 - DNA, 20 bp, Artificial Sequence
  Description of Artificial Sequence: Synthetic oligonucleotide
  Target: SCNA; (+) strand; PAM type: NRG; PAM sequence: TGG
cccgttaccacctgttgact

SEQ ID NO: 39156 - DNA, 20 bp, Artificial Sequence
  Description of Artificial Sequence: Synthetic oligonucleotide
  Target: SCNA; (+) strand; PAM type: NRG; PAM sequence: CAG
atttcattatttgccaaacg

SEQ ID NO: 39157 - DNA, 20 bp, Artificial Sequence
  Description of Artificial Sequence: Synthetic oligonucleotide
  Target: SCNA; (+) strand; PAM type: NRG; PAM sequence: CAG
aacgcagcttgcttacttta

SEQ ID NO: 39158 - DNA, 20 bp, Artificial Sequence
  Description of Artificial Sequence: Synthetic oligonucleotide
  Target: SCNA; (+) strand; PAM type: NRG; PAM sequence: GAG
cgcagcttgcttactttaca

SEQ ID NO: 39159 - DNA, 20 bp, Artificial Sequence
  Description of Artificial Sequence: Synthetic oligonucleotide
  Target: SCNA; (+) strand; PAM type: NRG; PAM sequence: AAG
ttactttacagagaaaaacc

SEQ ID NO: 39160 - DNA, 20 bp, Artificial Sequence
  Description of Artificial Sequence: Synthetic oligonucleotide
  Target: SCNA; (+) strand; PAM type: NRG; PAM sequence: GAG
actttacagagaaaaaccaa

SEQ ID NO: 39161 - DNA, 20 bp, Artificial Sequence
  Description of Artificial Sequence: Synthetic oligonucleotide
  Target: SCNA; (+) strand; PAM type: NRG; PAM sequence: GAG
tttacagagaaaaaccaaga

SEQ ID NO: 39162 - DNA, 20 bp, Artificial Sequence
  Description of Artificial Sequence: Synthetic oligonucleotide
  Target: SCNA; (+) strand; PAM type: NRG; PAM sequence: CGG
acagagaaaaaccaagagag

SEQ ID NO: 39163 - DNA, 20 bp, Artificial Sequence
  Description of Artificial Sequence: Synthetic oligonucleotide
  Target: SCNA; (+) strand; PAM type: NRG; PAM sequence: GGG
cagagaaaaaccaagagagc

SEQ ID NO: 39164 - DNA, 20 bp, Artificial Sequence
  Description of Artificial Sequence: Synthetic oligonucleotide
  Target: SCNA; (+) strand; PAM type: NRG; PAM sequence: CAG
agaaaaaccaagagagcggg

SEQ ID NO: 39165 - DNA, 20 bp, Artificial Sequence
  Description of Artificial Sequence: Synthetic oligonucleotide
  Target: SCNA; (+) strand; PAM type: NRG; PAM sequence: CAG
aaaccaagagagcgggcaga

SEQ ID NO: 39166 - DNA, 20 bp, Artificial Sequence
  Description of Artificial Sequence: Synthetic oligonucleotide
  Target: SCNA; (+) strand; PAM type: NRG; PAM sequence: GAG
cgggcagacagattttatgt

SEQ ID NO: 39167 - DNA, 20 bp, Artificial Sequence
  Description of Artificial Sequence: Synthetic oligonucleotide
  Target: SCNA; (+) strand; PAM type: NRG; PAM sequence: GAG
ggcagacagattttatgtga

SEQ ID NO: 39168 - DNA, 20 bp, Artificial Sequence
  Description of Artificial Sequence: Synthetic oligonucleotide
  Target: SCNA; (+) strand; PAM type: NRG; PAM sequence: AAG
acagattttatgtgagagaa

SEQ ID NO: 39169 - DNA, 20 bp, Artificial Sequence
  Description of Artificial Sequence: Synthetic oligonucleotide
  Target: SCNA; (+) strand; PAM type: NRG; PAM sequence: TGG
attttatgtgagagaaaagt

SEQ ID NO: 39170 - DNA, 20 bp, Artificial Sequence
  Description of Artificial Sequence: Synthetic oligonucleotide
  Target: SCNA; (+) strand; PAM type: NRG; PAM sequence: TGG
agttggatgctcacgctcca

SEQ ID NO: 39171 - DNA, 20 bp, Artificial Sequence
  Description of Artificial Sequence: Synthetic oligonucleotide
  Target: SCNA; (+) strand; PAM type: NRG; PAM sequence: GAG
ttggatgctcacgctccatg

SEQ ID NO: 39172 - DNA, 20 bp, Artificial Sequence
  Description of Artificial Sequence: Synthetic oligonucleotide
  Target: SCNA; (+) strand; PAM type: NRG; PAM sequence: CGG
tggagcatcctcgcgtttcc

SEQ ID NO: 39173 - DNA, 20 bp, Artificial Sequence
  Description of Artificial Sequence: Synthetic oligonucleotide
  Target: SCNA; (+) strand; PAM type: NRG; PAM sequence: GGG
ggagcatcctcgcgtttccc

SEQ ID NO: 39174 - DNA, 20 bp, Artificial Sequence
  Description of Artificial Sequence: Synthetic oligonucleotide
  Target: SCNA; (+) strand; PAM type: NRG; PAM sequence: GGG
gagcatcctcgcgtttcccg

SEQ ID NO: 39175 - DNA, 20 bp, Artificial Sequence
  Description of Artificial Sequence: Synthetic oligonucleotide
  Target: SCNA; (+) strand; PAM type: NRG; PAM sequence: AAG
tcctcgcgtttcccggggaa

SEQ ID NO: 39176 - DNA, 20 bp, Artificial Sequence
  Description of Artificial Sequence: Synthetic oligonucleotide
  Target: SCNA; (+) strand; PAM type: NRG; PAM sequence: CGG
tcgcgtttcccggggaaaag

SEQ ID NO: 39177 - DNA, 20 bp, Artificial Sequence
  Description of Artificial Sequence: Synthetic oligonucleotide
  Target: SCNA; (+) strand; PAM type: NRG; PAM sequence: CGG
tcccggggaaaagcggatcc

SEQ ID NO: 39178 - DNA, 20 bp, Artificial Sequence
  Description of Artificial Sequence: Synthetic oligonucleotide
  Target: SCNA; (+) strand; PAM type: NRG; PAM sequence: GAG
ccggggaaaagcggatcccg

SEQ ID NO: 39179 - DNA, 20 bp, Artificial Sequence
  Description of Artificial Sequence: Synthetic oligonucleotide
  Target: SCNA; (+) strand; PAM type: NRG; PAM sequence: AAG
gggaaaagcggatcccggag

SEQ ID NO: 39180 - DNA, 20 bp, Artificial Sequence
  Description of Artificial Sequence: Synthetic oligonucleotide
  Target: SCNA; (+) strand; PAM type: NRG; PAM sequence: CAG
aaaagcggatcccggagaag

SEQ ID NO: 39181 - DNA, 20 bp, Artificial Sequence
  Description of Artificial Sequence: Synthetic oligonucleotide
  Target: SCNA; (+) strand; PAM type: NRG; PAM sequence: CAG
ggagaagcagcctaatctct

SEQ ID NO: 39182 - DNA, 20 bp, Artificial Sequence
  Description of Artificial Sequence: Synthetic oligonucleotide
  Target: SCNA; (+) strand; PAM type: NRG; PAM sequence: TGG
gcctaatctctcagcccttg

SEQ ID NO: 39183 - DNA, 20 bp, Artificial Sequence
  Description of Artificial Sequence: Synthetic oligonucleotide
  Target: SCNA; (+) strand; PAM type: NRG; PAM sequence: GAG
ctaatctctcagcccttgtg

SEQ ID NO: 39184 - DNA, 20 bp, Artificial Sequence
  Description of Artificial Sequence: Synthetic oligonucleotide
  Target: SCNA; (+) strand; PAM type: NRG; PAM sequence: AAG
atctctcagcccttgtggag

SEQ ID NO: 39185 - DNA, 20 bp, Artificial Sequence
  Description of Artificial Sequence: Synthetic oligonucleotide
  Target: SCNA; (+) strand; PAM type: NRG; PAM sequence: AGG
tctctcagcccttgtggaga

SEQ ID NO: 39186 - DNA, 20 bp, Artificial Sequence
  Description of Artificial Sequence: Synthetic oligonucleotide
  Target: SCNA; (+) strand; PAM type: NRG; PAM sequence: GGG
ctctcagcccttgtggagaa

SEQ ID NO: 39187 - DNA, 20 bp, Artificial Sequence
  Description of Artificial Sequence: Synthetic oligonucleotide
  Target: SCNA; (+) strand; PAM type: NRG; PAM sequence: CAG
ccttgtggagaagggaatat

SEQ ID NO: 39188 - DNA, 20 bp, Artificial Sequence
  Description of Artificial Sequence: Synthetic oligonucleotide
  Target: SCNA; (+) strand; PAM type: NRG; PAM sequence: AAG
tgtggagaagggaatatcag

SEQ ID NO: 39189 - DNA, 20 bp, Artificial Sequence
  Description of Artificial Sequence: Synthetic oligonucleotide
  Target: SCNA; (+) strand; PAM type: NRG; PAM sequence: CAG
ggagaagggaatatcagaag

SEQ ID NO: 39190 - DNA, 20 bp, Artificial Sequence
  Description of Artificial Sequence: Synthetic oligonucleotide
  Target: SCNA; (+) strand; PAM type: NRG; PAM sequence: AGG
gagaagggaatatcagaagc

SEQ ID NO: 39191 - DNA, 20 bp, Artificial Sequence
  Description of Artificial Sequence: Synthetic oligonucleotide
  Target: SCNA; (+) strand; PAM type: NRG; PAM sequence: AAG
gaatatcagaagcaggacga

SEQ ID NO: 39192 - DNA, 20 bp, Artificial Sequence
  Description of Artificial Sequence: Synthetic oligonucleotide
  Target: SCNA; (+) strand; PAM type: NRG; PAM sequence: CAG
atcagaagcaggacgaaagc

SEQ ID NO: 39193 - DNA, 20 bp, Artificial Sequence
  Description of Artificial Sequence: Synthetic oligonucleotide
  Target: SCNA; (+) strand; PAM type: NRG; PAM sequence: AGG
tcagaagcaggacgaaagcc

SEQ ID NO: 39194 - DNA, 20 bp, Artificial Sequence
  Description of Artificial Sequence: Synthetic oligonucleotide
  Target: SCNA; (+) strand; PAM type: NRG; PAM sequence: AAG
agcaggacgaaagccaggtc

SEQ ID NO: 39195 - DNA, 20 bp, Artificial Sequence
  Description of Artificial Sequence: Synthetic oligonucleotide
  Target: SCNA; (+) strand; PAM type: NRG; PAM sequence: TAG
ccaggtcaagtctctttcct

SEQ ID NO: 39196 - DNA, 20 bp, Artificial Sequence
  Description of Artificial Sequence: Synthetic oligonucleotide
  Target: SCNA; (+) strand; PAM type: NRG; PAM sequence: AGG
caggtcaagtctctttcctt

SEQ ID NO: 39197 - DNA, 20 bp, Artificial Sequence
  Description of Artificial Sequence: Synthetic oligonucleotide
  Target: SCNA; (+) strand; PAM type: NRG; PAM sequence: AAG
ctctttccttaggctcccca

SEQ ID NO: 39198 - DNA, 20 bp, Artificial Sequence
  Description of Artificial Sequence: Synthetic oligonucleotide
  Target: SCNA; (+) strand; PAM type: NRG; PAM sequence: AGG
tctttccttaggctccccaa

SEQ ID NO: 39199 - DNA, 20 bp, Artificial Sequence
  Description of Artificial Sequence: Synthetic oligonucleotide
  Target: SCNA; (+) strand; PAM type: NRG; PAM sequence: GGG
ctttccttaggctccccaaa

SEQ ID NO: 39200 - DNA, 20 bp, Artificial Sequence
  Description of Artificial Sequence: Synthetic oligonucleotide
  Target: SCNA; (+) strand; PAM type: NRG; PAM sequence: AAG
cttaggctccccaaagggac

SEQ ID NO: 39201 - DNA, 20 bp, Artificial Sequence
  Description of Artificial Sequence: Synthetic oligonucleotide
  Target: SCNA; (+) strand; PAM type: NRG; PAM sequence: CAG
agggacaagtactcacctcc

SEQ ID NO: 39202 - DNA, 20 bp, Artificial Sequence
  Description of Artificial Sequence: Synthetic oligonucleotide
  Target: SCNA; (+) strand; PAM type: NRG; PAM sequence: GAG
ggacaagtactcacctccca

SEQ ID NO: 39203 - DNA, 20 bp, Artificial Sequence
  Description of Artificial Sequence: Synthetic oligonucleotide
  Target: SCNA; (+) strand; PAM type: NRG; PAM sequence: TGG
gtactcacctcccagagacc

SEQ ID NO: 39204 - DNA, 20 bp, Artificial Sequence
  Description of Artificial Sequence: Synthetic oligonucleotide
  Target: SCNA; (+) strand; PAM type: NRG; PAM sequence: CAG
cacctcccagagacctggcc

SEQ ID NO: 39205 - DNA, 20 bp, Artificial Sequence
  Description of Artificial Sequence: Synthetic oligonucleotide
  Target: SCNA; (+) strand; PAM type: NRG; PAM sequence: CGG
ctcccagagacctggcccag

SEQ ID NO: 39206 - DNA, 20 bp, Artificial Sequence
  Description of Artificial Sequence: Synthetic oligonucleotide
  Target: SCNA; (+) strand; PAM type: NRG; PAM sequence: GGG
tcccagagacctggcccagc

SEQ ID NO: 39207 - DNA, 20 bp, Artificial Sequence
  Description of Artificial Sequence: Synthetic oligonucleotide
  Target: SCNA; (+) strand; PAM type: NRG; PAM sequence: TGG
cctggcccagcgggtcctca

SEQ ID NO: 39208 - DNA, 20 bp, Artificial Sequence
  Description of Artificial Sequence: Synthetic oligonucleotide
  Target: SCNA; (+) strand; PAM type: NRG; PAM sequence: CAG
ggcccagcgggtcctcatgg

SEQ ID NO: 39209 - DNA, 20 bp, Artificial Sequence
  Description of Artificial Sequence: Synthetic oligonucleotide
  Target: SCNA; (+) strand; PAM type: NRG; PAM sequence: CGG
atggcagcaccaccccctcc

SEQ ID NO: 39210 - DNA, 20 bp, Artificial Sequence
  Description of Artificial Sequence: Synthetic oligonucleotide
  Target: SCNA; (+) strand; PAM type: NRG; PAM sequence: CGG
acgaccattcgtctcccatc

SEQ ID NO: 39211 - DNA, 20 bp, Artificial Sequence
  Description of Artificial Sequence: Synthetic oligonucleotide
  Target: SCNA; (+) strand; PAM type: NRG; PAM sequence: CAG
gtctcccatccggcgttctc

SEQ ID NO: 39212 - DNA, 20 bp, Artificial Sequence
  Description of Artificial Sequence: Synthetic oligonucleotide
  Target: SCNA; (+) strand; PAM type: NRG; PAM sequence: AGG
tctcccatccggcgttctcc

SEQ ID NO: 39213 - DNA, 20 bp, Artificial Sequence
  Description of Artificial Sequence: Synthetic oligonucleotide
  Target: SCNA; (+) strand; PAM type: NRG; PAM sequence: AAG
ggcgttctccaggatttcca

SEQ ID NO: 39214 - DNA, 20 bp, Artificial Sequence
  Description of Artificial Sequence: Synthetic oligonucleotide
  Target: SCNA; (+) strand; PAM type: NRG; PAM sequence: TAG
gatttccaaagacgcccgtt

SEQ ID NO: 39215 - DNA, 20 bp, Artificial Sequence
  Description of Artificial Sequence: Synthetic oligonucleotide
  Target: SCNA; (+) strand; PAM type: NRG; PAM sequence: CAG
aagacgcccgtttagatcca

SEQ ID NO: 39216 - DNA, 20 bp, Artificial Sequence
  Description of Artificial Sequence: Synthetic oligonucleotide
  Target: SCNA; (+) strand; PAM type: NRG; PAM sequence: AGG
agacgcccgtttagatccac

SEQ ID NO: 39217 - DNA, 20 bp, Artificial Sequence
  Description of Artificial Sequence: Synthetic oligonucleotide
  Target: SCNA; (+) strand; PAM type: NRG; PAM sequence: GAG
agatccacaggtacttacct

SEQ ID NO: 39218 - DNA, 20 bp, Artificial Sequence
  Description of Artificial Sequence: Synthetic oligonucleotide
  Target: SCNA; (+) strand; PAM type: NRG; PAM sequence: TAG
aattcccaaataatatttaa

SEQ ID NO: 39219 - DNA, 20 bp, Artificial Sequence
  Description of Artificial Sequence: Synthetic oligonucleotide
  Target: SCNA; (+) strand; PAM type: NRG; PAM sequence: AGG
attcccaaataatatttaat

SEQ ID NO: 39220 - DNA, 20 bp, Artificial Sequence
  Description of Artificial Sequence: Synthetic oligonucleotide
  Target: SCNA; (+) strand; PAM type: NRG; PAM sequence: AAG
ccaaataatatttaatagga

SEQ ID NO: 39221 - DNA, 20 bp, Artificial Sequence
  Description of Artificial Sequence: Synthetic oligonucleotide
  Target: SCNA; (+) strand; PAM type: NRG; PAM sequence: AAG
aataatatttaataggaaag

SEQ ID NO: 39222 - DNA, 20 bp, Artificial Sequence
  Description of Artificial Sequence: Synthetic oligonucleotide
  Target: SCNA; (+) strand; PAM type: NRG; PAM sequence: AAG
aatatttaataggaaagaag

SEQ ID NO: 39223 - DNA, 20 bp, Artificial Sequence
  Description of Artificial Sequence: Synthetic oligonucleotide
  Target: SCNA; (+) strand; PAM type: NRG; PAM sequence: AGG
atatttaataggaaagaaga

SEQ ID NO: 39224 - DNA, 20 bp, Artificial Sequence
  Description of Artificial Sequence: Synthetic oligonucleotide
  Target: SCNA; (+) strand; PAM type: NRG; PAM sequence: AAG
taataggaaagaagaaggaa

SEQ ID NO: 39225 - DNA, 20 bp, Artificial Sequence
  Description of Artificial Sequence: Synthetic oligonucleotide
  Target: SCNA; (+) strand; PAM type: NRG; PAM sequence: AGG
aataggaaagaagaaggaaa

SEQ ID NO: 39226 - DNA, 20 bp, Artificial Sequence
  Description of Artificial Sequence: Synthetic oligonucleotide
  Target: SCNA; (+) strand; PAM type: NRG; PAM sequence: GAG
taggaaagaagaaggaaaag

SEQ ID NO: 39227 - DNA, 20 bp, Artificial Sequence
  Description of Artificial Sequence: Synthetic oligonucleotide
  Target: SCNA; (+) strand; PAM type: NRG; PAM sequence: CAG
gaagaaggaaaaggagcgca

SEQ ID NO: 39228 - DNA, 20 bp, Artificial Sequence
  Description of Artificial Sequence: Synthetic oligonucleotide
  Target: SCNA; (+) strand; PAM type: NRG; PAM sequence: AGG
aagaaggaaaaggagcgcac

SEQ ID NO: 39229 - DNA, 20 bp, Artificial Sequence
  Description of Artificial Sequence: Synthetic oligonucleotide
  Target: SCNA; (+) strand; PAM type: NRG; PAM sequence: AAG
aaggaaaaggagcgcacagg

SEQ ID NO: 39230 - DNA, 20 bp, Artificial Sequence
  Description of Artificial Sequence: Synthetic oligonucleotide
  Target: SCNA; (+) strand; PAM type: NRG; PAM sequence: AGG
aggaaaaggagcgcacagga

SEQ ID NO: 39231 - DNA, 20 bp, Artificial Sequence
  Description of Artificial Sequence: Synthetic oligonucleotide
  Target: SCNA; (+) strand; PAM type: NRG; PAM sequence: GGG
ggaaaaggagcgcacaggaa

SEQ ID NO: 39232 - DNA, 20 bp, Artificial Sequence
  Description of Artificial Sequence: Synthetic oligonucleotide
  Target: SCNA; (+) strand; PAM type: NRG; PAM sequence: CGG
aaaggagcgcacaggaaggg

SEQ ID NO: 39233 - DNA, 20 bp, Artificial Sequence
  Description of Artificial Sequence: Synthetic oligonucleotide
  Target: SCNA; (+) strand; PAM type: NRG; PAM sequence: GAG
aggagcgcacaggaagggcg

SEQ ID NO: 39234 - DNA, 20 bp, Artificial Sequence
  Description of Artificial Sequence: Synthetic oligonucleotide
  Target: SCNA; (+) strand; PAM type: NRG; PAM sequence: AGG
ggagcgcacaggaagggcgg

SEQ ID NO: 39235 - DNA, 20 bp, Artificial Sequence
  Description of Artificial Sequence: Synthetic oligonucleotide
  Target: SCNA; (+) strand; PAM type: NRG; PAM sequence: CGG
gcgcacaggaagggcggagg

SEQ ID NO: 39236 - DNA, 20 bp, Artificial Sequence
  Description of Artificial Sequence: Synthetic oligonucleotide
  Target: SCNA; (+) strand; PAM type: NRG; PAM sequence: CGG
ggaagggcggaggcggcacc

SEQ ID NO: 39237 - DNA, 20 bp, Artificial Sequence
  Description of Artificial Sequence: Synthetic oligonucleotide
  Target: SCNA; (+) strand; PAM type: NRG; PAM sequence: GGG
gaagggcggaggcggcaccc

SEQ ID NO: 39238 - DNA, 20 bp, Artificial Sequence
  Description of Artificial Sequence: Synthetic oligonucleotide
  Target: SCNA; (+) strand; PAM type: NRG; PAM sequence: GGG
aagggcggaggcggcacccg

SEQ ID NO: 39239 - DNA, 20 bp, Artificial Sequence
  Description of Artificial Sequence: Synthetic oligonucleotide
  Target: SCNA; (+) strand; PAM type: NRG; PAM sequence: GGG
agggcggaggcggcacccgg

SEQ ID NO: 39240 - DNA, 20 bp, Artificial Sequence
  Description of Artificial Sequence: Synthetic oligonucleotide
  Target: SCNA; (+) strand; PAM type: NRG; PAM sequence: GGG
gggcggaggcggcacccggg

SEQ ID NO: 39241 - DNA, 20 bp, Artificial Sequence
  Description of Artificial Sequence: Synthetic oligonucleotide
  Target: SCNA; (+) strand; PAM type: NRG; PAM sequence: GGG
ggcggaggcggcacccgggg

SEQ ID NO: 39242 - DNA, 20 bp, Artificial Sequence
  Description of Artificial Sequence: Synthetic oligonucleotide
  Target: SCNA; (+) strand; PAM type: NRG; PAM sequence: CAG
cacccgggggggactgtccc

SEQ ID NO: 39243 - DNA, 20 bp, Artificial Sequence
  Description of Artificial Sequence: Synthetic oligonucleotide
  Target: SCNA; (+) strand; PAM type: NRG; PAM sequence: GAG
cccgggggggactgtcccca

SEQ ID NO: 39244 - DNA, 20 bp, Artificial Sequence
  Description of Artificial Sequence: Synthetic oligonucleotide
  Target: SCNA; (+) strand; PAM type: NRG; PAM sequence: AGG
ccgggggggactgtccccag

SEQ ID NO: 39245 - DNA, 20 bp, Artificial Sequence
  Description of Artificial Sequence: Synthetic oligonucleotide
  Target: SCNA; (+) strand; PAM type: NRG; PAM sequence: GAG
gggggggactgtccccagag

SEQ ID NO: 39246 - DNA, 20 bp, Artificial Sequence
  Description of Artificial Sequence: Synthetic oligonucleotide
  Target: SCNA; (+) strand; PAM type: NRG; PAM sequence: AGG
ggggggactgtccccagagg

SEQ ID NO: 39247 - DNA, 20 bp, Artificial Sequence
  Description of Artificial Sequence: Synthetic oligonucleotide
  Target: SCNA; (+) strand; PAM type: NRG; PAM sequence: GAG
tccccagaggaggccgctgt

SEQ ID NO: 39248 - DNA, 20 bp, Artificial Sequence
  Description of Artificial Sequence: Synthetic oligonucleotide
  Target: SCNA; (+) strand; PAM type: NRG; PAM sequence: CGG
cagaggaggccgctgtgagc

SEQ ID NO: 39249 - DNA, 20 bp, Artificial Sequence
  Description of Artificial Sequence: Synthetic oligonucleotide
  Target: SCNA; (+) strand; PAM type: NRG; PAM sequence: GAG
ccgctgtgagccggcgacgc

SEQ ID NO: 39250 - DNA, 20 bp, Artificial Sequence
  Description of Artificial Sequence: Synthetic oligonucleotide
  Target: SCNA; (+) strand; PAM type: NRG; PAM sequence: AGG
cgctgtgagccggcgacgcg

SEQ ID NO: 39251 - DNA, 20 bp, Artificial Sequence
  Description of Artificial Sequence: Synthetic oligonucleotide
  Target: SCNA; (+) strand; PAM type: NRG; PAM sequence: TGG
gtgagccggcgacgcgaggc

SEQ ID NO: 39252 - DNA, 20 bp, Artificial Sequence
  Description of Artificial Sequence: Synthetic oligonucleotide
  Target: SCNA; (+) strand; PAM type: NRG; PAM sequence: GGG
tgagccggcgacgcgaggct

SEQ ID NO: 39253 - DNA, 20 bp, Artificial Sequence
  Description of Artificial Sequence: Synthetic oligonucleotide
  Target: SCNA; (+) strand; PAM type: NRG; PAM sequence: GGG
gagccggcgacgcgaggctg

SEQ ID NO: 39254 - DNA, 20 bp, Artificial Sequence
  Description of Artificial Sequence: Synthetic oligonucleotide
  Target: SCNA; (+) strand; PAM type: NRG; PAM sequence: GGG
agccggcgacgcgaggctgg

SEQ ID NO: 39255 - DNA, 20 bp, Artificial Sequence
  Description of Artificial Sequence: Synthetic oligonucleotide
  Target: SCNA; (+) strand; PAM type: NRG; PAM sequence: GAG
ccggcgacgcgaggctgggg

SEQ ID NO: 39256 - DNA, 20 bp, Artificial Sequence
  Description of Artificial Sequence: Synthetic oligonucleotide
  Target: SCNA; (+) strand; PAM type: NRG; PAM sequence: TGG
gcgacgcgaggctgggggag

SEQ ID NO: 39257 - DNA, 20 bp, Artificial Sequence
  Description of Artificial Sequence: Synthetic oligonucleotide
  Target: SCNA; (+) strand; PAM type: NRG; PAM sequence: GGG
cgacgcgaggctgggggagt

SEQ ID NO: 39258 - DNA, 20 bp, Artificial Sequence
  Description of Artificial Sequence: Synthetic oligonucleotide
  Target: SCNA; (+) strand; PAM type: NRG; PAM sequence: GAG
acgcgaggctgggggagtgg

SEQ ID NO: 39259 - DNA, 20 bp, Artificial Sequence
  Description of Artificial Sequence: Synthetic oligonucleotide
  Target: SCNA; (+) strand; PAM type: NRG; PAM sequence: AGG
cgcgaggctgggggagtggg

SEQ ID NO: 39260 - DNA, 20 bp, Artificial Sequence
  Description of Artificial Sequence: Synthetic oligonucleotide
  Target: SCNA; (+) strand; PAM type: NRG; PAM sequence: TGG
cccgctaacctgtcgtcgaa

SEQ ID NO: 39261 - DNA, 20 bp, Artificial Sequence
  Description of Artificial Sequence: Synthetic oligonucleotide
  Target: SCNA; (+) strand; PAM type: NRG; PAM sequence: CAG
tgtcgtcgaatggccactcc

SEQ ID NO: 39262 - DNA, 20 bp, Artificial Sequence
  Description of Artificial Sequence: Synthetic oligonucleotide
  Target: SCNA; (+) strand; PAM type: NRG; PAM sequence: GAG
actcccagttctccgctcac

SEQ ID NO: 39263 - DNA, 20 bp, Artificial Sequence
  Description of Artificial Sequence: Synthetic oligonucleotide
  Target: SCNA; (+) strand; PAM type: NRG; PAM sequence: AGG
ctcccagttctccgctcacg

SEQ ID NO: 39264 - DNA, 20 bp, Artificial Sequence
  Description of Artificial Sequence: Synthetic oligonucleotide
  Target: SCNA; (+) strand; PAM type: NRG; PAM sequence: GGG
tcccagttctccgctcacga

SEQ ID NO: 39265 - DNA, 20 bp, Artificial Sequence
  Description of Artificial Sequence: Synthetic oligonucleotide
  Target: SCNA; (+) strand; PAM type: NRG; PAM sequence: TGG
cagttctccgctcacgaggg

SEQ ID NO: 39266 - DNA, 20 bp, Artificial Sequence
  Description of Artificial Sequence: Synthetic oligonucleotide
  Target: SCNA; (+) strand; PAM type: NRG; PAM sequence: AAG
tctccgctcacgagggtgga

SEQ ID NO: 39267 - DNA, 20 bp, Artificial Sequence
  Description of Artificial Sequence: Synthetic oligonucleotide
  Target: SCNA; (+) strand; PAM type: NRG; PAM sequence: AGG
ctccgctcacgagggtggaa

SEQ ID NO: 39268 - DNA, 20 bp, Artificial Sequence
  Description of Artificial Sequence: Synthetic oligonucleotide
  Target: SCNA; (+) strand; PAM type: NRG; PAM sequence: CAG
cgctcacgagggtggaaagg

SEQ ID NO: 39269 - DNA, 20 bp, Artificial Sequence
  Description of Artificial Sequence: Synthetic oligonucleotide
  Target: SCNA; (+) strand; PAM type: NRG; PAM sequence: AAG
tcacgagggtggaaaggcag

SEQ ID NO: 39270 - DNA, 20 bp, Artificial Sequence
  Description of Artificial Sequence: Synthetic oligonucleotide
  Target: SCNA; (+) strand; PAM type: NRG; PAM sequence: AGG
cacgagggtggaaaggcaga

SEQ ID NO: 39271 - DNA, 20 bp, Artificial Sequence
  Description of Artificial Sequence: Synthetic oligonucleotide
  Target: SCNA; (+) strand; PAM type: NRG; PAM sequence: AAG
gtggaaaggcagaaggcttg

SEQ ID NO: 39272 - DNA, 20 bp, Artificial Sequence
  Description of Artificial Sequence: Synthetic oligonucleotide
  Target: SCNA; (+) strand; PAM type: NRG; PAM sequence: AGG
tggaaaggcagaaggcttga

SEQ ID NO: 39273 - DNA, 20 bp, Artificial Sequence
  Description of Artificial Sequence: Synthetic oligonucleotide
  Target: SCNA; (+) strand; PAM type: NRG; PAM sequence: AAG
aaggcagaaggcttgaaggc

SEQ ID NO: 39274 - DNA, 20 bp, Artificial Sequence
  Description of Artificial Sequence: Synthetic oligonucleotide
  Target: SCNA; (+) strand; PAM type: NRG; PAM sequence: AGG
aggcagaaggcttgaaggca

SEQ ID NO: 39275 - DNA, 20 bp, Artificial Sequence
  Description of Artificial Sequence: Synthetic oligonucleotide
  Target: SCNA; (+) strand; PAM type: NRG; PAM sequence: GAG
aaggcttgaaggcaaggcgt

SEQ ID NO: 39276 - DNA, 20 bp, Artificial Sequence
  Description of Artificial Sequence: Synthetic oligonucleotide
  Target: SCNA; (+) strand; PAM type: NRG; PAM sequence: AGG
aggcttgaaggcaaggcgtg

SEQ ID NO: 39277 - DNA, 20 bp, Artificial Sequence
  Description of Artificial Sequence: Synthetic oligonucleotide
  Target: SCNA; (+) strand; PAM type: NRG; PAM sequence: GGG
ggcttgaaggcaaggcgtga

SEQ ID NO: 39278 - DNA, 20 bp, Artificial Sequence
  Description of Artificial Sequence: Synthetic oligonucleotide
  Target: SCNA; (+) strand; PAM type: NRG; PAM sequence: GAG
cttgaaggcaaggcgtgagg

SEQ ID NO: 39279 - DNA, 20 bp, Artificial Sequence
  Description of Artificial Sequence: Synthetic oligonucleotide
  Target: SCNA; (+) strand; PAM type: NRG; PAM sequence: CAG
gcaaggcgtgagggagcgcc

SEQ ID NO: 39280 - DNA, 20 bp, Artificial Sequence
  Description of Artificial Sequence: Synthetic oligonucleotide
  Target: SCNA; (+) strand; PAM type: NRG; PAM sequence: AGG
caaggcgtgagggagcgccc

SEQ ID NO: 39281 - DNA, 20 bp, Artificial Sequence
  Description of Artificial Sequence: Synthetic oligonucleotide
  Target: SCNA; (+) strand; PAM type: NRG; PAM sequence: CGG
gggagcgcccaggacgctct

SEQ ID NO: 39282 - DNA, 20 bp, Artificial Sequence
  Description of Artificial Sequence: Synthetic oligonucleotide
  Target: SCNA; (+) strand; PAM type: NRG; PAM sequence: GAG
gagcgcccaggacgctctcg

SEQ ID NO: 39283 - DNA, 20 bp, Artificial Sequence
  Description of Artificial Sequence: Synthetic oligonucleotide
  Target: SCNA; (+) strand; PAM type: NRG; PAM sequence: AGG
agcgcccaggacgctctcgg

SEQ ID NO: 39284 - DNA, 20 bp, Artificial Sequence
  Description of Artificial Sequence: Synthetic oligonucleotide
  Target: SCNA; (+) strand; PAM type: NRG; PAM sequence: GGG
gcgcccaggacgctctcgga

SEQ ID NO: 39285 - DNA, 20 bp, Artificial Sequence
  Description of Artificial Sequence: Synthetic oligonucleotide
  Target: SCNA; (+) strand; PAM type: NRG; PAM sequence: GGG
cgcccaggacgctctcggag

SEQ ID NO: 39286 - DNA, 20 bp, Artificial Sequence
  Description of Artificial Sequence: Synthetic oligonucleotide
  Target: SCNA; (+) strand; PAM type: NRG; PAM sequence: CGG
caggacgctctcggaggggc

SEQ ID NO: 39287 - DNA, 20 bp, Artificial Sequence
  Description of Artificial Sequence: Synthetic oligonucleotide
  Target: SCNA; (+) strand; PAM type: NRG; PAM sequence: GGG
aggacgctctcggaggggcc

SEQ ID NO: 39288 - DNA, 20 bp, Artificial Sequence
  Description of Artificial Sequence: Synthetic oligonucleotide
  Target: SCNA; (+) strand; PAM type: NRG; PAM sequence: CGG
cgctctcggaggggccgggc

SEQ ID NO: 39289 - DNA, 20 bp, Artificial Sequence
  Description of Artificial Sequence: Synthetic oligonucleotide
  Target: SCNA; (+) strand; PAM type: NRG; PAM sequence: GGG
gctctcggaggggccgggcc

SEQ ID NO: 39290 - DNA, 20 bp, Artificial Sequence
  Description of Artificial Sequence: Synthetic oligonucleotide
  Target: SCNA; (+) strand; PAM type: NRG; PAM sequence: GGG
ctctcggaggggccgggccg

SEQ ID NO: 39291 - DNA, 20 bp, Artificial Sequence
  Description of Artificial Sequence: Synthetic oligonucleotide
  Target: SCNA; (+) strand; PAM type: NRG; PAM sequence: CAG
ccgggccggggtctgcgctg

SEQ ID NO: 39292 - DNA, 20 bp, Artificial Sequence
  Description of Artificial Sequence: Synthetic oligonucleotide
  Target: SCNA; (+) strand; PAM type: NRG; PAM sequence: CGG
cgcacctcacttccgcgtcg

SEQ ID NO: 39293 - DNA, 20 bp, Artificial Sequence
  Description of Artificial Sequence: Synthetic oligonucleotide
  Target: SCNA; (+) strand; PAM type: NRG; PAM sequence: CGG
cacttccgcgtcgcggcgct

SEQ ID NO: 39294 - DNA, 20 bp, Artificial Sequence
  Description of Artificial Sequence: Synthetic oligonucleotide
  Target: SCNA; (+) strand; PAM type: NRG; PAM sequence: TGG
cggtcgctcgccccctctct

SEQ ID NO: 39295 - DNA, 20 bp, Artificial Sequence
  Description of Artificial Sequence: Synthetic oligonucleotide
  Target: SCNA; (+) strand; PAM type: NRG; PAM sequence: GGG
ggtcgctcgccccctctctt

SEQ ID NO: 39296 - DNA, 20 bp, Artificial Sequence
  Description of Artificial Sequence: Synthetic oligonucleotide
  Target: SCNA; (+) strand; PAM type: NRG; PAM sequence: TGG
cccctctcttgggccccttc

SEQ ID NO: 39297 - DNA, 20 bp, Artificial Sequence
  Description of Artificial Sequence: Synthetic oligonucleotide
  Target: SCNA; (+) strand; PAM type: NRG; PAM sequence: TAG
cgtcgccgtcctcctcctcc

SEQ ID NO: 39298 - DNA, 20 bp, Artificial Sequence
  Description of Artificial Sequence: Synthetic oligonucleotide
  Target: SCNA; (+) strand; PAM type: NRG; PAM sequence: CGG
ctcctccttctccttctcct

SEQ ID NO: 39299 - DNA, 20 bp, Artificial Sequence
  Description of Artificial Sequence: Synthetic oligonucleotide
  Target: SCNA; (+) strand; PAM type: NRG; PAM sequence: CAG
cgcccccaccgctgatttgt

SEQ ID NO: 39300 - DNA, 20 bp, Artificial Sequence
  Description of Artificial Sequence: Synthetic oligonucleotide
  Target: SCNA; (+) strand; PAM type: NRG; PAM sequence: CGG
gcttctgcccgcccctctcc

SEQ ID NO: 39301 - DNA, 20 bp, Artificial Sequence
  Description of Artificial Sequence: Synthetic oligonucleotide
  Target: SCNA; (+) strand; PAM type: NRG; PAM sequence: CAG
ggcgctcgctgctttccctg

SEQ ID NO: 39302 - DNA, 20 bp, Artificial Sequence
  Description of Artificial Sequence: Synthetic oligonucleotide
  Target: SCNA; (+) strand; PAM type: NRG; PAM sequence: CGG
cgtgctcctcgtccctatct

SEQ ID NO: 39303 - DNA, 20 bp, Artificial Sequence
  Description of Artificial Sequence: Synthetic oligonucleotide
  Target: SCNA; (+) strand; PAM type: NRG; PAM sequence: TGG
ctcctcgtccctatctcgga

SEQ ID NO: 39304 - DNA, 20 bp, Artificial Sequence
  Description of Artificial Sequence: Synthetic oligonucleotide
  Target: SCNA; (+) strand; PAM type: NRG; PAM sequence: GGG
tcctcgtccctatctcggat

SEQ ID NO: 39305 - DNA, 20 bp, Artificial Sequence
  Description of Artificial Sequence: Synthetic oligonucleotide
  Target: SCNA; (+) strand; PAM type: NRG; PAM sequence: GGG
cctcgtccctatctcggatg

SEQ ID NO: 39306 - DNA, 20 bp, Artificial Sequence
  Description of Artificial Sequence: Synthetic oligonucleotide
  Target: SCNA; (+) strand; PAM type: NRG; PAM sequence: TGG
gtccctatctcggatgggga

SEQ ID NO: 39307 - DNA, 20 bp, Artificial Sequence
  Description of Artificial Sequence: Synthetic oligonucleotide
  Target: SCNA; (+) strand; PAM type: NRG; PAM sequence: GGG
tccctatctcggatggggat

SEQ ID NO: 39308 - DNA, 20 bp, Artificial Sequence
  Description of Artificial Sequence: Synthetic oligonucleotide
  Target: SCNA; (+) strand; PAM type: NRG; PAM sequence: GGG
ccctatctcggatggggatg

SEQ ID NO: 39309 - DNA, 20 bp, Artificial Sequence
  Description of Artificial Sequence: Synthetic oligonucleotide
  Target: SCNA; (+) strand; PAM type: NRG; PAM sequence: CAG
tatctcggatggggatgggg

SEQ ID NO: 39310 - DNA, 20 bp, Artificial Sequence
  Description of Artificial Sequence: Synthetic oligonucleotide
  Target: SCNA; (+) strand; PAM type: NRG; PAM sequence: AGG
atctcggatggggatggggc

SEQ ID NO: 39311 - DNA, 20 bp, Artificial Sequence
  Description of Artificial Sequence: Synthetic oligonucleotide
  Target: SCNA; (+) strand; PAM type: NRG; PAM sequence: GGG
tctcggatggggatggggca

SEQ ID NO: 39312 - DNA, 20 bp, Artificial Sequence
  Description of Artificial Sequence: Synthetic oligonucleotide
  Target: SCNA; (+) strand; PAM type: NRG; PAM sequence: GGG
ctcggatggggatggggcag

SEQ ID NO: 39313 - DNA, 20 bp, Artificial Sequence
  Description of Artificial Sequence: Synthetic oligonucleotide
  Target: SCNA; (+) strand; PAM type: NRG; PAM sequence: GGG
tcggatggggatggggcagg

SEQ ID NO: 39314 - DNA, 20 bp, Artificial Sequence
  Description of Artificial Sequence: Synthetic oligonucleotide
  Target: SCNA; (+) strand; PAM type: NRG; PAM sequence: CGG
tggggatggggcagggggcg

SEQ ID NO: 39315 - DNA, 20 bp, Artificial Sequence
  Description of Artificial Sequence: Synthetic oligonucleotide
  Target: SCNA; (+) strand; PAM type: NRG; PAM sequence: GGG
ggggatggggcagggggcgc

SEQ ID NO: 39316 - DNA, 20 bp, Artificial Sequence
  Description of Artificial Sequence: Synthetic oligonucleotide
  Target: SCNA; (+) strand; PAM type: NRG; PAM sequence: GGG
gggatggggcagggggcgcg

SEQ ID NO: 39317 - DNA, 20 bp, Artificial Sequence
  Description of Artificial Sequence: Synthetic oligonucleotide
  Target: SCNA; (+) strand; PAM type: NRG; PAM sequence: GAG
tggggcagggggcgcggggt

SEQ ID NO: 39318 - DNA, 20 bp, Artificial Sequence
  Description of Artificial Sequence: Synthetic oligonucleotide
  Target: SCNA; (+) strand; PAM type: NRG; PAM sequence: CAG
gcggggtgagccatcaactc

SEQ ID NO: 39319 - DNA, 20 bp, Artificial Sequence
  Description of Artificial Sequence: Synthetic oligonucleotide
  Target: SCNA; (+) strand; PAM type: NRG; PAM sequence: TGG
atcaactccagccgcctgcc

SEQ ID NO: 39320 - DNA, 20 bp, Artificial Sequence
  Description of Artificial Sequence: Synthetic oligonucleotide
  Target: SCNA; (+) strand; PAM type: NRG; PAM sequence: AAG
agccgcctgcctggccgcgc

SEQ ID NO: 39321 - DNA, 20 bp, Artificial Sequence
  Description of Artificial Sequence: Synthetic oligonucleotide
  Target: SCNA; (+) strand; PAM type: NRG; PAM sequence: AGG
gccgcctgcctggccgcgca

SEQ ID NO: 39322 - DNA, 20 bp, Artificial Sequence
  Description of Artificial Sequence: Synthetic oligonucleotide
  Target: SCNA; (+) strand; PAM type: NRG; PAM sequence: CGG
gcctgcctggccgcgcaagg

SEQ ID NO: 39323 - DNA, 20 bp, Artificial Sequence
  Description of Artificial Sequence: Synthetic oligonucleotide
  Target: SCNA; (+) strand; PAM type: NRG; PAM sequence: GGG
cctgcctggccgcgcaaggc

SEQ ID NO: 39324 - DNA, 20 bp, Artificial Sequence
  Description of Artificial Sequence: Synthetic oligonucleotide
  Target: SCNA; (+) strand; PAM type: NRG; PAM sequence: AAG
cctggccgcgcaaggcggga

SEQ ID NO: 39325 - DNA, 20 bp, Artificial Sequence
  Description of Artificial Sequence: Synthetic oligonucleotide
  Target: SCNA; (+) strand; PAM type: NRG; PAM sequence: TGG
ggccgcgcaaggcgggaaag

SEQ ID NO: 39326 - DNA, 20 bp, Artificial Sequence
  Description of Artificial Sequence: Synthetic oligonucleotide
  Target: SCNA; (+) strand; PAM type: NRG; PAM sequence: GGG
gccgcgcaaggcgggaaagt

SEQ ID NO: 39327 - DNA, 20 bp, Artificial Sequence
  Description of Artificial Sequence: Synthetic oligonucleotide
  Target: SCNA; (+) strand; PAM type: NRG; PAM sequence: GGG
ccgcgcaaggcgggaaagtg

SEQ ID NO: 39328 - DNA, 20 bp, Artificial Sequence
  Description of Artificial Sequence: Synthetic oligonucleotide
  Target: SCNA; (+) strand; PAM type: NRG; PAM sequence: GGG
cgcgcaaggcgggaaagtgg

SEQ ID NO: 39329 - DNA, 20 bp, Artificial Sequence
  Description of Artificial Sequence: Synthetic oligonucleotide
  Target: SCNA; (+) strand; PAM type: NRG; PAM sequence: AAG
gcgcttttgcgcctcacgtt

SEQ ID NO: 39330 - DNA, 20 bp, Artificial Sequence
  Description of Artificial Sequence: Synthetic oligonucleotide
  Target: SCNA; (+) strand; PAM type: NRG; PAM sequence: TAG
tttgcgcctcacgttaagtt

SEQ ID NO: 39331 - DNA, 20 bp, Artificial Sequence
  Description of Artificial Sequence: Synthetic oligonucleotide
  Target: SCNA; (+) strand; PAM type: NRG; PAM sequence: AGG
ttgcgcctcacgttaagttt

SEQ ID NO: 39332 - DNA, 20 bp, Artificial Sequence
  Description of Artificial Sequence: Synthetic oligonucleotide
  Target: SCNA; (+) strand; PAM type: NRG; PAM sequence: GGG
tgcgcctcacgttaagttta

SEQ ID NO: 39333 - DNA, 20 bp, Artificial Sequence
  Description of Artificial Sequence: Synthetic oligonucleotide
  Target: SCNA; (+) strand; PAM type: NRG; PAM sequence: GAG
cacgttaagtttagggtcac

SEQ ID NO: 39334 - DNA, 20 bp, Artificial Sequence
  Description of Artificial Sequence: Synthetic oligonucleotide
  Target: SCNA; (+) strand; PAM type: NRG; PAM sequence: TGG
tagggtcacgagcactcttg

SEQ ID NO: 39335 - DNA, 20 bp, Artificial Sequence
  Description of Artificial Sequence: Synthetic oligonucleotide
  Target: SCNA; (+) strand; PAM type: NRG; PAM sequence: GAG
gggtcacgagcactcttgtg

SEQ ID NO: 39336 - DNA, 20 bp, Artificial Sequence
  Description of Artificial Sequence: Synthetic oligonucleotide
  Target: SCNA; (+) strand; PAM type: NRG; PAM sequence: CGG
acgagcactcttgtggagat

SEQ ID NO: 39337 - DNA, 20 bp, Artificial Sequence
  Description of Artificial Sequence: Synthetic oligonucleotide
  Target: SCNA; (+) strand; PAM type: NRG; PAM sequence: GGG
cgagcactcttgtggagatc

SEQ ID NO: 39338 - DNA, 20 bp, Artificial Sequence
  Description of Artificial Sequence: Synthetic oligonucleotide
  Target: SCNA; (+) strand; PAM type: NRG; PAM sequence: GAG
agcactcttgtggagatcgg

SEQ ID NO: 39339 - DNA, 20 bp, Artificial Sequence
  Description of Artificial Sequence: Synthetic oligonucleotide
  Target: SCNA; (+) strand; PAM type: NRG; PAM sequence: CGG
actcttgtggagatcgggag

SEQ ID NO: 39340 - DNA, 20 bp, Artificial Sequence
  Description of Artificial Sequence: Synthetic oligonucleotide
  Target: SCNA; (+) strand; PAM type: NRG; PAM sequence: TGG
ttgtggagatcgggagcggt

SEQ ID NO: 39341 - DNA, 20 bp, Artificial Sequence
  Description of Artificial Sequence: Synthetic oligonucleotide
  Target: SCNA; (+) strand; PAM type: NRG; PAM sequence: GGG
tgtggagatcgggagcggtt

SEQ ID NO: 39342 - DNA, 20 bp, Artificial Sequence
  Description of Artificial Sequence: Synthetic oligonucleotide
  Target: SCNA; (+) strand; PAM type: NRG; PAM sequence: TAG
gagatcgggagcggttgggc

SEQ ID NO: 39343 - DNA, 20 bp, Artificial Sequence
  Description of Artificial Sequence: Synthetic oligonucleotide
  Target: SCNA; (+) strand; PAM type: NRG; PAM sequence: AGG
agatcgggagcggttgggct

SEQ ID NO: 39344 - DNA, 20 bp, Artificial Sequence
  Description of Artificial Sequence: Synthetic oligonucleotide
  Target: SCNA; (+) strand; PAM type: NRG; PAM sequence: GGG
gatcgggagcggttgggcta

SEQ ID NO: 39345 - DNA, 20 bp, Artificial Sequence
  Description of Artificial Sequence: Synthetic oligonucleotide
  Target: SCNA; (+) strand; PAM type: NRG; PAM sequence: TGG
tcttgtccccgcctttcctc

SEQ ID NO: 39346 - DNA, 20 bp, Artificial Sequence
  Description of Artificial Sequence: Synthetic oligonucleotide
  Target: SCNA; (+) strand; PAM type: NRG; PAM sequence: GGG
cttgtccccgcctttcctct

SEQ ID NO: 39347 - DNA, 20 bp, Artificial Sequence
  Description of Artificial Sequence: Synthetic oligonucleotide
  Target: SCNA; (+) strand; PAM type: NRG; PAM sequence: CGG
gcctttcctctgggtcctcc

SEQ ID NO: 39348 - DNA, 20 bp, Artificial Sequence
  Description of Artificial Sequence: Synthetic oligonucleotide
  Target: SCNA; (+) strand; PAM type: NRG; PAM sequence: GGG
cctttcctctgggtcctccc

SEQ ID NO: 39349 - DNA, 20 bp, Artificial Sequence
  Description of Artificial Sequence: Synthetic oligonucleotide
  Target: SCNA; (+) strand; PAM type: NRG; PAM sequence: GGG
ctttcctctgggtcctcccg

SEQ ID NO: 39350 - DNA, 20 bp, Artificial Sequence
  Description of Artificial Sequence: Synthetic oligonucleotide
  Target: SCNA; (+) strand; PAM type: NRG; PAM sequence: CAG
gaccaccccctacccctcgt

SEQ ID NO: 39351 - DNA, 20 bp, Artificial Sequence
  Description of Artificial Sequence: Synthetic oligonucleotide
  Target: SCNA; (+) strand; PAM type: NRG; PAM sequence: GAG
ccaccccctacccctcgtca

SEQ ID NO: 39352 - DNA, 20 bp, Artificial Sequence
  Description of Artificial Sequence: Synthetic oligonucleotide
  Target: SCNA; (+) strand; PAM type: NRG; PAM sequence: TGG
acccctcgtcagagtcgccc

SEQ ID NO: 39353 - DNA, 20 bp, Artificial Sequence
  Description of Artificial Sequence: Synthetic oligonucleotide
  Target: SCNA; (+) strand; PAM type: NRG; PAM sequence: GGG
cccctcgtcagagtcgccct

SEQ ID NO: 39354 - DNA, 20 bp, Artificial Sequence
  Description of Artificial Sequence: Synthetic oligonucleotide
  Target: SCNA; (+) strand; PAM type: NRG; PAM sequence: GAG
cctcgtcagagtcgccctgg

SEQ ID NO: 39355 - DNA, 20 bp, Artificial Sequence
  Description of Artificial Sequence: Synthetic oligonucleotide
  Target: SCNA; (+) strand; PAM type: NRG; PAM sequence: GAG
tcgtcagagtcgccctggga

SEQ ID NO: 39356 - DNA, 20 bp, Artificial Sequence
  Description of Artificial Sequence: Synthetic oligonucleotide
  Target: SCNA; (+) strand; PAM type: NRG; PAM sequence: GAG
agagtcgccctgggagagcc

SEQ ID NO: 39357 - DNA, 20 bp, Artificial Sequence
  Description of Artificial Sequence: Synthetic oligonucleotide
  Target: SCNA; (+) strand; PAM type: NRG; PAM sequence: AGG
gagtcgccctgggagagccg

SEQ ID NO: 39358 - DNA, 20 bp, Artificial Sequence
  Description of Artificial Sequence: Synthetic oligonucleotide
  Target: SCNA; (+) strand; PAM type: NRG; PAM sequence: GGG
agtcgccctgggagagccga

SEQ ID NO: 39359 - DNA, 20 bp, Artificial Sequence
  Description of Artificial Sequence: Synthetic oligonucleotide
  Target: SCNA; (+) strand; PAM type: NRG; PAM sequence: GAG
cctgggagagccgagggcct

SEQ ID NO: 39360 - DNA, 20 bp, Artificial Sequence
  Description of Artificial Sequence: Synthetic oligonucleotide
  Target: SCNA; (+) strand; PAM type: NRG; PAM sequence: AGG
ctgggagagccgagggcctg

SEQ ID NO: 39361 - DNA, 20 bp, Artificial Sequence
  Description of Artificial Sequence: Synthetic oligonucleotide
  Target: SCNA; (+) strand; PAM type: NRG; PAM sequence: GGG
tgggagagccgagggcctga

SEQ ID NO: 39362 - DNA, 20 bp, Artificial Sequence
  Description of Artificial Sequence: Synthetic oligonucleotide
  Target: SCNA; (+) strand; PAM type: NRG; PAM sequence: AAG
gggcctgagggtcgaccacc

SEQ ID NO: 39363 - DNA, 20 bp, Artificial Sequence
  Description of Artificial Sequence: Synthetic oligonucleotide
  Target: SCNA; (+) strand; PAM type: NRG; PAM sequence: AGG
ggcctgagggtcgaccacca

SEQ ID NO: 39364 - DNA, 20 bp, Artificial Sequence
  Description of Artificial Sequence: Synthetic oligonucleotide
  Target: SCNA; (+) strand; PAM type: NRG; PAM sequence: GGG
gcctgagggtcgaccaccaa

SEQ ID NO: 39365 - DNA, 20 bp, Artificial Sequence
  Description of Artificial Sequence: Synthetic oligonucleotide
  Target: SCNA; (+) strand; PAM type: NRG; PAM sequence: CAG
tgagggtcgaccaccaaggg

SEQ ID NO: 39366 - DNA, 20 bp, Artificial Sequence
  Description of Artificial Sequence: Synthetic oligonucleotide
  Target: SCNA; (+) strand; PAM type: NRG; PAM sequence: GAG
agggtcgaccaccaagggca

SEQ ID NO: 39367 - DNA, 20 bp, Artificial Sequence
  Description of Artificial Sequence: Synthetic oligonucleotide
  Target: SCNA; (+) strand; PAM type: NRG; PAM sequence: TGG
caagggcagagcctatccct

SEQ ID NO: 39368 - DNA, 20 bp, Artificial Sequence
  Description of Artificial Sequence: Synthetic oligonucleotide
  Target: SCNA; (+) strand; PAM type: NRG; PAM sequence: GGG
aagggcagagcctatccctt

SEQ ID NO: 39369 - DNA, 20 bp, Artificial Sequence
  Description of Artificial Sequence: Synthetic oligonucleotide
  Target: SCNA; (+) strand; PAM type: NRG; PAM sequence: GGG
agggcagagcctatcccttg

SEQ ID NO: 39370 - DNA, 20 bp, Artificial Sequence
  Description of Artificial Sequence: Synthetic oligonucleotide
  Target: SCNA; (+) strand; PAM type: NRG; PAM sequence: GAG
ggcagagcctatcccttggg

SEQ ID NO: 39371 - DNA, 20 bp, Artificial Sequence
  Description of Artificial Sequence: Synthetic oligonucleotide
  Target: SCNA; (+) strand; PAM type: NRG; PAM sequence: TGG
cctatcccttggggagctgc

SEQ ID NO: 39372 - DNA, 20 bp, Artificial Sequence
  Description of Artificial Sequence: Synthetic oligonucleotide
  Target: SCNA; (+) strand; PAM type: NRG; PAM sequence: GAG
tatcccttggggagctgctg

SEQ ID NO: 39373 - DNA, 20 bp, Artificial Sequence
  Description of Artificial Sequence: Synthetic oligonucleotide
  Target: SCNA; (+) strand; PAM type: NRG; PAM sequence: AGG
atcccttggggagctgctgg

SEQ ID NO: 39374 - DNA, 20 bp, Artificial Sequence
  Description of Artificial Sequence: Synthetic oligonucleotide
  Target: SCNA; (+) strand; PAM type: NRG; PAM sequence: GAG
cccttggggagctgctggag

SEQ ID NO: 39375 - DNA, 20 bp, Artificial Sequence
  Description of Artificial Sequence: Synthetic oligonucleotide
  Target: SCNA; (+) strand; PAM type: NRG; PAM sequence: CAG
tggggagctgctggaggaga

SEQ ID NO: 39376 - DNA, 20 bp, Artificial Sequence
  Description of Artificial Sequence: Synthetic oligonucleotide
  Target: SCNA; (+) strand; PAM type: NRG; PAM sequence: AGG
ggggagctgctggaggagac

SEQ ID NO: 39377 - DNA, 20 bp, Artificial Sequence
  Description of Artificial Sequence: Synthetic oligonucleotide
  Target: SCNA; (+) strand; PAM type: NRG; PAM sequence: CAG
gagctgctggaggagacagg

SEQ ID NO: 39378 - DNA, 20 bp, Artificial Sequence
  Description of Artificial Sequence: Synthetic oligonucleotide
  Target: SCNA; (+) strand; PAM type: NRG; PAM sequence: CGG
ctggaggagacaggcagcgc

SEQ ID NO: 39379 - DNA, 20 bp, Artificial Sequence
  Description of Artificial Sequence: Synthetic oligonucleotide
  Target: SCNA; (+) strand; PAM type: NRG; PAM sequence: GGG
tggaggagacaggcagcgcc

SEQ ID NO: 39380 - DNA, 20 bp, Artificial Sequence
  Description of Artificial Sequence: Synthetic oligonucleotide
  Target: SCNA; (+) strand; PAM type: NRG; PAM sequence: GAG
gaggagacaggcagcgccgg

SEQ ID NO: 39381 - DNA, 20 bp, Artificial Sequence
  Description of Artificial Sequence: Synthetic oligonucleotide
  Target: SCNA; (+) strand; PAM type: NRG; PAM sequence: AGG
aggagacaggcagcgccggg

SEQ ID NO: 39382 - DNA, 20 bp, Artificial Sequence
  Description of Artificial Sequence: Synthetic oligonucleotide
  Target: SCNA; (+) strand; PAM type: NRG; PAM sequence: TGG
agacaggcagcgccgggagg

SEQ ID NO: 39383 - DNA, 20 bp, Artificial Sequence
  Description of Artificial Sequence: Synthetic oligonucleotide
  Target: SCNA; (+) strand; PAM type: NRG; PAM sequence: GAG
gtggctcacaccgcaccgcc

SEQ ID NO: 39384 - DNA, 20 bp, Artificial Sequence
  Description of Artificial Sequence: Synthetic oligonucleotide
  Target: SCNA; (+) strand; PAM type: NRG; PAM sequence: GAG
ggctcacaccgcaccgccga

SEQ ID NO: 39385 - DNA, 20 bp, Artificial Sequence
  Description of Artificial Sequence: Synthetic oligonucleotide
  Target: SCNA; (+) strand; PAM type: NRG; PAM sequence: CGG
gcatcgctgaaatttaatca

SEQ ID NO: 39386 - DNA, 20 bp, Artificial Sequence
  Description of Artificial Sequence: Synthetic oligonucleotide
  Target: SCNA; (+) strand; PAM type: NRG; PAM sequence: CAG
ctgaaatttaatcacggtca

SEQ ID NO: 39387 - DNA, 20 bp, Artificial Sequence
  Description of Artificial Sequence: Synthetic oligonucleotide
  Target: SCNA; (+) strand; PAM type: NRG; PAM sequence: AGG
tgaaatttaatcacggtcac

SEQ ID NO: 39388 - DNA, 20 bp, Artificial Sequence
  Description of Artificial Sequence: Synthetic oligonucleotide
  Target: SCNA; (+) strand; PAM type: NRG; PAM sequence: TAG
acggtcacaggttacaacgt

SEQ ID NO: 39389 - DNA, 20 bp, Artificial Sequence
  Description of Artificial Sequence: Synthetic oligonucleotide
  Target: SCNA; (+) strand; PAM type: NRG; PAM sequence: AGG
cggtcacaggttacaacgtt

SEQ ID NO: 39390 - DNA, 20 bp, Artificial Sequence
  Description of Artificial Sequence: Synthetic oligonucleotide
  Target: SCNA; (+) strand; PAM type: NRG; PAM sequence: GGG
ggtcacaggttacaacgtta

SEQ ID NO: 39391 - DNA, 20 bp, Artificial Sequence
  Description of Artificial Sequence: Synthetic oligonucleotide
  Target: SCNA; (+) strand; PAM type: NRG; PAM sequence: GGG
gtcacaggttacaacgttag

SEQ ID NO: 39392 - DNA, 20 bp, Artificial Sequence
  Description of Artificial Sequence: Synthetic oligonucleotide
  Target: SCNA; (+) strand; PAM type: NRG; PAM sequence: TAG
tacaacgttaggggtcgctt

SEQ ID NO: 39393 - DNA, 20 bp, Artificial Sequence
  Description of Artificial Sequence: Synthetic oligonucleotide
  Target: SCNA; (+) strand; PAM type: NRG; PAM sequence: AAG
gctttagttcaaatatcttc

SEQ ID NO: 39394 - DNA, 20 bp, Artificial Sequence
  Description of Artificial Sequence: Synthetic oligonucleotide
  Target: SCNA; (+) strand; PAM type: NRG; PAM sequence: AGG
ctttagttcaaatatcttca

SEQ ID NO: 39395 - DNA, 20 bp, Artificial Sequence
  Description of Artificial Sequence: Synthetic oligonucleotide
  Target: SCNA; (+) strand; PAM type: NRG; PAM sequence: TAG
gttttcgtttgctcttaatc

SEQ ID NO: 39396 - DNA, 20 bp, Artificial Sequence
  Description of Artificial Sequence: Synthetic oligonucleotide
  Target: SCNA; (+) strand; PAM type: NRG; PAM sequence: AGG
ttttcgtttgctcttaatct

SEQ ID NO: 39397 - DNA, 20 bp, Artificial Sequence
  Description of Artificial Sequence: Synthetic oligonucleotide
  Target: SCNA; (+) strand; PAM type: NRG; PAM sequence: AAG
tcgtttgctcttaatctagg

SEQ ID NO: 39398 - DNA, 20 bp, Artificial Sequence
  Description of Artificial Sequence: Synthetic oligonucleotide
  Target: SCNA; (+) strand; PAM type: NRG; PAM sequence: GAG
gtttgctcttaatctaggaa

SEQ ID NO: 39399 - DNA, 20 bp, Artificial Sequence
  Description of Artificial Sequence: Synthetic oligonucleotide
  Target: SCNA; (+) strand; PAM type: NRG; PAM sequence: CGG
gctcttaatctaggaagagc

SEQ ID NO: 39400 - DNA, 20 bp, Artificial Sequence
  Description of Artificial Sequence: Synthetic oligonucleotide
  Target: SCNA; (+) strand; PAM type: NRG; PAM sequence: AAG
ttaatctaggaagagccgga

SEQ ID NO: 39401 - DNA, 20 bp, Artificial Sequence
  Description of Artificial Sequence: Synthetic oligonucleotide
  Target: SCNA; (+) strand; PAM type: NRG; PAM sequence: AGG
taatctaggaagagccggaa

SEQ ID NO: 39402 - DNA, 20 bp, Artificial Sequence
  Description of Artificial Sequence: Synthetic oligonucleotide
  Target: SCNA; (+) strand; PAM type: NRG; PAM sequence: GGG
aatctaggaagagccggaaa

SEQ ID NO: 39403 - DNA, 20 bp, Artificial Sequence
  Description of Artificial Sequence: Synthetic oligonucleotide
  Target: SCNA; (+) strand; PAM type: NRG; PAM sequence: GAG
gaagagccggaaagggtcct

SEQ ID NO: 39404 - DNA, 20 bp, Artificial Sequence
  Description of Artificial Sequence: Synthetic oligonucleotide
  Target: SCNA; (+) strand; PAM type: NRG; PAM sequence: AGG
aagagccggaaagggtcctg

SEQ ID NO: 39405 - DNA, 20 bp, Artificial Sequence
  Description of Artificial Sequence: Synthetic oligonucleotide
  Target: SCNA; (+) strand; PAM type: NRG; PAM sequence: GGG
agagccggaaagggtcctga

SEQ ID NO: 39406 - DNA, 20 bp, Artificial Sequence
  Description of Artificial Sequence: Synthetic oligonucleotide
  Target: SCNA; (+) strand; PAM type: NRG; PAM sequence: AAG
ggaaagggtcctgagggtga

SEQ ID NO: 39407 - DNA, 20 bp, Artificial Sequence
  Description of Artificial Sequence: Synthetic oligonucleotide
  Target: SCNA; (+) strand; PAM type: NRG; PAM sequence: AGG
gaaagggtcctgagggtgaa

SEQ ID NO: 39408 - DNA, 20 bp, Artificial Sequence
  Description of Artificial Sequence: Synthetic oligonucleotide
  Target: SCNA; (+) strand; PAM type: NRG; PAM sequence: GGG
aaagggtcctgagggtgaaa

SEQ ID NO: 39409 - DNA, 20 bp, Artificial Sequence
  Description of Artificial Sequence: Synthetic oligonucleotide
  Target: SCNA; (+) strand; PAM type: NRG; PAM sequence: GAG
agggtcctgagggtgaaagg

SEQ ID NO: 39410 - DNA, 20 bp, Artificial Sequence
  Description of Artificial Sequence: Synthetic oligonucleotide
  Target: SCNA; (+) strand; PAM type: NRG; PAM sequence: AAG
agggtgaaagggagactact

SEQ ID NO: 39411 - DNA, 20 bp, Artificial Sequence
  Description of Artificial Sequence: Synthetic oligonucleotide
  Target: SCNA; (+) strand; PAM type: NRG; PAM sequence: AGG
gggtgaaagggagactacta

SEQ ID NO: 39412 - DNA, 20 bp, Artificial Sequence
  Description of Artificial Sequence: Synthetic oligonucleotide
  Target: SCNA; (+) strand; PAM type: NRG; PAM sequence: AAG
tgaaagggagactactaagg

SEQ ID NO: 39413 - DNA, 20 bp, Artificial Sequence
  Description of Artificial Sequence: Synthetic oligonucleotide
  Target: SCNA; (+) strand; PAM type: NRG; PAM sequence: GAG
aaagggagactactaaggaa

SEQ ID NO: 39414 - DNA, 20 bp, Artificial Sequence
  Description of Artificial Sequence: Synthetic oligonucleotide
  Target: SCNA; (+) strand; PAM type: NRG; PAM sequence: CAG
agactactaaggaagagtca

SEQ ID NO: 39415 - DNA, 20 bp, Artificial Sequence
  Description of Artificial Sequence: Synthetic oligonucleotide
  Target: SCNA; (+) strand; PAM type: NRG; PAM sequence: AGG
gactactaaggaagagtcac

SEQ ID NO: 39416 - DNA, 20 bp, Artificial Sequence
  Description of Artificial Sequence: Synthetic oligonucleotide
  Target: SCNA; (+) strand; PAM type: NRG; PAM sequence: GAG
ctaaggaagagtcacaggtt

SEQ ID NO: 39417 - DNA, 20 bp, Artificial Sequence
  Description of Artificial Sequence: Synthetic oligonucleotide
  Target: SCNA; (+) strand; PAM type: NRG; PAM sequence: AGG
taaggaagagtcacaggttg

SEQ ID NO: 39418 - DNA, 20 bp, Artificial Sequence
  Description of Artificial Sequence: Synthetic oligonucleotide
  Target: SCNA; (+) strand; PAM type: NRG; PAM sequence: GAG
aggaagagtcacaggttgag

SEQ ID NO: 39419 - DNA, 20 bp, Artificial Sequence
  Description of Artificial Sequence: Synthetic oligonucleotide
  Target: SCNA; (+) strand; PAM type: NRG; PAM sequence: AGG
ggaagagtcacaggttgagg

SEQ ID NO: 39420 - DNA, 20 bp, Artificial Sequence
  Description of Artificial Sequence: Synthetic oligonucleotide
  Target: SCNA; (+) strand; PAM type: NRG; PAM sequence: CAG
agagtcacaggttgaggagg

SEQ ID NO: 39421 - DNA, 20 bp, Artificial Sequence
  Description of Artificial Sequence: Synthetic oligonucleotide
  Target: SCNA; (+) strand; PAM type: NRG; PAM sequence: AGG
gagtcacaggttgaggaggc

SEQ ID NO: 39422 - DNA, 20 bp, Artificial Sequence
  Description of Artificial Sequence: Synthetic oligonucleotide
  Target: SCNA; (+) strand; PAM type: NRG; PAM sequence: GAG
gtcacaggttgaggaggcag

SEQ ID NO: 39423 - DNA, 20 bp, Artificial Sequence
  Description of Artificial Sequence: Synthetic oligonucleotide
  Target: SCNA; (+) strand; PAM type: NRG; PAM sequence: AAG
acaggttgaggaggcaggag

SEQ ID NO: 39424 - DNA, 20 bp, Artificial Sequence
  Description of Artificial Sequence: Synthetic oligonucleotide
  Target: SCNA; (+) strand; PAM type: NRG; PAM sequence: AGG
caggttgaggaggcaggaga

SEQ ID NO: 39425 - DNA, 20 bp, Artificial Sequence
  Description of Artificial Sequence: Synthetic oligonucleotide
  Target: SCNA; (+) strand; PAM type: NRG; PAM sequence: CAG
tgaggaggcaggagaaggct

SEQ ID NO: 39426 - DNA, 20 bp, Artificial Sequence
  Description of Artificial Sequence: Synthetic oligonucleotide
  Target: SCNA; (+) strand; PAM type: NRG; PAM sequence: CAG
ccattttcctttccaccaat

SEQ ID NO: 39427 - DNA, 20 bp, Artificial Sequence
  Description of Artificial Sequence: Synthetic oligonucleotide
  Target: SCNA; (+) strand; PAM type: NRG; PAM sequence: CAG
ttccaccaatcagcgcctgc

SEQ ID NO: 39428 - DNA, 20 bp, Artificial Sequence
  Description of Artificial Sequence: Synthetic oligonucleotide
  Target: SCNA; (+) strand; PAM type: NRG; PAM sequence: CAG
ccagacgctgattttcccat

SEQ ID NO: 39429 - DNA, 20 bp, Artificial Sequence
  Description of Artificial Sequence: Synthetic oligonucleotide
  Target: SCNA; (+) strand; PAM type: NRG; PAM sequence: TGG
gacgctgattttcccatcag

SEQ ID NO: 39430 - DNA, 20 bp, Artificial Sequence
  Description of Artificial Sequence: Synthetic oligonucleotide
  Target: SCNA; (+) strand; PAM type: NRG; PAM sequence: AAG
gattttcccatcagtggaac

SEQ ID NO: 39431 - DNA, 20 bp, Artificial Sequence
  Description of Artificial Sequence: Synthetic oligonucleotide
  Target: SCNA; (+) strand; PAM type: NRG; PAM sequence: AGG
attttcccatcagtggaaca

SEQ ID NO: 39432 - DNA, 20 bp, Artificial Sequence
  Description of Artificial Sequence: Synthetic oligonucleotide
  Target: SCNA; (+) strand; PAM type: NRG; PAM sequence: CAG
aacaaggaataaatattccc

SEQ ID NO: 39433 - DNA, 20 bp, Artificial Sequence
  Description of Artificial Sequence: Synthetic oligonucleotide
  Target: SCNA; (+) strand; PAM type: NRG; PAM sequence: AAG
attccccagccgtctaaaac

SEQ ID NO: 39434 - DNA, 20 bp, Artificial Sequence
  Description of Artificial Sequence: Synthetic oligonucleotide
  Target: SCNA; (+) strand; PAM type: NRG; PAM sequence: CGG
ccccagccgtctaaaacaag

SEQ ID NO: 39435 - DNA, 20 bp, Artificial Sequence
  Description of Artificial Sequence: Synthetic oligonucleotide
  Target: SCNA; (+) strand; PAM type: NRG; PAM sequence: AAG
cgtctaaaacaagcggtcct

SEQ ID NO: 39436 - DNA, 20 bp, Artificial Sequence
  Description of Artificial Sequence: Synthetic oligonucleotide
  Target: SCNA; (+) strand; PAM type: NRG; PAM sequence: AGG
gtctaaaacaagcggtccta

SEQ ID NO: 39437 - DNA, 20 bp, Artificial Sequence
  Description of Artificial Sequence: Synthetic oligonucleotide
  Target: SCNA; (+) strand; PAM type: NRG; PAM sequence: TAG
ggtcctaaggcttttcgctc

SEQ ID NO: 39438 - DNA, 20 bp, Artificial Sequence
  Description of Artificial Sequence: Synthetic oligonucleotide
  Target: SCNA; (+) strand; PAM type: NRG; PAM sequence: TGG
aaggcttttcgctctagaaa

SEQ ID NO: 39439 - DNA, 20 bp, Artificial Sequence
  Description of Artificial Sequence: Synthetic oligonucleotide
  Target: SCNA; (+) strand; PAM type: NRG; PAM sequence: GGG
aggcttttcgctctagaaat

SEQ ID NO: 39440 - DNA, 20 bp, Artificial Sequence
  Description of Artificial Sequence: Synthetic oligonucleotide
  Target: SCNA; (+) strand; PAM type: NRG; PAM sequence: CAG
tagaaatgggacttactttg

SEQ ID NO: 39441 - DNA, 20 bp, Artificial Sequence
  Description of Artificial Sequence: Synthetic oligonucleotide
  Target: SCNA; (+) strand; PAM type: NRG; PAM sequence: TGG
tttgcagacctccctttatc

SEQ ID NO: 39442 - DNA, 20 bp, Artificial Sequence
  Description of Artificial Sequence: Synthetic oligonucleotide
  Target: SCNA; (+) strand; PAM type: NRG; PAM sequence: GGG
ttgcagacctccctttatct

SEQ ID NO: 39443 - DNA, 20 bp, Artificial Sequence
  Description of Artificial Sequence: Synthetic oligonucleotide
  Target: SCNA; (+) strand; PAM type: NRG; PAM sequence: GAG
gcagacctccctttatctgg

SEQ ID NO: 39444 - DNA, 20 bp, Artificial Sequence
  Description of Artificial Sequence: Synthetic oligonucleotide
  Target: SCNA; (+) strand; PAM type: NRG; PAM sequence: CAG
ctttatctgggagacaaatc

SEQ ID NO: 39445 - DNA, 20 bp, Artificial Sequence
  Description of Artificial Sequence: Synthetic oligonucleotide
  Target: SCNA; (+) strand; PAM type: NRG; PAM sequence: TAG
gagacaaatccagcgtgatt

SEQ ID NO: 39446 - DNA, 20 bp, Artificial Sequence
  Description of Artificial Sequence: Synthetic oligonucleotide
  Target: SCNA; (+) strand; PAM type: NRG; PAM sequence: CGG
tccagcgtgatttagcctac

SEQ ID NO: 39447 - DNA, 20 bp, Artificial Sequence
  Description of Artificial Sequence: Synthetic oligonucleotide
  Target: SCNA; (+) strand; PAM type: NRG; PAM sequence: CAG
atcatatccaatttcttctt

SEQ ID NO: 39448 - DNA, 20 bp, Artificial Sequence
  Description of Artificial Sequence: Synthetic oligonucleotide
  Target: SCNA; (+) strand; PAM type: NRG; PAM sequence: AAG
tcttcttcagccccttctga

SEQ ID NO: 39449 - DNA, 20 bp, Artificial Sequence
  Description of Artificial Sequence: Synthetic oligonucleotide
  Target: SCNA; (+) strand; PAM type: NRG; PAM sequence: AGG
cttcttcagccccttctgaa

SEQ ID NO: 39450 - DNA, 20 bp, Artificial Sequence
  Description of Artificial Sequence: Synthetic oligonucleotide
  Target: SCNA; (+) strand; PAM type: NRG; PAM sequence: GGG
ttcttcagccccttctgaaa

SEQ ID NO: 39451 - DNA, 20 bp, Artificial Sequence
  Description of Artificial Sequence: Synthetic oligonucleotide
  Target: SCNA; (+) strand; PAM type: NRG; PAM sequence: GAG
cttcagccccttctgaaagg

SEQ ID NO: 39452 - DNA, 20 bp, Artificial Sequence
  Description of Artificial Sequence: Synthetic oligonucleotide
  Target: SCNA; (+) strand; PAM type: NRG; PAM sequence: CAG
cttctgattctcgttgccct

SEQ ID NO: 39453 - DNA, 20 bp, Artificial Sequence
  Description of Artificial Sequence: Synthetic oligonucleotide
  Target: SCNA; (+) strand; PAM type: NRG; PAM sequence: CAG
ccaccacacgcacatgcaca

SEQ ID NO: 39454 - DNA, 20 bp, Artificial Sequence
  Description of Artificial Sequence: Synthetic oligonucleotide
  Target: SCNA; (+) strand; PAM type: NRG; PAM sequence: AAG
gacatacacacgcgaacttc

SEQ ID NO: 39455 - DNA, 20 bp, Artificial Sequence
  Description of Artificial Sequence: Synthetic oligonucleotide
  Target: SCNA; (+) strand; PAM type: NRG; PAM sequence: CAG
taacacattttcacctcttt

SEQ ID NO: 39456 - DNA, 20 bp, Artificial Sequence
  Description of Artificial Sequence: Synthetic oligonucleotide
  Target: SCNA; (+) strand; PAM type: NRG; PAM sequence: GAG
acacattttcacctctttca

SEQ ID NO: 39457 - DNA, 20 bp, Artificial Sequence
  Description of Artificial Sequence: Synthetic oligonucleotide
  Target: SCNA; (+) strand; PAM type: NRG; PAM sequence: TGG
attttcacctctttcagagc

SEQ ID NO: 39458 - DNA, 20 bp, Artificial Sequence
  Description of Artificial Sequence: Synthetic oligonucleotide
  Target: SCNA; (+) strand; PAM type: NRG; PAM sequence: AAG
ttcacctctttcagagctgg

SEQ ID NO: 39459 - DNA, 20 bp, Artificial Sequence
  Description of Artificial Sequence: Synthetic oligonucleotide
  Target: SCNA; (+) strand; PAM type: NRG; PAM sequence: CAG
cctctttcagagctggaaga

SEQ ID NO: 39460 - DNA, 20 bp, Artificial Sequence
  Description of Artificial Sequence: Synthetic oligonucleotide
  Target: SCNA; (+) strand; PAM type: NRG; PAM sequence: TGG
agctggaagacagctgttcc

SEQ ID NO: 39461 - DNA, 20 bp, Artificial Sequence
  Description of Artificial Sequence: Synthetic oligonucleotide
  Target: SCNA; (+) strand; PAM type: NRG; PAM sequence: CAG
cagctgttcctggatcacac

SEQ ID NO: 39462 - DNA, 20 bp, Artificial Sequence
  Description of Artificial Sequence: Synthetic oligonucleotide
  Target: SCNA; (+) strand; PAM type: NRG; PAM sequence: TGG
gttcctggatcacaccagaa

SEQ ID NO: 39463 - DNA, 20 bp, Artificial Sequence
  Description of Artificial Sequence: Synthetic oligonucleotide
  Target: SCNA; (+) strand; PAM type: NRG; PAM sequence: GAG
tcctggatcacaccagaatg

SEQ ID NO: 39464 - DNA, 20 bp, Artificial Sequence
  Description of Artificial Sequence: Synthetic oligonucleotide
  Target: SCNA; (+) strand; PAM type: NRG; PAM sequence: AAG
tggatcacaccagaatggag

SEQ ID NO: 39465 - DNA, 20 bp, Artificial Sequence
  Description of Artificial Sequence: Synthetic oligonucleotide
  Target: SCNA; (+) strand; PAM type: NRG; PAM sequence: AAG
tcacaccagaatggagaagc

SEQ ID NO: 39466 - DNA, 20 bp, Artificial Sequence
  Description of Artificial Sequence: Synthetic oligonucleotide
  Target: SCNA; (+) strand; PAM type: NRG; PAM sequence: TAG
gagaagcaagctcctcccac

SEQ ID NO: 39467 - DNA, 20 bp, Artificial Sequence
  Description of Artificial Sequence: Synthetic oligonucleotide
  Target: SCNA; (+) strand; PAM type: NRG; PAM sequence: CAG
aagcaagctcctcccactag

SEQ ID NO: 39468 - DNA, 20 bp, Artificial Sequence
  Description of Artificial Sequence: Synthetic oligonucleotide
  Target: SCNA; (+) strand; PAM type: NRG; PAM sequence: AAG
aagctcctcccactagcaga

SEQ ID NO: 39469 - DNA, 20 bp, Artificial Sequence
  Description of Artificial Sequence: Synthetic oligonucleotide
  Target: SCNA; (+) strand; PAM type: NRG; PAM sequence: TGG
aagcctttgctttctgtgcc

SEQ ID NO: 39470 - DNA, 20 bp, Artificial Sequence
  Description of Artificial Sequence: Synthetic oligonucleotide
  Target: SCNA; (+) strand; PAM type: NRG; PAM sequence: CGG
ttgctttctgtgcctggatt

SEQ ID NO: 39471 - DNA, 20 bp, Artificial Sequence
  Description of Artificial Sequence: Synthetic oligonucleotide
  Target: SCNA; (+) strand; PAM type: NRG; PAM sequence: AAG
ctttctgtgcctggattcgg

SEQ ID NO: 39472 - DNA, 20 bp, Artificial Sequence
  Description of Artificial Sequence: Synthetic oligonucleotide
  Target: SCNA; (+) strand; PAM type: NRG; PAM sequence: TAG
tgtgcctggattcggaagat

SEQ ID NO: 39473 - DNA, 20 bp, Artificial Sequence
  Description of Artificial Sequence: Synthetic oligonucleotide
  Target: SCNA; (+) strand; PAM type: NRG; PAM sequence: AAG
ctggattcggaagattagtt

SEQ ID NO: 39474 - DNA, 20 bp, Artificial Sequence
  Description of Artificial Sequence: Synthetic oligonucleotide
  Target: SCNA; (+) strand; PAM type: NRG; PAM sequence: TGG
tcggaagattagttaagcac

SEQ ID NO: 39475 - DNA, 20 bp, Artificial Sequence
  Description of Artificial Sequence: Synthetic oligonucleotide
  Target: SCNA; (+) strand; PAM type: NRG; PAM sequence: AAG
gaagattagttaagcactgg

SEQ ID NO: 39476 - DNA, 20 bp, Artificial Sequence
  Description of Artificial Sequence: Synthetic oligonucleotide
  Target: SCNA; (+) strand; PAM type: NRG; PAM sequence: GAG
agattagttaagcactggaa

SEQ ID NO: 39477 - DNA, 20 bp, Artificial Sequence
  Description of Artificial Sequence: Synthetic oligonucleotide
  Target: SCNA; (+) strand; PAM type: NRG; PAM sequence: AGG
gattagttaagcactggaag

SEQ ID NO: 39478 - DNA, 20 bp, Artificial Sequence
  Description of Artificial Sequence: Synthetic oligonucleotide
  Target: SCNA; (+) strand; PAM type: NRG; PAM sequence: GAG
ttagttaagcactggaagag

SEQ ID NO: 39479 - DNA, 20 bp, Artificial Sequence
  Description of Artificial Sequence: Synthetic oligonucleotide
  Target: SCNA; (+) strand; PAM type: NRG; PAM sequence: AGG
tagttaagcactggaagagg

SEQ ID NO: 39480 - DNA, 20 bp, Artificial Sequence
  Description of Artificial Sequence: Synthetic oligonucleotide
  Target: SCNA; (+) strand; PAM type: NRG; PAM sequence: GGG
agttaagcactggaagagga

SEQ ID NO: 39481 - DNA, 20 bp, Artificial Sequence
  Description of Artificial Sequence: Synthetic oligonucleotide
  Target: SCNA; (+) strand; PAM type: NRG; PAM sequence: GGG
gttaagcactggaagaggag

SEQ ID NO: 39482 - DNA, 20 bp, Artificial Sequence
  Description of Artificial Sequence: Synthetic oligonucleotide
  Target: SCNA; (+) strand; PAM type: NRG; PAM sequence: GGG
ttaagcactggaagaggagg

SEQ ID NO: 39483 - DNA, 20 bp, Artificial Sequence
  Description of Artificial Sequence: Synthetic oligonucleotide
  Target: SCNA; (+) strand; PAM type: NRG; PAM sequence: GGG
taagcactggaagaggaggg

SEQ ID NO: 39484 - DNA, 20 bp, Artificial Sequence
  Description of Artificial Sequence: Synthetic oligonucleotide
  Target: SCNA; (+) strand; PAM type: NRG; PAM sequence: TAG
tttaattgtttttatattta

SEQ ID NO: 39485 - DNA, 20 bp, Artificial Sequence
  Description of Artificial Sequence: Synthetic oligonucleotide
  Target: SCNA; (+) strand; PAM type: NRG; PAM sequence: AAG
attgtttttatatttataga

SEQ ID NO: 39486 - DNA, 20 bp, Artificial Sequence
  Description of Artificial Sequence: Synthetic oligonucleotide
  Target: SCNA; (+) strand; PAM type: NRG; PAM sequence: TGG
gtctgattcttgcgctaatt

SEQ ID NO: 39487 - DNA, 20 bp, Artificial Sequence
  Description of Artificial Sequence: Synthetic oligonucleotide
  Target: SCNA; (+) strand; PAM type: NRG; PAM sequence: GGG
tctgattcttgcgctaattt

SEQ ID NO: 39488 - DNA, 20 bp, Artificial Sequence
  Description of Artificial Sequence: Synthetic oligonucleotide
  Target: SCNA; (+) strand; PAM type: NRG; PAM sequence: GAG
taatttgggttctgaaattt

SEQ ID NO: 39489 - DNA, 20 bp, Artificial Sequence
  Description of Artificial Sequence: Synthetic oligonucleotide
  Target: SCNA; (+) strand; PAM type: NRG; PAM sequence: AAG
caaaacaactttaaaaccac

SEQ ID NO: 39490 - DNA, 20 bp, Artificial Sequence
  Description of Artificial Sequence: Synthetic oligonucleotide
  Target: SCNA; (+) strand; PAM type: NRG; PAM sequence: AGG
aaaacaactttaaaaccaca

SEQ ID NO: 39491 - DNA, 20 bp, Artificial Sequence
  Description of Artificial Sequence: Synthetic oligonucleotide
  Target: SCNA; (+) strand; PAM type: NRG; PAM sequence: CAG
aactttaaaaccacaaggaa

SEQ ID NO: 39492 - DNA, 20 bp, Artificial Sequence
  Description of Artificial Sequence: Synthetic oligonucleotide
  Target: SCNA; (+) strand; PAM type: NRG; PAM sequence: AGG
actttaaaaccacaaggaac

SEQ ID NO: 39493 - DNA, 20 bp, Artificial Sequence
  Description of Artificial Sequence: Synthetic oligonucleotide
  Target: SCNA; (+) strand; PAM type: NRG; PAM sequence: AAG
ttaaaaccacaaggaacagg

SEQ ID NO: 39494 - DNA, 20 bp, Artificial Sequence
  Description of Artificial Sequence: Synthetic oligonucleotide
  Target: SCNA; (+) strand; PAM type: NRG; PAM sequence: AAG
aagcaaatgattatacataa

SEQ ID NO: 39495 - DNA, 20 bp, Artificial Sequence
  Description of Artificial Sequence: Synthetic oligonucleotide
  Target: SCNA; (+) strand; PAM type: NRG; PAM sequence: TAG
gattatacataaaagacata

SEQ ID NO: 39496 - DNA, 20 bp, Artificial Sequence
  Description of Artificial Sequence: Synthetic oligonucleotide
  Target: SCNA; (+) strand; PAM type: NRG; PAM sequence: AAG
tatacataaaagacatatag

SEQ ID NO: 39497 - DNA, 20 bp, Artificial Sequence
  Description of Artificial Sequence: Synthetic oligonucleotide
  Target: SCNA; (+) strand; PAM type: NRG; PAM sequence: CAG
gaagataatgcatatgtgtt

SEQ ID NO: 39498 - DNA, 20 bp, Artificial Sequence
  Description of Artificial Sequence: Synthetic oligonucleotide
  Target: SCNA; (+) strand; PAM type: NRG; PAM sequence: TGG
gataatgcatatgtgttcag

SEQ ID NO: 39499 - DNA, 20 bp, Artificial Sequence
  Description of Artificial Sequence: Synthetic oligonucleotide
  Target: SCNA; (+) strand; PAM type: NRG; PAM sequence: TAG
catatgtgttcagtggaaaa

SEQ ID NO: 39500 - DNA, 20 bp, Artificial Sequence
  Description of Artificial Sequence: Synthetic oligonucleotide
  Target: SCNA; (+) strand; PAM type: NRG; PAM sequence: AAG
gtgttcagtggaaaatagaa

SEQ ID NO: 39501 - DNA, 20 bp, Artificial Sequence
  Description of Artificial Sequence: Synthetic oligonucleotide
  Target: SCNA; (+) strand; PAM type: NRG; PAM sequence: AAG
tggaaaatagaaaagcatga

SEQ ID NO: 39502 - DNA, 20 bp, Artificial Sequence
  Description of Artificial Sequence: Synthetic oligonucleotide
  Target: SCNA; (+) strand; PAM type: NRG; PAM sequence: AAG
aaatagaaaagcatgaaagt

SEQ ID NO: 39503 - DNA, 20 bp, Artificial Sequence
  Description of Artificial Sequence: Synthetic oligonucleotide
  Target: SCNA; (+) strand; PAM type: NRG; PAM sequence: TGG
taaactcttccttgaactat

SEQ ID NO: 39504 - DNA, 20 bp, Artificial Sequence
  Description of Artificial Sequence: Synthetic oligonucleotide
  Target: SCNA; (+) strand; PAM type: NRG; PAM sequence: TGG
tgaactattggtctgccctt

SEQ ID NO: 39505 - DNA, 20 bp, Artificial Sequence
  Description of Artificial Sequence: Synthetic oligonucleotide
  Target: SCNA; (+) strand; PAM type: NRG; PAM sequence: AAG
tattggtctgccctttggaa

SEQ ID NO: 39506 - DNA, 20 bp, Artificial Sequence
  Description of Artificial Sequence: Synthetic oligonucleotide
  Target: SCNA; (+) strand; PAM type: NRG; PAM sequence: CAG
tggtctgccctttggaaaag

SEQ ID NO: 39507 - DNA, 20 bp, Artificial Sequence
  Description of Artificial Sequence: Synthetic oligonucleotide
  Target: SCNA; (+) strand; PAM type: NRG; PAM sequence: CAG
aaagcagactttccttaatg

SEQ ID NO: 39508 - DNA, 20 bp, Artificial Sequence
  Description of Artificial Sequence: Synthetic oligonucleotide
  Target: SCNA; (+) strand; PAM type: NRG; PAM sequence: TAG
gcagactttccttaatgcag

SEQ ID NO: 39509 - DNA, 20 bp, Artificial Sequence
  Description of Artificial Sequence: Synthetic oligonucleotide
  Target: SCNA; (+) strand; PAM type: NRG; PAM sequence: TAG
attaatattttttgtttgct

SEQ ID NO: 39510 - DNA, 20 bp, Artificial Sequence
  Description of Artificial Sequence: Synthetic oligonucleotide
  Target: SCNA; (+) strand; PAM type: NRG; PAM sequence: AGG
ttaatattttttgtttgctt

SEQ ID NO: 39511 - DNA, 20 bp, Artificial Sequence
  Description of Artificial Sequence: Synthetic oligonucleotide
  Target: SCNA; (+) strand; PAM type: NRG; PAM sequence: CAG
attttttgtttgcttaggac

SEQ ID NO: 39512 - DNA, 20 bp, Artificial Sequence
  Description of Artificial Sequence: Synthetic oligonucleotide
  Target: SCNA; (+) strand; PAM type: NRG; PAM sequence: GAG
tttttgtttgcttaggacca

SEQ ID NO: 39513 - DNA, 20 bp, Artificial Sequence
  Description of Artificial Sequence: Synthetic oligonucleotide
  Target: SCNA; (+) strand; PAM type: NRG; PAM sequence: AAG
tgtttgcttaggaccagagc

SEQ ID NO: 39514 - DNA, 20 bp, Artificial Sequence
  Description of Artificial Sequence: Synthetic oligonucleotide
  Target: SCNA; (+) strand; PAM type: NRG; PAM sequence: AAG
ttgcttaggaccagagcaag

SEQ ID NO: 39515 - DNA, 20 bp, Artificial Sequence
  Description of Artificial Sequence: Synthetic oligonucleotide
  Target: SCNA; (+) strand; PAM type: NRG; PAM sequence: AGG
tgcttaggaccagagcaaga

SEQ ID NO: 39516 - DNA, 20 bp, Artificial Sequence
  Description of Artificial Sequence: Synthetic oligonucleotide
  Target: SCNA; (+) strand; PAM type: NRG; PAM sequence: TGG
taggaccagagcaagaaggt

SEQ ID NO: 39517 - DNA, 20 bp, Artificial Sequence
  Description of Artificial Sequence: Synthetic oligonucleotide
  Target: SCNA; (+) strand; PAM type: NRG; PAM sequence: TGG
cagagcaagaaggttggact

SEQ ID NO: 39518 - DNA, 20 bp, Artificial Sequence
  Description of Artificial Sequence: Synthetic oligonucleotide
  Target: SCNA; (+) strand; PAM type: NRG; PAM sequence: GGG
agagcaagaaggttggactt

SEQ ID NO: 39519 - DNA, 20 bp, Artificial Sequence
  Description of Artificial Sequence: Synthetic oligonucleotide
  Target: SCNA; (+) strand; PAM type: NRG; PAM sequence: GAG
agcaagaaggttggacttgg

SEQ ID NO: 39520 - DNA, 20 bp, Artificial Sequence
  Description of Artificial Sequence: Synthetic oligonucleotide
  Target: SCNA; (+) strand; PAM type: NRG; PAM sequence: TAG
agaaggttggacttgggagc

SEQ ID NO: 39521 - DNA, 20 bp, Artificial Sequence
  Description of Artificial Sequence: Synthetic oligonucleotide
  Target: SCNA; (+) strand; PAM type: NRG; PAM sequence: TGG
ttgggagctagtttgctgtc

SEQ ID NO: 39522 - DNA, 20 bp, Artificial Sequence
  Description of Artificial Sequence: Synthetic oligonucleotide
  Target: SCNA; (+) strand; PAM type: NRG; PAM sequence: GAG
ctagtttgctgtctggcttt

SEQ ID NO: 39523 - DNA, 20 bp, Artificial Sequence
  Description of Artificial Sequence: Synthetic oligonucleotide
  Target: SCNA; (+) strand; PAM type: NRG; PAM sequence: AAG
ctggctttgagaccttgaac

SEQ ID NO: 39524 - DNA, 20 bp, Artificial Sequence
  Description of Artificial Sequence: Synthetic oligonucleotide
  Target: SCNA; (+) strand; PAM type: NRG; PAM sequence: CAG
ttttgttctccttctgtttc

SEQ ID NO: 39525 - DNA, 20 bp, Artificial Sequence
  Description of Artificial Sequence: Synthetic oligonucleotide
  Target: SCNA; (+) strand; PAM type: NRG; PAM sequence: TAG
cagttttcttttttgtaaat

SEQ ID NO: 39526 - DNA, 20 bp, Artificial Sequence
  Description of Artificial Sequence: Synthetic oligonucleotide
  Target: SCNA; (+) strand; PAM type: NRG; PAM sequence: AGG
agttttcttttttgtaaatt

SEQ ID NO: 39527 - DNA, 20 bp, Artificial Sequence
  Description of Artificial Sequence: Synthetic oligonucleotide
  Target: SCNA; (+) strand; PAM type: NRG; PAM sequence: GAG
ttttcttttttgtaaattag

SEQ ID NO: 39528 - DNA, 20 bp, Artificial Sequence
  Description of Artificial Sequence: Synthetic oligonucleotide
  Target: SCNA; (+) strand; PAM type: NRG; PAM sequence: TGG
ctattttcaactttttgtta

SEQ ID NO: 39529 - DNA, 20 bp, Artificial Sequence
  Description of Artificial Sequence: Synthetic oligonucleotide
  Target: SCNA; (+) strand; PAM type: NRG; PAM sequence: GGG
tattttcaactttttgttat

SEQ ID NO: 39530 - DNA, 20 bp, Artificial Sequence
  Description of Artificial Sequence: Synthetic oligonucleotide
  Target: SCNA; (+) strand; PAM type: NRG; PAM sequence: AAG
aaatattcaaacatatgcaa

SEQ ID NO: 39531 - DNA, 20 bp, Artificial Sequence
  Description of Artificial Sequence: Synthetic oligonucleotide
  Target: SCNA; (+) strand; PAM type: NRG; PAM sequence: TAG
tattcaaacatatgcaaaag

SEQ ID NO: 39532 - DNA, 20 bp, Artificial Sequence
  Description of Artificial Sequence: Synthetic oligonucleotide
  Target: SCNA; (+) strand; PAM type: NRG; PAM sequence: CAG
caaacatatgcaaaagtaga

SEQ ID NO: 39533 - DNA, 20 bp, Artificial Sequence
  Description of Artificial Sequence: Synthetic oligonucleotide
  Target: SCNA; (+) strand; PAM type: NRG; PAM sequence: AAG
atgcaaaagtagacagaata

SEQ ID NO: 39534 - DNA, 20 bp, Artificial Sequence
  Description of Artificial Sequence: Synthetic oligonucleotide
  Target: SCNA; (+) strand; PAM type: NRG; PAM sequence: AGG
tgcaaaagtagacagaataa

SEQ ID NO: 39535 - DNA, 20 bp, Artificial Sequence
  Description of Artificial Sequence: Synthetic oligonucleotide
  Target: SCNA; (+) strand; PAM type: NRG; PAM sequence: AAG
gaataaaggactctcatgtg

SEQ ID NO: 39536 - DNA, 20 bp, Artificial Sequence
  Description of Artificial Sequence: Synthetic oligonucleotide
  Target: SCNA; (+) strand; PAM type: NRG; PAM sequence: TGG
ttttacattttttcaatgca

SEQ ID NO: 39537 - DNA, 20 bp, Artificial Sequence
  Description of Artificial Sequence: Synthetic oligonucleotide
  Target: SCNA; (+) strand; PAM type: NRG; PAM sequence: AAG
gctgatcatgtctcatccat

SEQ ID NO: 39538 - DNA, 20 bp, Artificial Sequence
  Description of Artificial Sequence: Synthetic oligonucleotide
  Target: SCNA; (+) strand; PAM type: NRG; PAM sequence: AAG
tttttttttttaccaaattc

SEQ ID NO: 39539 - DNA, 20 bp, Artificial Sequence
  Description of Artificial Sequence: Synthetic oligonucleotide
  Target: SCNA; (+) strand; PAM type: NRG; PAM sequence: CAG
aagctttatatatatctttt

SEQ ID NO: 39540 - DNA, 20 bp, Artificial Sequence
  Description of Artificial Sequence: Synthetic oligonucleotide
  Target: SCNA; (+) strand; PAM type: NRG; PAM sequence: CAG
tcttttcagctgtaaacatt

SEQ ID NO: 39541 - DNA, 20 bp, Artificial Sequence
  Description of Artificial Sequence: Synthetic oligonucleotide
  Target: SCNA; (+) strand; PAM type: NRG; PAM sequence: AAG
agtatgcatccacaaaattt

SEQ ID NO: 39542 - DNA, 20 bp, Artificial Sequence
  Description of Artificial Sequence: Synthetic oligonucleotide
  Target: SCNA; (+) strand; PAM type: NRG; PAM sequence: AGG
gtatgcatccacaaaattta

SEQ ID NO: 39543 - DNA, 20 bp, Artificial Sequence
  Description of Artificial Sequence: Synthetic oligonucleotide
  Target: SCNA; (+) strand; PAM type: NRG; PAM sequence: TAG
aaaaataaccacaatatcat

SEQ ID NO: 39544 - DNA, 20 bp, Artificial Sequence
  Description of Artificial Sequence: Synthetic oligonucleotide
  Target: SCNA; (+) strand; PAM type: NRG; PAM sequence: CAG
tagatgattctttaaaattg

SEQ ID NO: 39545 - DNA, 20 bp, Artificial Sequence
  Description of Artificial Sequence: Synthetic oligonucleotide
  Target: SCNA; (+) strand; PAM type: NRG; PAM sequence: TAG
attgcagtgtaatttacacc

SEQ ID NO: 39546 - DNA, 20 bp, Artificial Sequence
  Description of Artificial Sequence: Synthetic oligonucleotide
  Target: SCNA; (+) strand; PAM type: NRG; PAM sequence: AGG
ttgcagtgtaatttacacct

SEQ ID NO: 39547 - DNA, 20 bp, Artificial Sequence
  Description of Artificial Sequence: Synthetic oligonucleotide
  Target: SCNA; (+) strand; PAM type: NRG; PAM sequence: GGG
tgcagtgtaatttacaccta

SEQ ID NO: 39548 - DNA, 20 bp, Artificial Sequence
  Description of Artificial Sequence: Synthetic oligonucleotide
  Target: SCNA; (+) strand; PAM type: NRG; PAM sequence: CAG
tttacacctagggaaatgct

SEQ ID NO: 39549 - DNA, 20 bp, Artificial Sequence
  Description of Artificial Sequence: Synthetic oligonucleotide
  Target: SCNA; (+) strand; PAM type: NRG; PAM sequence: CAG
gatgttgtgtccctttaaat

SEQ ID NO: 39550 - DNA, 20 bp, Artificial Sequence
  Description of Artificial Sequence: Synthetic oligonucleotide
  Target: SCNA; (+) strand; PAM type: NRG; PAM sequence: AAG
cctttaaatcagttttgaaa

SEQ ID NO: 39551 - DNA, 20 bp, Artificial Sequence
  Description of Artificial Sequence: Synthetic oligonucleotide
  Target: SCNA; (+) strand; PAM type: NRG; PAM sequence: TAG
gttttgaaaaagccatgcat

SEQ ID NO: 39552 - DNA, 20 bp, Artificial Sequence
  Description of Artificial Sequence: Synthetic oligonucleotide
  Target: SCNA; (+) strand; PAM type: NRG; PAM sequence: AAG
gtgtaacccacactattttg

SEQ ID NO: 39553 - DNA, 20 bp, Artificial Sequence
  Description of Artificial Sequence: Synthetic oligonucleotide
  Target: SCNA; (+) strand; PAM type: NRG; PAM sequence: CAG
cccacactattttgaagaca

SEQ ID NO: 39554 - DNA, 20 bp, Artificial Sequence
  Description of Artificial Sequence: Synthetic oligonucleotide
  Target: SCNA; (+) strand; PAM type: NRG; PAM sequence: AGG
ccacactattttgaagacac

SEQ ID NO: 39555 - DNA, 20 bp, Artificial Sequence
  Description of Artificial Sequence: Synthetic oligonucleotide
  Target: SCNA; (+) strand; PAM type: NRG; PAM sequence: CAG
acaggacattttcatcattc

SEQ ID NO: 39556 - DNA, 20 bp, Artificial Sequence
  Description of Artificial Sequence: Synthetic oligonucleotide
  Target: SCNA; (+) strand; PAM type: NRG; PAM sequence: CAG
gacattttcatcattccaga

SEQ ID NO: 39557 - DNA, 20 bp, Artificial Sequence
  Description of Artificial Sequence: Synthetic oligonucleotide
  Target: SCNA; (+) strand; PAM type: NRG; PAM sequence: TAG
gtaccttcatgtgcatattc

SEQ ID NO: 39558 - DNA, 20 bp, Artificial Sequence
  Description of Artificial Sequence: Synthetic oligonucleotide
  Target: SCNA; (+) strand; PAM type: NRG; PAM sequence: AAG
gcatattctagaatgtcata

SEQ ID NO: 39559 - DNA, 20 bp, Artificial Sequence
  Description of Artificial Sequence: Synthetic oligonucleotide
  Target: SCNA; (+) strand; PAM type: NRG; PAM sequence: TAG
gtcataaagatctaatcacg

SEQ ID NO: 39560 - DNA, 20 bp, Artificial Sequence
  Description of Artificial Sequence: Synthetic oligonucleotide
  Target: SCNA; (+) strand; PAM type: NRG; PAM sequence: CAG
tttgtctgacttcttttact

SEQ ID NO: 39561 - DNA, 20 bp, Artificial Sequence
  Description of Artificial Sequence: Synthetic oligonucleotide
  Target: SCNA; (+) strand; PAM type: NRG; PAM sequence: GAG
ttactcagtataatatttgt

SEQ ID NO: 39562 - DNA, 20 bp, Artificial Sequence
  Description of Artificial Sequence: Synthetic oligonucleotide
  Target: SCNA; (+) strand; PAM type: NRG; PAM sequence: AGG
tactcagtataatatttgtg

SEQ ID NO: 39563 - DNA, 20 bp, Artificial Sequence
  Description of Artificial Sequence: Synthetic oligonucleotide
  Target: SCNA; (+) strand; PAM type: NRG; PAM sequence: TGG
cgttcatgtcgttgcatgaa

SEQ ID NO: 39564 - DNA, 20 bp, Artificial Sequence
  Description of Artificial Sequence: Synthetic oligonucleotide
  Target: SCNA; (+) strand; PAM type: NRG; PAM sequence: GGG
gttcatgtcgttgcatgaat

SEQ ID NO: 39565 - DNA, 20 bp, Artificial Sequence
  Description of Artificial Sequence: Synthetic oligonucleotide
  Target: SCNA; (+) strand; PAM type: NRG; PAM sequence: TAG
tttctttttactactgttaa

SEQ ID NO: 39566 - DNA, 20 bp, Artificial Sequence
  Description of Artificial Sequence: Synthetic oligonucleotide
  Target: SCNA; (+) strand; PAM type: NRG; PAM sequence: AAG
tttactactgttaatagtat

SEQ ID NO: 39567 - DNA, 20 bp, Artificial Sequence
  Description of Artificial Sequence: Synthetic oligonucleotide
  Target: SCNA; (+) strand; PAM type: NRG; PAM sequence: TAG
ccattgtgcctctttacaac

SEQ ID NO: 39568 - DNA, 20 bp, Artificial Sequence
  Description of Artificial Sequence: Synthetic oligonucleotide
  Target: SCNA; (+) strand; PAM type: NRG; PAM sequence: TAG
ctttacaactagtatctcaa

SEQ ID NO: 39569 - DNA, 20 bp, Artificial Sequence
  Description of Artificial Sequence: Synthetic oligonucleotide
  Target: SCNA; (+) strand; PAM type: NRG; PAM sequence: GAG
ttacaactagtatctcaata

SEQ ID NO: 39570 - DNA, 20 bp, Artificial Sequence
  Description of Artificial Sequence: Synthetic oligonucleotide
  Target: SCNA; (+) strand; PAM type: NRG; PAM sequence: TAG
tatttcacatgacatattta

SEQ ID NO: 39571 - DNA, 20 bp, Artificial Sequence
  Description of Artificial Sequence: Synthetic oligonucleotide
  Target: SCNA; (+) strand; PAM type: NRG; PAM sequence: GAG
agtataaccatgacctcctt

SEQ ID NO: 39572 - DNA, 20 bp, Artificial Sequence
  Description of Artificial Sequence: Synthetic oligonucleotide
  Target: SCNA; (+) strand; PAM type: NRG; PAM sequence: TAG
accatgacctccttgagacc

SEQ ID NO: 39573 - DNA, 20 bp, Artificial Sequence
  Description of Artificial Sequence: Synthetic oligonucleotide
  Target: SCNA; (+) strand; PAM type: NRG; PAM sequence: AAG
tccttgagacctagtgcttt

SEQ ID NO: 39574 - DNA, 20 bp, Artificial Sequence
  Description of Artificial Sequence: Synthetic oligonucleotide
  Target: SCNA; (+) strand; PAM type: NRG; PAM sequence: AAG
agacctagtgctttaagtca

SEQ ID NO: 39575 - DNA, 20 bp, Artificial Sequence
  Description of Artificial Sequence: Synthetic oligonucleotide
  Target: SCNA; (+) strand; PAM type: NRG; PAM sequence: GAG
acctagtgctttaagtcaaa

SEQ ID NO: 39576 - DNA, 20 bp, Artificial Sequence
  Description of Artificial Sequence: Synthetic oligonucleotide
  Target: SCNA; (+) strand; PAM type: NRG; PAM sequence: AGG
cctagtgctttaagtcaaag

SEQ ID NO: 39577 - DNA, 20 bp, Artificial Sequence
  Description of Artificial Sequence: Synthetic oligonucleotide
  Target: SCNA; (+) strand; PAM type: NRG; PAM sequence: GAG
gtcaaagaggtaaataaaat

SEQ ID NO: 39578 - DNA, 20 bp, Artificial Sequence
  Description of Artificial Sequence: Synthetic oligonucleotide
  Target: SCNA; (+) strand; PAM type: NRG; PAM sequence: TAG
gtaaataaaatgagatattt

SEQ ID NO: 39579 - DNA, 20 bp, Artificial Sequence
  Description of Artificial Sequence: Synthetic oligonucleotide
  Target: SCNA; (+) strand; PAM type: NRG; PAM sequence: AGG
taaataaaatgagatatttt

SEQ ID NO: 39580 - DNA, 20 bp, Artificial Sequence
  Description of Artificial Sequence: Synthetic oligonucleotide
  Target: SCNA; (+) strand; PAM type: NRG; PAM sequence: CAG
tattttaggtctcattacaa

SEQ ID NO: 39581 - DNA, 20 bp, Artificial Sequence
  Description of Artificial Sequence: Synthetic oligonucleotide
  Target: SCNA; (+) strand; PAM type: NRG; PAM sequence: GAG
tcattacaacagaccaatgt

SEQ ID NO: 39582 - DNA, 20 bp, Artificial Sequence
  Description of Artificial Sequence: Synthetic oligonucleotide
  Target: SCNA; (+) strand; PAM type: NRG; PAM sequence: GAG
attacaacagaccaatgtga

SEQ ID NO: 39583 - DNA, 20 bp, Artificial Sequence
  Description of Artificial Sequence: Synthetic oligonucleotide
  Target: SCNA; (+) strand; PAM type: NRG; PAM sequence: TGG
caatgtgagagaattatttc

SEQ ID NO: 39584 - DNA, 20 bp, Artificial Sequence
  Description of Artificial Sequence: Synthetic oligonucleotide
  Target: SCNA; (+) strand; PAM type: NRG; PAM sequence: CAG
gtgagagaattatttctgga

SEQ ID NO: 39585 - DNA, 20 bp, Artificial Sequence
  Description of Artificial Sequence: Synthetic oligonucleotide
  Target: SCNA; (+) strand; PAM type: NRG; PAM sequence: TGG
catgattccaaacttttatt

SEQ ID NO: 39586 - DNA, 20 bp, Artificial Sequence
  Description of Artificial Sequence: Synthetic oligonucleotide
  Target: SCNA; (+) strand; PAM type: NRG; PAM sequence: TAG
acttttatttggtaatttgt

SEQ ID NO: 39587 - DNA, 20 bp, Artificial Sequence
  Description of Artificial Sequence: Synthetic oligonucleotide
  Target: SCNA; (+) strand; PAM type: NRG; PAM sequence: TGG
ttggtaatttgttagtcctt

SEQ ID NO: 39588 - DNA, 20 bp, Artificial Sequence
  Description of Artificial Sequence: Synthetic oligonucleotide
  Target: SCNA; (+) strand; PAM type: NRG; PAM sequence: AAG
aatttgttagtcctttggca

SEQ ID NO: 39589 - DNA, 20 bp, Artificial Sequence
  Description of Artificial Sequence: Synthetic oligonucleotide
  Target: SCNA; (+) strand; PAM type: NRG; PAM sequence: AGG
atttgttagtcctttggcaa

SEQ ID NO: 39590 - DNA, 20 bp, Artificial Sequence
  Description of Artificial Sequence: Synthetic oligonucleotide
  Target: SCNA; (+) strand; PAM type: NRG; PAM sequence: TAG
gactaatgtactatgttatt

SEQ ID NO: 39591 - DNA, 20 bp, Artificial Sequence
  Description of Artificial Sequence: Synthetic oligonucleotide
  Target: SCNA; (+) strand; PAM type: NRG; PAM sequence: AAG
ctatgttatttagtcataac

SEQ ID NO: 39592 - DNA, 20 bp, Artificial Sequence
  Description of Artificial Sequence: Synthetic oligonucleotide
  Target: SCNA; (+) strand; PAM type: NRG; PAM sequence: CAG
tgttatttagtcataacaag

SEQ ID NO: 39593 - DNA, 20 bp, Artificial Sequence
  Description of Artificial Sequence: Synthetic oligonucleotide
  Target: SCNA; (+) strand; PAM type: NRG; PAM sequence: TAG
tacattttatgtaactttta

SEQ ID NO: 39594 - DNA, 20 bp, Artificial Sequence
  Description of Artificial Sequence: Synthetic oligonucleotide
  Target: SCNA; (+) strand; PAM type: NRG; PAM sequence: CAG
ttttatgtaacttttataga

SEQ ID NO: 39595 - DNA, 20 bp, Artificial Sequence
  Description of Artificial Sequence: Synthetic oligonucleotide
  Target: SCNA; (+) strand; PAM type: NRG; PAM sequence: GAG
ttatgtaacttttatagaca

SEQ ID NO: 39596 - DNA, 20 bp, Artificial Sequence
  Description of Artificial Sequence: Synthetic oligonucleotide
  Target: SCNA; (+) strand; PAM type: NRG; PAM sequence: GAG
cttttatagacagagaaact

SEQ ID NO: 39597 - DNA, 20 bp, Artificial Sequence
  Description of Artificial Sequence: Synthetic oligonucleotide
  Target: SCNA; (+) strand; PAM type: NRG; PAM sequence: AAG
agacagagaaactgagctcc

SEQ ID NO: 39598 - DNA, 20 bp, Artificial Sequence
  Description of Artificial Sequence: Synthetic oligonucleotide
  Target: SCNA; (+) strand; PAM type: NRG; PAM sequence: GAG
acagagaaactgagctccaa

SEQ ID NO: 39599 - DNA, 20 bp, Artificial Sequence
  Description of Artificial Sequence: Synthetic oligonucleotide
  Target: SCNA; (+) strand; PAM type: NRG; PAM sequence: TGG
aaactgagctccaagagttt

SEQ ID NO: 39600 - DNA, 20 bp, Artificial Sequence
  Description of Artificial Sequence: Synthetic oligonucleotide
  Target: SCNA; (+) strand; PAM type: NRG; PAM sequence: GAG
aagagttttggtgatatgct

SEQ ID NO: 39601 - DNA, 20 bp, Artificial Sequence
  Description of Artificial Sequence: Synthetic oligonucleotide
  Target: SCNA; (+) strand; PAM type: NRG; PAM sequence: TAG
ggtgatatgctgagatcacc

SEQ ID NO: 39602 - DNA, 20 bp, Artificial Sequence
  Description of Artificial Sequence: Synthetic oligonucleotide
  Target: SCNA; (+) strand; PAM type: NRG; PAM sequence: AAG
tgagatcacctagctatttt

SEQ ID NO: 39603 - DNA, 20 bp, Artificial Sequence
  Description of Artificial Sequence: Synthetic oligonucleotide
  Target: SCNA; (+) strand; PAM type: NRG; PAM sequence: TGG
gatcacctagctattttaag

SEQ ID NO: 39604 - DNA, 20 bp, Artificial Sequence
  Description of Artificial Sequence: Synthetic oligonucleotide
  Target: SCNA; (+) strand; PAM type: NRG; PAM sequence: CAG
cacctagctattttaagtgg

SEQ ID NO: 39605 - DNA, 20 bp, Artificial Sequence
  Description of Artificial Sequence: Synthetic oligonucleotide
  Target: SCNA; (+) strand; PAM type: NRG; PAM sequence: GAG
cctagctattttaagtggca

SEQ ID NO: 39606 - DNA, 20 bp, Artificial Sequence
  Description of Artificial Sequence: Synthetic oligonucleotide
  Target: SCNA; (+) strand; PAM type: NRG; PAM sequence: GAG
ctattttaagtggcagagct

SEQ ID NO: 39607 - DNA, 20 bp, Artificial Sequence
  Description of Artificial Sequence: Synthetic oligonucleotide
  Target: SCNA; (+) strand; PAM type: NRG; PAM sequence: TAG
gtggcagagctgagacaatt

SEQ ID NO: 39608 - DNA, 20 bp, Artificial Sequence
  Description of Artificial Sequence: Synthetic oligonucleotide
  Target: SCNA; (+) strand; PAM type: NRG; PAM sequence: CAG
gcagagctgagacaatttag

SEQ ID NO: 39609 - DNA, 20 bp, Artificial Sequence
  Description of Artificial Sequence: Synthetic oligonucleotide
  Target: SCNA; (+) strand; PAM type: NRG; PAM sequence: CAG
caatttagcagaaactgtta

SEQ ID NO: 39610 - DNA, 20 bp, Artificial Sequence
  Description of Artificial Sequence: Synthetic oligonucleotide
  Target: SCNA; (+) strand; PAM type: NRG; PAM sequence: AAG
tttagcagaaactgttacag

SEQ ID NO: 39611 - DNA, 20 bp, Artificial Sequence
  Description of Artificial Sequence: Synthetic oligonucleotide
  Target: SCNA; (+) strand; PAM type: NRG; PAM sequence: AGG
ttagcagaaactgttacaga

SEQ ID NO: 39612 - DNA, 20 bp, Artificial Sequence
  Description of Artificial Sequence: Synthetic oligonucleotide
  Target: SCNA; (+) strand; PAM type: NRG; PAM sequence: TAG
ggcacaattgtctcctgaat

SEQ ID NO: 39613 - DNA, 20 bp, Artificial Sequence
  Description of Artificial Sequence: Synthetic oligonucleotide
  Target: SCNA; (+) strand; PAM type: NRG; PAM sequence: CAG
acaattgtctcctgaattag

SEQ ID NO: 39614 - DNA, 20 bp, Artificial Sequence
  Description of Artificial Sequence: Synthetic oligonucleotide
  Target: SCNA; (+) strand; PAM type: NRG; PAM sequence: AAG
gaattagcagtttgtgtctg

SEQ ID NO: 39615 - DNA, 20 bp, Artificial Sequence
  Description of Artificial Sequence: Synthetic oligonucleotide
  Target: SCNA; (+) strand; PAM type: NRG; PAM sequence: CAG
agtttgtgtctgaagcctca

SEQ ID NO: 39616 - DNA, 20 bp, Artificial Sequence
  Description of Artificial Sequence: Synthetic oligonucleotide
  Target: SCNA; (+) strand; PAM type: NRG; PAM sequence: TGG
gtgtctgaagcctcacagat

SEQ ID NO: 39617 - DNA, 20 bp, Artificial Sequence
  Description of Artificial Sequence: Synthetic oligonucleotide
  Target: SCNA; (+) strand; PAM type: NRG; PAM sequence: GGG
tgtctgaagcctcacagatt

SEQ ID NO: 39618 - DNA, 20 bp, Artificial Sequence
  Description of Artificial Sequence: Synthetic oligonucleotide
  Target: SCNA; (+) strand; PAM type: NRG; PAM sequence: TGG
gaagcctcacagattgggtg

SEQ ID NO: 39619 - DNA, 20 bp, Artificial Sequence
  Description of Artificial Sequence: Synthetic oligonucleotide
  Target: SCNA; (+) strand; PAM type: NRG; PAM sequence: AAG
ctcacagattgggtgtggta

SEQ ID NO: 39620 - DNA, 20 bp, Artificial Sequence
  Description of Artificial Sequence: Synthetic oligonucleotide
  Target: SCNA; (+) strand; PAM type: NRG; PAM sequence: GAG
cacagattgggtgtggtaaa

SEQ ID NO: 39621 - DNA, 20 bp, Artificial Sequence
  Description of Artificial Sequence: Synthetic oligonucleotide
  Target: SCNA; (+) strand; PAM type: NRG; PAM sequence: GAG
gattgggtgtggtaaagagt

SEQ ID NO: 39622 - DNA, 20 bp, Artificial Sequence
  Description of Artificial Sequence: Synthetic oligonucleotide
  Target: SCNA; (+) strand; PAM type: NRG; PAM sequence: AAG
tgggtgtggtaaagagtgag

SEQ ID NO: 39623 - DNA, 20 bp, Artificial Sequence
  Description of Artificial Sequence: Synthetic oligonucleotide
  Target: SCNA; (+) strand; PAM type: NRG; PAM sequence: AGG
gggtgtggtaaagagtgaga

SEQ ID NO: 39624 - DNA, 20 bp, Artificial Sequence
  Description of Artificial Sequence: Synthetic oligonucleotide
  Target: SCNA; (+) strand; PAM type: NRG; PAM sequence: AAG
ggtaaagagtgagaaggaaa

SEQ ID NO: 39625 - DNA, 20 bp, Artificial Sequence
  Description of Artificial Sequence: Synthetic oligonucleotide
  Target: SCNA; (+) strand; PAM type: NRG; PAM sequence: AGG
gtaaagagtgagaaggaaaa

SEQ ID NO: 39626 - DNA, 20 bp, Artificial Sequence
  Description of Artificial Sequence: Synthetic oligonucleotide
  Target: SCNA; (+) strand; PAM type: NRG; PAM sequence: TAG
aagagtgagaaggaaaaagg

SEQ ID NO: 39627 - DNA, 20 bp, Artificial Sequence
  Description of Artificial Sequence: Synthetic oligonucleotide
  Target: SCNA; (+) strand; PAM type: NRG; PAM sequence: CAG
agaaggaaaaaggtagaacc

SEQ ID NO: 39628 - DNA, 20 bp, Artificial Sequence
  Description of Artificial Sequence: Synthetic oligonucleotide
  Target: SCNA; (+) strand; PAM type: NRG; PAM sequence: TAG
aaggtagaacccagctgtgt

SEQ ID NO: 39629 - DNA, 20 bp, Artificial Sequence
  Description of Artificial Sequence: Synthetic oligonucleotide
  Target: SCNA; (+) strand; PAM type: NRG; PAM sequence: TAG
gaacccagctgtgttagaaa

SEQ ID NO: 39630 - DNA, 20 bp, Artificial Sequence
  Description of Artificial Sequence: Synthetic oligonucleotide
  Target: SCNA; (+) strand; PAM type: NRG; PAM sequence: TGG
ttagaaatagccttcaaatt

SEQ ID NO: 39631 - DNA, 20 bp, Artificial Sequence
  Description of Artificial Sequence: Synthetic oligonucleotide
  Target: SCNA; (+) strand; PAM type: NRG; PAM sequence: TGG
ttcaaatttggatgtgacaa

SEQ ID NO: 39632 - DNA, 20 bp, Artificial Sequence
  Description of Artificial Sequence: Synthetic oligonucleotide
  Target: SCNA; (+) strand; PAM type: NRG; PAM sequence: AAG
tggatgtgacaatggaaatc

SEQ ID NO: 39633 - DNA, 20 bp, Artificial Sequence
  Description of Artificial Sequence: Synthetic oligonucleotide
  Target: SCNA; (+) strand; PAM type: NRG; PAM sequence: AAG
atgtgacaatggaaatcaag

SEQ ID NO: 39634 - DNA, 20 bp, Artificial Sequence
  Description of Artificial Sequence: Synthetic oligonucleotide
  Target: SCNA; (+) strand; PAM type: NRG; PAM sequence: CAG
gaacttatgttattatgaaa

SEQ ID NO: 39635 - DNA, 20 bp, Artificial Sequence
  Description of Artificial Sequence: Synthetic oligonucleotide
  Target: SCNA; (+) strand; PAM type: NRG; PAM sequence: AAG
aaacagttcattcatattta

SEQ ID NO: 39636 - DNA, 20 bp, Artificial Sequence
  Description of Artificial Sequence: Synthetic oligonucleotide
  Target: SCNA; (+) strand; PAM type: NRG; PAM sequence: TGG
aagttttgccttttctatat

SEQ ID NO: 39637 - DNA, 20 bp, Artificial Sequence
  Description of Artificial Sequence: Synthetic oligonucleotide
  Target: SCNA; (+) strand; PAM type: NRG; PAM sequence: TAG
tctatattggtattcctcaa

SEQ ID NO: 39638 - DNA, 20 bp, Artificial Sequence
  Description of Artificial Sequence: Synthetic oligonucleotide
  Target: SCNA; (+) strand; PAM type: NRG; PAM sequence: AGG
ctatattggtattcctcaat

SEQ ID NO: 39639 - DNA, 20 bp, Artificial Sequence
  Description of Artificial Sequence: Synthetic oligonucleotide
  Target: SCNA; (+) strand; PAM type: NRG; PAM sequence: GGG
tatattggtattcctcaata

SEQ ID NO: 39640 - DNA, 20 bp, Artificial Sequence
  Description of Artificial Sequence: Synthetic oligonucleotide
  Target: SCNA; (+) strand; PAM type: NRG; PAM sequence: GGG
atattggtattcctcaatag

SEQ ID NO: 39641 - DNA, 20 bp, Artificial Sequence
  Description of Artificial Sequence: Synthetic oligonucleotide
  Target: SCNA; (+) strand; PAM type: NRG; PAM sequence: GGG
tattggtattcctcaatagg

SEQ ID NO: 39642 - DNA, 20 bp, Artificial Sequence
  Description of Artificial Sequence: Synthetic oligonucleotide
  Target: SCNA; (+) strand; PAM type: NRG; PAM sequence: GAG
ttggtattcctcaatagggg

SEQ ID NO: 39643 - DNA, 20 bp, Artificial Sequence
  Description of Artificial Sequence: Synthetic oligonucleotide
  Target: SCNA; (+) strand; PAM type: NRG; PAM sequence: AAG
tttcttactacctacaaaaa

SEQ ID NO: 39644 - DNA, 20 bp, Artificial Sequence
  Description of Artificial Sequence: Synthetic oligonucleotide
  Target: SCNA; (+) strand; PAM type: NRG; PAM sequence: CAG
tccttaaaatgccttgaaca

SEQ ID NO: 39645 - DNA, 20 bp, Artificial Sequence
  Description of Artificial Sequence: Synthetic oligonucleotide
  Target: SCNA; (+) strand; PAM type: NRG; PAM sequence: TAG
ttaattacacataatattga

SEQ ID NO: 39646 - DNA, 20 bp, Artificial Sequence
  Description of Artificial Sequence: Synthetic oligonucleotide
  Target: SCNA; (+) strand; PAM type: NRG; PAM sequence: TAG
tagtgatattgcatatgttc

SEQ ID NO: 39647 - DNA, 20 bp, Artificial Sequence
  Description of Artificial Sequence: Synthetic oligonucleotide
  Target: SCNA; (+) strand; PAM type: NRG; PAM sequence: AGG
agtgatattgcatatgttct

SEQ ID NO: 39648 - DNA, 20 bp, Artificial Sequence
  Description of Artificial Sequence: Synthetic oligonucleotide
  Target: SCNA; (+) strand; PAM type: NRG; PAM sequence: AAG
tgttctaggtctgtattctt

SEQ ID NO: 39649 - DNA, 20 bp, Artificial Sequence
  Description of Artificial Sequence: Synthetic oligonucleotide
  Target: SCNA; (+) strand; PAM type: NRG; PAM sequence: AGG
gttctaggtctgtattctta

SEQ ID NO: 39650 - DNA, 20 bp, Artificial Sequence
  Description of Artificial Sequence: Synthetic oligonucleotide
  Target: SCNA; (+) strand; PAM type: NRG; PAM sequence: GAG
tctaggtctgtattcttaag

SEQ ID NO: 39651 - DNA, 20 bp, Artificial Sequence
  Description of Artificial Sequence: Synthetic oligonucleotide
  Target: SCNA; (+) strand; PAM type: NRG; PAM sequence: AGG
ctaggtctgtattcttaagg

SEQ ID NO: 39652 - DNA, 20 bp, Artificial Sequence
  Description of Artificial Sequence: Synthetic oligonucleotide
  Target: SCNA; (+) strand; PAM type: NRG; PAM sequence: GGG
taggtctgtattcttaagga

SEQ ID NO: 39653 - DNA, 20 bp, Artificial Sequence
  Description of Artificial Sequence: Synthetic oligonucleotide
  Target: SCNA; (+) strand; PAM type: NRG; PAM sequence: AAG
tctgtattcttaaggaggga

SEQ ID NO: 39654 - DNA, 20 bp, Artificial Sequence
  Description of Artificial Sequence: Synthetic oligonucleotide
  Target: SCNA; (+) strand; PAM type: NRG; PAM sequence: AAG
ttaaggagggaaagctgctc

SEQ ID NO: 39655 - DNA, 20 bp, Artificial Sequence
  Description of Artificial Sequence: Synthetic oligonucleotide
  Target: SCNA; (+) strand; PAM type: NRG; PAM sequence: AAG
gggaaagctgctcaagtaca

SEQ ID NO: 39656 - DNA, 20 bp, Artificial Sequence
  Description of Artificial Sequence: Synthetic oligonucleotide
  Target: SCNA; (+) strand; PAM type: NRG; PAM sequence: AAG
aaagctgctcaagtacaaag

SEQ ID NO: 39657 - DNA, 20 bp, Artificial Sequence
  Description of Artificial Sequence: Synthetic oligonucleotide
  Target: SCNA; (+) strand; PAM type: NRG; PAM sequence: AGG
aagctgctcaagtacaaaga

SEQ ID NO: 39658 - DNA, 20 bp, Artificial Sequence
  Description of Artificial Sequence: Synthetic oligonucleotide
  Target: SCNA; (+) strand; PAM type: NRG; PAM sequence: GGG
agctgctcaagtacaaagaa

SEQ ID NO: 39659 - DNA, 20 bp, Artificial Sequence
  Description of Artificial Sequence: Synthetic oligonucleotide
  Target: SCNA; (+) strand; PAM type: NRG; PAM sequence: TAG
tcaagtacaaagaagggaac

SEQ ID NO: 39660 - DNA, 20 bp, Artificial Sequence
  Description of Artificial Sequence: Synthetic oligonucleotide
  Target: SCNA; (+) strand; PAM type: NRG; PAM sequence: AAG
agtacaaagaagggaactag

SEQ ID NO: 39661 - DNA, 20 bp, Artificial Sequence
  Description of Artificial Sequence: Synthetic oligonucleotide
  Target: SCNA; (+) strand; PAM type: NRG; PAM sequence: AAG
gggaactagaagttaaaata

SEQ ID NO: 39662 - DNA, 20 bp, Artificial Sequence
  Description of Artificial Sequence: Synthetic oligonucleotide
  Target: SCNA; (+) strand; PAM type: NRG; PAM sequence: TGG
atttttcttttcattattga

SEQ ID NO: 39663 - DNA, 20 bp, Artificial Sequence
  Description of Artificial Sequence: Synthetic oligonucleotide
  Target: SCNA; (+) strand; PAM type: NRG; PAM sequence: CAG
ttcttttcattattgatgga

SEQ ID NO: 39664 - DNA, 20 bp, Artificial Sequence
  Description of Artificial Sequence: Synthetic oligonucleotide
  Target: SCNA; (+) strand; PAM type: NRG; PAM sequence: TGG
ttcattattgatggacagca

SEQ ID NO: 39665 - DNA, 20 bp, Artificial Sequence
  Description of Artificial Sequence: Synthetic oligonucleotide
  Target: SCNA; (+) strand; PAM type: NRG; PAM sequence: CAG
ttgatggacagcatggtctt

SEQ ID NO: 39666 - DNA, 20 bp, Artificial Sequence
  Description of Artificial Sequence: Synthetic oligonucleotide
  Target: SCNA; (+) strand; PAM type: NRG; PAM sequence: TAG
catggtcttcagtaaatctt

SEQ ID NO: 39667 - DNA, 20 bp, Artificial Sequence
  Description of Artificial Sequence: Synthetic oligonucleotide
  Target: SCNA; (+) strand; PAM type: NRG; PAM sequence: TGG
ataacgttaaactaattgaa

SEQ ID NO: 39668 - DNA, 20 bp, Artificial Sequence
  Description of Artificial Sequence: Synthetic oligonucleotide
  Target: SCNA; (+) strand; PAM type: NRG; PAM sequence: AAG
ttgaatggcttgtacctcat

SEQ ID NO: 39669 - DNA, 20 bp, Artificial Sequence
  Description of Artificial Sequence: Synthetic oligonucleotide
  Target: SCNA; (+) strand; PAM type: NRG; PAM sequence: AAG
tgtacctcataagaaatatg

SEQ ID NO: 39670 - DNA, 20 bp, Artificial Sequence
  Description of Artificial Sequence: Synthetic oligonucleotide
  Target: SCNA; (+) strand; PAM type: NRG; PAM sequence: AAG
ataagaaatatgaagttatg

SEQ ID NO: 39671 - DNA, 20 bp, Artificial Sequence
  Description of Artificial Sequence: Synthetic oligonucleotide
  Target: SCNA; (+) strand; PAM type: NRG; PAM sequence: TGG
ttatgaagtaataacatatt

SEQ ID NO: 39672 - DNA, 20 bp, Artificial Sequence
  Description of Artificial Sequence: Synthetic oligonucleotide
  Target: SCNA; (+) strand; PAM type: NRG; PAM sequence: AAG
tgaagtaataacatatttgg

SEQ ID NO: 39673 - DNA, 20 bp, Artificial Sequence
  Description of Artificial Sequence: Synthetic oligonucleotide
  Target: SCNA; (+) strand; PAM type: NRG; PAM sequence: AAG
tgttttgttttctctttgct

SEQ ID NO: 39674 - DNA, 20 bp, Artificial Sequence
  Description of Artificial Sequence: Synthetic oligonucleotide
  Target: SCNA; (+) strand; PAM type: NRG; PAM sequence: CAG
gtgaaatataaatattttac

SEQ ID NO: 39675 - DNA, 20 bp, Artificial Sequence
  Description of Artificial Sequence: Synthetic oligonucleotide
  Target: SCNA; (+) strand; PAM type: NRG; PAM sequence: TAG
aatattttaccagaccataa

SEQ ID NO: 39676 - DNA, 20 bp, Artificial Sequence
  Description of Artificial Sequence: Synthetic oligonucleotide
  Target: SCNA; (+) strand; PAM type: NRG; PAM sequence: AGG
atattttaccagaccataat

SEQ ID NO: 39677 - DNA, 20 bp, Artificial Sequence
  Description of Artificial Sequence: Synthetic oligonucleotide
  Target: SCNA; (+) strand; PAM type: NRG; PAM sequence: TGG
cataataggattcttttatc

SEQ ID NO: 39678 - DNA, 20 bp, Artificial Sequence
  Description of Artificial Sequence: Synthetic oligonucleotide
  Target: SCNA; (+) strand; PAM type: NRG; PAM sequence: TAG
ttaattcattaattttgcta

SEQ ID NO: 39679 - DNA, 20 bp, Artificial Sequence
  Description of Artificial Sequence: Synthetic oligonucleotide
  Target: SCNA; (+) strand; PAM type: NRG; PAM sequence: TAG
tatgaaatatatgcttaacc

SEQ ID NO: 39680 - DNA, 20 bp, Artificial Sequence
  Description of Artificial Sequence: Synthetic oligonucleotide
  Target: SCNA; (+) strand; PAM type: NRG; PAM sequence: TAG
ctagactttgtttaccccca

SEQ ID NO: 39681 - DNA, 20 bp, Artificial Sequence
  Description of Artificial Sequence: Synthetic oligonucleotide
  Target: SCNA; (+) strand; PAM type: NRG; PAM sequence: TAG
ccatagaacaactgaatttt

SEQ ID NO: 39682 - DNA, 20 bp, Artificial Sequence
  Description of Artificial Sequence: Synthetic oligonucleotide
  Target: SCNA; (+) strand; PAM type: NRG; PAM sequence: AGG
catagaacaactgaattttt

SEQ ID NO: 39683 - DNA, 20 bp, Artificial Sequence
  Description of Artificial Sequence: Synthetic oligonucleotide
  Target: SCNA; (+) strand; PAM type: NRG; PAM sequence: TGG
aacaactgaatttttaggta

SEQ ID NO: 39684 - DNA, 20 bp, Artificial Sequence
  Description of Artificial Sequence: Synthetic oligonucleotide
  Target: SCNA; (+) strand; PAM type: NRG; PAM sequence: TGG
gaatttttaggtatggtatg

SEQ ID NO: 39685 - DNA, 20 bp, Artificial Sequence
  Description of Artificial Sequence: Synthetic oligonucleotide
  Target: SCNA; (+) strand; PAM type: NRG; PAM sequence: TAG
tatgtggtaaacttgtgcta

SEQ ID NO: 39686 - DNA, 20 bp, Artificial Sequence
  Description of Artificial Sequence: Synthetic oligonucleotide
  Target: SCNA; (+) strand; PAM type: NRG; PAM sequence: AAG
ggtaaacttgtgctatagca

SEQ ID NO: 39687 - DNA, 20 bp, Artificial Sequence
  Description of Artificial Sequence: Synthetic oligonucleotide
  Target: SCNA; (+) strand; PAM type: NRG; PAM sequence: CAG
aacttgtgctatagcaaaga

SEQ ID NO: 39688 - DNA, 20 bp, Artificial Sequence
  Description of Artificial Sequence: Synthetic oligonucleotide
  Target: SCNA; (+) strand; PAM type: NRG; PAM sequence: CAG
ttgtgctatagcaaagacag

SEQ ID NO: 39689 - DNA, 20 bp, Artificial Sequence
  Description of Artificial Sequence: Synthetic oligonucleotide
  Target: SCNA; (+) strand; PAM type: NRG; PAM sequence: GAG
gtgctatagcaaagacagca

SEQ ID NO: 39690 - DNA, 20 bp, Artificial Sequence
  Description of Artificial Sequence: Synthetic oligonucleotide
  Target: SCNA; (+) strand; PAM type: NRG; PAM sequence: TAG
ctatagcaaagacagcagag

SEQ ID NO: 39691 - DNA, 20 bp, Artificial Sequence
  Description of Artificial Sequence: Synthetic oligonucleotide
  Target: SCNA; (+) strand; PAM type: NRG; PAM sequence: TGG
gcaaagacagcagagtagaa

SEQ ID NO: 39692 - DNA, 20 bp, Artificial Sequence
  Description of Artificial Sequence: Synthetic oligonucleotide
  Target: SCNA; (+) strand; PAM type: NRG; PAM sequence: AAG
agtagaatggcatgaaaata

SEQ ID NO: 39693 - DNA, 20 bp, Artificial Sequence
  Description of Artificial Sequence: Synthetic oligonucleotide
  Target: SCNA; (+) strand; PAM type: NRG; PAM sequence: AAG
tgcccattaacaattgatta

SEQ ID NO: 39694 - DNA, 20 bp, Artificial Sequence
  Description of Artificial Sequence: Synthetic oligonucleotide
  Target: SCNA; (+) strand; PAM type: NRG; PAM sequence: GAG
cccattaacaattgattaaa

SEQ ID NO: 39695 - DNA, 20 bp, Artificial Sequence
  Description of Artificial Sequence: Synthetic oligonucleotide
  Target: SCNA; (+) strand; PAM type: NRG; PAM sequence: GAG
cattaacaattgattaaaga

SEQ ID NO: 39696 - DNA, 20 bp, Artificial Sequence
  Description of Artificial Sequence: Synthetic oligonucleotide
  Target: SCNA; (+) strand; PAM type: NRG; PAM sequence: AGG
attaacaattgattaaagag

SEQ ID NO: 39697 - DNA, 20 bp, Artificial Sequence
  Description of Artificial Sequence: Synthetic oligonucleotide
  Target: SCNA; (+) strand; PAM type: NRG; PAM sequence: AAG
aggactgatttaatgtgttt

SEQ ID NO: 39698 - DNA, 20 bp, Artificial Sequence
  Description of Artificial Sequence: Synthetic oligonucleotide
  Target: SCNA; (+) strand; PAM type: NRG; PAM sequence: AAG
tgatttaatgtgtttaagtt

SEQ ID NO: 39699 - DNA, 20 bp, Artificial Sequence
  Description of Artificial Sequence: Synthetic oligonucleotide
  Target: SCNA; (+) strand; PAM type: NRG; PAM sequence: TGG
aatacaacgtttattatctt

SEQ ID NO: 39700 - DNA, 20 bp, Artificial Sequence
  Description of Artificial Sequence: Synthetic oligonucleotide
  Target: SCNA; (+) strand; PAM type: NRG; PAM sequence: AAG
tccgtatttgttgtgaacac

SEQ ID NO: 39701 - DNA, 20 bp, Artificial Sequence
  Description of Artificial Sequence: Synthetic oligonucleotide
  Target: SCNA; (+) strand; PAM type: NRG; PAM sequence: AGG
ccgtatttgttgtgaacaca

SEQ ID NO: 39702 - DNA, 20 bp, Artificial Sequence
  Description of Artificial Sequence: Synthetic oligonucleotide
  Target: SCNA; (+) strand; PAM type: NRG; PAM sequence: GGG
cgtatttgttgtgaacacaa

SEQ ID NO: 39703 - DNA, 20 bp, Artificial Sequence
  Description of Artificial Sequence: Synthetic oligonucleotide
  Target: SCNA; (+) strand; PAM type: NRG; PAM sequence: GGG
gtatttgttgtgaacacaag

SEQ ID NO: 39704 - DNA, 20 bp, Artificial Sequence
  Description of Artificial Sequence: Synthetic oligonucleotide
  Target: SCNA; (+) strand; PAM type: NRG; PAM sequence: TGG
gggtgatgtaatgttgatgc

SEQ ID NO: 39705 - DNA, 20 bp, Artificial Sequence
  Description of Artificial Sequence: Synthetic oligonucleotide
  Target: SCNA; (+) strand; PAM type: NRG; PAM sequence: GAG
gtgatgtaatgttgatgctg

SEQ ID NO: 39706 - DNA, 20 bp, Artificial Sequence
  Description of Artificial Sequence: Synthetic oligonucleotide
  Target: SCNA; (+) strand; PAM type: NRG; PAM sequence: GAG
ctcaccttctgtaaacctgt

SEQ ID NO: 39707 - DNA, 20 bp, Artificial Sequence
  Description of Artificial Sequence: Synthetic oligonucleotide
  Target: SCNA; (+) strand; PAM type: NRG; PAM sequence: GAG
caccttctgtaaacctgtga

SEQ ID NO: 39708 - DNA, 20 bp, Artificial Sequence
  Description of Artificial Sequence: Synthetic oligonucleotide
  Target: SCNA; (+) strand; PAM type: NRG; PAM sequence: GAG
ccttctgtaaacctgtgaga

SEQ ID NO: 39709 - DNA, 20 bp, Artificial Sequence
  Description of Artificial Sequence: Synthetic oligonucleotide
  Target: SCNA; (+) strand; PAM type: NRG; PAM sequence: GAG
tgtaaacctgtgagagagac

SEQ ID NO: 39710 - DNA, 20 bp, Artificial Sequence
  Description of Artificial Sequence: Synthetic oligonucleotide
  Target: SCNA; (+) strand; PAM type: NRG; PAM sequence: AGG
gtaaacctgtgagagagacg

SEQ ID NO: 39711 - DNA, 20 bp, Artificial Sequence
  Description of Artificial Sequence: Synthetic oligonucleotide
  Target: SCNA; (+) strand; PAM type: NRG; PAM sequence: TAG
aacctgtgagagagacgagg

SEQ ID NO: 39712 - DNA, 20 bp, Artificial Sequence
  Description of Artificial Sequence: Synthetic oligonucleotide
  Target: SCNA; (+) strand; PAM type: NRG; PAM sequence: GAG
tgtgagagagacgaggtagt

SEQ ID NO: 39713 - DNA, 20 bp, Artificial Sequence
  Description of Artificial Sequence: Synthetic oligonucleotide
  Target: SCNA; (+) strand; PAM type: NRG; PAM sequence: TAG
acgaggtagtgagattgcga

SEQ ID NO: 39714 - DNA, 20 bp, Artificial Sequence
  Description of Artificial Sequence: Synthetic oligonucleotide
  Target: SCNA; (+) strand; PAM type: NRG; PAM sequence: AGG
cgaggtagtgagattgcgat

SEQ ID NO: 39715 - DNA, 20 bp, Artificial Sequence
  Description of Artificial Sequence: Synthetic oligonucleotide
  Target: SCNA; (+) strand; PAM type: NRG; PAM sequence: TAG
aggcttcttgtgtaatttca

SEQ ID NO: 39716 - DNA, 20 bp, Artificial Sequence
  Description of Artificial Sequence: Synthetic oligonucleotide
  Target: SCNA; (+) strand; PAM type: NRG; PAM sequence: TGG
cttcttgtgtaatttcatag

SEQ ID NO: 39717 - DNA, 20 bp, Artificial Sequence
  Description of Artificial Sequence: Synthetic oligonucleotide
  Target: SCNA; (+) strand; PAM type: NRG; PAM sequence: GGG
ttcttgtgtaatttcatagt

SEQ ID NO: 39718 - DNA, 20 bp, Artificial Sequence
  Description of Artificial Sequence: Synthetic oligonucleotide
  Target: SCNA; (+) strand; PAM type: NRG; PAM sequence: TAG
ttgtgtaatttcatagtggg

SEQ ID NO: 39719 - DNA, 20 bp, Artificial Sequence
  Description of Artificial Sequence: Synthetic oligonucleotide
  Target: SCNA; (+) strand; PAM type: NRG; PAM sequence: GAG
gtgtaatttcatagtgggta

SEQ ID NO: 39720 - DNA, 20 bp, Artificial Sequence
  Description of Artificial Sequence: Synthetic oligonucleotide
  Target: SCNA; (+) strand; PAM type: NRG; PAM sequence: TAG
taatttcatagtgggtagag

SEQ ID NO: 39721 - DNA, 20 bp, Artificial Sequence
  Description of Artificial Sequence: Synthetic oligonucleotide
  Target: SCNA; (+) strand; PAM type: NRG; PAM sequence: GAG
atttcatagtgggtagagta

SEQ ID NO: 39722 - DNA, 20 bp, Artificial Sequence
  Description of Artificial Sequence: Synthetic oligonucleotide
  Target: SCNA; (+) strand; PAM type: NRG; PAM sequence: AAG
catagtgggtagagtagaga

SEQ ID NO: 39723 - DNA, 20 bp, Artificial Sequence
  Description of Artificial Sequence: Synthetic oligonucleotide
  Target: SCNA; (+) strand; PAM type: NRG; PAM sequence: TGG
gaaagcctaatgcatactgt

SEQ ID NO: 39724 - DNA, 20 bp, Artificial Sequence
  Description of Artificial Sequence: Synthetic oligonucleotide
  Target: SCNA; (+) strand; PAM type: NRG; PAM sequence: GGG
aaagcctaatgcatactgtt

SEQ ID NO: 39725 - DNA, 20 bp, Artificial Sequence
  Description of Artificial Sequence: Synthetic oligonucleotide
  Target: SCNA; (+) strand; PAM type: NRG; PAM sequence: GAG
agcctaatgcatactgttgg

SEQ ID NO: 39726 - DNA, 20 bp, Artificial Sequence
  Description of Artificial Sequence: Synthetic oligonucleotide
  Target: SCNA; (+) strand; PAM type: NRG; PAM sequence: TGG
gagatcattatgtatgattt

SEQ ID NO: 39727 - DNA, 20 bp, Artificial Sequence
  Description of Artificial Sequence: Synthetic oligonucleotide
  Target: SCNA; (+) strand; PAM type: NRG; PAM sequence: AAG
tcattatgtatgattttgga

SEQ ID NO: 39728 - DNA, 20 bp, Artificial Sequence
  Description of Artificial Sequence: Synthetic oligonucleotide
  Target: SCNA; (+) strand; PAM type: NRG; PAM sequence: AGG
cattatgtatgattttggaa

SEQ ID NO: 39729 - DNA, 20 bp, Artificial Sequence
  Description of Artificial Sequence: Synthetic oligonucleotide
  Target: SCNA; (+) strand; PAM type: NRG; PAM sequence: GGG
attatgtatgattttggaaa

SEQ ID NO: 39730 - DNA, 20 bp, Artificial Sequence
  Description of Artificial Sequence: Synthetic oligonucleotide
  Target: SCNA; (+) strand; PAM type: NRG; PAM sequence: GGG
ttatgtatgattttggaaag

SEQ ID NO: 39731 - DNA, 20 bp, Artificial Sequence
  Description of Artificial Sequence: Synthetic oligonucleotide
  Target: SCNA; (+) strand; PAM type: NRG; PAM sequence: GGG
tatgtatgattttggaaagg

SEQ ID NO: 39732 - DNA, 20 bp, Artificial Sequence
  Description of Artificial Sequence: Synthetic oligonucleotide
  Target: SCNA; (+) strand; PAM type: NRG; PAM sequence: GAG
tatgattttggaaagggggt

SEQ ID NO: 39733 - DNA, 20 bp, Artificial Sequence
  Description of Artificial Sequence: Synthetic oligonucleotide
  Target: SCNA; (+) strand; PAM type: NRG; PAM sequence: GAG
tttggaaagggggtgagcat

SEQ ID NO: 39734 - DNA, 20 bp, Artificial Sequence
  Description of Artificial Sequence: Synthetic oligonucleotide
  Target: SCNA; (+) strand; PAM type: NRG; PAM sequence: TGG
gaaagggggtgagcatgaga

SEQ ID NO: 39735 - DNA, 20 bp, Artificial Sequence
  Description of Artificial Sequence: Synthetic oligonucleotide
  Target: SCNA; (+) strand; PAM type: NRG; PAM sequence: GGG
aaagggggtgagcatgagat

SEQ ID NO: 39736 - DNA, 20 bp, Artificial Sequence
  Description of Artificial Sequence: Synthetic oligonucleotide
  Target: SCNA; (+) strand; PAM type: NRG; PAM sequence: GGG
aagggggtgagcatgagatg

SEQ ID NO: 39737 - DNA, 20 bp, Artificial Sequence
  Description of Artificial Sequence: Synthetic oligonucleotide
  Target: SCNA; (+) strand; PAM type: NRG; PAM sequence: GGG
agggggtgagcatgagatgg

SEQ ID NO: 39738 - DNA, 20 bp, Artificial Sequence
  Description of Artificial Sequence: Synthetic oligonucleotide
  Target: SCNA; (+) strand; PAM type: NRG; PAM sequence: TAG
gtgagcatgagatgggggaa

SEQ ID NO: 39739 - DNA, 20 bp, Artificial Sequence
  Description of Artificial Sequence: Synthetic oligonucleotide
  Target: SCNA; (+) strand; PAM type: NRG; PAM sequence: AGG
tgagcatgagatgggggaat

SEQ ID NO: 39740 - DNA, 20 bp, Artificial Sequence
  Description of Artificial Sequence: Synthetic oligonucleotide
  Target: SCNA; (+) strand; PAM type: NRG; PAM sequence: GGG
gagcatgagatgggggaata

SEQ ID NO: 39741 - DNA, 20 bp, Artificial Sequence
  Description of Artificial Sequence: Synthetic oligonucleotide
  Target: SCNA; (+) strand; PAM type: NRG; PAM sequence: AAG
gggggaatagggttactctg

SEQ ID NO: 39742 - DNA, 20 bp, Artificial Sequence
  Description of Artificial Sequence: Synthetic oligonucleotide
  Target: SCNA; (+) strand; PAM type: NRG; PAM sequence: TGG
atagggttactctgaagaaa

SEQ ID NO: 39743 - DNA, 20 bp, Artificial Sequence
  Description of Artificial Sequence: Synthetic oligonucleotide
  Target: SCNA; (+) strand; PAM type: NRG; PAM sequence: GGG
tagggttactctgaagaaat

SEQ ID NO: 39744 - DNA, 20 bp, Artificial Sequence
  Description of Artificial Sequence: Synthetic oligonucleotide
  Target: SCNA; (+) strand; PAM type: NRG; PAM sequence: AAG
ggttactctgaagaaatggg

SEQ ID NO: 39745 - DNA, 20 bp, Artificial Sequence
  Description of Artificial Sequence: Synthetic oligonucleotide
  Target: SCNA; (+) strand; PAM type: NRG; PAM sequence: GAG
ttactctgaagaaatgggaa

SEQ ID NO: 39746 - DNA, 20 bp, Artificial Sequence
  Description of Artificial Sequence: Synthetic oligonucleotide
  Target: SCNA; (+) strand; PAM type: NRG; PAM sequence: AAG
aagaaatgggaagagcaatc

SEQ ID NO: 39747 - DNA, 20 bp, Artificial Sequence
  Description of Artificial Sequence: Synthetic oligonucleotide
  Target: SCNA; (+) strand; PAM type: NRG; PAM sequence: AGG
agaaatgggaagagcaatca

SEQ ID NO: 39748 - DNA, 20 bp, Artificial Sequence
  Description of Artificial Sequence: Synthetic oligonucleotide
  Target: SCNA; (+) strand; PAM type: NRG; PAM sequence: GAG
aaatgggaagagcaatcaag

SEQ ID NO: 39749 - DNA, 20 bp, Artificial Sequence
  Description of Artificial Sequence: Synthetic oligonucleotide
  Target: SCNA; (+) strand; PAM type: NRG; PAM sequence: AAG
tgggaagagcaatcaaggag

SEQ ID NO: 39750 - DNA, 20 bp, Artificial Sequence
  Description of Artificial Sequence: Synthetic oligonucleotide
  Target: SCNA; (+) strand; PAM type: NRG; PAM sequence: TAG
agagcaatcaaggagaagca

SEQ ID NO: 39751 - DNA, 20 bp, Artificial Sequence
  Description of Artificial Sequence: Synthetic oligonucleotide
  Target: SCNA; (+) strand; PAM type: NRG; PAM sequence: CAG
tcaaggagaagcatagtatt

SEQ ID NO: 39752 - DNA, 20 bp, Artificial Sequence
  Description of Artificial Sequence: Synthetic oligonucleotide
  Target: SCNA; (+) strand; PAM type: NRG; PAM sequence: TGG
gattctctaatttgacccca

SEQ ID NO: 39753 - DNA, 20 bp, Artificial Sequence
  Description of Artificial Sequence: Synthetic oligonucleotide
  Target: SCNA; (+) strand; PAM type: NRG; PAM sequence: TAG
caacttcatattgtttccac

SEQ ID NO: 39754 - DNA, 20 bp, Artificial Sequence
  Description of Artificial Sequence: Synthetic oligonucleotide
  Target: SCNA; (+) strand; PAM type: NRG; PAM sequence: TGG
tatcattttaaatattcctg

SEQ ID NO: 39755 - DNA, 20 bp, Artificial Sequence
  Description of Artificial Sequence: Synthetic oligonucleotide
  Target: SCNA; (+) strand; PAM type: NRG; PAM sequence: TGG
taaatattcctgtggtttcg

SEQ ID NO: 39756 - DNA, 20 bp, Artificial Sequence
  Description of Artificial Sequence: Synthetic oligonucleotide
  Target: SCNA; (+) strand; PAM type: NRG; PAM sequence: AAG
tcctgtggtttcgtggtcct

SEQ ID NO: 39757 - DNA, 20 bp, Artificial Sequence
  Description of Artificial Sequence: Synthetic oligonucleotide
  Target: SCNA; (+) strand; PAM type: NRG; PAM sequence: AAG
ttcgtggtcctaagaatatg

SEQ ID NO: 39758 - DNA, 20 bp, Artificial Sequence
  Description of Artificial Sequence: Synthetic oligonucleotide
  Target: SCNA; (+) strand; PAM type: NRG; PAM sequence: AGG
tcgtggtcctaagaatatga

SEQ ID NO: 39759 - DNA, 20 bp, Artificial Sequence
  Description of Artificial Sequence: Synthetic oligonucleotide
  Target: SCNA; (+) strand; PAM type: NRG; PAM sequence: AAG
ctaagaatatgaaggcatgc

SEQ ID NO: 39760 - DNA, 20 bp, Artificial Sequence
  Description of Artificial Sequence: Synthetic oligonucleotide
  Target: SCNA; (+) strand; PAM type: NRG; PAM sequence: AAG
atgaaggcatgcaagattcc

SEQ ID NO: 39761 - DNA, 20 bp, Artificial Sequence
  Description of Artificial Sequence: Synthetic oligonucleotide
  Target: SCNA; (+) strand; PAM type: NRG; PAM sequence: AAG
catgcaagattccaagatta

SEQ ID NO: 39762 - DNA, 20 bp, Artificial Sequence
  Description of Artificial Sequence: Synthetic oligonucleotide
  Target: SCNA; (+) strand; PAM type: NRG; PAM sequence: AAG
ttccaagattaaagatgtta

SEQ ID NO: 39763 - DNA, 20 bp, Artificial Sequence
  Description of Artificial Sequence: Synthetic oligonucleotide
  Target: SCNA; (+) strand; PAM type: NRG; PAM sequence: CAG
aagattaaagatgttaaagc

SEQ ID NO: 39764 - DNA, 20 bp, Artificial Sequence
  Description of Artificial Sequence: Synthetic oligonucleotide
  Target: SCNA; (+) strand; PAM type: NRG; PAM sequence: TAG
ttaaagatgttaaagccaga

SEQ ID NO: 39765 - DNA, 20 bp, Artificial Sequence
  Description of Artificial Sequence: Synthetic oligonucleotide
  Target: SCNA; (+) strand; PAM type: NRG; PAM sequence: AAG
gatgttaaagccagatagaa

SEQ ID NO: 39766 - DNA, 20 bp, Artificial Sequence
  Description of Artificial Sequence: Synthetic oligonucleotide
  Target: SCNA; (+) strand; PAM type: NRG; PAM sequence: AAG
taaatatttcaaaatctaac

SEQ ID NO: 39767 - DNA, 20 bp, Artificial Sequence
  Description of Artificial Sequence: Synthetic oligonucleotide
  Target: SCNA; (+) strand; PAM type: NRG; PAM sequence: TAG
ctaacaagttcaaatgactt

SEQ ID NO: 39768 - DNA, 20 bp, Artificial Sequence
  Description of Artificial Sequence: Synthetic oligonucleotide
  Target: SCNA; (+) strand; PAM type: NRG; PAM sequence: TAG
agttcaaatgactttagttt

SEQ ID NO: 39769 - DNA, 20 bp, Artificial Sequence
  Description of Artificial Sequence: Synthetic oligonucleotide
  Target: SCNA; (+) strand; PAM type: NRG; PAM sequence: AAG
caaatgactttagttttaga

SEQ ID NO: 39770 - DNA, 20 bp, Artificial Sequence
  Description of Artificial Sequence: Synthetic oligonucleotide
  Target: SCNA; (+) strand; PAM type: NRG; PAM sequence: GAG
aaagaaaaaaacacattaat

SEQ ID NO: 39771 - DNA, 20 bp, Artificial Sequence
  Description of Artificial Sequence: Synthetic oligonucleotide
  Target: SCNA; (+) strand; PAM type: NRG; PAM sequence: AAG
aaaaacacattaatgagccc

SEQ ID NO: 39772 - DNA, 20 bp, Artificial Sequence
  Description of Artificial Sequence: Synthetic oligonucleotide
  Target: SCNA; (+) strand; PAM type: NRG; PAM sequence: TGG
tacacgcaactctgcaactc

SEQ ID NO: 39773 - DNA, 20 bp, Artificial Sequence
  Description of Artificial Sequence: Synthetic oligonucleotide
  Target: SCNA; (+) strand; PAM type: NRG; PAM sequence: GAG
cgcaactctgcaactctggt

SEQ ID NO: 39774 - DNA, 20 bp, Artificial Sequence
  Description of Artificial Sequence: Synthetic oligonucleotide
  Target: SCNA; (+) strand; PAM type: NRG; PAM sequence: TAG
tgcaactctggtgagcatga

SEQ ID NO: 39775 - DNA, 20 bp, Artificial Sequence
  Description of Artificial Sequence: Synthetic oligonucleotide
  Target: SCNA; (+) strand; PAM type: NRG; PAM sequence: AAG
ggtgagcatgatagacttct

SEQ ID NO: 39776 - DNA, 20 bp, Artificial Sequence
  Description of Artificial Sequence: Synthetic oligonucleotide
  Target: SCNA; (+) strand; PAM type: NRG; PAM sequence: GAG
tgagcatgatagacttctaa

SEQ ID NO: 39777 - DNA, 20 bp, Artificial Sequence
  Description of Artificial Sequence: Synthetic oligonucleotide
  Target: SCNA; (+) strand; PAM type: NRG; PAM sequence: TAG
acttctaagagtaaatgtac

SEQ ID NO: 39778 - DNA, 20 bp, Artificial Sequence
  Description of Artificial Sequence: Synthetic oligonucleotide
  Target: SCNA; (+) strand; PAM type: NRG; PAM sequence: CAG
tactagatacaacctaaatt

SEQ ID NO: 39779 - DNA, 20 bp, Artificial Sequence
  Description of Artificial Sequence: Synthetic oligonucleotide
  Target: SCNA; (+) strand; PAM type: NRG; PAM sequence: AGG
actagatacaacctaaattc

SEQ ID NO: 39780 - DNA, 20 bp, Artificial Sequence
  Description of Artificial Sequence: Synthetic oligonucleotide
  Target: SCNA; (+) strand; PAM type: NRG; PAM sequence: GGG
ctagatacaacctaaattca

SEQ ID NO: 39781 - DNA, 20 bp, Artificial Sequence
  Description of Artificial Sequence: Synthetic oligonucleotide
  Target: SCNA; (+) strand; PAM type: NRG; PAM sequence: AAG
ctaaattcagggacttatta

SEQ ID NO: 39782 - DNA, 20 bp, Artificial Sequence
  Description of Artificial Sequence: Synthetic oligonucleotide
  Target: SCNA; (+) strand; PAM type: NRG; PAM sequence: TAG
aaagctctactactcattac

SEQ ID NO: 39783 - DNA, 20 bp, Artificial Sequence
  Description of Artificial Sequence: Synthetic oligonucleotide
  Target: SCNA; (+) strand; PAM type: NRG; PAM sequence: CAG
actactcattactagtgact

SEQ ID NO: 39784 - DNA, 20 bp, Artificial Sequence
  Description of Artificial Sequence: Synthetic oligonucleotide
  Target: SCNA; (+) strand; PAM type: NRG; PAM sequence: GAG
tactcattactagtgactca

SEQ ID NO: 39785 - DNA, 20 bp, Artificial Sequence
  Description of Artificial Sequence: Synthetic oligonucleotide
  Target: SCNA; (+) strand; PAM type: NRG; PAM sequence: AAG
cattactagtgactcagagc

SEQ ID NO: 39786 - DNA, 20 bp, Artificial Sequence
  Description of Artificial Sequence: Synthetic oligonucleotide
  Target: SCNA; (+) strand; PAM type: NRG; PAM sequence: TAG
tctataacctctctaatctc

SEQ ID NO: 39787 - DNA, 20 bp, Artificial Sequence
  Description of Artificial Sequence: Synthetic oligonucleotide
  Target: SCNA; (+) strand; PAM type: NRG; PAM sequence: TGG
ctagttttctcattaaaaaa

SEQ ID NO: 39788 - DNA, 20 bp, Artificial Sequence
  Description of Artificial Sequence: Synthetic oligonucleotide
  Target: SCNA; (+) strand; PAM type: NRG; PAM sequence: GGG
tagttttctcattaaaaaat

SEQ ID NO: 39789 - DNA, 20 bp, Artificial Sequence
  Description of Artificial Sequence: Synthetic oligonucleotide
  Target: SCNA; (+) strand; PAM type: NRG; PAM sequence: AAG
ttgtcttgtttgattgttgt

SEQ ID NO: 39790 - DNA, 20 bp, Artificial Sequence
  Description of Artificial Sequence: Synthetic oligonucleotide
  Target: SCNA; (+) strand; PAM type: NRG; PAM sequence: AGG
tgtcttgtttgattgttgta

SEQ ID NO: 39791 - DNA, 20 bp, Artificial Sequence
  Description of Artificial Sequence: Synthetic oligonucleotide
  Target: SCNA; (+) strand; PAM type: NRG; PAM sequence: TGG
gttgtaaggaatgaataatg

SEQ ID NO: 39792 - DNA, 20 bp, Artificial Sequence
  Description of Artificial Sequence: Synthetic oligonucleotide
  Target: SCNA; (+) strand; PAM type: NRG; PAM sequence: TAG
ggaatgaataatgtggctca

SEQ ID NO: 39793 - DNA, 20 bp, Artificial Sequence
  Description of Artificial Sequence: Synthetic oligonucleotide
  Target: SCNA; (+) strand; PAM type: NRG; PAM sequence: AAG
gaataatgtggctcatagca

SEQ ID NO: 39794 - DNA, 20 bp, Artificial Sequence
  Description of Artificial Sequence: Synthetic oligonucleotide
  Target: SCNA; (+) strand; PAM type: NRG; PAM sequence: GAG
ataatgtggctcatagcaaa

SEQ ID NO: 39795 - DNA, 20 bp, Artificial Sequence
  Description of Artificial Sequence: Synthetic oligonucleotide
  Target: SCNA; (+) strand; PAM type: NRG; PAM sequence: CAG
tgtggctcatagcaaagagc

SEQ ID NO: 39796 - DNA, 20 bp, Artificial Sequence
  Description of Artificial Sequence: Synthetic oligonucleotide
  Target: SCNA; (+) strand; PAM type: NRG; PAM sequence: AGG
gtggctcatagcaaagagcc

SEQ ID NO: 39797 - DNA, 20 bp, Artificial Sequence
  Description of Artificial Sequence: Synthetic oligonucleotide
  Target: SCNA; (+) strand; PAM type: NRG; PAM sequence: CAG
gctcatagcaaagagccagg

SEQ ID NO: 39798 - DNA, 20 bp, Artificial Sequence
  Description of Artificial Sequence: Synthetic oligonucleotide
  Target: SCNA; (+) strand; PAM type: NRG; PAM sequence: GAG
tcatagcaaagagccaggca

SEQ ID NO: 39799 - DNA, 20 bp, Artificial Sequence
  Description of Artificial Sequence: Synthetic oligonucleotide
  Target: SCNA; (+) strand; PAM type: NRG; PAM sequence: TGG
tagcaaagagccaggcagag

SEQ ID NO: 39800 - DNA, 20 bp, Artificial Sequence
  Description of Artificial Sequence: Synthetic oligonucleotide
  Target: SCNA; (+) strand; PAM type: NRG; PAM sequence: AAG
caaagagccaggcagagtgg

SEQ ID NO: 39801 - DNA, 20 bp, Artificial Sequence
  Description of Artificial Sequence: Synthetic oligonucleotide
  Target: SCNA; (+) strand; PAM type: NRG; PAM sequence: CAG
ccaggcagagtggaagctct

SEQ ID NO: 39802 - DNA, 20 bp, Artificial Sequence
  Description of Artificial Sequence: Synthetic oligonucleotide
  Target: SCNA; (+) strand; PAM type: NRG; PAM sequence: AAG
agagtggaagctctcagtac

SEQ ID NO: 39803 - DNA, 20 bp, Artificial Sequence
  Description of Artificial Sequence: Synthetic oligonucleotide
  Target: SCNA; (+) strand; PAM type: NRG; PAM sequence: TAG
gtggaagctctcagtacaag

SEQ ID NO: 39804 - DNA, 20 bp, Artificial Sequence
  Description of Artificial Sequence: Synthetic oligonucleotide
  Target: SCNA; (+) strand; PAM type: NRG; PAM sequence: TAG
aagtagctattgttattatc

SEQ ID NO: 39805 - DNA, 20 bp, Artificial Sequence
  Description of Artificial Sequence: Synthetic oligonucleotide
  Target: SCNA; (+) strand; PAM type: NRG; PAM sequence: TGG
attatctagcctccatgttt

SEQ ID NO: 39806 - DNA, 20 bp, Artificial Sequence
  Description of Artificial Sequence: Synthetic oligonucleotide
  Target: SCNA; (+) strand; PAM type: NRG; PAM sequence: GGG
ttatctagcctccatgtttt

SEQ ID NO: 39807 - DNA, 20 bp, Artificial Sequence
  Description of Artificial Sequence: Synthetic oligonucleotide
  Target: SCNA; (+) strand; PAM type: NRG; PAM sequence: TAG
cctccatgttttgggtgtcc

SEQ ID NO: 39808 - DNA, 20 bp, Artificial Sequence
  Description of Artificial Sequence: Synthetic oligonucleotide
  Target: SCNA; (+) strand; PAM type: NRG; PAM sequence: AGG
ctccatgttttgggtgtcct

SEQ ID NO: 39809 - DNA, 20 bp, Artificial Sequence
  Description of Artificial Sequence: Synthetic oligonucleotide
  Target: SCNA; (+) strand; PAM type: NRG; PAM sequence: CAG
ctttttttttttttccattg

SEQ ID NO: 39810 - DNA, 20 bp, Artificial Sequence
  Description of Artificial Sequence: Synthetic oligonucleotide
  Target: SCNA; (+) strand; PAM type: NRG; PAM sequence: TAG
tttttttttttccattgcag

SEQ ID NO: 39811 - DNA, 20 bp, Artificial Sequence
  Description of Artificial Sequence: Synthetic oligonucleotide
  Target: SCNA; (+) strand; PAM type: NRG; PAM sequence: CAG
ccacctgttcccatcctcca

SEQ ID NO: 39812 - DNA, 20 bp, Artificial Sequence
  Description of Artificial Sequence: Synthetic oligonucleotide
  Target: SCNA; (+) strand; PAM type: NRG; PAM sequence: CAG
tccacagtctcccatcccac

SEQ ID NO: 39813 - DNA, 20 bp, Artificial Sequence
  Description of Artificial Sequence: Synthetic oligonucleotide
  Target: SCNA; (+) strand; PAM type: NRG; PAM sequence: GAG
atcccaccagcaacacacgt

SEQ ID NO: 39814 - DNA, 20 bp, Artificial Sequence
  Description of Artificial Sequence: Synthetic oligonucleotide
  Target: SCNA; (+) strand; PAM type: NRG; PAM sequence: TAG
tcccatcaataactctcact

SEQ ID NO: 39815 - DNA, 20 bp, Artificial Sequence
  Description of Artificial Sequence: Synthetic oligonucleotide
  Target: SCNA; (+) strand; PAM type: NRG; PAM sequence: TGG
tcaataactctcacttagta

SEQ ID NO: 39816 - DNA, 20 bp, Artificial Sequence
  Description of Artificial Sequence: Synthetic oligonucleotide
  Target: SCNA; (+) strand; PAM type: NRG; PAM sequence: GGG
caataactctcacttagtat

SEQ ID NO: 39817 - DNA, 20 bp, Artificial Sequence
  Description of Artificial Sequence: Synthetic oligonucleotide
  Target: SCNA; (+) strand; PAM type: NRG; PAM sequence: AAG
aactctcacttagtatgggt

SEQ ID NO: 39818 - DNA, 20 bp, Artificial Sequence
  Description of Artificial Sequence: Synthetic oligonucleotide
  Target: SCNA; (+) strand; PAM type: NRG; PAM sequence: CAG
gtaagcaaaaaatttccaac

SEQ ID NO: 39819 - DNA, 20 bp, Artificial Sequence
  Description of Artificial Sequence: Synthetic oligonucleotide
  Target: SCNA; (+) strand; PAM type: NRG; PAM sequence: AGG
taagcaaaaaatttccaacc

SEQ ID NO: 39820 - DNA, 20 bp, Artificial Sequence
  Description of Artificial Sequence: Synthetic oligonucleotide
  Target: SCNA; (+) strand; PAM type: NRG; PAM sequence: GGG
aagcaaaaaatttccaacca

SEQ ID NO: 39821 - DNA, 20 bp, Artificial Sequence
  Description of Artificial Sequence: Synthetic oligonucleotide
  Target: SCNA; (+) strand; PAM type: NRG; PAM sequence: TGG
aaaaaatttccaaccaggga

SEQ ID NO: 39822 - DNA, 20 bp, Artificial Sequence
  Description of Artificial Sequence: Synthetic oligonucleotide
  Target: SCNA; (+) strand; PAM type: NRG; PAM sequence: AAG
aaatttccaaccagggatgg

SEQ ID NO: 39823 - DNA, 20 bp, Artificial Sequence
  Description of Artificial Sequence: Synthetic oligonucleotide
  Target: SCNA; (+) strand; PAM type: NRG; PAM sequence: TGG
ccaaccagggatggaagttg

SEQ ID NO: 39824 - DNA, 20 bp, Artificial Sequence
  Description of Artificial Sequence: Synthetic oligonucleotide
  Target: SCNA; (+) strand; PAM type: NRG; PAM sequence: GAG
aaccagggatggaagttgtg

SEQ ID NO: 39825 - DNA, 20 bp, Artificial Sequence
  Description of Artificial Sequence: Synthetic oligonucleotide
  Target: SCNA; (+) strand; PAM type: NRG; PAM sequence: GAG
ccagggatggaagttgtgga

SEQ ID NO: 39826 - DNA, 20 bp, Artificial Sequence
  Description of Artificial Sequence: Synthetic oligonucleotide
  Target: SCNA; (+) strand; PAM type: NRG; PAM sequence: TAG
ggatggaagttgtggagaga

SEQ ID NO: 39827 - DNA, 20 bp, Artificial Sequence
  Description of Artificial Sequence: Synthetic oligonucleotide
  Target: SCNA; (+) strand; PAM type: NRG; PAM sequence: GAG
atggaagttgtggagagata

SEQ ID NO: 39828 - DNA, 20 bp, Artificial Sequence
  Description of Artificial Sequence: Synthetic oligonucleotide
  Target: SCNA; (+) strand; PAM type: NRG; PAM sequence: TGG
gaagttgtggagagatagag

SEQ ID NO: 39829 - DNA, 20 bp, Artificial Sequence
  Description of Artificial Sequence: Synthetic oligonucleotide
  Target: SCNA; (+) strand; PAM type: NRG; PAM sequence: GGG
aagttgtggagagatagagt

SEQ ID NO: 39830 - DNA, 20 bp, Artificial Sequence
  Description of Artificial Sequence: Synthetic oligonucleotide
  Target: SCNA; (+) strand; PAM type: NRG; PAM sequence: AAG
tgtggagagatagagtggga

SEQ ID NO: 39831 - DNA, 20 bp, Artificial Sequence
  Description of Artificial Sequence: Synthetic oligonucleotide
  Target: SCNA; (+) strand; PAM type: NRG; PAM sequence: AAG
gagatagagtgggaaagctc

SEQ ID NO: 39832 - DNA, 20 bp, Artificial Sequence
  Description of Artificial Sequence: Synthetic oligonucleotide
  Target: SCNA; (+) strand; PAM type: NRG; PAM sequence: AGG
agatagagtgggaaagctca

SEQ ID NO: 39833 - DNA, 20 bp, Artificial Sequence
  Description of Artificial Sequence: Synthetic oligonucleotide
  Target: SCNA; (+) strand; PAM type: NRG; PAM sequence: GAG
atagagtgggaaagctcaag

SEQ ID NO: 39834 - DNA, 20 bp, Artificial Sequence
  Description of Artificial Sequence: Synthetic oligonucleotide
  Target: SCNA; (+) strand; PAM type: NRG; PAM sequence: TAG
gaaagctcaaggagcattga

SEQ ID NO: 39835 - DNA, 20 bp, Artificial Sequence
  Description of Artificial Sequence: Synthetic oligonucleotide
  Target: SCNA; (+) strand; PAM type: NRG; PAM sequence: AGG
aaagctcaaggagcattgat

SEQ ID NO: 39836 - DNA, 20 bp, Artificial Sequence
  Description of Artificial Sequence: Synthetic oligonucleotide
  Target: SCNA; (+) strand; PAM type: NRG; PAM sequence: GGG
aagctcaaggagcattgata

SEQ ID NO: 39837 - DNA, 20 bp, Artificial Sequence
  Description of Artificial Sequence: Synthetic oligonucleotide
  Target: SCNA; (+) strand; PAM type: NRG; PAM sequence: GAG
tctttctctccctaatgtgc

SEQ ID NO: 39838 - DNA, 20 bp, Artificial Sequence
  Description of Artificial Sequence: Synthetic oligonucleotide
  Target: SCNA; (+) strand; PAM type: NRG; PAM sequence: AAG
agttacaataacatcactca

SEQ ID NO: 39839 - DNA, 20 bp, Artificial Sequence
  Description of Artificial Sequence: Synthetic oligonucleotide
  Target: SCNA; (+) strand; PAM type: NRG; PAM sequence: CAG
tacaataacatcactcaaag

SEQ ID NO: 39840 - DNA, 20 bp, Artificial Sequence
  Description of Artificial Sequence: Synthetic oligonucleotide
  Target: SCNA; (+) strand; PAM type: NRG; PAM sequence: CAG
acatcactcaaagcagtttg

SEQ ID NO: 39841 - DNA, 20 bp, Artificial Sequence
  Description of Artificial Sequence: Synthetic oligonucleotide
  Target: SCNA; (+) strand; PAM type: NRG; PAM sequence: CAG
ctcaaagcagtttgcagcca

SEQ ID NO: 39842 - DNA, 20 bp, Artificial Sequence
  Description of Artificial Sequence: Synthetic oligonucleotide
  Target: SCNA; (+) strand; PAM type: NRG; PAM sequence: AAG
cagtttgcagccacagcttg

SEQ ID NO: 39843 - DNA, 20 bp, Artificial Sequence
  Description of Artificial Sequence: Synthetic oligonucleotide
  Target: SCNA; (+) strand; PAM type: NRG; PAM sequence: CAG
agccacagcttgaagaaata

SEQ ID NO: 39844 - DNA, 20 bp, Artificial Sequence
  Description of Artificial Sequence: Synthetic oligonucleotide
  Target: SCNA; (+) strand; PAM type: NRG; PAM sequence: CAG
aagaaatacagtaacaatga

SEQ ID NO: 39845 - DNA, 20 bp, Artificial Sequence
  Description of Artificial Sequence: Synthetic oligonucleotide
  Target: SCNA; (+) strand; PAM type: NRG; PAM sequence: AAG
ttaaaccttgtttctttcaa

SEQ ID NO: 39846 - DNA, 20 bp, Artificial Sequence
  Description of Artificial Sequence: Synthetic oligonucleotide
  Target: SCNA; (+) strand; PAM type: NRG; PAM sequence: TGG
ttgtttctttcaaaagacac

SEQ ID NO: 39847 - DNA, 20 bp, Artificial Sequence
  Description of Artificial Sequence: Synthetic oligonucleotide
  Target: SCNA; (+) strand; PAM type: NRG; PAM sequence: TAG
tctttcaaaagacactggca

SEQ ID NO: 39848 - DNA, 20 bp, Artificial Sequence
  Description of Artificial Sequence: Synthetic oligonucleotide
  Target: SCNA; (+) strand; PAM type: NRG; PAM sequence: TGG
atagtcctgtatgaattatg

SEQ ID NO: 39849 - DNA, 20 bp, Artificial Sequence
  Description of Artificial Sequence: Synthetic oligonucleotide
  Target: SCNA; (+) strand; PAM type: NRG; PAM sequence: AAG
atgaattatgtggatttgcc

SEQ ID NO: 39850 - DNA, 20 bp, Artificial Sequence
  Description of Artificial Sequence: Synthetic oligonucleotide
  Target: SCNA; (+) strand; PAM type: NRG; PAM sequence: GAG
gaattatgtggatttgccaa

SEQ ID NO: 39851 - DNA, 20 bp, Artificial Sequence
  Description of Artificial Sequence: Synthetic oligonucleotide
  Target: SCNA; (+) strand; PAM type: NRG; PAM sequence: TGG
aaataaaatgatacaacaaa

SEQ ID NO: 39852 - DNA, 20 bp, Artificial Sequence
  Description of Artificial Sequence: Synthetic oligonucleotide
  Target: SCNA; (+) strand; PAM type: NRG; PAM sequence: AAG
gatacaacaaatggtgttcc

SEQ ID NO: 39853 - DNA, 20 bp, Artificial Sequence
  Description of Artificial Sequence: Synthetic oligonucleotide
  Target: SCNA; (+) strand; PAM type: NRG; PAM sequence: CAG
aaatggtgttccaagtttga

SEQ ID NO: 39854 - DNA, 20 bp, Artificial Sequence
  Description of Artificial Sequence: Synthetic oligonucleotide
  Target: SCNA; (+) strand; PAM type: NRG; PAM sequence: CAG
gtttgacagaccctttgtgc

SEQ ID NO: 39855 - DNA, 20 bp, Artificial Sequence
  Description of Artificial Sequence: Synthetic oligonucleotide
  Target: SCNA; (+) strand; PAM type: NRG; PAM sequence: TGG
tgacagaccctttgtgccag

SEQ ID NO: 39856 - DNA, 20 bp, Artificial Sequence
  Description of Artificial Sequence: Synthetic oligonucleotide
  Target: SCNA; (+) strand; PAM type: NRG; PAM sequence: AAG
ctttgtgccagtggctctga

SEQ ID NO: 39857 - DNA, 20 bp, Artificial Sequence
  Description of Artificial Sequence: Synthetic oligonucleotide
  Target: SCNA; (+) strand; PAM type: NRG; PAM sequence: AGG
tttgtgccagtggctctgaa

SEQ ID NO: 39858 - DNA, 20 bp, Artificial Sequence
  Description of Artificial Sequence: Synthetic oligonucleotide
  Target: SCNA; (+) strand; PAM type: NRG; PAM sequence: CAG
ccagtggctctgaaaggctt

SEQ ID NO: 39859 - DNA, 20 bp, Artificial Sequence
  Description of Artificial Sequence: Synthetic oligonucleotide
  Target: SCNA; (+) strand; PAM type: NRG; PAM sequence: CAG
ttcagaatgaatatccaatt

SEQ ID NO: 39860 - DNA, 20 bp, Artificial Sequence
  Description of Artificial Sequence: Synthetic oligonucleotide
  Target: SCNA; (+) strand; PAM type: NRG; PAM sequence: CAG
tgaatatccaattcagaaat

SEQ ID NO: 39861 - DNA, 20 bp, Artificial Sequence
  Description of Artificial Sequence: Synthetic oligonucleotide
  Target: SCNA; (+) strand; PAM type: NRG; PAM sequence: CAG
gaaatcagtccctaatattt

SEQ ID NO: 39862 - DNA, 20 bp, Artificial Sequence
  Description of Artificial Sequence: Synthetic oligonucleotide
  Target: SCNA; (+) strand; PAM type: NRG; PAM sequence: TAG
cagtccctaatatttcagat

SEQ ID NO: 39863 - DNA, 20 bp, Artificial Sequence
  Description of Artificial Sequence: Synthetic oligonucleotide
  Target: SCNA; (+) strand; PAM type: NRG; PAM sequence: AAG
cctaatatttcagattagtg

SEQ ID NO: 39864 - DNA, 20 bp, Artificial Sequence
  Description of Artificial Sequence: Synthetic oligonucleotide
  Target: SCNA; (+) strand; PAM type: NRG; PAM sequence: CAG
tcagattagtgaagaatcaa

SEQ ID NO: 39865 - DNA, 20 bp, Artificial Sequence
  Description of Artificial Sequence: Synthetic oligonucleotide
  Target: SCNA; (+) strand; PAM type: NRG; PAM sequence: CAG
tgaagaatcaacagactgaa

SEQ ID NO: 39866 - DNA, 20 bp, Artificial Sequence
  Description of Artificial Sequence: Synthetic oligonucleotide
  Target: SCNA; (+) strand; PAM type: NRG; PAM sequence: CAG
gactgaacagcatttgtatt

SEQ ID NO: 39867 - DNA, 20 bp, Artificial Sequence
  Description of Artificial Sequence: Synthetic oligonucleotide
  Target: SCNA; (+) strand; PAM type: NRG; PAM sequence: AAG
gaacagcatttgtattcaga

SEQ ID NO: 39868 - DNA, 20 bp, Artificial Sequence
  Description of Artificial Sequence: Synthetic oligonucleotide
  Target: SCNA; (+) strand; PAM type: NRG; PAM sequence: AGG
aacagcatttgtattcagaa

SEQ ID NO: 39869 - DNA, 20 bp, Artificial Sequence
  Description of Artificial Sequence: Synthetic oligonucleotide
  Target: SCNA; (+) strand; PAM type: NRG; PAM sequence: AAG
agcatttgtattcagaaagg

SEQ ID NO: 39870 - DNA, 20 bp, Artificial Sequence
  Description of Artificial Sequence: Synthetic oligonucleotide
  Target: SCNA; (+) strand; PAM type: NRG; PAM sequence: CGG
aatgaatttttaaaatatca

SEQ ID NO: 39871 - DNA, 20 bp, Artificial Sequence
  Description of Artificial Sequence: Synthetic oligonucleotide
  Target: SCNA; (+) strand; PAM type: NRG; PAM sequence: GGG
atgaatttttaaaatatcac

SEQ ID NO: 39872 - DNA, 20 bp, Artificial Sequence
  Description of Artificial Sequence: Synthetic oligonucleotide
  Target: SCNA; (+) strand; PAM type: NRG; PAM sequence: AAG
ttgtgtattgttttgaactg

SEQ ID NO: 39873 - DNA, 20 bp, Artificial Sequence
  Description of Artificial Sequence: Synthetic oligonucleotide
  Target: SCNA; (+) strand; PAM type: NRG; PAM sequence: CAG
agttacaatactgttacaaa

SEQ ID NO: 39874 - DNA, 20 bp, Artificial Sequence
  Description of Artificial Sequence: Synthetic oligonucleotide
  Target: SCNA; (+) strand; PAM type: NRG; PAM sequence: GAG
ttacaatactgttacaaaca

SEQ ID NO: 39875 - DNA, 20 bp, Artificial Sequence
  Description of Artificial Sequence: Synthetic oligonucleotide
  Target: SCNA; (+) strand; PAM type: NRG; PAM sequence: CAG
tgttacaaacagagtatata

SEQ ID NO: 39876 - DNA, 20 bp, Artificial Sequence
  Description of Artificial Sequence: Synthetic oligonucleotide
  Target: SCNA; (+) strand; PAM type: NRG; PAM sequence: AAG
acagagtatatacagcaaat

SEQ ID NO: 39877 - DNA, 20 bp, Artificial Sequence
  Description of Artificial Sequence: Synthetic oligonucleotide
  Target: SCNA; (+) strand; PAM type: NRG; PAM sequence: CAG
cttacaatatccaaaatatc

SEQ ID NO: 39878 - DNA, 20 bp, Artificial Sequence
  Description of Artificial Sequence: Synthetic oligonucleotide
  Target: SCNA; (+) strand; PAM type: NRG; PAM sequence: AGG
ttacaatatccaaaatatcc

SEQ ID NO: 39879 - DNA, 20 bp, Artificial Sequence
  Description of Artificial Sequence: Synthetic oligonucleotide
  Target: SCNA; (+) strand; PAM type: NRG; PAM sequence: TAG
atctaatacgttttcctttc

SEQ ID NO: 39880 - DNA, 20 bp, Artificial Sequence
  Description of Artificial Sequence: Synthetic oligonucleotide
  Target: SCNA; (+) strand; PAM type: NRG; PAM sequence: GAG
ttttcctttctagataattt

SEQ ID NO: 39881 - DNA, 20 bp, Artificial Sequence
  Description of Artificial Sequence: Synthetic oligonucleotide
  Target: SCNA; (+) strand; PAM type: NRG; PAM sequence: GAG
ttcctttctagataatttga

SEQ ID NO: 39882 - DNA, 20 bp, Artificial Sequence
  Description of Artificial Sequence: Synthetic oligonucleotide
  Target: SCNA; (+) strand; PAM type: NRG; PAM sequence: AAG
ctagataatttgagagtata

SEQ ID NO: 39883 - DNA, 20 bp, Artificial Sequence
  Description of Artificial Sequence: Synthetic oligonucleotide
  Target: SCNA; (+) strand; PAM type: NRG; PAM sequence: AAG
gagagtataaagtgacgttt

SEQ ID NO: 39884 - DNA, 20 bp, Artificial Sequence
  Description of Artificial Sequence: Synthetic oligonucleotide
  Target: SCNA; (+) strand; PAM type: NRG; PAM sequence: TAG
gtgacgtttaagaaactttt

SEQ ID NO: 39885 - DNA, 20 bp, Artificial Sequence
  Description of Artificial Sequence: Synthetic oligonucleotide
  Target: SCNA; (+) strand; PAM type: NRG; PAM sequence: AGG
tgacgtttaagaaacttttt

SEQ ID NO: 39886 - DNA, 20 bp, Artificial Sequence
  Description of Artificial Sequence: Synthetic oligonucleotide
  Target: SCNA; (+) strand; PAM type: NRG; PAM sequence: CGG
gtttaagaaactttttaggt

SEQ ID NO: 39887 - DNA, 20 bp, Artificial Sequence
  Description of Artificial Sequence: Synthetic oligonucleotide
  Target: SCNA; (+) strand; PAM type: NRG; PAM sequence: GGG
tttaagaaactttttaggtc

SEQ ID NO: 39888 - DNA, 20 bp, Artificial Sequence
  Description of Artificial Sequence: Synthetic oligonucleotide
  Target: SCNA; (+) strand; PAM type: NRG; PAM sequence: TGG
gaaactttttaggtcgggca

SEQ ID NO: 39889 - DNA, 20 bp, Artificial Sequence
  Description of Artificial Sequence: Synthetic oligonucleotide
  Target: SCNA; (+) strand; PAM type: NRG; PAM sequence: TGG
actttttaggtcgggcatgg

SEQ ID NO: 39890 - DNA, 20 bp, Artificial Sequence
  Description of Artificial Sequence: Synthetic oligonucleotide
  Target: SCNA; (+) strand; PAM type: NRG; PAM sequence: CAG
gtggctcacgcctgtaatct

SEQ ID NO: 39891 - DNA, 20 bp, Artificial Sequence
  Description of Artificial Sequence: Synthetic oligonucleotide
  Target: SCNA; (+) strand; PAM type: NRG; PAM sequence: TGG
cgcctgtaatctcagcactt

SEQ ID NO: 39892 - DNA, 20 bp, Artificial Sequence
  Description of Artificial Sequence: Synthetic oligonucleotide
  Target: SCNA; (+) strand; PAM type: NRG; PAM sequence: GGG
gcctgtaatctcagcacttt

SEQ ID NO: 39893 - DNA, 20 bp, Artificial Sequence
  Description of Artificial Sequence: Synthetic oligonucleotide
  Target: SCNA; (+) strand; PAM type: NRG; PAM sequence: GAG
ctgtaatctcagcactttgg

SEQ ID NO: 39894 - DNA, 20 bp, Artificial Sequence
  Description of Artificial Sequence: Synthetic oligonucleotide
  Target: SCNA; (+) strand; PAM type: NRG; PAM sequence: AGG
tgtaatctcagcactttggg

SEQ ID NO: 39895 - DNA, 20 bp, Artificial Sequence
  Description of Artificial Sequence: Synthetic oligonucleotide
  Target: SCNA; (+) strand; PAM type: NRG; PAM sequence: GAG
tctcagcactttgggaggct

SEQ ID NO: 39896 - DNA, 20 bp, Artificial Sequence
  Description of Artificial Sequence: Synthetic oligonucleotide
  Target: SCNA; (+) strand; PAM type: NRG; PAM sequence: AGG
ctcagcactttgggaggctg

SEQ ID NO: 39897 - DNA, 20 bp, Artificial Sequence
  Description of Artificial Sequence: Synthetic oligonucleotide
  Target: SCNA; (+) strand; PAM type: NRG; PAM sequence: TGG
agcactttgggaggctgagg

SEQ ID NO: 39898 - DNA, 20 bp, Artificial Sequence
  Description of Artificial Sequence: Synthetic oligonucleotide
  Target: SCNA; (+) strand; PAM type: NRG; PAM sequence: GGG
gcactttgggaggctgaggt

SEQ ID NO: 39899 - DNA, 20 bp, Artificial Sequence
  Description of Artificial Sequence: Synthetic oligonucleotide
  Target: SCNA; (+) strand; PAM type: NRG; PAM sequence: CAG
ctttgggaggctgaggtggg

SEQ ID NO: 39900 - DNA, 20 bp, Artificial Sequence
  Description of Artificial Sequence: Synthetic oligonucleotide
  Target: SCNA; (+) strand; PAM type: NRG; PAM sequence: GAG
ctgaggtgggcagattacct

SEQ ID NO: 39901 - DNA, 20 bp, Artificial Sequence
  Description of Artificial Sequence: Synthetic oligonucleotide
  Target: SCNA; (+) strand; PAM type: NRG; PAM sequence: AGG
tgaggtgggcagattacctg

SEQ ID NO: 39902 - DNA, 20 bp, Artificial Sequence
  Description of Artificial Sequence: Synthetic oligonucleotide
  Target: SCNA; (+) strand; PAM type: NRG; PAM sequence: CAG
gtgggcagattacctgaggt

SEQ ID NO: 39903 - DNA, 20 bp, Artificial Sequence
  Description of Artificial Sequence: Synthetic oligonucleotide
  Target: SCNA; (+) strand; PAM type: NRG; PAM sequence: AGG
tgggcagattacctgaggtc

SEQ ID NO: 39904 - DNA, 20 bp, Artificial Sequence
  Description of Artificial Sequence: Synthetic oligonucleotide
  Target: SCNA; (+) strand; PAM type: NRG; PAM sequence: GAG
ggcagattacctgaggtcag

SEQ ID NO: 39905 - DNA, 20 bp, Artificial Sequence
  Description of Artificial Sequence: Synthetic oligonucleotide
  Target: SCNA; (+) strand; PAM type: NRG; PAM sequence: TAG
gattacctgaggtcaggagt

SEQ ID NO: 39906 - DNA, 20 bp, Artificial Sequence
  Description of Artificial Sequence: Synthetic oligonucleotide
  Target: SCNA; (+) strand; PAM type: NRG; PAM sequence: GAG
ttacctgaggtcaggagtta

SEQ ID NO: 39907 - DNA, 20 bp, Artificial Sequence
  Description of Artificial Sequence: Synthetic oligonucleotide
  Target: SCNA; (+) strand; PAM type: NRG; PAM sequence: CAG
tgaggtcaggagttagagac

SEQ ID NO: 39908 - DNA, 20 bp, Artificial Sequence
  Description of Artificial Sequence: Synthetic oligonucleotide
  Target: SCNA; (+) strand; PAM type: NRG; PAM sequence: TGG
tcaggagttagagaccagcc

SEQ ID NO: 39909 - DNA, 20 bp, Artificial Sequence
  Description of Artificial Sequence: Synthetic oligonucleotide
  Target: SCNA; (+) strand; PAM type: NRG; PAM sequence: AAG
agttagagaccagcctggcc

SEQ ID NO: 39910 - DNA, 20 bp, Artificial Sequence
  Description of Artificial Sequence: Synthetic oligonucleotide
  Target: SCNA; (+) strand; PAM type: NRG; PAM sequence: TGG
agagaccagcctggccaaga

SEQ ID NO: 39911 - DNA, 20 bp, Artificial Sequence
  Description of Artificial Sequence: Synthetic oligonucleotide
  Target: SCNA; (+) strand; PAM type: NRG; PAM sequence: CAG
tctactaaaaatacaaaaat

SEQ ID NO: 39912 - DNA, 20 bp, Artificial Sequence
  Description of Artificial Sequence: Synthetic oligonucleotide
  Target: SCNA; (+) strand; PAM type: NRG; PAM sequence: TGG
ctaaaaatacaaaaatcagc

SEQ ID NO: 39913 - DNA, 20 bp, Artificial Sequence
  Description of Artificial Sequence: Synthetic oligonucleotide
  Target: SCNA; (+) strand; PAM type: NRG; PAM sequence: TGG
atacaaaaatcagctggacg

SEQ ID NO: 39914 - DNA, 20 bp, Artificial Sequence
  Description of Artificial Sequence: Synthetic oligonucleotide
  Target: SCNA; (+) strand; PAM type: NRG; PAM sequence: TGG
caaaaatcagctggacgtgg

SEQ ID NO: 39915 - DNA, 20 bp, Artificial Sequence
  Description of Artificial Sequence: Synthetic oligonucleotide
  Target: SCNA; (+) strand; PAM type: NRG; PAM sequence: CAG
aaatcagctggacgtggtgg

SEQ ID NO: 39916 - DNA, 20 bp, Artificial Sequence
  Description of Artificial Sequence: Synthetic oligonucleotide
  Target: SCNA; (+) strand; PAM type: NRG; PAM sequence: AGG
aatcagctggacgtggtggc

SEQ ID NO: 39917 - DNA, 20 bp, Artificial Sequence
  Description of Artificial Sequence: Synthetic oligonucleotide
  Target: SCNA; (+) strand; PAM type: NRG; PAM sequence: CAG
gtggcaggtgcctgtaatcc

SEQ ID NO: 39918 - DNA, 20 bp, Artificial Sequence
  Description of Artificial Sequence: Synthetic oligonucleotide
  Target: SCNA; (+) strand; PAM type: NRG; PAM sequence: TGG
tgcctgtaatcccagctact

SEQ ID NO: 39919 - DNA, 20 bp, Artificial Sequence
  Description of Artificial Sequence: Synthetic oligonucleotide
  Target: SCNA; (+) strand; PAM type: NRG; PAM sequence: GGG
gcctgtaatcccagctactt

SEQ ID NO: 39920 - DNA, 20 bp, Artificial Sequence
  Description of Artificial Sequence: Synthetic oligonucleotide
  Target: SCNA; (+) strand; PAM type: NRG; PAM sequence: GGG
cctgtaatcccagctacttg

SEQ ID NO: 39921 - DNA, 20 bp, Artificial Sequence
  Description of Artificial Sequence: Synthetic oligonucleotide
  Target: SCNA; (+) strand; PAM type: NRG; PAM sequence: GGG
ctgtaatcccagctacttgg

SEQ ID NO: 39922 - DNA, 20 bp, Artificial Sequence
  Description of Artificial Sequence: Synthetic oligonucleotide
  Target: SCNA; (+) strand; PAM type: NRG; PAM sequence: GGG
tgtaatcccagctacttggg

SEQ ID NO: 39923 - DNA, 20 bp, Artificial Sequence
  Description of Artificial Sequence: Synthetic oligonucleotide
  Target: SCNA; (+) strand; PAM type: NRG; PAM sequence: GAG
tcccagctacttggggggct

SEQ ID NO: 39924 - DNA, 20 bp, Artificial Sequence
  Description of Artificial Sequence: Synthetic oligonucleotide
  Target: SCNA; (+) strand; PAM type: NRG; PAM sequence: AGG
cccagctacttggggggctg

SEQ ID NO: 39925 - DNA, 20 bp, Artificial Sequence
  Description of Artificial Sequence: Synthetic oligonucleotide
  Target: SCNA; (+) strand; PAM type: NRG; PAM sequence: CAG
agctacttggggggctgagg

SEQ ID NO: 39926 - DNA, 20 bp, Artificial Sequence
  Description of Artificial Sequence: Synthetic oligonucleotide
  Target: SCNA; (+) strand; PAM type: NRG; PAM sequence: AGG
gctacttggggggctgaggc

SEQ ID NO: 39927 - DNA, 20 bp, Artificial Sequence
  Description of Artificial Sequence: Synthetic oligonucleotide
  Target: SCNA; (+) strand; PAM type: NRG; PAM sequence: GAG
tacttggggggctgaggcag

SEQ ID NO: 39928 - DNA, 20 bp, Artificial Sequence
  Description of Artificial Sequence: Synthetic oligonucleotide
  Target: SCNA; (+) strand; PAM type: NRG; PAM sequence: CAG
gcaggagaattgcttgtacc

SEQ ID NO: 39929 - DNA, 20 bp, Artificial Sequence
  Description of Artificial Sequence: Synthetic oligonucleotide
  Target: SCNA; (+) strand; PAM type: NRG; PAM sequence: AGG
caggagaattgcttgtaccc

SEQ ID NO: 39930 - DNA, 20 bp, Artificial Sequence
  Description of Artificial Sequence: Synthetic oligonucleotide
  Target: SCNA; (+) strand; PAM type: NRG; PAM sequence: GAG
ggagaattgcttgtacccag

SEQ ID NO: 39931 - DNA, 20 bp, Artificial Sequence
  Description of Artificial Sequence: Synthetic oligonucleotide
  Target: SCNA; (+) strand; PAM type: NRG; PAM sequence: AGG
gagaattgcttgtacccagg

SEQ ID NO: 39932 - DNA, 20 bp, Artificial Sequence
  Description of Artificial Sequence: Synthetic oligonucleotide
  Target: SCNA; (+) strand; PAM type: NRG; PAM sequence: TGG
aattgcttgtacccaggagg

SEQ ID NO: 39933 - DNA, 20 bp, Artificial Sequence
  Description of Artificial Sequence: Synthetic oligonucleotide
  Target: SCNA; (+) strand; PAM type: NRG; PAM sequence: GAG
caggaggtggttgttgcact

SEQ ID NO: 39934 - DNA, 20 bp, Artificial Sequence
  Description of Artificial Sequence: Synthetic oligonucleotide
  Target: SCNA; (+) strand; PAM type: NRG; PAM sequence: GAG
ggtggttgttgcactgagcc

SEQ ID NO: 39935 - DNA, 20 bp, Artificial Sequence
  Description of Artificial Sequence: Synthetic oligonucleotide
  Target: SCNA; (+) strand; PAM type: NRG; PAM sequence: CAG
gagatcgcactactgcgctc

SEQ ID NO: 39936 - DNA, 20 bp, Artificial Sequence
  Description of Artificial Sequence: Synthetic oligonucleotide
  Target: SCNA; (+) strand; PAM type: NRG; PAM sequence: TGG
cgcactactgcgctccagcc

SEQ ID NO: 39937 - DNA, 20 bp, Artificial Sequence
  Description of Artificial Sequence: Synthetic oligonucleotide
  Target: SCNA; (+) strand; PAM type: NRG; PAM sequence: GGG
gcactactgcgctccagcct

SEQ ID NO: 39938 - DNA, 20 bp, Artificial Sequence
  Description of Artificial Sequence: Synthetic oligonucleotide
  Target: SCNA; (+) strand; PAM type: NRG; PAM sequence: CAG
ctgcgctccagcctgggcga

SEQ ID NO: 39939 - DNA, 20 bp, Artificial Sequence
  Description of Artificial Sequence: Synthetic oligonucleotide
  Target: SCNA; (+) strand; PAM type: NRG; PAM sequence: GAG
gcgctccagcctgggcgaca

SEQ ID NO: 39940 - DNA, 20 bp, Artificial Sequence
  Description of Artificial Sequence: Synthetic oligonucleotide
  Target: SCNA; (+) strand; PAM type: NRG; PAM sequence: AAG
tccagcctgggcgacagagc

SEQ ID NO: 39941 - DNA, 20 bp, Artificial Sequence
  Description of Artificial Sequence: Synthetic oligonucleotide
  Target: SCNA; (+) strand; PAM type: NRG; PAM sequence: TGG
gacagagcaagactccatct

SEQ ID NO: 39942 - DNA, 20 bp, Artificial Sequence
  Description of Artificial Sequence: Synthetic oligonucleotide
  Target: SCNA; (+) strand; PAM type: NRG; PAM sequence: GGG
acagagcaagactccatctt

SEQ ID NO: 39943 - DNA, 20 bp, Artificial Sequence
  Description of Artificial Sequence: Synthetic oligonucleotide
  Target: SCNA; (+) strand; PAM type: NRG; PAM sequence: GGG
cagagcaagactccatcttg

SEQ ID NO: 39944 - DNA, 20 bp, Artificial Sequence
  Description of Artificial Sequence: Synthetic oligonucleotide
  Target: SCNA; (+) strand; PAM type: NRG; PAM sequence: GGG
agagcaagactccatcttgg

SEQ ID NO: 39945 - DNA, 20 bp, Artificial Sequence
  Description of Artificial Sequence: Synthetic oligonucleotide
  Target: SCNA; (+) strand; PAM type: NRG; PAM sequence: AAG
agactccatcttgggggaaa

SEQ ID NO: 39946 - DNA, 20 bp, Artificial Sequence
  Description of Artificial Sequence: Synthetic oligonucleotide
  Target: SCNA; (+) strand; PAM type: NRG; PAM sequence: AAG
atcttgggggaaaaagaaaa

SEQ ID NO: 39947 - DNA, 20 bp, Artificial Sequence
  Description of Artificial Sequence: Synthetic oligonucleotide
  Target: SCNA; (+) strand; PAM type: NRG; PAM sequence: AAG
tgggggaaaaagaaaaaaga

SEQ ID NO: 39948 - DNA, 20 bp, Artificial Sequence
  Description of Artificial Sequence: Synthetic oligonucleotide
  Target: SCNA; (+) strand; PAM type: NRG; PAM sequence: AAG
ggaaaaagaaaaaagaaaga

SEQ ID NO: 39949 - DNA, 20 bp, Artificial Sequence
  Description of Artificial Sequence: Synthetic oligonucleotide
  Target: SCNA; (+) strand; PAM type: NRG; PAM sequence: AAG
actttttaacaccatataaa

SEQ ID NO: 39950 - DNA, 20 bp, Artificial Sequence
  Description of Artificial Sequence: Synthetic oligonucleotide
  Target: SCNA; (+) strand; PAM type: NRG; PAM sequence: TGG
tataaaaagcacatcactaa

SEQ ID NO: 39951 - DNA, 20 bp, Artificial Sequence
  Description of Artificial Sequence: Synthetic oligonucleotide
  Target: SCNA; (+) strand; PAM type: NRG; PAM sequence: TGG
tcactaatggtttgaaaact

SEQ ID NO: 39952 - DNA, 20 bp, Artificial Sequence
  Description of Artificial Sequence: Synthetic oligonucleotide
  Target: SCNA; (+) strand; PAM type: NRG; PAM sequence: AAG
aaaacttggtgttccatata

SEQ ID NO: 39953 - DNA, 20 bp, Artificial Sequence
  Description of Artificial Sequence: Synthetic oligonucleotide
  Target: SCNA; (+) strand; PAM type: NRG; PAM sequence: TGG
cttggtgttccatataaagc

SEQ ID NO: 39954 - DNA, 20 bp, Artificial Sequence
  Description of Artificial Sequence: Synthetic oligonucleotide
  Target: SCNA; (+) strand; PAM type: NRG; PAM sequence: TAG
tataaagctggaaatttatg

SEQ ID NO: 39955 - DNA, 20 bp, Artificial Sequence
  Description of Artificial Sequence: Synthetic oligonucleotide
  Target: SCNA; (+) strand; PAM type: NRG; PAM sequence: AAG
agctggaaatttatgtagtt

SEQ ID NO: 39956 - DNA, 20 bp, Artificial Sequence
  Description of Artificial Sequence: Synthetic oligonucleotide
  Target: SCNA; (+) strand; PAM type: NRG; PAM sequence: TAG
atttatgtagttaagaaatt

SEQ ID NO: 39957 - DNA, 20 bp, Artificial Sequence
  Description of Artificial Sequence: Synthetic oligonucleotide
  Target: SCNA; (+) strand; PAM type: NRG; PAM sequence: AAG
atgtagttaagaaatttaga

SEQ ID NO: 39958 - DNA, 20 bp, Artificial Sequence
  Description of Artificial Sequence: Synthetic oligonucleotide
  Target: SCNA; (+) strand; PAM type: NRG; PAM sequence: AAG
tttagaaagcaaattattca

SEQ ID NO: 39959 - DNA, 20 bp, Artificial Sequence
  Description of Artificial Sequence: Synthetic oligonucleotide
  Target: SCNA; (+) strand; PAM type: NRG; PAM sequence: AAG
agaaagcaaattattcaaag

SEQ ID NO: 39960 - DNA, 20 bp, Artificial Sequence
  Description of Artificial Sequence: Synthetic oligonucleotide
  Target: SCNA; (+) strand; PAM type: NRG; PAM sequence: TGG
tcaaagaagttatctcttaa

SEQ ID NO: 39961 - DNA, 20 bp, Artificial Sequence
  Description of Artificial Sequence: Synthetic oligonucleotide
  Target: SCNA; (+) strand; PAM type: NRG; PAM sequence: TAG
tggctatttgataaacactt

SEQ ID NO: 39962 - DNA, 20 bp, Artificial Sequence
  Description of Artificial Sequence: Synthetic oligonucleotide
  Target: SCNA; (+) strand; PAM type: NRG; PAM sequence: TGG
catatccatgtcaataaata

SEQ ID NO: 39963 - DNA, 20 bp, Artificial Sequence
  Description of Artificial Sequence: Synthetic oligonucleotide
  Target: SCNA; (+) strand; PAM type: NRG; PAM sequence: TGG
atggatttgtaacatcatct

SEQ ID NO: 39964 - DNA, 20 bp, Artificial Sequence
  Description of Artificial Sequence: Synthetic oligonucleotide
  Target: SCNA; (+) strand; PAM type: NRG; PAM sequence: CGG
ctttttattttcgtatacat

SEQ ID NO: 39965 - DNA, 20 bp, Artificial Sequence
  Description of Artificial Sequence: Synthetic oligonucleotide
  Target: SCNA; (+) strand; PAM type: NRG; PAM sequence: AAG
ttttcttctttttgtcttcc

SEQ ID NO: 39966 - DNA, 20 bp, Artificial Sequence
  Description of Artificial Sequence: Synthetic oligonucleotide
  Target: SCNA; (+) strand; PAM type: NRG; PAM sequence: CAG
aaaacgcttgtctatatacc

SEQ ID NO: 39967 - DNA, 20 bp, Artificial Sequence
  Description of Artificial Sequence: Synthetic oligonucleotide
  Target: SCNA; (+) strand; PAM type: NRG; PAM sequence: AAG
atatgttaaatattactaat

SEQ ID NO: 39968 - DNA, 20 bp, Artificial Sequence
  Description of Artificial Sequence: Synthetic oligonucleotide
  Target: SCNA; (+) strand; PAM type: NRG; PAM sequence: TAG
ttaaatcaacttctctataa

SEQ ID NO: 39969 - DNA, 20 bp, Artificial Sequence
  Description of Artificial Sequence: Synthetic oligonucleotide
  Target: SCNA; (+) strand; PAM type: NRG; PAM sequence: AAG
atagacaatgatccttcact

SEQ ID NO: 39970 - DNA, 20 bp, Artificial Sequence
  Description of Artificial Sequence: Synthetic oligonucleotide
  Target: SCNA; (+) strand; PAM type: NRG; PAM sequence: GAG
agtcttactgattcttttct

SEQ ID NO: 39971 - DNA, 20 bp, Artificial Sequence
  Description of Artificial Sequence: Synthetic oligonucleotide
  Target: SCNA; (+) strand; PAM type: NRG; PAM sequence: AAG
atttcgtcattaaaatattg

SEQ ID NO: 39972 - DNA, 20 bp, Artificial Sequence
  Description of Artificial Sequence: Synthetic oligonucleotide
  Target: SCNA; (+) strand; PAM type: NRG; PAM sequence: AAG
tcattaaaatattgaagtta

SEQ ID NO: 39973 - DNA, 20 bp, Artificial Sequence
  Description of Artificial Sequence: Synthetic oligonucleotide
  Target: SCNA; (+) strand; PAM type: NRG; PAM sequence: CAG
tgaagttaaagttgtatgtg

SEQ ID NO: 39974 - DNA, 20 bp, Artificial Sequence
  Description of Artificial Sequence: Synthetic oligonucleotide
  Target: SCNA; (+) strand; PAM type: NRG; PAM sequence: AGG
gaagttaaagttgtatgtgc

SEQ ID NO: 39975 - DNA, 20 bp, Artificial Sequence
  Description of Artificial Sequence: Synthetic oligonucleotide
  Target: SCNA; (+) strand; PAM type: NRG; PAM sequence: GGG
aagttaaagttgtatgtgca

SEQ ID NO: 39976 - DNA, 20 bp, Artificial Sequence
  Description of Artificial Sequence: Synthetic oligonucleotide
  Target: SCNA; (+) strand; PAM type: NRG; PAM sequence: TGG
atgtgcagggttgctttttt

SEQ ID NO: 39977 - DNA, 20 bp, Artificial Sequence
  Description of Artificial Sequence: Synthetic oligonucleotide
  Target: SCNA; (-) strand; PAM type: YTN; PAM sequence: TTA
ggtataggttttagtcatga

SEQ ID NO: 39978 - DNA, 20 bp, Artificial Sequence
  Description of Artificial Sequence: Synthetic oligonucleotide
  Target: SCNA; (-) strand; PAM type: YTN; PAM sequence: CTG
ttaggtataggttttagtca

SEQ ID NO: 39979 - DNA, 20 bp, Artificial Sequence
  Description of Artificial Sequence: Synthetic oligonucleotide
  Target: SCNA; (-) strand; PAM type: YTN; PAM sequence: TTC
caggctgttaggtataggtt

SEQ ID NO: 39980 - DNA, 20 bp, Artificial Sequence
  Description of Artificial Sequence: Synthetic oligonucleotide
  Target: SCNA; (-) strand; PAM type: YTN; PAM sequence: CTT
ccaggctgttaggtataggt

SEQ ID NO: 39981 - DNA, 20 bp, Artificial Sequence
  Description of Artificial Sequence: Synthetic oligonucleotide
  Target: SCNA; (-) strand; PAM type: YTN; PAM sequence: CTA
cttccaggctgttaggtata

SEQ ID NO: 39982 - DNA, 20 bp, Artificial Sequence
  Description of Artificial Sequence: Synthetic oligonucleotide
  Target: SCNA; (-) strand; PAM type: YTN; PAM sequence: TTG
atgatcagacctacttccag

SEQ ID NO: 39983 - DNA, 20 bp, Artificial Sequence
  Description of Artificial Sequence: Synthetic oligonucleotide
  Target: SCNA; (-) strand; PAM type: YTN; PAM sequence: TTT
gatgatcagacctacttcca

SEQ ID NO: 39984 - DNA, 20 bp, Artificial Sequence
  Description of Artificial Sequence: Synthetic oligonucleotide
  Target: SCNA; (-) strand; PAM type: YTN; PAM sequence: TTT
tgatgatcagacctacttcc

SEQ ID NO: 39985 - DNA, 20 bp, Artificial Sequence
  Description of Artificial Sequence: Synthetic oligonucleotide
  Target: SCNA; (-) strand; PAM type: YTN; PAM sequence: TTT
ttgatgatcagacctacttc

SEQ ID NO: 39986 - DNA, 20 bp, Artificial Sequence
  Description of Artificial Sequence: Synthetic oligonucleotide
  Target: SCNA; (-) strand; PAM type: YTN; PAM sequence: TTG
gtttttgatgatcagaccta

SEQ ID NO: 39987 - DNA, 20 bp, Artificial Sequence
  Description of Artificial Sequence: Synthetic oligonucleotide
  Target: SCNA; (-) strand; PAM type: YTN; PAM sequence: CTG
tgttggtttttgatgatcag

SEQ ID NO: 39988 - DNA, 20 bp, Artificial Sequence
  Description of Artificial Sequence: Synthetic oligonucleotide
  Target: SCNA; (-) strand; PAM type: YTN; PAM sequence: CTA
cactgtgttggtttttgatg

SEQ ID NO: 39989 - DNA, 20 bp, Artificial Sequence
  Description of Artificial Sequence: Synthetic oligonucleotide
  Target: SCNA; (-) strand; PAM type: YTN; PAM sequence: TTC
aaatgctacactgtgttggt

SEQ ID NO: 39990 - DNA, 20 bp, Artificial Sequence
  Description of Artificial Sequence: Synthetic oligonucleotide
  Target: SCNA; (-) strand; PAM type: YTN; PAM sequence: CTG
cccatggtgagaatagacat

SEQ ID NO: 39991 - DNA, 20 bp, Artificial Sequence
  Description of Artificial Sequence: Synthetic oligonucleotide
  Target: SCNA; (-) strand; PAM type: YTN; PAM sequence: TTC
actgcccatggtgagaatag

SEQ ID NO: 39992 - DNA, 20 bp, Artificial Sequence
  Description of Artificial Sequence: Synthetic oligonucleotide
  Target: SCNA; (-) strand; PAM type: YTN; PAM sequence: TTT
cactgcccatggtgagaata

SEQ ID NO: 39993 - DNA, 20 bp, Artificial Sequence
  Description of Artificial Sequence: Synthetic oligonucleotide
  Target: SCNA; (-) strand; PAM type: YTN; PAM sequence: TTT
tcactgcccatggtgagaat

SEQ ID NO: 39994 - DNA, 20 bp, Artificial Sequence
  Description of Artificial Sequence: Synthetic oligonucleotide
  Target: SCNA; (-) strand; PAM type: YTN; PAM sequence: CTG
tgttttcactgcccatggtg

SEQ ID NO: 39995 - DNA, 20 bp, Artificial Sequence
  Description of Artificial Sequence: Synthetic oligonucleotide
  Target: SCNA; (-) strand; PAM type: YTN; PAM sequence: TTC
catggctgtgttttcactgc

SEQ ID NO: 39996 - DNA, 20 bp, Artificial Sequence
  Description of Artificial Sequence: Synthetic oligonucleotide
  Target: SCNA; (-) strand; PAM type: YTN; PAM sequence: TTT
ccatggctgtgttttcactg

SEQ ID NO: 39997 - DNA, 20 bp, Artificial Sequence
  Description of Artificial Sequence: Synthetic oligonucleotide
  Target: SCNA; (-) strand; PAM type: YTN; PAM sequence: TTA
tggagtttccatggctgtgt

SEQ ID NO: 39998 - DNA, 20 bp, Artificial Sequence
  Description of Artificial Sequence: Synthetic oligonucleotide
  Target: SCNA; (-) strand; PAM type: YTN; PAM sequence: CTG
tacatcaatattatggagtt

SEQ ID NO: 39999 - DNA, 20 bp, Artificial Sequence
  Description of Artificial Sequence: Synthetic oligonucleotide
  Target: SCNA; (-) strand; PAM type: YTN; PAM sequence: CTC
tgtacatcaatattatggag

SEQ ID NO: 40000 - DNA, 20 bp, Artificial Sequence
  Description of Artificial Sequence: Synthetic oligonucleotide
  Target: SCNA; (-) strand; PAM type: YTN; PAM sequence: TTA
agaacagctctgtacatcaa

SEQ ID NO: 40001 - DNA, 20 bp, Artificial Sequence
  Description of Artificial Sequence: Synthetic oligonucleotide
  Target: SCNA; (-) strand; PAM type: YTN; PAM sequence: TTT
aagaacagctctgtacatca

SEQ ID NO: 40002 - DNA, 20 bp, Artificial Sequence
  Description of Artificial Sequence: Synthetic oligonucleotide
  Target: SCNA; (-) strand; PAM type: YTN; PAM sequence: TTA
tgtttaagaacagctctgta

SEQ ID NO: 40003 - DNA, 20 bp, Artificial Sequence
  Description of Artificial Sequence: Synthetic oligonucleotide
  Target: SCNA; (-) strand; PAM type: YTN; PAM sequence: CTA
agaaggagtccaacacaatc

SEQ ID NO: 40004 - DNA, 20 bp, Artificial Sequence
  Description of Artificial Sequence: Synthetic oligonucleotide
  Target: SCNA; (-) strand; PAM type: YTN; PAM sequence: TTC
taagaaggagtccaacacaa

SEQ ID NO: 40005 - DNA, 20 bp, Artificial Sequence
  Description of Artificial Sequence: Synthetic oligonucleotide
  Target: SCNA; (-) strand; PAM type: YTN; PAM sequence: TTG
gtgccattctaagaaggagt

SEQ ID NO: 40006 - DNA, 20 bp, Artificial Sequence
  Description of Artificial Sequence: Synthetic oligonucleotide
  Target: SCNA; (-) strand; PAM type: YTN; PAM sequence: CTT
ggtgccattctaagaaggag

SEQ ID NO: 40007 - DNA, 20 bp, Artificial Sequence
  Description of Artificial Sequence: Synthetic oligonucleotide
  Target: SCNA; (-) strand; PAM type: YTN; PAM sequence: TTA
cttggtgccattctaagaag

SEQ ID NO: 40008 - DNA, 20 bp, Artificial Sequence
  Description of Artificial Sequence: Synthetic oligonucleotide
  Target: SCNA; (-) strand; PAM type: YTN; PAM sequence: CTG
gtggttacttggtgccattc

SEQ ID NO: 40009 - DNA, 20 bp, Artificial Sequence
  Description of Artificial Sequence: Synthetic oligonucleotide
  Target: SCNA; (-) strand; PAM type: YTN; PAM sequence: TTG
gaggtgaatactggtggtta

SEQ ID NO: 40010 - DNA, 20 bp, Artificial Sequence
  Description of Artificial Sequence: Synthetic oligonucleotide
  Target: SCNA; (-) strand; PAM type: YTN; PAM sequence: TTT
ggaggtgaatactggtggtt

SEQ ID NO: 40011 - DNA, 20 bp, Artificial Sequence
  Description of Artificial Sequence: Synthetic oligonucleotide
  Target: SCNA; (-) strand; PAM type: YTN; PAM sequence: TTA
tcacagcaatgtttggaggt

SEQ ID NO: 40012 - DNA, 20 bp, Artificial Sequence
  Description of Artificial Sequence: Synthetic oligonucleotide
  Target: SCNA; (-) strand; PAM type: YTN; PAM sequence: CTG
attatcacagcaatgtttgg

SEQ ID NO: 40013 - DNA, 20 bp, Artificial Sequence
  Description of Artificial Sequence: Synthetic oligonucleotide
  Target: SCNA; (-) strand; PAM type: YTN; PAM sequence: CTC
tgattatcacagcaatgttt

SEQ ID NO: 40014 - DNA, 20 bp, Artificial Sequence
  Description of Artificial Sequence: Synthetic oligonucleotide
  Target: SCNA; (-) strand; PAM type: YTN; PAM sequence: CTG
agctctgattatcacagcaa

SEQ ID NO: 40015 - DNA, 20 bp, Artificial Sequence
  Description of Artificial Sequence: Synthetic oligonucleotide
  Target: SCNA; (-) strand; PAM type: YTN; PAM sequence: TTC
tgagctctgattatcacagc

SEQ ID NO: 40016 - DNA, 20 bp, Artificial Sequence
  Description of Artificial Sequence: Synthetic oligonucleotide
  Target: SCNA; (-) strand; PAM type: YTN; PAM sequence: CTG
attctgagctctgattatca

SEQ ID NO: 40017 - DNA, 20 bp, Artificial Sequence
  Description of Artificial Sequence: Synthetic oligonucleotide
  Target: SCNA; (-) strand; PAM type: YTN; PAM sequence: TTA
acaactgattctgagctctg

SEQ ID NO: 40018 - DNA, 20 bp, Artificial Sequence
  Description of Artificial Sequence: Synthetic oligonucleotide
  Target: SCNA; (-) strand; PAM type: YTN; PAM sequence: TTG
ttaacaactgattctgagct

SEQ ID NO: 40019 - DNA, 20 bp, Artificial Sequence
  Description of Artificial Sequence: Synthetic oligonucleotide
  Target: SCNA; (-) strand; PAM type: YTN; PAM sequence: TTA
tgtattgttaacaactgatt

SEQ ID NO: 40020 - DNA, 20 bp, Artificial Sequence
  Description of Artificial Sequence: Synthetic oligonucleotide
  Target: SCNA; (-) strand; PAM type: YTN; PAM sequence: CTG
taaattatgtattgttaaca

SEQ ID NO: 40021 - DNA, 20 bp, Artificial Sequence
  Description of Artificial Sequence: Synthetic oligonucleotide
  Target: SCNA; (-) strand; PAM type: YTN; PAM sequence: CTG
aaggaactgtaaattatgta

SEQ ID NO: 40022 - DNA, 20 bp, Artificial Sequence
  Description of Artificial Sequence: Synthetic oligonucleotide
  Target: SCNA; (-) strand; PAM type: YTN; PAM sequence: CTC
tgaaggaactgtaaattatg

SEQ ID NO: 40023 - DNA, 20 bp, Artificial Sequence
  Description of Artificial Sequence: Synthetic oligonucleotide
  Target: SCNA; (-) strand; PAM type: YTN; PAM sequence: CTA
aagcaaaagaagacatatct

SEQ ID NO: 40024 - DNA, 20 bp, Artificial Sequence
  Description of Artificial Sequence: Synthetic oligonucleotide
  Target: SCNA; (-) strand; PAM type: YTN; PAM sequence: CTC
atctaaagcaaaagaagaca

SEQ ID NO: 40025 - DNA, 20 bp, Artificial Sequence
  Description of Artificial Sequence: Synthetic oligonucleotide
  Target: SCNA; (-) strand; PAM type: YTN; PAM sequence: TTG
atctcatctaaagcaaaaga

SEQ ID NO: 40026 - DNA, 20 bp, Artificial Sequence
  Description of Artificial Sequence: Synthetic oligonucleotide
  Target: SCNA; (-) strand; PAM type: YTN; PAM sequence: CTT
gatctcatctaaagcaaaag

SEQ ID NO: 40027 - DNA, 20 bp, Artificial Sequence
  Description of Artificial Sequence: Synthetic oligonucleotide
  Target: SCNA; (-) strand; PAM type: YTN; PAM sequence: TTC
ttgatctcatctaaagcaaa

SEQ ID NO: 40028 - DNA, 20 bp, Artificial Sequence
  Description of Artificial Sequence: Synthetic oligonucleotide
  Target: SCNA; (-) strand; PAM type: YTN; PAM sequence: TTT
cttgatctcatctaaagcaa

SEQ ID NO: 40029 - DNA, 20 bp, Artificial Sequence
  Description of Artificial Sequence: Synthetic oligonucleotide
  Target: SCNA; (-) strand; PAM type: YTN; PAM sequence: TTT
tcttgatctcatctaaagca

SEQ ID NO: 40030 - DNA, 20 bp, Artificial Sequence
  Description of Artificial Sequence: Synthetic oligonucleotide
  Target: SCNA; (-) strand; PAM type: YTN; PAM sequence: CTA
caattttcttgatctcatct

SEQ ID NO: 40031 - DNA, 20 bp, Artificial Sequence
  Description of Artificial Sequence: Synthetic oligonucleotide
  Target: SCNA; (-) strand; PAM type: YTN; PAM sequence: TTC
ctacaattttcttgatctca

SEQ ID NO: 40032 - DNA, 20 bp, Artificial Sequence
  Description of Artificial Sequence: Synthetic oligonucleotide
  Target: SCNA; (-) strand; PAM type: YTN; PAM sequence: TTT
cctacaattttcttgatctc

SEQ ID NO: 40033 - DNA, 20 bp, Artificial Sequence
  Description of Artificial Sequence: Synthetic oligonucleotide
  Target: SCNA; (-) strand; PAM type: YTN; PAM sequence: CTT
tcctacaattttcttgatct

SEQ ID NO: 40034 - DNA, 20 bp, Artificial Sequence
  Description of Artificial Sequence: Synthetic oligonucleotide
  Target: SCNA; (-) strand; PAM type: YTN; PAM sequence: CTG
agaaaaagacctttcctaca

SEQ ID NO: 40035 - DNA, 20 bp, Artificial Sequence
  Description of Artificial Sequence: Synthetic oligonucleotide
  Target: SCNA; (-) strand; PAM type: YTN; PAM sequence: TTA
gatcgatgggcaaaagggta

SEQ ID NO: 40036 - DNA, 20 bp, Artificial Sequence
  Description of Artificial Sequence: Synthetic oligonucleotide
  Target: SCNA; (-) strand; PAM type: YTN; PAM sequence: CTT
agatcgatgggcaaaagggt

SEQ ID NO: 40037 - DNA, 20 bp, Artificial Sequence
  Description of Artificial Sequence: Synthetic oligonucleotide
  Target: SCNA; (-) strand; PAM type: YTN; PAM sequence: TTG
tcttagatcgatgggcaaaa

SEQ ID NO: 40038 - DNA, 20 bp, Artificial Sequence
  Description of Artificial Sequence: Synthetic oligonucleotide
  Target: SCNA; (-) strand; PAM type: YTN; PAM sequence: CTT
gtcttagatcgatgggcaaa

SEQ ID NO: 40039 - DNA, 20 bp, Artificial Sequence
  Description of Artificial Sequence: Synthetic oligonucleotide
  Target: SCNA; (-) strand; PAM type: YTN; PAM sequence: TTA
ggccacttgtcttagatcga

SEQ ID NO: 40040 - DNA, 20 bp, Artificial Sequence
  Description of Artificial Sequence: Synthetic oligonucleotide
  Target: SCNA; (-) strand; PAM type: YTN; PAM sequence: CTA
ggttaggccacttgtcttag

SEQ ID NO: 40041 - DNA, 20 bp, Artificial Sequence
  Description of Artificial Sequence: Synthetic oligonucleotide
  Target: SCNA; (-) strand; PAM type: YTN; PAM sequence: TTA
gctaggttaggccacttgtc

SEQ ID NO: 40042 - DNA, 20 bp, Artificial Sequence
  Description of Artificial Sequence: Synthetic oligonucleotide
  Target: SCNA; (-) strand; PAM type: YTN; PAM sequence: TTT
agctaggttaggccacttgt

SEQ ID NO: 40043 - DNA, 20 bp, Artificial Sequence
  Description of Artificial Sequence: Synthetic oligonucleotide
  Target: SCNA; (-) strand; PAM type: YTN; PAM sequence: CTT
tagctaggttaggccacttg

SEQ ID NO: 40044 - DNA, 20 bp, Artificial Sequence
  Description of Artificial Sequence: Synthetic oligonucleotide
  Target: SCNA; (-) strand; PAM type: YTN; PAM sequence: TTG
tgccatcctttagctaggtt

SEQ ID NO: 40045 - DNA, 20 bp, Artificial Sequence
  Description of Artificial Sequence: Synthetic oligonucleotide
  Target: SCNA; (-) strand; PAM type: YTN; PAM sequence: TTT
gtgccatcctttagctaggt

SEQ ID NO: 40046 - DNA, 20 bp, Artificial Sequence
  Description of Artificial Sequence: Synthetic oligonucleotide
  Target: SCNA; (-) strand; PAM type: YTN; PAM sequence: CTG
tttgtgccatcctttagcta

SEQ ID NO: 40047 - DNA, 20 bp, Artificial Sequence
  Description of Artificial Sequence: Synthetic oligonucleotide
  Target: SCNA; (-) strand; PAM type: YTN; PAM sequence: TTA
gctgtttgtgccatccttta

SEQ ID NO: 40048 - DNA, 20 bp, Artificial Sequence
  Description of Artificial Sequence: Synthetic oligonucleotide
  Target: SCNA; (-) strand; PAM type: YTN; PAM sequence: CTT
agctgtttgtgccatccttt

SEQ ID NO: 40049 - DNA, 20 bp, Artificial Sequence
  Description of Artificial Sequence: Synthetic oligonucleotide
  Target: SCNA; (-) strand; PAM type: YTN; PAM sequence: TTG
ggcatccttagctgtttgtg

SEQ ID NO: 40050 - DNA, 20 bp, Artificial Sequence
  Description of Artificial Sequence: Synthetic oligonucleotide
  Target: SCNA; (-) strand; PAM type: YTN; PAM sequence: CTT
gggcatccttagctgtttgt

SEQ ID NO: 40051 - DNA, 20 bp, Artificial Sequence
  Description of Artificial Sequence: Synthetic oligonucleotide
  Target: SCNA; (-) strand; PAM type: YTN; PAM sequence: TTG
gaaatccatcttgggcatcc

SEQ ID NO: 40052 - DNA, 20 bp, Artificial Sequence
  Description of Artificial Sequence: Synthetic oligonucleotide
  Target: SCNA; (-) strand; PAM type: YTN; PAM sequence: CTT
ggaaatccatcttgggcatc

SEQ ID NO: 40053 - DNA, 20 bp, Artificial Sequence
  Description of Artificial Sequence: Synthetic oligonucleotide
  Target: SCNA; (-) strand; PAM type: YTN; PAM sequence: TTC
cttggaaatccatcttgggc

SEQ ID NO: 40054 - DNA, 20 bp, Artificial Sequence
  Description of Artificial Sequence: Synthetic oligonucleotide
  Target: SCNA; (-) strand; PAM type: YTN; PAM sequence: CTT
ccttggaaatccatcttggg

SEQ ID NO: 40055 - DNA, 20 bp, Artificial Sequence
  Description of Artificial Sequence: Synthetic oligonucleotide
  Target: SCNA; (-) strand; PAM type: YTN; PAM sequence: TTG
gcaaacttccttggaaatcc

SEQ ID NO: 40056 - DNA, 20 bp, Artificial Sequence
  Description of Artificial Sequence: Synthetic oligonucleotide
  Target: SCNA; (-) strand; PAM type: YTN; PAM sequence: TTT
ggcaaacttccttggaaatc

SEQ ID NO: 40057 - DNA, 20 bp, Artificial Sequence
  Description of Artificial Sequence: Synthetic oligonucleotide
  Target: SCNA; (-) strand; PAM type: YTN; PAM sequence: TTT
tggcaaacttccttggaaat

SEQ ID NO: 40058 - DNA, 20 bp, Artificial Sequence
  Description of Artificial Sequence: Synthetic oligonucleotide
  Target: SCNA; (-) strand; PAM type: YTN; PAM sequence: TTT
ttggcaaacttccttggaaa

SEQ ID NO: 40059 - DNA, 20 bp, Artificial Sequence
  Description of Artificial Sequence: Synthetic oligonucleotide
  Target: SCNA; (-) strand; PAM type: YTN; PAM sequence: CTT
tttggcaaacttccttggaa

SEQ ID NO: 40060 - DNA, 20 bp, Artificial Sequence
  Description of Artificial Sequence: Synthetic oligonucleotide
  Target: SCNA; (-) strand; PAM type: YTN; PAM sequence: CTG
gcaagtctttttggcaaact

SEQ ID NO: 40061 - DNA, 20 bp, Artificial Sequence
  Description of Artificial Sequence: Synthetic oligonucleotide
  Target: SCNA; (-) strand; PAM type: YTN; PAM sequence: TTA
gaaatctggcaagtcttttt

SEQ ID NO: 40062 - DNA, 20 bp, Artificial Sequence
  Description of Artificial Sequence: Synthetic oligonucleotide
  Target: SCNA; (-) strand; PAM type: YTN; PAM sequence: TTG
aatgattagaaatctggcaa

SEQ ID NO: 40063 - DNA, 20 bp, Artificial Sequence
  Description of Artificial Sequence: Synthetic oligonucleotide
  Target: SCNA; (-) strand; PAM type: YTN; PAM sequence: TTG
aagatggagtgtccatgttg

SEQ ID NO: 40064 - DNA, 20 bp, Artificial Sequence
  Description of Artificial Sequence: Synthetic oligonucleotide
  Target: SCNA; (-) strand; PAM type: YTN; PAM sequence: CTG
ttgaagatggagtgtccatg

SEQ ID NO: 40065 - DNA, 20 bp, Artificial Sequence
  Description of Artificial Sequence: Synthetic oligonucleotide
  Target: SCNA; (-) strand; PAM type: YTN; PAM sequence: CTG
ctgttgaagatggagtgtcc

SEQ ID NO: 40066 - DNA, 20 bp, Artificial Sequence
  Description of Artificial Sequence: Synthetic oligonucleotide
  Target: SCNA; (-) strand; PAM type: YTN; PAM sequence: CTC
ctgctgttgaagatggagtg

SEQ ID NO: 40067 - DNA, 20 bp, Artificial Sequence
  Description of Artificial Sequence: Synthetic oligonucleotide
  Target: SCNA; (-) strand; PAM type: YTN; PAM sequence: CTG
actcctgctgttgaagatgg

SEQ ID NO: 40068 - DNA, 20 bp, Artificial Sequence
  Description of Artificial Sequence: Synthetic oligonucleotide
  Target: SCNA; (-) strand; PAM type: YTN; PAM sequence: TTA
gtaatgtggcagcactgact

SEQ ID NO: 40069 - DNA, 20 bp, Artificial Sequence
  Description of Artificial Sequence: Synthetic oligonucleotide
  Target: SCNA; (-) strand; PAM type: YTN; PAM sequence: CTG
ccaaacattagtaatgtggc

SEQ ID NO: 40070 - DNA, 20 bp, Artificial Sequence
  Description of Artificial Sequence: Synthetic oligonucleotide
  Target: SCNA; (-) strand; PAM type: YTN; PAM sequence: TTG
agaggctgccaaacattagt

SEQ ID NO: 40071 - DNA, 20 bp, Artificial Sequence
  Description of Artificial Sequence: Synthetic oligonucleotide
  Target: SCNA; (-) strand; PAM type: YTN; PAM sequence: TTT
gagaggctgccaaacattag

SEQ ID NO: 40072 - DNA, 20 bp, Artificial Sequence
  Description of Artificial Sequence: Synthetic oligonucleotide
  Target: SCNA; (-) strand; PAM type: YTN; PAM sequence: TTT
tgagaggctgccaaacatta

SEQ ID NO: 40073 - DNA, 20 bp, Artificial Sequence
  Description of Artificial Sequence: Synthetic oligonucleotide
  Target: SCNA; (-) strand; PAM type: YTN; PAM sequence: CTA
tggaaatggtcaaagcaagt

SEQ ID NO: 40074 - DNA, 20 bp, Artificial Sequence
  Description of Artificial Sequence: Synthetic oligonucleotide
  Target: SCNA; (-) strand; PAM type: YTN; PAM sequence: CTC
tatggaaatggtcaaagcaa

SEQ ID NO: 40075 - DNA, 20 bp, Artificial Sequence
  Description of Artificial Sequence: Synthetic oligonucleotide
  Target: SCNA; (-) strand; PAM type: YTN; PAM sequence: TTG
tgtaaggcgtcatccaaatc

SEQ ID NO: 40076 - DNA, 20 bp, Artificial Sequence
  Description of Artificial Sequence: Synthetic oligonucleotide
  Target: SCNA; (-) strand; PAM type: YTN; PAM sequence: CTA
cgtgttgtgtaaggcgtcat

SEQ ID NO: 40077 - DNA, 20 bp, Artificial Sequence
  Description of Artificial Sequence: Synthetic oligonucleotide
  Target: SCNA; (-) strand; PAM type: YTN; PAM sequence: CTA
gaacgtactacgtgttgtgt

SEQ ID NO: 40078 - DNA, 20 bp, Artificial Sequence
  Description of Artificial Sequence: Synthetic oligonucleotide
  Target: SCNA; (-) strand; PAM type: YTN; PAM sequence: CTC
tagaacgtactacgtgttgt

SEQ ID NO: 40079 - DNA, 20 bp, Artificial Sequence
  Description of Artificial Sequence: Synthetic oligonucleotide
  Target: SCNA; (-) strand; PAM type: YTN; PAM sequence: CTA
aatatggacagatgagcctc

SEQ ID NO: 40080 - DNA, 20 bp, Artificial Sequence
  Description of Artificial Sequence: Synthetic oligonucleotide
  Target: SCNA; (-) strand; PAM type: YTN; PAM sequence: TTG
taaaaaaacaaatgaagact

SEQ ID NO: 40081 - DNA, 20 bp, Artificial Sequence
  Description of Artificial Sequence: Synthetic oligonucleotide
  Target: SCNA; (-) strand; PAM type: YTN; PAM sequence: CTT
gtaaaaaaacaaatgaagac

SEQ ID NO: 40082 - DNA, 20 bp, Artificial Sequence
  Description of Artificial Sequence: Synthetic oligonucleotide
  Target: SCNA; (-) strand; PAM type: YTN; PAM sequence: CTC
ttgtaaaaaaacaaatgaag

SEQ ID NO: 40083 - DNA, 20 bp, Artificial Sequence
  Description of Artificial Sequence: Synthetic oligonucleotide
  Target: SCNA; (-) strand; PAM type: YTN; PAM sequence: CTA
acaaaatcaactcttgtaaa

SEQ ID NO: 40084 - DNA, 20 bp, Artificial Sequence
  Description of Artificial Sequence: Synthetic oligonucleotide
  Target: SCNA; (-) strand; PAM type: YTN; PAM sequence: TTC
ctaacaaaatcaactcttgt

SEQ ID NO: 40085 - DNA, 20 bp, Artificial Sequence
  Description of Artificial Sequence: Synthetic oligonucleotide
  Target: SCNA; (-) strand; PAM type: YTN; PAM sequence: TTT
cctaacaaaatcaactcttg

SEQ ID NO: 40086 - DNA, 20 bp, Artificial Sequence
  Description of Artificial Sequence: Synthetic oligonucleotide
  Target: SCNA; (-) strand; PAM type: YTN; PAM sequence: CTA
cgtttcctaacaaaatcaac

SEQ ID NO: 40087 - DNA, 20 bp, Artificial Sequence
  Description of Artificial Sequence: Synthetic oligonucleotide
  Target: SCNA; (-) strand; PAM type: YTN; PAM sequence: TTG
aatactacgtttcctaacaa

SEQ ID NO: 40088 - DNA, 20 bp, Artificial Sequence
  Description of Artificial Sequence: Synthetic oligonucleotide
  Target: SCNA; (-) strand; PAM type: YTN; PAM sequence: TTG
ttgaatactacgtttcctaa

SEQ ID NO: 40089 - DNA, 20 bp, Artificial Sequence
  Description of Artificial Sequence: Synthetic oligonucleotide
  Target: SCNA; (-) strand; PAM type: YTN; PAM sequence: TTA
ttgttgaatactacgtttcc

SEQ ID NO: 40090 - DNA, 20 bp, Artificial Sequence
  Description of Artificial Sequence: Synthetic oligonucleotide
  Target: SCNA; (-) strand; PAM type: YTN; PAM sequence: TTG
agagtagcagaaaattattg

SEQ ID NO: 40091 - DNA, 20 bp, Artificial Sequence
  Description of Artificial Sequence: Synthetic oligonucleotide
  Target: SCNA; (-) strand; PAM type: YTN; PAM sequence: CTA
ggaattgagagtagcagaaa

SEQ ID NO: 40092 - DNA, 20 bp, Artificial Sequence
  Description of Artificial Sequence: Synthetic oligonucleotide
  Target: SCNA; (-) strand; PAM type: YTN; PAM sequence: CTA
cctaggaattgagagtagca

SEQ ID NO: 40093 - DNA, 20 bp, Artificial Sequence
  Description of Artificial Sequence: Synthetic oligonucleotide
  Target: SCNA; (-) strand; PAM type: YTN; PAM sequence: CTG
tacgactacctaggaattga

SEQ ID NO: 40094 - DNA, 20 bp, Artificial Sequence
  Description of Artificial Sequence: Synthetic oligonucleotide
  Target: SCNA; (-) strand; PAM type: YTN; PAM sequence: CTG
gacactgtacgactacctag

SEQ ID NO: 40095 - DNA, 20 bp, Artificial Sequence
  Description of Artificial Sequence: Synthetic oligonucleotide
  Target: SCNA; (-) strand; PAM type: YTN; PAM sequence: TTC
tggacactgtacgactacct

SEQ ID NO: 40096 - DNA, 20 bp, Artificial Sequence
  Description of Artificial Sequence: Synthetic oligonucleotide
  Target: SCNA; (-) strand; PAM type: YTN; PAM sequence: CTT
ctggacactgtacgactacc

SEQ ID NO: 40097 - DNA, 20 bp, Artificial Sequence
  Description of Artificial Sequence: Synthetic oligonucleotide
  Target: SCNA; (-) strand; PAM type: YTN; PAM sequence: TTG
ccttctggacactgtacgac

SEQ ID NO: 40098 - DNA, 20 bp, Artificial Sequence
  Description of Artificial Sequence: Synthetic oligonucleotide
  Target: SCNA; (-) strand; PAM type: YTN; PAM sequence: TTT
gccttctggacactgtacga

SEQ ID NO: 40099 - DNA, 20 bp, Artificial Sequence
  Description of Artificial Sequence: Synthetic oligonucleotide
  Target: SCNA; (-) strand; PAM type: YTN; PAM sequence: TTT
tgccttctggacactgtacg

SEQ ID NO: 40100 - DNA, 20 bp, Artificial Sequence
  Description of Artificial Sequence: Synthetic oligonucleotide
  Target: SCNA; (-) strand; PAM type: YTN; PAM sequence: CTT
ttgccttctggacactgtac

SEQ ID NO: 40101 - DNA, 20 bp, Artificial Sequence
  Description of Artificial Sequence: Synthetic oligonucleotide
  Target: SCNA; (-) strand; PAM type: YTN; PAM sequence: TTG
tccttttgccttctggacac

SEQ ID NO: 40102 - DNA, 20 bp, Artificial Sequence
  Description of Artificial Sequence: Synthetic oligonucleotide
  Target: SCNA; (-) strand; PAM type: YTN; PAM sequence: CTT
gtccttttgccttctggaca

SEQ ID NO: 40103 - DNA, 20 bp, Artificial Sequence
  Description of Artificial Sequence: Synthetic oligonucleotide
  Target: SCNA; (-) strand; PAM type: YTN; PAM sequence: CTG
tgcagcagtgtggaaagtag

SEQ ID NO: 40104 - DNA, 20 bp, Artificial Sequence
  Description of Artificial Sequence: Synthetic oligonucleotide
  Target: SCNA; (-) strand; PAM type: YTN; PAM sequence: TTC
ctgtgcagcagtgtggaaag

SEQ ID NO: 40105 - DNA, 20 bp, Artificial Sequence
  Description of Artificial Sequence: Synthetic oligonucleotide
  Target: SCNA; (-) strand; PAM type: YTN; PAM sequence: TTT
cctgtgcagcagtgtggaaa

SEQ ID NO: 40106 - DNA, 20 bp, Artificial Sequence
  Description of Artificial Sequence: Synthetic oligonucleotide
  Target: SCNA; (-) strand; PAM type: YTN; PAM sequence: TTT
tcctgtgcagcagtgtggaa

SEQ ID NO: 40107 - DNA, 20 bp, Artificial Sequence
  Description of Artificial Sequence: Synthetic oligonucleotide
  Target: SCNA; (-) strand; PAM type: YTN; PAM sequence: CTG
tcagattttcctgtgcagca

SEQ ID NO: 40108 - DNA, 20 bp, Artificial Sequence
  Description of Artificial Sequence: Synthetic oligonucleotide
  Target: SCNA; (-) strand; PAM type: YTN; PAM sequence: CTC
tgtcagattttcctgtgcag

SEQ ID NO: 40109 - DNA, 20 bp, Artificial Sequence
  Description of Artificial Sequence: Synthetic oligonucleotide
  Target: SCNA; (-) strand; PAM type: YTN; PAM sequence: TTG
tcctctgtcagattttcctg

SEQ ID NO: 40110 - DNA, 20 bp, Artificial Sequence
  Description of Artificial Sequence: Synthetic oligonucleotide
  Target: SCNA; (-) strand; PAM type: YTN; PAM sequence: TTA
ttgtcctctgtcagattttc

SEQ ID NO: 40111 - DNA, 20 bp, Artificial Sequence
  Description of Artificial Sequence: Synthetic oligonucleotide
  Target: SCNA; (-) strand; PAM type: YTN; PAM sequence: TTG
ttattgtcctctgtcagatt

SEQ ID NO: 40112 - DNA, 20 bp, Artificial Sequence
  Description of Artificial Sequence: Synthetic oligonucleotide
  Target: SCNA; (-) strand; PAM type: YTN; PAM sequence: TTT
gttattgtcctctgtcagat

SEQ ID NO: 40113 - DNA, 20 bp, Artificial Sequence
  Description of Artificial Sequence: Synthetic oligonucleotide
  Target: SCNA; (-) strand; PAM type: YTN; PAM sequence: CTG
gtgagatgtttgttattgtc

SEQ ID NO: 40114 - DNA, 20 bp, Artificial Sequence
  Description of Artificial Sequence: Synthetic oligonucleotide
  Target: SCNA; (-) strand; PAM type: YTN; PAM sequence: TTA
ggatcaaaaaagaacgcatg

SEQ ID NO: 40115 - DNA, 20 bp, Artificial Sequence
  Description of Artificial Sequence: Synthetic oligonucleotide
  Target: SCNA; (-) strand; PAM type: YTN; PAM sequence: CTC
ggaattaggatcaaaaaaga

SEQ ID NO: 40116 - DNA, 20 bp, Artificial Sequence
  Description of Artificial Sequence: Synthetic oligonucleotide
  Target: SCNA; (-) strand; PAM type: YTN; PAM sequence: CTC
tcggaattaggatcaaaaaa

SEQ ID NO: 40117 - DNA, 20 bp, Artificial Sequence
  Description of Artificial Sequence: Synthetic oligonucleotide
  Target: SCNA; (-) strand; PAM type: YTN; PAM sequence: TTG
gtgagtctctcggaattagg

SEQ ID NO: 40118 - DNA, 20 bp, Artificial Sequence
  Description of Artificial Sequence: Synthetic oligonucleotide
  Target: SCNA; (-) strand; PAM type: YTN; PAM sequence: TTT
ggtgagtctctcggaattag

SEQ ID NO: 40119 - DNA, 20 bp, Artificial Sequence
  Description of Artificial Sequence: Synthetic oligonucleotide
  Target: SCNA; (-) strand; PAM type: YTN; PAM sequence: CTT
tggtgagtctctcggaatta

SEQ ID NO: 40120 - DNA, 20 bp, Artificial Sequence
  Description of Artificial Sequence: Synthetic oligonucleotide
  Target: SCNA; (-) strand; PAM type: YTN; PAM sequence: TTC
atgtctttggtgagtctctc

SEQ ID NO: 40121 - DNA, 20 bp, Artificial Sequence
  Description of Artificial Sequence: Synthetic oligonucleotide
  Target: SCNA; (-) strand; PAM type: YTN; PAM sequence: CTT
catgtctttggtgagtctct

SEQ ID NO: 40122 - DNA, 20 bp, Artificial Sequence
  Description of Artificial Sequence: Synthetic oligonucleotide
  Target: SCNA; (-) strand; PAM type: YTN; PAM sequence: CTC
ttcatgtctttggtgagtct

SEQ ID NO: 40123 - DNA, 20 bp, Artificial Sequence
  Description of Artificial Sequence: Synthetic oligonucleotide
  Target: SCNA; (-) strand; PAM type: YTN; PAM sequence: TTC
tcttcatgtctttggtgagt

SEQ ID NO: 40124 - DNA, 20 bp, Artificial Sequence
  Description of Artificial Sequence: Synthetic oligonucleotide
  Target: SCNA; (-) strand; PAM type: YTN; PAM sequence: TTT
ctcttcatgtctttggtgag

SEQ ID NO: 40125 - DNA, 20 bp, Artificial Sequence
  Description of Artificial Sequence: Synthetic oligonucleotide
  Target: SCNA; (-) strand; PAM type: YTN; PAM sequence: TTT
tctcttcatgtctttggtga

SEQ ID NO: 40126 - DNA, 20 bp, Artificial Sequence
  Description of Artificial Sequence: Synthetic oligonucleotide
  Target: SCNA; (-) strand; PAM type: YTN; PAM sequence: TTG
ttttctcttcatgtctttgg

SEQ ID NO: 40127 - DNA, 20 bp, Artificial Sequence
  Description of Artificial Sequence: Synthetic oligonucleotide
  Target: SCNA; (-) strand; PAM type: YTN; PAM sequence: TTT
gttttctcttcatgtctttg

SEQ ID NO: 40128 - DNA, 20 bp, Artificial Sequence
  Description of Artificial Sequence: Synthetic oligonucleotide
  Target: SCNA; (-) strand; PAM type: YTN; PAM sequence: TTG
tttgttttctcttcatgtct

SEQ ID NO: 40129 - DNA, 20 bp, Artificial Sequence
  Description of Artificial Sequence: Synthetic oligonucleotide
  Target: SCNA; (-) strand; PAM type: YTN; PAM sequence: TTC
caagaaaagtattgtttgtt

SEQ ID NO: 40130 - DNA, 20 bp, Artificial Sequence
  Description of Artificial Sequence: Synthetic oligonucleotide
  Target: SCNA; (-) strand; PAM type: YTN; PAM sequence: TTT
ccaagaaaagtattgtttgt

SEQ ID NO: 40131 - DNA, 20 bp, Artificial Sequence
  Description of Artificial Sequence: Synthetic oligonucleotide
  Target: SCNA; (-) strand; PAM type: YTN; PAM sequence: TTA
caatatttccaagaaaagta

SEQ ID NO: 40132 - DNA, 20 bp, Artificial Sequence
  Description of Artificial Sequence: Synthetic oligonucleotide
  Target: SCNA; (-) strand; PAM type: YTN; PAM sequence: TTA
tgccagaacaacaaatgtac

SEQ ID NO: 40133 - DNA, 20 bp, Artificial Sequence
  Description of Artificial Sequence: Synthetic oligonucleotide
  Target: SCNA; (-) strand; PAM type: YTN; PAM sequence: TTT
atgccagaacaacaaatgta

SEQ ID NO: 40134 - DNA, 20 bp, Artificial Sequence
  Description of Artificial Sequence: Synthetic oligonucleotide
  Target: SCNA; (-) strand; PAM type: YTN; PAM sequence: CTT
tatgccagaacaacaaatgt

SEQ ID NO: 40135 - DNA, 20 bp, Artificial Sequence
  Description of Artificial Sequence: Synthetic oligonucleotide
  Target: SCNA; (-) strand; PAM type: YTN; PAM sequence: CTA
ctttatgccagaacaacaaa

SEQ ID NO: 40136 - DNA, 20 bp, Artificial Sequence
  Description of Artificial Sequence: Synthetic oligonucleotide
  Target: SCNA; (-) strand; PAM type: YTN; PAM sequence: TTC
tactttatgccagaacaaca

SEQ ID NO: 40137 - DNA, 20 bp, Artificial Sequence
  Description of Artificial Sequence: Synthetic oligonucleotide
  Target: SCNA; (-) strand; PAM type: YTN; PAM sequence: TTT
ctactttatgccagaacaac

SEQ ID NO: 40138 - DNA, 20 bp, Artificial Sequence
  Description of Artificial Sequence: Synthetic oligonucleotide
  Target: SCNA; (-) strand; PAM type: YTN; PAM sequence: CTG
acaatttctactttatgcca

SEQ ID NO: 40139 - DNA, 20 bp, Artificial Sequence
  Description of Artificial Sequence: Synthetic oligonucleotide
  Target: SCNA; (-) strand; PAM type: YTN; PAM sequence: TTA
cctgacaatttctactttat

SEQ ID NO: 40140 - DNA, 20 bp, Artificial Sequence
  Description of Artificial Sequence: Synthetic oligonucleotide
  Target: SCNA; (-) strand; PAM type: YTN; PAM sequence: TTT
acctgacaatttctacttta

SEQ ID NO: 40141 - DNA, 20 bp, Artificial Sequence
  Description of Artificial Sequence: Synthetic oligonucleotide
  Target: SCNA; (-) strand; PAM type: YTN; PAM sequence: TTG
atccaaaaggaagcaatgtt

SEQ ID NO: 40142 - DNA, 20 bp, Artificial Sequence
  Description of Artificial Sequence: Synthetic oligonucleotide
  Target: SCNA; (-) strand; PAM type: YTN; PAM sequence: TTT
gatccaaaaggaagcaatgt

SEQ ID NO: 40143 - DNA, 20 bp, Artificial Sequence
  Description of Artificial Sequence: Synthetic oligonucleotide
  Target: SCNA; (-) strand; PAM type: YTN; PAM sequence: TTT
tgatccaaaaggaagcaatg

SEQ ID NO: 40144 - DNA, 20 bp, Artificial Sequence
  Description of Artificial Sequence: Synthetic oligonucleotide
  Target: SCNA; (-) strand; PAM type: YTN; PAM sequence: TTT
ttgatccaaaaggaagcaat

SEQ ID NO: 40145 - DNA, 20 bp, Artificial Sequence
  Description of Artificial Sequence: Synthetic oligonucleotide
  Target: SCNA; (-) strand; PAM type: YTN; PAM sequence: CTT
tttgatccaaaaggaagcaa

SEQ ID NO: 40146 - DNA, 20 bp, Artificial Sequence
  Description of Artificial Sequence: Synthetic oligonucleotide
  Target: SCNA; (-) strand; PAM type: YTN; PAM sequence: TTC
tttttgatccaaaaggaagc

SEQ ID NO: 40147 - DNA, 20 bp, Artificial Sequence
  Description of Artificial Sequence: Synthetic oligonucleotide
  Target: SCNA; (-) strand; PAM type: YTN; PAM sequence: TTT
ctttttgatccaaaaggaag

SEQ ID NO: 40148 - DNA, 20 bp, Artificial Sequence
  Description of Artificial Sequence: Synthetic oligonucleotide
  Target: SCNA; (-) strand; PAM type: YTN; PAM sequence: TTA
aatttctttttgatccaaaa

SEQ ID NO: 40149 - DNA, 20 bp, Artificial Sequence
  Description of Artificial Sequence: Synthetic oligonucleotide
  Target: SCNA; (-) strand; PAM type: YTN; PAM sequence: TTG
gttaaatttctttttgatcc

SEQ ID NO: 40150 - DNA, 20 bp, Artificial Sequence
  Description of Artificial Sequence: Synthetic oligonucleotide
  Target: SCNA; (-) strand; PAM type: YTN; PAM sequence: TTT
ggttaaatttctttttgatc

SEQ ID NO: 40151 - DNA, 20 bp, Artificial Sequence
  Description of Artificial Sequence: Synthetic oligonucleotide
  Target: SCNA; (-) strand; PAM type: YTN; PAM sequence: TTA
tttggttaaatttctttttg

SEQ ID NO: 40152 - DNA, 20 bp, Artificial Sequence
  Description of Artificial Sequence: Synthetic oligonucleotide
  Target: SCNA; (-) strand; PAM type: YTN; PAM sequence: TTT
atttggttaaatttcttttt

SEQ ID NO: 40153 - DNA, 20 bp, Artificial Sequence
  Description of Artificial Sequence: Synthetic oligonucleotide
  Target: SCNA; (-) strand; PAM type: YTN; PAM sequence: TTG
catttatttggttaaatttc

SEQ ID NO: 40154 - DNA, 20 bp, Artificial Sequence
  Description of Artificial Sequence: Synthetic oligonucleotide
  Target: SCNA; (-) strand; PAM type: YTN; PAM sequence: CTT
gcatttatttggttaaattt

SEQ ID NO: 40155 - DNA, 20 bp, Artificial Sequence
  Description of Artificial Sequence: Synthetic oligonucleotide
  Target: SCNA; (-) strand; PAM type: YTN; PAM sequence: CTC
ttgcatttatttggttaaat

SEQ ID NO: 40156 - DNA, 20 bp, Artificial Sequence
  Description of Artificial Sequence: Synthetic oligonucleotide
  Target: SCNA; (-) strand; PAM type: YTN; PAM sequence: CTC
atacctcttgcatttatttg

SEQ ID NO: 40157 - DNA, 20 bp, Artificial Sequence
  Description of Artificial Sequence: Synthetic oligonucleotide
  Target: SCNA; (-) strand; PAM type: YTN; PAM sequence: TTC
cctcatacctcttgcattta

SEQ ID NO: 40158 - DNA, 20 bp, Artificial Sequence
  Description of Artificial Sequence: Synthetic oligonucleotide
  Target: SCNA; (-) strand; PAM type: YTN; PAM sequence: CTT
ccctcatacctcttgcattt

SEQ ID NO: 40159 - DNA, 20 bp, Artificial Sequence
  Description of Artificial Sequence: Synthetic oligonucleotide
  Target: SCNA; (-) strand; PAM type: YTN; PAM sequence: TTA
tcttccctcatacctcttgc

SEQ ID NO: 40160 - DNA, 20 bp, Artificial Sequence
  Description of Artificial Sequence: Synthetic oligonucleotide
  Target: SCNA; (-) strand; PAM type: YTN; PAM sequence: TTC
ccattatcttccctcatacc

SEQ ID NO: 40161 - DNA, 20 bp, Artificial Sequence
  Description of Artificial Sequence: Synthetic oligonucleotide
  Target: SCNA; (-) strand; PAM type: YTN; PAM sequence: TTT
cccattatcttccctcatac

SEQ ID NO: 40162 - DNA, 20 bp, Artificial Sequence
  Description of Artificial Sequence: Synthetic oligonucleotide
  Target: SCNA; (-) strand; PAM type: YTN; PAM sequence: TTA
tttcccattatcttccctca

SEQ ID NO: 40163 - DNA, 20 bp, Artificial Sequence
  Description of Artificial Sequence: Synthetic oligonucleotide
  Target: SCNA; (-) strand; PAM type: YTN; PAM sequence: TTT
atttcccattatcttccctc

SEQ ID NO: 40164 - DNA, 20 bp, Artificial Sequence
  Description of Artificial Sequence: Synthetic oligonucleotide
  Target: SCNA; (-) strand; PAM type: YTN; PAM sequence: CTC
atttatttcccattatcttc

SEQ ID NO: 40165 - DNA, 20 bp, Artificial Sequence
  Description of Artificial Sequence: Synthetic oligonucleotide
  Target: SCNA; (-) strand; PAM type: YTN; PAM sequence: CTC
aaatctcatttatttcccat

SEQ ID NO: 40166 - DNA, 20 bp, Artificial Sequence
  Description of Artificial Sequence: Synthetic oligonucleotide
  Target: SCNA; (-) strand; PAM type: YTN; PAM sequence: TTC
tcaaatctcatttatttccc

SEQ ID NO: 40167 - DNA, 20 bp, Artificial Sequence
  Description of Artificial Sequence: Synthetic oligonucleotide
  Target: SCNA; (-) strand; PAM type: YTN; PAM sequence: TTT
ctcaaatctcatttatttcc

SEQ ID NO: 40168 - DNA, 20 bp, Artificial Sequence
  Description of Artificial Sequence: Synthetic oligonucleotide
  Target: SCNA; (-) strand; PAM type: YTN; PAM sequence: CTG
atttctcaaatctcatttat

SEQ ID NO: 40169 - DNA, 20 bp, Artificial Sequence
  Description of Artificial Sequence: Synthetic oligonucleotide
  Target: SCNA; (-) strand; PAM type: YTN; PAM sequence: CTC
cactgatttctcaaatctca

SEQ ID NO: 40170 - DNA, 20 bp, Artificial Sequence
  Description of Artificial Sequence: Synthetic oligonucleotide
  Target: SCNA; (-) strand; PAM type: YTN; PAM sequence: TTG
aacctccactgatttctcaa

SEQ ID NO: 40171 - DNA, 20 bp, Artificial Sequence
  Description of Artificial Sequence: Synthetic oligonucleotide
  Target: SCNA; (-) strand; PAM type: YTN; PAM sequence: CTT
gaacctccactgatttctca

SEQ ID NO: 40172 - DNA, 20 bp, Artificial Sequence
  Description of Artificial Sequence: Synthetic oligonucleotide
  Target: SCNA; (-) strand; PAM type: YTN; PAM sequence: CTA
caaaagaaaaaaaaaaccac

SEQ ID NO: 40173 - DNA, 20 bp, Artificial Sequence
  Description of Artificial Sequence: Synthetic oligonucleotide
  Target: SCNA; (-) strand; PAM type: YTN; PAM sequence: TTA
tcaactacaaaagaaaaaaa

SEQ ID NO: 40174 - DNA, 20 bp, Artificial Sequence
  Description of Artificial Sequence: Synthetic oligonucleotide
  Target: SCNA; (-) strand; PAM type: YTN; PAM sequence: TTA
aaacagagtattatcaacta

SEQ ID NO: 40175 - DNA, 20 bp, Artificial Sequence
  Description of Artificial Sequence: Synthetic oligonucleotide
  Target: SCNA; (-) strand; PAM type: YTN; PAM sequence: TTT
aaaacagagtattatcaact

SEQ ID NO: 40176 - DNA, 20 bp, Artificial Sequence
  Description of Artificial Sequence: Synthetic oligonucleotide
  Target: SCNA; (-) strand; PAM type: YTN; PAM sequence: CTG
atttaaaacagagtattatc

SEQ ID NO: 40177 - DNA, 20 bp, Artificial Sequence
  Description of Artificial Sequence: Synthetic oligonucleotide
  Target: SCNA; (-) strand; PAM type: YTN; PAM sequence: CTC
actgatttaaaacagagtat

SEQ ID NO: 40178 - DNA, 20 bp, Artificial Sequence
  Description of Artificial Sequence: Synthetic oligonucleotide
  Target: SCNA; (-) strand; PAM type: YTN; PAM sequence: CTA
gaaaaaaaaaaggacaagca

SEQ ID NO: 40179 - DNA, 20 bp, Artificial Sequence
  Description of Artificial Sequence: Synthetic oligonucleotide
  Target: SCNA; (-) strand; PAM type: YTN; PAM sequence: CTG
gtaactagaaaaaaaaaagg

SEQ ID NO: 40180 - DNA, 20 bp, Artificial Sequence
  Description of Artificial Sequence: Synthetic oligonucleotide
  Target: SCNA; (-) strand; PAM type: YTN; PAM sequence: TTC
tggtaactagaaaaaaaaaa

SEQ ID NO: 40181 - DNA, 20 bp, Artificial Sequence
  Description of Artificial Sequence: Synthetic oligonucleotide
  Target: SCNA; (-) strand; PAM type: YTN; PAM sequence: TTG
ttctggtaactagaaaaaaa

SEQ ID NO: 40182 - DNA, 20 bp, Artificial Sequence
  Description of Artificial Sequence: Synthetic oligonucleotide
  Target: SCNA; (-) strand; PAM type: YTN; PAM sequence: CTG
agtattgttctggtaactag

SEQ ID NO: 40183 - DNA, 20 bp, Artificial Sequence
  Description of Artificial Sequence: Synthetic oligonucleotide
  Target: SCNA; (-) strand; PAM type: YTN; PAM sequence: TTC
actgagtattgttctggtaa

SEQ ID NO: 40184 - DNA, 20 bp, Artificial Sequence
  Description of Artificial Sequence: Synthetic oligonucleotide
  Target: SCNA; (-) strand; PAM type: YTN; PAM sequence: TTC
ataagttcactgagtattgt

SEQ ID NO: 40185 - DNA, 20 bp, Artificial Sequence
  Description of Artificial Sequence: Synthetic oligonucleotide
  Target: SCNA; (-) strand; PAM type: YTN; PAM sequence: TTA
ccatatattcataagttcac

SEQ ID NO: 40186 - DNA, 20 bp, Artificial Sequence
  Description of Artificial Sequence: Synthetic oligonucleotide
  Target: SCNA; (-) strand; PAM type: YTN; PAM sequence: TTT
accatatattcataagttca

SEQ ID NO: 40187 - DNA, 20 bp, Artificial Sequence
  Description of Artificial Sequence: Synthetic oligonucleotide
  Target: SCNA; (-) strand; PAM type: YTN; PAM sequence: TTA
atatttaccatatattcata

SEQ ID NO: 40188 - DNA, 20 bp, Artificial Sequence
  Description of Artificial Sequence: Synthetic oligonucleotide
  Target: SCNA; (-) strand; PAM type: YTN; PAM sequence: TTT
aatatttaccatatattcat

SEQ ID NO: 40189 - DNA, 20 bp, Artificial Sequence
  Description of Artificial Sequence: Synthetic oligonucleotide
  Target: SCNA; (-) strand; PAM type: YTN; PAM sequence: CTC
atccaagtgggatgtgttta

SEQ ID NO: 40190 - DNA, 20 bp, Artificial Sequence
  Description of Artificial Sequence: Synthetic oligonucleotide
  Target: SCNA; (-) strand; PAM type: YTN; PAM sequence: TTC
tcatccaagtgggatgtgtt

SEQ ID NO: 40191 - DNA, 20 bp, Artificial Sequence
  Description of Artificial Sequence: Synthetic oligonucleotide
  Target: SCNA; (-) strand; PAM type: YTN; PAM sequence: CTT
ctcatccaagtgggatgtgt

SEQ ID NO: 40192 - DNA, 20 bp, Artificial Sequence
  Description of Artificial Sequence: Synthetic oligonucleotide
  Target: SCNA; (-) strand; PAM type: YTN; PAM sequence: CTC
acatatcttctcatccaagt

SEQ ID NO: 40193 - DNA, 20 bp, Artificial Sequence
  Description of Artificial Sequence: Synthetic oligonucleotide
  Target: SCNA; (-) strand; PAM type: YTN; PAM sequence: CTC
atcgactcacatatcttctc

SEQ ID NO: 40194 - DNA, 20 bp, Artificial Sequence
  Description of Artificial Sequence: Synthetic oligonucleotide
  Target: SCNA; (-) strand; PAM type: YTN; PAM sequence: CTA
tactcatcgactcacatatc

SEQ ID NO: 40195 - DNA, 20 bp, Artificial Sequence
  Description of Artificial Sequence: Synthetic oligonucleotide
  Target: SCNA; (-) strand; PAM type: YTN; PAM sequence: TTA
gctatactcatcgactcaca

SEQ ID NO: 40196 - DNA, 20 bp, Artificial Sequence
  Description of Artificial Sequence: Synthetic oligonucleotide
  Target: SCNA; (-) strand; PAM type: YTN; PAM sequence: CTT
agctatactcatcgactcac

SEQ ID NO: 40197 - DNA, 20 bp, Artificial Sequence
  Description of Artificial Sequence: Synthetic oligonucleotide
  Target: SCNA; (-) strand; PAM type: YTN; PAM sequence: TTA
gacttagctatactcatcga

SEQ ID NO: 40198 - DNA, 20 bp, Artificial Sequence
  Description of Artificial Sequence: Synthetic oligonucleotide
  Target: SCNA; (-) strand; PAM type: YTN; PAM sequence: TTT
agacttagctatactcatcg

SEQ ID NO: 40199 - DNA, 20 bp, Artificial Sequence
  Description of Artificial Sequence: Synthetic oligonucleotide
  Target: SCNA; (-) strand; PAM type: YTN; PAM sequence: CTT
tagacttagctatactcatc

SEQ ID NO: 40200 - DNA, 20 bp, Artificial Sequence
  Description of Artificial Sequence: Synthetic oligonucleotide
  Target: SCNA; (-) strand; PAM type: YTN; PAM sequence: CTA
actttagacttagctatact

SEQ ID NO: 40201 - DNA, 20 bp, Artificial Sequence
  Description of Artificial Sequence: Synthetic oligonucleotide
  Target: SCNA; (-) strand; PAM type: YTN; PAM sequence: TTA
tggaacacatctaactttag

SEQ ID NO: 40202 - DNA, 20 bp, Artificial Sequence
  Description of Artificial Sequence: Synthetic oligonucleotide
  Target: SCNA; (-) strand; PAM type: YTN; PAM sequence: TTT
atggaacacatctaacttta

SEQ ID NO: 40203 - DNA, 20 bp, Artificial Sequence
  Description of Artificial Sequence: Synthetic oligonucleotide
  Target: SCNA; (-) strand; PAM type: YTN; PAM sequence: CTA
tgtttatggaacacatctaa

SEQ ID NO: 40204 - DNA, 20 bp, Artificial Sequence
  Description of Artificial Sequence: Synthetic oligonucleotide
  Target: SCNA; (-) strand; PAM type: YTN; PAM sequence: CTC
cataaacactatgtttatgg

SEQ ID NO: 40205 - DNA, 20 bp, Artificial Sequence
  Description of Artificial Sequence: Synthetic oligonucleotide
  Target: SCNA; (-) strand; PAM type: YTN; PAM sequence: CTG
agaagtgaatatgcaccaac

SEQ ID NO: 40206 - DNA, 20 bp, Artificial Sequence
  Description of Artificial Sequence: Synthetic oligonucleotide
  Target: SCNA; (-) strand; PAM type: YTN; PAM sequence: TTA
ctgagaagtgaatatgcacc

SEQ ID NO: 40207 - DNA, 20 bp, Artificial Sequence
  Description of Artificial Sequence: Synthetic oligonucleotide
  Target: SCNA; (-) strand; PAM type: YTN; PAM sequence: CTT
actgagaagtgaatatgcac

SEQ ID NO: 40208 - DNA, 20 bp, Artificial Sequence
  Description of Artificial Sequence: Synthetic oligonucleotide
  Target: SCNA; (-) strand; PAM type: YTN; PAM sequence: TTA
agaaagtgtaacttactgag

SEQ ID NO: 40209 - DNA, 20 bp, Artificial Sequence
  Description of Artificial Sequence: Synthetic oligonucleotide
  Target: SCNA; (-) strand; PAM type: YTN; PAM sequence: CTA
gcaccaaaaagaaattaaga

SEQ ID NO: 40210 - DNA, 20 bp, Artificial Sequence
  Description of Artificial Sequence: Synthetic oligonucleotide
  Target: SCNA; (-) strand; PAM type: YTN; PAM sequence: TTA
gcagaatatcacctagcacc

SEQ ID NO: 40211 - DNA, 20 bp, Artificial Sequence
  Description of Artificial Sequence: Synthetic oligonucleotide
  Target: SCNA; (-) strand; PAM type: YTN; PAM sequence: CTT
agcagaatatcacctagcac

SEQ ID NO: 40212 - DNA, 20 bp, Artificial Sequence
  Description of Artificial Sequence: Synthetic oligonucleotide
  Target: SCNA; (-) strand; PAM type: YTN; PAM sequence: TTA
tgtgtacttagcagaatatc

SEQ ID NO: 40213 - DNA, 20 bp, Artificial Sequence
  Description of Artificial Sequence: Synthetic oligonucleotide
  Target: SCNA; (-) strand; PAM type: YTN; PAM sequence: CTT
atgtgtacttagcagaatat

SEQ ID NO: 40214 - DNA, 20 bp, Artificial Sequence
  Description of Artificial Sequence: Synthetic oligonucleotide
  Target: SCNA; (-) strand; PAM type: YTN; PAM sequence: CTA
tacttatgtgtacttagcag

SEQ ID NO: 40215 - DNA, 20 bp, Artificial Sequence
  Description of Artificial Sequence: Synthetic oligonucleotide
  Target: SCNA; (-) strand; PAM type: YTN; PAM sequence: TTA
ctatacttatgtgtacttag

SEQ ID NO: 40216 - DNA, 20 bp, Artificial Sequence
  Description of Artificial Sequence: Synthetic oligonucleotide
  Target: SCNA; (-) strand; PAM type: YTN; PAM sequence: CTA
accaatattactatacttat

SEQ ID NO: 40217 - DNA, 20 bp, Artificial Sequence
  Description of Artificial Sequence: Synthetic oligonucleotide
  Target: SCNA; (-) strand; PAM type: YTN; PAM sequence: TTA
ctaaccaatattactatact

SEQ ID NO: 40218 - DNA, 20 bp, Artificial Sequence
  Description of Artificial Sequence: Synthetic oligonucleotide
  Target: SCNA; (-) strand; PAM type: YTN; PAM sequence: TTT
actaaccaatattactatac

SEQ ID NO: 40219 - DNA, 20 bp, Artificial Sequence
  Description of Artificial Sequence: Synthetic oligonucleotide
  Target: SCNA; (-) strand; PAM type: YTN; PAM sequence: CTA
gtttactaaccaatattact

SEQ ID NO: 40220 - DNA, 20 bp, Artificial Sequence
  Description of Artificial Sequence: Synthetic oligonucleotide
  Target: SCNA; (-) strand; PAM type: YTN; PAM sequence: TTA
ctagtttactaaccaatatt

SEQ ID NO: 40221 - DNA, 20 bp, Artificial Sequence
  Description of Artificial Sequence: Synthetic oligonucleotide
  Target: SCNA; (-) strand; PAM type: YTN; PAM sequence: TTT
actagtttactaaccaatat

SEQ ID NO: 40222 - DNA, 20 bp, Artificial Sequence
  Description of Artificial Sequence: Synthetic oligonucleotide
  Target: SCNA; (-) strand; PAM type: YTN; PAM sequence: TTT
tactagtttactaaccaata

SEQ ID NO: 40223 - DNA, 20 bp, Artificial Sequence
  Description of Artificial Sequence: Synthetic oligonucleotide
  Target: SCNA; (-) strand; PAM type: YTN; PAM sequence: CTA
ggggagcattttactagttt

SEQ ID NO: 40224 - DNA, 20 bp, Artificial Sequence
  Description of Artificial Sequence: Synthetic oligonucleotide
  Target: SCNA; (-) strand; PAM type: YTN; PAM sequence: CTA
atagctaggggagcatttta

SEQ ID NO: 40225 - DNA, 20 bp, Artificial Sequence
  Description of Artificial Sequence: Synthetic oligonucleotide
  Target: SCNA; (-) strand; PAM type: YTN; PAM sequence: TTA
ctaatagctaggggagcatt

SEQ ID NO: 40226 - DNA, 20 bp, Artificial Sequence
  Description of Artificial Sequence: Synthetic oligonucleotide
  Target: SCNA; (-) strand; PAM type: YTN; PAM sequence: TTT
actaatagctaggggagcat

SEQ ID NO: 40227 - DNA, 20 bp, Artificial Sequence
  Description of Artificial Sequence: Synthetic oligonucleotide
  Target: SCNA; (-) strand; PAM type: YTN; PAM sequence: CTA
tttactaatagctaggggag

SEQ ID NO: 40228 - DNA, 20 bp, Artificial Sequence
  Description of Artificial Sequence: Synthetic oligonucleotide
  Target: SCNA; (-) strand; PAM type: YTN; PAM sequence: TTG
gagacacaaggcagaagcta

SEQ ID NO: 40229 - DNA, 20 bp, Artificial Sequence
  Description of Artificial Sequence: Synthetic oligonucleotide
  Target: SCNA; (-) strand; PAM type: YTN; PAM sequence: TTT
ggagacacaaggcagaagct

SEQ ID NO: 40230 - DNA, 20 bp, Artificial Sequence
  Description of Artificial Sequence: Synthetic oligonucleotide
  Target: SCNA; (-) strand; PAM type: YTN; PAM sequence: TTT
tggagacacaaggcagaagc

SEQ ID NO: 40231 - DNA, 20 bp, Artificial Sequence
  Description of Artificial Sequence: Synthetic oligonucleotide
  Target: SCNA; (-) strand; PAM type: YTN; PAM sequence: TTA
atataaaatagcaatcaaga

SEQ ID NO: 40232 - DNA, 20 bp, Artificial Sequence
  Description of Artificial Sequence: Synthetic oligonucleotide
  Target: SCNA; (-) strand; PAM type: YTN; PAM sequence: TTT
aatataaaatagcaatcaag

SEQ ID NO: 40233 - DNA, 20 bp, Artificial Sequence
  Description of Artificial Sequence: Synthetic oligonucleotide
  Target: SCNA; (-) strand; PAM type: YTN; PAM sequence: TTT
taatataaaatagcaatcaa

SEQ ID NO: 40234 - DNA, 20 bp, Artificial Sequence
  Description of Artificial Sequence: Synthetic oligonucleotide
  Target: SCNA; (-) strand; PAM type: YTN; PAM sequence: CTT
ttaatataaaatagcaatca

SEQ ID NO: 40235 - DNA, 20 bp, Artificial Sequence
  Description of Artificial Sequence: Synthetic oligonucleotide
  Target: SCNA; (-) strand; PAM type: YTN; PAM sequence: TTC
ttttaatataaaatagcaat

SEQ ID NO: 40236 - DNA, 20 bp, Artificial Sequence
  Description of Artificial Sequence: Synthetic oligonucleotide
  Target: SCNA; (-) strand; PAM type: YTN; PAM sequence: CTT
cttttaatataaaatagcaa

SEQ ID NO: 40237 - DNA, 20 bp, Artificial Sequence
  Description of Artificial Sequence: Synthetic oligonucleotide
  Target: SCNA; (-) strand; PAM type: YTN; PAM sequence: TTC
acatgtcttcttttaatata

SEQ ID NO: 40238 - DNA, 20 bp, Artificial Sequence
  Description of Artificial Sequence: Synthetic oligonucleotide
  Target: SCNA; (-) strand; PAM type: YTN; PAM sequence: TTC
atatacattcacatgtcttc

SEQ ID NO: 40239 - DNA, 20 bp, Artificial Sequence
  Description of Artificial Sequence: Synthetic oligonucleotide
  Target: SCNA; (-) strand; PAM type: YTN; PAM sequence: TTA
aatgttcatatacattcaca

SEQ ID NO: 40240 - DNA, 20 bp, Artificial Sequence
  Description of Artificial Sequence: Synthetic oligonucleotide
  Target: SCNA; (-) strand; PAM type: YTN; PAM sequence: TTT
aaatgttcatatacattcac

SEQ ID NO: 40241 - DNA, 20 bp, Artificial Sequence
  Description of Artificial Sequence: Synthetic oligonucleotide
  Target: SCNA; (-) strand; PAM type: YTN; PAM sequence: TTT
taaatgttcatatacattca

SEQ ID NO: 40242 - DNA, 20 bp, Artificial Sequence
  Description of Artificial Sequence: Synthetic oligonucleotide
  Target: SCNA; (-) strand; PAM type: YTN; PAM sequence: TTT
ttaaatgttcatatacattc

SEQ ID NO: 40243 - DNA, 20 bp, Artificial Sequence
  Description of Artificial Sequence: Synthetic oligonucleotide
  Target: SCNA; (-) strand; PAM type: YTN; PAM sequence: TTT
tttaaatgttcatatacatt

SEQ ID NO: 40244 - DNA, 20 bp, Artificial Sequence
  Description of Artificial Sequence: Synthetic oligonucleotide
  Target: SCNA; (-) strand; PAM type: YTN; PAM sequence: TTT
ttttaaatgttcatatacat

SEQ ID NO: 40245 - DNA, 20 bp, Artificial Sequence
  Description of Artificial Sequence: Synthetic oligonucleotide
  Target: SCNA; (-) strand; PAM type: YTN; PAM sequence: TTA
aaggtaaataagaaataaca

SEQ ID NO: 40246 - DNA, 20 bp, Artificial Sequence
  Description of Artificial Sequence: Synthetic oligonucleotide
  Target: SCNA; (-) strand; PAM type: YTN; PAM sequence: TTT
aaaggtaaataagaaataac

SEQ ID NO: 40247 - DNA, 20 bp, Artificial Sequence
  Description of Artificial Sequence: Synthetic oligonucleotide
  Target: SCNA; (-) strand; PAM type: YTN; PAM sequence: TTT
taaaggtaaataagaaataa

SEQ ID NO: 40248 - DNA, 20 bp, Artificial Sequence
  Description of Artificial Sequence: Synthetic oligonucleotide
  Target: SCNA; (-) strand; PAM type: YTN; PAM sequence: TTT
ttaaaggtaaataagaaata

SEQ ID NO: 40249 - DNA, 20 bp, Artificial Sequence
  Description of Artificial Sequence: Synthetic oligonucleotide
  Target: SCNA; (-) strand; PAM type: YTN; PAM sequence: CTG
tatttttaaaggtaaataag

SEQ ID NO: 40250 - DNA, 20 bp, Artificial Sequence
  Description of Artificial Sequence: Synthetic oligonucleotide
  Target: SCNA; (-) strand; PAM type: YTN; PAM sequence: CTA
gtacagcacactgtattttt

SEQ ID NO: 40251 - DNA, 20 bp, Artificial Sequence
  Description of Artificial Sequence: Synthetic oligonucleotide
  Target: SCNA; (-) strand; PAM type: YTN; PAM sequence: TTA
gtagtagtactagtacagca

SEQ ID NO: 40252 - DNA, 20 bp, Artificial Sequence
  Description of Artificial Sequence: Synthetic oligonucleotide
  Target: SCNA; (-) strand; PAM type: YTN; PAM sequence: TTA
ttagtagtagtactagtaca

SEQ ID NO: 40253 - DNA, 20 bp, Artificial Sequence
  Description of Artificial Sequence: Synthetic oligonucleotide
  Target: SCNA; (-) strand; PAM type: YTN; PAM sequence: TTT
attagtagtagtactagtac

SEQ ID NO: 40254 - DNA, 20 bp, Artificial Sequence
  Description of Artificial Sequence: Synthetic oligonucleotide
  Target: SCNA; (-) strand; PAM type: YTN; PAM sequence: CTA
tttattagtagtagtactag

SEQ ID NO: 40255 - DNA, 20 bp, Artificial Sequence
  Description of Artificial Sequence: Synthetic oligonucleotide
  Target: SCNA; (-) strand; PAM type: YTN; PAM sequence: CTA
tgagtcaatgatgctattta

SEQ ID NO: 40256 - DNA, 20 bp, Artificial Sequence
  Description of Artificial Sequence: Synthetic oligonucleotide
  Target: SCNA; (-) strand; PAM type: YTN; PAM sequence: CTG
atagtaagtgatctatgagt

SEQ ID NO: 40257 - DNA, 20 bp, Artificial Sequence
  Description of Artificial Sequence: Synthetic oligonucleotide
  Target: SCNA; (-) strand; PAM type: YTN; PAM sequence: CTG
gctgatagtaagtgatctat

SEQ ID NO: 40258 - DNA, 20 bp, Artificial Sequence
  Description of Artificial Sequence: Synthetic oligonucleotide
  Target: SCNA; (-) strand; PAM type: YTN; PAM sequence: CTG
cctggctgatagtaagtgat

SEQ ID NO: 40259 - DNA, 20 bp, Artificial Sequence
  Description of Artificial Sequence: Synthetic oligonucleotide
  Target: SCNA; (-) strand; PAM type: YTN; PAM sequence: TTA
ggactgcctggctgatagta

SEQ ID NO: 40260 - DNA, 20 bp, Artificial Sequence
  Description of Artificial Sequence: Synthetic oligonucleotide
  Target: SCNA; (-) strand; PAM type: YTN; PAM sequence: CTT
aggactgcctggctgatagt

SEQ ID NO: 40261 - DNA, 20 bp, Artificial Sequence
  Description of Artificial Sequence: Synthetic oligonucleotide
  Target: SCNA; (-) strand; PAM type: YTN; PAM sequence: TTA
atgtaagtggaatacttagg

SEQ ID NO: 40262 - DNA, 20 bp, Artificial Sequence
  Description of Artificial Sequence: Synthetic oligonucleotide
  Target: SCNA; (-) strand; PAM type: YTN; PAM sequence: TTA
agtgagttaatgtaagtgga

SEQ ID NO: 40263 - DNA, 20 bp, Artificial Sequence
  Description of Artificial Sequence: Synthetic oligonucleotide
  Target: SCNA; (-) strand; PAM type: YTN; PAM sequence: TTG
catgcattaagtgagttaat

SEQ ID NO: 40264 - DNA, 20 bp, Artificial Sequence
  Description of Artificial Sequence: Synthetic oligonucleotide
  Target: SCNA; (-) strand; PAM type: YTN; PAM sequence: TTG
ttgcatgcattaagtgagtt

SEQ ID NO: 40265 - DNA, 20 bp, Artificial Sequence
  Description of Artificial Sequence: Synthetic oligonucleotide
  Target: SCNA; (-) strand; PAM type: YTN; PAM sequence: CTC
atagcattgttgcatgcatt

SEQ ID NO: 40266 - DNA, 20 bp, Artificial Sequence
  Description of Artificial Sequence: Synthetic oligonucleotide
  Target: SCNA; (-) strand; PAM type: YTN; PAM sequence: TTA
tatgtaaatatgcaaatgat

SEQ ID NO: 40267 - DNA, 20 bp, Artificial Sequence
  Description of Artificial Sequence: Synthetic oligonucleotide
  Target: SCNA; (-) strand; PAM type: YTN; PAM sequence: CTT
atatgtaaatatgcaaatga

SEQ ID NO: 40268 - DNA, 20 bp, Artificial Sequence
  Description of Artificial Sequence: Synthetic oligonucleotide
  Target: SCNA; (-) strand; PAM type: YTN; PAM sequence: TTC
cttatatgtaaatatgcaaa

SEQ ID NO: 40269 - DNA, 20 bp, Artificial Sequence
  Description of Artificial Sequence: Synthetic oligonucleotide
  Target: SCNA; (-) strand; PAM type: YTN; PAM sequence: TTT
ccttatatgtaaatatgcaa

SEQ ID NO: 40270 - DNA, 20 bp, Artificial Sequence
  Description of Artificial Sequence: Synthetic oligonucleotide
  Target: SCNA; (-) strand; PAM type: YTN; PAM sequence: CTG
tttccttatatgtaaatatg

SEQ ID NO: 40271 - DNA, 20 bp, Artificial Sequence
  Description of Artificial Sequence: Synthetic oligonucleotide
  Target: SCNA; (-) strand; PAM type: YTN; PAM sequence: CTC
tgtttccttatatgtaaata

SEQ ID NO: 40272 - DNA, 20 bp, Artificial Sequence
  Description of Artificial Sequence: Synthetic oligonucleotide
  Target: SCNA; (-) strand; PAM type: YTN; PAM sequence: TTA
gtgtctctgtttccttatat

SEQ ID NO: 40273 - DNA, 20 bp, Artificial Sequence
  Description of Artificial Sequence: Synthetic oligonucleotide
  Target: SCNA; (-) strand; PAM type: YTN; PAM sequence: TTA
atattagtgtctctgtttcc

SEQ ID NO: 40274 - DNA, 20 bp, Artificial Sequence
  Description of Artificial Sequence: Synthetic oligonucleotide
  Target: SCNA; (-) strand; PAM type: YTN; PAM sequence: CTT
aatattagtgtctctgtttc

SEQ ID NO: 40275 - DNA, 20 bp, Artificial Sequence
  Description of Artificial Sequence: Synthetic oligonucleotide
  Target: SCNA; (-) strand; PAM type: YTN; PAM sequence: CTA
cttaatattagtgtctctgt

SEQ ID NO: 40276 - DNA, 20 bp, Artificial Sequence
  Description of Artificial Sequence: Synthetic oligonucleotide
  Target: SCNA; (-) strand; PAM type: YTN; PAM sequence: TTA
ctacttaatattagtgtctc

SEQ ID NO: 40277 - DNA, 20 bp, Artificial Sequence
  Description of Artificial Sequence: Synthetic oligonucleotide
  Target: SCNA; (-) strand; PAM type: YTN; PAM sequence: CTT
actacttaatattagtgtct

SEQ ID NO: 40278 - DNA, 20 bp, Artificial Sequence
  Description of Artificial Sequence: Synthetic oligonucleotide
  Target: SCNA; (-) strand; PAM type: YTN; PAM sequence: CTC
ttactacttaatattagtgt

SEQ ID NO: 40279 - DNA, 20 bp, Artificial Sequence
  Description of Artificial Sequence: Synthetic oligonucleotide
  Target: SCNA; (-) strand; PAM type: YTN; PAM sequence: TTA
tgtctcttactacttaatat

SEQ ID NO: 40280 - DNA, 20 bp, Artificial Sequence
  Description of Artificial Sequence: Synthetic oligonucleotide
  Target: SCNA; (-) strand; PAM type: YTN; PAM sequence: TTT
atgtctcttactacttaata

SEQ ID NO: 40281 - DNA, 20 bp, Artificial Sequence
  Description of Artificial Sequence: Synthetic oligonucleotide
  Target: SCNA; (-) strand; PAM type: YTN; PAM sequence: CTC
ccatttatgtctcttactac

SEQ ID NO: 40282 - DNA, 20 bp, Artificial Sequence
  Description of Artificial Sequence: Synthetic oligonucleotide
  Target: SCNA; (-) strand; PAM type: YTN; PAM sequence: TTC
gactcccatttatgtctctt

SEQ ID NO: 40283 - DNA, 20 bp, Artificial Sequence
  Description of Artificial Sequence: Synthetic oligonucleotide
  Target: SCNA; (-) strand; PAM type: YTN; PAM sequence: CTT
cgactcccatttatgtctct

SEQ ID NO: 40284 - DNA, 20 bp, Artificial Sequence
  Description of Artificial Sequence: Synthetic oligonucleotide
  Target: SCNA; (-) strand; PAM type: YTN; PAM sequence: CTA
tggaacttcgactcccattt

SEQ ID NO: 40285 - DNA, 20 bp, Artificial Sequence
  Description of Artificial Sequence: Synthetic oligonucleotide
  Target: SCNA; (-) strand; PAM type: YTN; PAM sequence: TTA
atagactatggaacttcgac

SEQ ID NO: 40286 - DNA, 20 bp, Artificial Sequence
  Description of Artificial Sequence: Synthetic oligonucleotide
  Target: SCNA; (-) strand; PAM type: YTN; PAM sequence: CTA
ttaatagactatggaacttc

SEQ ID NO: 40287 - DNA, 20 bp, Artificial Sequence
  Description of Artificial Sequence: Synthetic oligonucleotide
  Target: SCNA; (-) strand; PAM type: YTN; PAM sequence: CTC
caaaactattaatagactat

SEQ ID NO: 40288 - DNA, 20 bp, Artificial Sequence
  Description of Artificial Sequence: Synthetic oligonucleotide
  Target: SCNA; (-) strand; PAM type: YTN; PAM sequence: CTG
aactccaaaactattaatag

SEQ ID NO: 40289 - DNA, 20 bp, Artificial Sequence
  Description of Artificial Sequence: Synthetic oligonucleotide
  Target: SCNA; (-) strand; PAM type: YTN; PAM sequence: CTA
tcctgaactccaaaactatt

SEQ ID NO: 40290 - DNA, 20 bp, Artificial Sequence
  Description of Artificial Sequence: Synthetic oligonucleotide
  Target: SCNA; (-) strand; PAM type: YTN; PAM sequence: TTA
gagtaatagagactatcctg

SEQ ID NO: 40291 - DNA, 20 bp, Artificial Sequence
  Description of Artificial Sequence: Synthetic oligonucleotide
  Target: SCNA; (-) strand; PAM type: YTN; PAM sequence: TTA
atgaggtaggttagagtaat

SEQ ID NO: 40292 - DNA, 20 bp, Artificial Sequence
  Description of Artificial Sequence: Synthetic oligonucleotide
  Target: SCNA; (-) strand; PAM type: YTN; PAM sequence: CTT
aatgaggtaggttagagtaa

SEQ ID NO: 40293 - DNA, 20 bp, Artificial Sequence
  Description of Artificial Sequence: Synthetic oligonucleotide
  Target: SCNA; (-) strand; PAM type: YTN; PAM sequence: CTG
cttaatgaggtaggttagag

SEQ ID NO: 40294 - DNA, 20 bp, Artificial Sequence
  Description of Artificial Sequence: Synthetic oligonucleotide
  Target: SCNA; (-) strand; PAM type: YTN; PAM sequence: CTA
gaatagtcaaggatgctgct

SEQ ID NO: 40295 - DNA, 20 bp, Artificial Sequence
  Description of Artificial Sequence: Synthetic oligonucleotide
  Target: SCNA; (-) strand; PAM type: YTN; PAM sequence: TTA
cctagaatagtcaaggatgc

SEQ ID NO: 40296 - DNA, 20 bp, Artificial Sequence
  Description of Artificial Sequence: Synthetic oligonucleotide
  Target: SCNA; (-) strand; PAM type: YTN; PAM sequence: TTT
acctagaatagtcaaggatg

SEQ ID NO: 40297 - DNA, 20 bp, Artificial Sequence
  Description of Artificial Sequence: Synthetic oligonucleotide
  Target: SCNA; (-) strand; PAM type: YTN; PAM sequence: CTT
tacctagaatagtcaaggat

SEQ ID NO: 40298 - DNA, 20 bp, Artificial Sequence
  Description of Artificial Sequence: Synthetic oligonucleotide
  Target: SCNA; (-) strand; PAM type: YTN; PAM sequence: CTC
tttacctagaatagtcaagg

SEQ ID NO: 40299 - DNA, 20 bp, Artificial Sequence
  Description of Artificial Sequence: Synthetic oligonucleotide
  Target: SCNA; (-) strand; PAM type: YTN; PAM sequence: TTA
gaaaagaatacaatactctt

SEQ ID NO: 40300 - DNA, 20 bp, Artificial Sequence
  Description of Artificial Sequence: Synthetic oligonucleotide
  Target: SCNA; (-) strand; PAM type: YTN; PAM sequence: CTT
agaaaagaatacaatactct

SEQ ID NO: 40301 - DNA, 20 bp, Artificial Sequence
  Description of Artificial Sequence: Synthetic oligonucleotide
  Target: SCNA; (-) strand; PAM type: YTN; PAM sequence: TTA
tcttagaaaagaatacaata

SEQ ID NO: 40302 - DNA, 20 bp, Artificial Sequence
  Description of Artificial Sequence: Synthetic oligonucleotide
  Target: SCNA; (-) strand; PAM type: YTN; PAM sequence: TTT
atcttagaaaagaatacaat

SEQ ID NO: 40303 - DNA, 20 bp, Artificial Sequence
  Description of Artificial Sequence: Synthetic oligonucleotide
  Target: SCNA; (-) strand; PAM type: YTN; PAM sequence: TTT
tatcttagaaaagaatacaa

SEQ ID NO: 40304 - DNA, 20 bp, Artificial Sequence
  Description of Artificial Sequence: Synthetic oligonucleotide
  Target: SCNA; (-) strand; PAM type: YTN; PAM sequence: TTT
ttatcttagaaaagaataca

SEQ ID NO: 40305 - DNA, 20 bp, Artificial Sequence
  Description of Artificial Sequence: Synthetic oligonucleotide
  Target: SCNA; (-) strand; PAM type: YTN; PAM sequence: CTG
aatccaaacaaatatagtag

SEQ ID NO: 40306 - DNA, 20 bp, Artificial Sequence
  Description of Artificial Sequence: Synthetic oligonucleotide
  Target: SCNA; (-) strand; PAM type: YTN; PAM sequence: TTC
cagtaaagctgaatccaaac

SEQ ID NO: 40307 - DNA, 20 bp, Artificial Sequence
  Description of Artificial Sequence: Synthetic oligonucleotide
  Target: SCNA; (-) strand; PAM type: YTN; PAM sequence: CTG
tgttccagtaaagctgaatc

SEQ ID NO: 40308 - DNA, 20 bp, Artificial Sequence
  Description of Artificial Sequence: Synthetic oligonucleotide
  Target: SCNA; (-) strand; PAM type: YTN; PAM sequence: CTA
agctgtgttccagtaaagct

SEQ ID NO: 40309 - DNA, 20 bp, Artificial Sequence
  Description of Artificial Sequence: Synthetic oligonucleotide
  Target: SCNA; (-) strand; PAM type: YTN; PAM sequence: CTG
taaatgtcaaagctaagctg

SEQ ID NO: 40310 - DNA, 20 bp, Artificial Sequence
  Description of Artificial Sequence: Synthetic oligonucleotide
  Target: SCNA; (-) strand; PAM type: YTN; PAM sequence: CTA
acccatgtctgtaaatgtca

SEQ ID NO: 40311 - DNA, 20 bp, Artificial Sequence
  Description of Artificial Sequence: Synthetic oligonucleotide
  Target: SCNA; (-) strand; PAM type: YTN; PAM sequence: TTG
caacaaaatgaaacctaacc

SEQ ID NO: 40312 - DNA, 20 bp, Artificial Sequence
  Description of Artificial Sequence: Synthetic oligonucleotide
  Target: SCNA; (-) strand; PAM type: YTN; PAM sequence: CTT
gcaacaaaatgaaacctaac

SEQ ID NO: 40313 - DNA, 20 bp, Artificial Sequence
  Description of Artificial Sequence: Synthetic oligonucleotide
  Target: SCNA; (-) strand; PAM type: YTN; PAM sequence: TTA
tcttgcaacaaaatgaaacc

SEQ ID NO: 40314 - DNA, 20 bp, Artificial Sequence
  Description of Artificial Sequence: Synthetic oligonucleotide
  Target: SCNA; (-) strand; PAM type: YTN; PAM sequence: TTT
atcttgcaacaaaatgaaac

SEQ ID NO: 40315 - DNA, 20 bp, Artificial Sequence
  Description of Artificial Sequence: Synthetic oligonucleotide
  Target: SCNA; (-) strand; PAM type: YTN; PAM sequence: TTT
tatcttgcaacaaaatgaaa

SEQ ID NO: 40316 - DNA, 20 bp, Artificial Sequence
  Description of Artificial Sequence: Synthetic oligonucleotide
  Target: SCNA; (-) strand; PAM type: YTN; PAM sequence: CTT
ttatcttgcaacaaaatgaa

SEQ ID NO: 40317 - DNA, 20 bp, Artificial Sequence
  Description of Artificial Sequence: Synthetic oligonucleotide
  Target: SCNA; (-) strand; PAM type: YTN; PAM sequence: TTG
ccttttatcttgcaacaaaa

SEQ ID NO: 40318 - DNA, 20 bp, Artificial Sequence
  Description of Artificial Sequence: Synthetic oligonucleotide
  Target: SCNA; (-) strand; PAM type: YTN; PAM sequence: CTA
aatatcagattgccttttat

SEQ ID NO: 40319 - DNA, 20 bp, Artificial Sequence
  Description of Artificial Sequence: Synthetic oligonucleotide
  Target: SCNA; (-) strand; PAM type: YTN; PAM sequence: TTG
caggtaaactaaatatcaga

SEQ ID NO: 40320 - DNA, 20 bp, Artificial Sequence
  Description of Artificial Sequence: Synthetic oligonucleotide
  Target: SCNA; (-) strand; PAM type: YTN; PAM sequence: TTT
gcaggtaaactaaatatcag

SEQ ID NO: 40321 - DNA, 20 bp, Artificial Sequence
  Description of Artificial Sequence: Synthetic oligonucleotide
  Target: SCNA; (-) strand; PAM type: YTN; PAM sequence: TTT
tgcaggtaaactaaatatca

SEQ ID NO: 40322 - DNA, 20 bp, Artificial Sequence
  Description of Artificial Sequence: Synthetic oligonucleotide
  Target: SCNA; (-) strand; PAM type: YTN; PAM sequence: CTT
ttgcaggtaaactaaatatc

SEQ ID NO: 40323 - DNA, 20 bp, Artificial Sequence
  Description of Artificial Sequence: Synthetic oligonucleotide
  Target: SCNA; (-) strand; PAM type: YTN; PAM sequence: CTG
ccttttgcaggtaaactaaa

SEQ ID NO: 40324 - DNA, 20 bp, Artificial Sequence
  Description of Artificial Sequence: Synthetic oligonucleotide
  Target: SCNA; (-) strand; PAM type: YTN; PAM sequence: CTA
actgccttttgcaggtaaac

SEQ ID NO: 40325 - DNA, 20 bp, Artificial Sequence
  Description of Artificial Sequence: Synthetic oligonucleotide
  Target: SCNA; (-) strand; PAM type: YTN; PAM sequence: TTC
ctaactgccttttgcaggta

SEQ ID NO: 40326 - DNA, 20 bp, Artificial Sequence
  Description of Artificial Sequence: Synthetic oligonucleotide
  Target: SCNA; (-) strand; PAM type: YTN; PAM sequence: CTT
cctaactgccttttgcaggt

SEQ ID NO: 40327 - DNA, 20 bp, Artificial Sequence
  Description of Artificial Sequence: Synthetic oligonucleotide
  Target: SCNA; (-) strand; PAM type: YTN; PAM sequence: CTA
gggcttcctaactgcctttt

SEQ ID NO: 40328 - DNA, 20 bp, Artificial Sequence
  Description of Artificial Sequence: Synthetic oligonucleotide
  Target: SCNA; (-) strand; PAM type: YTN; PAM sequence: CTC
tagggcttcctaactgcctt

SEQ ID NO: 40329 - DNA, 20 bp, Artificial Sequence
  Description of Artificial Sequence: Synthetic oligonucleotide
  Target: SCNA; (-) strand; PAM type: YTN; PAM sequence: TTC
ctctagggcttcctaactgc

SEQ ID NO: 40330 - DNA, 20 bp, Artificial Sequence
  Description of Artificial Sequence: Synthetic oligonucleotide
  Target: SCNA; (-) strand; PAM type: YTN; PAM sequence: TTA
ggttcctctagggcttccta

SEQ ID NO: 40331 - DNA, 20 bp, Artificial Sequence
  Description of Artificial Sequence: Synthetic oligonucleotide
  Target: SCNA; (-) strand; PAM type: YTN; PAM sequence: TTA
attaggttcctctagggctt

SEQ ID NO: 40332 - DNA, 20 bp, Artificial Sequence
  Description of Artificial Sequence: Synthetic oligonucleotide
  Target: SCNA; (-) strand; PAM type: YTN; PAM sequence: TTT
aattaggttcctctagggct

SEQ ID NO: 40333 - DNA, 20 bp, Artificial Sequence
  Description of Artificial Sequence: Synthetic oligonucleotide
  Target: SCNA; (-) strand; PAM type: YTN; PAM sequence: TTT
taattaggttcctctagggc

SEQ ID NO: 40334 - DNA, 20 bp, Artificial Sequence
  Description of Artificial Sequence: Synthetic oligonucleotide
  Target: SCNA; (-) strand; PAM type: YTN; PAM sequence: CTG
cattttaattaggttcctct

SEQ ID NO: 40335 - DNA, 20 bp, Artificial Sequence
  Description of Artificial Sequence: Synthetic oligonucleotide
  Target: SCNA; (-) strand; PAM type: YTN; PAM sequence: TTG
gaaatgtgctgcattttaat

SEQ ID NO: 40336 - DNA, 20 bp, Artificial Sequence
  Description of Artificial Sequence: Synthetic oligonucleotide
  Target: SCNA; (-) strand; PAM type: YTN; PAM sequence: CTT
ggaaatgtgctgcattttaa

SEQ ID NO: 40337 - DNA, 20 bp, Artificial Sequence
  Description of Artificial Sequence: Synthetic oligonucleotide
  Target: SCNA; (-) strand; PAM type: YTN; PAM sequence: CTA
tggcaacacagcaagatatg

SEQ ID NO: 40338 - DNA, 20 bp, Artificial Sequence
  Description of Artificial Sequence: Synthetic oligonucleotide
  Target: SCNA; (-) strand; PAM type: YTN; PAM sequence: TTC
tatggcaacacagcaagata

SEQ ID NO: 40339 - DNA, 20 bp, Artificial Sequence
  Description of Artificial Sequence: Synthetic oligonucleotide
  Target: SCNA; (-) strand; PAM type: YTN; PAM sequence: TTT
ctatggcaacacagcaagat

SEQ ID NO: 40340 - DNA, 20 bp, Artificial Sequence
  Description of Artificial Sequence: Synthetic oligonucleotide
  Target: SCNA; (-) strand; PAM type: YTN; PAM sequence: TTG
tttctatggcaacacagcaa

SEQ ID NO: 40341 - DNA, 20 bp, Artificial Sequence
  Description of Artificial Sequence: Synthetic oligonucleotide
  Target: SCNA; (-) strand; PAM type: YTN; PAM sequence: CTC
gttgtttctatggcaacaca

SEQ ID NO: 40342 - DNA, 20 bp, Artificial Sequence
  Description of Artificial Sequence: Synthetic oligonucleotide
  Target: SCNA; (-) strand; PAM type: YTN; PAM sequence: CTG
gaaggtcagtgaccagaaat

SEQ ID NO: 40343 - DNA, 20 bp, Artificial Sequence
  Description of Artificial Sequence: Synthetic oligonucleotide
  Target: SCNA; (-) strand; PAM type: YTN; PAM sequence: TTC
cctggaaggtcagtgaccag

SEQ ID NO: 40344 - DNA, 20 bp, Artificial Sequence
  Description of Artificial Sequence: Synthetic oligonucleotide
  Target: SCNA; (-) strand; PAM type: YTN; PAM sequence: CTC
agattccctggaaggtcagt

SEQ ID NO: 40345 - DNA, 20 bp, Artificial Sequence
  Description of Artificial Sequence: Synthetic oligonucleotide
  Target: SCNA; (-) strand; PAM type: YTN; PAM sequence: TTA
tgaaaatacatcctcagatt

SEQ ID NO: 40346 - DNA, 20 bp, Artificial Sequence
  Description of Artificial Sequence: Synthetic oligonucleotide
  Target: SCNA; (-) strand; PAM type: YTN; PAM sequence: CTT
atgaaaatacatcctcagat

SEQ ID NO: 40347 - DNA, 20 bp, Artificial Sequence
  Description of Artificial Sequence: Synthetic oligonucleotide
  Target: SCNA; (-) strand; PAM type: YTN; PAM sequence: TTA
tgaaccttatgaaaatacat

SEQ ID NO: 40348 - DNA, 20 bp, Artificial Sequence
  Description of Artificial Sequence: Synthetic oligonucleotide
  Target: SCNA; (-) strand; PAM type: YTN; PAM sequence: CTT
atgaaccttatgaaaataca

SEQ ID NO: 40349 - DNA, 20 bp, Artificial Sequence
  Description of Artificial Sequence: Synthetic oligonucleotide
  Target: SCNA; (-) strand; PAM type: YTN; PAM sequence: CTC
ttatgaaccttatgaaaata

SEQ ID NO: 40350 - DNA, 20 bp, Artificial Sequence
  Description of Artificial Sequence: Synthetic oligonucleotide
  Target: SCNA; (-) strand; PAM type: YTN; PAM sequence: TTC
tcttatgaaccttatgaaaa

SEQ ID NO: 40351 - DNA, 20 bp, Artificial Sequence
  Description of Artificial Sequence: Synthetic oligonucleotide
  Target: SCNA; (-) strand; PAM type: YTN; PAM sequence: CTT
ctcttatgaaccttatgaaa

SEQ ID NO: 40352 - DNA, 20 bp, Artificial Sequence
  Description of Artificial Sequence: Synthetic oligonucleotide
  Target: SCNA; (-) strand; PAM type: YTN; PAM sequence: CTA
ggatggcttctcttatgaac

SEQ ID NO: 40353 - DNA, 20 bp, Artificial Sequence
  Description of Artificial Sequence: Synthetic oligonucleotide
  Target: SCNA; (-) strand; PAM type: YTN; PAM sequence: TTA
acatactaggatggcttctc

SEQ ID NO: 40354 - DNA, 20 bp, Artificial Sequence
  Description of Artificial Sequence: Synthetic oligonucleotide
  Target: SCNA; (-) strand; PAM type: YTN; PAM sequence: CTA
taggttaacatactaggatg

SEQ ID NO: 40355 - DNA, 20 bp, Artificial Sequence
  Description of Artificial Sequence: Synthetic oligonucleotide
  Target: SCNA; (-) strand; PAM type: YTN; PAM sequence: CTG
caactataggttaacatact

SEQ ID NO: 40356 - DNA, 20 bp, Artificial Sequence
  Description of Artificial Sequence: Synthetic oligonucleotide
  Target: SCNA; (-) strand; PAM type: YTN; PAM sequence: TTG
atctgcaactataggttaac

SEQ ID NO: 40357 - DNA, 20 bp, Artificial Sequence
  Description of Artificial Sequence: Synthetic oligonucleotide
  Target: SCNA; (-) strand; PAM type: YTN; PAM sequence: TTC
cataacgtatagttgatctg

SEQ ID NO: 40358 - DNA, 20 bp, Artificial Sequence
  Description of Artificial Sequence: Synthetic oligonucleotide
  Target: SCNA; (-) strand; PAM type: YTN; PAM sequence: TTT
ccataacgtatagttgatct

SEQ ID NO: 40359 - DNA, 20 bp, Artificial Sequence
  Description of Artificial Sequence: Synthetic oligonucleotide
  Target: SCNA; (-) strand; PAM type: YTN; PAM sequence: TTG
catagggaatttccataacg

SEQ ID NO: 40360 - DNA, 20 bp, Artificial Sequence
  Description of Artificial Sequence: Synthetic oligonucleotide
  Target: SCNA; (-) strand; PAM type: YTN; PAM sequence: CTA
gaattgcatagggaatttcc

SEQ ID NO: 40361 - DNA, 20 bp, Artificial Sequence
  Description of Artificial Sequence: Synthetic oligonucleotide
  Target: SCNA; (-) strand; PAM type: YTN; PAM sequence: TTG
gctagaattgcatagggaat

SEQ ID NO: 40362 - DNA, 20 bp, Artificial Sequence
  Description of Artificial Sequence: Synthetic oligonucleotide
  Target: SCNA; (-) strand; PAM type: YTN; PAM sequence: TTA
aaattggctagaattgcata

SEQ ID NO: 40363 - DNA, 20 bp, Artificial Sequence
  Description of Artificial Sequence: Synthetic oligonucleotide
  Target: SCNA; (-) strand; PAM type: YTN; PAM sequence: TTT
aaaattggctagaattgcat

SEQ ID NO: 40364 - DNA, 20 bp, Artificial Sequence
  Description of Artificial Sequence: Synthetic oligonucleotide
  Target: SCNA; (-) strand; PAM type: YTN; PAM sequence: TTT
taaaattggctagaattgca

SEQ ID NO: 40365 - DNA, 20 bp, Artificial Sequence
  Description of Artificial Sequence: Synthetic oligonucleotide
  Target: SCNA; (-) strand; PAM type: YTN; PAM sequence: TTG
gttttaaaattggctagaat

SEQ ID NO: 40366 - DNA, 20 bp, Artificial Sequence
  Description of Artificial Sequence: Synthetic oligonucleotide
  Target: SCNA; (-) strand; PAM type: YTN; PAM sequence: TTT
ggttttaaaattggctagaa

SEQ ID NO: 40367 - DNA, 20 bp, Artificial Sequence
  Description of Artificial Sequence: Synthetic oligonucleotide
  Target: SCNA; (-) strand; PAM type: YTN; PAM sequence: CTA
gtataatttggttttaaaat

SEQ ID NO: 40368 - DNA, 20 bp, Artificial Sequence
  Description of Artificial Sequence: Synthetic oligonucleotide
  Target: SCNA; (-) strand; PAM type: YTN; PAM sequence: TTG
ctagtataatttggttttaa

SEQ ID NO: 40369 - DNA, 20 bp, Artificial Sequence
  Description of Artificial Sequence: Synthetic oligonucleotide
  Target: SCNA; (-) strand; PAM type: YTN; PAM sequence: TTT
gctagtataatttggtttta

SEQ ID NO: 40370 - DNA, 20 bp, Artificial Sequence
  Description of Artificial Sequence: Synthetic oligonucleotide
  Target: SCNA; (-) strand; PAM type: YTN; PAM sequence: TTT
tgctagtataatttggtttt

SEQ ID NO: 40371 - DNA, 20 bp, Artificial Sequence
  Description of Artificial Sequence: Synthetic oligonucleotide
  Target: SCNA; (-) strand; PAM type: YTN; PAM sequence: CTA
gtaagttttgctagtataat

SEQ ID NO: 40372 - DNA, 20 bp, Artificial Sequence
  Description of Artificial Sequence: Synthetic oligonucleotide
  Target: SCNA; (-) strand; PAM type: YTN; PAM sequence: CTC
tagtaagttttgctagtata

SEQ ID NO: 40373 - DNA, 20 bp, Artificial Sequence
  Description of Artificial Sequence: Synthetic oligonucleotide
  Target: SCNA; (-) strand; PAM type: YTN; PAM sequence: TTG
agcctctagtaagttttgct

SEQ ID NO: 40374 - DNA, 20 bp, Artificial Sequence
  Description of Artificial Sequence: Synthetic oligonucleotide
  Target: SCNA; (-) strand; PAM type: YTN; PAM sequence: TTT
gagcctctagtaagttttgc

SEQ ID NO: 40375 - DNA, 20 bp, Artificial Sequence
  Description of Artificial Sequence: Synthetic oligonucleotide
  Target: SCNA; (-) strand; PAM type: YTN; PAM sequence: TTA
gtttgagcctctagtaagtt

SEQ ID NO: 40376 - DNA, 20 bp, Artificial Sequence
  Description of Artificial Sequence: Synthetic oligonucleotide
  Target: SCNA; (-) strand; PAM type: YTN; PAM sequence: CTT
agtttgagcctctagtaagt

SEQ ID NO: 40377 - DNA, 20 bp, Artificial Sequence
  Description of Artificial Sequence: Synthetic oligonucleotide
  Target: SCNA; (-) strand; PAM type: YTN; PAM sequence: TTC
aaagagcccttagtttgagc

SEQ ID NO: 40378 - DNA, 20 bp, Artificial Sequence
  Description of Artificial Sequence: Synthetic oligonucleotide
  Target: SCNA; (-) strand; PAM type: YTN; PAM sequence: CTT
caaagagcccttagtttgag

SEQ ID NO: 40379 - DNA, 20 bp, Artificial Sequence
  Description of Artificial Sequence: Synthetic oligonucleotide
  Target: SCNA; (-) strand; PAM type: YTN; PAM sequence: TTC
cttcaaagagcccttagttt

SEQ ID NO: 40380 - DNA, 20 bp, Artificial Sequence
  Description of Artificial Sequence: Synthetic oligonucleotide
  Target: SCNA; (-) strand; PAM type: YTN; PAM sequence: TTA
aaccacattccttcaaagag

SEQ ID NO: 40381 - DNA, 20 bp, Artificial Sequence
  Description of Artificial Sequence: Synthetic oligonucleotide
  Target: SCNA; (-) strand; PAM type: YTN; PAM sequence: TTG
gaagcagttaaaccacattc

SEQ ID NO: 40382 - DNA, 20 bp, Artificial Sequence
  Description of Artificial Sequence: Synthetic oligonucleotide
  Target: SCNA; (-) strand; PAM type: YTN; PAM sequence: TTA
tattggaagcagttaaacca

SEQ ID NO: 40383 - DNA, 20 bp, Artificial Sequence
  Description of Artificial Sequence: Synthetic oligonucleotide
  Target: SCNA; (-) strand; PAM type: YTN; PAM sequence: CTT
atattggaagcagttaaacc

SEQ ID NO: 40384 - DNA, 20 bp, Artificial Sequence
  Description of Artificial Sequence: Synthetic oligonucleotide
  Target: SCNA; (-) strand; PAM type: YTN; PAM sequence: TTG
aaatcttatattggaagcag

SEQ ID NO: 40385 - DNA, 20 bp, Artificial Sequence
  Description of Artificial Sequence: Synthetic oligonucleotide
  Target: SCNA; (-) strand; PAM type: YTN; PAM sequence: TTT
gaaatcttatattggaagca

SEQ ID NO: 40386 - DNA, 20 bp, Artificial Sequence
  Description of Artificial Sequence: Synthetic oligonucleotide
  Target: SCNA; (-) strand; PAM type: YTN; PAM sequence: TTA
tttgaaatcttatattggaa

SEQ ID NO: 40387 - DNA, 20 bp, Artificial Sequence
  Description of Artificial Sequence: Synthetic oligonucleotide
  Target: SCNA; (-) strand; PAM type: YTN; PAM sequence: TTA
attatttgaaatcttatatt

SEQ ID NO: 40388 - DNA, 20 bp, Artificial Sequence
  Description of Artificial Sequence: Synthetic oligonucleotide
  Target: SCNA; (-) strand; PAM type: YTN; PAM sequence: CTT
aattatttgaaatcttatat

SEQ ID NO: 40389 - DNA, 20 bp, Artificial Sequence
  Description of Artificial Sequence: Synthetic oligonucleotide
  Target: SCNA; (-) strand; PAM type: YTN; PAM sequence: CTA
cagtatccttaattatttga

SEQ ID NO: 40390 - DNA, 20 bp, Artificial Sequence
  Description of Artificial Sequence: Synthetic oligonucleotide
  Target: SCNA; (-) strand; PAM type: YTN; PAM sequence: CTA
ctacagtatccttaattatt

SEQ ID NO: 40391 - DNA, 20 bp, Artificial Sequence
  Description of Artificial Sequence: Synthetic oligonucleotide
  Target: SCNA; (-) strand; PAM type: YTN; PAM sequence: CTG
ctactacagtatccttaatt

SEQ ID NO: 40392 - DNA, 20 bp, Artificial Sequence
  Description of Artificial Sequence: Synthetic oligonucleotide
  Target: SCNA; (-) strand; PAM type: YTN; PAM sequence: TTG
ctgctactacagtatcctta

SEQ ID NO: 40393 - DNA, 20 bp, Artificial Sequence
  Description of Artificial Sequence: Synthetic oligonucleotide
  Target: SCNA; (-) strand; PAM type: YTN; PAM sequence: TTT
gctgctactacagtatcctt

SEQ ID NO: 40394 - DNA, 20 bp, Artificial Sequence
  Description of Artificial Sequence: Synthetic oligonucleotide
  Target: SCNA; (-) strand; PAM type: YTN; PAM sequence: TTT
tgctgctactacagtatcct

SEQ ID NO: 40395 - DNA, 20 bp, Artificial Sequence
  Description of Artificial Sequence: Synthetic oligonucleotide
  Target: SCNA; (-) strand; PAM type: YTN; PAM sequence: TTT
ttgctgctactacagtatcc

SEQ ID NO: 40396 - DNA, 20 bp, Artificial Sequence
  Description of Artificial Sequence: Synthetic oligonucleotide
  Target: SCNA; (-) strand; PAM type: YTN; PAM sequence: TTA
atgtttttgctgctactaca

SEQ ID NO: 40397 - DNA, 20 bp, Artificial Sequence
  Description of Artificial Sequence: Synthetic oligonucleotide
  Target: SCNA; (-) strand; PAM type: YTN; PAM sequence: TTT
aatgtttttgctgctactac

SEQ ID NO: 40398 - DNA, 20 bp, Artificial Sequence
  Description of Artificial Sequence: Synthetic oligonucleotide
  Target: SCNA; (-) strand; PAM type: YTN; PAM sequence: CTT
taatgtttttgctgctacta

SEQ ID NO: 40399 - DNA, 20 bp, Artificial Sequence
  Description of Artificial Sequence: Synthetic oligonucleotide
  Target: SCNA; (-) strand; PAM type: YTN; PAM sequence: TTC
tttaatgtttttgctgctac

SEQ ID NO: 40400 - DNA, 20 bp, Artificial Sequence
  Description of Artificial Sequence: Synthetic oligonucleotide
  Target: SCNA; (-) strand; PAM type: YTN; PAM sequence: TTT
ctttaatgtttttgctgcta

SEQ ID NO: 40401 - DNA, 20 bp, Artificial Sequence
  Description of Artificial Sequence: Synthetic oligonucleotide
  Target: SCNA; (-) strand; PAM type: YTN; PAM sequence: TTT
tctttaatgtttttgctgct

SEQ ID NO: 40402 - DNA, 20 bp, Artificial Sequence
  Description of Artificial Sequence: Synthetic oligonucleotide
  Target: SCNA; (-) strand; PAM type: YTN; PAM sequence: CTT
ttctttaatgtttttgctgc

SEQ ID NO: 40403 - DNA, 20 bp, Artificial Sequence
  Description of Artificial Sequence: Synthetic oligonucleotide
  Target: SCNA; (-) strand; PAM type: YTN; PAM sequence: CTA
agcttttctttaatgttttt

SEQ ID NO: 40404 - DNA, 20 bp, Artificial Sequence
  Description of Artificial Sequence: Synthetic oligonucleotide
  Target: SCNA; (-) strand; PAM type: YTN; PAM sequence: TTA
cctaagcttttctttaatgt

SEQ ID NO: 40405 - DNA, 20 bp, Artificial Sequence
  Description of Artificial Sequence: Synthetic oligonucleotide
  Target: SCNA; (-) strand; PAM type: YTN; PAM sequence: TTG
tgtaattacctaagcttttc

SEQ ID NO: 40406 - DNA, 20 bp, Artificial Sequence
  Description of Artificial Sequence: Synthetic oligonucleotide
  Target: SCNA; (-) strand; PAM type: YTN; PAM sequence: TTT
gtgtaattacctaagctttt

SEQ ID NO: 40407 - DNA, 20 bp, Artificial Sequence
  Description of Artificial Sequence: Synthetic oligonucleotide
  Target: SCNA; (-) strand; PAM type: YTN; PAM sequence: CTT
tgtgtaattacctaagcttt

SEQ ID NO: 40408 - DNA, 20 bp, Artificial Sequence
  Description of Artificial Sequence: Synthetic oligonucleotide
  Target: SCNA; (-) strand; PAM type: YTN; PAM sequence: TTC
tttgtgtaattacctaagct

SEQ ID NO: 40409 - DNA, 20 bp, Artificial Sequence
  Description of Artificial Sequence: Synthetic oligonucleotide
  Target: SCNA; (-) strand; PAM type: YTN; PAM sequence: TTC
caatgttctttgtgtaatta

SEQ ID NO: 40410 - DNA, 20 bp, Artificial Sequence
  Description of Artificial Sequence: Synthetic oligonucleotide
  Target: SCNA; (-) strand; PAM type: YTN; PAM sequence: TTA
gttccaatgttctttgtgta

SEQ ID NO: 40411 - DNA, 20 bp, Artificial Sequence
  Description of Artificial Sequence: Synthetic oligonucleotide
  Target: SCNA; (-) strand; PAM type: YTN; PAM sequence: TTT
agttccaatgttctttgtgt

SEQ ID NO: 40412 - DNA, 20 bp, Artificial Sequence
  Description of Artificial Sequence: Synthetic oligonucleotide
  Target: SCNA; (-) strand; PAM type: YTN; PAM sequence: TTT
tagttccaatgttctttgtg

SEQ ID NO: 40413 - DNA, 20 bp, Artificial Sequence
  Description of Artificial Sequence: Synthetic oligonucleotide
  Target: SCNA; (-) strand; PAM type: YTN; PAM sequence: CTA
aatatgattttagttccaat

SEQ ID NO: 40414 - DNA, 20 bp, Artificial Sequence
  Description of Artificial Sequence: Synthetic oligonucleotide
  Target: SCNA; (-) strand; PAM type: YTN; PAM sequence: TTC
ctaaatatgattttagttcc

SEQ ID NO: 40415 - DNA, 20 bp, Artificial Sequence
  Description of Artificial Sequence: Synthetic oligonucleotide
  Target: SCNA; (-) strand; PAM type: YTN; PAM sequence: CTA
ttcctaaatatgattttagt

SEQ ID NO: 40416 - DNA, 20 bp, Artificial Sequence
  Description of Artificial Sequence: Synthetic oligonucleotide
  Target: SCNA; (-) strand; PAM type: YTN; PAM sequence: TTG
aaactattcctaaatatgat

SEQ ID NO: 40417 - DNA, 20 bp, Artificial Sequence
  Description of Artificial Sequence: Synthetic oligonucleotide
  Target: SCNA; (-) strand; PAM type: YTN; PAM sequence: TTG
aagaacccaaaatgcaatag

SEQ ID NO: 40418 - DNA, 20 bp, Artificial Sequence
  Description of Artificial Sequence: Synthetic oligonucleotide
  Target: SCNA; (-) strand; PAM type: YTN; PAM sequence: CTA
gaattgaagaacccaaaatg

SEQ ID NO: 40419 - DNA, 20 bp, Artificial Sequence
  Description of Artificial Sequence: Synthetic oligonucleotide
  Target: SCNA; (-) strand; PAM type: YTN; PAM sequence: TTG
agtaagcctagaattgaaga

SEQ ID NO: 40420 - DNA, 20 bp, Artificial Sequence
  Description of Artificial Sequence: Synthetic oligonucleotide
  Target: SCNA; (-) strand; PAM type: YTN; PAM sequence: TTT
gagtaagcctagaattgaag

SEQ ID NO: 40421 - DNA, 20 bp, Artificial Sequence
  Description of Artificial Sequence: Synthetic oligonucleotide
  Target: SCNA; (-) strand; PAM type: YTN; PAM sequence: CTT
tgagtaagcctagaattgaa

SEQ ID NO: 40422 - DNA, 20 bp, Artificial Sequence
  Description of Artificial Sequence: Synthetic oligonucleotide
  Target: SCNA; (-) strand; PAM type: YTN; PAM sequence: TTA
tcctttgagtaagcctagaa

SEQ ID NO: 40423 - DNA, 20 bp, Artificial Sequence
  Description of Artificial Sequence: Synthetic oligonucleotide
  Target: SCNA; (-) strand; PAM type: YTN; PAM sequence: TTT
atcctttgagtaagcctaga

SEQ ID NO: 40424 - DNA, 20 bp, Artificial Sequence
  Description of Artificial Sequence: Synthetic oligonucleotide
  Target: SCNA; (-) strand; PAM type: YTN; PAM sequence: TTT
tatcctttgagtaagcctag

SEQ ID NO: 40425 - DNA, 20 bp, Artificial Sequence
  Description of Artificial Sequence: Synthetic oligonucleotide
  Target: SCNA; (-) strand; PAM type: YTN; PAM sequence: TTC
gttttatcctttgagtaagc

SEQ ID NO: 40426 - DNA, 20 bp, Artificial Sequence
  Description of Artificial Sequence: Synthetic oligonucleotide
  Target: SCNA; (-) strand; PAM type: YTN; PAM sequence: TTG
atgcagtaatgttcgtttta

SEQ ID NO: 40427 - DNA, 20 bp, Artificial Sequence
  Description of Artificial Sequence: Synthetic oligonucleotide
  Target: SCNA; (-) strand; PAM type: YTN; PAM sequence: TTG
attgatgcagtaatgttcgt

SEQ ID NO: 40428 - DNA, 20 bp, Artificial Sequence
  Description of Artificial Sequence: Synthetic oligonucleotide
  Target: SCNA; (-) strand; PAM type: YTN; PAM sequence: CTA
ggtgtagttgattgatgcag

SEQ ID NO: 40429 - DNA, 20 bp, Artificial Sequence
  Description of Artificial Sequence: Synthetic oligonucleotide
  Target: SCNA; (-) strand; PAM type: YTN; PAM sequence: TTC
taggtgtagttgattgatgc

SEQ ID NO: 40430 - DNA, 20 bp, Artificial Sequence
  Description of Artificial Sequence: Synthetic oligonucleotide
  Target: SCNA; (-) strand; PAM type: YTN; PAM sequence: TTT
ctaggtgtagttgattgatg

SEQ ID NO: 40431 - DNA, 20 bp, Artificial Sequence
  Description of Artificial Sequence: Synthetic oligonucleotide
  Target: SCNA; (-) strand; PAM type: YTN; PAM sequence: TTT
tctaggtgtagttgattgat

SEQ ID NO: 40432 - DNA, 20 bp, Artificial Sequence
  Description of Artificial Sequence: Synthetic oligonucleotide
  Target: SCNA; (-) strand; PAM type: YTN; PAM sequence: TTG
attttctaggtgtagttgat

SEQ ID NO: 40433 - DNA, 20 bp, Artificial Sequence
  Description of Artificial Sequence: Synthetic oligonucleotide
  Target: SCNA; (-) strand; PAM type: YTN; PAM sequence: TTT
gattttctaggtgtagttga

SEQ ID NO: 40434 - DNA, 20 bp, Artificial Sequence
  Description of Artificial Sequence: Synthetic oligonucleotide
  Target: SCNA; (-) strand; PAM type: YTN; PAM sequence: TTG
tataataaagtttgattttc

SEQ ID NO: 40435 - DNA, 20 bp, Artificial Sequence
  Description of Artificial Sequence: Synthetic oligonucleotide
  Target: SCNA; (-) strand; PAM type: YTN; PAM sequence: TTA
atattgtataataaagtttg

SEQ ID NO: 40436 - DNA, 20 bp, Artificial Sequence
  Description of Artificial Sequence: Synthetic oligonucleotide
  Target: SCNA; (-) strand; PAM type: YTN; PAM sequence: CTT
aatattgtataataaagttt

SEQ ID NO: 40437 - DNA, 20 bp, Artificial Sequence
  Description of Artificial Sequence: Synthetic oligonucleotide
  Target: SCNA; (-) strand; PAM type: YTN; PAM sequence: TTA
gcaacttaatattgtataat

SEQ ID NO: 40438 - DNA, 20 bp, Artificial Sequence
  Description of Artificial Sequence: Synthetic oligonucleotide
  Target: SCNA; (-) strand; PAM type: YTN; PAM sequence: CTA
taggtataaataatattagc

SEQ ID NO: 40439 - DNA, 20 bp, Artificial Sequence
  Description of Artificial Sequence: Synthetic oligonucleotide
  Target: SCNA; (-) strand; PAM type: YTN; PAM sequence: TTA
agaatctataggtataaata

SEQ ID NO: 40440 - DNA, 20 bp, Artificial Sequence
  Description of Artificial Sequence: Synthetic oligonucleotide
  Target: SCNA; (-) strand; PAM type: YTN; PAM sequence: TTA
taaatagatagtaaagggca

SEQ ID NO: 40441 - DNA, 20 bp, Artificial Sequence
  Description of Artificial Sequence: Synthetic oligonucleotide
  Target: SCNA; (-) strand; PAM type: YTN; PAM sequence: TTT
ataaatagatagtaaagggc

SEQ ID NO: 40442 - DNA, 20 bp, Artificial Sequence
  Description of Artificial Sequence: Synthetic oligonucleotide
  Target: SCNA; (-) strand; PAM type: YTN; PAM sequence: TTA
gtaatggaatgaatgaattt

SEQ ID NO: 40443 - DNA, 20 bp, Artificial Sequence
  Description of Artificial Sequence: Synthetic oligonucleotide
  Target: SCNA; (-) strand; PAM type: YTN; PAM sequence: TTT
agtaatggaatgaatgaatt

SEQ ID NO: 40444 - DNA, 20 bp, Artificial Sequence
  Description of Artificial Sequence: Synthetic oligonucleotide
  Target: SCNA; (-) strand; PAM type: YTN; PAM sequence: TTA
tacatatttagtaatggaat

SEQ ID NO: 40445 - DNA, 20 bp, Artificial Sequence
  Description of Artificial Sequence: Synthetic oligonucleotide
  Target: SCNA; (-) strand; PAM type: YTN; PAM sequence: TTG
tcaattatacatatttagta

SEQ ID NO: 40446 - DNA, 20 bp, Artificial Sequence
  Description of Artificial Sequence: Synthetic oligonucleotide
  Target: SCNA; (-) strand; PAM type: YTN; PAM sequence: CTG
ggattgtcaattatacatat

SEQ ID NO: 40447 - DNA, 20 bp, Artificial Sequence
  Description of Artificial Sequence: Synthetic oligonucleotide
  Target: SCNA; (-) strand; PAM type: YTN; PAM sequence: TTA
aggtataactgggattgtca

SEQ ID NO: 40448 - DNA, 20 bp, Artificial Sequence
  Description of Artificial Sequence: Synthetic oligonucleotide
  Target: SCNA; (-) strand; PAM type: YTN; PAM sequence: TTA
tgtcaaatagacaaaaaaat

SEQ ID NO: 40449 - DNA, 20 bp, Artificial Sequence
  Description of Artificial Sequence: Synthetic oligonucleotide
  Target: SCNA; (-) strand; PAM type: YTN; PAM sequence: CTT
atgtcaaatagacaaaaaaa

SEQ ID NO: 40450 - DNA, 20 bp, Artificial Sequence
  Description of Artificial Sequence: Synthetic oligonucleotide
  Target: SCNA; (-) strand; PAM type: YTN; PAM sequence: TTG
gcttatgtcaaatagacaaa

SEQ ID NO: 40451 - DNA, 20 bp, Artificial Sequence
  Description of Artificial Sequence: Synthetic oligonucleotide
  Target: SCNA; (-) strand; PAM type: YTN; PAM sequence: CTT
ggcttatgtcaaatagacaa

SEQ ID NO: 40452 - DNA, 20 bp, Artificial Sequence
  Description of Artificial Sequence: Synthetic oligonucleotide
  Target: SCNA; (-) strand; PAM type: YTN; PAM sequence: TTG
aatcatggcatgggtacttg

SEQ ID NO: 40453 - DNA, 20 bp, Artificial Sequence
  Description of Artificial Sequence: Synthetic oligonucleotide
  Target: SCNA; (-) strand; PAM type: YTN; PAM sequence: CTG
tgttgaatcatggcatgggt

SEQ ID NO: 40454 - DNA, 20 bp, Artificial Sequence
  Description of Artificial Sequence: Synthetic oligonucleotide
  Target: SCNA; (-) strand; PAM type: YTN; PAM sequence: TTC
tgtgttgaatcatggcatgg

SEQ ID NO: 40455 - DNA, 20 bp, Artificial Sequence
  Description of Artificial Sequence: Synthetic oligonucleotide
  Target: SCNA; (-) strand; PAM type: YTN; PAM sequence: TTT
ctgtgttgaatcatggcatg

SEQ ID NO: 40456 - DNA, 20 bp, Artificial Sequence
  Description of Artificial Sequence: Synthetic oligonucleotide
  Target: SCNA; (-) strand; PAM type: YTN; PAM sequence: TTT
tctgtgttgaatcatggcat

SEQ ID NO: 40457 - DNA, 20 bp, Artificial Sequence
  Description of Artificial Sequence: Synthetic oligonucleotide
  Target: SCNA; (-) strand; PAM type: YTN; PAM sequence: TTG
taattttctgtgttgaatca

SEQ ID NO: 40458 - DNA, 20 bp, Artificial Sequence
  Description of Artificial Sequence: Synthetic oligonucleotide
  Target: SCNA; (-) strand; PAM type: YTN; PAM sequence: TTT
gtaattttctgtgttgaatc

SEQ ID NO: 40459 - DNA, 20 bp, Artificial Sequence
  Description of Artificial Sequence: Synthetic oligonucleotide
  Target: SCNA; (-) strand; PAM type: YTN; PAM sequence: CTT
tgtaattttctgtgttgaat

SEQ ID NO: 40460 - DNA, 20 bp, Artificial Sequence
  Description of Artificial Sequence: Synthetic oligonucleotide
  Target: SCNA; (-) strand; PAM type: YTN; PAM sequence: CTA
cagtaaggtgggctttgtaa

SEQ ID NO: 40461 - DNA, 20 bp, Artificial Sequence
  Description of Artificial Sequence: Synthetic oligonucleotide
  Target: SCNA; (-) strand; PAM type: YTN; PAM sequence: TTG
atgcaataagagcagcagtc

SEQ ID NO: 40462 - DNA, 20 bp, Artificial Sequence
  Description of Artificial Sequence: Synthetic oligonucleotide
  Target: SCNA; (-) strand; PAM type: YTN; PAM sequence: TTC
cgtggaagatacgaatgttg

SEQ ID NO: 40463 - DNA, 20 bp, Artificial Sequence
  Description of Artificial Sequence: Synthetic oligonucleotide
  Target: SCNA; (-) strand; PAM type: YTN; PAM sequence: TTT
ccgtggaagatacgaatgtt

SEQ ID NO: 40464 - DNA, 20 bp, Artificial Sequence
  Description of Artificial Sequence: Synthetic oligonucleotide
  Target: SCNA; (-) strand; PAM type: YTN; PAM sequence: TTT
tccgtggaagatacgaatgt

SEQ ID NO: 40465 - DNA, 20 bp, Artificial Sequence
  Description of Artificial Sequence: Synthetic oligonucleotide
  Target: SCNA; (-) strand; PAM type: YTN; PAM sequence: TTA
ttttccgtggaagatacgaa

SEQ ID NO: 40466 - DNA, 20 bp, Artificial Sequence
  Description of Artificial Sequence: Synthetic oligonucleotide
  Target: SCNA; (-) strand; PAM type: YTN; PAM sequence: TTA
attattttccgtggaagata

SEQ ID NO: 40467 - DNA, 20 bp, Artificial Sequence
  Description of Artificial Sequence: Synthetic oligonucleotide
  Target: SCNA; (-) strand; PAM type: YTN; PAM sequence: CTA
agttaattattttccgtgga

SEQ ID NO: 40468 - DNA, 20 bp, Artificial Sequence
  Description of Artificial Sequence: Synthetic oligonucleotide
  Target: SCNA; (-) strand; PAM type: YTN; PAM sequence: TTA
tagaactaagttaattattt

SEQ ID NO: 40469 - DNA, 20 bp, Artificial Sequence
  Description of Artificial Sequence: Synthetic oligonucleotide
  Target: SCNA; (-) strand; PAM type: YTN; PAM sequence: CTG
attatagaactaagttaatt

SEQ ID NO: 40470 - DNA, 20 bp, Artificial Sequence
  Description of Artificial Sequence: Synthetic oligonucleotide
  Target: SCNA; (-) strand; PAM type: YTN; PAM sequence: TTG
taaataaaccgggcatatcc

SEQ ID NO: 40471 - DNA, 20 bp, Artificial Sequence
  Description of Artificial Sequence: Synthetic oligonucleotide
  Target: SCNA; (-) strand; PAM type: YTN; PAM sequence: CTT
gtaaataaaccgggcatatc

SEQ ID NO: 40472 - DNA, 20 bp, Artificial Sequence
  Description of Artificial Sequence: Synthetic oligonucleotide
  Target: SCNA; (-) strand; PAM type: YTN; PAM sequence: TTC
cttgtaaataaaccgggcat

SEQ ID NO: 40473 - DNA, 20 bp, Artificial Sequence
  Description of Artificial Sequence: Synthetic oligonucleotide
  Target: SCNA; (-) strand; PAM type: YTN; PAM sequence: TTT
ccttgtaaataaaccgggca

SEQ ID NO: 40474 - DNA, 20 bp, Artificial Sequence
  Description of Artificial Sequence: Synthetic oligonucleotide
  Target: SCNA; (-) strand; PAM type: YTN; PAM sequence: CTG
ataggtatttccttgtaaat

SEQ ID NO: 40475 - DNA, 20 bp, Artificial Sequence
  Description of Artificial Sequence: Synthetic oligonucleotide
  Target: SCNA; (-) strand; PAM type: YTN; PAM sequence: TTA
gcacctgataggtatttcct

SEQ ID NO: 40476 - DNA, 20 bp, Artificial Sequence
  Description of Artificial Sequence: Synthetic oligonucleotide
  Target: SCNA; (-) strand; PAM type: YTN; PAM sequence: CTA
agagaaattagcacctgata

SEQ ID NO: 40477 - DNA, 20 bp, Artificial Sequence
  Description of Artificial Sequence: Synthetic oligonucleotide
  Target: SCNA; (-) strand; PAM type: YTN; PAM sequence: TTC
taagagaaattagcacctga

SEQ ID NO: 40478 - DNA, 20 bp, Artificial Sequence
  Description of Artificial Sequence: Synthetic oligonucleotide
  Target: SCNA; (-) strand; PAM type: YTN; PAM sequence: CTA
attctaagagaaattagcac

SEQ ID NO: 40479 - DNA, 20 bp, Artificial Sequence
  Description of Artificial Sequence: Synthetic oligonucleotide
  Target: SCNA; (-) strand; PAM type: YTN; PAM sequence: TTC
taattctaagagaaattagc

SEQ ID NO: 40480 - DNA, 20 bp, Artificial Sequence
  Description of Artificial Sequence: Synthetic oligonucleotide
  Target: SCNA; (-) strand; PAM type: YTN; PAM sequence: TTT
ctaattctaagagaaattag

SEQ ID NO: 40481 - DNA, 20 bp, Artificial Sequence
  Description of Artificial Sequence: Synthetic oligonucleotide
  Target: SCNA; (-) strand; PAM type: YTN; PAM sequence: CTG
gccaagatttctaattctaa

SEQ ID NO: 40482 - DNA, 20 bp, Artificial Sequence
  Description of Artificial Sequence: Synthetic oligonucleotide
  Target: SCNA; (-) strand; PAM type: YTN; PAM sequence: TTA
caggtgtgagccaccatgcc

SEQ ID NO: 40483 - DNA, 20 bp, Artificial Sequence
  Description of Artificial Sequence: Synthetic oligonucleotide
  Target: SCNA; (-) strand; PAM type: YTN; PAM sequence: CTG
ggattacaggtgtgagccac

SEQ ID NO: 40484 - DNA, 20 bp, Artificial Sequence
  Description of Artificial Sequence: Synthetic oligonucleotide
  Target: SCNA; (-) strand; PAM type: YTN; PAM sequence: CTC
ccaaagtgctgggattacag

SEQ ID NO: 40485 - DNA, 20 bp, Artificial Sequence
  Description of Artificial Sequence: Synthetic oligonucleotide
  Target: SCNA; (-) strand; PAM type: YTN; PAM sequence: CTC
ggcctcccaaagtgctggga

SEQ ID NO: 40486 - DNA, 20 bp, Artificial Sequence
  Description of Artificial Sequence: Synthetic oligonucleotide
  Target: SCNA; (-) strand; PAM type: YTN; PAM sequence: CTA
cctcggcctcccaaagtgct

SEQ ID NO: 40487 - DNA, 20 bp, Artificial Sequence
  Description of Artificial Sequence: Synthetic oligonucleotide
  Target: SCNA; (-) strand; PAM type: YTN; PAM sequence: CTC
aggtaatccacctacctcgg

SEQ ID NO: 40488 - DNA, 20 bp, Artificial Sequence
  Description of Artificial Sequence: Synthetic oligonucleotide
  Target: SCNA; (-) strand; PAM type: YTN; PAM sequence: CTG
acctcaggtaatccacctac

SEQ ID NO: 40489 - DNA, 20 bp, Artificial Sequence
  Description of Artificial Sequence: Synthetic oligonucleotide
  Target: SCNA; (-) strand; PAM type: YTN; PAM sequence: CTC
ctgacctcaggtaatccacc

SEQ ID NO: 40490 - DNA, 20 bp, Artificial Sequence
  Description of Artificial Sequence: Synthetic oligonucleotide
  Target: SCNA; (-) strand; PAM type: YTN; PAM sequence: CTC
aaactcctgacctcaggtaa

SEQ ID NO: 40491 - DNA, 20 bp, Artificial Sequence
  Description of Artificial Sequence: Synthetic oligonucleotide
  Target: SCNA; (-) strand; PAM type: YTN; PAM sequence: CTG
gtctcaaactcctgacctca

SEQ ID NO: 40492 - DNA, 20 bp, Artificial Sequence
  Description of Artificial Sequence: Synthetic oligonucleotide
  Target: SCNA; (-) strand; PAM type: YTN; PAM sequence: TTG
gccaggctggtctcaaactc

SEQ ID NO: 40493 - DNA, 20 bp, Artificial Sequence
  Description of Artificial Sequence: Synthetic oligonucleotide
  Target: SCNA; (-) strand; PAM type: YTN; PAM sequence: TTC
accacgttggccaggctggt

SEQ ID NO: 40494 - DNA, 20 bp, Artificial Sequence
  Description of Artificial Sequence: Synthetic oligonucleotide
  Target: SCNA; (-) strand; PAM type: YTN; PAM sequence: TTA
gtagagacagggttcaccac

SEQ ID NO: 40495 - DNA, 20 bp, Artificial Sequence
  Description of Artificial Sequence: Synthetic oligonucleotide
  Target: SCNA; (-) strand; PAM type: YTN; PAM sequence: TTT
agtagagacagggttcacca

SEQ ID NO: 40496 - DNA, 20 bp, Artificial Sequence
  Description of Artificial Sequence: Synthetic oligonucleotide
  Target: SCNA; (-) strand; PAM type: YTN; PAM sequence: TTT
tagtagagacagggttcacc

SEQ ID NO: 40497 - DNA, 20 bp, Artificial Sequence
  Description of Artificial Sequence: Synthetic oligonucleotide
  Target: SCNA; (-) strand; PAM type: YTN; PAM sequence: TTT
ttagtagagacagggttcac

SEQ ID NO: 40498 - DNA, 20 bp, Artificial Sequence
  Description of Artificial Sequence: Synthetic oligonucleotide
  Target: SCNA; (-) strand; PAM type: YTN; PAM sequence: TTG
tatttttagtagagacaggg

SEQ ID NO: 40499 - DNA, 20 bp, Artificial Sequence
  Description of Artificial Sequence: Synthetic oligonucleotide
  Target: SCNA; (-) strand; PAM type: YTN; PAM sequence: TTT
gtatttttagtagagacagg

SEQ ID NO: 40500 - DNA, 20 bp, Artificial Sequence
  Description of Artificial Sequence: Synthetic oligonucleotide
  Target: SCNA; (-) strand; PAM type: YTN; PAM sequence: TTT
tgtatttttagtagagacag

SEQ ID NO: 40501 - DNA, 20 bp, Artificial Sequence
  Description of Artificial Sequence: Synthetic oligonucleotide
  Target: SCNA; (-) strand; PAM type: YTN; PAM sequence: TTT
ttgtatttttagtagagaca

SEQ ID NO: 40502 - DNA, 20 bp, Artificial Sequence
  Description of Artificial Sequence: Synthetic oligonucleotide
  Target: SCNA; (-) strand; PAM type: YTN; PAM sequence: CTA
atttttgtatttttagtaga

SEQ ID NO: 40503 - DNA, 20 bp, Artificial Sequence
  Description of Artificial Sequence: Synthetic oligonucleotide
  Target: SCNA; (-) strand; PAM type: YTN; PAM sequence: TTA
gcccgactaatttttgtatt

SEQ ID NO: 40504 - DNA, 20 bp, Artificial Sequence
  Description of Artificial Sequence: Synthetic oligonucleotide
  Target: SCNA; (-) strand; PAM type: YTN; PAM sequence: CTT
agcccgactaatttttgtat

SEQ ID NO: 40505 - DNA, 20 bp, Artificial Sequence
  Description of Artificial Sequence: Synthetic oligonucleotide
  Target: SCNA; (-) strand; PAM type: YTN; PAM sequence: TTA
caggaacacaccaccttagc

SEQ ID NO: 40506 - DNA, 20 bp, Artificial Sequence
  Description of Artificial Sequence: Synthetic oligonucleotide
  Target: SCNA; (-) strand; PAM type: YTN; PAM sequence: CTC
gagtaggtgggattacagga

SEQ ID NO: 40507 - DNA, 20 bp, Artificial Sequence
  Description of Artificial Sequence: Synthetic oligonucleotide
  Target: SCNA; (-) strand; PAM type: YTN; PAM sequence: CTC
tcgagtaggtgggattacag

SEQ ID NO: 40508 - DNA, 20 bp, Artificial Sequence
  Description of Artificial Sequence: Synthetic oligonucleotide
  Target: SCNA; (-) strand; PAM type: YTN; PAM sequence: CTC
agcctctcgagtaggtggga

SEQ ID NO: 40509 - DNA, 20 bp, Artificial Sequence
  Description of Artificial Sequence: Synthetic oligonucleotide
  Target: SCNA; (-) strand; PAM type: YTN; PAM sequence: CTG
cctcagcctctcgagtaggt

SEQ ID NO: 40510 - DNA, 20 bp, Artificial Sequence
  Description of Artificial Sequence: Synthetic oligonucleotide
  Target: SCNA; (-) strand; PAM type: YTN; PAM sequence: CTC
ctgcctcagcctctcgagta

SEQ ID NO: 40511 - DNA, 20 bp, Artificial Sequence
  Description of Artificial Sequence: Synthetic oligonucleotide
  Target: SCNA; (-) strand; PAM type: YTN; PAM sequence: TTC
tcctgcctcagcctctcgag

SEQ ID NO: 40512 - DNA, 20 bp, Artificial Sequence
  Description of Artificial Sequence: Synthetic oligonucleotide
  Target: SCNA; (-) strand; PAM type: YTN; PAM sequence: TTC
aagcgattctcctgcctcag

SEQ ID NO: 40513 - DNA, 20 bp, Artificial Sequence
  Description of Artificial Sequence: Synthetic oligonucleotide
  Target: SCNA; (-) strand; PAM type: YTN; PAM sequence: CTC
ccaggttcaagcgattctcc

SEQ ID NO: 40514 - DNA, 20 bp, Artificial Sequence
  Description of Artificial Sequence: Synthetic oligonucleotide
  Target: SCNA; (-) strand; PAM type: YTN; PAM sequence: CTC
cgcctcccaggttcaagcga

SEQ ID NO: 40515 - DNA, 20 bp, Artificial Sequence
  Description of Artificial Sequence: Synthetic oligonucleotide
  Target: SCNA; (-) strand; PAM type: YTN; PAM sequence: CTG
caacctccgcctcccaggtt

SEQ ID NO: 40516 - DNA, 20 bp, Artificial Sequence
  Description of Artificial Sequence: Synthetic oligonucleotide
  Target: SCNA; (-) strand; PAM type: YTN; PAM sequence: TTC
actgcaacctccgcctccca

SEQ ID NO: 40517 - DNA, 20 bp, Artificial Sequence
  Description of Artificial Sequence: Synthetic oligonucleotide
  Target: SCNA; (-) strand; PAM type: YTN; PAM sequence: CTC
agttcactgcaacctccgcc

SEQ ID NO: 40518 - DNA, 20 bp, Artificial Sequence
  Description of Artificial Sequence: Synthetic oligonucleotide
  Target: SCNA; (-) strand; PAM type: YTN; PAM sequence: CTG
gagtgcaatggcacaatctc

SEQ ID NO: 40519 - DNA, 20 bp, Artificial Sequence
  Description of Artificial Sequence: Synthetic oligonucleotide
  Target: SCNA; (-) strand; PAM type: YTN; PAM sequence: CTA
ggctggagtgcaatggcaca

SEQ ID NO: 40520 - DNA, 20 bp, Artificial Sequence
  Description of Artificial Sequence: Synthetic oligonucleotide
  Target: SCNA; (-) strand; PAM type: YTN; PAM sequence: TTG
ccacctaggctggagtgcaa

SEQ ID NO: 40521 - DNA, 20 bp, Artificial Sequence
  Description of Artificial Sequence: Synthetic oligonucleotide
  Target: SCNA; (-) strand; PAM type: YTN; PAM sequence: CTT
gccacctaggctggagtgca

SEQ ID NO: 40522 - DNA, 20 bp, Artificial Sequence
  Description of Artificial Sequence: Synthetic oligonucleotide
  Target: SCNA; (-) strand; PAM type: YTN; PAM sequence: CTC
ttgccacctaggctggagtg

SEQ ID NO: 40523 - DNA, 20 bp, Artificial Sequence
  Description of Artificial Sequence: Synthetic oligonucleotide
  Target: SCNA; (-) strand; PAM type: YTN; PAM sequence: TTG
ctcttgccacctaggctgga

SEQ ID NO: 40524 - DNA, 20 bp, Artificial Sequence
  Description of Artificial Sequence: Synthetic oligonucleotide
  Target: SCNA; (-) strand; PAM type: YTN; PAM sequence: CTT
gctcttgccacctaggctgg

SEQ ID NO: 40525 - DNA, 20 bp, Artificial Sequence
  Description of Artificial Sequence: Synthetic oligonucleotide
  Target: SCNA; (-) strand; PAM type: YTN; PAM sequence: TTG
agatggagtcttgctcttgc

SEQ ID NO: 40526 - DNA, 20 bp, Artificial Sequence
  Description of Artificial Sequence: Synthetic oligonucleotide
  Target: SCNA; (-) strand; PAM type: YTN; PAM sequence: TTT
gagatggagtcttgctcttg

SEQ ID NO: 40527 - DNA, 20 bp, Artificial Sequence
  Description of Artificial Sequence: Synthetic oligonucleotide
  Target: SCNA; (-) strand; PAM type: YTN; PAM sequence: TTT
tgagatggagtcttgctctt

SEQ ID NO: 40528 - DNA, 20 bp, Artificial Sequence
  Description of Artificial Sequence: Synthetic oligonucleotide
  Target: SCNA; (-) strand; PAM type: YTN; PAM sequence: TTT
ttgagatggagtcttgctct

SEQ ID NO: 40529 - DNA, 20 bp, Artificial Sequence
  Description of Artificial Sequence: Synthetic oligonucleotide
  Target: SCNA; (-) strand; PAM type: YTN; PAM sequence: TTT
tttgagatggagtcttgctc

SEQ ID NO: 40530 - DNA, 20 bp, Artificial Sequence
  Description of Artificial Sequence: Synthetic oligonucleotide
  Target: SCNA; (-) strand; PAM type: YTN; PAM sequence: TTT
ttttgagatggagtcttgct

SEQ ID NO: 40531 - DNA, 20 bp, Artificial Sequence
  Description of Artificial Sequence: Synthetic oligonucleotide
  Target: SCNA; (-) strand; PAM type: YTN; PAM sequence: TTT
tttttgagatggagtcttgc

SEQ ID NO: 40532 - DNA, 20 bp, Artificial Sequence
  Description of Artificial Sequence: Synthetic oligonucleotide
  Target: SCNA; (-) strand; PAM type: YTN; PAM sequence: TTT
ttttttgagatggagtcttg

SEQ ID NO: 40533 - DNA, 20 bp, Artificial Sequence
  Description of Artificial Sequence: Synthetic oligonucleotide
  Target: SCNA; (-) strand; PAM type: YTN; PAM sequence: TTT
tttttttgagatggagtctt

SEQ ID NO: 40534 - DNA, 20 bp, Artificial Sequence
  Description of Artificial Sequence: Synthetic oligonucleotide
  Target: SCNA; (-) strand; PAM type: YTN; PAM sequence: TTT
ttttttttgagatggagtct

SEQ ID NO: 40535 - DNA, 20 bp, Artificial Sequence
  Description of Artificial Sequence: Synthetic oligonucleotide
  Target: SCNA; (-) strand; PAM type: YTN; PAM sequence: TTT
tttttttttgagatggagtc

SEQ ID NO: 40536 - DNA, 20 bp, Artificial Sequence
  Description of Artificial Sequence: Synthetic oligonucleotide
  Target: SCNA; (-) strand; PAM type: YTN; PAM sequence: TTT
ttttttttttgagatggagt

SEQ ID NO: 40537 - DNA, 20 bp, Artificial Sequence
  Description of Artificial Sequence: Synthetic oligonucleotide
  Target: SCNA; (-) strand; PAM type: YTN; PAM sequence: TTT
tttttttttttgagatggag

SEQ ID NO: 40538 - DNA, 20 bp, Artificial Sequence
  Description of Artificial Sequence: Synthetic oligonucleotide
  Target: SCNA; (-) strand; PAM type: YTN; PAM sequence: TTT
ttttttttttttgagatgga

SEQ ID NO: 40539 - DNA, 20 bp, Artificial Sequence
  Description of Artificial Sequence: Synthetic oligonucleotide
  Target: SCNA; (-) strand; PAM type: YTN; PAM sequence: CTT
tttttttttttttgagatgg

SEQ ID NO: 40540 - DNA, 20 bp, Artificial Sequence
  Description of Artificial Sequence: Synthetic oligonucleotide
  Target: SCNA; (-) strand; PAM type: YTN; PAM sequence: TTC
tttttttttttttttgagat

SEQ ID NO: 40541 - DNA, 20 bp, Artificial Sequence
  Description of Artificial Sequence: Synthetic oligonucleotide
  Target: SCNA; (-) strand; PAM type: YTN; PAM sequence: TTT
ctttttttttttttttgaga

SEQ ID NO: 40542 - DNA, 20 bp, Artificial Sequence
  Description of Artificial Sequence: Synthetic oligonucleotide
  Target: SCNA; (-) strand; PAM type: YTN; PAM sequence: CTA
tagatacatatagagagatt

SEQ ID NO: 40543 - DNA, 20 bp, Artificial Sequence
  Description of Artificial Sequence: Synthetic oligonucleotide
  Target: SCNA; (-) strand; PAM type: YTN; PAM sequence: CTA
tatctatagatacatataga

SEQ ID NO: 40544 - DNA, 20 bp, Artificial Sequence
  Description of Artificial Sequence: Synthetic oligonucleotide
  Target: SCNA; (-) strand; PAM type: YTN; PAM sequence: CTA
taaacatatctatatctata

SEQ ID NO: 40545 - DNA, 20 bp, Artificial Sequence
  Description of Artificial Sequence: Synthetic oligonucleotide
  Target: SCNA; (-) strand; PAM type: YTN; PAM sequence: CTA
tatatctataaacatatcta

SEQ ID NO: 40546 - DNA, 20 bp, Artificial Sequence
  Description of Artificial Sequence: Synthetic oligonucleotide
  Target: SCNA; (-) strand; PAM type: YTN; PAM sequence: CTG
tatatctatatatctataaa

SEQ ID NO: 40547 - DNA, 20 bp, Artificial Sequence
  Description of Artificial Sequence: Synthetic oligonucleotide
  Target: SCNA; (-) strand; PAM type: YTN; PAM sequence: CTC
tgtatatctatatatctata

SEQ ID NO: 40548 - DNA, 20 bp, Artificial Sequence
  Description of Artificial Sequence: Synthetic oligonucleotide
  Target: SCNA; (-) strand; PAM type: YTN; PAM sequence: CTA
tatatatgtctctgtatatc

SEQ ID NO: 40549 - DNA, 20 bp, Artificial Sequence
  Description of Artificial Sequence: Synthetic oligonucleotide
  Target: SCNA; (-) strand; PAM type: YTN; PAM sequence: CTC
tatatatatgtctctgtata

SEQ ID NO: 40550 - DNA, 20 bp, Artificial Sequence
  Description of Artificial Sequence: Synthetic oligonucleotide
  Target: SCNA; (-) strand; PAM type: YTN; PAM sequence: CTC
atctctatatatatgtctct

SEQ ID NO: 40551 - DNA, 20 bp, Artificial Sequence
  Description of Artificial Sequence: Synthetic oligonucleotide
  Target: SCNA; (-) strand; PAM type: YTN; PAM sequence: CTC
tcatctctatatatatgtct

SEQ ID NO: 40552 - DNA, 20 bp, Artificial Sequence
  Description of Artificial Sequence: Synthetic oligonucleotide
  Target: SCNA; (-) strand; PAM type: YTN; PAM sequence: CTA
tatatatgtgtacacatatc

SEQ ID NO: 40553 - DNA, 20 bp, Artificial Sequence
  Description of Artificial Sequence: Synthetic oligonucleotide
  Target: SCNA; (-) strand; PAM type: YTN; PAM sequence: CTG
aagacaaacatatacacaca

SEQ ID NO: 40554 - DNA, 20 bp, Artificial Sequence
  Description of Artificial Sequence: Synthetic oligonucleotide
  Target: SCNA; (-) strand; PAM type: YTN; PAM sequence: TTC
aggtgcctgaagacaaacat

SEQ ID NO: 40555 - DNA, 20 bp, Artificial Sequence
  Description of Artificial Sequence: Synthetic oligonucleotide
  Target: SCNA; (-) strand; PAM type: YTN; PAM sequence: CTT
caggtgcctgaagacaaaca

SEQ ID NO: 40556 - DNA, 20 bp, Artificial Sequence
  Description of Artificial Sequence: Synthetic oligonucleotide
  Target: SCNA; (-) strand; PAM type: YTN; PAM sequence: TTC
ttcaggtgcctgaagacaaa

SEQ ID NO: 40557 - DNA, 20 bp, Artificial Sequence
  Description of Artificial Sequence: Synthetic oligonucleotide
  Target: SCNA; (-) strand; PAM type: YTN; PAM sequence: TTT
cttcaggtgcctgaagacaa

SEQ ID NO: 40558 - DNA, 20 bp, Artificial Sequence
  Description of Artificial Sequence: Synthetic oligonucleotide
  Target: SCNA; (-) strand; PAM type: YTN; PAM sequence: TTT
tcttcaggtgcctgaagaca

SEQ ID NO: 40559 - DNA, 20 bp, Artificial Sequence
  Description of Artificial Sequence: Synthetic oligonucleotide
  Target: SCNA; (-) strand; PAM type: YTN; PAM sequence: TTT
ttcttcaggtgcctgaagac

SEQ ID NO: 40560 - DNA, 20 bp, Artificial Sequence
  Description of Artificial Sequence: Synthetic oligonucleotide
  Target: SCNA; (-) strand; PAM type: YTN; PAM sequence: CTG
tttttcttcaggtgcctgaa

SEQ ID NO: 40561 - DNA, 20 bp, Artificial Sequence
  Description of Artificial Sequence: Synthetic oligonucleotide
  Target: SCNA; (-) strand; PAM type: YTN; PAM sequence: CTA
gtacatctgtttttcttcag

SEQ ID NO: 40562 - DNA, 20 bp, Artificial Sequence
  Description of Artificial Sequence: Synthetic oligonucleotide
  Target: SCNA; (-) strand; PAM type: YTN; PAM sequence: TTG
ctagtacatctgtttttctt

SEQ ID NO: 40563 - DNA, 20 bp, Artificial Sequence
  Description of Artificial Sequence: Synthetic oligonucleotide
  Target: SCNA; (-) strand; PAM type: YTN; PAM sequence: TTT
gctagtacatctgtttttct

SEQ ID NO: 40564 - DNA, 20 bp, Artificial Sequence
  Description of Artificial Sequence: Synthetic oligonucleotide
  Target: SCNA; (-) strand; PAM type: YTN; PAM sequence: TTT
tgctagtacatctgtttttc

SEQ ID NO: 40565 - DNA, 20 bp, Artificial Sequence
  Description of Artificial Sequence: Synthetic oligonucleotide
  Target: SCNA; (-) strand; PAM type: YTN; PAM sequence: TTA
gtaagttttgctagtacatc

SEQ ID NO: 40566 - DNA, 20 bp, Artificial Sequence
  Description of Artificial Sequence: Synthetic oligonucleotide
  Target: SCNA; (-) strand; PAM type: YTN; PAM sequence: TTT
agtaagttttgctagtacat

SEQ ID NO: 40567 - DNA, 20 bp, Artificial Sequence
  Description of Artificial Sequence: Synthetic oligonucleotide
  Target: SCNA; (-) strand; PAM type: YTN; PAM sequence: CTT
tagtaagttttgctagtaca

SEQ ID NO: 40568 - DNA, 20 bp, Artificial Sequence
  Description of Artificial Sequence: Synthetic oligonucleotide
  Target: SCNA; (-) strand; PAM type: YTN; PAM sequence: TTG
agcctttagtaagttttgct

SEQ ID NO: 40569 - DNA, 20 bp, Artificial Sequence
  Description of Artificial Sequence: Synthetic oligonucleotide
  Target: SCNA; (-) strand; PAM type: YTN; PAM sequence: TTT
gagcctttagtaagttttgc

SEQ ID NO: 40570 - DNA, 20 bp, Artificial Sequence
  Description of Artificial Sequence: Synthetic oligonucleotide
  Target: SCNA; (-) strand; PAM type: YTN; PAM sequence: CTA
gagtttgagcctttagtaag

SEQ ID NO: 40571 - DNA, 20 bp, Artificial Sequence
  Description of Artificial Sequence: Synthetic oligonucleotide
  Target: SCNA; (-) strand; PAM type: YTN; PAM sequence: TTA
ctagagtttgagcctttagt

SEQ ID NO: 40572 - DNA, 20 bp, Artificial Sequence
  Description of Artificial Sequence: Synthetic oligonucleotide
  Target: SCNA; (-) strand; PAM type: YTN; PAM sequence: TTT
actagagtttgagcctttag

SEQ ID NO: 40573 - DNA, 20 bp, Artificial Sequence
  Description of Artificial Sequence: Synthetic oligonucleotide
  Target: SCNA; (-) strand; PAM type: YTN; PAM sequence: CTA
aagaaaatttactagagttt

SEQ ID NO: 40574 - DNA, 20 bp, Artificial Sequence
  Description of Artificial Sequence: Synthetic oligonucleotide
  Target: SCNA; (-) strand; PAM type: YTN; PAM sequence: TTC
aggtacctaaagaaaattta

SEQ ID NO: 40575 - DNA, 20 bp, Artificial Sequence
  Description of Artificial Sequence: Synthetic oligonucleotide
  Target: SCNA; (-) strand; PAM type: YTN; PAM sequence: CTT
caggtacctaaagaaaattt

SEQ ID NO: 40576 - DNA, 20 bp, Artificial Sequence
  Description of Artificial Sequence: Synthetic oligonucleotide
  Target: SCNA; (-) strand; PAM type: YTN; PAM sequence: TTC
ttcaggtacctaaagaaaat

SEQ ID NO: 40577 - DNA, 20 bp, Artificial Sequence
  Description of Artificial Sequence: Synthetic oligonucleotide
  Target: SCNA; (-) strand; PAM type: YTN; PAM sequence: TTT
cttcaggtacctaaagaaaa

SEQ ID NO: 40578 - DNA, 20 bp, Artificial Sequence
  Description of Artificial Sequence: Synthetic oligonucleotide
  Target: SCNA; (-) strand; PAM type: YTN; PAM sequence: TTT
tcttcaggtacctaaagaaa

SEQ ID NO: 40579 - DNA, 20 bp, Artificial Sequence
  Description of Artificial Sequence: Synthetic oligonucleotide
  Target: SCNA; (-) strand; PAM type: YTN; PAM sequence: TTT
ttcttcaggtacctaaagaa

SEQ ID NO: 40580 - DNA, 20 bp, Artificial Sequence
  Description of Artificial Sequence: Synthetic oligonucleotide
  Target: SCNA; (-) strand; PAM type: YTN; PAM sequence: TTG
tttttcttcaggtacctaaa

SEQ ID NO: 40581 - DNA, 20 bp, Artificial Sequence
  Description of Artificial Sequence: Synthetic oligonucleotide
  Target: SCNA; (-) strand; PAM type: YTN; PAM sequence: TTT
gtttttcttcaggtacctaa

SEQ ID NO: 40582 - DNA, 20 bp, Artificial Sequence
  Description of Artificial Sequence: Synthetic oligonucleotide
  Target: SCNA; (-) strand; PAM type: YTN; PAM sequence: TTA
gatatttgtttttcttcagg

SEQ ID NO: 40583 - DNA, 20 bp, Artificial Sequence
  Description of Artificial Sequence: Synthetic oligonucleotide
  Target: SCNA; (-) strand; PAM type: YTN; PAM sequence: CTA
ggtataataattagatattt

SEQ ID NO: 40584 - DNA, 20 bp, Artificial Sequence
  Description of Artificial Sequence: Synthetic oligonucleotide
  Target: SCNA; (-) strand; PAM type: YTN; PAM sequence: TTC
taggtataataattagatat

SEQ ID NO: 40585 - DNA, 20 bp, Artificial Sequence
  Description of Artificial Sequence: Synthetic oligonucleotide
  Target: SCNA; (-) strand; PAM type: YTN; PAM sequence: TTT
ctaggtataataattagata

SEQ ID NO: 40586 - DNA, 20 bp, Artificial Sequence
  Description of Artificial Sequence: Synthetic oligonucleotide
  Target: SCNA; (-) strand; PAM type: YTN; PAM sequence: TTT
tctaggtataataattagat

SEQ ID NO: 40587 - DNA, 20 bp, Artificial Sequence
  Description of Artificial Sequence: Synthetic oligonucleotide
  Target: SCNA; (-) strand; PAM type: YTN; PAM sequence: CTT
ttctaggtataataattaga

SEQ ID NO: 40588 - DNA, 20 bp, Artificial Sequence
  Description of Artificial Sequence: Synthetic oligonucleotide
  Target: SCNA; (-) strand; PAM type: YTN; PAM sequence: CTA
ggaaatggggtgatagcccc

SEQ ID NO: 40589 - DNA, 20 bp, Artificial Sequence
  Description of Artificial Sequence: Synthetic oligonucleotide
  Target: SCNA; (-) strand; PAM type: YTN; PAM sequence: TTC
cagaagtctaggaaatgggg

SEQ ID NO: 40590 - DNA, 20 bp, Artificial Sequence
  Description of Artificial Sequence: Synthetic oligonucleotide
  Target: SCNA; (-) strand; PAM type: YTN; PAM sequence: CTT
ccagaagtctaggaaatggg

SEQ ID NO: 40591 - DNA, 20 bp, Artificial Sequence
  Description of Artificial Sequence: Synthetic oligonucleotide
  Target: SCNA; (-) strand; PAM type: YTN; PAM sequence: TTA
agaaaacttccagaagtcta

SEQ ID NO: 40592 - DNA, 20 bp, Artificial Sequence
  Description of Artificial Sequence: Synthetic oligonucleotide
  Target: SCNA; (-) strand; PAM type: YTN; PAM sequence: TTT
aagaaaacttccagaagtct

SEQ ID NO: 40593 - DNA, 20 bp, Artificial Sequence
  Description of Artificial Sequence: Synthetic oligonucleotide
  Target: SCNA; (-) strand; PAM type: YTN; PAM sequence: CTA
tttaagaaaacttccagaag

SEQ ID NO: 40594 - DNA, 20 bp, Artificial Sequence
  Description of Artificial Sequence: Synthetic oligonucleotide
  Target: SCNA; (-) strand; PAM type: YTN; PAM sequence: TTG
gccacatagtgtcagagtga

SEQ ID NO: 40595 - DNA, 20 bp, Artificial Sequence
  Description of Artificial Sequence: Synthetic oligonucleotide
  Target: SCNA; (-) strand; PAM type: YTN; PAM sequence: CTT
ggccacatagtgtcagagtg

SEQ ID NO: 40596 - DNA, 20 bp, Artificial Sequence
  Description of Artificial Sequence: Synthetic oligonucleotide
  Target: SCNA; (-) strand; PAM type: YTN; PAM sequence: CTC
agccccttggccacatagtg

SEQ ID NO: 40597 - DNA, 20 bp, Artificial Sequence
  Description of Artificial Sequence: Synthetic oligonucleotide
  Target: SCNA; (-) strand; PAM type: YTN; PAM sequence: CTC
tcagccccttggccacatag

SEQ ID NO: 40598 - DNA, 20 bp, Artificial Sequence
  Description of Artificial Sequence: Synthetic oligonucleotide
  Target: SCNA; (-) strand; PAM type: YTN; PAM sequence: CTG
tgctctcagccccttggcca

SEQ ID NO: 40599 - DNA, 20 bp, Artificial Sequence
  Description of Artificial Sequence: Synthetic oligonucleotide
  Target: SCNA; (-) strand; PAM type: YTN; PAM sequence: TTA
cagcaccacagtctgtgctc

SEQ ID NO: 40600 - DNA, 20 bp, Artificial Sequence
  Description of Artificial Sequence: Synthetic oligonucleotide
  Target: SCNA; (-) strand; PAM type: YTN; PAM sequence: CTA
gtaagcggcagagccaagag

SEQ ID NO: 40601 - DNA, 20 bp, Artificial Sequence
  Description of Artificial Sequence: Synthetic oligonucleotide
  Target: SCNA; (-) strand; PAM type: YTN; PAM sequence: TTC
ccacggccacacagctagta

SEQ ID NO: 40602 - DNA, 20 bp, Artificial Sequence
  Description of Artificial Sequence: Synthetic oligonucleotide
  Target: SCNA; (-) strand; PAM type: YTN; PAM sequence: TTT
cccacggccacacagctagt

SEQ ID NO: 40603 - DNA, 20 bp, Artificial Sequence
  Description of Artificial Sequence: Synthetic oligonucleotide
  Target: SCNA; (-) strand; PAM type: YTN; PAM sequence: CTT
tcccacggccacacagctag

SEQ ID NO: 40604 - DNA, 20 bp, Artificial Sequence
  Description of Artificial Sequence: Synthetic oligonucleotide
  Target: SCNA; (-) strand; PAM type: YTN; PAM sequence: CTA
gataactttcccacggccac

SEQ ID NO: 40605 - DNA, 20 bp, Artificial Sequence
  Description of Artificial Sequence: Synthetic oligonucleotide
  Target: SCNA; (-) strand; PAM type: YTN; PAM sequence: TTA
cacataagccaaaggaggca

SEQ ID NO: 40606 - DNA, 20 bp, Artificial Sequence
  Description of Artificial Sequence: Synthetic oligonucleotide
  Target: SCNA; (-) strand; PAM type: YTN; PAM sequence: TTT
acacataagccaaaggaggc

SEQ ID NO: 40607 - DNA, 20 bp, Artificial Sequence
  Description of Artificial Sequence: Synthetic oligonucleotide
  Target: SCNA; (-) strand; PAM type: YTN; PAM sequence: TTT
tacacataagccaaaggagg

SEQ ID NO: 40608 - DNA, 20 bp, Artificial Sequence
  Description of Artificial Sequence: Synthetic oligonucleotide
  Target: SCNA; (-) strand; PAM type: YTN; PAM sequence: CTA
attttacacataagccaaag

SEQ ID NO: 40609 - DNA, 20 bp, Artificial Sequence
  Description of Artificial Sequence: Synthetic oligonucleotide
  Target: SCNA; (-) strand; PAM type: YTN; PAM sequence: TTC
taattttacacataagccaa

SEQ ID NO: 40610 - DNA, 20 bp, Artificial Sequence
  Description of Artificial Sequence: Synthetic oligonucleotide
  Target: SCNA; (-) strand; PAM type: YTN; PAM sequence: TTA
tgattctaattttacacata

SEQ ID NO: 40611 - DNA, 20 bp, Artificial Sequence
  Description of Artificial Sequence: Synthetic oligonucleotide
  Target: SCNA; (-) strand; PAM type: YTN; PAM sequence: TTC
cattatgattctaattttac

SEQ ID NO: 40612 - DNA, 20 bp, Artificial Sequence
  Description of Artificial Sequence: Synthetic oligonucleotide
  Target: SCNA; (-) strand; PAM type: YTN; PAM sequence: TTA
ataggttccattatgattct

SEQ ID NO: 40613 - DNA, 20 bp, Artificial Sequence
  Description of Artificial Sequence: Synthetic oligonucleotide
  Target: SCNA; (-) strand; PAM type: YTN; PAM sequence: CTT
aataggttccattatgattc

SEQ ID NO: 40614 - DNA, 20 bp, Artificial Sequence
  Description of Artificial Sequence: Synthetic oligonucleotide
  Target: SCNA; (-) strand; PAM type: YTN; PAM sequence: CTC
aaaacaaccttaataggttc

SEQ ID NO: 40615 - DNA, 20 bp, Artificial Sequence
  Description of Artificial Sequence: Synthetic oligonucleotide
  Target: SCNA; (-) strand; PAM type: YTN; PAM sequence: TTC
tcaaaacaaccttaataggt

SEQ ID NO: 40616 - DNA, 20 bp, Artificial Sequence
  Description of Artificial Sequence: Synthetic oligonucleotide
  Target: SCNA; (-) strand; PAM type: YTN; PAM sequence: TTA
attctcaaaacaaccttaat

SEQ ID NO: 40617 - DNA, 20 bp, Artificial Sequence
  Description of Artificial Sequence: Synthetic oligonucleotide
  Target: SCNA; (-) strand; PAM type: YTN; PAM sequence: TTT
aattctcaaaacaaccttaa

SEQ ID NO: 40618 - DNA, 20 bp, Artificial Sequence
  Description of Artificial Sequence: Synthetic oligonucleotide
  Target: SCNA; (-) strand; PAM type: YTN; PAM sequence: TTA
agtcatttaattctcaaaac

SEQ ID NO: 40619 - DNA, 20 bp, Artificial Sequence
  Description of Artificial Sequence: Synthetic oligonucleotide
  Target: SCNA; (-) strand; PAM type: YTN; PAM sequence: TTA
tcaatattaagtcatttaat

SEQ ID NO: 40620 - DNA, 20 bp, Artificial Sequence
  Description of Artificial Sequence: Synthetic oligonucleotide
  Target: SCNA; (-) strand; PAM type: YTN; PAM sequence: TTT
atcaatattaagtcatttaa

SEQ ID NO: 40621 - DNA, 20 bp, Artificial Sequence
  Description of Artificial Sequence: Synthetic oligonucleotide
  Target: SCNA; (-) strand; PAM type: YTN; PAM sequence: TTA
tgtgtcaaatatagatgtaa

SEQ ID NO: 40622 - DNA, 20 bp, Artificial Sequence
  Description of Artificial Sequence: Synthetic oligonucleotide
  Target: SCNA; (-) strand; PAM type: YTN; PAM sequence: TTA
ttatgtgtcaaatatagatg

SEQ ID NO: 40623 - DNA, 20 bp, Artificial Sequence
  Description of Artificial Sequence: Synthetic oligonucleotide
  Target: SCNA; (-) strand; PAM type: YTN; PAM sequence: TTA
gacaaattattatgtgtcaa

SEQ ID NO: 40624 - DNA, 20 bp, Artificial Sequence
  Description of Artificial Sequence: Synthetic oligonucleotide
  Target: SCNA; (-) strand; PAM type: YTN; PAM sequence: TTT
agacaaattattatgtgtca

SEQ ID NO: 40625 - DNA, 20 bp, Artificial Sequence
  Description of Artificial Sequence: Synthetic oligonucleotide
  Target: SCNA; (-) strand; PAM type: YTN; PAM sequence: CTT
tagacaaattattatgtgtc

SEQ ID NO: 40626 - DNA, 20 bp, Artificial Sequence
  Description of Artificial Sequence: Synthetic oligonucleotide
  Target: SCNA; (-) strand; PAM type: YTN; PAM sequence: CTA
tactttagacaaattattat

SEQ ID NO: 40627 - DNA, 20 bp, Artificial Sequence
  Description of Artificial Sequence: Synthetic oligonucleotide
  Target: SCNA; (-) strand; PAM type: YTN; PAM sequence: TTG
gctatactttagacaaatta

SEQ ID NO: 40628 - DNA, 20 bp, Artificial Sequence
  Description of Artificial Sequence: Synthetic oligonucleotide
  Target: SCNA; (-) strand; PAM type: YTN; PAM sequence: TTA
ttggctatactttagacaaa

SEQ ID NO: 40629 - DNA, 20 bp, Artificial Sequence
  Description of Artificial Sequence: Synthetic oligonucleotide
  Target: SCNA; (-) strand; PAM type: YTN; PAM sequence: CTG
ttattggctatactttagac

SEQ ID NO: 40630 - DNA, 20 bp, Artificial Sequence
  Description of Artificial Sequence: Synthetic oligonucleotide
  Target: SCNA; (-) strand; PAM type: YTN; PAM sequence: CTG
tccctgttattggctatact

SEQ ID NO: 40631 - DNA, 20 bp, Artificial Sequence
  Description of Artificial Sequence: Synthetic oligonucleotide
  Target: SCNA; (-) strand; PAM type: YTN; PAM sequence: CTC
tgtccctgttattggctata

SEQ ID NO: 40632 - DNA, 20 bp, Artificial Sequence
  Description of Artificial Sequence: Synthetic oligonucleotide
  Target: SCNA; (-) strand; PAM type: YTN; PAM sequence: TTC
atatgagctctgtccctgtt

SEQ ID NO: 40633 - DNA, 20 bp, Artificial Sequence
  Description of Artificial Sequence: Synthetic oligonucleotide
  Target: SCNA; (-) strand; PAM type: YTN; PAM sequence: TTT
catatgagctctgtccctgt

SEQ ID NO: 40634 - DNA, 20 bp, Artificial Sequence
  Description of Artificial Sequence: Synthetic oligonucleotide
  Target: SCNA; (-) strand; PAM type: YTN; PAM sequence: TTT
tcatatgagctctgtccctg

SEQ ID NO: 40635 - DNA, 20 bp, Artificial Sequence
  Description of Artificial Sequence: Synthetic oligonucleotide
  Target: SCNA; (-) strand; PAM type: YTN; PAM sequence: CTG
acattttcatatgagctctg

SEQ ID NO: 40636 - DNA, 20 bp, Artificial Sequence
  Description of Artificial Sequence: Synthetic oligonucleotide
  Target: SCNA; (-) strand; PAM type: YTN; PAM sequence: TTG
ggcagggcaagagtgcaaca

SEQ ID NO: 40637 - DNA, 20 bp, Artificial Sequence
  Description of Artificial Sequence: Synthetic oligonucleotide
  Target: SCNA; (-) strand; PAM type: YTN; PAM sequence: CTT
gggcagggcaagagtgcaac

SEQ ID NO: 40638 - DNA, 20 bp, Artificial Sequence
  Description of Artificial Sequence: Synthetic oligonucleotide
  Target: SCNA; (-) strand; PAM type: YTN; PAM sequence: CTG
tcttgggcagggcaagagtg

SEQ ID NO: 40639 - DNA, 20 bp, Artificial Sequence
  Description of Artificial Sequence: Synthetic oligonucleotide
  Target: SCNA; (-) strand; PAM type: YTN; PAM sequence: TTC
tgtcttgggcagggcaagag

SEQ ID NO: 40640 - DNA, 20 bp, Artificial Sequence
  Description of Artificial Sequence: Synthetic oligonucleotide
  Target: SCNA; (-) strand; PAM type: YTN; PAM sequence: TTT
ctgtcttgggcagggcaaga

SEQ ID NO: 40641 - DNA, 20 bp, Artificial Sequence
  Description of Artificial Sequence: Synthetic oligonucleotide
  Target: SCNA; (-) strand; PAM type: YTN; PAM sequence: CTT
tctgtcttgggcagggcaag

SEQ ID NO: 40642 - DNA, 20 bp, Artificial Sequence
  Description of Artificial Sequence: Synthetic oligonucleotide
  Target: SCNA; (-) strand; PAM type: YTN; PAM sequence: TTC
tttctgtcttgggcagggca

SEQ ID NO: 40643 - DNA, 20 bp, Artificial Sequence
  Description of Artificial Sequence: Synthetic oligonucleotide
  Target: SCNA; (-) strand; PAM type: YTN; PAM sequence: TTG
ttctttctgtcttgggcagg

SEQ ID NO: 40644 - DNA, 20 bp, Artificial Sequence
  Description of Artificial Sequence: Synthetic oligonucleotide
  Target: SCNA; (-) strand; PAM type: YTN; PAM sequence: TTT
gttctttctgtcttgggcag

SEQ ID NO: 40645 - DNA, 20 bp, Artificial Sequence
  Description of Artificial Sequence: Synthetic oligonucleotide
  Target: SCNA; (-) strand; PAM type: YTN; PAM sequence: CTT
tgttctttctgtcttgggca

SEQ ID NO: 40646 - DNA, 20 bp, Artificial Sequence
  Description of Artificial Sequence: Synthetic oligonucleotide
  Target: SCNA; (-) strand; PAM type: YTN; PAM sequence: TTC
atcccactttgttctttctg

SEQ ID NO: 40647 - DNA, 20 bp, Artificial Sequence
  Description of Artificial Sequence: Synthetic oligonucleotide
  Target: SCNA; (-) strand; PAM type: YTN; PAM sequence: CTG
aaatgtgttcatcccacttt

SEQ ID NO: 40648 - DNA, 20 bp, Artificial Sequence
  Description of Artificial Sequence: Synthetic oligonucleotide
  Target: SCNA; (-) strand; PAM type: YTN; PAM sequence: TTC
atctgaaatgtgttcatccc

SEQ ID NO: 40649 - DNA, 20 bp, Artificial Sequence
  Description of Artificial Sequence: Synthetic oligonucleotide
  Target: SCNA; (-) strand; PAM type: YTN; PAM sequence: TTT
catctgaaatgtgttcatcc

SEQ ID NO: 40650 - DNA, 20 bp, Artificial Sequence
  Description of Artificial Sequence: Synthetic oligonucleotide
  Target: SCNA; (-) strand; PAM type: YTN; PAM sequence: CTG
tgtttcatctgaaatgtgtt

SEQ ID NO: 40651 - DNA, 20 bp, Artificial Sequence
  Description of Artificial Sequence: Synthetic oligonucleotide
  Target: SCNA; (-) strand; PAM type: YTN; PAM sequence: CTC
tgtgtttcatctgaaatgtg

SEQ ID NO: 40652 - DNA, 20 bp, Artificial Sequence
  Description of Artificial Sequence: Synthetic oligonucleotide
  Target: SCNA; (-) strand; PAM type: YTN; PAM sequence: CTA
atggaactctgtgtttcatc

SEQ ID NO: 40653 - DNA, 20 bp, Artificial Sequence
  Description of Artificial Sequence: Synthetic oligonucleotide
  Target: SCNA; (-) strand; PAM type: YTN; PAM sequence: CTG
tccacacactaatggaactc

SEQ ID NO: 40654 - DNA, 20 bp, Artificial Sequence
  Description of Artificial Sequence: Synthetic oligonucleotide
  Target: SCNA; (-) strand; PAM type: YTN; PAM sequence: CTC
tgtccacacactaatggaac

SEQ ID NO: 40655 - DNA, 20 bp, Artificial Sequence
  Description of Artificial Sequence: Synthetic oligonucleotide
  Target: SCNA; (-) strand; PAM type: YTN; PAM sequence: CTG
cctctgtccacacactaatg

SEQ ID NO: 40656 - DNA, 20 bp, Artificial Sequence
  Description of Artificial Sequence: Synthetic oligonucleotide
  Target: SCNA; (-) strand; PAM type: YTN; PAM sequence: CTG
acagactgcctctgtccaca

SEQ ID NO: 40657 - DNA, 20 bp, Artificial Sequence
  Description of Artificial Sequence: Synthetic oligonucleotide
  Target: SCNA; (-) strand; PAM type: YTN; PAM sequence: CTG
taaacctgacagactgcctc

SEQ ID NO: 40658 - DNA, 20 bp, Artificial Sequence
  Description of Artificial Sequence: Synthetic oligonucleotide
  Target: SCNA; (-) strand; PAM type: YTN; PAM sequence: TTC
aaatctgtaaacctgacaga

SEQ ID NO: 40659 - DNA, 20 bp, Artificial Sequence
  Description of Artificial Sequence: Synthetic oligonucleotide
  Target: SCNA; (-) strand; PAM type: YTN; PAM sequence: TTT
caaatctgtaaacctgacag

SEQ ID NO: 40660 - DNA, 20 bp, Artificial Sequence
  Description of Artificial Sequence: Synthetic oligonucleotide
  Target: SCNA; (-) strand; PAM type: YTN; PAM sequence: TTT
tcaaatctgtaaacctgaca

SEQ ID NO: 40661 - DNA, 20 bp, Artificial Sequence
  Description of Artificial Sequence: Synthetic oligonucleotide
  Target: SCNA; (-) strand; PAM type: YTN; PAM sequence: CTT
ttcaaatctgtaaacctgac

SEQ ID NO: 40662 - DNA, 20 bp, Artificial Sequence
  Description of Artificial Sequence: Synthetic oligonucleotide
  Target: SCNA; (-) strand; PAM type: YTN; PAM sequence: TTC
ttttcaaatctgtaaacctg

SEQ ID NO: 40663 - DNA, 20 bp, Artificial Sequence
  Description of Artificial Sequence: Synthetic oligonucleotide
  Target: SCNA; (-) strand; PAM type: YTN; PAM sequence: TTT
cttttcaaatctgtaaacct

SEQ ID NO: 40664 - DNA, 20 bp, Artificial Sequence
  Description of Artificial Sequence: Synthetic oligonucleotide
  Target: SCNA; (-) strand; PAM type: YTN; PAM sequence: TTT
tcttttcaaatctgtaaacc

SEQ ID NO: 40665 - DNA, 20 bp, Artificial Sequence
  Description of Artificial Sequence: Synthetic oligonucleotide
  Target: SCNA; (-) strand; PAM type: YTN; PAM sequence: CTG
aggaagaaaacacattttct

SEQ ID NO: 40666 - DNA, 20 bp, Artificial Sequence
  Description of Artificial Sequence: Synthetic oligonucleotide
  Target: SCNA; (-) strand; PAM type: YTN; PAM sequence: CTA
aatccatactgaggaagaaa

SEQ ID NO: 40667 - DNA, 20 bp, Artificial Sequence
  Description of Artificial Sequence: Synthetic oligonucleotide
  Target: SCNA; (-) strand; PAM type: YTN; PAM sequence: CTG
tctaaatccatactgaggaa

SEQ ID NO: 40668 - DNA, 20 bp, Artificial Sequence
  Description of Artificial Sequence: Synthetic oligonucleotide
  Target: SCNA; (-) strand; PAM type: YTN; PAM sequence: CTC
aaagacagtgctgtctaaat

SEQ ID NO: 40669 - DNA, 20 bp, Artificial Sequence
  Description of Artificial Sequence: Synthetic oligonucleotide
  Target: SCNA; (-) strand; PAM type: YTN; PAM sequence: TTC
tcaaagacagtgctgtctaa

SEQ ID NO: 40670 - DNA, 20 bp, Artificial Sequence
  Description of Artificial Sequence: Synthetic oligonucleotide
  Target: SCNA; (-) strand; PAM type: YTN; PAM sequence: TTA
attctcaaagacagtgctgt

SEQ ID NO: 40671 - DNA, 20 bp, Artificial Sequence
  Description of Artificial Sequence: Synthetic oligonucleotide
  Target: SCNA; (-) strand; PAM type: YTN; PAM sequence: CTA
ttaattctcaaagacagtgc

SEQ ID NO: 40672 - DNA, 20 bp, Artificial Sequence
  Description of Artificial Sequence: Synthetic oligonucleotide
  Target: SCNA; (-) strand; PAM type: YTN; PAM sequence: CTC
aaagacaactattaattctc

SEQ ID NO: 40673 - DNA, 20 bp, Artificial Sequence
  Description of Artificial Sequence: Synthetic oligonucleotide
  Target: SCNA; (-) strand; PAM type: YTN; PAM sequence: TTC
acacatctcaaagacaacta

SEQ ID NO: 40674 - DNA, 20 bp, Artificial Sequence
  Description of Artificial Sequence: Synthetic oligonucleotide
  Target: SCNA; (-) strand; PAM type: YTN; PAM sequence: CTC
atgcattcacacatctcaaa

SEQ ID NO: 40675 - DNA, 20 bp, Artificial Sequence
  Description of Artificial Sequence: Synthetic oligonucleotide
  Target: SCNA; (-) strand; PAM type: YTN; PAM sequence: TTA
aaacaaacacactcatgcat

SEQ ID NO: 40676 - DNA, 20 bp, Artificial Sequence
  Description of Artificial Sequence: Synthetic oligonucleotide
  Target: SCNA; (-) strand; PAM type: YTN; PAM sequence: CTA
gattaaaacaaacacactca

SEQ ID NO: 40677 - DNA, 20 bp, Artificial Sequence
  Description of Artificial Sequence: Synthetic oligonucleotide
  Target: SCNA; (-) strand; PAM type: YTN; PAM sequence: CTA
ctagattaaaacaaacacac

SEQ ID NO: 40678 - DNA, 20 bp, Artificial Sequence
  Description of Artificial Sequence: Synthetic oligonucleotide
  Target: SCNA; (-) strand; PAM type: YTN; PAM sequence: TTC
actactagattaaaacaaac

SEQ ID NO: 40679 - DNA, 20 bp, Artificial Sequence
  Description of Artificial Sequence: Synthetic oligonucleotide
  Target: SCNA; (-) strand; PAM type: YTN; PAM sequence: TTT
cactactagattaaaacaaa

SEQ ID NO: 40680 - DNA, 20 bp, Artificial Sequence
  Description of Artificial Sequence: Synthetic oligonucleotide
  Target: SCNA; (-) strand; PAM type: YTN; PAM sequence: TTT
tcactactagattaaaacaa

SEQ ID NO: 40681 - DNA, 20 bp, Artificial Sequence
  Description of Artificial Sequence: Synthetic oligonucleotide
  Target: SCNA; (-) strand; PAM type: YTN; PAM sequence: CTT
ttcactactagattaaaaca

SEQ ID NO: 40682 - DNA, 20 bp, Artificial Sequence
  Description of Artificial Sequence: Synthetic oligonucleotide
  Target: SCNA; (-) strand; PAM type: YTN; PAM sequence: TTC
cttttcactactagattaaa

SEQ ID NO: 40683 - DNA, 20 bp, Artificial Sequence
  Description of Artificial Sequence: Synthetic oligonucleotide
  Target: SCNA; (-) strand; PAM type: YTN; PAM sequence: TTT
ccttttcactactagattaa

SEQ ID NO: 40684 - DNA, 20 bp, Artificial Sequence
  Description of Artificial Sequence: Synthetic oligonucleotide
  Target: SCNA; (-) strand; PAM type: YTN; PAM sequence: TTG
tgagtgagtgtatagaaaga

SEQ ID NO: 40685 - DNA, 20 bp, Artificial Sequence
  Description of Artificial Sequence: Synthetic oligonucleotide
  Target: SCNA; (-) strand; PAM type: YTN; PAM sequence: TTG
agtgttgtgagtgagtgtat

SEQ ID NO: 40686 - DNA, 20 bp, Artificial Sequence
  Description of Artificial Sequence: Synthetic oligonucleotide
  Target: SCNA; (-) strand; PAM type: YTN; PAM sequence: TTC
cggaaatattgagtgttgtg

SEQ ID NO: 40687 - DNA, 20 bp, Artificial Sequence
  Description of Artificial Sequence: Synthetic oligonucleotide
  Target: SCNA; (-) strand; PAM type: YTN; PAM sequence: TTG
tgttccggaaatattgagtg

SEQ ID NO: 40688 - DNA, 20 bp, Artificial Sequence
  Description of Artificial Sequence: Synthetic oligonucleotide
  Target: SCNA; (-) strand; PAM type: YTN; PAM sequence: TTG
gtgtagaaaacacaccccac

SEQ ID NO: 40689 - DNA, 20 bp, Artificial Sequence
  Description of Artificial Sequence: Synthetic oligonucleotide
  Target: SCNA; (-) strand; PAM type: YTN; PAM sequence: CTT
ggtgtagaaaacacacccca

SEQ ID NO: 40690 - DNA, 20 bp, Artificial Sequence
  Description of Artificial Sequence: Synthetic oligonucleotide
  Target: SCNA; (-) strand; PAM type: YTN; PAM sequence: TTG
cttggtgtagaaaacacacc

SEQ ID NO: 40691 - DNA, 20 bp, Artificial Sequence
  Description of Artificial Sequence: Synthetic oligonucleotide
  Target: SCNA; (-) strand; PAM type: YTN; PAM sequence: TTG
gtagccacaaagaatgggag

SEQ ID NO: 40692 - DNA, 20 bp, Artificial Sequence
  Description of Artificial Sequence: Synthetic oligonucleotide
  Target: SCNA; (-) strand; PAM type: YTN; PAM sequence: TTA
cgggacacccagttggtagc

SEQ ID NO: 40693 - DNA, 20 bp, Artificial Sequence
  Description of Artificial Sequence: Synthetic oligonucleotide
  Target: SCNA; (-) strand; PAM type: YTN; PAM sequence: TTG
aattacgggacacccagttg

SEQ ID NO: 40694 - DNA, 20 bp, Artificial Sequence
  Description of Artificial Sequence: Synthetic oligonucleotide
  Target: SCNA; (-) strand; PAM type: YTN; PAM sequence: TTT
gaattacgggacacccagtt

SEQ ID NO: 40695 - DNA, 20 bp, Artificial Sequence
  Description of Artificial Sequence: Synthetic oligonucleotide
  Target: SCNA; (-) strand; PAM type: YTN; PAM sequence: CTC
caggtagatagtgtccgatt

SEQ ID NO: 40696 - DNA, 20 bp, Artificial Sequence
  Description of Artificial Sequence: Synthetic oligonucleotide
  Target: SCNA; (-) strand; PAM type: YTN; PAM sequence: CTA
actccaggtagatagtgtcc

SEQ ID NO: 40697 - DNA, 20 bp, Artificial Sequence
  Description of Artificial Sequence: Synthetic oligonucleotide
  Target: SCNA; (-) strand; PAM type: YTN; PAM sequence: CTG
tgggtcaatgctaactccag

SEQ ID NO: 40698 - DNA, 20 bp, Artificial Sequence
  Description of Artificial Sequence: Synthetic oligonucleotide
  Target: SCNA; (-) strand; PAM type: YTN; PAM sequence: TTA
acctgtgggtcaatgctaac

SEQ ID NO: 40699 - DNA, 20 bp, Artificial Sequence
  Description of Artificial Sequence: Synthetic oligonucleotide
  Target: SCNA; (-) strand; PAM type: YTN; PAM sequence: CTT
aacctgtgggtcaatgctaa

SEQ ID NO: 40700 - DNA, 20 bp, Artificial Sequence
  Description of Artificial Sequence: Synthetic oligonucleotide
  Target: SCNA; (-) strand; PAM type: YTN; PAM sequence: CTG
agtccttaacctgtgggtca

SEQ ID NO: 40701 - DNA, 20 bp, Artificial Sequence
  Description of Artificial Sequence: Synthetic oligonucleotide
  Target: SCNA; (-) strand; PAM type: YTN; PAM sequence: TTG
taaaactgagtccttaacct

SEQ ID NO: 40702 - DNA, 20 bp, Artificial Sequence
  Description of Artificial Sequence: Synthetic oligonucleotide
  Target: SCNA; (-) strand; PAM type: YTN; PAM sequence: CTT
gtaaaactgagtccttaacc

SEQ ID NO: 40703 - DNA, 20 bp, Artificial Sequence
  Description of Artificial Sequence: Synthetic oligonucleotide
  Target: SCNA; (-) strand; PAM type: YTN; PAM sequence: TTC
agtgggaaggggaaaaatct

SEQ ID NO: 40704 - DNA, 20 bp, Artificial Sequence
  Description of Artificial Sequence: Synthetic oligonucleotide
  Target: SCNA; (-) strand; PAM type: YTN; PAM sequence: CTT
cagtgggaaggggaaaaatc

SEQ ID NO: 40705 - DNA, 20 bp, Artificial Sequence
  Description of Artificial Sequence: Synthetic oligonucleotide
  Target: SCNA; (-) strand; PAM type: YTN; PAM sequence: TTG
tcatcttcagtgggaagggg

SEQ ID NO: 40706 - DNA, 20 bp, Artificial Sequence
  Description of Artificial Sequence: Synthetic oligonucleotide
  Target: SCNA; (-) strand; PAM type: YTN; PAM sequence: TTG
tgattgtcatcttcagtggg

SEQ ID NO: 40707 - DNA, 20 bp, Artificial Sequence
  Description of Artificial Sequence: Synthetic oligonucleotide
  Target: SCNA; (-) strand; PAM type: YTN; PAM sequence: CTT
gtgattgtcatcttcagtgg

SEQ ID NO: 40708 - DNA, 20 bp, Artificial Sequence
  Description of Artificial Sequence: Synthetic oligonucleotide
  Target: SCNA; (-) strand; PAM type: YTN; PAM sequence: TTG
cttgtgattgtcatcttcag

SEQ ID NO: 40709 - DNA, 20 bp, Artificial Sequence
  Description of Artificial Sequence: Synthetic oligonucleotide
  Target: SCNA; (-) strand; PAM type: YTN; PAM sequence: CTC
attgcttgtgattgtcatct

SEQ ID NO: 40710 - DNA, 20 bp, Artificial Sequence
  Description of Artificial Sequence: Synthetic oligonucleotide
  Target: SCNA; (-) strand; PAM type: YTN; PAM sequence: CTA
tgagtaacatgaggactcat

SEQ ID NO: 40711 - DNA, 20 bp, Artificial Sequence
  Description of Artificial Sequence: Synthetic oligonucleotide
  Target: SCNA; (-) strand; PAM type: YTN; PAM sequence: TTG
tagacaagtcaaacagaagc

SEQ ID NO: 40712 - DNA, 20 bp, Artificial Sequence
  Description of Artificial Sequence: Synthetic oligonucleotide
  Target: SCNA; (-) strand; PAM type: YTN; PAM sequence: TTT
gtagacaagtcaaacagaag

SEQ ID NO: 40713 - DNA, 20 bp, Artificial Sequence
  Description of Artificial Sequence: Synthetic oligonucleotide
  Target: SCNA; (-) strand; PAM type: YTN; PAM sequence: TTG
gatttgtagacaagtcaaac

SEQ ID NO: 40714 - DNA, 20 bp, Artificial Sequence
  Description of Artificial Sequence: Synthetic oligonucleotide
  Target: SCNA; (-) strand; PAM type: YTN; PAM sequence: CTT
ggatttgtagacaagtcaaa

SEQ ID NO: 40715 - DNA, 20 bp, Artificial Sequence
  Description of Artificial Sequence: Synthetic oligonucleotide
  Target: SCNA; (-) strand; PAM type: YTN; PAM sequence: CTG
aggagagggccgtggagacc

SEQ ID NO: 40716 - DNA, 20 bp, Artificial Sequence
  Description of Artificial Sequence: Synthetic oligonucleotide
  Target: SCNA; (-) strand; PAM type: YTN; PAM sequence: TTA
tcaaacctgaggagagggcc

SEQ ID NO: 40717 - DNA, 20 bp, Artificial Sequence
  Description of Artificial Sequence: Synthetic oligonucleotide
  Target: SCNA; (-) strand; PAM type: YTN; PAM sequence: CTA
gcaaattatcaaacctgagg

SEQ ID NO: 40718 - DNA, 20 bp, Artificial Sequence
  Description of Artificial Sequence: Synthetic oligonucleotide
  Target: SCNA; (-) strand; PAM type: YTN; PAM sequence: CTG
tgaatcacactagcaaatta

SEQ ID NO: 40719 - DNA, 20 bp, Artificial Sequence
  Description of Artificial Sequence: Synthetic oligonucleotide
  Target: SCNA; (-) strand; PAM type: YTN; PAM sequence: CTG
aagtctgtgaatcacactag

SEQ ID NO: 40720 - DNA, 20 bp, Artificial Sequence
  Description of Artificial Sequence: Synthetic oligonucleotide
  Target: SCNA; (-) strand; PAM type: YTN; PAM sequence: TTC
ctgaagtctgtgaatcacac

SEQ ID NO: 40721 - DNA, 20 bp, Artificial Sequence
  Description of Artificial Sequence: Synthetic oligonucleotide
  Target: SCNA; (-) strand; PAM type: YTN; PAM sequence: TTT
cctgaagtctgtgaatcaca

SEQ ID NO: 40722 - DNA, 20 bp, Artificial Sequence
  Description of Artificial Sequence: Synthetic oligonucleotide
  Target: SCNA; (-) strand; PAM type: YTN; PAM sequence: TTT
tcctgaagtctgtgaatcac

SEQ ID NO: 40723 - DNA, 20 bp, Artificial Sequence
  Description of Artificial Sequence: Synthetic oligonucleotide
  Target: SCNA; (-) strand; PAM type: YTN; PAM sequence: CTG
ttttcctgaagtctgtgaat

SEQ ID NO: 40724 - DNA, 20 bp, Artificial Sequence
  Description of Artificial Sequence: Synthetic oligonucleotide
  Target: SCNA; (-) strand; PAM type: YTN; PAM sequence: CTA
gtaagcaaactgttttcctg

SEQ ID NO: 40725 - DNA, 20 bp, Artificial Sequence
  Description of Artificial Sequence: Synthetic oligonucleotide
  Target: SCNA; (-) strand; PAM type: YTN; PAM sequence: CTG
gtaatctagtaagcaaactg

SEQ ID NO: 40726 - DNA, 20 bp, Artificial Sequence
  Description of Artificial Sequence: Synthetic oligonucleotide
  Target: SCNA; (-) strand; PAM type: YTN; PAM sequence: TTA
taacaaactggtaatctagt

SEQ ID NO: 40727 - DNA, 20 bp, Artificial Sequence
  Description of Artificial Sequence: Synthetic oligonucleotide
  Target: SCNA; (-) strand; PAM type: YTN; PAM sequence: TTT
ataacaaactggtaatctag

SEQ ID NO: 40728 - DNA, 20 bp, Artificial Sequence
  Description of Artificial Sequence: Synthetic oligonucleotide
  Target: SCNA; (-) strand; PAM type: YTN; PAM sequence: TTT
tataacaaactggtaatcta

SEQ ID NO: 40729 - DNA, 20 bp, Artificial Sequence
  Description of Artificial Sequence: Synthetic oligonucleotide
  Target: SCNA; (-) strand; PAM type: YTN; PAM sequence: CTT
ttataacaaactggtaatct

SEQ ID NO: 40730 - DNA, 20 bp, Artificial Sequence
  Description of Artificial Sequence: Synthetic oligonucleotide
  Target: SCNA; (-) strand; PAM type: YTN; PAM sequence: TTG
tatccttttataacaaactg

SEQ ID NO: 40731 - DNA, 20 bp, Artificial Sequence
  Description of Artificial Sequence: Synthetic oligonucleotide
  Target: SCNA; (-) strand; PAM type: YTN; PAM sequence: CTG
agttgtatccttttataaca

SEQ ID NO: 40732 - DNA, 20 bp, Artificial Sequence
  Description of Artificial Sequence: Synthetic oligonucleotide
  Target: SCNA; (-) strand; PAM type: YTN; PAM sequence: TTC
ctgagttgtatccttttata

SEQ ID NO: 40733 - DNA, 20 bp, Artificial Sequence
  Description of Artificial Sequence: Synthetic oligonucleotide
  Target: SCNA; (-) strand; PAM type: YTN; PAM sequence: CTG
ttcctgagttgtatcctttt

SEQ ID NO: 40734 - DNA, 20 bp, Artificial Sequence
  Description of Artificial Sequence: Synthetic oligonucleotide
  Target: SCNA; (-) strand; PAM type: YTN; PAM sequence: CTG
gctgttcctgagttgtatcc

SEQ ID NO: 40735 - DNA, 20 bp, Artificial Sequence
  Description of Artificial Sequence: Synthetic oligonucleotide
  Target: SCNA; (-) strand; PAM type: YTN; PAM sequence: TTC
catctggctgttcctgagtt

SEQ ID NO: 40736 - DNA, 20 bp, Artificial Sequence
  Description of Artificial Sequence: Synthetic oligonucleotide
  Target: SCNA; (-) strand; PAM type: YTN; PAM sequence: CTT
ccatctggctgttcctgagt

SEQ ID NO: 40737 - DNA, 20 bp, Artificial Sequence
  Description of Artificial Sequence: Synthetic oligonucleotide
  Target: SCNA; (-) strand; PAM type: YTN; PAM sequence: CTC
ttccatctggctgttcctga

SEQ ID NO: 40738 - DNA, 20 bp, Artificial Sequence
  Description of Artificial Sequence: Synthetic oligonucleotide
  Target: SCNA; (-) strand; PAM type: YTN; PAM sequence: CTG
tgcatctcttccatctggct

SEQ ID NO: 40739 - DNA, 20 bp, Artificial Sequence
  Description of Artificial Sequence: Synthetic oligonucleotide
  Target: SCNA; (-) strand; PAM type: YTN; PAM sequence: TTC
cctgtgcatctcttccatct

SEQ ID NO: 40740 - DNA, 20 bp, Artificial Sequence
  Description of Artificial Sequence: Synthetic oligonucleotide
  Target: SCNA; (-) strand; PAM type: YTN; PAM sequence: TTT
ccctgtgcatctcttccatc

SEQ ID NO: 40741 - DNA, 20 bp, Artificial Sequence
  Description of Artificial Sequence: Synthetic oligonucleotide
  Target: SCNA; (-) strand; PAM type: YTN; PAM sequence: CTT
tccctgtgcatctcttccat

SEQ ID NO: 40742 - DNA, 20 bp, Artificial Sequence
  Description of Artificial Sequence: Synthetic oligonucleotide
  Target: SCNA; (-) strand; PAM type: YTN; PAM sequence: CTC
ccccatacctttccctgtgc

SEQ ID NO: 40743 - DNA, 20 bp, Artificial Sequence
  Description of Artificial Sequence: Synthetic oligonucleotide
  Target: SCNA; (-) strand; PAM type: YTN; PAM sequence: CTC
cccacgcctcccccatacct

SEQ ID NO: 40744 - DNA, 20 bp, Artificial Sequence
  Description of Artificial Sequence: Synthetic oligonucleotide
  Target: SCNA; (-) strand; PAM type: YTN; PAM sequence: TTG
tggtgtgtccagagaaggca

SEQ ID NO: 40745 - DNA, 20 bp, Artificial Sequence
  Description of Artificial Sequence: Synthetic oligonucleotide
  Target: SCNA; (-) strand; PAM type: YTN; PAM sequence: CTG
ggaattgtggtgtgtccaga

SEQ ID NO: 40746 - DNA, 20 bp, Artificial Sequence
  Description of Artificial Sequence: Synthetic oligonucleotide
  Target: SCNA; (-) strand; PAM type: YTN; PAM sequence: TTG
aaataggtgaacatgcagag

SEQ ID NO: 40747 - DNA, 20 bp, Artificial Sequence
  Description of Artificial Sequence: Synthetic oligonucleotide
  Target: SCNA; (-) strand; PAM type: YTN; PAM sequence: TTT
gaaataggtgaacatgcaga

SEQ ID NO: 40748 - DNA, 20 bp, Artificial Sequence
  Description of Artificial Sequence: Synthetic oligonucleotide
  Target: SCNA; (-) strand; PAM type: YTN; PAM sequence: CTT
tgaaataggtgaacatgcag

SEQ ID NO: 40749 - DNA, 20 bp, Artificial Sequence
  Description of Artificial Sequence: Synthetic oligonucleotide
  Target: SCNA; (-) strand; PAM type: YTN; PAM sequence: TTC
agagtgctttgaaataggtg

SEQ ID NO: 40750 - DNA, 20 bp, Artificial Sequence
  Description of Artificial Sequence: Synthetic oligonucleotide
  Target: SCNA; (-) strand; PAM type: YTN; PAM sequence: CTA
aaagacaggattcagagtgc

SEQ ID NO: 40751 - DNA, 20 bp, Artificial Sequence
  Description of Artificial Sequence: Synthetic oligonucleotide
  Target: SCNA; (-) strand; PAM type: YTN; PAM sequence: CTC
cataaaaatccctaaaagac

SEQ ID NO: 40752 - DNA, 20 bp, Artificial Sequence
  Description of Artificial Sequence: Synthetic oligonucleotide
  Target: SCNA; (-) strand; PAM type: YTN; PAM sequence: TTC
catgatgaagactccataaa

SEQ ID NO: 40753 - DNA, 20 bp, Artificial Sequence
  Description of Artificial Sequence: Synthetic oligonucleotide
  Target: SCNA; (-) strand; PAM type: YTN; PAM sequence: CTT
ccatgatgaagactccataa

SEQ ID NO: 40754 - DNA, 20 bp, Artificial Sequence
  Description of Artificial Sequence: Synthetic oligonucleotide
  Target: SCNA; (-) strand; PAM type: YTN; PAM sequence: TTA
ataagcaacaatgcttccat

SEQ ID NO: 40755 - DNA, 20 bp, Artificial Sequence
  Description of Artificial Sequence: Synthetic oligonucleotide
  Target: SCNA; (-) strand; PAM type: YTN; PAM sequence: TTG
agttaataagcaacaatgct

SEQ ID NO: 40756 - DNA, 20 bp, Artificial Sequence
  Description of Artificial Sequence: Synthetic oligonucleotide
  Target: SCNA; (-) strand; PAM type: YTN; PAM sequence: CTG
gagattgagttaataagcaa

SEQ ID NO: 40757 - DNA, 20 bp, Artificial Sequence
  Description of Artificial Sequence: Synthetic oligonucleotide
  Target: SCNA; (-) strand; PAM type: YTN; PAM sequence: CTG
gggacgggagagaagaggag

SEQ ID NO: 40758 - DNA, 20 bp, Artificial Sequence
  Description of Artificial Sequence: Synthetic oligonucleotide
  Target: SCNA; (-) strand; PAM type: YTN; PAM sequence: TTC
tggggacgggagagaagagg

SEQ ID NO: 40759 - DNA, 20 bp, Artificial Sequence
  Description of Artificial Sequence: Synthetic oligonucleotide
  Target: SCNA; (-) strand; PAM type: YTN; PAM sequence: CTT
ctggggacgggagagaagag

SEQ ID NO: 40760 - DNA, 20 bp, Artificial Sequence
  Description of Artificial Sequence: Synthetic oligonucleotide
  Target: SCNA; (-) strand; PAM type: YTN; PAM sequence: TTC
acatcttctggggacgggag

SEQ ID NO: 40761 - DNA, 20 bp, Artificial Sequence
  Description of Artificial Sequence: Synthetic oligonucleotide
  Target: SCNA; (-) strand; PAM type: YTN; PAM sequence: TTG
gccccattcacatcttctgg

SEQ ID NO: 40762 - DNA, 20 bp, Artificial Sequence
  Description of Artificial Sequence: Synthetic oligonucleotide
  Target: SCNA; (-) strand; PAM type: YTN; PAM sequence: TTT
ggccccattcacatcttctg

SEQ ID NO: 40763 - DNA, 20 bp, Artificial Sequence
  Description of Artificial Sequence: Synthetic oligonucleotide
  Target: SCNA; (-) strand; PAM type: YTN; PAM sequence: TTT
tggccccattcacatcttct

SEQ ID NO: 40764 - DNA, 20 bp, Artificial Sequence
  Description of Artificial Sequence: Synthetic oligonucleotide
  Target: SCNA; (-) strand; PAM type: YTN; PAM sequence: CTT
ttggccccattcacatcttc

SEQ ID NO: 40765 - DNA, 20 bp, Artificial Sequence
  Description of Artificial Sequence: Synthetic oligonucleotide
  Target: SCNA; (-) strand; PAM type: YTN; PAM sequence: TTG
aagcttttggccccattcac

SEQ ID NO: 40766 - DNA, 20 bp, Artificial Sequence
  Description of Artificial Sequence: Synthetic oligonucleotide
  Target: SCNA; (-) strand; PAM type: YTN; PAM sequence: CTT
gaagcttttggccccattca

SEQ ID NO: 40767 - DNA, 20 bp, Artificial Sequence
  Description of Artificial Sequence: Synthetic oligonucleotide
  Target: SCNA; (-) strand; PAM type: YTN; PAM sequence: CTG
gtcaccagaaaggtcaagcc

SEQ ID NO: 40768 - DNA, 20 bp, Artificial Sequence
  Description of Artificial Sequence: Synthetic oligonucleotide
  Target: SCNA; (-) strand; PAM type: YTN; PAM sequence: CTG
gatgggggctggtcaccaga

SEQ ID NO: 40769 - DNA, 20 bp, Artificial Sequence
  Description of Artificial Sequence: Synthetic oligonucleotide
  Target: SCNA; (-) strand; PAM type: YTN; PAM sequence: TTC
ctggatgggggctggtcacc

SEQ ID NO: 40770 - DNA, 20 bp, Artificial Sequence
  Description of Artificial Sequence: Synthetic oligonucleotide
  Target: SCNA; (-) strand; PAM type: YTN; PAM sequence: CTG
ggttcctggatgggggctgg

SEQ ID NO: 40771 - DNA, 20 bp, Artificial Sequence
  Description of Artificial Sequence: Synthetic oligonucleotide
  Target: SCNA; (-) strand; PAM type: YTN; PAM sequence: TTG
ctgggttcctggatgggggc

SEQ ID NO: 40772 - DNA, 20 bp, Artificial Sequence
  Description of Artificial Sequence: Synthetic oligonucleotide
  Target: SCNA; (-) strand; PAM type: YTN; PAM sequence: CTT
gctgggttcctggatggggg

SEQ ID NO: 40773 - DNA, 20 bp, Artificial Sequence
  Description of Artificial Sequence: Synthetic oligonucleotide
  Target: SCNA; (-) strand; PAM type: YTN; PAM sequence: CTC
ttgctgggttcctggatggg

SEQ ID NO: 40774 - DNA, 20 bp, Artificial Sequence
  Description of Artificial Sequence: Synthetic oligonucleotide
  Target: SCNA; (-) strand; PAM type: YTN; PAM sequence: CTA
atgaagtgactcttgctggg

SEQ ID NO: 40775 - DNA, 20 bp, Artificial Sequence
  Description of Artificial Sequence: Synthetic oligonucleotide
  Target: SCNA; (-) strand; PAM type: YTN; PAM sequence: TTC
taatgaagtgactcttgctg

SEQ ID NO: 40776 - DNA, 20 bp, Artificial Sequence
  Description of Artificial Sequence: Synthetic oligonucleotide
  Target: SCNA; (-) strand; PAM type: YTN; PAM sequence: CTT
ctaatgaagtgactcttgct

SEQ ID NO: 40777 - DNA, 20 bp, Artificial Sequence
  Description of Artificial Sequence: Synthetic oligonucleotide
  Target: SCNA; (-) strand; PAM type: YTN; PAM sequence: CTC
ttctaatgaagtgactcttg

SEQ ID NO: 40778 - DNA, 20 bp, Artificial Sequence
  Description of Artificial Sequence: Synthetic oligonucleotide
  Target: SCNA; (-) strand; PAM type: YTN; PAM sequence: TTC
tcttctaatgaagtgactct

SEQ ID NO: 40779 - DNA, 20 bp, Artificial Sequence
  Description of Artificial Sequence: Synthetic oligonucleotide
  Target: SCNA; (-) strand; PAM type: YTN; PAM sequence: CTT
ctcttctaatgaagtgactc

SEQ ID NO: 40780 - DNA, 20 bp, Artificial Sequence
  Description of Artificial Sequence: Synthetic oligonucleotide
  Target: SCNA; (-) strand; PAM type: YTN; PAM sequence: CTG
ggtgagagtagcatcttctc

SEQ ID NO: 40781 - DNA, 20 bp, Artificial Sequence
  Description of Artificial Sequence: Synthetic oligonucleotide
  Target: SCNA; (-) strand; PAM type: YTN; PAM sequence: TTA
gtccctgggtgagagtagca

SEQ ID NO: 40782 - DNA, 20 bp, Artificial Sequence
  Description of Artificial Sequence: Synthetic oligonucleotide
  Target: SCNA; (-) strand; PAM type: YTN; PAM sequence: CTT
agtccctgggtgagagtagc

SEQ ID NO: 40783 - DNA, 20 bp, Artificial Sequence
  Description of Artificial Sequence: Synthetic oligonucleotide
  Target: SCNA; (-) strand; PAM type: YTN; PAM sequence: CTC
cttagtccctgggtgagagt

SEQ ID NO: 40784 - DNA, 20 bp, Artificial Sequence
  Description of Artificial Sequence: Synthetic oligonucleotide
  Target: SCNA; (-) strand; PAM type: YTN; PAM sequence: CTG
acagagctccttagtccctg

SEQ ID NO: 40785 - DNA, 20 bp, Artificial Sequence
  Description of Artificial Sequence: Synthetic oligonucleotide
  Target: SCNA; (-) strand; PAM type: YTN; PAM sequence: TTC
tgacagagctccttagtccc

SEQ ID NO: 40786 - DNA, 20 bp, Artificial Sequence
  Description of Artificial Sequence: Synthetic oligonucleotide
  Target: SCNA; (-) strand; PAM type: YTN; PAM sequence: TTT
ctgacagagctccttagtcc

SEQ ID NO: 40787 - DNA, 20 bp, Artificial Sequence
  Description of Artificial Sequence: Synthetic oligonucleotide
  Target: SCNA; (-) strand; PAM type: YTN; PAM sequence: CTT
tctgacagagctccttagtc

SEQ ID NO: 40788 - DNA, 20 bp, Artificial Sequence
  Description of Artificial Sequence: Synthetic oligonucleotide
  Target: SCNA; (-) strand; PAM type: YTN; PAM sequence: CTG
ctttctgacagagctcctta

SEQ ID NO: 40789 - DNA, 20 bp, Artificial Sequence
  Description of Artificial Sequence: Synthetic oligonucleotide
  Target: SCNA; (-) strand; PAM type: YTN; PAM sequence: CTC
tgctttctgacagagctcct

SEQ ID NO: 40790 - DNA, 20 bp, Artificial Sequence
  Description of Artificial Sequence: Synthetic oligonucleotide
  Target: SCNA; (-) strand; PAM type: YTN; PAM sequence: TTG
actctgctttctgacagagc

SEQ ID NO: 40791 - DNA, 20 bp, Artificial Sequence
  Description of Artificial Sequence: Synthetic oligonucleotide
  Target: SCNA; (-) strand; PAM type: YTN; PAM sequence: TTT
gactctgctttctgacagag

SEQ ID NO: 40792 - DNA, 20 bp, Artificial Sequence
  Description of Artificial Sequence: Synthetic oligonucleotide
  Target: SCNA; (-) strand; PAM type: YTN; PAM sequence: CTT
tgactctgctttctgacaga

SEQ ID NO: 40793 - DNA, 20 bp, Artificial Sequence
  Description of Artificial Sequence: Synthetic oligonucleotide
  Target: SCNA; (-) strand; PAM type: YTN; PAM sequence: TTG
gtctttgactctgctttctg

SEQ ID NO: 40794 - DNA, 20 bp, Artificial Sequence
  Description of Artificial Sequence: Synthetic oligonucleotide
  Target: SCNA; (-) strand; PAM type: YTN; PAM sequence: TTT
ggtctttgactctgctttct

SEQ ID NO: 40795 - DNA, 20 bp, Artificial Sequence
  Description of Artificial Sequence: Synthetic oligonucleotide
  Target: SCNA; (-) strand; PAM type: YTN; PAM sequence: CTA
atatttggtctttgactctg

SEQ ID NO: 40796 - DNA, 20 bp, Artificial Sequence
  Description of Artificial Sequence: Synthetic oligonucleotide
  Target: SCNA; (-) strand; PAM type: YTN; PAM sequence: TTC
taatatttggtctttgactc

SEQ ID NO: 40797 - DNA, 20 bp, Artificial Sequence
  Description of Artificial Sequence: Synthetic oligonucleotide
  Target: SCNA; (-) strand; PAM type: YTN; PAM sequence: TTG
ttctaatatttggtctttga

SEQ ID NO: 40798 - DNA, 20 bp, Artificial Sequence
  Description of Artificial Sequence: Synthetic oligonucleotide
  Target: SCNA; (-) strand; PAM type: YTN; PAM sequence: TTT
gttctaatatttggtctttg

SEQ ID NO: 40799 - DNA, 20 bp, Artificial Sequence
  Description of Artificial Sequence: Synthetic oligonucleotide
  Target: SCNA; (-) strand; PAM type: YTN; PAM sequence: TTT
tgttctaatatttggtcttt

SEQ ID NO: 40800 - DNA, 20 bp, Artificial Sequence
  Description of Artificial Sequence: Synthetic oligonucleotide
  Target: SCNA; (-) strand; PAM type: YTN; PAM sequence: CTT
ttgttctaatatttggtctt

SEQ ID NO: 40801 - DNA, 20 bp, Artificial Sequence
  Description of Artificial Sequence: Synthetic oligonucleotide
  Target: SCNA; (-) strand; PAM type: YTN; PAM sequence: CTA
gggtcatcttttgttctaat

SEQ ID NO: 40802 - DNA, 20 bp, Artificial Sequence
  Description of Artificial Sequence: Synthetic oligonucleotide
  Target: SCNA; (-) strand; PAM type: YTN; PAM sequence: CTG
agtagtaggggtgctagggt

SEQ ID NO: 40803 - DNA, 20 bp, Artificial Sequence
  Description of Artificial Sequence: Synthetic oligonucleotide
  Target: SCNA; (-) strand; PAM type: YTN; PAM sequence: TTC
ctgagtagtaggggtgctag

SEQ ID NO: 40804 - DNA, 20 bp, Artificial Sequence
  Description of Artificial Sequence: Synthetic oligonucleotide
  Target: SCNA; (-) strand; PAM type: YTN; PAM sequence: TTT
cctgagtagtaggggtgcta

SEQ ID NO: 40805 - DNA, 20 bp, Artificial Sequence
  Description of Artificial Sequence: Synthetic oligonucleotide
  Target: SCNA; (-) strand; PAM type: YTN; PAM sequence: TTG
taatttcctgagtagtaggg

SEQ ID NO: 40806 - DNA, 20 bp, Artificial Sequence
  Description of Artificial Sequence: Synthetic oligonucleotide
  Target: SCNA; (-) strand; PAM type: YTN; PAM sequence: CTT
gtaatttcctgagtagtagg

SEQ ID NO: 40807 - DNA, 20 bp, Artificial Sequence
  Description of Artificial Sequence: Synthetic oligonucleotide
  Target: SCNA; (-) strand; PAM type: YTN; PAM sequence: CTA
aaacccttgtaatttcctga

SEQ ID NO: 40808 - DNA, 20 bp, Artificial Sequence
  Description of Artificial Sequence: Synthetic oligonucleotide
  Target: SCNA; (-) strand; PAM type: YTN; PAM sequence: CTC
ctaaaacccttgtaatttcc

SEQ ID NO: 40809 - DNA, 20 bp, Artificial Sequence
  Description of Artificial Sequence: Synthetic oligonucleotide
  Target: SCNA; (-) strand; PAM type: YTN; PAM sequence: TTA
caaagagctcctaaaaccct

SEQ ID NO: 40810 - DNA, 20 bp, Artificial Sequence
  Description of Artificial Sequence: Synthetic oligonucleotide
  Target: SCNA; (-) strand; PAM type: YTN; PAM sequence: CTT
acaaagagctcctaaaaccc

SEQ ID NO: 40811 - DNA, 20 bp, Artificial Sequence
  Description of Artificial Sequence: Synthetic oligonucleotide
  Target: SCNA; (-) strand; PAM type: YTN; PAM sequence: TTC
ttacaaagagctcctaaaac

SEQ ID NO: 40812 - DNA, 20 bp, Artificial Sequence
  Description of Artificial Sequence: Synthetic oligonucleotide
  Target: SCNA; (-) strand; PAM type: YTN; PAM sequence: CTC
cagttcttacaaagagctcc

SEQ ID NO: 40813 - DNA, 20 bp, Artificial Sequence
  Description of Artificial Sequence: Synthetic oligonucleotide
  Target: SCNA; (-) strand; PAM type: YTN; PAM sequence: CTG
cctccagttcttacaaagag

SEQ ID NO: 40814 - DNA, 20 bp, Artificial Sequence
  Description of Artificial Sequence: Synthetic oligonucleotide
  Target: SCNA; (-) strand; PAM type: YTN; PAM sequence: TTC
tgcctccagttcttacaaag

SEQ ID NO: 40815 - DNA, 20 bp, Artificial Sequence
  Description of Artificial Sequence: Synthetic oligonucleotide
  Target: SCNA; (-) strand; PAM type: YTN; PAM sequence: TTT
ctgcctccagttcttacaaa

SEQ ID NO: 40816 - DNA, 20 bp, Artificial Sequence
  Description of Artificial Sequence: Synthetic oligonucleotide
  Target: SCNA; (-) strand; PAM type: YTN; PAM sequence: TTG
gtttctgcctccagttctta

SEQ ID NO: 40817 - DNA, 20 bp, Artificial Sequence
  Description of Artificial Sequence: Synthetic oligonucleotide
  Target: SCNA; (-) strand; PAM type: YTN; PAM sequence: TTT
ggtttctgcctccagttctt

SEQ ID NO: 40818 - DNA, 20 bp, Artificial Sequence
  Description of Artificial Sequence: Synthetic oligonucleotide
  Target: SCNA; (-) strand; PAM type: YTN; PAM sequence: TTG
tgacataataaatatataca

SEQ ID NO: 40819 - DNA, 20 bp, Artificial Sequence
  Description of Artificial Sequence: Synthetic oligonucleotide
  Target: SCNA; (-) strand; PAM type: YTN; PAM sequence: TTT
gtgacataataaatatatac

SEQ ID NO: 40820 - DNA, 20 bp, Artificial Sequence
  Description of Artificial Sequence: Synthetic oligonucleotide
  Target: SCNA; (-) strand; PAM type: YTN; PAM sequence: CTA
tttgtgacataataaatata

SEQ ID NO: 40821 - DNA, 20 bp, Artificial Sequence
  Description of Artificial Sequence: Synthetic oligonucleotide
  Target: SCNA; (-) strand; PAM type: YTN; PAM sequence: TTA
tccagtatgtagctatttgt

SEQ ID NO: 40822 - DNA, 20 bp, Artificial Sequence
  Description of Artificial Sequence: Synthetic oligonucleotide
  Target: SCNA; (-) strand; PAM type: YTN; PAM sequence: CTT
atccagtatgtagctatttg

SEQ ID NO: 40823 - DNA, 20 bp, Artificial Sequence
  Description of Artificial Sequence: Synthetic oligonucleotide
  Target: SCNA; (-) strand; PAM type: YTN; PAM sequence: CTG
gcttatccagtatgtagcta

SEQ ID NO: 40824 - DNA, 20 bp, Artificial Sequence
  Description of Artificial Sequence: Synthetic oligonucleotide
  Target: SCNA; (-) strand; PAM type: YTN; PAM sequence: TTC
tggcttatccagtatgtagc

SEQ ID NO: 40825 - DNA, 20 bp, Artificial Sequence
  Description of Artificial Sequence: Synthetic oligonucleotide
  Target: SCNA; (-) strand; PAM type: YTN; PAM sequence: TTT
ctggcttatccagtatgtag

SEQ ID NO: 40826 - DNA, 20 bp, Artificial Sequence
  Description of Artificial Sequence: Synthetic oligonucleotide
  Target: SCNA; (-) strand; PAM type: YTN; PAM sequence: CTT
tctggcttatccagtatgta

SEQ ID NO: 40827 - DNA, 20 bp, Artificial Sequence
  Description of Artificial Sequence: Synthetic oligonucleotide
  Target: SCNA; (-) strand; PAM type: YTN; PAM sequence: CTC
atctttctggcttatccagt

SEQ ID NO: 40828 - DNA, 20 bp, Artificial Sequence
  Description of Artificial Sequence: Synthetic oligonucleotide
  Target: SCNA; (-) strand; PAM type: YTN; PAM sequence: TTC
ctcatctttctggcttatcc

SEQ ID NO: 40829 - DNA, 20 bp, Artificial Sequence
  Description of Artificial Sequence: Synthetic oligonucleotide
  Target: SCNA; (-) strand; PAM type: YTN; PAM sequence: TTT
cctcatctttctggcttatc

SEQ ID NO: 40830 - DNA, 20 bp, Artificial Sequence
  Description of Artificial Sequence: Synthetic oligonucleotide
  Target: SCNA; (-) strand; PAM type: YTN; PAM sequence: CTA
gtgtgagatgcaaacatgtt

SEQ ID NO: 40831 - DNA, 20 bp, Artificial Sequence
  Description of Artificial Sequence: Synthetic oligonucleotide
  Target: SCNA; (-) strand; PAM type: YTN; PAM sequence: CTG
cactagtgtgagatgcaaac

SEQ ID NO: 40832 - DNA, 20 bp, Artificial Sequence
  Description of Artificial Sequence: Synthetic oligonucleotide
  Target: SCNA; (-) strand; PAM type: YTN; PAM sequence: CTC
tgcactagtgtgagatgcaa

SEQ ID NO: 40833 - DNA, 20 bp, Artificial Sequence
  Description of Artificial Sequence: Synthetic oligonucleotide
  Target: SCNA; (-) strand; PAM type: YTN; PAM sequence: TTC
agaatctctgcactagtgtg

SEQ ID NO: 40834 - DNA, 20 bp, Artificial Sequence
  Description of Artificial Sequence: Synthetic oligonucleotide
  Target: SCNA; (-) strand; PAM type: YTN; PAM sequence: TTT
cagaatctctgcactagtgt

SEQ ID NO: 40835 - DNA, 20 bp, Artificial Sequence
  Description of Artificial Sequence: Synthetic oligonucleotide
  Target: SCNA; (-) strand; PAM type: YTN; PAM sequence: TTT
tcagaatctctgcactagtg

SEQ ID NO: 40836 - DNA, 20 bp, Artificial Sequence
  Description of Artificial Sequence: Synthetic oligonucleotide
  Target: SCNA; (-) strand; PAM type: YTN; PAM sequence: TTT
ttcagaatctctgcactagt

SEQ ID NO: 40837 - DNA, 20 bp, Artificial Sequence
  Description of Artificial Sequence: Synthetic oligonucleotide
  Target: SCNA; (-) strand; PAM type: YTN; PAM sequence: CTT
tttcagaatctctgcactag

SEQ ID NO: 40838 - DNA, 20 bp, Artificial Sequence
  Description of Artificial Sequence: Synthetic oligonucleotide
  Target: SCNA; (-) strand; PAM type: YTN; PAM sequence: TTC
caagtggggtctttttcaga

SEQ ID NO: 40839 - DNA, 20 bp, Artificial Sequence
  Description of Artificial Sequence: Synthetic oligonucleotide
  Target: SCNA; (-) strand; PAM type: YTN; PAM sequence: TTG
gtattccaagtggggtcttt

SEQ ID NO: 40840 - DNA, 20 bp, Artificial Sequence
  Description of Artificial Sequence: Synthetic oligonucleotide
  Target: SCNA; (-) strand; PAM type: YTN; PAM sequence: TTT
ggtattccaagtggggtctt

SEQ ID NO: 40841 - DNA, 20 bp, Artificial Sequence
  Description of Artificial Sequence: Synthetic oligonucleotide
  Target: SCNA; (-) strand; PAM type: YTN; PAM sequence: CTA
atgtgtggtttggtattcca

SEQ ID NO: 40842 - DNA, 20 bp, Artificial Sequence
  Description of Artificial Sequence: Synthetic oligonucleotide
  Target: SCNA; (-) strand; PAM type: YTN; PAM sequence: TTG
ggaacagaacaatctaatgt

SEQ ID NO: 40843 - DNA, 20 bp, Artificial Sequence
  Description of Artificial Sequence: Synthetic oligonucleotide
  Target: SCNA; (-) strand; PAM type: YTN; PAM sequence: TTG
gcacacaattgggaacagaa

SEQ ID NO: 40844 - DNA, 20 bp, Artificial Sequence
  Description of Artificial Sequence: Synthetic oligonucleotide
  Target: SCNA; (-) strand; PAM type: YTN; PAM sequence: TTT
ggcacacaattgggaacaga

SEQ ID NO: 40845 - DNA, 20 bp, Artificial Sequence
  Description of Artificial Sequence: Synthetic oligonucleotide
  Target: SCNA; (-) strand; PAM type: YTN; PAM sequence: CTT
tggcacacaattgggaacag

SEQ ID NO: 40846 - DNA, 20 bp, Artificial Sequence
  Description of Artificial Sequence: Synthetic oligonucleotide
  Target: SCNA; (-) strand; PAM type: YTN; PAM sequence: TTC
agagtgcactttggcacaca

SEQ ID NO: 40847 - DNA, 20 bp, Artificial Sequence
  Description of Artificial Sequence: Synthetic oligonucleotide
  Target: SCNA; (-) strand; PAM type: YTN; PAM sequence: TTA
ccaaaacagttcagagtgca

SEQ ID NO: 40848 - DNA, 20 bp, Artificial Sequence
  Description of Artificial Sequence: Synthetic oligonucleotide
  Target: SCNA; (-) strand; PAM type: YTN; PAM sequence: TTT
accaaaacagttcagagtgc

SEQ ID NO: 40849 - DNA, 20 bp, Artificial Sequence
  Description of Artificial Sequence: Synthetic oligonucleotide
  Target: SCNA; (-) strand; PAM type: YTN; PAM sequence: CTT
taccaaaacagttcagagtg

SEQ ID NO: 40850 - DNA, 20 bp, Artificial Sequence
  Description of Artificial Sequence: Synthetic oligonucleotide
  Target: SCNA; (-) strand; PAM type: YTN; PAM sequence: CTC
cacggtcggctttaccaaaa

SEQ ID NO: 40851 - DNA, 20 bp, Artificial Sequence
  Description of Artificial Sequence: Synthetic oligonucleotide
  Target: SCNA; (-) strand; PAM type: YTN; PAM sequence: CTC
atatgactccacggtcggct

SEQ ID NO: 40852 - DNA, 20 bp, Artificial Sequence
  Description of Artificial Sequence: Synthetic oligonucleotide
  Target: SCNA; (-) strand; PAM type: YTN; PAM sequence: TTC
agcctcatatgactccacgg

SEQ ID NO: 40853 - DNA, 20 bp, Artificial Sequence
  Description of Artificial Sequence: Synthetic oligonucleotide
  Target: SCNA; (-) strand; PAM type: YTN; PAM sequence: TTA
ttcagcctcatatgactcca

SEQ ID NO: 40854 - DNA, 20 bp, Artificial Sequence
  Description of Artificial Sequence: Synthetic oligonucleotide
  Target: SCNA; (-) strand; PAM type: YTN; PAM sequence: CTC
ccaagttattcagcctcata

SEQ ID NO: 40855 - DNA, 20 bp, Artificial Sequence
  Description of Artificial Sequence: Synthetic oligonucleotide
  Target: SCNA; (-) strand; PAM type: YTN; PAM sequence: TTC
tcccaagttattcagcctca

SEQ ID NO: 40856 - DNA, 20 bp, Artificial Sequence
  Description of Artificial Sequence: Synthetic oligonucleotide
  Target: SCNA; (-) strand; PAM type: YTN; PAM sequence: TTA
cattctcccaagttattcag

SEQ ID NO: 40857 - DNA, 20 bp, Artificial Sequence
  Description of Artificial Sequence: Synthetic oligonucleotide
  Target: SCNA; (-) strand; PAM type: YTN; PAM sequence: CTT
acattctcccaagttattca

SEQ ID NO: 40858 - DNA, 20 bp, Artificial Sequence
  Description of Artificial Sequence: Synthetic oligonucleotide
  Target: SCNA; (-) strand; PAM type: YTN; PAM sequence: TTG
cagacttacattctcccaag

SEQ ID NO: 40859 - DNA, 20 bp, Artificial Sequence
  Description of Artificial Sequence: Synthetic oligonucleotide
  Target: SCNA; (-) strand; PAM type: YTN; PAM sequence: TTT
gcagacttacattctcccaa

SEQ ID NO: 40860 - DNA, 20 bp, Artificial Sequence
  Description of Artificial Sequence: Synthetic oligonucleotide
  Target: SCNA; (-) strand; PAM type: YTN; PAM sequence: TTT
tgcagacttacattctccca

SEQ ID NO: 40861 - DNA, 20 bp, Artificial Sequence
  Description of Artificial Sequence: Synthetic oligonucleotide
  Target: SCNA; (-) strand; PAM type: YTN; PAM sequence: TTA
ttttgcagacttacattctc

SEQ ID NO: 40862 - DNA, 20 bp, Artificial Sequence
  Description of Artificial Sequence: Synthetic oligonucleotide
  Target: SCNA; (-) strand; PAM type: YTN; PAM sequence: TTT
attttgcagacttacattct

SEQ ID NO: 40863 - DNA, 20 bp, Artificial Sequence
  Description of Artificial Sequence: Synthetic oligonucleotide
  Target: SCNA; (-) strand; PAM type: YTN; PAM sequence: CTA
ggtttattttgcagacttac

SEQ ID NO: 40864 - DNA, 20 bp, Artificial Sequence
  Description of Artificial Sequence: Synthetic oligonucleotide
  Target: SCNA; (-) strand; PAM type: YTN; PAM sequence: CTG
aggatcaatccagtcctagg

SEQ ID NO: 40865 - DNA, 20 bp, Artificial Sequence
  Description of Artificial Sequence: Synthetic oligonucleotide
  Target: SCNA; (-) strand; PAM type: YTN; PAM sequence: CTG
ccaagtggcctgaggatcaa

SEQ ID NO: 40866 - DNA, 20 bp, Artificial Sequence
  Description of Artificial Sequence: Synthetic oligonucleotide
  Target: SCNA; (-) strand; PAM type: YTN; PAM sequence: TTC
acctgccaagtggcctgagg

SEQ ID NO: 40867 - DNA, 20 bp, Artificial Sequence
  Description of Artificial Sequence: Synthetic oligonucleotide
  Target: SCNA; (-) strand; PAM type: YTN; PAM sequence: CTC
ccgagacattcacctgccaa

SEQ ID NO: 40868 - DNA, 20 bp, Artificial Sequence
  Description of Artificial Sequence: Synthetic oligonucleotide
  Target: SCNA; (-) strand; PAM type: YTN; PAM sequence: TTC
actcccgagacattcacctg

SEQ ID NO: 40869 - DNA, 20 bp, Artificial Sequence
  Description of Artificial Sequence: Synthetic oligonucleotide
  Target: SCNA; (-) strand; PAM type: YTN; PAM sequence: CTC
atattcactcccgagacatt

SEQ ID NO: 40870 - DNA, 20 bp, Artificial Sequence
  Description of Artificial Sequence: Synthetic oligonucleotide
  Target: SCNA; (-) strand; PAM type: YTN; PAM sequence: TTG
tctcatattcactcccgaga

SEQ ID NO: 40871 - DNA, 20 bp, Artificial Sequence
  Description of Artificial Sequence: Synthetic oligonucleotide
  Target: SCNA; (-) strand; PAM type: YTN; PAM sequence: CTT
gtctcatattcactcccgag

SEQ ID NO: 40872 - DNA, 20 bp, Artificial Sequence
  Description of Artificial Sequence: Synthetic oligonucleotide
  Target: SCNA; (-) strand; PAM type: YTN; PAM sequence: TTC
aggaagcttgtctcatattc

SEQ ID NO: 40873 - DNA, 20 bp, Artificial Sequence
  Description of Artificial Sequence: Synthetic oligonucleotide
  Target: SCNA; (-) strand; PAM type: YTN; PAM sequence: TTT
caggaagcttgtctcatatt

SEQ ID NO: 40874 - DNA, 20 bp, Artificial Sequence
  Description of Artificial Sequence: Synthetic oligonucleotide
  Target: SCNA; (-) strand; PAM type: YTN; PAM sequence: TTT
tcaggaagcttgtctcatat

SEQ ID NO: 40875 - DNA, 20 bp, Artificial Sequence
  Description of Artificial Sequence: Synthetic oligonucleotide
  Target: SCNA; (-) strand; PAM type: YTN; PAM sequence: CTT
ttcaggaagcttgtctcata

SEQ ID NO: 40876 - DNA, 20 bp, Artificial Sequence
  Description of Artificial Sequence: Synthetic oligonucleotide
  Target: SCNA; (-) strand; PAM type: YTN; PAM sequence: TTA
agtcatataagccttttcag

SEQ ID NO: 40877 - DNA, 20 bp, Artificial Sequence
  Description of Artificial Sequence: Synthetic oligonucleotide
  Target: SCNA; (-) strand; PAM type: YTN; PAM sequence: TTT
aagtcatataagccttttca

SEQ ID NO: 40878 - DNA, 20 bp, Artificial Sequence
  Description of Artificial Sequence: Synthetic oligonucleotide
  Target: SCNA; (-) strand; PAM type: YTN; PAM sequence: CTT
taagtcatataagccttttc

SEQ ID NO: 40879 - DNA, 20 bp, Artificial Sequence
  Description of Artificial Sequence: Synthetic oligonucleotide
  Target: SCNA; (-) strand; PAM type: YTN; PAM sequence: TTC
tttaagtcatataagccttt

SEQ ID NO: 40880 - DNA, 20 bp, Artificial Sequence
  Description of Artificial Sequence: Synthetic oligonucleotide
  Target: SCNA; (-) strand; PAM type: YTN; PAM sequence: TTA
aacaaaaagttctttaagtc

SEQ ID NO: 40881 - DNA, 20 bp, Artificial Sequence
  Description of Artificial Sequence: Synthetic oligonucleotide
  Target: SCNA; (-) strand; PAM type: YTN; PAM sequence: CTT
aaacaaaaagttctttaagt

SEQ ID NO: 40882 - DNA, 20 bp, Artificial Sequence
  Description of Artificial Sequence: Synthetic oligonucleotide
  Target: SCNA; (-) strand; PAM type: YTN; PAM sequence: TTG
ggaccaaacacttaaacaaa

SEQ ID NO: 40883 - DNA, 20 bp, Artificial Sequence
  Description of Artificial Sequence: Synthetic oligonucleotide
  Target: SCNA; (-) strand; PAM type: YTN; PAM sequence: TTT
gggaccaaacacttaaacaa

SEQ ID NO: 40884 - DNA, 20 bp, Artificial Sequence
  Description of Artificial Sequence: Synthetic oligonucleotide
  Target: SCNA; (-) strand; PAM type: YTN; PAM sequence: TTA
tttgggaccaaacacttaaa

SEQ ID NO: 40885 - DNA, 20 bp, Artificial Sequence
  Description of Artificial Sequence: Synthetic oligonucleotide
  Target: SCNA; (-) strand; PAM type: YTN; PAM sequence: TTT
atttgggaccaaacacttaa

SEQ ID NO: 40886 - DNA, 20 bp, Artificial Sequence
  Description of Artificial Sequence: Synthetic oligonucleotide
  Target: SCNA; (-) strand; PAM type: YTN; PAM sequence: TTA
atagtttatttgggaccaaa

SEQ ID NO: 40887 - DNA, 20 bp, Artificial Sequence
  Description of Artificial Sequence: Synthetic oligonucleotide
  Target: SCNA; (-) strand; PAM type: YTN; PAM sequence: CTT
aatagtttatttgggaccaa

SEQ ID NO: 40888 - DNA, 20 bp, Artificial Sequence
  Description of Artificial Sequence: Synthetic oligonucleotide
  Target: SCNA; (-) strand; PAM type: YTN; PAM sequence: TTA
tatatcttaatagtttattt

SEQ ID NO: 40889 - DNA, 20 bp, Artificial Sequence
  Description of Artificial Sequence: Synthetic oligonucleotide
  Target: SCNA; (-) strand; PAM type: YTN; PAM sequence: TTT
atatatcttaatagtttatt

SEQ ID NO: 40890 - DNA, 20 bp, Artificial Sequence
  Description of Artificial Sequence: Synthetic oligonucleotide
  Target: SCNA; (-) strand; PAM type: YTN; PAM sequence: CTT
tatatatcttaatagtttat

SEQ ID NO: 40891 - DNA, 20 bp, Artificial Sequence
  Description of Artificial Sequence: Synthetic oligonucleotide
  Target: SCNA; (-) strand; PAM type: YTN; PAM sequence: TTA
ctttatatatcttaatagtt

SEQ ID NO: 40892 - DNA, 20 bp, Artificial Sequence
  Description of Artificial Sequence: Synthetic oligonucleotide
  Target: SCNA; (-) strand; PAM type: YTN; PAM sequence: TTG
agcagtgaattactttatat

SEQ ID NO: 40893 - DNA, 20 bp, Artificial Sequence
  Description of Artificial Sequence: Synthetic oligonucleotide
  Target: SCNA; (-) strand; PAM type: YTN; PAM sequence: TTT
gagcagtgaattactttata

SEQ ID NO: 40894 - DNA, 20 bp, Artificial Sequence
  Description of Artificial Sequence: Synthetic oligonucleotide
  Target: SCNA; (-) strand; PAM type: YTN; PAM sequence: TTT
tgagcagtgaattactttat

SEQ ID NO: 40895 - DNA, 20 bp, Artificial Sequence
  Description of Artificial Sequence: Synthetic oligonucleotide
  Target: SCNA; (-) strand; PAM type: YTN; PAM sequence: TTT
ttgagcagtgaattacttta

SEQ ID NO: 40896 - DNA, 20 bp, Artificial Sequence
  Description of Artificial Sequence: Synthetic oligonucleotide
  Target: SCNA; (-) strand; PAM type: YTN; PAM sequence: CTG
acggtaatttttgagcagtg

SEQ ID NO: 40897 - DNA, 20 bp, Artificial Sequence
  Description of Artificial Sequence: Synthetic oligonucleotide
  Target: SCNA; (-) strand; PAM type: YTN; PAM sequence: TTA
tctgacggtaatttttgagc

SEQ ID NO: 40898 - DNA, 20 bp, Artificial Sequence
  Description of Artificial Sequence: Synthetic oligonucleotide
  Target: SCNA; (-) strand; PAM type: YTN; PAM sequence: TTT
atctgacggtaatttttgag

SEQ ID NO: 40899 - DNA, 20 bp, Artificial Sequence
  Description of Artificial Sequence: Synthetic oligonucleotide
  Target: SCNA; (-) strand; PAM type: YTN; PAM sequence: TTA
atatttatctgacggtaatt

SEQ ID NO: 40900 - DNA, 20 bp, Artificial Sequence
  Description of Artificial Sequence: Synthetic oligonucleotide
  Target: SCNA; (-) strand; PAM type: YTN; PAM sequence: CTT
aatatttatctgacggtaat

SEQ ID NO: 40901 - DNA, 20 bp, Artificial Sequence
  Description of Artificial Sequence: Synthetic oligonucleotide
  Target: SCNA; (-) strand; PAM type: YTN; PAM sequence: TTC
ccttaatatttatctgacgg

SEQ ID NO: 40902 - DNA, 20 bp, Artificial Sequence
  Description of Artificial Sequence: Synthetic oligonucleotide
  Target: SCNA; (-) strand; PAM type: YTN; PAM sequence: CTT
cccttaatatttatctgacg

SEQ ID NO: 40903 - DNA, 20 bp, Artificial Sequence
  Description of Artificial Sequence: Synthetic oligonucleotide
  Target: SCNA; (-) strand; PAM type: YTN; PAM sequence: TTC
ttcccttaatatttatctga

SEQ ID NO: 40904 - DNA, 20 bp, Artificial Sequence
  Description of Artificial Sequence: Synthetic oligonucleotide
  Target: SCNA; (-) strand; PAM type: YTN; PAM sequence: TTT
cttcccttaatatttatctg

SEQ ID NO: 40905 - DNA, 20 bp, Artificial Sequence
  Description of Artificial Sequence: Synthetic oligonucleotide
  Target: SCNA; (-) strand; PAM type: YTN; PAM sequence: TTA
aagtgtttcttcccttaata

SEQ ID NO: 40906 - DNA, 20 bp, Artificial Sequence
  Description of Artificial Sequence: Synthetic oligonucleotide
  Target: SCNA; (-) strand; PAM type: YTN; PAM sequence: TTT
aaagtgtttcttcccttaat

SEQ ID NO: 40907 - DNA, 20 bp, Artificial Sequence
  Description of Artificial Sequence: Synthetic oligonucleotide
  Target: SCNA; (-) strand; PAM type: YTN; PAM sequence: CTT
taaagtgtttcttcccttaa

SEQ ID NO: 40908 - DNA, 20 bp, Artificial Sequence
  Description of Artificial Sequence: Synthetic oligonucleotide
  Target: SCNA; (-) strand; PAM type: YTN; PAM sequence: CTC
ctttaaagtgtttcttccct

SEQ ID NO: 40909 - DNA, 20 bp, Artificial Sequence
  Description of Artificial Sequence: Synthetic oligonucleotide
  Target: SCNA; (-) strand; PAM type: YTN; PAM sequence: TTC
tcctttaaagtgtttcttcc

SEQ ID NO: 40910 - DNA, 20 bp, Artificial Sequence
  Description of Artificial Sequence: Synthetic oligonucleotide
  Target: SCNA; (-) strand; PAM type: YTN; PAM sequence: TTA
tgtggatacaaattctcctt

SEQ ID NO: 40911 - DNA, 20 bp, Artificial Sequence
  Description of Artificial Sequence: Synthetic oligonucleotide
  Target: SCNA; (-) strand; PAM type: YTN; PAM sequence: TTT
atgtggatacaaattctcct

SEQ ID NO: 40912 - DNA, 20 bp, Artificial Sequence
  Description of Artificial Sequence: Synthetic oligonucleotide
  Target: SCNA; (-) strand; PAM type: YTN; PAM sequence: TTA
aggatttatgtggatacaaa

SEQ ID NO: 40913 - DNA, 20 bp, Artificial Sequence
  Description of Artificial Sequence: Synthetic oligonucleotide
  Target: SCNA; (-) strand; PAM type: YTN; PAM sequence: TTT
aaggatttatgtggatacaa

SEQ ID NO: 40914 - DNA, 20 bp, Artificial Sequence
  Description of Artificial Sequence: Synthetic oligonucleotide
  Target: SCNA; (-) strand; PAM type: YTN; PAM sequence: TTG
tgaccatgaatttaaggatt

SEQ ID NO: 40915 - DNA, 20 bp, Artificial Sequence
  Description of Artificial Sequence: Synthetic oligonucleotide
  Target: SCNA; (-) strand; PAM type: YTN; PAM sequence: TTA
ggaaagttgtgaccatgaat

SEQ ID NO: 40916 - DNA, 20 bp, Artificial Sequence
  Description of Artificial Sequence: Synthetic oligonucleotide
  Target: SCNA; (-) strand; PAM type: YTN; PAM sequence: TTG
agattaggaaagttgtgacc

SEQ ID NO: 40917 - DNA, 20 bp, Artificial Sequence
  Description of Artificial Sequence: Synthetic oligonucleotide
  Target: SCNA; (-) strand; PAM type: YTN; PAM sequence: TTT
gagattaggaaagttgtgac

SEQ ID NO: 40918 - DNA, 20 bp, Artificial Sequence
  Description of Artificial Sequence: Synthetic oligonucleotide
  Target: SCNA; (-) strand; PAM type: YTN; PAM sequence: CTA
gaacaatttgagattaggaa

SEQ ID NO: 40919 - DNA, 20 bp, Artificial Sequence
  Description of Artificial Sequence: Synthetic oligonucleotide
  Target: SCNA; (-) strand; PAM type: YTN; PAM sequence: CTG
atagcagtgacctagaacaa

SEQ ID NO: 40920 - DNA, 20 bp, Artificial Sequence
  Description of Artificial Sequence: Synthetic oligonucleotide
  Target: SCNA; (-) strand; PAM type: YTN; PAM sequence: CTA
gactgatagcagtgacctag

SEQ ID NO: 40921 - DNA, 20 bp, Artificial Sequence
  Description of Artificial Sequence: Synthetic oligonucleotide
  Target: SCNA; (-) strand; PAM type: YTN; PAM sequence: TTA
agaaatagaggacagaacta

SEQ ID NO: 40922 - DNA, 20 bp, Artificial Sequence
  Description of Artificial Sequence: Synthetic oligonucleotide
  Target: SCNA; (-) strand; PAM type: YTN; PAM sequence: TTA
aattaagaaatagaggacag

SEQ ID NO: 40923 - DNA, 20 bp, Artificial Sequence
  Description of Artificial Sequence: Synthetic oligonucleotide
  Target: SCNA; (-) strand; PAM type: YTN; PAM sequence: TTG
gtattaaattaagaaataga

SEQ ID NO: 40924 - DNA, 20 bp, Artificial Sequence
  Description of Artificial Sequence: Synthetic oligonucleotide
  Target: SCNA; (-) strand; PAM type: YTN; PAM sequence: TTA
aaagtattggtattaaatta

SEQ ID NO: 40925 - DNA, 20 bp, Artificial Sequence
  Description of Artificial Sequence: Synthetic oligonucleotide
  Target: SCNA; (-) strand; PAM type: YTN; PAM sequence: TTT
aaaagtattggtattaaatt

SEQ ID NO: 40926 - DNA, 20 bp, Artificial Sequence
  Description of Artificial Sequence: Synthetic oligonucleotide
  Target: SCNA; (-) strand; PAM type: YTN; PAM sequence: TTA
aaaatttaaaagtattggta

SEQ ID NO: 40927 - DNA, 20 bp, Artificial Sequence
  Description of Artificial Sequence: Synthetic oligonucleotide
  Target: SCNA; (-) strand; PAM type: YTN; PAM sequence: TTT
aaaaatttaaaagtattggt

SEQ ID NO: 40928 - DNA, 20 bp, Artificial Sequence
  Description of Artificial Sequence: Synthetic oligonucleotide
  Target: SCNA; (-) strand; PAM type: YTN; PAM sequence: TTT
taaaaatttaaaagtattgg

SEQ ID NO: 40929 - DNA, 20 bp, Artificial Sequence
  Description of Artificial Sequence: Synthetic oligonucleotide
  Target: SCNA; (-) strand; PAM type: YTN; PAM sequence: CTA
aagcagcatattttaaaaat

SEQ ID NO: 40930 - DNA, 20 bp, Artificial Sequence
  Description of Artificial Sequence: Synthetic oligonucleotide
  Target: SCNA; (-) strand; PAM type: YTN; PAM sequence: CTA
cctaaagcagcatattttaa

SEQ ID NO: 40931 - DNA, 20 bp, Artificial Sequence
  Description of Artificial Sequence: Synthetic oligonucleotide
  Target: SCNA; (-) strand; PAM type: YTN; PAM sequence: TTA
aatctacctaaagcagcata

SEQ ID NO: 40932 - DNA, 20 bp, Artificial Sequence
  Description of Artificial Sequence: Synthetic oligonucleotide
  Target: SCNA; (-) strand; PAM type: YTN; PAM sequence: TTT
aaatctacctaaagcagcat

SEQ ID NO: 40933 - DNA, 20 bp, Artificial Sequence
  Description of Artificial Sequence: Synthetic oligonucleotide
  Target: SCNA; (-) strand; PAM type: YTN; PAM sequence: TTT
taaatctacctaaagcagca

SEQ ID NO: 40934 - DNA, 20 bp, Artificial Sequence
  Description of Artificial Sequence: Synthetic oligonucleotide
  Target: SCNA; (-) strand; PAM type: YTN; PAM sequence: TTA
ggatatattttaaatctacc

SEQ ID NO: 40935 - DNA, 20 bp, Artificial Sequence
  Description of Artificial Sequence: Synthetic oligonucleotide
  Target: SCNA; (-) strand; PAM type: YTN; PAM sequence: TTA
gaaagtggcggttaggatat

SEQ ID NO: 40936 - DNA, 20 bp, Artificial Sequence
  Description of Artificial Sequence: Synthetic oligonucleotide
  Target: SCNA; (-) strand; PAM type: YTN; PAM sequence: TTC
aggaaggttagaaagtggcg

SEQ ID NO: 40937 - DNA, 20 bp, Artificial Sequence
  Description of Artificial Sequence: Synthetic oligonucleotide
  Target: SCNA; (-) strand; PAM type: YTN; PAM sequence: TTT
caggaaggttagaaagtggc

SEQ ID NO: 40938 - DNA, 20 bp, Artificial Sequence
  Description of Artificial Sequence: Synthetic oligonucleotide
  Target: SCNA; (-) strand; PAM type: YTN; PAM sequence: TTG
aacagtatatttcaggaagg

SEQ ID NO: 40939 - DNA, 20 bp, Artificial Sequence
  Description of Artificial Sequence: Synthetic oligonucleotide
  Target: SCNA; (-) strand; PAM type: YTN; PAM sequence: TTA
ttgaacagtatatttcagga

SEQ ID NO: 40940 - DNA, 20 bp, Artificial Sequence
  Description of Artificial Sequence: Synthetic oligonucleotide
  Target: SCNA; (-) strand; PAM type: YTN; PAM sequence: TTG
ttattgaacagtatatttca

SEQ ID NO: 40941 - DNA, 20 bp, Artificial Sequence
  Description of Artificial Sequence: Synthetic oligonucleotide
  Target: SCNA; (-) strand; PAM type: YTN; PAM sequence: TTT
gttattgaacagtatatttc

SEQ ID NO: 40942 - DNA, 20 bp, Artificial Sequence
  Description of Artificial Sequence: Synthetic oligonucleotide
  Target: SCNA; (-) strand; PAM type: YTN; PAM sequence: TTA
agcaaggaaaggatttgtta

SEQ ID NO: 40943 - DNA, 20 bp, Artificial Sequence
  Description of Artificial Sequence: Synthetic oligonucleotide
  Target: SCNA; (-) strand; PAM type: YTN; PAM sequence: TTT
aagcaaggaaaggatttgtt

SEQ ID NO: 40944 - DNA, 20 bp, Artificial Sequence
  Description of Artificial Sequence: Synthetic oligonucleotide
  Target: SCNA; (-) strand; PAM type: YTN; PAM sequence: TTA
tgtttaagcaaggaaaggat

SEQ ID NO: 40945 - DNA, 20 bp, Artificial Sequence
  Description of Artificial Sequence: Synthetic oligonucleotide
  Target: SCNA; (-) strand; PAM type: YTN; PAM sequence: TTA
agttatgtttaagcaaggaa

SEQ ID NO: 40946 - DNA, 20 bp, Artificial Sequence
  Description of Artificial Sequence: Synthetic oligonucleotide
  Target: SCNA; (-) strand; PAM type: YTN; PAM sequence: TTT
aagttatgtttaagcaagga

SEQ ID NO: 40947 - DNA, 20 bp, Artificial Sequence
  Description of Artificial Sequence: Synthetic oligonucleotide
  Target: SCNA; (-) strand; PAM type: YTN; PAM sequence: TTA
tttaagttatgtttaagcaa

SEQ ID NO: 40948 - DNA, 20 bp, Artificial Sequence
  Description of Artificial Sequence: Synthetic oligonucleotide
  Target: SCNA; (-) strand; PAM type: YTN; PAM sequence: TTT
atttaagttatgtttaagca

SEQ ID NO: 40949 - DNA, 20 bp, Artificial Sequence
  Description of Artificial Sequence: Synthetic oligonucleotide
  Target: SCNA; (-) strand; PAM type: YTN; PAM sequence: TTT
tatttaagttatgtttaagc

SEQ ID NO: 40950 - DNA, 20 bp, Artificial Sequence
  Description of Artificial Sequence: Synthetic oligonucleotide
  Target: SCNA; (-) strand; PAM type: YTN; PAM sequence: TTG
ttttatttaagttatgttta

SEQ ID NO: 40951 - DNA, 20 bp, Artificial Sequence
  Description of Artificial Sequence: Synthetic oligonucleotide
  Target: SCNA; (-) strand; PAM type: YTN; PAM sequence: CTT
gttttatttaagttatgttt

SEQ ID NO: 40952 - DNA, 20 bp, Artificial Sequence
  Description of Artificial Sequence: Synthetic oligonucleotide
  Target: SCNA; (-) strand; PAM type: YTN; PAM sequence: TTC
ttgttttatttaagttatgt

SEQ ID NO: 40953 - DNA, 20 bp, Artificial Sequence
  Description of Artificial Sequence: Synthetic oligonucleotide
  Target: SCNA; (-) strand; PAM type: YTN; PAM sequence: TTT
cttgttttatttaagttatg

SEQ ID NO: 40954 - DNA, 20 bp, Artificial Sequence
  Description of Artificial Sequence: Synthetic oligonucleotide
  Target: SCNA; (-) strand; PAM type: YTN; PAM sequence: CTA
gagagaaatggtaagtttct

SEQ ID NO: 40955 - DNA, 20 bp, Artificial Sequence
  Description of Artificial Sequence: Synthetic oligonucleotide
  Target: SCNA; (-) strand; PAM type: YTN; PAM sequence: TTA
cactagagagaaatggtaag

SEQ ID NO: 40956 - DNA, 20 bp, Artificial Sequence
  Description of Artificial Sequence: Synthetic oligonucleotide
  Target: SCNA; (-) strand; PAM type: YTN; PAM sequence: CTT
acactagagagaaatggtaa

SEQ ID NO: 40957 - DNA, 20 bp, Artificial Sequence
  Description of Artificial Sequence: Synthetic oligonucleotide
  Target: SCNA; (-) strand; PAM type: YTN; PAM sequence: CTG
catgtgtcatcttacactag

SEQ ID NO: 40958 - DNA, 20 bp, Artificial Sequence
  Description of Artificial Sequence: Synthetic oligonucleotide
  Target: SCNA; (-) strand; PAM type: YTN; PAM sequence: CTA
agctgcatgtgtcatcttac

SEQ ID NO: 40959 - DNA, 20 bp, Artificial Sequence
  Description of Artificial Sequence: Synthetic oligonucleotide
  Target: SCNA; (-) strand; PAM type: YTN; PAM sequence: CTA
cagagtgctaagctgcatgt

SEQ ID NO: 40960 - DNA, 20 bp, Artificial Sequence
  Description of Artificial Sequence: Synthetic oligonucleotide
  Target: SCNA; (-) strand; PAM type: YTN; PAM sequence: CTA
ctacagagtgctaagctgca

SEQ ID NO: 40961 - DNA, 20 bp, Artificial Sequence
  Description of Artificial Sequence: Synthetic oligonucleotide
  Target: SCNA; (-) strand; PAM type: YTN; PAM sequence: TTG
aagagagactactacagagt

SEQ ID NO: 40962 - DNA, 20 bp, Artificial Sequence
  Description of Artificial Sequence: Synthetic oligonucleotide
  Target: SCNA; (-) strand; PAM type: YTN; PAM sequence: CTA
attgaagagagactactaca

SEQ ID NO: 40963 - DNA, 20 bp, Artificial Sequence
  Description of Artificial Sequence: Synthetic oligonucleotide
  Target: SCNA; (-) strand; PAM type: YTN; PAM sequence: TTA
cctaattgaagagagactac

SEQ ID NO: 40964 - DNA, 20 bp, Artificial Sequence
  Description of Artificial Sequence: Synthetic oligonucleotide
  Target: SCNA; (-) strand; PAM type: YTN; PAM sequence: TTT
acctaattgaagagagacta

SEQ ID NO: 40965 - DNA, 20 bp, Artificial Sequence
  Description of Artificial Sequence: Synthetic oligonucleotide
  Target: SCNA; (-) strand; PAM type: YTN; PAM sequence: TTT
tacctaattgaagagagact

SEQ ID NO: 40966 - DNA, 20 bp, Artificial Sequence
  Description of Artificial Sequence: Synthetic oligonucleotide
  Target: SCNA; (-) strand; PAM type: YTN; PAM sequence: TTT
ttacctaattgaagagagac

SEQ ID NO: 40967 - DNA, 20 bp, Artificial Sequence
  Description of Artificial Sequence: Synthetic oligonucleotide
  Target: SCNA; (-) strand; PAM type: YTN; PAM sequence: TTT
tttacctaattgaagagaga

SEQ ID NO: 40968 - DNA, 20 bp, Artificial Sequence
  Description of Artificial Sequence: Synthetic oligonucleotide
  Target: SCNA; (-) strand; PAM type: YTN; PAM sequence: CTT
ttttacctaattgaagagag

SEQ ID NO: 40969 - DNA, 20 bp, Artificial Sequence
  Description of Artificial Sequence: Synthetic oligonucleotide
  Target: SCNA; (-) strand; PAM type: YTN; PAM sequence: TTC
cttttttacctaattgaaga

SEQ ID NO: 40970 - DNA, 20 bp, Artificial Sequence
  Description of Artificial Sequence: Synthetic oligonucleotide
  Target: SCNA; (-) strand; PAM type: YTN; PAM sequence: CTT
ccttttttacctaattgaag

SEQ ID NO: 40971 - DNA, 20 bp, Artificial Sequence
  Description of Artificial Sequence: Synthetic oligonucleotide
  Target: SCNA; (-) strand; PAM type: YTN; PAM sequence: TTA
ccatagaaacttcctttttt

SEQ ID NO: 40972 - DNA, 20 bp, Artificial Sequence
  Description of Artificial Sequence: Synthetic oligonucleotide
  Target: SCNA; (-) strand; PAM type: YTN; PAM sequence: CTA
taaggatggttaccatagaa

SEQ ID NO: 40973 - DNA, 20 bp, Artificial Sequence
  Description of Artificial Sequence: Synthetic oligonucleotide
  Target: SCNA; (-) strand; PAM type: YTN; PAM sequence: CTG
gtgaggaaggaaggaggaat

SEQ ID NO: 40974 - DNA, 20 bp, Artificial Sequence
  Description of Artificial Sequence: Synthetic oligonucleotide
  Target: SCNA; (-) strand; PAM type: YTN; PAM sequence: TTG
ggcgctggtgaggaaggaag

SEQ ID NO: 40975 - DNA, 20 bp, Artificial Sequence
  Description of Artificial Sequence: Synthetic oligonucleotide
  Target: SCNA; (-) strand; PAM type: YTN; PAM sequence: TTC
atgagtaatgtgatatatat

SEQ ID NO: 40976 - DNA, 20 bp, Artificial Sequence
  Description of Artificial Sequence: Synthetic oligonucleotide
  Target: SCNA; (-) strand; PAM type: YTN; PAM sequence: TTA
tatgtattcatgagtaatgt

SEQ ID NO: 40977 - DNA, 20 bp, Artificial Sequence
  Description of Artificial Sequence: Synthetic oligonucleotide
  Target: SCNA; (-) strand; PAM type: YTN; PAM sequence: TTT
atatgtattcatgagtaatg

SEQ ID NO: 40978 - DNA, 20 bp, Artificial Sequence
  Description of Artificial Sequence: Synthetic oligonucleotide
  Target: SCNA; (-) strand; PAM type: YTN; PAM sequence: CTA
gcagtttatatgtattcatg

SEQ ID NO: 40979 - DNA, 20 bp, Artificial Sequence
  Description of Artificial Sequence: Synthetic oligonucleotide
  Target: SCNA; (-) strand; PAM type: YTN; PAM sequence: CTA
gacatgctagcagtttatat

SEQ ID NO: 40980 - DNA, 20 bp, Artificial Sequence
  Description of Artificial Sequence: Synthetic oligonucleotide
  Target: SCNA; (-) strand; PAM type: YTN; PAM sequence: TTC
tagacatgctagcagtttat

SEQ ID NO: 40981 - DNA, 20 bp, Artificial Sequence
  Description of Artificial Sequence: Synthetic oligonucleotide
  Target: SCNA; (-) strand; PAM type: YTN; PAM sequence: TTC
aagacagaatattctagaca

SEQ ID NO: 40982 - DNA, 20 bp, Artificial Sequence
  Description of Artificial Sequence: Synthetic oligonucleotide
  Target: SCNA; (-) strand; PAM type: YTN; PAM sequence: TTT
caagacagaatattctagac

SEQ ID NO: 40983 - DNA, 20 bp, Artificial Sequence
  Description of Artificial Sequence: Synthetic oligonucleotide
  Target: SCNA; (-) strand; PAM type: YTN; PAM sequence: CTA
gtagaaagtataatttcaag

SEQ ID NO: 40984 - DNA, 20 bp, Artificial Sequence
  Description of Artificial Sequence: Synthetic oligonucleotide
  Target: SCNA; (-) strand; PAM type: YTN; PAM sequence: CTA
aaagtcactagtagaaagta

SEQ ID NO: 40985 - DNA, 20 bp, Artificial Sequence
  Description of Artificial Sequence: Synthetic oligonucleotide
  Target: SCNA; (-) strand; PAM type: YTN; PAM sequence: TTC
taaaagtcactagtagaaag

SEQ ID NO: 40986 - DNA, 20 bp, Artificial Sequence
  Description of Artificial Sequence: Synthetic oligonucleotide
  Target: SCNA; (-) strand; PAM type: YTN; PAM sequence: TTT
ctaaaagtcactagtagaaa

SEQ ID NO: 40987 - DNA, 20 bp, Artificial Sequence
  Description of Artificial Sequence: Synthetic oligonucleotide
  Target: SCNA; (-) strand; PAM type: YTN; PAM sequence: CTG
gggcatagtcatttctaaaa

SEQ ID NO: 40988 - DNA, 20 bp, Artificial Sequence
  Description of Artificial Sequence: Synthetic oligonucleotide
  Target: SCNA; (-) strand; PAM type: YTN; PAM sequence: TTC
tggggcatagtcatttctaa

SEQ ID NO: 40989 - DNA, 20 bp, Artificial Sequence
  Description of Artificial Sequence: Synthetic oligonucleotide
  Target: SCNA; (-) strand; PAM type: YTN; PAM sequence: TTA
ttctggggcatagtcatttc

SEQ ID NO: 40990 - DNA, 20 bp, Artificial Sequence
  Description of Artificial Sequence: Synthetic oligonucleotide
  Target: SCNA; (-) strand; PAM type: YTN; PAM sequence: TTA
attattctggggcatagtca

SEQ ID NO: 40991 - DNA, 20 bp, Artificial Sequence
  Description of Artificial Sequence: Synthetic oligonucleotide
  Target: SCNA; (-) strand; PAM type: YTN; PAM sequence: TTT
aattattctggggcatagtc

SEQ ID NO: 40992 - DNA, 20 bp, Artificial Sequence
  Description of Artificial Sequence: Synthetic oligonucleotide
  Target: SCNA; (-) strand; PAM type: YTN; PAM sequence: TTT
taattattctggggcatagt

SEQ ID NO: 40993 - DNA, 20 bp, Artificial Sequence
  Description of Artificial Sequence: Synthetic oligonucleotide
  Target: SCNA; (-) strand; PAM type: YTN; PAM sequence: TTT
ttaattattctggggcatag

SEQ ID NO: 40994 - DNA, 20 bp, Artificial Sequence
  Description of Artificial Sequence: Synthetic oligonucleotide
  Target: SCNA; (-) strand; PAM type: YTN; PAM sequence: CTT
tttaattattctggggcata

SEQ ID NO: 40995 - DNA, 20 bp, Artificial Sequence
  Description of Artificial Sequence: Synthetic oligonucleotide
  Target: SCNA; (-) strand; PAM type: YTN; PAM sequence: CTC
tttttaattattctggggca

SEQ ID NO: 40996 - DNA, 20 bp, Artificial Sequence
  Description of Artificial Sequence: Synthetic oligonucleotide
  Target: SCNA; (-) strand; PAM type: YTN; PAM sequence: TTC
tctttttaattattctgggg

SEQ ID NO: 40997 - DNA, 20 bp, Artificial Sequence
  Description of Artificial Sequence: Synthetic oligonucleotide
  Target: SCNA; (-) strand; PAM type: YTN; PAM sequence: TTT
ctctttttaattattctggg

SEQ ID NO: 40998 - DNA, 20 bp, Artificial Sequence
  Description of Artificial Sequence: Synthetic oligonucleotide
  Target: SCNA; (-) strand; PAM type: YTN; PAM sequence: TTG
gtttctctttttaattattc

SEQ ID NO: 40999 - DNA, 20 bp, Artificial Sequence
  Description of Artificial Sequence: Synthetic oligonucleotide
  Target: SCNA; (-) strand; PAM type: YTN; PAM sequence: TTT
ggtttctctttttaattatt

SEQ ID NO: 41000 - DNA, 20 bp, Artificial Sequence
  Description of Artificial Sequence: Synthetic oligonucleotide
  Target: SCNA; (-) strand; PAM type: YTN; PAM sequence: TTA
tttggtttctctttttaatt

SEQ ID NO: 41001 - DNA, 20 bp, Artificial Sequence
  Description of Artificial Sequence: Synthetic oligonucleotide
  Target: SCNA; (-) strand; PAM type: YTN; PAM sequence: TTA
aaaattatttggtttctctt

SEQ ID NO: 41002 - DNA, 20 bp, Artificial Sequence
  Description of Artificial Sequence: Synthetic oligonucleotide
  Target: SCNA; (-) strand; PAM type: YTN; PAM sequence: TTT
aaaaattatttggtttctct

SEQ ID NO: 41003 - DNA, 20 bp, Artificial Sequence
  Description of Artificial Sequence: Synthetic oligonucleotide
  Target: SCNA; (-) strand; PAM type: YTN; PAM sequence: TTA
atttaaaaattatttggttt

SEQ ID NO: 41004 - DNA, 20 bp, Artificial Sequence
  Description of Artificial Sequence: Synthetic oligonucleotide
  Target: SCNA; (-) strand; PAM type: YTN; PAM sequence: CTG
tataaattaatttaaaaatt

SEQ ID NO: 41005 - DNA, 20 bp, Artificial Sequence
  Description of Artificial Sequence: Synthetic oligonucleotide
  Target: SCNA; (-) strand; PAM type: YTN; PAM sequence: CTC
tgtataaattaatttaaaaa

SEQ ID NO: 41006 - DNA, 20 bp, Artificial Sequence
  Description of Artificial Sequence: Synthetic oligonucleotide
  Target: SCNA; (-) strand; PAM type: YTN; PAM sequence: TTG
atggtgaaaaactctgtata

SEQ ID NO: 41007 - DNA, 20 bp, Artificial Sequence
  Description of Artificial Sequence: Synthetic oligonucleotide
  Target: SCNA; (-) strand; PAM type: YTN; PAM sequence: CTT
gatggtgaaaaactctgtat

SEQ ID NO: 41008 - DNA, 20 bp, Artificial Sequence
  Description of Artificial Sequence: Synthetic oligonucleotide
  Target: SCNA; (-) strand; PAM type: YTN; PAM sequence: CTG
aaaataaacttgatggtgaa

SEQ ID NO: 41009 - DNA, 20 bp, Artificial Sequence
  Description of Artificial Sequence: Synthetic oligonucleotide
  Target: SCNA; (-) strand; PAM type: YTN; PAM sequence: CTC
cccatgggtgctgaaaataa

SEQ ID NO: 41010 - DNA, 20 bp, Artificial Sequence
  Description of Artificial Sequence: Synthetic oligonucleotide
  Target: SCNA; (-) strand; PAM type: YTN; PAM sequence: TTA
actccccatgggtgctgaaa

SEQ ID NO: 41011 - DNA, 20 bp, Artificial Sequence
  Description of Artificial Sequence: Synthetic oligonucleotide
  Target: SCNA; (-) strand; PAM type: YTN; PAM sequence: CTA
ttaactccccatgggtgctg

SEQ ID NO: 41012 - DNA, 20 bp, Artificial Sequence
  Description of Artificial Sequence: Synthetic oligonucleotide
  Target: SCNA; (-) strand; PAM type: YTN; PAM sequence: TTC
agggaagatctattaactcc

SEQ ID NO: 41013 - DNA, 20 bp, Artificial Sequence
  Description of Artificial Sequence: Synthetic oligonucleotide
  Target: SCNA; (-) strand; PAM type: YTN; PAM sequence: TTT
cagggaagatctattaactc

SEQ ID NO: 41014 - DNA, 20 bp, Artificial Sequence
  Description of Artificial Sequence: Synthetic oligonucleotide
  Target: SCNA; (-) strand; PAM type: YTN; PAM sequence: CTT
tcagggaagatctattaact

SEQ ID NO: 41015 - DNA, 20 bp, Artificial Sequence
  Description of Artificial Sequence: Synthetic oligonucleotide
  Target: SCNA; (-) strand; PAM type: YTN; PAM sequence: CTC
tttcagggaagatctattaa

SEQ ID NO: 41016 - DNA, 20 bp, Artificial Sequence
  Description of Artificial Sequence: Synthetic oligonucleotide
  Target: SCNA; (-) strand; PAM type: YTN; PAM sequence: TTC
tctttcagggaagatctatt

SEQ ID NO: 41017 - DNA, 20 bp, Artificial Sequence
  Description of Artificial Sequence: Synthetic oligonucleotide
  Target: SCNA; (-) strand; PAM type: YTN; PAM sequence: TTT
ctctttcagggaagatctat

SEQ ID NO: 41018 - DNA, 20 bp, Artificial Sequence
  Description of Artificial Sequence: Synthetic oligonucleotide
  Target: SCNA; (-) strand; PAM type: YTN; PAM sequence: TTT
tctctttcagggaagatcta

SEQ ID NO: 41019 - DNA, 20 bp, Artificial Sequence
  Description of Artificial Sequence: Synthetic oligonucleotide
  Target: SCNA; (-) strand; PAM type: YTN; PAM sequence: TTT
ttctctttcagggaagatct

SEQ ID NO: 41020 - DNA, 20 bp, Artificial Sequence
  Description of Artificial Sequence: Synthetic oligonucleotide
  Target: SCNA; (-) strand; PAM type: YTN; PAM sequence: TTA
ggaaaggtttttctctttca

SEQ ID NO: 41021 - DNA, 20 bp, Artificial Sequence
  Description of Artificial Sequence: Synthetic oligonucleotide
  Target: SCNA; (-) strand; PAM type: YTN; PAM sequence: CTT
aggaaaggtttttctctttc

SEQ ID NO: 41022 - DNA, 20 bp, Artificial Sequence
  Description of Artificial Sequence: Synthetic oligonucleotide
  Target: SCNA; (-) strand; PAM type: YTN; PAM sequence: TTC
cttaggaaaggtttttctct

SEQ ID NO: 41023 - DNA, 20 bp, Artificial Sequence
  Description of Artificial Sequence: Synthetic oligonucleotide
  Target: SCNA; (-) strand; PAM type: YTN; PAM sequence: TTT
ccttaggaaaggtttttctc

SEQ ID NO: 41024 - DNA, 20 bp, Artificial Sequence
  Description of Artificial Sequence: Synthetic oligonucleotide
  Target: SCNA; (-) strand; PAM type: YTN; PAM sequence: TTT
tccttaggaaaggtttttct

SEQ ID NO: 41025 - DNA, 20 bp, Artificial Sequence
  Description of Artificial Sequence: Synthetic oligonucleotide
  Target: SCNA; (-) strand; PAM type: YTN; PAM sequence: TTT
ttccttaggaaaggtttttc

SEQ ID NO: 41026 - DNA, 20 bp, Artificial Sequence
  Description of Artificial Sequence: Synthetic oligonucleotide
  Target: SCNA; (-) strand; PAM type: YTN; PAM sequence: CTA
ggatttttccttaggaaagg

SEQ ID NO: 41027 - DNA, 20 bp, Artificial Sequence
  Description of Artificial Sequence: Synthetic oligonucleotide
  Target: SCNA; (-) strand; PAM type: YTN; PAM sequence: TTC
taggatttttccttaggaaa

SEQ ID NO: 41028 - DNA, 20 bp, Artificial Sequence
  Description of Artificial Sequence: Synthetic oligonucleotide
  Target: SCNA; (-) strand; PAM type: YTN; PAM sequence: TTG
ccaaatatatgaattctagg

SEQ ID NO: 41029 - DNA, 20 bp, Artificial Sequence
  Description of Artificial Sequence: Synthetic oligonucleotide
  Target: SCNA; (-) strand; PAM type: YTN; PAM sequence: TTA
aatgttgccaaatatatgaa

SEQ ID NO: 41030 - DNA, 20 bp, Artificial Sequence
  Description of Artificial Sequence: Synthetic oligonucleotide
  Target: SCNA; (-) strand; PAM type: YTN; PAM sequence: TTT
aaatgttgccaaatatatga

SEQ ID NO: 41031 - DNA, 20 bp, Artificial Sequence
  Description of Artificial Sequence: Synthetic oligonucleotide
  Target: SCNA; (-) strand; PAM type: YTN; PAM sequence: CTT
taaatgttgccaaatatatg

SEQ ID NO: 41032 - DNA, 20 bp, Artificial Sequence
  Description of Artificial Sequence: Synthetic oligonucleotide
  Target: SCNA; (-) strand; PAM type: YTN; PAM sequence: CTC
ctttaaatgttgccaaatat

SEQ ID NO: 41033 - DNA, 20 bp, Artificial Sequence
  Description of Artificial Sequence: Synthetic oligonucleotide
  Target: SCNA; (-) strand; PAM type: YTN; PAM sequence: TTC
atggcctcctttaaatgttg

SEQ ID NO: 41034 - DNA, 20 bp, Artificial Sequence
  Description of Artificial Sequence: Synthetic oligonucleotide
  Target: SCNA; (-) strand; PAM type: YTN; PAM sequence: TTT
catggcctcctttaaatgtt

SEQ ID NO: 41035 - DNA, 20 bp, Artificial Sequence
  Description of Artificial Sequence: Synthetic oligonucleotide
  Target: SCNA; (-) strand; PAM type: YTN; PAM sequence: CTG
ataaaaatttcatggcctcc

SEQ ID NO: 41036 - DNA, 20 bp, Artificial Sequence
  Description of Artificial Sequence: Synthetic oligonucleotide
  Target: SCNA; (-) strand; PAM type: YTN; PAM sequence: CTA
gactgataaaaatttcatgg

SEQ ID NO: 41037 - DNA, 20 bp, Artificial Sequence
  Description of Artificial Sequence: Synthetic oligonucleotide
  Target: SCNA; (-) strand; PAM type: YTN; PAM sequence: CTC
tagactgataaaaatttcat

SEQ ID NO: 41038 - DNA, 20 bp, Artificial Sequence
  Description of Artificial Sequence: Synthetic oligonucleotide
  Target: SCNA; (-) strand; PAM type: YTN; PAM sequence: TTC
tctagactgataaaaatttc

SEQ ID NO: 41039 - DNA, 20 bp, Artificial Sequence
  Description of Artificial Sequence: Synthetic oligonucleotide
  Target: SCNA; (-) strand; PAM type: YTN; PAM sequence: TTA
aaggagatcaattctctaga

SEQ ID NO: 41040 - DNA, 20 bp, Artificial Sequence
  Description of Artificial Sequence: Synthetic oligonucleotide
  Target: SCNA; (-) strand; PAM type: YTN; PAM sequence: CTT
aaaggagatcaattctctag

SEQ ID NO: 41041 - DNA, 20 bp, Artificial Sequence
  Description of Artificial Sequence: Synthetic oligonucleotide
  Target: SCNA; (-) strand; PAM type: YTN; PAM sequence: CTA
ccagagtcaccttaaaggag

SEQ ID NO: 41042 - DNA, 20 bp, Artificial Sequence
  Description of Artificial Sequence: Synthetic oligonucleotide
  Target: SCNA; (-) strand; PAM type: YTN; PAM sequence: TTG
gaactaccagagtcacctta

SEQ ID NO: 41043 - DNA, 20 bp, Artificial Sequence
  Description of Artificial Sequence: Synthetic oligonucleotide
  Target: SCNA; (-) strand; PAM type: YTN; PAM sequence: TTA
aacatcgttggaactaccag

SEQ ID NO: 41044 - DNA, 20 bp, Artificial Sequence
  Description of Artificial Sequence: Synthetic oligonucleotide
  Target: SCNA; (-) strand; PAM type: YTN; PAM sequence: TTT
aaacatcgttggaactacca

SEQ ID NO: 41045 - DNA, 20 bp, Artificial Sequence
  Description of Artificial Sequence: Synthetic oligonucleotide
  Target: SCNA; (-) strand; PAM type: YTN; PAM sequence: CTT
taaacatcgttggaactacc

SEQ ID NO: 41046 - DNA, 20 bp, Artificial Sequence
  Description of Artificial Sequence: Synthetic oligonucleotide
  Target: SCNA; (-) strand; PAM type: YTN; PAM sequence: TTA
caggaaatgcctttaaacat

SEQ ID NO: 41047 - DNA, 20 bp, Artificial Sequence
  Description of Artificial Sequence: Synthetic oligonucleotide
  Target: SCNA; (-) strand; PAM type: YTN; PAM sequence: TTT
acaggaaatgcctttaaaca

SEQ ID NO: 41048 - DNA, 20 bp, Artificial Sequence
  Description of Artificial Sequence: Synthetic oligonucleotide
  Target: SCNA; (-) strand; PAM type: YTN; PAM sequence: TTT
tacaggaaatgcctttaaac

SEQ ID NO: 41049 - DNA, 20 bp, Artificial Sequence
  Description of Artificial Sequence: Synthetic oligonucleotide
  Target: SCNA; (-) strand; PAM type: YTN; PAM sequence: TTT
ttacaggaaatgcctttaaa

SEQ ID NO: 41050 - DNA, 20 bp, Artificial Sequence
  Description of Artificial Sequence: Synthetic oligonucleotide
  Target: SCNA; (-) strand; PAM type: YTN; PAM sequence: TTT
tttacaggaaatgcctttaa

SEQ ID NO: 41051 - DNA, 20 bp, Artificial Sequence
  Description of Artificial Sequence: Synthetic oligonucleotide
  Target: SCNA; (-) strand; PAM type: YTN; PAM sequence: TTT
ttttacaggaaatgccttta

SEQ ID NO: 41052 - DNA, 20 bp, Artificial Sequence
  Description of Artificial Sequence: Synthetic oligonucleotide
  Target: SCNA; (-) strand; PAM type: YTN; PAM sequence: TTT
tttttacaggaaatgccttt

SEQ ID NO: 41053 - DNA, 20 bp, Artificial Sequence
  Description of Artificial Sequence: Synthetic oligonucleotide
  Target: SCNA; (-) strand; PAM type: YTN; PAM sequence: TTT
ttttttacaggaaatgcctt

SEQ ID NO: 41054 - DNA, 20 bp, Artificial Sequence
  Description of Artificial Sequence: Synthetic oligonucleotide
  Target: SCNA; (-) strand; PAM type: YTN; PAM sequence: TTT
tttttttacaggaaatgcct

SEQ ID NO: 41055 - DNA, 20 bp, Artificial Sequence
  Description of Artificial Sequence: Synthetic oligonucleotide
  Target: SCNA; (-) strand; PAM type: YTN; PAM sequence: TTT
ttttttttacaggaaatgcc

SEQ ID NO: 41056 - DNA, 20 bp, Artificial Sequence
  Description of Artificial Sequence: Synthetic oligonucleotide
  Target: SCNA; (-) strand; PAM type: YTN; PAM sequence: TTT
tttttttttacaggaaatgc

SEQ ID NO: 41057 - DNA, 20 bp, Artificial Sequence
  Description of Artificial Sequence: Synthetic oligonucleotide
  Target: SCNA; (-) strand; PAM type: YTN; PAM sequence: TTT
ttttttttttacaggaaatg

SEQ ID NO: 41058 - DNA, 20 bp, Artificial Sequence
  Description of Artificial Sequence: Synthetic oligonucleotide
  Target: SCNA; (-) strand; PAM type: YTN; PAM sequence: TTT
tttttttttttacaggaaat

SEQ ID NO: 41059 - DNA, 20 bp, Artificial Sequence
  Description of Artificial Sequence: Synthetic oligonucleotide
  Target: SCNA; (-) strand; PAM type: YTN; PAM sequence: TTT
ttttttttttttacaggaaa

SEQ ID NO: 41060 - DNA, 20 bp, Artificial Sequence
  Description of Artificial Sequence: Synthetic oligonucleotide
  Target: SCNA; (-) strand; PAM type: YTN; PAM sequence: TTT
tttttttttttttacaggaa

SEQ ID NO: 41061 - DNA, 20 bp, Artificial Sequence
  Description of Artificial Sequence: Synthetic oligonucleotide
  Target: SCNA; (-) strand; PAM type: YTN; PAM sequence: TTT
ttttttttttttttacagga

SEQ ID NO: 41062 - DNA, 20 bp, Artificial Sequence
  Description of Artificial Sequence: Synthetic oligonucleotide
  Target: SCNA; (-) strand; PAM type: YTN; PAM sequence: CTT
tttttttttttttttacagg

SEQ ID NO: 41063 - DNA, 20 bp, Artificial Sequence
  Description of Artificial Sequence: Synthetic oligonucleotide
  Target: SCNA; (-) strand; PAM type: YTN; PAM sequence: CTC
tttttttttttttttttaca

SEQ ID NO: 41064 - DNA, 20 bp, Artificial Sequence
  Description of Artificial Sequence: Synthetic oligonucleotide
  Target: SCNA; (-) strand; PAM type: YTN; PAM sequence: CTC
tcttttttttttttttttta

SEQ ID NO: 41065 - DNA, 20 bp, Artificial Sequence
  Description of Artificial Sequence: Synthetic oligonucleotide
  Target: SCNA; (-) strand; PAM type: YTN; PAM sequence: CTC
gctctctttttttttttttt

SEQ ID NO: 41066 - DNA, 20 bp, Artificial Sequence
  Description of Artificial Sequence: Synthetic oligonucleotide
  Target: SCNA; (-) strand; PAM type: YTN; PAM sequence: CTC
tcgctctctttttttttttt

SEQ ID NO: 41067 - DNA, 20 bp, Artificial Sequence
  Description of Artificial Sequence: Synthetic oligonucleotide
  Target: SCNA; (-) strand; PAM type: YTN; PAM sequence: TTC
tctcgctctctttttttttt

SEQ ID NO: 41068 - DNA, 20 bp, Artificial Sequence
  Description of Artificial Sequence: Synthetic oligonucleotide
  Target: SCNA; (-) strand; PAM type: YTN; PAM sequence: TTT
ctctcgctctcttttttttt

SEQ ID NO: 41069 - DNA, 20 bp, Artificial Sequence
  Description of Artificial Sequence: Synthetic oligonucleotide
  Target: SCNA; (-) strand; PAM type: YTN; PAM sequence: TTT
tctctcgctctctttttttt

SEQ ID NO: 41070 - DNA, 20 bp, Artificial Sequence
  Description of Artificial Sequence: Synthetic oligonucleotide
  Target: SCNA; (-) strand; PAM type: YTN; PAM sequence: TTT
ttctctcgctctcttttttt

SEQ ID NO: 41071 - DNA, 20 bp, Artificial Sequence
  Description of Artificial Sequence: Synthetic oligonucleotide
  Target: SCNA; (-) strand; PAM type: YTN; PAM sequence: CTT
tttctctcgctctctttttt

SEQ ID NO: 41072 - DNA, 20 bp, Artificial Sequence
  Description of Artificial Sequence: Synthetic oligonucleotide
  Target: SCNA; (-) strand; PAM type: YTN; PAM sequence: CTC
tttttctctcgctctctttt

SEQ ID NO: 41073 - DNA, 20 bp, Artificial Sequence
  Description of Artificial Sequence: Synthetic oligonucleotide
  Target: SCNA; (-) strand; PAM type: YTN; PAM sequence: CTC
tctttttctctcgctctctt

SEQ ID NO: 41074 - DNA, 20 bp, Artificial Sequence
  Description of Artificial Sequence: Synthetic oligonucleotide
  Target: SCNA; (-) strand; PAM type: YTN; PAM sequence: CTC
tctctttttctctcgctctc

SEQ ID NO: 41075 - DNA, 20 bp, Artificial Sequence
  Description of Artificial Sequence: Synthetic oligonucleotide
  Target: SCNA; (-) strand; PAM type: YTN; PAM sequence: CTC
tctctctttttctctcgctc

SEQ ID NO: 41076 - DNA, 20 bp, Artificial Sequence
  Description of Artificial Sequence: Synthetic oligonucleotide
  Target: SCNA; (-) strand; PAM type: YTN; PAM sequence: CTC
tctctctctttttctctcgc

SEQ ID NO: 41077 - DNA, 20 bp, Artificial Sequence
  Description of Artificial Sequence: Synthetic oligonucleotide
  Target: SCNA; (-) strand; PAM type: YTN; PAM sequence: CTC
tctctctctctttttctctc

SEQ ID NO: 41078 - DNA, 20 bp, Artificial Sequence
  Description of Artificial Sequence: Synthetic oligonucleotide
  Target: SCNA; (-) strand; PAM type: YTN; PAM sequence: CTC
tctctctctctctttttctc

SEQ ID NO: 41079 - DNA, 20 bp, Artificial Sequence
  Description of Artificial Sequence: Synthetic oligonucleotide
  Target: SCNA; (-) strand; PAM type: YTN; PAM sequence: CTC
tctctctctctctctttttc

SEQ ID NO: 41080 - DNA, 20 bp, Artificial Sequence
  Description of Artificial Sequence: Synthetic oligonucleotide
  Target: SCNA; (-) strand; PAM type: YTN; PAM sequence: TTC
tctctctctctctctctttt

SEQ ID NO: 41081 - DNA, 20 bp, Artificial Sequence
  Description of Artificial Sequence: Synthetic oligonucleotide
  Target: SCNA; (-) strand; PAM type: YTN; PAM sequence: TTA
atcatcagaaattctctctc

SEQ ID NO: 41082 - DNA, 20 bp, Artificial Sequence
  Description of Artificial Sequence: Synthetic oligonucleotide
  Target: SCNA; (-) strand; PAM type: YTN; PAM sequence: TTT
aatcatcagaaattctctct

SEQ ID NO: 41083 - DNA, 20 bp, Artificial Sequence
  Description of Artificial Sequence: Synthetic oligonucleotide
  Target: SCNA; (-) strand; PAM type: YTN; PAM sequence: TTT
taatcatcagaaattctctc

SEQ ID NO: 41084 - DNA, 20 bp, Artificial Sequence
  Description of Artificial Sequence: Synthetic oligonucleotide
  Target: SCNA; (-) strand; PAM type: YTN; PAM sequence: TTT
ttaatcatcagaaattctct

SEQ ID NO: 41085 - DNA, 20 bp, Artificial Sequence
  Description of Artificial Sequence: Synthetic oligonucleotide
  Target: SCNA; (-) strand; PAM type: YTN; PAM sequence: TTT
tttaatcatcagaaattctc

SEQ ID NO: 41086 - DNA, 20 bp, Artificial Sequence
  Description of Artificial Sequence: Synthetic oligonucleotide
  Target: SCNA; (-) strand; PAM type: YTN; PAM sequence: TTT
ttttaatcatcagaaattct

SEQ ID NO: 41087 - DNA, 20 bp, Artificial Sequence
  Description of Artificial Sequence: Synthetic oligonucleotide
  Target: SCNA; (-) strand; PAM type: YTN; PAM sequence: TTT
tttttaatcatcagaaattc

SEQ ID NO: 41088 - DNA, 20 bp, Artificial Sequence
  Description of Artificial Sequence: Synthetic oligonucleotide
  Target: SCNA; (-) strand; PAM type: YTN; PAM sequence: TTT
ttttttaatcatcagaaatt

SEQ ID NO: 41089 - DNA, 20 bp, Artificial Sequence
  Description of Artificial Sequence: Synthetic oligonucleotide
  Target: SCNA; (-) strand; PAM type: YTN; PAM sequence: TTT
tttttttaatcatcagaaat

SEQ ID NO: 41090 - DNA, 20 bp, Artificial Sequence
  Description of Artificial Sequence: Synthetic oligonucleotide
  Target: SCNA; (-) strand; PAM type: YTN; PAM sequence: TTT
ttttttttaatcatcagaaa

SEQ ID NO: 41091 - DNA, 20 bp, Artificial Sequence
  Description of Artificial Sequence: Synthetic oligonucleotide
  Target: SCNA; (-) strand; PAM type: YTN; PAM sequence: CTT
tttttttttaatcatcagaa

SEQ ID NO: 41092 - DNA, 20 bp, Artificial Sequence
  Description of Artificial Sequence: Synthetic oligonucleotide
  Target: SCNA; (-) strand; PAM type: YTN; PAM sequence: CTC
actttttttttttaatcatc

SEQ ID NO: 41093 - DNA, 20 bp, Artificial Sequence
  Description of Artificial Sequence: Synthetic oligonucleotide
  Target: SCNA; (-) strand; PAM type: YTN; PAM sequence: TTC
ctcactttttttttttaatc

SEQ ID NO: 41094 - DNA, 20 bp, Artificial Sequence
  Description of Artificial Sequence: Synthetic oligonucleotide
  Target: SCNA; (-) strand; PAM type: YTN; PAM sequence: CTC
agcattcctcactttttttt

SEQ ID NO: 41095 - DNA, 20 bp, Artificial Sequence
  Description of Artificial Sequence: Synthetic oligonucleotide
  Target: SCNA; (-) strand; PAM type: YTN; PAM sequence: TTA
actcagcattcctcactttt

SEQ ID NO: 41096 - DNA, 20 bp, Artificial Sequence
  Description of Artificial Sequence: Synthetic oligonucleotide
  Target: SCNA; (-) strand; PAM type: YTN; PAM sequence: TTT
aactcagcattcctcacttt

SEQ ID NO: 41097 - DNA, 20 bp, Artificial Sequence
  Description of Artificial Sequence: Synthetic oligonucleotide
  Target: SCNA; (-) strand; PAM type: YTN; PAM sequence: TTG
tttaactcagcattcctcac

SEQ ID NO: 41098 - DNA, 20 bp, Artificial Sequence
  Description of Artificial Sequence: Synthetic oligonucleotide
  Target: SCNA; (-) strand; PAM type: YTN; PAM sequence: TTT
gtttaactcagcattcctca

SEQ ID NO: 41099 - DNA, 20 bp, Artificial Sequence
  Description of Artificial Sequence: Synthetic oligonucleotide
  Target: SCNA; (-) strand; PAM type: YTN; PAM sequence: CTT
tgtttaactcagcattcctc

SEQ ID NO: 41100 - DNA, 20 bp, Artificial Sequence
  Description of Artificial Sequence: Synthetic oligonucleotide
  Target: SCNA; (-) strand; PAM type: YTN; PAM sequence: TTA
actttgtttaactcagcatt

SEQ ID NO: 41101 - DNA, 20 bp, Artificial Sequence
  Description of Artificial Sequence: Synthetic oligonucleotide
  Target: SCNA; (-) strand; PAM type: YTN; PAM sequence: CTG
agagaatgtggttaactttg

SEQ ID NO: 41102 - DNA, 20 bp, Artificial Sequence
  Description of Artificial Sequence: Synthetic oligonucleotide
  Target: SCNA; (-) strand; PAM type: YTN; PAM sequence: CTC
tgagagaatgtggttaactt

SEQ ID NO: 41103 - DNA, 20 bp, Artificial Sequence
  Description of Artificial Sequence: Synthetic oligonucleotide
  Target: SCNA; (-) strand; PAM type: YTN; PAM sequence: TTC
aaggctctgagagaatgtgg

SEQ ID NO: 41104 - DNA, 20 bp, Artificial Sequence
  Description of Artificial Sequence: Synthetic oligonucleotide
  Target: SCNA; (-) strand; PAM type: YTN; PAM sequence: TTA
gcacattcaaggctctgaga

SEQ ID NO: 41105 - DNA, 20 bp, Artificial Sequence
  Description of Artificial Sequence: Synthetic oligonucleotide
  Target: SCNA; (-) strand; PAM type: YTN; PAM sequence: TTA
gcacatattagcacattcaa

SEQ ID NO: 41106 - DNA, 20 bp, Artificial Sequence
  Description of Artificial Sequence: Synthetic oligonucleotide
  Target: SCNA; (-) strand; PAM type: YTN; PAM sequence: TTA
gagagccataagacacatta

SEQ ID NO: 41107 - DNA, 20 bp, Artificial Sequence
  Description of Artificial Sequence: Synthetic oligonucleotide
  Target: SCNA; (-) strand; PAM type: YTN; PAM sequence: CTT
agagagccataagacacatt

SEQ ID NO: 41108 - DNA, 20 bp, Artificial Sequence
  Description of Artificial Sequence: Synthetic oligonucleotide
  Target: SCNA; (-) strand; PAM type: YTN; PAM sequence: CTC
cttagagagccataagacac

SEQ ID NO: 41109 - DNA, 20 bp, Artificial Sequence
  Description of Artificial Sequence: Synthetic oligonucleotide
  Target: SCNA; (-) strand; PAM type: YTN; PAM sequence: CTA
caccctccttagagagccat

SEQ ID NO: 41110 - DNA, 20 bp, Artificial Sequence
  Description of Artificial Sequence: Synthetic oligonucleotide
  Target: SCNA; (-) strand; PAM type: YTN; PAM sequence: TTG
actacaccctccttagagag

SEQ ID NO: 41111 - DNA, 20 bp, Artificial Sequence
  Description of Artificial Sequence: Synthetic oligonucleotide
  Target: SCNA; (-) strand; PAM type: YTN; PAM sequence: TTT
gactacaccctccttagaga

SEQ ID NO: 41112 - DNA, 20 bp, Artificial Sequence
  Description of Artificial Sequence: Synthetic oligonucleotide
  Target: SCNA; (-) strand; PAM type: YTN; PAM sequence: TTT
tgactacaccctccttagag

SEQ ID NO: 41113 - DNA, 20 bp, Artificial Sequence
  Description of Artificial Sequence: Synthetic oligonucleotide
  Target: SCNA; (-) strand; PAM type: YTN; PAM sequence: CTA
agcagtgtagaagatgattt

SEQ ID NO: 41114 - DNA, 20 bp, Artificial Sequence
  Description of Artificial Sequence: Synthetic oligonucleotide
  Target: SCNA; (-) strand; PAM type: YTN; PAM sequence: TTC
ccgggaactaagcagtgtag

SEQ ID NO: 41115 - DNA, 20 bp, Artificial Sequence
  Description of Artificial Sequence: Synthetic oligonucleotide
  Target: SCNA; (-) strand; PAM type: YTN; PAM sequence: TTC
gaccatgaataaaaaaaaaa

SEQ ID NO: 41116 - DNA, 20 bp, Artificial Sequence
  Description of Artificial Sequence: Synthetic oligonucleotide
  Target: SCNA; (-) strand; PAM type: YTN; PAM sequence: CTG
acaataaataatattcgacc

SEQ ID NO: 41117 - DNA, 20 bp, Artificial Sequence
  Description of Artificial Sequence: Synthetic oligonucleotide
  Target: SCNA; (-) strand; PAM type: YTN; PAM sequence: TTC
tgacaataaataatattcga

SEQ ID NO: 41118 - DNA, 20 bp, Artificial Sequence
  Description of Artificial Sequence: Synthetic oligonucleotide
  Target: SCNA; (-) strand; PAM type: YTN; PAM sequence: TTT
ctgacaataaataatattcg

SEQ ID NO: 41119 - DNA, 20 bp, Artificial Sequence
  Description of Artificial Sequence: Synthetic oligonucleotide
  Target: SCNA; (-) strand; PAM type: YTN; PAM sequence: CTT
tctgacaataaataatattc

SEQ ID NO: 41120 - DNA, 20 bp, Artificial Sequence
  Description of Artificial Sequence: Synthetic oligonucleotide
  Target: SCNA; (-) strand; PAM type: YTN; PAM sequence: CTG
tacctttctgacaataaata

SEQ ID NO: 41121 - DNA, 20 bp, Artificial Sequence
  Description of Artificial Sequence: Synthetic oligonucleotide
  Target: SCNA; (-) strand; PAM type: YTN; PAM sequence: TTG
gtgtgaatgctgtacctttc

SEQ ID NO: 41122 - DNA, 20 bp, Artificial Sequence
  Description of Artificial Sequence: Synthetic oligonucleotide
  Target: SCNA; (-) strand; PAM type: YTN; PAM sequence: CTG
atattggtgtgaatgctgta

SEQ ID NO: 41123 - DNA, 20 bp, Artificial Sequence
  Description of Artificial Sequence: Synthetic oligonucleotide
  Target: SCNA; (-) strand; PAM type: YTN; PAM sequence: TTG
tctgatattggtgtgaatgc

SEQ ID NO: 41124 - DNA, 20 bp, Artificial Sequence
  Description of Artificial Sequence: Synthetic oligonucleotide
  Target: SCNA; (-) strand; PAM type: YTN; PAM sequence: TTT
gtctgatattggtgtgaatg

SEQ ID NO: 41125 - DNA, 20 bp, Artificial Sequence
  Description of Artificial Sequence: Synthetic oligonucleotide
  Target: SCNA; (-) strand; PAM type: YTN; PAM sequence: TTT
tgtctgatattggtgtgaat

SEQ ID NO: 41126 - DNA, 20 bp, Artificial Sequence
  Description of Artificial Sequence: Synthetic oligonucleotide
  Target: SCNA; (-) strand; PAM type: YTN; PAM sequence: CTA
ttttgtctgatattggtgtg

SEQ ID NO: 41127 - DNA, 20 bp, Artificial Sequence
  Description of Artificial Sequence: Synthetic oligonucleotide
  Target: SCNA; (-) strand; PAM type: YTN; PAM sequence: TTA
aaatctattttgtctgatat

SEQ ID NO: 41128 - DNA, 20 bp, Artificial Sequence
  Description of Artificial Sequence: Synthetic oligonucleotide
  Target: SCNA; (-) strand; PAM type: YTN; PAM sequence: TTA
gttaaaatctattttgtctg

SEQ ID NO: 41129 - DNA, 20 bp, Artificial Sequence
  Description of Artificial Sequence: Synthetic oligonucleotide
  Target: SCNA; (-) strand; PAM type: YTN; PAM sequence: TTT
agttaaaatctattttgtct

SEQ ID NO: 41130 - DNA, 20 bp, Artificial Sequence
  Description of Artificial Sequence: Synthetic oligonucleotide
  Target: SCNA; (-) strand; PAM type: YTN; PAM sequence: TTT
tagttaaaatctattttgtc

SEQ ID NO: 41131 - DNA, 20 bp, Artificial Sequence
  Description of Artificial Sequence: Synthetic oligonucleotide
  Target: SCNA; (-) strand; PAM type: YTN; PAM sequence: TTT
ttagttaaaatctattttgt

SEQ ID NO: 41132 - DNA, 20 bp, Artificial Sequence
  Description of Artificial Sequence: Synthetic oligonucleotide
  Target: SCNA; (-) strand; PAM type: YTN; PAM sequence: TTT
tttagttaaaatctattttg

SEQ ID NO: 41133 - DNA, 20 bp, Artificial Sequence
  Description of Artificial Sequence: Synthetic oligonucleotide
  Target: SCNA; (-) strand; PAM type: YTN; PAM sequence: CTC
gaaataattttttagttaaa

SEQ ID NO: 41134 - DNA, 20 bp, Artificial Sequence
  Description of Artificial Sequence: Synthetic oligonucleotide
  Target: SCNA; (-) strand; PAM type: YTN; PAM sequence: TTG
tctcgaaataattttttagt

SEQ ID NO: 41135 - DNA, 20 bp, Artificial Sequence
  Description of Artificial Sequence: Synthetic oligonucleotide
  Target: SCNA; (-) strand; PAM type: YTN; PAM sequence: TTT
gtctcgaaataattttttag

SEQ ID NO: 41136 - DNA, 20 bp, Artificial Sequence
  Description of Artificial Sequence: Synthetic oligonucleotide
  Target: SCNA; (-) strand; PAM type: YTN; PAM sequence: TTT
tgtctcgaaataatttttta

SEQ ID NO: 41137 - DNA, 20 bp, Artificial Sequence
  Description of Artificial Sequence: Synthetic oligonucleotide
  Target: SCNA; (-) strand; PAM type: YTN; PAM sequence: TTT
ttgtctcgaaataatttttt

SEQ ID NO: 41138 - DNA, 20 bp, Artificial Sequence
  Description of Artificial Sequence: Synthetic oligonucleotide
  Target: SCNA; (-) strand; PAM type: YTN; PAM sequence: TTA
tttttgtctcgaaataattt

SEQ ID NO: 41139 - DNA, 20 bp, Artificial Sequence
  Description of Artificial Sequence: Synthetic oligonucleotide
  Target: SCNA; (-) strand; PAM type: YTN; PAM sequence: TTG
ttatttttgtctcgaaataa

SEQ ID NO: 41140 - DNA, 20 bp, Artificial Sequence
  Description of Artificial Sequence: Synthetic oligonucleotide
  Target: SCNA; (-) strand; PAM type: YTN; PAM sequence: TTA
acatatattgttatttttgt

SEQ ID NO: 41141 - DNA, 20 bp, Artificial Sequence
  Description of Artificial Sequence: Synthetic oligonucleotide
  Target: SCNA; (-) strand; PAM type: YTN; PAM sequence: TTA
ttaacatatattgttatttt

SEQ ID NO: 41142 - DNA, 20 bp, Artificial Sequence
  Description of Artificial Sequence: Synthetic oligonucleotide
  Target: SCNA; (-) strand; PAM type: YTN; PAM sequence: TTT
attaacatatattgttattt

SEQ ID NO: 41143 - DNA, 20 bp, Artificial Sequence
  Description of Artificial Sequence: Synthetic oligonucleotide
  Target: SCNA; (-) strand; PAM type: YTN; PAM sequence: TTT
tattaacatatattgttatt

SEQ ID NO: 41144 - DNA, 20 bp, Artificial Sequence
  Description of Artificial Sequence: Synthetic oligonucleotide
  Target: SCNA; (-) strand; PAM type: YTN; PAM sequence: CTT
ttattaacatatattgttat

SEQ ID NO: 41145 - DNA, 20 bp, Artificial Sequence
  Description of Artificial Sequence: Synthetic oligonucleotide
  Target: SCNA; (-) strand; PAM type: YTN; PAM sequence: TTG
agccttttattaacatatat

SEQ ID NO: 41146 - DNA, 20 bp, Artificial Sequence
  Description of Artificial Sequence: Synthetic oligonucleotide
  Target: SCNA; (-) strand; PAM type: YTN; PAM sequence: TTA
attgagccttttattaacat

SEQ ID NO: 41147 - DNA, 20 bp, Artificial Sequence
  Description of Artificial Sequence: Synthetic oligonucleotide
  Target: SCNA; (-) strand; PAM type: YTN; PAM sequence: TTT
aattgagccttttattaaca

SEQ ID NO: 41148 - DNA, 20 bp, Artificial Sequence
  Description of Artificial Sequence: Synthetic oligonucleotide
  Target: SCNA; (-) strand; PAM type: YTN; PAM sequence: TTT
taattgagccttttattaac

SEQ ID NO: 41149 - DNA, 20 bp, Artificial Sequence
  Description of Artificial Sequence: Synthetic oligonucleotide
  Target: SCNA; (-) strand; PAM type: YTN; PAM sequence: TTT
ttaattgagccttttattaa

SEQ ID NO: 41150 - DNA, 20 bp, Artificial Sequence
  Description of Artificial Sequence: Synthetic oligonucleotide
  Target: SCNA; (-) strand; PAM type: YTN; PAM sequence: TTA
tacatttttaattgagcctt

SEQ ID NO: 41151 - DNA, 20 bp, Artificial Sequence
  Description of Artificial Sequence: Synthetic oligonucleotide
  Target: SCNA; (-) strand; PAM type: YTN; PAM sequence: TTG
ttatacatttttaattgagc

SEQ ID NO: 41152 - DNA, 20 bp, Artificial Sequence
  Description of Artificial Sequence: Synthetic oligonucleotide
  Target: SCNA; (-) strand; PAM type: YTN; PAM sequence: TTA
taattgttatacatttttaa

SEQ ID NO: 41153 - DNA, 20 bp, Artificial Sequence
  Description of Artificial Sequence: Synthetic oligonucleotide
  Target: SCNA; (-) strand; PAM type: YTN; PAM sequence: TTT
ataattgttatacattttta

SEQ ID NO: 41154 - DNA, 20 bp, Artificial Sequence
  Description of Artificial Sequence: Synthetic oligonucleotide
  Target: SCNA; (-) strand; PAM type: YTN; PAM sequence: TTG
atgtgtatgtgtttataatt

SEQ ID NO: 41155 - DNA, 20 bp, Artificial Sequence
  Description of Artificial Sequence: Synthetic oligonucleotide
  Target: SCNA; (-) strand; PAM type: YTN; PAM sequence: TTT
gatgtgtatgtgtttataat

SEQ ID NO: 41156 - DNA, 20 bp, Artificial Sequence
  Description of Artificial Sequence: Synthetic oligonucleotide
  Target: SCNA; (-) strand; PAM type: YTN; PAM sequence: TTG
tttgatgtgtatgtgtttat

SEQ ID NO: 41157 - DNA, 20 bp, Artificial Sequence
  Description of Artificial Sequence: Synthetic oligonucleotide
  Target: SCNA; (-) strand; PAM type: YTN; PAM sequence: CTG
ttgtttgatgtgtatgtgtt

SEQ ID NO: 41158 - DNA, 20 bp, Artificial Sequence
  Description of Artificial Sequence: Synthetic oligonucleotide
  Target: SCNA; (-) strand; PAM type: YTN; PAM sequence: TTG
gggaactgttgtttgatgtg

SEQ ID NO: 41159 - DNA, 20 bp, Artificial Sequence
  Description of Artificial Sequence: Synthetic oligonucleotide
  Target: SCNA; (-) strand; PAM type: YTN; PAM sequence: TTT
ggggaactgttgtttgatgt

SEQ ID NO: 41160 - DNA, 20 bp, Artificial Sequence
  Description of Artificial Sequence: Synthetic oligonucleotide
  Target: SCNA; (-) strand; PAM type: YTN; PAM sequence: TTT
tggggaactgttgtttgatg

SEQ ID NO: 41161 - DNA, 20 bp, Artificial Sequence
  Description of Artificial Sequence: Synthetic oligonucleotide
  Target: SCNA; (-) strand; PAM type: YTN; PAM sequence: TTA
cgtattttggggaactgttg

SEQ ID NO: 41162 - DNA, 20 bp, Artificial Sequence
  Description of Artificial Sequence: Synthetic oligonucleotide
  Target: SCNA; (-) strand; PAM type: YTN; PAM sequence: TTT
acgtattttggggaactgtt

SEQ ID NO: 41163 - DNA, 20 bp, Artificial Sequence
  Description of Artificial Sequence: Synthetic oligonucleotide
  Target: SCNA; (-) strand; PAM type: YTN; PAM sequence: CTT
tacgtattttggggaactgt

SEQ ID NO: 41164 - DNA, 20 bp, Artificial Sequence
  Description of Artificial Sequence: Synthetic oligonucleotide
  Target: SCNA; (-) strand; PAM type: YTN; PAM sequence: TTG
ctttacgtattttggggaac

SEQ ID NO: 41165 - DNA, 20 bp, Artificial Sequence
  Description of Artificial Sequence: Synthetic oligonucleotide
  Target: SCNA; (-) strand; PAM type: YTN; PAM sequence: TTT
gctttacgtattttggggaa

SEQ ID NO: 41166 - DNA, 20 bp, Artificial Sequence
  Description of Artificial Sequence: Synthetic oligonucleotide
  Target: SCNA; (-) strand; PAM type: YTN; PAM sequence: CTG
tcaatgtttgctttacgtat

SEQ ID NO: 41167 - DNA, 20 bp, Artificial Sequence
  Description of Artificial Sequence: Synthetic oligonucleotide
  Target: SCNA; (-) strand; PAM type: YTN; PAM sequence: TTC
aatcctgtcaatgtttgctt

SEQ ID NO: 41168 - DNA, 20 bp, Artificial Sequence
  Description of Artificial Sequence: Synthetic oligonucleotide
  Target: SCNA; (-) strand; PAM type: YTN; PAM sequence: CTT
caatcctgtcaatgtttgct

SEQ ID NO: 41169 - DNA, 20 bp, Artificial Sequence
  Description of Artificial Sequence: Synthetic oligonucleotide
  Target: SCNA; (-) strand; PAM type: YTN; PAM sequence: CTC
ccttcaatcctgtcaatgtt

SEQ ID NO: 41170 - DNA, 20 bp, Artificial Sequence
  Description of Artificial Sequence: Synthetic oligonucleotide
  Target: SCNA; (-) strand; PAM type: YTN; PAM sequence: TTC
tcccttcaatcctgtcaatg

SEQ ID NO: 41171 - DNA, 20 bp, Artificial Sequence
  Description of Artificial Sequence: Synthetic oligonucleotide
  Target: SCNA; (-) strand; PAM type: YTN; PAM sequence: TTT
ctcccttcaatcctgtcaat

SEQ ID NO: 41172 - DNA, 20 bp, Artificial Sequence
  Description of Artificial Sequence: Synthetic oligonucleotide
  Target: SCNA; (-) strand; PAM type: YTN; PAM sequence: CTA
tttctcccttcaatcctgtc

SEQ ID NO: 41173 - DNA, 20 bp, Artificial Sequence
  Description of Artificial Sequence: Synthetic oligonucleotide
  Target: SCNA; (-) strand; PAM type: YTN; PAM sequence: TTG
tagagtggtctatttctccc

SEQ ID NO: 41174 - DNA, 20 bp, Artificial Sequence
  Description of Artificial Sequence: Synthetic oligonucleotide
  Target: SCNA; (-) strand; PAM type: YTN; PAM sequence: CTA
ttgtagagtggtctatttct

SEQ ID NO: 41175 - DNA, 20 bp, Artificial Sequence
  Description of Artificial Sequence: Synthetic oligonucleotide
  Target: SCNA; (-) strand; PAM type: YTN; PAM sequence: CTA
ctattgtagagtggtctatt

SEQ ID NO: 41176 - DNA, 20 bp, Artificial Sequence
  Description of Artificial Sequence: Synthetic oligonucleotide
  Target: SCNA; (-) strand; PAM type: YTN; PAM sequence: TTG
aagaccccaactactattgt

SEQ ID NO: 41177 - DNA, 20 bp, Artificial Sequence
  Description of Artificial Sequence: Synthetic oligonucleotide
  Target: SCNA; (-) strand; PAM type: YTN; PAM sequence: TTG
aaagtggggtgttgaagacc

SEQ ID NO: 41178 - DNA, 20 bp, Artificial Sequence
  Description of Artificial Sequence: Synthetic oligonucleotide
  Target: SCNA; (-) strand; PAM type: YTN; PAM sequence: TTA
ttgaaagtggggtgttgaag

SEQ ID NO: 41179 - DNA, 20 bp, Artificial Sequence
  Description of Artificial Sequence: Synthetic oligonucleotide
  Target: SCNA; (-) strand; PAM type: YTN; PAM sequence: TTA
attattgaaagtggggtgtt

SEQ ID NO: 41180 - DNA, 20 bp, Artificial Sequence
  Description of Artificial Sequence: Synthetic oligonucleotide
  Target: SCNA; (-) strand; PAM type: YTN; PAM sequence: CTG
tgattaattattgaaagtgg

SEQ ID NO: 41181 - DNA, 20 bp, Artificial Sequence
  Description of Artificial Sequence: Synthetic oligonucleotide
  Target: SCNA; (-) strand; PAM type: YTN; PAM sequence: TTA
agtggctgtgattaattatt

SEQ ID NO: 41182 - DNA, 20 bp, Artificial Sequence
  Description of Artificial Sequence: Synthetic oligonucleotide
  Target: SCNA; (-) strand; PAM type: YTN; PAM sequence: CTT
aagtggctgtgattaattat

SEQ ID NO: 41183 - DNA, 20 bp, Artificial Sequence
  Description of Artificial Sequence: Synthetic oligonucleotide
  Target: SCNA; (-) strand; PAM type: YTN; PAM sequence: TTC
cttaagtggctgtgattaat

SEQ ID NO: 41184 - DNA, 20 bp, Artificial Sequence
  Description of Artificial Sequence: Synthetic oligonucleotide
  Target: SCNA; (-) strand; PAM type: YTN; PAM sequence: CTG
gttccttaagtggctgtgat

SEQ ID NO: 41185 - DNA, 20 bp, Artificial Sequence
  Description of Artificial Sequence: Synthetic oligonucleotide
  Target: SCNA; (-) strand; PAM type: YTN; PAM sequence: TTG
gtatgcactggttccttaag

SEQ ID NO: 41186 - DNA, 20 bp, Artificial Sequence
  Description of Artificial Sequence: Synthetic oligonucleotide
  Target: SCNA; (-) strand; PAM type: YTN; PAM sequence: TTT
ggtatgcactggttccttaa

SEQ ID NO: 41187 - DNA, 20 bp, Artificial Sequence
  Description of Artificial Sequence: Synthetic oligonucleotide
  Target: SCNA; (-) strand; PAM type: YTN; PAM sequence: TTT
tggtatgcactggttcctta

SEQ ID NO: 41188 - DNA, 20 bp, Artificial Sequence
  Description of Artificial Sequence: Synthetic oligonucleotide
  Target: SCNA; (-) strand; PAM type: YTN; PAM sequence: CTG
ccagaagtgtgttttggtat

SEQ ID NO: 41189 - DNA, 20 bp, Artificial Sequence
  Description of Artificial Sequence: Synthetic oligonucleotide
  Target: SCNA; (-) strand; PAM type: YTN; PAM sequence: CTG
aagcaacactgccagaagtg

SEQ ID NO: 41190 - DNA, 20 bp, Artificial Sequence
  Description of Artificial Sequence: Synthetic oligonucleotide
  Target: SCNA; (-) strand; PAM type: YTN; PAM sequence: TTC
cctgaagcaacactgccaga

SEQ ID NO: 41191 - DNA, 20 bp, Artificial Sequence
  Description of Artificial Sequence: Synthetic oligonucleotide
  Target: SCNA; (-) strand; PAM type: YTN; PAM sequence: CTC
ggaattccctgaagcaacac

SEQ ID NO: 41192 - DNA, 20 bp, Artificial Sequence
  Description of Artificial Sequence: Synthetic oligonucleotide
  Target: SCNA; (-) strand; PAM type: YTN; PAM sequence: CTA
cactcggaattccctgaagc

SEQ ID NO: 41193 - DNA, 20 bp, Artificial Sequence
  Description of Artificial Sequence: Synthetic oligonucleotide
  Target: SCNA; (-) strand; PAM type: YTN; PAM sequence: TTA
accctacactcggaattccc

SEQ ID NO: 41194 - DNA, 20 bp, Artificial Sequence
  Description of Artificial Sequence: Synthetic oligonucleotide
  Target: SCNA; (-) strand; PAM type: YTN; PAM sequence: TTA
gaagaggtagagaaaatgga

SEQ ID NO: 41195 - DNA, 20 bp, Artificial Sequence
  Description of Artificial Sequence: Synthetic oligonucleotide
  Target: SCNA; (-) strand; PAM type: YTN; PAM sequence: TTT
agaagaggtagagaaaatgg

SEQ ID NO: 41196 - DNA, 20 bp, Artificial Sequence
  Description of Artificial Sequence: Synthetic oligonucleotide
  Target: SCNA; (-) strand; PAM type: YTN; PAM sequence: TTT
tagaagaggtagagaaaatg

SEQ ID NO: 41197 - DNA, 20 bp, Artificial Sequence
  Description of Artificial Sequence: Synthetic oligonucleotide
  Target: SCNA; (-) strand; PAM type: YTN; PAM sequence: TTG
aagaaggaggaattttagaa

SEQ ID NO: 41198 - DNA, 20 bp, Artificial Sequence
  Description of Artificial Sequence: Synthetic oligonucleotide
  Target: SCNA; (-) strand; PAM type: YTN; PAM sequence: TTT
gaagaaggaggaattttaga

SEQ ID NO: 41199 - DNA, 20 bp, Artificial Sequence
  Description of Artificial Sequence: Synthetic oligonucleotide
  Target: SCNA; (-) strand; PAM type: YTN; PAM sequence: TTA
atagccatttgaagaaggag

SEQ ID NO: 41200 - DNA, 20 bp, Artificial Sequence
  Description of Artificial Sequence: Synthetic oligonucleotide
  Target: SCNA; (-) strand; PAM type: YTN; PAM sequence: TTA
ttaatagccatttgaagaag

SEQ ID NO: 41201 - DNA, 20 bp, Artificial Sequence
  Description of Artificial Sequence: Synthetic oligonucleotide
  Target: SCNA; (-) strand; PAM type: YTN; PAM sequence: CTG
acacaaaggacaaaaatata

SEQ ID NO: 41202 - DNA, 20 bp, Artificial Sequence
  Description of Artificial Sequence: Synthetic oligonucleotide
  Target: SCNA; (-) strand; PAM type: YTN; PAM sequence: TTA
agaactgacacaaaggacaa

SEQ ID NO: 41203 - DNA, 20 bp, Artificial Sequence
  Description of Artificial Sequence: Synthetic oligonucleotide
  Target: SCNA; (-) strand; PAM type: YTN; PAM sequence: TTA
taagcaacatgaattaagaa

SEQ ID NO: 41204 - DNA, 20 bp, Artificial Sequence
  Description of Artificial Sequence: Synthetic oligonucleotide
  Target: SCNA; (-) strand; PAM type: YTN; PAM sequence: CTT
ataagcaacatgaattaaga

SEQ ID NO: 41205 - DNA, 20 bp, Artificial Sequence
  Description of Artificial Sequence: Synthetic oligonucleotide
  Target: SCNA; (-) strand; PAM type: YTN; PAM sequence: TTA
ataataaaaatcatgcttat

SEQ ID NO: 41206 - DNA, 20 bp, Artificial Sequence
  Description of Artificial Sequence: Synthetic oligonucleotide
  Target: SCNA; (-) strand; PAM type: YTN; PAM sequence: TTT
aataataaaaatcatgctta

SEQ ID NO: 41207 - DNA, 20 bp, Artificial Sequence
  Description of Artificial Sequence: Synthetic oligonucleotide
  Target: SCNA; (-) strand; PAM type: YTN; PAM sequence: CTT
taataataaaaatcatgctt

SEQ ID NO: 41208 - DNA, 20 bp, Artificial Sequence
  Description of Artificial Sequence: Synthetic oligonucleotide
  Target: SCNA; (-) strand; PAM type: YTN; PAM sequence: CTC
actttaataataaaaatcat

SEQ ID NO: 41209 - DNA, 20 bp, Artificial Sequence
  Description of Artificial Sequence: Synthetic oligonucleotide
  Target: SCNA; (-) strand; PAM type: YTN; PAM sequence: TTA
tcccatctcactttaataat

SEQ ID NO: 41210 - DNA, 20 bp, Artificial Sequence
  Description of Artificial Sequence: Synthetic oligonucleotide
  Target: SCNA; (-) strand; PAM type: YTN; PAM sequence: TTT
atcccatctcactttaataa

SEQ ID NO: 41211 - DNA, 20 bp, Artificial Sequence
  Description of Artificial Sequence: Synthetic oligonucleotide
  Target: SCNA; (-) strand; PAM type: YTN; PAM sequence: TTT
tatcccatctcactttaata

SEQ ID NO: 41212 - DNA, 20 bp, Artificial Sequence
  Description of Artificial Sequence: Synthetic oligonucleotide
  Target: SCNA; (-) strand; PAM type: YTN; PAM sequence: TTT
ttatcccatctcactttaat

SEQ ID NO: 41213 - DNA, 20 bp, Artificial Sequence
  Description of Artificial Sequence: Synthetic oligonucleotide
  Target: SCNA; (-) strand; PAM type: YTN; PAM sequence: TTA
tttttatcccatctcacttt

SEQ ID NO: 41214 - DNA, 20 bp, Artificial Sequence
  Description of Artificial Sequence: Synthetic oligonucleotide
  Target: SCNA; (-) strand; PAM type: YTN; PAM sequence: TTT
atttttatcccatctcactt

SEQ ID NO: 41215 - DNA, 20 bp, Artificial Sequence
  Description of Artificial Sequence: Synthetic oligonucleotide
  Target: SCNA; (-) strand; PAM type: YTN; PAM sequence: TTT
tatttttatcccatctcact

SEQ ID NO: 41216 - DNA, 20 bp, Artificial Sequence
  Description of Artificial Sequence: Synthetic oligonucleotide
  Target: SCNA; (-) strand; PAM type: YTN; PAM sequence: TTG
caaaaatattttatttttat

SEQ ID NO: 41217 - DNA, 20 bp, Artificial Sequence
  Description of Artificial Sequence: Synthetic oligonucleotide
  Target: SCNA; (-) strand; PAM type: YTN; PAM sequence: CTC
attgcaaaaatattttattt

SEQ ID NO: 41218 - DNA, 20 bp, Artificial Sequence
  Description of Artificial Sequence: Synthetic oligonucleotide
  Target: SCNA; (-) strand; PAM type: YTN; PAM sequence: TTA
tctcattgcaaaaatatttt

SEQ ID NO: 41219 - DNA, 20 bp, Artificial Sequence
  Description of Artificial Sequence: Synthetic oligonucleotide
  Target: SCNA; (-) strand; PAM type: YTN; PAM sequence: TTA
aaataaaacgttatctcatt

SEQ ID NO: 41220 - DNA, 20 bp, Artificial Sequence
  Description of Artificial Sequence: Synthetic oligonucleotide
  Target: SCNA; (-) strand; PAM type: YTN; PAM sequence: TTG
tatataaatggtgagaatta

SEQ ID NO: 41221 - DNA, 20 bp, Artificial Sequence
  Description of Artificial Sequence: Synthetic oligonucleotide
  Target: SCNA; (-) strand; PAM type: YTN; PAM sequence: TTT
gtatataaatggtgagaatt

SEQ ID NO: 41222 - DNA, 20 bp, Artificial Sequence
  Description of Artificial Sequence: Synthetic oligonucleotide
  Target: SCNA; (-) strand; PAM type: YTN; PAM sequence: TTG
tgtttgtatataaatggtga

SEQ ID NO: 41223 - DNA, 20 bp, Artificial Sequence
  Description of Artificial Sequence: Synthetic oligonucleotide
  Target: SCNA; (-) strand; PAM type: YTN; PAM sequence: CTT
gtgtttgtatataaatggtg

SEQ ID NO: 41224 - DNA, 20 bp, Artificial Sequence
  Description of Artificial Sequence: Synthetic oligonucleotide
  Target: SCNA; (-) strand; PAM type: YTN; PAM sequence: TTC
acttgtgtttgtatataaat

SEQ ID NO: 41225 - DNA, 20 bp, Artificial Sequence
  Description of Artificial Sequence: Synthetic oligonucleotide
  Target: SCNA; (-) strand; PAM type: YTN; PAM sequence: TTA
ttcacttgtgtttgtatata

SEQ ID NO: 41226 - DNA, 20 bp, Artificial Sequence
  Description of Artificial Sequence: Synthetic oligonucleotide
  Target: SCNA; (-) strand; PAM type: YTN; PAM sequence: TTT
attcacttgtgtttgtatat

SEQ ID NO: 41227 - DNA, 20 bp, Artificial Sequence
  Description of Artificial Sequence: Synthetic oligonucleotide
  Target: SCNA; (-) strand; PAM type: YTN; PAM sequence: TTT
tattcacttgtgtttgtata

SEQ ID NO: 41228 - DNA, 20 bp, Artificial Sequence
  Description of Artificial Sequence: Synthetic oligonucleotide
  Target: SCNA; (-) strand; PAM type: YTN; PAM sequence: TTG
cgatgtgttttattcacttg

SEQ ID NO: 41229 - DNA, 20 bp, Artificial Sequence
  Description of Artificial Sequence: Synthetic oligonucleotide
  Target: SCNA; (-) strand; PAM type: YTN; PAM sequence: TTT
gcgatgtgttttattcactt

SEQ ID NO: 41230 - DNA, 20 bp, Artificial Sequence
  Description of Artificial Sequence: Synthetic oligonucleotide
  Target: SCNA; (-) strand; PAM type: YTN; PAM sequence: TTT
tgcgatgtgttttattcact

SEQ ID NO: 41231 - DNA, 20 bp, Artificial Sequence
  Description of Artificial Sequence: Synthetic oligonucleotide
  Target: SCNA; (-) strand; PAM type: YTN; PAM sequence: TTA
ccattttgcgatgtgtttta

SEQ ID NO: 41232 - DNA, 20 bp, Artificial Sequence
  Description of Artificial Sequence: Synthetic oligonucleotide
  Target: SCNA; (-) strand; PAM type: YTN; PAM sequence: TTT
accattttgcgatgtgtttt

SEQ ID NO: 41233 - DNA, 20 bp, Artificial Sequence
  Description of Artificial Sequence: Synthetic oligonucleotide
  Target: SCNA; (-) strand; PAM type: YTN; PAM sequence: TTT
taccattttgcgatgtgttt

SEQ ID NO: 41234 - DNA, 20 bp, Artificial Sequence
  Description of Artificial Sequence: Synthetic oligonucleotide
  Target: SCNA; (-) strand; PAM type: YTN; PAM sequence: CTA
aatatgaaattttaccattt

SEQ ID NO: 41235 - DNA, 20 bp, Artificial Sequence
  Description of Artificial Sequence: Synthetic oligonucleotide
  Target: SCNA; (-) strand; PAM type: YTN; PAM sequence: CTA
taaatactaaatatgaaatt

SEQ ID NO: 41236 - DNA, 20 bp, Artificial Sequence
  Description of Artificial Sequence: Synthetic oligonucleotide
  Target: SCNA; (-) strand; PAM type: YTN; PAM sequence: CTA
tgcacctataaatactaaat

SEQ ID NO: 41237 - DNA, 20 bp, Artificial Sequence
  Description of Artificial Sequence: Synthetic oligonucleotide
  Target: SCNA; (-) strand; PAM type: YTN; PAM sequence: TTA
aaaatatgtgagcatgaaac

SEQ ID NO: 41238 - DNA, 20 bp, Artificial Sequence
  Description of Artificial Sequence: Synthetic oligonucleotide
  Target: SCNA; (-) strand; PAM type: YTN; PAM sequence: CTT
aaaaatatgtgagcatgaaa

SEQ ID NO: 41239 - DNA, 20 bp, Artificial Sequence
  Description of Artificial Sequence: Synthetic oligonucleotide
  Target: SCNA; (-) strand; PAM type: YTN; PAM sequence: TTA
atatatataatacttaaaaa

SEQ ID NO: 41240 - DNA, 20 bp, Artificial Sequence
  Description of Artificial Sequence: Synthetic oligonucleotide
  Target: SCNA; (-) strand; PAM type: YTN; PAM sequence: TTG
ttaatatatataatacttaa

SEQ ID NO: 41241 - DNA, 20 bp, Artificial Sequence
  Description of Artificial Sequence: Synthetic oligonucleotide
  Target: SCNA; (-) strand; PAM type: YTN; PAM sequence: TTT
gttaatatatataatactta

SEQ ID NO: 41242 - DNA, 20 bp, Artificial Sequence
  Description of Artificial Sequence: Synthetic oligonucleotide
  Target: SCNA; (-) strand; PAM type: YTN; PAM sequence: TTG
tgaaatttgttaatatatat

SEQ ID NO: 41243 - DNA, 20 bp, Artificial Sequence
  Description of Artificial Sequence: Synthetic oligonucleotide
  Target: SCNA; (-) strand; PAM type: YTN; PAM sequence: CTA
agaataatgacgtattgtga

SEQ ID NO: 41244 - DNA, 20 bp, Artificial Sequence
  Description of Artificial Sequence: Synthetic oligonucleotide
  Target: SCNA; (-) strand; PAM type: YTN; PAM sequence: CTG
tctaagaataatgacgtatt

SEQ ID NO: 41245 - DNA, 20 bp, Artificial Sequence
  Description of Artificial Sequence: Synthetic oligonucleotide
  Target: SCNA; (-) strand; PAM type: YTN; PAM sequence: TTA
atgatactgtctaagaataa

SEQ ID NO: 41246 - DNA, 20 bp, Artificial Sequence
  Description of Artificial Sequence: Synthetic oligonucleotide
  Target: SCNA; (-) strand; PAM type: YTN; PAM sequence: TTT
aatgatactgtctaagaata

SEQ ID NO: 41247 - DNA, 20 bp, Artificial Sequence
  Description of Artificial Sequence: Synthetic oligonucleotide
  Target: SCNA; (-) strand; PAM type: YTN; PAM sequence: TTT
taatgatactgtctaagaat

SEQ ID NO: 41248 - DNA, 20 bp, Artificial Sequence
  Description of Artificial Sequence: Synthetic oligonucleotide
  Target: SCNA; (-) strand; PAM type: YTN; PAM sequence: CTT
ttaatgatactgtctaagaa

SEQ ID NO: 41249 - DNA, 20 bp, Artificial Sequence
  Description of Artificial Sequence: Synthetic oligonucleotide
  Target: SCNA; (-) strand; PAM type: YTN; PAM sequence: TTA
ggtgtcttttaatgatactg

SEQ ID NO: 41250 - DNA, 20 bp, Artificial Sequence
  Description of Artificial Sequence: Synthetic oligonucleotide
  Target: SCNA; (-) strand; PAM type: YTN; PAM sequence: TTT
aggtgtcttttaatgatact

SEQ ID NO: 41251 - DNA, 20 bp, Artificial Sequence
  Description of Artificial Sequence: Synthetic oligonucleotide
  Target: SCNA; (-) strand; PAM type: YTN; PAM sequence: TTT
taggtgtcttttaatgatac

SEQ ID NO: 41252 - DNA, 20 bp, Artificial Sequence
  Description of Artificial Sequence: Synthetic oligonucleotide
  Target: SCNA; (-) strand; PAM type: YTN; PAM sequence: TTT
ttaggtgtcttttaatgata

SEQ ID NO: 41253 - DNA, 20 bp, Artificial Sequence
  Description of Artificial Sequence: Synthetic oligonucleotide
  Target: SCNA; (-) strand; PAM type: YTN; PAM sequence: TTA
taagatttttaggtgtcttt

SEQ ID NO: 41254 - DNA, 20 bp, Artificial Sequence
  Description of Artificial Sequence: Synthetic oligonucleotide
  Target: SCNA; (-) strand; PAM type: YTN; PAM sequence: CTA
tcatatattataagattttt

SEQ ID NO: 41255 - DNA, 20 bp, Artificial Sequence
  Description of Artificial Sequence: Synthetic oligonucleotide
  Target: SCNA; (-) strand; PAM type: YTN; PAM sequence: TTG
ctatcatatattataagatt

SEQ ID NO: 41256 - DNA, 20 bp, Artificial Sequence
  Description of Artificial Sequence: Synthetic oligonucleotide
  Target: SCNA; (-) strand; PAM type: YTN; PAM sequence: TTT
gctatcatatattataagat

SEQ ID NO: 41257 - DNA, 20 bp, Artificial Sequence
  Description of Artificial Sequence: Synthetic oligonucleotide
  Target: SCNA; (-) strand; PAM type: YTN; PAM sequence: TTA
gtgatttgctatcatatatt

SEQ ID NO: 41258 - DNA, 20 bp, Artificial Sequence
  Description of Artificial Sequence: Synthetic oligonucleotide
  Target: SCNA; (-) strand; PAM type: YTN; PAM sequence: TTG
ttagtgatttgctatcatat

SEQ ID NO: 41259 - DNA, 20 bp, Artificial Sequence
  Description of Artificial Sequence: Synthetic oligonucleotide
  Target: SCNA; (-) strand; PAM type: YTN; PAM sequence: TTC
agaagttgttagtgatttgc

SEQ ID NO: 41260 - DNA, 20 bp, Artificial Sequence
  Description of Artificial Sequence: Synthetic oligonucleotide
  Target: SCNA; (-) strand; PAM type: YTN; PAM sequence: TTG
ttcagaagttgttagtgatt

SEQ ID NO: 41261 - DNA, 20 bp, Artificial Sequence
  Description of Artificial Sequence: Synthetic oligonucleotide
  Target: SCNA; (-) strand; PAM type: YTN; PAM sequence: CTG
ttgttcagaagttgttagtg

SEQ ID NO: 41262 - DNA, 20 bp, Artificial Sequence
  Description of Artificial Sequence: Synthetic oligonucleotide
  Target: SCNA; (-) strand; PAM type: YTN; PAM sequence: TTG
ctgttgttcagaagttgtta

SEQ ID NO: 41263 - DNA, 20 bp, Artificial Sequence
  Description of Artificial Sequence: Synthetic oligonucleotide
  Target: SCNA; (-) strand; PAM type: YTN; PAM sequence: TTG
ttgctgttgttcagaagttg

SEQ ID NO: 41264 - DNA, 20 bp, Artificial Sequence
  Description of Artificial Sequence: Synthetic oligonucleotide
  Target: SCNA; (-) strand; PAM type: YTN; PAM sequence: TTT
gttgctgttgttcagaagtt

SEQ ID NO: 41265 - DNA, 20 bp, Artificial Sequence
  Description of Artificial Sequence: Synthetic oligonucleotide
  Target: SCNA; (-) strand; PAM type: YTN; PAM sequence: TTT
tgttgctgttgttcagaagt

SEQ ID NO: 41266 - DNA, 20 bp, Artificial Sequence
  Description of Artificial Sequence: Synthetic oligonucleotide
  Target: SCNA; (-) strand; PAM type: YTN; PAM sequence: TTT
ttgttgctgttgttcagaag

SEQ ID NO: 41267 - DNA, 20 bp, Artificial Sequence
  Description of Artificial Sequence: Synthetic oligonucleotide
  Target: SCNA; (-) strand; PAM type: YTN; PAM sequence: TTT
tttgttgctgttgttcagaa

SEQ ID NO: 41268 - DNA, 20 bp, Artificial Sequence
  Description of Artificial Sequence: Synthetic oligonucleotide
  Target: SCNA; (-) strand; PAM type: YTN; PAM sequence: TTT
ttttgttgctgttgttcaga

SEQ ID NO: 41269 - DNA, 20 bp, Artificial Sequence
  Description of Artificial Sequence: Synthetic oligonucleotide
  Target: SCNA; (-) strand; PAM type: YTN; PAM sequence: CTA
tttttttgttgctgttgttc

SEQ ID NO: 41270 - DNA, 20 bp, Artificial Sequence
  Description of Artificial Sequence: Synthetic oligonucleotide
  Target: SCNA; (-) strand; PAM type: YTN; PAM sequence: CTC
actatttttttgttgctgtt

SEQ ID NO: 41271 - DNA, 20 bp, Artificial Sequence
  Description of Artificial Sequence: Synthetic oligonucleotide
  Target: SCNA; (-) strand; PAM type: YTN; PAM sequence: CTA
aatcctcactatttttttgt

SEQ ID NO: 41272 - DNA, 20 bp, Artificial Sequence
  Description of Artificial Sequence: Synthetic oligonucleotide
  Target: SCNA; (-) strand; PAM type: YTN; PAM sequence: TTC
taaatcctcactattttttt

SEQ ID NO: 41273 - DNA, 20 bp, Artificial Sequence
  Description of Artificial Sequence: Synthetic oligonucleotide
  Target: SCNA; (-) strand; PAM type: YTN; PAM sequence: TTT
ctaaatcctcactatttttt

SEQ ID NO: 41274 - DNA, 20 bp, Artificial Sequence
  Description of Artificial Sequence: Synthetic oligonucleotide
  Target: SCNA; (-) strand; PAM type: YTN; PAM sequence: TTA
tttctaaatcctcactattt

SEQ ID NO: 41275 - DNA, 20 bp, Artificial Sequence
  Description of Artificial Sequence: Synthetic oligonucleotide
  Target: SCNA; (-) strand; PAM type: YTN; PAM sequence: CTT
atttctaaatcctcactatt

SEQ ID NO: 41276 - DNA, 20 bp, Artificial Sequence
  Description of Artificial Sequence: Synthetic oligonucleotide
  Target: SCNA; (-) strand; PAM type: YTN; PAM sequence: CTA
ccacttatttctaaatcctc

SEQ ID NO: 41277 - DNA, 20 bp, Artificial Sequence
  Description of Artificial Sequence: Synthetic oligonucleotide
  Target: SCNA; (-) strand; PAM type: YTN; PAM sequence: CTA
agtgactaccacttatttct

SEQ ID NO: 41278 - DNA, 20 bp, Artificial Sequence
  Description of Artificial Sequence: Synthetic oligonucleotide
  Target: SCNA; (-) strand; PAM type: YTN; PAM sequence: TTA
aaaacacctaagtgactacc

SEQ ID NO: 41279 - DNA, 20 bp, Artificial Sequence
  Description of Artificial Sequence: Synthetic oligonucleotide
  Target: SCNA; (-) strand; PAM type: YTN; PAM sequence: TTA
aaacaaattaaaaacaccta

SEQ ID NO: 41280 - DNA, 20 bp, Artificial Sequence
  Description of Artificial Sequence: Synthetic oligonucleotide
  Target: SCNA; (-) strand; PAM type: YTN; PAM sequence: CTA
cgatgttaaaacaaattaaa

SEQ ID NO: 41281 - DNA, 20 bp, Artificial Sequence
  Description of Artificial Sequence: Synthetic oligonucleotide
  Target: SCNA; (-) strand; PAM type: YTN; PAM sequence: TTC
aatctacgatgttaaaacaa

SEQ ID NO: 41282 - DNA, 20 bp, Artificial Sequence
  Description of Artificial Sequence: Synthetic oligonucleotide
  Target: SCNA; (-) strand; PAM type: YTN; PAM sequence: CTT
caatctacgatgttaaaaca

SEQ ID NO: 41283 - DNA, 20 bp, Artificial Sequence
  Description of Artificial Sequence: Synthetic oligonucleotide
  Target: SCNA; (-) strand; PAM type: YTN; PAM sequence: TTG
tggcttcaatctacgatgtt

SEQ ID NO: 41284 - DNA, 20 bp, Artificial Sequence
  Description of Artificial Sequence: Synthetic oligonucleotide
  Target: SCNA; (-) strand; PAM type: YTN; PAM sequence: TTT
gtggcttcaatctacgatgt

SEQ ID NO: 41285 - DNA, 20 bp, Artificial Sequence
  Description of Artificial Sequence: Synthetic oligonucleotide
  Target: SCNA; (-) strand; PAM type: YTN; PAM sequence: TTT
tgtggcttcaatctacgatg

SEQ ID NO: 41286 - DNA, 20 bp, Artificial Sequence
  Description of Artificial Sequence: Synthetic oligonucleotide
  Target: SCNA; (-) strand; PAM type: YTN; PAM sequence: CTG
tggattttgtggcttcaatc

SEQ ID NO: 41287 - DNA, 20 bp, Artificial Sequence
  Description of Artificial Sequence: Synthetic oligonucleotide
  Target: SCNA; (-) strand; PAM type: YTN; PAM sequence: TTG
tgtgctgtggattttgtggc

SEQ ID NO: 41288 - DNA, 20 bp, Artificial Sequence
  Description of Artificial Sequence: Synthetic oligonucleotide
  Target: SCNA; (-) strand; PAM type: YTN; PAM sequence: TTT
gtgtgctgtggattttgtgg

SEQ ID NO: 41289 - DNA, 20 bp, Artificial Sequence
  Description of Artificial Sequence: Synthetic oligonucleotide
  Target: SCNA; (-) strand; PAM type: YTN; PAM sequence: CTT
tgtgtgctgtggattttgtg

SEQ ID NO: 41290 - DNA, 20 bp, Artificial Sequence
  Description of Artificial Sequence: Synthetic oligonucleotide
  Target: SCNA; (-) strand; PAM type: YTN; PAM sequence: CTG
aagtgaatacatggtagcag

SEQ ID NO: 41291 - DNA, 20 bp, Artificial Sequence
  Description of Artificial Sequence: Synthetic oligonucleotide
  Target: SCNA; (-) strand; PAM type: YTN; PAM sequence: TTC
actgaagtgaatacatggta

SEQ ID NO: 41292 - DNA, 20 bp, Artificial Sequence
  Description of Artificial Sequence: Synthetic oligonucleotide
  Target: SCNA; (-) strand; PAM type: YTN; PAM sequence: TTT
cactgaagtgaatacatggt

SEQ ID NO: 41293 - DNA, 20 bp, Artificial Sequence
  Description of Artificial Sequence: Synthetic oligonucleotide
  Target: SCNA; (-) strand; PAM type: YTN; PAM sequence: CTT
tcactgaagtgaatacatgg

SEQ ID NO: 41294 - DNA, 20 bp, Artificial Sequence
  Description of Artificial Sequence: Synthetic oligonucleotide
  Target: SCNA; (-) strand; PAM type: YTN; PAM sequence: TTC
cctttcactgaagtgaatac

SEQ ID NO: 41295 - DNA, 20 bp, Artificial Sequence
  Description of Artificial Sequence: Synthetic oligonucleotide
  Target: SCNA; (-) strand; PAM type: YTN; PAM sequence: CTT
ccctttcactgaagtgaata

SEQ ID NO: 41296 - DNA, 20 bp, Artificial Sequence
  Description of Artificial Sequence: Synthetic oligonucleotide
  Target: SCNA; (-) strand; PAM type: YTN; PAM sequence: TTC
ggtgcttccctttcactgaa

SEQ ID NO: 41297 - DNA, 20 bp, Artificial Sequence
  Description of Artificial Sequence: Synthetic oligonucleotide
  Target: SCNA; (-) strand; PAM type: YTN; PAM sequence: TTT
cggtgcttccctttcactga

SEQ ID NO: 41298 - DNA, 20 bp, Artificial Sequence
  Description of Artificial Sequence: Synthetic oligonucleotide
  Target: SCNA; (-) strand; PAM type: YTN; PAM sequence: CTC
agcatttcggtgcttccctt

SEQ ID NO: 41299 - DNA, 20 bp, Artificial Sequence
  Description of Artificial Sequence: Synthetic oligonucleotide
  Target: SCNA; (-) strand; PAM type: YTN; PAM sequence: CTG
cccccactcagcatttcggt

SEQ ID NO: 41300 - DNA, 20 bp, Artificial Sequence
  Description of Artificial Sequence: Synthetic oligonucleotide
  Target: SCNA; (-) strand; PAM type: YTN; PAM sequence: CTG
tacctgcccccactcagcat

SEQ ID NO: 41301 - DNA, 20 bp, Artificial Sequence
  Description of Artificial Sequence: Synthetic oligonucleotide
  Target: SCNA; (-) strand; PAM type: YTN; PAM sequence: TTG
aagtatctgtacctgccccc

SEQ ID NO: 41302 - DNA, 20 bp, Artificial Sequence
  Description of Artificial Sequence: Synthetic oligonucleotide
  Target: SCNA; (-) strand; PAM type: YTN; PAM sequence: TTC
catcagcagtgattgaagta

SEQ ID NO: 41303 - DNA, 20 bp, Artificial Sequence
  Description of Artificial Sequence: Synthetic oligonucleotide
  Target: SCNA; (-) strand; PAM type: YTN; PAM sequence: CTT
ccatcagcagtgattgaagt

SEQ ID NO: 41304 - DNA, 20 bp, Artificial Sequence
  Description of Artificial Sequence: Synthetic oligonucleotide
  Target: SCNA; (-) strand; PAM type: YTN; PAM sequence: CTC
gaagtcttccatcagcagtg

SEQ ID NO: 41305 - DNA, 20 bp, Artificial Sequence
  Description of Artificial Sequence: Synthetic oligonucleotide
  Target: SCNA; (-) strand; PAM type: YTN; PAM sequence: TTA
cagtgtatctcgaagtcttc

SEQ ID NO: 41306 - DNA, 20 bp, Artificial Sequence
  Description of Artificial Sequence: Synthetic oligonucleotide
  Target: SCNA; (-) strand; PAM type: YTN; PAM sequence: TTT
acagtgtatctcgaagtctt

SEQ ID NO: 41307 - DNA, 20 bp, Artificial Sequence
  Description of Artificial Sequence: Synthetic oligonucleotide
  Target: SCNA; (-) strand; PAM type: YTN; PAM sequence: TTT
tacagtgtatctcgaagtct

SEQ ID NO: 41308 - DNA, 20 bp, Artificial Sequence
  Description of Artificial Sequence: Synthetic oligonucleotide
  Target: SCNA; (-) strand; PAM type: YTN; PAM sequence: TTT
ttacagtgtatctcgaagtc

SEQ ID NO: 41309 - DNA, 20 bp, Artificial Sequence
  Description of Artificial Sequence: Synthetic oligonucleotide
  Target: SCNA; (-) strand; PAM type: YTN; PAM sequence: CTC
aaagtttttacagtgtatct

SEQ ID NO: 41310 - DNA, 20 bp, Artificial Sequence
  Description of Artificial Sequence: Synthetic oligonucleotide
  Target: SCNA; (-) strand; PAM type: YTN; PAM sequence: TTC
tcaaagtttttacagtgtat

SEQ ID NO: 41311 - DNA, 20 bp, Artificial Sequence
  Description of Artificial Sequence: Synthetic oligonucleotide
  Target: SCNA; (-) strand; PAM type: YTN; PAM sequence: TTT
ctcaaagtttttacagtgta

SEQ ID NO: 41312 - DNA, 20 bp, Artificial Sequence
  Description of Artificial Sequence: Synthetic oligonucleotide
  Target: SCNA; (-) strand; PAM type: YTN; PAM sequence: TTC
caatgtgcccagtcatgaca

SEQ ID NO: 41313 - DNA, 20 bp, Artificial Sequence
  Description of Artificial Sequence: Synthetic oligonucleotide
  Target: SCNA; (-) strand; PAM type: YTN; PAM sequence: CTC
agttccaatgtgcccagtca

SEQ ID NO: 41314 - DNA, 20 bp, Artificial Sequence
  Description of Artificial Sequence: Synthetic oligonucleotide
  Target: SCNA; (-) strand; PAM type: YTN; PAM sequence: CTG
tacaagtgctcagttccaat

SEQ ID NO: 41315 - DNA, 20 bp, Artificial Sequence
  Description of Artificial Sequence: Synthetic oligonucleotide
  Target: SCNA; (-) strand; PAM type: YTN; PAM sequence: TTC
catcctgtacaagtgctcag

SEQ ID NO: 41316 - DNA, 20 bp, Artificial Sequence
  Description of Artificial Sequence: Synthetic oligonucleotide
  Target: SCNA; (-) strand; PAM type: YTN; PAM sequence: CTG
acagatgttccatcctgtac

SEQ ID NO: 41317 - DNA, 20 bp, Artificial Sequence
  Description of Artificial Sequence: Synthetic oligonucleotide
  Target: SCNA; (-) strand; PAM type: YTN; PAM sequence: CTG
ctgacagatgttccatcctg

SEQ ID NO: 41318 - DNA, 20 bp, Artificial Sequence
  Description of Artificial Sequence: Synthetic oligonucleotide
  Target: SCNA; (-) strand; PAM type: YTN; PAM sequence: TTG
agatctgctgacagatgttc

SEQ ID NO: 41319 - DNA, 20 bp, Artificial Sequence
  Description of Artificial Sequence: Synthetic oligonucleotide
  Target: SCNA; (-) strand; PAM type: YTN; PAM sequence: CTT
gagatctgctgacagatgtt

SEQ ID NO: 41320 - DNA, 20 bp, Artificial Sequence
  Description of Artificial Sequence: Synthetic oligonucleotide
  Target: SCNA; (-) strand; PAM type: YTN; PAM sequence: TTC
ttgagatctgctgacagatg

SEQ ID NO: 41321 - DNA, 20 bp, Artificial Sequence
  Description of Artificial Sequence: Synthetic oligonucleotide
  Target: SCNA; (-) strand; PAM type: YTN; PAM sequence: TTT
cttgagatctgctgacagat

SEQ ID NO: 41322 - DNA, 20 bp, Artificial Sequence
  Description of Artificial Sequence: Synthetic oligonucleotide
  Target: SCNA; (-) strand; PAM type: YTN; PAM sequence: CTC
ccagtttcttgagatctgct

SEQ ID NO: 41323 - DNA, 20 bp, Artificial Sequence
  Description of Artificial Sequence: Synthetic oligonucleotide
  Target: SCNA; (-) strand; PAM type: YTN; PAM sequence: TTG
ctcccagtttcttgagatct

SEQ ID NO: 41324 - DNA, 20 bp, Artificial Sequence
  Description of Artificial Sequence: Synthetic oligonucleotide
  Target: SCNA; (-) strand; PAM type: YTN; PAM sequence: TTT
gctcccagtttcttgagatc

SEQ ID NO: 41325 - DNA, 20 bp, Artificial Sequence
  Description of Artificial Sequence: Synthetic oligonucleotide
  Target: SCNA; (-) strand; PAM type: YTN; PAM sequence: CTT
tgctcccagtttcttgagat

SEQ ID NO: 41326 - DNA, 20 bp, Artificial Sequence
  Description of Artificial Sequence: Synthetic oligonucleotide
  Target: SCNA; (-) strand; PAM type: YTN; PAM sequence: CTA
agaaatatctttgctcccag

SEQ ID NO: 41327 - DNA, 20 bp, Artificial Sequence
  Description of Artificial Sequence: Synthetic oligonucleotide
  Target: SCNA; (-) strand; PAM type: YTN; PAM sequence: CTG
aagcctaagaaatatctttg

SEQ ID NO: 41328 - DNA, 20 bp, Artificial Sequence
  Description of Artificial Sequence: Synthetic oligonucleotide
  Target: SCNA; (-) strand; PAM type: YTN; PAM sequence: CTA
cgaacctgaagcctaagaaa

SEQ ID NO: 41329 - DNA, 20 bp, Artificial Sequence
  Description of Artificial Sequence: Synthetic oligonucleotide
  Target: SCNA; (-) strand; PAM type: YTN; PAM sequence: TTA
ggaagggtatcaagactacg

SEQ ID NO: 41330 - DNA, 20 bp, Artificial Sequence
  Description of Artificial Sequence: Synthetic oligonucleotide
  Target: SCNA; (-) strand; PAM type: YTN; PAM sequence: CTA
atattaggaagggtatcaag

SEQ ID NO: 41331 - DNA, 20 bp, Artificial Sequence
  Description of Artificial Sequence: Synthetic oligonucleotide
  Target: SCNA; (-) strand; PAM type: YTN; PAM sequence: TTC
taatattaggaagggtatca

SEQ ID NO: 41332 - DNA, 20 bp, Artificial Sequence
  Description of Artificial Sequence: Synthetic oligonucleotide
  Target: SCNA; (-) strand; PAM type: YTN; PAM sequence: TTT
ctaatattaggaagggtatc

SEQ ID NO: 41333 - DNA, 20 bp, Artificial Sequence
  Description of Artificial Sequence: Synthetic oligonucleotide
  Target: SCNA; (-) strand; PAM type: YTN; PAM sequence: TTT
tctaatattaggaagggtat

SEQ ID NO: 41334 - DNA, 20 bp, Artificial Sequence
  Description of Artificial Sequence: Synthetic oligonucleotide
  Target: SCNA; (-) strand; PAM type: YTN; PAM sequence: TTT
ttctaatattaggaagggta

SEQ ID NO: 41335 - DNA, 20 bp, Artificial Sequence
  Description of Artificial Sequence: Synthetic oligonucleotide
  Target: SCNA; (-) strand; PAM type: YTN; PAM sequence: TTG
atttttctaatattaggaag

SEQ ID NO: 41336 - DNA, 20 bp, Artificial Sequence
  Description of Artificial Sequence: Synthetic oligonucleotide
  Target: SCNA; (-) strand; PAM type: YTN; PAM sequence: TTT
gatttttctaatattaggaa

SEQ ID NO: 41337 - DNA, 20 bp, Artificial Sequence
  Description of Artificial Sequence: Synthetic oligonucleotide
  Target: SCNA; (-) strand; PAM type: YTN; PAM sequence: TTT
tgatttttctaatattagga

SEQ ID NO: 41338 - DNA, 20 bp, Artificial Sequence
  Description of Artificial Sequence: Synthetic oligonucleotide
  Target: SCNA; (-) strand; PAM type: YTN; PAM sequence: TTT
ttgatttttctaatattagg

SEQ ID NO: 41339 - DNA, 20 bp, Artificial Sequence
  Description of Artificial Sequence: Synthetic oligonucleotide
  Target: SCNA; (-) strand; PAM type: YTN; PAM sequence: CTT
tttgatttttctaatattag

SEQ ID NO: 41340 - DNA, 20 bp, Artificial Sequence
  Description of Artificial Sequence: Synthetic oligonucleotide
  Target: SCNA; (-) strand; PAM type: YTN; PAM sequence: CTG
tctttttgatttttctaata

SEQ ID NO: 41341 - DNA, 20 bp, Artificial Sequence
  Description of Artificial Sequence: Synthetic oligonucleotide
  Target: SCNA; (-) strand; PAM type: YTN; PAM sequence: CTA
acagtgtgtgctgtcttttt

SEQ ID NO: 41342 - DNA, 20 bp, Artificial Sequence
  Description of Artificial Sequence: Synthetic oligonucleotide
  Target: SCNA; (-) strand; PAM type: YTN; PAM sequence: TTA
tactaacagtgtgtgctgtc

SEQ ID NO: 41343 - DNA, 20 bp, Artificial Sequence
  Description of Artificial Sequence: Synthetic oligonucleotide
  Target: SCNA; (-) strand; PAM type: YTN; PAM sequence: CTT
atactaacagtgtgtgctgt

SEQ ID NO: 41344 - DNA, 20 bp, Artificial Sequence
  Description of Artificial Sequence: Synthetic oligonucleotide
  Target: SCNA; (-) strand; PAM type: YTN; PAM sequence: TTG
aaacttatactaacagtgtg

SEQ ID NO: 41345 - DNA, 20 bp, Artificial Sequence
  Description of Artificial Sequence: Synthetic oligonucleotide
  Target: SCNA; (-) strand; PAM type: YTN; PAM sequence: CTG
atgcgtaattgaaacttata

SEQ ID NO: 41346 - DNA, 20 bp, Artificial Sequence
  Description of Artificial Sequence: Synthetic oligonucleotide
  Target: SCNA; (-) strand; PAM type: YTN; PAM sequence: CTG
tcagtgctgatgcgtaattg

SEQ ID NO: 41347 - DNA, 20 bp, Artificial Sequence
  Description of Artificial Sequence: Synthetic oligonucleotide
  Target: SCNA; (-) strand; PAM type: YTN; PAM sequence: TTG
gctgtcagtgctgatgcgta

SEQ ID NO: 41348 - DNA, 20 bp, Artificial Sequence
  Description of Artificial Sequence: Synthetic oligonucleotide
  Target: SCNA; (-) strand; PAM type: YTN; PAM sequence: CTC
attggctgtcagtgctgatg

SEQ ID NO: 41349 - DNA, 20 bp, Artificial Sequence
  Description of Artificial Sequence: Synthetic oligonucleotide
  Target: SCNA; (-) strand; PAM type: YTN; PAM sequence: CTA
tctcattggctgtcagtgct

SEQ ID NO: 41350 - DNA, 20 bp, Artificial Sequence
  Description of Artificial Sequence: Synthetic oligonucleotide
  Target: SCNA; (-) strand; PAM type: YTN; PAM sequence: TTC
ctatctcattggctgtcagt

SEQ ID NO: 41351 - DNA, 20 bp, Artificial Sequence
  Description of Artificial Sequence: Synthetic oligonucleotide
  Target: SCNA; (-) strand; PAM type: YTN; PAM sequence: TTT
cctatctcattggctgtcag

SEQ ID NO: 41352 - DNA, 20 bp, Artificial Sequence
  Description of Artificial Sequence: Synthetic oligonucleotide
  Target: SCNA; (-) strand; PAM type: YTN; PAM sequence: TTA
gtgtaagtggggagccattt

SEQ ID NO: 41353 - DNA, 20 bp, Artificial Sequence
  Description of Artificial Sequence: Synthetic oligonucleotide
  Target: SCNA; (-) strand; PAM type: YTN; PAM sequence: TTT
agtgtaagtggggagccatt

SEQ ID NO: 41354 - DNA, 20 bp, Artificial Sequence
  Description of Artificial Sequence: Synthetic oligonucleotide
  Target: SCNA; (-) strand; PAM type: YTN; PAM sequence: TTT
tagtgtaagtggggagccat

SEQ ID NO: 41355 - DNA, 20 bp, Artificial Sequence
  Description of Artificial Sequence: Synthetic oligonucleotide
  Target: SCNA; (-) strand; PAM type: YTN; PAM sequence: TTG
taaattttagtgtaagtggg

SEQ ID NO: 41356 - DNA, 20 bp, Artificial Sequence
  Description of Artificial Sequence: Synthetic oligonucleotide
  Target: SCNA; (-) strand; PAM type: YTN; PAM sequence: TTG
attgtaaattttagtgtaag

SEQ ID NO: 41357 - DNA, 20 bp, Artificial Sequence
  Description of Artificial Sequence: Synthetic oligonucleotide
  Target: SCNA; (-) strand; PAM type: YTN; PAM sequence: TTG
caaaaacattgattgtaaat

SEQ ID NO: 41358 - DNA, 20 bp, Artificial Sequence
  Description of Artificial Sequence: Synthetic oligonucleotide
  Target: SCNA; (-) strand; PAM type: YTN; PAM sequence: TTT
gcaaaaacattgattgtaaa

SEQ ID NO: 41359 - DNA, 20 bp, Artificial Sequence
  Description of Artificial Sequence: Synthetic oligonucleotide
  Target: SCNA; (-) strand; PAM type: YTN; PAM sequence: CTG
cagaatatttgcaaaaacat

SEQ ID NO: 41360 - DNA, 20 bp, Artificial Sequence
  Description of Artificial Sequence: Synthetic oligonucleotide
  Target: SCNA; (-) strand; PAM type: YTN; PAM sequence: TTG
ctgcagaatatttgcaaaaa

SEQ ID NO: 41361 - DNA, 20 bp, Artificial Sequence
  Description of Artificial Sequence: Synthetic oligonucleotide
  Target: SCNA; (-) strand; PAM type: YTN; PAM sequence: TTT
gctgcagaatatttgcaaaa

SEQ ID NO: 41362 - DNA, 20 bp, Artificial Sequence
  Description of Artificial Sequence: Synthetic oligonucleotide
  Target: SCNA; (-) strand; PAM type: YTN; PAM sequence: TTA
aaaataagataatatttgct

SEQ ID NO: 41363 - DNA, 20 bp, Artificial Sequence
  Description of Artificial Sequence: Synthetic oligonucleotide
  Target: SCNA; (-) strand; PAM type: YTN; PAM sequence: CTA
ttaaaaataagataatattt

SEQ ID NO: 41364 - DNA, 20 bp, Artificial Sequence
  Description of Artificial Sequence: Synthetic oligonucleotide
  Target: SCNA; (-) strand; PAM type: YTN; PAM sequence: TTA
tatcagacaagaaagacaca

SEQ ID NO: 41365 - DNA, 20 bp, Artificial Sequence
  Description of Artificial Sequence: Synthetic oligonucleotide
  Target: SCNA; (-) strand; PAM type: YTN; PAM sequence: TTT
atatcagacaagaaagacac

SEQ ID NO: 41366 - DNA, 20 bp, Artificial Sequence
  Description of Artificial Sequence: Synthetic oligonucleotide
  Target: SCNA; (-) strand; PAM type: YTN; PAM sequence: TTT
tatatcagacaagaaagaca

SEQ ID NO: 41367 - DNA, 20 bp, Artificial Sequence
  Description of Artificial Sequence: Synthetic oligonucleotide
  Target: SCNA; (-) strand; PAM type: YTN; PAM sequence: CTT
ttatatcagacaagaaagac

SEQ ID NO: 41368 - DNA, 20 bp, Artificial Sequence
  Description of Artificial Sequence: Synthetic oligonucleotide
  Target: SCNA; (-) strand; PAM type: YTN; PAM sequence: TTC
acttttatatcagacaagaa

SEQ ID NO: 41369 - DNA, 20 bp, Artificial Sequence
  Description of Artificial Sequence: Synthetic oligonucleotide
  Target: SCNA; (-) strand; PAM type: YTN; PAM sequence: CTG
taattcacttttatatcaga

SEQ ID NO: 41370 - DNA, 20 bp, Artificial Sequence
  Description of Artificial Sequence: Synthetic oligonucleotide
  Target: SCNA; (-) strand; PAM type: YTN; PAM sequence: CTA
ctgtaattcacttttatatc

SEQ ID NO: 41371 - DNA, 20 bp, Artificial Sequence
  Description of Artificial Sequence: Synthetic oligonucleotide
  Target: SCNA; (-) strand; PAM type: YTN; PAM sequence: CTA
ctactgtaattcacttttat

SEQ ID NO: 41372 - DNA, 20 bp, Artificial Sequence
  Description of Artificial Sequence: Synthetic oligonucleotide
  Target: SCNA; (-) strand; PAM type: YTN; PAM sequence: CTG
actactactgtaattcactt

SEQ ID NO: 41373 - DNA, 20 bp, Artificial Sequence
  Description of Artificial Sequence: Synthetic oligonucleotide
  Target: SCNA; (-) strand; PAM type: YTN; PAM sequence: CTC
tgactactactgtaattcac

SEQ ID NO: 41374 - DNA, 20 bp, Artificial Sequence
  Description of Artificial Sequence: Synthetic oligonucleotide
  Target: SCNA; (-) strand; PAM type: YTN; PAM sequence: TTA
actctgactactactgtaat

SEQ ID NO: 41375 - DNA, 20 bp, Artificial Sequence
  Description of Artificial Sequence: Synthetic oligonucleotide
  Target: SCNA; (-) strand; PAM type: YTN; PAM sequence: TTT
aactctgactactactgtaa

SEQ ID NO: 41376 - DNA, 20 bp, Artificial Sequence
  Description of Artificial Sequence: Synthetic oligonucleotide
  Target: SCNA; (-) strand; PAM type: YTN; PAM sequence: TTT
taactctgactactactgta

SEQ ID NO: 41377 - DNA, 20 bp, Artificial Sequence
  Description of Artificial Sequence: Synthetic oligonucleotide
  Target: SCNA; (-) strand; PAM type: YTN; PAM sequence: CTA
gatattttaactctgactac

SEQ ID NO: 41378 - DNA, 20 bp, Artificial Sequence
  Description of Artificial Sequence: Synthetic oligonucleotide
  Target: SCNA; (-) strand; PAM type: YTN; PAM sequence: TTA
aatggtgcatccggatcaga

SEQ ID NO: 41379 - DNA, 20 bp, Artificial Sequence
  Description of Artificial Sequence: Synthetic oligonucleotide
  Target: SCNA; (-) strand; PAM type: YTN; PAM sequence: CTA
ggtatatgatcattaaatgg

SEQ ID NO: 41380 - DNA, 20 bp, Artificial Sequence
  Description of Artificial Sequence: Synthetic oligonucleotide
  Target: SCNA; (-) strand; PAM type: YTN; PAM sequence: CTA
ccaaactaggtatatgatca

SEQ ID NO: 41381 - DNA, 20 bp, Artificial Sequence
  Description of Artificial Sequence: Synthetic oligonucleotide
  Target: SCNA; (-) strand; PAM type: YTN; PAM sequence: TTG
tcctaccaaactaggtatat

SEQ ID NO: 41382 - DNA, 20 bp, Artificial Sequence
  Description of Artificial Sequence: Synthetic oligonucleotide
  Target: SCNA; (-) strand; PAM type: YTN; PAM sequence: TTT
gtcctaccaaactaggtata

SEQ ID NO: 41383 - DNA, 20 bp, Artificial Sequence
  Description of Artificial Sequence: Synthetic oligonucleotide
  Target: SCNA; (-) strand; PAM type: YTN; PAM sequence: TTA
tttgtcctaccaaactaggt

SEQ ID NO: 41384 - DNA, 20 bp, Artificial Sequence
  Description of Artificial Sequence: Synthetic oligonucleotide
  Target: SCNA; (-) strand; PAM type: YTN; PAM sequence: CTT
atttgtcctaccaaactagg

SEQ ID NO: 41385 - DNA, 20 bp, Artificial Sequence
  Description of Artificial Sequence: Synthetic oligonucleotide
  Target: SCNA; (-) strand; PAM type: YTN; PAM sequence: CTG
agaaccagacagtccaactt

SEQ ID NO: 41386 - DNA, 20 bp, Artificial Sequence
  Description of Artificial Sequence: Synthetic oligonucleotide
  Target: SCNA; (-) strand; PAM type: YTN; PAM sequence: TTA
caggtgaagaaactgagaac

SEQ ID NO: 41387 - DNA, 20 bp, Artificial Sequence
  Description of Artificial Sequence: Synthetic oligonucleotide
  Target: SCNA; (-) strand; PAM type: YTN; PAM sequence: TTT
acaggtgaagaaactgagaa

SEQ ID NO: 41388 - DNA, 20 bp, Artificial Sequence
  Description of Artificial Sequence: Synthetic oligonucleotide
  Target: SCNA; (-) strand; PAM type: YTN; PAM sequence: TTT
tacaggtgaagaaactgaga

SEQ ID NO: 41389 - DNA, 20 bp, Artificial Sequence
  Description of Artificial Sequence: Synthetic oligonucleotide
  Target: SCNA; (-) strand; PAM type: YTN; PAM sequence: CTC
acattttacaggtgaagaaa

SEQ ID NO: 41390 - DNA, 20 bp, Artificial Sequence
  Description of Artificial Sequence: Synthetic oligonucleotide
  Target: SCNA; (-) strand; PAM type: YTN; PAM sequence: TTC
tcacattttacaggtgaaga

SEQ ID NO: 41391 - DNA, 20 bp, Artificial Sequence
  Description of Artificial Sequence: Synthetic oligonucleotide
  Target: SCNA; (-) strand; PAM type: YTN; PAM sequence: TTG
ttctcacattttacaggtga

SEQ ID NO: 41392 - DNA, 20 bp, Artificial Sequence
  Description of Artificial Sequence: Synthetic oligonucleotide
  Target: SCNA; (-) strand; PAM type: YTN; PAM sequence: TTT
gttctcacattttacaggtg

SEQ ID NO: 41393 - DNA, 20 bp, Artificial Sequence
  Description of Artificial Sequence: Synthetic oligonucleotide
  Target: SCNA; (-) strand; PAM type: YTN; PAM sequence: TTT
tgttctcacattttacaggt

SEQ ID NO: 41394 - DNA, 20 bp, Artificial Sequence
  Description of Artificial Sequence: Synthetic oligonucleotide
  Target: SCNA; (-) strand; PAM type: YTN; PAM sequence: TTG
attttgttctcacattttac

SEQ ID NO: 41395 - DNA, 20 bp, Artificial Sequence
  Description of Artificial Sequence: Synthetic oligonucleotide
  Target: SCNA; (-) strand; PAM type: YTN; PAM sequence: CTT
gattttgttctcacatttta

SEQ ID NO: 41396 - DNA, 20 bp, Artificial Sequence
  Description of Artificial Sequence: Synthetic oligonucleotide
  Target: SCNA; (-) strand; PAM type: YTN; PAM sequence: TTA
tagacagcttgattttgttc

SEQ ID NO: 41397 - DNA, 20 bp, Artificial Sequence
  Description of Artificial Sequence: Synthetic oligonucleotide
  Target: SCNA; (-) strand; PAM type: YTN; PAM sequence: TTT
atagacagcttgattttgtt

SEQ ID NO: 41398 - DNA, 20 bp, Artificial Sequence
  Description of Artificial Sequence: Synthetic oligonucleotide
  Target: SCNA; (-) strand; PAM type: YTN; PAM sequence: CTT
tatagacagcttgattttgt

SEQ ID NO: 41399 - DNA, 20 bp, Artificial Sequence
  Description of Artificial Sequence: Synthetic oligonucleotide
  Target: SCNA; (-) strand; PAM type: YTN; PAM sequence: CTG
gaaaaggctttatagacagc

SEQ ID NO: 41400 - DNA, 20 bp, Artificial Sequence
  Description of Artificial Sequence: Synthetic oligonucleotide
  Target: SCNA; (-) strand; PAM type: YTN; PAM sequence: TTA
gtctggaaaaggctttatag

SEQ ID NO: 41401 - DNA, 20 bp, Artificial Sequence
  Description of Artificial Sequence: Synthetic oligonucleotide
  Target: SCNA; (-) strand; PAM type: YTN; PAM sequence: CTT
agtctggaaaaggctttata

SEQ ID NO: 41402 - DNA, 20 bp, Artificial Sequence
  Description of Artificial Sequence: Synthetic oligonucleotide
  Target: SCNA; (-) strand; PAM type: YTN; PAM sequence: TTA
gagcatcttagtctggaaaa

SEQ ID NO: 41403 - DNA, 20 bp, Artificial Sequence
  Description of Artificial Sequence: Synthetic oligonucleotide
  Target: SCNA; (-) strand; PAM type: YTN; PAM sequence: CTG
agaattagagcatcttagtc

SEQ ID NO: 41404 - DNA, 20 bp, Artificial Sequence
  Description of Artificial Sequence: Synthetic oligonucleotide
  Target: SCNA; (-) strand; PAM type: YTN; PAM sequence: TTC
tgagaattagagcatcttag

SEQ ID NO: 41405 - DNA, 20 bp, Artificial Sequence
  Description of Artificial Sequence: Synthetic oligonucleotide
  Target: SCNA; (-) strand; PAM type: YTN; PAM sequence: CTT
ctgagaattagagcatctta

SEQ ID NO: 41406 - DNA, 20 bp, Artificial Sequence
  Description of Artificial Sequence: Synthetic oligonucleotide
  Target: SCNA; (-) strand; PAM type: YTN; PAM sequence: TTC
cttctgagaattagagcatc

SEQ ID NO: 41407 - DNA, 20 bp, Artificial Sequence
  Description of Artificial Sequence: Synthetic oligonucleotide
  Target: SCNA; (-) strand; PAM type: YTN; PAM sequence: TTT
ccttctgagaattagagcat

SEQ ID NO: 41408 - DNA, 20 bp, Artificial Sequence
  Description of Artificial Sequence: Synthetic oligonucleotide
  Target: SCNA; (-) strand; PAM type: YTN; PAM sequence: TTA
atttccttctgagaattaga

SEQ ID NO: 41409 - DNA, 20 bp, Artificial Sequence
  Description of Artificial Sequence: Synthetic oligonucleotide
  Target: SCNA; (-) strand; PAM type: YTN; PAM sequence: CTT
aatttccttctgagaattag

SEQ ID NO: 41410 - DNA, 20 bp, Artificial Sequence
  Description of Artificial Sequence: Synthetic oligonucleotide
  Target: SCNA; (-) strand; PAM type: YTN; PAM sequence: TTC
aaacatcttaatttccttct

SEQ ID NO: 41411 - DNA, 20 bp, Artificial Sequence
  Description of Artificial Sequence: Synthetic oligonucleotide
  Target: SCNA; (-) strand; PAM type: YTN; PAM sequence: CTT
caaacatcttaatttccttc

SEQ ID NO: 41412 - DNA, 20 bp, Artificial Sequence
  Description of Artificial Sequence: Synthetic oligonucleotide
  Target: SCNA; (-) strand; PAM type: YTN; PAM sequence: TTG
ccttcaaacatcttaatttc

SEQ ID NO: 41413 - DNA, 20 bp, Artificial Sequence
  Description of Artificial Sequence: Synthetic oligonucleotide
  Target: SCNA; (-) strand; PAM type: YTN; PAM sequence: CTT
gccttcaaacatcttaattt

SEQ ID NO: 41414 - DNA, 20 bp, Artificial Sequence
  Description of Artificial Sequence: Synthetic oligonucleotide
  Target: SCNA; (-) strand; PAM type: YTN; PAM sequence: CTG
ggagagtgaaagtagggaaa

SEQ ID NO: 41415 - DNA, 20 bp, Artificial Sequence
  Description of Artificial Sequence: Synthetic oligonucleotide
  Target: SCNA; (-) strand; PAM type: YTN; PAM sequence: TTC
aactgggagagtgaaagtag

SEQ ID NO: 41416 - DNA, 20 bp, Artificial Sequence
  Description of Artificial Sequence: Synthetic oligonucleotide
  Target: SCNA; (-) strand; PAM type: YTN; PAM sequence: TTT
caactgggagagtgaaagta

SEQ ID NO: 41417 - DNA, 20 bp, Artificial Sequence
  Description of Artificial Sequence: Synthetic oligonucleotide
  Target: SCNA; (-) strand; PAM type: YTN; PAM sequence: TTT
tcaactgggagagtgaaagt

SEQ ID NO: 41418 - DNA, 20 bp, Artificial Sequence
  Description of Artificial Sequence: Synthetic oligonucleotide
  Target: SCNA; (-) strand; PAM type: YTN; PAM sequence: TTG
aagccatagatgaagacgaa

SEQ ID NO: 41419 - DNA, 20 bp, Artificial Sequence
  Description of Artificial Sequence: Synthetic oligonucleotide
  Target: SCNA; (-) strand; PAM type: YTN; PAM sequence: TTG
aaatacaagtaataattgaa

SEQ ID NO: 41420 - DNA, 20 bp, Artificial Sequence
  Description of Artificial Sequence: Synthetic oligonucleotide
  Target: SCNA; (-) strand; PAM type: YTN; PAM sequence: TTT
gaaatacaagtaataattga

SEQ ID NO: 41421 - DNA, 20 bp, Artificial Sequence
  Description of Artificial Sequence: Synthetic oligonucleotide
  Target: SCNA; (-) strand; PAM type: YTN; PAM sequence: TTG
aggtttgaaatacaagtaat

SEQ ID NO: 41422 - DNA, 20 bp, Artificial Sequence
  Description of Artificial Sequence: Synthetic oligonucleotide
  Target: SCNA; (-) strand; PAM type: YTN; PAM sequence: CTT
gaggtttgaaatacaagtaa

SEQ ID NO: 41423 - DNA, 20 bp, Artificial Sequence
  Description of Artificial Sequence: Synthetic oligonucleotide
  Target: SCNA; (-) strand; PAM type: YTN; PAM sequence: CTG
tatggagagcttgaggtttg

SEQ ID NO: 41424 - DNA, 20 bp, Artificial Sequence
  Description of Artificial Sequence: Synthetic oligonucleotide
  Target: SCNA; (-) strand; PAM type: YTN; PAM sequence: CTA
tccagatactgtatggagag

SEQ ID NO: 41425 - DNA, 20 bp, Artificial Sequence
  Description of Artificial Sequence: Synthetic oligonucleotide
  Target: SCNA; (-) strand; PAM type: YTN; PAM sequence: TTG
tggatgctatccagatactg

SEQ ID NO: 41426 - DNA, 20 bp, Artificial Sequence
  Description of Artificial Sequence: Synthetic oligonucleotide
  Target: SCNA; (-) strand; PAM type: YTN; PAM sequence: TTG
tgttgtggatgctatccaga

SEQ ID NO: 41427 - DNA, 20 bp, Artificial Sequence
  Description of Artificial Sequence: Synthetic oligonucleotide
  Target: SCNA; (-) strand; PAM type: YTN; PAM sequence: TTT
gtgttgtggatgctatccag

SEQ ID NO: 41428 - DNA, 20 bp, Artificial Sequence
  Description of Artificial Sequence: Synthetic oligonucleotide
  Target: SCNA; (-) strand; PAM type: YTN; PAM sequence: TTA
atatttgtgttgtggatgct

SEQ ID NO: 41429 - DNA, 20 bp, Artificial Sequence
  Description of Artificial Sequence: Synthetic oligonucleotide
  Target: SCNA; (-) strand; PAM type: YTN; PAM sequence: TTA
aatccattaatatttgtgtt

SEQ ID NO: 41430 - DNA, 20 bp, Artificial Sequence
  Description of Artificial Sequence: Synthetic oligonucleotide
  Target: SCNA; (-) strand; PAM type: YTN; PAM sequence: TTA
attaaatccattaatatttg

SEQ ID NO: 41431 - DNA, 20 bp, Artificial Sequence
  Description of Artificial Sequence: Synthetic oligonucleotide
  Target: SCNA; (-) strand; PAM type: YTN; PAM sequence: TTT
aattaaatccattaatattt

SEQ ID NO: 41432 - DNA, 20 bp, Artificial Sequence
  Description of Artificial Sequence: Synthetic oligonucleotide
  Target: SCNA; (-) strand; PAM type: YTN; PAM sequence: CTT
taattaaatccattaatatt

SEQ ID NO: 41433 - DNA, 20 bp, Artificial Sequence
  Description of Artificial Sequence: Synthetic oligonucleotide
  Target: SCNA; (-) strand; PAM type: YTN; PAM sequence: CTG
atccctttaattaaatccat

SEQ ID NO: 41434 - DNA, 20 bp, Artificial Sequence
  Description of Artificial Sequence: Synthetic oligonucleotide
  Target: SCNA; (-) strand; PAM type: YTN; PAM sequence: TTA
ggaggaataatctgatccct

SEQ ID NO: 41435 - DNA, 20 bp, Artificial Sequence
  Description of Artificial Sequence: Synthetic oligonucleotide
  Target: SCNA; (-) strand; PAM type: YTN; PAM sequence: TTT
aggaggaataatctgatccc

SEQ ID NO: 41436 - DNA, 20 bp, Artificial Sequence
  Description of Artificial Sequence: Synthetic oligonucleotide
  Target: SCNA; (-) strand; PAM type: YTN; PAM sequence: CTT
taggaggaataatctgatcc

SEQ ID NO: 41437 - DNA, 20 bp, Artificial Sequence
  Description of Artificial Sequence: Synthetic oligonucleotide
  Target: SCNA; (-) strand; PAM type: YTN; PAM sequence: CTC
tttaggaggaataatctgat

SEQ ID NO: 41438 - DNA, 20 bp, Artificial Sequence
  Description of Artificial Sequence: Synthetic oligonucleotide
  Target: SCNA; (-) strand; PAM type: YTN; PAM sequence: TTG
ctctttaggaggaataatct

SEQ ID NO: 41439 - DNA, 20 bp, Artificial Sequence
  Description of Artificial Sequence: Synthetic oligonucleotide
  Target: SCNA; (-) strand; PAM type: YTN; PAM sequence: TTA
gagttgctctttaggaggaa

SEQ ID NO: 41440 - DNA, 20 bp, Artificial Sequence
  Description of Artificial Sequence: Synthetic oligonucleotide
  Target: SCNA; (-) strand; PAM type: YTN; PAM sequence: TTA
ttagagttgctctttaggag

SEQ ID NO: 41441 - DNA, 20 bp, Artificial Sequence
  Description of Artificial Sequence: Synthetic oligonucleotide
  Target: SCNA; (-) strand; PAM type: YTN; PAM sequence: CTG
atattattagagttgctctt

SEQ ID NO: 41442 - DNA, 20 bp, Artificial Sequence
  Description of Artificial Sequence: Synthetic oligonucleotide
  Target: SCNA; (-) strand; PAM type: YTN; PAM sequence: TTA
agcagaatcctgatattatt

SEQ ID NO: 41443 - DNA, 20 bp, Artificial Sequence
  Description of Artificial Sequence: Synthetic oligonucleotide
  Target: SCNA; (-) strand; PAM type: YTN; PAM sequence: TTT
aagcagaatcctgatattat

SEQ ID NO: 41444 - DNA, 20 bp, Artificial Sequence
  Description of Artificial Sequence: Synthetic oligonucleotide
  Target: SCNA; (-) strand; PAM type: YTN; PAM sequence: TTT
taagcagaatcctgatatta

SEQ ID NO: 41445 - DNA, 20 bp, Artificial Sequence
  Description of Artificial Sequence: Synthetic oligonucleotide
  Target: SCNA; (-) strand; PAM type: YTN; PAM sequence: TTT
ttaagcagaatcctgatatt

SEQ ID NO: 41446 - DNA, 20 bp, Artificial Sequence
  Description of Artificial Sequence: Synthetic oligonucleotide
  Target: SCNA; (-) strand; PAM type: YTN; PAM sequence: TTG
tttttaagcagaatcctgat

SEQ ID NO: 41447 - DNA, 20 bp, Artificial Sequence
  Description of Artificial Sequence: Synthetic oligonucleotide
  Target: SCNA; (-) strand; PAM type: YTN; PAM sequence: TTT
gtttttaagcagaatcctga

SEQ ID NO: 41448 - DNA, 20 bp, Artificial Sequence
  Description of Artificial Sequence: Synthetic oligonucleotide
  Target: SCNA; (-) strand; PAM type: YTN; PAM sequence: TTG
tttgtttttaagcagaatcc

SEQ ID NO: 41449 - DNA, 20 bp, Artificial Sequence
  Description of Artificial Sequence: Synthetic oligonucleotide
  Target: SCNA; (-) strand; PAM type: YTN; PAM sequence: TTT
gtttgtttttaagcagaatc

SEQ ID NO: 41450 - DNA, 20 bp, Artificial Sequence
  Description of Artificial Sequence: Synthetic oligonucleotide
  Target: SCNA; (-) strand; PAM type: YTN; PAM sequence: TTA
tttgtttgtttttaagcaga

SEQ ID NO: 41451 - DNA, 20 bp, Artificial Sequence
  Description of Artificial Sequence: Synthetic oligonucleotide
  Target: SCNA; (-) strand; PAM type: YTN; PAM sequence: CTT
atttgtttgtttttaagcag

SEQ ID NO: 41452 - DNA, 20 bp, Artificial Sequence
  Description of Artificial Sequence: Synthetic oligonucleotide
  Target: SCNA; (-) strand; PAM type: YTN; PAM sequence: TTA
tgcttatttgtttgttttta

SEQ ID NO: 41453 - DNA, 20 bp, Artificial Sequence
  Description of Artificial Sequence: Synthetic oligonucleotide
  Target: SCNA; (-) strand; PAM type: YTN; PAM sequence: TTG
aagttatgcttatttgtttg

SEQ ID NO: 41454 - DNA, 20 bp, Artificial Sequence
  Description of Artificial Sequence: Synthetic oligonucleotide
  Target: SCNA; (-) strand; PAM type: YTN; PAM sequence: TTA
ttgaagttatgcttatttgt

SEQ ID NO: 41455 - DNA, 20 bp, Artificial Sequence
  Description of Artificial Sequence: Synthetic oligonucleotide
  Target: SCNA; (-) strand; PAM type: YTN; PAM sequence: TTG
agttattgaagttatgctta

SEQ ID NO: 41456 - DNA, 20 bp, Artificial Sequence
  Description of Artificial Sequence: Synthetic oligonucleotide
  Target: SCNA; (-) strand; PAM type: YTN; PAM sequence: CTT
gagttattgaagttatgctt

SEQ ID NO: 41457 - DNA, 20 bp, Artificial Sequence
  Description of Artificial Sequence: Synthetic oligonucleotide
  Target: SCNA; (-) strand; PAM type: YTN; PAM sequence: TTC
agaaaacaacttgagttatt

SEQ ID NO: 41458 - DNA, 20 bp, Artificial Sequence
  Description of Artificial Sequence: Synthetic oligonucleotide
  Target: SCNA; (-) strand; PAM type: YTN; PAM sequence: CTA
ttcagaaaacaacttgagtt

SEQ ID NO: 41459 - DNA, 20 bp, Artificial Sequence
  Description of Artificial Sequence: Synthetic oligonucleotide
  Target: SCNA; (-) strand; PAM type: YTN; PAM sequence: TTC
tattcagaaaacaacttgag

SEQ ID NO: 41460 - DNA, 20 bp, Artificial Sequence
  Description of Artificial Sequence: Synthetic oligonucleotide
  Target: SCNA; (-) strand; PAM type: YTN; PAM sequence: TTG
tattctattcagaaaacaac

SEQ ID NO: 41461 - DNA, 20 bp, Artificial Sequence
  Description of Artificial Sequence: Synthetic oligonucleotide
  Target: SCNA; (-) strand; PAM type: YTN; PAM sequence: CTT
gtattctattcagaaaacaa

SEQ ID NO: 41462 - DNA, 20 bp, Artificial Sequence
  Description of Artificial Sequence: Synthetic oligonucleotide
  Target: SCNA; (-) strand; PAM type: YTN; PAM sequence: TTC
agcttgtattctattcagaa

SEQ ID NO: 41463 - DNA, 20 bp, Artificial Sequence
  Description of Artificial Sequence: Synthetic oligonucleotide
  Target: SCNA; (-) strand; PAM type: YTN; PAM sequence: TTT
cagcttgtattctattcaga

SEQ ID NO: 41464 - DNA, 20 bp, Artificial Sequence
  Description of Artificial Sequence: Synthetic oligonucleotide
  Target: SCNA; (-) strand; PAM type: YTN; PAM sequence: TTG
tcatttcagcttgtattcta

SEQ ID NO: 41465 - DNA, 20 bp, Artificial Sequence
  Description of Artificial Sequence: Synthetic oligonucleotide
  Target: SCNA; (-) strand; PAM type: YTN; PAM sequence: CTT
gtcatttcagcttgtattct

SEQ ID NO: 41466 - DNA, 20 bp, Artificial Sequence
  Description of Artificial Sequence: Synthetic oligonucleotide
  Target: SCNA; (-) strand; PAM type: YTN; PAM sequence: TTA
ggataatcttgtcatttcag

SEQ ID NO: 41467 - DNA, 20 bp, Artificial Sequence
  Description of Artificial Sequence: Synthetic oligonucleotide
  Target: SCNA; (-) strand; PAM type: YTN; PAM sequence: TTA
tagagtattaggataatctt

SEQ ID NO: 41468 - DNA, 20 bp, Artificial Sequence
  Description of Artificial Sequence: Synthetic oligonucleotide
  Target: SCNA; (-) strand; PAM type: YTN; PAM sequence: CTA
tgggtcaaagacaagttata

SEQ ID NO: 41469 - DNA, 20 bp, Artificial Sequence
  Description of Artificial Sequence: Synthetic oligonucleotide
  Target: SCNA; (-) strand; PAM type: YTN; PAM sequence: TTG
cagctatgggtcaaagacaa

SEQ ID NO: 41470 - DNA, 20 bp, Artificial Sequence
  Description of Artificial Sequence: Synthetic oligonucleotide
  Target: SCNA; (-) strand; PAM type: YTN; PAM sequence: TTT
gcagctatgggtcaaagaca

SEQ ID NO: 41471 - DNA, 20 bp, Artificial Sequence
  Description of Artificial Sequence: Synthetic oligonucleotide
  Target: SCNA; (-) strand; PAM type: YTN; PAM sequence: TTG
aatttgcagctatgggtcaa

SEQ ID NO: 41472 - DNA, 20 bp, Artificial Sequence
  Description of Artificial Sequence: Synthetic oligonucleotide
  Target: SCNA; (-) strand; PAM type: YTN; PAM sequence: TTA
ggaacaaggaaaatggtgat

SEQ ID NO: 41473 - DNA, 20 bp, Artificial Sequence
  Description of Artificial Sequence: Synthetic oligonucleotide
  Target: SCNA; (-) strand; PAM type: YTN; PAM sequence: CTT
aggaacaaggaaaatggtga

SEQ ID NO: 41474 - DNA, 20 bp, Artificial Sequence
  Description of Artificial Sequence: Synthetic oligonucleotide
  Target: SCNA; (-) strand; PAM type: YTN; PAM sequence: CTC
aagcttaggaacaaggaaaa

SEQ ID NO: 41475 - DNA, 20 bp, Artificial Sequence
  Description of Artificial Sequence: Synthetic oligonucleotide
  Target: SCNA; (-) strand; PAM type: YTN; PAM sequence: TTA
tgactcaagcttaggaacaa

SEQ ID NO: 41476 - DNA, 20 bp, Artificial Sequence
  Description of Artificial Sequence: Synthetic oligonucleotide
  Target: SCNA; (-) strand; PAM type: YTN; PAM sequence: CTG
agaacagtgaataattatga

SEQ ID NO: 41477 - DNA, 20 bp, Artificial Sequence
  Description of Artificial Sequence: Synthetic oligonucleotide
  Target: SCNA; (-) strand; PAM type: YTN; PAM sequence: CTG
agcatgcaaatggatatgtc

SEQ ID NO: 41478 - DNA, 20 bp, Artificial Sequence
  Description of Artificial Sequence: Synthetic oligonucleotide
  Target: SCNA; (-) strand; PAM type: YTN; PAM sequence: CTG
gcacaagggaatatcagaag

SEQ ID NO: 41479 - DNA, 20 bp, Artificial Sequence
  Description of Artificial Sequence: Synthetic oligonucleotide
  Target: SCNA; (-) strand; PAM type: YTN; PAM sequence: TTC
tggcacaagggaatatcaga

SEQ ID NO: 41480 - DNA, 20 bp, Artificial Sequence
  Description of Artificial Sequence: Synthetic oligonucleotide
  Target: SCNA; (-) strand; PAM type: YTN; PAM sequence: CTG
ggtgggaaaaggtaagagat

SEQ ID NO: 41481 - DNA, 20 bp, Artificial Sequence
  Description of Artificial Sequence: Synthetic oligonucleotide
  Target: SCNA; (-) strand; PAM type: YTN; PAM sequence: TTG
atctgggtgggaaaaggtaa

SEQ ID NO: 41482 - DNA, 20 bp, Artificial Sequence
  Description of Artificial Sequence: Synthetic oligonucleotide
  Target: SCNA; (-) strand; PAM type: YTN; PAM sequence: TTG
aggaggtaatgttgatctgg

SEQ ID NO: 41483 - DNA, 20 bp, Artificial Sequence
  Description of Artificial Sequence: Synthetic oligonucleotide
  Target: SCNA; (-) strand; PAM type: YTN; PAM sequence: TTA
ttgaggaggtaatgttgatc

SEQ ID NO: 41484 - DNA, 20 bp, Artificial Sequence
  Description of Artificial Sequence: Synthetic oligonucleotide
  Target: SCNA; (-) strand; PAM type: YTN; PAM sequence: TTT
attgaggaggtaatgttgat

SEQ ID NO: 41485 - DNA, 20 bp, Artificial Sequence
  Description of Artificial Sequence: Synthetic oligonucleotide
  Target: SCNA; (-) strand; PAM type: YTN; PAM sequence: TTT
tattgaggaggtaatgttga

SEQ ID NO: 41486 - DNA, 20 bp, Artificial Sequence
  Description of Artificial Sequence: Synthetic oligonucleotide
  Target: SCNA; (-) strand; PAM type: YTN; PAM sequence: TTC
aatcaatcaggagaagtttt

SEQ ID NO: 41487 - DNA, 20 bp, Artificial Sequence
  Description of Artificial Sequence: Synthetic oligonucleotide
  Target: SCNA; (-) strand; PAM type: YTN; PAM sequence: TTT
caatcaatcaggagaagttt

SEQ ID NO: 41488 - DNA, 20 bp, Artificial Sequence
  Description of Artificial Sequence: Synthetic oligonucleotide
  Target: SCNA; (-) strand; PAM type: YTN; PAM sequence: CTG
tttcaatcaatcaggagaag

SEQ ID NO: 41489 - DNA, 20 bp, Artificial Sequence
  Description of Artificial Sequence: Synthetic oligonucleotide
  Target: SCNA; (-) strand; PAM type: YTN; PAM sequence: TTA
aagatctgtttcaatcaatc

SEQ ID NO: 41490 - DNA, 20 bp, Artificial Sequence
  Description of Artificial Sequence: Synthetic oligonucleotide
  Target: SCNA; (-) strand; PAM type: YTN; PAM sequence: TTT
aaagatctgtttcaatcaat

SEQ ID NO: 41491 - DNA, 20 bp, Artificial Sequence
  Description of Artificial Sequence: Synthetic oligonucleotide
  Target: SCNA; (-) strand; PAM type: YTN; PAM sequence: TTT
taaagatctgtttcaatcaa

SEQ ID NO: 41492 - DNA, 20 bp, Artificial Sequence
  Description of Artificial Sequence: Synthetic oligonucleotide
  Target: SCNA; (-) strand; PAM type: YTN; PAM sequence: CTA
aaaagtaaaacattttaaag

SEQ ID NO: 41493 - DNA, 20 bp, Artificial Sequence
  Description of Artificial Sequence: Synthetic oligonucleotide
  Target: SCNA; (-) strand; PAM type: YTN; PAM sequence: TTC
gatgtaccaggcatcacagg

SEQ ID NO: 41494 - DNA, 20 bp, Artificial Sequence
  Description of Artificial Sequence: Synthetic oligonucleotide
  Target: SCNA; (-) strand; PAM type: YTN; PAM sequence: CTT
cgatgtaccaggcatcacag

SEQ ID NO: 41495 - DNA, 20 bp, Artificial Sequence
  Description of Artificial Sequence: Synthetic oligonucleotide
  Target: SCNA; (-) strand; PAM type: YTN; PAM sequence: TTG
tcttcgatgtaccaggcatc

SEQ ID NO: 41496 - DNA, 20 bp, Artificial Sequence
  Description of Artificial Sequence: Synthetic oligonucleotide
  Target: SCNA; (-) strand; PAM type: YTN; PAM sequence: TTG
attgtcttcgatgtaccagg

SEQ ID NO: 41497 - DNA, 20 bp, Artificial Sequence
  Description of Artificial Sequence: Synthetic oligonucleotide
  Target: SCNA; (-) strand; PAM type: YTN; PAM sequence: TTA
acaaacataattgattgtct

SEQ ID NO: 41498 - DNA, 20 bp, Artificial Sequence
  Description of Artificial Sequence: Synthetic oligonucleotide
  Target: SCNA; (-) strand; PAM type: YTN; PAM sequence: TTT
aacaaacataattgattgtc

SEQ ID NO: 41499 - DNA, 20 bp, Artificial Sequence
  Description of Artificial Sequence: Synthetic oligonucleotide
  Target: SCNA; (-) strand; PAM type: YTN; PAM sequence: CTT
taacaaacataattgattgt

SEQ ID NO: 41500 - DNA, 20 bp, Artificial Sequence
  Description of Artificial Sequence: Synthetic oligonucleotide
  Target: SCNA; (-) strand; PAM type: YTN; PAM sequence: TTC
ctttaacaaacataattgat

SEQ ID NO: 41501 - DNA, 20 bp, Artificial Sequence
  Description of Artificial Sequence: Synthetic oligonucleotide
  Target: SCNA; (-) strand; PAM type: YTN; PAM sequence: TTA
tgattcctttaacaaacata

SEQ ID NO: 41502 - DNA, 20 bp, Artificial Sequence
  Description of Artificial Sequence: Synthetic oligonucleotide
  Target: SCNA; (-) strand; PAM type: YTN; PAM sequence: TTC
attatgattcctttaacaaa

SEQ ID NO: 41503 - DNA, 20 bp, Artificial Sequence
  Description of Artificial Sequence: Synthetic oligonucleotide
  Target: SCNA; (-) strand; PAM type: YTN; PAM sequence: CTT
cattatgattcctttaacaa

SEQ ID NO: 41504 - DNA, 20 bp, Artificial Sequence
  Description of Artificial Sequence: Synthetic oligonucleotide
  Target: SCNA; (-) strand; PAM type: YTN; PAM sequence: TTC
ttcattatgattcctttaac

SEQ ID NO: 41505 - DNA, 20 bp, Artificial Sequence
  Description of Artificial Sequence: Synthetic oligonucleotide
  Target: SCNA; (-) strand; PAM type: YTN; PAM sequence: TTT
cttcattatgattcctttaa

SEQ ID NO: 41506 - DNA, 20 bp, Artificial Sequence
  Description of Artificial Sequence: Synthetic oligonucleotide
  Target: SCNA; (-) strand; PAM type: YTN; PAM sequence: TTC
atttcttcattatgattcct

SEQ ID NO: 41507 - DNA, 20 bp, Artificial Sequence
  Description of Artificial Sequence: Synthetic oligonucleotide
  Target: SCNA; (-) strand; PAM type: YTN; PAM sequence: TTC
attcatttcttcattatgat

SEQ ID NO: 41508 - DNA, 20 bp, Artificial Sequence
  Description of Artificial Sequence: Synthetic oligonucleotide
  Target: SCNA; (-) strand; PAM type: YTN; PAM sequence: TTC
attcattcatttcttcatta

SEQ ID NO: 41509 - DNA, 20 bp, Artificial Sequence
  Description of Artificial Sequence: Synthetic oligonucleotide
  Target: SCNA; (-) strand; PAM type: YTN; PAM sequence: TTG
atgaaaaaaaatagaaattc

SEQ ID NO: 41510 - DNA, 20 bp, Artificial Sequence
  Description of Artificial Sequence: Synthetic oligonucleotide
  Target: SCNA; (-) strand; PAM type: YTN; PAM sequence: TTT
gatgaaaaaaaatagaaatt

SEQ ID NO: 41511 - DNA, 20 bp, Artificial Sequence
  Description of Artificial Sequence: Synthetic oligonucleotide
  Target: SCNA; (-) strand; PAM type: YTN; PAM sequence: CTG
gtaggtttgatgaaaaaaaa

SEQ ID NO: 41512 - DNA, 20 bp, Artificial Sequence
  Description of Artificial Sequence: Synthetic oligonucleotide
  Target: SCNA; (-) strand; PAM type: YTN; PAM sequence: TTA
cagtctggtaggtttgatga

SEQ ID NO: 41513 - DNA, 20 bp, Artificial Sequence
  Description of Artificial Sequence: Synthetic oligonucleotide
  Target: SCNA; (-) strand; PAM type: YTN; PAM sequence: TTT
acagtctggtaggtttgatg

SEQ ID NO: 41514 - DNA, 20 bp, Artificial Sequence
  Description of Artificial Sequence: Synthetic oligonucleotide
  Target: SCNA; (-) strand; PAM type: YTN; PAM sequence: TTA
ccaggacataaggagtttac

SEQ ID NO: 41515 - DNA, 20 bp, Artificial Sequence
  Description of Artificial Sequence: Synthetic oligonucleotide
  Target: SCNA; (-) strand; PAM type: YTN; PAM sequence: TTG
acattaccaggacataagga

SEQ ID NO: 41516 - DNA, 20 bp, Artificial Sequence
  Description of Artificial Sequence: Synthetic oligonucleotide
  Target: SCNA; (-) strand; PAM type: YTN; PAM sequence: CTA
tagagtaattgacattacca

SEQ ID NO: 41517 - DNA, 20 bp, Artificial Sequence
  Description of Artificial Sequence: Synthetic oligonucleotide
  Target: SCNA; (-) strand; PAM type: YTN; PAM sequence: CTA
aacacaatggaaaactatag

SEQ ID NO: 41518 - DNA, 20 bp, Artificial Sequence
  Description of Artificial Sequence: Synthetic oligonucleotide
  Target: SCNA; (-) strand; PAM type: YTN; PAM sequence: TTA
tgcaagacacagtactaaac

SEQ ID NO: 41519 - DNA, 20 bp, Artificial Sequence
  Description of Artificial Sequence: Synthetic oligonucleotide
  Target: SCNA; (-) strand; PAM type: YTN; PAM sequence: TTT
atgcaagacacagtactaaa

SEQ ID NO: 41520 - DNA, 20 bp, Artificial Sequence
  Description of Artificial Sequence: Synthetic oligonucleotide
  Target: SCNA; (-) strand; PAM type: YTN; PAM sequence: TTT
tatgcaagacacagtactaa

SEQ ID NO: 41521 - DNA, 20 bp, Artificial Sequence
  Description of Artificial Sequence: Synthetic oligonucleotide
  Target: SCNA; (-) strand; PAM type: YTN; PAM sequence: CTT
ttatgcaagacacagtacta

SEQ ID NO: 41522 - DNA, 20 bp, Artificial Sequence
  Description of Artificial Sequence: Synthetic oligonucleotide
  Target: SCNA; (-) strand; PAM type: YTN; PAM sequence: TTG
gggtcttttatgcaagacac

SEQ ID NO: 41523 - DNA, 20 bp, Artificial Sequence
  Description of Artificial Sequence: Synthetic oligonucleotide
  Target: SCNA; (-) strand; PAM type: YTN; PAM sequence: TTT
ggggtcttttatgcaagaca

SEQ ID NO: 41524 - DNA, 20 bp, Artificial Sequence
  Description of Artificial Sequence: Synthetic oligonucleotide
  Target: SCNA; (-) strand; PAM type: YTN; PAM sequence: TTT
tggggtcttttatgcaagac

SEQ ID NO: 41525 - DNA, 20 bp, Artificial Sequence
  Description of Artificial Sequence: Synthetic oligonucleotide
  Target: SCNA; (-) strand; PAM type: YTN; PAM sequence: TTC
caatattttggggtctttta

SEQ ID NO: 41526 - DNA, 20 bp, Artificial Sequence
  Description of Artificial Sequence: Synthetic oligonucleotide
  Target: SCNA; (-) strand; PAM type: YTN; PAM sequence: TTT
ccaatattttggggtctttt

SEQ ID NO: 41527 - DNA, 20 bp, Artificial Sequence
  Description of Artificial Sequence: Synthetic oligonucleotide
  Target: SCNA; (-) strand; PAM type: YTN; PAM sequence: CTA
ataagaatttccaatatttt

SEQ ID NO: 41528 - DNA, 20 bp, Artificial Sequence
  Description of Artificial Sequence: Synthetic oligonucleotide
  Target: SCNA; (-) strand; PAM type: YTN; PAM sequence: TTG
cctaataagaatttccaata

SEQ ID NO: 41529 - DNA, 20 bp, Artificial Sequence
  Description of Artificial Sequence: Synthetic oligonucleotide
  Target: SCNA; (-) strand; PAM type: YTN; PAM sequence: TTT
gcctaataagaatttccaat

SEQ ID NO: 41530 - DNA, 20 bp, Artificial Sequence
  Description of Artificial Sequence: Synthetic oligonucleotide
  Target: SCNA; (-) strand; PAM type: YTN; PAM sequence: TTG
tttgcctaataagaatttcc

SEQ ID NO: 41531 - DNA, 20 bp, Artificial Sequence
  Description of Artificial Sequence: Synthetic oligonucleotide
  Target: SCNA; (-) strand; PAM type: YTN; PAM sequence: TTT
gtttgcctaataagaatttc

SEQ ID NO: 41532 - DNA, 20 bp, Artificial Sequence
  Description of Artificial Sequence: Synthetic oligonucleotide
  Target: SCNA; (-) strand; PAM type: YTN; PAM sequence: TTG
tttgtttgcctaataagaat

SEQ ID NO: 41533 - DNA, 20 bp, Artificial Sequence
  Description of Artificial Sequence: Synthetic oligonucleotide
  Target: SCNA; (-) strand; PAM type: YTN; PAM sequence: TTA
aattgtttgtttgcctaata

SEQ ID NO: 41534 - DNA, 20 bp, Artificial Sequence
  Description of Artificial Sequence: Synthetic oligonucleotide
  Target: SCNA; (-) strand; PAM type: YTN; PAM sequence: TTG
agattaaattgtttgtttgc

SEQ ID NO: 41535 - DNA, 20 bp, Artificial Sequence
  Description of Artificial Sequence: Synthetic oligonucleotide
  Target: SCNA; (-) strand; PAM type: YTN; PAM sequence: TTA
tagaaattgagattaaattg

SEQ ID NO: 41536 - DNA, 20 bp, Artificial Sequence
  Description of Artificial Sequence: Synthetic oligonucleotide
  Target: SCNA; (-) strand; PAM type: YTN; PAM sequence: CTT
atagaaattgagattaaatt

SEQ ID NO: 41537 - DNA, 20 bp, Artificial Sequence
  Description of Artificial Sequence: Synthetic oligonucleotide
  Target: SCNA; (-) strand; PAM type: YTN; PAM sequence: TTC
aacttatagaaattgagatt

SEQ ID NO: 41538 - DNA, 20 bp, Artificial Sequence
  Description of Artificial Sequence: Synthetic oligonucleotide
  Target: SCNA; (-) strand; PAM type: YTN; PAM sequence: TTG
ataataattcaacttataga

SEQ ID NO: 41539 - DNA, 20 bp, Artificial Sequence
  Description of Artificial Sequence: Synthetic oligonucleotide
  Target: SCNA; (-) strand; PAM type: YTN; PAM sequence: CTC
acacagacacacgaaaggca

SEQ ID NO: 41540 - DNA, 20 bp, Artificial Sequence
  Description of Artificial Sequence: Synthetic oligonucleotide
  Target: SCNA; (-) strand; PAM type: YTN; PAM sequence: CTG
tctcacacagacacacgaaa

SEQ ID NO: 41541 - DNA, 20 bp, Artificial Sequence
  Description of Artificial Sequence: Synthetic oligonucleotide
  Target: SCNA; (-) strand; PAM type: YTN; PAM sequence: TTG
gtaacagagcaagactgtct

SEQ ID NO: 41542 - DNA, 20 bp, Artificial Sequence
  Description of Artificial Sequence: Synthetic oligonucleotide
  Target: SCNA; (-) strand; PAM type: YTN; PAM sequence: CTT
ggtaacagagcaagactgtc

SEQ ID NO: 41543 - DNA, 20 bp, Artificial Sequence
  Description of Artificial Sequence: Synthetic oligonucleotide
  Target: SCNA; (-) strand; PAM type: YTN; PAM sequence: CTC
caatcttggtaacagagcaa

SEQ ID NO: 41544 - DNA, 20 bp, Artificial Sequence
  Description of Artificial Sequence: Synthetic oligonucleotide
  Target: SCNA; (-) strand; PAM type: YTN; PAM sequence: CTG
cactccaatcttggtaacag

SEQ ID NO: 41545 - DNA, 20 bp, Artificial Sequence
  Description of Artificial Sequence: Synthetic oligonucleotide
  Target: SCNA; (-) strand; PAM type: YTN; PAM sequence: CTG
agatggcacccctgcactcc

SEQ ID NO: 41546 - DNA, 20 bp, Artificial Sequence
  Description of Artificial Sequence: Synthetic oligonucleotide
  Target: SCNA; (-) strand; PAM type: YTN; PAM sequence: TTG
cagtgagctgagatggcacc

SEQ ID NO: 41547 - DNA, 20 bp, Artificial Sequence
  Description of Artificial Sequence: Synthetic oligonucleotide
  Target: SCNA; (-) strand; PAM type: YTN; PAM sequence: TTG
aacccaggaggcagaggttg

SEQ ID NO: 41548 - DNA, 20 bp, Artificial Sequence
  Description of Artificial Sequence: Synthetic oligonucleotide
  Target: SCNA; (-) strand; PAM type: YTN; PAM sequence: CTT
gaacccaggaggcagaggtt

SEQ ID NO: 41549 - DNA, 20 bp, Artificial Sequence
  Description of Artificial Sequence: Synthetic oligonucleotide
  Target: SCNA; (-) strand; PAM type: YTN; PAM sequence: CTG
aggcatgagagtcacttgaa

SEQ ID NO: 41550 - DNA, 20 bp, Artificial Sequence
  Description of Artificial Sequence: Synthetic oligonucleotide
  Target: SCNA; (-) strand; PAM type: YTN; PAM sequence: TTG
ggaggctgaggcatgagagt

SEQ ID NO: 41551 - DNA, 20 bp, Artificial Sequence
  Description of Artificial Sequence: Synthetic oligonucleotide
  Target: SCNA; (-) strand; PAM type: YTN; PAM sequence: CTT
gggaggctgaggcatgagag

SEQ ID NO: 41552 - DNA, 20 bp, Artificial Sequence
  Description of Artificial Sequence: Synthetic oligonucleotide
  Target: SCNA; (-) strand; PAM type: YTN; PAM sequence: CTA
cttgggaggctgaggcatga

SEQ ID NO: 41553 - DNA, 20 bp, Artificial Sequence
  Description of Artificial Sequence: Synthetic oligonucleotide
  Target: SCNA; (-) strand; PAM type: YTN; PAM sequence: TTC
cagctacttgggaggctgag

SEQ ID NO: 41554 - DNA, 20 bp, Artificial Sequence
  Description of Artificial Sequence: Synthetic oligonucleotide
  Target: SCNA; (-) strand; PAM type: YTN; PAM sequence: CTA
tggttccagctacttgggag

SEQ ID NO: 41555 - DNA, 20 bp, Artificial Sequence
  Description of Artificial Sequence: Synthetic oligonucleotide
  Target: SCNA; (-) strand; PAM type: YTN; PAM sequence: TTA
gccgggcatggtggtacacg

SEQ ID NO: 41556 - DNA, 20 bp, Artificial Sequence
  Description of Artificial Sequence: Synthetic oligonucleotide
  Target: SCNA; (-) strand; PAM type: YTN; PAM sequence: CTA
aaaatacaaaaattagccgg

SEQ ID NO: 41557 - DNA, 20 bp, Artificial Sequence
  Description of Artificial Sequence: Synthetic oligonucleotide
  Target: SCNA; (-) strand; PAM type: YTN; PAM sequence: CTA
ctaaaaatacaaaaattagc

SEQ ID NO: 41558 - DNA, 20 bp, Artificial Sequence
  Description of Artificial Sequence: Synthetic oligonucleotide
  Target: SCNA; (-) strand; PAM type: YTN; PAM sequence: CTC
tactaaaaatacaaaaatta

SEQ ID NO: 41559 - DNA, 20 bp, Artificial Sequence
  Description of Artificial Sequence: Synthetic oligonucleotide
  Target: SCNA; (-) strand; PAM type: YTN; PAM sequence: CTG
gccaacatggtgaaacccca

SEQ ID NO: 41560 - DNA, 20 bp, Artificial Sequence
  Description of Artificial Sequence: Synthetic oligonucleotide
  Target: SCNA; (-) strand; PAM type: YTN; PAM sequence: TTG
gagaccagtctggccaacat

SEQ ID NO: 41561 - DNA, 20 bp, Artificial Sequence
  Description of Artificial Sequence: Synthetic oligonucleotide
  Target: SCNA; (-) strand; PAM type: YTN; PAM sequence: TTG
aggccaggagttggagacca

SEQ ID NO: 41562 - DNA, 20 bp, Artificial Sequence
  Description of Artificial Sequence: Synthetic oligonucleotide
  Target: SCNA; (-) strand; PAM type: YTN; PAM sequence: CTT
gaggccaggagttggagacc

SEQ ID NO: 41563 - DNA, 20 bp, Artificial Sequence
  Description of Artificial Sequence: Synthetic oligonucleotide
  Target: SCNA; (-) strand; PAM type: YTN; PAM sequence: TTA
cttgaggccaggagttggag

SEQ ID NO: 41564 - DNA, 20 bp, Artificial Sequence
  Description of Artificial Sequence: Synthetic oligonucleotide
  Target: SCNA; (-) strand; PAM type: YTN; PAM sequence: TTG
tgagccaaagtggccaggtt

SEQ ID NO: 41565 - DNA, 20 bp, Artificial Sequence
  Description of Artificial Sequence: Synthetic oligonucleotide
  Target: SCNA; (-) strand; PAM type: YTN; PAM sequence: TTT
gtgagccaaagtggccaggt

SEQ ID NO: 41566 - DNA, 20 bp, Artificial Sequence
  Description of Artificial Sequence: Synthetic oligonucleotide
  Target: SCNA; (-) strand; PAM type: YTN; PAM sequence: CTT
tgtgagccaaagtggccagg

SEQ ID NO: 41567 - DNA, 20 bp, Artificial Sequence
  Description of Artificial Sequence: Synthetic oligonucleotide
  Target: SCNA; (-) strand; PAM type: YTN; PAM sequence: CTG
taatcccgcactttgtgagc

SEQ ID NO: 41568 - DNA, 20 bp, Artificial Sequence
  Description of Artificial Sequence: Synthetic oligonucleotide
  Target: SCNA; (-) strand; PAM type: YTN; PAM sequence: TTC
acacctgtaatcccgcactt

SEQ ID NO: 41569 - DNA, 20 bp, Artificial Sequence
  Description of Artificial Sequence: Synthetic oligonucleotide
  Target: SCNA; (-) strand; PAM type: YTN; PAM sequence: TTA
aaaggcatgtcgaggatggg

SEQ ID NO: 41570 - DNA, 20 bp, Artificial Sequence
  Description of Artificial Sequence: Synthetic oligonucleotide
  Target: SCNA; (-) strand; PAM type: YTN; PAM sequence: TTA
ttaaaaggcatgtcgaggat

SEQ ID NO: 41571 - DNA, 20 bp, Artificial Sequence
  Description of Artificial Sequence: Synthetic oligonucleotide
  Target: SCNA; (-) strand; PAM type: YTN; PAM sequence: CTC
acggcattattaaaaggcat

SEQ ID NO: 41572 - DNA, 20 bp, Artificial Sequence
  Description of Artificial Sequence: Synthetic oligonucleotide
  Target: SCNA; (-) strand; PAM type: YTN; PAM sequence: TTC
ctcacggcattattaaaagg

SEQ ID NO: 41573 - DNA, 20 bp, Artificial Sequence
  Description of Artificial Sequence: Synthetic oligonucleotide
  Target: SCNA; (-) strand; PAM type: YTN; PAM sequence: TTA
ttcctcacggcattattaaa

SEQ ID NO: 41574 - DNA, 20 bp, Artificial Sequence
  Description of Artificial Sequence: Synthetic oligonucleotide
  Target: SCNA; (-) strand; PAM type: YTN; PAM sequence: TTA
tgtattattcctcacggcat

SEQ ID NO: 41575 - DNA, 20 bp, Artificial Sequence
  Description of Artificial Sequence: Synthetic oligonucleotide
  Target: SCNA; (-) strand; PAM type: YTN; PAM sequence: TTG
gttatgtattattcctcacg

SEQ ID NO: 41576 - DNA, 20 bp, Artificial Sequence
  Description of Artificial Sequence: Synthetic oligonucleotide
  Target: SCNA; (-) strand; PAM type: YTN; PAM sequence: TTT
ggttatgtattattcctcac

SEQ ID NO: 41577 - DNA, 20 bp, Artificial Sequence
  Description of Artificial Sequence: Synthetic oligonucleotide
  Target: SCNA; (-) strand; PAM type: YTN; PAM sequence: TTG
tagtttggttatgtattatt

SEQ ID NO: 41578 - DNA, 20 bp, Artificial Sequence
  Description of Artificial Sequence: Synthetic oligonucleotide
  Target: SCNA; (-) strand; PAM type: YTN; PAM sequence: TTC
aagtatgttgtagtttggtt

SEQ ID NO: 41579 - DNA, 20 bp, Artificial Sequence
  Description of Artificial Sequence: Synthetic oligonucleotide
  Target: SCNA; (-) strand; PAM type: YTN; PAM sequence: TTG
agttcaagtatgttgtagtt

SEQ ID NO: 41580 - DNA, 20 bp, Artificial Sequence
  Description of Artificial Sequence: Synthetic oligonucleotide
  Target: SCNA; (-) strand; PAM type: YTN; PAM sequence: TTA
aaaattgagttcaagtatgt

SEQ ID NO: 41581 - DNA, 20 bp, Artificial Sequence
  Description of Artificial Sequence: Synthetic oligonucleotide
  Target: SCNA; (-) strand; PAM type: YTN; PAM sequence: CTC
cattaaaaattgagttcaag

SEQ ID NO: 41582 - DNA, 20 bp, Artificial Sequence
  Description of Artificial Sequence: Synthetic oligonucleotide
  Target: SCNA; (-) strand; PAM type: YTN; PAM sequence: CTA
tataatggctccattaaaaa

SEQ ID NO: 41583 - DNA, 20 bp, Artificial Sequence
  Description of Artificial Sequence: Synthetic oligonucleotide
  Target: SCNA; (-) strand; PAM type: YTN; PAM sequence: CTG
ataatcaaaaccaaatgaag

SEQ ID NO: 41584 - DNA, 20 bp, Artificial Sequence
  Description of Artificial Sequence: Synthetic oligonucleotide
  Target: SCNA; (-) strand; PAM type: YTN; PAM sequence: TTA
ccctgataatcaaaaccaaa

SEQ ID NO: 41585 - DNA, 20 bp, Artificial Sequence
  Description of Artificial Sequence: Synthetic oligonucleotide
  Target: SCNA; (-) strand; PAM type: YTN; PAM sequence: TTG
tgagaccaatattaccctga

SEQ ID NO: 41586 - DNA, 20 bp, Artificial Sequence
  Description of Artificial Sequence: Synthetic oligonucleotide
  Target: SCNA; (-) strand; PAM type: YTN; PAM sequence: TTT
gtgagaccaatattaccctg

SEQ ID NO: 41587 - DNA, 20 bp, Artificial Sequence
  Description of Artificial Sequence: Synthetic oligonucleotide
  Target: SCNA; (-) strand; PAM type: YTN; PAM sequence: TTT
tgtgagaccaatattaccct

SEQ ID NO: 41588 - DNA, 20 bp, Artificial Sequence
  Description of Artificial Sequence: Synthetic oligonucleotide
  Target: SCNA; (-) strand; PAM type: YTN; PAM sequence: CTA
attttgtgagaccaatatta

SEQ ID NO: 41589 - DNA, 20 bp, Artificial Sequence
  Description of Artificial Sequence: Synthetic oligonucleotide
  Target: SCNA; (-) strand; PAM type: YTN; PAM sequence: TTC
ccaactaattttgtgagacc

SEQ ID NO: 41590 - DNA, 20 bp, Artificial Sequence
  Description of Artificial Sequence: Synthetic oligonucleotide
  Target: SCNA; (-) strand; PAM type: YTN; PAM sequence: TTT
cccaactaattttgtgagac

SEQ ID NO: 41591 - DNA, 20 bp, Artificial Sequence
  Description of Artificial Sequence: Synthetic oligonucleotide
  Target: SCNA; (-) strand; PAM type: YTN; PAM sequence: TTA
caaaacagaagaggagacat

SEQ ID NO: 41592 - DNA, 20 bp, Artificial Sequence
  Description of Artificial Sequence: Synthetic oligonucleotide
  Target: SCNA; (-) strand; PAM type: YTN; PAM sequence: CTT
acaaaacagaagaggagaca

SEQ ID NO: 41593 - DNA, 20 bp, Artificial Sequence
  Description of Artificial Sequence: Synthetic oligonucleotide
  Target: SCNA; (-) strand; PAM type: YTN; PAM sequence: CTC
ttacaaaacagaagaggaga

SEQ ID NO: 41594 - DNA, 20 bp, Artificial Sequence
  Description of Artificial Sequence: Synthetic oligonucleotide
  Target: SCNA; (-) strand; PAM type: YTN; PAM sequence: TTA
atatctcttacaaaacagaa

SEQ ID NO: 41595 - DNA, 20 bp, Artificial Sequence
  Description of Artificial Sequence: Synthetic oligonucleotide
  Target: SCNA; (-) strand; PAM type: YTN; PAM sequence: TTA
acaccaattaatatctctta

SEQ ID NO: 41596 - DNA, 20 bp, Artificial Sequence
  Description of Artificial Sequence: Synthetic oligonucleotide
  Target: SCNA; (-) strand; PAM type: YTN; PAM sequence: TTA
gttaacaccaattaatatct

SEQ ID NO: 41597 - DNA, 20 bp, Artificial Sequence
  Description of Artificial Sequence: Synthetic oligonucleotide
  Target: SCNA; (-) strand; PAM type: YTN; PAM sequence: CTA
attagttaacaccaattaat

SEQ ID NO: 41598 - DNA, 20 bp, Artificial Sequence
  Description of Artificial Sequence: Synthetic oligonucleotide
  Target: SCNA; (-) strand; PAM type: YTN; PAM sequence: TTA
atactaattagttaacacca

SEQ ID NO: 41599 - DNA, 20 bp, Artificial Sequence
  Description of Artificial Sequence: Synthetic oligonucleotide
  Target: SCNA; (-) strand; PAM type: YTN; PAM sequence: TTA
aagaggaattaatactaatt

SEQ ID NO: 41600 - DNA, 20 bp, Artificial Sequence
  Description of Artificial Sequence: Synthetic oligonucleotide
  Target: SCNA; (-) strand; PAM type: YTN; PAM sequence: TTT
aaagaggaattaatactaat

SEQ ID NO: 41601 - DNA, 20 bp, Artificial Sequence
  Description of Artificial Sequence: Synthetic oligonucleotide
  Target: SCNA; (-) strand; PAM type: YTN; PAM sequence: CTA
ccaaacatttaaagaggaat

SEQ ID NO: 41602 - DNA, 20 bp, Artificial Sequence
  Description of Artificial Sequence: Synthetic oligonucleotide
  Target: SCNA; (-) strand; PAM type: YTN; PAM sequence: TTC
taccaaacatttaaagagga

SEQ ID NO: 41603 - DNA, 20 bp, Artificial Sequence
  Description of Artificial Sequence: Synthetic oligonucleotide
  Target: SCNA; (-) strand; PAM type: YTN; PAM sequence: CTG
gtaaattctaccaaacattt

SEQ ID NO: 41604 - DNA, 20 bp, Artificial Sequence
  Description of Artificial Sequence: Synthetic oligonucleotide
  Target: SCNA; (-) strand; PAM type: YTN; PAM sequence: CTG
caaagaaaatcccaggccga

SEQ ID NO: 41605 - DNA, 20 bp, Artificial Sequence
  Description of Artificial Sequence: Synthetic oligonucleotide
  Target: SCNA; (-) strand; PAM type: YTN; PAM sequence: CTA
cctgcaaagaaaatcccagg

SEQ ID NO: 41606 - DNA, 20 bp, Artificial Sequence
  Description of Artificial Sequence: Synthetic oligonucleotide
  Target: SCNA; (-) strand; PAM type: YTN; PAM sequence: TTA
gtaataaaaaaaaaaaccta

SEQ ID NO: 41607 - DNA, 20 bp, Artificial Sequence
  Description of Artificial Sequence: Synthetic oligonucleotide
  Target: SCNA; (-) strand; PAM type: YTN; PAM sequence: TTA
aattagtaataaaaaaaaaa

SEQ ID NO: 41608 - DNA, 20 bp, Artificial Sequence
  Description of Artificial Sequence: Synthetic oligonucleotide
  Target: SCNA; (-) strand; PAM type: YTN; PAM sequence: TTG
taacacagcgaatagattaa

SEQ ID NO: 41609 - DNA, 20 bp, Artificial Sequence
  Description of Artificial Sequence: Synthetic oligonucleotide
  Target: SCNA; (-) strand; PAM type: YTN; PAM sequence: TTT
gtaacacagcgaatagatta

SEQ ID NO: 41610 - DNA, 20 bp, Artificial Sequence
  Description of Artificial Sequence: Synthetic oligonucleotide
  Target: SCNA; (-) strand; PAM type: YTN; PAM sequence: CTG
aatagatttgtaacacagcg

SEQ ID NO: 41611 - DNA, 20 bp, Artificial Sequence
  Description of Artificial Sequence: Synthetic oligonucleotide
  Target: SCNA; (-) strand; PAM type: YTN; PAM sequence: CTG
gcccaagaagaaacagtaaa

SEQ ID NO: 41612 - DNA, 20 bp, Artificial Sequence
  Description of Artificial Sequence: Synthetic oligonucleotide
  Target: SCNA; (-) strand; PAM type: YTN; PAM sequence: TTA
gatgaataaaactggcccaa

SEQ ID NO: 41613 - DNA, 20 bp, Artificial Sequence
  Description of Artificial Sequence: Synthetic oligonucleotide
  Target: SCNA; (-) strand; PAM type: YTN; PAM sequence: CTG
ttagatgaataaaactggcc

SEQ ID NO: 41614 - DNA, 20 bp, Artificial Sequence
  Description of Artificial Sequence: Synthetic oligonucleotide
  Target: SCNA; (-) strand; PAM type: YTN; PAM sequence: TTA
gaaaatactgttagatgaat

SEQ ID NO: 41615 - DNA, 20 bp, Artificial Sequence
  Description of Artificial Sequence: Synthetic oligonucleotide
  Target: SCNA; (-) strand; PAM type: YTN; PAM sequence: TTA
atagaaaatgtatcaaaagg

SEQ ID NO: 41616 - DNA, 20 bp, Artificial Sequence
  Description of Artificial Sequence: Synthetic oligonucleotide
  Target: SCNA; (-) strand; PAM type: YTN; PAM sequence: TTT
aatagaaaatgtatcaaaag

SEQ ID NO: 41617 - DNA, 20 bp, Artificial Sequence
  Description of Artificial Sequence: Synthetic oligonucleotide
  Target: SCNA; (-) strand; PAM type: YTN; PAM sequence: CTT
taatagaaaatgtatcaaaa

SEQ ID NO: 41618 - DNA, 20 bp, Artificial Sequence
  Description of Artificial Sequence: Synthetic oligonucleotide
  Target: SCNA; (-) strand; PAM type: YTN; PAM sequence: TTG
aaaatgaaagtatctttaat

SEQ ID NO: 41619 - DNA, 20 bp, Artificial Sequence
  Description of Artificial Sequence: Synthetic oligonucleotide
  Target: SCNA; (-) strand; PAM type: YTN; PAM sequence: TTG
attgaaaatgaaagtatctt

SEQ ID NO: 41620 - DNA, 20 bp, Artificial Sequence
  Description of Artificial Sequence: Synthetic oligonucleotide
  Target: SCNA; (-) strand; PAM type: YTN; PAM sequence: TTT
gattgaaaatgaaagtatct

SEQ ID NO: 41621 - DNA, 20 bp, Artificial Sequence
  Description of Artificial Sequence: Synthetic oligonucleotide
  Target: SCNA; (-) strand; PAM type: YTN; PAM sequence: TTT
tgattgaaaatgaaagtatc

SEQ ID NO: 41622 - DNA, 20 bp, Artificial Sequence
  Description of Artificial Sequence: Synthetic oligonucleotide
  Target: SCNA; (-) strand; PAM type: YTN; PAM sequence: TTA
ttttgattgaaaatgaaagt

SEQ ID NO: 41623 - DNA, 20 bp, Artificial Sequence
  Description of Artificial Sequence: Synthetic oligonucleotide
  Target: SCNA; (-) strand; PAM type: YTN; PAM sequence: TTT
attttgattgaaaatgaaag

SEQ ID NO: 41624 - DNA, 20 bp, Artificial Sequence
  Description of Artificial Sequence: Synthetic oligonucleotide
  Target: SCNA; (-) strand; PAM type: YTN; PAM sequence: TTT
tattttgattgaaaatgaaa

SEQ ID NO: 41625 - DNA, 20 bp, Artificial Sequence
  Description of Artificial Sequence: Synthetic oligonucleotide
  Target: SCNA; (-) strand; PAM type: YTN; PAM sequence: TTA
attttattttgattgaaaat

SEQ ID NO: 41626 - DNA, 20 bp, Artificial Sequence
  Description of Artificial Sequence: Synthetic oligonucleotide
  Target: SCNA; (-) strand; PAM type: YTN; PAM sequence: TTG
ttaattttattttgattgaa

SEQ ID NO: 41627 - DNA, 20 bp, Artificial Sequence
  Description of Artificial Sequence: Synthetic oligonucleotide
  Target: SCNA; (-) strand; PAM type: YTN; PAM sequence: TTA
aacaacacaatatgattgtt

SEQ ID NO: 41628 - DNA, 20 bp, Artificial Sequence
  Description of Artificial Sequence: Synthetic oligonucleotide
  Target: SCNA; (-) strand; PAM type: YTN; PAM sequence: TTT
aaacaacacaatatgattgt

SEQ ID NO: 41629 - DNA, 20 bp, Artificial Sequence
  Description of Artificial Sequence: Synthetic oligonucleotide
  Target: SCNA; (-) strand; PAM type: YTN; PAM sequence: TTT
taaacaacacaatatgattg

SEQ ID NO: 41630 - DNA, 20 bp, Artificial Sequence
  Description of Artificial Sequence: Synthetic oligonucleotide
  Target: SCNA; (-) strand; PAM type: YTN; PAM sequence: TTC
cagtataatgttttaaacaa

SEQ ID NO: 41631 - DNA, 20 bp, Artificial Sequence
  Description of Artificial Sequence: Synthetic oligonucleotide
  Target: SCNA; (-) strand; PAM type: YTN; PAM sequence: TTG
atatattccagtataatgtt

SEQ ID NO: 41632 - DNA, 20 bp, Artificial Sequence
  Description of Artificial Sequence: Synthetic oligonucleotide
  Target: SCNA; (-) strand; PAM type: YTN; PAM sequence: TTG
cgacaattgatatattccag

SEQ ID NO: 41633 - DNA, 20 bp, Artificial Sequence
  Description of Artificial Sequence: Synthetic oligonucleotide
  Target: SCNA; (-) strand; PAM type: YTN; PAM sequence: TTT
gcgacaattgatatattcca

SEQ ID NO: 41634 - DNA, 20 bp, Artificial Sequence
  Description of Artificial Sequence: Synthetic oligonucleotide
  Target: SCNA; (-) strand; PAM type: YTN; PAM sequence: TTA
tagaataaaaagataaatgc

SEQ ID NO: 41635 - DNA, 20 bp, Artificial Sequence
  Description of Artificial Sequence: Synthetic oligonucleotide
  Target: SCNA; (-) strand; PAM type: YTN; PAM sequence: TTA
cccacacaagttatagaata

SEQ ID NO: 41636 - DNA, 20 bp, Artificial Sequence
  Description of Artificial Sequence: Synthetic oligonucleotide
  Target: SCNA; (-) strand; PAM type: YTN; PAM sequence: TTG
ccatacatgtccaatgggat

SEQ ID NO: 41637 - DNA, 20 bp, Artificial Sequence
  Description of Artificial Sequence: Synthetic oligonucleotide
  Target: SCNA; (-) strand; PAM type: YTN; PAM sequence: TTT
gccatacatgtccaatggga

SEQ ID NO: 41638 - DNA, 20 bp, Artificial Sequence
  Description of Artificial Sequence: Synthetic oligonucleotide
  Target: SCNA; (-) strand; PAM type: YTN; PAM sequence: TTT
tgccatacatgtccaatggg

SEQ ID NO: 41639 - DNA, 20 bp, Artificial Sequence
  Description of Artificial Sequence: Synthetic oligonucleotide
  Target: SCNA; (-) strand; PAM type: YTN; PAM sequence: TTT
ttgccatacatgtccaatgg

SEQ ID NO: 41640 - DNA, 20 bp, Artificial Sequence
  Description of Artificial Sequence: Synthetic oligonucleotide
  Target: SCNA; (-) strand; PAM type: YTN; PAM sequence: TTT
tttgccatacatgtccaatg

SEQ ID NO: 41641 - DNA, 20 bp, Artificial Sequence
  Description of Artificial Sequence: Synthetic oligonucleotide
  Target: SCNA; (-) strand; PAM type: YTN; PAM sequence: TTA
ttttttgccatacatgtcca

SEQ ID NO: 41642 - DNA, 20 bp, Artificial Sequence
  Description of Artificial Sequence: Synthetic oligonucleotide
  Target: SCNA; (-) strand; PAM type: YTN; PAM sequence: TTA
ttattttttgccatacatgt

SEQ ID NO: 41643 - DNA, 20 bp, Artificial Sequence
  Description of Artificial Sequence: Synthetic oligonucleotide
  Target: SCNA; (-) strand; PAM type: YTN; PAM sequence: TTA
gggaaatcaatggaatgcca

SEQ ID NO: 41644 - DNA, 20 bp, Artificial Sequence
  Description of Artificial Sequence: Synthetic oligonucleotide
  Target: SCNA; (-) strand; PAM type: YTN; PAM sequence: CTA
aatggaaagttagggaaatc

SEQ ID NO: 41645 - DNA, 20 bp, Artificial Sequence
  Description of Artificial Sequence: Synthetic oligonucleotide
  Target: SCNA; (-) strand; PAM type: YTN; PAM sequence: TTC
taaatggaaagttagggaaa

SEQ ID NO: 41646 - DNA, 20 bp, Artificial Sequence
  Description of Artificial Sequence: Synthetic oligonucleotide
  Target: SCNA; (-) strand; PAM type: YTN; PAM sequence: TTT
ctaaatggaaagttagggaa

SEQ ID NO: 41647 - DNA, 20 bp, Artificial Sequence
  Description of Artificial Sequence: Synthetic oligonucleotide
  Target: SCNA; (-) strand; PAM type: YTN; PAM sequence: CTA
aaataaatttctaaatggaa

SEQ ID NO: 41648 - DNA, 20 bp, Artificial Sequence
  Description of Artificial Sequence: Synthetic oligonucleotide
  Target: SCNA; (-) strand; PAM type: YTN; PAM sequence: TTC
taaaataaatttctaaatgg

SEQ ID NO: 41649 - DNA, 20 bp, Artificial Sequence
  Description of Artificial Sequence: Synthetic oligonucleotide
  Target: SCNA; (-) strand; PAM type: YTN; PAM sequence: TTA
cattctaaaataaatttcta

SEQ ID NO: 41650 - DNA, 20 bp, Artificial Sequence
  Description of Artificial Sequence: Synthetic oligonucleotide
  Target: SCNA; (-) strand; PAM type: YTN; PAM sequence: TTT
acattctaaaataaatttct

SEQ ID NO: 41651 - DNA, 20 bp, Artificial Sequence
  Description of Artificial Sequence: Synthetic oligonucleotide
  Target: SCNA; (-) strand; PAM type: YTN; PAM sequence: CTT
tacattctaaaataaatttc

SEQ ID NO: 41652 - DNA, 20 bp, Artificial Sequence
  Description of Artificial Sequence: Synthetic oligonucleotide
  Target: SCNA; (-) strand; PAM type: YTN; PAM sequence: TTA
gaaactttacattctaaaat

SEQ ID NO: 41653 - DNA, 20 bp, Artificial Sequence
  Description of Artificial Sequence: Synthetic oligonucleotide
  Target: SCNA; (-) strand; PAM type: YTN; PAM sequence: TTT
agaaactttacattctaaaa

SEQ ID NO: 41654 - DNA, 20 bp, Artificial Sequence
  Description of Artificial Sequence: Synthetic oligonucleotide
  Target: SCNA; (-) strand; PAM type: YTN; PAM sequence: TTT
tagaaactttacattctaaa

SEQ ID NO: 41655 - DNA, 20 bp, Artificial Sequence
  Description of Artificial Sequence: Synthetic oligonucleotide
  Target: SCNA; (-) strand; PAM type: YTN; PAM sequence: TTT
ttagaaactttacattctaa

SEQ ID NO: 41656 - DNA, 20 bp, Artificial Sequence
  Description of Artificial Sequence: Synthetic oligonucleotide
  Target: SCNA; (-) strand; PAM type: YTN; PAM sequence: TTA
gagaatatatttttagaaac

SEQ ID NO: 41657 - DNA, 20 bp, Artificial Sequence
  Description of Artificial Sequence: Synthetic oligonucleotide
  Target: SCNA; (-) strand; PAM type: YTN; PAM sequence: CTG
cattagagaatatattttta

SEQ ID NO: 41658 - DNA, 20 bp, Artificial Sequence
  Description of Artificial Sequence: Synthetic oligonucleotide
  Target: SCNA; (-) strand; PAM type: YTN; PAM sequence: CTA
acccctgcattagagaatat

SEQ ID NO: 41659 - DNA, 20 bp, Artificial Sequence
  Description of Artificial Sequence: Synthetic oligonucleotide
  Target: SCNA; (-) strand; PAM type: YTN; PAM sequence: TTA
ctaacccctgcattagagaa

SEQ ID NO: 41660 - DNA, 20 bp, Artificial Sequence
  Description of Artificial Sequence: Synthetic oligonucleotide
  Target: SCNA; (-) strand; PAM type: YTN; PAM sequence: TTT
actaacccctgcattagaga

SEQ ID NO: 41661 - DNA, 20 bp, Artificial Sequence
  Description of Artificial Sequence: Synthetic oligonucleotide
  Target: SCNA; (-) strand; PAM type: YTN; PAM sequence: TTA
caggaaaagtttactaaccc

SEQ ID NO: 41662 - DNA, 20 bp, Artificial Sequence
  Description of Artificial Sequence: Synthetic oligonucleotide
  Target: SCNA; (-) strand; PAM type: YTN; PAM sequence: TTT
acaggaaaagtttactaacc

SEQ ID NO: 41663 - DNA, 20 bp, Artificial Sequence
  Description of Artificial Sequence: Synthetic oligonucleotide
  Target: SCNA; (-) strand; PAM type: YTN; PAM sequence: CTT
tacaggaaaagtttactaac

SEQ ID NO: 41664 - DNA, 20 bp, Artificial Sequence
  Description of Artificial Sequence: Synthetic oligonucleotide
  Target: SCNA; (-) strand; PAM type: YTN; PAM sequence: TTG
accctttacaggaaaagttt

SEQ ID NO: 41665 - DNA, 20 bp, Artificial Sequence
  Description of Artificial Sequence: Synthetic oligonucleotide
  Target: SCNA; (-) strand; PAM type: YTN; PAM sequence: CTT
gaccctttacaggaaaagtt

SEQ ID NO: 41666 - DNA, 20 bp, Artificial Sequence
  Description of Artificial Sequence: Synthetic oligonucleotide
  Target: SCNA; (-) strand; PAM type: YTN; PAM sequence: CTA
cttgaccctttacaggaaaa

SEQ ID NO: 41667 - DNA, 20 bp, Artificial Sequence
  Description of Artificial Sequence: Synthetic oligonucleotide
  Target: SCNA; (-) strand; PAM type: YTN; PAM sequence: TTA
ctacttgaccctttacagga

SEQ ID NO: 41668 - DNA, 20 bp, Artificial Sequence
  Description of Artificial Sequence: Synthetic oligonucleotide
  Target: SCNA; (-) strand; PAM type: YTN; PAM sequence: CTT
actacttgaccctttacagg

SEQ ID NO: 41669 - DNA, 20 bp, Artificial Sequence
  Description of Artificial Sequence: Synthetic oligonucleotide
  Target: SCNA; (-) strand; PAM type: YTN; PAM sequence: TTA
atatacttactacttgaccc

SEQ ID NO: 41670 - DNA, 20 bp, Artificial Sequence
  Description of Artificial Sequence: Synthetic oligonucleotide
  Target: SCNA; (-) strand; PAM type: YTN; PAM sequence: CTT
aatatacttactacttgacc

SEQ ID NO: 41671 - DNA, 20 bp, Artificial Sequence
  Description of Artificial Sequence: Synthetic oligonucleotide
  Target: SCNA; (-) strand; PAM type: YTN; PAM sequence: TTA
aaaaaaaagaggaggaggaa

SEQ ID NO: 41672 - DNA, 20 bp, Artificial Sequence
  Description of Artificial Sequence: Synthetic oligonucleotide
  Target: SCNA; (-) strand; PAM type: YTN; PAM sequence: CTT
aaaaaaaaagaggaggagga

SEQ ID NO: 41673 - DNA, 20 bp, Artificial Sequence
  Description of Artificial Sequence: Synthetic oligonucleotide
  Target: SCNA; (-) strand; PAM type: YTN; PAM sequence: TTA
aagggtccttaaaaaaaaag

SEQ ID NO: 41674 - DNA, 20 bp, Artificial Sequence
  Description of Artificial Sequence: Synthetic oligonucleotide
  Target: SCNA; (-) strand; PAM type: YTN; PAM sequence: TTT
aaagggtccttaaaaaaaaa

SEQ ID NO: 41675 - DNA, 20 bp, Artificial Sequence
  Description of Artificial Sequence: Synthetic oligonucleotide
  Target: SCNA; (-) strand; PAM type: YTN; PAM sequence: TTT
taaagggtccttaaaaaaaa

SEQ ID NO: 41676 - DNA, 20 bp, Artificial Sequence
  Description of Artificial Sequence: Synthetic oligonucleotide
  Target: SCNA; (-) strand; PAM type: YTN; PAM sequence: TTT
ttaaagggtccttaaaaaaa

SEQ ID NO: 41677 - DNA, 20 bp, Artificial Sequence
  Description of Artificial Sequence: Synthetic oligonucleotide
  Target: SCNA; (-) strand; PAM type: YTN; PAM sequence: TTA
catttttaaagggtccttaa

SEQ ID NO: 41678 - DNA, 20 bp, Artificial Sequence
  Description of Artificial Sequence: Synthetic oligonucleotide
  Target: SCNA; (-) strand; PAM type: YTN; PAM sequence: TTT
acatttttaaagggtcctta

SEQ ID NO: 41679 - DNA, 20 bp, Artificial Sequence
  Description of Artificial Sequence: Synthetic oligonucleotide
  Target: SCNA; (-) strand; PAM type: YTN; PAM sequence: TTT
tacatttttaaagggtcctt

SEQ ID NO: 41680 - DNA, 20 bp, Artificial Sequence
  Description of Artificial Sequence: Synthetic oligonucleotide
  Target: SCNA; (-) strand; PAM type: YTN; PAM sequence: TTT
ttacatttttaaagggtcct

SEQ ID NO: 41681 - DNA, 20 bp, Artificial Sequence
  Description of Artificial Sequence: Synthetic oligonucleotide
  Target: SCNA; (-) strand; PAM type: YTN; PAM sequence: TTA
agaatagtttttacattttt

SEQ ID NO: 41682 - DNA, 20 bp, Artificial Sequence
  Description of Artificial Sequence: Synthetic oligonucleotide
  Target: SCNA; (-) strand; PAM type: YTN; PAM sequence: TTG
caagttaagaatagttttta

SEQ ID NO: 41683 - DNA, 20 bp, Artificial Sequence
  Description of Artificial Sequence: Synthetic oligonucleotide
  Target: SCNA; (-) strand; PAM type: YTN; PAM sequence: CTT
gcaagttaagaatagttttt

SEQ ID NO: 41684 - DNA, 20 bp, Artificial Sequence
  Description of Artificial Sequence: Synthetic oligonucleotide
  Target: SCNA; (-) strand; PAM type: YTN; PAM sequence: TTA
cgtggacaacttgcaagtta

SEQ ID NO: 41685 - DNA, 20 bp, Artificial Sequence
  Description of Artificial Sequence: Synthetic oligonucleotide
  Target: SCNA; (-) strand; PAM type: YTN; PAM sequence: CTC
attacgtggacaacttgcaa

SEQ ID NO: 41686 - DNA, 20 bp, Artificial Sequence
  Description of Artificial Sequence: Synthetic oligonucleotide
  Target: SCNA; (-) strand; PAM type: YTN; PAM sequence: CTA
catgctcattacgtggacaa

SEQ ID NO: 41687 - DNA, 20 bp, Artificial Sequence
  Description of Artificial Sequence: Synthetic oligonucleotide
  Target: SCNA; (-) strand; PAM type: YTN; PAM sequence: CTC
tacatgctcattacgtggac

SEQ ID NO: 41688 - DNA, 20 bp, Artificial Sequence
  Description of Artificial Sequence: Synthetic oligonucleotide
  Target: SCNA; (-) strand; PAM type: YTN; PAM sequence: CTC
tctacatgctcattacgtgg

SEQ ID NO: 41689 - DNA, 20 bp, Artificial Sequence
  Description of Artificial Sequence: Synthetic oligonucleotide
  Target: SCNA; (-) strand; PAM type: YTN; PAM sequence: TTG
ctctctacatgctcattacg

SEQ ID NO: 41690 - DNA, 20 bp, Artificial Sequence
  Description of Artificial Sequence: Synthetic oligonucleotide
  Target: SCNA; (-) strand; PAM type: YTN; PAM sequence: TTT
gctctctacatgctcattac

SEQ ID NO: 41691 - DNA, 20 bp, Artificial Sequence
  Description of Artificial Sequence: Synthetic oligonucleotide
  Target: SCNA; (-) strand; PAM type: YTN; PAM sequence: TTA
gtgagaatcatttgctctct

SEQ ID NO: 41692 - DNA, 20 bp, Artificial Sequence
  Description of Artificial Sequence: Synthetic oligonucleotide
  Target: SCNA; (-) strand; PAM type: YTN; PAM sequence: CTT
agtgagaatcatttgctctc

SEQ ID NO: 41693 - DNA, 20 bp, Artificial Sequence
  Description of Artificial Sequence: Synthetic oligonucleotide
  Target: SCNA; (-) strand; PAM type: YTN; PAM sequence: TTA
gtgcttagtgagaatcattt

SEQ ID NO: 41694 - DNA, 20 bp, Artificial Sequence
  Description of Artificial Sequence: Synthetic oligonucleotide
  Target: SCNA; (-) strand; PAM type: YTN; PAM sequence: TTC
attagtgcttagtgagaatc

SEQ ID NO: 41695 - DNA, 20 bp, Artificial Sequence
  Description of Artificial Sequence: Synthetic oligonucleotide
  Target: SCNA; (-) strand; PAM type: YTN; PAM sequence: TTT
cattagtgcttagtgagaat

SEQ ID NO: 41696 - DNA, 20 bp, Artificial Sequence
  Description of Artificial Sequence: Synthetic oligonucleotide
  Target: SCNA; (-) strand; PAM type: YTN; PAM sequence: CTT
tcattagtgcttagtgagaa

SEQ ID NO: 41697 - DNA, 20 bp, Artificial Sequence
  Description of Artificial Sequence: Synthetic oligonucleotide
  Target: SCNA; (-) strand; PAM type: YTN; PAM sequence: CTC
tttcattagtgcttagtgag

SEQ ID NO: 41698 - DNA, 20 bp, Artificial Sequence
  Description of Artificial Sequence: Synthetic oligonucleotide
  Target: SCNA; (-) strand; PAM type: YTN; PAM sequence: TTC
tctttcattagtgcttagtg

SEQ ID NO: 41699 - DNA, 20 bp, Artificial Sequence
  Description of Artificial Sequence: Synthetic oligonucleotide
  Target: SCNA; (-) strand; PAM type: YTN; PAM sequence: TTT
ctctttcattagtgcttagt

SEQ ID NO: 41700 - DNA, 20 bp, Artificial Sequence
  Description of Artificial Sequence: Synthetic oligonucleotide
  Target: SCNA; (-) strand; PAM type: YTN; PAM sequence: TTG
tcacatttctctttcattag

SEQ ID NO: 41701 - DNA, 20 bp, Artificial Sequence
  Description of Artificial Sequence: Synthetic oligonucleotide
  Target: SCNA; (-) strand; PAM type: YTN; PAM sequence: CTG
tcattgtcacatttctcttt

SEQ ID NO: 41702 - DNA, 20 bp, Artificial Sequence
  Description of Artificial Sequence: Synthetic oligonucleotide
  Target: SCNA; (-) strand; PAM type: YTN; PAM sequence: CTA
acaagacagtaccaaaaacc

SEQ ID NO: 41703 - DNA, 20 bp, Artificial Sequence
  Description of Artificial Sequence: Synthetic oligonucleotide
  Target: SCNA; (-) strand; PAM type: YTN; PAM sequence: TTC
taacaagacagtaccaaaaa

SEQ ID NO: 41704 - DNA, 20 bp, Artificial Sequence
  Description of Artificial Sequence: Synthetic oligonucleotide
  Target: SCNA; (-) strand; PAM type: YTN; PAM sequence: TTT
ctaacaagacagtaccaaaa

SEQ ID NO: 41705 - DNA, 20 bp, Artificial Sequence
  Description of Artificial Sequence: Synthetic oligonucleotide
  Target: SCNA; (-) strand; PAM type: YTN; PAM sequence: CTT
tctaacaagacagtaccaaa

SEQ ID NO: 41706 - DNA, 20 bp, Artificial Sequence
  Description of Artificial Sequence: Synthetic oligonucleotide
  Target: SCNA; (-) strand; PAM type: YTN; PAM sequence: CTG
aatctttctaacaagacagt

SEQ ID NO: 41707 - DNA, 20 bp, Artificial Sequence
  Description of Artificial Sequence: Synthetic oligonucleotide
  Target: SCNA; (-) strand; PAM type: YTN; PAM sequence: CTG
aggtaggagtccaagctgaa

SEQ ID NO: 41708 - DNA, 20 bp, Artificial Sequence
  Description of Artificial Sequence: Synthetic oligonucleotide
  Target: SCNA; (-) strand; PAM type: YTN; PAM sequence: TTC
tgaggtaggagtccaagctg

SEQ ID NO: 41709 - DNA, 20 bp, Artificial Sequence
  Description of Artificial Sequence: Synthetic oligonucleotide
  Target: SCNA; (-) strand; PAM type: YTN; PAM sequence: CTT
ctgaggtaggagtccaagct

SEQ ID NO: 41710 - DNA, 20 bp, Artificial Sequence
  Description of Artificial Sequence: Synthetic oligonucleotide
  Target: SCNA; (-) strand; PAM type: YTN; PAM sequence: TTA
tgaaatgccttctgaggtag

SEQ ID NO: 41711 - DNA, 20 bp, Artificial Sequence
  Description of Artificial Sequence: Synthetic oligonucleotide
  Target: SCNA; (-) strand; PAM type: YTN; PAM sequence: CTT
atgaaatgccttctgaggta

SEQ ID NO: 41712 - DNA, 20 bp, Artificial Sequence
  Description of Artificial Sequence: Synthetic oligonucleotide
  Target: SCNA; (-) strand; PAM type: YTN; PAM sequence: CTG
acaatgaggcttatgaaatg

SEQ ID NO: 41713 - DNA, 20 bp, Artificial Sequence
  Description of Artificial Sequence: Synthetic oligonucleotide
  Target: SCNA; (-) strand; PAM type: YTN; PAM sequence: CTG
tggatcctgacaatgaggct

SEQ ID NO: 41714 - DNA, 20 bp, Artificial Sequence
  Description of Artificial Sequence: Synthetic oligonucleotide
  Target: SCNA; (-) strand; PAM type: YTN; PAM sequence: CTG
gaagatatgcctgtggatcc

SEQ ID NO: 41715 - DNA, 20 bp, Artificial Sequence
  Description of Artificial Sequence: Synthetic oligonucleotide
  Target: SCNA; (-) strand; PAM type: YTN; PAM sequence: TTC
tggaagatatgcctgtggat

SEQ ID NO: 41716 - DNA, 20 bp, Artificial Sequence
  Description of Artificial Sequence: Synthetic oligonucleotide
  Target: SCNA; (-) strand; PAM type: YTN; PAM sequence: TTA
gaatgaagaaggagccccac

SEQ ID NO: 41717 - DNA, 20 bp, Artificial Sequence
  Description of Artificial Sequence: Synthetic oligonucleotide
  Target: SCNA; (-) strand; PAM type: YTN; PAM sequence: TTA
aatattagaatgaagaagga

SEQ ID NO: 41718 - DNA, 20 bp, Artificial Sequence
  Description of Artificial Sequence: Synthetic oligonucleotide
  Target: SCNA; (-) strand; PAM type: YTN; PAM sequence: TTT
aaatattagaatgaagaagg

SEQ ID NO: 41719 - DNA, 20 bp, Artificial Sequence
  Description of Artificial Sequence: Synthetic oligonucleotide
  Target: SCNA; (-) strand; PAM type: YTN; PAM sequence: CTT
taaatattagaatgaagaag

SEQ ID NO: 41720 - DNA, 20 bp, Artificial Sequence
  Description of Artificial Sequence: Synthetic oligonucleotide
  Target: SCNA; (-) strand; PAM type: YTN; PAM sequence: TTA
ctttaaatattagaatgaag

SEQ ID NO: 41721 - DNA, 20 bp, Artificial Sequence
  Description of Artificial Sequence: Synthetic oligonucleotide
  Target: SCNA; (-) strand; PAM type: YTN; PAM sequence: CTT
actttaaatattagaatgaa

SEQ ID NO: 41722 - DNA, 20 bp, Artificial Sequence
  Description of Artificial Sequence: Synthetic oligonucleotide
  Target: SCNA; (-) strand; PAM type: YTN; PAM sequence: TTC
ttactttaaatattagaatg

SEQ ID NO: 41723 - DNA, 20 bp, Artificial Sequence
  Description of Artificial Sequence: Synthetic oligonucleotide
  Target: SCNA; (-) strand; PAM type: YTN; PAM sequence: CTT
cttactttaaatattagaat

SEQ ID NO: 41724 - DNA, 20 bp, Artificial Sequence
  Description of Artificial Sequence: Synthetic oligonucleotide
  Target: SCNA; (-) strand; PAM type: YTN; PAM sequence: TTG
tgcttcttactttaaatatt

SEQ ID NO: 41725 - DNA, 20 bp, Artificial Sequence
  Description of Artificial Sequence: Synthetic oligonucleotide
  Target: SCNA; (-) strand; PAM type: YTN; PAM sequence: TTT
gtgcttcttactttaaatat

SEQ ID NO: 41726 - DNA, 20 bp, Artificial Sequence
  Description of Artificial Sequence: Synthetic oligonucleotide
  Target: SCNA; (-) strand; PAM type: YTN; PAM sequence: TTT
tgtgcttcttactttaaata

SEQ ID NO: 41727 - DNA, 20 bp, Artificial Sequence
  Description of Artificial Sequence: Synthetic oligonucleotide
  Target: SCNA; (-) strand; PAM type: YTN; PAM sequence: TTT
ttgtgcttcttactttaaat

SEQ ID NO: 41728 - DNA, 20 bp, Artificial Sequence
  Description of Artificial Sequence: Synthetic oligonucleotide
  Target: SCNA; (-) strand; PAM type: YTN; PAM sequence: CTT
tttgtgcttcttactttaaa

SEQ ID NO: 41729 - DNA, 20 bp, Artificial Sequence
  Description of Artificial Sequence: Synthetic oligonucleotide
  Target: SCNA; (-) strand; PAM type: YTN; PAM sequence: TTC
tttttgtgcttcttacttta

SEQ ID NO: 41730 - DNA, 20 bp, Artificial Sequence
  Description of Artificial Sequence: Synthetic oligonucleotide
  Target: SCNA; (-) strand; PAM type: YTN; PAM sequence: TTC
atcatgttctttttgtgctt

SEQ ID NO: 41731 - DNA, 20 bp, Artificial Sequence
  Description of Artificial Sequence: Synthetic oligonucleotide
  Target: SCNA; (-) strand; PAM type: YTN; PAM sequence: CTT
catcatgttctttttgtgct

SEQ ID NO: 41732 - DNA, 20 bp, Artificial Sequence
  Description of Artificial Sequence: Synthetic oligonucleotide
  Target: SCNA; (-) strand; PAM type: YTN; PAM sequence: CTA
cttcatcatgttctttttgt

SEQ ID NO: 41733 - DNA, 20 bp, Artificial Sequence
  Description of Artificial Sequence: Synthetic oligonucleotide
  Target: SCNA; (-) strand; PAM type: YTN; PAM sequence: TTA
aaagtgaaaaatgctacttc

SEQ ID NO: 41734 - DNA, 20 bp, Artificial Sequence
  Description of Artificial Sequence: Synthetic oligonucleotide
  Target: SCNA; (-) strand; PAM type: YTN; PAM sequence: TTT
aaaagtgaaaaatgctactt

SEQ ID NO: 41735 - DNA, 20 bp, Artificial Sequence
  Description of Artificial Sequence: Synthetic oligonucleotide
  Target: SCNA; (-) strand; PAM type: YTN; PAM sequence: TTT
taaaagtgaaaaatgctact

SEQ ID NO: 41736 - DNA, 20 bp, Artificial Sequence
  Description of Artificial Sequence: Synthetic oligonucleotide
  Target: SCNA; (-) strand; PAM type: YTN; PAM sequence: TTT
ttaaaagtgaaaaatgctac

SEQ ID NO: 41737 - DNA, 20 bp, Artificial Sequence
  Description of Artificial Sequence: Synthetic oligonucleotide
  Target: SCNA; (-) strand; PAM type: YTN; PAM sequence: CTG
atttttaaaagtgaaaaatg

SEQ ID NO: 41738 - DNA, 20 bp, Artificial Sequence
  Description of Artificial Sequence: Synthetic oligonucleotide
  Target: SCNA; (-) strand; PAM type: YTN; PAM sequence: TTC
tgatttttaaaagtgaaaaa

SEQ ID NO: 41739 - DNA, 20 bp, Artificial Sequence
  Description of Artificial Sequence: Synthetic oligonucleotide
  Target: SCNA; (-) strand; PAM type: YTN; PAM sequence: TTC
caaaacatggttctgatttt

SEQ ID NO: 41740 - DNA, 20 bp, Artificial Sequence
  Description of Artificial Sequence: Synthetic oligonucleotide
  Target: SCNA; (-) strand; PAM type: YTN; PAM sequence: TTT
ccaaaacatggttctgattt

SEQ ID NO: 41741 - DNA, 20 bp, Artificial Sequence
  Description of Artificial Sequence: Synthetic oligonucleotide
  Target: SCNA; (-) strand; PAM type: YTN; PAM sequence: TTT
tccaaaacatggttctgatt

SEQ ID NO: 41742 - DNA, 20 bp, Artificial Sequence
  Description of Artificial Sequence: Synthetic oligonucleotide
  Target: SCNA; (-) strand; PAM type: YTN; PAM sequence: TTT
ttccaaaacatggttctgat

SEQ ID NO: 41743 - DNA, 20 bp, Artificial Sequence
  Description of Artificial Sequence: Synthetic oligonucleotide
  Target: SCNA; (-) strand; PAM type: YTN; PAM sequence: CTA
tatgtaagatttttccaaaa

SEQ ID NO: 41744 - DNA, 20 bp, Artificial Sequence
  Description of Artificial Sequence: Synthetic oligonucleotide
  Target: SCNA; (-) strand; PAM type: YTN; PAM sequence: TTC
aagatccgtggccaacatcc

SEQ ID NO: 41745 - DNA, 20 bp, Artificial Sequence
  Description of Artificial Sequence: Synthetic oligonucleotide
  Target: SCNA; (-) strand; PAM type: YTN; PAM sequence: TTT
caagatccgtggccaacatc

SEQ ID NO: 41746 - DNA, 20 bp, Artificial Sequence
  Description of Artificial Sequence: Synthetic oligonucleotide
  Target: SCNA; (-) strand; PAM type: YTN; PAM sequence: TTT
tcaagatccgtggccaacat

SEQ ID NO: 41747 - DNA, 20 bp, Artificial Sequence
  Description of Artificial Sequence: Synthetic oligonucleotide
  Target: SCNA; (-) strand; PAM type: YTN; PAM sequence: TTA
aggtgtgccattttcaagat

SEQ ID NO: 41748 - DNA, 20 bp, Artificial Sequence
  Description of Artificial Sequence: Synthetic oligonucleotide
  Target: SCNA; (-) strand; PAM type: YTN; PAM sequence: TTA
gaatgccagtagtaatatta

SEQ ID NO: 41749 - DNA, 20 bp, Artificial Sequence
  Description of Artificial Sequence: Synthetic oligonucleotide
  Target: SCNA; (-) strand; PAM type: YTN; PAM sequence: TTT
agaatgccagtagtaatatt

SEQ ID NO: 41750 - DNA, 20 bp, Artificial Sequence
  Description of Artificial Sequence: Synthetic oligonucleotide
  Target: SCNA; (-) strand; PAM type: YTN; PAM sequence: TTG
tggagtttagaatgccagta

SEQ ID NO: 41751 - DNA, 20 bp, Artificial Sequence
  Description of Artificial Sequence: Synthetic oligonucleotide
  Target: SCNA; (-) strand; PAM type: YTN; PAM sequence: TTC
cccggaggcattgtggagtt

SEQ ID NO: 41752 - DNA, 20 bp, Artificial Sequence
  Description of Artificial Sequence: Synthetic oligonucleotide
  Target: SCNA; (-) strand; PAM type: YTN; PAM sequence: TTT
ccccggaggcattgtggagt

SEQ ID NO: 41753 - DNA, 20 bp, Artificial Sequence
  Description of Artificial Sequence: Synthetic oligonucleotide
  Target: SCNA; (-) strand; PAM type: YTN; PAM sequence: TTG
ccgcaatgtttccccggagg

SEQ ID NO: 41754 - DNA, 20 bp, Artificial Sequence
  Description of Artificial Sequence: Synthetic oligonucleotide
  Target: SCNA; (-) strand; PAM type: YTN; PAM sequence: TTG
ataacccatgttgccgcaat

SEQ ID NO: 41755 - DNA, 20 bp, Artificial Sequence
  Description of Artificial Sequence: Synthetic oligonucleotide
  Target: SCNA; (-) strand; PAM type: YTN; PAM sequence: TTG
agggttgataacccatgttg

SEQ ID NO: 41756 - DNA, 20 bp, Artificial Sequence
  Description of Artificial Sequence: Synthetic oligonucleotide
  Target: SCNA; (-) strand; PAM type: YTN; PAM sequence: TTT
gagggttgataacccatgtt

SEQ ID NO: 41757 - DNA, 20 bp, Artificial Sequence
  Description of Artificial Sequence: Synthetic oligonucleotide
  Target: SCNA; (-) strand; PAM type: YTN; PAM sequence: CTT
tgagggttgataacccatgt

SEQ ID NO: 41758 - DNA, 20 bp, Artificial Sequence
  Description of Artificial Sequence: Synthetic oligonucleotide
  Target: SCNA; (-) strand; PAM type: YTN; PAM sequence: TTA
catactttgagggttgataa

SEQ ID NO: 41759 - DNA, 20 bp, Artificial Sequence
  Description of Artificial Sequence: Synthetic oligonucleotide
  Target: SCNA; (-) strand; PAM type: YTN; PAM sequence: TTT
acatactttgagggttgata

SEQ ID NO: 41760 - DNA, 20 bp, Artificial Sequence
  Description of Artificial Sequence: Synthetic oligonucleotide
  Target: SCNA; (-) strand; PAM type: YTN; PAM sequence: TTG
agcaaaaagtttacatactt

SEQ ID NO: 41761 - DNA, 20 bp, Artificial Sequence
  Description of Artificial Sequence: Synthetic oligonucleotide
  Target: SCNA; (-) strand; PAM type: YTN; PAM sequence: CTT
gagcaaaaagtttacatact

SEQ ID NO: 41762 - DNA, 20 bp, Artificial Sequence
  Description of Artificial Sequence: Synthetic oligonucleotide
  Target: SCNA; (-) strand; PAM type: YTN; PAM sequence: TTA
cttgagcaaaaagtttacat

SEQ ID NO: 41763 - DNA, 20 bp, Artificial Sequence
  Description of Artificial Sequence: Synthetic oligonucleotide
  Target: SCNA; (-) strand; PAM type: YTN; PAM sequence: CTA
aatagtaaattacttgagca

SEQ ID NO: 41764 - DNA, 20 bp, Artificial Sequence
  Description of Artificial Sequence: Synthetic oligonucleotide
  Target: SCNA; (-) strand; PAM type: YTN; PAM sequence: TTC
ctaaatagtaaattacttga

SEQ ID NO: 41765 - DNA, 20 bp, Artificial Sequence
  Description of Artificial Sequence: Synthetic oligonucleotide
  Target: SCNA; (-) strand; PAM type: YTN; PAM sequence: TTT
cctaaatagtaaattacttg

SEQ ID NO: 41766 - DNA, 20 bp, Artificial Sequence
  Description of Artificial Sequence: Synthetic oligonucleotide
  Target: SCNA; (-) strand; PAM type: YTN; PAM sequence: TTA
tttcctaaatagtaaattac

SEQ ID NO: 41767 - DNA, 20 bp, Artificial Sequence
  Description of Artificial Sequence: Synthetic oligonucleotide
  Target: SCNA; (-) strand; PAM type: YTN; PAM sequence: CTG
tggattatttcctaaatagt

SEQ ID NO: 41768 - DNA, 20 bp, Artificial Sequence
  Description of Artificial Sequence: Synthetic oligonucleotide
  Target: SCNA; (-) strand; PAM type: YTN; PAM sequence: CTA
tagctgtggattatttccta

SEQ ID NO: 41769 - DNA, 20 bp, Artificial Sequence
  Description of Artificial Sequence: Synthetic oligonucleotide
  Target: SCNA; (-) strand; PAM type: YTN; PAM sequence: TTG
gactatagctgtggattatt

SEQ ID NO: 41770 - DNA, 20 bp, Artificial Sequence
  Description of Artificial Sequence: Synthetic oligonucleotide
  Target: SCNA; (-) strand; PAM type: YTN; PAM sequence: TTT
ggactatagctgtggattat

SEQ ID NO: 41771 - DNA, 20 bp, Artificial Sequence
  Description of Artificial Sequence: Synthetic oligonucleotide
  Target: SCNA; (-) strand; PAM type: YTN; PAM sequence: CTT
tggactatagctgtggatta

SEQ ID NO: 41772 - DNA, 20 bp, Artificial Sequence
  Description of Artificial Sequence: Synthetic oligonucleotide
  Target: SCNA; (-) strand; PAM type: YTN; PAM sequence: TTG
tgaaaaatatctttggacta

SEQ ID NO: 41773 - DNA, 20 bp, Artificial Sequence
  Description of Artificial Sequence: Synthetic oligonucleotide
  Target: SCNA; (-) strand; PAM type: YTN; PAM sequence: CTT
gtgaaaaatatctttggact

SEQ ID NO: 41774 - DNA, 20 bp, Artificial Sequence
  Description of Artificial Sequence: Synthetic oligonucleotide
  Target: SCNA; (-) strand; PAM type: YTN; PAM sequence: TTG
atcttgtgaaaaatatcttt

SEQ ID NO: 41775 - DNA, 20 bp, Artificial Sequence
  Description of Artificial Sequence: Synthetic oligonucleotide
  Target: SCNA; (-) strand; PAM type: YTN; PAM sequence: CTG
tcattgatcttgtgaaaaat

SEQ ID NO: 41776 - DNA, 20 bp, Artificial Sequence
  Description of Artificial Sequence: Synthetic oligonucleotide
  Target: SCNA; (-) strand; PAM type: YTN; PAM sequence: CTG
ctgtcattgatcttgtgaaa

SEQ ID NO: 41777 - DNA, 20 bp, Artificial Sequence
  Description of Artificial Sequence: Synthetic oligonucleotide
  Target: SCNA; (-) strand; PAM type: YTN; PAM sequence: TTC
ctgctgtcattgatcttgtg

SEQ ID NO: 41778 - DNA, 20 bp, Artificial Sequence
  Description of Artificial Sequence: Synthetic oligonucleotide
  Target: SCNA; (-) strand; PAM type: YTN; PAM sequence: TTT
cctgctgtcattgatcttgt

SEQ ID NO: 41779 - DNA, 20 bp, Artificial Sequence
  Description of Artificial Sequence: Synthetic oligonucleotide
  Target: SCNA; (-) strand; PAM type: YTN; PAM sequence: TTG
tttcctgctgtcattgatct

SEQ ID NO: 41780 - DNA, 20 bp, Artificial Sequence
  Description of Artificial Sequence: Synthetic oligonucleotide
  Target: SCNA; (-) strand; PAM type: YTN; PAM sequence: TTT
gtttcctgctgtcattgatc

SEQ ID NO: 41781 - DNA, 20 bp, Artificial Sequence
  Description of Artificial Sequence: Synthetic oligonucleotide
  Target: SCNA; (-) strand; PAM type: YTN; PAM sequence: TTT
tgtttcctgctgtcattgat

SEQ ID NO: 41782 - DNA, 20 bp, Artificial Sequence
  Description of Artificial Sequence: Synthetic oligonucleotide
  Target: SCNA; (-) strand; PAM type: YTN; PAM sequence: CTA
aaaattttgtttcctgctgt
